United States Patent Application Publication US 2022/0090207 A1 - sequence listing, part 12

SEQ ID NO: 161261 - DNA, 30 bp, Homo sapiens
  chr8:143957227-143957257
  hypo
gcagggcctgctgcacgttggggttccgag

SEQ ID NO: 161262 - DNA, 36 bp, Homo sapiens
  chr8:143983232-143983268
  hypo
ttctgcaagagatgtcgttatcgtcccaaaacagac

SEQ ID NO: 161263 - DNA, 119 bp, Homo sapiens
  chr8:143993974-143994093
  hypo
ctgccaggcgccgcccgaggcactggcgcatgccaaagccaaagggcacgtggtggaagttcctgccggagcccctgatgtctagccagcgctggggattataccgctcaggcctcggg

SEQ ID NO: 161264 - DNA, 38 bp, Homo sapiens
  chr8:143994803-143994841
  hypo
ggatctgctgcacgtcggggttccgagccagctcaaag

SEQ ID NO: 161265 - DNA, 305 bp, Homo sapiens
  chr8:143998174-143998479
  hypo
agagaaagcagccgccgaggttggtgcagagcgggttctcactacacagaagggctcattgctctgcgtcttctctgcagaggtgcccgtgcccatttctccaccaccgccctgcttccccaacccacagtgcagacgcgaccccacaggatggccgtcctctgggccgggtgctcaccctcactgcccaccacaggggcccagggcagatgtgcttttgggtcctacctctctcgcctcccccctacacccaggctgcccaccctgctcccagctctcagctcccaactcgccgcttacaacaa

SEQ ID NO: 161266 - DNA, 44 bp, Homo sapiens; identical to SEQ ID NO: 76980
  chr8:144057228-144057272
  hypo

SEQ ID NO: 161267 - DNA, 43 bp, Homo sapiens; identical to SEQ ID NO: 76981
  chr8:144057391-144057434
  hypo

SEQ ID NO: 161268 - DNA, 198 bp, Homo sapiens
  chr8:144069363-144069561
  hypo
gaatccaaggcctcccgccaaagggcagcatctgcctgccggcagcacagtgcaccatctaggagatgggtcctccagccctagccgagccttcggaccacttcaccccagacaacatctagcctcacgcagccggaaccacctgtggcgaaggctaaaatgactccatcttggatgctgacccgccatgtggacttc

SEQ ID NO: 161269 - DNA, 30 bp, Homo sapiens
  chr8:144069777-144069807
  hypo
cctaagccctgggtccgcgggtagcaatgc

SEQ ID NO: 161270 - DNA, 272 bp, Homo sapiens
  chr8:144070434-144070706
  hypo
cgtctccagaatctccgcttgagttgccccagaaacacctagagcccagtctccacgcctgcgggggagccacactccccgggctgctgcggcccccagggtgccacctccctctgcaacagcctttaacagctctgcaagttctgtggggctgtcccacggagaggtgaggtctgagaagggagtggaggcacagggctcctgcggccacgtcagaaacgccctgcagctcccacctgacatcttcggaggctccacgagaggagaccagc

SEQ ID NO: 161271 - DNA, 426 bp, Homo sapiens; identical to SEQ ID NO: 22909
  chr8:144070962-144071388
  hypo

SEQ ID NO: 161272 - DNA, 138 bp, Homo sapiens; identical to SEQ ID NO: 76984
  chr8:144090395-144090533
  hypo

SEQ ID NO: 161273 - DNA, 212 bp, Homo sapiens; identical to SEQ ID NO: 76985
  chr8:144093515-144093727
  hypo

SEQ ID NO: 161274 - DNA, 30 bp, Homo sapiens
  chr8:144150970-144151000
  hypo
gcgatgatgccagcccgtgctccaggtgaa

SEQ ID NO: 161275 - DNA, 30 bp, Homo sapiens
  chr8:144151328-144151358
  hypo
ggccgcacccagcgtcgtgggaagccccag

SEQ ID NO: 161276 - DNA, 142 bp, Homo sapiens; identical to SEQ ID NO: 76986
  chr8:144163831-144163973
  hypo

SEQ ID NO: 161277 - DNA, 363 bp, Homo sapiens; identical to SEQ ID NO: 22911
  chr8:144178362-144178725
  hypo

SEQ ID NO: 161278 - DNA, 264 bp, Homo sapiens; identical to SEQ ID NO: 76988
  chr8:144187579-144187843
  hypo

SEQ ID NO: 161279 - DNA, 194 bp, Homo sapiens; identical to SEQ ID NO: 76989
  chr8:144190245-144190439
  hypo

SEQ ID NO: 161280 - DNA, 77 bp, Homo sapiens; identical to SEQ ID NO: 76990
  chr8:144203022-144203099
  hypo

SEQ ID NO: 161281 - DNA, 972 bp, Homo sapiens; identical to SEQ ID NO: 22912
  chr8:144203467-144204439
  hypo

SEQ ID NO: 161282 - DNA, 430 bp, Homo sapiens
  chr8:144205316-144205746
  hypo
acacatgcatgccctcgtgtgtacacgtgcgcacacacacccttgaacacatatacatcttcacacatgtacacacaccctcacatgtacacacatgcaccctcaaacgtacagatcctcacacatgtacacacaccctcacacatgtacacacaccctcacacatgtacacaccctcacacatgtatacgtacgcacaccccctcaaacgtacacaccctcacacatgtacatgcacacacatgcacacatgcatgccctcgcatgtacaggcacaccctaatacatcctcacacatgtacgcacacaaaccctcacacgtacacacaccctcacatttacacactcaaacgtacacacatcctcacacatgtacacacaccctcgcacatgtatacatatgcacaccctcacacgtacgcacaccccc

SEQ ID NO: 161283 - DNA, 139 bp, Homo sapiens; identical to SEQ ID NO: 22913
  chr8:144208603-144208742
  hypo

SEQ ID NO: 161284 - DNA, 156 bp, Homo sapiens; identical to SEQ ID NO: 76993
  chr8:144222939-144223095
  hypo

SEQ ID NO: 161285 - DNA, 30 bp, Homo sapiens
  chr8:144224687-144224717
  hypo
actggtcccccaggacgatgactcgtgtgt

SEQ ID NO: 161286 - DNA, 30 bp, Homo sapiens
  chr8:144231414-144231444
  hypo
agccaagggtgacggcgcctccaggtcccc

SEQ ID NO: 161287 - DNA, 201 bp, Homo sapiens
  chr8:144236384-144236585
  hypo
ccgaaatgctaacagcgttagcattttctgcaaccggaaaaatggatcccaaaacccatctgtaagaataaattgtgagaagtagcagtatgtgtttaaaaagaataacgtggggcccttgccttaacgagtgtaaaacacgccgcccggctgccatcgttgaaacagcatcacatgtagatgacccgtgacgaaccgacc

SEQ ID NO: 161288 - DNA, 146 bp, Homo sapiens
  chr8:144238763-144238909
  hypo
accgtgtgcactgcacgctgagtgtacaagggtgggtgtgcacagacatgggcatgcacgtgtgggtgtgggcacgtgcactgggacacgccagtttgtgccagttatgtgcatgccccagcacgtgtgcgcggggcacctggggt

SEQ ID NO: 161289 - DNA, 554 bp, Homo sapiens; identical to SEQ ID NO: 117289
  chr8:144240967-144241521
  hypo

SEQ ID NO: 161290 - DNA, 119 bp, Homo sapiens; identical to SEQ ID NO: 117290
  chr8:144241583-144241702
  hypo

SEQ ID NO: 161291 - DNA, 526 bp, Homo sapiens; identical to SEQ ID NO: 117291
  chr8:144241757-144242283
  hypo

SEQ ID NO: 161292 - DNA, 202 bp, Homo sapiens
  chr8:144254778-144254980
  hypo
cgcgtgagcgttccacgcatgagcgttacaacgtttgcttatccacttccttgttggccgaccctgggctgtgtgccgtgtttggctcgggtacattcctgagtcccgcattctcttgggtaaatattggggtacagagttgccgtgtccagagttgctgtgtccaaaggtcaagtaaatcgttctctaagaaattgccagg

SEQ ID NO: 161293 - DNA, 106 bp, Homo sapiens
  chr8:144262819-144262925
  hypo
gtgcactgggacagccgtgcagtgatgggcagtcgggaggctcccaacccctgctatttcaaatagcgccccatcgagaagctccacactgcggcattttgtgtgt

SEQ ID NO: 161294 - DNA, 30 bp, Homo sapiens
  chr8:144291948-144291978
  hypo
gtgccctggggtgtgcgcatggctcaggga

SEQ ID NO: 161295 - DNA, 433 bp, Homo sapiens
  chr8:144292289-144292722
  hypo
cccctttcacacctgcgcaccatcccaggtggcaccttctgtaggggctggaccagacccactagcctttccggggcgggacagagggaacagcctctcagtggcgagcactaaatttaattcaatctgcgaatcaaatgtgctctgattgtccctaggtgattctcgcaataagcacttgcctgggctgggcagtttgcacctgggctgaagaggagctgggcccagagggaggcaacgtgcaagggcctgggcccctgtggaggggaggcggcaggtggaggccccttgagaatcccagtagcgcccttcctaggagcagctcctgcagcactagattcaagggcctgtagcggtagccggggcggggcgcgggggaggtagggcagcaggaaagcggggcaccagggaagcggggcgacagggaggcggg

SEQ ID NO: 161296 - DNA, 521 bp, Homo sapiens
  chr8:144293589-144294110
  hypo
gccgagggcgagagggcgcagggaggcgggtgggggtggggccacgcgcggaggggcagggaagggcggggcggggcggggcgggacggggctgggggggacaggcatcaggtatgaagagtttggggctggcggggcgtgtccggctgtggcgtgggcaccactatgggagaccctggcttggcaagtgaccttgcagccttggctggggaagggctagatgctgggtgggtgccggtagagtggaaagaatgacaggttcaggtgaattaaggaaggatggttgactcggtggctgggacattagagacaggtattcccagcctcaggcgctgtcctaagcccagcaggtactgacccttgatggtcacctcaccctatgagggagctgaggcctggggaacccaaggggctagtccagaacccacagccgggggaaggaggaaccgggtcttaaacccaggtagctcactccagaaccaactcaacctctgttacaggtggccggccagaaaatgccc

SEQ ID NO: 161297 - DNA, 197 bp, Homo sapiens
  chr8:144311086-144311283
  hypo
cgggtctctcgtccacgacactgggaaaaaccaagcccatctcacgggactggtgtggagattttctgaccttcggccgccacaccctggcatgtgctgggcgacccctgccctgcctcattgcagtctgtttcccaagccgggttctggttccttgcttgtccccaccccccacagtgtttcggaccctcctccgg

SEQ ID NO: 161298 - DNA, 133 bp, Homo sapiens
  chr8:144326797-144326930
  hypo
atggacagctacccacgcagccttggcctaaggctggcaggggcgaggccggggctggcacagaggagctcgaacaggtggagtcttaaaaagcaggaaagggtctgtcaggcggaggcggagcgggggtgtt

SEQ ID NO: 161299 - DNA, 206 bp, Homo sapiens
  chr8:144330279-144330485
  hypo
gcccggccagtccactctgcttttaagaaatattttatttctcagggtgggcagcgtgtagagaagtgagtcattccagtctctgccggttagcacctgccagcctaagttgagtcgacagagccgttatggagaatgttccctgaccacagtatgtgactaggatttggagataaaaaagatacgatcctcgccttcaggagacc

SEQ ID NO: 161300 - DNA, 31 bp, Homo sapiens; identical to SEQ ID NO: 77000
  chr8:144331530-144331561
  hypo

SEQ ID NO: 161301 - DNA, 30 bp, Homo sapiens; identical to SEQ ID NO: 77001
  chr8:144331979-144332009
  hypo

SEQ ID NO: 161302 - DNA, 30 bp, Homo sapiens
  chr8:144332630-144332660
  hypo
cgggccctgcggtgcgagcctcgccggaca

SEQ ID NO: 161303 - DNA, 31 bp, Homo sapiens; identical to SEQ ID NO: 77002
  chr8:144333711-144333742
  hypo

SEQ ID NO: 161304 - DNA, 63 bp, Homo sapiens; identical to SEQ ID NO: 77003
  chr8:144334637-144334700
  hypo

SEQ ID NO: 161305 - DNA, 30 bp, Homo sapiens; identical to SEQ ID NO: 77004
  chr8:144335014-144335044
  hypo

SEQ ID NO: 161306 - DNA, 43 bp, Homo sapiens; identical to SEQ ID NO: 77005
  chr8:144335406-144335449
  hypo

SEQ ID NO: 161307 - DNA, 1409 bp, Homo sapiens
  chr8:144343415-144344824
  hypo
gcgctgagatgtgatcgtttctttcctgagaatgagctgaggtaaaaacatgctggggaggaagatgggccctgggggcagcgagctgcgcctctgcaccgggagaaaggccgtgtccccagagctgaggcggtggtgggcagggctcctgagaagccggggcagggcagggtgtctctgaggtcaatgaggaacagctgaggtccagggacgcaggaaggatggggtgaactccgggatggggccggcagggagcctcacgcttacagagcctggtgttggcactctcctggcttcctccgcaaacctagccacgtggtcagggagcccgggcctagcagacggcccccaccttgacagaatccccagggtcgtgcgtggcggtgggggcgacttcacagccgagaccgggcctaacgctgctgtctcgcagtcacccctgcaggccgctcagggcagggctctggcctgacgggggttcctggacacgcctctgagccggcagcccctacccgcacccgtgcaccttccacgcccgtctccagcagcccctgcccccacccgcacccctgcacctgccacgcctgtctccggcagcccctgcccgcacccgcacccctgcacctgccacgcccgtctccggcagcacctgccacgcccgtctccggcagcacctgccacgcccgtctccggcagcacctgccacgcccgtctccggcagcccctgcccgcacccgcacccctgcacctgccacgcccgtctccggcagcccctgcctgcacccgcacccctcacggctgtctccggcagcccctgcccgcgcccgcacctctgcacctcccacgcccctctccggcagcccctgcccacacccgcacccctgcacctcccacgcccgtcttgccctggggcccaggtgcaggtctgtgaggagggcagccccgtgctcccgtggccaccgctcagccaaatggattcagcgagggtttttagtgtttgtgcctgtgtccccgtgtgcctgtttcctggtgaggctggatgcctggcatgtctgaacactcacattccccaggcatgcatgtgcagccgccgccgccacccatgtactgtggcgctgacccctcctgtaacagctgtggtcttggcctctcgtgttggtggcagatgtcccatttcccagttactttctgttgtccaaaagtttaactgtcctgccagccaaagctgctgagcattactctgatagaccatcagtccttggtaagtgtcctgtgcatctgggataagcatccgtttgttttcagctgcgctttctgtgacttgctctgcgtgagtcctcggtccacgtgggccgttgcgctggttcccagcctgcccgacacactcactgcgacgcctcccttgccta

SEQ ID NO: 161308 - DNA, 106 bp, Homo sapiens; identical to SEQ ID NO: 77008
  chr8:144347175-144347281
  hypo

SEQ ID NO: 161309 - DNA, 106 bp, Homo sapiens; identical to SEQ ID NO: 77009
  chr8:144347700-144347806
  hypo

SEQ ID NO: 161310 - DNA, 267 bp, Homo sapiens; identical to SEQ ID NO: 77010
  chr8:144351689-144351956
  hypo

SEQ ID NO: 161311 - DNA, 972 bp, Homo sapiens
  chr8:144359678-144360650
  hypo
aggggagtctgggccacgaagctctgggagagctcagctgggggtggctccaagtgctgagtgccagtgattctgccagtgccttctccctgccctgcctgtgccctccgggacagctggcagaccccggaccccagcctggctcctccgaggctgtccctctccaggtctcacctcccctcctactgtgactcatccagaaccccgggcctggcccccagatgtgcctgtggcgggcctctgaggtcactgtcctggtgaagacgaaggctaccgtccccgctttctggcagtgtctgcgagggcctgcgcagcgcgcatctgatgtcatcagcccccagcaagcccgttttccagaagagaacccggaggctccgaggtgacgtgtggcttgctcgagatcacacgatcagtgacggcaccagatgaatccctgagctccctgaccagccatccacccaggcccctgctgagacagcgggacctcgtttccaactcagaagcccccggaacgcggctgcccggcttgggagcctgcggcacagggccctgtgcagccccttggggaagacggccccaggctctgccagcccccgccaccctctccagaccatgctctgggggccctatggccaccagcgctctggacgccccactctgccaggtgagaacgagtttaggggtgcgggctggaggtcagtgtgtctgtccgaagtcagctgggaggcaggcgcctacttgaggcgtccttgctggtgtgcggtgggcctggggttcagactgtctgcctgaaaggtaagggtgaggacgcctgcattctccttgttcagtaacacgcgtgggcagccaggccgaggtgctggctctactaggggattcatctggtgccgtcactgatcgtgtgacctcgagcaagccacgagtcacctcggagcctccgggttcttctctggaaaacgggcttgctggggg

SEQ ID NO: 161312 - DNA, 187 bp, Homo sapiens; identical to SEQ ID NO: 77012
  chr8:144361757-144361944
  hypo

SEQ ID NO: 161313 - DNA, 30 bp, Homo sapiens; identical to SEQ ID NO: 22923
  chr8:144364998-144365028
  hypo

SEQ ID NO: 161314 - DNA, 214 bp, Homo sapiens
  chr8:144372043-144372257
  hypo
cctcctgcgcagactcgcgtgcttggagtaccggagcctgcagggcaagagagggtcttcagaagacccacgacgttccactgggatgcagagggaaacggttacttgtacttctacatcatctcttttagatgtgtgtgtgtgtggtgtgtgttgttgttgttgtttttgttttgcgacagaatctctgtcacccaggctggagtgcagtgcc

SEQ ID NO: 161315 - DNA, 30 bp, Homo sapiens; identical to SEQ ID NO: 22924
  chr8:144378382-144378412
  hypo

SEQ ID NO: 161316 - DNA, 565 bp, Homo sapiens; identical to SEQ ID NO: 77016
  chr8:144380306-144380871
  hypo

SEQ ID NO: 161317 - DNA, 173 bp, Homo sapiens; identical to SEQ ID NO: 77017
  chr8:144383377-144383550
  hypo

SEQ ID NO: 161318 - DNA, 113 bp, Homo sapiens
  chr8:144386308-144386421
  hypo
gccccagactgcactcgcagtcagtgcactgcgtcttaggtgttgcttctgccaacagctgtcttagacgaggtggctctgccaacacctgtcttagacgaggtggctctgcc

SEQ ID NO: 161319 - DNA, 47 bp, Homo sapiens
  chr8:144386879-144386926
  hypo
acggtgcttctgtggccgcaggcgtgaggacccgggtcctggcctcc

SEQ ID NO: 161320 - DNA, 80 bp, Homo sapiens
  chr8:144387631-144387711
  hypo
gggtgtcgggaaggcgtcagggctcccggttgctgtcagtcgcccgtgagacccgagcagcagtcgctctgttcttgtga

SEQ ID NO: 161321 - DNA, 96 bp, Homo sapiens
  chr8:144390544-144390640
  hypo
ccgcgtggcagagaagagggcggcagagggtcccgcgtggcagagagggcggcagaggatcccgcgtggcagagggcagccgacaggcagctctga

SEQ ID NO: 161322 - DNA, 155 bp, Homo sapiens
  chr8:144396022-144396177
  hypo
tccaaaggaaaaaaaaaaaaaagaaagaacaaagacaacccaagagtgggcgaaacatcgacgagctcttacaagtcaataataaaacaacaacccgactggaaaatggacagaggacctgagcagtcattctccagagacgatacagaagtggg

SEQ ID NO: 161323 - DNA, 55 bp, Homo sapiens; identical to SEQ ID NO: 77020
  chr8:144398062-144398117
  hypo

SEQ ID NO: 161324 - DNA, 30 bp, Homo sapiens
  chr8:144399199-144399229
  hypo
ggcccacgggtgcacgcgaaacacatgccg

SEQ ID NO: 161325 - DNA, 31 bp, Homo sapiens; identical to SEQ ID NO: 77021
  chr8:144399475-144399506
  hypo

SEQ ID NO: 161326 - DNA, 203 bp, Homo sapiens; identical to SEQ ID NO: 77022
  chr8:144400198-144400401
  hypo

SEQ ID NO: 161327 - DNA, 528 bp, Homo sapiens
  chr8:144413512-144414040
  hypo
aagacggagacaggacgtgtcactctcctgggccaggccctgcatgagcctcttccccgctcccacagtggctcctccctgtggctcctagcaggtgagcagtgtggcctccacctcacgggggaggaaaacaaggcctgcagagggaggcaaccctacctgacctcagaccccatgcccgtgtacccgcccatgccccccacctgcagaggcccgtgtgctgctgagtcacggatcccaccaagcccagctaagcgggaaagggcaagcccagctaagtgggaaaggcaacgtgcctctcccaggctctagggcctctccccagatgggtcccttcagagccggtctagaatcttcgggaacctctccatgggaccatttcatttgctaaataaaggacctggctgcttatgagagagccctgcctccgaggagctgggtggaagggggtccagcagtgcagccagtggagaggcaccacagcagggcgcaggaccgccgcccacagaggatcgggcagggtggaag

SEQ ID NO: 161328 - DNA, 242 bp, Homo sapiens; identical to SEQ ID NO: 77024
  chr8:144414247-144414489
  hypo

SEQ ID NO: 161329 - DNA, 30 bp, Homo sapiens
  chr8:144442422-144442452
  hypo
ctgcagcgcttctgcgactctgaagataaa

SEQ ID NO: 161330 - DNA, 31 bp, Homo sapiens; identical to SEQ ID NO: 22928
  chr8:144446233-144446264
  hypo

SEQ ID NO: 161331 - DNA, 30 bp, Homo sapiens; identical to SEQ ID NO: 22929
  chr8:144446722-144446752
  hypo

SEQ ID NO: 161332 - DNA, 31 bp, Homo sapiens
  chr8:144449873-144449904
  hypo
ctcagctccaaggctccgctgggcctgtggt

SEQ ID NO: 161333 - DNA, 30 bp, Homo sapiens
  chr8:144452114-144452144
  hypo
gctggtgatgctgaccgtagccctcaagga

SEQ ID NO: 161334 - DNA, 140 bp, Homo sapiens; identical to SEQ ID NO: 77027
  chr8:144452480-144452620
  hypo

SEQ ID NO: 161335 - DNA, 30 bp, Homo sapiens; identical to SEQ ID NO: 22930
  chr8:144454256-144454286
  hypo

SEQ ID NO: 161336 - DNA, 232 bp, Homo sapiens; identical to SEQ ID NO: 22931
  chr8:144457688-144457920
  hypo

SEQ ID NO: 161337 - DNA, 30 bp, Homo sapiens; identical to SEQ ID NO: 22932
  chr8:144459827-144459857
  hypo

SEQ ID NO: 161338 - DNA, 608 bp, Homo sapiens
  chr8:144460930-144461538
  hypo
gtgcttcctggatgcgcgcttcctcacccctgccaggagcctcgggctcttcttccactggtaggggctctgcgggcggaggcaccctggggaggggaggcccagctgcgggaaccgtgggaactccacccagcctgacccaacactgcaggtacgactcgcttactggggtcccggcccagcagcgtgccctggccttcgagaagggcagcgttctcttcaacatcggtgccctccacacgcagattggggcgcgccaggaccgctcctgcaccgagggtgcccgccgcgctatggaggccttccagagggccgctggtgagggcggcccgggccgcggtggggcacggcgcggtgccagggtgttgcagagccccttttgcagggcaggagctggggagtggttaggacatcagtccctcaggtagggggagtgagcacatcaggtccatatgtgtcccaggagcatccctagctggccgccctgagtgctgcatggggcagagatgggcaggtacagggccctgcctgtgtgagcacccctccctccgcaggggccttcagcctcctgagggagaacttctcccatgcgccgagcccagacatga

SEQ ID NO: 161339 - DNA, 379 bp, Homo sapiens; identical to SEQ ID NO: 22935
  chr8:144462487-144462866
  hypo

SEQ ID NO: 161340 - DNA, 30 bp, Homo sapiens; identical to SEQ ID NO: 77034
  chr8:144463884-144463914
  hypo

SEQ ID NO: 161341 - DNA, 478 bp, Homo sapiens; identical to SEQ ID NO: 77035
  chr8:144471547-144472025
  hypo

SEQ ID NO: 161342 - DNA, 136 bp, Homo sapiens; identical to SEQ ID NO: 117300
  chr8:144484159-144484295
  hypo

SEQ ID NO: 161343 - DNA, 30 bp, Homo sapiens
  chr8:144493446-144493476
  hypo
tctcctgagacctgcgcctgacgtcaccct

SEQ ID NO: 161344 - DNA, 528 bp, Homo sapiens; identical to SEQ ID NO: 117305
  chr8:144510871-144511399
  hypo

SEQ ID NO: 161345 - DNA, 1365 bp, Homo sapiens; identical to SEQ ID NO: 117306
  chr8:144511448-144512813
  hypo

SEQ ID NO: 161346 - DNA, 256 bp, Homo sapiens
  chr8:144519591-144519847
  hypo
gaaccgggagctggccgagctgccccacccaccatggctctagcctgttgcatccgggtccccagagtgccccctaggccttccccaccccagatggtgctgctcaggtccagggagaagcgccttctgacttctgaaccatcgtgggaggtaggaaaggggccccatactcctgcccagaggggcggtgctttccgcctggcggtggcatggcaacagtcaggacaagccaaccagttacggatagaacctttat

SEQ ID NO: 161347 - DNA, 30 bp, Homo sapiens
  chr8:144520838-144520868
  hypo
tcactgggtgccagcgcctctcctccctcc

SEQ ID NO: 161348 - DNA, 233 bp, Homo sapiens; identical to SEQ ID NO: 22939
  chr8:144521389-144521622
  hypo

SEQ ID NO: 161349 - DNA, 161 bp, Homo sapiens; identical to SEQ ID NO: 77040
  chr8:144521830-144521991
  hypo

SEQ ID NO: 161350 - DNA, 146 bp, Homo sapiens
  chr8:144543709-144543855
  hypo
acaaaggctggagcgcggacattcgaggcagtattattcacgacagcccccaactggcaaccacccgaacggacaaagaaagtgtggagagcctctgcagcggcttgactctgtaataaaaacgggtgcagcgctgaggtgctgca

SEQ ID NO: 161351 - DNA, 30 bp, Homo sapiens
  chr8:144544341-144544371
  hypo
ggccccctgaagagtcgccacgaccctctg

SEQ ID NO: 161352 - DNA, 30 bp, Homo sapiens
  chr8:144544606-144544636
  hypo
aaagggcagcactggcgaaagcaaggcacc

SEQ ID NO: 161353 - DNA, 30 bp, Homo sapiens
  chr8:144544857-144544887
  hypo
gggaaaacggcagcgcggaggctcacggag

SEQ ID NO: 161354 - DNA, 22 bp, Homo sapiens
  chr8:144545178-144545200
  hypo
gtctcactcttgtcacgtaggc

SEQ ID NO: 161355 - DNA, 21 bp, Homo sapiens
  chr8:144545439-144545460
  hypo
ccaccgcgcccggcccagacc

SEQ ID NO: 161356 - DNA, 136 bp, Homo sapiens; identical to SEQ ID NO: 77041
  chr8:144545693-144545829
  hypo

SEQ ID NO: 161357 - DNA, 100 bp, Homo sapiens; identical to SEQ ID NO: 77042
  chr8:144546272-144546372
  hypo

SEQ ID NO: 161358 - DNA, 92 bp, Homo sapiens; identical to SEQ ID NO: 77043
  chr8:144550586-144550678
  hypo

SEQ ID NO: 161359 - DNA, 30 bp, Homo sapiens; identical to SEQ ID NO: 77044
  chr8:144552437-144552467
  hypo

SEQ ID NO: 161360 - DNA, 30 bp, Homo sapiens
  chr8:144554064-144554094
  hypo
taccttcctcatggcgaggcggggccggtg

SEQ ID NO: 161361 - DNA, 213 bp, Homo sapiens
  chr8:144557019-144557232
  hypo
gcaaggtggcggcgccggctgcctccagacacagttgtcgaggcgtcgccaatgcgattacgggcgccgcggccccaggtgtgcgctcgcccgggcgtgtttgccgtacctggcatcatcctttttccaaaagcgaaacatggtgcttgtgagcaactctcccccaccccacagaaaatcaggggccgctcagccacgcgaggtgggcgccac

SEQ ID NO: 161362 - DNA, 30 bp, Homo sapiens; identical to SEQ ID NO: 77046
  chr8:144557504-144557534
  hypo

SEQ ID NO: 161363 - DNA, 199 bp, Homo sapiens
  chr8:144559234-144559433
  hypo
tctgtcgggttccaccgccatccccaccactcagccctgcaacccctccgggccttggtccctctgcctgcaagctggggtaattctcagcagccgggggcctccaagggcccattagagagagaatgggagcagagagagcccggtgccggggatgggagctgcagtgtaagtacaagcacggcggctggagcactta

SEQ ID NO: 161364 - DNA, 38 bp, Homo sapiens
  chr8:144567458-144567496
  hypo
ttccttggtgaggccgagaacccggtccagtgtttcta

SEQ ID NO: 161365 - DNA, 30 bp, Homo sapiens; identical to SEQ ID NO: 77049
  chr8:144568417-144568447
  hypo

SEQ ID NO: 161366 - DNA, 30 bp, Homo sapiens; identical to SEQ ID NO: 77050
  chr8:144571193-144571223
  hypo

SEQ ID NO: 161367 - DNA, 31 bp, Homo sapiens; identical to SEQ ID NO: 22944
  chr8:144574934-144574965
  hypo

SEQ ID NO: 161368 - DNA, 30 bp, Homo sapiens
  chr8:144575625-144575655
  hypo
gaggggtctggccctcggccacacctggag

SEQ ID NO: 161369 - DNA, 260 bp, Homo sapiens
  chr8:144575936-144576196
  hypo
tccttaatgagcagccgaagggatcggtaagcataatttcagaggccagtaatattttatataatcgccgagtggtttaaattgaaaacccccaactgaatcaatatttactgcattgaaacgaaatgaatagtaataagtcactaagctccctgtcctgtttcataaaataaaaaattataaaaatgagcacaggcacagggaggccatcacattaacttttacagcacttggggagccgtaaccgcctgttcccataa

SEQ ID NO: 161370 - DNA, 29 bp, Homo sapiens
  chr8:144577034-144577063
  hypo
ccaccagtggccttacgttagcccgagca

SEQ ID NO: 161371 - DNA, 148 bp, Homo sapiens; identical to SEQ ID NO: 77053
  chr8:144577122-144577270
  hypo

SEQ ID NO: 161372 - DNA, 30 bp, Homo sapiens; identical to SEQ ID NO: 22945
  chr8:144583895-144583925
  hypo

SEQ ID NO: 161373 - DNA, 30 bp, Homo sapiens; identical to SEQ ID NO: 22946
  chr8:144588450-144588480
  hypo

SEQ ID NO: 161374 - DNA, 30 bp, Homo sapiens
  chr8:144589375-144589405
  hypo
ccctgccgacagagccgccctcccagcctg

SEQ ID NO: 161375 - DNA, 34 bp, Homo sapiens; identical to SEQ ID NO: 77056
  chr8:144589671-144589705
  hypo

SEQ ID NO: 161376 - DNA, 398 bp, Homo sapiens; identical to SEQ ID NO: 77057
  chr8:144589918-144590316
  hypo

SEQ ID NO: 161377 - DNA, 31 bp, Homo sapiens; identical to SEQ ID NO: 22949
  chr8:144601156-144601187
  hypo

SEQ ID NO: 161378 - DNA, 30 bp, Homo sapiens; identical to SEQ ID NO: 77059
  chr8:144605455-144605485
  hypo

SEQ ID NO: 161379 - DNA, 30 bp, Homo sapiens
  chr8:144610362-144610392
  hypo
tgcctcctcgggggccgccactcatctctg

SEQ ID NO: 161380 - DNA, 266 bp, Homo sapiens; identical to SEQ ID NO: 77060
  chr8:144610875-144611141
  hypo

SEQ ID NO: 161381 - DNA, 84 bp, Homo sapiens; identical to SEQ ID NO: 77061
  chr8:144617125-144617209
  hypo

SEQ ID NO: 161382 - DNA, 190 bp, Homo sapiens
  chr8:144621155-144621345
  hypo
aactttgatgaccacgttctgaccctgactgagctggacctgtctctcaaggacatgctgctgcgggacaggaggctggcccccccgggccccgtgcaacggccgcacagcatggtcggcaggagggtctgagggtcccgggggccgattcacgagggagtatttcttgcgccacgaaggcccatggtgg

SEQ ID NO: 161383 - DNA, 325 bp, Homo sapiens; identical to SEQ ID NO: 117313
  chr8:144636561-144636886
  hypo

SEQ ID NO: 161384 - DNA, 450 bp, Homo sapiens; identical to SEQ ID NO: 117314
  chr8:144640320-144640770
  hypo

SEQ ID NO: 161385 - DNA, 286 bp, Homo sapiens; identical to SEQ ID NO: 77065
  chr8:144656840-144657126
  hypo

SEQ ID NO: 161386 - DNA, 287 bp, Homo sapiens; identical to SEQ ID NO: 77066
  chr8:144658239-144658526
  hypo

SEQ ID NO: 161387 - DNA, 228 bp, Homo sapiens; identical to SEQ ID NO: 77067
  chr8:144661844-144662072
  hypo

SEQ ID NO: 161388 - DNA, 326 bp, Homo sapiens
  chr8:144668625-144668951
  hypo
gacgacaggcaaaggcgcccatgtctgcgggggaaggagtgccaggcctggccccacaccaagtgcacaggcgccggcaggagggccctgagcagacccggcccgggggcccggccaaggccgcctgccccgagaccccactcccagcacccacagcagagccactgggccagggtgcctctgccttcctggcctggctgaatccgctttgtgtgccccggccactcctgtcgggcagcagagccgcccagccgccccacgtgcagctctcacctggcgggaggcacctgccacaggcccgttcatctgctcgtagaatctccttt

SEQ ID NO: 161389 - DNA, 30 bp, Homo sapiens
  chr8:144674905-144674935
  hypo
tcagcccggggcggccgggggcctttccag

SEQ ID NO: 161390 - DNA, 30 bp, Homo sapiens
  chr8:144675543-144675573
  hypo
ccctgcaagctctgcgaagggcagctgggc

SEQ ID NO: 161391 - DNA, 260 bp, Homo sapiens; identical to SEQ ID NO: 77069
  chr8:144675967-144676227
  hypo

SEQ ID NO: 161392 - DNA, 89 bp, Homo sapiens; identical to SEQ ID NO: 22953
  chr8:144676811-144676900
  hypo

SEQ ID NO: 161393 - DNA, 86 bp, Homo sapiens; identical to SEQ ID NO: 117317
  chr8:144680873-144680959
  hypo

SEQ ID NO: 161394 - DNA, 218 bp, Homo sapiens
  chr8:144681633-144681851
  hypo
tacaagtgcctggctccggaggaggttgcggagtggctgcacctggacgatgatgggggtccgcccgagggctgcagggaggaggtgggcccagccctgccccctgcagcgcctccggccccagccagtctgccctctgccatggggggcggagaggacgaggaggaggccaccgactatggagggacctcagtgccgactgccggggaggccgtgcg

SEQ ID NO: 161395 - DNA, 30 bp, Homo sapiens; identical to SEQ ID NO: 77072
  chr8:144682385-144682415
  hypo

SEQ ID NO: 161396 - DNA, 217 bp, Homo sapiens
  chr8:144683682-144683899
  hypo
agctgacttcacggccgcggtgccagtgagggctgcatagccaggccttgtctgtagtctgggcggcccgtggcgctgcccttcagcccaactactcattgccgctgcgtctttggcgaggctttcatttccaacctttcttcccatctcagcccttttgttggcccgggtcccaggaggctggtgtcggtgagggcaggcccgctcctctcatcgg

SEQ ID NO: 161397 - DNA, 54 bp, Homo sapiens; identical to SEQ ID NO: 6650
  chr8:144691795-144691849
  hypo

SEQ ID NO: 161398 - DNA, 30 bp, Homo sapiens; identical to SEQ ID NO: 77074
  chr8:144696341-144696371
  hypo

SEQ ID NO: 161399 - DNA, 30 bp, Homo sapiens; identical to SEQ ID NO: 77075
  chr8:144696636-144696666
  hypo

SEQ ID NO: 161400 - DNA, 30 bp, Homo sapiens
  chr8:144716810-144716840
  hypo
agggcacgcgcctagcgtgtcccccttggc

SEQ ID NO: 161401 - DNA, 36 bp, Homo sapiens
  chr8:144717162-144717198
  hypo
gggaacagcggttcacgcctgtaatcccagcacttt

SEQ ID NO: 161402 - DNA, 199 bp, Homo sapiens; identical to SEQ ID NO: 77076
  chr8:145155547-145155746
  hypo

SEQ ID NO: 161403 - DNA, 40 bp, Homo sapiens; identical to SEQ ID NO: 22955
  chr8:145158417-145158457
  hypo

SEQ ID NO: 161404 - DNA, 232 bp, Homo sapiens; identical to SEQ ID NO: 77078
  chr8:145161407-145161639
  hypo

SEQ ID NO: 161405 - DNA, 61 bp, Homo sapiens; identical to SEQ ID NO: 77079
  chr8:145163870-145163931
  hypo

SEQ ID NO: 161406 - DNA, 30 bp, Homo sapiens; identical to SEQ ID NO: 77080
  chr8:145168435-145168465
  hypo

SEQ ID NO: 161407 - DNA, 30 bp, Homo sapiens; identical to SEQ ID NO: 77081
  chr8:145169807-145169837
  hypo

SEQ ID NO: 161408 - DNA, 84 bp, Homo sapiens; identical to SEQ ID NO: 77082
  chr8:145214940-145215024
  hypo

SEQ ID NO: 161409 - DNA, 118 bp, Homo sapiens; identical to SEQ ID NO: 22957
  chr8:145223204-145223322
  hypo

SEQ ID NO: 161410 - DNA, 101 bp, Homo sapiens; identical to SEQ ID NO: 22958
  chr8:145223918-145224019
  hypo

SEQ ID NO: 161411 - DNA, 293 bp, Homo sapiens; identical to SEQ ID NO: 77085
  chr8:145226070-145226363
  hypo

SEQ ID NO: 161412 - DNA, 30 bp, Homo sapiens; identical to SEQ ID NO: 22959
  chr8:145232213-145232243
  hypo

SEQ ID NO: 161413 - DNA, 30 bp, Homo sapiens; identical to SEQ ID NO: 22960
  chr8:145234253-145234283
  hypo

SEQ ID NO: 161414 - DNA, 30 bp, Homo sapiens; identical to SEQ ID NO: 77088
  chr8:145234936-145234966
  hypo

SEQ ID NO: 161415 - DNA, 237 bp, Homo sapiens; identical to SEQ ID NO: 77089
  chr8:145235188-145235425
  hypo

SEQ ID NO: 161416 - DNA, 30 bp, Homo sapiens; identical to SEQ ID NO: 22962
  chr8:145236061-145236091
  hypo

SEQ ID NO: 161417 - DNA, 30 bp, Homo sapiens; identical to SEQ ID NO: 77091
  chr8:145239301-145239331
  hypo

SEQ ID NO: 161418 - DNA, 30 bp, Homo sapiens; identical to SEQ ID NO: 77092
  chr8:145255089-145255119
  hypo

SEQ ID NO: 161419 - DNA, 83 bp, Homo sapiens
  chr8:145273269-145273352
  hypo
catgaggttttgcaccggactcctgcacctattccagtcaggccgtcatcctgtgtctctctggccagcggggaagcccagtg

SEQ ID NO: 161420 - DNA, 154 bp, Homo sapiens
  chr8:145278743-145278897
  hypo
agctcagaacagacacgccgccctccttgtgttctcgtgaccatcactgtggtgcccactgtgcctcaagtgggatacgtgaatttaactggaaacatctgagctcagtgactgcatgctgtgatgttgcctctaagtgcgtggtcgtcagtga

SEQ ID NO: 161421 - DNA, 176 bp, Homo sapiens
  chr8:145661366-145661542
  hypo
ctttgctgtggccccgcggtgggccaggccccagccggctctgagcactgcccacaccccggatggctgcctggtaggctgcccggctggtgctggctgtggctgcttccctgttgctggcggggccaggcgtccaggctgccacccgttgtgctgtggccgagcaccgaggcctc

SEQ ID NO: 161422 - DNA, 30 bp, Homo sapiens; identical to SEQ ID NO: 77094
  chr8:145661871-145661901
  hypo

SEQ ID NO: 161423 - DNA, 30 bp, Homo sapiens; identical to SEQ ID NO: 77095
  chr8:145662256-145662286
  hypo

SEQ ID NO: 161424 - DNA, 30 bp, Homo sapiens; identical to SEQ ID NO: 77096
  chr8:145667749-145667779
  hypo

SEQ ID NO: 161425 - DNA, 30 bp, Homo sapiens; identical to SEQ ID NO: 77097
  chr8:145668576-145668606
  hypo

SEQ ID NO: 161426 - DNA, 30 bp, Homo sapiens; identical to SEQ ID NO: 77098
  chr8:145678748-145678778
  hypo

SEQ ID NO: 161427 - DNA, 149 bp, Homo sapiens
  chr8:145679539-145679688
  hypo
gagcagggcacctcccgctgggctccctgcctgtgtgggctcccagcacgcccagtggcctatcctggctctcactccctcaacataagcctcgagcgtccacttggtgccactgagagacacatggcaagctgcggtcccagcccgtg

SEQ ID NO: 161428 - DNA, 65 bp, Homo sapiens; identical to SEQ ID NO: 77100
  chr8:145680954-145681019
  hypo

SEQ ID NO: 161429 - DNA, 30 bp, Homo sapiens; identical to SEQ ID NO: 77101
  chr8:145684582-145684612
  hypo

SEQ ID NO: 161430 - DNA, 30 bp, Homo sapiens; identical to SEQ ID NO: 77102
  chr8:145695747-145695777
  hypo

SEQ ID NO: 161431 - DNA, 238 bp, Homo sapiens; identical to SEQ ID NO: 45952
  chr8:145697348-145697586
  hypo

SEQ ID NO: 161432 - DNA, 124 bp, Homo sapiens; identical to SEQ ID NO: 6654
  chr8:145697858-145697982
  hypo

SEQ ID NO: 161433 - DNA, 31 bp, Homo sapiens; identical to SEQ ID NO: 77105
  chr8:145706678-145706709
  hypo

SEQ ID NO: 161434 - DNA, 31 bp, Homo sapiens; identical to SEQ ID NO: 77106
  chr8:145709415-145709446
  hypo

SEQ ID NO: 161435 - DNA, 31 bp, Homo sapiens; identical to SEQ ID NO: 77107
  chr8:145715362-145715393
  hypo

SEQ ID NO: 161436 - DNA, 39 bp, Homo sapiens; identical to SEQ ID NO: 77108
  chr8:145719388-145719427
  hypo

SEQ ID NO: 161437 - DNA, 130 bp, Homo sapiens; identical to SEQ ID NO: 77109
  chr8:145721881-145722011
  hypo

SEQ ID NO: 161438 - DNA, 30 bp, Homo sapiens; identical to SEQ ID NO: 22968
  chr8:145723477-145723507
  hypo

SEQ ID NO: 161439 - DNA, 478 bp, Homo sapiens; identical to SEQ ID NO: 117336
  chr8:145726120-145726598
  hypo

SEQ ID NO: 161440 - DNA, 31 bp, Homo sapiens; identical to SEQ ID NO: 77111
  chr8:145728371-145728402
  hypo

SEQ ID NO: 161441 - DNA, 434 bp, Homo sapiens; identical to SEQ ID NO: 117337
  chr8:145733643-145734077
  hypo

SEQ ID NO: 161442 - DNA, 212 bp, Homo sapiens; identical to SEQ ID NO: 77113
  chr8:145736699-145736911
  hypo

SEQ ID NO: 161443 - DNA, 152 bp, Homo sapiens
  chr8:145737563-145737715
  hypo
gggcctggcgctcccgggcctgcacacggccatagaggaagtcacatatctggtccttctcctcagcggtcaagtcccccgggctgcgaaggtggaaggccagctcactgaactccacaagcacccctgtcccacgccgcacacctgccgga

SEQ ID NO: 161444 - DNA, 819 bp, Homo sapiens; identical to SEQ ID NO: 77115
  chr8:145737999-145738818
  hypo

SEQ ID NO: 161445 - DNA, 137 bp, Homo sapiens; identical to SEQ ID NO: 77116
  chr8:145739823-145739960
  hypo

SEQ ID NO: 161446 - DNA, 241 bp, Homo sapiens; identical to SEQ ID NO: 77117
  chr8:145740330-145740571
  hypo

SEQ ID NO: 161447 - DNA, 30 bp, Homo sapiens; identical to SEQ ID NO: 77118
  chr8:145741976-145742006
  hypo

SEQ ID NO: 161448 - DNA, 30 bp, Homo sapiens
  chr8:145744813-145744843
  hypo
caagcgagttgttgacgatgccacactgct

SEQ ID NO: 161449 - DNA, 192 bp, Homo sapiens
  chr8:145745101-145745293
  hypo
ccagcaccatgcacacgcttgtgttcttgagcacacggcaggtgctgcagtgccagccagctgcctgccaggccctgcccttgctgccacgcgaactcttccccctgctgttcaaggtggccttcatggacaagaagacagtggtactgcgcgagttggtacacacgtggcccttcccgctgctcagtttcc

SEQ ID NO: 161450 - DNA, 296 bp, Homo sapiens
  chr8:145745869-145746165
  hypo
tgcggctctgctgccgggacctgcgagctgaggacctgcccatgcgcaacactgtggccctgctgcagcttctggatgcaggctgcctgcgccgcgtggacctgcgcttcaacaatctgggcctgcgcggcctgtctgtgatcatcccacacgtggcccgcttccagcacctggccagcctgcggctccactatgtgcatggggattcaaggcagccctccgtggatggcgaggacaacttccgctacttccttgcccagatgggccgcttcacctgtctgcgtgagctcagcatg

SEQ ID NO: 161451 - DNA, 30 bp, Homo sapiens; identical to SEQ ID NO: 77121
  chr8:145746818-145746848
  hypo

SEQ ID NO: 161452 - DNA, 31 bp, Homo sapiens; identical to SEQ ID NO: 77122
  chr8:145751952-145751983
  hypo

SEQ ID NO: 161453 - DNA, 406 bp, Homo sapiens
  chr8:145753289-145753695
  hypo
tcctgagcgcaggacgcccactccttggtgcgctgggcccgtcggcagagtcggggagcccatcaggggctgcccggaagggagaaagaaggggctggagagggaggcacagcattacctttgaagcaggtgatgaaattcttcattttggaatcatccaggaaaagctgcagatagagggccaggccgtgataagtcccagcgtgcaggtgggggcggggaagctcaggaggtcctgaagctcgggaggtcctgaaccggcccgagcccacttttcctgcttgtctgtgcacaccgcatgcagggaggcgcgtgaaaggtaaacctgggggccccgccgacttatccgcgtctatgcgcacctctgctccctggtcagccaattctttcccgcaccttttccctc

SEQ ID NO: 161454 - DNA, 265 bp, Homo sapiens
  chr8:145758477-145758742
  hypo
cccacacccggcgcccggggttgccgtggcacctgaagatgccctctgtctggtcaccgttgagcgccagcacctcctcagagagccgtgtctgcacccagggcagctggcgctcggggtagcgctctctctgcatgcccatgacctcctgcagtgcgctgccgaacatggacgggctgaacacggcgttcttggcatgccggatctcctccacgttgggcttcttcagcccctgtgaagacagaggctccgtcctggtctggcc

SEQ ID NO: 161455 - DNA, 58 bp, Homo sapiens; identical to SEQ ID NO: 22976
  chr8:145763000-145763058
  hypo

SEQ ID NO: 161456 - DNA, 403 bp, Homo sapiens; identical to SEQ ID NO: 77126
  chr8:145770757-145771160
  hypo

SEQ ID NO: 161457 - DNA, 567 bp, Homo sapiens; identical to SEQ ID NO: 77127
  chr8:145772640-145773207
  hypo

SEQ ID NO: 161458 - DNA, 30 bp, Homo sapiens; identical to SEQ ID NO: 77128
  chr8:145773912-145773942
  hypo

SEQ ID NO: 161459 - DNA, 31 bp, Homo sapiens; identical to SEQ ID NO: 77129
  chr8:145777265-145777296
  hypo

SEQ ID NO: 161460 - DNA, 36 bp, Homo sapiens; identical to SEQ ID NO: 77130
  chr8:145779198-145779234
  hypo

SEQ ID NO: 161461 - DNA, 31 bp, Homo sapiens; identical to SEQ ID NO: 77131
  chr8:145780239-145780270
  hypo

SEQ ID NO: 161462 - DNA, 122 bp, Homo sapiens; identical to SEQ ID NO: 77132
  chr8:145780879-145781001
  hypo

SEQ ID NO: 161463 - DNA, 30 bp, Homo sapiens; identical to SEQ ID NO: 77133
  chr8:145785517-145785547
  hypo

SEQ ID NO: 161464 - DNA, 189 bp, Homo sapiens
  chr8:145804871-145805060
  hypo
taccgacaccaacaccgtcttcccggtgtgctccagtggctcctccacacctgatttgccccacctcctgcccactctgcagcaggccccatccctggcctccctttcatcctgccagaccgggtccacgggatgaacctgctgcccgcctccctctgtgcctgcacctcggcacggtgggacggaagc

SEQ ID NO: 161465 - DNA, 140 bp, Homo sapiens
  chr8:145805452-145805592
  hypo
cgtcctctctggactcgcttcccacggtgcactcacctcgaggcccttgcgctctaccctgacctctccctgtttctgagggcaggggtctcctgggctcccaccaacacaggctgtgctccttcggagccactgtgact

SEQ ID NO: 161466 - DNA, 30 bp, Homo sapiens; identical to SEQ ID NO: 77135
  chr8:145807540-145807570
  hypo

SEQ ID NO: 161467 - DNA, 171 bp, Homo sapiens; identical to SEQ ID NO: 77136
  chr8:145811090-145811261
  hypo

SEQ ID NO: 161468 - DNA, 572 bp, Homo sapiens
  chr8:145813605-145814177
  hypo
caagacagagcagggccgccccgagggctcctgagcacgcatcctgcgtgagggaaccaggcaggggcctgcaggctgtgcgctgcattgaggctcatggaggcacaaaaccaacggtgatgccagaggctgactgcccggtggggcacatcatgagcctgcacctcctcgaacacttctctgcacacacgtatgttagctaacatgttttcagaggaagagaaatgtgcctcaccctatggggaggtggccctaagcctccctcagcagccaggaagagcagccgtatgcagcagggacagaactgtggggaccgcggagagcggcagactgggtgcgggaggcggggctctcgccaagccatctggagaaactcggcccagggcccgaaggggaaggtaagacccagtagggctggggacccagctggccacctgaagcccacggcctgtctccgtcaaacccagcgagggtcagactcacagccggaggcagcacggcggcacgggggaacacagcaaagcctcagcagcctcagctgggccaccatggccaacgtgggcaggactctt

SEQ ID NO: 161469 - DNA, 282 bp, Homo sapiens; identical to SEQ ID NO: 77138
  chr8:145814543-145814825
  hypo

SEQ ID NO: 161470 - DNA, 176 bp, Homo sapiens; identical to SEQ ID NO: 77139
  chr8:145815416-145815592
  hypo

SEQ ID NO: 161471 - DNA, 30 bp, Homo sapiens
  chr8:145822104-145822134
  hypo
actgccggggtcctcggcgaagataagaaa

SEQ ID NO: 161472 - DNA, 291 bp, Homo sapiens; identical to SEQ ID NO: 77140
  chr8:145823325-145823616
  hypo

SEQ ID NO: 161473 - DNA, 97 bp, Homo sapiens; identical to SEQ ID NO: 77141
  chr8:145826422-145826519
  hypo

SEQ ID NO: 161474 - DNA, 37 bp, Homo sapiens; identical to SEQ ID NO: 77142
  chr8:145826578-145826615
  hypo

SEQ ID NO: 161475 - DNA, 31 bp, Homo sapiens; identical to SEQ ID NO: 77143
  chr8:145827337-145827368
  hypo

SEQ ID NO: 161476 - DNA, 307 bp, Homo sapiens; identical to SEQ ID NO: 77144
  chr8:145828363-145828670
  hypo

SEQ ID NO: 161477 - DNA, 31 bp, Homo sapiens; identical to SEQ ID NO: 77145
  chr8:145829405-145829436
  hypo

SEQ ID NO: 161478 - DNA, 31 bp, Homo sapiens; identical to SEQ ID NO: 77146
  chr8:145830861-145830892
  hypo

SEQ ID NO: 161479 - DNA, 262 bp, Homo sapiens; identical to SEQ ID NO: 77147
  chr8:145831270-145831532
  hypo

SEQ ID NO: 161480 - DNA, 79 bp, Homo sapiens; identical to SEQ ID NO: 77148
  chr8:145843551-145843630
  hypo

SEQ ID NO: 161481 - DNA, 65 bp, Homo sapiens; identical to SEQ ID NO: 77149
  chr8:145844222-145844287
  hypo

SEQ ID NO: 161482 - DNA, 473 bp, Homo sapiens; identical to SEQ ID NO: 77150
  chr8:145844495-145844968
  hypo

SEQ ID NO: 161483 - DNA, 667 bp, Homo sapiens; identical to SEQ ID NO: 77151
  chr8:145845208-145845875
  hypo

SEQ ID NO: 161484 - DNA, 168 bp, Homo sapiens; identical to SEQ ID NO: 77152
  chr8:145849041-145849209
  hypo

SEQ ID NO: 161485 - DNA, 43 bp, Homo sapiens; identical to SEQ ID NO: 77153
  chr8:145849871-145849914
  hypo

SEQ ID NO: 161486 - DNA, 153 bp, Homo sapiens; identical to SEQ ID NO: 77154
  chr8:145852007-145852160
  hypo

SEQ ID NO: 161487 - DNA, 31 bp, Homo sapiens; identical to SEQ ID NO: 77155
  chr8:145852645-145852676
  hypo

SEQ ID NO: 161488 - DNA, 70 bp, Homo sapiens; identical to SEQ ID NO: 77156
  chr8:145854281-145854351
  hypo

SEQ ID NO: 161489 - DNA, 114 bp, Homo sapiens; identical to SEQ ID NO: 77157
  chr8:145854688-145854802
  hypo

SEQ ID NO: 161490 - DNA, 250 bp, Homo sapiens; identical to SEQ ID NO: 117344
  chr8:145910531-145910781
  hypo

SEQ ID NO: 161491 - DNA, 543 bp, Homo sapiens; identical to SEQ ID NO: 117345
  chr8:145910993-145911536
  hypo

SEQ ID NO: 161492 - DNA, 30 bp, Homo sapiens; identical to SEQ ID NO: 117346
  chr8:145925692-145925722
  hypo

SEQ ID NO: 161493 - DNA, 30 bp, Homo sapiens; identical to SEQ ID NO: 117347
  chr8:145926024-145926054
  hypo

SEQ ID NO: 161494 - DNA, 30 bp, Homo sapiens; identical to SEQ ID NO: 77160
  chr8:145955001-145955031
  hypo

SEQ ID NO: 161495 - DNA, 100 bp, Homo sapiens; identical to SEQ ID NO: 77161
  chr8:145978672-145978772
  hypo

SEQ ID NO: 161496 - DNA, 193 bp, Homo sapiens
  chr8:145979451-145979644
  hypo
agatcagactgatacccggggacaaggggcaggaccctcttctttgggatccaaagagccaaagcagcctcccaagctcctcagaggcccccactgcgaaccaggccaagtgcagagagcctcacccagagaggccacgttcccatagttctccagcatcacatcccggtagagcgcccgctgctgggggccc

SEQ ID NO: 161497 - DNA, 30 bp, Homo sapiens
  chr8:146000753-146000783
  hypo
tcccaggtacacacgcgccagaaatgtatt

SEQ ID NO: 161498 - DNA, 17 bp, Homo sapiens
  chr8:146009536-146009553
  hypo
tacgtctccagaaaaaa

SEQ ID NO: 161499 - DNA, 30 bp, Homo sapiens; identical to SEQ ID NO: 22988
  chr8:146019250-146019280
  hypo

SEQ ID NO: 161500 - DNA, 254 bp, Homo sapiens; identical to SEQ ID NO: 77165
  chr8:146033023-146033277
  hypo

SEQ ID NO: 161501 - DNA, 30 bp, Homo sapiens
  chr8:146033505-146033535
  hypo
gcaaggccttcggtcgcaagtccaacctca

SEQ ID NO: 161502 - DNA, 336 bp, Homo sapiens
  chr8:146036125-146036461
  hypo
ttcacacccacagcacggacagcgggaataacacttcctttggggatccagggtttctggtgtctccagatttttcaggcgccaccatgttcctctcatccagacgtcagcacccaaggtggaagcaggtcatggcatgcccggcccagctgcagtccgagtgcagatcccatggcgagcgtgggatccagcccaaagcacaagccacgcacagcccgccaggttgagtgggcaggtacctccaacagccagcccaggttgagtgggcaggtacctccaacagcctggagccgtgaggccttgcgcaggggcgttgccggccgtggaggtctctgg

SEQ ID NO: 161503 - DNA, 30 bp, Homo sapiens; identical to SEQ ID NO: 77167
  chr8:146037120-146037150
  hypo

SEQ ID NO: 161504 - DNA, 204 bp, Homo sapiens; identical to SEQ ID NO: 77168
  chr8:146046146-146046350
  hypo

SEQ ID NO: 161505 - DNA, 185 bp, Homo sapiens; identical to SEQ ID NO: 45967
  chr8:146052021-146052206
  hypo

SEQ ID NO: 161506 - DNA, 20 bp, Homo sapiens
  chr8:146056880-146056900
  hypo
tcttagggccgggcgcggtg

SEQ ID NO: 161507 - DNA, 37 bp, Homo sapiens; identical to SEQ ID NO: 6662
  chr8:146078070-146078107
  hypo

SEQ ID NO: 161508 - DNA, 139 bp, Homo sapiens
  chr8:146079240-146079379
  hypo
ggctattagagaaatgcgaatggaagccacggggaggtgccatttcataccattagaagggttataataaaaatgacaggttgggtgcggtggctcacgcctgtaatcccagcactttgggaggcggaggtggacaacc

SEQ ID NO: 161509 - DNA, 85 bp, Homo sapiens; identical to SEQ ID NO: 22992
  chr8:146105088-146105173
  hypo

SEQ ID NO: 161510 - DNA, 218 bp, Homo sapiens; identical to SEQ ID NO: 77173
  chr8:146176521-146176739
  hypo

SEQ ID NO: 161511 - DNA, 30 bp, Homo sapiens
  chr8:146237701-146237731
  hypo
gaacatgcttggcgtcgactccatgggcat

SEQ ID NO: 161512 - DNA, 83 bp, Homo sapiens
  chr8:146301129-146301212
  hypo
agccagcgagcactccgccgagactctacacagctctttgcttcagacccaaggccatggctgagctcaccaggggacctcct

SEQ ID NO: 161513 - DNA, 23 bp, Homo sapiens
  chr8:146301271-146301294
  hypo
tccctaaccgccccccttggctg

SEQ ID NO: 161514 - DNA, 1 bp, Homo sapiens
  chr9:113511-113512
  hypo
t

SEQ ID NO: 161515 - DNA, 315 bp, Homo sapiens; identical to SEQ ID NO: 117365
  chr9:113549-113864
  hypo

SEQ ID NO: 161516 - DNA, 2 bp, Homo sapiens
  chr9:113881-113883
  hypo
cg

SEQ ID NO: 161517 - DNA, 401 bp, Homo sapiens; identical to SEQ ID NO: 45974
  chr9:113897-114298
  hypo

SEQ ID NO: 161518 - DNA, 83 bp, Homo sapiens; identical to SEQ ID NO: 22996
  chr9:173862-173945
  hypo

SEQ ID NO: 161519 - DNA, 23 bp, Homo sapiens
  chr9:174124-174147
  hypo
caacacagcgagactccatctca

SEQ ID NO: 161520 - DNA, 981 bp, Homo sapiens; identical to SEQ ID NO: 117371
  chr9:214544-215525
  hypo

SEQ ID NO: 161521 - DNA, 29 bp, Homo sapiens
  chr9:252237-252266
  hypo
gctgggattacaagcgtgagccaccgtgc

SEQ ID NO: 161522 - DNA, 19 bp, Homo sapiens
  chr9:265216-265235
  hypo
ccaccgtgcccggcctaaa

SEQ ID NO: 161523 - DNA, 22 bp, Homo sapiens
  chr9:280965-280987
  hypo
aaaaggggttgggcacggtggc

SEQ ID NO: 161524 - DNA, 30 bp, Homo sapiens
  chr9:328097-328127
  hypo
ccgcatcaagtcaggcgagatctgcagtct

SEQ ID NO: 161525 - DNA, 31 bp, Homo sapiens
  chr9:377163-377194
  hypo
agctcttccagctgtccgtgcagcccatggt

SEQ ID NO: 161526 - DNA, 35 bp, Homo sapiens
  chr9:413856-413891
  hypo
aggctgggcgctcggcggctcacgcctataatctc

SEQ ID NO: 161527 - DNA, 1827 bp, Homo sapiens; identical to SEQ ID NO: 45979
  chr9:503915-505742
  hypo

SEQ ID NO: 161528 - DNA, 100 bp, Homo sapiens
  chr9:573569-573669
  hypo
aaggattttttttttaaagccagaagtaatataagtcggtatcagtgagaaaaggtggtgaggatagcagggattaagtaagtcgcgggcattttatttt

SEQ ID NO: 161529 - DNA, 30 bp, Homo sapiens
  chr9:574147-574177
  hypo
ttgaaaagcgcagctcgcacccactcttcc

SEQ ID NO: 161530 - DNA, 36 bp, Homo sapiens
  chr9:671595-671631
  hypo
acagagcgaaactccgtctcaaaaaaaaaaaagagt

SEQ ID NO: 161531 - DNA, 138 bp, Homo sapiens; identical to SEQ ID NO: 45980
  chr9:706972-707110
  hypo

SEQ ID NO: 161532 - DNA, 239 bp, Homo sapiens; identical to SEQ ID NO: 45981
  chr9:707165-707404
  hypo

SEQ ID NO: 161533 - DNA, 79 bp, Homo sapiens; identical to SEQ ID NO: 77185
  chr9:738241-738320
  hypo

SEQ ID NO: 161534 - DNA, 95 bp, Homo sapiens
  chr9:738429-738524
  hypo
gcaacggcaacacagccctccattacagcgtgtcccactccaacttcgagattgtgaagctgctgttagatgccggtatgttggctgcccttcca

SEQ ID NO: 161535 - DNA, 30 bp, Homo sapiens
  chr9:738821-738851
  hypo
tcatgcgggcttggccggtttgcactcagg

SEQ ID NO: 161536 - DNA, 31 bp, Homo sapiens; identical to SEQ ID NO: 77186
  chr9:792361-792392
  hypo

SEQ ID NO: 161537 - DNA, 27 bp, Homo sapiens
  chr9:799202-799229
  hypo
ggcgtgagccaccgcgcccggcctcat

SEQ ID NO: 161538 - DNA, 582 bp, Homo sapiens; identical to SEQ ID NO: 6671
  chr9:841449-842031
  hypo

SEQ ID NO: 161539 - DNA, 30 bp, Homo sapiens; identical to SEQ ID NO: 6672
  chr9:842207-842237
  hypo

SEQ ID NO: 161540 - DNA, 137 bp, Homo sapiens; identical to SEQ ID NO: 6673
  chr9:842610-842747
  hypo

SEQ ID NO: 161541 - DNA, 74 bp, Homo sapiens; identical to SEQ ID NO: 46001
  chr9:1042426-1042500
  hypo

SEQ ID NO: 161542 - DNA, 369 bp, Homo sapiens; identical to SEQ ID NO: 46002
  chr9:1042615-1042984
  hypo

SEQ ID NO: 161543 - DNA, 30 bp, Homo sapiens; identical to SEQ ID NO: 6687
  chr9:1710358-1710388
  hypo

SEQ ID NO: 161544 - DNA, 30 bp, Homo sapiens; identical to SEQ ID NO: 6688
  chr9:1749159-1749189
  hypo

SEQ ID NO: 161545 - DNA, 30 bp, Homo sapiens
  chr9:1832959-1832989
  hypo
actgcacaatgtcctcgtcgctgaatataa

SEQ ID NO: 161546 - DNA, 30 bp, Homo sapiens
  chr9:1917452-1917482
  hypo
tttcgaggggggtggcgatttctgtggacg

SEQ ID NO: 161547 - DNA, 30 bp, Homo sapiens
  chr9:2011549-2011579
  hypo
ccaggcatttttggcggcagggtcaacaac

SEQ ID NO: 161548 - DNA, 457 bp, Homo sapiens; identical to SEQ ID NO: 77195
  chr9:2047358-2047815
  hypo

SEQ ID NO: 161549 - DNA, 150 bp, Homo sapiens
  chr9:2086729-2086879
  hypo
aggatgggttctttggttttccgcaccaccacttgcttgttggaaatagttgtattttcccttgcttactacacgtccgtccttcctcttgtgttatagattcggtggaaatacatgatagtggacgaaggccaccgaatgaagaatcac

SEQ ID NO: 161550 - DNA, 148 bp, Homo sapiens
  chr9:2115833-2115981
  hypo
caagaccgagctcaccgcatcgggcagcagaacgaggtccgggtactgaggctctgtaccgtgaacagcgtggaggaaaagatcctcgcggccgcaaaatacaagctgaacgtggatcagaaagtgatccaggcgggcatgtttgacc

SEQ ID NO: 161551 - DNA, 232 bp, Homo sapiens; identical to SEQ ID NO: 77197
  chr9:2170355-2170587
  hypo

SEQ ID NO: 161552 - DNA, 99 bp, Homo sapiens; identical to SEQ ID NO: 77198
  chr9:2170836-2170935
  hypo

SEQ ID NO: 161553 - DNA, 401 bp, Homo sapiens
  chr9:2177849-2178250
  hypo
ccagaggtagatttcttaactagcatatcagccttcagcatgtctctaagcttaaaatataatcaaagctaaagctgacatttatgtaaagtttataatgtatgcagtcaccagtttagagtcatagtatagatgtggaattatacttttggtttgtggaggtaatgaggaaaaaaaaaaacggttcccagatgaagcataacaaattaaatctcagtagtgtgtgtatataagccatgcatacaaggagttcaaactaccacttgcacagtggtatgtggctcttttccatctcgtactctatggtctcatggccacgtcgcggtgtctgttcacttccatgaagaggagaggttcttgtccaccaacacctgtgaaccgtaagaccagtgagtgccttt

SEQ ID NO: 161554 - DNA, 94 bp, Homo sapiens; identical to SEQ ID NO: 77200
  chr9:2272285-2272379
  hypo

SEQ ID NO: 161555 - DNA, 313 bp, Homo sapiens; identical to SEQ ID NO: 77201
  chr9:2717323-2717636
  hypo

SEQ ID NO: 161556 - DNA, 30 bp, Homo sapiens; identical to SEQ ID NO: 77202
  chr9:2717931-2717961
  hypo

SEQ ID NO: 161557 - DNA, 30 bp, Homo sapiens; identical to SEQ ID NO: 77203
  chr9:2718441-2718471
  hypo

SEQ ID NO: 161558 - DNA, 134 bp, Homo sapiens; identical to SEQ ID NO: 77204
  chr9:2718723-2718857
  hypo

SEQ ID NO: 161559 - DNA, 30 bp, Homo sapiens; identical to SEQ ID NO: 23011
  chr9:2726655-2726685
  hypo

SEQ ID NO: 161560 - DNA, 30 bp, Homo sapiens
  chr9:2816046-2816076
  hypo
gaagtagggttaaggcgtgtgcgtttttgg

SEQ ID NO: 161561 - DNA, 197 bp, Homo sapiens; identical to SEQ ID NO: 77206
  chr9:2876419-2876616
  hypo

SEQ ID NO: 161562 - DNA, 867 bp, Homo sapiens
  chr9:2933125-2933992
  hypo
cagccgctgccatgacgccggctgcagtggggtacaggagtaggtcgcgggtcctcaggtacagactctgaggtgtgcagcccctggagcctgcacctaggagcgcccccggaacctgctgccctgagaactcacccctgggagccccgggaatagggctgggcccagccaccccctggagggagagtagggaggtgaggcacagaaaatgggcagagagggtccccaagacagaactgggcccagggcggtgccgcgcttgcacgcggagcatgggggccgggcccgagacatggaactggggccccgcttcaggggcccagggcaagaagtgggagcggcacccacttcgaggacctgcccagtggcatgaccactgcgcccaacccgccgatggcgccaagttcctgcgcctcaggaagaggctccgtatggggccgcctgaggccgtatccccaggacctgccccacattaaggtgaccgctaagccagacaatcctgatggtgaggccccgtgcctgccatctgctcctggagacgccccccaaccccaggcatggccgtcagccggcgaggcggtactgaggcagggggcgcgtcctggtcattggagagtttcagcccagtgggtgaaccagacacactgttcaagggggcagcggttagtaagcaggacgagggggagccccaggccgcagggagaactcgtgacaacgtcacccctgccccagtcgtaggcccgggcccagtgaggacatgaagcccccgcctcaggctgcaaggaggcgccaccagggctgcaagctccacggagctggtgggacctggagacaggcgagaaccccgccccttccaatttggagcaa

SEQ ID NO: 161563 - DNA, 69 bp, Homo sapiens
  chr9:3262995-3263064
  hypo
ttctgaagcactgcacgagctgcctgggccaggtgattaagcgacgtgtatcttcgcagagtctgggca

SEQ ID NO: 161564 - DNA, 32 bp, Homo sapiens; identical to SEQ ID NO: 77209
  chr9:3469784-3469816
  hypo

SEQ ID NO: 161565 - DNA, 30 bp, Homo sapiens
  chr9:4106276-4106306
  hypo
tttctgtatacgtgacgcctcctaattaga

SEQ ID NO: 161566 - DNA, 30 bp, Homo sapiens
  chr9:4169688-4169718
  hypo
ggggtaaaagggcatcgagtctataaccta

SEQ ID NO: 161567 - DNA, 1404 bp, Homo sapiens; identical to SEQ ID NO: 117418
  chr9:4298791-4300195
  hypo

SEQ ID NO: 161568 - DNA, 41 bp, Homo sapiens; identical to SEQ ID NO: 77211
  chr9:4622942-4622983
  hypo

SEQ ID NO: 161569 - DNA, 30 bp, Homo sapiens; identical to SEQ ID NO: 77212
  chr9:4711601-4711631
  hypo

SEQ ID NO: 161570 - DNA, 79 bp, Homo sapiens; identical to SEQ ID NO: 77213
  chr9:4714887-4714966
  hypo

SEQ ID NO: 161571 - DNA, 31 bp, Homo sapiens; identical to SEQ ID NO: 77214
  chr9:4771251-4771282
  hypo

SEQ ID NO: 161572 - DNA, 161 bp, Homo sapiens; identical to SEQ ID NO: 77215
  chr9:4804633-4804794
  hypo

SEQ ID NO: 161573 - DNA, 30 bp, Homo sapiens
  chr9:4862372-4862402
  hypo
acctagtgccgctgacgttcgaactcagat

SEQ ID NO: 161574 - DNA, 209 bp, Homo sapiens; identical to SEQ ID NO: 77216
  chr9:4864400-4864609
  hypo

SEQ ID NO: 161575 - DNA, 44 bp, Homo sapiens; identical to SEQ ID NO: 23015
  chr9:4987436-4987480
  hypo

SEQ ID NO: 161576 - DNA, 100 bp, Homo sapiens; identical to SEQ ID NO: 6694
  chr9:5022027-5022127
  hypo

SEQ ID NO: 161577 - DNA, 30 bp, Homo sapiens; identical to SEQ ID NO: 77219
  chr9:5040720-5040750
  hypo

SEQ ID NO: 161578 - DNA, 30 bp, Homo sapiens; identical to SEQ ID NO: 77220
  chr9:5041298-5041328
  hypo

SEQ ID NO: 161579 - DNA, 249 bp, Homo sapiens; identical to SEQ ID NO: 6695
  chr9:5054639-5054888
  hypo

SEQ ID NO: 161580 - DNA, 30 bp, Homo sapiens; identical to SEQ ID NO: 6696
  chr9:5064973-5065003
  hypo

SEQ ID NO: 161581 - DNA, 129 bp, Homo sapiens; identical to SEQ ID NO: 6697
  chr9:5069923-5070052
  hypo

SEQ ID NO: 161582 - DNA, 30 bp, Homo sapiens; identical to SEQ ID NO: 6698
  chr9:5072525-5072555
  hypo

SEQ ID NO: 161583 - DNA, 63 bp, Homo sapiens; identical to SEQ ID NO: 6699
  chr9:5073736-5073799
  hypo

SEQ ID NO: 161584 - DNA, 30 bp, Homo sapiens; identical to SEQ ID NO: 6700
  chr9:5078415-5078445
  hypo

SEQ ID NO: 161585 - DNA, 153 bp, Homo sapiens; identical to SEQ ID NO: 6701
  chr9:5080227-5080380
  hypo

SEQ ID NO: 161586 - DNA, 100 bp, Homo sapiens; identical to SEQ ID NO: 6702
  chr9:5081711-5081811
  hypo

SEQ ID NO: 161587 - DNA, 30 bp, Homo sapiens; identical to SEQ ID NO: 6703
  chr9:5090773-5090803
  hypo

SEQ ID NO: 161588 - DNA, 30 bp, Homo sapiens; identical to SEQ ID NO: 23026
  chr9:5111405-5111435
  hypo

SEQ ID NO: 161589 - DNA, 30 bp, Homo sapiens; identical to SEQ ID NO: 77231
  chr9:5113987-5114017
  hypo

SEQ ID NO: 161590 - DNA, 27 bp, Homo sapiens
  chr9:5118101-5118128
  hypo
agtgagcggagacctcgccactgcact

SEQ ID NO: 161591 - DNA, 30 bp, Homo sapiens; identical to SEQ ID NO: 6704
  chr9:5123003-5123033
  hypo

SEQ ID NO: 161592 - DNA, 42 bp, Homo sapiens; identical to SEQ ID NO: 77234
  chr9:5418575-5418617
  hypo

SEQ ID NO: 161593 - DNA, 27 bp, Homo sapiens
  chr9:6077576-6077603
  hypo
ttaagactttcgggccgggtgtggtgg

SEQ ID NO: 161594 - DNA, 35 bp, Homo sapiens; identical to SEQ ID NO: 141669
  chr9:6183186-6183221
  hypo

SEQ ID NO: 161595 - DNA, 414 bp, Homo sapiens; identical to SEQ ID NO: 117443
  chr9:6412570-6412984
  hypo

SEQ ID NO: 161596 - DNA, 20 bp, Homo sapiens
  chr9:6423646-6423666
  hypo
ttttaaagaaaagtctcggc

SEQ ID NO: 161597 - DNA, 29 bp, Homo sapiens
  chr9:6462993-6463022
  hypo
tgagtgggccaggtgccgtggctcacgcc

SEQ ID NO: 161598 - DNA, 29 bp, Homo sapiens
  chr9:6463261-6463290
  hypo
caagagtgaaacttcgtctcaataaaaaa

SEQ ID NO: 161599 - DNA, 30 bp, Homo sapiens
  chr9:6517139-6517169
  hypo
cagtgcttttctagtcggcctcgcttgggt

SEQ ID NO: 161600 - DNA, 30 bp, Homo sapiens; identical to SEQ ID NO: 77240
  chr9:6549254-6549284
  hypo

SEQ ID NO: 161601 - DNA, 30 bp, Homo sapiens
  chr9:6577111-6577141
  hypo
gatgagaagacagcgcggaaaggcacagca

SEQ ID NO: 161602 - DNA, 30 bp, Homo sapiens; identical to SEQ ID NO: 6707
  chr9:6587038-6587068
  hypo

SEQ ID NO: 161603 - DNA, 81 bp, Homo sapiens; identical to SEQ ID NO: 77242
  chr9:6756347-6756428
  hypo

SEQ ID NO: 161604 - DNA, 30 bp, Homo sapiens
  chr9:6793129-6793159
  hypo
aaggtgattatccttcgatgctttaaatga

SEQ ID NO: 161605 - DNA, 25 bp, Homo sapiens
  chr9:6863517-6863542
  hypo
tgggcaccatggctcacggctgtaa

SEQ ID NO: 161606 - DNA, 220 bp, Homo sapiens
  chr9:6868324-6868544
  hypo
cgtgaagagagtttccgtaggtaacatagcattcatcccaggaaaccctgggaactttgaggtgtgccataaaaagcagtttgaaaatcggttaactggatcaccgatttgagccacccctcagtatccatgaactgttggttccaggttccattcacaataccaaaacctgtggctgctcacgtccctgatataaagtgcgtggtagttacccatgcac

SEQ ID NO: 161607 - DNA, 99 bp, Homo sapiens
  chr9:6868603-6868702
  hypo
tgctatgtaaatagttgttatcccgaattgtttagggaatactgaccagagaaacagtttgtacatgttcagtacagacacgaccgtttcccctccacg

SEQ ID NO: 161608 - DNA, 143 bp, Homo sapiens; identical to SEQ ID NO: 77246
  chr9:6883914-6884057
  hypo

SEQ ID NO: 161609 - DNA, 30 bp, Homo sapiens
  chr9:6945115-6945145
  hypo
ctcactgcacgaacccgtggacccgcacac

SEQ ID NO: 161610 - DNA, 30 bp, Homo sapiens
  chr9:6996614-6996644
  hypo
gtgtacagaggacgtcgtgagcatggcatt

SEQ ID NO: 161611 - DNA, 225 bp, Homo sapiens
  chr9:6997066-6997291
  hypo
atgcctcggtgcctgcgtttacaaagtagtgatggtagcagcacctgccgcatggaggaattgttttgagggttaaaaaagtgtttggcacataatgactgtttgttgttgctgttgtaaggagagggggaaagtgacagctgattggtaagggggagccaagttgtggccgttgaggagaaattttccaggaccagaatgggcgcagagcgatcagaactagga

SEQ ID NO: 161612 - DNA, 101 bp, Homo sapiens; identical to SEQ ID NO: 23035
  chr9:7028537-7028638
  hypo

SEQ ID NO: 161613 - DNA, 241 bp, Homo sapiens; identical to SEQ ID NO: 23036
  chr9:7028697-7028938
  hypo

SEQ ID NO: 161614 - DNA, 30 bp, Homo sapiens; identical to SEQ ID NO: 77249
  chr9:7032585-7032615
  hypo

SEQ ID NO: 161615 - DNA, 114 bp, Homo sapiens
  chr9:7032960-7033074
  hypo
cccagaactggataacgtcttgaattcaatttcccaactgacaacagcattggcatttttctttttcgaagagctctgaagcggctttgtagatcagagcgattgattttgaga

SEQ ID NO: 161616 - DNA, 30 bp, Homo sapiens; identical to SEQ ID NO: 6710
  chr9:7076080-7076110
  hypo

SEQ ID NO: 161617 - DNA, 31 bp, Homo sapiens; identical to SEQ ID NO: 23038
  chr9:7128644-7128675
  hypo

SEQ ID NO: 161618 - DNA, 30 bp, Homo sapiens
  chr9:7145693-7145723
  hypo
agccttcctagttctcgatctctagagcaa

SEQ ID NO: 161619 - DNA, 134 bp, Homo sapiens; identical to SEQ ID NO: 77253
  chr9:7164554-7164688
  hypo

SEQ ID NO: 161620 - DNA, 233 bp, Homo sapiens; identical to SEQ ID NO: 23040
  chr9:7172201-7172434
  hypo

SEQ ID NO: 161621 - DNA, 45 bp, Homo sapiens; identical to SEQ ID NO: 77255
  chr9:7392964-7393009
  hypo

SEQ ID NO: 161622 - DNA, 139 bp, Homo sapiens; identical to SEQ ID NO: 23041
  chr9:7785324-7785463
  hypo

SEQ ID NO: 161623 - DNA, 25 bp, Homo sapiens
  chr9:8087307-8087332
  hypo
aacgagacgccgtctcaaaaaaaaa

SEQ ID NO: 161624 - DNA, 30 bp, Homo sapiens
  chr9:8521524-8521554
  hypo
aatcttggtgggacacggcgaactggaaca

SEQ ID NO: 161625 - DNA, 31 bp, Homo sapiens; identical to SEQ ID NO: 23042
  chr9:10964598-10964629
  hypo

SEQ ID NO: 161626 - DNA, 24 bp, Homo sapiens
  chr9:12725577-12725601
  hypo
caccgcgcccggcctccatcattt

SEQ ID NO: 161627 - DNA, 1163 bp, Homo sapiens; identical to SEQ ID NO: 117461
  chr9:12775485-12776648
  hypo

SEQ ID NO: 161628 - DNA, 31 bp, Homo sapiens; identical to SEQ ID NO: 23044
  chr9:12910323-12910354
  hypo

SEQ ID NO: 161629 - DNA, 1141 bp, Homo sapiens; identical to SEQ ID NO: 117463
  chr9:13278634-13279775
  hypo

SEQ ID NO: 161630 - DNA, 190 bp, Homo sapiens; identical to SEQ ID NO: 77263
  chr9:13323278-13323468
  hypo

SEQ ID NO: 161631 - DNA, 193 bp, Homo sapiens; identical to SEQ ID NO: 77264
  chr9:13753040-13753233
  hypo

SEQ ID NO: 161632 - DNA, 30 bp, Homo sapiens
  chr9:13779774-13779804
  hypo
gttacacagtgagttcgtaatagaaagatt

SEQ ID NO: 161633 - DNA, 30 bp, Homo sapiens
  chr9:14007663-14007693
  hypo
cgcccagacagacaccggcacgcgggcaag

SEQ ID NO: 161634 - DNA, 22 bp, Homo sapiens
  chr9:14053523-14053545
  hypo
ctcggggcggggtgggaagtgt

SEQ ID NO: 161635 - DNA, 212 bp, Homo sapiens; identical to SEQ ID NO: 77266
  chr9:14232122-14232334
  hypo

SEQ ID NO: 161636 - DNA, 2813 bp, Homo sapiens; identical to SEQ ID NO: 117466
  chr9:14312997-14315810
  hypo

SEQ ID NO: 161637 - DNA, 45 bp, Homo sapiens; identical to SEQ ID NO: 23048
  chr9:14316249-14316294
  hypo

SEQ ID NO: 161638 - DNA, 846 bp, Homo sapiens; identical to SEQ ID NO: 6723
  chr9:14322292-14323138
  hypo

SEQ ID NO: 161639 - DNA, 97 bp, Homo sapiens; identical to SEQ ID NO: 77271
  chr9:14355599-14355696
  hypo

SEQ ID NO: 161640 - DNA, 31 bp, Homo sapiens; identical to SEQ ID NO: 23050
  chr9:14428822-14428853
  hypo

SEQ ID NO: 161641 - DNA, 43 bp, Homo sapiens; identical to SEQ ID NO: 77273
  chr9:14462633-14462676
  hypo

SEQ ID NO: 161642 - DNA, 207 bp, Homo sapiens; identical to SEQ ID NO: 23051
  chr9:14607838-14608045
  hypo

SEQ ID NO: 161643 - DNA, 181 bp, Homo sapiens; identical to SEQ ID NO: 77275
  chr9:14796911-14797092
  hypo

SEQ ID NO: 161644 - DNA, 133 bp, Homo sapiens; identical to SEQ ID NO: 77276
  chr9:14974058-14974191
  hypo

SEQ ID NO: 161645 - DNA, 35 bp, Homo sapiens; identical to SEQ ID NO: 77277
  chr9:14979216-14979251
  hypo

SEQ ID NO: 161646 - DNA, 22 bp, Homo sapiens
  chr9:15200707-15200729
  hypo
agatgctctggctgggcgtggt

SEQ ID NO: 161647 - DNA, 30 bp, Homo sapiens
  chr9:15232687-15232717
  hypo
cgcctagctgaggcgcgcaggcagcagccg

SEQ ID NO: 161648 - DNA, 29 bp, Homo sapiens
  chr9:15284961-15284990
  hypo
taactaagatcctttcggccgagctcggt

SEQ ID NO: 161649 - DNA, 623 bp, Homo sapiens; identical to SEQ ID NO: 117473
  chr9:15306322-15306945
  hypo

SEQ ID NO: 161650 - DNA, 393 bp, Homo sapiens; identical to SEQ ID NO: 117474
  chr9:15306998-15307391
  hypo

SEQ ID NO: 161651 - DNA, 31 bp, Homo sapiens; identical to SEQ ID NO: 77282
  chr9:15343233-15343264
  hypo

SEQ ID NO: 161652 - DNA, 64 bp, Homo sapiens; identical to SEQ ID NO: 23054
  chr9:15527747-15527811
  hypo

SEQ ID NO: 161653 - DNA, 37 bp, Homo sapiens; identical to SEQ ID NO: 23055
  chr9:15533121-15533158
  hypo

SEQ ID NO: 161654 - DNA, 93 bp, Homo sapiens; identical to SEQ ID NO: 77285
  chr9:15618918-15619011
  hypo

SEQ ID NO: 161655 - DNA, 31 bp, Homo sapiens; identical to SEQ ID NO: 77286
  chr9:15701646-15701677
  hypo

SEQ ID NO: 161656 - DNA, 29 bp, Homo sapiens
  chr9:15810502-15810531
  hypo
tggggctcgggcatggcgggctgcaggtc

SEQ ID NO: 161657 - DNA, 28 bp, Homo sapiens
  chr9:15810710-15810738
  hypo
gcccacgcccacccggaactcgcgctgc

SEQ ID NO: 161658 - DNA, 30 bp, Homo sapiens
  chr9:16132295-16132325
  hypo
cgatggtattgattccggacggctagggag

SEQ ID NO: 161659 - DNA, 30 bp, Homo sapiens
  chr9:16132583-16132613
  hypo
taaaaaagcacttgtcgtgggtcacagggc

SEQ ID NO: 161660 - DNA, 92 bp, Homo sapiens
  chr9:16144534-16144626
  hypo
acacttgggcagaatcgcacactaaataagtagtgaatttcgaatgttttgagagtatctctgatgagtcagaagtgcgctagtgaaacagt

SEQ ID NO: 161661 - DNA, 207 bp, Homo sapiens; identical to SEQ ID NO: 23056
  chr9:16268703-16268910
  hypo

SEQ ID NO: 161662 - DNA, 34 bp, Homo sapiens; identical to SEQ ID NO: 23057
  chr9:16828976-16829010
  hypo

SEQ ID NO: 161663 - DNA, 2067 bp, Homo sapiens; identical to SEQ ID NO: 117484
  chr9:16870006-16872073
  hypo

SEQ ID NO: 161664 - DNA, 37 bp, Homo sapiens; identical to SEQ ID NO: 23059
  chr9:16886661-16886698
  hypo

SEQ ID NO: 161665 - DNA, 30 bp, Homo sapiens; identical to SEQ ID NO: 46077
  chr9:16915005-16915035
  hypo

SEQ ID NO: 161666 - DNA, 43 bp, Homo sapiens; identical to SEQ ID NO: 77295
  chr9:17018076-17018119
  hypo

SEQ ID NO: 161667 - DNA, 760 bp, Homo sapiens; identical to SEQ ID NO: 117486
  chr9:17134993-17135753
  hypo

SEQ ID NO: 161668 - DNA, 30 bp, Homo sapiens; identical to SEQ ID NO: 117487
  chr9:17135820-17135850
  hypo

SEQ ID NO: 161669 - DNA, 88 bp, Homo sapiens
  chr9:17223002-17223090
  hypo
ttccaagcctcccaacgggtacttgaaaccatggatagcactgaaccctatgtacactacgttttttcctacacggtaataggcaggt

SEQ ID NO: 161670 - DNA, 581 bp, Homo sapiens; identical to SEQ ID NO: 117488
  chr9:17578710-17579291
  hypo

SEQ ID NO: 161671 - DNA, 408 bp, Homo sapiens; identical to SEQ ID NO: 117489
  chr9:17579402-17579810
  hypo

SEQ ID NO: 161672 - DNA, 29 bp, Homo sapiens
  chr9:17637854-17637883
  hypo
tcttaaaacactgatttcagccgggcgcg

SEQ ID NO: 161673 - DNA, 31 bp, Homo sapiens; identical to SEQ ID NO: 77299
  chr9:18527897-18527928
  hypo

SEQ ID NO: 161674 - DNA, 1126 bp, Homo sapiens; identical to SEQ ID NO: 77300
  chr9:18776737-18777863
  hypo

SEQ ID NO: 161675 - DNA, 21 bp, Homo sapiens
  chr9:18807364-18807385
  hypo
gggcgcggtagctcacgcctg

SEQ ID NO: 161676 - DNA, 181 bp, Homo sapiens
  chr9:19103983-19104164
  hypo
attataggcgtgagccaccgcacccggcccgtcgtcttaattgacagctgttgcctaccacaaaccccactgacaacagggcctggaagtggattgggtaacctgcttttaagtctcattgctacctctggcaatgattgtctcctgcctcactaaaatcaccttaataaaagagagagag

SEQ ID NO: 161677 - DNA, 20 bp, Homo sapiens
  chr9:19111070-19111090
  hypo
tttgagacggagtctcgctc

SEQ ID NO: 161678 - DNA, 20 bp, Homo sapiens
  chr9:19111329-19111349
  hypo
gccaccgcacctgggcaatt

SEQ ID NO: 161679 - DNA, 20 bp, Homo sapiens
  chr9:19220868-19220888
  hypo
agtgactcaaattttttgct

SEQ ID NO: 161680 - DNA, 30 bp, Homo sapiens
  chr9:19221405-19221435
  hypo
gtgtggtgcgtcatacgtgtagtcccagct

SEQ ID NO: 161681 - DNA, 22 bp, Homo sapiens
  chr9:19223394-19223416
  hypo
ccagctatgggccgggcgcagt

SEQ ID NO: 161682 - DNA, 31 bp, Homo sapiens; identical to SEQ ID NO: 77305
  chr9:19289482-19289513
  hypo

SEQ ID NO: 161683 - DNA, 95 bp, Homo sapiens
  chr9:19374748-19374843
  hypo
agcacaaaaactagccgcagtgcacacctgtagttcccaggcggtcaaggctgcagtgagccataccactgctcgccatccggggcgtaggagtg

SEQ ID NO: 161684 - DNA, 31 bp, Homo sapiens; identical to SEQ ID NO: 23064
  chr9:19376712-19376743
  hypo

SEQ ID NO: 161685 - DNA, 18 bp, Homo sapiens
  chr9:19396542-19396560
  hypo
gcccgatgagaaagatta

SEQ ID NO: 161686 - DNA, 33 bp, Homo sapiens
  chr9:19414877-19414910
  hypo
actattctacaatttcagcgaccaatacaattt

SEQ ID NO: 161687 - DNA, 45 bp, Homo sapiens; identical to SEQ ID NO: 23066
  chr9:19431390-19431435
  hypo

SEQ ID NO: 161688 - DNA, 30 bp, Homo sapiens
  chr9:19445118-19445148
  hypo
ctccgggaagaaggacgctcagccaccagc

SEQ ID NO: 161689 - DNA, 21 bp, Homo sapiens
  chr9:20514950-20514971
  hypo
ttttttttttttgagacggag

SEQ ID NO: 161690 - DNA, 2015 bp, Homo sapiens; identical to SEQ ID NO: 117501
  chr9:20620357-20622372
  hypo

SEQ ID NO: 161691 - DNA, 45 bp, Homo sapiens
  chr9:20778483-20778528
  hypo
gttggcgttacaggcgtgagctgccacgcccggccgaccaattct

SEQ ID NO: 161692 - DNA, 387 bp, Homo sapiens; identical to SEQ ID NO: 46090
  chr9:21031411-21031798
  hypo

SEQ ID NO: 161693 - DNA, 36 bp, Homo sapiens; identical to SEQ ID NO: 117503
  chr9:21032002-21032038
  hypo

SEQ ID NO: 161694 - DNA, 69 bp, Homo sapiens; identical to SEQ ID NO: 117508
  chr9:21802583-21802652
  hypo

SEQ ID NO: 161695 - DNA, 109 bp, Homo sapiens; identical to SEQ ID NO: 117516
  chr9:21971026-21971135
  hypo

SEQ ID NO: 161696 - DNA, 192 bp, Homo sapiens; identical to SEQ ID NO: 117522
  chr9:21995718-21995910
  hypo

SEQ ID NO: 161697 - DNA, 30 bp, Homo sapiens; identical to SEQ ID NO: 46106
  chr9:22062118-22062148
  hypo

SEQ ID NO: 161698 - DNA, 1031 bp, Homo sapiens; identical to SEQ ID NO: 46107
  chr9:22446678-22447709
  hypo

SEQ ID NO: 161699 - DNA, 682 bp, Homo sapiens; identical to SEQ ID NO: 117527
  chr9:23821051-23821733
  hypo

SEQ ID NO: 161700 - DNA, 113 bp, Homo sapiens; identical to SEQ ID NO: 117528
  chr9:23822017-23822130
  hypo

SEQ ID NO: 161701 - DNA, 92 bp, Homo sapiens; identical to SEQ ID NO: 117537
  chr9:25677512-25677604
  hypo

SEQ ID NO: 161702 - DNA, 990 bp, Homo sapiens; identical to SEQ ID NO: 117538
  chr9:25677627-25678617
  hypo

SEQ ID NO: 161703 - DNA, 24 bp, Homo sapiens
  chr9:26848497-26848521
  hypo
agcgagactccatctcaaaaaaag

SEQ ID NO: 161704 - DNA, 30 bp, Homo sapiens
  chr9:26849052-26849082
  hypo
agatatgaatcaagtcggtaggactgaaga

SEQ ID NO: 161705 - DNA, 85 bp, Homo sapiens
  chr9:26936773-26936858
  hypo
gttgttgcacctcccccggttgatgcaagcctctaccacttgagctgaagtgacttccaagaggatttaaaaggctgatgcccgg

SEQ ID NO: 161706 - DNA, 24 bp, Homo sapiens
  chr9:26958047-26958071
  hypo
gtcgctttgtttgctttttaacaa

SEQ ID NO: 161707 - DNA, 25 bp, Homo sapiens
  chr9:27080539-27080564
  hypo
aaaaaaaagacgtgaccaacaccaa

SEQ ID NO: 161708 - DNA, 226 bp, Homo sapiens; identical to SEQ ID NO: 23073
  chr9:27212708-27212934
  hypo

SEQ ID NO: 161709 - DNA, 168 bp, Homo sapiens; identical to SEQ ID NO: 23074
  chr9:27340152-27340320
  hypo

SEQ ID NO: 161710 - DNA, 43 bp, Homo sapiens
  chr9:27380601-27380644
  hypo
tattcaactaactctcattaacgatgactctgggccaaatggt

SEQ ID NO: 161711 - DNA, 567 bp, Homo sapiens; identical to SEQ ID NO: 46116
  chr9:27528536-27529103
  hypo

SEQ ID NO: 161712 - DNA, 764 bp, Homo sapiens; identical to SEQ ID NO: 6754
  chr9:27529157-27529921
  hypo

SEQ ID NO: 161713 - DNA, 19 bp, Homo sapiens
  chr9:27562908-27562927
  hypo
ccctaaagctcacttttat

SEQ ID NO: 161714 - DNA, 81 bp, Homo sapiens; identical to SEQ ID NO: 77325
  chr9:27610811-27610892
  hypo

SEQ ID NO: 161715 - DNA, 30 bp, Homo sapiens
  chr9:27763996-27764026
  hypo
gtcactgatgaatatcggttgatgactcat

SEQ ID NO: 161716 - DNA, 2837 bp, Homo sapiens; identical to SEQ ID NO: 117546
  chr9:29212210-29215047
  hypo

SEQ ID NO: 161717 - DNA, 28 bp, Homo sapiens
  chr9:29450348-29450376
  hypo
agtttcctaagatataaaatacggatta

SEQ ID NO: 161718 - DNA, 30 bp, Homo sapiens
  chr9:31280709-31280739
  hypo
taaattatgacgatccgttaccctgaaatt

SEQ ID NO: 161719 - DNA, 45 bp, Homo sapiens; identical to SEQ ID NO: 23080
  chr9:32481579-32481624
  hypo

SEQ ID NO: 161720 - DNA, 43 bp, Homo sapiens; identical to SEQ ID NO: 77329
  chr9:32516783-32516826
  hypo

SEQ ID NO: 161721 - DNA, 31 bp, Homo sapiens; identical to SEQ ID NO: 23081
  chr9:32547785-32547816
  hypo

SEQ ID NO: 161722 - DNA, 30 bp, Homo sapiens; identical to SEQ ID NO: 77331
  chr9:32567030-32567060
  hypo

SEQ ID NO: 161723 - DNA, 29 bp, Homo sapiens
  chr9:32582749-32582778
  hypo
agaaagagcaactgattggcccggcgcag

SEQ ID NO: 161724 - DNA, 110 bp, Homo sapiens
  chr9:32632957-32633067
  hypo
tgcgtttgaagtcagcgcagagctttagcctcttccggatgctgctttctgaatgggaaggaaaggctttttttatatcttccattcgtatcctccgtggccgatcttta

SEQ ID NO: 161725 - DNA, 31 bp, Homo sapiens; identical to SEQ ID NO: 23082
  chr9:32956634-32956665
  hypo

SEQ ID NO: 161726 - DNA, 44 bp, Homo sapiens; identical to SEQ ID NO: 23083
  chr9:32999673-32999717
  hypo

SEQ ID NO: 161727 - DNA, 103 bp, Homo sapiens; identical to SEQ ID NO: 77334
  chr9:32999956-33000059
  hypo

SEQ ID NO: 161728 - DNA, 31 bp, Homo sapiens
  chr9:33000346-33000377
  hypo
gggcacagtggctcacgcctgtaatcccaac

SEQ ID NO: 161729 - DNA, 174 bp, Homo sapiens; identical to SEQ ID NO: 77336
  chr9:33019797-33019971
  hypo

SEQ ID NO: 161730 - DNA, 85 bp, Homo sapiens
  chr9:33023516-33023601
  hypo
ggcctgacttacgtgatttttgtattacaaagccctagtacactgcctggtaatattagacgtttattaacggttggtttaaaca

SEQ ID NO: 161731 - DNA, 90 bp, Homo sapiens; identical to SEQ ID NO: 23085
  chr9:33077215-33077305
  hypo

SEQ ID NO: 161732 - DNA, 121 bp, Homo sapiens
  chr9:33077544-33077665
  hypo
aagaaagaagaaaagaaagaaaagaaaagaaagaaaagaaagagcactggtttggaaagattgctttttttttgagacggaatctcgcactgtcgcccgggctgaagagcacaatggcgcg

SEQ ID NO: 161733 - DNA, 30 bp, Homo sapiens; identical to SEQ ID NO: 23086
  chr9:33077904-33077934
  hypo

SEQ ID NO: 161734 - DNA, 30 bp, Homo sapiens; identical to SEQ ID NO: 23087
  chr9:33078201-33078231
  hypo

SEQ ID NO: 161735 - DNA, 16 bp, Homo sapiens
  chr9:33078603-33078619
  hypo
tcgaaccactgcactc

SEQ ID NO: 161736 - DNA, 210 bp, Homo sapiens; identical to SEQ ID NO: 23088
  chr9:33136434-33136644
  hypo

SEQ ID NO: 161737 - DNA, 79 bp, Homo sapiens; identical to SEQ ID NO: 77343
  chr9:33299615-33299694
  hypo

SEQ ID NO: 161738 - DNA, 31 bp, Homo sapiens; identical to SEQ ID NO: 77344
  chr9:33409492-33409523
  hypo

SEQ ID NO: 161739 - DNA, 121 bp, Homo sapiens; identical to SEQ ID NO: 77345
  chr9:33411412-33411533
  hypo

SEQ ID NO: 161740 - DNA, 30 bp, Homo sapiens
  chr9:33417914-33417944
  hypo
tcaactttgtacatgcgtcactcggctggg

SEQ ID NO: 161741 - DNA, 35 bp, Homo sapiens
  chr9:33418331-33418366
  hypo
ttccatcctgcgggccgacacgcccaacccagcca

SEQ ID NO: 161742 - DNA, 26 bp, Homo sapiens
  chr9:33425059-33425085
  hypo
cgcccggccttccctcagtttcttga

SEQ ID NO: 161743 - DNA, 32 bp, Homo sapiens; identical to SEQ ID NO: 77347
  chr9:33438854-33438886
  hypo

SEQ ID NO: 161744 - DNA, 810 bp, Homo sapiens
  chr9:33442162-33442972
  hypo
ccaggagtggggacacgatgggcacccaccaccaatgctggccggtcctggggggacagacactcatagtcagggacatggggggcagggcagaggagaggcaggctggggtgagctgggtgggggctgtactcacgtgaagactgcagagccccagcccgcaagggctgtaaaaaggcgggggccaaagtcccgggcagggttgacggcatagccggagttgaagcccatggaggtgccaatgaccaggaccaccaggcccacggtgaaggcctccaggcctcgggggacggggttgttgtaggggtcaacaatggccagcacacacacgataagggaggctgtgcctatgaactggggagtggggagaacagggtgagctgcagctccctccctttctctgacccctccttccatcccccgtcttccctctagctcttaaactcttgtcagcgcccgcccatgctcttctcctgaaagcaatggtgctagaatgtctgcgtgacaagaacccgctggagagccgcatgttttgtaagtacttgccaccatgttctgatgcgggttaccccacagattggagaaaccctgctacagtcgaggagtcctgtcccccaaccagcccatgagctaccaaggcaactcggtcccctccctgcgttcccctcacacgtccccagcccatacctggtcaaagaagccattgatcatatccaagtgtccagaggggtaggtagcaaagatgccggctgtgccattggggcccgaaacaaaaagctggttgtcggcgaagtgccagattgcatctgg

SEQ ID NO: 161745 - DNA, 518 bp, Homo sapiens
  chr9:33464101-33464619
  hypo
acggggagctgtgcccgagctgccaggaagccactgcggatctccacctgctcctccactagagacaagaatgggtcctgggtcagcctgctcctccctgtaagacaccctctactcccccaggtcctcctacggtgcccccaacggctgctcatcacaggtatttttcaacactcccccccaccaagtggcaaaggtgacgaaagggacatcgcatttgcctcaactgggtggggcattaatcgcccaacctcagcccagaggcaaaattttccactgcttggcacccccagtctggtttccgggcctgcacaagctgagtcttgcccctggccccctcccaccatgggcttccacacacctggggaattaggaacctgacaccctgctctctgcagagaccgagtgcctcacgttacaaccagaaatcaccactcccacccccaccaagaggtctgagtatctgtgctacacttcctagctccgtgccctaatacttcttacgtggtattcaggat

SEQ ID NO: 161746 - DNA, 31 bp, Homo sapiens; identical to SEQ ID NO: 77350
  chr9:33466348-33466379
  hypo

SEQ ID NO: 161747 - DNA, 33 bp, Homo sapiens; identical to SEQ ID NO: 23091
  chr9:33834157-33834190
  hypo

SEQ ID NO: 161748 - DNA, 34 bp, Homo sapiens
  chr9:33862120-33862154
  hypo
aattacaggcatgagccaccgtgcccggcctgtt

SEQ ID NO: 161749 - DNA, 30 bp, Homo sapiens
  chr9:33926631-33926661
  hypo
gcagcatctggagctcgtcatagccataga

SEQ ID NO: 161750 - DNA, 30 bp, Homo sapiens
  chr9:33926957-33926987
  hypo
gcaggccaggagttccgccatacactcacc

SEQ ID NO: 161751 - DNA, 30 bp, Homo sapiens; identical to SEQ ID NO: 23092
  chr9:34017624-34017654
  hypo

SEQ ID NO: 161752 - DNA, 20 bp, Homo sapiens
  chr9:34035212-34035232
  hypo
tcatacggctaggcgcggtg

SEQ ID NO: 161753 - DNA, 39 bp, Homo sapiens; identical to SEQ ID NO: 77354
  chr9:34046347-34046386
  hypo

SEQ ID NO: 161754 - DNA, 40 bp, Homo sapiens; identical to SEQ ID NO: 23093
  chr9:34050560-34050600
  hypo

SEQ ID NO: 161755 - DNA, 34 bp, Homo sapiens; identical to SEQ ID NO: 77356
  chr9:34062509-34062543
  hypo

SEQ ID NO: 161756 - DNA, 181 bp, Homo sapiens
  chr9:34062782-34062963
  hypo
gcctaggcaacaagagcgaaactgggtctcaaaaaaaaaaaaaatagtaacatgggctgtgtttagaaaatggcaatttagataacattttcacttctctgtaatttcaaattgcttttaatactcaggtcttacacccagcgaggtggctcacgcctctaatcccagcactttgggaagc

SEQ ID NO: 161757 - DNA, 93 bp, Homo sapiens
  chr9:34063202-34063295
  hypo
aacaaaaccaaacctcaggtgttacttttatgatctaaataatgtttaagcaaatatttagggctattgaaggttgtacgctttcagagagaa

SEQ ID NO: 161758 - DNA, 30 bp, Homo sapiens; identical to SEQ ID NO: 77359
  chr9:34134601-34134631
  hypo

SEQ ID NO: 161759 - DNA, 30 bp, Homo sapiens
  chr9:34142790-34142820
  hypo
aggtgtgagccgccgcgccggcccaggatt

SEQ ID NO: 161760 - DNA, 44 bp, Homo sapiens; identical to SEQ ID NO: 77360
  chr9:34148341-34148385
  hypo

SEQ ID NO: 161761 - DNA, 18 bp, Homo sapiens
  chr9:34162680-34162698
  hypo
tgccttggccttacctct

SEQ ID NO: 161762 - DNA, 20 bp, Homo sapiens
  chr9:34180817-34180837
  hypo
atttttttccagagggagtc

SEQ ID NO: 161763 - DNA, 167 bp, Homo sapiens; identical to SEQ ID NO: 23095
  chr9:34224347-34224514
  hypo

SEQ ID NO: 161764 - DNA, 41 bp, Homo sapiens; identical to SEQ ID NO: 77363
  chr9:34230331-34230372
  hypo

SEQ ID NO: 161765 - DNA, 30 bp, Homo sapiens
  chr9:34249478-34249508
  hypo
catgcaagggcctgtcgtgttgtggcgctt

SEQ ID NO: 161766 - DNA, 36 bp, Homo sapiens; identical to SEQ ID NO: 23096
  chr9:34276111-34276147
  hypo

SEQ ID NO: 161767 - DNA, 82 bp, Homo sapiens; identical to SEQ ID NO: 77365
  chr9:34316316-34316398
  hypo

SEQ ID NO: 161768 - DNA, 707 bp, Homo sapiens; identical to SEQ ID NO: 77366
  chr9:34318261-34318968
  hypo

SEQ ID NO: 161769 - DNA, 909 bp, Homo sapiens
  chr9:34372074-34372983
  hypo
gacgtctgagcccacgcacactcggtagctcagctctggcgctgcggcgcggccggcgggtggcttgtagggcgtgtcgtggtagcgcgcctgaagccgcagcgagcgctccgtgctgttccagcccaggtggaagggcactgagtcattgactttgatggcggccgcgcgcgaagatagccagtagcgctcgaggatgcccccaaacgcggcgtcggaggagtagacatcgctggtgacgaacggctggggctcctgctggccatccaggcggatgggccagtgttgcgtcctcatctcggcgccaccataccagtgggccgccgcgtcgcccaagaacatggcgtgctccacggcccggcccggcgctgcctcctcccagcgcacgcggtagcacatgaccgtgtccttgggccgcacagtctggatgaagaagtgcagcggcagcccgtcggccgtgagcgagcagcccagcagggcgccatcgcggctgcaggagtcaaggtccagcgcgccggagcggaaggccaggcggaagacctgctctcccttctgattgcggatggagaagccgccagctttcaggtccagcagctccgcgcgaagtcgctccgccttgcgtagggagacgctgtagtagcaccaggccaccaccgcggccagcacaagcagcagccccagaaccgcggagcccagcagcggcttcaggtctttggaaggcttgggcttggcaggtgagaagttgtcgggcaggaaggtgtacatagctgcggctgcgatggcctcggggttctgacgctatgcgtagcagccaggccggcggcggcgggggtaggcctggctcttctcctgagggttctggagcattagtgggctgctaagaaaggagcgggccgtggggccatctga

SEQ ID NO: 161770 - DNA, 193 bp, Homo sapiens
  chr9:34401059-34401252
  hypo
ggatctcatctaaccggtagccgtccttcagcagctggatgttcaaatcttggttgatctgctgtaggcaaaggggagggaggtcaggcccgagcggcagggaggcaccacccacagctctgcggccactccaggccgtctgcgccccagtccagccagtgccctggatatcagccccgccctgtcccgggtc

SEQ ID NO: 161771 - DNA, 30 bp, Homo sapiens
  chr9:34552722-34552752
  hypo
tagcgtgggcggctacgctccagtcactcc

SEQ ID NO: 161772 - DNA, 30 bp, Homo sapiens
  chr9:34574217-34574247
  hypo
ggtcaggggccagctcgtgggctggggccg

SEQ ID NO: 161773 - DNA, 163 bp, Homo sapiens
  chr9:34574689-34574852
  hypo
tgtgacctccacagccggagatggggtcctggaggggacaagattccgatggattttggcagcggcctggactcagtgctcaaaacccccattcccagcctcttgcaccgtggggaccctgagatcagcatgtgcgtgccctgctgcacgtgtgtgcgggcgt

SEQ ID NO: 161774 - DNA, 31 bp, Homo sapiens; identical to SEQ ID NO: 23100
  chr9:34583938-34583969
  hypo

SEQ ID NO: 161775 - DNA, 519 bp, Homo sapiens; identical to SEQ ID NO: 117576
  chr9:34591176-34591695
  hypo

SEQ ID NO: 161776 - DNA, 78 bp, Homo sapiens; identical to SEQ ID NO: 117578
  chr9:34646924-34647002
  hypo

SEQ ID NO: 161777 - DNA, 232 bp, Homo sapiens
  chr9:34971409-34971641
  hypo
gagctgccagggtcccgccgtggcactgtagagggctccgtccaggaggtacaggaggagaaggaagcagaagcaggaacctcggtggtccaggaagagagtagtgccggccgcgcagcctgggagcggctccgagatgggcgcggcgtggagcctgaggagtttgacaggacaagtcgattcacaccccctgcgttcatccgccccacccggaagctggatgatgacaaac

SEQ ID NO: 161778 - DNA, 30 bp, Homo sapiens
  chr9:34992689-34992719
  hypo
ggccaggacagctggcggaagacccaggcc

SEQ ID NO: 161779 - DNA, 34 bp, Homo sapiens; identical to SEQ ID NO: 6768
  chr9:35072283-35072317
  hypo

SEQ ID NO: 161780 - DNA, 923 bp, Homo sapiens; identical to SEQ ID NO: 117595
  chr9:35161756-35162679
  hypo

SEQ ID NO: 161781 - DNA, 22 bp, Homo sapiens
  chr9:35177011-35177033
  hypo
cctgacctcaggtgatccaccc

SEQ ID NO: 161782 - DNA, 30 bp, Homo sapiens; identical to SEQ ID NO: 77376
  chr9:35560072-35560102
  hypo

SEQ ID NO: 161783 - DNA, 30 bp, Homo sapiens; identical to SEQ ID NO: 23105
  chr9:35563519-35563549
  hypo

SEQ ID NO: 161784 - DNA, 74 bp, Homo sapiens; identical to SEQ ID NO: 23106
  chr9:35608229-35608303
  hypo

SEQ ID NO: 161785 - DNA, 285 bp, Homo sapiens
  chr9:35609215-35609500
  hypo
caggtcctggccctcccgctgtgggcccctcggctgaagagaagatggagtgcgagggcagcagccctgagccggaacctccagggccagcgccccagctgcctctggctgtggccacagacaacttcatcagcacctgttcctcggcctcccaaccctggtcccctagatcaggacccgtcctcaataacaatcccccagctgtggtggtgaactccccacaaggctgggctggggagccctggaaccgggcccagcatagcctgccccgggcggcagccctgg

SEQ ID NO: 161786 - DNA, 30 bp, Homo sapiens; identical to SEQ ID NO: 77380
  chr9:35609838-35609868
  hypo

SEQ ID NO: 161787 - DNA, 146 bp, Homo sapiens
  chr9:35649868-35650014
  hypo
ggcataggcctgatccgggaaggaggcccgggccctgcgggtctgggcacatactgaggcatagagctccggctcggggcccgaggcctgggactttggctcagagtccagcaccacctccgagtacttgacgggggttccaggac

SEQ ID NO: 161788 - DNA, 30 bp, Homo sapiens
  chr9:35650494-35650524
  hypo
ccaccgtccctgccccggatggctcctgct

SEQ ID NO: 161789 - DNA, 30 bp, Homo sapiens; identical to SEQ ID NO: 77381
  chr9:35666808-35666838
  hypo

SEQ ID NO: 161790 - DNA, 27 bp, Homo sapiens
  chr9:35670794-35670821
  hypo
tttttttttttgaaacagtctcgcttt

SEQ ID NO: 161791 - DNA, 494 bp, Homo sapiens; identical to SEQ ID NO: 117607
  chr9:35675837-35676331
  hypo

SEQ ID NO: 161792 - DNA, 193 bp, Homo sapiens
  chr9:35689363-35689556
  hypo
ctactgggatggaagcggaataacataaaagggacagtacagtcaagggtactggtgggacccgttgagggtacagagaaaacttcaggccccaaggagcaggaccaaccgcgctctgcaaaggcagagtggaaaccaggggcctggggcttccccaggctattgtaggggagagaagcggctctggcgaagg

SEQ ID NO: 161793 - DNA, 14 bp, Homo sapiens
  chr9:35690126-35690140
  hypo
ggaggaaaaagtgg

SEQ ID NO: 161794 - DNA, 134 bp, Homo sapiens
  chr9:35690163-35690297
  hypo
cggcgatgcgaaggggaggggacccttgggctgggggctccgtgcttcctctgagtgacagccggacccagtggcagctgcggctggggcccctggggctatttcggggcgtgagctcacggcagctgcccggg

SEQ ID NO: 161795 - DNA, 31 bp, Homo sapiens; identical to SEQ ID NO: 23108
  chr9:35694371-35694402
  hypo

SEQ ID NO: 161796 - DNA, 31 bp, Homo sapiens; identical to SEQ ID NO: 6775
  chr9:35700411-35700442
  hypo

SEQ ID NO: 161797 - DNA, 30 bp, Homo sapiens; identical to SEQ ID NO: 23110
  chr9:35711673-35711703
  hypo

SEQ ID NO: 161798 - DNA, 352 bp, Homo sapiens; identical to SEQ ID NO: 77387
  chr9:35711910-35712262
  hypo

SEQ ID NO: 161799 - DNA, 71 bp, Homo sapiens
  chr9:35712950-35713021
  hypo
gcactgcaggatctgacgtcagtgcagcgactcccctagcggcctgggccagtgaccgcagcccacctgcc

SEQ ID NO: 161800 - DNA, 30 bp, Homo sapiens; identical to SEQ ID NO: 23112
  chr9:35713223-35713253
  hypo

SEQ ID NO: 161801 - DNA, 29 bp, Homo sapiens
  chr9:35774424-35774453
  hypo
aaaaacatggaagtacttggccgggcgcg

SEQ ID NO: 161802 - DNA, 30 bp, Homo sapiens; identical to SEQ ID NO: 23113
  chr9:35792942-35792972
  hypo

SEQ ID NO: 161803 - DNA, 30 bp, Homo sapiens; identical to SEQ ID NO: 23114
  chr9:35810229-35810259
  hypo

SEQ ID NO: 161804 - DNA, 146 bp, Homo sapiens; identical to SEQ ID NO: 117614
  chr9:35814689-35814835
  hypo

SEQ ID NO: 161805 - DNA, 318 bp, Homo sapiens
  chr9:35869774-35870092
  hypo
aggcagcagcaggatggagcccgccagcaggaagtcttcgctgaccgacgtgttgccgcatgccagcttcagcactgccaggatcttgcaggtgaagtgactgaccacgtggtggccacagaagggcagcctcatggagatgaccatctcagtcaccgacttgaggaggcagaggacccaggcagctcccatcagcagcacgcagagccggtggctcatgagcacgtggtacctgagtggctggcagatggccaggtagcggtcataggccgtgatggccagtagcaggcactccgtggagcccgtggacaggctcag

SEQ ID NO: 161806 - DNA, 30 bp, Homo sapiens; identical to SEQ ID NO: 23116
  chr9:36035973-36036003
  hypo

SEQ ID NO: 161807 - DNA, 113 bp, Homo sapiens
  chr9:36118827-36118940
  hypo
ggatcgcgtggcagtcgattactatggggactgccaggccgtcggagtcctctcagagcacagctccgtcgccgagtgtgcttctgtcaagtgtccttcgctcttggcagctg

SEQ ID NO: 161808 - DNA, 30 bp, Homo sapiens
  chr9:36126720-36126750
  hypo
caccatgttgtctcccggcccaaagcaaaa

SEQ ID NO: 161809 - DNA, 30 bp, Homo sapiens
  chr9:36162401-36162431
  hypo
cgtggggaaggcgtccgcaagtgacgggtc

SEQ ID NO: 161810 - DNA, 36 bp, Homo sapiens
  chr9:36165534-36165570
  hypo
aggtgcggtggctaacgcctgtaatcccatacatta

SEQ ID NO: 161811 - DNA, 140 bp, Homo sapiens; identical to SEQ ID NO: 46165
  chr9:36257375-36257515
  hypo

SEQ ID NO: 161812 - DNA, 722 bp, Homo sapiens; identical to SEQ ID NO: 6783
  chr9:36257923-36258645
  hypo

SEQ ID NO: 161813 - DNA, 31 bp, Homo sapiens; identical to SEQ ID NO: 77396
  chr9:36274720-36274751
  hypo

SEQ ID NO: 161814 - DNA, 77 bp, Homo sapiens; identical to SEQ ID NO: 77397
  chr9:36303860-36303937
  hypo

SEQ ID NO: 161815 - DNA, 46 bp, Homo sapiens; identical to SEQ ID NO: 77398
  chr9:36318334-36318380
  hypo

SEQ ID NO: 161816 - DNA, 82 bp, Homo sapiens; identical to SEQ ID NO: 77399
  chr9:36320467-36320549
  hypo

SEQ ID NO: 161817 - DNA, 30 bp, Homo sapiens
  chr9:36328263-36328293
  hypo
gggagaggcaggcctcggccgacatggtag

SEQ ID NO: 161818 - DNA, 121 bp, Homo sapiens; identical to SEQ ID NO: 77400
  chr9:36478390-36478511
  hypo

SEQ ID NO: 161819 - DNA, 30 bp, Homo sapiens; identical to SEQ ID NO: 23119
  chr9:36483383-36483413
  hypo

SEQ ID NO: 161820 - DNA, 18 bp, Homo sapiens
  chr9:36492511-36492529
  hypo
tgtaagaaaatactgaag

SEQ ID NO: 161821 - DNA, 28 bp, Homo sapiens
  chr9:36657162-36657190
  hypo
gtgacgcgtgactgtattttaaatattg

SEQ ID NO: 161822 - DNA, 31 bp, Homo sapiens; identical to SEQ ID NO: 23120
  chr9:36880260-36880291
  hypo

SEQ ID NO: 161823 - DNA, 1072 bp, Homo sapiens; identical to SEQ ID NO: 46172
  chr9:37025279-37026351
  hypo

SEQ ID NO: 161824 - DNA, 838 bp, Homo sapiens; identical to SEQ ID NO: 6789
  chr9:37026433-37027271
  hypo

SEQ ID NO: 161825 - DNA, 772 bp, Homo sapiens; identical to SEQ ID NO: 6790
  chr9:37027324-37028096
  hypo

SEQ ID NO: 161826 - DNA, 1741 bp, Homo sapiens; identical to SEQ ID NO: 117637
  chr9:37035396-37037137
  hypo

SEQ ID NO: 161827 - DNA, 121 bp, Homo sapiens; identical to SEQ ID NO: 23126
  chr9:37118378-37118499
  hypo

SEQ ID NO: 161828 - DNA, 82 bp, Homo sapiens; identical to SEQ ID NO: 23127
  chr9:37118798-37118880
  hypo

SEQ ID NO: 161829 - DNA, 37 bp, Homo sapiens; identical to SEQ ID NO: 23128
  chr9:37119168-37119205
  hypo

SEQ ID NO: 161830 - DNA, 156 bp, Homo sapiens; identical to SEQ ID NO: 77412
  chr9:37119444-37119600
  hypo

SEQ ID NO: 161831 - DNA, 38 bp, Homo sapiens; identical to SEQ ID NO: 77413
  chr9:37122904-37122942
  hypo

SEQ ID NO: 161832 - DNA, 28 bp, Homo sapiens
  chr9:37216375-37216403
  hypo
catatgtttatcttggccatacgcggtg

SEQ ID NO: 161833 - DNA, 24 bp, Homo sapiens
  chr9:37227010-37227034
  hypo
gcgagactccgtctcaaaaaaaaa

SEQ ID NO: 161834 - DNA, 23 bp, Homo sapiens
  chr9:37289155-37289178
  hypo
tttttttctgaggtggagtctcg

SEQ ID NO: 161835 - DNA, 30 bp, Homo sapiens; identical to SEQ ID NO: 77417
  chr9:37340190-37340220
  hypo

SEQ ID NO: 161836 - DNA, 31 bp, Homo sapiens; identical to SEQ ID NO: 77418
  chr9:37377485-37377516
  hypo

SEQ ID NO: 161837 - DNA, 43 bp, Homo sapiens; identical to SEQ ID NO: 77419
  chr9:37380692-37380735
  hypo

SEQ ID NO: 161838 - DNA, 143 bp, Homo sapiens
  chr9:37409147-37409290
  hypo
cattgccaagcggcccgcccatgcgtgctgtggttacacggtcttcatgctggctggggagccccgagaactcgggtttggttcgtcctccaaacacgtgaacacgtgttgagcactgactgtgaattcggcagctgtgatgg

SEQ ID NO: 161839 - DNA, 491 bp, Homo sapiens; identical to SEQ ID NO: 77420
  chr9:37414523-37415014
  hypo

SEQ ID NO: 161840 - DNA, 30 bp, Homo sapiens; identical to SEQ ID NO: 23133
  chr9:37428904-37428934
  hypo

SEQ ID NO: 161841 - DNA, 100 bp, Homo sapiens; identical to SEQ ID NO: 23134
  chr9:37432302-37432402
  hypo

SEQ ID NO: 161842 - DNA, 44 bp, Homo sapiens; identical to SEQ ID NO: 77423
  chr9:37467933-37467977
  hypo

SEQ ID NO: 161843 - DNA, 85 bp, Homo sapiens
  chr9:37468276-37468361
  hypo
aagccactctcttttcacccacgcctttttctgcgtggcagttgctccgtggcagttgcaagccctcctttttctgtctggcagt

SEQ ID NO: 161844 - DNA, 138 bp, Homo sapiens
  chr9:37515930-37516068
  hypo
tgcatgatgcattctcggttgtttgagatctgctgaaagatggtcttactggttttgccctggaagatgatgttttcctgcaccagggccttggcacggccccgcacggcgatgccgtaggcccggaacgagtggatc

SEQ ID NO: 161845 - DNA, 30 bp, Homo sapiens; identical to SEQ ID NO: 77424
  chr9:37647493-37647523
  hypo

SEQ ID NO: 161846 - DNA, 31 bp, Homo sapiens
  chr9:37755252-37755283
  hypo
gtaagactccgtctttttttttttttttttt

SEQ ID NO: 161847 - DNA, 99 bp, Homo sapiens; identical to SEQ ID NO: 77425
  chr9:37778483-37778582
  hypo

SEQ ID NO: 161848 - DNA, 30 bp, Homo sapiens
  chr9:37799669-37799699
  hypo
cccaagtccaaagcccgcagaaccgagttt

SEQ ID NO: 161849 - DNA, 83 bp, Homo sapiens; identical to SEQ ID NO: 23137
  chr9:37871178-37871261
  hypo

SEQ ID NO: 161850 - DNA, 30 bp, Homo sapiens; identical to SEQ ID NO: 23138
  chr9:37914846-37914876
  hypo

SEQ ID NO: 161851 - DNA, 31 bp, Homo sapiens; identical to SEQ ID NO: 77428
  chr9:37918142-37918173
  hypo

SEQ ID NO: 161852 - DNA, 31 bp, Homo sapiens; identical to SEQ ID NO: 77429
  chr9:37919798-37919829
  hypo

SEQ ID NO: 161853 - DNA, 30 bp, Homo sapiens
  chr9:37921300-37921330
  hypo
agctccgcccctagccgctgtcgctcccac

SEQ ID NO: 161854 - DNA, 30 bp, Homo sapiens
  chr9:37921698-37921728
  hypo
ctgagaagcaggcggcgcactcgcttaggc

SEQ ID NO: 161855 - DNA, 224 bp, Homo sapiens
  chr9:37928526-37928750
  hypo
ctgctaaataccctacgacgcacagcacagcccccacaacaaagaataatgtagcccagcttcccacagtgcctaggctaaagccacaccactcgctagacggccagtgcctcaaattctgcatccacaacatgggaataaccagagtccacccttgctgctgtggtgaggggcagatgagaacctccacatgaagtgtgaacgtctgacgaatcccggctcgc

SEQ ID NO: 161856 - DNA, 438 bp, Homo sapiens
  chr9:37935343-37935781
  hypo
ctgcgaggttgtgttcggcctcggtggggcatacgcctttagtgccaggaggaaatgacgggcacacggcttgctctctggcagactgggaagtggtggggagttgttgaagggatggagggctgggatgtagagcactgctatggccacaggtgagcccctcatctctctgagcccgtctccttcagcgtaaagtgagttgctgtggggagtcagagagagctgactagggcttcagagtgtacaaaatcgtggtcctggaccacgattgcatttatgcctcacaacgatcctgagatgtaggaactattactctccccattgtacagatgcagaaatggaggccatacagctagtaagacgcagaatcgagatctgaaccagggagggattctggctccaggtggtctaccttcttagccacgatactctatgctt

SEQ ID NO: 161857 - DNA, 53 bp, Homo sapiens; identical to SEQ ID NO: 77431
  chr9:37948328-37948381
  hypo

SEQ ID NO: 161858 - DNA, 89 bp, Homo sapiens; identical to SEQ ID NO: 77432
  chr9:37948877-37948966
  hypo

SEQ ID NO: 161859 - DNA, 377 bp, Homo sapiens
  chr9:37950439-37950816
  hypo
gactggaagagctgacggtaaaactgcagggaaagaataaagatcctcactgcccatgagtggacacactcaaaatacattcctgtttacatgatggtctctgcgcggtagtggagggggtgagactcagccaggagaggcagaggcacggggcggtactgtggttggagtgtgctttgtccacagagacatggatgctgctccgaatggtggctctgctgcctgctggccaggcaagccactgaccaggcggcttctattaagcgaggatcatgccaacctctcttgggttgtgggaatgtaacaagtggccccgcaggaagggccaatgtagagcctgatgtggggcgagtcttaaccgacggcagctgcagcgt

SEQ ID NO: 161860 - DNA, 159 bp, Homo sapiens
  chr9:37955882-37956041
  hypo
tgcttctccagggggacggcaggatccaccctttctcctaggatcccgcagaactcagggctcccatgtttgataggcttaaagccccctccaggggcacgaagctggcgccgccggtcccgcgaaggtgagggggatgactgccgcttctcgttgcca

SEQ ID NO: 161861 - DNA, 46 bp, Homo sapiens
  chr9:37965535-37965581
  hypo
agggttggttttcctgagacccgatttactcaaatatctttttttt

SEQ ID NO: 161862 - DNA, 31 bp, Homo sapiens; identical to SEQ ID NO: 23141
  chr9:37973846-37973877
  hypo

SEQ ID NO: 161863 - DNA, 302 bp, Homo sapiens; identical to SEQ ID NO: 77435
  chr9:37974529-37974831
  hypo

SEQ ID NO: 161864 - DNA, 35 bp, Homo sapiens; identical to SEQ ID NO: 77436
  chr9:37985464-37985499
  hypo

SEQ ID NO: 161865 - DNA, 31 bp, Homo sapiens; identical to SEQ ID NO: 23143
  chr9:37985848-37985879
  hypo

SEQ ID NO: 161866 - DNA, 46 bp, Homo sapiens; identical to SEQ ID NO: 46184
  chr9:37998719-37998765
  hypo

SEQ ID NO: 161867 - DNA, 86 bp, Homo sapiens; identical to SEQ ID NO: 77439
  chr9:38005201-38005287
  hypo

SEQ ID NO: 161868 - DNA, 185 bp, Homo sapiens; identical to SEQ ID NO: 77440
  chr9:38012922-38013107
  hypo

SEQ ID NO: 161869 - DNA, 259 bp, Homo sapiens
  chr9:38022308-38022567
  hypo
aaggcagcaggtgcacagatgcgacgcgtcgactgcatcgtaattcaacactcattattcacctggctaaaaatgcggtttggtgtgtgacacaggcctgtcattgactgtgagagggtcactctgagagaatgatggcctggggctctttgtcttggcttgccgggagccctggccctctccccagctctgagggtcaggagggctccttgaaggtgagcaaatagcatttggggacgtgaggcggcagcagcagcac

SEQ ID NO: 161870 - DNA, 22 bp, Homo sapiens
  chr9:38033454-38033476
  hypo
aagatcacttgagcccgcgagt

SEQ ID NO: 161871 - DNA, 81 bp, Homo sapiens; identical to SEQ ID NO: 77443
  chr9:38033535-38033616
  hypo

SEQ ID NO: 161872 - DNA, 89 bp, Homo sapiens
  chr9:38033979-38034068
  hypo
attgatgaatgagctcgggtaataacggggctcacccttcgccattaaaaatattaacctcattcctggcccagcgatgtcataaaccc

SEQ ID NO: 161873 - DNA, 208 bp, Homo sapiens; identical to SEQ ID NO: 77444
  chr9:38042760-38042968
  hypo

SEQ ID NO: 161874 - DNA, 152 bp, Homo sapiens
  chr9:38045590-38045742
  hypo
gagtgagaccctgtctccaaaaaaaacaaagccacaacaataaacaatttgacaacatatcaatttcctaccactttgtaatgaacctgactatacaacgtgagatcctacacagcacaacacaggtacaataaaaacggtgcattttaaaa

SEQ ID NO: 161875 - DNA, 1325 bp, Homo sapiens; identical to SEQ ID NO: 46185
  chr9:38067582-38068907
  hypo

SEQ ID NO: 161876 - DNA, 93 bp, Homo sapiens; identical to SEQ ID NO: 77446
  chr9:38075104-38075197
  hypo

SEQ ID NO: 161877 - DNA, 94 bp, Homo sapiens; identical to SEQ ID NO: 77447
  chr9:38131871-38131965
  hypo

SEQ ID NO: 161878 - DNA, 30 bp, Homo sapiens; identical to SEQ ID NO: 77448
  chr9:38284366-38284396
  hypo

SEQ ID NO: 161879 - DNA, 179 bp, Homo sapiens; identical to SEQ ID NO: 77449
  chr9:38290208-38290387
  hypo

SEQ ID NO: 161880 - DNA, 155 bp, Homo sapiens
  chr9:38397124-38397279
  hypo
ccaggcactccaggccgggaccgtgtgggtaaacacctacaacatcgtcacctgccacacgccatttggagggtttaaggaatctggaaacgggagggagctgggtgaggatgggcttaaggcctacacagaggtaaagacggtcaccatcaagg

SEQ ID NO: 161881 - DNA, 54 bp, Homo sapiens
  chr9:38406327-38406381
  hypo
gctggttaaaaatttcgggcaaggtgaacggtggggctgcgatcgcaaccaggc

SEQ ID NO: 161882 - DNA, 30 bp, Homo sapiens
  chr9:38406649-38406679
  hypo
taacagctgtggcagcgcatgctctcttag

SEQ ID NO: 161883 - DNA, 31 bp, Homo sapiens; identical to SEQ ID NO: 77450
  chr9:38425342-38425373
  hypo

SEQ ID NO: 161884 - DNA, 30 bp, Homo sapiens; identical to SEQ ID NO: 77451
  chr9:38638884-38638914
  hypo

SEQ ID NO: 161885 - DNA, 37 bp, Homo sapiens; identical to SEQ ID NO: 77452
  chr9:38695224-38695261
  hypo

SEQ ID NO: 161886 - DNA, 37 bp, Homo sapiens; identical to SEQ ID NO: 77453
  chr9:38695500-38695537
  hypo

SEQ ID NO: 161887 - DNA, 31 bp, Homo sapiens; identical to SEQ ID NO: 77454
  chr9:38727292-38727323
  hypo

SEQ ID NO: 161888 - DNA, 34 bp, Homo sapiens; identical to SEQ ID NO: 77455
  chr9:39020900-39020934
  hypo

SEQ ID NO: 161889 - DNA, 45 bp, Homo sapiens; identical to SEQ ID NO: 77456
  chr9:43617174-43617219
  hypo

SEQ ID NO: 161890 - DNA, 30 bp, Homo sapiens
  chr9:66333568-66333598
  hypo
gcagtcgccggagcccgagggagcaccgtg

SEQ ID NO: 161891 - DNA, 59 bp, Homo sapiens; identical to SEQ ID NO: 46192
  chr9:66494098-66494157
  hypo

SEQ ID NO: 161892 - DNA, 30 bp, Homo sapiens; identical to SEQ ID NO: 6803
  chr9:68433449-68433479
  hypo

SEQ ID NO: 161893 - DNA, 41 bp, Homo sapiens
  chr9:71200384-71200425
  hypo
agaccggtatgggtccgtggccttttaggaacagagctaca

SEQ ID NO: 161894 - DNA, 30 bp, Homo sapiens; identical to SEQ ID NO: 77459
  chr9:71223868-71223898
  hypo

SEQ ID NO: 161895 - DNA, 30 bp, Homo sapiens
  chr9:71229691-71229721
  hypo
tagttgtgcaaacttcggcaagccacttca

SEQ ID NO: 161896 - DNA, 78 bp, Homo sapiens
  chr9:71230117-71230195
  hypo
ccgaagaacaaatcacgcctgaggggcctgagtggagaaagtaaggttaaatcactggaaccacgtatccatctgcaa

SEQ ID NO: 161897 - DNA, 31 bp, Homo sapiens
  chr9:71382231-71382262
  hypo
gggcgctgtggctcacgcctgtaatcccagc

SEQ ID NO: 161898 - DNA, 30 bp, Homo sapiens
  chr9:71383891-71383921
  hypo
ttagctagtcgtagtcgccctgttgggaaa

SEQ ID NO: 161899 - DNA, 30 bp, Homo sapiens
  chr9:71419312-71419342
  hypo
gggcccaccattcctcggggaggcaggggg

SEQ ID NO: 161900 - DNA, 43 bp, Homo sapiens; identical to SEQ ID NO: 23147
  chr9:71454999-71455042
  hypo

SEQ ID NO: 161901 - DNA, 30 bp, Homo sapiens
  chr9:71476563-71476593
  hypo
cttagaacagtgtggcgtatcgggccctct

SEQ ID NO: 161902 - DNA, 64 bp, Homo sapiens
  chr9:71482149-71482213
  hypo
ttggctctacaccctcggactccggctcccacgccaccctggcaggtgccggcctcaacatttg

SEQ ID NO: 161903 - DNA, 30 bp, Homo sapiens
  chr9:71491634-71491664
  hypo
tagatttaagacatacgctccattagcatt

SEQ ID NO: 161904 - DNA, 44 bp, Homo sapiens
  chr9:71495143-71495187
  hypo
tttcgcttttatgtacgtaaatataacttaaaaggtagagagag

SEQ ID NO: 161905 - DNA, 30 bp, Homo sapiens
  chr9:71539042-71539072
  hypo
aaaggaggccgggcgcggtaatcctagcac

SEQ ID NO: 161906 - DNA, 30 bp, Homo sapiens
  chr9:71549830-71549860
  hypo
acggtgcaattcaatcgccgccctaaaggc

SEQ ID NO: 161907 - DNA, 18 bp, Homo sapiens
  chr9:71575828-71575846
  hypo
ttaaaagcgtgtcaccgg

SEQ ID NO: 161908 - DNA, 19 bp, Homo sapiens
  chr9:71576122-71576141
  hypo
actccgtctcaaaaaaaaa

SEQ ID NO: 161909 - DNA, 19 bp, Homo sapiens
  chr9:71580596-71580615
  hypo
ggcagcggggcgcagcggt

SEQ ID NO: 161910 - DNA, 34 bp, Homo sapiens
  chr9:71583984-71584018
  hypo
tgttaaaactgtaaatgaggccgggcgcggtggc

SEQ ID NO: 161911 - DNA, 26 bp, Homo sapiens
  chr9:71592577-71592603
  hypo
ttttttttttcgagacggagtctcgc

SEQ ID NO: 161912 - DNA, 30 bp, Homo sapiens; identical to SEQ ID NO: 77463
  chr9:71605851-71605881
  hypo

SEQ ID NO: 161913 - DNA, 30 bp, Homo sapiens; identical to SEQ ID NO: 77464
  chr9:71606467-71606497
  hypo

SEQ ID NO: 161914 - DNA, 29 bp, Homo sapiens
  chr9:71608064-71608093
  hypo
cagactccgtctccaaaaaaaaaaaagtc

SEQ ID NO: 161915 - DNA, 83 bp, Homo sapiens; identical to SEQ ID NO: 77466
  chr9:71615752-71615835
  hypo

SEQ ID NO: 161916 - DNA, 36 bp, Homo sapiens; identical to SEQ ID NO: 77467
  chr9:71620575-71620611
  hypo

SEQ ID NO: 161917 - DNA, 30 bp, Homo sapiens; identical to SEQ ID NO: 77468
  chr9:71628891-71628921
  hypo

SEQ ID NO: 161918 - DNA, 18 bp, Homo sapiens
  chr9:71629491-71629509
  hypo
tttaaaactcatagaact

SEQ ID NO: 161919 - DNA, 36 bp, Homo sapiens; identical to SEQ ID NO: 77470
  chr9:71655283-71655319
  hypo

SEQ ID NO: 161920 - DNA, 103 bp, Homo sapiens
  chr9:71664071-71664174
  hypo
agggcccaactctgccggcaggtagcaccttccaacctcttcactttggactttataactgtcaggtataaagtcggttgtgtccttacgtttctcaaattct

SEQ ID NO: 161921 - DNA, 158 bp, Homo sapiens; identical to SEQ ID NO: 77471
  chr9:71669728-71669886
  hypo

SEQ ID NO: 161922 - DNA, 121 bp, Homo sapiens
  chr9:71734803-71734924
  hypo
agtaacctggcccaaccagttctgccatcgcagataggaacagaagacatatgaaaacctaacttcgacccccgcctgattccatctccaacctgaccaatcagcactccccacttctcaa

SEQ ID NO: 161923 - DNA, 43 bp, Homo sapiens; identical to SEQ ID NO: 46200
  chr9:71736562-71736605
  hypo

SEQ ID NO: 161924 - DNA, 104 bp, Homo sapiens; identical to SEQ ID NO: 77474
  chr9:71760274-71760378
  hypo

SEQ ID NO: 161925 - DNA, 711 bp, Homo sapiens; identical to SEQ ID NO: 46202
  chr9:71788549-71789260
  hypo

SEQ ID NO: 161926 - DNA, 36 bp, Homo sapiens
  chr9:71800809-71800845
  hypo
tttctttttttggagacggagtctcggttgcgcctg

SEQ ID NO: 161927 - DNA, 36 bp, Homo sapiens; identical to SEQ ID NO: 77477
  chr9:71800964-71801000
  hypo

SEQ ID NO: 161928 - DNA, 31 bp, Homo sapiens; identical to SEQ ID NO: 77478
  chr9:71836312-71836343
  hypo

SEQ ID NO: 161929 - DNA, 30 bp, Homo sapiens; identical to SEQ ID NO: 77479
  chr9:71863144-71863174
  hypo

SEQ ID NO: 161930 - DNA, 31 bp, Homo sapiens; identical to SEQ ID NO: 46204
  chr9:71881715-71881746
  hypo

SEQ ID NO: 161931 - DNA, 31 bp, Homo sapiens; identical to SEQ ID NO: 23151
  chr9:71884367-71884398
  hypo

SEQ ID NO: 161932 - DNA, 31 bp, Homo sapiens; identical to SEQ ID NO: 77482
  chr9:72271625-72271656
  hypo

SEQ ID NO: 161933 - DNA, 29 bp, Homo sapiens
  chr9:72289028-72289057
  hypo
gagatcgcgctactgcactccagccttgg

SEQ ID NO: 161934 - DNA, 34 bp, Homo sapiens
  chr9:72333374-72333408
  hypo
ggagtctggaactggcgtccgcttcaggcgtttg

SEQ ID NO: 161935 - DNA, 30 bp, Homo sapiens
  chr9:72334275-72334305
  hypo
aaaaatgaagattcccgcgtctaatctcca

SEQ ID NO: 161936 - DNA, 30 bp, Homo sapiens
  chr9:72362831-72362861
  hypo
ggagtttcgactctacgttgaccctgtggg

SEQ ID NO: 161937 - DNA, 31 bp, Homo sapiens; identical to SEQ ID NO: 6811
  chr9:72374873-72374904
  hypo

SEQ ID NO: 161938 - DNA, 30 bp, Homo sapiens
  chr9:72535630-72535660
  hypo
acttttatctgcccacggtagtaacacgat

SEQ ID NO: 161939 - DNA, 112 bp, Homo sapiens; identical to SEQ ID NO: 77486
  chr9:72832132-72832244
  hypo

SEQ ID NO: 161940 - DNA, 179 bp, Homo sapiens; identical to SEQ ID NO: 46210
  chr9:72874087-72874266
  hypo

SEQ ID NO: 161941 - DNA, 1696 bp, Homo sapiens; identical to SEQ ID NO: 46212
  chr9:73027342-73029038
  hypo

SEQ ID NO: 161942 - DNA, 31 bp, Homo sapiens; identical to SEQ ID NO: 46214
  chr9:73035699-73035730
  hypo

SEQ ID NO: 161943 - DNA, 35 bp, Homo sapiens
  chr9:73119014-73119049
  hypo
ttctcctgccaggtgcggtggctcacgcctgtaat

SEQ ID NO: 161944 - DNA, 61 bp, Homo sapiens; identical to SEQ ID NO: 77490
  chr9:73152152-73152213
  hypo

SEQ ID NO: 161945 - DNA, 30 bp, Homo sapiens
  chr9:73203462-73203492
  hypo
gcatttcagaaggcccgcacggggtacacc

SEQ ID NO: 161946 - DNA, 31 bp, Homo sapiens; identical to SEQ ID NO: 77491
  chr9:73220268-73220299
  hypo

SEQ ID NO: 161947 - DNA, 30 bp, Homo sapiens
  chr9:73594130-73594160
  hypo
tgccattccattgcccgttaacctacagac

SEQ ID NO: 161948 - DNA, 36 bp, Homo sapiens
  chr9:73984597-73984633
  hypo
gggaacagtcaatttttcaatcggggttatggttga

SEQ ID NO: 161949 - DNA, 266 bp, Homo sapiens; identical to SEQ ID NO: 6813
  chr9:74061492-74061758
  hypo

SEQ ID NO: 161950 - DNA, 330 bp, Homo sapiens; identical to SEQ ID NO: 6814
  chr9:74061787-74062117
  hypo

SEQ ID NO: 161951 - DNA, 17 bp, Homo sapiens
  chr9:74249330-74249347
  hypo
ggcgtgagcccctccat

SEQ ID NO: 161952 - DNA, 22 bp, Homo sapiens
  chr9:74348774-74348796
  hypo
tttgagacgcagtctcgctctg

SEQ ID NO: 161953 - DNA, 39 bp, Homo sapiens; identical to SEQ ID NO: 77495
  chr9:74418834-74418873
  hypo

SEQ ID NO: 161954 - DNA, 29 bp, Homo sapiens
  chr9:74507122-74507151
  hypo
ttcaggttttcaaagttgttccggctact

SEQ ID NO: 161955 - DNA, 30 bp, Homo sapiens
  chr9:74565842-74565872
  hypo
aatcaccaaaaaccgcgtgttaattagcaa

SEQ ID NO: 161956 - DNA, 31 bp, Homo sapiens; identical to SEQ ID NO: 23156
  chr9:74622982-74623013
  hypo

SEQ ID NO: 161957 - DNA, 280 bp, Homo sapiens; identical to SEQ ID NO: 117695
  chr9:74639981-74640261
  hypo

SEQ ID NO: 161958 - DNA, 32 bp, Homo sapiens
  chr9:74640498-74640530
  hypo
ttataggcgtgagccaccgcacccggccttgt

SEQ ID NO: 161959 - DNA, 155 bp, Homo sapiens; identical to SEQ ID NO: 77499
  chr9:74794875-74795030
  hypo

SEQ ID NO: 161960 - DNA, 214 bp, Homo sapiens; identical to SEQ ID NO: 23157
  chr9:74853848-74854062
  hypo

SEQ ID NO: 161961 - DNA, 23 bp, Homo sapiens
  chr9:74909194-74909217
  hypo
aaaagttatgagcaagtggggcg

SEQ ID NO: 161962 - DNA, 163 bp, Homo sapiens; identical to SEQ ID NO: 77502
  chr9:75005075-75005238
  hypo

SEQ ID NO: 161963 - DNA, 25 bp, Homo sapiens
  chr9:75042116-75042141
  hypo
ttttttttttttgagacgacggagt

SEQ ID NO: 161964 - DNA, 98 bp, Homo sapiens; identical to SEQ ID NO: 77504
  chr9:75049395-75049493
  hypo

SEQ ID NO: 161965 - DNA, 207 bp, Homo sapiens; identical to SEQ ID NO: 77505
  chr9:75083051-75083258
  hypo

SEQ ID NO: 161966 - DNA, 27 bp, Homo sapiens
  chr9:75095638-75095665
  hypo
gagggagggctgcgagggctgccagca

SEQ ID NO: 161967 - DNA, 21 bp, Homo sapiens
  chr9:75118600-75118621
  hypo
agactccgtctcaaaaaaaaa

SEQ ID NO: 161968 - DNA, 31 bp, Homo sapiens; identical to SEQ ID NO: 23160
  chr9:75130857-75130888
  hypo

SEQ ID NO: 161969 - DNA, 101 bp, Homo sapiens; identical to SEQ ID NO: 77509
  chr9:75136041-75136142
  hypo

SEQ ID NO: 161970 - DNA, 31 bp, Homo sapiens; identical to SEQ ID NO: 23161
  chr9:75160821-75160852
  hypo

SEQ ID NO: 161971 - DNA, 27 bp, Homo sapiens
  chr9:75255822-75255849
  hypo
aggtgtgagccacggtgcctggccttt

SEQ ID NO: 161972 - DNA, 31 bp, Homo sapiens; identical to SEQ ID NO: 77512
  chr9:75256673-75256704
  hypo

SEQ ID NO: 161973 - DNA, 135 bp, Homo sapiens
  chr9:75271060-75271195
  hypo
tgccatcttcggctccgtgggtgtttttccggtatccttaaaagccatcactgctgcgcggcttcctgacctacttgttccggcaagagtgaacagtggtgagtcaggagcaggtgcgggcggatcagagctcca

SEQ ID NO: 161974 - DNA, 168 bp, Homo sapiens; identical to SEQ ID NO: 77514
  chr9:75429002-75429170
  hypo

SEQ ID NO: 161975 - DNA, 27 bp, Homo sapiens
  chr9:75533857-75533884
  hypo
aaatggcttttttttttgagacgaagt

SEQ ID NO: 161976 - DNA, 27 bp, Homo sapiens
  chr9:75533943-75533970
  hypo
cctcccgggttcaagtgattctctggc

SEQ ID NO: 161977 - DNA, 156 bp, Homo sapiens; identical to SEQ ID NO: 77517
  chr9:75545773-75545929
  hypo

SEQ ID NO: 161978 - DNA, 125 bp, Homo sapiens; identical to SEQ ID NO: 77518
  chr9:75580430-75580555
  hypo

SEQ ID NO: 161979 - DNA, 26 bp, Homo sapiens
  chr9:75581592-75581618
  hypo
cctgagctaagcgcccggccattgac

SEQ ID NO: 161980 - DNA, 29 bp, Homo sapiens
  chr9:75630307-75630336
  hypo
gccacctcgtccagccagaaccaataaat

SEQ ID NO: 161981 - DNA, 77 bp, Homo sapiens; identical to SEQ ID NO: 23162
  chr9:75715151-75715228
  hypo

SEQ ID NO: 161982 - DNA, 16 bp, Homo sapiens
  chr9:75715287-75715303
  hypo
taggtgtggatgcagg

SEQ ID NO: 161983 - DNA, 275 bp, Homo sapiens; identical to SEQ ID NO: 23164
  chr9:76089531-76089806
  hypo

SEQ ID NO: 161984 - DNA, 30 bp, Homo sapiens; identical to SEQ ID NO: 46221
  chr9:76736854-76736884
  hypo

SEQ ID NO: 161985 - DNA, 35 bp, Homo sapiens; identical to SEQ ID NO: 77524
  chr9:76744463-76744498
  hypo

SEQ ID NO: 161986 - DNA, 649 bp, Homo sapiens; identical to SEQ ID NO: 46223
  chr9:77112691-77113340
  hypo

SEQ ID NO: 161987 - DNA, 150 bp, Homo sapiens; identical to SEQ ID NO: 6820
  chr9:77113558-77113708
  hypo

SEQ ID NO: 161988 - DNA, 669 bp, Homo sapiens; identical to SEQ ID NO: 117704
  chr9:77113805-77114474
  hypo

SEQ ID NO: 161989 - DNA, 24 bp, Homo sapiens
  chr9:77164924-77164948
  hypo
gagcccctgcgcccggccgattat

SEQ ID NO: 161990 - DNA, 158 bp, Homo sapiens
  chr9:77257379-77257537
  hypo
gaggtgcagaagcaccagcagcggctgcaggaacagcggcagcagcagagtggggaggcagaagcccttgccagggtgtacagcagcagcattagcaacggcctgagcaacctgaacaacgagaccagcggcacttatgccaacgggcacgtcattga

SEQ ID NO: 161991 - DNA, 30 bp, Homo sapiens
  chr9:77386334-77386364
  hypo
gcgcacacacacacacgcgcgcgcgcatga

SEQ ID NO: 161992 - DNA, 33 bp, Homo sapiens; identical to SEQ ID NO: 77529
  chr9:77401359-77401392
  hypo

SEQ ID NO: 161993 - DNA, 30 bp, Homo sapiens
  chr9:77566065-77566095
  hypo
agatctaggcaaaccgaggcatacctagat

SEQ ID NO: 161994 - DNA, 18 bp, Homo sapiens
  chr9:77644235-77644253
  hypo
attctggggccgggcgcg

SEQ ID NO: 161995 - DNA, 31 bp, Homo sapiens
  chr9:77645126-77645157
  hypo
caggcgtgagccgccacgctcggccaagtgt

SEQ ID NO: 161996 - DNA, 31 bp, Homo sapiens; identical to SEQ ID NO: 23168
  chr9:77648110-77648141
  hypo

SEQ ID NO: 161997 - DNA, 32 bp, Homo sapiens; identical to SEQ ID NO: 77532
  chr9:78017958-78017990
  hypo

SEQ ID NO: 161998 - DNA, 42 bp, Homo sapiens; identical to SEQ ID NO: 77533
  chr9:78550278-78550320
  hypo

SEQ ID NO: 161999 - DNA, 167 bp, Homo sapiens; identical to SEQ ID NO: 77534
  chr9:78557001-78557168
  hypo

SEQ ID NO: 162000 - DNA, 156 bp, Homo sapiens; identical to SEQ ID NO: 77535
  chr9:78682859-78683015
  hypo

SEQ ID NO: 162001 - DNA, 136 bp, Homo sapiens; identical to SEQ ID NO: 23169
  chr9:78686690-78686826
  hypo

SEQ ID NO: 162002 - DNA, 42 bp, Homo sapiens; identical to SEQ ID NO: 23170
  chr9:78775007-78775049
  hypo

SEQ ID NO: 162003 - DNA, 40 bp, Homo sapiens; identical to SEQ ID NO: 23171
  chr9:78866883-78866923
  hypo

SEQ ID NO: 162004 - DNA, 24 bp, Homo sapiens
  chr9:78983257-78983281
  hypo
tgggcacagtggttcacgcctgta

SEQ ID NO: 162005 - DNA, 67 bp, Homo sapiens; identical to SEQ ID NO: 77540
  chr9:78989901-78989968
  hypo

SEQ ID NO: 162006 - DNA, 41 bp, Homo sapiens; identical to SEQ ID NO: 77541
  chr9:79012635-79012676
  hypo

SEQ ID NO: 162007 - DNA, 41 bp, Homo sapiens; identical to SEQ ID NO: 77542
  chr9:79073373-79073414
  hypo

SEQ ID NO: 162008 - DNA, 23 bp, Homo sapiens
  chr9:79192191-79192214
  hypo
caagccaccgtgcctggccgatt

SEQ ID NO: 162009 - DNA, 181 bp, Homo sapiens; identical to SEQ ID NO: 77543
  chr9:79197273-79197454
  hypo

SEQ ID NO: 162010 - DNA, 30 bp, Homo sapiens
  chr9:79204236-79204266
  hypo
gtatagcaataaagtcgagagaagattcta

SEQ ID NO: 162011 - DNA, 79 bp, Homo sapiens; identical to SEQ ID NO: 77544
  chr9:79230961-79231040
  hypo

SEQ ID NO: 162012 - DNA, 23 bp, Homo sapiens
  chr9:79284932-79284955
  hypo
tcagtgacttaacaaaatcttcg

SEQ ID NO: 162013 - DNA, 23 bp, Homo sapiens
  chr9:79346936-79346959
  hypo
aaaattacacttggccgggcgcg

SEQ ID NO: 162014 - DNA, 30 bp, Homo sapiens; identical to SEQ ID NO: 77545
  chr9:79375717-79375747
  hypo

SEQ ID NO: 162015 - DNA, 110 bp, Homo sapiens
  chr9:79398984-79399094
  hypo
acccgggctcacctccgtccctccatatttgtcctccactttcacagatccctgggagaaatgcccggccgccatcttgggtcatcgatgagcctcgccctgtgcctggt

SEQ ID NO: 162016 - DNA, 27 bp, Homo sapiens
  chr9:79409227-79409254
  hypo
tggtggcaaagagcgcggcctccgagc

SEQ ID NO: 162017 - DNA, 37 bp, Homo sapiens; identical to SEQ ID NO: 23172
  chr9:79448381-79448418
  hypo

SEQ ID NO: 162018 - DNA, 728 bp, Homo sapiens; identical to SEQ ID NO: 46237
  chr9:79520836-79521564
  hypo

SEQ ID NO: 162019 - DNA, 1868 bp, Homo sapiens; identical to SEQ ID NO: 46242
  chr9:79630544-79632412
  hypo

SEQ ID NO: 162020 - DNA, 2557 bp, Homo sapiens; identical to SEQ ID NO: 117729
  chr9:79632891-79635448
  hypo

SEQ ID NO: 162021 - DNA, 31 bp, Homo sapiens; identical to SEQ ID NO: 77550
  chr9:79651146-79651177
  hypo

SEQ ID NO: 162022 - DNA, 30 bp, Homo sapiens; identical to SEQ ID NO: 77551
  chr9:79893264-79893294
  hypo

SEQ ID NO: 162023 - DNA, 30 bp, Homo sapiens
  chr9:80006973-80007003
  hypo
ccaaccctgtaatgtcggatcttcacactc

SEQ ID NO: 162024 - DNA, 125 bp, Homo sapiens
  chr9:80007509-80007634
  hypo
accaccagaataaagcgaatatggcaacaaagcaagtcacacgcatatatttgttctccagtgcatataaaaattatgtttataatgtagactattatgtacaatcacgtcgttaaaaaactata

SEQ ID NO: 162025 - DNA, 31 bp, Homo sapiens; identical to SEQ ID NO: 23176
  chr9:80015335-80015366
  hypo

SEQ ID NO: 162026 - DNA, 166 bp, Homo sapiens
  chr9:80064831-80064997
  hypo
cacagtgactcagacccctaccgcctccctgctcagacaagaaccttagaaacaaagagaacatgaggaattggcggtagttcatggtaccggacagactggaagctggacctgggccgaaggacatttggaattctgggattccgtgggcttatgcatcctcagg

SEQ ID NO: 162027 - DNA, 209 bp, Homo sapiens; identical to SEQ ID NO: 77554
  chr9:80076051-80076260
  hypo

SEQ ID NO: 162028 - DNA, 31 bp, Homo sapiens; identical to SEQ ID NO: 77555
  chr9:80113570-80113601
  hypo

SEQ ID NO: 162029 - DNA, 91 bp, Homo sapiens; identical to SEQ ID NO: 23177
  chr9:80116553-80116644
  hypo

SEQ ID NO: 162030 - DNA, 206 bp, Homo sapiens; identical to SEQ ID NO: 77557
  chr9:80137039-80137245
  hypo

SEQ ID NO: 162031 - DNA, 16 bp, Homo sapiens
  chr9:80140731-80140747
  hypo
gcgtgagccaccgcac

SEQ ID NO: 162032 - DNA, 31 bp, Homo sapiens; identical to SEQ ID NO: 77558
  chr9:80141356-80141387
  hypo

SEQ ID NO: 162033 - DNA, 30 bp, Homo sapiens; identical to SEQ ID NO: 77559
  chr9:80144062-80144092
  hypo

SEQ ID NO: 162034 - DNA, 17 bp, Homo sapiens
  chr9:80193189-80193206
  hypo
caaacaaaacaaaaaca

SEQ ID NO: 162035 - DNA, 22 bp, Homo sapiens
  chr9:80215543-80215565
  hypo
cagattagggccggacgcagtg

SEQ ID NO: 162036 - DNA, 44 bp, Homo sapiens
  chr9:80269585-80269629
  hypo
ctgggattacaggtgtgagctaccgctcccggccgcaagcacct

SEQ ID NO: 162037 - DNA, 31 bp, Homo sapiens; identical to SEQ ID NO: 23181
  chr9:80272559-80272590
  hypo

SEQ ID NO: 162038 - DNA, 90 bp, Homo sapiens
  chr9:80272829-80272919
  hypo
acaggcgtgagccgccgcgcccggcccaaaaacttcattttcaacacaaggaatacattcatgattccactgtaccgtgggagaagaagg

SEQ ID NO: 162039 - DNA, 38 bp, Homo sapiens; identical to SEQ ID NO: 23183
  chr9:80304149-80304187
  hypo

SEQ ID NO: 162040 - DNA, 35 bp, Homo sapiens; identical to SEQ ID NO: 23184
  chr9:80315385-80315420
  hypo

SEQ ID NO: 162041 - DNA, 42 bp, Homo sapiens; identical to SEQ ID NO: 23185
  chr9:80343171-80343213
  hypo

SEQ ID NO: 162042 - DNA, 30 bp, Homo sapiens
  chr9:80347555-80347585
  hypo
acaggcgtgagccaccgcacccggcaggat

SEQ ID NO: 162043 - DNA, 181 bp, Homo sapiens
  chr9:80390583-80390764
  hypo
gattacaggcatgagccaccacgcccagcctcctcatctctctttttatctttgccattctagcaagtaaaaaggcactttcactcatcaattgtgtttccgtaattatggcatgctgagatttacttttaaaattcagtttagatacttggggcgctgaggcacaagaatcacttgaacc

SEQ ID NO: 162044 - DNA, 21 bp, Homo sapiens
  chr9:80401003-80401024
  hypo
agttaacaagccaggcgcggt

SEQ ID NO: 162045 - DNA, 42 bp, Homo sapiens
  chr9:80420641-80420683
  hypo
agtggcaggttcaaaacaaagatcactcggtagcaggtgggt

SEQ ID NO: 162046 - DNA, 30 bp, Homo sapiens
  chr9:80465394-80465424
  hypo
gatctttttccagtccgttctccacagtgt

SEQ ID NO: 162047 - DNA, 150 bp, Homo sapiens
  chr9:80475566-80475716
  hypo
taatactcaggcagtgagtgctagttcgcccgcagctcactggtccatggcgcgggatgttcgggaccccttccataacacactgaacagtccccacaggactggaaggcagagcatttatttccctggctcttccgtggaggttgcctc

SEQ ID NO: 162048 - DNA, 31 bp, Homo sapiens; identical to SEQ ID NO: 77570
  chr9:80488591-80488622
  hypo

SEQ ID NO: 162049 - DNA, 38 bp, Homo sapiens; identical to SEQ ID NO: 77571
  chr9:80501725-80501763
  hypo

SEQ ID NO: 162050 - DNA, 22 bp, Homo sapiens
  chr9:80505318-80505340
  hypo
atatgagaattagaaacgtgtc

SEQ ID NO: 162051 - DNA, 90 bp, Homo sapiens; identical to SEQ ID NO: 23188
  chr9:80533773-80533863
  hypo

SEQ ID NO: 162052 - DNA, 30 bp, Homo sapiens; identical to SEQ ID NO: 23189
  chr9:80534762-80534792
  hypo

SEQ ID NO: 162053 - DNA, 28 bp, Homo sapiens
  chr9:80544457-80544485
  hypo
tgcaacaggctgggtgcggtggctcatg

SEQ ID NO: 162054 - DNA, 88 bp, Homo sapiens; identical to SEQ ID NO: 77576
  chr9:80544724-80544812
  hypo

SEQ ID NO: 162055 - DNA, 159 bp, Homo sapiens; identical to SEQ ID NO: 77577
  chr9:80546075-80546234
  hypo

SEQ ID NO: 162056 - DNA, 28 bp, Homo sapiens
  chr9:80555579-80555607
  hypo
tgtattttaaaatttgcaagtcggctgc

SEQ ID NO: 162057 - DNA, 204 bp, Homo sapiens
  chr9:80563223-80563427
  hypo
tccaaatcttgctcctcgcaggaacctcactggactgcaggctcactatcccaacacaggacacaaactgctagcactcatcagccagagatggccttttacccttttccagcaaagaaagggagactgaggcctgacacgggactactcagaaagcgggggacctagcggtagggatggaagaggacacggatgaaggaggac

SEQ ID NO: 162058 - DNA, 89 bp, Homo sapiens; identical to SEQ ID NO: 77580
  chr9:80570362-80570451
  hypo

SEQ ID NO: 162059 - DNA, 21 bp, Homo sapiens
  chr9:80582605-80582626
  hypo
ttcaggtctgctgggcgcggt

SEQ ID NO: 162060 - DNA, 80 bp, Homo sapiens; identical to SEQ ID NO: 77582
  chr9:80591581-80591661
  hypo

SEQ ID NO: 162061 - DNA, 30 bp, Homo sapiens; identical to SEQ ID NO: 23194
  chr9:80607204-80607234
  hypo

SEQ ID NO: 162062 - DNA, 31 bp, Homo sapiens; identical to SEQ ID NO: 77584
  chr9:80642698-80642729
  hypo

SEQ ID NO: 162063 - DNA, 2103 bp, Homo sapiens; identical to SEQ ID NO: 46250
  chr9:80645541-80647644
  hypo

SEQ ID NO: 162064 - DNA, 337 bp, Homo sapiens; identical to SEQ ID NO: 77586
  chr9:80833877-80834214
  hypo

SEQ ID NO: 162065 - DNA, 366 bp, Homo sapiens; identical to SEQ ID NO: 23197
  chr9:81892876-81893242
  hypo

SEQ ID NO: 162066 - DNA, 77 bp, Homo sapiens; identical to SEQ ID NO: 77588
  chr9:81897887-81897964
  hypo

SEQ ID NO: 162067 - DNA, 38 bp, Homo sapiens; identical to SEQ ID NO: 77589
  chr9:82082369-82082407
  hypo

SEQ ID NO: 162068 - DNA, 21 bp, Homo sapiens
  chr9:82115477-82115498
  hypo
ggccatcttggctcctcctaa

SEQ ID NO: 162069 - DNA, 1499 bp, Homo sapiens; identical to SEQ ID NO: 117741
  chr9:82185178-82186677
  hypo

SEQ ID NO: 162070 - DNA, 493 bp, Homo sapiens; identical to SEQ ID NO: 117742
  chr9:82187754-82188247
  hypo

SEQ ID NO: 162071 - DNA, 90 bp, Homo sapiens; identical to SEQ ID NO: 117743
  chr9:82188484-82188574
  hypo

SEQ ID NO: 162072 - DNA, 67 bp, Homo sapiens
  chr9:82275743-82275810
  hypo
atgatgtgagtgactcggggagacacgcttgttttgcagcaccctcctccgccgatcgctgaagcag

SEQ ID NO: 162073 - DNA, 50 bp, Homo sapiens
  chr9:82282621-82282671
  hypo
gatagtgtggagcttcgaagtcaggattttctacacgaccccaccctcaa

SEQ ID NO: 162074 - DNA, 30 bp, Homo sapiens; identical to SEQ ID NO: 6844
  chr9:82839233-82839263
  hypo

SEQ ID NO: 162075 - DNA, 30 bp, Homo sapiens; identical to SEQ ID NO: 117745
  chr9:83995005-83995035
  hypo

SEQ ID NO: 162076 - DNA, 30 bp, Homo sapiens; identical to SEQ ID NO: 117746
  chr9:83995056-83995086
  hypo

SEQ ID NO: 162077 - DNA, 121 bp, Homo sapiens; identical to SEQ ID NO: 77594
  chr9:84130017-84130138
  hypo

SEQ ID NO: 162078 - DNA, 27 bp, Homo sapiens
  chr9:84138514-84138541
  hypo
gggtgcggtggctcacgcctgtaatcc

SEQ ID NO: 162079 - DNA, 31 bp, Homo sapiens; identical to SEQ ID NO: 77595
  chr9:84205670-84205701
  hypo

SEQ ID NO: 162080 - DNA, 30 bp, Homo sapiens
  chr9:84206979-84207009
  hypo
aaatcggaacatggccgggcgcggtggctc

SEQ ID NO: 162081 - DNA, 187 bp, Homo sapiens; identical to SEQ ID NO: 77596
  chr9:84220197-84220384
  hypo

SEQ ID NO: 162082 - DNA, 30 bp, Homo sapiens
  chr9:84264611-84264641
  hypo
gctgcatttactctgcgcgcagctgctgct

SEQ ID NO: 162083 - DNA, 35 bp, Homo sapiens; identical to SEQ ID NO: 77597
  chr9:84281395-84281430
  hypo

SEQ ID NO: 162084 - DNA, 31 bp, Homo sapiens; identical to SEQ ID NO: 77598
  chr9:84291856-84291887
  hypo

SEQ ID NO: 162085 - DNA, 202 bp, Homo sapiens
  chr9:84294947-84295149
  hypo
agaacatcttaagtcctctggcgaaggacgctcctcaatttgcacgcacgaggtgctgggttctgcgggtgtatgctgggatggctcccaccatgcgagggaacaaacagacttttgtctagtctaaccctcattatacagagaggggaactgaagccagggaacgtgttcatgacttgcccagtcccgaatggaaatcccc

SEQ ID NO: 162086 - DNA, 1035 bp, Homo sapiens; identical to SEQ ID NO: 117747
  chr9:84302130-84303165
  hypo

SEQ ID NO: 162087 - DNA, 672 bp, Homo sapiens; identical to SEQ ID NO: 46257
  chr9:84303267-84303939
  hypo

SEQ ID NO: 162088 - DNA, 223 bp, Homo sapiens
  chr9:84441560-84441783
  hypo
aaagaggctgtgttgcgcggtggaattcattttcttgtttacttcctccagaaacaagagcatcatcagcacgctcagtgcatcggatcagaccgcggagttgttgacagaagcttggcgaggcctgccagctttccgcatgaaacgctggctttcttctcatacaccccctaccgtttgtgtctctgccaattgtagcacatcagagcggccattgagataa

SEQ ID NO: 162089 - DNA, 31 bp, Homo sapiens; identical to SEQ ID NO: 77603
  chr9:84456245-84456276
  hypo

SEQ ID NO: 162090 - DNA, 31 bp, Homo sapiens; identical to SEQ ID NO: 23202
  chr9:84460617-84460648
  hypo

SEQ ID NO: 162091 - DNA, 170 bp, Homo sapiens; identical to SEQ ID NO: 23203
  chr9:84530342-84530512
  hypo

SEQ ID NO: 162092 - DNA, 31 bp, Homo sapiens; identical to SEQ ID NO: 77606
  chr9:84640507-84640538
  hypo

SEQ ID NO: 162093 - DNA, 31 bp, Homo sapiens; identical to SEQ ID NO: 77607
  chr9:85076174-85076205
  hypo

SEQ ID NO: 162094 - DNA, 31 bp, Homo sapiens; identical to SEQ ID NO: 77608
  chr9:85485585-85485616
  hypo

SEQ ID NO: 162095 - DNA, 100 bp, Homo sapiens; identical to SEQ ID NO: 77609
  chr9:85673369-85673469
  hypo

SEQ ID NO: 162096 - DNA, 31 bp, Homo sapiens; identical to SEQ ID NO: 77610
  chr9:85683069-85683100
  hypo

SEQ ID NO: 162097 - DNA, 31 bp, Homo sapiens; identical to SEQ ID NO: 6848
  chr9:85834937-85834968
  hypo

SEQ ID NO: 162098 - DNA, 150 bp, Homo sapiens; identical to SEQ ID NO: 77612
  chr9:85843822-85843972
  hypo

SEQ ID NO: 162099 - DNA, 30 bp, Homo sapiens
  chr9:85890080-85890110
  hypo
agcatgggaccgagccgtcggcatggaggt

SEQ ID NO: 162100 - DNA, 31 bp, Homo sapiens; identical to SEQ ID NO: 77613
  chr9:85927653-85927684
  hypo

SEQ ID NO: 162101 - DNA, 31 bp, Homo sapiens; identical to SEQ ID NO: 23206
  chr9:85944983-85945014
  hypo

SEQ ID NO: 162102 - DNA, 31 bp, Homo sapiens; identical to SEQ ID NO: 77615
  chr9:85948467-85948498
  hypo

SEQ ID NO: 162103 - DNA, 31 bp, Homo sapiens; identical to SEQ ID NO: 77616
  chr9:86036211-86036242
  hypo

SEQ ID NO: 162104 - DNA, 30 bp, Homo sapiens
  chr9:86117057-86117087
  hypo
aaatacctaagcatgcgccacttcgaattc

SEQ ID NO: 162105 - DNA, 68 bp, Homo sapiens; identical to SEQ ID NO: 46261
  chr9:86152303-86152371
  hypo

SEQ ID NO: 162106 - DNA, 1390 bp, Homo sapiens; identical to SEQ ID NO: 46262
  chr9:86152381-86153771
  hypo

SEQ ID NO: 162107 - DNA, 340 bp, Homo sapiens; identical to SEQ ID NO: 46263
  chr9:86238305-86238645
  hypo

SEQ ID NO: 162108 - DNA, 31 bp, Homo sapiens; identical to SEQ ID NO: 77620
  chr9:86518262-86518293
  hypo

SEQ ID NO: 162109 - DNA, 25 bp, Homo sapiens
  chr9:86537041-86537066
  hypo
ttcttttcttttttttgagaccgag

SEQ ID NO: 162110 - DNA, 25 bp, Homo sapiens
  chr9:86537485-86537510
  hypo
gcccggccctatcaggactttttag

SEQ ID NO: 162111 - DNA, 30 bp, Homo sapiens
  chr9:86586579-86586609
  hypo
ttcttaccatgccgtcgtaacggtctccag

SEQ ID NO: 162112 - DNA, 189 bp, Homo sapiens
  chr9:86586838-86587027
  hypo
gctctgctaccaccccggccgcctcgtccgggaggagggggaggtggtcctcgacgagggctcatatcatcataatctcttctagatggaggcatgggacgcccaccccgaccaggaggcattctgtcaaaaccacctcttccccgcatgggaaatcccactgggcgtccgcgacggtcatcaaacatc

SEQ ID NO: 162113 - DNA, 410 bp, Homo sapiens
  chr9:86590176-86590586
  hypo
ataaaattagtggatcgtttgggtgggcaactcacggtaaaagttcagtgacaaaaagacttaatggggaaaataagacagaaacttgaaaaacaatacaccgtctaaaggggatactatttaattatataaaaggcaggtaataaaatacatttctctctttctaatcaggcagtgaggcataaactgttgggacataccgctcggggccactgctgtctgggactgaaacactggcattgtactgcattggtcattggcgttcgtggatgttggcattgggcatgggcattcaatcagaagttgtcaagtatggtacccgtttggcaacgagcacatttttgggcatagccaaccagggttttcacatgggcgttcaggggcggatgggccaacgtcatggtgggcaa

SEQ ID NO: 162114 - DNA, 34 bp, Homo sapiens; identical to SEQ ID NO: 23208
  chr9:86600600-86600634
  hypo

SEQ ID NO: 162115 - DNA, 31 bp, Homo sapiens; identical to SEQ ID NO: 23209
  chr9:86691067-86691098
  hypo

SEQ ID NO: 162116 - DNA, 30 bp, Homo sapiens
  chr9:86781874-86781904
  hypo
gggagcgggtgtgtacggagatcacaagga

SEQ ID NO: 162117 - DNA, 25 bp, Homo sapiens
  chr9:86964436-86964461
  hypo
ccaccacgtccggcttacttgtttt

SEQ ID NO: 162118 - DNA, 34 bp, Homo sapiens
  chr9:87655018-87655052
  hypo
atgaaatgagagaatcgaacgcctccacaaagaa

SEQ ID NO: 162119 - DNA, 121 bp, Homo sapiens; identical to SEQ ID NO: 77627
  chr9:87904206-87904327
  hypo

SEQ ID NO: 162120 - DNA, 29 bp, Homo sapiens
  chr9:88232863-88232892
  hypo
taaatttctagctgggcgcactggctcac

SEQ ID NO: 162121 - DNA, 17 bp, Homo sapiens
  chr9:88307210-88307227
  hypo
gacggagtcttgctgtc

SEQ ID NO: 162122 - DNA, 376 bp, Homo sapiens; identical to SEQ ID NO: 117767
  chr9:88355779-88356155
  hypo

SEQ ID NO: 162123 - DNA, 82 bp, Homo sapiens
  chr9:88490934-88491016
  hypo
tattctttcttggttccgctccaatagctaaattaaattaataggaattttttttttttttttttgagacagagtctcgctc

SEQ ID NO: 162124 - DNA, 30 bp, Homo sapiens; identical to SEQ ID NO: 77632
  chr9:88513774-88513804
  hypo

SEQ ID NO: 162125 - DNA, 186 bp, Homo sapiens; identical to SEQ ID NO: 77633
  chr9:88651535-88651721
  hypo

SEQ ID NO: 162126 - DNA, 27 bp, Homo sapiens
  chr9:88656737-88656764
  hypo
aaaacttgaactggggccaggcgcagt

SEQ ID NO: 162127 - DNA, 26 bp, Homo sapiens
  chr9:88657063-88657089
  hypo
cactcggttgaattgctattgcattg

SEQ ID NO: 162128 - DNA, 117 bp, Homo sapiens; identical to SEQ ID NO: 77636
  chr9:88661263-88661380
  hypo

SEQ ID NO: 162129 - DNA, 42 bp, Homo sapiens; identical to SEQ ID NO: 77637
  chr9:88672700-88672742
  hypo

SEQ ID NO: 162130 - DNA, 22 bp, Homo sapiens
  chr9:88680656-88680678
  hypo
ttaaatatgttcatgtcgggct

SEQ ID NO: 162131 - DNA, 450 bp, Homo sapiens; identical to SEQ ID NO: 77639
  chr9:88694096-88694546
  hypo

SEQ ID NO: 162132 - DNA, 43 bp, Homo sapiens; identical to SEQ ID NO: 77640
  chr9:88712486-88712529
  hypo

SEQ ID NO: 162133 - DNA, 22 bp, Homo sapiens
  chr9:88921884-88921906
  hypo
aaaaagaatacattaataggcc

SEQ ID NO: 162134 - DNA, 46 bp, Homo sapiens
  chr9:88977772-88977818
  hypo
ggaccatggcccacgactctgggtgggggggcgggggtgcgggggg

SEQ ID NO: 162135 - DNA, 34 bp, Homo sapiens; identical to SEQ ID NO: 23216
  chr9:89301325-89301359
  hypo

SEQ ID NO: 162136 - DNA, 234 bp, Homo sapiens; identical to SEQ ID NO: 117776
  chr9:89560474-89560708
  hypo

SEQ ID NO: 162137 - DNA, 1823 bp, Homo sapiens; identical to SEQ ID NO: 117777
  chr9:89560739-89562562
  hypo

SEQ ID NO: 162138 - DNA, 30 bp, Homo sapiens
  chr9:89563217-89563247
  hypo
ccgtgcgccaggcatcgttttcaaattgca

SEQ ID NO: 162139 - DNA, 30 bp, Homo sapiens
  chr9:89563765-89563795
  hypo
actaggagattcctccggctgcgggaaatc

SEQ ID NO: 162140 - DNA, 31 bp, Homo sapiens; identical to SEQ ID NO: 77645
  chr9:89699519-89699550
  hypo

SEQ ID NO: 162141 - DNA, 406 bp, Homo sapiens; identical to SEQ ID NO: 23219
  chr9:89699971-89700377
  hypo

SEQ ID NO: 162142 - DNA, 177 bp, Homo sapiens; identical to SEQ ID NO: 117780
  chr9:90112253-90112430
  hypo

SEQ ID NO: 162143 - DNA, 1254 bp, Homo sapiens; identical to SEQ ID NO: 6863
  chr9:90112493-90113747
  hypo

SEQ ID NO: 162144 - DNA, 30 bp, Homo sapiens; identical to SEQ ID NO: 77648
  chr9:90140235-90140265
  hypo

SEQ ID NO: 162145 - DNA, 28 bp, Homo sapiens
  chr9:90172559-90172587
  hypo
aatacctaatccttggcagggcgcggta

SEQ ID NO: 162146 - DNA, 30 bp, Homo sapiens; identical to SEQ ID NO: 77650
  chr9:90274439-90274469
  hypo

SEQ ID NO: 162147 - DNA, 30 bp, Homo sapiens; identical to SEQ ID NO: 6865
  chr9:90282276-90282306
  hypo

SEQ ID NO: 162148 - DNA, 30 bp, Homo sapiens
  chr9:90285606-90285636
  hypo
cgccctctggaaatccgcttaccacattca

SEQ ID NO: 162149 - DNA, 199 bp, Homo sapiens
  chr9:90287672-90287871
  hypo
gcacctgggcacacccggtactggaatttggttattggaaatgactgagctgtcgcggcagcttccttggagaatgcatcgctgaggattgtggggagcccagaagcaggcaatgcctgtggaggacaccaggaaggggactgacctgcagttctaacttgggtcacctggaggaggagacaatcgggtacatgatcgg

SEQ ID NO: 162150 - DNA, 47 bp, Homo sapiens
  chr9:90290414-90290461
  hypo
gcagagaacaatgcccgacatgacccgagaggcggcacagctctata

SEQ ID NO: 162151 - DNA, 150 bp, Homo sapiens; identical to SEQ ID NO: 23222
  chr9:90346010-90346160
  hypo

SEQ ID NO: 162152 - DNA, 30 bp, Homo sapiens
  chr9:90379550-90379580
  hypo
tgtcacgggaccattcgttttcatcaagat

SEQ ID NO: 162153 - DNA, 30 bp, Homo sapiens
  chr9:90386484-90386514
  hypo
cctgtacagacgggacgggggccaccccgg

SEQ ID NO: 162154 - DNA, 30 bp, Homo sapiens
  chr9:90402691-90402721
  hypo
gtgatttttttttttcggtaaggagtgtac

SEQ ID NO: 162155 - DNA, 30 bp, Homo sapiens
  chr9:90414217-90414247
  hypo
gcttctaaggtgagccgagaactgcagttc

SEQ ID NO: 162156 - DNA, 205 bp, Homo sapiens
  chr9:90439087-90439292
  hypo
cgccagctgtggaatcgcacagcccgggttcaaagcctggttgggccatgaacacctgaatgacctgcagaaaggtcttaggtacatttgtgaaaagaagtggagatcccgcctgccaggaagggatgtggtaaggggcagcatccagtcaggtcagggcaccgcgtcctctccttggaaaccttcgtagcggggctggtggccc

SEQ ID NO: 162157 - DNA, 30 bp, Homo sapiens; identical to SEQ ID NO: 77654
  chr9:90440451-90440481
  hypo

SEQ ID NO: 162158 - DNA, 210 bp, Homo sapiens; identical to SEQ ID NO: 77655
  chr9:90457940-90458150
  hypo

SEQ ID NO: 162159 - DNA, 138 bp, Homo sapiens; identical to SEQ ID NO: 77656
  chr9:90472236-90472374
  hypo

SEQ ID NO: 162160 - DNA, 301 bp, Homo sapiens
  chr9:90472433-90472734
  hypo
aggcgcttctcatttaccagacagttgggttccgggcagaggcgctcctcacttcccagacagtgggcctgcccgacagaggtgctcctgacctcccagatgcggtggctgctgagctggggcctccttacttcccagacgctgcagtggccaggcagaggtgctcttcacttcccagactgtgaggcggccaggtagaggcgctcctcacttcccaggcggtgcctagccaggcagaggcactcctcacttctcaggcggtgggatggggggtgcggggggagtgctgggcagaggtgct

SEQ ID NO: 162161 - DNA, 30 bp, Homo sapiens
  chr9:90473133-90473163
  hypo
cgggtgggggcggctcgtctctatcccacc

SEQ ID NO: 162162 - DNA, 534 bp, Homo sapiens
  chr9:90474023-90474557
  hypo
gggttgaagaggaatcggtaacagcccaaggttcccagggcaggcacaggtgcaggagccatggggtgagcccagccagctgggaaggcctcacggacaagacgagcaggttgctgatggtatggcggggacctgtggtggaaccaggaacaaaatacgcttagaagagcacgttgccaatcgcgtggccggaacctgcggcggaaccaggaacaaaatacgcttagaagagtaagtcgccgatggcatagccggcacctgcggcggaaccggggacgaaatacgcttagaagagaatgtcgccgatggtgtggccgggacctgctgcggaagcagggacaacatatgcttagacgagaacattgccggtggtgttgctgggtcatgcggtggaagcagtaacaacatacgcttagaagagcaggttgccgatggcgtggttgagacctgcggcggaaccaggaacaaaatatgcttagtgagttgcccatttcgagcgagttgtgcacagacgaaaccaagggtcagaagtgg

SEQ ID NO: 162163 - DNA, 35 bp, Homo sapiens; identical to SEQ ID NO: 23223
  chr9:90482723-90482758
  hypo

SEQ ID NO: 162164 - DNA, 35 bp, Homo sapiens; identical to SEQ ID NO: 23224
  chr9:90482817-90482852
  hypo

SEQ ID NO: 162165 - DNA, 225 bp, Homo sapiens
  chr9:90483166-90483391
  hypo
acgcttgtgagcagccgtttcctgcccatctccctcgctgttcccattgccccttgttgtggaatttctcagacctaagactcgccttccagggaagccttctcctgcctctatattaagccaactggagaccatgcccagggcttggctgtggagcctgtgggaaccccccgaatccagggcaagggtccgcatgccccctgggccctgcgtgtaaaatggagc

SEQ ID NO: 162166 - DNA, 37 bp, Homo sapiens; identical to SEQ ID NO: 77662
  chr9:90485106-90485143
  hypo

SEQ ID NO: 162167 - DNA, 217 bp, Homo sapiens
  chr9:90485382-90485599
  hypo
agtcaccgtgcctggcctaggaagcacattcctgctcctggacaaccactggttctgcaagcctcttcccagctctgagatgcacaaagctaagctgggggacagagcctctccctggctgccgctccagtgggagaagcggaccctgagcctgcagcccttgcaggcacctggagctggggagagaaccccagggctagggcggcggctgagggag

SEQ ID NO: 162168 - DNA, 31 bp, Homo sapiens; identical to SEQ ID NO: 77663
  chr9:90492074-90492105
  hypo

SEQ ID NO: 162169 - DNA, 204 bp, Homo sapiens; identical to SEQ ID NO: 77664
  chr9:90499878-90500082
  hypo

SEQ ID NO: 162170 - DNA, 170 bp, Homo sapiens; identical to SEQ ID NO: 77665
  chr9:90500552-90500722
  hypo

SEQ ID NO: 162171 - DNA, 30 bp, Homo sapiens
  chr9:90582133-90582163
  hypo
gaaggtaaggctcaccgagcacaggccatg

SEQ ID NO: 162172 - DNA, 30 bp, Homo sapiens
  chr9:90582383-90582413
  hypo
tccaggatgaagggccgaatcagctctggg

SEQ ID NO: 162173 - DNA, 38 bp, Homo sapiens; identical to SEQ ID NO: 77666
  chr9:90583823-90583861
  hypo

SEQ ID NO: 162174 - DNA, 22 bp, Homo sapiens
  chr9:90620673-90620695
  hypo
ttcctcaaaagacatttcagcc

SEQ ID NO: 162175 - DNA, 141 bp, Homo sapiens
  chr9:90670702-90670843
  hypo
ataaagaaactgaggcgaaggtaacgtaacttatccaggcagcgtagttggccagcagcggccagcatatctgagacttattctaaagcccaagctcctccgctggacttcacaaagaagagtgggcgttggcgatctgtg

SEQ ID NO: 162176 - DNA, 30 bp, Homo sapiens
  chr9:90704782-90704812
  hypo
gcacgaaggaggggacgcactgcgtagtga

SEQ ID NO: 162177 - DNA, 23 bp, Homo sapiens
  chr9:90755738-90755761
  hypo
aaaaaaaaggatcagccgggcgc

SEQ ID NO: 162178 - DNA, 31 bp, Homo sapiens; identical to SEQ ID NO: 77669
  chr9:90849822-90849853
  hypo

SEQ ID NO: 162179 - DNA, 154 bp, Homo sapiens
  chr9:90888547-90888701
  hypo
ccaagagggagatctttctgatacaccttcacgtagagtatttcttcctagcagttacgtctatttaaactcatcattttacaatgtattggctgatctgcgctccgtcccccaccatgacagaggctcccttttgcctcgtccttcttagtct

SEQ ID NO: 162180 - DNA, 30 bp, Homo sapiens
  chr9:90927607-90927637
  hypo
cctcctgcttgtgcccggcaccccacgcat

SEQ ID NO: 162181 - DNA, 30 bp, Homo sapiens
  chr9:90928381-90928411
  hypo
agacttttcaggtgacggatcaaagaatat

SEQ ID NO: 162182 - DNA, 30 bp, Homo sapiens; identical to SEQ ID NO: 77670
  chr9:91001585-91001615
  hypo

SEQ ID NO: 162183 - DNA, 31 bp, Homo sapiens; identical to SEQ ID NO: 77671
  chr9:91114317-91114348
  hypo

SEQ ID NO: 162184 - DNA, 292 bp, Homo sapiens; identical to SEQ ID NO: 77672
  chr9:91119033-91119325
  hypo

SEQ ID NO: 162185 - DNA, 103 bp, Homo sapiens; identical to SEQ ID NO: 77673
  chr9:91138736-91138839
  hypo

SEQ ID NO: 162186 - DNA, 48 bp, Homo sapiens; identical to SEQ ID NO: 77674
  chr9:91140237-91140285
  hypo

SEQ ID NO: 162187 - DNA, 99 bp, Homo sapiens
  chr9:91161618-91161717
  hypo
cacgcttggccgacacatactttaatattataacatcccaaacaatttttcttgacgtaaggcaaagtattccagccttctttccgagaactgtgtaat

SEQ ID NO: 162188 - DNA, 30 bp, Homo sapiens
  chr9:91178390-91178420
  hypo
ctcccaccctccttgcgcccctcagcctct

SEQ ID NO: 162189 - DNA, 95 bp, Homo sapiens; identical to SEQ ID NO: 77675
  chr9:91187464-91187559
  hypo

SEQ ID NO: 162190 - DNA, 176 bp, Homo sapiens
  chr9:91312333-91312509
  hypo
accatctgcagttatcgtttttagttacttgttcactgccctttcccactgagagggtcagcgtcatgagatcagaacttgtcaagtcggtgcttcgtcggcgaggtgaggagtgagctcctcgaggtcacctgcgggttggggatgtgacagtttctgagcggcagtgttaagtt

SEQ ID NO: 162191 - DNA, 31 bp, Homo sapiens; identical to SEQ ID NO: 77676
  chr9:91366824-91366855
  hypo

SEQ ID NO: 162192 - DNA, 30 bp, Homo sapiens
  chr9:91488816-91488846
  hypo
agcagagagccccaccggccctgcttcatt

SEQ ID NO: 162193 - DNA, 87 bp, Homo sapiens; identical to SEQ ID NO: 23227
  chr9:91614961-91615048
  hypo

SEQ ID NO: 162194 - DNA, 368 bp, Homo sapiens
  chr9:91616950-91617318
  hypo
aggctcagtggttcatcgtgttggctgtgctcaactccgccatgaacccggtcatctacacgctggccagcaaggagatgcggcgggccttcttccgtctggtctgcaactgcctggtcaggggacggggggcccgcgcctcacccatccagcctgcgctcgacccaagcagaagtaaatcaagcagcagcaacaatagcagccactctccgaaggtcaaggaagacctgccccacacagccccctcatcctgcatcatggacaagaacgcagcacttcagaatgggatcttctgcaactgatcgtctccatgcgccctgctctgcggctgtgttcttatttattgcatgcgtcgcttccacaggggc

SEQ ID NO: 162195 - DNA, 220 bp, Homo sapiens
  chr9:91663694-91663914
  hypo
ggctgcaccctgctggaggagcggagctgaaacggaaggcagggcaagctcaggagatccccgtcaccccgctctcggatagtaccctgcgggacaccaggagcctctgcaggataaggtgaggggggtgtcaggtcaccgacagtatgaagctacaggcagggccccttgtcactgctctgctttagaaatgatatgccggccgggcacggtgatttac

SEQ ID NO: 162196 - DNA, 97 bp, Homo sapiens
  chr9:91666526-91666623
  hypo
cagcacagtgcctcacggaggggacctcttgtagcacgactttggctaatcgtaacgacaaggacaatgggacacacagaaccggtggtaacataga

SEQ ID NO: 162197 - DNA, 30 bp, Homo sapiens
  chr9:91666987-91667017
  hypo
aaatattgcttaaaccggagctcaaaggct

SEQ ID NO: 162198 - DNA, 31 bp, Homo sapiens; identical to SEQ ID NO: 77681
  chr9:91781635-91781666
  hypo

SEQ ID NO: 162199 - DNA, 31 bp, Homo sapiens
  chr9:91943296-91943327
  hypo
gaccatcatatgtggcgcgtgactatacata

SEQ ID NO: 162200 - DNA, 179 bp, Homo sapiens
  chr9:91993501-91993680
  hypo
atgcgggctaacctacgcagcactgcacgagactcggatactgaacaggagaaacacaaaactctccacgcctggacacgtcgcagccgaggcaccagcggggatgcacagccggcctcagtctccatctgcgtctgagtcagcgaacttcagctcacacttgacgtcaaagggcttgt

SEQ ID NO: 162201 - DNA, 350 bp, Homo sapiens
  chr9:91995936-91996286
  hypo
ccaaaggaaatgggacgtcgaggagtcactcacccgggcacacagaagcatcgccgctcatctcctgaatcaaacccctgcaaaacaaccggcacgtgttattcacccacacacatgggggacatccccaggcagcgcatcccgccccatacctgctggggctctcggtctggtgcagagccacgcaggtcgctgtgggcgggctccaggcgcagtaggggtcccgcgccagcacacagtcctcgcaggtgccgtgcttcccacagaaggccagcggggcctggaccacgcccgagttagagccagcatagacaaacctgttgccctgcgtgtatgagacagagaagaac

SEQ ID NO: 162202 - DNA, 135 bp, Homo sapiens; identical to SEQ ID NO: 23231
  chr9:91997067-91997202
  hypo

SEQ ID NO: 162203 - DNA, 250 bp, Homo sapiens; identical to SEQ ID NO: 77685
  chr9:91997530-91997780
  hypo

SEQ ID NO: 162204 - DNA, 30 bp, Homo sapiens; identical to SEQ ID NO: 23233
  chr9:92005548-92005578
  hypo

SEQ ID NO: 162205 - DNA, 22 bp, Homo sapiens
  chr9:92045870-92045892
  hypo
gacagagcgagactccatcttg

SEQ ID NO: 162206 - DNA, 248 bp, Homo sapiens; identical to SEQ ID NO: 77687
  chr9:92049176-92049424
  hypo

SEQ ID NO: 162207 - DNA, 322 bp, Homo sapiens; identical to SEQ ID NO: 77688
  chr9:92053269-92053591
  hypo

SEQ ID NO: 162208 - DNA, 21 bp, Homo sapiens
  chr9:92054190-92054211
  hypo
ggcacaatgtatgtattttaa

SEQ ID NO: 162209 - DNA, 146 bp, Homo sapiens; identical to SEQ ID NO: 77690
  chr9:92056120-92056266
  hypo

SEQ ID NO: 162210 - DNA, 254 bp, Homo sapiens
  chr9:92058329-92058583
  hypo
gaagcgggtgtaccacggtcctgttgtccctgcagagtggagccttcagctgtctgacagaaaatgagccctcccagtaaagcacagcgtggactccacccgcccataatagccacccgggaagcaggtccggccagcagcagccgccagaggaggatctgcctggggtaggcgggtggcggacggccctggccctgcagcgctcagctgcaccccaccccatgcctgcctccgagctggtggccaggacctgg

SEQ ID NO: 162211 - DNA, 30 bp, Homo sapiens
  chr9:92063484-92063514
  hypo
cactctgaggaacagcgatccacacaacgg

SEQ ID NO: 162212 - DNA, 124 bp, Homo sapiens; identical to SEQ ID NO: 77691
  chr9:92075499-92075623
  hypo

SEQ ID NO: 162213 - DNA, 30 bp, Homo sapiens
  chr9:92082967-92082997
  hypo
aaagactagggtagtcgtggtgttaggcct

SEQ ID NO: 162214 - DNA, 17 bp, Homo sapiens
  chr9:92124802-92124819
  hypo
cccgccaccactcccag

SEQ ID NO: 162215 - DNA, 82 bp, Homo sapiens; identical to SEQ ID NO: 23237
  chr9:92140640-92140722
  hypo

SEQ ID NO: 162216 - DNA, 30 bp, Homo sapiens
  chr9:92175951-92175981
  hypo
ccatgttgtgtgtgccggtgatccatttat

SEQ ID NO: 162217 - DNA, 208 bp, Homo sapiens
  chr9:92178182-92178390
  hypo
ctatgcacgtgcacgcgcacacacacactccacacaagcttgaatgggccattcttatgacattgtcccacggcctgagagctgggaagagaatggcttttccaccatgaacaaaatgacttcacatcagtccactgcccatgcccctggggctgaagaacctgcacgaggtcagggacctgggttcgctgctttgtgttgtcaattg

SEQ ID NO: 162218 - DNA, 21 bp, Homo sapiens
  chr9:92185464-92185485
  hypo
tagattttggccggtcgcggt

SEQ ID NO: 162219 - DNA, 30 bp, Homo sapiens
  chr9:92210409-92210439
  hypo
atctgtcatggaaaccgagagtgaatagag

SEQ ID NO: 162220 - DNA, 172 bp, Homo sapiens
  chr9:92227879-92228051
  hypo
atatcatgccctttcataccccggggccttggacgtgctggtccagctgcgtgaactgcatgttttcttgaacggcgactctgcttgcaggtggaatgcatggagtgcacgggcgtctgcctagagaggagatgtgggggctgggcatggaggtagccgaggagtcagcctg

SEQ ID NO: 162221 - DNA, 30 bp, Homo sapiens
  chr9:92231200-92231230
  hypo
tgttgacctgaaggtcgggacaggaattgc

SEQ ID NO: 162222 - DNA, 41 bp, Homo sapiens
  chr9:92231502-92231543
  hypo
tggggcctgtccacacggtcttgtcacggggtctctctcca

SEQ ID NO: 162223 - DNA, 373 bp, Homo sapiens
  chr9:92235735-92236108
  hypo
tcagagatggccagacgcctctctgcttgtgaactgcggattaaagccaatgggctcttaaagtctctcccagttgtaggacaccaatttccccaggttccataatcacctgttctgttagctgcttcctcccacacatgcacacacacacacgcacacacacaggcacatgtgcccatagtgcatacctgtctattgtgaagcgcaatcgttcaatcttgttggactccccagctattacattaggtcagcagcgttggctttaccaacctcagatagtcaaggatgagtgaaaagtaaagagctactttgcccctgcagagagtggcgaaggtgctggtgaggagggccagcatgccgtgctcaatggcct

SEQ ID NO: 162224 - DNA, 168 bp, Homo sapiens
  chr9:92237958-92238126
  hypo
gcccaggctcagcatcgcccaagggcagctgacctagcctttgcaatggcactggcattagccggggaggtccgcaccaggacacactccctggctggggtgggatgttctgaaccgtgcagatggggattaggccgagccccacaccctgagcgcctctgtaaacaa

SEQ ID NO: 162225 - DNA, 30 bp, Homo sapiens
  chr9:92238505-92238535
  hypo
actgcccgctgtcctcgctgtttgggtccc

SEQ ID NO: 162226 - DNA, 213 bp, Homo sapiens; identical to SEQ ID NO: 77698
  chr9:92249013-92249226
  hypo

SEQ ID NO: 162227 - DNA, 30 bp, Homo sapiens
  chr9:92273978-92274008
  hypo
gtgaggcactctgctcggcttgtctcctcg

SEQ ID NO: 162228 - DNA, 67 bp, Homo sapiens
  chr9:92277576-92277643
  hypo
gttgtggtggtggggcggggggtggtggtcagcatgcagtgattagcagccacctggggtactctac

SEQ ID NO: 162229 - DNA, 98 bp, Homo sapiens
  chr9:92277734-92277832
  hypo
ccctgcccatggctgccctggcctgtggccgaggctgtgatgaagggcagcctgttctgtgcgacgcagttaagcaaggtgtccggtgggctgcattg

SEQ ID NO: 162230 - DNA, 30 bp, Homo sapiens
  chr9:92684425-92684455
  hypo
tgctcagctatccatcgcattccacgaagt

SEQ ID NO: 162231 - DNA, 31 bp, Homo sapiens; identical to SEQ ID NO: 23241
  chr9:92720565-92720596
  hypo

SEQ ID NO: 162232 - DNA, 201 bp, Homo sapiens; identical to SEQ ID NO: 77700
  chr9:92725473-92725674
  hypo

SEQ ID NO: 162233 - DNA, 30 bp, Homo sapiens; identical to SEQ ID NO: 77701
  chr9:92765773-92765803
  hypo

SEQ ID NO: 162234 - DNA, 79 bp, Homo sapiens
  chr9:92776738-92776817
  hypo
gccatgtgtctacttcggccaatgcaatgtgggccaaaaaggcagcctgcccgtcctacactgacgcctgaagaggcat

SEQ ID NO: 162235 - DNA, 31 bp, Homo sapiens; identical to SEQ ID NO: 6876
  chr9:92859700-92859731
  hypo

SEQ ID NO: 162236 - DNA, 145 bp, Homo sapiens
  chr9:92897071-92897216
  hypo
acaggcgtgagccaccgcgcccggccaccggggctccagtacttcagggagactggagcacacctgacgtgacccacccccgggacaaggaagcaggaagatcatcctccaactcccatcccgctggctgcgggctgctggcaag

SEQ ID NO: 162237 - DNA, 31 bp, Homo sapiens; identical to SEQ ID NO: 77704
  chr9:92929514-92929545
  hypo

SEQ ID NO: 162238 - DNA, 30 bp, Homo sapiens
  chr9:92980468-92980498
  hypo
tgatctgaggaataacgtagttttagggta

SEQ ID NO: 162239 - DNA, 240 bp, Homo sapiens; identical to SEQ ID NO: 77705
  chr9:93156038-93156278
  hypo

SEQ ID NO: 162240 - DNA, 30 bp, Homo sapiens
  chr9:93279979-93280009
  hypo
tgaggggcaactggacgaatgtccagctcc

SEQ ID NO: 162241 - DNA, 105 bp, Homo sapiens
  chr9:93462724-93462829
  hypo
tcagccttccggcgctccggagtgtttcaagcaggatatcacctgaattgtacttgaaaagaagctttcttgcagcttggtggcgcttggattgaagagtagcaa

SEQ ID NO: 162242 - DNA, 30 bp, Homo sapiens; identical to SEQ ID NO: 23243
  chr9:93658211-93658241
  hypo

SEQ ID NO: 162243 - DNA, 243 bp, Homo sapiens
  chr9:93676596-93676839
  hypo
cccggcgtggcaccacgtctcccgctccagtgccgtccctctggccaccagcccaggtcacaggcatccagcaacaactgcagcatggactctgggtctgttggatgtgggcatggctgctggctcactgctaagtcagggaagcaccacgtggcccacgctgtgggcccctccaaagccactgtgttccagcccagtgcccagccccaagtaccgtgttataatgagcggcgactgacgtga

SEQ ID NO: 162244 - DNA, 159 bp, Homo sapiens
  chr9:93727465-93727624
  hypo
gggaagtgatgcctccgttcttgtgaaaatgttttcacacgctgaaaagttggaagacaacaaacactgcgacatgtcacctggatccagcgcttcgtagcatgttgtgatttctctgcctccgcccgctttctctcgtggaaccggttggaagctagt

SEQ ID NO: 162245 - DNA, 316 bp, Homo sapiens
  chr9:93733023-93733339
  hypo
acacctgactcacttcgttggccctgctgatgtccacaggcagccacatgtgatggcctcagtgctgagtggagaaacgcctgcggctttgggaaggacttgctgcagcctgctcctaccccagccagcctccttccagccccattgttctcgacacataagaggcctggcaagtctcaacccgggtgtaaagcggcatcccttaccctagaaatacagaagtcatttttttctagtagctaagaaaggcctggcgctgcattacaagagttcattcacataaacagtgaacgctagaaatcgaattacacttgga

SEQ ID NO: 162246 - DNA, 43 bp, Homo sapiens; identical to SEQ ID NO: 77708
  chr9:93734261-93734304
  hypo

SEQ ID NO: 162247 - DNA, 30 bp, Homo sapiens; identical to SEQ ID NO: 23244
  chr9:93798705-93798735
  hypo

SEQ ID NO: 162248 - DNA, 30 bp, Homo sapiens
  chr9:93810746-93810776
  hypo
acgttccaagaacttcggtaggtgcctgaa

SEQ ID NO: 162249 - DNA, 31 bp, Homo sapiens; identical to SEQ ID NO: 23245
  chr9:93837381-93837412
  hypo

SEQ ID NO: 162250 - DNA, 30 bp, Homo sapiens
  chr9:93919410-93919440
  hypo
cttcacaaaaacaagcgttgggccggattt

SEQ ID NO: 162251 - DNA, 1194 bp, Homo sapiens; identical to SEQ ID NO: 46306
  chr9:93955382-93956576
  hypo

SEQ ID NO: 162252 - DNA, 30 bp, Homo sapiens
  chr9:93983195-93983225
  hypo
ccatcgaggactcgcgcagagaatatgagc

SEQ ID NO: 162253 - DNA, 121 bp, Homo sapiens
  chr9:94076013-94076134
  hypo
gaaaatgaacaaactttatgagaagaactagtgaaaagagagccagaaagaaagatggaggcctctgtgcagtatctggtccataaacgctcttttttttttttttttgagaccgagtttc

SEQ ID NO: 162254 - DNA, 24 bp, Homo sapiens
  chr9:94116470-94116494
  hypo
aaaacctttcggagaaatctgaaa

SEQ ID NO: 162255 - DNA, 224 bp, Homo sapiens; identical to SEQ ID NO: 23248
  chr9:94124706-94124930
  hypo

SEQ ID NO: 162256 - DNA, 516 bp, Homo sapiens; identical to SEQ ID NO: 46307
  chr9:94183473-94183989
  hypo

SEQ ID NO: 162257 - DNA, 40 bp, Homo sapiens; identical to SEQ ID NO: 23250
  chr9:94186235-94186275
  hypo

SEQ ID NO: 162258 - DNA, 31 bp, Homo sapiens; identical to SEQ ID NO: 23251
  chr9:94447741-94447772
  hypo

SEQ ID NO: 162259 - DNA, 76 bp, Homo sapiens
  chr9:94475884-94475960
  hypo
agagagggagcccccacaacacgtgagtctcctcccaccccgtccatggacctccgtgccagcagagagcagctct

SEQ ID NO: 162260 - DNA, 394 bp, Homo sapiens
  chr9:94486726-94487120
  hypo
ccacaggaccacaccgtaggaccagatgtctgagtcgatggagaacttgccgtacatgatggcctctggggccatccagcggataggcagcagcgagttccccagcagcttgtagtaatcggcggcatacacctctcggaagaggcccaagtctgagatcttcacgttcagcttgtcgtacactagcacattgcgggtggccaggtccttgtgaaccacgtggtggctggataggtactccatccccgccgcgatctgtgccacaaggtgcacgaagtcggggggctccagggcggacttcaccgtgcggtcatcatcggtgctgcccacgtccgagtgcggcgagcgcatgaccaggaattcgtggaggtcgccgtgcgaacagtagctgaag

SEQ ID NO: 162261 - DNA, 30 bp, Homo sapiens; identical to SEQ ID NO: 77718
  chr9:94495731-94495761
  hypo

SEQ ID NO: 162262 - DNA, 30 bp, Homo sapiens; identical to SEQ ID NO: 77719
  chr9:94531888-94531918
  hypo

SEQ ID NO: 162263 - DNA, 30 bp, Homo sapiens; identical to SEQ ID NO: 77720
  chr9:94532130-94532160
  hypo

SEQ ID NO: 162264 - DNA, 31 bp, Homo sapiens
  chr9:94563874-94563905
  hypo
gtgctaggattaccggcgtgagccacagctc

SEQ ID NO: 162265 - DNA, 218 bp, Homo sapiens
  chr9:94572961-94573179
  hypo
aaaggctgccacaaggacaaccgcaggcagcaccgggagccctgcggtctgtgtcaccaggtgtggccggaacaggagggacgacgctggcctctgcatcccagtggagtctacgtttgcgggtcacacacagggaatgcggccctaattaggaccccacttcgctgtgaggaagacagacccagaggggagacatcggcactctcatgctgcacaga

SEQ ID NO: 162266 - DNA, 17 bp, Homo sapiens
  chr9:94611012-94611029
  hypo
ggcgacagagtgagact

SEQ ID NO: 162267 - DNA, 30 bp, Homo sapiens
  chr9:94679660-94679690
  hypo
gttcatggggaagtacgatccatgtcacaa

SEQ ID NO: 162268 - DNA, 880 bp, Homo sapiens; identical to SEQ ID NO: 46310
  chr9:94711199-94712079
  hypo

SEQ ID NO: 162269 - DNA, 501 bp, Homo sapiens; identical to SEQ ID NO: 117810
  chr9:94712294-94712795
  hypo

SEQ ID NO: 162270 - DNA, 30 bp, Homo sapiens
  chr9:94821479-94821509
  hypo
tgttcttttagtagtcgctcgaggtcagcc

SEQ ID NO: 162271 - DNA, 40 bp, Homo sapiens; identical to SEQ ID NO: 23254
  chr9:94834641-94834681
  hypo

SEQ ID NO: 162272 - DNA, 22 bp, Homo sapiens
  chr9:94863553-94863575
  hypo
aaacaaacaggccaggcgtggt

SEQ ID NO: 162273 - DNA, 211 bp, Homo sapiens; identical to SEQ ID NO: 77724
  chr9:94904616-94904827
  hypo

SEQ ID NO: 162274 - DNA, 101 bp, Homo sapiens; identical to SEQ ID NO: 23255
  chr9:95003569-95003670
  hypo

SEQ ID NO: 162275 - DNA, 39 bp, Homo sapiens; identical to SEQ ID NO: 23256
  chr9:95010671-95010710
  hypo

SEQ ID NO: 162276 - DNA, 105 bp, Homo sapiens; identical to SEQ ID NO: 23257
  chr9:95039645-95039750
  hypo

SEQ ID NO: 162277 - DNA, 30 bp, Homo sapiens
  chr9:95160291-95160321
  hypo
gtttctctgacagtgcggaacctggctctc

SEQ ID NO: 162278 - DNA, 30 bp, Homo sapiens
  chr9:95160618-95160648
  hypo
ggttttttgactatacgaaacagcattgtt

SEQ ID NO: 162279 - DNA, 30 bp, Homo sapiens; identical to SEQ ID NO: 77728
  chr9:95188894-95188924
  hypo

SEQ ID NO: 162280 - DNA, 30 bp, Homo sapiens; identical to SEQ ID NO: 23258
  chr9:95374071-95374101
  hypo

SEQ ID NO: 162281 - DNA, 30 bp, Homo sapiens; identical to SEQ ID NO: 23259
  chr9:95374322-95374352
  hypo

SEQ ID NO: 162282 - DNA, 30 bp, Homo sapiens
  chr9:95374741-95374771
  hypo
ggttgctaatcttttcgccagatttcaaaa

SEQ ID NO: 162283 - DNA, 227 bp, Homo sapiens; identical to SEQ ID NO: 77731
  chr9:95376168-95376395
  hypo

SEQ ID NO: 162284 - DNA, 97 bp, Homo sapiens; identical to SEQ ID NO: 77732
  chr9:95380370-95380467
  hypo

SEQ ID NO: 162285 - DNA, 175 bp, Homo sapiens
  chr9:95381218-95381393
  hypo
ttatcagtttcatcccgaattcccagaaacagaggggactggacaaaactagtgacattagggagaggggcggcacataggctggttattcagaagaggaagcagaatgaatgcgcgcctcacaggctttcaaatgactgtggtggtaaaaaggcaggtgcgccatgctgccact

SEQ ID NO: 162286 - DNA, 30 bp, Homo sapiens
  chr9:95394869-95394899
  hypo
ttatacctaaatcaacgtacccaactggca

SEQ ID NO: 162287 - DNA, 30 bp, Homo sapiens
  chr9:95403533-95403563
  hypo
tcgtcctccaagcgacgagctgcaaggatg

SEQ ID NO: 162288 - DNA, 232 bp, Homo sapiens
  chr9:95403857-95404089
  hypo
gggcaccgccagactcgctgaagccatggagtgagcggtgttggtgccaccttctgaatgagcattcccaatgtttgtgaactttttaacttccaaagacaactccgcgttcgatctttgttcccggaagtttaaaagagcatctaaccaaaagcactgacatgatgaccaggcacgcactcagaggcagtgctgagcactgacaaaggcaggggcacgaaatgaatggctg

SEQ ID NO: 162289 - DNA, 31 bp, Homo sapiens; identical to SEQ ID NO: 77733
  chr9:95408939-95408970
  hypo

SEQ ID NO: 162290 - DNA, 30 bp, Homo sapiens; identical to SEQ ID NO: 77734
  chr9:95409149-95409179
  hypo

SEQ ID NO: 162291 - DNA, 280 bp, Homo sapiens; identical to SEQ ID NO: 77735
  chr9:95416104-95416384
  hypo

SEQ ID NO: 162292 - DNA, 46 bp, Homo sapiens; identical to SEQ ID NO: 77736
  chr9:95416853-95416899
  hypo

SEQ ID NO: 162293 - DNA, 66 bp, Homo sapiens; identical to SEQ ID NO: 77737
  chr9:95417139-95417205
  hypo

SEQ ID NO: 162294 - DNA, 405 bp, Homo sapiens
  chr9:95417481-95417886
  hypo
gctttgcctaactcaccgacacatctgttcttccctcacgtggccctgtgtggccctgcagatgcagcgaccctgaggggtgcatcgtcagcctggaatgggctctgcacctactttcccactgcgccagagcccagcggcgtcctactgggacacgctcacctgcagggcaagcaagctctgcttcactttgtcggtatcttaaggcagaggaaatgcgctcacaggcggccttgtgggttgagccctgtttgctgtgggttcattactgtgacccttcccactgaggacaaacctggagccagactgctcattgctggaaatgctcccctatcctgtcccctcagagcagtccctaacgctcaccccaccaggttgccaatgggacctcgagtctaatcccat

SEQ ID NO: 162295 - DNA, 30 bp, Homo sapiens; identical to SEQ ID NO: 77739
  chr9:95421904-95421934
  hypo

SEQ ID NO: 162296 - DNA, 606 bp, Homo sapiens
  chr9:95477239-95477845
  hypo
ggggctttgaggagtgagaagcgacacaaagctctcacaagtgtcctgctgatgcaacgccccatggcgcctcggctagactcctaccctctgtgcattagtcacgttaagattgacctagcaccgccgtcccgctgctgctgggttagttgaggtgaagcagatgttagctgcagcgtgcggcgccccacagcccctaatcacagtaaatgctgtgcttctcgctgcagaacacctggttggccagcccggtgccctcggccctgtcgctggcacaggcacaggtgtgacttacgctcggtgtggctggcttggtcttcggggcggctttggcacggccacgccgggtctgctcatggtccagctcgagcagctccagccgctgggtcagcgccagcttctgctggatggccatgcgcagcagcgagttcagcgtcttcttctcgtcctcagcagccgccagctgccgctgcatctcatccagctgtgtaatgtactcgtcacacctgtgggtaccaaaaacatgactgaggggcgggcagagccgagcagaggagggcagggcagggcagggctaagctgcacggccctctgacagccctatac

SEQ ID NO: 162297 - DNA, 30 bp, Homo sapiens; identical to SEQ ID NO: 77741
  chr9:95478096-95478126
  hypo

SEQ ID NO: 162298 - DNA, 30 bp, Homo sapiens
  chr9:95482626-95482656
  hypo
ctcactgagtaggtcggagacgaggctggg

SEQ ID NO: 162299 - DNA, 31 bp, Homo sapiens; identical to SEQ ID NO: 23263
  chr9:95482914-95482945
  hypo

SEQ ID NO: 162300 - DNA, 362 bp, Homo sapiens
  chr9:95484976-95485338
  hypo
gatgttctcctcctccagttccgagtagtcctgcagcagacgagcttcccggaatttgtactccttgatgtcatcccgcaggcggccacgctggatctccacattctggttgatctgttgggggagagggaaaggcaggtatgagcagcctccacagggcacgagaggggctcagtgcagccaggcacgccatggccagccatacagccagaactcaagagccctggcctgcaggtgccagtgtgactgcctggagaggagagggagcccagagcagtatgccagagtgcacagcggactgcagaggttccagagtaaattccctcagcccttctcacctgggaacccgtgactgcctgctc

SEQ ID NO: 162301 - DNA, 30 bp, Homo sapiens
  chr9:95486898-95486928
  hypo
catgctgggacgaagcgggagaaagcagca

SEQ ID NO: 162302 - DNA, 340 bp, Homo sapiens; identical to SEQ ID NO: 77744
  chr9:95492112-95492452
  hypo

SEQ ID NO: 162303 - DNA, 180 bp, Homo sapiens
  chr9:95501275-95501455
  hypo
cccagcctcctgggaacggcgggcctgggcatcccaggaatcccactagtcctagcctggctgcctcggttgggccctcccaccacctgctaaggtggagacactgctgggctccttgtcagggctggtccaagcagggggaaggtctgatcctcatccactcgacgggctgtgaatacc

SEQ ID NO: 162304 - DNA, 28 bp, Homo sapiens
  chr9:95520189-95520217
  hypo
aaaaaatgagtaaaggctgggcgcggtg

SEQ ID NO: 162305 - DNA, 29 bp, Homo sapiens
  chr9:95534117-95534146
  hypo
taagccactgtgcccggttgacccacacc

SEQ ID NO: 162306 - DNA, 1002 bp, Homo sapiens; identical to SEQ ID NO: 117821
  chr9:95569779-95570781
  hypo

SEQ ID NO: 162307 - DNA, 788 bp, Homo sapiens; identical to SEQ ID NO: 6884
  chr9:95570893-95571681
  hypo

SEQ ID NO: 162308 - DNA, 86 bp, Homo sapiens; identical to SEQ ID NO: 77749
  chr9:95676049-95676135
  hypo

SEQ ID NO: 162309 - DNA, 204 bp, Homo sapiens; identical to SEQ ID NO: 77750
  chr9:95687861-95688065
  hypo

SEQ ID NO: 162310 - DNA, 20 bp, Homo sapiens
  chr9:95698338-95698358
  hypo
ctggccgcagtattcttatt

SEQ ID NO: 162311 - DNA, 31 bp, Homo sapiens; identical to SEQ ID NO: 77752
  chr9:95707428-95707459
  hypo

SEQ ID NO: 162312 - DNA, 30 bp, Homo sapiens; identical to SEQ ID NO: 23268
  chr9:95764727-95764757
  hypo

SEQ ID NO: 162313 - DNA, 30 bp, Homo sapiens
  chr9:95770892-95770922
  hypo
tcacttgataaagggcgtgtctgtcaggac

SEQ ID NO: 162314 - DNA, 31 bp, Homo sapiens; identical to SEQ ID NO: 77754
  chr9:95771842-95771873
  hypo

SEQ ID NO: 162315 - DNA, 92 bp, Homo sapiens; identical to SEQ ID NO: 77755
  chr9:95826253-95826345
  hypo

SEQ ID NO: 162316 - DNA, 30 bp, Homo sapiens; identical to SEQ ID NO: 77756
  chr9:95844039-95844069
  hypo

SEQ ID NO: 162317 - DNA, 249 bp, Homo sapiens
  chr9:95899552-95899801
  hypo
ctaagcgacccccaccgcgtactatggggagtacagttgtgtctctcagacctgggggaacatgcggtgaaagcaccaagctgttgaaaggtccatgggtcagatggaccatgttttcacctacagaaagccttcagaagcagccagtccctggcctcctccacctcggagaggcttgcaggcaggtatgccgtttccacatcaccaagggagaaagcgagtctggcaaggtggcgcagcatgcccgag

SEQ ID NO: 162318 - DNA, 31 bp, Homo sapiens; identical to SEQ ID NO: 77757
  chr9:95913666-95913697
  hypo

SEQ ID NO: 162319 - DNA, 35 bp, Homo sapiens; identical to SEQ ID NO: 77758
  chr9:95952713-95952748
  hypo

SEQ ID NO: 162320 - DNA, 31 bp, Homo sapiens; identical to SEQ ID NO: 23269
  chr9:95965599-95965630
  hypo

SEQ ID NO: 162321 - DNA, 30 bp, Homo sapiens; identical to SEQ ID NO: 77760
  chr9:96009781-96009811
  hypo

SEQ ID NO: 162322 - DNA, 30 bp, Homo sapiens; identical to SEQ ID NO: 23270
  chr9:96051943-96051973
  hypo

SEQ ID NO: 162323 - DNA, 397 bp, Homo sapiens
  chr9:96054919-96055316
  hypo
gctttggggtcccctcggaaacgtccagagcagcaggatgtcagctcaccagccaagactgtgggccgtttctcggtggtcagcactcaggacgagtggaccctggcctccccccacagcctgagatactctgccccacccgacgtctacctggacgaggccccctccagccccgacgtgaagctggcagtgcggcgggcgcagacggcctcctccatcgaggtcggcgtgggcgagcccgtgtccagcgactctggggacgagggccctcgggcgagacccccggtgcagaagcaggcgtccctgcccgtgagtggcagcgtggctggcgacttcgtgaagaaggccaccgccttcctgcagaggccttctcgggccggctcgctgggccccgaga

SEQ ID NO: 162324 - DNA, 412 bp, Homo sapiens; identical to SEQ ID NO: 77762
  chr9:96069017-96069429
  hypo

SEQ ID NO: 162325 - DNA, 35 bp, Homo sapiens; identical to SEQ ID NO: 77763
  chr9:96070698-96070733
  hypo

SEQ ID NO: 162326 - DNA, 31 bp, Homo sapiens; identical to SEQ ID NO: 23272
  chr9:96081613-96081644
  hypo

SEQ ID NO: 162327 - DNA, 104 bp, Homo sapiens
  chr9:96084518-96084622
  hypo
cccactagacgcgtccgtgcttcaggcttcactgctgctgcacagcgtgccagctgggcccggatattcttttttttctttttcttttttttttttttttgaga

SEQ ID NO: 162328 - DNA, 97 bp, Homo sapiens
  chr9:96155804-96155901
  hypo
atgcctatgcccctgtaacctcggcagtggcccgacgtagtctatttgccatctagtcaagggaatctgccctaccgtcacttgttgtgtaacactg

SEQ ID NO: 162329 - DNA, 24 bp, Homo sapiens
  chr9:96206327-96206351
  hypo
tttttgttttttgagacggagttt

SEQ ID NO: 162330 - DNA, 42 bp, Homo sapiens; identical to SEQ ID NO: 77765
  chr9:96218213-96218255
  hypo

SEQ ID NO: 162331 - DNA, 38 bp, Homo sapiens; identical to SEQ ID NO: 77766
  chr9:96230168-96230206
  hypo

SEQ ID NO: 162332 - DNA, 37 bp, Homo sapiens; identical to SEQ ID NO: 77767
  chr9:96230445-96230482
  hypo

SEQ ID NO: 162333 - DNA, 179 bp, Homo sapiens; identical to SEQ ID NO: 23274
  chr9:96256150-96256329
  hypo

SEQ ID NO: 162334 - DNA, 30 bp, Homo sapiens; identical to SEQ ID NO: 77769
  chr9:96269905-96269935
  hypo

SEQ ID NO: 162335 - DNA, 411 bp, Homo sapiens; identical to SEQ ID NO: 77770
  chr9:96275709-96276120
  hypo

SEQ ID NO: 162336 - DNA, 30 bp, Homo sapiens
  chr9:96287146-96287176
  hypo
gtgcctgtctcagcacgtctcagcgcagtg

SEQ ID NO: 162337 - DNA, 188 bp, Homo sapiens; identical to SEQ ID NO: 23276
  chr9:96294480-96294668
  hypo

SEQ ID NO: 162338 - DNA, 30 bp, Homo sapiens; identical to SEQ ID NO: 23277
  chr9:96295075-96295105
  hypo

SEQ ID NO: 162339 - DNA, 30 bp, Homo sapiens
  chr9:96305634-96305664
  hypo
gtagaggacaagaaccgcaggatgagggcc

SEQ ID NO: 162340 - DNA, 247 bp, Homo sapiens; identical to SEQ ID NO: 77773
  chr9:96308694-96308941
  hypo

SEQ ID NO: 162341 - DNA, 300 bp, Homo sapiens
  chr9:96348816-96349116
  hypo
agccaacgtacaggccggatgggaacagtctgtgaggcttttgtgccactcctggctgcgcttggcagctctgcatgtcacacatgaggaatcctgagtctcaaaatggcccaggaatccagcatgagctgtgctaggagtcaagaggtttgccacgactgggcttggttccttgttcatgagcgagcacgtccctcagtctgtccatctagctggtgacgtttcctgaacaccaggggagaccaggctctgttctaggcacgggcagcagtgaggaagactgcacggcccctgaagcta

SEQ ID NO: 162342 - DNA, 179 bp, Homo sapiens; identical to SEQ ID NO: 23278
  chr9:96357851-96358030
  hypo

SEQ ID NO: 162343 - DNA, 177 bp, Homo sapiens
  chr9:96361905-96362082
  hypo
ctcagccgagatattcggtggttacctgtgagtttcacctttcctggacttcactaaaccataacatgccaccacgagggctgatgtggtccagcacctcatttcacatgtgagctgcttgcagcaagggggattcggagcacgaaagggatttagaggcgccggtggggccaggtg

SEQ ID NO: 162344 - DNA, 184 bp, Homo sapiens; identical to SEQ ID NO: 77775
  chr9:96435973-96436157
  hypo

SEQ ID NO: 162345 - DNA, 172 bp, Homo sapiens
  chr9:96446746-96446918
  hypo
ccagcgatgccacctcggtagaaaaatgatgctgttccattaacatctgacacggatttgcaggccccaaacagacgagcgagctgtaaacacccggtgctggctgggccctcgcccggcctccaagtaggatccttgtcattaatcgtcctcccgccggccaggctgggcc

SEQ ID NO: 162346 - DNA, 328 bp, Homo sapiens; identical to SEQ ID NO: 23279
  chr9:96573409-96573737
  hypo

SEQ ID NO: 162347 - DNA, 320 bp, Homo sapiens; identical to SEQ ID NO: 77777
  chr9:96673539-96673859
  hypo

SEQ ID NO: 162348 - DNA, 37 bp, Homo sapiens; identical to SEQ ID NO: 77778
  chr9:96687052-96687089
  hypo

SEQ ID NO: 162349 - DNA, 31 bp, Homo sapiens; identical to SEQ ID NO: 77779
  chr9:96688196-96688227
  hypo

SEQ ID NO: 162350 - DNA, 523 bp, Homo sapiens; identical to SEQ ID NO: 6902
  chr9:96716904-96717427
  hypo

SEQ ID NO: 162351 - DNA, 357 bp, Homo sapiens; identical to SEQ ID NO: 46339
  chr9:96717449-96717806
  hypo

SEQ ID NO: 162352 - DNA, 441 bp, Homo sapiens; identical to SEQ ID NO: 117854
  chr9:96717840-96718281
  hypo

SEQ ID NO: 162353 - DNA, 44 bp, Homo sapiens; identical to SEQ ID NO: 6909
  chr9:96722503-96722547
  hypo

SEQ ID NO: 162354 - DNA, 297 bp, Homo sapiens; identical to SEQ ID NO: 6910
  chr9:96722862-96723159
  hypo

SEQ ID NO: 162355 - DNA, 17 bp, Homo sapiens
  chr9:96881831-96881848
  hypo
atcttggctcctcccct

SEQ ID NO: 162356 - DNA, 263 bp, Homo sapiens
  chr9:96910019-96910282
  hypo
agaatgaaactccgtctcaaaaaaaaaaaagagtctaaaaaatctaagaaccatcttggcacacgagctgcaaagaaaggagctgcagctggatttggccgcctggctccccgacacgtcctggcacccccgaagcactcaaggagcttccttgcttcatcccctggaggaaagccgggcctggccatggcgctattgtgacgtggctcccagagcagtttcaggcctgttctagcatctggccggggcggcagcctgagagc

SEQ ID NO: 162357 - DNA, 30 bp, Homo sapiens
  chr9:96923699-96923729
  hypo
tcacttttaattctacgcttcgagagatat

SEQ ID NO: 162358 - DNA, 38 bp, Homo sapiens; identical to SEQ ID NO: 23286
  chr9:96945350-96945388
  hypo

SEQ ID NO: 162359 - DNA, 121 bp, Homo sapiens; identical to SEQ ID NO: 23287
  chr9:96945447-96945568
  hypo

SEQ ID NO: 162360 - DNA, 37 bp, Homo sapiens; identical to SEQ ID NO: 77788
  chr9:97010559-97010596
  hypo

SEQ ID NO: 162361 - DNA, 36 bp, Homo sapiens
  chr9:97010715-97010751
  hypo
tgagccactgcgcccggctaatataacttttttttt

SEQ ID NO: 162362 - DNA, 28 bp, Homo sapiens
  chr9:97020658-97020686
  hypo
cacaaggacggctcacgcctgtaatccc

SEQ ID NO: 162363 - DNA, 267 bp, Homo sapiens
  chr9:97062632-97062899
  hypo
cctgagtgtgggcgtcggtttagccagaaggcctccctctccatacaccagaggaagcactcgggggagaagccgtatgtgtgcagggaatgtgggcgacacttcaggtatacatcctctctcactaatcacaagaggattcactccggggagaggccctttgtatgtcaggagtgtgggcgaggctttcgccagaagatagccctccttctacaccagaggacgcacttggaggagaagcccttcgtgtgtcctgagtgtgggaga

SEQ ID NO: 162364 - DNA, 31 bp, Homo sapiens; identical to SEQ ID NO: 77790
  chr9:97087289-97087320
  hypo

SEQ ID NO: 162365 - DNA, 31 bp, Homo sapiens; identical to SEQ ID NO: 77791
  chr9:97088741-97088772
  hypo

SEQ ID NO: 162366 - DNA, 42 bp, Homo sapiens; identical to SEQ ID NO: 77792
  chr9:97107979-97108021
  hypo

SEQ ID NO: 162367 - DNA, 104 bp, Homo sapiens; identical to SEQ ID NO: 77793
  chr9:97161999-97162103
  hypo

SEQ ID NO: 162368 - DNA, 109 bp, Homo sapiens; identical to SEQ ID NO: 77794
  chr9:97203263-97203372
  hypo

SEQ ID NO: 162369 - DNA, 30 bp, Homo sapiens; identical to SEQ ID NO: 77795
  chr9:97221771-97221801
  hypo

SEQ ID NO: 162370 - DNA, 382 bp, Homo sapiens
  chr9:97317330-97317712
  hypo
catgcagtctaggaaccggcatgcgcataacctcaggatataaataatgctgaagcagagttacgttttttttgttgttgttttttttgtttttgtttttttaggtttccgtgtgtttctattgagctgctcagtgcccggcttagaagaccaggaaaaggagtcacaggtcgtatgctggaggcttgagccgcggcaccgtggcgcggctcgcctcgctgcggttggtggtggcggtggacattgcagcgcggctggaggggtaggaagaagaagatagttttgggatagatagaggtgggtaaagagtgtggttagtgccaaagggaaaaaaggatagcgaggaggagaaggcgttgcaaaaagacgatggggaaaagat

SEQ ID NO: 162371 - DNA, 31 bp, Homo sapiens; identical to SEQ ID NO: 77798
  chr9:97367816-97367847
  hypo

SEQ ID NO: 162372 - DNA, 108 bp, Homo sapiens
  chr9:97369212-97369320
  hypo
ccaaaatgaactccccgatggcctttttagacaaggaaggaaaggtggagagatgacgagcgcactgggtcccccaggcctggatgaggcgagcgatgggctgggcta

SEQ ID NO: 162373 - DNA, 30 bp, Homo sapiens
  chr9:97369682-97369712
  hypo
cacccaagtgctcagcgctgttctcggctt

SEQ ID NO: 162374 - DNA, 314 bp, Homo sapiens
  chr9:97384559-97384873
  hypo
atgcacagagcaaggcgagagccttgatgtgggaaggggaaaagatgggtctttgaagacaccagcaagcctctgaaagtgggtggtaagggcacacccgcgcccttggccatgatggcgatgtgcgctcgcctgggaactgacggtccctgatccagtggccgtgactgcttcagctcctgcaagtgcatttgcccaaaacataactcgctgtgactggctgggcaaaactgagcccctcctagaaaccatccaaacccacatgcctggtccggcctgactatctcaggagctagctccggctgtcttctcgg

SEQ ID NO: 162375 - DNA, 38 bp, Homo sapiens; identical to SEQ ID NO: 77799
  chr9:97469745-97469783
  hypo

SEQ ID NO: 162376 - DNA, 213 bp, Homo sapiens; identical to SEQ ID NO: 77800
  chr9:97474709-97474922
  hypo

SEQ ID NO: 162377 - DNA, 43 bp, Homo sapiens
  chr9:97488327-97488370
  hypo
tccccatgagggaaggcacagcgtctgtcttgttcctggttgt

SEQ ID NO: 162378 - DNA, 17 bp, Homo sapiens
  chr9:97500869-97500886
  hypo
ttttgagatggagtctc

SEQ ID NO: 162379 - DNA, 38 bp, Homo sapiens
  chr9:97506388-97506426
  hypo
atatggggctgtgcgcggtggcttatgcctgtaatcca

SEQ ID NO: 162380 - DNA, 132 bp, Homo sapiens
  chr9:97563054-97563186
  hypo
agtcacatggaatacccctgccgcttccagaatgcttctgccaccacccaggagatcattcctcatcgggtctttgcccctgtgtgcctcacgggtgcctgccaagagacccttctgcggctgatccctcct

SEQ ID NO: 162381 - DNA, 38 bp, Homo sapiens; identical to SEQ ID NO: 23289
  chr9:97591477-97591515
  hypo

SEQ ID NO: 162382 - DNA, 97 bp, Homo sapiens
  chr9:97634476-97634573
  hypo
gtgtttaaaatggatcgatggcagggcgaaccatcacgcactctggcagagatctaaacgggggcagtagtcattcttcagtcgtgtttttcttttg

SEQ ID NO: 162383 - DNA, 30 bp, Homo sapiens
  chr9:97663794-97663824
  hypo
gtccttaggactcctcgctgcttctcagta

SEQ ID NO: 162384 - DNA, 164 bp, Homo sapiens
  chr9:97671388-97671552
  hypo
cgttcacagtgagtccgtgaatggaaatcacgccacacaggagctgtgactcaggcctgttctccgaaggggtgaggtgatggctattaatatttaatttcatatactgtagtgtttgcagaagcaaacatgctgtagttaaggttacgcgcattgagcgtcag

SEQ ID NO: 162385 - DNA, 116 bp, Homo sapiens
  chr9:97674943-97675059
  hypo
taaagagtaggaatctcggctatgggctccctgggaaaagttgctttcctgatgaaagggatcgttgttgctggcacagcgcgtttcttccatgttaaacacgaacatggtgcatg

SEQ ID NO: 162386 - DNA, 240 bp, Homo sapiens
  chr9:97678304-97678544
  hypo
ctccacaccgccacacgggacagacttgtgctcgctgtgaaaaccaccaggatgagctattacggctctcagttgtgccattttattgctgttctggaaatggagcaaaacacattattttattaaataaagattttccctgtatcacagtggaggctaattttattagctctttttatgggaacaaacatcatcgccctgattggggaggacggaggtgggggccgtggggaggtgagg

SEQ ID NO: 162387 - DNA, 199 bp, Homo sapiens; identical to SEQ ID NO: 77805
  chr9:97679313-97679512
  hypo

SEQ ID NO: 162388 - DNA, 30 bp, Homo sapiens
  chr9:97681851-97681881
  hypo
caggggctgagagttcggcttgtaaatgtg

SEQ ID NO: 162389 - DNA, 40 bp, Homo sapiens
  chr9:97682279-97682319
  hypo
aaacttgcggccaggcgcagtgactcatgcctgtgatcct

SEQ ID NO: 162390 - DNA, 38 bp, Homo sapiens
  chr9:97682618-97682656
  hypo
taaacttgctctccatgaggggaattggggtctgctcc

SEQ ID NO: 162391 - DNA, 37 bp, Homo sapiens
  chr9:97682800-97682837
  hypo
ctccacccacagcaagatgggccgtgctggtcagggc

SEQ ID NO: 162392 - DNA, 30 bp, Homo sapiens
  chr9:97688345-97688375
  hypo
tgagactctcagattcgcgctggtcctggc

SEQ ID NO: 162393 - DNA, 338 bp, Homo sapiens; identical to SEQ ID NO: 77806
  chr9:97719170-97719508
  hypo

SEQ ID NO: 162394 - DNA, 173 bp, Homo sapiens; identical to SEQ ID NO: 23292
  chr9:97727388-97727561
  hypo

SEQ ID NO: 162395 - DNA, 30 bp, Homo sapiens
  chr9:97744674-97744704
  hypo
cacctgagagcagcccgctgtgtgtccgcc

SEQ ID NO: 162396 - DNA, 30 bp, Homo sapiens
  chr9:97745003-97745033
  hypo
ataatcaaacttattcggggcctaccccac

SEQ ID NO: 162397 - DNA, 444 bp, Homo sapiens; identical to SEQ ID NO: 117865
  chr9:97767418-97767862
  hypo

SEQ ID NO: 162398 - DNA, 30 bp, Homo sapiens
  chr9:97784044-97784074
  hypo
gattcacggtctgaccgacgccttggtttc

SEQ ID NO: 162399 - DNA, 31 bp, Homo sapiens
  chr9:97807797-97807828
  hypo
cccgcaccttccagtgcggtcaaggatgctg

SEQ ID NO: 162400 - DNA, 159 bp, Homo sapiens
  chr9:97808125-97808284
  hypo
agtagatttcaggcagcatcacgctgccggcccctgcggaatggagagtggtgttcggggatttgctttggaaatgccttgggaaggcgccgccacctccactttgaacaacggtaggaacgcagggtaggtgctcaggtggcacgagcactgctggcc

SEQ ID NO: 162401 - DNA, 472 bp, Homo sapiens; identical to SEQ ID NO: 117867
  chr9:97810931-97811403
  hypo

SEQ ID NO: 162402 - DNA, 31 bp, Homo sapiens; identical to SEQ ID NO: 23294
  chr9:97844496-97844527
  hypo

SEQ ID NO: 162403 - DNA, 217 bp, Homo sapiens
  chr9:97847399-97847616
  hypo
ttgctagcataacaggcgtgaaggcggcagtgtcgccggcgtccttccgcggaagcccagtgtgtgcagacagcacggggtggcgctgctctcaggtgctctggctgcttgggttcctggcatgctgatttgtgacttaagattaaaatcacattgccagggattaccacgcaaccacgaccttggctgctcctccagaaaccgtggtcgcgctcac

SEQ ID NO: 162404 - DNA, 1028 bp, Homo sapiens
  chr9:97847890-97848918
  hypo
cagtcagcttgggtgcggagcgcgatcctggaggatgagagaccacttgaccccaaggatgcactgtctcctgctgggaatgctagccatgtactgagtccttaagtctgtccacagaaacatgcactaatcggacatctgtctgaaaggtcaaatgtattgaaagttgcaaaaattcttcttacaaaaaactaaaaccaaatgcatcacctaagtcgtgtgaaatcatgtggtagctcatggctgtgagcggggcggggcggggctttcggaggagctcctgttgttctgggcgcggtgaactctctcttgtatttgcagtccaggccttcgcgtctcctgcgccagcagacggtgcccacggagctcccagctgaggcgctgcttctccgggctgtcgattggacccgccctccggtgcctactgagctgatatcagttctcattttacacactggctcagttcagcaggaacaggagtcgagcccttgagcaaaaagccttcgtgtctgtaagtgcccgaggctcaggagagctggggctcccactcgcggcagacaggcccgcgtccaccctgcgtccaccccggcccggcggcagcacggtgccagtcatctgcatgtgctcctgcggcgtgggggtttgtagacttggaaaaccctgttggcagaaagttaagagctcccaggcctgaaggcaggacacagtgccagcagggggccgtttgcccccatgtgtaagggaggcagggcccagctctcccacggcgaggtgagctgagactttctgagaacagttagagtgggtgcgtgtctgaaatgggtactcctagcagctattgtgtacgcaaagcctgagtacagcctgctggtgtcatggccacgtgtgagcaggccagcgtcacacggctcgctgtgacccgtcccggagactgaaatgggcctgggtcttctccttgtcctgtgattaaagtcctctcttgaaagtggagagcaaaggcacacagaggtgcgcgctcacaagaattc

SEQ ID NO: 162405 - DNA, 30 bp, Homo sapiens
  chr9:97855692-97855722
  hypo
aaggatcagagatggcgctgtctcctttta

SEQ ID NO: 162406 - DNA, 224 bp, Homo sapiens; identical to SEQ ID NO: 23296
  chr9:97855922-97856146
  hypo

SEQ ID NO: 162407 - DNA, 353 bp, Homo sapiens
  chr9:97863723-97864076
  hypo
gacggtctggccgggcgggcaccaggagtaccgaaggctcacttgagtcattagtgaacatgtctgactgagtctgggctgagggacctggctctgcattttgtaaaatagatactagcagattgtcccaagatgtgtacagctcattctcacagcccagcgagggcacttactccacaaatgcgtggccacaggtcatcacctgtcctgtggccctggcgagcctgatccctcacgccgggcacccacacggcctgcgtgccttctagacttgagttcgcagctctttaaggagctctcgggccagtttttctgatctagggctttcaatgccaagacgattccatctgtac

SEQ ID NO: 162408 - DNA, 30 bp, Homo sapiens; identical to SEQ ID NO: 77816
  chr9:97864346-97864376
  hypo

SEQ ID NO: 162409 - DNA, 62 bp, Homo sapiens; identical to SEQ ID NO: 77817
  chr9:97864637-97864699
  hypo

SEQ ID NO: 162410 - DNA, 309 bp, Homo sapiens; identical to SEQ ID NO: 77818
  chr9:97864981-97865290
  hypo

SEQ ID NO: 162411 - DNA, 386 bp, Homo sapiens
  chr9:97867212-97867598
  hypo
tgagagcatgcatttgtctctcgcgtctggcttatttcgctcagtgtaaagccctctaggttgggccgcattgttgcaggtgtgcattttataagagtacacaatagattctcgaaagcattctcgctgtgctggggccgggcccaaagaggtggcacctggcatgtggcagccagtcgtctttagccctgggccaccctcatgactcggattcgtcttagctgagacaccagcacctgggaggcacagcctgggcccactccacaggactgtcctaccaggatggagacaatctcctggccctggttcttggcaggtgggtcatgttacggggactttctgtacatggacattcacgtttcagtcaggcccggcctggacgggag

SEQ ID NO: 162412 - DNA, 169 bp, Homo sapiens; identical to SEQ ID NO: 77820
  chr9:97868959-97869128
  hypo

SEQ ID NO: 162413 - DNA, 78 bp, Homo sapiens; identical to SEQ ID NO: 77821
  chr9:97887432-97887510
  hypo

SEQ ID NO: 162414 - DNA, 30 bp, Homo sapiens; identical to SEQ ID NO: 77822
  chr9:97887819-97887849
  hypo

SEQ ID NO: 162415 - DNA, 158 bp, Homo sapiens
  chr9:97891725-97891883
  hypo
tcttcatgagtgatgacgcaggcatctaacctctgatcctgttttatttgtaaggtggggcactccggtaacacaccagaggtcacgctgcaagccagggctctgaagccccatgactgcggccattatcttttctataaaagcggggaaataaaata

SEQ ID NO: 162416 - DNA, 31 bp, Homo sapiens; identical to SEQ ID NO: 23299
  chr9:97901310-97901341
  hypo

SEQ ID NO: 162417 - DNA, 207 bp, Homo sapiens; identical to SEQ ID NO: 77824
  chr9:97913296-97913503
  hypo

SEQ ID NO: 162418 - DNA, 31 bp, Homo sapiens; identical to SEQ ID NO: 23301
  chr9:97983531-97983562
  hypo

SEQ ID NO: 162419 - DNA, 30 bp, Homo sapiens; identical to SEQ ID NO: 23302
  chr9:98054862-98054892
  hypo

SEQ ID NO: 162420 - DNA, 21 bp, Homo sapiens
  chr9:98076961-98076982
  hypo
ctttatcgataaaaaaaattt

SEQ ID NO: 162421 - DNA, 30 bp, Homo sapiens
  chr9:98078499-98078529
  hypo
aaacaaattctttttcgatgcagcctttct

SEQ ID NO: 162422 - DNA, 82 bp, Homo sapiens; identical to SEQ ID NO: 77827
  chr9:98145031-98145113
  hypo

SEQ ID NO: 162423 - DNA, 30 bp, Homo sapiens; identical to SEQ ID NO: 77828
  chr9:98173084-98173114
  hypo

SEQ ID NO: 162424 - DNA, 30 bp, Homo sapiens; identical to SEQ ID NO: 117870
  chr9:98189067-98189097
  hypo

SEQ ID NO: 162425 - DNA, 61 bp, Homo sapiens; identical to SEQ ID NO: 117871
  chr9:98189304-98189365
  hypo

SEQ ID NO: 162426 - DNA, 32 bp, Homo sapiens; identical to SEQ ID NO: 77830
  chr9:98196381-98196413
  hypo

SEQ ID NO: 162427 - DNA, 30 bp, Homo sapiens; identical to SEQ ID NO: 77831
  chr9:98239842-98239872
  hypo

SEQ ID NO: 162428 - DNA, 403 bp, Homo sapiens; identical to SEQ ID NO: 77832
  chr9:98240099-98240502
  hypo

SEQ ID NO: 162429 - DNA, 30 bp, Homo sapiens
  chr9:98256345-98256375
  hypo
acctgcccacggaaccgcacgggaccgcac

SEQ ID NO: 162430 - DNA, 47 bp, Homo sapiens; identical to SEQ ID NO: 6916
  chr9:98268139-98268186
  hypo

SEQ ID NO: 162431 - DNA, 1284 bp, Homo sapiens; identical to SEQ ID NO: 117875
  chr9:98272637-98273921
  hypo

SEQ ID NO: 162432 - DNA, 835 bp, Homo sapiens; identical to SEQ ID NO: 117876
  chr9:98278352-98279187
  hypo

SEQ ID NO: 162433 - DNA, 31 bp, Homo sapiens; identical to SEQ ID NO: 23305
  chr9:98356425-98356456
  hypo

SEQ ID NO: 162434 - DNA, 31 bp, Homo sapiens; identical to SEQ ID NO: 77838
  chr9:98369372-98369403
  hypo

SEQ ID NO: 162435 - DNA, 46 bp, Homo sapiens; identical to SEQ ID NO: 23306
  chr9:98459834-98459880
  hypo

SEQ ID NO: 162436 - DNA, 208 bp, Homo sapiens; identical to SEQ ID NO: 77840
  chr9:98490543-98490751
  hypo

SEQ ID NO: 162437 - DNA, 30 bp, Homo sapiens
  chr9:98491096-98491126
  hypo
cagaacgacctgggccgagtgaaagcgacc

SEQ ID NO: 162438 - DNA, 30 bp, Homo sapiens; identical to SEQ ID NO: 77841
  chr9:98622610-98622640
  hypo

SEQ ID NO: 162439 - DNA, 30 bp, Homo sapiens
  chr9:98796491-98796521
  hypo
ccagagggttcacctcggtccctcttgtct

SEQ ID NO: 162440 - DNA, 60 bp, Homo sapiens; identical to SEQ ID NO: 77842
  chr9:98842604-98842664
  hypo

SEQ ID NO: 162441 - DNA, 232 bp, Homo sapiens; identical to SEQ ID NO: 77843
  chr9:98842926-98843158
  hypo

SEQ ID NO: 162442 - DNA, 81 bp, Homo sapiens; identical to SEQ ID NO: 77844
  chr9:99102563-99102644
  hypo

SEQ ID NO: 162443 - DNA, 30 bp, Homo sapiens; identical to SEQ ID NO: 23307
  chr9:99107784-99107814
  hypo

SEQ ID NO: 162444 - DNA, 330 bp, Homo sapiens; identical to SEQ ID NO: 77846
  chr9:99139191-99139521
  hypo

SEQ ID NO: 162445 - DNA, 625 bp, Homo sapiens; identical to SEQ ID NO: 117885
  chr9:99145528-99146153
  hypo

SEQ ID NO: 162446 - DNA, 31 bp, Homo sapiens; identical to SEQ ID NO: 77848
  chr9:99199880-99199911
  hypo

SEQ ID NO: 162447 - DNA, 38 bp, Homo sapiens
  chr9:99214209-99214247
  hypo
ttttttaacaaatgaaaatgccgggtgtggtggctcac

SEQ ID NO: 162448 - DNA, 38 bp, Homo sapiens
  chr9:99214486-99214524
  hypo
agaaagagcgagactccgtcacaaaaaaaaaaaaaaaa

SEQ ID NO: 162449 - DNA, 25 bp, Homo sapiens
  chr9:99217044-99217069
  hypo
taataaagcacgtgcccccagatct

SEQ ID NO: 162450 - DNA, 123 bp, Homo sapiens
  chr9:99256190-99256313
  hypo
cgcgctcccaggactcgcgctgcctccaggcgctcccctccacgccagtgctgccttttcaaagaagtctttcagactttaagtccgaaggatgcccctcctcctacccgctttccccctgca

SEQ ID NO: 162451 - DNA, 1052 bp, Homo sapiens
  chr9:99258625-99259677
  hypo
ggacagccaaccatcgctggaaaagggaggagatggacagcgctgtacttaccaccaccaccaccaccacagggcctgtctcagggcttgagtttgtgtggacggcaaggactagcttcctgggccgctaactctcaaccgcaaggcaaacttgggttggggcccagaacggccgtcagccgttaccctccagcctggccagtgagtgctgagtggacactccgcggctacttaaggacacgccaaccgcggtcctgccggggcgctccgtgcgtctccctccggctgggtcccggctgaccccgcaatccaggcgcaggcaagggagaccccgctggctccaccgcccaggccaccctgaagtccccgctggaggaggtgcagcggacccgctcccggggagcccgtcccgcgccctccctccgagaagccccttcctccagctccttcctctgcccgccggcccgagagcaccgaggcggcttctctgtcctgtgtactgcccaggacaagcggcattggaagcgagtgagccgttcccagctgggggcagcaacagcccggggccagggaaacgcatgggggcctggaccgtccggtggcaccgagtaggcgggtgccaggacgccagacacgctgcattccccggagtcccacgccagggagaacggccccgcctgaaaagacgtcgtttaacacagagaaacacacccagggccaggagaaaccattgtcctccccgagtcccacaacgcacaaagcacacggtggccctcccacgcggagtcgtctacccctttagaaacagacttggcccattagagcctccgcggccaggccggggcctccttacctggggatttaggtgtggacccagcacgcgtcgtccagaagcgtgtcaaagccatgcagacttgctgccaaagagtcaggcggggttagaggcggggaggcaggggcggggaggcagaggcgggaggccccccactcccacacaggccagggacccccgaggcgctggggaggaatccggaaggctttgctcaggggga

SEQ ID NO: 162452 - DNA, 197 bp, Homo sapiens; identical to SEQ ID NO: 77851
  chr9:99267707-99267904
  hypo

SEQ ID NO: 162453 - DNA, 241 bp, Homo sapiens; identical to SEQ ID NO: 46369
  chr9:99416949-99417190
  hypo

SEQ ID NO: 162454 - DNA, 410 bp, Homo sapiens; identical to SEQ ID NO: 46370
  chr9:99417396-99417806
  hypo

SEQ ID NO: 162455 - DNA, 24 bp, Homo sapiens
  chr9:99426397-99426421
  hypo
gagccaccgcgcccggccctaact

SEQ ID NO: 162456 - DNA, 80 bp, Homo sapiens; identical to SEQ ID NO: 77854
  chr9:99446886-99446966
  hypo

SEQ ID NO: 162457 - DNA, 212 bp, Homo sapiens; identical to SEQ ID NO: 77855
  chr9:99450308-99450520
  hypo

SEQ ID NO: 162458 - DNA, 46 bp, Homo sapiens; identical to SEQ ID NO: 77856
  chr9:99641470-99641516
  hypo

SEQ ID NO: 162459 - DNA, 41 bp, Homo sapiens
  chr9:99803882-99803923
  hypo
atcttgtacttgtactgcaaatttgccgtctcaaaaaaaaa

SEQ ID NO: 162460 - DNA, 41 bp, Homo sapiens
  chr9:99818323-99818364
  hypo
cactgccgatggctccgggataggttcggtggtgggaaggc

SEQ ID NO: 162461 - DNA, 30 bp, Homo sapiens; identical to SEQ ID NO: 23312
  chr9:99883667-99883697
  hypo

SEQ ID NO: 162462 - DNA, 503 bp, Homo sapiens; identical to SEQ ID NO: 117903
  chr9:99983229-99983732
  hypo

SEQ ID NO: 162463 - DNA, 221 bp, Homo sapiens; identical to SEQ ID NO: 6928
  chr9:99983767-99983988
  hypo

SEQ ID NO: 162464 - DNA, 16 bp, Homo sapiens
  chr9:99984041-99984057
  hypo
cgcctggccgtgactc

SEQ ID NO: 162465 - DNA, 45 bp, Homo sapiens; identical to SEQ ID NO: 6930
  chr9:99984107-99984152
  hypo

SEQ ID NO: 162466 - DNA, 167 bp, Homo sapiens
  chr9:100267686-100267853
  hypo
ggtgaccccagggccgtttctagcgatgattctggagggtgatgagttgtgaccactgcgttgttgctctccatgcccaaaggaatgaaggaaagcagaactgcctctgggcatccttcagcctccttcatagactcatcgctgctgcccatcgctttgctgttggt

SEQ ID NO: 162467 - DNA, 20 bp, Homo sapiens
  chr9:100284857-100284877
  hypo
ttttgagactggatctcact

SEQ ID NO: 162468 - DNA, 181 bp, Homo sapiens; identical to SEQ ID NO: 77865
  chr9:100297535-100297716
  hypo

SEQ ID NO: 162469 - DNA, 30 bp, Homo sapiens
  chr9:100298991-100299021
  hypo
ggcccctcccttccccggcccttggcttct

SEQ ID NO: 162470 - DNA, 143 bp, Homo sapiens
  chr9:100299577-100299720
  hypo
gtgcacatgtgtgatcgtgcgtgcctgtgtgtgcgggtatatgtacgtgtgtgtgcatgtgtgttgcctctgtgtgcacatctgaacaagcccacaaggttctaggcaggatggcttctcacgtagccctatctatagcaatg

SEQ ID NO: 162471 - DNA, 77 bp, Homo sapiens; identical to SEQ ID NO: 77867
  chr9:100308891-100308968
  hypo

SEQ ID NO: 162472 - DNA, 84 bp, Homo sapiens; identical to SEQ ID NO: 23317
  chr9:100349303-100349387
  hypo

SEQ ID NO: 162473 - DNA, 39 bp, Homo sapiens
  chr9:100397700-100397739
  hypo
ttttttttttctgagacggagtgtcattctttgtcaggc

SEQ ID NO: 162474 - DNA, 38 bp, Homo sapiens
  chr9:100397978-100398016
  hypo
cagatgtgagctactgcgcccgccgataatacaatttt

SEQ ID NO: 162475 - DNA, 304 bp, Homo sapiens; identical to SEQ ID NO: 6933
  chr9:100565761-100566065
  hypo

SEQ ID NO: 162476 - DNA, 101 bp, Homo sapiens; identical to SEQ ID NO: 46385
  chr9:100610033-100610134
  hypo

SEQ ID NO: 162477 - DNA, 616 bp, Homo sapiens; identical to SEQ ID NO: 46386
  chr9:100610200-100610816
  hypo

SEQ ID NO: 162478 - DNA, 1594 bp, Homo sapiens; identical to SEQ ID NO: 46390
  chr9:100614441-100616035
  hypo

SEQ ID NO: 162479 - DNA, 198 bp, Homo sapiens; identical to SEQ ID NO: 6942
  chr9:100616270-100616468
  hypo

SEQ ID NO: 162480 - DNA, 139 bp, Homo sapiens; identical to SEQ ID NO: 77875
  chr9:100690586-100690725
  hypo

SEQ ID NO: 162481 - DNA, 24 bp, Homo sapiens
  chr9:100818303-100818327
  hypo
gagccaccgcgcccgcccaggtga

SEQ ID NO: 162482 - DNA, 36 bp, Homo sapiens
  chr9:100820490-100820526
  hypo
cctcggcccttgctgttccttcgggactggttttat

SEQ ID NO: 162483 - DNA, 33 bp, Homo sapiens; identical to SEQ ID NO: 77877
  chr9:100835844-100835877
  hypo

SEQ ID NO: 162484 - DNA, 257 bp, Homo sapiens; identical to SEQ ID NO: 77878
  chr9:100843156-100843413
  hypo

SEQ ID NO: 162485 - DNA, 179 bp, Homo sapiens; identical to SEQ ID NO: 77879
  chr9:100849663-100849842
  hypo

SEQ ID NO: 162486 - DNA, 129 bp, Homo sapiens; identical to SEQ ID NO: 77880
  chr9:100890702-100890831
  hypo

SEQ ID NO: 162487 - DNA, 30 bp, Homo sapiens; identical to SEQ ID NO: 77881
  chr9:100894486-100894516
  hypo

SEQ ID NO: 162488 - DNA, 30 bp, Homo sapiens
  chr9:100895323-100895353
  hypo
aggacggtccctgctcgggggtcaataacc

SEQ ID NO: 162489 - DNA, 211 bp, Homo sapiens
  chr9:100924969-100925180
  hypo
catgagcgcctgtgtcgttttgtgggtgtgcatgcacgtgtgcatccctttggatgtttaactgaggctgtgtatatacacatgcatgagcgcatgcgtgtatccgtgcatgcatgactttaatgactcagtaattcagagaacaggagttcattttccctacaagcaggcacttgcccacaagtgagtactgtagcgggcccttcgccta

SEQ ID NO: 162490 - DNA, 30 bp, Homo sapiens; identical to SEQ ID NO: 77883
  chr9:100925442-100925472
  hypo

SEQ ID NO: 162491 - DNA, 183 bp, Homo sapiens; identical to SEQ ID NO: 77884
  chr9:100933033-100933216
  hypo

SEQ ID NO: 162492 - DNA, 226 bp, Homo sapiens
  chr9:100935908-100936134
  hypo
atggtgctccacagccggaacaaaatccacctattgcgtctgctgtcccataacagcttcgcagcccagtacacgtgcttaagatacgggcttcagagtcagagaaacctggatccaaatccagactcacttcccttctctaagtcttgataccacatcgtcaggttgctgtgagatgagcaaggagcttaagagcgtgtagcctttggtctgggtgtggtggctc

SEQ ID NO: 162493 - DNA, 95 bp, Homo sapiens; identical to SEQ ID NO: 77886
  chr9:100981135-100981230
  hypo

SEQ ID NO: 162494 - DNA, 30 bp, Homo sapiens; identical to SEQ ID NO: 77887
  chr9:100983353-100983383
  hypo

SEQ ID NO: 162495 - DNA, 121 bp, Homo sapiens; identical to SEQ ID NO: 77888
  chr9:101009638-101009759
  hypo

SEQ ID NO: 162496 - DNA, 175 bp, Homo sapiens; identical to SEQ ID NO: 77889
  chr9:101014051-101014226
  hypo

SEQ ID NO: 162497 - DNA, 22 bp, Homo sapiens
  chr9:101019660-101019682
  hypo
acaaaatatttcttttcttttc

SEQ ID NO: 162498 - DNA, 119 bp, Homo sapiens; identical to SEQ ID NO: 77891
  chr9:101052971-101053090
  hypo

SEQ ID NO: 162499 - DNA, 31 bp, Homo sapiens; identical to SEQ ID NO: 77892
  chr9:101065558-101065589
  hypo

SEQ ID NO: 162500 - DNA, 345 bp, Homo sapiens; identical to SEQ ID NO: 77893
  chr9:101216241-101216586
  hypo

SEQ ID NO: 162501 - DNA, 157 bp, Homo sapiens; identical to SEQ ID NO: 23328
  chr9:101280571-101280728
  hypo

SEQ ID NO: 162502 - DNA, 22 bp, Homo sapiens
  chr9:101442885-101442907
  hypo
cggcctctattattatttttag

SEQ ID NO: 162503 - DNA, 99 bp, Homo sapiens; identical to SEQ ID NO: 77895
  chr9:101445881-101445980
  hypo

SEQ ID NO: 162504 - DNA, 1097 bp, Homo sapiens; identical to SEQ ID NO: 46399
  chr9:101469270-101470367
  hypo

SEQ ID NO: 162505 - DNA, 30 bp, Homo sapiens
  chr9:101498704-101498734
  hypo
ggcacagcagtgtgacgggggcagggctgg

SEQ ID NO: 162506 - DNA, 225 bp, Homo sapiens
  chr9:101499000-101499225
  hypo
tcaaaaacccatgggcgtcttggggaaaataaattacctaactgaaagagtaccgagttcaataaaaacatactgagtcagaatctccccagtacccaccatcgcagcctgtcaatgctggagaggccctgggatgcaggaccccaaacccctggacagagtgggaggccgagtccggggcaggactgacttctcccgagtcgcacggcccggattcgaggtctc

SEQ ID NO: 162507 - DNA, 154 bp, Homo sapiens; identical to SEQ ID NO: 23330
  chr9:101553961-101554115
  hypo

SEQ ID NO: 162508 - DNA, 196 bp, Homo sapiens
  chr9:101557773-101557969
  hypo
ctactcatacattctacgcatacctcattctaccagtcctaccagctcgtgcacccaagcctttgcatgggcctcccatcatgccttcccacagcccacttgtaatgtcctggctaattctcaggtatccgcaggtctccacgtggatataaacatcttttctaccagaaaccttcccccacgtctccaaaatggg

SEQ ID NO: 162509 - DNA, 726 bp, Homo sapiens; identical to SEQ ID NO: 117943
  chr9:101569828-101570554
  hypo

SEQ ID NO: 162510 - DNA, 249 bp, Homo sapiens; identical to SEQ ID NO: 6954
  chr9:101705946-101706195
  hypo

SEQ ID NO: 162511 - DNA, 637 bp, Homo sapiens; identical to SEQ ID NO: 46407
  chr9:101706314-101706951
  hypo

SEQ ID NO: 162512 - DNA, 30 bp, Homo sapiens; identical to SEQ ID NO: 77901
  chr9:101748067-101748097
  hypo

SEQ ID NO: 162513 - DNA, 145 bp, Homo sapiens
  chr9:101813049-101813194
  hypo
aaatattctttgaggtgagttcgtaattgatccctgttggaggtgatgttaaggcttgggtcatagccttcaaaatgacgcagtttggccgcgtatttgcccagacatctggctaagtctaaacgttgaggcatccaagtctgca

SEQ ID NO: 162514 - DNA, 165 bp, Homo sapiens; identical to SEQ ID NO: 77903
  chr9:101904929-101905094
  hypo

SEQ ID NO: 162515 - DNA, 40 bp, Homo sapiens
  chr9:101949973-101950013
  hypo
atcacttagctggtccgctattatgcgacatttgtttctc

SEQ ID NO: 162516 - DNA, 163 bp, Homo sapiens; identical to SEQ ID NO: 77904
  chr9:102068814-102068977
  hypo

SEQ ID NO: 162517 - DNA, 30 bp, Homo sapiens
  chr9:102177777-102177807
  hypo
atgttgagccaagctcgcttatctgcaact

SEQ ID NO: 162518 - DNA, 30 bp, Homo sapiens
  chr9:102178050-102178080
  hypo
aaatcgaaggagccccgaaacgccatagaa

SEQ ID NO: 162519 - DNA, 31 bp, Homo sapiens; identical to SEQ ID NO: 23333
  chr9:102591226-102591257
  hypo

SEQ ID NO: 162520 - DNA, 30 bp, Homo sapiens; identical to SEQ ID NO: 77906
  chr9:102761248-102761278
  hypo

SEQ ID NO: 162521 - DNA, 145 bp, Homo sapiens; identical to SEQ ID NO: 23334
  chr9:103174496-103174641
  hypo

SEQ ID NO: 162522 - DNA, 85 bp, Homo sapiens; identical to SEQ ID NO: 77908
  chr9:103174700-103174785
  hypo

SEQ ID NO: 162523 - DNA, 30 bp, Homo sapiens; identical to SEQ ID NO: 6958
  chr9:103190004-103190034
  hypo

SEQ ID NO: 162524 - DNA, 173 bp, Homo sapiens; identical to SEQ ID NO: 117957
  chr9:103190035-103190208
  hypo

SEQ ID NO: 162525 - DNA, 193 bp, Homo sapiens; identical to SEQ ID NO: 77910
  chr9:103493406-103493599
  hypo

SEQ ID NO: 162526 - DNA, 97 bp, Homo sapiens
  chr9:104138072-104138169
  hypo
ggagcgcactagctgcgattccggctttgccgaaagtaactgttcccccttttctcctttttgcccaataagttccatttttctcactccgcaaatt

SEQ ID NO: 162527 - DNA, 181 bp, Homo sapiens; identical to SEQ ID NO: 77911
  chr9:104238255-104238436
  hypo

SEQ ID NO: 162528 - DNA, 85 bp, Homo sapiens; identical to SEQ ID NO: 77912
  chr9:104238667-104238752
  hypo

SEQ ID NO: 162529 - DNA, 327 bp, Homo sapiens; identical to SEQ ID NO: 117963
  chr9:104248322-104248649
  hypo

SEQ ID NO: 162530 - DNA, 872 bp, Homo sapiens; identical to SEQ ID NO: 6961
  chr9:104248697-104249569
  hypo

SEQ ID NO: 162531 - DNA, 317 bp, Homo sapiens; identical to SEQ ID NO: 77915
  chr9:104305541-104305858
  hypo

SEQ ID NO: 162532 - DNA, 188 bp, Homo sapiens; identical to SEQ ID NO: 77916
  chr9:104365591-104365779
  hypo

SEQ ID NO: 162533 - DNA, 83 bp, Homo sapiens
  chr9:104473573-104473656
  hypo
gtagtgcatacagcccggattcactgaccgaagggatgattcacacatcccgataggtcagggtgggacggtgggagatttca

SEQ ID NO: 162534 - DNA, 43 bp, Homo sapiens
  chr9:104605228-104605271
  hypo
ccgctcgacttgtggaccgcaaagttgtcggagctgtcacaat

SEQ ID NO: 162535 - DNA, 30 bp, Homo sapiens; identical to SEQ ID NO: 6963
  chr9:105037092-105037122
  hypo

SEQ ID NO: 162536 - DNA, 30 bp, Homo sapiens; identical to SEQ ID NO: 77919
  chr9:106761984-106762014
  hypo

SEQ ID NO: 162537 - DNA, 30 bp, Homo sapiens; identical to SEQ ID NO: 77920
  chr9:106881380-106881410
  hypo

SEQ ID NO: 162538 - DNA, 30 bp, Homo sapiens; identical to SEQ ID NO: 77921
  chr9:106881736-106881766
  hypo

SEQ ID NO: 162539 - DNA, 17 bp, Homo sapiens
  chr9:107064994-107065011
  hypo
ggcgtgacccactgcgc

SEQ ID NO: 162540 - DNA, 40 bp, Homo sapiens; identical to SEQ ID NO: 23340
  chr9:107144257-107144297
  hypo

SEQ ID NO: 162541 - DNA, 36 bp, Homo sapiens; identical to SEQ ID NO: 77924
  chr9:107260231-107260267
  hypo

SEQ ID NO: 162542 - DNA, 35 bp, Homo sapiens; identical to SEQ ID NO: 77925
  chr9:107260506-107260541
  hypo

SEQ ID NO: 162543 - DNA, 267 bp, Homo sapiens; identical to SEQ ID NO: 23341
  chr9:107396337-107396604
  hypo

SEQ ID NO: 162544 - DNA, 30 bp, Homo sapiens; identical to SEQ ID NO: 77927
  chr9:107525099-107525129
  hypo

SEQ ID NO: 162545 - DNA, 52 bp, Homo sapiens
  chr9:107528625-107528677
  hypo
gggccctagacaatacgatggaacgttctatgaatttcgtacttattacctt

SEQ ID NO: 162546 - DNA, 87 bp, Homo sapiens
  chr9:107554119-107554206
  hypo
aaatccacttttacctcttaacgagcatcgttgcttgattgggtagagatagtctgaactaatagggacaaacgcaatatagacaaa

SEQ ID NO: 162547 - DNA, 154 bp, Homo sapiens
  chr9:107729488-107729642
  hypo
ggaggatgttcattagcggctgtaagaaatcacggtctaaactacaccgttcaagaaacccactacagtcgtgcagaccaatagcactattctagaaggtagctatccctcgtgccctctaagaaccatcgttttgcatcgttagcaagaagca

SEQ ID NO: 162548 - DNA, 30 bp, Homo sapiens
  chr9:107971221-107971251
  hypo
aaaagacatattgaccgacggcaatgtgtg

SEQ ID NO: 162549 - DNA, 31 bp, Homo sapiens; identical to SEQ ID NO: 23343
  chr9:108200731-108200762
  hypo

SEQ ID NO: 162550 - DNA, 121 bp, Homo sapiens
  chr9:108257888-108258009
  hypo
ctgtagaccggagctgttcctattcggccatcttggctccagctcgggttgtttcttttcttattgttgaatattaagagttctttgggccgggcgcggtggctcacgcctgtaaccccag

SEQ ID NO: 162551 - DNA, 30 bp, Homo sapiens; identical to SEQ ID NO: 23344
  chr9:108282462-108282492
  hypo

SEQ ID NO: 162552 - DNA, 750 bp, Homo sapiens; identical to SEQ ID NO: 117977
  chr9:108418382-108419132
  hypo

SEQ ID NO: 162553 - DNA, 30 bp, Homo sapiens
  chr9:108822389-108822419
  hypo
gtgttacgcagcagccgctccagatgggcc

SEQ ID NO: 162554 - DNA, 30 bp, Homo sapiens
  chr9:109384744-109384774
  hypo
ctctccttttgctaacgagtgttagtcact

SEQ ID NO: 162555 - DNA, 30 bp, Homo sapiens
  chr9:109440002-109440032
  hypo
ctatgtagggtgagcggagacatgtagcag

SEQ ID NO: 162556 - DNA, 31 bp, Homo sapiens; identical to SEQ ID NO: 77934
  chr9:109606635-109606666
  hypo

SEQ ID NO: 162557 - DNA, 31 bp, Homo sapiens; identical to SEQ ID NO: 23345
  chr9:109686799-109686830
  hypo

SEQ ID NO: 162558 - DNA, 257 bp, Homo sapiens
  chr9:109687596-109687853
  hypo
tgtctacaaatgtgacgaatgtccgtttacttgcaagagctcgttgaaacttggggctcacaaacagtgtcacacgggtacaacgtcagattgggatgctgtgaattcccagagtgaaagcatttcttcctcactgaatgaaggtgtggtgtcttatgagagctcaagcatcaatggtagaaagtcaggagtcatgttggatcccttgcagcagcaacagccaccgcagccaccaccaccgccgccgccaccaccac

SEQ ID NO: 162559 - DNA, 179 bp, Homo sapiens
  chr9:109688895-109689074
  hypo
ccagcagcattatggcgagcaccacccagaagccatgaatgtactcaactttgatcactcggacctgatctaccggtgtcggttttgttcatacacgagcccgaatgttagaagcctgatgccacattaccaaagaatgcatcccacggtgaagatcaacaacgcgatgatattttcaa

SEQ ID NO: 162560 - DNA, 223 bp, Homo sapiens; identical to SEQ ID NO: 23346
  chr9:109689778-109690001
  hypo

SEQ ID NO: 162561 - DNA, 292 bp, Homo sapiens; identical to SEQ ID NO: 23347
  chr9:109690710-109691002
  hypo

SEQ ID NO: 162562 - DNA, 186 bp, Homo sapiens
  chr9:109691302-109691488
  hypo
tacaccaaccccatccgcaaaggtctggcagcccactaccagaagcgccacgacattgatgcgtattacactcactgcttggcagcctccaggaccatcagcgacaagcccaacaaagtgatcatcccatccccgcccaaggacgactcccctcagctgagcgaggaactccggcgggcagtggag

SEQ ID NO: 162563 - DNA, 45 bp, Homo sapiens; identical to SEQ ID NO: 77938
  chr9:109693209-109693254
  hypo

SEQ ID NO: 162564 - DNA, 23 bp, Homo sapiens
  chr9:109835379-109835402
  hypo
attacaggcgtgagccaccgcgc

SEQ ID NO: 162565 - DNA, 38 bp, Homo sapiens; identical to SEQ ID NO: 23348
  chr9:109865316-109865354
  hypo

SEQ ID NO: 162566 - DNA, 42 bp, Homo sapiens; identical to SEQ ID NO: 77941
  chr9:109894934-109894976
  hypo

SEQ ID NO: 162567 - DNA, 41 bp, Homo sapiens; identical to SEQ ID NO: 77942
  chr9:109895275-109895316
  hypo

SEQ ID NO: 162568 - DNA, 21 bp, Homo sapiens
  chr9:110012769-110012790
  hypo
agccaccgtgcctggccccca

SEQ ID NO: 162569 - DNA, 30 bp, Homo sapiens; identical to SEQ ID NO: 77944
  chr9:110093452-110093482
  hypo

SEQ ID NO: 162570 - DNA, 266 bp, Homo sapiens; identical to SEQ ID NO: 23351
  chr9:110096155-110096421
  hypo

SEQ ID NO: 162571 - DNA, 114 bp, Homo sapiens
  chr9:110121098-110121212
  hypo
aggtgagaaattccacgtagccggtgcctgcgcacaagtgcccaacaaaaggcggctattattcacttaatgacaagtaaccatgatcgctgctgttgccgttgttgttgttgt

SEQ ID NO: 162572 - DNA, 131 bp, Homo sapiens
  chr9:110126148-110126279
  hypo
taaatcagtgggagaggtgagcgcttgctctagtgaggcatttatgattggctgcctttcattgagccacacggcgagctcattcggtgagcagaaagcccggcagagcaggcctgcgatctggcagactg

SEQ ID NO: 162573 - DNA, 35 bp, Homo sapiens; identical to SEQ ID NO: 23352
  chr9:110160587-110160622
  hypo

SEQ ID NO: 162574 - DNA, 31 bp, Homo sapiens; identical to SEQ ID NO: 77949
  chr9:110177580-110177611
  hypo

SEQ ID NO: 162575 - DNA, 120 bp, Homo sapiens
  chr9:110185792-110185912
  hypo
caaaagactgttgcagtcaggcgtacgccacgtttacttttccattgccaggactggtaagccgaaaaggcaccacagaggatccatgagaacgggtacgtaaagcatacagattagaat

SEQ ID NO: 162576 - DNA, 30 bp, Homo sapiens
  chr9:110206882-110206912
  hypo
ctggttacacagcatcgcactgaaaacccc

SEQ ID NO: 162577 - DNA, 31 bp, Homo sapiens; identical to SEQ ID NO: 77950
  chr9:110288498-110288529
  hypo

SEQ ID NO: 162578 - DNA, 30 bp, Homo sapiens; identical to SEQ ID NO: 77951
  chr9:110288708-110288738
  hypo

SEQ ID NO: 162579 - DNA, 30 bp, Homo sapiens; identical to SEQ ID NO: 46434
  chr9:110306099-110306129
  hypo

SEQ ID NO: 162580 - DNA, 20 bp, Homo sapiens
  chr9:110312666-110312686
  hypo
ttttgagatggaggctcgct

SEQ ID NO: 162581 - DNA, 31 bp, Homo sapiens; identical to SEQ ID NO: 23353
  chr9:110328591-110328622
  hypo

SEQ ID NO: 162582 - DNA, 140 bp, Homo sapiens; identical to SEQ ID NO: 77955
  chr9:110335014-110335154
  hypo

SEQ ID NO: 162583 - DNA, 21 bp, Homo sapiens
  chr9:110353020-110353041
  hypo
ttgggggacagagtttcgctc

SEQ ID NO: 162584 - DNA, 356 bp, Homo sapiens; identical to SEQ ID NO: 77957
  chr9:110390659-110391015
  hypo

SEQ ID NO: 162585 - DNA, 30 bp, Homo sapiens
  chr9:110394457-110394487
  hypo
tctcgtgtgactggccgtcagtggcacctg

SEQ ID NO: 162586 - DNA, 30 bp, Homo sapiens
  chr9:110394773-110394803
  hypo
cttgtgtgtacttgtcggtgtgcggagtat

SEQ ID NO: 162587 - DNA, 77 bp, Homo sapiens; identical to SEQ ID NO: 23356
  chr9:110478887-110478964
  hypo

SEQ ID NO: 162588 - DNA, 184 bp, Homo sapiens; identical to SEQ ID NO: 77959
  chr9:110531374-110531558
  hypo

SEQ ID NO: 162589 - DNA, 31 bp, Homo sapiens; identical to SEQ ID NO: 77960
  chr9:110558849-110558880
  hypo

SEQ ID NO: 162590 - DNA, 215 bp, Homo sapiens; identical to SEQ ID NO: 77961
  chr9:110779879-110780094
  hypo

SEQ ID NO: 162591 - DNA, 30 bp, Homo sapiens; identical to SEQ ID NO: 23358
  chr9:110813284-110813314
  hypo

SEQ ID NO: 162592 - DNA, 186 bp, Homo sapiens; identical to SEQ ID NO: 23359
  chr9:110842927-110843113
  hypo

SEQ ID NO: 162593 - DNA, 45 bp, Homo sapiens; identical to SEQ ID NO: 77964
  chr9:110861944-110861989
  hypo

SEQ ID NO: 162594 - DNA, 30 bp, Homo sapiens; identical to SEQ ID NO: 46436
  chr9:110888462-110888492
  hypo

SEQ ID NO: 162595 - DNA, 20 bp, Homo sapiens
  chr9:110976599-110976619
  hypo
acaagtcggccagatgcggg

SEQ ID NO: 162596 - DNA, 30 bp, Homo sapiens; identical to SEQ ID NO: 23360
  chr9:111033910-111033940
  hypo

SEQ ID NO: 162597 - DNA, 31 bp, Homo sapiens; identical to SEQ ID NO: 23361
  chr9:111212068-111212099
  hypo

SEQ ID NO: 162598 - DNA, 33 bp, Homo sapiens; identical to SEQ ID NO: 77969
  chr9:111446305-111446338
  hypo

SEQ ID NO: 162599 - DNA, 171 bp, Homo sapiens
  chr9:111465837-111466008
  hypo
ctcctggcctttccctgagtacgcccaggcatgtcaaaaccctgatgtgagcgactggaaacataacctgctacttgtctgcaacgatgtaatagaagaaccaggaaacacgcttagtgtcataagagaggttcaacaactattacttacggcattgtctgtcaccagacc

SEQ ID NO: 162600 - DNA, 30 bp, Homo sapiens
  chr9:111526385-111526415
  hypo
aattgcgggggtccacgtatacgcagattt

SEQ ID NO: 162601 - DNA, 30 bp, Homo sapiens; identical to SEQ ID NO: 77970
  chr9:111617046-111617076
  hypo

SEQ ID NO: 162602 - DNA, 50 bp, Homo sapiens; identical to SEQ ID NO: 77971
  chr9:111617455-111617505
  hypo

SEQ ID NO: 162603 - DNA, 67 bp, Homo sapiens; identical to SEQ ID NO: 77972
  chr9:111617923-111617990
  hypo

SEQ ID NO: 162604 - DNA, 30 bp, Homo sapiens
  chr9:111623972-111624002
  hypo
cagtcacggacaatacgtacatgaatgagc

SEQ ID NO: 162605 - DNA, 30 bp, Homo sapiens
  chr9:111624574-111624604
  hypo
ttctaagagtggtgcggctcttgacaacat

SEQ ID NO: 162606 - DNA, 30 bp, Homo sapiens; identical to SEQ ID NO: 77973
  chr9:111625747-111625777
  hypo

SEQ ID NO: 162607 - DNA, 30 bp, Homo sapiens
  chr9:111693316-111693346
  hypo
gaaccaatgagcaccgtcccctgttcagtt

SEQ ID NO: 162608 - DNA, 193 bp, Homo sapiens; identical to SEQ ID NO: 23362
  chr9:111835845-111836038
  hypo

SEQ ID NO: 162609 - DNA, 34 bp, Homo sapiens; identical to SEQ ID NO: 77975
  chr9:111876330-111876364
  hypo

SEQ ID NO: 162610 - DNA, 29 bp, Homo sapiens
  chr9:111894539-111894568
  hypo
ccaccgcgcccggccgatacaacttttta

SEQ ID NO: 162611 - DNA, 30 bp, Homo sapiens; identical to SEQ ID NO: 23363
  chr9:111930182-111930212
  hypo

SEQ ID NO: 162612 - DNA, 30 bp, Homo sapiens; identical to SEQ ID NO: 77978
  chr9:111936760-111936790
  hypo

SEQ ID NO: 162613 - DNA, 188 bp, Homo sapiens; identical to SEQ ID NO: 77979
  chr9:111951146-111951334
  hypo

SEQ ID NO: 162614 - DNA, 59 bp, Homo sapiens; identical to SEQ ID NO: 77980
  chr9:111952370-111952429
  hypo

SEQ ID NO: 162615 - DNA, 31 bp, Homo sapiens; identical to SEQ ID NO: 77981
  chr9:112029751-112029782
  hypo

SEQ ID NO: 162616 - DNA, 268 bp, Homo sapiens; identical to SEQ ID NO: 77982
  chr9:112040327-112040595
  hypo

SEQ ID NO: 162617 - DNA, 30 bp, Homo sapiens
  chr9:112052289-112052319
  hypo
tatctttctgttcttcgacagtacctaacg

SEQ ID NO: 162618 - DNA, 1939 bp, Homo sapiens; identical to SEQ ID NO: 118000
  chr9:112081563-112083502
  hypo

SEQ ID NO: 162619 - DNA, 79 bp, Homo sapiens; identical to SEQ ID NO: 77985
  chr9:112295750-112295829
  hypo

SEQ ID NO: 162620 - DNA, 30 bp, Homo sapiens
  chr9:112593096-112593126
  hypo
tgctactgaaggtcacgcagtcagcattga

SEQ ID NO: 162621 - DNA, 30 bp, Homo sapiens; identical to SEQ ID NO: 23368
  chr9:112664145-112664175
  hypo

SEQ ID NO: 162622 - DNA, 85 bp, Homo sapiens; identical to SEQ ID NO: 77987
  chr9:112847320-112847405
  hypo

SEQ ID NO: 162623 - DNA, 29 bp, Homo sapiens
  chr9:112957098-112957127
  hypo
acaggtgtgagccacggcgcccggccgag

SEQ ID NO: 162624 - DNA, 21 bp, Homo sapiens
  chr9:112965594-112965615
  hypo
ggccagccaaaggaaactttt

SEQ ID NO: 162625 - DNA, 30 bp, Homo sapiens
  chr9:113011111-113011141
  hypo
aaaatcaaggccgggcgtggtggataatcc

SEQ ID NO: 162626 - DNA, 305 bp, Homo sapiens; identical to SEQ ID NO: 118005
  chr9:113017455-113017760
  hypo

SEQ ID NO: 162627 - DNA, 102 bp, Homo sapiens; identical to SEQ ID NO: 118006
  chr9:113017834-113017936
  hypo

SEQ ID NO: 162628 - DNA, 21 bp, Homo sapiens
  chr9:113025658-113025679
  hypo
cctgggcgtgtctaaaaacaa

SEQ ID NO: 162629 - DNA, 20 bp, Homo sapiens
  chr9:113120483-113120503
  hypo
gttgtcttgcttcacaaaac

SEQ ID NO: 162630 - DNA, 18 bp, Homo sapiens
  chr9:113179381-113179399
  hypo
aggaggaggagccaagat

SEQ ID NO: 162631 - DNA, 204 bp, Homo sapiens; identical to SEQ ID NO: 23370
  chr9:113592869-113593073
  hypo

SEQ ID NO: 162632 - DNA, 30 bp, Homo sapiens; identical to SEQ ID NO: 77992
  chr9:113733116-113733146
  hypo

SEQ ID NO: 162633 - DNA, 19 bp, Homo sapiens
  chr9:113785035-113785054
  hypo
aaaaccctgctattgccgg

SEQ ID NO: 162634 - DNA, 46 bp, Homo sapiens; identical to SEQ ID NO: 77994
  chr9:113897403-113897449
  hypo

SEQ ID NO: 162635 - DNA, 30 bp, Homo sapiens
  chr9:114151908-114151938
  hypo
tggtaacgataaagtcgaggaactagctga

SEQ ID NO: 162636 - DNA, 92 bp, Homo sapiens
  chr9:114173537-114173629
  hypo
aataaagtgaacactcgaggtttcactggatgctaatgcatcgagcttagggaacaagagaaaccttgagtttctaacggaattttgagaag

SEQ ID NO: 162637 - DNA, 30 bp, Homo sapiens
  chr9:114173988-114174018
  hypo
gattaggtgtgttcacggtggtacggctgc

SEQ ID NO: 162638 - DNA, 17 bp, Homo sapiens
  chr9:114247608-114247625
  hypo
caaaaagaaaaaaaaaa

SEQ ID NO: 162639 - DNA, 121 bp, Homo sapiens
  chr9:114319644-114319765
  hypo
ctccatctccagtaaaaaaaaaaagatgacttgaacacatggaaaggtaccatgccgttgaacaggaaaactcattatcttttttttgctttttttttggagatggagtctcgctctgtct

SEQ ID NO: 162640 - DNA, 31 bp, Homo sapiens; identical to SEQ ID NO: 23371
  chr9:114320409-114320440
  hypo

SEQ ID NO: 162641 - DNA, 26 bp, Homo sapiens
  chr9:114326074-114326100
  hypo
cgtgcccagagcgattaagcaatttc

SEQ ID NO: 162642 - DNA, 31 bp, Homo sapiens; identical to SEQ ID NO: 77998
  chr9:114352193-114352224
  hypo

SEQ ID NO: 162643 - DNA, 221 bp, Homo sapiens; identical to SEQ ID NO: 77999
  chr9:114556867-114557088
  hypo

SEQ ID NO: 162644 - DNA, 241 bp, Homo sapiens
  chr9:114619239-114619480
  hypo
tctcctctttgcccttattttttaaagcccagtgtttattttttttctcttaagcatcaggcttgtgaagttgaaaaccatgactttcaagattattgtctcttacaaaagtctacctgaaggctcaaaatgcaaaaattcaactcatgtgtatgtgtgtgtgtatacaaaaatcttttcctgttcttggatagtggggagaatgatctgagcaaaacaaagaaaaaaaaaccggccaggc

SEQ ID NO: 162645 - DNA, 23 bp, Homo sapiens
  chr9:114649574-114649597
  hypo
aagtgctgggattacacgcatga

SEQ ID NO: 162646 - DNA, 181 bp, Homo sapiens
  chr9:114656963-114657144
  hypo
aattaactctaagatggcattgactgtgagatgcattcccatttcagagaaattaaaatttgttaaagtgtttttttgaagtgtgccttagaattaactacaatcgtaaatttttgtttggaacgttatttcgatgttagaattctattccacttttttttaagacagggactcactgtca

SEQ ID NO: 162647 - DNA, 17 bp, Homo sapiens
  chr9:114670202-114670219
  hypo
ccagcctaccttatttt

SEQ ID NO: 162648 - DNA, 17 bp, Homo sapiens
  chr9:114683165-114683182
  hypo
ccagttttatgttgtcg

SEQ ID NO: 162649 - DNA, 17 bp, Homo sapiens
  chr9:114686351-114686368
  hypo
gcccatggtgcctggcc

SEQ ID NO: 162650 - DNA, 38 bp, Homo sapiens; identical to SEQ ID NO: 23376
  chr9:114701510-114701548
  hypo

SEQ ID NO: 162651 - DNA, 22 bp, Homo sapiens
  chr9:114728193-114728215
  hypo
ttaaaggtggccgggcgtggtg

SEQ ID NO: 162652 - DNA, 20 bp, Homo sapiens
  chr9:114747964-114747984
  hypo
ttttctctcggctgggcgag

SEQ ID NO: 162653 - DNA, 21 bp, Homo sapiens
  chr9:114749646-114749667
  hypo
gtagccaggtgtggtggctca

SEQ ID NO: 162654 - DNA, 158 bp, Homo sapiens
  chr9:114750308-114750466
  hypo
tggccaatgatgaatcgtttagctatagagactcaaggcccttcacaacggaaggcatggcagaagctctcacccacattgcacgtgaaagaggccctgctcagaatggcctctccctgctccttcacaaacctagcgtcacccttctagcttctgaa

SEQ ID NO: 162655 - DNA, 22 bp, Homo sapiens
  chr9:114765804-114765826
  hypo
ctgtaagcgtgtattctatggt

SEQ ID NO: 162656 - DNA, 33 bp, Homo sapiens; identical to SEQ ID NO: 78010
  chr9:114789966-114789999
  hypo

SEQ ID NO: 162657 - DNA, 31 bp, Homo sapiens; identical to SEQ ID NO: 78011
  chr9:114802062-114802093
  hypo

SEQ ID NO: 162658 - DNA, 182 bp, Homo sapiens
  chr9:114823148-114823330
  hypo
ggtggtggtcaagagcaaggtcgaggctcacctgtgcccatttggttccgtacattgctcactagaggcatcatcgacagagtatgaatcagctccccaattagcctgaccgtaatcacctgtgttgcttgattattatacaaattccccgacctcataccgacctactgaatcgaaatctc

SEQ ID NO: 162659 - DNA, 203 bp, Homo sapiens; identical to SEQ ID NO: 23381
  chr9:114830991-114831194
  hypo

SEQ ID NO: 162660 - DNA, 138 bp, Homo sapiens; identical to SEQ ID NO: 23382
  chr9:114832552-114832690
  hypo

SEQ ID NO: 162661 - DNA, 182 bp, Homo sapiens
  chr9:114860721-114860903
  hypo
cacaaaaaagaaagacgtctacacccacctgctgggggagttgctattgttatttgcactgagtgccgcttaggagatctcagcagggtcacattcaccgtataatcagtcgtagggtacagatccaaacacactacaggcacttgttccctcgttgtgaagttaaacgatgttgcatgaga

SEQ ID NO: 162662 - DNA, 31 bp, Homo sapiens; identical to SEQ ID NO: 78014
  chr9:114889345-114889376
  hypo

SEQ ID NO: 162663 - DNA, 21 bp, Homo sapiens
  chr9:114917241-114917262
  hypo
agggcagggccaggtgcggtg

SEQ ID NO: 162664 - DNA, 100 bp, Homo sapiens
  chr9:114931838-114931938
  hypo
gagtgccattcatttacgccacaccctacggttcacgtcaggcagtcactcacttaacccctaccggttcttttcacacctgtctcatacctgattcatt

SEQ ID NO: 162665 - DNA, 31 bp, Homo sapiens; identical to SEQ ID NO: 6985
  chr9:114937351-114937382
  hypo

SEQ ID NO: 162666 - DNA, 193 bp, Homo sapiens; identical to SEQ ID NO: 118023
  chr9:114937754-114937947
  hypo

SEQ ID NO: 162667 - DNA, 199 bp, Homo sapiens
  chr9:115040852-115041051
  hypo
acccaagctcccattcgtgctgcactatcaaataaagacctaagatgacaaacttttaccaagaaatgtgcaattataaatcaccattttagggtgttaattgttccgtattataaaatacctgggctatgttaagagcgcagagctatgaaatcagatatcctgttctgagcaagttatttaacgttactaagcctca

SEQ ID NO: 162668 - DNA, 32 bp, Homo sapiens; identical to SEQ ID NO: 78018
  chr9:115067925-115067957
  hypo

SEQ ID NO: 162669 - DNA, 78 bp, Homo sapiens
  chr9:115087415-115087493
  hypo
gataagagtcaagagacggcaaaatgcctaggcaaagagggaagggtccccggagaaccttcgacctgcccaggtcat

SEQ ID NO: 162670 - DNA, 121 bp, Homo sapiens
  chr9:115087612-115087733
  hypo
gggggaagggggtggagccaccaggaattcacgccttaggctagggagtgtggtggcctggtattcaacctgaggtggaagccagctggcgggacccctctctttgctgagagctcccctt

SEQ ID NO: 162671 - DNA, 30 bp, Homo sapiens; identical to SEQ ID NO: 78020
  chr9:115172301-115172331
  hypo

SEQ ID NO: 162672 - DNA, 83 bp, Homo sapiens; identical to SEQ ID NO: 78021
  chr9:115445175-115445258
  hypo

SEQ ID NO: 162673 - DNA, 36 bp, Homo sapiens; identical to SEQ ID NO: 23385
  chr9:115478926-115478962
  hypo

SEQ ID NO: 162674 - DNA, 95 bp, Homo sapiens; identical to SEQ ID NO: 78023
  chr9:115479261-115479356
  hypo

SEQ ID NO: 162675 - DNA, 79 bp, Homo sapiens
  chr9:115519016-115519095
  hypo
aggcgtgagccactgcgctcggctccttcacctttttaacagttcatctgctctctcccacggccgcaccctgcgttgt

SEQ ID NO: 162676 - DNA, 200 bp, Homo sapiens
  chr9:115550631-115550831
  hypo
gcagagtgcactccgcgtgtgtagtaccatgtcagatggtagcacagaaacatgtcaatgagaaccaggctttgtaagatgaacagatggtacagttaagaggaattgggcgaagggtaggaaaagaactattgtttatgaaggggtcgttctaggcaccttcttcctacctaaggaacgcctggattgtggtgtagcac

SEQ ID NO: 162677 - DNA, 210 bp, Homo sapiens; identical to SEQ ID NO: 78025
  chr9:115598522-115598732
  hypo

SEQ ID NO: 162678 - DNA, 76 bp, Homo sapiens
  chr9:115599297-115599373
  hypo
tacatatgcatggggcggacagacgtgagcagtgtaaatgatcgcactggcatgggaagcacgttgaggattcccc

SEQ ID NO: 162679 - DNA, 30 bp, Homo sapiens
  chr9:115602335-115602365
  hypo
gtactaaactgtggacggtggaaaatggag

SEQ ID NO: 162680 - DNA, 23 bp, Homo sapiens
  chr9:115603312-115603335
  hypo
attacaggcgtgagccactgcac

SEQ ID NO: 162681 - DNA, 31 bp, Homo sapiens; identical to SEQ ID NO: 23386
  chr9:115619370-115619401
  hypo

SEQ ID NO: 162682 - DNA, 274 bp, Homo sapiens; identical to SEQ ID NO: 78027
  chr9:115630951-115631225
  hypo

SEQ ID NO: 162683 - DNA, 145 bp, Homo sapiens; identical to SEQ ID NO: 78028
  chr9:115948532-115948677
  hypo

SEQ ID NO: 162684 - DNA, 102 bp, Homo sapiens; identical to SEQ ID NO: 78029
  chr9:116043448-116043550
  hypo

SEQ ID NO: 162685 - DNA, 65 bp, Homo sapiens
  chr9:116047379-116047444
  hypo
tttgatcgttcctgccgtacctgcttcacaggtctgttagaaagatcatccgagataatagatat

SEQ ID NO: 162686 - DNA, 30 bp, Homo sapiens
  chr9:116049765-116049795
  hypo
aaaaaaaaaaaacttcggaagcaccctgtt

SEQ ID NO: 162687 - DNA, 30 bp, Homo sapiens
  chr9:116050483-116050513
  hypo
atacagtgcgtgtggcgcgggtaatgtggc

SEQ ID NO: 162688 - DNA, 98 bp, Homo sapiens; identical to SEQ ID NO: 78030
  chr9:116054116-116054214
  hypo

SEQ ID NO: 162689 - DNA, 30 bp, Homo sapiens; identical to SEQ ID NO: 78031
  chr9:116054754-116054784
  hypo

SEQ ID NO: 162690 - DNA, 30 bp, Homo sapiens; identical to SEQ ID NO: 78032
  chr9:116055512-116055542
  hypo

SEQ ID NO: 162691 - DNA, 963 bp, Homo sapiens
  chr9:116059810-116060773
  hypo
taccaaatgaggctccgtagtcaccatacccagcagcaaccgaaaaaggtttggtttcttgtctgggaacagcactcaccccacaccccaaaggaactgcttggtccaaaagatggagaatatgagcaacagagtgacactgaggatgacggccatcaggtaggcaaagatgcggaactgagggttgcggaaacactccctcaaagagtggtggctggggatgaggatgggcgtagacacggtggcagaggccgtgtctgggggcggcccagtctggcccccaggctgggggccaaggtccagcgtgtagacttgaggctggcgcaggaagtagcggctcttgggctggtccttgaggcacagctgatggccttccaggatgacatggtggggctccaggcggagcagggcgagcatggcagtgtccgtgggcaagtcagtgacaggctgccctgaggccagcactgtgggctggcgacagagtgggcacagcaggcggcgccgggctggagtcacaaggctgaggtgggccagacattccacgcagaaggagtggcagcaatccagcattttgggggtatggaacgtgttgttgaaggggttccagcagacggggcactcagcctcaagctcccggccctgctgctcagccatcctcagccacacacggggaggcttcgcgggagacgtcctggcagaagggggaaaggagcaaaggaacagccatgaagtcccatccttgtgcttggcctggggcaaagtgttctgtgggtgttgaaaggtgtaatcaccacgttttacttaggttcaaaagcgttttgttcttgatcaccagttcctaacccatcgagttgagtcaaatgctcctacagcctcccctctgtcaaggtgaaggcctgggccacccctaccaagagcccccaagagagccggcattggagcagatgtcgccctgggctttgg

SEQ ID NO: 162692 - DNA, 234 bp, Homo sapiens
  chr9:116061762-116061996
  hypo
gaagcttaagagctccgactatcagattcagtccagtcacccgctgatcttttaatgtgcctaagtaactgcaatcagcgtgtacaaacctcgctgccttctgctttgttcttagcacacagctggtcagccttctgagatcttagagctggccatcccaccaaccttagggagttaaagcggggagttggagggaggcgcactccagcccagcttctccgtttcaaccagaaa

SEQ ID NO: 162693 - DNA, 128 bp, Homo sapiens
  chr9:116062910-116063038
  hypo
cagcatgtgtggccccgaggtgagaaaagctcttccaatttgagaaagtgaaaggagcccagggtgatcaaggtgtggtgaccggagtaggcaaggtgggagggtatagtactcgggacctgtgaact

SEQ ID NO: 162694 - DNA, 30 bp, Homo sapiens
  chr9:116065350-116065380
  hypo
cgcctcctccgcctccgttcgtgcagccct

SEQ ID NO: 162695 - DNA, 621 bp, Homo sapiens
  chr9:116065579-116066200
  hypo
tttctctgaggggatcaagtgcgctcatccttgcaggcctctgttctgggtccgattgatctcctgccatcccctcggattccactgtcctctgtgcgctgacctgcctcgactcctggcttctgccgagatggatccttccctatgctgagtccctgtaaccaaaatacagatagctcttgcaaaatactgacaaaagcggccactaatacagcagaaaaatagtcgggagacggttgagcgtctgcctgaagagccagggttctcaagcaaggcacacttctaggtcagagttcagccctcactgagaatccaaactccgtttaactaccgatggagacttgagcaaattaattaacttctgccagcctcagtttcctcacctgaaaatggccataataacctacctacttgatctgtagattaaatgaggtaatacgtgtcgagatcgcgtaataacacagggcctggcagacagtaactcgctaaatgttaaccagaactattattgttataaccggtctgttcacgtggcccatcttttgttcccgctcaaattctttttgtacctatggtcctcttttctttctctctctctttctttctttttttttttctttc

SEQ ID NO: 162696 - DNA, 33 bp, Homo sapiens; identical to SEQ ID NO: 78037
  chr9:116076149-116076182
  hypo

SEQ ID NO: 162697 - DNA, 38 bp, Homo sapiens; identical to SEQ ID NO: 78038
  chr9:116076764-116076802
  hypo

SEQ ID NO: 162698 - DNA, 31 bp, Homo sapiens; identical to SEQ ID NO: 23390
  chr9:116091907-116091938
  hypo

SEQ ID NO: 162699 - DNA, 31 bp, Homo sapiens; identical to SEQ ID NO: 23391
  chr9:116104971-116105002
  hypo

SEQ ID NO: 162700 - DNA, 402 bp, Homo sapiens; identical to SEQ ID NO: 46467
  chr9:116111660-116112062
  hypo

SEQ ID NO: 162701 - DNA, 31 bp, Homo sapiens; identical to SEQ ID NO: 23393
  chr9:116118819-116118850
  hypo

SEQ ID NO: 162702 - DNA, 31 bp, Homo sapiens; identical to SEQ ID NO: 23394
  chr9:116128844-116128875
  hypo

SEQ ID NO: 162703 - DNA, 39 bp, Homo sapiens; identical to SEQ ID NO: 78044
  chr9:116222777-116222816
  hypo

SEQ ID NO: 162704 - DNA, 66 bp, Homo sapiens
  chr9:116259620-116259686
  hypo
ggggagcacctgggccggaccaagcacttgaaggtggccaggcggcgactgcggccgctgagaggt

SEQ ID NO: 162705 - DNA, 54 bp, Homo sapiens; identical to SEQ ID NO: 23395
  chr9:116269882-116269936
  hypo

SEQ ID NO: 162706 - DNA, 30 bp, Homo sapiens
  chr9:116299130-116299160
  hypo
tgtgctggtgcctgtcggagaacatcgcca

SEQ ID NO: 162707 - DNA, 117 bp, Homo sapiens
  chr9:116299415-116299532
  hypo
cagagccaaattaagcgtggcccatcagttctgcactctgttcttcggtttgcctatggcaaggtttaattcgggctggcctccctgatgctgcctggcatgcgttcacctctgcca

SEQ ID NO: 162708 - DNA, 170 bp, Homo sapiens
  chr9:116331271-116331441
  hypo
cagtgggcctaagtcatcactcgagatgtgtggatagctgccaggtatgctccagatggcccagggcttctcccctctccctgccctccatgggccagcccgcttgcacctggtaccgtggctcaggctgctgccggagaactgtcagcggctcccaacttagaaagggg

SEQ ID NO: 162709 - DNA, 31 bp, Homo sapiens; identical to SEQ ID NO: 78047
  chr9:116332904-116332935
  hypo

SEQ ID NO: 162710 - DNA, 30 bp, Homo sapiens; identical to SEQ ID NO: 78048
  chr9:116333234-116333264
  hypo

SEQ ID NO: 162711 - DNA, 30 bp, Homo sapiens; identical to SEQ ID NO: 23396
  chr9:116337270-116337300
  hypo

SEQ ID NO: 162712 - DNA, 183 bp, Homo sapiens; identical to SEQ ID NO: 78050
  chr9:116344623-116344806
  hypo

SEQ ID NO: 162713 - DNA, 30 bp, Homo sapiens; identical to SEQ ID NO: 78051
  chr9:116346484-116346514
  hypo

SEQ ID NO: 162714 - DNA, 149 bp, Homo sapiens
  chr9:116634760-116634909
  hypo
taaactcaggcacgccgagttgaaccacagaccctcagaagatgggagagcctgtgggtgtccctcccggaccacgcttccaccgatgtgagcatctgttcttccacacccctgaccaacagtcatttttccaacgctgtatcacagag

SEQ ID NO: 162715 - DNA, 243 bp, Homo sapiens; identical to SEQ ID NO: 118044
  chr9:116638745-116638988
  hypo

SEQ ID NO: 162716 - DNA, 55 bp, Homo sapiens; identical to SEQ ID NO: 6991
  chr9:116639070-116639125
  hypo

SEQ ID NO: 162717 - DNA, 24 bp, Homo sapiens
  chr9:116662611-116662635
  hypo
gattacaggcgtgagccaccatgc

SEQ ID NO: 162718 - DNA, 234 bp, Homo sapiens
  chr9:116663445-116663679
  hypo
agcactgtcctctcccgctgctgcgagagagcgtttgttgcacttgagggtctaaactttgtctccagttctcctcagggcagaatctctccttttcctcaagttctcctgcgtcgttgggcctcagcgtctccaacatttaaaacgggcatctccttgccccgtctcctgtctaggcagctgttgctctcgcccttctctgtgcggacttggccagcccggtgctttgccaga

SEQ ID NO: 162719 - DNA, 30 bp, Homo sapiens
  chr9:116664187-116664217
  hypo
cagtgggggggacatcgcgctgagcatctg

SEQ ID NO: 162720 - DNA, 82 bp, Homo sapiens; identical to SEQ ID NO: 78054
  chr9:116671456-116671538
  hypo

SEQ ID NO: 162721 - DNA, 138 bp, Homo sapiens; identical to SEQ ID NO: 23400
  chr9:116671887-116672025
  hypo

SEQ ID NO: 162722 - DNA, 30 bp, Homo sapiens
  chr9:116678595-116678625
  hypo
tggaccggtggattccgcatctttctgcta

SEQ ID NO: 162723 - DNA, 151 bp, Homo sapiens; identical to SEQ ID NO: 78056
  chr9:116681838-116681989
  hypo

SEQ ID NO: 162724 - DNA, 30 bp, Homo sapiens
  chr9:116696748-116696778
  hypo
aaaacacatggaacgcgctgaagcccgtgt

SEQ ID NO: 162725 - DNA, 129 bp, Homo sapiens; identical to SEQ ID NO: 78057
  chr9:116697027-116697156
  hypo

SEQ ID NO: 162726 - DNA, 31 bp, Homo sapiens; identical to SEQ ID NO: 78058
  chr9:116698062-116698093
  hypo

SEQ ID NO: 162727 - DNA, 164 bp, Homo sapiens; identical to SEQ ID NO: 78059
  chr9:116708858-116709022
  hypo

SEQ ID NO: 162728 - DNA, 30 bp, Homo sapiens
  chr9:116709985-116710015
  hypo
tggtgtggaggcttccgagctggttcgagg

SEQ ID NO: 162729 - DNA, 30 bp, Homo sapiens
  chr9:116710478-116710508
  hypo
tcaagcatactccatcgccattgtcaaccc

SEQ ID NO: 162730 - DNA, 30 bp, Homo sapiens
  chr9:116720932-116720962
  hypo
gcccaggctgattcccgtaaacactaccct

SEQ ID NO: 162731 - DNA, 30 bp, Homo sapiens
  chr9:116727454-116727484
  hypo
ttattttatcgaaatcgttggccagccccc

SEQ ID NO: 162732 - DNA, 156 bp, Homo sapiens
  chr9:116728165-116728321
  hypo
tcattctggctgcaccgttggagaaggccttcgggctgtgtggtctggtggccactcatgagatgccgacttgcagcttgggattcggggaaggccttgaggcagaagacccatggtccaccccaggctggctctgcgactcgttcatcttataca

SEQ ID NO: 162733 - DNA, 31 bp, Homo sapiens; identical to SEQ ID NO: 23403
  chr9:116730184-116730215
  hypo

SEQ ID NO: 162734 - DNA, 30 bp, Homo sapiens
  chr9:116747948-116747978
  hypo
gatgtggggcagcctcggctgtgggtgagg

SEQ ID NO: 162735 - DNA, 30 bp, Homo sapiens
  chr9:116748415-116748445
  hypo
cagttccaggccaggcgctgtgctgagtac

SEQ ID NO: 162736 - DNA, 217 bp, Homo sapiens; identical to SEQ ID NO: 78062
  chr9:116749790-116750007
  hypo

SEQ ID NO: 162737 - DNA, 36 bp, Homo sapiens; identical to SEQ ID NO: 78063
  chr9:116750066-116750102
  hypo

SEQ ID NO: 162738 - DNA, 315 bp, Homo sapiens; identical to SEQ ID NO: 23404
  chr9:116750639-116750954
  hypo

SEQ ID NO: 162739 - DNA, 151 bp, Homo sapiens; identical to SEQ ID NO: 78065
  chr9:116760430-116760581
  hypo

SEQ ID NO: 162740 - DNA, 164 bp, Homo sapiens; identical to SEQ ID NO: 78066
  chr9:116761524-116761688
  hypo

SEQ ID NO: 162741 - DNA, 280 bp, Homo sapiens; identical to SEQ ID NO: 78067
  chr9:116762417-116762697
  hypo

SEQ ID NO: 162742 - DNA, 255 bp, Homo sapiens
  chr9:116770599-116770854
  hypo
ctgccgcctcctgcccgggcgcagtgtttagtgtggaaggggcccctgagaaccgggcaggtaagtccttggtgtctgcttgtcacctcccctgtccccggctgggctcctgagacctgggggaccagggtgctaagggccgtgtgttctcccacagaccccttcgaccaaggtgtcgtggccacggacgaggtgaaggaggagcccccggagccattccagaaaatcgggccaagtatgcgggattccctctgg

SEQ ID NO: 162743 - DNA, 341 bp, Homo sapiens; identical to SEQ ID NO: 23407
  chr9:116790928-116791269
  hypo

SEQ ID NO: 162744 - DNA, 133 bp, Homo sapiens
  chr9:116796578-116796711
  hypo
aataagtagtagcgccgggctggaaccgaggtctccagatgtgccctgtgctcccagccaagccatgctgcacccccatgcgtcccctgcccccagagctaatattcacaatcgggaacgatagcgcaagcac

SEQ ID NO: 162745 - DNA, 31 bp, Homo sapiens; identical to SEQ ID NO: 23408
  chr9:116797924-116797955
  hypo

SEQ ID NO: 162746 - DNA, 324 bp, Homo sapiens; identical to SEQ ID NO: 78071
  chr9:116798286-116798610
  hypo

SEQ ID NO: 162747 - DNA, 676 bp, Homo sapiens; identical to SEQ ID NO: 78072
  chr9:116800626-116801302
  hypo

SEQ ID NO: 162748 - DNA, 1452 bp, Homo sapiens; identical to SEQ ID NO: 78073
  chr9:116810951-116812403
  hypo

SEQ ID NO: 162749 - DNA, 99 bp, Homo sapiens
  chr9:116812705-116812804
  hypo
gaaactttgcacacacgcacacacacacacacacacacacacacacacacgaccctggtgcgtgtacatacgcctgtgcttggacgggtgtgcattgaa

SEQ ID NO: 162750 - DNA, 420 bp, Homo sapiens
  chr9:116813597-116814017
  hypo
ctgtgctatttggagaccaggcgttggggaggattcacgggttccacagctgcggggtttggtggccgtaggggaagcagtggtttgggagttctgaatgtaagcgccagagctgccctcctggtccgctgtgcgtggtacccagtgtgcatcacactactcaccccctcccggaccctggcagtccacagcgactccgaagtcagcccatagtcacatccaccacacctcagacctgccacagcctctcctcacttcccaggaccctgaggcttccaggagctctgctgcccacagccctcggggtcctcactcacacctccgacttccaggacggcagtgagcatggtgccttgtggccccaacagttgatgttccgagggtgggatggtgtttggccatgttcgactcgatgctgtg

SEQ ID NO: 162751 - DNA, 422 bp, Homo sapiens
  chr9:116817233-116817655
  hypo
acccaccacgggtgtcgctttaaagagtcaattcttgtacagagaaggatttgctaggtttgcatttgggtgttagcatcacgacccacgagggccctgcccaaccgtgcgtcccatggggcaccttgactcttcaaaccaaaattccttaaaggggcacagcccagccttgtccgcaacctcaggggcctgggattcctgtggcgcttcctgaattccaggttggcacagatgatgaggtctgagaccagccggaaggaggggctcctgccataacccaggtgccagccggtctccgcctaggaccttccctcccgcccagccagggtgggcggcatcctacgcggtgaaacgagctcatggactgacccggggctgggcctcgccagccaggagagagcgagggccgcacggcagggctg

SEQ ID NO: 162752 - DNA, 30 bp, Homo sapiens; identical to SEQ ID NO: 78076
  chr9:116822835-116822865
  hypo

SEQ ID NO: 162753 - DNA, 202 bp, Homo sapiens
  chr9:116823661-116823863
  hypo
cttgagggtgcagagcgcacaggggtggggacccgcactcacccacagttcggcaggtctgcagacactccttttctgtgacgaagttgttaccgttgcccatgcagccgccgtactggaaagtctcacaggccatggatgtaccattatagaaatacctgctggtcattcccatgcagggaccggccgagtagcccagctg

SEQ ID NO: 162754 - DNA, 44 bp, Homo sapiens; identical to SEQ ID NO: 78078
  chr9:116832917-116832961
  hypo

SEQ ID NO: 162755 - DNA, 201 bp, Homo sapiens; identical to SEQ ID NO: 23415
  chr9:116856484-116856685
  hypo

SEQ ID NO: 162756 - DNA, 246 bp, Homo sapiens; identical to SEQ ID NO: 78080
  chr9:116857251-116857497
  hypo

SEQ ID NO: 162757 - DNA, 31 bp, Homo sapiens; identical to SEQ ID NO: 78081
  chr9:116894967-116894998
  hypo

SEQ ID NO: 162758 - DNA, 31 bp, Homo sapiens; identical to SEQ ID NO: 78082
  chr9:116930483-116930514
  hypo

SEQ ID NO: 162759 - DNA, 433 bp, Homo sapiens
  chr9:116971562-116971995
  hypo
ccatggcaggagccacgggcacctaccagcatccctgggggtgggcagggcttggtgccgtgctagcatctaacccagccgcgagcttccttctgcaggtcctggagccctggcgtggggcgggcctcctgccggcgagcgcctgcgcccttccctggcgtgagggtatgtgcctttggactacatcgtggaagccagcaccatgcagtccatgggcatatacacttgcctcaaggcctatgtcatcgaggagccaccggagctgccactgccaccagggaggaagaggaggagccgggatgtgggatggcagtggtgggtgggctgcggcaggttgggccagccacacctcactgcttgaccgctctgaccccctttcttctctttcctagggctacattgggctcccagggctcttcggcctgccagggtc

SEQ ID NO: 162760 - DNA, 30 bp, Homo sapiens
  chr9:116972206-116972236
  hypo
tttacggtaacttggcgagtttaacactca

SEQ ID NO: 162761 - DNA, 176 bp, Homo sapiens; identical to SEQ ID NO: 23418
  chr9:116973313-116973489
  hypo

SEQ ID NO: 162762 - DNA, 31 bp, Homo sapiens; identical to SEQ ID NO: 23419
  chr9:116995057-116995088
  hypo

SEQ ID NO: 162763 - DNA, 31 bp, Homo sapiens; identical to SEQ ID NO: 78086
  chr9:117031993-117032024
  hypo

SEQ ID NO: 162764 - DNA, 55 bp, Homo sapiens; identical to SEQ ID NO: 78087
  chr9:117038005-117038060
  hypo

SEQ ID NO: 162765 - DNA, 31 bp, Homo sapiens; identical to SEQ ID NO: 23420
  chr9:117038569-117038600
  hypo

SEQ ID NO: 162766 - DNA, 153 bp, Homo sapiens
  chr9:117045884-117046037
  hypo
tgccaggctgctgggcggagcggggctggagcctgcagggagactgctgtgtccccgctgtgagagccacactccataccaacgagggtctcctcctcttgtagggtgctccgggacgcatgggggcccaaggagaaccgggactggctggtt

SEQ ID NO: 162767 - DNA, 30 bp, Homo sapiens; identical to SEQ ID NO: 23421
  chr9:117161867-117161897
  hypo

SEQ ID NO: 162768 - DNA, 30 bp, Homo sapiens
  chr9:117173406-117173436
  hypo
agcaagagaatgaaccgcgagacgtgtcct

SEQ ID NO: 162769 - DNA, 50 bp, Homo sapiens; identical to SEQ ID NO: 78090
  chr9:117179586-117179636
  hypo

SEQ ID NO: 162770 - DNA, 22 bp, Homo sapiens
  chr9:117349223-117349245
  hypo
cgcctggccttcagatcttaaa

SEQ ID NO: 162771 - DNA, 317 bp, Homo sapiens
  chr9:117372621-117372938
  hypo
aatgtttttaatggcaaaaaaacgcaataacttttgcgcaaacctaatattaatatagggacgtttatgtgccccttaaaaggaaatgaggcagtgtggcgcgttctggccgatgagcgccaaggtactttgtcgaatgaaaaagcagagtgcccaacagaatagaaaaggccttcctttgtgtaaacgcacacacgcacaggtacatatgtgctctaaggaaaaatacaaggaaagcacaaggttagtgttttcctcaggggaaaggttacttacttttaaccgtagaccctttgaaattacgaaggatggcgatg

SEQ ID NO: 162772 - DNA, 31 bp, Homo sapiens; identical to SEQ ID NO: 23423
  chr9:118222147-118222178
  hypo

SEQ ID NO: 162773 - DNA, 30 bp, Homo sapiens
  chr9:118506581-118506611
  hypo
cggaagatcatacttcgccattttcctctt

SEQ ID NO: 162774 - DNA, 826 bp, Homo sapiens; identical to SEQ ID NO: 118059
  chr9:118916362-118917188
  hypo

SEQ ID NO: 162775 - DNA, 29 bp, Homo sapiens
  chr9:119040228-119040257
  hypo
gagccaccgtgcctgactgaatatgatta

SEQ ID NO: 162776 - DNA, 30 bp, Homo sapiens
  chr9:119909756-119909786
  hypo
cgttctcttcccccacgcaaccacccagga

SEQ ID NO: 162777 - DNA, 130 bp, Homo sapiens; identical to SEQ ID NO: 78096
  chr9:119976900-119977030
  hypo

SEQ ID NO: 162778 - DNA, 2314 bp, Homo sapiens; identical to SEQ ID NO: 118063
  chr9:120175189-120177503
  hypo

SEQ ID NO: 162779 - DNA, 53 bp, Homo sapiens; identical to SEQ ID NO: 46489
  chr9:120177963-120178016
  hypo

SEQ ID NO: 162780 - DNA, 61 bp, Homo sapiens; identical to SEQ ID NO: 78099
  chr9:123139934-123139995
  hypo

SEQ ID NO: 162781 - DNA, 204 bp, Homo sapiens
  chr9:123140238-123140442
  hypo
caggcacgcagcttgcgtctctccagctccttttgaagaatcttctctcctcttctcactgcgccacctctgatctccagcgcagcagcgtggggacaggagctcagatgattcctaactctatcttcaccataaaacaaatattttgaaaagccttttgatgtcactttaatggagtgtggaaaacaccgttcaaccccccgc

SEQ ID NO: 162782 - DNA, 30 bp, Homo sapiens
  chr9:123140730-123140760
  hypo
tggtcaccgcacgggcgtgatggctttaag

SEQ ID NO: 162783 - DNA, 214 bp, Homo sapiens
  chr9:123146242-123146456
  hypo
agggcgaggccagggcgaccttgttctcttatttccctgtgtctgcccacaccgtcggccagtgtcacacacgagctgggaccacatgctgttctgtttggaacgagaaagtggcattaatacaaacagagggtcgttttagacctgaaaccatgtaattaagctctcccgtgaatgcctgttaacaaggaggtgctttcgcatttgagagaag

SEQ ID NO: 162784 - DNA, 485 bp, Homo sapiens
  chr9:123150758-123151243
  hypo
accttgttaggggctcgggcttggatcagagggtagtgggaagccgctaaagtgttttggctgggggcatcttggtcagaggcagcgatgtggatggctgatgacacacccctgtcatcacgggaacaatgcaaatgccacattccagctctgggcctcactctgctctttgctaaatcgggaatggcaccactgcaagggctgctgtccagcagactgtgagatgctgagcacacaccagtgcccatggccacgctgcacggaggtgctcttctctggacacttgaacgagctcagcagtgagccatgcgactcgtggaaccctggcctgtcccacttgggattttgggacctgggctttgaggcgccacacaaaacaacagaatcgtcaaggtgaaatgaaatgaatcatttaatgagaatcttcaaactgtggcactggctgagtactaagcaaatccaggggaagacgtgaagcccaccaa

SEQ ID NO: 162785 - DNA, 56 bp, Homo sapiens; identical to SEQ ID NO: 78102
  chr9:123162809-123162865
  hypo

SEQ ID NO: 162786 - DNA, 111 bp, Homo sapiens; identical to SEQ ID NO: 78103
  chr9:123163100-123163211
  hypo

SEQ ID NO: 162787 - DNA, 167 bp, Homo sapiens
  chr9:123165254-123165421
  hypo
caggcgggacacacacggagtgctagttgccgaactgccactgtcgcaggagagggagtccgtgtcattcccagagagtggaggagtctctgaaactgtaaaatgagaagtaggatgtaaaatctgtttcaggtaacactctgcgttcaagacgcttatgatgttga

SEQ ID NO: 162788 - DNA, 105 bp, Homo sapiens
  chr9:123171453-123171558
  hypo
tgtgtctctccttctcgctgccttctttctgcagcctttcattttcttccttcacgctggcatactcccgctgaaggtgctccaggctcacggtcttcctggaga

SEQ ID NO: 162789 - DNA, 30 bp, Homo sapiens; identical to SEQ ID NO: 23427
  chr9:123175604-123175634
  hypo

SEQ ID NO: 162790 - DNA, 156 bp, Homo sapiens; identical to SEQ ID NO: 78105
  chr9:123176126-123176282
  hypo

SEQ ID NO: 162791 - DNA, 30 bp, Homo sapiens; identical to SEQ ID NO: 78106
  chr9:123176586-123176616
  hypo

SEQ ID NO: 162792 - DNA, 422 bp, Homo sapiens; identical to SEQ ID NO: 78107
  chr9:123210114-123210536
  hypo

SEQ ID NO: 162793 - DNA, 30 bp, Homo sapiens
  chr9:123246573-123246603
  hypo
tggggccgggggagtcgggggtacgactgt

SEQ ID NO: 162794 - DNA, 30 bp, Homo sapiens
  chr9:123257023-123257053
  hypo
taagaatcatcaggcggcgccggaggcccc

SEQ ID NO: 162795 - DNA, 30 bp, Homo sapiens
  chr9:123263159-123263189
  hypo
ccagggccagaagagcggctgtggctaaag

SEQ ID NO: 162796 - DNA, 30 bp, Homo sapiens
  chr9:123263424-123263454
  hypo
tctcctgtggctctccgcagccagttctgc

SEQ ID NO: 162797 - DNA, 30 bp, Homo sapiens
  chr9:123272609-123272639
  hypo
cacttgtcagggtagcggatgacgggtctc

SEQ ID NO: 162798 - DNA, 72 bp, Homo sapiens; identical to SEQ ID NO: 78108
  chr9:123295276-123295348
  hypo

SEQ ID NO: 162799 - DNA, 19 bp, Homo sapiens
  chr9:123321471-123321490
  hypo
tttaaaacattgaggccgg

SEQ ID NO: 162800 - DNA, 22 bp, Homo sapiens
  chr9:123337368-123337390
  hypo
gcccaggctggagtgcagtggc

SEQ ID NO: 162801 - DNA, 23 bp, Homo sapiens
  chr9:123362247-123362270
  hypo
ccggccaattcagcttaactttt

SEQ ID NO: 162802 - DNA, 125 bp, Homo sapiens; identical to SEQ ID NO: 78112
  chr9:123367535-123367660
  hypo

SEQ ID NO: 162803 - DNA, 31 bp, Homo sapiens; identical to SEQ ID NO: 78113
  chr9:123398974-123399005
  hypo

SEQ ID NO: 162804 - DNA, 43 bp, Homo sapiens; identical to SEQ ID NO: 78114
  chr9:123447412-123447455
  hypo

SEQ ID NO: 162805 - DNA, 22 bp, Homo sapiens
  chr9:123464038-123464060
  hypo
aaggtggggagcagtggctcac

SEQ ID NO: 162806 - DNA, 30 bp, Homo sapiens; identical to SEQ ID NO: 78116
  chr9:123595647-123595677
  hypo

SEQ ID NO: 162807 - DNA, 30 bp, Homo sapiens; identical to SEQ ID NO: 78117
  chr9:123636973-123637003
  hypo

SEQ ID NO: 162808 - DNA, 78 bp, Homo sapiens
  chr9:123650229-123650307
  hypo
aatgacacgcgtgcacgtctcttgattccttgtcctcttgcaagtccccacacgtctgtcgcccagactggagtgcag

SEQ ID NO: 162809 - DNA, 83 bp, Homo sapiens
  chr9:123664360-123664443
  hypo
cacaaaccctcttccctgccacgtgcccccgaaaagcccatcagaaacctgaatggcttcccgttgccaactgaagcatcctc

SEQ ID NO: 162810 - DNA, 34 bp, Homo sapiens
  chr9:123690271-123690305
  hypo
ccacggacatcaaaacgtgcgcaacctgctctaa

SEQ ID NO: 162811 - DNA, 29 bp, Homo sapiens
  chr9:123742869-123742898
  hypo
tttttttctttttttttgagacggagtct

SEQ ID NO: 162812 - DNA, 29 bp, Homo sapiens
  chr9:123743197-123743226
  hypo
ctctcagcgtagttgcaacaggcacacag

SEQ ID NO: 162813 - DNA, 24 bp, Homo sapiens
  chr9:123896061-123896085
  hypo
aacgggattcaattttatatatat

SEQ ID NO: 162814 - DNA, 17 bp, Homo sapiens
  chr9:123926438-123926455
  hypo
gccggaactttcatata

SEQ ID NO: 162815 - DNA, 105 bp, Homo sapiens; identical to SEQ ID NO: 23434
  chr9:123965021-123965126
  hypo

SEQ ID NO: 162816 - DNA, 30 bp, Homo sapiens; identical to SEQ ID NO: 78123
  chr9:124076232-124076262
  hypo

SEQ ID NO: 162817 - DNA, 65 bp, Homo sapiens; identical to SEQ ID NO: 78124
  chr9:124095119-124095184
  hypo

SEQ ID NO: 162818 - DNA, 1033 bp, Homo sapiens; identical to SEQ ID NO: 118081
  chr9:124131787-124132820
  hypo

SEQ ID NO: 162819 - DNA, 357 bp, Homo sapiens
  chr9:124289676-124290033
  hypo
tgggtgaggtgcggccggcgctgcatactccatggagccagtgggggctgggggctgggggctgggagcagacaggagccccacccttccaggcgcagcggcagctgcccaatccgtggctgtggacccaggcatttctgtactctcgggggcctgggaagacacccccttcccccgcaggcttggaagttcctgctcccgttgcctggcctctccttgatcttggagtgaggttggggctgagcccaggcgctgtcacagcccggccgggtgtgggtacacttggtgcagtgctgacacacaagccgcctgccacctcagccccttccagactttgaacaccgatgagcaggggag

SEQ ID NO: 162820 - DNA, 223 bp, Homo sapiens; identical to SEQ ID NO: 78126
  chr9:124339601-124339824
  hypo

SEQ ID NO: 162821 - DNA, 206 bp, Homo sapiens; identical to SEQ ID NO: 23436
  chr9:124422090-124422296
  hypo

SEQ ID NO: 162822 - DNA, 199 bp, Homo sapiens; identical to SEQ ID NO: 78128
  chr9:124443386-124443585
  hypo

SEQ ID NO: 162823 - DNA, 366 bp, Homo sapiens; identical to SEQ ID NO: 78129
  chr9:124479633-124479999
  hypo

SEQ ID NO: 162824 - DNA, 29 bp, Homo sapiens
  chr9:124496356-124496385
  hypo
ttactaaagatgttgctgggccgggcgcg

SEQ ID NO: 162825 - DNA, 168 bp, Homo sapiens; identical to SEQ ID NO: 78131
  chr9:124499832-124500000
  hypo

SEQ ID NO: 162826 - DNA, 85 bp, Homo sapiens; identical to SEQ ID NO: 78132
  chr9:124512391-124512476
  hypo

SEQ ID NO: 162827 - DNA, 98 bp, Homo sapiens
  chr9:124513375-124513473
  hypo
ctgtggacctttccccctgcccggctgctgtggacctttccctgctgcccggctgctgtggacctttccccctgcccggctgctatggacctttccct

SEQ ID NO: 162828 - DNA, 170 bp, Homo sapiens; identical to SEQ ID NO: 78133
  chr9:124545861-124546031
  hypo

SEQ ID NO: 162829 - DNA, 30 bp, Homo sapiens; identical to SEQ ID NO: 78134
  chr9:124547675-124547705
  hypo

SEQ ID NO: 162830 - DNA, 185 bp, Homo sapiens; identical to SEQ ID NO: 78135
  chr9:124548589-124548774
  hypo

SEQ ID NO: 162831 - DNA, 180 bp, Homo sapiens; identical to SEQ ID NO: 78136
  chr9:124549334-124549514
  hypo

SEQ ID NO: 162832 - DNA, 63 bp, Homo sapiens; identical to SEQ ID NO: 78137
  chr9:124581115-124581178
  hypo

SEQ ID NO: 162833 - DNA, 182 bp, Homo sapiens; identical to SEQ ID NO: 46504
  chr9:124622035-124622217
  hypo

SEQ ID NO: 162834 - DNA, 73 bp, Homo sapiens
  chr9:124639398-124639471
  hypo
acataaacaggtccccgtccctgctgttcggccaaggcgaagtcccctcagtcactagcggattccaaacgca

SEQ ID NO: 162835 - DNA, 387 bp, Homo sapiens
  chr9:124666053-124666440
  hypo
gccacgtctatacttcgtgaatctgtcagtaaaagcaaatcggatggtacaattaaaaggattaggtaaatgtaaagtattgaaagaaaatattgaggtgtatcttttcttctgtgctttgaatggagtgacatttatcttgttattttatagctgggagtttgcagggttttccagctcagctcagggataccaaatacaacgtgggttaaatatacaagccaactcagcttcatgcccgggctaagcctgtccatgaaacataaaccgcgttaattcccatattcatgacagagttctcttgggggaacagcatttggagaaaatactaacaactaaaactatttccacatttcataatgatcatccaagggacatctgcaactg

SEQ ID NO: 162836 - DNA, 27 bp, Homo sapiens
  chr9:124666739-124666766
  hypo
caccacgcccagcccaatacattccta

SEQ ID NO: 162837 - DNA, 167 bp, Homo sapiens; identical to SEQ ID NO: 78140
  chr9:124736302-124736469
  hypo

SEQ ID NO: 162838 - DNA, 30 bp, Homo sapiens
  chr9:124749900-124749930
  hypo
agtgctggtcttgcccggcgtctcagcagc

SEQ ID NO: 162839 - DNA, 196 bp, Homo sapiens
  chr9:124751430-124751626
  hypo
cggtcaaggctggaaacgcaggctgggaactggcaatggttacctggaagcacgtggggcccggcctccccgtggggatgtctgactggtagaagactttgagctctggagtcagcgcgatgaccgtcttaatcaccacggagatgatgtcagaccagaccttcttgatgtcaacgcctttggaagacagtctaca

SEQ ID NO: 162840 - DNA, 30 bp, Homo sapiens
  chr9:124812613-124812643
  hypo
tgagtaaggacactgcggtgtgcgtgcact

SEQ ID NO: 162841 - DNA, 113 bp, Homo sapiens; identical to SEQ ID NO: 78142
  chr9:124815996-124816109
  hypo

SEQ ID NO: 162842 - DNA, 30 bp, Homo sapiens
  chr9:124822033-124822063
  hypo
ctgctccggttatcacgaggctcaaattaa

SEQ ID NO: 162843 - DNA, 30 bp, Homo sapiens; identical to SEQ ID NO: 23442
  chr9:124893989-124894019
  hypo

SEQ ID NO: 162844 - DNA, 31 bp, Homo sapiens; identical to SEQ ID NO: 78144
  chr9:124938381-124938412
  hypo

SEQ ID NO: 162845 - DNA, 30 bp, Homo sapiens
  chr9:124953954-124953984
  hypo
cagcccaaaggcgtgcgaagagcaggcaga

SEQ ID NO: 162846 - DNA, 31 bp, Homo sapiens; identical to SEQ ID NO: 78145
  chr9:124961781-124961812
  hypo

SEQ ID NO: 162847 - DNA, 30 bp, Homo sapiens; identical to SEQ ID NO: 23443
  chr9:124965034-124965064
  hypo

SEQ ID NO: 162848 - DNA, 66 bp, Homo sapiens; identical to SEQ ID NO: 78147
  chr9:124967429-124967495
  hypo

SEQ ID NO: 162849 - DNA, 63 bp, Homo sapiens; identical to SEQ ID NO: 118089
  chr9:124981570-124981633
  hypo

SEQ ID NO: 162850 - DNA, 140 bp, Homo sapiens; identical to SEQ ID NO: 118090
  chr9:124981877-124982017
  hypo

SEQ ID NO: 162851 - DNA, 368 bp, Homo sapiens; identical to SEQ ID NO: 46507
  chr9:124990417-124990785
  hypo

SEQ ID NO: 162852 - DNA, 334 bp, Homo sapiens; identical to SEQ ID NO: 118092
  chr9:124990828-124991162
  hypo

SEQ ID NO: 162853 - DNA, 107 bp, Homo sapiens
  chr9:125126539-125126646
  hypo
caaaagggaagataacgtaagcaaaaatgtttctttatactgtatatggctgaatgacggtaagttattaatgaagtgttaaagcaggaacgcgcattccatgcaac

SEQ ID NO: 162854 - DNA, 31 bp, Homo sapiens; identical to SEQ ID NO: 23446
  chr9:125511988-125512019
  hypo

SEQ ID NO: 162855 - DNA, 30 bp, Homo sapiens; identical to SEQ ID NO: 78151
  chr9:125562614-125562644
  hypo

SEQ ID NO: 162856 - DNA, 43 bp, Homo sapiens; identical to SEQ ID NO: 78152
  chr9:125573935-125573978
  hypo

SEQ ID NO: 162857 - DNA, 43 bp, Homo sapiens; identical to SEQ ID NO: 78153
  chr9:125574217-125574260
  hypo

SEQ ID NO: 162858 - DNA, 31 bp, Homo sapiens; identical to SEQ ID NO: 7008
  chr9:125587779-125587810
  hypo

SEQ ID NO: 162859 - DNA, 241 bp, Homo sapiens
  chr9:125591371-125591612
  hypo
gagcgagactgtctcaaaaaaaaagaaagaaagaaaagaaaaatgtattcacttcccttcgaagtttccgaagccattcaaagtgtgttttttattggttcttcatcgcatcacgtctattagacggaaaagtgactcagagacgttcggtaatttgcccgagagcacaaatccctcaagtacagggcatagattaaaatatatatatatatttttttgacggagtttcgctcttcttgcc

SEQ ID NO: 162860 - DNA, 154 bp, Homo sapiens; identical to SEQ ID NO: 78155
  chr9:125622563-125622717
  hypo

SEQ ID NO: 162861 - DNA, 25 bp, Homo sapiens
  chr9:125623481-125623506
  hypo
aatttcggccgggcacggtggctca

SEQ ID NO: 162862 - DNA, 31 bp, Homo sapiens; identical to SEQ ID NO: 23448
  chr9:125648124-125648155
  hypo

SEQ ID NO: 162863 - DNA, 30 bp, Homo sapiens; identical to SEQ ID NO: 78158
  chr9:125699585-125699615
  hypo

SEQ ID NO: 162864 - DNA, 26 bp, Homo sapiens
  chr9:125704673-125704699
  hypo
ggccgggtgcgttcacgcctgtgatc

SEQ ID NO: 162865 - DNA, 26 bp, Homo sapiens
  chr9:125704938-125704964
  hypo
actccgtctcaaaaaaaaaaaaaaaa

SEQ ID NO: 162866 - DNA, 29 bp, Homo sapiens
  chr9:125859123-125859152
  hypo
caggcgtgagccaccgcacctggcccagt

SEQ ID NO: 162867 - DNA, 30 bp, Homo sapiens; identical to SEQ ID NO: 78161
  chr9:125865745-125865775
  hypo

SEQ ID NO: 162868 - DNA, 30 bp, Homo sapiens
  chr9:125868421-125868451
  hypo
aggcctcaaacgactcggatgagggttctg

SEQ ID NO: 162869 - DNA, 58 bp, Homo sapiens; identical to SEQ ID NO: 23451
  chr9:125870567-125870625
  hypo

SEQ ID NO: 162870 - DNA, 30 bp, Homo sapiens; identical to SEQ ID NO: 23452
  chr9:125877119-125877149
  hypo

SEQ ID NO: 162871 - DNA, 30 bp, Homo sapiens
  chr9:125877619-125877649
  hypo
cgggagacctgggaacgggcctgccagcgc

SEQ ID NO: 162872 - DNA, 43 bp, Homo sapiens
  chr9:125878078-125878121
  hypo
gctctctcaaggctgcgtctgtcatcgcgggaggtgtatttta

SEQ ID NO: 162873 - DNA, 45 bp, Homo sapiens; identical to SEQ ID NO: 78164
  chr9:125927261-125927306
  hypo

SEQ ID NO: 162874 - DNA, 30 bp, Homo sapiens
  chr9:125968165-125968195
  hypo
cttttaaaacctgacgtaaatcacaagatt

SEQ ID NO: 162875 - DNA, 102 bp, Homo sapiens; identical to SEQ ID NO: 23453
  chr9:125986775-125986877
  hypo

SEQ ID NO: 162876 - DNA, 30 bp, Homo sapiens
  chr9:125990288-125990318
  hypo
tggtaagaagtgttacgacactgcagatat

SEQ ID NO: 162877 - DNA, 25 bp, Homo sapiens
  chr9:126010837-126010862
  hypo
cgcgcccagccgaattattttttta

SEQ ID NO: 162878 - DNA, 30 bp, Homo sapiens
  chr9:126019219-126019249
  hypo
gaatgaaacattattcgagaaccagtcgta

SEQ ID NO: 162879 - DNA, 214 bp, Homo sapiens; identical to SEQ ID NO: 78167
  chr9:126092334-126092548
  hypo

SEQ ID NO: 162880 - DNA, 196 bp, Homo sapiens; identical to SEQ ID NO: 23454
  chr9:126100874-126101070
  hypo

SEQ ID NO: 162881 - DNA, 171 bp, Homo sapiens
  chr9:126110129-126110300
  hypo
gatgtatgtgtgtgacgtgtgggggtgtggacgggcatgacgtgtacagagagaggtccaagcatgaagatcaggagtctttgttccaactttggcatgtgacgtgggtcagcccctgcccctatcaagcctcggtttccctgtctgggcagtgagcgccatgttgttcaa

SEQ ID NO: 162882 - DNA, 30 bp, Homo sapiens; identical to SEQ ID NO: 78169
  chr9:126125415-126125445
  hypo

SEQ ID NO: 162883 - DNA, 30 bp, Homo sapiens; identical to SEQ ID NO: 78170
  chr9:126126362-126126392
  hypo

SEQ ID NO: 162884 - DNA, 30 bp, Homo sapiens; identical to SEQ ID NO: 78171
  chr9:126133009-126133039
  hypo

SEQ ID NO: 162885 - DNA, 180 bp, Homo sapiens
  chr9:126139068-126139248
  hypo
tcctccccttctctgcggtcttaggcctcggtgtcgtgtctcttgcagaagggcctgcccctgccgctgccattcccactgctggaggtggccgtacctgcagcctgtgcctgcctcctcctcctcctcctgggcctcctttcagggatcctggcagcccgaaagcgccgccagtctgag

SEQ ID NO: 162886 - DNA, 30 bp, Homo sapiens; identical to SEQ ID NO: 78172
  chr9:126145196-126145226
  hypo

SEQ ID NO: 162887 - DNA, 271 bp, Homo sapiens
  chr9:126152956-126153227
  hypo
tgaagaggtgaccacgtggccaagaagtggagaacagggactgcagcccggatggtccacccccaggggcctcaccctctcctgtgagcggggctcggagtagatgcacacgaggggacaccagccccggctcgggccaaatggagggaggctctccagtcgccctcacgtccaccttggttgcctttccgacacctatccaagcacgggcccccacctctggctctgacaagagagcacagatcacagcttgacacgttggtgcaacgcc

SEQ ID NO: 162888 - DNA, 436 bp, Homo sapiens; identical to SEQ ID NO: 23456
  chr9:126154146-126154582
  hypo

SEQ ID NO: 162889 - DNA, 291 bp, Homo sapiens
  chr9:126158004-126158295
  hypo
ggatgcactggcagcttcatacgcacgtcctaatcacacctggcacacagtaggtgctctttacctgtttgtggttgttaccggacgcccctaccccgcctcccaggtgcttgactgcaagccgcactctgccttcagattcctttgttcattcacccaggaaacatctcagagcagaggtctgggctcggatgtggtccaggagttggagagtcaaagctgaggaagagctcacagactactggtgtgcctggtgtgtgtgtgtgtgtgtgcacgcgtgtgagacaaaga

SEQ ID NO: 162890 - DNA, 25 bp, Homo sapiens
  chr9:126160660-126160685
  hypo
cttttttatttgagacggcgtctca

SEQ ID NO: 162891 - DNA, 157 bp, Homo sapiens; identical to SEQ ID NO: 78176
  chr9:126162176-126162333
  hypo

SEQ ID NO: 162892 - DNA, 281 bp, Homo sapiens
  chr9:126165454-126165735
  hypo
ccagcccaagtgcccggctccctggcctctggggcctcccactggtgtgacaaccagaccgagtaaaagatcaagtcctgttccctgaatgacccctttgtgaaacacccgctgggagccccggggaagcctcacaaaggccggggctacacgcttgggcttcgcaaagtgctggctccgcagacacagggttcttacagacagaggggagaggcacaatactcactgctcagggctcggcacagacgtcctccggccttccactgcgatgttgctctttg

SEQ ID NO: 162893 - DNA, 35 bp, Homo sapiens
  chr9:126168859-126168894
  hypo
agaagtgcataatgacgctgcgagtatcatcgtga

SEQ ID NO: 162894 - DNA, 351 bp, Homo sapiens
  chr9:126169182-126169533
  hypo
cttgctacaataaaggcgggttaagaatgtgaacttgtggctgaaatggggggattaagtttgtggcaacttcaactgaacttgcaacgtggtgaaacatggggaaaaagaacaacagagctaattagacgagctgagctgtcagagtgccgctgaatggctcagcgccaacaaacaaaaggaatgggttggcaatcagcgggatcggtggaggagactgcttcattagggatgataaaacagacagagcagggggggaggggcgggggggtggggagcacggagctggagcctcggaggctggggagggagagaaagacacgccagacccagaggcggttggtcaccagc

SEQ ID NO: 162895 - DNA, 349 bp, Homo sapiens
  chr9:126169850-126170199
  hypo
atcacacccatgtttcgggggtgcttaggaagggtgggtactggtgatgaaggaagaaacccacaggcacacacaacagtgactggccccaccggtgtgaggatcccagccgcgtccggggagaaaatgctaaacagagatttccagctctgttcaagggggactggaggggaaacttgggaagccagccaattccccactggatttaaaacctgagaaatctaagtcggcagggttaaatgtgtattgaatacaaaagcactgagtacatttgattttaatggtgagcaagaaataataaatacagagcttataaagtgcttcacacgcaggccgacggcagcctgcc

SEQ ID NO: 162896 - DNA, 30 bp, Homo sapiens
  chr9:126178670-126178700
  hypo
ctcttgaccgctgaccgcttgagtgctctt

SEQ ID NO: 162897 - DNA, 232 bp, Homo sapiens
  chr9:126180748-126180980
  hypo
gtcaggaggggaaggcgcgttggaatagcaacttaattacctgggtggcatggatgagtgggcaccccgcacagggctgcagggtggaaaacgctcgacggccaggtggtgacttgggggcagagagcgcagtgtgtaggggaggagaggtggtgtccctgctgcctgggagccagcctgcctgtgctgtgggcagagccaaggcactttctgctgccggtgcttccagggc

SEQ ID NO: 162898 - DNA, 30 bp, Homo sapiens; identical to SEQ ID NO: 23459
  chr9:126182779-126182809
  hypo

SEQ ID NO: 162899 - DNA, 222 bp, Homo sapiens; identical to SEQ ID NO: 78181
  chr9:126187644-126187866
  hypo

SEQ ID NO: 162900 - DNA, 135 bp, Homo sapiens
  chr9:126198541-126198676
  hypo
cctggggagcagccagggcaacgccctcccgcagctcctccttgctaggagtctatgggcagctccaacctggagagacctgccattgtccacttatctcgagtggagaaacgcggtcttcacattctcaggtga

SEQ ID NO: 162901 - DNA, 267 bp, Homo sapiens
  chr9:126208444-126208711
  hypo
gtctgactcatgctgcgggtgtgagaactcccgtctccatttacagactcgtgccgcacccttcttttcccaggccacctcacagcacagcaaatgcaaattaaaatatgaatattgatatcaaaatagtaaccaaagttggaatttctgtgattgaggctgcagcgtattttaatgtgtcgggagacagggagctgacagttgtgtgataaggtgtgaaaatgtctgttctacaagtctacctagctctcccggccccacgcatgc

SEQ ID NO: 162902 - DNA, 30 bp, Homo sapiens; identical to SEQ ID NO: 78182
  chr9:126217699-126217729
  hypo

SEQ ID NO: 162903 - DNA, 30 bp, Homo sapiens; identical to SEQ ID NO: 78183
  chr9:126218182-126218212
  hypo

SEQ ID NO: 162904 - DNA, 30 bp, Homo sapiens
  chr9:126225256-126225286
  hypo
tgcaagtaaaaatggcggcccccactccat

SEQ ID NO: 162905 - DNA, 81 bp, Homo sapiens
  chr9:126243635-126243716
  hypo
gtggaaacaaggaagcgggagcgggaggaagaaacagtgagggaagcccaggcaccaggaaggacgcgtgcatttacagac

SEQ ID NO: 162906 - DNA, 165 bp, Homo sapiens
  chr9:126314089-126314254
  hypo
cctccccaacaaacccgcagaaagcacagatggggaggagaagcctagctcctggcacagggctgggcctcagcaagcggtccccttccttcttccttctggatctggtaaagaaaacaaagctcaggagtcccccagccagctgcattctgaattttttcatta

SEQ ID NO: 162907 - DNA, 104 bp, Homo sapiens
  chr9:126314313-126314417
  hypo
gagacagagagagagagagagagagagagagagaggccaaggtggtaaaaatctcaagggagctctgagccagggaaaagttcttcagacgtgactgcagagga

SEQ ID NO: 162908 - DNA, 138 bp, Homo sapiens
  chr9:126321029-126321167
  hypo
catctcaagatgccacgcttcagagcacacctttcacgctgcgttccccataagaggaattgtgcgacgtggtgacctcgagttatccattcactcagcaaatatttattatttcctatgtaccgaggactatgttag

SEQ ID NO: 162909 - DNA, 168 bp, Homo sapiens; identical to SEQ ID NO: 23460
  chr9:126323415-126323583
  hypo

SEQ ID NO: 162910 - DNA, 30 bp, Homo sapiens; identical to SEQ ID NO: 78186
  chr9:126334161-126334191
  hypo

SEQ ID NO: 162911 - DNA, 339 bp, Homo sapiens; identical to SEQ ID NO: 23461
  chr9:126348886-126349225
  hypo

SEQ ID NO: 162912 - DNA, 31 bp, Homo sapiens; identical to SEQ ID NO: 23462
  chr9:126362199-126362230
  hypo

SEQ ID NO: 162913 - DNA, 115 bp, Homo sapiens; identical to SEQ ID NO: 78189
  chr9:126368301-126368416
  hypo

SEQ ID NO: 162914 - DNA, 30 bp, Homo sapiens
  chr9:126377320-126377350
  hypo
tcttgctggagaatgcgaatgatcatggtt

SEQ ID NO: 162915 - DNA, 79 bp, Homo sapiens
  chr9:126403903-126403982
  hypo
tttttaagtgccagtcggtacgcataaacatcttctaaatgaacttgatcagtctctattatgtcgtctcaacatgaaa

SEQ ID NO: 162916 - DNA, 76 bp, Homo sapiens
  chr9:126406102-126406178
  hypo
tagagtagtgtcaggcgcacagacagggcttgccgaatctgaagtaaaaagcttaggtgtgcgttcaaaggtgacg

SEQ ID NO: 162917 - DNA, 30 bp, Homo sapiens
  chr9:126406540-126406570
  hypo
ggtgggggagaacggcggggctcccatata

SEQ ID NO: 162918 - DNA, 30 bp, Homo sapiens
  chr9:126419452-126419482
  hypo
agaaacgttggtaagcgtcaggtcaagtgc

SEQ ID NO: 162919 - DNA, 81 bp, Homo sapiens
  chr9:126440714-126440795
  hypo
gaaggttgtaccaagcgcttgccggcctggtcatgtctgccctgctgtgctaacagagtccaataccgacagatatggaca

SEQ ID NO: 162920 - DNA, 88 bp, Homo sapiens
  chr9:126442150-126442238
  hypo
cggggtgcgaccatccgtggtccgcctctgcctgctgcctttgtgtgacggcttgagtccccactgcggagtaccacagttgggacta

SEQ ID NO: 162921 - DNA, 30 bp, Homo sapiens
  chr9:126459280-126459310
  hypo
ccggttaaatttaaccggcaatttggagct

SEQ ID NO: 162922 - DNA, 261 bp, Homo sapiens
  chr9:126487963-126488224
  hypo
gccaaacagactgtacgggcctcactgctcggatgcttccagagaaagaaggagaatcgatgggttcctttgtaaacaacttcttgtgctttcgggctgtgaccgacttcaaaggtggcataacttaattctgtcacaaattatgccatggaaatcttgaggaagatatcttcctgaggaaatacctacgtggccccttataaactaaattctaacaggtaaacaacaaacaacaaaagaaaaacacgttcagcttttagt

SEQ ID NO: 162923 - DNA, 30 bp, Homo sapiens
  chr9:126648774-126648804
  hypo
ggggctgaggtgtaccgtttaaaaattcat

SEQ ID NO: 162924 - DNA, 30 bp, Homo sapiens
  chr9:126649182-126649212
  hypo
acgcagatattgctacgaaaagagtcacaa

SEQ ID NO: 162925 - DNA, 102 bp, Homo sapiens; identical to SEQ ID NO: 78192
  chr9:126707415-126707517
  hypo

SEQ ID NO: 162926 - DNA, 165 bp, Homo sapiens; identical to SEQ ID NO: 118103
  chr9:126762043-126762208
  hypo

SEQ ID NO: 162927 - DNA, 442 bp, Homo sapiens; identical to SEQ ID NO: 118104
  chr9:126762231-126762673
  hypo

SEQ ID NO: 162928 - DNA, 1942 bp, Homo sapiens; identical to SEQ ID NO: 118109
  chr9:126770234-126772176
  hypo

SEQ ID NO: 162929 - DNA, 689 bp, Homo sapiens; identical to SEQ ID NO: 118121
  chr9:126780284-126780973
  hypo

SEQ ID NO: 162930 - DNA, 30 bp, Homo sapiens; identical to SEQ ID NO: 46527
  chr9:126781414-126781444
  hypo

SEQ ID NO: 162931 - DNA, 338 bp, Homo sapiens
  chr9:126975846-126976184
  hypo
gggcagtgagacatgcgtgattgcaaaccaatgtaatgtgcgtgtgtgagcatgtctgcaaatatgcatgcatgtttgcatgtgcaagtgtagggaggcagcttgtggatgcccggatatgagccacacgtgtggatgcccaggagtatgaaaagatccctgactgtatggggcatgcacgtatgagcacatttacgtggatatatgtgcattagctaaacacgcatttttgtgtagacctgtgtgcaccgtacacatagcgtgcatggatttgtgcgtgtcagagcacactagtgtggacgtatgtgttcgggcacgtttttctaggctgatctgcc

SEQ ID NO: 162932 - DNA, 283 bp, Homo sapiens
  chr9:127019286-127019569
  hypo
agcctcaaagcccatctgtaaaatgggcacaagggtaacgttggcacacgtggtggacgctccgttggtgtcattattacagatcacggccagttgaagcacttccactcatttggcaaacagaagccagacgggcattcaccctgtgcccagtacagtgctgcgcccaagcaggcagtcagtgtccctggctccagccctcctggggtgcagcacagttttgaatgtggaggggaggcagcaggggtggaaacagcccagccaggagcggccgctctcggtg

SEQ ID NO: 162933 - DNA, 31 bp, Homo sapiens; identical to SEQ ID NO: 7018
  chr9:127061459-127061490
  hypo

SEQ ID NO: 162934 - DNA, 30 bp, Homo sapiens
  chr9:127071606-127071636
  hypo
atccaccaggagcttcggccccactgtgga

SEQ ID NO: 162935 - DNA, 292 bp, Homo sapiens; identical to SEQ ID NO: 78198
  chr9:127071987-127072279
  hypo

SEQ ID NO: 162936 - DNA, 31 bp, Homo sapiens; identical to SEQ ID NO: 23466
  chr9:127106879-127106910
  hypo

SEQ ID NO: 162937 - DNA, 119 bp, Homo sapiens
  chr9:127120325-127120444
  hypo
atctaacctgtgctacggcgccttcccagtccacgagggcgtgagagtacatacacatgcaagtgcactccagcgctcacccaagcaacacccttggagaaacacggactccaggccca

SEQ ID NO: 162938 - DNA, 30 bp, Homo sapiens; identical to SEQ ID NO: 78200
  chr9:127121863-127121893
  hypo

SEQ ID NO: 162939 - DNA, 201 bp, Homo sapiens
  chr9:127214764-127214965
  hypo
caccgtctctcttatcgtttttagcccccgtggccgccggcgaggtggtgaagactgcaggtggggtgtgcaagttctctggacagcgactgagctggtggcaggcccaagagtcctgcgagcagcagtttggccacttggcactgcagccccctgatggggttcttgcttcacggctgcgcgatccggtctgggtgggcc

SEQ ID NO: 162940 - DNA, 278 bp, Homo sapiens; identical to SEQ ID NO: 118133
  chr9:127215311-127215589
  hypo

SEQ ID NO: 162941 - DNA, 344 bp, Homo sapiens; identical to SEQ ID NO: 118134
  chr9:127215678-127216022
  hypo

SEQ ID NO: 162942 - DNA, 81 bp, Homo sapiens
  chr9:127219755-127219836
  hypo
gaggtgcggagcttacgcttgagggaggccagcacgaggggctgcttattcacaatgcctggtgggcgtccagaggggccc

SEQ ID NO: 162943 - DNA, 31 bp, Homo sapiens; identical to SEQ ID NO: 78201
  chr9:127230036-127230067
  hypo

SEQ ID NO: 162944 - DNA, 52 bp, Homo sapiens; identical to SEQ ID NO: 78202
  chr9:127230410-127230462
  hypo

SEQ ID NO: 162945 - DNA, 37 bp, Homo sapiens; identical to SEQ ID NO: 78203
  chr9:127237565-127237602
  hypo

SEQ ID NO: 162946 - DNA, 30 bp, Homo sapiens; identical to SEQ ID NO: 78204
  chr9:127239211-127239241
  hypo

SEQ ID NO: 162947 - DNA, 172 bp, Homo sapiens
  chr9:127241720-127241892
  hypo
tgctgaggatggctgcgtagcctcacgatgccccatccgtcttctgtcgaatgggggacatcatactcacccagcgggtcatgtgaggggtccgcgcagtcctgcacttggttcctggcacggccctcagcaagcactcagagtgtcagctgtggcccgagacagatgttcg

SEQ ID NO: 162948 - DNA, 30 bp, Homo sapiens
  chr9:127247260-127247290
  hypo
ttggagtgagacagacgtggattcgaatcc

SEQ ID NO: 162949 - DNA, 30 bp, Homo sapiens
  chr9:127247700-127247730
  hypo
cctggccgcccccagcgcgcctgctgaggc

SEQ ID NO: 162950 - DNA, 31 bp, Homo sapiens; identical to SEQ ID NO: 78205
  chr9:127260203-127260234
  hypo

SEQ ID NO: 162951 - DNA, 603 bp, Homo sapiens; identical to SEQ ID NO: 78206
  chr9:127262375-127262978
  hypo

SEQ ID NO: 162952 - DNA, 272 bp, Homo sapiens
  chr9:127268259-127268531
  hypo
gaggccaaaaagctgcgatcttcaagcaggaaaataccgcaattttgcattgacagcggcgcaacccaccaaaaggctccatctgggctcccgcccgcctggaggcctcgggcttcggttggagctgggcctggggcctgcaagttgtggccagagaaccccccgcgcagaccgcactcagctggctcacccacagaaggagcagaacccgcagactagctgtgcaagctcgggcaagtcacttctcctctctgaaacgagagcctcagttt

SEQ ID NO: 162953 - DNA, 31 bp, Homo sapiens; identical to SEQ ID NO: 78208
  chr9:127270139-127270170
  hypo

SEQ ID NO: 162954 - DNA, 31 bp, Homo sapiens; identical to SEQ ID NO: 78209
  chr9:127282290-127282321
  hypo

SEQ ID NO: 162955 - DNA, 94 bp, Homo sapiens; identical to SEQ ID NO: 23468
  chr9:127308363-127308457
  hypo

SEQ ID NO: 162956 - DNA, 31 bp, Homo sapiens; identical to SEQ ID NO: 78211
  chr9:127312606-127312637
  hypo

SEQ ID NO: 162957 - DNA, 223 bp, Homo sapiens; identical to SEQ ID NO: 78212
  chr9:127361667-127361890
  hypo

SEQ ID NO: 162958 - DNA, 135 bp, Homo sapiens; identical to SEQ ID NO: 23469
  chr9:127420614-127420749
  hypo

SEQ ID NO: 162959 - DNA, 40 bp, Homo sapiens; identical to SEQ ID NO: 78214
  chr9:127457914-127457954
  hypo

SEQ ID NO: 162960 - DNA, 22 bp, Homo sapiens
  chr9:127468805-127468827
  hypo
ttttttgagatagtctcgccct

SEQ ID NO: 162961 - DNA, 31 bp, Homo sapiens; identical to SEQ ID NO: 78216
  chr9:127481036-127481067
  hypo

SEQ ID NO: 162962 - DNA, 99 bp, Homo sapiens; identical to SEQ ID NO: 78217
  chr9:127481334-127481433
  hypo

SEQ ID NO: 162963 - DNA, 36 bp, Homo sapiens; identical to SEQ ID NO: 78218
  chr9:127482310-127482346
  hypo

SEQ ID NO: 162964 - DNA, 32 bp, Homo sapiens; identical to SEQ ID NO: 23471
  chr9:127500845-127500877
  hypo

SEQ ID NO: 162965 - DNA, 24 bp, Homo sapiens
  chr9:127504546-127504570
  hypo
aaaaaataaaagaggccgggcacg

SEQ ID NO: 162966 - DNA, 17 bp, Homo sapiens
  chr9:127507664-127507681
  hypo
tcctggcagggcacagc

SEQ ID NO: 162967 - DNA, 128 bp, Homo sapiens; identical to SEQ ID NO: 118143
  chr9:127534415-127534543
  hypo

SEQ ID NO: 162968 - DNA, 30 bp, Homo sapiens
  chr9:127534807-127534837
  hypo
gtccctcacctgctacgaaagttgcaacgc

SEQ ID NO: 162969 - DNA, 86 bp, Homo sapiens
  chr9:127538087-127538173
  hypo
gtatttttagtagaggcgagttttcaccatgttgcccaggctgggagagtttgcatttttaacaagttatccgatgatgcggaggc

SEQ ID NO: 162970 - DNA, 68 bp, Homo sapiens; identical to SEQ ID NO: 78224
  chr9:127570204-127570272
  hypo

SEQ ID NO: 162971 - DNA, 31 bp, Homo sapiens; identical to SEQ ID NO: 78225
  chr9:127571889-127571920
  hypo

SEQ ID NO: 162972 - DNA, 337 bp, Homo sapiens; identical to SEQ ID NO: 78226
  chr9:127572287-127572624
  hypo

SEQ ID NO: 162973 - DNA, 111 bp, Homo sapiens
  chr9:127573374-127573485
  hypo
gcagaaaccgcaccccgagagaaaatcccatcctctgttccaaggcccctgtctgctctatgctcatttttattttctcttattcttcatcagtgccgtcatttgtttctg

SEQ ID NO: 162974 - DNA, 40 bp, Homo sapiens; identical to SEQ ID NO: 78228
  chr9:127577753-127577793
  hypo

SEQ ID NO: 162975 - DNA, 40 bp, Homo sapiens; identical to SEQ ID NO: 78229
  chr9:127577912-127577952
  hypo

SEQ ID NO: 162976 - DNA, 30 bp, Homo sapiens
  chr9:127596329-127596359
  hypo
ggaaggcactttgcacggcacctagcagtt

SEQ ID NO: 162977 - DNA, 118 bp, Homo sapiens
  chr9:127616530-127616648
  hypo
ctcagaagatggctgcgtgtatggctgggagacccggagtgggcagctgctgtggaggctgggtggccacacaggtggggctcccacacctggccgggaagaccgaggcacaagggtc

SEQ ID NO: 162978 - DNA, 30 bp, Homo sapiens; identical to SEQ ID NO: 78230
  chr9:127619001-127619031
  hypo

SEQ ID NO: 162979 - DNA, 37 bp, Homo sapiens; identical to SEQ ID NO: 23474
  chr9:127623916-127623953
  hypo

SEQ ID NO: 162980 - DNA, 30 bp, Homo sapiens; identical to SEQ ID NO: 23475
  chr9:127641832-127641862
  hypo

SEQ ID NO: 162981 - DNA, 78 bp, Homo sapiens; identical to SEQ ID NO: 23476
  chr9:127657865-127657943
  hypo

SEQ ID NO: 162982 - DNA, 30 bp, Homo sapiens; identical to SEQ ID NO: 78234
  chr9:127661762-127661792
  hypo

SEQ ID NO: 162983 - DNA, 37 bp, Homo sapiens; identical to SEQ ID NO: 78235
  chr9:127861824-127861861
  hypo

SEQ ID NO: 162984 - DNA, 34 bp, Homo sapiens; identical to SEQ ID NO: 23477
  chr9:127955074-127955108
  hypo

SEQ ID NO: 162985 - DNA, 30 bp, Homo sapiens
  chr9:127960194-127960224
  hypo
tgagcagaaatgtacgtggagatgcacatg

SEQ ID NO: 162986 - DNA, 30 bp, Homo sapiens; identical to SEQ ID NO: 78237
  chr9:127993098-127993128
  hypo

SEQ ID NO: 162987 - DNA, 31 bp, Homo sapiens; identical to SEQ ID NO: 7023
  chr9:128024544-128024575
  hypo

SEQ ID NO: 162988 - DNA, 34 bp, Homo sapiens
  chr9:128029578-128029612
  hypo
gttggagttcagttgcgctatcagggatcattgc

SEQ ID NO: 162989 - DNA, 38 bp, Homo sapiens; identical to SEQ ID NO: 78239
  chr9:128032922-128032960
  hypo

SEQ ID NO: 162990 - DNA, 30 bp, Homo sapiens
  chr9:128033552-128033582
  hypo
atgccggtacacccacgctggagactagta

SEQ ID NO: 162991 - DNA, 20 bp, Homo sapiens
  chr9:128034593-128034613
  hypo
cccagccaaaaatacattaa

SEQ ID NO: 162992 - DNA, 25 bp, Homo sapiens
  chr9:128071898-128071923
  hypo
ccaccgtgcccgggcacttaatggt

SEQ ID NO: 162993 - DNA, 157 bp, Homo sapiens; identical to SEQ ID NO: 23480
  chr9:128103376-128103533
  hypo

SEQ ID NO: 162994 - DNA, 30 bp, Homo sapiens
  chr9:128104149-128104179
  hypo
ggagagctgctttcacgccatactcaagcg

SEQ ID NO: 162995 - DNA, 136 bp, Homo sapiens
  chr9:128118009-128118145
  hypo
tcatatggcaaaacgcgagtgaagaacagcttcaagatgcacagctggccattgagcgaagcgtgatgaaccggattttcaagctcgccttctaccctaatcaagatggggacatacttcgcgaccagtaagtact

SEQ ID NO: 162996 - DNA, 139 bp, Homo sapiens
  chr9:128135748-128135887
  hypo
cttaaacctgtcccccgctgccacagccagtttttccacctccacaatcacgactgactcctagtctccctgcctccctctcaccccttctcctaggtgcccttagaattcatcaagtctggccaggcacggtagctca

SEQ ID NO: 162997 - DNA, 19 bp, Homo sapiens
  chr9:128136126-128136145
  hypo
gcaacaagagcaaaactcc

SEQ ID NO: 162998 - DNA, 31 bp, Homo sapiens; identical to SEQ ID NO: 7025
  chr9:128138375-128138406
  hypo

SEQ ID NO: 162999 - DNA, 30 bp, Homo sapiens
  chr9:128150811-128150841
  hypo
ctgggctgggcgcaacgaacacagaaaagt

SEQ ID NO: 163000 - DNA, 160 bp, Homo sapiens; identical to SEQ ID NO: 78246
  chr9:128168026-128168186
  hypo

SEQ ID NO: 163001 - DNA, 31 bp, Homo sapiens; identical to SEQ ID NO: 78247
  chr9:128173739-128173770
  hypo

SEQ ID NO: 163002 - DNA, 31 bp, Homo sapiens; identical to SEQ ID NO: 78248
  chr9:128178251-128178282
  hypo

SEQ ID NO: 163003 - DNA, 31 bp, Homo sapiens; identical to SEQ ID NO: 78249
  chr9:128186652-128186683
  hypo

SEQ ID NO: 163004 - DNA, 321 bp, Homo sapiens
  chr9:128189977-128190298
  hypo
taaagggtgactcagcctcagcgaggtgaagggacttgcccagggtcacacagttaacaggcggtggcgccagtttgtctgactggagaccgcgctgtcagccggccactgccacggctcccgaaacagcatcgcccataccgagtcccgagctaccccagctctagacatgcgtgcatgcacttcggtcacaagtgtgcctggggaagttgcgtgtcacccccttcttggaacacagtgcacagtggcccgttgaaggctctgagggaccccgcaggagcaaaaactgccatgttcagcgtggagttcccagacctctgt

SEQ ID NO: 163005 - DNA, 30 bp, Homo sapiens
  chr9:128193407-128193437
  hypo
gacttacacacaccccgtgggggtccctgc

SEQ ID NO: 163006 - DNA, 481 bp, Homo sapiens
  chr9:128200051-128200532
  hypo
cagtaaggacatcaccgcaggagggacactgaagaggctgtcgaggactgcagaggcatctggtgtggccagaggcgtggtgtcaggggcatctgatcccttgcctgttcccacccagggagccggacggcacggacacaggtctccctccgctcacccctctccctgaaacgtgagaaacagcagctttccgcctgcttgaaaaaggaggcaggcgctgtaaggagaagaggaatggggaatgtggccccttccaaggcagcgaagcagagaacatgcaggtggaactgccagctgaaacctacacttgctacttaagaaacggaaagaccatgtctggctgggagtgcagcgtgcctgaggaccagccaccgcccctcctcctggcaccccacactgtccacgcagctcctgggctctgaggtcagaagctggggtgtgctgaaggggaaagtgacacggccttggacacaccactagg

SEQ ID NO: 163007 - DNA, 246 bp, Homo sapiens
  chr9:128263220-128263466
  hypo
acggggtaaaaattccgataagcaagtcacataggagtgtattggtgtaacttttcctttggctcactatggtatggtactagatatggtatgaaatttcaaatgtcacaaggattgttacactaagacattgtctcactatacgatctttatctatgtagacttgcccttatttcttgtttgcttttccttcttagaaagtcatgcatgctcaccttagaaactctggaacgaacaaatataaac

SEQ ID NO: 163008 - DNA, 169 bp, Homo sapiens; identical to SEQ ID NO: 78252
  chr9:128274067-128274236
  hypo

SEQ ID NO: 163009 - DNA, 30 bp, Homo sapiens; identical to SEQ ID NO: 78253
  chr9:128274518-128274548
  hypo

SEQ ID NO: 163010 - DNA, 88 bp, Homo sapiens; identical to SEQ ID NO: 78254
  chr9:128274768-128274856
  hypo

SEQ ID NO: 163011 - DNA, 30 bp, Homo sapiens; identical to SEQ ID NO: 78255
  chr9:128309350-128309380
  hypo

SEQ ID NO: 163012 - DNA, 30 bp, Homo sapiens; identical to SEQ ID NO: 23485
  chr9:128365540-128365570
  hypo

SEQ ID NO: 163013 - DNA, 94 bp, Homo sapiens; identical to SEQ ID NO: 23486
  chr9:128399988-128400082
  hypo

SEQ ID NO: 163014 - DNA, 160 bp, Homo sapiens; identical to SEQ ID NO: 23487
  chr9:128407605-128407765
  hypo

SEQ ID NO: 163015 - DNA, 265 bp, Homo sapiens
  chr9:128409705-128409970
  hypo
tgtaggaatacaactgaaattcggacaaccacaccaaggataagaaactggctcagatccgagccgtagacagtattcatctactattcatctatagtgcccatcacatttgctctctggtttgttgttcgtggttctgttcctctgctcggtcaggtgcacctaatgtcatggaccactgtcacagtcctcagcactgggcacgatcattcatgtaaagtatagtttctccacttgatggccatatggccgctcttgtctttta

SEQ ID NO: 163016 - DNA, 82 bp, Homo sapiens; identical to SEQ ID NO: 78260
  chr9:128479563-128479645
  hypo

SEQ ID NO: 163017 - DNA, 29 bp, Homo sapiens
  chr9:128635174-128635203
  hypo
aagcaaaaattgacagaatttcggctggg

SEQ ID NO: 163018 - DNA, 468 bp, Homo sapiens; identical to SEQ ID NO: 46554
  chr9:128651895-128652363
  hypo

SEQ ID NO: 163019 - DNA, 51 bp, Homo sapiens
  chr9:128672788-128672839
  hypo
agagaatgagtcaagcgaaagtgacaactaggttggcgtggaaatgtgcag

SEQ ID NO: 163020 - DNA, 58 bp, Homo sapiens
  chr9:128674627-128674685
  hypo
gggtatgcgtttattcggagaaagctttgtaataattttgacccgtaatttatttatt

SEQ ID NO: 163021 - DNA, 240 bp, Homo sapiens; identical to SEQ ID NO: 78264
  chr9:128677869-128678109
  hypo

SEQ ID NO: 163022 - DNA, 30 bp, Homo sapiens
  chr9:128695645-128695675
  hypo
cacagccagaatgtccggtgagctattccg

SEQ ID NO: 163023 - DNA, 106 bp, Homo sapiens
  chr9:128718757-128718863
  hypo
cgtgggggaaatacacggttgtagtgtatgcgagagaccagatccctttcaggctgctccttggccttgcagaaaagttccagaaaatcagcggactgcataatgt

SEQ ID NO: 163024 - DNA, 30 bp, Homo sapiens; identical to SEQ ID NO: 23491
  chr9:128728891-128728921
  hypo

SEQ ID NO: 163025 - DNA, 41 bp, Homo sapiens; identical to SEQ ID NO: 78266
  chr9:128752497-128752538
  hypo

SEQ ID NO: 163026 - DNA, 31 bp, Homo sapiens; identical to SEQ ID NO: 78267
  chr9:128757172-128757203
  hypo

SEQ ID NO: 163027 - DNA, 275 bp, Homo sapiens; identical to SEQ ID NO: 23492
  chr9:128759706-128759981
  hypo

SEQ ID NO: 163028 - DNA, 60 bp, Homo sapiens; identical to SEQ ID NO: 78269
  chr9:128777743-128777803
  hypo

SEQ ID NO: 163029 - DNA, 176 bp, Homo sapiens
  chr9:128786730-128786906
  hypo
ggctgggctggtgcccggagggtggggtcaggcctggcagttccaccccgtgccggtggtgacaacacagatcctcccgtctccaccagcatttactttaattgcccgaaaattgacgatagatgcaaggaaaataatgaggcctaattatgttaattaaacggctaattcattaa

SEQ ID NO: 163030 - DNA, 148 bp, Homo sapiens
  chr9:128819864-128820012
  hypo
ctcgtatgtggcgcccggcccagaaaggtacaataactgtatattttaacttaatggttttttggggggcatgcaaatttcagtgagcagattgcaccgaggcccgggcttggagcggcctccctgggcccggcggccctttccccag

SEQ ID NO: 163031 - DNA, 234 bp, Homo sapiens
  chr9:128824392-128824626
  hypo
gtcaccatcggcaaccggagcctgctggaattgtgaacaactggatgaatgaatgaattggaaaatataagaacaaatgattggataaagaagtcaatgaaagaatgaatttgagccacagggtctcatgcaggccacatggtcgttcaggctctgctgtgtgccaggcactagcactacgcggcacacaacggacccagtccctgccctcggggctctcgcctgcagacctgg

SEQ ID NO: 163032 - DNA, 60 bp, Homo sapiens
  chr9:128890926-128890986
  hypo
tggggccctcagagacgcaggtgcaggcagaaggctcccagcctgcgtaccactgtctca

SEQ ID NO: 163033 - DNA, 31 bp, Homo sapiens; identical to SEQ ID NO: 23493
  chr9:128908570-128908601
  hypo

SEQ ID NO: 163034 - DNA, 112 bp, Homo sapiens; identical to SEQ ID NO: 78272
  chr9:128925325-128925437
  hypo

SEQ ID NO: 163035 - DNA, 36 bp, Homo sapiens; identical to SEQ ID NO: 78273
  chr9:128926860-128926896
  hypo

SEQ ID NO: 163036 - DNA, 441 bp, Homo sapiens
  chr9:128997998-128998439
  hypo
agcagaaagcgtctgcggaggagacaacatcttgtaccatctatcttccttaaatcctcacgctgtgacaaagtggagggcgaaatcatgatgaatgatcggacacatttagccagtacctgtgctctgtaacgagcgtggcccgggaaaggggccctaatgaagatctgtgcccccgccccaaaccgggcctcgtcggaaacaagtctttattacgaaattggcgcctagttttcataccacgcaggatggaggcgcaaggtgtgacatgaattaacgccggcacctgcagggtcagcccagccctcgctggcggtacagagacaaacgggttcggctcccgccaccaccctgcgtctggttgacaaggcgccagtcgccttcggattgtgcgggaacacgcctcggttttgttcctacccggcccgccatcatttattc

SEQ ID NO: 163037 - DNA, 30 bp, Homo sapiens
  chr9:129038054-129038084
  hypo
ggagggcttccttcccggagcccagagcgc

SEQ ID NO: 163038 - DNA, 296 bp, Homo sapiens
  chr9:129038607-129038903
  hypo
ggcccggtggccggccggaccgcctgctgtctcacacccttgtaaggttactatttatctagtgcaaccgaagttggcgcacacatctggggcctggtacttagtgcaattatttatgatttccaccaagatttaaaagctcatcgccggccttgtaatgcagtaactgattgcgctgctaatgtaattaagaaaagattatgatgtccacgtggcgtaccagatggtggcattcatagtaatcggcgtgcacaactggcagacaactgcacaagggcagccgagcggaggcagct

SEQ ID NO: 163039 - DNA, 30 bp, Homo sapiens
  chr9:129133532-129133562
  hypo
ttggccgtctgggtgcgacagaaacgggag

SEQ ID NO: 163040 - DNA, 30 bp, Homo sapiens
  chr9:129191642-129191672
  hypo
tggccaggtttgctccgtacacaaccatgt

SEQ ID NO: 163041 - DNA, 31 bp, Homo sapiens; identical to SEQ ID NO: 78275
  chr9:129219830-129219861
  hypo

SEQ ID NO: 163042 - DNA, 31 bp, Homo sapiens; identical to SEQ ID NO: 78276
  chr9:129222036-129222067
  hypo

SEQ ID NO: 163043 - DNA, 31 bp, Homo sapiens; identical to SEQ ID NO: 78277
  chr9:129224279-129224310
  hypo

SEQ ID NO: 163044 - DNA, 31 bp, Homo sapiens; identical to SEQ ID NO: 78278
  chr9:129242473-129242504
  hypo

SEQ ID NO: 163045 - DNA, 31 bp, Homo sapiens; identical to SEQ ID NO: 78279
  chr9:129265131-129265162
  hypo

SEQ ID NO: 163046 - DNA, 31 bp, Homo sapiens; identical to SEQ ID NO: 23495
  chr9:129265612-129265643
  hypo

SEQ ID NO: 163047 - DNA, 141 bp, Homo sapiens
  chr9:129265880-129266021
  hypo
cccagtgacgcccaccggctccctccgctccctcctgtcacctaccagggcagaccccactaagccgttgagtctcttcctggaagaccctgagggccggcagctttgcctaggactctccagggtcgctgatcctccccg

SEQ ID NO: 163048 - DNA, 30 bp, Homo sapiens
  chr9:129266238-129266268
  hypo
gatccaccaccaggacgctgtgctcggcca

SEQ ID NO: 163049 - DNA, 31 bp, Homo sapiens; identical to SEQ ID NO: 78281
  chr9:129266741-129266772
  hypo

SEQ ID NO: 163050 - DNA, 31 bp, Homo sapiens; identical to SEQ ID NO: 78282
  chr9:129267624-129267655
  hypo

SEQ ID NO: 163051 - DNA, 31 bp, Homo sapiens; identical to SEQ ID NO: 78283
  chr9:129287199-129287230
  hypo

SEQ ID NO: 163052 - DNA, 80 bp, Homo sapiens; identical to SEQ ID NO: 78284
  chr9:129316509-129316589
  hypo

SEQ ID NO: 163053 - DNA, 30 bp, Homo sapiens
  chr9:129348823-129348853
  hypo
gcgagcagaagacctcgataaatgttagcg

SEQ ID NO: 163054 - DNA, 31 bp, Homo sapiens; identical to SEQ ID NO: 78285
  chr9:129423386-129423417
  hypo

SEQ ID NO: 163055 - DNA, 120 bp, Homo sapiens
  chr9:129454750-129454870
  hypo
gcacatgcttccgcacgctgtgtgtgtctgtccagatgcatgcatgcctgtacgttcctgcccgtgagcatgggcccatgtgtgtgaatacgcctgtgagttgcacgcgtgagggccttt

SEQ ID NO: 163056 - DNA, 422 bp, Homo sapiens; identical to SEQ ID NO: 23496
  chr9:129455240-129455662
  hypo

SEQ ID NO: 163057 - DNA, 31 bp, Homo sapiens; identical to SEQ ID NO: 78287
  chr9:129455945-129455976
  hypo

SEQ ID NO: 163058 - DNA, 30 bp, Homo sapiens
  chr9:129458196-129458226
  hypo
ggaacagagcccctacggcagcagcgaccc

SEQ ID NO: 163059 - DNA, 292 bp, Homo sapiens
  chr9:129458624-129458916
  hypo
cagcgactgcttcctcggctcctcagacgtgggctccctgcaggcccgcgtggggaaccccatcgaccggctctactccatgcagagttcctacttcgcctcctgagagccagccaggcgcacggacgcttgggcaggggcctgggggggactgccagcctctgcggccagcctggccacccccgccctgctctccgcacagactacagacagccatacggtgccctcccctcggccagctgggcctgaccactgtgcccgttgggtacagccagaccggtagatgggcaca

SEQ ID NO: 163060 - DNA, 224 bp, Homo sapiens
  chr9:129517388-129517612
  hypo
gtggggcgtgggtggcggccaatgcagtgccgggccctggcgggccgcagtgcgggcacagagcctcgtctttattgtacttataaaatatacatggccctttattgaattgcctgctgtcgaaatctgcaagaacgttattgccttttactgtcctggagagaagcagagcagcaacatctgtgtaatttcataagatgcaggagccataaatctgattgtgc

SEQ ID NO: 163061 - DNA, 30 bp, Homo sapiens
  chr9:129517699-129517729
  hypo
ttccgaacctcgcaccgcaattccggtggg

SEQ ID NO: 163062 - DNA, 38 bp, Homo sapiens; identical to SEQ ID NO: 78290
  chr9:129560118-129560156
  hypo

SEQ ID NO: 163063 - DNA, 98 bp, Homo sapiens; identical to SEQ ID NO: 78291
  chr9:129562213-129562311
  hypo

SEQ ID NO: 163064 - DNA, 81 bp, Homo sapiens; identical to SEQ ID NO: 23497
  chr9:129627922-129628003
  hypo

SEQ ID NO: 163065 - DNA, 238 bp, Homo sapiens; identical to SEQ ID NO: 78293
  chr9:129628398-129628636
  hypo

SEQ ID NO: 163066 - DNA, 426 bp, Homo sapiens; identical to SEQ ID NO: 78294
  chr9:129630575-129631001
  hypo

SEQ ID NO: 163067 - DNA, 30 bp, Homo sapiens; identical to SEQ ID NO: 78295
  chr9:129631221-129631251
  hypo

SEQ ID NO: 163068 - DNA, 77 bp, Homo sapiens; identical to SEQ ID NO: 78296
  chr9:129633596-129633673
  hypo

SEQ ID NO: 163069 - DNA, 30 bp, Homo sapiens; identical to SEQ ID NO: 78297
  chr9:129642296-129642326
  hypo

SEQ ID NO: 163070 - DNA, 136 bp, Homo sapiens
  chr9:129643033-129643169
  hypo
gaaaaaccacccaggcgttgctgaagtcaggagtcgcattgagtcccccgagagaacagatgtgtacgtggaacagaaactagaaaatgacgcatcggcctcagagatgggcctagattcccggatggaaattcac

SEQ ID NO: 163071 - DNA, 149 bp, Homo sapiens
  chr9:129644773-129644922
  hypo
tttacaagattgcttcggtactgtaaactctggcagagagtaattttgtaggcagtttggtggtgagtttgtgctgcaggctgcctgtgggatgtcagcgttctggtatctgcctgagaacctgggctctgagacgcacaaccagtgca

SEQ ID NO: 163072 - DNA, 145 bp, Homo sapiens
  chr9:129645168-129645313
  hypo
cacaggatctgttcacgtgtgaactgctgcgctacacatcagtgttaactccctacagattacactctaatcccgctgctcccgaggagcggctttgctaaatcgggtatatagtatatgcctttttcctcgtcaaactgcctaa

SEQ ID NO: 163073 - DNA, 30 bp, Homo sapiens; identical to SEQ ID NO: 78299
  chr9:129645656-129645686
  hypo

SEQ ID NO: 163074 - DNA, 39 bp, Homo sapiens
  chr9:129648780-129648819
  hypo
gtgaatgagctaatgcgtgtctcccgaaggtcgcacgag

SEQ ID NO: 163075 - DNA, 22 bp, Homo sapiens
  chr9:129679037-129679059
  hypo
cgatggagtgagacttttccat

SEQ ID NO: 163076 - DNA, 30 bp, Homo sapiens; identical to SEQ ID NO: 78301
  chr9:129749225-129749255
  hypo

SEQ ID NO: 163077 - DNA, 41 bp, Homo sapiens; identical to SEQ ID NO: 78302
  chr9:129834458-129834499
  hypo

SEQ ID NO: 163078 - DNA, 30 bp, Homo sapiens
  chr9:129895479-129895509
  hypo
gggaggaggaggcaccgtgcaccctgggga

SEQ ID NO: 163079 - DNA, 30 bp, Homo sapiens; identical to SEQ ID NO: 78303
  chr9:130027101-130027131
  hypo

SEQ ID NO: 163080 - DNA, 659 bp, Homo sapiens; identical to SEQ ID NO: 118188
  chr9:130158817-130159476
  hypo

SEQ ID NO: 163081 - DNA, 30 bp, Homo sapiens; identical to SEQ ID NO: 118189
  chr9:130159714-130159744
  hypo

SEQ ID NO: 163082 - DNA, 37 bp, Homo sapiens; identical to SEQ ID NO: 78305
  chr9:130172834-130172871
  hypo

SEQ ID NO: 163083 - DNA, 30 bp, Homo sapiens; identical to SEQ ID NO: 78306
  chr9:130207492-130207522
  hypo

SEQ ID NO: 163084 - DNA, 30 bp, Homo sapiens; identical to SEQ ID NO: 23502
  chr9:130230041-130230071
  hypo

SEQ ID NO: 163085 - DNA, 31 bp, Homo sapiens; identical to SEQ ID NO: 78308
  chr9:130241845-130241876
  hypo

SEQ ID NO: 163086 - DNA, 22 bp, Homo sapiens
  chr9:130247370-130247392
  hypo
gccaccacgcctggcctatttt

SEQ ID NO: 163087 - DNA, 193 bp, Homo sapiens; identical to SEQ ID NO: 78310
  chr9:130248340-130248533
  hypo

SEQ ID NO: 163088 - DNA, 21 bp, Homo sapiens
  chr9:130262619-130262640
  hypo
acagagcgagactgtctcaaa

SEQ ID NO: 163089 - DNA, 30 bp, Homo sapiens
  chr9:130265172-130265202
  hypo
agctgagtgctgcccgcccacctgggcctg

SEQ ID NO: 163090 - DNA, 191 bp, Homo sapiens; identical to SEQ ID NO: 78312
  chr9:130265600-130265791
  hypo

SEQ ID NO: 163091 - DNA, 168 bp, Homo sapiens; identical to SEQ ID NO: 23504
  chr9:130266738-130266906
  hypo

SEQ ID NO: 163092 - DNA, 274 bp, Homo sapiens; identical to SEQ ID NO: 78314
  chr9:130269316-130269590
  hypo

SEQ ID NO: 163093 - DNA, 318 bp, Homo sapiens
  chr9:130270527-130270845
  hypo
ggccctgagggtaggacgaggccagtggtctgacccaagcctccgagtcctcatccgcacaagaggaccatggcgcctccttgcagggacagcaatcctggtggtggccggggatgaggctcggggctcggcctcgcctaggacggtccggggcagggcgtggggccgctcaccttcagcacccgctccaggacccgctggatggacttgcacagctcctccttggtgggccccttccccagctcctggtgcaggagggtctcgaacgtatacacggcattgtccatttgctgcagggcataccgcggacatgtgaag

SEQ ID NO: 163094 - DNA, 199 bp, Homo sapiens
  chr9:130271242-130271441
  hypo
cctcgggtctacctcccgcatgtggatctgggctcgctgcttgaacacggacgtgctggacacatcaaatcgctgctgcagcccgtccagtcgcagcgactccatcttctcatagcagctctgcatcttcagggggtggtacgccagccgggacagcttctccatgtactgcaggggccggggccgcgggggctgagca

SEQ ID NO: 163095 - DNA, 164 bp, Homo sapiens; identical to SEQ ID NO: 78317
  chr9:130272562-130272726
  hypo

SEQ ID NO: 163096 - DNA, 72 bp, Homo sapiens; identical to SEQ ID NO: 78318
  chr9:130278829-130278901
  hypo

SEQ ID NO: 163097 - DNA, 70 bp, Homo sapiens; identical to SEQ ID NO: 78319
  chr9:130279230-130279300
  hypo

SEQ ID NO: 163098 - DNA, 31 bp, Homo sapiens; identical to SEQ ID NO: 78320
  chr9:130279562-130279593
  hypo

SEQ ID NO: 163099 - DNA, 327 bp, Homo sapiens
  chr9:130279873-130280200
  hypo
ctgcaccccagtgcctcgtccagggtaggtgctcagatgcccagtaagtgatgaataagacagcgagtatctccacgtgcactggccctgcacttgtccaaatctaagcatgtcatctccttccaaaccggcagcgccccagagccccatctctgtaccccaccccctgccctcccctgctgggtccttgggtgacttctgaggtttcctcaccagcccgtctggcctcacctgcacctcgttcccacacagcatctcccaggtgccgtacagctccttggactgtcggtacatgcggatggcatctgtgaacgcagggccctctac

SEQ ID NO: 163100 - DNA, 38 bp, Homo sapiens
  chr9:130282273-130282311
  hypo
ggtgaggcagagggccgggacagcgggagggaggccag

SEQ ID NO: 163101 - DNA, 31 bp, Homo sapiens; identical to SEQ ID NO: 78322
  chr9:130290388-130290419
  hypo

SEQ ID NO: 163102 - DNA, 58 bp, Homo sapiens; identical to SEQ ID NO: 78323
  chr9:130296358-130296416
  hypo

SEQ ID NO: 163103 - DNA, 204 bp, Homo sapiens; identical to SEQ ID NO: 78324
  chr9:130297781-130297985
  hypo

SEQ ID NO: 163104 - DNA, 31 bp, Homo sapiens; identical to SEQ ID NO: 78325
  chr9:130305368-130305399
  hypo

SEQ ID NO: 163105 - DNA, 31 bp, Homo sapiens; identical to SEQ ID NO: 23509
  chr9:130311543-130311574
  hypo

SEQ ID NO: 163106 - DNA, 42 bp, Homo sapiens; identical to SEQ ID NO: 78327
  chr9:130326063-130326105
  hypo

SEQ ID NO: 163107 - DNA, 301 bp, Homo sapiens; identical to SEQ ID NO: 78328
  chr9:130327522-130327823
  hypo

SEQ ID NO: 163108 - DNA, 474 bp, Homo sapiens; identical to SEQ ID NO: 46581
  chr9:130330785-130331259
  hypo

SEQ ID NO: 163109 - DNA, 30 bp, Homo sapiens
  chr9:130338687-130338717
  hypo
agtcaggcagggggccgctgaagtgccagc

SEQ ID NO: 163110 - DNA, 30 bp, Homo sapiens
  chr9:130352126-130352156
  hypo
gacagagtgaaactgcgtctcgaaaagaaa

SEQ ID NO: 163111 - DNA, 159 bp, Homo sapiens; identical to SEQ ID NO: 46583
  chr9:130374195-130374354
  hypo

SEQ ID NO: 163112 - DNA, 37 bp, Homo sapiens; identical to SEQ ID NO: 46584
  chr9:130374656-130374693
  hypo

SEQ ID NO: 163113 - DNA, 19 bp, Homo sapiens
  chr9:130387826-130387845
  hypo
gacataggccagacacggt

SEQ ID NO: 163114 - DNA, 181 bp, Homo sapiens; identical to SEQ ID NO: 78332
  chr9:130388084-130388265
  hypo

SEQ ID NO: 163115 - DNA, 31 bp, Homo sapiens; identical to SEQ ID NO: 78333
  chr9:130415924-130415955
  hypo

SEQ ID NO: 163116 - DNA, 24 bp, Homo sapiens
  chr9:130436198-130436222
  hypo
ctgaagccggctgggcgtggtggc

SEQ ID NO: 163117 - DNA, 200 bp, Homo sapiens; identical to SEQ ID NO: 78334
  chr9:130438944-130439144
  hypo

SEQ ID NO: 163118 - DNA, 46 bp, Homo sapiens
  chr9:130440869-130440915
  hypo
ggatgcttccagcttcacctgcggcgaggtgctgctgacttcacag

SEQ ID NO: 163119 - DNA, 192 bp, Homo sapiens
  chr9:130442500-130442692
  hypo
cttcagcaccaccgccgtcaggtaggtgaaaatcccttagcaaggacagaggggagccagctctggttggatgtcagctctgcggcagacccactgtacggctgtgtgatctaccagagccctctcgctgctgctccccacagctgcagcgtgggccaggtctgcacagtggtcccacggcccttccccctc

SEQ ID NO: 163120 - DNA, 30 bp, Homo sapiens
  chr9:130443395-130443425
  hypo
gtagagttagcagctcgagagggcgaccct

SEQ ID NO: 163121 - DNA, 163 bp, Homo sapiens; identical to SEQ ID NO: 78336
  chr9:130444668-130444831
  hypo

SEQ ID NO: 163122 - DNA, 192 bp, Homo sapiens; identical to SEQ ID NO: 78337
  chr9:130446344-130446536
  hypo

SEQ ID NO: 163123 - DNA, 34 bp, Homo sapiens; identical to SEQ ID NO: 78338
  chr9:130448209-130448243
  hypo

SEQ ID NO: 163124 - DNA, 202 bp, Homo sapiens; identical to SEQ ID NO: 78339
  chr9:130454484-130454686
  hypo

SEQ ID NO: 163125 - DNA, 23 bp, Homo sapiens
  chr9:130463903-130463926
  hypo
tgtttgggccgggagcggtggct

SEQ ID NO: 163126 - DNA, 31 bp, Homo sapiens; identical to SEQ ID NO: 23515
  chr9:130467717-130467748
  hypo

SEQ ID NO: 163127 - DNA, 30 bp, Homo sapiens; identical to SEQ ID NO: 78341
  chr9:130476610-130476640
  hypo

SEQ ID NO: 163128 - DNA, 30 bp, Homo sapiens; identical to SEQ ID NO: 78342
  chr9:130494138-130494168
  hypo

SEQ ID NO: 163129 - DNA, 40 bp, Homo sapiens; identical to SEQ ID NO: 78343
  chr9:130494891-130494931
  hypo

SEQ ID NO: 163130 - DNA, 216 bp, Homo sapiens
  chr9:130496542-130496758
  hypo
ggtgagaacagtggtcaaggacgcatccagcctaccttgtagcgctcgatgtggctggggtgggggaagtggaggacgggagaaaagtggtgcacgcgggggctgcggaggccgccctggaagaggtagtgcgccagcagggagctgacataggatttgccggtgccggtccagccgtgcagggagaggaccagcggcttggtgggggctgggtcc

SEQ ID NO: 163131 - DNA, 30 bp, Homo sapiens
  chr9:130530428-130530458
  hypo
agacacggcccaccacgacccccacccctg

SEQ ID NO: 163132 - DNA, 20 bp, Homo sapiens
  chr9:130534828-130534848
  hypo
gcgcccggccagctgacttt

SEQ ID NO: 163133 - DNA, 155 bp, Homo sapiens
  chr9:130536484-130536639
  hypo
gcctcctgggcctgccgggcagcctgtgagttctgtgctttcttgatgctggggcgaggcatggtgcccatgtggctgtacatgtcactggagcgggcataggctgggggactcttgggcaccgtcaccatgtcatcctgcgtggcttcaaaggt

SEQ ID NO: 163134 - DNA, 346 bp, Homo sapiens
  chr9:130550820-130551166
  hypo
aggggagcgggactacggcccccccattgacctgtggggtgctgggtgcatcatggcagagatgtggacccgcagccccatcatgcagggcaacacggagcagcaccaactcgccctcatcagtcagctctgcggctccatcacccctgaggtacggggccccggtccccacggggtgcagagatcgaggtcccccggcagaggaggagtggggagtagaatggaaggagcgctcctctctggaagggaggctggtttggtgacagggcctgtcttggggtggggagtgtgtgggagaaaaaaacacctgacacaggctgtgcgccagtctcggttccatcagctg

SEQ ID NO: 163135 - DNA, 37 bp, Homo sapiens; identical to SEQ ID NO: 78346
  chr9:130561819-130561856
  hypo

SEQ ID NO: 163136 - DNA, 38 bp, Homo sapiens
  chr9:130563063-130563101
  hypo
tttgcgaagggctgggcgtggtggctcaagcatgtaat

SEQ ID NO: 163137 - DNA, 31 bp, Homo sapiens; identical to SEQ ID NO: 23517
  chr9:130570904-130570935
  hypo

SEQ ID NO: 163138 - DNA, 153 bp, Homo sapiens
  chr9:130587467-130587620
  hypo
gggagtttgggttttgtgtcccgggagctgcgcacaactcacccagatctgcatgttgtggttggcgtcgatgagccaggacacgtaggggggaccctgcaggatgaggacggcatcgagatccccgggtgcgcagctcagttccaccttcac

SEQ ID NO: 163139 - DNA, 41 bp, Homo sapiens; identical to SEQ ID NO: 23518
  chr9:130589224-130589265
  hypo

SEQ ID NO: 163140 - DNA, 141 bp, Homo sapiens; identical to SEQ ID NO: 118206
  chr9:130616611-130616752
  hypo

SEQ ID NO: 163141 - DNA, 24 bp, Homo sapiens
  chr9:130622503-130622527
  hypo
ggaaaactccgtttcaaaaaaaaa

SEQ ID NO: 163142 - DNA, 94 bp, Homo sapiens; identical to SEQ ID NO: 78350
  chr9:130630678-130630772
  hypo

SEQ ID NO: 163143 - DNA, 216 bp, Homo sapiens; identical to SEQ ID NO: 78351
  chr9:130633161-130633377
  hypo

SEQ ID NO: 163144 - DNA, 31 bp, Homo sapiens; identical to SEQ ID NO: 78352
  chr9:130634873-130634904
  hypo

SEQ ID NO: 163145 - DNA, 186 bp, Homo sapiens; identical to SEQ ID NO: 23521
  chr9:130635123-130635309
  hypo

SEQ ID NO: 163146 - DNA, 263 bp, Homo sapiens
  chr9:130637216-130637479
  hypo
cagtgaggatggcaccgagggacataaacagcggccacacaactgcagagctgctcccctcgaaactcccagaaaacagggcgcagggccagcgtctgcccagacaccttgacaacgctccccagggccagagggaagctgccaggaggtgggaggtggccaggaactatgtgtgtctgggatgaggtttggatggggatcctctaagggacagaggcctggggtgaaggaatctacaggagccgctcgcatgaacacagccc

SEQ ID NO: 163147 - DNA, 369 bp, Homo sapiens; identical to SEQ ID NO: 118207
  chr9:130639767-130640136
  hypo

SEQ ID NO: 163148 - DNA, 30 bp, Homo sapiens; identical to SEQ ID NO: 78356
  chr9:130648186-130648216
  hypo

SEQ ID NO: 163149 - DNA, 30 bp, Homo sapiens
  chr9:130653144-130653174
  hypo
aatgggccacgacgcggtaggtggtcttgt

SEQ ID NO: 163150 - DNA, 30 bp, Homo sapiens
  chr9:130656846-130656876
  hypo
caggtcggcggctacggccccgcagggagc

SEQ ID NO: 163151 - DNA, 30 bp, Homo sapiens; identical to SEQ ID NO: 23524
  chr9:130672621-130672651
  hypo

SEQ ID NO: 163152 - DNA, 498 bp, Homo sapiens; identical to SEQ ID NO: 46591
  chr9:130674525-130675023
  hypo

SEQ ID NO: 163153 - DNA, 80 bp, Homo sapiens; identical to SEQ ID NO: 23526
  chr9:130675503-130675583
  hypo

SEQ ID NO: 163154 - DNA, 166 bp, Homo sapiens
  chr9:130676087-130676253
  hypo
gggctagggcaggcacatggacggggtgctcggcggccacacctactgcacactgctgcagctcaccaggatgtaccccggcctgcaggtgtacaccttcaccgagcgcatgatggcctactgtgaccagatcttccaggacgagacaggcaagaaccggtggcgg

SEQ ID NO: 163155 - DNA, 30 bp, Homo sapiens; identical to SEQ ID NO: 23527
  chr9:130710250-130710280
  hypo

SEQ ID NO: 163156 - DNA, 155 bp, Homo sapiens; identical to SEQ ID NO: 78362
  chr9:130712702-130712857
  hypo

SEQ ID NO: 163157 - DNA, 108 bp, Homo sapiens
  chr9:130716084-130716192
  hypo
ttgcgcacagacacacggaagacacaggggtccagcaggccggtggccgggttagcactcatcttacacacgaaggtgaacctctttcgccaccgcacacagttctcc

SEQ ID NO: 163158 - DNA, 30 bp, Homo sapiens; identical to SEQ ID NO: 78363
  chr9:130727578-130727608
  hypo

SEQ ID NO: 163159 - DNA, 105 bp, Homo sapiens; identical to SEQ ID NO: 78364
  chr9:130737467-130737572
  hypo

SEQ ID NO: 163160 - DNA, 30 bp, Homo sapiens; identical to SEQ ID NO: 23529
  chr9:130744220-130744250
  hypo

SEQ ID NO: 163161 - DNA, 32 bp, Homo sapiens
  chr9:130744754-130744786
  hypo
gcgtgagccacgaggcaaggcccagatttgct

SEQ ID NO: 163162 - DNA, 30 bp, Homo sapiens
  chr9:130813189-130813219
  hypo
cagccagttctctttcgcgcttgattcctg

SEQ ID NO: 163163 - DNA, 125 bp, Homo sapiens; identical to SEQ ID NO: 23530
  chr9:130868764-130868889
  hypo

SEQ ID NO: 163164 - DNA, 30 bp, Homo sapiens
  chr9:130876929-130876959
  hypo
ccgccttcatcctctcgggcctgggatctc

SEQ ID NO: 163165 - DNA, 49 bp, Homo sapiens
  chr9:130877182-130877231
  hypo
aggggagtgaagctgcggcgggctctgctggggccgcccaccaggaact

SEQ ID NO: 163166 - DNA, 105 bp, Homo sapiens; identical to SEQ ID NO: 78367
  chr9:130878927-130879032
  hypo

SEQ ID NO: 163167 - DNA, 30 bp, Homo sapiens; identical to SEQ ID NO: 78368
  chr9:130883518-130883548
  hypo

SEQ ID NO: 163168 - DNA, 30 bp, Homo sapiens
  chr9:130885843-130885873
  hypo
aatccggcatggcccggccccagccccgct

SEQ ID NO: 163169 - DNA, 30 bp, Homo sapiens
  chr9:130891728-130891758
  hypo
gaggtgacacagggcgctgtagggtccagc

SEQ ID NO: 163170 - DNA, 143 bp, Homo sapiens; identical to SEQ ID NO: 78369
  chr9:130906606-130906749
  hypo

SEQ ID NO: 163171 - DNA, 263 bp, Homo sapiens; identical to SEQ ID NO: 78370
  chr9:130907015-130907278
  hypo

SEQ ID NO: 163172 - DNA, 31 bp, Homo sapiens; identical to SEQ ID NO: 23532
  chr9:130910752-130910783
  hypo

SEQ ID NO: 163173 - DNA, 318 bp, Homo sapiens; identical to SEQ ID NO: 78372
  chr9:130914349-130914667
  hypo

SEQ ID NO: 163174 - DNA, 31 bp, Homo sapiens; identical to SEQ ID NO: 78373
  chr9:130915766-130915797
  hypo

SEQ ID NO: 163175 - DNA, 31 bp, Homo sapiens; identical to SEQ ID NO: 78374
  chr9:130917060-130917091
  hypo

SEQ ID NO: 163176 - DNA, 31 bp, Homo sapiens; identical to SEQ ID NO: 23534
  chr9:130932122-130932153
  hypo

SEQ ID NO: 163177 - DNA, 122 bp, Homo sapiens
  chr9:130945586-130945708
  hypo
gggcgcaggaccaaccgcaccccaatctctaagcctgggtttttccatacgtaaaaaaatgagggcagggcgggttagacactagaccagatctgtgatgacaggcccgttggaaggctgga

SEQ ID NO: 163178 - DNA, 30 bp, Homo sapiens
  chr9:131002434-131002464
  hypo
ccagccgcatccacccgtccatctgtgtgc

SEQ ID NO: 163179 - DNA, 164 bp, Homo sapiens
  chr9:131048962-131049126
  hypo
gcatccaggattccacggcagggagggcttctctgtgtttcactggacgatgggccccagaggaggagaggaaaaaactggaggtgggaactatagatggatgaaaagagcggggtgatcagggcccaagaagatgggggtgtgaggggagtgtagcctagtgg

SEQ ID NO: 163180 - DNA, 42 bp, Homo sapiens; identical to SEQ ID NO: 23535
  chr9:131060965-131061007
  hypo

SEQ ID NO: 163181 - DNA, 86 bp, Homo sapiens
  chr9:131061248-131061334
  hypo
gcaccagcaaacctgcgcagctggtttgccagggaggagcaagacctgttttcccatcttagggctcttctcgcttctgatttcat

SEQ ID NO: 163182 - DNA, 30 bp, Homo sapiens; identical to SEQ ID NO: 78377
  chr9:131091185-131091215
  hypo

SEQ ID NO: 163183 - DNA, 20 bp, Homo sapiens
  chr9:131125693-131125713
  hypo
gcacccggccctatggagca

SEQ ID NO: 163184 - DNA, 84 bp, Homo sapiens; identical to SEQ ID NO: 46607
  chr9:131132509-131132593
  hypo

SEQ ID NO: 163185 - DNA, 83 bp, Homo sapiens
  chr9:131145991-131146074
  hypo
gatgagggtctgttacgcctgcgagtcaatatcagatacgactttgaggttgttccgtttcagtcccacgaggctgaggctga

SEQ ID NO: 163186 - DNA, 30 bp, Homo sapiens; identical to SEQ ID NO: 78380
  chr9:131154332-131154362
  hypo

SEQ ID NO: 163187 - DNA, 221 bp, Homo sapiens; identical to SEQ ID NO: 118233
  chr9:131183033-131183254
  hypo

SEQ ID NO: 163188 - DNA, 31 bp, Homo sapiens; identical to SEQ ID NO: 78382
  chr9:131196570-131196601
  hypo

SEQ ID NO: 163189 - DNA, 168 bp, Homo sapiens; identical to SEQ ID NO: 78383
  chr9:131217227-131217395
  hypo

SEQ ID NO: 163190 - DNA, 30 bp, Homo sapiens
  chr9:131315062-131315092
  hypo
ggcggggccggcgcgcggacaggtgagccg

SEQ ID NO: 163191 - DNA, 30 bp, Homo sapiens
  chr9:131315346-131315376
  hypo
cgcctccctgcagaacgctccccgcaccgc

SEQ ID NO: 163192 - DNA, 31 bp, Homo sapiens; identical to SEQ ID NO: 23537
  chr9:131394892-131394923
  hypo

SEQ ID NO: 163193 - DNA, 30 bp, Homo sapiens; identical to SEQ ID NO: 23538
  chr9:131395952-131395982
  hypo

SEQ ID NO: 163194 - DNA, 180 bp, Homo sapiens; identical to SEQ ID NO: 78386
  chr9:131396612-131396792
  hypo

SEQ ID NO: 163195 - DNA, 30 bp, Homo sapiens
  chr9:131398592-131398622
  hypo
ccagacacaggacagcgctggggacctcca

SEQ ID NO: 163196 - DNA, 139 bp, Homo sapiens
  chr9:131399185-131399324
  hypo
ctgccactcaccggccgtaggcacaggccaccacagagccagtggagttccaggagatgctggtcacatgcagaccctgcgcttgggctggcgggtagcccagggtatacagacaagacacctgcggagacgtccccaa

SEQ ID NO: 163197 - DNA, 30 bp, Homo sapiens
  chr9:131399644-131399674
  hypo
gtacaaggggtcaagcgaaccacccgacgt

SEQ ID NO: 163198 - DNA, 148 bp, Homo sapiens; identical to SEQ ID NO: 23539
  chr9:131411425-131411573
  hypo

SEQ ID NO: 163199 - DNA, 147 bp, Homo sapiens
  chr9:131417338-131417485
  hypo
ctcaagctgaaagtccgcacagaccccttgggagaggccttgagcacgcagcatctcatctcatcagagcatctcctttcgtgtgcgtttgattaaacacctggaaaactggcttatctagaatttacaatgcagtttggtcattta

SEQ ID NO: 163200 - DNA, 41 bp, Homo sapiens
  chr9:131461563-131461604
  hypo
gcctctcaaagtgttgggattacaggcgagccgccgcgccc

SEQ ID NO: 163201 - DNA, 31 bp, Homo sapiens; identical to SEQ ID NO: 78388
  chr9:131477221-131477252
  hypo

SEQ ID NO: 163202 - DNA, 30 bp, Homo sapiens
  chr9:131483402-131483432
  hypo
ctggggacaggccccgtggttttcaggcac

SEQ ID NO: 163203 - DNA, 205 bp, Homo sapiens; identical to SEQ ID NO: 23540
  chr9:131483896-131484101
  hypo

SEQ ID NO: 163204 - DNA, 30 bp, Homo sapiens; identical to SEQ ID NO: 23541
  chr9:131492163-131492193
  hypo

SEQ ID NO: 163205 - DNA, 31 bp, Homo sapiens
  chr9:131504890-131504921
  hypo
atccgctggatagactcgtcctgccgcgtgg

SEQ ID NO: 163206 - DNA, 30 bp, Homo sapiens; identical to SEQ ID NO: 78391
  chr9:131535835-131535865
  hypo

SEQ ID NO: 163207 - DNA, 30 bp, Homo sapiens; identical to SEQ ID NO: 78392
  chr9:131571626-131571656
  hypo

SEQ ID NO: 163208 - DNA, 37 bp, Homo sapiens; identical to SEQ ID NO: 78393
  chr9:131574472-131574509
  hypo

SEQ ID NO: 163209 - DNA, 155 bp, Homo sapiens; identical to SEQ ID NO: 78394
  chr9:131579961-131580116
  hypo

SEQ ID NO: 163210 - DNA, 175 bp, Homo sapiens; identical to SEQ ID NO: 78395
  chr9:131600338-131600513
  hypo

SEQ ID NO: 163211 - DNA, 31 bp, Homo sapiens; identical to SEQ ID NO: 78396
  chr9:131604667-131604698
  hypo

SEQ ID NO: 163212 - DNA, 136 bp, Homo sapiens
  chr9:131607623-131607759
  hypo
tggctcaccaggggttgtagtcgatcccgtctagccttcgggcctgcagctgtttggccatggcgagctggagacgaacaagtggaaggtcagagatggaatctgtctgggtgcagcagtccgagcttgcacacag

SEQ ID NO: 163213 - DNA, 156 bp, Homo sapiens; identical to SEQ ID NO: 78398
  chr9:131647360-131647516
  hypo

SEQ ID NO: 163214 - DNA, 581 bp, Homo sapiens
  chr9:131652560-131653141
  hypo
ttctgttgcgtcttgcgtcttgcagcaagtttgtctacatctaaacgtctcttgagggcttaaaacctcaaaattaaattgcttgctgcaatctaagcctcacgcctagagcaatgttccagtggagtaaaagtggctgtaaaattccatagctttcacgtgccacctggacgccgtcagagtgccactgccaaacctgcgccctctgacgggcagcatgacaaacgcactgaccagcagcgggggcggtgggcgggaatcctggccctgaagggacacctcgcatctcccagctgactccatgagtcaggatccctgggggtagcccccttccatcccagagagtcgggtaccaggcagctcaccctctgtcagaccccccagtcctccccctggctcacctagggcttggccagtgcccactcccctgggatctcagcagaagatgtgtctgctgcctctctagggtactggtggccacatttcataacctgtctaagaaggcagcgctggtattcataacaggttaagacctgtaaaccgtgtgtggccgtgactccatgtgcaaatatgagccaaca

SEQ ID NO: 163215 - DNA, 30 bp, Homo sapiens; identical to SEQ ID NO: 78401
  chr9:131669826-131669856
  hypo

SEQ ID NO: 163216 - DNA, 109 bp, Homo sapiens
  chr9:131675066-131675175
  hypo
ggccacggggcctggcgtggccaaggcaggtagggatggagagacatggacggatctgggagacgctggagggggaattcaaagggacgggagttgatggtgggggtgg

SEQ ID NO: 163217 - DNA, 399 bp, Homo sapiens; identical to SEQ ID NO: 118245
  chr9:131709400-131709799
  hypo

SEQ ID NO: 163218 - DNA, 99 bp, Homo sapiens
  chr9:131749118-131749217
  hypo
actgaacctgtgccacgagacagacctgcacagcaggtaatgaagggttgattactagagcttggtgctcgccaaggcaagacacgggcttttgctgtg

SEQ ID NO: 163219 - DNA, 24 bp, Homo sapiens
  chr9:131754187-131754211
  hypo
tttttttttttttttttgagacgg

SEQ ID NO: 163220 - DNA, 261 bp, Homo sapiens
  chr9:131770314-131770575
  hypo
actcgcacacaaggacggtttattggctagagagcaaacgcaggcagaagtaaaaacaccagataaaaagtgagtgtggagaggtgaagactgcggccgctggacttggcttgagctgtgaggggtgggaggggaggatagcaccggaagatgctgctccgggcccaacaccagccctggccaggctctcccctcccaggggcagcgcccagtccccaggggctgccagagccctgtgtgccttgccgcattcccctgatg

SEQ ID NO: 163221 - DNA, 113 bp, Homo sapiens; identical to SEQ ID NO: 23547
  chr9:131776673-131776786
  hypo

SEQ ID NO: 163222 - DNA, 27 bp, Homo sapiens
  chr9:131792372-131792399
  hypo
gccaccacgcccggcctaggtttcacc

SEQ ID NO: 163223 - DNA, 31 bp, Homo sapiens; identical to SEQ ID NO: 78406
  chr9:131796484-131796515
  hypo

SEQ ID NO: 163224 - DNA, 283 bp, Homo sapiens; identical to SEQ ID NO: 78407
  chr9:131821423-131821706
  hypo

SEQ ID NO: 163225 - DNA, 257 bp, Homo sapiens; identical to SEQ ID NO: 78408
  chr9:131822133-131822390
  hypo

SEQ ID NO: 163226 - DNA, 874 bp, Homo sapiens; identical to SEQ ID NO: 118249
  chr9:131842774-131843648
  hypo

SEQ ID NO: 163227 - DNA, 361 bp, Homo sapiens; identical to SEQ ID NO: 23551
  chr9:131854102-131854463
  hypo

SEQ ID NO: 163228 - DNA, 30 bp, Homo sapiens; identical to SEQ ID NO: 78411
  chr9:131857185-131857215
  hypo

SEQ ID NO: 163229 - DNA, 30 bp, Homo sapiens
  chr9:131869800-131869830
  hypo
tctggttgtacctgccgtgcaccccactcc

SEQ ID NO: 163230 - DNA, 233 bp, Homo sapiens
  chr9:131870086-131870319
  hypo
actcacccagttctccgtcttcctggcccgacgctccagccccttctgcaggcgctcccctacacctcctgaggcctgaaactcatccaccagctgcttggtgtgggcccactcctcctcactcacgatgggctgcagcgccttcaggtagtggtccagggactgctggagagggggcacgggcagccgtggcagtgcatcctggtgtgccttgaagcggctggaagccttca

SEQ ID NO: 163231 - DNA, 126 bp, Homo sapiens
  chr9:131870879-131871005
  hypo
agggcagtgctgtggcgagagagccgggtggcctggcatggagggtgagaggcggcagagagagaaagagaaagtccaggaggccctggagtgggcagagacaggagggcccgaggctgctcttgc

SEQ ID NO: 163232 - DNA, 30 bp, Homo sapiens
  chr9:131876585-131876615
  hypo
gccaccgcgcccggcgagaagttcttaatg

SEQ ID NO: 163233 - DNA, 37 bp, Homo sapiens; identical to SEQ ID NO: 78413
  chr9:131897373-131897410
  hypo

SEQ ID NO: 163234 - DNA, 158 bp, Homo sapiens; identical to SEQ ID NO: 78414
  chr9:131919403-131919561
  hypo

SEQ ID NO: 163235 - DNA, 277 bp, Homo sapiens; identical to SEQ ID NO: 46622
  chr9:131940268-131940545
  hypo

SEQ ID NO: 163236 - DNA, 390 bp, Homo sapiens; identical to SEQ ID NO: 46623
  chr9:131940585-131940975
  hypo

SEQ ID NO: 163237 - DNA, 31 bp, Homo sapiens; identical to SEQ ID NO: 78417
  chr9:131978870-131978901
  hypo

SEQ ID NO: 163238 - DNA, 31 bp, Homo sapiens; identical to SEQ ID NO: 78418
  chr9:131987004-131987035
  hypo

SEQ ID NO: 163239 - DNA, 228 bp, Homo sapiens; identical to SEQ ID NO: 78419
  chr9:132004479-132004707
  hypo

SEQ ID NO: 163240 - DNA, 298 bp, Homo sapiens; identical to SEQ ID NO: 78420
  chr9:132071026-132071324
  hypo

SEQ ID NO: 163241 - DNA, 31 bp, Homo sapiens; identical to SEQ ID NO: 23554
  chr9:132089110-132089141
  hypo

SEQ ID NO: 163242 - DNA, 197 bp, Homo sapiens; identical to SEQ ID NO: 78422
  chr9:132112538-132112735
  hypo

SEQ ID NO: 163243 - DNA, 241 bp, Homo sapiens
  chr9:132123265-132123506
  hypo
tcccaaagtgctgggattacaggggtgagccatctcgccaggctgcctctagacttttaacgaatgtgtggcgctcgctcgctgtacttcgagcacaggaggggaccctagagcgcaggtcccccccatacatactttgttttgtaacctgattcttccattcaccagcagaacgtgaacttccatgtcaccccaaaccctcgaccctcttgttcctcagaatgctccacaaattggctgc

SEQ ID NO: 163244 - DNA, 31 bp, Homo sapiens; identical to SEQ ID NO: 23556
  chr9:132142032-132142063
  hypo

SEQ ID NO: 163245 - DNA, 293 bp, Homo sapiens; identical to SEQ ID NO: 46627
  chr9:132145468-132145761
  hypo

SEQ ID NO: 163246 - DNA, 503 bp, Homo sapiens
  chr9:132162535-132163038
  hypo
gccacccctagtttgcgggtgaggaaactgaggcccagagacctgagtcagtgcgtggcatacattgaagcaaatttgaagaggctcagcctcggtgggtggctgcgtgctggtgaattgtgactgagggggcacacagggacagggacggtgctcagggcaggcctctcggggggttttgagctggggcccaatggaccaagtgttggctctgggccgggcacggggctttttttggcaggcgtctcacttctgggtagcctgcccgtggctgcattctagagaccaggagactgaggcccacagagcttacgaggcagcctgcgttctcagggttggggagagtagccaggggctcggacctcgccgtgccacactcgcccgtccaccatgccgccctgttctcacaaggccatggcgctcccagcacacaggaggagcccagatgggaaagggctggagcatgaacgtgacgaggccttgccttcggaggggtgaaggtc

SEQ ID NO: 163247 - DNA, 219 bp, Homo sapiens; identical to SEQ ID NO: 78426
  chr9:132163278-132163497
  hypo

SEQ ID NO: 163248 - DNA, 272 bp, Homo sapiens; identical to SEQ ID NO: 78427
  chr9:132166917-132167189
  hypo

SEQ ID NO: 163249 - DNA, 170 bp, Homo sapiens; identical to SEQ ID NO: 78428
  chr9:132189583-132189753
  hypo

SEQ ID NO: 163250 - DNA, 31 bp, Homo sapiens; identical to SEQ ID NO: 78429
  chr9:132204052-132204083
  hypo

SEQ ID NO: 163251 - DNA, 48 bp, Homo sapiens; identical to SEQ ID NO: 23559
  chr9:132211771-132211819
  hypo

SEQ ID NO: 163252 - DNA, 35 bp, Homo sapiens; identical to SEQ ID NO: 46630
  chr9:132222863-132222898
  hypo

SEQ ID NO: 163253 - DNA, 627 bp, Homo sapiens
  chr9:132230760-132231387
  hypo
gtgtgcatgtgtgtctcgtgtaggtgtgtgcacagtgtacaactgtgtgcaagtgtgtacagtgtttctgcatgtgtgcagagtgtacctgtgtgtgtgcgtgtggacagtgtgcaccggcgtgacactgtgtcgaatgtgtgtgcacagtgtacctgtgtgtgtgcatgtggacagtgtgcaccggcgtgacactgtgtctagtgtgcaccgtgtacctgtgtgtgtgtgtgtggacagtgtgcaccgtgtacctgtgtgtgtgtgtggacagtgtgcaccggcgtgacactgtgtcgaatgtgtgtgcacagtgtacctgtgtgtgtgcatgtggacagtgtgcaccggcgtgacactgtgtctagtgtgcacagtgtacctgtgtgtgcatgtggacagtgtgcacagtgtacctgtgtgtgtgtgtgtggacagtgtgcaccagcgtgacactgtgtcaaatgtgtgtgcacagtgtacctgtgtgtgtgcatgtggacagtgtgcaccggcgtgacactgtgtctagtgtgcacagtgtacgtgtgtgtgtgtgtggacagtgtgcaccgtgtacctgtgtgtgtgtgtgtggacagtgtgcaccggcgtgacactgtgtcg

SEQ ID NO: 163254 - DNA, 1577 bp, Homo sapiens; identical to SEQ ID NO: 118266
  chr9:132244498-132246075
  hypo

SEQ ID NO: 163255 - DNA, 57 bp, Homo sapiens; identical to SEQ ID NO: 46633
  chr9:132250697-132250754
  hypo

SEQ ID NO: 163256 - DNA, 708 bp, Homo sapiens; identical to SEQ ID NO: 118269
  chr9:132258222-132258930
  hypo

SEQ ID NO: 163257 - DNA, 30 bp, Homo sapiens; identical to SEQ ID NO: 118270
  chr9:132259626-132259656
  hypo

SEQ ID NO: 163258 - DNA, 37 bp, Homo sapiens; identical to SEQ ID NO: 78436
  chr9:132285634-132285671
  hypo

SEQ ID NO: 163259 - DNA, 1168 bp, Homo sapiens; identical to SEQ ID NO: 118274
  chr9:132330489-132331657
  hypo

SEQ ID NO: 163260 - DNA, 43 bp, Homo sapiens; identical to SEQ ID NO: 78439
  chr9:132356354-132356397
  hypo

SEQ ID NO: 163261 - DNA, 30 bp, Homo sapiens
  chr9:132358989-132359019
  hypo
tccagtgcgcggggccgatgggctctagga

SEQ ID NO: 163262 - DNA, 30 bp, Homo sapiens
  chr9:132359682-132359712
  hypo
ccgggaaggctggaccggcccgcggcttgc

SEQ ID NO: 163263 - DNA, 200 bp, Homo sapiens; identical to SEQ ID NO: 78440
  chr9:132370721-132370921
  hypo

SEQ ID NO: 163264 - DNA, 31 bp, Homo sapiens; identical to SEQ ID NO: 78441
  chr9:132378412-132378443
  hypo

SEQ ID NO: 163265 - DNA, 31 bp, Homo sapiens; identical to SEQ ID NO: 78442
  chr9:132381768-132381799
  hypo

SEQ ID NO: 163266 - DNA, 100 bp, Homo sapiens; identical to SEQ ID NO: 7072
  chr9:132382254-132382354
  hypo

SEQ ID NO: 163267 - DNA, 355 bp, Homo sapiens
  chr9:132393700-132394055
  hypo
ccgcccaactgtcatcgctgtcctgaagggtgaggtgggcctgggctctgctgccaggacccagctgaggctttctagttctctctccttctaccgtggcaaccgtctcctcatccccctgccatctccaccgccgccagcagtcttcagaagcatcggtcttcccgggccactctctgttgggcctcagggtggttgactcattgctctgtaggatgcagtcgaaactgctagagttgactgtgagaccaggaactggcagccgcgagggctgtctgtccttccctccaggagcagtgccgtcgccctccacctactgcgcttattcttgcccatccatcggtttcagcttacg

SEQ ID NO: 163268 - DNA, 30 bp, Homo sapiens; identical to SEQ ID NO: 78444
  chr9:132396273-132396303
  hypo

SEQ ID NO: 163269 - DNA, 31 bp, Homo sapiens
  chr9:132401945-132401976
  hypo
gatactagagggccctcggggtgttctagtg

SEQ ID NO: 163270 - DNA, 540 bp, Homo sapiens; identical to SEQ ID NO: 78445
  chr9:132402738-132403278
  hypo

SEQ ID NO: 163271 - DNA, 43 bp, Homo sapiens
  chr9:132408622-132408665
  hypo
ggtgcaacttttccacgcttcctgcctccgagactcgagtgtc

SEQ ID NO: 163272 - DNA, 102 bp, Homo sapiens
  chr9:132409735-132409837
  hypo
ttcctcccgagtggccgtgagtccacccgcccacccgcccaggctggctgtaggaatggccaatcggcagcaactgtggtctctgctcgagtgtgtcctact

SEQ ID NO: 163273 - DNA, 23 bp, Homo sapiens
  chr9:132410106-132410129
  hypo
caccactcaaatacacgcacaca

SEQ ID NO: 163274 - DNA, 30 bp, Homo sapiens
  chr9:132411284-132411314
  hypo
ccccaacccccagggcgacaagccccagag

SEQ ID NO: 163275 - DNA, 169 bp, Homo sapiens; identical to SEQ ID NO: 78446
  chr9:132411515-132411684
  hypo

SEQ ID NO: 163276 - DNA, 138 bp, Homo sapiens
  chr9:132411886-132412024
  hypo
tcgggggcagatcctcgcctactaaactcgggtcagcctgcccccgcttctcccaagcccggcgaggagatcccagctcgggctcgccttctctaaaccttgctcattctgcccagtggaggccggggagggcgccca

SEQ ID NO: 163277 - DNA, 38 bp, Homo sapiens
  chr9:132412332-132412370
  hypo
caggaagaatccggtcggccatccgtcagggagacgga

SEQ ID NO: 163278 - DNA, 30 bp, Homo sapiens
  chr9:132447825-132447855
  hypo
tagagacgagcgtctcgaactgctggactt

SEQ ID NO: 163279 - DNA, 43 bp, Homo sapiens
  chr9:132448116-132448159
  hypo
acacagccctgagggcgcagagggaacccggttcttggtgcag

SEQ ID NO: 163280 - DNA, 30 bp, Homo sapiens
  chr9:132451666-132451696
  hypo
gaaggaattgctccacgcgagttagtggca

SEQ ID NO: 163281 - DNA, 85 bp, Homo sapiens
  chr9:132451959-132452044
  hypo
ggccaggcctcactccgaacctgtggagtccgactctccggggtgggggcgggggcttggcatcttattttgcttatttatttat

SEQ ID NO: 163282 - DNA, 137 bp, Homo sapiens
  chr9:132471797-132471934
  hypo
gtggcccatgcctctcgctcttgtgtgctgtgccgaggccggggaagccatgggatggggccccctggggacctgtctgactcctcgggccccactgcggcttccatcatcaccttccttcccgggatgtgtttctc

SEQ ID NO: 163283 - DNA, 31 bp, Homo sapiens; identical to SEQ ID NO: 78447
  chr9:132482544-132482575
  hypo

SEQ ID NO: 163284 - DNA, 210 bp, Homo sapiens; identical to SEQ ID NO: 78448
  chr9:132495390-132495600
  hypo

SEQ ID NO: 163285 - DNA, 30 bp, Homo sapiens; identical to SEQ ID NO: 78449
  chr9:132497009-132497039
  hypo

SEQ ID NO: 163286 - DNA, 323 bp, Homo sapiens; identical to SEQ ID NO: 23566
  chr9:132501745-132502068
  hypo

SEQ ID NO: 163287 - DNA, 97 bp, Homo sapiens
  chr9:132509433-132509530
  hypo
aaatgttgggattataggcatgagccaccacatctggtcaagaataatttttttagtaacatttaccaacatggaaagtgttcgcaaaataatgtta

SEQ ID NO: 163288 - DNA, 30 bp, Homo sapiens
  chr9:132510937-132510967
  hypo
ggcagcgttccacgtcggggtcgctcctgc

SEQ ID NO: 163289 - DNA, 30 bp, Homo sapiens; identical to SEQ ID NO: 23568
  chr9:132530230-132530260
  hypo

SEQ ID NO: 163290 - DNA, 30 bp, Homo sapiens; identical to SEQ ID NO: 23569
  chr9:132530947-132530977
  hypo

SEQ ID NO: 163291 - DNA, 22 bp, Homo sapiens
  chr9:132535543-132535565
  hypo
gagccaccgcacccagccacat

SEQ ID NO: 163292 - DNA, 23 bp, Homo sapiens
  chr9:132564533-132564556
  hypo
ttttttttgttttttttgagacg

SEQ ID NO: 163293 - DNA, 30 bp, Homo sapiens; identical to SEQ ID NO: 78455
  chr9:132572685-132572715
  hypo

SEQ ID NO: 163294 - DNA, 31 bp, Homo sapiens; identical to SEQ ID NO: 78456
  chr9:132574946-132574977
  hypo

SEQ ID NO: 163295 - DNA, 95 bp, Homo sapiens; identical to SEQ ID NO: 23571
  chr9:132604071-132604166
  hypo

SEQ ID NO: 163296 - DNA, 30 bp, Homo sapiens
  chr9:132630310-132630340
  hypo
atggaccagctgcacgaggagctcaaggag

SEQ ID NO: 163297 - DNA, 203 bp, Homo sapiens
  chr9:132631148-132631351
  hypo
aatgatgctcacctacgcagctcctctcgcccctgcagccccgtccaccaccacgagggccatgccaagctgtctagcagcccccctcgtgcaagccccgtgaggatggcaccgtcgtacgtgctcaagaaaggttcggggggcacgggagggtgggtcagcttgaggctgggagtacagattacgcccgtagctgcctttct

SEQ ID NO: 163298 - DNA, 30 bp, Homo sapiens
  chr9:132631625-132631655
  hypo
gcagcgctaccgcagcgtcatctcagacat

SEQ ID NO: 163299 - DNA, 336 bp, Homo sapiens; identical to SEQ ID NO: 23572
  chr9:132633589-132633925
  hypo

SEQ ID NO: 163300 - DNA, 203 bp, Homo sapiens; identical to SEQ ID NO: 78459
  chr9:132636599-132636802
  hypo

SEQ ID NO: 163301 - DNA, 30 bp, Homo sapiens; identical to SEQ ID NO: 78460
  chr9:132637044-132637074
  hypo

SEQ ID NO: 163302 - DNA, 54 bp, Homo sapiens; identical to SEQ ID NO: 23574
  chr9:132638504-132638558
  hypo

SEQ ID NO: 163303 - DNA, 30 bp, Homo sapiens; identical to SEQ ID NO: 78462
  chr9:132643195-132643225
  hypo

SEQ ID NO: 163304 - DNA, 282 bp, Homo sapiens; identical to SEQ ID NO: 78463
  chr9:132643741-132644023
  hypo

SEQ ID NO: 163305 - DNA, 31 bp, Homo sapiens; identical to SEQ ID NO: 78464
  chr9:132661151-132661182
  hypo

SEQ ID NO: 163306 - DNA, 21 bp, Homo sapiens
  chr9:132706251-132706272
  hypo
acagagcgagactccatctca

SEQ ID NO: 163307 - DNA, 31 bp, Homo sapiens; identical to SEQ ID NO: 78465
  chr9:132750114-132750145
  hypo

SEQ ID NO: 163308 - DNA, 378 bp, Homo sapiens; identical to SEQ ID NO: 7074
  chr9:132804283-132804661
  hypo

SEQ ID NO: 163309 - DNA, 920 bp, Homo sapiens; identical to SEQ ID NO: 46646
  chr9:132805028-132805948
  hypo

SEQ ID NO: 163310 - DNA, 31 bp, Homo sapiens; identical to SEQ ID NO: 7077
  chr9:132809114-132809145
  hypo

SEQ ID NO: 163311 - DNA, 121 bp, Homo sapiens
  chr9:132814991-132815112
  hypo
cgcgaatcaccaccctgccaggcctcatttcgtttttagtacagtattatattcaaatttaaaaccagagattttcaaagatgccacttaactttaaaagataaaaagtactccaaagcag

SEQ ID NO: 163312 - DNA, 161 bp, Homo sapiens
  chr9:132821044-132821205
  hypo
ataggtaggcttttgtgcccatctttctttctttcttttttgagcttcgttcattttgtgccatgtgtcagtaattcattcctttttactgttgaatggtcttccagcgtgtggatatatcttcttttgcttagcagttcaccagtcgatggatgtttggg

SEQ ID NO: 163313 - DNA, 59 bp, Homo sapiens
  chr9:132850525-132850584
  hypo
cgccttgctttttctcggacagatcaggctttaggctctgctctcgctgttcccacagg

SEQ ID NO: 163314 - DNA, 616 bp, Homo sapiens
  chr9:132874114-132874730
  hypo
actgtcctttagccgcgtctttgtctctcctgtcacgcgcagtggcttctctcaggtcctcggtcactgagactcacagctgcactgcatcctccgagagggagcttaattgagtctcgcacagacacacctagcgctggctccactctgtctcgcctgctaagatttactggctctgactgcccttgagcccgcatccgcgttcccttctctttctccagtgtcattaccttataggactggcgtcgagatacacaccgtaaatttaattaacagtctctgctgctcaccatcctttttttgggccttgtgtttctgaggaaaagtcagaagatgtattctgaagagccttagctttcatgtgagcttcagaagtatttaaacaatcccggttggctggctgcagagttgatggaggaacggcttcattccgaggtgccgccgtgctctgaaaggagccgcgaccatgcgaggcatttgttagggcagcggttctcaagggggtcctcgggatcaaaactattttcataatcatacggtgtgagtctcttgtgctgttgacatttgcctgatggtgaaaagcaatgatgggtgaaattgccggcaccgtcacgtg

SEQ ID NO: 163315 - DNA, 507 bp, Homo sapiens; identical to SEQ ID NO: 23581
  chr9:132881037-132881544
  hypo

SEQ ID NO: 163316 - DNA, 89 bp, Homo sapiens; identical to SEQ ID NO: 78473
  chr9:132881755-132881844
  hypo

SEQ ID NO: 163317 - DNA, 64 bp, Homo sapiens; identical to SEQ ID NO: 78474
  chr9:133223967-133224031
  hypo

SEQ ID NO: 163318 - DNA, 330 bp, Homo sapiens; identical to SEQ ID NO: 78475
  chr9:133230036-133230366
  hypo

SEQ ID NO: 163319 - DNA, 31 bp, Homo sapiens; identical to SEQ ID NO: 23584
  chr9:133238734-133238765
  hypo

SEQ ID NO: 163320 - DNA, 30 bp, Homo sapiens
  chr9:133250781-133250811
  hypo
caagcctggccaccccgggcatgggcttct

SEQ ID NO: 163321 - DNA, 30 bp, Homo sapiens
  chr9:133251064-133251094
  hypo
cacctggatgaaggacggggccccgtttga

SEQ ID NO: 163322 - DNA, 199 bp, Homo sapiens
  chr9:133258529-133258728
  hypo
tggcgcgtgcagagccgtgcccagcactcagacatcaggcagccccctgagtcaccccatgtgcagacacagagctgcggggaccctgggagcccaacacacacagcacggccctccacaggggtgggggaggctcttgtcacatctggtttgctacagagaaccacccaacaccaacctcacacgcccgctcctgagc

SEQ ID NO: 163323 - DNA, 105 bp, Homo sapiens
  chr9:133264433-133264538
  hypo
ctcacgcaggctccacgtggggcagaaaggtctgaaggtacagctcggagctggtcccttgtctggtggaaatccgtccacagcaggggccggcactgccagcca

SEQ ID NO: 163324 - DNA, 73 bp, Homo sapiens
  chr9:133265443-133265516
  hypo
gtggacctgtgtcatcgcctctcgcgggtcaggtggctgcaggccccacctccctttgcgtccagctcttggc

SEQ ID NO: 163325 - DNA, 310 bp, Homo sapiens
  chr9:133266377-133266687
  hypo
cacggtgtggtctcccgggggggccgcctccagctgagccgcctgcaaccggcccaggcgggcacctacacgtgcgtggctgagaacacccaggctgaggcccgcaaggacttcgtggtagcagtgctgggtaggtctgcgcctgcaccctcctgtcccactcccatggcagcccctgccatcacccagggcctcactgcacccctgcctcagtggccccccggatccggagctcgggcgtggcgcgggagcaccatgtcttggaagggcaggaggtgcggctggactgtgaggccgatgggcagccgcc

SEQ ID NO: 163326 - DNA, 31 bp, Homo sapiens; identical to SEQ ID NO: 78479
  chr9:133267499-133267530
  hypo

SEQ ID NO: 163327 - DNA, 31 bp, Homo sapiens; identical to SEQ ID NO: 78480
  chr9:133274947-133274978
  hypo

SEQ ID NO: 163328 - DNA, 30 bp, Homo sapiens
  chr9:133278583-133278613
  hypo
ccccggtggtgaagccgctgcccagcgtgg

SEQ ID NO: 163329 - DNA, 30 bp, Homo sapiens
  chr9:133279194-133279224
  hypo
aaactatctctgcatcgctaagaacagtgc

SEQ ID NO: 163330 - DNA, 150 bp, Homo sapiens
  chr9:133281383-133281533
  hypo
gtgggccgggcccgccgccgcgtgcacctcaccatcctggtactgcctgtgttcaccaccctgcctggggaccgcagcctgcgccttggggacaggctgtggcttcgctgtgcagcccggggcagccccacccctcgcattggctggact

SEQ ID NO: 163331 - DNA, 30 bp, Homo sapiens
  chr9:133282218-133282248
  hypo
tgacaatggaggggccgtgctcggcacagg

SEQ ID NO: 163332 - DNA, 155 bp, Homo sapiens; identical to SEQ ID NO: 78481
  chr9:133300386-133300541
  hypo

SEQ ID NO: 163333 - DNA, 31 bp, Homo sapiens; identical to SEQ ID NO: 23586
  chr9:133303021-133303052
  hypo

SEQ ID NO: 163334 - DNA, 377 bp, Homo sapiens
  chr9:133303486-133303863
  hypo
gggtgcccaaggggacgttgtctgcagccttgcattggaagctgcaggcccaaggactcgggtcccttggagtgggccctatgttttgggatagggagcaagacaatggaaagagctagcagaaggggtggggaccttcctgccagtggctcctgggcctgcggacgaagcctctgtggataggccgggccagggtcaggtggcgaggcacgcctggggatcatgttcacacagccgtctgccctgatctgcccccagatgtggacgagtgtgcgtgggatgctcacctctgccgagagggacagcgctgtgtgaacctgctcgggtcctaccgctgcctccccgactgtgggcctggcttccgggtggctgatggg

SEQ ID NO: 163335 - DNA, 105 bp, Homo sapiens
  chr9:133304438-133304543
  hypo
aaggggatcagccatcgcacctctgtggcccccagggcccttggagtgcccgacaactcaccgggctctcctgcctgccgcccttcctgccgcctttcctccttt

SEQ ID NO: 163336 - DNA, 160 bp, Homo sapiens
  chr9:133304980-133305140
  hypo
ctacaaccagctctgcgagaacaccccaggcggtcaccgctgcagctgccccaggggttaccggatgcagggccccagcctgccctgcctaggtacggggacacccaccctctggccacaccgctgcagctgccccaggggttaccggatgcagggcccc

SEQ ID NO: 163337 - DNA, 236 bp, Homo sapiens; identical to SEQ ID NO: 78486
  chr9:133305756-133305992
  hypo

SEQ ID NO: 163338 - DNA, 252 bp, Homo sapiens; identical to SEQ ID NO: 78487
  chr9:133306769-133307021
  hypo

SEQ ID NO: 163339 - DNA, 136 bp, Homo sapiens; identical to SEQ ID NO: 46648
  chr9:133308610-133308746
  hypo

SEQ ID NO: 163340 - DNA, 490 bp, Homo sapiens; identical to SEQ ID NO: 118294
  chr9:133308769-133309259
  hypo

SEQ ID NO: 163341 - DNA, 112 bp, Homo sapiens; identical to SEQ ID NO: 78490
  chr9:133314398-133314510
  hypo

SEQ ID NO: 163342 - DNA, 31 bp, Homo sapiens; identical to SEQ ID NO: 78491
  chr9:133337714-133337745
  hypo

SEQ ID NO: 163343 - DNA, 44 bp, Homo sapiens; identical to SEQ ID NO: 78492
  chr9:133345458-133345502
  hypo

SEQ ID NO: 163344 - DNA, 30 bp, Homo sapiens
  chr9:133345870-133345900
  hypo
ctcgtagggtggtggcggggctggttggct

SEQ ID NO: 163345 - DNA, 260 bp, Homo sapiens
  chr9:133346155-133346415
  hypo
ctgggacggacctcacgcgtccttccagccgccttacctccacctgtgctgtctctttcctgcagcaacacgggattcccatcccggtcactcccaagaacccgtggagcatggatgagaacctcatgcacatcaggtaaatcccaccctccacccatccttggtcctcccgggctcattccaaaggacggccacgcgctgccccaggacgtcctggtgacccccacaccagtggtccctgccctcggggagctgagagg

SEQ ID NO: 163346 - DNA, 31 bp, Homo sapiens; identical to SEQ ID NO: 78493
  chr9:133351149-133351180
  hypo

SEQ ID NO: 163347 - DNA, 31 bp, Homo sapiens; identical to SEQ ID NO: 78494
  chr9:133352248-133352279
  hypo

SEQ ID NO: 163348 - DNA, 30 bp, Homo sapiens; identical to SEQ ID NO: 78495
  chr9:133357106-133357136
  hypo

SEQ ID NO: 163349 - DNA, 31 bp, Homo sapiens; identical to SEQ ID NO: 23589
  chr9:133364355-133364386
  hypo

SEQ ID NO: 163350 - DNA, 31 bp, Homo sapiens; identical to SEQ ID NO: 78497
  chr9:133364922-133364953
  hypo

SEQ ID NO: 163351 - DNA, 31 bp, Homo sapiens; identical to SEQ ID NO: 78498
  chr9:133365220-133365251
  hypo

SEQ ID NO: 163352 - DNA, 396 bp, Homo sapiens
  chr9:133366612-133367008
  hypo
ggctttccagcccggcgggattgcgaccccgaaaggaggattttagttacaaagtgagagagtcattaagacgtggcggaggagagagcacctggccgggctgctccggggcctccacggaggctgatcccaccgtggccgcggccacggctgccacttatcctgccatcttgctgctaggctctgagctgggcacctgatggggtattatctaatattagctgcgcagaggtgaggaaacggaggcccccaggtgaagacactcacccaggctctcctggctggtgatgggcagctttgagccggggacaggccagctgtagcggccaagttcccagttactccaacagattccaggatgctcgtgatcaaggggcacggcggcacagacagggg

SEQ ID NO: 163353 - DNA, 31 bp, Homo sapiens; identical to SEQ ID NO: 78500
  chr9:133367502-133367533
  hypo

SEQ ID NO: 163354 - DNA, 31 bp, Homo sapiens; identical to SEQ ID NO: 78501
  chr9:133370322-133370353
  hypo

SEQ ID NO: 163355 - DNA, 31 bp, Homo sapiens; identical to SEQ ID NO: 78502
  chr9:133376591-133376622
  hypo

SEQ ID NO: 163356 - DNA, 25 bp, Homo sapiens
  chr9:133381108-133381133
  hypo
agcgagactccgtctcaagaaaaca

SEQ ID NO: 163357 - DNA, 155 bp, Homo sapiens; identical to SEQ ID NO: 78504
  chr9:133408938-133409093
  hypo

SEQ ID NO: 163358 - DNA, 41 bp, Homo sapiens; identical to SEQ ID NO: 78505
  chr9:133421533-133421574
  hypo

SEQ ID NO: 163359 - DNA, 516 bp, Homo sapiens
  chr9:133426642-133427158
  hypo
tcaggcagatggcacaggtttctggctcacgctggtgccagctcagcgacagccctgtcagtgacccaaagccttcttggagacggtggttcctcagtgcccggtggccggctgtgggagtctgagacctattttgttcattatgaatgaaaagcagacgtgattttaaatgtcgtgctttggctgctagtgccgggtggagcagggccccagcgagcagtcacaccagataaaacatattatttaggagtgattggaaggcagacaagctgaaacattgtgcacggaagggctaccgcaattcgctcatgagcatcatagtcactttccccgggctcgtaggtggattcacatttagggcaatttccctcgcggtagctcagctccgtgagtgggctcgggcttgaggcttgaggacaagcgatttcccagccgagtgacttccagcctccacatagagcgcggggctcggtgaggcatggcttccctgaatcaaatccacgctgcccactgaga

SEQ ID NO: 163360 - DNA, 30 bp, Homo sapiens
  chr9:133430427-133430457
  hypo
aagcacacgggggaacgcttggctctgccc

SEQ ID NO: 163361 - DNA, 40 bp, Homo sapiens
  chr9:133433440-133433480
  hypo
ggcggaggctgggcacggtggttcttgcctaaaatcccag

SEQ ID NO: 163362 - DNA, 30 bp, Homo sapiens
  chr9:133439233-133439263
  hypo
gtcccctcgtgtacacgccctgcataaccc

SEQ ID NO: 163363 - DNA, 81 bp, Homo sapiens; identical to SEQ ID NO: 78506
  chr9:133450276-133450357
  hypo

SEQ ID NO: 163364 - DNA, 30 bp, Homo sapiens
  chr9:133458817-133458847
  hypo
agtgggttcgccctgcgaggctcatttaac

SEQ ID NO: 163365 - DNA, 30 bp, Homo sapiens
  chr9:133483582-133483612
  hypo
gtggaccagaacccacggtgcggcctcatt

SEQ ID NO: 163366 - DNA, 125 bp, Homo sapiens
  chr9:133484749-133484874
  hypo
ctgctctggtgggtccgtgacgaggcctgtggaggtaggaggctggatcctctccttcagatgcttatggtcttgggggtgggggggccggcgaggggggcaccagggggcgtctcctcccccgt

SEQ ID NO: 163367 - DNA, 173 bp, Homo sapiens; identical to SEQ ID NO: 78507
  chr9:133513742-133513915
  hypo

SEQ ID NO: 163368 - DNA, 332 bp, Homo sapiens; identical to SEQ ID NO: 78508
  chr9:133527217-133527549
  hypo

SEQ ID NO: 163369 - DNA, 211 bp, Homo sapiens; identical to SEQ ID NO: 118298
  chr9:133534646-133534857
  hypo

SEQ ID NO: 163370 - DNA, 503 bp, Homo sapiens; identical to SEQ ID NO: 118299
  chr9:133535057-133535560
  hypo

SEQ ID NO: 163371 - DNA, 829 bp, Homo sapiens; identical to SEQ ID NO: 118305
  chr9:133537658-133538487
  hypo

SEQ ID NO: 163372 - DNA, 304 bp, Homo sapiens; identical to SEQ ID NO: 118306
  chr9:133538727-133539031
  hypo

SEQ ID NO: 163373 - DNA, 34 bp, Homo sapiens; identical to SEQ ID NO: 78511
  chr9:133580975-133581009
  hypo

SEQ ID NO: 163374 - DNA, 89 bp, Homo sapiens
  chr9:133583813-133583902
  hypo
ggacctcttgagactgtgcctcggtttttaaaaaaagtatcattctacagtattatacaggcatttttaaagtacagtgcattggccgg

SEQ ID NO: 163375 - DNA, 121 bp, Homo sapiens; identical to SEQ ID NO: 78513
  chr9:133585239-133585360
  hypo

SEQ ID NO: 163376 - DNA, 241 bp, Homo sapiens; identical to SEQ ID NO: 23595
  chr9:133592859-133593100
  hypo

SEQ ID NO: 163377 - DNA, 30 bp, Homo sapiens; identical to SEQ ID NO: 78515
  chr9:133605722-133605752
  hypo

SEQ ID NO: 163378 - DNA, 41 bp, Homo sapiens; identical to SEQ ID NO: 23596
  chr9:133606662-133606703
  hypo

SEQ ID NO: 163379 - DNA, 83 bp, Homo sapiens
  chr9:133609267-133609350
  hypo
cgcctggcctgtaaagcactttcatatacttttttgtgaggtctatggtataggcaggatacgcattattcctttctttcagt

SEQ ID NO: 163380 - DNA, 175 bp, Homo sapiens; identical to SEQ ID NO: 23597
  chr9:133641497-133641672
  hypo

SEQ ID NO: 163381 - DNA, 30 bp, Homo sapiens; identical to SEQ ID NO: 7088
  chr9:133660745-133660775
  hypo

SEQ ID NO: 163382 - DNA, 1393 bp, Homo sapiens; identical to SEQ ID NO: 118315
  chr9:133710034-133711427
  hypo

SEQ ID NO: 163383 - DNA, 30 bp, Homo sapiens; identical to SEQ ID NO: 78521
  chr9:133715223-133715253
  hypo

SEQ ID NO: 163384 - DNA, 30 bp, Homo sapiens
  chr9:133734593-133734623
  hypo
cctgtcacgttcctcgattccttctagtcc

SEQ ID NO: 163385 - DNA, 110 bp, Homo sapiens; identical to SEQ ID NO: 78522
  chr9:133738140-133738250
  hypo

SEQ ID NO: 163386 - DNA, 30 bp, Homo sapiens
  chr9:133745900-133745930
  hypo
gcagcattgaatccccggatactggcaggc

SEQ ID NO: 163387 - DNA, 30 bp, Homo sapiens
  chr9:133746145-133746175
  hypo
accatttttaaagagcgataaattgtttcc

SEQ ID NO: 163388 - DNA, 35 bp, Homo sapiens; identical to SEQ ID NO: 78523
  chr9:133755898-133755933
  hypo

SEQ ID NO: 163389 - DNA, 30 bp, Homo sapiens; identical to SEQ ID NO: 23600
  chr9:133758474-133758504
  hypo

SEQ ID NO: 163390 - DNA, 365 bp, Homo sapiens; identical to SEQ ID NO: 78525
  chr9:133759675-133760040
  hypo

SEQ ID NO: 163391 - DNA, 500 bp, Homo sapiens
  chr9:133760399-133760899
  hypo
ggaaggctggaggaaagccctcgcagagcccgagccaggaggcggccggggaggcagtcctgggcgcaaagacaaaagccacgagtctggttgatgctgtgaacagtgacgctgccaagcccagccagccgggagagggcctcaaaaagcccgtgctcccggccactccaaagccacagtccgccaagccgtcggggacccccatcagcccagcccccgttccctccacgttgccatcagcatcctcggccctggcaggggaccagccgtcttccaccgccttcatccctctcatatcaacccgagtgtctcttcggaaaacccgccagcctccagagcggatcgccagcggcgccatcaccaagggcgtggtcctggacagcaccgaggcgctgtgcctcgccatctctaggaactccgagcagatggccagccacagcgcagtgctggaggccggcaaaaacctctacacgttctgcgtgagctatgtggattccatc

SEQ ID NO: 163392 - DNA, 524 bp, Homo sapiens
  chr9:133761106-133761630
  hypo
tgcctgcagcacatgcgggctcgcccatacccgtgacagtggctgacaagggactagtgagtcagcaccttggcccaggagctctgcgccaggcagagctgagggccctgtggagtccagctctactacctacgtttgcaccgcctgccctcccgcaccttcctcctccccgctccgtctctgtcctcgaattttatctgtggagttcctgctccgtggactgcagtcggcatgccaggacccgccagccccgctcccacctagtgccccagactgagctctccaggccaggtgggaacggctgatgtggactgtctttttcatttttttctctctggagcccctcctcccccggctgggcctccttcttccacttctccaagaatggaagcctgaactgaggccttgtgtgtcaggccctctgcctgcactccctggccttgcccgtcgtgtgctgaagacatgtttcaagaaccgcatttcgggaagggcatgcacgggcatgcacacggctggtcactctg

SEQ ID NO: 163393 - DNA, 303 bp, Homo sapiens; identical to SEQ ID NO: 23602
  chr9:133767698-133768001
  hypo

SEQ ID NO: 163394 - DNA, 30 bp, Homo sapiens
  chr9:133773327-133773357
  hypo
ggctttttctgctgtcgggtaaatgcaggg

SEQ ID NO: 163395 - DNA, 352 bp, Homo sapiens
  chr9:133773571-133773923
  hypo
ggccaggccccggcctcgcagacccctttaaccacatgtcactcccggactgggttccacagccggctcagccacagccagcctccacctcactgagcttcagatcctccgcctggctgggcatgacagcagtgcccgtgtggtggggtggggttgtcggggtggcatggtgcccgcttaggcagtgttcactgctgctgctagggagggcgcagggtggtggcccccatctaagcccgggtcccctgggctgttggcaactgccgctccggttctgctggccgaacccctcctgccctgggaagccgcttcccatgctgttgggcaccatttctcgcggaattgcatgagc

SEQ ID NO: 163396 - DNA, 549 bp, Homo sapiens; identical to SEQ ID NO: 23604
  chr9:133779433-133779982
  hypo

SEQ ID NO: 163397 - DNA, 30 bp, Homo sapiens; identical to SEQ ID NO: 23605
  chr9:133787179-133787209
  hypo

SEQ ID NO: 163398 - DNA, 563 bp, Homo sapiens; identical to SEQ ID NO: 78533
  chr9:133799038-133799601
  hypo

SEQ ID NO: 163399 - DNA, 31 bp, Homo sapiens; identical to SEQ ID NO: 78534
  chr9:133800540-133800571
  hypo

SEQ ID NO: 163400 - DNA, 212 bp, Homo sapiens
  chr9:133802157-133802369
  hypo
gagattgaaccactgcactccagctgggtgacagagcgagacaaccgtgtctcaaaaaataaataaatgaattaaaataaaataaaatgggataacaaatgtactaacctcctggcgttatggggctgcaaagtgcctattaacgcggagcccagcacatggtataggcctatcactcctaccagaaaagggattttcggcccaacacagta

SEQ ID NO: 163401 - DNA, 430 bp, Homo sapiens; identical to SEQ ID NO: 118317
  chr9:133814205-133814635
  hypo

SEQ ID NO: 163402 - DNA, 601 bp, Homo sapiens; identical to SEQ ID NO: 118318
  chr9:133814875-133815476
  hypo

SEQ ID NO: 163403 - DNA, 30 bp, Homo sapiens
  chr9:133864825-133864855
  hypo
ccggagcctgtcccccggctgggatgagca

SEQ ID NO: 163404 - DNA, 30 bp, Homo sapiens
  chr9:133865402-133865432
  hypo
gggggatgcgcgaaccggccgacagcggcc

SEQ ID NO: 163405 - DNA, 30 bp, Homo sapiens; identical to SEQ ID NO: 78536
  chr9:133900517-133900547
  hypo

SEQ ID NO: 163406 - DNA, 30 bp, Homo sapiens
  chr9:133903912-133903942
  hypo
cggagccggccgtgtcggggtccccaggac

SEQ ID NO: 163407 - DNA, 258 bp, Homo sapiens
  chr9:133911550-133911808
  hypo
aggtgcaagtgcaacgggcatgccagcgagtgcggccccgacgtggcaggccagttggcctgccggtgccagcacaacaccaccggcacagactgtgagcgctgcctgcccttcttccaggaccgcccgtgggcccggggcaccgccgaggctgcccacgagtgtctgcgtgagtgtctgagtgtcacagggcatcagggacccgaggctggtgttgcaggcggggaaaggaactccccaaaacgtcgtggtgggggc

SEQ ID NO: 163408 - DNA, 31 bp, Homo sapiens; identical to SEQ ID NO: 78538
  chr9:133914586-133914617
  hypo

SEQ ID NO: 163409 - DNA, 114 bp, Homo sapiens; identical to SEQ ID NO: 78539
  chr9:133926311-133926425
  hypo

SEQ ID NO: 163410 - DNA, 106 bp, Homo sapiens
  chr9:133927487-133927593
  hypo
tgttccctaggaatttcgtgctcatgggcatcgtgaatgctacacatgagcagacggcagcctctctggtcacacgtgtgtgtatcccctccgttcaccctcggac

SEQ ID NO: 163411 - DNA, 30 bp, Homo sapiens
  chr9:133942875-133942905
  hypo
ggctgacccggtgatcgccctgcgccgggt

SEQ ID NO: 163412 - DNA, 108 bp, Homo sapiens
  chr9:133945092-133945200
  hypo
ccagtgccacgagaacggcacatgcgtgtgcaggcctggcttcgagggctacaaatgtgaccgctgccacgacaacttcttcctcacggcagacggcacacactgcca

SEQ ID NO: 163413 - DNA, 30 bp, Homo sapiens
  chr9:133948093-133948123
  hypo
ctgaacaagggtgcccgctgtgcccaggcc

SEQ ID NO: 163414 - DNA, 30 bp, Homo sapiens
  chr9:133948416-133948446
  hypo
cgaggagactgaatgcgcagtaagtggtgg

SEQ ID NO: 163415 - DNA, 55 bp, Homo sapiens; identical to SEQ ID NO: 78540
  chr9:133951049-133951104
  hypo

SEQ ID NO: 163416 - DNA, 245 bp, Homo sapiens
  chr9:133967062-133967307
  hypo
ggagctgcagatccagggcttcgagagtgacctcgccgagatccgcgccgacaaacagaacctggaggccattctgcacagcctgcccgagaactgtgccagctggcagtgagggctgcccagatccccggcacacactcccccacctgctgtttacatgacccagggggtgcacactaccccacaggtgtgcccatacagacattccccggagccggctgctgtgaactcgcccccgtgtggat

SEQ ID NO: 163417 - DNA, 217 bp, Homo sapiens
  chr9:133967913-133968130
  hypo
tgtcattgccttcaccggacgcttccctctcagggtcctgggactgcaccagatgccctgagggaatggcccaccctggcctgtacccacttcagcctgtgatctatccaaagagccaggcccaaaagcgcctaggtcagggtgctcaggctaccaggagcacgcctctgtgcccccggcaacccagttgacctttaattgacgctttccagaccag

SEQ ID NO: 163418 - DNA, 30 bp, Homo sapiens; identical to SEQ ID NO: 23608
  chr9:133979441-133979471
  hypo

SEQ ID NO: 163419 - DNA, 95 bp, Homo sapiens
  chr9:133982139-133982234
  hypo
ataaatagggtcggccgcattgagaaggtgacattcggccgcattgagaaggtgacattgaggctgggtgtggtggctcacgcctgtgatgccag

SEQ ID NO: 163420 - DNA, 347 bp, Homo sapiens
  chr9:133987303-133987650
  hypo
tcccctcactgcccacggggctcaggctggttcccgtccgccgctgcccaggccccgtcactcccgggccccgcacacaatcagctctttgtgagcaagccttgcctctccccctccccagcagagcgtctcaggagcccctgcggagaatggacgtttgtgtcaccgcagtggggcaggggggcagagtttctgcccattgaaacccggcagcacgggatgaaaagaaagcagggcctgggagccggcgcggggagaggggcagcataaaggtccctctgtttggggccctggcgcttggttcccagccagcacctcgaaaggagaggagccgggcacataggggg

SEQ ID NO: 163421 - DNA, 86 bp, Homo sapiens
  chr9:133987866-133987952
  hypo
gcatttgttggacgtcggcctgtgtgaagcacttctcgtgcggcgtggcgagctccccacatcaccccaatcggcctggaggaaga

SEQ ID NO: 163422 - DNA, 30 bp, Homo sapiens
  chr9:134015732-134015762
  hypo
gtggcgatctgatagcggcaggaactctct

SEQ ID NO: 163423 - DNA, 30 bp, Homo sapiens
  chr9:134038477-134038507
  hypo
agtcttcagcagctccgcctttacaaacag

SEQ ID NO: 163424 - DNA, 48 bp, Homo sapiens
  chr9:134110672-134110720
  hypo
caagctctgacaggagaggctcgtggcggagggcttagctttaaaggg

SEQ ID NO: 163425 - DNA, 146 bp, Homo sapiens; identical to SEQ ID NO: 78543
  chr9:134126662-134126808
  hypo

SEQ ID NO: 163426 - DNA, 32 bp, Homo sapiens; identical to SEQ ID NO: 23610
  chr9:134132751-134132783
  hypo

SEQ ID NO: 163427 - DNA, 627 bp, Homo sapiens
  chr9:134135919-134136546
  hypo
ctgttacaagtgagcgactgaaactgagaaaaaggagaggcaaggagaccagaggtcaccctgagggcgcacgtggggtctgtctgtcctgcttagatctcccctctccctgaaaggaagcaggtgccgagagccggggaggccttcccgggggcatcagcacagtgagatccgcccgctggagagggtagaatggttgtatcttgctgaatgactgaagagtgagtctgagttttgttttcagcggtattattatttgtgagtctaacctagcgggtggtcctggctgtcaccggtgcttgggcgggatcaccaccagcggctgcccgtacttgggccgccacatgaggacctgggcatcgttggcattgggcttgaccagggcgctgggcgggatgggctcattcttgctcaggattttgggctggtcctgggcgatgggctcccgcagccgggcgcgctggcccaggggccggttggggttcacctcgatgctgagctgcatgcgccagtgcagcgtctgcaggatgatcatgtcgttggtggaggtgttggtggccaccagccaggtggtgaagctctggtcccggtagatattggtgagcttggccacgttgctctcgctga

SEQ ID NO: 163428 - DNA, 31 bp, Homo sapiens
  chr9:134146005-134146036
  hypo
accccgcccttgcctccgccagggcccagca

SEQ ID NO: 163429 - DNA, 753 bp, Homo sapiens; identical to SEQ ID NO: 118328
  chr9:134151923-134152676
  hypo

SEQ ID NO: 163430 - DNA, 30 bp, Homo sapiens; identical to SEQ ID NO: 23612
  chr9:134157081-134157111
  hypo

SEQ ID NO: 163431 - DNA, 30 bp, Homo sapiens
  chr9:134164565-134164595
  hypo
actcccgtcctttgcgaagttccaggtagt

SEQ ID NO: 163432 - DNA, 22 bp, Homo sapiens
  chr9:134179705-134179727
  hypo
tctcccctgtgtttccgaaatg

SEQ ID NO: 163433 - DNA, 30 bp, Homo sapiens; identical to SEQ ID NO: 23613
  chr9:134183530-134183560
  hypo

SEQ ID NO: 163434 - DNA, 30 bp, Homo sapiens; identical to SEQ ID NO: 78550
  chr9:134184489-134184519
  hypo

SEQ ID NO: 163435 - DNA, 226 bp, Homo sapiens
  chr9:134188221-134188447
  hypo
cacgggcctggccatacgtcttccatatgtgtcattgtgatgaccttatccctattttacagatgaggaaactgaggctcagagagggaaacccatttccctaaggttgcccagcttggatgtggtggagccaggatcagaaaccaggcctgagtggccccagcgcagagaagccctccggaagacagaaacgcagggcacccgccaacctcggaatgaggctgaa

SEQ ID NO: 163436 - DNA, 31 bp, Homo sapiens; identical to SEQ ID NO: 78552
  chr9:134190317-134190348
  hypo

SEQ ID NO: 163437 - DNA, 153 bp, Homo sapiens
  chr9:134191188-134191341
  hypo
actacagggcttcggcgctcttgggctcctggtcactgtggttcaactcctaagagagggagggaccccgggtttgtccccatccagctccaggaaagagacgttggctcgaggaatccgtctcaaggtcaaagagggcgaggtgagggcagg

SEQ ID NO: 163438 - DNA, 206 bp, Homo sapiens
  chr9:134191561-134191767
  hypo
tgcgtcgatgctctgcgccagcgtatggagaggcagccgctgcagtctgtgccccccacagtctgtacattgaaatcccaaccaaaacacgagggtatgaagaggtgggcgtttggggtcattaggtcatgagggtgggcccacacgacgggattagtgcccttacaaaaaaggctccggatgccgggcgttgtggctcacgccgg

SEQ ID NO: 163439 - DNA, 155 bp, Homo sapiens
  chr9:134195895-134196050
  hypo
tgctgagccctgggccggcagatgcgcgatgagtctcttaagggcctcacagggaacagggtgaatttcgttaagcaatcatctatttccctgattagtatgtgttttggttacacaagaatgcttttttatgatttaaaaaattaggggccggg

SEQ ID NO: 163440 - DNA, 113 bp, Homo sapiens
  chr9:134200643-134200756
  hypo
gtttcttgggagagacgggccacgggactgcgtcctggttttcaggggcctggggcgcctgactctaccacccgcgctgtggaggccgaggcaaggctcgcctgcagatatgg

SEQ ID NO: 163441 - DNA, 92 bp, Homo sapiens; identical to SEQ ID NO: 78554
  chr9:134207873-134207965
  hypo

SEQ ID NO: 163442 - DNA, 31 bp, Homo sapiens; identical to SEQ ID NO: 23615
  chr9:134225985-134226016
  hypo

SEQ ID NO: 163443 - DNA, 30 bp, Homo sapiens
  chr9:134247273-134247303
  hypo
ccaccgcgcccggccgggagtattttcaaa

SEQ ID NO: 163444 - DNA, 33 bp, Homo sapiens; identical to SEQ ID NO: 78556
  chr9:134279021-134279054
  hypo

SEQ ID NO: 163445 - DNA, 30 bp, Homo sapiens; identical to SEQ ID NO: 23616
  chr9:134305365-134305395
  hypo

SEQ ID NO: 163446 - DNA, 56 bp, Homo sapiens; identical to SEQ ID NO: 46675
  chr9:134307437-134307493
  hypo

SEQ ID NO: 163447 - DNA, 259 bp, Homo sapiens
  chr9:134308038-134308297
  hypo
gttgctgcagcccggcgcatgccaccgcctgcaaacctgccaagcttgaagtctgaaaacaaaggaaacgaccccaacatcgtgatagtacccaaggacgggacgggatgggcaaacaagcaggatcagcaagacccaaagaggtaaacggaggaggcgggtggtgagtgggagctggcgctccaagggtggtcccggcatccttccctgtggcaaactaaccctaaccctttggctactgcagcgctagtcttgcagt

SEQ ID NO: 163448 - DNA, 30 bp, Homo sapiens; identical to SEQ ID NO: 78559
  chr9:134350446-134350476
  hypo

SEQ ID NO: 163449 - DNA, 30 bp, Homo sapiens
  chr9:134370013-134370043
  hypo
ggagctgggccgcccgcgtccctcctggcg

SEQ ID NO: 163450 - DNA, 30 bp, Homo sapiens
  chr9:134371389-134371419
  hypo
ctcctctccactcccgaaagctccgttgtc

SEQ ID NO: 163451 - DNA, 121 bp, Homo sapiens; identical to SEQ ID NO: 78560
  chr9:134377409-134377530
  hypo

SEQ ID NO: 163452 - DNA, 185 bp, Homo sapiens
  chr9:134400290-134400475
  hypo
gagtgaggaaggcctcgctgctaacactcccctggggtgcgccgagaggaagcagtgggtgtgggtgggcgtccccaggctcagtccctgaacacacatgccgggcgggagacctgccctgaggctcggcagcccctcagtggggtctgctgctggactccaaatgtgaccgtttgccagaggtc

SEQ ID NO: 163453 - DNA, 54 bp, Homo sapiens; identical to SEQ ID NO: 23618
  chr9:134406194-134406248
  hypo

SEQ ID NO: 163454 - DNA, 30 bp, Homo sapiens
  chr9:134501589-134501619
  hypo
gggagagcaggtggcgtatctgtctgctgc

SEQ ID NO: 163455 - DNA, 30 bp, Homo sapiens
  chr9:134508713-134508743
  hypo
ttcctaaaagcacaacgccaggccccaaag

SEQ ID NO: 163456 - DNA, 32 bp, Homo sapiens
  chr9:134509058-134509090
  hypo
ctccctacactagctcgcgtggcctaggcttg

SEQ ID NO: 163457 - DNA, 30 bp, Homo sapiens
  chr9:134529029-134529059
  hypo
actggagaaactgaacgccctacacattgc

SEQ ID NO: 163458 - DNA, 29 bp, Homo sapiens
  chr9:134587009-134587038
  hypo
gctgggattacaggcgtgagccaccacgc

SEQ ID NO: 163459 - DNA, 39 bp, Homo sapiens; identical to SEQ ID NO: 23619
  chr9:134688852-134688891
  hypo

SEQ ID NO: 163460 - DNA, 30 bp, Homo sapiens; identical to SEQ ID NO: 78564
  chr9:134716728-134716758
  hypo

SEQ ID NO: 163461 - DNA, 371 bp, Homo sapiens; identical to SEQ ID NO: 78565
  chr9:134731511-134731882
  hypo

SEQ ID NO: 163462 - DNA, 187 bp, Homo sapiens; identical to SEQ ID NO: 78566
  chr9:134746466-134746653
  hypo

SEQ ID NO: 163463 - DNA, 338 bp, Homo sapiens
  chr9:134775010-134775348
  hypo
ctcaatggctgttagcgtcctttctcttcggagtgtggtgcagcaggaagggtaacgtaacaggagccctcctggctctgccatcgagatggagcctggtgtgcgctctctagcagaccttccagccctcacatcgctctacaatgattccgattctcatgtgtctggcatgtgccagtttctaacgtatctgcatgcaccaggttgtagtgaccttgaactttttgatagactgataaagagatgcagcacatagaggccaatgggcatctttccacaaactagccaatgctggtcacagtcagaagcaaaacgcccaccgacgggggctacaggtc

SEQ ID NO: 163464 - DNA, 30 bp, Homo sapiens
  chr9:134775633-134775663
  hypo
actctgggcagcgagcgggggccgaaacca

SEQ ID NO: 163465 - DNA, 256 bp, Homo sapiens
  chr9:134818811-134819067
  hypo
tgctgcctcccgagacggtgagcacggctagcgtctgcagcgggctctgcagtgcggcgccccactttgagagcagggctaaggacaggtaggaacagtgtgctcccctcctacacttccaccatatgttacactctgttctgtggcagaatcaaattactttaatttttacctttggaatataggcaaacaagcagtaacacagcagtggtgactagtttacacttgagcagacgcggcgcggaaagacattaat

SEQ ID NO: 163466 - DNA, 30 bp, Homo sapiens
  chr9:134819365-134819395
  hypo
cctttgccctagctgcggtaagactctcaa

SEQ ID NO: 163467 - DNA, 250 bp, Homo sapiens; identical to SEQ ID NO: 78569
  chr9:134836479-134836729
  hypo

SEQ ID NO: 163468 - DNA, 30 bp, Homo sapiens
  chr9:134837044-134837074
  hypo
cagaaccgctgctttcgtgaactagcgaag

SEQ ID NO: 163469 - DNA, 139 bp, Homo sapiens; identical to SEQ ID NO: 78570
  chr9:134902644-134902783
  hypo

SEQ ID NO: 163470 - DNA, 197 bp, Homo sapiens; identical to SEQ ID NO: 78571
  chr9:134903266-134903463
  hypo

SEQ ID NO: 163471 - DNA, 30 bp, Homo sapiens
  chr9:134912598-134912628
  hypo
aagctgaagtcacaacgcgaataaacacgc

SEQ ID NO: 163472 - DNA, 30 bp, Homo sapiens
  chr9:134928998-134929028
  hypo
tgcctggagtcacaccgctgggaaacagca

SEQ ID NO: 163473 - DNA, 98 bp, Homo sapiens; identical to SEQ ID NO: 78572
  chr9:134929559-134929657
  hypo

SEQ ID NO: 163474 - DNA, 30 bp, Homo sapiens
  chr9:135016247-135016277
  hypo
aaaatgggagcaggccggggagcggtggct

SEQ ID NO: 163475 - DNA, 31 bp, Homo sapiens; identical to SEQ ID NO: 78573
  chr9:135021247-135021278
  hypo

SEQ ID NO: 163476 - DNA, 595 bp, Homo sapiens; identical to SEQ ID NO: 7095
  chr9:135036692-135037287
  hypo

SEQ ID NO: 163477 - DNA, 227 bp, Homo sapiens; identical to SEQ ID NO: 118340
  chr9:135037333-135037560
  hypo

SEQ ID NO: 163478 - DNA, 30 bp, Homo sapiens; identical to SEQ ID NO: 118341
  chr9:135037776-135037806
  hypo

SEQ ID NO: 163479 - DNA, 30 bp, Homo sapiens
  chr9:135045100-135045130
  hypo
cgggacggcacagcccggccgtgctgccgt

SEQ ID NO: 163480 - DNA, 880 bp, Homo sapiens; identical to SEQ ID NO: 23627
  chr9:135048987-135049867
  hypo

SEQ ID NO: 163481 - DNA, 46 bp, Homo sapiens
  chr9:135084415-135084461
  hypo
tgagtaggactgtgccgtgtgcactgcacaccgtggtctgtttacc

SEQ ID NO: 163482 - DNA, 163 bp, Homo sapiens
  chr9:135102283-135102446
  hypo
cctgcagtgcgagtgcgagcacaacaccaccggccccgactgcggcaagtgcaagaagaatttccgcacccggtcctggcgggccggctcctacctgccgctgccccatggctctcccaacgcctgtacgtgccatgccccggggccacgagcccacatggct

SEQ ID NO: 163483 - DNA, 31 bp, Homo sapiens; identical to SEQ ID NO: 23628
  chr9:135130344-135130375
  hypo

SEQ ID NO: 163484 - DNA, 30 bp, Homo sapiens
  chr9:135134224-135134254
  hypo
ctggccctgggagccggctaagggatgtgg

SEQ ID NO: 163485 - DNA, 101 bp, Homo sapiens
  chr9:135195996-135196097
  hypo
aaaaaaaaactaaacaaggcaccttaataccaccaataattattggcctgtataaaccagaaatgcttaaataagacggttgaaatcgtatggttaaaaag

SEQ ID NO: 163486 - DNA, 145 bp, Homo sapiens
  chr9:135196473-135196618
  hypo
tccaacacctctcctccgtcccccactcctacccagccctcttcccacactcagctccctgccacgcctacatttcccaggtaaaatatgtgacgattcttttttgggaactgagacctgacaggaaaaataaagactaaagaca

SEQ ID NO: 163487 - DNA, 40 bp, Homo sapiens
  chr9:135239754-135239794
  hypo
aaagtatttgtcagtcgggcgcagtggctcatgcctgtaa

SEQ ID NO: 163488 - DNA, 30 bp, Homo sapiens; identical to SEQ ID NO: 78580
  chr9:135251394-135251424
  hypo

SEQ ID NO: 163489 - DNA, 30 bp, Homo sapiens
  chr9:135260505-135260535
  hypo
aagtcatttaaccagcgctaaagcacgggg

SEQ ID NO: 163490 - DNA, 30 bp, Homo sapiens
  chr9:135260849-135260879
  hypo
acgcacccagcccatcgctgccgtcatttt

SEQ ID NO: 163491 - DNA, 30 bp, Homo sapiens; identical to SEQ ID NO: 23631
  chr9:135266721-135266751
  hypo

SEQ ID NO: 163492 - DNA, 345 bp, Homo sapiens; identical to SEQ ID NO: 23632
  chr9:135267103-135267448
  hypo

SEQ ID NO: 163493 - DNA, 247 bp, Homo sapiens; identical to SEQ ID NO: 23633
  chr9:135275313-135275560
  hypo

SEQ ID NO: 163494 - DNA, 551 bp, Homo sapiens; identical to SEQ ID NO: 118348
  chr9:135285313-135285864
  hypo

SEQ ID NO: 163495 - DNA, 106 bp, Homo sapiens; identical to SEQ ID NO: 118349
  chr9:135285880-135285986
  hypo

SEQ ID NO: 163496 - DNA, 770 bp, Homo sapiens; identical to SEQ ID NO: 7099
  chr9:135286198-135286968
  hypo

SEQ ID NO: 163497 - DNA, 344 bp, Homo sapiens
  chr9:135331488-135331832
  hypo
tactatcctaggctccgttgaacgagacaggtgagctgcctctctcgtggttacatttgaatggagaaagacagacaataaatacacagccgaaaggtagcatcgcttatagtaagtggctgggtggggaaggcagctcagaatgggtgactgaggaggggctctgtccacagtagctgttgtcctgccccccatcttgacatctgctgcccctctcccagcctcatgtgccttgtcacgtgcctgtgcctgttcccatttgtaccccatcttcagccagcgcttgactcattcatcttcatattccctacggcgcctccttggtatggcgccaggcatgcggt

SEQ ID NO: 163498 - DNA, 210 bp, Homo sapiens; identical to SEQ ID NO: 78588
  chr9:135338501-135338711
  hypo

SEQ ID NO: 163499 - DNA, 158 bp, Homo sapiens
  chr9:135360967-135361125
  hypo
tgccttccttgagcacgccccagctgtgagcagcgggagctggccggcaggtggctggaatgaaaccccacacagtggataacccaccaaacagacaagtgacacttgactgcaaagtacgacgccaagtgattgcactccatcgcggcggtgagctt

SEQ ID NO: 163500 - DNA, 30 bp, Homo sapiens
  chr9:135373271-135373301
  hypo
gataaagggagaccgcgtggcaggatgatc

SEQ ID NO: 163501 - DNA, 235 bp, Homo sapiens; identical to SEQ ID NO: 23635
  chr9:135384262-135384497
  hypo

SEQ ID NO: 163502 - DNA, 162 bp, Homo sapiens; identical to SEQ ID NO: 46688
  chr9:135395348-135395510
  hypo

SEQ ID NO: 163503 - DNA, 30 bp, Homo sapiens
  chr9:135412902-135412932
  hypo
ggaggctcccgggggcgggcggtggggagc

SEQ ID NO: 163504 - DNA, 35 bp, Homo sapiens; identical to SEQ ID NO: 78591
  chr9:135447835-135447870
  hypo

SEQ ID NO: 163505 - DNA, 275 bp, Homo sapiens; identical to SEQ ID NO: 118364
  chr9:135462647-135462922
  hypo

SEQ ID NO: 163506 - DNA, 267 bp, Homo sapiens; identical to SEQ ID NO: 118365
  chr9:135464626-135464893
  hypo

SEQ ID NO: 163507 - DNA, 84 bp, Homo sapiens; identical to SEQ ID NO: 78593
  chr9:135479249-135479333
  hypo

SEQ ID NO: 163508 - DNA, 36 bp, Homo sapiens
  chr9:135507040-135507076
  hypo
ctccctgcaggtcaacgtacacggacacggctctcg

SEQ ID NO: 163509 - DNA, 735 bp, Homo sapiens
  chr9:135512939-135513674
  hypo
gggacgcagcacactcgcctctgacgccttcccggcctgccaaaagtcattactgccgtgtgtggaaagccatcagcagggtccaggcccccgttgtccgggtgacagattgggctgcgtaatcagaggaggaaggagagagtgcagaagctgtcagaggcgagagatcttggctggagccgccaaaaaactggcaacatgagttagcgtaactgagtaaacagcaaacaatctccaaatgatctttccattaacgaaacaaaataaaacgaaaaagatacactttacctaaaaagcataccccagagaaaagcacgaaagtctacatttatttgggacacagaactgacattgtgactcttcacagccgtatctcctttgtctcctagcctcctggcacggtggaaattccccaggaggagaggaaattaagaactgcacagacagaacagtatgcttcaagcggaaaaaaatacggagaaggtggaggaaagcagcacaggtgatttaggtgcatcttctgaaaaagaaatgcacgcgccggacagccaaggaggatgccaagggacagttggcgcccagggcgggctgcaggtatctttcctttctgggaaaaaggtgactgcactccatccagggacaatcaaggacagccaccggagaccaacagaaaacctaatgtcagccttaaaatcaggtggcttagaaactccattttccggccattcggtggta

SEQ ID NO: 163510 - DNA, 321 bp, Homo sapiens
  chr9:135514393-135514714
  hypo
gttctccatctgtctcgtcctgaagtggccctcgttcctcattaacaccaaggaggctcctggagagtgttcggatagcctggcaagcaacaggctgcttaaaaggacgcagagtggcagcatctcccccgacccaggcatgatctattacagcgtgtgtgtcccactcgccccgcagctctcatatgctagaagcatcagctagagcaaacaagcatggcagaagagccaggaacaccgagaggaagcgaagaacttcccacgactgggaaccggccctcctgttctggcccagcaaccgagagaaatgaaccccaccca

SEQ ID NO: 163511 - DNA, 237 bp, Homo sapiens
  chr9:135520062-135520299
  hypo
cgcttggatcgacgccgcagaatgcctctggtaaaaacggattcacaggattagtaaacaaagcttgaaacaaaaacaaaaccccaaaccattaacggtattaaataaataaaaccaacaactttgattgaatcagggatccaaaggtaaagaccaagagtttacctaatgcgcaagggctggaatattcagggatttctatataatcttgtggcaaataaccggtgtccttgagtg

SEQ ID NO: 163512 - DNA, 30 bp, Homo sapiens; identical to SEQ ID NO: 78596
  chr9:135521292-135521322
  hypo

SEQ ID NO: 163513 - DNA, 164 bp, Homo sapiens
  chr9:135523836-135524000
  hypo
accaaccaccgcagccgactaaaatgaatgttctttgtggattttatatgatccaccaggcgtccaggagttgagataaggatatttattcctttgcggagtctgtttaaaattatatatcataaaagaaagtaaatcaaacagggccacgccagtagaaaaca

SEQ ID NO: 163514 - DNA, 113 bp, Homo sapiens; identical to SEQ ID NO: 78597
  chr9:135537994-135538107
  hypo

SEQ ID NO: 163515 - DNA, 246 bp, Homo sapiens
  chr9:135538540-135538786
  hypo
cacaggagagaggggcgagggggaatgcgcatctcagcccgtgcccaggaagcggaaacattcattaccattctaccctagcgcctggatctctctcattctctcctctcaagctgctcctccagattcagacggcctggagaaaattcctacgccctgttcccattccaaatgagaatgctgctccatccatcacctctaccacaattacttcctacctcccttgcctttcgagtctctgagtcc

SEQ ID NO: 163516 - DNA, 147 bp, Homo sapiens; identical to SEQ ID NO: 78599
  chr9:135548173-135548320
  hypo

SEQ ID NO: 163517 - DNA, 26 bp, Homo sapiens
  chr9:135548559-135548585
  hypo
actccgtctcaaaaaaaaagaaagaa

SEQ ID NO: 163518 - DNA, 79 bp, Homo sapiens; identical to SEQ ID NO: 78601
  chr9:135588872-135588951
  hypo

SEQ ID NO: 163519 - DNA, 335 bp, Homo sapiens
  chr9:135600615-135600950
  hypo
actgcacccggccaaggtgggtgttttaaaagctgtgtttgttgagtgcttccagagcccggcactgcgctgagatcttcatcggcatcaccactctttatcccacagccaccctgcgaggcggctacggtttttagcctcaagttggttgtgagaagagaggctctgtgggttgggactccaaggacacaccatgcgttggtgctggagccaccatttgtcccaggtccgactccagagacccggcctgcactccactttatcatcactgtggtcttcacctgtcctgtgtccccagacccctacacgaggccaacttccggccacctcacctt

SEQ ID NO: 163520 - DNA, 23 bp, Homo sapiens
  chr9:135613457-135613480
  hypo
tgagacagagtctcactctgtcg

SEQ ID NO: 163521 - DNA, 531 bp, Homo sapiens
  chr9:135624733-135625264
  hypo
gggttcaggtgctggacgctctggcctgccataaccactgggcactaccgcctccctggatgctcttgtgcgaggcccctcgtaaggtgtgctggctcttcaggtgccccgtgcccggcactctgtgaggatgcacaggatacctctcactgcgtcttcatggcaagcccgggacgtaggtgtaactgtcacccccatcttatggatgaggcagcttgccccgatatcggctggtgagtgacccagaagaactcgcgactcacagctgctggactctaacatccagggtgggagccactgggctgtgttgctgtttcccaaatgcaggaagtctcttaagtgcttcatttactctgttttttttttttcttgagacagatttgttcatcgataatttttattttttaaatcgatatgaaaatcctcttgcaggggtggactggagctgagggcacttgaaggggtgagtgggaaagcccacagccaggagccaccagaaccggcgcagagaacagacgctgctgcaggagg

SEQ ID NO: 163522 - DNA, 204 bp, Homo sapiens; identical to SEQ ID NO: 78605
  chr9:135626042-135626246
  hypo

SEQ ID NO: 163523 - DNA, 284 bp, Homo sapiens
  chr9:135632486-135632770
  hypo
gttgccgtgggcacccgacagatgacaacggaatgcgtgtgtccaggggcagccagagtgactgacatttcaatccagaagctgccacggggacctggtgattcccaccgttagcgggagagaagcttccacagctcaccgggatggtcagagggttccggagcaggacaaggctaggatgggctccccccgtcaccctcactgcaccaacgaggccgtgtccaacccgctggcctctggggaaggagggcccgccatctcacggcaggtgaagaagacaagga

SEQ ID NO: 163524 - DNA, 31 bp, Homo sapiens; identical to SEQ ID NO: 78607
  chr9:135653270-135653301
  hypo

SEQ ID NO: 163525 - DNA, 31 bp, Homo sapiens; identical to SEQ ID NO: 23643
  chr9:135654706-135654737
  hypo

SEQ ID NO: 163526 - DNA, 165 bp, Homo sapiens
  chr9:135671074-135671239
  hypo
gactgccaaggcccccgggctcctgaagttcacgctgtctcggggagacaaacattacccaggtaacaaataaccatttctaagagtcatgggtactgtgaagaaaatcaaccaaatgatgggaggctgatggtttgaccgggcctaggacggctactaaggagg

SEQ ID NO: 163527 - DNA, 172 bp, Homo sapiens
  chr9:135701620-135701792
  hypo
agaggctgcacagctgggctgcgtcggggctgagatttgaacaggttgctcagctcagccatccccgcacctcgcacaggctgcccgcagtggctcccgagctgctgtgaacattggccattgctgtggacagcaacgcagtgccaggcgcggggccatgtatctccatcct

SEQ ID NO: 163528 - DNA, 388 bp, Homo sapiens
  chr9:135712694-135713082
  hypo
gactccatctcgaaaaaaaaaaaaaaaaaaagaatgaaagaatgaggagttggcccccttctgctctgcccttctgctgtgggtgccctgctagctctcgggagcagacgtggcacctctgactctctgctcagcctgcgaagagaagagtgatgtggtcagtacttctgggtccagtcccgttcccatcatctccgtgcctctcaatactctctcctgctccaaggtctgcttgcgtctgctcaaacctcaggccctgtcctgcatttgatcatctctttttcctcttctactgcagtgagagggatgatctgaggcatcacacatccacagagcatatcggaacacgcgttcctgtccacatggagtgctacggctctgtatgcag

SEQ ID NO: 163529 - DNA, 46 bp, Homo sapiens
  chr9:135714353-135714399
  hypo
cgagtctccaactgtcgcccagatggagagtgcagtggtgtgatct

SEQ ID NO: 163530 - DNA, 30 bp, Homo sapiens
  chr9:135715710-135715740
  hypo
ttcttgcattacgctcgcgtttggcaacat

SEQ ID NO: 163531 - DNA, 30 bp, Homo sapiens
  chr9:135727339-135727369
  hypo
agatactggaattagcggatgaaaactcga

SEQ ID NO: 163532 - DNA, 66 bp, Homo sapiens; identical to SEQ ID NO: 78610
  chr9:135735332-135735398
  hypo

SEQ ID NO: 163533 - DNA, 30 bp, Homo sapiens
  chr9:135740107-135740137
  hypo
gaggacaaactcgatcgcttcagccatgct

SEQ ID NO: 163534 - DNA, 31 bp, Homo sapiens; identical to SEQ ID NO: 78611
  chr9:135744759-135744790
  hypo

SEQ ID NO: 163535 - DNA, 142 bp, Homo sapiens; identical to SEQ ID NO: 23645
  chr9:135745916-135746058
  hypo

SEQ ID NO: 163536 - DNA, 31 bp, Homo sapiens; identical to SEQ ID NO: 23646
  chr9:135746338-135746369
  hypo

SEQ ID NO: 163537 - DNA, 197 bp, Homo sapiens; identical to SEQ ID NO: 78614
  chr9:135767902-135768099
  hypo

SEQ ID NO: 163538 - DNA, 30 bp, Homo sapiens; identical to SEQ ID NO: 78615
  chr9:135776245-135776275
  hypo

SEQ ID NO: 163539 - DNA, 232 bp, Homo sapiens
  chr9:135781248-135781480
  hypo
gcattccctgtctcccgcagggctttcatcagcactgccgcagggcaggtctatgggagtaaaggcttgctttggtgtgtcaggcccaagcttgtccagggaggagtgtaaaggctcagggttcacgctggcgccctgagaactggaggctgccgagtgggtcttccgctgagaacctgggagactgtctcggtaaaagggagagtcaaagcctcctcgaggaaccacaggc

SEQ ID NO: 163540 - DNA, 23 bp, Homo sapiens
  chr9:135823463-135823486
  hypo
acggagtccttctcaggccatat

SEQ ID NO: 163541 - DNA, 31 bp, Homo sapiens; identical to SEQ ID NO: 78617
  chr9:135862918-135862949
  hypo

SEQ ID NO: 163542 - DNA, 123 bp, Homo sapiens
  chr9:135865155-135865278
  hypo
ggcaaggccttcaagcgctcgtccacgctgtccacccacctgctcatccactcagacacgcggccctacccctgccagttctgcggcaagcgtttccaccagaagtccgacatgaagaagcac

SEQ ID NO: 163543 - DNA, 61 bp, Homo sapiens; identical to SEQ ID NO: 78619
  chr9:135898910-135898971
  hypo

SEQ ID NO: 163544 - DNA, 85 bp, Homo sapiens
  chr9:135904329-135904414
  hypo
agtgaggctctgtctcaaaacaaacaaacaacaaaaagaaatgactttaggcaacatagtgagaccccgtcgccacacacacaca

SEQ ID NO: 163545 - DNA, 181 bp, Homo sapiens; identical to SEQ ID NO: 118372
  chr9:135906375-135906556
  hypo

SEQ ID NO: 163546 - DNA, 136 bp, Homo sapiens
  chr9:135907664-135907800
  hypo
tccctgctggttggagttggaccacacaatctaagctaatctcaattggctattttaaatagaacaggggtgtgggttacagtgacgggacgagcgatttcggtgggaagactagtttcggcgggaagggcagtta

SEQ ID NO: 163547 - DNA, 217 bp, Homo sapiens
  chr9:135908015-135908232
  hypo
gtttgtctgaataaggcggggggaaattggaggttagtgagagctgtctccgtaagtctttgtattaaccctcaggcacagggtatgatacaacatcctacgagaataaacacgtttattacaatggcaagggacataaggatcgaggacataagtcctttccacctgccgaacaatcttcccgttagatcagtgaagagatcgtttatcccagaat

SEQ ID NO: 163548 - DNA, 143 bp, Homo sapiens; identical to SEQ ID NO: 78622
  chr9:135908535-135908678
  hypo

SEQ ID NO: 163549 - DNA, 30 bp, Homo sapiens
  chr9:135915550-135915580
  hypo
cctgtgccaggcctacgtttgggttcattc

SEQ ID NO: 163550 - DNA, 30 bp, Homo sapiens
  chr9:135920114-135920144
  hypo
actctacacagctctcgcctgctctgtact

SEQ ID NO: 163551 - DNA, 248 bp, Homo sapiens
  chr9:135920655-135920903
  hypo
tcctgacacccccatcgtacacatgaggaagccgagacatggggtcagcgccacgtcccgccggcagcaccgccctggtctctcccactctgcaggctttgctcgtggcccagtgccaacggtgtcctgatttttgtatgctctactttctaaaatgacgcacaaaaagacaacatggaaaaaaactttgcattgtaatggatgctccccagaagtagcgacttggcctgcttcggtctctgtcatag

SEQ ID NO: 163552 - DNA, 139 bp, Homo sapiens
  chr9:135922415-135922554
  hypo
cgtgcccatcaggagcgtccagtgagcaacattctgctcctctccacccccagtggcacagtgctgccttcagaaacaagcagtgcggatctctgacagggaagactcatgtttcagacagactcgcaataccagtctc

SEQ ID NO: 163553 - DNA, 37 bp, Homo sapiens
  chr9:135926316-135926353
  hypo
agtctgcactaaccccgtggaccggaaggtggaggag

SEQ ID NO: 163554 - DNA, 276 bp, Homo sapiens
  chr9:135926580-135926856
  hypo
cttaagaaaaatatgcgtgcgttgttcagatgtgacataaacgtggagctctgggatccactgagctcttattcttccattcactcattgcagccaagccagtggggcacctagtgtgccaggcccagcactttcttaccgttagaactggaaccgtgctgccaggcagccctccttccccgggcttgcgggtgccgtggagtcctgcgtccccactggcatgagcatcaggttcacaggccactgccacctggagcccggcgcttcccttacgca

SEQ ID NO: 163555 - DNA, 31 bp, Homo sapiens; identical to SEQ ID NO: 23652
  chr9:135927292-135927323
  hypo

SEQ ID NO: 163556 - DNA, 30 bp, Homo sapiens; identical to SEQ ID NO: 78624
  chr9:135929732-135929762
  hypo

SEQ ID NO: 163557 - DNA, 30 bp, Homo sapiens; identical to SEQ ID NO: 23653
  chr9:135943292-135943322
  hypo

SEQ ID NO: 163558 - DNA, 238 bp, Homo sapiens; identical to SEQ ID NO: 78626
  chr9:135945846-135946084
  hypo

SEQ ID NO: 163559 - DNA, 30 bp, Homo sapiens
  chr9:135961756-135961786
  hypo
tttgccaccccactccgggctaccggcccc

SEQ ID NO: 163560 - DNA, 75 bp, Homo sapiens
  chr9:135962382-135962457
  hypo
ctctgaggccactcccgtctcccccgacaggcaactccgagtctgcccccgtccctgcaacgggtgactctcagg

SEQ ID NO: 163561 - DNA, 31 bp, Homo sapiens; identical to SEQ ID NO: 23656
  chr9:135978311-135978342
  hypo

SEQ ID NO: 163562 - DNA, 127 bp, Homo sapiens
  chr9:135979096-135979223
  hypo
tcccgggccctactccagccccgcccggcacactcacatacagatagtccttcatggcagtgtccagcatcaccaggtcggtgaggaacgtgcccaggtagggaacggtgccctggatgatgccctg

SEQ ID NO: 163563 - DNA, 105 bp, Homo sapiens
  chr9:135991326-135991431
  hypo
gagcccaggctcctgcgacagtgcggggcccacgctgctgtgcccttctccgtcctacagaggtggggacccatgcccgaggacaggagccggtggggcgtgtgc

SEQ ID NO: 163564 - DNA, 22 bp, Homo sapiens
  chr9:136000829-136000851
  hypo
aagaaaaatggccagacgcagt

SEQ ID NO: 163565 - DNA, 30 bp, Homo sapiens
  chr9:136034910-136034940
  hypo
gtggtggctcatgcccgcaatcccggcagg

SEQ ID NO: 163566 - DNA, 306 bp, Homo sapiens
  chr9:136044288-136044594
  hypo
ccagccctccccggacgcccaccctttgggagcctctatgtgttcagccatccagaagctccctaaaccctgtcctcttgggccttttatggaggcttcactgggtaatcggataggcatgactgaagcatggacaactgtgtagaaacatggttggacaaaaagggcatggtctagcattagcgcacaatctagcattggcgcacggtctagcattggcgcacggtctagcactggcgcacggtctagcactggcgcacggtctagcattggcgcacggtctagcattggcgcacggtctagcat

SEQ ID NO: 163567 - DNA, 31 bp, Homo sapiens; identical to SEQ ID NO: 23657
  chr9:136045257-136045288
  hypo

SEQ ID NO: 163568 - DNA, 31 bp, Homo sapiens
  chr9:136120135-136120166
  hypo
gttttgttttgttttatgaggcggagtcttg

SEQ ID NO: 163569 - DNA, 30 bp, Homo sapiens; identical to SEQ ID NO: 46699
  chr9:136137090-136137120
  hypo

SEQ ID NO: 163570 - DNA, 30 bp, Homo sapiens; identical to SEQ ID NO: 46700
  chr9:136149213-136149243
  hypo

SEQ ID NO: 163571 - DNA, 151 bp, Homo sapiens; identical to SEQ ID NO: 78634
  chr9:136369630-136369781
  hypo

SEQ ID NO: 163572 - DNA, 423 bp, Homo sapiens; identical to SEQ ID NO: 23658
  chr9:136372632-136373055
  hypo

SEQ ID NO: 163573 - DNA, 40 bp, Homo sapiens
  chr9:136375447-136375487
  hypo
gtatttcatcggcaacgccacccatgtgactttttttttg

SEQ ID NO: 163574 - DNA, 39 bp, Homo sapiens; identical to SEQ ID NO: 78636
  chr9:136375606-136375645
  hypo

SEQ ID NO: 163575 - DNA, 30 bp, Homo sapiens; identical to SEQ ID NO: 78637
  chr9:136375901-136375931
  hypo

SEQ ID NO: 163576 - DNA, 1138 bp, Homo sapiens; identical to SEQ ID NO: 78638
  chr9:136376181-136377319
  hypo

SEQ ID NO: 163577 - DNA, 314 bp, Homo sapiens; identical to SEQ ID NO: 78639
  chr9:136377538-136377852
  hypo

SEQ ID NO: 163578 - DNA, 367 bp, Homo sapiens
  chr9:136378202-136378569
  hypo
gggtgtcagagcgaccgtatgggggaggggcctagagggccaccctgtccccagcccaggagcggagccagctatctcccagccctggaggcaacagggggtgactctaggacaaataaccgccctctttccatgggcagtggacctgggcaaccactcccaagccggtggcaccgtctggaaacacaaacaggccccagacaggtgtaggtaacttcctgcctgacagatgggcctggaatcgctgggtgccgggggacgcaggttgtgaggtgatgtctgggacctgctgccaccacccccgcagtccttcacagacagcaccgcccatcacgcagcagggaggcccagccgagggagcccggca

SEQ ID NO: 163579 - DNA, 350 bp, Homo sapiens; identical to SEQ ID NO: 23660
  chr9:136380582-136380932
  hypo

SEQ ID NO: 163580 - DNA, 120 bp, Homo sapiens; identical to SEQ ID NO: 23661
  chr9:136381249-136381369
  hypo

SEQ ID NO: 163581 - DNA, 189 bp, Homo sapiens
  chr9:136382128-136382317
  hypo
cgggcagcccatcctcggctcctgtggctggatctgcagcctgagggccttggcagtctcgtggctcttggtgggaaacacagcagtgaattctcttctgggcaattacagttcagcccagttcagacctggccaagaccagcgggaggagcaaccttcaggggcagaaggaggcgagaggcgggtggc

SEQ ID NO: 163582 - DNA, 203 bp, Homo sapiens; identical to SEQ ID NO: 23663
  chr9:136382776-136382979
  hypo

SEQ ID NO: 163583 - DNA, 261 bp, Homo sapiens; identical to SEQ ID NO: 23664
  chr9:136383896-136384157
  hypo

SEQ ID NO: 163584 - DNA, 599 bp, Homo sapiens
  chr9:136385190-136385789
  hypo
agtggggatagagggctgcagcgggactggtttgaggctgggtgtgcggacactggggagccggtccttgtccgcaaggcttgtctgcaggggttgaccactcacccatcagcgagacccacatgctcagggctgtcccgtagacactgaaatactccaggatgtcgtgacgcatgaagcacagcacagacaagccgggtccattgcaggcatggtggagctgccagaaaacccacaggtggtcacagcacaaagaggccagagctggtccccgagccacggcccccagagtgccaggtcacttgctggctgtgagaagtcactttggcgagtcacttaatgactgtgtgcctcagtctccccgtctgaaaaatgggggtactgccgagcactcccgcagagggtcctgtggggattaagtggcacatgccagcgaggtgtttaggggctggggtgtgccaagggttcactcaatgtcacctcagcagaattcgctcatctgcactggcaggactgggcggagactgagtggtcactcaggtgaagcccgcttaggtggggcggtctccgggagggaccctacacggctctccccggac

SEQ ID NO: 163585 - DNA, 30 bp, Homo sapiens; identical to SEQ ID NO: 78646
  chr9:136389876-136389906
  hypo

SEQ ID NO: 163586 - DNA, 30 bp, Homo sapiens; identical to SEQ ID NO: 78647
  chr9:136390125-136390155
  hypo

SEQ ID NO: 163587 - DNA, 175 bp, Homo sapiens
  chr9:136393620-136393795
  hypo
ctgaggcccagggagcggcagcagccctcctctgcccagcagatggcaggccccagtgggctccagcgggctggtcctgggccacgctggggagcagggccgccctgcactccccttccctcacccccacagccgcaggagcgcccctgctttatagaggcgctgaaatgcctgg

SEQ ID NO: 163588 - DNA, 30 bp, Homo sapiens
  chr9:136394066-136394096
  hypo
agcgtgacatggctccgcgtgtgcctctgc

SEQ ID NO: 163589 - DNA, 77 bp, Homo sapiens
  chr9:136395957-136396034
  hypo
ccagctggagagagacggagtcaggatttgaacccaaagagtccggttccaggcactcacgcgtgaggctgctgttg

SEQ ID NO: 163590 - DNA, 335 bp, Homo sapiens; identical to SEQ ID NO: 23667
  chr9:136397021-136397356
  hypo

SEQ ID NO: 163591 - DNA, 30 bp, Homo sapiens
  chr9:136401572-136401602
  hypo
tagcacgcacaccgccgctgggtgtcttgc

SEQ ID NO: 163592 - DNA, 670 bp, Homo sapiens
  chr9:136402171-136402841
  hypo
gtgaaggccccagcacggccagggtaggctgtgtcctgcagaacgcagttgggccctgagctgctccggggaaagtgaggacagttagatgcggccccaggagcttgccaagcccccaggccatcctggaccttaaggtcaaggaggacccgtggcccacggttccttgggagttccccccagcgccacccaggagatctgaacccaagctgccgagtgaccctgcaagggggcccagccagggggctgtgtcttctggtcccgctgacggtgataccctcgggcatggggtgggggcaggctggtcctcctgggcacttgagccctctaccatctgggggtccctctcacccaggacaacagcccaacatccaatagcctggaggggggcaccgacgccacggccttctggtggggggagtggaccaagtggacggcgtgttcccgcagttgcgggggtggggtgacatcccaggagcggcactgcctgcagcagaggtgcgaggttgggcacgtggccctgaggggatggcatgagggcagggtagcgggcaggagagggcggttggctcttcagcctggtggcttctccccctgggagggctctcgggttgggggcagcacaggctgagtccccccatcagcctctgctggacgcggctatggatgg

SEQ ID NO: 163593 - DNA, 30 bp, Homo sapiens; identical to SEQ ID NO: 23669
  chr9:136407493-136407523
  hypo

SEQ ID NO: 163594 - DNA, 30 bp, Homo sapiens; identical to SEQ ID NO: 78652
  chr9:136409649-136409679
  hypo

SEQ ID NO: 163595 - DNA, 30 bp, Homo sapiens; identical to SEQ ID NO: 78653
  chr9:136410355-136410385
  hypo

SEQ ID NO: 163596 - DNA, 217 bp, Homo sapiens
  chr9:136412217-136412434
  hypo
caagaacttcaacatcgcaggcacggtggtcaagtacaggcggcccatggatgtctatgagaccggaatcgagtacatcgtggcacaggggcccaccaaccagggcctgaatgtcatggtacgtgtgccgcaggccttgggggccccaggggccctgggcactgtttccccagaatccagccacaggtgaggtcttccagcccgtgacgcccccagg

SEQ ID NO: 163597 - DNA, 30 bp, Homo sapiens
  chr9:136412787-136412817
  hypo
cccctccctaccccacggtggaggggttta

SEQ ID NO: 163598 - DNA, 30 bp, Homo sapiens; identical to SEQ ID NO: 78654
  chr9:136463740-136463770
  hypo

SEQ ID NO: 163599 - DNA, 30 bp, Homo sapiens; identical to SEQ ID NO: 78655
  chr9:136464286-136464316
  hypo

SEQ ID NO: 163600 - DNA, 42 bp, Homo sapiens; identical to SEQ ID NO: 23670
  chr9:136501757-136501799
  hypo

SEQ ID NO: 163601 - DNA, 148 bp, Homo sapiens
  chr9:136507435-136507583
  hypo
gaagcccaatatccccgaaccggagttgccctcagacgcgtgcaccatggaggtccaagctcccaatatccagatccccagccaggagaccacgtactggtgctacattaaggagcttccaaagggcttctctcggcaccacattatc

SEQ ID NO: 163602 - DNA, 199 bp, Homo sapiens
  chr9:136508530-136508729
  hypo
acagtacgagcccatcgtcaccaagggcaatgaggcccttgtccaccacatggaagtcttccagtgcgcccccgagatggacagcgtcccccacttcagcgggccctgcgactccaagatgaaacccgaccgcctcaactactgccgccacgtgctggccgcctgggccctgggtgccaaggtgcgtgccctgcgaccc

SEQ ID NO: 163603 - DNA, 496 bp, Homo sapiens; identical to SEQ ID NO: 78657
  chr9:136537809-136538305
  hypo

SEQ ID NO: 163604 - DNA, 30 bp, Homo sapiens
  chr9:136546452-136546482
  hypo
agaggtcgagacactcggggccttgcccca

SEQ ID NO: 163605 - DNA, 511 bp, Homo sapiens
  chr9:136546764-136547275
  hypo
tagtgagggagaggacgagaagcacagcactgggaacggatcgttaagtttagtaaaacactagtgcttgactgagagtcccagtggccctacgtgagctgacggtgctgggaggtacaccatggataactgccacggccggtgcgcggcgtgtttcccagcagctgggcctccttatgcgtgtagcacctccccgccgcctatttcctgtgtccccacgatcgcgcacgccagttgacgctcatgtcccacctcccctgtgtttcccctcccccccatcccacacgcagggaccccagcctagaaagcattgtgcttctctcccactccgcctgagacctagggtagcactgggcaagcgaggggcgcagaaatacggaaggacagagaagaacacaccacagagtgacccgggaccatgaaccgcacatacctccgacctggtgggcccagctctaccctctctcagaccaacagtcagcatctactgggaggacggtgttcaagggaa

SEQ ID NO: 163606 - DNA, 211 bp, Homo sapiens
  chr9:136549273-136549484
  hypo
cgatcctgcccccagcggacccttggccatgtctgaacacacttgtggctgtcacgacggtgggtgccactggcacctagtgggcggcagccagggaggcggccacacacctgtgtcacacaggagggccctcacagcagagaggatctcctccaaacgtcagtagtgctgaggttgggagaccctgtaacagagccgcccgcactatggc

SEQ ID NO: 163607 - DNA, 30 bp, Homo sapiens
  chr9:136553102-136553132
  hypo
gctgggcgcaccggccgcccccgggccgca

SEQ ID NO: 163608 - DNA, 165 bp, Homo sapiens
  chr9:136553359-136553524
  hypo
actgcatgattccaccgcatcccagtccctttcccggcagctgcggccagcaccctccactcttcatcatgcacgcggaagctgtctctgtcccctaccctcccccgaccctctcagcacaccccatccactgtcgggtgctatgagcctcgcccagtccatggg

SEQ ID NO: 163609 - DNA, 30 bp, Homo sapiens
  chr9:136555601-136555631
  hypo
agttgtgctgggccacggccccgcccatgg

SEQ ID NO: 163610 - DNA, 359 bp, Homo sapiens
  chr9:136557801-136558160
  hypo
tccctgaagccccaccggcctccttcacctcctcccgaccctggctacctggtgcttccacacagtgcaggctcacgtgatgactgttgagggaacgagcgaaggaacgagctcatggatccatgaggcacgagcgctgtggctcagcccatggctccctcagcctccacgtcgccaacggcaggagggaaggggtgggcgagctctgcgcaccccataggacccctcactcacgctctcagcctcatctccgccaccagcctccagaccgcagggctcacctcactactccctgcttttggcagaaccgcagaggcccaggagcccctgccagcccccagccccgaagacccgctggg

SEQ ID NO: 163611 - DNA, 30 bp, Homo sapiens; identical to SEQ ID NO: 78659
  chr9:136558393-136558423
  hypo

SEQ ID NO: 163612 - DNA, 31 bp, Homo sapiens; identical to SEQ ID NO: 23671
  chr9:136568774-136568805
  hypo

SEQ ID NO: 163613 - DNA, 30 bp, Homo sapiens
  chr9:136569649-136569679
  hypo
tgcctgccctcctacggacataaaccaaca

SEQ ID NO: 163614 - DNA, 242 bp, Homo sapiens
  chr9:136569904-136570146
  hypo
caggtcggcagggctcggcttcccgtgtgcagaataactgatcacgacagtggaaccacctggggaggcggggcacacggaggggcaaggacggggcacgtggaggggcaagggggttgtcagggcagggcctcccagcagcacagcccagcaggcactactcaccggagctgggcctcggggatgaaaccatcccggtcgctcccagccatgccgctcctggaacacgcagccttgtccaa

SEQ ID NO: 163615 - DNA, 30 bp, Homo sapiens
  chr9:136570959-136570989
  hypo
ggtcctaatcccatacggctggagccctta

SEQ ID NO: 163616 - DNA, 30 bp, Homo sapiens; identical to SEQ ID NO: 78661
  chr9:136573503-136573533
  hypo

SEQ ID NO: 163617 - DNA, 430 bp, Homo sapiens
  chr9:136575501-136575931
  hypo
aagccccctggtgcccggtcagccctgggaccctcacgcgcagcccggagcccagacaggccccgcacccagggacggctcaggctgcctggtctcccgggacgccccctcgctgtgcgtgtctcccatgtgtatgatgaaggacgacccacgcgtgttctggctctggcctgaggggagcaaccaggagtctctgagcaggggagagctccgttctggcgccgacgctctctgttcactttcttttctgggtctttcaacgactttctcaggcacctccttcctctcctcgctctgtctctctccttcagggtctgtgtcttgtctcagtccccgggcgcaggcccgaggtggcagaacattgcattagtgctacagcccttgggggccggtggctggtcctgctggtggcggccgtccactctggcac

SEQ ID NO: 163618 - DNA, 324 bp, Homo sapiens
  chr9:136593119-136593443
  hypo
gagcgtgacccctggcggccacctaggggaggaggctctccccagggacccggagccagggaggaggcctcagcactcagctccgacacccaccgtgtgactactcttagtccctaacccggcacatggcaccagccacctgcagtgagaggctcattctatgaacaagaggtcttgtgtccagtggggcgtggcttgcccagcgcacaggagtcagaggcagcagcgcactgggacccaggttccggccccatttcgccacccgcttcactaccctggtctacgaagcagccaagcctggtacctccccggtgaccataggga

SEQ ID NO: 163619 - DNA, 30 bp, Homo sapiens
  chr9:136594887-136594917
  hypo
tgaatcccctcgatgcgctcggtgacgaca

SEQ ID NO: 163620 - DNA, 106 bp, Homo sapiens
  chr9:136607052-136607158
  hypo
ggtggatggaatccgcggtggaatccatggaaacatggtggatcccggcggctgagcctatgccaggcaggtgccaggagtgcttcaaaatcatctcggggccggg

SEQ ID NO: 163621 - DNA, 16 bp, Homo sapiens
  chr9:136621517-136621533
  hypo
acgaaaacaacaataa

SEQ ID NO: 163622 - DNA, 104 bp, Homo sapiens
  chr9:136621772-136621876
  hypo
tggaatgctcagatacacagacgaggctgcacaggcccattcaagaaccagagcgtccagaagcaattcacatgctgtaaaccggcttttcctttcttcccttt

SEQ ID NO: 163623 - DNA, 75 bp, Homo sapiens; identical to SEQ ID NO: 78663
  chr9:136641168-136641243
  hypo

SEQ ID NO: 163624 - DNA, 31 bp, Homo sapiens; identical to SEQ ID NO: 78664
  chr9:136642035-136642066
  hypo

SEQ ID NO: 163625 - DNA, 197 bp, Homo sapiens; identical to SEQ ID NO: 78665
  chr9:136645035-136645232
  hypo

SEQ ID NO: 163626 - DNA, 31 bp, Homo sapiens; identical to SEQ ID NO: 78666
  chr9:136646294-136646325
  hypo

SEQ ID NO: 163627 - DNA, 173 bp, Homo sapiens; identical to SEQ ID NO: 23673
  chr9:136648155-136648328
  hypo

SEQ ID NO: 163628 - DNA, 136 bp, Homo sapiens
  chr9:136649605-136649741
  hypo
tcctgggaaccagctgggctccggacccaggctgtgcagaatccgagagggcctggactccaagcctggctctgcccgcaacatggggcagactcagggcccagactccctgctcgtagaaggcaggtcagagaag

SEQ ID NO: 163629 - DNA, 209 bp, Homo sapiens
  chr9:136651135-136651344
  hypo
ctgtgtgaacacatgttctcacgtgtgtacctgctctcttgcccatgctgtacgtgcacacgtgcctctgtatgcatgcatgtatagctgtgtgcccataccctcacgtgagaatacatatgcgcttgtgccttcacctctgcatgcatactagtgtgctcctgcgtgcatgggtgtgcatctgtgcctgcacgcgtgtctatgcgtgt

SEQ ID NO: 163630 - DNA, 289 bp, Homo sapiens; identical to SEQ ID NO: 23675
  chr9:136655638-136655927
  hypo

SEQ ID NO: 163631 - DNA, 31 bp, Homo sapiens; identical to SEQ ID NO: 23676
  chr9:136656439-136656470
  hypo

SEQ ID NO: 163632 - DNA, 164 bp, Homo sapiens; identical to SEQ ID NO: 23677
  chr9:136664523-136664687
  hypo

SEQ ID NO: 163633 - DNA, 112 bp, Homo sapiens
  chr9:136665005-136665117
  hypo
caagacactgactcccggcggccgcctgcacctgccccgctccggatcggtgttttctccaccctgagagaatggtcagagccatgcgcagaagacacgccacacacactgg

SEQ ID NO: 163634 - DNA, 30 bp, Homo sapiens
  chr9:136665591-136665621
  hypo
ggccacgctcgggcccgagggacaccacac

SEQ ID NO: 163635 - DNA, 226 bp, Homo sapiens
  chr9:136667520-136667746
  hypo
agcctccccctcccccgccccactccggctgactcctcccctggagaaagttgttcaggcgcaaatgatttctgtcctgatagaggacatggccccaaaggtctcagtgtggtcaccttgcaaggcacggcccgccgtgtccagcatcctgcccgacctcccctctctgctgacaaggtatgtggttcccttgctcgtgagttgacagacccgtggcccgagctcc

SEQ ID NO: 163636 - DNA, 73 bp, Homo sapiens
  chr9:136669073-136669146
  hypo
gggggacacgtcctccgctgtgcagccctcacgggtctcctgggctctccagcaacgccgcagctccccccgg

SEQ ID NO: 163637 - DNA, 345 bp, Homo sapiens
  chr9:136669405-136669750
  hypo
tccccaaacagaccccgactgacggatctcgccacacgcctcgctgccagggacggagctgcccgtccacagagctcttgggctgggcctgtgactggacgtgctgcccgcactgcagtggcgctccaaggcagagatgcccgctgttcctcagcgggaaccacccatgcaaggtcctgctggtgggacagggccaggggtgtcgccgggcagcctgactgtggagggaggctcctgggagaggacaggttatccaccctgtcactctaccacacagccagccattcctcctccagggcttcagcctttgacggacctcgaagcaaaccacgcctcatccgtggc

SEQ ID NO: 163638 - DNA, 154 bp, Homo sapiens
  chr9:136670533-136670687
  hypo
ctgatggggctctctcgagacttccgtggctggaaacgccatctccccagcctctgacagcctgggcattgtctaacccccagaaacgccatctccccagcctccgacagcctgggcattgtctaacccccagaaacgccgcctccccaacctc

SEQ ID NO: 163639 - DNA, 497 bp, Homo sapiens
  chr9:136671073-136671570
  hypo
ggggtccagagggggcggcccctgcctcgggacaccccaagagtcccacttacacaagagttccacttgtgtaaactctcccgcagacagggaggggccaaggagccccaggagccggcagccactcacctttccttgaaatcgaggaagaccttggccagcgtgctgccccccaccatcacggacacgtcgatggccctcaggaagctgtgatgcaccttgatcaggtcctgggttgaaaaccagccgtgagtgcctggccaggcccacccaaggctagacgggagcgccgcccttaaagtgcccttgttgttctgtagttccctcaaggaggggaggggcccgggtgctgggcctgcaccccacatctctgtgcatgccagggtgtgattcaggtagaaggttctatggcgatggtgcaacagaagagccagtacgtgtgggagggaagccgcccacagcccgcaccagcccatcagacacgcagcggccgactc

SEQ ID NO: 163640 - DNA, 472 bp, Homo sapiens
  chr9:136671900-136672372
  hypo
ggagcagcatgtccccggaggaagcccacccatgcacggctgccggagcctggtgccagcgccctgctctgctaaccacgtctaggtgactctttgcatggggaactgcctttctatgactgagttcagacacccgcagggcaggcgagggggtccgctcaaaggggtggagggacacgtttctctctggccgctgacaaaaacttcatttacattctcagcgtcatccgtgcctccagccacgcacgtcagtgctgccctcacccgcagacaagcggagcccagaaacctgctaccctggctcctaaatccaaagaccctggagagagcggtgggggctcctccttccggccagcacgagccaccacggagccacaggggtgcagctctccaaggccctgaggacagcaggacatgtgtggccagtgccgagttagggccccgagcctggcatgagcgatgggggccggga

SEQ ID NO: 163641 - DNA, 31 bp, Homo sapiens; identical to SEQ ID NO: 78674
  chr9:136672779-136672810
  hypo

SEQ ID NO: 163642 - DNA, 31 bp, Homo sapiens; identical to SEQ ID NO: 23679
  chr9:136674468-136674499
  hypo

SEQ ID NO: 163643 - DNA, 31 bp, Homo sapiens; identical to SEQ ID NO: 23680
  chr9:136675284-136675315
  hypo

SEQ ID NO: 163644 - DNA, 180 bp, Homo sapiens
  chr9:136676091-136676271
  hypo
gctcgccggccgcctcgggacctctcaggccagctccggggaggcgaggggagcccccagcagcagggccatggctcagtcttccagccctaacagctacccagccaggctccccgggaaggcaaactggaggccctgctgcctccacaaagggccaccatccctcgggggagacccccc

SEQ ID NO: 163645 - DNA, 30 bp, Homo sapiens
  chr9:136676714-136676744
  hypo
gtccgagagattattcgccagtgcctgctt

SEQ ID NO: 163646 - DNA, 301 bp, Homo sapiens; identical to SEQ ID NO: 78678
  chr9:136677204-136677505
  hypo

SEQ ID NO: 163647 - DNA, 963 bp, Homo sapiens; identical to SEQ ID NO: 78679
  chr9:136680292-136681255
  hypo

SEQ ID NO: 163648 - DNA, 386 bp, Homo sapiens
  chr9:136686195-136686581
  hypo
tggctctggaatctccgtggcacaattacatcactctcctgtggctctgtggcaggctgctgtgtcacacactgatccttttcacatcagtgtctcggctagaaagaagcgtgtggaggctccgtgtcatcagaggctatacttcgtggaaaaactccacacccatgccacaccagtgtctggtccacagagcaggccagtcctcatcacttcggaacaggcgggccgcagtgggtctcttgttggcaggaacttgactgtcgctcctgagcccctggaggggaggcagcgagggaaactagggttgtctttgtagcccttcctgtttctagctctgtaactgcaaccaggataacctaagcttcggtttcccatctgcaacagga

SEQ ID NO: 163649 - DNA, 511 bp, Homo sapiens
  chr9:136689992-136690503
  hypo
agagggctcagggcccggcctgcagcgctcagggagatgcaactggaagcgtcttgacagagggaccctccggggacgctggcttcattcactccattctgccagtccccacagaggcctggcctcacagagtcacaccgaggagcaagagacccttggcagcatttgagggagccacatgcggccaaggagaagcccaggtggggccgagcacgcagtcttaaagggtctgttgtgcaaatgaggcaccacggccagtggggaggcagctccaaggagacaatgccacggtccagccaggtgtccttgtcgatgaaggacctggggtgggggggcgggggacaaaggcctttctgtcccggccatcacccgccttaagaaacgccccgtcttccgtctctccagtctcccctccatccccacacgagcctcgggccaccagggagggacggggggatgcctgtcaacacctcctctggggaagggggcttcattccggcctccttcagac

SEQ ID NO: 163650 - DNA, 116 bp, Homo sapiens; identical to SEQ ID NO: 23684
  chr9:136691770-136691886
  hypo

SEQ ID NO: 163651 - DNA, 237 bp, Homo sapiens
  chr9:136693623-136693860
  hypo
ggcatcgccggcatgcggccaccttcctggacacccagcagtgctgccccctgcagccagcacaggctgacccaaggtgtccttctaccgtgcggagaaacactgtcactgcagtgccaccaagttggggtcacagcaggcatttcgacgtgggccctgtgccttcctgagggagaggtgatcctccctgtgagtccccggggaacttccacaattctgattcgttacaaacaccaa

SEQ ID NO: 163652 - DNA, 76 bp, Homo sapiens; identical to SEQ ID NO: 78682
  chr9:136694903-136694979
  hypo

SEQ ID NO: 163653 - DNA, 31 bp, Homo sapiens; identical to SEQ ID NO: 23686
  chr9:136696894-136696925
  hypo

SEQ ID NO: 163654 - DNA, 120 bp, Homo sapiens; identical to SEQ ID NO: 78684
  chr9:136698780-136698900
  hypo

SEQ ID NO: 163655 - DNA, 175 bp, Homo sapiens; identical to SEQ ID NO: 78685
  chr9:136699683-136699858
  hypo

SEQ ID NO: 163656 - DNA, 309 bp, Homo sapiens; identical to SEQ ID NO: 78686
  chr9:136714184-136714493
  hypo

SEQ ID NO: 163657 - DNA, 240 bp, Homo sapiens; identical to SEQ ID NO: 78687
  chr9:136718545-136718785
  hypo

SEQ ID NO: 163658 - DNA, 31 bp, Homo sapiens; identical to SEQ ID NO: 78688
  chr9:136719371-136719402
  hypo

SEQ ID NO: 163659 - DNA, 435 bp, Homo sapiens; identical to SEQ ID NO: 78689
  chr9:136722068-136722503
  hypo

SEQ ID NO: 163660 - DNA, 180 bp, Homo sapiens; identical to SEQ ID NO: 78690
  chr9:136723289-136723469
  hypo

SEQ ID NO: 163661 - DNA, 31 bp, Homo sapiens; identical to SEQ ID NO: 78691
  chr9:136723744-136723775
  hypo

SEQ ID NO: 163662 - DNA, 22 bp, Homo sapiens
  chr9:136725133-136725155
  hypo
tctatccatggccgggcgaggt

SEQ ID NO: 163663 - DNA, 81 bp, Homo sapiens; identical to SEQ ID NO: 78693
  chr9:136725454-136725535
  hypo

SEQ ID NO: 163664 - DNA, 30 bp, Homo sapiens; identical to SEQ ID NO: 78694
  chr9:136727117-136727147
  hypo

SEQ ID NO: 163665 - DNA, 156 bp, Homo sapiens; identical to SEQ ID NO: 78695
  chr9:136728457-136728613
  hypo

SEQ ID NO: 163666 - DNA, 66 bp, Homo sapiens; identical to SEQ ID NO: 78696
  chr9:136729691-136729757
  hypo

SEQ ID NO: 163667 - DNA, 48 bp, Homo sapiens; identical to SEQ ID NO: 78697
  chr9:136729988-136730036
  hypo

SEQ ID NO: 163668 - DNA, 36 bp, Homo sapiens; identical to SEQ ID NO: 23694
  chr9:136731600-136731636
  hypo

SEQ ID NO: 163669 - DNA, 173 bp, Homo sapiens; identical to SEQ ID NO: 78699
  chr9:136732401-136732574
  hypo

SEQ ID NO: 163670 - DNA, 456 bp, Homo sapiens; identical to SEQ ID NO: 78700
  chr9:136733333-136733789
  hypo

SEQ ID NO: 163671 - DNA, 336 bp, Homo sapiens; identical to SEQ ID NO: 78701
  chr9:136737402-136737738
  hypo

SEQ ID NO: 163672 - DNA, 115 bp, Homo sapiens; identical to SEQ ID NO: 78702
  chr9:136739159-136739274
  hypo

SEQ ID NO: 163673 - DNA, 101 bp, Homo sapiens; identical to SEQ ID NO: 23697
  chr9:136743437-136743538
  hypo

SEQ ID NO: 163674 - DNA, 48 bp, Homo sapiens; identical to SEQ ID NO: 78704
  chr9:136743949-136743997
  hypo

SEQ ID NO: 163675 - DNA, 254 bp, Homo sapiens
  chr9:136746361-136746615
  hypo
gagatgcggccttcccgcaggcatgatgctatctgcagatagcggagcgcagacgtgggacaaggccctctggaatgtgtctggacttgccccacaaggttcctcccagtgagacggggcttgtgaacaggactgagaaggaggagcgcccagctctcctgcatcccatcaggggcctgggtgacaggaggggaggccctgcatgaaggctgcaaaggagtctccaaggcaagctctgacggattcccaggcag

SEQ ID NO: 163676 - DNA, 172 bp, Homo sapiens; identical to SEQ ID NO: 23699
  chr9:136751546-136751718
  hypo

SEQ ID NO: 163677 - DNA, 76 bp, Homo sapiens
  chr9:136754060-136754136
  hypo
cgcaaggagacgacacgaacagcatggaaatgaagcgcccctgccaggggggcagggacaccgcgtccccgtccct

SEQ ID NO: 163678 - DNA, 30 bp, Homo sapiens
  chr9:136754777-136754807
  hypo
tgcttcctcagcgaccgagtgcgtcatgaa

SEQ ID NO: 163679 - DNA, 364 bp, Homo sapiens
  chr9:136758750-136759114
  hypo
ctgcagaacaggggcgagcacccagcccagccaaggccaggaggagcccaagccttcctccgtcgccacacggcagctttcattgcctgaacctcggagggtggcgggacggtgattccacccacagccgcgatgaccgaggcccagcatcgcagcaagtggcagagaagccagagtccaactaccgcccctgaaacccaccgcacctgacccacacagcagcggcgagagtcgggcgcccacgtgtaccacacacacagttgaatgctttactggacctcacggatcctcacagacctctggaaagttctgtcgtaatctccaccttacatctgcagaaactgaggctcggggagaaggaaga

SEQ ID NO: 163680 - DNA, 78 bp, Homo sapiens; identical to SEQ ID NO: 78707
  chr9:136762225-136762303
  hypo

SEQ ID NO: 163681 - DNA, 60 bp, Homo sapiens; identical to SEQ ID NO: 78708
  chr9:136763772-136763832
  hypo

SEQ ID NO: 163682 - DNA, 304 bp, Homo sapiens; identical to SEQ ID NO: 78709
  chr9:136766706-136767010
  hypo

SEQ ID NO: 163683 - DNA, 369 bp, Homo sapiens; identical to SEQ ID NO: 78710
  chr9:136771808-136772177
  hypo

SEQ ID NO: 163684 - DNA, 127 bp, Homo sapiens; identical to SEQ ID NO: 78711
  chr9:136773824-136773951
  hypo

SEQ ID NO: 163685 - DNA, 31 bp, Homo sapiens; identical to SEQ ID NO: 78712
  chr9:136777464-136777495
  hypo

SEQ ID NO: 163686 - DNA, 58 bp, Homo sapiens; identical to SEQ ID NO: 23704
  chr9:136785102-136785160
  hypo

SEQ ID NO: 163687 - DNA, 40 bp, Homo sapiens; identical to SEQ ID NO: 78714
  chr9:136786009-136786049
  hypo

SEQ ID NO: 163688 - DNA, 223 bp, Homo sapiens
  chr9:136795929-136796152
  hypo
gtggtgtgcgtccagcgtcgccagctggcacttcagaatctgtaagcagccatggagccacccccagacagtgctgagagccagttttaactgcctcagaagtctctgagcctcccaaaatgctttaatgaataataaataggagaattaagcccgtttattggaaggtgcgcgctgctctttaactcgagcaagagaagcggcctagcgatttcctctggga

SEQ ID NO: 163689 - DNA, 162 bp, Homo sapiens; identical to SEQ ID NO: 78715
  chr9:136802013-136802175
  hypo

SEQ ID NO: 163690 - DNA, 31 bp, Homo sapiens; identical to SEQ ID NO: 78716
  chr9:136808205-136808236
  hypo

SEQ ID NO: 163691 - DNA, 26 bp, Homo sapiens
  chr9:136817742-136817768
  hypo
cctgaggctctcgagataagataatc

SEQ ID NO: 163692 - DNA, 139 bp, Homo sapiens
  chr9:136834266-136834405
  hypo
ttccaccgtgcccgccgggcctgcgaggacgagagctggattccaccgtgcccgccgggcctgcgaggacgagcctctgcacctgcttccctcctgccggatgaactgcggcttctcacggctgcgctgctggcatggt

SEQ ID NO: 163693 - DNA, 304 bp, Homo sapiens; identical to SEQ ID NO: 23705
  chr9:136835361-136835665
  hypo

SEQ ID NO: 163694 - DNA, 282 bp, Homo sapiens
  chr9:136836265-136836547
  hypo
aagtcaggcagagtccgtgtgccctctgaccctcagtctccaaagcttgcagatggaacagtcgtaactgctgctgtgaggcctgtcgggggcagggaaagccctctgggggtcagacccacttggcccctcggtgtttaactgatcctgatcgtcaccatctgggtcgccacggcagcccaggggcagccgcaagcaggcaccgtgggaccggtgactccactgtgccccaggaacccaggagggggccacatgttctacgccaatgactctctagcctag

SEQ ID NO: 163695 - DNA, 30 bp, Homo sapiens; identical to SEQ ID NO: 78720
  chr9:136842308-136842338
  hypo

SEQ ID NO: 163696 - DNA, 31 bp, Homo sapiens; identical to SEQ ID NO: 23706
  chr9:136852076-136852107
  hypo

SEQ ID NO: 163697 - DNA, 197 bp, Homo sapiens; identical to SEQ ID NO: 78722
  chr9:136852628-136852825
  hypo

SEQ ID NO: 163698 - DNA, 31 bp, Homo sapiens; identical to SEQ ID NO: 46707
  chr9:136856910-136856941
  hypo

SEQ ID NO: 163699 - DNA, 30 bp, Homo sapiens
  chr9:136898124-136898154
  hypo
ccccaagggctccacgctccgggctggggc

SEQ ID NO: 163700 - DNA, 192 bp, Homo sapiens; identical to SEQ ID NO: 23707
  chr9:136905411-136905603
  hypo

SEQ ID NO: 163701 - DNA, 31 bp, Homo sapiens; identical to SEQ ID NO: 78725
  chr9:136911190-136911221
  hypo

SEQ ID NO: 163702 - DNA, 30 bp, Homo sapiens
  chr9:136911478-136911508
  hypo
gggacctcgagggacgacacacgcaagggc

SEQ ID NO: 163703 - DNA, 31 bp, Homo sapiens
  chr9:136915348-136915379
  hypo
gcctgagctcccagggcgcagagagaaacac

SEQ ID NO: 163704 - DNA, 35 bp, Homo sapiens
  chr9:136915610-136915645
  hypo
ggggtggcagcgatgacgggcgtctgggagacggt

SEQ ID NO: 163705 - DNA, 30 bp, Homo sapiens; identical to SEQ ID NO: 78726
  chr9:136916158-136916188
  hypo

SEQ ID NO: 163706 - DNA, 30 bp, Homo sapiens; identical to SEQ ID NO: 78727
  chr9:136919129-136919159
  hypo

SEQ ID NO: 163707 - DNA, 231 bp, Homo sapiens; identical to SEQ ID NO: 78728
  chr9:136920305-136920536
  hypo

SEQ ID NO: 163708 - DNA, 30 bp, Homo sapiens; identical to SEQ ID NO: 23708
  chr9:136923094-136923124
  hypo

SEQ ID NO: 163709 - DNA, 30 bp, Homo sapiens
  chr9:136930140-136930170
  hypo
ggcccaaggcagacccgcaagttccaaaac

SEQ ID NO: 163710 - DNA, 85 bp, Homo sapiens; identical to SEQ ID NO: 78730
  chr9:136993425-136993510
  hypo

SEQ ID NO: 163711 - DNA, 23 bp, Homo sapiens
  chr9:136999214-136999237
  hypo
atcttttttatttttttgagacg

SEQ ID NO: 163712 - DNA, 142 bp, Homo sapiens
  chr9:136999416-136999558
  hypo
gcccggccggattttctcatttttactagaaggttctatctcctgggggtggggtgaggtggtgagaccaattcacctggaagtggaagctgggaacttggtttgagttctgagggttctggggtctcgccccttatcttgc

SEQ ID NO: 163713 - DNA, 21 bp, Homo sapiens
  chr9:137002516-137002537
  hypo
agccttggcccggcgcggtgg

SEQ ID NO: 163714 - DNA, 30 bp, Homo sapiens
  chr9:137012388-137012418
  hypo
gcaggcagcatgccccggggacctgttcga

SEQ ID NO: 163715 - DNA, 439 bp, Homo sapiens
  chr9:137017037-137017476
  hypo
actcccagcagcccgcgtgagatcataacttgtctgcttacgcttttttgttctctttgcttcgaagtcgcatctgggacaccgcctcaggccagtgcctgaagacgctcatcggtgagtgtggctctgtgtgggggctgggtctgtggggagggcctcccctgctgggttcactgcccctgttcttcaccagctcctcctccctcctctgccctgggtccgcccctgcaggaggaaccttcctccgtgtccgaccgttccgccagctccccctgaccgcccgctggctctgttgctccttctggtgcagttttcctgccatggcctttctcttgggccagcctggggctcctccacctgtgctgtcggcctcactccggctgctcactggagtcctctgggcagccccattgcctcctggcttcgggcccctgctgtc

SEQ ID NO: 163716 - DNA, 30 bp, Homo sapiens
  chr9:137021123-137021153
  hypo
tggttgacaccttccgagggcgctgggacc

SEQ ID NO: 163717 - DNA, 30 bp, Homo sapiens
  chr9:137022959-137022989
  hypo
gtccccgacccaggcgcagggatggctctg

SEQ ID NO: 163718 - DNA, 220 bp, Homo sapiens; identical to SEQ ID NO: 118395
  chr9:137273877-137274097
  hypo

SEQ ID NO: 163719 - DNA, 45 bp, Homo sapiens
  chr9:137280522-137280567
  hypo
ggccgccattctgggcgcatcgggctctcccggcccctttccctg

SEQ ID NO: 163720 - DNA, 191 bp, Homo sapiens
  chr9:137280947-137281138
  hypo
catccgccacctggccggtcctgtcgtggacgccctcagctcgctcccgtcccctgcccctctggatggcacagactgcacgttgttgccatttcacggaacccgttttcccggatttgtcaggaggggagagaatggtggaaatgcagttttgctgggttccctgcacacgtgggcgctggctttggtca

SEQ ID NO: 163721 - DNA, 218 bp, Homo sapiens
  chr9:137281712-137281930
  hypo
tgctagctgcagccccgtctcaggttcttggggctgggcaccgaggagcagagaagctgcctgccacctgttcaccctcgcatctgcaggccagcggctcgtcccctcctgctgccacagtaccctgatatgtgccgattggtgggattgggaggggacacagcgaggccttgggtcagagccttgatgaggatgggggtggccgtcctgggggcagc

SEQ ID NO: 163722 - DNA, 183 bp, Homo sapiens
  chr9:137282422-137282605
  hypo
gcggggcaggagggacgtgctgaggctgagctcggaagaggcaactctgggtgcagttgagcctctgggctggtgtcgttgagctccgccgcagccctgggagtggcagaggcagggagggcgcccatgttggggttgtgatgggggaagtcctgctcagcgggctgacgtcccgttcttggt

SEQ ID NO: 163723 - DNA, 97 bp, Homo sapiens
  chr9:137282868-137282965
  hypo
tccaccgcgtggccccggtggccatgccctgcctattctaagcaccggtgcccccatctgcaaatggtgctgctcagcgggccgtgggaagactggg

SEQ ID NO: 163724 - DNA, 108 bp, Homo sapiens; identical to SEQ ID NO: 23709
  chr9:137287804-137287912
  hypo

SEQ ID NO: 163725 - DNA, 49 bp, Homo sapiens; identical to SEQ ID NO: 78734
  chr9:137293294-137293343
  hypo

SEQ ID NO: 163726 - DNA, 83 bp, Homo sapiens; identical to SEQ ID NO: 78735
  chr9:137314809-137314892
  hypo

SEQ ID NO: 163727 - DNA, 30 bp, Homo sapiens
  chr9:137323633-137323663
  hypo
catctcagcggccctcgggccacgccgggc

SEQ ID NO: 163728 - DNA, 30 bp, Homo sapiens
  chr9:137324097-137324127
  hypo
gccgtctgggctccgcggttcatagtgttc

SEQ ID NO: 163729 - DNA, 30 bp, Homo sapiens
  chr9:137324388-137324418
  hypo
cagcctctgggttctcggcttgaaaagcct

SEQ ID NO: 163730 - DNA, 35 bp, Homo sapiens; identical to SEQ ID NO: 23710
  chr9:137330714-137330749
  hypo

SEQ ID NO: 163731 - DNA, 61 bp, Homo sapiens; identical to SEQ ID NO: 78737
  chr9:137352255-137352316
  hypo

SEQ ID NO: 163732 - DNA, 251 bp, Homo sapiens
  chr9:137360363-137360614
  hypo
ctagggccctgcaggcggaggctgggacctctgcacccacctcaaaggcctgtccatttgcagggcgggactgcccacgaggctgggcctgatccagctccagacaccaaccccatggaatcccagttccacctggggcagcctgtgatgagcaggtcacctcacctctccaagccttggttttatgtctgtaaagtagaggcaatgttatccctcgctgcacagggttgatgcaacggggcaagaaataa

SEQ ID NO: 163733 - DNA, 94 bp, Homo sapiens
  chr9:137387910-137388004
  hypo
catgcatccgagcttcgctcctttctgtggttgaatcacactccactgtgcggatgggccggttttgtttctccatcaccgttgctggaccttt

SEQ ID NO: 163734 - DNA, 154 bp, Homo sapiens
  chr9:137433015-137433169
  hypo
gaggaaaaggcccctcgtctggaatccacggagcccctgggcaatcgtgtattaatgatccttttcgggatgctgggatctgcctgcggcatcctcctgggacagcgacggtctcaggacacagcagagtcatcagatccgcctggtggttaca

SEQ ID NO: 163735 - DNA, 30 bp, Homo sapiens; identical to SEQ ID NO: 78739
  chr9:137433706-137433736
  hypo

SEQ ID NO: 163736 - DNA, 157 bp, Homo sapiens
  chr9:137439056-137439213
  hypo
gggtgcagcacagggcggagggaggagttgagtggtgacgcggtcgtgaactcgggcgtcagcccgtcctgtggacggctctggagctgggattccctttggagttgtcctgcgttgaggtaagcgggctgagcctccggaccgactcccatgcggt

SEQ ID NO: 163737 - DNA, 30 bp, Homo sapiens
  chr9:137450190-137450220
  hypo
gagagacaggccccccgcacagaagagctc

SEQ ID NO: 163738 - DNA, 30 bp, Homo sapiens
  chr9:137459330-137459360
  hypo
aatgaaataagaaatcgatcgattgcccta

SEQ ID NO: 163739 - DNA, 141 bp, Homo sapiens
  chr9:137474606-137474747
  hypo
gatcaagatcccgctcggcccacgaaggcctgagctcttaaccagcacgcgtccatgccggtcaaactgatcttcacaggctgttggtaattcaatactgtcaacgcatctttaagaattccttggccgggtgcggtggct

SEQ ID NO: 163740 - DNA, 30 bp, Homo sapiens; identical to SEQ ID NO: 23711
  chr9:137485433-137485463
  hypo

SEQ ID NO: 163741 - DNA, 30 bp, Homo sapiens; identical to SEQ ID NO: 23712
  chr9:137485708-137485738
  hypo

SEQ ID NO: 163742 - DNA, 100 bp, Homo sapiens
  chr9:137497207-137497307
  hypo
ccatctcaaaaataataataatgataatcattccaccttccgcacacactggggcagggactgggctgcaaggctcctccggcaccgcccctgagacatt

SEQ ID NO: 163743 - DNA, 265 bp, Homo sapiens
  chr9:137515856-137516121
  hypo
ggtcccccaaggttccggacagatgccatccgacgtccaacagaactctgcaccaatggaaacatcctatatgtgggcggggtgattggtaaccactacgcacatgtggccattgacacttgaaatgcggctcgtgtgacagaaaaactgaatttaaatgttgcttaattgtaatgacttttaagtgaatatttaagtaaccacgtctggccaccggctatcacatcgcacagcgcagttgcataacggccgagctggcaaagcc

SEQ ID NO: 163744 - DNA, 30 bp, Homo sapiens
  chr9:137519899-137519929
  hypo
ttccttggcgcgaggcgtgggttttcctaa

SEQ ID NO: 163745 - DNA, 30 bp, Homo sapiens; identical to SEQ ID NO: 78742
  chr9:137542329-137542359
  hypo

SEQ ID NO: 163746 - DNA, 166 bp, Homo sapiens
  chr9:137542647-137542813
  hypo
ctctgagggtgctcccgtcagcacctgtgatcctcaaacccgcccttcgtgccaggtgggatcggcccattctgcagatgtgccagtctagctccttgagtccagctggcacaaggggatgaaaaccaccctccacgtcccagtggtcacacggcctgcatgttgg

SEQ ID NO: 163747 - DNA, 134 bp, Homo sapiens
  chr9:137575892-137576026
  hypo
agcggacttctgcagcgtttctgttgttggtggagaagcgttctttcatgaggggccccacttccaaggggaggggctgctgagcctgagagatgctctccagcagggcaggctgtgaccgggccgaagttgcc

SEQ ID NO: 163748 - DNA, 133 bp, Homo sapiens
  chr9:137580162-137580295
  hypo
cttgctcccctgccccggccgctgccagtgctggaattgagtcttagggatgacccagggctcggcactgtgtcatcttcagcaggtggaccggcagctggcgcatcctctctttccacgggctgcatccagg

SEQ ID NO: 163749 - DNA, 30 bp, Homo sapiens
  chr9:137580539-137580569
  hypo
ttgtcactgttcccacgccgcagtgggaaa

SEQ ID NO: 163750 - DNA, 37 bp, Homo sapiens; identical to SEQ ID NO: 78744
  chr9:137583039-137583076
  hypo

SEQ ID NO: 163751 - DNA, 31 bp, Homo sapiens; identical to SEQ ID NO: 78745
  chr9:137599728-137599759
  hypo

SEQ ID NO: 163752 - DNA, 217 bp, Homo sapiens; identical to SEQ ID NO: 78746
  chr9:137601995-137602212
  hypo

SEQ ID NO: 163753 - DNA, 30 bp, Homo sapiens
  chr9:137604883-137604913
  hypo
gccctggctgcctgccgtccatgcctctgg

SEQ ID NO: 163754 - DNA, 30 bp, Homo sapiens
  chr9:137605246-137605276
  hypo
tgagggtcttcctgacgatggttgatttgc

SEQ ID NO: 163755 - DNA, 200 bp, Homo sapiens; identical to SEQ ID NO: 78747
  chr9:137609683-137609883
  hypo

SEQ ID NO: 163756 - DNA, 353 bp, Homo sapiens
  chr9:137620491-137620844
  hypo
cacggggccgcaattcgctttcagtacacggaaggagacggcgagggtgagacctattactacgaatacccctactacgaagaccccgaagacctagggaaggagcccacccccagcaagaagcccgtggaagctgccaaagaaaccacagaggtccccgaggtctgggctgagcgggggactgggttgggctgggcccctcgaggccatggtgcaggggagggcgaggccaggagaggttgtgtcagggtagagggttgggggctgtctggtgaaggttgcgggggcagctcagtgagggagccggctgttgccatccgagctttgctgtcacggggcgtatcgggctttcc

SEQ ID NO: 163757 - DNA, 616 bp, Homo sapiens; identical to SEQ ID NO: 78748
  chr9:137621051-137621667
  hypo

SEQ ID NO: 163758 - DNA, 160 bp, Homo sapiens
  chr9:137622085-137622245
  hypo
tgaccccgacccccacggaagctgctcccatgcctgaaaccagtgaaggggctgggaaggaagaggacgtcggcatcggggactatgactacgtgcccagtgaggactactacacgccctcaccgtatgatgacctcacctatggcgagggggaggagaa

SEQ ID NO: 163759 - DNA, 254 bp, Homo sapiens
  chr9:137622809-137623063
  hypo
tggaaagttagtctgcgtctctggacctcgcggttctcctttccaacatggcactgacagttcctgtctctgggggctgtgaagttttcagattcaggaggagccttgcgtagtgtgtagcacatggccgatgcttaacatagccactgtgtgatgcagaatctccactgccagagaggacacctcgttccagcaggtccagacccctgcgtctgcagcaccgccctgggatgcattatcgcaagaccctgggg

SEQ ID NO: 163760 - DNA, 418 bp, Homo sapiens
  chr9:137623292-137623710
  hypo
tgcctggtgcgtttgcgaggcaaccctgcgccttcctctccctctgcagccagctccgcctccaggggaaggtgcggatgacttggagggggagttcactgaggaaacgatccggaaccttgacgagaactactacgacccctactacgaccccaccagctccccgtcggagatcgggccgggaatgccggcgaaccaggataccatctatgaaggggtgagagggtgcaggcccccgttccgggtggggttggggggctggtggggcatcatgggggctcctgcccaagagcctcctcaggggtgggcctctacgggcagctcaagtgttacaccctattcccaaaactttatttttaaagagacctcggtgcctcgaatttgctctgaataacgtgtgtatcggagcatactctcc

SEQ ID NO: 163761 - DNA, 30 bp, Homo sapiens
  chr9:137623998-137624028
  hypo
ctgcgccggggtgtccgctgctcggggtca

SEQ ID NO: 163762 - DNA, 110 bp, Homo sapiens
  chr9:137632037-137632147
  hypo
gcaacagcgagtggccgctgctcttgcccagccagcaccggccaaaactccagacaggcaacagcgagtggccgctgctcttacccagccaggaccggcatggctggagc

SEQ ID NO: 163763 - DNA, 30 bp, Homo sapiens
  chr9:137632409-137632439
  hypo
ctcagtggtgttccacggctccgtcctcct

SEQ ID NO: 163764 - DNA, 127 bp, Homo sapiens
  chr9:137632910-137633037
  hypo
gccatccctgctcaccgctcagcgccctcttgatgtccagatcttgctcgatgcccgctaatcagctgtgaaagatcactggctatggggtgaggccctgcagtgcagcctgcggtgggccgggctc

SEQ ID NO: 163765 - DNA, 30 bp, Homo sapiens
  chr9:137641917-137641947
  hypo
caggcacaggcggctcgctcggagcccatt

SEQ ID NO: 163766 - DNA, 479 bp, Homo sapiens
  chr9:137642191-137642670
  hypo
tcctcagcccacagccgtgcccctcccttctccgggtgggggtttctgaaacattcctgccacggggtctcacagcttctgtgcgtgtccagtgcatttcccgggtgggccgcttctccgacgccctcattctcgctgcagcccagccctggcctggttgcactctgacttgtctctcttggccccttgtcttcagggcccccctggacgcccaggccttcctggggccgatggcctgcccggtcctccaggaaccatgctcatgctgcccgtgagtacccttatcagtcggaggtggggaggcagctggggcaggtgggatccaaaccagaccctctgaggctgcgctgtcactggagaggcctgtgggccccgtctcagtctgtggtcttgcctgggtgccacgtcactgctcccagagtgacccttgtcttacacttgcagttccggtttggaggtggcggcgatgcgggctccaa

SEQ ID NO: 163767 - DNA, 341 bp, Homo sapiens
  chr9:137645493-137645834
  hypo
aacaactgcatttcccggctcctggaaagtcatcgttcttccccccggttctgttcgaggcagacaggtcgcgctttgtgtgctgagcaccgtggccgaagccctgtcccctccccctgcccctcccctgccacccccagcccttcctgtgttctcgagtccccacctcgagcagacattaacacacaccatgtctccctagggtccccctgggagcggaggtttgaagggcgagccgggagacgtggggcctcaggtatgtgggatccttgccttcgctgtctggtgggcgcctcccgttctccggcggcagcgacggcgagcatggagggaccccaact

SEQ ID NO: 163768 - DNA, 205 bp, Homo sapiens; identical to SEQ ID NO: 23714
  chr9:137646058-137646263
  hypo

SEQ ID NO: 163769 - DNA, 203 bp, Homo sapiens
  chr9:137648331-137648534
  hypo
gcccaggggcagtggcgtgatccccctttgacagtctgggatgacgtggtccggaaagaccagccccgtgtgttccatccgttggtgtgaggcacagaacagccccgcccgggctcctggatctgggtcctcgcagcagcccggccactcgggctgtgaccttgggggtgggcgcggctctggtggaacgctcaacttggttt

SEQ ID NO: 163770 - DNA, 30 bp, Homo sapiens
  chr9:137648900-137648930
  hypo
atgggggtgggatcccgactatgaaaacca

SEQ ID NO: 163771 - DNA, 114 bp, Homo sapiens; identical to SEQ ID NO: 78751
  chr9:137650027-137650141
  hypo

SEQ ID NO: 163772 - DNA, 110 bp, Homo sapiens
  chr9:137650638-137650748
  hypo
tttgaaagtgtgtcccgtgagtcccgagctagtgcggtgacctgggggtcttcctggctgcgccgtttctatgtggttgttggagaacacagatgcggcagctttggata

SEQ ID NO: 163773 - DNA, 233 bp, Homo sapiens
  chr9:137656918-137657151
  hypo
gttctgcacgagcctcgccgaccggagagggcgtgccagctcttgcccagagtagcgtcctggaaaagatctgtaccccacgcctccttctgcacattcagtcttggggttcccaccagggactagtttcacctggtgctctcctgcccgcaccctctgaccctgtgatatcataaaaacaatcgtatgtcgctgcggaggggaattcaggagcgagccggtaatgaggatag

SEQ ID NO: 163774 - DNA, 30 bp, Homo sapiens
  chr9:137657603-137657633
  hypo
tgtctgcccccatctcggcctttgagaccc

SEQ ID NO: 163775 - DNA, 31 bp, Homo sapiens; identical to SEQ ID NO: 78753
  chr9:137693755-137693786
  hypo

SEQ ID NO: 163776 - DNA, 31 bp, Homo sapiens; identical to SEQ ID NO: 78754
  chr9:137698684-137698715
  hypo

SEQ ID NO: 163777 - DNA, 30 bp, Homo sapiens
  chr9:137708239-137708269
  hypo
gagtgttttaaacaccgcttcaagcccaga

SEQ ID NO: 163778 - DNA, 82 bp, Homo sapiens
  chr9:137708697-137708779
  hypo
gtcacagcccgggtgcgacactgtcttaggaccctctgtgctagccccaaaagaagagagaggcggccgcagggctggccga

SEQ ID NO: 163779 - DNA, 41 bp, Homo sapiens
  chr9:137709403-137709444
  hypo
ctcatgctgaggacccgtgtcactgcgggtggcccgggagc

SEQ ID NO: 163780 - DNA, 228 bp, Homo sapiens; identical to SEQ ID NO: 78756
  chr9:137709948-137710176
  hypo

SEQ ID NO: 163781 - DNA, 80 bp, Homo sapiens; identical to SEQ ID NO: 78757
  chr9:137710619-137710699
  hypo

SEQ ID NO: 163782 - DNA, 91 bp, Homo sapiens
  chr9:137716484-137716575
  hypo
gcatccaggacgcggcggaacatcgacgccagccagctgctggacgacgggaatggcgagaactacgtggactacgcggacggcatggaag

SEQ ID NO: 163783 - DNA, 275 bp, Homo sapiens; identical to SEQ ID NO: 78758
  chr9:137718799-137719074
  hypo

SEQ ID NO: 163784 - DNA, 156 bp, Homo sapiens
  chr9:137719320-137719476
  hypo
tggccagaggccccgcgtggaattcccttagaaaagaggtttctcggccctccttcgcggcctgcctctgcaaatgggtggccttgccgctgtggaaatcacgggccagactcctccaaactcagaggtttcctgggaagccgcggctggtgttca

SEQ ID NO: 163785 - DNA, 34 bp, Homo sapiens; identical to SEQ ID NO: 78759
  chr9:137727554-137727588
  hypo

SEQ ID NO: 163786 - DNA, 553 bp, Homo sapiens; identical to SEQ ID NO: 78760
  chr9:137759999-137760552
  hypo

SEQ ID NO: 163787 - DNA, 249 bp, Homo sapiens
  chr9:137774780-137775029
  hypo
cttcccacctcaacacggaggccatgacactcttctccacctgtctcagatgaggaaactgaggctcagagagtccagggatttcgctctgttctcacacttggaaggaaaagagccgagattctacccatggtctctggatttccagctcccggcccctgagtgaacaggagagccccgtgaggcctgggtcctggatctagaaccttctggtgcaggatgggcaagcctgggcggggccacagtcac

SEQ ID NO: 163788 - DNA, 30 bp, Homo sapiens
  chr9:137775255-137775285
  hypo
cagaggaacgtgaggcgggtcttctggggc

SEQ ID NO: 163789 - DNA, 30 bp, Homo sapiens; identical to SEQ ID NO: 7114
  chr9:137835238-137835268
  hypo

SEQ ID NO: 163790 - DNA, 83 bp, Homo sapiens
  chr9:137926908-137926991
  hypo
gggtgtggtggctcacgcctgtcatcctgctttcaatcatcttgggtatacgctcaaaagcaggattgccagccaggtgcggt

SEQ ID NO: 163791 - DNA, 178 bp, Homo sapiens; identical to SEQ ID NO: 46721
  chr9:137967472-137967650
  hypo

SEQ ID NO: 163792 - DNA, 174 bp, Homo sapiens; identical to SEQ ID NO: 118406
  chr9:137967688-137967862
  hypo

SEQ ID NO: 163793 - DNA, 1027 bp, Homo sapiens
  chr9:138011452-138012479
  hypo
acccctggtcgggcacggggcaggtggtctacaacggttctatctacttcaacaagttccagagccacatcatcatcaggtttgacctgaagacagagaccatcctcaagacccgcagcctggactatgccggttacaacaacatgtaccactacgcctggggtggccactcggacatcgacctcatggtggacgagagcgggctgtgggccgtgtacgccaccaaccagaacgctggcaacatcgtggtcagtaggctggaccccgtgtccctgcagaccctgcagacctggaacacgagctaccccaagcgcagcgccggggaggccttcatcatctgcggcacgctgtacgtcaccaacggctactcagggggtaccaaggtccactatgcataccagaccaatgcctccacctatgaatacatcgacatcccattccagaacaaatactcccacatctccatgctggactacaaccccaaggaccgggccctgtatgcctggaacaacggccaccagatcctctacaacgtgaccctcttccacgtcatccgctccgacgagttgtagctccctcctcctggaagccaagggcccacgtcctcaccacaaagggactcctgtgaaactgctgccaaaaagataccaataacactaacaataccgatcttgaaaaatcatcagcagtgcggattctgacatcgagggatggcattacctccgtgtttctccctttcgagccggcgggccacagacgtcggaagaaactcccgtatttgcagctggaactgcagcccacggcgccccggttttcctccccgccctgtccctctctggtcaaacaacatactaaagaggcgaggcaatgactgttggccagttctcaccggggaaaaacccactgttaggatggcatgaacatttccttagatcgtggtcagctccgaggaatgtggcgtccaggctctttgagagccatgggctgcacccggccgtaggctagtgtaactcgcatcccattgcag

SEQ ID NO: 163794 - DNA, 30 bp, Homo sapiens
  chr9:138039217-138039247
  hypo
tggcaaccagatgcacgggcttaattacat

SEQ ID NO: 163795 - DNA, 187 bp, Homo sapiens
  chr9:138060950-138061137
  hypo
ccaggagtggatcctcgccagacaccgtccgccggcaggttgaccctggatgcctggcctccagggcagtgggaaaggtgctgtttctgagccaccccagctgccgtgtgtggcaatggccgcgccacagactcaggcatgggcacagacaagaaacataaacccacatactcgcagggattgattt

SEQ ID NO: 163796 - DNA, 69 bp, Homo sapiens; identical to SEQ ID NO: 78765
  chr9:138068321-138068390
  hypo

SEQ ID NO: 163797 - DNA, 165 bp, Homo sapiens
  chr9:138077115-138077280
  hypo
cctccccaggacgaacgcaggcctggcactgggctgacggagtggccgctgcccgggtcacgccatagaggccagcacttgcagcggcttggcctggccccagagcagtttctatgtgcgtgaaaggaccgaagattcaggtcaccatagcgtaacgcagaccag

SEQ ID NO: 163798 - DNA, 30 bp, Homo sapiens
  chr9:138077706-138077736
  hypo
tcattctgaagtcgacggcactgacttgta

SEQ ID NO: 163799 - DNA, 38 bp, Homo sapiens; identical to SEQ ID NO: 23720
  chr9:138106858-138106896
  hypo

SEQ ID NO: 163800 - DNA, 30 bp, Homo sapiens
  chr9:138117126-138117156
  hypo
actttcccattaccgcgtcttcccctcatt

SEQ ID NO: 163801 - DNA, 30 bp, Homo sapiens
  chr9:138117751-138117781
  hypo
tcacacacctatgcacgctcacccgtgcac

SEQ ID NO: 163802 - DNA, 31 bp, Homo sapiens; identical to SEQ ID NO: 7118
  chr9:138120293-138120324
  hypo

SEQ ID NO: 163803 - DNA, 377 bp, Homo sapiens; identical to SEQ ID NO: 23722
  chr9:138143893-138144270
  hypo

SEQ ID NO: 163804 - DNA, 210 bp, Homo sapiens
  chr9:138148458-138148668
  hypo
cagggcgcgcctccccggctttaactgtctccttgacattcacgatgctgcgcaaatggctcctccttggagactcctgccctgacaatgcagccctgtgcgctcagcctcacgttggcagagttctctgcgtggcagtgattcaagttgagttttcccatttgcgtgttaattatcagctcccctcgccctgcacgcttgctagaacat

SEQ ID NO: 163805 - DNA, 798 bp, Homo sapiens
  chr9:138150428-138151226
  hypo
gaccgcatggggcgacggcggtgatgccaaccgtatggggtgaccgaggtgatgccaaccgtatggggtgactgaggtgatgccgactgcatggggtgactgaggtgatgccgactgcatggggtgaccgaggtgatgcccactctatggggcgacagcagtggtgctgactgcatagggtgatggtggtgatgcccactgtatggggtgacggtggtgatgccgactgcatggggtgatggcagtgatgccaactgcgtggggtgaccgaggtgatgctgactgcatggggcgaccaaggtgatgccaactgcatggggtgacttcggtgatgcccactgtatggggtgacggtggtgatgccgaccgcatggggtgacggcggtgatgccgaccgtatggggtgacggcggtgatgcccactgtatggggtgacggcggtgatgccgaccgtatggggtgacggcggtgatgccgaccgtatggggtgacggcggtgatgcccactgtatggggtgacggtggtgatgccgaccgtatggggtgacttcggtgatgccgactgcatggggtgaccaaggtgatgctgactgcatggggtgacggcggtgatgccaactgtatggggtgacttcggtgatgccgactgcatggggtgacggtggtgatgccaactgtatggggtgacttcggtgatgccgactgcatggggcgacggcggtgatgccaaccatatggggtgacggtggtgatgctgaccgtatggggtgacggtggtgatgccgaccgtatggggtg

SEQ ID NO: 163806 - DNA, 31 bp, Homo sapiens; identical to SEQ ID NO: 23723
  chr9:138156950-138156981
  hypo

SEQ ID NO: 163807 - DNA, 110 bp, Homo sapiens
  chr9:138163499-138163609
  hypo
gtccagcgtcactggcgcgtttggctcaggcgggaaggttccattctcagacagcgaggaagacgtttgaagacatgccactctgttgaatggcacgcacgcccgggtgt

SEQ ID NO: 163808 - DNA, 44 bp, Homo sapiens
  chr9:138190747-138190791
  hypo
tatggggcgaaagttcgggaggacttggccgggcagttcccaca

SEQ ID NO: 163809 - DNA, 30 bp, Homo sapiens
  chr9:138222273-138222303
  hypo
agtccttgggctctgcgtatgggagctgca

SEQ ID NO: 163810 - DNA, 30 bp, Homo sapiens
  chr9:138247500-138247530
  hypo
agccccagagggccccgaagctggcggaag

SEQ ID NO: 163811 - DNA, 176 bp, Homo sapiens; identical to SEQ ID NO: 78773
  chr9:138247968-138248144
  hypo

SEQ ID NO: 163812 - DNA, 30 bp, Homo sapiens; identical to SEQ ID NO: 78774
  chr9:138264674-138264704
  hypo

SEQ ID NO: 163813 - DNA, 162 bp, Homo sapiens; identical to SEQ ID NO: 78775
  chr9:138265192-138265354
  hypo

SEQ ID NO: 163814 - DNA, 163 bp, Homo sapiens; identical to SEQ ID NO: 78776
  chr9:138274929-138275092
  hypo

SEQ ID NO: 163815 - DNA, 914 bp, Homo sapiens
  chr9:138289053-138289967
  hypo
catttgtcttcctttcgggaggagagcagcccagcggggaagtgcagcgtggcctctcccagtgcgcccagtgccaaggcagtctgcaggaagtggcacactgctggcgcagggacagggcaggtacacagggcagaggccgtgcccatcccaagcctgtgccctgagccagagccctgctcccagcccctcccagagaggatcgtcctcactcggtccgctgcaatgatgcccctgcatgaaagaagctccctgctccctcagagtgcctcacctgggagcctcctctgggcctggtggagcccacaacccagcgaggacctggcacagttggcaatgtgagtggtggcccacgacgcaacttgtgattgtggttgtggtggagtaacaacacctcgtccacacctgcccgtggaatgctgcaggccaggcgctgggtcacactcttcacgcggattatctcgtgtgacacctggcccacacccgtccgtggaatgctgcaggccaggcgctcggttacactcttcacgcggattatctcgtgtgacacctggcccacacccgcctgtggaatgctccaagccaggcgctgggttacactcttcacatggatcatctcgtgtgacacctggcccccacccgcctgttgaatgctgcaggccatgcgctgggttacactcttcatgcggattatctcatgtgacacctggcccacacccgtccgtggaatgctgcaggccaggcgctgggtcacactcttcacacggattatctcgtgtgacacctggcccacacccgtccgtggaatgctgcaggccaggcgctgggttacactcttcacgcggattatctcgtgtgacacctggcccacacccatctgtggaatgctgcaggccaggcgctggattacactc

SEQ ID NO: 163816 - DNA, 43 bp, Homo sapiens; identical to SEQ ID NO: 23725
  chr9:138296700-138296743
  hypo

SEQ ID NO: 163817 - DNA, 90 bp, Homo sapiens; identical to SEQ ID NO: 23726
  chr9:138297096-138297186
  hypo

SEQ ID NO: 163818 - DNA, 43 bp, Homo sapiens; identical to SEQ ID NO: 78780
  chr9:138339187-138339230
  hypo

SEQ ID NO: 163819 - DNA, 87 bp, Homo sapiens
  chr9:138353990-138354077
  hypo
agctctgggagggcacggctgagccctccctttttctgcattcccaaggctggctcctagacggctccaaaccgtttccagggttcg

SEQ ID NO: 163820 - DNA, 31 bp, Homo sapiens; identical to SEQ ID NO: 78781
  chr9:138357660-138357691
  hypo

SEQ ID NO: 163821 - DNA, 152 bp, Homo sapiens; identical to SEQ ID NO: 118415
  chr9:138372137-138372289
  hypo

SEQ ID NO: 163822 - DNA, 30 bp, Homo sapiens; identical to SEQ ID NO: 78783
  chr9:138375660-138375690
  hypo

SEQ ID NO: 163823 - DNA, 122 bp, Homo sapiens; identical to SEQ ID NO: 78784
  chr9:138393596-138393718
  hypo

SEQ ID NO: 163824 - DNA, 30 bp, Homo sapiens; identical to SEQ ID NO: 78785
  chr9:138395331-138395361
  hypo

SEQ ID NO: 163825 - DNA, 85 bp, Homo sapiens
  chr9:138456650-138456735
  hypo
ggctgagtttttctccagcggttcatcgagtcctctgacaaagcaaggagctgatatagggccagtgggacggtcgccagtcaag

SEQ ID NO: 163826 - DNA, 45 bp, Homo sapiens
  chr9:138507284-138507329
  hypo
cgctctccactccatccggaccagggacggcggggacgtggactt

SEQ ID NO: 163827 - DNA, 30 bp, Homo sapiens; identical to SEQ ID NO: 78788
  chr9:138531497-138531527
  hypo

SEQ ID NO: 163828 - DNA, 31 bp, Homo sapiens; identical to SEQ ID NO: 78789
  chr9:138547729-138547760
  hypo

SEQ ID NO: 163829 - DNA, 30 bp, Homo sapiens
  chr9:138548236-138548266
  hypo
gggcaggtgtggctccgcgctgttgtagca

SEQ ID NO: 163830 - DNA, 580 bp, Homo sapiens
  chr9:138562773-138563353
  hypo
gggtctctcgggcatcgaaaggacaagcttaagggtcgtgcaaatgcaccgcgtgtacaggacggctgtgtgcacacgtgcaccggggcgaggggctgtcgatgccacttcccttcgcagtgttctcttagttaccgacagcgtggcagcctgcagttaccagggaagccggagctaggagcagaggcaggcgaagccccaggaggggaggcatgtccactccccacagcccctcccataccagaggcccttgacaatgcgcctgcaggtcaggcgaccagctaggtgtggggtgagcccccgcctctgtttccccaaatgactggtatgttcctgggcacacatccgatggctgccagcctgcacgtcacgcccagctgccggagctactgcgggattccagaacaaggaacgtgacatgctcggcctggagcggaacaaggcacctggctcccgcaccctcgacggggccctgcccagtggacacgaccacgtggaagcctcttcctcctggcactgcagagcggatggcggatgcagatcccactttggggatggcgggcactgctggtaaattcta

SEQ ID NO: 163831 - DNA, 314 bp, Homo sapiens
  chr9:138569349-138569663
  hypo
cagctgccttcctacaagcaacgcactgacggtgatccccacacatcggcatcaccatggacaaggtcctctccacgtggaaatccgcgctttcctgctcgcagcttcatgaacattttcttggctcctgtgtgcgccgtggtctttgtgcaccatggcctgtgtacaccatggtctgtgtgtgtcgtggtctgtgtgcaccgtggcctgtgtacaccgtggtctgtgtgcgccatggccgtctgcctgtcttcggcactggagcctccctttggctaacggagcacctgggcgcctgccttctgcttgtcaga

SEQ ID NO: 163832 - DNA, 43 bp, Homo sapiens; identical to SEQ ID NO: 78792
  chr9:138603671-138603714
  hypo

SEQ ID NO: 163833 - DNA, 88 bp, Homo sapiens; identical to SEQ ID NO: 46728
  chr9:138606160-138606248
  hypo

SEQ ID NO: 163834 - DNA, 250 bp, Homo sapiens; identical to SEQ ID NO: 46729
  chr9:138606523-138606773
  hypo

SEQ ID NO: 163835 - DNA, 23 bp, Homo sapiens
  chr9:138606820-138606843
  hypo
cgcggaggcggagggcggcctgg

SEQ ID NO: 163836 - DNA, 136 bp, Homo sapiens
  chr9:138634103-138634239
  hypo
cagcctcgcagacctcggcatgaggtggagctcaccgcgctcgcttctggatgctggggaccacacatggggcctgggctggcttcgtgctgagcagggccagggcgagtgcccaaagcatcgtcacctgcttgcg

SEQ ID NO: 163837 - DNA, 30 bp, Homo sapiens
  chr9:138634468-138634498
  hypo
tgcgtgtctgtgccccgcctggtcccagag

SEQ ID NO: 163838 - DNA, 30 bp, Homo sapiens; identical to SEQ ID NO: 78796
  chr9:138637320-138637350
  hypo

SEQ ID NO: 163839 - DNA, 389 bp, Homo sapiens
  chr9:138637699-138638088
  hypo
actctgaggagctagcggagccctccaggctaccagtgtccatgaacctctgccgcagcaaggaggcttgggccactctggcaggaaccaccaggcgggtctaccccagccgggtcggcctagagctgaccccagccaggcctctgcagccacaggctccctccccaggtgccgctgcgtgactcgtgaagacagatcgcaccagtcacctgaaatacactgcaggggaaaatggatcgttttcatctcctttttgtggtggtgctcggagaagtgggcggccacagttcattaaaaattaaaagcagaggaggcttcattaatgtctctggcatcgcaggctccagtttctcagggagtctgccaggccccagcgtttctctgcctcc

SEQ ID NO: 163840 - DNA, 30 bp, Homo sapiens
  chr9:138643580-138643610
  hypo
gggccctgcggccctcggtgccggcctgtc

SEQ ID NO: 163841 - DNA, 107 bp, Homo sapiens
  chr9:138643903-138644010
  hypo
tcaaatgtctggtgccgtttatgcgtaagagtgctcaggcgctgaggggctctgcagccacgtgtgtggtgtggttgtcaccatccagccatcggggtgaaccctgc

SEQ ID NO: 163842 - DNA, 549 bp, Homo sapiens
  chr9:138649884-138650433
  hypo
cctacccaggtgcaggctgcccgtgggcctcagcggagacgcaggtgtggccaggcgtgggctgccccttgggcctcagccgagacacaggtgtggccgtgggctgccccgtgggcctcagccgagacacaggtgtggccaggtgcaggctgccccgtgggcctcagccgagacgcaggtgtggccaggtgcaggctgccccatgggcctcagccgagacacaggtgtggccaggtacaggctgccccgtgggcctcagccgagacgcaggtgtggccgggccgtctgctttccactgtccttctagtctctattcattggctcctggcggggtccacagtccctgcccgctgacagccaccactccttccacagaatgacttccaccgtgccatcctgcggacacagtcagccatgttcaaccaggtcctcatcctcttctgcaccctgctgtgcctcgttttcacggggtgagtgccggccgtcagtgtgagcaccccaggacgttgggagggcccgagaggcaagcagggccgggcgaggggatac

SEQ ID NO: 163843 - DNA, 554 bp, Homo sapiens
  chr9:138651295-138651849
  hypo
tgcattgtcagccagcgtcaggcaggaggtggctccggcagagcttggggacagatgggcagggctgagggcctgatgccacccagctgtcaggagggcggggctcgcctggtgatgcacagctcagtctcctgggcagtgagggtcccgtgggcaggcaggatctctgaggggccacggccccccagctcctgggccccaggccgcccctcactgccaggggttgcaggacctgcggcatccagcacctggagcgggcgggcgagaacctgtccctcctgacctccttctacttctgcatcgtcaccttctccaccgtgggctacggtgacgtcacgcccaagatctggccatcgcagctgctggtggtcatcatgatctgcgtggccctcgtggtgctcccactgcaggtgggtcctctgggcaccagccctgggtggcaccagcaaagggacaggcgggtgccagtagagggagggtgccactgaggctgtggcacagtgcgggggccactcccaggaggggacagtgaggccaggcgggtggtgcctgct

SEQ ID NO: 163844 - DNA, 38 bp, Homo sapiens; identical to SEQ ID NO: 78799
  chr9:138654777-138654815
  hypo

SEQ ID NO: 163845 - DNA, 768 bp, Homo sapiens; identical to SEQ ID NO: 23732
  chr9:138660476-138661244
  hypo

SEQ ID NO: 163846 - DNA, 503 bp, Homo sapiens
  chr9:138661531-138662034
  hypo
gccagggcctgccccgccctggaactcctcgctgagctgggagagaagcacaggagcgatggaaggtccaccgaggctcagaccaagtagggggttgaggtccacagactctcggggcagagatgctgaagccggacagcagacacgggggtgccaggcaagggtgcatctgcatagcaccttcaggaagtgagcaggtactgtgggggaggagagagccggcagagcggcaggtggaccggcctcccccactgcccgcagaccacgtggtgtgtgaggaggagtgcaagtacgccatgctggcgctgaactgcatctgcccggcgacctccaccctcatcaccctgctggtgcacacgtcccgcggccagtgagtgccccgtgccccgggggaccgacctccatggcggggccggcgcagggagacaacgcagggcctgcttgggggcggggatgggcttcccagaggaggggcacatggcgggcaaaagtcctgcataggg

SEQ ID NO: 163847 - DNA, 362 bp, Homo sapiens
  chr9:138662652-138663014
  hypo
gacagggcgggtgagcggcggtacctgaagttgccggtgcctctgcccaggtatggcgtgtgcctcatcgggctgaagcgggaggacaacaagagcatcctgctgaacccggggccccggcacatcctggccgcctctgacacctgcttctacatcaacatcaccaaggaggagaactcggccttcatcttcaagcaggaggagaagcggaagaagagggccttctcggggcaggggctgcacgagggtccggcccgcctgcccgtgcacagcatcatcgcctccatgggtgagccgggacaggcgcgcgggactccctgggcctgctcctttggcgggagaccaggcgggacaccggcagg

SEQ ID NO: 163848 - DNA, 138 bp, Homo sapiens
  chr9:138663354-138663492
  hypo
ggttggcagctcaaccggaggctcctggtggtcccatcagcccggagggtctgcttcacgtgtgtccctcaaacagtcgggagtcctgacgtccactggggccaggagttggcggaatgaggtcgcagtggccgaggg

SEQ ID NO: 163849 - DNA, 30 bp, Homo sapiens
  chr9:138663902-138663932
  hypo
caggttcccggccgccgtctacggcagctc

SEQ ID NO: 163850 - DNA, 47 bp, Homo sapiens
  chr9:138666572-138666619
  hypo
gtgttgtgtgtgtgtccgggtgtgtccatttccgtgtgcctgtatgg

SEQ ID NO: 163851 - DNA, 305 bp, Homo sapiens
  chr9:138670509-138670814
  hypo
acgggccctcggtcccgccaccagcctggacagcctgctgcagtgtggcatcatctatgcggacaacctggtggtggtggacaaggagagcaccatgagcgccgaggaggactacatggcggacgccaagaccatcgtcaacgtgcagaccatgttccggtgcgtccagtgtccggggctcggctctaaaccaccccacagccacgaccacgggccctcgccctgagacccccacagccacgaccacgggccctcgccctgagacccccacagccacgaccacgggccctcgccctgagaccgcc

SEQ ID NO: 163852 - DNA, 30 bp, Homo sapiens; identical to SEQ ID NO: 78804
  chr9:138671241-138671271
  hypo

SEQ ID NO: 163853 - DNA, 30 bp, Homo sapiens; identical to SEQ ID NO: 78805
  chr9:138671743-138671773
  hypo

SEQ ID NO: 163854 - DNA, 30 bp, Homo sapiens; identical to SEQ ID NO: 78806
  chr9:138682388-138682418
  hypo

SEQ ID NO: 163855 - DNA, 30 bp, Homo sapiens; identical to SEQ ID NO: 78807
  chr9:138710963-138710993
  hypo

SEQ ID NO: 163856 - DNA, 31 bp, Homo sapiens; identical to SEQ ID NO: 78808
  chr9:138712991-138713022
  hypo

SEQ ID NO: 163857 - DNA, 204 bp, Homo sapiens; identical to SEQ ID NO: 23734
  chr9:138718006-138718210
  hypo

SEQ ID NO: 163858 - DNA, 215 bp, Homo sapiens; identical to SEQ ID NO: 23735
  chr9:138719253-138719468
  hypo

SEQ ID NO: 163859 - DNA, 30 bp, Homo sapiens; identical to SEQ ID NO: 78811
  chr9:138719699-138719729
  hypo

SEQ ID NO: 163860 - DNA, 312 bp, Homo sapiens; identical to SEQ ID NO: 78812
  chr9:138743578-138743890
  hypo

SEQ ID NO: 163861 - DNA, 247 bp, Homo sapiens; identical to SEQ ID NO: 78813
  chr9:138770461-138770708
  hypo

SEQ ID NO: 163862 - DNA, 184 bp, Homo sapiens; identical to SEQ ID NO: 78814
  chr9:138774056-138774240
  hypo

SEQ ID NO: 163863 - DNA, 118 bp, Homo sapiens; identical to SEQ ID NO: 78815
  chr9:138774511-138774629
  hypo

SEQ ID NO: 163864 - DNA, 492 bp, Homo sapiens
  chr9:138780558-138781050
  hypo
gatataaggagtcaacggaaataattccaactcaaggtaaaagcgaccagtagtccacgccccagctccatcctggagaggccagacacaagggtaagaaaagctgatgtaatggtccccacagggccaagaccacctgacccccacccagggacaaccagtaacaaactgcaccttgacagcggagcgccaggtgcacagacaagcacacaccccacagggcgctggcccgggcatgccacaccaggctcaggtgcagacttggcttccagccagaaggccagcaagggagaccctcgggaaccctcagagaggggagaggatcccagagaagagggggctggatagggagaccctctaaatctgtgtcacatcctggccactcctgaagcaactacagtggcacagcagccactctgagggccacagcccacagcccagccagagcggcaggacgaagaccgaaaatgaaacctacgctcaactgtatgt

SEQ ID NO: 163865 - DNA, 30 bp, Homo sapiens
  chr9:138781398-138781428
  hypo
agaaaagaccaagcccggagcagaggccac

SEQ ID NO: 163866 - DNA, 78 bp, Homo sapiens
  chr9:138796490-138796568
  hypo
tagaatgtaaaagccctctctcggcaaaaagaagtggaaaccagccaggcgtggtggctcacacctgtaatcccagca

SEQ ID NO: 163867 - DNA, 78 bp, Homo sapiens; identical to SEQ ID NO: 78819
  chr9:138796807-138796885
  hypo

SEQ ID NO: 163868 - DNA, 30 bp, Homo sapiens; identical to SEQ ID NO: 78820
  chr9:138821407-138821437
  hypo

SEQ ID NO: 163869 - DNA, 30 bp, Homo sapiens
  chr9:138823225-138823255
  hypo
cagggcagctgcgacgtgctccagaaccca

SEQ ID NO: 163870 - DNA, 30 bp, Homo sapiens
  chr9:138823489-138823519
  hypo
gcaggaccagccaacgggagcgaacgcagc

SEQ ID NO: 163871 - DNA, 41 bp, Homo sapiens; identical to SEQ ID NO: 23740
  chr9:138824556-138824597
  hypo

SEQ ID NO: 163872 - DNA, 120 bp, Homo sapiens
  chr9:138831882-138832002
  hypo
aggtagaaacgcatcgcttatgtggacacgaggcagtcaggccaacttcagaccctttcaggtttgtcccgatgactgtgtggataagactgtctcggcagccaccgcaggtttacccca

SEQ ID NO: 163873 - DNA, 309 bp, Homo sapiens
  chr9:138836302-138836611
  hypo
aggaggaagtaaaacccgaatcaaagaacaggagagagaaggaagaatggggagatgaggcgcgggcgaggaaggtccacacacacaggcgcagggacccttcagccctgcagactgtgccatggaggcggctggcagcctgagcggcccctcgctcatggacacccccgacggcaaatgaccctcccggtctctgggcagggcccccaccccgcagagaggctgccgaacagggggggcttgtggatgagtggtcagaaggaactgtaaaatatcaagtttttcaaaaggtgacgaatgtggcaacac

SEQ ID NO: 163874 - DNA, 30 bp, Homo sapiens; identical to SEQ ID NO: 78824
  chr9:138838012-138838042
  hypo

SEQ ID NO: 163875 - DNA, 30 bp, Homo sapiens; identical to SEQ ID NO: 78825
  chr9:138839929-138839959
  hypo

SEQ ID NO: 163876 - DNA, 245 bp, Homo sapiens
  chr9:138841433-138841678
  hypo
cctccacagctgctgcgctggaatacgaggcctccagacagtttcccctcctggcacccgaggaagtcaggctccaccagaccaagggacagatcgagaagaacaagacacctggtcctgcggcaggcagaactcgaggacggccgcacgctccccgggcctggcagttgcccgtgcgtggctgcacagcatgagcaggacacagtccactctggggtcaggttacatcacgcggcacagccgac

SEQ ID NO: 163877 - DNA, 61 bp, Homo sapiens; identical to SEQ ID NO: 78827
  chr9:138867840-138867901
  hypo

SEQ ID NO: 163878 - DNA, 155 bp, Homo sapiens
  chr9:138871836-138871991
  hypo
ctccatctccacggccggcccccgtgctgagttcacggccagcccccgtgctgaggccatgcaggtccctgtgctgagtccacagccgtcccccgtcctgaggccacccaggcctggcccaggagggtggacatttcctttgtgttttttttgag

SEQ ID NO: 163879 - DNA, 30 bp, Homo sapiens
  chr9:138872294-138872324
  hypo
gggtgaggactgtcccggtcacacagtccc

SEQ ID NO: 163880 - DNA, 331 bp, Homo sapiens; identical to SEQ ID NO: 23743
  chr9:138873214-138873545
  hypo

SEQ ID NO: 163881 - DNA, 30 bp, Homo sapiens; identical to SEQ ID NO: 78829
  chr9:138873972-138874002
  hypo

SEQ ID NO: 163882 - DNA, 178 bp, Homo sapiens; identical to SEQ ID NO: 78830
  chr9:138874535-138874713
  hypo

SEQ ID NO: 163883 - DNA, 77 bp, Homo sapiens
  chr9:138875024-138875101
  hypo
caagagtggcgcccgcgtagtaattcctaattaaatagagcacaaaacaggggattgtctagcgattagccaaaccg

SEQ ID NO: 163884 - DNA, 52 bp, Homo sapiens
  chr9:138875478-138875530
  hypo
gctacaatcccgcgccgccctataaacataatctattcgcgtgcctctttca

SEQ ID NO: 163885 - DNA, 30 bp, Homo sapiens
  chr9:138875780-138875810
  hypo
tggggccgctccgagcgcggggagcgccca

SEQ ID NO: 163886 - DNA, 556 bp, Homo sapiens
  chr9:138877538-138878094
  hypo
gaagcgctctgctcacgtgttggttgggactcgggtgaacacgaggcagcggaggcaatcagaaaggacgcgctgagggctgcgcttacccccatctctctttccctggggtaggccccttcctcctgctcctcctgaatgctggcacctgcgcagccctctgccatgactccagagccaacccatgctcacaacctccacgtgctgcccccagctggcctgggcactcggcctccccctctcctaggtccagagaacgggtctgaaagcctgtgggggccaacagcagcggcctgttccccaacctgcacctccagcccaggctgtcctcctcatcctgcgttcccgggcctggtgtggagctggacacgtcccgaatgtccctgtgtccctgcgcaggcatcaggtctgaaatgccatcggtgcttcaggctctcgtgtccgcgtggccggcaggatgcttcttctgaagtggaccgagagccgttcactcgtgccaaggggtgtttgagaacggagccaagtgcagggcctgcaggggcggtgctggagggtg

SEQ ID NO: 163887 - DNA, 299 bp, Homo sapiens
  chr9:138878430-138878729
  hypo
agcctggggggcacgcggtgggcggttggtgcacacacaggcccttggctctgacaggcctggagcagtgcaggggtgccgtgccgggtcctcagcaccggctcccaggcagccagggacttcccggagctccctggtcaccaacccaggcttgatggaggccccggctgcatctctgacccctgacccctgaccccagcctgcaccaagccccacacgtgactggaatttcgcctgcacgttcggcctggtactcacaggaggctccgagcagcccaccctttcggacaagctggtcg

SEQ ID NO: 163888 - DNA, 336 bp, Homo sapiens
  chr9:138880241-138880577
  hypo
gctggctctaccatcgttcagcagaacctcatgcgtaagaagtaggggaaggcatgggatcatcatcccctcctgatagagaagctgagccgcaagtgggactcctaagaggagacgcctggagacgcctttagtcttaatatgttcccgtgtgtgcatatgtgcacgtgtgtgtgtctgtgtgcacaggcgcgttggggtacaagagtgaacacagcacccgggagcattccgcatctgctcacagtctcagcctgaggcagccgggccaggcttgctggaaaacaagccccgggatcggaccaagcagctgcccctcctcgcactctgcctggc

SEQ ID NO: 163889 - DNA, 691 bp, Homo sapiens
  chr9:138887920-138888611
  hypo
catgctgggcggtcacgcctgtctcatcgttgcagcagctggtctgtcctgatgctccaggtggacgcttcgttcttggctcggcccgtggaaaccatgaaaagtggaggtcctgtgtggggcatctgcaacataccagccacggagctcggggctcacagtagcttctcagtaaatactgaatggacgcctggtttccagtttccgtgacacattggtaagatggcaatcgttaccctgttttacaaaatcttagacaagttaagtgactctgaaagtcccccggccaggacatggagctgggacctggtctcaggctcacctggctcccgactgctaggccgctgtgcacatgtgtgcaggttgctactgcacatgggcactcagctgaaggggagaaaggggcgaatctccagtccccatcctttctccctccccgccatcacgtgccaggcactgcctttgcccaggggctccttgtgattgtaacagaaggccgagtggcctggtgggtccgggacccattctgtgctgctggctcaccctccacacagcaacaccacgggcaccgtttccacgggcaccatttccacgggcaccatttgcttctgttgcatgacaagggtcgggccggagagaggcctgcgtccctgaccagagcccatgagggaggaagcggcacagaacagca

SEQ ID NO: 163890 - DNA, 30 bp, Homo sapiens
  chr9:138889997-138890027
  hypo
ccccaggccccctgccgcccagctcctggc

SEQ ID NO: 163891 - DNA, 210 bp, Homo sapiens
  chr9:138890406-138890616
  hypo
ggctgccagccctgccgctccagggaggcacaggcgcctccaggccggctccagaatcctgccagcccctctgtgcttgggcctgggggcttctttctgccacagccactgttacgatggaggagagacactgtcatcagcttcctgccccctggccagcacctgggctaggttggcactggaggtgcgctcacacgccaggtgagatgc

SEQ ID NO: 163892 - DNA, 101 bp, Homo sapiens
  chr9:138901526-138901627
  hypo
gcccagtgggaatgcgtctaacccacaccctgtaggtccccaggccagggtgcagcacatggtcctcccctagcggaggcggcctccgcttgatgggttgt

SEQ ID NO: 163893 - DNA, 162 bp, Homo sapiens
  chr9:138902148-138902310
  hypo
cacccctcaaggcagacggggagcccagcaccgggaggaccgactctcgccctggcccagccctggccgctgcctcctgcccgagcggagtcccccgctccccaggtccggccctgagctcagcttcacacgtactagtcgcccacccgggacccccttttt

SEQ ID NO: 163894 - DNA, 49 bp, Homo sapiens; identical to SEQ ID NO: 78837
  chr9:138906091-138906140
  hypo

SEQ ID NO: 163895 - DNA, 56 bp, Homo sapiens; identical to SEQ ID NO: 78838
  chr9:138907130-138907186
  hypo

SEQ ID NO: 163896 - DNA, 31 bp, Homo sapiens; identical to SEQ ID NO: 23749
  chr9:138908323-138908354
  hypo

SEQ ID NO: 163897 - DNA, 31 bp, Homo sapiens; identical to SEQ ID NO: 78840
  chr9:138908900-138908931
  hypo

SEQ ID NO: 163898 - DNA, 40 bp, Homo sapiens; identical to SEQ ID NO: 78841
  chr9:138909963-138910003
  hypo

SEQ ID NO: 163899 - DNA, 185 bp, Homo sapiens; identical to SEQ ID NO: 78842
  chr9:138910982-138911167
  hypo

SEQ ID NO: 163900 - DNA, 570 bp, Homo sapiens; identical to SEQ ID NO: 78843
  chr9:138911433-138912003
  hypo

SEQ ID NO: 163901 - DNA, 30 bp, Homo sapiens; identical to SEQ ID NO: 23752
  chr9:138916649-138916679
  hypo

SEQ ID NO: 163902 - DNA, 32 bp, Homo sapiens; identical to SEQ ID NO: 78845
  chr9:138922160-138922192
  hypo

SEQ ID NO: 163903 - DNA, 30 bp, Homo sapiens; identical to SEQ ID NO: 78846
  chr9:138948513-138948543
  hypo

SEQ ID NO: 163904 - DNA, 240 bp, Homo sapiens
  chr9:138948880-138949120
  hypo
ggcctccagcagccagtacctcgagggagggctgggaggacgctccatcctcggcagcagcaggctctgcgtccgatagggccttgtggggtgcccgtggcgttggctctgccgggggtctggtccaggggcctgtgtgactgagccgagccctgcgcttatggggaatgacccaagcagccacggctcacctgaggcatggcccctggccaccaacacgctcatctctaaccttcactt

SEQ ID NO: 163905 - DNA, 433 bp, Homo sapiens
  chr9:138950491-138950924
  hypo
agtgacgagctcgatcgcaacccacctcagcatcgcaccatgcacccaggtgacaaacctgtacacgtatctctgaatcgaaaataaaagttgaaaaaaggaaaagattcaactcacacagcaccagagattcggaatagcccccacctgcacacttcgggcaatgcctcacgctggggcatgggattggacaaaagtccttggcagagctcaagccatggaggggacgcaggggccggggcaggatggtctcctgaccgccaccccaccccagtggatagcgctgcccctggatgggtagcagaggcccaggtgtgggaggcgtgactctggcccctgggccccgccctcctgtctgcagggagaggcagtgtgggggctgtagagggaaggtgctgggtcaggggcaggggagaagcgtgatctggaaccc

SEQ ID NO: 163906 - DNA, 86 bp, Homo sapiens; identical to SEQ ID NO: 78849
  chr9:138954963-138955049
  hypo

SEQ ID NO: 163907 - DNA, 37 bp, Homo sapiens; identical to SEQ ID NO: 23754
  chr9:138970474-138970511
  hypo

SEQ ID NO: 163908 - DNA, 30 bp, Homo sapiens; identical to SEQ ID NO: 78851
  chr9:138970808-138970838
  hypo

SEQ ID NO: 163909 - DNA, 30 bp, Homo sapiens
  chr9:138974192-138974222
  hypo
cacgtgctgagccggcggatgggcctccgg

SEQ ID NO: 163910 - DNA, 30 bp, Homo sapiens
  chr9:138974421-138974451
  hypo
caggtagagccgaggcgtcttagcaggtgc

SEQ ID NO: 163911 - DNA, 173 bp, Homo sapiens
  chr9:138974808-138974981
  hypo
cgagggggaagacgccgtgttttacggctgtcataacttctgccccattagacatctacactcacatgaaagcgaccagattgatctcctgacgaccgagcacttcacacggcagaacctttctggcaccgcaacagaaacctgagggccctcttcctcgatgccagaaacgg

SEQ ID NO: 163912 - DNA, 193 bp, Homo sapiens; identical to SEQ ID NO: 78852
  chr9:138975399-138975592
  hypo

SEQ ID NO: 163913 - DNA, 259 bp, Homo sapiens; identical to SEQ ID NO: 78853
  chr9:138976373-138976632
  hypo

SEQ ID NO: 163914 - DNA, 213 bp, Homo sapiens
  chr9:138979353-138979566
  hypo
gacagagccagtcctcgcagggcccggctggggaagggccccgcagcttctggggccgcctgggagccctctctgggtctgccttgggctggccctagaccttcctggtgaccagaaagcaggatacggtaccccattcggagctcacagcgggaaaactgagacccagggaggccatggtgtttgcccagcttccaccgcagcacgggggga

SEQ ID NO: 163915 - DNA, 31 bp, Homo sapiens; identical to SEQ ID NO: 23755
  chr9:138979873-138979904
  hypo

SEQ ID NO: 163916 - DNA, 998 bp, Homo sapiens; identical to SEQ ID NO: 118428
  chr9:138986158-138987156
  hypo

SEQ ID NO: 163917 - DNA, 560 bp, Homo sapiens; identical to SEQ ID NO: 46735
  chr9:138987167-138987727
  hypo

SEQ ID NO: 163918 - DNA, 30 bp, Homo sapiens; identical to SEQ ID NO: 78858
  chr9:138989725-138989755
  hypo

SEQ ID NO: 163919 - DNA, 30 bp, Homo sapiens; identical to SEQ ID NO: 78859
  chr9:138994465-138994495
  hypo

SEQ ID NO: 163920 - DNA, 134 bp, Homo sapiens
  chr9:139000508-139000642
  hypo
tctccctgtgccatccgccagcccaggcttgattgagctccatatgaatattcatacagcattctgctgggaccgtcgttaatattctgaggaagcggcaagaatgcccgtccccatgtcgtgagccatggtca

SEQ ID NO: 163921 - DNA, 123 bp, Homo sapiens; identical to SEQ ID NO: 78861
  chr9:139006537-139006660
  hypo

SEQ ID NO: 163922 - DNA, 30 bp, Homo sapiens; identical to SEQ ID NO: 78862
  chr9:139008859-139008889
  hypo

SEQ ID NO: 163923 - DNA, 86 bp, Homo sapiens
  chr9:139012325-139012411
  hypo
ccagatagagggtggcgtgtaaagcaggtggtcacccgtcactcgacttttcgcgtgctggtgagggtggtcgcatgtccatggat

SEQ ID NO: 163924 - DNA, 95 bp, Homo sapiens; identical to SEQ ID NO: 118432
  chr9:139024425-139024520
  hypo

SEQ ID NO: 163925 - DNA, 138 bp, Homo sapiens; identical to SEQ ID NO: 46738
  chr9:139024749-139024887
  hypo

SEQ ID NO: 163926 - DNA, 30 bp, Homo sapiens; identical to SEQ ID NO: 118434
  chr9:139025266-139025296
  hypo

SEQ ID NO: 163927 - DNA, 557 bp, Homo sapiens
  chr9:139028080-139028637
  hypo
aggccgcagggggcacgggcgtcgaattaacattgcaggagggtcccgcgactgttgatatcagcacttcggggttatttatgaattcatctatttcctgggacaagccattctgcatttggttaccatggtagctttaaacccggtatcttattaattctgcatgttatgaaataaatatagatcagacaattgcagtgatggttctatctttttattatgcatttggttcttggtgccggggatgggatgctcccaacacaccaccgtcaacacacatccatcagcctcgggggcctgggcgggctgcaggggcgcactcctgcgcctgagaatggagtggggctgaggaggggacacgaggctgtctcagggaaagggtgaagcttgaagaccccccagggcaccggcagctcctgaaggaattcctacagcccggcagggatggacgcaccggggaaggaggccggtgtcctggggtgcttcggctggaattgcagggccagtgggttggaatggctcccacctgcggactgggacctcgtggcgctgccgag

SEQ ID NO: 163928 - DNA, 30 bp, Homo sapiens; identical to SEQ ID NO: 78867
  chr9:139028910-139028940
  hypo

SEQ ID NO: 163929 - DNA, 185 bp, Homo sapiens
  chr9:139041468-139041653
  hypo
ctggcatggaagcggcggaacccaggacgcactgggagaagccaccatgttcgcccacgaggcctgattctgccctgtggagggggacctgggcacaccacacactgccctgtagaacatggacaatgataggaacaaggctgcaggccatcgagagatttggggcgactcgtcagtagaattcc

SEQ ID NO: 163930 - DNA, 60 bp, Homo sapiens; identical to SEQ ID NO: 78868
  chr9:139043907-139043967
  hypo

SEQ ID NO: 163931 - DNA, 67 bp, Homo sapiens; identical to SEQ ID NO: 78869
  chr9:139044755-139044822
  hypo

SEQ ID NO: 163932 - DNA, 73 bp, Homo sapiens
  chr9:139047580-139047653
  hypo
ttaaaaaggacgcagcgctgacacacgggaaaacacggcgagcctgggagcgtcaggccgagggcaagaagcc

SEQ ID NO: 163933 - DNA, 815 bp, Homo sapiens; identical to SEQ ID NO: 23760
  chr9:139051192-139052007
  hypo

SEQ ID NO: 163934 - DNA, 236 bp, Homo sapiens; identical to SEQ ID NO: 78871
  chr9:139061802-139062038
  hypo

SEQ ID NO: 163935 - DNA, 171 bp, Homo sapiens; identical to SEQ ID NO: 23761
  chr9:139069741-139069912
  hypo

SEQ ID NO: 163936 - DNA, 71 bp, Homo sapiens
  chr9:139071633-139071704
  hypo
caacgtggccatgtgcgtgtgtccccacactgggtgggcagccccctgcgtgagcgcgtgtgtgcacacac

SEQ ID NO: 163937 - DNA, 252 bp, Homo sapiens
  chr9:139075038-139075290
  hypo
ccgggcagggggagccgaaagtaaaccccttggagacacattagtgtcctggggctgctatcataaagtgccgccagcttggcagtttacacaacggaaaggcatcctgccggtgtcggggggccacagtctgaaatcaaggtggcctgctggggtggctgcctccaagggctgggggagaatcatcgtcctgtcccacgcctctctccccgctcctggtggctgctggcgtttgcccgttggcttccgcca

SEQ ID NO: 163938 - DNA, 30 bp, Homo sapiens; identical to SEQ ID NO: 78874
  chr9:139079095-139079125
  hypo

SEQ ID NO: 163939 - DNA, 113 bp, Homo sapiens; identical to SEQ ID NO: 23762
  chr9:139079353-139079466
  hypo

SEQ ID NO: 163940 - DNA, 208 bp, Homo sapiens
  chr9:139079779-139079987
  hypo
gagctgcccctactccgtccagcttggacgtggaccatgactgcccagtagaaacaatgagagaggcctaaagggccagcccgacctcagaaagctctgccaccccaactctggagggtcaccaatggcccgggaaatggtcatagtgtgacaatcaagccaagaagtaggtttcaaggacgtacatctcggccgggcgcaatggctc

SEQ ID NO: 163941 - DNA, 152 bp, Homo sapiens; identical to SEQ ID NO: 7127
  chr9:139090399-139090551
  hypo

SEQ ID NO: 163942 - DNA, 155 bp, Homo sapiens; identical to SEQ ID NO: 7128
  chr9:139090586-139090741
  hypo

SEQ ID NO: 163943 - DNA, 453 bp, Homo sapiens; identical to SEQ ID NO: 46746
  chr9:139091071-139091524
  hypo

SEQ ID NO: 163944 - DNA, 150 bp, Homo sapiens; identical to SEQ ID NO: 118447
  chr9:139093772-139093922
  hypo

SEQ ID NO: 163945 - DNA, 312 bp, Homo sapiens; identical to SEQ ID NO: 118450
  chr9:139096713-139097025
  hypo

SEQ ID NO: 163946 - DNA, 30 bp, Homo sapiens; identical to SEQ ID NO: 23768
  chr9:139100455-139100485
  hypo

SEQ ID NO: 163947 - DNA, 106 bp, Homo sapiens; identical to SEQ ID NO: 23769
  chr9:139101083-139101189
  hypo

SEQ ID NO: 163948 - DNA, 30 bp, Homo sapiens
  chr9:139103631-139103661
  hypo
accagtcttccagccgtctgtgccagaacg

SEQ ID NO: 163949 - DNA, 35 bp, Homo sapiens; identical to SEQ ID NO: 23770
  chr9:139103913-139103948
  hypo

SEQ ID NO: 163950 - DNA, 30 bp, Homo sapiens; identical to SEQ ID NO: 23771
  chr9:139106573-139106603
  hypo

SEQ ID NO: 163951 - DNA, 237 bp, Homo sapiens; identical to SEQ ID NO: 23772
  chr9:139106805-139107042
  hypo

SEQ ID NO: 163952 - DNA, 604 bp, Homo sapiens; identical to SEQ ID NO: 23773
  chr9:139110882-139111486
  hypo

SEQ ID NO: 163953 - DNA, 931 bp, Homo sapiens
  chr9:139114398-139115329
  hypo
aaggtgtgaactgggcgccccgcgtggccgtgcctctcctgagctgggtgtgtctgcgaagagctgatcgctactctggggccacactggtctctgctctgggccatgccgtgactctgtgctgaagagcactcctcctgcacgagtggagcctggctgccccgaacgcaccagcatgccaggcaggtaggggagcgtgcccggcaccaagacggtcccacacccgcctcttctcaggggaacacctgcctctggtctgcgtgtgtggaggccccgcccgagacagcaagggcacgaggggccttgggacaggggtgaggggtctgggagagccacacactgctagcggttcctcagccctccacagagaatcctggccaaccatctggaggcagcctggcgtcaccatcaaacctggagggggcggtgctggggtgccaggagggcagccagggcacaaagcgagacggtcacagtgcaggtgtctgcagctgccttcccaagtgcgtctccaaaagccctcgcaggggcaaagctgtttcctacattcaccgcaaggcccctcacagtggacagaaaaacagtcgcctatcaagttgcaaggaggaggaggagaagctcagggtgagtgctgggcgaacgcatgtgcagtgaggcctttctctcgtctccgggaagactgtcagcaataatgactctccgtgagctgcccctgcacctggtccctggaccttatttagacttggccagaagcaaggcttcagaactgtacgtgtgaaatcaaagtatgacgatagaaacgacgttttacagaatcttggatttggcaaaaatgttgagagttcagaatacggcaacgaaaaaaatcttagtaataatgcatacaaaatacagaatgacctcaaggtgagctgggcgtgtcataaaaatg

SEQ ID NO: 163954 - DNA, 30 bp, Homo sapiens
  chr9:139115579-139115609
  hypo
gacacctggagcccacgcagaggccgtacc

SEQ ID NO: 163955 - DNA, 236 bp, Homo sapiens; identical to SEQ ID NO: 23776
  chr9:139118752-139118988
  hypo

SEQ ID NO: 163956 - DNA, 139 bp, Homo sapiens; identical to SEQ ID NO: 78892
  chr9:139121426-139121565
  hypo

SEQ ID NO: 163957 - DNA, 245 bp, Homo sapiens
  chr9:139128187-139128432
  hypo
gtgattctccttcagccggactagacggatattcacaggtatctgaaacaggacgccctctgaaacaggccgcagctgccagcttaaataaaggagacagaaaaaacccaccttgctttccctccagttttggccaatctgaggctttcctcacgacagcagaagagccagcgctgcagcatcacccaaaccacaggccccctggccaaacgggtgctccaaaacccagcgtgcgccccgagact

SEQ ID NO: 163958 - DNA, 90 bp, Homo sapiens; identical to SEQ ID NO: 23778
  chr9:139130638-139130728
  hypo

SEQ ID NO: 163959 - DNA, 1002 bp, Homo sapiens
  chr9:139132821-139133823
  hypo
atgacacagcggagacggctccctggacgtggctgtaaggccctcttagcaaaccatcccgtcttacttcaacaacaagtaagtggcctgggtctctcggtgtagtctcagacgcaccaaccacagccactggggaggccagcggggagcccggctgctccgatgcaccatcctttctgtaaaatactcatgtggtcgccacagcggggctacattaagccatttctgggcccgtaaggagacaggaggcctccactgcccaactcttcctccttccaccctctccatcctcccgagtccagtgagcacctggcagctctcacgggccgtcagccccgccaaatgcccgctgacacctgcatgtccccctccctctggcccttattgtttctttttccagtaaacggacaatgagcctgtggggaacaccaagttctaattcatctccaagaagcctgcagcctagtcgagtagacaagaaaccagaccaagtgggacagaggagctggcagcaatcacagaatgccctacccttccttcaagagatgtcggatgtgtccagctcccaacccccacctgtcctctacaaagacacaggaatgaactgccatggctccaggtcacccacacctggacacccatcccggcctgtcactcagctgcgtgaccgtgactatcccacgcaacctcacgtgctatcacctgcaacatgagcgcccccgcactcctgaggacaggtgtgggaggactcggcctgttccacgcaacctcatgtgctatcatctacaacataagcgttcccgccctcctgagggcaggtctaggaggactcagcctgttgtgggtggtggcctgccctgttttctcaggctgaccaagtgaaggagatgggagggaacaggcaccagggccacagagggcgcacggggacacaggccctgcctttagggtgcaccctcttgtccactcaagactgcagaggcatttcggagatctcaccgg

SEQ ID NO: 163960 - DNA, 30 bp, Homo sapiens
  chr9:139134211-139134241
  hypo
gaacgcagggcgtggcgggcgctggccagg

SEQ ID NO: 163961 - DNA, 56 bp, Homo sapiens
  chr9:139134453-139134509
  hypo
gccacgggcaatgggcgccctatccctgtgggacagctccacgcagggatgacaga

SEQ ID NO: 163962 - DNA, 31 bp, Homo sapiens; identical to SEQ ID NO: 78896
  chr9:139253100-139253131
  hypo

SEQ ID NO: 163963 - DNA, 169 bp, Homo sapiens; identical to SEQ ID NO: 78897
  chr9:139256370-139256539
  hypo

SEQ ID NO: 163964 - DNA, 31 bp, Homo sapiens; identical to SEQ ID NO: 78898
  chr9:139261466-139261497
  hypo

SEQ ID NO: 163965 - DNA, 30 bp, Homo sapiens; identical to SEQ ID NO: 78899
  chr9:139262118-139262148
  hypo

SEQ ID NO: 163966 - DNA, 30 bp, Homo sapiens; identical to SEQ ID NO: 23780
  chr9:139262661-139262691
  hypo

SEQ ID NO: 163967 - DNA, 81 bp, Homo sapiens; identical to SEQ ID NO: 78901
  chr9:139264124-139264205
  hypo

SEQ ID NO: 163968 - DNA, 30 bp, Homo sapiens; identical to SEQ ID NO: 23782
  chr9:139265711-139265741
  hypo

SEQ ID NO: 163969 - DNA, 954 bp, Homo sapiens
  chr9:139268623-139269577
  hypo
cacacgggggagaaacgtcccttccagaagtgtcgttatcctcgttatccccatcatgaggcatccctgctctccaccaggatgcatgtgaggactgaggccactctcggggtcccccaaaccagcttcagaagagccggtgacagcagggcacagctcggcccccatccagggacaacggacagcagagtctgccctgaactgtgcacttcagcgtgtgggctgccagagcctcatccctgcaggcttgggaacccccaggccccgcctcacccggtaaagctggttgaactgagttgccacccaacaggttcgagaaggggccgccaggctggaaggcaaggaagctggtgtggagcttgcctaaccgttctcagcctccagccctcaggcctctgtgcggacaacgtctgacatcacacattaaggagcggacagttaggggtcctcctgggctctcgggaatgccacattccagggggccgtgcccctgctggacccctcaccatcaacatgagcgagtgtgcaggccggggccatcctgggccctgccagggagcgaaccggagctggcaccaggccctcatgacccagtgtttccccagcgtttaaaacgcggaccttagtgacttccctgtggtgtgtgtccttaggagtgaacacacataccatgttctctaaccatatcggaagctaaaaatcggtaacagatatcggcaaaatctctaaatatttggaaattaaataatataccgctaaataacccacagatcagagtggcccccagactaggcaccagactagagaaccaggcacagcaacacatactcaggagtgaggtcggccatgggaccgtcccgtctgccaggtgcccagggctgaggccccacagtggctccagtgaaggatcgaagcccagatagccaagggcctgggggcgctgctgccacagag

SEQ ID NO: 163970 - DNA, 35 bp, Homo sapiens; identical to SEQ ID NO: 23784
  chr9:139272164-139272199
  hypo

SEQ ID NO: 163971 - DNA, 31 bp, Homo sapiens; identical to SEQ ID NO: 78905
  chr9:139273917-139273948
  hypo

SEQ ID NO: 163972 - DNA, 48 bp, Homo sapiens
  chr9:139292778-139292826
  hypo
ttctgagatctccacgtgggagcccgaggagccgggatccaaaatcct

SEQ ID NO: 163973 - DNA, 57 bp, Homo sapiens; identical to SEQ ID NO: 118452
  chr9:139294770-139294827
  hypo

SEQ ID NO: 163974 - DNA, 149 bp, Homo sapiens; identical to SEQ ID NO: 23786
  chr9:139300479-139300628
  hypo

SEQ ID NO: 163975 - DNA, 30 bp, Homo sapiens; identical to SEQ ID NO: 78908
  chr9:139301526-139301556
  hypo

SEQ ID NO: 163976 - DNA, 290 bp, Homo sapiens
  chr9:139302050-139302340
  hypo
gcttctgactcggagcgcatcttcctttctgtgttctgcctcgcaacaagaagaaaggcccaatctctctaccggaaggagcccagcagcttctgagcccagagctgctccccagcactgacgcctgcctgctctgccacactcatgcacgattcctccaaaggaggctgcagaggccggaacagaaacgtcccacagagccatcgcccacagtgccgtggatttacctttgcataaattctgctggccggatcctctttcgagaggccgaggttcttggtcttcagaaa

SEQ ID NO: 163977 - DNA, 751 bp, Homo sapiens; identical to SEQ ID NO: 78910
  chr9:139317509-139318260
  hypo

SEQ ID NO: 163978 - DNA, 55 bp, Homo sapiens
  chr9:139324912-139324967
  hypo
cgtggggcgtggcccgctcacctccctgctgttctcaagcgccccccacaaggaa

SEQ ID NO: 163979 - DNA, 30 bp, Homo sapiens; identical to SEQ ID NO: 78912
  chr9:139327480-139327510
  hypo

SEQ ID NO: 163980 - DNA, 490 bp, Homo sapiens
  chr9:139330349-139330839
  hypo
accatttggaaatgtaaaacccgttctcagctcgccgactatacagaaacgccgtgggctaggcttgccagccgtcctccccgctccctctctaagtaacacttgtgcggctccttctggatacgccgtcttctgacatggttcccttccgcaaggggacacgagagcatagtgccggattcctgtgacctcccgcgagaacttcttcaaccctggctgcggctcaccaagcttcactggacacgttaaatcatgtcagcagggaggaacctcgctacctcacccctaaaactgtcgacaatcccggtcgggacagctgtgttcacacagtggtcattcgggacagagagcgttcctgtgggcacccctgtcaagtgatcccgggcccagcaggggctcctcggtcaccaggctggaggcccacggcccctttgccggcagcgcccatcatgtccacaccagcagccacgtggtcagtctgcccagctct

SEQ ID NO: 163981 - DNA, 248 bp, Homo sapiens; identical to SEQ ID NO: 118455
  chr9:139334258-139334506
  hypo

SEQ ID NO: 163982 - DNA, 366 bp, Homo sapiens; identical to SEQ ID NO: 78914
  chr9:139345459-139345825
  hypo

SEQ ID NO: 163983 - DNA, 276 bp, Homo sapiens; identical to SEQ ID NO: 78915
  chr9:139347809-139348085
  hypo

SEQ ID NO: 163984 - DNA, 142 bp, Homo sapiens; identical to SEQ ID NO: 78916
  chr9:139349658-139349800
  hypo

SEQ ID NO: 163985 - DNA, 30 bp, Homo sapiens
  chr9:139350382-139350412
  hypo
ttctcataggcacacgtttgcagttacact

SEQ ID NO: 163986 - DNA, 97 bp, Homo sapiens; identical to SEQ ID NO: 23794
  chr9:139351903-139352000
  hypo

SEQ ID NO: 163987 - DNA, 250 bp, Homo sapiens
  chr9:139360041-139360291
  hypo
gacaactgcaggagcggagtctccaaggggaatgagcagctccctcctgcacgcctgctgagccacggggtctgcgatggggatgtgatcaggggctgcccagagcctggatatgagctgtcctcagagtcacactttaaaacgcatgtcggggcaggcagggcagctctcaggccttaaaccaaactgcaatcgaagagacagcatcggcccgtcctgacacaccctgcttctcggaaggacggattgg

SEQ ID NO: 163988 - DNA, 30 bp, Homo sapiens
  chr9:139360669-139360699
  hypo
gttctaaacacaaccgtccgcgtgtctgtg

SEQ ID NO: 163989 - DNA, 31 bp, Homo sapiens; identical to SEQ ID NO: 23796
  chr9:139361343-139361374
  hypo

SEQ ID NO: 163990 - DNA, 68 bp, Homo sapiens; identical to SEQ ID NO: 23797
  chr9:139361591-139361659
  hypo

SEQ ID NO: 163991 - DNA, 126 bp, Homo sapiens; identical to SEQ ID NO: 78921
  chr9:139367912-139368038
  hypo

SEQ ID NO: 163992 - DNA, 30 bp, Homo sapiens; identical to SEQ ID NO: 78922
  chr9:139368734-139368764
  hypo

SEQ ID NO: 163993 - DNA, 263 bp, Homo sapiens
  chr9:139374823-139375086
  hypo
tttaaacacagagcacgggcctagaggtttattccttggctgctgctgtgagagcaaaactgagtgtccaggtgagtggctcgaggcagccactcctctttctgcaatgtatttttgtctataaaatgcgagaatcgatgtgattattttttcctaaaaaacccgggtttaatcttatgagattctactcacagtggattctgggatgtcctaatcccacctgctgtttaacaggggtggccgggcacggtggctcacacctg

SEQ ID NO: 163994 - DNA, 22 bp, Homo sapiens
  chr9:139375325-139375347
  hypo
gagactccgtctcaaaaaaaaa

SEQ ID NO: 163995 - DNA, 41 bp, Homo sapiens
  chr9:139375858-139375899
  hypo
ggattacaggcatgagccaccgcgcccggcccagggaattt

SEQ ID NO: 163996 - DNA, 144 bp, Homo sapiens
  chr9:139381428-139381572
  hypo
cctggagtgctcgcccggtgtgctcgccaggggtgtgcagcgagacagcactgtccactttctaggccttcccagggctgacatgaggctgaaggtgcatccccgccctggcacatgtgcccttgctctcggctgctggggaat

SEQ ID NO: 163997 - DNA, 30 bp, Homo sapiens
  chr9:139381899-139381929
  hypo
cacagggcacattgacggcattgccagcag

SEQ ID NO: 163998 - DNA, 166 bp, Homo sapiens
  chr9:139382432-139382598
  hypo
tgagcggccagtgggcgtaggctagtgtggactctgtaggcttgctaagagacccgcaggtggtgtctggaagtataggaagcttccagaggcttttcagccaggagcgatgcaaccagtttgggccccaaaggctctccaggttagggttcgagctaggggctag

SEQ ID NO: 163999 - DNA, 193 bp, Homo sapiens
  chr9:139384212-139384405
  hypo
ggagaacaaagaatgcgattgaaaacctcctaacgataacaagagctgttccctttctgagccctcaccccatgcccagcgtgcaccagcagctcaccatcgcaggcccagggccagcacccaggtccccacttgacccacgaggacactgaggtacagcaacagccaggacagcagccgccaggtggaaagc

SEQ ID NO: 164000 - DNA, 90 bp, Homo sapiens; identical to SEQ ID NO: 78925
  chr9:139384887-139384977
  hypo

SEQ ID NO: 164001 - DNA, 31 bp, Homo sapiens; identical to SEQ ID NO: 78926
  chr9:139388144-139388175
  hypo

SEQ ID NO: 164002 - DNA, 77 bp, Homo sapiens
  chr9:139389074-139389151
  hypo
gcaccacgcggcccccgtagagccgggggaggctgccctgaggagtgcaggcggcacggcagcggagcgtccccagt

SEQ ID NO: 164003 - DNA, 30 bp, Homo sapiens
  chr9:139389419-139389449
  hypo
ggacgcagcccacggcgttgcacagctcaa

SEQ ID NO: 164004 - DNA, 30 bp, Homo sapiens; identical to SEQ ID NO: 23799
  chr9:139389753-139389783
  hypo

SEQ ID NO: 164005 - DNA, 30 bp, Homo sapiens; identical to SEQ ID NO: 78928
  chr9:139393035-139393065
  hypo

SEQ ID NO: 164006 - DNA, 30 bp, Homo sapiens; identical to SEQ ID NO: 78929
  chr9:139393721-139393751
  hypo

SEQ ID NO: 164007 - DNA, 30 bp, Homo sapiens; identical to SEQ ID NO: 78930
  chr9:139396032-139396062
  hypo

SEQ ID NO: 164008 - DNA, 383 bp, Homo sapiens; identical to SEQ ID NO: 118459
  chr9:139401221-139401604
  hypo

SEQ ID NO: 164009 - DNA, 30 bp, Homo sapiens; identical to SEQ ID NO: 78932
  chr9:139401916-139401946
  hypo

SEQ ID NO: 164010 - DNA, 30 bp, Homo sapiens; identical to SEQ ID NO: 23800
  chr9:139407964-139407994
  hypo

SEQ ID NO: 164011 - DNA, 30 bp, Homo sapiens; identical to SEQ ID NO: 78934
  chr9:139408978-139409008
  hypo

SEQ ID NO: 164012 - DNA, 30 bp, Homo sapiens; identical to SEQ ID NO: 23801
  chr9:139410895-139410925
  hypo

SEQ ID NO: 164013 - DNA, 30 bp, Homo sapiens; identical to SEQ ID NO: 23802
  chr9:139412389-139412419
  hypo

SEQ ID NO: 164014 - DNA, 31 bp, Homo sapiens; identical to SEQ ID NO: 23803
  chr9:139417760-139417791
  hypo

SEQ ID NO: 164015 - DNA, 30 bp, Homo sapiens
  chr9:139419829-139419859
  hypo
cctggccttgcgctccgggaaaaggtctgg

SEQ ID NO: 164016 - DNA, 31 bp, Homo sapiens; identical to SEQ ID NO: 23804
  chr9:139420230-139420261
  hypo

SEQ ID NO: 164017 - DNA, 775 bp, Homo sapiens; identical to SEQ ID NO: 78939
  chr9:139421469-139422244
  hypo

SEQ ID NO: 164018 - DNA, 31 bp, Homo sapiens; identical to SEQ ID NO: 23807
  chr9:139429159-139429190
  hypo

SEQ ID NO: 164019 - DNA, 216 bp, Homo sapiens; identical to SEQ ID NO: 46753
  chr9:139440689-139440905
  hypo

SEQ ID NO: 164020 - DNA, 31 bp, Homo sapiens; identical to SEQ ID NO: 78942
  chr9:139449119-139449150
  hypo

SEQ ID NO: 164021 - DNA, 35 bp, Homo sapiens; identical to SEQ ID NO: 78943
  chr9:139456526-139456561
  hypo

SEQ ID NO: 164022 - DNA, 30 bp, Homo sapiens
  chr9:139462378-139462408
  hypo
agcccattcgcccgccgcgcctcagtcttc

SEQ ID NO: 164023 - DNA, 31 bp, Homo sapiens; identical to SEQ ID NO: 78944
  chr9:139465108-139465139
  hypo

SEQ ID NO: 164024 - DNA, 205 bp, Homo sapiens; identical to SEQ ID NO: 78945
  chr9:139480858-139481063
  hypo

SEQ ID NO: 164025 - DNA, 417 bp, Homo sapiens
  chr9:139484034-139484451
  hypo
gcagcggctcaaagagcggaggaaatctgtggatgcccccaccgtgcgatgtcccccccgccatgtgacacacccaccatgcgatgccctctcatccactgtgatccccccacactgttcagtgctcccgccaccacgcgatgccctctcatccagtgtgatccccccacactgttcagtgctccccccaccacgcgatgcccccctccacagtgcggtgcccccctccacagtgcgatgccccctactgtgtccccttggacctctgccatctccatcaaggtgtcatctgctggtgatacctgtgccctcacccacttggttctcgggccagagttggcaccatctggggcagccaggggccctgcgaggctgctccaagttctgcaccatttcccaacccgggggacagagccc

SEQ ID NO: 164026 - DNA, 134 bp, Homo sapiens
  chr9:139490172-139490306
  hypo
acaggagtcacgctgcgaaatcatgctcacagcactcggtaaaccatgggagagggcctcggagaagatccagcgtggcgatgaaacgtaagttaaaggaatgtgtttagtggtccgttcgcgatgtcttgtta

SEQ ID NO: 164027 - DNA, 159 bp, Homo sapiens
  chr9:139497759-139497918
  hypo
tggaggtggggcttgcgcccgggtgtgcctgcctctaacgtctgcgcttctagtcatggcttttattgtccccagtaaaagagccctggacttcgggctctgtcaggtacttggggctgcgagttgtgagttggggaaacaggccgccgggaaccaaat

SEQ ID NO: 164028 - DNA, 141 bp, Homo sapiens; identical to SEQ ID NO: 23811
  chr9:139501901-139502042
  hypo

SEQ ID NO: 164029 - DNA, 418 bp, Homo sapiens
  chr9:139506142-139506560
  hypo
gcccctgcgcgtgcccggtccccactcacattgccacctgcctccggtgtggctgcgaagtcggagggaggagagagccagccaggggtgtgggcgccaagatcagagactcgcacgctgctggacggaatgtggaccggcccagctgctgggtcacctgccggcagctcccgaaacaaccagtcaccacgagacccagcaactccacccctaggtgtgcgcccaagataaacggaagctcctgtccgcacaaacacccgtgcggcttccttcactaagggtggaaacggcccgggtgcccatgggtgggtgacggatgaaccgggtagaccgtctgtacaatggaatatttatccttccgccacaaaaacagaagaaattcggacgcaggcttcagtacggacggggtttaaagttg

SEQ ID NO: 164030 - DNA, 174 bp, Homo sapiens; identical to SEQ ID NO: 78949
  chr9:139509480-139509654
  hypo

SEQ ID NO: 164031 - DNA, 30 bp, Homo sapiens
  chr9:139516735-139516765
  hypo
cccgagtgactcctccgagagccaggccag

SEQ ID NO: 164032 - DNA, 201 bp, Homo sapiens
  chr9:139517133-139517334
  hypo
agcccccaggacctgcgccctgcctcttctgcctcatcacacagacacgtggggagcagcctggatcttctcttctgtgcaggggctttgcccgggcaccgctctccctagccacggtgccgcccctgctgtctctcaggcacatcggtcggtctgcagccgcctggggcatgaaacgcctcttcccgggagcctccccgg

SEQ ID NO: 164033 - DNA, 299 bp, Homo sapiens
  chr9:139517554-139517853
  hypo
aggaggctccagccagagccccgtgatgggggacccgcctctgatgctgctgggctctcagggcagccccggccggttcccaccaggcagctcctggtgtggagagcgggcacatgcccgggcagcatcctccacagctggctgctcagaggacggggcgcctgccccacacccaccgtgggctcatgcccctcagggtcagggttcagggaggccccgtgcactcctggctctgggcccctcctcctttctccttccttctctccagtggcccacgaaggacccggggccactcctgg

SEQ ID NO: 164034 - DNA, 95 bp, Homo sapiens; identical to SEQ ID NO: 78951
  chr9:139546508-139546603
  hypo

SEQ ID NO: 164035 - DNA, 31 bp, Homo sapiens; identical to SEQ ID NO: 78952
  chr9:139570934-139570965
  hypo

SEQ ID NO: 164036 - DNA, 93 bp, Homo sapiens; identical to SEQ ID NO: 78953
  chr9:139571843-139571936
  hypo

SEQ ID NO: 164037 - DNA, 31 bp, Homo sapiens; identical to SEQ ID NO: 78954
  chr9:139579045-139579076
  hypo

SEQ ID NO: 164038 - DNA, 597 bp, Homo sapiens; identical to SEQ ID NO: 118462
  chr9:139580673-139581270
  hypo

SEQ ID NO: 164039 - DNA, 145 bp, Homo sapiens; identical to SEQ ID NO: 118463
  chr9:139581730-139581875
  hypo

SEQ ID NO: 164040 - DNA, 322 bp, Homo sapiens; identical to SEQ ID NO: 78958
  chr9:139585993-139586315
  hypo

SEQ ID NO: 164041 - DNA, 683 bp, Homo sapiens; identical to SEQ ID NO: 78959
  chr9:139586515-139587198
  hypo

SEQ ID NO: 164042 - DNA, 160 bp, Homo sapiens; identical to SEQ ID NO: 23817
  chr9:139598242-139598402
  hypo

SEQ ID NO: 164043 - DNA, 30 bp, Homo sapiens; identical to SEQ ID NO: 23818
  chr9:139604153-139604183
  hypo

SEQ ID NO: 164044 - DNA, 30 bp, Homo sapiens
  chr9:139604619-139604649
  hypo
ccctttcttgggctccgggaccctcgctgg

SEQ ID NO: 164045 - DNA, 30 bp, Homo sapiens
  chr9:139605203-139605233
  hypo
actcagagcacgatccgggctggtggcagt

SEQ ID NO: 164046 - DNA, 1174 bp, Homo sapiens; identical to SEQ ID NO: 118464
  chr9:139606528-139607702
  hypo

SEQ ID NO: 164047 - DNA, 284 bp, Homo sapiens
  chr9:139611136-139611420
  hypo
ccaccatgcccggcccgcctgcgtctcttaaaggcttccaggatgtggctgcgttgggctcctagggccccgttctccaaacctggttctccttgtgggtctggtccggccggaacttcccaccaatctgcattacggtggacggtgggaaaaataggggcagtgtctctcgcggtgggcgcgctcacctggccttgtgcggaggtgacgatgttatgaaatgagatcaggataggaagggtttgtaaaaatatcttcattcggccaggcacagtggctcacac

SEQ ID NO: 164048 - DNA, 475 bp, Homo sapiens
  chr9:139617708-139618183
  hypo
tccagcagtggctggggcctgcgtggccttggcgggccaagatcgccatcggcctgctggagttcgtggaggagctcttccacggctcttacgggactttctacatgtgtgagaccacactggccaacgtgggctacacagccacctacgacttcaagatggccgacctgcagcaggtggcacccgaggccaccgtgcgccgcttcctgcagggccgccgctgcgagcacagcaccgactgcacctacgggcgcgactgcagggccccgtgtgacaggctcatgaggcagtgcaagggcgacctcatccagcccaacctggccaaggtgtgcgcactgctacggggctacctgctgcctggcgcgcccgccgacctccgcgaggagctgggcacacagctgcgcacctgtaccacgctgagcgggctggccagccaggtggaggcccatcactcgctggtgctcagccacctcaa

SEQ ID NO: 164049 - DNA, 348 bp, Homo sapiens
  chr9:139630436-139630784
  hypo
acccaccaggtggcacgctgcggagggaggtgcactggcacgggtggtgtgtacgcgtctaacccctcctgctgcccctccctccctgcccgtgggaccccaagtgctcccctctccccattctcccagctccttcccttcttccttcttctcctccccactgacaggattgagttgtggaaatggctgcttccctgggcccagggaaggggggcgcagagcccgagcccccgggacagagccaggcccagggaaggggggcgcagagcccgagcccccgggacagagccattgccctcaccctggtgaatgggtggttcagaggcccacactcggggttctcaaggc

SEQ ID NO: 164050 - DNA, 30 bp, Homo sapiens; identical to SEQ ID NO: 23819
  chr9:139634181-139634211
  hypo

SEQ ID NO: 164051 - DNA, 253 bp, Homo sapiens
  chr9:139638345-139638598
  hypo
actgggttgggcacgcgtcttctttgcagctggctctatggttctgtggcttggcccttggtgacgacccccgccatcctccccgcaattccccggctggcccccagtcaaaagcatccttggtttgctgtggaatcgctttattctgagctggtgctgggccccgggagccgctgagcgaggtgggtggacactggccgaggtcacaggaccctgtgggcgccatccctactggggacgcagcactcactga

SEQ ID NO: 164052 - DNA, 31 bp, Homo sapiens; identical to SEQ ID NO: 23820
  chr9:139641115-139641146
  hypo

SEQ ID NO: 164053 - DNA, 30 bp, Homo sapiens; identical to SEQ ID NO: 23821
  chr9:139641387-139641417
  hypo

SEQ ID NO: 164054 - DNA, 32 bp, Homo sapiens; identical to SEQ ID NO: 78965
  chr9:139666884-139666916
  hypo

SEQ ID NO: 164055 - DNA, 19 bp, Homo sapiens
  chr9:139684617-139684636
  hypo
ccaccgcacctggccaaga

SEQ ID NO: 164056 - DNA, 31 bp, Homo sapiens; identical to SEQ ID NO: 23822
  chr9:139687078-139687109
  hypo

SEQ ID NO: 164057 - DNA, 87 bp, Homo sapiens; identical to SEQ ID NO: 78968
  chr9:139687830-139687917
  hypo

SEQ ID NO: 164058 - DNA, 30 bp, Homo sapiens; identical to SEQ ID NO: 23823
  chr9:139693181-139693211
  hypo

SEQ ID NO: 164059 - DNA, 858 bp, Homo sapiens; identical to SEQ ID NO: 78970
  chr9:139698437-139699295
  hypo

SEQ ID NO: 164060 - DNA, 31 bp, Homo sapiens; identical to SEQ ID NO: 23825
  chr9:139700525-139700556
  hypo

SEQ ID NO: 164061 - DNA, 42 bp, Homo sapiens
  chr9:139703928-139703970
  hypo
tatgaaagttggtgtccgggccgggcacggtggctcatgcct

SEQ ID NO: 164062 - DNA, 341 bp, Homo sapiens; identical to SEQ ID NO: 78972
  chr9:139704089-139704430
  hypo

SEQ ID NO: 164063 - DNA, 31 bp, Homo sapiens; identical to SEQ ID NO: 78973
  chr9:139705002-139705033
  hypo

SEQ ID NO: 164064 - DNA, 30 bp, Homo sapiens; identical to SEQ ID NO: 78974
  chr9:139705453-139705483
  hypo

SEQ ID NO: 164065 - DNA, 252 bp, Homo sapiens; identical to SEQ ID NO: 23827
  chr9:139717804-139718056
  hypo

SEQ ID NO: 164066 - DNA, 30 bp, Homo sapiens; identical to SEQ ID NO: 23828
  chr9:139718360-139718390
  hypo

SEQ ID NO: 164067 - DNA, 30 bp, Homo sapiens; identical to SEQ ID NO: 23829
  chr9:139719277-139719307
  hypo

SEQ ID NO: 164068 - DNA, 273 bp, Homo sapiens
  chr9:139721705-139721978
  hypo
agcagccagggcggccggtggggagtgcattggagggggttgaggtctcttgggcacctggtgagttctcaagggtgagaggaagccgaggccatcaggcttagctgacgctgcatggggcaggctgccaagagggaggctgaatggagcagcctcaggtgagccgacaatcctcacctccgcctggtcagccaggacccggctcccctccagtcccgcctgctttccccaaagcagatccagccagtctcaatggctcgcccggggggtgct

SEQ ID NO: 164069 - DNA, 30 bp, Homo sapiens; identical to SEQ ID NO: 78978
  chr9:139723868-139723898
  hypo

SEQ ID NO: 164070 - DNA, 101 bp, Homo sapiens; identical to SEQ ID NO: 78979
  chr9:139724684-139724785
  hypo

SEQ ID NO: 164071 - DNA, 30 bp, Homo sapiens; identical to SEQ ID NO: 78980
  chr9:139726203-139726233
  hypo

SEQ ID NO: 164072 - DNA, 30 bp, Homo sapiens; identical to SEQ ID NO: 78981
  chr9:139727383-139727413
  hypo

SEQ ID NO: 164073 - DNA, 203 bp, Homo sapiens
  chr9:139729607-139729810
  hypo
tggatgctgaggcagctggatcacctgaggtcaggagttcgtgaggctccggcgtttgtatttcatttgaatctaaagtgagcagccacagggacccgcagctcatcagaccagcctggggttccaggccaggagggcagtggtttgctccagagccagctgcttgtgggtgtgggacggtggcgacgcgtgcaccggggatg

SEQ ID NO: 164074 - DNA, 197 bp, Homo sapiens
  chr9:139730160-139730357
  hypo
ccctgctcaggcctgcgtgctccctttctgcagagggagacgctgttgcggcagctggagacgaaccagctggacatggacgccacgctggaggagctgtcggtgcagcaggagacggaggaccagaactacggcatgtatgtggccggacccgcccgtgcgggcggtgtgggggctgcgggcgtggccgtggtgca

SEQ ID NO: 164075 - DNA, 31 bp, Homo sapiens; identical to SEQ ID NO: 23830
  chr9:139731838-139731869
  hypo

SEQ ID NO: 164076 - DNA, 31 bp, Homo sapiens; identical to SEQ ID NO: 23831
  chr9:139732505-139732536
  hypo

SEQ ID NO: 164077 - DNA, 667 bp, Homo sapiens
  chr9:139734901-139735568
  hypo
gctggaggctttcctggggggcggggccccgggcggccgccaccctgggggtggcgactacgaggagctctaggccggcgtgggcagtggccgccctggggcggggggcgtgcctgtcactgcctggggaggcatttgcctctgtaccatcgcctttgccgctgccccgtggctgccgtgtgcgcttctgagctggaagaggccgggcattggtggtccccaggctgggccctgcaggtgctgggccttcaggcccagtgtgagcctgctctgcaagaagggaggggacagctggcttcagccaggctcggtggacaccctggccctctcggggcagagccgccagtgtttctcagggatgtgactgaggcccaggagggacctgtgagggtctgtttacagaggctgggcaggggccgcttggctgtggggtgtgcgctgccccggcacctgcttgccctccgcgctcatctggggccgcagcatgcctatggttccgcttccggccgggagccctgaacacgggtgtgcagactcaccctaaagggcggcccaggccccacgctagaaggctggcgagaccgaaggcagcatgtgaggcctctcctgggagtgggggttgtgtttcccacagtggcctcagctgcgcccccgctcaggtgagccc

SEQ ID NO: 164078 - DNA, 43 bp, Homo sapiens; identical to SEQ ID NO: 78986
  chr9:139754946-139754989
  hypo

SEQ ID NO: 164079 - DNA, 30 bp, Homo sapiens
  chr9:139757086-139757116
  hypo
gctcagagaaccatcgccaacagcacaggc

SEQ ID NO: 164080 - DNA, 30 bp, Homo sapiens
  chr9:139757351-139757381
  hypo
actcaccaatggcccgctcgattttgccaa

SEQ ID NO: 164081 - DNA, 30 bp, Homo sapiens
  chr9:139761797-139761827
  hypo
aactgtgaaaacatcggttgcaaaaatgaa

SEQ ID NO: 164082 - DNA, 30 bp, Homo sapiens
  chr9:139775143-139775173
  hypo
cccgggaccaaggggcgagagctaaaaaag

SEQ ID NO: 164083 - DNA, 30 bp, Homo sapiens
  chr9:139779308-139779338
  hypo
aaccctttctcatcccgagctggctgctgc

SEQ ID NO: 164084 - DNA, 30 bp, Homo sapiens
  chr9:139779757-139779787
  hypo
tccttctctgcaaagcggggtgaaaggtct

SEQ ID NO: 164085 - DNA, 43 bp, Homo sapiens; identical to SEQ ID NO: 78987
  chr9:139782733-139782776
  hypo

SEQ ID NO: 164086 - DNA, 42 bp, Homo sapiens; identical to SEQ ID NO: 78988
  chr9:139782895-139782937
  hypo

SEQ ID NO: 164087 - DNA, 278 bp, Homo sapiens; identical to SEQ ID NO: 78989
  chr9:139787442-139787720
  hypo

SEQ ID NO: 164088 - DNA, 264 bp, Homo sapiens
  chr9:139793000-139793264
  hypo
ccaaggctccctgaagctctgcgattctgcttctctgagtcttgaccgcaggtcagtggggacccggcccctcaccatcgcctgctactgatcaccattggtttggttttgtctcgaggactgttctggaattgaggtgtaacgtgctgtgtgttcttccttagggctttgttcgcgggggtcacagctctcatggctgcagctagcgtgaccccccctggctccctggagttgctacagcccggcttctccaagaccctcctg

SEQ ID NO: 164089 - DNA, 392 bp, Homo sapiens; identical to SEQ ID NO: 78990
  chr9:139794873-139795265
  hypo

SEQ ID NO: 164090 - DNA, 151 bp, Homo sapiens; identical to SEQ ID NO: 78991
  chr9:139798423-139798574
  hypo

SEQ ID NO: 164091 - DNA, 30 bp, Homo sapiens
  chr9:139801343-139801373
  hypo
tcctgtgactgctgcggcttcccaacctta

SEQ ID NO: 164092 - DNA, 30 bp, Homo sapiens; identical to SEQ ID NO: 78992
  chr9:139802029-139802059
  hypo

SEQ ID NO: 164093 - DNA, 30 bp, Homo sapiens; identical to SEQ ID NO: 78993
  chr9:139802588-139802618
  hypo

SEQ ID NO: 164094 - DNA, 140 bp, Homo sapiens
  chr9:139803482-139803622
  hypo
ctgtctcaaaaaaaaaaaaaagaaaaaaaatttttaaaaaaagtttgtttttaggacaaaaaagcatttttgtcttagaaaagtctaaatgcatcaggtagagagtgcggtggtgggtgtgcgtccgtcctcgccaggcc

SEQ ID NO: 164095 - DNA, 722 bp, Homo sapiens; identical to SEQ ID NO: 78994
  chr9:139803919-139804641
  hypo

SEQ ID NO: 164096 - DNA, 350 bp, Homo sapiens; identical to SEQ ID NO: 23837
  chr9:139805156-139805506
  hypo

SEQ ID NO: 164097 - DNA, 443 bp, Homo sapiens
  chr9:139809648-139810091
  hypo
ttttgtaaaatggttacatggcaccaaagcgaaaactacaaaaaaggtgcattctgagacgtcagagggaaatgtgtcaggctccccgtccgcagcgccgtgcggtcgttcagaaatttgcattcccataagcattgtgggagcaccgtctcccgagacttgccagcacagtgtggtgtgaaggttggacgtgccactgtgatgtgtgagaaacacatcagtcctctgtatcgggggtccacgccgtggatccagccaaccgtaggttggaaatgttcaggtaaaaatgcactgaacacgcgcggacattttttattgacacagcgttcacgttgtattggtcatgagtcaccgagagctgatttcaggtatgagggagggtgtgcttaggctctgtgcaaacactctgccatcttccatcagggactcgagcatccttgggt

SEQ ID NO: 164098 - DNA, 143 bp, Homo sapiens; identical to SEQ ID NO: 23839
  chr9:139814739-139814882
  hypo

SEQ ID NO: 164099 - DNA, 31 bp, Homo sapiens; identical to SEQ ID NO: 23840
  chr9:139817151-139817182
  hypo

SEQ ID NO: 164100 - DNA, 337 bp, Homo sapiens
  chr9:139818343-139818680
  hypo
tatctacctgaacggcgacggcaccgggcgaggaacacacctgtccctcttctttgtggtgatgaagggcccgaatgacgccctgctgcggtggcccttcaaccagaaggtgaggccgtccctgcaggcttcgctagggccgcacctgggagtccctctgggcagtgcagcttctgtggtgcagggttgtgcgggacaaggtggcttgggctcgctggaccaggtgtctgcagcaggcacgtcaccctgtgatgctgtgtcacgcggtggagagctctggcagtttgttgtttccatgatttctgagcactggtccgtgacacaagcacctggcttc

SEQ ID NO: 164101 - DNA, 148 bp, Homo sapiens
  chr9:139821631-139821779
  hypo
acggagctgaccgacgggcattgtctgtgttccgtgagtgtgtactgggcctaaagagcaagcattgcagagccctgctgttccctttcccggcctcacctcagctccccaggccacgtggcgggaattgaggcgttccggttctctt

SEQ ID NO: 164102 - DNA, 70 bp, Homo sapiens
  chr9:139822246-139822316
  hypo
catcgctgtcacgtgcgtttctctgatgactcggcggagtcaggcgtctttaccacgcttacctctccct

SEQ ID NO: 164103 - DNA, 196 bp, Homo sapiens; identical to SEQ ID NO: 79001
  chr9:139833901-139834097
  hypo

SEQ ID NO: 164104 - DNA, 2624 bp, Homo sapiens
  chr9:139834952-139837576
  hypo
ccacagcagcgtgaccggccgctcccaagccccgggcgcacaaccacagccaggagcagcccctgccaccactgggccaccgtccagggccccacaggaccagccgaaggtgccccgggccgaggccagctgggtcaggtgtacccctagcctggggttgagtgaggagcggcacccccagtatcctgtgtaccccaagttgcccaggaggccgagggggccttgggctccatctgcactggccaccccgtgccaagcatcacagctgcgtgagcaggtttgtgtgtgagcgtgtggcggggcctggttgtccccttcctaaggcgtaactgctataagcatctccacctctcccgctcgggaaaaagccacagagcctggcgatgtcctcaaggggtcccggtggctccagtgcacccagcacacctcagcgcctctggctggcaagccaggagaagaaggtgcgaggccgtgggcgaggtgcctggaggacgcgcatggtgcgtggggagcgccaggctttgatggtggcgtcgtcgctggccgtgagcagcagctcctgctcctggggactgaagaccactgagttgaccacatcctcgtgccgcagcctggccagacagatgttgtagtggcggtcccagatgtagccgtgccggtcctccgccccgctgcagaacagcgcctgggtgagccggccgcccgcccgctgctgcccacacccgccctgcaccacgccgcgccctgcacctggccacgaagtccctgctgacgtccaggaagatgaagaagcactcgtcgttgggcgtgtaggcgcggtgcgcacgcagagcccgcctcacctcccgcatggtcttgaggtcgaacaccagcaggtcaatctcctccgcgattggtggcggctgcatggggtcggccaccaccgcaccgttgggccaggcgcggctgttcacgtacaggtacctgggcgaggggcactgtgctaggtgtgggccgcctgcgggcaccccgcctgggacactggcaagaggcccacctgttgtcgggcgacaggcccatgccgatgatgtgtccgtgtatgtctatgacgtggtccagcgcgtcgaagaaggcatcggagccccggccctcacccagcacgggccctgccgtggtcatctggtgtggcaggatctgcttgatgcctgcagggagggctacggtgagggtccctgtccaatgccccaaggacatcactccagggcagcttcctacctcagtggtgtctctggggctgtgagcaccacagaggtccgtgggcactgcctgctccgggggccccagacctgaatcaggcccgtcggttgcttgctggccagcggccctgcctgcgtttgttttcactgctcatcccacaggccccaggtctgggcttgtgaccccaggggcgagtgaacgatcccagctttgcctgtggacttgcttgctgtctgcccctcaggacccctgcccggcctcccccaagctcctaggaccgaggcgggcagcatggcggcaggggtgtaccgatctggtgtggggagtaggtgaggcagccagtggtgaagatgaggtacttgctcttggcgcctgtggcactgcgctcgggtggcttggtgtggccctgggccagcagctcggccaccttggtctctagcatgcgctccgacagctgtggctgcgcccgcccctccagcacgcggtccagaaagtgccgcaagccctccttggcgtgggcgggggccgggccagccaccacctcctcgttgtcgctgcccaggtcaaagatgcggcagggggacgtggccgggtcaccggcttccagcagcaggtcagggctgtcgaagcggctgcagtcggccaccatcaccgtgcggacggtgctggcattgaggttctggatcttgaacagccgcttcaccacgttgacgttctctgactccacatcctgggggcgggggcacgtgccaggtgggcgccgggcgccaggccccaggagggcagccccgcccctagccccgcacgcacctggaaggcattgttgagccacagcaccgagcaggaggtgatatctccgatgcggtgcaggttccccgagatgaggctggtctcggtgagccaacagccaaacacgtcatagggcttgttccgcacgcgggacagcagcgcgaaggagtctgtggggaggccggggctggacaggctgtcggcgtggggcgggggcagggtcaacccgccgcccgtgctcacctaggctgatgacagcaatctcgccggatgaggagttgtgcggccccaggaacacccccgaggccagcagtagcgagtcgtccttgttgaactgggagaactgggtgtagctccagttgtagggccgcatgtccgcgctgtgcagcagcgagatggtcaggtcgttgctccagatctgttcggcaggggcggctgtagtgatcgcctggccaggtcgcggggcgggggcctgctactacacagccatgaggccccagctctgccagccctactcagaggccaccagggagcagggaccccttccagccactgtcatccactcggggggcattggtatagagcggaggagcctgccc

SEQ ID NO: 164105 - DNA, 742 bp, Homo sapiens
  chr9:139846908-139847650
  hypo
cggaaggagaagcagccggctgggtctgagtgcagggagaggctggtggctgagcaggcctggggatgctgcccagagagccaggaccagccgtgcttccaggagcccccaggcgggcccctgacctccagcagaggagggcccagcgcagaccttcctggcacccattccctgccgtcagcccagcccatcgctccctctgtgcgtgaggggaaacaggctcgggaaggccgcacagccactggccagggtcaccatgtccctgccagacccagagtaggctctggttcttgccagtgtccctggcgccggcccagccaggagcactgctctgtgaggggtccagaagctgccagggagggcgggagggggctcctgaccctgcccactgccacccctgcccaccgccgcccctgcccaccaccgcctctgtagttccagggggaatggttcgtcctgggcctggcgggcaacagcttcaggccggagcacagggcgctgctgaacgctttcaccgcaacttttgagctaagtgatgatggccgctttgaggtgtggaatgcgatgactcggtgagtggctgtccctgccgttccaagcgggtgaggaggatcccgggcctgggtcccagccgccagtggctcaggtgcgccatgggccctgtcccagcacaggcagcttcatgactctgcctgccaatgaccaaacccagctggggagtatacaaaaaagtgtgggcagc

SEQ ID NO: 164106 - DNA, 30 bp, Homo sapiens; identical to SEQ ID NO: 79004
  chr9:139848030-139848060
  hypo

SEQ ID NO: 164107 - DNA, 24 bp, Homo sapiens
  chr9:139856856-139856880
  hypo
caccttgcccggccctcaaattca

SEQ ID NO: 164108 - DNA, 31 bp, Homo sapiens
  chr9:139858923-139858954
  hypo
gcagaggaaggagactcgggccacacccagg

SEQ ID NO: 164109 - DNA, 248 bp, Homo sapiens
  chr9:139873672-139873920
  hypo
aggaaaaaccagtgtgagacccgaaccatgctgctgcagcccgcggggtccctcggctcctacagctaccggagtccccgtgagtggggcctccaccggccccctgggcccagcctgggggcgacacttgccgggacgactctgggccagccccctgccgcggagatccatggggtgggaggtgatggctgccccaccagcgtcagaggcaaaggccaggcctgggcgtgactacccatgcacaagtg

SEQ ID NO: 164110 - DNA, 102 bp, Homo sapiens
  chr9:139885961-139886063
  hypo
gaggaataccatgcgcgggacagagagcgcagaagccttcttccctggagatcgctctgtactgtgacttctttttttgtttgtttgagacagagtctcgct

SEQ ID NO: 164111 - DNA, 350 bp, Homo sapiens
  chr9:139888785-139889135
  hypo
ggggagcgcctgccccgggacaggattgaggaatgtgccagcccccatccacctggggcaccccgccccaccccggcctgactggtttgggagcccagtccggtcctggagatccctgaggccaccggttgcaggaggcctggagtctgcgccttcttagcgtggaggatgggaccggcccgacccccggcgctcctgcccctgtggttctgggctatcgggctgagcgtcccaccctggggtttggggatgggaagtgatcccgagacctctggcccttcagatgtcaggacaccctcactcccgacaaagatgcctttattgggcgacagacgcggggtggggcgcta

SEQ ID NO: 164112 - DNA, 228 bp, Homo sapiens
  chr9:139901956-139902184
  hypo
ggactgacccagctccgcccacagcccgctctcggcatcagccttcatcgtaagagagaaaagctggttccgaggccgggcaggagaaaggccagcagtgcctggtccagccggcgtcgccttgggcggtgagcagtgccaggcaggggcgaggggccgggcagaccccgaggctttaaggcaaagcagggcaagggtgtacgcagcccgggccgggtcagcctttgg

SEQ ID NO: 164113 - DNA, 754 bp, Homo sapiens
  chr9:139902478-139903232
  hypo
cacttgtgctggcccgccccggccctcctgcaggctgggcctggacgcagggtctccccacgagctccctctgtgtctgggctctcccgggcctccgtctgccgagtctgggggccactgagtctacatcggtcccctgttccccggctctggtcccctctgccccacccttgctctgtgcccctcaaagactctagcaagtctggaccatgcagttacgtctctccaggcctatctgcaagtgtccctcgcccactctgcccccttgacctctggacagcaagcatcctggggccagttctcccccgaccccacccgcggctggagccaccaggcagcctgggtccagtgggcagagccctggacagccatgagagcagcctgctcacccgctcctcctcgaagctgatgaggccctcgtcctccgtgtccaggtcctcgggctcgtctgccacaagtgcccggagctccgtgggggcagaccggggccggagcaggctgagcaagcagccgagaggggactgcagtgcggatggcggctccgtctcctgctgctccaggttgtcactctgcttcttggcaaagttcacgaacacctggtgggtggcgcaggcgtgtggggagggggctggtctggggtgaggaggggcagggcgggtgaggggaggggcaggtgtggtgcgcagtgcccttggggcgctcacattgtccagtgtggtctggctgaccgagtagtcctcgatgcccagcacgc

SEQ ID NO: 164114 - DNA, 55 bp, Homo sapiens
  chr9:139903846-139903901
  hypo
ccaggcaccgcaggcgaccgttcaccatgatggccagccgcgtgcacagcgcctc

SEQ ID NO: 164115 - DNA, 445 bp, Homo sapiens
  chr9:139904257-139904702
  hypo
gccgtggagagcttccgcttgttgccgccgctgtaggtgccagccggcttgtctgcgtacttggtcagctccagcttctccagagcccacttcaccacctggccagggaacgcaggtgtcagtggaggcagggccacccagcgtgctgactccctgccccgccccacagatcctcacccgggcctcgtccttccaggagatcccacgcagccgcgtgtacagctgcaggtgctcccgggccgtgagctcgtcgaacagcgcgtcacactgcgggcagtagccgaggctctgctgcacctggagcagctccttcagcacgctggggacacggcagctgtcagcgcgtgaggacgcggcggccccgcccacccagggctcccgccccacctgtgtccattgacgaaggcctcgccccccgtcgtgctctcgtcgccggtcagcatct

SEQ ID NO: 164116 - DNA, 30 bp, Homo sapiens; identical to SEQ ID NO: 79012
  chr9:139905750-139905780
  hypo

SEQ ID NO: 164117 - DNA, 98 bp, Homo sapiens; identical to SEQ ID NO: 79013
  chr9:139906299-139906397
  hypo

SEQ ID NO: 164118 - DNA, 30 bp, Homo sapiens
  chr9:139908738-139908768
  hypo
tgcagcgatgcctgcgactgggtcagctcc

SEQ ID NO: 164119 - DNA, 172 bp, Homo sapiens; identical to SEQ ID NO: 79014
  chr9:139909004-139909176
  hypo

SEQ ID NO: 164120 - DNA, 30 bp, Homo sapiens
  chr9:139910205-139910235
  hypo
gatggcgcgagagccgcccacgaaggcgat

SEQ ID NO: 164121 - DNA, 44 bp, Homo sapiens; identical to SEQ ID NO: 79015
  chr9:139910703-139910747
  hypo

SEQ ID NO: 164122 - DNA, 30 bp, Homo sapiens; identical to SEQ ID NO: 23850
  chr9:139912554-139912584
  hypo

SEQ ID NO: 164123 - DNA, 410 bp, Homo sapiens
  chr9:139913332-139913742
  hypo
gctcggaggccccaccgctcaccttggacatgaactggatccagccgcaggccgcgttgtcaatggtatccagctgctgcaggagggccatgccactgggcagcgagaagttgtcctgtctcagggccggcggcagctcatccagtgacaggttcagtgcctcggggtgcagccgcagctctgctacatacttggggtggaggggcggctcagagggggacctgcgcctgccgagccgggcagagaggggctccccacaccacccacagccgcctccctcgcgggcacccttggcacctgctgcagccagcgcaggtgttgctgcagcctgccctgctccaggaagctgcggatctccgccgagatgttgagccagacctgggcatagtgagtcacgttgcccacaaaag

SEQ ID NO: 164124 - DNA, 30 bp, Homo sapiens; identical to SEQ ID NO: 79018
  chr9:139915035-139915065
  hypo

SEQ ID NO: 164125 - DNA, 30 bp, Homo sapiens; identical to SEQ ID NO: 23852
  chr9:139915373-139915403
  hypo

SEQ ID NO: 164126 - DNA, 141 bp, Homo sapiens
  chr9:139915973-139916114
  hypo
ctctcaggcacagtgaggatccggcccagctcccccgagcccggcgtgcaggtgagctgctccaggagggcaggagccagcagcagctcctgggatgggcacaggggtccgtggagccacggcaaggactttgtccccaac

SEQ ID NO: 164127 - DNA, 713 bp, Homo sapiens; identical to SEQ ID NO: 79021
  chr9:139934674-139935387
  hypo

SEQ ID NO: 164128 - DNA, 31 bp, Homo sapiens; identical to SEQ ID NO: 79022
  chr9:139945423-139945454
  hypo

SEQ ID NO: 164129 - DNA, 532 bp, Homo sapiens; identical to SEQ ID NO: 46769
  chr9:139948372-139948904
  hypo

SEQ ID NO: 164130 - DNA, 31 bp, Homo sapiens; identical to SEQ ID NO: 7141
  chr9:139964409-139964440
  hypo

SEQ ID NO: 164131 - DNA, 30 bp, Homo sapiens; identical to SEQ ID NO: 79025
  chr9:139975268-139975298
  hypo

SEQ ID NO: 164132 - DNA, 19 bp, Homo sapiens
  chr9:139978920-139978939
  hypo
gggccggttgctggcatct

SEQ ID NO: 164133 - DNA, 30 bp, Homo sapiens
  chr9:139979140-139979170
  hypo
caaggaatccccccgcggtcccatcccact

SEQ ID NO: 164134 - DNA, 266 bp, Homo sapiens
  chr9:139990641-139990907
  hypo
agctcgcagacaccccgtgatttcctgtgtgaccaatttctctacagaagacacaaagacacatccagcggggaccacctcacctgcagattagacccccaagccaagacctgaaggatgggacccaggaggaggccacaaaaaggcaagaagcccctgtggatccccgcccggaaggagatccgcagaggacagtcatcaggtacagagcgcagggcaggctgcacgccgccgctcagggcttgatgttccgaaaaacaagattg

SEQ ID NO: 164135 - DNA, 86 bp, Homo sapiens
  chr9:140001322-140001408
  hypo
gagtcatgatgtcaaaaagaacgaaatcctggccatggcgcccacgtggaggccctgggtggaccgtggctgcctggccaggcctg

SEQ ID NO: 164136 - DNA, 30 bp, Homo sapiens; identical to SEQ ID NO: 79027
  chr9:140001715-140001745
  hypo

SEQ ID NO: 164137 - DNA, 30 bp, Homo sapiens; identical to SEQ ID NO: 23856
  chr9:140007684-140007714
  hypo

SEQ ID NO: 164138 - DNA, 869 bp, Homo sapiens; identical to SEQ ID NO: 118497
  chr9:140023901-140024770
  hypo

SEQ ID NO: 164139 - DNA, 132 bp, Homo sapiens; identical to SEQ ID NO: 46775
  chr9:140024786-140024918
  hypo

SEQ ID NO: 164140 - DNA, 116 bp, Homo sapiens; identical to SEQ ID NO: 118499
  chr9:140024956-140025072
  hypo

SEQ ID NO: 164141 - DNA, 377 bp, Homo sapiens
  chr9:140030219-140030596
  hypo
cgcccggctgggaggtgttctttctagacctcacctgggagtcacgcaccattacctctaccacgttccatttgtaagtgcaggccatgtatgcctggagggaaatcaatcttctgccgaacagggtggtgttcaaagcaccaccggctccaccacactctgccttttattctgcattctgtttcttgagaccacgcgccgctacgtggaatggtctcaggagctcatgtgtttgtgctccatgaagtcagaaagtccagcctttgcactgccacatacccacccttagaacagcgtctggtacacggtaggtgctcagtgaatgtgcctagtggagtaaacgtgcggtgcggtgctgcctgcggtcggatctgtgg

SEQ ID NO: 164142 - DNA, 30 bp, Homo sapiens; identical to SEQ ID NO: 118501
  chr9:140032934-140032964
  hypo

SEQ ID NO: 164143 - DNA, 206 bp, Homo sapiens; identical to SEQ ID NO: 118502
  chr9:140033284-140033490
  hypo

SEQ ID NO: 164144 - DNA, 8 bp, Homo sapiens
  chr9:140033618-140033626
  hypo
cgtccgga

SEQ ID NO: 164145 - DNA, 317 bp, Homo sapiens; identical to SEQ ID NO: 118504
  chr9:140033762-140034079
  hypo

SEQ ID NO: 164146 - DNA, 209 bp, Homo sapiens
  chr9:140041683-140041892
  hypo
tccatgcagctccagcgccacacacacacctggacacgtactcaggtgcgctcctcacacacacacctggacacgcacaggtgcgctcctcacacacacacctggacacacgctcaggtgcgctcctcatgtgcatgctcacccttacttgcgccagccagcacagacacacatgcacacacgcacacacgtgcacaggcacacacatg

SEQ ID NO: 164147 - DNA, 79 bp, Homo sapiens
  chr9:140071513-140071592
  hypo
gacagggacaggtggggcctccgggaaagggctgcggacccgcctgtctgaaggcttcggcactggtgagctgcataag

SEQ ID NO: 164148 - DNA, 30 bp, Homo sapiens
  chr9:140075208-140075238
  hypo
ctggagatggccagcgcgtcacaggcctca

SEQ ID NO: 164149 - DNA, 34 bp, Homo sapiens; identical to SEQ ID NO: 79037
  chr9:140078704-140078738
  hypo

SEQ ID NO: 164150 - DNA, 30 bp, Homo sapiens
  chr9:140079603-140079633
  hypo
tgggaggagcctcacggccacccaccctgt

SEQ ID NO: 164151 - DNA, 88 bp, Homo sapiens; identical to SEQ ID NO: 79038
  chr9:140081899-140081987
  hypo

SEQ ID NO: 164152 - DNA, 30 bp, Homo sapiens
  chr9:140086036-140086066
  hypo
tcagccaaggaccacgcagtggggacacca

SEQ ID NO: 164153 - DNA, 31 bp, Homo sapiens; identical to SEQ ID NO: 23858
  chr9:140088446-140088477
  hypo

SEQ ID NO: 164154 - DNA, 72 bp, Homo sapiens
  chr9:140089725-140089797
  hypo
caagtgtggccccagcgccaggcacggcctccacccatgagaaagctgagggaggagcgtccaggccgctcc

SEQ ID NO: 164155 - DNA, 30 bp, Homo sapiens; identical to SEQ ID NO: 79040
  chr9:140096434-140096464
  hypo

SEQ ID NO: 164156 - DNA, 30 bp, Homo sapiens
  chr9:140103619-140103649
  hypo
accacacccggccaaaacttggcatgttta

SEQ ID NO: 164157 - DNA, 151 bp, Homo sapiens
  chr9:140106338-140106489
  hypo
ctgatcaagctgggaggacaccgtggaaggcacggtgtggaaccagaggatctggaccctgttggctcgaggtcctgcagccacggaaggagggggatgtgtctcagcgacactggaacctcagagggccgagtgtgagagcccttgggat

SEQ ID NO: 164158 - DNA, 1509 bp, Homo sapiens
  chr9:140107153-140108662
  hypo
gcgcctcagggccctcgcagtggtactggcttctccacaacgctccctggtgggcaccccaggcttcacgctgcggggagggcacagaggggagcaggcagggtggcaaagggctgggctccagccacgctgacgtcacacaggcctacctggcgccggtccccacttttacaaaaaggcgtgctgtgaagtgttgacgactttgagcctggaggaggaccccgtatgctcctgccaccccagaggccacctctgccttttctcctgggcattttcacagtgctcctctgcaccctaagcaaggagtggcatgttcagtgtgcaaatggcatctttagaccccacaacggtgaaaaccccgactgtccacgtagggcccaggtccgctgagcaccgagcatcaaaagccgtttgcatagccaggtgtcagtcatttcagatgaaaaagaacgggaagatcggagacagctccccccggttctgccgggaggttttgttccgtgcgtgacgtaggtccgtgcatgacgttgtttcctgcgtgacgttgttctgtgtgggacacagtgttcgttcaagagagggagggaggccgctgccgacagcgttcccagggaggagcgtgacccagagccagtcatgcctcggaaccagagtgagaagagaaactgacccccgggaagatgcctggctctctccccagcacagagtttctcagctgaggagtgacccacatcttggctgggggcctggaggcctcagctgcctcaagtccctgcccagggatgagggcccatcagtgggacgaggccgcctgctcccacccacacaggctcattctctgcgagcagaggacctgctgcttggcaccctggcagctgccctggtctcggcagcccctggcgtgtggaggccctgccccctcctagggtgcggccagcgtggagtgtgttttccacccgagggaggccctccccaggctccactcttcgcccgggctccactctcccgggttccactctgcctgggcaccactctccgcccgggctccagcccaggaccagcctcactgtctccacaggttcaacttcgtggccaagaagctgcaccgacggctactgcagcttgggggcagcgccctcctgcccgtgtgcctgggcgatgaccagcatgagctggggtgagtctgcgggcgtggtacccgcctccacagtctggtctggccacacgcagggtccgctcaggccagcgcacgtgctccctcccaggcccgacgctgctgtggacccctggctgcgagacttgtgggacagggttctggggctgtacccgccgcctccgggcctcactgagatccctcccggagtcccgtgagtgtgggccccgggtcacccacaggcgcagcagacccaacctggcctggggacctcgccctgggtccctcccgtgtgggtgggcggcccctggggagtgggtcctggtctgaccagcgtgccctcccacagcctgccc

SEQ ID NO: 164159 - DNA, 630 bp, Homo sapiens
  chr9:140110573-140111203
  hypo
tccgggagctggggtcgcttgtgtgggaactgctggaccgccagggtgcatacttctacctggcagggtgagctggcctgcgtgcagcaggagtgggcccagcccctgagtgccaggcctcattgcgccttctgcgacctgcccctctagcaacgccaagtccatgccagcggacgtctcggaagccctgatgtccatcttccaggaggagggtggactctgcagcccggacgcagccgcgtatctagccaggctccagcagacacggcgcttccagacagagacgtgggcctgaggcccgcggctgcccgtgccccctctgacagccatcctcctgggagcccaggaaggcatccacgagggagctcctggccagcagccgtcatcctctcggaccagccagctggtcctctgggaacagccagctcccgagcacagccgcactcctgttgaccctggatcccaccctttgagcctgaccccactgcagcctctgcccagccagccctgcgctcccccaccctgacagtgagctgtgtcctcgtccccccacccccttcccagtcaaggtggtggcctgggccgctccacctcaccggtgcagtgacccaggacggcatcagcagccca

SEQ ID NO: 164160 - DNA, 121 bp, Homo sapiens; identical to SEQ ID NO: 79043
  chr9:140112977-140113098
  hypo

SEQ ID NO: 164161 - DNA, 31 bp, Homo sapiens; identical to SEQ ID NO: 23861
  chr9:140120570-140120601
  hypo

SEQ ID NO: 164162 - DNA, 31 bp, Homo sapiens; identical to SEQ ID NO: 79045
  chr9:140124090-140124121
  hypo

SEQ ID NO: 164163 - DNA, 348 bp, Homo sapiens
  chr9:140125870-140126218
  hypo
gagctggagccccttcgagtctacccctgaaactggactgggctcgcctgacaactgcctgaggtcattgtagccatccccctgtggatggagaaagggggatggtcactgaggcctgcagggcgtagagagggagggtggcggccaagggctcaattcaggggacccaggggtgtgaatccagcttgtgaggacagggccggggcaggaggaaatgtctctgacacgcgcgtcccccccagcagatctagacctgggcctgggtctgtccctgcccgaaatccatgccgagttcccttcccggcagccaggtcccccaccccactctggacgcggttgacctagtgg

SEQ ID NO: 164164 - DNA, 30 bp, Homo sapiens
  chr9:140126427-140126457
  hypo
tcttacgcctcagcccgtcctccggcctgt

SEQ ID NO: 164165 - DNA, 30 bp, Homo sapiens
  chr9:140127788-140127818
  hypo
cacccagggcgcaggcgcccgacatcctca

SEQ ID NO: 164166 - DNA, 278 bp, Homo sapiens; identical to SEQ ID NO: 79046
  chr9:140133506-140133784
  hypo

SEQ ID NO: 164167 - DNA, 181 bp, Homo sapiens; identical to SEQ ID NO: 79047
  chr9:140137587-140137768
  hypo

SEQ ID NO: 164168 - DNA, 278 bp, Homo sapiens
  chr9:140137947-140138225
  hypo
ggatgccacagccgaggaggagggcgagttcgaggaggaggctgaggaggaggtggcctagagccttcagtcactggggaaagcagggaagcagtgtgaactctttattcactcccagcctgtcctgtggcctgtcccactgtgtgcacttgctgttttccctgtccacatccatgctgtacagacaccaccattaaagcattttcatagtgtgtggtttcgctttgcccattccttccagtaggccctccgggtgctgttgccgaatgtcagggcgt

SEQ ID NO: 164169 - DNA, 30 bp, Homo sapiens
  chr9:140139116-140139146
  hypo
tggcttgcatgacgccgtctcggtaattca

SEQ ID NO: 164170 - DNA, 30 bp, Homo sapiens
  chr9:140139868-140139898
  hypo
gagggtgcggggtgtcgggcgtgaagcctg

SEQ ID NO: 164171 - DNA, 30 bp, Homo sapiens
  chr9:140140263-140140293
  hypo
ttccccacctggtagcgcagctgcggaaag

SEQ ID NO: 164172 - DNA, 73 bp, Homo sapiens
  chr9:140140639-140140712
  hypo
agtacaggcacaagacgtgtgggccaggacataggcgagggacggacccttggacacacgcagggcccaccag

SEQ ID NO: 164173 - DNA, 30 bp, Homo sapiens
  chr9:140146517-140146547
  hypo
ccgagcccgtccgtacgagagtcctcccca

SEQ ID NO: 164174 - DNA, 70 bp, Homo sapiens
  chr9:140147105-140147175
  hypo
cctcgcagtggccctcgccagcccactaccagctgctcagccggcccgccttccccgccttcagcttcag

SEQ ID NO: 164175 - DNA, 30 bp, Homo sapiens
  chr9:140151691-140151721
  hypo
tgcattttacttttcgttaaagtgatatat

SEQ ID NO: 164176 - DNA, 169 bp, Homo sapiens; identical to SEQ ID NO: 79049
  chr9:140157483-140157652
  hypo

SEQ ID NO: 164177 - DNA, 124 bp, Homo sapiens
  chr9:140166591-140166715
  hypo
cttgcgctgctggccgacgaatttgcccttgaggacttctgcagcagcctcttcgatggcttcttcctcaccgcctctccaaggtaggcctgctgggtaccatccggcccgctctgtcctctca

SEQ ID NO: 164178 - DNA, 825 bp, Homo sapiens
  chr9:140166924-140167749
  hypo
gcctcctgccccagccctgcacggccttttccaggaaggagaacgtgcaccggcacgcgctgcggctcctcattcacctgcaccccagggtggccccgtctaagctggaggcgttgcagaaggccctggagcctacaggccaggtgggtgcccgggggggctgcatctgaaggcacctggtccctaccagcccgtgtgtgcttgccaagctgcccttgtggtgcttgtgtgtggtcggtgggcacccacccctgtgccccctgggcctgcccatgcgcctcgcctgccccatggtgtggttccccgcagagcggagaggcagtgaaggagctttactcccagctcggcgagaagctggaacagctggatcaccggaagcccagcccggcacaggctgcggagacgccggccctggagctgcccctccccagcgtgcccgcccctgccccgctctgagggccctccagacctgctcgggtgctggggccatgccgagtcgcggccctgctcagccggaagaggctcccggacctggatgtacagggcagtctctcttcccggggctatggctgggcctgtcctgccgtcatggccccctgcttcctgctccttggagctggctcccggaccttgcccaccatccatgcagtggctcccagggcagagcctctccttgtactttggcagccatagaaagcgtgctcattttctgttttcctgtgttaggaaaaaaccacctgttttccaaggggagagggcggggcctgagggtgggggcggggcctcttcattggcccagcttggcgaaagcgaggcacactgctt

SEQ ID NO: 164179 - DNA, 18 bp, Homo sapiens
  chr9:140176951-140176969
  hypo
ctctttttatttattcct

SEQ ID NO: 164180 - DNA, 1866 bp, Homo sapiens; identical to SEQ ID NO: 118520
  chr9:140195551-140197417
  hypo

SEQ ID NO: 164181 - DNA, 156 bp, Homo sapiens
  chr9:140198184-140198340
  hypo
ggtgaggacacagtggagtcccggagtaggcccccagcagaacagagatgggcgctgtggagcccaggcccggggcagggatggcatggcctggcctgccgtgctctgctgggcacctttggcctcttaaggagggggagccgctgggctgcctgc

SEQ ID NO: 164182 - DNA, 209 bp, Homo sapiens
  chr9:140206331-140206540
  hypo
tggtggcccagcgcacgtcttgcctttggacagcgatcgtccacctgagaccacctgcctgataccctgagacccgccccccagcactcgggggctgagagcccctgccctcccattttgaagaaaaggggcttctgagggcttgctgagtcacagggcactcggcgggccaggactccatgccagggttctcacgccgcctccttcca

SEQ ID NO: 164183 - DNA, 573 bp, Homo sapiens
  chr9:140208417-140208990
  hypo
gatgctggcgggggtcgccagtgtgccgtcccaggatggacattgcacatttggtccctggcaagcccctgggtgggtcctgaggcccccaggctgccctgtgcactctgacctcccctagagccgcccaaccgatggtggggactggggtgtgggcctgacaccttgctggacagggcgagccagcggcccaggaagaagcaatcaggcaccaacctgcccgccgaggcctgggtctggcccacacctcaccttcccacgctgtccccagagtgccttgcagccctgggctgcccgccccaaaggtgacccgacactgtcccctgctgtggcactgtgagcctcttcagagagaagggagttgcgagtttgccaaaagaacctggccagtcccggcactgactttccactggagacagtgctggggtgggcggaaggccgagcccctggcccctggggaggtgtgtgcagctggggatagcggccgtcttttgggaagcttttaaaacccagtctatccccgtggagcaagctggtagccacccgctcagtgacccccgccctaaggccccg

SEQ ID NO: 164184 - DNA, 201 bp, Homo sapiens; identical to SEQ ID NO: 23869
  chr9:140216161-140216362
  hypo

SEQ ID NO: 164185 - DNA, 33 bp, Homo sapiens; identical to SEQ ID NO: 79057
  chr9:140216845-140216878
  hypo

SEQ ID NO: 164186 - DNA, 55 bp, Homo sapiens
  chr9:140218252-140218307
  hypo
gccttcagggagcagtcgaccgagaggcagcgcccagccccgacctgggcccgga

SEQ ID NO: 164187 - DNA, 186 bp, Homo sapiens; identical to SEQ ID NO: 79058
  chr9:140243516-140243702
  hypo

SEQ ID NO: 164188 - DNA, 31 bp, Homo sapiens; identical to SEQ ID NO: 79059
  chr9:140244415-140244446
  hypo

SEQ ID NO: 164189 - DNA, 31 bp, Homo sapiens; identical to SEQ ID NO: 23870
  chr9:140260841-140260872
  hypo

SEQ ID NO: 164190 - DNA, 30 bp, Homo sapiens; identical to SEQ ID NO: 79061
  chr9:140261956-140261986
  hypo

SEQ ID NO: 164191 - DNA, 88 bp, Homo sapiens; identical to SEQ ID NO: 79062
  chr9:140263677-140263765
  hypo

SEQ ID NO: 164192 - DNA, 757 bp, Homo sapiens; identical to SEQ ID NO: 79063
  chr9:140265349-140266106
  hypo

SEQ ID NO: 164193 - DNA, 30 bp, Homo sapiens; identical to SEQ ID NO: 79064
  chr9:140267369-140267399
  hypo

SEQ ID NO: 164194 - DNA, 426 bp, Homo sapiens; identical to SEQ ID NO: 23872
  chr9:140267956-140268382
  hypo

SEQ ID NO: 164195 - DNA, 121 bp, Homo sapiens
  chr9:140268624-140268745
  hypo
gcaagtgagtcaaccgctatagacttcaagccataacgactgcttgcaggtcattccgcaggtagaatcttaacagctaaaggggtggacgggttcacagctcagcgctcgggacagggcg

SEQ ID NO: 164196 - DNA, 31 bp, Homo sapiens; identical to SEQ ID NO: 79067
  chr9:140269908-140269939
  hypo

SEQ ID NO: 164197 - DNA, 648 bp, Homo sapiens
  chr9:140273998-140274646
  hypo
ggtttgcttctgaagcgatgaaccattctgaaaccagaagaggtgcacaggttgtgaagatgtagaaagattcacgaagcacgactgggcgctccaggccattgagtcactcattgtgaaacggctggttttatatgtcgtgcatcttaccccaataaagcattcgatgaagccgacgctccgtggctctgatttggggtgcgctctcgcccaggctggtttctgtcacccccggagttctgcagcacccgttctaaccacagcccgccttccctcactcctgcttcagtcccgtaaaccttctgcaaaatcctggccctccagaccccagctgggtcctcccctccaggcccccagtggcagctgtgccccttgtgtgcccacgtcggccagcgcaagccacacatggacccagtgcccactgcacccctgccagcctcagggtcccagcccgttgttccgggagacttcagtcctggcccaggcatctccttccagctcctgtccttatcttggtggcctcaatgaacgtgccaagacccttgggacccatggctctgagactgggctccccttgcgctgcctgcctccctcccggggtccctgtgaaggaagccgtcccacccaccctgccggtccctcctccct

SEQ ID NO: 164198 - DNA, 152 bp, Homo sapiens; identical to SEQ ID NO: 79068
  chr9:140290858-140291010
  hypo

SEQ ID NO: 164199 - DNA, 30 bp, Homo sapiens; identical to SEQ ID NO: 79069
  chr9:140304116-140304146
  hypo

SEQ ID NO: 164200 - DNA, 366 bp, Homo sapiens
  chr9:140325565-140325931
  hypo
actgggccctgcgagcgcgtgcctttcctgctgggcagaggccctccacatggggccacgcgggccgggcacaggagggcagtcagatgggcagggcctgagagcctccctcctctccctaggtccctaatcatggactccccaagagctggcacccaccagggccccctcgatgcagagacagaggtcggtgctgaccgctgcacgtcgactgcctaccaggagcaggtgcgtgggcctgggcctcttcccctgctgggggtcggtgcttctgctgcctccgcagactggggaccacaatgggaccaacatgagggtggagggagcagctcgctggggggtagacggggccgggctcacccgtgg

SEQ ID NO: 164201 - DNA, 42 bp, Homo sapiens; identical to SEQ ID NO: 79070
  chr9:140327519-140327561
  hypo

SEQ ID NO: 164202 - DNA, 370 bp, Homo sapiens
  chr9:140328417-140328787
  hypo
gagccgggggtcggccggtcctctaccaggtggtggcccagcacagctactccgcccaggggccagaggacctgggcttccgacagggggacacggtggacgtcctgtgtgaaggtagggtgggcatggcccttcccaggcagcaccgtggtgcccggggtgtggggggcttagagctcggcctgtgctgtgagcagacgtggcacccagaggccacgcctgggtaacgccctgcagagcccgatgtcccccttgcagtggaccaggcatggctggagggccactgtgacggccgcatcggcatcttccccaagtgcttcgtggtccccgccggccctcggatgtcaggagcccccggccgcctgccccg

SEQ ID NO: 164203 - DNA, 543 bp, Homo sapiens
  chr9:140332757-140333300
  hypo
ctgtggggggacggccgtgggcacccaggctgcacttggtgtccccatcccgccctccagaggcagaggcttcgctccccgtctccctggagacgcacccctggacagccacttgccttagaggcatctccggggctcagacgcctcccgtggccatagaggcatccccggggctcagacggtctcccgtggccttagaggcatctccggggctcaggcggcctcccgtggccatagaggcatctccggggctcagacggcctcccgtggccatagaggcatccccggggctcagacggcctcccgtggccatagaggcatccccggggctcagacggtctcccgtggccatagaggcatccccggggctcagacgcctcccgtggccaaggaccactccccaggagccacgcctgccaggggtgccatgggcatcagagggccctgtgggaggggggcggggggcagcagaggcctcgtctggggacacagccccagcaggatccaagtagccccctcggaccccctcggatgggactcgcg

SEQ ID NO: 164204 - DNA, 30 bp, Homo sapiens; identical to SEQ ID NO: 79073
  chr9:140343310-140343340
  hypo

SEQ ID NO: 164205 - DNA, 30 bp, Homo sapiens; identical to SEQ ID NO: 118525
  chr9:140343763-140343793
  hypo

SEQ ID NO: 164206 - DNA, 488 bp, Homo sapiens; identical to SEQ ID NO: 79074
  chr9:140351845-140352333
  hypo

SEQ ID NO: 164207 - DNA, 185 bp, Homo sapiens; identical to SEQ ID NO: 79075
  chr9:140355148-140355333
  hypo

SEQ ID NO: 164208 - DNA, 30 bp, Homo sapiens; identical to SEQ ID NO: 79076
  chr9:140357691-140357721
  hypo

SEQ ID NO: 164209 - DNA, 30 bp, Homo sapiens
  chr9:140358598-140358628
  hypo
ccgaggctgtgatgtcggtggtgatggcga

SEQ ID NO: 164210 - DNA, 626 bp, Homo sapiens
  chr9:140358866-140359492
  hypo
gtaggtgaggtccagcgcggccttcatcaaggacgtcatgccctggggccacatgtggaatttacagaaggcttccaccctccctgcgggctgccacagcagacacgtggcgtgctgagggcctctcatgaatggaacgggggtccagagtgtccttgggccccacccacggtcctgaggcttggcgccctggctggagcctcagagtgagcagaggctggtggtcgccccagggcctgaaagccaggacacagcccaccctcggtcccttcctgatccctaagccctcgctggccctaccctcgcaggctctgcagcgcccccatgcctggggcctcctcggctttgcctgctcagctctggggcaaggcctgcccatgcccgtggctggagggtcagcgaggaggagagctcggggcgggctgctgggcacatgaggttcctgggccagggggacacagtggattgctttcgggaaggtcagagccacccagccctggctcacatgccactgcggtactccatcaggggtcccggggaagccgggctctcttgggttccttctgggtgggcctggggcccatccttcctcagtgaggcaggcaggactcgagactgacctcaaa

SEQ ID NO: 164211 - DNA, 31 bp, Homo sapiens; identical to SEQ ID NO: 79078
  chr9:140361288-140361319
  hypo

SEQ ID NO: 164212 - DNA, 31 bp, Homo sapiens; identical to SEQ ID NO: 79079
  chr9:140373388-140373419
  hypo

SEQ ID NO: 164213 - DNA, 31 bp, Homo sapiens; identical to SEQ ID NO: 79080
  chr9:140375091-140375122
  hypo

SEQ ID NO: 164214 - DNA, 30 bp, Homo sapiens; identical to SEQ ID NO: 79081
  chr9:140375565-140375595
  hypo

SEQ ID NO: 164215 - DNA, 31 bp, Homo sapiens; identical to SEQ ID NO: 79082
  chr9:140378940-140378971
  hypo

SEQ ID NO: 164216 - DNA, 410 bp, Homo sapiens; identical to SEQ ID NO: 23877
  chr9:140379672-140380082
  hypo

SEQ ID NO: 164217 - DNA, 30 bp, Homo sapiens; identical to SEQ ID NO: 23878
  chr9:140380752-140380782
  hypo

SEQ ID NO: 164218 - DNA, 493 bp, Homo sapiens
  chr9:140382231-140382724
  hypo
tggcccccgagaggccgtcccatccagcctccacctgcctgtcaggggcatctcaggagcctgggccaccaccacaacctggcacgccctgcgaggtgtccccagcatcaccttcaccgcacgcacttcagcccctcactgcagctgagccttggccacacgggaggagcgggggactcaggcccagatgatgtgtctccgcctctaggcgctgagtggaaggcaggtggcttctataatcaggaggaaataactcccagatagcaaacaaacaatgcacacacacaccaaagtgctgctgagcacagaaagacggagaaccgcctcctcatcctgagcttcggcctgaacgctgctctcgtggtctgatgtctcgtcccgagcttcacttgcagtctgatgtctcgtcccgagcttcggcccgaacgcggctctcgcggtctgatgtctcgtcccgagcttcggcccgaacgtggctctctgatgtggattt

SEQ ID NO: 164219 - DNA, 30 bp, Homo sapiens
  chr9:140387602-140387632
  hypo
gatgctcaacaacagcgagactcagccaat

SEQ ID NO: 164220 - DNA, 677 bp, Homo sapiens; identical to SEQ ID NO: 79086
  chr9:140388965-140389642
  hypo

SEQ ID NO: 164221 - DNA, 30 bp, Homo sapiens; identical to SEQ ID NO: 79087
  chr9:140391465-140391495
  hypo

SEQ ID NO: 164222 - DNA, 645 bp, Homo sapiens
  chr9:140392377-140393022
  hypo
aaatccaggaggccacgaagtgtgtttccgagctaagctggggtggggctggggaaatccagccttccatgtgtggtttccacagtaacttccgtgtgtggtttccacggtaaccgtgctttgcccatccccagctcctgcatgccagggcagcatggatgcggagtgtgtggcacccacggcctcacctgtatattgctcgcccggcctccacctccacccagtccagggcaaagtcgatttgccgcacgaaggacgacatcctcttcaccacagtgtgcgccacacccaggacgacggtcggctgcttccgcatgattctgccgggcagcccagagtcaatcctgccccatccctccaaccctacccttcgcccagggccgcagtgctcgggaatggatgggacccacaacccccaccccacccggaaagtagagagaccactggcaggggctgggacggggcacgcaccagtcagctgcctgccccacggcacagcactgcccaccacgtgcccagtggccagcagctgttggggagcccagagagccccctcctggcaggcccgcgagtgccccttggacacgggccctgtgtcaggctgcggtcctggcaggggactgcacatgccgtcaggagctgcat

SEQ ID NO: 164223 - DNA, 30 bp, Homo sapiens; identical to SEQ ID NO: 23880
  chr9:140394124-140394154
  hypo

SEQ ID NO: 164224 - DNA, 30 bp, Homo sapiens
  chr9:140396274-140396304
  hypo
ggtgaggccagaggccgggcaaggccctcc

SEQ ID NO: 164225 - DNA, 822 bp, Homo sapiens
  chr9:140396596-140397418
  hypo
gctcccagaggtgacccgggagtgcccaacacactggaacccagaaggcagaggttgcagtggacccggagcctgtggagaggccctggggcaaaccaagggtgagggagcgtctgcgggcaccacacccacgaaggtttgaaacatcaggtgtgtaaacccccagtccacagtgatgatgaaataaaaataagaagccccacccagcatctttggaaaatgatcgaaaaacaaaccattaaacttcccaaaccctgacggtgaagggggtgaaggcagctcccccccaaaagagaaatgacatcacatgtcgccaaaagtttgtcaaacaggagggagaaagagatggaggaggatgagaagaatctgagcagccacatatccagctctcaggcagaggacggccgctgacggagaggccgcatcgccccagggcgcgttgtcagcccgaggaggagccgtgggaggttcttcaggagaagaaagcggcctccctgaggaaagcagctgcactaagaaagtcagagccttcgggagatgagggggacgggggggacgcgggggacgcgggggacgcgggggacgggggggacgagagggatgtgggagccggccacggtgacatggacgaggccgctggacaggggggcactgaacgcacggctgaagtcatttggccattttaaggattactgttaagtattcagaaatgataagagtattgtggttagagatgaatcctgaaatatccaccagtgacgtgctatgatgatgggatttgcttcaagggggggcacccgaacggtacggaaggggtgcaga

SEQ ID NO: 164226 - DNA, 1348 bp, Homo sapiens
  chr9:140400243-140401591
  hypo
agggatgtggttggggaacatcgcacaagggtgtggtcaggtctgaatcgcacagtgcggaaaggccggctgagcctcctgaagctgcaggtgccacatgacaccaaagccggcggcgcccccaatgcaccagcaagccacggagagggtggggccccaggcggagggtgagaatgacagccagggcctaccttgctggccacggagctcccggggtgctcgtccgagtgcaggaagaccctggcacggtcacatgccatccccagatcagaagtggcactgcctgggccccctacacacagaggggacactcaggacacggttcgctaggccactgacacaaacgtccgcggtgtgggctgagcacaccctgcagtctaaccacacagaccccggcagctccctcgagggagtcgggccctgagatccctccacaccctgctttctttcggcatctgcctcaatggctctgtgacccaccagctacaggttttctccgcagcttaaacccacacggtgccttcaacatttctgggcactgataaaggtagcccggtcggtacctaaaacacggaaggaaaccagccctggtcctgagccaaattcctcaaaccttgccatgcgtgccacaccctgacggctcgctgcggccaaccctgggtagagcaccctttctcttgctgtccatctcagggatgctgccgccctctgtatgtgagctcccctaacgggtgccctgggccgtcacgctggtgctttgggcttggctctttgcagtcccagccccatctcagaggttcgctcttcgcagtccagccccatcttggagggagggggttgaggcaccccctccaaagagctcccctgttgctgcttttgggcggcctcgggctgagcgggatgaagcagtgtgcacccttttacagcctgccctcagcattacacatcactacacacacagcgtatctgacctctggaccagctgctgtggattctgaggaagggtgcacgctttgcacgacggggtcacgcacttccaggcacagatccagcccttcgtgtgcagctgcgcatgcgagcgagtcatctgcactgcggtttcccatccatactggaattcgcaacacccatttctcagcggaatacagaggaaccgcgcagacactaaccgcagacacatgccacacagatgccgcagccacatggcgctgcgggaaggaaccaggcccaggagcacagccatgtgcccctccctgggaagccagacacagagagccaggagcgctgggccttggaaaggggcgcatgtctccgaggcttacgctgagggtgcgctggtcgggtttca

SEQ ID NO: 164227 - DNA, 31 bp, Homo sapiens; identical to SEQ ID NO: 23884
  chr9:140416957-140416988
  hypo

SEQ ID NO: 164228 - DNA, 30 bp, Homo sapiens; identical to SEQ ID NO: 79093
  chr9:140417840-140417870
  hypo

SEQ ID NO: 164229 - DNA, 38 bp, Homo sapiens; identical to SEQ ID NO: 79094
  chr9:140418787-140418825
  hypo

SEQ ID NO: 164230 - DNA, 730 bp, Homo sapiens; identical to SEQ ID NO: 118527
  chr9:140445745-140446475
  hypo

SEQ ID NO: 164231 - DNA, 30 bp, Homo sapiens; identical to SEQ ID NO: 79096
  chr9:140469093-140469123
  hypo

SEQ ID NO: 164232 - DNA, 123 bp, Homo sapiens; identical to SEQ ID NO: 46791
  chr9:140473436-140473559
  hypo

SEQ ID NO: 164233 - DNA, 30 bp, Homo sapiens; identical to SEQ ID NO: 23887
  chr9:140481483-140481513
  hypo

SEQ ID NO: 164234 - DNA, 30 bp, Homo sapiens; identical to SEQ ID NO: 23888
  chr9:140483462-140483492
  hypo

SEQ ID NO: 164235 - DNA, 82 bp, Homo sapiens; identical to SEQ ID NO: 79100
  chr9:140487907-140487989
  hypo

SEQ ID NO: 164236 - DNA, 26 bp, Homo sapiens
  chr9:140498378-140498404
  hypo
gcgagccaccgcgcccggtgaaacac

SEQ ID NO: 164237 - DNA, 31 bp, Homo sapiens; identical to SEQ ID NO: 79101
  chr9:140507427-140507458
  hypo

SEQ ID NO: 164238 - DNA, 147 bp, Homo sapiens
  chr9:140538081-140538228
  hypo
gagccaccgcgcccggccgtataaaggttttttagtactctgagggtattgtctggctgcactccatggtttctgatgaggaaccattgctcatctctcaggaccctcgttcatgacacgttgctcctctgtcgctgcttttgagag

SEQ ID NO: 164239 - DNA, 21 bp, Homo sapiens
  chr9:140539609-140539630
  hypo
ccgccacggcctgcttattta

SEQ ID NO: 164240 - DNA, 30 bp, Homo sapiens; identical to SEQ ID NO: 79104
  chr9:140540204-140540234
  hypo

SEQ ID NO: 164241 - DNA, 30 bp, Homo sapiens
  chr9:140551845-140551875
  hypo
ggtgagaggctgtcgcgctcgttaggatga

SEQ ID NO: 164242 - DNA, 43 bp, Homo sapiens; identical to SEQ ID NO: 23891
  chr9:140576166-140576209
  hypo

SEQ ID NO: 164243 - DNA, 31 bp, Homo sapiens; identical to SEQ ID NO: 23892
  chr9:140576695-140576726
  hypo

SEQ ID NO: 164244 - DNA, 175 bp, Homo sapiens; identical to SEQ ID NO: 23893
  chr9:140577313-140577488
  hypo

SEQ ID NO: 164245 - DNA, 270 bp, Homo sapiens
  chr9:140582119-140582389
  hypo
cgtcacgcgaggacacggcaagaagatggcaggccatgagcccggaaatgagagcctggccacacgctgaatttgccagcaccttgatcttggatttccgagcctccagaacttaaacaaataaatttctgttgggtctgtgccacccacatgaaggcagtttgttataatagcctgaaaggataaagtcagagcacgtcatcgtgtcaccgtcttcacggtgtggtctctgatccttcaacatggggcgtctttctatttaattgaaac

SEQ ID NO: 164246 - DNA, 701 bp, Homo sapiens; identical to SEQ ID NO: 23894
  chr9:140587005-140587706
  hypo

SEQ ID NO: 164247 - DNA, 30 bp, Homo sapiens; identical to SEQ ID NO: 23895
  chr9:140587996-140588026
  hypo

SEQ ID NO: 164248 - DNA, 21 bp, Homo sapiens
  chr9:140588505-140588526
  hypo
acacagtggctcaggacgctg

SEQ ID NO: 164249 - DNA, 80 bp, Homo sapiens; identical to SEQ ID NO: 23897
  chr9:140588765-140588845
  hypo

SEQ ID NO: 164250 - DNA, 334 bp, Homo sapiens
  chr9:140592376-140592710
  hypo
ctgttgtgagggcagcgtgtgagggcggcgtggctcgcggaggcctcactccccactgttgtgagggcagcgtgtgagggcggtgtggctcgcggaggcctcaatccccactgtcgtgagggcagcgtgtgagggcggcgtggctcgcggaggcctcactccctggctttcactccagcctcctggtagcatgcagagacacagtgtggaaacggaggccactgtcacaagcgctgaggaggatcattattactggtttgttgacaaaacgtggacgcattttgtcttatccagcatgttgtagaaaagcagggattgccgtggaaactccaca

SEQ ID NO: 164251 - DNA, 545 bp, Homo sapiens; identical to SEQ ID NO: 79113
  chr9:140606072-140606617
  hypo

SEQ ID NO: 164252 - DNA, 284 bp, Homo sapiens; identical to SEQ ID NO: 23900
  chr9:140611159-140611443
  hypo

SEQ ID NO: 164253 - DNA, 152 bp, Homo sapiens; identical to SEQ ID NO: 79115
  chr9:140612586-140612738
  hypo

SEQ ID NO: 164254 - DNA, 509 bp, Homo sapiens; identical to SEQ ID NO: 23901
  chr9:140615062-140615571
  hypo

SEQ ID NO: 164255 - DNA, 142 bp, Homo sapiens
  chr9:140617089-140617231
  hypo
cccacggaggtggtgcggcagagactgtgggtgggtgggtgcccccctgtgcccccggtatgctctgtgtgggccccacagaggtggtgcggcagagactgtggcggtagggtgcctgccctgcacccggagtgtgctctgt

SEQ ID NO: 164256 - DNA, 862 bp, Homo sapiens
  chr9:140620042-140620904
  hypo
agtagggagcccaggtcgttctatgtctgttctggacatcagtggggtgtctggcagtttagtgtgggctcactgagaagctttgcaaggaccacatggcagcaagatgcgctcgagagacagagaggcaaggagggagggaaacagacacagacagagtgcgcctgtgagacagagagaggtggagaccgtgaggccgtgagagccagccccaagagtactcgctcccctgtgccttccagctcgccctggcacacccctctcatctcccagccaagccaggtgctaccctgttctcctccgtgtgctcttgcctggaactctcgctctgcctccctgcctcacctgtaacctccacaagcacctcctgaatccctcagagctgtctctgcagccacatgttcacccatgtcatggacccaccgagcactttgagttacttatgaccttggttacttctccctggccttgactatagttgatgcaggtgccttgtcgtgtgtgtgtgtgtgtgtgtgcgtatgtgcgtggtaaaacacataatatcaaacttaaccatttttaagtaaacagctcagtggcattaagcacattcacgctgccgtgcagccatcgccaccctccgtctctggaacctcttcatcttcccacactgaagctctgtctcctttaaacactgacttcccattcctctctcccagtccctggcaataccattctactttctgtgtccatcagttggacgactctagggacctcctgtaagtggaatggtacaacgtttgttcttttgtggctgacttacttcattcggcacagtgtccccgaggctcatccacgctgcagcgcgggccccagcttc

SEQ ID NO: 164257 - DNA, 329 bp, Homo sapiens; identical to SEQ ID NO: 79119
  chr9:140622679-140623008
  hypo

SEQ ID NO: 164258 - DNA, 258 bp, Homo sapiens; identical to SEQ ID NO: 23905
  chr9:140623352-140623610
  hypo

SEQ ID NO: 164259 - DNA, 41 bp, Homo sapiens; identical to SEQ ID NO: 79121
  chr9:140633523-140633564
  hypo

SEQ ID NO: 164260 - DNA, 209 bp, Homo sapiens
  chr9:140636512-140636721
  hypo
ctgcatgttggctgtgtgctccgagcctgacccccatgaacatactgcagacgcctggtgtgatcgtttcccagcgtccgtggtcccaggcacctccttactccagagcggattgcccaggccccgcggcgtctgtgggtggtgctgtcaaaggacctacccgctttggatggttctcactcgttcacgtccctccaactgttgcttct

SEQ ID NO: 164261 - DNA, 249 bp, Homo sapiens
  chr9:140645186-140645435
  hypo
caccggagctcaggacgtggctgccggagggggcgcggctgccggaggggacgcttactcaggagcgctgaggcggttaatgagtgggacagggagcctgtgacatgtataaaggtcgattgtaagactggggtattaaatcagtggtcaaggggtcatgaactttttaataactatggttgggccagttgactaatattttgggaaaaggcagcctgcacttgtgtcagggcacgtaacaaatgtgag

SEQ ID NO: 164262 - DNA, 30 bp, Homo sapiens
  chr9:140647737-140647767
  hypo
ggaggacacgggggccgtggtgttcggcga

SEQ ID NO: 164263 - DNA, 181 bp, Homo sapiens; identical to SEQ ID NO: 23907
  chr9:140647979-140648160
  hypo

SEQ ID NO: 164264 - DNA, 30 bp, Homo sapiens; identical to SEQ ID NO: 23908
  chr9:140652670-140652700
  hypo

SEQ ID NO: 164265 - DNA, 675 bp, Homo sapiens; identical to SEQ ID NO: 79125
  chr9:140653936-140654611
  hypo

SEQ ID NO: 164266 - DNA, 1510 bp, Homo sapiens
  chr9:140657348-140658858
  hypo
cccctcgagtgagttgtgctgcgtgaccagggcgggagcctgagtggattctgcgcagaaccaatcgagcagatcccaacagtgaaatcacggcagatgatgaaacacaggtctagagcttgttaaaaaggaggactgtgtagacaaagtctttgaatgaaaatggcctgttgtatttcttttttatgatcatggttttgtcaaggtttttcctaccttgctataaacaaagtgagtagattgaggcaggatagtcacaccaaggtgagtccagaactgcccagaactgtggtttcctgcagggcaggccccgcaagggccgggcctcggccacctccctcctttcaccggggatcacagactcagagggttcagcacgtcccgtctctgctgcctctgggacaggaggggggatcaggcagagcacagacggaattaatgttttctgagaatttctccagttctttttaacacgatttctttcagccctcagagcctcgtgaccatggctggccatggtgagggtctgagcaggaggcttgttggcaccaggccgagaggcaccacatgcagtcacactgctcaggtgtctggctgccccgggcttgcatttgctgtggccgaagtcagcacgtggccattagtgtcgtctgcttcctgaggggtgtgtcaggctgttgcttccacgagtttcctggtcttattggccagcggatccatcttcagctcgattattgcgtcttagctgcacattgtggaagtaagtgagctgtgaacaggacaaccatccgtgtagcaatgctgggcattattccaagccttttgcgtagggcgctcctccaggtccacggcagcctgtgcagcatcggccgtcgcccaggtgatacaggtgaggcccgtgagaggggccaggtggcgcctccagactcactggcctgctgtgaggaaggcaggaatgggagccttgttccaaaggtcaggcccgaccgctgtgtcggggagcatgggcaacacccgggaggagcgggcagagccctggaacaggccagtcagtttcgcccatggccctcaccctggtgcctgttggcgtggccggggtttctgattcagcaggtctggcctggctgggattttgcttttctaaagtgttccccgtttctcctgatgcttctggtccagggaccacactttgagaaccactggttcgcctcctcttctccttctccgtaggtgttaaacaggatccagtggagtcagatccccgtgtgacacgtgcttccctgtgacttttctctctgtatctccacgtttccggtgcacatgcctttactcagactccgacactggcgttgcttttgtctcatcccagctaggcgacgtctgcgtcagcgcctctcatctgtggcacgtgtgcccagcgggctccctatgtgacggcttttcccacctctgagtgttcatgtcactcgctgcatgttctgccacactcggcccctctgcagagcctctc

SEQ ID NO: 164267 - DNA, 91 bp, Homo sapiens; identical to SEQ ID NO: 79128
  chr9:140659466-140659557
  hypo

SEQ ID NO: 164268 - DNA, 274 bp, Homo sapiens
  chr9:140664574-140664848
  hypo
cactgtgcccggcccactttatttcttcagtcttgtgtttttttctttctttctgggattccttgtacacacgttagattgtttgacattgtcccacagctcttcaatgccctcctctttttttctccttccattttagttttagataatttatgttggcctttaaaattattcaccagttcttccttgttgagtatacttctgagccagtcaaaggcatttatctctggtactgtttgtttctagcgttttacgctgacgttcttgaaattcc

SEQ ID NO: 164269 - DNA, 31 bp, Homo sapiens
  chr9:140665996-140666027
  hypo
acgtctctgtgctcctcggagtcctggtctt

SEQ ID NO: 164270 - DNA, 30 bp, Homo sapiens; identical to SEQ ID NO: 79131
  chr9:140673921-140673951
  hypo

SEQ ID NO: 164271 - DNA, 30 bp, Homo sapiens; identical to SEQ ID NO: 79132
  chr9:140675914-140675944
  hypo

SEQ ID NO: 164272 - DNA, 311 bp, Homo sapiens; identical to SEQ ID NO: 79133
  chr9:140680231-140680542
  hypo

SEQ ID NO: 164273 - DNA, 30 bp, Homo sapiens
  chr9:140682127-140682157
  hypo
accgggagagcagcccgcctgggccagggg

SEQ ID NO: 164274 - DNA, 405 bp, Homo sapiens
  chr9:140682706-140683111
  hypo
catgctgaagccattgctgggcggtggcagatgaccgagcggctggtaggactggcatgcagcactcagggggcccaggacgttggcgaaggctccacccgcaccgccttctgccagcgcctcagccggggtgacgctcacgcaggtgtaaggaggttgcaggtttagggatcttgtaggtgaaaggaggttgcaggcgtacggaggttgcaggtgtagggagattgcaggtgtagggaagttgcaggtgtaggggtccttgcaggtgcagggatcttgtaggtgaagggaggttgcaggtgtagggggccttgcgggcttagagggcctcacaggtgtaggggattgccgtgctgcaggtgtctcttgtcccctcggggactgggagagcgactgtgcctctgg

SEQ ID NO: 164275 - DNA, 30 bp, Homo sapiens; identical to SEQ ID NO: 79135
  chr9:140684827-140684857
  hypo

SEQ ID NO: 164276 - DNA, 30 bp, Homo sapiens; identical to SEQ ID NO: 79136
  chr9:140691321-140691351
  hypo

SEQ ID NO: 164277 - DNA, 107 bp, Homo sapiens; identical to SEQ ID NO: 79137
  chr9:140691708-140691815
  hypo

SEQ ID NO: 164278 - DNA, 324 bp, Homo sapiens
  chr9:140692091-140692415
  hypo
tagccgtgtgggaaccgggtgtgctggctttccttgaggaaggtgagcatgctgatttagccccaggtaggggagcagtatgtgcagtgatgcctgcgaaactctatgactgctacacggactccaccgagataaggggagaaaggtaatgaaggaacatggttaagtggagacaggaacaggggagcaaagcaaagcaaacacctgaagggagacggtggtggagtgcgtctgcgggcctgtgtgaggagcacaggcaggaagaaccctgtgtaaggcgtgtggatggcacagcggtgtgggcggcaccggctcccctgcctc

SEQ ID NO: 164279 - DNA, 148 bp, Homo sapiens
  chr9:140693485-140693633
  hypo
gctcgggccctccagcgtcctcttccacacttagggccagctcggaccctccacagcgtcccatcccacacacagagccagctcgggccctccagcgtcctcttccacactcagggccagctcggaccctccacggcatcgccttcca

SEQ ID NO: 164280 - DNA, 30 bp, Homo sapiens
  chr9:140693899-140693929
  hypo
gcatgtgtgctgaaccgcggcgcctcacac

SEQ ID NO: 164281 - DNA, 258 bp, Homo sapiens
  chr9:140697267-140697525
  hypo
tctacctcattccaccggagttctttcccactgcgggttaggatgacggcaccatgaagagaggagccctgagccggcagaaggaagagaagagggaagcagaggagccctgagctggtggaaggctgtggcgggtaccttggaggaagagaggagggaagcaaaggcagagaacaaggcagaggccacccccaggtggggccacctcacccaccgcccccggagactgcgtggcggggaaggcggccctagtgtggc

SEQ ID NO: 164282 - DNA, 27 bp, Homo sapiens
  chr9:140703099-140703126
  hypo
tctcaaaaatgtaattctgggcggggg

SEQ ID NO: 164283 - DNA, 26 bp, Homo sapiens
  chr9:140703365-140703391
  hypo
actccgcctctaaaaaaaaataaaaa

SEQ ID NO: 164284 - DNA, 622 bp, Homo sapiens; identical to SEQ ID NO: 46793
  chr9:140703837-140704459
  hypo

SEQ ID NO: 164285 - DNA, 102 bp, Homo sapiens; identical to SEQ ID NO: 23915
  chr9:140704675-140704777
  hypo

SEQ ID NO: 164286 - DNA, 30 bp, Homo sapiens; identical to SEQ ID NO: 46794
  chr9:140704853-140704883
  hypo

SEQ ID NO: 164287 - DNA, 30 bp, Homo sapiens; identical to SEQ ID NO: 23916
  chr9:140705975-140706005
  hypo

SEQ ID NO: 164288 - DNA, 609 bp, Homo sapiens; identical to SEQ ID NO: 79145
  chr9:140707363-140707972
  hypo

SEQ ID NO: 164289 - DNA, 982 bp, Homo sapiens; identical to SEQ ID NO: 79146
  chr9:140708199-140709181
  hypo

SEQ ID NO: 164290 - DNA, 467 bp, Homo sapiens; identical to SEQ ID NO: 79147
  chr9:140709435-140709902
  hypo

SEQ ID NO: 164291 - DNA, 30 bp, Homo sapiens; identical to SEQ ID NO: 79148
  chr9:140715047-140715077
  hypo

SEQ ID NO: 164292 - DNA, 106 bp, Homo sapiens; identical to SEQ ID NO: 79149
  chr9:140723473-140723579
  hypo

SEQ ID NO: 164293 - DNA, 30 bp, Homo sapiens; identical to SEQ ID NO: 79150
  chr9:140724249-140724279
  hypo

SEQ ID NO: 164294 - DNA, 528 bp, Homo sapiens; identical to SEQ ID NO: 79151
  chr9:140727425-140727953
  hypo

SEQ ID NO: 164295 - DNA, 31 bp, Homo sapiens; identical to SEQ ID NO: 23921
  chr9:140728257-140728288
  hypo

SEQ ID NO: 164296 - DNA, 137 bp, Homo sapiens; identical to SEQ ID NO: 79153
  chr9:140731430-140731567
  hypo

SEQ ID NO: 164297 - DNA, 709 bp, Homo sapiens; identical to SEQ ID NO: 118536
  chr9:140772756-140773465
  hypo

SEQ ID NO: 164298 - DNA, 31 bp, Homo sapiens; identical to SEQ ID NO: 79155
  chr9:140852045-140852076
  hypo

SEQ ID NO: 164299 - DNA, 30 bp, Homo sapiens; identical to SEQ ID NO: 7156
  chr9:140876711-140876741
  hypo

SEQ ID NO: 164300 - DNA, 30 bp, Homo sapiens
  chr9:140878620-140878650
  hypo
gggcggccatcaagccgggaagctcctttg

SEQ ID NO: 164301 - DNA, 30 bp, Homo sapiens
  chr9:140880274-140880304
  hypo
ctctgggatgggaagcgttgagggatacca

SEQ ID NO: 164302 - DNA, 30 bp, Homo sapiens
  chr9:140918884-140918914
  hypo
ggtcaacccagccgccgccctgtctttgtg

SEQ ID NO: 164303 - DNA, 805 bp, Homo sapiens
  chr9:140937909-140938714
  hypo
ggcttctcagcgcatcgaggcccctcagcgcggcagaggggtccacagccacgggtgctgggctcggtgttgttgccaacgttggtgcagcaagaggtgaggaagggtccgttagcgtctctgcggcagatggtggtcctggctgtcgtgcgccacggtcatgtacgtgaagcactgttcttagctgcttgcccatccctggtgggcctgtgaggacctgacgcaagtgccgggggcatgggagctgggagggagccacgcaacgtgggcttcatgtgcactacaccccttactcgggggccctgtgtccttgtaggtggtaacgtggacctggaaagccaagcagaggggaagaaggaggtggaagcggatgacgtgatgaggagcggcccccggcctatcgtcccatacagctccatgttctgtttaagccccaccaacctgtgagtctccttgcctgctggtgtgtgtggccgcccactcacccatgcatcatgacccgtgggatctcagtagccagcgtgcactgattctgcgcacttatgtagagaaacggctctaaatcccatggcagaccccagaggcacgtgcccgtgtgacctcattctgcagaagaggacacgggcacaggaggcagcctcagcggagctggggtgagctccaggcctgggctcctcacctcctctgtggtgtgcgtgtgtctctgcacacagggacgccgtctgccctgtgtcgcaaacacacttccatccatctgccttcccatcacacctggcacctgtgttgcctgcgtgtgtgcactgtg

SEQ ID NO: 164304 - DNA, 170 bp, Homo sapiens
  chr9:140969118-140969288
  hypo
aacaggtggatgcaccgtggtgttcttgagggctgcatgggctcccgcccagtgatggtagggtgtcggggcacaggtcagaatgggtgctggctgtgtggtggaggcgcgttggagcacagctgtgtttgccgagtggcttgcacagtggcggtcggttatcctgttag

SEQ ID NO: 164305 - DNA, 273 bp, Homo sapiens
  chr9:140970054-140970327
  hypo
gttcagagctggagccggcacatgtgtagctacggagagggcgtctatactgggaatgcacactggcctctcccgggtgggagttctctggtgtggggcagtcgcccatctcacgtggggtccttgtacggctcgcacgccctctctggctcggtccacctggcgcggctcctgcagacccagcagggtccgtgccattgctcttctccattgcaggtgtttgggaatattgccctggatgatgacaccagcatcaaccgccacaacaacttc

SEQ ID NO: 164306 - DNA, 223 bp, Homo sapiens
  chr9:140996898-140997121
  hypo
ccgcccactgccccgcgtggggctggagtgaggaggtgaggctcgggggtggggggccaggagggggtcaagccaagcagagaaatccctcattttatttattttgattttgggctttgaatccgacactttgattaactggctctgttttcttgtctgcttcctccctgcccctaccccgctcccctccccgctcccctcctgctgccgctcctcctgtgga

SEQ ID NO: 164307 - DNA, 31 bp, Homo sapiens; identical to SEQ ID NO: 79158
  chr9:141015037-141015068
  hypo

SEQ ID NO: 164308 - DNA, 30 bp, Homo sapiens
  chr9:141015472-141015502
  hypo
ctctgtgccctgtcccggagcccacgtctg

SEQ ID NO: 164309 - DNA, 457 bp, Homo sapiens
  chr9:141015967-141016424
  hypo
tagcacccccggccgcggtgggcggaggcagctcccccagacgcccctgactccccgccccagcatcacctacaagacggccaactcctcacccatccacttcgccggggctcagaccagcctccctgccttctccccaggccggctcagccgtgggctttccgaacacaacgccctgctgcagagagaccccctcagccagcccctggcccctggctctcgaattggctctgacccttacctggggcagcgtctggacagtgaggcctctgtccacgccctgcctgaggacactctcactttcgaggaggctgtggccaccaactcgggccgctcctccaggacttcctacgtgtcctccctgacctcccagtctcaccctctccgccgcgtgcccaacggttaccactgcaccctgggactcagctcgggtggccgagcacggcacagctaccac

SEQ ID NO: 164310 - DNA, 30 bp, Homo sapiens
  chr9:141016792-141016822
  hypo
ttgtgaggagctctgcgtcctgtggggagc

SEQ ID NO: 164311 - DNA, 114 bp, Homo sapiens
  chr9:141022613-141022727
  hypo
gcatcagaacaggggtcgcagaactgacctggcccccagtccctgagcgctcccacctgctgccctctcccgcccagcccagcccagctgcctgcgttgcggcctccacctgca

SEQ ID NO: 164312 - DNA, 207 bp, Homo sapiens; identical to SEQ ID NO: 79160
  chr9:141069526-141069733
  hypo

SEQ ID NO: 164313 - DNA, 31 bp, Homo sapiens; identical to SEQ ID NO: 79161
  chr9:141070600-141070631
  hypo

SEQ ID NO: 164314 - DNA, 30 bp, Homo sapiens; identical to SEQ ID NO: 79162
  chr10:300239-300269
  hypo

SEQ ID NO: 164315 - DNA, 31 bp, Homo sapiens; identical to SEQ ID NO: 79163
  chr10:326506-326537
  hypo

SEQ ID NO: 164316 - DNA, 31 bp, Homo sapiens; identical to SEQ ID NO: 79164
  chr10:327401-327432
  hypo

SEQ ID NO: 164317 - DNA, 31 bp, Homo sapiens; identical to SEQ ID NO: 79165
  chr10:338152-338183
  hypo

SEQ ID NO: 164318 - DNA, 45 bp, Homo sapiens
  chr10:353590-353635
  hypo
gaaaggtcaaagagagaacatcgcggagaaaaaaacagaaaggaa

SEQ ID NO: 164319 - DNA, 195 bp, Homo sapiens; identical to SEQ ID NO: 23926
  chr10:373929-374124
  hypo

SEQ ID NO: 164320 - DNA, 48 bp, Homo sapiens
  chr10:385013-385061
  hypo
cttaggagcacagcctgaggtcgaggcgtcctcaaatttacaccccca

SEQ ID NO: 164321 - DNA, 31 bp, Homo sapiens; identical to SEQ ID NO: 79167
  chr10:387526-387557
  hypo

SEQ ID NO: 164322 - DNA, 30 bp, Homo sapiens; identical to SEQ ID NO: 79168
  chr10:390313-390343
  hypo

SEQ ID NO: 164323 - DNA, 31 bp, Homo sapiens; identical to SEQ ID NO: 79169
  chr10:391367-391398
  hypo

SEQ ID NO: 164324 - DNA, 326 bp, Homo sapiens; identical to SEQ ID NO: 79170
  chr10:396922-397248
  hypo

SEQ ID NO: 164325 - DNA, 31 bp, Homo sapiens; identical to SEQ ID NO: 79171
  chr10:410433-410464
  hypo

SEQ ID NO: 164326 - DNA, 124 bp, Homo sapiens; identical to SEQ ID NO: 79172
  chr10:415396-415520
  hypo

SEQ ID NO: 164327 - DNA, 86 bp, Homo sapiens
  chr10:416217-416303
  hypo
agaccactgcgcacacgttcaccacgctggggcccaccccacctcctctgccggacaccccagcttgctcccgccttggggcttct

SEQ ID NO: 164328 - DNA, 173 bp, Homo sapiens; identical to SEQ ID NO: 79173
  chr10:422172-422345
  hypo

SEQ ID NO: 164329 - DNA, 521 bp, Homo sapiens; identical to SEQ ID NO: 79174
  chr10:425872-426393
  hypo

SEQ ID NO: 164330 - DNA, 30 bp, Homo sapiens
  chr10:426621-426651
  hypo
gcctcccacattggacgtgacgacctttaa

SEQ ID NO: 164331 - DNA, 31 bp, Homo sapiens; identical to SEQ ID NO: 79175
  chr10:431729-431760
  hypo

SEQ ID NO: 164332 - DNA, 30 bp, Homo sapiens; identical to SEQ ID NO: 79176
  chr10:435938-435968
  hypo

SEQ ID NO: 164333 - DNA, 30 bp, Homo sapiens
  chr10:438828-438858
  hypo
tgcccacacacaggcgcgcacacacactca

SEQ ID NO: 164334 - DNA, 45 bp, Homo sapiens; identical to SEQ ID NO: 79177
  chr10:463656-463701
  hypo

SEQ ID NO: 164335 - DNA, 30 bp, Homo sapiens; identical to SEQ ID NO: 79178
  chr10:465020-465050
  hypo

SEQ ID NO: 164336 - DNA, 30 bp, Homo sapiens
  chr10:465960-465990
  hypo
gccacgatgcggatcgcgatcctgaatcct

SEQ ID NO: 164337 - DNA, 458 bp, Homo sapiens; identical to SEQ ID NO: 79179
  chr10:482018-482476
  hypo

SEQ ID NO: 164338 - DNA, 142 bp, Homo sapiens
  chr10:482839-482981
  hypo
gctctctctgagctccgcctcctggacgtggtagggtgatatgctccacccacacctgagctctctccgagctccgcctcctggatgtggtagggtggccatgctccacccacacctgagctctctccgagctccgcctcct

SEQ ID NO: 164339 - DNA, 160 bp, Homo sapiens; identical to SEQ ID NO: 79181
  chr10:483295-483455
  hypo

SEQ ID NO: 164340 - DNA, 30 bp, Homo sapiens
  chr10:516640-516670
  hypo
cgcagtggcgactgacgcggatctcctgtg

SEQ ID NO: 164341 - DNA, 220 bp, Homo sapiens
  chr10:518265-518485
  hypo
cgtgctgcaggtccacgcccactgcacttctgcctcgcccagtggctgggcacaggcaccgtcctggcacaggtggcagatggacgtattgtatcaccccaccccgtgcttacctgaccgatagcgctcatctcgtgaccctgaagaccgtcggcggtggtagcgagaggcggaggaaggagtgacaggagcccggcgttcttgcggcaaagcttggtcc

SEQ ID NO: 164342 - DNA, 428 bp, Homo sapiens; identical to SEQ ID NO: 79183
  chr10:524386-524814
  hypo

SEQ ID NO: 164343 - DNA, 30 bp, Homo sapiens; identical to SEQ ID NO: 79184
  chr10:525931-525961
  hypo

SEQ ID NO: 164344 - DNA, 159 bp, Homo sapiens; identical to SEQ ID NO: 23932
  chr10:545442-545601
  hypo

SEQ ID NO: 164345 - DNA, 30 bp, Homo sapiens
  chr10:563435-563465
  hypo
tcacacccacaacgccgaagaggagcaggt

SEQ ID NO: 164346 - DNA, 30 bp, Homo sapiens; identical to SEQ ID NO: 79186
  chr10:576017-576047
  hypo

SEQ ID NO: 164347 - DNA, 428 bp, Homo sapiens; identical to SEQ ID NO: 79187
  chr10:583335-583763
  hypo

SEQ ID NO: 164348 - DNA, 181 bp, Homo sapiens; identical to SEQ ID NO: 79188
  chr10:603005-603186
  hypo

SEQ ID NO: 164349 - DNA, 336 bp, Homo sapiens
  chr10:606108-606444
  hypo
tgtccactgatcatccctccacgcacagcagagagcagtcctcgggataaaacccacaggggtggagaagacacgcgatcaaggtggacaggatggaggagtcacaaagaggggaggttcggagaatgaggccatgtgaacacaaagctaaagtgctcagcggctggaagacaaaagctgcacaacacaagagacaagctaaacacaaccatttaaaaaaaaaaagaaaaaagtgtcactgttaagtaggagtccatcaggatttaagttctcgagtcacttaatgtatcagcacacagacttctcataatgcctgaaactcgcggcagtgaacac

SEQ ID NO: 164350 - DNA, 299 bp, Homo sapiens; identical to SEQ ID NO: 79190
  chr10:630293-630592
  hypo

SEQ ID NO: 164351 - DNA, 320 bp, Homo sapiens
  chr10:632980-633300
  hypo
ctgctgacagcgtggcgaggggcaaacagtgcagggtctaaggccggaccacccggatccctgctgatagcgtggcgaggggcaaacagtgcagggtctaaggccggaccacccgggtccctgctgacagtgtggcgaggggcaaacagtgcagggtctaaggccagactacccgggtccctgctgacagcgtggcgaggggcaaacagtgcagggtctaaggctggaccacccagggtcccgctgataccatgacttcaggagtttcctaaaccctctgctctccaagttccgcgtcagtaaaacgcggtgataaccgt

SEQ ID NO: 164352 - DNA, 31 bp, Homo sapiens; identical to SEQ ID NO: 79191
  chr10:644048-644079
  hypo

SEQ ID NO: 164353 - DNA, 30 bp, Homo sapiens
  chr10:652245-652275
  hypo
cacagctcagggcacggccactcgccccgc

SEQ ID NO: 164354 - DNA, 70 bp, Homo sapiens
  chr10:658725-658795
  hypo
aagaaatgagacaaatattgacgctccacagaagcaagtattctcttccggaaagtcaagaagtgtcagg

SEQ ID NO: 164355 - DNA, 31 bp, Homo sapiens; identical to SEQ ID NO: 79192
  chr10:661289-661320
  hypo

SEQ ID NO: 164356 - DNA, 353 bp, Homo sapiens; identical to SEQ ID NO: 23934
  chr10:669049-669402
  hypo

SEQ ID NO: 164357 - DNA, 220 bp, Homo sapiens; identical to SEQ ID NO: 23935
  chr10:669946-670166
  hypo

SEQ ID NO: 164358 - DNA, 218 bp, Homo sapiens
  chr10:673212-673430
  hypo
agggctgctgtgggtcgggaaaccctcccgacacctccctctccaaaaccccccatcagcatcccagcatctggacctgtgtcaccagccgctctgccgtacaagagaactggattttcagctgggttcgctgcttccctaaacaaagtagggttttgttactgaggaaaaaggaaaaagcgggcatcttcttggcaacctcgcgacatccagccgcc

SEQ ID NO: 164359 - DNA, 123 bp, Homo sapiens
  chr10:673703-673826
  hypo
cacaaacagaccgcacggctcagccacgtggacgcttacaggacttcacgagaggcaccaccgtggtacacgtgaagacgtgcacttcattcagcctcgaacagaccacgccctcattacggg

SEQ ID NO: 164360 - DNA, 364 bp, Homo sapiens
  chr10:676524-676888
  hypo
acagcggccaacgtccgtcacggtgccgagcagtgccagccgctctaccatggccgacggcctgattcccaagggctgcgtcccggggccgtgctagtgcagtgaatgttcaggaaacagaccaggtggcaggagggagtcttgtcctcaaggaacctcataagtcttgctagggggacaaacaacgagagaatgaaactggcagccatagaatccgggccttgatgcccaggcctcgccatgcatacctgctggccggcatctccctgagacccgtctggcacaggcaacggcagggcccggcccttggagcacagggatggcagagcagggtcatcgaagcaggtggcgtgcagacagtggc

SEQ ID NO: 164361 - DNA, 30 bp, Homo sapiens; identical to SEQ ID NO: 23936
  chr10:678248-678278
  hypo

SEQ ID NO: 164362 - DNA, 44 bp, Homo sapiens
  chr10:678905-678949
  hypo
gaccacacaggcaccggtgtgaactcagacgcaacggcaccctc

SEQ ID NO: 164363 - DNA, 358 bp, Homo sapiens; identical to SEQ ID NO: 79198
  chr10:679149-679507
  hypo

SEQ ID NO: 164364 - DNA, 31 bp, Homo sapiens; identical to SEQ ID NO: 79199
  chr10:682647-682678
  hypo

SEQ ID NO: 164365 - DNA, 161 bp, Homo sapiens; identical to SEQ ID NO: 23939
  chr10:685211-685372
  hypo

SEQ ID NO: 164366 - DNA, 31 bp, Homo sapiens; identical to SEQ ID NO: 23940
  chr10:685731-685762
  hypo

SEQ ID NO: 164367 - DNA, 30 bp, Homo sapiens; identical to SEQ ID NO: 79202
  chr10:687478-687508
  hypo

SEQ ID NO: 164368 - DNA, 333 bp, Homo sapiens
  chr10:698146-698479
  hypo
caagtgggcgcactgcgtatcccctgcgggaaagaccacgctggctgctgaccaaactccactggcatcttcctccatcctgagggcatcttcctcggcatcttcctccatcgacagcagcctgggctcacctcccagcccgaggctgagaactgagttccagtcccggggtggggtggcgggggggcgcactgtgcaccctcccagctctcctccaccccttccctcaggctggcccaagaatagcctggacaatcacctgctggggacaccgggctgcccctcctccgcccacagcctcaggccacctgtctcatccgtgaccgagaaacg

SEQ ID NO: 164369 - DNA, 42 bp, Homo sapiens; identical to SEQ ID NO: 79203
  chr10:712415-712457
  hypo

SEQ ID NO: 164370 - DNA, 30 bp, Homo sapiens
  chr10:717076-717106
  hypo
gtccctgtgtgtcacgcaaacccctgccac

SEQ ID NO: 164371 - DNA, 611 bp, Homo sapiens
  chr10:741528-742139
  hypo
acggcctgggccagccgggtgtgggcagagagcagcccacccatcggctcatcacactgggaacacgcgtggctgtgacccacccatggccacatgacagccgctggaggatggggcacccagcctacagcgcccgagcagcctcgctgagaaccaccacatgtcagctgggcagaaaccaggaacccgcaggctcacatccaccaagcagtgtgtccgggcagatggcgtctcagagggtgaggatcccccatgatctctggggacccacaggtgaggatcctgtgtgacctctggggacccacagctcctcatatccagcgagcagtgcgtccaggcggatggcatctcagagggtgagggtcctgcatgatgtctggggacccgcgggtgaggatcctgtgtgatctctggggacccgcaggtgaggatcctgtatgatctctggggacccacagctgctcacatccaccaagcagtgcgtccaggtggacggcatctcagagggtgagggtcctgtgtgatctctgaactcgcaggtgagggtcccttgtgatttctggggacccgcagctgctcacatccaacaggcagtgcgtccgggtgtacgg

SEQ ID NO: 164372 - DNA, 153 bp, Homo sapiens; identical to SEQ ID NO: 23941
  chr10:746637-746790
  hypo

SEQ ID NO: 164373 - DNA, 230 bp, Homo sapiens; identical to SEQ ID NO: 23942
  chr10:769016-769246
  hypo

SEQ ID NO: 164374 - DNA, 30 bp, Homo sapiens
  chr10:772954-772984
  hypo
ggctcgatgaccttcgctggacggtcaccc

SEQ ID NO: 164375 - DNA, 132 bp, Homo sapiens; identical to SEQ ID NO: 79206
  chr10:802982-803114
  hypo

SEQ ID NO: 164376 - DNA, 80 bp, Homo sapiens
  chr10:818532-818612
  hypo
cttgggggtagtagacgctgggaccagctcactgcacagattggggctgaaaagaggggctgggtcgacgccaggctgtc

SEQ ID NO: 164377 - DNA, 224 bp, Homo sapiens
  chr10:818867-819091
  hypo
accgtggatttcaggcgggggtcactgggccccctgctccttgccattcatggaacggtgactcagcaggtggggcgaggtgaggacacccctcaaattagtgtaggcactcaaggtgggaccatcctgctgagggtgacgcagtctctgaaaagatcctaacaaggtggaaagactgactctgccaagatttttttttttttttttttttgagacggagtttc

SEQ ID NO: 164378 - DNA, 704 bp, Homo sapiens
  chr10:819330-820034
  hypo
gattacaggcgtgaaccactgcgctcagcctggcgagatttcattttattgataaatgtaagtttttgcactgaactaaccccagacttcactaacgtgggtaggaagacatggctcctaggtgtagacgcaacccccagggctcttggacggagatcacgtggaatccagagtccagtgactttggcagtaactgaaatgggatatttaatattcacgcatttatttcacaaatgatcccagtgtgcctgtgtgtgcctgggccccggcagcggccagccttgccctggaacacaaatgactcacagagagggacgggtcacgcggagaataagccaggagctgatgcgggaggagacgggtcagaggtgctttccctggcaggaagagccaggccccccagaactcctagagcgccctgagatcttcgggttctgatggtggcaggttctgctggggcgggtggtgggccctgctagggagggtgacgggccctgctggggagggtggcgggccctgctggggagggcggcaggccctgcgggagcatgtgagcagggacatgatggggtcgcgcattttgcagggaaaccagcctctggctgctgcaggggtgcaggaggcgagagggtaggggctgggccaggcgggtggcggtgtgttgagaagctgggtacacgtgctccagacgatggccgtgtccc

SEQ ID NO: 164379 - DNA, 30 bp, Homo sapiens
  chr10:820829-820859
  hypo
caccgcgctcggggccgtcagcatgcacgc

SEQ ID NO: 164380 - DNA, 49 bp, Homo sapiens
  chr10:821445-821494
  hypo
gctgtggagacggatcgcacgctgggtttagaggcgccagccgctggca

SEQ ID NO: 164381 - DNA, 561 bp, Homo sapiens; identical to SEQ ID NO: 79209
  chr10:832975-833536
  hypo

SEQ ID NO: 164382 - DNA, 573 bp, Homo sapiens; identical to SEQ ID NO: 79210
  chr10:851104-851677
  hypo

SEQ ID NO: 164383 - DNA, 291 bp, Homo sapiens
  chr10:851916-852207
  hypo
cagggagactggcgacgagatggccgggctggactctcggaaggatctggggaagaaccaagactggcccaggatttgggcttgcctgtctgcgtcggggctgcccgtggagatggggttccggtgaggagcaggaggatccaggccggagggtgggtggtcccatctgaaatgtggactgactgcaggtggccacgccaaggacacagtgagacatgggctggaggctgagcaggctggggctgaggagctcgaatgtactgagtggacgtattagttaccccttctttc

SEQ ID NO: 164384 - DNA, 30 bp, Homo sapiens; identical to SEQ ID NO: 79212
  chr10:853200-853230
  hypo

SEQ ID NO: 164385 - DNA, 195 bp, Homo sapiens; identical to SEQ ID NO: 23947
  chr10:863714-863909
  hypo

SEQ ID NO: 164386 - DNA, 169 bp, Homo sapiens
  chr10:865347-865516
  hypo
gtactgctcaggtcccatgggcgtggttaggcccgaggctcacacacttttacagaaaaagcgtctggacctttctgaggtcctgagagcacgtacataagacgatgggcgtatgctctgtaatcaatacaacactgggccacaagccgaagcttcaaagcaggtcaca

SEQ ID NO: 164387 - DNA, 187 bp, Homo sapiens
  chr10:868639-868826
  hypo
aggaaacatcactgtgacacccgcgactctgaatgcagtggtgtgaaggcctgagaccctgaagaggtgtgcttcccccagctgatcctaacagtagctccaccaaggcagccacctggcgcctggggctcctcatgccattcaacccagctgggccgtgccctgccatggccgccatgcaagggta

SEQ ID NO: 164388 - DNA, 29 bp, Homo sapiens
  chr10:872924-872953
  hypo
tcacacatggccgggcgcagtggctcatg

SEQ ID NO: 164389 - DNA, 286 bp, Homo sapiens
  chr10:894780-895066
  hypo
agagagcaccagaaaccgccatgacatggacaaacacgtatgctgttttgcttgttacagtttcaatctcttttaaaaataactgacttttaaataaaaataaaaacatatattgtcagtttatagcataagtaactgcaaaaggcatgatgaccaaagcatccgggccacgagagaaacggcggcagactgccctgatgctgtgctctatgtgaagcagcacgcagccacctcaaggtagactgtgttagccggaggaagtggagcaaaacgcaaagaaatcatt

SEQ ID NO: 164390 - DNA, 18 bp, Homo sapiens
  chr10:941141-941159
  hypo
taacgtaaaataaaataa

SEQ ID NO: 164391 - DNA, 30 bp, Homo sapiens; identical to SEQ ID NO: 79218
  chr10:963337-963367
  hypo

SEQ ID NO: 164392 - DNA, 356 bp, Homo sapiens
  chr10:978656-979012
  hypo
cctgtcccgaactcccgccccacacctgagacgaaggtcccggccccgaagtcccaaccccacacccgggaccaaggccccggcactgccccgaacccccgccccacacccctaaccaaggcctcggctcagccccggaatccccaaccccacacctgggatcaaggccccggcccttccccaaacccccaacccacacccgggaccaaaaggccccggccccacgtttcctagaggcgctgggttcgggcccacgttgcaacgagtcagatgctcttggtagctcagggaggtgttcacactcctgccgtttccgtgaggatggtgacgactccgaactatagcagcatactcta

SEQ ID NO: 164393 - DNA, 21 bp, Homo sapiens
  chr10:984475-984496
  hypo
agccaccgcgcccggccgaat

SEQ ID NO: 164394 - DNA, 109 bp, Homo sapiens; identical to SEQ ID NO: 79220
  chr10:986577-986686
  hypo

SEQ ID NO: 164395 - DNA, 30 bp, Homo sapiens; identical to SEQ ID NO: 79221
  chr10:1000560-1000590
  hypo

SEQ ID NO: 164396 - DNA, 53 bp, Homo sapiens; identical to SEQ ID NO: 79222
  chr10:1007454-1007507
  hypo

SEQ ID NO: 164397 - DNA, 30 bp, Homo sapiens; identical to SEQ ID NO: 23954
  chr10:1011233-1011263
  hypo

SEQ ID NO: 164398 - DNA, 241 bp, Homo sapiens; identical to SEQ ID NO: 79224
  chr10:1020586-1020827
  hypo

SEQ ID NO: 164399 - DNA, 46 bp, Homo sapiens; identical to SEQ ID NO: 79225
  chr10:1031929-1031975
  hypo

SEQ ID NO: 164400 - DNA, 30 bp, Homo sapiens
  chr10:1042098-1042128
  hypo
gcaaacagctgaagcgtgcggccctgggac

SEQ ID NO: 164401 - DNA, 44 bp, Homo sapiens; identical to SEQ ID NO: 79226
  chr10:1043353-1043397
  hypo

SEQ ID NO: 164402 - DNA, 256 bp, Homo sapiens
  chr10:1053556-1053812
  hypo
gggcacacatcgttacgctgtgtcttcatgttttactgcaaatgtgtctgcacttcaccatgtggtgttgacaacgttcctgtcccacagacgccttcctggtgtgtgctgcactgacgctggaggctgtgtccttccctctgtctttccttgtgtcctcggcgtggtcgggcactgactgtcagtcttgtgtaaagatgattttattgttgtgtgtttatgtaatgctgggtgcggttgagcatgtttgtctgct

SEQ ID NO: 164403 - DNA, 37 bp, Homo sapiens; identical to SEQ ID NO: 79228
  chr10:1080386-1080423
  hypo

SEQ ID NO: 164404 - DNA, 211 bp, Homo sapiens; identical to SEQ ID NO: 79229
  chr10:1106059-1106270
  hypo

SEQ ID NO: 164405 - DNA, 30 bp, Homo sapiens; identical to SEQ ID NO: 79230
  chr10:1118534-1118564
  hypo

SEQ ID NO: 164406 - DNA, 30 bp, Homo sapiens; identical to SEQ ID NO: 79231
  chr10:1120366-1120396
  hypo

SEQ ID NO: 164407 - DNA, 328 bp, Homo sapiens; identical to SEQ ID NO: 79232
  chr10:1120708-1121036
  hypo

SEQ ID NO: 164408 - DNA, 30 bp, Homo sapiens
  chr10:1129713-1129743
  hypo
aggccaggggcctacggccgcgctgccctg

SEQ ID NO: 164409 - DNA, 57 bp, Homo sapiens
  chr10:1130123-1130180
  hypo
ccgcgagagctgcacgcattctctgtgatatgagctgaacccgccaccctttccacg

SEQ ID NO: 164410 - DNA, 30 bp, Homo sapiens
  chr10:1130390-1130420
  hypo
gtgaaggagtacatcggccaccgggacggc

SEQ ID NO: 164411 - DNA, 30 bp, Homo sapiens; identical to SEQ ID NO: 79234
  chr10:1147660-1147690
  hypo

SEQ ID NO: 164412 - DNA, 172 bp, Homo sapiens; identical to SEQ ID NO: 79235
  chr10:1147964-1148136
  hypo

SEQ ID NO: 164413 - DNA, 91 bp, Homo sapiens; identical to SEQ ID NO: 79236
  chr10:1148460-1148551
  hypo

SEQ ID NO: 164414 - DNA, 30 bp, Homo sapiens
  chr10:1151123-1151153
  hypo
ctcctcccgtgacacgactttccgcctctg

SEQ ID NO: 164415 - DNA, 30 bp, Homo sapiens
  chr10:1156494-1156524
  hypo
aggtcctgagatgtgcgtccgcgccccagc

SEQ ID NO: 164416 - DNA, 31 bp, Homo sapiens
  chr10:1156841-1156872
  hypo
ggactgcctgctcatccgggaagtagctctg

SEQ ID NO: 164417 - DNA, 146 bp, Homo sapiens; identical to SEQ ID NO: 79237
  chr10:1163781-1163927
  hypo

SEQ ID NO: 164418 - DNA, 30 bp, Homo sapiens
  chr10:1165019-1165049
  hypo
tgtataccagaaggccgtgctgcaaaacaa

SEQ ID NO: 164419 - DNA, 31 bp, Homo sapiens; identical to SEQ ID NO: 23958
  chr10:1166112-1166143
  hypo

SEQ ID NO: 164420 - DNA, 375 bp, Homo sapiens
  chr10:1167464-1167839
  hypo
tgcccatgctgctctcgtaacccgtgctgctctcgttacccaggctgggcgtttgcttgtgtcctgccccgtgtgatgccgtggtttccagttgggcagtttccccccaggagacagtgtttgttgtcacccctggggaggggtctgctctagtttctaatgtgcctgggcagggcggctgctacatccacaggccaggatgctgcaccacagggaagggccccgaccagacatcaggtcctagcgggggaataagtgtcagcaatccacaccgcagctgtgggcaccacgaccaggcctttgagaatgcagacgtgaaaacggtcgccgccgcatcatcctgactgtgttccggggtctcggtgtcagagcgtg

SEQ ID NO: 164421 - DNA, 30 bp, Homo sapiens; identical to SEQ ID NO: 79240
  chr10:1174802-1174832
  hypo

SEQ ID NO: 164422 - DNA, 30 bp, Homo sapiens
  chr10:1175740-1175770
  hypo
ttttgtgtttacctcgcgtgaagttcagca

SEQ ID NO: 164423 - DNA, 30 bp, Homo sapiens
  chr10:1176726-1176756
  hypo
tgggacttttggacccgtcctttggtgcag

SEQ ID NO: 164424 - DNA, 31 bp, Homo sapiens; identical to SEQ ID NO: 23960
  chr10:1199245-1199276
  hypo

SEQ ID NO: 164425 - DNA, 165 bp, Homo sapiens
  chr10:1206576-1206741
  hypo
ggtagggacggttcccggagggtgctcagcaccatgccgactactgctggctggcacgttcgcacgtggccatgtcagctccaaggaggatgctgacatcctgctggctggcacgttcgcacgtgtccatgttagctgcgagggccatgccgacatcctgctggc

SEQ ID NO: 164426 - DNA, 309 bp, Homo sapiens
  chr10:1219202-1219511
  hypo
cgcacgggagccgctcgcaggtggaacacgtgcttgctgcggtgctaactttgtgtccaggcacagaatcgagcccgttcccaacccgtgagtgggtccctgctgtgttcatctgaataagatgaaatgaagcactggtggaggtagcatcccgggtctcagcagtcataggtgcgcgtgaacacagggcatgcgctccacccgccgtcctcagcggcgcacacgcacaggtggtgttcagagtgtgacgacagctggggtttgtttgttcgtttgttttatggagacgcaaggtctcaaggtctcact

SEQ ID NO: 164427 - DNA, 30 bp, Homo sapiens; identical to SEQ ID NO: 23962
  chr10:1222489-1222519
  hypo

SEQ ID NO: 164428 - DNA, 285 bp, Homo sapiens; identical to SEQ ID NO: 79245
  chr10:1230857-1231142
  hypo

SEQ ID NO: 164429 - DNA, 30 bp, Homo sapiens
  chr10:1232483-1232513
  hypo
tcattcatgcctcctcgcagatcagctctg

SEQ ID NO: 164430 - DNA, 270 bp, Homo sapiens
  chr10:1233051-1233321
  hypo
cacccaagcgaatcccgttcatgtcagctcttcctttttccttcaagtgattcacggtggcagctgccaccccgagagccgggagggacaatctggcccgttggccgctgtggctgtcctactaggcaggggccgcctgggcaggaggagccagccaccaaggccagggatgaccgggcactgggagaggcagtcactaccctgatctgcgtgcactgggcagcctcccctcctcctcccactcccgtcaccaggcggcctcccctcctc

SEQ ID NO: 164431 - DNA, 150 bp, Homo sapiens
  chr10:1233558-1233708
  hypo
cccttggccagctgccgtctgacggggtttcctcccaacgctcctggctgccaggcatgacgaggcccaaacaccaccgggaaggcagctgtgaggacgtgggtgtgaacccagcacgtgcactgctccacactccggggacagaaggaa

SEQ ID NO: 164432 - DNA, 114 bp, Homo sapiens; identical to SEQ ID NO: 79247
  chr10:1245936-1246050
  hypo

SEQ ID NO: 164433 - DNA, 30 bp, Homo sapiens; identical to SEQ ID NO: 23964
  chr10:1246321-1246351
  hypo

SEQ ID NO: 164434 - DNA, 30 bp, Homo sapiens
  chr10:1249923-1249953
  hypo
cagttcgagaaccaccgtctccgtgttggt

SEQ ID NO: 164435 - DNA, 164 bp, Homo sapiens
  chr10:1250511-1250675
  hypo
acctgcaccttctgtcgcgtggacgctccgcccctcactggctcctgccggcctcacccgtcacattgtgtaggacgcttgtgactgctctaaaaccacagggctttcaagctgtcccctccaaggtcccctcctgtgtccagcaccatcgtgactgcctcctg

SEQ ID NO: 164436 - DNA, 164 bp, Homo sapiens; identical to SEQ ID NO: 79249
  chr10:1251713-1251877
  hypo

SEQ ID NO: 164437 - DNA, 652 bp, Homo sapiens; identical to SEQ ID NO: 23966
  chr10:1252096-1252748
  hypo

SEQ ID NO: 164438 - DNA, 30 bp, Homo sapiens
  chr10:1256798-1256828
  hypo
gtgtagacgtctcctcgggacgagtctcag

SEQ ID NO: 164439 - DNA, 608 bp, Homo sapiens; identical to SEQ ID NO: 23967
  chr10:1259925-1260533
  hypo

SEQ ID NO: 164440 - DNA, 30 bp, Homo sapiens
  chr10:1283457-1283487
  hypo
caaggtcccattactcgtagatttgaggaa

SEQ ID NO: 164441 - DNA, 725 bp, Homo sapiens
  chr10:1283789-1284514
  hypo
ggcaagaagacagcgcgtctccaagccaccccttgggcactgcactcacgttctctgagggcaacggcggaaaagggggcagtgcaggaatgtggggggcatggggaaccgaggccaggagagggtggccttgcccggaaggacgagggctgcaaaggtgttttctggagggaaacgtggagtaaggaggaagcctggaattttagcatcttcccagcgcacacggcggctttattggtgtgccagggatgtctctagtctgaataaaaagggatgctttctggctcaccctgtgccaggatagagggaagcgtgttctgagccaggcatggggccccatctgctccctggcagcccccagccgcggcgtccgccttccctggagcccgtccccagccgctcacctcaggtgcagctccagctgcgtgtagaggaagtgcaggaacgcccgccgggccacgacctccgcgtggcagtcattcaccaccagcccctggtcactgaggtgctcgccgctgatgcacttggtccccgaggacagggccacgacctgcgcctgccgagcatccaggcctggggacacagatagcatcagagcagcgtggcccacggcccccgtctccctcctcctcggtcttttcagggtctcacaacagcggtttccctgggttaggaaaccttggaaacactgcgttttgagagctgggaagcgaggcttctgtgtg

SEQ ID NO: 164442 - DNA, 212 bp, Homo sapiens; identical to SEQ ID NO: 79252
  chr10:1286698-1286910
  hypo

SEQ ID NO: 164443 - DNA, 30 bp, Homo sapiens
  chr10:1308796-1308826
  hypo
ggagaaggaccagccggccaccaccgcaga

SEQ ID NO: 164444 - DNA, 30 bp, Homo sapiens; identical to SEQ ID NO: 79253
  chr10:1357204-1357234
  hypo

SEQ ID NO: 164445 - DNA, 82 bp, Homo sapiens
  chr10:1357510-1357592
  hypo
ggcttccaaggtttccgccttcattgattgctgctggggcacccagcacggctgagtgagcgcaaagcgtcctgagcgtggc

SEQ ID NO: 164446 - DNA, 204 bp, Homo sapiens
  chr10:1376281-1376485
  hypo
taggcaggggccatggcaagacgcagactcatgggcagaggccggaggctgttttgtgtttcctggagcagcggtacggcgggaaacatggaagaagcggcggggtggcctaggtgagtgtttagtaatctccagaaagtggaataattaatttgttaactaatgacattcgtatggaagagatcaggccgcggcttttggtcg

SEQ ID NO: 164447 - DNA, 30 bp, Homo sapiens; identical to SEQ ID NO: 79256
  chr10:1416127-1416157
  hypo

SEQ ID NO: 164448 - DNA, 27 bp, Homo sapiens
  chr10:1417946-1417973
  hypo
acacacatgcacacacgcacacatgtg

SEQ ID NO: 164449 - DNA, 121 bp, Homo sapiens
  chr10:1418032-1418153
  hypo
ccgcacacatgcacacacatgcacatgacacacatgcatgtgaactcccacaccacacacgtgcacataccacacttgccacacatgcacacacgtgcacagacacacaccacacacatgc

SEQ ID NO: 164450 - DNA, 147 bp, Homo sapiens
  chr10:1418212-1418359
  hypo
tcacacaccccacacacgtgcacgtaccacacaccacacataccacatgcatgaacacacatcacgacacacacacacacacgcacatctttttctaccttcccgtgcatctggattacaaatggataaggccgcgctggcaatgcc

SEQ ID NO: 164451 - DNA, 30 bp, Homo sapiens; identical to SEQ ID NO: 79258
  chr10:1419354-1419384
  hypo

SEQ ID NO: 164452 - DNA, 590 bp, Homo sapiens
  chr10:1443298-1443888
  hypo
catgcctcccattgtgtgtcccggcagccacaaacaccgtcaggcccagcgtcaccctccccacctcccggatgagaaggagcctccggagcagctgagggacccactgtggaggcagccgggtgggggacggcccggtgtgtgtggtctggtcgtgactttcccacaaggcatcacccatgggaaggaggcgtgatgatggtaagcagcacagagccctgcggggaccagggttttggaacaccccggccttcggtcatgctgcgggaagcctgggtcctctccctgtcagagaagacagctgggttctggggtttcacagcacacgggtacccccggttccaggactgaccatggagggcaggtgccagcgctgttcggggcctccggtgatggtcccagctcccttcccacaaaggccaggtgcagccttggaatcctctgacacttggatccccatggattcaatgggagctcgcatgctgtgaagaccgcggtgcattttaaacggcaccagcaaggaggctacactgtgtatcccgtgtccccatttctaccgaagagcggcggcttcacggcggtttgggagt

SEQ ID NO: 164453 - DNA, 30 bp, Homo sapiens
  chr10:1444828-1444858
  hypo
tcatcctgccttcctcgccatcagctccca

SEQ ID NO: 164454 - DNA, 104 bp, Homo sapiens
  chr10:1445192-1445296
  hypo
agggcggcggaagtccgtcttcctgctggggcaggtgcgctcgtgcgcctggagctctgctgggtcctgcaggcaccgtgtgcggctctcgtggaagcagccgg

SEQ ID NO: 164455 - DNA, 30 bp, Homo sapiens
  chr10:1453063-1453093
  hypo
gctgtttcagctgcccggatggagggcagt

SEQ ID NO: 164456 - DNA, 30 bp, Homo sapiens
  chr10:1453510-1453540
  hypo
ctccttcaagtgcaccggaggctccgtcgt

SEQ ID NO: 164457 - DNA, 196 bp, Homo sapiens
  chr10:1476321-1476517
  hypo
cgagaaggctgataacgagagatttaaaataacacgaagattcaggtgaagctattagattccgagaaggctgataacgagagatttaaaataacacgaagaggtgatgtacacagaggccggtatgagaaattccacattaactgtaatttgaaaatgttttgcctctcaccgctttctgcgttttaaatggagg

SEQ ID NO: 164458 - DNA, 481 bp, Homo sapiens
  chr10:1506142-1506623
  hypo
ttaggaaagcgcaaacgcaaacccccataagacgcctggacacacctgcgagagtggctgcaataaaacaaccacagagaagctgatgacagtgaatgctgacaaggatgtggaggggccaggaccgccacacacatgcgctgggggcagtcacagcgggcagtgtgccggagaagagggtggacacacactcccccacacacgcgcggggggcagtcacagcgggcagtgcgccggagaagagggtggacacacactcccccacacacgcgctggggacagtcacagcgggcagtgcgccggagaagagggtggacacacactcccccacacacgcgctggggacagtcacagcaggcagcgcgccggagaagagggtggacacacactcccccacacacgcgcgggggccagtcacagcgggcagcgtgctggagaagagggtggacacacactcccccacacacgcgcgggggccagt

SEQ ID NO: 164459 - DNA, 144 bp, Homo sapiens; identical to SEQ ID NO: 79263
  chr10:1527765-1527909
  hypo

SEQ ID NO: 164460 - DNA, 101 bp, Homo sapiens; identical to SEQ ID NO: 79264
  chr10:1547437-1547538
  hypo

SEQ ID NO: 164461 - DNA, 45 bp, Homo sapiens; identical to SEQ ID NO: 79265
  chr10:1555731-1555776
  hypo

SEQ ID NO: 164462 - DNA, 363 bp, Homo sapiens
  chr10:1558526-1558889
  hypo
tgggtgcaacagaggcggctttccctgctccctttcccgaggtgcagctggattcagagcttcccacctgcttgtgaccagcgtgcattctcgacatacacgcttcagaccaaatgtctgcttgttcacctgtgcgggctttgtgtgggctgctctgtgctatgcgggctgctctgtgcgggctgctctgtgctgtgtgggctgctctgctctgtgcgggctgctgtgtgctgtgcgggctgctctgtgcttgggaaaatgaaggttggcatgatttcctgcggcaatgccctcccgttttatgccttaataagggctagaaagaaaacattttcctcgagctgcatgcgaatatcgcccaaa

SEQ ID NO: 164463 - DNA, 390 bp, Homo sapiens
  chr10:1574917-1575307
  hypo
gaccgctggctatggcgccgggactcttctcccagtgggtcaatcgcaccttcactctgggcaggtgagggcacaggcaggagcctgaatgtgcaggtgcccgcaggcgaggtggagaatgggcgcttctccaggaacttaaatcttgataatgaggcccatctgaacccctcaggctgccccaggagcctcgcctcacctgcgggcatccagcggtgtctgtaatgaccctgccctgaaatgaaggggaggaaccgcatcctgtgtgttactccaggggaaggacagggtaggggccggcctccaccctcctcgaagcaaactctcattagatgttcctactgggccctggagagtaacgagccagctgattactgtctctagtgtaaa

SEQ ID NO: 164464 - DNA, 385 bp, Homo sapiens; identical to SEQ ID NO: 23970
  chr10:1585130-1585515
  hypo

SEQ ID NO: 164465 - DNA, 30 bp, Homo sapiens
  chr10:1593973-1594003
  hypo
gtcctgccgggcttccggctctgaatgtct

SEQ ID NO: 164466 - DNA, 30 bp, Homo sapiens
  chr10:1594218-1594248
  hypo
gccaagccctcctcccgcatgtggcctgag

SEQ ID NO: 164467 - DNA, 27 bp, Homo sapiens
  chr10:1597839-1597866
  hypo
catatatgggccgggcgcggtggctca

SEQ ID NO: 164468 - DNA, 97 bp, Homo sapiens
  chr10:1607154-1607251
  hypo
aggcctggcctcggccgtagacctgcatcccacctggcctgggggccgacgtgcagcagcaccggtgccttcccctccctcccgtgcagggctctcc

SEQ ID NO: 164469 - DNA, 35 bp, Homo sapiens
  chr10:1649862-1649897
  hypo
cctagggaccctgcccgcagcgacatgcatagaat

SEQ ID NO: 164470 - DNA, 30 bp, Homo sapiens
  chr10:1665062-1665092
  hypo
gtcagggaatgctcacgtggcttcattcat

SEQ ID NO: 164471 - DNA, 30 bp, Homo sapiens
  chr10:1665768-1665798
  hypo
ccaggcatggtccaccgtgagccgtaactg

SEQ ID NO: 164472 - DNA, 112 bp, Homo sapiens; identical to SEQ ID NO: 79268
  chr10:1668890-1669002
  hypo

SEQ ID NO: 164473 - DNA, 31 bp, Homo sapiens; identical to SEQ ID NO: 79269
  chr10:1671647-1671678
  hypo

SEQ ID NO: 164474 - DNA, 30 bp, Homo sapiens
  chr10:1685116-1685146
  hypo
aggaaacctccaccccgcggccccctccta

SEQ ID NO: 164475 - DNA, 188 bp, Homo sapiens
  chr10:1701551-1701739
  hypo
gagctgggggaaggccggagccaggcacagggacagaaaatgggggtccccacgcgacatctaaaaaacgaaaaaaccaaactgactaaaacgtgcacagaaacacgattcagacagtgggagcggggtgatccctcttccctggaaggagcctggagccccactgccggccccggtcactttagtct

SEQ ID NO: 164476 - DNA, 624 bp, Homo sapiens
  chr10:1708216-1708840
  hypo
gccaggtggaaggaccgggcatggaggctccaggctgagaccagcattggatagggtgggtgggcagggattacttaggtgccaataacccaggagtagaggagatggcaccgctataaaatgccacgagaggtgcgcacaagggttcagggctgcatagaaccgggagggagaggaagaccccgctggagcaagtgccagggtgacagagccagaggactttctgagatagcacagccccgagggtcggcagggcactgagggccacctgccctgcctgccccgccagggcgagcatctgaatccacattctcctgggccgcagctcatctgcgagtcggagcctccgaaggggggccagtagcacatgtcccagcctctctcgcccaggtgatcctcatgaccagacgcggctttgctacaagacagctcagactgtgttcccccaatcgtgttcccgcaggaaagctgcccgaggatttttgtcatgcacacgccgctgccagcccattagctctccctgcttcccatggtctgccgcatctggggtatccagcgtcctcctgcagccgagggggaattctgaatgttttgctagaaaccgtctcatcaacattcagtttc

SEQ ID NO: 164477 - DNA, 31 bp, Homo sapiens; identical to SEQ ID NO: 23972
  chr10:1720646-1720677
  hypo

SEQ ID NO: 164478 - DNA, 30 bp, Homo sapiens
  chr10:1726141-1726171
  hypo
ggtggctccggtgtgcgtgaaagaccaccg

SEQ ID NO: 164479 - DNA, 148 bp, Homo sapiens; identical to SEQ ID NO: 79272
  chr10:1767854-1768002
  hypo

SEQ ID NO: 164480 - DNA, 234 bp, Homo sapiens
  chr10:1789172-1789406
  hypo
acatgaatcgcgtgacgtgtatgcgagtgtcacatgaatcgcctgatgtgtacgtgtcacatggattgcgtgacatgaacgtgactgtcacatggatcgcctgatgtgtatgtgtcacatggattgcgtgacgtgtatgcgagtgtcacatggatcgcgtgatgtgtatgcgagtgtcacatggatcgcgtgatgtgtatgcgagtgtcacatggatcgcgtgatgtgtatgcg

SEQ ID NO: 164481 - DNA, 68 bp, Homo sapiens
  chr10:1814097-1814165
  hypo
tcagtctgcggaggacggcagagccagtttgctctggcttggcctgaagaagacgctgagagtcgtcg

SEQ ID NO: 164482 - DNA, 170 bp, Homo sapiens
  chr10:1828703-1828873
  hypo
atttaatggaggagccaacttcggcgctaaacatagggagacgatgattgcgtggtcagtgcagatgcagaggaagctgggatagtcacgggcaggtgcccgggggctgtgtgtcgatgagtgtgaagacaggctctgtgtgagtgcacgtacatgcaggtgtgtgtatg

SEQ ID NO: 164483 - DNA, 34 bp, Homo sapiens
  chr10:1852465-1852499
  hypo
gagagagagttctttatcacgcagactttctcta

SEQ ID NO: 164484 - DNA, 30 bp, Homo sapiens
  chr10:1981663-1981693
  hypo
gagagactcgcccagcgctttcctcggttt

SEQ ID NO: 164485 - DNA, 30 bp, Homo sapiens
  chr10:1982061-1982091
  hypo
gttagaaccttcggacgtaggcaccccacg

SEQ ID NO: 164486 - DNA, 324 bp, Homo sapiens
  chr10:1986623-1986947
  hypo
ccactgcacctggcccgtgattctgttcttatgcctgacgccttccgtcgggggagcactcccacactcagtgctccttgccttgccctgacgccttctgtctcgggagccctcccacacctggtgctccttgccttgccctgacaccttctgtcccaggagcattcccacacccggtgctccttgtcttgatgacttctgtctcaggagccctcccacactcagtgctccttgtcttgccctgatgccttctgtcgggggagcactcccacacccggtgctctttgtcttgtcctgacgccttctgtccggggagcactccca

SEQ ID NO: 164487 - DNA, 1003 bp, Homo sapiens
  chr10:1994485-1995488
  hypo
ccctggggtccaccgcggatggagccggcaggtaaggatcaggcccgctggcggccgcgctcctatccgcaccccttatccgcaccccttatccgcgccccttatccacacccgttatccgcaccccttatctgcactccttatccgcatcccctatccgcaccccctatccgcacccctggcccaacacctccactccgaggcctcttcagggggtcctttcccagcgcgtctcctctccctccctgggactcccagagccataaaatcaggccccgtccttagggctccgtccccagttccgtgaccggccctctgctctgtgctgacacccagcaccctccccggcctctgctccgaggggaaaataaaacaggggccttcaggcctcaccgctggctcactccatcgcagcaaatcgaccgagggtcctctgctgcgtccttgcggcctgttgtcttactcagcggccctgacacccggcatttatttaaagcctcgaggctggatgcggttgcgacagcagggcgtgttcagaggaaagaaggggctggagcccgggcactcgggttaggcaacgtcaaggggctcgggaggagagtgggctccgccaaggcggtggctgcaggggccacgtgtggcctcttggaacacggaggaaggaagcgctgaaggacgtaaggactgtctgtaaaatcctccctgacaagggaggtcagggtcgggatgtccccttggacgtggcgatgcggaggcctgagtgacctcaggagaggggctaggtggagatgacgctcacggagggtgactcgggagacaaaccgcagacagtaggtgcaggtggccctgagaggcgtcctgcacagcacagcaaaagccagggtcctagttagtgggcgaagtgagttccagactttgggaaaataatcgcgttttgtactgctgtaaatgagcggaagaaagggagaggccgggcgcggtggctgaggcctgtactcccagc

SEQ ID NO: 164488 - DNA, 208 bp, Homo sapiens; identical to SEQ ID NO: 23974
  chr10:2006675-2006883
  hypo

SEQ ID NO: 164489 - DNA, 64 bp, Homo sapiens; identical to SEQ ID NO: 79276
  chr10:2140550-2140614
  hypo

SEQ ID NO: 164490 - DNA, 30 bp, Homo sapiens
  chr10:2256503-2256533
  hypo
cttgttggagaaaggcgccgtcttctctac

SEQ ID NO: 164491 - DNA, 52 bp, Homo sapiens
  chr10:2358813-2358865
  hypo
tgtgcttggagcctacgtccatggaagaggaggactccgtcatggaattgtg

SEQ ID NO: 164492 - DNA, 30 bp, Homo sapiens
  chr10:2359837-2359867
  hypo
cgttagttcctttctcgtagaaagaatggg

SEQ ID NO: 164493 - DNA, 80 bp, Homo sapiens
  chr10:2364621-2364701
  hypo
aaaaaaaaaaaaggaaagagaaaagctctctctcctgcagagagagggctcctgagtgggtcttccggttctgtggtaaa

SEQ ID NO: 164494 - DNA, 30 bp, Homo sapiens
  chr10:2375896-2375926
  hypo
cgccttccttggaaccgcaagaacttcagc

SEQ ID NO: 164495 - DNA, 173 bp, Homo sapiens; identical to SEQ ID NO: 23975
  chr10:2416381-2416554
  hypo

SEQ ID NO: 164496 - DNA, 30 bp, Homo sapiens; identical to SEQ ID NO: 79278
  chr10:2606117-2606147
  hypo

SEQ ID NO: 164497 - DNA, 186 bp, Homo sapiens; identical to SEQ ID NO: 23976
  chr10:2610007-2610193
  hypo

SEQ ID NO: 164498 - DNA, 222 bp, Homo sapiens; identical to SEQ ID NO: 23977
  chr10:2620064-2620286
  hypo

SEQ ID NO: 164499 - DNA, 102 bp, Homo sapiens; identical to SEQ ID NO: 23978
  chr10:2620525-2620627
  hypo

SEQ ID NO: 164500 - DNA, 30 bp, Homo sapiens
  chr10:2621046-2621076
  hypo
caacaggattaggtgcggtagagacgcgtg

SEQ ID NO: 164501 - DNA, 30 bp, Homo sapiens
  chr10:2744238-2744268
  hypo
cctaatgatcctggccgcgccccctggttt

SEQ ID NO: 164502 - DNA, 43 bp, Homo sapiens; identical to SEQ ID NO: 79282
  chr10:2782245-2782288
  hypo

SEQ ID NO: 164503 - DNA, 30 bp, Homo sapiens
  chr10:2833605-2833635
  hypo
atttgccagtgtacacgcaccccacattca

SEQ ID NO: 164504 - DNA, 458 bp, Homo sapiens; identical to SEQ ID NO: 23979
  chr10:2932054-2932512
  hypo

SEQ ID NO: 164505 - DNA, 111 bp, Homo sapiens
  chr10:2936338-2936449
  hypo
ggcgatgggcatccacggctcatctttaagtgaagagtgcgctggcgggactgtgaggcttgaatgaggtgtgacacgcagctctaagcacggcacgcagtagtctccgct

SEQ ID NO: 164506 - DNA, 31 bp, Homo sapiens
  chr10:3077559-3077590
  hypo
gcatccttatgtattcgtctgctctcacact

SEQ ID NO: 164507 - DNA, 30 bp, Homo sapiens
  chr10:3106510-3106540
  hypo
atcaggcaaaagagacggcggtctttcctg

SEQ ID NO: 164508 - DNA, 2351 bp, Homo sapiens; identical to SEQ ID NO: 118556
  chr10:3109009-3111360
  hypo

SEQ ID NO: 164509 - DNA, 557 bp, Homo sapiens
  chr10:3121873-3122430
  hypo
gcaggggtgaggggccgccattgggtcttagttgtgctcctgcatcacctgcttcctagtgttggcacgggctgtgtttgatgggtaattcatccattagagtgaccatagcgtaaggtcctggaaccagagctgtgcgtccacccttcgagttgaagagtccaggcactgctgagcccagccatgggagagatgagcgaggaccttccacaggtgtgaggccaagggggcgggaggctctgtcctgccaggaataaatggaatcaggtgggaggctctgtcctgccacgaataaatggaatcaggtgggaggcaagccaggcccttttcctgggaggtgccagagccgaggaggagttggaggaggaagagcgtccgagcaagagcactggtgggactgctaccaaggttcaggaacaggagcctccgagtgctgccagacaggtgggaggtccctggggcatggccgggagctcaggggaacttgggttttcttccagtagccctgggaacctggaggaacgcggtcatattcgtgctttagaagagaacattgc

SEQ ID NO: 164510 - DNA, 30 bp, Homo sapiens
  chr10:3122748-3122778
  hypo
gtatggaaaacatctcggacgtagtgtcaa

SEQ ID NO: 164511 - DNA, 67 bp, Homo sapiens; identical to SEQ ID NO: 79287
  chr10:3141465-3141532
  hypo

SEQ ID NO: 164512 - DNA, 55 bp, Homo sapiens; identical to SEQ ID NO: 79288
  chr10:3146042-3146097
  hypo

SEQ ID NO: 164513 - DNA, 276 bp, Homo sapiens
  chr10:3150859-3151135
  hypo
agttccgcatcctaacgagatgtttccttgcagcttgtcgtcacgcagctgggctatgacacacgtgtgaccatcctcgggcacgtgcagagaggagggaccccttcggcattcgacaggatcttggtgagttgggaagggttgggcatcttcacaaggtctctaggaggaagcgtttctggagaggcacaggcaccagccggccacagaggctggcaaggtgctccccgagagatgcccgcggcccggccctcatcttaacgatccttgagacct

SEQ ID NO: 164514 - DNA, 443 bp, Homo sapiens; identical to SEQ ID NO: 79290
  chr10:3151596-3152039
  hypo

SEQ ID NO: 164515 - DNA, 14 bp, Homo sapiens
  chr10:3155262-3155276
  hypo
tgtgtccggtattc

SEQ ID NO: 164516 - DNA, 425 bp, Homo sapiens
  chr10:3155318-3155743
  hypo
cgggcaacctgaacacctacaagcgacttgccatcaagctgccggatgatcagatcccaaaggtaggtggccggcctcccgcgatgccccgacctctcctgcgggcctcccctcatggcctctgcctcagtgaatgaggccacctgttttcaggcctggcacggcatgagccactgccaaagtgtgcagcaaatggagctcacgtgtgcccgtgacccagcactcacctgccttctgttttgcagaccaattgcaacgtagctgtcatcaacgtgggggcacccgcggctgggatgaacgcagccgtacgctcagctgtgcgcgtgggcattgccgacggccacaggatgctcgccatctatgatggctttgacggcttcgccaagggccaggtgagtcacccaggatgccgtaggcaggcagac

SEQ ID NO: 164517 - DNA, 329 bp, Homo sapiens; identical to SEQ ID NO: 79291
  chr10:3158925-3159254
  hypo

SEQ ID NO: 164518 - DNA, 511 bp, Homo sapiens; identical to SEQ ID NO: 23985
  chr10:3160806-3161317
  hypo

SEQ ID NO: 164519 - DNA, 30 bp, Homo sapiens; identical to SEQ ID NO: 23986
  chr10:3162176-3162206
  hypo

SEQ ID NO: 164520 - DNA, 30 bp, Homo sapiens
  chr10:3167356-3167386
  hypo
tgtggtgccggccacgattagcaacaatgt

SEQ ID NO: 164521 - DNA, 46 bp, Homo sapiens
  chr10:3168654-3168700
  hypo
cacacttccaccctcgcgccccacacgcgacgcagccctaccctgg

SEQ ID NO: 164522 - DNA, 56 bp, Homo sapiens
  chr10:3171105-3171161
  hypo
acaggacctggtgccgggagcaggcggggccggggattcccgacaaaggcttgatg

SEQ ID NO: 164523 - DNA, 233 bp, Homo sapiens; identical to SEQ ID NO: 79296
  chr10:3179619-3179852
  hypo

SEQ ID NO: 164524 - DNA, 30 bp, Homo sapiens; identical to SEQ ID NO: 79297
  chr10:3180258-3180288
  hypo

SEQ ID NO: 164525 - DNA, 30 bp, Homo sapiens
  chr10:3180552-3180582
  hypo
atggagccgctgcccgggagctcgcgttgt

SEQ ID NO: 164526 - DNA, 30 bp, Homo sapiens; identical to SEQ ID NO: 79298
  chr10:3184122-3184152
  hypo

SEQ ID NO: 164527 - DNA, 198 bp, Homo sapiens
  chr10:3185689-3185887
  hypo
gttcctgagggacacggtatggtcagaggcggctgtgctgccatgcaccgcccacggcactgggactggacccactcaggggtcagaggcggctgtgctcccacgcactgcccacggcactgggactggagccatctcaggggtcccatctccgtgacactctgcagccaggtgctggggcgcgagagcaaggcactg

SEQ ID NO: 164528 - DNA, 30 bp, Homo sapiens; identical to SEQ ID NO: 79300
  chr10:3186099-3186129
  hypo

SEQ ID NO: 164529 - DNA, 30 bp, Homo sapiens; identical to SEQ ID NO: 79301
  chr10:3190386-3190416
  hypo

SEQ ID NO: 164530 - DNA, 97 bp, Homo sapiens
  chr10:3192558-3192655
  hypo
gagagatgtcagcctcgagttccactcacatgcgcccacacacacacacacatgaaaataaatgagatacaaacatgacaagcgctgtcagaagaca

SEQ ID NO: 164531 - DNA, 40 bp, Homo sapiens
  chr10:3192933-3192973
  hypo
gaatgaaacgtgtcacggaacaaaacgtgccaaggaacga

SEQ ID NO: 164532 - DNA, 235 bp, Homo sapiens
  chr10:3194432-3194667
  hypo
cccaggcgtgctccccgccctgatggccatcagtgaagcggcttcacagtgctacaccgagccaagcaagtatacaaatgcatgattccacgactcccggggagggctgtgcccagttcccactttaactcagtccccgcagacagcactcctggtgtctgctgggctgacctcccccatgttccatttccaccttctgaagttccccgagagcgtgccacgcacttagacacgg

SEQ ID NO: 164533 - DNA, 30 bp, Homo sapiens; identical to SEQ ID NO: 23990
  chr10:3196495-3196525
  hypo

SEQ ID NO: 164534 - DNA, 547 bp, Homo sapiens; identical to SEQ ID NO: 23991
  chr10:3196874-3197421
  hypo

SEQ ID NO: 164535 - DNA, 118 bp, Homo sapiens
  chr10:3197635-3197753
  hypo
ctcaatgcatcgaacgtgagctctgttggcgcccagcggacacctgttggttgaaataatacctgcctccaactactaactcactaacaagtccactaggcccgagtgcaggttaggg

SEQ ID NO: 164536 - DNA, 97 bp, Homo sapiens
  chr10:3206002-3206099
  hypo
ggagaccactgagtacgtgtggtcaggaagaagtctgttctgaaggtgctgggagaatatcctctcattgtctgtcttgaaacgtaaaataaataaa

SEQ ID NO: 164537 - DNA, 82 bp, Homo sapiens
  chr10:3206322-3206404
  hypo
gtgtggtgcaacaaacgcatagctgagggctgtaaatcgggatggatcagtcggtctgcccaccagccgtgagggaagtggg

SEQ ID NO: 164538 - DNA, 30 bp, Homo sapiens
  chr10:3207918-3207948
  hypo
ctcaggatctgcactcgacgggcaccaggg

SEQ ID NO: 164539 - DNA, 30 bp, Homo sapiens; identical to SEQ ID NO: 79307
  chr10:3212289-3212319
  hypo

SEQ ID NO: 164540 - DNA, 112 bp, Homo sapiens; identical to SEQ ID NO: 79308
  chr10:3216515-3216627
  hypo

SEQ ID NO: 164541 - DNA, 71 bp, Homo sapiens; identical to SEQ ID NO: 79309
  chr10:3243875-3243946
  hypo

SEQ ID NO: 164542 - DNA, 30 bp, Homo sapiens; identical to SEQ ID NO: 79310
  chr10:3244438-3244468
  hypo

SEQ ID NO: 164543 - DNA, 189 bp, Homo sapiens; identical to SEQ ID NO: 79311
  chr10:3277175-3277364
  hypo

SEQ ID NO: 164544 - DNA, 70 bp, Homo sapiens; identical to SEQ ID NO: 79312
  chr10:3284259-3284329
  hypo

SEQ ID NO: 164545 - DNA, 47 bp, Homo sapiens
  chr10:3285011-3285058
  hypo
tcggtgctgccagcacgatgctaggagtgacccgggcgtgtgggagg

SEQ ID NO: 164546 - DNA, 30 bp, Homo sapiens; identical to SEQ ID NO: 79313
  chr10:3285675-3285705
  hypo

SEQ ID NO: 164547 - DNA, 451 bp, Homo sapiens
  chr10:3329665-3330116
  hypo
atgtccaaccttcctcctgtgcgttgttctggtttcacatgttcgtgttgtaattgagtgcgtgcacactcagtaaatgcgaaatggtttcatcacaaccgcaccgatgcagttcctaaaagaaacacacgacagccgattttgcttctcaaaatcgctgcattcagggtttccgccgtcaccctgctggcagtgaactagaggacccgtcccaccggagctggtccatggagaggtgccacagcctgtgagccacggcagagcggagaagcctgggacccctgtcacctctcagagcagcgcctcacatggcagaaggagctgctttccgaagagctaaaggttgccataaatatttataagagacctggcattgctgcgctggagggcagtgtgttatgataaaagtcacaaatggagctgaaaaaacagtggcttctacatgacagct

SEQ ID NO: 164548 - DNA, 450 bp, Homo sapiens
  chr10:3330175-3330625
  hypo
tgtgtggggatacgtatttgcacacatgtgtgttcaatctgtggatacggtacctacgtgcacttctgtacctggtttcttcctttttctacacatacattatttatctgttttttaaaattcaacttttattgctccttgtcctgccggtggccctggcaacatgccacgccggactccagcttagtttccttgttgccttgcagccaaacttacgcagtgtgcagacggagctgctcagaggggaggggcagcgagcaggtgccacgtccacaccgggtgaggcgtgaggtgagggctcccccgcgccgccctggcgtccaggtggtgagggctgcacggaaacgtggacttcggcagaacatgtgtgcgccacggagcggctgcgtgcagcccgcaggtgagaccgtctgcataactctgccaaccgtggagtatccaagtaatttt

SEQ ID NO: 164549 - DNA, 398 bp, Homo sapiens; identical to SEQ ID NO: 23997
  chr10:3342839-3343237
  hypo

SEQ ID NO: 164550 - DNA, 53 bp, Homo sapiens; identical to SEQ ID NO: 79317
  chr10:3365238-3365291
  hypo

SEQ ID NO: 164551 - DNA, 51 bp, Homo sapiens
  chr10:3438496-3438547
  hypo
ctgcagacaggtgaccggagcgcgctgggagccacacggcggagcagcccc

SEQ ID NO: 164552 - DNA, 231 bp, Homo sapiens; identical to SEQ ID NO: 79318
  chr10:3512564-3512795
  hypo

SEQ ID NO: 164553 - DNA, 43 bp, Homo sapiens; identical to SEQ ID NO: 79319
  chr10:3518834-3518877
  hypo

SEQ ID NO: 164554 - DNA, 247 bp, Homo sapiens; identical to SEQ ID NO: 79320
  chr10:3572531-3572778
  hypo

SEQ ID NO: 164555 - DNA, 30 bp, Homo sapiens; identical to SEQ ID NO: 79321
  chr10:3596481-3596511
  hypo

SEQ ID NO: 164556 - DNA, 30 bp, Homo sapiens
  chr10:3628268-3628298
  hypo
aggcatgagctaccgcgcccgggatcattt

SEQ ID NO: 164557 - DNA, 33 bp, Homo sapiens
  chr10:3641387-3641420
  hypo
ggagggcgaggcgggcggatcggatcatgaggt

SEQ ID NO: 164558 - DNA, 32 bp, Homo sapiens
  chr10:3641659-3641691
  hypo
ggaggaaaactgccagtcgcctgactagtttg

SEQ ID NO: 164559 - DNA, 557 bp, Homo sapiens; identical to SEQ ID NO: 79323
  chr10:3678616-3679173
  hypo

SEQ ID NO: 164560 - DNA, 123 bp, Homo sapiens; identical to SEQ ID NO: 79324
  chr10:3712902-3713025
  hypo

SEQ ID NO: 164561 - DNA, 31 bp, Homo sapiens; identical to SEQ ID NO: 7166
  chr10:3862627-3862658
  hypo

SEQ ID NO: 164562 - DNA, 256 bp, Homo sapiens; identical to SEQ ID NO: 118564
  chr10:3862674-3862930
  hypo

SEQ ID NO: 164563 - DNA, 30 bp, Homo sapiens; identical to SEQ ID NO: 79326
  chr10:3868099-3868129
  hypo

SEQ ID NO: 164564 - DNA, 30 bp, Homo sapiens; identical to SEQ ID NO: 79327
  chr10:3868330-3868360
  hypo

SEQ ID NO: 164565 - DNA, 30 bp, Homo sapiens
  chr10:3903113-3903143
  hypo
ctaaatcttcgaacacgttgagaagattcc

SEQ ID NO: 164566 - DNA, 206 bp, Homo sapiens
  chr10:3954895-3955101
  hypo
ccaccgcacccggccaatattcattcattctttctcacctcttcctccgctctttaaggttgagcttgcctggcccaaggcacagagttctgggaaggatggaagagaggggaagggagagcaccaacatcacggaccgcctttcacatcagcggcagcagcagtaaaacccccagaaaacctggggtaggcgtgggggtctgttt

SEQ ID NO: 164567 - DNA, 30 bp, Homo sapiens; identical to SEQ ID NO: 23999
  chr10:3983404-3983434
  hypo

SEQ ID NO: 164568 - DNA, 69 bp, Homo sapiens
  chr10:4082780-4082849
  hypo
gtgcctttgttacatcgtgtcccccgttaaaacccggaggctgacaaagtcatacggtttaggaactat

SEQ ID NO: 164569 - DNA, 139 bp, Homo sapiens; identical to SEQ ID NO: 79329
  chr10:4191044-4191183
  hypo

SEQ ID NO: 164570 - DNA, 30 bp, Homo sapiens
  chr10:4353892-4353922
  hypo
ctgatggaatactttcgactccaagtgttt

SEQ ID NO: 164571 - DNA, 31 bp, Homo sapiens; identical to SEQ ID NO: 79330
  chr10:4500574-4500605
  hypo

SEQ ID NO: 164572 - DNA, 70 bp, Homo sapiens
  chr10:4773956-4774026
  hypo
aaaactcgctgctgacgtagtttcatgccgctgctcatatctgtgctcagccatccgtagttttctccac

SEQ ID NO: 164573 - DNA, 161 bp, Homo sapiens; identical to SEQ ID NO: 79331
  chr10:4867811-4867972
  hypo

SEQ ID NO: 164574 - DNA, 38 bp, Homo sapiens
  chr10:4872905-4872943
  hypo
attgacgcagggtaccggcacttcgactgtgcttactt

SEQ ID NO: 164575 - DNA, 224 bp, Homo sapiens
  chr10:4886023-4886247
  hypo
ctctcctttctcaggcgtcctgctctttgaatggcccagagcagctctgggtgaccagccaaccttaagcctgaaaggtatggatttggctaaactgtaaactcagttctctccaatggctgctgacgggcctcttggaacgagactgcaggtctcttgtagtggttagaattgagcactgctgactgaccggcatctgctccacatggtgtgtccggaattgg

SEQ ID NO: 164576 - DNA, 27 bp, Homo sapiens
  chr10:4959070-4959097
  hypo
ggtccgtatacaacacgaaatgctgtg

SEQ ID NO: 164577 - DNA, 30 bp, Homo sapiens; identical to SEQ ID NO: 79333
  chr10:4959679-4959709
  hypo

SEQ ID NO: 164578 - DNA, 158 bp, Homo sapiens; identical to SEQ ID NO: 118566
  chr10:5488420-5488578
  hypo

SEQ ID NO: 164579 - DNA, 70 bp, Homo sapiens
  chr10:5495769-5495839
  hypo
tcatgtgtgattatccgttgcattctgtcatgtatgtttaagcgcatgccaaatgcggggcactgtttga

SEQ ID NO: 164580 - DNA, 30 bp, Homo sapiens
  chr10:5496216-5496246
  hypo
ttactcttcagttaccgcgcttgaatgcct

SEQ ID NO: 164581 - DNA, 30 bp, Homo sapiens
  chr10:5496599-5496629
  hypo
tttaagtacccagtgcgttagtacgctgtg

SEQ ID NO: 164582 - DNA, 30 bp, Homo sapiens
  chr10:5506607-5506637
  hypo
aaacgacaatgagatcgcgcttcacaccaa

SEQ ID NO: 164583 - DNA, 129 bp, Homo sapiens
  chr10:5509143-5509272
  hypo
tccatccatcaaatgcgcatagatgtgcattttatggggtggcagatggaaccgaaagctcaaagcagcctttaaactttccagccccagcaggcccgtgagtccctcgggttctttgcagcctctgct

SEQ ID NO: 164584 - DNA, 31 bp, Homo sapiens; identical to SEQ ID NO: 79335
  chr10:5512031-5512062
  hypo

SEQ ID NO: 164585 - DNA, 19 bp, Homo sapiens
  chr10:5518992-5519011
  hypo
tctccgtttctgcatcaca

SEQ ID NO: 164586 - DNA, 100 bp, Homo sapiens; identical to SEQ ID NO: 79337
  chr10:5523191-5523291
  hypo

SEQ ID NO: 164587 - DNA, 176 bp, Homo sapiens; identical to SEQ ID NO: 79338
  chr10:5527429-5527605
  hypo

SEQ ID NO: 164588 - DNA, 501 bp, Homo sapiens
  chr10:5529519-5530020
  hypo
agcaaaccatcaggctgtctgcgacggcattcggacctctcccttacctcccaggcagcgcgggctccccaaaagacactgacgctcccacttccaaaccgtcactcatgcagtttcctcaccaagaacgccccacccctgttgaaatctgcccccgcctcagtgccacttcctggaagtctgtccccttctctgagcacctcctcgaatgggaatccactgacgagggacctgacccactgtctttgcatggccatttatgttacatctcctgggcccagaggccggcgcagcgtctccctccaagtccctgcagactcacagtaaggagaagcacccaaggaaacacttgtagaatagtgagtgagtgaatgaaagtcaccaacacctcctccatgaagccacgaccacaaggctcccggtgcaggaaaatactgttcatcaaaagcactgagatttgtttttgtttgttttgtttttgtttttgtttgagacggagtc

SEQ ID NO: 164589 - DNA, 860 bp, Homo sapiens; identical to SEQ ID NO: 79340
  chr10:5530259-5531119
  hypo

SEQ ID NO: 164590 - DNA, 183 bp, Homo sapiens
  chr10:5535379-5535562
  hypo
ttccaagaggcacagcgaattcctgctgtcaggcagaattcccagaaacagcaggtgagtggtctctactcaccttagaaacgcccaccgcacaggagactggcgaagctccctcttgaactttctccctgctcgatgacctctcatcttcaggagactggcgaagctccctctagaactttc

SEQ ID NO: 164591 - DNA, 139 bp, Homo sapiens; identical to SEQ ID NO: 79342
  chr10:5536520-5536659
  hypo

SEQ ID NO: 164592 - DNA, 103 bp, Homo sapiens; identical to SEQ ID NO: 79343
  chr10:5537075-5537178
  hypo

SEQ ID NO: 164593 - DNA, 30 bp, Homo sapiens
  chr10:5538399-5538429
  hypo
ttcctggaggacctccgggcagagccagga

SEQ ID NO: 164594 - DNA, 446 bp, Homo sapiens
  chr10:5538685-5539131
  hypo
cactggccaggctctgagcaccgggcaagaaggaacaggtcgcaatgagtgaccgcaagagatcatggtgactcctgaaaacgcccaggccccgcctcagtgccccgggctacccctggccccccaggctttgtgctgaagccgagataaagtggacaggcgcacctcactcctccacaggtgtgccccacccccccacccgcaggtctgcccgagagcacggcaggtgggaaagagacgaatcctgactccaaggccagggccgccacctccccaaagcccgatttcacccaatgctaccataagttggcctgggctgctcctgtacccacctggggcttcagtttccacatctgccaagcaaggtgcctgggtccgaccatctgagacccaggacaaagggagccctgggaacgccaggctgtgatgagcgagcctgggtctcg

SEQ ID NO: 164595 - DNA, 1491 bp, Homo sapiens; identical to SEQ ID NO: 79345
  chr10:5540250-5541741
  hypo

SEQ ID NO: 164596 - DNA, 30 bp, Homo sapiens
  chr10:5543744-5543774
  hypo
catatctgatcggagcgtgtaggatcagaa

SEQ ID NO: 164597 - DNA, 63 bp, Homo sapiens; identical to SEQ ID NO: 79346
  chr10:5548689-5548752
  hypo

SEQ ID NO: 164598 - DNA, 31 bp, Homo sapiens; identical to SEQ ID NO: 79347
  chr10:5549565-5549596
  hypo

SEQ ID NO: 164599 - DNA, 30 bp, Homo sapiens
  chr10:5550491-5550521
  hypo
tgttcgtccctcaccggctgccctgggtcc

SEQ ID NO: 164600 - DNA, 84 bp, Homo sapiens
  chr10:5551877-5551961
  hypo
gcctgcggaggtggccgggagtgggaggaagagcactggccgtgccgggaagaggtggcaattcgggcccgctctgcctcccac

SEQ ID NO: 164601 - DNA, 30 bp, Homo sapiens; identical to SEQ ID NO: 79348
  chr10:5554532-5554562
  hypo

SEQ ID NO: 164602 - DNA, 762 bp, Homo sapiens; identical to SEQ ID NO: 79349
  chr10:5566907-5567669
  hypo

SEQ ID NO: 164603 - DNA, 31 bp, Homo sapiens; identical to SEQ ID NO: 24007
  chr10:5571209-5571240
  hypo

SEQ ID NO: 164604 - DNA, 154 bp, Homo sapiens; identical to SEQ ID NO: 79351
  chr10:5572906-5573060
  hypo

SEQ ID NO: 164605 - DNA, 190 bp, Homo sapiens
  chr10:5574190-5574380
  hypo
aaagtctggccctgccgaggagcagcggagcatcccaggaaagcccctgctctcccaaccccagttctgctgaggaagtgaaggatccttggaggcggcacagccatgcacagggtgtaaccgcctgggatgcaacctgggcatgaagacagcacagacgtggtaccgcagggcccgaggctgggtgaga

SEQ ID NO: 164606 - DNA, 227 bp, Homo sapiens
  chr10:5576084-5576311
  hypo
tcgctccctcgcaggcgcacaggccctttctcaggaaagccccacacttggcttaaggctctgctgttgctgccttgaactcttaatgagttttgaacaaggcgccccgcattttcattttgcattaagccccccaaattatgtgcctgccctgctcaccacgtcccactgcgctcccagggcagggcccgccccacccagacgcagactgtcgcggcttcatcaga

SEQ ID NO: 164607 - DNA, 30 bp, Homo sapiens
  chr10:5576529-5576559
  hypo
tcacgttgcgccacccgcaggacccgtcgg

SEQ ID NO: 164608 - DNA, 30 bp, Homo sapiens; identical to SEQ ID NO: 7168
  chr10:5615942-5615972
  hypo

SEQ ID NO: 164609 - DNA, 30 bp, Homo sapiens; identical to SEQ ID NO: 79354
  chr10:5626580-5626610
  hypo

SEQ ID NO: 164610 - DNA, 290 bp, Homo sapiens
  chr10:5638903-5639193
  hypo
acagccctgccccatcggtttcagccacccggagcggccgccccacccgcctcctgcaaagaggtgagctgcccctgcccactgctgctccagctcacacccgtcatccgtgagccattactgactacctacagggtgcgcccgccgtggtctgcatgtcccacagaaattacccagggctggcccagcggctcccagcagacggccaggcatgtgctcccaggggcactggtcctagacagatgaggacacatagggactgacacccctgaaaacgcctggggcagcag

SEQ ID NO: 164611 - DNA, 31 bp, Homo sapiens; identical to SEQ ID NO: 79356
  chr10:5640942-5640973
  hypo

SEQ ID NO: 164612 - DNA, 30 bp, Homo sapiens; identical to SEQ ID NO: 79357
  chr10:5658234-5658264
  hypo

SEQ ID NO: 164613 - DNA, 216 bp, Homo sapiens; identical to SEQ ID NO: 79358
  chr10:5666827-5667043
  hypo

SEQ ID NO: 164614 - DNA, 41 bp, Homo sapiens; identical to SEQ ID NO: 79359
  chr10:5680698-5680739
  hypo

SEQ ID NO: 164615 - DNA, 59 bp, Homo sapiens; identical to SEQ ID NO: 79360
  chr10:5681053-5681112
  hypo

SEQ ID NO: 164616 - DNA, 102 bp, Homo sapiens; identical to SEQ ID NO: 79361
  chr10:5683748-5683850
  hypo

SEQ ID NO: 164617 - DNA, 856 bp, Homo sapiens; identical to SEQ ID NO: 118568
  chr10:5707984-5708840
  hypo

SEQ ID NO: 164618 - DNA, 30 bp, Homo sapiens
  chr10:5757050-5757080
  hypo
ggaaatagagtttcacggaaagcagaaaga

SEQ ID NO: 164619 - DNA, 27 bp, Homo sapiens
  chr10:5757600-5757627
  hypo
ttttggttttttttttggtggcggggt

SEQ ID NO: 164620 - DNA, 31 bp, Homo sapiens; identical to SEQ ID NO: 24011
  chr10:5784320-5784351
  hypo

SEQ ID NO: 164621 - DNA, 23 bp, Homo sapiens
  chr10:5786671-5786694
  hypo
gcagcctccgcctcccgggttca

SEQ ID NO: 164622 - DNA, 22 bp, Homo sapiens
  chr10:5786873-5786895
  hypo
gagaagccgtgccctacctaag

SEQ ID NO: 164623 - DNA, 181 bp, Homo sapiens; identical to SEQ ID NO: 24012
  chr10:5796176-5796357
  hypo

SEQ ID NO: 164624 - DNA, 31 bp, Homo sapiens; identical to SEQ ID NO: 24013
  chr10:5809843-5809874
  hypo

SEQ ID NO: 164625 - DNA, 27 bp, Homo sapiens
  chr10:5829459-5829486
  hypo
gactccgtctcaaaaaaaaaaaagaaa

SEQ ID NO: 164626 - DNA, 83 bp, Homo sapiens; identical to SEQ ID NO: 79370
  chr10:5863289-5863372
  hypo

SEQ ID NO: 164627 - DNA, 30 bp, Homo sapiens
  chr10:5870923-5870953
  hypo
cgccgttcttccaacgcagatgagcccacc

SEQ ID NO: 164628 - DNA, 318 bp, Homo sapiens; identical to SEQ ID NO: 24015
  chr10:5875004-5875322
  hypo

SEQ ID NO: 164629 - DNA, 30 bp, Homo sapiens
  chr10:5893695-5893725
  hypo
agccaccgcgcccgacgtattttttattat

SEQ ID NO: 164630 - DNA, 148 bp, Homo sapiens
  chr10:5898119-5898267
  hypo
cacgtgttgggtgcacgtgctgggccaagcatcatgcacgctgtaaggtatatagatgtgatttggtcaaggtagagaccgaggcggatatacaggcctgcacggctcagtgagtttggtgcgcaggcgcacacctccgcttgttaca

SEQ ID NO: 164631 - DNA, 28 bp, Homo sapiens
  chr10:5898326-5898354
  hypo
actgccctgctgacgccgtacaggtgct

SEQ ID NO: 164632 - DNA, 91 bp, Homo sapiens; identical to SEQ ID NO: 24016
  chr10:5901981-5902072
  hypo

SEQ ID NO: 164633 - DNA, 79 bp, Homo sapiens; identical to SEQ ID NO: 79373
  chr10:5902470-5902549
  hypo

SEQ ID NO: 164634 - DNA, 30 bp, Homo sapiens; identical to SEQ ID NO: 24017
  chr10:5935938-5935968
  hypo

SEQ ID NO: 164635 - DNA, 31 bp, Homo sapiens; identical to SEQ ID NO: 24018
  chr10:5939819-5939850
  hypo

SEQ ID NO: 164636 - DNA, 34 bp, Homo sapiens
  chr10:5952450-5952484
  hypo
tttccccacagcctgcgtgcggccctctcctgtg

SEQ ID NO: 164637 - DNA, 632 bp, Homo sapiens; identical to SEQ ID NO: 24019
  chr10:5953028-5953660
  hypo

SEQ ID NO: 164638 - DNA, 463 bp, Homo sapiens; identical to SEQ ID NO: 79378
  chr10:5960337-5960800
  hypo

SEQ ID NO: 164639 - DNA, 169 bp, Homo sapiens; identical to SEQ ID NO: 24021
  chr10:5962671-5962840
  hypo

SEQ ID NO: 164640 - DNA, 30 bp, Homo sapiens; identical to SEQ ID NO: 24022
  chr10:5969442-5969472
  hypo

SEQ ID NO: 164641 - DNA, 139 bp, Homo sapiens; identical to SEQ ID NO: 79381
  chr10:5979159-5979298
  hypo

SEQ ID NO: 164642 - DNA, 30 bp, Homo sapiens; identical to SEQ ID NO: 79382
  chr10:5995013-5995043
  hypo

SEQ ID NO: 164643 - DNA, 31 bp, Homo sapiens; identical to SEQ ID NO: 24023
  chr10:5998387-5998418
  hypo

SEQ ID NO: 164644 - DNA, 30 bp, Homo sapiens; identical to SEQ ID NO: 79384
  chr10:6000625-6000655
  hypo

SEQ ID NO: 164645 - DNA, 602 bp, Homo sapiens
  chr10:6003401-6004003
  hypo
tgtcaaagatctgagtcgttcagcttgtttactagagaaggcaggcccaacgctggaggctcagctgagagcaggtgaagctgcgctggccgaggacgctcggagcggctgcgtgtgaaacacgggaagcctgggctctggcctgaactctccgggctgtgtgggaggaaagcgtcctgatgagcttgctctcaggaacagaggctgccttgtgttcagcgtcttccctgtcttccttgtccttccctggaaggtggctgcccctgcactgtaagggtgtggcgtaactgtgctgttccctctccatgaaaaatgtgtcttccattgtgacagccacggaatctaggaaacgtgaggccaagcgctgtggctctctggacgcactgttgttgccgcgttcccatggtctcccagccacacaggtcatgagaaggcctcacgccccttaatcctgtgtcaccacctttcatataacttgccctacgctcactgccaatgctccagggctccctgcacaggacgcaccaaggcatcctcagccaagtgcccacggtcgtgccagctcgggtcaaaggctgctgtcacatcggggcttctgactg

SEQ ID NO: 164646 - DNA, 29 bp, Homo sapiens
  chr10:6009694-6009723
  hypo
ctggaaaagtgcaagtgtggccggaagta

SEQ ID NO: 164647 - DNA, 31 bp, Homo sapiens; identical to SEQ ID NO: 7172
  chr10:6019532-6019563
  hypo

SEQ ID NO: 164648 - DNA, 159 bp, Homo sapiens; identical to SEQ ID NO: 79388
  chr10:6023433-6023592
  hypo

SEQ ID NO: 164649 - DNA, 148 bp, Homo sapiens
  chr10:6024477-6024625
  hypo
aataagtgtaagaaaacgattgtttgtaagggtagcccataaattcagagtcagagtcaggaatggtggtgatgccaatcatccgcagatgttcacgtgggtgactgcagtggcaacaacgttgctttctgggcgttcaatagacaca

SEQ ID NO: 164650 - DNA, 31 bp, Homo sapiens
  chr10:6041768-6041799
  hypo
ggggacatttggatctcgttcaggccacgtt

SEQ ID NO: 164651 - DNA, 120 bp, Homo sapiens; identical to SEQ ID NO: 79389
  chr10:6042314-6042434
  hypo

SEQ ID NO: 164652 - DNA, 63 bp, Homo sapiens
  chr10:6055608-6055671
  hypo
ttgggaagagatgcgcggtagccaccgtcaaacggtatttccaccatgcggacacaatagatg

SEQ ID NO: 164653 - DNA, 151 bp, Homo sapiens
  chr10:6065691-6065842
  hypo
gctggccaggacacacgcatctggagcttttgagactcacaagtgtggcatgcacattttacaaccttgccctggaagaaatactgggaagcaagtaatttttttgcggtgcgttgtcttgtgcttaaggggaagacgcagagcgtttcct

SEQ ID NO: 164654 - DNA, 30 bp, Homo sapiens
  chr10:6066295-6066325
  hypo
tgtttcgttgtgttccgagtggctagaaaa

SEQ ID NO: 164655 - DNA, 271 bp, Homo sapiens
  chr10:6078742-6079013
  hypo
ggggacagtcattttagagagcggacaccactgctgaagaagaaggatatcccggttggctgctctagagccggcaggacggatgctgaggttgttcgcagcagcgtgtgtgcagagcccccgggatcttgcagactgggatttgtcagggcaggtgtggacattgaggctatttctaacaagctcctacatgatgctggggctgcagagccccaggccgcacttggagtatgagagtttccagggagtgaagccccggctgctctctctg

SEQ ID NO: 164656 - DNA, 30 bp, Homo sapiens
  chr10:6079581-6079611
  hypo
tggttcttgctctaacgcggttcatcttct

SEQ ID NO: 164657 - DNA, 47 bp, Homo sapiens
  chr10:6089448-6089495
  hypo
tcacgtcagctgagacgcaacacactgcatgccgaacacacaggaga

SEQ ID NO: 164658 - DNA, 30 bp, Homo sapiens
  chr10:6090018-6090048
  hypo
gtctgcctgtcctcccgcctatcctccctc

SEQ ID NO: 164659 - DNA, 50 bp, Homo sapiens; identical to SEQ ID NO: 79391
  chr10:6135598-6135648
  hypo

SEQ ID NO: 164660 - DNA, 257 bp, Homo sapiens
  chr10:6151971-6152228
  hypo
gaggactcaagacctcgatcacagtcttccaaagcagccattcctcccccagtgtacgaggaacaagacagaccgagatctccaaccggacctagcaactccttcctcgctaacatggggtaatgatttaatgttcttatctaaggacttgagagacagtgtgaagcgttgatagccctttcaatagatgcagcttgtttgaaactgaggacattcaggacccttggtgtgtgcaggtcacacggtacctgcctcaa

SEQ ID NO: 164661 - DNA, 159 bp, Homo sapiens; identical to SEQ ID NO: 79392
  chr10:6159772-6159931
  hypo

SEQ ID NO: 164662 - DNA, 18 bp, Homo sapiens
  chr10:6160975-6160993
  hypo
ggctggtgttatggcttg

SEQ ID NO: 164663 - DNA, 30 bp, Homo sapiens; identical to SEQ ID NO: 79394
  chr10:6161687-6161717
  hypo

SEQ ID NO: 164664 - DNA, 248 bp, Homo sapiens; identical to SEQ ID NO: 79395
  chr10:6161977-6162225
  hypo

SEQ ID NO: 164665 - DNA, 22 bp, Homo sapiens
  chr10:6163551-6163573
  hypo
ttcttttttttgagacggactc

SEQ ID NO: 164666 - DNA, 31 bp, Homo sapiens; identical to SEQ ID NO: 79397
  chr10:6164389-6164420
  hypo

SEQ ID NO: 164667 - DNA, 154 bp, Homo sapiens
  chr10:6167799-6167953
  hypo
taattccaaagcgtgaacccttcactgaagccactgaacactctcatccacgccaaaacttcaaaagttaacactggcttgcacagtttgactgatcctggagcggcagagtgactcaccgtctgcagccaggcctggacggcactgctggtcc

SEQ ID NO: 164668 - DNA, 29 bp, Homo sapiens
  chr10:6199195-6199224
  hypo
ctttttttttttgagacggagtctcgctc

SEQ ID NO: 164669 - DNA, 28 bp, Homo sapiens
  chr10:6199463-6199491
  hypo
caggcatgagccacggcgcccagccaat

SEQ ID NO: 164670 - DNA, 30 bp, Homo sapiens; identical to SEQ ID NO: 79399
  chr10:6208579-6208609
  hypo

SEQ ID NO: 164671 - DNA, 265 bp, Homo sapiens
  chr10:6211183-6211448
  hypo
cgtgagccaccgcgcccagtcttcttatattttcttgtcacagtgcatctgcttgggtggcaggtgcacctacctgggggagagcacattttctgttcttttcttagtcttacgcagggaggattgtgattgggactctggcggctgtgagcagggtagggggtcttaattttagtgagcaaggggcacgaatgctcagacctgggccaccatggagttgtcggggtgtgggtaggagactggcgtcacccataaatgcagagta

SEQ ID NO: 164672 - DNA, 30 bp, Homo sapiens; identical to SEQ ID NO: 79401
  chr10:6219895-6219925
  hypo

SEQ ID NO: 164673 - DNA, 30 bp, Homo sapiens
  chr10:6264075-6264105
  hypo
gttgcctcctctgccgatgggatcctcctg

SEQ ID NO: 164674 - DNA, 30 bp, Homo sapiens
  chr10:6265077-6265107
  hypo
caggtgtcggctcccggctgcttcaggtcc

SEQ ID NO: 164675 - DNA, 95 bp, Homo sapiens
  chr10:6372301-6372396
  hypo
cgtgctggagggcagcgtgggcggcgggagcacgggtggagggagcagctgctcaggcgggagccctgcggaacgtgaccctctgtgcactggag

SEQ ID NO: 164676 - DNA, 35 bp, Homo sapiens
  chr10:6372695-6372730
  hypo
ataacaggcgtgagccaccgcgcccggccgaggtg

SEQ ID NO: 164677 - DNA, 30 bp, Homo sapiens; identical to SEQ ID NO: 79402
  chr10:6466364-6466394
  hypo

SEQ ID NO: 164678 - DNA, 30 bp, Homo sapiens
  chr10:6473477-6473507
  hypo
ggacaggcatacacacgcatacacacacgt

SEQ ID NO: 164679 - DNA, 30 bp, Homo sapiens
  chr10:6527942-6527972
  hypo
gacatccttgctgagcggccatggcgggaa

SEQ ID NO: 164680 - DNA, 28 bp, Homo sapiens
  chr10:6530623-6530651
  hypo
gtgtgagccaccgcgcccggtcaactat

SEQ ID NO: 164681 - DNA, 300 bp, Homo sapiens; identical to SEQ ID NO: 24029
  chr10:6531083-6531383
  hypo

SEQ ID NO: 164682 - DNA, 21 bp, Homo sapiens
  chr10:6543757-6543778
  hypo
cctgggcgacatgagcgaaac

SEQ ID NO: 164683 - DNA, 83 bp, Homo sapiens
  chr10:6547161-6547244
  hypo
attcttaaaacatttcctaggcttatgtcattattgtttacggaatatcattgtttttgcccgattgaatttgctctctcatt

SEQ ID NO: 164684 - DNA, 219 bp, Homo sapiens; identical to SEQ ID NO: 79406
  chr10:6578875-6579094
  hypo

SEQ ID NO: 164685 - DNA, 30 bp, Homo sapiens
  chr10:6586345-6586375
  hypo
cccattctaataatgcgatgaccacagaat

SEQ ID NO: 164686 - DNA, 968 bp, Homo sapiens; identical to SEQ ID NO: 118581
  chr10:6621839-6622807
  hypo

SEQ ID NO: 164687 - DNA, 45 bp, Homo sapiens; identical to SEQ ID NO: 24030
  chr10:6647893-6647938
  hypo

SEQ ID NO: 164688 - DNA, 144 bp, Homo sapiens; identical to SEQ ID NO: 79410
  chr10:6664619-6664763
  hypo

SEQ ID NO: 164689 - DNA, 30 bp, Homo sapiens
  chr10:6668129-6668159
  hypo
tcctcatccattctacgtcgctaaagcgct

SEQ ID NO: 164690 - DNA, 30 bp, Homo sapiens
  chr10:6766157-6766187
  hypo
tagcgttgtaacaggcgattggggtaaaga

SEQ ID NO: 164691 - DNA, 196 bp, Homo sapiens
  chr10:6852534-6852730
  hypo
ttctccctttacatctgaatacgaagaaaccaggcaaagttctttccactctgagagctgtatctgctctcgatgtgactgtgggaaccaggatgaagtgatgaatactgttgcttcatctgccatcgtaggaactgctttattaattcaggaaattaatcgctcctctggcttcgactacagatttaatggtatg

SEQ ID NO: 164692 - DNA, 90 bp, Homo sapiens; identical to SEQ ID NO: 79412
  chr10:6864688-6864778
  hypo

SEQ ID NO: 164693 - DNA, 26 bp, Homo sapiens
  chr10:6953233-6953259
  hypo
acttgaattaacagtggctcacgcct

SEQ ID NO: 164694 - DNA, 104 bp, Homo sapiens
  chr10:6956296-6956400
  hypo
tccacaaatactgaccgagctcctccagtggacacagtaccacatgggtgcaggcaagactatgtagcccacggggaataagacaaatacgaaaggagaacgtg

SEQ ID NO: 164695 - DNA, 71 bp, Homo sapiens
  chr10:6975462-6975533
  hypo
tgtagtgttcagatcaaatcacgctttattaggtgaaactctattgaatcgtgaaactttcaagcccatat

SEQ ID NO: 164696 - DNA, 211 bp, Homo sapiens; identical to SEQ ID NO: 79414
  chr10:6984457-6984668
  hypo

SEQ ID NO: 164697 - DNA, 30 bp, Homo sapiens; identical to SEQ ID NO: 79415
  chr10:6997705-6997735
  hypo

SEQ ID NO: 164698 - DNA, 43 bp, Homo sapiens; identical to SEQ ID NO: 79416
  chr10:7083316-7083359
  hypo

SEQ ID NO: 164699 - DNA, 83 bp, Homo sapiens; identical to SEQ ID NO: 79417
  chr10:7138551-7138634
  hypo

SEQ ID NO: 164700 - DNA, 184 bp, Homo sapiens; identical to SEQ ID NO: 79418
  chr10:7139932-7140116
  hypo

SEQ ID NO: 164701 - DNA, 75 bp, Homo sapiens; identical to SEQ ID NO: 79419
  chr10:7156188-7156263
  hypo

SEQ ID NO: 164702 - DNA, 146 bp, Homo sapiens
  chr10:7175435-7175581
  hypo
ggataatggacaacgcgcccactaagggcaatgtgactcatacatttaatctaccaaggaggcttgccgcgtagcacagttccgtcctgttaaatgattttcttctcctccttcaaagccccactcagtgacggtgcttcctaggc

SEQ ID NO: 164703 - DNA, 288 bp, Homo sapiens; identical to SEQ ID NO: 24033
  chr10:7202878-7203166
  hypo

SEQ ID NO: 164704 - DNA, 30 bp, Homo sapiens
  chr10:7203406-7203436
  hypo
gatgccctttccaatcgtttgacagagttg

SEQ ID NO: 164705 - DNA, 30 bp, Homo sapiens
  chr10:7203643-7203673
  hypo
cttgattctagaaatcgactgcaggggaga

SEQ ID NO: 164706 - DNA, 265 bp, Homo sapiens
  chr10:7204510-7204775
  hypo
agagggactcctgctcggtgacctgctgcagtgatccttctaagggggacgtagctggttgatgaaatgcttccctcacatctctttcccttcctcctctctgaaactaagcttttcctttgatatataatccaacatttgcctaaaagactcactccctgatccggctacgattaaacaacaacactggagatagttgagggtctagaaaagactgggtagagtttgtctctacagatgttctaggcttcaatcaaaaaccatc

SEQ ID NO: 164707 - DNA, 31 bp, Homo sapiens; identical to SEQ ID NO: 79422
  chr10:7205122-7205153
  hypo

SEQ ID NO: 164708 - DNA, 378 bp, Homo sapiens; identical to SEQ ID NO: 79423
  chr10:7205705-7206083
  hypo

SEQ ID NO: 164709 - DNA, 30 bp, Homo sapiens
  chr10:7209019-7209049
  hypo
agggcaaaattaaatcgattttgatagagc

SEQ ID NO: 164710 - DNA, 85 bp, Homo sapiens
  chr10:7209415-7209500
  hypo
tctctgcatttataacgttcagggcctgcgtgcacatagcgatgaccatgctgtgcactgtgatctcattcgcatgccagtgaag

SEQ ID NO: 164711 - DNA, 28 bp, Homo sapiens
  chr10:7211200-7211228
  hypo
tacaggcataagccgccatggccggcct

SEQ ID NO: 164712 - DNA, 368 bp, Homo sapiens
  chr10:7212696-7213064
  hypo
tgaggctctgtctctcgtccctgccaggcagctctcagcaggggccttggagggagaagggtctcgcacacctgccgagcagcgccgaagaaccccctcgcaggtgtcacgaggaagccggctaggacacgaggttcatttcagatgcagagtctcagcacatcaaacaatcgacacgcggcaaccaccgtacctgctcctgaaatatcttggccaagggggcacagtctgtcagcttaatgaacctcaccacgtcggtgaccgtccactccaacgggttgctctccagaaccagtctctcctcctcctcctgtttcgtgtcctgcagagaaagggcaggaggagctcagctgcggcacagtcagctg

SEQ ID NO: 164713 - DNA, 750 bp, Homo sapiens
  chr10:7213828-7214578
  hypo
gccctctgtccccacgcccgggcatcacctctgtcccctcgggcttggtcggcgggcacttctccccttcctctgctgaggaggcagccggcgccccgcggccccttcgtgtcctctctgggggtggccggcgcacgggctctgagccgctccgcagggtgacggccctccggggccgggccgagggcacctccgccgacgaggtgtccgtctggtcatcccggagctcggagccggtctcctcactggcggtgtcatcgtccatggcgtcagcgtcctcctcttcactttcctgggaaggaggaaaaggcatttaaggggctggtggcccgggggcctgtagcggtggccccgcggtcagaccctgggcccagtgcagaccacctagcaaaccctcggaaatggagccagtggtcccacccgtgggccctacgaggcccttcccagccaaagcagctggacacactacatttgttttcagcaagtaaggaggagggggctcttcttcagtgtttctgaccatcttgccacaatctccagggccacctctgctgtgaagcagccacacttgccggccagggccagatgacagagctacaggctggcaggtgccccgggcagaacatacctcccccgagcccgcggtgaagtccacggcagaagacctccgtttcttctgcacgaaaatggatttccgtcgcttcctccgcctggcgggtttggggtgtccgctgtcggggttgctttccc

SEQ ID NO: 164714 - DNA, 194 bp, Homo sapiens
  chr10:7216059-7216253
  hypo
gaggcacacctgctccgggagccccggcctgttctcatcaatctctcaaaaggagcagctggcaggagagcttggaacaatgtcccgtgtccagttctataaggaccgtgttactcagtgagcaggaataaactgccgtgggcgagcattgctctgtggccatctccaggtacggggcaaatgagcaagcctct

SEQ ID NO: 164715 - DNA, 167 bp, Homo sapiens
  chr10:7216520-7216687
  hypo
tttattatatgagatccggagacatctctgagttcatttcggcaatgctgaatgggaggtgtgggaccctgctccttccctgccattcccagtgtcctggaagaacacagaagcccacctggcaggtaagcattcaccgtacacggcaaaggcgagccctcggttag

SEQ ID NO: 164716 - DNA, 96 bp, Homo sapiens; identical to SEQ ID NO: 79428
  chr10:7235748-7235844
  hypo

SEQ ID NO: 164717 - DNA, 382 bp, Homo sapiens
  chr10:7236181-7236563
  hypo
tcccctacctcccctcgctgcaccccctcgaattgaggccagacacgctcgtggtcctgccaaaccccactcaactctaacacccatcaagtgagtagagccatgcattaaagaccacttttgccagaaacttcgtcctctcttataaagcggcccactcagacagaacccagaactggactctgcagcctgcactgagccttgccaaagaccatgtctgcatccacaccccgagacgtctatttctggcagaacagatcagggtgaaccgctctcactgcacatctcctacacataaagtgttcaagttcctaataacaccgatggccaggaaaagcaatgcactctgtctttacttccattacctcgttctctttaacta

SEQ ID NO: 164718 - DNA, 139 bp, Homo sapiens; identical to SEQ ID NO: 79430
  chr10:7238963-7239102
  hypo

SEQ ID NO: 164719 - DNA, 40 bp, Homo sapiens
  chr10:7239511-7239551
  hypo
ctttaagaaccagcacgcatttgcccggtcccaccgactg

SEQ ID NO: 164720 - DNA, 178 bp, Homo sapiens; identical to SEQ ID NO: 79432
  chr10:7239773-7239951
  hypo

SEQ ID NO: 164721 - DNA, 88 bp, Homo sapiens
  chr10:7246835-7246923
  hypo
taaaaaaaaaaaaattttttttttgcatgtatttaaatgtgcatgtgcgtgtgtgcacacatgtatgaatgggcgtttactgctgggt

SEQ ID NO: 164722 - DNA, 215 bp, Homo sapiens; identical to SEQ ID NO: 24039
  chr10:7252610-7252825
  hypo

SEQ ID NO: 164723 - DNA, 30 bp, Homo sapiens; identical to SEQ ID NO: 24040
  chr10:7255520-7255550
  hypo

SEQ ID NO: 164724 - DNA, 158 bp, Homo sapiens; identical to SEQ ID NO: 79435
  chr10:7256060-7256218
  hypo

SEQ ID NO: 164725 - DNA, 30 bp, Homo sapiens
  chr10:7258131-7258161
  hypo
gactgcagccgaccccgctcccatcgcaga

SEQ ID NO: 164726 - DNA, 30 bp, Homo sapiens
  chr10:7258628-7258658
  hypo
aaagtttgtggtcaccgtccccacatatcc

SEQ ID NO: 164727 - DNA, 30 bp, Homo sapiens
  chr10:7259140-7259170
  hypo
gaagggagactttaacggggagagagtttc

SEQ ID NO: 164728 - DNA, 196 bp, Homo sapiens
  chr10:7262330-7262526
  hypo
ctacattccccccagcgactgctacccccagcgagtacgtaccttccaggtgaagccacattagccgccccttcacactcacaacggaggccacacacagttctcctggattcctggggttcacagcttcaagtttcatgttctttgtgaaacctcgactgaatgatgtctgcaagagaaacgagaccaacactga

SEQ ID NO: 164729 - DNA, 30 bp, Homo sapiens
  chr10:7267433-7267463
  hypo
ccaatgcgatgcatacgtcaacaatcctat

SEQ ID NO: 164730 - DNA, 30 bp, Homo sapiens
  chr10:7268057-7268087
  hypo
tcggtggcaatcctgcggagagcccggact

SEQ ID NO: 164731 - DNA, 32 bp, Homo sapiens; identical to SEQ ID NO: 79436
  chr10:7288382-7288414
  hypo

SEQ ID NO: 164732 - DNA, 92 bp, Homo sapiens; identical to SEQ ID NO: 79437
  chr10:7288713-7288805
  hypo

SEQ ID NO: 164733 - DNA, 225 bp, Homo sapiens; identical to SEQ ID NO: 79438
  chr10:7290463-7290688
  hypo

SEQ ID NO: 164734 - DNA, 30 bp, Homo sapiens; identical to SEQ ID NO: 79439
  chr10:7295944-7295974
  hypo

SEQ ID NO: 164735 - DNA, 106 bp, Homo sapiens; identical to SEQ ID NO: 79440
  chr10:7304465-7304571
  hypo

SEQ ID NO: 164736 - DNA, 169 bp, Homo sapiens; identical to SEQ ID NO: 79441
  chr10:7317008-7317177
  hypo

SEQ ID NO: 164737 - DNA, 101 bp, Homo sapiens; identical to SEQ ID NO: 79442
  chr10:7330643-7330744
  hypo

SEQ ID NO: 164738 - DNA, 30 bp, Homo sapiens
  chr10:7352294-7352324
  hypo
catgtcccaagatgccgattccaactgctg

SEQ ID NO: 164739 - DNA, 43 bp, Homo sapiens; identical to SEQ ID NO: 24042
  chr10:7352681-7352724
  hypo

SEQ ID NO: 164740 - DNA, 30 bp, Homo sapiens
  chr10:7354280-7354310
  hypo
gaggccaccacccaacgcagccaaactacc

SEQ ID NO: 164741 - DNA, 79 bp, Homo sapiens; identical to SEQ ID NO: 79444
  chr10:7367241-7367320
  hypo

SEQ ID NO: 164742 - DNA, 30 bp, Homo sapiens
  chr10:7367725-7367755
  hypo
ggaagtggctgctatcgggtaacggtttac

SEQ ID NO: 164743 - DNA, 134 bp, Homo sapiens
  chr10:7381914-7382048
  hypo
tgaaagactctcattacgcaaatgagtgcttagggccttaacactaaccaattcacacaggtctgacggggcatgagtgtgcaagtgaaagccatgcaggttcctgagacagccacagtcggtggggatccatc

SEQ ID NO: 164744 - DNA, 30 bp, Homo sapiens; identical to SEQ ID NO: 24043
  chr10:7392001-7392031
  hypo

SEQ ID NO: 164745 - DNA, 30 bp, Homo sapiens; identical to SEQ ID NO: 79446
  chr10:7396413-7396443
  hypo

SEQ ID NO: 164746 - DNA, 268 bp, Homo sapiens
  chr10:7400999-7401267
  hypo
ggacggtcagtggcacgaagaagagtgaacaggtggaggtggagggggaataaagggaggtcaacgaggcagggtcaagcctggagcagccagacatcctgcaggccgagctgtgcccgggggccttgtctgtgtaaagctgccacggggcttcccatacaagtgaaacccaaggatcattcaggacgttcaaaggtccacccagagcaggaacggggccagatgggagctgagccctccatgcacccgaggccgtgatcatctgagc

SEQ ID NO: 164747 - DNA, 30 bp, Homo sapiens; identical to SEQ ID NO: 79448
  chr10:7404090-7404120
  hypo

SEQ ID NO: 164748 - DNA, 302 bp, Homo sapiens; identical to SEQ ID NO: 24044
  chr10:7409502-7409804
  hypo

SEQ ID NO: 164749 - DNA, 226 bp, Homo sapiens
  chr10:7412691-7412917
  hypo
ggcgaaggaacccatcgtgcgctgagcaagggctgtgatgtaggctgtgatgtatacagagaacagcactaattgttataaagataaagcactgactctggcatcattttaaggggaaaaagagaaaatgaggccccaaagaattgctcgagtgtgtggggccacccagccagtcaacaacacaaaccgaccagctgcctgacactcccgacgcctggccagtcca

SEQ ID NO: 164750 - DNA, 30 bp, Homo sapiens; identical to SEQ ID NO: 79450
  chr10:7414647-7414677
  hypo

SEQ ID NO: 164751 - DNA, 112 bp, Homo sapiens
  chr10:7415758-7415870
  hypo
agctcccagaacctgcgtgtgaggaagaagaagagcacctgggaagaagacatcggcatgaaactcagtcctgggccgaaggaggcacaaggttctacgtaggactccgaga

SEQ ID NO: 164752 - DNA, 233 bp, Homo sapiens; identical to SEQ ID NO: 79451
  chr10:7424553-7424786
  hypo

SEQ ID NO: 164753 - DNA, 139 bp, Homo sapiens; identical to SEQ ID NO: 79452
  chr10:7426167-7426306
  hypo

SEQ ID NO: 164754 - DNA, 155 bp, Homo sapiens
  chr10:7436185-7436340
  hypo
ccaccagcacgcccagtgagatgattttttatatcagagttacatctgcatataattttgaaagccaaatattctctataaggcctgtgcgtcgatgcccacccctaaaaatcaaacccagtcatctcctgcccttctcccgcgtccccatctcc

SEQ ID NO: 164755 - DNA, 37 bp, Homo sapiens; identical to SEQ ID NO: 79453
  chr10:7442790-7442827
  hypo

SEQ ID NO: 164756 - DNA, 37 bp, Homo sapiens
  chr10:7443066-7443103
  hypo
cctggccaacagagtgagactccgtcataaaaaaaaa

SEQ ID NO: 164757 - DNA, 30 bp, Homo sapiens
  chr10:7443819-7443849
  hypo
cgggacatttctccacgtgttccgcacaac

SEQ ID NO: 164758 - DNA, 301 bp, Homo sapiens; identical to SEQ ID NO: 7174
  chr10:7449888-7450189
  hypo

SEQ ID NO: 164759 - DNA, 3166 bp, Homo sapiens; identical to SEQ ID NO: 7175
  chr10:7450490-7453656
  hypo

SEQ ID NO: 164760 - DNA, 39 bp, Homo sapiens
  chr10:7471886-7471925
  hypo
ccaccacggccacatggcgaattcttgatacagacaaga

SEQ ID NO: 164761 - DNA, 57 bp, Homo sapiens; identical to SEQ ID NO: 79456
  chr10:7498706-7498763
  hypo

SEQ ID NO: 164762 - DNA, 30 bp, Homo sapiens
  chr10:7501985-7502015
  hypo
catcctaagatcatccgaggtgaggcgctg

SEQ ID NO: 164763 - DNA, 30 bp, Homo sapiens
  chr10:7542617-7542647
  hypo
ataggcccatgaatccggggtgcagagggg

SEQ ID NO: 164764 - DNA, 52 bp, Homo sapiens; identical to SEQ ID NO: 79457
  chr10:7583451-7583503
  hypo

SEQ ID NO: 164765 - DNA, 198 bp, Homo sapiens
  chr10:7608056-7608254
  hypo
tcgctggaagggcgccggctttttgtagaggtggatgaggatgacaaaggctatggagccctggatggtgacggtgacattggcgttggcagacacggacacctccagcccccagctccccaccaccacactctggttgcaggggagcaccagtctgtccccaccatccaagatgactctgctcggtgtgatctcgag

SEQ ID NO: 164766 - DNA, 332 bp, Homo sapiens; identical to SEQ ID NO: 79458
  chr10:7618356-7618688
  hypo

SEQ ID NO: 164767 - DNA, 42 bp, Homo sapiens; identical to SEQ ID NO: 24049
  chr10:7679268-7679310
  hypo

SEQ ID NO: 164768 - DNA, 172 bp, Homo sapiens; identical to SEQ ID NO: 79460
  chr10:7780610-7780782
  hypo

SEQ ID NO: 164769 - DNA, 92 bp, Homo sapiens
  chr10:7790289-7790381
  hypo
ataactgaaactgagctgtcccgtgggctgggcacagtgatacttttaagtctcgttcacgcagtgtgaacgagatccttaacaaattgttg

SEQ ID NO: 164770 - DNA, 35 bp, Homo sapiens
  chr10:7852583-7852618
  hypo
ctcgtcagcattgaccgctacgccccagtactcgc

SEQ ID NO: 164771 - DNA, 185 bp, Homo sapiens; identical to SEQ ID NO: 24051
  chr10:7871222-7871407
  hypo

SEQ ID NO: 164772 - DNA, 203 bp, Homo sapiens
  chr10:7945961-7946164
  hypo
agaagtttcacggtgcgtctgagttggagcagagtccagtgtacttggaaacaagggccgcagagggaagcagcagtgctagaagtaagaagaagccagtttagagaggccgtgaacttcacactgaacttgttctgaattcagcggcagcgagagcctgttcagtctcgcatagtggggttgggacacgctcttccgaggca

SEQ ID NO: 164773 - DNA, 30 bp, Homo sapiens
  chr10:7984685-7984715
  hypo
agtgggcagccgaggcgtgtgggcacggag

SEQ ID NO: 164774 - DNA, 274 bp, Homo sapiens
  chr10:7985033-7985307
  hypo
gtccttacttagcagcggttgtgatcctgctcagatcaaaggagtccaatcctgtggttccggttccctgtagctccgtgagactctgagaactccactcggcctccagcgctgcctttgccgttgccttgaatgaaacaggcgctcgatgttggcctcaccttgcttggtttcttggcttctgtcttctgattctggctcctacgcatcacgttctgcttgctccttagcattgcaaactctgacattttagatgatacgtttgtttcctagt

SEQ ID NO: 164775 - DNA, 30 bp, Homo sapiens; identical to SEQ ID NO: 79464
  chr10:8006631-8006661
  hypo

SEQ ID NO: 164776 - DNA, 33 bp, Homo sapiens
  chr10:8024998-8025031
  hypo
gggtggatgtgacttcggcggggccacctgcag

SEQ ID NO: 164777 - DNA, 30 bp, Homo sapiens; identical to SEQ ID NO: 24053
  chr10:8051085-8051115
  hypo

SEQ ID NO: 164778 - DNA, 388 bp, Homo sapiens
  chr10:8055483-8055871
  hypo
tcattgaacacttagcgtttttctgtttcttgattctaaaacagtgatgacgctgatcatggcattaatgaagtgctgatctactatattttttagtttaatatgcctgtttattcggttaacagtataaagtaatcattctgatctggcctctttttgttttttttcccattccctccatttttgccgcttccgctttgcaaacatcagatccgagatgagtggggcaatcagatctggatctgccctgggtgtaacaagcctgacgatgggagtcccatgattgggtgtgacgactgcgatgactggtaccactggtgagtgcccagggcgccctgccggccacactcattaggcagcatcagccgctcctgagatgaagcatcca

SEQ ID NO: 164779 - DNA, 30 bp, Homo sapiens; identical to SEQ ID NO: 24055
  chr10:8056845-8056875
  hypo

SEQ ID NO: 164780 - DNA, 146 bp, Homo sapiens; identical to SEQ ID NO: 46838
  chr10:8075798-8075944
  hypo

SEQ ID NO: 164781 - DNA, 2095 bp, Homo sapiens; identical to SEQ ID NO: 46855
  chr10:8095492-8097587
  hypo

SEQ ID NO: 164782 - DNA, 43 bp, Homo sapiens; identical to SEQ ID NO: 79470
  chr10:8124884-8124927
  hypo

SEQ ID NO: 164783 - DNA, 19 bp, Homo sapiens
  chr10:8166125-8166144
  hypo
cccaatccaagtctttaaa

SEQ ID NO: 164784 - DNA, 123 bp, Homo sapiens
  chr10:8192082-8192205
  hypo
tagctttcctcttatggtttacgatcctccttcttcctacctggggccagcgagcaggctaaagaacgaaaatgagcggaatagtcagacgcacgttgatccggggtctgaagcaatctgcag

SEQ ID NO: 164785 - DNA, 30 bp, Homo sapiens
  chr10:8203245-8203275
  hypo
tgcgcacagcgtccgcggcaccaaccctca

SEQ ID NO: 164786 - DNA, 175 bp, Homo sapiens; identical to SEQ ID NO: 79472
  chr10:8203923-8204098
  hypo

SEQ ID NO: 164787 - DNA, 86 bp, Homo sapiens; identical to SEQ ID NO: 79473
  chr10:8556147-8556233
  hypo

SEQ ID NO: 164788 - DNA, 30 bp, Homo sapiens; identical to SEQ ID NO: 46856
  chr10:8701203-8701233
  hypo

SEQ ID NO: 164789 - DNA, 30 bp, Homo sapiens
  chr10:8715000-8715030
  hypo
tgaaacaaaagatcgcgtttagaagcagat

SEQ ID NO: 164790 - DNA, 30 bp, Homo sapiens; identical to SEQ ID NO: 46857
  chr10:8739564-8739594
  hypo

SEQ ID NO: 164791 - DNA, 27 bp, Homo sapiens
  chr10:8799685-8799712
  hypo
ggcgtgagccaccgcgcccggccggga

SEQ ID NO: 164792 - DNA, 30 bp, Homo sapiens
  chr10:9036182-9036212
  hypo
acaggctcgaaggaacgtcctctgtatttc

SEQ ID NO: 164793 - DNA, 94 bp, Homo sapiens; identical to SEQ ID NO: 79476
  chr10:9043111-9043205
  hypo

SEQ ID NO: 164794 - DNA, 44 bp, Homo sapiens; identical to SEQ ID NO: 79477
  chr10:9141898-9141942
  hypo

SEQ ID NO: 164795 - DNA, 31 bp, Homo sapiens; identical to SEQ ID NO: 79478
  chr10:9171726-9171757
  hypo

SEQ ID NO: 164796 - DNA, 30 bp, Homo sapiens
  chr10:9380850-9380880
  hypo
agagtgtaacgagaacggcagagatggaat

SEQ ID NO: 164797 - DNA, 30 bp, Homo sapiens; identical to SEQ ID NO: 7190
  chr10:9423701-9423731
  hypo

SEQ ID NO: 164798 - DNA, 30 bp, Homo sapiens
  chr10:9428819-9428849
  hypo
acgaaattcgaggtgcgaggaaagtctgga

SEQ ID NO: 164799 - DNA, 18 bp, Homo sapiens
  chr10:9841517-9841535
  hypo
ttttttttttttttttga

SEQ ID NO: 164800 - DNA, 19 bp, Homo sapiens
  chr10:9919403-9919422
  hypo
ctcaataataataataata

SEQ ID NO: 164801 - DNA, 445 bp, Homo sapiens; identical to SEQ ID NO: 79482
  chr10:9919834-9920279
  hypo

SEQ ID NO: 164802 - DNA, 30 bp, Homo sapiens; identical to SEQ ID NO: 7191
  chr10:10043570-10043600
  hypo

SEQ ID NO: 164803 - DNA, 26 bp, Homo sapiens
  chr10:10077049-10077075
  hypo
ctaaagatttgcggtgaatcttatta

SEQ ID NO: 164804 - DNA, 83 bp, Homo sapiens
  chr10:10661817-10661900
  hypo
aagaagggggttttggcttgtcggtaatgacagggatgggatacagggttgaagagacgaacggaaggagagagaaagaaacc

SEQ ID NO: 164805 - DNA, 30 bp, Homo sapiens; identical to SEQ ID NO: 24059
  chr10:10687296-10687326
  hypo

SEQ ID NO: 164806 - DNA, 21 bp, Homo sapiens
  chr10:10692753-10692774
  hypo
cagagtcaccatctgacccag

SEQ ID NO: 164807 - DNA, 30 bp, Homo sapiens
  chr10:10809181-10809211
  hypo
cactgccaccaccaccgacaccaccatgat

SEQ ID NO: 164808 - DNA, 43 bp, Homo sapiens
  chr10:10964609-10964652
  hypo
taggtttggtgggtggtatttcggtaataagcctacttatttt

SEQ ID NO: 164809 - DNA, 212 bp, Homo sapiens
  chr10:10965181-10965393
  hypo
ctgtgacgtctaggaaaaatggaaaaatgcaactcaggcaactgccaactagtgatatgtggctgggaaggaagacggtggcatttgagaacagttttatggtttggttttcattggctatgactgtcttgaaatgttccgaaagaccatttacacgggttgcataagggtggagtatttccaccgtaattaccttacgtggtactaattta

SEQ ID NO: 164810 - DNA, 43 bp, Homo sapiens; identical to SEQ ID NO: 79486
  chr10:10979085-10979128
  hypo

SEQ ID NO: 164811 - DNA, 30 bp, Homo sapiens
  chr10:11051317-11051347
  hypo
gtgtgtgtgcgtgcgcgcgtcggaacctcc

SEQ ID NO: 164812 - DNA, 242 bp, Homo sapiens; identical to SEQ ID NO: 46860
  chr10:11059421-11059663
  hypo

SEQ ID NO: 164813 - DNA, 225 bp, Homo sapiens; identical to SEQ ID NO: 7193
  chr10:11059932-11060157
  hypo

SEQ ID NO: 164814 - DNA, 120 bp, Homo sapiens; identical to SEQ ID NO: 7194
  chr10:11060314-11060434
  hypo

SEQ ID NO: 164815 - DNA, 116 bp, Homo sapiens; identical to SEQ ID NO: 7195
  chr10:11060512-11060628
  hypo

SEQ ID NO: 164816 - DNA, 68 bp, Homo sapiens; identical to SEQ ID NO: 46864
  chr10:11060741-11060809
  hypo

SEQ ID NO: 164817 - DNA, 33 bp, Homo sapiens; identical to SEQ ID NO: 79492
  chr10:11081057-11081090
  hypo

SEQ ID NO: 164818 - DNA, 30 bp, Homo sapiens
  chr10:11100985-11101015
  hypo
tgcttcttccttggccgcacaaagtgccag

SEQ ID NO: 164819 - DNA, 30 bp, Homo sapiens
  chr10:11137388-11137418
  hypo
gccgtctcagtgccccggcattcggcatgt

SEQ ID NO: 164820 - DNA, 42 bp, Homo sapiens
  chr10:11184679-11184721
  hypo
cataaagagattaatgaccacaggatccgagaaatacacacc

SEQ ID NO: 164821 - DNA, 312 bp, Homo sapiens; identical to SEQ ID NO: 79493
  chr10:11198991-11199303
  hypo

SEQ ID NO: 164822 - DNA, 177 bp, Homo sapiens
  chr10:11204045-11204222
  hypo
tcagggcatgtgattcggcagtgccaggagagtggtcggtgggacaggaccacccataccacccatttcagcagtgccaggagagaggttggtgggaccggaccacctattgaggcagcgccaggagagtggtcgatgggacaggaccacccattttggcagcgccaggagagtggt

SEQ ID NO: 164823 - DNA, 30 bp, Homo sapiens
  chr10:11256557-11256587
  hypo
cttccctgccaaacgcggcgcctgtggagc

SEQ ID NO: 164824 - DNA, 396 bp, Homo sapiens
  chr10:11296955-11297351
  hypo
tcccatgttagtgagcacaggcggtgtagacggcctgcagcaggtggtgtggacggcctgcaggtacactcgttgcccagggtatctggtgtctctctggcttagctgtcgcgcctgtgctgcccatgactgaccaggcttcaccagttcacagcggatccatgctactttgccttctctgaagggaggaaaaagaacttgaattagaagttttccgtcagcgtacaggaggtcaggtcctcagcagtctccctcccaggaattggagcccggggtgcctgttgcccatgtctcctccgagtctgaacacaagcagtggctcaggccagctgatgctttcctcactgagctccttctctgcacatgaagcggaagatggggcgtgccatcctgagg

SEQ ID NO: 164825 - DNA, 30 bp, Homo sapiens
  chr10:11311951-11311981
  hypo
cagctccagggatggcgggtagcacaggtg

SEQ ID NO: 164826 - DNA, 222 bp, Homo sapiens; identical to SEQ ID NO: 24068
  chr10:11317671-11317893
  hypo

SEQ ID NO: 164827 - DNA, 30 bp, Homo sapiens; identical to SEQ ID NO: 24069
  chr10:11322284-11322314
  hypo

SEQ ID NO: 164828 - DNA, 107 bp, Homo sapiens; identical to SEQ ID NO: 79497
  chr10:11338048-11338155
  hypo

SEQ ID NO: 164829 - DNA, 30 bp, Homo sapiens; identical to SEQ ID NO: 79498
  chr10:11343304-11343334
  hypo

SEQ ID NO: 164830 - DNA, 201 bp, Homo sapiens
  chr10:11344064-11344265
  hypo
tttcctctggaagaacagaaccgtaacttaccactctcacctagtttttgactctgggttccttggtgcccagtgactgttgccctttcctgtcacaaaccaaaccttcccactccctgcagcctctcaccttctcatgcctcagaatcaagttttcacccagtcgtgatggaatttgacagcaccgcatcggatagtcct

SEQ ID NO: 164831 - DNA, 253 bp, Homo sapiens; identical to SEQ ID NO: 79500
  chr10:11360788-11361041
  hypo

SEQ ID NO: 164832 - DNA, 380 bp, Homo sapiens
  chr10:11381579-11381959
  hypo
gtcccaaatggaagacttgcccgctatgaggtcaagccacctcagatgtcccgtcatctctttctgcacccgctcaggaacattttctatctcgacagaagtttaacatctgagatcagaacggacatagaactaagcgcacatgaacagaaactgtggagacaggcgcctgactcaggcattcctgagaagcggatccgctccctttcccccatctcccacggcagctcctgttgggcctggcaagttagtgcccagggcaggatggggccgacgccagccccccaccctgcacagcacaaccgagccattcaaacagactcggacaggcacaaggtccctgctactgcagggatgccatttggcggcaggcacgcagg

SEQ ID NO: 164833 - DNA, 30 bp, Homo sapiens; identical to SEQ ID NO: 24072
  chr10:11386128-11386158
  hypo

SEQ ID NO: 164834 - DNA, 82 bp, Homo sapiens
  chr10:11405330-11405412
  hypo
tgcatagaggaagaacgacaatgccacaaacaatagctgagcacaggtagagcgtgaccagggagagcgcggatgctggcgc

SEQ ID NO: 164835 - DNA, 346 bp, Homo sapiens
  chr10:11472667-11473013
  hypo
ctggtggcaccggagcgcacacacctgggccgtgccagagctctccgtggaagagggcgatctcacccttcatccatcatccaggcagaaggcaagcagaccatttccccaagcagcacttctctccaacaagcagtggtcataaaagcagaggctctgaaactttaagaggccataaaccctttggcaacgacacacggctccgagaacacacgcatgaataaataaaaccaatactctgctgctgagacatcgctacatccagaaggacccagagcaacagacgcagagaaaagcaacatggaccaccgcggcctgacagcaggtcccacgggcccaggggcgg

SEQ ID NO: 164836 - DNA, 30 bp, Homo sapiens; identical to SEQ ID NO: 79504
  chr10:11485614-11485644
  hypo

SEQ ID NO: 164837 - DNA, 145 bp, Homo sapiens; identical to SEQ ID NO: 79505
  chr10:11504536-11504681
  hypo

SEQ ID NO: 164838 - DNA, 200 bp, Homo sapiens
  chr10:11505265-11505465
  hypo
acgttgtcgtactgcgatgcagtggagccccgcttcccgtcctcagcatccagggccttcatctttggccgcacgtttgacacccgcacctcggcaggacctgggacggtaactgcgagcgcggggtgcgctgctcgacctttgccttccatggtgtatttggcagttctctctgtagctgagacgtctgacggtttatt

SEQ ID NO: 164839 - DNA, 30 bp, Homo sapiens
  chr10:11505691-11505721
  hypo
tgcctcctgtggggcgccccgctctccctc

SEQ ID NO: 164840 - DNA, 30 bp, Homo sapiens; identical to SEQ ID NO: 79507
  chr10:11515987-11516017
  hypo

SEQ ID NO: 164841 - DNA, 31 bp, Homo sapiens; identical to SEQ ID NO: 79508
  chr10:11520400-11520431
  hypo

SEQ ID NO: 164842 - DNA, 82 bp, Homo sapiens; identical to SEQ ID NO: 79509
  chr10:11661766-11661848
  hypo

SEQ ID NO: 164843 - DNA, 108 bp, Homo sapiens
  chr10:11700967-11701075
  hypo
cctggcttcatcacccgggcagtcatacctgctcgtccagtatttgaatgaatggagttcagcatggtatgtttctatccagcaccgtggaagcgtgtctggatctta

SEQ ID NO: 164844 - DNA, 455 bp, Homo sapiens
  chr10:11731794-11732249
  hypo
ccggaccgattttcaacatttttaatgtgggcttgtacttgtttccatgtttggccgctgacagtgattttctttgctggacatgaccatgttttgctgaatgatttcggctttggggagagagagagctgtgctctggcgttatttactcttgagaaaatacaggcgcatggatacagcagccagcgttgcctggtagaatgtgggcagcagcaggctggggggttgcctcgtggttctggaggagcgagcggctcagccatccacacaactccttcaccagcctttcctcacccgcctggagatagccttggacttcgccctcagccagagccagaagatacaggcccaggtttcagtggaatttacactggagaataagaagtccctctatttcttctagaagcctccgccctgaccgctaatctctcgccgcacactcaacccacaggaat

SEQ ID NO: 164845 - DNA, 170 bp, Homo sapiens; identical to SEQ ID NO: 79511
  chr10:11761570-11761740
  hypo

SEQ ID NO: 164846 - DNA, 30 bp, Homo sapiens; identical to SEQ ID NO: 79512
  chr10:11805267-11805297
  hypo

SEQ ID NO: 164847 - DNA, 79 bp, Homo sapiens
  chr10:11830179-11830258
  hypo
aggaatcggagaaggcgcagagcaaacagagcttccaggctggagagggtgagcaatggggacacggggtgtaagcgtg

SEQ ID NO: 164848 - DNA, 453 bp, Homo sapiens
  chr10:11846785-11847238
  hypo
aggtttcatcacctgcggtgcgcaccttcccgaaagggtggcgtgtggtcaggggtctgtgcggagacctcctggctctccccacacgcggtaggtattcatgcagccgcgtcacgcggaggccccactccgtgcggccaacacagggtcttccagcccctccttccctggctatgtgacttgtagcctcattctgggaaccttccccagctacgtgacttataccttgattctgggaaccacagagttcagaccttggtgctgaaatgggagacgtcccccctgccccccgcaacaccccaccccgttcctcacccaccaccctcgacactgggcttttctcagaatccagaaagcccagggtaccctctgcacgcgatcacctgccctcagtggccgcagcaagctgaagtgtcccttcccccttttcctgcccgacgcctgcagaaccag

SEQ ID NO: 164849 - DNA, 76 bp, Homo sapiens
  chr10:11847447-11847523
  hypo
gtctcctccagccagcgctgtccgctgccccagtcagtcccccgctgagtggtctgagtggcgctggtcatctcaa

SEQ ID NO: 164850 - DNA, 871 bp, Homo sapiens; identical to SEQ ID NO: 118633
  chr10:11865126-11865997
  hypo

SEQ ID NO: 164851 - DNA, 194 bp, Homo sapiens; identical to SEQ ID NO: 24075
  chr10:11870931-11871125
  hypo

SEQ ID NO: 164852 - DNA, 30 bp, Homo sapiens; identical to SEQ ID NO: 79515
  chr10:11876443-11876473
  hypo

SEQ ID NO: 164853 - DNA, 30 bp, Homo sapiens; identical to SEQ ID NO: 79516
  chr10:11876811-11876841
  hypo

SEQ ID NO: 164854 - DNA, 36 bp, Homo sapiens; identical to SEQ ID NO: 79517
  chr10:11878793-11878829
  hypo

SEQ ID NO: 164855 - DNA, 151 bp, Homo sapiens; identical to SEQ ID NO: 79518
  chr10:11894858-11895009
  hypo

SEQ ID NO: 164856 - DNA, 29 bp, Homo sapiens
  chr10:11897183-11897212
  hypo
aagataaggccaggtgcggtggctcacgc

SEQ ID NO: 164857 - DNA, 47 bp, Homo sapiens; identical to SEQ ID NO: 24077
  chr10:11898438-11898485
  hypo

SEQ ID NO: 164858 - DNA, 24 bp, Homo sapiens
  chr10:11899444-11899468
  hypo
agtaaccattattggccgggtgca

SEQ ID NO: 164859 - DNA, 79 bp, Homo sapiens; identical to SEQ ID NO: 79522
  chr10:11911398-11911477
  hypo

SEQ ID NO: 164860 - DNA, 33 bp, Homo sapiens; identical to SEQ ID NO: 79523
  chr10:11914995-11915028
  hypo

SEQ ID NO: 164861 - DNA, 117 bp, Homo sapiens; identical to SEQ ID NO: 79524
  chr10:11920972-11921089
  hypo

SEQ ID NO: 164862 - DNA, 152 bp, Homo sapiens; identical to SEQ ID NO: 79525
  chr10:11923031-11923183
  hypo

SEQ ID NO: 164863 - DNA, 51 bp, Homo sapiens; identical to SEQ ID NO: 79526
  chr10:11941265-11941316
  hypo

SEQ ID NO: 164864 - DNA, 30 bp, Homo sapiens; identical to SEQ ID NO: 24078
  chr10:11950036-11950066
  hypo

SEQ ID NO: 164865 - DNA, 31 bp, Homo sapiens; identical to SEQ ID NO: 79528
  chr10:11951074-11951105
  hypo

SEQ ID NO: 164866 - DNA, 159 bp, Homo sapiens
  chr10:11952451-11952610
  hypo
acccttcctgctgtgcgtgcctggcaattttggctctgtcacctgtaacaacttaagaaaaagtaaattggtgtgagctggtcctgcgggtacacccgatcgctgccactgtaccggaaggatggcaaaggagcagtcggtggtcagtcctgtgttgaa

SEQ ID NO: 164867 - DNA, 182 bp, Homo sapiens
  chr10:11972973-11973155
  hypo
aagtctccatggactcgatgtgtaaggttccaactaactgaaaaatgctgggtatgtatgcataaaatgagaatcctaatttgagtatttcctcaaatctgaaggaacacagcttcctcaagaccaggactccaagtagacaaaaggaggtaaatacagtcgtgtgccgcgtgaccatgttc

SEQ ID NO: 164868 - DNA, 22 bp, Homo sapiens
  chr10:11993069-11993091
  hypo
tatttttttgagatggagtttc

SEQ ID NO: 164869 - DNA, 25 bp, Homo sapiens
  chr10:12117184-12117209
  hypo
tttcttttttttgagacggagtctc

SEQ ID NO: 164870 - DNA, 152 bp, Homo sapiens
  chr10:12139549-12139701
  hypo
ggtgtgagccactgcacctgtcgaatgcctttttagagtgctgacactccaccgcccttgacagtgactctccttgtctctattagattgttacaggtcagactgatttttgtttcttctctttcttgggcagagctcgaaagagcattcca

SEQ ID NO: 164871 - DNA, 62 bp, Homo sapiens
  chr10:12211463-12211525
  hypo
ctaattatggtccgcggagcctcaaaccgagtcgggcctgtgactccgagctgcgctgcctc

SEQ ID NO: 164872 - DNA, 45 bp, Homo sapiens
  chr10:12308421-12308466
  hypo
ctcgtcttctggatattaattcccggagctgtcatttcctgagag

SEQ ID NO: 164873 - DNA, 41 bp, Homo sapiens; identical to SEQ ID NO: 79533
  chr10:12309042-12309083
  hypo

SEQ ID NO: 164874 - DNA, 22 bp, Homo sapiens
  chr10:12336504-12336526
  hypo
cgagactcagtctaaaaaaaaa

SEQ ID NO: 164875 - DNA, 25 bp, Homo sapiens
  chr10:12341300-12341325
  hypo
agtgaaactccgtctcaaaaaaaaa

SEQ ID NO: 164876 - DNA, 43 bp, Homo sapiens; identical to SEQ ID NO: 79536
  chr10:12346515-12346558
  hypo

SEQ ID NO: 164877 - DNA, 1968 bp, Homo sapiens; identical to SEQ ID NO: 118643
  chr10:12390697-12392665
  hypo

SEQ ID NO: 164878 - DNA, 22 bp, Homo sapiens
  chr10:12453887-12453909
  hypo
cggacaagcctacctggcttca

SEQ ID NO: 164879 - DNA, 133 bp, Homo sapiens
  chr10:12460854-12460987
  hypo
accgtccacccctgccgagggatgtcctgcagagtggccatagatggaaggcctcagccgagagtggccataggtggaaggcctcagtcgcgggcgtggtgtgtccgaagccgttgctcacagaacacttaag

SEQ ID NO: 164880 - DNA, 67 bp, Homo sapiens; identical to SEQ ID NO: 79539
  chr10:12485159-12485226
  hypo

SEQ ID NO: 164881 - DNA, 189 bp, Homo sapiens; identical to SEQ ID NO: 79540
  chr10:12531841-12532030
  hypo

SEQ ID NO: 164882 - DNA, 30 bp, Homo sapiens
  chr10:12544418-12544448
  hypo
ttggcttgtgggcagcgctgggttcaaggc

SEQ ID NO: 164883 - DNA, 246 bp, Homo sapiens
  chr10:12545238-12545484
  hypo
tgtgtgcacttgtgccgctgggattttgggaggagcatttgctcctcgccccgcctgatgtggccaggtggctgcgtgtagtgtatttaaatgcgttcaacgacatgagtgaacgtaaaacaactcctgggtaccaggtttacagttgagaagcaggtcccctcttggcgtgtgtcacagctgtctggcagcctgggctacttttaacaagggaggagagagcaggtgaggcgaagaggccagaag

SEQ ID NO: 164884 - DNA, 29 bp, Homo sapiens
  chr10:12548514-12548543
  hypo
ctctttcttttttttttgagacggggagt

SEQ ID NO: 164885 - DNA, 148 bp, Homo sapiens; identical to SEQ ID NO: 79543
  chr10:12548782-12548930
  hypo

SEQ ID NO: 164886 - DNA, 60 bp, Homo sapiens
  chr10:12553846-12553906
  hypo
ctctcgccaagccagcggcatctccagcagtggggagtatgtacccgtcctgtgagcttg

SEQ ID NO: 164887 - DNA, 118 bp, Homo sapiens
  chr10:12554253-12554371
  hypo
tgtgcttacacaggacgtggacttttaggaattctgattcgttggggagaagttaaagcagtagaaaacactaccttacgttgtcactggtttcagacaaacccggagtctccatcac

SEQ ID NO: 164888 - DNA, 77 bp, Homo sapiens
  chr10:12589995-12590072
  hypo
catccctgtcacctgcggtgcttgccacgcacacgccctggtagccacctgtatcagcccagcgtgacacattgaga

SEQ ID NO: 164889 - DNA, 55 bp, Homo sapiens; identical to SEQ ID NO: 79544
  chr10:12595202-12595257
  hypo

SEQ ID NO: 164890 - DNA, 38 bp, Homo sapiens
  chr10:12602246-12602284
  hypo
tcaatagaaattcatcgattggggtccgggcgcggtgg

SEQ ID NO: 164891 - DNA, 58 bp, Homo sapiens; identical to SEQ ID NO: 79545
  chr10:12611334-12611392
  hypo

SEQ ID NO: 164892 - DNA, 43 bp, Homo sapiens; identical to SEQ ID NO: 24081
  chr10:12671579-12671622
  hypo

SEQ ID NO: 164893 - DNA, 30 bp, Homo sapiens; identical to SEQ ID NO: 24082
  chr10:12680724-12680754
  hypo

SEQ ID NO: 164894 - DNA, 213 bp, Homo sapiens; identical to SEQ ID NO: 24083
  chr10:12707776-12707989
  hypo

SEQ ID NO: 164895 - DNA, 182 bp, Homo sapiens
  chr10:12768862-12769044
  hypo
aaaaaatgctttgcacgtgttcgtgcatccaggtgagaattcatttgaacccagccccctcaggcccctgtgctcccagctgcccagggccatggtgaggagcggctgtattcagtcaggcctacggcacgccatgcccgtggccccacacccaggctccccttccgcgttatcctcagcct

SEQ ID NO: 164896 - DNA, 30 bp, Homo sapiens
  chr10:12827063-12827093
  hypo
gtacagccgcccccacgctaaccccactct

SEQ ID NO: 164897 - DNA, 399 bp, Homo sapiens
  chr10:12827567-12827966
  hypo
gccctcatcactttccgaggccccggagggactgtgctgggcacctcctgggtctggaaactcgttggtcttctgcaagtttggaagctggacgctgtgattttttggaattacagcagagtccttgccacgcgtcataaaactggtaacacaacactggccggttcggctggttctcaggcaggaaaactggcgtctgacaagatcagagtgagaagtggactctcccagggctatgtacctcaccacagctgaaacaagaaaatggatgggttgggggctatgctagaaaggccgggtgaattcagcaggttggtgaaacagtgcagctgactcccgatcacaggaggcgagcaggagagagaacatcctcgtggatctccacggtttggcccggtt

SEQ ID NO: 164898 - DNA, 285 bp, Homo sapiens; identical to SEQ ID NO: 79549
  chr10:12837374-12837659
  hypo

SEQ ID NO: 164899 - DNA, 30 bp, Homo sapiens
  chr10:12849848-12849878
  hypo
ttcctgactcaaacccgccacatctctgct

SEQ ID NO: 164900 - DNA, 30 bp, Homo sapiens
  chr10:12850115-12850145
  hypo
cccacctgtttctcccgtaaaattcctgct

SEQ ID NO: 164901 - DNA, 30 bp, Homo sapiens
  chr10:12870937-12870967
  hypo
ggtcgccagagccgcgagccactccagcga

SEQ ID NO: 164902 - DNA, 43 bp, Homo sapiens; identical to SEQ ID NO: 79550
  chr10:12872605-12872648
  hypo

SEQ ID NO: 164903 - DNA, 30 bp, Homo sapiens; identical to SEQ ID NO: 24084
  chr10:12874192-12874222
  hypo

SEQ ID NO: 164904 - DNA, 30 bp, Homo sapiens
  chr10:12875085-12875115
  hypo
acagagcaagactccgtctcaaaaaagatg

SEQ ID NO: 164905 - DNA, 91 bp, Homo sapiens
  chr10:12875519-12875610
  hypo
agaattgagtcttcgcgttggggaggccacgctggaaccattgctctagggctgaaggtggaagtagggccactgccgcagcttcagccag

SEQ ID NO: 164906 - DNA, 96 bp, Homo sapiens
  chr10:12940455-12940551
  hypo
ttgatgtgcggcagcgcgcccgccgccagcttctcactgagtttctggttcgccagctccaggtggcggcccttcttacgcgcctgccgcaaggac

SEQ ID NO: 164907 - DNA, 72 bp, Homo sapiens; identical to SEQ ID NO: 79552
  chr10:12965604-12965676
  hypo

SEQ ID NO: 164908 - DNA, 35 bp, Homo sapiens
  chr10:13146883-13146918
  hypo
gcaggaccgggaggcgagtcggccagaaagaggtg

SEQ ID NO: 164909 - DNA, 38 bp, Homo sapiens; identical to SEQ ID NO: 24086
  chr10:13150490-13150528
  hypo

SEQ ID NO: 164910 - DNA, 202 bp, Homo sapiens; identical to SEQ ID NO: 79555
  chr10:13263526-13263728
  hypo

SEQ ID NO: 164911 - DNA, 30 bp, Homo sapiens; identical to SEQ ID NO: 79556
  chr10:13264033-13264063
  hypo

SEQ ID NO: 164912 - DNA, 30 bp, Homo sapiens
  chr10:13280619-13280649
  hypo
ttcattattgtgtcgcgttagctaacatgt

SEQ ID NO: 164913 - DNA, 20 bp, Homo sapiens
  chr10:13281207-13281227
  hypo
ccattcggccagtcgcggtg

SEQ ID NO: 164914 - DNA, 19 bp, Homo sapiens
  chr10:13281346-13281365
  hypo
tagccgggcacggtggtgt

SEQ ID NO: 164915 - DNA, 30 bp, Homo sapiens
  chr10:13313183-13313213
  hypo
catcactttctcttacgatgtgcaagtctc

SEQ ID NO: 164916 - DNA, 30 bp, Homo sapiens
  chr10:13337481-13337511
  hypo
tagtgttactgtaccgaaagcgttgaatat

SEQ ID NO: 164917 - DNA, 242 bp, Homo sapiens; identical to SEQ ID NO: 118649
  chr10:13341386-13341628
  hypo

SEQ ID NO: 164918 - DNA, 30 bp, Homo sapiens
  chr10:13398822-13398852
  hypo
ccttgcttaaaactgcgcagtagctcccgt

SEQ ID NO: 164919 - DNA, 46 bp, Homo sapiens
  chr10:13404822-13404868
  hypo
gaaaagatctcaaaccggccgggcgcggtggctcacgcctgtaatc

SEQ ID NO: 164920 - DNA, 165 bp, Homo sapiens; identical to SEQ ID NO: 79560
  chr10:13405107-13405272
  hypo

SEQ ID NO: 164921 - DNA, 30 bp, Homo sapiens
  chr10:13426166-13426196
  hypo
gacatttgcgtttgttagctcagtagcctc

SEQ ID NO: 164922 - DNA, 89 bp, Homo sapiens; identical to SEQ ID NO: 79561
  chr10:13451815-13451904
  hypo

SEQ ID NO: 164923 - DNA, 173 bp, Homo sapiens; identical to SEQ ID NO: 79562
  chr10:13480543-13480716
  hypo

SEQ ID NO: 164924 - DNA, 36 bp, Homo sapiens; identical to SEQ ID NO: 79563
  chr10:13516621-13516657
  hypo

SEQ ID NO: 164925 - DNA, 31 bp, Homo sapiens; identical to SEQ ID NO: 79564
  chr10:13531358-13531389
  hypo

SEQ ID NO: 164926 - DNA, 30 bp, Homo sapiens
  chr10:13534106-13534136
  hypo
taacctatcattacacggagtaaatggcat

SEQ ID NO: 164927 - DNA, 98 bp, Homo sapiens
  chr10:13630040-13630138
  hypo
gttggcattctgcggacgtgccccagtgctcctgagagttcccttctgtcgccttacgaagggtttgtgcccaactgaaacatggaggaagggccgcc

SEQ ID NO: 164928 - DNA, 30 bp, Homo sapiens
  chr10:13639969-13639999
  hypo
aatattttaagccatcgattttatgtttgc

SEQ ID NO: 164929 - DNA, 133 bp, Homo sapiens; identical to SEQ ID NO: 79565
  chr10:13688015-13688148
  hypo

SEQ ID NO: 164930 - DNA, 171 bp, Homo sapiens; identical to SEQ ID NO: 24089
  chr10:13692404-13692575
  hypo

SEQ ID NO: 164931 - DNA, 30 bp, Homo sapiens
  chr10:13695794-13695824
  hypo
gaatagcctcactggcgccgagatgataat

SEQ ID NO: 164932 - DNA, 30 bp, Homo sapiens; identical to SEQ ID NO: 79567
  chr10:13699411-13699441
  hypo

SEQ ID NO: 164933 - DNA, 94 bp, Homo sapiens; identical to SEQ ID NO: 24090
  chr10:13711292-13711386
  hypo

SEQ ID NO: 164934 - DNA, 30 bp, Homo sapiens
  chr10:13711942-13711972
  hypo
gctatgaccacggggcggtggaccctactg

SEQ ID NO: 164935 - DNA, 38 bp, Homo sapiens; identical to SEQ ID NO: 79569
  chr10:13715560-13715598
  hypo

SEQ ID NO: 164936 - DNA, 79 bp, Homo sapiens
  chr10:13725167-13725246
  hypo
acaacgcccgactaatagaagcctctggagccccttccacgtgcacggtggtgtgggagagacacgaacagcagacatg

SEQ ID NO: 164937 - DNA, 264 bp, Homo sapiens
  chr10:13735187-13735451
  hypo
taacatttccaaaccacggctgcctcccttcctctctgcttctttcaaacccactcctcctcctgccatttcagtaaatgacacccccctttttaagtcagtcagatccaggaccttggaactcctctgtccctcccaacatcaaaagacaaaatgacttggccaaggctggcggaagcggacgacggaaccagatctctgactcgcaatttcaaaaggcactgaatggagaaatcatgccctgcgacacgatggagagagtat

SEQ ID NO: 164938 - DNA, 30 bp, Homo sapiens; identical to SEQ ID NO: 79572
  chr10:13735972-13736002
  hypo

SEQ ID NO: 164939 - DNA, 86 bp, Homo sapiens; identical to SEQ ID NO: 79573
  chr10:13737447-13737533
  hypo

SEQ ID NO: 164940 - DNA, 96 bp, Homo sapiens; identical to SEQ ID NO: 79574
  chr10:13739453-13739549
  hypo

SEQ ID NO: 164941 - DNA, 31 bp, Homo sapiens; identical to SEQ ID NO: 79575
  chr10:13741937-13741968
  hypo

SEQ ID NO: 164942 - DNA, 30 bp, Homo sapiens
  chr10:13751680-13751710
  hypo
ccgctatcctgcacccgccttgctcaggca

SEQ ID NO: 164943 - DNA, 334 bp, Homo sapiens; identical to SEQ ID NO: 79576
  chr10:13769491-13769825
  hypo

SEQ ID NO: 164944 - DNA, 33 bp, Homo sapiens; identical to SEQ ID NO: 79577
  chr10:13769884-13769917
  hypo

SEQ ID NO: 164945 - DNA, 472 bp, Homo sapiens; identical to SEQ ID NO: 24093
  chr10:13771116-13771588
  hypo

SEQ ID NO: 164946 - DNA, 57 bp, Homo sapiens
  chr10:13776211-13776268
  hypo
cccttctccatcctgaagccccgccaggtgttgcccgccctaccctcatcatgtcct

SEQ ID NO: 164947 - DNA, 29 bp, Homo sapiens
  chr10:13798636-13798665
  hypo
ttaaagacgtgagccaccatgctttgctt

SEQ ID NO: 164948 - DNA, 292 bp, Homo sapiens; identical to SEQ ID NO: 46887
  chr10:13933246-13933538
  hypo

SEQ ID NO: 164949 - DNA, 338 bp, Homo sapiens; identical to SEQ ID NO: 7209
  chr10:13933596-13933934
  hypo

SEQ ID NO: 164950 - DNA, 143 bp, Homo sapiens; identical to SEQ ID NO: 7210
  chr10:13933982-13934125
  hypo

SEQ ID NO: 164951 - DNA, 145 bp, Homo sapiens; identical to SEQ ID NO: 46890
  chr10:13934168-13934313
  hypo

SEQ ID NO: 164952 - DNA, 30 bp, Homo sapiens
  chr10:14161422-14161452
  hypo
gatgtgcagatataacgttccccttcctaa

SEQ ID NO: 164953 - DNA, 168 bp, Homo sapiens; identical to SEQ ID NO: 79585
  chr10:14195966-14196134
  hypo

SEQ ID NO: 164954 - DNA, 17 bp, Homo sapiens
  chr10:14393905-14393922
  hypo
tatgacatggccaggcg

SEQ ID NO: 164955 - DNA, 30 bp, Homo sapiens
  chr10:14406489-14406519
  hypo
gtcaacaatcgctaccgtcaccacctatac

SEQ ID NO: 164956 - DNA, 30 bp, Homo sapiens
  chr10:14447449-14447479
  hypo
ctggcactgtcttcccgtttctccacgtag

SEQ ID NO: 164957 - DNA, 30 bp, Homo sapiens; identical to SEQ ID NO: 24098
  chr10:14492011-14492041
  hypo

SEQ ID NO: 164958 - DNA, 30 bp, Homo sapiens; identical to SEQ ID NO: 24099
  chr10:14562020-14562050
  hypo

SEQ ID NO: 164959 - DNA, 354 bp, Homo sapiens; identical to SEQ ID NO: 79589
  chr10:14575211-14575565
  hypo

SEQ ID NO: 164960 - DNA, 161 bp, Homo sapiens; identical to SEQ ID NO: 24100
  chr10:14626300-14626461
  hypo

SEQ ID NO: 164961 - DNA, 72 bp, Homo sapiens; identical to SEQ ID NO: 46891
  chr10:14646261-14646333
  hypo

SEQ ID NO: 164962 - DNA, 101 bp, Homo sapiens; identical to SEQ ID NO: 46892
  chr10:14646653-14646754
  hypo

SEQ ID NO: 164963 - DNA, 31 bp, Homo sapiens; identical to SEQ ID NO: 24101
  chr10:14735179-14735210
  hypo

SEQ ID NO: 164964 - DNA, 30 bp, Homo sapiens
  chr10:14774249-14774279
  hypo
aagcccgcaagcaagcgtgaggacatgaag

SEQ ID NO: 164965 - DNA, 436 bp, Homo sapiens; identical to SEQ ID NO: 79594
  chr10:14816083-14816519
  hypo

SEQ ID NO: 164966 - DNA, 30 bp, Homo sapiens; identical to SEQ ID NO: 24103
  chr10:14816958-14816988
  hypo

SEQ ID NO: 164967 - DNA, 30 bp, Homo sapiens
  chr10:14818428-14818458
  hypo
ccactcgggtcgggtcgtgccatgctgtgc

SEQ ID NO: 164968 - DNA, 75 bp, Homo sapiens
  chr10:14818701-14818776
  hypo
cactttctaggtctgcggaggccctgggcttgcatccgggctctgaggaccacctctcctcgctcagtgggtgtg

SEQ ID NO: 164969 - DNA, 37 bp, Homo sapiens; identical to SEQ ID NO: 24104
  chr10:14851281-14851318
  hypo

SEQ ID NO: 164970 - DNA, 30 bp, Homo sapiens
  chr10:14884676-14884706
  hypo
ggggaagagggaaccggcattctaaaatca

SEQ ID NO: 164971 - DNA, 35 bp, Homo sapiens; identical to SEQ ID NO: 79597
  chr10:14947695-14947730
  hypo

SEQ ID NO: 164972 - DNA, 125 bp, Homo sapiens; identical to SEQ ID NO: 79598
  chr10:14966087-14966212
  hypo

SEQ ID NO: 164973 - DNA, 37 bp, Homo sapiens; identical to SEQ ID NO: 79599
  chr10:14966551-14966588
  hypo

SEQ ID NO: 164974 - DNA, 31 bp, Homo sapiens; identical to SEQ ID NO: 24106
  chr10:14975093-14975124
  hypo

SEQ ID NO: 164975 - DNA, 168 bp, Homo sapiens
  chr10:14979022-14979190
  hypo
ctcagtgaaagaagccggataagaaatgaacacatgttgtatgattccactcatatgaaatatccggaataggtgaacccatggagacagagagtccaatacagtagtggttgccgggggttggggaaggagagaatagggagggattgcgatcgctaaaggcttctt

SEQ ID NO: 164976 - DNA, 29 bp, Homo sapiens
  chr10:14996910-14996939
  hypo
caacccagaacactttcgctttattttat

SEQ ID NO: 164977 - DNA, 30 bp, Homo sapiens
  chr10:15000010-15000040
  hypo
agagctgttgggaacggttgtaattaccag

SEQ ID NO: 164978 - DNA, 150 bp, Homo sapiens
  chr10:15000458-15000608
  hypo
ggcttgtatttaacaacgagctcagaaaaattcctaaaaatttaattactgagtctccagagctctaatgagctggctccagcacacaattgctcctttctttcattcaacaatttgacaagtcctgatggctctacattcaaaacatgt

SEQ ID NO: 164979 - DNA, 31 bp, Homo sapiens
  chr10:15009036-15009067
  hypo
tctctcatcttattaacggggagaggcccag

SEQ ID NO: 164980 - DNA, 82 bp, Homo sapiens
  chr10:15009624-15009706
  hypo
ttttacaaattcagttcacccctgaacaacacagggactaggggcttcaatgcttcatgccgtcaaaaatttgtgtataact

SEQ ID NO: 164981 - DNA, 102 bp, Homo sapiens
  chr10:15022594-15022696
  hypo
aatccgttctcttggcgcacccgactgacctggggtgtcccagcaaaagctcaacctactggagcaaagcgcagcctatgtctctggttggaaacctctgga

SEQ ID NO: 164982 - DNA, 22 bp, Homo sapiens
  chr10:15131819-15131841
  hypo
cccacctcggcttcccgaagca

SEQ ID NO: 164983 - DNA, 121 bp, Homo sapiens
  chr10:15140511-15140632
  hypo
cgccagccaacttatttcttttaatactgagatacctttctttactccatacttcctttggtaggcattgtttagatgtaggttaagaggtccggcccggcgcggtggctcacgcctgtag

SEQ ID NO: 164984 - DNA, 28 bp, Homo sapiens
  chr10:15140871-15140899
  hypo
agactccgtctcaaaaaaaaaaaaaaaa

SEQ ID NO: 164985 - DNA, 30 bp, Homo sapiens; identical to SEQ ID NO: 79606
  chr10:15145400-15145430
  hypo

SEQ ID NO: 164986 - DNA, 168 bp, Homo sapiens
  chr10:15154755-15154923
  hypo
tggagaaccaaacggcgtgaacaggaaggagtggcttaccgatttagccaggatgagcgcgtcgctcatgaggtccagcaggggcgtctctgtgtggatgttgtagaatgagtaggcggctttgaggctcttgtgagcagggtggtgcatcaccgtggaggggagcgt

SEQ ID NO: 164987 - DNA, 30 bp, Homo sapiens; identical to SEQ ID NO: 79607
  chr10:15166258-15166288
  hypo

SEQ ID NO: 164988 - DNA, 247 bp, Homo sapiens
  chr10:15174783-15175030
  hypo
taaaaaccgcatggacgagcttaaacatgtacctgtcataaatccgaatgtttgctgggatggcacttatgaacccgaccagttttttatttgaagacactctgaccccacagtgccactgcaggagccagcctggtggacgcagagccctgaggtcacggtagacaagaaaacaggcaccagttattgtccaagaacacaggaacagacgcaggagtccccaagtcagcagcgcctatccacgaca

SEQ ID NO: 164989 - DNA, 26 bp, Homo sapiens
  chr10:15203628-15203654
  hypo
gattacaggtgcgagccaccacgcct

SEQ ID NO: 164990 - DNA, 206 bp, Homo sapiens
  chr10:15254632-15254838
  hypo
aatgtccctggtggcggatacgccgagtcctcggaaggacatctggacaccactttcagccacctccttgcaggggcgacatccgccaaagtcatcctttattccgagtaataactttaattcctttctaacatttacacggcaaacaggaatgcagtaaacgtccacgtccgtcccacggctgggctgccgttccgtttcctcca

SEQ ID NO: 164991 - DNA, 204 bp, Homo sapiens; identical to SEQ ID NO: 79609
  chr10:15255040-15255244
  hypo

SEQ ID NO: 164992 - DNA, 30 bp, Homo sapiens; identical to SEQ ID NO: 24109
  chr10:15256407-15256437
  hypo

SEQ ID NO: 164993 - DNA, 36 bp, Homo sapiens
  chr10:15261859-15261895
  hypo
tgagccaccgcgcccggctaagggaaacacattact

SEQ ID NO: 164994 - DNA, 292 bp, Homo sapiens
  chr10:15264099-15264391
  hypo
cccgcgcacccactccgacctatcagcatggagatgtcccggcatacacaggcctcctgtgcagctcacctctctcctataatcatcctcacctgaaatggctacgtgggcgaccctgtggctctaaggcctaaatagaccagctgtgcaccaaatgcaggcatgcatcatttaacagggatacattctgaaaatgcattgttcatcgctgtgcaaacatcatagagcgtccttatgcaaacctagatggtactgcctcctacacacctgggccacacggtctaacccattg

SEQ ID NO: 164995 - DNA, 30 bp, Homo sapiens
  chr10:15264809-15264839
  hypo
caagtcgggcaccagcgagggctcggcatc

SEQ ID NO: 164996 - DNA, 84 bp, Homo sapiens; identical to SEQ ID NO: 79612
  chr10:15273617-15273701
  hypo

SEQ ID NO: 164997 - DNA, 61 bp, Homo sapiens; identical to SEQ ID NO: 24110
  chr10:15345842-15345903
  hypo

SEQ ID NO: 164998 - DNA, 41 bp, Homo sapiens; identical to SEQ ID NO: 79614
  chr10:15355002-15355043
  hypo

SEQ ID NO: 164999 - DNA, 286 bp, Homo sapiens
  chr10:15356715-15357001
  hypo
atttcatcccaactccaaagacgccaaccacgaaatggcacaggttcctggcgtgcccaggtgggaagttggggagtatccgctgccacattcctgtcacttctcacgagcccaggaatgacttccaagccagcacccctgccacctcggcctggcctgcagccgcggggaggaggctggttggcgctgtctgggccctgtctctccggttcctccgggatgggtggctgagtttcagctgagcctagcctttcctcatatcagaatggtacgatctcagactcca

SEQ ID NO: 165000 - DNA, 336 bp, Homo sapiens
  chr10:15484067-15484403
  hypo
gatcccgtctcaaaaataaaacgaaacaaaacaaaattctggcttgggaactttccagctcggcctctacttacctttctagcgtcatggctccacactgcgtttccttatctgggaatcccagccttactgaactttcagcttctgcagccagccacgctctttctggcctccggctttgctgtgtgctgtttctccagcctggcgatttgctctgtccccagcccctgcactcctttacctgatctgctccgattgatcctgcagtcctccgcggctgagtcacttccttctgcagggaagccgtcctgggttctcctccgaggactgtctcag

SEQ ID NO: 165001 - DNA, 29 bp, Homo sapiens
  chr10:15488123-15488152
  hypo
caggcatgagccaccgcgcctggccgaat

SEQ ID NO: 165002 - DNA, 1336 bp, Homo sapiens; identical to SEQ ID NO: 118684
  chr10:15760996-15762332
  hypo

SEQ ID NO: 165003 - DNA, 172 bp, Homo sapiens; identical to SEQ ID NO: 79618
  chr10:15828304-15828476
  hypo

SEQ ID NO: 165004 - DNA, 30 bp, Homo sapiens
  chr10:15850424-15850454
  hypo
catgcagagaaatgtcgatgtagaactgtc

SEQ ID NO: 165005 - DNA, 29 bp, Homo sapiens
  chr10:15963737-15963766
  hypo
cggccatcttggctcgggaagtgtcgctg

SEQ ID NO: 165006 - DNA, 30 bp, Homo sapiens; identical to SEQ ID NO: 79619
  chr10:16482310-16482340
  hypo

SEQ ID NO: 165007 - DNA, 30 bp, Homo sapiens; identical to SEQ ID NO: 24113
  chr10:16715185-16715215
  hypo

SEQ ID NO: 165008 - DNA, 197 bp, Homo sapiens
  chr10:16715602-16715799
  hypo
atcatgcctgactggcgctggatgtccctgtgttcaacaggtcaggctccatctcaaatgacgcaggtggaaggatgagcaacggcacagcctcctgcagcacacagatgcttctcaatggggctgatcaggagacctctggcacccaaagactgcgtgatgactgagggactctttatgctcgcttctgcctaggt

SEQ ID NO: 165009 - DNA, 343 bp, Homo sapiens
  chr10:16716462-16716805
  hypo
tgaaacaacaacagctctcatcgaatattcagagagtccactaggtgccaggcaatgtctgaagctcctgaggacagagcagtgtacaaaactacgtctcccgctcttgcaggagactccattctaagcataagagagacgataaaattggaggcaggagtgggtggtgggcgatggggtccactttagatacagtgataatggaaaaaactttgctgagatggcatttgaactgaaacttgaatgagataagacagcaagcctaaggtcatttagaaactgaatataagtgtaaagccggccagaagctgtaatcccagcactgtgggaggccgaggtgggc

SEQ ID NO: 165010 - DNA, 30 bp, Homo sapiens
  chr10:16768553-16768583
  hypo
gcgcccggccaagaacgtatcttgaatgat

SEQ ID NO: 165011 - DNA, 323 bp, Homo sapiens
  chr10:16769205-16769528
  hypo
agagtgacgatgttccgcctggctgcatcttttgttataatttcacagaggagataacttgattggaggcaaatggacacaaatcctcccaaagcacccaattcaacttttatatcaaacttaaaaaacatgctaccttttctgagataaatacgtgtttctggcaaattcacgaccacagtgaaggccaattaaagttcaaacagaagctggcagaaatttcatttccctcagaaacagcagaaggctgttcaatcatggattgccgctaccaatatgcaagtattactgatcacgcgaggtaacaacggctggaatttcaa

SEQ ID NO: 165012 - DNA, 109 bp, Homo sapiens; identical to SEQ ID NO: 79624
  chr10:16806476-16806585
  hypo

SEQ ID NO: 165013 - DNA, 48 bp, Homo sapiens
  chr10:16866977-16867025
  hypo
ctgtcccaagttaatcggaatgcggatggacgccgtgcataatcagca

SEQ ID NO: 165014 - DNA, 30 bp, Homo sapiens
  chr10:16868683-16868713
  hypo
tatacttcaacttaacgtggcattggatta

SEQ ID NO: 165015 - DNA, 33 bp, Homo sapiens; identical to SEQ ID NO: 79625
  chr10:16915426-16915459
  hypo

SEQ ID NO: 165016 - DNA, 51 bp, Homo sapiens
  chr10:16916364-16916415
  hypo
ttacgtacttgagctcgatcaccttgtcgtcactaacggtgatggtataca

SEQ ID NO: 165017 - DNA, 30 bp, Homo sapiens
  chr10:16919018-16919048
  hypo
atggggtggacatgacgctgtaacctctga

SEQ ID NO: 165018 - DNA, 98 bp, Homo sapiens; identical to SEQ ID NO: 79626
  chr10:16955824-16955922
  hypo

SEQ ID NO: 165019 - DNA, 63 bp, Homo sapiens
  chr10:16990539-16990602
  hypo
atctcagcgtcagggcgctgctgaaggatgtgataggatggggcatgtcggtgccacagtaac

SEQ ID NO: 165020 - DNA, 30 bp, Homo sapiens
  chr10:17014808-17014838
  hypo
tctagtgactgccaccgtgacagttctcca

SEQ ID NO: 165021 - DNA, 30 bp, Homo sapiens
  chr10:17126435-17126465
  hypo
tagttcccaccacaacgcagatccgctaag

SEQ ID NO: 165022 - DNA, 30 bp, Homo sapiens; identical to SEQ ID NO: 24116
  chr10:17156913-17156943
  hypo

SEQ ID NO: 165023 - DNA, 305 bp, Homo sapiens; identical to SEQ ID NO: 79628
  chr10:17157464-17157769
  hypo

SEQ ID NO: 165024 - DNA, 1182 bp, Homo sapiens; identical to SEQ ID NO: 7224
  chr10:17270072-17271254
  hypo

SEQ ID NO: 165025 - DNA, 1188 bp, Homo sapiens; identical to SEQ ID NO: 118697
  chr10:17271443-17272631
  hypo

SEQ ID NO: 165026 - DNA, 30 bp, Homo sapiens
  chr10:17318895-17318925
  hypo
cccaccccctgcccccgcttttgctgcgcc

SEQ ID NO: 165027 - DNA, 33 bp, Homo sapiens
  chr10:17331809-17331842
  hypo
tataggcgtgaaccaccgcgcccagccggttta

SEQ ID NO: 165028 - DNA, 388 bp, Homo sapiens
  chr10:17347072-17347460
  hypo
ccctatgatagcggtcgtaatattcagagggagatagggtgatagtacccctaatgtcgcaggggatgtgtacaccccccgtgataccggttgcagtatccaaggggggacagaatgatagtaccccccatatcacatgtggcgttttcactcccctgtgattccggatattatttccaggaagggacaggatgatagtgaccccaatgtcgcagagagtttgtactcccctttatgatactggtcaaaaaacccagcggggggaagattcatagtacccccgatatcgcagggcatgtatacacccccctatgatagcggtcgtaatatccaggaagagaaaggatgatagtacccctatgtcgcagggggtgtgtacactcccctg

SEQ ID NO: 165029 - DNA, 40 bp, Homo sapiens
  chr10:17378258-17378298
  hypo
ttcttaaattatatattttaaatatcgtgtaaaatttcca

SEQ ID NO: 165030 - DNA, 22 bp, Homo sapiens
  chr10:17412265-17412287
  hypo
gccaccacgccctgcctgacaa

SEQ ID NO: 165031 - DNA, 30 bp, Homo sapiens; identical to SEQ ID NO: 79632
  chr10:17428556-17428586
  hypo

SEQ ID NO: 165032 - DNA, 85 bp, Homo sapiens; identical to SEQ ID NO: 79633
  chr10:17429165-17429250
  hypo

SEQ ID NO: 165033 - DNA, 25 bp, Homo sapiens
  chr10:17429549-17429574
  hypo
gccaccgcgccgggcccagaaaact

SEQ ID NO: 165034 - DNA, 30 bp, Homo sapiens
  chr10:17431184-17431214
  hypo
aaaaactctgatccccgatccaacgctcag

SEQ ID NO: 165035 - DNA, 30 bp, Homo sapiens
  chr10:17431333-17431363
  hypo
ggtgaaaccactgggcgtttacattatcct

SEQ ID NO: 165036 - DNA, 28 bp, Homo sapiens
  chr10:17433536-17433564
  hypo
aggcgtgagccaccgctcccagtcgcgt

SEQ ID NO: 165037 - DNA, 30 bp, Homo sapiens; identical to SEQ ID NO: 79635
  chr10:17460695-17460725
  hypo

SEQ ID NO: 165038 - DNA, 326 bp, Homo sapiens; identical to SEQ ID NO: 46912
  chr10:17495119-17495445
  hypo

SEQ ID NO: 165039 - DNA, 621 bp, Homo sapiens; identical to SEQ ID NO: 7228
  chr10:17495474-17496095
  hypo

SEQ ID NO: 165040 - DNA, 307 bp, Homo sapiens; identical to SEQ ID NO: 7229
  chr10:17496544-17496851
  hypo

SEQ ID NO: 165041 - DNA, 114 bp, Homo sapiens; identical to SEQ ID NO: 79639
  chr10:17507083-17507197
  hypo

SEQ ID NO: 165042 - DNA, 22 bp, Homo sapiens
  chr10:17509404-17509426
  hypo
tttttttttttttttttgagac

SEQ ID NO: 165043 - DNA, 82 bp, Homo sapiens; identical to SEQ ID NO: 24123
  chr10:17509665-17509747
  hypo

SEQ ID NO: 165044 - DNA, 45 bp, Homo sapiens
  chr10:17512860-17512905
  hypo
acataaaactaagatcaaggccgggtgcggtggctcacgcctgta

SEQ ID NO: 165045 - DNA, 39 bp, Homo sapiens; identical to SEQ ID NO: 79641
  chr10:17608666-17608705
  hypo

SEQ ID NO: 165046 - DNA, 25 bp, Homo sapiens
  chr10:18285636-18285661
  hypo
taatgcaccggcgggcgcggtggct

SEQ ID NO: 165047 - DNA, 633 bp, Homo sapiens; identical to SEQ ID NO: 7231
  chr10:18429517-18430150
  hypo

SEQ ID NO: 165048 - DNA, 191 bp, Homo sapiens
  chr10:18579866-18580057
  hypo
ccagccttgctcttccgtctggggcttctaatttggtcccctttggggcttctatttttcttaccttataaacaaatgtccctggttgttaggataccagcctttcatggagcggtttcatcaacaacaggtgcgcagtgagcttctggaactgcagggagagcgataacctacgtcgtgaggctgcgcag

SEQ ID NO: 165049 - DNA, 205 bp, Homo sapiens
  chr10:18914960-18915165
  hypo
gaaagtaacgcagtacgtaagagtcacactttgggaaagggcagggggtgcgggagatctgctaagtgactgtactcaccaataaagacattaataaagataagaaatgagaaataaactgtgccataaggaccgaaagcaaacactgcatccatgtgaattatacttgggaaataacaatgttacaaagcttgacaatgtttaa

SEQ ID NO: 165050 - DNA, 30 bp, Homo sapiens; identical to SEQ ID NO: 79643
  chr10:18950067-18950097
  hypo

SEQ ID NO: 165051 - DNA, 147 bp, Homo sapiens; identical to SEQ ID NO: 79644
  chr10:20538374-20538521
  hypo

SEQ ID NO: 165052 - DNA, 26 bp, Homo sapiens
  chr10:21592887-21592913
  hypo
tgcggtggttcacgccggtaatccca

SEQ ID NO: 165053 - DNA, 35 bp, Homo sapiens; identical to SEQ ID NO: 79645
  chr10:21606053-21606088
  hypo

SEQ ID NO: 165054 - DNA, 39 bp, Homo sapiens
  chr10:21623889-21623928
  hypo
attacaggcgtgagccactgcacccggcctgcattttta

SEQ ID NO: 165055 - DNA, 30 bp, Homo sapiens; identical to SEQ ID NO: 79646
  chr10:21683108-21683138
  hypo

SEQ ID NO: 165056 - DNA, 204 bp, Homo sapiens; identical to SEQ ID NO: 118710
  chr10:21785546-21785750
  hypo

SEQ ID NO: 165057 - DNA, 191 bp, Homo sapiens; identical to SEQ ID NO: 118711
  chr10:21785785-21785976
  hypo

SEQ ID NO: 165058 - DNA, 219 bp, Homo sapiens
  chr10:21786284-21786503
  hypo
tgccaggcggccaggcgggcgccctgccaaattccgcgttcctctccaggagacggggagttgcgtcccaggctcgggaaagcccgcagttcgggcttgggactcgcttacaaagccccccaaggcgccagggacgcctctgcaggttgaattcctgctccgtatcacttcaattttaattaatcttttaaaacaccgctgtcacgtcgcttgcagaaa

SEQ ID NO: 165059 - DNA, 466 bp, Homo sapiens; identical to SEQ ID NO: 79648
  chr10:21797634-21798100
  hypo

SEQ ID NO: 165060 - DNA, 154 bp, Homo sapiens; identical to SEQ ID NO: 46925
  chr10:21805906-21806060
  hypo

SEQ ID NO: 165061 - DNA, 319 bp, Homo sapiens; identical to SEQ ID NO: 118714
  chr10:21814234-21814553
  hypo

SEQ ID NO: 165062 - DNA, 887 bp, Homo sapiens; identical to SEQ ID NO: 118715
  chr10:21815633-21816520
  hypo

SEQ ID NO: 165063 - DNA, 143 bp, Homo sapiens; identical to SEQ ID NO: 46930
  chr10:21824263-21824406
  hypo

SEQ ID NO: 165064 - DNA, 31 bp, Homo sapiens; identical to SEQ ID NO: 46931
  chr10:21878818-21878849
  hypo

SEQ ID NO: 165065 - DNA, 169 bp, Homo sapiens; identical to SEQ ID NO: 79653
  chr10:21915223-21915392
  hypo

SEQ ID NO: 165066 - DNA, 30 bp, Homo sapiens; identical to SEQ ID NO: 46932
  chr10:21915603-21915633
  hypo

SEQ ID NO: 165067 - DNA, 83 bp, Homo sapiens
  chr10:21983924-21984007
  hypo
gacttcgccttctgccgcatctctcactttctcttctgccgcatctttcactgactttctaccttcttttttttttttttttt

SEQ ID NO: 165068 - DNA, 22 bp, Homo sapiens
  chr10:21984186-21984208
  hypo
cgaactcctgacctcaagtgag

SEQ ID NO: 165069 - DNA, 18 bp, Homo sapiens
  chr10:21998445-21998463
  hypo
caccgcatctggctgcag

SEQ ID NO: 165070 - DNA, 61 bp, Homo sapiens; identical to SEQ ID NO: 79657
  chr10:22004066-22004127
  hypo

SEQ ID NO: 165071 - DNA, 241 bp, Homo sapiens; identical to SEQ ID NO: 118721
  chr10:22032715-22032956
  hypo

SEQ ID NO: 165072 - DNA, 239 bp, Homo sapiens
  chr10:22033211-22033450
  hypo
gtctcttctcccaaggcgaaggattaccttccctctagaatgacaggtgactcatccatcaactcctgcgagtttaattcctcaacatgtgtcctttgccttagctgcatgtttgtaagtgtccgcttctgtagctctctggcttcctggaggctccgggacgtcgacctcgtcatcctgggttgctgccctgcagggccctggcagctgctggttcacatgtgcgccttgtgctctgg

SEQ ID NO: 165073 - DNA, 30 bp, Homo sapiens; identical to SEQ ID NO: 79660
  chr10:22038248-22038278
  hypo

SEQ ID NO: 165074 - DNA, 302 bp, Homo sapiens; identical to SEQ ID NO: 79661
  chr10:22039218-22039520
  hypo

SEQ ID NO: 165075 - DNA, 30 bp, Homo sapiens
  chr10:22040293-22040323
  hypo
ccttccttgcatgcgcgtccgtgtgaagag

SEQ ID NO: 165076 - DNA, 178 bp, Homo sapiens
  chr10:22040718-22040896
  hypo
aaggcattctaaggccgtgcacggggagctcttgcacacctggggaagaacgtggcttggctgcacatcccaaacattcctgaccctctgtgggcgggggggggggggggggcgggggcagaacccccattaaggataagtaagacaacaggtgagtgtgcttcgaaaactggcgcta

SEQ ID NO: 165077 - DNA, 313 bp, Homo sapiens
  chr10:22042720-22043033
  hypo
aaaaaacaaaaaaagcgtaaactgaagaggaaagggagaaagtggttgggttggttctcatgagcaagacggcaagaacagaaaagcaagcacgggctacctgtggcggctgggcacggcatggggaggcctcctcagtgggcagggtgaggtggcttgggaggacacgggtctgggagtgggagaggagaaggggcacggtggggctgtcacgtggctggtggatgtgccacgtccccacatgcattcagcacattccctctcgaggatcctcgctctcctgctgtgacccggggtggcagctgtcatctgt

SEQ ID NO: 165078 - DNA, 405 bp, Homo sapiens; identical to SEQ ID NO: 79663
  chr10:22047230-22047635
  hypo

SEQ ID NO: 165079 - DNA, 164 bp, Homo sapiens; identical to SEQ ID NO: 79664
  chr10:22048280-22048444
  hypo

SEQ ID NO: 165080 - DNA, 132 bp, Homo sapiens
  chr10:22099944-22100076
  hypo
gtaacatacaatcttcgagggcaagattgaaactgcaccctactttccccaggaatgcaggtatgacatcacactgatgacctcctccgctgaggagattcctttgatacactcactcgggacatacaaatg

SEQ ID NO: 165081 - DNA, 30 bp, Homo sapiens
  chr10:22160206-22160236
  hypo
aaagttctgagaaggcgctaagctctcacc

SEQ ID NO: 165082 - DNA, 31 bp, Homo sapiens; identical to SEQ ID NO: 24131
  chr10:22288660-22288691
  hypo

SEQ ID NO: 165083 - DNA, 30 bp, Homo sapiens; identical to SEQ ID NO: 46936
  chr10:22315827-22315857
  hypo

SEQ ID NO: 165084 - DNA, 37 bp, Homo sapiens; identical to SEQ ID NO: 79667
  chr10:22477765-22477802
  hypo

SEQ ID NO: 165085 - DNA, 37 bp, Homo sapiens; identical to SEQ ID NO: 79668
  chr10:22478101-22478138
  hypo

SEQ ID NO: 165086 - DNA, 77 bp, Homo sapiens; identical to SEQ ID NO: 118729
  chr10:22540629-22540706
  hypo

SEQ ID NO: 165087 - DNA, 1110 bp, Homo sapiens; identical to SEQ ID NO: 7243
  chr10:22540740-22541850
  hypo

SEQ ID NO: 165088 - DNA, 225 bp, Homo sapiens; identical to SEQ ID NO: 7244
  chr10:22542024-22542249
  hypo

SEQ ID NO: 165089 - DNA, 30 bp, Homo sapiens
  chr10:22553503-22553533
  hypo
aagtaaaataccaagcgtggtgagccacag

SEQ ID NO: 165090 - DNA, 38 bp, Homo sapiens; identical to SEQ ID NO: 24135
  chr10:22567377-22567415
  hypo

SEQ ID NO: 165091 - DNA, 31 bp, Homo sapiens; identical to SEQ ID NO: 46944
  chr10:22605455-22605486
  hypo

SEQ ID NO: 165092 - DNA, 967 bp, Homo sapiens; identical to SEQ ID NO: 118737
  chr10:22614078-22615045
  hypo

SEQ ID NO: 165093 - DNA, 83 bp, Homo sapiens; identical to SEQ ID NO: 7251
  chr10:22634091-22634174
  hypo

SEQ ID NO: 165094 - DNA, 330 bp, Homo sapiens; identical to SEQ ID NO: 46953
  chr10:22634324-22634654
  hypo

SEQ ID NO: 165095 - DNA, 258 bp, Homo sapiens; identical to SEQ ID NO: 79677
  chr10:22833843-22834101
  hypo

SEQ ID NO: 165096 - DNA, 292 bp, Homo sapiens
  chr10:22849146-22849438
  hypo
caacccccctttaaccgatgatccgcccacagtggaaaaagaggcacttcttagctgagcggcaaataaagatttccagaaggatacgctgctgtgcttttgtgtcacgtttggggagcccgccgccctggccacctcacttcaatggcagcccagatgaccagataggggtagtaattaattataatttgttacaatttaaagaccacaaaagaaatgctgaaaactggtttcgaaaagcatttttagacgtaagggtattaatgattaatcctctcgaaccctcagttgg

SEQ ID NO: 165097 - DNA, 136 bp, Homo sapiens
  chr10:22849865-22850001
  hypo
ccctgctgagtcgctcgctagcaggcagcatgctaagactgtcatttgtaaaaagcagcccgctcagctataattactaatttgatgtcacactggaattgcagcgcagctgtgaaaagatcgaccaccagggagg

SEQ ID NO: 165098 - DNA, 283 bp, Homo sapiens
  chr10:22869772-22870055
  hypo
agttgtccctttctgcgatggtaatgtctcgctttacagactcgacaggtgcagtgctctaatgcggcccgggaggctcctttgtagaatggatgagtctgccaactcctgtctgcagacactttgaagtcccaaggcagatgaggctgcaaatggaccaaacactgaacaatgctggccgtcccgtgtgtggctcagaaattaagagcacacaccagataagtgggcttattctcctgtgagagcacaggcagcatgaacacaataccgaagagtgttcctt

SEQ ID NO: 165099 - DNA, 104 bp, Homo sapiens; identical to SEQ ID NO: 79680
  chr10:22883123-22883227
  hypo

SEQ ID NO: 165100 - DNA, 30 bp, Homo sapiens; identical to SEQ ID NO: 24139
  chr10:22901509-22901539
  hypo

SEQ ID NO: 165101 - DNA, 236 bp, Homo sapiens
  chr10:22922575-22922811
  hypo
tgagtccttctcacccggaccgtcattccttctcgccacacccagagctgtctgcaatatgttccaaaaatgcttcacacaactggtcaccaaggaaacaataaatgctaaacactcgcatgtagttttgttttctcggatctttgccccagtatggaggcaactgggcataagcaagcgggaggccaagcaagcgaattcacaggtagaaaagtgagtgtcggcttctcaaggca

SEQ ID NO: 165102 - DNA, 642 bp, Homo sapiens; identical to SEQ ID NO: 46957
  chr10:23001887-23002529
  hypo

SEQ ID NO: 165103 - DNA, 30 bp, Homo sapiens
  chr10:23072717-23072747
  hypo
aggcgtgacccactgcgccccgcctgcaat

SEQ ID NO: 165104 - DNA, 162 bp, Homo sapiens
  chr10:23294126-23294288
  hypo
gctagactcgtctcaaaaaaaaaaaaaaaaaaaaaaccaaaccaaggggggaaaacaaacaagaaaactgacgggaaaagccgaaaaacgatcgcagaacacttaccaggaaaaccttgccatagatcagataaaattgtgacaaaacgtgtttggtcatga

SEQ ID NO: 165105 - DNA, 36 bp, Homo sapiens
  chr10:23401786-23401822
  hypo
acaggcgtgagccagcgcacccgggcgtaatgatgt

SEQ ID NO: 165106 - DNA, 559 bp, Homo sapiens; identical to SEQ ID NO: 7257
  chr10:23461903-23462462
  hypo

SEQ ID NO: 165107 - DNA, 129 bp, Homo sapiens; identical to SEQ ID NO: 7258
  chr10:23462485-23462614
  hypo

SEQ ID NO: 165108 - DNA, 1157 bp, Homo sapiens; identical to SEQ ID NO: 118772
  chr10:23983617-23984774
  hypo

SEQ ID NO: 165109 - DNA, 151 bp, Homo sapiens; identical to SEQ ID NO: 118773
  chr10:23984841-23984992
  hypo

SEQ ID NO: 165110 - DNA, 78 bp, Homo sapiens; identical to SEQ ID NO: 79687
  chr10:24839341-24839419
  hypo

SEQ ID NO: 165111 - DNA, 224 bp, Homo sapiens
  chr10:24841854-24842078
  hypo
attcacattcagagacgagtcgtaccggggactcgaacgctgtgaatggctggtaatgtgacttttcccaaatagcgaatgacttggttgaaagctttgaacaaagcagaatacgactctccctcactttacacgttcctgaaaaattttattgcacattttgaggctgcaaaagtgtttaaatataaaataaaattggcctctacactcggatcattataagc

SEQ ID NO: 165112 - DNA, 265 bp, Homo sapiens; identical to SEQ ID NO: 79688
  chr10:24863016-24863281
  hypo

SEQ ID NO: 165113 - DNA, 142 bp, Homo sapiens; identical to SEQ ID NO: 24145
  chr10:24908407-24908549
  hypo

SEQ ID NO: 165114 - DNA, 38 bp, Homo sapiens
  chr10:24966119-24966157
  hypo
gcctaagcgacagagcgagactccgactctaaataaat

SEQ ID NO: 165115 - DNA, 149 bp, Homo sapiens; identical to SEQ ID NO: 79690
  chr10:24988566-24988715
  hypo

SEQ ID NO: 165116 - DNA, 242 bp, Homo sapiens; identical to SEQ ID NO: 118775
  chr10:25011169-25011411
  hypo

SEQ ID NO: 165117 - DNA, 165 bp, Homo sapiens; identical to SEQ ID NO: 7267
  chr10:25012545-25012710
  hypo

SEQ ID NO: 165118 - DNA, 34 bp, Homo sapiens; identical to SEQ ID NO: 79692
  chr10:25097336-25097370
  hypo

SEQ ID NO: 165119 - DNA, 21 bp, Homo sapiens
  chr10:25115833-25115854
  hypo
gcaccgcgcccggcagaaaat

SEQ ID NO: 165120 - DNA, 30 bp, Homo sapiens
  chr10:25138795-25138825
  hypo
cgtgctcattgatgacgcatatgtgctgaa

SEQ ID NO: 165121 - DNA, 30 bp, Homo sapiens
  chr10:25197141-25197171
  hypo
gatacatttttgttgcgttgcgttgcgttg

SEQ ID NO: 165122 - DNA, 30 bp, Homo sapiens; identical to SEQ ID NO: 79693
  chr10:25239942-25239972
  hypo

SEQ ID NO: 165123 - DNA, 2026 bp, Homo sapiens; identical to SEQ ID NO: 118785
  chr10:25463328-25465354
  hypo

SEQ ID NO: 165124 - DNA, 30 bp, Homo sapiens; identical to SEQ ID NO: 79696
  chr10:26158265-26158295
  hypo

SEQ ID NO: 165125 - DNA, 227 bp, Homo sapiens; identical to SEQ ID NO: 46996
  chr10:26505008-26505235
  hypo

SEQ ID NO: 165126 - DNA, 176 bp, Homo sapiens; identical to SEQ ID NO: 46997
  chr10:26505441-26505617
  hypo

SEQ ID NO: 165127 - DNA, 905 bp, Homo sapiens; identical to SEQ ID NO: 46998
  chr10:26505713-26506618
  hypo

SEQ ID NO: 165128 - DNA, 139 bp, Homo sapiens
  chr10:26638399-26638538
  hypo
gaaatattgggggcaggttcccccaatactggcatctataggaaatgtatatgagggatggaagagacgagaggtggggagaccagaaataacaaacagttcaggagagggatggaaaaggctgcggtgagaacagcgg

SEQ ID NO: 165129 - DNA, 833 bp, Homo sapiens; identical to SEQ ID NO: 47000
  chr10:26726983-26727816
  hypo

SEQ ID NO: 165130 - DNA, 320 bp, Homo sapiens; identical to SEQ ID NO: 118802
  chr10:26727867-26728187
  hypo

SEQ ID NO: 165131 - DNA, 28 bp, Homo sapiens
  chr10:26759487-26759515
  hypo
tatgttcgttagatgattttgcccaact

SEQ ID NO: 165132 - DNA, 30 bp, Homo sapiens
  chr10:26798845-26798875
  hypo
attacatgaaaatcacggtctctctaacga

SEQ ID NO: 165133 - DNA, 30 bp, Homo sapiens
  chr10:26804296-26804326
  hypo
ccatgttagcttttccgcctcaccattttc

SEQ ID NO: 165134 - DNA, 30 bp, Homo sapiens
  chr10:26818843-26818873
  hypo
acaggcgtgagccaccgcacccgggtttgg

SEQ ID NO: 165135 - DNA, 34 bp, Homo sapiens
  chr10:26819342-26819376
  hypo
aggtatggtggctcacgcatgtaatcgcagcact

SEQ ID NO: 165136 - DNA, 158 bp, Homo sapiens
  chr10:26822791-26822949
  hypo
atgctctctcaacattttagacgtggtaggaagtgtgagatttggagtcagggacccgttacaggaggcggctctgcctagcactcttcatgtgctcatgggacagtccccgcccccccgagaacctgacagattccgaattgtattgaattatcaca

SEQ ID NO: 165137 - DNA, 31 bp, Homo sapiens; identical to SEQ ID NO: 24153
  chr10:26840145-26840176
  hypo

SEQ ID NO: 165138 - DNA, 290 bp, Homo sapiens
  chr10:26868624-26868914
  hypo
gccccaggcagggcccgcacagggcttctgcggagccttcctgcggctctgacatctatgagtgggcagccagcaaaggcgaaggccctagcacagaggagaagaggcgcccggaacacgctgtcccccaatgccagccccaagcagggccagctgagggtgcggtgtttggagcctttctgagatccacgaggtggcggtgggagtagcgccagactccactgctttggagcctgcccagtctgattcaggagccttgactagcagcacattggcgacccgaagacgcc

SEQ ID NO: 165139 - DNA, 37 bp, Homo sapiens; identical to SEQ ID NO: 79705
  chr10:27020721-27020758
  hypo

SEQ ID NO: 165140 - DNA, 276 bp, Homo sapiens; identical to SEQ ID NO: 79706
  chr10:27020877-27021153
  hypo

SEQ ID NO: 165141 - DNA, 31 bp, Homo sapiens; identical to SEQ ID NO: 24155
  chr10:27033792-27033823
  hypo

SEQ ID NO: 165142 - DNA, 90 bp, Homo sapiens; identical to SEQ ID NO: 24156
  chr10:27089295-27089385
  hypo

SEQ ID NO: 165143 - DNA, 37 bp, Homo sapiens; identical to SEQ ID NO: 24157
  chr10:27096988-27097025
  hypo

SEQ ID NO: 165144 - DNA, 78 bp, Homo sapiens; identical to SEQ ID NO: 79710
  chr10:27144550-27144628
  hypo

SEQ ID NO: 165145 - DNA, 43 bp, Homo sapiens
  chr10:27233077-27233120
  hypo
ctgtgctggggcctgcgcctttgctggccgcccactcatagat

SEQ ID NO: 165146 - DNA, 282 bp, Homo sapiens; identical to SEQ ID NO: 79712
  chr10:27233409-27233691
  hypo

SEQ ID NO: 165147 - DNA, 103 bp, Homo sapiens
  chr10:27478218-27478321
  hypo
atgctgggattacaggcgtgagccacccggccagctatatacagtttgtattaataaaaaataatttgtggctgggcatagtggctcacgcctttatttccag

SEQ ID NO: 165148 - DNA, 30 bp, Homo sapiens
  chr10:27480123-27480153
  hypo
gccagtctgacaaggcgacacaccgtatga

SEQ ID NO: 165149 - DNA, 23 bp, Homo sapiens
  chr10:27488710-27488733
  hypo
tgcttaagaaaactggttagacg

SEQ ID NO: 165150 - DNA, 30 bp, Homo sapiens; identical to SEQ ID NO: 79715
  chr10:27541531-27541561
  hypo

SEQ ID NO: 165151 - DNA, 30 bp, Homo sapiens; identical to SEQ ID NO: 79716
  chr10:27552255-27552285
  hypo

SEQ ID NO: 165152 - DNA, 83 bp, Homo sapiens; identical to SEQ ID NO: 79717
  chr10:27825967-27826050
  hypo

SEQ ID NO: 165153 - DNA, 33 bp, Homo sapiens; identical to SEQ ID NO: 79718
  chr10:27846685-27846718
  hypo

SEQ ID NO: 165154 - DNA, 32 bp, Homo sapiens; identical to SEQ ID NO: 24162
  chr10:27846957-27846989
  hypo

SEQ ID NO: 165155 - DNA, 30 bp, Homo sapiens; identical to SEQ ID NO: 7284
  chr10:27928208-27928238
  hypo

SEQ ID NO: 165156 - DNA, 91 bp, Homo sapiens; identical to SEQ ID NO: 24164
  chr10:27978842-27978933
  hypo

SEQ ID NO: 165157 - DNA, 75 bp, Homo sapiens
  chr10:27990193-27990268
  hypo
tttccctctaaagaactgaagcggtgcacatcacggcacgcagcgcattctcacgtgattttatctcattatgtt

SEQ ID NO: 165158 - DNA, 2915 bp, Homo sapiens; identical to SEQ ID NO: 118814
  chr10:28030731-28033646
  hypo

SEQ ID NO: 165159 - DNA, 498 bp, Homo sapiens; identical to SEQ ID NO: 7287
  chr10:28033688-28034186
  hypo

SEQ ID NO: 165160 - DNA, 229 bp, Homo sapiens; identical to SEQ ID NO: 7288
  chr10:28034326-28034555
  hypo

SEQ ID NO: 165161 - DNA, 872 bp, Homo sapiens; identical to SEQ ID NO: 118817
  chr10:28034873-28035745
  hypo

SEQ ID NO: 165162 - DNA, 30 bp, Homo sapiens; identical to SEQ ID NO: 79727
  chr10:28288654-28288684
  hypo

SEQ ID NO: 165163 - DNA, 30 bp, Homo sapiens
  chr10:28342651-28342681
  hypo
gagaccagcagaagcgctgaactcccatac

SEQ ID NO: 165164 - DNA, 30 bp, Homo sapiens
  chr10:28461322-28461352
  hypo
ccacgtggcacacgccgaagtcttatttca

SEQ ID NO: 165165 - DNA, 30 bp, Homo sapiens
  chr10:28461561-28461591
  hypo
aagcatgaaagaactcgatatccaaaaaaa

SEQ ID NO: 165166 - DNA, 30 bp, Homo sapiens
  chr10:28527755-28527785
  hypo
actattggagagatcgcaactcttcagaat

SEQ ID NO: 165167 - DNA, 44 bp, Homo sapiens; identical to SEQ ID NO: 79728
  chr10:28551684-28551728
  hypo

SEQ ID NO: 165168 - DNA, 31 bp, Homo sapiens; identical to SEQ ID NO: 79729
  chr10:28557287-28557318
  hypo

SEQ ID NO: 165169 - DNA, 43 bp, Homo sapiens; identical to SEQ ID NO: 79730
  chr10:28558916-28558959
  hypo

SEQ ID NO: 165170 - DNA, 26 bp, Homo sapiens
  chr10:28791005-28791031
  hypo
gtgagccaccacgccctgccagtatg

SEQ ID NO: 165171 - DNA, 60 bp, Homo sapiens
  chr10:28824510-28824570
  hypo
gagtcaccccagtagcggtgatcacagacatgaaaagatgcgagacgccggagatccttc

SEQ ID NO: 165172 - DNA, 88 bp, Homo sapiens
  chr10:28833065-28833153
  hypo
cctcccaaagtgctgggattataggcatgagtcactgagcccacttctttccagattttttgtaaaattgtttcgcattgtgttccct

SEQ ID NO: 165173 - DNA, 30 bp, Homo sapiens; identical to SEQ ID NO: 24171
  chr10:28860337-28860367
  hypo

SEQ ID NO: 165174 - DNA, 24 bp, Homo sapiens
  chr10:28964548-28964572
  hypo
gtattgtcctctgggcgcggtggc

SEQ ID NO: 165175 - DNA, 458 bp, Homo sapiens; identical to SEQ ID NO: 118827
  chr10:28965843-28966301
  hypo

SEQ ID NO: 165176 - DNA, 240 bp, Homo sapiens; identical to SEQ ID NO: 47019
  chr10:28966597-28966837
  hypo

SEQ ID NO: 165177 - DNA, 173 bp, Homo sapiens; identical to SEQ ID NO: 79736
  chr10:29186602-29186775
  hypo

SEQ ID NO: 165178 - DNA, 80 bp, Homo sapiens; identical to SEQ ID NO: 79737
  chr10:29213403-29213483
  hypo

SEQ ID NO: 165179 - DNA, 77 bp, Homo sapiens
  chr10:29296564-29296641
  hypo
gcagcgtgaactaaggcaagcgcgtacggtgcgaggattcaaggggcgaggagtgcggttaaataacctggctgcag

SEQ ID NO: 165180 - DNA, 152 bp, Homo sapiens; identical to SEQ ID NO: 24174
  chr10:29300089-29300241
  hypo

SEQ ID NO: 165181 - DNA, 229 bp, Homo sapiens; identical to SEQ ID NO: 79739
  chr10:29311384-29311613
  hypo

SEQ ID NO: 165182 - DNA, 30 bp, Homo sapiens
  chr10:29320995-29321025
  hypo
tgtggggaaggagaccggtccagccgagcc

SEQ ID NO: 165183 - DNA, 30 bp, Homo sapiens
  chr10:29414219-29414249
  hypo
ttttttttttttttttttagacgagtcttc

SEQ ID NO: 165184 - DNA, 29 bp, Homo sapiens
  chr10:29433666-29433695
  hypo
tttttttttttttttttgagacggagtct

SEQ ID NO: 165185 - DNA, 368 bp, Homo sapiens
  chr10:29518367-29518735
  hypo
tggagaggaggctctcggagatcggctgacggcgtagggagaaggctctctggtcggctgaccgcctggagaggaggctgtgggaggttggctgatcccctggggaggaggctctggcaggtcggccgaccatgttgggaggaggctcttggaggtcagctgactgcatggggaggaggctgtgggaggtcggctgaccatgtggggaggaggctgtgggggttcggctgacggcttggggaggagactctgggaggtcagctaaccacaggcacctgctctgcgtctcagcgcatgtactgctgcctattgcggccgtggagctgttcccagttctctccggtactacgccacgtcttcccaagttt

SEQ ID NO: 165186 - DNA, 118 bp, Homo sapiens; identical to SEQ ID NO: 79741
  chr10:29581545-29581663
  hypo

SEQ ID NO: 165187 - DNA, 22 bp, Homo sapiens
  chr10:29595179-29595201
  hypo
agaaaaaataaggaacttggcc

SEQ ID NO: 165188 - DNA, 81 bp, Homo sapiens; identical to SEQ ID NO: 79742
  chr10:29666996-29667077
  hypo

SEQ ID NO: 165189 - DNA, 29 bp, Homo sapiens
  chr10:29718757-29718786
  hypo
ttaaagaaatatggtagtggccgggcatg

SEQ ID NO: 165190 - DNA, 30 bp, Homo sapiens
  chr10:29737913-29737943
  hypo
cccaggtcagcccatcgtagagttcaggtt

SEQ ID NO: 165191 - DNA, 79 bp, Homo sapiens; identical to SEQ ID NO: 7296
  chr10:29738054-29738133
  hypo

SEQ ID NO: 165192 - DNA, 30 bp, Homo sapiens; identical to SEQ ID NO: 118833
  chr10:29738146-29738176
  hypo

SEQ ID NO: 165193 - DNA, 30 bp, Homo sapiens; identical to SEQ ID NO: 24177
  chr10:29759212-29759242
  hypo

SEQ ID NO: 165194 - DNA, 108 bp, Homo sapiens
  chr10:29769272-29769380
  hypo
aggttgttaggaattcggccttacttcttttcatctctgtagtttactaggtggctctcaaaggcgcatgactgcagtgccccactgcacggacgcagcagagggcat

SEQ ID NO: 165195 - DNA, 30 bp, Homo sapiens
  chr10:29769630-29769660
  hypo
ggccatagccacggccgacgttcactccgt

SEQ ID NO: 165196 - DNA, 46 bp, Homo sapiens; identical to SEQ ID NO: 79746
  chr10:29777544-29777590
  hypo

SEQ ID NO: 165197 - DNA, 31 bp, Homo sapiens; identical to SEQ ID NO: 79747
  chr10:29784320-29784351
  hypo

SEQ ID NO: 165198 - DNA, 172 bp, Homo sapiens; identical to SEQ ID NO: 79748
  chr10:29805521-29805693
  hypo

SEQ ID NO: 165199 - DNA, 146 bp, Homo sapiens; identical to SEQ ID NO: 79749
  chr10:29815840-29815986
  hypo

SEQ ID NO: 165200 - DNA, 159 bp, Homo sapiens; identical to SEQ ID NO: 79750
  chr10:29821665-29821824
  hypo

SEQ ID NO: 165201 - DNA, 40 bp, Homo sapiens; identical to SEQ ID NO: 79751
  chr10:29840086-29840126
  hypo

SEQ ID NO: 165202 - DNA, 36 bp, Homo sapiens; identical to SEQ ID NO: 79752
  chr10:29857036-29857072
  hypo

SEQ ID NO: 165203 - DNA, 208 bp, Homo sapiens; identical to SEQ ID NO: 79753
  chr10:29884471-29884679
  hypo

SEQ ID NO: 165204 - DNA, 31 bp, Homo sapiens; identical to SEQ ID NO: 24178
  chr10:29993108-29993139
  hypo

SEQ ID NO: 165205 - DNA, 759 bp, Homo sapiens; identical to SEQ ID NO: 7297
  chr10:30024793-30025552
  hypo

SEQ ID NO: 165206 - DNA, 30 bp, Homo sapiens
  chr10:30047207-30047237
  hypo
aactgaataaggcttcgtgtttccatcgcc

SEQ ID NO: 165207 - DNA, 31 bp, Homo sapiens; identical to SEQ ID NO: 79756
  chr10:30102454-30102485
  hypo

SEQ ID NO: 165208 - DNA, 44 bp, Homo sapiens
  chr10:30270176-30270220
  hypo
aaaaaaaggaattagtaattttatgctgtcgctgtcgaaggact

SEQ ID NO: 165209 - DNA, 48 bp, Homo sapiens; identical to SEQ ID NO: 79757
  chr10:30280768-30280816
  hypo

SEQ ID NO: 165210 - DNA, 120 bp, Homo sapiens; identical to SEQ ID NO: 79758
  chr10:30282370-30282490
  hypo

SEQ ID NO: 165211 - DNA, 30 bp, Homo sapiens
  chr10:30295552-30295582
  hypo
tggcacacacaccggcgccaagataaagga

SEQ ID NO: 165212 - DNA, 30 bp, Homo sapiens; identical to SEQ ID NO: 79759
  chr10:30317912-30317942
  hypo

SEQ ID NO: 165213 - DNA, 31 bp, Homo sapiens; identical to SEQ ID NO: 79760
  chr10:30336420-30336451
  hypo

SEQ ID NO: 165214 - DNA, 241 bp, Homo sapiens; identical to SEQ ID NO: 79761
  chr10:30454425-30454666
  hypo

SEQ ID NO: 165215 - DNA, 31 bp, Homo sapiens; identical to SEQ ID NO: 79762
  chr10:30471109-30471140
  hypo

SEQ ID NO: 165216 - DNA, 97 bp, Homo sapiens
  chr10:30496157-30496254
  hypo
gaggtcgcccttaaacgagtattaattcaaggcgcaggtaagaaacatggagaagagcagcgcaaagcacgtgtgaggcaaacgctacggcagcacg

SEQ ID NO: 165217 - DNA, 35 bp, Homo sapiens; identical to SEQ ID NO: 79763
  chr10:30692598-30692633
  hypo

SEQ ID NO: 165218 - DNA, 19 bp, Homo sapiens
  chr10:30733374-30733393
  hypo
agaacgaaactccatcaca

SEQ ID NO: 165219 - DNA, 179 bp, Homo sapiens; identical to SEQ ID NO: 79765
  chr10:30736710-30736889
  hypo

SEQ ID NO: 165220 - DNA, 82 bp, Homo sapiens; identical to SEQ ID NO: 79766
  chr10:30798126-30798208
  hypo

SEQ ID NO: 165221 - DNA, 30 bp, Homo sapiens; identical to SEQ ID NO: 79767
  chr10:30848293-30848323
  hypo

SEQ ID NO: 165222 - DNA, 30 bp, Homo sapiens
  chr10:30915902-30915932
  hypo
ttgattcaggaacttcgaaatccagcatcg

SEQ ID NO: 165223 - DNA, 35 bp, Homo sapiens; identical to SEQ ID NO: 24180
  chr10:30981746-30981781
  hypo

SEQ ID NO: 165224 - DNA, 31 bp, Homo sapiens
  chr10:31006068-31006099
  hypo
ctcctttcactgagtcgcggggcgcttctcc

SEQ ID NO: 165225 - DNA, 30 bp, Homo sapiens; identical to SEQ ID NO: 79769
  chr10:31076177-31076207
  hypo

SEQ ID NO: 165226 - DNA, 31 bp, Homo sapiens; identical to SEQ ID NO: 24181
  chr10:31076407-31076438
  hypo

SEQ ID NO: 165227 - DNA, 288 bp, Homo sapiens
  chr10:31108013-31108301
  hypo
ccagagtggccccaccgctccacccactctgggtaactcatgggcacaccctggaaaccagaaaaacagtggagctctgcctgtccccgaaggaaagaattacattgccgcaagcaatttggaaaggagcaaggagcttggaaactcggagcaagcggaatcatctcctaccgccccgcttctgctcggctcagggcgcacgatgaaaaggctgaatttgtcacatttccccacactcagtcccaaacaggctatcccagtcgtctctccctccggaggagacccctt

SEQ ID NO: 165228 - DNA, 30 bp, Homo sapiens
  chr10:31121212-31121242
  hypo
gagcatcacagttcacggctggtatgaatt

SEQ ID NO: 165229 - DNA, 85 bp, Homo sapiens
  chr10:31121496-31121581
  hypo
acaatcggcaactgtcgctgggccccatgcacggctcacctgcctagagaggcactctctgcgagaaatccgtcctgtgctaact

SEQ ID NO: 165230 - DNA, 30 bp, Homo sapiens; identical to SEQ ID NO: 24183
  chr10:31133814-31133844
  hypo

SEQ ID NO: 165231 - DNA, 107 bp, Homo sapiens
  chr10:31134746-31134853
  hypo
cgcatctgtcccaggcgagctaactcgtctttggttaccacagggacaggagcaatcacgtggaagagtcacgtaagagcgcgtgaagggcacgggaacaccctcgg

SEQ ID NO: 165232 - DNA, 31 bp, Homo sapiens; identical to SEQ ID NO: 24184
  chr10:31137749-31137780
  hypo

SEQ ID NO: 165233 - DNA, 43 bp, Homo sapiens
  chr10:31389889-31389932
  hypo
gattttgccaacaaccttgggcgagtcagtccacctatctggg

SEQ ID NO: 165234 - DNA, 2174 bp, Homo sapiens; identical to SEQ ID NO: 47034
  chr10:31607940-31610114
  hypo

SEQ ID NO: 165235 - DNA, 107 bp, Homo sapiens
  chr10:31810653-31810760
  hypo
caaccccataaatatcgctatacctacagtcactgcccagttacccacaatcgtggccattgctgaccagaacagtgttccatgcttaagagcgctagctgccaata

SEQ ID NO: 165236 - DNA, 60 bp, Homo sapiens
  chr10:31892880-31892940
  hypo
tcatgctgcaaattcccgtggccagcacccgaggcctgctggctccgatctgggccacgt

SEQ ID NO: 165237 - DNA, 187 bp, Homo sapiens
  chr10:32038296-32038483
  hypo
gaggcagcaggtgggcgggctgtggcctacagcccctctgctccccggggccgtgccaggccaggcctgaggatgccggctgtcaacagtcaccatggtgacctcatagccagcagctgctctccccactgcggtgaaggtgtctgaatggcttctgaggcgggtccaagggcggtgggcagtccca

SEQ ID NO: 165238 - DNA, 31 bp, Homo sapiens; identical to SEQ ID NO: 79776
  chr10:32042434-32042465
  hypo

SEQ ID NO: 165239 - DNA, 31 bp, Homo sapiens; identical to SEQ ID NO: 79777
  chr10:32062806-32062837
  hypo

SEQ ID NO: 165240 - DNA, 34 bp, Homo sapiens
  chr10:32080304-32080338
  hypo
acaggccgggtgcggcggctgatgcctgtaatcc

SEQ ID NO: 165241 - DNA, 46 bp, Homo sapiens; identical to SEQ ID NO: 79778
  chr10:32171068-32171114
  hypo

SEQ ID NO: 165242 - DNA, 156 bp, Homo sapiens; identical to SEQ ID NO: 79779
  chr10:32205148-32205304
  hypo

SEQ ID NO: 165243 - DNA, 25 bp, Homo sapiens
  chr10:32292573-32292598
  hypo
gattgtgccacagcactccagcgtg

SEQ ID NO: 165244 - DNA, 31 bp, Homo sapiens; identical to SEQ ID NO: 24188
  chr10:32332318-32332349
  hypo

SEQ ID NO: 165245 - DNA, 37 bp, Homo sapiens; identical to SEQ ID NO: 24189
  chr10:32333608-32333645
  hypo

SEQ ID NO: 165246 - DNA, 30 bp, Homo sapiens; identical to SEQ ID NO: 79783
  chr10:32398763-32398793
  hypo

SEQ ID NO: 165247 - DNA, 62 bp, Homo sapiens; identical to SEQ ID NO: 79784
  chr10:32499019-32499081
  hypo

SEQ ID NO: 165248 - DNA, 18 bp, Homo sapiens
  chr10:32585161-32585179
  hypo
caatgttctgcttcttaa

SEQ ID NO: 165249 - DNA, 34 bp, Homo sapiens; identical to SEQ ID NO: 79786
  chr10:32587052-32587086
  hypo

SEQ ID NO: 165250 - DNA, 30 bp, Homo sapiens; identical to SEQ ID NO: 79787
  chr10:32638803-32638833
  hypo

SEQ ID NO: 165251 - DNA, 30 bp, Homo sapiens; identical to SEQ ID NO: 79788
  chr10:32639442-32639472
  hypo

SEQ ID NO: 165252 - DNA, 30 bp, Homo sapiens
  chr10:33224729-33224759
  hypo
tctctaaagcaaaccgattatattttaaca

SEQ ID NO: 165253 - DNA, 90 bp, Homo sapiens
  chr10:33233313-33233403
  hypo
tggtctgtaaaggggcgtctacgcggcagcagccgtgatcatgggggccctgggctaggcaacagcactagttgtcgcgcgtcaccaaac

SEQ ID NO: 165254 - DNA, 30 bp, Homo sapiens; identical to SEQ ID NO: 79790
  chr10:33265703-33265733
  hypo

SEQ ID NO: 165255 - DNA, 20 bp, Homo sapiens
  chr10:33271671-33271691
  hypo
aactcctggccttaagtgat

SEQ ID NO: 165256 - DNA, 41 bp, Homo sapiens; identical to SEQ ID NO: 24191
  chr10:33293519-33293560
  hypo

SEQ ID NO: 165257 - DNA, 105 bp, Homo sapiens; identical to SEQ ID NO: 79793
  chr10:33432804-33432909
  hypo

SEQ ID NO: 165258 - DNA, 18 bp, Homo sapiens
  chr10:33433526-33433544
  hypo
aaatttatttctaggccg

SEQ ID NO: 165259 - DNA, 31 bp, Homo sapiens; identical to SEQ ID NO: 79795
  chr10:33780120-33780151
  hypo

SEQ ID NO: 165260 - DNA, 27 bp, Homo sapiens
  chr10:33867644-33867671
  hypo
gcacccggccctgaaatggatcttaag

SEQ ID NO: 165261 - DNA, 44 bp, Homo sapiens; identical to SEQ ID NO: 79797
  chr10:34063091-34063135
  hypo

SEQ ID NO: 165262 - DNA, 48 bp, Homo sapiens; identical to SEQ ID NO: 79798
  chr10:34151693-34151741
  hypo

SEQ ID NO: 165263 - DNA, 25 bp, Homo sapiens
  chr10:34248563-34248588
  hypo
gcccggccacttaatttcccttttc

SEQ ID NO: 165264 - DNA, 183 bp, Homo sapiens; identical to SEQ ID NO: 24193
  chr10:34276836-34277019
  hypo

SEQ ID NO: 165265 - DNA, 31 bp, Homo sapiens; identical to SEQ ID NO: 79801
  chr10:34318438-34318469
  hypo

SEQ ID NO: 165266 - DNA, 172 bp, Homo sapiens; identical to SEQ ID NO: 79802
  chr10:34333799-34333971
  hypo

SEQ ID NO: 165267 - DNA, 30 bp, Homo sapiens
  chr10:34335770-34335800
  hypo
actcactctgaactccgagagctgtctggc

SEQ ID NO: 165268 - DNA, 77 bp, Homo sapiens; identical to SEQ ID NO: 79803
  chr10:34345646-34345723
  hypo

SEQ ID NO: 165269 - DNA, 26 bp, Homo sapiens
  chr10:34378907-34378933
  hypo
actccgtctcaaacaaaagaaaaaaa

SEQ ID NO: 165270 - DNA, 161 bp, Homo sapiens; identical to SEQ ID NO: 79805
  chr10:34472411-34472572
  hypo

SEQ ID NO: 165271 - DNA, 41 bp, Homo sapiens; identical to SEQ ID NO: 79806
  chr10:34532752-34532793
  hypo

SEQ ID NO: 165272 - DNA, 168 bp, Homo sapiens
  chr10:34558596-34558764
  hypo
gagggtttggaattccgcggcttcttgacttgggcatacaaagcatccatcatatgcccttctcgtgggctctgaggtctagcgttgagagccatggaaccttcataagaagaaactcccccatacattaactcatcatcacagccaaatgtccgatgaaaatcttga

SEQ ID NO: 165273 - DNA, 31 bp, Homo sapiens; identical to SEQ ID NO: 79807
  chr10:34777861-34777892
  hypo

SEQ ID NO: 165274 - DNA, 79 bp, Homo sapiens
  chr10:34845265-34845344
  hypo
taatagacacaactgcgctaccacccttccaattccttttcttctttctttttttttttttttgagacagagtcttgct

SEQ ID NO: 165275 - DNA, 78 bp, Homo sapiens; identical to SEQ ID NO: 79809
  chr10:34845583-34845661
  hypo

SEQ ID NO: 165276 - DNA, 24 bp, Homo sapiens
  chr10:34910403-34910427
  hypo
gcaagccaccgcgcccggcctagt

SEQ ID NO: 165277 - DNA, 28 bp, Homo sapiens
  chr10:35023510-35023538
  hypo
ccacctcggcccatatggggcattttta

SEQ ID NO: 165278 - DNA, 94 bp, Homo sapiens; identical to SEQ ID NO: 79811
  chr10:35043968-35044062
  hypo

SEQ ID NO: 165279 - DNA, 2584 bp, Homo sapiens; identical to SEQ ID NO: 47041
  chr10:35102969-35105553
  hypo

SEQ ID NO: 165280 - DNA, 143 bp, Homo sapiens
  chr10:35152216-35152359
  hypo
ttagcaaaaagttttataagacgttatcaaataacaaatacttaatttcttttctttttttttttttgagacggagtcttgccaccatacctggcctatttacaggcatcctgtttaagagatgtttcaggccgggcgcggcg

SEQ ID NO: 165281 - DNA, 32 bp, Homo sapiens; identical to SEQ ID NO: 79814
  chr10:35243812-35243844
  hypo

SEQ ID NO: 165282 - DNA, 82 bp, Homo sapiens; identical to SEQ ID NO: 79815
  chr10:35254595-35254677
  hypo

SEQ ID NO: 165283 - DNA, 30 bp, Homo sapiens; identical to SEQ ID NO: 24198
  chr10:35299079-35299109
  hypo

SEQ ID NO: 165284 - DNA, 30 bp, Homo sapiens
  chr10:35304954-35304984
  hypo
tgatgccttaacgctcgcagctctatggag

SEQ ID NO: 165285 - DNA, 30 bp, Homo sapiens
  chr10:35363878-35363908
  hypo
taccaaaaagctagcgatgctcccctcaca

SEQ ID NO: 165286 - DNA, 36 bp, Homo sapiens; identical to SEQ ID NO: 79817
  chr10:35394057-35394093
  hypo

SEQ ID NO: 165287 - DNA, 30 bp, Homo sapiens; identical to SEQ ID NO: 79818
  chr10:35502673-35502703
  hypo

SEQ ID NO: 165288 - DNA, 123 bp, Homo sapiens; identical to SEQ ID NO: 24199
  chr10:35503792-35503915
  hypo

SEQ ID NO: 165289 - DNA, 30 bp, Homo sapiens
  chr10:35596271-35596301
  hypo
gtgtggcggctcacgcgcataaacgccatg

SEQ ID NO: 165290 - DNA, 30 bp, Homo sapiens
  chr10:35602373-35602403
  hypo
acttccccgagtttgcgtctgtttcaggct

SEQ ID NO: 165291 - DNA, 30 bp, Homo sapiens
  chr10:35606657-35606687
  hypo
ccagggaaaggggacgtggggaatggtgat

SEQ ID NO: 165292 - DNA, 35 bp, Homo sapiens; identical to SEQ ID NO: 24200
  chr10:35621533-35621568
  hypo

SEQ ID NO: 165293 - DNA, 34 bp, Homo sapiens
  chr10:35621807-35621841
  hypo
aggtgtgaaccaccgcgcccggcccacctgagtt

SEQ ID NO: 165294 - DNA, 31 bp, Homo sapiens; identical to SEQ ID NO: 47044
  chr10:35626505-35626536
  hypo

SEQ ID NO: 165295 - DNA, 30 bp, Homo sapiens; identical to SEQ ID NO: 24201
  chr10:35781947-35781977
  hypo

SEQ ID NO: 165296 - DNA, 2901 bp, Homo sapiens; identical to SEQ ID NO: 118866
  chr10:35929333-35932234
  hypo

SEQ ID NO: 165297 - DNA, 199 bp, Homo sapiens; identical to SEQ ID NO: 24203
  chr10:36639322-36639521
  hypo

SEQ ID NO: 165298 - DNA, 43 bp, Homo sapiens; identical to SEQ ID NO: 24204
  chr10:36930095-36930138
  hypo

SEQ ID NO: 165299 - DNA, 17 bp, Homo sapiens
  chr10:37301908-37301925
  hypo
cagaaaaaaaaaaaaag

SEQ ID NO: 165300 - DNA, 17 bp, Homo sapiens
  chr10:38078894-38078911
  hypo
aaaacctgcctggggcc

SEQ ID NO: 165301 - DNA, 31 bp, Homo sapiens; identical to SEQ ID NO: 24205
  chr10:38301639-38301670
  hypo

SEQ ID NO: 165302 - DNA, 30 bp, Homo sapiens; identical to SEQ ID NO: 7317
  chr10:38654417-38654447
  hypo

SEQ ID NO: 165303 - DNA, 30 bp, Homo sapiens
  chr10:42876857-42876887
  hypo
aaaagtctttgtattcggctgggcgccgtg

SEQ ID NO: 165304 - DNA, 30 bp, Homo sapiens
  chr10:42978430-42978460
  hypo
agaattccccttccccgttgacttagctaa

SEQ ID NO: 165305 - DNA, 35 bp, Homo sapiens; identical to SEQ ID NO: 24207
  chr10:43131975-43132010
  hypo

SEQ ID NO: 165306 - DNA, 301 bp, Homo sapiens
  chr10:43185745-43186046
  hypo
ctccactgctgccaccgaggccgacggtacagcacccacagcttcctacccacgccaggccaggtggctccgcagtgctcctactcccacttcccaggacccccagacttgctgctgctgccaccactaaggccaatgccaatacaaccactgctgctgtcaccctcgatgcaccggcactccctacaaggcccctactagctggccacagccacagccctgccacaggtggccacagctggctgccctcctacctactgctccaaagtgccacccaccgcagtgacgccagccgccacgt

SEQ ID NO: 165307 - DNA, 30 bp, Homo sapiens
  chr10:43186362-43186392
  hypo
ccccaccccgagtgccggtttccattccta

SEQ ID NO: 165308 - DNA, 286 bp, Homo sapiens
  chr10:43186654-43186940
  hypo
gtgcagccccgattgcgcccctaacccgccgctgacagtgtagcccccgatagtgtcccaaacaccaccccccactcccagggagtgtaacccctgatagcgcccccaacccgtccccacctcgaacactgcagcacccaatagagaccccaacccgcccccacactgggagaaataacgcccgtaacagtgccccaagccccactccatccccgggcagtgcagccctggatagcaccccaacccgctcctggctgcaggcagtgatgcccggaatagcgccccc

SEQ ID NO: 165309 - DNA, 1481 bp, Homo sapiens; identical to SEQ ID NO: 118880
  chr10:43248637-43250118
  hypo

SEQ ID NO: 165310 - DNA, 643 bp, Homo sapiens; identical to SEQ ID NO: 47058
  chr10:43250136-43250779
  hypo

SEQ ID NO: 165311 - DNA, 78 bp, Homo sapiens; identical to SEQ ID NO: 47059
  chr10:43250854-43250932
  hypo

SEQ ID NO: 165312 - DNA, 206 bp, Homo sapiens
  chr10:43265222-43265428
  hypo
ggcctcctggcgcgggcgtggcagggcagcacagcctggctgaggaaagcacaaatcctgctctgcaactgctggctccgtggccttgggaagtcagcaccaactccccagggtttttgaggaggtggtgtgacttagtgactgcaaatgcaaggcgtgccttgccttccactgaacatgcgcagtgttggcgctgttttactgtt

SEQ ID NO: 165313 - DNA, 30 bp, Homo sapiens; identical to SEQ ID NO: 47060
  chr10:43361300-43361330
  hypo

SEQ ID NO: 165314 - DNA, 725 bp, Homo sapiens; identical to SEQ ID NO: 118884
  chr10:43361589-43362314
  hypo

SEQ ID NO: 165315 - DNA, 30 bp, Homo sapiens
  chr10:43375852-43375882
  hypo
gtgcgtgtgggtgtgcgagggtgagtgtgc

SEQ ID NO: 165316 - DNA, 30 bp, Homo sapiens; identical to SEQ ID NO: 79836
  chr10:43394632-43394662
  hypo

SEQ ID NO: 165317 - DNA, 378 bp, Homo sapiens; identical to SEQ ID NO: 47066
  chr10:43571918-43572296
  hypo

SEQ ID NO: 165318 - DNA, 743 bp, Homo sapiens; identical to SEQ ID NO: 118890
  chr10:43572558-43573301
  hypo

SEQ ID NO: 165319 - DNA, 50 bp, Homo sapiens; identical to SEQ ID NO: 79839
  chr10:43584497-43584547
  hypo

SEQ ID NO: 165320 - DNA, 30 bp, Homo sapiens; identical to SEQ ID NO: 47068
  chr10:43593497-43593527
  hypo

SEQ ID NO: 165321 - DNA, 75 bp, Homo sapiens; identical to SEQ ID NO: 118892
  chr10:43600281-43600356
  hypo

SEQ ID NO: 165322 - DNA, 171 bp, Homo sapiens; identical to SEQ ID NO: 47069
  chr10:43600550-43600721
  hypo

SEQ ID NO: 165323 - DNA, 30 bp, Homo sapiens
  chr10:43601847-43601877
  hypo
gtcttcgatgcagacgtggtacctgcatca

SEQ ID NO: 165324 - DNA, 169 bp, Homo sapiens
  chr10:43604493-43604662
  hypo
ggaacctctccatctcggagaaccgcaccatgcagctggcggtgctggtcaatgactcagacttccagggcccaggagcgggcgtcctcttgctccacttcaacgtgtcggtgctgccggtcagcctgcacctgcccagtacctactccctctccgtgagcaggagggc

SEQ ID NO: 165325 - DNA, 186 bp, Homo sapiens
  chr10:43605296-43605482
  hypo
gccagtgttgcacatcgtggtgttctttctgggatgtttctcgtaagcacttattaagttgacttgaaactgcagcacgcatgttctcgcatgccgctctcccttgcagagcagcccgtggcgcctcctcttcaggggccatctgccagttctttcgggtggttctgtgcccgcatcagctcctgg

SEQ ID NO: 165326 - DNA, 54 bp, Homo sapiens
  chr10:43626345-43626399
  hypo
catcagtctcatctgcgattgcattgtgtcagatgccaacggcctgtgtcacac

SEQ ID NO: 165327 - DNA, 169 bp, Homo sapiens
  chr10:43626883-43627052
  hypo
aaagaaagcctctcccgcaggcaggtggagcagttagcggtgcctctctctgcctcgggtgcgttcacgcatagtgtctggcacaccttgttttattgctctttgctttattgcgtttttcacaaattgaagttttgtggcaacgctgagtcgtcgagaaagtctatca

SEQ ID NO: 165328 - DNA, 240 bp, Homo sapiens; identical to SEQ ID NO: 79843
  chr10:43701716-43701956
  hypo

SEQ ID NO: 165329 - DNA, 30 bp, Homo sapiens
  chr10:43803036-43803066
  hypo
tcccgcataaaattccgccagttttggcca

SEQ ID NO: 165330 - DNA, 30 bp, Homo sapiens
  chr10:43810914-43810944
  hypo
cagtgctgccctctgcgaggcagataggga

SEQ ID NO: 165331 - DNA, 30 bp, Homo sapiens; identical to SEQ ID NO: 24212
  chr10:43815765-43815795
  hypo

SEQ ID NO: 165332 - DNA, 96 bp, Homo sapiens
  chr10:43858253-43858349
  hypo
gggcccgaggaatctgcggagagacgggaagagcaggggacactcacagggcgggggtccaggcgggagtccagtagtcctcgtggagacagctgg

SEQ ID NO: 165333 - DNA, 327 bp, Homo sapiens
  chr10:43872975-43873302
  hypo
cgactggaatgcaggcgataggatcactgaggaggcaaggcccagccctgcaggacgcagaggcaggggtgggagccacccagcagggctggtagaagggggctcctgagcacgcctcctcatccagggggtgcagtgcagagctctctcctcgttggcacgggaagacgctggtgtgagagactgcttttgagaacatgaaaagtgcggtaagaaagccaagtctggagtggcagacccaggggaagccacacaaaggtgaccggaagcagtgcatgctttctgactgaggaacccagggccacgcagtcacgactatcaggagct

SEQ ID NO: 165334 - DNA, 30 bp, Homo sapiens; identical to SEQ ID NO: 79846
  chr10:43889094-43889124
  hypo

SEQ ID NO: 165335 - DNA, 30 bp, Homo sapiens; identical to SEQ ID NO: 79847
  chr10:43905817-43905847
  hypo

SEQ ID NO: 165336 - DNA, 89 bp, Homo sapiens; identical to SEQ ID NO: 24213
  chr10:43906026-43906115
  hypo

SEQ ID NO: 165337 - DNA, 28 bp, Homo sapiens
  chr10:43915512-43915540
  hypo
tgtctccgttttccaaagtgctgggatc

SEQ ID NO: 165338 - DNA, 273 bp, Homo sapiens; identical to SEQ ID NO: 24215
  chr10:44163387-44163660
  hypo

SEQ ID NO: 165339 - DNA, 92 bp, Homo sapiens; identical to SEQ ID NO: 24216
  chr10:44163719-44163811
  hypo

SEQ ID NO: 165340 - DNA, 160 bp, Homo sapiens
  chr10:44184095-44184255
  hypo
tctcctgggctacaggggctgcgagggaggcttgaggggctggggagcgaggggcaggctgagaccctcctgtgggaaagcattgcaagctgggaatgtttagcggtggccagtacctcagagtgcagcagggcgaggcggaaaagagactgaccatgtc

SEQ ID NO: 165341 - DNA, 198 bp, Homo sapiens
  chr10:44197650-44197848
  hypo
aaagcaagataagaggtgttttctttctgtccctaccggtgccctctgtctggggcttcttcaacagggtgcatggcaggcggtgttagtgttgaactcatggagacgcctgtggccagcccgcgggggcagttcagaggggcaggaggcactacacaggtggctgggtacaggtgcattccccgagctgccccccca

SEQ ID NO: 165342 - DNA, 51 bp, Homo sapiens
  chr10:44197884-44197935
  hypo
ccttccgcagaggcttcagcctcccctgtacagaggcggggcatggagccg

SEQ ID NO: 165343 - DNA, 423 bp, Homo sapiens
  chr10:44198149-44198572
  hypo
gacagtcgcaccgggcgtggcccaaggccaggatcctgagagctggctgcctgcggcccgtggcatatttgctagcgccttccaggcatagaacggtggcagttttttctgtcaaggactcactttctagggaagaaggagggtggtgggcagcgcgaggccaggaggctggcgtgggcttgccggtaggcgcttctgagctgggtgggctcgccttctcgcccttcctcctctttccttccttgtttcccctaatgacccgggcacttattctagcccagctctggcctcgcgtcactacgctctgcaataggaggacggtagggtccttggccatgctggctcgcctggtcacggcgactcccacgcacgcccggactcctggtgctggtgctcgctcagcaggcgcggctgggggcggct

SEQ ID NO: 165344 - DNA, 30 bp, Homo sapiens
  chr10:44304694-44304724
  hypo
attctttttatagatcgtttaacagaattc

SEQ ID NO: 165345 - DNA, 30 bp, Homo sapiens; identical to SEQ ID NO: 79854
  chr10:44321615-44321645
  hypo

SEQ ID NO: 165346 - DNA, 30 bp, Homo sapiens
  chr10:44375466-44375496
  hypo
acccctagcagatggcgagtgtgtccagct

SEQ ID NO: 165347 - DNA, 30 bp, Homo sapiens
  chr10:44375754-44375784
  hypo
gaaagccagtctccacggagacgtgggagg

SEQ ID NO: 165348 - DNA, 31 bp, Homo sapiens; identical to SEQ ID NO: 7333
  chr10:44420042-44420073
  hypo

SEQ ID NO: 165349 - DNA, 595 bp, Homo sapiens
  chr10:44500791-44501386
  hypo
tggaagtccgctgttcggggtaaattggcagctgctgaaccctaaagtcgtggggcagggctccgacaggcctttgcgcctcctttccccatcagcgtttagagctaatgggaaaggaattgtttattttcttttgtttttatatttttgggttagctttaccgctacagaaaagtaaggtaaatgaccccgcattcacggagggtgactgtgcaaagcgtgaacatgcgccgagtttatgaagcgggtgtcggagccagcgctgcttctcgctgacccgcatgccccggccggccaggaacctgcgcctgagtgccctggtgtttctcttttttcccacgaaagcacgtgtgaagggcagagccacgtttatcaagaagtcatttttcccgttcgccggcattacaccattagcattacaggggccacctacacctcgtatttcgattccacagctccggagaacctgcggtgctgcggccactctgtgggtgtccccccacccccatctccactgcgagctctccggcctgggcacgcagctgctgacacacatcagcatggtgccctggccggcatctgctctgtggctggt

SEQ ID NO: 165350 - DNA, 30 bp, Homo sapiens
  chr10:44524456-44524486
  hypo
acgcatggcgagccgcggacaggtgttacc

SEQ ID NO: 165351 - DNA, 30 bp, Homo sapiens
  chr10:44540322-44540352
  hypo
gtctgtgatcagcaacgctgcccttggtca

SEQ ID NO: 165352 - DNA, 30 bp, Homo sapiens; identical to SEQ ID NO: 7335
  chr10:44848905-44848935
  hypo

SEQ ID NO: 165353 - DNA, 304 bp, Homo sapiens
  chr10:44874107-44874411
  hypo
ctcctgaatccactttagcttcgggtcaatgcacacttgtctgttgttgttcttcagccgggctctgtgaaaacagaatggcaacagtgtgcggctgcacaggaggaaggcgcggctgcaacgtgtgcatccgctcccccaacacccatctagggccctcgctggcaccccgtgctccacttggtacgctcaggctccagaggtgctcgcggtgtgctggggaaagctcagcgctggcagtgcaggaagttccattgcagagacatggaaatgtgaacagaagtctttccggggcagtgcaggg

SEQ ID NO: 165354 - DNA, 31 bp, Homo sapiens; identical to SEQ ID NO: 24222
  chr10:45419799-45419830
  hypo

SEQ ID NO: 165355 - DNA, 30 bp, Homo sapiens
  chr10:45488283-45488313
  hypo
gtcagtcctgaccccgtaagatttgagagc

SEQ ID NO: 165356 - DNA, 273 bp, Homo sapiens
  chr10:45566819-45567092
  hypo
ctgctcaggagccggcgaaatttcaaatgggggtactgttgaggcaccgttgcaggctgtgtttttcacttcttccctcagtccacgcccacactctggcacattgtgtgctgattggctcacaagcttccctaagctaccccgccactctcccttctccaccgcccaacccctacctcgatgaggtcctcacctatccaccaccccagaaggctctgggtgaggctccgggcgaggcacagcgcccccagtgccacccaacaggctcttgct

SEQ ID NO: 165357 - DNA, 35 bp, Homo sapiens; identical to SEQ ID NO: 79860
  chr10:45986734-45986769
  hypo

SEQ ID NO: 165358 - DNA, 238 bp, Homo sapiens
  chr10:46009802-46010040
  hypo
gaatgcattggtgtgcgctcagtgcagcgcttccccgcaacatggtccctgtgcttgatgccggggaacaggcgctgcctgcacagcagctgccaccctacagctgccagcagcagcacatggctggctgtcgcagctggacttgtgagggcttgctgaagccctcagcataccactcctgccatcaaactggactacttcctccagctgattttcaaggaacgaggcagtgaatgaa

SEQ ID NO: 165359 - DNA, 32 bp, Homo sapiens; identical to SEQ ID NO: 79862
  chr10:46195656-46195688
  hypo

SEQ ID NO: 165360 - DNA, 30 bp, Homo sapiens; identical to SEQ ID NO: 79863
  chr10:46221210-46221240
  hypo

SEQ ID NO: 165361 - DNA, 51 bp, Homo sapiens; identical to SEQ ID NO: 7340
  chr10:49514478-49514529
  hypo

SEQ ID NO: 165362 - DNA, 267 bp, Homo sapiens; identical to SEQ ID NO: 79865
  chr10:49541832-49542099
  hypo

SEQ ID NO: 165363 - DNA, 30 bp, Homo sapiens; identical to SEQ ID NO: 24226
  chr10:49542400-49542430
  hypo

SEQ ID NO: 165364 - DNA, 41 bp, Homo sapiens; identical to SEQ ID NO: 24227
  chr10:49592261-49592302
  hypo

SEQ ID NO: 165365 - DNA, 30 bp, Homo sapiens
  chr10:49628279-49628309
  hypo
cgagttttatgatgacgccttatgtagtga

SEQ ID NO: 165366 - DNA, 117 bp, Homo sapiens
  chr10:49652963-49653080
  hypo
tcgcgtgtcagtggccgagcaaagacagacgccactctccccagcccctcctgagctccggcatccagaccttgatgctgctgagggccctgagcaggtgcccgcctcctggtggac

SEQ ID NO: 165367 - DNA, 284 bp, Homo sapiens
  chr10:49658305-49658589
  hypo
tttcacactcctctcgtactcagtccgctggcggcacagctcggccctgagctcagtgaccagcccctgtaaggcctcggagcggcgcgcgtgttcccgggtggggctgtccggctcgctgggctcgctgttgctggcacccgcgcccgcctcgtccatgctgtggtccaggtccagggacttggggtcctcgctgctgctggggagcggggagggctccagggcccagtcggtgtgcagggaactgcgggcagacgagtcgctggcgcggcaggccgtgcagc

SEQ ID NO: 165368 - DNA, 31 bp, Homo sapiens; identical to SEQ ID NO: 7344
  chr10:49892636-49892667
  hypo

SEQ ID NO: 165369 - DNA, 154 bp, Homo sapiens; identical to SEQ ID NO: 79870
  chr10:50099025-50099179
  hypo

SEQ ID NO: 165370 - DNA, 30 bp, Homo sapiens
  chr10:50121879-50121909
  hypo
ccggttgttgctgacgttgaggtagagcag

SEQ ID NO: 165371 - DNA, 43 bp, Homo sapiens
  chr10:50158396-50158439
  hypo
cattgttgcggcatgtgtcagtttcctacggctgagtctgcgc

SEQ ID NO: 165372 - DNA, 119 bp, Homo sapiens
  chr10:50178207-50178326
  hypo
gggccgctgtctgtgcgccgtgtgcccatccccaacaacgattgtcacctctgggaccagcactgtggtgtgtgtgtgggagctcagcatgaccaaaggccgcccgaggggcttgcgcc

SEQ ID NO: 165373 - DNA, 156 bp, Homo sapiens; identical to SEQ ID NO: 24229
  chr10:50340032-50340188
  hypo

SEQ ID NO: 165374 - DNA, 30 bp, Homo sapiens
  chr10:50480898-50480928
  hypo
gcctcattgcggctccgagaaaggaagtgt

SEQ ID NO: 165375 - DNA, 369 bp, Homo sapiens
  chr10:50530628-50530997
  hypo
cgactcctccagcatcggcagcgtgttggatgatgcagacagggaggtgagcagcctaacagaccgggcattccggagtttgtgcatctccgaggacacatccttccatgactcctatctggctgtgtccccggatatcacccgacaggtgtttgggacttttcaccagagaacagtgggccacacccagaggaaaagtggcatttggagccagttaccgtcacagggcacggaacattcgggctgggcggccaccttccaacagctacccaagtacgttcagggagaggaaaagtaccccaaaaccagccccccaccaacgccagtccagaggagactggaggtgccagtttccggcctaaggagcag

SEQ ID NO: 165376 - DNA, 1734 bp, Homo sapiens; identical to SEQ ID NO: 118938
  chr10:50605143-50606877
  hypo

SEQ ID NO: 165377 - DNA, 154 bp, Homo sapiens; identical to SEQ ID NO: 79873
  chr10:50680405-50680559
  hypo

SEQ ID NO: 165378 - DNA, 194 bp, Homo sapiens; identical to SEQ ID NO: 79874
  chr10:50724152-50724346
  hypo

SEQ ID NO: 165379 - DNA, 40 bp, Homo sapiens
  chr10:50748350-50748390
  hypo
ctgggattacaggtgtgagccaccacgcccggcttgtaac

SEQ ID NO: 165380 - DNA, 783 bp, Homo sapiens; identical to SEQ ID NO: 118942
  chr10:50817089-50817872
  hypo

SEQ ID NO: 165381 - DNA, 479 bp, Homo sapiens; identical to SEQ ID NO: 47111
  chr10:50818152-50818631
  hypo

SEQ ID NO: 165382 - DNA, 421 bp, Homo sapiens; identical to SEQ ID NO: 47112
  chr10:50818986-50819407
  hypo

SEQ ID NO: 165383 - DNA, 712 bp, Homo sapiens; identical to SEQ ID NO: 118949
  chr10:50822143-50822855
  hypo

SEQ ID NO: 165384 - DNA, 314 bp, Homo sapiens; identical to SEQ ID NO: 79879
  chr10:50854540-50854854
  hypo

SEQ ID NO: 165385 - DNA, 103 bp, Homo sapiens
  chr10:50948749-50948852
  hypo
acccacccaggactccgtactccgagagggagctgttgcacacggtgtacggggcctggtcaggccagagatgattcataggcacacacgtcctgcggtcaac

SEQ ID NO: 165386 - DNA, 935 bp, Homo sapiens; identical to SEQ ID NO: 118951
  chr10:50969671-50970606
  hypo

SEQ ID NO: 165387 - DNA, 30 bp, Homo sapiens; identical to SEQ ID NO: 79881
  chr10:51027364-51027394
  hypo

SEQ ID NO: 165388 - DNA, 28 bp, Homo sapiens
  chr10:52174734-52174762
  hypo
taaatgctctgatgccggcgcctgtagt

SEQ ID NO: 165389 - DNA, 119 bp, Homo sapiens; identical to SEQ ID NO: 7357
  chr10:52177703-52177822
  hypo

SEQ ID NO: 165390 - DNA, 210 bp, Homo sapiens; identical to SEQ ID NO: 24239
  chr10:52180039-52180249
  hypo

SEQ ID NO: 165391 - DNA, 127 bp, Homo sapiens; identical to SEQ ID NO: 24240
  chr10:52369821-52369948
  hypo

SEQ ID NO: 165392 - DNA, 16 bp, Homo sapiens
  chr10:52372715-52372731
  hypo
ttaaaaacaaagaaag

SEQ ID NO: 165393 - DNA, 31 bp, Homo sapiens; identical to SEQ ID NO: 79886
  chr10:52429237-52429268
  hypo

SEQ ID NO: 165394 - DNA, 1437 bp, Homo sapiens; identical to SEQ ID NO: 118961
  chr10:52833428-52834865
  hypo

SEQ ID NO: 165395 - DNA, 23 bp, Homo sapiens
  chr10:52896915-52896938
  hypo
attacaggcgtgagtaccgcacc

SEQ ID NO: 165396 - DNA, 1839 bp, Homo sapiens; identical to SEQ ID NO: 118964
  chr10:54072981-54074820
  hypo

SEQ ID NO: 165397 - DNA, 30 bp, Homo sapiens; identical to SEQ ID NO: 24244
  chr10:58775425-58775455
  hypo

SEQ ID NO: 165398 - DNA, 290 bp, Homo sapiens; identical to SEQ ID NO: 24245
  chr10:59866612-59866902
  hypo

SEQ ID NO: 165399 - DNA, 30 bp, Homo sapiens; identical to SEQ ID NO: 79892
  chr10:60046048-60046078
  hypo

SEQ ID NO: 165400 - DNA, 30 bp, Homo sapiens; identical to SEQ ID NO: 7371
  chr10:60262026-60262056
  hypo

SEQ ID NO: 165401 - DNA, 30 bp, Homo sapiens; identical to SEQ ID NO: 7380
  chr10:61164087-61164117
  hypo

SEQ ID NO: 165402 - DNA, 229 bp, Homo sapiens; identical to SEQ ID NO: 79895
  chr10:61552611-61552840
  hypo

SEQ ID NO: 165403 - DNA, 30 bp, Homo sapiens
  chr10:61624726-61624756
  hypo
acgattaacttaatacgcgatcttcaagtt

SEQ ID NO: 165404 - DNA, 28 bp, Homo sapiens
  chr10:61642434-61642462
  hypo
ctggccaggagcagtggctcacgcctgt

SEQ ID NO: 165405 - DNA, 51 bp, Homo sapiens
  chr10:61652230-61652281
  hypo
aggctccccaacctgcggtgcacagggagcttggtgcggcctcaaccaccc

SEQ ID NO: 165406 - DNA, 25 bp, Homo sapiens
  chr10:61877555-61877580
  hypo
agcaagactccgtctcaaaaaaaag

SEQ ID NO: 165407 - DNA, 180 bp, Homo sapiens; identical to SEQ ID NO: 79896
  chr10:62662662-62662842
  hypo

SEQ ID NO: 165408 - DNA, 30 bp, Homo sapiens; identical to SEQ ID NO: 24249
  chr10:62668835-62668865
  hypo

SEQ ID NO: 165409 - DNA, 974 bp, Homo sapiens; identical to SEQ ID NO: 118991
  chr10:62703330-62704304
  hypo

SEQ ID NO: 165410 - DNA, 30 bp, Homo sapiens
  chr10:63574864-63574894
  hypo
attctcccaacttcacgaaacacgatggta

SEQ ID NO: 165411 - DNA, 44 bp, Homo sapiens; identical to SEQ ID NO: 79900
  chr10:63669382-63669426
  hypo

SEQ ID NO: 165412 - DNA, 30 bp, Homo sapiens; identical to SEQ ID NO: 24252
  chr10:63671388-63671418
  hypo

SEQ ID NO: 165413 - DNA, 30 bp, Homo sapiens; identical to SEQ ID NO: 79902
  chr10:63709395-63709425
  hypo

SEQ ID NO: 165414 - DNA, 42 bp, Homo sapiens; identical to SEQ ID NO: 24253
  chr10:63757868-63757910
  hypo

SEQ ID NO: 165415 - DNA, 30 bp, Homo sapiens
  chr10:63810722-63810752
  hypo
ttccaacaacaattccgatggcaaagccgt

SEQ ID NO: 165416 - DNA, 28 bp, Homo sapiens
  chr10:63930995-63931023
  hypo
actttttttttttttttgatacggagtc

SEQ ID NO: 165417 - DNA, 207 bp, Homo sapiens; identical to SEQ ID NO: 118997
  chr10:64028002-64028209
  hypo

SEQ ID NO: 165418 - DNA, 30 bp, Homo sapiens; identical to SEQ ID NO: 47159
  chr10:64278666-64278696
  hypo

SEQ ID NO: 165419 - DNA, 30 bp, Homo sapiens
  chr10:64372406-64372436
  hypo
ggaaaatcatgagggcgtcagggtcagagg

SEQ ID NO: 165420 - DNA, 30 bp, Homo sapiens; identical to SEQ ID NO: 79907
  chr10:64571430-64571460
  hypo

SEQ ID NO: 165421 - DNA, 376 bp, Homo sapiens; identical to SEQ ID NO: 7386
  chr10:64574691-64575067
  hypo

SEQ ID NO: 165422 - DNA, 685 bp, Homo sapiens; identical to SEQ ID NO: 119004
  chr10:64575127-64575812
  hypo

SEQ ID NO: 165423 - DNA, 112 bp, Homo sapiens; identical to SEQ ID NO: 79910
  chr10:64914129-64914241
  hypo

SEQ ID NO: 165424 - DNA, 104 bp, Homo sapiens; identical to SEQ ID NO: 24257
  chr10:64945156-64945260
  hypo

SEQ ID NO: 165425 - DNA, 31 bp, Homo sapiens; identical to SEQ ID NO: 24258
  chr10:64983779-64983810
  hypo

SEQ ID NO: 165426 - DNA, 83 bp, Homo sapiens
  chr10:64997097-64997180
  hypo
aaacactcactaaaaatttttttttaatatacagtgcaatgaatgtaacttccaaattaataccacatcgaagttttttgggc

SEQ ID NO: 165427 - DNA, 24 bp, Homo sapiens
  chr10:65031223-65031247
  hypo
caccatgcccggatgtaaatagtc

SEQ ID NO: 165428 - DNA, 30 bp, Homo sapiens
  chr10:65120689-65120719
  hypo
gtgagccaccgagcccggcctaaaaagtat

SEQ ID NO: 165429 - DNA, 30 bp, Homo sapiens; identical to SEQ ID NO: 24259
  chr10:65160317-65160347
  hypo

SEQ ID NO: 165430 - DNA, 115 bp, Homo sapiens
  chr10:65186890-65187005
  hypo
cggacaactcatggcggtggcggcagcagctgcttgggcatggtgcagtggtgactgagctacgagcctggcggcgggtgttcgccgagctccggtccccgcgtgtctcccagaa

SEQ ID NO: 165431 - DNA, 445 bp, Homo sapiens; identical to SEQ ID NO: 119011
  chr10:65225895-65226340
  hypo

SEQ ID NO: 165432 - DNA, 30 bp, Homo sapiens
  chr10:65313563-65313593
  hypo
taaaacttagattggccgggggcggtggct

SEQ ID NO: 165433 - DNA, 30 bp, Homo sapiens
  chr10:65313892-65313922
  hypo
aactttcacgttatctttaagtcagtgggc

SEQ ID NO: 165434 - DNA, 20 bp, Homo sapiens
  chr10:65424398-65424418
  hypo
ggccagtccttgctccgaga

SEQ ID NO: 165435 - DNA, 34 bp, Homo sapiens
  chr10:69253020-69253054
  hypo
gttaagagtttgattttaggccggacacggcggc

SEQ ID NO: 165436 - DNA, 30 bp, Homo sapiens; identical to SEQ ID NO: 79919
  chr10:69571123-69571153
  hypo

SEQ ID NO: 165437 - DNA, 30 bp, Homo sapiens
  chr10:69578014-69578044
  hypo
aaagatccacataaacgttcagaaagttgt

SEQ ID NO: 165438 - DNA, 42 bp, Homo sapiens
  chr10:69578803-69578845
  hypo
gccaggggtcgggagcggtggctcacgcctgtaatcccagga

SEQ ID NO: 165439 - DNA, 43 bp, Homo sapiens
  chr10:69606877-69606920
  hypo
agaaaattaagccaaaaatgccgggcttggtggctcacgcctg

SEQ ID NO: 165440 - DNA, 30 bp, Homo sapiens; identical to SEQ ID NO: 119016
  chr10:69643890-69643920
  hypo

SEQ ID NO: 165441 - DNA, 80 bp, Homo sapiens
  chr10:69646547-69646627
  hypo
ttattacacgtttcacgaacgctattgtttgtgattgtatgatacattctagctagattattatcttttctttttttttt

SEQ ID NO: 165442 - DNA, 20 bp, Homo sapiens
  chr10:69646926-69646946
  hypo
gctatcttttctgtttttta

SEQ ID NO: 165443 - DNA, 31 bp, Homo sapiens; identical to SEQ ID NO: 24260
  chr10:69836219-69836250
  hypo

SEQ ID NO: 165444 - DNA, 121 bp, Homo sapiens; identical to SEQ ID NO: 79922
  chr10:69853848-69853969
  hypo

SEQ ID NO: 165445 - DNA, 30 bp, Homo sapiens; identical to SEQ ID NO: 79923
  chr10:70043829-70043859
  hypo

SEQ ID NO: 165446 - DNA, 30 bp, Homo sapiens
  chr10:70170993-70171023
  hypo
atgagccaccgcgcccggccacgctttgtt

SEQ ID NO: 165447 - DNA, 440 bp, Homo sapiens; identical to SEQ ID NO: 79924
  chr10:70184273-70184713
  hypo

SEQ ID NO: 165448 - DNA, 20 bp, Homo sapiens
  chr10:70188071-70188091
  hypo
gactccgtctcaaaataaaa

SEQ ID NO: 165449 - DNA, 30 bp, Homo sapiens
  chr10:70188494-70188524
  hypo
cttaacattctcgaacgaccaaattatcga

SEQ ID NO: 165450 - DNA, 169 bp, Homo sapiens; identical to SEQ ID NO: 24263
  chr10:70218970-70219139
  hypo

SEQ ID NO: 165451 - DNA, 30 bp, Homo sapiens
  chr10:70229013-70229043
  hypo
ctgggaaggccgggcgcggtggctcacgcc

SEQ ID NO: 165452 - DNA, 34 bp, Homo sapiens; identical to SEQ ID NO: 79926
  chr10:70232451-70232485
  hypo

SEQ ID NO: 165453 - DNA, 35 bp, Homo sapiens; identical to SEQ ID NO: 24264
  chr10:70266165-70266200
  hypo

SEQ ID NO: 165454 - DNA, 241 bp, Homo sapiens
  chr10:70288834-70289075
  hypo
tctaacctgcggcttctcgctttttcaggcatgttttgacttgcttccatctcccaccaaatcagctctgccttgtcagagctcctcactgaacaccaatttctgccctccctaaatcccccactaagcttccattcctcccctaccacctctgcaaaaaaaaaaaaaaaaaaaaaaaaaaacacacacaaccaggcctggggcggtggctcatgcagtaatcccaggattttgggatgcc

SEQ ID NO: 165455 - DNA, 21 bp, Homo sapiens
  chr10:70392096-70392117
  hypo
gcagggcgggtggagtcgcgg

SEQ ID NO: 165456 - DNA, 36 bp, Homo sapiens; identical to SEQ ID NO: 79930
  chr10:70472769-70472805
  hypo

SEQ ID NO: 165457 - DNA, 44 bp, Homo sapiens; identical to SEQ ID NO: 79931
  chr10:70478653-70478697
  hypo

SEQ ID NO: 165458 - DNA, 121 bp, Homo sapiens; identical to SEQ ID NO: 24265
  chr10:70483198-70483319
  hypo

SEQ ID NO: 165459 - DNA, 140 bp, Homo sapiens; identical to SEQ ID NO: 79933
  chr10:70530863-70531003
  hypo

SEQ ID NO: 165460 - DNA, 24 bp, Homo sapiens
  chr10:70586254-70586278
  hypo
gggcgccgtggctcacgcctgtaa

SEQ ID NO: 165461 - DNA, 23 bp, Homo sapiens
  chr10:70586517-70586540
  hypo
tgagactccgcctcaaaaaaaaa

SEQ ID NO: 165462 - DNA, 30 bp, Homo sapiens
  chr10:70628026-70628056
  hypo
taatggcagtaagcccgagataaacatcgt

SEQ ID NO: 165463 - DNA, 31 bp, Homo sapiens; identical to SEQ ID NO: 79935
  chr10:70987006-70987037
  hypo

SEQ ID NO: 165464 - DNA, 99 bp, Homo sapiens
  chr10:70992568-70992667
  hypo
gctgaaggtgcaagtcgctgaagaggggaagcgacacgtgcagatggagagtcagttctacccaacgcccaatgaaatcatccgcgggaacggcacaga

SEQ ID NO: 165465 - DNA, 52 bp, Homo sapiens
  chr10:70993019-70993071
  hypo
atgatgaggtggcagcgtgaggcagagaacttgttaacgcaatggccttgat

SEQ ID NO: 165466 - DNA, 160 bp, Homo sapiens; identical to SEQ ID NO: 79936
  chr10:71007177-71007337
  hypo

SEQ ID NO: 165467 - DNA, 31 bp, Homo sapiens; identical to SEQ ID NO: 79937
  chr10:71008307-71008338
  hypo

SEQ ID NO: 165468 - DNA, 30 bp, Homo sapiens; identical to SEQ ID NO: 79938
  chr10:71009531-71009561
  hypo

SEQ ID NO: 165469 - DNA, 31 bp, Homo sapiens; identical to SEQ ID NO: 79939
  chr10:71014928-71014959
  hypo

SEQ ID NO: 165470 - DNA, 1258 bp, Homo sapiens; identical to SEQ ID NO: 47186
  chr10:71078139-71079397
  hypo

SEQ ID NO: 165471 - DNA, 197 bp, Homo sapiens; identical to SEQ ID NO: 79941
  chr10:71097943-71098140
  hypo

SEQ ID NO: 165472 - DNA, 22 bp, Homo sapiens
  chr10:71108272-71108294
  hypo
ttaattcattgaggctgggcac

SEQ ID NO: 165473 - DNA, 23 bp, Homo sapiens
  chr10:71110631-71110654
  hypo
taaaaccaaagctggccgggcgc

SEQ ID NO: 165474 - DNA, 30 bp, Homo sapiens; identical to SEQ ID NO: 7399
  chr10:71122697-71122727
  hypo

SEQ ID NO: 165475 - DNA, 31 bp, Homo sapiens; identical to SEQ ID NO: 24270
  chr10:71128907-71128938
  hypo

SEQ ID NO: 165476 - DNA, 654 bp, Homo sapiens; identical to SEQ ID NO: 79946
  chr10:71133918-71134572
  hypo

SEQ ID NO: 165477 - DNA, 174 bp, Homo sapiens; identical to SEQ ID NO: 79947
  chr10:71136631-71136805
  hypo

SEQ ID NO: 165478 - DNA, 43 bp, Homo sapiens
  chr10:71144261-71144304
  hypo
tgtgcactgcacacacggccagtggcaccggcagtcacgtgat

SEQ ID NO: 165479 - DNA, 110 bp, Homo sapiens; identical to SEQ ID NO: 24271
  chr10:71144612-71144722
  hypo

SEQ ID NO: 165480 - DNA, 30 bp, Homo sapiens; identical to SEQ ID NO: 79949
  chr10:71151975-71152005
  hypo

SEQ ID NO: 165481 - DNA, 49 bp, Homo sapiens; identical to SEQ ID NO: 79950
  chr10:71154728-71154777
  hypo

SEQ ID NO: 165482 - DNA, 225 bp, Homo sapiens
  chr10:71158354-71158579
  hypo
cgattagcactgctccaggtccgggctatcctccagcagctaggtctgaatagcacctgcgatgacagtatcctcgtcaagacagtgtgcggggtggtgtccaggagggccgcacagctgtgtggcgcaggcatggctgcggttgtggataagatccgcgagaacagaggactggaccgtctgaatgtgactgtgggagtggacgggacactctacaagcttcat

SEQ ID NO: 165483 - DNA, 30 bp, Homo sapiens; identical to SEQ ID NO: 24272
  chr10:71160984-71161014
  hypo

SEQ ID NO: 165484 - DNA, 51 bp, Homo sapiens; identical to SEQ ID NO: 79952
  chr10:71174692-71174743
  hypo

SEQ ID NO: 165485 - DNA, 30 bp, Homo sapiens
  chr10:71178534-71178564
  hypo
gctagacagcgatcccgaaggccagtcctt

SEQ ID NO: 165486 - DNA, 30 bp, Homo sapiens
  chr10:71178886-71178916
  hypo
aaaaaatgccgggcacggtggctcacacct

SEQ ID NO: 165487 - DNA, 107 bp, Homo sapiens
  chr10:71218534-71218641
  hypo
aaggccctgagaagtgtccttcgctcttaacctagactttgtacatggtctcgttccccgctttaatagaggaattgctttatgtcgtaggactggaccttgctgcc

SEQ ID NO: 165488 - DNA, 191 bp, Homo sapiens; identical to SEQ ID NO: 24274
  chr10:71245587-71245778
  hypo

SEQ ID NO: 165489 - DNA, 30 bp, Homo sapiens
  chr10:71255440-71255470
  hypo
aaaaggtgagccaggcgctttggggtagag

SEQ ID NO: 165490 - DNA, 30 bp, Homo sapiens; identical to SEQ ID NO: 79954
  chr10:71266782-71266812
  hypo

SEQ ID NO: 165491 - DNA, 438 bp, Homo sapiens; identical to SEQ ID NO: 119055
  chr10:71331466-71331904
  hypo

SEQ ID NO: 165492 - DNA, 1282 bp, Homo sapiens; identical to SEQ ID NO: 119056
  chr10:71331949-71333231
  hypo

SEQ ID NO: 165493 - DNA, 248 bp, Homo sapiens
  chr10:71405328-71405576
  hypo
cgttttccccactcacggcgaacctgaagccttctccaaagggcttcacacccagggccactgaggcctggaaagcattttatttatacgaggtattcctggtaaccttctccgcctttcatagggtgcgtgagtggtcaccacagagaaacaggccaaagctgacccggtgcccaccttttctgcccacagtgtccttccaggcccctgacttgttccatgccgccaatgcacgccaaccctcagag

SEQ ID NO: 165494 - DNA, 71 bp, Homo sapiens; identical to SEQ ID NO: 79956
  chr10:71566070-71566141
  hypo

SEQ ID NO: 165495 - DNA, 31 bp, Homo sapiens; identical to SEQ ID NO: 24276
  chr10:71568580-71568611
  hypo

SEQ ID NO: 165496 - DNA, 31 bp, Homo sapiens; identical to SEQ ID NO: 79958
  chr10:71581897-71581928
  hypo

SEQ ID NO: 165497 - DNA, 167 bp, Homo sapiens; identical to SEQ ID NO: 79959
  chr10:71639772-71639939
  hypo

SEQ ID NO: 165498 - DNA, 184 bp, Homo sapiens; identical to SEQ ID NO: 79960
  chr10:71703275-71703459
  hypo

SEQ ID NO: 165499 - DNA, 94 bp, Homo sapiens
  chr10:71706825-71706919
  hypo
gagccaccgtgcccagcctgaagtgtgttcttggctttgcccagaactcatcatttgcctctaggtcaggttttcttagcgatttgcttctctg

SEQ ID NO: 165500 - DNA, 31 bp, Homo sapiens; identical to SEQ ID NO: 79961
  chr10:71848017-71848048
  hypo

SEQ ID NO: 165501 - DNA, 54 bp, Homo sapiens; identical to SEQ ID NO: 79962
  chr10:71871349-71871403
  hypo

SEQ ID NO: 165502 - DNA, 30 bp, Homo sapiens; identical to SEQ ID NO: 79963
  chr10:71873584-71873614
  hypo

SEQ ID NO: 165503 - DNA, 30 bp, Homo sapiens
  chr10:71880332-71880362
  hypo
acgatgaaccgtgagcgctggacctggaga

SEQ ID NO: 165504 - DNA, 700 bp, Homo sapiens; identical to SEQ ID NO: 119067
  chr10:71892159-71892859
  hypo

SEQ ID NO: 165505 - DNA, 129 bp, Homo sapiens; identical to SEQ ID NO: 119068
  chr10:71892895-71893024
  hypo

SEQ ID NO: 165506 - DNA, 30 bp, Homo sapiens
  chr10:71898224-71898254
  hypo
gcctccgcccacagccgcccctcacagggc

SEQ ID NO: 165507 - DNA, 30 bp, Homo sapiens; identical to SEQ ID NO: 24279
  chr10:72032484-72032514
  hypo

SEQ ID NO: 165508 - DNA, 30 bp, Homo sapiens; identical to SEQ ID NO: 79965
  chr10:72059784-72059814
  hypo

SEQ ID NO: 165509 - DNA, 30 bp, Homo sapiens
  chr10:72079085-72079115
  hypo
agcagcaccaagtaccggtgagcacgtggt

SEQ ID NO: 165510 - DNA, 30 bp, Homo sapiens
  chr10:72080462-72080492
  hypo
aacaaaagccatccacgtgccacacagacc

SEQ ID NO: 165511 - DNA, 30 bp, Homo sapiens
  chr10:72080739-72080769
  hypo
tccccgtctttccagcgccaggttggggcc

SEQ ID NO: 165512 - DNA, 651 bp, Homo sapiens; identical to SEQ ID NO: 119082
  chr10:72238257-72238908
  hypo

SEQ ID NO: 165513 - DNA, 186 bp, Homo sapiens; identical to SEQ ID NO: 24281
  chr10:72288399-72288585
  hypo

SEQ ID NO: 165514 - DNA, 161 bp, Homo sapiens
  chr10:72300743-72300904
  hypo
tgacaatttctggcccgaggacagtggctggggctgccatgtggatggggaccctgttggggtttgtgcatccaagagacgcccgctgacccagaccttgcttttctcgtccaggactttgaccagctgctggaggccctgcgggccgccctctccaagga

SEQ ID NO: 165515 - DNA, 30 bp, Homo sapiens
  chr10:72362828-72362858
  hypo
ggcaagcagaggcggcggctcagagcatgg

SEQ ID NO: 165516 - DNA, 30 bp, Homo sapiens
  chr10:72434586-72434616
  hypo
cgcctgcggcccaatcggaggttggtagtg

SEQ ID NO: 165517 - DNA, 254 bp, Homo sapiens
  chr10:72442675-72442929
  hypo
atgacccagcactgggcctgccggacaaccgtctgggtgaggaggcataaactcctgtagttagatgaggggacagcatttgtcgtcctctccgtggctatctggccatctgctcctaggccagaggtggtgactgctgaggcacgcacactgccatttgccctcctgcgccctggcaggccctgcaggcccgctgtggcacgctgtccctgggcctcagacccccctgcatgtgctcacgtagtcactctccg

SEQ ID NO: 165518 - DNA, 30 bp, Homo sapiens
  chr10:72453990-72454020
  hypo
gagtgtttgctggagcgtttgtcgtctgtg

SEQ ID NO: 165519 - DNA, 51 bp, Homo sapiens
  chr10:72489896-72489947
  hypo
ctggagcaggtgtgtcgctgggcacactcccagcagcgccaggaccccagc

SEQ ID NO: 165520 - DNA, 166 bp, Homo sapiens; identical to SEQ ID NO: 79969
  chr10:72491961-72492127
  hypo

SEQ ID NO: 165521 - DNA, 30 bp, Homo sapiens
  chr10:72498692-72498722
  hypo
gcggtcatgtgggggcggggtgcgatcccg

SEQ ID NO: 165522 - DNA, 31 bp, Homo sapiens; identical to SEQ ID NO: 79970
  chr10:72503154-72503185
  hypo

SEQ ID NO: 165523 - DNA, 38 bp, Homo sapiens; identical to SEQ ID NO: 79971
  chr10:72503443-72503481
  hypo

SEQ ID NO: 165524 - DNA, 57 bp, Homo sapiens; identical to SEQ ID NO: 79972
  chr10:72509554-72509611
  hypo

SEQ ID NO: 165525 - DNA, 31 bp, Homo sapiens; identical to SEQ ID NO: 79973
  chr10:72537207-72537238
  hypo

SEQ ID NO: 165526 - DNA, 30 bp, Homo sapiens; identical to SEQ ID NO: 79974
  chr10:72539412-72539442
  hypo

SEQ ID NO: 165527 - DNA, 262 bp, Homo sapiens
  chr10:72695179-72695441
  hypo
gagctgtacttctagcgtcgctcttcctcacatgtcccctgagccatctacagattccctcatggctgccgtgcccgagtacgcacacttgcacacacaccttccaacagcctacatcttcagactccccatcttcacacagcccctgcctccatcccccacatacataccttcatacaccccacacactttcgcacactcacacactcacacatcccccagccccagaactacctgggagggaaggcgatggagtgacagc

SEQ ID NO: 165528 - DNA, 30 bp, Homo sapiens; identical to SEQ ID NO: 47217
  chr10:72738258-72738288
  hypo

SEQ ID NO: 165529 - DNA, 252 bp, Homo sapiens
  chr10:72765319-72765571
  hypo
agcctatcatgggctaaaactcgagccaagcgccagagtgggacagatgcacaggtccgtcctcagcctcccaagctcccgctcactaagtaaacacctgtgcgtgggctcgtcgctcacctccctaatgagctcatcgctcacccggctctccatcgcgctccatccgtcttcaccttgctgccatggctccactgtgcagctatttttgcacttcccagtaagcattccactgggcgggggagccagtgc

SEQ ID NO: 165530 - DNA, 140 bp, Homo sapiens
  chr10:72784965-72785105
  hypo
aaggaccaggctactcgaactgcatgcagcaacttgtatgaatcgcaaaggcttatgctgagcagaagccactatcacaaggttaccttctgcatgattttatctatactaccttctcgaaaagccgagagtatagcgtt

SEQ ID NO: 165531 - DNA, 151 bp, Homo sapiens
  chr10:72793045-72793196
  hypo
acagccgggttcaagccaggttctgctttctactagctgcgtgactgcaagcaacctctctgggcctcagttttcttgttgatgaaagagagatgattataatgataaagctccttgcccacgaggtgctgagaggcgtggagggggtgat

SEQ ID NO: 165532 - DNA, 30 bp, Homo sapiens
  chr10:72793470-72793500
  hypo
ctgaggtctgcctgtcgagcgggccaggat

SEQ ID NO: 165533 - DNA, 30 bp, Homo sapiens
  chr10:72799526-72799556
  hypo
caccccagaggcccccgcctcgcagccgcc

SEQ ID NO: 165534 - DNA, 134 bp, Homo sapiens
  chr10:72820037-72820171
  hypo
ggggctctgcataggcgcatagccatgaggcatccgcgactccagcctgcgttgtgcggtaaggagcctgccacccatattatccaatgcctcgcttggcacatggggaaactgaggttcgggcagaggcagtg

SEQ ID NO: 165535 - DNA, 213 bp, Homo sapiens; identical to SEQ ID NO: 79978
  chr10:72838754-72838967
  hypo

SEQ ID NO: 165536 - DNA, 176 bp, Homo sapiens
  chr10:72847941-72848117
  hypo
aggagttgaagatgacgcagaggcctctagctaaggcaaccaagtggaaagaatctactccgcattttgccaaagaaaatgaatgaaatcagccatgcttccgacaggccaagcatacgctgcctcccccatccaggcctcagcatctctcccggtcacgccgatacctgaaaaca

SEQ ID NO: 165537 - DNA, 203 bp, Homo sapiens; identical to SEQ ID NO: 79979
  chr10:72887225-72887428
  hypo

SEQ ID NO: 165538 - DNA, 30 bp, Homo sapiens; identical to SEQ ID NO: 79980
  chr10:72978709-72978739
  hypo

SEQ ID NO: 165539 - DNA, 19 bp, Homo sapiens
  chr10:73002694-73002713
  hypo
caagagtctggggagccgg

SEQ ID NO: 165540 - DNA, 100 bp, Homo sapiens
  chr10:73036105-73036205
  hypo
agcctggccataggtcgctctcatctagcccacctttcaagccttcctcagtcactggggcccaagccagggccaaggagaagtgagggctctcgttgtt

SEQ ID NO: 165541 - DNA, 30 bp, Homo sapiens
  chr10:73085164-73085194
  hypo
catcggcacattacccgtccgatgaaaagg

SEQ ID NO: 165542 - DNA, 38 bp, Homo sapiens; identical to SEQ ID NO: 7413
  chr10:73113222-73113260
  hypo

SEQ ID NO: 165543 - DNA, 30 bp, Homo sapiens; identical to SEQ ID NO: 79983
  chr10:73160222-73160252
  hypo

SEQ ID NO: 165544 - DNA, 30 bp, Homo sapiens
  chr10:73160988-73161018
  hypo
gtggggtggctggtgcgggtgggctgcccc

SEQ ID NO: 165545 - DNA, 30 bp, Homo sapiens
  chr10:73189370-73189400
  hypo
gacaggggggaaagtcgtatttagcgggtg

SEQ ID NO: 165546 - DNA, 30 bp, Homo sapiens; identical to SEQ ID NO: 79984
  chr10:73202923-73202953
  hypo

SEQ ID NO: 165547 - DNA, 193 bp, Homo sapiens; identical to SEQ ID NO: 24285
  chr10:73288225-73288418
  hypo

SEQ ID NO: 165548 - DNA, 35 bp, Homo sapiens; identical to SEQ ID NO: 79986
  chr10:73326699-73326734
  hypo

SEQ ID NO: 165549 - DNA, 37 bp, Homo sapiens
  chr10:73395988-73396025
  hypo
acagtgggccgggtgcggtagctcacacctgtaatcc

SEQ ID NO: 165550 - DNA, 28 bp, Homo sapiens
  chr10:73402432-73402460
  hypo
aggcatgagccaccgcacccggcctggg

SEQ ID NO: 165551 - DNA, 139 bp, Homo sapiens
  chr10:73418335-73418474
  hypo
aacaagaggatactgcgttcatcccaggcctggtgaagcagtggtgtgagcttagtgaatgccaggcattttacagggcgttccctgtctcttctgtacccattgtgtagaagaagctggggcccggagaggtgagcgg

SEQ ID NO: 165552 - DNA, 30 bp, Homo sapiens; identical to SEQ ID NO: 24286
  chr10:73421686-73421716
  hypo

SEQ ID NO: 165553 - DNA, 197 bp, Homo sapiens
  chr10:73445870-73446067
  hypo
ggacaataagcttttgtagagcgagccgctgatttagaactaatagcgaatgcagcgccaagatccggggaaatatcaccgctaataagtttctgcctcatgctctgtcactgacattctccacaccgtttcgtgcagccaagcagaagcttaaatgtataagtatatggggcgctcgcacccgcaccagggacagg

SEQ ID NO: 165554 - DNA, 124 bp, Homo sapiens
  chr10:73455052-73455176
  hypo
gtggagctggcagaattaatgcgaagattgcccgtgggcatctgagcacttttcccctggcaggccctgccctggcccatctcagctgggtgtgtctcccagcgccccttatggcttcacaggt

SEQ ID NO: 165555 - DNA, 30 bp, Homo sapiens
  chr10:73466313-73466343
  hypo
gttgtcatgattgtccgtgttgccatggtc

SEQ ID NO: 165556 - DNA, 31 bp, Homo sapiens; identical to SEQ ID NO: 24289
  chr10:73483375-73483406
  hypo

SEQ ID NO: 165557 - DNA, 240 bp, Homo sapiens
  chr10:73514959-73515199
  hypo
tcgcccagctcctggcgggaagtgcagctgctcccaactctcaaatgaaaaggaattgtgcctgcatcgtgcctttgcgaatcccaggggctgaactgggggctggagcaggtcactcgcaccgtccacccaccccaggcagggaggaatactcacggcggttggaggctgcctgcctttgcttgtagaccaggagcaggatgagggggaggcagaggattcctacgatgcaggcacccg

SEQ ID NO: 165558 - DNA, 30 bp, Homo sapiens
  chr10:73521630-73521660
  hypo
cgcccctcgagctgcggtaccacgtcttgt

SEQ ID NO: 165559 - DNA, 30 bp, Homo sapiens
  chr10:73548900-73548930
  hypo
agaccccagtgggtgcgggaggggaaggat

SEQ ID NO: 165560 - DNA, 93 bp, Homo sapiens; identical to SEQ ID NO: 79992
  chr10:73553123-73553216
  hypo

SEQ ID NO: 165561 - DNA, 93 bp, Homo sapiens; identical to SEQ ID NO: 79993
  chr10:73574840-73574933
  hypo

SEQ ID NO: 165562 - DNA, 30 bp, Homo sapiens; identical to SEQ ID NO: 79994
  chr10:73575425-73575455
  hypo

SEQ ID NO: 165563 - DNA, 167 bp, Homo sapiens
  chr10:73576258-73576425
  hypo
acccttcggcatgccgccctctaccaggaagccagaggcctaggagctcgccatccatatttatttgaaaaggtcaaaaggagcatctatgagacaagggaggggtgcaggctgaagcagcgcctcaacagccagggacatgtaggcaacacgagcaggcacagcgc

SEQ ID NO: 165564 - DNA, 30 bp, Homo sapiens
  chr10:73579598-73579628
  hypo
tccgacagggacttcggcagcttcgagcac

SEQ ID NO: 165565 - DNA, 30 bp, Homo sapiens
  chr10:73590659-73590689
  hypo
ccagtccccagcagccgcaccctcgctaac

SEQ ID NO: 165566 - DNA, 30 bp, Homo sapiens
  chr10:73590996-73591026
  hypo
aaggatctcctcctacgagaggacaccagg

SEQ ID NO: 165567 - DNA, 176 bp, Homo sapiens
  chr10:73591507-73591683
  hypo
caccattcctctttagacacccggaatcacagctctcttaggaaccagtgcacgtgcccgtggctcaagcaccatccccactcaccgccgctcacctcagtggcattgtccttcagcatatcaccagctgcggtgacaacgtctttgcatatgtcgcagggaagggatttctaaga

SEQ ID NO: 165568 - DNA, 30 bp, Homo sapiens; identical to SEQ ID NO: 79997
  chr10:73614492-73614522
  hypo

SEQ ID NO: 165569 - DNA, 30 bp, Homo sapiens
  chr10:73622460-73622490
  hypo
gggggctgatgccatcgcactccacctttc

SEQ ID NO: 165570 - DNA, 30 bp, Homo sapiens
  chr10:73623165-73623195
  hypo
tcagtacgtgcattacgaacatggacgtag

SEQ ID NO: 165571 - DNA, 30 bp, Homo sapiens
  chr10:73751053-73751083
  hypo
gggcgttttgttcttcgctaattaaatata

SEQ ID NO: 165572 - DNA, 31 bp, Homo sapiens; identical to SEQ ID NO: 24293
  chr10:73767276-73767307
  hypo

SEQ ID NO: 165573 - DNA, 408 bp, Homo sapiens; identical to SEQ ID NO: 79999
  chr10:73767528-73767936
  hypo

SEQ ID NO: 165574 - DNA, 31 bp, Homo sapiens; identical to SEQ ID NO: 24296
  chr10:73822605-73822636
  hypo

SEQ ID NO: 165575 - DNA, 30 bp, Homo sapiens
  chr10:73842140-73842170
  hypo
tcctgcaaggagacgcgcagagacggggtt

SEQ ID NO: 165576 - DNA, 364 bp, Homo sapiens; identical to SEQ ID NO: 7419
  chr10:73847427-73847791
  hypo

SEQ ID NO: 165577 - DNA, 161 bp, Homo sapiens; identical to SEQ ID NO: 47234
  chr10:73848208-73848369
  hypo

SEQ ID NO: 165578 - DNA, 25 bp, Homo sapiens
  chr10:73925165-73925190
  hypo
gcccggccaagttgaagctcttcta

SEQ ID NO: 165579 - DNA, 39 bp, Homo sapiens; identical to SEQ ID NO: 80004
  chr10:73929855-73929894
  hypo

SEQ ID NO: 165580 - DNA, 93 bp, Homo sapiens; identical to SEQ ID NO: 80005
  chr10:73970689-73970782
  hypo

SEQ ID NO: 165581 - DNA, 152 bp, Homo sapiens; identical to SEQ ID NO: 80006
  chr10:74003509-74003661
  hypo

SEQ ID NO: 165582 - DNA, 467 bp, Homo sapiens; identical to SEQ ID NO: 119104
  chr10:74032434-74032901
  hypo

SEQ ID NO: 165583 - DNA, 30 bp, Homo sapiens; identical to SEQ ID NO: 119105
  chr10:74033154-74033184
  hypo

SEQ ID NO: 165584 - DNA, 31 bp, Homo sapiens; identical to SEQ ID NO: 80008
  chr10:74052002-74052033
  hypo

SEQ ID NO: 165585 - DNA, 418 bp, Homo sapiens; identical to SEQ ID NO: 119111
  chr10:74079274-74079692
  hypo

SEQ ID NO: 165586 - DNA, 193 bp, Homo sapiens; identical to SEQ ID NO: 7426
  chr10:74079752-74079945
  hypo

SEQ ID NO: 165587 - DNA, 103 bp, Homo sapiens
  chr10:74100514-74100617
  hypo
cccgcgctgtccctggcgccctcctcactcacatcaccctggttgtccctgcggtcctgcctttgctggtaggtatagcgcatgcggccgttgctgtagacgt

SEQ ID NO: 165588 - DNA, 156 bp, Homo sapiens
  chr10:74108258-74108414
  hypo
ctgctggcctgaagacgccatgctgggtgccacacccaccagtgcgacccactgaggtctgacccaacaggctgagagccagtctcactgggaacagagtatggggctccagtggagcactgtgccctgggccactgctgccgcactccgagcttg

SEQ ID NO: 165589 - DNA, 30 bp, Homo sapiens
  chr10:74108758-74108788
  hypo
ccatgctcttaactacgctgctatcctggg

SEQ ID NO: 165590 - DNA, 31 bp, Homo sapiens; identical to SEQ ID NO: 24302
  chr10:74115963-74115994
  hypo

SEQ ID NO: 165591 - DNA, 26 bp, Homo sapiens
  chr10:74153530-74153556
  hypo
tttgtttgttttgagacggagtcttg

SEQ ID NO: 165592 - DNA, 21 bp, Homo sapiens
  chr10:74292062-74292083
  hypo
gagactccatctcaaaaaaaa

SEQ ID NO: 165593 - DNA, 30 bp, Homo sapiens
  chr10:74379520-74379550
  hypo
tagtttaacgatgaacggcagctcaccagt

SEQ ID NO: 165594 - DNA, 30 bp, Homo sapiens
  chr10:74386725-74386755
  hypo
aggcgtgagccactgcgcccggctgaagaa

SEQ ID NO: 165595 - DNA, 43 bp, Homo sapiens; identical to SEQ ID NO: 80015
  chr10:74439297-74439340
  hypo

SEQ ID NO: 165596 - DNA, 41 bp, Homo sapiens
  chr10:74451109-74451150
  hypo
ggattacaggcgtgagccaccgcgcccggccttacatgatt

SEQ ID NO: 165597 - DNA, 32 bp, Homo sapiens
  chr10:74467238-74467270
  hypo
cgccactgcacctgactcgccttttgaaatgt

SEQ ID NO: 165598 - DNA, 85 bp, Homo sapiens; identical to SEQ ID NO: 24303
  chr10:74518789-74518874
  hypo

SEQ ID NO: 165599 - DNA, 253 bp, Homo sapiens; identical to SEQ ID NO: 80018
  chr10:74684077-74684330
  hypo

SEQ ID NO: 165600 - DNA, 30 bp, Homo sapiens; identical to SEQ ID NO: 80019
  chr10:74692247-74692277
  hypo

SEQ ID NO: 165601 - DNA, 32 bp, Homo sapiens; identical to SEQ ID NO: 80020
  chr10:74880400-74880432
  hypo

SEQ ID NO: 165602 - DNA, 27 bp, Homo sapiens
  chr10:74928793-74928820
  hypo
ggccgtggtggctcacgcttgtaatcc

SEQ ID NO: 165603 - DNA, 34 bp, Homo sapiens
  chr10:75128351-75128385
  hypo
aattgattgtggtgacggtcgcacaaatttgtga

SEQ ID NO: 165604 - DNA, 223 bp, Homo sapiens
  chr10:75184110-75184333
  hypo
ggcaacagagcaagactccatctcaaaaaaagaaagaaaccagttatgttatacagaaactctcattcagcttagaatttttacccaaacagtaaatgaggtttagaatataatgtttttcaaagtttgcaagaacctggcattagcagggtaatttcatcacaaactccccgttttccagatgtccagttatgatctatttaaatcccgccgtccactttct

SEQ ID NO: 165605 - DNA, 30 bp, Homo sapiens
  chr10:75187368-75187398
  hypo
acctcttacagtgccggagaaccttggagt

SEQ ID NO: 165606 - DNA, 30 bp, Homo sapiens; identical to SEQ ID NO: 80021
  chr10:75197913-75197943
  hypo

SEQ ID NO: 165607 - DNA, 19 bp, Homo sapiens
  chr10:75344163-75344182
  hypo
ttgacgtagtttgtgatcc

SEQ ID NO: 165608 - DNA, 19 bp, Homo sapiens
  chr10:75348275-75348294
  hypo
ccagcctgggaaaaatgta

SEQ ID NO: 165609 - DNA, 20 bp, Homo sapiens
  chr10:75381081-75381101
  hypo
gggcacagtggctcacgcct

SEQ ID NO: 165610 - DNA, 41 bp, Homo sapiens; identical to SEQ ID NO: 24304
  chr10:75384237-75384278
  hypo

SEQ ID NO: 165611 - DNA, 277 bp, Homo sapiens; identical to SEQ ID NO: 119135
  chr10:75408168-75408445
  hypo

SEQ ID NO: 165612 - DNA, 227 bp, Homo sapiens; identical to SEQ ID NO: 80025
  chr10:75423484-75423711
  hypo

SEQ ID NO: 165613 - DNA, 144 bp, Homo sapiens; identical to SEQ ID NO: 80026
  chr10:75491398-75491542
  hypo

SEQ ID NO: 165614 - DNA, 30 bp, Homo sapiens; identical to SEQ ID NO: 80027
  chr10:75492848-75492878
  hypo

SEQ ID NO: 165615 - DNA, 35 bp, Homo sapiens; identical to SEQ ID NO: 24305
  chr10:75493100-75493135
  hypo

SEQ ID NO: 165616 - DNA, 42 bp, Homo sapiens
  chr10:75501514-75501556
  hypo
ggattacaggcatgagccaccatgcccggccctagtgggtgc

SEQ ID NO: 165617 - DNA, 68 bp, Homo sapiens
  chr10:75548867-75548935
  hypo
tggccaatggcagtgcggatgagtttcagcgaggggatcagctcttccgcatgcgggctgtgaaggac

SEQ ID NO: 165618 - DNA, 145 bp, Homo sapiens
  chr10:75574062-75574207
  hypo
atgtaaaaaacacctcggtacagcagagacagacacgaagggcgggcgggagggctgcatgcaggggcgtgcattggctgctgccgcttttgtaattgaattgttttaaacctcaaacaaacaggactgccgctgtcactcaggc

SEQ ID NO: 165619 - DNA, 30 bp, Homo sapiens
  chr10:75574919-75574949
  hypo
ggcgatgcacgctgcgtcctccccaatcac

SEQ ID NO: 165620 - DNA, 30 bp, Homo sapiens
  chr10:75597430-75597460
  hypo
gggatcttgagtggcgtcagagccctcagg

SEQ ID NO: 165621 - DNA, 30 bp, Homo sapiens
  chr10:75599679-75599709
  hypo
cttctgaggtagcccggccctagcttaagg

SEQ ID NO: 165622 - DNA, 61 bp, Homo sapiens
  chr10:75606976-75607037
  hypo
acttacacagacccacgggtgcttgagagcctggtcagccgtgatgcgctttgctgggttt

SEQ ID NO: 165623 - DNA, 30 bp, Homo sapiens
  chr10:75611139-75611169
  hypo
gctgaggcatgtggccggggaacggtcctc

SEQ ID NO: 165624 - DNA, 181 bp, Homo sapiens; identical to SEQ ID NO: 80030
  chr10:75632894-75633075
  hypo

SEQ ID NO: 165625 - DNA, 30 bp, Homo sapiens; identical to SEQ ID NO: 47269
  chr10:75700453-75700483
  hypo

SEQ ID NO: 165626 - DNA, 30 bp, Homo sapiens; identical to SEQ ID NO: 47270
  chr10:75700833-75700863
  hypo

SEQ ID NO: 165627 - DNA, 30 bp, Homo sapiens
  chr10:75737361-75737391
  hypo
actagcatgtgcgcgcgcgcatgcacacac

SEQ ID NO: 165628 - DNA, 27 bp, Homo sapiens
  chr10:75749181-75749208
  hypo
acagattacaggcgtgagctactgctc

SEQ ID NO: 165629 - DNA, 26 bp, Homo sapiens
  chr10:75756849-75756875
  hypo
ttatacaaagcgtgagggaactggat

SEQ ID NO: 165630 - DNA, 267 bp, Homo sapiens
  chr10:75832422-75832689
  hypo
ctgagaaagccagacccgggattgtttcactactcaccctgcacaatttcttctttgtgccccaggaatgactaagatggccaagatgattgacgagagacagcaggagctcactcaccaggagcaccgagtgatgttggtgaactcgatgaacaccgtgaaagagttgctgccagttctcatttcaggtacttcctgcctgtactttattttataggggggaaaaatgttagcatgttctaaactctgaggttcattttgttttct

SEQ ID NO: 165631 - DNA, 100 bp, Homo sapiens
  chr10:75874042-75874142
  hypo
gtgtgccaaggacatcgccaaggcctcagatgaggtgactcggttggccaaggaggttgccaagcagtgcacagataaacggattagaaccaacctctta

SEQ ID NO: 165632 - DNA, 160 bp, Homo sapiens; identical to SEQ ID NO: 80036
  chr10:75893716-75893876
  hypo

SEQ ID NO: 165633 - DNA, 30 bp, Homo sapiens; identical to SEQ ID NO: 80037
  chr10:75900002-75900032
  hypo

SEQ ID NO: 165634 - DNA, 25 bp, Homo sapiens
  chr10:75948531-75948556
  hypo
attcatacattcattcagagacgga

SEQ ID NO: 165635 - DNA, 25 bp, Homo sapiens
  chr10:75948795-75948820
  hypo
caccgctcccagccacatttctttc

SEQ ID NO: 165636 - DNA, 87 bp, Homo sapiens
  chr10:75966599-75966686
  hypo
aggatccttagggtgtcgcttttccagccagaagccactgtggttggtggagcctttgcctgaggtttgcttgtgcctgccaggctt

SEQ ID NO: 165637 - DNA, 27 bp, Homo sapiens
  chr10:75966745-75966772
  hypo
acctgccaagggcgagccaggtgcaga

SEQ ID NO: 165638 - DNA, 32 bp, Homo sapiens; identical to SEQ ID NO: 24307
  chr10:76013803-76013835
  hypo

SEQ ID NO: 165639 - DNA, 32 bp, Homo sapiens; identical to SEQ ID NO: 24308
  chr10:76019175-76019207
  hypo

SEQ ID NO: 165640 - DNA, 131 bp, Homo sapiens
  chr10:76287769-76287900
  hypo
gagggaatttgtattcggcaataaaacccagagtaaactcttaagataaaatgacgacgtccttctggaagaggtgaaactggtatgtccatgatccttatcagaagtgtcatgatcgaacaaacctgaaa

SEQ ID NO: 165641 - DNA, 30 bp, Homo sapiens
  chr10:76513873-76513903
  hypo
aaggagacctgcaggcggggcagacgggtg

SEQ ID NO: 165642 - DNA, 197 bp, Homo sapiens
  chr10:76524047-76524244
  hypo
agtggcacattggcacgaggaaaagaaagatgaaagatcagagaggcgacaccagttgaaacaggctgctgaattattacagcgagtgaccatgggacgatggagccgggggcggccaccccctgctggctcagtaggtcaagtcagtgcggtgtcccagcagaggcggcttgaacttaaggcgaacttaacaatca

SEQ ID NO: 165643 - DNA, 35 bp, Homo sapiens; identical to SEQ ID NO: 24309
  chr10:76538432-76538467
  hypo

SEQ ID NO: 165644 - DNA, 18 bp, Homo sapiens
  chr10:76539612-76539630
  hypo
taagaatattaacttctg

SEQ ID NO: 165645 - DNA, 30 bp, Homo sapiens; identical to SEQ ID NO: 80044
  chr10:76574011-76574041
  hypo

SEQ ID NO: 165646 - DNA, 62 bp, Homo sapiens; identical to SEQ ID NO: 24310
  chr10:76585430-76585492
  hypo

SEQ ID NO: 165647 - DNA, 27 bp, Homo sapiens
  chr10:76588326-76588353
  hypo
tttttttttttttttttgagacggagt

SEQ ID NO: 165648 - DNA, 147 bp, Homo sapiens; identical to SEQ ID NO: 80047
  chr10:76588592-76588739
  hypo

SEQ ID NO: 165649 - DNA, 31 bp, Homo sapiens; identical to SEQ ID NO: 24311
  chr10:76655265-76655296
  hypo

SEQ ID NO: 165650 - DNA, 45 bp, Homo sapiens; identical to SEQ ID NO: 80049
  chr10:76693643-76693688
  hypo

SEQ ID NO: 165651 - DNA, 367 bp, Homo sapiens
  chr10:76780146-76780513
  hypo
tcaaagattcaggagcgtaaacttcacggagatcaaatcactataactgggaagaggctacattcctaaagcgaatgcacttctctgttgtgatgtttttaccttgtcactactcatattatttctagtggctcctgttctaagctctgggaatgccacagtgaggaatgcccatttattttttctgccctaggctatttgctttctagaagagaaggccaagcagggtctcctgaaaagcctctctccgatctgggccgtctctcctacctggcatattggaagagcgtcatcttggagtatctctaccaccaccatgagaggcacatcagcatcaaggcaattagcagagcgacgggcatgtgcc

SEQ ID NO: 165652 - DNA, 125 bp, Homo sapiens
  chr10:76784641-76784766
  hypo
atgtctactgcatatcgactcaaccatttaatttctcatgagctcttatgtgttatgtttggaattaatttcagaggccttttgtactaaagaagaaaaggggtcgtaaacgcaggaggatcaac

SEQ ID NO: 165653 - DNA, 174 bp, Homo sapiens; identical to SEQ ID NO: 80051
  chr10:76796612-76796786
  hypo

SEQ ID NO: 165654 - DNA, 497 bp, Homo sapiens; identical to SEQ ID NO: 80052
  chr10:76797022-76797519
  hypo

SEQ ID NO: 165655 - DNA, 30 bp, Homo sapiens
  chr10:76800426-76800456
  hypo
gacagaaggaatccccgctggtaggcaggt

SEQ ID NO: 165656 - DNA, 188 bp, Homo sapiens
  chr10:76818034-76818222
  hypo
ctgcctgctcccaagcgagcctgggcctgggcacttactcatcgccaatgtagagcttgggccagacctcgttgacgtgggtgtactggggactgcccttccagaagagccgctccagctcaaaggctccaggggtgcagtagtcctcctcctccccttcctcctccatcttcggcgacagcctcttg

SEQ ID NO: 165657 - DNA, 30 bp, Homo sapiens; identical to SEQ ID NO: 80054
  chr10:76833190-76833220
  hypo

SEQ ID NO: 165658 - DNA, 30 bp, Homo sapiens
  chr10:76841584-76841614
  hypo
atttattctagggagcgatgtttacacgat

SEQ ID NO: 165659 - DNA, 36 bp, Homo sapiens; identical to SEQ ID NO: 80055
  chr10:76845052-76845088
  hypo

SEQ ID NO: 165660 - DNA, 30 bp, Homo sapiens
  chr10:76847285-76847315
  hypo
tctgaagtagcagccggagcgcagaaaatc

SEQ ID NO: 165661 - DNA, 147 bp, Homo sapiens; identical to SEQ ID NO: 80056
  chr10:76857398-76857545
  hypo

SEQ ID NO: 165662 - DNA, 34 bp, Homo sapiens; identical to SEQ ID NO: 80057
  chr10:76875398-76875432
  hypo

SEQ ID NO: 165663 - DNA, 26 bp, Homo sapiens
  chr10:76898723-76898749
  hypo
ttttttttttttgagacggagtttcg

SEQ ID NO: 165664 - DNA, 23 bp, Homo sapiens
  chr10:76951433-76951456
  hypo
gcgcccaacaaagtctttttttt

SEQ ID NO: 165665 - DNA, 109 bp, Homo sapiens
  chr10:76961623-76961732
  hypo
aagactcccttccacaccccacgactggactggggctgggagggggccacttacttcgctcgtcacctcctataagatcacctgcttcgaggttcatgccatcagctct

SEQ ID NO: 165666 - DNA, 90 bp, Homo sapiens
  chr10:76966474-76966564
  hypo
gtgtggcagtgtgggcgaaagagcgaaactctatctcctctgtctcaaaaaaaaaaaacaaaaagcaaaaaaaaaaaaacctggcgccgt

SEQ ID NO: 165667 - DNA, 89 bp, Homo sapiens; identical to SEQ ID NO: 80061
  chr10:76968430-76968519
  hypo

SEQ ID NO: 165668 - DNA, 29 bp, Homo sapiens
  chr10:76968758-76968787
  hypo
gagactccgtctcaaaaaaaaaagaagaa

SEQ ID NO: 165669 - DNA, 26 bp, Homo sapiens
  chr10:76975731-76975757
  hypo
gggattacaggcgtgagccacagcgc

SEQ ID NO: 165670 - DNA, 45 bp, Homo sapiens; identical to SEQ ID NO: 80064
  chr10:76992469-76992514
  hypo

SEQ ID NO: 165671 - DNA, 31 bp, Homo sapiens
  chr10:76997775-76997806
  hypo
gaatccattttaacaacgctgactaggcatt

SEQ ID NO: 165672 - DNA, 31 bp, Homo sapiens; identical to SEQ ID NO: 24318
  chr10:76998105-76998136
  hypo

SEQ ID NO: 165673 - DNA, 433 bp, Homo sapiens
  chr10:76998411-76998844
  hypo
aatgcatccaggatccgggggcggctgtgatcttgttcccattttccagagcaggaaagctcagagaccaccgcccagaccctgcagccaacagaggaaacgcgcgtacctctcccttgaaccctgggacccagagggaacaggccttcttggctcctctgctgggacgagggcccagctcgagctggcctgagggccctgcgctcaggtggtgccgctgaccgctctctcccttcagcccgggggtccaggttgcagcaggcccccagctcacactgaaactccctcctacagcctggctttaggccggagcggtggaggttgagggggagcgggtggggaggggaggcatgtcaccatctatccccgtcagattaaaaaactaatttgaaaagattaatgtattccattcttgttacgctggctctgatac

SEQ ID NO: 165674 - DNA, 30 bp, Homo sapiens
  chr10:76999063-76999093
  hypo
aaaccttgctgatgacgcagaatttaattt

SEQ ID NO: 165675 - DNA, 32 bp, Homo sapiens
  chr10:77003405-77003437
  hypo
ggcaagcaggtatgacgcggtgcaggtgcctg

SEQ ID NO: 165676 - DNA, 390 bp, Homo sapiens; identical to SEQ ID NO: 47278
  chr10:77054512-77054902
  hypo

SEQ ID NO: 165677 - DNA, 30 bp, Homo sapiens; identical to SEQ ID NO: 80068
  chr10:77107146-77107176
  hypo

SEQ ID NO: 165678 - DNA, 4329 bp, Homo sapiens; identical to SEQ ID NO: 47279
  chr10:77159486-77163815
  hypo

SEQ ID NO: 165679 - DNA, 179 bp, Homo sapiens; identical to SEQ ID NO: 80070
  chr10:77242294-77242473
  hypo

SEQ ID NO: 165680 - DNA, 30 bp, Homo sapiens; identical to SEQ ID NO: 80071
  chr10:77359109-77359139
  hypo

SEQ ID NO: 165681 - DNA, 131 bp, Homo sapiens
  chr10:77499937-77500068
  hypo
tacattcctctcccatgccatcgacatcaatttcccctgtagatgatggaggtgcgatgttcagacaaatgctgacgcagaccgacgggagctggaggctgaggggcagcggcctggcaggtgatgtctct

SEQ ID NO: 165682 - DNA, 30 bp, Homo sapiens
  chr10:77564117-77564147
  hypo
ttgagcctggtgtcacggcgatgtgattta

SEQ ID NO: 165683 - DNA, 20 bp, Homo sapiens
  chr10:77635472-77635492
  hypo
agccacggtgcccagccagc

SEQ ID NO: 165684 - DNA, 31 bp, Homo sapiens; identical to SEQ ID NO: 80073
  chr10:77663258-77663289
  hypo

SEQ ID NO: 165685 - DNA, 30 bp, Homo sapiens
  chr10:77794269-77794299
  hypo
aggaatggaacatgccggcagagctctggg

SEQ ID NO: 165686 - DNA, 222 bp, Homo sapiens
  chr10:77794550-77794772
  hypo
ttttatagaatagcccggcatcccctacgtgtctccctcccgtccacatcgtagctcagctgtcagccggtgcaggctcagcacatctcctgggtctggcaggtgaacgagctgggagtctgtgtctctgtgtaagcccctctgccggccggcttgctttaattaatgtctgtgtgcgcccaggcaagcacttgtgcacaactacctcgtgtcacctccacc

SEQ ID NO: 165687 - DNA, 31 bp, Homo sapiens; identical to SEQ ID NO: 24321
  chr10:77838045-77838076
  hypo

SEQ ID NO: 165688 - DNA, 205 bp, Homo sapiens
  chr10:77892385-77892590
  hypo
actgggaaagttttgtgggagcgtgtatgtttacatgtgtaggtgagcgcatgagtacgagtatcggagtacgagtatcggaggaacaatgagctggagtccactagagagtgaaacttacagagtcttgaccattcatcattctgattctcagatttcaccagctgacaagcaccttcttttttggcggggggggtcagagttt

SEQ ID NO: 165689 - DNA, 30 bp, Homo sapiens; identical to SEQ ID NO: 24322
  chr10:77909913-77909943
  hypo

SEQ ID NO: 165690 - DNA, 30 bp, Homo sapiens
  chr10:78189264-78189294
  hypo
cttgtcagggaggcgcgtacaagcgaggat

SEQ ID NO: 165691 - DNA, 30 bp, Homo sapiens
  chr10:78761259-78761289
  hypo
atgcatgagcagtcacgctcagaacgtccg

SEQ ID NO: 165692 - DNA, 1904 bp, Homo sapiens; identical to SEQ ID NO: 7442
  chr10:79396526-79398430
  hypo

SEQ ID NO: 165693 - DNA, 45 bp, Homo sapiens; identical to SEQ ID NO: 80078
  chr10:79540285-79540330
  hypo

SEQ ID NO: 165694 - DNA, 23 bp, Homo sapiens
  chr10:79547018-79547041
  hypo
accgcgcccggccagactttgct

SEQ ID NO: 165695 - DNA, 31 bp, Homo sapiens; identical to SEQ ID NO: 24324
  chr10:79565637-79565668
  hypo

SEQ ID NO: 165696 - DNA, 107 bp, Homo sapiens; identical to SEQ ID NO: 80081
  chr10:79581128-79581235
  hypo

SEQ ID NO: 165697 - DNA, 507 bp, Homo sapiens
  chr10:79598455-79598962
  hypo
atgaagatggctctgcggtgagggagctagacctgccagaaggccccccacagctgacccctgacaggcagcagccagtggggtggcggggccaatccccagggtgcctcactgcccacccctcctggtctgctcttgccggtggagagtgctctcttatccatgaagccagaccaacttgagaaggagctgaggatttcagctctcagagctgatggggcagccgcgggggctctctcctgcctgctgactcggaacagggcctggaaaagatccctgcctcagctgacaggtgcacttgatgcccagtcaacaccccctgtggaggatggaggcgggctccaggctgaatggctcgcctgagtgctgggaatgcggtggttgccgcaaggacgtcaggcctggaggtctcattgctggacgccagcaccacagggaactcaggtgttctttgtgcatctctgtgctttctatatttctacaaacagtcttcacgattaacttcaa

SEQ ID NO: 165698 - DNA, 541 bp, Homo sapiens; identical to SEQ ID NO: 24325
  chr10:79601536-79602077
  hypo

SEQ ID NO: 165699 - DNA, 30 bp, Homo sapiens; identical to SEQ ID NO: 24326
  chr10:79602350-79602380
  hypo

SEQ ID NO: 165700 - DNA, 449 bp, Homo sapiens; identical to SEQ ID NO: 80086
  chr10:79610502-79610951
  hypo

SEQ ID NO: 165701 - DNA, 30 bp, Homo sapiens; identical to SEQ ID NO: 24327
  chr10:79626162-79626192
  hypo

SEQ ID NO: 165702 - DNA, 30 bp, Homo sapiens; identical to SEQ ID NO: 24328
  chr10:79628926-79628956
  hypo

SEQ ID NO: 165703 - DNA, 32 bp, Homo sapiens; identical to SEQ ID NO: 80089
  chr10:79670434-79670466
  hypo

SEQ ID NO: 165704 - DNA, 46 bp, Homo sapiens; identical to SEQ ID NO: 47287
  chr10:79686267-79686313
  hypo

SEQ ID NO: 165705 - DNA, 470 bp, Homo sapiens; identical to SEQ ID NO: 47288
  chr10:79686574-79687044
  hypo

SEQ ID NO: 165706 - DNA, 30 bp, Homo sapiens
  chr10:79702754-79702784
  hypo
gtcagccaccgctcccggcaaaacctgaat

SEQ ID NO: 165707 - DNA, 43 bp, Homo sapiens; identical to SEQ ID NO: 80092
  chr10:79713477-79713520
  hypo

SEQ ID NO: 165708 - DNA, 31 bp, Homo sapiens; identical to SEQ ID NO: 80093
  chr10:79739250-79739281
  hypo

SEQ ID NO: 165709 - DNA, 105 bp, Homo sapiens; identical to SEQ ID NO: 80094
  chr10:79770244-79770349
  hypo

SEQ ID NO: 165710 - DNA, 31 bp, Homo sapiens
  chr10:79788120-79788151
  hypo
ttgtcattgcacttgtcgtacccagtgttga

SEQ ID NO: 165711 - DNA, 31 bp, Homo sapiens; identical to SEQ ID NO: 80095
  chr10:79814428-79814459
  hypo

SEQ ID NO: 165712 - DNA, 102 bp, Homo sapiens
  chr10:80061831-80061933
  hypo
cacccacccaggcactgtgctcgaaattcttcctgcaaacctgcaaggtaggttctaatgatgttcccatttacccctaagcttgcgcggtggcacgattta

SEQ ID NO: 165713 - DNA, 30 bp, Homo sapiens; identical to SEQ ID NO: 7447
  chr10:80159487-80159517
  hypo

SEQ ID NO: 165714 - DNA, 30 bp, Homo sapiens; identical to SEQ ID NO: 47292
  chr10:80181336-80181366
  hypo

SEQ ID NO: 165715 - DNA, 30 bp, Homo sapiens; identical to SEQ ID NO: 24331
  chr10:80232164-80232194
  hypo

SEQ ID NO: 165716 - DNA, 64 bp, Homo sapiens
  chr10:80232426-80232490
  hypo
tctgaacctgaaagccggtggaggcccgctctaatgagtgtgcagctttcgctgccctcagaaa

SEQ ID NO: 165717 - DNA, 213 bp, Homo sapiens; identical to SEQ ID NO: 80100
  chr10:80540447-80540660
  hypo

SEQ ID NO: 165718 - DNA, 181 bp, Homo sapiens
  chr10:80588138-80588319
  hypo
agcctcaagccagcagcggcccacactctgggcagcagaatgagctcctcggtccccagagggtatctgggcagtgcaccccagcatccactacaaaagcgatgtgaggaaaggctgaaggaacaaaggcctggaaaaggatgatcccacaatgcgatgccacactcggagatctgaagga

SEQ ID NO: 165719 - DNA, 31 bp, Homo sapiens; identical to SEQ ID NO: 24333
  chr10:80638009-80638040
  hypo

SEQ ID NO: 165720 - DNA, 31 bp, Homo sapiens; identical to SEQ ID NO: 24334
  chr10:80714408-80714439
  hypo

SEQ ID NO: 165721 - DNA, 100 bp, Homo sapiens
  chr10:80726029-80726129
  hypo
gtccaccctagaccgcggtaccaccactgggctgtatcacaaaggaccccatatacgtcgcatccacatgagtgctgcccatccccgcctgagctgcacc

SEQ ID NO: 165722 - DNA, 30 bp, Homo sapiens
  chr10:80726848-80726878
  hypo
ttcctggcaatataacgtcccactgacggc

SEQ ID NO: 165723 - DNA, 116 bp, Homo sapiens; identical to SEQ ID NO: 119185
  chr10:80733745-80733861
  hypo

SEQ ID NO: 165724 - DNA, 64 bp, Homo sapiens; identical to SEQ ID NO: 24336
  chr10:80739955-80740019
  hypo

SEQ ID NO: 165725 - DNA, 19 bp, Homo sapiens
  chr10:80762723-80762742
  hypo
attagcaatggtgcagctg

SEQ ID NO: 165726 - DNA, 78 bp, Homo sapiens
  chr10:80763041-80763119
  hypo
aaaaaaaaaagcattggtggcagccgagagttgagtttgagctgcctcattccagtagtatctcgtgctgatgctggg

SEQ ID NO: 165727 - DNA, 195 bp, Homo sapiens; identical to SEQ ID NO: 80108
  chr10:80766187-80766382
  hypo

SEQ ID NO: 165728 - DNA, 24 bp, Homo sapiens
  chr10:80769677-80769701
  hypo
ccctggttcaaaccaccgctctgg

SEQ ID NO: 165729 - DNA, 380 bp, Homo sapiens
  chr10:80793777-80794157
  hypo
tggggttttggaacgtatgccccagggatgaggtgggactactgtaaatgtttgttgtccaaaggccctaggtttgaggccagaatgcccctctgtaccagctcttcccgtcagctcttagacatgcccaagtctctcgtctgaagttctgcttgatccccgtgttcctcagcagctccagccttcactcactcccccactggctccccttccgccactcctccaagagggtactctccaagatcaccagggcctggctgtacctgagtcctgtggttgatctgatttgcctgcttcctggggtccgctgcctctcctttcaatactttccccagtgctcctctcggtcctcacctctacttctccgtgccatttctctc

SEQ ID NO: 165730 - DNA, 30 bp, Homo sapiens; identical to SEQ ID NO: 47294
  chr10:80819116-80819146
  hypo

SEQ ID NO: 165731 - DNA, 116 bp, Homo sapiens; identical to SEQ ID NO: 119187
  chr10:80827232-80827348
  hypo

SEQ ID NO: 165732 - DNA, 408 bp, Homo sapiens; identical to SEQ ID NO: 47297
  chr10:80828531-80828939
  hypo

SEQ ID NO: 165733 - DNA, 190 bp, Homo sapiens; identical to SEQ ID NO: 119192
  chr10:80830745-80830935
  hypo

SEQ ID NO: 165734 - DNA, 76 bp, Homo sapiens; identical to SEQ ID NO: 24341
  chr10:80840368-80840444
  hypo

SEQ ID NO: 165735 - DNA, 30 bp, Homo sapiens; identical to SEQ ID NO: 47300
  chr10:80841132-80841162
  hypo

SEQ ID NO: 165736 - DNA, 143 bp, Homo sapiens
  chr10:80848857-80849000
  hypo
cctccgacaggacagcgctgagcaggtacctgggctggtgccacacttggggaggtggacacgtagcctcagagcccgaagcaactggtggggttcattcccatggaggagaggttctccgtggtccacggccggagcctccg

SEQ ID NO: 165737 - DNA, 244 bp, Homo sapiens
  chr10:80855250-80855494
  hypo
tctcacctggccatgcggcctttccgggtgtcaggcaggtctctccggttaggtaagggaggcctcatccttcttacctgactgctctgagtgcagatctatgctgcttcccatcttctccaggcgcctgatctattaccttgggcttggaacgcacctaacaaaggctaccgtgaggaggcccctcggtacctgttcatctggacacatcgtgcagacccccgcaccccgtgtggctcccggt

SEQ ID NO: 165738 - DNA, 39 bp, Homo sapiens; identical to SEQ ID NO: 24342
  chr10:80870192-80870231
  hypo

SEQ ID NO: 165739 - DNA, 452 bp, Homo sapiens; identical to SEQ ID NO: 80118
  chr10:80878240-80878692
  hypo

SEQ ID NO: 165740 - DNA, 168 bp, Homo sapiens
  chr10:80879965-80880133
  hypo
cgtgtacacagacgtcgcttctgcatgccacatgaatgcacacagataacacttgcgtgcacttgcatgctcacatacacatgcacaaactcgtgttggaactacacacatacacgggcacaaactctcacaagcacacagcattctgacacacggggctgcatatcc

SEQ ID NO: 165741 - DNA, 30 bp, Homo sapiens
  chr10:80880381-80880411
  hypo
tgtccgcctcctatacggtggccgcaagga

SEQ ID NO: 165742 - DNA, 31 bp, Homo sapiens; identical to SEQ ID NO: 80119
  chr10:80882132-80882163
  hypo

SEQ ID NO: 165743 - DNA, 31 bp, Homo sapiens; identical to SEQ ID NO: 24343
  chr10:80882864-80882895
  hypo

SEQ ID NO: 165744 - DNA, 30 bp, Homo sapiens
  chr10:80883670-80883700
  hypo
cctgtcaatcttcagcgccagctgagaatg

SEQ ID NO: 165745 - DNA, 25 bp, Homo sapiens
  chr10:80900499-80900524
  hypo
cacaccaggccaggcccgcattaag

SEQ ID NO: 165746 - DNA, 385 bp, Homo sapiens
  chr10:80900703-80901088
  hypo
tgatttttaaatttttgtggagacggggtctcacttcgttgtccgggggtgggttttgaagacagagccaatttagccctgccctgagagggtgtggtgtgcaatggagtacgactcagatcccagagccagactgagttccataaggcagtgctcaaagcctgtgtggtgaccatgacgacacaggggacgagggagaggggacgtggctgattctgcaggcagacattcggggaggaggaggcggcattgctcatgcattcattccccaggtgttgaccgagaaagtctgtcaggaactctttaagttcagagatatagcagggaataaagcagacaaaactccctgcccttacggcgcttgtactctcgtgaggaggcatgg

SEQ ID NO: 165747 - DNA, 283 bp, Homo sapiens; identical to SEQ ID NO: 24344
  chr10:80921745-80922028
  hypo

SEQ ID NO: 165748 - DNA, 31 bp, Homo sapiens; identical to SEQ ID NO: 24345
  chr10:80927517-80927548
  hypo

SEQ ID NO: 165749 - DNA, 30 bp, Homo sapiens
  chr10:80928005-80928035
  hypo
tgccactacccaaagcggagctcccccggg

SEQ ID NO: 165750 - DNA, 194 bp, Homo sapiens
  chr10:80928399-80928593
  hypo
ttcggaggctgtgtgcggactccacgagaaataatgctgtgcatcgtgtggcgcatggtcacgctctcagccctgctccctgggtatcaggtctgcttgactgatgtctcagctctgggctgtggccagtgcaggaggagagaagaggcagggacctcagtgtgacccccacaggtgtccgtccaccctggctg

SEQ ID NO: 165751 - DNA, 426 bp, Homo sapiens; identical to SEQ ID NO: 80125
  chr10:80930707-80931133
  hypo

SEQ ID NO: 165752 - DNA, 30 bp, Homo sapiens
  chr10:80952837-80952867
  hypo
tgcgcgagccacctgcgacgtgaccacagg

SEQ ID NO: 165753 - DNA, 317 bp, Homo sapiens
  chr10:80953305-80953622
  hypo
agtacctgctgagtacggagccctgggctagactaagggatctgtaactggaagacattccagctgatggagagacagttgcaaggagtcagccctcatctagtgctgctacgatgggggtgtgtgacagcgacatggaggggatagggatggaaaccaagaaagagcacgaaagagtgacagttgagccataccctgatggatgggaggtgtccaggcattgcgggcagagggacagtcagaggcaaagacatggaggtgcgatcttcagagcacagtccgggaggcagggagcagccccacgttggggacaaggg

SEQ ID NO: 165754 - DNA, 129 bp, Homo sapiens
  chr10:80954540-80954669
  hypo
tctatacataatagccgctaacttttcttgaactagtcttctgcaccaggcgccgctaagcatagacaccctcgctctgctgggtggtgagaagtgtaaatggaagcttggtcccgaaagacgtcccac

SEQ ID NO: 165755 - DNA, 337 bp, Homo sapiens
  chr10:80955981-80956318
  hypo
aaacacaggacacagcgctgtccctgtggtctgcgatgtccctcctgccatccatctacccacccttgggtctcacaggtgttgcaagcccagacactcacccctcggttcctgtgagctgcagccctgcctgggagcaaagcccccctgggacctggacccagcccagtgccccttggccttgaacaaaacactgatgggccccaggctcctcagagtaaaaccagttgaggcagagcgggtagataggggacctgaaagcaccttcggcccttaatattccaggaatctttctgtccagaagccagttcagtccagccgccggcctccagacaag

SEQ ID NO: 165756 - DNA, 24 bp, Homo sapiens
  chr10:80957700-80957724
  hypo
gaccccgcacagtgtcgttattaa

SEQ ID NO: 165757 - DNA, 33 bp, Homo sapiens; identical to SEQ ID NO: 24349
  chr10:80958500-80958533
  hypo

SEQ ID NO: 165758 - DNA, 241 bp, Homo sapiens
  chr10:80958772-80959013
  hypo
gagcgagactcagtctcaaaaaaaaaaaaattggaaaaagcttcagggtccctcgtttcaggctggagtgtgagcccccagagcagaggggccttgtctgagggctcaagccttagaacagcacctggcagggggcgatgggcagatgttagttggataatgcttcatcatacctaggaatactgtgcggccattaaaaaatgaaaaggtggccaggcgtggtggctcacacctgtaatct

SEQ ID NO: 165759 - DNA, 240 bp, Homo sapiens
  chr10:80961347-80961587
  hypo
aacgttcatggctctcgggtagaacctagtgaaacggccagaatgaattctatggacaggcacatccagcagaccaatgaccgactgcagtgcatcaagcaggtgggtgtggggcaaggcacactccgagggcggggcagatggggcgggctgcagcagcagggcatctggtgggttctggctggagacgatggcagggcctcctgaccacctacctatcgaggccgttattggcatgct

SEQ ID NO: 165760 - DNA, 58 bp, Homo sapiens
  chr10:80962988-80963046
  hypo
gctgttcctcgagaacgagggttgtgtgtcttcttattagcatcgagcagaggaatct

SEQ ID NO: 165761 - DNA, 30 bp, Homo sapiens
  chr10:80963500-80963530
  hypo
cagtcaccattccgtcgcttacaaactatg

SEQ ID NO: 165762 - DNA, 547 bp, Homo sapiens
  chr10:80966387-80966934
  hypo
agaaggagccagggctgagagcggccacatgcagctgtacttccaggagagcctttgggagacagagtcagggccaagggcagccccacatgggagcaccccacgcgccaggcactttgccaggggctgtataagcctcatcttgtttaagcctcactgcggccccgtgatggagggctttgttgctgcttgcctgccctctttctctcctacatctctttctctccctttacttccatggaaggaggacattctccttcatttcactttcctccacccatttttaaataccttgcctcgcatgaactacattgtagcaacagtcacggaaccttaagcgaaagaaataaaaccccaccaccaagtcatgttctgtcatatccccattttacagatgaggctactgaggctcagggagctgaggggaccatcctacgtcagtggttgaaagtgggtgaaggcagagtgtggattcccgtagctcccctgccaattctgggccctgcggctcctaggcccctccctgccctggcgctggggcaggctc

SEQ ID NO: 165763 - DNA, 185 bp, Homo sapiens; identical to SEQ ID NO: 80133
  chr10:80969928-80970113
  hypo

SEQ ID NO: 165764 - DNA, 172 bp, Homo sapiens; identical to SEQ ID NO: 80134
  chr10:80971585-80971757
  hypo

SEQ ID NO: 165765 - DNA, 499 bp, Homo sapiens; identical to SEQ ID NO: 80135
  chr10:80974592-80975091
  hypo

SEQ ID NO: 165766 - DNA, 424 bp, Homo sapiens
  chr10:80975645-80976069
  hypo
ctgagcccttggaagcggcggggcctatggctttggtgttggacccatcgtcagcctgggaaacccctaaggacggggccaggatcccagggcctggcacggaagaggtgttcatcagtatttgctgagcaactgaagaaggcacagtggacttctggctctgcctaatgatggggcactgccttagcttgcccacctcacccacttcacctgcaaaatgggcatatccattggctctgggctccgtgactcacctgccctcctcccctcttgctttcaggtggtcagtcgggtggcagcccagcaaggctttgacctggacctcggctacagactgctggctgtgtgtgctgcaaaccgagacaagttcaccccgaagtctgccggtaggtgtccgtgggggactctgcgatgtcactgggag

SEQ ID NO: 165767 - DNA, 31 bp, Homo sapiens; identical to SEQ ID NO: 80137
  chr10:80976754-80976785
  hypo

SEQ ID NO: 165768 - DNA, 29 bp, Homo sapiens
  chr10:80991615-80991644
  hypo
tgagccaccgtgcccggtcatgcctggtg

SEQ ID NO: 165769 - DNA, 146 bp, Homo sapiens; identical to SEQ ID NO: 119197
  chr10:81002562-81002708
  hypo

SEQ ID NO: 165770 - DNA, 33 bp, Homo sapiens; identical to SEQ ID NO: 24356
  chr10:81017843-81017876
  hypo

SEQ ID NO: 165771 - DNA, 51 bp, Homo sapiens
  chr10:81020969-81021020
  hypo
gaggcccatccagttcgtgcttgcccaactggtgcgcgctcagctcaggcc

SEQ ID NO: 165772 - DNA, 191 bp, Homo sapiens; identical to SEQ ID NO: 24357
  chr10:81023806-81023997
  hypo

SEQ ID NO: 165773 - DNA, 48 bp, Homo sapiens
  chr10:81029633-81029681
  hypo
agcgtacctgctccccgtgacacccgacccgatcgatgctaacaaagg

SEQ ID NO: 165774 - DNA, 270 bp, Homo sapiens
  chr10:81032442-81032712
  hypo
gtaggttagaatggatcgaggtgagggagtctggtcacaaggatgcagtttggagaggtgaggggagctcagtgggttcactttagacgagttgggtggtgcgtgcttttacgttttacgctgagacatttgaggagtgcttggaagtctggattaaggctcagcattggcagttcgagtctgggatgattccctgctgctgtcccagccccagctgtggtcaccatgaggtgagctggaaggccccaaggtcctcggcaccagcccctg

SEQ ID NO: 165775 - DNA, 227 bp, Homo sapiens; identical to SEQ ID NO: 80144
  chr10:81035987-81036214
  hypo

SEQ ID NO: 165776 - DNA, 434 bp, Homo sapiens; identical to SEQ ID NO: 24360
  chr10:81036656-81037090
  hypo

SEQ ID NO: 165777 - DNA, 30 bp, Homo sapiens
  chr10:81043000-81043030
  hypo
tgagtatagcaggtcggggaacaggccctg

SEQ ID NO: 165778 - DNA, 291 bp, Homo sapiens; identical to SEQ ID NO: 80146
  chr10:81050746-81051037
  hypo

SEQ ID NO: 165779 - DNA, 30 bp, Homo sapiens; identical to SEQ ID NO: 80147
  chr10:81056343-81056373
  hypo

SEQ ID NO: 165780 - DNA, 188 bp, Homo sapiens; identical to SEQ ID NO: 80148
  chr10:81057999-81058187
  hypo

SEQ ID NO: 165781 - DNA, 78 bp, Homo sapiens; identical to SEQ ID NO: 80149
  chr10:81059002-81059080
  hypo

SEQ ID NO: 165782 - DNA, 30 bp, Homo sapiens; identical to SEQ ID NO: 24364
  chr10:81059399-81059429
  hypo

SEQ ID NO: 165783 - DNA, 112 bp, Homo sapiens; identical to SEQ ID NO: 80151
  chr10:81060508-81060620
  hypo

SEQ ID NO: 165784 - DNA, 476 bp, Homo sapiens
  chr10:81063476-81063952
  hypo
gacatgccccttcctcgcgaaggcagggcctgctctgcagagacaggggaactgccacagccacctcgtctggcacacacacaccacacgtgtcccacatggagacagcagcccgggcacccggccctgtgactgccacacagtgccacacactgccctctcagcgtttggtgtgggctgggaggagaaccaggacatgccccagctgcacgaggaagtggggagcacgtgcagaccccctacctctgcaggactgtcttgccatcctcacctgtctgtgcctcctgccccgcagtcaagcggaatttcagcagcgtggctgcctcctcgggcaacacgaccctcaacggggaggatggggtggagcagacggccatcaaggtgtctctgaagtgccccatcacattccggcgcatccagctgcctgctcgaggacacgattgcaagcatgtgcaggtgagcggccccagaaagca

SEQ ID NO: 165785 - DNA, 390 bp, Homo sapiens
  chr10:81065709-81066099
  hypo
gccaggcttccgcctcgtccacagtgtggtgagagtgggagcaggggcctcaacaaggtcacctgggtgtctgtcggagctggaggtgcttttatgcccaaagccaggcaccccggagcctcagctctgccacccttcctcccccagctccgagtttgaagaggtcaccatcgatcccacgtgcagctggcggccggtgcccatcaagtcggacttacacatcaaggacgaccctgatggcatcccctccaagcggttcaagaccatgagtcccagccagatgatcatgcccaatgtcatggagatgatcgcagccctgggccccggcccgtccccctatcccctcccgcctcccccagggggcaccaactccaacgactacagcagcca

SEQ ID NO: 165786 - DNA, 31 bp, Homo sapiens; identical to SEQ ID NO: 80155
  chr10:81067466-81067497
  hypo

SEQ ID NO: 165787 - DNA, 30 bp, Homo sapiens; identical to SEQ ID NO: 80156
  chr10:81070454-81070484
  hypo

SEQ ID NO: 165788 - DNA, 153 bp, Homo sapiens
  chr10:81070816-81070969
  hypo
ggcagccgccacaggccgctcccagcagccatccacacagcgacctgacctttaacccctcctcagccttagagggtcaggccggagcgcagggagcgtccgacatgccggagccttcgctggatgtaagttggggtcgccactcgccttggc

SEQ ID NO: 165789 - DNA, 43 bp, Homo sapiens; identical to SEQ ID NO: 80158
  chr10:81072191-81072234
  hypo

SEQ ID NO: 165790 - DNA, 31 bp, Homo sapiens; identical to SEQ ID NO: 80159
  chr10:81072581-81072612
  hypo

SEQ ID NO: 165791 - DNA, 182 bp, Homo sapiens; identical to SEQ ID NO: 24369
  chr10:81073339-81073521
  hypo

SEQ ID NO: 165792 - DNA, 30 bp, Homo sapiens
  chr10:81110805-81110835
  hypo
acagtgaggggactcggcctggggagctgg

SEQ ID NO: 165793 - DNA, 166 bp, Homo sapiens
  chr10:81142184-81142350
  hypo
ccaagggctgcacttcggagacgtcggagccttctccacgcaccttccgagctgggcccacgggttctgttttgtctttttagctggactcacacgtatggacagacacagacacggacggggtcaccgcatgggggcggaggaggtcggacggcaaggttggcaa

SEQ ID NO: 165794 - DNA, 30 bp, Homo sapiens; identical to SEQ ID NO: 80162
  chr10:81144084-81144114
  hypo

SEQ ID NO: 165795 - DNA, 264 bp, Homo sapiens; identical to SEQ ID NO: 80163
  chr10:81145944-81146208
  hypo

SEQ ID NO: 165796 - DNA, 31 bp, Homo sapiens; identical to SEQ ID NO: 24372
  chr10:81153953-81153984
  hypo

SEQ ID NO: 165797 - DNA, 30 bp, Homo sapiens
  chr10:81194469-81194499
  hypo
gtatttttaggtgtgcggcaaaatatacac

SEQ ID NO: 165798 - DNA, 30 bp, Homo sapiens; identical to SEQ ID NO: 80165
  chr10:81371061-81371091
  hypo

SEQ ID NO: 165799 - DNA, 30 bp, Homo sapiens; identical to SEQ ID NO: 80166
  chr10:81444388-81444418
  hypo

SEQ ID NO: 165800 - DNA, 30 bp, Homo sapiens
  chr10:81652816-81652846
  hypo
gctccggcaaaacctcgaggcagcgctgga

SEQ ID NO: 165801 - DNA, 30 bp, Homo sapiens; identical to SEQ ID NO: 80167
  chr10:81706242-81706272
  hypo

SEQ ID NO: 165802 - DNA, 163 bp, Homo sapiens
  chr10:81861005-81861168
  hypo
aggtagttcctccaccggtgcttccaaccaaatcgccaggattgtggattatcttactttctcctaagggtttaaaagtgaaaattccagccaaaggagcgactagtggattggtggtcgctggattctcaatccttacatcgctgggaccaacataggtgaa

SEQ ID NO: 165803 - DNA, 33 bp, Homo sapiens
  chr10:81915176-81915209
  hypo
gtgcttcacccacccagtcgccctcaccagaaa

SEQ ID NO: 165804 - DNA, 30 bp, Homo sapiens
  chr10:81918843-81918873
  hypo
tgagacacttacccacggccagcatgccct

SEQ ID NO: 165805 - DNA, 31 bp, Homo sapiens; identical to SEQ ID NO: 24373
  chr10:81921253-81921284
  hypo

SEQ ID NO: 165806 - DNA, 30 bp, Homo sapiens; identical to SEQ ID NO: 24374
  chr10:81924865-81924895
  hypo

SEQ ID NO: 165807 - DNA, 30 bp, Homo sapiens
  chr10:81925194-81925224
  hypo
agtccaagccgggcccgtcagaacctgccc

SEQ ID NO: 165808 - DNA, 108 bp, Homo sapiens
  chr10:81931375-81931483
  hypo
gctcagctgggtgcccgatgggcattcgacatcatcatggggcctctggcctgttagatgctttcctctacatggcagcttcggatcggctcttcatctccagggctc

SEQ ID NO: 165809 - DNA, 22 bp, Homo sapiens
  chr10:81958869-81958891
  hypo
tgagaccaagtcttgatctgtc

SEQ ID NO: 165810 - DNA, 30 bp, Homo sapiens
  chr10:81960764-81960794
  hypo
agcaggagggtaaatcgaggcaacagaatc

SEQ ID NO: 165811 - DNA, 166 bp, Homo sapiens; identical to SEQ ID NO: 80173
  chr10:81966465-81966631
  hypo

SEQ ID NO: 165812 - DNA, 143 bp, Homo sapiens
  chr10:81968100-81968243
  hypo
acgggtgtgagttaccgcacccggcctcttttgttgttttctaataagtatatatgactatcatttccctcaaaagtctgctttagctgaatatcacaagttttaatatgctatgcttttgttatcacttagttatacatatt

SEQ ID NO: 165813 - DNA, 30 bp, Homo sapiens
  chr10:82012565-82012595
  hypo
cagctgtcggtcctccgggacctcatccac

SEQ ID NO: 165814 - DNA, 30 bp, Homo sapiens; identical to SEQ ID NO: 80174
  chr10:82034734-82034764
  hypo

SEQ ID NO: 165815 - DNA, 30 bp, Homo sapiens; identical to SEQ ID NO: 80175
  chr10:82131762-82131792
  hypo

SEQ ID NO: 165816 - DNA, 240 bp, Homo sapiens; identical to SEQ ID NO: 119215
  chr10:82213503-82213743
  hypo

SEQ ID NO: 165817 - DNA, 30 bp, Homo sapiens; identical to SEQ ID NO: 80177
  chr10:82214373-82214403
  hypo

SEQ ID NO: 165818 - DNA, 30 bp, Homo sapiens; identical to SEQ ID NO: 24378
  chr10:82268203-82268233
  hypo

SEQ ID NO: 165819 - DNA, 18 bp, Homo sapiens
  chr10:82282239-82282257
  hypo
ctgggtgacaggagactc

SEQ ID NO: 165820 - DNA, 30 bp, Homo sapiens; identical to SEQ ID NO: 24379
  chr10:82297778-82297808
  hypo

SEQ ID NO: 165821 - DNA, 30 bp, Homo sapiens
  chr10:82298572-82298602
  hypo
cagattgtgctccgacgtggttggcaatgg

SEQ ID NO: 165822 - DNA, 31 bp, Homo sapiens; identical to SEQ ID NO: 80181
  chr10:82329515-82329546
  hypo

SEQ ID NO: 165823 - DNA, 80 bp, Homo sapiens; identical to SEQ ID NO: 80182
  chr10:82363369-82363449
  hypo

SEQ ID NO: 165824 - DNA, 81 bp, Homo sapiens
  chr10:82573972-82574053
  hypo
gcaccggtgggaaccggggccaacgggagttccgggtgggcatggtctcagtgggcccgcactcagcggctggccgtccca

SEQ ID NO: 165825 - DNA, 30 bp, Homo sapiens
  chr10:82709456-82709486
  hypo
atggtcacaaagtcacgctctcaaggatgt

SEQ ID NO: 165826 - DNA, 30 bp, Homo sapiens; identical to SEQ ID NO: 7459
  chr10:84158654-84158684
  hypo

SEQ ID NO: 165827 - DNA, 163 bp, Homo sapiens; identical to SEQ ID NO: 24381
  chr10:84618970-84619133
  hypo

SEQ ID NO: 165828 - DNA, 30 bp, Homo sapiens; identical to SEQ ID NO: 7460
  chr10:85233864-85233894
  hypo

SEQ ID NO: 165829 - DNA, 30 bp, Homo sapiens; identical to SEQ ID NO: 7461
  chr10:85247485-85247515
  hypo

SEQ ID NO: 165830 - DNA, 30 bp, Homo sapiens; identical to SEQ ID NO: 7462
  chr10:85416512-85416542
  hypo

SEQ ID NO: 165831 - DNA, 34 bp, Homo sapiens; identical to SEQ ID NO: 24385
  chr10:86016116-86016150
  hypo

SEQ ID NO: 165832 - DNA, 43 bp, Homo sapiens; identical to SEQ ID NO: 7466
  chr10:86088146-86088189
  hypo

SEQ ID NO: 165833 - DNA, 178 bp, Homo sapiens; identical to SEQ ID NO: 80190
  chr10:86175508-86175686
  hypo

SEQ ID NO: 165834 - DNA, 16 bp, Homo sapiens
  chr10:86176684-86176700
  hypo
aaaaaaaaaagagttt

SEQ ID NO: 165835 - DNA, 30 bp, Homo sapiens; identical to SEQ ID NO: 24387
  chr10:86296485-86296515
  hypo

SEQ ID NO: 165836 - DNA, 179 bp, Homo sapiens; identical to SEQ ID NO: 80193
  chr10:86306480-86306659
  hypo

SEQ ID NO: 165837 - DNA, 267 bp, Homo sapiens; identical to SEQ ID NO: 80194
  chr10:86361897-86362164
  hypo

SEQ ID NO: 165838 - DNA, 30 bp, Homo sapiens; identical to SEQ ID NO: 47331
  chr10:86475849-86475879
  hypo

SEQ ID NO: 165839 - DNA, 30 bp, Homo sapiens; identical to SEQ ID NO: 47332
  chr10:86514862-86514892
  hypo

SEQ ID NO: 165840 - DNA, 30 bp, Homo sapiens; identical to SEQ ID NO: 47333
  chr10:86904510-86904540
  hypo

SEQ ID NO: 165841 - DNA, 30 bp, Homo sapiens; identical to SEQ ID NO: 47334
  chr10:87074845-87074875
  hypo

SEQ ID NO: 165842 - DNA, 30 bp, Homo sapiens; identical to SEQ ID NO: 47335
  chr10:87081956-87081986
  hypo

SEQ ID NO: 165843 - DNA, 30 bp, Homo sapiens; identical to SEQ ID NO: 47336
  chr10:87270873-87270903
  hypo

SEQ ID NO: 165844 - DNA, 30 bp, Homo sapiens; identical to SEQ ID NO: 47337
  chr10:87397127-87397157
  hypo

SEQ ID NO: 165845 - DNA, 30 bp, Homo sapiens; identical to SEQ ID NO: 47338
  chr10:87405011-87405041
  hypo

SEQ ID NO: 165846 - DNA, 30 bp, Homo sapiens; identical to SEQ ID NO: 47339
  chr10:87424457-87424487
  hypo

SEQ ID NO: 165847 - DNA, 30 bp, Homo sapiens; identical to SEQ ID NO: 47340
  chr10:87453632-87453662
  hypo

SEQ ID NO: 165848 - DNA, 57 bp, Homo sapiens; identical to SEQ ID NO: 47341
  chr10:87493569-87493626
  hypo

SEQ ID NO: 165849 - DNA, 30 bp, Homo sapiens; identical to SEQ ID NO: 47342
  chr10:87515091-87515121
  hypo

SEQ ID NO: 165850 - DNA, 30 bp, Homo sapiens; identical to SEQ ID NO: 47343
  chr10:87536102-87536132
  hypo

SEQ ID NO: 165851 - DNA, 30 bp, Homo sapiens; identical to SEQ ID NO: 47344
  chr10:87602797-87602827
  hypo

SEQ ID NO: 165852 - DNA, 30 bp, Homo sapiens; identical to SEQ ID NO: 47345
  chr10:87622976-87623006
  hypo

SEQ ID NO: 165853 - DNA, 30 bp, Homo sapiens; identical to SEQ ID NO: 47346
  chr10:87672380-87672410
  hypo

SEQ ID NO: 165854 - DNA, 30 bp, Homo sapiens; identical to SEQ ID NO: 47347
  chr10:87832587-87832617
  hypo

SEQ ID NO: 165855 - DNA, 30 bp, Homo sapiens; identical to SEQ ID NO: 47348
  chr10:87836471-87836501
  hypo

SEQ ID NO: 165856 - DNA, 30 bp, Homo sapiens; identical to SEQ ID NO: 47349
  chr10:87838181-87838211
  hypo

SEQ ID NO: 165857 - DNA, 30 bp, Homo sapiens; identical to SEQ ID NO: 47350
  chr10:87863910-87863940
  hypo

SEQ ID NO: 165858 - DNA, 30 bp, Homo sapiens; identical to SEQ ID NO: 47351
  chr10:87866056-87866086
  hypo

SEQ ID NO: 165859 - DNA, 30 bp, Homo sapiens; identical to SEQ ID NO: 47352
  chr10:87886909-87886939
  hypo

SEQ ID NO: 165860 - DNA, 30 bp, Homo sapiens; identical to SEQ ID NO: 47353
  chr10:87941840-87941870
  hypo

SEQ ID NO: 165861 - DNA, 178 bp, Homo sapiens; identical to SEQ ID NO: 80218
  chr10:87965963-87966141
  hypo

SEQ ID NO: 165862 - DNA, 30 bp, Homo sapiens; identical to SEQ ID NO: 47354
  chr10:87992037-87992067
  hypo

SEQ ID NO: 165863 - DNA, 30 bp, Homo sapiens; identical to SEQ ID NO: 47355
  chr10:88023113-88023143
  hypo

SEQ ID NO: 165864 - DNA, 30 bp, Homo sapiens; identical to SEQ ID NO: 47356
  chr10:88096446-88096476
  hypo

SEQ ID NO: 165865 - DNA, 31 bp, Homo sapiens; identical to SEQ ID NO: 80222
  chr10:88098234-88098265
  hypo

SEQ ID NO: 165866 - DNA, 31 bp, Homo sapiens; identical to SEQ ID NO: 80223
  chr10:88108300-88108331
  hypo

SEQ ID NO: 165867 - DNA, 30 bp, Homo sapiens; identical to SEQ ID NO: 47357
  chr10:88118882-88118912
  hypo

SEQ ID NO: 165868 - DNA, 30 bp, Homo sapiens; identical to SEQ ID NO: 47358
  chr10:88123778-88123808
  hypo

SEQ ID NO: 165869 - DNA, 1060 bp, Homo sapiens; identical to SEQ ID NO: 119260
  chr10:88125456-88126516
  hypo

SEQ ID NO: 165870 - DNA, 31 bp, Homo sapiens; identical to SEQ ID NO: 7470
  chr10:88148418-88148449
  hypo

SEQ ID NO: 165871 - DNA, 30 bp, Homo sapiens; identical to SEQ ID NO: 47366
  chr10:88193994-88194024
  hypo

SEQ ID NO: 165872 - DNA, 204 bp, Homo sapiens; identical to SEQ ID NO: 80229
  chr10:88200327-88200531
  hypo

SEQ ID NO: 165873 - DNA, 24 bp, Homo sapiens
  chr10:88222184-88222208
  hypo
gttctcggccaggtgcggtggctc

SEQ ID NO: 165874 - DNA, 23 bp, Homo sapiens
  chr10:88224372-88224395
  hypo
cacctgagttcagttcgagacca

SEQ ID NO: 165875 - DNA, 83 bp, Homo sapiens; identical to SEQ ID NO: 119267
  chr10:88224574-88224657
  hypo

SEQ ID NO: 165876 - DNA, 24 bp, Homo sapiens
  chr10:88237802-88237826
  hypo
actctgtctcggaaaaaaaaaaaa

SEQ ID NO: 165877 - DNA, 36 bp, Homo sapiens; identical to SEQ ID NO: 80232
  chr10:88241397-88241433
  hypo

SEQ ID NO: 165878 - DNA, 30 bp, Homo sapiens; identical to SEQ ID NO: 47368
  chr10:88271572-88271602
  hypo

SEQ ID NO: 165879 - DNA, 80 bp, Homo sapiens; identical to SEQ ID NO: 80234
  chr10:88280085-88280165
  hypo

SEQ ID NO: 165880 - DNA, 31 bp, Homo sapiens; identical to SEQ ID NO: 80235
  chr10:88282806-88282837
  hypo

SEQ ID NO: 165881 - DNA, 34 bp, Homo sapiens; identical to SEQ ID NO: 80236
  chr10:88286948-88286982
  hypo

SEQ ID NO: 165882 - DNA, 213 bp, Homo sapiens; identical to SEQ ID NO: 47369
  chr10:88294491-88294704
  hypo

SEQ ID NO: 165883 - DNA, 18 bp, Homo sapiens
  chr10:88300213-88300231
  hypo
agagtcgcgctctgtcgc

SEQ ID NO: 165884 - DNA, 30 bp, Homo sapiens; identical to SEQ ID NO: 47370
  chr10:88318471-88318501
  hypo

SEQ ID NO: 165885 - DNA, 30 bp, Homo sapiens; identical to SEQ ID NO: 47371
  chr10:88332878-88332908
  hypo

SEQ ID NO: 165886 - DNA, 30 bp, Homo sapiens; identical to SEQ ID NO: 47373
  chr10:88413886-88413916
  hypo

SEQ ID NO: 165887 - DNA, 30 bp, Homo sapiens; identical to SEQ ID NO: 24392
  chr10:88414306-88414336
  hypo

SEQ ID NO: 165888 - DNA, 165 bp, Homo sapiens; identical to SEQ ID NO: 80242
  chr10:88422750-88422915
  hypo

SEQ ID NO: 165889 - DNA, 654 bp, Homo sapiens; identical to SEQ ID NO: 24393
  chr10:88441136-88441790
  hypo

SEQ ID NO: 165890 - DNA, 30 bp, Homo sapiens; identical to SEQ ID NO: 80244
  chr10:88445501-88445531
  hypo

SEQ ID NO: 165891 - DNA, 30 bp, Homo sapiens; identical to SEQ ID NO: 47374
  chr10:88453438-88453468
  hypo

SEQ ID NO: 165892 - DNA, 225 bp, Homo sapiens; identical to SEQ ID NO: 80246
  chr10:88470509-88470734
  hypo

SEQ ID NO: 165893 - DNA, 30 bp, Homo sapiens; identical to SEQ ID NO: 47375
  chr10:88480957-88480987
  hypo

SEQ ID NO: 165894 - DNA, 30 bp, Homo sapiens; identical to SEQ ID NO: 47376
  chr10:88487419-88487449
  hypo

SEQ ID NO: 165895 - DNA, 30 bp, Homo sapiens; identical to SEQ ID NO: 47377
  chr10:88499801-88499831
  hypo

SEQ ID NO: 165896 - DNA, 30 bp, Homo sapiens; identical to SEQ ID NO: 47379
  chr10:88550295-88550325
  hypo

SEQ ID NO: 165897 - DNA, 30 bp, Homo sapiens; identical to SEQ ID NO: 47380
  chr10:88560576-88560606
  hypo

SEQ ID NO: 165898 - DNA, 30 bp, Homo sapiens; identical to SEQ ID NO: 47381
  chr10:88581192-88581222
  hypo

SEQ ID NO: 165899 - DNA, 36 bp, Homo sapiens; identical to SEQ ID NO: 80253
  chr10:88587610-88587646
  hypo

SEQ ID NO: 165900 - DNA, 30 bp, Homo sapiens; identical to SEQ ID NO: 47382
  chr10:88592397-88592427
  hypo

SEQ ID NO: 165901 - DNA, 30 bp, Homo sapiens; identical to SEQ ID NO: 24394
  chr10:88615949-88615979
  hypo

SEQ ID NO: 165902 - DNA, 30 bp, Homo sapiens; identical to SEQ ID NO: 47383
  chr10:88628328-88628358
  hypo

SEQ ID NO: 165903 - DNA, 30 bp, Homo sapiens; identical to SEQ ID NO: 47384
  chr10:88629689-88629719
  hypo

SEQ ID NO: 165904 - DNA, 31 bp, Homo sapiens; identical to SEQ ID NO: 80258
  chr10:88698619-88698650
  hypo

SEQ ID NO: 165905 - DNA, 782 bp, Homo sapiens
  chr10:88702273-88703055
  hypo
ccaaagaggctgtggaagagccgctggtgctgctccaagctgcgctgagtggcgaagagtgcgttgtggaggccgtgaagggaggcgttgagggaggcggccccggccccggcctcggcctcgcagcaccgcccgacattcttgacgtcgttgctcaggctctggagctcccgcgccagcccggccagggcggtggtggcggcctcctcgcggcccgcgtcgtggctgggctccaggtgctctgccggccgcgggggctccgaggcctgctccagggccgtcactcgggcggccagctcgtcccagccgagcgcctgctcctgcagcccgctagcggcgtcctgcagggccacgcggatctgctcgtagctcaggggcagcggtcccggcgtctgctcagacatctcctccagcacctcctccccgaagagcgcggccagcaccgcctcgtgccgcagcgcgtcctccagcagggcggcgaaggcgctgtgcagctggcgcacctcgtggcgggcctcggccgcggccgccttcagcgcgcccacctcgtcatccagcgcctgcacttggctccggagccgcgacgtggccgcccgcgcccgctcgccctccgctttgtgcgcgtccacggccagcgacacggcgtccacggcgttctgcagggcctgcagggaggagccgtccagctgccgccgctcgtccaggctcacctgggtctcctccagggcacgcgtggcgtccctctggccctcccggatgacgtccaggtctaaatagagctt

SEQ ID NO: 165906 - DNA, 121 bp, Homo sapiens
  chr10:88857178-88857299
  hypo
gtggtggggggcctacaaaaattagccaggcgtggtggcggggagggggttgggcagtgcttgtagttccagctacttgggagaaccacttgaaccagggagagaggttgcagtgagccga

SEQ ID NO: 165907 - DNA, 40 bp, Homo sapiens
  chr10:89362123-89362163
  hypo
gaagtattagaagtgtcagctcgccgggcggggtggctca

SEQ ID NO: 165908 - DNA, 31 bp, Homo sapiens; identical to SEQ ID NO: 24396
  chr10:89420153-89420184
  hypo

SEQ ID NO: 165909 - DNA, 31 bp, Homo sapiens
  chr10:89605950-89605981
  hypo
aaacgtcattatgtcacgcaagactagataa

SEQ ID NO: 165910 - DNA, 30 bp, Homo sapiens; identical to SEQ ID NO: 7476
  chr10:89692890-89692920
  hypo

SEQ ID NO: 165911 - DNA, 30 bp, Homo sapiens; identical to SEQ ID NO: 7477
  chr10:89717657-89717687
  hypo

SEQ ID NO: 165912 - DNA, 30 bp, Homo sapiens
  chr10:89721078-89721108
  hypo
cttttcctaattcttcgttgtttgctgaaa

SEQ ID NO: 165913 - DNA, 31 bp, Homo sapiens; identical to SEQ ID NO: 80263
  chr10:89762183-89762214
  hypo

SEQ ID NO: 165914 - DNA, 19 bp, Homo sapiens
  chr10:89789286-89789305
  hypo
catgccaagcaagagcgca

SEQ ID NO: 165915 - DNA, 30 bp, Homo sapiens
  chr10:89802270-89802300
  hypo
agcatcctgaaggtacggggcctcgtgctg

SEQ ID NO: 165916 - DNA, 117 bp, Homo sapiens
  chr10:89892094-89892211
  hypo
gacatatgagaggaacgacaggctcaaaatatgaagacttaatccagacacctctgtgtctctgaacttgcgttgtttcttctttggaggtgaagtacacatcgttttactccgggc

SEQ ID NO: 165917 - DNA, 278 bp, Homo sapiens; identical to SEQ ID NO: 80264
  chr10:90029771-90030049
  hypo

SEQ ID NO: 165918 - DNA, 30 bp, Homo sapiens
  chr10:90122323-90122353
  hypo
tattatcaatggagacgaagcgtatgcagg

SEQ ID NO: 165919 - DNA, 30 bp, Homo sapiens; identical to SEQ ID NO: 80265
  chr10:90345845-90345875
  hypo

SEQ ID NO: 165920 - DNA, 30 bp, Homo sapiens
  chr10:90488017-90488047
  hypo
ggatggcatcatctcgacgtctccgcccag

SEQ ID NO: 165921 - DNA, 184 bp, Homo sapiens; identical to SEQ ID NO: 119304
  chr10:90750729-90750913
  hypo

SEQ ID NO: 165922 - DNA, 260 bp, Homo sapiens; identical to SEQ ID NO: 119314
  chr10:91295584-91295844
  hypo

SEQ ID NO: 165923 - DNA, 30 bp, Homo sapiens; identical to SEQ ID NO: 80269
  chr10:91353097-91353127
  hypo

SEQ ID NO: 165924 - DNA, 32 bp, Homo sapiens
  chr10:91589219-91589251
  hypo
cagccccgcgcttgcgcgccaatcacggccgt

SEQ ID NO: 165925 - DNA, 20 bp, Homo sapiens
  chr10:92072364-92072384
  hypo
acaggcgtgagccaccgcgc

SEQ ID NO: 165926 - DNA, 1140 bp, Homo sapiens; identical to SEQ ID NO: 119320
  chr10:92617016-92618156
  hypo

SEQ ID NO: 165927 - DNA, 30 bp, Homo sapiens; identical to SEQ ID NO: 80273
  chr10:92663305-92663335
  hypo

SEQ ID NO: 165928 - DNA, 333 bp, Homo sapiens; identical to SEQ ID NO: 80274
  chr10:92913457-92913790
  hypo

SEQ ID NO: 165929 - DNA, 30 bp, Homo sapiens
  chr10:93038109-93038139
  hypo
actatttgtttactcgtcaacagattgcac

SEQ ID NO: 165930 - DNA, 79 bp, Homo sapiens
  chr10:93168926-93169005
  hypo
cttgcttttaacaggcgatacagcgcattcttactctcttttctcctagatcagcaggtgtccccgccgctccagtaga

SEQ ID NO: 165931 - DNA, 30 bp, Homo sapiens
  chr10:93169230-93169260
  hypo
gacagcaaagggttgcggggagagagcaaa

SEQ ID NO: 165932 - DNA, 26 bp, Homo sapiens
  chr10:93561512-93561538
  hypo
gccactgcgcccggccaggaatgatt

SEQ ID NO: 165933 - DNA, 30 bp, Homo sapiens
  chr10:93562818-93562848
  hypo
ccgtagaggccatggcgttcttttccaagt

SEQ ID NO: 165934 - DNA, 137 bp, Homo sapiens; identical to SEQ ID NO: 24403
  chr10:93567139-93567276
  hypo

SEQ ID NO: 165935 - DNA, 215 bp, Homo sapiens; identical to SEQ ID NO: 24404
  chr10:93572697-93572912
  hypo

SEQ ID NO: 165936 - DNA, 709 bp, Homo sapiens; identical to SEQ ID NO: 7490
  chr10:93647031-93647740
  hypo

SEQ ID NO: 165937 - DNA, 18 bp, Homo sapiens
  chr10:93682877-93682895
  hypo
gagcgaaactcggtcaaa

SEQ ID NO: 165938 - DNA, 30 bp, Homo sapiens
  chr10:93714337-93714367
  hypo
tgatgcagtctctgtcgcccaggctggagt

SEQ ID NO: 165939 - DNA, 43 bp, Homo sapiens; identical to SEQ ID NO: 80279
  chr10:93744095-93744138
  hypo

SEQ ID NO: 165940 - DNA, 30 bp, Homo sapiens; identical to SEQ ID NO: 80280
  chr10:93804883-93804913
  hypo

SEQ ID NO: 165941 - DNA, 320 bp, Homo sapiens; identical to SEQ ID NO: 80281
  chr10:93811839-93812159
  hypo

SEQ ID NO: 165942 - DNA, 38 bp, Homo sapiens; identical to SEQ ID NO: 24408
  chr10:93843637-93843675
  hypo

SEQ ID NO: 165943 - DNA, 19 bp, Homo sapiens
  chr10:93976815-93976834
  hypo
ttggctgggcatagtggta

SEQ ID NO: 165944 - DNA, 30 bp, Homo sapiens
  chr10:94019064-94019094
  hypo
aatatcatctatggccgggtgcgatggctc

SEQ ID NO: 165945 - DNA, 23 bp, Homo sapiens
  chr10:94093937-94093960
  hypo
ctctgtctcggaagaaagttggc

SEQ ID NO: 165946 - DNA, 17 bp, Homo sapiens
  chr10:94130492-94130509
  hypo
agaaatgaggccgggcg

SEQ ID NO: 165947 - DNA, 86 bp, Homo sapiens
  chr10:94156008-94156094
  hypo
agacagcaccgcactaagaataaaaagctgaacagagggtgtcaggtttctggtctggcacgcaaggagctcggcagtcgccactc

SEQ ID NO: 165948 - DNA, 78 bp, Homo sapiens
  chr10:94156299-94156377
  hypo
gtaagtaatgagctgcgggatggtcagtgtgcaggagcctgaaagtcaaaacctccagggggccgggcacggtcgttc

SEQ ID NO: 165949 - DNA, 38 bp, Homo sapiens; identical to SEQ ID NO: 80283
  chr10:94219876-94219914
  hypo

SEQ ID NO: 165950 - DNA, 38 bp, Homo sapiens; identical to SEQ ID NO: 24409
  chr10:94310595-94310633
  hypo

SEQ ID NO: 165951 - DNA, 32 bp, Homo sapiens
  chr10:94342631-94342663
  hypo
agtgctgggattccaggcgtgagccagcgtgc

SEQ ID NO: 165952 - DNA, 30 bp, Homo sapiens; identical to SEQ ID NO: 24410
  chr10:94429554-94429584
  hypo

SEQ ID NO: 165953 - DNA, 142 bp, Homo sapiens; identical to SEQ ID NO: 119341
  chr10:94448826-94448968
  hypo

SEQ ID NO: 165954 - DNA, 259 bp, Homo sapiens; identical to SEQ ID NO: 119342
  chr10:94449138-94449397
  hypo

SEQ ID NO: 165955 - DNA, 364 bp, Homo sapiens; identical to SEQ ID NO: 47421
  chr10:94449797-94450161
  hypo

SEQ ID NO: 165956 - DNA, 1225 bp, Homo sapiens; identical to SEQ ID NO: 119344
  chr10:94450377-94451602
  hypo

SEQ ID NO: 165957 - DNA, 28 bp, Homo sapiens
  chr10:94676999-94677027
  hypo
gtgtgggccactgcgcccaaatctaatt

SEQ ID NO: 165958 - DNA, 103 bp, Homo sapiens; identical to SEQ ID NO: 80289
  chr10:94770432-94770535
  hypo

SEQ ID NO: 165959 - DNA, 30 bp, Homo sapiens
  chr10:94795027-94795057
  hypo
tatgccttcagctatcgatatgaactttga

SEQ ID NO: 165960 - DNA, 30 bp, Homo sapiens; identical to SEQ ID NO: 80290
  chr10:94819544-94819574
  hypo

SEQ ID NO: 165961 - DNA, 31 bp, Homo sapiens; identical to SEQ ID NO: 80291
  chr10:94819875-94819906
  hypo

SEQ ID NO: 165962 - DNA, 1946 bp, Homo sapiens; identical to SEQ ID NO: 119355
  chr10:94833093-94835039
  hypo

SEQ ID NO: 165963 - DNA, 29 bp, Homo sapiens
  chr10:94888154-94888183
  hypo
ggcttgtccagctacgccttgatccttac

SEQ ID NO: 165964 - DNA, 23 bp, Homo sapiens
  chr10:94939631-94939654
  hypo
caggtgcggtggctcacgcctgt

SEQ ID NO: 165965 - DNA, 31 bp, Homo sapiens; identical to SEQ ID NO: 80294
  chr10:94973477-94973508
  hypo

SEQ ID NO: 165966 - DNA, 31 bp, Homo sapiens; identical to SEQ ID NO: 80295
  chr10:94981204-94981235
  hypo

SEQ ID NO: 165967 - DNA, 81 bp, Homo sapiens
  chr10:95143643-95143724
  hypo
gggccggctctaccccgtaggcctccacatagccaggattccattagaaccccatggatgctctcacgcagagcttgcaaa

SEQ ID NO: 165968 - DNA, 914 bp, Homo sapiens; identical to SEQ ID NO: 119363
  chr10:95753357-95754271
  hypo

SEQ ID NO: 165969 - DNA, 30 bp, Homo sapiens; identical to SEQ ID NO: 47436
  chr10:96066325-96066355
  hypo

SEQ ID NO: 165970 - DNA, 152 bp, Homo sapiens; identical to SEQ ID NO: 119365
  chr10:96122664-96122816
  hypo

SEQ ID NO: 165971 - DNA, 159 bp, Homo sapiens; identical to SEQ ID NO: 80300
  chr10:96154780-96154939
  hypo

SEQ ID NO: 165972 - DNA, 1667 bp, Homo sapiens; identical to SEQ ID NO: 119366
  chr10:96161936-96163603
  hypo

SEQ ID NO: 165973 - DNA, 19 bp, Homo sapiens
  chr10:96944423-96944442
  hypo
cagagcaagccttgtctca

SEQ ID NO: 165974 - DNA, 30 bp, Homo sapiens; identical to SEQ ID NO: 80303
  chr10:96953432-96953462
  hypo

SEQ ID NO: 165975 - DNA, 30 bp, Homo sapiens; identical to SEQ ID NO: 80304
  chr10:96991416-96991446
  hypo

SEQ ID NO: 165976 - DNA, 30 bp, Homo sapiens
  chr10:97042396-97042426
  hypo
ttcttaagaagtcatcgaggccaggcgtgg

SEQ ID NO: 165977 - DNA, 60 bp, Homo sapiens; identical to SEQ ID NO: 119368
  chr10:97050342-97050402
  hypo

SEQ ID NO: 165978 - DNA, 220 bp, Homo sapiens; identical to SEQ ID NO: 119369
  chr10:97051015-97051235
  hypo

SEQ ID NO: 165979 - DNA, 93 bp, Homo sapiens; identical to SEQ ID NO: 80306
  chr10:97096179-97096272
  hypo

SEQ ID NO: 165980 - DNA, 38 bp, Homo sapiens; identical to SEQ ID NO: 24416
  chr10:97118424-97118462
  hypo

SEQ ID NO: 165981 - DNA, 30 bp, Homo sapiens; identical to SEQ ID NO: 7509
  chr10:97208010-97208040
  hypo

SEQ ID NO: 165982 - DNA, 81 bp, Homo sapiens
  chr10:97317228-97317309
  hypo
atttacaaaaaaaccgggacttcagcagaactgagtcccacctcagcatcagccagcatcaccacccgcacacctgacttc

SEQ ID NO: 165983 - DNA, 27 bp, Homo sapiens
  chr10:97317758-97317785
  hypo
atataggccgggcaccgtggctcaagc

SEQ ID NO: 165984 - DNA, 192 bp, Homo sapiens; identical to SEQ ID NO: 119372
  chr10:97321200-97321392
  hypo

SEQ ID NO: 165985 - DNA, 80 bp, Homo sapiens
  chr10:97322743-97322823
  hypo
agtatttattgagcacgtctaggctgctatgcaccgtactatacttgtgctaagagctttacatgcgttaactcacatcc

SEQ ID NO: 165986 - DNA, 75 bp, Homo sapiens
  chr10:97326021-97326096
  hypo
aagtaaatctacaaacgcgtgcctcagggcacggaactgatttgaagatgatggaacgcccgagccaagaattcc

SEQ ID NO: 165987 - DNA, 45 bp, Homo sapiens; identical to SEQ ID NO: 80311
  chr10:97617585-97617630
  hypo

SEQ ID NO: 165988 - DNA, 30 bp, Homo sapiens; identical to SEQ ID NO: 7511
  chr10:97659562-97659592
  hypo

SEQ ID NO: 165989 - DNA, 95 bp, Homo sapiens
  chr10:97801081-97801176
  hypo
ctcagccacctgatacgtacctactctctcacttccctcaggcctttgcatgccttaccttatcatgaaacaaagtccacccatttctttttttt

SEQ ID NO: 165990 - DNA, 412 bp, Homo sapiens; identical to SEQ ID NO: 80313
  chr10:98129735-98130147
  hypo

SEQ ID NO: 165991 - DNA, 97 bp, Homo sapiens
  chr10:98144321-98144418
  hypo
cctcacctctgaacccgcatacctgagaagaagtgggccctgaagccgcgcttggagacggtgttgtcggacttgaactccacgcgcatgttgttgc

SEQ ID NO: 165992 - DNA, 96 bp, Homo sapiens
  chr10:98292765-98292861
  hypo
tattgtgtgaaacaatcgcataagatttagcattctctttaccattttttctccggtataggacgaggcacagcattgacacgacaaggaaagttg

SEQ ID NO: 165993 - DNA, 30 bp, Homo sapiens
  chr10:98338056-98338086
  hypo
taagtaaaatactgtcgtttccttaagaag

SEQ ID NO: 165994 - DNA, 39 bp, Homo sapiens; identical to SEQ ID NO: 80315
  chr10:98338544-98338583
  hypo

SEQ ID NO: 165995 - DNA, 137 bp, Homo sapiens; identical to SEQ ID NO: 24421
  chr10:98350861-98350998
  hypo

SEQ ID NO: 165996 - DNA, 30 bp, Homo sapiens; identical to SEQ ID NO: 80317
  chr10:98351470-98351500
  hypo

SEQ ID NO: 165997 - DNA, 30 bp, Homo sapiens
  chr10:98355093-98355123
  hypo
aacaagtatatggttcgatatacttggtga

SEQ ID NO: 165998 - DNA, 30 bp, Homo sapiens
  chr10:98363763-98363793
  hypo
acactgaggaggctccgggtgctggagcgg

SEQ ID NO: 165999 - DNA, 82 bp, Homo sapiens
  chr10:98364555-98364637
  hypo
cttgtaataaggggccggaccctttgacacaaaacaaaatgcaaagtacacactcaaaagtataattttttttttccccgag

SEQ ID NO: 166000 - DNA, 22 bp, Homo sapiens
  chr10:98365542-98365564
  hypo
tgtttattaaggaacatgagcc

SEQ ID NO: 166001 - DNA, 30 bp, Homo sapiens
  chr10:98370962-98370992
  hypo
ctcatctggagactccggctccaggtgtag

SEQ ID NO: 166002 - DNA, 177 bp, Homo sapiens; identical to SEQ ID NO: 80318
  chr10:98380114-98380291
  hypo

SEQ ID NO: 166003 - DNA, 31 bp, Homo sapiens; identical to SEQ ID NO: 24422
  chr10:98403875-98403906
  hypo

SEQ ID NO: 166004 - DNA, 145 bp, Homo sapiens; identical to SEQ ID NO: 80320
  chr10:98469422-98469567
  hypo

SEQ ID NO: 166005 - DNA, 96 bp, Homo sapiens; identical to SEQ ID NO: 80321
  chr10:98482589-98482685
  hypo

SEQ ID NO: 166006 - DNA, 121 bp, Homo sapiens
  chr10:98526398-98526519
  hypo
catctcaaaaaaataaatcaaatcaaatcaaatgaactatacattcattatggatgactcaaaaaggttgggtaaatattaaaagtaataagagacctaggaaggaaataaagaattatga

SEQ ID NO: 166007 - DNA, 91 bp, Homo sapiens; identical to SEQ ID NO: 80323
  chr10:98528135-98528226
  hypo

SEQ ID NO: 166008 - DNA, 24 bp, Homo sapiens
  chr10:98577449-98577473
  hypo
tttttttttttttttttgagacgg

SEQ ID NO: 166009 - DNA, 229 bp, Homo sapiens; identical to SEQ ID NO: 119385
  chr10:98593369-98593598
  hypo

SEQ ID NO: 166010 - DNA, 30 bp, Homo sapiens
  chr10:98594920-98594950
  hypo
gctgaaatttacaggcgtgagagccactgt

SEQ ID NO: 166011 - DNA, 30 bp, Homo sapiens; identical to SEQ ID NO: 24425
  chr10:98645908-98645938
  hypo

SEQ ID NO: 166012 - DNA, 35 bp, Homo sapiens; identical to SEQ ID NO: 80327
  chr10:98676069-98676104
  hypo

SEQ ID NO: 166013 - DNA, 30 bp, Homo sapiens; identical to SEQ ID NO: 80328
  chr10:98708806-98708836
  hypo

SEQ ID NO: 166014 - DNA, 46 bp, Homo sapiens; identical to SEQ ID NO: 80329
  chr10:98713008-98713054
  hypo

SEQ ID NO: 166015 - DNA, 30 bp, Homo sapiens; identical to SEQ ID NO: 24426
  chr10:98740820-98740850
  hypo

SEQ ID NO: 166016 - DNA, 55 bp, Homo sapiens
  chr10:98746416-98746471
  hypo
attattatagtgcagcgtgtacttgacttttccattgggccgctctacaaaaaaa

SEQ ID NO: 166017 - DNA, 30 bp, Homo sapiens
  chr10:98759614-98759644
  hypo
ccattaggccagaacgtccacaatccccag

SEQ ID NO: 166018 - DNA, 61 bp, Homo sapiens; identical to SEQ ID NO: 80331
  chr10:98982989-98983050
  hypo

SEQ ID NO: 166019 - DNA, 23 bp, Homo sapiens
  chr10:99042885-99042908
  hypo
cacccgcccggctgttactatgt

SEQ ID NO: 166020 - DNA, 38 bp, Homo sapiens
  chr10:99108578-99108616
  hypo
ttacaggcgtgagccaccgcgcccggccaacactatcc

SEQ ID NO: 166021 - DNA, 394 bp, Homo sapiens; identical to SEQ ID NO: 80333
  chr10:99206758-99207152
  hypo

SEQ ID NO: 166022 - DNA, 29 bp, Homo sapiens
  chr10:99207384-99207413
  hypo
atgaaaagtctgggccaggtgcggtggct

SEQ ID NO: 166023 - DNA, 31 bp, Homo sapiens; identical to SEQ ID NO: 80335
  chr10:99233071-99233102
  hypo

SEQ ID NO: 166024 - DNA, 252 bp, Homo sapiens; identical to SEQ ID NO: 80336
  chr10:99240757-99241009
  hypo

SEQ ID NO: 166025 - DNA, 337 bp, Homo sapiens; identical to SEQ ID NO: 47467
  chr10:99259372-99259709
  hypo

SEQ ID NO: 166026 - DNA, 22 bp, Homo sapiens
  chr10:99269408-99269430
  hypo
ttttttccccccaccctgagac

SEQ ID NO: 166027 - DNA, 30 bp, Homo sapiens; identical to SEQ ID NO: 80339
  chr10:99285190-99285220
  hypo

SEQ ID NO: 166028 - DNA, 125 bp, Homo sapiens
  chr10:99329946-99330071
  hypo
ctactgcctgtcaccgccggtgaacctgctgctggagcacacggaggaggagagcctggagccccccgagcctccacccagcgtgcgccgtgagttcccgctgaaggtgcgcctgtccacgggca

SEQ ID NO: 166029 - DNA, 30 bp, Homo sapiens; identical to SEQ ID NO: 24429
  chr10:99330432-99330462
  hypo

SEQ ID NO: 166030 - DNA, 30 bp, Homo sapiens; identical to SEQ ID NO: 24430
  chr10:99331793-99331823
  hypo

SEQ ID NO: 166031 - DNA, 30 bp, Homo sapiens; identical to SEQ ID NO: 80343
  chr10:99343435-99343465
  hypo

SEQ ID NO: 166032 - DNA, 329 bp, Homo sapiens; identical to SEQ ID NO: 80344
  chr10:99358762-99359091
  hypo

SEQ ID NO: 166033 - DNA, 31 bp, Homo sapiens; identical to SEQ ID NO: 24431
  chr10:99375942-99375973
  hypo

SEQ ID NO: 166034 - DNA, 123 bp, Homo sapiens; identical to SEQ ID NO: 119410
  chr10:99447291-99447414
  hypo

SEQ ID NO: 166035 - DNA, 23 bp, Homo sapiens
  chr10:99449195-99449218
  hypo
acagcgcccggcccgttaaaaag

SEQ ID NO: 166036 - DNA, 22 bp, Homo sapiens
  chr10:99451149-99451171
  hypo
aatggtacaagctgggcgccgt

SEQ ID NO: 166037 - DNA, 261 bp, Homo sapiens; identical to SEQ ID NO: 47471
  chr10:99474282-99474543
  hypo

SEQ ID NO: 166038 - DNA, 30 bp, Homo sapiens; identical to SEQ ID NO: 24434
  chr10:99481793-99481823
  hypo

SEQ ID NO: 166039 - DNA, 1080 bp, Homo sapiens; identical to SEQ ID NO: 119415
  chr10:99530901-99531981
  hypo

SEQ ID NO: 166040 - DNA, 30 bp, Homo sapiens; identical to SEQ ID NO: 80352
  chr10:99566060-99566090
  hypo

SEQ ID NO: 166041 - DNA, 192 bp, Homo sapiens; identical to SEQ ID NO: 80353
  chr10:99626198-99626390
  hypo

SEQ ID NO: 166042 - DNA, 31 bp, Homo sapiens; identical to SEQ ID NO: 80354
  chr10:99656697-99656728
  hypo

SEQ ID NO: 166043 - DNA, 30 bp, Homo sapiens; identical to SEQ ID NO: 80355
  chr10:99696017-99696047
  hypo

SEQ ID NO: 166044 - DNA, 318 bp, Homo sapiens; identical to SEQ ID NO: 47478
  chr10:99790021-99790339
  hypo

SEQ ID NO: 166045 - DNA, 322 bp, Homo sapiens; identical to SEQ ID NO: 47479
  chr10:99790437-99790759
  hypo

SEQ ID NO: 166046 - DNA, 260 bp, Homo sapiens; identical to SEQ ID NO: 7527
  chr10:99790917-99791177
  hypo

SEQ ID NO: 166047 - DNA, 30 bp, Homo sapiens
  chr10:99990538-99990568
  hypo
tcatggctttgctgccgctttccactttcc

SEQ ID NO: 166048 - DNA, 173 bp, Homo sapiens
  chr10:100013351-100013524
  hypo
ggacgaaagtcagtccggcccagattgtagatctgtgtggagaagcgcaataggcggcggtatccgtagggccagtccatgtgatccgcagacttggagaggcagttctcctcgtgggcacaatacagctggctgagcgggcggtcctccaagtaggccgtctcctgcactag

SEQ ID NO: 166049 - DNA, 30 bp, Homo sapiens; identical to SEQ ID NO: 80359
  chr10:100020680-100020710
  hypo

SEQ ID NO: 166050 - DNA, 31 bp, Homo sapiens; identical to SEQ ID NO: 24439
  chr10:100078103-100078134
  hypo

SEQ ID NO: 166051 - DNA, 79 bp, Homo sapiens
  chr10:100127559-100127638
  hypo
ttcactattaccaagcgaggccaggctgctctgggagtgtggcaggaggccgaaggcggctgcacgctgccgtaacaag

SEQ ID NO: 166052 - DNA, 30 bp, Homo sapiens
  chr10:100128047-100128077
  hypo
gagcctttcagacatcgctccctaatagct

SEQ ID NO: 166053 - DNA, 175 bp, Homo sapiens; identical to SEQ ID NO: 24440
  chr10:100170636-100170811
  hypo

SEQ ID NO: 166054 - DNA, 143 bp, Homo sapiens; identical to SEQ ID NO: 24441
  chr10:100171091-100171234
  hypo

SEQ ID NO: 166055 - DNA, 427 bp, Homo sapiens
  chr10:100178509-100178936
  hypo
gcagggctgcccccacggcaccggctgggctgtgtggctggcattcaaacctggcctctccagcccacagctctgcctcactttatcaccccacggggccacccaagcacacagactcctgtccctccctagaagtgaaggtaaaggtcacaggaattttctagcacttctgttgtacacacgtcctgggcacttctgagggcacggaggaaagctgggagcctgcaggccgggggagcagagcttgggctccggcttcctcacttacagcctcggtggccctggccatggcgtctgatctccggatcattgtgtctccatccgtacaacggggtcaggaatccctgccccagccactttacagggctgtgagggggtaactgagagaacagtggtggagagccccagtaaccgccctgccctatgg

SEQ ID NO: 166056 - DNA, 212 bp, Homo sapiens
  chr10:100194214-100194426
  hypo
ctcggatgctggcaacgtctgcactggccactgtgattcatgtaacaggcatctgccacctgcagcatttgccactgacaccatgacctatctgggctaaaatgactcatgaaacaatgtttgtgcatttgagaaatgcctcaatatgggtagttgctcatatcgccacaaaactaaagtcccagagcttcacactccgcagcttcccaatc

SEQ ID NO: 166057 - DNA, 87 bp, Homo sapiens; identical to SEQ ID NO: 80364
  chr10:100207453-100207540
  hypo

SEQ ID NO: 166058 - DNA, 64 bp, Homo sapiens
  chr10:100217101-100217165
  hypo
ctctggattatttcgcgctcggcaacccatttccccgggtgcccctgggcgagccatggatcct

SEQ ID NO: 166059 - DNA, 30 bp, Homo sapiens; identical to SEQ ID NO: 80365
  chr10:100248279-100248309
  hypo

SEQ ID NO: 166060 - DNA, 30 bp, Homo sapiens
  chr10:101156743-101156773
  hypo
tcagttaaatatgtacgtgtccgtgcatgt

SEQ ID NO: 166061 - DNA, 30 bp, Homo sapiens; identical to SEQ ID NO: 80366
  chr10:101194081-101194111
  hypo

SEQ ID NO: 166062 - DNA, 1501 bp, Homo sapiens; identical to SEQ ID NO: 119445
  chr10:101294528-101296029
  hypo

SEQ ID NO: 166063 - DNA, 158 bp, Homo sapiens; identical to SEQ ID NO: 47502
  chr10:101296558-101296716
  hypo

SEQ ID NO: 166064 - DNA, 629 bp, Homo sapiens; identical to SEQ ID NO: 47503
  chr10:101296737-101297366
  hypo

SEQ ID NO: 166065 - DNA, 30 bp, Homo sapiens; identical to SEQ ID NO: 47505
  chr10:101345350-101345380
  hypo

SEQ ID NO: 166066 - DNA, 30 bp, Homo sapiens; identical to SEQ ID NO: 47506
  chr10:101351688-101351718
  hypo

SEQ ID NO: 166067 - DNA, 241 bp, Homo sapiens; identical to SEQ ID NO: 80373
  chr10:101493072-101493313
  hypo

SEQ ID NO: 166068 - DNA, 44 bp, Homo sapiens
  chr10:101493372-101493416
  hypo
agagtgagactctgcctcaaaaaagaaaacgcctctcacttgtg

SEQ ID NO: 166069 - DNA, 30 bp, Homo sapiens
  chr10:101606010-101606040
  hypo
agataaggactgccgcgaggcctctccgtt

SEQ ID NO: 166070 - DNA, 25 bp, Homo sapiens
  chr10:101726505-101726530
  hypo
aacagagcgtggtggcgttttctct

SEQ ID NO: 166071 - DNA, 30 bp, Homo sapiens
  chr10:101759899-101759929
  hypo
gattagaatacttaccgttcagaatactta

SEQ ID NO: 166072 - DNA, 242 bp, Homo sapiens
  chr10:101769042-101769284
  hypo
cctgcagcaggaacgcgggtgtccgcgggtttctgcaaaactccaccatgaccaaagctgcatctccagctgaacaggtctaacccttgcttcggaagccatctgtccctgtctccctgacacagaatcacggcctcctatgccgtaaggctccgaacatctgtaaaatcagcggggtggactaacgcagaattctttttccagctctcaaaattccgcctcattgccggagtggcagggcg

SEQ ID NO: 166073 - DNA, 30 bp, Homo sapiens
  chr10:101771146-101771176
  hypo
aaaatatcaacgttcggagagtctttaaaa

SEQ ID NO: 166074 - DNA, 31 bp, Homo sapiens; identical to SEQ ID NO: 80375
  chr10:101873876-101873907
  hypo

SEQ ID NO: 166075 - DNA, 224 bp, Homo sapiens
  chr10:102180362-102180586
  hypo
tgcaggaggagaaagcgtcaaagatgattccttaccttttccttggtagcgctttcaattatgactaagtagttatttgtgcaagtatttgtttagctgccttccccacaagattataaacaaccctaggacagggatttatcttgaacatcttacttaggtacatgctgtagcagggtgtgtggcacatagtggtgtttaaaaacgatgtgttaaggctgggc

SEQ ID NO: 166076 - DNA, 30 bp, Homo sapiens; identical to SEQ ID NO: 47516
  chr10:102196220-102196250
  hypo

SEQ ID NO: 166077 - DNA, 30 bp, Homo sapiens; identical to SEQ ID NO: 80378
  chr10:102286164-102286194
  hypo

SEQ ID NO: 166078 - DNA, 204 bp, Homo sapiens; identical to SEQ ID NO: 80379
  chr10:102409485-102409689
  hypo

SEQ ID NO: 166079 - DNA, 385 bp, Homo sapiens; identical to SEQ ID NO: 47523
  chr10:102430676-102431061
  hypo

SEQ ID NO: 166080 - DNA, 375 bp, Homo sapiens; identical to SEQ ID NO: 119484
  chr10:102483870-102484245
  hypo

SEQ ID NO: 166081 - DNA, 292 bp, Homo sapiens; identical to SEQ ID NO: 7555
  chr10:102484269-102484561
  hypo

SEQ ID NO: 166082 - DNA, 522 bp, Homo sapiens; identical to SEQ ID NO: 119501
  chr10:102507767-102508289
  hypo

SEQ ID NO: 166083 - DNA, 477 bp, Homo sapiens; identical to SEQ ID NO: 47549
  chr10:102508341-102508818
  hypo

SEQ ID NO: 166084 - DNA, 638 bp, Homo sapiens; identical to SEQ ID NO: 119504
  chr10:102585767-102586405
  hypo

SEQ ID NO: 166085 - DNA, 30 bp, Homo sapiens
  chr10:102637397-102637427
  hypo
caggcacgccaaccgcggcacacaccatcg

SEQ ID NO: 166086 - DNA, 27 bp, Homo sapiens
  chr10:102668241-102668268
  hypo
ttaaacaactcttggccgggtgcagca

SEQ ID NO: 166087 - DNA, 30 bp, Homo sapiens; identical to SEQ ID NO: 80387
  chr10:102671206-102671236
  hypo

SEQ ID NO: 166088 - DNA, 30 bp, Homo sapiens
  chr10:102738304-102738334
  hypo
ctaggtatgaattccggagcattcctgaca

SEQ ID NO: 166089 - DNA, 204 bp, Homo sapiens; identical to SEQ ID NO: 80388
  chr10:102748644-102748848
  hypo

SEQ ID NO: 166090 - DNA, 30 bp, Homo sapiens; identical to SEQ ID NO: 80389
  chr10:102753813-102753843
  hypo

SEQ ID NO: 166091 - DNA, 31 bp, Homo sapiens; identical to SEQ ID NO: 80390
  chr10:102762723-102762754
  hypo

SEQ ID NO: 166092 - DNA, 318 bp, Homo sapiens; identical to SEQ ID NO: 80391
  chr10:102766307-102766625
  hypo

SEQ ID NO: 166093 - DNA, 263 bp, Homo sapiens; identical to SEQ ID NO: 80392
  chr10:102770158-102770421
  hypo

SEQ ID NO: 166094 - DNA, 382 bp, Homo sapiens; identical to SEQ ID NO: 119519
  chr10:102802619-102803001
  hypo

SEQ ID NO: 166095 - DNA, 599 bp, Homo sapiens; identical to SEQ ID NO: 119523
  chr10:102822295-102822894
  hypo

SEQ ID NO: 166096 - DNA, 62 bp, Homo sapiens; identical to SEQ ID NO: 24451
  chr10:102872321-102872383
  hypo

SEQ ID NO: 166097 - DNA, 121 bp, Homo sapiens; identical to SEQ ID NO: 119537
  chr10:102973523-102973644
  hypo

SEQ ID NO: 166098 - DNA, 2925 bp, Homo sapiens; identical to SEQ ID NO: 119538
  chr10:102975123-102978048
  hypo

SEQ ID NO: 166099 - DNA, 739 bp, Homo sapiens; identical to SEQ ID NO: 119541
  chr10:102982317-102983056
  hypo

SEQ ID NO: 166100 - DNA, 1008 bp, Homo sapiens; identical to SEQ ID NO: 119551
  chr10:102987928-102988936
  hypo

SEQ ID NO: 166101 - DNA, 999 bp, Homo sapiens; identical to SEQ ID NO: 119552
  chr10:102989239-102990238
  hypo

SEQ ID NO: 166102 - DNA, 31 bp, Homo sapiens; identical to SEQ ID NO: 24455
  chr10:103002233-103002264
  hypo

SEQ ID NO: 166103 - DNA, 89 bp, Homo sapiens
  chr10:103033096-103033185
  hypo
atcgtgcttttcaacatttgtaagcaggcggggaataaggtaagcttgtggactccgaggctcgtgtgcgcaggcgcacatgcatgcag

SEQ ID NO: 166104 - DNA, 466 bp, Homo sapiens; identical to SEQ ID NO: 119562
  chr10:103051149-103051615
  hypo

SEQ ID NO: 166105 - DNA, 153 bp, Homo sapiens
  chr10:103198985-103199138
  hypo
caaattggatgtgtgcctgagcgcttcatcctgggctgtaatttcatcttttagctaagaaccacaaggtacacgagcaaagcaccctgtaaacaataatactgtggaaaaaaaataaacaaggtcgtgtttctggtacgttgatccgatggt

SEQ ID NO: 166106 - DNA, 35 bp, Homo sapiens; identical to SEQ ID NO: 80404
  chr10:103259006-103259041
  hypo

SEQ ID NO: 166107 - DNA, 30 bp, Homo sapiens
  chr10:103327979-103328009
  hypo
ctgcagtgagtccgcgccccaccagagccc

SEQ ID NO: 166108 - DNA, 30 bp, Homo sapiens; identical to SEQ ID NO: 80405
  chr10:103334187-103334217
  hypo

SEQ ID NO: 166109 - DNA, 203 bp, Homo sapiens; identical to SEQ ID NO: 7591
  chr10:103348787-103348990
  hypo

SEQ ID NO: 166110 - DNA, 168 bp, Homo sapiens
  chr10:103372827-103372995
  hypo
agctggcccccagcccggggctagcacgcctccgtgatcacagcccccagcctgtggggctccagcctgctccccccaccctcaccccacccgggggccgagagcagattactgagaacaatttctttgtgactgtgtaattccctccgtgaccgcggcagtgggcag

SEQ ID NO: 166111 - DNA, 30 bp, Homo sapiens; identical to SEQ ID NO: 80407
  chr10:103374628-103374658
  hypo

SEQ ID NO: 166112 - DNA, 20 bp, Homo sapiens
  chr10:103386530-103386550
  hypo
caacgcgcccggccaggcat

SEQ ID NO: 166113 - DNA, 30 bp, Homo sapiens; identical to SEQ ID NO: 24457
  chr10:103411731-103411761
  hypo

SEQ ID NO: 166114 - DNA, 30 bp, Homo sapiens
  chr10:103418724-103418754
  hypo
agggctacaagtttccgctctaccatcagg

SEQ ID NO: 166115 - DNA, 272 bp, Homo sapiens; identical to SEQ ID NO: 80409
  chr10:103425892-103426164
  hypo

SEQ ID NO: 166116 - DNA, 30 bp, Homo sapiens
  chr10:103433182-103433212
  hypo
aggcagaatgtccccgaagtataagatgga

SEQ ID NO: 166117 - DNA, 30 bp, Homo sapiens
  chr10:103457448-103457478
  hypo
tgagccactgcccccggccctcattaatgg

SEQ ID NO: 166118 - DNA, 390 bp, Homo sapiens; identical to SEQ ID NO: 119572
  chr10:103535380-103535770
  hypo

SEQ ID NO: 166119 - DNA, 415 bp, Homo sapiens; identical to SEQ ID NO: 47609
  chr10:103535841-103536256
  hypo

SEQ ID NO: 166120 - DNA, 113 bp, Homo sapiens; identical to SEQ ID NO: 47610
  chr10:103536299-103536412
  hypo

SEQ ID NO: 166121 - DNA, 30 bp, Homo sapiens
  chr10:103546530-103546560
  hypo
cacccagcttcccccgcacccgagacagaa

SEQ ID NO: 166122 - DNA, 17 bp, Homo sapiens
  chr10:103548959-103548976
  hypo
tatgaagaaaatgaggc

SEQ ID NO: 166123 - DNA, 27 bp, Homo sapiens
  chr10:103549444-103549471
  hypo
tactggccaggcacagtggctcgtgct

SEQ ID NO: 166124 - DNA, 74 bp, Homo sapiens; identical to SEQ ID NO: 24461
  chr10:103553396-103553470
  hypo

SEQ ID NO: 166125 - DNA, 125 bp, Homo sapiens
  chr10:103555063-103555188
  hypo
atgcctcagtcgctgcgcaaacgtgacttcagttcatgtctaccgcccttaaatctacctgagctacctcacagatagaaccttgcaatttaaactaattaatcatgacgcgctgtgaacatctg

SEQ ID NO: 166126 - DNA, 130 bp, Homo sapiens; identical to SEQ ID NO: 80416
  chr10:103588892-103589022
  hypo

SEQ ID NO: 166127 - DNA, 31 bp, Homo sapiens; identical to SEQ ID NO: 24462
  chr10:103606761-103606792
  hypo

SEQ ID NO: 166128 - DNA, 30 bp, Homo sapiens
  chr10:103662679-103662709
  hypo
aaaatgaagcccatgcggagggtgaggcgg

SEQ ID NO: 166129 - DNA, 92 bp, Homo sapiens; identical to SEQ ID NO: 80418
  chr10:103720632-103720724
  hypo

SEQ ID NO: 166130 - DNA, 31 bp, Homo sapiens; identical to SEQ ID NO: 80419
  chr10:103752253-103752284
  hypo

SEQ ID NO: 166131 - DNA, 23 bp, Homo sapiens
  chr10:103814485-103814508
  hypo
ctcacacctgtaatccgaacact

SEQ ID NO: 166132 - DNA, 202 bp, Homo sapiens
  chr10:103817632-103817834
  hypo
cttggactagccatagcgccagtgcctgggaaggcacctgttacttagcagacgggcctttccctgaggaagttagagaacactctgcttcaccacctcttgttggaagcctgacatcagccaggcctacccgcagccaaccggaggcttaaacctctccgagatgctgtgcttcagcggtcacgctcctggttcactttcc

SEQ ID NO: 166133 - DNA, 16 bp, Homo sapiens
  chr10:103819076-103819092
  hypo
ccgggccaccatgccc

SEQ ID NO: 166134 - DNA, 30 bp, Homo sapiens; identical to SEQ ID NO: 24463
  chr10:103869733-103869763
  hypo

SEQ ID NO: 166135 - DNA, 43 bp, Homo sapiens; identical to SEQ ID NO: 24464
  chr10:103897006-103897049
  hypo

SEQ ID NO: 166136 - DNA, 23 bp, Homo sapiens
  chr10:103930134-103930157
  hypo
accgcgcccggccgagaagggag

SEQ ID NO: 166137 - DNA, 371 bp, Homo sapiens; identical to SEQ ID NO: 119596
  chr10:103985870-103986241
  hypo

SEQ ID NO: 166138 - DNA, 30 bp, Homo sapiens; identical to SEQ ID NO: 80423
  chr10:104139055-104139085
  hypo

SEQ ID NO: 166139 - DNA, 145 bp, Homo sapiens; identical to SEQ ID NO: 80424
  chr10:104140853-104140998
  hypo

SEQ ID NO: 166140 - DNA, 138 bp, Homo sapiens
  chr10:104161593-104161731
  hypo
gagcgtctggggctgcgcagcctggtagacacgtaccgacagacaacctcacccagtggcagcctcctgcgcagctacgaggtgggttggcctgtgccctgccccctccccagcctcctttcccgatctgagtccagg

SEQ ID NO: 166141 - DNA, 85 bp, Homo sapiens; identical to SEQ ID NO: 119606
  chr10:104170177-104170262
  hypo

SEQ ID NO: 166142 - DNA, 393 bp, Homo sapiens; identical to SEQ ID NO: 47628
  chr10:104170407-104170800
  hypo

SEQ ID NO: 166143 - DNA, 30 bp, Homo sapiens
  chr10:104183160-104183190
  hypo
cgggcagagtccggcgagtgcctcaatgga

SEQ ID NO: 166144 - DNA, 43 bp, Homo sapiens; identical to SEQ ID NO: 80427
  chr10:104198521-104198564
  hypo

SEQ ID NO: 166145 - DNA, 30 bp, Homo sapiens
  chr10:104211746-104211776
  hypo
ctcgcagactgtctcgaagtcctcccactc

SEQ ID NO: 166146 - DNA, 35 bp, Homo sapiens; identical to SEQ ID NO: 24468
  chr10:104230569-104230604
  hypo

SEQ ID NO: 166147 - DNA, 240 bp, Homo sapiens; identical to SEQ ID NO: 24469
  chr10:104239033-104239273
  hypo

SEQ ID NO: 166148 - DNA, 30 bp, Homo sapiens; identical to SEQ ID NO: 80430
  chr10:104265489-104265519
  hypo

SEQ ID NO: 166149 - DNA, 30 bp, Homo sapiens
  chr10:104265753-104265783
  hypo
gaccagtgtggggagcgtagccagacccta

SEQ ID NO: 166150 - DNA, 130 bp, Homo sapiens
  chr10:104384281-104384411
  hypo
attcttttaaaataacgtgaagtttccagcgggaaccagcaaatcaccaaaagcaaaaatggaggagcagctagggtttgtcctcatttttgatctggccatcccctcccccaaccgagtccaaaataag

SEQ ID NO: 166151 - DNA, 30 bp, Homo sapiens
  chr10:104415904-104415934
  hypo
ggccctagccctcccgggggcacatcctgg

SEQ ID NO: 166152 - DNA, 527 bp, Homo sapiens; identical to SEQ ID NO: 24470
  chr10:104416698-104417225
  hypo

SEQ ID NO: 166153 - DNA, 30 bp, Homo sapiens; identical to SEQ ID NO: 24471
  chr10:104455554-104455584
  hypo

SEQ ID NO: 166154 - DNA, 88 bp, Homo sapiens
  chr10:104456327-104456415
  hypo
ttttaaaatgcaaaaattcctgtcctcacggagcttaccttacagtgcaagagaaagctaataaataaaaatacgtctgatggcaata

SEQ ID NO: 166155 - DNA, 19 bp, Homo sapiens
  chr10:104581680-104581699
  hypo
ggagttttgctcttgtcgc

SEQ ID NO: 166156 - DNA, 19 bp, Homo sapiens
  chr10:104581938-104581957
  hypo
gcatgagccaccacacctg

SEQ ID NO: 166157 - DNA, 30 bp, Homo sapiens; identical to SEQ ID NO: 47640
  chr10:104595232-104595262
  hypo

SEQ ID NO: 166158 - DNA, 30 bp, Homo sapiens; identical to SEQ ID NO: 24473
  chr10:104596875-104596905
  hypo

SEQ ID NO: 166159 - DNA, 102 bp, Homo sapiens
  chr10:104737942-104738044
  hypo
gacgtaagccaccatgcctggacttttttttttttttttaagctccacttagagccatctcaaacatacgattttcaaaactggactcgattttttttttcc

SEQ ID NO: 166160 - DNA, 121 bp, Homo sapiens
  chr10:104746122-104746243
  hypo
gagtatgggtggtgatggaccatttgtaaagcctcagaagccaaactggaattaatgtgaaagttatagggaagttagtttcagcttaatcaaagtagaatttccaaaaagtagagccatt

SEQ ID NO: 166161 - DNA, 30 bp, Homo sapiens
  chr10:104758441-104758471
  hypo
ctattaggtttaggccggcagggtgactca

SEQ ID NO: 166162 - DNA, 30 bp, Homo sapiens
  chr10:104773348-104773378
  hypo
tccctttatccaagccgaaaactgtgacgc

SEQ ID NO: 166163 - DNA, 42 bp, Homo sapiens; identical to SEQ ID NO: 80437
  chr10:104793214-104793256
  hypo

SEQ ID NO: 166164 - DNA, 95 bp, Homo sapiens; identical to SEQ ID NO: 80438
  chr10:104812048-104812143
  hypo

SEQ ID NO: 166165 - DNA, 30 bp, Homo sapiens
  chr10:104831138-104831168
  hypo
gtattggggtgcaggcgccagcggtttgag

SEQ ID NO: 166166 - DNA, 30 bp, Homo sapiens; identical to SEQ ID NO: 80439
  chr10:104832107-104832137
  hypo

SEQ ID NO: 166167 - DNA, 30 bp, Homo sapiens; identical to SEQ ID NO: 80440
  chr10:104832342-104832372
  hypo

SEQ ID NO: 166168 - DNA, 30 bp, Homo sapiens; identical to SEQ ID NO: 24474
  chr10:104837126-104837156
  hypo

SEQ ID NO: 166169 - DNA, 30 bp, Homo sapiens; identical to SEQ ID NO: 24475
  chr10:104837439-104837469
  hypo

SEQ ID NO: 166170 - DNA, 337 bp, Homo sapiens; identical to SEQ ID NO: 80443
  chr10:104837796-104838133
  hypo

SEQ ID NO: 166171 - DNA, 30 bp, Homo sapiens
  chr10:104841949-104841979
  hypo
agcattgtcttgcctcgcttggaaggacgc

SEQ ID NO: 166172 - DNA, 32 bp, Homo sapiens; identical to SEQ ID NO: 80444
  chr10:104874861-104874893
  hypo

SEQ ID NO: 166173 - DNA, 22 bp, Homo sapiens
  chr10:104892588-104892610
  hypo
gagccaccgcgcctggccgcgg

SEQ ID NO: 166174 - DNA, 30 bp, Homo sapiens
  chr10:104934615-104934645
  hypo
gatgataggcttctcgacgatactttttca

SEQ ID NO: 166175 - DNA, 31 bp, Homo sapiens; identical to SEQ ID NO: 80445
  chr10:104947825-104947856
  hypo

SEQ ID NO: 166176 - DNA, 31 bp, Homo sapiens; identical to SEQ ID NO: 7607
  chr10:104951847-104951878
  hypo

SEQ ID NO: 166177 - DNA, 208 bp, Homo sapiens; identical to SEQ ID NO: 47643
  chr10:105036450-105036658
  hypo

SEQ ID NO: 166178 - DNA, 182 bp, Homo sapiens; identical to SEQ ID NO: 7609
  chr10:105036700-105036882
  hypo

SEQ ID NO: 166179 - DNA, 998 bp, Homo sapiens; identical to SEQ ID NO: 7610
  chr10:105036893-105037891
  hypo

SEQ ID NO: 166180 - DNA, 24 bp, Homo sapiens
  chr10:105119650-105119674
  hypo
taaaattgaacacagccgggcgtg

SEQ ID NO: 166181 - DNA, 147 bp, Homo sapiens; identical to SEQ ID NO: 80451
  chr10:105127014-105127161
  hypo

SEQ ID NO: 166182 - DNA, 30 bp, Homo sapiens; identical to SEQ ID NO: 24482
  chr10:105215408-105215438
  hypo

SEQ ID NO: 166183 - DNA, 30 bp, Homo sapiens; identical to SEQ ID NO: 24483
  chr10:105216247-105216277
  hypo

SEQ ID NO: 166184 - DNA, 30 bp, Homo sapiens; identical to SEQ ID NO: 80454
  chr10:105218271-105218301
  hypo

SEQ ID NO: 166185 - DNA, 34 bp, Homo sapiens; identical to SEQ ID NO: 80455
  chr10:105238591-105238625
  hypo

SEQ ID NO: 166186 - DNA, 30 bp, Homo sapiens
  chr10:105331456-105331486
  hypo
gccgtgtcttccaccgcatcaacgactcgg

SEQ ID NO: 166187 - DNA, 322 bp, Homo sapiens
  chr10:105345022-105345344
  hypo
gaggcggggacgatccgggtaggagacaaagggcgagctccccttcctccaggctcatgatggtgttgctaaggaatcacagacacctaaggtgagttctgggcgggacttggtcatcttgtcagtggcccttatatgtcacctgggagactcacctggggggtgaggcgagggaaagcgcggattattgagtttgatgcccagaatcagatcaacccatagtctcacagatacataaacagtccagaagcacacaacccactgaccactcaaaaatgagaggaaaaggccaggtgcggtggctcacgcctgtaatctcagc

SEQ ID NO: 166188 - DNA, 22 bp, Homo sapiens
  chr10:105345583-105345605
  hypo
cgtctcaaaaaaaaaaaaaaaa

SEQ ID NO: 166189 - DNA, 30 bp, Homo sapiens; identical to SEQ ID NO: 80458
  chr10:105350122-105350152
  hypo

SEQ ID NO: 166190 - DNA, 30 bp, Homo sapiens; identical to SEQ ID NO: 80459
  chr10:105362042-105362072
  hypo

SEQ ID NO: 166191 - DNA, 30 bp, Homo sapiens
  chr10:105363243-105363273
  hypo
ctccacgggctcctcgctcagctcaggctc

SEQ ID NO: 166192 - DNA, 145 bp, Homo sapiens
  chr10:105403458-105403603
  hypo
agaaacttctcatgacgagattcaatgccactcaatgctgtgtccgcccagcacatgtttgcacgacccactctcggggaaccactgatcttcttcaggtgaagcttggggtaaagaatctgcagaccaggccaggcgcggtggc

SEQ ID NO: 166193 - DNA, 200 bp, Homo sapiens
  chr10:105413584-105413784
  hypo
tcctccccacacagcccggagggcttgcctcaaggctcacccttctcagggagttctccggctcaccagcttcccgaggccccaccctcccacctcctgctgcccagctcccgcttttcttctgcttggggcacatagatgcatgcctgctttgcagtcgcagccccaccacgccctgtactcctcgctctgcctgtcta

SEQ ID NO: 166194 - DNA, 283 bp, Homo sapiens
  chr10:105436789-105437072
  hypo
ccgagtcttgcaatccgcctcctccctggctcagtctccctgagagccgcgagtgagtgatggagtcaatagcaacggactcaggacagacattcccctccccggacaacaaaatgtggaatgtctccttctctccagactggactcttgctatcggattatcaatgaatcaaccgccaactatttcgggagcatcaacggcccctggttgagaccatctgactctccaccctctgtctcaaagcatcagacacacaaccacagacaccgtccccagcattcc

SEQ ID NO: 166195 - DNA, 43 bp, Homo sapiens; identical to SEQ ID NO: 80462
  chr10:105440560-105440603
  hypo

SEQ ID NO: 166196 - DNA, 39 bp, Homo sapiens
  chr10:105487457-105487496
  hypo
cggaggcagaggacgcgtgggccacgagggcctcagaca

SEQ ID NO: 166197 - DNA, 30 bp, Homo sapiens
  chr10:105505794-105505824
  hypo
tgcagaaagcatcagcgcaccttggaggga

SEQ ID NO: 166198 - DNA, 30 bp, Homo sapiens
  chr10:105631970-105632000
  hypo
agaccagtacctcctcgccagctgtcattc

SEQ ID NO: 166199 - DNA, 66 bp, Homo sapiens
  chr10:105639323-105639389
  hypo
catgtgtgcaaggcccgtgcggctgggctgggagggcagggtaagcggggccgtgctgacctctgt

SEQ ID NO: 166200 - DNA, 16 bp, Homo sapiens
  chr10:105649757-105649773
  hypo
tggccaacttagtctt

SEQ ID NO: 166201 - DNA, 30 bp, Homo sapiens; identical to SEQ ID NO: 47654
  chr10:105694285-105694315
  hypo

SEQ ID NO: 166202 - DNA, 77 bp, Homo sapiens; identical to SEQ ID NO: 24485
  chr10:105725849-105725926
  hypo

SEQ ID NO: 166203 - DNA, 30 bp, Homo sapiens
  chr10:105877972-105878002
  hypo
actcagtgaggcaatcgctccggcatgcct

SEQ ID NO: 166204 - DNA, 77 bp, Homo sapiens; identical to SEQ ID NO: 80465
  chr10:106029645-106029722
  hypo

SEQ ID NO: 166205 - DNA, 76 bp, Homo sapiens; identical to SEQ ID NO: 80466
  chr10:106030046-106030122
  hypo

SEQ ID NO: 166206 - DNA, 30 bp, Homo sapiens
  chr10:106030671-106030701
  hypo
ttaatcacccatgaccgaagatccaaacat

SEQ ID NO: 166207 - DNA, 30 bp, Homo sapiens
  chr10:106031152-106031182
  hypo
tgtcattaactttgacgtatactgagctct

SEQ ID NO: 166208 - DNA, 36 bp, Homo sapiens; identical to SEQ ID NO: 80467
  chr10:106032650-106032686
  hypo

SEQ ID NO: 166209 - DNA, 30 bp, Homo sapiens
  chr10:106066360-106066390
  hypo
cttgcccaggtgttacgtagctagtgatga

SEQ ID NO: 166210 - DNA, 30 bp, Homo sapiens; identical to SEQ ID NO: 80468
  chr10:106075053-106075083
  hypo

SEQ ID NO: 166211 - DNA, 56 bp, Homo sapiens; identical to SEQ ID NO: 80469
  chr10:106075695-106075751
  hypo

SEQ ID NO: 166212 - DNA, 30 bp, Homo sapiens; identical to SEQ ID NO: 24487
  chr10:106094151-106094181
  hypo

SEQ ID NO: 166213 - DNA, 94 bp, Homo sapiens
  chr10:106094617-106094711
  hypo
gacgcagggaagagacgacattcagtctgtgtgatgtttgcgaagtctccttgcaaattaataaaccagcattctgattcgtacaccctcttct

SEQ ID NO: 166214 - DNA, 736 bp, Homo sapiens; identical to SEQ ID NO: 47660
  chr10:106097222-106097958
  hypo

SEQ ID NO: 166215 - DNA, 681 bp, Homo sapiens; identical to SEQ ID NO: 119661
  chr10:106098025-106098706
  hypo

SEQ ID NO: 166216 - DNA, 139 bp, Homo sapiens; identical to SEQ ID NO: 119662
  chr10:106098909-106099048
  hypo

SEQ ID NO: 166217 - DNA, 336 bp, Homo sapiens; identical to SEQ ID NO: 47663
  chr10:106113480-106113816
  hypo

SEQ ID NO: 166218 - DNA, 95 bp, Homo sapiens
  chr10:106174642-106174737
  hypo
tataaactcttcgaaaacagaaaaggtcttctctgaattgttaaaaagaccaagggttgtctctgaacactccccacgcccgtgaatgggcagca

SEQ ID NO: 166219 - DNA, 37 bp, Homo sapiens; identical to SEQ ID NO: 80475
  chr10:106199913-106199950
  hypo

SEQ ID NO: 166220 - DNA, 1426 bp, Homo sapiens; identical to SEQ ID NO: 47666
  chr10:106399491-106400917
  hypo

SEQ ID NO: 166221 - DNA, 110 bp, Homo sapiens; identical to SEQ ID NO: 7618
  chr10:106401322-106401432
  hypo

SEQ ID NO: 166222 - DNA, 680 bp, Homo sapiens; identical to SEQ ID NO: 7619
  chr10:106401510-106402190
  hypo

SEQ ID NO: 166223 - DNA, 30 bp, Homo sapiens
  chr10:108307190-108307220
  hypo
aaatttactaattaccgtgacagatcactg

SEQ ID NO: 166224 - DNA, 38 bp, Homo sapiens
  chr10:111668072-111668110
  hypo
agatgacaggctgggcgcagtggctcacgcctttaatt

SEQ ID NO: 166225 - DNA, 42 bp, Homo sapiens; identical to SEQ ID NO: 24491
  chr10:111674529-111674571
  hypo

SEQ ID NO: 166226 - DNA, 188 bp, Homo sapiens; identical to SEQ ID NO: 80480
  chr10:111684021-111684209
  hypo

SEQ ID NO: 166227 - DNA, 33 bp, Homo sapiens; identical to SEQ ID NO: 80481
  chr10:111696449-111696482
  hypo

SEQ ID NO: 166228 - DNA, 30 bp, Homo sapiens
  chr10:111755326-111755356
  hypo
tttcgcttaactccccgtgcctaaaacctc

SEQ ID NO: 166229 - DNA, 767 bp, Homo sapiens; identical to SEQ ID NO: 47685
  chr10:111767115-111767882
  hypo

SEQ ID NO: 166230 - DNA, 30 bp, Homo sapiens
  chr10:111867519-111867549
  hypo
gcatgcagtacagcacgcagcacgtagtcg

SEQ ID NO: 166231 - DNA, 30 bp, Homo sapiens
  chr10:111907319-111907349
  hypo
gcaccacccaccagacggtgtgatgctgcg

SEQ ID NO: 166232 - DNA, 330 bp, Homo sapiens
  chr10:111921292-111921622
  hypo
gctgggatttataggcgtgaaccaccatgcccaactgtcaatcagttatcaaccaggatgccaggaccattcaatggtgaaaataagagtcttttcaacaaatggtgctggtgcaaatggagattgacatgcaaagacaggtcaggactacacttcgtgtttcctgtgtccggtgtcaatgtgtgaagctgccttggattaaacatccaacgagaaaggaaaaaccctcgtctcctcttcctgggatcccagccgccagagcaggggcaccaggcagtactcagcaccacctaaagaagtgcctgtgctttgacccggcaattccacttc

SEQ ID NO: 166233 - DNA, 40 bp, Homo sapiens; identical to SEQ ID NO: 24494
  chr10:111946084-111946124
  hypo

SEQ ID NO: 166234 - DNA, 202 bp, Homo sapiens; identical to SEQ ID NO: 80484
  chr10:111987862-111988064
  hypo

SEQ ID NO: 166235 - DNA, 43 bp, Homo sapiens; identical to SEQ ID NO: 80485
  chr10:112030547-112030590
  hypo

SEQ ID NO: 166236 - DNA, 267 bp, Homo sapiens; identical to SEQ ID NO: 80486
  chr10:112170715-112170982
  hypo

SEQ ID NO: 166237 - DNA, 41 bp, Homo sapiens
  chr10:112326385-112326426
  hypo
tgctgggattacacgcttgagccactcgaccaggcctattt

SEQ ID NO: 166238 - DNA, 386 bp, Homo sapiens; identical to SEQ ID NO: 119699
  chr10:112327396-112327782
  hypo

SEQ ID NO: 166239 - DNA, 77 bp, Homo sapiens; identical to SEQ ID NO: 7640
  chr10:112328694-112328771
  hypo

SEQ ID NO: 166240 - DNA, 40 bp, Homo sapiens; identical to SEQ ID NO: 7641
  chr10:112333463-112333503
  hypo

SEQ ID NO: 166241 - DNA, 69 bp, Homo sapiens; identical to SEQ ID NO: 7642
  chr10:112335092-112335161
  hypo

SEQ ID NO: 166242 - DNA, 73 bp, Homo sapiens; identical to SEQ ID NO: 7643
  chr10:112337177-112337250
  hypo

SEQ ID NO: 166243 - DNA, 81 bp, Homo sapiens; identical to SEQ ID NO: 7644
  chr10:112337591-112337672
  hypo

SEQ ID NO: 166244 - DNA, 80 bp, Homo sapiens; identical to SEQ ID NO: 7645
  chr10:112338384-112338464
  hypo

SEQ ID NO: 166245 - DNA, 119 bp, Homo sapiens; identical to SEQ ID NO: 7646
  chr10:112340660-112340779
  hypo

SEQ ID NO: 166246 - DNA, 177 bp, Homo sapiens; identical to SEQ ID NO: 7647
  chr10:112341679-112341856
  hypo

SEQ ID NO: 166247 - DNA, 82 bp, Homo sapiens; identical to SEQ ID NO: 7648
  chr10:112342318-112342400
  hypo

SEQ ID NO: 166248 - DNA, 166 bp, Homo sapiens; identical to SEQ ID NO: 7649
  chr10:112343140-112343306
  hypo

SEQ ID NO: 166249 - DNA, 123 bp, Homo sapiens; identical to SEQ ID NO: 7650
  chr10:112343597-112343720
  hypo

SEQ ID NO: 166250 - DNA, 215 bp, Homo sapiens; identical to SEQ ID NO: 7651
  chr10:112343939-112344154
  hypo

SEQ ID NO: 166251 - DNA, 388 bp, Homo sapiens; identical to SEQ ID NO: 7652
  chr10:112349361-112349749
  hypo

SEQ ID NO: 166252 - DNA, 162 bp, Homo sapiens; identical to SEQ ID NO: 7653
  chr10:112350168-112350330
  hypo

SEQ ID NO: 166253 - DNA, 143 bp, Homo sapiens; identical to SEQ ID NO: 7654
  chr10:112350747-112350890
  hypo

SEQ ID NO: 166254 - DNA, 30 bp, Homo sapiens
  chr10:112351698-112351728
  hypo
gcgtggttccatttacgctgagtaaacaaa

SEQ ID NO: 166255 - DNA, 152 bp, Homo sapiens; identical to SEQ ID NO: 7655
  chr10:112352829-112352981
  hypo

SEQ ID NO: 166256 - DNA, 154 bp, Homo sapiens; identical to SEQ ID NO: 7656
  chr10:112356154-112356308
  hypo

SEQ ID NO: 166257 - DNA, 153 bp, Homo sapiens; identical to SEQ ID NO: 7657
  chr10:112357895-112358048
  hypo

SEQ ID NO: 166258 - DNA, 17 bp, Homo sapiens
  chr10:112359152-112359169
  hypo
actttttgttcttataa

SEQ ID NO: 166259 - DNA, 160 bp, Homo sapiens; identical to SEQ ID NO: 7658
  chr10:112359410-112359570
  hypo

SEQ ID NO: 166260 - DNA, 109 bp, Homo sapiens; identical to SEQ ID NO: 7659
  chr10:112360195-112360304
  hypo

SEQ ID NO: 166261 - DNA, 110 bp, Homo sapiens; identical to SEQ ID NO: 7660
  chr10:112360778-112360888
  hypo

SEQ ID NO: 166262 - DNA, 543 bp, Homo sapiens; identical to SEQ ID NO: 7661
  chr10:112361393-112361936
  hypo

SEQ ID NO: 166263 - DNA, 818 bp, Homo sapiens; identical to SEQ ID NO: 7662
  chr10:112362230-112363048
  hypo

SEQ ID NO: 166264 - DNA, 405 bp, Homo sapiens; identical to SEQ ID NO: 7663
  chr10:112363987-112364392
  hypo

SEQ ID NO: 166265 - DNA, 15 bp, Homo sapiens
  chr10:112395018-112395033
  hypo
ttagagactgagtct

SEQ ID NO: 166266 - DNA, 1575 bp, Homo sapiens; identical to SEQ ID NO: 119725
  chr10:112402938-112404513
  hypo

SEQ ID NO: 166267 - DNA, 632 bp, Homo sapiens; identical to SEQ ID NO: 7665
  chr10:112431814-112432446
  hypo

SEQ ID NO: 166268 - DNA, 31 bp, Homo sapiens; identical to SEQ ID NO: 80516
  chr10:112459871-112459902
  hypo

SEQ ID NO: 166269 - DNA, 347 bp, Homo sapiens; identical to SEQ ID NO: 80517
  chr10:112524227-112524574
  hypo

SEQ ID NO: 166270 - DNA, 225 bp, Homo sapiens
  chr10:112540575-112540800
  hypo
acaagaacccattctcggtcagtaacccgaaccctctgcttccttcacctgccagtctccagctggctcaactgcaggcccagctcaccctccaccggctgaagctggcacagacagctgtcaccaacaacactgcagccgccacagtcctgaaccaagtcctctccaaagtggccatgtcccagcctctcttcaatcaactgaggcatccgtctgtgatcactg

SEQ ID NO: 166271 - DNA, 167 bp, Homo sapiens; identical to SEQ ID NO: 80518
  chr10:112553599-112553766
  hypo

SEQ ID NO: 166272 - DNA, 44 bp, Homo sapiens; identical to SEQ ID NO: 80519
  chr10:112595365-112595409
  hypo

SEQ ID NO: 166273 - DNA, 30 bp, Homo sapiens; identical to SEQ ID NO: 24525
  chr10:112696771-112696801
  hypo

SEQ ID NO: 166274 - DNA, 30 bp, Homo sapiens
  chr10:112724699-112724729
  hypo
ccactctttaccttcgctttaatcgtataa

SEQ ID NO: 166275 - DNA, 36 bp, Homo sapiens
  chr10:112761501-112761537
  hypo
tttaataaggtcaggcgctgtagctcatgcttgtaa

SEQ ID NO: 166276 - DNA, 29 bp, Homo sapiens
  chr10:112838325-112838354
  hypo
gcggcggcggcggcccgcagccggccgag

SEQ ID NO: 166277 - DNA, 30 bp, Homo sapiens; identical to SEQ ID NO: 7669
  chr10:113005648-113005678
  hypo

SEQ ID NO: 166278 - DNA, 30 bp, Homo sapiens; identical to SEQ ID NO: 7670
  chr10:113134325-113134355
  hypo

SEQ ID NO: 166279 - DNA, 30 bp, Homo sapiens
  chr10:113749330-113749360
  hypo
ctggcaaattgcctgcgcggctctttcctc

SEQ ID NO: 166280 - DNA, 30 bp, Homo sapiens; identical to SEQ ID NO: 80524
  chr10:114037461-114037491
  hypo

SEQ ID NO: 166281 - DNA, 30 bp, Homo sapiens
  chr10:114143660-114143690
  hypo
aactcatccaccaggcgcggtggttcatgc

SEQ ID NO: 166282 - DNA, 30 bp, Homo sapiens
  chr10:114163595-114163625
  hypo
caatctaaatacccacgatgaaataaagtc

SEQ ID NO: 166283 - DNA, 211 bp, Homo sapiens; identical to SEQ ID NO: 24528
  chr10:114200385-114200596
  hypo

SEQ ID NO: 166284 - DNA, 30 bp, Homo sapiens
  chr10:114224029-114224059
  hypo
gatgggcgtgagccacggcgcctggccaaa

SEQ ID NO: 166285 - DNA, 107 bp, Homo sapiens; identical to SEQ ID NO: 80526
  chr10:114252633-114252740
  hypo

SEQ ID NO: 166286 - DNA, 30 bp, Homo sapiens; identical to SEQ ID NO: 47732
  chr10:114280686-114280716
  hypo

SEQ ID NO: 166287 - DNA, 30 bp, Homo sapiens; identical to SEQ ID NO: 47733
  chr10:114319364-114319394
  hypo

SEQ ID NO: 166288 - DNA, 74 bp, Homo sapiens; identical to SEQ ID NO: 80529
  chr10:114343130-114343204
  hypo

SEQ ID NO: 166289 - DNA, 22 bp, Homo sapiens
  chr10:114350979-114351001
  hypo
gttagaagagatactgttgacc

SEQ ID NO: 166290 - DNA, 22 bp, Homo sapiens
  chr10:114351300-114351322
  hypo
cgaagaagagatactttactta

SEQ ID NO: 166291 - DNA, 97 bp, Homo sapiens; identical to SEQ ID NO: 80532
  chr10:114410444-114410541
  hypo

SEQ ID NO: 166292 - DNA, 30 bp, Homo sapiens
  chr10:114429965-114429995
  hypo
ggagggctcctgcgtcgtgagctgtaacga

SEQ ID NO: 166293 - DNA, 30 bp, Homo sapiens
  chr10:114430239-114430269
  hypo
aggatttatgggtttcgaaaccaatgtatt

SEQ ID NO: 166294 - DNA, 48 bp, Homo sapiens
  chr10:114498663-114498711
  hypo
ctagccgcatgatcccgcagtgagggcttaacacgttccacggcctga

SEQ ID NO: 166295 - DNA, 30 bp, Homo sapiens
  chr10:114535969-114535999
  hypo
agtgtgttcaacacgcgctgcaccgtgtta

SEQ ID NO: 166296 - DNA, 233 bp, Homo sapiens
  chr10:114542053-114542286
  hypo
gagtggaacactaaaacctcacgccgacttggaggccacactggaaaaggatgttgcaatgacgcttggatcaggccaggccctgcgtgaaggccctttggcgtctttttcggcgtggaagcgcatgctctttctccttgaggagaagataggaccttagcgtttccaaggccttctgagtgaaaacatctgtatccgatctttcccgtcgcggcatattagtgaagtctggc

SEQ ID NO: 166297 - DNA, 30 bp, Homo sapiens
  chr10:114552834-114552864
  hypo
gaggctgccttttgccgtggctgtgttaag

SEQ ID NO: 166298 - DNA, 30 bp, Homo sapiens
  chr10:114570809-114570839
  hypo
agaggcggacggtagcgttatcactcaggg

SEQ ID NO: 166299 - DNA, 41 bp, Homo sapiens; identical to SEQ ID NO: 47734
  chr10:114571158-114571199
  hypo

SEQ ID NO: 166300 - DNA, 220 bp, Homo sapiens; identical to SEQ ID NO: 24529
  chr10:114571438-114571658
  hypo

SEQ ID NO: 166301 - DNA, 251 bp, Homo sapiens
  chr10:114591111-114591362
  hypo
ggggctgggaagaggcgctgggccatcggccacacctgagctaatattcctggcgcatcaggtgcttctcaagtgtttgtggacagacggctgccttggatgaaatggtattcaccaggcgtgtccttttactgtccagtttggtcaccaagattctcccctattttaagagggagctgagcagcttcacaaggctagtcttgtttggatgcgtagcacaatgaatttgtacccgccgagcctccagcgct

SEQ ID NO: 166302 - DNA, 229 bp, Homo sapiens; identical to SEQ ID NO: 80536
  chr10:114591691-114591920
  hypo

SEQ ID NO: 166303 - DNA, 34 bp, Homo sapiens; identical to SEQ ID NO: 7673
  chr10:114709863-114709897
  hypo

SEQ ID NO: 166304 - DNA, 57 bp, Homo sapiens; identical to SEQ ID NO: 119746
  chr10:114710114-114710171
  hypo

SEQ ID NO: 166305 - DNA, 291 bp, Homo sapiens; identical to SEQ ID NO: 119747
  chr10:114710659-114710950
  hypo

SEQ ID NO: 166306 - DNA, 47 bp, Homo sapiens; identical to SEQ ID NO: 47740
  chr10:114711333-114711380
  hypo

SEQ ID NO: 166307 - DNA, 959 bp, Homo sapiens; identical to SEQ ID NO: 119750
  chr10:114711917-114712876
  hypo

SEQ ID NO: 166308 - DNA, 30 bp, Homo sapiens; identical to SEQ ID NO: 47743
  chr10:114726827-114726857
  hypo

SEQ ID NO: 166309 - DNA, 325 bp, Homo sapiens
  chr10:114752044-114752369
  hypo
gcagtgaatgtgcgtcggtagcatagattccattccgcacgccaccctcgcctccgccccccagccctgggagggatgcatgccctccgggagacacccagacccgacagagaggcctttgttggagctggaggtgagaatctgtgggcgttgggattcctgggttcgagttccagctcactgccaattgcccgagtgctgggcgaacatttctggaatcaaaaggagtgcagcctgcccagcagggcctacgggagccggaggctgcagggtgctaagattgcgttatctttaccaagtgcccggagctcctgggagggaagag

SEQ ID NO: 166310 - DNA, 30 bp, Homo sapiens; identical to SEQ ID NO: 47744
  chr10:114773911-114773941
  hypo

SEQ ID NO: 166311 - DNA, 31 bp, Homo sapiens; identical to SEQ ID NO: 24532
  chr10:114817202-114817233
  hypo

SEQ ID NO: 166312 - DNA, 148 bp, Homo sapiens
  chr10:114834270-114834418
  hypo
agggacatttaaaagagttgtcggactgtgcgggaccttggcacactgctgacggctgcacactcatcactgcggggctcatcacacattgacaccagcaccatattttgctgggtttcctgatctcggttgagtatttggatttgaa

SEQ ID NO: 166313 - DNA, 87 bp, Homo sapiens
  chr10:114858114-114858201
  hypo
tgtgccctgatttaacgtatgagggtcaagtgtgagacgtgggatttttatttaaaaaattgtattttaggccgggctcggtggctc

SEQ ID NO: 166314 - DNA, 30 bp, Homo sapiens
  chr10:114858546-114858576
  hypo
attgtaatataaattcgtattattgccacc

SEQ ID NO: 166315 - DNA, 103 bp, Homo sapiens; identical to SEQ ID NO: 80547
  chr10:114867547-114867650
  hypo

SEQ ID NO: 166316 - DNA, 139 bp, Homo sapiens
  chr10:114868047-114868186
  hypo
ggtgaagtggggaatcgcttttgtcccttccctgatgaatgggtgtaaagtgttcactgaacctggaaacacctccttttgtgtccggtgctctcctaacacaggccgttaaacttggggcaatcgctcatggtggggg

SEQ ID NO: 166317 - DNA, 110 bp, Homo sapiens
  chr10:114868453-114868563
  hypo
tctgcagggccagggcgctccatttcttcccaggactgcctgccctggtcgtggccgtcatttctgcagggaggttgctgttttcctccaggcatcggagttaaaaagca

SEQ ID NO: 166318 - DNA, 322 bp, Homo sapiens
  chr10:114877411-114877733
  hypo
gcgcttagtcaatgccgggaaacggcggtctgacagctaatagatatctctgccctcaattgtttagacattttttgtcttttgtgacattgaagaaaagacaaggaagggaatggaagcaactaaaaaatgtcaaaagatcaaaaaatcaatgggccgcaggaatgcaatctgtttaccggggtgtagctgctgtttctgctccgccacaagtccgaggcggttgtctggggcaggcaccgaagttgcgtcgcctccctccctgggagctgtgatacggcacacaaagcgggcacattagcttgctcgcccccaccccccg

SEQ ID NO: 166319 - DNA, 242 bp, Homo sapiens; identical to SEQ ID NO: 80549
  chr10:114878743-114878985
  hypo

SEQ ID NO: 166320 - DNA, 297 bp, Homo sapiens
  chr10:114902487-114902784
  hypo
accagtgaatggcagcgtcaacgtctcatttaaataatggtagtacagggaatagcttttaaatggttatcgtaaaacatatgattaacgtctgtggactgtttacttttcctctgcgaacattctttcaagtgtgcaaatggctcgatgtagggtccaagcccagctaatctgtttggtttttgtaatagagagaaagcaatgtctgcatgaaaatgtcacccagggagacttaatttacagattaaaagcttcctgaatgaattttttaaaaaatgaagtcgttttcgtccacga

SEQ ID NO: 166321 - DNA, 42 bp, Homo sapiens; identical to SEQ ID NO: 80550
  chr10:114913257-114913299
  hypo

SEQ ID NO: 166322 - DNA, 238 bp, Homo sapiens; identical to SEQ ID NO: 80551
  chr10:114925527-114925765
  hypo

SEQ ID NO: 166323 - DNA, 22 bp, Homo sapiens
  chr10:114987697-114987719
  hypo
tgggcacagtggctcacgccta

SEQ ID NO: 166324 - DNA, 30 bp, Homo sapiens
  chr10:115014266-115014296
  hypo
atgcccatccccttgcggatctggttggat

SEQ ID NO: 166325 - DNA, 30 bp, Homo sapiens; identical to SEQ ID NO: 80553
  chr10:115059328-115059358
  hypo

SEQ ID NO: 166326 - DNA, 205 bp, Homo sapiens; identical to SEQ ID NO: 80554
  chr10:115201244-115201449
  hypo

SEQ ID NO: 166327 - DNA, 25 bp, Homo sapiens
  chr10:115258211-115258236
  hypo
tgagccaccgcgcccggcctcaatt

SEQ ID NO: 166328 - DNA, 30 bp, Homo sapiens
  chr10:115289253-115289283
  hypo
ctgagaaaggagagccgagagataagagaa

SEQ ID NO: 166329 - DNA, 31 bp, Homo sapiens; identical to SEQ ID NO: 80555
  chr10:115350627-115350658
  hypo

SEQ ID NO: 166330 - DNA, 31 bp, Homo sapiens; identical to SEQ ID NO: 24534
  chr10:115370274-115370305
  hypo

SEQ ID NO: 166331 - DNA, 84 bp, Homo sapiens; identical to SEQ ID NO: 80557
  chr10:115548280-115548364
  hypo

SEQ ID NO: 166332 - DNA, 30 bp, Homo sapiens
  chr10:115580927-115580957
  hypo
taatcactatttacacggtggatacagaac

SEQ ID NO: 166333 - DNA, 121 bp, Homo sapiens
  chr10:115585199-115585320
  hypo
caaccaatgagtcgtacaggttaaatgtgtgaatcgtatggtatgtgaatcatttctcaataaaactgttttaaaaacattttaaaatagagtttgggggccgggcacacgcctgtaatcc

SEQ ID NO: 166334 - DNA, 38 bp, Homo sapiens; identical to SEQ ID NO: 80558
  chr10:115612072-115612110
  hypo

SEQ ID NO: 166335 - DNA, 38 bp, Homo sapiens
  chr10:115671807-115671845
  hypo
cggttctcttaagtacgtgatttcgtgaagatagcaat

SEQ ID NO: 166336 - DNA, 258 bp, Homo sapiens; identical to SEQ ID NO: 119761
  chr10:115804303-115804561
  hypo

SEQ ID NO: 166337 - DNA, 853 bp, Homo sapiens; identical to SEQ ID NO: 119762
  chr10:115804635-115805488
  hypo

SEQ ID NO: 166338 - DNA, 126 bp, Homo sapiens
  chr10:115844821-115844947
  hypo
gtgggaacatgcaggcggacgctgcagcagctttggtgtgaagactgcatggtctgtgaacaaggtcaccaagtggagaagaataatgatcatcctggcctctcagaacagcgtggcacctgcaga

SEQ ID NO: 166339 - DNA, 30 bp, Homo sapiens
  chr10:115922493-115922523
  hypo
atgttctgcaaactccgtagataagagctc

SEQ ID NO: 166340 - DNA, 34 bp, Homo sapiens; identical to SEQ ID NO: 24537
  chr10:115925580-115925614
  hypo

SEQ ID NO: 166341 - DNA, 96 bp, Homo sapiens
  chr10:115940179-115940275
  hypo
catgctttaccgaagcgttgcgttttgtctgtttaaaaccggagtgtttttgtttgttctttgagtaagagtttcactcttgttgcccaggctgga

SEQ ID NO: 166342 - DNA, 27 bp, Homo sapiens
  chr10:116006272-116006299
  hypo
aaaaaaaaaaaacgagtatcatgggtt

SEQ ID NO: 166343 - DNA, 38 bp, Homo sapiens; identical to SEQ ID NO: 80565
  chr10:116007332-116007370
  hypo

SEQ ID NO: 166344 - DNA, 82 bp, Homo sapiens; identical to SEQ ID NO: 24538
  chr10:116011527-116011609
  hypo

SEQ ID NO: 166345 - DNA, 22 bp, Homo sapiens
  chr10:116011848-116011870
  hypo
gccaccccgctggcctgttttt

SEQ ID NO: 166346 - DNA, 22 bp, Homo sapiens
  chr10:116023377-116023399
  hypo
gagccaccgtgcctggccgaat

SEQ ID NO: 166347 - DNA, 106 bp, Homo sapiens; identical to SEQ ID NO: 80569
  chr10:116028356-116028462
  hypo

SEQ ID NO: 166348 - DNA, 157 bp, Homo sapiens
  chr10:116034554-116034711
  hypo
tggcttaggatatgttttgaaggcagagcagtgagcggccgccactgaattggaggtgggtgtgtgagagaagaattgaggattttgacttgagccccagagtgaatagtggtgccatctcccgacatgggaaagatgacaacgggggaagagcacg

SEQ ID NO: 166349 - DNA, 351 bp, Homo sapiens
  chr10:116045865-116046216
  hypo
gggagctgctggtggcggtgcctgtgggggagtaccaggatgtgcctgacctggtctggagcctcgatggcattcccttccgtggtggccccaccctgacgggcagtgccttgcggcaggcggcagagcgtggcttcgggagcgccaccaggacaggccaggaccggccacgtagagtggtggttttgctcactgagtcacactccgaggatgaggttgcgggcccagcgcgtcacgcaagggcgcgagagctgctcctgctgggtgtaggcagtgaggccgtgcgggcagagctggaggagatcacaggcagcccaaagcatgtgatggtctactcggatcctcaggatc

SEQ ID NO: 166350 - DNA, 144 bp, Homo sapiens
  chr10:116050041-116050185
  hypo
gaatgagggcagctgcgtcctgcagaatgggagctaccgctgcaagtgtcgggatggctgggagggcccccactgcgagaaccgtgagtggagctcttgctctgtatgtgtgagccagggatggtattgcgagtcctgccaagt

SEQ ID NO: 166351 - DNA, 30 bp, Homo sapiens
  chr10:116050484-116050514
  hypo
gtacagggatgtagacggaggcagggatgg

SEQ ID NO: 166352 - DNA, 30 bp, Homo sapiens
  chr10:116080828-116080858
  hypo
aggggaatcccatcccgctcccagtcaccg

SEQ ID NO: 166353 - DNA, 31 bp, Homo sapiens; identical to SEQ ID NO: 80571
  chr10:116105879-116105910
  hypo

SEQ ID NO: 166354 - DNA, 31 bp, Homo sapiens; identical to SEQ ID NO: 80572
  chr10:116123045-116123076
  hypo

SEQ ID NO: 166355 - DNA, 39 bp, Homo sapiens; identical to SEQ ID NO: 80573
  chr10:116188467-116188506
  hypo

SEQ ID NO: 166356 - DNA, 152 bp, Homo sapiens
  chr10:116190954-116191106
  hypo
tgctggcaacaggagcggggagcaggtagggatcacaggcacagcagcgcggagccggcagggccacctcctcctctacacacaagcatgtggcacttagcgcgccaacacacacctgctcagtttcacagggaacacgacacagcttttca

SEQ ID NO: 166357 - DNA, 187 bp, Homo sapiens; identical to SEQ ID NO: 80574
  chr10:116203665-116203852
  hypo

SEQ ID NO: 166358 - DNA, 31 bp, Homo sapiens; identical to SEQ ID NO: 80575
  chr10:116228469-116228500
  hypo

SEQ ID NO: 166359 - DNA, 39 bp, Homo sapiens; identical to SEQ ID NO: 24541
  chr10:116282621-116282660
  hypo

SEQ ID NO: 166360 - DNA, 30 bp, Homo sapiens
  chr10:116303368-116303398
  hypo
ttgagaactctcatacgttctttacacaac

SEQ ID NO: 166361 - DNA, 96 bp, Homo sapiens
  chr10:116304715-116304811
  hypo
cgctgagaaagatggcggtagctatgagggagccggtctgccacttacctccaggactttccctgtgataaactggtgacacgcctcacatttcac

SEQ ID NO: 166362 - DNA, 197 bp, Homo sapiens; identical to SEQ ID NO: 80577
  chr10:116331008-116331205
  hypo

SEQ ID NO: 166363 - DNA, 27 bp, Homo sapiens
  chr10:116394180-116394207
  hypo
gcgcccggcctcaatttttcttttact

SEQ ID NO: 166364 - DNA, 20 bp, Homo sapiens
  chr10:116495235-116495255
  hypo
tgttgttgttttgagacgga

SEQ ID NO: 166365 - DNA, 934 bp, Homo sapiens; identical to SEQ ID NO: 47760
  chr10:116527399-116528333
  hypo

SEQ ID NO: 166366 - DNA, 30 bp, Homo sapiens
  chr10:116603660-116603690
  hypo
gttagatattgaaaccgtggaagcaattaa

SEQ ID NO: 166367 - DNA, 1450 bp, Homo sapiens; identical to SEQ ID NO: 119778
  chr10:116852171-116853621
  hypo

SEQ ID NO: 166368 - DNA, 31 bp, Homo sapiens; identical to SEQ ID NO: 7682
  chr10:117350835-117350866
  hypo

SEQ ID NO: 166369 - DNA, 18 bp, Homo sapiens
  chr10:117472085-117472103
  hypo
gaaatttgtggctgggcg

SEQ ID NO: 166370 - DNA, 90 bp, Homo sapiens; identical to SEQ ID NO: 80585
  chr10:118740857-118740947
  hypo

SEQ ID NO: 166371 - DNA, 31 bp, Homo sapiens; identical to SEQ ID NO: 24545
  chr10:118741274-118741305
  hypo

SEQ ID NO: 166372 - DNA, 34 bp, Homo sapiens; identical to SEQ ID NO: 80587
  chr10:118742172-118742206
  hypo

SEQ ID NO: 166373 - DNA, 24 bp, Homo sapiens
  chr10:118763413-118763437
  hypo
ttttttttggagatggagtttcgt

SEQ ID NO: 166374 - DNA, 572 bp, Homo sapiens; identical to SEQ ID NO: 119788
  chr10:118764186-118764758
  hypo

SEQ ID NO: 166375 - DNA, 181 bp, Homo sapiens; identical to SEQ ID NO: 47776
  chr10:118764979-118765160
  hypo

SEQ ID NO: 166376 - DNA, 1135 bp, Homo sapiens; identical to SEQ ID NO: 119800
  chr10:118896283-118897418
  hypo

SEQ ID NO: 166377 - DNA, 619 bp, Homo sapiens; identical to SEQ ID NO: 47787
  chr10:118897478-118898097
  hypo

SEQ ID NO: 166378 - DNA, 165 bp, Homo sapiens; identical to SEQ ID NO: 119813
  chr10:119000426-119000591
  hypo

SEQ ID NO: 166379 - DNA, 465 bp, Homo sapiens; identical to SEQ ID NO: 47798
  chr10:119000689-119001154
  hypo

SEQ ID NO: 166380 - DNA, 308 bp, Homo sapiens; identical to SEQ ID NO: 47799
  chr10:119001328-119001636
  hypo

SEQ ID NO: 166381 - DNA, 100 bp, Homo sapiens; identical to SEQ ID NO: 24551
  chr10:119180986-119181086
  hypo

SEQ ID NO: 166382 - DNA, 309 bp, Homo sapiens; identical to SEQ ID NO: 7706
  chr10:119256045-119256354
  hypo

SEQ ID NO: 166383 - DNA, 2020 bp, Homo sapiens; identical to SEQ ID NO: 47814
  chr10:119302458-119304478
  hypo

SEQ ID NO: 166384 - DNA, 530 bp, Homo sapiens; identical to SEQ ID NO: 119847
  chr10:119312661-119313191
  hypo

SEQ ID NO: 166385 - DNA, 103 bp, Homo sapiens; identical to SEQ ID NO: 80600
  chr10:119374700-119374803
  hypo

SEQ ID NO: 166386 - DNA, 30 bp, Homo sapiens; identical to SEQ ID NO: 24555
  chr10:119498852-119498882
  hypo

SEQ ID NO: 166387 - DNA, 205 bp, Homo sapiens; identical to SEQ ID NO: 80602
  chr10:119543605-119543810
  hypo

SEQ ID NO: 166388 - DNA, 76 bp, Homo sapiens
  chr10:119680911-119680987
  hypo
ccttatttatttttgtttgtgcgtgtttagtctccggcacctcccactagaatgcgagtgccacatccaacattag

SEQ ID NO: 166389 - DNA, 30 bp, Homo sapiens
  chr10:119777860-119777890
  hypo
tgtcagacaagatatcgaataatccggtct

SEQ ID NO: 166390 - DNA, 274 bp, Homo sapiens
  chr10:119806964-119807238
  hypo
ccggccgcgcctctgccgctatcagtgtgtgtgaccttggccgagtcatttcacctccatgagcctcagtgttttcacgagtaaaaaagccagttctacctcatgtctaagactccatcacgactctatgggctcgacgtcaaaaggacccccgtggggactcacactgtggtggactgtgcaaatcatgtggagaccatgccccaaacacgggtttcgagtttcaggggataatacatgtgcctttcctagcacaatgcggcacataaatctc

SEQ ID NO: 166391 - DNA, 64 bp, Homo sapiens; identical to SEQ ID NO: 80603
  chr10:119876201-119876265
  hypo

SEQ ID NO: 166392 - DNA, 31 bp, Homo sapiens; identical to SEQ ID NO: 24556
  chr10:119904561-119904592
  hypo

SEQ ID NO: 166393 - DNA, 48 bp, Homo sapiens; identical to SEQ ID NO: 24557
  chr10:120011732-120011780
  hypo

SEQ ID NO: 166394 - DNA, 190 bp, Homo sapiens; identical to SEQ ID NO: 80606
  chr10:120170437-120170627
  hypo

SEQ ID NO: 166395 - DNA, 30 bp, Homo sapiens
  chr10:120233262-120233292
  hypo
gtgcacagtattagccgggaatctgcccat

SEQ ID NO: 166396 - DNA, 30 bp, Homo sapiens; identical to SEQ ID NO: 47828
  chr10:120278928-120278958
  hypo

SEQ ID NO: 166397 - DNA, 30 bp, Homo sapiens
  chr10:120288168-120288198
  hypo
ccctggctatggagacggacttaggaacgg

SEQ ID NO: 166398 - DNA, 28 bp, Homo sapiens
  chr10:120457933-120457961
  hypo
gtgtgagccatcgcgcccagccgacatg

SEQ ID NO: 166399 - DNA, 31 bp, Homo sapiens; identical to SEQ ID NO: 24558
  chr10:120476537-120476568
  hypo

SEQ ID NO: 166400 - DNA, 17 bp, Homo sapiens
  chr10:120500413-120500430
  hypo
ggcgacagtgtgagatt

SEQ ID NO: 166401 - DNA, 442 bp, Homo sapiens; identical to SEQ ID NO: 119863
  chr10:120514799-120515241
  hypo

SEQ ID NO: 166402 - DNA, 42 bp, Homo sapiens; identical to SEQ ID NO: 80610
  chr10:120518463-120518505
  hypo

SEQ ID NO: 166403 - DNA, 31 bp, Homo sapiens; identical to SEQ ID NO: 80611
  chr10:120526070-120526101
  hypo

SEQ ID NO: 166404 - DNA, 35 bp, Homo sapiens; identical to SEQ ID NO: 80612
  chr10:120584842-120584877
  hypo

SEQ ID NO: 166405 - DNA, 109 bp, Homo sapiens; identical to SEQ ID NO: 80613
  chr10:120601820-120601929
  hypo

SEQ ID NO: 166406 - DNA, 30 bp, Homo sapiens; identical to SEQ ID NO: 7734
  chr10:120670186-120670216
  hypo

SEQ ID NO: 166407 - DNA, 36 bp, Homo sapiens
  chr10:120800789-120800825
  hypo
aaaaatgaggctgggcgcagcgcctcacacccgtta

SEQ ID NO: 166408 - DNA, 30 bp, Homo sapiens
  chr10:120801817-120801847
  hypo
ctcgcctgggaccccggtcatcatcagcat

SEQ ID NO: 166409 - DNA, 30 bp, Homo sapiens
  chr10:120810230-120810260
  hypo
aagagcaacaaactcgcagaaagctattag

SEQ ID NO: 166410 - DNA, 94 bp, Homo sapiens; identical to SEQ ID NO: 24562
  chr10:120822533-120822627
  hypo

SEQ ID NO: 166411 - DNA, 65 bp, Homo sapiens; identical to SEQ ID NO: 24563
  chr10:120840485-120840550
  hypo

SEQ ID NO: 166412 - DNA, 31 bp, Homo sapiens
  chr10:120841509-120841540
  hypo
ttacacatttaatagacgagatatgtgaatt

SEQ ID NO: 166413 - DNA, 29 bp, Homo sapiens
  chr10:120890670-120890699
  hypo
ctaaattgttccaaattaggccggccatg

SEQ ID NO: 166414 - DNA, 152 bp, Homo sapiens; identical to SEQ ID NO: 24564
  chr10:120926966-120927118
  hypo

SEQ ID NO: 166415 - DNA, 22 bp, Homo sapiens
  chr10:120937188-120937210
  hypo
ctccatgcgcttaaagcaacac

SEQ ID NO: 166416 - DNA, 316 bp, Homo sapiens
  chr10:120965861-120966177
  hypo
gagaaggcccagagtcggcttctgaacggatatccggcccgcaggatgcagaggaggcaaaggcctcattgttctttggggcctgcctgccccgcccccagctgtaggacactcgtggcagatcccgggtgaccgaagacagcccatttccaggagtggggccttcggagcggagggagcaaggaaacggggctgagcacagacctggagtctgatgttctgagcataacactggaaggagctaagagccccaaaataaataagaccggaatttaaaaacgttaatcccacgccggcttggcgctggcctggctgt

SEQ ID NO: 166417 - DNA, 36 bp, Homo sapiens; identical to SEQ ID NO: 80620
  chr10:120996575-120996611
  hypo

SEQ ID NO: 166418 - DNA, 26 bp, Homo sapiens
  chr10:121005241-121005267
  hypo
tgttaaggccgggcgcggtggctcac

SEQ ID NO: 166419 - DNA, 31 bp, Homo sapiens; identical to SEQ ID NO: 24566
  chr10:121088294-121088325
  hypo

SEQ ID NO: 166420 - DNA, 156 bp, Homo sapiens
  chr10:121103956-121104112
  hypo
ttgcgatagttcagagtaggtttttctttgtgacgcccggtcgcaggatgtctttcagcaccacctgtcagagctctccaagccggcagctgttcccgctgcccacctgtcccttccctgctctttttggggatggtttctcgctcccctgctgtc

SEQ ID NO: 166421 - DNA, 31 bp, Homo sapiens; identical to SEQ ID NO: 24567
  chr10:121128015-121128046
  hypo

SEQ ID NO: 166422 - DNA, 30 bp, Homo sapiens; identical to SEQ ID NO: 24568
  chr10:121172883-121172913
  hypo

SEQ ID NO: 166423 - DNA, 215 bp, Homo sapiens
  chr10:121182610-121182825
  hypo
gtgggcaaacccggccgcactgctgctggctcctcactgaccacctcccttcccttccttcttccagtcccctgttttcatagcccaagttggccaagacctggtctcccagacggaggagaagctcctacagaagccgtgcaaagaactcttttctgcctgtgcacagtaagtgccgtagtcacctggcctgtcctccccgggctgcccagaga

SEQ ID NO: 166424 - DNA, 126 bp, Homo sapiens
  chr10:121228864-121228990
  hypo
gcaggagcgcttcaccgggggcctggaggtggtaagtgccaagaaacagtggccatgttcctgtggtctcgagtgatgttacaactccctggcaaggtgggcagtggcacccgctatggagatggg

SEQ ID NO: 166425 - DNA, 19 bp, Homo sapiens
  chr10:121244293-121244312
  hypo
caatttaaaaaaaaaaaaa

SEQ ID NO: 166426 - DNA, 30 bp, Homo sapiens; identical to SEQ ID NO: 80624
  chr10:121249992-121250022
  hypo

SEQ ID NO: 166427 - DNA, 31 bp, Homo sapiens
  chr10:121255681-121255712
  hypo
gtgctgggattacaggcgtgagccaccatgc

SEQ ID NO: 166428 - DNA, 150 bp, Homo sapiens; identical to SEQ ID NO: 80625
  chr10:121260421-121260571
  hypo

SEQ ID NO: 166429 - DNA, 175 bp, Homo sapiens
  chr10:121264281-121264456
  hypo
agcgctaaggagtgccggcagccaccagcagtctgtaagctgaaggggcaagtaagcaccccccacaccctctcgccaccacccaccagagtcttgtggagaacagggccctgccaacaccttgatgtcatattttcaatccgtttctgctgagcgaatacgtttctgctgtttg

SEQ ID NO: 166430 - DNA, 81 bp, Homo sapiens; identical to SEQ ID NO: 80627
  chr10:121264729-121264810
  hypo

SEQ ID NO: 166431 - DNA, 132 bp, Homo sapiens; identical to SEQ ID NO: 24569
  chr10:121265439-121265571
  hypo

SEQ ID NO: 166432 - DNA, 252 bp, Homo sapiens
  chr10:121265789-121266041
  hypo
acagcagatgagcagacgaagcagctcaagtcagcccttgccccagagcgccaggacgggccacacagaaggctctgtcgccttgcacggctctccagcttcacgacagaccagccagagatggacagtgtgccaggggtgggattggaactccagaaggagtctggacaccagcgggatcagagagacctcgcttggacgatatcccctcccaagctcacgggttcacgcgtgtggcggtcacacgtgtgg

SEQ ID NO: 166433 - DNA, 30 bp, Homo sapiens; identical to SEQ ID NO: 24571
  chr10:121266566-121266596
  hypo

SEQ ID NO: 166434 - DNA, 22 bp, Homo sapiens
  chr10:121267523-121267545
  hypo
tttgagacagagtttcgctctt

SEQ ID NO: 166435 - DNA, 85 bp, Homo sapiens; identical to SEQ ID NO: 47836
  chr10:121271621-121271706
  hypo

SEQ ID NO: 166436 - DNA, 30 bp, Homo sapiens; identical to SEQ ID NO: 80633
  chr10:121271963-121271993
  hypo

SEQ ID NO: 166437 - DNA, 1307 bp, Homo sapiens; identical to SEQ ID NO: 119872
  chr10:121301365-121302672
  hypo

SEQ ID NO: 166438 - DNA, 31 bp, Homo sapiens; identical to SEQ ID NO: 80635
  chr10:121329546-121329577
  hypo

SEQ ID NO: 166439 - DNA, 44 bp, Homo sapiens; identical to SEQ ID NO: 7736
  chr10:121356078-121356122
  hypo

SEQ ID NO: 166440 - DNA, 302 bp, Homo sapiens
  chr10:121397982-121398284
  hypo
gacaactggcacaagcgccgcaagactggcagcaagagaaagccctacgacaagaagcggaagtatgagttggggcacctggctgccaacaccaagattggcccccaccacatccacacagtccgtgtgcggggaggtaacaataaatacggtgccctgaggcgggacatggggaatttctcctggggttcagagtgttgtactcgcaaaacaaggatcactgatgttgtctacgatgcgcccaatagcaagctggtccgtaccaagaccctggtggagaactgcttcgtgctcactgacag

SEQ ID NO: 166441 - DNA, 280 bp, Homo sapiens; identical to SEQ ID NO: 80637
  chr10:121429482-121429762
  hypo

SEQ ID NO: 166442 - DNA, 30 bp, Homo sapiens; identical to SEQ ID NO: 80638
  chr10:121436804-121436834
  hypo

SEQ ID NO: 166443 - DNA, 28 bp, Homo sapiens
  chr10:121488642-121488670
  hypo
ttttgggggagggggaaagggcggggcg

SEQ ID NO: 166444 - DNA, 30 bp, Homo sapiens; identical to SEQ ID NO: 80640
  chr10:121495328-121495358
  hypo

SEQ ID NO: 166445 - DNA, 31 bp, Homo sapiens; identical to SEQ ID NO: 24576
  chr10:121507663-121507694
  hypo

SEQ ID NO: 166446 - DNA, 31 bp, Homo sapiens; identical to SEQ ID NO: 24577
  chr10:121508292-121508323
  hypo

SEQ ID NO: 166447 - DNA, 175 bp, Homo sapiens; identical to SEQ ID NO: 24578
  chr10:121550360-121550535
  hypo

SEQ ID NO: 166448 - DNA, 23 bp, Homo sapiens
  chr10:121568723-121568746
  hypo
gcgagactctgtctcaaaaaaaa

SEQ ID NO: 166449 - DNA, 62 bp, Homo sapiens; identical to SEQ ID NO: 24579
  chr10:121591476-121591538
  hypo

SEQ ID NO: 166450 - DNA, 127 bp, Homo sapiens
  chr10:121663599-121663726
  hypo
gccagatccggagagcgtggttcttggcacggatggagggcgctacgatgtttacctctatgaccgaataaggaaggctgcctactgggaagaggagccagccgaagtgagacgctgtacttggttt

SEQ ID NO: 166451 - DNA, 30 bp, Homo sapiens
  chr10:121681580-121681610
  hypo
tagttgcggggagcacgttgagctcaaatg

SEQ ID NO: 166452 - DNA, 18 bp, Homo sapiens
  chr10:121691374-121691392
  hypo
tttatggtatttgaactt

SEQ ID NO: 166453 - DNA, 166 bp, Homo sapiens; identical to SEQ ID NO: 80647
  chr10:121702238-121702404
  hypo

SEQ ID NO: 166454 - DNA, 40 bp, Homo sapiens
  chr10:121999796-121999836
  hypo
gctgtagtccggagctgttcctattcggccatcttggctc

SEQ ID NO: 166455 - DNA, 43 bp, Homo sapiens; identical to SEQ ID NO: 80648
  chr10:122214595-122214638
  hypo

SEQ ID NO: 166456 - DNA, 511 bp, Homo sapiens; identical to SEQ ID NO: 119887
  chr10:122216793-122217304
  hypo

SEQ ID NO: 166457 - DNA, 30 bp, Homo sapiens; identical to SEQ ID NO: 24581
  chr10:122393515-122393545
  hypo

SEQ ID NO: 166458 - DNA, 30 bp, Homo sapiens; identical to SEQ ID NO: 80651
  chr10:122610143-122610173
  hypo

SEQ ID NO: 166459 - DNA, 31 bp, Homo sapiens; identical to SEQ ID NO: 24582
  chr10:122846742-122846773
  hypo

SEQ ID NO: 166460 - DNA, 35 bp, Homo sapiens; identical to SEQ ID NO: 24583
  chr10:123037579-123037614
  hypo

SEQ ID NO: 166461 - DNA, 35 bp, Homo sapiens; identical to SEQ ID NO: 24584
  chr10:123037853-123037888
  hypo

SEQ ID NO: 166462 - DNA, 85 bp, Homo sapiens; identical to SEQ ID NO: 24585
  chr10:123063522-123063607
  hypo

SEQ ID NO: 166463 - DNA, 30 bp, Homo sapiens; identical to SEQ ID NO: 47852
  chr10:123093885-123093915
  hypo

SEQ ID NO: 166464 - DNA, 78 bp, Homo sapiens; identical to SEQ ID NO: 80657
  chr10:123335737-123335815
  hypo

SEQ ID NO: 166465 - DNA, 30 bp, Homo sapiens; identical to SEQ ID NO: 47853
  chr10:123337319-123337349
  hypo

SEQ ID NO: 166466 - DNA, 138 bp, Homo sapiens
  chr10:123492974-123493112
  hypo
atttccagggagtcccgagcagctccaggagcaggccctgcctgaggtcccggttgctgggattcagcctccacacaacacatggtgttttctctagcaggtttctccaacgagtccggcctttctttggctccctta

SEQ ID NO: 166467 - DNA, 30 bp, Homo sapiens; identical to SEQ ID NO: 24586
  chr10:123532108-123532138
  hypo

SEQ ID NO: 166468 - DNA, 31 bp, Homo sapiens; identical to SEQ ID NO: 80661
  chr10:123554225-123554256
  hypo

SEQ ID NO: 166469 - DNA, 18 bp, Homo sapiens
  chr10:123667286-123667304
  hypo
aaaaaaaaaagattaaaa

SEQ ID NO: 166470 - DNA, 31 bp, Homo sapiens; identical to SEQ ID NO: 24587
  chr10:123706878-123706909
  hypo

SEQ ID NO: 166471 - DNA, 30 bp, Homo sapiens
  chr10:123747494-123747524
  hypo
actccagttctcccacgtgggctcagcctc

SEQ ID NO: 166472 - DNA, 197 bp, Homo sapiens; identical to SEQ ID NO: 80664
  chr10:123757356-123757553
  hypo

SEQ ID NO: 166473 - DNA, 30 bp, Homo sapiens
  chr10:123778608-123778638
  hypo
cggaggctgcggggccggagggtctttggg

SEQ ID NO: 166474 - DNA, 104 bp, Homo sapiens
  chr10:123837324-123837428
  hypo
tgtcttgaacttcttcgggaaaatgtccttgtgtgtacaatggggccacccttctaccaggctgttgtgtggattaagcgcaatcgtaactgaaaagtgcccag

SEQ ID NO: 166475 - DNA, 239 bp, Homo sapiens; identical to SEQ ID NO: 80665
  chr10:123842297-123842536
  hypo

SEQ ID NO: 166476 - DNA, 30 bp, Homo sapiens; identical to SEQ ID NO: 47859
  chr10:123853457-123853487
  hypo

SEQ ID NO: 166477 - DNA, 31 bp, Homo sapiens; identical to SEQ ID NO: 80667
  chr10:123865057-123865088
  hypo

SEQ ID NO: 166478 - DNA, 335 bp, Homo sapiens; identical to SEQ ID NO: 80668
  chr10:123879959-123880294
  hypo

SEQ ID NO: 166479 - DNA, 238 bp, Homo sapiens; identical to SEQ ID NO: 80669
  chr10:123910180-123910418
  hypo

SEQ ID NO: 166480 - DNA, 177 bp, Homo sapiens; identical to SEQ ID NO: 80670
  chr10:123952374-123952551
  hypo

SEQ ID NO: 166481 - DNA, 31 bp, Homo sapiens; identical to SEQ ID NO: 80671
  chr10:123954597-123954628
  hypo

SEQ ID NO: 166482 - DNA, 31 bp, Homo sapiens; identical to SEQ ID NO: 80672
  chr10:123958278-123958309
  hypo

SEQ ID NO: 166483 - DNA, 31 bp, Homo sapiens; identical to SEQ ID NO: 80673
  chr10:123961235-123961266
  hypo

SEQ ID NO: 166484 - DNA, 43 bp, Homo sapiens; identical to SEQ ID NO: 24590
  chr10:123971194-123971237
  hypo

SEQ ID NO: 166485 - DNA, 40 bp, Homo sapiens; identical to SEQ ID NO: 24591
  chr10:123977731-123977771
  hypo

SEQ ID NO: 166486 - DNA, 180 bp, Homo sapiens; identical to SEQ ID NO: 80676
  chr10:123988939-123989119
  hypo

SEQ ID NO: 166487 - DNA, 31 bp, Homo sapiens; identical to SEQ ID NO: 80677
  chr10:124001600-124001631
  hypo

SEQ ID NO: 166488 - DNA, 88 bp, Homo sapiens; identical to SEQ ID NO: 80678
  chr10:124028461-124028549
  hypo

SEQ ID NO: 166489 - DNA, 31 bp, Homo sapiens; identical to SEQ ID NO: 80679
  chr10:124050740-124050771
  hypo

SEQ ID NO: 166490 - DNA, 1372 bp, Homo sapiens; identical to SEQ ID NO: 119906
  chr10:124133664-124135036
  hypo

SEQ ID NO: 166491 - DNA, 30 bp, Homo sapiens; identical to SEQ ID NO: 24593
  chr10:124138748-124138778
  hypo

SEQ ID NO: 166492 - DNA, 285 bp, Homo sapiens; identical to SEQ ID NO: 80682
  chr10:124248921-124249206
  hypo

SEQ ID NO: 166493 - DNA, 31 bp, Homo sapiens; identical to SEQ ID NO: 80683
  chr10:124311934-124311965
  hypo

SEQ ID NO: 166494 - DNA, 30 bp, Homo sapiens
  chr10:124402893-124402923
  hypo
cgagaagaggagcctcggtaggtggtcgct

SEQ ID NO: 166495 - DNA, 30 bp, Homo sapiens
  chr10:124403601-124403631
  hypo
tgctgtgatgctgtgcggctgtgctgctgt

SEQ ID NO: 166496 - DNA, 190 bp, Homo sapiens; identical to SEQ ID NO: 80684
  chr10:124609890-124610080
  hypo

SEQ ID NO: 166497 - DNA, 46 bp, Homo sapiens; identical to SEQ ID NO: 24594
  chr10:124712594-124712640
  hypo

SEQ ID NO: 166498 - DNA, 121 bp, Homo sapiens
  chr10:124738943-124739064
  hypo
ctccagtccgggcgagagagtgagacgctgtctcaaaaaacaaaaaactgtaatctgaattcaatttttctacaacacacccccagacaaaaaaaacttggccagccgcggtggcttgcgc

SEQ ID NO: 166499 - DNA, 825 bp, Homo sapiens; identical to SEQ ID NO: 119916
  chr10:124894870-124895695
  hypo

SEQ ID NO: 166500 - DNA, 700 bp, Homo sapiens; identical to SEQ ID NO: 119917
  chr10:124895832-124896532
  hypo

SEQ ID NO: 166501 - DNA, 79 bp, Homo sapiens
  chr10:124922177-124922256
  hypo
ctgtgccaattccatcggtaccccacgagcatcgcatcacttgccttcagtaatgatgggactacgcttgcaatagcgt

SEQ ID NO: 166502 - DNA, 32 bp, Homo sapiens; identical to SEQ ID NO: 80689
  chr10:124931353-124931385
  hypo

SEQ ID NO: 166503 - DNA, 30 bp, Homo sapiens; identical to SEQ ID NO: 80690
  chr10:124953675-124953705
  hypo

SEQ ID NO: 166504 - DNA, 125 bp, Homo sapiens
  chr10:124964476-124964601
  hypo
ggaagggaggccagccgcatcttattcccttgtgtccatgctgtgttcttggtgtgcggtccctggagcaagtgcaaggaataagacaaagacatcagtgactgtgtctccgatggacagtgacg

SEQ ID NO: 166505 - DNA, 163 bp, Homo sapiens
  chr10:125017525-125017688
  hypo
ttaagatgatttcaccgggaaaacattaaggtatacaaagagttcttaataaatagaaataaatagtgcagggtttgcgccatggtgattttcgatggttatctgccctcgccgctgctgctccagctgcatcttccgcggggctcagcgcagcattttgctc

SEQ ID NO: 166506 - DNA, 30 bp, Homo sapiens; identical to SEQ ID NO: 80692
  chr10:125528084-125528114
  hypo

SEQ ID NO: 166507 - DNA, 291 bp, Homo sapiens
  chr10:125617036-125617327
  hypo
cagggaggcaggtgatgccagcgatggaaggcggcgtggagatggaaggcggcgtggagatggaaggcggcgtggagatggaaggcggcgtggagatggaaggcggcgtggagatggaaggcggcgtggagatggaaggcggcgtggagatggaaggcggcgtggagctgctgagttgaaggctagggcaaaacggagaagaacctgagcaatgcaccagcacaggccccactgacgccgaggaacaggaggcacagggcaccacgcacgggactccgcagcttccacgct

SEQ ID NO: 166508 - DNA, 59 bp, Homo sapiens
  chr10:125769653-125769712
  hypo
caattcagctctcacgtcgtcttccacgcaaacgcctcatccgcgaggacctgcgccag

SEQ ID NO: 166509 - DNA, 81 bp, Homo sapiens
  chr10:125984182-125984263
  hypo
acacacacagactcccgtgccccgcgggcagagcaggctgcctgctgcttggatgtggccaccgagcgggtgcatccagct

SEQ ID NO: 166510 - DNA, 30 bp, Homo sapiens
  chr10:126075544-126075574
  hypo
tctaatgcaagaaccggcccgccataaagg

SEQ ID NO: 166511 - DNA, 46 bp, Homo sapiens; identical to SEQ ID NO: 80695
  chr10:126101960-126102006
  hypo

SEQ ID NO: 166512 - DNA, 46 bp, Homo sapiens; identical to SEQ ID NO: 80696
  chr10:126102245-126102291
  hypo

SEQ ID NO: 166513 - DNA, 1218 bp, Homo sapiens; identical to SEQ ID NO: 119945
  chr10:126106653-126107871
  hypo

SEQ ID NO: 166514 - DNA, 121 bp, Homo sapiens
  chr10:126114965-126115086
  hypo
agtgagaccctattaaaaaaaaaaaaagtcatatagaatccttcctttctctcttttttcttttgttctctttttttatttttggagttgggggacagagtctcgctctgtcaccaggctg

SEQ ID NO: 166515 - DNA, 121 bp, Homo sapiens
  chr10:126115343-126115464
  hypo
ccaggatcctttcctttaacctgtattctcccccaaaagattttagttacaggctggacgcggtggctcacccacctggcactttagaagatcggggcgggcagatcactagaggtcagga

SEQ ID NO: 166516 - DNA, 30 bp, Homo sapiens; identical to SEQ ID NO: 24600
  chr10:126149556-126149586
  hypo

SEQ ID NO: 166517 - DNA, 30 bp, Homo sapiens
  chr10:126184706-126184736
  hypo
ctttcaatgaactgcgtcttcagagcagcg

SEQ ID NO: 166518 - DNA, 30 bp, Homo sapiens; identical to SEQ ID NO: 24601
  chr10:126185131-126185161
  hypo

SEQ ID NO: 166519 - DNA, 30 bp, Homo sapiens; identical to SEQ ID NO: 80701
  chr10:126185380-126185410
  hypo

SEQ ID NO: 166520 - DNA, 82 bp, Homo sapiens
  chr10:126186173-126186255
  hypo
ctcctgcctgcctgccgtcaggtgggagggagaggcagacgagcagatggagccctgtgatgagctgcgagtgggcagggga

SEQ ID NO: 166521 - DNA, 30 bp, Homo sapiens
  chr10:126186659-126186689
  hypo
agtctgccctgcaagcgataggagtggaag

SEQ ID NO: 166522 - DNA, 94 bp, Homo sapiens; identical to SEQ ID NO: 24602
  chr10:126190196-126190290
  hypo

SEQ ID NO: 166523 - DNA, 30 bp, Homo sapiens; identical to SEQ ID NO: 24603
  chr10:126190715-126190745
  hypo

SEQ ID NO: 166524 - DNA, 265 bp, Homo sapiens; identical to SEQ ID NO: 80704
  chr10:126198877-126199142
  hypo

SEQ ID NO: 166525 - DNA, 30 bp, Homo sapiens
  chr10:126234666-126234696
  hypo
tctttgaggcagagtcgcctgcaggtgggg

SEQ ID NO: 166526 - DNA, 31 bp, Homo sapiens; identical to SEQ ID NO: 24605
  chr10:126237288-126237319
  hypo

SEQ ID NO: 166527 - DNA, 388 bp, Homo sapiens
  chr10:126238652-126239040
  hypo
gggcctccgagccaggctcctcgttgcaaatggacttctctcctttgcgtgctgtgaactgggcgtgaacacctcctgtgatggggagctcactccttgccgagggagcctggtaagctgccggcacagtcatcctcataccctctctcctgacctgtgtcttatggcctctgcccccaggcagctgcggggcagggggctggggtgacccccgtcttggttgttgagcccttccactagctggagggtgactgtccccccttctcccccgacacaaggcacagcctttcttgtggctgtcaggagagagggcctgtcctcctttgcgcccacgctgcccctgcgccttgtggcactgcattcaaagtgagtgcgcctgcttttgttt

SEQ ID NO: 166528 - DNA, 30 bp, Homo sapiens
  chr10:126239810-126239840
  hypo
ggccccagagaggcccgatcccatcccgct

SEQ ID NO: 166529 - DNA, 35 bp, Homo sapiens; identical to SEQ ID NO: 80707
  chr10:126240417-126240452
  hypo

SEQ ID NO: 166530 - DNA, 47 bp, Homo sapiens
  chr10:126254747-126254794
  hypo
agtgggccaggtcctggagaccgggcgtgtggttatgggctctccag

SEQ ID NO: 166531 - DNA, 152 bp, Homo sapiens; identical to SEQ ID NO: 80708
  chr10:126265311-126265463
  hypo

SEQ ID NO: 166532 - DNA, 35 bp, Homo sapiens
  chr10:126267743-126267778
  hypo
ttaaggaacatctcccgggccgagcgttctgagcg

SEQ ID NO: 166533 - DNA, 31 bp, Homo sapiens; identical to SEQ ID NO: 24608
  chr10:126276742-126276773
  hypo

SEQ ID NO: 166534 - DNA, 30 bp, Homo sapiens; identical to SEQ ID NO: 80710
  chr10:126281449-126281479
  hypo

SEQ ID NO: 166535 - DNA, 30 bp, Homo sapiens; identical to SEQ ID NO: 80711
  chr10:126281817-126281847
  hypo

SEQ ID NO: 166536 - DNA, 18 bp, Homo sapiens
  chr10:126287148-126287166
  hypo
gaggccagggccagcacg

SEQ ID NO: 166537 - DNA, 78 bp, Homo sapiens; identical to SEQ ID NO: 80713
  chr10:126287225-126287303
  hypo

SEQ ID NO: 166538 - DNA, 31 bp, Homo sapiens; identical to SEQ ID NO: 24611
  chr10:126287859-126287890
  hypo

SEQ ID NO: 166539 - DNA, 31 bp, Homo sapiens; identical to SEQ ID NO: 24612
  chr10:126290723-126290754
  hypo

SEQ ID NO: 166540 - DNA, 30 bp, Homo sapiens
  chr10:126291415-126291445
  hypo
gcaggagacgcagtgcgcccctctcctatt

SEQ ID NO: 166541 - DNA, 30 bp, Homo sapiens
  chr10:126291721-126291751
  hypo
tggacacctgcagtgcgctcatgcccagcc

SEQ ID NO: 166542 - DNA, 363 bp, Homo sapiens
  chr10:126296071-126296434
  hypo
gccacggacgccattcggctaggtacacgtgcggagtggggctggccggattctcattacaaagcgtcatcttctatggggagacctcttgttccctctcggggctggttgcttttgcctggacaataagcctggccccagggcacctggggaaggtgtccaaggagggggtcctgggggccagtcccccgggggctcggatgatgaatcatgggcggtgtttgctggaagaatttttgttccgcttcgggcaacaaggaacccaaacctctcactgttgtggggagaaaagttggaaatcagatgggaactggctgcggtaccagagaggacgtcagacccgggccgcggcctcagcccccg

SEQ ID NO: 166543 - DNA, 31 bp, Homo sapiens; identical to SEQ ID NO: 24614
  chr10:126296748-126296779
  hypo

SEQ ID NO: 166544 - DNA, 30 bp, Homo sapiens; identical to SEQ ID NO: 80718
  chr10:126305305-126305335
  hypo

SEQ ID NO: 166545 - DNA, 412 bp, Homo sapiens
  chr10:126305756-126306168
  hypo
atgtcccccagccaccgacgtccccctgcctgctccgcaaccccagggcctgcagaaaaggcccacgagactcagactggcagagacttaggcggaccaggaacaggggcgcagtctccgtcccacccaaaccctaaccagagagaacacggcacgttgtgccagacggaggacggatgccagcgagggtccatgtcctcactgccgacaaggctgggaactgggccaagtgaagcagaggcctccacgtcagatgtgagcgccaccggcccaggtgactgcagttcttccctccttccgttcggcttgagccctccagaggatcggaaaggctgaggcctgacctggtgccgctgtcctgggtgggtctgtcctgctggtcggttcctgcccctctcggggaggttggctg

SEQ ID NO: 166546 - DNA, 318 bp, Homo sapiens
  chr10:126307212-126307530
  hypo
gcctgtcctccaggccgcaaacacgcccttctcctgagtccgggtaagcagagggccatgcacgggagacagtgggccacgccgggctgggcttcgtgcttctggggcccccgcaactcactcacgcagcagaagtctgcactgtgctgcctgcagcgggggcagaaacccggagccagtgagcctgtctgtgccacctcagctaccctggtgggtgggtggtgggggccatcccaggcccctcagggctgcaggccaggctgggcccatctccgcacgctgctgtgtggcctcacctcccagcgctgtcgaaggctg

SEQ ID NO: 166547 - DNA, 30 bp, Homo sapiens; identical to SEQ ID NO: 80721
  chr10:126309463-126309493
  hypo

SEQ ID NO: 166548 - DNA, 241 bp, Homo sapiens; identical to SEQ ID NO: 80722
  chr10:126309752-126309993
  hypo

SEQ ID NO: 166549 - DNA, 30 bp, Homo sapiens
  chr10:126310810-126310840
  hypo
ctgcagagtggccagcggacgcccttcacc

SEQ ID NO: 166550 - DNA, 30 bp, Homo sapiens; identical to SEQ ID NO: 80723
  chr10:126311129-126311159
  hypo

SEQ ID NO: 166551 - DNA, 120 bp, Homo sapiens; identical to SEQ ID NO: 80724
  chr10:126311517-126311637
  hypo

SEQ ID NO: 166552 - DNA, 220 bp, Homo sapiens; identical to SEQ ID NO: 80725
  chr10:126311863-126312083
  hypo

SEQ ID NO: 166553 - DNA, 185 bp, Homo sapiens; identical to SEQ ID NO: 80726
  chr10:126312313-126312498
  hypo

SEQ ID NO: 166554 - DNA, 230 bp, Homo sapiens
  chr10:126313237-126313467
  hypo
aggatttcaagggtacgcaggccagttctgcttggcgtcagctgccagcgatgggggtagggctgacactgtgcacaagtgggtgcagttcaacacctgctcccagggcagagcacaaaatccagccttctcctcagaatgatgcacatgccacagacaggacagaggctgagacagtgaggggcactcccggcgcagtcctggatatccccaaccggactgcagcaacg

SEQ ID NO: 166555 - DNA, 151 bp, Homo sapiens; identical to SEQ ID NO: 80727
  chr10:126314039-126314190
  hypo

SEQ ID NO: 166556 - DNA, 285 bp, Homo sapiens; identical to SEQ ID NO: 80728
  chr10:126314662-126314947
  hypo

SEQ ID NO: 166557 - DNA, 218 bp, Homo sapiens; identical to SEQ ID NO: 24619
  chr10:126317367-126317585
  hypo

SEQ ID NO: 166558 - DNA, 332 bp, Homo sapiens
  chr10:126321122-126321454
  hypo
gggctggtgggcactcgttcgcattcagctgcctggggccacatcggggtgctgaagacaggactgctgagcacggcctctgggctccaccccagcagctcacaactctgttccagatattgtcttccatggagggcacactcttggagaagtgagcaaatcaccaactggtttagccactcttgcagatgagcagacagaggccgagtgaggagaagggacatgccccagactgcacagctgcgtgatgtgcaatcgcaccccatcactctgggctgtgctcaggaaagcatgcagtcctccggcaggacggtggggtagtatgggctgga

SEQ ID NO: 166559 - DNA, 31 bp, Homo sapiens; identical to SEQ ID NO: 24620
  chr10:126323262-126323293
  hypo

SEQ ID NO: 166560 - DNA, 191 bp, Homo sapiens; identical to SEQ ID NO: 24621
  chr10:126325796-126325987
  hypo

SEQ ID NO: 166561 - DNA, 377 bp, Homo sapiens; identical to SEQ ID NO: 80732
  chr10:126331894-126332271
  hypo

SEQ ID NO: 166562 - DNA, 31 bp, Homo sapiens; identical to SEQ ID NO: 24623
  chr10:126334816-126334847
  hypo

SEQ ID NO: 166563 - DNA, 355 bp, Homo sapiens
  chr10:126354231-126354586
  hypo
cctgggcattggtcacgtgggccggtgatatggccctttccacgtttctaagtgatgacttgttggtgctgtgacctccaggaggccagggctaactgtcctctccattgctgcatccctggtgcctacaagggcctgactcacagcaaatgctaggtaaataaatagtggctgaacaaagagattaatctagaattgaatctcgatcctcagaggacaagactagctcatcttactgtgactcggcttatagtcggctacgtagacacagctgtctccaccccagccctgtagcctgcacctaccttgcaggtaaggatggggtcttgtacacgctagtcttccctgagccctg

SEQ ID NO: 166564 - DNA, 30 bp, Homo sapiens; identical to SEQ ID NO: 80735
  chr10:126355217-126355247
  hypo

SEQ ID NO: 166565 - DNA, 329 bp, Homo sapiens
  chr10:126367643-126367972
  hypo
tctcacccccaaaggcgaatgtgtaaaccaagatcaaaaggcccacgaaagagaagccagagcccagcggaaggaagcgtgggccacacctgggtaccagcctacccttccaaagatacagaaagcccaactccaagccttgcttccatgggcatgcagagcagaccccaaccccttctcagtggtcccaaatgttgagtgaagccacagcacgcagaggctggggtctgtggccagtggtctcacctcactggccatctggcaacacgttagtccttgtacaccagcaacatgcccagctcatcaggttcccacgcacaaggccgtgc

SEQ ID NO: 166566 - DNA, 30 bp, Homo sapiens
  chr10:126369304-126369334
  hypo
agatgatggtcagaccgtggcattaagcaa

SEQ ID NO: 166567 - DNA, 311 bp, Homo sapiens; identical to SEQ ID NO: 80738
  chr10:126370267-126370578
  hypo

SEQ ID NO: 166568 - DNA, 29 bp, Homo sapiens
  chr10:126380993-126381022
  hypo
aaagcataggccaggcgcggtggctcatg

SEQ ID NO: 166569 - DNA, 257 bp, Homo sapiens
  chr10:126386074-126386331
  hypo
tctgcacaaggtcaacgccgtgttcatcccacggggttactaagggtccatgctgaccaacctggggacacagaggtgaaggagggctcactcttcatggaagacggtcacagacaaaccacagggagatcagggctggaggggatgtccagggcaagtgtgctgggatgagggtggaggtcggggcagcctcctgggggggatgcttagacacttgatgaggaccacaggagcttctagggcggaaggggaacggg

SEQ ID NO: 166570 - DNA, 129 bp, Homo sapiens; identical to SEQ ID NO: 80740
  chr10:126420269-126420398
  hypo

SEQ ID NO: 166571 - DNA, 30 bp, Homo sapiens
  chr10:126421546-126421576
  hypo
aacttttggcctatgcggacgcagccaggc

SEQ ID NO: 166572 - DNA, 30 bp, Homo sapiens
  chr10:126421935-126421965
  hypo
caggtgactcaggcccgccattctcgagtg

SEQ ID NO: 166573 - DNA, 30 bp, Homo sapiens
  chr10:126431592-126431622
  hypo
cgaacgcgagggacccgggcaaacctgtcc

SEQ ID NO: 166574 - DNA, 30 bp, Homo sapiens; identical to SEQ ID NO: 47901
  chr10:126431871-126431901
  hypo

SEQ ID NO: 166575 - DNA, 30 bp, Homo sapiens; identical to SEQ ID NO: 119951
  chr10:126431902-126431932
  hypo

SEQ ID NO: 166576 - DNA, 80 bp, Homo sapiens
  chr10:126435115-126435195
  hypo
gctaacctgattaagccggagaacaccctgggaaatataaaatgcagggattacttgcagtcttttacatcaagaccaat

SEQ ID NO: 166577 - DNA, 30 bp, Homo sapiens; identical to SEQ ID NO: 80742
  chr10:126438752-126438782
  hypo

SEQ ID NO: 166578 - DNA, 26 bp, Homo sapiens
  chr10:126464744-126464770
  hypo
ctaccggttccttcttttcccatgcc

SEQ ID NO: 166579 - DNA, 23 bp, Homo sapiens
  chr10:126479341-126479364
  hypo
cttctttttttgagacggagtca

SEQ ID NO: 166580 - DNA, 22 bp, Homo sapiens
  chr10:126479603-126479625
  hypo
ttacaggcgtaagccaccacgc

SEQ ID NO: 166581 - DNA, 31 bp, Homo sapiens; identical to SEQ ID NO: 24627
  chr10:126497161-126497192
  hypo

SEQ ID NO: 166582 - DNA, 25 bp, Homo sapiens
  chr10:126607814-126607839
  hypo
ttacaaaagtagtccactggccggg

SEQ ID NO: 166583 - DNA, 30 bp, Homo sapiens; identical to SEQ ID NO: 80746
  chr10:126632144-126632174
  hypo

SEQ ID NO: 166584 - DNA, 31 bp, Homo sapiens; identical to SEQ ID NO: 24628
  chr10:126667503-126667534
  hypo

SEQ ID NO: 166585 - DNA, 30 bp, Homo sapiens
  chr10:126685674-126685704
  hypo
agctgggagtctcccggaggccagaacatt

SEQ ID NO: 166586 - DNA, 31 bp, Homo sapiens; identical to SEQ ID NO: 80748
  chr10:126686478-126686509
  hypo

SEQ ID NO: 166587 - DNA, 30 bp, Homo sapiens; identical to SEQ ID NO: 24629
  chr10:126688777-126688807
  hypo

SEQ ID NO: 166588 - DNA, 1149 bp, Homo sapiens
  chr10:126690290-126691439
  hypo
gggcagctccctgctcgcccggctccccagccctgctcctgacaccaagacccacccagtgcttccggtacctgggtgctgccccgactggccgtgaaggattcaactaagattctgacccatacactccatgccccaggctaaggctgtggagagacagctggagcccatgggggtggcctccctgaaaacgtggccggtggtgcccgagagcaggattctcagatgtatgtaacactccgctcacacacagagcccatctgacacccagcccgtcccggaagcaccggggcccactggggccttagccgatgggagagaggtggggaaatagcgcctgggctattcctggagcacaggaagagctgttccaaggccaggctgctgccttggaattcatggtgcctcatgaatttggggcacctcagcactcgtaaggcagagtacagcccccacccccaaaatgcaggggtggcgtgttccaaacacagagcaagcacagtgcccacctggccctctcccgaggacgctcgatgccagcggtctgcttcttgtgcctctgcactcagcactcacgagctcacacggggtgctgggcagaggcccccctcaacatgcacccccagccgcaagtgcatggggccgataagcagctttgaagcccccaactctgggttcccgcctgctgcctctgcttttcttcggaagcctctgtcatcaactgtgttgggcaggggcccacctgctttggtgctgacctggaccacatgctgctaaggctgccctcccagaacgggaggcccaggttcccatgtggacaggggcctagagctgtgcacacggcaggggcagtttaggggacacacacggcaggggtcatttaggggacgcacccagcaggggtggtttagaggacatgtggccagtcgcattctcccctctggaggcggcactgggtgtctccaaattgagcctgtgccagctgggtgttgctctgagggcagagatgcctcacagccccgcagaccccacacaagggccagcagggactatcctacctgtgtcatgtgaaggcagggccgcaaggtgctccacagcccggcctggaggcagccaccttgctacagccagaagcggctgctccgtggt

SEQ ID NO: 166589 - DNA, 30 bp, Homo sapiens; identical to SEQ ID NO: 24631
  chr10:126694132-126694162
  hypo

SEQ ID NO: 166590 - DNA, 239 bp, Homo sapiens
  chr10:126694640-126694879
  hypo
aggttgcctagcgatcggctccctccccgacacgggttgcctttctccttggtgaaacccaccctctaccctccctgatggccgggcacgcagaacgtggctgaggctggcccgagacctgtccaaggtctgaggctcgaatcctggcagcaggtccttcatggcaaggcgggaaaagagaaaagccaacgggttctcatgctgggaaaagatgccgggcacgacggctggaggtgggg

SEQ ID NO: 166591 - DNA, 30 bp, Homo sapiens
  chr10:126695404-126695434
  hypo
cgtaatgagggcttccgaagaactgggctt

SEQ ID NO: 166592 - DNA, 265 bp, Homo sapiens
  chr10:126696782-126697047
  hypo
gggattacaggcaataagccaccgtgcctggccggctctggcctctttttttaaaacgcactagattttatggaagtttcctgacaccgtagcagtctcaagacaccagtgcctgagtcactccctgttcctgacaggggctacggctgcccaaggacagacactggccacataccccagggttgccccatgaagtccctgcaggttgcagtcttagagctgaccgagctatcacattcatgagaagaaccgctgctcagagtca

SEQ ID NO: 166593 - DNA, 340 bp, Homo sapiens; identical to SEQ ID NO: 80753
  chr10:126697822-126698162
  hypo

SEQ ID NO: 166594 - DNA, 30 bp, Homo sapiens; identical to SEQ ID NO: 80754
  chr10:126698632-126698662
  hypo

SEQ ID NO: 166595 - DNA, 81 bp, Homo sapiens
  chr10:126701134-126701215
  hypo
ccccactcgtgtggccgatcctccaagcctctgtggaagagatgagcctcagggcatcgccaaagactaaaaattgttgtt

SEQ ID NO: 166596 - DNA, 30 bp, Homo sapiens
  chr10:126701961-126701991
  hypo
gttgtaaaatagtctcgtgcgggcaccgct

SEQ ID NO: 166597 - DNA, 54 bp, Homo sapiens
  chr10:126702212-126702266
  hypo
accctgtgccgtaggcgctgctgtttccccagcaggtaacggaggcggggggaa

SEQ ID NO: 166598 - DNA, 216 bp, Homo sapiens
  chr10:126702576-126702792
  hypo
ctcacgtgaggcatgcgctcttcccacccgggtgtctctctagatcttgcagcctaaaagagacgtcatcatggtaactgttatcagaacggcggagaacagaagggcacatccaagcaagaccgagacgccacaggatagtaacacgtgtgtgctggccccactccccaagctggatgcagggacacacggtcctcctcacggtgtcctattggc

SEQ ID NO: 166599 - DNA, 37 bp, Homo sapiens; identical to SEQ ID NO: 24632
  chr10:126709395-126709432
  hypo

SEQ ID NO: 166600 - DNA, 30 bp, Homo sapiens
  chr10:126710385-126710415
  hypo
agagctcactgatgtcgggtgtgttcaatg

SEQ ID NO: 166601 - DNA, 106 bp, Homo sapiens
  chr10:126710673-126710779
  hypo
ccatctgccccacgccggcctgggcggtggcctctcccctggccccagtctggctgcggtgctgagctctgcccttctcctgcttccctgccggtgcacacacatg

SEQ ID NO: 166602 - DNA, 137 bp, Homo sapiens; identical to SEQ ID NO: 80756
  chr10:126711479-126711616
  hypo

SEQ ID NO: 166603 - DNA, 30 bp, Homo sapiens
  chr10:126712166-126712196
  hypo
atttgtctgtgtcaccggggctggtgggcc

SEQ ID NO: 166604 - DNA, 1832 bp, Homo sapiens
  chr10:126714617-126716449
  hypo
ccccaggcagggcaggcggggaggatgtattacttggttctggtgcaagcatggtggacacgatgatgggtgcccctgtgcgccgggccaccttctggtacggtgagtgaggcgtgtggaggctctggctggccggcggcagggtggatggccccaggggtgcacctggcttccgcaagacctgggggctgccgtgagggctgggcagcggagaggcggccacgttgcgctccctctttagcagctccatgggcaccgtgtatgccgtggagtaggctgttctggggcctgggtgaagggggtttgaggggcccgggttagtcaaggccacccctgcctgcagggggtacgtggggctcagacgcgctgtcagggcgcaaggggtgggagagctgtacccggagttggaggggaagtgtggggcatgggtgcccacgccaggggcagaataggtggctgccgtctccaggaggtgctgagatggtgcgctggagggacggcgagccgggtctccagctcggggggatgctgtctgcagaggagccgcagcgcccagagaagccaagtcaccatggagcagttcgcttcggtggctgaagctgctggaccgcgcccggggcagcgggcccccccggtcctgcctccgcagctgcatttcggtcctgcagctattggccaggcggctcagaacacgggcctggcccaggttgggtgcgacagacttgatatccgcgtcctccagggtagccaggacggccggggagtcaaagccctgctgcagtagggctcccagcgtggcctctgccagcccctccgcccgcagaaaggccaggaactcagggagcacggtcctcttgccaccaggaccctggaaggtggacaggtcagcttcgtaagtctcgtaagccatcttggatgggatgctttcccgggcaggcccgtagccacgattcagggcccctggggccacccctgtgctgccttcgggggcagcagctgaactggggtccacaaccaggcacgtcggggccacctgtctggcaggggcagggtcaatgggtctttcgctgatgtcgctgaagacctggctgagggggtaggcaggcacctccgccccatacctggtgtcgggctgctcccgtccataccgcccgggagatgcagccctgctctgtgtctgccgcccctgagggatcattttacctccaggatcccggtacaggtgaccggcgtcctgcagggcaggtgaccggccttgcattggatcccatgacgttctgctgccaagcactccgtagctggggaccggccggctgactcctgggtcccgatagaggggaggctctttgggtaccctagcagctccagacggatcactgtagtactcccgtggcagcagggggctgcgaccagacatcactgcctgtctgctgtcgtagaaggtgaagtcaggagtagacccctttcttgcagccactgagttataaacggcctcccggtacaggtagggctcggcggccacgggcagggcagcgtcctgtggtcggtggtttggctcaaaccaagtcccctctgctgtgccatacgtcagggagcttctcctccccagaggccgcagggactcggcgttctcccaggggccctcgtaccacccagcagcatcccagctctgagaacgaccaatatttatatgcctgctgggaactggcattggaaaaaaaatgactgcggatgaggcagaggagaagcttttctttataaatcttcaattacatacatcaaaaacagacctggctgtgtgctaacccttccgagacggcagggacaaccaa

SEQ ID NO: 166605 - DNA, 31 bp, Homo sapiens; identical to SEQ ID NO: 80759
  chr10:126720966-126720997
  hypo

SEQ ID NO: 166606 - DNA, 30 bp, Homo sapiens; identical to SEQ ID NO: 80760
  chr10:126721634-126721664
  hypo

SEQ ID NO: 166607 - DNA, 314 bp, Homo sapiens; identical to SEQ ID NO: 80761
  chr10:126721931-126722245
  hypo

SEQ ID NO: 166608 - DNA, 41 bp, Homo sapiens; identical to SEQ ID NO: 80762
  chr10:126726952-126726993
  hypo

SEQ ID NO: 166609 - DNA, 31 bp, Homo sapiens; identical to SEQ ID NO: 24635
  chr10:126727934-126727965
  hypo

SEQ ID NO: 166610 - DNA, 30 bp, Homo sapiens; identical to SEQ ID NO: 80764
  chr10:126731742-126731772
  hypo

SEQ ID NO: 166611 - DNA, 18 bp, Homo sapiens
  chr10:126731973-126731991
  hypo
tttatagaccctctcgat

SEQ ID NO: 166612 - DNA, 18 bp, Homo sapiens
  chr10:126732290-126732308
  hypo
aaccgtgcccggccgacc

SEQ ID NO: 166613 - DNA, 307 bp, Homo sapiens; identical to SEQ ID NO: 24637
  chr10:126732715-126733022
  hypo

SEQ ID NO: 166614 - DNA, 43 bp, Homo sapiens; identical to SEQ ID NO: 80767
  chr10:126738867-126738910
  hypo

SEQ ID NO: 166615 - DNA, 30 bp, Homo sapiens; identical to SEQ ID NO: 80768
  chr10:126744831-126744861
  hypo

SEQ ID NO: 166616 - DNA, 90 bp, Homo sapiens; identical to SEQ ID NO: 24638
  chr10:126751062-126751152
  hypo

SEQ ID NO: 166617 - DNA, 31 bp, Homo sapiens
  chr10:126752457-126752488
  hypo
gcaactccatcaggcacggttttcccccacc

SEQ ID NO: 166618 - DNA, 182 bp, Homo sapiens; identical to SEQ ID NO: 80770
  chr10:126763481-126763663
  hypo

SEQ ID NO: 166619 - DNA, 286 bp, Homo sapiens; identical to SEQ ID NO: 80771
  chr10:126767710-126767996
  hypo

SEQ ID NO: 166620 - DNA, 30 bp, Homo sapiens
  chr10:126770764-126770794
  hypo
tctgcaggccggctccgggacacactgtct

SEQ ID NO: 166621 - DNA, 579 bp, Homo sapiens
  chr10:126771761-126772340
  hypo
atctgacaccaacaacgtaagaccaccagggccagcacgcattctcaacatactttccaaagctggaaaaaagcacagccaagtcactcagaaaagcctctcttgatttggcttctggataaaaaagagtctccctgtcgtgccagatggggtcaactactcggtgaaaacagaggcccattccacaggcaccactgctgagcctctgagttcccaggacagggctgtccgaggacacaacactgacagccatgtgcagacccccgacctgggcgaggataccgccctctgagactcagtcgcctgtctacaaaaaaggaaaagataccacattaccgtgaccatctagtctaatgaaaatgccaccaggatcaaagaccataacgcaaagccctctgtttgcaccttagtccgaacaagcacccaggatacactcgctgttgtttgtttgtttgttttaaggcaggatctcactctgcctcccaggctggagtgcagtcttgacctcctggactccagccgtcctgccacgtcagcttctcaagtagctgtgactgtaggcacgcaccatcacaccca

SEQ ID NO: 166622 - DNA, 39 bp, Homo sapiens; identical to SEQ ID NO: 24641
  chr10:126772639-126772678
  hypo

SEQ ID NO: 166623 - DNA, 121 bp, Homo sapiens; identical to SEQ ID NO: 80774
  chr10:126774971-126775092
  hypo

SEQ ID NO: 166624 - DNA, 200 bp, Homo sapiens; identical to SEQ ID NO: 24642
  chr10:126775427-126775627
  hypo

SEQ ID NO: 166625 - DNA, 20 bp, Homo sapiens
  chr10:126775926-126775946
  hypo
caccgcgcccagccaaggga

SEQ ID NO: 166626 - DNA, 31 bp, Homo sapiens; identical to SEQ ID NO: 80776
  chr10:126776897-126776928
  hypo

SEQ ID NO: 166627 - DNA, 30 bp, Homo sapiens
  chr10:126783001-126783031
  hypo
agcccaaggaagcaacgatgatgtgggggt

SEQ ID NO: 166628 - DNA, 52 bp, Homo sapiens
  chr10:126786129-126786181
  hypo
tcccgctgctacaggcgcgccttaggtgcatgcctcacgtggggtccatacc

SEQ ID NO: 166629 - DNA, 335 bp, Homo sapiens
  chr10:126786697-126787032
  hypo
aacgaacaaaaaatgccaacaataccagtaacagcagcagcagtcagtaatcaatgttcaaaaagtgcctgctatccccgttttcttttttgccaagcactgagacggtcccagccatcagtccacaggtgtgtggacccagcacgtgttcagctcttggagtgaacggaatggaacttaggcagactactccccaaattccattccctccctaggctgctaatgacaatgacacccacatacactagccctggtggctgagaatatagtaatatcaagagaatacacggtacccagctgcgtctggtatatgcgtggtccgtaaggcatcactt

SEQ ID NO: 166630 - DNA, 93 bp, Homo sapiens
  chr10:126787571-126787664
  hypo
agcctcctttccacgcgctgtcggtctgcaagcatggagtctagggagacactgtagaaaagccatcatactagcacacggtcaggcacgttc

SEQ ID NO: 166631 - DNA, 292 bp, Homo sapiens
  chr10:126789759-126790051
  hypo
acccagtgacctgaatctaaccgcctttcatgtgaagtggccgtgttcccggcctctcccagtgtggctctcgagagaaagcctcatgtcttcgtcctctccatggctggcctcaggctctttggtcacacttaatgttcaggcaaattgcagagacctcaagccatttaaaggagtagagacatgttcccagggaaggatgtccattacgaaacagatgtccaggtgggcataggagcgggtgcagcagcatggtgccagcacctcgccttggctgcggctgggatcagca

SEQ ID NO: 166632 - DNA, 31 bp, Homo sapiens; identical to SEQ ID NO: 24644
  chr10:126792359-126792390
  hypo

SEQ ID NO: 166633 - DNA, 194 bp, Homo sapiens; identical to SEQ ID NO: 80779
  chr10:126792666-126792860
  hypo

SEQ ID NO: 166634 - DNA, 438 bp, Homo sapiens
  chr10:126794865-126795303
  hypo
gaatatcaaagcccccgggaagccatcttcactgtaaagggaccctgcagtgtatgggaagccaggctcactaccacagtgtttccggaaaggcttccaccagcaagggacgcggggcgacctgagtttggggttgcttcatcggctcctgaatgccagatatacctaaggccacacatgctggcaggtggatctgggcgtcaagttcttcactaacaaaatgggggtcttgggaagggtatgaggatcacggaaagagaagcggacaccacgcctccatttcccagcataacgtcactcagtggcaacagagactcctggccccgccaagagtgagaggcaagtgtgcccaccatcctgcagatgccctgctcggaggtacccctccagcgaaggagcaactcagcaggaacccacccaggccggccacacagtgtt

SEQ ID NO: 166635 - DNA, 31 bp, Homo sapiens; identical to SEQ ID NO: 80780
  chr10:126807512-126807543
  hypo

SEQ ID NO: 166636 - DNA, 51 bp, Homo sapiens; identical to SEQ ID NO: 80781
  chr10:126809816-126809867
  hypo

SEQ ID NO: 166637 - DNA, 30 bp, Homo sapiens; identical to SEQ ID NO: 24645
  chr10:126810201-126810231
  hypo

SEQ ID NO: 166638 - DNA, 230 bp, Homo sapiens
  chr10:126811106-126811336
  hypo
ttctgagagcatgagcgccaagaaagaaaaccgagactcaaaagcccaagggctgtttcttcatgtttcagtcaatgtacactgtgcaaacacatgcaacacagatgaacaaaactcacaaggtgaagggggttcttccactctttccaaaatcagccaagccaactggtacaaaagtcactcccaatacgaccccatggacatctgctgagacgcgacgaggtaagagg

SEQ ID NO: 166639 - DNA, 30 bp, Homo sapiens; identical to SEQ ID NO: 24646
  chr10:126819037-126819067
  hypo

SEQ ID NO: 166640 - DNA, 422 bp, Homo sapiens; identical to SEQ ID NO: 80784
  chr10:126819308-126819730
  hypo

SEQ ID NO: 166641 - DNA, 30 bp, Homo sapiens; identical to SEQ ID NO: 80785
  chr10:126820125-126820155
  hypo

SEQ ID NO: 166642 - DNA, 30 bp, Homo sapiens; identical to SEQ ID NO: 80786
  chr10:126824383-126824413
  hypo

SEQ ID NO: 166643 - DNA, 30 bp, Homo sapiens
  chr10:126827399-126827429
  hypo
aaacatacctgtgcccgtccgtctcttcac

SEQ ID NO: 166644 - DNA, 90 bp, Homo sapiens
  chr10:126828914-126829004
  hypo
aatcacgatgactgccgcttaaacctgccctcagcctgactgatgtgatgagggaaggggacaaagaatgagctccgaaaggacatttcg

SEQ ID NO: 166645 - DNA, 405 bp, Homo sapiens; identical to SEQ ID NO: 80787
  chr10:126830137-126830542
  hypo

SEQ ID NO: 166646 - DNA, 121 bp, Homo sapiens
  chr10:126839531-126839652
  hypo
ggccaagcacagcgctgtcctcgcagaggcacaggtgatagttagtcactgttttaccaatgaagagtcagggcaacgcaacaacacacaatggcccagcgagctagtgccagacactaag

SEQ ID NO: 166647 - DNA, 285 bp, Homo sapiens; identical to SEQ ID NO: 47905
  chr10:126847583-126847868
  hypo

SEQ ID NO: 166648 - DNA, 123 bp, Homo sapiens; identical to SEQ ID NO: 47906
  chr10:126847900-126848023
  hypo

SEQ ID NO: 166649 - DNA, 648 bp, Homo sapiens; identical to SEQ ID NO: 47909
  chr10:126849497-126850145
  hypo

SEQ ID NO: 166650 - DNA, 23 bp, Homo sapiens
  chr10:126853662-126853685
  hypo
gggcaaggtggctcacgcctgta

SEQ ID NO: 166651 - DNA, 30 bp, Homo sapiens
  chr10:126884376-126884406
  hypo
ctttgcctgtccgatcggacgggcctgtta

SEQ ID NO: 166652 - DNA, 137 bp, Homo sapiens
  chr10:126912091-126912228
  hypo
tgccgcggtaaggaacggatgaggaggatgtttaatccgcccagccttgcagctaatgaggcgggagtatttgggtgattgttgatgcaggtggaaaaactgtttctaaagagtactgattggccaggcgcggtggc

SEQ ID NO: 166653 - DNA, 30 bp, Homo sapiens
  chr10:126920336-126920366
  hypo
gcctgacattctgcacggctggcctgctcc

SEQ ID NO: 166654 - DNA, 30 bp, Homo sapiens
  chr10:126955898-126955928
  hypo
actctgccgccatctcgctccaaaacttgc

SEQ ID NO: 166655 - DNA, 30 bp, Homo sapiens
  chr10:126967099-126967129
  hypo
tctccagagctgcctcgattccccggccca

SEQ ID NO: 166656 - DNA, 150 bp, Homo sapiens
  chr10:127263256-127263406
  hypo
cgggtggccgttcatcggggaacggatgtttattgcccacctcctagtgccaggcgtagtgcccagctggggacacagaacagggaacagcaccgttatgacctctgcttctctgtagggaggacttctcccacacggagaactcggctc

SEQ ID NO: 166657 - DNA, 38 bp, Homo sapiens; identical to SEQ ID NO: 80792
  chr10:127277449-127277487
  hypo

SEQ ID NO: 166658 - DNA, 275 bp, Homo sapiens; identical to SEQ ID NO: 80793
  chr10:127314343-127314618
  hypo

SEQ ID NO: 166659 - DNA, 30 bp, Homo sapiens
  chr10:127412177-127412207
  hypo
gactcataaagtgtacgtgattctggtttg

SEQ ID NO: 166660 - DNA, 30 bp, Homo sapiens
  chr10:127412424-127412454
  hypo
agcatggcagtacaccgcataggaaggact

SEQ ID NO: 166661 - DNA, 172 bp, Homo sapiens; identical to SEQ ID NO: 80794
  chr10:127415614-127415786
  hypo

SEQ ID NO: 166662 - DNA, 30 bp, Homo sapiens
  chr10:127429161-127429191
  hypo
gagtcttcagaaatacggaagagcattacg

SEQ ID NO: 166663 - DNA, 30 bp, Homo sapiens; identical to SEQ ID NO: 24651
  chr10:127451325-127451355
  hypo

SEQ ID NO: 166664 - DNA, 323 bp, Homo sapiens; identical to SEQ ID NO: 80796
  chr10:127451803-127452126
  hypo

SEQ ID NO: 166665 - DNA, 109 bp, Homo sapiens
  chr10:127463305-127463414
  hypo
tcgcgggggaggaagacgctccccccggccttgcggggcaggtcgcgcagggcaggtcgtgcggggcaggtggggggtgccaaggaagtccgggcgtggccacaccgca

SEQ ID NO: 166666 - DNA, 310 bp, Homo sapiens
  chr10:127464145-127464455
  hypo
ctgtgcctgtgcgcgcgtgcgcatgtgcctgtgtgcacgtgcacgggcctgggggtattgctgttcttccagcttcctcctacctgagcagcgtggaggtcggcaatgggcttggcctggcgcagtggggacggctccaggtccgagcggtcccggctgtggaagagactctcgggctgggtgggccagggagcagccagccagcagagcagcagtgtcggacggaagatggaggcggcgagcattggcctggtctgaacccttgccctccctgcctggcttcttccccgtccccgtcacctctccttaa

SEQ ID NO: 166667 - DNA, 30 bp, Homo sapiens
  chr10:127475523-127475553
  hypo
cccgactcacgcaatcgtcgaggacactgc

SEQ ID NO: 166668 - DNA, 30 bp, Homo sapiens; identical to SEQ ID NO: 80799
  chr10:127478313-127478343
  hypo

SEQ ID NO: 166669 - DNA, 30 bp, Homo sapiens
  chr10:127525158-127525188
  hypo
tgtgaaatccgtcttcgcgtcatgtatctc

SEQ ID NO: 166670 - DNA, 30 bp, Homo sapiens
  chr10:127527645-127527675
  hypo
tagggaagctcgattcgcttgataatttct

SEQ ID NO: 166671 - DNA, 92 bp, Homo sapiens; identical to SEQ ID NO: 80800
  chr10:127616425-127616517
  hypo

SEQ ID NO: 166672 - DNA, 86 bp, Homo sapiens; identical to SEQ ID NO: 80801
  chr10:127659355-127659441
  hypo

SEQ ID NO: 166673 - DNA, 30 bp, Homo sapiens
  chr10:127666854-127666884
  hypo
gccagtgaggaggaacgggattgggaccca

SEQ ID NO: 166674 - DNA, 30 bp, Homo sapiens
  chr10:127693457-127693487
  hypo
tgctggcgtgctatgcgggacacctagatg

SEQ ID NO: 166675 - DNA, 30 bp, Homo sapiens; identical to SEQ ID NO: 80802
  chr10:127802681-127802711
  hypo

SEQ ID NO: 166676 - DNA, 260 bp, Homo sapiens; identical to SEQ ID NO: 24653
  chr10:127817215-127817475
  hypo

SEQ ID NO: 166677 - DNA, 37 bp, Homo sapiens; identical to SEQ ID NO: 24654
  chr10:127937967-127938004
  hypo

SEQ ID NO: 166678 - DNA, 30 bp, Homo sapiens
  chr10:128337757-128337787
  hypo
ttcaagaattttcagcgatggggtgattca

SEQ ID NO: 166679 - DNA, 30 bp, Homo sapiens
  chr10:128529150-128529180
  hypo
gctgtaccgtatggccgatgtgcggagtag

SEQ ID NO: 166680 - DNA, 31 bp, Homo sapiens; identical to SEQ ID NO: 80805
  chr10:128595435-128595466
  hypo

SEQ ID NO: 166681 - DNA, 31 bp, Homo sapiens; identical to SEQ ID NO: 80806
  chr10:128600072-128600103
  hypo

SEQ ID NO: 166682 - DNA, 31 bp, Homo sapiens; identical to SEQ ID NO: 80807
  chr10:128602214-128602245
  hypo

SEQ ID NO: 166683 - DNA, 85 bp, Homo sapiens; identical to SEQ ID NO: 80808
  chr10:128767290-128767375
  hypo

SEQ ID NO: 166684 - DNA, 35 bp, Homo sapiens; identical to SEQ ID NO: 24655
  chr10:128767589-128767624
  hypo

SEQ ID NO: 166685 - DNA, 45 bp, Homo sapiens; identical to SEQ ID NO: 80810
  chr10:128779078-128779123
  hypo

SEQ ID NO: 166686 - DNA, 31 bp, Homo sapiens; identical to SEQ ID NO: 80811
  chr10:128783518-128783549
  hypo

SEQ ID NO: 166687 - DNA, 136 bp, Homo sapiens
  chr10:128804388-128804524
  hypo
aggccagcccctgcagcggagttgctgactcgcagggtgtgggggtccatctgccgtgagcaagtcatcctgatgcagccccaccagtgggactgagccatcagcccctctccctgcgagacgtttctcacctcct

SEQ ID NO: 166688 - DNA, 141 bp, Homo sapiens; identical to SEQ ID NO: 80813
  chr10:128804852-128804993
  hypo

SEQ ID NO: 166689 - DNA, 30 bp, Homo sapiens; identical to SEQ ID NO: 80814
  chr10:128805259-128805289
  hypo

SEQ ID NO: 166690 - DNA, 255 bp, Homo sapiens; identical to SEQ ID NO: 24658
  chr10:128813791-128814046
  hypo

SEQ ID NO: 166691 - DNA, 117 bp, Homo sapiens; identical to SEQ ID NO: 80816
  chr10:128816342-128816459
  hypo

SEQ ID NO: 166692 - DNA, 30 bp, Homo sapiens
  chr10:128817488-128817518
  hypo
cgctcagctagtgtacgttatactggcatt

SEQ ID NO: 166693 - DNA, 30 bp, Homo sapiens
  chr10:128817722-128817752
  hypo
cgtggcttggcagggcgtagtggctcatgc

SEQ ID NO: 166694 - DNA, 116 bp, Homo sapiens
  chr10:128818999-128819115
  hypo
cgagtaatcactggccgcgctgtgggcaccagagagagagagagtatgggcggttatcagtctgtctcgctgtctttagcctgcagaacctgtgtatcacccggttttgtcactgt

SEQ ID NO: 166695 - DNA, 20 bp, Homo sapiens
  chr10:128819443-128819463
  hypo
gaggctgtgggagtttcgcc

SEQ ID NO: 166696 - DNA, 20 bp, Homo sapiens
  chr10:128819702-128819722
  hypo
acaggcgtgagccactgcac

SEQ ID NO: 166697 - DNA, 30 bp, Homo sapiens; identical to SEQ ID NO: 80820
  chr10:128825468-128825498
  hypo

SEQ ID NO: 166698 - DNA, 31 bp, Homo sapiens; identical to SEQ ID NO: 80821
  chr10:128851343-128851374
  hypo

SEQ ID NO: 166699 - DNA, 31 bp, Homo sapiens; identical to SEQ ID NO: 24660
  chr10:128862778-128862809
  hypo

SEQ ID NO: 166700 - DNA, 77 bp, Homo sapiens; identical to SEQ ID NO: 80823
  chr10:128863993-128864070
  hypo

SEQ ID NO: 166701 - DNA, 31 bp, Homo sapiens; identical to SEQ ID NO: 80824
  chr10:128867668-128867699
  hypo

SEQ ID NO: 166702 - DNA, 39 bp, Homo sapiens; identical to SEQ ID NO: 24661
  chr10:128874461-128874500
  hypo

SEQ ID NO: 166703 - DNA, 218 bp, Homo sapiens; identical to SEQ ID NO: 80826
  chr10:128888486-128888704
  hypo

SEQ ID NO: 166704 - DNA, 32 bp, Homo sapiens; identical to SEQ ID NO: 24662
  chr10:128891889-128891921
  hypo

SEQ ID NO: 166705 - DNA, 79 bp, Homo sapiens
  chr10:128897855-128897934
  hypo
acaagagagagcgcagggaggtgccattgtcttaaaccgccagctctcacgtgaactaatagagcgggaactcactggt

SEQ ID NO: 166706 - DNA, 205 bp, Homo sapiens
  chr10:128898511-128898716
  hypo
atgggaggcagtagccgtgcggcccaggtgctgtttgttccggggggagttaacagcctgaaccgagggctctgtcgctgcctagaagggggctgtgaggaagagagaacacccggtgtgatgcccaggcctgtggcatgcagctggggcttggcggtgcagcgcctggcactggaatccctagggaaggcgaggcagcggtggc

SEQ ID NO: 166707 - DNA, 31 bp, Homo sapiens; identical to SEQ ID NO: 80829
  chr10:128899123-128899154
  hypo

SEQ ID NO: 166708 - DNA, 195 bp, Homo sapiens; identical to SEQ ID NO: 80830
  chr10:128899934-128900129
  hypo

SEQ ID NO: 166709 - DNA, 204 bp, Homo sapiens; identical to SEQ ID NO: 80831
  chr10:128904394-128904598
  hypo

SEQ ID NO: 166710 - DNA, 31 bp, Homo sapiens; identical to SEQ ID NO: 80832
  chr10:128905316-128905347
  hypo

SEQ ID NO: 166711 - DNA, 31 bp, Homo sapiens; identical to SEQ ID NO: 80833
  chr10:128905986-128906017
  hypo

SEQ ID NO: 166712 - DNA, 63 bp, Homo sapiens; identical to SEQ ID NO: 80834
  chr10:128930827-128930890
  hypo

SEQ ID NO: 166713 - DNA, 195 bp, Homo sapiens; identical to SEQ ID NO: 80835
  chr10:128936061-128936256
  hypo

SEQ ID NO: 166714 - DNA, 30 bp, Homo sapiens
  chr10:128972588-128972618
  hypo
aatccaggcgaagtccgataacccccagac

SEQ ID NO: 166715 - DNA, 419 bp, Homo sapiens
  chr10:128973758-128974177
  hypo
agggcgcctggagcccgttgagatgtgtggctctcctccgctcgtcatctgccgggcagagtgaccactggctggcggctgcagagtctgacaaaccaggctcgggggccctggcactgagggcaggtgcgtaaacggtggcaacctccgttttaaacaccctcctgagggcaggtggagcgggctcctcggagtttggcctcccccggtcctgcttggccctcccgagcagctggtaatcgggctcttcggatggaggccgagtggagttttggagcgcagcttctccatagctgagcggctccgggcttttacagggctctgtgcagttgacccccaaaggctggtccactgtgttcatgtgttggttggaatggaaaaccaaggctgtggtcttgtgcacccgccccgcgccacat

SEQ ID NO: 166716 - DNA, 205 bp, Homo sapiens; identical to SEQ ID NO: 24663
  chr10:128999160-128999365
  hypo

SEQ ID NO: 166717 - DNA, 42 bp, Homo sapiens; identical to SEQ ID NO: 80837
  chr10:129057987-129058029
  hypo

SEQ ID NO: 166718 - DNA, 31 bp, Homo sapiens; identical to SEQ ID NO: 80838
  chr10:129059291-129059322
  hypo

SEQ ID NO: 166719 - DNA, 132 bp, Homo sapiens; identical to SEQ ID NO: 24664
  chr10:129065862-129065994
  hypo

SEQ ID NO: 166720 - DNA, 272 bp, Homo sapiens; identical to SEQ ID NO: 80840
  chr10:129144157-129144429
  hypo

SEQ ID NO: 166721 - DNA, 31 bp, Homo sapiens; identical to SEQ ID NO: 80841
  chr10:129145541-129145572
  hypo

SEQ ID NO: 166722 - DNA, 31 bp, Homo sapiens; identical to SEQ ID NO: 80842
  chr10:129145797-129145828
  hypo

SEQ ID NO: 166723 - DNA, 30 bp, Homo sapiens; identical to SEQ ID NO: 80843
  chr10:129151720-129151750
  hypo

SEQ ID NO: 166724 - DNA, 92 bp, Homo sapiens; identical to SEQ ID NO: 80844
  chr10:129156701-129156793
  hypo

SEQ ID NO: 166725 - DNA, 31 bp, Homo sapiens; identical to SEQ ID NO: 24665
  chr10:129159705-129159736
  hypo

SEQ ID NO: 166726 - DNA, 215 bp, Homo sapiens; identical to SEQ ID NO: 80846
  chr10:129165712-129165927
  hypo

SEQ ID NO: 166727 - DNA, 31 bp, Homo sapiens; identical to SEQ ID NO: 80847
  chr10:129176710-129176741
  hypo

SEQ ID NO: 166728 - DNA, 95 bp, Homo sapiens; identical to SEQ ID NO: 80848
  chr10:129182942-129183037
  hypo

SEQ ID NO: 166729 - DNA, 31 bp, Homo sapiens; identical to SEQ ID NO: 80849
  chr10:129186940-129186971
  hypo

SEQ ID NO: 166730 - DNA, 31 bp, Homo sapiens; identical to SEQ ID NO: 80850
  chr10:129187397-129187428
  hypo

SEQ ID NO: 166731 - DNA, 31 bp, Homo sapiens; identical to SEQ ID NO: 80851
  chr10:129189357-129189388
  hypo

SEQ ID NO: 166732 - DNA, 328 bp, Homo sapiens; identical to SEQ ID NO: 80852
  chr10:129195280-129195608
  hypo

SEQ ID NO: 166733 - DNA, 448 bp, Homo sapiens; identical to SEQ ID NO: 80853
  chr10:129195667-129196115
  hypo

SEQ ID NO: 166734 - DNA, 48 bp, Homo sapiens
  chr10:129199501-129199549
  hypo
tgacaccgtctcccacgtggcggtgttactggccgcaaatctgtatag

SEQ ID NO: 166735 - DNA, 160 bp, Homo sapiens
  chr10:129218387-129218547
  hypo
tgtgaaacgcatgtacgtcagaagctgcagtgcaccctctccctgttctccgtgcacctctggcggtggtgtgcgtcctcatctgtgttttcccagctgaagttgtgcaagttatttcactgttctacttatgctcctggggcctcgggagcctttccca

SEQ ID NO: 166736 - DNA, 117 bp, Homo sapiens
  chr10:129227986-129228103
  hypo
ctgacctttagggagcgaggtgtgcagggccccagggatgagcccgtgagcacctgccacgttcggcattggcccccgtgccctcaccggcccacagcgccacgttcggcattggcc

SEQ ID NO: 166737 - DNA, 197 bp, Homo sapiens; identical to SEQ ID NO: 24668
  chr10:129236891-129237088
  hypo

SEQ ID NO: 166738 - DNA, 201 bp, Homo sapiens; identical to SEQ ID NO: 80855
  chr10:129237714-129237915
  hypo

SEQ ID NO: 166739 - DNA, 206 bp, Homo sapiens
  chr10:129239687-129239893
  hypo
tccagcaccaggaggcggagaatccgaacctcccactgggggacaggcttactattcttggtccagcccagcaacctgtctgtctacgcagagggcacctcctccaggggacgggtgccggcaaggtctgtgaggacagtcagacacctgaagtttcctagcaggcggctgcgtgccagtgaccagccatgcgcaggaggggaggt

SEQ ID NO: 166740 - DNA, 202 bp, Homo sapiens; identical to SEQ ID NO: 80856
  chr10:129241060-129241262
  hypo

SEQ ID NO: 166741 - DNA, 169 bp, Homo sapiens
  chr10:129242399-129242568
  hypo
tgcggccccagagaccgaagagccaggtgatgaacgtcattggaagcgaaaggcgcttctcggtgtccccctcgtcaccgtcctcccagcaaacaccccctccagttacaccaagggccaagctcagcttcagcatgcagtcgagtaagtggaacgctccccacatacg

SEQ ID NO: 166742 - DNA, 30 bp, Homo sapiens
  chr10:129244654-129244684
  hypo
gttatcccccacggtcgatgtgattaatgc

SEQ ID NO: 166743 - DNA, 777 bp, Homo sapiens; identical to SEQ ID NO: 24670
  chr10:129245251-129246028
  hypo

SEQ ID NO: 166744 - DNA, 91 bp, Homo sapiens; identical to SEQ ID NO: 80858
  chr10:129249787-129249878
  hypo

SEQ ID NO: 166745 - DNA, 30 bp, Homo sapiens; identical to SEQ ID NO: 80859
  chr10:129683351-129683381
  hypo

SEQ ID NO: 166746 - DNA, 20 bp, Homo sapiens
  chr10:129716803-129716823
  hypo
cagagcgagactccatctca

SEQ ID NO: 166747 - DNA, 100 bp, Homo sapiens; identical to SEQ ID NO: 80861
  chr10:129721601-129721701
  hypo

SEQ ID NO: 166748 - DNA, 30 bp, Homo sapiens; identical to SEQ ID NO: 80862
  chr10:129732977-129733007
  hypo

SEQ ID NO: 166749 - DNA, 31 bp, Homo sapiens; identical to SEQ ID NO: 80863
  chr10:129833477-129833508
  hypo

SEQ ID NO: 166750 - DNA, 85 bp, Homo sapiens; identical to SEQ ID NO: 80864
  chr10:129865328-129865413
  hypo

SEQ ID NO: 166751 - DNA, 30 bp, Homo sapiens
  chr10:129897015-129897045
  hypo
gctcatccattcattcgtgtttaccgagtg

SEQ ID NO: 166752 - DNA, 223 bp, Homo sapiens; identical to SEQ ID NO: 24671
  chr10:129907593-129907816
  hypo

SEQ ID NO: 166753 - DNA, 27 bp, Homo sapiens
  chr10:129953932-129953959
  hypo
ggcgtgagccaccgcacccggccttga

SEQ ID NO: 166754 - DNA, 30 bp, Homo sapiens; identical to SEQ ID NO: 24672
  chr10:129964196-129964226
  hypo

SEQ ID NO: 166755 - DNA, 30 bp, Homo sapiens
  chr10:130008351-130008381
  hypo
tgggcttggaagccccgccagcgagggcat

SEQ ID NO: 166756 - DNA, 325 bp, Homo sapiens; identical to SEQ ID NO: 119988
  chr10:130008906-130009231
  hypo

SEQ ID NO: 166757 - DNA, 261 bp, Homo sapiens
  chr10:130123678-130123939
  hypo
atcaatgttccctcgcgcggcggggccaatccacacccatatttttaatgatctgacccaatgtgaatctgccggttacaaagatgctgccttagaattttaaaaaacctcataaataatttgttataaccgcagggtatcatgttaccatgttacttatcatggaactaggataatatttaaattgcttatttacagcgttaaagtaaatagtggtttgggcatttctgcaaagcaggggacatgcgttgtcactccctg

SEQ ID NO: 166758 - DNA, 30 bp, Homo sapiens
  chr10:130124389-130124419
  hypo
ccatcaagtgcccctcgcttaagccccact

SEQ ID NO: 166759 - DNA, 402 bp, Homo sapiens
  chr10:130185247-130185649
  hypo
gcttcgccaggagtccgggcatcgcggagattcatcttcgtcctggcacccaccatgcggtgcccagccagccctgcacttggtcggccctgctcgagaatccaacctggttccattttcaattttggaagcgttgttgcggattaaaaaccggtcaaatgatgggaaagagtcagagagaacagctgctctgtccccgccatcctgccaaggcctaaatgagcctccaggaagcttcagagagatgagggatgcatttcccagcaggagtgatgcatggcccaggaatggcaagtcacgtcgggggcttgtggcaccctggggaggacctgtcagtgcagcgccaactggctgccagtgcccatgcacacacgatggaaacttgatcggtcaagtttctga

SEQ ID NO: 166760 - DNA, 30 bp, Homo sapiens
  chr10:130196618-130196648
  hypo
cccaaggagtccaagcgctcagctgctgcc

SEQ ID NO: 166761 - DNA, 284 bp, Homo sapiens; identical to SEQ ID NO: 24675
  chr10:130203289-130203573
  hypo

SEQ ID NO: 166762 - DNA, 53 bp, Homo sapiens; identical to SEQ ID NO: 80872
  chr10:130259850-130259903
  hypo

SEQ ID NO: 166763 - DNA, 123 bp, Homo sapiens
  chr10:130265102-130265225
  hypo
tcccggtgagggtcacggctatgcactgagtggggtgtgccaaaaggatgctgtgggaggcacatgaacttccagagaggccccctccaggctggccgctgtcccccgcggggtggaagacag

SEQ ID NO: 166764 - DNA, 30 bp, Homo sapiens
  chr10:130297829-130297859
  hypo
cctaccccagtaagccgtgaggagggaggc

SEQ ID NO: 166765 - DNA, 30 bp, Homo sapiens
  chr10:130299033-130299063
  hypo
aggtggaaagtggatcgggattcaggccag

SEQ ID NO: 166766 - DNA, 217 bp, Homo sapiens; identical to SEQ ID NO: 24676
  chr10:130300170-130300387
  hypo

SEQ ID NO: 166767 - DNA, 89 bp, Homo sapiens
  chr10:130577810-130577899
  hypo
caaggctgccaatttgagcaccggccaaactgcaaccagaccccaggaaaggtaaaatagattgaaatgtattgcgcggtactcagatt

SEQ ID NO: 166768 - DNA, 30 bp, Homo sapiens
  chr10:130652263-130652293
  hypo
ctgggggaagccttgcgtgtccgattacat

SEQ ID NO: 166769 - DNA, 303 bp, Homo sapiens; identical to SEQ ID NO: 80875
  chr10:130748863-130749166
  hypo

SEQ ID NO: 166770 - DNA, 41 bp, Homo sapiens
  chr10:130828603-130828644
  hypo
tgcacatccacaaagcgccccagctacgtcgctgggcagcc

SEQ ID NO: 166771 - DNA, 184 bp, Homo sapiens
  chr10:130828911-130829095
  hypo
acgcagacagacactcgacacccagtttctccatggacggcatgcatttacatgcataatacggcggatgtgcccgctctgactgcagctcatttcctaagtcgcaagaaacgctggtatttttcaaaagtgatttcaaagaatttgtgtatgtgcatgtgtgtgcgcacgcgagcgtgtatga

SEQ ID NO: 166772 - DNA, 43 bp, Homo sapiens; identical to SEQ ID NO: 80878
  chr10:130911837-130911880
  hypo

SEQ ID NO: 166773 - DNA, 30 bp, Homo sapiens
  chr10:131138595-131138625
  hypo
ctctgcatgccccgccgctgagcctcagcc

SEQ ID NO: 166774 - DNA, 30 bp, Homo sapiens; identical to SEQ ID NO: 80879
  chr10:131263947-131263977
  hypo

SEQ ID NO: 166775 - DNA, 30 bp, Homo sapiens; identical to SEQ ID NO: 24677
  chr10:131264297-131264327
  hypo

SEQ ID NO: 166776 - DNA, 72 bp, Homo sapiens; identical to SEQ ID NO: 80881
  chr10:131301186-131301258
  hypo

SEQ ID NO: 166777 - DNA, 30 bp, Homo sapiens
  chr10:131309261-131309291
  hypo
agccagacacagacacgtgcttcctgtaat

SEQ ID NO: 166778 - DNA, 222 bp, Homo sapiens
  chr10:131329752-131329974
  hypo
gcatccccccacctctctgctcgcccggtgtgcacacctgctaggtcagccctgggcatcgcatcagagacgctgccgtgctcggtggcctggggcttctgtcctgtagaggcctcagccattgcattttaggaatcggcactaaactaacttctactgctgcccacagaagaactgtgccaaatgctctggttgtctaccggaaaaaaaggtagtatgcag

SEQ ID NO: 166779 - DNA, 298 bp, Homo sapiens; identical to SEQ ID NO: 80883
  chr10:131348387-131348685
  hypo

SEQ ID NO: 166780 - DNA, 250 bp, Homo sapiens
  chr10:131377659-131377909
  hypo
gcagagctttctgctcatccccggatcatggcagcgtcagatggaactcggcctgccccgtttctgtgcagctgtcaggatgtatggggttttcccatgctccgtgcctccatgcctgcggcactttggaaggacgttaaggcaggacatctttaggagaatgtctttattgactttgtctttatttaccttgggcctggcgctgttatctcagctgagtgtccgtgtttaaaggcgacacatggaacga

SEQ ID NO: 166781 - DNA, 266 bp, Homo sapiens
  chr10:131378236-131378502
  hypo
gaacactccttaggccggtgtgtggtactgtcaggtgcttatttttgtttcacaaacttggtatttattaggtgttccaggctttgttcgacccgggtgggagggaggatctttgttggaggactctcactttctaattgcgggtttttgttctgaagccatagggtgtgttgccgtctcagcagggaggagtattccccattaacgggcaggtggcatcgtgggagaagcacctgctgtgcccgggggggcgggactgcgcagga

SEQ ID NO: 166782 - DNA, 125 bp, Homo sapiens; identical to SEQ ID NO: 80886
  chr10:131412742-131412867
  hypo

SEQ ID NO: 166783 - DNA, 30 bp, Homo sapiens
  chr10:131421283-131421313
  hypo
tgcagaggagccagccggatggcatcgtcc

SEQ ID NO: 166784 - DNA, 127 bp, Homo sapiens
  chr10:131428276-131428403
  hypo
gaacttgtaaaagaacgtcaggtggaagcggtgagagggcctggacagttgttctgcagctgtgttctttgtctggttaatcgcgtgcgtctccagtctgtggctggccagccgcgtccacctgcgt

SEQ ID NO: 166785 - DNA, 30 bp, Homo sapiens; identical to SEQ ID NO: 80887
  chr10:131504557-131504587
  hypo

SEQ ID NO: 166786 - DNA, 190 bp, Homo sapiens; identical to SEQ ID NO: 24678
  chr10:131566933-131567123
  hypo

SEQ ID NO: 166787 - DNA, 30 bp, Homo sapiens
  chr10:131568720-131568750
  hypo
agccctgggggccacgtcccctcccggtct

SEQ ID NO: 166788 - DNA, 192 bp, Homo sapiens; identical to SEQ ID NO: 80889
  chr10:131577564-131577756
  hypo

SEQ ID NO: 166789 - DNA, 249 bp, Homo sapiens
  chr10:131592425-131592674
  hypo
aggagcagccgcagccgcgctgtgcacccaggaacctgtccttcaggaaggaggcggcggtagaaattaatctgctcagattttccaactaatgaagtattcccaggaccgaaggggccacacagagacgtctgcggcgctgcttcccattcgcgcagatgcacacggattccgggcccagcgctaactcggatgtgttttccagctccgtttattgtcttccataatgcttaacgtactgtttgtata

SEQ ID NO: 166790 - DNA, 30 bp, Homo sapiens
  chr10:131592969-131592999
  hypo
ccctctagaagggagcggctgagagctctt

SEQ ID NO: 166791 - DNA, 30 bp, Homo sapiens
  chr10:131606559-131606589
  hypo
cgttgtgttcctgggcgcttctggtcttgc

SEQ ID NO: 166792 - DNA, 30 bp, Homo sapiens
  chr10:131637084-131637114
  hypo
tattaatttatctccgactcaccgttacaa

SEQ ID NO: 166793 - DNA, 393 bp, Homo sapiens; identical to SEQ ID NO: 24680
  chr10:131638467-131638860
  hypo

SEQ ID NO: 166794 - DNA, 535 bp, Homo sapiens; identical to SEQ ID NO: 80891
  chr10:131647409-131647944
  hypo

SEQ ID NO: 166795 - DNA, 55 bp, Homo sapiens
  chr10:131660293-131660348
  hypo
tgggactaaattgtggacacccgccaggagacacgggagaaaccctcacccaggg

SEQ ID NO: 166796 - DNA, 141 bp, Homo sapiens; identical to SEQ ID NO: 80892
  chr10:131660569-131660710
  hypo

SEQ ID NO: 166797 - DNA, 30 bp, Homo sapiens; identical to SEQ ID NO: 80893
  chr10:131666154-131666184
  hypo

SEQ ID NO: 166798 - DNA, 30 bp, Homo sapiens; identical to SEQ ID NO: 80894
  chr10:131666993-131667023
  hypo

SEQ ID NO: 166799 - DNA, 30 bp, Homo sapiens
  chr10:131686471-131686501
  hypo
tatggctcttcctccgccttctggacctga

SEQ ID NO: 166800 - DNA, 176 bp, Homo sapiens; identical to SEQ ID NO: 80895
  chr10:131686724-131686900
  hypo

SEQ ID NO: 166801 - DNA, 85 bp, Homo sapiens; identical to SEQ ID NO: 80896
  chr10:131694682-131694767
  hypo

SEQ ID NO: 166802 - DNA, 161 bp, Homo sapiens; identical to SEQ ID NO: 80897
  chr10:131694792-131694953
  hypo

SEQ ID NO: 166803 - DNA, 121 bp, Homo sapiens; identical to SEQ ID NO: 80898
  chr10:131713786-131713907
  hypo

SEQ ID NO: 166804 - DNA, 31 bp, Homo sapiens; identical to SEQ ID NO: 80899
  chr10:131718519-131718550
  hypo

SEQ ID NO: 166805 - DNA, 241 bp, Homo sapiens
  chr10:131735250-131735491
  hypo
ctcagtcacccctcccgcgacagtgcatctcctacgtgatgcatgccgagtgccaggcgccagccagcttcattcgggccccaagggctgcagtgaggaggagcccagagaatccccaaaagctggactggctgtctgaaagtgggacagcaatcgtgccgggaacaagatccctgagtctacaactgggatcagatgggtgggacaaccacaggccgtagggggccgggtcgacaaggga

SEQ ID NO: 166806 - DNA, 30 bp, Homo sapiens
  chr10:131735886-131735916
  hypo
ccactgtccagtccccgccccgtgcccacg

SEQ ID NO: 166807 - DNA, 241 bp, Homo sapiens; identical to SEQ ID NO: 119995
  chr10:131757611-131757852
  hypo

SEQ ID NO: 166808 - DNA, 2208 bp, Homo sapiens; identical to SEQ ID NO: 119997
  chr10:131761128-131763336
  hypo

SEQ ID NO: 166809 - DNA, 269 bp, Homo sapiens; identical to SEQ ID NO: 119998
  chr10:131763632-131763901
  hypo

SEQ ID NO: 166810 - DNA, 30 bp, Homo sapiens; identical to SEQ ID NO: 119999
  chr10:131765430-131765460
  hypo

SEQ ID NO: 166811 - DNA, 847 bp, Homo sapiens; identical to SEQ ID NO: 7804
  chr10:131769490-131770337
  hypo

SEQ ID NO: 166812 - DNA, 133 bp, Homo sapiens
  chr10:131811605-131811738
  hypo
gcagggctctgcagccgctgcgggcttgccgaccgtcgcctggttgtaatcaccatgacttatgggtcttggctggtgttttgggcaagatgaacattgttggagcagaaattcatagcgcgtcataagtatt

SEQ ID NO: 166813 - DNA, 31 bp, Homo sapiens; identical to SEQ ID NO: 24687
  chr10:131821309-131821340
  hypo

SEQ ID NO: 166814 - DNA, 119 bp, Homo sapiens
  chr10:131825391-131825510
  hypo
acactgtccccagccggaggccaccgctgctgccctcacagctgccatctcacggtctccccctgccccacttcagggctctccccggggggccaaacaaggcccggcgatggggtgga

SEQ ID NO: 166815 - DNA, 30 bp, Homo sapiens
  chr10:131825762-131825792
  hypo
gacttgctatcccaccgccgggtgaagtta

SEQ ID NO: 166816 - DNA, 153 bp, Homo sapiens
  chr10:131826125-131826278
  hypo
gcaaccccggcccgtcggccgtgagactttcacttgcagctgcttggaataatcaggacattccccgaaggcccaggtactgctgtgctctcctcgggggccgaaaccccttcctcagtgcgtgtgctgtgggcgtcacgtgcagagcttccc

SEQ ID NO: 166817 - DNA, 1047 bp, Homo sapiens
  chr10:131844031-131845078
  hypo
gcgattgcctcgactcgaggctcagctaaggagcagtcaggtccgtgtcacctgtggcttccactcccaggaagtctgatggctccggtcgtggctgttgtggggaatccgtcgtgtggagaacgtgcctgccacgtgcgggggagaaaggagccaccttccgagtacgcgacctcacctgccgggcgtgaggtgctggactgagaccagggtggggctctgggcatgggaggtggggctgggcgtggggcacgtggcacagagggatgcgcgtggtagggctcagggcagacggaacgtggaacagggagtggctcagggcatggggatggggcggggcgtgggacggggcgtggcgtggggcacaggaaggggcagggcacgaggagtggggcgagaggtgctaagtggggcctgagtggggcgcggggcgtggcgcggagtggggtggagcgggtggggcgaggctcggcgtgggacacgagggacgggacgcgggggcacggcaatgggtggcgcagggcgcactctcgggctccctgcaggtgggcagccccacctgtgcacgccgctcccccgcccagcgcctcccccgggacctgctccagaagcgccagttgcgggaccccacacggaaggcagtcttcggtggttctcactgcaattcctcttaattatgtgtgacataaaaagaccacctacagacgagacaatgctgccgtaagagtctcggggttactgcagggaattcttcataaccgaagtgtgttttccccgaggagttatgctaccatttgatttaatttttaatttttacattttaatcaaaaatagatcaaatggtggtggtctctccggggaaacacacttcagataggaagccggccatgctcctttaaatatggaaactgccgtctccgcgctgcgggctgggcgtgtcctttctgggaggggccttgggccatgcacctgaggccaccagctcgcccacgccgcccgctcacctgcacgcggaggttcatttaatccgtgcgtctatgcagcgcc

SEQ ID NO: 166818 - DNA, 76 bp, Homo sapiens; identical to SEQ ID NO: 24690
  chr10:131936597-131936673
  hypo

SEQ ID NO: 166819 - DNA, 181 bp, Homo sapiens; identical to SEQ ID NO: 80908
  chr10:131937431-131937612
  hypo

SEQ ID NO: 166820 - DNA, 74 bp, Homo sapiens; identical to SEQ ID NO: 80909
  chr10:131975643-131975717
  hypo

SEQ ID NO: 166821 - DNA, 233 bp, Homo sapiens
  chr10:131987121-131987354
  hypo
ccaaagctcttatccaaggggcgagtggctcagccagggttcattaccaggctccggatcctgcttctcccggatcacagcaagcgctgtgcttaggcctggggtgggggacggattctccctgaaggcaggtctgacgcgggcgggagcacccaccccgctgggttcttacggcggatccgttacctgggtctccagagggtgaggtcgccgtgggcaccctgggagcagca

SEQ ID NO: 166822 - DNA, 30 bp, Homo sapiens; identical to SEQ ID NO: 80911
  chr10:131993155-131993185
  hypo

SEQ ID NO: 166823 - DNA, 191 bp, Homo sapiens
  chr10:132237996-132238187
  hypo
cagtgaatccccgcaccgagtttagaaactgcgctagccagtccctcccaactcctgacagcatgttatgctgctggttatttgtggcctggttagaattttccaacagatgcagtgcctgacatgtgacatcacagtgcagagtgtgccccgaaactgtctggtttctagaagcccgctggacccgtgcc

SEQ ID NO: 166824 - DNA, 39 bp, Homo sapiens; identical to SEQ ID NO: 80912
  chr10:132251718-132251757
  hypo

SEQ ID NO: 166825 - DNA, 37 bp, Homo sapiens
  chr10:132284134-132284171
  hypo
gcagtgtcgacagcgcggcagccgtggagaggaaggg

SEQ ID NO: 166826 - DNA, 30 bp, Homo sapiens
  chr10:132284371-132284401
  hypo
ggtgggccgtgctcccgctggcggctctac

SEQ ID NO: 166827 - DNA, 30 bp, Homo sapiens
  chr10:132349731-132349761
  hypo
gcctacacctttaggcggggccctgccagg

SEQ ID NO: 166828 - DNA, 235 bp, Homo sapiens
  chr10:132365736-132365971
  hypo
gcaaagcagaaatggcgtgacagccacatgtgcggggccggggaagtggaggctggctgctcctcacgggcactcgggtgaggctctctccacctcgcgcaggggctacccgctcgccgtgctgagcccttccagctctgccacgcgcaggaagccggtgcggtgacggcagcgcacgctcccaggcacctgcctttgcccacgccggggaggcgcttcctgtgagtcaggactc

SEQ ID NO: 166829 - DNA, 30 bp, Homo sapiens
  chr10:132420997-132421027
  hypo
cactccaccgtgcagcgcatggaccagtta

SEQ ID NO: 166830 - DNA, 55 bp, Homo sapiens
  chr10:132421232-132421287
  hypo
cgcacatggtgctcccgcccctctctctctctgaatctttcgctgactacacgga

SEQ ID NO: 166831 - DNA, 30 bp, Homo sapiens
  chr10:132495234-132495264
  hypo
cagtcctgcagtgtgcgatggaggccctgt

SEQ ID NO: 166832 - DNA, 30 bp, Homo sapiens
  chr10:132528780-132528810
  hypo
gagcagagatcgcagcgagcagagattgca

SEQ ID NO: 166833 - DNA, 30 bp, Homo sapiens
  chr10:132529071-132529101
  hypo
agagattgcagtgagcggagattgcagtga

SEQ ID NO: 166834 - DNA, 30 bp, Homo sapiens
  chr10:132866762-132866792
  hypo
gcggggtgctgtgcccgcggcatcttcacg

SEQ ID NO: 166835 - DNA, 140 bp, Homo sapiens; identical to SEQ ID NO: 80914
  chr10:132869741-132869881
  hypo

SEQ ID NO: 166836 - DNA, 92 bp, Homo sapiens
  chr10:132873693-132873785
  hypo
cttaggcctccgtgcgctgggcgcacctgggtccggctccagagtctgggtctccgtgcagccttaggcctccttgcgctgggcgcacccgg

SEQ ID NO: 166837 - DNA, 79 bp, Homo sapiens
  chr10:132933677-132933756
  hypo
aaagacatcagtttcaacaatcgcaggggcctctgcacattttctttctataaaacccgacaattctccctacacctgt

SEQ ID NO: 166838 - DNA, 43 bp, Homo sapiens
  chr10:132956921-132956964
  hypo
gaaggttgaggtctacacttacgtagacagaggatctaattct

SEQ ID NO: 166839 - DNA, 164 bp, Homo sapiens; identical to SEQ ID NO: 80916
  chr10:132958984-132959148
  hypo

SEQ ID NO: 166840 - DNA, 371 bp, Homo sapiens
  chr10:132977018-132977389
  hypo
tctgcccgttctatgcgctccaggatgaagatctggctctccgcacttgaggagcctctctttgatcaagttaaacaacagaatcaacagatgggactccactgtacactccgcagagctgcaaatgaattgtttaatgagaaggcaaagcggttccagcagagccccgctcactactcatgtatgctcatcagtgctcgtgcggtccctcagggacacactcctacgtgtcatcacggagggttccgtctcatgatggcaccagcccagcctccagcccctctgacagcaggggaggctgagcccgcgtcggcaccatgctggtggaagccggggcttctgtgaacacacctgcccggctctctccacgg

SEQ ID NO: 166841 - DNA, 193 bp, Homo sapiens; identical to SEQ ID NO: 24692
  chr10:132992256-132992449
  hypo

SEQ ID NO: 166842 - DNA, 31 bp, Homo sapiens; identical to SEQ ID NO: 80919
  chr10:133004437-133004468
  hypo

SEQ ID NO: 166843 - DNA, 209 bp, Homo sapiens; identical to SEQ ID NO: 24693
  chr10:133058384-133058593
  hypo

SEQ ID NO: 166844 - DNA, 120 bp, Homo sapiens; identical to SEQ ID NO: 47947
  chr10:133110064-133110184
  hypo

SEQ ID NO: 166845 - DNA, 321 bp, Homo sapiens; identical to SEQ ID NO: 47948
  chr10:133110553-133110874
  hypo

SEQ ID NO: 166846 - DNA, 125 bp, Homo sapiens; identical to SEQ ID NO: 47949
  chr10:133110966-133111091
  hypo

SEQ ID NO: 166847 - DNA, 35 bp, Homo sapiens; identical to SEQ ID NO: 80924
  chr10:133146660-133146695
  hypo

SEQ ID NO: 166848 - DNA, 30 bp, Homo sapiens
  chr10:133195770-133195800
  hypo
gggtccctgtgcacacgctcgaccaccacg

SEQ ID NO: 166849 - DNA, 30 bp, Homo sapiens
  chr10:133196203-133196233
  hypo
tcatatggggtgatgcgaaggatacttttt

SEQ ID NO: 166850 - DNA, 30 bp, Homo sapiens
  chr10:133204276-133204306
  hypo
ttctcctctcagccccgcaccgtaaacgcg

SEQ ID NO: 166851 - DNA, 30 bp, Homo sapiens
  chr10:133205116-133205146
  hypo
gtgtcgggagaaggacgggacatgtggacg

SEQ ID NO: 166852 - DNA, 30 bp, Homo sapiens
  chr10:133208944-133208974
  hypo
gccaggcgacggcaccgccctcagatccgg

SEQ ID NO: 166853 - DNA, 30 bp, Homo sapiens; identical to SEQ ID NO: 80925
  chr10:133217038-133217068
  hypo

SEQ ID NO: 166854 - DNA, 84 bp, Homo sapiens
  chr10:133218244-133218328
  hypo
gatttgaacccttctcgtgacgactcaccgtatgccgtacttgggagagaacacaaagggcagaatgatcgcaccgagtccaaa

SEQ ID NO: 166855 - DNA, 33 bp, Homo sapiens; identical to SEQ ID NO: 80926
  chr10:133229419-133229452
  hypo

SEQ ID NO: 166856 - DNA, 30 bp, Homo sapiens
  chr10:133246555-133246585
  hypo
ttcagctcacaccaacgctgctgttgggtg

SEQ ID NO: 166857 - DNA, 30 bp, Homo sapiens
  chr10:133247253-133247283
  hypo
tccctgcggggggtgcgggacactcagggg

SEQ ID NO: 166858 - DNA, 31 bp, Homo sapiens; identical to SEQ ID NO: 80927
  chr10:133441393-133441424
  hypo

SEQ ID NO: 166859 - DNA, 30 bp, Homo sapiens; identical to SEQ ID NO: 24695
  chr10:133448522-133448552
  hypo

SEQ ID NO: 166860 - DNA, 30 bp, Homo sapiens
  chr10:133514264-133514294
  hypo
agacaggccttgcgtcgcctgcaagatatt

SEQ ID NO: 166861 - DNA, 115 bp, Homo sapiens; identical to SEQ ID NO: 80929
  chr10:133514940-133515055
  hypo

SEQ ID NO: 166862 - DNA, 30 bp, Homo sapiens
  chr10:133528857-133528887
  hypo
ttgtagggaggggtacggcttcacaggtga

SEQ ID NO: 166863 - DNA, 90 bp, Homo sapiens; identical to SEQ ID NO: 24696
  chr10:133557717-133557807
  hypo

SEQ ID NO: 166864 - DNA, 30 bp, Homo sapiens
  chr10:133572043-133572073
  hypo
acgcatctgtgccatcgagtgtgacgcatg

SEQ ID NO: 166865 - DNA, 159 bp, Homo sapiens
  chr10:133572408-133572567
  hypo
acgtgctgtcaatcacgcatctgtaccatcgagtaagacacgtgctgcaggatcttcatacatgctctctttcacgcatctgtaccatgctgtgggatcttcatacatgctctcaatcatgcatcggtaccatcgagtatgatgcgtgctgcaggatct

SEQ ID NO: 166866 - DNA, 30 bp, Homo sapiens
  chr10:133579861-133579891
  hypo
acgcacctcctgatccggccatacacaagg

SEQ ID NO: 166867 - DNA, 30 bp, Homo sapiens
  chr10:133580337-133580367
  hypo
ctgacctttccttcccgggcctccgtgcgc

SEQ ID NO: 166868 - DNA, 94 bp, Homo sapiens
  chr10:133590115-133590209
  hypo
cggggaactgcacagcgctgaatgcccggtcaataacacggctgattgggtgcttgcaggcactcagggtgagaaggagcggcaacgtcacaca

SEQ ID NO: 166869 - DNA, 384 bp, Homo sapiens; identical to SEQ ID NO: 24697
  chr10:133783037-133783421
  hypo

SEQ ID NO: 166870 - DNA, 30 bp, Homo sapiens
  chr10:133784754-133784784
  hypo
gggggtactgacagcggcaaacactgtcct

SEQ ID NO: 166871 - DNA, 35 bp, Homo sapiens; identical to SEQ ID NO: 24698
  chr10:133790490-133790525
  hypo

SEQ ID NO: 166872 - DNA, 571 bp, Homo sapiens; identical to SEQ ID NO: 7811
  chr10:133795312-133795883
  hypo

SEQ ID NO: 166873 - DNA, 83 bp, Homo sapiens; identical to SEQ ID NO: 7812
  chr10:133795975-133796058
  hypo

SEQ ID NO: 166874 - DNA, 1 bp, Homo sapiens
  chr10:133796301-133796302
  hypo
g

SEQ ID NO: 166875 - DNA, 30 bp, Homo sapiens; identical to SEQ ID NO: 24701
  chr10:133797312-133797342
  hypo

SEQ ID NO: 166876 - DNA, 30 bp, Homo sapiens; identical to SEQ ID NO: 80937
  chr10:133799405-133799435
  hypo

SEQ ID NO: 166877 - DNA, 307 bp, Homo sapiens
  chr10:133806788-133807095
  hypo
gttttcagttcttgccgctggcaaatcgagctgctgggaacgttcacattcatgtgccagcgtttgtatcgacatgttctttcatttcttgcaggtaaatgccatggagtgcagcggctgggtcgtatggggagggtgtgcttagctttttaaggagctgccatcgtgttctccaaagtgctcgcacatgttactttcccagcagcaggagagtgccagtggctgaacacccacgccaactgtggtttagccgggctttttaattgtagccattctaatgggtgtgtgctgccgtctcgtgatttta

SEQ ID NO: 166878 - DNA, 280 bp, Homo sapiens; identical to SEQ ID NO: 80939
  chr10:133834564-133834844
  hypo

SEQ ID NO: 166879 - DNA, 30 bp, Homo sapiens; identical to SEQ ID NO: 80940
  chr10:133872433-133872463
  hypo

SEQ ID NO: 166880 - DNA, 30 bp, Homo sapiens; identical to SEQ ID NO: 80941
  chr10:133878001-133878031
  hypo

SEQ ID NO: 166881 - DNA, 576 bp, Homo sapiens
  chr10:133920808-133921384
  hypo
ccaaaacacatccatctgtgacgccccgagggacacacgctccttgatggtcaacaggccaggcttgcgggctccccaggtgccggcaaggttccagggccggcgtctgagggctgcaacccagacccgctgggcaccctgcggggcatgtttagttgtacctggaggagaggatgtgctctcttggcacaacgtgcagaaggcaccggaggaaaggaatggagaagaagcctgtttgcctcagagctcctcatcctggacgccctcgccagagggttcatgttatggtttcctgcataagcgatctgagccctgcctcctcaagcgtaactgacagcatgctggatgcacaggcagcaactcccttttgccaagtgatcacagcgcctcttggagtcagttccacgtggaacagtgcagctggcacaagctcgtccatgttattcacatgccccaccgtggtgggcctgtcgacggcatccaggctgattcgattctcggctgatactgcagccctgtacctgggtcttggactacatgcaaaagaactcctgcaggagacgttcttgcaagcca

SEQ ID NO: 166882 - DNA, 30 bp, Homo sapiens
  chr10:133934994-133935024
  hypo
ggccctgggtgaggacgtagcgggtcaggg

SEQ ID NO: 166883 - DNA, 30 bp, Homo sapiens; identical to SEQ ID NO: 80943
  chr10:133948426-133948456
  hypo

SEQ ID NO: 166884 - DNA, 30 bp, Homo sapiens; identical to SEQ ID NO: 24704
  chr10:133949194-133949224
  hypo

SEQ ID NO: 166885 - DNA, 30 bp, Homo sapiens; identical to SEQ ID NO: 24705
  chr10:133949902-133949932
  hypo

SEQ ID NO: 166886 - DNA, 30 bp, Homo sapiens; identical to SEQ ID NO: 80946
  chr10:133950885-133950915
  hypo

SEQ ID NO: 166887 - DNA, 488 bp, Homo sapiens
  chr10:133951544-133952032
  hypo
acacgggcagtaaaccgtggactgaaaccggtggagctgctctaccacttacacaacctcttcaactggcttccgcaggagcgggacaagctgttaagattccggaagcaaagaaagaaaatggcaaaacttcccaaggtaaggaacagcacaccggcacgtgcggagagtacgccgggtgtgtgcggagaggaccacgcccgcgtgtgtggagagcgctggtgtgtgcggagaggggtgcgccggtgtacgtggagggcgctgggtgtgtgtgccgaggaccgcgcccacgtgtgtggagagtatgccgggtgcgtgtggagaggaccgcgcccgcgtgtgtggagagtacgccgggtgtgtgcggagaggggtgcgccggtgtatgtggagggcgctgggtgtgtgtgccgaggaccgcgcccgcgtgtgtggagagcgctggtgtgtgtggagagcgtgctggcgtgtgcttagtaggaatcagt

SEQ ID NO: 166888 - DNA, 30 bp, Homo sapiens
  chr10:133952320-133952350
  hypo
gtgccacacaccccacgctcgcctgtcctg

SEQ ID NO: 166889 - DNA, 593 bp, Homo sapiens; identical to SEQ ID NO: 24707
  chr10:133953706-133954299
  hypo

SEQ ID NO: 166890 - DNA, 73 bp, Homo sapiens; identical to SEQ ID NO: 80949
  chr10:133955512-133955585
  hypo

SEQ ID NO: 166891 - DNA, 31 bp, Homo sapiens; identical to SEQ ID NO: 24709
  chr10:133962081-133962112
  hypo

SEQ ID NO: 166892 - DNA, 173 bp, Homo sapiens
  chr10:133979197-133979370
  hypo
tcgccttagacgggccgtgtgtcatcccacatccaccctagccctgccccgcccctcgtaggcggtgacacccatgcccttccactgggcactcactgccgcctgtgagaatcatcatcctgaggaacgagttactcaaggcacagcctttgaggccccggtggactccaggc

SEQ ID NO: 166893 - DNA, 30 bp, Homo sapiens
  chr10:133981136-133981166
  hypo
catcattgttcgcctcggtcctcgagtctg

SEQ ID NO: 166894 - DNA, 292 bp, Homo sapiens
  chr10:133981378-133981670
  hypo
tcgcccctcggccctcgcccctcactccagccaagcggagcctcgctgactctgcactctacgtttcatttcttccagccccacattgaatcggacccttttcctccagtgggaccagaaagcagggacaaaatgggacgtcgcgtctccatcctgaagacccagggagatttggtctctgcacgcccgtcccgtggaggaagagtgagaaggggcagtgtgtggggcgtggagctgccgtccacgtgggatgtgccagaactagaactggctctgccgacttctcgggggc

SEQ ID NO: 166895 - DNA, 1012 bp, Homo sapiens
  chr10:133982427-133983439
  hypo
gagcagcccaggtggggatggcgggcgcaagaagggaaccgcggggacggcctttcccctcccgccctgtgtggggacgctgcacgagccgtggaccaagaggctgacaggtaagggctgccatctgtccgcggggagggcctttgcaccctccctgcgaggtgagctccagcttcttcacacctctgtgtccccgtctgcacatgcgtgacgctgccaccccgtccactgctgacccgtcaagatcacctctcccgccactgacgggacagggcctgggggctggtgtggagcgtggcgtgagctgtcgctggggcagggtctgcagacatggtgctccacggggacctggcgtctggcagagctggtcctcctcccacttgcaggaggaggcttgcgggaaaagggagaaaccccgtaggtgcaatgaggccgctctccgagtgcgcctccctccgctgctcccgtgcacttgaacgtggacgccgccccacactcggccccggcacctgaggtgtccgctctggggaggcgactctgggtgctcccagcagggagggagggaggtcaggactctgggcatgctccaccgtggagctttcctcgccagcggggttccctatgggagggtttgtggatccgttgtgtctgtgggactcagcggggccctggggcagggtgagccggttcttggggaggcagtggcagccccatggggggccgcccagggagcgctccatctcccccacctccgacccacaccgtgtctgagagccacctgtgtctcctgcagtgggcagcggctgtgggccacgggcactgttgttcccgggagatgctccctgcgtagaaaatgggagggggaggaggaggtgcgaccaccaccctggactcaggagagggcggcagctccatcttcacccttgactcaggaggggtccgcagcgaggaggaggtgcgaagggggcggcggctccgtcttgcaggtcccctggggcgcgttcttcaggtg

SEQ ID NO: 166896 - DNA, 220 bp, Homo sapiens; identical to SEQ ID NO: 24711
  chr10:133983712-133983932
  hypo

SEQ ID NO: 166897 - DNA, 30 bp, Homo sapiens
  chr10:133996665-133996695
  hypo
gttaataaaagctaccgtggcgctgtgggt

SEQ ID NO: 166898 - DNA, 317 bp, Homo sapiens; identical to SEQ ID NO: 120024
  chr10:134000108-134000425
  hypo

SEQ ID NO: 166899 - DNA, 210 bp, Homo sapiens; identical to SEQ ID NO: 120025
  chr10:134000529-134000739
  hypo

SEQ ID NO: 166900 - DNA, 149 bp, Homo sapiens; identical to SEQ ID NO: 120026
  chr10:134000798-134000947
  hypo

SEQ ID NO: 166901 - DNA, 184 bp, Homo sapiens; identical to SEQ ID NO: 120027
  chr10:134001139-134001323
  hypo

SEQ ID NO: 166902 - DNA, 54 bp, Homo sapiens
  chr10:134002750-134002804
  hypo
cggtggagggaaaagcgttgccgagtccagcccgtgggcgcgtccttctccacc

SEQ ID NO: 166903 - DNA, 30 bp, Homo sapiens
  chr10:134013560-134013590
  hypo
ggcacgccctggccccgctggagtgcccgg

SEQ ID NO: 166904 - DNA, 303 bp, Homo sapiens
  chr10:134013834-134014137
  hypo
acctctcatgggcctcgtgctgcaggggtggtcgtgtttggggagcccatcaccgccagcctgggcaccgacggttcacactactggagcaagaactgggccaaggccgcagccttcgtcacatcaccccctgtcaacccagaccccaccacggcggaccacctcacctgcttgctgtccaggtaagcagcctctccaggtggccccaggttggccgcccgctgcacaccctgccaaggctgtggccccgacaccccaggcctctcccacggctcccatagggcagcccggacagtggcgggt

SEQ ID NO: 166905 - DNA, 30 bp, Homo sapiens; identical to SEQ ID NO: 80956
  chr10:134014521-134014551
  hypo

SEQ ID NO: 166906 - DNA, 314 bp, Homo sapiens
  chr10:134016117-134016431
  hypo
gaggcactggaccctcgggcctctctccccagaacgtggagtacaacatcttcgagggagtggagtgccggggagcgcctgccgtggtcataagtcagggccgagtggcgctggaggacgggaagatgtttgtcaccccgggggcgggccgcttcgtccctcggaaaacattcccggactttgtctacaagaggatcaaagctcgcaacagggtagggcggcacccgcaagggtgttgtgcaggtaggcaggtgggcgctgagttctaggcccagaacgcacccctggtcaacctggcccggcctcccgagggg

SEQ ID NO: 166907 - DNA, 479 bp, Homo sapiens
  chr10:134019293-134019772
  hypo
tcctctcccccacgccgtctctgcacaggcggggcctggctggctgtgggctggtccgacgactcctgcagccgcagctcttctcccctcaatggcagggaggagcgcaccctctcacagggaagagggccggcagggcagccaacatccagggcggggcagagggcagccaacatccagggcgggacagaggcccccccccccccccgcctacattctcaccggacagcccgagccaccccagaaggccggggagcatgcacgggagtgtgtggaagtgaagcacacaccaccgccacccaggtgggcgctgctcacagacgcaggcccagcactcaaggccgggcagctatgaggctgacccgagcccccggtgtgtgactgcggtgctggcgcgtgctgtgtctcaaagggtgcgtggacgttcccagacggttgtcctcatcccaagagcggggcctggtcgcagtcactgggca

SEQ ID NO: 166908 - DNA, 30 bp, Homo sapiens
  chr10:134021486-134021516
  hypo
aggggtgaggaccacgggcgtcccggccta

SEQ ID NO: 166909 - DNA, 30 bp, Homo sapiens
  chr10:134022366-134022396
  hypo
gcaggggcctcccgccgctcccctccatag

SEQ ID NO: 166910 - DNA, 143 bp, Homo sapiens
  chr10:134022677-134022820
  hypo
tctgggcatccccatcgggcctccacctgtggctttggatgacggcctctgggctattgaagtgccccggccctccagcagccagactgcccgggagctcgcatctctgcgggtgactcacccaagcccgaggatgccaaggc

SEQ ID NO: 166911 - DNA, 20 bp, Homo sapiens
  chr10:134023769-134023789
  hypo
catggatcctatttttggtc

SEQ ID NO: 166912 - DNA, 287 bp, Homo sapiens; identical to SEQ ID NO: 80959
  chr10:134024096-134024383
  hypo

SEQ ID NO: 166913 - DNA, 701 bp, Homo sapiens
  chr10:134035686-134036387
  hypo
gccagcacacctgggcgagtgtgagggcttcacatggccgtccccacacacacaactgatgccgacgcacctgggtgagtgtgagggcttcacatggctgtcccggcacacatacctgatgctgacgcacctgggcgagtgtgagggcttcacatagccgtccccgcacacacaaccaacaccagcacacctgggcaagcacgaaggcttcacatggccatccccgtgcactcataaccccagccctggttgtccctgcccacctgcttcataaggagcgaggtgggggctgggaaaggcagaagggaggtctctggccttctcaggacttcaggaaacggtctgctggacttccgagacgtgtgcgctgccaggggtccccacacgccttgctcggtggtagagaggagccccaagcccagcccgccgccgcgccctgagcctgccctggcactcacggactgggagctgtccctgctgttgtcccgggacttgttcttggccagacgcttcttcttcttgtgcaggggcctggactccaggatcatctcctccagctcaaaggtggggtcgcagtgcagacggcctttctacagagggatgggtgctgagccccggcccgtggaggacgccacatccatccccagggccccccacctgagccgcccacaggcttacgttgggcacgaagcccggctcca

SEQ ID NO: 166914 - DNA, 31 bp, Homo sapiens; identical to SEQ ID NO: 80962
  chr10:134038356-134038387
  hypo

SEQ ID NO: 166915 - DNA, 302 bp, Homo sapiens
  chr10:134038774-134039076
  hypo
accaccagtccacctcgaaggagtagccggtcccgccgttgacaaaagagtggaagatctccggagctttccgacagaaagaaggaaaaacagctgccacggggtcacagcccggacccgtgggcacagggccggcaccttgaggccacatcccgagaccaggctgcctccagggtgggacagagaagccaccgaggtcttgtccttcccacctggaggaagccagctcccatctggaaccccagctcgggctcacccatgtacggcttggtgcctgctaatgccgtcgcccgctccccgtc

SEQ ID NO: 166916 - DNA, 31 bp, Homo sapiens
  chr10:134041490-134041521
  hypo
ccaggaagacgtgctcgatctcctgcaggat

SEQ ID NO: 166917 - DNA, 31 bp, Homo sapiens; identical to SEQ ID NO: 80964
  chr10:134043176-134043207
  hypo

SEQ ID NO: 166918 - DNA, 106 bp, Homo sapiens; identical to SEQ ID NO: 80965
  chr10:134044631-134044737
  hypo

SEQ ID NO: 166919 - DNA, 456 bp, Homo sapiens
  chr10:134049508-134049964
  hypo
acaggattggtgtcgcgtcggtccctgatgaggccggacccgggtgcttgtggggggtcacagtgttcctcctctataccatgtgagttgcatcttctaaaaactagaaaaagagaagagttgaggcaatgcttccgtggccccaaagcccacacatgggcctcagtcaggagcacagaaaggacccctggccccttccccaggtggcagagcctgcgcacggcctggtcagcgaagggacgtggtcaatgctgggacctgggctctgggcccacgcggaggcccgactgccccggaaatggccaacaatgtccccgcggtcctggatgccacaacctgtcatgaggttcgcagaagggggtgacccgatggggtggccaggggctcccggtccagatgaggaagctgaggctgggtggcaggtggcagccccaccgtgcacgggccccacacaca

SEQ ID NO: 166920 - DNA, 30 bp, Homo sapiens
  chr10:134052413-134052443
  hypo
gggtggacacttgggcggagaccaggctgc

SEQ ID NO: 166921 - DNA, 30 bp, Homo sapiens
  chr10:134053012-134053042
  hypo
ggtcgctccatgccacgcacttggccgccg

SEQ ID NO: 166922 - DNA, 334 bp, Homo sapiens; identical to SEQ ID NO: 24715
  chr10:134053689-134054023
  hypo

SEQ ID NO: 166923 - DNA, 162 bp, Homo sapiens
  chr10:134056817-134056979
  hypo
cagcctctggaaccccggctggacgctgaggaggcagcaggcttctaatcacactgagcagcctgggggcgaggcgggggtggagagtgggctggacggaagtctatgccgggtaagggggcaggcaggggcggagggcaggctggacgaatgtccatggca

SEQ ID NO: 166924 - DNA, 129 bp, Homo sapiens
  chr10:134057207-134057336
  hypo
catttccgagagcggcggccccgagggtggagccatggccctggtggtagagcagctgcaccagggccatttggcaggacccgactctacccggtcagactctaaatgctgcgccgccctgaacgggtg

SEQ ID NO: 166925 - DNA, 30 bp, Homo sapiens
  chr10:134057733-134057763
  hypo
aaccctccaggtgcacgactaccccgcatc

SEQ ID NO: 166926 - DNA, 116 bp, Homo sapiens
  chr10:134058331-134058447
  hypo
cccaacagccctgagcgtctctgacgaactccgccagcttcagcacctcacctcgatggtcaaccagcctcaccagcaacaaaacggtgcaggtccacgggcgcctcccaacatgc

SEQ ID NO: 166927 - DNA, 88 bp, Homo sapiens
  chr10:134065941-134066029
  hypo
ggcgtgatttacgccgtgcagtgatgctgtcagcgcatccttcacccgtgctgtccacctctcaaattaagacgcaggtaaaaggaga

SEQ ID NO: 166928 - DNA, 30 bp, Homo sapiens; identical to SEQ ID NO: 80970
  chr10:134072063-134072093
  hypo

SEQ ID NO: 166929 - DNA, 30 bp, Homo sapiens; identical to SEQ ID NO: 80971
  chr10:134073292-134073322
  hypo

SEQ ID NO: 166930 - DNA, 119 bp, Homo sapiens
  chr10:134089038-134089157
  hypo
ccgagtctcagtgcccgctcttccttctggccactccgccgacgtgtcactgcaatgcagggtcacagcacagccaggccacggggccagtggccaggggccagcgcagtgcagagcca

SEQ ID NO: 166931 - DNA, 30 bp, Homo sapiens
  chr10:134089492-134089522
  hypo
cacagtgaaggcccgcgaggatggaagacc

SEQ ID NO: 166932 - DNA, 30 bp, Homo sapiens
  chr10:134090390-134090420
  hypo
cccagggctcgaggccgtggctgcgcccca

SEQ ID NO: 166933 - DNA, 138 bp, Homo sapiens
  chr10:134095685-134095823
  hypo
tgcaggaccaaggtgcgccaaccagcccgcaccacgcccgagaggcttcgcagccgcccaccccggctctcacagcgcccatccctgccacacgccctgccagctgcgccagcttccccaggccgtccagagtcgctg

SEQ ID NO: 166934 - DNA, 175 bp, Homo sapiens
  chr10:134104518-134104693
  hypo
gctctctcctgcattcgataacagccctcatggctgtgggacctcactgtttgtatgttgaaaacacaaaatcaacacagccactgcacatagaagagaagaaaccaccggagggcaaatgtaattaatggaaattttctgaaccttccaattagctcggcggtggctgagctgg

SEQ ID NO: 166935 - DNA, 281 bp, Homo sapiens
  chr10:134106505-134106786
  hypo
atgaaacctgccccacgcaacgtgcagggcaagaggctgacccagaggtgagcagcgaacggcaaacatcagcaagcggggagcacggcacgtgcggggcggtcagtgcagcgcgtgcatgcgtgcggggagggcagcgctggggaagagccaagagaggcctggggccagggggctggggcaggacttagagtgggcctggctgagaggaggatggagtggccatcgctactctcacggtccctccacccaggcctggcgcctggcgggctcccctcctg

SEQ ID NO: 166936 - DNA, 422 bp, Homo sapiens
  chr10:134116363-134116785
  hypo
accataaggaaagaacgaggcaaaaccatcacggggccactagagtcactccaaggcaacgtgacagaccacccagaaagccaacaaaatgaacttcaaagctatagactaacgagaatttagccaagtgcagtcatgtgcaagaggcagcgaagtctcagccacacacaaggtgaaccttgtaaaagtggagcgttccttcacatcagcagcagccagcgtggaaacggtcccactccagtcccacaggccgggagcagcaagggcgcagcctgcctggggctctgcggtgaggggctgcgtgggaggcctcagatccctacagggggaaacatcctaactgcactcatcctgggaaagaggagaactaatgcgagaaggagagagctttctcactctccgtcaagcgatactccctacgg

SEQ ID NO: 166937 - DNA, 30 bp, Homo sapiens; identical to SEQ ID NO: 24717
  chr10:134117344-134117374
  hypo

SEQ ID NO: 166938 - DNA, 30 bp, Homo sapiens
  chr10:134119434-134119464
  hypo
tgggacaccgtcagccgaatctctgccgtc

SEQ ID NO: 166939 - DNA, 30 bp, Homo sapiens
  chr10:134119740-134119770
  hypo
gatgcgtttctcagacgttctctcaacccg

SEQ ID NO: 166940 - DNA, 30 bp, Homo sapiens; identical to SEQ ID NO: 80974
  chr10:134120014-134120044
  hypo

SEQ ID NO: 166941 - DNA, 769 bp, Homo sapiens; identical to SEQ ID NO: 7817
  chr10:134120668-134121437
  hypo

SEQ ID NO: 166942 - DNA, 632 bp, Homo sapiens; identical to SEQ ID NO: 120032
  chr10:134121687-134122319
  hypo

SEQ ID NO: 166943 - DNA, 30 bp, Homo sapiens; identical to SEQ ID NO: 80977
  chr10:134161567-134161597
  hypo

SEQ ID NO: 166944 - DNA, 30 bp, Homo sapiens; identical to SEQ ID NO: 80978
  chr10:134161981-134162011
  hypo

SEQ ID NO: 166945 - DNA, 105 bp, Homo sapiens; identical to SEQ ID NO: 80979
  chr10:134164630-134164735
  hypo

SEQ ID NO: 166946 - DNA, 45 bp, Homo sapiens
  chr10:134168481-134168526
  hypo
gttactcgggacgttcgcagccctgggcggcgagctgtgaggagg

SEQ ID NO: 166947 - DNA, 45 bp, Homo sapiens; identical to SEQ ID NO: 80980
  chr10:134171805-134171850
  hypo

SEQ ID NO: 166948 - DNA, 30 bp, Homo sapiens
  chr10:134172672-134172702
  hypo
ctgaggtggtggagcgtgggatagagcatg

SEQ ID NO: 166949 - DNA, 31 bp, Homo sapiens; identical to SEQ ID NO: 80981
  chr10:134176770-134176801
  hypo

SEQ ID NO: 166950 - DNA, 30 bp, Homo sapiens; identical to SEQ ID NO: 80982
  chr10:134184508-134184538
  hypo

SEQ ID NO: 166951 - DNA, 385 bp, Homo sapiens
  chr10:134188500-134188885
  hypo
ccagagacgtggtgacgccctaagtcctgccagcctttctaacatctccccctccttgtctcccataaggccacagagctacaggatgaagtattgaagctaaaattgggattaaccttgaacaaagatcgtcgacgggcggccctcactggaaacctttcgcttggcctgccggcagcacagcctcaaaatacattttttaacacaaaatatggagaatcaggaaatgttcgcagataccagtgacaccaggtggctggactgatggagacgtcttcagacaggagccgctcagtcttctttcccgggcgtcgcctcctgtgtggtgccggaagagcgccaggttcagtgttaccctgagggctgatttcgcgcagcctgttgt

SEQ ID NO: 166952 - DNA, 31 bp, Homo sapiens; identical to SEQ ID NO: 80983
  chr10:134198071-134198102
  hypo

SEQ ID NO: 166953 - DNA, 295 bp, Homo sapiens; identical to SEQ ID NO: 47966
  chr10:134209483-134209778
  hypo

SEQ ID NO: 166954 - DNA, 946 bp, Homo sapiens; identical to SEQ ID NO: 47967
  chr10:134210376-134211322
  hypo

SEQ ID NO: 166955 - DNA, 402 bp, Homo sapiens; identical to SEQ ID NO: 80986
  chr10:134212590-134212992
  hypo

SEQ ID NO: 166956 - DNA, 688 bp, Homo sapiens
  chr10:134217025-134217713
  hypo
acaggggacagggctcggggacattggctgcacttgggcctcgagaatgatggggcagccaggtgcccgtgcagcgaggtggcctgcactctaggacgtgagctgcttctgaggacaaatcccccaaagccacgcacagtgctgggcactagccgttaagcgcaggctgcccggcccagcgagtcccaggatgagaaggcctttacaactgggattggtgtcccggctgtggcagccgcggggccttaattgtggctcccccagcagtggctgctcctgccccctgtgccccttcccctgcagctcgtgtggcccagcagggcaggacctgagggtgccaggtgggcagatggggatgagggctctctcggggccactgaaagcatctgggccatctccagagggctcagccccgggccacgcgcagccccaccccagacacacgtcatgcacctggaaccctgctcccgtaggacggcattctccagggctcctgcaggacggcattctccagggctcctgcaggacggcattctccagggctcctgcaggacggcattcttctgggctcctgcagggagctttctccaggggcttgctttgggggttgaagcgttgcctggccctaggggttgtcttccctgagtcccccagcccctcggagaggagggaacggctgagcctgtga

SEQ ID NO: 166957 - DNA, 30 bp, Homo sapiens; identical to SEQ ID NO: 80987
  chr10:134218393-134218423
  hypo

SEQ ID NO: 166958 - DNA, 30 bp, Homo sapiens; identical to SEQ ID NO: 24724
  chr10:134218741-134218771
  hypo

SEQ ID NO: 166959 - DNA, 30 bp, Homo sapiens; identical to SEQ ID NO: 80989
  chr10:134219190-134219220
  hypo

SEQ ID NO: 166960 - DNA, 30 bp, Homo sapiens
  chr10:134219506-134219536
  hypo
tccttggtggccggcgcgtgttcttgacat

SEQ ID NO: 166961 - DNA, 30 bp, Homo sapiens
  chr10:134233571-134233601
  hypo
gaggccagctgttaccgtgttcgacatgga

SEQ ID NO: 166962 - DNA, 31 bp, Homo sapiens; identical to SEQ ID NO: 80990
  chr10:134242153-134242184
  hypo

SEQ ID NO: 166963 - DNA, 30 bp, Homo sapiens; identical to SEQ ID NO: 24725
  chr10:134246645-134246675
  hypo

SEQ ID NO: 166964 - DNA, 31 bp, Homo sapiens; identical to SEQ ID NO: 24726
  chr10:134252926-134252957
  hypo

SEQ ID NO: 166965 - DNA, 31 bp, Homo sapiens; identical to SEQ ID NO: 80993
  chr10:134253239-134253270
  hypo

SEQ ID NO: 166966 - DNA, 202 bp, Homo sapiens; identical to SEQ ID NO: 80994
  chr10:134269925-134270127
  hypo

SEQ ID NO: 166967 - DNA, 136 bp, Homo sapiens; identical to SEQ ID NO: 80995
  chr10:134273058-134273194
  hypo

SEQ ID NO: 166968 - DNA, 44 bp, Homo sapiens; identical to SEQ ID NO: 80996
  chr10:134276611-134276655
  hypo

SEQ ID NO: 166969 - DNA, 82 bp, Homo sapiens; identical to SEQ ID NO: 80997
  chr10:134279121-134279203
  hypo

SEQ ID NO: 166970 - DNA, 106 bp, Homo sapiens; identical to SEQ ID NO: 80998
  chr10:134279497-134279603
  hypo

SEQ ID NO: 166971 - DNA, 107 bp, Homo sapiens; identical to SEQ ID NO: 80999
  chr10:134280449-134280556
  hypo

SEQ ID NO: 166972 - DNA, 30 bp, Homo sapiens
  chr10:134290435-134290465
  hypo
ccgggtcagagatgccgctggggtgctcat

SEQ ID NO: 166973 - DNA, 112 bp, Homo sapiens; identical to SEQ ID NO: 81000
  chr10:134292418-134292530
  hypo

SEQ ID NO: 166974 - DNA, 30 bp, Homo sapiens
  chr10:134292963-134292993
  hypo
ggcgtgagacccctgcgtgagctggttctg

SEQ ID NO: 166975 - DNA, 186 bp, Homo sapiens
  chr10:134298546-134298732
  hypo
ctatccgattcacgtcgctgagctagcgtgtcactgccgagagacaggctcgcctgtgaagcggaggaggacattagtgtagaaacgcacagccttggacaggctcgcctgtgaaacggaggaggacttcagcgtagaaatgcacagccttggacaggctcgcctgtgaaacggaggaggacttca

SEQ ID NO: 166976 - DNA, 30 bp, Homo sapiens
  chr10:134299071-134299101
  hypo
gtagtaacttccagccgtgtcctcacgtgg

SEQ ID NO: 166977 - DNA, 384 bp, Homo sapiens; identical to SEQ ID NO: 81001
  chr10:134300835-134301219
  hypo

SEQ ID NO: 166978 - DNA, 54 bp, Homo sapiens; identical to SEQ ID NO: 24731
  chr10:134302491-134302545
  hypo

SEQ ID NO: 166979 - DNA, 86 bp, Homo sapiens; identical to SEQ ID NO: 81003
  chr10:134304826-134304912
  hypo

SEQ ID NO: 166980 - DNA, 31 bp, Homo sapiens; identical to SEQ ID NO: 81004
  chr10:134344093-134344124
  hypo

SEQ ID NO: 166981 - DNA, 123 bp, Homo sapiens; identical to SEQ ID NO: 81005
  chr10:134346518-134346641
  hypo

SEQ ID NO: 166982 - DNA, 771 bp, Homo sapiens; identical to SEQ ID NO: 47970
  chr10:134351008-134351779
  hypo

SEQ ID NO: 166983 - DNA, 30 bp, Homo sapiens; identical to SEQ ID NO: 81007
  chr10:134359202-134359232
  hypo

SEQ ID NO: 166984 - DNA, 30 bp, Homo sapiens
  chr10:134359596-134359626
  hypo
ctgcagcccttggccgtgtcacgccatgtg

SEQ ID NO: 166985 - DNA, 275 bp, Homo sapiens
  chr10:134370564-134370839
  hypo
ttcttttgtatgctgtgacaccggtttggtaggtctgagtggagatttggtcagttccgcctaaaggccgacgggcccggctttctggggagaaggttttcccttgcagaggggtatcctttggtgtctgttgccgctgtgaccgactgtctcacatgagggatggagtccaggctgaggcaccctcgcccggggccactgtgactcccatggagcctgggatttgttccggttaggccacgggtcacagtgctcagtgccgggcagatgtgggc

SEQ ID NO: 166986 - DNA, 30 bp, Homo sapiens; identical to SEQ ID NO: 24732
  chr10:134400336-134400366
  hypo

SEQ ID NO: 166987 - DNA, 30 bp, Homo sapiens; identical to SEQ ID NO: 24733
  chr10:134421015-134421045
  hypo

SEQ ID NO: 166988 - DNA, 56 bp, Homo sapiens; identical to SEQ ID NO: 24734
  chr10:134421292-134421348
  hypo

SEQ ID NO: 166989 - DNA, 46 bp, Homo sapiens; identical to SEQ ID NO: 81012
  chr10:134421770-134421816
  hypo

SEQ ID NO: 166990 - DNA, 56 bp, Homo sapiens; identical to SEQ ID NO: 81013
  chr10:134427567-134427623
  hypo

SEQ ID NO: 166991 - DNA, 30 bp, Homo sapiens; identical to SEQ ID NO: 81014
  chr10:134455848-134455878
  hypo

SEQ ID NO: 166992 - DNA, 37 bp, Homo sapiens; identical to SEQ ID NO: 24735
  chr10:134457708-134457745
  hypo

SEQ ID NO: 166993 - DNA, 202 bp, Homo sapiens; identical to SEQ ID NO: 81016
  chr10:134459515-134459717
  hypo

SEQ ID NO: 166994 - DNA, 56 bp, Homo sapiens; identical to SEQ ID NO: 81017
  chr10:134460289-134460345
  hypo

SEQ ID NO: 166995 - DNA, 31 bp, Homo sapiens; identical to SEQ ID NO: 81018
  chr10:134466578-134466609
  hypo

SEQ ID NO: 166996 - DNA, 30 bp, Homo sapiens; identical to SEQ ID NO: 81019
  chr10:134466859-134466889
  hypo

SEQ ID NO: 166997 - DNA, 40 bp, Homo sapiens; identical to SEQ ID NO: 81020
  chr10:134467310-134467350
  hypo

SEQ ID NO: 166998 - DNA, 30 bp, Homo sapiens
  chr10:134470210-134470240
  hypo
aagcagggttgccccgggctcctgagagga

SEQ ID NO: 166999 - DNA, 30 bp, Homo sapiens; identical to SEQ ID NO: 81021
  chr10:134473537-134473567
  hypo

SEQ ID NO: 167000 - DNA, 210 bp, Homo sapiens
  chr10:134477299-134477509
  hypo
gctcctcttctgagccgtgagctgggcagggccgcgctcacatcattcctctccccctgtcgccgggtgggaaatccgtaacaggctctgtggcaaaggctgggccaaggtgcctcgtgggcagccgatccatcaggcggccgacaggcgtgatcgagtgccgtgtcacacgcagcccaggaaacaaacacgccgcgcgaaaggtattgg

SEQ ID NO: 167001 - DNA, 379 bp, Homo sapiens; identical to SEQ ID NO: 81023
  chr10:134481124-134481503
  hypo

SEQ ID NO: 167002 - DNA, 30 bp, Homo sapiens
  chr10:134489068-134489098
  hypo
tccaggggccttgccgtgcccgggagagtg

SEQ ID NO: 167003 - DNA, 374 bp, Homo sapiens; identical to SEQ ID NO: 81024
  chr10:134491021-134491395
  hypo

SEQ ID NO: 167004 - DNA, 59 bp, Homo sapiens
  chr10:134492042-134492101
  hypo
gagggttctgtccagcggtcctgagctgctgctgctcagccgggcgcccagagggtgtg

SEQ ID NO: 167005 - DNA, 30 bp, Homo sapiens
  chr10:134498321-134498351
  hypo
aggtgagcatggtttcgtgcccctgggctc

SEQ ID NO: 167006 - DNA, 515 bp, Homo sapiens
  chr10:134499295-134499810
  hypo
gaagtggtctgctcccgccctgagttggctgtgtttgcaaagtgggcccgctatcagaattcagctcccgaaatcaagctaagtgacacggtgtggccatttatcacattaccggactccaattgaagttgagaggttgttttaatagcatttgtaaatactccatcttcactagccgcccctgtgagaggcactgagcccccatggtacgcagggttcgttgcgccctggtcgccagttggtgtggaagcctgatggtggtgactgggagcttcagttgcccattagctcccaggctgccttcagagaccagggtcccaccagtgcagccccagccagggcccaggttagccggggtctggatctcctgtgtggcccgcaccggatcgacttttcggtgccccaggggcttggctttgtccagtggaggccgcttcccggctgtgccgtggcctccgggggctggaggactcctgcccgtgtctgcagtcctcgcagaagcatcacagctaatg

SEQ ID NO: 167007 - DNA, 406 bp, Homo sapiens; identical to SEQ ID NO: 81026
  chr10:134503265-134503671
  hypo

SEQ ID NO: 167008 - DNA, 193 bp, Homo sapiens; identical to SEQ ID NO: 81027
  chr10:134504488-134504681
  hypo

SEQ ID NO: 167009 - DNA, 30 bp, Homo sapiens
  chr10:134505533-134505563
  hypo
atgctcagcgcagtcggggggcctcgggct

SEQ ID NO: 167010 - DNA, 351 bp, Homo sapiens
  chr10:134517970-134518321
  hypo
tgttggacgccagcccgcggcggctgctggtgcgcagagccacccctcgcagcccgccggcaacatgggctctgtcctcccctccttgtacccgaggccccacagctgggacttgaacctggcagcctggcagtcctgtcttacccactgccttgaggccctgggtgctgctggtgtggatcctgtgcgtggctgggccgtgggggggcagtggctgttccaggtgggccgtctccccggaaagtgcaggctggatttggacgtgtgggagatggaggaagggcgtctagtcaggcagcaggcagctcctctggagtgtggaggatggaggaagggcgtctggacaggcgg

SEQ ID NO: 167011 - DNA, 296 bp, Homo sapiens
  chr10:134518522-134518818
  hypo
tggacaggtggcaggcggctcgtctggagtgcaggctgagtggaggggagagagtccaagcattgggggtgtcccagctgcaccgttggtgggagcatggagcccgctgtggggcatcagcagcacccacttctccccacagctcagcttcccactgatgtgtttccattgcagacacagttaccgacaggaaatgaacacagaggctccccggggcaaatggcctccccgagagaggaggcggacatgtttggaatcagagacaagtgtctggtgcagcacgcagggagcctgcc

SEQ ID NO: 167012 - DNA, 605 bp, Homo sapiens
  chr10:134527000-134527605
  hypo
ctgtgctgttattagcgggtatatggccttggctctcctctgcatctggcccttgctgagggccctgaggcgtggccccttatcccctctgaccgcccctgacctccgtctccagagtgatggagccctggtcccctgccactagcctggtcccggggagggtggcaactgcgaggcctgggtgctgctgtgctcgtggccacacactgaggccggccctcagccctgtgcacggccacaccctctgcaggggacctgtccggcctcccggatatctctggagctggcactgacaccgaggcagggatcggtctgagcctggggactgtgctctcaactgcccaccgtagggaagcagcacaggtgggggatgggggcctggggctttgtcagcgacaaagtgactgatgaccgcctgtgccctgggcgccctccctggacagcatgtcagtcgcccagggagaagggcctcacccacaggagcggcgcggttcttcctgcctgatcagccctcggcttgcaggcaccaagcgtctcggggacctcccacggagcccaggagcagggagggccctgccgtgtctgctgttgggtcttggtgacag

SEQ ID NO: 167013 - DNA, 3 bp, Homo sapiens
  chr10:134527777-134527780
  hypo
cgg

SEQ ID NO: 167014 - DNA, 354 bp, Homo sapiens
  chr10:134527839-134528193
  hypo
ccctttcaccgcggctgctaacctcttggcagccaccagcagaccacattctgctgtgcggatcgggcaggacaatgccgcgcggcctctgaatggacgctgccaccaacggggccccattcacggcgttgggaaccgggcgcacattgtctgccccgcagggagacagcgaggaggctcctgcagcctcttcctggtttaatctccccgcgcggcttcccaggtccatgtcccgtatcagctgcggggccggcagcaccaggcccaggagggagggcaggtcccagccctggaggaggatgcaggccaggttaaaacccagaggcaccgtaggaccttcgcaccgttgctcta

SEQ ID NO: 167015 - DNA, 125 bp, Homo sapiens; identical to SEQ ID NO: 81030
  chr10:134528538-134528663
  hypo

SEQ ID NO: 167016 - DNA, 558 bp, Homo sapiens; identical to SEQ ID NO: 81031
  chr10:134529077-134529635
  hypo

SEQ ID NO: 167017 - DNA, 30 bp, Homo sapiens
  chr10:134540368-134540398
  hypo
gtgatttcaacttccggctggattccaagt

SEQ ID NO: 167018 - DNA, 50 bp, Homo sapiens; identical to SEQ ID NO: 81032
  chr10:134540683-134540733
  hypo

SEQ ID NO: 167019 - DNA, 412 bp, Homo sapiens
  chr10:134542024-134542436
  hypo
tggaagcggcatttccggcaggtctggaacatctctgagtgagctcatttctaacctgttactcgagagccagtgagtccacagtgcacataagtacttcccgctctgactgggaggggccaggatgaaagtcaagaagaacccgcgaaagaccaaagccgatcaatcccgggcgcccagcaattggggaaaggtcagggagcttggaaagggccttttccttctggtagagcaaatgtcacagtaaagggcagctggtcctggccgggtcagagccgtggtgaggcacgcactggagcagccgcgggagcctccctggtgaagggagccagctgctgagcccggtggccgggccgtgtgaccacaaggcgtcgggggcagtgggaagcctgggctccggtgcctgtggggc

SEQ ID NO: 167020 - DNA, 30 bp, Homo sapiens; identical to SEQ ID NO: 81034
  chr10:134543856-134543886
  hypo

SEQ ID NO: 167021 - DNA, 30 bp, Homo sapiens; identical to SEQ ID NO: 81035
  chr10:134544190-134544220
  hypo

SEQ ID NO: 167022 - DNA, 30 bp, Homo sapiens; identical to SEQ ID NO: 81036
  chr10:134544993-134545023
  hypo

SEQ ID NO: 167023 - DNA, 68 bp, Homo sapiens; identical to SEQ ID NO: 81037
  chr10:134546238-134546306
  hypo

SEQ ID NO: 167024 - DNA, 30 bp, Homo sapiens; identical to SEQ ID NO: 81038
  chr10:134547441-134547471
  hypo

SEQ ID NO: 167025 - DNA, 30 bp, Homo sapiens; identical to SEQ ID NO: 81039
  chr10:134550043-134550073
  hypo

SEQ ID NO: 167026 - DNA, 30 bp, Homo sapiens; identical to SEQ ID NO: 81040
  chr10:134553173-134553203
  hypo

SEQ ID NO: 167027 - DNA, 401 bp, Homo sapiens
  chr10:134556146-134556547
  hypo
cataaattacagccccgtgaaacaaaaagtgcctcccgatgagttcggaccgtgagggacacccagctccgatgcttccttcccggggtctggaatccctggtgaaccggggcccttggtagtcaagaaacctgtcattgaaattcatgatgccggtttggttctctttgccgagatttatcattgacaggcatcctgcgtcctttggccctttatttaaccgctgaaggcattgtttttaagaccatttcttttagaagagtttcttttcagatgttcctacgaacatctgtttgtggctgaaattcgacccagccggcctgcgcctgccccgcgccccctttgtccccggccattgtttctgatttcatgctatcagaggtctgcgtgtttttctgcat

SEQ ID NO: 167028 - DNA, 173 bp, Homo sapiens; identical to SEQ ID NO: 24742
  chr10:134559538-134559711
  hypo

SEQ ID NO: 167029 - DNA, 30 bp, Homo sapiens
  chr10:134562150-134562180
  hypo
cgcggtgatctgtgccggctgtccgccagc

SEQ ID NO: 167030 - DNA, 655 bp, Homo sapiens
  chr10:134562452-134563107
  hypo
gcccaccccagcctgcgccccagggactggtttgagcctgttaacaccacaaagcaggcgtgtgacctcagccatccctcccacgtcagcttcacccagatgagcctgttgagacggttcccggtcaagccgcctgcagcccttgcccgttgtcacagtcgaacagctctcgagggagttcagggacgggagagagcgagcgggaggaggccggccatgtgcccccgcaggcaccctctttgctgttctcagtgctgctgtgccttccgagcctgctggtgtcgcactggcttttgccccaaagcagctctgtgggcggcagcagctccggggtgtcctcacggttgcagccacgctttgttggggagcagccagcctcaggcccttcgcacgtgtgagggtcggctgttgcgggagtggcccctgaccccaggtgcggaaatctgggtgtgacaccagctgctgtctggaaccagccatcctatcccactgactcggggtgtcgggtgacgctgccatgggcaggtgggcccccctgggacttatctccgttgctgtctttctgcagacgctctgcacaaaagccaccatgcagacggtccgggccgccgacaccaatgaagtggtgaagctcatatttcgtgagtcggacaac

SEQ ID NO: 167031 - DNA, 135 bp, Homo sapiens
  chr10:134566207-134566342
  hypo
gcgtggaggcggtgcggcatggaggggtgtgtctagagcatctgggagcaattgtctttcatgtggatccaaagtcctccttttctctcagcattttgacacagagcacgcccctgctgtcggtagccaccatac

SEQ ID NO: 167032 - DNA, 30 bp, Homo sapiens
  chr10:134566560-134566590
  hypo
agccgatgcctcggcgttcctgtcctgcta

SEQ ID NO: 167033 - DNA, 84 bp, Homo sapiens
  chr10:134567165-134567249
  hypo
ggcttgggagtttccgcagcaccggcctcttggagggaggtgttttctgtgtgtttagcaaccgctgtagccccaggtgcattg

SEQ ID NO: 167034 - DNA, 30 bp, Homo sapiens; identical to SEQ ID NO: 81044
  chr10:134567744-134567774
  hypo

SEQ ID NO: 167035 - DNA, 30 bp, Homo sapiens; identical to SEQ ID NO: 81045
  chr10:134571362-134571392
  hypo

SEQ ID NO: 167036 - DNA, 30 bp, Homo sapiens; identical to SEQ ID NO: 81046
  chr10:134573012-134573042
  hypo

SEQ ID NO: 167037 - DNA, 59 bp, Homo sapiens; identical to SEQ ID NO: 81047
  chr10:134575251-134575310
  hypo

SEQ ID NO: 167038 - DNA, 145 bp, Homo sapiens; identical to SEQ ID NO: 24745
  chr10:134577902-134578047
  hypo

SEQ ID NO: 167039 - DNA, 30 bp, Homo sapiens; identical to SEQ ID NO: 81049
  chr10:134578984-134579014
  hypo

SEQ ID NO: 167040 - DNA, 31 bp, Homo sapiens; identical to SEQ ID NO: 24746
  chr10:134580978-134581009
  hypo

SEQ ID NO: 167041 - DNA, 30 bp, Homo sapiens; identical to SEQ ID NO: 24747
  chr10:134582063-134582093
  hypo

SEQ ID NO: 167042 - DNA, 30 bp, Homo sapiens
  chr10:134582323-134582353
  hypo
aacgcattgcaaaccggccgagcagccaag

SEQ ID NO: 167043 - DNA, 101 bp, Homo sapiens; identical to SEQ ID NO: 81052
  chr10:134583321-134583422
  hypo

SEQ ID NO: 167044 - DNA, 30 bp, Homo sapiens
  chr10:134583674-134583704
  hypo
cctcaggatgctatcgtctcctctgggcag

SEQ ID NO: 167045 - DNA, 209 bp, Homo sapiens
  chr10:134588783-134588992
  hypo
tcacagccgctcccacgctgtaggcgcaggtgcgcccctgtcctgtgtgcctccccccccacccagcaggtatgctttcagataagcccacatgcctggcactcccacgtcagtcactgctgggcagcgtccaggccccgcgtcctgctgctctgcagcgtggccccgccagcacctcccacctgtgggtacagcggttgtgtgcagtc

SEQ ID NO: 167046 - DNA, 242 bp, Homo sapiens
  chr10:134589351-134589593
  hypo
ggacgccaggtggcacgggctctccaagctccatggggtgcatgaggagggagaactggttcggttccagcttcctatttagaagtcacctattgtgtgctgtgtgcatgtgtgtccggggggcagtggacgtgtgtgcggatgcaatggacatgtgtccaggggcagtggacgtgtgtcaggggctgggcaggcccctgcctgcatccagtttccactcgtgtccgcggttgggatcagct

SEQ ID NO: 167047 - DNA, 536 bp, Homo sapiens
  chr10:134589800-134590336
  hypo
tggctcccgctggagcgcgcggaggatgggagctcctgcgtcagggcagagcaagttcccagtccccggctgtttccaggtggttgggcacagggcccacaggcgcccctgtgggcagggtccggggggcatgggaggggctgcagaatccgcagctgaggtgccgggatggacccgaaacccaatcacagccaacagggaaatttcacagagaatcagatcccagtcgcgacaggtgctgtatgatattttggaattaactgaaaaaactcttgagactctggtgaaggccccagagatgttgagagtaagcagagacgctgcacttaggggcaggtggctgagctcagccacaggacccccggggttcgttcactccaagtggaattcgttaccacttcagtgcagtcccaagcaacatgcccatttgggggtgggtttgcagcctgatgggtgggtcgggccccctgagaacctgcaggcccggaagtgggggctgtgcttgcgtgttccagactcggcgggtagtgggggcc

SEQ ID NO: 167048 - DNA, 30 bp, Homo sapiens; identical to SEQ ID NO: 81056
  chr10:134590757-134590787
  hypo

SEQ ID NO: 167049 - DNA, 664 bp, Homo sapiens
  chr10:134592900-134593564
  hypo
cccctgggaaaacgtcggaggtcacgcgagtgcagattggtgagcagcgcccaagggcagaaggctggcagggctgtggcctccccacattgtgctgccgctgccagggctccaccagctcagagcagggcagcgttgcagcccgttttccattcactcacagcctctcgggttctctggatccgggacttgacactttatgctcagggtgggggacagagcctcacaacacacacctggcggcctttgacagcccctgccttctggggctggagtttggacaggctctccccatggggccacccagtgggcagcgggtgtgcaggacaagcagacgggcgccgggcgcgctccgcagcctcatccatcatgacacgcgccgtcacctcgtcaccaagctccgttctgcctccggagccctaaaacaccaaaaggggctcgggacgcgggcggtgctgcttggggagcctcggtgacaagtgttcagtgaggtgtgccgcacgctgcctgtgcccgccgtaatttgtttatctgtccaaagattatgcagttgaaaatccacaattttatgctgcctttgtaaattaccacgctgcgtttgatgaatgtttctccacttctgcggaggcgccgcttcacccgcgagaggcgggaaggtgctcat

SEQ ID NO: 167050 - DNA, 30 bp, Homo sapiens; identical to SEQ ID NO: 81059
  chr10:134595431-134595461
  hypo

SEQ ID NO: 167051 - DNA, 94 bp, Homo sapiens
  chr10:134595970-134596064
  hypo
ctgccggccggcagcgtggccctgagcatggcaagggggtctgtctctgccgatgctccttccgcggcactgactctgcgccgtgtcacatggt

SEQ ID NO: 167052 - DNA, 30 bp, Homo sapiens
  chr10:134596858-134596888
  hypo
tggttgccgctgtccgcggttcaacacgga

SEQ ID NO: 167053 - DNA, 418 bp, Homo sapiens; identical to SEQ ID NO: 47978
  chr10:134602127-134602545
  hypo

SEQ ID NO: 167054 - DNA, 18 bp, Homo sapiens
  chr10:134606019-134606037
  hypo
aaccgtatgggtgcagca

SEQ ID NO: 167055 - DNA, 263 bp, Homo sapiens
  chr10:134606291-134606554
  hypo
accgggcaggctgcttctcttctccctggtggtcgtgctttggggacgcgtccctgggacccctggctgctgggagctgccccgtgcgagtgccccgccttctgcagatggaatctgtcatcttcattcacttctcaggtgaagttcttaaaagggtggcacggcccaagctccttggtccccagcggagctgccccatctgttggcaccgctcaggtttctggccatgtgacttcggccctgacgcccgcctgcgttgcccc

SEQ ID NO: 167056 - DNA, 30 bp, Homo sapiens
  chr10:134607260-134607290
  hypo
gcggaggggccacgccgtcggtgggacagc

SEQ ID NO: 167057 - DNA, 471 bp, Homo sapiens
  chr10:134607700-134608171
  hypo
cctccccacaatgggcgccccctgctgatgggcacctcccgacaatggcgcctcccagtgatggacgcctccacaggtcctcggggccccttcccgtccaggtcttcacagaggccccggcactgggtgcccagtggcctcggcagccgtgtctgcgtgacagaagccgagcgtgggacggctccagctcaggactgtctgagccccaccctgcgagggtgctctgagctctcagggcgttgcttctttgcccatttatcccgggtcttgggtgagttccagtggcggacagagctcagacaagagcagtgctcgcagcagcgccagcagggacagtggcaatacgagggtcacaggtgtgatcggaggccgccagcctgtgctgggtcaccgtgcggtgccagtgaaggtgccctctgcccaggagctgtgggggagccgggggtgccgccaggacgcagtgtgggtcgc

SEQ ID NO: 167058 - DNA, 442 bp, Homo sapiens; identical to SEQ ID NO: 81065
  chr10:134610519-134610961
  hypo

SEQ ID NO: 167059 - DNA, 204 bp, Homo sapiens
  chr10:134611723-134611927
  hypo
ggcggctgggctggacggtgtgatcctgaggtgggccgaggcggctgggctggacggtgtgacccggaggtgggccgaggctggacgaggtgccccagaggtgggccgaggcggctgggctggacggtgtgatcctgaggtgggccgaggcggctgggctggacggtgtgacccggaggtgggccgaggcggctgggctggacg

SEQ ID NO: 167060 - DNA, 208 bp, Homo sapiens
  chr10:134620148-134620356
  hypo
aatgagactggttcaagctctcggtgaactgcgggtgccgtggttcctttctcaggtagggattggcgttgcagccaccgtcgagacacacaactggtgtgtcagcagcgggcccccgtgccaggcacgctaactgtgcagtgctggagctctgccgccttgagatgctctgcaagccgcaccctgcggtgtgtgaagcttctgatgc

SEQ ID NO: 167061 - DNA, 30 bp, Homo sapiens; identical to SEQ ID NO: 81067
  chr10:134621100-134621130
  hypo

SEQ ID NO: 167062 - DNA, 30 bp, Homo sapiens
  chr10:134639399-134639429
  hypo
cagggtgtctggtaacggggggtggggcag

SEQ ID NO: 167063 - DNA, 226 bp, Homo sapiens
  chr10:134639767-134639993
  hypo
gagccaggcaggagccggagccgcagagacccaccacagagccaggcaggagtcggagccacggagccaggcaggaactggagccacagagaccagccacggagccaggcaggagccagagccacagagaccagccatggagccaggcaggagccagagccacagagaccagccacggagccaggcaggagccggagccacagagacctgccacagagccaggcag

SEQ ID NO: 167064 - DNA, 30 bp, Homo sapiens; identical to SEQ ID NO: 81069
  chr10:134640755-134640785
  hypo

SEQ ID NO: 167065 - DNA, 810 bp, Homo sapiens
  chr10:134651400-134652210
  hypo
agatgaacacatacacggacccagacacgcagacatgcacggacacagacacgcacgtgtacacagacgcacacactcacgcagacatgcacggacacacgtgtacacagtgcagactcagagccgtgcccccatgctcccctggggaaggccctctcttcctggccttaggcccctgggatgccagtcggctgtggtcaggtggtgcaggcagcagctccggcccgtccgctcccgtggactatgagtctgtctaataccagacccggcacgcagttcaggctcctcaccaccagcggcaggcggccaccacagcccctgagggccagccagagggctcctggaggcttgggcctctccgcatgggcagccctccatcgagctgtgaggcttctggttctgagtcatagcttcaagtttgcacaaacaaagcagtttttataaaacttactatcaaagtagaatatacagaaagtggcgtaaaagcccatgcgtgaaaagctcgatggatttttgcagtgggcacacctgtgtggccaggcaaagagatgggacattgccggccactggccctcgtccccacaaggggaccacaacagattctagcagctcaggtgggcttttctgccgggcctctggcttgcgccgtgggcttcacccaggtggagcgtggggctggccttcctccctgcagatgccacagctggtaatgccacagctgggaatgccacagcgtcttcatccgttctgtggccaagggcatctgggtggcttcccgtcaatgggggtcatgagcgatgctgctctctg

SEQ ID NO: 167066 - DNA, 138 bp, Homo sapiens
  chr10:134659533-134659671
  hypo
ggttcagcggcatccgtgcccgcttaccttggacacggcggccagcctctgctccacacgggcgcccaggctggtggtggtcctgtcttggcaccggagctggtgctgtagctgcagcagggccgccagctgtgagct

SEQ ID NO: 167067 - DNA, 30 bp, Homo sapiens
  chr10:134660168-134660198
  hypo
tgaggtccgcatggacggggccctgctggc

SEQ ID NO: 167068 - DNA, 30 bp, Homo sapiens
  chr10:134662602-134662632
  hypo
cctgcgccctccacacgggacttgacgtct

SEQ ID NO: 167069 - DNA, 148 bp, Homo sapiens; identical to SEQ ID NO: 81072
  chr10:134663731-134663879
  hypo

SEQ ID NO: 167070 - DNA, 30 bp, Homo sapiens
  chr10:134664536-134664566
  hypo
cggctcctgctggaacgggggtcccatcag

SEQ ID NO: 167071 - DNA, 481 bp, Homo sapiens
  chr10:134664776-134665257
  hypo
cttcctcatcaggggcgtgttgacgttctgcaactgagggggtcaggcatgcctctgaagcatggaagcttctggtaagcctgaatctacatccccacaacttggatgaggcataaccgacgtaagaaactcataacaaactgcgcagatctacagtggaaaactgacacactttgatcacgaatacacccgtgaaaccatcaccaccttcgagataatgcagtagcccttatccccaaatctcttcgcgtcccctcatgttccctcccggtcacctagctgcctgccggcaccctgcattccttggcattttccagaaccgtacctaagtggaggcgcacagagtgctgtctttccgtctggttcattttcctcggtaaagtcaccgtgagactcccccacgcggctgcacgcatgctccttccctctcacagccggcgtcggtgcaccgtgtgcacgcgccacaccctgcttatctatt

SEQ ID NO: 167072 - DNA, 30 bp, Homo sapiens
  chr10:134671235-134671265
  hypo
gcttccaagtaatacgcagttttttgttct

SEQ ID NO: 167073 - DNA, 166 bp, Homo sapiens; identical to SEQ ID NO: 81074
  chr10:134671582-134671748
  hypo

SEQ ID NO: 167074 - DNA, 30 bp, Homo sapiens; identical to SEQ ID NO: 81075
  chr10:134672397-134672427
  hypo

SEQ ID NO: 167075 - DNA, 30 bp, Homo sapiens; identical to SEQ ID NO: 81076
  chr10:134672849-134672879
  hypo

SEQ ID NO: 167076 - DNA, 30 bp, Homo sapiens; identical to SEQ ID NO: 81077
  chr10:134679441-134679471
  hypo

SEQ ID NO: 167077 - DNA, 30 bp, Homo sapiens; identical to SEQ ID NO: 81078
  chr10:134679683-134679713
  hypo

SEQ ID NO: 167078 - DNA, 119 bp, Homo sapiens; identical to SEQ ID NO: 81079
  chr10:134680048-134680167
  hypo

SEQ ID NO: 167079 - DNA, 115 bp, Homo sapiens
  chr10:134680624-134680739
  hypo
cacaggccggcccctcgcacactgacacacacacaggccggcccctcacacactgacacacacacaggccggcccctcacacactgacacacacacaggccggcccctcacacac

SEQ ID NO: 167080 - DNA, 770 bp, Homo sapiens; identical to SEQ ID NO: 81080
  chr10:134680971-134681741
  hypo

SEQ ID NO: 167081 - DNA, 646 bp, Homo sapiens; identical to SEQ ID NO: 81081
  chr10:134682471-134683117
  hypo

SEQ ID NO: 167082 - DNA, 258 bp, Homo sapiens
  chr10:134683319-134683577
  hypo
tccagcctcctctcccgtgcccgcccctgggatatctgagcaagctgaggatgcaacttgcagcctttctcccggatccttcagggcacaggcgcctccatttatcaaactgtgctgtattgcgctgctcagatgttgcatattttacaaattgaaagtctggggcagccctgagcgaccaagtccatcggcgccattttcccacagcacctgctcactcggtgtctctgtgtcacattttggtaattctcaaaatat

SEQ ID NO: 167083 - DNA, 77 bp, Homo sapiens; identical to SEQ ID NO: 81083
  chr10:134683636-134683713
  hypo

SEQ ID NO: 167084 - DNA, 30 bp, Homo sapiens
  chr10:134694024-134694054
  hypo
aggctgcctctgggccggcccagctgtgtg

SEQ ID NO: 167085 - DNA, 141 bp, Homo sapiens
  chr10:134694271-134694412
  hypo
atggatacccaacggcggtccagatcacggagcaggaagcagagctctggggagcggcgtggggtcggcaccctgccagcggcgtgggctcaccatccggcgtgggctgtggctcagggacatcgccgggcggcttcatgg

SEQ ID NO: 167086 - DNA, 278 bp, Homo sapiens
  chr10:134698447-134698725
  hypo
gagtgcccggggccacgcggtgcattctctgtgcccgtcagctgtggctgctctgcgtgctgccccacaccaggtccctgctgagcttctgtccacacggttctccctttcactaaaggacaaattttaccacgtgcacccacgcttacggcttcacacctgcaaggcctggatggcgttgttgtagcaggccagctctccagacacgctcggcgagttcagggccaggcggtgccacatgcgcgccaagtagtcctcactctcggccttgaatttct

SEQ ID NO: 167087 - DNA, 678 bp, Homo sapiens
  chr10:134699320-134699998
  hypo
tcacaggcggtgggccgtccttggcagcacctgcacagcctcgtccagcaccttgaggccgccctcccagtcgtcctggtcggcatggctgtggaagagcaggccgtagagcgcagcacggagcgccaggtcgtcctcagcccctgggagggagaaggaggggtgtccttggagccgcctgatccctcatcaaaggcgccctcggacctcccagactaagctgcccatcacagtgcccctgaggtggaaccgcggctacagaggtgcccaggccagcgcatgccccgcagggctgaagtgagctgtggacctgcatggcccctccagccccacagtggccacccgggatgccctttccgttgcaggaagcagctgtcttgtctccttgctgcctgtcactctccatctccttggagaattctgcgttcacaaacacagacctgtgtttccacgtattaaagattggcgagcaggacttggggtcctttcaggagttgcatggaaagctcccccgcggccgaggacacagcgccacgtgcacgctcgggagtcctcatgcttggtgcccgcagcacgggaacaatccccgagtctccacgcaggcagcggagccatgtgacacgcagaggcaaaggtgcctgccttcagggcacacacaaaaatcgcctgcctgccggg

SEQ ID NO: 167088 - DNA, 30 bp, Homo sapiens
  chr10:134702726-134702756
  hypo
gaccaccgaggcttacgtcacagagtgtgg

SEQ ID NO: 167089 - DNA, 366 bp, Homo sapiens
  chr10:134716709-134717075
  hypo
ctccaacttctctagcgcaggatggcctctggcatcttgtcagcgtacagacccctccatccctgttttctgccaggcctggaatctagtcctgtgcacacacagtttaccaccagacaggcacagactcatgggtggctccacagaacgagggccccaccccacctgccgcgtcacatcctggacacctcagctgctacagcctcaagccctgacccatttctccccgcgactcttccatccatctgggcccaagccctgacccgtttctccccgcgactcttccatctgggcccgctctccaggctgcagcatgtgaagctcccttaggcagaatgcggagcccacttccgatatttccttcta

SEQ ID NO: 167090 - DNA, 30 bp, Homo sapiens; identical to SEQ ID NO: 24758
  chr10:134720519-134720549
  hypo

SEQ ID NO: 167091 - DNA, 670 bp, Homo sapiens
  chr10:134722153-134722823
  hypo
aagagaaggggcaccgtgttagcaacaacgaacttcccacggcctgcagcccccacggaccacgcagcgcatgtgatcctaagcagaggcgtggcctgtgaagggccaccgtgccacaaaagctgagctgccacgtccgtgcctgtgaggacccctgatgtccttgtagctcccacaccccacagggtgtcctggacacgggactggcgtgtgcagcccttggctgcccctgagcggctcagggttgggtgggaatggagggtccgctcaaacagcgtttgcctcgcaccaggagacagggatgctctgagcatggagctgaaggaagtgcgtcgagggggcgcagctccgttgggaggtgggggagagcggggcagagtgggggtgagcatgcacgatggggctcgagttccagccacctagggcaagagcctcggcgtcctcgcctcttggcccctggcctcccgggacccctggggacacctacctgggccagggaggggacagtgaagtccatgaggcccagcccgttgcatgagtacatttccaaggcaacgaggactctggtcaccgagctgacatcctcattggtgccctggtggggaggatgccctgagtgtatcagcccaagcgtgcggggggagtctggaatatgcgtgaatttaacact

SEQ ID NO: 167092 - DNA, 44 bp, Homo sapiens; identical to SEQ ID NO: 81088
  chr10:134723476-134723520
  hypo

SEQ ID NO: 167093 - DNA, 179 bp, Homo sapiens; identical to SEQ ID NO: 81089
  chr10:134724607-134724786
  hypo

SEQ ID NO: 167094 - DNA, 30 bp, Homo sapiens
  chr10:134729305-134729335
  hypo
aacatggagaaacaacgcacgtccagcgtg

SEQ ID NO: 167095 - DNA, 242 bp, Homo sapiens
  chr10:134729783-134730025
  hypo
aaagacactcctgaacgtttcctcgtagtaacagcaaactacgcctggggtcttgcgaggaacgacggctaaaaacaggagaggccacgtcaccccattttctctttcatggtctcagtcatttacgtgacgatggacacgtcccccacgcaagaagccggtgtccttacgaatgcaaagggtgtccctccccacgccagcctgagtgcaggggacactctgacccacggccccgggcggtg

SEQ ID NO: 167096 - DNA, 1292 bp, Homo sapiens
  chr10:134732856-134734148
  hypo
tacaggaggcagaagcggctcgccgtccgacagacgtcccacacgccttgtttccgggccactttggccagctctgcccaaatctgtatcctgctcaccgagaacccaaacgagtgaaaggtgagtagacaagtgtggttgctgaagttagaaaacacctgggctggctgcctgagaaaaggccactgtggctctgcagtttcaaggtggcaaggagcccggcactcgcgctgggtacggcctggcgggtgcatgtcccagggtcgggcgcagctctccgctctccctgccagccagctgtgcgcggcacctcccttccctgtggtgagaagaaaggccacacaatccactccccgggggagtgcacgggacaggcctcccggggatggtaccgaccgcagggtcggtaccaaaaatcagcctgctctggtcacaggcgctgcgtgtcctccgagtgacagcagtgacaggcgggacagggcagccgcacacctcataggccgtggctgtcatcacaggctggggggtcccgtctgtggcgggactcccaggcagggacctcgtcccaccatcctggagcaggtggcctggcgagtccccagacggccacatgcagggtcagctcagccgccacagacactggccctcgggctgagcgacccccgggctgagctgtgcgtggcgctctggccttttcctcactcacctctccttgtcgttttcgttgcccaggcgccgcaggtgcccggcagctttgtccacgctgacggtgtggtgccacgccttcgcacagaggtaggtgaaccggcccctgttcttcccggtggagactgagggcggaaatgcaaaggcaggtgttgcagctgctggccaagggccggggacgtgcccatcagtaaccaatgccctgcgccggcgccggggtggccacccacaggtagcggctccaggggccctagatccccggctcccagaagccgagctcctcacagagctgcagagtggcattgcctgtgtctcctgccggcgatgaggccgagccagtgctcctctgagtgggggaggctccaggaactttggagcagagtctgccaagaccctcctgctgctctgctggctgcgctgtccagctgccctccaagcagaggcacccggcctcagactcccgagctcccacccagcccctgcgtagcaccccaagtcccagcaggtttatccgcatgacgccagatgttccgaatcaccgctccttttcctggcaaataatcacgagcacccggaactcagctcca

SEQ ID NO: 167097 - DNA, 393 bp, Homo sapiens
  chr10:134734533-134734926
  hypo
gcggcagccccttcccgctccaagagtcgccaaccttcccttgcagggcgcgacccaccctgcgtctgcccatctcctcgtctcagacccgagacatgacccagcagctccactcccgaccaccatctccacaggctgcagtctgggtgacacctggttcgtcgtgctgggtgaaagccgccggctgctgggcactgagctggagggaggcctggcagcagcccccagcaggaccctcaggggaccagcgggaagggctcccaagccaggcccagcctggcccctgcactgggctggagagagtggggccgcctgcgttcccagagccactggcgagtgcccagagaagctcgggcagtgaggatgcaacacacctgccgaaccctggctcag

SEQ ID NO: 167098 - DNA, 155 bp, Homo sapiens; identical to SEQ ID NO: 24761
  chr10:134736023-134736178
  hypo

SEQ ID NO: 167099 - DNA, 1460 bp, Homo sapiens; identical to SEQ ID NO: 81094
  chr10:134738017-134739477
  hypo

SEQ ID NO: 167100 - DNA, 231 bp, Homo sapiens; identical to SEQ ID NO: 81095
  chr10:134739717-134739948
  hypo

SEQ ID NO: 167101 - DNA, 180 bp, Homo sapiens; identical to SEQ ID NO: 81096
  chr10:134740787-134740967
  hypo

SEQ ID NO: 167102 - DNA, 273 bp, Homo sapiens
  chr10:134746662-134746935
  hypo
ctttggggtggggtgcggacgcttctccgcccctcgtccctgcccacctcctcctccccctgctctgctgttgggccctctcaggtcctggcaggcctggcatcacaacactggcctctccgtcctacctgagctccagcgcacaggcctgctgggcaggtcgggaagagagaatccgtaaaagtgcctgagaatgccgcctgtggacagacctcggaacagggctatttacactggtcccaagacctctcgtcggagcgcctggccacagaa

SEQ ID NO: 167103 - DNA, 31 bp, Homo sapiens; identical to SEQ ID NO: 24765
  chr10:134747808-134747839
  hypo

SEQ ID NO: 167104 - DNA, 30 bp, Homo sapiens
  chr10:134753221-134753251
  hypo
atcatgggactccagcggcctgctgcgtct

SEQ ID NO: 167105 - DNA, 194 bp, Homo sapiens; identical to SEQ ID NO: 24766
  chr10:134758117-134758311
  hypo

SEQ ID NO: 167106 - DNA, 30 bp, Homo sapiens; identical to SEQ ID NO: 24767
  chr10:134758761-134758791
  hypo

SEQ ID NO: 167107 - DNA, 258 bp, Homo sapiens
  chr10:134787902-134788160
  hypo
ccaggtgggctctgccgctgcctgtgagatgaggccagatcctcgccgcccgcacctgcctctccccaactcgccctgcgcgggacaggtggacgccgcccacacctacctctcccccactcaccctgcccgggagaggtggacgctgtctgcacctgcctctccccaacgcgccctgcccgggagaggtggatgccgcccgcacctgcctctcccccactctccctgcctgggagagatggacgccgcctgtgcctg

SEQ ID NO: 167108 - DNA, 300 bp, Homo sapiens
  chr10:134790700-134791000
  hypo
tcttaccctggtggtcggaggcgcggtcatcagccagggatgggttggcctcgtgcgcgtgccctgcgcggtgctgagatcagcccagcacgatgtctagcatgttctgcccgaaacacacgcctcagaagaaagcgccaggcaaactgaaggacgcgaagccgtgggccggcctgccgagatcctgaaacgcaggcagagccgagacgctcttcagagcacgggtgtgtggcggccgaacacagcacctgaccctgggcttagtcttggacttctggaagaaaccgcggaactggtgca

SEQ ID NO: 167109 - DNA, 594 bp, Homo sapiens; identical to SEQ ID NO: 24768
  chr10:134793861-134794455
  hypo

SEQ ID NO: 167110 - DNA, 111 bp, Homo sapiens
  chr10:134795407-134795518
  hypo
gctttgtcaaagcggcgctcagatggagacaacgtctcgtcaggtgccacgatgggtctgtgttgtgcgagcatgttgctttaggctgccttaggccgcccacctgattct

SEQ ID NO: 167111 - DNA, 287 bp, Homo sapiens
  chr10:134795895-134796182
  hypo
cgagcaacacgccagcgccccaaggctggccacgggcaggacgcagagacagacgcgtcattagagcatgggcgcggcgtgtccgtggcacgtgaggccccgggccctgcctttgctttcggtctctgtgcacgctgcctcctgacctgatggtccagttgcctgcggaagtaggtctgtgcacagtggaccttttaaaagagacacgaaacctgggagggcctggccttccctctgtgcgctgctgctgtttgtctttttcctcagcttcccgttgttcgatggag

SEQ ID NO: 167112 - DNA, 586 bp, Homo sapiens; identical to SEQ ID NO: 24769
  chr10:134797187-134797773
  hypo

SEQ ID NO: 167113 - DNA, 346 bp, Homo sapiens; identical to SEQ ID NO: 81102
  chr10:134803433-134803779
  hypo

SEQ ID NO: 167114 - DNA, 310 bp, Homo sapiens; identical to SEQ ID NO: 81103
  chr10:134807155-134807465
  hypo

SEQ ID NO: 167115 - DNA, 30 bp, Homo sapiens
  chr10:134809910-134809940
  hypo
tgggagtctccaggtcggctgcacagcccc

SEQ ID NO: 167116 - DNA, 30 bp, Homo sapiens
  chr10:134810300-134810330
  hypo
ctctgtgcgggacaccgtgtgtcagggctg

SEQ ID NO: 167117 - DNA, 223 bp, Homo sapiens; identical to SEQ ID NO: 81104
  chr10:134817169-134817392
  hypo

SEQ ID NO: 167118 - DNA, 30 bp, Homo sapiens
  chr10:134826606-134826636
  hypo
gagacagcatcgggcgttgactgtcccctc

SEQ ID NO: 167119 - DNA, 30 bp, Homo sapiens
  chr10:134827560-134827590
  hypo
atcccttcaacagcgcgccacacgctcctg

SEQ ID NO: 167120 - DNA, 225 bp, Homo sapiens
  chr10:134827959-134828184
  hypo
gaagactgcggtggacgcctccagaggttcccacttggcttccagtggagcctctgccaaacccggcctgtgcaagggcagagacaaggcccagcagggctcgagcaggcccaaacgcacgacgcagctgctgtgcctgggtctgagctgcacccacaggtgacgtgaggggcgcctaggaggcgggggaggcacggggccgggaaggctcgggggtcccagagc

SEQ ID NO: 167121 - DNA, 30 bp, Homo sapiens
  chr10:134829024-134829054
  hypo
cgactgggaagggggcgcccaggacgcagg

SEQ ID NO: 167122 - DNA, 505 bp, Homo sapiens
  chr10:134829384-134829889
  hypo
ctccgccgcagagtccgcacccctggaaggaggcgtcggggaaggcactgcacccacgcatggcttcgagggcaggaggcaggttgcacagcgggggtcacaggctcctctgtcccaggtgggactgggcgatcccagacacgtgtgctgtggcctctgggcctcatgcggagagcagatgccagggcctgcaactctgacctctgagcacacaggccggcctcagggaagggttgttctggctgtgggaacctgaactcgaaatggcctccgttcgctgcagacactgcccgcctgcaccggggactcagcccaggcagctctgcacacacctcagcaccacccaccctcaggcctcagccgcgctacccagcaggcgcttttgcccagaacgcctgctcagaacaccgtgagccactgcccggcgctgagccggggcctccggaacgtgaaccaagcggctgcagcccaggcccagagccaccggcatcgccccatggcagct

SEQ ID NO: 167123 - DNA, 516 bp, Homo sapiens
  chr10:134830233-134830749
  hypo
tgagatggtctcatccgctgggcgagcaggccagggctgcccgtctccacctttgtgctggaccatttacaatcaaagcgcagcatcgagatacccaggaaagagccaggaacaggccaggaagctgctgccccaccactgaccccaccgctctccttccctccttccttcccgctgggctgggcacaggtggagctcaccgtcgtcccccttcatcccttggcccctccaaggctcaaggactggaggccgactgggcagcagacatgtcaccatcaccatgctccccgtcaccacgctccctgtcgccatggtcactgtcaccatgctccctgtcgccatgctccccctcgccacgctccctctcgccacgctccccgtcgccacggtccccgtcgccacgctccccgtcgccacggtccccgtcgccacgctccccgtcgccacggtccccgtcgccacgctccccgtcgccacgctccccgtcgccacgctccccatcgccacagtccctgt

SEQ ID NO: 167124 - DNA, 177 bp, Homo sapiens
  chr10:134833357-134833534
  hypo
tctgaattcatgtccgcccatgcccgcccccagctacttccagaggcatttgaagggaggacctgtgccctgcacagctgcttctcaaaggggtgccagcacctgtccatgcgtcactaacccaagctccatgccgggcacaggctgggcgtcagagccaccgaaacaccaacctct

SEQ ID NO: 167125 - DNA, 51 bp, Homo sapiens
  chr10:134833859-134833910
  hypo
gtcgctggggtgggcgccggctgtggggcagagacgcggcgctgcgtgtga

SEQ ID NO: 167126 - DNA, 30 bp, Homo sapiens
  chr10:134834266-134834296
  hypo
tgccacccttctgcccgaagggacagccac

SEQ ID NO: 167127 - DNA, 165 bp, Homo sapiens
  chr10:134834667-134834832
  hypo
acctgtctgcggtgacggccgcccttcccgtcagcccctccgcggtcccggccccagccctgggttgagggagggctggggaggagcagggacagacgggcaggcaccaggacgctggctgctgcgtgaatgtcacctgtggtcacggccgacgcccggcgggcc

SEQ ID NO: 167128 - DNA, 393 bp, Homo sapiens
  chr10:134836850-134837243
  hypo
atcaggtgacaccaacgtgaccacggcaagagcgagctggagcggagcctcgggtagccatgactaacagacatggttcgcaaacccacgcacaccttccaaaaacgccaggctggcctcacatgaccaggggcctcaccaagtgcagtgggtccctgcgtgtcagggaggctgcccagagctgtggctgctcctgtcttagcctcaacctgtgcccggggccctgtggatggatccgcgtggggcggtggtgttccaagtccacgtggggcggtggtgttccaggtccacgtggggcggtggtgttccaggtccacgtggggcggtggtgttccaggtccacgtggggtggtggtgttccaagtccacgtgggacggcggtgttccaggcca

SEQ ID NO: 167129 - DNA, 30 bp, Homo sapiens
  chr10:134845667-134845697
  hypo
agtctgacttgtcgacgctgtggtcccagc

SEQ ID NO: 167130 - DNA, 30 bp, Homo sapiens
  chr10:134845936-134845966
  hypo
gagctagccggggcacggaggccatcactg

SEQ ID NO: 167131 - DNA, 30 bp, Homo sapiens
  chr10:134846293-134846323
  hypo
tggacacgggtgtcccggggagcagacacc

SEQ ID NO: 167132 - DNA, 30 bp, Homo sapiens
  chr10:134850311-134850341
  hypo
gcggcggacacctctcgttacgccccctcc

SEQ ID NO: 167133 - DNA, 30 bp, Homo sapiens
  chr10:134850916-134850946
  hypo
acaggcgtgagccaccgcgcctggcccgac

SEQ ID NO: 167134 - DNA, 30 bp, Homo sapiens; identical to SEQ ID NO: 81111
  chr10:134858800-134858830
  hypo

SEQ ID NO: 167135 - DNA, 205 bp, Homo sapiens
  chr10:134875675-134875880
  hypo
tgtcccagcacacaccgcatgaaaatagccagttccgggggctccgcacccgcgtagggggcgcgtcggtcctttccattttagctgcgtgggggagggtgttggcggcaccattgtgctttcattccacgtttcctcagtgattcaacacgttaagtaacgtgtcacgtgcctgctggccaccaccgtccgctcctgggaagaa

SEQ ID NO: 167136 - DNA, 92 bp, Homo sapiens; identical to SEQ ID NO: 24774
  chr10:134878527-134878619
  hypo

SEQ ID NO: 167137 - DNA, 30 bp, Homo sapiens
  chr10:134886135-134886165
  hypo
tgagaactgacgaaccgtaagtggtgcatt

SEQ ID NO: 167138 - DNA, 151 bp, Homo sapiens
  chr10:134886534-134886685
  hypo
cacctggcaccccaccgcccagcgcacgcaagccaagtcccggagctgccatgctcgtctgtgaggaaacgctggagctgggtgcccagggctgctgggggtccacgagcccccggggccaggccgtgagcttggtcggtgggcccacggc

SEQ ID NO: 167139 - DNA, 294 bp, Homo sapiens
  chr10:134894541-134894835
  hypo
cagggaagccggagccgcggacctgtcccacgttgagatcagggtagacctgggagccagctgggcgggacgcactgctctgatacagggaagctggagcctcggacctgtcccaggttgagatcagggtagatggtcttggagccagctgggcgggatgcgccgctctgatgaagggaagccagagccttggacctagatgtaaaagctctgtgttcacaaatcttcccggggacccacattaacttccgagtcgggaaggaatcatctgcatgaaatcgggggtttcacggt

SEQ ID NO: 167140 - DNA, 282 bp, Homo sapiens
  chr10:134907949-134908231
  hypo
accgcccctcgcccccgtagctgagcaggagtctgagtcctgcaggaaggcgcggcggccacagcagccccagggaggccgtgagaggacgcgtgagggcccggggcagaccaccccaggctcttcaacacaacagatgagaacgaagtccttgttccaggcgactcactgaggaaatgctccgatagactcggagagggctggacacagagtggaccccactctcttggcttctctcgcggatctgggtttgcaacaatggctcgtcggaactgtgtagag

SEQ ID NO: 167141 - DNA, 30 bp, Homo sapiens
  chr10:134911707-134911737
  hypo
ctatagccggggtcacgctgagccagtcta

SEQ ID NO: 167142 - DNA, 421 bp, Homo sapiens
  chr10:134911961-134912382
  hypo
cactcagggcagactcggacgacccatctgctctcccctgaccgggtcctcggacagctgcccctgaccccacggagagcccggacttcccggggacagagcctgcgccccagggggctcccttccacgcctccccctgcagagcctctgctcatgtgaaaccctcctttcccgtcccacagcgccatccgcatcagccgcaagggccggcacacgctcctgaatttctgcttccacgcggccctgaccttcactgtgttcgccggcggcatcaatcgcaccaagtaccccatcctgtgccaggcggtgagtgccggggcgccctcgttggctcctcccagaggggaactgcgtgagcgtcgtcttgtttactaaataatattccagcgtttgctcagctatttcccgggaagagggtcgg

SEQ ID NO: 167143 - DNA, 289 bp, Homo sapiens
  chr10:134913648-134913937
  hypo
agactgccaggaggccgtgcccccggcctgggcctgggcctgggcccagcatggccccggcggaggagtcgctggcacgcacctgaaggtggctaaggtcagacgtacctcctgcctccttaatcattcctctggtaagctggaaacaaccacagcaagtgcccgggaaacgccattgacgtcccgcctgtaagtgcctgcgagaggccgtcaccatcacgtctgcactttgccaccaagtacgccccacactgggatgaagcctgctggatccgcgggtgaggccccc

SEQ ID NO: 167144 - DNA, 30 bp, Homo sapiens
  chr10:134917520-134917550
  hypo
atgggagacgtgacccggtgctggcgcacg

SEQ ID NO: 167145 - DNA, 259 bp, Homo sapiens; identical to SEQ ID NO: 81116
  chr10:134920247-134920506
  hypo

SEQ ID NO: 167146 - DNA, 97 bp, Homo sapiens; identical to SEQ ID NO: 81117
  chr10:134926795-134926892
  hypo

SEQ ID NO: 167147 - DNA, 30 bp, Homo sapiens
  chr10:134937520-134937550
  hypo
tcttgttctcctgtgcgatgctcatctacc

SEQ ID NO: 167148 - DNA, 30 bp, Homo sapiens
  chr10:134938005-134938035
  hypo
ccctggcgtgcgagccgctgccccaacgct

SEQ ID NO: 167149 - DNA, 30 bp, Homo sapiens; identical to SEQ ID NO: 81118
  chr10:134940449-134940479
  hypo

SEQ ID NO: 167150 - DNA, 471 bp, Homo sapiens
  chr10:134940813-134941284
  hypo
cagaggacgaggacacggcgtagtgagtaccgggcacccagaaccgggagctgggagcagcgggtgggctctgcctgaggtccctcccaggcacctgtggtggggaagcccaggacgaagcagcaaggcctgggcctggacctggggcttgccgagagctgcgcccctcccagctcgcacccccgaggagtgcgcagcgccccctcctctcccagggagtccaacctaatctttgcctttggacaaggcaggcctggtttgccttctatgggaggggcctggggacaaatagcgatttggcaacagcacagagctcagctgagaagggaaaccccatcgagtaggaacggcggtccagccatcagtgcccagagccagcctggaacctctcattcagggccctcagttccttctgcggccccaggatggcccgcccgtctgccctccgccttgccccgcccacccagctcc

SEQ ID NO: 167151 - DNA, 1407 bp, Homo sapiens; identical to SEQ ID NO: 81120
  chr10:134941646-134943053
  hypo

SEQ ID NO: 167152 - DNA, 94 bp, Homo sapiens
  chr10:134943512-134943606
  hypo
tcttgcgttctactccgggggtggcggcggcaggtctgtccccagcattctcgctctgggcagaaccctcgggaccctccgctgtcgtgtgtct

SEQ ID NO: 167153 - DNA, 385 bp, Homo sapiens
  chr10:134944404-134944789
  hypo
ttaacacacacttgcacctgctgtgcacatgtgcacacacacgtagtagtgtgttttccagccacccacacactgggtttgcattggagattgtttcaccctgcaaacgtcaacgtcagcagactcgtcggtgcgctgtgctatccggttgggaggtctcaccaggagcagagcctccctaacgtgcacctccgagaagaggggtgtcggggagtgttcccagcacctgctcggtggaagggctctccggagactggcactcagtatctgagtatgaggagcctcacttcccggggtgtcggtaaacttgaccgtgactcagtaacccacagcgtgctcctcccagcaaaccccgtgtgtccttacaggtcgaccagacgggccg

SEQ ID NO: 167154 - DNA, 241 bp, Homo sapiens
  chr10:134945552-134945793
  hypo
gtgagtgtgcttgcccgtgtgcctgcgtgtcagacgcactggagcgtgggtgtatgccggcctgtgcgagtgtgcccgtgtgcctgcgtgtcggatgcaatggagcgtgcgtgcatgccggcctgtgtgagcgtgcttgcccgtgtgcctgtgtgtcggatgcaatggagtgtgcgtgcatgctggcctgtgcgagtgtgcctgtgtgcctgtgtgtgtgtgagtccgtgtgcctgcgtgt

SEQ ID NO: 167155 - DNA, 30 bp, Homo sapiens; identical to SEQ ID NO: 24780
  chr10:134955621-134955651
  hypo

SEQ ID NO: 167156 - DNA, 23 bp, Homo sapiens
  chr10:134959184-134959207
  hypo
gaattttaggccgggcgcggtgg

SEQ ID NO: 167157 - DNA, 30 bp, Homo sapiens
  chr10:134964274-134964304
  hypo
cccagtgaagggtggcggccaaggcgccct

SEQ ID NO: 167158 - DNA, 30 bp, Homo sapiens; identical to SEQ ID NO: 24781
  chr10:134978033-134978063
  hypo

SEQ ID NO: 167159 - DNA, 376 bp, Homo sapiens
  chr10:134978858-134979234
  hypo
gtggccctgctggcacggctgacctgggctcccttcccgggtccacgtgtctcgacaccattctgtgggctggcggcaggcgcctgacctgtgagtgacagccagaggcaccccagggccccgcagggggacggggaccggctgagacgcgcctcatgctgactcccttcctcctaagcagcacaacctacggggtcctcagactgacttaccgcttggtgcacgtctgtgcccgtgtttgcaggcacgtgtgcgtgggcatgttgcgctgtgtgcatgtgtgtgccagtgcacgggagtgtgtacatatgtgtgcgcctgcgtgtgcaggtgcatgggtgtgtgcatgtgtttgtgtgtacgcagtgcccaggta

SEQ ID NO: 167160 - DNA, 724 bp, Homo sapiens; identical to SEQ ID NO: 81124
  chr10:134980288-134981012
  hypo

SEQ ID NO: 167161 - DNA, 30 bp, Homo sapiens; identical to SEQ ID NO: 24784
  chr10:134992325-134992355
  hypo

SEQ ID NO: 167162 - DNA, 647 bp, Homo sapiens
  chr10:134996304-134996951
  hypo
tctaggcccaactgcgcgggcggcgagggcgcgggcagtgtgggcgcaggtggtgtgggcgtgggtggcatgggcgcaggcggcaagggcatgggtggcgtgggtgcgagcaatgtgggcacggacggtgtgggcacaggcggtgtgggcacaggcggtgtgggcacaggcggtgtgggcacaggcggcgtgggcacaggcggcaagggcatgggtggcatgggtgcgagcagcatgggcggcgtgggtacaagtgaggagggtgtgggcggcgtgggcacgggcagtgtggacgtgggtggcggcaggggcggcaaaagtgtgggcggtatgggtgtgagcagcgtgggcgcgggcggcgagggtgccagcggcgtgggcgcgggcggcaagggtgtgggcagcgtgggcacgggtgctgcttcccctcaggggaatctcacgattcctgaaacttgagctcctggcccggagaagtgctggccgcggtcggggtggcgcacacgcagagactctggagctgacagcctgtcgtgcccacaggcgcacatctactctctgggggccacgctgaaggccgccctcgagtacgtggcagagcccacactggaacccaggctgagccaagacctcgaggcgctgctgag

SEQ ID NO: 167163 - DNA, 28 bp, Homo sapiens
  chr10:134997772-134997800
  hypo
ccatgcacacacacgctgcacacacacc

SEQ ID NO: 167164 - DNA, 30 bp, Homo sapiens; identical to SEQ ID NO: 81129
  chr10:134998506-134998536
  hypo

SEQ ID NO: 167165 - DNA, 192 bp, Homo sapiens
  chr10:135001612-135001804
  hypo
cactgcccctgcgtccgtccgtggatgcctgggtgctccccgtgttggctatttcgagccgtgctgctgggaacatgggtgtgcacgtatgcgtgagccctgccctcggttcctcggggaatgtggccgtgtggaactgctgtcacctgggaggtgtatgttgagcttttcaaggaacggcagcactgtcgt

SEQ ID NO: 167166 - DNA, 371 bp, Homo sapiens
  chr10:135002063-135002434
  hypo
ctgtcccagctgggccggcccttccgggagtacgagctgtgggccctgtgcctggcctgcctccgcgcactgcagacacgccctgagcacccaggtgacgcacgcaccatcccatcccccccgccgtccccaccccccactgctgttccaccccccaccgccgtcccacacccccgccgtcccaccccccacaccgtcccacgcccccccactgtcccatcacccctgccgtcccatgcgtaactggcccccacctgaaccaagggacccaggggcagccaggacagtgtctccggtgaacggaacaggcggctcccgtctggagcaccttgtgggtgcctgctgggttgcagcaccgagggaggtgtggg

SEQ ID NO: 167167 - DNA, 238 bp, Homo sapiens
  chr10:135002753-135002991
  hypo
agcccgtggctgccccgtgggccctgactcgggacggggcctgtgacacgggggcttcaagttaccgtgttctccctgccgcttggctccctttcagccgcagatatgccgctgcagccactgtgtcggctggggcagcgctaccctcggggagggctgggaggaggcagctccgaggaccccgggggctggggtcaggccatgtgcgtgcactggcaggtgcgtgcccgtgcaatgg

SEQ ID NO: 167168 - DNA, 236 bp, Homo sapiens
  chr10:135008713-135008949
  hypo
cacaggcggtgtgttcgctcggagagccagttgttagccatgtagcagcacggcaccagtcggggggcttccgggagcaggcaccagtcggggggctcccgggtccgtgaggtgggggctatgctggccagttctcctcaaaccctcgagctgctgccttcgtgaggagagtggaaggtgggaaagtccagttgaggcttccaaccctctggtgtttaaaacgcggacagaaccat

SEQ ID NO: 167169 - DNA, 354 bp, Homo sapiens
  chr10:135009174-135009528
  hypo
gtactgtgtggccgccgttctgtggaccgcagccaagttcagcgtcccccgcaaccacaagctggccctgccacgcaggctcaagaccctcctcctggacatggccaggcgcagtgccccggagcggccgtccgcggctgaggccatcaaggtaaccacaccacagtcatggccccagcccagggtccaaggactgtgggcagtggccgccctcgctgagctgggggtggaggagcacgggctgccagtgtccaggtgatgaggccaccaggtctgtttctaggtccctgtttctagacgtcggcctggccgtcgcatggggaagggagtgggtttcgcgtcatggccacgtcc

SEQ ID NO: 167170 - DNA, 30 bp, Homo sapiens; identical to SEQ ID NO: 24790
  chr10:135012439-135012469
  hypo

SEQ ID NO: 167171 - DNA, 763 bp, Homo sapiens
  chr10:135014641-135015404
  hypo
ttccagaagaaaagaggagagcgtgagggggcagagggacacagtcctgatagcagagccagcgaggacagggcccggccccaccccggggcgagtacgagtttggaagcagtgagggcgcagagtggggctccatctggggagaggcctctctctgtcacccggccccgtgcggcagttcagggtcccagcatctcccctgcactgggaggcggcagccgtgcccggggggcgcccgtggtgggcgggtgcaagagagaagggcgtcgggtgtgcaagcaccaccggcctcccattaacagcctgcccgggctccgcccacaggagccactgtccacgtaacctgcgtctctttctttcaaggaaaagagaagccagccatggccaggaccagcagcagggccccctgctcacccacctcggtgtcggatgtggactcggacgcactgtcacggggaaacttcgaggtggggtttcggcctcagaggtccgtaaaagccgagagagcgcagcagcctgaggctggcgaggacagacggccagctggcggggcctcagacgtggaggcagtgacccgactggccaggtccaaaggggtcggcccagccttgtcccccggcccagccggattccagagctgcagccccggctggtgcagcgccttctacgaggccgactgcttcggggccgacgtccacaactacgtgaaggacctggggcggcagcaggcggacggggccctgcccgacgcccagagcccggt

SEQ ID NO: 167172 - DNA, 1800 bp, Homo sapiens
  chr10:135016597-135018397
  hypo
cccccaaacgcacggcgtccagcggggagcactcggcccccaaacgcacggcgtccagcggggagcactcggcccccaaacgcacagagtccagcggggagcactcggcccccaaacgcacggcgtccagtggggagcactcggcccccaaacgcacagagtccagcggggagcactcggcccccaaactcacggcgtccagcggggagcactcggcccccaaactcatggtgtccagcagggagcactcggcccccaaacacacagcgtccggcccatggccacagcctcacgtttctcttggaggagctactgtgtctctttcaaaacaggaggctcagaaacacagcaagggcaaaaaccacctggagacagactttcacatccgcagcccaaaacgcacacggtgcagcgagggccgttctctggggcggctggagcagccggtgggcatttcctcccttcagcgctgacccccacctactggtgccggccgtgtgtgctgggctcagcactgcgggtgccctggggctgtggagctggcatccgcgtctcctgctgttaaaacaagcgtggctcccagagtcagcgtggacagcactggtgtgggttcctcccccgtctgtctgcaccggtgaagcctggcctcgtgtttccctcctcactgccccacatgtggtgtggattttagttaccgtggatttattaaaatcagtcaagaccgtcctcctcatggagtccgcctgtggttcccgcgtgaggagcgcccccgacggacatcgagtctgactgtgaacggaggccgtggaggtgccggccagagaggagtctgcgtgagctgcactccagccaggcgggcatcgggctcgcaggcacccgcctccaggttcctggatgcgtcagggtacacagacctttcccaggagattttctcgacatcagcacctctgcaaatggatgggggtgagagggctggatggagcctggcgccggtgacctccgggggccggacgagggccccatggtgcaggccatgggggaacgtggccaccaccatcctcagaagccaggaccaggtgccccggcagcagaacacagctccatggggacacctgcgtttaccaacctcaacctgcccagcccggtaggtccttccttgatgatggaatgttctagacgctgtccaccgggtagccaacagccacgtgtggctactgagctctggaaacatggcccacgtgactgaggacctgatgttttaatttcactgcactttaggcagccacggcagcctgcagctcagtgtgggaggcagggtcgcacttggctgggtggcagcggggtccggagggcttggggaacctggcttagtggccgaggttctgcagaggcctggtctttacgcagctgggacactgcccacactgccgtagcggggagcctggccctccgtggcaccgccacggccgctgctgaacccgtgcgtgggagaagacagcacagggaccccgtctccatggaaccaccagatagagcggattcaagtagttaaatagaaatgtcgcctgcatttttttattttgcaaaaaacattcaaaaataaaccctgtcaatagcagagtcactggcggctgacaaggcgagggggtggctgtgtggatctgagccaaccgcacttcacaaaaggaagcctggtggaccggctcgcggatgagcccctcggggcggtcgcttcgggccctgggcacgtgaacccctcacaggaggctgcgggccgagggctgccgcgcctctcacctc

SEQ ID NO: 167173 - DNA, 367 bp, Homo sapiens
  chr10:135018666-135019033
  hypo
tccagcctctacgcccgtgtgcctgtcccgtaggacagaaggagtgctcagacgagggctgcccggccaggcgtgggaggcatcctgggacaacgcggcgccctctccctgaatgtagagtcccgtccagggaggcgctcagccccagctgctgtctgtgcatgaagcagtgcccggcggccctcgcccccagctcctgtgatcaggacctgcccgtctggcctcagtcctgcttccctcatggcgacagccctggggatgaggtccccggctccatctcgcaggcaggaactcagactctgggcaggttccggagaatcacacccgggcgtgcactcacatttacactcaacgctcatgctctatg

SEQ ID NO: 167174 - DNA, 30 bp, Homo sapiens
  chr10:135022234-135022264
  hypo
tgccgttgcgggagacgtccgtgtgcgtga

SEQ ID NO: 167175 - DNA, 30 bp, Homo sapiens
  chr10:135022687-135022717
  hypo
tggggtgtagtgtggcgtgtacacgtgtgt

SEQ ID NO: 167176 - DNA, 639 bp, Homo sapiens
  chr10:135022965-135023604
  hypo
tgtggcttgtgtgcgcgtgtgtggtgtgcgcgtctggttgtggagttctgtgtggctttgtgcatgtgtgtggtgtgcgcgtctggttgtcgagttctgtgtggctttgtccacgtgtgtggcgtgcgtgtctgtggttgtacagtttgtggcttgcatggcgtgagtgtgagtgctgtgcttccatggaaggagcgtctcctggccgtgatgtggtcacgaggggcttccccgctctgtggacctggtgggcgtcacctttgcagggcagcctggggctggggctgtggccacctgtgtcctcggaccccaggtgagtgggtgaccaggccccttgttccagggccacgccatctcctgcctgagactcctccagggtgggaggaggccttgccaggcctccgcttcctgaccgtggccgtcgggctcccaggacagtcccagacctgcaggcggggccctggtcagtgtctcctgagggtggcgcggtttcacccagtgaagacccagaacctttgagcgtgcagcattgcgcccggtcccgaggcaccagctccctcagcttcccgagctaacgggtcctgcgagtggagacgtcacaaagccctgcatagggctgcgttcagaaaggccctggtg

SEQ ID NO: 167177 - DNA, 181 bp, Homo sapiens
  chr10:135025084-135025265
  hypo
gctgagctgggcggccgcacccggggctcccacagtgggaggtgccgccctcctccagaaggtggcagtgacccccccaccactgtgcttctgcctagatcctacccctggacggctctgccaagcacctgctgggcctcctggaggtgggcatggaccggcgggccgagggcaaccctcg

SEQ ID NO: 167178 - DNA, 375 bp, Homo sapiens; identical to SEQ ID NO: 24795
  chr10:135025539-135025914
  hypo

SEQ ID NO: 167179 - DNA, 164 bp, Homo sapiens
  chr10:135026317-135026481
  hypo
cctcgaggacttctacggcccctgcgccaagaccagtgagaaggggccctacttcctgacggagtacagcactcaccagctcttcagccagctcacgctgctacagcaggtgaggagggcgaggatctgcgcccaggtcacctgcgagtcggggccccagaaac

SEQ ID NO: 167180 - DNA, 30 bp, Homo sapiens; identical to SEQ ID NO: 81140
  chr10:135029279-135029309
  hypo

SEQ ID NO: 167181 - DNA, 586 bp, Homo sapiens; identical to SEQ ID NO: 81141
  chr10:135030352-135030938
  hypo

SEQ ID NO: 167182 - DNA, 158 bp, Homo sapiens; identical to SEQ ID NO: 81142
  chr10:135035223-135035381
  hypo

SEQ ID NO: 167183 - DNA, 564 bp, Homo sapiens; identical to SEQ ID NO: 7830
  chr10:135043826-135044390
  hypo

SEQ ID NO: 167184 - DNA, 186 bp, Homo sapiens; identical to SEQ ID NO: 120059
  chr10:135044554-135044740
  hypo

SEQ ID NO: 167185 - DNA, 31 bp, Homo sapiens; identical to SEQ ID NO: 24799
  chr10:135064837-135064868
  hypo

SEQ ID NO: 167186 - DNA, 135 bp, Homo sapiens
  chr10:135067364-135067499
  hypo
aaacttggggctgtgcggcggagccgtgggggtgcccgctctgcggtggtcggctgaccctgggatgccctggtcagaataacacggggcccagggtcagatgtgcgtctcggaagaacacggaccatttcttag

SEQ ID NO: 167187 - DNA, 100 bp, Homo sapiens
  chr10:135069285-135069385
  hypo
catgctgggggtcagcggtgcacacgattcagccacgtccacagcttttctttatttcagggtctcactctgtggcccaggctggagtacaggggtgcaa

SEQ ID NO: 167188 - DNA, 339 bp, Homo sapiens
  chr10:135069624-135069963
  hypo
tctgaggaagttatatatatttgttaaacatacgtgtccttctcagaatctgtgagaagcgcagatacaattgtcaacagattccagaaacacggggagcagcagagctttgccgccgcctctctccagcaagctttgaacagccattgttttcatttattcctgcttgtaaaacgacacattgttatgatggagaattgtgagtactgcagaaaagaaataagttttgccaccaaaggcgatcactgtggatcatgccggttcctgcacacctgtggggtgctctgagcgtggactccccacgcgagccgtccagacgtgctcagggtggcctcccct

SEQ ID NO: 167189 - DNA, 30 bp, Homo sapiens; identical to SEQ ID NO: 24800
  chr10:135073734-135073764
  hypo

SEQ ID NO: 167190 - DNA, 41 bp, Homo sapiens
  chr10:135073970-135074011
  hypo
agagagtcaggtgtgcgctgcagagccgggtgtgcactgag

SEQ ID NO: 167191 - DNA, 31 bp, Homo sapiens; identical to SEQ ID NO: 24802
  chr10:135075452-135075483
  hypo

SEQ ID NO: 167192 - DNA, 335 bp, Homo sapiens
  chr10:135076253-135076588
  hypo
tgtgctgcctggaaccgggtgcccagggcagccggctcagcaggccccagagcaggggcaggtgtggctgggaggggctgtatatgtggcctcctgaacacagcgggagaccagcggccacctggagacacgtacacacacacgcacccgcaagcacacagctcatcccagcctggtgcctgcagacagctggggctacacgtggccaaggcggggagaaggaattggctgagggcgtggacagcaggagcctctcaggtagatgcattcctgaggttagaacagcagctgagcctgcaaagtcagggtctagggctgagcggcactagctggac

SEQ ID NO: 167193 - DNA, 30 bp, Homo sapiens
  chr10:135080419-135080449
  hypo
gggctccagtgattcgggttttgagagatc

SEQ ID NO: 167194 - DNA, 147 bp, Homo sapiens; identical to SEQ ID NO: 81149
  chr10:135081993-135082140
  hypo

SEQ ID NO: 167195 - DNA, 247 bp, Homo sapiens; identical to SEQ ID NO: 81150
  chr10:135085112-135085359
  hypo

SEQ ID NO: 167196 - DNA, 70 bp, Homo sapiens
  chr10:135086762-135086832
  hypo
gccgaggcctgaagacggctgccgtccggggtcccaggaggctgcccaggctgtcgtcgctgaccccgca

SEQ ID NO: 167197 - DNA, 532 bp, Homo sapiens
  chr10:135087234-135087766
  hypo
gggagccctggcgttcgtccgccacacccacctgaggccggcacaggtgctgaggctggcggctgagtccgggtacccctctacgtggccctggtagaagcagtggtcctgcgggggaagcaggagaggggtccacaggctgtgcccccatggccccacaggctcggggagggccgcccagcccctacctgcccgcccagctgctccgcccgacccatacctgcccgcgaggctgctccgtcacctcggagccattggcagccgtataggtctctgtgtagccggagcccagcaggtccctggaaaagaagtgctgtgactgcctcggccccctcggtgcagagaggctggcccagaggctggacgccggggacaccagtgtgctggagccaggcccgggcaggggggccgacccgagacccactcacctgttcttccgcaggtggagggtgaagttgtgccctgtggccccaaggacgtagctcaccctctctgggtgcaggccctgagcgaggagggaagggtcccaggt

SEQ ID NO: 167198 - DNA, 30 bp, Homo sapiens
  chr10:135094784-135094814
  hypo
gacgctggccatgccgtgctcacagtcact

SEQ ID NO: 167199 - DNA, 30 bp, Homo sapiens; identical to SEQ ID NO: 81153
  chr10:135095288-135095318
  hypo

SEQ ID NO: 167200 - DNA, 30 bp, Homo sapiens; identical to SEQ ID NO: 81154
  chr10:135096695-135096725
  hypo

SEQ ID NO: 167201 - DNA, 30 bp, Homo sapiens; identical to SEQ ID NO: 81155
  chr10:135097462-135097492
  hypo

SEQ ID NO: 167202 - DNA, 30 bp, Homo sapiens; identical to SEQ ID NO: 81156
  chr10:135097785-135097815
  hypo

SEQ ID NO: 167203 - DNA, 30 bp, Homo sapiens
  chr10:135102425-135102455
  hypo
gctccacatacgcccgctcttttaacgtgt

SEQ ID NO: 167204 - DNA, 78 bp, Homo sapiens; identical to SEQ ID NO: 24805
  chr10:135102836-135102914
  hypo

SEQ ID NO: 167205 - DNA, 30 bp, Homo sapiens
  chr10:135103538-135103568
  hypo
ccaggccggcagcgcgcagggacattaaca

SEQ ID NO: 167206 - DNA, 31 bp, Homo sapiens; identical to SEQ ID NO: 24806
  chr10:135106411-135106442
  hypo

SEQ ID NO: 167207 - DNA, 194 bp, Homo sapiens
  chr10:135107040-135107234
  hypo
cccagggaccgcgcccggtgcccacctggtcacagcggagtagctggcggccactgggaggatcctgtgcaccagctccctgatggacaggtccaggttggggtccacgaggaaggtccggctctgcctcccagccaggggctgagcactgacgtacctcccgtccacgcccaccagcacgtacagcaggtcct

SEQ ID NO: 167208 - DNA, 30 bp, Homo sapiens; identical to SEQ ID NO: 81159
  chr10:135109196-135109226
  hypo

SEQ ID NO: 167209 - DNA, 75 bp, Homo sapiens
  chr10:135111400-135111475
  hypo
aaatcaacgcatcacgtacctatcggcagagcccggaaatcaacgcatcacgtacctatcggcaaagcggtgtct

SEQ ID NO: 167210 - DNA, 38 bp, Homo sapiens
  chr10:135113436-135113474
  hypo
ctcccaacatgggccgtacgggcgcagtgtggcacgtg

SEQ ID NO: 167211 - DNA, 31 bp, Homo sapiens; identical to SEQ ID NO: 24807
  chr10:135117510-135117541
  hypo

SEQ ID NO: 167212 - DNA, 17 bp, Homo sapiens
  chr10:135118067-135118084
  hypo
aggatgagctcaacaaa

SEQ ID NO: 167213 - DNA, 580 bp, Homo sapiens; identical to SEQ ID NO: 24808
  chr10:135120290-135120870
  hypo

SEQ ID NO: 167214 - DNA, 150 bp, Homo sapiens
  chr10:135124037-135124187
  hypo
ggggtgtgggaatgagcgggcgcagcgcctccgcactcacacccctctgggccatgcctgtacctcctgcagcagtcggccgtggtcatccgcactcacacccctcggggccgtgtctgtacctcctgcagccgtcggccgtgctcacac

SEQ ID NO: 167215 - DNA, 84 bp, Homo sapiens; identical to SEQ ID NO: 81163
  chr10:135125635-135125719
  hypo

SEQ ID NO: 167216 - DNA, 30 bp, Homo sapiens; identical to SEQ ID NO: 81164
  chr10:135126544-135126574
  hypo

SEQ ID NO: 167217 - DNA, 203 bp, Homo sapiens
  chr10:135128534-135128737
  hypo
tgtggtggggccgcccggggcctgtcggctgcttgagaaagcacaacacaagaaaaatgcaaacacgcagatttactgctggttctccatctccctgagaagatcctgccccagcccgttgaatcctctggctcttgcgtgagctccctgcacaaggccagcagcacagccctggcggcagcgctccacgaggatgtattagc

SEQ ID NO: 167218 - DNA, 711 bp, Homo sapiens; identical to SEQ ID NO: 120068
  chr10:135138913-135139624
  hypo

SEQ ID NO: 167219 - DNA, 403 bp, Homo sapiens; identical to SEQ ID NO: 120070
  chr10:135148818-135149221
  hypo

SEQ ID NO: 167220 - DNA, 30 bp, Homo sapiens; identical to SEQ ID NO: 120071
  chr10:135149575-135149605
  hypo

SEQ ID NO: 167221 - DNA, 697 bp, Homo sapiens; identical to SEQ ID NO: 120072
  chr10:135149868-135150565
  hypo

SEQ ID NO: 167222 - DNA, 30 bp, Homo sapiens
  chr10:135152231-135152261
  hypo
cacccagacacacaccgcaaacaccacaca

SEQ ID NO: 167223 - DNA, 30 bp, Homo sapiens
  chr10:135152599-135152629
  hypo
cctggactcataccccggatgcgcaccaca

SEQ ID NO: 167224 - DNA, 322 bp, Homo sapiens; identical to SEQ ID NO: 24810
  chr10:135153716-135154038
  hypo

SEQ ID NO: 167225 - DNA, 31 bp, Homo sapiens; identical to SEQ ID NO: 24811
  chr10:135180194-135180225
  hypo

SEQ ID NO: 167226 - DNA, 31 bp, Homo sapiens; identical to SEQ ID NO: 24812
  chr10:135198047-135198078
  hypo

SEQ ID NO: 167227 - DNA, 115 bp, Homo sapiens
  chr10:135202197-135202312
  hypo
gccgcccacactctgcgaactgctgcctgagggacgctctgtggggtggctctttgtgcctctggggcccctgctccatcagtggttccttgctgagaaacgcgggcggagagct

SEQ ID NO: 167228 - DNA, 31 bp, Homo sapiens; identical to SEQ ID NO: 24813
  chr10:135204298-135204329
  hypo

SEQ ID NO: 167229 - DNA, 202 bp, Homo sapiens; identical to SEQ ID NO: 24814
  chr10:135204810-135205012
  hypo

SEQ ID NO: 167230 - DNA, 30 bp, Homo sapiens
  chr10:135212896-135212926
  hypo
gggcagagcctcggcgttaacctcccttct

SEQ ID NO: 167231 - DNA, 149 bp, Homo sapiens; identical to SEQ ID NO: 81172
  chr10:135228979-135229128
  hypo

SEQ ID NO: 167232 - DNA, 30 bp, Homo sapiens
  chr10:135232921-135232951
  hypo
cctggctggccgcgcggtgtcagtgctggg

SEQ ID NO: 167233 - DNA, 30 bp, Homo sapiens; identical to SEQ ID NO: 81173
  chr10:135234720-135234750
  hypo

SEQ ID NO: 167234 - DNA, 30 bp, Homo sapiens; identical to SEQ ID NO: 81174
  chr10:135255007-135255037
  hypo

SEQ ID NO: 167235 - DNA, 612 bp, Homo sapiens
  chr10:135269749-135270361
  hypo
gtgctctgaggctggcgtacagacacagcacgtgcgacggagtggtgttggtccgacaccacggggcatggggatacgtgtgcaaccaggagtggacgctggcagaggcctctgtcgtgtgcaggcagctgggctgcggccctgccgtgggcgcccccaagtatgtcccgctgcctggagagatggcccagccctggcttcacaacgtgtcctgccggggcaacgagtcctccctctgggagtgcagccttggctcatggtgccagagcccgtgcccccacgcatgggtggtggtcgcgctgtgctccagtaagtagggaggagtgaaggggacggggctgaggaggaggaggagtgggaggacgaggaggaggactgggaggacgcagaggaggactgggaggatggcgggtctcggagacgggcggggaggctgtgggtctggagctctctctgggaggggctcctctctgggcaccggggccatcctgactgtaagattcagctgtggaaaaaccaacgccagggagagtcagagattggaggaaggaagcagagtgcggcccaggcgtgggggaggcagcagccgagcgggggcggggtctgtggacg

SEQ ID NO: 167236 - DNA, 30 bp, Homo sapiens; identical to SEQ ID NO: 81175
  chr10:135270816-135270846
  hypo

SEQ ID NO: 167237 - DNA, 30 bp, Homo sapiens; identical to SEQ ID NO: 81176
  chr10:135278115-135278145
  hypo

SEQ ID NO: 167238 - DNA, 154 bp, Homo sapiens; identical to SEQ ID NO: 81177
  chr10:135381712-135381866
  hypo

SEQ ID NO: 167239 - DNA, 30 bp, Homo sapiens; identical to SEQ ID NO: 24815
  chr11:197209-197239
  hypo

SEQ ID NO: 167240 - DNA, 30 bp, Homo sapiens; identical to SEQ ID NO: 24816
  chr11:223336-223366
  hypo

SEQ ID NO: 167241 - DNA, 30 bp, Homo sapiens; identical to SEQ ID NO: 81180
  chr11:231998-232028
  hypo

SEQ ID NO: 167242 - DNA, 30 bp, Homo sapiens; identical to SEQ ID NO: 81181
  chr11:232403-232433
  hypo

SEQ ID NO: 167243 - DNA, 400 bp, Homo sapiens; identical to SEQ ID NO: 24817
  chr11:232823-233223
  hypo

SEQ ID NO: 167244 - DNA, 139 bp, Homo sapiens
  chr11:251676-251815
  hypo
gagtcaaggctcttgtgtgagcgctgtgctccctagacagtaaaaaatgacgggaggagcggcatctgcttctcacaagccatctgggtccatgggggtgtgtcaggctatcttgtcttacacacgcctccctctctgc

SEQ ID NO: 167245 - DNA, 30 bp, Homo sapiens; identical to SEQ ID NO: 81184
  chr11:252435-252465
  hypo

SEQ ID NO: 167246 - DNA, 30 bp, Homo sapiens; identical to SEQ ID NO: 81185
  chr11:252668-252698
  hypo

SEQ ID NO: 167247 - DNA, 30 bp, Homo sapiens
  chr11:259235-259265
  hypo
gactctggtgtcagtcgacagtctcagcat

SEQ ID NO: 167248 - DNA, 30 bp, Homo sapiens
  chr11:278025-278055
  hypo
cgtccagcctctgcccgccagctgttcagg

SEQ ID NO: 167249 - DNA, 30 bp, Homo sapiens
  chr11:278405-278435
  hypo
tgcccaacagcatctcgtgccagctgagct

SEQ ID NO: 167250 - DNA, 413 bp, Homo sapiens; identical to SEQ ID NO: 7839
  chr11:314082-314495
  hypo

SEQ ID NO: 167251 - DNA, 30 bp, Homo sapiens; identical to SEQ ID NO: 81187
  chr11:314929-314959
  hypo

SEQ ID NO: 167252 - DNA, 196 bp, Homo sapiens; identical to SEQ ID NO: 120092
  chr11:327112-327308
  hypo

SEQ ID NO: 167253 - DNA, 39 bp, Homo sapiens; identical to SEQ ID NO: 81189
  chr11:367111-367150
  hypo

SEQ ID NO: 167254 - DNA, 730 bp, Homo sapiens; identical to SEQ ID NO: 120095
  chr11:369469-370199
  hypo

SEQ ID NO: 167255 - DNA, 156 bp, Homo sapiens; identical to SEQ ID NO: 81191
  chr11:372117-372273
  hypo

SEQ ID NO: 167256 - DNA, 1660 bp, Homo sapiens; identical to SEQ ID NO: 81192
  chr11:375765-377425
  hypo

SEQ ID NO: 167257 - DNA, 210 bp, Homo sapiens; identical to SEQ ID NO: 81193
  chr11:380578-380788
  hypo

SEQ ID NO: 167258 - DNA, 37 bp, Homo sapiens; identical to SEQ ID NO: 81194
  chr11:381323-381360
  hypo

SEQ ID NO: 167259 - DNA, 186 bp, Homo sapiens
  chr11:390911-391097
  hypo
gccagaccccaggagaacccccgggagatgccccgcctgcctcagacagacgcccccttccccagaggagcgccgggggcatagcaagagcccgggactcgtctgatgaacgaacaagtagtggacggacagatggacagactgaccaacaggccggcagtggacggggtgtgtgcagatgaaagg

SEQ ID NO: 167260 - DNA, 850 bp, Homo sapiens
  chr11:391858-392708
  hypo
agcggcccgaggctccgtgcagattccgggccccacagacaaccgcttcctccaggaagcctaccgtcaagcccccctccagggctcctgtgtcaggagctggctccagggagagtgcgaccctcagggctggtcacagggatcagatgagactccgccgagcctggagctggaagctgcagcggtggcctagcaggcatcgccatccgtctggcccggccgcagtgagggaaggtgcaccccagattcctggctttgccaaaactgtgcctggcgggcaccacgcatcctcagggaggcgccgcagctctgggggggggcacccacagccctctctgccaaggggaggagggaaggtgggcagagtcggccctgggggccctgcaggccgcggggtaccggcgttcccatcatagctccagccgcacggaagccccttcactgagtcctcttgtgagcccttcggcctgactgggctgcagaggccctccaggctggcttccccctcatgccgcccagcctggcccctgcagggccccaggtgggcctggggtggacctgggtgcagggcgggacccagcccatgccaggcacatacctccaggcccgctctgcgccgcacaaacttgtctcccaggatttttccacacgaaacctgtctcccagggaatcagccagtccgatgagctgggcgttcccaccccgccctccgaggcccccacagtcctgtccccgccgcagaggctgccccgcacgcgccgggccagggatggagtcctggacacctcggccgtcagcagtggcctctgggatgagctgggaggctggcgggatccggaccacgagccgg

SEQ ID NO: 167261 - DNA, 31 bp, Homo sapiens
  chr11:393253-393284
  hypo
aggggccccccaccctcgctccctctccatc

SEQ ID NO: 167262 - DNA, 109 bp, Homo sapiens
  chr11:393554-393663
  hypo
gcttcgggggagggccggtccatccacatgcttcctggtgcggagggggctcgctggattccaaggaccagggccagggcctccatggagtcccgttggaccctaaagc

SEQ ID NO: 167263 - DNA, 146 bp, Homo sapiens
  chr11:394011-394157
  hypo
tgggagaaaaggaggcgggaggccaggctgggacctggggccatgcagggcctgttcttccgcccaaattccaccttaagcaggcggcggcccctccctcccacctggccaggtgtccccgcccccagctgcgctcagggctgggc

SEQ ID NO: 167264 - DNA, 34 bp, Homo sapiens
  chr11:394429-394463
  hypo
ccaggagcaggtccgcgcccgcctcttgcagctg

SEQ ID NO: 167265 - DNA, 330 bp, Homo sapiens
  chr11:394828-395158
  hypo
ctcggtcggcaaacccggaacacgcacgcgcctggccccggtagcacagactcacatagggtctcagggacacccagacacccacgctcctcccatacctcacgggaatgagcagaacgggaaagcggggagaggtgtgggggtgctggaagtcctggaggaaagccaggcctgtctggaccaggggctccctgaggaattagaggggagggcccggctggagtgacctagatttctctgtgggaacagcaggtggaggagcacccctcggtgccagccagacccacctgtggcggaatcctggccccactcacgcgagtgtgtgtgcat

SEQ ID NO: 167266 - DNA, 30 bp, Homo sapiens; identical to SEQ ID NO: 81201
  chr11:395394-395424
  hypo

SEQ ID NO: 167267 - DNA, 40 bp, Homo sapiens
  chr11:404581-404621
  hypo
ggaggagaaggtgacgtggcccagcgtccaagggacagac

SEQ ID NO: 167268 - DNA, 53 bp, Homo sapiens; identical to SEQ ID NO: 81203
  chr11:405078-405131
  hypo

SEQ ID NO: 167269 - DNA, 308 bp, Homo sapiens; identical to SEQ ID NO: 120096
  chr11:406792-407100
  hypo

SEQ ID NO: 167270 - DNA, 76 bp, Homo sapiens; identical to SEQ ID NO: 120097
  chr11:407427-407503
  hypo

SEQ ID NO: 167271 - DNA, 985 bp, Homo sapiens; identical to SEQ ID NO: 120098
  chr11:416565-417550
  hypo

SEQ ID NO: 167272 - DNA, 154 bp, Homo sapiens; identical to SEQ ID NO: 81207
  chr11:419275-419429
  hypo

SEQ ID NO: 167273 - DNA, 31 bp, Homo sapiens; identical to SEQ ID NO: 24826
  chr11:420901-420932
  hypo

SEQ ID NO: 167274 - DNA, 426 bp, Homo sapiens
  chr11:421329-421755
  hypo
ggtgctcacacccagatgaaccgcacccgcacgtgggcacgcacacacacacacacacacacaggggaggccacaggctcccagatgaaccgcacccacacgtgggcgcgcgcacacacacacacacccccacacaggggaggccacaggctcccagacgaaccgcacctgcacgtgggcgcacacacacccacacacacacaggggaggccacaggctcccagatgaaccgcacccacacgtgggcgcgcgcacacacacacacacccccacacaggggaggccacaggctcccagacgaaccgcacctgcacgtgggcgcacacacacacacacaggcaaggccacaggctccaacacacgctccagacagtgtctgttacgagtggcctcggtttctccccgtggaaacggcacgatgggtta

SEQ ID NO: 167275 - DNA, 522 bp, Homo sapiens; identical to SEQ ID NO: 24827
  chr11:429288-429810
  hypo

SEQ ID NO: 167276 - DNA, 30 bp, Homo sapiens; identical to SEQ ID NO: 81211
  chr11:430824-430854
  hypo

SEQ ID NO: 167277 - DNA, 145 bp, Homo sapiens; identical to SEQ ID NO: 81212
  chr11:431644-431789
  hypo

SEQ ID NO: 167278 - DNA, 30 bp, Homo sapiens; identical to SEQ ID NO: 24829
  chr11:433687-433717
  hypo

SEQ ID NO: 167279 - DNA, 135 bp, Homo sapiens; identical to SEQ ID NO: 81214
  chr11:438116-438251
  hypo

SEQ ID NO: 167280 - DNA, 253 bp, Homo sapiens
  chr11:445979-446232
  hypo
cagaggcagctcctccgtccctgcagcctccttttaactgtgggatatggcagccacccgtggagcggtccgggtgacaaagccagcgagagctagggagcgcccaggtgaaatcccacaggcaggtgtgagcaccaattgtcattacctttgccctgggcccctcagagacctgtcctccccccccgcccccaacagcctcctgggcgcggccacagacacagacacagtgtctggacgagcagactcgtcc

SEQ ID NO: 167281 - DNA, 30 bp, Homo sapiens; identical to SEQ ID NO: 81216
  chr11:446617-446647
  hypo

SEQ ID NO: 167282 - DNA, 30 bp, Homo sapiens
  chr11:447003-447033
  hypo
cctcctcaccagccacggtgctccctgagc

SEQ ID NO: 167283 - DNA, 155 bp, Homo sapiens; identical to SEQ ID NO: 81217
  chr11:449359-449514
  hypo

SEQ ID NO: 167284 - DNA, 269 bp, Homo sapiens; identical to SEQ ID NO: 120101
  chr11:450010-450279
  hypo

SEQ ID NO: 167285 - DNA, 30 bp, Homo sapiens; identical to SEQ ID NO: 24833
  chr11:453742-453772
  hypo

SEQ ID NO: 167286 - DNA, 204 bp, Homo sapiens; identical to SEQ ID NO: 24834
  chr11:455933-456137
  hypo

SEQ ID NO: 167287 - DNA, 30 bp, Homo sapiens; identical to SEQ ID NO: 81222
  chr11:459885-459915
  hypo

SEQ ID NO: 167288 - DNA, 102 bp, Homo sapiens; identical to SEQ ID NO: 81223
  chr11:464467-464569
  hypo

SEQ ID NO: 167289 - DNA, 35 bp, Homo sapiens; identical to SEQ ID NO: 24836
  chr11:471550-471585
  hypo

SEQ ID NO: 167290 - DNA, 196 bp, Homo sapiens; identical to SEQ ID NO: 81225
  chr11:472767-472963
  hypo

SEQ ID NO: 167291 - DNA, 43 bp, Homo sapiens; identical to SEQ ID NO: 81226
  chr11:475000-475043
  hypo

SEQ ID NO: 167292 - DNA, 50 bp, Homo sapiens; identical to SEQ ID NO: 81227
  chr11:476444-476494
  hypo

SEQ ID NO: 167293 - DNA, 30 bp, Homo sapiens
  chr11:477789-477819
  hypo
agttaatttcaccacgagcccctcaaactc

SEQ ID NO: 167294 - DNA, 267 bp, Homo sapiens; identical to SEQ ID NO: 120102
  chr11:485907-486174
  hypo

SEQ ID NO: 167295 - DNA, 30 bp, Homo sapiens; identical to SEQ ID NO: 81229
  chr11:486897-486927
  hypo

SEQ ID NO: 167296 - DNA, 1673 bp, Homo sapiens
  chr11:487198-488871
  hypo
gctgaggccctgtccgtctggatggtgctcatggtgggcagggggcccctgctctctaggctgtcgtggacgtggtctccacaggccacggcagcacctgtgagtccctggccttcttcccggggtctggcaggtgctgctcaggtgtgggctgatctgccggtgtggggagtgggggtggctgtgccccagggtcaagggtcataccctgtcgcccacaggacaagttggatggctttgttcccgcgcactttcttggctggtacctgaaggtacggcacctcctcttcccggcctccccgccccggttctgaggcctgccgtgggctctggaccgtttctgtccatggagttgagctcagggtgctctgagtgtggtgggagggtgtcgcactgcagccacccagaggttcgagaagccgtggggctcccggacctcccagaagccctgatcctggtcgggtccccgctccgtcctcagggtcggggcggtggaaagaggcggcagggcaggaagtcccgcccctgcctgggcttgggcactgccccatcccacttctgagggaccctgtgctacctatggggctaagagcagtgcctgcttgaccctgcagcccaccctggcagagtttggtgtcaggccccgggcacggggatgctgccttgtttgctgacagtcgtacatcgaggctgctggaggggcagccacccaccccacgctcaccctgagacctcactgggggccctgccagtgctgtcgactccaagaatgctgccagccggggtgggggctgcacgcacccgtgggcagggccgggcgtggcctgcgtcccatactctggctgccagccgggtgggggctgcacgcacccgtgggcagggccgggcgtggccggcgtcccatactctggctgccagccggggtgggggctgcacgcacccgtgggcagggccgggtgtggccggcgtcccatactctggctgaccctggcgcccacagaccctgatgatccgagactggtggatgtgcatgatcatcagcgtgatgttcgagttcctggagtacagcctggagcaccagctgcccaacttcagcgagtgctggtgggatcacgtaggtgccagcacagcccccggggcagtcggtgcaggctgaggggcattctcggaacccctgtgcccagcgcggcccctggaccccctcattctccccggggggcagtgggtgcaggctgaggggcattctcggttcccctgtgctcttccggggtcctcctcggggggctcgttacccctcacccctgcaacgagtgctggcccctccctgcagtggatcatggacgtgctcgtctgcaacgggctgggcatctactgcggcatgaagacccttgagtggctgtccctgaagacgtacaagtggcagggcctctggaacattccgacctacaagtacgtcgtgggggctgcgagggcagggccgggtgggggttacctggaggcagcctcagcgtccgtgctccagcagaccccgagcaccaggcccgtccagtgtgcggctcaggaggggtgaccgtggggctttgcctcctggaacctccctctgacctggtgtcactcaagcccggccgcccctcacagtggccatggcgtctgacccacgtacctccctcctc

SEQ ID NO: 167297 - DNA, 137 bp, Homo sapiens
  chr11:489086-489223
  hypo
cacggcaccgtggagcgccctctgaggcgctgcagccactgctcaagctggaagagactgaacagcagagggccgtggagaagcagggcttgtagctgggtggccagacctcggagaacagccgggcagcagctggg

SEQ ID NO: 167298 - DNA, 30 bp, Homo sapiens; identical to SEQ ID NO: 81232
  chr11:489439-489469
  hypo

SEQ ID NO: 167299 - DNA, 730 bp, Homo sapiens; identical to SEQ ID NO: 24841
  chr11:492550-493280
  hypo

SEQ ID NO: 167300 - DNA, 30 bp, Homo sapiens
  chr11:495183-495213
  hypo
tccccaaggctcaccgtccctgtggccctg

SEQ ID NO: 167301 - DNA, 30 bp, Homo sapiens; identical to SEQ ID NO: 81234
  chr11:498849-498879
  hypo

SEQ ID NO: 167302 - DNA, 30 bp, Homo sapiens
  chr11:500583-500613
  hypo
gtgcagggttgactcgaagtgcagagctga

SEQ ID NO: 167303 - DNA, 282 bp, Homo sapiens; identical to SEQ ID NO: 120104
  chr11:518711-518993
  hypo

SEQ ID NO: 167304 - DNA, 6 bp, Homo sapiens
  chr11:519003-519009
  hypo
cgccgc

SEQ ID NO: 167305 - DNA, 30 bp, Homo sapiens; identical to SEQ ID NO: 81236
  chr11:521031-521061
  hypo

SEQ ID NO: 167306 - DNA, 65 bp, Homo sapiens; identical to SEQ ID NO: 81237
  chr11:528256-528321
  hypo

SEQ ID NO: 167307 - DNA, 262 bp, Homo sapiens
  chr11:528625-528887
  hypo
agtgtggtgcctccgcgggtgctctgacgatcgtctcgagccacgggggtgacagtgacaaggacctgtgtgcacgttagtggggcagccaggcctagctggagaagaaacacacacacgcacacgttcacccacatacacgtgcacacacatgctgccagttcagggggtggaggacgctgactccaggcccagctgacctgcgcggggccctattgtgatgtgtgcagccaccccatgacgtcaccggtgccaagtgccg

SEQ ID NO: 167308 - DNA, 30 bp, Homo sapiens
  chr11:532192-532222
  hypo
atgccaggccacacgcgcaccgtgtcccac

SEQ ID NO: 167309 - DNA, 39 bp, Homo sapiens
  chr11:532699-532738
  hypo
cgcagcttgtgctgccggatctcacgcaccaacgtgtag

SEQ ID NO: 167310 - DNA, 75 bp, Homo sapiens
  chr11:533442-533517
  hypo
gctgcctcacctgccgggtcttggccgaggtctcgatgtaggggatgccgtagcttcgggcgaggtcctgagcct

SEQ ID NO: 167311 - DNA, 38 bp, Homo sapiens
  chr11:534209-534247
  hypo
acctctatagtggggtcgtattcgtccacaaaatggtt

SEQ ID NO: 167312 - DNA, 37 bp, Homo sapiens; identical to SEQ ID NO: 81241
  chr11:539724-539761
  hypo

SEQ ID NO: 167313 - DNA, 338 bp, Homo sapiens
  chr11:548734-549072
  hypo
ggcgtgaaccaccgcgcccggcctcaagtggttttttaaggacagaaataacgaagtgctccttagacgtcgccacagtggacactggaacgaaaggctttgcagcctcctgggaagaggcgtgaactgagagtctgacacccagcctaatggctgcataagctcacagccagcaaacatctgtgagtcagagatcaaggggtttccattagctgctcttgaagaaatcactagacacaaatcccagccaattcagagcggagtggaaaagccattgaaggcagcaggctgaggacagacactgactccacagcgcgaaaggacggaccaccgggaat

SEQ ID NO: 167314 - DNA, 30 bp, Homo sapiens
  chr11:549472-549502
  hypo
ggggtcagcctccagcgaagccccccacat

SEQ ID NO: 167315 - DNA, 153 bp, Homo sapiens
  chr11:550044-550197
  hypo
cctggctcagagccccgcgctgcccaggaactctacgcctcctacaacaacatctcggacctgagcccactgtgcctgctggaacaattggaggtgctggacctggagggcaacagcgtggaggacctggggcaggtgcgctacttgcagctg

SEQ ID NO: 167316 - DNA, 30 bp, Homo sapiens; identical to SEQ ID NO: 81243
  chr11:551271-551301
  hypo

SEQ ID NO: 167317 - DNA, 30 bp, Homo sapiens
  chr11:552381-552411
  hypo
ccttggctgagtcatcgctggtcccaaggc

SEQ ID NO: 167318 - DNA, 30 bp, Homo sapiens
  chr11:553129-553159
  hypo
gcaggagggtgctgccgcttcaccctgaag

SEQ ID NO: 167319 - DNA, 1622 bp, Homo sapiens
  chr11:561903-563525
  hypo
cggggtcaggcaggccgggcaggtagagctgaagtgggacctggtggtccagctccatggtctcccccaaggagagtggggctggttgctgatcctttttgttcttcccaactcttcaagccaggtggacagagagtcggggggacataggctgaccttctcctcttcttcccaggccagactggccgctttgtgcttgtgcagcggcttcgggagaaggagcggcagttgctgccacaagagtgtccagtgggcgcccaggccacctgcggacagtttgccagcgatgtccagtttgtcctgaggcgcacagggcccagcctagctgggaggccctcctcagacagctgtccacccccggaacgctgcctaattcgtgccagcctccctgtaaagccacgggctgcgctgggctgtgagccccgcaaaacactgacccccgagccagcccccagcctctcacgccctgggcctgcggcccctgtgacacccacaccaggctgctgcacagacctgcggggcctggagctcagggtgcagaggaatgctgaggagctgggccatgaggccttctgggagcaagagctgcgccgggagcaggcccgggagcgagagggacaggcacgcctgcaggcactaagtgcggccactgctgagcatgccgcccggctgcaggccctggacgctcaggcccgtgccctggaggctgagctgcagctggcagcggaggcccctgggcccccctcacctatggcatctgccactgagcgcctgcaccaggacctggctgttcaggagcggcagagtgcggaggtgcagggcagcctggctctggtgagccgggccctggaggcagcagagcgagccttgcaggtgagcccggggacctgatcccctgtcactcccccacccctgatatgggcagatacggggatcacagggtcccactcgggaggcaggtgagcccggggacctgatcccctgtcactcccccacccctgacgtgggcagatatgggggtcacagggtctgactcgggaggcaggtgagcccgcggacctgatcccctgtcactcccccacccctgacgtgggcagatacgggggtcacagggtcccactcgggaggcaggtgagcccggggacctgatcccctgtcactccccaacccctgacgtgggcagatatgggggtcacagggcccgaccagggaaagtgctccctccggagcacaagggctgtggagcccagtggctgtgcctcctaaggatctcatgtgtccccaggctcaggctcaggagctggaggagctgaaccgagagctccgtcagtgcaacctgcagcagttcatccagcagaccggggctgcgctgccaccgcccccacggcctgacaggggccctcctggcactcaggtcggagtggttctggggggaggctgggaggtgaggacctggcccagccccactccaagctgacttcccaacccacagggccctctgcctccagccagagaggagtccctcctgggcgctccctctgagtcccatgctggtgcccagcctaggccccgagggtatgtctgtgccccacctccccctggggcaccgggccctcctgtgg

SEQ ID NO: 167320 - DNA, 160 bp, Homo sapiens; identical to SEQ ID NO: 24846
  chr11:563845-564005
  hypo

SEQ ID NO: 167321 - DNA, 30 bp, Homo sapiens
  chr11:566427-566457
  hypo
gcagagcatgcgccacgccgtccctgtgtg

SEQ ID NO: 167322 - DNA, 157 bp, Homo sapiens; identical to SEQ ID NO: 81246
  chr11:567174-567331
  hypo

SEQ ID NO: 167323 - DNA, 212 bp, Homo sapiens; identical to SEQ ID NO: 120110
  chr11:568187-568399
  hypo

SEQ ID NO: 167324 - DNA, 222 bp, Homo sapiens; identical to SEQ ID NO: 48023
  chr11:575603-575825
  hypo

SEQ ID NO: 167325 - DNA, 330 bp, Homo sapiens; identical to SEQ ID NO: 24849
  chr11:590963-591293
  hypo

SEQ ID NO: 167326 - DNA, 30 bp, Homo sapiens; identical to SEQ ID NO: 81250
  chr11:592570-592600
  hypo

SEQ ID NO: 167327 - DNA, 111 bp, Homo sapiens; identical to SEQ ID NO: 24850
  chr11:593650-593761
  hypo

SEQ ID NO: 167328 - DNA, 30 bp, Homo sapiens; identical to SEQ ID NO: 24851
  chr11:599075-599105
  hypo

SEQ ID NO: 167329 - DNA, 123 bp, Homo sapiens; identical to SEQ ID NO: 81253
  chr11:601645-601768
  hypo

SEQ ID NO: 167330 - DNA, 130 bp, Homo sapiens
  chr11:605029-605159
  hypo
ctgatgaaggcttcacgtggcatttacagagccctcgtagatgccatccccgtctctctgttcatctttttctttgttactggattcagagtgaagccaccactcgctctcgaatcgcgcggacgctggg

SEQ ID NO: 167331 - DNA, 30 bp, Homo sapiens
  chr11:608043-608073
  hypo
tctccatcaacagcccgaaggcccagacgg

SEQ ID NO: 167332 - DNA, 30 bp, Homo sapiens
  chr11:608365-608395
  hypo
cccacccagcccggacgtgctgcaggctgc

SEQ ID NO: 167333 - DNA, 61 bp, Homo sapiens; identical to SEQ ID NO: 24853
  chr11:609530-609591
  hypo

SEQ ID NO: 167334 - DNA, 30 bp, Homo sapiens
  chr11:613534-613564
  hypo
ttctgcagcaccgtgcggcccttgtacatg

SEQ ID NO: 167335 - DNA, 30 bp, Homo sapiens
  chr11:613787-613817
  hypo
gcaccgcggtgcaggcgcttggggagggtg

SEQ ID NO: 167336 - DNA, 3 bp, Homo sapiens
  chr11:615793-615796
  hypo
cgc

SEQ ID NO: 167337 - DNA, 117 bp, Homo sapiens; identical to SEQ ID NO: 81255
  chr11:618978-619095
  hypo

SEQ ID NO: 167338 - DNA, 30 bp, Homo sapiens
  chr11:625003-625033
  hypo
gtttatgatcctttacgaccggcttctgcc

SEQ ID NO: 167339 - DNA, 303 bp, Homo sapiens; identical to SEQ ID NO: 81256
  chr11:625774-626077
  hypo

SEQ ID NO: 167340 - DNA, 132 bp, Homo sapiens; identical to SEQ ID NO: 81257
  chr11:644101-644233
  hypo

SEQ ID NO: 167341 - DNA, 30 bp, Homo sapiens
  chr11:674541-674571
  hypo
ccgctctgcgtcagcgtggatcttggcctg

SEQ ID NO: 167342 - DNA, 30 bp, Homo sapiens
  chr11:682082-682112
  hypo
ctcctggggcggcctcggctgctgctcctc

SEQ ID NO: 167343 - DNA, 30 bp, Homo sapiens
  chr11:682342-682372
  hypo
cccagatgggttcttcgctgtggctttcct

SEQ ID NO: 167344 - DNA, 165 bp, Homo sapiens; identical to SEQ ID NO: 81258
  chr11:688382-688547
  hypo

SEQ ID NO: 167345 - DNA, 268 bp, Homo sapiens; identical to SEQ ID NO: 120122
  chr11:694727-694995
  hypo

SEQ ID NO: 167346 - DNA, 30 bp, Homo sapiens; identical to SEQ ID NO: 120123
  chr11:695228-695258
  hypo

SEQ ID NO: 167347 - DNA, 153 bp, Homo sapiens
  chr11:700513-700666
  hypo
aagaccctgtctcaaaaaaaaaaaaaaggaaaaggcaagctgaggtggctgctgctgctgtgccaggttacttatgttccgtccgcgcctctgctcttcaggtcaggtgttcagctatcctcaccgctacctggtcctcgatcttgctctgct

SEQ ID NO: 167348 - DNA, 220 bp, Homo sapiens
  chr11:702893-703113
  hypo
ctccagggagcgcctcgcaccaccttccctcccctttgctctgttctccaggcaccaggggcaacctgacagaggctgagaggccgctggccgccagcctggccctcacggctggcaccgccctcctctctgcccacttcctgctttggcaggccctagtgttgtgggcggactgggccctcagcgccacgctcctggcccttcacggcctggaggccgt

SEQ ID NO: 167349 - DNA, 688 bp, Homo sapiens; identical to SEQ ID NO: 120124
  chr11:705950-706638
  hypo

SEQ ID NO: 167350 - DNA, 30 bp, Homo sapiens; identical to SEQ ID NO: 24856
  chr11:712378-712408
  hypo

SEQ ID NO: 167351 - DNA, 30 bp, Homo sapiens
  chr11:719597-719627
  hypo
tggagtagcgagcacgctggacgcacagca

SEQ ID NO: 167352 - DNA, 190 bp, Homo sapiens; identical to SEQ ID NO: 120125
  chr11:721127-721317
  hypo

SEQ ID NO: 167353 - DNA, 31 bp, Homo sapiens; identical to SEQ ID NO: 24857
  chr11:724960-724991
  hypo

SEQ ID NO: 167354 - DNA, 136 bp, Homo sapiens; identical to SEQ ID NO: 81263
  chr11:727708-727844
  hypo

SEQ ID NO: 167355 - DNA, 30 bp, Homo sapiens
  chr11:728112-728142
  hypo
ggaggggcacctgaccgccagatgggcggt

SEQ ID NO: 167356 - DNA, 311 bp, Homo sapiens
  chr11:733217-733528
  hypo
cacaccacccagtgtgcggcgtttgccatggcagccccgtgaaacacagaagcctgccttctcaaccgcactcacctttgctcgaatatgagcagcccccattcttccccgacacacacagtcaaatcagcaaacgtcactgatttgatgcagtctcacctggaagcgtaagcatccggcgtcccgggcgcctgctgcctaggtgttggggctgcccggggaagagctgggagccatgtcccagccgtgactgacctggccagcttccccaggttacttgaaagaacctcttgtgtcgagacgtgggtagt

SEQ ID NO: 167357 - DNA, 33 bp, Homo sapiens
  chr11:739280-739313
  hypo
ctatatatacacctctatcgatacgtggattga

SEQ ID NO: 167358 - DNA, 34 bp, Homo sapiens; identical to SEQ ID NO: 24859
  chr11:744541-744575
  hypo

SEQ ID NO: 167359 - DNA, 494 bp, Homo sapiens
  chr11:763192-763686
  hypo
cgccctcacctgccccgccctcacctgcccccgccctcacccgcccccgccctcacccatccccgccctcaccgtccccgccctcacccgcccccgccctcacctgtccccgccctcacctgccccgccctcacctgtccccgccccgcagggagctcgaggagcagcacggcatccactgcaacatgacgttactcttctccttcgcccaggctgtggcctgtgccgaggcgggtgtgaccctcatctccccatttgttgggcgcatccttgattggcatgtggcaaacaccgacaagaaatcctatgagcccctggaagaccctggtgagggtccctctgtggtaatggggtaaggggagcagcctcagcagcacctcaggcaggaagagcccgagacggagctgccgcatcaacaagcagtgaggtgcacaggtcggcgcggggcaggcaggggtggcggctcaaggtagtgcagccggcaggcactggga

SEQ ID NO: 167360 - DNA, 213 bp, Homo sapiens; identical to SEQ ID NO: 81267
  chr11:763888-764101
  hypo

SEQ ID NO: 167361 - DNA, 627 bp, Homo sapiens
  chr11:772494-773121
  hypo
caccgtggccgacggcgcagatgggttctgaaagccgtacatggcgttgaggccctggaccccgccacccgcaccctgaagcccctcccagatgcccctgcttgtggctcccccaggcttgtgccgcctgcctggcccctcctcccaggtttccctggaaactggactcagcacccgggtgtcctggctcagcccgcacagctggcatcaggaatctgctcgggggagctggtgcttcaggactaggctctggtttagagcccaaatctcaggttttggcagccgagacacacgcagagaggaggtcctgaggttccaggtctgtttaccaaaccctaggacgctgcccggcagccccactgcatagcctggcaggcactgtgggaaaggcccctccccggctagacaggacgcccctgggcaggtgggaggtagcctgaggcaatgcctgtgccttgcagtggggacatcctggctccatccgaaaggctgagtgtgttcccacggctgaggtggccacaaacaattgctgcctgtccaggccatgctggggacggcggccccactccaacacacaaagggtgctgtgtagagcgctggcttgtccaccccggccagtggacacac

SEQ ID NO: 167362 - DNA, 190 bp, Homo sapiens; identical to SEQ ID NO: 81269
  chr11:775073-775263
  hypo

SEQ ID NO: 167363 - DNA, 143 bp, Homo sapiens; identical to SEQ ID NO: 81270
  chr11:782433-782576
  hypo

SEQ ID NO: 167364 - DNA, 30 bp, Homo sapiens; identical to SEQ ID NO: 81271
  chr11:787670-787700
  hypo

SEQ ID NO: 167365 - DNA, 30 bp, Homo sapiens; identical to SEQ ID NO: 81272
  chr11:791998-792028
  hypo

SEQ ID NO: 167366 - DNA, 392 bp, Homo sapiens
  chr11:799206-799598
  hypo
tgctcacagggacccgtccccacacactggagagacttgaaggtgggggctctgcccatccactggggaatatctgggccagcctaaaagtctgtggggcctaggcctgggcaggctctgggggctgtggagccgaggagccaggcagagcggggtccttgggggccaagcccatgcgtcggatgctgtcctggtacttgcggcggccgagctccaagactgcgcgcacctcttcagccacgtcctgccggtcactctgctccagggcctgcaccaggagccccacagcccctggctgcccagcctggcgctcagcccaggagaagagcatgtgacggatctgctcatccagatcatccctgcaggcagaggatgggcgacagaggggtcct

SEQ ID NO: 167367 - DNA, 317 bp, Homo sapiens
  chr11:799829-800146
  hypo
atgcgctgcacctcccggtaggacacccccaggtgcagggccacggctggccagtccagacccagacgcccagccacactcagcaggttgctctgcgtcagaaagccggtctcggcatctcccagattcaagggtgccaaggagaggccagccccccgccgtggcccctcggaccctcgaagtctctgttggaaggaaaaagtgcattaagccctgggctccacccccaactccaccatgtcaccctggtcacccctgggcctcggtcctgccccgcccctctgctgtccctcagtcccaccggcagcttgatgggc

SEQ ID NO: 167368 - DNA, 30 bp, Homo sapiens; identical to SEQ ID NO: 81274
  chr11:800579-800609
  hypo

SEQ ID NO: 167369 - DNA, 30 bp, Homo sapiens; identical to SEQ ID NO: 81275
  chr11:800850-800880
  hypo

SEQ ID NO: 167370 - DNA, 635 bp, Homo sapiens
  chr11:823371-824006
  hypo
ctgtacagctttgatcttgttctggatctaggataggttttggggttgggagctgcgggtagtgaagggaggtggctgttgggggtgccagggattccaggggcagaacgggcatccctggctccctccgctccatttaaccctcctcactgcaggtgctgcgagagatgtgcaagcagggataccgggatggcctgcgctttctgcagcggaacggtgcgcggacccgggcgggagagggcggggtgggctcggctctgctaccccctgcgggccgcggccgcgctgatgaactgagaatcccttctctccccaaccccaggcctcctgaaccggcccaaccccttgctggcgttgccccccgcccgcccccacggcccagaggacaaggaccaggcagtggagagcgcccaagcggaggattactcgcagctgcccggagaagatcacatcctggagcacctgcccgcccggctcaatgagggtgcgcacctgggggacgggaggggaggaggggaggcaggagggaaagagagagaggagaggacggtgagcaggggagggaagccgagcgggtcctgggccccgctgcctccactggccgccgacctcccgcccacccgcagccctgctgg

SEQ ID NO: 167371 - DNA, 403 bp, Homo sapiens
  chr11:824507-824910
  hypo
atccctgccccgcaggctgccggagcaggtggagctgcgccgcgtccagtcgctgccgtccgtgccgctgtcctgcgccgcctacagagaggcactgcccggctggatgcgcaacaacctctcgctgggggacgcgctggccaagtgggaggagtgccagcgccagctgctgctcggcctcttctgcaccaacgtggccttcccgcccgaagctctgcgcatgcgcgcacccgccgacccggctcccgcccccgcggacccagcatccccgcagcaccagctggccgggcctgcccccttgctgagcacccctgctcccgaggcccggcccgtgatcggggccctggggctgtgagaccccgaccctctcgaggaaccctgcctgagacgcctccattaccac

SEQ ID NO: 167372 - DNA, 144 bp, Homo sapiens
  chr11:826058-826202
  hypo
gggatctgggactgggcgagccggccaggcaggtccctgatgtgcctgtgccagaggccaccccccttggtctcaaggtcctgtcctataagcccagccttttgtggttcagctgggtcgcacgctggatcccaggccccttcc

SEQ ID NO: 167373 - DNA, 35 bp, Homo sapiens; identical to SEQ ID NO: 7854
  chr11:832780-832815
  hypo

SEQ ID NO: 167374 - DNA, 30 bp, Homo sapiens; identical to SEQ ID NO: 24863
  chr11:840392-840422
  hypo

SEQ ID NO: 167375 - DNA, 749 bp, Homo sapiens
  chr11:850358-851107
  hypo
ctcttctgggtgagtccgggggccggggtgggggcccgggaaagacccggggtccctcccgcggcgggtcgcggggtctggggagtcggagtcgctgccccggccaggcgttgggtgcggttgtggggatggtcccgggaggacccaagaccgctgctccggctaggagcctggactgggcgggtggggaaggtttgcaccatcgcggggtccgccccctgcactcagagcggctgccccacgccctggtcccctctcctctcctctcctctcctcacttgatgagacgggacacgttgcacacgtgcgcgccggacagggccacccgggcactgcgcctctcctagggtcggggttcgagtccgggtcgtggccagttttgcgcggggccccggtgcctcctctgcgcccgctccctcctcggtgcagccgttatccttgcctcggccccgcccctccaggcaggcgacctgtcgggcccagggactcacttccgagggtttgagccggctgccgccaaggtcccccagtcgccgggaggcgctgcggaagggaatcctggacactgagcagggccgtgggccatcagtgttcgcgggagacactggctttcccgcgcctccggcagcagaggcttccctaacttttgcggaggtggggtcaggtgtgctcagacctgcagtggtgtccgggggggccctgtgtgctggatggagcagagctgaggtagagggcggacagggttccac

SEQ ID NO: 167376 - DNA, 30 bp, Homo sapiens; identical to SEQ ID NO: 24865
  chr11:855956-855986
  hypo

SEQ ID NO: 167377 - DNA, 44 bp, Homo sapiens
  chr11:858810-858854
  hypo
cccacccccgctcacacgcacccccggctcgcatcctgggctcc

SEQ ID NO: 167378 - DNA, 399 bp, Homo sapiens
  chr11:859259-859658
  hypo
cacaccctggcccacacgcaccttggctcacgtgcaccccggctcacacgcaccccccctttcacacgcaccccgggctcacacgcaccccgggctcacacgcaccccccctttcacacgcaccccgggctcacatgcaccccggctcacacgcaccccctctcacacgcaccccggctcacacgcacccccctcacacgcaccccgggctcacacgcaccccgggctcacacgcaccccgggctcacacgcaccccctcttacacgcaccccgggcccacatgcactccggctcacacacaccctcactcatgcaccccgggcccacacgcaccccagctcccatgtacccctgctcacatgcaccccagctcccatgcatcccgggctcacacacaa

SEQ ID NO: 167379 - DNA, 30 bp, Homo sapiens
  chr11:861977-862007
  hypo
gcgtttctcctgccacgagtgacaggggac

SEQ ID NO: 167380 - DNA, 409 bp, Homo sapiens
  chr11:862649-863058
  hypo
acttgctcatcatcaccggcgcctttgtcatggccatcggcttcgtgggctgcctgggtgccatcaaggagaacaagtgcctcctgctcactgtgagtgccggggcccaagcgatgctccgggtgggaccacgcagggtggggctccggtggcccccaggccttggctgccgcagtgaccccccagacgtgggcaccacctctggggccggacctccaggctggcagtgtggcccggggccctggccactgttgggtcttccaggccacactggggctggggggtgatttgcagagcggtgtgggggtcactcaagagaacgtgctgtaccttgtcaggggcctcccctgacgggacactggccctggtgagtgcaggcacagccccgcacacacgtacacacgcatgc

SEQ ID NO: 167381 - DNA, 213 bp, Homo sapiens
  chr11:864621-864834
  hypo
gggcagccaggacagcgggtgtggatttaccaggcctggaggggcagcgccagcgaccctgggaggctgtgctgtggctctatagcgactggggcacaagggcactgctaccccacccggagggtgcgccccaggttgtcccccgccctctgacgcagcgtcctgagccgtctgctcccagcgccccatccgggccgcgcaccgtggggttct

SEQ ID NO: 167382 - DNA, 662 bp, Homo sapiens
  chr11:865451-866113
  hypo
tctggatgagggaggcggggtacagtgggaggggccctgctgaccccccccgcacccccagattgacaggtatgcccagcaagacctgaagaaaggcttgcacctgtacggcacgcagggcaacgtgggcctcaccaacgcctggagcatcatccagaccgacgtgaggcgtgggcaggtgggcggggtcggcgggtgccccctcccctcctgcctcagcccgacctgagcttgccccccagttccgctgctgtggcgtctccaactacactgactggttcgaggtgtacaacgccacgcgggtacctgactcctgctgcttggagttcagtgagagctgtgggctgcacgcccccggcacctggtggaaggcggtgagtgagacccccaccctgggggctggtaggggcctagagggcgggaccagcaggccctgccgtgacacgcatgacatccctccctgcagccgtgctacgagacggtgaaggtgtggcttcaggagaacctgctggctgtgggcatctttgggctgtgcacggcgctggtgcaggtatggcctgggggcctgcgggctccctgcccccactttgttaggaccttctgagcccagggaacaaagtagcaaagaccttgcccccaggaacccacgatcgggggaggcc

SEQ ID NO: 167383 - DNA, 30 bp, Homo sapiens; identical to SEQ ID NO: 81286
  chr11:867016-867046
  hypo

SEQ ID NO: 167384 - DNA, 30 bp, Homo sapiens; identical to SEQ ID NO: 81287
  chr11:869477-869507
  hypo

SEQ ID NO: 167385 - DNA, 162 bp, Homo sapiens
  chr11:873623-873785
  hypo
tgaacacggacagctcggcctcacagaaacatccagaacagacaaacctacagagacggtgggctggaggtgggcacaagctagggcggagaaagagggcacagctgctaaaaggcacagggcttctttttttggggagcagtaatgcgggctgtacaattc

SEQ ID NO: 167386 - DNA, 207 bp, Homo sapiens; identical to SEQ ID NO: 81288
  chr11:875481-875688
  hypo

SEQ ID NO: 167387 - DNA, 31 bp, Homo sapiens; identical to SEQ ID NO: 24868
  chr11:880350-880381
  hypo

SEQ ID NO: 167388 - DNA, 30 bp, Homo sapiens; identical to SEQ ID NO: 81290
  chr11:888555-888585
  hypo

SEQ ID NO: 167389 - DNA, 30 bp, Homo sapiens; identical to SEQ ID NO: 81291
  chr11:889216-889246
  hypo

SEQ ID NO: 167390 - DNA, 30 bp, Homo sapiens; identical to SEQ ID NO: 81292
  chr11:890316-890346
  hypo

SEQ ID NO: 167391 - DNA, 30 bp, Homo sapiens; identical to SEQ ID NO: 24869
  chr11:891002-891032
  hypo

SEQ ID NO: 167392 - DNA, 30 bp, Homo sapiens
  chr11:893454-893484
  hypo
ggagggccagcagccgggcctggtgcagag

SEQ ID NO: 167393 - DNA, 207 bp, Homo sapiens; identical to SEQ ID NO: 81294
  chr11:898337-898544
  hypo

SEQ ID NO: 167394 - DNA, 30 bp, Homo sapiens
  chr11:901608-901638
  hypo
gccaatggcccgtgccgtttgctgcccaga

SEQ ID NO: 167395 - DNA, 80 bp, Homo sapiens; identical to SEQ ID NO: 81295
  chr11:907471-907551
  hypo

SEQ ID NO: 167396 - DNA, 30 bp, Homo sapiens; identical to SEQ ID NO: 24871
  chr11:921977-922007
  hypo

SEQ ID NO: 167397 - DNA, 84 bp, Homo sapiens; identical to SEQ ID NO: 81297
  chr11:937329-937413
  hypo

SEQ ID NO: 167398 - DNA, 38 bp, Homo sapiens; identical to SEQ ID NO: 81298
  chr11:938959-938997
  hypo

SEQ ID NO: 167399 - DNA, 25 bp, Homo sapiens
  chr11:939450-939475
  hypo
ttgactttttttgagacggggtttc

SEQ ID NO: 167400 - DNA, 30 bp, Homo sapiens; identical to SEQ ID NO: 81300
  chr11:945187-945217
  hypo

SEQ ID NO: 167401 - DNA, 145 bp, Homo sapiens; identical to SEQ ID NO: 81301
  chr11:946373-946518
  hypo

SEQ ID NO: 167402 - DNA, 263 bp, Homo sapiens; identical to SEQ ID NO: 81302
  chr11:971726-971989
  hypo

SEQ ID NO: 167403 - DNA, 30 bp, Homo sapiens; identical to SEQ ID NO: 81303
  chr11:972232-972262
  hypo

SEQ ID NO: 167404 - DNA, 30 bp, Homo sapiens; identical to SEQ ID NO: 81304
  chr11:977265-977295
  hypo

SEQ ID NO: 167405 - DNA, 30 bp, Homo sapiens; identical to SEQ ID NO: 81305
  chr11:977547-977577
  hypo

SEQ ID NO: 167406 - DNA, 97 bp, Homo sapiens
  chr11:980552-980649
  hypo
ggtgacaggctgcccggtgctttggggaggactgcttgtgccctgggatctgaatctgttctcactgagggccaggaggagcggggagggaggactc

SEQ ID NO: 167407 - DNA, 31 bp, Homo sapiens; identical to SEQ ID NO: 24873
  chr11:984630-984661
  hypo

SEQ ID NO: 167408 - DNA, 690 bp, Homo sapiens; identical to SEQ ID NO: 81308
  chr11:985301-985991
  hypo

SEQ ID NO: 167409 - DNA, 102 bp, Homo sapiens
  chr11:986393-986495
  hypo
agcagccgcgctcccggccttctcggccttctccctgccctgggctggtgcctctggctgagaccccattgccggtcacagcttgaccggcctcccgcgggc

SEQ ID NO: 167410 - DNA, 174 bp, Homo sapiens
  chr11:986839-987013
  hypo
cgcgagaccaacctgcgctacctggccctggagagcatgtgcacgctggccagctctgagttctcccatgaggctgtcaagacgcacatcgagacggtcatcaacgccctgaaggcgagtgccctgtccttgggttctgctcactccctgagcaggtgccgtgggtcttcctgt

SEQ ID NO: 167411 - DNA, 363 bp, Homo sapiens; identical to SEQ ID NO: 81311
  chr11:991641-992004
  hypo

SEQ ID NO: 167412 - DNA, 30 bp, Homo sapiens; identical to SEQ ID NO: 24877
  chr11:992637-992667
  hypo

SEQ ID NO: 167413 - DNA, 30 bp, Homo sapiens
  chr11:992964-992994
  hypo
gcctgccctgtccgtcggagagggttaggc

SEQ ID NO: 167414 - DNA, 530 bp, Homo sapiens
  chr11:993203-993733
  hypo
tgcaccgcgccaggacgtgcccgcctcgccttaactctggcacctggctgccaccccggctcattgtttgtgcttcgcaggctcttcaggctcccgcgtgccacgagaacctggtcaaagtgggcggctacatcctgggggagtttggaaacttgatagctggagacccgagatccaggtgagaggccctttgcgagtcggggctgtgtgcgctccggcgggcctctcggtggtcggtggcaagaggcgaggcaccagctggccctgccgtgaggcctcgcagagccgcttctgctccccatcggcgtctttttgttttccttcagttgatagaaaaagcagggattctagtagaaaatggagacgtggggttgatggctgacttagtgaaaggggcgtctttgcggtgggatctggagctggaagagggtcccgaccagcggcctctggtgcaggccagggggtctcgccgccgtcccccccccgcgggggcgtgctgcagcctgcgaggggacgacggtgtccctgtg

SEQ ID NO: 167415 - DNA, 302 bp, Homo sapiens; identical to SEQ ID NO: 24879
  chr11:996127-996429
  hypo

SEQ ID NO: 167416 - DNA, 264 bp, Homo sapiens; identical to SEQ ID NO: 24880
  chr11:998036-998300
  hypo

SEQ ID NO: 167417 - DNA, 57 bp, Homo sapiens; identical to SEQ ID NO: 24881
  chr11:1000518-1000575
  hypo

SEQ ID NO: 167418 - DNA, 30 bp, Homo sapiens
  chr11:1001148-1001178
  hypo
ctctaatttctgtccggtgcctgggcacct

SEQ ID NO: 167419 - DNA, 30 bp, Homo sapiens; identical to SEQ ID NO: 81317
  chr11:1001993-1002023
  hypo

SEQ ID NO: 167420 - DNA, 370 bp, Homo sapiens
  chr11:1005977-1006347
  hypo
aatgtgcacctgtgccgtggctgagccgctgcagtgagggctagtgtgcaacaccgatgctgtgctggacgcgtgcccagccgggtcccctgacaggaggcagccggggccggtgcgtgtgtttgcatgttgcagtcatggggcggggccggcagaggcctgtgtgattgtggcgtccctggaaaagatgcttggcaggcccctccagctgtagcccagcctgcagacggggcgttctgtgggtccttccccgtgcatatgcgtgtgatctcacccatcccgtgtgggtgcgcaggaggggccgagggaggagggtgctggagggcggaagttacctctgactggaggagatacccggcccgtgttacca

SEQ ID NO: 167421 - DNA, 170 bp, Homo sapiens
  chr11:1006969-1007139
  hypo
gcagagtgtgggaggcgccagtggggactggagcgcggtgcgcaccccagccgagcttgtgtgtgcttctggcagagcttttagactgaagattttcccttcgtaatgccagaagcgttcctagaacttccccagctaaaacagggagacgctaacgtctctacctctaa

SEQ ID NO: 167422 - DNA, 30 bp, Homo sapiens
  chr11:1007432-1007462
  hypo
gctcgaggcggcagcgagcccagcagctga

SEQ ID NO: 167423 - DNA, 31 bp, Homo sapiens; identical to SEQ ID NO: 24884
  chr11:1007687-1007718
  hypo

SEQ ID NO: 167424 - DNA, 501 bp, Homo sapiens
  chr11:1008030-1008531
  hypo
gcccgtggacccgaccgtggaggggggcgcgcaggtgcagcaggtggtcaacatagagtgcgtgtccgacttcacggaggcgccagtcctcaacattcagttcaggtaagagccgcctgtgcgccccgggccaaggggtgtgtgggcgcctgagctgtgtgcctgggctccatgactgtgcctccgtgtccttcctgaggggacccggggcgtgcgggtgctcacggtgcatggatgcggcctgagctattgctgcccccggctctgcagagcgcaggaaacaaggggaggcggagccctgggctccgggacggcaggtggcagctcccacatggggccttgctaggatctttctgggcaccatggggcccacctcatggggtggcagacagccagggcccccgcgccacctgcccggcttggtaccagacgacagctgtggggtgcaggcagctggtttccttcggccccctggcctggggggcgcgttttttgctcagt

SEQ ID NO: 167425 - DNA, 60 bp, Homo sapiens; identical to SEQ ID NO: 81322
  chr11:1008940-1009000
  hypo

SEQ ID NO: 167426 - DNA, 30 bp, Homo sapiens; identical to SEQ ID NO: 81323
  chr11:1009786-1009816
  hypo

SEQ ID NO: 167427 - DNA, 30 bp, Homo sapiens; identical to SEQ ID NO: 24885
  chr11:1010697-1010727
  hypo

SEQ ID NO: 167428 - DNA, 30 bp, Homo sapiens; identical to SEQ ID NO: 81325
  chr11:1010968-1010998
  hypo

SEQ ID NO: 167429 - DNA, 64 bp, Homo sapiens; identical to SEQ ID NO: 81326
  chr11:1011266-1011330
  hypo

SEQ ID NO: 167430 - DNA, 30 bp, Homo sapiens; identical to SEQ ID NO: 81327
  chr11:1012086-1012116
  hypo

SEQ ID NO: 167431 - DNA, 453 bp, Homo sapiens
  chr11:1013507-1013960
  hypo
gtgagtacgagccgccggccaggcgtgctgggatcggggcagggcagctccagctgctgctcataggagtggagggggcggcagcagctgcagcgggcatccacctgctgggtgatgatgttgaagctgccgagaagtcaagacagagcagggtcatgactgctgcaggggcataaggcccctccctccccagggcagctgctccgcagaggcctggacctccccgctgagctcccggctcacaggggccagggcggtgttgggcagatggagcgcagagtggctcacctgatggggcagcaggcgcctgggtggggtgcccgaacctctctggggtggggttgtgagcaccttggtggacgtggggcaggcctcccacctgtggactcacctggcagcggaaatgcaggcgccctcacagcgggttaccgtcacgttcgccatgcacccctt

SEQ ID NO: 167432 - DNA, 188 bp, Homo sapiens
  chr11:1015846-1016034
  hypo
gaaccgtgtggtaggcgacaaggtgggaccagggtgcctggtggtaaggttggtgactggagaggtggggatacccgtcacccccgaggtgagtgacacaaagcctgatgtgggaactcgggtggtgagagaagtggaccgcgaggtggtggactgagaggagaaggcaggggcggtgtgggtgctgg

SEQ ID NO: 167433 - DNA, 30 bp, Homo sapiens; identical to SEQ ID NO: 81329
  chr11:1021797-1021827
  hypo

SEQ ID NO: 167434 - DNA, 30 bp, Homo sapiens; identical to SEQ ID NO: 81330
  chr11:1023558-1023588
  hypo

SEQ ID NO: 167435 - DNA, 30 bp, Homo sapiens; identical to SEQ ID NO: 81331
  chr11:1023931-1023961
  hypo

SEQ ID NO: 167436 - DNA, 492 bp, Homo sapiens
  chr11:1024948-1025440
  hypo
cacgtccccgcacagcgggctctccttccacgagttcaccaactccagctcgctggatgccacgtacctgctgcgcgtctcgaagtcgtccttcatgttcccgttgaagttgccacacaagccgcagaggggatcctgcagacggtggcatcaggccgggcccaggggccgtgccatctgtctccacccctgcatcagggagggcctgggaggaggcagagggcgtgcggtacctgggaggcacgggcgatcctgatgaggatggtcatgtgcctgttccagatgagcgtcaggttgtacctcccggggatgctgatgtccacgacaaggctcagcgcacccggcgtcaccccgagctgcacgtggggctcctccccggtgaccgtgtagtttctgtccgccagcaccacggacaggccctgtggggtggggttggcataggactgcctgtctgtctcccccggcccctggcacagccgtgctggaccgagc

SEQ ID NO: 167437 - DNA, 30 bp, Homo sapiens
  chr11:1026019-1026049
  hypo
agttgccgtcgaatacgaagcgctggccgt

SEQ ID NO: 167438 - DNA, 30 bp, Homo sapiens; identical to SEQ ID NO: 24887
  chr11:1027545-1027575
  hypo

SEQ ID NO: 167439 - DNA, 30 bp, Homo sapiens; identical to SEQ ID NO: 24888
  chr11:1028276-1028306
  hypo

SEQ ID NO: 167440 - DNA, 483 bp, Homo sapiens
  chr11:1029014-1029497
  hypo
ctggcagggatgggcgcaggaaaggccttacctgcctggagaggtagaccacagccaccagggaggtctcggagtgtgagacgccggacttgtcgtacacagccatgagggcaccgtcctcgggaagctgggggctctgcgagggggcggggctcagacacgggtggggtcaccgggagcgcccctccccacgggccacagggctcgtcctacctggaggaggatgtaggtgcaggtgccgtggaagcggtagggcctggcgtcaaatgtggtaacaaaggagccaccttccagggagcagtgtccggggcacggccgctccgtgcacacccagcggcccagggtgcaccggctgtgggtgggcgtgggggtagcggcatggtgggcagggccgctggagccagacagcacacccctgcctgccctaggccagtggaacccctgccggccggccagagccccctccggcgcctcactcaccag

SEQ ID NO: 167441 - DNA, 30 bp, Homo sapiens; identical to SEQ ID NO: 81335
  chr11:1032120-1032150
  hypo

SEQ ID NO: 167442 - DNA, 30 bp, Homo sapiens; identical to SEQ ID NO: 24889
  chr11:1033142-1033172
  hypo

SEQ ID NO: 167443 - DNA, 269 bp, Homo sapiens
  chr11:1035490-1035759
  hypo
cggcgtggtagggagcgggctcagagacccccatatctcctacagttgaagggtggtgcccggcgtggtggggagcgagctcagagacccccacatctcccacggttgaagggtggtgcccggcgtggtggggaaggggcttcaaaggagagaaggggtggggtgggcttgggtcgccctacagtgggacacccctgggggggtcccactgtgctctgagcccgaggcgcccaggttggcagcagctccgagggcgagctctgtcacgc

SEQ ID NO: 167444 - DNA, 30 bp, Homo sapiens
  chr11:1036051-1036081
  hypo
agggcaggctgcctgcggcggttctgagcc

SEQ ID NO: 167445 - DNA, 337 bp, Homo sapiens
  chr11:1043702-1044039
  hypo
cgaggcggatgcgtgcgcacacatgctcccaggaggtgtttgtaacaaccccaaactggaaatgacccagatgtccatcagagcgcagcctgttcacctgctcttccagcttcagcaattacaaacaaagcagttagaacacgtgtgtccgtgtctcagaggagcatgtgctgccacttctcccggcgtggactggctggatcacgtggttggcgtctgaatttttcagaaacggccaaactgttttccggcatggctgtgccattgtgcctcccacccgtgatgtgagttccagcccctcctcaccctcctgtatgcttgacgtcgtccgttttta

SEQ ID NO: 167446 - DNA, 30 bp, Homo sapiens; identical to SEQ ID NO: 81337
  chr11:1044780-1044810
  hypo

SEQ ID NO: 167447 - DNA, 70 bp, Homo sapiens; identical to SEQ ID NO: 81338
  chr11:1047106-1047176
  hypo

SEQ ID NO: 167448 - DNA, 31 bp, Homo sapiens; identical to SEQ ID NO: 81339
  chr11:1055802-1055833
  hypo

SEQ ID NO: 167449 - DNA, 39 bp, Homo sapiens; identical to SEQ ID NO: 81340
  chr11:1056098-1056137
  hypo

SEQ ID NO: 167450 - DNA, 30 bp, Homo sapiens; identical to SEQ ID NO: 81341
  chr11:1056391-1056421
  hypo

SEQ ID NO: 167451 - DNA, 46 bp, Homo sapiens
  chr11:1060629-1060675
  hypo
ctggggaccccaggccgctgacatggggacgcgctagagctttcga

SEQ ID NO: 167452 - DNA, 81 bp, Homo sapiens; identical to SEQ ID NO: 81342
  chr11:1061400-1061481
  hypo

SEQ ID NO: 167453 - DNA, 172 bp, Homo sapiens
  chr11:1075761-1075933
  hypo
tcgcctccgactgccgaggctcctacaaggaatttgctgtgcacctgaagcggggtccgggccaggctgaggcccccgccggggtggagtccatcctgctgaccatcaaggatgacaccatctacctcacccgccacctggctgtgcttaacggggccgtgtgagtgtggtc

SEQ ID NO: 167454 - DNA, 30 bp, Homo sapiens; identical to SEQ ID NO: 24890
  chr11:1077628-1077658
  hypo

SEQ ID NO: 167455 - DNA, 358 bp, Homo sapiens; identical to SEQ ID NO: 81344
  chr11:1082516-1082874
  hypo

SEQ ID NO: 167456 - DNA, 503 bp, Homo sapiens
  chr11:1088801-1089304
  hypo
acccacctggagcatcggttcccaccgaggagacctgcaagtcctggtacctaagcccacgtggcagggggcctgggggagctgcacatatgggcacatgagtacacacacacgtgtgagcacacagtgtacacagtacacagacacacaaccgttccacatgggtgcacatgcacacaaacgcacacagcataccacgtgcacacacacggtcacatgcatgcatggtgcacacatgcacacatgaatggatgccaacatgcaggcacacacagtcacacatgcacacagcgcacacatggacacatgcctagacgcagatacccaggcatacactcacggttacacactcacgcacatatgcatggatgcagacacgcaggcacacacggtcatatagtcatacaccacatgcacacatgcacagacagacacccaggcacacacagttacacagtcacacatgcacacatgcatggatgcagacacgcaggcgcacacac

SEQ ID NO: 167457 - DNA, 30 bp, Homo sapiens
  chr11:1092185-1092215
  hypo
catcgagtgcaggtcggtcaaggatcccca

SEQ ID NO: 167458 - DNA, 30 bp, Homo sapiens
  chr11:1094674-1094704
  hypo
tcgcggtaccacgaccgggtcatcttcagc

SEQ ID NO: 167459 - DNA, 227 bp, Homo sapiens
  chr11:1094961-1095188
  hypo
tcaggaggcagcagccgtcgagggtggctgtgtccagggcacggcttcccttgggtggcctctgtggggacctccgctgtggggacctccacggggtccagcggctagccctgcctccggatagccctgcctctggacggtgtgatcgtgggtctgtctcccttcgcaggtgaggaggtgtacaacggcacatacggagacacctgttatttcgtcaactgctcact

SEQ ID NO: 167460 - DNA, 232 bp, Homo sapiens
  chr11:1095390-1095622
  hypo
tctgcgcagcatgtccgggcagctgaggccccaggcaccacttcctgctggtcgtctgagggccgaggcctccagcaacccttgggtgcagggtctgccgagccctccacattttcaccgtgccccgctgtgcctggcgaggtggctggctgcagtgaggtccgtggaagccacttcggcctccagcctcccggctcagcacccgcccctcctgagcgcagaccaccccatc

SEQ ID NO: 167461 - DNA, 380 bp, Homo sapiens; identical to SEQ ID NO: 24891
  chr11:1096251-1096631
  hypo

SEQ ID NO: 167462 - DNA, 268 bp, Homo sapiens
  chr11:1098558-1098826
  hypo
cagtccgggcagagacgctggggtagagagcaggggagaggcaggtgccacctgagtgtgacctgtgcctctccctgcacagcctgtttgcccagtgccacgcactggtgcccccgcagcactactacgatgcctgcgtgttcgacagctgcttcatgccgggctcgagcctggagtgcgccagtctgcaggcctacgcagccctctgtgcccagcagaacatctgcctcgactggcggaaccacacgcatggggcctgctgtaagtg

SEQ ID NO: 167463 - DNA, 1078 bp, Homo sapiens
  chr11:1103461-1104539
  hypo
tgcagcagctacccccgcccacggcatcgtgggaaggtgctctcatccccaggaatgtccgggggtcccgggctcattctcctttccctctagggctccatcacattcatgcccaatggatgctgcaagacctgtgagtacagggcacagcctggggggtaggcagggtgggggcacaagggctggtgccctcagccccgcctggggtggctggaggctggacaacggcctctgggtgggcagtgagggctgggggctgaggccgagcctggggaggggacgcagcgagggagagcctcctcgaagatgtggaggccctgccctaagccgctgcccgctctccccaggcacccctcgcaatgagaccagggtgccctgctccaccgtccccgtcaccacggaggtttcgtacgccggctgcaccaagaccgtcctcatgaatcattgctccgggtcctgcgggacatttgtcatgtgagtcccaggctgggagtgtgcctggagggggtggtggagaccccagggaggcgagaggccagcgctggccccggaaggtcacccctcactccgccctccccccaggtactcggccaaggcccaggccctggaccacagctgctcctgctgcaaagaggagaaaaccagccagcgtgaggtggtcctgagctgccccaatggcggctcgctgacacacacctacacccacatcgagagctgccagtgccaggacaccgtctgcgggctccccaccggcacctcccgccgggcccggcgctcccctaggcatctggggagcgggtgagcggggtgggcacagcccccttcactgccctcgacagctttacctcccccggaccctctgagcctcctaagctcggcttcctctcttcagatatttattgtctgagtctttgttcagtccttgctttccaataataaactcagggggacatgctgtactgtgtggtttaggttggtgctgcaggggtgcggcttggccactgtgcatggcggaggccaccaggctctgcgtgcaggacacgggggcaccacacacacgccacgcggttggcaaatc

SEQ ID NO: 167464 - DNA, 346 bp, Homo sapiens; identical to SEQ ID NO: 24894
  chr11:1105011-1105357
  hypo

SEQ ID NO: 167465 - DNA, 31 bp, Homo sapiens; identical to SEQ ID NO: 48038
  chr11:1139541-1139572
  hypo

SEQ ID NO: 167466 - DNA, 30 bp, Homo sapiens; identical to SEQ ID NO: 24895
  chr11:1140343-1140373
  hypo

SEQ ID NO: 167467 - DNA, 30 bp, Homo sapiens
  chr11:1148243-1148273
  hypo
gatctggtcccaccgcggggcccattgtcc

SEQ ID NO: 167468 - DNA, 252 bp, Homo sapiens
  chr11:1155527-1155779
  hypo
caacccggcgcacaacgggcgggtgtgcagcacctggggcagcttccactacaagaccttcgacggcgacgtcttccgcttccccggcctctgcaactacgtgttctccgagcactgcggtgccgcctacgaggattttaacatccagctacgccgcagccaggagtcagcggcccccacgctgagcagggtcctcatgaaggtggatggcgtggtcatccagctgaccaagggctccgtcctggtcaacgg

SEQ ID NO: 167469 - DNA, 30 bp, Homo sapiens
  chr11:1157443-1157473
  hypo
tgggctgacgggtaccgggacctgcaggca

SEQ ID NO: 167470 - DNA, 30 bp, Homo sapiens
  chr11:1158088-1158118
  hypo
aaccaggagcactcccgggcctgtgaggac

SEQ ID NO: 167471 - DNA, 31 bp, Homo sapiens; identical to SEQ ID NO: 81352
  chr11:1158948-1158979
  hypo

SEQ ID NO: 167472 - DNA, 285 bp, Homo sapiens
  chr11:1161251-1161536
  hypo
gcaggtgcgggctgacggacagcgagacctgcctgaagagcgtgacactgagcctggatggggtgcagacggtgagtggagcctggcagggcaaaccccgggaagagggaaggggcctgtctcttctgcaagtcacctctgcccaagcccttcatccctggcatgaacagcgagaggcggggaccctctggcaacactggctgtgtccattacttatgggtccacgtgactgtccctaaagggagaagctcagggccgggcctcccgggccgccatacctgaccc

SEQ ID NO: 167473 - DNA, 44 bp, Homo sapiens
  chr11:1161744-1161788
  hypo
atttcacagcctccgcggggctgaggtgccgcaagcctgccccg

SEQ ID NO: 167474 - DNA, 261 bp, Homo sapiens
  chr11:1162083-1162344
  hypo
ctggcgcccaagctccgtgggcagacctgcggtaagagggctgccttctgggcttggagcccacccactctggccagggcgcatggtcctcaacctgcctaacccgcccccaggtctctgtgggaacttcaacagcatccaggccgatgacttccggaccctcagtggggtggtggaggccaccgctgcggccttcttcaacaccttcaagacccaggccgcctgccccaacatcaggaacagcttcgaggacccctgctc

SEQ ID NO: 167475 - DNA, 252 bp, Homo sapiens
  chr11:1213295-1213547
  hypo
atcccctggaccccacggcggggacaaggaaacctacaacaacatcatcaggagtggggaaaaaatctgccgccgacctgaggagatcaccaggctccagtgccgagccgagagccacccggaggtgaacattgaacacctgggtcaggtggtgcagtgcagccgtgaagagggcctggtgtgccggaaccaggaccagcagggacccttcaagatgtgcctcaactacgaggtgcgcgtgctctgctgcga

SEQ ID NO: 167476 - DNA, 1285 bp, Homo sapiens
  chr11:1214721-1216006
  hypo
ctgggccacacccaactgctccgaggccacctgtgagggcaacaacgtcatctccctgcgcccgcgcacgtgcccgagggtggagaagcccacttgtgccaacggctacccggctgtgaaggtggctgaccaagatggctgctgccatcactaccagtgccagtgtgagtggagcgccgagcgggacccagggcagccggggcagccactccccacccaggtggaaatgggcggggcagaggagggggcttggctgaagcagaaaagaattgggtgggacagcaggaaggacttcccagcatcaaggcggggccgcatggggccgagcctccccgcttaggggtgctgagtgaatccctgtgagcctcggagcagcctggctggagaaggtggaggagtctgtccctgcctcgctccagccttgtcaagcgcccgctggatggagctctgtgcggacgctggccacgtgtgttctgatgacgtgagggtcttgtgcgccctgtgagatgagacggtggggggtcagggacagatgtgacctgttgggaggaaagccccagggccatggtgccaccacccgagccacccgtaaggctgcccctggggcctggcaggtgtgtgcagcggctggggtgacccccactacatcaccttcgacggcacctactacaccttcctggacaactgcacgtacgtgctggtgcagcagattgtgcccgtgtatggccacttccgcgtgctcgtcgacaactacttctgcggtgcggaggacgggctctcctgcccgaggtccatcatcctggagtaccaccaggaccgcgtggtgctgacccgcaagccagtccacggggtgatgacaaacgaggtgggggcgcgcccggtgtgccgcggagggggtgggggacgcggctttcccggcaagagcctgagcagcggctgaccgcccgcccgcctgccttctgacttcccgtcgaccacgccctgcgtccagatcatcttcaacaacaaggtggtcagccccggcttccggaaaaacggcatcgtggtctcgcgcatcggcgtcaagatgtacgcgaccatcccggagctgggagtccaggtcatgttctccggcctcatcttctccgtggaggtgcccttcagcaagtttgccaacaacaccgagggccagtgcggtgaggccacagggctcccgggcatcgtctggcattcgcgggggcgggggtgccgggcaggggcgaggccaccacgtgccgcgtgtgccggtgtctctgctttctggctg

SEQ ID NO: 167477 - DNA, 30 bp, Homo sapiens; identical to SEQ ID NO: 81355
  chr11:1216290-1216320
  hypo

SEQ ID NO: 167478 - DNA, 30 bp, Homo sapiens; identical to SEQ ID NO: 81356
  chr11:1217151-1217181
  hypo

SEQ ID NO: 167479 - DNA, 326 bp, Homo sapiens
  chr11:1221487-1221813
  hypo
tggtgggactgttggcgcctggggaactggcaaaggagagctggttgtcagacactggcagcatgcctccaggagcagggaacacgatgaggccgcccagagcttggcacggcgccggcttacggcaggaggctggggtggcgcagcagctggtgctgagcagcccctgcccacaggtactcgctcgagggcaacacggtggagcacaggtgccagtgctgccaggagctgcggacctcgctgaggaatgtgaccctgcactgcaccgacggctccagccgggccttcagctacaccgaggtggaagagtgcggctgcatgggccg

SEQ ID NO: 167480 - DNA, 30 bp, Homo sapiens
  chr11:1225251-1225281
  hypo
ggagcagccgcctcccggccgcccacctgg

SEQ ID NO: 167481 - DNA, 239 bp, Homo sapiens
  chr11:1228794-1229033
  hypo
agctcaggaagccaccggtagctccactgagaccagcctcctctcccggggcgtctcagctgtccccggggccacgtccccccctcacttgggtctccacagcagcgccggccgagctggtttgcagactctgcctctggagaatcgtgggcggtggctcctgtttgcctacgtgtgtgctgcatggacagagctgcaaggccccgggcgaacatgcaggcagacggacgtggatacac

SEQ ID NO: 167482 - DNA, 30 bp, Homo sapiens
  chr11:1229669-1229699
  hypo
gtgtcccgtgagggtcgggccctgcaagtg

SEQ ID NO: 167483 - DNA, 30 bp, Homo sapiens
  chr11:1230027-1230057
  hypo
cagggaactggacaacgtgcgccccactcc

SEQ ID NO: 167484 - DNA, 30 bp, Homo sapiens
  chr11:1247442-1247472
  hypo
acgtcctcgcccacccggcgcgtgagcttt

SEQ ID NO: 167485 - DNA, 30 bp, Homo sapiens
  chr11:1247815-1247845
  hypo
ggatgggcctcatcccgcgctccccacagc

SEQ ID NO: 167486 - DNA, 356 bp, Homo sapiens
  chr11:1250877-1251233
  hypo
ccccgtgcatgggccggccctgcctcacgccgcgccccacaggcacggtgctggatgacatcacgcactctggctgcctgcccctcgggcagtgcccctgcacccacggcggccgcacctacagcccgggcacctccttcaacaccacctgcagctcctggtacttatgagcccaccagcctccgcctggggtggggtgtggagctcctggtatttatgaacccgccagcctctgcctggggtgggggtgtggagctcctggtgtgcacccaccagcctccgcctgcggtgggggtgtggagggtggggcccacctcctcccgacatgccggttctgctcacggcctccctcccca

SEQ ID NO: 167487 - DNA, 30 bp, Homo sapiens; identical to SEQ ID NO: 81360
  chr11:1251751-1251781
  hypo

SEQ ID NO: 167488 - DNA, 30 bp, Homo sapiens
  chr11:1253996-1254026
  hypo
tgcagtgagtgcccacgctgggggtgggat

SEQ ID NO: 167489 - DNA, 236 bp, Homo sapiens
  chr11:1254259-1254495
  hypo
tgccccaagtcccagcgctacgcctacgtggtggatgcctgccagcccacttgccgcggcctgagtgaggccgacgtcacctgcagcgtttccttcgtgcctgtggacggctgcacctgccccgcgggcaccttcctcaatgacgcgggcgcctgtgtgcccgcccaggagtgcccctgctacgctcacggcaccgtgctggctcctggagaggtggtgcacgacgagggcgccgt

SEQ ID NO: 167490 - DNA, 100 bp, Homo sapiens; identical to SEQ ID NO: 81361
  chr11:1255096-1255196
  hypo

SEQ ID NO: 167491 - DNA, 225 bp, Homo sapiens
  chr11:1256363-1256588
  hypo
acctgcgtggcctacggggatggccacttcatcacctttgatggcgatcgctacagctttgaaggcagctgcgagtacatcttggcccaggtacgccgccccctcgcccactcctgcaggccgggcacactccagcccgcggccagcagcttgtctctttctggcccaggactactgtggggacaacaccacccacgggaccttccgcatcgtcaccgagaacat

SEQ ID NO: 167492 - DNA, 30 bp, Homo sapiens; identical to SEQ ID NO: 24899
  chr11:1257644-1257674
  hypo

SEQ ID NO: 167493 - DNA, 30 bp, Homo sapiens
  chr11:1258169-1258199
  hypo
ctgtgcgggaacttcgacgacaatgccatc

SEQ ID NO: 167494 - DNA, 30 bp, Homo sapiens
  chr11:1261119-1261149
  hypo
aaactactatgacgtcggtgcaagggtccc

SEQ ID NO: 167495 - DNA, 359 bp, Homo sapiens
  chr11:1261377-1261736
  hypo
cctgggtgactctgccggctccatccccagcctgcacctgcacctatgaggacaggacctacagctaccaggacgtcatctacaacaccaccgatgggcttggcgcctgcttgatcgccatctgcggaagcaacggcaccatcatcaggaaggctgtggcatgtcctggaactccagccacaacgccattcaccttcaccaccgcctgggtcccccactccacgacaagtaagccctgcctggctctcctgaggcccagtaccgtctgggtgacaaggaggaccccctgggctcttagtgcaggtgccctgtatggtagcgacagtcccaatccactgaccttccgggctctgtctagg

SEQ ID NO: 167496 - DNA, 1815 bp, Homo sapiens
  chr11:1262077-1263892
  hypo
caggcccggccctcccggtctccaccgtgtgtgtccgcgaggtctgccgctggtccagctggtacaatgggcaccgcccagagcccggcctgggaggcggagactttgagacgtttgaaaacctgaggcagagagggtaccaggtatgccctgtgctggctgacatcgagtgccgggcggcgcagcttcccgacatgccgctggaggagctgggccagcaggtggactgtgaccgcatgcgggggctgatgtgcgccaacagccaacagagtcccccgctctgtcacgactacgagctgcgggttctctgctgcgaatacgtgccctgtggcccctccccggccccaggcaccagccctcagccctccctcagtgccagcacggagcctgctgtgcctaccccaacccagaccacagcaaccgaaaagaccaccctatgggtgaccccgagcatccggtcgacggcggccctcacctcgcagactgggtccagctcaggccccgtgacggtcaccccctcggccccaggtaccaccacctgccagccccggtgtcagtggacagagtggtttgatgaggactaccccaagtctgaacaacttggaggggacgttgagtcctacgataagatcagggccgctggagggcacttatgccagcagcctaaggacatagagtgccaggccgagagcttccccaactggaccctggcacaggtggggcagaaggtgcactgtgacgtccacttcggcctggtgtgcaggaactgggagcaggagggcgtcttcaagatgtgctacaactacaggatccgggtcctctgctgcagtgacgaccactgcaggggacgtgccacaaccccgccaccgaccacagagctggagacggccaccaccaccaccacccaggccctgttctcaacgccgcagcctacgagtagcccggggctgaccagggctcccccggccagcaccacagcagtccccaccctctcagaaggactgacatcccccagatacacaagcacccttggtacagccaccacgggaggccccacgacgcctgcaggctccacagaacccactgtcccaggggtggccacatccacccttccaacacgctcagcccttccagggacgacggggagcttgggcacatggcgcccctcacagccacccacgctggccccaacaacaatggcaacctccagagctcgcccgacaggcacagccagcaccgcttccaaagagccgctgaccacgagcctggcgccaacactcacgagcgagctgtccacctctcaggccgagaccagcacgcccaggacagagacgacaatgagccccttgactaacaccaccaccagccagggcacgacccgctgtcaaccgaagtgtgagtggacagagtggtttgacgtggacttcccaacctcaggggttgcaggcggggacatggaaacttttgaaaacatcagggctgctgggggcaagatgtgctgggcaccaaagagcatagagtgccgggcggagaactaccccgaggtaagcatcgaccaggtcgggcaggtgctgacctgcagcctggagacggggctgacctgcaagaacgaagaccagacaggcaggttcaacatgtgcttcaactacaacgtgcgtgtgctttgctgtgacgactacagccactgccccagtaccccagccaccagctccacggccacgccctcctcaactccggggacgacctggatcctcacaaagccgaccacaacagccactacgactgcgtccactggatccacggccaccccgacct

SEQ ID NO: 167497 - DNA, 30 bp, Homo sapiens; identical to SEQ ID NO: 81366
  chr11:1273773-1273803
  hypo

SEQ ID NO: 167498 - DNA, 100 bp, Homo sapiens; identical to SEQ ID NO: 81367
  chr11:1274055-1274155
  hypo

SEQ ID NO: 167499 - DNA, 30 bp, Homo sapiens
  chr11:1274690-1274720
  hypo
ccgtgcgggacccaccgctaagaggtcacg

SEQ ID NO: 167500 - DNA, 1543 bp, Homo sapiens
  chr11:1275271-1276814
  hypo
gcgagggcaccaccacggagcctgccagcccgtccatctctgtcccgcaggcatctgcagcatgtggggcggctcccactattccacctttgacggcacctcttacaccttccggggcaactgcacctatgtcctcatgagagagatccatgcacgctttgggaatctcagcctctacctggacaaccactactgcacggcctctgccactgccgctgccgcccgctgcccccgcgccctcagcatccactacaagtccatggatatcgtcctcactgtcaccatggtgcatgggaaggaggagggcctggtgagtccaggctgcgggtggcacagtgttggcccagtcccaaccgcacctgggcaggccgactgcaggccggggtgacccaggtgccgcagcgatggcccagtgcccaagacagctcccagggggcagggaaggcctgtggagccgcctaaggccgagcgcaccctgtggcctaaatgcagccagctggagactccaggcccccagggaagatctgggctttggggtgggggatacacaggggggtctctgcacatggaggcagagccccaaagagaagccctgctccccgagcccacctggcactgcctcccagctcagggttcccctggattcccccagatcctgtttgaccaaattccggtgagcagcggtttcagcaagaacggcgtgcttgtgtctgtgctggggaccaccaccatgcgtgtggacattcctgccctgggcgtgagcgtcaccttcaatggccaagtcttccaggcccggctgccctacagcctcttccacaacaacaccgagggccagtgcggtgagtgggcggcgggtcctgccccggccagggctgctgctgggcctgacaacccagtgagcataggggaagcctggggaggggaatgagtgggggaggggggtgggggctgtgaaaggctccccagattccagccccgcggtgacgcccccactcccaggcacctgcaccaacaaccagagggacgactgtctccagcgggacggaaccactgccgccagttgcaaggacatggccaagacgtggctggtccccgacagcagaaaggatggctgctgggccccgactggcacaccccccactgccagccccgcagccccggtgtctagcacacccacccccaccccatgcccaccacagccgctctgtgatctgatgctgagccagtgagtcctcccctcgggggttgcaggccctggggcgcccccgcccgcccgcatgcacgcacgcacgcagctccctggggctgggggccctccgtcctgatcgctttgccccacagggtctttgctgagtgccacaaccttgtgcccccgggcccattcttcaacgcctgcatcagcgaccactgcaggggccgccttgaggtgccctgccagagcctggaggcttacgcagagctctgccgcgcccggggagtgtgcagtgactggcgaggtgcaaccggtggcctgtgcggtgagtgggggcggccccgggccccc

SEQ ID NO: 167501 - DNA, 30 bp, Homo sapiens
  chr11:1277985-1278015
  hypo
tgcgtgcaggcctgccgtaagctccgccac

SEQ ID NO: 167502 - DNA, 32 bp, Homo sapiens
  chr11:1281708-1281740
  hypo
cagcagtgggatgcccgcgtccagactccacc

SEQ ID NO: 167503 - DNA, 30 bp, Homo sapiens; identical to SEQ ID NO: 24905
  chr11:1282940-1282970
  hypo

SEQ ID NO: 167504 - DNA, 30 bp, Homo sapiens; identical to SEQ ID NO: 81371
  chr11:1293751-1293781
  hypo

SEQ ID NO: 167505 - DNA, 234 bp, Homo sapiens
  chr11:1298241-1298475
  hypo
gggcaaaacggcatcgaggcagaggctctatggctcctcccccatctgcagcagggagttgatggcggcatccttgttccctcgctgggcttccagcacggagcggatcacctcctggtccatgttggggaacatgtcctggatggctttcaggtcctcctcgctacagcggggctgggcgttcacggcggccgggggcagggccacgggcaccatgccggggctacagacagc

SEQ ID NO: 167506 - DNA, 97 bp, Homo sapiens; identical to SEQ ID NO: 81373
  chr11:1301050-1301147
  hypo

SEQ ID NO: 167507 - DNA, 30 bp, Homo sapiens
  chr11:1301419-1301449
  hypo
gcaaactccctattcgctggaattccacgt

SEQ ID NO: 167508 - DNA, 30 bp, Homo sapiens
  chr11:1302613-1302643
  hypo
aagtggacggtcctcgtgagggctcagcca

SEQ ID NO: 167509 - DNA, 30 bp, Homo sapiens; identical to SEQ ID NO: 24907
  chr11:1302878-1302908
  hypo

SEQ ID NO: 167510 - DNA, 30 bp, Homo sapiens; identical to SEQ ID NO: 81375
  chr11:1304237-1304267
  hypo

SEQ ID NO: 167511 - DNA, 139 bp, Homo sapiens
  chr11:1306744-1306883
  hypo
cacacgacaacagacgcaacagcgcagtagagagcacgcatcacccaacaggagcgtgaggttcagacacaacggcgcagcgcagggcacgcgtcacccaatgggcgtgaggttcggacacgacggcacagtgcagagc

SEQ ID NO: 167512 - DNA, 140 bp, Homo sapiens; identical to SEQ ID NO: 81377
  chr11:1307127-1307267
  hypo

SEQ ID NO: 167513 - DNA, 30 bp, Homo sapiens; identical to SEQ ID NO: 81378
  chr11:1308413-1308443
  hypo

SEQ ID NO: 167514 - DNA, 30 bp, Homo sapiens
  chr11:1309877-1309907
  hypo
catgccctccttgtcgtccccctgcctccc

SEQ ID NO: 167515 - DNA, 30 bp, Homo sapiens; identical to SEQ ID NO: 81379
  chr11:1310343-1310373
  hypo

SEQ ID NO: 167516 - DNA, 110 bp, Homo sapiens; identical to SEQ ID NO: 81380
  chr11:1312470-1312580
  hypo

SEQ ID NO: 167517 - DNA, 56 bp, Homo sapiens
  chr11:1312882-1312938
  hypo
ggccgccccgtcctcgctgaccccccgctgagggcacggccgccccgtcctcgctg

SEQ ID NO: 167518 - DNA, 30 bp, Homo sapiens; identical to SEQ ID NO: 81381
  chr11:1315156-1315186
  hypo

SEQ ID NO: 167519 - DNA, 30 bp, Homo sapiens; identical to SEQ ID NO: 24910
  chr11:1359749-1359779
  hypo

SEQ ID NO: 167520 - DNA, 279 bp, Homo sapiens
  chr11:1360070-1360349
  hypo
ggggggcccgggccacggtggatggttctggagctgcccggcctccagcaggaaaccttcctcttctgcacttgagtgtctgcgggaactcccacgccacttcccgaaaggatgaaccttctcaatgtgctgcgcctgcacctggcgagcagctttggcatttctcaggcgctcatctgtcagggcatccactgggatccggcactgctccgggcgtgggggatgcaactgatgggatcatacgcgtgcatctgtgagtgtacacgtgcgtgtgtgagg

SEQ ID NO: 167521 - DNA, 30 bp, Homo sapiens
  chr11:1365491-1365521
  hypo
ctaggacagctgacacgggcacggttggca

SEQ ID NO: 167522 - DNA, 372 bp, Homo sapiens
  chr11:1374620-1374992
  hypo
gctctttccagcccacggagcagagtgccacctccctgcctacctcagccccagttccctcaaagggcaaacgttccacctgccgacccattttcctgctttgggccggccagggccaggcctggtcttcccagccctactgcggtgcccgacccacaggacagcctggggggcatcaagcccaatgcctctgagagcctgtgagtgagtggcctccatggtgctggggccgctccagccgccttgcttggcccccgggcctcccttcaggatctagatcacacccagacacccgtccctgcctctgccccagcacctccgcctggaatgtgaatccgcagctacctgtggagccggcgccttctctccgtc

SEQ ID NO: 167523 - DNA, 179 bp, Homo sapiens
  chr11:1375493-1375672
  hypo
cagcctgcacgtgcccggccctgctccacacgagcttccgggtgtgccggtgagccggatgcctgctgggttcccacagcagcctctctgttcttctccctgattgtagagacgtgacccttgcctgctggctccagctcagggaggtgtgctgtgtgtccttcgcgacgtgcgctagg

SEQ ID NO: 167524 - DNA, 31 bp, Homo sapiens; identical to SEQ ID NO: 24912
  chr11:1377226-1377257
  hypo

SEQ ID NO: 167525 - DNA, 59 bp, Homo sapiens; identical to SEQ ID NO: 81387
  chr11:1390810-1390869
  hypo

SEQ ID NO: 167526 - DNA, 30 bp, Homo sapiens; identical to SEQ ID NO: 81388
  chr11:1394100-1394130
  hypo

SEQ ID NO: 167527 - DNA, 30 bp, Homo sapiens; identical to SEQ ID NO: 81389
  chr11:1394614-1394644
  hypo

SEQ ID NO: 167528 - DNA, 30 bp, Homo sapiens; identical to SEQ ID NO: 81390
  chr11:1396899-1396929
  hypo

SEQ ID NO: 167529 - DNA, 151 bp, Homo sapiens
  chr11:1397881-1398032
  hypo
agcagtgaatgaaaacgtgcagggtaacaagcgtcagagctcggcccatgagggcacaccagggtggctggttcacatccacagttgatggaggaaggaacgggcgtgagcccatggccgtaaaatcagtgcaactcggcccggcgcggtg

SEQ ID NO: 167530 - DNA, 824 bp, Homo sapiens; identical to SEQ ID NO: 120152
  chr11:1410709-1411533
  hypo

SEQ ID NO: 167531 - DNA, 235 bp, Homo sapiens; identical to SEQ ID NO: 7859
  chr11:1411549-1411784
  hypo

SEQ ID NO: 167532 - DNA, 443 bp, Homo sapiens; identical to SEQ ID NO: 48044
  chr11:1411841-1412284
  hypo

SEQ ID NO: 167533 - DNA, 637 bp, Homo sapiens
  chr11:1417381-1418018
  hypo
gtgtgtggacccctgcgtcccccgctcctcgtctctcttcccttccacccacgtcccccactcctggtccctcttcccttccacccacgtcccccactcctggtccctcttcccttccacccacgtcccccactcctggtccctcttcccttacagccgcctcgaggactgcatggggccagcaaggcctgtaccccaggacaccagagttgctcggaccggctcccggacctgggcctaagcgagctctcctggttctcactcccgagtctgcggagtgaccccgggccctctcatcatggcctcaccctgctccggcgctctgggtgctttgaagcagacaggagaccccctccaggctggcccgagggcaggtcagaccccagtccctgggaacagcctgagtgggctgtgcctccccgtcggccactggcgctcaggaggagccgtcgggaaggcccctttgccatcacctggtggcgcttgcttgagggcttctgtgccttccagtcctcactgggcacagactagcttctttgggcacctggggagggtcaggctgtctctgaagtcagcagccctgctgggcagccggcaccaggagaggaggcgggctggtccccgtgactgccggccg

SEQ ID NO: 167534 - DNA, 30 bp, Homo sapiens
  chr11:1422469-1422499
  hypo
gcatcacacctcacccgtgagcaactgatg

SEQ ID NO: 167535 - DNA, 664 bp, Homo sapiens
  chr11:1430820-1431484
  hypo
ttgtagagaaggcgccgtccagagacagagccactgctgaggtgggtggggggtgtatgaagggcacaaggacgctttgggggtgtcaggtatgatggccctcaggtcatggtttcacacgcgtgtgctttaaatgcgtgctggctgtcacgtgtcagtcgtgcctccacagagcttcaggaaccaccgagatggggagcctgccggagacacaggttttctgagcgcaccagcggctccaaaagcagagggaagagccctgcgtgcaggtggggcgctcatggcgtcggcctcgcagagcggtgacggacacagagtccgtgtttgggggggtttgggacgtcggcctcgcagagcggtgacggtcgcagagtctgtgttttggggggtttgtgacgagtccgtgtttgggggggtttgtgacgtcggcctcgcagagcggtgacggtcgcagagtctgtgttttggggggtttgtgacgagtctgtgtttgggggggtttgtgacgtcggcctcgcagagcggtgacggtcgcagagtctgtgttttggggggtttgtgacgagttcgtgtttgggggggtttgtgacgtcggcctcgcagagtggtgacggacacagagtccgtgtttgggggggtttgtgacgtcggcctcgcagagcgg

SEQ ID NO: 167536 - DNA, 88 bp, Homo sapiens
  chr11:1433175-1433263
  hypo
cttaacagcagtcctgcggtgggtggagtctcagctgcgccgccccgtcctgcggtgggtggagtctcagctgcgccgccccgtcctg

SEQ ID NO: 167537 - DNA, 240 bp, Homo sapiens
  chr11:1433607-1433847
  hypo
gcgccgccccgtcctgcggtgggtggagtctgagctgcgctgccccgtcctgcggtgggtggagtctcagctgcgccgccccgtcctgtggtgggtggagtctcagctgtgctgccccgtcctgtgattggtgaactctgagctgtgctgctctgtcctctctggtctgtgaagtctgagctgtttggtaggcggggccgagggagcaggcgccctcagaaaatgcgagacagggtcggg

SEQ ID NO: 167538 - DNA, 191 bp, Homo sapiens
  chr11:1434051-1434242
  hypo
cacacagcaaccccgcgtcccaggcaaccctgcgtcccaggcccgtcgggtctctggcccagggcacagtagtggcagtcactcgcatgggacgggaccgcccatggcctcccaccgtgcacgccctttctgactgctgtaggcctgaggggtggatgggcggggctcactgcaggcgctgcccccggcac

SEQ ID NO: 167539 - DNA, 30 bp, Homo sapiens; identical to SEQ ID NO: 81398
  chr11:1435981-1436011
  hypo

SEQ ID NO: 167540 - DNA, 362 bp, Homo sapiens; identical to SEQ ID NO: 24917
  chr11:1446109-1446471
  hypo

SEQ ID NO: 167541 - DNA, 559 bp, Homo sapiens
  chr11:1446895-1447454
  hypo
ccccacacccccgctcgtctcccactctgtgtcctctccactggccttggggtagatgagctgcccccgtcctttctttgggaacccacccccttctgggcgagggtgggtagcaggcacccgacagggtccccaggtggcactccaggccgtggcactagatgtgcactgtggagatgggaagaggtgtggggcaggggagggcgtggggggaacgctgagtttcctgggtacacctgccccggggccagtgcctcaggcctctggagagcggatttgcggcctcatggctggggagggctgaggttctgctgtccggtgtggtgccacggtgagcacacctcacctgtccagccttccccctaaacccagtgctctggacggtgggctggcccctggctcctagcctgtgcgcgcccattcaggaaagcaaacaccagcacacaccggtccctgtggggccttgggtgctctgggcacccagctgcatgggacgggcagggccacgtggccatcagggcctggatgggggcctggcacacagcgggcactggggatg

SEQ ID NO: 167542 - DNA, 30 bp, Homo sapiens
  chr11:1450402-1450432
  hypo
tcctgggtgcatgcgcgtgtgcatgggtgt

SEQ ID NO: 167543 - DNA, 87 bp, Homo sapiens
  chr11:1450675-1450762
  hypo
acacaggtgcatgtctgtgtgcgtggccacacgtgctgtccctgcccagggccctgctgctctgtcgccagcatcctgctgtgccca

SEQ ID NO: 167544 - DNA, 30 bp, Homo sapiens
  chr11:1455225-1455255
  hypo
aataaagctaaaagccgatggggccggggg

SEQ ID NO: 167545 - DNA, 51 bp, Homo sapiens; identical to SEQ ID NO: 81400
  chr11:1455551-1455602
  hypo

SEQ ID NO: 167546 - DNA, 652 bp, Homo sapiens
  chr11:1464363-1465015
  hypo
atccgggtgagtcagcgccgccgcgtgcagctctgtggggcccagggtggcggggacctgaccctggtgggaccccagcctgccgcacccccaggtgctgctaggctgcctgtccccgggccgactccctctgagcccaggccctccaaggcccccgccctgccctgcgccccccaacagcccgggcactgctgtccacagggggagaagtatgacggccggaaggcggacgtgtggagctgcggcgtcatcctgttcgccttgctggtggtgagaccctggccccctcaaccctgccctggcctctccccaaacctgcccccccacgctgacccccacacccggccgcccgcagggggctctgcccttcgacgatgacaacttgcgacagctgctggagaaggtgaagcggggcgtgttccacatgccgcactttatcccgcccgactgccagagtctgctacggggcatgatcgaggtggacgccgcacgccgcctcacggtgcgtgccctcggagcggggcggccccagagcgtggcgggggggcgcgggggcgggcgtgtgcctgtgtgtgcacaggtgtgtgcccagacgtgtgggcacccaggtgtgtgggtcggtgcccaggtgtgtggacgtgtgcacaggtgt

SEQ ID NO: 167547 - DNA, 897 bp, Homo sapiens
  chr11:1466356-1467253
  hypo
ggcctgcgctgggtgcggggtgcgggcaggacgcaggaggcctccccgggctgggcacagggagagtggcaggatgaagggccccaggtgagggcgggcgtcccaccctcgcagccgcccaggcccggccggagctgatgagcgggtggcccgtcctgtgtccacagagggggcaagaatgagcccgaaccagagcagcccattcctcgcaaggtgcagatccgctcgctgcccagcctggaggacatcgaccccgacgtgctggacagcatgcactcactgggctgcttccgagaccgcaacaagctgctgcaggacctgctgtccgaggagtgcgtctggggctgctcccgggtggggcacggggcctgaggtgggagcgctgccccggaggagccggcggccccgtgtgccagcgcgtctcgcgcctctcgcccgctgtagggagaaccaggagaagatgatttacttcctcctcctggaccggaaagaaaggtacccgagccaggaggatgaggacctgcccccccggaacgagataggtatgggtccaggggtggcctccagcccggcctgcactgccccaccggggtccgggggctgtctggcctgaccttcgtctgtactcagaccctccccggaagcgtgtggactccccgatgctgaaccggcacggcaagcggcggccagaacgcaaatccatggaggtgctcagcgtgacggacggcggctccccggtgcctgcgcggcgggccattgagatggcccagcacggccagaggtgtgtgtgccccgaggctgctgggcctccctccctgggccctggctgcgcggcactgccgcctggctcatcgctacccattggcctggggtctcggctgaggccattgggtgggg

SEQ ID NO: 167548 - DNA, 638 bp, Homo sapiens
  chr11:1468914-1469552
  hypo
gcggcctcagagccacgtggagttcttacccggtgtggcccgggccctgggggccgacctgtgcccgcgtgtggccgtcagtaactgtgttttctcgctctgttctgctgtagtaaagcaatgttcagtaaaagcctggatatcgctgaggcccatccccaattcagcaaagaagacaggtatacaccccgaccacccgtccccgcacctcccagccccagacacgctgtcctgcctcaggccgggcaggcacatgggcgggtctggtggcgggctgggctgcagggctcctgctgcggtgaagccagccagcaagccaggcaagggcccgcgggccaggcagaggccgaggaggggtggggctgctgaggcgtggcccacgcctgcctgtgagggaccacgcaccatggcttacagggcctggggctagagcccggcgtggctgcaggccgagccgctcctcctgccagcccctgtgctgtgtccggtgggcctcggtggccctgctgcccctggggccggccagagttgaagccgagcagccgtcctgtgcccacctgcaggagctgaggagggcaggaggcgccgccgtcaagaggggcctctacctggggccagttttgcgagcctgggcgggt

SEQ ID NO: 167549 - DNA, 197 bp, Homo sapiens
  chr11:1471368-1471565
  hypo
tgtgccgtgtgcatgcgggggactggggtgcatgtgccgcgcggctgcccccaccccgctcgctccctgcgcctccccgtagcctattaggaagcttgtcctgcccccaccgccccccgagccgcccttcgtggcccgccccctggccacctccacggagcccgaagcttgtgggagcgcctcgaggcctggacacg

SEQ ID NO: 167550 - DNA, 228 bp, Homo sapiens
  chr11:1471901-1472129
  hypo
gcacgcccaaccccacgcccccgtccagccccagcgtcggaggggtgccctggagggcgcggctcaactccatcaagaacagctttctgggctcaccccgcttccaccgccggaaactgcaaggtgagtgtctgcccggaggcgccagagtggggctgggagagagcagaggctgccttggggagggccccgcccggcagtgccagaccagtccgaggggcctgtagc

SEQ ID NO: 167551 - DNA, 778 bp, Homo sapiens
  chr11:1477649-1478427
  hypo
gccgtgttccagaagccggtcaagttccaggttgatatcacctacacggagggtggggaggcgcagaaggagaacggcatctactccgtcaccttcaccctgctctcaggtgagctggcgcccccagggcggctccgggcccaggcccgtccagggcataaccccctgtctcccctaggccccagccgtcgcttcaagagggtggtggagaccatccaggcccagctgctgagcacacacgacccgcctgcggcccagcacttgtcaggtgaggcgggctcagctccggccaacctgcggcctgcgagtggggcgtggccagctggtgctgcgcggacgggaggcgtgaggacccgggcgcagcctcctggcccctcttgacggacgcccccacctccctgccccgagctgtggctgcacccctcagggagcagagcccctccctggcctggcgggaccacccgcctcgcctctgcacgccagggacatagggcgcagccgcaccacactgaaaggcgcctcttgtccaccgtagaaccccccccaccagcgccaggactaagctggggtgctgggcttaagggccagaaggtggccaccagctacgagagtagcctctgacgctggcaggtaaggcgcccggcctgtgctggggcggggaggggctgcgggcaggtcctcggcggagccaggctggccctgagcagggccctccatgcccacccacaggtctcggccctggacaggccaagcatgccccgggcggcccatctgctag

SEQ ID NO: 167552 - DNA, 60 bp, Homo sapiens; identical to SEQ ID NO: 81408
  chr11:1482006-1482066
  hypo

SEQ ID NO: 167553 - DNA, 858 bp, Homo sapiens
  chr11:1483176-1484034
  hypo
tgtagcgggcggcagcgccagcgcccctctgtcaggctggggcaatcttggttttgtgtccaaaggtgaaggggtaggaggagggccctcagctggccctccccacacacaggacggcaggggcactgtgaggcttttcttattaaaatgaaaaaattgaaaaaaaaggacaaagagtcggtggcgctcctctgcagggcgttctgtgcagagcgaggcccagggcgcagccctcagagggctgcaggcccaccctgcccagtgcccgccgccgtgcttcaccccagctccagcttctgtgttcccttccgcccatgtgcccagccctcccaggcgggcacagcccgggtgcggcggccgtgggggacggcgggtctgatgcatgcctctgccatggagtcgtctgtctgcttcggtgcctgcccctgcctcccacccacctcgtgtatagattttaacgcttctgttaacattagacctctgccacaggctgggatttctatacataagaacaaaagcaaacacctaggacagcaaacgccaggcggtacaggcgggaaggggctctccacggagatcgaggacacgaagcaaactgcctcttgcttgccttccccttttgtgcttcggacacacgcggactccagcaggcgccacggaaatgggcaagcccctgcagtgtacccctgtcataactgtgagcagctgcagctccggaacaataaatcccttccgcaaagacagcgacgcaggtcttcatctgggcagggcgggcgcgcagggctctgtgacagcccgggacagcttcttgttccccacttgcagcccctgggctgcgccagtgtgaatgcagctacc

SEQ ID NO: 167554 - DNA, 30 bp, Homo sapiens; identical to SEQ ID NO: 24925
  chr11:1486326-1486356
  hypo

SEQ ID NO: 167555 - DNA, 30 bp, Homo sapiens
  chr11:1491417-1491447
  hypo
tggttctgtgctcccgggcccccgctgccg

SEQ ID NO: 167556 - DNA, 30 bp, Homo sapiens; identical to SEQ ID NO: 81411
  chr11:1492528-1492558
  hypo

SEQ ID NO: 167557 - DNA, 30 bp, Homo sapiens; identical to SEQ ID NO: 81412
  chr11:1492930-1492960
  hypo

SEQ ID NO: 167558 - DNA, 162 bp, Homo sapiens; identical to SEQ ID NO: 24926
  chr11:1494353-1494515
  hypo

SEQ ID NO: 167559 - DNA, 30 bp, Homo sapiens; identical to SEQ ID NO: 81414
  chr11:1495102-1495132
  hypo

SEQ ID NO: 167560 - DNA, 284 bp, Homo sapiens; identical to SEQ ID NO: 81415
  chr11:1497176-1497460
  hypo

SEQ ID NO: 167561 - DNA, 30 bp, Homo sapiens; identical to SEQ ID NO: 81416
  chr11:1501958-1501988
  hypo

SEQ ID NO: 167562 - DNA, 163 bp, Homo sapiens; identical to SEQ ID NO: 81417
  chr11:1508341-1508504
  hypo

SEQ ID NO: 167563 - DNA, 30 bp, Homo sapiens
  chr11:1509138-1509168
  hypo
aggatggccccaggccggcccccgcctccc

SEQ ID NO: 167564 - DNA, 483 bp, Homo sapiens
  chr11:1509373-1509856
  hypo
cgtgctcacggctgccggtctgccctcgggggctccaccaacagcagggacacaggtgctggcaggtcacccaagtggcaaagggagccacaggaagagcgggctccaggcctggggaggcccccgtgagtagcagggctgggaccaggaggtgcatgacgcagacctgcccactctcgggaggcatggcctggacagagaaggccgtgcagaggcccatgacagggagaatgagctgctgggggttggagggcagagcataaaggaagctggggatggtggaggcttcgggcacaagaagccaggcaaccaggcaaggcaatggtgagggtggcacgggggcgggggaacagtcaggacaaggtgccgggtagggtggggggagcacaccaagcgtgcctagtctggtccaggcaaggcagtggtgagggtggcacgggggcgggggaacagtcaagacaaggtgcccggtagggtggggga

SEQ ID NO: 167565 - DNA, 240 bp, Homo sapiens
  chr11:1521172-1521412
  hypo
gcacacgaatgttcacggcagctgcaagtgtgctggtcagaaaggagagaacctgcacacccaccatggggaggtgacacagtgcggcctcagcatccacggaccgcgcctcagccacagacaggagtggcctgggagacacgcggaacacggaagactcctacagcaagtgtgctgagtgacggaggccaggtgaacatcaggttcacactgtgattccgttcacgggaaattccagga

SEQ ID NO: 167566 - DNA, 30 bp, Homo sapiens; identical to SEQ ID NO: 81420
  chr11:1526016-1526046
  hypo

SEQ ID NO: 167567 - DNA, 30 bp, Homo sapiens
  chr11:1535418-1535448
  hypo
agtgctatgatcccacgtgctcggactaat

SEQ ID NO: 167568 - DNA, 871 bp, Homo sapiens
  chr11:1535821-1536692
  hypo
ctcttcagcatcctagtgggacgggagcacccagggaacacaagtgcaccatgacgcggagcccttcatcaccgcaggccacggcgcttgtccttcccagaggcccccaaccacagctgctgagcgacacccacaccgcttctctcttcacacagcggactgatgaggagtcccgccaagcaggagctctgagccacagcacagagtgtgctggcccaagtccacgcctgcatgcaagctcagccatgcgtctaatggcaataaccgtggaatgagctcgtgaggttcggagagtcccaccccgacggggagagccacagggagccccaatctcggcagtgaccggctccaggtccccacgtaccgtgagagtggggacagcggtggacagcagcccttgagcagggcacaaccttcagagagacctcgacaagtgaacacttaaaccaaggtcgaccctgggggaaacgcagacctcctcccagtgcccccttcagaaaaggtactcaaacactggctcccatcatgagctgggcacggaaccaggcatgggtactacctgcctccagggcttggagctcgggaggggaaccaatcccgggccctcgacctgggaggtgccagaaggccctcacacaagactccagcactagggtggggaggttaaagtaaacaggacagaggggttcaactaagacaatacctttgctcacggtcagaggcgaaggcactgatgccagccggcgccgactcaggtgagcacacaagctctcccgccgcggctgcaccacatgcctgataaagggacagccctggatgtctagttcctcaggcacgtgtgcacacatgtgtgctgcgtagcactggcacc

SEQ ID NO: 167569 - DNA, 30 bp, Homo sapiens; identical to SEQ ID NO: 81422
  chr11:1539696-1539726
  hypo

SEQ ID NO: 167570 - DNA, 209 bp, Homo sapiens; identical to SEQ ID NO: 24929
  chr11:1552161-1552370
  hypo

SEQ ID NO: 167571 - DNA, 198 bp, Homo sapiens
  chr11:1553265-1553463
  hypo
actcagagcaggctgcgcgcatgcaggcctccaacaggaacctgactcaacccagattctcaggcccacactcttgtatttcatgacaccactgctatgacaaatggtcctgtcacatgtggcacaaagaacagggcacgcagcagaagggcagatgtgccgggaggaggaacccagagcggccgcccatgtagaggg

SEQ ID NO: 167572 - DNA, 30 bp, Homo sapiens
  chr11:1553971-1554001
  hypo
ccccgcccaccacagcgaaatgctcgatga

SEQ ID NO: 167573 - DNA, 191 bp, Homo sapiens
  chr11:1555915-1556106
  hypo
ctaaaagtcacagtcacaaaccgcggatcagtggtggaaggagagtggcagatgcacatctccccaggacggaattgcacttggtgatgaagaggacggagctgcagacacacgcaacgccatggatggacgttcgcaacactgcgccgcataggacaggcacacagcccgtgtactgggattccatttgc

SEQ ID NO: 167574 - DNA, 121 bp, Homo sapiens
  chr11:1560262-1560383
  hypo
ccacacgtgtattatttagcctctagagtatctaggtcctcggctccggggcctgtgaacgtggcatcattcatacgatgtgatatcctaagagacaatcaaaatctgtgtggacgaggcc

SEQ ID NO: 167575 - DNA, 31 bp, Homo sapiens; identical to SEQ ID NO: 81426
  chr11:1579098-1579129
  hypo

SEQ ID NO: 167576 - DNA, 40 bp, Homo sapiens; identical to SEQ ID NO: 24930
  chr11:1584968-1585008
  hypo

SEQ ID NO: 167577 - DNA, 39 bp, Homo sapiens; identical to SEQ ID NO: 24931
  chr11:1586816-1586855
  hypo

SEQ ID NO: 167578 - DNA, 499 bp, Homo sapiens; identical to SEQ ID NO: 48045
  chr11:1592746-1593245
  hypo

SEQ ID NO: 167579 - DNA, 118 bp, Homo sapiens; identical to SEQ ID NO: 7863
  chr11:1594038-1594156
  hypo

SEQ ID NO: 167580 - DNA, 643 bp, Homo sapiens; identical to SEQ ID NO: 81431
  chr11:1602551-1603194
  hypo

SEQ ID NO: 167581 - DNA, 31 bp, Homo sapiens; identical to SEQ ID NO: 81432
  chr11:1634888-1634919
  hypo

SEQ ID NO: 167582 - DNA, 30 bp, Homo sapiens
  chr11:1669678-1669708
  hypo
atgagaagctgagcgcggtcagatggcccg

SEQ ID NO: 167583 - DNA, 30 bp, Homo sapiens; identical to SEQ ID NO: 24934
  chr11:1670294-1670324
  hypo

SEQ ID NO: 167584 - DNA, 28 bp, Homo sapiens
  chr11:1679771-1679799
  hypo
ccatgttaggctgggcgcggtggctcaa

SEQ ID NO: 167585 - DNA, 38 bp, Homo sapiens; identical to SEQ ID NO: 24935
  chr11:1715582-1715620
  hypo

SEQ ID NO: 167586 - DNA, 213 bp, Homo sapiens; identical to SEQ ID NO: 24936
  chr11:1749038-1749251
  hypo

SEQ ID NO: 167587 - DNA, 30 bp, Homo sapiens
  chr11:1756532-1756562
  hypo
gcaggaagatgaagacgaggatgatgcagg

SEQ ID NO: 167588 - DNA, 225 bp, Homo sapiens
  chr11:1759617-1759842
  hypo
agttgaaaaagcatacgtcgaaccgtcataagatggggaccgtctgtatatgctgggtggggtaacaggtgcatagacgaacatatgaatatatgtccaagtggacagatggatatgcaagtgtatgccacatgggtggggcatctgggtaagcgggtaagtgaacggctgctggatgggaggtgatgtgtggatatgtaagagcatgttcggtgggcaggacag

SEQ ID NO: 167589 - DNA, 31 bp, Homo sapiens; identical to SEQ ID NO: 81437
  chr11:1787100-1787131
  hypo

SEQ ID NO: 167590 - DNA, 30 bp, Homo sapiens; identical to SEQ ID NO: 24937
  chr11:1795195-1795225
  hypo

SEQ ID NO: 167591 - DNA, 224 bp, Homo sapiens; identical to SEQ ID NO: 24938
  chr11:1795686-1795910
  hypo

SEQ ID NO: 167592 - DNA, 30 bp, Homo sapiens
  chr11:1796442-1796472
  hypo
cgtggccaggggctccgggtcctctgggtt

SEQ ID NO: 167593 - DNA, 30 bp, Homo sapiens
  chr11:1797729-1797759
  hypo
agacaggttccagcgcgagtcccataggag

SEQ ID NO: 167594 - DNA, 192 bp, Homo sapiens; identical to SEQ ID NO: 24939
  chr11:1800815-1801007
  hypo

SEQ ID NO: 167595 - DNA, 95 bp, Homo sapiens
  chr11:1801338-1801433
  hypo
gtccgggtaaggatgcggaggcagggaggaagccagcctcctgcccggcgggcacaaatgccccaggccaggggtacaggcgggcaggtgccgga

SEQ ID NO: 167596 - DNA, 94 bp, Homo sapiens
  chr11:1805365-1805459
  hypo
tcctgccacctttgccgcatcaccatcggccgcccaggatcagcagggtcctcctggtccccagctccgatgggcccaccgcagagttatacat

SEQ ID NO: 167597 - DNA, 223 bp, Homo sapiens; identical to SEQ ID NO: 81442
  chr11:1806142-1806365
  hypo

SEQ ID NO: 167598 - DNA, 32 bp, Homo sapiens
  chr11:1811100-1811132
  hypo
gtgtgagccaccgcgcccggccctcgttgagt

SEQ ID NO: 167599 - DNA, 39 bp, Homo sapiens; identical to SEQ ID NO: 81443
  chr11:1819537-1819576
  hypo

SEQ ID NO: 167600 - DNA, 111 bp, Homo sapiens; identical to SEQ ID NO: 81444
  chr11:1824187-1824298
  hypo

SEQ ID NO: 167601 - DNA, 442 bp, Homo sapiens; identical to SEQ ID NO: 24941
  chr11:1824637-1825079
  hypo

SEQ ID NO: 167602 - DNA, 142 bp, Homo sapiens; identical to SEQ ID NO: 24942
  chr11:1825138-1825280
  hypo

SEQ ID NO: 167603 - DNA, 41 bp, Homo sapiens
  chr11:1825528-1825569
  hypo
ggcggcgggtgtggacgggcggcaggcgtggagggtggcgg

SEQ ID NO: 167604 - DNA, 287 bp, Homo sapiens
  chr11:1826891-1827178
  hypo
gcggagctcagcctccgagtcacaccagcgtagggaagcgtgatcaccaccttcatcaaggacacgcggagctcagcctccgagtcacaccagtgtagggaggcgtgataaccaccctcatcaaggacacgcggagctcagcctcgagtcacaccagtgtagggaagcgtgatagctgccttggacatctgtcaagaccccaagggtcattccttaggggcacagagtaagctccaagataggatgttcccccgagacacatctagatatcccgataactcttaaag

SEQ ID NO: 167605 - DNA, 31 bp, Homo sapiens; identical to SEQ ID NO: 24944
  chr11:1829205-1829236
  hypo

SEQ ID NO: 167606 - DNA, 30 bp, Homo sapiens
  chr11:1836041-1836071
  hypo
gcacccgacccccgacggcagcgccagtgt

SEQ ID NO: 167607 - DNA, 30 bp, Homo sapiens
  chr11:1836618-1836648
  hypo
gcgctctgggcatcacgtccagggccttcc

SEQ ID NO: 167608 - DNA, 66 bp, Homo sapiens
  chr11:1842376-1842442
  hypo
ggagcttgagaacaacggggccacacctacaatgcggcagcttacgaatcgcgccagacccagcaa

SEQ ID NO: 167609 - DNA, 164 bp, Homo sapiens
  chr11:1845538-1845702
  hypo
tcccagagtcacctgcggggctgacgtggagagagcgagtacgtgtgtgcgtgggtgagtgtgcacgtgcattgtgtgcacaggtgcgtagcagtgtgcccgtgcctggcgtgtgcgtgtgtgtgaggctgtgtgggtcaagcgcccacactcacaggtgaggg

SEQ ID NO: 167610 - DNA, 30 bp, Homo sapiens
  chr11:1846801-1846831
  hypo
tgcaccaagcctgctcgagggcagtgggag

SEQ ID NO: 167611 - DNA, 310 bp, Homo sapiens; identical to SEQ ID NO: 24945
  chr11:1847135-1847445
  hypo

SEQ ID NO: 167612 - DNA, 30 bp, Homo sapiens
  chr11:1847881-1847911
  hypo
gggtaggacccagctcgcactcacacaggg

SEQ ID NO: 167613 - DNA, 30 bp, Homo sapiens
  chr11:1856964-1856994
  hypo
acagagcgaagccgacgatttgtgcctgtt

SEQ ID NO: 167614 - DNA, 836 bp, Homo sapiens; identical to SEQ ID NO: 81452
  chr11:1857226-1858062
  hypo

SEQ ID NO: 167615 - DNA, 357 bp, Homo sapiens
  chr11:1858534-1858891
  hypo
agacatgctggcccacgcccggcggcccattgcccagcggcaccccctgcggccagccagggaggtggaccgcatgctggccctgcagccccgccttcgcctgcgcctgcccttgccccactcctgaatgcaccacatgcctctgtctccccgctgagcccaggcacttgcccaggccgccctgcaggaccactgcaataaacgccttctcctgccactgtgtgtccggctggagcctggaggggatgcagaaatagggcccgggcccgctcaccagggtcccctgacaaggacgggggaggggctcctctccagactcagccaggccctgaggcctctgaccggtccctgcttgac

SEQ ID NO: 167616 - DNA, 30 bp, Homo sapiens
  chr11:1861793-1861823
  hypo
aaggaggagagccgccgtgaggcagagaag

SEQ ID NO: 167617 - DNA, 30 bp, Homo sapiens
  chr11:1862142-1862172
  hypo
gtggtggcggcgggccggcggcaggcgggt

SEQ ID NO: 167618 - DNA, 30 bp, Homo sapiens
  chr11:1864500-1864530
  hypo
gcgagggacaggcggcggtggggcctggcc

SEQ ID NO: 167619 - DNA, 30 bp, Homo sapiens
  chr11:1864962-1864992
  hypo
caaatatcaaaccggcgcccctctgagccc

SEQ ID NO: 167620 - DNA, 110 bp, Homo sapiens
  chr11:1868081-1868191
  hypo
gggagggaaaatccacgaagtcagggacctggagttatttgcagctgtgtcagtgctgctggggcgaggcatacacctgtgacgggacctcaggacggggacacgggtct

SEQ ID NO: 167621 - DNA, 623 bp, Homo sapiens
  chr11:1869645-1870268
  hypo
tccctccgatccacccggccccctcgaagccttccctgcccctttcctgtctgtctctgtccccgttgagagcttctcttcctcactctcttcactcctgggccagattcccaagctcaccagtggccacggccagtggaaggaaaggggccgagtgaccccagctcgcgtgcagggagagggcacagcccccagctttgctccccacagcaaacccctccagcacctgcgtgtgcccacagagtgatttgccagggaggggcgctgcgggatggcctgtactgcgggacgtcctttccagcccatggtgccagcacacagcatctcctgcccaggcctctccctgctcggctgggacttctacacgcacctccagcctgctacacaggtcccaacccccggcttctcccctcaaatccaggtctgcacctctcagacatctgccttgtggcctctgcacctggagtgtccctgtgtcctgcccgcctggcacagagctcctcctggctcacccctcaaggcttccctgcttggctccatcccccggaatctgatgccctcagctggctccatcccagaatccaaactaactcatcacctgatgcagccgcttgctggtcccc

SEQ ID NO: 167622 - DNA, 30 bp, Homo sapiens; identical to SEQ ID NO: 48055
  chr11:1874056-1874086
  hypo

SEQ ID NO: 167623 - DNA, 30 bp, Homo sapiens; identical to SEQ ID NO: 48056
  chr11:1908990-1909020
  hypo

SEQ ID NO: 167624 - DNA, 86 bp, Homo sapiens
  chr11:1919471-1919557
  hypo
tttttttttttgagaccgagtctcgctccgtcggctggagtgcagcggcgccagccatgtctcggctcactgcaacctccacctcc

SEQ ID NO: 167625 - DNA, 32 bp, Homo sapiens
  chr11:1935032-1935064
  hypo
ctagacgcctcaccccgcgctctgcggtgagc

SEQ ID NO: 167626 - DNA, 30 bp, Homo sapiens
  chr11:1935327-1935357
  hypo
attacccaatgaacacgcctggttgggcgc

SEQ ID NO: 167627 - DNA, 30 bp, Homo sapiens
  chr11:1945862-1945892
  hypo
ggaagggtcttcgtgcgacatgtctctgaa

SEQ ID NO: 167628 - DNA, 30 bp, Homo sapiens
  chr11:1947586-1947616
  hypo
cccaccctcggcctcgagtggcgacgggct

SEQ ID NO: 167629 - DNA, 940 bp, Homo sapiens
  chr11:1950283-1951223
  hypo
ctgctcccccgcagccgcactggcttttctcttgcatgtgtgcttgtgccttttgccacctggaagacaccgcagaggaggacgcggaaggtaagggcccgtccctgccgccggaggtgcaggaccctggctctagccgacgcgagggaaagaggacaggctggggtctctcgctgccctgcctcctcctccctctgtcctctttctcttcccctggcacgggggcctcggagggccaggccttgctgctccgcacggtgccgctggggtcgagctgccagggcctcgcgggtgccaccgctccaagtttctgccacacagcggagggggagtaagcgggaccagccagcagtgccagagcccgggccgggcacgcccccctcccctttctcccaagcccctttcctcccaatcttcttcccgagcccctgtcctctttgctccgtctcctcccttcccagccttcaaggacgcggcctgtctcgctcctatttcttccctacctcttcctcacccttcctcctggccccaggccctgagctcttcccctccaaccctgccaggggcttttgcaggcctagagcagaaacaggaccctcttgtttctgggggttgggggtactcccagctgaaaaggacggtggccttcagtgaaggggaacccagggccgcaggccgcccagtctcacccaggctgtctctctccctctccccacgctggtgtccctctccctacgctggtgctgtgtggaccagaggagaaaccgagacccaagtgagtgtggggtcctggcaggcccgctgctgagtgtgttctggggtgggggtggtcaagtgagtgtggggtcctggcaggcccagtgccgagtgtgttctggggtggcggtggccaagtgagtgtggggtcctggcaggcccagcgcctcgtgtgttccgtggt

SEQ ID NO: 167630 - DNA, 30 bp, Homo sapiens
  chr11:1952240-1952270
  hypo
aaaaagatttaaagtcggccttgtttttca

SEQ ID NO: 167631 - DNA, 177 bp, Homo sapiens
  chr11:1955097-1955274
  hypo
gctggtggactccctcggaggagccggggacagggctgagcagacccccttctctggctgcaggagaagcgccgtgcagagagagcggagcagcagaggattcgtgcagagaaggagagggagcgccagaacagactggcggtgagggcaccatccgcactgctgcctcatcagaga

SEQ ID NO: 167632 - DNA, 87 bp, Homo sapiens
  chr11:1956447-1956534
  hypo
agtggactcagggttcattttcggaacccctttaagcttatagaaagtccccatcatcacccagctcggccccggggcaccgagtcc

SEQ ID NO: 167633 - DNA, 236 bp, Homo sapiens
  chr11:1956827-1957063
  hypo
accctcccaaacacccgtttgggctccaggggcgaggggtgaggggcgcagccatgggtgatccacgtgctcggggcaaatgcagacactccagcatcaccatcagggccacgatgtccaccctccagcaccgccagaggccccaggggagggcggctgtgcccacggggcttgtgctctacccaggtgcagcaggtgtggggcgaccagtccaagccagccgggcaaatccgagc

SEQ ID NO: 167634 - DNA, 1005 bp, Homo sapiens
  chr11:1957391-1958396
  hypo
cctcgatgccccagccgcccatccagccttgtaaccatcttggtctttctagatcatgaatgtccgggccagagtgcagatgctggccaagttgtaagtagccgggtccgccctgggccaggcccgtgggtgtgcgttgcacggtgaggtgaacctctcgcatggcaaaaacctggatcgctcaggatgctggcggcagggggcctggagccttcctcctgcccccgctctcccctcgtgcctgcagccgggggcttcccagtggccgctgccctgttggcaagcgaggaagggcccccaccttcccaggagctccgcctcaagccagcagcggccacagagtgcccctgggcacaggcacgagggcgggagcggctggcccaggagcagcagggccgttcggagctctgagctcagcggctgaagggagctggagctgagaaggaggggtccgcaggcctcacctgcaacccctccccagccccatccgtgctccgtaccccccgccccacatcctgccgcaggctgaaggtaagtggccagctacgggctgctgtgtgtggcagtccaggccagtacaggctggcgagagtaagtccaggcatgagcccaggggccacgggacggtgtccccctgcacaaggagccaggagacagtaagggagccgaggagccctcatgggggcccagcagccctgggtcgcgcagcccagcccaccctgcggtggagacaggccttcacccagtacacgcaggcctggccctcgggtcgtcgcagtgagtcactcatgttgttcacagatcaccacgctcaggagccgcattgaccaggcccagaagcagtgagtagccctgccgtcctcgctccgcactgggcacaggggcccttggggccagccgctgtagccagtccctaacaagggccggtggtggctggcctcggcagggcagtaacgagactaacccggccaggccacccaggccagcatgcgcaggcctgtggcc

SEQ ID NO: 167635 - DNA, 254 bp, Homo sapiens; identical to SEQ ID NO: 24948
  chr11:1958919-1959173
  hypo

SEQ ID NO: 167636 - DNA, 30 bp, Homo sapiens; identical to SEQ ID NO: 81461
  chr11:1959856-1959886
  hypo

SEQ ID NO: 167637 - DNA, 90 bp, Homo sapiens
  chr11:1962756-1962846
  hypo
tgcagaaaacatgagcgacagacagaagcagccaagccctggaatcagaaatatgagcaaccgatacacgcacgccgctacacctggctc

SEQ ID NO: 167638 - DNA, 30 bp, Homo sapiens
  chr11:1963056-1963086
  hypo
cgtgcccaggccctgcggcccgggaagccc

SEQ ID NO: 167639 - DNA, 30 bp, Homo sapiens; identical to SEQ ID NO: 24949
  chr11:1973530-1973560
  hypo

SEQ ID NO: 167640 - DNA, 166 bp, Homo sapiens; identical to SEQ ID NO: 81463
  chr11:1975867-1976033
  hypo

SEQ ID NO: 167641 - DNA, 30 bp, Homo sapiens; identical to SEQ ID NO: 24950
  chr11:1977366-1977396
  hypo

SEQ ID NO: 167642 - DNA, 30 bp, Homo sapiens; identical to SEQ ID NO: 24951
  chr11:1977654-1977684
  hypo

SEQ ID NO: 167643 - DNA, 30 bp, Homo sapiens; identical to SEQ ID NO: 81466
  chr11:1977936-1977966
  hypo

SEQ ID NO: 167644 - DNA, 30 bp, Homo sapiens
  chr11:1978378-1978408
  hypo
tggcggagaggtgccgtcgggcggagaggt

SEQ ID NO: 167645 - DNA, 30 bp, Homo sapiens
  chr11:1978846-1978876
  hypo
ctggacaggccagccggggcagcctccagg

SEQ ID NO: 167646 - DNA, 30 bp, Homo sapiens; identical to SEQ ID NO: 81467
  chr11:1979864-1979894
  hypo

SEQ ID NO: 167647 - DNA, 51 bp, Homo sapiens; identical to SEQ ID NO: 81468
  chr11:1980679-1980730
  hypo

SEQ ID NO: 167648 - DNA, 115 bp, Homo sapiens
  chr11:1982882-1982997
  hypo
gctccactgggtgaacggtccgcgtgttcatccgccgtccatcagtggacacgtggcggcttccgccttttggctctcgtgagcaaggttgtggtgcacacgtgtgtgcacattt

SEQ ID NO: 167649 - DNA, 30 bp, Homo sapiens; identical to SEQ ID NO: 81469
  chr11:1983225-1983255
  hypo

SEQ ID NO: 167650 - DNA, 30 bp, Homo sapiens
  chr11:1985430-1985460
  hypo
aggcgaggacaccgccgtgctcccggcgcg

SEQ ID NO: 167651 - DNA, 100 bp, Homo sapiens
  chr11:1985747-1985847
  hypo
cccggcagccctcgcgcggcccagggcaggggtgaagcagcctgttaaacagaacaaggtgctcgcggctcataccttagctttacgaagtgtttggaat

SEQ ID NO: 167652 - DNA, 30 bp, Homo sapiens
  chr11:1986176-1986206
  hypo
gtgggtccccccatcgccacattggagaca

SEQ ID NO: 167653 - DNA, 31 bp, Homo sapiens
  chr11:1987802-1987833
  hypo
tcgccctgagggtccccgcccccgataccca

SEQ ID NO: 167654 - DNA, 30 bp, Homo sapiens; identical to SEQ ID NO: 24953
  chr11:1988743-1988773
  hypo

SEQ ID NO: 167655 - DNA, 30 bp, Homo sapiens
  chr11:1991860-1991890
  hypo
agccgtgggatccccgggagaggccagcct

SEQ ID NO: 167656 - DNA, 30 bp, Homo sapiens; identical to SEQ ID NO: 81472
  chr11:1994102-1994132
  hypo

SEQ ID NO: 167657 - DNA, 30 bp, Homo sapiens
  chr11:2005175-2005205
  hypo
ggaccgccctcccgacgaagcttctttgcg

SEQ ID NO: 167658 - DNA, 334 bp, Homo sapiens
  chr11:2005409-2005743
  hypo
cggacacgggctttgcggcacaacctggtccttgttctctggctgggctagggtcacctggagctggtgcccgtgatatccgcctgacgcggaagtgggcaccgttttctggatgctcccttactttctcagcgctgtgtggagggggaatgccccgtgcttctcaccctgtcttcgcctgtccccaccccaagctccactgggcggggaggagaggggcacctccataggactcagctatccccccaactcccacaggaacctcaggcccagagtccccaggagggagcagccggcaacacggtttccgctgtggagacggggcgtcctggct

SEQ ID NO: 167659 - DNA, 30 bp, Homo sapiens
  chr11:2009164-2009194
  hypo
ttgtccatctcccccgtcgcccgccaccca

SEQ ID NO: 167660 - DNA, 261 bp, Homo sapiens
  chr11:2013348-2013609
  hypo
atcacacacacaccccgcggagcatctccgggccggacaggacccacgccctccacagcccggaaaggcgggttaactggtcagcatgcagagacccaccaagtggagaccccgctcccaggcacagacgcacagctgtggatgcacgtcctcggtgacaaggtagctgaggtcgcgtgccccgggtgtgtacggcccacagagccacaggggactcgccaggagatgcgtgcaccgagggtccagcgtggccacagcagc

SEQ ID NO: 167661 - DNA, 293 bp, Homo sapiens
  chr11:2026724-2027017
  hypo
ggtgggacacgggtacggcacgtcacctggatagggacacgggtacggcacgtcacccgggtgggacacgggtacggcacgtcacccgggtgggacacgggtacggcacgtcacccgggtgggacacgggtacggcacgtcacccgggtgggacacgggtacggcacgtcacccgggtgggacacgggtacggcacgtcacccgggtgggacacgggtacggcacgtcacccgggtgggacacgggtacggcacgtcacctggatagggacacgggtacggcacatcatgcgg

SEQ ID NO: 167662 - DNA, 147 bp, Homo sapiens
  chr11:2027240-2027387
  hypo
ggctggctccttcttcgagctctaagggaggctccagtgctggccgactttcccagtgttcccaggctcccagacctgtcaccccagccgtgcccatcttccaggatgctctcatcctgcgccttcacgcagcgttgctctctcgtg

SEQ ID NO: 167663 - DNA, 30 bp, Homo sapiens
  chr11:2029279-2029309
  hypo
gtgcactgacccagccgcagctgcctctgc

SEQ ID NO: 167664 - DNA, 221 bp, Homo sapiens
  chr11:2029641-2029862
  hypo
gctacttggaccgaccggctgagcccagcttctggtggatggcagccgcatggcggagcctggccggtcacccacgggcagaagatgtacccagctaagctctgccccgaatcctggcttgcagagctgtgagagctcacgtcacggctcttttaagtcactggcttgggagtagttgctcatccagcaaggactggtgagaagcccgagcccctccactt

SEQ ID NO: 167665 - DNA, 177 bp, Homo sapiens
  chr11:2037057-2037234
  hypo
acgatgcccgtgggccgccggctcccctccgtgctaatgccaccctccaaagccatggcttcctctcgagccttgggtgtccagcagcctgaccagacagaggcctcctcagccccgcaccgaaggaggatggaggggccgggccggctcctgtcggttgcccgtgctggccgaccc

SEQ ID NO: 167666 - DNA, 30 bp, Homo sapiens
  chr11:2040118-2040148
  hypo
atcgcgccaacctctcgcagctctccagcg

SEQ ID NO: 167667 - DNA, 30 bp, Homo sapiens; identical to SEQ ID NO: 48058
  chr11:2048642-2048672
  hypo

SEQ ID NO: 167668 - DNA, 192 bp, Homo sapiens; identical to SEQ ID NO: 81478
  chr11:2051190-2051382
  hypo

SEQ ID NO: 167669 - DNA, 55 bp, Homo sapiens
  chr11:2054680-2054735
  hypo
gaccagggtgggccacgcccgagttcagcggggggtgtcacgcatgtgaggccgg

SEQ ID NO: 167670 - DNA, 306 bp, Homo sapiens; identical to SEQ ID NO: 81480
  chr11:2055186-2055492
  hypo

SEQ ID NO: 167671 - DNA, 30 bp, Homo sapiens
  chr11:2092980-2093010
  hypo
tggctcgtctttctccgactccccaacctc

SEQ ID NO: 167672 - DNA, 30 bp, Homo sapiens
  chr11:2093632-2093662
  hypo
gatgagcacaaggtgcgctgggaggacacc

SEQ ID NO: 167673 - DNA, 160 bp, Homo sapiens
  chr11:2096089-2096249
  hypo
gcgggattgctgggtcgtatgggaattctatctttaatgttgtgaggagccaccatagtgttctccagcgcagctgcatcattctacactctcaccagcagtgcccgggggttccaacattgccacgtccttgccttattattttcggggtttcttagcg

SEQ ID NO: 167674 - DNA, 30 bp, Homo sapiens
  chr11:2096879-2096909
  hypo
gagacccgggagagccggtggagtaaatcg

SEQ ID NO: 167675 - DNA, 30 bp, Homo sapiens
  chr11:2106685-2106715
  hypo
agggcgtcagggtctcgaggacacagctga

SEQ ID NO: 167676 - DNA, 153 bp, Homo sapiens
  chr11:2107096-2107249
  hypo
ggtgacagaagggctcgaggctggtcgcctggagggcgttttgaagccagggtggacgctgatccatcctgagaccaggaatccagggcatgggagagacgacgcctgggtttggggcacctgaagggtaaccaaacacgtatcgtggccgag

SEQ ID NO: 167677 - DNA, 175 bp, Homo sapiens
  chr11:2108012-2108187
  hypo
ttaccgaggaatgcacgtcagaaccagtaggacagctgccatcccaaagccagaccacggcaagcgctgggcgtgggggagtcggagctgcctgtgctgctggggatgggccgtggtgccaacgctatggggccgtgggctcctcacacatgtaaacctacggttgccattccac

SEQ ID NO: 167678 - DNA, 147 bp, Homo sapiens
  chr11:2109249-2109396
  hypo
catagagacagaaagcgccaggggtaccaggggctaggggagggaatgcggagtcggtgttcgatgggggtgggggttcagtgtgggaaggtgagaaagttctggagatggatgccggtgacatctgcacgacgtcgtgaatgtaca

SEQ ID NO: 167679 - DNA, 30 bp, Homo sapiens
  chr11:2109648-2109678
  hypo
cgcccccctcccacacgcctccttcaggct

SEQ ID NO: 167680 - DNA, 189 bp, Homo sapiens
  chr11:2113262-2113451
  hypo
acggaggaggtagtgcggtgtgcgcctttggggccggtggctcgggaagggcaggcagagccctctacgggggactatgtcctttgtggatgggcagaacagtgcacagtgggagtgccttgcactaacagattggaaactgaggcacagaggggaaaagcgtccctggtcctccggcctggtggagca

SEQ ID NO: 167681 - DNA, 30 bp, Homo sapiens
  chr11:2115926-2115956
  hypo
agaggggtatgtgcacgccccagggcttgg

SEQ ID NO: 167682 - DNA, 30 bp, Homo sapiens
  chr11:2116463-2116493
  hypo
tgggggccaaagggccgcttggaccccact

SEQ ID NO: 167683 - DNA, 30 bp, Homo sapiens
  chr11:2116984-2117014
  hypo
cccctcttgtcccgacgggtctcagagtcc

SEQ ID NO: 167684 - DNA, 360 bp, Homo sapiens
  chr11:2117526-2117886
  hypo
atgcctgggctgcagcgtgcacacagggaccacgcacgtgcacccatgtacacacgcacctgcacacatgcacatacatgcttgcacatacgtacgcacgccagcatgcacatcacacacagggcctcagggtaaccttttccccagtcccggctgtgatattgcgaaaggagctcagggtggggggcgggctgctgggtccaggcccccaccgtcctgcctagcagtcatttggtttctctttgcctcagtttccctttctctgcccctcacacctcccaaagtcctttggagaatccgtgagatgggggggtgacaggccctgtatgtcagcacacacagccacgtgatgtgggaccc

SEQ ID NO: 167685 - DNA, 55 bp, Homo sapiens
  chr11:2119432-2119487
  hypo
agtcctgacacctgccgacctcacacatgggccctctgggcgcctgccctccccc

SEQ ID NO: 167686 - DNA, 37 bp, Homo sapiens
  chr11:2119757-2119794
  hypo
tgtgctgccggaagtcgcagagcgtccccccggctcc

SEQ ID NO: 167687 - DNA, 30 bp, Homo sapiens
  chr11:2120100-2120130
  hypo
caccaagctcaggagcgtcctgcccagtcc

SEQ ID NO: 167688 - DNA, 150 bp, Homo sapiens
  chr11:2122399-2122549
  hypo
caagggaggaagacccggggcctccagacacagtgtaccagaggagaacccttcccatccagcatggccaagcgggacccgtgtggcacttgaagctgggtccctggactcaccaccttccctcactggacccctcggcagccatgcagg

SEQ ID NO: 167689 - DNA, 479 bp, Homo sapiens
  chr11:2124956-2125435
  hypo
tggactcaaaatgaacgagggccgtcctgtgcgtgctccactccaaatcccatctgctcccacactgctggcccagggaaaatctgggtagtgacagtggccgtccctcacgccctccatggccaggtgccagtagcgtgttccacaagcatcaccttcgaaaccctgaaggagtcaggactgtcgctgttccagacaaggagactgaggatgagtctccattaagtggctttcccgcagacacacagtaagtggcacaagagtcaggagtttgagcccgggtcagcccagctccagccatggtcgcaggggctgcctgcaacccctgacgaggggcaccccggggaggcctggacccagcacctgcagcccaacctgggcagaggctgatccagcagctaggaagggcatgggtccaggagatggcagagcagggaacagagcgctgccgctcagggtactcccggggagctgtggtt

SEQ ID NO: 167690 - DNA, 43 bp, Homo sapiens
  chr11:2125675-2125718
  hypo
ggcacaaccccctcccgtgccggagtgcgcacacacacacaca

SEQ ID NO: 167691 - DNA, 283 bp, Homo sapiens
  chr11:2125777-2126060
  hypo
acacacattcatatacacacacgcccacacacacaaacacacattcatatacacacatgcccacacatgcaaacacacattcatatacacacgcacgcccacacatgcaaacacacattcatatacacacacgcgcagcaggcctccttggtcaaggcctccagagctttgtccttcctcacggttccagtggcccagaagactcaccatgttgccttgccccagcccagggccccaagtgagtgtatcaggatccctgagcccgccccgaaatccccaggtt

SEQ ID NO: 167692 - DNA, 30 bp, Homo sapiens
  chr11:2126621-2126651
  hypo
atcccggaatgaaaacggatgaccgatcat

SEQ ID NO: 167693 - DNA, 172 bp, Homo sapiens
  chr11:2136031-2136203
  hypo
ggagtttccggggagcgctgggtgagcgggaaagaccaggagtaaggagccgaccccctcaggcttcctctcccatgttttccacaagggagccccccaggcccagaggcgctcaggggaaggcctcgcccaagctgggcttgccgtctgccctgagcgcctggaagtgctc

SEQ ID NO: 167694 - DNA, 58 bp, Homo sapiens
  chr11:2136426-2136484
  hypo
acagaagcccttcctcgccactgcccagtggtgggttcagcggcggagactggcctgt

SEQ ID NO: 167695 - DNA, 30 bp, Homo sapiens
  chr11:2136722-2136752
  hypo
ctcactcgccggctgcggtctcagtcttct

SEQ ID NO: 167696 - DNA, 30 bp, Homo sapiens; identical to SEQ ID NO: 81483
  chr11:2142827-2142857
  hypo

SEQ ID NO: 167697 - DNA, 502 bp, Homo sapiens
  chr11:2152090-2152592
  hypo
ggggtccccaggagacgggcaaagatgatccctaggtgtgctccggtgggggggtccccaagatcttccttccaggagcacaccagggagtcaggctactcgtgggggcatgtctgctcagctaccgccatctccaatgtggccaaactccttcctcactctggctgggccaacacacagtaagtaaggtgtatcgggaatgggtggggtatggggagcatcgtggctcacgctgcgggggccgtggggacaggcgccaaggaggccagcctcacaagggcatctctgtcatggtggaaagatggaattaggcctgggacacaccccgcccaccctacgggtgtatcccaaatgccgccggccgcacactcaggccgcaccatctgagccccctcctctgagaggcagggcacagacagggccgaggggcagtggagatgggaacaggagcggggctcagaccatgaaaacattggagaatcttagcgggactttggcctga

SEQ ID NO: 167698 - DNA, 544 bp, Homo sapiens
  chr11:2175987-2176531
  hypo
gtcctcaccacccaccgagccacccatgtgtaacgggcccatgccaggaaccccgcgctctagagaggatcaggggatgcccaaggtccctccgaaactgggcagcagcgggcctggatgtgggcaggtggtggccctgtggaggccgggctggggtgggaccgagctttgaagtgaaggtggactttgaagacagaagggtgcgatttgagtcccagcgtgagcagccgcaagctggcagggccgcggggggctctggctctgttttccaaaaacacagatgggctgggaagggggtcagagagaggcctgggcggaatgtggggcccgcggcgcccccgaggttctgatgactcagcagcctgggccacacagggccacagggagcagagcctccccgaagcccacaggcctgtggacccccagggcttggcctcctcgaggccggtctccatccctggcaagggctgggctggctctgcctaggggtcacagccacccgggtttagacattctcagcccccctgggcgaggagagcctggc

SEQ ID NO: 167699 - DNA, 201 bp, Homo sapiens
  chr11:2183693-2183894
  hypo
gggggcatgggctccgagccctgctgcctgcagcccctacctgcctcttagcaccaggggcaggatcaggaggtcccagaagcaggaggatgagaccatgggggcaggcaggttggagtatcctgtgccccggcccctcgcatccctatgtcccaccctggcctcagcctcggaacctctcggggccgctctgcacacacc

SEQ ID NO: 167700 - DNA, 408 bp, Homo sapiens
  chr11:2209802-2210210
  hypo
gcatcagaggacatcatcaaccgtaaaaaggcaactcccagaacaggagaaaatgccgcaaatcacacacctgatcggggagtagtacccggaacccacagagaacccctaaaacacaaccgccaaacaccagattcaaaagtgggcgaaggacgtagacgggcgcctctccagggaaggtgtatccaggacagcagccgcagggaaaggtgctcaatgccacgaatcattagggcaatgccaatcaaaatcacggcgcgacaggattccacacccgttagggtggccaccgtcaacaaacccaaacaatgcagaacacaaaatagcaagtgctcacgagaatgtggagaaatcagagcccctgcggtgggtcgtgccgcagggcagccgctgcggacagcaccctgg

SEQ ID NO: 167701 - DNA, 205 bp, Homo sapiens
  chr11:2210732-2210937
  hypo
gagccacggcgcccggcccaggaaggacattcttacatccgctacaccgtggatgaacctcgagaaccttacaatcagggagaggagccagtcacaacaggacaaatgctgcccgagtccactcccacgtggtccctaaagacgtcaaatctgtcaggatggagaggagaatggggctgcggggggctggcggaggggatggggc

SEQ ID NO: 167702 - DNA, 31 bp, Homo sapiens; identical to SEQ ID NO: 81487
  chr11:2219692-2219723
  hypo

SEQ ID NO: 167703 - DNA, 30 bp, Homo sapiens
  chr11:2221003-2221033
  hypo
cagctcatggtgcagcgttcagcgcaggtg

SEQ ID NO: 167704 - DNA, 412 bp, Homo sapiens
  chr11:2221257-2221669
  hypo
accctggcacctacccgggcacaccggtgagcactggatggccgttccacctggagaaaatgtcccctgtgctgagcaggacagacagggtgtggaggtgagggcaagacagaggcaggggctggacagggagcgggcacagaacgaccagggctctggacaggccagggcagagaaagcagtggcctgcacaatcttgccctggtgggcggcctccgggactaaagacgctcgctatcctgagagctcagtcaactcaggcagccagaacaaagggccacagactgggggcttaaaccctacgcattcatttcccatagctctggggtctgggcggcccagatcaaggggccagcagatgcggttgctggtgagaacccgcttcttggctccccgtcggggcctccccagg

SEQ ID NO: 167705 - DNA, 30 bp, Homo sapiens
  chr11:2225303-2225333
  hypo
ggggcggctggcagtcggagcaagggtaga

SEQ ID NO: 167706 - DNA, 73 bp, Homo sapiens
  chr11:2225629-2225702
  hypo
gcgtccctagcctggcggcaggtgctctgggccctctccctgggactatctgcctggacggcattttctggcc

SEQ ID NO: 167707 - DNA, 126 bp, Homo sapiens; identical to SEQ ID NO: 81490
  chr11:2226009-2226135
  hypo

SEQ ID NO: 167708 - DNA, 342 bp, Homo sapiens
  chr11:2228965-2229307
  hypo
aatggggaaagggtacgcaccaccttctgagagagtcatctgccacggggtggcacaaggtcatggcatttcacatggttgtcacccaaagaaagccctcagccgtggagccttgccctctccagaagcgtcataggagatgccccgttacgtctgcagacaacccgtgtgggttcacagcctccatcagcaggtcagttgtttgttccctctgaggagcaggagcaggggcccaggcacgctcccagtgggcaccgaacacctgctgctgggtgcctgccccgcacgtaggagggacacagcggtgagcaggcgctggtcctcatgcggctgcctgctggt

SEQ ID NO: 167709 - DNA, 203 bp, Homo sapiens
  chr11:2235850-2236053
  hypo
tcctgccacagttgccggctacacgcaggccacagtccgtctcccgctaggccgcctccctctcccctgtgctccaacccagaagccagctgccctctgtcactctcagacgacagacggcagcacgggtccagctgccccaggcccgagccccggggctcctcaccgcctgggcctcctcgccaggccggaccttgatgctg

SEQ ID NO: 167710 - DNA, 14 bp, Homo sapiens
  chr11:2236826-2236840
  hypo
taggtgacggggga

SEQ ID NO: 167711 - DNA, 31 bp, Homo sapiens; identical to SEQ ID NO: 81492
  chr11:2237235-2237266
  hypo

SEQ ID NO: 167712 - DNA, 181 bp, Homo sapiens; identical to SEQ ID NO: 81493
  chr11:2237499-2237680
  hypo

SEQ ID NO: 167713 - DNA, 31 bp, Homo sapiens; identical to SEQ ID NO: 81494
  chr11:2257967-2257998
  hypo

SEQ ID NO: 167714 - DNA, 47 bp, Homo sapiens; identical to SEQ ID NO: 81495
  chr11:2269905-2269952
  hypo

SEQ ID NO: 167715 - DNA, 93 bp, Homo sapiens
  chr11:2277664-2277757
  hypo
acctgtgtgctcctgcgtgctcccgtgtgctcctgcttactcctgtgtgctcccgtgtgctcctgtgtactcctgctgcgaagggtaaaatga

SEQ ID NO: 167716 - DNA, 923 bp, Homo sapiens; identical to SEQ ID NO: 81496
  chr11:2278016-2278939
  hypo

SEQ ID NO: 167717 - DNA, 279 bp, Homo sapiens
  chr11:2288975-2289254
  hypo
gcgccctaaagaaaccgggggagccccacaacccctcccccaccaggacactaaaaggcagctttcggtacagtgagacatcaaagcctcctaggccctgagtcaaaggtatagccgtgtaatatcccagtgccagctctccggctgcggggagcctggcgcaaagcttccaagccttccttgttcctttcaagagccgctcttagaattcaggtgagcggagacctgcagggcctccccagtgcgggcaaaacccaaagctagcgagagggcagcctc

SEQ ID NO: 167718 - DNA, 171 bp, Homo sapiens; identical to SEQ ID NO: 7868
  chr11:2290846-2291017
  hypo

SEQ ID NO: 167719 - DNA, 421 bp, Homo sapiens; identical to SEQ ID NO: 7869
  chr11:2291072-2291493
  hypo

SEQ ID NO: 167720 - DNA, 124 bp, Homo sapiens; identical to SEQ ID NO: 7870
  chr11:2291800-2291924
  hypo

SEQ ID NO: 167721 - DNA, 113 bp, Homo sapiens; identical to SEQ ID NO: 7871
  chr11:2291944-2292057
  hypo

SEQ ID NO: 167722 - DNA, 254 bp, Homo sapiens; identical to SEQ ID NO: 7872
  chr11:2292105-2292359
  hypo

SEQ ID NO: 167723 - DNA, 324 bp, Homo sapiens; identical to SEQ ID NO: 7873
  chr11:2292391-2292715
  hypo

SEQ ID NO: 167724 - DNA, 30 bp, Homo sapiens
  chr11:2293589-2293619
  hypo
ctccgcccagtggagcgatccaggcagaaa

SEQ ID NO: 167725 - DNA, 42 bp, Homo sapiens
  chr11:2294015-2294057
  hypo
gggggtcaacagggacgagcggtacagcggctgggttgctct

SEQ ID NO: 167726 - DNA, 107 bp, Homo sapiens
  chr11:2294684-2294791
  hypo
cgaagctggtgaacctcgagaacacgaggccgcgtgaacgaagccagacaccgaggaccacgtagcgtgagactctcagtctatgaaatgtgcggagtcgataaatt

SEQ ID NO: 167727 - DNA, 90 bp, Homo sapiens; identical to SEQ ID NO: 24963
  chr11:2328965-2329055
  hypo

SEQ ID NO: 167728 - DNA, 141 bp, Homo sapiens
  chr11:2330507-2330648
  hypo
cgcggactggggtgtcgcagcctccaccccctccacggaacagcacccatccttccgtcctggatgctgacctgcctggaggagggtccggcctagctgaccgtgggcaggggccaagggcgtccccgtggaaaggccagc

SEQ ID NO: 167729 - DNA, 30 bp, Homo sapiens
  chr11:2334410-2334440
  hypo
cttccagaaggcagccgggtgattcttggg

SEQ ID NO: 167730 - DNA, 351 bp, Homo sapiens
  chr11:2334645-2334996
  hypo
ggagggccactctgacggccattgtgtgaaggccccatcgttgatgttgggaagcactgtgactggctgcccagggacccaggttccgctttggggagatccacctgctacaaggagggcagtgctgggacgtcactcagcactaagggcccactagcgtttgggatgtcgtggggagggggctgtgtccccggatctcccaccagggccaggacctccctgtggtctctcggtgcaggtggaggacgccatgctggacacctacgacctggtatatgagcaggcgatgaaaggtacgtcccacgtccggcggcaggagctggcggccatccaggacgtggtgagcgtggg

SEQ ID NO: 167731 - DNA, 30 bp, Homo sapiens; identical to SEQ ID NO: 24964
  chr11:2335442-2335472
  hypo

SEQ ID NO: 167732 - DNA, 30 bp, Homo sapiens; identical to SEQ ID NO: 24965
  chr11:2335824-2335854
  hypo

SEQ ID NO: 167733 - DNA, 391 bp, Homo sapiens
  chr11:2337175-2337566
  hypo
gtggcccaacatggacgctcaggacagctgggagacggcaccggccgggcccagggcagtgccagagtgcccacagaggccagccctgtcccactgggcttcacctgctcgtgctgcctttccctagagccctgggggcttcctaggaatgtgccgcacccgccgccctgctgccctggcattggcctaggtgggcgctgcagctccatggccccacagaggccgcttgtccaggcagggagggccgctcagggcgggtaccatgcctgctgccctctcacaggactgccttcagggcatccggagcttcctgaggacacaccagcaggtcgcctccagcctgaccagcatcggcctggccctcacggtaccctctcgcctccctcactgc

SEQ ID NO: 167734 - DNA, 143 bp, Homo sapiens; identical to SEQ ID NO: 81508
  chr11:2348406-2348549
  hypo

SEQ ID NO: 167735 - DNA, 17 bp, Homo sapiens
  chr11:2357593-2357610
  hypo
ggaccgagacccatccg

SEQ ID NO: 167736 - DNA, 16 bp, Homo sapiens
  chr11:2357729-2357745
  hypo
acgggagccggtaaag

SEQ ID NO: 167737 - DNA, 223 bp, Homo sapiens
  chr11:2362551-2362774
  hypo
taaagacataaatgccggttaaaacggattaaatatcccgttcgcactttaagcaaaagtgaccattaagcttgtgggcgcggtaggccagaggctcaggatgcctcctttccactgggacggtcctcaaatcaagcggacatggagtgcgtggtagctcttttcgaagattccaccacctggaataacgaattgtgccaagctctttctctgctatttcctg

SEQ ID NO: 167738 - DNA, 34 bp, Homo sapiens
  chr11:2375967-2376001
  hypo
gatgctatttctatcctatcggttctgtttacct

SEQ ID NO: 167739 - DNA, 30 bp, Homo sapiens; identical to SEQ ID NO: 24966
  chr11:2395933-2395963
  hypo

SEQ ID NO: 167740 - DNA, 565 bp, Homo sapiens; identical to SEQ ID NO: 120182
  chr11:2398757-2399322
  hypo

SEQ ID NO: 167741 - DNA, 415 bp, Homo sapiens; identical to SEQ ID NO: 120183
  chr11:2399399-2399814
  hypo

SEQ ID NO: 167742 - DNA, 22 bp, Homo sapiens
  chr11:2409425-2409447
  hypo
gctaccacgcccagccccctct

SEQ ID NO: 167743 - DNA, 30 bp, Homo sapiens
  chr11:2412662-2412692
  hypo
gccccacacctgcgccgtcccacctctttg

SEQ ID NO: 167744 - DNA, 573 bp, Homo sapiens; identical to SEQ ID NO: 81511
  chr11:2412912-2413485
  hypo

SEQ ID NO: 167745 - DNA, 175 bp, Homo sapiens
  chr11:2413788-2413963
  hypo
acctgccacccccgacgtgggctctgcctgggcccccactggacagggaccccttggagctcctctggccaccaagtcctcgcccattccagaatcggccttctggagcctcttgctgtccctgatgcgggctgggccttgccaagggctttttttcctgcgccgggaacagggt

SEQ ID NO: 167746 - DNA, 158 bp, Homo sapiens; identical to SEQ ID NO: 24969
  chr11:2414472-2414630
  hypo

SEQ ID NO: 167747 - DNA, 219 bp, Homo sapiens; identical to SEQ ID NO: 81513
  chr11:2423367-2423586
  hypo

SEQ ID NO: 167748 - DNA, 198 bp, Homo sapiens
  chr11:2423832-2424030
  hypo
tggtttaggtgtggcgtggccctggggacgcatggctgaggcaggaacaggtgagccgtcccccagcgtggagggcgaacacgggacggagtatgacacgctgccttccgacacagtctccctcagtgactcggactctgacctcagcttgcccggtggtgctgaagtggaagcactgtccccgatggggctgcctgg

SEQ ID NO: 167749 - DNA, 31 bp, Homo sapiens; identical to SEQ ID NO: 24970
  chr11:2427869-2427900
  hypo

SEQ ID NO: 167750 - DNA, 161 bp, Homo sapiens
  chr11:2428377-2428538
  hypo
ttcttgaagacccggcggagcgtcaggctcaggtggctgagcaggatgaagggcggggccagggcggggcgctcgtggtactccacaatcaggttgtagcgctggaacttccagaacatgtctgcgttgccctgcaccacctggaacgtgtagctgcaggg

SEQ ID NO: 167751 - DNA, 1485 bp, Homo sapiens
  chr11:2435283-2436768
  hypo
cactcacctgaacgccgtcgtgggcaaagaaggccttggcgtcagcctcggtggccaggtgcaggcaggtggtcttgctccagcagcggttccggcgcaccagcagggcgaaggcgcgggcctcactgttgctgtagcactcggagaagaggtctgcccccggaggccctggccgctaggacgagacgccgatgcccggcccggcccccgacgcccctcctccatcccctgcccagacctgggctctgcagccgcaccctgcgttcaacacgcagggcccagccaggccttctgccccctccggcctgctccgggcccttcctgaacctccgtccttctccggctctgtccctcccccagcaggacaaagggaacctctgccacgctaaatgtccctcgtcctgcggcagggcccagtgtatgcccggggtgtgaggctgtatcgtcctcaccacgtgcacagcggtcccacactcagggtctggggccgcctccaccccaggcagagccgtctgtcctctcctatggaggaggcccctgagggcacctggagccccacggcggtaacaggcagccctggcgaggcccaggacccttcgtccgacccctccgtcacatcctcccccgcgcgcgggcccggccccagccgccggtcactcaccaagggccagccgctcgtatttcgcctcgcgcgtggctcgggccgcctcggcctccgtctccaggtgcgacatctctttgaggattttgcaggcggccagtgcggctgccacaccttcctggccctacgagacctggtctcaggaggccgcccctcccctgcccccgcgctgggcccgcggcctgggctcaccatggcccagaagtaggtggccatctcgtggcggttctgcagcacggcccacaggaacaggtcccgccaggggttctcgctcttctggttcaggtccagcagccacttctggcccgtgggccgcttggccgggcccttctcctggaggacacgggcgtcggcctcctgctgcggccccagcctcgccctccatccccacggagcccccgctcaccgccctcctgcggtcccctggccggccgtcctggtagaagcctcggcaggcgtcctgcaggaagtccttgagtacgcgggagacctcgtgcagggagaaggccggtggccccgcgggtggctcccgggcctgctgggtgcccaggccggccagcgtcagccgggcctcctcctgcttccgctgcagcaggtcgaagagcaggctcttgcgtgacacggagcggtagagctcctgcagccgcccatacgtcaggaagtcggccacgtctgcgccgttgtccacaaagaggcgcacaaactcgggcttgttgctgaccagggcgtccaccatcacctcctccaggtcacaggacttggcggccatgggcacccgagggaagggggacaagagagtgagcgagagacaggaggagggggtc

SEQ ID NO: 167752 - DNA, 376 bp, Homo sapiens
  chr11:2441483-2441859
  hypo
ttctccagcctcagccgcagctccgtcagcccatcgcccttccccggggggcctggctccaccaggatgaagtgggagaggttgctgtccagtgaacagagggggccctggctgccgccgtcatcctcagggtagtggacaggaaaatcctcctgcgcccatgcagggagacgaggctgagccctcgagaggcagcttgggctggtcccgctgcgggatcctccctgccaggccgtgcacaccacgccatggggccccgcacaaggcttctgcccgagccttggtttccccacccttcagacaaaaggagggacgaacagctggggcccggggaccctccttcgacagtcaggggcaggggcggtggggagcgggt

SEQ ID NO: 167753 - DNA, 96 bp, Homo sapiens
  chr11:2446551-2446647
  hypo
tccaggttcctgaggcgccaggtgttcctggctgtggccgcgtggctccagcttctgccttggttgccgcatggtctgcctcgcctgtctgtgtcc

SEQ ID NO: 167754 - DNA, 58 bp, Homo sapiens
  chr11:2448566-2448624
  hypo
cagcaccctgacacgcggctgctggccaaggcgcgggtggagccgtctgcctaccttg

SEQ ID NO: 167755 - DNA, 30 bp, Homo sapiens; identical to SEQ ID NO: 24972
  chr11:2481626-2481656
  hypo

SEQ ID NO: 167756 - DNA, 300 bp, Homo sapiens
  chr11:2485034-2485334
  hypo
ggatggcccggcccccgctaccacgtggaggctccctgtaggtgcttgtgtagatgcccccgtgcggggacttgtttggctgatggatcagggggaaggttctccccacggtgtgaggcagcaccgagggctccgtgcccagcaggctcactgtcggcagttgggtctggtttgataaccgtggaccggggtgacaggccctgactctgcagagcaggactgtggaaaatggacactgatgctgcccggtggatccaggcagggccgggatgtttgcaggacccacgggacaattagaac

SEQ ID NO: 167757 - DNA, 30 bp, Homo sapiens; identical to SEQ ID NO: 81519
  chr11:2542565-2542595
  hypo

SEQ ID NO: 167758 - DNA, 128 bp, Homo sapiens
  chr11:2543212-2543340
  hypo
cctcccacagcgtctcgggctatgaccctggcagggttcctgcattctcctgtgttcccgggcacccggggctgagatgttgaaatgatgtcggataattcaccgggtgccttcggggctggtactcg

SEQ ID NO: 167759 - DNA, 110 bp, Homo sapiens; identical to SEQ ID NO: 48070
  chr11:2554315-2554425
  hypo

SEQ ID NO: 167760 - DNA, 112 bp, Homo sapiens; identical to SEQ ID NO: 120191
  chr11:2554453-2554565
  hypo

SEQ ID NO: 167761 - DNA, 30 bp, Homo sapiens
  chr11:2555157-2555187
  hypo
aaaccccgtgagctgcggccccggaggcct

SEQ ID NO: 167762 - DNA, 183 bp, Homo sapiens
  chr11:2560626-2560809
  hypo
agtggctagaggaacgggcttacgctaggcaggcgctggcatcttagacaatacctgacatctttgcgggagctctggtgagaggccccacaagcgtgtgaccctgtgcggactccaccgcggcagcctgggagccaagccgatggctgtgctggccgaagggaacaccgccatggtgctctg

SEQ ID NO: 167763 - DNA, 39 bp, Homo sapiens; identical to SEQ ID NO: 24974
  chr11:2562213-2562252
  hypo

SEQ ID NO: 167764 - DNA, 354 bp, Homo sapiens; identical to SEQ ID NO: 81523
  chr11:2569187-2569541
  hypo

SEQ ID NO: 167765 - DNA, 30 bp, Homo sapiens
  chr11:2572513-2572543
  hypo
cctgggaaccgtggacgtgtttcctgtccc

SEQ ID NO: 167766 - DNA, 42 bp, Homo sapiens; identical to SEQ ID NO: 81524
  chr11:2579780-2579822
  hypo

SEQ ID NO: 167767 - DNA, 44 bp, Homo sapiens; identical to SEQ ID NO: 81525
  chr11:2581753-2581797
  hypo

SEQ ID NO: 167768 - DNA, 30 bp, Homo sapiens; identical to SEQ ID NO: 81526
  chr11:2591917-2591947
  hypo

SEQ ID NO: 167769 - DNA, 30 bp, Homo sapiens; identical to SEQ ID NO: 81527
  chr11:2594084-2594114
  hypo

SEQ ID NO: 167770 - DNA, 131 bp, Homo sapiens; identical to SEQ ID NO: 81528
  chr11:2594825-2594956
  hypo

SEQ ID NO: 167771 - DNA, 64 bp, Homo sapiens; identical to SEQ ID NO: 81529
  chr11:2595669-2595733
  hypo

SEQ ID NO: 167772 - DNA, 200 bp, Homo sapiens
  chr11:2596283-2596483
  hypo
cagtgggtactggccccggcacggctgataagcagtgcccagccttcgctgctgccctgcctgccttcccagccgcccactggagctgtgggcagcggacgctactccccagccccccagcccgcagcagagcggcactcccactcccacacctgtgcaaacatccgcccgctggccgggaacacggcccctttgtgccc

SEQ ID NO: 167773 - DNA, 32 bp, Homo sapiens
  chr11:2597547-2597579
  hypo
tggatgtgagaactctcgaatcccctgagtgt

SEQ ID NO: 167774 - DNA, 30 bp, Homo sapiens; identical to SEQ ID NO: 81532
  chr11:2598638-2598668
  hypo

SEQ ID NO: 167775 - DNA, 30 bp, Homo sapiens; identical to SEQ ID NO: 24978
  chr11:2602156-2602186
  hypo

SEQ ID NO: 167776 - DNA, 30 bp, Homo sapiens; identical to SEQ ID NO: 81534
  chr11:2602996-2603026
  hypo

SEQ ID NO: 167777 - DNA, 67 bp, Homo sapiens; identical to SEQ ID NO: 81535
  chr11:2610096-2610163
  hypo

SEQ ID NO: 167778 - DNA, 30 bp, Homo sapiens; identical to SEQ ID NO: 24979
  chr11:2610580-2610610
  hypo

SEQ ID NO: 167779 - DNA, 30 bp, Homo sapiens
  chr11:2622886-2622916
  hypo
gaatcacacaatacacgatatcttagaaac

SEQ ID NO: 167780 - DNA, 30 bp, Homo sapiens; identical to SEQ ID NO: 81537
  chr11:2691234-2691264
  hypo

SEQ ID NO: 167781 - DNA, 144 bp, Homo sapiens
  chr11:2720202-2720346
  hypo
ggggattcccacctccgatcctaattcgggccctgactcagaaccactaagtggatttccgactccggtcccaattcgggctttgactcaaaaccacaacatggattcccaacttccatcccaatagcgcggactcagaaccac

SEQ ID NO: 167782 - DNA, 30 bp, Homo sapiens; identical to SEQ ID NO: 81538
  chr11:2741018-2741048
  hypo

SEQ ID NO: 167783 - DNA, 264 bp, Homo sapiens
  chr11:2750148-2750412
  hypo
tgcctgatttggggcagatagcggggtgattaatgctcgtgataaggtgttgattggttctgggagccactgcagacacaggggctgttgtgcatgcagggctggcaactgtagtcacagaacaatagcccgtttatgtagcacactcccaccccccgcctgccccaggcgggcacaaagggcgctcgggccaggaacccatgagctgggctctcccggggccgagggtccagacctgttgccgagaagctgcttagcaaggcc

SEQ ID NO: 167784 - DNA, 211 bp, Homo sapiens
  chr11:2753750-2753961
  hypo
tgatgtggatgcagccgggcagtgaggagcgcaggcgaatgttacagcaggcgcgagcgaaggggcccgaggcaccggtgcttccgacggggcccgagggccgtctgacctttccggccacggggcagcagttgcgtgagcaggaacaatcgccccagtgtgcaaggcacaagcggccttttcttcctcaccgggccggcgcacacagctc

SEQ ID NO: 167785 - DNA, 494 bp, Homo sapiens
  chr11:2757684-2758178
  hypo
gcctctggggttagacggtggcccccgtgcctggagagaaggtgcactttggggatgggaggcgctaggtgccaatggccctaggagggggctttggagctggacccttgagggagtcaatgccagctcatcgccatagcggcttgcttagggccgtccctcccaccccccagttacacagcctgcaaaccccaacctagccccttccaggtgtcccttgtgatcttccgccactgacataggtgtggcccagagcaaagggcggcttcccatttcacctgcgcatctgcagctggtatgcggctgccctggtgggttcctggctggctggcatgcgccctgcgcctctgctgggcctggtggggcctaagggtgaaaactcggtcaagataagatgcccacggctcagggaccccacagtcacaggtggggagtggcgcagagcctgggcctgcctcgggctaccctgaagtgccagccgagggtggctgagg

SEQ ID NO: 167786 - DNA, 110 bp, Homo sapiens
  chr11:2758837-2758947
  hypo
tgactccgttcacggcgaagaagctttgtgtaaaatgccgggaagccttcgtgctgactcggccctcgcagaccataaaacacggctggtgggtccgagcccggcaggga

SEQ ID NO: 167787 - DNA, 386 bp, Homo sapiens; identical to SEQ ID NO: 24981
  chr11:2772655-2773041
  hypo

SEQ ID NO: 167788 - DNA, 30 bp, Homo sapiens
  chr11:2781240-2781270
  hypo
atgggcagcccagtccgggaaacttcctgc

SEQ ID NO: 167789 - DNA, 331 bp, Homo sapiens; identical to SEQ ID NO: 81543
  chr11:2781506-2781837
  hypo

SEQ ID NO: 167790 - DNA, 181 bp, Homo sapiens; identical to SEQ ID NO: 81544
  chr11:2782399-2782580
  hypo

SEQ ID NO: 167791 - DNA, 30 bp, Homo sapiens; identical to SEQ ID NO: 24983
  chr11:2783762-2783792
  hypo

SEQ ID NO: 167792 - DNA, 30 bp, Homo sapiens
  chr11:2817631-2817661
  hypo
caggaagcacccatcgctttcctctcccgg

SEQ ID NO: 167793 - DNA, 403 bp, Homo sapiens; identical to SEQ ID NO: 24984
  chr11:2818019-2818422
  hypo

SEQ ID NO: 167794 - DNA, 156 bp, Homo sapiens
  chr11:2826846-2827002
  hypo
cgttgtaacagagatcgtgtgaccaacgaagccagaacgatttactctctggccctttagagaaaagcgtgctagcccttgctctaagagtttcagtgaagagacgcaagatgcagaaatgaacctaattgtgtggtcttccgtgctggggaagcc

SEQ ID NO: 167795 - DNA, 31 bp, Homo sapiens; identical to SEQ ID NO: 81547
  chr11:2832257-2832288
  hypo

SEQ ID NO: 167796 - DNA, 31 bp, Homo sapiens; identical to SEQ ID NO: 81548
  chr11:2842364-2842395
  hypo

SEQ ID NO: 167797 - DNA, 30 bp, Homo sapiens; identical to SEQ ID NO: 120193
  chr11:2847665-2847695
  hypo

SEQ ID NO: 167798 - DNA, 132 bp, Homo sapiens
  chr11:2864466-2864598
  hypo
accgcgaccttaccacgtgctgtgacctattgccacttgtgcccagctccacacaggagccgggtctgacatccgattgctcagagcctggtatgaaacattctaggtaccgccctgagagtggcttagtaa

SEQ ID NO: 167799 - DNA, 219 bp, Homo sapiens
  chr11:2865182-2865401
  hypo
tcccagcagttcttggggaaccggccccagtgcctagagcatgcactgccttcccccagggcggcagctccccgatggcacctgcccggatgcacctccgcatgggtggggtctggcctcggccatgggaggtgcttctcaggctcctccatcgccaaaaaaaaccaaacgtgccagcgagatgaaggcgccctgcccgcagagtggtggggtgggact

SEQ ID NO: 167800 - DNA, 30 bp, Homo sapiens
  chr11:2867376-2867406
  hypo
accaggcccgcccggcgcagcctagggtgc

SEQ ID NO: 167801 - DNA, 296 bp, Homo sapiens; identical to SEQ ID NO: 81550
  chr11:2868804-2869100
  hypo

SEQ ID NO: 167802 - DNA, 30 bp, Homo sapiens; identical to SEQ ID NO: 24986
  chr11:2870193-2870223
  hypo

SEQ ID NO: 167803 - DNA, 216 bp, Homo sapiens
  chr11:2874226-2874442
  hypo
cctgagtgaggcagagcgtaaaggagatggacagcctggcccagggcagccctgctggactccaggagatgcttgggcccgctccccactcttccttctagaccctcacccatggctcccagaggggacgaggccgcccttaattcccagagccaagcccagccccaccgcccacctatccccaggcttgggtttcgcacacgtacaggcagcgag

SEQ ID NO: 167804 - DNA, 161 bp, Homo sapiens
  chr11:2874822-2874983
  hypo
tccctcctgggcctgcgccctgggaagccggtggcagcggcaaacccacggagaggagttaacaggtgcccgaggacagagaagactcatgctgaggggagagaccccagagcaaaaaggcctcagagctcgtgaagccccccacccggtacagacaggga

SEQ ID NO: 167805 - DNA, 55 bp, Homo sapiens; identical to SEQ ID NO: 81553
  chr11:2885740-2885795
  hypo

SEQ ID NO: 167806 - DNA, 31 bp, Homo sapiens; identical to SEQ ID NO: 24988
  chr11:2896187-2896218
  hypo

SEQ ID NO: 167807 - DNA, 1731 bp, Homo sapiens; identical to SEQ ID NO: 48072
  chr11:2905410-2907141
  hypo

SEQ ID NO: 167808 - DNA, 30 bp, Homo sapiens; identical to SEQ ID NO: 120198
  chr11:2907535-2907565
  hypo

SEQ ID NO: 167809 - DNA, 30 bp, Homo sapiens; identical to SEQ ID NO: 120199
  chr11:2908056-2908086
  hypo

SEQ ID NO: 167810 - DNA, 103 bp, Homo sapiens; identical to SEQ ID NO: 81556
  chr11:2910402-2910505
  hypo

SEQ ID NO: 167811 - DNA, 329 bp, Homo sapiens
  chr11:2934241-2934570
  hypo
tgagcagtgtcccatacgacccagggcaccccaagcgctgagcggaggctgaggagtgcaggggtgtttgtaacagggcacctgctgtacagggaagaggctctcgggggcagatagatgcagggcaggggctggcaggcagctgagggagcagcaggatatgggcgacccaggcccgccgcccccccagccaggtgactcagctactgccttagttcgtgtacctcgcagtgcccaggacactccggttctttctgttcttcccacagtgggcaggcagcaggccccgctgagatggttctggccccgctgtccctcaggacagccct

SEQ ID NO: 167812 - DNA, 31 bp, Homo sapiens; identical to SEQ ID NO: 81558
  chr11:2938037-2938068
  hypo

SEQ ID NO: 167813 - DNA, 198 bp, Homo sapiens; identical to SEQ ID NO: 24991
  chr11:2939100-2939298
  hypo

SEQ ID NO: 167814 - DNA, 305 bp, Homo sapiens; identical to SEQ ID NO: 81560
  chr11:2942533-2942838
  hypo

SEQ ID NO: 167815 - DNA, 30 bp, Homo sapiens; identical to SEQ ID NO: 120202
  chr11:2951456-2951486
  hypo

SEQ ID NO: 167816 - DNA, 434 bp, Homo sapiens; identical to SEQ ID NO: 120203
  chr11:2951690-2952124
  hypo

SEQ ID NO: 167817 - DNA, 42 bp, Homo sapiens; identical to SEQ ID NO: 81561
  chr11:2963521-2963563
  hypo

SEQ ID NO: 167818 - DNA, 386 bp, Homo sapiens; identical to SEQ ID NO: 81562
  chr11:2965736-2966122
  hypo

SEQ ID NO: 167819 - DNA, 85 bp, Homo sapiens
  chr11:2987079-2987164
  hypo
gaacacttacacagagcgtgtctgagatccaacttgcgggcaccatggaagagtgggcatcatggaagagcgtacaattcttatc

SEQ ID NO: 167820 - DNA, 30 bp, Homo sapiens; identical to SEQ ID NO: 24995
  chr11:2998183-2998213
  hypo

SEQ ID NO: 167821 - DNA, 30 bp, Homo sapiens; identical to SEQ ID NO: 24996
  chr11:2998580-2998610
  hypo

SEQ ID NO: 167822 - DNA, 30 bp, Homo sapiens; identical to SEQ ID NO: 81566
  chr11:3003075-3003105
  hypo

SEQ ID NO: 167823 - DNA, 274 bp, Homo sapiens
  chr11:3021375-3021649
  hypo
aacagcatgcgcatgcggagggcaaggacaaagaattggcgcacccacaacccaacactgccacactccccatgctgaggctgctgccaccatccacatgcactggatggagtgtccccccctggatgtccacagcaccaatgactgtcttttgtcccgatggatatggcctggcaccagcttccgcaggcatgaagcaggctgtggtttctgcttacgccctcctcagccaaggatgggtaagcaccttcgcgtctgggtggtgattcttagt

SEQ ID NO: 167824 - DNA, 30 bp, Homo sapiens; identical to SEQ ID NO: 81568
  chr11:3023283-3023313
  hypo

SEQ ID NO: 167825 - DNA, 30 bp, Homo sapiens; identical to SEQ ID NO: 81569
  chr11:3027903-3027933
  hypo

SEQ ID NO: 167826 - DNA, 108 bp, Homo sapiens
  chr11:3031443-3031551
  hypo
ccagtccccctttagcgccctcccggggctgtggcatgccagggaagccaaggccacgtgcacagtcttgtatgaccccagggagctggggcccgggctcggccttcg

SEQ ID NO: 167827 - DNA, 159 bp, Homo sapiens
  chr11:3035021-3035180
  hypo
gcagtgaccggagattgcgctactgcactccagctgtggaaagaagagtttttgttcgctgagagctgctcacactcctatatccataactgaataatagctcagcggccacgacacagggcagggactggcatgggcgacagagtgagactctgtctc

SEQ ID NO: 167828 - DNA, 34 bp, Homo sapiens
  chr11:3046727-3046761
  hypo
gattataggcgtgagccaccgcacctttatttta

SEQ ID NO: 167829 - DNA, 167 bp, Homo sapiens
  chr11:3050211-3050378
  hypo
gcccttgtgcttacccgtaaccgttgtccacaatcttctggacaaagttcacaatttctggcacatactcactaacccgggttaagacatctggagggagaacctgtgcaagacatgagaatgtcctgggattttcccttctgaaaaccacgcgctccataaaaacg

SEQ ID NO: 167830 - DNA, 53 bp, Homo sapiens; identical to SEQ ID NO: 81571
  chr11:3060354-3060407
  hypo

SEQ ID NO: 167831 - DNA, 21 bp, Homo sapiens
  chr11:3098286-3098307
  hypo
agccaccgtgcctggcctctc

SEQ ID NO: 167832 - DNA, 31 bp, Homo sapiens; identical to SEQ ID NO: 81573
  chr11:3102364-3102395
  hypo

SEQ ID NO: 167833 - DNA, 30 bp, Homo sapiens; identical to SEQ ID NO: 81574
  chr11:3108567-3108597
  hypo

SEQ ID NO: 167834 - DNA, 54 bp, Homo sapiens; identical to SEQ ID NO: 24998
  chr11:3109134-3109188
  hypo

SEQ ID NO: 167835 - DNA, 331 bp, Homo sapiens
  chr11:3110963-3111294
  hypo
gatgacaaccccagccgcggcctcctggcctccccacctcccgccctagctctaccaggtctctcgcactctctgacccggagtctggatggacaccctgagtgtggcccacctgtgcagctcctgctgggcctctcggatggagaggatggcctcgtgcagggcctgcagccgccgcgcctccttcctgcaccgagggcatgggctctcaccgcctgggacggccccgagtgagacaaaggaggggaggggaggagtgaggatgagctggaggtccagtggggctggcacgtgggtcacagggtcatatccagctcgggcctccacccca

SEQ ID NO: 167836 - DNA, 31 bp, Homo sapiens; identical to SEQ ID NO: 81577
  chr11:3111798-3111829
  hypo

SEQ ID NO: 167837 - DNA, 60 bp, Homo sapiens; identical to SEQ ID NO: 81578
  chr11:3122918-3122978
  hypo

SEQ ID NO: 167838 - DNA, 44 bp, Homo sapiens; identical to SEQ ID NO: 81579
  chr11:3127000-3127044
  hypo

SEQ ID NO: 167839 - DNA, 30 bp, Homo sapiens; identical to SEQ ID NO: 81580
  chr11:3127406-3127436
  hypo

SEQ ID NO: 167840 - DNA, 182 bp, Homo sapiens; identical to SEQ ID NO: 25000
  chr11:3128517-3128699
  hypo

SEQ ID NO: 167841 - DNA, 30 bp, Homo sapiens; identical to SEQ ID NO: 81582
  chr11:3129053-3129083
  hypo

SEQ ID NO: 167842 - DNA, 30 bp, Homo sapiens; identical to SEQ ID NO: 81583
  chr11:3130630-3130660
  hypo

SEQ ID NO: 167843 - DNA, 426 bp, Homo sapiens; identical to SEQ ID NO: 25001
  chr11:3141592-3142018
  hypo

SEQ ID NO: 167844 - DNA, 30 bp, Homo sapiens
  chr11:3142825-3142855
  hypo
aatggccacggtctccgtgaggtctgaaca

SEQ ID NO: 167845 - DNA, 312 bp, Homo sapiens
  chr11:3143175-3143487
  hypo
agcagcacgctgacccgtgtcctgggtggccggaggccgggcatcacctaccttcaggctgtcagccatgatgaccacgctggggtctgtcagagcgctgagcagctgccgtgtggcgcgcttcttctcctgccggtagttctccttctgcgcctgggcccggggcacccgcggtgggtcatgggagaaggcaccgagctgccccagctcctcccaccgtccagcccagggatgggtccaggggcaggggcaggagaggaagtaggaggaagtagggggtgtggaggcgaccaggtgcggtttgtcccctcc

SEQ ID NO: 167846 - DNA, 282 bp, Homo sapiens
  chr11:3145123-3145405
  hypo
catggaaccgttccacggactggcggtcctggcagcactgggcaccaggcttggccttaggcactgaggttagaaagtaaagatgccagtgtcctgctctttcagggagaggcagaccagccaccagcacgcagaggcgggaggagccaggggtcaggtgagcgctgcggttctgcgttctgtgcatggatgtaagcacgttagatcccacagctcaggtcatcgttgttattctcagcattgtacagaggaagagcctacgcacagagaggttcagaaacc

SEQ ID NO: 167847 - DNA, 276 bp, Homo sapiens
  chr11:3162892-3163168
  hypo
tgcattgccaagttgcgattctcatgcatcccagtgctttgccgaggtgcctacgccacccttgcatgtgtgtcctcccctgggcacaggatgctaaatggggtgacagtaggaacacccaccccccacccgcctcccacccagtgcagggactgggaggactctacgccctggaaggaaaaaagactgcaagagtacaaatgcgccattttcccactttctctccatgttacagttgcagtttcttttctttctttttattttttttgagacgga

SEQ ID NO: 167848 - DNA, 411 bp, Homo sapiens
  chr11:3164462-3164873
  hypo
ggggggcagaggaggcaggtgcggagcggggcagaggaggcaggtacagcccagtgcgtggaccagcgaccggctccaggggcccatggggggctgcactgtgggcgaaaacgcacggacgcgacacacccaagagaaacaagcacacgcccccaggtggtccgcgcacgcacgctcccagcagcatggctcagggccatcagagagcggacacagccagacatccacatgggtgaacggataaacatggatcacatctgtgcaacggatggaagaacattcggccttcaggaggcaggaagcacggcactcacacatgcgacgacacggatgagccgcagagatgcaccaagtcaaagaagccagataccaaaggccacatcttgtccgcttccacgcccacgcagtgtc

SEQ ID NO: 167849 - DNA, 30 bp, Homo sapiens; identical to SEQ ID NO: 81587
  chr11:3165978-3166008
  hypo

SEQ ID NO: 167850 - DNA, 394 bp, Homo sapiens; identical to SEQ ID NO: 81588
  chr11:3167018-3167412
  hypo

SEQ ID NO: 167851 - DNA, 30 bp, Homo sapiens; identical to SEQ ID NO: 81589
  chr11:3167812-3167842
  hypo

SEQ ID NO: 167852 - DNA, 64 bp, Homo sapiens; identical to SEQ ID NO: 81590
  chr11:3168978-3169042
  hypo

SEQ ID NO: 167853 - DNA, 191 bp, Homo sapiens; identical to SEQ ID NO: 81591
  chr11:3169703-3169894
  hypo

SEQ ID NO: 167854 - DNA, 124 bp, Homo sapiens
  chr11:3172031-3172155
  hypo
gactgtgatcacgcacgcctgcatctgtgatgtcatccccatgccccagaatgccacccctggtctttctacaggttccgatcctagtccgtcttcccaggagtcacggcgggctgcccgctgt

SEQ ID NO: 167855 - DNA, 30 bp, Homo sapiens; identical to SEQ ID NO: 81593
  chr11:3172354-3172384
  hypo

SEQ ID NO: 167856 - DNA, 55 bp, Homo sapiens; identical to SEQ ID NO: 81594
  chr11:3179501-3179556
  hypo

SEQ ID NO: 167857 - DNA, 764 bp, Homo sapiens; identical to SEQ ID NO: 120210
  chr11:3186007-3186771
  hypo

SEQ ID NO: 167858 - DNA, 30 bp, Homo sapiens; identical to SEQ ID NO: 120211
  chr11:3186866-3186896
  hypo

SEQ ID NO: 167859 - DNA, 30 bp, Homo sapiens
  chr11:3187495-3187525
  hypo
gtttctacggtttcacgctgcagttgcatt

SEQ ID NO: 167860 - DNA, 296 bp, Homo sapiens; identical to SEQ ID NO: 25005
  chr11:3187735-3188031
  hypo

SEQ ID NO: 167861 - DNA, 217 bp, Homo sapiens
  chr11:3212406-3212623
  hypo
aaagatagagagagggcggggctggatgaactcgcaggtttggggtctcctcccctgttttcagctccatattcacagtagtgttgctttggtgaattttcacaggatggccaaggccaattcctgccctagggaaagcgtgaagaggcctgggctctattaaaatataaaatatttgtactcaggccgggcgcggtggctcacgcctgtaatccca

SEQ ID NO: 167862 - DNA, 36 bp, Homo sapiens
  chr11:3212862-3212898
  hypo
gacgccgtctcgaaaaaaaaacgtacttagtggcgg

SEQ ID NO: 167863 - DNA, 30 bp, Homo sapiens
  chr11:3213329-3213359
  hypo
acctttcttcttctccggccacatacagcg

SEQ ID NO: 167864 - DNA, 31 bp, Homo sapiens; identical to SEQ ID NO: 81598
  chr11:3219913-3219944
  hypo

SEQ ID NO: 167865 - DNA, 30 bp, Homo sapiens
  chr11:3236711-3236741
  hypo
aaggtttgggcgggccgccctctgtggaga

SEQ ID NO: 167866 - DNA, 30 bp, Homo sapiens; identical to SEQ ID NO: 81599
  chr11:3239494-3239524
  hypo

SEQ ID NO: 167867 - DNA, 758 bp, Homo sapiens; identical to SEQ ID NO: 25006
  chr11:3243292-3244050
  hypo

SEQ ID NO: 167868 - DNA, 273 bp, Homo sapiens; identical to SEQ ID NO: 81601
  chr11:3246364-3246637
  hypo

SEQ ID NO: 167869 - DNA, 35 bp, Homo sapiens; identical to SEQ ID NO: 81602
  chr11:3247716-3247751
  hypo

SEQ ID NO: 167870 - DNA, 247 bp, Homo sapiens
  chr11:3249604-3249851
  hypo
caggtggtcaggtggcgtgggcggcggcacgagtaccaggctgggaagagggcggccaggcactgctccacgctgacggccgccaggagactcaggcccacgatgtagcagaagaagcgcagcgttgccaggctggtctgcacgaagcccgggaagtccagccggccttgcagcaagtcggggacgatggccaccatgtggcagccaaggaagatgagatccgcgcaggccacgtccaggaggtaga

SEQ ID NO: 167871 - DNA, 30 bp, Homo sapiens; identical to SEQ ID NO: 25007
  chr11:3251745-3251775
  hypo

SEQ ID NO: 167872 - DNA, 238 bp, Homo sapiens; identical to SEQ ID NO: 81605
  chr11:3254281-3254519
  hypo

SEQ ID NO: 167873 - DNA, 30 bp, Homo sapiens
  chr11:3374596-3374626
  hypo
gcaaaggagaaggtacggggggtgcacacc

SEQ ID NO: 167874 - DNA, 30 bp, Homo sapiens; identical to SEQ ID NO: 25009
  chr11:3396222-3396252
  hypo

SEQ ID NO: 167875 - DNA, 30 bp, Homo sapiens; identical to SEQ ID NO: 7885
  chr11:3427830-3427860
  hypo

SEQ ID NO: 167876 - DNA, 243 bp, Homo sapiens; identical to SEQ ID NO: 48083
  chr11:3444552-3444795
  hypo

SEQ ID NO: 167877 - DNA, 87 bp, Homo sapiens; identical to SEQ ID NO: 81609
  chr11:3511140-3511227
  hypo

SEQ ID NO: 167878 - DNA, 30 bp, Homo sapiens
  chr11:3553961-3553991
  hypo
tgtgcaatgtggagtcggccgtacacaatt

SEQ ID NO: 167879 - DNA, 27 bp, Homo sapiens
  chr11:3602557-3602584
  hypo
ccgcggacacgccgggccctggcctgc

SEQ ID NO: 167880 - DNA, 30 bp, Homo sapiens; identical to SEQ ID NO: 25013
  chr11:3637412-3637442
  hypo

SEQ ID NO: 167881 - DNA, 31 bp, Homo sapiens; identical to SEQ ID NO: 81612
  chr11:3658467-3658498
  hypo

SEQ ID NO: 167882 - DNA, 31 bp, Homo sapiens; identical to SEQ ID NO: 81613
  chr11:3661448-3661479
  hypo

SEQ ID NO: 167883 - DNA, 126 bp, Homo sapiens
  chr11:3681139-3681265
  hypo
ttcaatgcagccgtgcgtgaggcgggccgctcccgggcccactacctccaccacttctccttcaagacactccatttcctgctgactgaggccctgcagctcctgggcagcggccagcgtccaccc

SEQ ID NO: 167884 - DNA, 30 bp, Homo sapiens
  chr11:3681564-3681594
  hypo
cagcacctacaactgcgagtacatcaaagg

SEQ ID NO: 167885 - DNA, 30 bp, Homo sapiens; identical to SEQ ID NO: 81614
  chr11:3686877-3686907
  hypo

SEQ ID NO: 167886 - DNA, 226 bp, Homo sapiens; identical to SEQ ID NO: 81615
  chr11:3688511-3688737
  hypo

SEQ ID NO: 167887 - DNA, 51 bp, Homo sapiens; identical to SEQ ID NO: 81616
  chr11:3688970-3689021
  hypo

SEQ ID NO: 167888 - DNA, 223 bp, Homo sapiens; identical to SEQ ID NO: 81617
  chr11:3697392-3697615
  hypo

SEQ ID NO: 167889 - DNA, 31 bp, Homo sapiens; identical to SEQ ID NO: 25016
  chr11:3704649-3704680
  hypo

SEQ ID NO: 167890 - DNA, 150 bp, Homo sapiens
  chr11:3705439-3705589
  hypo
ctcaaaaacaaaacaaaacaaaacaaacacatagcattaatttttaaaaataaaataaagtattttcatgttcaaaaagttggggcttggctcggcgcagtggctcacgcctgtaatcccagcactttggcaggccgaggcggacagatc

SEQ ID NO: 167891 - DNA, 40 bp, Homo sapiens; identical to SEQ ID NO: 25017
  chr11:3767211-3767251
  hypo

SEQ ID NO: 167892 - DNA, 37 bp, Homo sapiens
  chr11:3828813-3828850
  hypo
aggcgtgagctaccgcgcctggccctcacagggtttt

SEQ ID NO: 167893 - DNA, 360 bp, Homo sapiens; identical to SEQ ID NO: 81621
  chr11:3845110-3845470
  hypo

SEQ ID NO: 167894 - DNA, 31 bp, Homo sapiens; identical to SEQ ID NO: 25018
  chr11:3846725-3846756
  hypo

SEQ ID NO: 167895 - DNA, 30 bp, Homo sapiens
  chr11:3849208-3849238
  hypo
tcaggttcactgtgcgcccgtcaactgcgc

SEQ ID NO: 167896 - DNA, 28 bp, Homo sapiens
  chr11:4030227-4030255
  hypo
aagttgcattttggctgggtgcggtggc

SEQ ID NO: 167897 - DNA, 100 bp, Homo sapiens; identical to SEQ ID NO: 81624
  chr11:4095785-4095885
  hypo

SEQ ID NO: 167898 - DNA, 30 bp, Homo sapiens
  chr11:4214096-4214126
  hypo
actgcgggggccatgcgcagttgagttcag

SEQ ID NO: 167899 - DNA, 38 bp, Homo sapiens; identical to SEQ ID NO: 81625
  chr11:4494113-4494151
  hypo

SEQ ID NO: 167900 - DNA, 153 bp, Homo sapiens; identical to SEQ ID NO: 81626
  chr11:4599982-4600135
  hypo

SEQ ID NO: 167901 - DNA, 30 bp, Homo sapiens
  chr11:4621698-4621728
  hypo
cggcgaggagggaccggcaaggacaggatt

SEQ ID NO: 167902 - DNA, 23 bp, Homo sapiens
  chr11:4697730-4697753
  hypo
ccgtctcaaaaaaaaacaaaaaa

SEQ ID NO: 167903 - DNA, 121 bp, Homo sapiens
  chr11:5177826-5177947
  hypo
gggatcacaggcgtgagccactgcacccggcctactgaatattttttaaatttatttttattaaggtaaaatatacatacgtaatttaccgtctttactttttttttttccttgagacgga

SEQ ID NO: 167904 - DNA, 30 bp, Homo sapiens; identical to SEQ ID NO: 81628
  chr11:5474950-5474980
  hypo

SEQ ID NO: 167905 - DNA, 30 bp, Homo sapiens
  chr11:5616887-5616917
  hypo
gcctccggatttgccgttcatcaggtaaga

SEQ ID NO: 167906 - DNA, 159 bp, Homo sapiens
  chr11:5687848-5688007
  hypo
acatctaaggtttcagatttccgggaaaaattacaaacacttggcaaatgagaaattatgtgcactaaactattactggcctgaatatcgtgtggttagaaagaacttgataccaccacgtaggtgtgcgaggtgtgcgattttagacacaagaatagc

SEQ ID NO: 167907 - DNA, 30 bp, Homo sapiens
  chr11:5730344-5730374
  hypo
caagtgaaaactgtacgcacctgcacattt

SEQ ID NO: 167908 - DNA, 165 bp, Homo sapiens
  chr11:5950917-5951082
  hypo
cttcaggtcacgcaccgcccacttcctcacgggtccctccttcgccaatcacgccacctcctcctccacctccatcatctcctcctcctccaccactaccctcacctgcccctcccaagtcccctgtggccgcacacacccaggccaggccggcactccttgccc

SEQ ID NO: 167909 - DNA, 76 bp, Homo sapiens
  chr11:5951371-5951447
  hypo
ggcggttccatccaccgatccagagtgggattaccaagttgggcaagcagggcgtcgccgccgggacataatggtt

SEQ ID NO: 167910 - DNA, 21 bp, Homo sapiens
  chr11:6398752-6398773
  hypo
tttttgagacggagtcgcgct

SEQ ID NO: 167911 - DNA, 20 bp, Homo sapiens
  chr11:6399012-6399032
  hypo
acaggcgtgagccaccgcgc

SEQ ID NO: 167912 - DNA, 31 bp, Homo sapiens; identical to SEQ ID NO: 25021
  chr11:6412882-6412913
  hypo

SEQ ID NO: 167913 - DNA, 30 bp, Homo sapiens
  chr11:6423324-6423354
  hypo
gcccgacgccccacacgcggatgctgatga

SEQ ID NO: 167914 - DNA, 30 bp, Homo sapiens
  chr11:6425883-6425913
  hypo
tccaaccctgtaacccgctcatgcgtcctc

SEQ ID NO: 167915 - DNA, 35 bp, Homo sapiens; identical to SEQ ID NO: 81631
  chr11:6432991-6433026
  hypo

SEQ ID NO: 167916 - DNA, 237 bp, Homo sapiens; identical to SEQ ID NO: 81632
  chr11:6477623-6477860
  hypo

SEQ ID NO: 167917 - DNA, 81 bp, Homo sapiens; identical to SEQ ID NO: 81633
  chr11:6478111-6478192
  hypo

SEQ ID NO: 167918 - DNA, 101 bp, Homo sapiens
  chr11:6497208-6497309
  hypo
gcacctggccaggtctcagctttcaaactgacatccccatttccaccccagtccatgccagatgcccctcctttgtgctcccacagcgccctctgtacttc

SEQ ID NO: 167919 - DNA, 219 bp, Homo sapiens; identical to SEQ ID NO: 120237
  chr11:6502786-6503005
  hypo

SEQ ID NO: 167920 - DNA, 121 bp, Homo sapiens; identical to SEQ ID NO: 81636
  chr11:6521105-6521226
  hypo

SEQ ID NO: 167921 - DNA, 30 bp, Homo sapiens; identical to SEQ ID NO: 81637
  chr11:6559931-6559961
  hypo

SEQ ID NO: 167922 - DNA, 114 bp, Homo sapiens; identical to SEQ ID NO: 81638
  chr11:6585064-6585178
  hypo

SEQ ID NO: 167923 - DNA, 30 bp, Homo sapiens; identical to SEQ ID NO: 25023
  chr11:6630617-6630647
  hypo

SEQ ID NO: 167924 - DNA, 30 bp, Homo sapiens; identical to SEQ ID NO: 81640
  chr11:6631271-6631301
  hypo

SEQ ID NO: 167925 - DNA, 30 bp, Homo sapiens; identical to SEQ ID NO: 25024
  chr11:6632057-6632087
  hypo

SEQ ID NO: 167926 - DNA, 30 bp, Homo sapiens; identical to SEQ ID NO: 81642
  chr11:6642893-6642923
  hypo

SEQ ID NO: 167927 - DNA, 31 bp, Homo sapiens; identical to SEQ ID NO: 25025
  chr11:6651319-6651350
  hypo

SEQ ID NO: 167928 - DNA, 30 bp, Homo sapiens; identical to SEQ ID NO: 81644
  chr11:6661953-6661983
  hypo

SEQ ID NO: 167929 - DNA, 30 bp, Homo sapiens; identical to SEQ ID NO: 25026
  chr11:6662309-6662339
  hypo

SEQ ID NO: 167930 - DNA, 90 bp, Homo sapiens
  chr11:6730929-6731019
  hypo
aaataaatctgataatcgtacaaacttagaactagaaagactggtctaatatgtttacagagtgaggattttgaacgcaggtgtctcccc

SEQ ID NO: 167931 - DNA, 712 bp, Homo sapiens; identical to SEQ ID NO: 120246
  chr11:6947536-6948248
  hypo

SEQ ID NO: 167932 - DNA, 31 bp, Homo sapiens; identical to SEQ ID NO: 7899
  chr11:7534832-7534863
  hypo

SEQ ID NO: 167933 - DNA, 31 bp, Homo sapiens
  chr11:7619001-7619032
  hypo
ccatcctgcctgggggcgggattggctgctc

SEQ ID NO: 167934 - DNA, 155 bp, Homo sapiens; identical to SEQ ID NO: 120255
  chr11:7694730-7694885
  hypo

SEQ ID NO: 167935 - DNA, 164 bp, Homo sapiens; identical to SEQ ID NO: 120256
  chr11:7695108-7695272
  hypo

SEQ ID NO: 167936 - DNA, 30 bp, Homo sapiens; identical to SEQ ID NO: 120257
  chr11:7695484-7695514
  hypo

SEQ ID NO: 167937 - DNA, 169 bp, Homo sapiens; identical to SEQ ID NO: 120258
  chr11:8040394-8040563
  hypo

SEQ ID NO: 167938 - DNA, 194 bp, Homo sapiens; identical to SEQ ID NO: 48114
  chr11:8040581-8040775
  hypo

SEQ ID NO: 167939 - DNA, 611 bp, Homo sapiens; identical to SEQ ID NO: 48115
  chr11:8040960-8041571
  hypo

SEQ ID NO: 167940 - DNA, 631 bp, Homo sapiens; identical to SEQ ID NO: 120261
  chr11:8102564-8103195
  hypo

SEQ ID NO: 167941 - DNA, 30 bp, Homo sapiens; identical to SEQ ID NO: 81653
  chr11:8104443-8104473
  hypo

SEQ ID NO: 167942 - DNA, 708 bp, Homo sapiens; identical to SEQ ID NO: 48117
  chr11:8190058-8190766
  hypo

SEQ ID NO: 167943 - DNA, 95 bp, Homo sapiens; identical to SEQ ID NO: 25032
  chr11:8254113-8254208
  hypo

SEQ ID NO: 167944 - DNA, 161 bp, Homo sapiens
  chr11:8255451-8255612
  hypo
ctttagaaaaaaatggctttgcgctccttcaggaaaggttttaaagcattacccagtaattactactcacccatgaaaacactgatatttcacaatggatgatgtttgcgccgacacgcacgcctgggcacacactcagatgcatgcgctgggcccagcag

SEQ ID NO: 167945 - DNA, 203 bp, Homo sapiens; identical to SEQ ID NO: 81657
  chr11:8269569-8269772
  hypo

SEQ ID NO: 167946 - DNA, 534 bp, Homo sapiens; identical to SEQ ID NO: 81658
  chr11:8336903-8337437
  hypo

SEQ ID NO: 167947 - DNA, 30 bp, Homo sapiens; identical to SEQ ID NO: 81659
  chr11:8337656-8337686
  hypo

SEQ ID NO: 167948 - DNA, 215 bp, Homo sapiens
  chr11:8358360-8358575
  hypo
tggctgtggggcccgcgggctgcaaggccagtgctctgcaggcagggccaggctgcctcttgcccacacctggccactaagccccgaggccggtaatgaggatctcctgcaccaccgtggctcagaggaggcctcctggcagcctggccttgttctcattgtcctgctccagcccaaatgcaccaggcccaggcctcaatcgtgatcaatgggcc

SEQ ID NO: 167949 - DNA, 30 bp, Homo sapiens; identical to SEQ ID NO: 25033
  chr11:8376473-8376503
  hypo

SEQ ID NO: 167950 - DNA, 749 bp, Homo sapiens; identical to SEQ ID NO: 48123
  chr11:8615282-8616031
  hypo

SEQ ID NO: 167951 - DNA, 167 bp, Homo sapiens; identical to SEQ ID NO: 25036
  chr11:8656270-8656437
  hypo

SEQ ID NO: 167952 - DNA, 30 bp, Homo sapiens; identical to SEQ ID NO: 25037
  chr11:8680502-8680532
  hypo

SEQ ID NO: 167953 - DNA, 30 bp, Homo sapiens; identical to SEQ ID NO: 25038
  chr11:8721006-8721036
  hypo

SEQ ID NO: 167954 - DNA, 31 bp, Homo sapiens; identical to SEQ ID NO: 81665
  chr11:8724437-8724468
  hypo

SEQ ID NO: 167955 - DNA, 170 bp, Homo sapiens; identical to SEQ ID NO: 81666
  chr11:8725355-8725525
  hypo

SEQ ID NO: 167956 - DNA, 32 bp, Homo sapiens; identical to SEQ ID NO: 81667
  chr11:8735204-8735236
  hypo

SEQ ID NO: 167957 - DNA, 42 bp, Homo sapiens; identical to SEQ ID NO: 81668
  chr11:8751525-8751567
  hypo

SEQ ID NO: 167958 - DNA, 367 bp, Homo sapiens; identical to SEQ ID NO: 81669
  chr11:8752346-8752713
  hypo

SEQ ID NO: 167959 - DNA, 31 bp, Homo sapiens; identical to SEQ ID NO: 81670
  chr11:8756389-8756420
  hypo

SEQ ID NO: 167960 - DNA, 180 bp, Homo sapiens; identical to SEQ ID NO: 81671
  chr11:8759789-8759969
  hypo

SEQ ID NO: 167961 - DNA, 36 bp, Homo sapiens; identical to SEQ ID NO: 81672
  chr11:8791119-8791155
  hypo

SEQ ID NO: 167962 - DNA, 18 bp, Homo sapiens
  chr11:8801353-8801371
  hypo
gcccggccaaggtttcca

SEQ ID NO: 167963 - DNA, 126 bp, Homo sapiens; identical to SEQ ID NO: 81674
  chr11:8829416-8829542
  hypo

SEQ ID NO: 167964 - DNA, 19 bp, Homo sapiens
  chr11:8955863-8955882
  hypo
gaaagacccatggccgggc

SEQ ID NO: 167965 - DNA, 31 bp, Homo sapiens; identical to SEQ ID NO: 81675
  chr11:8958013-8958044
  hypo

SEQ ID NO: 167966 - DNA, 30 bp, Homo sapiens; identical to SEQ ID NO: 81676
  chr11:8958834-8958864
  hypo

SEQ ID NO: 167967 - DNA, 31 bp, Homo sapiens; identical to SEQ ID NO: 25041
  chr11:8959627-8959658
  hypo

SEQ ID NO: 167968 - DNA, 17 bp, Homo sapiens
  chr11:9014178-9014195
  hypo
cgggcgcagtggctcac

SEQ ID NO: 167969 - DNA, 30 bp, Homo sapiens
  chr11:9020623-9020653
  hypo
acaggcatgagccagcgcgcccagcccgca

SEQ ID NO: 167970 - DNA, 1189 bp, Homo sapiens; identical to SEQ ID NO: 120278
  chr11:9025074-9026263
  hypo

SEQ ID NO: 167971 - DNA, 31 bp, Homo sapiens; identical to SEQ ID NO: 81680
  chr11:9049167-9049198
  hypo

SEQ ID NO: 167972 - DNA, 191 bp, Homo sapiens; identical to SEQ ID NO: 81681
  chr11:9074511-9074702
  hypo

SEQ ID NO: 167973 - DNA, 492 bp, Homo sapiens; identical to SEQ ID NO: 48130
  chr11:9112639-9113131
  hypo

SEQ ID NO: 167974 - DNA, 16 bp, Homo sapiens
  chr11:9206714-9206730
  hypo
gcgacagtgtgagact

SEQ ID NO: 167975 - DNA, 78 bp, Homo sapiens; identical to SEQ ID NO: 25045
  chr11:9328212-9328290
  hypo

SEQ ID NO: 167976 - DNA, 43 bp, Homo sapiens
  chr11:9343802-9343845
  hypo
atagaacttaatacacatttacgccagggtgtaccacgaacat

SEQ ID NO: 167977 - DNA, 21 bp, Homo sapiens
  chr11:9347579-9347600
  hypo
aatatacagccaggcacggtg

SEQ ID NO: 167978 - DNA, 30 bp, Homo sapiens
  chr11:9403227-9403257
  hypo
agtagcctgagcctcgggttcttcatttgt

SEQ ID NO: 167979 - DNA, 241 bp, Homo sapiens; identical to SEQ ID NO: 81686
  chr11:9405262-9405503
  hypo

SEQ ID NO: 167980 - DNA, 24 bp, Homo sapiens
  chr11:9405802-9405826
  hypo
caccgcgcccggcagtttaaatat

SEQ ID NO: 167981 - DNA, 26 bp, Homo sapiens
  chr11:9414005-9414031
  hypo
tgcccggcttgtcaaatgctttagta

SEQ ID NO: 167982 - DNA, 37 bp, Homo sapiens; identical to SEQ ID NO: 25047
  chr11:9418900-9418937
  hypo

SEQ ID NO: 167983 - DNA, 37 bp, Homo sapiens; identical to SEQ ID NO: 25048
  chr11:9422431-9422468
  hypo

SEQ ID NO: 167984 - DNA, 30 bp, Homo sapiens; identical to SEQ ID NO: 81691
  chr11:9448802-9448832
  hypo

SEQ ID NO: 167985 - DNA, 42 bp, Homo sapiens; identical to SEQ ID NO: 25049
  chr11:9531939-9531981
  hypo

SEQ ID NO: 167986 - DNA, 42 bp, Homo sapiens; identical to SEQ ID NO: 81693
  chr11:9540961-9541003
  hypo

SEQ ID NO: 167987 - DNA, 94 bp, Homo sapiens; identical to SEQ ID NO: 81694
  chr11:9548318-9548412
  hypo

SEQ ID NO: 167988 - DNA, 152 bp, Homo sapiens; identical to SEQ ID NO: 81695
  chr11:9552470-9552622
  hypo

SEQ ID NO: 167989 - DNA, 324 bp, Homo sapiens; identical to SEQ ID NO: 81696
  chr11:9554671-9554995
  hypo

SEQ ID NO: 167990 - DNA, 121 bp, Homo sapiens; identical to SEQ ID NO: 81697
  chr11:9567889-9568010
  hypo

SEQ ID NO: 167991 - DNA, 37 bp, Homo sapiens
  chr11:9593562-9593599
  hypo
taaaaaggccaggcgcggtggctcacgcctgtaatcc

SEQ ID NO: 167992 - DNA, 872 bp, Homo sapiens; identical to SEQ ID NO: 120292
  chr11:9596146-9597018
  hypo

SEQ ID NO: 167993 - DNA, 50 bp, Homo sapiens; identical to SEQ ID NO: 81699
  chr11:9620657-9620707
  hypo

SEQ ID NO: 167994 - DNA, 31 bp, Homo sapiens; identical to SEQ ID NO: 81700
  chr11:9629900-9629931
  hypo

SEQ ID NO: 167995 - DNA, 17 bp, Homo sapiens
  chr11:9673131-9673148
  hypo
accgcacccggcctgtt

SEQ ID NO: 167996 - DNA, 823 bp, Homo sapiens; identical to SEQ ID NO: 120296
  chr11:9685218-9686041
  hypo

SEQ ID NO: 167997 - DNA, 18 bp, Homo sapiens
  chr11:9751051-9751069
  hypo
ttttttttttctgagacg

SEQ ID NO: 167998 - DNA, 36 bp, Homo sapiens; identical to SEQ ID NO: 25056
  chr11:9771062-9771098
  hypo

SEQ ID NO: 167999 - DNA, 18 bp, Homo sapiens
  chr11:9863100-9863118
  hypo
agagtcttgctctgtccg

SEQ ID NO: 168000 - DNA, 85 bp, Homo sapiens; identical to SEQ ID NO: 81705
  chr11:10004723-10004808
  hypo

SEQ ID NO: 168001 - DNA, 30 bp, Homo sapiens
  chr11:10177891-10177921
  hypo
agctgcccctcggcgcgaacagcctgggca

SEQ ID NO: 168002 - DNA, 30 bp, Homo sapiens
  chr11:10413927-10413957
  hypo
tccgttagacatccacgaaggtcaggtagg

SEQ ID NO: 168003 - DNA, 30 bp, Homo sapiens
  chr11:10475574-10475604
  hypo
tcttgatgtttgttcgaaagggaaataagg

SEQ ID NO: 168004 - DNA, 30 bp, Homo sapiens; identical to SEQ ID NO: 81706
  chr11:10508886-10508916
  hypo

SEQ ID NO: 168005 - DNA, 227 bp, Homo sapiens; identical to SEQ ID NO: 81707
  chr11:10509587-10509814
  hypo

SEQ ID NO: 168006 - DNA, 113 bp, Homo sapiens; identical to SEQ ID NO: 81708
  chr11:10512605-10512718
  hypo

SEQ ID NO: 168007 - DNA, 193 bp, Homo sapiens; identical to SEQ ID NO: 25058
  chr11:10519311-10519504
  hypo

SEQ ID NO: 168008 - DNA, 268 bp, Homo sapiens
  chr11:10522098-10522366
  hypo
cacacaccagggcacactccacgtgtacctgtacatccctgagataatggaagcataggacatgctatcacacatgcacggtcacttactgccacaccaacaatgtccacacgtgcatattttcgttcagcaaatcactgcatctggcatgcgataggcattgccctgggcactggacaaataacggggaacaaaacagactaaatccatgcatgcccttacaggcagaggctcctaccaatacgcacacagacgaggcacacgtggc

SEQ ID NO: 168009 - DNA, 30 bp, Homo sapiens
  chr11:10532113-10532143
  hypo
accgctgaaaccgatcgacatcattgctct

SEQ ID NO: 168010 - DNA, 22 bp, Homo sapiens
  chr11:10545661-10545683
  hypo
aaaaaaaaagaaaccactggcc

SEQ ID NO: 168011 - DNA, 26 bp, Homo sapiens
  chr11:10654909-10654935
  hypo
ctgcgcccggccgagaattatctttt

SEQ ID NO: 168012 - DNA, 30 bp, Homo sapiens; identical to SEQ ID NO: 81712
  chr11:10672610-10672640
  hypo

SEQ ID NO: 168013 - DNA, 194 bp, Homo sapiens; identical to SEQ ID NO: 25059
  chr11:10712068-10712262
  hypo

SEQ ID NO: 168014 - DNA, 30 bp, Homo sapiens
  chr11:10781763-10781793
  hypo
aaactggaaaaagctcgtctggcattcagc

SEQ ID NO: 168015 - DNA, 30 bp, Homo sapiens
  chr11:10786153-10786183
  hypo
ctataacgccatttccgttaccacgtcata

SEQ ID NO: 168016 - DNA, 35 bp, Homo sapiens; identical to SEQ ID NO: 81714
  chr11:10811102-10811137
  hypo

SEQ ID NO: 168017 - DNA, 24 bp, Homo sapiens
  chr11:10815861-10815885
  hypo
aaagtgacatttgaagctgggcgc

SEQ ID NO: 168018 - DNA, 152 bp, Homo sapiens; identical to SEQ ID NO: 81716
  chr11:10865157-10865309
  hypo

SEQ ID NO: 168019 - DNA, 30 bp, Homo sapiens
  chr11:10920492-10920522
  hypo
gttgaggccaatgcccgggtgcatgaccag

SEQ ID NO: 168020 - DNA, 30 bp, Homo sapiens; identical to SEQ ID NO: 25061
  chr11:11102824-11102854
  hypo

SEQ ID NO: 168021 - DNA, 30 bp, Homo sapiens
  chr11:11177515-11177545
  hypo
tactggttgacgccacggccgcagatgctg

SEQ ID NO: 168022 - DNA, 212 bp, Homo sapiens
  chr11:11177833-11178045
  hypo
ctcagctgagtctgtcgccagggattgctctcagatgccgagagccacctcgcccgtcacatccccttcccaggggctgtgcatccaatgtcgagtcagtgcgggggattagagggccggggtcctcgccctacctcagtgcatctctgcagggccgtaccagctcccaagcttccctgcaggattgcggaggtcttcgctgcttctgcatc

SEQ ID NO: 168023 - DNA, 31 bp, Homo sapiens; identical to SEQ ID NO: 81718
  chr11:11398889-11398920
  hypo

SEQ ID NO: 168024 - DNA, 30 bp, Homo sapiens
  chr11:11464668-11464698
  hypo
gtctgaggccgaagccgcagaactggagag

SEQ ID NO: 168025 - DNA, 207 bp, Homo sapiens; identical to SEQ ID NO: 81719
  chr11:11534253-11534460
  hypo

SEQ ID NO: 168026 - DNA, 30 bp, Homo sapiens
  chr11:11600219-11600249
  hypo
gtcaaggttgtgcgtcgcagcagccgggcc

SEQ ID NO: 168027 - DNA, 208 bp, Homo sapiens; identical to SEQ ID NO: 81720
  chr11:11601779-11601987
  hypo

SEQ ID NO: 168028 - DNA, 31 bp, Homo sapiens; identical to SEQ ID NO: 25063
  chr11:11614845-11614876
  hypo

SEQ ID NO: 168029 - DNA, 438 bp, Homo sapiens; identical to SEQ ID NO: 81722
  chr11:11833039-11833477
  hypo

SEQ ID NO: 168030 - DNA, 390 bp, Homo sapiens; identical to SEQ ID NO: 81723
  chr11:11862851-11863241
  hypo

SEQ ID NO: 168031 - DNA, 112 bp, Homo sapiens
  chr11:11960214-11960326
  hypo
tgggctcctttttggcgtaggcaataagtcgagtttttgttttcgtcatttttaagtgcggcaatgctgcatttagtgtctggtgacactagactagcgttccacatgcctt

SEQ ID NO: 168032 - DNA, 31 bp, Homo sapiens; identical to SEQ ID NO: 81724
  chr11:11990980-11991011
  hypo

SEQ ID NO: 168033 - DNA, 246 bp, Homo sapiens; identical to SEQ ID NO: 81725
  chr11:11991421-11991667
  hypo

SEQ ID NO: 168034 - DNA, 1143 bp, Homo sapiens; identical to SEQ ID NO: 120320
  chr11:12029917-12031060
  hypo

SEQ ID NO: 168035 - DNA, 169 bp, Homo sapiens; identical to SEQ ID NO: 25065
  chr11:12073850-12074019
  hypo

SEQ ID NO: 168036 - DNA, 31 bp, Homo sapiens; identical to SEQ ID NO: 25066
  chr11:12083039-12083070
  hypo

SEQ ID NO: 168037 - DNA, 31 bp, Homo sapiens; identical to SEQ ID NO: 81729
  chr11:12091296-12091327
  hypo

SEQ ID NO: 168038 - DNA, 44 bp, Homo sapiens; identical to SEQ ID NO: 81730
  chr11:12106315-12106359
  hypo

SEQ ID NO: 168039 - DNA, 30 bp, Homo sapiens
  chr11:12115169-12115199
  hypo
tggccggcgcatgagcgtttgcggtgtcat

SEQ ID NO: 168040 - DNA, 263 bp, Homo sapiens
  chr11:12115687-12115950
  hypo
tgagagtgtgagtaccgagaaagcatggcactgggcttgaaggatgaggagttcgccagacacagaggatgaggagagcagcacgtgagtaaagaaaacagagaaaggaactctctgtcatgttgtgggctggagggcagcattcacactggacaagtgcttcagaaagatccttctggcaggtagtgggcagaaaaatgagtgaagtcagagcgatcgactaggaatccactgaaagtggatttaaatgagaggtgatgaaa

SEQ ID NO: 168041 - DNA, 893 bp, Homo sapiens; identical to SEQ ID NO: 120321
  chr11:12131733-12132626
  hypo

SEQ ID NO: 168042 - DNA, 30 bp, Homo sapiens
  chr11:12142750-12142780
  hypo
ttcaccacctcgctgcgggctaagctcttc

SEQ ID NO: 168043 - DNA, 103 bp, Homo sapiens
  chr11:12145845-12145948
  hypo
cttgcgatctttgaccgactgactttgggaagagtgattgaagccgcccctagcctagtctctgtccttttgcttctctgacctaagacgcctttctgaagct

SEQ ID NO: 168044 - DNA, 87 bp, Homo sapiens
  chr11:12158739-12158826
  hypo
tggtaatgatgatgacgggcgggcagggctgccgcttctgcccaggtggccgcccttggagctcgccaggctcgcccggtgtgtggg

SEQ ID NO: 168045 - DNA, 150 bp, Homo sapiens
  chr11:12172360-12172510
  hypo
gagagttggttaaggcgaggatgagctaccctcaacttttatgtgaaaatgtatccatttctgcctcggtttggtttgggctacctagagcttgaggtggtaggagttatccccacgcagcttcccgggaactgacgcttattgagctca

SEQ ID NO: 168046 - DNA, 30 bp, Homo sapiens
  chr11:12180723-12180753
  hypo
ttttccactggagcccgaagacgaagttgt

SEQ ID NO: 168047 - DNA, 30 bp, Homo sapiens; identical to SEQ ID NO: 81734
  chr11:12181661-12181691
  hypo

SEQ ID NO: 168048 - DNA, 399 bp, Homo sapiens; identical to SEQ ID NO: 81735
  chr11:12181999-12182398
  hypo

SEQ ID NO: 168049 - DNA, 407 bp, Homo sapiens
  chr11:12183610-12184017
  hypo
cccctactttcacaggtgtgacgtttctccagatacttcatgctgttcacctgtgtcctcgccgcaccactgccgcacacgactcctgaaccatgggggaaaacgaggatgagaagcaggcccaggcggggcaggtttttgagaactttgtccaggcatccacgtgcaaaggtaccctccaggccttcaacattctcacacgacacctggacctagaccctctggaccacagaaacttttattccaagctcaagtccaaggtgaccacctggaaagccaaagccctgtggtacaaattggataagcgtggttcccacaaagagtataagcgagggaagtcgtgcacgaacaccaaggtaaggggaaaccctcctagtcttacctttgcagggcgtgtgggttgacat

SEQ ID NO: 168050 - DNA, 30 bp, Homo sapiens
  chr11:12184703-12184733
  hypo
catagacagcatcggcgaacataggctcac

SEQ ID NO: 168051 - DNA, 28 bp, Homo sapiens
  chr11:12186385-12186413
  hypo
caacaggtgtccttggctgggcgtcgcg

SEQ ID NO: 168052 - DNA, 134 bp, Homo sapiens; identical to SEQ ID NO: 81738
  chr11:12205860-12205994
  hypo

SEQ ID NO: 168053 - DNA, 428 bp, Homo sapiens; identical to SEQ ID NO: 25069
  chr11:12209617-12210045
  hypo

SEQ ID NO: 168054 - DNA, 42 bp, Homo sapiens; identical to SEQ ID NO: 25070
  chr11:12214007-12214049
  hypo

SEQ ID NO: 168055 - DNA, 100 bp, Homo sapiens
  chr11:12225813-12225913
  hypo
aggaccctgtggcttgcgcactgccattgaacttgcctacctgggagccaaagtggtcgtggtggagaagagggactccttctcccggaacaacgtgcta

SEQ ID NO: 168056 - DNA, 173 bp, Homo sapiens
  chr11:12230961-12231134
  hypo
tctcatagccaccacacggggggtataatcattctcttcccacctctctctgccaactcatctcatttctctgtcctggtagaaattggctggcgggcagaatttctccctacagaccattctctgtcggagtttgagtttgacgtcatcattggtgccgatggccgcaggaa

SEQ ID NO: 168057 - DNA, 31 bp, Homo sapiens; identical to SEQ ID NO: 81743
  chr11:12238924-12238955
  hypo

SEQ ID NO: 168058 - DNA, 288 bp, Homo sapiens; identical to SEQ ID NO: 81744
  chr11:12240001-12240289
  hypo

SEQ ID NO: 168059 - DNA, 281 bp, Homo sapiens; identical to SEQ ID NO: 81745
  chr11:12247646-12247927
  hypo

SEQ ID NO: 168060 - DNA, 345 bp, Homo sapiens; identical to SEQ ID NO: 25074
  chr11:12248493-12248838
  hypo

SEQ ID NO: 168061 - DNA, 132 bp, Homo sapiens
  chr11:12250136-12250268
  hypo
caagggagtttgaggcgctggcagaggcagagcagccaggaaagaagatgggaaggggaacaggcagttggaaagtcagagagggagtcgggaagcccacggaggagagcgcttctacgggatgggccctgg

SEQ ID NO: 168062 - DNA, 30 bp, Homo sapiens
  chr11:12251088-12251118
  hypo
cctttctccattcaccgcgtttctgccact

SEQ ID NO: 168063 - DNA, 55 bp, Homo sapiens; identical to SEQ ID NO: 25075
  chr11:12253011-12253066
  hypo

SEQ ID NO: 168064 - DNA, 31 bp, Homo sapiens; identical to SEQ ID NO: 81748
  chr11:12253366-12253397
  hypo

SEQ ID NO: 168065 - DNA, 30 bp, Homo sapiens
  chr11:12256334-12256364
  hypo
gtgtgttggggcacccgtagctagggttgt

SEQ ID NO: 168066 - DNA, 30 bp, Homo sapiens
  chr11:12256723-12256753
  hypo
cttacccatggggtacggaggaggtactaa

SEQ ID NO: 168067 - DNA, 30 bp, Homo sapiens; identical to SEQ ID NO: 7924
  chr11:12260402-12260432
  hypo

SEQ ID NO: 168068 - DNA, 119 bp, Homo sapiens; identical to SEQ ID NO: 81750
  chr11:12260725-12260844
  hypo

SEQ ID NO: 168069 - DNA, 139 bp, Homo sapiens; identical to SEQ ID NO: 81751
  chr11:12262548-12262687
  hypo

SEQ ID NO: 168070 - DNA, 209 bp, Homo sapiens
  chr11:12267672-12267881
  hypo
tgacttggtttccaccgggcattagatccttctaagagacggcagggagcagcctgctggaaacatgcagagctgctgggtaagacagagatgctgtcagccactaagcgtgtccccatcacatcagcatcacaccggctgaggccctgcctgctgctgtctctggctcttcaggcagccctcccctgaggactcggctccctatcagc

SEQ ID NO: 168071 - DNA, 219 bp, Homo sapiens
  chr11:12276132-12276351
  hypo
tgggtctgagtaccacgtttaccccatgcccctgctgagtgaagctgtgaatgccccagggctggggggcaggagaccagagtacagtctggaatcttgaatttatttgctaagcggcctcagatagaccgttcccttctctgggattcatgtacatatctgtgcaatgagaggctcaggaactttggaaggccttgcaccccacggtgaatgtaacag

SEQ ID NO: 168072 - DNA, 318 bp, Homo sapiens; identical to SEQ ID NO: 81752
  chr11:12276762-12277080
  hypo

SEQ ID NO: 168073 - DNA, 382 bp, Homo sapiens; identical to SEQ ID NO: 81753
  chr11:12278212-12278594
  hypo

SEQ ID NO: 168074 - DNA, 30 bp, Homo sapiens; identical to SEQ ID NO: 25080
  chr11:12279001-12279031
  hypo

SEQ ID NO: 168075 - DNA, 171 bp, Homo sapiens; identical to SEQ ID NO: 81755
  chr11:12279380-12279551
  hypo

SEQ ID NO: 168076 - DNA, 321 bp, Homo sapiens; identical to SEQ ID NO: 25082
  chr11:12281097-12281418
  hypo

SEQ ID NO: 168077 - DNA, 470 bp, Homo sapiens; identical to SEQ ID NO: 25083
  chr11:12283306-12283776
  hypo

SEQ ID NO: 168078 - DNA, 396 bp, Homo sapiens
  chr11:12283995-12284391
  hypo
tctctttccaatcttacgccatggccatcagttcatttcagccttccagtgctacacccacttcttggctgacacacttctgctctaaggtgactggttttcttgccaattttcaaagagtggtactaacccccaacccgctttccgcaccccgtcctctccgccagcagtactggttgcactaactgtgagtgtcttgcatactgatggactcatttggtggcatggttggctaacagcatggcggggggtgttcagcttgagacccatgcctgtgttcatttcccatggagctggcagcctggtctaccccaagtgcatgccccgcctctcctctctcccttgggtctgcctgcgtgcatgcttctccagttgcgtctgcgaagctacctactt

SEQ ID NO: 168079 - DNA, 30 bp, Homo sapiens; identical to SEQ ID NO: 81759
  chr11:12285653-12285683
  hypo

SEQ ID NO: 168080 - DNA, 31 bp, Homo sapiens; identical to SEQ ID NO: 25085
  chr11:12294621-12294652
  hypo

SEQ ID NO: 168081 - DNA, 199 bp, Homo sapiens
  chr11:12296624-12296823
  hypo
gacttgaatgaagaacgaaaggacaagagcagtcaaagatgctggcgaggtgttggctggagcaacaggaagctgaagttgccatttactgagagggggaaggctatgggcaagacatgttgggtgggtggagaagatgaagaactctgttcggacttgttgagtctgatgtgtctgttagacacgtagacggagatgc

SEQ ID NO: 168082 - DNA, 30 bp, Homo sapiens
  chr11:12297732-12297762
  hypo
agatggggacagaagcggggttggaggaag

SEQ ID NO: 168083 - DNA, 30 bp, Homo sapiens
  chr11:12298050-12298080
  hypo
acctgtcccgagggccgcccactgcaagat

SEQ ID NO: 168084 - DNA, 363 bp, Homo sapiens; identical to SEQ ID NO: 81761
  chr11:12298407-12298770
  hypo

SEQ ID NO: 168085 - DNA, 30 bp, Homo sapiens; identical to SEQ ID NO: 25086
  chr11:12301270-12301300
  hypo

SEQ ID NO: 168086 - DNA, 192 bp, Homo sapiens; identical to SEQ ID NO: 81763
  chr11:12315586-12315778
  hypo

SEQ ID NO: 168087 - DNA, 31 bp, Homo sapiens; identical to SEQ ID NO: 81764
  chr11:12366726-12366757
  hypo

SEQ ID NO: 168088 - DNA, 30 bp, Homo sapiens
  chr11:12455597-12455627
  hypo
ctcaggtctgagcaccgcgagcactatgtt

SEQ ID NO: 168089 - DNA, 27 bp, Homo sapiens
  chr11:12501480-12501507
  hypo
tatattgaggctgggcgcggtggctca

SEQ ID NO: 168090 - DNA, 34 bp, Homo sapiens; identical to SEQ ID NO: 81766
  chr11:12554119-12554153
  hypo

SEQ ID NO: 168091 - DNA, 1423 bp, Homo sapiens; identical to SEQ ID NO: 48167
  chr11:12695572-12696995
  hypo

SEQ ID NO: 168092 - DNA, 30 bp, Homo sapiens
  chr11:12745849-12745879
  hypo
ataaagtagaatgatcgaggctcgatttca

SEQ ID NO: 168093 - DNA, 140 bp, Homo sapiens; identical to SEQ ID NO: 81768
  chr11:12769803-12769943
  hypo

SEQ ID NO: 168094 - DNA, 31 bp, Homo sapiens; identical to SEQ ID NO: 81769
  chr11:12794317-12794348
  hypo

SEQ ID NO: 168095 - DNA, 216 bp, Homo sapiens; identical to SEQ ID NO: 25091
  chr11:12823850-12824066
  hypo

SEQ ID NO: 168096 - DNA, 31 bp, Homo sapiens; identical to SEQ ID NO: 81771
  chr11:12838688-12838719
  hypo

SEQ ID NO: 168097 - DNA, 34 bp, Homo sapiens; identical to SEQ ID NO: 81772
  chr11:12841277-12841311
  hypo

SEQ ID NO: 168098 - DNA, 24 bp, Homo sapiens
  chr11:12943744-12943768
  hypo
tttttttttttttttttgagacgg

SEQ ID NO: 168099 - DNA, 23 bp, Homo sapiens
  chr11:12944007-12944030
  hypo
gcggttctctttatttgtagaca

SEQ ID NO: 168100 - DNA, 30 bp, Homo sapiens; identical to SEQ ID NO: 81775
  chr11:12944529-12944559
  hypo

SEQ ID NO: 168101 - DNA, 130 bp, Homo sapiens; identical to SEQ ID NO: 25092
  chr11:12944976-12945106
  hypo

SEQ ID NO: 168102 - DNA, 105 bp, Homo sapiens
  chr11:12990319-12990424
  hypo
atggaatgatgatcccgagtaatttataagctgactccactgacatgggctccagcaagtcctggcgggtgtttggtggtgcagggggagcggcccttgctggtt

SEQ ID NO: 168103 - DNA, 87 bp, Homo sapiens; identical to SEQ ID NO: 81777
  chr11:13114152-13114239
  hypo

SEQ ID NO: 168104 - DNA, 71 bp, Homo sapiens; identical to SEQ ID NO: 81778
  chr11:13185769-13185840
  hypo

SEQ ID NO: 168105 - DNA, 30 bp, Homo sapiens; identical to SEQ ID NO: 25094
  chr11:13237589-13237619
  hypo

SEQ ID NO: 168106 - DNA, 305 bp, Homo sapiens; identical to SEQ ID NO: 48172
  chr11:13298518-13298823
  hypo

SEQ ID NO: 168107 - DNA, 474 bp, Homo sapiens; identical to SEQ ID NO: 120335
  chr11:13300227-13300701
  hypo

SEQ ID NO: 168108 - DNA, 185 bp, Homo sapiens
  chr11:13334700-13334885
  hypo
tcccacctcaggcctcgctttcttcagctctgctgagcgtgcctctcctgggtcggctcccggttctcctccagctgctgagattccagcctccacagcctgctctgctggttctctgttctttgtccttagcttctggtttggcttggtccctttcacgtcatccttaacgtcctccctgggtg

SEQ ID NO: 168109 - DNA, 30 bp, Homo sapiens
  chr11:13350046-13350076
  hypo
gatgatcactggtgccgatggcccctccac

SEQ ID NO: 168110 - DNA, 520 bp, Homo sapiens
  chr11:13375540-13376060
  hypo
ccacagcacagggaccgagaagctgctcagcttctctaggcttttatgtcttcaccagaaaaatgagcgggtgggcttaaatttcctacaaaaactcttaaaataaatatgatgctctttccattctatcacatgcctgttctgggtccgggggtgtgagagatgcattagtgctgctgtaaaccagccccgggtctccccccccggccccccaccaccaaacccccaagcaccaacctgggttctccaccacttttgagagctcatcgaaataaacacacctttgtgcctcttgtaacaattccagatcatccaatggcagaccagagaatggacatttcttcaaccatcagtgatttcatgtccccgggccccaccgacctgctttccagctctcttggtaccagtggtgtggattgcaaccgcaaacggaaaggcagctccactgactaccagtaaggcctttggggcatgtcttcctcttgttaaacttggtgtcagttctcgggcatggaacatc

SEQ ID NO: 168111 - DNA, 30 bp, Homo sapiens; identical to SEQ ID NO: 25097
  chr11:13379014-13379044
  hypo

SEQ ID NO: 168112 - DNA, 27 bp, Homo sapiens
  chr11:13486979-13487006
  hypo
agaaaattaatcggccgggttcggagg

SEQ ID NO: 168113 - DNA, 1268 bp, Homo sapiens; identical to SEQ ID NO: 120339
  chr11:13689449-13690717
  hypo

SEQ ID NO: 168114 - DNA, 34 bp, Homo sapiens
  chr11:13700079-13700113
  hypo
gggttacaggcatggccacgaaggtcatgctttc

SEQ ID NO: 168115 - DNA, 30 bp, Homo sapiens
  chr11:13711001-13711031
  hypo
ccacatgtgttttagcgatcgttccttcat

SEQ ID NO: 168116 - DNA, 30 bp, Homo sapiens
  chr11:13750156-13750186
  hypo
aggttgcggaatatacgttatggttttaat

SEQ ID NO: 168117 - DNA, 30 bp, Homo sapiens; identical to SEQ ID NO: 7935
  chr11:14086442-14086472
  hypo

SEQ ID NO: 168118 - DNA, 148 bp, Homo sapiens; identical to SEQ ID NO: 25101
  chr11:14498536-14498684
  hypo

SEQ ID NO: 168119 - DNA, 123 bp, Homo sapiens
  chr11:14520357-14520480
  hypo
attctcaaaataatatcgaagtttacctagatcattttttaagctaatttcagatggtggttctgaatccattggcacgttaattaacgtgtagcatacgttctcagccgccgtcatggtttc

SEQ ID NO: 168120 - DNA, 121 bp, Homo sapiens
  chr11:14542800-14542921
  hypo
tgagatcactatattattttaatacagtgggacctcgtcgctacaataataataagaataagaataagaataagaataataaaaaaaaaaggctgggcatgttggcatgggcctgtggtcc

SEQ ID NO: 168121 - DNA, 25 bp, Homo sapiens
  chr11:14561086-14561111
  hypo
ggagcttaagaacaggacccacggg

SEQ ID NO: 168122 - DNA, 81 bp, Homo sapiens; identical to SEQ ID NO: 81789
  chr11:14564351-14564432
  hypo

SEQ ID NO: 168123 - DNA, 46 bp, Homo sapiens; identical to SEQ ID NO: 81790
  chr11:14674975-14675021
  hypo

SEQ ID NO: 168124 - DNA, 252 bp, Homo sapiens; identical to SEQ ID NO: 7939
  chr11:15671675-15671927
  hypo

SEQ ID NO: 168125 - DNA, 31 bp, Homo sapiens; identical to SEQ ID NO: 81792
  chr11:15921681-15921712
  hypo

SEQ ID NO: 168126 - DNA, 64 bp, Homo sapiens; identical to SEQ ID NO: 25105
  chr11:15959966-15960030
  hypo

SEQ ID NO: 168127 - DNA, 38 bp, Homo sapiens; identical to SEQ ID NO: 25106
  chr11:15962974-15963012
  hypo

SEQ ID NO: 168128 - DNA, 43 bp, Homo sapiens; identical to SEQ ID NO: 81795
  chr11:16050845-16050888
  hypo

SEQ ID NO: 168129 - DNA, 43 bp, Homo sapiens; identical to SEQ ID NO: 81796
  chr11:16051187-16051230
  hypo

SEQ ID NO: 168130 - DNA, 30 bp, Homo sapiens; identical to SEQ ID NO: 81797
  chr11:16107917-16107947
  hypo

SEQ ID NO: 168131 - DNA, 38 bp, Homo sapiens
  chr11:16790661-16790699
  hypo
tgtgtgtaccttctataggtacgttacatttgccataa

SEQ ID NO: 168132 - DNA, 31 bp, Homo sapiens; identical to SEQ ID NO: 25107
  chr11:16828576-16828607
  hypo

SEQ ID NO: 168133 - DNA, 30 bp, Homo sapiens; identical to SEQ ID NO: 81799
  chr11:16838600-16838630
  hypo

SEQ ID NO: 168134 - DNA, 143 bp, Homo sapiens
  chr11:16847523-16847666
  hypo
cagggttgttacagggatttacgtaggtaatggcagtaaagagtttaaggctgcccttacgcagcaagtgctggctaaatgacagctcttgccactacattatcgtgctcgttataagcagcgatcctgagtctattactcac

SEQ ID NO: 168135 - DNA, 124 bp, Homo sapiens
  chr11:16863136-16863260
  hypo
tggccctgacccaagcgttcatgtcctcctgggtgtcggcactgaagtagtaggtcctcatgcctgactgctcggcctgagagcccgctgtggagctgttatagatgagcgctcgcatccccgt

SEQ ID NO: 168136 - DNA, 31 bp, Homo sapiens; identical to SEQ ID NO: 25108
  chr11:16877365-16877396
  hypo

SEQ ID NO: 168137 - DNA, 20 bp, Homo sapiens
  chr11:16880044-16880064
  hypo
ttttttttttttgagacgga

SEQ ID NO: 168138 - DNA, 30 bp, Homo sapiens; identical to SEQ ID NO: 25109
  chr11:16945408-16945438
  hypo

SEQ ID NO: 168139 - DNA, 1615 bp, Homo sapiens; identical to SEQ ID NO: 120361
  chr11:17034984-17036599
  hypo

SEQ ID NO: 168140 - DNA, 41 bp, Homo sapiens; identical to SEQ ID NO: 81804
  chr11:17037335-17037376
  hypo

SEQ ID NO: 168141 - DNA, 260 bp, Homo sapiens; identical to SEQ ID NO: 81805
  chr11:17100560-17100820
  hypo

SEQ ID NO: 168142 - DNA, 80 bp, Homo sapiens; identical to SEQ ID NO: 81806
  chr11:17101059-17101139
  hypo

SEQ ID NO: 168143 - DNA, 30 bp, Homo sapiens; identical to SEQ ID NO: 25112
  chr11:17278764-17278794
  hypo

SEQ ID NO: 168144 - DNA, 31 bp, Homo sapiens; identical to SEQ ID NO: 81808
  chr11:17285257-17285288
  hypo

SEQ ID NO: 168145 - DNA, 30 bp, Homo sapiens
  chr11:17414610-17414640
  hypo
tcaaggatggcaccccgcttcaggacgatc

SEQ ID NO: 168146 - DNA, 122 bp, Homo sapiens
  chr11:17430255-17430377
  hypo
tcggtacatctgaggcgtatttctcaatggctgggtttgcagagcaaattagtgcatcctgctcaagctggctggttactcacaaggactccacccacggcagcggccgtcatacactaagt

SEQ ID NO: 168147 - DNA, 30 bp, Homo sapiens
  chr11:17470993-17471023
  hypo
tgtgttacacgaccgcgtgagtcagtcagc

SEQ ID NO: 168148 - DNA, 669 bp, Homo sapiens; identical to SEQ ID NO: 120374
  chr11:17498077-17498746
  hypo

SEQ ID NO: 168149 - DNA, 30 bp, Homo sapiens
  chr11:17551405-17551435
  hypo
aacgcccccagtcatcgaggcagcattgag

SEQ ID NO: 168150 - DNA, 36 bp, Homo sapiens
  chr11:17566570-17566606
  hypo
attacaggcgcgggccaccgcgcccggccttctctg

SEQ ID NO: 168151 - DNA, 30 bp, Homo sapiens
  chr11:17653412-17653442
  hypo
tgctcgccctgccttcgcatggtgtccaac

SEQ ID NO: 168152 - DNA, 106 bp, Homo sapiens
  chr11:17653681-17653787
  hypo
cgtgcagcagccctgcgtggccctgactgtgtacgtggccatgtgccacaaatttcatgtgtgcatcgagtggcggcgctctgactactgccgtgagtttgcgggg

SEQ ID NO: 168153 - DNA, 361 bp, Homo sapiens; identical to SEQ ID NO: 120379
  chr11:17741528-17741889
  hypo

SEQ ID NO: 168154 - DNA, 531 bp, Homo sapiens; identical to SEQ ID NO: 120380
  chr11:17741952-17742483
  hypo

SEQ ID NO: 168155 - DNA, 539 bp, Homo sapiens; identical to SEQ ID NO: 120381
  chr11:17742745-17743284
  hypo

SEQ ID NO: 168156 - DNA, 30 bp, Homo sapiens; identical to SEQ ID NO: 81813
  chr11:17794463-17794493
  hypo

SEQ ID NO: 168157 - DNA, 159 bp, Homo sapiens
  chr11:17905735-17905894
  hypo
ctatggcaacgaggcgtacgtgcggaaacacatgatggccagggtggaaggggagtaacggggtttaggttggtacggtactgggttatgctctgtgccgcactgcgagcccttggcgggcacagccgccagggtgggagaagcgtaccagaagcagct

SEQ ID NO: 168158 - DNA, 30 bp, Homo sapiens; identical to SEQ ID NO: 25115
  chr11:18033384-18033414
  hypo

SEQ ID NO: 168159 - DNA, 30 bp, Homo sapiens
  chr11:18084854-18084884
  hypo
agaaaccacagttgccgtgggaacgctccc

SEQ ID NO: 168160 - DNA, 81 bp, Homo sapiens; identical to SEQ ID NO: 81816
  chr11:18100060-18100141
  hypo

SEQ ID NO: 168161 - DNA, 20 bp, Homo sapiens
  chr11:18100380-18100400
  hypo
tctcaaaaaaaaagaaaaaa

SEQ ID NO: 168162 - DNA, 30 bp, Homo sapiens; identical to SEQ ID NO: 81818
  chr11:18357572-18357602
  hypo

SEQ ID NO: 168163 - DNA, 33 bp, Homo sapiens
  chr11:18401402-18401435
  hypo
ctacctcatatgatccaccgcctcggtctccca

SEQ ID NO: 168164 - DNA, 31 bp, Homo sapiens; identical to SEQ ID NO: 25116
  chr11:18419901-18419932
  hypo

SEQ ID NO: 168165 - DNA, 156 bp, Homo sapiens
  chr11:18512367-18512523
  hypo
cagagagcagatttctctcttcgttggagtattcatgcctcgttctgtgactgccttcgtgactacagccatatcatcatagcgctcagcctgctcagtgagttggctttctgtaccagctcacttttatccagtcgttcccgtgggagggctgca

SEQ ID NO: 168166 - DNA, 20 bp, Homo sapiens
  chr11:18557638-18557658
  hypo
ccactgcactccagcctggt

SEQ ID NO: 168167 - DNA, 30 bp, Homo sapiens
  chr11:18597469-18597499
  hypo
agccagagtgatcgacggccttttcccatt

SEQ ID NO: 168168 - DNA, 56 bp, Homo sapiens; identical to SEQ ID NO: 120394
  chr11:18610407-18610463
  hypo

SEQ ID NO: 168169 - DNA, 205 bp, Homo sapiens; identical to SEQ ID NO: 48220
  chr11:18610539-18610744
  hypo

SEQ ID NO: 168170 - DNA, 30 bp, Homo sapiens; identical to SEQ ID NO: 25120
  chr11:18617191-18617221
  hypo

SEQ ID NO: 168171 - DNA, 159 bp, Homo sapiens; identical to SEQ ID NO: 81824
  chr11:18656774-18656933
  hypo

SEQ ID NO: 168172 - DNA, 99 bp, Homo sapiens
  chr11:18657232-18657331
  hypo
aaagctgctggctcttactctttgatggtttaatgctgcgaacgtaattcaaaatcaaagctgttggaactttaagttattttgcgccttaaaagaatg

SEQ ID NO: 168173 - DNA, 22 bp, Homo sapiens
  chr11:18690386-18690408
  hypo
tggctaataaacaagaaaagac

SEQ ID NO: 168174 - DNA, 30 bp, Homo sapiens; identical to SEQ ID NO: 120398
  chr11:18720142-18720172
  hypo

SEQ ID NO: 168175 - DNA, 31 bp, Homo sapiens; identical to SEQ ID NO: 7960
  chr11:18720185-18720216
  hypo

SEQ ID NO: 168176 - DNA, 230 bp, Homo sapiens
  chr11:18978175-18978405
  hypo
agatgggccacaggacgtacaggcagcgctcggtgctcatggcgcttagaaagctcaggcttgcaaggtaggaaaacatcatcacagggctgaggattttgaagatgggatggaggatattgatgaggcttaacggaaaacgtataatgtggcttctgagaaagaggaagtcggccatggacaggttgaagatgtagatggagaaggcgttcctgcgcatgcggaagccc

SEQ ID NO: 168177 - DNA, 37 bp, Homo sapiens
  chr11:19080252-19080289
  hypo
gtgagccaccgtgcccggccctgcacctgtattttta

SEQ ID NO: 168178 - DNA, 33 bp, Homo sapiens
  chr11:19140969-19141002
  hypo
tcttgcttgcccggtcatccccagccacaccag

SEQ ID NO: 168179 - DNA, 40 bp, Homo sapiens; identical to SEQ ID NO: 25122
  chr11:19238181-19238221
  hypo

SEQ ID NO: 168180 - DNA, 30 bp, Homo sapiens
  chr11:19240301-19240331
  hypo
ttggaagatcggagtcgcaaaccggacaat

SEQ ID NO: 168181 - DNA, 118 bp, Homo sapiens; identical to SEQ ID NO: 81830
  chr11:19240815-19240933
  hypo

SEQ ID NO: 168182 - DNA, 94 bp, Homo sapiens; identical to SEQ ID NO: 81831
  chr11:19247018-19247112
  hypo

SEQ ID NO: 168183 - DNA, 230 bp, Homo sapiens; identical to SEQ ID NO: 25123
  chr11:19256430-19256660
  hypo

SEQ ID NO: 168184 - DNA, 30 bp, Homo sapiens; identical to SEQ ID NO: 81833
  chr11:19259283-19259313
  hypo

SEQ ID NO: 168185 - DNA, 496 bp, Homo sapiens; identical to SEQ ID NO: 120411
  chr11:19366638-19367134
  hypo

SEQ ID NO: 168186 - DNA, 99 bp, Homo sapiens; identical to SEQ ID NO: 7968
  chr11:19367267-19367366
  hypo

SEQ ID NO: 168187 - DNA, 130 bp, Homo sapiens; identical to SEQ ID NO: 120413
  chr11:19367846-19367976
  hypo

SEQ ID NO: 168188 - DNA, 13 bp, Homo sapiens
  chr11:19601696-19601709
  hypo
ctaatttctcttt

SEQ ID NO: 168189 - DNA, 2022 bp, Homo sapiens; identical to SEQ ID NO: 120414
  chr11:19733694-19735716
  hypo

SEQ ID NO: 168190 - DNA, 110 bp, Homo sapiens; identical to SEQ ID NO: 81838
  chr11:19913973-19914083
  hypo

SEQ ID NO: 168191 - DNA, 30 bp, Homo sapiens
  chr11:20108815-20108845
  hypo
tttccccagaggaatcgggtggggttggct

SEQ ID NO: 168192 - DNA, 30 bp, Homo sapiens; identical to SEQ ID NO: 81839
  chr11:20147563-20147593
  hypo

SEQ ID NO: 168193 - DNA, 1008 bp, Homo sapiens; identical to SEQ ID NO: 48239
  chr11:20178093-20179101
  hypo

SEQ ID NO: 168194 - DNA, 312 bp, Homo sapiens; identical to SEQ ID NO: 48241
  chr11:20181724-20182036
  hypo

SEQ ID NO: 168195 - DNA, 30 bp, Homo sapiens
  chr11:20472204-20472234
  hypo
ataggtcaataccgacgtagagttgccggc

SEQ ID NO: 168196 - DNA, 484 bp, Homo sapiens; identical to SEQ ID NO: 120443
  chr11:20690393-20690877
  hypo

SEQ ID NO: 168197 - DNA, 103 bp, Homo sapiens; identical to SEQ ID NO: 7984
  chr11:20690982-20691085
  hypo

SEQ ID NO: 168198 - DNA, 258 bp, Homo sapiens; identical to SEQ ID NO: 7985
  chr11:20691121-20691379
  hypo

SEQ ID NO: 168199 - DNA, 184 bp, Homo sapiens; identical to SEQ ID NO: 7986
  chr11:20691431-20691615
  hypo

SEQ ID NO: 168200 - DNA, 30 bp, Homo sapiens
  chr11:23702378-23702408
  hypo
ctgtggggcagacgccggggacatgccccc

SEQ ID NO: 168201 - DNA, 30 bp, Homo sapiens
  chr11:23702740-23702770
  hypo
ctgtcctcacctcctcgctgccgactgcct

SEQ ID NO: 168202 - DNA, 30 bp, Homo sapiens
  chr11:27255739-27255769
  hypo
cagcacggtagctgacgcagtgcggtacac

SEQ ID NO: 168203 - DNA, 16 bp, Homo sapiens
  chr11:27322426-27322442
  hypo
aaaaaaataaattaaa

SEQ ID NO: 168204 - DNA, 98 bp, Homo sapiens; identical to SEQ ID NO: 81847
  chr11:27380959-27381057
  hypo

SEQ ID NO: 168205 - DNA, 37 bp, Homo sapiens; identical to SEQ ID NO: 81848
  chr11:27381176-27381213
  hypo

SEQ ID NO: 168206 - DNA, 30 bp, Homo sapiens
  chr11:27434973-27435003
  hypo
gttttcccttaagagcgtccgcagaaagaa

SEQ ID NO: 168207 - DNA, 30 bp, Homo sapiens
  chr11:27435409-27435439
  hypo
ttcttttaaaggaggcgacaccttcagtat

SEQ ID NO: 168208 - DNA, 98 bp, Homo sapiens
  chr11:27485358-27485456
  hypo
atgacagaaacatatttgaaatgtattaaattcatttaatgttcccttcttatgaactctgattaaattaagtaagaattccgcgtacacttcaactt

SEQ ID NO: 168209 - DNA, 100 bp, Homo sapiens; identical to SEQ ID NO: 81849
  chr11:27495266-27495366
  hypo

SEQ ID NO: 168210 - DNA, 35 bp, Homo sapiens; identical to SEQ ID NO: 81850
  chr11:27526852-27526887
  hypo

SEQ ID NO: 168211 - DNA, 28 bp, Homo sapiens
  chr11:27602484-27602512
  hypo
gatgttgttgagatggagtctcgctcta

SEQ ID NO: 168212 - DNA, 105 bp, Homo sapiens; identical to SEQ ID NO: 81851
  chr11:27678523-27678628
  hypo

SEQ ID NO: 168213 - DNA, 1149 bp, Homo sapiens; identical to SEQ ID NO: 48283
  chr11:27743202-27744351
  hypo

SEQ ID NO: 168214 - DNA, 30 bp, Homo sapiens; identical to SEQ ID NO: 81853
  chr11:29955980-29956010
  hypo

SEQ ID NO: 168215 - DNA, 30 bp, Homo sapiens; identical to SEQ ID NO: 8001
  chr11:30393948-30393978
  hypo

SEQ ID NO: 168216 - DNA, 338 bp, Homo sapiens; identical to SEQ ID NO: 81855
  chr11:30445727-30446065
  hypo

SEQ ID NO: 168217 - DNA, 1559 bp, Homo sapiens; identical to SEQ ID NO: 120500
  chr11:30606795-30608354
  hypo

SEQ ID NO: 168218 - DNA, 30 bp, Homo sapiens
  chr11:30734980-30735010
  hypo
agtgattttaccaatcgatttccctctcga

SEQ ID NO: 168219 - DNA, 30 bp, Homo sapiens; identical to SEQ ID NO: 81857
  chr11:31393770-31393800
  hypo

SEQ ID NO: 168220 - DNA, 30 bp, Homo sapiens
  chr11:31464204-31464234
  hypo
tggttctaaaatgaccgcaaagaaaacaaa

SEQ ID NO: 168221 - DNA, 30 bp, Homo sapiens
  chr11:31467323-31467353
  hypo
tgcagtggcacgagacggatggcatttttt

SEQ ID NO: 168222 - DNA, 162 bp, Homo sapiens; identical to SEQ ID NO: 81858
  chr11:31533739-31533901
  hypo

SEQ ID NO: 168223 - DNA, 84 bp, Homo sapiens
  chr11:31760146-31760230
  hypo
ggtggaatgcgcctatagtctcagcgccgggggaggtggaggtgggaggattgcttgagcctgagcctgcgggtcgaggtctca

SEQ ID NO: 168224 - DNA, 213 bp, Homo sapiens; identical to SEQ ID NO: 25138
  chr11:31808821-31809034
  hypo

SEQ ID NO: 168225 - DNA, 1548 bp, Homo sapiens; identical to SEQ ID NO: 48298
  chr11:31820460-31822008
  hypo

SEQ ID NO: 168226 - DNA, 2 bp, Homo sapiens
  chr11:32008879-32008881
  hypo
at

SEQ ID NO: 168227 - DNA, 126 bp, Homo sapiens; identical to SEQ ID NO: 48327
  chr11:32009000-32009126
  hypo

SEQ ID NO: 168228 - DNA, 30 bp, Homo sapiens
  chr11:32378587-32378617
  hypo
ctttggcactagagccggacaggggtttat

SEQ ID NO: 168229 - DNA, 1383 bp, Homo sapiens; identical to SEQ ID NO: 120550
  chr11:32455062-32456445
  hypo

SEQ ID NO: 168230 - DNA, 440 bp, Homo sapiens; identical to SEQ ID NO: 8035
  chr11:32456758-32457198
  hypo

SEQ ID NO: 168231 - DNA, 45 bp, Homo sapiens
  chr11:32535831-32535876
  hypo
tagaatatcaaaatttttggccgtgcgaggtggctcacgcctgta

SEQ ID NO: 168232 - DNA, 23 bp, Homo sapiens
  chr11:32559234-32559257
  hypo
ttttttttttagatggagtctcg

SEQ ID NO: 168233 - DNA, 30 bp, Homo sapiens
  chr11:32610230-32610260
  hypo
gctggtcaaatttcgcgaaggtgaacgccc

SEQ ID NO: 168234 - DNA, 97 bp, Homo sapiens
  chr11:32727119-32727216
  hypo
gcatgggatctgggccagtatcgcaagccgagtgcagcccgccaggtcaagtgaatggaacaagtccagcgggtgcgagcaaaactcaagcagaggc

SEQ ID NO: 168235 - DNA, 30 bp, Homo sapiens; identical to SEQ ID NO: 81864
  chr11:32816065-32816095
  hypo

SEQ ID NO: 168236 - DNA, 114 bp, Homo sapiens; identical to SEQ ID NO: 25142
  chr11:32851223-32851337
  hypo

SEQ ID NO: 168237 - DNA, 413 bp, Homo sapiens; identical to SEQ ID NO: 120559
  chr11:32851552-32851965
  hypo

SEQ ID NO: 168238 - DNA, 41 bp, Homo sapiens
  chr11:32907342-32907383
  hypo
aataggcaagccacacccctgtcgcacgtccttcgaggggg

SEQ ID NO: 168239 - DNA, 55 bp, Homo sapiens; identical to SEQ ID NO: 81868
  chr11:32912158-32912213
  hypo

SEQ ID NO: 168240 - DNA, 942 bp, Homo sapiens; identical to SEQ ID NO: 120561
  chr11:32915114-32916056
  hypo

SEQ ID NO: 168241 - DNA, 20 bp, Homo sapiens
  chr11:32935046-32935066
  hypo
tccttttaatactcagttgt

SEQ ID NO: 168242 - DNA, 42 bp, Homo sapiens
  chr11:33181223-33181265
  hypo
tggcaggatcacagagcgcagggaggtcgaagctatggtgag

SEQ ID NO: 168243 - DNA, 43 bp, Homo sapiens; identical to SEQ ID NO: 25146
  chr11:33183721-33183764
  hypo

SEQ ID NO: 168244 - DNA, 39 bp, Homo sapiens; identical to SEQ ID NO: 81872
  chr11:33202742-33202781
  hypo

SEQ ID NO: 168245 - DNA, 30 bp, Homo sapiens; identical to SEQ ID NO: 81873
  chr11:33262597-33262627
  hypo

SEQ ID NO: 168246 - DNA, 30 bp, Homo sapiens; identical to SEQ ID NO: 81874
  chr11:33276508-33276538
  hypo

SEQ ID NO: 168247 - DNA, 87 bp, Homo sapiens
  chr11:33277373-33277460
  hypo
gaaaacaactgtcattcgaaagtgttatttccagtggcctcagggcatactatcctttctcttttattttattttttgagacagagt

SEQ ID NO: 168248 - DNA, 30 bp, Homo sapiens
  chr11:33317024-33317054
  hypo
agcttatgttgcgtcgttatgaaaccttcg

SEQ ID NO: 168249 - DNA, 1122 bp, Homo sapiens; identical to SEQ ID NO: 120567
  chr11:33397372-33398494
  hypo

SEQ ID NO: 168250 - DNA, 30 bp, Homo sapiens
  chr11:33596300-33596330
  hypo
ctataccctgtacaacgggaagcctttgtt

SEQ ID NO: 168251 - DNA, 128 bp, Homo sapiens
  chr11:33667397-33667525
  hypo
tcagcctggcatccgcgggccacgcaggccagagccggcaccaagaggcctacggctcagcccagcacctgccctattcggaggtggtgaccagcgctccggggaccatgacgcggcccagggccggg

SEQ ID NO: 168252 - DNA, 30 bp, Homo sapiens; identical to SEQ ID NO: 81879
  chr11:33726709-33726739
  hypo

SEQ ID NO: 168253 - DNA, 30 bp, Homo sapiens; identical to SEQ ID NO: 48349
  chr11:33758142-33758172
  hypo

SEQ ID NO: 168254 - DNA, 30 bp, Homo sapiens; identical to SEQ ID NO: 120570
  chr11:33758207-33758237
  hypo

SEQ ID NO: 168255 - DNA, 93 bp, Homo sapiens
  chr11:33874006-33874099
  hypo
cgtgccctgttcactcggcccgccatgctcaagctcttcttgcgaggaacgcgtgggtgaacaagtgcaggatctggccggctgctttgggca

SEQ ID NO: 168256 - DNA, 30 bp, Homo sapiens; identical to SEQ ID NO: 48350
  chr11:33888571-33888601
  hypo

SEQ ID NO: 168257 - DNA, 1000 bp, Homo sapiens; identical to SEQ ID NO: 120574
  chr11:33890236-33891236
  hypo

SEQ ID NO: 168258 - DNA, 30 bp, Homo sapiens
  chr11:33928289-33928319
  hypo
gcttaatgcacatcacgcctgggtttagtt

SEQ ID NO: 168259 - DNA, 30 bp, Homo sapiens
  chr11:33947796-33947826
  hypo
agagcagcgacaagccgtcgcaccatgtct

SEQ ID NO: 168260 - DNA, 30 bp, Homo sapiens
  chr11:33950429-33950459
  hypo
acagaaatgtgtgtgcgtgtactctaaaat

SEQ ID NO: 168261 - DNA, 33 bp, Homo sapiens
  chr11:33993992-33994025
  hypo
aaaccaccggccaggcgtggtggctcatgtctg

SEQ ID NO: 168262 - DNA, 66 bp, Homo sapiens
  chr11:34097798-34097864
  hypo
agaagacagcacgtcgggagcagcttatgagagaagaagctgaacagaaacgtttaaaaactgtac

SEQ ID NO: 168263 - DNA, 43 bp, Homo sapiens; identical to SEQ ID NO: 81884
  chr11:34109546-34109589
  hypo

SEQ ID NO: 168264 - DNA, 31 bp, Homo sapiens; identical to SEQ ID NO: 81885
  chr11:34133735-34133766
  hypo

SEQ ID NO: 168265 - DNA, 30 bp, Homo sapiens; identical to SEQ ID NO: 81886
  chr11:34161034-34161064
  hypo

SEQ ID NO: 168266 - DNA, 30 bp, Homo sapiens; identical to SEQ ID NO: 81887
  chr11:34173898-34173928
  hypo

SEQ ID NO: 168267 - DNA, 31 bp, Homo sapiens; identical to SEQ ID NO: 81888
  chr11:34184136-34184167
  hypo

SEQ ID NO: 168268 - DNA, 31 bp, Homo sapiens; identical to SEQ ID NO: 25150
  chr11:34186712-34186743
  hypo

SEQ ID NO: 168269 - DNA, 62 bp, Homo sapiens
  chr11:34190349-34190411
  hypo
ggcagttggcggggccgcctccctggctgggaatcctcctctgtggccggcaacagcaaagg

SEQ ID NO: 168270 - DNA, 112 bp, Homo sapiens
  chr11:34190792-34190904
  hypo
ttgtccctgtccccacgcactccagacatataaagaggccaaataaaaccaggccggctcgcagatatcaggcatcatcatcatatcaacagcaatacgactacaataatca

SEQ ID NO: 168271 - DNA, 39 bp, Homo sapiens; identical to SEQ ID NO: 25151
  chr11:34192313-34192352
  hypo

SEQ ID NO: 168272 - DNA, 31 bp, Homo sapiens; identical to SEQ ID NO: 81891
  chr11:34206116-34206147
  hypo

SEQ ID NO: 168273 - DNA, 31 bp, Homo sapiens; identical to SEQ ID NO: 81892
  chr11:34219692-34219723
  hypo

SEQ ID NO: 168274 - DNA, 17 bp, Homo sapiens
  chr11:34242794-34242811
  hypo
ggcgtgagccaccacgc

SEQ ID NO: 168275 - DNA, 27 bp, Homo sapiens
  chr11:34258968-34258995
  hypo
cgtgagccactgcgcctggcctttcct

SEQ ID NO: 168276 - DNA, 35 bp, Homo sapiens
  chr11:34264828-34264863
  hypo
tatatattttagatggagtctcgctctgtcgccca

SEQ ID NO: 168277 - DNA, 394 bp, Homo sapiens
  chr11:34264982-34265376
  hypo
ctctggcaaatctcttaaccctactaaaccccacattcctcatccataaccctgcccctcctccaacaacagaaatcactgacactgcaagcacccttgctcctgacatcccacttgatatcacctttgatccgcaaggataatcctagaaaatatgtcctagtcttacgcgattttacagatttattatctatctgtgaaaatgggaacaacaatattgattctcttaactttcttgaagagtcaatgagatcatttacggaatgtgcttggcacagactcagtgaaagataaaagcttgaagcctatggttagacctaaggtcagccacccacccagacccaggaccaagccctgaatgtctagagcacggttcttcgcagacacaccccag

SEQ ID NO: 168278 - DNA, 76 bp, Homo sapiens; identical to SEQ ID NO: 81897
  chr11:34270688-34270764
  hypo

SEQ ID NO: 168279 - DNA, 31 bp, Homo sapiens; identical to SEQ ID NO: 25153
  chr11:34378939-34378970
  hypo

SEQ ID NO: 168280 - DNA, 102 bp, Homo sapiens; identical to SEQ ID NO: 81899
  chr11:34407510-34407612
  hypo

SEQ ID NO: 168281 - DNA, 30 bp, Homo sapiens; identical to SEQ ID NO: 81900
  chr11:34492969-34492999
  hypo

SEQ ID NO: 168282 - DNA, 201 bp, Homo sapiens; identical to SEQ ID NO: 25154
  chr11:34511229-34511430
  hypo

SEQ ID NO: 168283 - DNA, 575 bp, Homo sapiens
  chr11:34516980-34517555
  hypo
ccagccgaggcgctacgcgttcttgtcgtctcaagtttctcaggtcccctcaacaatcctatccagtaggtgtaattgggctattccacaaaaaaggaaatagaggctccccttaaaactcaaaggtcttccagagatctcttttaccaccgaagggtgggtggaggggcagttgatttattttatttaaaaattttcagaattttatatgcattaagatcaaagcgtcaatattgtgccagggtgcttgaggctgatgtcgtagcctctacctggcagataggaagagccagggagccggtgagaccgatgactcaggtcttgctcactggccactggctggagctggcttaccaggcccgtgggggctcttcagggcaggcaggggttcctggcagaacaaggggccattcctgagttcggcctgagctttcatctactgatttctggctttagtaaacctgaggggccttttggactttactggcgtcctgtgagagatgtttatgagccttgacatttttcagctgcgggccctgccctagatggccatcggtgtgcggccgtcggagggc

SEQ ID NO: 168284 - DNA, 93 bp, Homo sapiens
  chr11:34518319-34518412
  hypo
agtcactctctccactttacacgtgaggagattgccgttccggggactgacgggacccctgtaaggtcacgcggcctgtcagtaaaggagcta

SEQ ID NO: 168285 - DNA, 31 bp, Homo sapiens; identical to SEQ ID NO: 81904
  chr11:34527363-34527394
  hypo

SEQ ID NO: 168286 - DNA, 303 bp, Homo sapiens; identical to SEQ ID NO: 81905
  chr11:34535007-34535310
  hypo

SEQ ID NO: 168287 - DNA, 45 bp, Homo sapiens; identical to SEQ ID NO: 81906
  chr11:34592833-34592878
  hypo

SEQ ID NO: 168288 - DNA, 25 bp, Homo sapiens
  chr11:34625479-34625504
  hypo
atatcaggcagtgtggctgggcgca

SEQ ID NO: 168289 - DNA, 170 bp, Homo sapiens
  chr11:34631594-34631764
  hypo
gagcagtgcagtttgggaaggcgtgggtgcgcccatggagagggtgatcccctctctcttctttccaggcatgcgtaaggagcagtggcagagaattacggaacagaggatgctatcataggtgacctatgagccaggcacgtacatacgtgtcatctcaatgaaagctt

SEQ ID NO: 168290 - DNA, 43 bp, Homo sapiens; identical to SEQ ID NO: 81909
  chr11:34666541-34666584
  hypo

SEQ ID NO: 168291 - DNA, 157 bp, Homo sapiens; identical to SEQ ID NO: 81910
  chr11:34897218-34897375
  hypo

SEQ ID NO: 168292 - DNA, 30 bp, Homo sapiens; identical to SEQ ID NO: 25156
  chr11:34951009-34951039
  hypo

SEQ ID NO: 168293 - DNA, 104 bp, Homo sapiens
  chr11:35016466-35016570
  hypo
caacttggggatgtttggcatcgacgaatttactgcagtgattaaccctcctcaggcctgcattttggcggttgggaggttccgacctgtgctgaagctcactg

SEQ ID NO: 168294 - DNA, 78 bp, Homo sapiens
  chr11:35150807-35150885
  hypo
tggaagtgacctcagtgaactcggaagtcatgtattgaaaattgcagagtttggccgggcacggtggctcacgcctgt

SEQ ID NO: 168295 - DNA, 30 bp, Homo sapiens
  chr11:35158070-35158100
  hypo
tgtcttcattccagacgggcggctctttga

SEQ ID NO: 168296 - DNA, 201 bp, Homo sapiens; identical to SEQ ID NO: 120586
  chr11:35439896-35440097
  hypo

SEQ ID NO: 168297 - DNA, 237 bp, Homo sapiens; identical to SEQ ID NO: 48361
  chr11:35440137-35440374
  hypo

SEQ ID NO: 168298 - DNA, 415 bp, Homo sapiens; identical to SEQ ID NO: 8052
  chr11:35440469-35440884
  hypo

SEQ ID NO: 168299 - DNA, 910 bp, Homo sapiens; identical to SEQ ID NO: 120589
  chr11:35440936-35441846
  hypo

SEQ ID NO: 168300 - DNA, 38 bp, Homo sapiens; identical to SEQ ID NO: 25160
  chr11:35516159-35516197
  hypo

SEQ ID NO: 168301 - DNA, 1622 bp, Homo sapiens; identical to SEQ ID NO: 120592
  chr11:35639631-35641253
  hypo

SEQ ID NO: 168302 - DNA, 485 bp, Homo sapiens; identical to SEQ ID NO: 120593
  chr11:35641291-35641776
  hypo

SEQ ID NO: 168303 - DNA, 75 bp, Homo sapiens
  chr11:35661155-35661230
  hypo
cccctgccagtgaggcgccaaaaagaaggtcttacattctgaagacaggtggcttccccccgcccctccgcttca

SEQ ID NO: 168304 - DNA, 243 bp, Homo sapiens
  chr11:35684976-35685219
  hypo
gtcagaggaagagagcgagacagaggaagagagtgaggatgagagcgatgaggagagtgaagaagacagcgaggaagaaatggaggatgagcaagaaagcgaggccgaagaagacaaccaagaagaaggggaatccgaggcggagggagaaactgaggcagaaagtgaatttgacccagaaatagaaatggaagcagagagagtggccaagaggaagtgtccggaccatgggcttgatttgag

SEQ ID NO: 168305 - DNA, 30 bp, Homo sapiens; identical to SEQ ID NO: 81922
  chr11:35685818-35685848
  hypo

SEQ ID NO: 168306 - DNA, 30 bp, Homo sapiens
  chr11:36057740-36057770
  hypo
cgcctggcagtgtgacgggctgcctgactg

SEQ ID NO: 168307 - DNA, 39 bp, Homo sapiens; identical to SEQ ID NO: 25165
  chr11:36060519-36060558
  hypo

SEQ ID NO: 168308 - DNA, 38 bp, Homo sapiens; identical to SEQ ID NO: 25166
  chr11:36060797-36060835
  hypo

SEQ ID NO: 168309 - DNA, 317 bp, Homo sapiens; identical to SEQ ID NO: 81925
  chr11:36100375-36100692
  hypo

SEQ ID NO: 168310 - DNA, 121 bp, Homo sapiens; identical to SEQ ID NO: 81926
  chr11:36245104-36245225
  hypo

SEQ ID NO: 168311 - DNA, 50 bp, Homo sapiens; identical to SEQ ID NO: 81927
  chr11:36248991-36249041
  hypo

SEQ ID NO: 168312 - DNA, 208 bp, Homo sapiens; identical to SEQ ID NO: 81928
  chr11:36277914-36278122
  hypo

SEQ ID NO: 168313 - DNA, 43 bp, Homo sapiens; identical to SEQ ID NO: 81929
  chr11:36292454-36292497
  hypo

SEQ ID NO: 168314 - DNA, 30 bp, Homo sapiens
  chr11:36294308-36294338
  hypo
cattttccaaatggcgctagtcacagaatt

SEQ ID NO: 168315 - DNA, 31 bp, Homo sapiens; identical to SEQ ID NO: 25168
  chr11:36297993-36298024
  hypo

SEQ ID NO: 168316 - DNA, 30 bp, Homo sapiens
  chr11:36300131-36300161
  hypo
accagcctagtgaggcggtgcagagcctgg

SEQ ID NO: 168317 - DNA, 184 bp, Homo sapiens
  chr11:36300630-36300814
  hypo
gctacaggctcctttcgagaacctgaagctgtgcttactgaaccgtgacacaagataccggctcctgtggagtgagggtcttgaatccagggtggtaggattcatgtcctttcctctcaactggttgcctaggagggcaaagagaacaaacagctcctggccggctgtgcgggttcctcctggg

SEQ ID NO: 168318 - DNA, 43 bp, Homo sapiens
  chr11:36419755-36419798
  hypo
gtcctggctctcttcctgcctcgagcaccttggatgtgtttct

SEQ ID NO: 168319 - DNA, 191 bp, Homo sapiens; identical to SEQ ID NO: 81931
  chr11:36476160-36476351
  hypo

SEQ ID NO: 168320 - DNA, 30 bp, Homo sapiens; identical to SEQ ID NO: 81932
  chr11:36536828-36536858
  hypo

SEQ ID NO: 168321 - DNA, 17 bp, Homo sapiens
  chr11:36716024-36716041
  hypo
ccctgtgtctcttgggc

SEQ ID NO: 168322 - DNA, 38 bp, Homo sapiens; identical to SEQ ID NO: 81934
  chr11:36823632-36823670
  hypo

SEQ ID NO: 168323 - DNA, 120 bp, Homo sapiens
  chr11:37929403-37929523
  hypo
caggcaaccttgcaacggaggttcttcctcctccctgcactgctttctgcaaggactggccacgcacttcccgcagcacagttacaaacgcccatctgactctcccggtaaagggatgct

SEQ ID NO: 168324 - DNA, 30 bp, Homo sapiens
  chr11:37929923-37929953
  hypo
cacacattacagctgcgtggccggctctcc

SEQ ID NO: 168325 - DNA, 46 bp, Homo sapiens; identical to SEQ ID NO: 81935
  chr11:38195081-38195127
  hypo

SEQ ID NO: 168326 - DNA, 40 bp, Homo sapiens; identical to SEQ ID NO: 81936
  chr11:38358532-38358572
  hypo

SEQ ID NO: 168327 - DNA, 83 bp, Homo sapiens; identical to SEQ ID NO: 81937
  chr11:38525521-38525604
  hypo

SEQ ID NO: 168328 - DNA, 21 bp, Homo sapiens
  chr11:38526622-38526643
  hypo
tctttttttttttttttgaga

SEQ ID NO: 168329 - DNA, 26 bp, Homo sapiens
  chr11:38655870-38655896
  hypo
tttttttttgagatggagtctcgctg

SEQ ID NO: 168330 - DNA, 160 bp, Homo sapiens; identical to SEQ ID NO: 81940
  chr11:39766925-39767085
  hypo

SEQ ID NO: 168331 - DNA, 83 bp, Homo sapiens; identical to SEQ ID NO: 25171
  chr11:40039795-40039878
  hypo

SEQ ID NO: 168332 - DNA, 30 bp, Homo sapiens
  chr11:42222023-42222053
  hypo
cctgcgggagaggcgcggagctgtctatga

SEQ ID NO: 168333 - DNA, 20 bp, Homo sapiens
  chr11:43402088-43402108
  hypo
gtcaccgtgcccggccaaaa

SEQ ID NO: 168334 - DNA, 396 bp, Homo sapiens
  chr11:43543793-43544189
  hypo
gttcaaggccctgagagtgatcgtgtggatagacagtggcaacgacaacgtggacatcaaggctgccgcgagctcggaattgttgtgtgcaacatcccgtccggagccctggaagagacagccgactccaccgtctgcgacatcctcaatctgtaccggaggaacacgtgggtgtgccaggcactgcgggaagggacgtgggttcagagcatggagcaaatcctcgaggtggccttgggagtggtccgcatccgtgggtagacgctgtgggtctcatgagctttggtcgcacgaggcaggcagttgcatttcaagccaaggcctttggattcagcgtcatattttatgacccctacttgcaggatgggatagaacggtccctgggcattcaatggg

SEQ ID NO: 168335 - DNA, 67 bp, Homo sapiens; identical to SEQ ID NO: 48375
  chr11:43569007-43569074
  hypo

SEQ ID NO: 168336 - DNA, 504 bp, Homo sapiens; identical to SEQ ID NO: 120607
  chr11:43569128-43569632
  hypo

SEQ ID NO: 168337 - DNA, 1517 bp, Homo sapiens; identical to SEQ ID NO: 120609
  chr11:43599957-43601474
  hypo

SEQ ID NO: 168338 - DNA, 631 bp, Homo sapiens; identical to SEQ ID NO: 120611
  chr11:43602405-43603036
  hypo

SEQ ID NO: 168339 - DNA, 159 bp, Homo sapiens; identical to SEQ ID NO: 8068
  chr11:43603076-43603235
  hypo

SEQ ID NO: 168340 - DNA, 30 bp, Homo sapiens; identical to SEQ ID NO: 81949
  chr11:43761552-43761582
  hypo

SEQ ID NO: 168341 - DNA, 30 bp, Homo sapiens
  chr11:43944726-43944756
  hypo
gtaggccctgcagtgcgctgaatgctccag

SEQ ID NO: 168342 - DNA, 2558 bp, Homo sapiens; identical to SEQ ID NO: 120617
  chr11:43963645-43966203
  hypo

SEQ ID NO: 168343 - DNA, 31 bp, Homo sapiens; identical to SEQ ID NO: 81951
  chr11:44096836-44096867
  hypo

SEQ ID NO: 168344 - DNA, 30 bp, Homo sapiens; identical to SEQ ID NO: 25177
  chr11:44105474-44105504
  hypo

SEQ ID NO: 168345 - DNA, 30 bp, Homo sapiens; identical to SEQ ID NO: 25178
  chr11:44257653-44257683
  hypo

SEQ ID NO: 168346 - DNA, 562 bp, Homo sapiens; identical to SEQ ID NO: 8072
  chr11:44330877-44331439
  hypo

SEQ ID NO: 168347 - DNA, 299 bp, Homo sapiens; identical to SEQ ID NO: 8073
  chr11:44331482-44331781
  hypo

SEQ ID NO: 168348 - DNA, 30 bp, Homo sapiens
  chr11:44549237-44549267
  hypo
ttccgggttgttttgcgagtttttttctca

SEQ ID NO: 168349 - DNA, 30 bp, Homo sapiens
  chr11:44550540-44550570
  hypo
ctgaaatccgcaagccggccctgctgtgaa

SEQ ID NO: 168350 - DNA, 29 bp, Homo sapiens
  chr11:44551124-44551153
  hypo
acttcaggccaggcgcgggggctcacgcc

SEQ ID NO: 168351 - DNA, 30 bp, Homo sapiens
  chr11:44559583-44559613
  hypo
gacctgcagcctacccggatgtgctcatgc

SEQ ID NO: 168352 - DNA, 141 bp, Homo sapiens; identical to SEQ ID NO: 81956
  chr11:44594533-44594674
  hypo

SEQ ID NO: 168353 - DNA, 30 bp, Homo sapiens
  chr11:44598074-44598104
  hypo
cccacccgccatccacgcagagacggtcag

SEQ ID NO: 168354 - DNA, 167 bp, Homo sapiens; identical to SEQ ID NO: 81957
  chr11:44608907-44609074
  hypo

SEQ ID NO: 168355 - DNA, 230 bp, Homo sapiens; identical to SEQ ID NO: 25182
  chr11:44609385-44609615
  hypo

SEQ ID NO: 168356 - DNA, 30 bp, Homo sapiens
  chr11:44610518-44610548
  hypo
gcacctcaccaggaacggtggctcacgcct

SEQ ID NO: 168357 - DNA, 42 bp, Homo sapiens; identical to SEQ ID NO: 25183
  chr11:44611372-44611414
  hypo

SEQ ID NO: 168358 - DNA, 42 bp, Homo sapiens; identical to SEQ ID NO: 81960
  chr11:44611653-44611695
  hypo

SEQ ID NO: 168359 - DNA, 31 bp, Homo sapiens; identical to SEQ ID NO: 25185
  chr11:44616400-44616431
  hypo

SEQ ID NO: 168360 - DNA, 181 bp, Homo sapiens; identical to SEQ ID NO: 25186
  chr11:44621699-44621880
  hypo

SEQ ID NO: 168361 - DNA, 257 bp, Homo sapiens
  chr11:44625095-44625352
  hypo
ttggtcgggttgtaacggactcaagcatctgcatccctaagaggctcctctgatccacactactctccagccttctggagacgccagcaccctcgccctccaggtgcgtcccatgccctgggggtacagtgtacccatgctggtgagttagagatgacatgagctttaccctgtgtgatgggttgggtgtcttaggaaatgttggccaagtgcccctgcaggactcctgacctctacctcccggaatgggcctgtcc

SEQ ID NO: 168362 - DNA, 176 bp, Homo sapiens
  chr11:44637484-44637660
  hypo
gacggacggactgaccgactgaccaacagatagactgaccaggttcccagcctgtctcaatagtgatccaatgaccacctggctctcctttcttgtggtcccggatgctgcatgtgcccttggctgggacctgacatctctgatctgcaatcctgtgagggcgcaggacacagtgg

SEQ ID NO: 168363 - DNA, 486 bp, Homo sapiens
  chr11:44639740-44640226
  hypo
caactggacagacaacgctgagctcatgaatcgccctgaggtcacctacccctgttcctgcgaagtcaagggggaagaggacaacagcctttctgtgaggaagggcttctgcgaggcccccggcaacaggacccagagtggcaaccaccctgaggactggcctgtgtaccaggaggtgtgcggggggctgcggatcgggggcggggctccgagggcgttgggggccatctgggctactgctcagcaattccttcctgcatttagttccttcccttaattcatctgtcatttgtaccttcatctacttctttgttaatgtatttattcaaggaacaggcagagccctctgtaggggcttccgggctgggactggggggctctcggtggttctgcatggcggggtgggatggtgcagagcggggtgatgtgaccgcattctgcccttgcagggctgcatggagaaggtgcaggcgtggctgcaggaga

SEQ ID NO: 168364 - DNA, 520 bp, Homo sapiens; identical to SEQ ID NO: 25188
  chr11:44640524-44641044
  hypo

SEQ ID NO: 168365 - DNA, 207 bp, Homo sapiens; identical to SEQ ID NO: 81967
  chr11:44675158-44675365
  hypo

SEQ ID NO: 168366 - DNA, 1696 bp, Homo sapiens; identical to SEQ ID NO: 120634
  chr11:44748052-44749748
  hypo

SEQ ID NO: 168367 - DNA, 26 bp, Homo sapiens
  chr11:44794670-44794696
  hypo
tattaaaactcactggccaggcgcgg

SEQ ID NO: 168368 - DNA, 30 bp, Homo sapiens
  chr11:44902310-44902340
  hypo
caaggacctctgagccgcctccagccctga

SEQ ID NO: 168369 - DNA, 30 bp, Homo sapiens; identical to SEQ ID NO: 81969
  chr11:44940982-44941012
  hypo

SEQ ID NO: 168370 - DNA, 148 bp, Homo sapiens; identical to SEQ ID NO: 81970
  chr11:44941372-44941520
  hypo

SEQ ID NO: 168371 - DNA, 87 bp, Homo sapiens; identical to SEQ ID NO: 25190
  chr11:44944308-44944395
  hypo

SEQ ID NO: 168372 - DNA, 31 bp, Homo sapiens; identical to SEQ ID NO: 25191
  chr11:44968587-44968618
  hypo

SEQ ID NO: 168373 - DNA, 34 bp, Homo sapiens; identical to SEQ ID NO: 81973
  chr11:44993089-44993123
  hypo

SEQ ID NO: 168374 - DNA, 372 bp, Homo sapiens
  chr11:45011417-45011789
  hypo
caacgccggcaaccccgggcctctcctttcctgcgaggcccagccttcagcaaaggctgtgaagctgactgcagttgcctcggcagcagcctggtgctgaggtcaacactgtcatcttgctggagtatgggagtcggtgcaaacatggcttctcgtcagccaggaagacgcccagcctggcacaaccttcggttctgactcccatcacctcctgttgacagcgtctggctggcatcctaatcgctcattggacaaattgccagggcagcggtagacagctggcatgtgttaactcgctcagtcctcacagcgatcccatggggaaggcggttatcatccccgttattgtacggccagagaaacagtggcaca

SEQ ID NO: 168375 - DNA, 117 bp, Homo sapiens
  chr11:45167588-45167705
  hypo
cttgaagaacatgtgcgattcgtgactacaaaaccgcaaccccacataaagagttaatatttttaacgaaccccaagcccctcaccctcagccttcgcgggacgcctgcgtctcgca

SEQ ID NO: 168376 - DNA, 80 bp, Homo sapiens; identical to SEQ ID NO: 81975
  chr11:45195151-45195231
  hypo

SEQ ID NO: 168377 - DNA, 30 bp, Homo sapiens; identical to SEQ ID NO: 25192
  chr11:45204451-45204481
  hypo

SEQ ID NO: 168378 - DNA, 30 bp, Homo sapiens
  chr11:45215318-45215348
  hypo
ctgctggtcagctgccgttcctcatttcta

SEQ ID NO: 168379 - DNA, 30 bp, Homo sapiens
  chr11:45215699-45215729
  hypo
ggattcaatctgacacggatgccacctcag

SEQ ID NO: 168380 - DNA, 103 bp, Homo sapiens; identical to SEQ ID NO: 81977
  chr11:45230780-45230883
  hypo

SEQ ID NO: 168381 - DNA, 91 bp, Homo sapiens; identical to SEQ ID NO: 81978
  chr11:45234258-45234349
  hypo

SEQ ID NO: 168382 - DNA, 30 bp, Homo sapiens; identical to SEQ ID NO: 25193
  chr11:45234717-45234747
  hypo

SEQ ID NO: 168383 - DNA, 62 bp, Homo sapiens; identical to SEQ ID NO: 81980
  chr11:45248079-45248141
  hypo

SEQ ID NO: 168384 - DNA, 30 bp, Homo sapiens; identical to SEQ ID NO: 81981
  chr11:45254824-45254854
  hypo

SEQ ID NO: 168385 - DNA, 30 bp, Homo sapiens; identical to SEQ ID NO: 25194
  chr11:45256850-45256880
  hypo

SEQ ID NO: 168386 - DNA, 30 bp, Homo sapiens
  chr11:45338579-45338609
  hypo
gtgagccaccgcgcccggcttttttgagtc

SEQ ID NO: 168387 - DNA, 192 bp, Homo sapiens; identical to SEQ ID NO: 81983
  chr11:45417058-45417250
  hypo

SEQ ID NO: 168388 - DNA, 97 bp, Homo sapiens; identical to SEQ ID NO: 8079
  chr11:45684298-45684395
  hypo

SEQ ID NO: 168389 - DNA, 43 bp, Homo sapiens
  chr11:45773609-45773652
  hypo
ccagcaatcccatttctaagacgctgcctgcagaaatatttga

SEQ ID NO: 168390 - DNA, 30 bp, Homo sapiens; identical to SEQ ID NO: 81985
  chr11:45824637-45824667
  hypo

SEQ ID NO: 168391 - DNA, 233 bp, Homo sapiens; identical to SEQ ID NO: 48408
  chr11:45825484-45825717
  hypo

SEQ ID NO: 168392 - DNA, 21 bp, Homo sapiens
  chr11:45838622-45838643
  hypo
caagtacagtagctcacgcct

SEQ ID NO: 168393 - DNA, 81 bp, Homo sapiens; identical to SEQ ID NO: 81988
  chr11:45838882-45838963
  hypo

SEQ ID NO: 168394 - DNA, 30 bp, Homo sapiens; identical to SEQ ID NO: 25198
  chr11:45924176-45924206
  hypo

SEQ ID NO: 168395 - DNA, 30 bp, Homo sapiens; identical to SEQ ID NO: 81990
  chr11:45931700-45931730
  hypo

SEQ ID NO: 168396 - DNA, 196 bp, Homo sapiens; identical to SEQ ID NO: 25199
  chr11:45951098-45951294
  hypo

SEQ ID NO: 168397 - DNA, 500 bp, Homo sapiens; identical to SEQ ID NO: 81992
  chr11:45953588-45954088
  hypo

SEQ ID NO: 168398 - DNA, 190 bp, Homo sapiens; identical to SEQ ID NO: 81993
  chr11:45955788-45955978
  hypo

SEQ ID NO: 168399 - DNA, 158 bp, Homo sapiens; identical to SEQ ID NO: 25202
  chr11:45956741-45956899
  hypo

SEQ ID NO: 168400 - DNA, 30 bp, Homo sapiens; identical to SEQ ID NO: 81995
  chr11:45959585-45959615
  hypo

SEQ ID NO: 168401 - DNA, 30 bp, Homo sapiens
  chr11:45970025-45970055
  hypo
acactctggccttgccggcagcaggacaac

SEQ ID NO: 168402 - DNA, 16 bp, Homo sapiens
  chr11:46138502-46138518
  hypo
gcgagactccgtctca

SEQ ID NO: 168403 - DNA, 30 bp, Homo sapiens; identical to SEQ ID NO: 25203
  chr11:46152535-46152565
  hypo

SEQ ID NO: 168404 - DNA, 18 bp, Homo sapiens
  chr11:46245495-46245513
  hypo
gtaccttaagccgggcgc

SEQ ID NO: 168405 - DNA, 63 bp, Homo sapiens; identical to SEQ ID NO: 8082
  chr11:46264957-46265020
  hypo

SEQ ID NO: 168406 - DNA, 57 bp, Homo sapiens
  chr11:46275736-46275793
  hypo
gcccccagttcccagaaccctcgcaggctgcggcccggcctctgagccttgcaggag

SEQ ID NO: 168407 - DNA, 30 bp, Homo sapiens
  chr11:46281869-46281899
  hypo
gtgaatcagcaggtgcgtcggccgcgaggc

SEQ ID NO: 168408 - DNA, 33 bp, Homo sapiens
  chr11:46298482-46298515
  hypo
gttacaagctgaaaatcggctgggcatggtggc

SEQ ID NO: 168409 - DNA, 703 bp, Homo sapiens; identical to SEQ ID NO: 120658
  chr11:46299153-46299856
  hypo

SEQ ID NO: 168410 - DNA, 621 bp, Homo sapiens
  chr11:46337892-46338513
  hypo
gaccttacaagatggccgccacccagactgggacctgcctcatggtaggtgtggctccctccaccacagacccacaggaggagagttcttcccaaggctggctttttccagggttgggcagagctttaaggatcggtaacatcgtgggcagcgtcccagggtacaccatcctggcgcctggtgggctggttctagcagactccagactccttctccaagcccatggtgccttctgcctcacaccggtccccgactggttaacacagtgtagatgtgtaggtgactccagtggccccagctaggggacagctgggcaggttccttgaggaggcggcttccacaggccttgtgcagggaagggcttggggagactcagggaagaacggacatggttctttctggaacagatggcagtgaaaaggctgaggaaacccctggaaacccggaaggctcccagggcgtgtttcagacctcttccagtccctcttctatcttcttctggaaatggccagtctcttgccgcctggctcagcatgccccggccctccgagaccctcgagctgtcaggcagcagaaccaggctatgggcaggggtagtgtgggctccgtggctctcagcac

SEQ ID NO: 168411 - DNA, 31 bp, Homo sapiens; identical to SEQ ID NO: 82002
  chr11:46343982-46344013
  hypo

SEQ ID NO: 168412 - DNA, 42 bp, Homo sapiens; identical to SEQ ID NO: 82003
  chr11:46390758-46390800
  hypo

SEQ ID NO: 168413 - DNA, 624 bp, Homo sapiens; identical to SEQ ID NO: 82004
  chr11:46391519-46392143
  hypo

SEQ ID NO: 168414 - DNA, 206 bp, Homo sapiens; identical to SEQ ID NO: 120672
  chr11:46412033-46412239
  hypo

SEQ ID NO: 168415 - DNA, 308 bp, Homo sapiens; identical to SEQ ID NO: 120673
  chr11:46412276-46412584
  hypo

SEQ ID NO: 168416 - DNA, 810 bp, Homo sapiens; identical to SEQ ID NO: 120674
  chr11:46412964-46413774
  hypo

SEQ ID NO: 168417 - DNA, 20 bp, Homo sapiens
  chr11:46417129-46417149
  hypo
atatccttttcccacttgag

SEQ ID NO: 168418 - DNA, 19 bp, Homo sapiens
  chr11:46417388-46417407
  hypo
caggcgtgagccaccacgc

SEQ ID NO: 168419 - DNA, 30 bp, Homo sapiens; identical to SEQ ID NO: 25210
  chr11:46426274-46426304
  hypo

SEQ ID NO: 168420 - DNA, 33 bp, Homo sapiens
  chr11:46483753-46483786
  hypo
gtaaacaagtgagcacggcggtgtaagcacaca

SEQ ID NO: 168421 - DNA, 25 bp, Homo sapiens
  chr11:46493454-46493479
  hypo
cgtgagccaccgtgcctggccagga

SEQ ID NO: 168422 - DNA, 30 bp, Homo sapiens
  chr11:46496490-46496520
  hypo
cagcctgacaaagtccgcatatatgtataa

SEQ ID NO: 168423 - DNA, 43 bp, Homo sapiens; identical to SEQ ID NO: 82009
  chr11:46542428-46542471
  hypo

SEQ ID NO: 168424 - DNA, 30 bp, Homo sapiens; identical to SEQ ID NO: 82010
  chr11:46558166-46558196
  hypo

SEQ ID NO: 168425 - DNA, 334 bp, Homo sapiens; identical to SEQ ID NO: 48430
  chr11:46564031-46564365
  hypo

SEQ ID NO: 168426 - DNA, 30 bp, Homo sapiens; identical to SEQ ID NO: 120677
  chr11:46582128-46582158
  hypo

SEQ ID NO: 168427 - DNA, 35 bp, Homo sapiens; identical to SEQ ID NO: 25211
  chr11:46589408-46589443
  hypo

SEQ ID NO: 168428 - DNA, 181 bp, Homo sapiens; identical to SEQ ID NO: 25212
  chr11:46617387-46617568
  hypo

SEQ ID NO: 168429 - DNA, 30 bp, Homo sapiens; identical to SEQ ID NO: 82014
  chr11:46624852-46624882
  hypo

SEQ ID NO: 168430 - DNA, 91 bp, Homo sapiens
  chr11:46777022-46777113
  hypo
ctgggattacaggcgtgagccaccgcacctggccccatttaaatataaataactagtccttagggattcagtcattcggcaaatatttact

SEQ ID NO: 168431 - DNA, 181 bp, Homo sapiens; identical to SEQ ID NO: 25213
  chr11:46783058-46783239
  hypo

SEQ ID NO: 168432 - DNA, 33 bp, Homo sapiens; identical to SEQ ID NO: 25214
  chr11:46844004-46844037
  hypo

SEQ ID NO: 168433 - DNA, 25 bp, Homo sapiens
  chr11:46844514-46844539
  hypo
atcttcttttttttgagacagcgtc

SEQ ID NO: 168434 - DNA, 25 bp, Homo sapiens
  chr11:46844778-46844803
  hypo
caccgcacccacccctatgctatct

SEQ ID NO: 168435 - DNA, 183 bp, Homo sapiens; identical to SEQ ID NO: 120682
  chr11:46848280-46848463
  hypo

SEQ ID NO: 168436 - DNA, 21 bp, Homo sapiens
  chr11:46866488-46866509
  hypo
gccaccgcgcccagcctaaaa

SEQ ID NO: 168437 - DNA, 31 bp, Homo sapiens; identical to SEQ ID NO: 82020
  chr11:46898129-46898160
  hypo

SEQ ID NO: 168438 - DNA, 31 bp, Homo sapiens; identical to SEQ ID NO: 25215
  chr11:46907965-46907996
  hypo

SEQ ID NO: 168439 - DNA, 31 bp, Homo sapiens; identical to SEQ ID NO: 25216
  chr11:46911489-46911520
  hypo

SEQ ID NO: 168440 - DNA, 133 bp, Homo sapiens
  chr11:46916228-46916361
  hypo
cagaagacaagctcgcggcggtggtggaaatcaagggcaatggcattctccaggttgttaagcagcagtgtgtactcagagcggtgtggcagcacctgccggatgtcgatgcgattggcgaacagcagcacag

SEQ ID NO: 168441 - DNA, 139 bp, Homo sapiens; identical to SEQ ID NO: 82023
  chr11:46920034-46920173
  hypo

SEQ ID NO: 168442 - DNA, 30 bp, Homo sapiens
  chr11:46920478-46920508
  hypo
ctccacagtcatcgtcgccatcgcagtggt

SEQ ID NO: 168443 - DNA, 628 bp, Homo sapiens; identical to SEQ ID NO: 120684
  chr11:46938420-46939048
  hypo

SEQ ID NO: 168444 - DNA, 30 bp, Homo sapiens; identical to SEQ ID NO: 120685
  chr11:46939350-46939380
  hypo

SEQ ID NO: 168445 - DNA, 35 bp, Homo sapiens; identical to SEQ ID NO: 120686
  chr11:46939596-46939631
  hypo

SEQ ID NO: 168446 - DNA, 30 bp, Homo sapiens; identical to SEQ ID NO: 25217
  chr11:46957743-46957773
  hypo

SEQ ID NO: 168447 - DNA, 81 bp, Homo sapiens; identical to SEQ ID NO: 25218
  chr11:46959054-46959135
  hypo

SEQ ID NO: 168448 - DNA, 25 bp, Homo sapiens
  chr11:47029795-47029820
  hypo
gtgagccaccgcgcccagccaactc

SEQ ID NO: 168449 - DNA, 32 bp, Homo sapiens; identical to SEQ ID NO: 82027
  chr11:47081352-47081384
  hypo

SEQ ID NO: 168450 - DNA, 17 bp, Homo sapiens
  chr11:47132457-47132474
  hypo
tgagacagagtctagct

SEQ ID NO: 168451 - DNA, 187 bp, Homo sapiens; identical to SEQ ID NO: 82029
  chr11:47169577-47169764
  hypo

SEQ ID NO: 168452 - DNA, 30 bp, Homo sapiens; identical to SEQ ID NO: 82030
  chr11:47202079-47202109
  hypo

SEQ ID NO: 168453 - DNA, 58 bp, Homo sapiens
  chr11:47215891-47215949
  hypo
ccgcctcagcaggagacgccccaggagttgccattgtgtactccgggtttcagctctg

SEQ ID NO: 168454 - DNA, 17 bp, Homo sapiens
  chr11:47240496-47240513
  hypo
aaaagtgtttttttttt

SEQ ID NO: 168455 - DNA, 612 bp, Homo sapiens
  chr11:47264238-47264850
  hypo
gggcatgactagcaaggaggccggtgacagctcacctgtgtctgcaggaccgcttgccagctggcactcctgctgccaatccttgggcacgacgggctctgtgaggcgaaggaagtcctgcagtgggcagcggtgagggcagccaggcaggctgagcggccagggggccttgtcactctcgttccgaaagtacatctccactgagaaattcctgagggtcgacaggaggcaacatgggagctgctcagcctgcccatcatggggtccttgggctgccccgagccacctcccgagggcccccctccagaggacactgctagctccactcacccagaatcttcctggtacagttcaaatatgtggcaggaggcgtagggggcttgttcaccattgtagacatccagtgccatttgcagggcaaccagggtagtgtcgtgctgcgggggagaggggctgcccgtcagcattgttccccacacccgcaggaaccgaacagagaagaaatccagctccttgcctgacacagcacgctagggagcgcaggcactcaccgcagagtaaaccagcagcttggggagctgggaggtggtcgccattagggtcaggttcttc

SEQ ID NO: 168456 - DNA, 30 bp, Homo sapiens; identical to SEQ ID NO: 82033
  chr11:47296530-47296560
  hypo

SEQ ID NO: 168457 - DNA, 30 bp, Homo sapiens
  chr11:47317057-47317087
  hypo
agactctgtcatcggcgtgagtccagctgt

SEQ ID NO: 168458 - DNA, 30 bp, Homo sapiens
  chr11:47346146-47346176
  hypo
acgaggctccctgtcgttccatctgtaaga

SEQ ID NO: 168459 - DNA, 252 bp, Homo sapiens
  chr11:47348745-47348997
  hypo
agccagcctccctggcgccgctctggtctccacctggcctctgtgccagacaaaggggcaccgggcgtcgcaggcagactcacttgagggacagaggagtctagcgggacagctgtagccggaagctgggagccagcgctagggagtggtgtagtgggttctcaccctggggctttgagttcctgctgtgtttgtgcttcattcttttgtgcccctcatcgctgctatgaaaaccttcgttctccagcaggt

SEQ ID NO: 168460 - DNA, 459 bp, Homo sapiens; identical to SEQ ID NO: 82034
  chr11:47358889-47359348
  hypo

SEQ ID NO: 168461 - DNA, 30 bp, Homo sapiens; identical to SEQ ID NO: 82035
  chr11:47359943-47359973
  hypo

SEQ ID NO: 168462 - DNA, 81 bp, Homo sapiens
  chr11:47431264-47431345
  hypo
ctggggtgtcgcgggcggcagggcctcccctggcagccagagacacccagctgggccgggccgtgccgccggtggctgagg

SEQ ID NO: 168463 - DNA, 30 bp, Homo sapiens; identical to SEQ ID NO: 82036
  chr11:47436913-47436943
  hypo

SEQ ID NO: 168464 - DNA, 30 bp, Homo sapiens; identical to SEQ ID NO: 82037
  chr11:47439518-47439548
  hypo

SEQ ID NO: 168465 - DNA, 30 bp, Homo sapiens; identical to SEQ ID NO: 82038
  chr11:47440333-47440363
  hypo

SEQ ID NO: 168466 - DNA, 31 bp, Homo sapiens; identical to SEQ ID NO: 25221
  chr11:47440865-47440896
  hypo

SEQ ID NO: 168467 - DNA, 30 bp, Homo sapiens; identical to SEQ ID NO: 82040
  chr11:47445627-47445657
  hypo

SEQ ID NO: 168468 - DNA, 30 bp, Homo sapiens
  chr11:47464922-47464952
  hypo
gtcagctgatgacctcgcctcaactccacg

SEQ ID NO: 168469 - DNA, 181 bp, Homo sapiens; identical to SEQ ID NO: 82041
  chr11:47479674-47479855
  hypo

SEQ ID NO: 168470 - DNA, 159 bp, Homo sapiens
  chr11:47485989-47486148
  hypo
ttttgtcacaataaaaacaaacgacactgggtaaacaatggttgagctggtctcagatctagtgacgtgagagtatggagaggagtgctctttagaagttgcccgtcccccacaggcagcagcgccctgcaggagcccgctgaccaaccagttacaagt

SEQ ID NO: 168471 - DNA, 38 bp, Homo sapiens; identical to SEQ ID NO: 25222
  chr11:47506516-47506554
  hypo

SEQ ID NO: 168472 - DNA, 385 bp, Homo sapiens; identical to SEQ ID NO: 82044
  chr11:47599038-47599423
  hypo

SEQ ID NO: 168473 - DNA, 30 bp, Homo sapiens; identical to SEQ ID NO: 25224
  chr11:47608032-47608062
  hypo

SEQ ID NO: 168474 - DNA, 30 bp, Homo sapiens
  chr11:47612365-47612395
  hypo
gcctgggagggagacggaggggcgagagtg

SEQ ID NO: 168475 - DNA, 30 bp, Homo sapiens; identical to SEQ ID NO: 82046
  chr11:47753811-47753841
  hypo

SEQ ID NO: 168476 - DNA, 30 bp, Homo sapiens
  chr11:47776160-47776190
  hypo
aacatcattgtcatcgtcatcactgtcagc

SEQ ID NO: 168477 - DNA, 30 bp, Homo sapiens; identical to SEQ ID NO: 82047
  chr11:47777881-47777911
  hypo

SEQ ID NO: 168478 - DNA, 31 bp, Homo sapiens; identical to SEQ ID NO: 25225
  chr11:48001803-48001834
  hypo

SEQ ID NO: 168479 - DNA, 51 bp, Homo sapiens; identical to SEQ ID NO: 48450
  chr11:48002695-48002746
  hypo

SEQ ID NO: 168480 - DNA, 45 bp, Homo sapiens; identical to SEQ ID NO: 82050
  chr11:48008069-48008114
  hypo

SEQ ID NO: 168481 - DNA, 21 bp, Homo sapiens
  chr11:48015394-48015415
  hypo
ttttgagaggcagtctcgctc

SEQ ID NO: 168482 - DNA, 198 bp, Homo sapiens
  chr11:48061634-48061832
  hypo
ctggccgcttttgccttttcttgacattgccaatgcatcctgtccccgagcgtctctgagttttaagtctcagatttgttttctttggagacaaactgcaggtaggtgttacttctcaccgaagttcccagatagcacaggctttgctaaacaacacagcaccaggaactccatcatagagaccgcaggatgctgtgt

SEQ ID NO: 168483 - DNA, 75 bp, Homo sapiens; identical to SEQ ID NO: 82052
  chr11:48065753-48065828
  hypo

SEQ ID NO: 168484 - DNA, 24 bp, Homo sapiens
  chr11:48071241-48071265
  hypo
ggcgacaatagtgaaactctgtct

SEQ ID NO: 168485 - DNA, 90 bp, Homo sapiens
  chr11:48146568-48146658
  hypo
gcatgatgagtccctcgtgggacctgtggacccatcctccggccagcagtcccgagacacggaagtcctgcttgtcgggttagagcctgg

SEQ ID NO: 168486 - DNA, 30 bp, Homo sapiens; identical to SEQ ID NO: 8097
  chr11:48294280-48294310
  hypo

SEQ ID NO: 168487 - DNA, 32 bp, Homo sapiens; identical to SEQ ID NO: 82055
  chr11:48365006-48365038
  hypo

SEQ ID NO: 168488 - DNA, 30 bp, Homo sapiens; identical to SEQ ID NO: 8098
  chr11:48561464-48561494
  hypo

SEQ ID NO: 168489 - DNA, 30 bp, Homo sapiens
  chr11:49086439-49086469
  hypo
agcaagaccctgtttcgaaaagaaaacaaa

SEQ ID NO: 168490 - DNA, 51 bp, Homo sapiens
  chr11:49124075-49124126
  hypo
gacccggagggtgccgggtcccaggtctcctcacacggagcggcctaagcc

SEQ ID NO: 168491 - DNA, 82 bp, Homo sapiens; identical to SEQ ID NO: 82058
  chr11:49212564-49212646
  hypo

SEQ ID NO: 168492 - DNA, 99 bp, Homo sapiens; identical to SEQ ID NO: 82059
  chr11:50258374-50258473
  hypo

SEQ ID NO: 168493 - DNA, 26 bp, Homo sapiens
  chr11:55753725-55753751
  hypo
aagtacacattcaaggggtgacggac

SEQ ID NO: 168494 - DNA, 30 bp, Homo sapiens
  chr11:55919911-55919941
  hypo
ggattcgccagttcccgccatcccagtggc

SEQ ID NO: 168495 - DNA, 59 bp, Homo sapiens; identical to SEQ ID NO: 82061
  chr11:55940875-55940934
  hypo

SEQ ID NO: 168496 - DNA, 159 bp, Homo sapiens; identical to SEQ ID NO: 82062
  chr11:57010761-57010920
  hypo

SEQ ID NO: 168497 - DNA, 31 bp, Homo sapiens; identical to SEQ ID NO: 82063
  chr11:57058716-57058747
  hypo

SEQ ID NO: 168498 - DNA, 73 bp, Homo sapiens; identical to SEQ ID NO: 82064
  chr11:57069625-57069698
  hypo

SEQ ID NO: 168499 - DNA, 274 bp, Homo sapiens; identical to SEQ ID NO: 82065
  chr11:57071396-57071670
  hypo

SEQ ID NO: 168500 - DNA, 148 bp, Homo sapiens; identical to SEQ ID NO: 82066
  chr11:57072386-57072534
  hypo

SEQ ID NO: 168501 - DNA, 30 bp, Homo sapiens; identical to SEQ ID NO: 25229
  chr11:57105324-57105354
  hypo

SEQ ID NO: 168502 - DNA, 30 bp, Homo sapiens; identical to SEQ ID NO: 82068
  chr11:57106078-57106108
  hypo

SEQ ID NO: 168503 - DNA, 31 bp, Homo sapiens; identical to SEQ ID NO: 82069
  chr11:57115641-57115672
  hypo

SEQ ID NO: 168504 - DNA, 31 bp, Homo sapiens; identical to SEQ ID NO: 25230
  chr11:57116315-57116346
  hypo

SEQ ID NO: 168505 - DNA, 39 bp, Homo sapiens
  chr11:57134904-57134943
  hypo
caagttctggccggacgcggtggctcacccctataatcc

SEQ ID NO: 168506 - DNA, 30 bp, Homo sapiens
  chr11:57138014-57138044
  hypo
ccctgctgcttcagccgcctccaccctgac

SEQ ID NO: 168507 - DNA, 43 bp, Homo sapiens; identical to SEQ ID NO: 25231
  chr11:57152966-57153009
  hypo

SEQ ID NO: 168508 - DNA, 391 bp, Homo sapiens; identical to SEQ ID NO: 25232
  chr11:57182503-57182894
  hypo

SEQ ID NO: 168509 - DNA, 247 bp, Homo sapiens
  chr11:57188496-57188743
  hypo
gtgatgatggtcgaacggtgttggccaaataggttcccaatctggggatgataggactagcctggatcacttatttattcatgaaacagatacttcctgagcacccagcatgtggcagaccctccttatacccaaactcaccctccaccgctagagctcccacctcagcttgggccaaccccatctgaggcagccaattatagaaaagggtctctccttccctccaccttcccgccaccctgccgag

SEQ ID NO: 168510 - DNA, 30 bp, Homo sapiens
  chr11:57188955-57188985
  hypo
cccaattctagccagcgttccagcgtcctt

SEQ ID NO: 168511 - DNA, 282 bp, Homo sapiens
  chr11:57202847-57203129
  hypo
cacccaagatatttacataagcgaaatgagtgcatacgctcaccagaagtagtgtacaagaatatccatagcaactttattcataacagccagaacctggtaacagcccaaatgcccaccgataggaatacggataagcaaattgtcccgtagtcacacgacggaatactgcatcacaacaaaaagaaccaacctttcatacacacagtgtagattaatttcgcagatgtgatattgagcaaaataaaccagatgccaaaaagtacacaatgtatatatatt

SEQ ID NO: 168512 - DNA, 166 bp, Homo sapiens; identical to SEQ ID NO: 82074
  chr11:57206941-57207107
  hypo

SEQ ID NO: 168513 - DNA, 30 bp, Homo sapiens
  chr11:57216526-57216556
  hypo
caaccagagtccttccgatacatgattctg

SEQ ID NO: 168514 - DNA, 201 bp, Homo sapiens; identical to SEQ ID NO: 25233
  chr11:57235324-57235525
  hypo

SEQ ID NO: 168515 - DNA, 30 bp, Homo sapiens
  chr11:57240582-57240612
  hypo
tgacgccgatgatgacgatgatacccatcc

SEQ ID NO: 168516 - DNA, 541 bp, Homo sapiens; identical to SEQ ID NO: 8100
  chr11:57243624-57244165
  hypo

SEQ ID NO: 168517 - DNA, 30 bp, Homo sapiens
  chr11:57245131-57245161
  hypo
gctggaggtggtgtgcgctcccccgccatg

SEQ ID NO: 168518 - DNA, 175 bp, Homo sapiens
  chr11:57254650-57254825
  hypo
actgcaggcctgtcagcgtcccaaagtggttggatgggaacctgtccacgagacggggagtatcaggggtgtgtggccctctccagcccaggccagcacctctcctatcccctccccaccatggtccccgctggccaggcagggtggtgcttaagcgttcgggctctttgcatgg

SEQ ID NO: 168519 - DNA, 30 bp, Homo sapiens; identical to SEQ ID NO: 25235
  chr11:57308127-57308157
  hypo

SEQ ID NO: 168520 - DNA, 30 bp, Homo sapiens; identical to SEQ ID NO: 82079
  chr11:57319857-57319887
  hypo

SEQ ID NO: 168521 - DNA, 30 bp, Homo sapiens
  chr11:57327835-57327865
  hypo
ggacattggcatcatcgctggacaggttcc

SEQ ID NO: 168522 - DNA, 118 bp, Homo sapiens
  chr11:57373337-57373455
  hypo
aggagtgggctggaccgcgctccaccatgccgtattcactaagtgagcagatagaaccatagaaagcatgctcactctcaaatcgtgctcatggaaagaacgacgtgttcaggactca

SEQ ID NO: 168523 - DNA, 22 bp, Homo sapiens
  chr11:57409670-57409692
  hypo
aattgaggccgggtgcggtggc

SEQ ID NO: 168524 - DNA, 44 bp, Homo sapiens
  chr11:57423900-57423944
  hypo
aaatgtttactattattataaccggactcagaaactctgggttt

SEQ ID NO: 168525 - DNA, 52 bp, Homo sapiens; identical to SEQ ID NO: 48470
  chr11:57434927-57434979
  hypo

SEQ ID NO: 168526 - DNA, 40 bp, Homo sapiens
  chr11:57446668-57446708
  hypo
ttacgcccaggctgtcgtgaagtggcgcgatcttggctca

SEQ ID NO: 168527 - DNA, 30 bp, Homo sapiens; identical to SEQ ID NO: 82082
  chr11:57470956-57470986
  hypo

SEQ ID NO: 168528 - DNA, 76 bp, Homo sapiens; identical to SEQ ID NO: 82083
  chr11:57500992-57501068
  hypo

SEQ ID NO: 168529 - DNA, 30 bp, Homo sapiens; identical to SEQ ID NO: 82084
  chr11:57520319-57520349
  hypo

SEQ ID NO: 168530 - DNA, 30 bp, Homo sapiens; identical to SEQ ID NO: 82085
  chr11:57520653-57520683
  hypo

SEQ ID NO: 168531 - DNA, 29 bp, Homo sapiens
  chr11:57548700-57548729
  hypo
acctggccgagaagctgctattttaaaaa

SEQ ID NO: 168532 - DNA, 27 bp, Homo sapiens
  chr11:57550844-57550871
  hypo
gaagccatagaaaggccgggctcacgc

SEQ ID NO: 168533 - DNA, 122 bp, Homo sapiens; identical to SEQ ID NO: 25239
  chr11:57580246-57580368
  hypo

SEQ ID NO: 168534 - DNA, 19 bp, Homo sapiens
  chr11:57775182-57775201
  hypo
ctcaaaaaaaaaaaaaaaa

SEQ ID NO: 168535 - DNA, 19 bp, Homo sapiens
  chr11:57996698-57996717
  hypo
cggccgctttatttcttta

SEQ ID NO: 168536 - DNA, 30 bp, Homo sapiens; identical to SEQ ID NO: 25241
  chr11:58275195-58275225
  hypo

SEQ ID NO: 168537 - DNA, 30 bp, Homo sapiens; identical to SEQ ID NO: 25242
  chr11:58390073-58390103
  hypo

SEQ ID NO: 168538 - DNA, 27 bp, Homo sapiens
  chr11:58395624-58395651
  hypo
gcgcgcgtgtgtgactaatgtactgtt

SEQ ID NO: 168539 - DNA, 121 bp, Homo sapiens
  chr11:58437897-58438018
  hypo
agtagtatcaccctcctctctcccccactggatattacgaaccatatcacagggggttagacaccgctcgcgatatggggagtaatatcacccccctgtcccccctggatattatgaacca

SEQ ID NO: 168540 - DNA, 26 bp, Homo sapiens
  chr11:58438077-58438103
  hypo
cctggatattacgaaccatatcacgg

SEQ ID NO: 168541 - DNA, 30 bp, Homo sapiens
  chr11:58726786-58726816
  hypo
gtgatccaccctcctcgccctcagaaagtg

SEQ ID NO: 168542 - DNA, 31 bp, Homo sapiens; identical to SEQ ID NO: 82095
  chr11:58835156-58835187
  hypo

SEQ ID NO: 168543 - DNA, 62 bp, Homo sapiens; identical to SEQ ID NO: 82096
  chr11:58904854-58904916
  hypo

SEQ ID NO: 168544 - DNA, 30 bp, Homo sapiens; identical to SEQ ID NO: 82097
  chr11:58907364-58907394
  hypo

SEQ ID NO: 168545 - DNA, 43 bp, Homo sapiens; identical to SEQ ID NO: 82098
  chr11:58949203-58949246
  hypo

SEQ ID NO: 168546 - DNA, 31 bp, Homo sapiens; identical to SEQ ID NO: 82099
  chr11:58949531-58949562
  hypo

SEQ ID NO: 168547 - DNA, 30 bp, Homo sapiens
  chr11:58953419-58953449
  hypo
cgcagagaggctgtgcggctctcccaaagg

SEQ ID NO: 168548 - DNA, 30 bp, Homo sapiens; identical to SEQ ID NO: 82100
  chr11:58956702-58956732
  hypo

SEQ ID NO: 168549 - DNA, 43 bp, Homo sapiens; identical to SEQ ID NO: 82101
  chr11:59031093-59031136
  hypo

SEQ ID NO: 168550 - DNA, 31 bp, Homo sapiens; identical to SEQ ID NO: 82102
  chr11:59031571-59031602
  hypo

SEQ ID NO: 168551 - DNA, 102 bp, Homo sapiens; identical to SEQ ID NO: 82103
  chr11:59312645-59312747
  hypo

SEQ ID NO: 168552 - DNA, 44 bp, Homo sapiens
  chr11:59316334-59316378
  hypo
tacaggcgtgagccactgcgcccggcctaaaaaccaatttaaac

SEQ ID NO: 168553 - DNA, 31 bp, Homo sapiens; identical to SEQ ID NO: 25244
  chr11:59329209-59329240
  hypo

SEQ ID NO: 168554 - DNA, 177 bp, Homo sapiens; identical to SEQ ID NO: 25245
  chr11:59423037-59423214
  hypo

SEQ ID NO: 168555 - DNA, 31 bp, Homo sapiens; identical to SEQ ID NO: 82106
  chr11:59443884-59443915
  hypo

SEQ ID NO: 168556 - DNA, 211 bp, Homo sapiens; identical to SEQ ID NO: 120765
  chr11:59523105-59523316
  hypo

SEQ ID NO: 168557 - DNA, 273 bp, Homo sapiens
  chr11:59665528-59665801
  hypo
ctccttctaaaaaaaaaaaaagatttaaagttctaagatggctaagatgggcgcacgacgcgccagtggccactactccgcgggctgacggtggcggcgctggcagcgcggaacgcgggcgcctaagccatggcttcctcagggagagctgagctctgggcgctgaacccgctgcgcttgctgtggctcacgccggccgccgccttcctgctgaccctgctgttgcagcttctgccgctcggcctgctcctgggccgcgcattcttccaggac

SEQ ID NO: 168558 - DNA, 120 bp, Homo sapiens
  chr11:59807943-59808063
  hypo
agtcttgatgctcctcgctgtcttgatttggaccggtgctgagaacctccatggtaaataacaagttttagagaatgcttcctcgaaggagttaatcataatgatcgctttccatgcagg

SEQ ID NO: 168559 - DNA, 38 bp, Homo sapiens; identical to SEQ ID NO: 25248
  chr11:59809608-59809646
  hypo

SEQ ID NO: 168560 - DNA, 38 bp, Homo sapiens
  chr11:59834955-59834993
  hypo
gggataaggggcgtgagccaccgcgcccatcccataat

SEQ ID NO: 168561 - DNA, 24 bp, Homo sapiens
  chr11:60066953-60066977
  hypo
tggttttttgagacagagtttcgc

SEQ ID NO: 168562 - DNA, 41 bp, Homo sapiens; identical to SEQ ID NO: 82111
  chr11:60143548-60143589
  hypo

SEQ ID NO: 168563 - DNA, 30 bp, Homo sapiens; identical to SEQ ID NO: 25249
  chr11:60260922-60260952
  hypo

SEQ ID NO: 168564 - DNA, 368 bp, Homo sapiens; identical to SEQ ID NO: 25250
  chr11:60282697-60283065
  hypo

SEQ ID NO: 168565 - DNA, 30 bp, Homo sapiens; identical to SEQ ID NO: 82114
  chr11:60468413-60468443
  hypo

SEQ ID NO: 168566 - DNA, 30 bp, Homo sapiens; identical to SEQ ID NO: 82115
  chr11:60468706-60468736
  hypo

SEQ ID NO: 168567 - DNA, 322 bp, Homo sapiens; identical to SEQ ID NO: 25251
  chr11:60514865-60515187
  hypo

SEQ ID NO: 168568 - DNA, 31 bp, Homo sapiens; identical to SEQ ID NO: 82117
  chr11:60515940-60515971
  hypo

SEQ ID NO: 168569 - DNA, 895 bp, Homo sapiens
  chr11:60524469-60525364
  hypo
gacgtgatcgccttgaagttacgcttgaaggaggaaaactcatcaattttcggggaatcccggtaagggacagtcctgactcccgtcaggaggatgggacccacgcgtaaaatatcaggggttggattatcatgggtcaagaaatgaccaaagaacagaaagtgttttttaaaaacagtgcgacagctacttaaggctaaccagtgcactgcagagcctggagctctacacaacgctatgatcttaattcggcaggaatgcccttggtttcctgatcaaggaaccttagacttgagttatggagcaggtaggtcactgcctgaaaacaggatgtgagcaaggtcattttactgaggttattgttttgaccacctgggcgccggtacactcggtgttgtatcctctttatctgccagattgcagtgggtcagaccgcccgtctttgcctgaagggaattcaggaggtttaaaggagaaggaagaacaggagccaaccaggacagcgggaggcgggcggggggtcctctctctacttcattcccttctgtagggcataaggaggatatttttttctagtgatcatgaggacggaccggagccttttcctccccctatagaaaagccattgccctcttttcctccacccttaaagggacctgtattcgttggccccgttcaggcaatggcgcctcccatcccccttgaggagtctggaggccgcccaagagatggttcttggataagacctccagtcagtgaatatctatatgatcgggtggccgtgtcctcaacgccaactcctcgtcaaactttcttagtagaggggtgcctccaagagggacttaggaagggagactctgaggcgctttttggcgcattccctgttattgttcaa

SEQ ID NO: 168570 - DNA, 30 bp, Homo sapiens
  chr11:60568861-60568891
  hypo
tgcgtggtggaagcccgggcagggttagct

SEQ ID NO: 168571 - DNA, 30 bp, Homo sapiens; identical to SEQ ID NO: 25252
  chr11:60608619-60608649
  hypo

SEQ ID NO: 168572 - DNA, 30 bp, Homo sapiens; identical to SEQ ID NO: 82120
  chr11:60608936-60608966
  hypo

SEQ ID NO: 168573 - DNA, 43 bp, Homo sapiens; identical to SEQ ID NO: 82121
  chr11:60640962-60641005
  hypo

SEQ ID NO: 168574 - DNA, 270 bp, Homo sapiens
  chr11:60648546-60648816
  hypo
ggattatgttccagccgctttgtgtcaacagagccttaggtttactaatgcagcagagaaggcagtcagaccatgcctttattcgataggtgtcaagtgtcagggaccaccatgaccttggcgacatgtgtcaatacagttaaatctcaaggacaatgccagtgcaggcagagcacggaagatgcacggtagtcaacatttactgagtgcctcatctctacatgaaacagttcacttaattctcaagagccctggaacaaaaggcaacag

SEQ ID NO: 168575 - DNA, 34 bp, Homo sapiens; identical to SEQ ID NO: 82124
  chr11:60660675-60660709
  hypo

SEQ ID NO: 168576 - DNA, 94 bp, Homo sapiens
  chr11:60680208-60680302
  hypo
cgcaagtgaacaaggcgggaactggagtgcacaagcgctggaacaagccagccgtttttcagcaccagtgggatcacactccactcactcaaga

SEQ ID NO: 168577 - DNA, 34 bp, Homo sapiens; identical to SEQ ID NO: 82126
  chr11:60680361-60680395
  hypo

SEQ ID NO: 168578 - DNA, 231 bp, Homo sapiens; identical to SEQ ID NO: 25253
  chr11:60689400-60689631
  hypo

SEQ ID NO: 168579 - DNA, 50 bp, Homo sapiens; identical to SEQ ID NO: 8117
  chr11:60692120-60692170
  hypo

SEQ ID NO: 168580 - DNA, 133 bp, Homo sapiens; identical to SEQ ID NO: 82129
  chr11:60695103-60695236
  hypo

SEQ ID NO: 168581 - DNA, 160 bp, Homo sapiens; identical to SEQ ID NO: 82130
  chr11:60696095-60696255
  hypo

SEQ ID NO: 168582 - DNA, 165 bp, Homo sapiens; identical to SEQ ID NO: 82131
  chr11:60703903-60704068
  hypo

SEQ ID NO: 168583 - DNA, 221 bp, Homo sapiens
  chr11:60714068-60714289
  hypo
cacttggctgcccatcgggggcttggtgatgaagacgggggtggcaaagaggaagatgaaaaatgccaggcccacacagcccacagggatgctgtagcccagcaggaagctgatgttctgctgaataaacgccaccaccagcagcgacagcacagcacccaggttgatgctccagtaaaaccagttgaagaagcggcgggtggcgtcgcggccgagatcca

SEQ ID NO: 168584 - DNA, 30 bp, Homo sapiens
  chr11:60750230-60750260
  hypo
gaggaaagcgaggtgcgaagtggggaacga

SEQ ID NO: 168585 - DNA, 20 bp, Homo sapiens
  chr11:60752609-60752629
  hypo
ttttcgtatatgtaccgccg

SEQ ID NO: 168586 - DNA, 33 bp, Homo sapiens; identical to SEQ ID NO: 82133
  chr11:60754317-60754350
  hypo

SEQ ID NO: 168587 - DNA, 155 bp, Homo sapiens; identical to SEQ ID NO: 48499
  chr11:60775226-60775381
  hypo

SEQ ID NO: 168588 - DNA, 154 bp, Homo sapiens
  chr11:60850613-60850767
  hypo
aggacaacgcctgatcgagcggagggtatcctctcagcgggagaatcaggagccctgggtccctgttggttccttaacttgctgtgtgatcatgggcagggcgcttcacctctctgaaagatggggcaaatgtcatcttcgctgtcttcctcct

SEQ ID NO: 168589 - DNA, 30 bp, Homo sapiens
  chr11:60851201-60851231
  hypo
ttgattgcgcggggacggggcacctgtctg

SEQ ID NO: 168590 - DNA, 30 bp, Homo sapiens
  chr11:60872745-60872775
  hypo
cctgactggcctagccgatgcgactctgaa

SEQ ID NO: 168591 - DNA, 30 bp, Homo sapiens
  chr11:60875983-60876013
  hypo
gtcctttacgaccttcgtttccctaaagcc

SEQ ID NO: 168592 - DNA, 174 bp, Homo sapiens; identical to SEQ ID NO: 25256
  chr11:60880737-60880911
  hypo

SEQ ID NO: 168593 - DNA, 190 bp, Homo sapiens; identical to SEQ ID NO: 25257
  chr11:60897021-60897211
  hypo

SEQ ID NO: 168594 - DNA, 53 bp, Homo sapiens; identical to SEQ ID NO: 82137
  chr11:60897861-60897914
  hypo

SEQ ID NO: 168595 - DNA, 104 bp, Homo sapiens
  chr11:60920710-60920814
  hypo
tgaatgaggtctcatgagctatgatggttttataagtgtttgacagtttatcctacagacactgtctcacctgccgccattaagacgaacgcacttcaccttct

SEQ ID NO: 168596 - DNA, 33 bp, Homo sapiens; identical to SEQ ID NO: 82138
  chr11:60926975-60927008
  hypo

SEQ ID NO: 168597 - DNA, 153 bp, Homo sapiens
  chr11:60927367-60927520
  hypo
cgtctcaaaaaaaaaaaaaaaaaaaaaaaaaaatccaaacttggccacttactggctgtgtgacactagccaggttatctaacatctccgcaactcacttcatctgtaaaacgggatcatcacctatttggacatgttcgcaaaattcggtat

SEQ ID NO: 168598 - DNA, 30 bp, Homo sapiens; identical to SEQ ID NO: 82140
  chr11:61030494-61030524
  hypo

SEQ ID NO: 168599 - DNA, 154 bp, Homo sapiens; identical to SEQ ID NO: 82141
  chr11:61036508-61036662
  hypo

SEQ ID NO: 168600 - DNA, 31 bp, Homo sapiens
  chr11:61039291-61039322
  hypo
ggacagatgcctcatgcgcacaaacacacac

SEQ ID NO: 168601 - DNA, 30 bp, Homo sapiens
  chr11:61048677-61048707
  hypo
cagatggggccagcacggctttcgggaaag

SEQ ID NO: 168602 - DNA, 351 bp, Homo sapiens
  chr11:61049428-61049779
  hypo
acggagcccttcttccgcccatcccttagctcaaaacacttggggagtttctctgccatgttcttacagggtccatgcctgccccgaggtgcgggatgtgactcagacagctgggagcggggctgaaatctagtgcttgtcttgttaataggttcacacatcgagcaggtatttaatgcgagtatcagagactcagccccagcactatgcagcggtaattaattgctgcgtggtaggggtaagccccaatgagaagctcatctccaaaccttccaccctcccgtttttctttccgaaaaaagtctcaaaactcactgggctgctgaaggaaggcttcgggacaaataccta

SEQ ID NO: 168603 - DNA, 38 bp, Homo sapiens; identical to SEQ ID NO: 82143
  chr11:61056996-61057034
  hypo

SEQ ID NO: 168604 - DNA, 30 bp, Homo sapiens
  chr11:61058300-61058330
  hypo
tcatcgagaagcccacggggcacactcggg

SEQ ID NO: 168605 - DNA, 568 bp, Homo sapiens; identical to SEQ ID NO: 48500
  chr11:61062455-61063023
  hypo

SEQ ID NO: 168606 - DNA, 22 bp, Homo sapiens
  chr11:61063061-61063083
  hypo
cgctgagcagttctaggcctgc

SEQ ID NO: 168607 - DNA, 352 bp, Homo sapiens; identical to SEQ ID NO: 25263
  chr11:61076170-61076522
  hypo

SEQ ID NO: 168608 - DNA, 170 bp, Homo sapiens; identical to SEQ ID NO: 82147
  chr11:61094129-61094299
  hypo

SEQ ID NO: 168609 - DNA, 355 bp, Homo sapiens; identical to SEQ ID NO: 82148
  chr11:61106580-61106935
  hypo

SEQ ID NO: 168610 - DNA, 152 bp, Homo sapiens; identical to SEQ ID NO: 25265
  chr11:61108935-61109087
  hypo

SEQ ID NO: 168611 - DNA, 30 bp, Homo sapiens
  chr11:61109976-61110006
  hypo
ccctctggcacaggccgccctaaggccaag

SEQ ID NO: 168612 - DNA, 170 bp, Homo sapiens
  chr11:61110432-61110602
  hypo
ctgccacctaattgccggataccttgagcctctgtttgttttcttgtctgcaaattgggggtaataataatggtacctgctttataccgttgttttgaggattaagtgagattaaacatatgtaagacactcaacacagcgcccagcacctggcacgaactgagtaaatg

SEQ ID NO: 168613 - DNA, 54 bp, Homo sapiens; identical to SEQ ID NO: 82150
  chr11:61118454-61118508
  hypo

SEQ ID NO: 168614 - DNA, 44 bp, Homo sapiens; identical to SEQ ID NO: 25266
  chr11:61122608-61122652
  hypo

SEQ ID NO: 168615 - DNA, 30 bp, Homo sapiens
  chr11:61148495-61148525
  hypo
ggttataaaattgttcgtcaggaattatca

SEQ ID NO: 168616 - DNA, 31 bp, Homo sapiens; identical to SEQ ID NO: 8124
  chr11:61160872-61160903
  hypo

SEQ ID NO: 168617 - DNA, 121 bp, Homo sapiens; identical to SEQ ID NO: 82153
  chr11:61263502-61263623
  hypo

SEQ ID NO: 168618 - DNA, 692 bp, Homo sapiens; identical to SEQ ID NO: 48508
  chr11:61275811-61276503
  hypo

SEQ ID NO: 168619 - DNA, 584 bp, Homo sapiens; identical to SEQ ID NO: 8127
  chr11:61276535-61277119
  hypo

SEQ ID NO: 168620 - DNA, 493 bp, Homo sapiens
  chr11:61292551-61293044
  hypo
tccttcctaccgcagcgtccccttctctactgccacctccctcatccgagccgctggcacctcttgcctaggcagctgcaagtgtctccaaaccgccctccccgcatccacgctttctcctaccgtccattctcaatgcggcagccagagagaccttttaaaaatagaaattccatcatgatatgctcctgcttaaagcctttcaatggctcccagtgcacttagaataaaagccgggcaccctaccttggcttcaagtccttccacaatttggcccggctgtcctctccctgcttggcttgtgacctctcttcactcaatgactgggctccagccacatcggcctccttcctggcccttcaacaccccgactcctcccgcctcagggccgggcgcacactggccccatcatgacccccctcctggctactctcatccttcaggtctcagcattctttcctggcaccccagagagtgtcggatcccattatcc

SEQ ID NO: 168621 - DNA, 76 bp, Homo sapiens
  chr11:61302240-61302316
  hypo
ccacccagcgacacgcgggcgcccctcccagagggccatggcacacatggacatgtggacacgcacgcaccacata

SEQ ID NO: 168622 - DNA, 261 bp, Homo sapiens; identical to SEQ ID NO: 25271
  chr11:61305392-61305653
  hypo

SEQ ID NO: 168623 - DNA, 30 bp, Homo sapiens; identical to SEQ ID NO: 82159
  chr11:61310180-61310210
  hypo

SEQ ID NO: 168624 - DNA, 30 bp, Homo sapiens
  chr11:61313533-61313563
  hypo
ggctctgcaccgtccgccagcggcctctcc

SEQ ID NO: 168625 - DNA, 713 bp, Homo sapiens; identical to SEQ ID NO: 120795
  chr11:61347879-61348592
  hypo

SEQ ID NO: 168626 - DNA, 30 bp, Homo sapiens
  chr11:61364766-61364796
  hypo
gtcaggcttggaccgcgacctccatggcag

SEQ ID NO: 168627 - DNA, 30 bp, Homo sapiens
  chr11:61370866-61370896
  hypo
cacccgagcaaccatcggcgaacggctgat

SEQ ID NO: 168628 - DNA, 31 bp, Homo sapiens; identical to SEQ ID NO: 82162
  chr11:61416205-61416236
  hypo

SEQ ID NO: 168629 - DNA, 31 bp, Homo sapiens; identical to SEQ ID NO: 82163
  chr11:61423922-61423953
  hypo

SEQ ID NO: 168630 - DNA, 31 bp, Homo sapiens; identical to SEQ ID NO: 25272
  chr11:61458298-61458329
  hypo

SEQ ID NO: 168631 - DNA, 80 bp, Homo sapiens; identical to SEQ ID NO: 82165
  chr11:61464742-61464822
  hypo

SEQ ID NO: 168632 - DNA, 30 bp, Homo sapiens; identical to SEQ ID NO: 25273
  chr11:61467271-61467301
  hypo

SEQ ID NO: 168633 - DNA, 14 bp, Homo sapiens
  chr11:61467503-61467517
  hypo
tgccccagcagtgc

SEQ ID NO: 168634 - DNA, 1 bp, Homo sapiens
  chr11:61467601-61467602
  hypo
g

SEQ ID NO: 168635 - DNA, 31 bp, Homo sapiens; identical to SEQ ID NO: 82169
  chr11:61473668-61473699
  hypo

SEQ ID NO: 168636 - DNA, 51 bp, Homo sapiens; identical to SEQ ID NO: 25274
  chr11:61474396-61474447
  hypo

SEQ ID NO: 168637 - DNA, 53 bp, Homo sapiens
  chr11:61475155-61475208
  hypo
ctgtggaggccatgtcggggcggagtgcccaaagcaagcggggccatctggag

SEQ ID NO: 168638 - DNA, 121 bp, Homo sapiens; identical to SEQ ID NO: 82171
  chr11:61475742-61475863
  hypo

SEQ ID NO: 168639 - DNA, 45 bp, Homo sapiens; identical to SEQ ID NO: 82172
  chr11:61476224-61476269
  hypo

SEQ ID NO: 168640 - DNA, 199 bp, Homo sapiens
  chr11:61478511-61478710
  hypo
gccaccccctccaagtcgatgcctttgagagagtcgcgttcccgggagagtggggtaaagacgtgttagggcatgaggggactgaccaagaagaccaccggggcaggtagaaaggacgaaaaccacagacacccttccccacagacaggcaggagaaaacagcctggtgccacccagtgtggggcggtgtcggcctttg

SEQ ID NO: 168641 - DNA, 190 bp, Homo sapiens; identical to SEQ ID NO: 25277
  chr11:61479891-61480081
  hypo

SEQ ID NO: 168642 - DNA, 371 bp, Homo sapiens; identical to SEQ ID NO: 82175
  chr11:61488079-61488450
  hypo

SEQ ID NO: 168643 - DNA, 199 bp, Homo sapiens
  chr11:61490186-61490385
  hypo
gggtctgctaatggcccgctgcctctgcctttgctactgagctggctgaaagcccagcgataggaaaggccaggccggggttctaggcccttccctggcatgcaagtggcagccatccttcagccaggcctgctctccttgcagccatcctggtgatcgagttcatctacgccatcgtgggcatcgtctggctcactca

SEQ ID NO: 168644 - DNA, 188 bp, Homo sapiens
  chr11:61490854-61491042
  hypo
agagaggtgtccccagcgcccctacctaatgcctcccactgctgcccgcaggaatggttgtctgcaactgggtagtcatcctcagtgtgtgcatcactgtcctctgcgtcttcgaccccacgggccgcacctttgtcaagctgagagccaccaagaggaggcagcgtaacctgcggacctacaacctg

SEQ ID NO: 168645 - DNA, 36 bp, Homo sapiens; identical to SEQ ID NO: 82178
  chr11:61494079-61494115
  hypo

SEQ ID NO: 168646 - DNA, 214 bp, Homo sapiens
  chr11:61495639-61495853
  hypo
atcgcctacctctttgcggagttcttccgggaccttgacattgtgccatccgacatcattgctggcctggtgctgctccggcagcggcagcgggccaagcgcaacgccgtgctggacgaggtgagcaccaccagccccttctccaggtcacctctccacaccacccttctttcaggccccttccctgtggcccctgcagcggagggctcggctc

SEQ ID NO: 168647 - DNA, 321 bp, Homo sapiens
  chr11:61498683-61499004
  hypo
tgccaggggttgggtccgcaggctcccaccctggggaactgctgggccctgaggctgtaggcaggaagggcaggaggtgaccgccctctgcctcctctcttctagcaagagatgctccgctacaaagaggtctgctactacatgctctttgccctggctgcctacgggtggcccatgtacctgatgcggaagcccgcctgcggcctctgccaactggctcggtcctgctcgtgagtacccctgtcccatcccccagcgattgcacctctcctcccgggtggtgtgtgaggaagggctaccgggctgcgcctactgctttgc

SEQ ID NO: 168648 - DNA, 175 bp, Homo sapiens; identical to SEQ ID NO: 82181
  chr11:61502321-61502496
  hypo

SEQ ID NO: 168649 - DNA, 30 bp, Homo sapiens
  chr11:61508415-61508445
  hypo
tagggcaggagcactcgccgggctgtgggg

SEQ ID NO: 168650 - DNA, 144 bp, Homo sapiens
  chr11:61508686-61508830
  hypo
catggtgagccctaccgaggtggacctgactcctgagctcatcttccagcagcagccactccccacggggccgcccatgcccactggccttgccctggagctgccgactgcagaccaccgcaacagcagcgtcaggtgagcctt

SEQ ID NO: 168651 - DNA, 607 bp, Homo sapiens; identical to SEQ ID NO: 82183
  chr11:61511516-61512123
  hypo

SEQ ID NO: 168652 - DNA, 172 bp, Homo sapiens
  chr11:61514700-61514872
  hypo
gtctgtattgggttagaacttcgtttctcaaagttcacggtgctcatgactcactggggcgcttgctaaatgcaggtgcgggtttagtggtccggggtggggcccaggtatagatttcttacctgctcctgctcggctagtgccctggcccggggccacactttgagttgca

SEQ ID NO: 168653 - DNA, 520 bp, Homo sapiens; identical to SEQ ID NO: 48515
  chr11:61519847-61520367
  hypo

SEQ ID NO: 168654 - DNA, 459 bp, Homo sapiens; identical to SEQ ID NO: 25283
  chr11:61522482-61522941
  hypo

SEQ ID NO: 168655 - DNA, 100 bp, Homo sapiens; identical to SEQ ID NO: 82186
  chr11:61525592-61525692
  hypo

SEQ ID NO: 168656 - DNA, 30 bp, Homo sapiens; identical to SEQ ID NO: 25285
  chr11:61525907-61525937
  hypo

SEQ ID NO: 168657 - DNA, 31 bp, Homo sapiens; identical to SEQ ID NO: 82188
  chr11:61533319-61533350
  hypo

SEQ ID NO: 168658 - DNA, 412 bp, Homo sapiens; identical to SEQ ID NO: 82189
  chr11:61536685-61537097
  hypo

SEQ ID NO: 168659 - DNA, 30 bp, Homo sapiens; identical to SEQ ID NO: 48516
  chr11:61552664-61552694
  hypo

SEQ ID NO: 168660 - DNA, 31 bp, Homo sapiens; identical to SEQ ID NO: 82191
  chr11:61592290-61592321
  hypo

SEQ ID NO: 168661 - DNA, 1762 bp, Homo sapiens; identical to SEQ ID NO: 120804
  chr11:61594981-61596743
  hypo

SEQ ID NO: 168662 - DNA, 30 bp, Homo sapiens
  chr11:61610009-61610039
  hypo
agagcacggctgttgcgtcaggcgggagac

SEQ ID NO: 168663 - DNA, 47 bp, Homo sapiens; identical to SEQ ID NO: 82194
  chr11:61615509-61615556
  hypo

SEQ ID NO: 168664 - DNA, 31 bp, Homo sapiens; identical to SEQ ID NO: 82195
  chr11:61619675-61619706
  hypo

SEQ ID NO: 168665 - DNA, 31 bp, Homo sapiens; identical to SEQ ID NO: 82196
  chr11:61621920-61621951
  hypo

SEQ ID NO: 168666 - DNA, 31 bp, Homo sapiens; identical to SEQ ID NO: 82197
  chr11:61624801-61624832
  hypo

SEQ ID NO: 168667 - DNA, 408 bp, Homo sapiens; identical to SEQ ID NO: 82198
  chr11:61632398-61632806
  hypo

SEQ ID NO: 168668 - DNA, 177 bp, Homo sapiens; identical to SEQ ID NO: 25290
  chr11:61634596-61634773
  hypo

SEQ ID NO: 168669 - DNA, 43 bp, Homo sapiens; identical to SEQ ID NO: 82200
  chr11:61635270-61635313
  hypo

SEQ ID NO: 168670 - DNA, 330 bp, Homo sapiens
  chr11:61640575-61640905
  hypo
gcaggtggcccgctgcgcggggccctttcaggccccccatcatggagggctgtgggaggccagtgcaggtcaagaggcacaaccgtctttcccagtccatgtccagaagcgtccgcagacatggcccccagccctgggtcctcatctgctgggcccgctcatcccaccatgcagaagcgtcaagtgacttgaagcccagcatgaataggaagtgaataggccctcgggcaggtccgagtccaggcatccctgggctcccaggcccagggcatctagagctaaagggagctccttagcgctccccctcaaccccgccgccggccccaacac

SEQ ID NO: 168671 - DNA, 237 bp, Homo sapiens
  chr11:61641254-61641491
  hypo
gagcccttctctgcccgcctgggtgttgccttcactgatggaggtaggcgtccagccagatgtcaccagacttcttcagggacctgggaggtgggggtggcagtgggggtgggtgttaggagctcagttgcaagatcctaacacccctgtatcccccatggtaagtgtgagcggagatccccattccctgtgggttcccttccctgggggcaggcagcgatgcgggctggagggtgg

SEQ ID NO: 168672 - DNA, 30 bp, Homo sapiens
  chr11:61644388-61644418
  hypo
taggataagaagaagcgggcatagaagctg

SEQ ID NO: 168673 - DNA, 216 bp, Homo sapiens
  chr11:61644862-61645078
  hypo
agccacactgttgcacgcacatgtgcaccctgtttgccttcatgggcaggtactgtcccccgaggcaccacctcctgccacggcagccgtatgcccggggtcctgggcaaccccactcaccgcccactgcatgcacaccagcatgtacgccagattttccacttcaaagttcaccagggtgagcagcggcgggccgactgcaagaaggggcatgag

SEQ ID NO: 168674 - DNA, 112 bp, Homo sapiens; identical to SEQ ID NO: 82203
  chr11:61646080-61646192
  hypo

SEQ ID NO: 168675 - DNA, 31 bp, Homo sapiens; identical to SEQ ID NO: 25292
  chr11:61647048-61647079
  hypo

SEQ ID NO: 168676 - DNA, 43 bp, Homo sapiens; identical to SEQ ID NO: 82205
  chr11:61653515-61653558
  hypo

SEQ ID NO: 168677 - DNA, 191 bp, Homo sapiens; identical to SEQ ID NO: 120806
  chr11:61659370-61659561
  hypo

SEQ ID NO: 168678 - DNA, 168 bp, Homo sapiens
  chr11:61662931-61663099
  hypo
aagcccagagaggagcgactttgcccaggtgcacagccccggcaggagttccatcaggacagtcttggcagactggaaagcatcctgcaggagtgaagcacgccagtgcgcagctggtctcggctcagcgcctccaccctcagaggccagagtcgttgctaggtttga

SEQ ID NO: 168679 - DNA, 226 bp, Homo sapiens
  chr11:61664738-61664964
  hypo
gtgcaggagtgagggcgcgtggccacccagcctgtaccaacaaagcctgcctttattaaatagagatcgcgttacattccatccaaagaaggaaatccggacgtggtgagggatgcgtccaggtgggagctccgaacgctggtcctgagtgggctctgatgggtgggagggcccaggtcctgcctgcccacccaggccccacatgccagggcgcgtgtctgcatgg

SEQ ID NO: 168680 - DNA, 142 bp, Homo sapiens; identical to SEQ ID NO: 82209
  chr11:61665671-61665813
  hypo

SEQ ID NO: 168681 - DNA, 182 bp, Homo sapiens; identical to SEQ ID NO: 82210
  chr11:61666024-61666206
  hypo

SEQ ID NO: 168682 - DNA, 144 bp, Homo sapiens
  chr11:61667784-61667928
  hypo
agggtggaaggtagccggcggctgtgcccgcccgcaacagcccctactgaatgtccaacactcctggggagggacatcaagtgagaggggcacccgcaggctggggagtggagaagcttcggggaggggcgggacggtggtggc

SEQ ID NO: 168683 - DNA, 30 bp, Homo sapiens; identical to SEQ ID NO: 25297
  chr11:61668543-61668573
  hypo

SEQ ID NO: 168684 - DNA, 230 bp, Homo sapiens; identical to SEQ ID NO: 82213
  chr11:61668804-61669034
  hypo

SEQ ID NO: 168685 - DNA, 30 bp, Homo sapiens; identical to SEQ ID NO: 25299
  chr11:61669446-61669476
  hypo

SEQ ID NO: 168686 - DNA, 249 bp, Homo sapiens; identical to SEQ ID NO: 25300
  chr11:61672903-61673152
  hypo

SEQ ID NO: 168687 - DNA, 397 bp, Homo sapiens; identical to SEQ ID NO: 82216
  chr11:61673893-61674290
  hypo

SEQ ID NO: 168688 - DNA, 460 bp, Homo sapiens; identical to SEQ ID NO: 25302
  chr11:61674739-61675199
  hypo

SEQ ID NO: 168689 - DNA, 30 bp, Homo sapiens; identical to SEQ ID NO: 25303
  chr11:61675593-61675623
  hypo

SEQ ID NO: 168690 - DNA, 155 bp, Homo sapiens; identical to SEQ ID NO: 25304
  chr11:61679897-61680052
  hypo

SEQ ID NO: 168691 - DNA, 67 bp, Homo sapiens; identical to SEQ ID NO: 25305
  chr11:61688730-61688797
  hypo

SEQ ID NO: 168692 - DNA, 30 bp, Homo sapiens; identical to SEQ ID NO: 25306
  chr11:61689492-61689522
  hypo

SEQ ID NO: 168693 - DNA, 95 bp, Homo sapiens; identical to SEQ ID NO: 82222
  chr11:61713859-61713954
  hypo

SEQ ID NO: 168694 - DNA, 222 bp, Homo sapiens
  chr11:61717669-61717891
  hypo
caggctgtgctagccgttgcttctgagcagattacaagaagggactaagacaaggactcctttgtggaggtcctggcttagggagtcaagtgacggcggctcagcactcacgtgggcagtgccagcctctaagagtgggcaggggcactggccacagagtcccagggagtcccaccagcctagtcgccagaccttctgtgggatcatcggacccacctggaa

SEQ ID NO: 168695 - DNA, 31 bp, Homo sapiens; identical to SEQ ID NO: 82224
  chr11:61727795-61727826
  hypo

SEQ ID NO: 168696 - DNA, 140 bp, Homo sapiens
  chr11:61736212-61736352
  hypo
cgtcttttgacgcatcggtggaagaactgaatttcaggatgctcacaaacctgcagctggaagctagacttccaaaccttagtttaaaaaagcaactctactgaaatactaaaataaattgccgacggaattagggtgat

SEQ ID NO: 168697 - DNA, 38 bp, Homo sapiens; identical to SEQ ID NO: 25309
  chr11:61736664-61736702
  hypo

SEQ ID NO: 168698 - DNA, 31 bp, Homo sapiens; identical to SEQ ID NO: 82227
  chr11:61747021-61747052
  hypo

SEQ ID NO: 168699 - DNA, 31 bp, Homo sapiens; identical to SEQ ID NO: 25310
  chr11:61765125-61765156
  hypo

SEQ ID NO: 168700 - DNA, 77 bp, Homo sapiens; identical to SEQ ID NO: 25311
  chr11:61770025-61770102
  hypo

SEQ ID NO: 168701 - DNA, 149 bp, Homo sapiens; identical to SEQ ID NO: 25312
  chr11:61770720-61770869
  hypo

SEQ ID NO: 168702 - DNA, 31 bp, Homo sapiens; identical to SEQ ID NO: 82231
  chr11:61779428-61779459
  hypo

SEQ ID NO: 168703 - DNA, 38 bp, Homo sapiens; identical to SEQ ID NO: 82232
  chr11:61784771-61784809
  hypo

SEQ ID NO: 168704 - DNA, 30 bp, Homo sapiens
  chr11:61795043-61795073
  hypo
caaggctgactgttccgtatgacaaagata

SEQ ID NO: 168705 - DNA, 34 bp, Homo sapiens; identical to SEQ ID NO: 82233
  chr11:61795461-61795495
  hypo

SEQ ID NO: 168706 - DNA, 40 bp, Homo sapiens
  chr11:61797089-61797129
  hypo
cttcttggggccgggcgtggtgactcactcctgtaatccc

SEQ ID NO: 168707 - DNA, 32 bp, Homo sapiens; identical to SEQ ID NO: 82234
  chr11:61811794-61811826
  hypo

SEQ ID NO: 168708 - DNA, 19 bp, Homo sapiens
  chr11:61819621-61819640
  hypo
agctggctcacggctcgta

SEQ ID NO: 168709 - DNA, 45 bp, Homo sapiens; identical to SEQ ID NO: 25313
  chr11:61825692-61825737
  hypo

SEQ ID NO: 168710 - DNA, 31 bp, Homo sapiens; identical to SEQ ID NO: 82237
  chr11:61826063-61826094
  hypo

SEQ ID NO: 168711 - DNA, 21 bp, Homo sapiens
  chr11:61844022-61844043
  hypo
tacaggcgtgagccaccacgc

SEQ ID NO: 168712 - DNA, 18 bp, Homo sapiens
  chr11:61880293-61880311
  hypo
tcttttttttttttcccg

SEQ ID NO: 168713 - DNA, 56 bp, Homo sapiens
  chr11:61889938-61889994
  hypo
aggctctagataaacgcacactccgttgccattcacaaggcgttttgtttttactt

SEQ ID NO: 168714 - DNA, 30 bp, Homo sapiens; identical to SEQ ID NO: 82240
  chr11:61897497-61897527
  hypo

SEQ ID NO: 168715 - DNA, 30 bp, Homo sapiens
  chr11:61899800-61899830
  hypo
ggctttgtgcaaggccgcagggcagggcct

SEQ ID NO: 168716 - DNA, 30 bp, Homo sapiens; identical to SEQ ID NO: 82241
  chr11:61911139-61911169
  hypo

SEQ ID NO: 168717 - DNA, 130 bp, Homo sapiens
  chr11:61912295-61912425
  hypo
tgctgttggggccacgttggggatacctctgcctaagaagcattctgatgctgccacccacgtggctgcaggctgctggggactgtgggcagcttttggggctgggtggggggtcgtccttgctcatgtc

SEQ ID NO: 168718 - DNA, 22 bp, Homo sapiens
  chr11:62114427-62114449
  hypo
gagactccgtctcaaaaaaaaa

SEQ ID NO: 168719 - DNA, 237 bp, Homo sapiens
  chr11:62167972-62168209
  hypo
ggaccagcaggggcgcggctatttctgtgcaaggcttgggcactgggcagaaccccaaccctccatgctattaacacagaggagaaccccagcttcatattttatgttttatgaaacacgtttgcatctatttctactttgtggagtagccagggcagaaatcatcattgccattttccaatcggggcccctgacactcagtgctgtggagtgccttacccgcgtcacacagcaggt

SEQ ID NO: 168720 - DNA, 143 bp, Homo sapiens
  chr11:62184161-62184304
  hypo
aacgtgtgctcttaccggtgttaaggcgtctcggagtgggacggttccggggtcaccacagccttcaactgtcacatggcacaaaggcctcatgcatggattcattccagggattcctgtttagcaagcgttgcgtaccttgg

SEQ ID NO: 168721 - DNA, 165 bp, Homo sapiens; identical to SEQ ID NO: 48525
  chr11:62192261-62192426
  hypo

SEQ ID NO: 168722 - DNA, 30 bp, Homo sapiens
  chr11:62239235-62239265
  hypo
tgtgggagactggccgggatgcgggtaccc

SEQ ID NO: 168723 - DNA, 31 bp, Homo sapiens; identical to SEQ ID NO: 82243
  chr11:62242405-62242436
  hypo

SEQ ID NO: 168724 - DNA, 89 bp, Homo sapiens; identical to SEQ ID NO: 82244
  chr11:62257977-62258066
  hypo

SEQ ID NO: 168725 - DNA, 469 bp, Homo sapiens; identical to SEQ ID NO: 48527
  chr11:62313645-62314114
  hypo

SEQ ID NO: 168726 - DNA, 55 bp, Homo sapiens
  chr11:62356613-62356668
  hypo
tccctgggcctttctcgcagctcgtagttctaccaggtgccggtgctttctgcct

SEQ ID NO: 168727 - DNA, 188 bp, Homo sapiens; identical to SEQ ID NO: 82246
  chr11:62361979-62362167
  hypo

SEQ ID NO: 168728 - DNA, 209 bp, Homo sapiens; identical to SEQ ID NO: 8138
  chr11:62369473-62369682
  hypo

SEQ ID NO: 168729 - DNA, 31 bp, Homo sapiens; identical to SEQ ID NO: 82248
  chr11:62370822-62370853
  hypo

SEQ ID NO: 168730 - DNA, 30 bp, Homo sapiens; identical to SEQ ID NO: 82249
  chr11:62376459-62376489
  hypo

SEQ ID NO: 168731 - DNA, 30 bp, Homo sapiens; identical to SEQ ID NO: 25317
  chr11:62381716-62381746
  hypo

SEQ ID NO: 168732 - DNA, 106 bp, Homo sapiens; identical to SEQ ID NO: 82251
  chr11:62387276-62387382
  hypo

SEQ ID NO: 168733 - DNA, 30 bp, Homo sapiens; identical to SEQ ID NO: 82252
  chr11:62415009-62415039
  hypo

SEQ ID NO: 168734 - DNA, 39 bp, Homo sapiens; identical to SEQ ID NO: 82253
  chr11:62418573-62418612
  hypo

SEQ ID NO: 168735 - DNA, 29 bp, Homo sapiens
  chr11:62421696-62421725
  hypo
ccgcgcccggcctcaactcaggactttaa

SEQ ID NO: 168736 - DNA, 32 bp, Homo sapiens
  chr11:62423246-62423278
  hypo
ttttgttaaaagctatatcctcgggctgggcg

SEQ ID NO: 168737 - DNA, 78 bp, Homo sapiens; identical to SEQ ID NO: 82256
  chr11:62440581-62440659
  hypo

SEQ ID NO: 168738 - DNA, 149 bp, Homo sapiens
  chr11:62450078-62450227
  hypo
aggctggtctcgaacttgtgagctcaagccatcccctgccttgtgctggaattacaggcgtgagccaccatgcccagtgctggaattacaggcgtgagtgctgtaattacaggcgtgagtgctggaattacaggcgtgagtgctggaat

SEQ ID NO: 168739 - DNA, 30 bp, Homo sapiens
  chr11:62458430-62458460
  hypo
acccttgtctcagtcggtgataccctaagc

SEQ ID NO: 168740 - DNA, 30 bp, Homo sapiens; identical to SEQ ID NO: 82258
  chr11:62470803-62470833
  hypo

SEQ ID NO: 168741 - DNA, 240 bp, Homo sapiens; identical to SEQ ID NO: 120835
  chr11:62473883-62474123
  hypo

SEQ ID NO: 168742 - DNA, 198 bp, Homo sapiens; identical to SEQ ID NO: 25320
  chr11:62474895-62475093
  hypo

SEQ ID NO: 168743 - DNA, 102 bp, Homo sapiens
  chr11:62479574-62479676
  hypo
taacagagcgaggctctgtcaaaaaaaaaaaataaaaataaaaataaaaaataaaaaagcaatggcgctgttgtaaatttaatttaccgtctcgttctccag

SEQ ID NO: 168744 - DNA, 30 bp, Homo sapiens; identical to SEQ ID NO: 82260
  chr11:62482693-62482723
  hypo

SEQ ID NO: 168745 - DNA, 184 bp, Homo sapiens; identical to SEQ ID NO: 82261
  chr11:62484465-62484649
  hypo

SEQ ID NO: 168746 - DNA, 18 bp, Homo sapiens
  chr11:62485882-62485900
  hypo
ctccctgcggccaggcgc

SEQ ID NO: 168747 - DNA, 30 bp, Homo sapiens; identical to SEQ ID NO: 82263
  chr11:62490137-62490167
  hypo

SEQ ID NO: 168748 - DNA, 27 bp, Homo sapiens
  chr11:62518339-62518366
  hypo
gactccgtctcaaaaaaaaaaaaaaaa

SEQ ID NO: 168749 - DNA, 106 bp, Homo sapiens
  chr11:62527792-62527898
  hypo
gactcgcagtcatatctctctcgaggcttaaagtgttttttgggcttccaatagctcttaaatttttttttttttttgagactccgtcttgctttgtcgccaggct

SEQ ID NO: 168750 - DNA, 67 bp, Homo sapiens; identical to SEQ ID NO: 25321
  chr11:62532993-62533060
  hypo

SEQ ID NO: 168751 - DNA, 30 bp, Homo sapiens
  chr11:62538357-62538387
  hypo
agtccggagcttgcacgggatgttcggccg

SEQ ID NO: 168752 - DNA, 214 bp, Homo sapiens; identical to SEQ ID NO: 82266
  chr11:62541856-62542070
  hypo

SEQ ID NO: 168753 - DNA, 30 bp, Homo sapiens
  chr11:62543250-62543280
  hypo
gggccatgtcagagcgagaagagcggcggt

SEQ ID NO: 168754 - DNA, 30 bp, Homo sapiens; identical to SEQ ID NO: 25322
  chr11:62562459-62562489
  hypo

SEQ ID NO: 168755 - DNA, 297 bp, Homo sapiens
  chr11:62581076-62581373
  hypo
tcacatgatcaacaacgtagagtaaaagcactctgctagataccgtggggaataaagatcaatcagggttggaccctgctaaagggataagatcaagtgggcaggagtggattcctaaaacctcctacacctcctctcctctactggcttttcttcttaatgagctgagaagactgaagtggtctgaagataaatgccgctccaccccgagcattgctacaatagcctctgtcttcccacctatcgccagctcctcttagagccaagccttgatttatgccccggagcccacttcct

SEQ ID NO: 168756 - DNA, 142 bp, Homo sapiens
  chr11:62598479-62598621
  hypo
caggtccttacctgacgggtctgcagcgacttgcaggcagacagaaactcctgggtccgatcccggcaggacatggtgtcgggagggggagggacgagggtcactggggggggcagaggggcgatgtcgctgctgctactgc

SEQ ID NO: 168757 - DNA, 176 bp, Homo sapiens
  chr11:62598908-62599084
  hypo
gtcccaagtcgaacccgcttcagactcttcttccaacttggctctggcggccagagcgcgggccggggaccctgaagcagagacagggccagagccaaccccgtggtcctgagactccggcccggcccgtgtaactgccccgggccctaacccagccctttcgtttccgcggtttc

SEQ ID NO: 168758 - DNA, 30 bp, Homo sapiens
  chr11:62610575-62610605
  hypo
agagagtagtaggcagggggccgggcgtgg

SEQ ID NO: 168759 - DNA, 35 bp, Homo sapiens
  chr11:62617577-62617612
  hypo
gggaaactcaggtgtcggatcgcttgagcccagga

SEQ ID NO: 168760 - DNA, 30 bp, Homo sapiens; identical to SEQ ID NO: 25323
  chr11:62652970-62653000
  hypo

SEQ ID NO: 168761 - DNA, 30 bp, Homo sapiens; identical to SEQ ID NO: 82269
  chr11:62655827-62655857
  hypo

SEQ ID NO: 168762 - DNA, 121 bp, Homo sapiens
  chr11:62658209-62658330
  hypo
tgtgcaagcagatctgcagtatttgctgttgggatcctgttgcagtactagtgatctgcgcaggcctcatggcccttggagttagttcggctctcttagttttcttacagaaaagaatgct

SEQ ID NO: 168763 - DNA, 31 bp, Homo sapiens; identical to SEQ ID NO: 25324
  chr11:62700323-62700354
  hypo

SEQ ID NO: 168764 - DNA, 30 bp, Homo sapiens
  chr11:62802367-62802397
  hypo
ccatcaccgctcctccggacccgtacagtc

SEQ ID NO: 168765 - DNA, 421 bp, Homo sapiens; identical to SEQ ID NO: 120860
  chr11:63258403-63258824
  hypo

SEQ ID NO: 168766 - DNA, 30 bp, Homo sapiens; identical to SEQ ID NO: 25327
  chr11:63320384-63320414
  hypo

SEQ ID NO: 168767 - DNA, 179 bp, Homo sapiens; identical to SEQ ID NO: 82273
  chr11:63325852-63326031
  hypo

SEQ ID NO: 168768 - DNA, 30 bp, Homo sapiens
  chr11:63341046-63341076
  hypo
taagtttggggagctcgagaactggcatta

SEQ ID NO: 168769 - DNA, 305 bp, Homo sapiens
  chr11:63377495-63377800
  hypo
gaattaacttccctaaggtctcggagctccccgaaaagtagcaccaggattccgcagcagatctgcctgagcttaaaggtgaggttcttcccaccacaccaagtaattcactccaaggtactgacgttcaacaactgtgctcccatggcaaaactggcctctgcctcaccgcactctcggcctgaaatgcccttttgccgttcacctggaagattcctactcatccctcgagatgggctcaacatgtccactcctcaatgcatcccctgatgcctcagcaaagcgagttgctgctgcctccacag

SEQ ID NO: 168770 - DNA, 41 bp, Homo sapiens; identical to SEQ ID NO: 82275
  chr11:63389634-63389675
  hypo

SEQ ID NO: 168771 - DNA, 30 bp, Homo sapiens
  chr11:63390390-63390420
  hypo
atacaggaccgcattcgtcaccctggtcct

SEQ ID NO: 168772 - DNA, 222 bp, Homo sapiens
  chr11:63398534-63398756
  hypo
caaaatcaatagctccgcccagctcacgatattgaccagaatacctgatgtagccccaggtgaggagtgctattaacagtagtccaaccatacagttgaacaactgggctacaacctcaagacctatgaagccagtgaggcctgaggctatgtacaaagctacaatgcccgtgaacagcactgcaggggttcggaaggtgctgaagacgttcttgctaccat

SEQ ID NO: 168773 - DNA, 153 bp, Homo sapiens; identical to SEQ ID NO: 82277
  chr11:63399449-63399602
  hypo

SEQ ID NO: 168774 - DNA, 30 bp, Homo sapiens
  chr11:63400981-63401011
  hypo
atcctcctgccagtgcgtgccaccacgctt

SEQ ID NO: 168775 - DNA, 121 bp, Homo sapiens; identical to SEQ ID NO: 25330
  chr11:63431995-63432116
  hypo

SEQ ID NO: 168776 - DNA, 89 bp, Homo sapiens; identical to SEQ ID NO: 82279
  chr11:63434152-63434241
  hypo

SEQ ID NO: 168777 - DNA, 22 bp, Homo sapiens
  chr11:63437114-63437136
  hypo
gtagctaatacaataatgggcc

SEQ ID NO: 168778 - DNA, 30 bp, Homo sapiens; identical to SEQ ID NO: 82281
  chr11:63442644-63442674
  hypo

SEQ ID NO: 168779 - DNA, 31 bp, Homo sapiens; identical to SEQ ID NO: 82282
  chr11:63444189-63444220
  hypo

SEQ ID NO: 168780 - DNA, 30 bp, Homo sapiens; identical to SEQ ID NO: 82283
  chr11:63528996-63529026
  hypo

SEQ ID NO: 168781 - DNA, 96 bp, Homo sapiens
  chr11:63529490-63529586
  hypo
ctagcctccccgccccggctttaggaccgcgggaactgttcctgcagcagcctggctttgtgaagagcagacagtagggcccggagtctcccagcg

SEQ ID NO: 168782 - DNA, 181 bp, Homo sapiens
  chr11:63562758-63562939
  hypo
acgccaccacgcctgactaatttttgtatttttacaccatgttggccaggctggtaaatttggtgatttcttaagcgtatcttgggggaaaaaagtttctgagagcagtaagtataaacgtgtgtctaaaatgtgtgtccttttatttatttatttttttgagatggagtcttgctctgtc

SEQ ID NO: 168783 - DNA, 97 bp, Homo sapiens; identical to SEQ ID NO: 82284
  chr11:63609979-63610076
  hypo

SEQ ID NO: 168784 - DNA, 32 bp, Homo sapiens; identical to SEQ ID NO: 25334
  chr11:63641118-63641150
  hypo

SEQ ID NO: 168785 - DNA, 227 bp, Homo sapiens; identical to SEQ ID NO: 82286
  chr11:63675217-63675444
  hypo

SEQ ID NO: 168786 - DNA, 111 bp, Homo sapiens; identical to SEQ ID NO: 25336
  chr11:63675663-63675774
  hypo

SEQ ID NO: 168787 - DNA, 501 bp, Homo sapiens; identical to SEQ ID NO: 82288
  chr11:63676298-63676799
  hypo

SEQ ID NO: 168788 - DNA, 28 bp, Homo sapiens
  chr11:63707793-63707821
  hypo
tacaggcgtgagccaccacacaggccta

SEQ ID NO: 168789 - DNA, 30 bp, Homo sapiens; identical to SEQ ID NO: 82290
  chr11:63710279-63710309
  hypo

SEQ ID NO: 168790 - DNA, 31 bp, Homo sapiens; identical to SEQ ID NO: 82291
  chr11:63714456-63714487
  hypo

SEQ ID NO: 168791 - DNA, 32 bp, Homo sapiens; identical to SEQ ID NO: 82292
  chr11:63743820-63743852
  hypo

SEQ ID NO: 168792 - DNA, 70 bp, Homo sapiens
  chr11:63764162-63764232
  hypo
acctcctccccgggcgagtaggatgtgtctcgagtagggtgtctccctccttcccgggcgatgggctgga

SEQ ID NO: 168793 - DNA, 151 bp, Homo sapiens
  chr11:63764789-63764940
  hypo
gaccagggcctgaccggcacctgtgccacaggaggtggagcccatgtgcaaggagagcgaccacatccacatcattgcgctggcccaggccctcagcgtgtccatccaggtggagtacatggaccgcggcgagggcggcaccaccaatccg

SEQ ID NO: 168794 - DNA, 31 bp, Homo sapiens; identical to SEQ ID NO: 82295
  chr11:63776021-63776052
  hypo

SEQ ID NO: 168795 - DNA, 30 bp, Homo sapiens; identical to SEQ ID NO: 25340
  chr11:63776404-63776434
  hypo

SEQ ID NO: 168796 - DNA, 282 bp, Homo sapiens; identical to SEQ ID NO: 82297
  chr11:63779083-63779365
  hypo

SEQ ID NO: 168797 - DNA, 82 bp, Homo sapiens; identical to SEQ ID NO: 25342
  chr11:63783734-63783816
  hypo

SEQ ID NO: 168798 - DNA, 183 bp, Homo sapiens
  chr11:63784047-63784230
  hypo
ctaagtggtgtcgggcggctccgagtggctggtctcccagagctgacagctcttcgcttggggaataattaattccaccgcccaaaaacccagggctgcaagttgccatgttacttgcgagattaatacaagcagctaattaagatggagaggcgaggagcggctgggcgctcccaaagcagg

SEQ ID NO: 168799 - DNA, 43 bp, Homo sapiens; identical to SEQ ID NO: 82300
  chr11:63786386-63786429
  hypo

SEQ ID NO: 168800 - DNA, 30 bp, Homo sapiens; identical to SEQ ID NO: 25344
  chr11:63808025-63808055
  hypo

SEQ ID NO: 168801 - DNA, 22 bp, Homo sapiens
  chr11:63811296-63811318
  hypo
ttttatgacggagtttcgctct

SEQ ID NO: 168802 - DNA, 32 bp, Homo sapiens; identical to SEQ ID NO: 82303
  chr11:63814028-63814060
  hypo

SEQ ID NO: 168803 - DNA, 32 bp, Homo sapiens; identical to SEQ ID NO: 82304
  chr11:63814239-63814271
  hypo

SEQ ID NO: 168804 - DNA, 31 bp, Homo sapiens; identical to SEQ ID NO: 82305
  chr11:63818820-63818851
  hypo

SEQ ID NO: 168805 - DNA, 31 bp, Homo sapiens; identical to SEQ ID NO: 82306
  chr11:63830016-63830047
  hypo

SEQ ID NO: 168806 - DNA, 438 bp, Homo sapiens
  chr11:63832548-63832986
  hypo
ctgagccagactcggcggcctcggagagacttcccagaggagaacgggctacacgtgggcctggaggtgaggtagaagtggcccagggaacgggtgcaggacagagtttcaggaagcaggcctggggtcagagaggcccagagatgaagagcgggtagagtgttgagcgatcggagcagtgaggcggtgggtgggcaggatcgggcaggtggcgggcaagcgtcagctgcctcaacatgcaggaggccaggctttgttctgagggcggctggggccttggagggttttaagccaggtcctcacagatttgccatgtacgaagagttcacccactacctccgctccaaaacagaacatttactgaggctccagagagcctggcagggtgtgtgcttgtcctgagctacagaggacttaaaagatgaacaaggggccagg

SEQ ID NO: 168807 - DNA, 555 bp, Homo sapiens
  chr11:63849154-63849709
  hypo
accatgcaggtgagggcgtgtggctgaagcctgttcctgcttgggggttggccacacagcatcccaactccaggtccagagccgagcctgacagccctcctccactgcctcctggagctgccggagagaggtccgggtccgttctccccaattcacagacatgaagactgaggccgtggttccagtggctgctcggtggtggggctggagcttggcagcatcctgcagccctctggactcccggctctcgagtgccgcgttctacctgctgtgttctaaatggacatgccatccccacagctgtgtcaataaagcagccatttacagagcgggcgccggatcccgtgacaggttgaaaagtgtgtgagctgcagcgtcctgggctggggcagaggggccgtggcgagaacagatggggctgtgcccatctccccaggccctcctgtggctgcgcctggagcctcccgggagggaggccagagccaggagcaggccagagccaggagcaggcgcgaaacatcccttaaatattggtgctctcggcagcactgggcc

SEQ ID NO: 168808 - DNA, 30 bp, Homo sapiens; identical to SEQ ID NO: 25347
  chr11:63856697-63856727
  hypo

SEQ ID NO: 168809 - DNA, 80 bp, Homo sapiens
  chr11:63860748-63860828
  hypo
gggccatctagaactcgatcgagtcagctgctggtgttgtcactgctgcggacacagtccttacccgtaagagctcacgg

SEQ ID NO: 168810 - DNA, 96 bp, Homo sapiens
  chr11:63864327-63864423
  hypo
ttcgagggcctcccccggcagagctgagagccgatgcctgtccctccgtgagctgggtgcgagtggcccttgctggtcccccgctcacccactctc

SEQ ID NO: 168811 - DNA, 281 bp, Homo sapiens
  chr11:63864922-63865203
  hypo
gtgccctgctctgggcgctgcctgctgagtttctctgatggccatcttgagggtgggcgctggcaaaggcccaggcccgccggccgggcggcacagactcctgaagccacccacggcctggctcgcacactctcgcaaataccctgaaagtctgggttttgtcaggagatggtttaattagcagagcggaggctgggagggttcgcaccacacaagcaggctctcgcctccgcctcttctcaccctgctactcgggtgccatgcagcggtgccaagcctgg

SEQ ID NO: 168812 - DNA, 30 bp, Homo sapiens; identical to SEQ ID NO: 25348
  chr11:63870604-63870634
  hypo

SEQ ID NO: 168813 - DNA, 78 bp, Homo sapiens; identical to SEQ ID NO: 82311
  chr11:63871582-63871660
  hypo

SEQ ID NO: 168814 - DNA, 30 bp, Homo sapiens
  chr11:63883169-63883199
  hypo
aacaagctttcctttcgaatcctgggtccg

SEQ ID NO: 168815 - DNA, 259 bp, Homo sapiens
  chr11:63883404-63883663
  hypo
attccaggagggccgcggcagcacgggtctcattaatgcgcagcctcttggctcctgataagatttaacattagccagatgttgttagagtccgacctcggcgggagcaatcacctgcggcataaacctggcacaaaggccactcctccagcttgacctcaccccgcaggaccggacttcggtcaccccttggtacaggctggcaggtgggagggaatgcacgattcactcctggggtcgctgtcgccgcctccctctc

SEQ ID NO: 168816 - DNA, 30 bp, Homo sapiens; identical to SEQ ID NO: 82313
  chr11:63883932-63883962
  hypo

SEQ ID NO: 168817 - DNA, 30 bp, Homo sapiens
  chr11:63884509-63884539
  hypo
caattcgctggccgcgccacccctcaacct

SEQ ID NO: 168818 - DNA, 331 bp, Homo sapiens; identical to SEQ ID NO: 82314
  chr11:63885569-63885900
  hypo

SEQ ID NO: 168819 - DNA, 30 bp, Homo sapiens; identical to SEQ ID NO: 82315
  chr11:63887422-63887452
  hypo

SEQ ID NO: 168820 - DNA, 255 bp, Homo sapiens
  chr11:63888533-63888788
  hypo
gctggggcaggagtgcgggagacttagtgctagagagcaggcagagctgggagccagcctgtgcccagccacgccctccgagacaaggcctgagtgatgagctttcctcccctcccattgcacagagcaggcccaggcaggcaggagccctggcagctgccccagaggagctccttgggccccaggaccacgcgagtctcctgttcctggttcttgcactaactgggcgagggcggggctcggcccctcttacca

SEQ ID NO: 168821 - DNA, 34 bp, Homo sapiens
  chr11:63889203-63889237
  hypo
acatttccaagggaacgtccgcggctgggctgac

SEQ ID NO: 168822 - DNA, 145 bp, Homo sapiens; identical to SEQ ID NO: 82316
  chr11:63892467-63892612
  hypo

SEQ ID NO: 168823 - DNA, 83 bp, Homo sapiens
  chr11:63894385-63894468
  hypo
aggggcctgagtgacgggcctgaccgtccccgctaccgcctgctgccatgcgaccagatggctgacccggcccggcttctcag

SEQ ID NO: 168824 - DNA, 29 bp, Homo sapiens
  chr11:63898814-63898843
  hypo
ttcttttttttgatggagtctcgctctgt

SEQ ID NO: 168825 - DNA, 28 bp, Homo sapiens
  chr11:63899082-63899110
  hypo
ccaccgcgcccagcccctcaggatgttt

SEQ ID NO: 168826 - DNA, 188 bp, Homo sapiens; identical to SEQ ID NO: 82318
  chr11:63905994-63906182
  hypo

SEQ ID NO: 168827 - DNA, 403 bp, Homo sapiens; identical to SEQ ID NO: 82319
  chr11:63908845-63909248
  hypo

SEQ ID NO: 168828 - DNA, 145 bp, Homo sapiens; identical to SEQ ID NO: 82320
  chr11:63912568-63912713
  hypo

SEQ ID NO: 168829 - DNA, 253 bp, Homo sapiens
  chr11:63916438-63916691
  hypo
gttcagaccctgcctccgtcattccctgggattccaggcgggtaccgggtcctcctggctgtgagagtctagaacaaaaagatcccaggagaacacaccaagaggtgtatgggtaaactgaggcaagcagggggaggtgaaagctgatcatttgcaggaggtaccatgtccctcggcaccgctgggacaggggtgatgcccagaacggcgctgatgacaccagtttcagcaccagtgcgaggtgctgagcccc

SEQ ID NO: 168830 - DNA, 31 bp, Homo sapiens; identical to SEQ ID NO: 82322
  chr11:63917114-63917145
  hypo

SEQ ID NO: 168831 - DNA, 31 bp, Homo sapiens; identical to SEQ ID NO: 82323
  chr11:63917484-63917515
  hypo

SEQ ID NO: 168832 - DNA, 31 bp, Homo sapiens; identical to SEQ ID NO: 82324
  chr11:63923020-63923051
  hypo

SEQ ID NO: 168833 - DNA, 85 bp, Homo sapiens; identical to SEQ ID NO: 82325
  chr11:63934614-63934699
  hypo

SEQ ID NO: 168834 - DNA, 30 bp, Homo sapiens
  chr11:63948392-63948422
  hypo
gttttcagcctgagccgctgaaagaataat

SEQ ID NO: 168835 - DNA, 272 bp, Homo sapiens; identical to SEQ ID NO: 25354
  chr11:63963858-63964130
  hypo

SEQ ID NO: 168836 - DNA, 30 bp, Homo sapiens; identical to SEQ ID NO: 82327
  chr11:63971381-63971411
  hypo

SEQ ID NO: 168837 - DNA, 30 bp, Homo sapiens; identical to SEQ ID NO: 25355
  chr11:63971751-63971781
  hypo

SEQ ID NO: 168838 - DNA, 149 bp, Homo sapiens
  chr11:63978731-63978880
  hypo
caacctgcactccaggcgtggcacctgcactgttccgggggatgccagctcacttctcggacagcgcccagactgaggcctgctaccacatgctgagccggccccagccgccacccgaccccctcctgctccagcgtctgccacggccc

SEQ ID NO: 168839 - DNA, 165 bp, Homo sapiens
  chr11:63979091-63979256
  hypo
gactgctgcttctgccgcggcccaggtggctggactcgtcgcggtgtctcatgcagcagggcatcaaggccggggacgcactctggctgcgcttcaagtactacagcttcttcgatttggatcccaaggtgggtcggggcagggagaaagcgggcctcaggtcca

SEQ ID NO: 168840 - DNA, 216 bp, Homo sapiens; identical to SEQ ID NO: 82330
  chr11:63988353-63988569
  hypo

SEQ ID NO: 168841 - DNA, 162 bp, Homo sapiens; identical to SEQ ID NO: 82331
  chr11:63990014-63990176
  hypo

SEQ ID NO: 168842 - DNA, 31 bp, Homo sapiens; identical to SEQ ID NO: 25358
  chr11:63996887-63996918
  hypo

SEQ ID NO: 168843 - DNA, 30 bp, Homo sapiens
  chr11:64001079-64001109
  hypo
gtgatggagttagacgcataccctttctag

SEQ ID NO: 168844 - DNA, 30 bp, Homo sapiens
  chr11:64003394-64003424
  hypo
tgcgtgactgtgcagcgctgtggtggctgc

SEQ ID NO: 168845 - DNA, 32 bp, Homo sapiens
  chr11:64011976-64012008
  hypo
ctttattaaagggcccgcgccgcagagtcaat

SEQ ID NO: 168846 - DNA, 30 bp, Homo sapiens; identical to SEQ ID NO: 120892
  chr11:64014797-64014827
  hypo

SEQ ID NO: 168847 - DNA, 218 bp, Homo sapiens; identical to SEQ ID NO: 120893
  chr11:64015093-64015311
  hypo

SEQ ID NO: 168848 - DNA, 31 bp, Homo sapiens; identical to SEQ ID NO: 25359
  chr11:64019237-64019268
  hypo

SEQ ID NO: 168849 - DNA, 30 bp, Homo sapiens; identical to SEQ ID NO: 82334
  chr11:64026526-64026556
  hypo

SEQ ID NO: 168850 - DNA, 30 bp, Homo sapiens; identical to SEQ ID NO: 82335
  chr11:64029908-64029938
  hypo

SEQ ID NO: 168851 - DNA, 59 bp, Homo sapiens; identical to SEQ ID NO: 25360
  chr11:64032944-64033003
  hypo

SEQ ID NO: 168852 - DNA, 89 bp, Homo sapiens
  chr11:64034943-64035032
  hypo
tgccagcaacggtcacgcacccgggagcagcgggcacctgtcgggcgctgactcggagagccaggaggagaacacgcagctctgaactg

SEQ ID NO: 168853 - DNA, 30 bp, Homo sapiens
  chr11:64035676-64035706
  hypo
aagccttccctgccccgcttcctgtggcct

SEQ ID NO: 168854 - DNA, 27 bp, Homo sapiens
  chr11:64041564-64041591
  hypo
ctaagaaagcaagtaggtggccgggtg

SEQ ID NO: 168855 - DNA, 461 bp, Homo sapiens
  chr11:64044374-64044835
  hypo
cctctagctttacattctctgcgtgttgggcttctgagtcagcggctggggcggacatccctgctgatgcttccgcgagcatccctgcactgggattttcagagtcctcagattcccaagaaggagaatacgaagttctccctgttttatagatgaggaaacagaggcacacttaattacaagacacttgcacactgaattgcacacttaattaaaacagtggtgttccagaccgtttggagcagtgaagctctgccatcaggcaagggctgggtttggatcctgcccctaccacatgccgaccacacacaatctgctgccgggggaggctgacgtcagtggccagcacagtggccagtgctgccaccccaccctgggcagacactcgcagcctgtccgcctccggcacctgtaggcctcagccttgactatagccttccggtacagaagccccttcaggc

SEQ ID NO: 168856 - DNA, 118 bp, Homo sapiens
  chr11:64054224-64054342
  hypo
ttctccttctacttccgagatactccccgcgccaaccgcctggggcccttgcccttctggcttctctactgctgccccgtctgcctgcagttcttcaccttgacgcttatgaacctct

SEQ ID NO: 168857 - DNA, 95 bp, Homo sapiens; identical to SEQ ID NO: 82339
  chr11:64055230-64055325
  hypo

SEQ ID NO: 168858 - DNA, 180 bp, Homo sapiens; identical to SEQ ID NO: 82340
  chr11:64056036-64056216
  hypo

SEQ ID NO: 168859 - DNA, 598 bp, Homo sapiens; identical to SEQ ID NO: 120899
  chr11:64059063-64059661
  hypo

SEQ ID NO: 168860 - DNA, 250 bp, Homo sapiens; identical to SEQ ID NO: 120900
  chr11:64059860-64060110
  hypo

SEQ ID NO: 168861 - DNA, 33 bp, Homo sapiens; identical to SEQ ID NO: 120901
  chr11:64060160-64060193
  hypo

SEQ ID NO: 168862 - DNA, 79 bp, Homo sapiens; identical to SEQ ID NO: 82344
  chr11:64069274-64069353
  hypo

SEQ ID NO: 168863 - DNA, 40 bp, Homo sapiens; identical to SEQ ID NO: 82345
  chr11:64078888-64078928
  hypo

SEQ ID NO: 168864 - DNA, 116 bp, Homo sapiens; identical to SEQ ID NO: 82346
  chr11:64081530-64081646
  hypo

SEQ ID NO: 168865 - DNA, 30 bp, Homo sapiens
  chr11:64081859-64081889
  hypo
tggggctacgaaaccggaggcctatgtgtg

SEQ ID NO: 168866 - DNA, 330 bp, Homo sapiens; identical to SEQ ID NO: 25364
  chr11:64088214-64088544
  hypo

SEQ ID NO: 168867 - DNA, 160 bp, Homo sapiens
  chr11:64089707-64089867
  hypo
tgggattacaggtgtgagccactgtgcccagccttgaggcaggtgttactgagcactgagaaggagccagcaatctgaagaggaagggaagaagcgctccccacagaggcagcacagagggcgaggcctggccgatggcatgtggcgcacagtgtggcct

SEQ ID NO: 168868 - DNA, 78 bp, Homo sapiens
  chr11:64105953-64106031
  hypo
ccataaaacagccaggcgctcttaagccagctttacaattgtgcagatgaagtggagccgagttttcactctgctcta

SEQ ID NO: 168869 - DNA, 189 bp, Homo sapiens; identical to SEQ ID NO: 82350
  chr11:64112372-64112561
  hypo

SEQ ID NO: 168870 - DNA, 159 bp, Homo sapiens; identical to SEQ ID NO: 25366
  chr11:64118935-64119094
  hypo

SEQ ID NO: 168871 - DNA, 347 bp, Homo sapiens
  chr11:64120021-64120368
  hypo
tgggttgggctccccgtggggctcacctattgggagtggtgggcacctggcatggcattctgcccaatggcttcctctgggggacctaggcttaggaggtgacagacccccccgccccgggtccagatagtccagccagctgcttgtggtggccataggttcacacagccctcttagccccttgtccatcccaggcacgagcagctgcaggcccagcgggccagcgtggaggcacaggaggtggccctgctggcagagcgtgaacgcctgatgcaagatgggcatcggcagcggggcctggaggaggagctgcggaggcttcagagcgagcacgacaggtgccgccc

SEQ ID NO: 168872 - DNA, 527 bp, Homo sapiens; identical to SEQ ID NO: 82353
  chr11:64120592-64121119
  hypo

SEQ ID NO: 168873 - DNA, 452 bp, Homo sapiens
  chr11:64124341-64124793
  hypo
agcattctgggcagagggaaccgctgagggaacagcaggcgtggtgcagctggaagcggggggtattggcaggtcgggggtgggcagaaggtgctcgagcctgtgggcctcctgggactctgggagtcctcctgagggaagcagatctcagctgagcctttccctctaggccctgaggtacaggaaccggagaaacgtcccctcaccccatccctcagccagtgacaccgtgggaacagcaggcttgggagtgcagccttctcggcactggagtgtcagcggaggccccaggcagcccaagagctcagggagccagggaccccaaggggagtccttggacaaggaggcctgggccctgagatcctccacggtcagcgccggggcccggagatggagctgggacgagtgtgtggacaggggggatggctggcccccacgagcagctccaggct

SEQ ID NO: 168874 - DNA, 340 bp, Homo sapiens
  chr11:64129092-64129432
  hypo
caccccggctccacccggcaggctgtggactggtggagcctgggcatcttgctcttcgagctgctgacgggggcctcgcccttcaccctggagggcgagaggaacacgcaggctgaggtgtctcggtgagtagggctggacgtggagggcggccagagggctgcagggcctgcctgggcagggctgtgggtggggggcttgctgcccctgacacccccccaatcctcccagacggatcctgaagtgctcccctcccttcccccctcggatcgggcccgtggcgcaggacctgctgcagcggctgctttgtaaggatcctaagaagcgattgggcgcgggg

SEQ ID NO: 168875 - DNA, 30 bp, Homo sapiens
  chr11:64129772-64129802
  hypo
cacagtaaatggtgccgagttgggaataga

SEQ ID NO: 168876 - DNA, 643 bp, Homo sapiens
  chr11:64135635-64136278
  hypo
tgaccacaacaacgcggtgatgaccgatgggctggaagcgcctggtgctggagaccggccaggtcgggcagcggtggccaggagcgctatgatgcaggtgggctgggctgggctgggttggggggaaattggttttaggagaggcctaggcccggggactctaggcctagatccaactggcgcccgcagcgtgagctcagcaaggtcctaagcctctccgacatggggcgtggcggggccgcggggctaccaggtgggacctctgacgcgccgccttcgccttcgccttcgccttcgcctccaggactcgcccttcttccagcagtacgagctggacctgcgggagcctgcgctgggccagggcagcttttctgtgtgtcgccgctgccgccagcgccagagcggccaggagttcgcagtcaagatcctcagtcgcaggtgggagggcccaggcgcgggcaggggtgggggtggcagagcgctgtcccgggggcggggccgaagcgcggcgaccgtaactccttctgctccgtcccccaggctggaggcgaacacgcagcgcgaagtggctgccctgcgcctgtgccagtcacaccccaacgtggtgaatctgcacgaggtgcatcacgaccaggtgatggct

SEQ ID NO: 168877 - DNA, 30 bp, Homo sapiens; identical to SEQ ID NO: 82356
  chr11:64136960-64136990
  hypo

SEQ ID NO: 168878 - DNA, 31 bp, Homo sapiens
  chr11:64140407-64140438
  hypo
caagacgggtgccaggcgctccagggactcc

SEQ ID NO: 168879 - DNA, 83 bp, Homo sapiens; identical to SEQ ID NO: 82357
  chr11:64143180-64143263
  hypo

SEQ ID NO: 168880 - DNA, 30 bp, Homo sapiens
  chr11:64150117-64150147
  hypo
acgattccctacgaacgatgtcccagcatc

SEQ ID NO: 168881 - DNA, 150 bp, Homo sapiens
  chr11:64150445-64150595
  hypo
tcatccgtcaatgctcggatggctttatttctcagagcagcccctcctgacccctccactagcctacaagccccgactctttgtgccgtcagtaggcagcagttcccaccgaagcagccgtccctgtgtgttgctgtcattgtcttttct

SEQ ID NO: 168882 - DNA, 164 bp, Homo sapiens
  chr11:64160545-64160709
  hypo
ggccacgggagcgatcggccgctgccaccattgaacactgggtgccacgcctggccccactgcagcctctggctctgtgccccaaaagccacctactgtccctgaagttggacactgtggccagaatggacggacttgacactgtccctaattctttttttttt

SEQ ID NO: 168883 - DNA, 231 bp, Homo sapiens; identical to SEQ ID NO: 82359
  chr11:64168610-64168841
  hypo

SEQ ID NO: 168884 - DNA, 108 bp, Homo sapiens
  chr11:64310456-64310564
  hypo
ttcacatgcaccgggcggacagcggaggccccgggcccggggaggcggcagcggccgctcaagtgaacccgggtctggaagctccttacagcacgatgatgcccaagc

SEQ ID NO: 168885 - DNA, 199 bp, Homo sapiens; identical to SEQ ID NO: 82361
  chr11:64313081-64313280
  hypo

SEQ ID NO: 168886 - DNA, 53 bp, Homo sapiens; identical to SEQ ID NO: 82362
  chr11:64319241-64319294
  hypo

SEQ ID NO: 168887 - DNA, 586 bp, Homo sapiens
  chr11:64323491-64324077
  hypo
ggagcaagccggaggcgtgggcctcttccagaccctgcaggtgctcaccttcatcctcccctgcctcatgataccttcccagatgctcctggagaacttctcagccgccatcccaggccaccgatgctggacacacatgctggacaatggctctgcggtttccacaaacatgacccccaaggcccttctgaccatctccatcccgccaggccccaaccaggggccccaccagtgccgccgcttccgccagccacagtggcagctcttggaccccaatgccacggccaccagctggagcgaagctgacacggagccgtgtgtggacggctgggtctatgaccgcagcgtcttcacctccaccatcgtggccaaggtagggcctcccccagagccactcgagtcccgtcaccttggaggtcagagtcatggatcaggttggttggactccaaggtccagtcctgggagggacccgcctcctctcgagcctctcagcccctcgtcagccacacacaggggagtgggcggcagggatcagtctacagatggggccagcccaggctcctggtagtgcggggggcacctggg

SEQ ID NO: 168888 - DNA, 31 bp, Homo sapiens; identical to SEQ ID NO: 82364
  chr11:64324827-64324858
  hypo

SEQ ID NO: 168889 - DNA, 30 bp, Homo sapiens; identical to SEQ ID NO: 82365
  chr11:64329587-64329617
  hypo

SEQ ID NO: 168890 - DNA, 43 bp, Homo sapiens; identical to SEQ ID NO: 25373
  chr11:64335473-64335516
  hypo

SEQ ID NO: 168891 - DNA, 88 bp, Homo sapiens; identical to SEQ ID NO: 25374
  chr11:64347187-64347275
  hypo

SEQ ID NO: 168892 - DNA, 223 bp, Homo sapiens
  chr11:64367274-64367497
  hypo
ctgagccacctgggccgccgccccacgctggccgcatccctgttgctggcagggctctgcattctggccaacacgctggtgccccacggtgagggggcaaagctgtacaccagagacttccctaccttgggggggtctcgggctgggaacagcacccctccttggaggtgctggactagagcaggtaccctggtaggaaggaggctgccggagccgtctaggg

SEQ ID NO: 168893 - DNA, 102 bp, Homo sapiens; identical to SEQ ID NO: 82368
  chr11:64367836-64367938
  hypo

SEQ ID NO: 168894 - DNA, 50 bp, Homo sapiens; identical to SEQ ID NO: 82369
  chr11:64390386-64390436
  hypo

SEQ ID NO: 168895 - DNA, 292 bp, Homo sapiens; identical to SEQ ID NO: 120914
  chr11:64409892-64410184
  hypo

SEQ ID NO: 168896 - DNA, 746 bp, Homo sapiens; identical to SEQ ID NO: 120915
  chr11:64410203-64410949
  hypo

SEQ ID NO: 168897 - DNA, 59 bp, Homo sapiens; identical to SEQ ID NO: 82371
  chr11:64418854-64418913
  hypo

SEQ ID NO: 168898 - DNA, 31 bp, Homo sapiens; identical to SEQ ID NO: 25377
  chr11:64434773-64434804
  hypo

SEQ ID NO: 168899 - DNA, 30 bp, Homo sapiens; identical to SEQ ID NO: 82373
  chr11:64435051-64435081
  hypo

SEQ ID NO: 168900 - DNA, 30 bp, Homo sapiens
  chr11:64451789-64451819
  hypo
gctcggtaatgacaacgcgggacagccctc

SEQ ID NO: 168901 - DNA, 65 bp, Homo sapiens; identical to SEQ ID NO: 120919
  chr11:64480265-64480330
  hypo

SEQ ID NO: 168902 - DNA, 1117 bp, Homo sapiens; identical to SEQ ID NO: 120920
  chr11:64480379-64481496
  hypo

SEQ ID NO: 168903 - DNA, 30 bp, Homo sapiens
  chr11:64488685-64488715
  hypo
actggcaagggtaagcgggagggagcagct

SEQ ID NO: 168904 - DNA, 99 bp, Homo sapiens
  chr11:64504252-64504351
  hypo
gcctgtactggtggccgcaggctggtcaccatggccagctcctccaggatgctaaagagctgcttcatcttggccccgttgagccgggtccgggctggg

SEQ ID NO: 168905 - DNA, 1625 bp, Homo sapiens; identical to SEQ ID NO: 120927
  chr11:64512196-64513821
  hypo

SEQ ID NO: 168906 - DNA, 66 bp, Homo sapiens; identical to SEQ ID NO: 82377
  chr11:64521037-64521103
  hypo

SEQ ID NO: 168907 - DNA, 30 bp, Homo sapiens; identical to SEQ ID NO: 82378
  chr11:64532956-64532986
  hypo

SEQ ID NO: 168908 - DNA, 30 bp, Homo sapiens
  chr11:64533332-64533362
  hypo
aagggcggcatgcccgccacccccatgccc

SEQ ID NO: 168909 - DNA, 30 bp, Homo sapiens; identical to SEQ ID NO: 82379
  chr11:64537362-64537392
  hypo

SEQ ID NO: 168910 - DNA, 24 bp, Homo sapiens
  chr11:64578576-64578600
  hypo
tgtttgttttgagacacggtcttt

SEQ ID NO: 168911 - DNA, 30 bp, Homo sapiens; identical to SEQ ID NO: 82381
  chr11:64595087-64595117
  hypo

SEQ ID NO: 168912 - DNA, 30 bp, Homo sapiens; identical to SEQ ID NO: 82382
  chr11:64597372-64597402
  hypo

SEQ ID NO: 168913 - DNA, 31 bp, Homo sapiens; identical to SEQ ID NO: 82383
  chr11:64597831-64597862
  hypo

SEQ ID NO: 168914 - DNA, 301 bp, Homo sapiens; identical to SEQ ID NO: 82384
  chr11:64599004-64599305
  hypo

SEQ ID NO: 168915 - DNA, 178 bp, Homo sapiens; identical to SEQ ID NO: 82385
  chr11:64600134-64600312
  hypo

SEQ ID NO: 168916 - DNA, 31 bp, Homo sapiens; identical to SEQ ID NO: 82386
  chr11:64600772-64600803
  hypo

SEQ ID NO: 168917 - DNA, 31 bp, Homo sapiens; identical to SEQ ID NO: 82387
  chr11:64601738-64601769
  hypo

SEQ ID NO: 168918 - DNA, 495 bp, Homo sapiens
  chr11:64602458-64602953
  hypo
catgggctgggccctcagtctcgcctgcgttccccaccccgacccacccctggcacccaccagctgaggatgtcggcgagctgggcctcccagttgctctccgtctcccgccgctcaccctccagccgctgcttgctctcctgctcctgggccagctctgcttctagctggggccggccagaggaaaggtcagccccaggccccagcagtcctgggactgccgtctccctgtaggtaccccagcaccccgagccccgtccatgtccaccctgctcactggctgcagcttgcccacccctcaactggctccccattgccttgtccgtctgttgtaccctccgtctgttgtaccctgctcacccgctcctgctcccggctcagcctccggttttcctcctgcagctggcacagagcctcctccttaccactcggcctggggaggagaaggccaaggccgtgactcaccgcccaggccaggcccggcccctccctgcc

SEQ ID NO: 168919 - DNA, 84 bp, Homo sapiens; identical to SEQ ID NO: 25381
  chr11:64607056-64607140
  hypo

SEQ ID NO: 168920 - DNA, 30 bp, Homo sapiens
  chr11:64607782-64607812
  hypo
cctggccacttcaccgcggtcccgcagggc

SEQ ID NO: 168921 - DNA, 248 bp, Homo sapiens
  chr11:64609225-64609473
  hypo
ggggtgagcccagcccggtgtgaacacctccccccacctaccccaggccctttgctcacctccccaaaggctcctcggccgatcaccttcaagatctcaaagtcatctctctgcagacgcagttctttcacctttgatacgaaggggctggctgaggggacacagggcgggactcagagtgcagggagggagggctccattccccctctcaccttgggcaagccaggagctgccgctcctgtgagccc

SEQ ID NO: 168922 - DNA, 30 bp, Homo sapiens
  chr11:64611399-64611429
  hypo
tttgcagtgccaatgcggtcggggtggtct

SEQ ID NO: 168923 - DNA, 30 bp, Homo sapiens; identical to SEQ ID NO: 82390
  chr11:64616875-64616905
  hypo

SEQ ID NO: 168924 - DNA, 30 bp, Homo sapiens; identical to SEQ ID NO: 82391
  chr11:64617572-64617602
  hypo

SEQ ID NO: 168925 - DNA, 222 bp, Homo sapiens
  chr11:64620282-64620504
  hypo
tcaacagtgacttcccggcaaggacagcgcccgcatccatcctcacctaatactgtatggagtgacgggctaaggagaacaaggccagttcctgcagactccgagcagcgctggggagaagctccctgagacccccgcgggaaagcctggtgggaagcccagctgtgtggtacctggtgctccacctgccttggtgccatcacagcccggacagtggccact

SEQ ID NO: 168926 - DNA, 401 bp, Homo sapiens; identical to SEQ ID NO: 82393
  chr11:64621796-64622197
  hypo

SEQ ID NO: 168927 - DNA, 30 bp, Homo sapiens
  chr11:64623796-64623826
  hypo
aatgggcccgtgccacgctccactccatca

SEQ ID NO: 168928 - DNA, 87 bp, Homo sapiens; identical to SEQ ID NO: 25383
  chr11:64624926-64625013
  hypo

SEQ ID NO: 168929 - DNA, 30 bp, Homo sapiens
  chr11:64627760-64627790
  hypo
ggtccacacgctccgcgaaccactccagga

SEQ ID NO: 168930 - DNA, 30 bp, Homo sapiens; identical to SEQ ID NO: 82395
  chr11:64630856-64630886
  hypo

SEQ ID NO: 168931 - DNA, 78 bp, Homo sapiens; identical to SEQ ID NO: 82396
  chr11:64631089-64631167
  hypo

SEQ ID NO: 168932 - DNA, 30 bp, Homo sapiens; identical to SEQ ID NO: 82397
  chr11:64631193-64631223
  hypo

SEQ ID NO: 168933 - DNA, 332 bp, Homo sapiens; identical to SEQ ID NO: 82398
  chr11:64635185-64635517
  hypo

SEQ ID NO: 168934 - DNA, 207 bp, Homo sapiens
  chr11:64646713-64646920
  hypo
aagaaaaatgggcagcgagaggcctgacctcccctcaggccgacggggtgggaatgggagagggacgcaagcgagggaggacatgggtgacaccggactcgcgcgggagaagagaaggcttccccacaaaggctatagctggggcaaggcagggagggcatgaggaggaagttgaggctctctggccacttgcgtattgggaagtga

SEQ ID NO: 168935 - DNA, 106 bp, Homo sapiens
  chr11:64648941-64649047
  hypo
aaagagaggtgccttttccgcttgcggtgccgtgcagtgaggagctcttatctgtgctcttggctatgccatccaagggccagctgcagtccgtgcaatccactgc

SEQ ID NO: 168936 - DNA, 102 bp, Homo sapiens; identical to SEQ ID NO: 82399
  chr11:64653029-64653131
  hypo

SEQ ID NO: 168937 - DNA, 30 bp, Homo sapiens; identical to SEQ ID NO: 25385
  chr11:64659114-64659144
  hypo

SEQ ID NO: 168938 - DNA, 30 bp, Homo sapiens; identical to SEQ ID NO: 82401
  chr11:64662732-64662762
  hypo

SEQ ID NO: 168939 - DNA, 30 bp, Homo sapiens
  chr11:64666121-64666151
  hypo
cacgtcgcggcatccgctcactcgtgtgta

SEQ ID NO: 168940 - DNA, 296 bp, Homo sapiens
  chr11:64667888-64668184
  hypo
tgctacacgtgacatcgagaacaaggcccgttgttctatgacacacacgtgtagtaggcactcgccaccccactcaccttgctcagctggatctccatgaggacatggtgctgccgcccgctgcccccctgcgtgcgccatgagttctggggccggttggggccagagcagcgggaaggggagctcctgggacctgagaggccagttcttgccctgggaagagggacaggggccaagctgactcagaggaaccccattccctccccgtcctcagcgggccttttagcctgggacaa

SEQ ID NO: 168941 - DNA, 30 bp, Homo sapiens
  chr11:64668471-64668501
  hypo
gtccgtgctgccgatcggccgtgagaagta

SEQ ID NO: 168942 - DNA, 73 bp, Homo sapiens; identical to SEQ ID NO: 25386
  chr11:64672164-64672237
  hypo

SEQ ID NO: 168943 - DNA, 30 bp, Homo sapiens
  chr11:64677410-64677440
  hypo
ggggtcagagcagccgtcggagcccctccc

SEQ ID NO: 168944 - DNA, 30 bp, Homo sapiens; identical to SEQ ID NO: 82404
  chr11:64678431-64678461
  hypo

SEQ ID NO: 168945 - DNA, 199 bp, Homo sapiens; identical to SEQ ID NO: 48603
  chr11:64698944-64699143
  hypo

SEQ ID NO: 168946 - DNA, 30 bp, Homo sapiens; identical to SEQ ID NO: 25387
  chr11:64707138-64707168
  hypo

SEQ ID NO: 168947 - DNA, 519 bp, Homo sapiens; identical to SEQ ID NO: 120937
  chr11:64739231-64739750
  hypo

SEQ ID NO: 168948 - DNA, 31 bp, Homo sapiens; identical to SEQ ID NO: 8168
  chr11:64759021-64759052
  hypo

SEQ ID NO: 168949 - DNA, 198 bp, Homo sapiens
  chr11:64774014-64774212
  hypo
aattaaataaaaaagggtccctgtgccttggagcaggggagcagggaagccggtcaggaggctgctgcagcgatccaggtgagtgggtgggggggtctgtcatgcggagagaagagtggtacctgcctcttaggttccggagtgagggcacagcaggacacgggcaaccaggggcagcagctgcgctcctgcgttcat

SEQ ID NO: 168950 - DNA, 29 bp, Homo sapiens
  chr11:64784668-64784697
  hypo
ctttttttttttttaatcagacggggtct

SEQ ID NO: 168951 - DNA, 28 bp, Homo sapiens
  chr11:64799348-64799376
  hypo
acagagcgagactccatctcaaaaaaaa

SEQ ID NO: 168952 - DNA, 35 bp, Homo sapiens; identical to SEQ ID NO: 82411
  chr11:64804456-64804491
  hypo

SEQ ID NO: 168953 - DNA, 166 bp, Homo sapiens; identical to SEQ ID NO: 82412
  chr11:64809833-64809999
  hypo

SEQ ID NO: 168954 - DNA, 30 bp, Homo sapiens
  chr11:64820074-64820104
  hypo
tgcctggccaggagccgtttaacatgagga

SEQ ID NO: 168955 - DNA, 95 bp, Homo sapiens
  chr11:64820395-64820490
  hypo
ctgagctaaagttcccggagggcagagcctgggcgctgcctgcttcacagcagcatcgggccttgctccatccaggcacacgggaggcacttgga

SEQ ID NO: 168956 - DNA, 30 bp, Homo sapiens
  chr11:64825589-64825619
  hypo
cagcagcacttcgtacgtggaggcctcggc

SEQ ID NO: 168957 - DNA, 157 bp, Homo sapiens
  chr11:64833874-64834031
  hypo
cctggtctctgtggtcgtggggcaggtcaggcagcttgaagaggagacctgccttccgggggtttgggtcactgcaggcagagacagctcgagtgagcagcatggggcagccgcctcttccctccccgctgccatggctgcccgcacacctgagcag

SEQ ID NO: 168958 - DNA, 30 bp, Homo sapiens; identical to SEQ ID NO: 82413
  chr11:64845661-64845691
  hypo

SEQ ID NO: 168959 - DNA, 936 bp, Homo sapiens; identical to SEQ ID NO: 82414
  chr11:64875425-64876361
  hypo

SEQ ID NO: 168960 - DNA, 30 bp, Homo sapiens; identical to SEQ ID NO: 82415
  chr11:64876973-64877003
  hypo

SEQ ID NO: 168961 - DNA, 30 bp, Homo sapiens; identical to SEQ ID NO: 25393
  chr11:64877296-64877326
  hypo

SEQ ID NO: 168962 - DNA, 30 bp, Homo sapiens
  chr11:64883513-64883543
  hypo
tacatctactgaagcggctccaccacccca

SEQ ID NO: 168963 - DNA, 30 bp, Homo sapiens; identical to SEQ ID NO: 25394
  chr11:64883896-64883926
  hypo

SEQ ID NO: 168964 - DNA, 231 bp, Homo sapiens; identical to SEQ ID NO: 82418
  chr11:64898550-64898781
  hypo

SEQ ID NO: 168965 - DNA, 190 bp, Homo sapiens
  chr11:64950291-64950481
  hypo
ggattatgagcagctgcgggtgcgatgcctgcagagtgggaccctcttccgtgatgaggccttccccccggtaccccagagcctgggttacaaggacctgggtcccaattcctccaagacctatggcatcaagtggaagcgtcccacggtgagaggggccatcctgggtgggactcggctaagccagatc

SEQ ID NO: 168966 - DNA, 190 bp, Homo sapiens; identical to SEQ ID NO: 82419
  chr11:64950869-64951059
  hypo

SEQ ID NO: 168967 - DNA, 774 bp, Homo sapiens; identical to SEQ ID NO: 82420
  chr11:64951331-64952105
  hypo

SEQ ID NO: 168968 - DNA, 78 bp, Homo sapiens; identical to SEQ ID NO: 82421
  chr11:64955442-64955520
  hypo

SEQ ID NO: 168969 - DNA, 303 bp, Homo sapiens
  chr11:64955904-64956207
  hypo
tggacccatatgaacgggaccagctccgggtcaagatggaggacggggagttctggtgagcgccccctccccttctaccccacctctccacccctacacatcagctctgtgccctgacgggctgtgcctcacctgtgtacctcccacctcaggatgtcattccgagacttcatgcgggagttcacccgcctggagatctgcaacctcacacccgacgccctcaagagccggaccatccgcaaatggaacaccacactctacgaaggcacctggcggcgggggagcaccgcggggggctgccga

SEQ ID NO: 168970 - DNA, 219 bp, Homo sapiens; identical to SEQ ID NO: 82424
  chr11:64971911-64972130
  hypo

SEQ ID NO: 168971 - DNA, 181 bp, Homo sapiens
  chr11:64974940-64975121
  hypo
gattacaggtgtgagccaccgcacctggcccaaactcttgccttttactcactgagctgaacagcatccccttcatttaggtcacatgagtgctggatatggggcggggcagggcagggcaggaacgagattcccttttcagattagaaaagtgagactcaagccgggctcagtggctcac

SEQ ID NO: 168972 - DNA, 501 bp, Homo sapiens
  chr11:64975360-64975861
  hypo
ggtgacagagtgaaactccatctcaaaaagaaaagaaaagaaaagtgaggctcagagaagcgaagtgacttgtagcagatatgtgacctcagccctccctccagctgcctccacacgggcagggccggggcctctcttacctgctttctccccttctcggtccagcaagtgctctcagaagaggagattgacgagaacttcaaggccctcttcaggcagctggcaggggaggtaggttggggcatggcaggttgggaggggcctgtgaggggcagccctctcctggggcaggtgccacctcctctctctccccaggacatggagatcagcgtgaaggagttgcggacaatcctcaataggatcatcagcaaacgtgagtccccgcggggctgtcccaccaccccaccatttcttccacatcagaatccaggctcctgctcacacattgagctgaacctcatcccttggtctgcatgagtcggggaatcctccagtttttct

SEQ ID NO: 168973 - DNA, 463 bp, Homo sapiens; identical to SEQ ID NO: 25400
  chr11:64977144-64977607
  hypo

SEQ ID NO: 168974 - DNA, 43 bp, Homo sapiens; identical to SEQ ID NO: 82427
  chr11:65023026-65023069
  hypo

SEQ ID NO: 168975 - DNA, 145 bp, Homo sapiens
  chr11:65028519-65028664
  hypo
aatgctgggattacaggcgtgagtgaccgcacctggcctgggatggacattttaaaggttcctgatacatattgctaaattgttttctcgaaacgctctataccatcccaccagcattgtatgacgcctacggttgagatttttg

SEQ ID NO: 168976 - DNA, 26 bp, Homo sapiens
  chr11:65036097-65036123
  hypo
ctaccgtgcccagccattattgtttt

SEQ ID NO: 168977 - DNA, 30 bp, Homo sapiens; identical to SEQ ID NO: 82430
  chr11:65045442-65045472
  hypo

SEQ ID NO: 168978 - DNA, 30 bp, Homo sapiens; identical to SEQ ID NO: 82431
  chr11:65063420-65063450
  hypo

SEQ ID NO: 168979 - DNA, 26 bp, Homo sapiens
  chr11:65064127-65064153
  hypo
gtgactgaggccgggcgcagtggttg

SEQ ID NO: 168980 - DNA, 196 bp, Homo sapiens; identical to SEQ ID NO: 48614
  chr11:65081962-65082158
  hypo

SEQ ID NO: 168981 - DNA, 123 bp, Homo sapiens
  chr11:65120976-65121099
  hypo
aggatctgaactgcccgcagtgcagccctgcagcctttcccagggcacgttgatgtgcacacagtttccctgaaggcaaagtgaacatgtggagagcttacgtggcagcgcgtatgtcttcag

SEQ ID NO: 168982 - DNA, 30 bp, Homo sapiens
  chr11:65121352-65121382
  hypo
gtacagcaatggatgcgctttggcagctga

SEQ ID NO: 168983 - DNA, 30 bp, Homo sapiens
  chr11:65123675-65123705
  hypo
gtcggctttggggcccgccatgttcttgcg

SEQ ID NO: 168984 - DNA, 472 bp, Homo sapiens
  chr11:65123942-65124414
  hypo
tgcttctttgggatccgcagtgaggctctgcctgcctcctaccacccggacctgggcatcccctggttagagtggttggcacagtttgaccgggacatgggacagcagggccgacaggtggctttgctgctggctgcccgagtggtggaggagctggcaggcctgcctgggctctaccacgtgaagctcttgcctctggccgcctctagcaccacgcctcccctgcccagctcagtggtccgggcctttaaggcccattaccgacaccggctgttgggcaaactggctgccatccaaagcgagagggatggcacctcgctggccgaggccggggcaggcatcaccgtgctggacgccctgcacgtggcgtctgccgcctgggccaaggtgcctcctcagctcattttcagcagcttcattcaagaagggctggctcccggcaaaacgcccccgtcctcgcacaaaacctctg

SEQ ID NO: 168985 - DNA, 30 bp, Homo sapiens; identical to SEQ ID NO: 25402
  chr11:65127662-65127692
  hypo

SEQ ID NO: 168986 - DNA, 134 bp, Homo sapiens
  chr11:65145404-65145538
  hypo
agccctggagatggctgatggcgacgggggctggcggtcgcctctggtggtgggtggtggtacttagggtgtggcaggccaagtcttcgcttgtttactttggtcccaggagtaagggtcgtaggttaggtacc

SEQ ID NO: 168987 - DNA, 92 bp, Homo sapiens; identical to SEQ ID NO: 120958
  chr11:65147932-65148024
  hypo

SEQ ID NO: 168988 - DNA, 192 bp, Homo sapiens; identical to SEQ ID NO: 82436
  chr11:65168191-65168383
  hypo

SEQ ID NO: 168989 - DNA, 26 bp, Homo sapiens
  chr11:65180774-65180800
  hypo
tctctgatgggcgggcgagggtgtgt

SEQ ID NO: 168990 - DNA, 30 bp, Homo sapiens
  chr11:65181126-65181156
  hypo
tgcccacggagcacccgagtgaagctgtct

SEQ ID NO: 168991 - DNA, 99 bp, Homo sapiens; identical to SEQ ID NO: 8174
  chr11:65189905-65190004
  hypo

SEQ ID NO: 168992 - DNA, 26 bp, Homo sapiens
  chr11:65258596-65258622
  hypo
gtgagccaccacgcccagcctggctt

SEQ ID NO: 168993 - DNA, 121 bp, Homo sapiens
  chr11:65276489-65276610
  hypo
tgctgggattacaaggatgagccaccgcgcccggccgactgctcttaataatataaacaagccctaggcattccccatatgtactcctccagttgtacacagggacctcagttttttcttt

SEQ ID NO: 168994 - DNA, 29 bp, Homo sapiens
  chr11:65276909-65276938
  hypo
caggtgtgagccaccgatcccggcccaca

SEQ ID NO: 168995 - DNA, 30 bp, Homo sapiens; identical to SEQ ID NO: 25406
  chr11:65296779-65296809
  hypo

SEQ ID NO: 168996 - DNA, 30 bp, Homo sapiens; identical to SEQ ID NO: 25407
  chr11:65305560-65305590
  hypo

SEQ ID NO: 168997 - DNA, 1003 bp, Homo sapiens; identical to SEQ ID NO: 120981
  chr11:65306212-65307215
  hypo

SEQ ID NO: 168998 - DNA, 30 bp, Homo sapiens; identical to SEQ ID NO: 120982
  chr11:65307510-65307540
  hypo

SEQ ID NO: 168999 - DNA, 107 bp, Homo sapiens
  chr11:65309027-65309134
  hypo
ggggagttgtccagtccgagggaggagctgggaggacactcaccctcacaaccgtgctggtcctgggtgggagtgaagccctcatcgcagacacacacataggagcc

SEQ ID NO: 169000 - DNA, 30 bp, Homo sapiens
  chr11:65316530-65316560
  hypo
aaacgaggctaacaacgctcactttgcaga

SEQ ID NO: 169001 - DNA, 30 bp, Homo sapiens; identical to SEQ ID NO: 25409
  chr11:65348379-65348409
  hypo

SEQ ID NO: 169002 - DNA, 225 bp, Homo sapiens; identical to SEQ ID NO: 25410
  chr11:65353077-65353302
  hypo

SEQ ID NO: 169003 - DNA, 386 bp, Homo sapiens
  chr11:65366938-65367324
  hypo
ggtgcaggagtgggcggggagtcgggcgtcttgagcgagaagcagatgagcggggaagggggcggctcggtcgggcagggcgcgggcgttggcgtggggggtgttgtcggggactccccgcgctcgcgtcctgggcctcccggcggctgcaggtcgcggccaaggcccagcgaggcgagcagggcggtgccgcgcagcagcgcccgctggatcagcttgggcgtcccagagctgctaccgcgctctgcggggacaggcctcttgggctcctcgggctccaggctaggccgcggggggttacctgcgggcagaggcggcacaggtgagggtgtggctggtgcatattccgggtgagggcccaagacctctccgtggtcttggaacaa

SEQ ID NO: 169004 - DNA, 344 bp, Homo sapiens
  chr11:65374933-65375277
  hypo
ccgctgctcgcgcgccgctcgcgtcagctcctcctcgcggctcagtagttcctgcgcccgagacagcgatggtggagaggtcagcctggcaccaatcccggcagcgcccgccccgactctgccccagggagatcggggagacactcgttccaacgctgggtcccttgattcctcgcaccttttccttggctcgcagctcgtcgaagagaccctggatctcgcgcttccagccttcctgcatggaatggaaggagtcccgcggcatttcccgtaggacctgtgcctccagcgcctccaactgctgcaggatggaggcgaagtcgggcctgcggtgggggtcctgc

SEQ ID NO: 169005 - DNA, 31 bp, Homo sapiens; identical to SEQ ID NO: 25412
  chr11:65385209-65385240
  hypo

SEQ ID NO: 169006 - DNA, 147 bp, Homo sapiens
  chr11:65385896-65386043
  hypo
cagatgacacgctgcgttcctttgacacggtcattggagcagggacgccaccgggcctggctgagccgctcctggtcgtgcggcccaaggacttggccctgctacggcctagcaaacggcagccacccctgcgaagacactctccac

SEQ ID NO: 169007 - DNA, 580 bp, Homo sapiens
  chr11:65386920-65387500
  hypo
tccctggcggaacaccgtccccaaccttactcccccagccttgtctgagcatctgtcacttacacttgggggcctctctctgggcagcggccgaggagactggcaggcgggaccgctcaagcagtgtgaggcggacccaggccattcggagacgccacaatgcaggcagcaaccccacccctccagcctctgtcatgggctcgccgcccaggtgagcaccttgccagctgtgccgaggggcaccgggggccggggagggcccgcaagctctagctggcgctgacctggggctgaccctctccagcagcctgcaggaagctcagcggggccgggctgcctcccactcccgggcgctgacgctgccctctgcgctgcatttcgcctcttcactgttgctcacccgggccggtgccaatgtgcatgaggcctgcacctttgatgacacttctgagggtgctgtgcactatttctacgatgagagcggtgagcctttcccaagcccggtggcccagtgcctccccgccttcccccaacagcctgagtcctcctagcagtggtgctcgctcggccctgtggcagg

SEQ ID NO: 169008 - DNA, 224 bp, Homo sapiens; identical to SEQ ID NO: 25415
  chr11:65388103-65388327
  hypo

SEQ ID NO: 169009 - DNA, 30 bp, Homo sapiens
  chr11:65392919-65392949
  hypo
gcttggagacagcccgggccgagcccccgg

SEQ ID NO: 169010 - DNA, 121 bp, Homo sapiens
  chr11:65393283-65393404
  hypo
gggcagcccctccccggcctgtgccaggtggccctctgtggtcccttggcctgctcccatcagctgagtctctggcctctccctcctgcagtcggtgctgggtttcgtgttgtacgcactg

SEQ ID NO: 169011 - DNA, 904 bp, Homo sapiens; identical to SEQ ID NO: 25416
  chr11:65397156-65398060
  hypo

SEQ ID NO: 169012 - DNA, 202 bp, Homo sapiens
  chr11:65402721-65402923
  hypo
ccagcagccctatacgatgccattgcggccaacgaggagcggctggtcatctcacatgagggtgacccagcatggcgcagcgccatcctcagcaacacgccctccctgctggcgctgcgccatgtcctggatgatgcctccgacgagtacaagatcatcatgctcaaccggcgccacctcagcttccgagtcatcaaggttg

SEQ ID NO: 169013 - DNA, 30 bp, Homo sapiens; identical to SEQ ID NO: 25417
  chr11:65412564-65412594
  hypo

SEQ ID NO: 169014 - DNA, 486 bp, Homo sapiens
  chr11:65413815-65414301
  hypo
cacacacaccctgcacgccacacaccacctacaggtgggcaccggagtggtcccaggtctcccgtgggcatggagtcctgccgcccctcactaacgcctccctccccgcagggtggccgtgagccgcacccaggacacccctgccttcgggccagctctgcctgctggcggaggccccttcgcagccaacgccgacttccgggccttcctgctggccaaagcgctgaatggtgagcaggcggccggccacgcgcgccagttccacgccatggccacgcgcacccgccagcagtacctgcaagacctggccaccaacgaggtgaccactacgtcgctggactcggcttcacgcttcggcctgccctccctgggtgggaggcgccgggcggcccctcggggcccaggcgccgagctgcaggcagcgggctcactggtgtggggagtgcgcgcggcgcccggggcgcgggtcgccgccggggctcaggc

SEQ ID NO: 169015 - DNA, 30 bp, Homo sapiens
  chr11:65419532-65419562
  hypo
gattttccaggacctcgtggaaggactgga

SEQ ID NO: 169016 - DNA, 174 bp, Homo sapiens; identical to SEQ ID NO: 120993
  chr11:65419809-65419983
  hypo

SEQ ID NO: 169017 - DNA, 50 bp, Homo sapiens; identical to SEQ ID NO: 82456
  chr11:65425913-65425963
  hypo

SEQ ID NO: 169018 - DNA, 33 bp, Homo sapiens; identical to SEQ ID NO: 82457
  chr11:65465491-65465524
  hypo

SEQ ID NO: 169019 - DNA, 78 bp, Homo sapiens
  chr11:65476357-65476435
  hypo
cgagggccaccgccacgcctggctaattaaaaaaaaaaaattttgtagagacagagtctcgctctgttgccgaggctg

SEQ ID NO: 169020 - DNA, 18 bp, Homo sapiens
  chr11:65476494-65476512
  hypo
agccgtgagccactggac

SEQ ID NO: 169021 - DNA, 17 bp, Homo sapiens
  chr11:65478547-65478564
  hypo
gccgttttgtcccatta

SEQ ID NO: 169022 - DNA, 30 bp, Homo sapiens; identical to SEQ ID NO: 82459
  chr11:65495234-65495264
  hypo

SEQ ID NO: 169023 - DNA, 40 bp, Homo sapiens
  chr11:65511030-65511070
  hypo
tgctgggattacaggcgtgagccaccgcaccctcttggcc

SEQ ID NO: 169024 - DNA, 154 bp, Homo sapiens
  chr11:65511330-65511484
  hypo
gcagcggcagcccgtcgggagctgcagctgccaagatgcaggctgcagcgtgggagtcgcagaggaggaggcacagccggggctgtgtggcccaaggggccagcgggagctgggaacaggtgaaagcctcaccccctgccgagttggcagggca

SEQ ID NO: 169025 - DNA, 38 bp, Homo sapiens; identical to SEQ ID NO: 25420
  chr11:65524509-65524547
  hypo

SEQ ID NO: 169026 - DNA, 207 bp, Homo sapiens; identical to SEQ ID NO: 121001
  chr11:65548871-65549078
  hypo

SEQ ID NO: 169027 - DNA, 32 bp, Homo sapiens; identical to SEQ ID NO: 121002
  chr11:65553780-65553812
  hypo

SEQ ID NO: 169028 - DNA, 1720 bp, Homo sapiens; identical to SEQ ID NO: 121003
  chr11:65554042-65555762
  hypo

SEQ ID NO: 169029 - DNA, 30 bp, Homo sapiens; identical to SEQ ID NO: 25422
  chr11:65557170-65557200
  hypo

SEQ ID NO: 169030 - DNA, 30 bp, Homo sapiens
  chr11:65560137-65560167
  hypo
aggcccccggacagacggacgccagtgcct

SEQ ID NO: 169031 - DNA, 109 bp, Homo sapiens
  chr11:65561323-65561432
  hypo
aatagggcgggaaggcggtgcagcagtggtggtcggggcagccccgctctgctgcatgcctgcgatgggagggacggagtctccaggttccagccgtctcatggctagg

SEQ ID NO: 169032 - DNA, 30 bp, Homo sapiens
  chr11:65561717-65561747
  hypo
aggtaatgccactcgcgctgtctccgaggg

SEQ ID NO: 169033 - DNA, 33 bp, Homo sapiens
  chr11:65577927-65577960
  hypo
actcacatgcacacacgtagacacacgcacaat

SEQ ID NO: 169034 - DNA, 92 bp, Homo sapiens
  chr11:65578019-65578111
  hypo
acacacgttgagacgtgcactcacgtatacactcccacacacgttcagacgtgcactcacgtgcacactcgcaaacacgcacactcacacat

SEQ ID NO: 169035 - DNA, 30 bp, Homo sapiens
  chr11:65578628-65578658
  hypo
ggtagaattaattggcgtaatagaacgtgt

SEQ ID NO: 169036 - DNA, 372 bp, Homo sapiens; identical to SEQ ID NO: 121004
  chr11:65582708-65583080
  hypo

SEQ ID NO: 169037 - DNA, 848 bp, Homo sapiens; identical to SEQ ID NO: 48648
  chr11:65600723-65601571
  hypo

SEQ ID NO: 169038 - DNA, 30 bp, Homo sapiens
  chr11:65620184-65620214
  hypo
gaggtgcggcccgccgagagccaccagcag

SEQ ID NO: 169039 - DNA, 333 bp, Homo sapiens
  chr11:65629223-65629556
  hypo
cccacccactgccccgaaactgcctgctgttttatcccagatttgcagcggatcatcccatcacctggcccattttacagagaaggaaactgagagacaactgagtgacttacccagggccacaaagcctgctggggacttattcaaagatgactggctggctttcatgttcagaactcctctgtacctttcaggttcctgcccagcccaaagcgggaggctctggcagctactggccagctcggcactcaggagcccgagtgatactgctggtgctctaccgggagcacctggtgagcactgggctacaccgggaggcggaaccatggcagt

SEQ ID NO: 169040 - DNA, 30 bp, Homo sapiens; identical to SEQ ID NO: 82471
  chr11:65633538-65633568
  hypo

SEQ ID NO: 169041 - DNA, 93 bp, Homo sapiens; identical to SEQ ID NO: 82472
  chr11:65634005-65634098
  hypo

SEQ ID NO: 169042 - DNA, 30 bp, Homo sapiens; identical to SEQ ID NO: 25428
  chr11:65635934-65635964
  hypo

SEQ ID NO: 169043 - DNA, 100 bp, Homo sapiens; identical to SEQ ID NO: 25429
  chr11:65665114-65665214
  hypo

SEQ ID NO: 169044 - DNA, 361 bp, Homo sapiens; identical to SEQ ID NO: 25430
  chr11:65684984-65685345
  hypo

SEQ ID NO: 169045 - DNA, 278 bp, Homo sapiens
  chr11:65698236-65698514
  hypo
aacagtttcagatggggcctgcggtgtgatgtggtgaaggccaatctcagccgcattcgcacagccaaagcctgtaataagcctcccacaatgagtccttggagaatgggtccaggcgattcagttgttctcatttgggctcgccttgacctctcagtggctcttgtcatagttggtcgcttgcctcctctttgaaacactttcttcacttggatgggggccctcactctcttggcaatctttttttttttttgagacggagtctcgcactctcaccc

SEQ ID NO: 169046 - DNA, 30 bp, Homo sapiens; identical to SEQ ID NO: 82477
  chr11:65706283-65706313
  hypo

SEQ ID NO: 169047 - DNA, 30 bp, Homo sapiens
  chr11:65722454-65722484
  hypo
ctgcatgctccaacacgcatcacatgtaac

SEQ ID NO: 169048 - DNA, 37 bp, Homo sapiens; identical to SEQ ID NO: 82478
  chr11:65722777-65722814
  hypo

SEQ ID NO: 169049 - DNA, 30 bp, Homo sapiens; identical to SEQ ID NO: 25433
  chr11:65733612-65733642
  hypo

SEQ ID NO: 169050 - DNA, 66 bp, Homo sapiens; identical to SEQ ID NO: 25434
  chr11:65733941-65734007
  hypo

SEQ ID NO: 169051 - DNA, 200 bp, Homo sapiens
  chr11:65740975-65741175
  hypo
caagcctgacagtagcgagtaggagtaaaggacatggagcggccagagtcctcagccacgctactcacagccatgggcaggagtctaatcagatgagagggaatgtgtgcgtgcccggggcccaccccacacctctcccgagtgtgcccatgtgcaccaggagacattgtcagtgggcctgcagccgcagtacttgggac

SEQ ID NO: 169052 - DNA, 315 bp, Homo sapiens
  chr11:65743836-65744151
  hypo
ggtttgcccacagccgctccctcccccaggtggtggagattgtgaagaagctggagtctcgccagcggggctgggaggaggatgaggatcccgagcggaagggggccatcgtgttcaacgccacgtccgagttctgccgcaccttgggggagatccccacctacgggctggctggcaatcgcgaggagcaggaggagctcatggtgcgtctggggcggccccgccctctgcttccctcggctgggtgggctggctggggcctgggccgaccctggtcttttgtgccccaggactttgaacgggatgaggagcgct

SEQ ID NO: 169053 - DNA, 30 bp, Homo sapiens; identical to SEQ ID NO: 121021
  chr11:65746237-65746267
  hypo

SEQ ID NO: 169054 - DNA, 121 bp, Homo sapiens; identical to SEQ ID NO: 48657
  chr11:65746277-65746398
  hypo

SEQ ID NO: 169055 - DNA, 30 bp, Homo sapiens; identical to SEQ ID NO: 25436
  chr11:65746739-65746769
  hypo

SEQ ID NO: 169056 - DNA, 40 bp, Homo sapiens; identical to SEQ ID NO: 25437
  chr11:65754936-65754976
  hypo

SEQ ID NO: 169057 - DNA, 17 bp, Homo sapiens
  chr11:65760753-65760770
  hypo
gtgtataaacttgagcg

SEQ ID NO: 169058 - DNA, 241 bp, Homo sapiens; identical to SEQ ID NO: 82486
  chr11:65761069-65761310
  hypo

SEQ ID NO: 169059 - DNA, 30 bp, Homo sapiens; identical to SEQ ID NO: 82487
  chr11:65773964-65773994
  hypo

SEQ ID NO: 169060 - DNA, 35 bp, Homo sapiens; identical to SEQ ID NO: 82488
  chr11:65787644-65787679
  hypo

SEQ ID NO: 169061 - DNA, 42 bp, Homo sapiens; identical to SEQ ID NO: 25439
  chr11:65810129-65810171
  hypo

SEQ ID NO: 169062 - DNA, 30 bp, Homo sapiens; identical to SEQ ID NO: 25440
  chr11:65810501-65810531
  hypo

SEQ ID NO: 169063 - DNA, 79 bp, Homo sapiens; identical to SEQ ID NO: 25441
  chr11:65817721-65817800
  hypo

SEQ ID NO: 169064 - DNA, 242 bp, Homo sapiens; identical to SEQ ID NO: 82492
  chr11:65935758-65936000
  hypo

SEQ ID NO: 169065 - DNA, 41 bp, Homo sapiens
  chr11:65944153-65944194
  hypo
ggattacatgcgtgaaccatcatgcccggtccatatacact

SEQ ID NO: 169066 - DNA, 61 bp, Homo sapiens; identical to SEQ ID NO: 82493
  chr11:65996091-65996152
  hypo

SEQ ID NO: 169067 - DNA, 30 bp, Homo sapiens; identical to SEQ ID NO: 82494
  chr11:65999341-65999371
  hypo

SEQ ID NO: 169068 - DNA, 22 bp, Homo sapiens
  chr11:66021656-66021678
  hypo
cgctcctgcctggggaacacag

SEQ ID NO: 169069 - DNA, 30 bp, Homo sapiens
  chr11:66039717-66039747
  hypo
cagatcgtgagtgtcgctcttcccaaaatc

SEQ ID NO: 169070 - DNA, 285 bp, Homo sapiens; identical to SEQ ID NO: 121033
  chr11:66045216-66045501
  hypo

SEQ ID NO: 169071 - DNA, 71 bp, Homo sapiens; identical to SEQ ID NO: 25442
  chr11:66047172-66047243
  hypo

SEQ ID NO: 169072 - DNA, 269 bp, Homo sapiens; identical to SEQ ID NO: 82498
  chr11:66052168-66052437
  hypo

SEQ ID NO: 169073 - DNA, 31 bp, Homo sapiens
  chr11:66061846-66061877
  hypo
aagtgcctgctcctcacgctgctcatccacg

SEQ ID NO: 169074 - DNA, 30 bp, Homo sapiens
  chr11:66062695-66062725
  hypo
ggggccgtgcccagcgggcccccgctgtcc

SEQ ID NO: 169075 - DNA, 1106 bp, Homo sapiens; identical to SEQ ID NO: 121039
  chr11:66079388-66080494
  hypo

SEQ ID NO: 169076 - DNA, 30 bp, Homo sapiens
  chr11:66083557-66083587
  hypo
tctgtgtccacacagcggtgcggatcatcc

SEQ ID NO: 169077 - DNA, 30 bp, Homo sapiens; identical to SEQ ID NO: 82500
  chr11:66099701-66099731
  hypo

SEQ ID NO: 169078 - DNA, 200 bp, Homo sapiens; identical to SEQ ID NO: 82501
  chr11:66099977-66100177
  hypo

SEQ ID NO: 169079 - DNA, 31 bp, Homo sapiens; identical to SEQ ID NO: 82502
  chr11:66101068-66101099
  hypo

SEQ ID NO: 169080 - DNA, 680 bp, Homo sapiens
  chr11:66101898-66102578
  hypo
gaacagaatcagacaggctggcgctgtggaggggagcagagggtcggatggggcagtgctggagctatggagagacggagcctcacccagcctcttaggcgacagcagcttctcagggcccagctccgcactcagcatggcccgggcccggctcagcgcctgacggatgccctgcagctcctggggctcgggcccagcccgcacctgggtcagtaggtcctgcaccagctggcccgcggctgtgtgtcggtcctgcatcagtgctgccgcagcccggcccacctgccgctccggtgccagtagggagcagaaggcggcgctcatggaccgaagcagaggtcgtcggcggcccaggtggggtgaggtcgctgggctcccccgggaccctggcaccccctcctcctcggagctgctgggggagccgcagtccacctcttggagggagggcataggcggaaggctagggccactgcctgctggcacgcggtaccccactgagctctccctccgtagcagctggcaagggggcagccgctctgtctggctggggactgcccctggcagcacggggacggggggaggtggcacggcaggtggagacagggggctggaggtctctgtggacacgcgcactttgaagcttctcttgaatttctcccgcttggtgggccctaggtccc

SEQ ID NO: 169081 - DNA, 31 bp, Homo sapiens; identical to SEQ ID NO: 8198
  chr11:66107464-66107495
  hypo

SEQ ID NO: 169082 - DNA, 171 bp, Homo sapiens
  chr11:66113510-66113681
  hypo
gggaagggctcagcagcgtcggggagagttggggtacttggccttcaactcctgtttgaactggcgatataggatcttattgtgctgattttcagcctccttttggggatggaacttcaacgcttctttgaagcccttatgaaccaagaaaccttcgttcaggacctcaaa

SEQ ID NO: 169083 - DNA, 308 bp, Homo sapiens; identical to SEQ ID NO: 82506
  chr11:66113949-66114257
  hypo

SEQ ID NO: 169084 - DNA, 31 bp, Homo sapiens; identical to SEQ ID NO: 25448
  chr11:66128652-66128683
  hypo

SEQ ID NO: 169085 - DNA, 404 bp, Homo sapiens; identical to SEQ ID NO: 121042
  chr11:66176317-66176721
  hypo

SEQ ID NO: 169086 - DNA, 21 bp, Homo sapiens
  chr11:66205042-66205063
  hypo
caagaaaaaaataaatcgggg

SEQ ID NO: 169087 - DNA, 30 bp, Homo sapiens; identical to SEQ ID NO: 82510
  chr11:66241269-66241299
  hypo

SEQ ID NO: 169088 - DNA, 164 bp, Homo sapiens
  chr11:66243062-66243226
  hypo
tggcaggtggaaaacgagtccaacgtgctgcaggacggctctctcatcgacctgtgtggggccacactgctgtggcgcacaccggcggggctgctgcgggctcccacactgaagcaactggaggcccagcggcaggaggcaaatgcagcgcggccccagtgccc

SEQ ID NO: 169089 - DNA, 31 bp, Homo sapiens; identical to SEQ ID NO: 25450
  chr11:66266000-66266031
  hypo

SEQ ID NO: 169090 - DNA, 317 bp, Homo sapiens
  chr11:66325259-66325576
  hypo
tttcgggactaccggcgtctgcacaagccgccccgcattcaggaaaagtgccagctggagatcaacttcaacacactgcagaccaagttgcggctcagccaccggcctgccttcatgccctccgagggcaagctggtctcggtgagctctacacacattccctaggtgaccttgaggtccgtatcccatctgtacaatgggcaaaccgtgatggagcgcacccctgcctgctccacaggacatcgccaacgcctggcgggggctggagcaggtggaaaagggctatgaggactggctgctctcggagatccggcgcc

SEQ ID NO: 169091 - DNA, 30 bp, Homo sapiens; identical to SEQ ID NO: 25451
  chr11:66331594-66331624
  hypo

SEQ ID NO: 169092 - DNA, 31 bp, Homo sapiens; identical to SEQ ID NO: 82515
  chr11:66333945-66333976
  hypo

SEQ ID NO: 169093 - DNA, 234 bp, Homo sapiens; identical to SEQ ID NO: 82516
  chr11:66373084-66373318
  hypo

SEQ ID NO: 169094 - DNA, 30 bp, Homo sapiens; identical to SEQ ID NO: 82517
  chr11:66393926-66393956
  hypo

SEQ ID NO: 169095 - DNA, 715 bp, Homo sapiens; identical to SEQ ID NO: 25452
  chr11:66410883-66411598
  hypo

SEQ ID NO: 169096 - DNA, 82 bp, Homo sapiens
  chr11:66413514-66413596
  hypo
tgaaattccgagctgcggttgtgcatgagaatacacccttcgtggtaccccatctccgggacgttctcggctctgtgcgttc

SEQ ID NO: 169097 - DNA, 30 bp, Homo sapiens; identical to SEQ ID NO: 25453
  chr11:66452952-66452982
  hypo

SEQ ID NO: 169098 - DNA, 37 bp, Homo sapiens
  chr11:66453718-66453755
  hypo
gagtgcggcctggtgcggccgtcgcacacatccagtc

SEQ ID NO: 169099 - DNA, 279 bp, Homo sapiens; identical to SEQ ID NO: 82521
  chr11:66454423-66454702
  hypo

SEQ ID NO: 169100 - DNA, 266 bp, Homo sapiens; identical to SEQ ID NO: 82522
  chr11:66457264-66457530
  hypo

SEQ ID NO: 169101 - DNA, 30 bp, Homo sapiens; identical to SEQ ID NO: 82523
  chr11:66458814-66458844
  hypo

SEQ ID NO: 169102 - DNA, 30 bp, Homo sapiens; identical to SEQ ID NO: 82524
  chr11:66459066-66459096
  hypo

SEQ ID NO: 169103 - DNA, 30 bp, Homo sapiens
  chr11:66460704-66460734
  hypo
ggcctccgcctcggcggcatcgcggtagaa

SEQ ID NO: 169104 - DNA, 120 bp, Homo sapiens
  chr11:66461611-66461731
  hypo
tctcatcttccacatcgcggtggaactggtgctgctcgcgagaagcctgcaggcgccggcagcgttcccgcatgggctggcacaaggccctgaacttctcctccacggccctcgaggttc

SEQ ID NO: 169105 - DNA, 30 bp, Homo sapiens; identical to SEQ ID NO: 82525
  chr11:66468375-66468405
  hypo

SEQ ID NO: 169106 - DNA, 30 bp, Homo sapiens; identical to SEQ ID NO: 82526
  chr11:66473160-66473190
  hypo

SEQ ID NO: 169107 - DNA, 131 bp, Homo sapiens
  chr11:66475122-66475253
  hypo
tgccgagcggcgatgcgcttgatgtcgtggtagcgctcggcggccagctctgcagccacggcgtccactgcctgcacccggccgctgtaggccacgatgtccgtctcaatggcttcgtgcttccgtactgc

SEQ ID NO: 169108 - DNA, 76 bp, Homo sapiens
  chr11:66475609-66475685
  hypo
acctgggacacgaggcgctggttctcgctgagccaggtctcccgcatggcagccttgcggtcgaagcgggcggcca

SEQ ID NO: 169109 - DNA, 51 bp, Homo sapiens
  chr11:66484935-66484986
  hypo
taagacacagcaacacacccacgtcgctccgtgtctttcacctccagccac

SEQ ID NO: 169110 - DNA, 30 bp, Homo sapiens; identical to SEQ ID NO: 82529
  chr11:66488706-66488736
  hypo

SEQ ID NO: 169111 - DNA, 30 bp, Homo sapiens
  chr11:66510366-66510396
  hypo
cactgcgcccggccacgatgggaaatattt

SEQ ID NO: 169112 - DNA, 81 bp, Homo sapiens
  chr11:66510745-66510826
  hypo
atggggaggaatggggaggagcgctgagcatagactcgagaagggtatgattcaggtctcgatagacaatgttctttggag

SEQ ID NO: 169113 - DNA, 141 bp, Homo sapiens; identical to SEQ ID NO: 82531
  chr11:66511193-66511334
  hypo

SEQ ID NO: 169114 - DNA, 21 bp, Homo sapiens
  chr11:66511633-66511654
  hypo
gggcgtcgtttttaatttcag

SEQ ID NO: 169115 - DNA, 89 bp, Homo sapiens; identical to SEQ ID NO: 82533
  chr11:66513181-66513270
  hypo

SEQ ID NO: 169116 - DNA, 241 bp, Homo sapiens
  chr11:66513569-66513810
  hypo
tgcccggcccgatatgggaatatcgtaacagaggacgtgtgaaggaatagttagactctacacgtacctggaaaccattcttgttaactggtacaaatgaggatcttagttcccagatctccctgcctttaaaaagggggtaataattttccttgtgttgcctccctgtaaaagtgagaatctgtttgcatgaataataatgggagttggccgggcgcggtgggtagcctgtattctcagc

SEQ ID NO: 169117 - DNA, 30 bp, Homo sapiens; identical to SEQ ID NO: 82535
  chr11:66514957-66514987
  hypo

SEQ ID NO: 169118 - DNA, 34 bp, Homo sapiens; identical to SEQ ID NO: 82536
  chr11:66515369-66515403
  hypo

SEQ ID NO: 169119 - DNA, 89 bp, Homo sapiens
  chr11:66557361-66557450
  hypo
atatttacttattcatccagacgtgtgtttgttcaagtcagtgtcagtgagctagatactatctgtaggtacagtgtcttaagatatgt

SEQ ID NO: 169120 - DNA, 89 bp, Homo sapiens; identical to SEQ ID NO: 82538
  chr11:66557749-66557838
  hypo

SEQ ID NO: 169121 - DNA, 146 bp, Homo sapiens; identical to SEQ ID NO: 82539
  chr11:66600087-66600233
  hypo

SEQ ID NO: 169122 - DNA, 35 bp, Homo sapiens
  chr11:66602480-66602515
  hypo
aggcattgtttccggcgggtcgggggagggggtag

SEQ ID NO: 169123 - DNA, 30 bp, Homo sapiens; identical to SEQ ID NO: 25462
  chr11:66620003-66620033
  hypo

SEQ ID NO: 169124 - DNA, 1339 bp, Homo sapiens
  chr11:66625239-66626578
  hypo
ctgctggccagtggagcggccgcctgcccgctgccctgcgtctgccagaacctgtccgagtcgctcagcaccctctgtgcccaccgaggcctgctgtttgtgccgcccaacgtggaccggcgcacagtggagctgcggctggctgacaacttcatccaggccctggggccccctgacttccgcaacatgacgggactggtggacctgacactgtctcgcaatgccatcacccgcattggggcccgcgcctttggggacctcgagagcctgcgttccctccaccttgacggcaacaggctggtggagctgggcaccgggagcctccggggccccgtcaatctgcagcacctcatcctcagcggcaaccagctgggccgcatcgcgccgggagccttcgacgacttcctagagagcctggaggacctggacctgtcctacaacaacctccggcaggtgccctgggccggcatcggcgccatgcctgccctgcacaccctcaacctggaccataaccttattgacgcactgcccccaggcgccttcgcccagctcggtcagctctcccgcctggacctcacctccaaccgcctggccacgctggctccggacccgcttttctctcgtgggcgtgatgcagaggcctctcccgcccccctggtgctgagctttagcgggaaccccctgcactgcaactgtgagctgctgtggctgcggcggctggcgcggccggacgacctggaaacgtgcgcctccccgcccggcctggccggccgctacttctgggcagtgcccgagggcgagttctcctgtgagccgcccctcattgcccgccacacgcagcgcctctgggtgctggaaggccagcgggccacgctgcggtgccgggccctgggtgaccccgcgcctaccatgcactgggtcggtcctgacgaccggttggttggcaactcctcccgagcccgggctttccccaacgggaccttagagattggggtgaccggcgctggggacgctgggggctacacctgcatcgccaccaaccctgctggtgaggccacagcccgagtagaactgcgggtgctggccttgccccatggtgggaacagcagtgccgaggggggccgccccgggccctcggacatcgccgcctccgctcgcactgctgccgagggtgaggggacgctggagtctgagccagccgtgcaggtgacggaggtgaccgccacctcagggctggtgagctggggtcccgggcggccagccgacccagtgtggatgttccaaatccagtacaacagcagcgaagatgagaccctcatctaccggtgaggatgcgtgc

SEQ ID NO: 169125 - DNA, 35 bp, Homo sapiens; identical to SEQ ID NO: 25465
  chr11:66628275-66628310
  hypo

SEQ ID NO: 169126 - DNA, 30 bp, Homo sapiens; identical to SEQ ID NO: 82544
  chr11:66628888-66628918
  hypo

SEQ ID NO: 169127 - DNA, 201 bp, Homo sapiens
  chr11:66629458-66629659
  hypo
gagggagcagaggaaccgggcacaaccccaggagccagccaggaccacagagcaacgggcaggggcaggcgagggggatggcctgggtcacccctgtgcatggccacgcatcccctcaacaccgaagcagccgcaggacatccccgccaggacaccaggagccgcagcaaggtgcagggggagcgcgtgatgtcgacagct

SEQ ID NO: 169128 - DNA, 350 bp, Homo sapiens; identical to SEQ ID NO: 82546
  chr11:66631164-66631514
  hypo

SEQ ID NO: 169129 - DNA, 31 bp, Homo sapiens; identical to SEQ ID NO: 25467
  chr11:66631858-66631889
  hypo

SEQ ID NO: 169130 - DNA, 592 bp, Homo sapiens
  chr11:66633440-66634032
  hypo
tcctcctgacctgggcgcccagcagtctcttcccctgggaggcgccgcccctcctctgggcactgcctgcctccgtgtactctatgtccacttcagagcccacatgcgggtcctccctaactgccgggctgtggcaacttggcactgcagccccaggcaccaggcagaacctgtgcacaggtgagctggcatctccctctgctcgagctccgcccacctcaatgcggccggtgtccggctggaagctgcgcgcggggtcctcggtggtgacccggcactggatggcacacccgttgatgcggatgttctcctgccgcaggcccaggtcgggtaggctcctgccctcagccacgtggatctgagcatggaccaggtctacgctgtagggcattggggggaggggggaaaggacgggagaaagggggaaacatgaggcgggggatagacgaggggcaccgcagccagtggggcgtccacacacagtgcgactcctgcccataggctctgggccagcctgaacagccggttcctcccaaccagtggctccaccagcccctgccctgctcccgccgggagccgactaaactacaca

SEQ ID NO: 169131 - DNA, 63 bp, Homo sapiens; identical to SEQ ID NO: 82549
  chr11:66637037-66637100
  hypo

SEQ ID NO: 169132 - DNA, 98 bp, Homo sapiens; identical to SEQ ID NO: 82550
  chr11:66637737-66637835
  hypo

SEQ ID NO: 169133 - DNA, 41 bp, Homo sapiens
  chr11:66639552-66639593
  hypo
ggaggcagcgggggcggtggaggttcggcggattcccagga

SEQ ID NO: 169134 - DNA, 42 bp, Homo sapiens
  chr11:66643996-66644038
  hypo
ctgctcaagaggtgccgggagcaccagcgaggagctcaggtg

SEQ ID NO: 169135 - DNA, 101 bp, Homo sapiens
  chr11:66644471-66644572
  hypo
aaggccttcaggaggcggcccgcaggcactgctgagcatcacggcagcttctccgggaagctgtttgcaaaacttatcaagagcctttaaggtatttatgc

SEQ ID NO: 169136 - DNA, 30 bp, Homo sapiens; identical to SEQ ID NO: 25470
  chr11:66647155-66647185
  hypo

SEQ ID NO: 169137 - DNA, 198 bp, Homo sapiens
  chr11:66648998-66649196
  hypo
gggcgagggcctggccgtcacctgccccgctcctgacagagctgccgcttccatagcacacaacacatactcactgagctccacctggtgcccggccagtgccagtggaggagggcacaatggtgggcagtgaccccagcagagccttgctccttgccaggcaggggccactgtggctcttcacgcagactcactcag

SEQ ID NO: 169138 - DNA, 139 bp, Homo sapiens; identical to SEQ ID NO: 82554
  chr11:66652535-66652674
  hypo

SEQ ID NO: 169139 - DNA, 101 bp, Homo sapiens; identical to SEQ ID NO: 82555
  chr11:66654306-66654407
  hypo

SEQ ID NO: 169140 - DNA, 357 bp, Homo sapiens; identical to SEQ ID NO: 82556
  chr11:66655203-66655560
  hypo

SEQ ID NO: 169141 - DNA, 31 bp, Homo sapiens; identical to SEQ ID NO: 25473
  chr11:66658266-66658297
  hypo

SEQ ID NO: 169142 - DNA, 39 bp, Homo sapiens; identical to SEQ ID NO: 82558
  chr11:66658550-66658589
  hypo

SEQ ID NO: 169143 - DNA, 17 bp, Homo sapiens
  chr11:66660020-66660037
  hypo
ctttaagaaaaatgtcg

SEQ ID NO: 169144 - DNA, 101 bp, Homo sapiens
  chr11:66662143-66662244
  hypo
ccacaatgggctgaacgggctgccgtgtataaagagggcaggctgaaagctttcaaaaagcaatcagggctgggcacagtggctcgcacctgtaatgccaa

SEQ ID NO: 169145 - DNA, 31 bp, Homo sapiens; identical to SEQ ID NO: 82559
  chr11:66664018-66664049
  hypo

SEQ ID NO: 169146 - DNA, 93 bp, Homo sapiens; identical to SEQ ID NO: 25474
  chr11:66665003-66665096
  hypo

SEQ ID NO: 169147 - DNA, 299 bp, Homo sapiens; identical to SEQ ID NO: 82561
  chr11:66676019-66676318
  hypo

SEQ ID NO: 169148 - DNA, 224 bp, Homo sapiens
  chr11:66676877-66677101
  hypo
tgcaggacatgatcttcggaacaggtgtccctgccgctcccccccgaagagaagctgcctgagagtggggtcacagcttactcagctctgcctgcaatgagcacttcacaggctgctactggattggaccaaaaatgtcatcaccaccacgtgtcctatttggtccagcgcagcctgcctgagtctccatcagcactggggagccggagcggacaagaagacac

SEQ ID NO: 169149 - DNA, 305 bp, Homo sapiens
  chr11:66677362-66677667
  hypo
gtatggctggaacaccgggtatgagcagaaggggacgcaggggcctgaccactcactgcggcagagcaacacagcatgatccatgctgtcttcaatttacacagaaagcccggtgttgaaaaattcaacaattaaccttccatgcaattgtaaaataccctgaaaccaacaattatgacgactttataggtgttttcttcatctgagaaaaacacaagcggggggagtaagtgtctggcttaaacggtagcaaggttatgcgctgctgccctggcgaacgagtcgctcacatgctcaacaacact

SEQ ID NO: 169150 - DNA, 200 bp, Homo sapiens
  chr11:66683035-66683235
  hypo
cagctgtggaccactccgtgccctgtgatcctgcagggagcaagggctccaggggtgattctgctccatccatggaggggtgtaccagggccctgcccgcagggggagctaccaggggagggaccacaggcctcagaggtggcatgccaggttccgagacttcctcgatttatcctaaagtctcacgctaacgtaacaga

SEQ ID NO: 169151 - DNA, 40 bp, Homo sapiens; identical to SEQ ID NO: 82565
  chr11:66683677-66683717
  hypo

SEQ ID NO: 169152 - DNA, 100 bp, Homo sapiens; identical to SEQ ID NO: 82566
  chr11:66683836-66683936
  hypo

SEQ ID NO: 169153 - DNA, 26 bp, Homo sapiens
  chr11:66695177-66695203
  hypo
gagcgaaagtccgtctcaaaaaaaaa

SEQ ID NO: 169154 - DNA, 148 bp, Homo sapiens; identical to SEQ ID NO: 25478
  chr11:66695455-66695603
  hypo

SEQ ID NO: 169155 - DNA, 347 bp, Homo sapiens; identical to SEQ ID NO: 82569
  chr11:66701353-66701700
  hypo

SEQ ID NO: 169156 - DNA, 34 bp, Homo sapiens; identical to SEQ ID NO: 82570
  chr11:66706996-66707030
  hypo

SEQ ID NO: 169157 - DNA, 45 bp, Homo sapiens; identical to SEQ ID NO: 82571
  chr11:66710159-66710204
  hypo

SEQ ID NO: 169158 - DNA, 31 bp, Homo sapiens; identical to SEQ ID NO: 82572
  chr11:66718615-66718646
  hypo

SEQ ID NO: 169159 - DNA, 31 bp, Homo sapiens; identical to SEQ ID NO: 82573
  chr11:66744189-66744220
  hypo

SEQ ID NO: 169160 - DNA, 31 bp, Homo sapiens; identical to SEQ ID NO: 25481
  chr11:66749830-66749861
  hypo

SEQ ID NO: 169161 - DNA, 22 bp, Homo sapiens
  chr11:66752027-66752049
  hypo
gccacagcgcctggcagtcgag

SEQ ID NO: 169162 - DNA, 30 bp, Homo sapiens
  chr11:66799593-66799623
  hypo
tttgcgcacgtcacacgattgcgtgattag

SEQ ID NO: 169163 - DNA, 30 bp, Homo sapiens
  chr11:66799978-66800008
  hypo
caaggtaccggtgcccggctctgccgtttc

SEQ ID NO: 169164 - DNA, 88 bp, Homo sapiens
  chr11:66807524-66807612
  hypo
gtgagcatggagtacgacactgcctcccacacgctgaacgtggcggtgatgcagggcaaggacctcctggagcgggaggaggccagct

SEQ ID NO: 169165 - DNA, 31 bp, Homo sapiens; identical to SEQ ID NO: 82577
  chr11:66817389-66817420
  hypo

SEQ ID NO: 169166 - DNA, 30 bp, Homo sapiens; identical to SEQ ID NO: 25483
  chr11:66834370-66834400
  hypo

SEQ ID NO: 169167 - DNA, 34 bp, Homo sapiens
  chr11:66867269-66867303
  hypo
tctagcttgggcgacagagcgagactctgtctca

SEQ ID NO: 169168 - DNA, 127 bp, Homo sapiens; identical to SEQ ID NO: 48692
  chr11:66886029-66886156
  hypo

SEQ ID NO: 169169 - DNA, 121 bp, Homo sapiens; identical to SEQ ID NO: 8214
  chr11:66897391-66897512
  hypo

SEQ ID NO: 169170 - DNA, 241 bp, Homo sapiens; identical to SEQ ID NO: 48695
  chr11:66897571-66897812
  hypo

SEQ ID NO: 169171 - DNA, 151 bp, Homo sapiens
  chr11:66974945-66975096
  hypo
ctcgatagagatgatcgatgcatcttttatggcagggagtcgtcgcatggtggatgtcatggacgtgaacacacagaaaggcattgaaatgaccatggctcagtggacacgctactatgagaccccagaggaggagcgagagaaactctat

SEQ ID NO: 169172 - DNA, 32 bp, Homo sapiens; identical to SEQ ID NO: 25486
  chr11:67002079-67002111
  hypo

SEQ ID NO: 169173 - DNA, 85 bp, Homo sapiens
  chr11:67021692-67021777
  hypo
gctccggaacatgaccgacttccggctggcaggccttgacatcacagatgccacgcttcgcctcataattcgccacatgcccctc

SEQ ID NO: 169174 - DNA, 78 bp, Homo sapiens; identical to SEQ ID NO: 25487
  chr11:67051192-67051270
  hypo

SEQ ID NO: 169175 - DNA, 50 bp, Homo sapiens; identical to SEQ ID NO: 25488
  chr11:67059785-67059835
  hypo

SEQ ID NO: 169176 - DNA, 301 bp, Homo sapiens; identical to SEQ ID NO: 82585
  chr11:67072095-67072396
  hypo

SEQ ID NO: 169177 - DNA, 25 bp, Homo sapiens
  chr11:67072939-67072964
  hypo
tgagccaccgcgcccggcctgggca

SEQ ID NO: 169178 - DNA, 210 bp, Homo sapiens; identical to SEQ ID NO: 82587
  chr11:67073280-67073490
  hypo

SEQ ID NO: 169179 - DNA, 31 bp, Homo sapiens; identical to SEQ ID NO: 25490
  chr11:67074565-67074596
  hypo

SEQ ID NO: 169180 - DNA, 30 bp, Homo sapiens; identical to SEQ ID NO: 82589
  chr11:67075331-67075361
  hypo

SEQ ID NO: 169181 - DNA, 100 bp, Homo sapiens; identical to SEQ ID NO: 82590
  chr11:67076904-67077004
  hypo

SEQ ID NO: 169182 - DNA, 171 bp, Homo sapiens; identical to SEQ ID NO: 82591
  chr11:67077276-67077447
  hypo

SEQ ID NO: 169183 - DNA, 462 bp, Homo sapiens; identical to SEQ ID NO: 82592
  chr11:67077696-67078158
  hypo

SEQ ID NO: 169184 - DNA, 609 bp, Homo sapiens; identical to SEQ ID NO: 82593
  chr11:67078397-67079006
  hypo

SEQ ID NO: 169185 - DNA, 42 bp, Homo sapiens; identical to SEQ ID NO: 25494
  chr11:67091661-67091703
  hypo

SEQ ID NO: 169186 - DNA, 25 bp, Homo sapiens
  chr11:67110662-67110687
  hypo
tttttttttttttttttgagacgga

SEQ ID NO: 169187 - DNA, 29 bp, Homo sapiens
  chr11:67114347-67114376
  hypo
attttttttgagatggagcttcgctcttg

SEQ ID NO: 169188 - DNA, 715 bp, Homo sapiens; identical to SEQ ID NO: 121085
  chr11:67141092-67141807
  hypo

SEQ ID NO: 169189 - DNA, 77 bp, Homo sapiens
  chr11:67145531-67145608
  hypo
actaacaatagtttacgcgcacgcagctgttccccacatcaggcacagtgctaaggctttcgcgggctattttattt

SEQ ID NO: 169190 - DNA, 42 bp, Homo sapiens; identical to SEQ ID NO: 25496
  chr11:67150725-67150767
  hypo

SEQ ID NO: 169191 - DNA, 30 bp, Homo sapiens; identical to SEQ ID NO: 25497
  chr11:67165692-67165722
  hypo

SEQ ID NO: 169192 - DNA, 184 bp, Homo sapiens; identical to SEQ ID NO: 25498
  chr11:67166352-67166536
  hypo

SEQ ID NO: 169193 - DNA, 30 bp, Homo sapiens
  chr11:67174371-67174401
  hypo
gcagcaggtgggcgtcggacccctgctgta

SEQ ID NO: 169194 - DNA, 443 bp, Homo sapiens
  chr11:67186966-67187409
  hypo
aagctcagtggctggcgctggcgggggcggcaggcatggcgtctgcacccgcgggcagagctgggtgcagtggtggacacagtgctggcgctgctggagaagctggaggaggaggagagtgtcctggtggaggctgtgtacccacctgcccagctgccctgctcaggtgagagccacctgggctgaccagggatgggagtttggtgtggccttctggccactctgtgctggccttagacctccccgtcttcccccagatggtccttcacccggccccggcctggccgtgcgaatctgtgctgtggtgtgtcggacacagggtgataggccactgctgagcaaggtgagcgtggcccaggcccaggctgtgaccctgcctgccacacgccagcccagtcccagtagtggtttgccaagggcccctgagccgtctctgggcagag

SEQ ID NO: 169195 - DNA, 236 bp, Homo sapiens
  chr11:67201982-67202218
  hypo
gaccagggcacggatcgtgactaaggatggcaggcactgagtgtcgcatggccctgcctccgccccccagggcttcacatacgtggcgccgtctgtcctggacagcatcaaggagggcttctccttccagcccaagctgcgctcacccaggcgcctcaacagtagcccccgggcccccgtcaggtactgagggacgtgggggtgtgtggctgggttagggacgctggcaggcagga

SEQ ID NO: 169196 - DNA, 30 bp, Homo sapiens
  chr11:67202539-67202569
  hypo
tcctgccaccgccgccgccctcgaccaccg

SEQ ID NO: 169197 - DNA, 30 bp, Homo sapiens
  chr11:67202814-67202844
  hypo
ccgcccgccacgccccgcgctcaactgctc

SEQ ID NO: 169198 - DNA, 584 bp, Homo sapiens
  chr11:67203182-67203766
  hypo
atgggacaccaagaccggcctctacagtgcggtgacatggaggccctggcccccagctgccctggcgctgtcatcccaggctgcgctgccagcaaaggcgtgcaggtcactcagcagggcctcagcactgccccctgcgctcgctggtcctggggagccgaggaccaggtcgccctccgtgtcactgtctctggcttcctcagcccgcacggggacctgctctgggctggacgcctctccacattgctgctcgccttccccagggtcagcctgcaggccaccatccgcgacgtggtcatagtctgtgtcctgctcatcctcctgtcgctcaaggtcattgtctgtggaccccagctcagctcgggcctgcagccagcgacctggggggctggcccagagcaggcgccgcgtgcggccccacagcgcggcacctaggcgggccgggtggtagtagccccctgagtcacggctgaggcggcgccaggccagtgctaggccagtggccagcagtaggagcagcagcagcagcaggacaacggtgacagagctggagcccacgctgtcctccgcgctgccacccgagc

SEQ ID NO: 169199 - DNA, 202 bp, Homo sapiens; identical to SEQ ID NO: 82603
  chr11:67205681-67205883
  hypo

SEQ ID NO: 169200 - DNA, 214 bp, Homo sapiens; identical to SEQ ID NO: 82604
  chr11:67206218-67206432
  hypo

SEQ ID NO: 169201 - DNA, 35 bp, Homo sapiens; identical to SEQ ID NO: 25500
  chr11:67208821-67208856
  hypo

SEQ ID NO: 169202 - DNA, 30 bp, Homo sapiens
  chr11:67209242-67209272
  hypo
cgatgatgcccactcgcttggtgtgcccct

SEQ ID NO: 169203 - DNA, 57 bp, Homo sapiens
  chr11:67209514-67209571
  hypo
cgtgtgcccacacaccgtcgggtaggccttgtcaatgcggcccgtctgtgggcacga

SEQ ID NO: 169204 - DNA, 220 bp, Homo sapiens; identical to SEQ ID NO: 25501
  chr11:67209931-67210151
  hypo

SEQ ID NO: 169205 - DNA, 235 bp, Homo sapiens; identical to SEQ ID NO: 121091
  chr11:67210769-67211004
  hypo

SEQ ID NO: 169206 - DNA, 30 bp, Homo sapiens
  chr11:67215242-67215272
  hypo
ggggtttacacaacccgcgcttcctgggtt

SEQ ID NO: 169207 - DNA, 62 bp, Homo sapiens; identical to SEQ ID NO: 82609
  chr11:67221669-67221731
  hypo

SEQ ID NO: 169208 - DNA, 30 bp, Homo sapiens; identical to SEQ ID NO: 82610
  chr11:67223159-67223189
  hypo

SEQ ID NO: 169209 - DNA, 202 bp, Homo sapiens; identical to SEQ ID NO: 25503
  chr11:67230824-67231026
  hypo

SEQ ID NO: 169210 - DNA, 21 bp, Homo sapiens
  chr11:67231145-67231166
  hypo
agccaccgtgcccggccatcc

SEQ ID NO: 169211 - DNA, 290 bp, Homo sapiens
  chr11:67257335-67257625
  hypo
ggcacacaggagatgtgacatcgatgtttgatgctttttgagtgacaagtagctctgctgctggtgtgtgatgtctgggggcccagccagcccagatgtgggtcaggtctgctgctgacggacgcagctgtggtgtccccgagccccgctgtgatatgccccatgccctgcaggtggagagccctggcacgtaccagcaggacccatgggccatgacagacgaagagaaggcaaaggcagtgccacttatccaccaggagggcaaccggttgtaccgcgaggggcatgtg

SEQ ID NO: 169212 - DNA, 30 bp, Homo sapiens
  chr11:67258993-67259023
  hypo
gaggagagggccgagcgcttcgtgagacct

SEQ ID NO: 169213 - DNA, 461 bp, Homo sapiens
  chr11:67259308-67259769
  hypo
cctcctccctccccccggcgctgggtcccctcatatgaaagggaagtaacaccgaggagcacacggagatatagggtgtggggctgggggggccagcgctggggccaaaagtctgggtccccagcctcccacacgcagcccctcgggccccttgggtgtgtcaataaataacccaggtccaggctggtgtgggcctcactcctcgctgtccagcttcaggctgatgctccgtgctttgccccgtgccagggtggtgggtggtgttcccgggccctcacgctccgcctggctggggcccctcgagcgaagcagctggctctgtttgcgcaggaagtccacgggggcagccacaccatagctgctcttgcccaaggcagctctcgggggtcccgaggaggcatgcgagtgcgagcccgcttccagctggcccaggtgggccacatagccgtctgacaggaact

SEQ ID NO: 169214 - DNA, 128 bp, Homo sapiens
  chr11:67260398-67260526
  hypo
cctcacctggcactgcgcctgtagcttccgcacggcacggcccacgatgtaggtctggctcggggacagccccagcgccgcgtatacagccacatctttgggagacccataaccggccacgatgttca

SEQ ID NO: 169215 - DNA, 377 bp, Homo sapiens
  chr11:67260760-67261137
  hypo
agtcaggcagggcccgggccgatccagttgggaacagatgggcctccgccgatccgggggtggagggtaagggggagcgggggcggggtcaggacccggagcctcccccagccgccgcacctcctgcaccaggctctgcagaaacattgccttctggcgtagtgggtcgtgggtgaggccgtcgcagaaggagacgacgccgtgggggaagttgtgctgcgacagccatgccaccacgcggtgcttctgcatatccggccggcctgtgacatacacgatcaggtagccggagtcctgccagtgcctgtggggcgggggcagcggtcagctccgctggccaggggtgaggggccggtcaccccggtgaaatgggtggt

SEQ ID NO: 169216 - DNA, 30 bp, Homo sapiens
  chr11:67269524-67269554
  hypo
gggccactgcatcccgcacgatgtcgatgg

SEQ ID NO: 169217 - DNA, 30 bp, Homo sapiens
  chr11:67286630-67286660
  hypo
aaactctgccaggacgaagccaaggttttg

SEQ ID NO: 169218 - DNA, 30 bp, Homo sapiens; identical to SEQ ID NO: 82615
  chr11:67287552-67287582
  hypo

SEQ ID NO: 169219 - DNA, 36 bp, Homo sapiens; identical to SEQ ID NO: 82616
  chr11:67291005-67291041
  hypo

SEQ ID NO: 169220 - DNA, 148 bp, Homo sapiens; identical to SEQ ID NO: 82617
  chr11:67353107-67353255
  hypo

SEQ ID NO: 169221 - DNA, 259 bp, Homo sapiens; identical to SEQ ID NO: 82618
  chr11:67378801-67379060
  hypo

SEQ ID NO: 169222 - DNA, 30 bp, Homo sapiens; identical to SEQ ID NO: 25507
  chr11:67394579-67394609
  hypo

SEQ ID NO: 169223 - DNA, 30 bp, Homo sapiens
  chr11:67398521-67398551
  hypo
tgctctgctgtgtgacgttgagcaggtccc

SEQ ID NO: 169224 - DNA, 30 bp, Homo sapiens; identical to SEQ ID NO: 82620
  chr11:67401518-67401548
  hypo

SEQ ID NO: 169225 - DNA, 30 bp, Homo sapiens; identical to SEQ ID NO: 25508
  chr11:67402398-67402428
  hypo

SEQ ID NO: 169226 - DNA, 215 bp, Homo sapiens; identical to SEQ ID NO: 121106
  chr11:67406910-67407125
  hypo

SEQ ID NO: 169227 - DNA, 30 bp, Homo sapiens; identical to SEQ ID NO: 121107
  chr11:67407690-67407720
  hypo

SEQ ID NO: 169228 - DNA, 38 bp, Homo sapiens
  chr11:67425588-67425626
  hypo
atttctggccgggcacggtggctcacatctgtaatccc

SEQ ID NO: 169229 - DNA, 185 bp, Homo sapiens; identical to SEQ ID NO: 82623
  chr11:67430154-67430339
  hypo

SEQ ID NO: 169230 - DNA, 31 bp, Homo sapiens; identical to SEQ ID NO: 82624
  chr11:67431647-67431678
  hypo

SEQ ID NO: 169231 - DNA, 268 bp, Homo sapiens; identical to SEQ ID NO: 82625
  chr11:67432664-67432932
  hypo

SEQ ID NO: 169232 - DNA, 95 bp, Homo sapiens
  chr11:67450463-67450558
  hypo
acagcagcggcacaacgtgtgtgtcttattgcgatgctttccaaacgatgatgctcccttcgtcatctcgcttctgcggccgagaccagaaagtg

SEQ ID NO: 169233 - DNA, 715 bp, Homo sapiens
  chr11:67462526-67463241
  hypo
aggctttttacactcttcactcgctttgtcctacctggccactttcctcacgggaatttaggcccctcttagcattggcgtgccggtataaaccccaaggcaagatccgccttaagccgtatgaggtagccacggaaccgcaggcaagactcactcgctcggtccagcagtaggacttatcatgatttacacaagcaacaccagctgcagtgaggcttgtgactattcacacacacttttaacctccagaatatcccgaccaccaagcaagtactttgtcgcacccttgcgacgtttctttactttgctctgtgaacagagtttatctggtccccgaggcagtgcaatgcaagcctattcgccgttttccacgttgctgagggtccgggtttattcatcacaacaggtaagtccggattcccagtccctgaggccaccgcagtaaggcagtggggcgcctccccttggtgggggggcgggaatcagagaccccgacccgaaggagactgggtgatcccagacgagcccccaagactgttagaaataaatccttattccccgatgtcacaaagaagaatcagcagacgaaaagcttcctcagcaaggtgatttttaccttctgcagaaagagtgctgcccgtccgcaatcctgccacgatcgcatacaaaataaaaaaggcactagaatatttatcccttacgcatgaggtcccta

SEQ ID NO: 169234 - DNA, 30 bp, Homo sapiens
  chr11:67559501-67559531
  hypo
atgtcaagttggaggcggagcgctgctggg

SEQ ID NO: 169235 - DNA, 320 bp, Homo sapiens
  chr11:67764061-67764381
  hypo
gctgtacttaccaaggcgataccagtgcaggcaaagagcacctcgaagccgctgtagataaagaaaggcacgaggtggcgcaggcggtagtcacgcacgtgcttgaagggcagctggaagatgttgccccagcccacgctgcgcagatcgatctcctccgtgggccggtaagcggctccgcacaaacccagcacctgcgaacccattacttgaaggggcggccagccaggcccaggcctggcctccaggcttcagccccgcccttcagatgcaccacgtgcctgggccttgccccagctcggccccgcctcccaaaccag

SEQ ID NO: 169236 - DNA, 30 bp, Homo sapiens; identical to SEQ ID NO: 82628
  chr11:67775286-67775316
  hypo

SEQ ID NO: 169237 - DNA, 96 bp, Homo sapiens; identical to SEQ ID NO: 8227
  chr11:67777601-67777697
  hypo

SEQ ID NO: 169238 - DNA, 553 bp, Homo sapiens; identical to SEQ ID NO: 82630
  chr11:67781063-67781616
  hypo

SEQ ID NO: 169239 - DNA, 181 bp, Homo sapiens; identical to SEQ ID NO: 82631
  chr11:67785445-67785626
  hypo

SEQ ID NO: 169240 - DNA, 258 bp, Homo sapiens
  chr11:67786111-67786369
  hypo
ccggccgggctgaggcgggcagggggctcaggggatatttgctcccacagggtggcccctctgggtgggagctggctgctgaggggccggggtgctgagcacttaatttcatccccggctcccggcccaggccacgcagctggactccgccttcatccggaaggagccctttggcctggtcctcatcattgcgccctggaactatccgctgaacctgacgctggtgcccctcgtgggagccctcgctgcaggtgagag

SEQ ID NO: 169241 - DNA, 186 bp, Homo sapiens
  chr11:67786587-67786773
  hypo
accaggagctggctacgcctcctccagctctctccctgcactgccctgcagggaactgtgtggtgctgaagccatcggagattagcaagaacgtcgagaagatcctggccgaggtgctgccccaatacgtggaccaggtgagcagggctgccgggcaggtagagcgggaacaggcaaggctcaagg

SEQ ID NO: 169242 - DNA, 30 bp, Homo sapiens
  chr11:67787262-67787292
  hypo
caggtgaggccgggacgagggtcgggacag

SEQ ID NO: 169243 - DNA, 88 bp, Homo sapiens
  chr11:67795519-67795607
  hypo
gcacccctcaaagcagcgcctgcctcctccctcctgggtcttccctctccctgcctcagcctcctccctcagccgctcccaaccatga

SEQ ID NO: 169244 - DNA, 83 bp, Homo sapiens
  chr11:67797202-67797285
  hypo
cctacctaccctcagcgcagatcctcccaacacacacatgcaggcagcctcggggcctctgcgggtccctctaccacagcatt

SEQ ID NO: 169245 - DNA, 743 bp, Homo sapiens
  chr11:67808549-67809292
  hypo
actgcttactttctgcgtgacctcagcaccgcatcaagcctgcccaggcctcagtttccacctctgtcagatgggggtggtaacagcagcttccaggattcagtgagtgaaggtgcacaggtgcccgtggttgggaactgtctgtggtctgcccctgactggcccccatccgtgtccacccacaggaccatgggctccatgttccggagcgaggaggtggccctggtccagctctttctgcccacagcggctgcctacacctgcgtgagtcggctgggcgagctgggcctcgtggagttcagagacgtgagttgggtgggcaggcgtgggaagggggctactgccaaggttagcccggaggccggtccaggatggggactgccccccctccgccatagggccctggccccatttgaaccccagcggcccctgccatgggcactgctcatgggaagcccgcagctgaggcccctgagctggctcctccccataccctcctggggcatggggtctggtctgtgctctgatctgcgtcttgtggctcccagggcactccacacctttctggaggaggcagctaaggcctggggagagtcaggcctgggctctagggtgaggagctccctgacccccttcccgggacactcacccctccgtgtggcacccacagctcaacgcctcggtgagcgccttccagagacgctttgtggttgatgttcggcgctgtgaggagctggagaaga

SEQ ID NO: 169246 - DNA, 30 bp, Homo sapiens; identical to SEQ ID NO: 82634
  chr11:67809965-67809995
  hypo

SEQ ID NO: 169247 - DNA, 65 bp, Homo sapiens; identical to SEQ ID NO: 25515
  chr11:67810253-67810318
  hypo

SEQ ID NO: 169248 - DNA, 446 bp, Homo sapiens
  chr11:67811378-67811824
  hypo
gtgcccccggccttccggaggcgggtgtaggaggtgggtgcccccggcctcccggaggtgggtgcaggaggtgggtgccctggcctggcctccaggaggtgggtgcaggaggtgggtgccctggcctggcctccaggaggtgggtgcaggaggtgggtgcccccggcccagccaccccacctgcctgcccagcccccgctgactgcccactctggcgcaggtcctcggggagacagagcggttcctgagccaggtgctaggccgggtgctgcagctgctgccgccagggcaggtgcaggtccacaagatgaaggccgtgtacctggccctgaaccagtgcagcgtgagcaccacgcacaagtgcctcattgccgaggcctggtgctctgtgcgagacctgcccgccctgcaggaggccctgcgggacagctcggtgagcagcctga

SEQ ID NO: 169249 - DNA, 30 bp, Homo sapiens; identical to SEQ ID NO: 25517
  chr11:67813259-67813289
  hypo

SEQ ID NO: 169250 - DNA, 101 bp, Homo sapiens; identical to SEQ ID NO: 82638
  chr11:67815194-67815295
  hypo

SEQ ID NO: 169251 - DNA, 30 bp, Homo sapiens; identical to SEQ ID NO: 82639
  chr11:67816831-67816861
  hypo

SEQ ID NO: 169252 - DNA, 730 bp, Homo sapiens; identical to SEQ ID NO: 82640
  chr11:67817079-67817809
  hypo

SEQ ID NO: 169253 - DNA, 30 bp, Homo sapiens; identical to SEQ ID NO: 82641
  chr11:67820554-67820584
  hypo

SEQ ID NO: 169254 - DNA, 211 bp, Homo sapiens; identical to SEQ ID NO: 82642
  chr11:67850479-67850690
  hypo

SEQ ID NO: 169255 - DNA, 30 bp, Homo sapiens; identical to SEQ ID NO: 82643
  chr11:67864510-67864540
  hypo

SEQ ID NO: 169256 - DNA, 78 bp, Homo sapiens; identical to SEQ ID NO: 82644
  chr11:67864776-67864854
  hypo

SEQ ID NO: 169257 - DNA, 18 bp, Homo sapiens
  chr11:67865093-67865111
  hypo
ctccgtctcaaaaaaaaa

SEQ ID NO: 169258 - DNA, 31 bp, Homo sapiens; identical to SEQ ID NO: 82646
  chr11:67887225-67887256
  hypo

SEQ ID NO: 169259 - DNA, 387 bp, Homo sapiens; identical to SEQ ID NO: 121112
  chr11:67889353-67889740
  hypo

SEQ ID NO: 169260 - DNA, 30 bp, Homo sapiens
  chr11:67891385-67891415
  hypo
gtgacagagtgagaccgtatttgctgaatg

SEQ ID NO: 169261 - DNA, 442 bp, Homo sapiens; identical to SEQ ID NO: 121113
  chr11:67895652-67896094
  hypo

SEQ ID NO: 169262 - DNA, 120 bp, Homo sapiens
  chr11:67916021-67916141
  hypo
gaaggaggagaggcccgggggtggagcggaggtttcgggtaaacagaggcggcctgactgacagaggggcatcagccaggggaaaatagaaccgggatccaggatcgtctgagtacgcag

SEQ ID NO: 169263 - DNA, 44 bp, Homo sapiens
  chr11:67916578-67916622
  hypo
tatagaagagtcactctgggccgggcgcagtggctcacacctgt

SEQ ID NO: 169264 - DNA, 173 bp, Homo sapiens; identical to SEQ ID NO: 82648
  chr11:67926118-67926291
  hypo

SEQ ID NO: 169265 - DNA, 321 bp, Homo sapiens; identical to SEQ ID NO: 82649
  chr11:67931310-67931631
  hypo

SEQ ID NO: 169266 - DNA, 156 bp, Homo sapiens; identical to SEQ ID NO: 82650
  chr11:67949301-67949457
  hypo

SEQ ID NO: 169267 - DNA, 30 bp, Homo sapiens
  chr11:67970366-67970396
  hypo
acctgtttgagtacccgctttaattctttt

SEQ ID NO: 169268 - DNA, 217 bp, Homo sapiens
  chr11:67970706-67970923
  hypo
ctgggattacaggcgtgaggcaccgcacccggccccatacactttcatatcattagaatccagcacaagaccagacataggtccattcatatcaccttccctttctattctcaaaccaactgctacacataagcagaatcggtttttagttttctcctaaatgtgaaatcacaaaaggacttgacatcaaagaattccaaatcggtctttatcaatg

SEQ ID NO: 169269 - DNA, 370 bp, Homo sapiens
  chr11:67984062-67984432
  hypo
ccctgctatgctctctcgctccctttcctcgagtgccaggttcactcagtgacaggatggcagggattcacttgctttgatcctgtgcttactgggatggcccacaggtcacgttgaccccagaattccaggctggaggcaggttgcttttcattgtaaagcgatatgttggctttcgtgctccgcacatgcgtctgccccagtccccaccccgcccggaagctaggactcctctgatgggagcaggtgtctgaaaccggagggagagtggggcgtacccggctttcccagtggcccctctgggcggctggcgggtttcctggtcacattcctgagcaccactacccccggcaccattcttgctttccac

SEQ ID NO: 169270 - DNA, 30 bp, Homo sapiens
  chr11:68028842-68028872
  hypo
gacacctggggagacggggtcctgcccgcc

SEQ ID NO: 169271 - DNA, 30 bp, Homo sapiens; identical to SEQ ID NO: 82653
  chr11:68033704-68033734
  hypo

SEQ ID NO: 169272 - DNA, 30 bp, Homo sapiens
  chr11:68043143-68043173
  hypo
aacactcagatttggcgcataaatgggtga

SEQ ID NO: 169273 - DNA, 111 bp, Homo sapiens; identical to SEQ ID NO: 48722
  chr11:68080103-68080214
  hypo

SEQ ID NO: 169274 - DNA, 203 bp, Homo sapiens; identical to SEQ ID NO: 121117
  chr11:68080740-68080943
  hypo

SEQ ID NO: 169275 - DNA, 31 bp, Homo sapiens; identical to SEQ ID NO: 82656
  chr11:68086448-68086479
  hypo

SEQ ID NO: 169276 - DNA, 31 bp, Homo sapiens; identical to SEQ ID NO: 82657
  chr11:68093171-68093202
  hypo

SEQ ID NO: 169277 - DNA, 31 bp, Homo sapiens; identical to SEQ ID NO: 82658
  chr11:68118342-68118373
  hypo

SEQ ID NO: 169278 - DNA, 180 bp, Homo sapiens; identical to SEQ ID NO: 82659
  chr11:68119116-68119296
  hypo

SEQ ID NO: 169279 - DNA, 31 bp, Homo sapiens; identical to SEQ ID NO: 82660
  chr11:68119795-68119826
  hypo

SEQ ID NO: 169280 - DNA, 31 bp, Homo sapiens; identical to SEQ ID NO: 82661
  chr11:68121252-68121283
  hypo

SEQ ID NO: 169281 - DNA, 31 bp, Homo sapiens; identical to SEQ ID NO: 25526
  chr11:68131492-68131523
  hypo

SEQ ID NO: 169282 - DNA, 263 bp, Homo sapiens; identical to SEQ ID NO: 82663
  chr11:68133045-68133308
  hypo

SEQ ID NO: 169283 - DNA, 323 bp, Homo sapiens
  chr11:68133367-68133690
  hypo
aatcctgttttgttttgttttatttttgccccagatattttccacttttttactctccgccttggtcctcaggcacttggtgcttcctgggactgtgttgcagtgaggcatggctcttctcctctggggcaccggctgaggatctttctttccaggtgtcggttcggggcgggcccttcgggaaatcacacacgttcaggatgcagctcgccttcggggatgctcccgggcctgggatagccagtctggcctctggggctgaccctggggcctggcaagcgagggggtaacgagaggtgtcaggaaagcgccatccctgggac

SEQ ID NO: 169284 - DNA, 193 bp, Homo sapiens; identical to SEQ ID NO: 82665
  chr11:68142590-68142783
  hypo

SEQ ID NO: 169285 - DNA, 31 bp, Homo sapiens; identical to SEQ ID NO: 82666
  chr11:68143934-68143965
  hypo

SEQ ID NO: 169286 - DNA, 77 bp, Homo sapiens; identical to SEQ ID NO: 82667
  chr11:68153339-68153416
  hypo

SEQ ID NO: 169287 - DNA, 95 bp, Homo sapiens; identical to SEQ ID NO: 25529
  chr11:68158723-68158818
  hypo

SEQ ID NO: 169288 - DNA, 30 bp, Homo sapiens; identical to SEQ ID NO: 82669
  chr11:68159208-68159238
  hypo

SEQ ID NO: 169289 - DNA, 30 bp, Homo sapiens
  chr11:68160923-68160953
  hypo
ttacctcctcacaaacgcttcttttccatt

SEQ ID NO: 169290 - DNA, 394 bp, Homo sapiens; identical to SEQ ID NO: 82670
  chr11:68161250-68161644
  hypo

SEQ ID NO: 169291 - DNA, 146 bp, Homo sapiens; identical to SEQ ID NO: 25530
  chr11:68162350-68162496
  hypo

SEQ ID NO: 169292 - DNA, 34 bp, Homo sapiens; identical to SEQ ID NO: 82672
  chr11:68165098-68165132
  hypo

SEQ ID NO: 169293 - DNA, 100 bp, Homo sapiens; identical to SEQ ID NO: 25531
  chr11:68172055-68172155
  hypo

SEQ ID NO: 169294 - DNA, 197 bp, Homo sapiens
  chr11:68176055-68176252
  hypo
cacagtcatatgctacgcagaattctgtatcctgattttttcacttgacattacaacaggtatttgatggcgctgtgacaaactctttggcacaatcttttaaatgtatgaaatactccactgcacagatgtttgcttttaggcttaactgttcttttattttgcgtgtgctggttacagccgggcacagtggctca

SEQ ID NO: 169295 - DNA, 129 bp, Homo sapiens; identical to SEQ ID NO: 82675
  chr11:68177517-68177646
  hypo

SEQ ID NO: 169296 - DNA, 31 bp, Homo sapiens; identical to SEQ ID NO: 82676
  chr11:68178044-68178075
  hypo

SEQ ID NO: 169297 - DNA, 226 bp, Homo sapiens
  chr11:68178822-68179048
  hypo
acagttgcgtccccccgccacccactgtcctgcggtgagagcagactcactgagcctgcccttctcccttgtgccttccagctacatctactggaccgagtggggcggcaagccgaggatcgtgcgggccttcatggacgggaccaactgcatgacgctggtggacaaggtgggccgggccaacgacctcaccattgactacgctgaccagcgcctctactggacc

SEQ ID NO: 169298 - DNA, 69 bp, Homo sapiens; identical to SEQ ID NO: 82678
  chr11:68189964-68190033
  hypo

SEQ ID NO: 169299 - DNA, 363 bp, Homo sapiens; identical to SEQ ID NO: 82679
  chr11:68190241-68190604
  hypo

SEQ ID NO: 169300 - DNA, 389 bp, Homo sapiens; identical to SEQ ID NO: 82680
  chr11:68190853-68191242
  hypo

SEQ ID NO: 169301 - DNA, 264 bp, Homo sapiens; identical to SEQ ID NO: 82681
  chr11:68191536-68191800
  hypo

SEQ ID NO: 169302 - DNA, 254 bp, Homo sapiens; identical to SEQ ID NO: 82682
  chr11:68192496-68192750
  hypo

SEQ ID NO: 169303 - DNA, 137 bp, Homo sapiens; identical to SEQ ID NO: 82683
  chr11:68192959-68193096
  hypo

SEQ ID NO: 169304 - DNA, 252 bp, Homo sapiens; identical to SEQ ID NO: 82684
  chr11:68193463-68193715
  hypo

SEQ ID NO: 169305 - DNA, 31 bp, Homo sapiens; identical to SEQ ID NO: 82685
  chr11:68194429-68194460
  hypo

SEQ ID NO: 169306 - DNA, 42 bp, Homo sapiens; identical to SEQ ID NO: 82686
  chr11:68196104-68196146
  hypo

SEQ ID NO: 169307 - DNA, 78 bp, Homo sapiens; identical to SEQ ID NO: 82687
  chr11:68199349-68199427
  hypo

SEQ ID NO: 169308 - DNA, 30 bp, Homo sapiens; identical to SEQ ID NO: 25542
  chr11:68200720-68200750
  hypo

SEQ ID NO: 169309 - DNA, 193 bp, Homo sapiens
  chr11:68201116-68201309
  hypo
atcgactgtatccccggggcctggcgctgtgacggctttcccgagtgcgatgaccagagcgacgaggagggctgccccgtgtgctccgccgcccagttcccctgcgcgcggggtcagtgtgtggacctgcgcctgcgctgcgacggcgaggcagactgtcaggaccgctcagacgaggcggactgtgacggtg

SEQ ID NO: 169310 - DNA, 141 bp, Homo sapiens; identical to SEQ ID NO: 82690
  chr11:68203448-68203589
  hypo

SEQ ID NO: 169311 - DNA, 442 bp, Homo sapiens; identical to SEQ ID NO: 82691
  chr11:68204358-68204800
  hypo

SEQ ID NO: 169312 - DNA, 30 bp, Homo sapiens; identical to SEQ ID NO: 82692
  chr11:68205546-68205576
  hypo

SEQ ID NO: 169313 - DNA, 63 bp, Homo sapiens; identical to SEQ ID NO: 82693
  chr11:68206025-68206088
  hypo

SEQ ID NO: 169314 - DNA, 129 bp, Homo sapiens; identical to SEQ ID NO: 82694
  chr11:68207213-68207342
  hypo

SEQ ID NO: 169315 - DNA, 195 bp, Homo sapiens; identical to SEQ ID NO: 25548
  chr11:68207879-68208074
  hypo

SEQ ID NO: 169316 - DNA, 197 bp, Homo sapiens; identical to SEQ ID NO: 82696
  chr11:68210029-68210226
  hypo

SEQ ID NO: 169317 - DNA, 30 bp, Homo sapiens; identical to SEQ ID NO: 82697
  chr11:68216313-68216343
  hypo

SEQ ID NO: 169318 - DNA, 128 bp, Homo sapiens; identical to SEQ ID NO: 82698
  chr11:68216739-68216867
  hypo

SEQ ID NO: 169319 - DNA, 30 bp, Homo sapiens
  chr11:68222311-68222341
  hypo
agtgaggggctcatccgccggctgcctacc

SEQ ID NO: 169320 - DNA, 31 bp, Homo sapiens; identical to SEQ ID NO: 25550
  chr11:68223648-68223679
  hypo

SEQ ID NO: 169321 - DNA, 219 bp, Homo sapiens
  chr11:68225538-68225757
  hypo
tttccctggcatggccgctcccgccctgcccaggtgatcagcctgtgaatcccctccctaacccccacacagagcacacctcccaggctggcttccggcttgactatgttcctccatgcctctctgagtagcaggatcaatgtgagaaaggtctgccctgtctgcagcctccccagaagcacagtacttttcgtggcgcgtacacgggctggtagatac

SEQ ID NO: 169322 - DNA, 280 bp, Homo sapiens
  chr11:68226725-68227005
  hypo
tgaccgcgccgtgacctcctgtggattttcatgggactctgagaggcgcctcaaatccattttggaataaggcaggttattagcatggggtctaaccgtgggctgtctcggtgtcctgggctggctcttggggcgggggtcctgatgtccgggacctcggtcctacctgggaggcacagatatggcggggaacgggaagcccgggggagcatttagaagctcgtgtgcacagggaaaccctgtctctacaaaaaaattaaattagcggggcccagtggtg

SEQ ID NO: 169323 - DNA, 30 bp, Homo sapiens
  chr11:68305540-68305570
  hypo
gagtttaaaaatgagcgttctgaatttcat

SEQ ID NO: 169324 - DNA, 30 bp, Homo sapiens; identical to SEQ ID NO: 82701
  chr11:68310137-68310167
  hypo

SEQ ID NO: 169325 - DNA, 29 bp, Homo sapiens
  chr11:68328642-68328671
  hypo
ccacgcccggccacttataccttatacaa

SEQ ID NO: 169326 - DNA, 30 bp, Homo sapiens; identical to SEQ ID NO: 82703
  chr11:68330121-68330151
  hypo

SEQ ID NO: 169327 - DNA, 17 bp, Homo sapiens
  chr11:68336516-68336533
  hypo
cacgcctggcctcttat

SEQ ID NO: 169328 - DNA, 157 bp, Homo sapiens; identical to SEQ ID NO: 82704
  chr11:68341482-68341639
  hypo

SEQ ID NO: 169329 - DNA, 31 bp, Homo sapiens; identical to SEQ ID NO: 25553
  chr11:68356341-68356372
  hypo

SEQ ID NO: 169330 - DNA, 233 bp, Homo sapiens
  chr11:68383035-68383268
  hypo
tacttttatgtgcagcgtgtcccacctatgttgtttggctcccagcccaacaagtcacagttaggtgctccataatgattcttaagatgtgatgcttatgtagctccttattttgcattttcccttcacctgtttgcttaaaaacatgttctctagtcattacctcctagcaggtcctctgcacagccttttgctttctgggcacgcatgcatccctccgtgcctgggcccac

SEQ ID NO: 169331 - DNA, 30 bp, Homo sapiens
  chr11:68383844-68383874
  hypo
agatccaaacatgagcgcttaaacagtgaa

SEQ ID NO: 169332 - DNA, 100 bp, Homo sapiens; identical to SEQ ID NO: 82706
  chr11:68385167-68385267
  hypo

SEQ ID NO: 169333 - DNA, 230 bp, Homo sapiens; identical to SEQ ID NO: 82707
  chr11:68385503-68385733
  hypo

SEQ ID NO: 169334 - DNA, 34 bp, Homo sapiens; identical to SEQ ID NO: 82708
  chr11:68408312-68408346
  hypo

SEQ ID NO: 169335 - DNA, 87 bp, Homo sapiens
  chr11:68433119-68433206
  hypo
gcctgccaaggccatcgtggatgacggtcgcattactcacgcgcgttgccacccaaccggctggggcatcgccgcacttcccattct

SEQ ID NO: 169336 - DNA, 30 bp, Homo sapiens; identical to SEQ ID NO: 82710
  chr11:68437828-68437858
  hypo

SEQ ID NO: 169337 - DNA, 138 bp, Homo sapiens
  chr11:68442012-68442150
  hypo
ccccaaatacttttcggtggaaacgagacagccccatggcctgcgctgctgtaagatatctcatccctgcacctcagtgtctcagtcctggaggatacgggctccccaccttccacggaccccggcactgcgggttgc

SEQ ID NO: 169338 - DNA, 30 bp, Homo sapiens
  chr11:68453295-68453325
  hypo
ctgccccggctctgccgccctgtcccgggg

SEQ ID NO: 169339 - DNA, 30 bp, Homo sapiens
  chr11:68454029-68454059
  hypo
cagacgcttgtttatcggggtcactcagag

SEQ ID NO: 169340 - DNA, 245 bp, Homo sapiens; identical to SEQ ID NO: 82711
  chr11:68472883-68473128
  hypo

SEQ ID NO: 169341 - DNA, 38 bp, Homo sapiens; identical to SEQ ID NO: 82712
  chr11:68505094-68505132
  hypo

SEQ ID NO: 169342 - DNA, 30 bp, Homo sapiens
  chr11:68540543-68540573
  hypo
ttgcgaactttgcccgcgtgcgtggtgaaa

SEQ ID NO: 169343 - DNA, 30 bp, Homo sapiens
  chr11:68543200-68543230
  hypo
ccactgtagcatcagcggcatccaagccct

SEQ ID NO: 169344 - DNA, 30 bp, Homo sapiens
  chr11:68543578-68543608
  hypo
agaagcaggcaggcgcggtgcctcacttca

SEQ ID NO: 169345 - DNA, 114 bp, Homo sapiens; identical to SEQ ID NO: 82713
  chr11:68549944-68550058
  hypo

SEQ ID NO: 169346 - DNA, 30 bp, Homo sapiens; identical to SEQ ID NO: 25558
  chr11:68550519-68550549
  hypo

SEQ ID NO: 169347 - DNA, 30 bp, Homo sapiens; identical to SEQ ID NO: 82715
  chr11:68550967-68550997
  hypo

SEQ ID NO: 169348 - DNA, 30 bp, Homo sapiens; identical to SEQ ID NO: 82716
  chr11:68553406-68553436
  hypo

SEQ ID NO: 169349 - DNA, 30 bp, Homo sapiens
  chr11:68560175-68560205
  hypo
acgctgactgtgagccggagtaaaatgccc

SEQ ID NO: 169350 - DNA, 303 bp, Homo sapiens
  chr11:68564259-68564562
  hypo
ctctgtggacagacccgccgccccaccgtcctcgtcagacagcagcccgggcgggtggactcaccatggcataatagttgctgttcaccatgagcggccctcgtcctcggaggtagatgtactcctcccaccagtcgctcacctagtgggcgcaaacaccagacaaacccgcaggctcagcaggggccaggcaggctccctggcagcagcccagagccgcggggaagggcaggcagtgcttttggcagacatttcggcgtctaacaggggccattccagaacagggaacgcagtcctaactag

SEQ ID NO: 169351 - DNA, 30 bp, Homo sapiens; identical to SEQ ID NO: 25559
  chr11:68565729-68565759
  hypo

SEQ ID NO: 169352 - DNA, 30 bp, Homo sapiens; identical to SEQ ID NO: 82719
  chr11:68575370-68575400
  hypo

SEQ ID NO: 169353 - DNA, 30 bp, Homo sapiens; identical to SEQ ID NO: 82720
  chr11:68579955-68579985
  hypo

SEQ ID NO: 169354 - DNA, 30 bp, Homo sapiens
  chr11:68586823-68586853
  hypo
tgctatgagccaccacgccccgcctcaagg

SEQ ID NO: 169355 - DNA, 30 bp, Homo sapiens; identical to SEQ ID NO: 121122
  chr11:68606358-68606388
  hypo

SEQ ID NO: 169356 - DNA, 786 bp, Homo sapiens; identical to SEQ ID NO: 8232
  chr11:68606632-68607418
  hypo

SEQ ID NO: 169357 - DNA, 162 bp, Homo sapiens; identical to SEQ ID NO: 82722
  chr11:68657682-68657844
  hypo

SEQ ID NO: 169358 - DNA, 247 bp, Homo sapiens; identical to SEQ ID NO: 82723
  chr11:68664616-68664863
  hypo

SEQ ID NO: 169359 - DNA, 30 bp, Homo sapiens
  chr11:68673066-68673096
  hypo
agcaggtgagggaggcgaatagctttgcat

SEQ ID NO: 169360 - DNA, 199 bp, Homo sapiens
  chr11:68679245-68679444
  hypo
gtcttggggagcacgcgcaggagccgtagcctgggttgttgaggaaggctcctggagccctttgaggcgtggcagccttcgtgtcggccaggccctgggtcagggtttatttgttcaccacgcttgctgtgctcgtgctcctccgtgtgcacgcccgtgcaggggcctggagttggcctgggcccggtctgtgcccgtc

SEQ ID NO: 169361 - DNA, 341 bp, Homo sapiens
  chr11:68682152-68682493
  hypo
gaatgcaagatttgattgagagcacgtgtgtacatgccttgtgcttctttctacctttaaggctttttgttgttttagtgtcaacttcagtggtttgattacaaagtaaatgaccagatcctaacttgcggttcccaggttctgtgctgcgccccctccaacatcgccgtggacaatctggtggagcgcctggctctgtgtaagcagcggattctgcgcctgggacaccctgcccgcctcctggagtccattcagcagcactccctggatgcggttttagcgcggagcgacagtgcccagattgttgcagatatcaggaaggacatcgaccaggtctttgt

SEQ ID NO: 169362 - DNA, 74 bp, Homo sapiens
  chr11:68691888-68691962
  hypo
cggagagcccaggcccggctgaacaaggtgctgtgctcaggatctcacaaggctgcgatcgaggtgtcagtggg

SEQ ID NO: 169363 - DNA, 30 bp, Homo sapiens
  chr11:68696907-68696937
  hypo
accaggagcccctgcggtgcctcctcggtt

SEQ ID NO: 169364 - DNA, 30 bp, Homo sapiens; identical to SEQ ID NO: 82726
  chr11:68699682-68699712
  hypo

SEQ ID NO: 169365 - DNA, 228 bp, Homo sapiens
  chr11:68700806-68701034
  hypo
ctggctgaggagtacggcgcgagggtggtgcggacactgacggtgcagtaccgcatgcaccaggctatcatgcgctgggcctcagacaccatgtaccttgggcagctcacagcccactcttccgtggcaaggcacctcctgaggtgagtagctcggcaccacccgccgccccatccttctgccctggctaatcctctgcgtcacctgtttctacgcagcaagctaaag

SEQ ID NO: 169366 - DNA, 204 bp, Homo sapiens; identical to SEQ ID NO: 82728
  chr11:68701351-68701555
  hypo

SEQ ID NO: 169367 - DNA, 30 bp, Homo sapiens
  chr11:68707871-68707901
  hypo
ccacgtggttgtcccgggaaagctgcccca

SEQ ID NO: 169368 - DNA, 30 bp, Homo sapiens; identical to SEQ ID NO: 82729
  chr11:68718470-68718500
  hypo

SEQ ID NO: 169369 - DNA, 88 bp, Homo sapiens; identical to SEQ ID NO: 82730
  chr11:68727155-68727243
  hypo

SEQ ID NO: 169370 - DNA, 30 bp, Homo sapiens; identical to SEQ ID NO: 82731
  chr11:68727512-68727542
  hypo

SEQ ID NO: 169371 - DNA, 31 bp, Homo sapiens; identical to SEQ ID NO: 25563
  chr11:68728005-68728036
  hypo

SEQ ID NO: 169372 - DNA, 49 bp, Homo sapiens; identical to SEQ ID NO: 82733
  chr11:68728253-68728302
  hypo

SEQ ID NO: 169373 - DNA, 31 bp, Homo sapiens; identical to SEQ ID NO: 25564
  chr11:68747918-68747949
  hypo

SEQ ID NO: 169374 - DNA, 30 bp, Homo sapiens
  chr11:68760408-68760438
  hypo
gttcagccagcatgtcggctggatgggtgg

SEQ ID NO: 169375 - DNA, 128 bp, Homo sapiens
  chr11:68772695-68772823
  hypo
agggtcttggaggccgcttcctgcccctgcctcctccaggcgctggagtctcaggaggcgttccccgggggacactgcatctccatggtgactgtgttgggcgtgctgcccccggcctcccccagctc

SEQ ID NO: 169376 - DNA, 31 bp, Homo sapiens; identical to SEQ ID NO: 82736
  chr11:68785782-68785813
  hypo

SEQ ID NO: 169377 - DNA, 244 bp, Homo sapiens
  chr11:68800913-68801157
  hypo
tgggctgggggacatcgcccactctccaagctgctcacatacattagtagccgctggagatgggtgggggcttctcagcttcacaggggcaaggtgcagtggcagagtaggccttgcccatgaaccgccagggtcccctagccgagatgagttccctctggcaggctgtggaaggatcatccctccctgggtgcgtgacccccagccccgcccgacctcaggtctatcccggggcctcccctcc

SEQ ID NO: 169378 - DNA, 282 bp, Homo sapiens
  chr11:68822120-68822402
  hypo
gtggggctcgggtcacggcccaccctgcatgcacccatgtcatgcctcatgtgacttttcgcttgtagtaccgctccatcaaccaccgggtggatgccagctcgatgtggctttaccgacggtattactcgaacgtatgccaacggtgagaacgcacccatgtggaactcagggttcctgccggcttgcgtggcaggggaggctggcccccacctggggatcacctggtctcagggtccaggcaggctccccactacatagatagggcggttaccatcatcc

SEQ ID NO: 169379 - DNA, 64 bp, Homo sapiens; identical to SEQ ID NO: 82737
  chr11:68830512-68830576
  hypo

SEQ ID NO: 169380 - DNA, 177 bp, Homo sapiens; identical to SEQ ID NO: 25565
  chr11:68838711-68838888
  hypo

SEQ ID NO: 169381 - DNA, 30 bp, Homo sapiens
  chr11:68850860-68850890
  hypo
gaaggcctttctcccggctaggctgtgatg

SEQ ID NO: 169382 - DNA, 72 bp, Homo sapiens; identical to SEQ ID NO: 82739
  chr11:68853900-68853972
  hypo

SEQ ID NO: 169383 - DNA, 77 bp, Homo sapiens
  chr11:68856609-68856686
  hypo
ggggagggggcgacccgaacaacagtgcagtcggtatcgagattggggagaggagcgagtccaaggagaaggtcatg

SEQ ID NO: 169384 - DNA, 30 bp, Homo sapiens
  chr11:68859985-68860015
  hypo
atgcggaactgcgacggatggcagcaaacc

SEQ ID NO: 169385 - DNA, 30 bp, Homo sapiens
  chr11:68879912-68879942
  hypo
catggctgggtgggccgccgccttccccag

SEQ ID NO: 169386 - DNA, 197 bp, Homo sapiens; identical to SEQ ID NO: 82741
  chr11:68968787-68968984
  hypo

SEQ ID NO: 169387 - DNA, 200 bp, Homo sapiens
  chr11:68970084-68970284
  hypo
tggcatttcaccaaaccgagggttccctctcaccccctctggctggcatttcactgagcagggggccccctctcaccctcaggcagacctgtcattgcacccagcctttctctctcctgatgtgcaacaccaggctgggccggcgctgaccaccctggacatggcagtgtggacggtaacagagccggtgacccgccctc

SEQ ID NO: 169388 - DNA, 211 bp, Homo sapiens
  chr11:68970655-68970866
  hypo
gccccggggtgcattcgcgtcaaagaggttgaggtggaaccagctgcgaccctcagcagcagcaagtggccactttggggaccctgtgggttttgagtcagaggaaaacagagtttaagccttttcccatttgtcctgagagtactcaccaggggcttgcgactgcagtgtttaccccgagataactccgccacgaaatagctcgatttta

SEQ ID NO: 169389 - DNA, 175 bp, Homo sapiens; identical to SEQ ID NO: 82743
  chr11:68972047-68972222
  hypo

SEQ ID NO: 169390 - DNA, 30 bp, Homo sapiens; identical to SEQ ID NO: 82744
  chr11:68973600-68973630
  hypo

SEQ ID NO: 169391 - DNA, 30 bp, Homo sapiens
  chr11:69051012-69051042
  hypo
agctcaacgtcatagcgtgtgttggactct

SEQ ID NO: 169392 - DNA, 251 bp, Homo sapiens
  chr11:69056018-69056269
  hypo
gacacgaatcttgtccggaagcaaggtccaggggcttctgacccagggaggtgggcatgactcatgctgagcagccgaagctccctgacttgccgtgtctgctccggcctctgcatccacctgttgcctctgcctgggctgcttcctcttgcctgcgcagcctggaaagcttctgctagctctgcagcactgacagcaaagccccccgccctccctggcccagctcctccgagctccggcatcgtctcgga

SEQ ID NO: 169393 - DNA, 30 bp, Homo sapiens
  chr11:69065550-69065580
  hypo
gccacctggcatgcacgtcactccgctctt

SEQ ID NO: 169394 - DNA, 30 bp, Homo sapiens
  chr11:69065853-69065883
  hypo
ggaaccctctgcagccgtccttgtcgaggg

SEQ ID NO: 169395 - DNA, 30 bp, Homo sapiens
  chr11:69066208-69066238
  hypo
cacaaaaacacgacccgcccgcttcctgtg

SEQ ID NO: 169396 - DNA, 30 bp, Homo sapiens; identical to SEQ ID NO: 82746
  chr11:69191918-69191948
  hypo

SEQ ID NO: 169397 - DNA, 46 bp, Homo sapiens
  chr11:69192162-69192208
  hypo
gtgaacgcagacgcccgcccaggaatgcacacgcccacccgtgaac

SEQ ID NO: 169398 - DNA, 287 bp, Homo sapiens
  chr11:69192497-69192784
  hypo
gttccgaggctgctccgatgtgtgggaactgagggggttcccaggatgtgagactttcagtgctgaaactgggaaagtcctgggcgagccgggacaagtcgctcaccctactagagacagttgggcgaaggagacacattgggatcagtctcccatggccttcaagtgtcagggcaggggctggggacctcccatataacgagcagcctcaggagactccaggcaggcaggagcgtcgggggctgcgactccagaatggccaaggcttctaccgtccagcccctttg

SEQ ID NO: 169399 - DNA, 224 bp, Homo sapiens; identical to SEQ ID NO: 25568
  chr11:69193142-69193366
  hypo

SEQ ID NO: 169400 - DNA, 135 bp, Homo sapiens
  chr11:69205854-69205989
  hypo
aaacagggaactgatcgttggacagcagctgccctgggtttcggggtcaggggtatcctgctgcaaaggcagacaggagtggaaggtggagtgcgtgatggaaacaaacagggaaccgatcgttggacggcagct

SEQ ID NO: 169401 - DNA, 535 bp, Homo sapiens
  chr11:69206199-69206734
  hypo
gtctcccagcacacccgggcgagctgaggaaaaggctcaggggctgacagatacagggactgagcgcggctaggatagccctactgagggagccagaggggccctggggagatgcctggcgggcccgtctcctagcgactgacgtcccgccaccccacgggccccttgtgctgggcactgcccacccctgacactggctgcgagcacttttcactgctgttctgcatgaataagcgccaggcctcttgccaattgtccccctcttaaaaggcagccccggcgaaaggccttttcaagtgggatcgcacagtgccacccaggccgggcgggcattgttttggggagccagggtcctgcttggccgccggggtcggggggcccacaaagcatggtgatggcggctccacgcactcagcgcagcagccctgcttattaatctgcaaaactcacaccgatgcctttggaggggagattgagtgaaaacgatgtccttaggggagtggcctttgcaggcgcctcctgggttcctcactac

SEQ ID NO: 169402 - DNA, 218 bp, Homo sapiens
  chr11:69244618-69244836
  hypo
tcctaaggaccgacacgggggccactggagctggcacgcagtggcatggggagaggggtttccagaaacaccaggtgtgccctgctttggctgcataccctcagctagggctgggacagtcactctgaactggctaccagggtgctgggcacgggatagctgtggcctagccaaccgcctctggtccactcgagtgtgtgtgccgggcatccactctc

SEQ ID NO: 169403 - DNA, 30 bp, Homo sapiens; identical to SEQ ID NO: 25570
  chr11:69279629-69279659
  hypo

SEQ ID NO: 169404 - DNA, 190 bp, Homo sapiens
  chr11:69280486-69280676
  hypo
aatctgtccggggtgcggtctgggcatgaaaagtttttcaggctctccaggtgattctcgtgtgcagccaagttagagaacactgactcccggggaggtggattacctgtcctcccggcaaagcgcaggactcgcagtttggcaagcttccagcagcagcgagttcgggtggctccgtggggagccttac

SEQ ID NO: 169405 - DNA, 30 bp, Homo sapiens; identical to SEQ ID NO: 82753
  chr11:69300859-69300889
  hypo

SEQ ID NO: 169406 - DNA, 254 bp, Homo sapiens; identical to SEQ ID NO: 48732
  chr11:69331402-69331656
  hypo

SEQ ID NO: 169407 - DNA, 76 bp, Homo sapiens
  chr11:69337265-69337341
  hypo
gctttacacaaatcatggagctggcatcttcttggcttctggggagacctagggaagcttacgatcatggcagaag

SEQ ID NO: 169408 - DNA, 563 bp, Homo sapiens
  chr11:69339658-69340221
  hypo
tctgtgtccaaagacaaatatcgctgctgtcatggaagccccaaggagctcacggtccccttgggggcaaatggctccctcgggaaatgacagcaaaacacccaagatggagaattttcatcaccctgcgcggtgtgatgaggggctggggggaactggggctggagttgccagggggcctgaaaggagaggctgcacaggtagagaggcaccctggagggccaccgcgggacctgctccctgggcctgcccccatgtctgcctgccccgtccccacacttgccccctctgccctcatccctgcccgccccgtccccatgcttgcctccacgggcctctcctcgcacaggaggaggggctgttcctgccgcacacctgcggtggccatcctctcactcagcatgacagctgctggtccgtggtgctcaggggtggctgcgcaggctattagaatgtgtccctacatccacagtggttattatgcactgctttccgaggagccgccagacttccccataatctggcaactaaagggttggcacttggcacgggaagtggggact

SEQ ID NO: 169409 - DNA, 30 bp, Homo sapiens
  chr11:69340440-69340470
  hypo
cctgctgcgggaactcgctgtccccgactc

SEQ ID NO: 169410 - DNA, 222 bp, Homo sapiens; identical to SEQ ID NO: 82755
  chr11:69357101-69357323
  hypo

SEQ ID NO: 169411 - DNA, 96 bp, Homo sapiens; identical to SEQ ID NO: 82756
  chr11:69367213-69367309
  hypo

SEQ ID NO: 169412 - DNA, 30 bp, Homo sapiens; identical to SEQ ID NO: 48733
  chr11:69379145-69379175
  hypo

SEQ ID NO: 169413 - DNA, 30 bp, Homo sapiens; identical to SEQ ID NO: 25573
  chr11:69384772-69384802
  hypo

SEQ ID NO: 169414 - DNA, 30 bp, Homo sapiens; identical to SEQ ID NO: 25574
  chr11:69407848-69407878
  hypo

SEQ ID NO: 169415 - DNA, 30 bp, Homo sapiens
  chr11:69431194-69431224
  hypo
ttccccacctggtcacgcagctctctaacc

SEQ ID NO: 169416 - DNA, 210 bp, Homo sapiens
  chr11:69431509-69431719
  hypo
tgcatcctaagcgctcgaggtgttgatccactcgacaaactggcagagagccacttccgtgagcacctgcagggtgcacagctgagcccaaacccaggccctgcctcacagggtgcacggtctactgcaaggatttacacaataaataccatacattacagagcatgctgggaaagcaatgcataccacagagcaaaagaaaatgggctg

SEQ ID NO: 169417 - DNA, 30 bp, Homo sapiens
  chr11:69458494-69458524
  hypo
tctgagccggaggtgcggcgtggcccggcc

SEQ ID NO: 169418 - DNA, 53 bp, Homo sapiens; identical to SEQ ID NO: 82761
  chr11:69458858-69458911
  hypo

SEQ ID NO: 169419 - DNA, 30 bp, Homo sapiens; identical to SEQ ID NO: 82762
  chr11:69460920-69460950
  hypo

SEQ ID NO: 169420 - DNA, 31 bp, Homo sapiens; identical to SEQ ID NO: 82763
  chr11:69464228-69464259
  hypo

SEQ ID NO: 169421 - DNA, 30 bp, Homo sapiens
  chr11:69466039-69466069
  hypo
tggacatctgagggcgccaggcaggcgggc

SEQ ID NO: 169422 - DNA, 664 bp, Homo sapiens; identical to SEQ ID NO: 82764
  chr11:69468276-69468940
  hypo

SEQ ID NO: 169423 - DNA, 30 bp, Homo sapiens; identical to SEQ ID NO: 48737
  chr11:69472531-69472561
  hypo

SEQ ID NO: 169424 - DNA, 27 bp, Homo sapiens
  chr11:69475471-69475498
  hypo
ggcgtgagccaccgcacccggccgctt

SEQ ID NO: 169425 - DNA, 32 bp, Homo sapiens; identical to SEQ ID NO: 8239
  chr11:69477504-69477536
  hypo

SEQ ID NO: 169426 - DNA, 30 bp, Homo sapiens; identical to SEQ ID NO: 82768
  chr11:69480943-69480973
  hypo

SEQ ID NO: 169427 - DNA, 327 bp, Homo sapiens
  chr11:69481588-69481915
  hypo
ttggcaggacctgtgcggcctgggagggagggcagggactcgcctgtgcattccggaggcggctgtgcctggtggcagtgaggcacagccttagggcggaagtcctagctctgctgctgggtgcccttagaccaggcaatcccttcgcgtctcccctccctcctctgtaaaatgagaataacacccatcttgtgggctcctgaagggattaaataacacacgggaggcacgtcccgcaccgcctggcacacaatcggcctcgacatgcggcacagcacccgtccaaacctcccatgagcctcattcggggccaaccatctctctcat

SEQ ID NO: 169428 - DNA, 30 bp, Homo sapiens
  chr11:69484417-69484447
  hypo
gcgcaccatcagaggcggcacacgtcaggc

SEQ ID NO: 169429 - DNA, 90 bp, Homo sapiens
  chr11:69525487-69525577
  hypo
caagtgcgcagtttgcgggcatgaccctggtgtcctgcacggagccagcctggcacttgacgctgccaagaaatattggatgaatcattt

SEQ ID NO: 169430 - DNA, 30 bp, Homo sapiens
  chr11:69580581-69580611
  hypo
ctgtcccacccgggacggaatcgtgcctgt

SEQ ID NO: 169431 - DNA, 92 bp, Homo sapiens; identical to SEQ ID NO: 82771
  chr11:69593279-69593371
  hypo

SEQ ID NO: 169432 - DNA, 309 bp, Homo sapiens; identical to SEQ ID NO: 25578
  chr11:69931074-69931383
  hypo

SEQ ID NO: 169433 - DNA, 31 bp, Homo sapiens; identical to SEQ ID NO: 82773
  chr11:69944883-69944914
  hypo

SEQ ID NO: 169434 - DNA, 62 bp, Homo sapiens; identical to SEQ ID NO: 82774
  chr11:69946371-69946433
  hypo

SEQ ID NO: 169435 - DNA, 507 bp, Homo sapiens
  chr11:69946944-69947451
  hypo
tattactgtattattgcccttcgttcgttcattccataaatatgtgcaaagcggctgctctgagccttccgtgggcagcagggcagcacagaggaggcctgagcggtggtgctggggagaggatggcgtagggcaggcctcgtggacgcagccgggggcctcaccatcagcataagcgaccacggtgggcttcagaaggagcgatgagacaggattcaccccattgccatttgcttttctatcggatcaggaagaagcatgggatgaagctggggtgtcaaggagggtctcccttcctcggtggtcacctgaggtgctggggccccacctttaactctctctgctggacctggaagctttgcccaggtccctgggaccgtcgcgttcacaggcttccaccgaggctctcgctgggtacattgacttgacccacttcagattttgttttcttaaaactcatccccaagtacactttgggaggccgaggcaggcagatcgcctgaggtc

SEQ ID NO: 169436 - DNA, 34 bp, Homo sapiens
  chr11:69947851-69947885
  hypo
ggatggatgaggtcccggccggcactcgctcttc

SEQ ID NO: 169437 - DNA, 189 bp, Homo sapiens
  chr11:69949118-69949307
  hypo
tccacagagatgcaccgccccccctcaacccagaactttccttctctctccagactaaaatccacggagtcgggtttgtgaaaatccatgccccctggaacgtgctgtgcagagaggccgagtttctgaaactgaagatgccgacgaagaaggttggtgttgatggtcctgctccgaaatgaatcgcca

SEQ ID NO: 169438 - DNA, 184 bp, Homo sapiens
  chr11:69953588-69953772
  hypo
gtggaggcggcggggcggggaagcggtcagatggcctgggccagggggaactggaaggacgctggccttgcctgagagagtggaggcagaattggcatgctctgaaatgcacgtctgcatagcacgaccagttcttctcaccccagtttacagatggaaaaactgaggccgggagtggtgatgt

SEQ ID NO: 169439 - DNA, 31 bp, Homo sapiens; identical to SEQ ID NO: 82776
  chr11:69960316-69960347
  hypo

SEQ ID NO: 169440 - DNA, 484 bp, Homo sapiens
  chr11:69962316-69962800
  hypo
agaggcggctcaggccgtcctggtggtggaggccaacagggcggccaacagggacgtgcacggcctttctatcataacgggggcacacctgggcaaccctcacactctgtgtgaaatgttgccccaggatgatcttaatttgtgtcaacgagagctgctggggtttatgttttgaaacataatggatgtgagcgcctccaaagctccattggatgataagaacgtccctttcctctttttttaacagggagactacaacggtgaaaacgtcgagttcaacgacagaaaagtaagttgatggagcggagcaggaggtggctctgtcagagcctggaggcgttctggggcggggtgggcctgcagctggaccgaggacttaccggcctccagggcctccccagggcgctcgctgcagggggctgagaagcgggtgtcccctctcaccttttcaggagaaaagtccgtgagctttgtgtggctggtt

SEQ ID NO: 169441 - DNA, 250 bp, Homo sapiens; identical to SEQ ID NO: 82778
  chr11:69970395-69970645
  hypo

SEQ ID NO: 169442 - DNA, 19 bp, Homo sapiens
  chr11:69971154-69971173
  hypo
cagagaagtggggaccggg

SEQ ID NO: 169443 - DNA, 78 bp, Homo sapiens; identical to SEQ ID NO: 82780
  chr11:69971957-69972035
  hypo

SEQ ID NO: 169444 - DNA, 201 bp, Homo sapiens
  chr11:69972730-69972931
  hypo
gctggctggtgttcgcgggaggtgagcatgaatgctaggcttcggtgcaggctggtacttgcgggaggtgagacatggatgccagaggcctcggtgcaggctggtgcttgcgggaggtgagcgtgaatgccagacttcggtgcaggctggcacttgcgggaggtgagacgtgaatgctagaggcctcggtacaggctggtg

SEQ ID NO: 169445 - DNA, 128 bp, Homo sapiens
  chr11:69973146-69973274
  hypo
gaacactagaggcctcggtgcaggctggtgcttgcgggaagtgagacatgaacgctagaggcctcggtgcagtctggtgctcccaggaggtgagacgtgaacgctagaggcttcggtgcaggctggtg

SEQ ID NO: 169446 - DNA, 194 bp, Homo sapiens
  chr11:69976909-69977103
  hypo
gggcctccgctgcaccgggcagctggggacctattccttccggcccagcccccgttctcccagagaagagtcctgggatccccgtttctccacctcctgtgtccagagcacccaggccacgtccaaggcagccgccccaccaggcggatggagatgctgtgtgaaccgctcatagacggcgcctggcacagagc

SEQ ID NO: 169447 - DNA, 363 bp, Homo sapiens; identical to SEQ ID NO: 82783
  chr11:69977942-69978305
  hypo

SEQ ID NO: 169448 - DNA, 31 bp, Homo sapiens; identical to SEQ ID NO: 82784
  chr11:69979712-69979743
  hypo

SEQ ID NO: 169449 - DNA, 545 bp, Homo sapiens
  chr11:69982804-69983349
  hypo
ctcagctccaccacacgagggtgtgggcagagcagtgtgagggacaggtcttgctttcccgggattccagtcacaggtggggacagacacgcacagaaatcagcatagcctcgagataaatgcagttgtttctcttcgtggacaaaggcgttcgattttccagaggaggccaagaatgggagccgtgggtccgtagcttggtgtagggcgtgagttccagtggtgagcagtgagacacgctgagctgggctggccagggagggggtgagcgccccgtgctgggaagcattcaagctgaggttggaggacttcttgctggggcaactgcagagcattgggaggtgatgtctatgtgtgatccaaggccacgtggcttattgggaagattcccaggcctacaacccagctctggtttttaatttggggatcaaaatgtatcgtaaatttagaattataaatgtagggtcagcagcagtctgtcaccgctgaagcacacgtgccagagctcccgttgtttatcacactgtatccgaacagcggagaac

SEQ ID NO: 169450 - DNA, 30 bp, Homo sapiens; identical to SEQ ID NO: 82787
  chr11:69983711-69983741
  hypo

SEQ ID NO: 169451 - DNA, 164 bp, Homo sapiens
  chr11:69985997-69986161
  hypo
cgtgtgtgctgaacacgtgccttgcttgttcctgactggattacctccaagtttttctctcacctagagtagtttccccgtctgactccacaaaaatacacctccttccctttgggagctgcgctgaggactgcctccgtgccaggccccgggctaagggctct

SEQ ID NO: 169452 - DNA, 31 bp, Homo sapiens; identical to SEQ ID NO: 25583
  chr11:69995207-69995238
  hypo

SEQ ID NO: 169453 - DNA, 30 bp, Homo sapiens
  chr11:70001011-70001041
  hypo
agctgccctctgccccggcccttcaggccc

SEQ ID NO: 169454 - DNA, 131 bp, Homo sapiens; identical to SEQ ID NO: 82790
  chr11:70002185-70002316
  hypo

SEQ ID NO: 169455 - DNA, 225 bp, Homo sapiens
  chr11:70002956-70003181
  hypo
gggcccatgcacgcacgcacatgcacccacgctgacacacagagatgtctcatcgtgatggttccagacagtgaccggcattgttttgtgttgtagactgacaaagtgaagctgacatggagagatcggttcccagcctacctcactaacttggtctccatcatcttcatggtaagttccagaaggttaaggccagacgaagtcaggggaaaccgcaaggaagtg

SEQ ID NO: 169456 - DNA, 107 bp, Homo sapiens
  chr11:70008171-70008278
  hypo
cggcagtgagggccccgggcagtgaggacccgggagtgagggccccgggcagtgaggactctgggcagagaggacctcgggcagtgaggacccgggagtgagggcct

SEQ ID NO: 169457 - DNA, 31 bp, Homo sapiens; identical to SEQ ID NO: 8244
  chr11:70016124-70016155
  hypo

SEQ ID NO: 169458 - DNA, 263 bp, Homo sapiens
  chr11:70016943-70017206
  hypo
atgggctgtggctcacggggtgctgactagcactgggctctctctgcagtcatccagtttggcttcgtcaccctgtttgtcgcctccttccccctggccccactgtttgcgctgctgaacaacatcatcgagatccgcctggacgccaaaaagtttgtcactgagctccgaaggccggtagctgtcagagccaaagacatcggtgagtgaccccacgggccggcagaaccggttccgagtgcgtgctgggtttggggaggggg

SEQ ID NO: 169459 - DNA, 102 bp, Homo sapiens
  chr11:70020523-70020625
  hypo
ttttagcttttagggacaagtgagaaagaggctgtcgaaaaacaggccaccatggccgtctttgcacacccgctctcaagagcaaggcgagattgcacccca

SEQ ID NO: 169460 - DNA, 30 bp, Homo sapiens; identical to SEQ ID NO: 82794
  chr11:70020926-70020956
  hypo

SEQ ID NO: 169461 - DNA, 515 bp, Homo sapiens
  chr11:70021159-70021674
  hypo
tggcaccctctgcttcgagaagctctggctgtccccagacagtggctgaatgaagcttgcaaacccaccagggtgaaagggagcagcagctcagtggccctggcttcccgcagtccctctgcaggcattggcgtccccaccagcagcaggccttccgcgtgcctctttggactctttgcacctggctggtttttgctcagttcttacggatcagctactcacttcctggttcctgtccggttggctgaaggcataatctgccctcctttcacgagtttgtttatgggttccttaaccgtaacctttccttgaagaggcttttgtattccttctgtgatccgtgcagggcccccaggcgagctccttgagaggacagagagggcccctgtggcccctgtgacctgcgcccctgaggccctgggtggctgggggaagctgtgccacaaagcgcaggtgccttgatcaccctgtcgtccagcgggtcacagcagggacccagccgtgcgtgggaatct

SEQ ID NO: 169462 - DNA, 622 bp, Homo sapiens
  chr11:70022806-70023428
  hypo
ctgcttcctgtcatggcctgaaccagtctttcaggttaatttgggggtgccctggccgagacgatgaaccccattcaaatggttcgggggacccttagaattttatttttggtttacagagatccttagagcagtgagtgtcaccctggaatgtgcgtcagaataactcggggctcccagccccaccccaggagaggcggatcccgtgggctggggctggggtgccggttcagcatttctctaacacaccccgcggatgtgcagggccacacggagagccatccgcctggacgtagatatcctgcagacctgtcaggacaggctccatcggggcccggaagcgaggaagaccccgctcccggctccatctcatccccgcctcatccctcccatttcctgttgtctctctgggccggttgggcgatcacctgggcggacccccttgcctgcctgagtcctgcacttcgacggccctgaactcaggagccacgtccctcgggagccccaaagacttcaacctccaccccaggcccaccgcacctcagcaccccacttcggaggtctcaaactcagcgccccaagggccaggtgggccacacgcgcaagtgagactaagtcctgg

SEQ ID NO: 169463 - DNA, 38 bp, Homo sapiens
  chr11:70023976-70024014
  hypo
ttacaggcgtgagccaatgcgcccggtcttgatttttt

SEQ ID NO: 169464 - DNA, 220 bp, Homo sapiens; identical to SEQ ID NO: 82796
  chr11:70028533-70028753
  hypo

SEQ ID NO: 169465 - DNA, 339 bp, Homo sapiens; identical to SEQ ID NO: 82797
  chr11:70031508-70031847
  hypo

SEQ ID NO: 169466 - DNA, 30 bp, Homo sapiens
  chr11:70054006-70054036
  hypo
ggggtgctgccgtggcgctgagctggttgc

SEQ ID NO: 169467 - DNA, 274 bp, Homo sapiens
  chr11:70054495-70054769
  hypo
ataggcgtgagccaccgcgcccggccttggacatggatttcttaaagcaacttgaaaaaacaaattctatgttcattttttttacaatcaggtagaatttgtgtttctggaaaaggtacgcacaaatcttgggcttacttgaaagctggaggtaacagccgtctcttgctctctgactcctttttcccctaagacagaagagggaagacaagtccaaacgtctgtgctttgcgggagacttcaggggaatttgatcaagcgtttcctggaacaa

SEQ ID NO: 169468 - DNA, 183 bp, Homo sapiens; identical to SEQ ID NO: 82798
  chr11:70080114-70080297
  hypo

SEQ ID NO: 169469 - DNA, 75 bp, Homo sapiens
  chr11:70125199-70125274
  hypo
gttcaagtacctctgcggtgaggtactccaggatggctgtgctattcacagcggcagtcgcgcccacacgtccag

SEQ ID NO: 169470 - DNA, 30 bp, Homo sapiens; identical to SEQ ID NO: 82799
  chr11:70129795-70129825
  hypo

SEQ ID NO: 169471 - DNA, 30 bp, Homo sapiens; identical to SEQ ID NO: 82800
  chr11:70139261-70139291
  hypo

SEQ ID NO: 169472 - DNA, 32 bp, Homo sapiens
  chr11:70139603-70139635
  hypo
gaaacataatagagtcgcggtggcaaggccag

SEQ ID NO: 169473 - DNA, 183 bp, Homo sapiens
  chr11:70164143-70164326
  hypo
cttgcctcttccacttcattgcgcttacctggcagaaaccaccccattcagtccgttctccatgcccattcacctccactgacccgcagaggccctaagtgccgccagcatctctgttagtgcatcccgccctctttcttctacgcggcatgctgcctacccgtcctctcttctagatgccat

SEQ ID NO: 169474 - DNA, 30 bp, Homo sapiens; identical to SEQ ID NO: 82802
  chr11:70165502-70165532
  hypo

SEQ ID NO: 169475 - DNA, 96 bp, Homo sapiens; identical to SEQ ID NO: 82803
  chr11:70177349-70177445
  hypo

SEQ ID NO: 169476 - DNA, 30 bp, Homo sapiens; identical to SEQ ID NO: 82804
  chr11:70178151-70178181
  hypo

SEQ ID NO: 169477 - DNA, 30 bp, Homo sapiens
  chr11:70178901-70178931
  hypo
aggcccctgtctgtcgtcctgagtcttctt

SEQ ID NO: 169478 - DNA, 30 bp, Homo sapiens; identical to SEQ ID NO: 82805
  chr11:70185263-70185293
  hypo

SEQ ID NO: 169479 - DNA, 144 bp, Homo sapiens
  chr11:70189848-70189992
  hypo
cgagagtgatgctgacgtgtctgatggtgaagatgacagggacactctcctcagctcagttgacctgctatcgcccagcgggcaggccgacgcgcacacactagccatgatgcttcaggagcagctggacgccatcaacaaaga

SEQ ID NO: 169480 - DNA, 96 bp, Homo sapiens
  chr11:70263135-70263231
  hypo
ggcggcaagtatggcgtgcaggccgaccgagtagacaagagcgcggtgggcttcgactaccagggcaagacggagaagcacgagtcacagagaggt

SEQ ID NO: 169481 - DNA, 142 bp, Homo sapiens
  chr11:70268910-70269052
  hypo
tcgcttggccattctcgtttcttcccgctgtggtgcaccttcttgggctgtttctggatctgtctgcatgcacccacggccacccccatgctcgcctccacctcagagtaagtgttgtgttttgccacgtttcagactactc

SEQ ID NO: 169482 - DNA, 8 bp, Homo sapiens
  chr11:70270219-70270227
  hypo
ggccgggt

SEQ ID NO: 169483 - DNA, 78 bp, Homo sapiens; identical to SEQ ID NO: 82809
  chr11:70281166-70281244
  hypo

SEQ ID NO: 169484 - DNA, 69 bp, Homo sapiens; identical to SEQ ID NO: 82810
  chr11:70282720-70282789
  hypo

SEQ ID NO: 169485 - DNA, 378 bp, Homo sapiens
  chr11:71108171-71108549
  hypo
gaacttgccggcctccgtcactgtgtgagccaggccctcatcctgaacccctctccgtgtctacgctcatcccactcttctgtgtctccagagaactttgctgcccccgccggggagtgagatgtcccctgtggagagggccgccccactccttctccagctccccaccgcctcacgggcactcgacagtctgaaagtaggagcctgctgcgccccaaccaggcagcccagctgtggcctactcctgtgatccacctctccacaagccgaggaggactcaagggtccgctcagggctttttctcaaatgaggtggcagctcatgcctgcactgtgatggatagagctgccatttctgggccgccgtgtgtgcctctgc

SEQ ID NO: 169486 - DNA, 162 bp, Homo sapiens
  chr11:71135267-71135429
  hypo
cacggggcagctcagcgtggagacgccgcacatttcaacctgacagttgaggctgtgcaaacagaaggtagtcaggactgctgaagcctgactgagaggcatgatggcactgtctctgccagtcggcaagtgaacgcagagggcctccgtggagtcgttcac

SEQ ID NO: 169487 - DNA, 203 bp, Homo sapiens
  chr11:71146643-71146846
  hypo
acgccccagaagcccgacaccagcagcttgctgtggtgcctctgcccatcggcggatgtgtaggagcactcgatgaccttgggcttcctgccccagatgaggcagcgcccatccgtgcggcggaacaggtccttctggtggttggccacccggaagatgtagtagcccaccaggcccagcagcaggacgcccacggcgtgcgg

SEQ ID NO: 169488 - DNA, 320 bp, Homo sapiens
  chr11:71169276-71169596
  hypo
tcttcgctttcagtacggcacatctggctgcggcagtgggtcttatgctggctgctcattggaatcacctggaaggctttgagaaaacacctgagccccggcccccagacacgttcagactggactggcccacaggccctgcccctccccgctcacctgagttgtttctggagctcaccttctcactgtctctgcagcggctacggatgttgggatcattattacgagtcggacaccctcttgcactcgtttcaagtcctagcggcccttgtggagtctcccgtcactcaggacatcatctgcgacgtggggatgtaagt

SEQ ID NO: 169489 - DNA, 30 bp, Homo sapiens
  chr11:71170021-71170051
  hypo
tgtaccctgcatcgccggtccttatggagg

SEQ ID NO: 169490 - DNA, 201 bp, Homo sapiens
  chr11:71178321-71178522
  hypo
tgtagcacccgcaggcgctgggcacaggcaaacagacgtctctctggagaaattcaccttcaatccaggctgctccgaatttctagacgtgacatttaaggaaaatgagaagctcagagtccagtcataaaacatacaaggaaataaggcacaatgagtcagaaccagcaaaaaaaatacagtagacgcagatgtgaaagc

SEQ ID NO: 169491 - DNA, 34 bp, Homo sapiens; identical to SEQ ID NO: 25592
  chr11:71184881-71184915
  hypo

SEQ ID NO: 169492 - DNA, 217 bp, Homo sapiens; identical to SEQ ID NO: 82813
  chr11:71185634-71185851
  hypo

SEQ ID NO: 169493 - DNA, 30 bp, Homo sapiens; identical to SEQ ID NO: 82814
  chr11:71187875-71187905
  hypo

SEQ ID NO: 169494 - DNA, 211 bp, Homo sapiens
  chr11:71188520-71188731
  hypo
gcgcaaggtggccacggccatcctgtgaaccgccgcagtggtgcaggtgctgttcccgctgtcccacactcgtgtttagcaaggcaacactcaggaacacaatttgataaagatattttttcatgaaggaataacccctatgagttaaaacctcatttctgcatataccgcaattggcagaacccctaccatagccgggttcaaaggcagg

SEQ ID NO: 169495 - DNA, 954 bp, Homo sapiens
  chr11:71192112-71193066
  hypo
gccctgctgcttccccgtgctgtgaccttgggccccaaggtgctgtccgtccattctgtggttcagtgtccccattttaaaatgaggacgatgataatacccacgtcctgggtctgtcttcagaatcacatgtgtcccttctcacgaggtgcctaaagcagagacgggcgtcctgagagcccagcgttgactctggcactgcagcctcctggggcctgcttgggtgggttgttgggtgctgtgggcaggggccaccgcctccgggctccatgttctgattgccctgcagccttggacctgcctgctggctctgggattttttaagacgaagtcaacaggtaagacttccagtttctagtgagcccactttgcttgttctgctggttggtctggttttattctggggcagggtagggatttttttttttttttttagtgcaaacaacaaaaagcatttcatcactctgcctccatggggagcttagtctgtgctagccagaggcaaggtgggcacagtggctggtgggtcagctccacctttggaggctcagcggaacccagcccatcagcattcagggtcacgctcaccatcttgccagcattgtaatcatgcgtatctgcagttcgtcggtggagtcagcctctgacacgccccgcagtgaagtgtcttttttccctctgaaaaatccattcatcctgccacgtgcgggtatttgtcctgaccccatggaaagtgctaacacccacgtgcatttctgtggacgcctccttgaggtctatgggtggagcttggctgatccatgggcatgctgcttctccgaggctctgctcacgctgtctgattggtccattccaggcagggtttttgctgcccttgagtggcggggtggacagcgcagccaccgcctgcctcatctactccatgtgctgccaggtctgcgaggccgtgaggag

SEQ ID NO: 169496 - DNA, 154 bp, Homo sapiens; identical to SEQ ID NO: 82817
  chr11:71193407-71193561
  hypo

SEQ ID NO: 169497 - DNA, 30 bp, Homo sapiens
  chr11:71209503-71209533
  hypo
acaggtttgatctgcgaccatttctgtaca

SEQ ID NO: 169498 - DNA, 845 bp, Homo sapiens; identical to SEQ ID NO: 82818
  chr11:71229610-71230455
  hypo

SEQ ID NO: 169499 - DNA, 30 bp, Homo sapiens; identical to SEQ ID NO: 82819
  chr11:71258377-71258407
  hypo

SEQ ID NO: 169500 - DNA, 91 bp, Homo sapiens
  chr11:71282210-71282301
  hypo
ggtcctccatgaagagcggcagcctgaagccccgacccctgcagacccaaggctgtctggggacgggccagtgcaccgtgtcctcctgtcc

SEQ ID NO: 169501 - DNA, 30 bp, Homo sapiens; identical to SEQ ID NO: 82821
  chr11:71288241-71288271
  hypo

SEQ ID NO: 169502 - DNA, 30 bp, Homo sapiens; identical to SEQ ID NO: 25599
  chr11:71288499-71288529
  hypo

SEQ ID NO: 169503 - DNA, 121 bp, Homo sapiens; identical to SEQ ID NO: 82823
  chr11:71296338-71296459
  hypo

SEQ ID NO: 169504 - DNA, 83 bp, Homo sapiens; identical to SEQ ID NO: 25600
  chr11:71321042-71321125
  hypo

SEQ ID NO: 169505 - DNA, 27 bp, Homo sapiens
  chr11:71496103-71496130
  hypo
agagcgaaactccgtctcaaaaaaata

SEQ ID NO: 169506 - DNA, 333 bp, Homo sapiens
  chr11:71507733-71508066
  hypo
attgtcccatctcaccgacaaagacactaggacacacagaggacaagcaacccccgagctcccacagactgctgcccggccacctggctcttgtgcctccactctacacccaagccccccattgccaccagcctttgccccagctccccctgagcacagcccctcctggcagccatgtgcacagatgtacccgcagcagcctctgcctgcacacagagacacggacaagccagtgcctgtccacgtggggcagcccgttaactacagagccaacaaacaagccaggacacgaagacatactgggttccacgacagagtcctgcacaacctcac

SEQ ID NO: 169507 - DNA, 29 bp, Homo sapiens
  chr11:71647183-71647212
  hypo
ggcgtaaactgctgcgcctggcctataat

SEQ ID NO: 169508 - DNA, 37 bp, Homo sapiens; identical to SEQ ID NO: 82826
  chr11:71647444-71647481
  hypo

SEQ ID NO: 169509 - DNA, 36 bp, Homo sapiens; identical to SEQ ID NO: 82827
  chr11:71647720-71647756
  hypo

SEQ ID NO: 169510 - DNA, 32 bp, Homo sapiens; identical to SEQ ID NO: 25603
  chr11:71673294-71673326
  hypo

SEQ ID NO: 169511 - DNA, 30 bp, Homo sapiens
  chr11:71679726-71679756
  hypo
cagtcagtagatattcgttgatcctttcta

SEQ ID NO: 169512 - DNA, 30 bp, Homo sapiens; identical to SEQ ID NO: 25604
  chr11:71708567-71708597
  hypo

SEQ ID NO: 169513 - DNA, 30 bp, Homo sapiens; identical to SEQ ID NO: 82830
  chr11:71715153-71715183
  hypo

SEQ ID NO: 169514 - DNA, 771 bp, Homo sapiens
  chr11:71724322-71725093
  hypo
agctccccaagctcccgctgggcccgcagcagctctgcccgcagtcccccagcggcctgcttgctctgctccagctcctcacggtggcgtttctcggcagcggcctgctcggcctgcagctgctggcagaggtgcttagctggcagcagctcactcaccagggcctgtgtgctggtgtgctcgagctgcagggtggagagggcctgctctttctggaagaacttctcctgccacgccttcaattcttggcccagctcctccgcacgctcagcctgtgaggtcagctcctgccgcaggttctctgaagccacccgctgtttctcagcctcctcccggaggctctgcacctcctcccgcagagcagagctgcgttctgcagctctggcactgttgctggctgtctctgcctgcagcaggcgcagcctctcctccagcttctggctcttctctgactcggccatcaccagccgcttcaactccttgctctccccctccttctccaggacctggcgattcaggatggacacctcctcctccaagctgctgatgaggctatttttcctctcagcctcttgccggccccgggccacctgggccttccactcatcttcagccttgctgtggtcttgtaccttggtgcggaaggcagccaactcccgttgggccgaggctaaggcactctgactgtgccctagctcctgggccttctcctctaactggccctgcagagtctccagagcactgtcccgctcagcccgggaggcccgctca

SEQ ID NO: 169515 - DNA, 753 bp, Homo sapiens
  chr11:71725579-71726332
  hypo
tccatcagcgcggcccgcagccgttccagctcattgcccatctgctctgcctcccgctccatagcctgcagcgctgcctgtgtgctgcagaactggcgtccctgttgctcttccagccactcgggctgtctgtctcctgccctcgcaggctccttgactaactcccgggaggctgtttcctgctgctcacctgccttgcgcaccaaggtctccaagcgggccacctctttgctggtggcagccatcttttcctgcagagtggagaggtcatctgcaagcttctgggccctgacttccttctcttggacctgctggagtgctctggccaggttggcatggagctcagctagttcgttctgctgccggcttatctggagctcgctgtgggattctatgcctgccaccttctcctttgcctcctgcagctcctggcgggccttctcacattcctccttcaaagtcatcagctgttcctggaacatggcgccatactgtgcctcctcttgctggctatcctcataccgctcacgccaggcagctacttctttgacgagctgctcacactcactctcagctgtgtgctgggcagccatggcctctgccagctcccgccgcaggacttcagtctcagcctgatgggcctccccaagctgctgtaatcgagcctccagccccttgcgcccagccctctcttcttccagctcctttcgttcccgcttatgctgctccaccaggcttcgggtctctgccttc

SEQ ID NO: 169516 - DNA, 30 bp, Homo sapiens
  chr11:71728854-71728884
  hypo
gactggcaaactcccgcagctgagacgggc

SEQ ID NO: 169517 - DNA, 30 bp, Homo sapiens
  chr11:71781785-71781815
  hypo
gcctgggcaacagagcgaaaccacgtatcc

SEQ ID NO: 169518 - DNA, 30 bp, Homo sapiens; identical to SEQ ID NO: 82834
  chr11:71789665-71789695
  hypo

SEQ ID NO: 169519 - DNA, 30 bp, Homo sapiens
  chr11:71790126-71790156
  hypo
atgaaaacgggaaagcgaaattcctgtgcc

SEQ ID NO: 169520 - DNA, 85 bp, Homo sapiens
  chr11:71792520-71792605
  hypo
ccccaacgcaaacataaagctcccaaaatcggatgcttcaagttccaggcataacctgggagatcagaaacgccctcagaaatgg

SEQ ID NO: 169521 - DNA, 30 bp, Homo sapiens; identical to SEQ ID NO: 82836
  chr11:71806560-71806590
  hypo

SEQ ID NO: 169522 - DNA, 31 bp, Homo sapiens; identical to SEQ ID NO: 25607
  chr11:71888415-71888446
  hypo

SEQ ID NO: 169523 - DNA, 30 bp, Homo sapiens
  chr11:71906664-71906694
  hypo
agctggcgcaaagagcgggtactgaacgtg

SEQ ID NO: 169524 - DNA, 30 bp, Homo sapiens
  chr11:71907073-71907103
  hypo
catccagatgtggttcgacccagcccaggg

SEQ ID NO: 169525 - DNA, 45 bp, Homo sapiens
  chr11:71937178-71937223
  hypo
catctttggtcggggcgcacattagcctagaccaggggagacctt

SEQ ID NO: 169526 - DNA, 38 bp, Homo sapiens
  chr11:71938061-71938099
  hypo
aggatcagacgtgggcgatcagacgtgggcaatatctt

SEQ ID NO: 169527 - DNA, 30 bp, Homo sapiens
  chr11:71938817-71938847
  hypo
acacacgtgttagcacgttgcccgtgtgtg

SEQ ID NO: 169528 - DNA, 55 bp, Homo sapiens; identical to SEQ ID NO: 25608
  chr11:71948503-71948558
  hypo

SEQ ID NO: 169529 - DNA, 118 bp, Homo sapiens; identical to SEQ ID NO: 48760
  chr11:71955006-71955124
  hypo

SEQ ID NO: 169530 - DNA, 329 bp, Homo sapiens; identical to SEQ ID NO: 48761
  chr11:71955189-71955518
  hypo

SEQ ID NO: 169531 - DNA, 186 bp, Homo sapiens; identical to SEQ ID NO: 121177
  chr11:71955549-71955735
  hypo

SEQ ID NO: 169532 - DNA, 50 bp, Homo sapiens; identical to SEQ ID NO: 25610
  chr11:72006578-72006628
  hypo

SEQ ID NO: 169533 - DNA, 42 bp, Homo sapiens
  chr11:72021663-72021705
  hypo
gggtgacagcagtgacgtgaaaggagccgtgttcttctaaaa

SEQ ID NO: 169534 - DNA, 30 bp, Homo sapiens
  chr11:72022038-72022068
  hypo
ctggtcaattctgcccgacctagggcatga

SEQ ID NO: 169535 - DNA, 30 bp, Homo sapiens; identical to SEQ ID NO: 25611
  chr11:72084018-72084048
  hypo

SEQ ID NO: 169536 - DNA, 180 bp, Homo sapiens; identical to SEQ ID NO: 25612
  chr11:72109412-72109592
  hypo

SEQ ID NO: 169537 - DNA, 26 bp, Homo sapiens
  chr11:72126248-72126274
  hypo
actccgtctcaaaaaaaaagaaaaag

SEQ ID NO: 169538 - DNA, 241 bp, Homo sapiens; identical to SEQ ID NO: 121181
  chr11:72301341-72301582
  hypo

SEQ ID NO: 169539 - DNA, 30 bp, Homo sapiens
  chr11:72354608-72354638
  hypo
cgtcaactgcactgccggcccctctctctg

SEQ ID NO: 169540 - DNA, 31 bp, Homo sapiens; identical to SEQ ID NO: 82846
  chr11:72355681-72355712
  hypo

SEQ ID NO: 169541 - DNA, 30 bp, Homo sapiens; identical to SEQ ID NO: 25613
  chr11:72396361-72396391
  hypo

SEQ ID NO: 169542 - DNA, 30 bp, Homo sapiens; identical to SEQ ID NO: 82848
  chr11:72406670-72406700
  hypo

SEQ ID NO: 169543 - DNA, 30 bp, Homo sapiens; identical to SEQ ID NO: 82849
  chr11:72407673-72407703
  hypo

SEQ ID NO: 169544 - DNA, 582 bp, Homo sapiens; identical to SEQ ID NO: 82850
  chr11:72407945-72408527
  hypo

SEQ ID NO: 169545 - DNA, 30 bp, Homo sapiens; identical to SEQ ID NO: 82851
  chr11:72413222-72413252
  hypo

SEQ ID NO: 169546 - DNA, 406 bp, Homo sapiens
  chr11:72413649-72414055
  hypo
ccagaaacacaaatccggggggctcagaggcgcacaaacaccagcacagctgccagccatcctgaggggcccacactgcaagtcagggaagtcatcaacagtcacagagacacagacacagaggaacatgcatacgtagtacaaatacacactgacatgcaaacccaagcacaccccagctcacacatgatttatcacaggcccttgaggagctgcgatcacggcctgagagcagcaggtaaatcaaaccccaccaggcactgcacagcctggtggacccccaccctctgccacgctcacctgtggtccggttgttccgaaggaattccatctgcagcgtctgccccgcctgctctgcaagagccaggggcgtgggggcctcagggtcccccgagaagcagttgat

SEQ ID NO: 169547 - DNA, 108 bp, Homo sapiens; identical to SEQ ID NO: 25615
  chr11:72437782-72437890
  hypo

SEQ ID NO: 169548 - DNA, 538 bp, Homo sapiens; identical to SEQ ID NO: 82854
  chr11:72465691-72466229
  hypo

SEQ ID NO: 169549 - DNA, 524 bp, Homo sapiens; identical to SEQ ID NO: 82855
  chr11:72475518-72476042
  hypo

SEQ ID NO: 169550 - DNA, 30 bp, Homo sapiens
  chr11:72483278-72483308
  hypo
ggctcccctgtgcccggtgctgccatagtg

SEQ ID NO: 169551 - DNA, 482 bp, Homo sapiens
  chr11:72532173-72532655
  hypo
ccaaatctcttagctacgtgactttgggcaagacacttaaacctctctgtcggtgtccttgtctgtgaagtgagagtggcagtaccagcctcctggtgtggtgaggatggaaggagcgtgtagcctgctgggaacatcatggcgcccgagggccggatgggcatttggcagcctctgcgcgaggagtcctcgcagtggttatgcatggtgctgggagcggagcgctggcttcccactcttcaggcgaggcagtggagcgggttgctcttgccagagaggttcctagtagggtcgcagagaaacgaagcggcacggcgaggattgggacccagggctgactccagagcccgagggccttccactgctccacaaacagcagcgcgtccctgtgcaaggtcccaaacctgtgtggggctcagcttgcttttcaggaagggggcgggcaggtgagcagccgactcccttagcgccttcggccccgg

SEQ ID NO: 169552 - DNA, 30 bp, Homo sapiens; identical to SEQ ID NO: 82858
  chr11:72534623-72534653
  hypo

SEQ ID NO: 169553 - DNA, 30 bp, Homo sapiens
  chr11:72571256-72571286
  hypo
taacaggccatggaccggtaaaaggttcgt

SEQ ID NO: 169554 - DNA, 30 bp, Homo sapiens; identical to SEQ ID NO: 82859
  chr11:72614709-72614739
  hypo

SEQ ID NO: 169555 - DNA, 20 bp, Homo sapiens
  chr11:72844826-72844846
  hypo
aactccgtctcaaaaaaaaa

SEQ ID NO: 169556 - DNA, 30 bp, Homo sapiens
  chr11:72851844-72851874
  hypo
ctggccagagagcctcgcccgccaggccgg

SEQ ID NO: 169557 - DNA, 81 bp, Homo sapiens
  chr11:72907830-72907911
  hypo
tcacagaaccactgtcggagagtttcgaggactcagagagaacacaaacaccaggagactggaaattcaactttctttctt

SEQ ID NO: 169558 - DNA, 30 bp, Homo sapiens; identical to SEQ ID NO: 82861
  chr11:73008010-73008040
  hypo

SEQ ID NO: 169559 - DNA, 30 bp, Homo sapiens
  chr11:73008354-73008384
  hypo
agtgcgctcgacgccgggcgtcccctgcac

SEQ ID NO: 169560 - DNA, 39 bp, Homo sapiens; identical to SEQ ID NO: 82862
  chr11:73057917-73057956
  hypo

SEQ ID NO: 169561 - DNA, 223 bp, Homo sapiens
  chr11:73063839-73064062
  hypo
tgagggagtgtgcaccgaccctgtgggtccttcagggctacatgcagccgctgaagcagccagagaactccgtgctctgtgacccttcactggtggacgagatcttcgaccagatccccgagctcctggagcaccacgagcaattcctggagcaggttcggcactgcatgcagacctggcatgcccagcagaaggtgggagccctgctcgtccagtcggtgag

SEQ ID NO: 169562 - DNA, 31 bp, Homo sapiens; identical to SEQ ID NO: 82863
  chr11:73068913-73068944
  hypo

SEQ ID NO: 169563 - DNA, 806 bp, Homo sapiens
  chr11:73072923-73073729
  hypo
gcgtgtatgtgtacgcgtgtgtagaagggtgtatagggcatccacacacacacacccatgcaggcctgcctccctccattctgccggggtttcccaggagtggggaatgctggcagcagttcctccattcaccttctcctgtccattggcgcctcctgcagttctcctgtgcggctcccaccctgaacagctgcccggagccctcgcctgaggtatgggtctgcaacagcgacggctacgtgggccaggtgtgcctgctgagcctgcgcgccgagccggacgtggaggcctgcatcgccgtctgttccgcccgcatcctctgcatcggggcggtgcccgggctgcagcctcgctgccaccggtgaggcctgggcggcggggtgggcggcaccgcgggcctgggagaaccaacccctgtcccagcacactctcaggccgccccggcgtggttgtgggcggggcccggcgagtgtgggcggggtcggtgggcgtgtccaccaccggggccccgtctggctcgtagctgctgtcatcctcactccgtcttctcgcagggagcctcctccgtcgctgaggagtcctccagagacggcaccggagcccgccgggccggagctggacgtcgaggccgctgcagacgaggaagccgcgacgctcgcggagccggggccgcagccctgccttcacatctccattgcaggctcgggcttggagatgacgccgggcctcggcgagggtgacccccgcccagagctggtgccctttgacagtgactctgacgatgagtcttcgcccagcccctcggg

SEQ ID NO: 169564 - DNA, 30 bp, Homo sapiens; identical to SEQ ID NO: 25620
  chr11:73075680-73075710
  hypo

SEQ ID NO: 169565 - DNA, 218 bp, Homo sapiens; identical to SEQ ID NO: 8257
  chr11:73087924-73088142
  hypo

SEQ ID NO: 169566 - DNA, 93 bp, Homo sapiens; identical to SEQ ID NO: 25622
  chr11:73093211-73093304
  hypo

SEQ ID NO: 169567 - DNA, 149 bp, Homo sapiens; identical to SEQ ID NO: 82869
  chr11:73310291-73310440
  hypo

SEQ ID NO: 169568 - DNA, 43 bp, Homo sapiens; identical to SEQ ID NO: 25623
  chr11:73464044-73464087
  hypo

SEQ ID NO: 169569 - DNA, 16 bp, Homo sapiens
  chr11:73464835-73464851
  hypo
gcgtgagccaccacgc

SEQ ID NO: 169570 - DNA, 158 bp, Homo sapiens; identical to SEQ ID NO: 82871
  chr11:73476966-73477124
  hypo

SEQ ID NO: 169571 - DNA, 102 bp, Homo sapiens; identical to SEQ ID NO: 82872
  chr11:73491526-73491628
  hypo

SEQ ID NO: 169572 - DNA, 145 bp, Homo sapiens
  chr11:73492564-73492709
  hypo
accgttaacaatgtacggcagaacaatgaaatctaagaccattataggacccgtgaccggctgggtggtgttgatttttgctgttgttgtttttacttttctgtattttccaaatgttttatagttaattatgcctccctacttt

SEQ ID NO: 169573 - DNA, 24 bp, Homo sapiens
  chr11:73492768-73492792
  hypo
tggcccccacgctgcaccggcgtc

SEQ ID NO: 169574 - DNA, 39 bp, Homo sapiens; identical to SEQ ID NO: 25624
  chr11:73643143-73643182
  hypo

SEQ ID NO: 169575 - DNA, 175 bp, Homo sapiens
  chr11:73662119-73662294
  hypo
ccaggattattactctgtgctcgggatcactcgcaattcagaggatgcccagatcaagcaggcgtaagttggggtgggagccaggccttaggggtgtgctggggcaggccctgccctcttctcttccaaaacgagctttcctgcacagcttagcgcagacaaggtaaaccttgtt

SEQ ID NO: 169576 - DNA, 36 bp, Homo sapiens
  chr11:73662697-73662733
  hypo
ttttttgttttgagacggagtcttggtcttgttgcc

SEQ ID NO: 169577 - DNA, 156 bp, Homo sapiens; identical to SEQ ID NO: 82874
  chr11:73662972-73663128
  hypo

SEQ ID NO: 169578 - DNA, 439 bp, Homo sapiens
  chr11:73685692-73686131
  hypo
agctacaagagagggaggagacgccaaggttgagcttgctttatggatgacaagtgggctaggctgggctgtcgggggcaggacgaagattctggctgaactttccaagggacgggacgcttgggatcctggctggtacgaggcctcccacactgtcaaatgtcaactccaccagcactgagacaatgagtagatgagaatgtagaaagagggaaggtggtaggtaaaggagcggaaggaagaggtggggaaagagggaaggagagaagggaaggagggaagagaaagaaggaagaaaaggaaagcatggcccggctagagacaaagccagaggtgatcaggtcagcagcaggagaggctcagaagggagcctctcgggaagtgcaggcagccatgagggctcgtttcagctgctcataggtgacgaacatcaccacgt

SEQ ID NO: 169579 - DNA, 30 bp, Homo sapiens
  chr11:73686626-73686656
  hypo
atctcgtcttgaccacgtctacaggggagg

SEQ ID NO: 169580 - DNA, 120 bp, Homo sapiens
  chr11:73687938-73688058
  hypo
cgaccacctccagcccgggcctgagcttggaatcggacctttaccacatccgtgggctgggccacagccacagccagggcacctgtggtgctgcctgctaggaggcggctcccaatgctg

SEQ ID NO: 169581 - DNA, 180 bp, Homo sapiens; identical to SEQ ID NO: 82876
  chr11:73688954-73689134
  hypo

SEQ ID NO: 169582 - DNA, 30 bp, Homo sapiens; identical to SEQ ID NO: 82877
  chr11:73714785-73714815
  hypo

SEQ ID NO: 169583 - DNA, 30 bp, Homo sapiens
  chr11:73716252-73716282
  hypo
ttgctcccaaggaagcgcttcctcgttgca

SEQ ID NO: 169584 - DNA, 30 bp, Homo sapiens
  chr11:73716807-73716837
  hypo
cgatggttctgtaggcgtccatagtcccgc

SEQ ID NO: 169585 - DNA, 30 bp, Homo sapiens
  chr11:73727968-73727998
  hypo
ttggagtctagacagcgggtgtcatccatg

SEQ ID NO: 169586 - DNA, 30 bp, Homo sapiens
  chr11:73728335-73728365
  hypo
ggctttcctgtggaccgggtgtcaagcacg

SEQ ID NO: 169587 - DNA, 21 bp, Homo sapiens
  chr11:73779853-73779874
  hypo
atttattttttgagacggagt

SEQ ID NO: 169588 - DNA, 30 bp, Homo sapiens; identical to SEQ ID NO: 82879
  chr11:73858461-73858491
  hypo

SEQ ID NO: 169589 - DNA, 179 bp, Homo sapiens
  chr11:73883501-73883680
  hypo
gtagatctgagggaagcgacgtactggcctaagactttgaattagtgaagcattgggagttcgagaaatagtttgctggaaaggaaggagagccatgtagaagagataggttttggaattttagatcgttaaatggcttgtgccaggttaggggatacttgggccgaggagaaagaatg

SEQ ID NO: 169590 - DNA, 190 bp, Homo sapiens
  chr11:73965090-73965280
  hypo
catccttagccatagcgagcggtggtggtggatagcatcacaagaaacgagcctgaaaatcaggtccagccggtccaagcacatggcctcccatctgggagagcccactgtcccactcccacatgtctgggcacctgccctgggctgaggccaggctgctccaggggcctcctgcgccctcacctgccac

SEQ ID NO: 169591 - DNA, 398 bp, Homo sapiens; identical to SEQ ID NO: 121205
  chr11:74022459-74022857
  hypo

SEQ ID NO: 169592 - DNA, 30 bp, Homo sapiens
  chr11:74085544-74085574
  hypo
attcggcaacaaagacgatctcgcagctcc

SEQ ID NO: 169593 - DNA, 97 bp, Homo sapiens
  chr11:74100757-74100854
  hypo
gtgctaggattacagacgtgagccactgcgcccgaccgggaaaataattttagatcaaagacatatccgaataggtttctaacggccttgtagaaaa

SEQ ID NO: 169594 - DNA, 121 bp, Homo sapiens; identical to SEQ ID NO: 82882
  chr11:74107338-74107459
  hypo

SEQ ID NO: 169595 - DNA, 21 bp, Homo sapiens
  chr11:74107758-74107779
  hypo
ggaaattcattcttaggcaga

SEQ ID NO: 169596 - DNA, 31 bp, Homo sapiens; identical to SEQ ID NO: 82884
  chr11:74136875-74136906
  hypo

SEQ ID NO: 169597 - DNA, 45 bp, Homo sapiens; identical to SEQ ID NO: 25628
  chr11:74168143-74168188
  hypo

SEQ ID NO: 169598 - DNA, 94 bp, Homo sapiens; identical to SEQ ID NO: 25629
  chr11:74168434-74168528
  hypo

SEQ ID NO: 169599 - DNA, 32 bp, Homo sapiens
  chr11:74246353-74246385
  hypo
tgttttgttttgagcccgagtcttgctctgtt

SEQ ID NO: 169600 - DNA, 32 bp, Homo sapiens
  chr11:74246624-74246656
  hypo
attacgggtatgagccacggcacccagcccaa

SEQ ID NO: 169601 - DNA, 65 bp, Homo sapiens; identical to SEQ ID NO: 82888
  chr11:74264049-74264114
  hypo

SEQ ID NO: 169602 - DNA, 30 bp, Homo sapiens; identical to SEQ ID NO: 48787
  chr11:74345534-74345564
  hypo

SEQ ID NO: 169603 - DNA, 30 bp, Homo sapiens
  chr11:74347259-74347289
  hypo
aaaagaaaacgaaaacgcgtactaaaatct

SEQ ID NO: 169604 - DNA, 198 bp, Homo sapiens; identical to SEQ ID NO: 82890
  chr11:74424485-74424683
  hypo

SEQ ID NO: 169605 - DNA, 847 bp, Homo sapiens; identical to SEQ ID NO: 121217
  chr11:74441795-74442642
  hypo

SEQ ID NO: 169606 - DNA, 30 bp, Homo sapiens; identical to SEQ ID NO: 25631
  chr11:74560679-74560709
  hypo

SEQ ID NO: 169607 - DNA, 18 bp, Homo sapiens
  chr11:74664268-74664286
  hypo
tttttttttgagacagag

SEQ ID NO: 169608 - DNA, 17 bp, Homo sapiens
  chr11:74664525-74664542
  hypo
ccacacccagcctaata

SEQ ID NO: 169609 - DNA, 30 bp, Homo sapiens
  chr11:74668522-74668552
  hypo
agaataaggactcatcgcacatctgtatca

SEQ ID NO: 169610 - DNA, 30 bp, Homo sapiens
  chr11:74914410-74914440
  hypo
gccctgagctgtgggcgtcgagctgtctgt

SEQ ID NO: 169611 - DNA, 388 bp, Homo sapiens; identical to SEQ ID NO: 48794
  chr11:74952948-74953336
  hypo

SEQ ID NO: 169612 - DNA, 30 bp, Homo sapiens; identical to SEQ ID NO: 82896
  chr11:74978418-74978448
  hypo

SEQ ID NO: 169613 - DNA, 31 bp, Homo sapiens; identical to SEQ ID NO: 25634
  chr11:74988583-74988614
  hypo

SEQ ID NO: 169614 - DNA, 248 bp, Homo sapiens; identical to SEQ ID NO: 25635
  chr11:74994375-74994623
  hypo

SEQ ID NO: 169615 - DNA, 75 bp, Homo sapiens; identical to SEQ ID NO: 82899
  chr11:74998667-74998742
  hypo

SEQ ID NO: 169616 - DNA, 68 bp, Homo sapiens; identical to SEQ ID NO: 82900
  chr11:75001249-75001317
  hypo

SEQ ID NO: 169617 - DNA, 31 bp, Homo sapiens; identical to SEQ ID NO: 82901
  chr11:75021190-75021221
  hypo

SEQ ID NO: 169618 - DNA, 96 bp, Homo sapiens; identical to SEQ ID NO: 82902
  chr11:75026126-75026222
  hypo

SEQ ID NO: 169619 - DNA, 17 bp, Homo sapiens
  chr11:75034362-75034379
  hypo
ttgaaatgtacctagag

SEQ ID NO: 169620 - DNA, 453 bp, Homo sapiens; identical to SEQ ID NO: 82904
  chr11:75035340-75035793
  hypo

SEQ ID NO: 169621 - DNA, 45 bp, Homo sapiens; identical to SEQ ID NO: 82905
  chr11:75053730-75053775
  hypo

SEQ ID NO: 169622 - DNA, 715 bp, Homo sapiens; identical to SEQ ID NO: 48795
  chr11:75062272-75062987
  hypo

SEQ ID NO: 169623 - DNA, 30 bp, Homo sapiens; identical to SEQ ID NO: 82907
  chr11:75064704-75064734
  hypo

SEQ ID NO: 169624 - DNA, 30 bp, Homo sapiens; identical to SEQ ID NO: 82908
  chr11:75065540-75065570
  hypo

SEQ ID NO: 169625 - DNA, 30 bp, Homo sapiens
  chr11:75070774-75070804
  hypo
ccaatgaaggagaatcgcttgagtccaaaa

SEQ ID NO: 169626 - DNA, 22 bp, Homo sapiens
  chr11:75085063-75085085
  hypo
ttttgagacaaagtctcgctct

SEQ ID NO: 169627 - DNA, 204 bp, Homo sapiens
  chr11:75088467-75088671
  hypo
ctacagcctggtccccgtgcccatgcagaggtagctgctgctgctgagctgatgttgagcatggcagggacagagttctatcttctgcttggaactgacactggaaaatgggatcctgtggtcatgggggcagtgtattctactagattctgctaagttgctttaaaattagctgtatcggctgggcacggtggctcacacctg

SEQ ID NO: 169628 - DNA, 15 bp, Homo sapiens
  chr11:75095705-75095720
  hypo
cgccccctagcggcg

SEQ ID NO: 169629 - DNA, 30 bp, Homo sapiens
  chr11:75100594-75100624
  hypo
aatgacggccgggcgcggtggctcacgcct

SEQ ID NO: 169630 - DNA, 88 bp, Homo sapiens; identical to SEQ ID NO: 82912
  chr11:75101268-75101356
  hypo

SEQ ID NO: 169631 - DNA, 30 bp, Homo sapiens
  chr11:75102253-75102283
  hypo
gcgagaccaggctgtcgggctcaaacatac

SEQ ID NO: 169632 - DNA, 30 bp, Homo sapiens; identical to SEQ ID NO: 25639
  chr11:75115361-75115391
  hypo

SEQ ID NO: 169633 - DNA, 295 bp, Homo sapiens
  chr11:75136559-75136854
  hypo
agaaggggtcgtagcgctccacgctgtgcaggcgcctcaggccgtcgaagccacccaccgcgaacagctgcaagtgaggacatgggccggggagccgggtgccagggccttagggccctcggcctcatcgcttcagtccttacagtctttgagctggaaactatccctgtccccaacccagtttcaggaccaaactgacccccgagcccagtgctgccaccacctgggcagcctccacccagttgctgtacctccctgagccggtttcctctcatttagcggggatgagacctta

SEQ ID NO: 169634 - DNA, 930 bp, Homo sapiens; identical to SEQ ID NO: 48799
  chr11:75140939-75141869
  hypo

SEQ ID NO: 169635 - DNA, 251 bp, Homo sapiens; identical to SEQ ID NO: 82916
  chr11:75146456-75146707
  hypo

SEQ ID NO: 169636 - DNA, 31 bp, Homo sapiens; identical to SEQ ID NO: 82917
  chr11:75147837-75147868
  hypo

SEQ ID NO: 169637 - DNA, 387 bp, Homo sapiens
  chr11:75150985-75151372
  hypo
gagacagtactcgtccgggggctgtggacagacggcccgaggccaacttccagtcatggccagtccagactgaggctccagactgagggtccgtggaccaaaggaccccacatggccactggggaagggcaagggaggaccctgagagggtctgggggctgaagatgacattttgcaggtgtaggctccaggcgctgtgggcctgggggccggggcgtgtgtgtgcacacgtgtgcactctcagggtaggaggggactgtatggtgctcagggcagaggggttgtgtgctaggcctgcagggtctgtgtgtctagggtcctcaaagcaggagccagatactgaaagacaatggctttgccgccccccgctgccgactctcatccatc

SEQ ID NO: 169638 - DNA, 643 bp, Homo sapiens
  chr11:75152261-75152904
  hypo
gacggatgggacccccgcacaccacagcagggagaagagccacggtgcgttgactgtgtagaggttcacactcaggttccaggacgcgtagtccctgtggggcaggggagaggcaggtcagcatgcggaccctggcagctccaggcccagtgtcggggctggtaaagcacgtcctgttcacgacctcacagccatgcccggggcaaggaacattggctccagagggccaagctccgggacaagcccgggtctgcccgacacgctcaccctcttgtctttgaaccatgtgtgcctgattcctctgtgtgcccatccctctgcccgaccgtgtgtgtgtgtgtgtgtgtgtgtgttggggggtggtggtggcaggactgggagagactcagtcccaccctctcctggaggagcccagggcagggcaggcacctgagctcctggcgggacacctgagtgtagcgcaggttcagccgctggatgtggcctctccgcaggctggcgactgcctccttggagcctgatgtctgttggaagccgggagccaccttccgcaccaggggcctctgcctgctaggcagccacatgacctgcaggcagaagagaggcagcctcagacttctcttctgcacgatgcgtaagagta

SEQ ID NO: 169639 - DNA, 30 bp, Homo sapiens
  chr11:75161246-75161276
  hypo
ggccggcagacccagcgaggaagggacagc

SEQ ID NO: 169640 - DNA, 545 bp, Homo sapiens
  chr11:75161621-75162166
  hypo
agcatctaggtccgccgtgatgggggccatcctccttgcagcctccagaagaaagcaaagcacagctctcatggaggatgaggtggcacctctacgggacagagatctctggtgacaggtaagacctgaaatctttaaccacgtgaagctcggcagaggttttcggctcctcggcccccagcccctcgcccctagccgtggatctcactccacccacccccctccacacccccaggcgtgcctccccgaagcccaggttgtggctctcctccaaagcctcccgcagatcccagtctctggaagggtcagtcaaagccgccacctccgtccccctagtttctccagactcgtctcccatctccctccaaaggcctgtccttctcccacagcactgccggccgccctgcctccctggagccgttctagctgctggcagggccttcaccccctttctcccgaggcaacctttcccagaggcagcagcggccagggccctctgatgccgagcagggacagtggcatttctagacgatgagggtggggcg

SEQ ID NO: 169641 - DNA, 30 bp, Homo sapiens; identical to SEQ ID NO: 25643
  chr11:75167012-75167042
  hypo

SEQ ID NO: 169642 - DNA, 224 bp, Homo sapiens
  chr11:75167767-75167991
  hypo
gctctctcccagccccggccgaggcggcccttaccttgtgcagccagtgcaggttcatctgctgccccacggcaatgtgacatagtgccaggacctgaggagggacccacagggtgattgtcaggcccgtgtgggcgggaaggctttgccagtttctcagacaccctgctccccactgcggctctgggcctgaccctgggcagaggcagcgaacctccctccag

SEQ ID NO: 169643 - DNA, 31 bp, Homo sapiens; identical to SEQ ID NO: 8270
  chr11:75237128-75237159
  hypo

SEQ ID NO: 169644 - DNA, 30 bp, Homo sapiens
  chr11:75239802-75239832
  hypo
ttacattcttctcaccggaggcagcagctt

SEQ ID NO: 169645 - DNA, 128 bp, Homo sapiens; identical to SEQ ID NO: 25645
  chr11:75242018-75242146
  hypo

SEQ ID NO: 169646 - DNA, 30 bp, Homo sapiens
  chr11:75259762-75259792
  hypo
ctaccctggtgcctccgtgccgcagcccag

SEQ ID NO: 169647 - DNA, 30 bp, Homo sapiens
  chr11:75260095-75260125
  hypo
cgcagggctcctggacgcacactgtagaac

SEQ ID NO: 169648 - DNA, 30 bp, Homo sapiens
  chr11:75280069-75280099
  hypo
ctcatgccccatcacgtggagcctctcgag

SEQ ID NO: 169649 - DNA, 203 bp, Homo sapiens; identical to SEQ ID NO: 82923
  chr11:75285549-75285752
  hypo

SEQ ID NO: 169650 - DNA, 194 bp, Homo sapiens; identical to SEQ ID NO: 25646
  chr11:75303122-75303316
  hypo

SEQ ID NO: 169651 - DNA, 142 bp, Homo sapiens; identical to SEQ ID NO: 82925
  chr11:75315460-75315602
  hypo

SEQ ID NO: 169652 - DNA, 30 bp, Homo sapiens
  chr11:75315888-75315918
  hypo
aggagcagaccagagcggttcaggaaggga

SEQ ID NO: 169653 - DNA, 31 bp, Homo sapiens; identical to SEQ ID NO: 25647
  chr11:75338638-75338669
  hypo

SEQ ID NO: 169654 - DNA, 935 bp, Homo sapiens; identical to SEQ ID NO: 48805
  chr11:75379282-75380217
  hypo

SEQ ID NO: 169655 - DNA, 93 bp, Homo sapiens
  chr11:75389092-75389185
  hypo
ctctgcggccggaggcgccttctgcctaagtattacttgcgccgctggactcattccgcccacttggccgtctcagctcgagctaccgcctgg

SEQ ID NO: 169656 - DNA, 46 bp, Homo sapiens
  chr11:75392222-75392268
  hypo
ttcacaagggtggagcgtctgtgatgggaatcgtttccttataaga

SEQ ID NO: 169657 - DNA, 31 bp, Homo sapiens; identical to SEQ ID NO: 82928
  chr11:75414896-75414927
  hypo

SEQ ID NO: 169658 - DNA, 41 bp, Homo sapiens
  chr11:75426560-75426601
  hypo
cgagatggtgccagtgcactccagcccgggcgacagtggga

SEQ ID NO: 169659 - DNA, 18 bp, Homo sapiens
  chr11:75438021-75438039
  hypo
accgcgcctggctggaac

SEQ ID NO: 169660 - DNA, 102 bp, Homo sapiens
  chr11:75459472-75459574
  hypo
acagataaacaaaaggcgttaggttggtgcgaaagtcattgaggtttttgccaatagcatccctacaatggactattatttgatcgtaaaaagtaatgaaat

SEQ ID NO: 169661 - DNA, 30 bp, Homo sapiens; identical to SEQ ID NO: 121239
  chr11:75479809-75479839
  hypo

SEQ ID NO: 169662 - DNA, 135 bp, Homo sapiens; identical to SEQ ID NO: 121240
  chr11:75480047-75480182
  hypo

SEQ ID NO: 169663 - DNA, 30 bp, Homo sapiens
  chr11:75513638-75513668
  hypo
tcactgaggaaagaacgcctgagctgggcc

SEQ ID NO: 169664 - DNA, 30 bp, Homo sapiens; identical to SEQ ID NO: 25649
  chr11:75529839-75529869
  hypo

SEQ ID NO: 169665 - DNA, 181 bp, Homo sapiens
  chr11:75536034-75536215
  hypo
cgtactggaatgtgtacagctacaaactgaaggtgttttagaaaaagacatctgtcttatgagagaggttgaaacattttaggtttatgctttgttttaggtttaatgacataagtaatgtcttttttttttttttgagacagcgttaccctgttgtcgcccagaatggagtgcaatggca

SEQ ID NO: 169666 - DNA, 30 bp, Homo sapiens; identical to SEQ ID NO: 82933
  chr11:75557285-75557315
  hypo

SEQ ID NO: 169667 - DNA, 30 bp, Homo sapiens; identical to SEQ ID NO: 121243
  chr11:75566602-75566632
  hypo

SEQ ID NO: 169668 - DNA, 31 bp, Homo sapiens; identical to SEQ ID NO: 25651
  chr11:75681481-75681512
  hypo

SEQ ID NO: 169669 - DNA, 32 bp, Homo sapiens
  chr11:75748468-75748500
  hypo
gggcgcagtggctcacgcctgtaatcccagca

SEQ ID NO: 169670 - DNA, 30 bp, Homo sapiens
  chr11:75748929-75748959
  hypo
ttgtgaatatatagtcggccctctcaatct

SEQ ID NO: 169671 - DNA, 37 bp, Homo sapiens; identical to SEQ ID NO: 82935
  chr11:75799382-75799419
  hypo

SEQ ID NO: 169672 - DNA, 30 bp, Homo sapiens
  chr11:75849441-75849471
  hypo
agtcgggaaaatggtcgttcccttcacatt

SEQ ID NO: 169673 - DNA, 50 bp, Homo sapiens; identical to SEQ ID NO: 25652
  chr11:75852054-75852104
  hypo

SEQ ID NO: 169674 - DNA, 30 bp, Homo sapiens
  chr11:75854027-75854057
  hypo
aactctcaggcagtcgaaagctttaactgg

SEQ ID NO: 169675 - DNA, 169 bp, Homo sapiens; identical to SEQ ID NO: 25653
  chr11:75858210-75858379
  hypo

SEQ ID NO: 169676 - DNA, 18 bp, Homo sapiens
  chr11:75859222-75859240
  hypo
aaaaaaaaaaaatttttt

SEQ ID NO: 169677 - DNA, 30 bp, Homo sapiens; identical to SEQ ID NO: 82939
  chr11:75859521-75859551
  hypo

SEQ ID NO: 169678 - DNA, 30 bp, Homo sapiens; identical to SEQ ID NO: 82940
  chr11:75876120-75876150
  hypo

SEQ ID NO: 169679 - DNA, 30 bp, Homo sapiens; identical to SEQ ID NO: 25655
  chr11:75878112-75878142
  hypo

SEQ ID NO: 169680 - DNA, 168 bp, Homo sapiens; identical to SEQ ID NO: 25656
  chr11:75882507-75882675
  hypo

SEQ ID NO: 169681 - DNA, 30 bp, Homo sapiens; identical to SEQ ID NO: 25657
  chr11:75904169-75904199
  hypo

SEQ ID NO: 169682 - DNA, 229 bp, Homo sapiens
  chr11:75905703-75905932
  hypo
ccccatgaggagcccgtagctgaggttgtccgcacatcctccccagcggttcccgggcccgggtggctcacctgggacggggccgcaggagcagccgggcaggtcgccggaggtgcaggcccgggcgatggcgtggctgatggcggcggccgacagcgcatacacgaaggccgactcccgggtccctgagggtgggaggggaaggtcagccgacgctgatccagggcta

SEQ ID NO: 169683 - DNA, 30 bp, Homo sapiens; identical to SEQ ID NO: 25658
  chr11:75907190-75907220
  hypo

SEQ ID NO: 169684 - DNA, 30 bp, Homo sapiens; identical to SEQ ID NO: 121245
  chr11:75921611-75921641
  hypo

SEQ ID NO: 169685 - DNA, 254 bp, Homo sapiens; identical to SEQ ID NO: 121246
  chr11:75921930-75922184
  hypo

SEQ ID NO: 169686 - DNA, 87 bp, Homo sapiens; identical to SEQ ID NO: 82946
  chr11:75993074-75993161
  hypo

SEQ ID NO: 169687 - DNA, 31 bp, Homo sapiens; identical to SEQ ID NO: 82947
  chr11:76001208-76001239
  hypo

SEQ ID NO: 169688 - DNA, 31 bp, Homo sapiens; identical to SEQ ID NO: 25659
  chr11:76010247-76010278
  hypo

SEQ ID NO: 169689 - DNA, 36 bp, Homo sapiens; identical to SEQ ID NO: 25660
  chr11:76077427-76077463
  hypo

SEQ ID NO: 169690 - DNA, 31 bp, Homo sapiens; identical to SEQ ID NO: 25661
  chr11:76101585-76101616
  hypo

SEQ ID NO: 169691 - DNA, 31 bp, Homo sapiens
  chr11:76101855-76101886
  hypo
gcaagactccgtcttaaaaaaaaaaaaaaaa

SEQ ID NO: 169692 - DNA, 56 bp, Homo sapiens; identical to SEQ ID NO: 25662
  chr11:76164361-76164417
  hypo

SEQ ID NO: 169693 - DNA, 181 bp, Homo sapiens
  chr11:76205111-76205292
  hypo
tctggtccagccgcagcctcgcatggagcttggcatctctgccagtgcctggagctgcccgccccactgcagcagctggcatctgtgcctggctcactgttgacaggtgtgggatccgggccggtagcacgagccaagcaccgcctgcagggacaagtggacagaatgagcccagtgggca

SEQ ID NO: 169694 - DNA, 192 bp, Homo sapiens; identical to SEQ ID NO: 82952
  chr11:76315099-76315291
  hypo

SEQ ID NO: 169695 - DNA, 184 bp, Homo sapiens; identical to SEQ ID NO: 25663
  chr11:76339358-76339542
  hypo

SEQ ID NO: 169696 - DNA, 832 bp, Homo sapiens
  chr11:76371477-76372309
  hypo
accccagggctctggcgcccagttccagtgtctccagggcattgtggcttaagtcaaggagcatcaggcagggcagggagcctaagcgccgggcctcaaaggtccgcaagcagtttctgctgaggttcaggaagcacagggaggtcaggtgctcaagaaagctgtcggggatgagctcaatctcattgtagctcaaatccagattcaagagctgggaaagggggcggccgctggcattcccgctgggggctgagaggggcagggctgaccagccctcggaaggtgcgtggatgcccttgctgtcctggggtggccctgtggggagccggatgaggttgttggacaagttcaggtagatgagtctcgggagcgcggccaggtcggggaaatggagcagtttgttctcccgcaggtcaagccaggtgagctggaactcagcctggggctgggaggccgtctgaaaggcctcgatgctgttgcagctcaggtctagcacccgcagctgctggaggctgaagtcggagatgcaggtgagggaattcctggagaggttgagatgggtcaggcggggcagaccctcgaaggcgccatcctcgatgtccatcagcacgttgctatgcaggtcaagctgctccagcgcaggcatgtcccggaaggtgtggcgggtgaggcgagtcagactgttctccgccagtgagagggtatgcaggctgggtgcctcccccagcagccgctccagcaggccgctgtacaggctgttcccagacaggtccagggaggtcacgcgtggcagggggcccaggccaccagcactcagcgcagtggccatcgc

SEQ ID NO: 169697 - DNA, 808 bp, Homo sapiens; identical to SEQ ID NO: 121254
  chr11:76381507-76382315
  hypo

SEQ ID NO: 169698 - DNA, 437 bp, Homo sapiens; identical to SEQ ID NO: 82956
  chr11:76407634-76408071
  hypo

SEQ ID NO: 169699 - DNA, 193 bp, Homo sapiens; identical to SEQ ID NO: 82957
  chr11:76408272-76408465
  hypo

SEQ ID NO: 169700 - DNA, 40 bp, Homo sapiens
  chr11:76419080-76419120
  hypo
ttttttttttaatgtcgcgatcccagctcaccacaacctc

SEQ ID NO: 169701 - DNA, 160 bp, Homo sapiens
  chr11:76419239-76419399
  hypo
ataaactgccttcttgagaggagtgctgaggtggaagacgacggatgttagcacctggcagactctcccccaccctcaggccccgcaacaactgccgctgctctgttgccaacaatgcccaccaatgatcttgaaaccttgacagcgcagctctttcctc

SEQ ID NO: 169702 - DNA, 90 bp, Homo sapiens
  chr11:76419670-76419760
  hypo
aagaggggctgacaccgagctcaggctctggagtccacagatcagagcgggactttagacgacccatttacagtccgcacaaggcgcatc

SEQ ID NO: 169703 - DNA, 73 bp, Homo sapiens
  chr11:76447827-76447900
  hypo
ggctggcggtgagaccgaatgtgcagagccgacactaggctgtggagacccgagggcccggcaggctcccctg

SEQ ID NO: 169704 - DNA, 31 bp, Homo sapiens; identical to SEQ ID NO: 25668
  chr11:76450420-76450451
  hypo

SEQ ID NO: 169705 - DNA, 56 bp, Homo sapiens; identical to SEQ ID NO: 82959
  chr11:76463184-76463240
  hypo

SEQ ID NO: 169706 - DNA, 31 bp, Homo sapiens; identical to SEQ ID NO: 48811
  chr11:76466226-76466257
  hypo

SEQ ID NO: 169707 - DNA, 144 bp, Homo sapiens; identical to SEQ ID NO: 82961
  chr11:76506254-76506398
  hypo

SEQ ID NO: 169708 - DNA, 31 bp, Homo sapiens; identical to SEQ ID NO: 82962
  chr11:76507126-76507157
  hypo

SEQ ID NO: 169709 - DNA, 31 bp, Homo sapiens; identical to SEQ ID NO: 82963
  chr11:76516214-76516245
  hypo

SEQ ID NO: 169710 - DNA, 105 bp, Homo sapiens; identical to SEQ ID NO: 82964
  chr11:76674833-76674938
  hypo

SEQ ID NO: 169711 - DNA, 31 bp, Homo sapiens; identical to SEQ ID NO: 48816
  chr11:76682667-76682698
  hypo

SEQ ID NO: 169712 - DNA, 121 bp, Homo sapiens
  chr11:76901056-76901177
  hypo
ggctgcagtacctgcggaacttcatccacgggggcccgcccggctacgccccgtactgtgaggagcgcctgagaaggacctttgtcaatgggacacggacacagccgcccagctggctgga

SEQ ID NO: 169713 - DNA, 31 bp, Homo sapiens
  chr11:76902656-76902687
  hypo
gaggctggagcctcctcggctgagcgggacc

SEQ ID NO: 169714 - DNA, 167 bp, Homo sapiens; identical to SEQ ID NO: 82967
  chr11:76905509-76905676
  hypo

SEQ ID NO: 169715 - DNA, 31 bp, Homo sapiens; identical to SEQ ID NO: 82968
  chr11:76910510-76910541
  hypo

SEQ ID NO: 169716 - DNA, 31 bp, Homo sapiens; identical to SEQ ID NO: 82969
  chr11:76912236-76912267
  hypo

SEQ ID NO: 169717 - DNA, 108 bp, Homo sapiens; identical to SEQ ID NO: 82970
  chr11:76924553-76924661
  hypo

SEQ ID NO: 169718 - DNA, 36 bp, Homo sapiens; identical to SEQ ID NO: 82971
  chr11:76955353-76955389
  hypo

SEQ ID NO: 169719 - DNA, 30 bp, Homo sapiens
  chr11:77016587-77016617
  hypo
gtgagctactgcgcccggcctagtcaaggg

SEQ ID NO: 169720 - DNA, 30 bp, Homo sapiens
  chr11:77024553-77024583
  hypo
tgagcagcgccctccgccctccgccctaag

SEQ ID NO: 169721 - DNA, 30 bp, Homo sapiens
  chr11:77091233-77091263
  hypo
tgttgaactaaagtacgggaggtggccggg

SEQ ID NO: 169722 - DNA, 1570 bp, Homo sapiens; identical to SEQ ID NO: 121263
  chr11:77184260-77185830
  hypo

SEQ ID NO: 169723 - DNA, 147 bp, Homo sapiens
  chr11:77383097-77383244
  hypo
gagctggaaagtcttcgcttgtgtactcgccttatttctttaccacgtcgcaaactcttctgggaaccgtcactttctgagtcttctttgtagttaatttgtcttttctgatttctccttgaccgccttcgccgagtttctacaaaa

SEQ ID NO: 169724 - DNA, 16 bp, Homo sapiens
  chr11:77533444-77533460
  hypo
agcaagactccacctc

SEQ ID NO: 169725 - DNA, 22 bp, Homo sapiens
  chr11:77534247-77534269
  hypo
aagactccgtctcaaaaaaaaa

SEQ ID NO: 169726 - DNA, 30 bp, Homo sapiens; identical to SEQ ID NO: 25674
  chr11:77589957-77589987
  hypo

SEQ ID NO: 169727 - DNA, 30 bp, Homo sapiens; identical to SEQ ID NO: 25675
  chr11:77595018-77595048
  hypo

SEQ ID NO: 169728 - DNA, 31 bp, Homo sapiens; identical to SEQ ID NO: 82978
  chr11:77728163-77728194
  hypo

SEQ ID NO: 169729 - DNA, 27 bp, Homo sapiens
  chr11:77751992-77752019
  hypo
ggtgtgagccaccgcgcccggccacta

SEQ ID NO: 169730 - DNA, 31 bp, Homo sapiens; identical to SEQ ID NO: 82979
  chr11:77883308-77883339
  hypo

SEQ ID NO: 169731 - DNA, 30 bp, Homo sapiens; identical to SEQ ID NO: 25676
  chr11:77920641-77920671
  hypo

SEQ ID NO: 169732 - DNA, 22 bp, Homo sapiens
  chr11:78002202-78002224
  hypo
aaagagtagatcaaggctgggc

SEQ ID NO: 169733 - DNA, 82 bp, Homo sapiens; identical to SEQ ID NO: 82982
  chr11:78021124-78021206
  hypo

SEQ ID NO: 169734 - DNA, 26 bp, Homo sapiens
  chr11:78130945-78130971
  hypo
ttttttttttttagacggagtctcgc

SEQ ID NO: 169735 - DNA, 25 bp, Homo sapiens
  chr11:78131210-78131235
  hypo
ggattacaggcgtgagcccggccga

SEQ ID NO: 169736 - DNA, 30 bp, Homo sapiens; identical to SEQ ID NO: 82985
  chr11:78253913-78253943
  hypo

SEQ ID NO: 169737 - DNA, 20 bp, Homo sapiens
  chr11:78255540-78255560
  hypo
atcaagaatgagttaccggc

SEQ ID NO: 169738 - DNA, 348 bp, Homo sapiens
  chr11:78380584-78380932
  hypo
agatatcaccgccccgctgcctcaggaagccatcctcatccatcttgtattgcacgtcacccagccgagtgatgcggtcgcggatgtcataccgtagtggtgtgagccgtgcactgttcccagggctcagtaagtgcaggttcccattgaggtcgtagctgtagcgccagagtggcttgtcattgatggagactgtctgcagctggccgtcagcatcatactcataggagtagcgagtggtattggcgtagggtcctaccttcagctccttcttcactactcgccccatgttatcatactggacggtcatccagtacatgagcgagcggaagatctcatactgcactt

SEQ ID NO: 169739 - DNA, 202 bp, Homo sapiens
  chr11:78387182-78387384
  hypo
gaggcctcgctcacccgcagccggcgcccaaagacagtgacctggccccgagcctgctctttgcgctggcgccactccaccaggttgaggccgttgtcgatgggcagcgtgacattcctcttgcccacggtggggttgacggtgccagccagcaagtggggctcagtctgcagcgccacctccatgccgttggccagcagca

SEQ ID NO: 169740 - DNA, 74 bp, Homo sapiens
  chr11:78497976-78498050
  hypo
gcactcgcacttgccgtcgcggcaggtcccatgctcggcacagcgcgggtggcaggcccgctggtcgcaggctg

SEQ ID NO: 169741 - DNA, 408 bp, Homo sapiens; identical to SEQ ID NO: 25679
  chr11:78534088-78534496
  hypo

SEQ ID NO: 169742 - DNA, 30 bp, Homo sapiens; identical to SEQ ID NO: 48829
  chr11:78789409-78789439
  hypo

SEQ ID NO: 169743 - DNA, 30 bp, Homo sapiens
  chr11:78790142-78790172
  hypo
cagaaagagaactgtcgggacagagacagg

SEQ ID NO: 169744 - DNA, 43 bp, Homo sapiens; identical to SEQ ID NO: 82991
  chr11:78982380-78982423
  hypo

SEQ ID NO: 169745 - DNA, 31 bp, Homo sapiens; identical to SEQ ID NO: 25680
  chr11:78984744-78984775
  hypo

SEQ ID NO: 169746 - DNA, 1141 bp, Homo sapiens; identical to SEQ ID NO: 121284
  chr11:79150740-79151881
  hypo

SEQ ID NO: 169747 - DNA, 30 bp, Homo sapiens
  chr11:81707040-81707070
  hypo
agctggctgctttggcgcctgcatgagcaa

SEQ ID NO: 169748 - DNA, 195 bp, Homo sapiens; identical to SEQ ID NO: 8285
  chr11:82443373-82443568
  hypo

SEQ ID NO: 169749 - DNA, 285 bp, Homo sapiens; identical to SEQ ID NO: 8286
  chr11:82443651-82443936
  hypo

SEQ ID NO: 169750 - DNA, 1138 bp, Homo sapiens; identical to SEQ ID NO: 121288
  chr11:82443948-82445086
  hypo

SEQ ID NO: 169751 - DNA, 30 bp, Homo sapiens; identical to SEQ ID NO: 82997
  chr11:82693039-82693069
  hypo

SEQ ID NO: 169752 - DNA, 104 bp, Homo sapiens; identical to SEQ ID NO: 82998
  chr11:82843542-82843646
  hypo

SEQ ID NO: 169753 - DNA, 219 bp, Homo sapiens
  chr11:82931325-82931544
  hypo
gtgtctttagtctggcggctgtgctaattgcctttaagtggctgacaggtgcccagtttagcctctgaattctaaggaaggacaggacagaatagcaagtgaaagaggtccgattgtattcaccacgtgacgatctagatgcctttcctggacactcctggcaggctcgccaaaatgtaatgcctaaggttcttacctagccatgccaaagaattggtg

SEQ ID NO: 169754 - DNA, 29 bp, Homo sapiens
  chr11:82998000-82998029
  hypo
cactgggatggctgggcgtggtggctcat

SEQ ID NO: 169755 - DNA, 30 bp, Homo sapiens
  chr11:83534703-83534733
  hypo
attcattcattcattcgttcattaaacatt

SEQ ID NO: 169756 - DNA, 137 bp, Homo sapiens; identical to SEQ ID NO: 83000
  chr11:85247647-85247784
  hypo

SEQ ID NO: 169757 - DNA, 43 bp, Homo sapiens; identical to SEQ ID NO: 83001
  chr11:85319010-85319053
  hypo

SEQ ID NO: 169758 - DNA, 20 bp, Homo sapiens
  chr11:85359988-85360008
  hypo
tttttttttgtagaccgagt

SEQ ID NO: 169759 - DNA, 31 bp, Homo sapiens; identical to SEQ ID NO: 25687
  chr11:85379742-85379773
  hypo

SEQ ID NO: 169760 - DNA, 203 bp, Homo sapiens; identical to SEQ ID NO: 83004
  chr11:85564730-85564933
  hypo

SEQ ID NO: 169761 - DNA, 30 bp, Homo sapiens; identical to SEQ ID NO: 83005
  chr11:85565187-85565217
  hypo

SEQ ID NO: 169762 - DNA, 30 bp, Homo sapiens; identical to SEQ ID NO: 83006
  chr11:85646445-85646475
  hypo

SEQ ID NO: 169763 - DNA, 30 bp, Homo sapiens
  chr11:85673250-85673280
  hypo
tcttcagcgcaaccacggacggccaatcaa

SEQ ID NO: 169764 - DNA, 170 bp, Homo sapiens; identical to SEQ ID NO: 25688
  chr11:85692739-85692909
  hypo

SEQ ID NO: 169765 - DNA, 30 bp, Homo sapiens; identical to SEQ ID NO: 25689
  chr11:85719839-85719869
  hypo

SEQ ID NO: 169766 - DNA, 181 bp, Homo sapiens
  chr11:85749361-85749542
  hypo
gaaaaaaattaaacaaaacaaaacaaaaaaagaataagagttgcatggtaaagtacctgagaatttggcagccactatgccagaagtaggtcagtattttgaacacaagttcaatctcttacaatggtaaatgagccttaaggaatctccagaccccacacccaaagtaagtcaaagtcct

SEQ ID NO: 169767 - DNA, 30 bp, Homo sapiens
  chr11:85820568-85820598
  hypo
tcaccaccagcacgtcgctctcttgttcgt

SEQ ID NO: 169768 - DNA, 339 bp, Homo sapiens
  chr11:85906158-85906497
  hypo
ataaggaccatcttgagatggcggccaccgagggggtcggggaggctgcgcaaggcggtgagccccggcagctggagcagcccccgccccagccgcacccaccgctgccccaggagcagcacgaggaagagatggcagcagaggctggggaagccgtggcgtcccccatggacgacgggtttctgagcctggattcgccctcctatgtcccgtacagggacagaacagaatgggctgatacagatccagtgccgcagaatgatggccccaatcccgtggtccagatcatttatagtgacaaatttagagatgtttgattacttccgagctgtcctgcag

SEQ ID NO: 169769 - DNA, 280 bp, Homo sapiens; identical to SEQ ID NO: 83011
  chr11:85989382-85989662
  hypo

SEQ ID NO: 169770 - DNA, 30 bp, Homo sapiens; identical to SEQ ID NO: 48855
  chr11:86014098-86014128
  hypo

SEQ ID NO: 169771 - DNA, 19 bp, Homo sapiens
  chr11:86120513-86120532
  hypo
agatggagtcttgctccgt

SEQ ID NO: 169772 - DNA, 30 bp, Homo sapiens; identical to SEQ ID NO: 25691
  chr11:86208307-86208337
  hypo

SEQ ID NO: 169773 - DNA, 31 bp, Homo sapiens; identical to SEQ ID NO: 25692
  chr11:86218735-86218766
  hypo

SEQ ID NO: 169774 - DNA, 84 bp, Homo sapiens
  chr11:86267640-86267724
  hypo
cggtaggcgtgtacacgattggcatgaacttctccacgtccgaagtcagcactcggtagaagagcttctcgttccggtcttgga

SEQ ID NO: 169775 - DNA, 30 bp, Homo sapiens; identical to SEQ ID NO: 48856
  chr11:86382375-86382405
  hypo

SEQ ID NO: 169776 - DNA, 30 bp, Homo sapiens; identical to SEQ ID NO: 48858
  chr11:86391915-86391945
  hypo

SEQ ID NO: 169777 - DNA, 175 bp, Homo sapiens; identical to SEQ ID NO: 83018
  chr11:86408235-86408410
  hypo

SEQ ID NO: 169778 - DNA, 32 bp, Homo sapiens; identical to SEQ ID NO: 83019
  chr11:86464894-86464926
  hypo

SEQ ID NO: 169779 - DNA, 30 bp, Homo sapiens; identical to SEQ ID NO: 48859
  chr11:86503647-86503677
  hypo

SEQ ID NO: 169780 - DNA, 1142 bp, Homo sapiens; identical to SEQ ID NO: 48860
  chr11:86510899-86512041
  hypo

SEQ ID NO: 169781 - DNA, 30 bp, Homo sapiens; identical to SEQ ID NO: 8297
  chr11:86512316-86512346
  hypo

SEQ ID NO: 169782 - DNA, 30 bp, Homo sapiens; identical to SEQ ID NO: 48862
  chr11:86512761-86512791
  hypo

SEQ ID NO: 169783 - DNA, 284 bp, Homo sapiens; identical to SEQ ID NO: 48863
  chr11:86513413-86513697
  hypo

SEQ ID NO: 169784 - DNA, 30 bp, Homo sapiens; identical to SEQ ID NO: 8299
  chr11:86514121-86514151
  hypo

SEQ ID NO: 169785 - DNA, 30 bp, Homo sapiens; identical to SEQ ID NO: 83026
  chr11:86617353-86617383
  hypo

SEQ ID NO: 169786 - DNA, 650 bp, Homo sapiens; identical to SEQ ID NO: 48865
  chr11:86665885-86666535
  hypo

SEQ ID NO: 169787 - DNA, 30 bp, Homo sapiens
  chr11:86702665-86702695
  hypo
agcttgttgtccaggcggagtgcacgatct

SEQ ID NO: 169788 - DNA, 32 bp, Homo sapiens; identical to SEQ ID NO: 83028
  chr11:87434383-87434415
  hypo

SEQ ID NO: 169789 - DNA, 92 bp, Homo sapiens; identical to SEQ ID NO: 83029
  chr11:87434774-87434866
  hypo

SEQ ID NO: 169790 - DNA, 30 bp, Homo sapiens
  chr11:88050713-88050743
  hypo
cggggaagccaagtacgcagtaccttaagg

SEQ ID NO: 169791 - DNA, 29 bp, Homo sapiens
  chr11:88094140-88094169
  hypo
ccttttgaacaagtacgtattctttacta

SEQ ID NO: 169792 - DNA, 30 bp, Homo sapiens
  chr11:89957567-89957597
  hypo
aatttacaattgcaccggctgtgaatgtaa

SEQ ID NO: 169793 - DNA, 31 bp, Homo sapiens
  chr11:90159451-90159482
  hypo
gcgagactacgtatcaaagaaaaaataatag

SEQ ID NO: 169794 - DNA, 186 bp, Homo sapiens; identical to SEQ ID NO: 25698
  chr11:91435728-91435914
  hypo

SEQ ID NO: 169795 - DNA, 482 bp, Homo sapiens; identical to SEQ ID NO: 83032
  chr11:92648641-92649123
  hypo

SEQ ID NO: 169796 - DNA, 766 bp, Homo sapiens; identical to SEQ ID NO: 121339
  chr11:92930674-92931440
  hypo

SEQ ID NO: 169797 - DNA, 30 bp, Homo sapiens; identical to SEQ ID NO: 83034
  chr11:93062737-93062767
  hypo

SEQ ID NO: 169798 - DNA, 446 bp, Homo sapiens; identical to SEQ ID NO: 121340
  chr11:93063607-93064053
  hypo

SEQ ID NO: 169799 - DNA, 102 bp, Homo sapiens; identical to SEQ ID NO: 83036
  chr11:93065698-93065800
  hypo

SEQ ID NO: 169800 - DNA, 130 bp, Homo sapiens; identical to SEQ ID NO: 83037
  chr11:93212117-93212247
  hypo

SEQ ID NO: 169801 - DNA, 107 bp, Homo sapiens
  chr11:93214578-93214685
  hypo
gccttgagtgatgcccaccttcgcgggaccgtggtgaggatggagtaggaagctgtataactcagggcttggcacagagcgggcggcgaattcgtgctagctgacat

SEQ ID NO: 169802 - DNA, 77 bp, Homo sapiens; identical to SEQ ID NO: 25700
  chr11:93425625-93425702
  hypo

SEQ ID NO: 169803 - DNA, 455 bp, Homo sapiens
  chr11:93476507-93476962
  hypo
tgctctgccacccaggctggagtgcagttgaagcaggatattcctctgaccccttcgtgggtcttgcggctgcggtgcctcacttacttagcccacggctctcaactcctcgcgggagggggggcgcgagtgaatgaggcgggaactggagtgctggaagccacgaactccagtcacccaggcctgctgcgctccaccctttatgggagggtgcgtgggggtgagcagatgctggagccggagcgagcgcttttggtcgccggtaggagcgaactccatgcaggccctgcggctgtgtctaggggatgcccgcgacccctgaagacccacagcctgtcttacaacctgtcatggttgtgaaaagttttgagagaacgtctgcacagtgtctaacggtgtctggtatatagtgtgcactcaaatggtaaccagtttagttgcgatagttggtctac

SEQ ID NO: 169804 - DNA, 30 bp, Homo sapiens
  chr11:93796805-93796835
  hypo
cctgggtgtaccattcgcacatcgacgccc

SEQ ID NO: 169805 - DNA, 30 bp, Homo sapiens; identical to SEQ ID NO: 25702
  chr11:93822725-93822755
  hypo

SEQ ID NO: 169806 - DNA, 348 bp, Homo sapiens
  chr11:93911547-93911895
  hypo
tcctgctgctctttgcgatcctcctgtacctgcccccgctgttctggcgtttcgcagctgctcctcatatttgctcagacttgaagtttatcatggaagaacttgacaaagtttacaaccgtgcaattaaggctgcaaagagtgcgcgtgaccttgacatgagagatggagcctgctcagttccaggtgttaccgagaacttagggcaaaggtaacttagccccagcaggcagctcatcgggttttgtaggacaaattctctgcccttctactgccagtctgggcccagagttctcattgctaggaggcggggcaggagtggaagcagggggacgtcatgcacctagt

SEQ ID NO: 169807 - DNA, 21 bp, Homo sapiens
  chr11:94064776-94064797
  hypo
tacaggcgtgagccaccgcgc

SEQ ID NO: 169808 - DNA, 30 bp, Homo sapiens
  chr11:94145948-94145978
  hypo
tcgtatgattttgtcgaatagtctaactgg

SEQ ID NO: 169809 - DNA, 88 bp, Homo sapiens
  chr11:94163939-94164027
  hypo
tactcttacaaagcttaacttgcagtaaattcctatgtcttttaattaataagaaatttaagtcactttagatcggggccagtaagca

SEQ ID NO: 169810 - DNA, 21 bp, Homo sapiens
  chr11:94165674-94165695
  hypo
tttcaaaccccttatctggga

SEQ ID NO: 169811 - DNA, 20 bp, Homo sapiens
  chr11:94165994-94166014
  hypo
aaacaaaacaaaacaaaaac

SEQ ID NO: 169812 - DNA, 17 bp, Homo sapiens
  chr11:94272328-94272345
  hypo
ttaagtgcagtgacatg

SEQ ID NO: 169813 - DNA, 17 bp, Homo sapiens
  chr11:94272584-94272601
  hypo
cagcagttttatttttc

SEQ ID NO: 169814 - DNA, 43 bp, Homo sapiens; identical to SEQ ID NO: 83046
  chr11:94276062-94276105
  hypo

SEQ ID NO: 169815 - DNA, 30 bp, Homo sapiens; identical to SEQ ID NO: 83047
  chr11:94300663-94300693
  hypo

SEQ ID NO: 169816 - DNA, 80 bp, Homo sapiens
  chr11:94390522-94390602
  hypo
aactccagaaaattccgtaagtggggctcttgagcgtctacactcgggtcgctcccacactgtggcgtgtacttttattc

SEQ ID NO: 169817 - DNA, 272 bp, Homo sapiens
  chr11:94532869-94533141
  hypo
atggagaaacaggtccggtccacgcagcctcagcagaacaacgaggaactgcccacttacgaggaggccaaagcacagtcgcagttcttcagggggcagcagcagcagcaacagcagcagggggcggtgggccatggttactacatggcagggggcaccagtcagaagtcccgaactgaggggaggcccactgtgaaccgtgccaacagtggacaggcgcataaggacgaggcgctgaaggaactgaagcagggccacgtccgctcgctcag

SEQ ID NO: 169818 - DNA, 30 bp, Homo sapiens; identical to SEQ ID NO: 83049
  chr11:94533427-94533457
  hypo

SEQ ID NO: 169819 - DNA, 31 bp, Homo sapiens; identical to SEQ ID NO: 83050
  chr11:94554946-94554977
  hypo

SEQ ID NO: 169820 - DNA, 30 bp, Homo sapiens; identical to SEQ ID NO: 83051
  chr11:94864223-94864253
  hypo

SEQ ID NO: 169821 - DNA, 38 bp, Homo sapiens; identical to SEQ ID NO: 83052
  chr11:94885452-94885490
  hypo

SEQ ID NO: 169822 - DNA, 104 bp, Homo sapiens
  chr11:94895731-94895835
  hypo
caaaaaaaaaaaaaaaaaataggcatcccccaactctgggccacagctggagacctaagtgctgctgcactctggccaggttggacagccgcacttctcttgaa

SEQ ID NO: 169823 - DNA, 94 bp, Homo sapiens
  chr11:94924622-94924716
  hypo
atgtaaaactggctccgcaagaaagactccaggtactgagtgtgtaaactcatgacctgtgtgatgttgtccagacgaccggatgtagagtatt

SEQ ID NO: 169824 - DNA, 31 bp, Homo sapiens
  chr11:94940219-94940250
  hypo
ggcatgaaccaccacgcgcggccaacattac

SEQ ID NO: 169825 - DNA, 35 bp, Homo sapiens; identical to SEQ ID NO: 25706
  chr11:94952097-94952132
  hypo

SEQ ID NO: 169826 - DNA, 30 bp, Homo sapiens
  chr11:94993728-94993758
  hypo
cattattttacgttacgttaaataacaatt

SEQ ID NO: 169827 - DNA, 30 bp, Homo sapiens; identical to SEQ ID NO: 48899
  chr11:95522931-95522961
  hypo

SEQ ID NO: 169828 - DNA, 34 bp, Homo sapiens; identical to SEQ ID NO: 8325
  chr11:95523018-95523052
  hypo

SEQ ID NO: 169829 - DNA, 204 bp, Homo sapiens
  chr11:95526174-95526378
  hypo
atattcaactgttttcgacattgataaactcatacggagctagttataagtacattgagatgctttacaggcaaagatttttaacaagtagattcataaataaccgtctttgggaagcagtgaccatgtaaatctcaaatgtgaacagcatggaagtagggcgataggtttcagttaggttctaggtaacgtttattgagtgat

SEQ ID NO: 169830 - DNA, 30 bp, Homo sapiens
  chr11:95577364-95577394
  hypo
tttgttttaaatggccgtttcatgataagt

SEQ ID NO: 169831 - DNA, 114 bp, Homo sapiens; identical to SEQ ID NO: 83057
  chr11:95631020-95631134
  hypo

SEQ ID NO: 169832 - DNA, 168 bp, Homo sapiens; identical to SEQ ID NO: 83058
  chr11:95658583-95658751
  hypo

SEQ ID NO: 169833 - DNA, 30 bp, Homo sapiens; identical to SEQ ID NO: 8326
  chr11:95831955-95831985
  hypo

SEQ ID NO: 169834 - DNA, 31 bp, Homo sapiens; identical to SEQ ID NO: 25710
  chr11:95999750-95999781
  hypo

SEQ ID NO: 169835 - DNA, 31 bp, Homo sapiens; identical to SEQ ID NO: 25711
  chr11:96109568-96109599
  hypo

SEQ ID NO: 169836 - DNA, 145 bp, Homo sapiens; identical to SEQ ID NO: 83062
  chr11:96117186-96117331
  hypo

SEQ ID NO: 169837 - DNA, 1331 bp, Homo sapiens; identical to SEQ ID NO: 8327
  chr11:96122354-96123685
  hypo

SEQ ID NO: 169838 - DNA, 52 bp, Homo sapiens; identical to SEQ ID NO: 83064
  chr11:97332187-97332239
  hypo

SEQ ID NO: 169839 - DNA, 181 bp, Homo sapiens; identical to SEQ ID NO: 25713
  chr11:97588955-97589136
  hypo

SEQ ID NO: 169840 - DNA, 30 bp, Homo sapiens
  chr11:97616941-97616971
  hypo
gaactctacctggcccgcaaacgcggcaga

SEQ ID NO: 169841 - DNA, 38 bp, Homo sapiens
  chr11:97936946-97936984
  hypo
tcaatgaaacagcctcggcttggcgtaatcggcacgaa

SEQ ID NO: 169842 - DNA, 31 bp, Homo sapiens; identical to SEQ ID NO: 25714
  chr11:98233109-98233140
  hypo

SEQ ID NO: 169843 - DNA, 21 bp, Homo sapiens
  chr11:100681708-100681729
  hypo
cagagtctcactgtgttaccc

SEQ ID NO: 169844 - DNA, 21 bp, Homo sapiens
  chr11:100681968-100681989
  hypo
gagctaccatgcctggccaga

SEQ ID NO: 169845 - DNA, 604 bp, Homo sapiens; identical to SEQ ID NO: 121375
  chr11:100997686-100998290
  hypo

SEQ ID NO: 169846 - DNA, 389 bp, Homo sapiens; identical to SEQ ID NO: 8330
  chr11:100998355-100998744
  hypo

SEQ ID NO: 169847 - DNA, 31 bp, Homo sapiens; identical to SEQ ID NO: 83070
  chr11:101951409-101951440
  hypo

SEQ ID NO: 169848 - DNA, 31 bp, Homo sapiens; identical to SEQ ID NO: 83071
  chr11:101952328-101952359
  hypo

SEQ ID NO: 169849 - DNA, 31 bp, Homo sapiens; identical to SEQ ID NO: 25717
  chr11:101977377-101977408
  hypo

SEQ ID NO: 169850 - DNA, 44 bp, Homo sapiens; identical to SEQ ID NO: 25718
  chr11:102245880-102245924
  hypo

SEQ ID NO: 169851 - DNA, 78 bp, Homo sapiens
  chr11:102246146-102246224
  hypo
accttattgcatgaccgtgtagcaaaatatttaaagtctggacttctacattgaaacagatttgtgtttaaattctag

SEQ ID NO: 169852 - DNA, 30 bp, Homo sapiens
  chr11:102259409-102259439
  hypo
agtttgacccttgaacgatacgggttcgaa

SEQ ID NO: 169853 - DNA, 31 bp, Homo sapiens; identical to SEQ ID NO: 83074
  chr11:102325404-102325435
  hypo

SEQ ID NO: 169854 - DNA, 31 bp, Homo sapiens; identical to SEQ ID NO: 83075
  chr11:102367129-102367160
  hypo

SEQ ID NO: 169855 - DNA, 26 bp, Homo sapiens
  chr11:102981560-102981586
  hypo
tttttagacgcagttcgcagtttcgc

SEQ ID NO: 169856 - DNA, 50 bp, Homo sapiens
  chr11:103870882-103870932
  hypo
cctggggtagctgttcgggaatctaggactctgcacgtagccgtttcctt

SEQ ID NO: 169857 - DNA, 706 bp, Homo sapiens; identical to SEQ ID NO: 25720
  chr11:103907384-103908090
  hypo

SEQ ID NO: 169858 - DNA, 1123 bp, Homo sapiens; identical to SEQ ID NO: 121392
  chr11:104034043-104035166
  hypo

SEQ ID NO: 169859 - DNA, 30 bp, Homo sapiens
  chr11:105590044-105590074
  hypo
aagttgtcccacgagcggctggctatgttt

SEQ ID NO: 169860 - DNA, 202 bp, Homo sapiens; identical to SEQ ID NO: 25722
  chr11:105850437-105850639
  hypo

SEQ ID NO: 169861 - DNA, 30 bp, Homo sapiens
  chr11:105880590-105880620
  hypo
tctcgatttgtaggcgttccttttctacct

SEQ ID NO: 169862 - DNA, 1039 bp, Homo sapiens; identical to SEQ ID NO: 48928
  chr11:106888277-106889316
  hypo

SEQ ID NO: 169863 - DNA, 30 bp, Homo sapiens
  chr11:107142238-107142268
  hypo
agggtctaattaaaacgccagactatttat

SEQ ID NO: 169864 - DNA, 30 bp, Homo sapiens
  chr11:107296033-107296063
  hypo
cgacgtttcactcaacgacagaccacatga

SEQ ID NO: 169865 - DNA, 30 bp, Homo sapiens
  chr11:107326456-107326486
  hypo
gcttaagttctttacgcctttcttcttttt

SEQ ID NO: 169866 - DNA, 43 bp, Homo sapiens
  chr11:107696427-107696470
  hypo
gatacttatgctgctggtccacggaccagactttgagtgagca

SEQ ID NO: 169867 - DNA, 1155 bp, Homo sapiens; identical to SEQ ID NO: 121407
  chr11:107798897-107800052
  hypo

SEQ ID NO: 169868 - DNA, 88 bp, Homo sapiens; identical to SEQ ID NO: 25726
  chr11:107931200-107931288
  hypo

SEQ ID NO: 169869 - DNA, 35 bp, Homo sapiens; identical to SEQ ID NO: 83082
  chr11:108031056-108031091
  hypo

SEQ ID NO: 169870 - DNA, 200 bp, Homo sapiens
  chr11:108031525-108031725
  hypo
tgtggcaagaactgctgaattcgctaatcactaaagcggaaaaaaaaggtgtggttttgaaattaaaactttcaaacttgccttaattttcttctttttcattggtattgatgaatttgtaagatttttactagaaggacgagagtttcgctcacgttcatctaattcctcaattttccgcttttttgtggtgctccttg

SEQ ID NO: 169871 - DNA, 30 bp, Homo sapiens
  chr11:108157852-108157882
  hypo
tctgggaagaagttacgcagggaacaaaga

SEQ ID NO: 169872 - DNA, 17 bp, Homo sapiens
  chr11:108189612-108189629
  hypo
aaattattggccgagcg

SEQ ID NO: 169873 - DNA, 30 bp, Homo sapiens; identical to SEQ ID NO: 48939
  chr11:108345500-108345530
  hypo

SEQ ID NO: 169874 - DNA, 30 bp, Homo sapiens; identical to SEQ ID NO: 48940
  chr11:108357121-108357151
  hypo

SEQ ID NO: 169875 - DNA, 30 bp, Homo sapiens
  chr11:108367627-108367657
  hypo
ttttcccgaacaccacggtctcctacgcct

SEQ ID NO: 169876 - DNA, 645 bp, Homo sapiens; identical to SEQ ID NO: 121417
  chr11:108368604-108369249
  hypo

SEQ ID NO: 169877 - DNA, 178 bp, Homo sapiens; identical to SEQ ID NO: 83088
  chr11:108603171-108603349
  hypo

SEQ ID NO: 169878 - DNA, 35 bp, Homo sapiens; identical to SEQ ID NO: 83089
  chr11:108674026-108674061
  hypo

SEQ ID NO: 169879 - DNA, 30 bp, Homo sapiens; identical to SEQ ID NO: 25729
  chr11:108680108-108680138
  hypo

SEQ ID NO: 169880 - DNA, 40 bp, Homo sapiens; identical to SEQ ID NO: 25730
  chr11:109963224-109963264
  hypo

SEQ ID NO: 169881 - DNA, 32 bp, Homo sapiens; identical to SEQ ID NO: 25731
  chr11:109963348-109963380
  hypo

SEQ ID NO: 169882 - DNA, 30 bp, Homo sapiens; identical to SEQ ID NO: 83093
  chr11:110108722-110108752
  hypo

SEQ ID NO: 169883 - DNA, 201 bp, Homo sapiens; identical to SEQ ID NO: 25732
  chr11:110144180-110144381
  hypo

SEQ ID NO: 169884 - DNA, 1254 bp, Homo sapiens; identical to SEQ ID NO: 121428
  chr11:110581774-110583028
  hypo

SEQ ID NO: 169885 - DNA, 1035 bp, Homo sapiens; identical to SEQ ID NO: 48951
  chr11:110583043-110584078
  hypo

SEQ ID NO: 169886 - DNA, 355 bp, Homo sapiens
  chr11:111154358-111154713
  hypo
ccttatccagacatagcgatctcagataacaggccaggagcacctcttgttaacagttctatgtatatggagaggtagctccgatgttgtgaaaaagatgcttccttggttaaaatatgaatgccaagagattatttcatttatgtcttcctagcacagcgccggtcaccgggaaggtactcagtaaatgtgaatgaatgaacagacacggtactgtctaaaatgaactcacccctaaaggcgacaatgttttcaaacgttagttatttgggctaatgcaggaatatttcacgcttttcaagacatttctctatttccatgttagcgttggagtcaggcacgcgttagtaacatc

SEQ ID NO: 169887 - DNA, 30 bp, Homo sapiens; identical to SEQ ID NO: 48953
  chr11:111171693-111171723
  hypo

SEQ ID NO: 169888 - DNA, 30 bp, Homo sapiens
  chr11:111338996-111339026
  hypo
ttatggatgggtaaacgaactcaggttgtg

SEQ ID NO: 169889 - DNA, 488 bp, Homo sapiens; identical to SEQ ID NO: 121435
  chr11:111411093-111411581
  hypo

SEQ ID NO: 169890 - DNA, 865 bp, Homo sapiens; identical to SEQ ID NO: 121436
  chr11:111411821-111412686
  hypo

SEQ ID NO: 169891 - DNA, 30 bp, Homo sapiens
  chr11:111437167-111437197
  hypo
ccaggtgcgagttttcgctgatcaatgtgc

SEQ ID NO: 169892 - DNA, 30 bp, Homo sapiens
  chr11:111474437-111474467
  hypo
acctagtggttttgacgtactctactctgc

SEQ ID NO: 169893 - DNA, 31 bp, Homo sapiens; identical to SEQ ID NO: 25737
  chr11:111484752-111484783
  hypo

SEQ ID NO: 169894 - DNA, 221 bp, Homo sapiens; identical to SEQ ID NO: 83102
  chr11:111500768-111500989
  hypo

SEQ ID NO: 169895 - DNA, 141 bp, Homo sapiens
  chr11:111558642-111558783
  hypo
ttgaggaaaaaaatttcctgactactaatagtggagttattttattttggtgactaattcttaatcctctcttcatttacagactatcttgctaatcatggccggttaaatgagtctgaagccaggcgaaaattctggcaa

SEQ ID NO: 169896 - DNA, 30 bp, Homo sapiens
  chr11:111573525-111573555
  hypo
gagagctctttgcctcgcttacgtagcctt

SEQ ID NO: 169897 - DNA, 30 bp, Homo sapiens
  chr11:111574230-111574260
  hypo
cacatgtatctccagcgcctaggcgtactg

SEQ ID NO: 169898 - DNA, 223 bp, Homo sapiens
  chr11:111574698-111574921
  hypo
tacttataggatatacgtatttctaatacctttacgatagtaaaaaagcaaacagtgctcttcaggaagaaacataacaagaaagaatatcaaatgccgccttgtttgctgtgaaagaccaaggctccgggctgtgctgcctttcccccgccacgtagccataagtgaaaccaaactgattctcctgctttgctcactttgcgcccagtgatgtttttctgta

SEQ ID NO: 169899 - DNA, 30 bp, Homo sapiens
  chr11:111579826-111579856
  hypo
cacagttcgggaggccggaaatcaggatga

SEQ ID NO: 169900 - DNA, 30 bp, Homo sapiens
  chr11:111589720-111589750
  hypo
cggggagctgtgctgcgctcacccctgtgg

SEQ ID NO: 169901 - DNA, 30 bp, Homo sapiens; identical to SEQ ID NO: 83104
  chr11:111595084-111595114
  hypo

SEQ ID NO: 169902 - DNA, 31 bp, Homo sapiens; identical to SEQ ID NO: 8367
  chr11:111945412-111945443
  hypo

SEQ ID NO: 169903 - DNA, 44 bp, Homo sapiens; identical to SEQ ID NO: 83106
  chr11:112066435-112066479
  hypo

SEQ ID NO: 169904 - DNA, 70 bp, Homo sapiens
  chr11:112108639-112108709
  hypo
atgaccagagccgaacgatcatttgtattacctcaattgaggtaggaactaccagcgagttataaaaata

SEQ ID NO: 169905 - DNA, 59 bp, Homo sapiens
  chr11:112128640-112128699
  hypo
cctgctgtgtaaccacgggtgtgggatctggcaatttacatctccgtcggcgaagattt

SEQ ID NO: 169906 - DNA, 20 bp, Homo sapiens
  chr11:112152181-112152201
  hypo
gcaataaccagatgccttca

SEQ ID NO: 169907 - DNA, 269 bp, Homo sapiens
  chr11:112370522-112370791
  hypo
tgtgggaagcggaggcggccaccgcgtgcaggaagggtctcccaggtggccggagaacccacaggcgtgtacggacaaggtgccctgggtgccctggctgacccctggtcagcccggccaggggtagagaccttcccggaaggcgaagatcgcataggtaactgggaaagtgtgttttttgaggtgggggaaccccatgcagccaggtcagggctgcagggtaggccgcctgccccacaatcagagcactgcctcgttacccgctcagg

SEQ ID NO: 169908 - DNA, 210 bp, Homo sapiens
  chr11:113552727-113552937
  hypo
cagctcccgtacgggcggcaggcccttctcttcctcctcctgagtgggctcaaccactcgaagccagcacctataacatgctgagcccgcaccgggctctaggaaccagaaatcagagtgaccaggggaaactgggacatcgatatgcatggcttgccggagtaacactacacctgactcaccttcctagcctcccgcaaattgccagag

SEQ ID NO: 169909 - DNA, 30 bp, Homo sapiens; identical to SEQ ID NO: 83110
  chr11:113560577-113560607
  hypo

SEQ ID NO: 169910 - DNA, 236 bp, Homo sapiens; identical to SEQ ID NO: 83111
  chr11:113560951-113561187
  hypo

SEQ ID NO: 169911 - DNA, 117 bp, Homo sapiens
  chr11:113688514-113688631
  hypo
tccgggagcgggaaccgagctgggcctgagccatatttcacatacctaagcgacaaagacagtggtactctactgcccaaggctgttttgtattttaagagtcgctgacaaaagatc

SEQ ID NO: 169912 - DNA, 31 bp, Homo sapiens; identical to SEQ ID NO: 25740
  chr11:113712909-113712940
  hypo

SEQ ID NO: 169913 - DNA, 30 bp, Homo sapiens
  chr11:113743305-113743335
  hypo
gagacaaaaggaaacgaaaggtcaataaat

SEQ ID NO: 169914 - DNA, 35 bp, Homo sapiens; identical to SEQ ID NO: 25741
  chr11:113747596-113747631
  hypo

SEQ ID NO: 169915 - DNA, 30 bp, Homo sapiens; identical to SEQ ID NO: 83114
  chr11:113752457-113752487
  hypo

SEQ ID NO: 169916 - DNA, 29 bp, Homo sapiens
  chr11:113790259-113790288
  hypo
caaggtttaggcagggcgctgtggctcac

SEQ ID NO: 169917 - DNA, 174 bp, Homo sapiens
  chr11:113902119-113902293
  hypo
aagtcaggggagctccgcagcatccctaatgcggtgctaaattctcagcagcacagtctccgtgttaaagccttcgctggcaattaggttcattaactatcacaataccttatttattactcatcgtgccatatggtttcccagctaaagaatggcgcccgttctcctacagac

SEQ ID NO: 169918 - DNA, 200 bp, Homo sapiens; identical to SEQ ID NO: 25742
  chr11:113921421-113921621
  hypo

SEQ ID NO: 169919 - DNA, 30 bp, Homo sapiens; identical to SEQ ID NO: 121456
  chr11:113953339-113953369
  hypo

SEQ ID NO: 169920 - DNA, 30 bp, Homo sapiens; identical to SEQ ID NO: 121457
  chr11:113953631-113953661
  hypo

SEQ ID NO: 169921 - DNA, 30 bp, Homo sapiens
  chr11:114013226-114013256
  hypo
ggtgttcaacatatgcgctgttgacataaa

SEQ ID NO: 169922 - DNA, 64 bp, Homo sapiens
  chr11:114013828-114013892
  hypo
aggctcctgtgcacacggtgaatgtgtgctggctgatgagggtgaggagcggtgggtacccggc

SEQ ID NO: 169923 - DNA, 376 bp, Homo sapiens
  chr11:114069849-114070225
  hypo
ctgggacctgggaccgggatgccagacacggatgctgggccccgggacggggatgccggacatggatgccgggccccgggacggggatgacggacatggatgccgctgggcccagggacggggatgccggacatggatgccgctgggcccagggacggggatgccggacatggatgccgctgggccccgggatggggatgccggacatggatgccgctgggccccgggacggggctgctggacatggatgccgctgggccccgggacggggatgctggacatggatgctgggccccgggatggggatgccagccatggatgccgctgggcagtgggcaggacacagaccttgcccttccccggcctcccaccctag

SEQ ID NO: 169924 - DNA, 93 bp, Homo sapiens; identical to SEQ ID NO: 83118
  chr11:114082515-114082608
  hypo

SEQ ID NO: 169925 - DNA, 286 bp, Homo sapiens
  chr11:114103480-114103766
  hypo
agggcacatttgttccgggcctgcgcactggccaggccccattgttctgcctcccacccccatgtgggcccattgtcctcgcccccagcgggtgctgcttactgctgatttatacgggcaggcgtcctgcgggctccaggcttctctgccacagctggcggaggtgcttaaggccttggaccccgtgacctttgccctagtcctgctgtcattttgaaagttacagaccagagggctgcatacctctccggatttactttccaccccaactcatccccggccccac

SEQ ID NO: 169926 - DNA, 667 bp, Homo sapiens
  chr11:114112595-114113262
  hypo
cttttacataccacccgacacagttgcccactacccttgctgctgcgatgtatttgatcaatgtctatcctttagctttagcttccagagctcgggaacgacgtcgattttgcccatcactggggccacatactgggtgctcagtgttgcatagcctgggcccactctggatttgcccctgagcatggggatttggaggtgtgagtcccgacactggctctcactccagatgggtaaagaatgcaccttgtattcccacctttctgaggcaccccctctcctgtctcccacaggcactgacatggccgtcttctgtctgctgtgtgggaagcgcttccaggcgcagagcgcactgcagcagcacatggaggtccacgcgggcgtgcgcagctacatctgcagtgagtgcaaccgcaccttccccagccacacggctctcaaacgccacctgcgctcacatacaggtaggtcagtccagctgatgggtggatctgggtctctgggagccagcgtctatatttacctccaaggacgtaaagtggaggtggtgggctgagtcagccttcagtccttctgctcaaggcttggacgtgcagaggctgcccgtcgtgcaggtaaatgtggacagttctcccagtcccctcctgtggaccgtcggttcaaagtc

SEQ ID NO: 169927 - DNA, 172 bp, Homo sapiens
  chr11:114115565-114115737
  hypo
ccccttcccccccaccgccgccttcacccccacccggctgggtggctgccgatgtacgttttaattaccggctccagctgaagtctcacgtggccttggctttatttatttatttataccttaatgaggatactgaatctttgattaaagtcgtaatcgttgccgattcagt

SEQ ID NO: 169928 - DNA, 66 bp, Homo sapiens; identical to SEQ ID NO: 25746
  chr11:114127909-114127975
  hypo

SEQ ID NO: 169929 - DNA, 181 bp, Homo sapiens
  chr11:114284755-114284936
  hypo
ccctgtgcaacttatcgcttttcagtgctgtgtaccggccattccagctgcctttgtttcgctggactctcagctgtgtcttctgaactcagtgagtttgccaggctctgcctgccctgtcccccaaccccacacaatgcagcctaaacgttccctcaaggtagcacgcaaggtaatcatg

SEQ ID NO: 169930 - DNA, 30 bp, Homo sapiens; identical to SEQ ID NO: 83123
  chr11:114314868-114314898
  hypo

SEQ ID NO: 169931 - DNA, 80 bp, Homo sapiens
  chr11:114483427-114483507
  hypo
tataatgtgttgcctcgtgggtaaccactgttacccagtatttaataagtgttgcctcgtgggtaaccactgttacctgg

SEQ ID NO: 169932 - DNA, 19 bp, Homo sapiens
  chr11:114483626-114483645
  hypo
tacccggtggataataatt

SEQ ID NO: 169933 - DNA, 30 bp, Homo sapiens
  chr11:114831687-114831717
  hypo
cacacactgtgtgatcggggacagtatgtg

SEQ ID NO: 169934 - DNA, 30 bp, Homo sapiens; identical to SEQ ID NO: 83124
  chr11:115060642-115060672
  hypo

SEQ ID NO: 169935 - DNA, 3238 bp, Homo sapiens; identical to SEQ ID NO: 121463
  chr11:115372959-115376197
  hypo

SEQ ID NO: 169936 - DNA, 31 bp, Homo sapiens; identical to SEQ ID NO: 121466
  chr11:115630442-115630473
  hypo

SEQ ID NO: 169937 - DNA, 878 bp, Homo sapiens; identical to SEQ ID NO: 121467
  chr11:115630530-115631408
  hypo

SEQ ID NO: 169938 - DNA, 30 bp, Homo sapiens; identical to SEQ ID NO: 8383
  chr11:115791602-115791632
  hypo

SEQ ID NO: 169939 - DNA, 88 bp, Homo sapiens; identical to SEQ ID NO: 83128
  chr11:115939371-115939459
  hypo

SEQ ID NO: 169940 - DNA, 125 bp, Homo sapiens; identical to SEQ ID NO: 83129
  chr11:116132011-116132136
  hypo

SEQ ID NO: 169941 - DNA, 32 bp, Homo sapiens; identical to SEQ ID NO: 83130
  chr11:116256382-116256414
  hypo

SEQ ID NO: 169942 - DNA, 30 bp, Homo sapiens
  chr11:116346300-116346330
  hypo
gtaatctacacaccacggcagggggcgggg

SEQ ID NO: 169943 - DNA, 38 bp, Homo sapiens; identical to SEQ ID NO: 83131
  chr11:116365359-116365397
  hypo

SEQ ID NO: 169944 - DNA, 616 bp, Homo sapiens; identical to SEQ ID NO: 121472
  chr11:116450734-116451350
  hypo

SEQ ID NO: 169945 - DNA, 171 bp, Homo sapiens; identical to SEQ ID NO: 25750
  chr11:116591712-116591883
  hypo

SEQ ID NO: 169946 - DNA, 30 bp, Homo sapiens; identical to SEQ ID NO: 83133
  chr11:116612892-116612922
  hypo

SEQ ID NO: 169947 - DNA, 34 bp, Homo sapiens; identical to SEQ ID NO: 83134
  chr11:116613906-116613940
  hypo

SEQ ID NO: 169948 - DNA, 30 bp, Homo sapiens
  chr11:116620386-116620416
  hypo
atgcataatgagctgcgtaggccatggtaa

SEQ ID NO: 169949 - DNA, 30 bp, Homo sapiens
  chr11:116655105-116655135
  hypo
atgcccacagttctcgcagttggtagccat

SEQ ID NO: 169950 - DNA, 22 bp, Homo sapiens
  chr11:116666252-116666274
  hypo
gacggagcgggactccatttca

SEQ ID NO: 169951 - DNA, 37 bp, Homo sapiens; identical to SEQ ID NO: 83136
  chr11:116672909-116672946
  hypo

SEQ ID NO: 169952 - DNA, 339 bp, Homo sapiens; identical to SEQ ID NO: 83137
  chr11:116691760-116692099
  hypo

SEQ ID NO: 169953 - DNA, 30 bp, Homo sapiens; identical to SEQ ID NO: 83138
  chr11:116692344-116692374
  hypo

SEQ ID NO: 169954 - DNA, 30 bp, Homo sapiens; identical to SEQ ID NO: 25751
  chr11:116693400-116693430
  hypo

SEQ ID NO: 169955 - DNA, 30 bp, Homo sapiens; identical to SEQ ID NO: 121477
  chr11:116706305-116706335
  hypo

SEQ ID NO: 169956 - DNA, 614 bp, Homo sapiens; identical to SEQ ID NO: 121478
  chr11:116706356-116706970
  hypo

SEQ ID NO: 169957 - DNA, 156 bp, Homo sapiens
  chr11:116821479-116821635
  hypo
ttttgacagaaggaagccctgcgttcttggctgcagtagcctggacgggaatttccaccttgctgaccagactttgtttcttaccgaatttgcacagatgttcttgaataatgttccttcattttctgcttactcttaggacgatttccagagact

SEQ ID NO: 169958 - DNA, 20 bp, Homo sapiens
  chr11:116862121-116862141
  hypo
cactgcgctccagtatgggc

SEQ ID NO: 169959 - DNA, 27 bp, Homo sapiens
  chr11:116890017-116890044
  hypo
agccaccgcacacggtctttattgtaa

SEQ ID NO: 169960 - DNA, 22 bp, Homo sapiens
  chr11:116934572-116934594
  hypo
cgcctggcctgaagtttcttaa

SEQ ID NO: 169961 - DNA, 34 bp, Homo sapiens; identical to SEQ ID NO: 25754
  chr11:116959821-116959855
  hypo

SEQ ID NO: 169962 - DNA, 36 bp, Homo sapiens
  chr11:116960725-116960761
  hypo
caacagttccgtactcgcttccgcaattctattctg

SEQ ID NO: 169963 - DNA, 23 bp, Homo sapiens
  chr11:117020434-117020457
  hypo
accgtgcccggccaaaagttttc

SEQ ID NO: 169964 - DNA, 21 bp, Homo sapiens
  chr11:117043703-117043724
  hypo
ccaccgcggacccagccgcct

SEQ ID NO: 169965 - DNA, 37 bp, Homo sapiens; identical to SEQ ID NO: 25755
  chr11:117047302-117047339
  hypo

SEQ ID NO: 169966 - DNA, 256 bp, Homo sapiens
  chr11:117054571-117054827
  hypo
gcctttctaccccttcgcagaaggtacattttgtgccctgggcctggctagggatggggaggtcttggtcactttctgggagcaagaagagcctgcgtggctgattggtggacctgataggacatgggtttttggctccagtctctcaaaggcctgatcccactgactctagccaagctccaggcaactagtttaccactttgacattttacttccagatgaaccggtcgatcaagggcaccgccagaaaaccctg

SEQ ID NO: 169967 - DNA, 105 bp, Homo sapiens
  chr11:117056078-117056183
  hypo
catggattatttattcagcaaatatttatggagcacctcctatatgccaggtggtatgctaaggcagcagtccttggtgggggcggggtcctgtctagaggaaca

SEQ ID NO: 169968 - DNA, 493 bp, Homo sapiens
  chr11:117058316-117058809
  hypo
tgcctcaccactgatcgttccccacagagaatgtttctggatctaccgatggtctggttgacagcgctggcactggggacctctcttacggttaccagggtgagtgggccaggctgggaggggcggtgtggtgcaggacggtgttgtctgggtaaaatgtcacggtgggcggttgcctcttctgccagatgctggaacctgggaagggcctgctgtcttcctaacccctctcttccctcatcccctcctccttggccccagttccctggtaactttccctttcctttgaagggcacgaccagttcaagcggcgcctcccctctggccagatgcggcagctgtgcattgccatgggtagacctggggtgggggtagggctgttttgccaatcagtgcctgccggctccggttgactgccggctgtggggccagaaagattctatgtgcatggcttccccatgtaattccagtaattgcccgctcttgtgtcttc

SEQ ID NO: 169969 - DNA, 239 bp, Homo sapiens
  chr11:117062555-117062794
  hypo
gccatttctgcagctcccttccgtgtccctcatcctagacacatcgttcatgtacatgatcgccggactctgcatgctgaagctctaccagaagcggcacccggacatcaacgccagcgcctacagtgcctacgcctgcctggccattgtcatcttcttctctgtgctgggcgtggtgagggcctgacctgctctgctcagcctgtatgataggaaaggtgcacgtgcgttcagacacg

SEQ ID NO: 169970 - DNA, 120 bp, Homo sapiens
  chr11:117068431-117068551
  hypo
tctgcccacctggccccgcccaccagactgaggctcacttcacctctgacctgagcggcccccagctcaccaagccacaggcccaagcagtgctccctgatgcggcgtttataatccgct

SEQ ID NO: 169971 - DNA, 336 bp, Homo sapiens; identical to SEQ ID NO: 25757
  chr11:117073747-117074083
  hypo

SEQ ID NO: 169972 - DNA, 71 bp, Homo sapiens; identical to SEQ ID NO: 25758
  chr11:117074287-117074358
  hypo

SEQ ID NO: 169973 - DNA, 140 bp, Homo sapiens
  chr11:117075032-117075172
  hypo
cggcatgacaggctacggacgacctcggcagatcatcagttagagcggagagggctagccctgagcccggccctcccccagctccttggctgcagccatcccgcttagcctgcctcacccacacccgtgtggtaccttca

SEQ ID NO: 169974 - DNA, 235 bp, Homo sapiens; identical to SEQ ID NO: 83152
  chr11:117076077-117076312
  hypo

SEQ ID NO: 169975 - DNA, 30 bp, Homo sapiens; identical to SEQ ID NO: 83153
  chr11:117097587-117097617
  hypo

SEQ ID NO: 169976 - DNA, 116 bp, Homo sapiens; identical to SEQ ID NO: 25761
  chr11:117097880-117097996
  hypo

SEQ ID NO: 169977 - DNA, 21 bp, Homo sapiens
  chr11:117129695-117129716
  hypo
tgagtttcactctgtcgtcca

SEQ ID NO: 169978 - DNA, 21 bp, Homo sapiens
  chr11:117129955-117129976
  hypo
agctaccgtgcccggctttat

SEQ ID NO: 169979 - DNA, 680 bp, Homo sapiens; identical to SEQ ID NO: 121485
  chr11:117186457-117187137
  hypo

SEQ ID NO: 169980 - DNA, 121 bp, Homo sapiens; identical to SEQ ID NO: 25765
  chr11:117188181-117188302
  hypo

SEQ ID NO: 169981 - DNA, 77 bp, Homo sapiens
  chr11:117188541-117188618
  hypo
gctgggattacaggcgtgagccaccgcgcccggccgatcattatctctactcttatcctacacggttcagaccggtc

SEQ ID NO: 169982 - DNA, 151 bp, Homo sapiens; identical to SEQ ID NO: 25767
  chr11:117267875-117268026
  hypo

SEQ ID NO: 169983 - DNA, 30 bp, Homo sapiens; identical to SEQ ID NO: 83161
  chr11:117283752-117283782
  hypo

SEQ ID NO: 169984 - DNA, 232 bp, Homo sapiens; identical to SEQ ID NO: 25768
  chr11:117335663-117335895
  hypo

SEQ ID NO: 169985 - DNA, 267 bp, Homo sapiens
  chr11:117347129-117347396
  hypo
agaagaggcctcctgcgtcacaacgacagctcacgacatctcaacaccagtccctctgacagccacactccagctcccacagaacaccatgccatgccaggccagctcaccccatggtggccggcacagcccctacaccagcttgcgctatgaggctggtgtaggggagggccatcctcaaagaacccatccttgctctgtgcttggtgaacaggggcgaaatgtggtgtctgcatttttaaatctgcacagcgccatctgatagat

SEQ ID NO: 169986 - DNA, 251 bp, Homo sapiens; identical to SEQ ID NO: 121487
  chr11:117352703-117352954
  hypo

SEQ ID NO: 169987 - DNA, 255 bp, Homo sapiens
  chr11:117376183-117376438
  hypo
ggcgctcccggctcacggtggcggctgcgttgctggcgatgcatgtatagttgccgttgtgcttgagggagacgctagagatctgcagggagctcatgaattccttgctctcgatggtcacgcccgagcctgagatgatcacctgtccgtccttcctccaggtgatacggatgggcatgtcccccgaggacaccacacagggaatgtagagcagctggccgatggaggcgggtgggaattcgaagggctggatca

SEQ ID NO: 169988 - DNA, 199 bp, Homo sapiens; identical to SEQ ID NO: 25769
  chr11:117380435-117380634
  hypo

SEQ ID NO: 169989 - DNA, 382 bp, Homo sapiens; identical to SEQ ID NO: 25770
  chr11:117389165-117389547
  hypo

SEQ ID NO: 169990 - DNA, 181 bp, Homo sapiens
  chr11:117391898-117392079
  hypo
agcactggtaggccccggaatggctcttctgggccgaggtgatgagcagcgtctcgttgctgagcccgcggatggagatggcctcgtcaggcagcaccagctccgtgttgcgataccagcggatggtgaactctggggagcccgtcagggcacaggagaggatgaccgtgctgccaatgcc

SEQ ID NO: 169991 - DNA, 115 bp, Homo sapiens
  chr11:117403089-117403204
  hypo
cctgtcacagagaggcgtgccccattgctctgccgggtctccccgctatacttgtgcttggtgatgcagcgataggtggagagggcgtcctccttctgtacgtcagagatgtaca

SEQ ID NO: 169992 - DNA, 30 bp, Homo sapiens
  chr11:117440880-117440910
  hypo
ggcggggtcggctggcgcgtctcagatgct

SEQ ID NO: 169993 - DNA, 30 bp, Homo sapiens; identical to SEQ ID NO: 25771
  chr11:117459974-117460004
  hypo

SEQ ID NO: 169994 - DNA, 207 bp, Homo sapiens
  chr11:117488133-117488340
  hypo
ttgcatgatatttcacgctgactcggtctctcaaactgttattccatctacacacggcactgtgggatgcctgcgatattttataaagttaataactttctcttaattggatgagtttatagaatagtctgcgcaattaacaataattacgccaaagacactttgattccaaggatgctccacaaacattggcgcattaagccattt

SEQ ID NO: 169995 - DNA, 356 bp, Homo sapiens
  chr11:117497922-117498278
  hypo
tcagaacggagatggcgggagttttcccttccgcccccggtctgctaagacactgttagaggttacaagtaaccccgcctcttcttctccctcctagacgttattctccttcaaaagctccttcctcaccaccatctgaggtgggttttcattcgccctgccctgtttcccatgggtcttgggcacaggggctggtgctgatttccagggctttgactgaaggcctctatgtcgtccccagcctgagtacaatgccgggagaggtgcccagtcgcactgctcgcagccccacatcaccacactcgtgccttcccctgagccgctgcacccaccattccctacggcccagtgcctgg

SEQ ID NO: 169996 - DNA, 17 bp, Homo sapiens
  chr11:117542536-117542553
  hypo
aaaccttggggccggcg

SEQ ID NO: 169997 - DNA, 30 bp, Homo sapiens
  chr11:117543310-117543340
  hypo
catgggcatccagggcgagcctatgagtgg

SEQ ID NO: 169998 - DNA, 30 bp, Homo sapiens
  chr11:117607810-117607840
  hypo
tatttaagaaggcaacgctgtccagctgaa

SEQ ID NO: 169999 - DNA, 30 bp, Homo sapiens
  chr11:117608202-117608232
  hypo
aatgctgtccaagaccgggacagcaggaca

SEQ ID NO: 170000 - DNA, 1384 bp, Homo sapiens; identical to SEQ ID NO: 121488
  chr11:117666745-117668129
  hypo

SEQ ID NO: 170001 - DNA, 30 bp, Homo sapiens
  chr11:117709486-117709516
  hypo
ctgctctgcccatcacgggccgctatgagg

SEQ ID NO: 170002 - DNA, 30 bp, Homo sapiens; identical to SEQ ID NO: 83169
  chr11:117772843-117772873
  hypo

SEQ ID NO: 170003 - DNA, 30 bp, Homo sapiens; identical to SEQ ID NO: 8387
  chr11:117789330-117789360
  hypo

SEQ ID NO: 170004 - DNA, 277 bp, Homo sapiens; identical to SEQ ID NO: 121492
  chr11:117856649-117856926
  hypo

SEQ ID NO: 170005 - DNA, 31 bp, Homo sapiens; identical to SEQ ID NO: 25773
  chr11:117860108-117860139
  hypo

SEQ ID NO: 170006 - DNA, 31 bp, Homo sapiens; identical to SEQ ID NO: 83173
  chr11:117941634-117941665
  hypo

SEQ ID NO: 170007 - DNA, 101 bp, Homo sapiens
  chr11:117949566-117949667
  hypo
cccacaacagccccacgcacatgcaccgggttcgcagagattacacagctaatacatgtgagtaggttctggaaaccatgaagccccgcacagatgtaagg

SEQ ID NO: 170008 - DNA, 126 bp, Homo sapiens; identical to SEQ ID NO: 25774
  chr11:117957554-117957680
  hypo

SEQ ID NO: 170009 - DNA, 30 bp, Homo sapiens
  chr11:117964255-117964285
  hypo
tctgtggctgtgtgcgtgctgagtgcacac

SEQ ID NO: 170010 - DNA, 30 bp, Homo sapiens
  chr11:117971203-117971233
  hypo
gctgcgacagaaccccggtcccctgattga

SEQ ID NO: 170011 - DNA, 24 bp, Homo sapiens
  chr11:117973128-117973152
  hypo
gttgcacagtaaggccgagtgcgg

SEQ ID NO: 170012 - DNA, 33 bp, Homo sapiens; identical to SEQ ID NO: 25775
  chr11:117977481-117977514
  hypo

SEQ ID NO: 170013 - DNA, 40 bp, Homo sapiens; identical to SEQ ID NO: 25776
  chr11:117994508-117994548
  hypo

SEQ ID NO: 170014 - DNA, 30 bp, Homo sapiens
  chr11:118031531-118031561
  hypo
tcccctttagaacaacgaggggccttgaca

SEQ ID NO: 170015 - DNA, 30 bp, Homo sapiens
  chr11:118031919-118031949
  hypo
aaaccaggcccagttcgtgactaccaagac

SEQ ID NO: 170016 - DNA, 88 bp, Homo sapiens; identical to SEQ ID NO: 83178
  chr11:118088741-118088829
  hypo

SEQ ID NO: 170017 - DNA, 201 bp, Homo sapiens
  chr11:118133140-118133341
  hypo
tgcataacctaccagtgtgcacgacgctgagccggatctcccctatcaccccatcaacatcaggtgggttcttcacctggcaggtgtatgtcccattgtcgtcgaactgcagtttccagagaaggatggaggcatcgtaccgctcaggattcccatcccaagacacccggtccttaaaccgcccactcatgggttggaagg

SEQ ID NO: 170018 - DNA, 31 bp, Homo sapiens; identical to SEQ ID NO: 83180
  chr11:118193731-118193762
  hypo

SEQ ID NO: 170019 - DNA, 21 bp, Homo sapiens
  chr11:118214329-118214350
  hypo
aggtgccgtgtctcacgcctg

SEQ ID NO: 170020 - DNA, 163 bp, Homo sapiens; identical to SEQ ID NO: 121501
  chr11:118662850-118663013
  hypo

SEQ ID NO: 170021 - DNA, 30 bp, Homo sapiens; identical to SEQ ID NO: 83182
  chr11:118747225-118747255
  hypo

SEQ ID NO: 170022 - DNA, 30 bp, Homo sapiens
  chr11:118768565-118768595
  hypo
gcccacctggccagccgcctgcagggaggg

SEQ ID NO: 170023 - DNA, 30 bp, Homo sapiens
  chr11:118769142-118769172
  hypo
atgccgcctggtgccgggaggtagcccatc

SEQ ID NO: 170024 - DNA, 45 bp, Homo sapiens; identical to SEQ ID NO: 83183
  chr11:118772065-118772110
  hypo

SEQ ID NO: 170025 - DNA, 512 bp, Homo sapiens
  chr11:118773642-118774154
  hypo
gacaggtaaggggacgttccacccagtcctgctgctcacagaggcgccacgctcacctggtcaagcttggcccggggcacgttctgctggtggtaggcgaggatggagtcggcccggccctgcagcactgcctctgcagccctgcacagagtgggggcaccgacagctcagagaggtgagcaggagggagccccaccctcacccaccccaccctgcccctgcacggggctccctcggaaccccaggctgagaggtgctgggcagagagagagagagacttggcctgcccaccaggcacttacgtgttggccaggtgggtggtgaagacatatacgaactgcgagggaggctttccggggacgcccccgcccccgcccccgcccccaggggcatcaggccgaaggccaggaggagggccgtgcggggcgcctggcacgctgctctcgctgaggggcagttgggtggtttggccgggacccagctgtggggccgccatggctgggtctgctaca

SEQ ID NO: 170026 - DNA, 30 bp, Homo sapiens; identical to SEQ ID NO: 83186
  chr11:118779002-118779032
  hypo

SEQ ID NO: 170027 - DNA, 30 bp, Homo sapiens
  chr11:118780667-118780697
  hypo
gctacggcccctgtgcgtgcccagggccca

SEQ ID NO: 170028 - DNA, 86 bp, Homo sapiens
  chr11:118780942-118781028
  hypo
aagcctccgccccgacgggcggcagagacagaattcactaaaaggctaggtagcaaaggtgccgtgtggggcggctgtgaggtctc

SEQ ID NO: 170029 - DNA, 31 bp, Homo sapiens; identical to SEQ ID NO: 83187
  chr11:118983356-118983387
  hypo

SEQ ID NO: 170030 - DNA, 41 bp, Homo sapiens; identical to SEQ ID NO: 25777
  chr11:119019635-119019676
  hypo

SEQ ID NO: 170031 - DNA, 31 bp, Homo sapiens; identical to SEQ ID NO: 83189
  chr11:119029537-119029568
  hypo

SEQ ID NO: 170032 - DNA, 31 bp, Homo sapiens; identical to SEQ ID NO: 25778
  chr11:119032604-119032635
  hypo

SEQ ID NO: 170033 - DNA, 196 bp, Homo sapiens; identical to SEQ ID NO: 49008
  chr11:119039917-119040113
  hypo

SEQ ID NO: 170034 - DNA, 32 bp, Homo sapiens
  chr11:119040420-119040452
  hypo
ccgagtggtggctcgcgcctgcagtccccgca

SEQ ID NO: 170035 - DNA, 262 bp, Homo sapiens; identical to SEQ ID NO: 25779
  chr11:119044182-119044444
  hypo

SEQ ID NO: 170036 - DNA, 55 bp, Homo sapiens
  chr11:119052935-119052990
  hypo
cagctggaccgcaaccggcagctgcaggagctgaacgtggcgtacaacggtgctg

SEQ ID NO: 170037 - DNA, 31 bp, Homo sapiens; identical to SEQ ID NO: 83194
  chr11:119058471-119058502
  hypo

SEQ ID NO: 170038 - DNA, 31 bp, Homo sapiens; identical to SEQ ID NO: 83195
  chr11:119058917-119058948
  hypo

SEQ ID NO: 170039 - DNA, 21 bp, Homo sapiens
  chr11:119062227-119062248
  hypo
ttcattggccgggtgcggtgg

SEQ ID NO: 170040 - DNA, 30 bp, Homo sapiens; identical to SEQ ID NO: 8392
  chr11:119077264-119077294
  hypo

SEQ ID NO: 170041 - DNA, 237 bp, Homo sapiens; identical to SEQ ID NO: 8393
  chr11:119103175-119103412
  hypo

SEQ ID NO: 170042 - DNA, 84 bp, Homo sapiens; identical to SEQ ID NO: 8394
  chr11:119142430-119142514
  hypo

SEQ ID NO: 170043 - DNA, 107 bp, Homo sapiens; identical to SEQ ID NO: 8395
  chr11:119144574-119144681
  hypo

SEQ ID NO: 170044 - DNA, 131 bp, Homo sapiens; identical to SEQ ID NO: 8396
  chr11:119145546-119145677
  hypo

SEQ ID NO: 170045 - DNA, 143 bp, Homo sapiens; identical to SEQ ID NO: 8397
  chr11:119146701-119146844
  hypo

SEQ ID NO: 170046 - DNA, 103 bp, Homo sapiens; identical to SEQ ID NO: 8398
  chr11:119148461-119148564
  hypo

SEQ ID NO: 170047 - DNA, 563 bp, Homo sapiens; identical to SEQ ID NO: 8399
  chr11:119148860-119149423
  hypo

SEQ ID NO: 170048 - DNA, 493 bp, Homo sapiens; identical to SEQ ID NO: 8400
  chr11:119155747-119156240
  hypo

SEQ ID NO: 170049 - DNA, 127 bp, Homo sapiens; identical to SEQ ID NO: 8401
  chr11:119167630-119167757
  hypo

SEQ ID NO: 170050 - DNA, 87 bp, Homo sapiens; identical to SEQ ID NO: 8402
  chr11:119168097-119168184
  hypo

SEQ ID NO: 170051 - DNA, 176 bp, Homo sapiens; identical to SEQ ID NO: 8403
  chr11:119169060-119169236
  hypo

SEQ ID NO: 170052 - DNA, 101 bp, Homo sapiens; identical to SEQ ID NO: 8404
  chr11:119170360-119170461
  hypo

SEQ ID NO: 170053 - DNA, 31 bp, Homo sapiens; identical to SEQ ID NO: 8405
  chr11:119187862-119187893
  hypo

SEQ ID NO: 170054 - DNA, 31 bp, Homo sapiens; identical to SEQ ID NO: 83210
  chr11:119216683-119216714
  hypo

SEQ ID NO: 170055 - DNA, 309 bp, Homo sapiens; identical to SEQ ID NO: 83211
  chr11:119243047-119243356
  hypo

SEQ ID NO: 170056 - DNA, 191 bp, Homo sapiens; identical to SEQ ID NO: 83212
  chr11:119244099-119244290
  hypo

SEQ ID NO: 170057 - DNA, 31 bp, Homo sapiens; identical to SEQ ID NO: 83213
  chr11:119286647-119286678
  hypo

SEQ ID NO: 170058 - DNA, 31 bp, Homo sapiens; identical to SEQ ID NO: 83214
  chr11:119287463-119287494
  hypo

SEQ ID NO: 170059 - DNA, 299 bp, Homo sapiens; identical to SEQ ID NO: 25795
  chr11:119290803-119291102
  hypo

SEQ ID NO: 170060 - DNA, 31 bp, Homo sapiens
  chr11:119322225-119322256
  hypo
attacaggtgacaccgcgcccggcctagtca

SEQ ID NO: 170061 - DNA, 56 bp, Homo sapiens; identical to SEQ ID NO: 83216
  chr11:119352935-119352991
  hypo

SEQ ID NO: 170062 - DNA, 30 bp, Homo sapiens
  chr11:119361454-119361484
  hypo
ctggaagcgtcttcccgcaaccccaacacc

SEQ ID NO: 170063 - DNA, 30 bp, Homo sapiens
  chr11:119361737-119361767
  hypo
cagggtctagctccacgatcacagaccaga

SEQ ID NO: 170064 - DNA, 91 bp, Homo sapiens; identical to SEQ ID NO: 83217
  chr11:119405811-119405902
  hypo

SEQ ID NO: 170065 - DNA, 86 bp, Homo sapiens; identical to SEQ ID NO: 83218
  chr11:119493219-119493305
  hypo

SEQ ID NO: 170066 - DNA, 68 bp, Homo sapiens; identical to SEQ ID NO: 83219
  chr11:119493692-119493760
  hypo

SEQ ID NO: 170067 - DNA, 226 bp, Homo sapiens
  chr11:119505166-119505392
  hypo
gcagatctcagcacgcggcagaccgtggcagtgtggacccggacagctgcggagcgtggctggctgcagccccagctgccaccccgctggatccacccagcatttgtgctgagaccgcaattcccctagaccgctctcagccaacaactagacaggctgggaatccagcgcaggccctttcctgtgggacgcaggagtcctctaatagcagcgatggcccaaggat

SEQ ID NO: 170068 - DNA, 278 bp, Homo sapiens; identical to SEQ ID NO: 83221
  chr11:119506101-119506379
  hypo

SEQ ID NO: 170069 - DNA, 69 bp, Homo sapiens; identical to SEQ ID NO: 83222
  chr11:119506661-119506730
  hypo

SEQ ID NO: 170070 - DNA, 156 bp, Homo sapiens; identical to SEQ ID NO: 83223
  chr11:119506966-119507122
  hypo

SEQ ID NO: 170071 - DNA, 303 bp, Homo sapiens
  chr11:119523962-119524265
  hypo
ccttacacaggatcccggcaagtaaaaatgatcacggttgagacctatcctctcgcttcctatgtcaggtggctcccggggcatttctgtggattaaactgtagaaggcactggaagcctttgctccggggtgaatgtggcctcacattcctgcagctggcctcagtgtcccctgcaggagggtggcccggcgcggggatcccaacccagccctgccctgagggacacatccccgttcctccagacccgcgcccctccaacaggctggtgggtcgtggtgcgagacgacgtcaatcagagaga

SEQ ID NO: 170072 - DNA, 30 bp, Homo sapiens; identical to SEQ ID NO: 83225
  chr11:119529816-119529846
  hypo

SEQ ID NO: 170073 - DNA, 150 bp, Homo sapiens
  chr11:119531881-119532031
  hypo
caaggtagcgcatcacgctgggaggggagggtggcagcttctcctggattcttttcatttatacaaaaaaggaaaaccaattttttcgaccaagaatcccattcctcacagcaggggtcagaagagcagcagcaccgagtgggacagggg

SEQ ID NO: 170074 - DNA, 169 bp, Homo sapiens; identical to SEQ ID NO: 83227
  chr11:119532427-119532596
  hypo

SEQ ID NO: 170075 - DNA, 785 bp, Homo sapiens
  chr11:119535380-119536165
  hypo
aggtggggggtgggcagggggcgtgcggggaggggctggggaggagcggtcacagacagaggctctggaaggggggctacacgtaccactccttcttggaaatgaaagacccgtcgttctgagaaaccatgttctcagccaagtccagctgctcagggtcgtactggtagcccagagtccggtccccgtagccgtcctgacgggcctcggcctcatccacggtgaagtagggccgcttggcgtcctcgtcatatttggggtgggggccgcccaccttgcgctcgccccctccaccgccctcctcctcctcctcctcctcctcatagctgcttccacccagtgggccggccttcttctcgtcgtctgagtcgtcggggtactgcaggttctgtgccattggtgggtggtgctgggggatgcctgccttgctgtagccgttgccatacacgtgcttcttggtgctgtagtcacccttgaaggtgtgccggcgccgacgcagggcgaccacgatcccgccgaccacaatcaacaccagcaggatgctccccgccacgcccccaatgatggccgtgggcaccggcccggcgcgccgcccatgttcgggaggagacggggtgtaggggaattctgggtgaggaaaagagatggaggggacagcatcagcgtgtgctcctggggtgtagagggggtgggagggaggcagggaaaggagaggccaggaaggacaggctgtctgcaccccaggtttgagcagctccagttcgaggccccgcagcactccaccc

SEQ ID NO: 170076 - DNA, 187 bp, Homo sapiens
  chr11:119536816-119537003
  hypo
ggcacaagcacagggcaaggacggcagaaatgggggtgaaagcatgtgcgtgtgtgcgtgcgtggcaatgtcgagtacacacaagtgggcacatgcacaggcatacacgcttgccgtcatagcaagcctgccacccagagagcacatgctgggagggcctgcatgcctgtgccgacatgatgaacat

SEQ ID NO: 170077 - DNA, 30 bp, Homo sapiens; identical to SEQ ID NO: 83230
  chr11:119538338-119538368
  hypo

SEQ ID NO: 170078 - DNA, 160 bp, Homo sapiens; identical to SEQ ID NO: 83231
  chr11:119540984-119541144
  hypo

SEQ ID NO: 170079 - DNA, 100 bp, Homo sapiens; identical to SEQ ID NO: 25803
  chr11:119541629-119541729
  hypo

SEQ ID NO: 170080 - DNA, 31 bp, Homo sapiens; identical to SEQ ID NO: 25804
  chr11:119547317-119547348
  hypo

SEQ ID NO: 170081 - DNA, 638 bp, Homo sapiens; identical to SEQ ID NO: 83234
  chr11:119548208-119548846
  hypo

SEQ ID NO: 170082 - DNA, 384 bp, Homo sapiens; identical to SEQ ID NO: 25806
  chr11:119549110-119549494
  hypo

SEQ ID NO: 170083 - DNA, 162 bp, Homo sapiens
  chr11:119549861-119550023
  hypo
atttttggttgcttttcgagcagagccccagcctaggagccatgcactggctgctttgtcttcctgggccttggtttcctcctctgttatatggggtggagaatccagtcctctctacctcacgaggttactgggggaaacaaatggcgtgatggacgagaa

SEQ ID NO: 170084 - DNA, 30 bp, Homo sapiens
  chr11:119550375-119550405
  hypo
tcagccacgatttgccgagtgacatattcc

SEQ ID NO: 170085 - DNA, 30 bp, Homo sapiens
  chr11:119560432-119560462
  hypo
tcgaccccatcccctcgagaaggtcttggt

SEQ ID NO: 170086 - DNA, 30 bp, Homo sapiens; identical to SEQ ID NO: 83237
  chr11:119560674-119560704
  hypo

SEQ ID NO: 170087 - DNA, 30 bp, Homo sapiens
  chr11:119561263-119561293
  hypo
aagggtctccagcagcgctgccggaggtag

SEQ ID NO: 170088 - DNA, 30 bp, Homo sapiens
  chr11:119566994-119567024
  hypo
ccgcacagtgctcagcgactcaggctgcct

SEQ ID NO: 170089 - DNA, 315 bp, Homo sapiens
  chr11:119574540-119574855
  hypo
tagagtaatgagatgcgcggctcagcctgttcagcctgtcacctccactgcatccaggatgccgggctcggaactggcacacaggtgctcaggaatggcgctcacagggagagagtggcctttatcatgcccatcctttcacactcggagtacgtgttagtgtgcctttttgccacctcttctccaagacaatggttcctcctggcaaatctccccagctttacccaggaacacggttctccgggcaagaagctgcctcaaaaggctcacccaaggtcacacagctgggtgcacccctcacgccccaccatcatt

SEQ ID NO: 170090 - DNA, 30 bp, Homo sapiens
  chr11:119575464-119575494
  hypo
ccgggaggctctctccgggcaggtgagcag

SEQ ID NO: 170091 - DNA, 74 bp, Homo sapiens; identical to SEQ ID NO: 83239
  chr11:119576249-119576323
  hypo

SEQ ID NO: 170092 - DNA, 501 bp, Homo sapiens; identical to SEQ ID NO: 83240
  chr11:119579304-119579805
  hypo

SEQ ID NO: 170093 - DNA, 30 bp, Homo sapiens; identical to SEQ ID NO: 83241
  chr11:119587349-119587379
  hypo

SEQ ID NO: 170094 - DNA, 313 bp, Homo sapiens; identical to SEQ ID NO: 49034
  chr11:119587837-119588150
  hypo

SEQ ID NO: 170095 - DNA, 159 bp, Homo sapiens; identical to SEQ ID NO: 25811
  chr11:119588397-119588556
  hypo

SEQ ID NO: 170096 - DNA, 136 bp, Homo sapiens
  chr11:119589824-119589960
  hypo
ggcctccaaaagcttcggattttggattagggatgttcaacctgcgccaagactctctgaagattcagcactaataactccccaaatgcatcaggcatggacaactacaacaccaggttatcgctgcaccactgaa

SEQ ID NO: 170097 - DNA, 148 bp, Homo sapiens
  chr11:119590580-119590728
  hypo
agcttgcggggggagcgggtcatgaaagcttcacaatagaagtggctcttgacttcagtattcagatttcatatttatgggaaataagcgggaatgggggaacagcatgtgcaaaggcacggaggcaggaaagcgctgggcatggaaa

SEQ ID NO: 170098 - DNA, 270 bp, Homo sapiens; identical to SEQ ID NO: 121549
  chr11:119598242-119598512
  hypo

SEQ ID NO: 170099 - DNA, 30 bp, Homo sapiens; identical to SEQ ID NO: 83246
  chr11:119598756-119598786
  hypo

SEQ ID NO: 170100 - DNA, 314 bp, Homo sapiens; identical to SEQ ID NO: 8414
  chr11:119599011-119599325
  hypo

SEQ ID NO: 170101 - DNA, 58 bp, Homo sapiens; identical to SEQ ID NO: 8415
  chr11:119600031-119600089
  hypo

SEQ ID NO: 170102 - DNA, 41 bp, Homo sapiens; identical to SEQ ID NO: 83249
  chr11:119602211-119602252
  hypo

SEQ ID NO: 170103 - DNA, 103 bp, Homo sapiens; identical to SEQ ID NO: 25816
  chr11:119606538-119606641
  hypo

SEQ ID NO: 170104 - DNA, 30 bp, Homo sapiens; identical to SEQ ID NO: 25817
  chr11:119607029-119607059
  hypo

SEQ ID NO: 170105 - DNA, 30 bp, Homo sapiens
  chr11:119609589-119609619
  hypo
gctcactctcaaagacgtgcaggttgccat

SEQ ID NO: 170106 - DNA, 31 bp, Homo sapiens; identical to SEQ ID NO: 25818
  chr11:119617498-119617529
  hypo

SEQ ID NO: 170107 - DNA, 33 bp, Homo sapiens
  chr11:119681394-119681427
  hypo
gtccccggagaacaacggcgctgtcctattcct

SEQ ID NO: 170108 - DNA, 31 bp, Homo sapiens; identical to SEQ ID NO: 83254
  chr11:119683416-119683447
  hypo

SEQ ID NO: 170109 - DNA, 30 bp, Homo sapiens
  chr11:119686935-119686965
  hypo
aaccgatctttactgcgatcgttccagaac

SEQ ID NO: 170110 - DNA, 131 bp, Homo sapiens; identical to SEQ ID NO: 83255
  chr11:119757772-119757903
  hypo

SEQ ID NO: 170111 - DNA, 327 bp, Homo sapiens
  chr11:119970225-119970552
  hypo
tttccagccctgcttcgttatcaggcacgaggcaacaaggatggcctggtgggcacacggttggagcagggtcccgtcctatccctgttcacaacgtgtcatttagaaagtcaccaatacacacagcctctctgtttcttcatctgtggaatgggacgtagtaagtaatgctgcttaactacccacagttgaagtgacgacgaaggccggctgagatgaattctggcccccatctgaatgctcaccgtgtgctttcgacacagcttccactttcacgccgcgtaacacggtgagggagaaaccgccgccttcataccattgatatgg

SEQ ID NO: 170112 - DNA, 121 bp, Homo sapiens
  chr11:119993680-119993801
  hypo
ggagtatctcttcatggtgtccggtgcactccactcacccccgaagctgttcgtgtagttgttcacatagcgatggtcaccacctaggaagcagagggtcgggtcagcagaggagccaggt

SEQ ID NO: 170113 - DNA, 332 bp, Homo sapiens
  chr11:119994861-119995193
  hypo
cctcgccacacacctcgtacaggacgcagggccacacctgtacagaggccgtggccagcattgtgacctagaaatgggacagtgagcggccaggagcctgaacagtttctgcaaggctcaccccaccccagtctaggccatcccccaggcctggccggacctcaccggaggggctgccctgccgagtttgtaccccagggacgatgattatcacactcctcaaccccacttctgcagccaccgccagccgcagcttctcagatgagagggcatgggagactgaacagcagagtgttcaaccccgccgtaccccctaccgagcagtgcgccct

SEQ ID NO: 170114 - DNA, 30 bp, Homo sapiens; identical to SEQ ID NO: 83258
  chr11:120007198-120007228
  hypo

SEQ ID NO: 170115 - DNA, 715 bp, Homo sapiens
  chr11:120008003-120008718
  hypo
ggtagcagatgcaggtctggtcggtctggcagaagagctccatcgtcttgccatgcacgggacacttgcgggcctcaaagtcccggatgggctcgagcagctggtggtctcggaaggcggcgccctccaggtggggcttgagatgcagctcgcagaaggaggcctggcacaccaggcaggacttgaccgccttctgcttgttgccgatgcaggagtcgcacagcacctcctcggagccggacttggaccgtgaaaaaaggcccgtgtcggcccgggggtagctgttccgccgggtctccccgggctccatgatggacaccgtgggcttccgggactccgagaaaatggacttgcgcagctcgcccttttcggcaaaggtaacgggtggcttcttggcagcccccagctggagccctgcgtacggcgacctcttgccttccatagagtccatgctgaagtagttggagttcttgtcgtccccggactcgacaaactggatgatgggtcgccgccactcattgcccgcgaacagggcgctcctaccttcccctggcttcagggcgctgcccaggctcttgccctcagctgcctccccgccgtgcccgttggtggtcttggcatccttgccgtcagccttggtgccattctccaggctgccactggggcccgacgggctccgggcatccctggcttctgggctcgacccgttgctcct

SEQ ID NO: 170116 - DNA, 78 bp, Homo sapiens; identical to SEQ ID NO: 83260
  chr11:120041662-120041740
  hypo

SEQ ID NO: 170117 - DNA, 154 bp, Homo sapiens; identical to SEQ ID NO: 83261
  chr11:120043748-120043902
  hypo

SEQ ID NO: 170118 - DNA, 30 bp, Homo sapiens; identical to SEQ ID NO: 83262
  chr11:120099853-120099883
  hypo

SEQ ID NO: 170119 - DNA, 513 bp, Homo sapiens; identical to SEQ ID NO: 121562
  chr11:120110623-120111136
  hypo

SEQ ID NO: 170120 - DNA, 31 bp, Homo sapiens; identical to SEQ ID NO: 83264
  chr11:120178423-120178454
  hypo

SEQ ID NO: 170121 - DNA, 630 bp, Homo sapiens; identical to SEQ ID NO: 121564
  chr11:120195890-120196520
  hypo

SEQ ID NO: 170122 - DNA, 143 bp, Homo sapiens; identical to SEQ ID NO: 121565
  chr11:120206446-120206589
  hypo

SEQ ID NO: 170123 - DNA, 520 bp, Homo sapiens; identical to SEQ ID NO: 121566
  chr11:120207765-120208285
  hypo

SEQ ID NO: 170124 - DNA, 41 bp, Homo sapiens; identical to SEQ ID NO: 83268
  chr11:120221758-120221799
  hypo

SEQ ID NO: 170125 - DNA, 31 bp, Homo sapiens; identical to SEQ ID NO: 25825
  chr11:120298674-120298705
  hypo

SEQ ID NO: 170126 - DNA, 181 bp, Homo sapiens; identical to SEQ ID NO: 83270
  chr11:120338502-120338683
  hypo

SEQ ID NO: 170127 - DNA, 226 bp, Homo sapiens; identical to SEQ ID NO: 25826
  chr11:120367535-120367761
  hypo

SEQ ID NO: 170128 - DNA, 558 bp, Homo sapiens; identical to SEQ ID NO: 121567
  chr11:120382096-120382654
  hypo

SEQ ID NO: 170129 - DNA, 62 bp, Homo sapiens
  chr11:120384059-120384121
  hypo
tctgagagacaaatccggtcctgcctgactccctgactgtctgtgctcgcgtggtcaggggc

SEQ ID NO: 170130 - DNA, 73 bp, Homo sapiens; identical to SEQ ID NO: 83272
  chr11:120446083-120446156
  hypo

SEQ ID NO: 170131 - DNA, 113 bp, Homo sapiens; identical to SEQ ID NO: 83273
  chr11:120772900-120773013
  hypo

SEQ ID NO: 170132 - DNA, 33 bp, Homo sapiens
  chr11:120908933-120908966
  hypo
aagttcttggattacaggcgtgaaccactgctc

SEQ ID NO: 170133 - DNA, 30 bp, Homo sapiens; identical to SEQ ID NO: 25827
  chr11:120911589-120911619
  hypo

SEQ ID NO: 170134 - DNA, 36 bp, Homo sapiens; identical to SEQ ID NO: 25828
  chr11:120950503-120950539
  hypo

SEQ ID NO: 170135 - DNA, 30 bp, Homo sapiens; identical to SEQ ID NO: 25829
  chr11:120973182-120973212
  hypo

SEQ ID NO: 170136 - DNA, 617 bp, Homo sapiens
  chr11:120998440-120999057
  hypo
tcttcctttccccgcgtcagtgtccacagtgcagtgcccgagcttcagccactactccgtgtgcacaagcagctgccccgacacatgctccgacctgacggcctcgcggaactgcgccacgccgtgcacagagggctgcgagtgcaaccagggcttcgtcctcagcaccagccagtgcgtccctctgcacaagtgcggctgcgacttcgacggccactactacaccatgggggagttcttctgggccacggccaactgcactgtgcaatgcctgtgcgaggagggcggggacgtctactgcttcaacaagacctgcggcagcggggaggtgtgcgccgtggaggacggctaccagggctgcttccccaagcgggagaccgtgtgcctgctcagccagaaccaggtgctgcacacctttgacggcgcctcctacgccttcccctccgagttctcctacaccctcctgaagacctgccctgagcgcccagagtacttggaaatcgacatcaacaagaagaagcccgatgcaggacctgcttggctgcggggacttcggatcctggtggccgaccaggaggtcaagataggaggcatcggggcttcggaagtcaaggtaa

SEQ ID NO: 170137 - DNA, 379 bp, Homo sapiens
  chr11:121000555-121000934
  hypo
gttctgtctccccaacggcaagtgcacggacaacctggcagtgttcctggaaagctggacaactttcgaggagatctgcaatggagagtgtggggacctgctgaaggcctgcaacaatgactcggagctgctcaagttttatcgaagccgctccaggtgcggcatcatcaacgacccctccaacagctccttcctggagtgccatggggtggtgaacgtcactgcctattaccgcacctgccttttccgcctgtgccagagtgggggcaatgagtcagagctctgtgactctgtggcccggtatgcaagcgcctgcaagaatgcggacgtggaggtggggccctggcggacctatgacttctgccgtaagttggggttg

SEQ ID NO: 170138 - DNA, 382 bp, Homo sapiens
  chr11:121023445-121023827
  hypo
agtaatgaagaaaggcggcagacctcctggctcctgcctctccccgtgcctttcatctccctgagtaggtgagcaatggccatgagaaaaccctcctcggtgccttgtgatcgtgcgagtcttgacttgtctctcttgttccagctgtcacctgccctccaaacagccattacgagagctgcgtgagtgtctgccagccccgctgcgccgccatccgcctgaagagtgactgcagccactactgcgtggagggctgtcactgcgacgctggctacgtcctcaacggcaagagctgcatcctgccccacagctgcggctgctactccgatggcaaatattacgaggtatgggaggccagcccggccttttcctccttgccaat

SEQ ID NO: 170139 - DNA, 30 bp, Homo sapiens
  chr11:121076814-121076844
  hypo
tttgcggggtcaaagcgaatgtttaatttt

SEQ ID NO: 170140 - DNA, 30 bp, Homo sapiens; identical to SEQ ID NO: 83280
  chr11:121233742-121233772
  hypo

SEQ ID NO: 170141 - DNA, 30 bp, Homo sapiens
  chr11:121315176-121315206
  hypo
ggtctctggcagagccggatataaacccag

SEQ ID NO: 170142 - DNA, 317 bp, Homo sapiens; identical to SEQ ID NO: 121572
  chr11:121323529-121323846
  hypo

SEQ ID NO: 170143 - DNA, 217 bp, Homo sapiens
  chr11:121348736-121348953
  hypo
gtctcaaaaaaaaaaaaaaaaaaaagaaagatctttctgccagtttctcaccaactctttctttttcatctccttttctctgtattccaggtgtacgtgtcttacgactatggaaaatcattcaagaaaatttcagacaagttaaactttggcttgggaaataggagtgaagctgttatcgcccagttctaccacagccctgcggacaacaagcggg

SEQ ID NO: 170144 - DNA, 361 bp, Homo sapiens
  chr11:121349213-121349574
  hypo
caactcttgtaataccttgcccgacttgcagatggcaaaaatgtttcccaggtacactgagaataaccttgcaatcaaattcatgttttctaggatactatcagtgtgtctgcttgcgtgcttatgcgtgcttgtatgcgtgtgtgtgcatgtacgtgcttgtgtgcgtgtgagtacctgtgtgcgtgtgggtacctgtgtgtgtgtgcttgtgtgcatgtgggtaactgtgtgtgtgcttgtgtgcgtgtgagtacttgtgtggatgtgcatgcttgtgtgcgcgtgagtacctttgtgtgtgtgcttgtgtgcgtgtagttacttgtgtgcgtatgggtacctgcgtgtgtgtgcttat

SEQ ID NO: 170145 - DNA, 30 bp, Homo sapiens
  chr11:121421325-121421355
  hypo
gaggagatgttgaagcgcgactggaaggag

SEQ ID NO: 170146 - DNA, 104 bp, Homo sapiens; identical to SEQ ID NO: 83282
  chr11:121516993-121517097
  hypo

SEQ ID NO: 170147 - DNA, 241 bp, Homo sapiens; identical to SEQ ID NO: 25833
  chr11:121665533-121665774
  hypo

SEQ ID NO: 170148 - DNA, 30 bp, Homo sapiens
  chr11:121895528-121895558
  hypo
tgaagtgcaggtgcgcgtgcagccagtgga

SEQ ID NO: 170149 - DNA, 30 bp, Homo sapiens
  chr11:121896684-121896714
  hypo
tcagcaacacgctcccgccccccacagttc

SEQ ID NO: 170150 - DNA, 30 bp, Homo sapiens; identical to SEQ ID NO: 83284
  chr11:122156442-122156472
  hypo

SEQ ID NO: 170151 - DNA, 30 bp, Homo sapiens
  chr11:122548163-122548193
  hypo
ccctggaacattgtacgtacctgatgccgt

SEQ ID NO: 170152 - DNA, 148 bp, Homo sapiens; identical to SEQ ID NO: 83285
  chr11:122621689-122621837
  hypo

SEQ ID NO: 170153 - DNA, 261 bp, Homo sapiens; identical to SEQ ID NO: 83286
  chr11:122628719-122628980
  hypo

SEQ ID NO: 170154 - DNA, 105 bp, Homo sapiens; identical to SEQ ID NO: 25835
  chr11:122632801-122632906
  hypo

SEQ ID NO: 170155 - DNA, 30 bp, Homo sapiens; identical to SEQ ID NO: 25836
  chr11:122643974-122644004
  hypo

SEQ ID NO: 170156 - DNA, 31 bp, Homo sapiens; identical to SEQ ID NO: 25837
  chr11:122933146-122933177
  hypo

SEQ ID NO: 170157 - DNA, 121 bp, Homo sapiens; identical to SEQ ID NO: 83290
  chr11:122945969-122946090
  hypo

SEQ ID NO: 170158 - DNA, 20 bp, Homo sapiens
  chr11:122946389-122946409
  hypo
caaccaagtggttatgtttt

SEQ ID NO: 170159 - DNA, 40 bp, Homo sapiens; identical to SEQ ID NO: 83292
  chr11:123027336-123027376
  hypo

SEQ ID NO: 170160 - DNA, 31 bp, Homo sapiens; identical to SEQ ID NO: 8436
  chr11:123084067-123084098
  hypo

SEQ ID NO: 170161 - DNA, 30 bp, Homo sapiens
  chr11:123084438-123084468
  hypo
atcgggagcccacgccgagtctgtttgcgc

SEQ ID NO: 170162 - DNA, 618 bp, Homo sapiens; identical to SEQ ID NO: 121597
  chr11:123228788-123229406
  hypo

SEQ ID NO: 170163 - DNA, 31 bp, Homo sapiens; identical to SEQ ID NO: 49071
  chr11:123229461-123229492
  hypo

SEQ ID NO: 170164 - DNA, 205 bp, Homo sapiens; identical to SEQ ID NO: 8440
  chr11:123300823-123301028
  hypo

SEQ ID NO: 170165 - DNA, 1044 bp, Homo sapiens; identical to SEQ ID NO: 49073
  chr11:123301082-123302126
  hypo

SEQ ID NO: 170166 - DNA, 31 bp, Homo sapiens; identical to SEQ ID NO: 8442
  chr11:123326582-123326613
  hypo

SEQ ID NO: 170167 - DNA, 30 bp, Homo sapiens
  chr11:123596388-123596418
  hypo
cgatataggaaccacgacctcttaagtctc

SEQ ID NO: 170168 - DNA, 30 bp, Homo sapiens; identical to SEQ ID NO: 83299
  chr11:123596900-123596930
  hypo

SEQ ID NO: 170169 - DNA, 45 bp, Homo sapiens
  chr11:123614726-123614771
  hypo
gcctgacaagtttggcgaagaaaagagattttgtcaatggataaa

SEQ ID NO: 170170 - DNA, 181 bp, Homo sapiens; identical to SEQ ID NO: 25843
  chr11:124071494-124071675
  hypo

SEQ ID NO: 170171 - DNA, 30 bp, Homo sapiens; identical to SEQ ID NO: 83301
  chr11:124387060-124387090
  hypo

SEQ ID NO: 170172 - DNA, 100 bp, Homo sapiens; identical to SEQ ID NO: 83302
  chr11:124387387-124387487
  hypo

SEQ ID NO: 170173 - DNA, 30 bp, Homo sapiens
  chr11:124453690-124453720
  hypo
actgttaattttatgcgtcgctttgactgt

SEQ ID NO: 170174 - DNA, 30 bp, Homo sapiens; identical to SEQ ID NO: 83303
  chr11:124481295-124481325
  hypo

SEQ ID NO: 170175 - DNA, 30 bp, Homo sapiens; identical to SEQ ID NO: 83304
  chr11:124526756-124526786
  hypo

SEQ ID NO: 170176 - DNA, 22 bp, Homo sapiens
  chr11:124562499-124562521
  hypo
cgaagtccaccctcaaaggccc

SEQ ID NO: 170177 - DNA, 185 bp, Homo sapiens; identical to SEQ ID NO: 25845
  chr11:124638959-124639144
  hypo

SEQ ID NO: 170178 - DNA, 122 bp, Homo sapiens; identical to SEQ ID NO: 121621
  chr11:124709069-124709191
  hypo

SEQ ID NO: 170179 - DNA, 833 bp, Homo sapiens; identical to SEQ ID NO: 49085
  chr11:124709233-124710066
  hypo

SEQ ID NO: 170180 - DNA, 30 bp, Homo sapiens; identical to SEQ ID NO: 121623
  chr11:124710324-124710354
  hypo

SEQ ID NO: 170181 - DNA, 1131 bp, Homo sapiens; identical to SEQ ID NO: 121627
  chr11:124735374-124736505
  hypo

SEQ ID NO: 170182 - DNA, 30 bp, Homo sapiens; identical to SEQ ID NO: 25848
  chr11:124743268-124743298
  hypo

SEQ ID NO: 170183 - DNA, 30 bp, Homo sapiens; identical to SEQ ID NO: 25849
  chr11:124744053-124744083
  hypo

SEQ ID NO: 170184 - DNA, 142 bp, Homo sapiens
  chr11:124792305-124792447
  hypo
gccatggggttcttccgttcctgctcaccacttcgagggagggtgtctgctgcacaggggagagaagcgggtggctggcccaggtacagactctccccaccagccggcacctactctctgtgcttcccgaatggcccgccac

SEQ ID NO: 170185 - DNA, 310 bp, Homo sapiens; identical to SEQ ID NO: 25850
  chr11:124794644-124794954
  hypo

SEQ ID NO: 170186 - DNA, 325 bp, Homo sapiens
  chr11:124948905-124949230
  hypo
ttggccagagccacttcctagcgtggtgggggcagaaacatggtagggagttgaggtggacacagaggagcttaaccgcagatccaactttctcttccccagtggggtttttggggagcggcttccgctccgttactacctctcagctggaatgctgctcagtggccttttcacctcgctctttggcctgggatatttctggaacatccacgagctctggtactttgtggtcatccaggtatgaatcaccgtcttgcacttgggcctgtgttgccgtctcgggaaggacctgggagaccgcagctcacagcgggtgggagcctgt

SEQ ID NO: 170187 - DNA, 30 bp, Homo sapiens
  chr11:124972149-124972179
  hypo
cagcggcggccccccgccctgcgcgccgca

SEQ ID NO: 170188 - DNA, 30 bp, Homo sapiens; identical to SEQ ID NO: 83313
  chr11:125065384-125065414
  hypo

SEQ ID NO: 170189 - DNA, 30 bp, Homo sapiens; identical to SEQ ID NO: 83314
  chr11:125066173-125066203
  hypo

SEQ ID NO: 170190 - DNA, 30 bp, Homo sapiens
  chr11:125125087-125125117
  hypo
tgaagatgaaacgagcgaatgcatacccag

SEQ ID NO: 170191 - DNA, 30 bp, Homo sapiens
  chr11:125169662-125169692
  hypo
atggctggatcccctcgcatccccccaccg

SEQ ID NO: 170192 - DNA, 30 bp, Homo sapiens
  chr11:125207207-125207237
  hypo
tgttctccgcctcttcggatttcttcgttt

SEQ ID NO: 170193 - DNA, 164 bp, Homo sapiens
  chr11:125211588-125211752
  hypo
tgttgatgaagggaacggcatggctgtgaaatacagaacaccttggtagcggacaagaaacacagcaaaaggcacgagagcatcttaggttgggcgacggagggagtatctgctggggtgcgagtctgtgtggccgcgccacgtcctctcgcatcatggctgtc

SEQ ID NO: 170194 - DNA, 30 bp, Homo sapiens
  chr11:125212409-125212439
  hypo
ccggaggtggctctgcgcttttccacctgg

SEQ ID NO: 170195 - DNA, 30 bp, Homo sapiens
  chr11:125221885-125221915
  hypo
ccccaagatcttctgcgctccccaccccga

SEQ ID NO: 170196 - DNA, 82 bp, Homo sapiens
  chr11:125758705-125758787
  hypo
aattcaagtagtaccataacttctaagtcataatccaattccaggagtttattccaaggacataaatcggacaagaatgcaa

SEQ ID NO: 170197 - DNA, 30 bp, Homo sapiens
  chr11:125759074-125759104
  hypo
ctgtcagtgtcgatacgcattaccattttt

SEQ ID NO: 170198 - DNA, 30 bp, Homo sapiens
  chr11:125763471-125763501
  hypo
ttaatccttttggaccgggataagagaata

SEQ ID NO: 170199 - DNA, 30 bp, Homo sapiens; identical to SEQ ID NO: 25851
  chr11:125763707-125763737
  hypo

SEQ ID NO: 170200 - DNA, 544 bp, Homo sapiens; identical to SEQ ID NO: 121648
  chr11:125773516-125774060
  hypo

SEQ ID NO: 170201 - DNA, 326 bp, Homo sapiens; identical to SEQ ID NO: 49109
  chr11:125774122-125774448
  hypo

SEQ ID NO: 170202 - DNA, 42 bp, Homo sapiens; identical to SEQ ID NO: 121650
  chr11:125774480-125774522
  hypo

SEQ ID NO: 170203 - DNA, 71 bp, Homo sapiens
  chr11:125791136-125791207
  hypo
aacaaggagaggagccggactatgagacctacctccaccgcatagggcggacggggcgctttgggaaaaaa

SEQ ID NO: 170204 - DNA, 18 bp, Homo sapiens
  chr11:125804572-125804590
  hypo
ggccgcatttctacacat

SEQ ID NO: 170205 - DNA, 31 bp, Homo sapiens; identical to SEQ ID NO: 83319
  chr11:125817157-125817188
  hypo

SEQ ID NO: 170206 - DNA, 430 bp, Homo sapiens; identical to SEQ ID NO: 83320
  chr11:125817623-125818053
  hypo

SEQ ID NO: 170207 - DNA, 30 bp, Homo sapiens; identical to SEQ ID NO: 83321
  chr11:125818253-125818283
  hypo

SEQ ID NO: 170208 - DNA, 179 bp, Homo sapiens; identical to SEQ ID NO: 83322
  chr11:125824156-125824335
  hypo

SEQ ID NO: 170209 - DNA, 109 bp, Homo sapiens
  chr11:125827968-125828077
  hypo
gcagagctctgcccgcggaggccagagagcagcttctctggctgcggagttggagcctcggaggaattccacggcagggatagatcacagcatacggaacgggactggt

SEQ ID NO: 170210 - DNA, 32 bp, Homo sapiens; identical to SEQ ID NO: 83323
  chr11:125836033-125836065
  hypo

SEQ ID NO: 170211 - DNA, 31 bp, Homo sapiens; identical to SEQ ID NO: 83324
  chr11:125836293-125836324
  hypo

SEQ ID NO: 170212 - DNA, 23 bp, Homo sapiens
  chr11:125840354-125840377
  hypo
accgcacccggccagtagtttat

SEQ ID NO: 170213 - DNA, 31 bp, Homo sapiens; identical to SEQ ID NO: 83326
  chr11:125843433-125843464
  hypo

SEQ ID NO: 170214 - DNA, 30 bp, Homo sapiens
  chr11:125867179-125867209
  hypo
tcatccgtttatattcgactttgaaggcag

SEQ ID NO: 170215 - DNA, 179 bp, Homo sapiens; identical to SEQ ID NO: 25856
  chr11:125902448-125902627
  hypo

SEQ ID NO: 170216 - DNA, 56 bp, Homo sapiens; identical to SEQ ID NO: 8455
  chr11:125932493-125932549
  hypo

SEQ ID NO: 170217 - DNA, 436 bp, Homo sapiens; identical to SEQ ID NO: 8456
  chr11:125932556-125932992
  hypo

SEQ ID NO: 170218 - DNA, 128 bp, Homo sapiens; identical to SEQ ID NO: 49112
  chr11:125933200-125933328
  hypo

SEQ ID NO: 170219 - DNA, 41 bp, Homo sapiens; identical to SEQ ID NO: 83331
  chr11:125945775-125945816
  hypo

SEQ ID NO: 170220 - DNA, 157 bp, Homo sapiens; identical to SEQ ID NO: 83332
  chr11:125954977-125955134
  hypo

SEQ ID NO: 170221 - DNA, 198 bp, Homo sapiens; identical to SEQ ID NO: 83333
  chr11:125971128-125971326
  hypo

SEQ ID NO: 170222 - DNA, 125 bp, Homo sapiens; identical to SEQ ID NO: 83334
  chr11:125988688-125988813
  hypo

SEQ ID NO: 170223 - DNA, 30 bp, Homo sapiens
  chr11:126000487-126000517
  hypo
agcaaaggattgtgtcgctttcctttcctt

SEQ ID NO: 170224 - DNA, 183 bp, Homo sapiens
  chr11:126030294-126030477
  hypo
tgcccccgcccactgcgccccacgccccacctgctgtgtttgtgcaggggtggagggaacataatgagaggctgatgttcctgcagctgggctgtgtttggagtctggtggagtgaggggagggcagcagggcaggtcggggcagcaggacggagggccaggcagggccgcagagcctcaggg

SEQ ID NO: 170225 - DNA, 30 bp, Homo sapiens
  chr11:126030838-126030868
  hypo
ccctcatctcacccgcgtataaatacagag

SEQ ID NO: 170226 - DNA, 467 bp, Homo sapiens
  chr11:126055109-126055576
  hypo
acagtgctaagcagcgcctctcaaatccagcccacccatttattttccaaaactcctgggagagacgacagagggacagaggcgcagggctctgtggaagccaggcctgcacccctcccccaggcggcctcctctccactctgggaccagccctgccttcccccaggctgcggtgggtcccgtcggagcacagcggctgctcataaagctcccgatgaaaggcacgctggacaggagaggtcaaggttcacacaagcagctccgccttctgtttcatttacaagtggcagtcacctcattaaacccggtccccctccacccctaccccaccctcacccccagcccaccgcacgcatccccacacccggtccctcccgctcagccctggccggcacagagaggctgggttggagatcgagtggtccagagatgggcaggtgacctgctggacacgcccacccataccc

SEQ ID NO: 170227 - DNA, 79 bp, Homo sapiens; identical to SEQ ID NO: 25864
  chr11:126083886-126083965
  hypo

SEQ ID NO: 170228 - DNA, 45 bp, Homo sapiens; identical to SEQ ID NO: 83338
  chr11:126085297-126085342
  hypo

SEQ ID NO: 170229 - DNA, 30 bp, Homo sapiens; identical to SEQ ID NO: 25865
  chr11:126136098-126136128
  hypo

SEQ ID NO: 170230 - DNA, 825 bp, Homo sapiens; identical to SEQ ID NO: 121662
  chr11:126225360-126226185
  hypo

SEQ ID NO: 170231 - DNA, 420 bp, Homo sapiens
  chr11:126272979-126273399
  hypo
ggtagcagccagccccggaagccctggaatgcctggggccactgagcaatcctcaccctcagccccacaaggggagggcgtggctcgtgaaattcctgattgggtatagcccagcaagccccaagactcgcccagtttgcttagcgcaacactgacgctgttttggaatgaagacaagacaatgtagaactttactggggaagaggtcgaagaagggctaattgtcttgttgttcaagactggttagcgctgctcacctctgacgctgctcacctctgacgccaaaggtttttccctggaaggcagccctggaggatacctgtgtatctgtctttcacaaaaggtgaaatgagctctttgtagtgtttcccgcccaggctgcattttagaatcacagaggaggtacggcgctgatttgtt

SEQ ID NO: 170232 - DNA, 30 bp, Homo sapiens
  chr11:126278018-126278048
  hypo
gtggggaacgggcaccggctgcggaacagc

SEQ ID NO: 170233 - DNA, 126 bp, Homo sapiens
  chr11:126278420-126278546
  hypo
gcctggcggtggggacgctgcccgagtcaggacctcacgctccttgatgtccgcctggcagtcctaaagaggctgtgaggggacagcatgaaccgggctcccggaagtcagcgccttaggctgccc

SEQ ID NO: 170234 - DNA, 30 bp, Homo sapiens; identical to SEQ ID NO: 49119
  chr11:126322262-126322292
  hypo

SEQ ID NO: 170235 - DNA, 101 bp, Homo sapiens
  chr11:126578517-126578618
  hypo
aggcaccggcgaactcgagagccaagagcggcactcccacctgggcactccttgctgatggaccgggacctcctctcccatttctccggggcctccagggc

SEQ ID NO: 170236 - DNA, 30 bp, Homo sapiens
  chr11:126595507-126595537
  hypo
gatggtggtagaggccgtccttgtctggag

SEQ ID NO: 170237 - DNA, 207 bp, Homo sapiens; identical to SEQ ID NO: 25867
  chr11:126619094-126619301
  hypo

SEQ ID NO: 170238 - DNA, 33 bp, Homo sapiens
  chr11:127323961-127323994
  hypo
acctggcatcatgcacgtcgctgacactggttc

SEQ ID NO: 170239 - DNA, 30 bp, Homo sapiens; identical to SEQ ID NO: 8461
  chr11:127423281-127423311
  hypo

SEQ ID NO: 170240 - DNA, 101 bp, Homo sapiens
  chr11:128290554-128290655
  hypo
ctaaaaactccccagcgactaaaggtgaaacaccttagaagcaaggagggccatcggagcctgaacctgagctgtttccatgtgtgcgtacagccttgtgg

SEQ ID NO: 170241 - DNA, 30 bp, Homo sapiens; identical to SEQ ID NO: 83346
  chr11:128327650-128327680
  hypo

SEQ ID NO: 170242 - DNA, 274 bp, Homo sapiens
  chr11:128350029-128350303
  hypo
ccccacccacagaaacgtgcagatggagttggcctaagcagcgggagggcgcctacctgtgtagccagctagggcagcagcaggaatgacaggcttgtccttattgaggtcagcacggtcccgcacatagtccttgaaggtgcccttgggcttgtggttgggcagggcagccggatagtcctctgagtcgaagctgtcataggagggaacacgctgcaggctgttgaaagatgactggctgctccaggactgggtgaggcgatcacaactatcg

SEQ ID NO: 170243 - DNA, 30 bp, Homo sapiens; identical to SEQ ID NO: 83347
  chr11:128356683-128356713
  hypo

SEQ ID NO: 170244 - DNA, 999 bp, Homo sapiens; identical to SEQ ID NO: 121671
  chr11:128391754-128392753
  hypo

SEQ ID NO: 170245 - DNA, 30 bp, Homo sapiens
  chr11:128402946-128402976
  hypo
ccatcgccaattagccgtcgcctttgaaaa

SEQ ID NO: 170246 - DNA, 571 bp, Homo sapiens; identical to SEQ ID NO: 49127
  chr11:128562614-128563185
  hypo

SEQ ID NO: 170247 - DNA, 499 bp, Homo sapiens; identical to SEQ ID NO: 49128
  chr11:128563336-128563835
  hypo

SEQ ID NO: 170248 - DNA, 687 bp, Homo sapiens; identical to SEQ ID NO: 49129
  chr11:128563856-128564543
  hypo

SEQ ID NO: 170249 - DNA, 274 bp, Homo sapiens; identical to SEQ ID NO: 8466
  chr11:128564602-128564876
  hypo

SEQ ID NO: 170250 - DNA, 543 bp, Homo sapiens; identical to SEQ ID NO: 49131
  chr11:128564991-128565534
  hypo

SEQ ID NO: 170251 - DNA, 387 bp, Homo sapiens
  chr11:128634599-128634986
  hypo
accctgagcggcagccgtggagccccatggccgcacgcagggcttgcgctggctggaggaggcacggtgcttgggagctgcaagaatggagggaggactggcaggcgagcgggcgaggtatggctttccttctttctctccctgagcagtgggaggagggccagctgggcaagtgtggggaaccaggatggtgccagcccttctccctaaggacacccgcctgcaggtcctagtgcagaagcctgggaccgaggacagggccattttccagaggagaaacaccctggcgggcgagcggccaaaccgatcacctgtccagctggagagcaggtgtgtgcacagggccgggggagggagagaggaggagggaagcggaactgggagaac

SEQ ID NO: 170252 - DNA, 20 bp, Homo sapiens
  chr11:128657945-128657965
  hypo
ctgcccgcctcggcctccta

SEQ ID NO: 170253 - DNA, 30 bp, Homo sapiens; identical to SEQ ID NO: 83355
  chr11:128680318-128680348
  hypo

SEQ ID NO: 170254 - DNA, 161 bp, Homo sapiens; identical to SEQ ID NO: 83356
  chr11:128737283-128737444
  hypo

SEQ ID NO: 170255 - DNA, 31 bp, Homo sapiens; identical to SEQ ID NO: 83357
  chr11:128781365-128781396
  hypo

SEQ ID NO: 170256 - DNA, 789 bp, Homo sapiens
  chr11:128812233-128813022
  hypo
ccgttcaccaggggacgtgagaaaggggctggcctgtggaccaggactgacccaggtctgagccccagctcagcggtcggctagctgtgcgagcttgcgcagtagctccccaagtgtggctcaggacgcacagcatcggcgtcagcatcgcccaggaacctgttagagatacacatttttggccccaacctgcatcgaccaagtcagaaattctgcagtgtgtgttttcgtaagtcctccaggtgactctgatgtactctcagggttcagaaccattgagagagagcagtttagctgacctcctccaggcctcacctgcgcatggtcacgactgtactttccgcacacagtcgccgagatgcgtgtgaaaccccaagcacaaagcagagtgaatcgcagtggccagagcatacctgaagcaccagcgctggtcccctccctccccctctcctcacctgcctcctaggagtcggagggtccgtggaaatggtctcctcctgcacatctgtgctgctgtgactgggtgcaggtctgagcagaggctttcggagtgagctgagcaggcgagcccgagcacggcctctcagggagcgagcccataggctggggagccgtccctggagatgcccctgggctccttgcggggcatggctgagttcctgcctgtccttggcaggcccgcagtggtggggtggctcaggcagttacccttttcacaaccagtgctgctgggggtgaaggcaacgggtgggtgagcacggacagtgtgagccacgtggccgggagctg

SEQ ID NO: 170257 - DNA, 30 bp, Homo sapiens
  chr11:128813318-128813348
  hypo
tcctcaaggctggcacgctcatcagttgac

SEQ ID NO: 170258 - DNA, 541 bp, Homo sapiens; identical to SEQ ID NO: 8470
  chr11:129148498-129149039
  hypo

SEQ ID NO: 170259 - DNA, 835 bp, Homo sapiens; identical to SEQ ID NO: 49138
  chr11:129149096-129149931
  hypo

SEQ ID NO: 170260 - DNA, 80 bp, Homo sapiens; identical to SEQ ID NO: 25878
  chr11:129207797-129207877
  hypo

SEQ ID NO: 170261 - DNA, 19 bp, Homo sapiens
  chr11:129207936-129207955
  hypo
tggcgcgatcttggctctt

SEQ ID NO: 170262 - DNA, 160 bp, Homo sapiens; identical to SEQ ID NO: 83362
  chr11:129315218-129315378
  hypo

SEQ ID NO: 170263 - DNA, 31 bp, Homo sapiens; identical to SEQ ID NO: 83363
  chr11:129324012-129324043
  hypo

SEQ ID NO: 170264 - DNA, 21 bp, Homo sapiens
  chr11:129445105-129445126
  hypo
tataggcgtgagccaccgcac

SEQ ID NO: 170265 - DNA, 30 bp, Homo sapiens; identical to SEQ ID NO: 49145
  chr11:129461155-129461185
  hypo

SEQ ID NO: 170266 - DNA, 185 bp, Homo sapiens; identical to SEQ ID NO: 83366
  chr11:129575146-129575331
  hypo

SEQ ID NO: 170267 - DNA, 30 bp, Homo sapiens
  chr11:129684569-129684599
  hypo
cccaaacgcagctgccgctggctcggatgg

SEQ ID NO: 170268 - DNA, 95 bp, Homo sapiens; identical to SEQ ID NO: 83367
  chr11:129686909-129687004
  hypo

SEQ ID NO: 170269 - DNA, 30 bp, Homo sapiens
  chr11:129708372-129708402
  hypo
tgtgagacggagtttcgctcttgtcgctct

SEQ ID NO: 170270 - DNA, 175 bp, Homo sapiens
  chr11:129732116-129732291
  hypo
aaaggcccatttccccgcactgcatcctacctctccccactgccaacctcatcccgtgccagtctacttgcccatcacaagctcaacctgggaggcccattcacctctgctctctgcaatgcaggcctcccacctcctaagactggatcgcccccaggctcgccaggatacatca

SEQ ID NO: 170271 - DNA, 300 bp, Homo sapiens
  chr11:129742114-129742414
  hypo
tgagaatacgagttccgcgagggcaaggacttagtctgtttaatgtaccattaaatctccaatacttaggacactctctggcttaatgtttgttgaacaaaaaaaaaacattactttatcgttatgtggttccatttctccacctgtaaataataagagtgcctaccccacagagctaagaagattagactatttaacaagcaaaaaatgcttaacgcggtgcaggcacacaggaggcactcctatcagtattagttgctatactgcttacgattctttgaagttcgatgattattcttt

SEQ ID NO: 170272 - DNA, 217 bp, Homo sapiens; identical to SEQ ID NO: 49146
  chr11:129765559-129765776
  hypo

SEQ ID NO: 170273 - DNA, 289 bp, Homo sapiens; identical to SEQ ID NO: 25881
  chr11:129775500-129775789
  hypo

SEQ ID NO: 170274 - DNA, 126 bp, Homo sapiens; identical to SEQ ID NO: 83370
  chr11:129785493-129785619
  hypo

SEQ ID NO: 170275 - DNA, 30 bp, Homo sapiens; identical to SEQ ID NO: 83371
  chr11:129788435-129788465
  hypo

SEQ ID NO: 170276 - DNA, 74 bp, Homo sapiens
  chr11:129802031-129802105
  hypo
tggtgatttccaggcggataaattttggaggacgccccggccgtcgacctggaccgaatcgcctcttgcctcgt

SEQ ID NO: 170277 - DNA, 148 bp, Homo sapiens; identical to SEQ ID NO: 25884
  chr11:129803838-129803986
  hypo

SEQ ID NO: 170278 - DNA, 271 bp, Homo sapiens
  chr11:129816768-129817039
  hypo
tgcctgatgccccttcgtccctgtgtgacccccagcgagcttcccaatcttctgagcttgtttactcatcagtaaatcagaaaacgaaggagagtgtccctcaaagggctgcagtgaaggccaggtgggatgaagcaagcagagaatgtagcacagttggctgcacacggaaggacctgacgcacgggagctatgttcacacacacgcacacgtacacagacacacaagatggacacagcttccctgggggagacccgtgcccacacttac

SEQ ID NO: 170279 - DNA, 29 bp, Homo sapiens
  chr11:129836985-129837014
  hypo
gacagaaagcacttgtgaagccgggcgcg

SEQ ID NO: 170280 - DNA, 31 bp, Homo sapiens; identical to SEQ ID NO: 83374
  chr11:129849604-129849635
  hypo

SEQ ID NO: 170281 - DNA, 99 bp, Homo sapiens; identical to SEQ ID NO: 25885
  chr11:129859712-129859811
  hypo

SEQ ID NO: 170282 - DNA, 42 bp, Homo sapiens; identical to SEQ ID NO: 83376
  chr11:129897978-129898020
  hypo

SEQ ID NO: 170283 - DNA, 191 bp, Homo sapiens; identical to SEQ ID NO: 83377
  chr11:129902830-129903021
  hypo

SEQ ID NO: 170284 - DNA, 30 bp, Homo sapiens; identical to SEQ ID NO: 83378
  chr11:129910309-129910339
  hypo

SEQ ID NO: 170285 - DNA, 30 bp, Homo sapiens
  chr11:129912411-129912441
  hypo
gctcacctgctcctgcggcttcatcatcat

SEQ ID NO: 170286 - DNA, 17 bp, Homo sapiens
  chr11:129932610-129932627
  hypo
ctgggtgtgatggtacg

SEQ ID NO: 170287 - DNA, 30 bp, Homo sapiens
  chr11:129939160-129939190
  hypo
gaggcgaggacccggcggagaggcctgggc

SEQ ID NO: 170288 - DNA, 239 bp, Homo sapiens; identical to SEQ ID NO: 121700
  chr11:129939593-129939832
  hypo

SEQ ID NO: 170289 - DNA, 30 bp, Homo sapiens
  chr11:129940040-129940070
  hypo
gcgggcagcggggtccgcggcagggcgggc

SEQ ID NO: 170290 - DNA, 37 bp, Homo sapiens
  chr11:129968001-129968038
  hypo
attaaaacatggatatttggccgggcgcggtggctca

SEQ ID NO: 170291 - DNA, 37 bp, Homo sapiens
  chr11:129968277-129968314
  hypo
gacagagggagactccgtctcaaaaaaaaaaaaaaag

SEQ ID NO: 170292 - DNA, 29 bp, Homo sapiens
  chr11:129975900-129975929
  hypo
gcctgtgcttttctcgtgcatgtctgcag

SEQ ID NO: 170293 - DNA, 606 bp, Homo sapiens; identical to SEQ ID NO: 83381
  chr11:129993350-129993956
  hypo

SEQ ID NO: 170294 - DNA, 31 bp, Homo sapiens; identical to SEQ ID NO: 83382
  chr11:129994925-129994956
  hypo

SEQ ID NO: 170295 - DNA, 31 bp, Homo sapiens; identical to SEQ ID NO: 83383
  chr11:130005549-130005580
  hypo

SEQ ID NO: 170296 - DNA, 81 bp, Homo sapiens
  chr11:130013340-130013421
  hypo
taggtggcagggagcgcggcagccctggcggagggatgcaggtgggccggaagatcccacgattccgatcgactgccaagc

SEQ ID NO: 170297 - DNA, 121 bp, Homo sapiens; identical to SEQ ID NO: 25888
  chr11:130017430-130017551
  hypo

SEQ ID NO: 170298 - DNA, 19 bp, Homo sapiens
  chr11:130019585-130019604
  hypo
ttttgtttgtttgttttga

SEQ ID NO: 170299 - DNA, 283 bp, Homo sapiens
  chr11:130059522-130059805
  hypo
atggcaggcccaggtgtgccccgagccgcccatgtgtcctggagtcgctctgggcgcacgtgggggaaatggggcccagagctccgcctcaggctcccgctctctccccagcgagggcagcgtcatcgcctactactggtctgagttcagcatcccgcagcacctggtggaggaggccgagcgcgtcatggccgaggagcgcgtagtcatgctgcccccgcgggcgcgctccctgaagtcctttgtggtcacctcagtggtggctttccgtgagtccgagggc

SEQ ID NO: 170300 - DNA, 617 bp, Homo sapiens
  chr11:130060257-130060874
  hypo
ctgaggtccacacccacggggtctcagggtcctcccccagctctgcccagccctgcccccacacgtgccctccttcttgtctcctgcgcagacagctgcagctttggcctgcacgcccgcggtgtggagctgatgcgcttcaccacgcccggcttccctgacagcccctaccccgctcatgcccgctgccagtgggccctgcggggggacgccgactcagtgctgagcctcaccttccgcagctttgaccttgcgtcctgcgacgagcgcggcagcgacctggtgacggtgtacaacaccctgagccccatggagccccacgccctggtgcagtgagtaccccggggggcgggtagggctgtgggagcttggcggctgccctgtagggggccagcttcttcaacgattgggatacagtttatgactcttggccgcaggccactgctaaacatccaggcagcaggaggcacgtgtggtgtgatcctcagctgcagctccaggggagtctgggaggtgatttttctcagccttggcaaagcagaggaaggctctatagtccccagataccaaatccagcctgtgcggcctgtgccctgaaccgccggagagaaggcact

SEQ ID NO: 170301 - DNA, 269 bp, Homo sapiens
  chr11:130067921-130068190
  hypo
gaggcagaaaggccggaggtggtgggagtttttgctctcggccctgtgtagagacctctggccccactccccaccctgccatatggagatcttggcctgtggggcaggtggtggggtatctcggaagtgctgaggtcagcttggtagctggtggagcagggccccttgggcctctctgtagatcagaaagcggtccccaggtagctctgatcgcctgggcatcctggggaagcagtgagtgatgagggcctcacggccgacctcccctt

SEQ ID NO: 170302 - DNA, 85 bp, Homo sapiens; identical to SEQ ID NO: 83390
  chr11:130074708-130074793
  hypo

SEQ ID NO: 170303 - DNA, 43 bp, Homo sapiens; identical to SEQ ID NO: 83391
  chr11:130075917-130075960
  hypo

SEQ ID NO: 170304 - DNA, 30 bp, Homo sapiens; identical to SEQ ID NO: 83392
  chr11:130078221-130078251
  hypo

SEQ ID NO: 170305 - DNA, 30 bp, Homo sapiens; identical to SEQ ID NO: 83393
  chr11:130078634-130078664
  hypo

SEQ ID NO: 170306 - DNA, 661 bp, Homo sapiens; identical to SEQ ID NO: 25892
  chr11:130079178-130079839
  hypo

SEQ ID NO: 170307 - DNA, 31 bp, Homo sapiens; identical to SEQ ID NO: 83395
  chr11:130082174-130082205
  hypo

SEQ ID NO: 170308 - DNA, 54 bp, Homo sapiens; identical to SEQ ID NO: 121704
  chr11:130083120-130083174
  hypo

SEQ ID NO: 170309 - DNA, 242 bp, Homo sapiens; identical to SEQ ID NO: 83396
  chr11:130089772-130090014
  hypo

SEQ ID NO: 170310 - DNA, 30 bp, Homo sapiens
  chr11:130090263-130090293
  hypo
gagctgctcactccccgcacctacaggtgg

SEQ ID NO: 170311 - DNA, 21 bp, Homo sapiens
  chr11:130109950-130109971
  hypo
ttttgagactgagtctcgctc

SEQ ID NO: 170312 - DNA, 174 bp, Homo sapiens; identical to SEQ ID NO: 83398
  chr11:130250619-130250793
  hypo

SEQ ID NO: 170313 - DNA, 45 bp, Homo sapiens; identical to SEQ ID NO: 25894
  chr11:130264260-130264305
  hypo

SEQ ID NO: 170314 - DNA, 31 bp, Homo sapiens; identical to SEQ ID NO: 83400
  chr11:130275555-130275586
  hypo

SEQ ID NO: 170315 - DNA, 1531 bp, Homo sapiens; identical to SEQ ID NO: 121707
  chr11:130318226-130319757
  hypo

SEQ ID NO: 170316 - DNA, 30 bp, Homo sapiens; identical to SEQ ID NO: 83402
  chr11:130343062-130343092
  hypo

SEQ ID NO: 170317 - DNA, 30 bp, Homo sapiens; identical to SEQ ID NO: 83403
  chr11:130343518-130343548
  hypo

SEQ ID NO: 170318 - DNA, 82 bp, Homo sapiens; identical to SEQ ID NO: 25896
  chr11:130356097-130356179
  hypo

SEQ ID NO: 170319 - DNA, 30 bp, Homo sapiens; identical to SEQ ID NO: 83405
  chr11:130731446-130731476
  hypo

SEQ ID NO: 170320 - DNA, 375 bp, Homo sapiens; identical to SEQ ID NO: 25897
  chr11:130781406-130781781
  hypo

SEQ ID NO: 170321 - DNA, 265 bp, Homo sapiens
  chr11:130785376-130785641
  hypo
gcatgactgtccatcacgctcatccttctccgaagctcctggaccaaccctttcatggctgcctccatttcttcctcaaaggctggctcctggctcacggaacggtaccaagataacacaaaatctcgaataatcatctggatggtgcggttgatctcccgttccagctgcctttctgcctcagggcatggaggacaggtggccaacgggatgaagcgttccagatgcagtcgacctgaagccactccagcgaggctggagccca

SEQ ID NO: 170322 - DNA, 30 bp, Homo sapiens; identical to SEQ ID NO: 25898
  chr11:131085431-131085461
  hypo

SEQ ID NO: 170323 - DNA, 30 bp, Homo sapiens
  chr11:131259322-131259352
  hypo
tcaggatttatcattcgccttggtggcagg

SEQ ID NO: 170324 - DNA, 30 bp, Homo sapiens
  chr11:131560462-131560492
  hypo
tcagaaacatacaccgtggacgctgccttg

SEQ ID NO: 170325 - DNA, 201 bp, Homo sapiens; identical to SEQ ID NO: 25899
  chr11:131648917-131649118
  hypo

SEQ ID NO: 170326 - DNA, 30 bp, Homo sapiens
  chr11:131668173-131668203
  hypo
cattgttatcatggacgtagccgagaactg

SEQ ID NO: 170327 - DNA, 131 bp, Homo sapiens
  chr11:131707598-131707729
  hypo
cacccgagggctatgcgtggtgttgcgggagacctgtcattgctgcctgccgcgatgccaggccccacgctgggggagccacccgggtcctcacctggagatgtggctctctgtggcgacgtgccctgacg

SEQ ID NO: 170328 - DNA, 31 bp, Homo sapiens; identical to SEQ ID NO: 25900
  chr11:131794182-131794213
  hypo

SEQ ID NO: 170329 - DNA, 30 bp, Homo sapiens
  chr11:131799653-131799683
  hypo
aaattccacgaagtccgcttgctttcctgg

SEQ ID NO: 170330 - DNA, 30 bp, Homo sapiens
  chr11:132016251-132016281
  hypo
tggtgcctggatcctcgcgtggtccttctg

SEQ ID NO: 170331 - DNA, 30 bp, Homo sapiens
  chr11:132025388-132025418
  hypo
gtctgggtcgcatcccgtttctccagcctc

SEQ ID NO: 170332 - DNA, 30 bp, Homo sapiens; identical to SEQ ID NO: 83411
  chr11:132206346-132206376
  hypo

SEQ ID NO: 170333 - DNA, 30 bp, Homo sapiens
  chr11:132488938-132488968
  hypo
gcatggaagctcctgcgatgactggcaccc

SEQ ID NO: 170334 - DNA, 30 bp, Homo sapiens
  chr11:132851828-132851858
  hypo
taacgtatttgtgtccgtcacatatccaaa

SEQ ID NO: 170335 - DNA, 286 bp, Homo sapiens; identical to SEQ ID NO: 121722
  chr11:132864080-132864366
  hypo

SEQ ID NO: 170336 - DNA, 30 bp, Homo sapiens
  chr11:132941882-132941912
  hypo
tgtgcaggacggccccgtaccaccaattgc

SEQ ID NO: 170337 - DNA, 448 bp, Homo sapiens; identical to SEQ ID NO: 121725
  chr11:132952552-132953000
  hypo

SEQ ID NO: 170338 - DNA, 95 bp, Homo sapiens; identical to SEQ ID NO: 8491
  chr11:132953232-132953327
  hypo

SEQ ID NO: 170339 - DNA, 30 bp, Homo sapiens; identical to SEQ ID NO: 83415
  chr11:133050636-133050666
  hypo

SEQ ID NO: 170340 - DNA, 30 bp, Homo sapiens
  chr11:133051135-133051165
  hypo
taaatacacacacagcggtgcacaaggaaa

SEQ ID NO: 170341 - DNA, 213 bp, Homo sapiens; identical to SEQ ID NO: 83416
  chr11:133076713-133076926
  hypo

SEQ ID NO: 170342 - DNA, 69 bp, Homo sapiens
  chr11:133233051-133233120
  hypo
gagggaggacagcaaaggccccgcggctactggaaaccccatcatgtcgctgagcactgggctccactt

SEQ ID NO: 170343 - DNA, 30 bp, Homo sapiens
  chr11:133589577-133589607
  hypo
acctcgttctggtcacggtgcatccactga

SEQ ID NO: 170344 - DNA, 375 bp, Homo sapiens
  chr11:133703492-133703867
  hypo
ccccactccgcggccgcgcggcgccctgatcgcgcgtctcaggccccgctggaacccggggcctccctgcccgctccactccttcccgcggcgcacccccgccctccgcctgcccctgccctgctggccccccgccaggcagcctctcccgcatcggagaccacccgcccggttttcatgtcccggtttggctgggtgtctaaactccgcctctcgggatgggacagagccccaccccacctcgcagtggacaccccaggacagtggcttggtcttcacaacactgggtgcggttcatggagcagcacctcgcattgctccctgcagtgacccacgcaggaggccgcctgccctggtggacgtgggcacaccctc

SEQ ID NO: 170345 - DNA, 34 bp, Homo sapiens
  chr11:133704390-133704424
  hypo
cccaaactccagatgcgcgcgagagacagacagt

SEQ ID NO: 170346 - DNA, 923 bp, Homo sapiens; identical to SEQ ID NO: 83418
  chr11:133734500-133735423
  hypo

SEQ ID NO: 170347 - DNA, 80 bp, Homo sapiens
  chr11:133771362-133771442
  hypo
cctgcccatcttgcccggcactcatctcttgccctcccgctccccacacccgagtgccactcgcccgaagctcccagtct

SEQ ID NO: 170348 - DNA, 30 bp, Homo sapiens
  chr11:133776395-133776425
  hypo
aagcacggctccccgcgttgggtctacgtg

SEQ ID NO: 170349 - DNA, 35 bp, Homo sapiens
  chr11:133776832-133776867
  hypo
gtgagcagcacatcacgacgcgggggcagagggtg

SEQ ID NO: 170350 - DNA, 470 bp, Homo sapiens
  chr11:133777669-133778139
  hypo
gggcaggatccagagcgtcccaggccccagcagccagaggcgccctagcttcacctgagctcatccccctgcagctcaggtccaccggaggacgaaggccccggggcagagaagagtcggcaggcagcacgtggtgagtgcgggaaagccacaggcggctccgcacaagtggtaattaatcaatctggagaattagctcccacaaaagcaaaggaggatccaatcagccgctgtggaacagcactgcacagagtgctgagccggggacggtataaatagagccggcagcttggcgctagcacaggtggctccgcagtggggagactttggccacagagctcacggcctggctgggcggaagggcgccgacggatgcgctggacatgtgcaccagaggcttgctttagccccgcggctgagttagcctctactcctgcagcgtgagccacgctggaaggaagaaagatgca

SEQ ID NO: 170351 - DNA, 1045 bp, Homo sapiens; identical to SEQ ID NO: 25906
  chr11:133790243-133791288
  hypo

SEQ ID NO: 170352 - DNA, 55 bp, Homo sapiens; identical to SEQ ID NO: 83421
  chr11:133795667-133795722
  hypo

SEQ ID NO: 170353 - DNA, 184 bp, Homo sapiens; identical to SEQ ID NO: 25907
  chr11:133799602-133799786
  hypo

SEQ ID NO: 170354 - DNA, 260 bp, Homo sapiens
  chr11:133800160-133800420
  hypo
ttagcgatgtgacgccggagaaagcattcgggccacggcaacctctgcttcgaggaacctacactagagaaaccccagctcgcacctcccgagttgtgaaggacgagctgtgcagaccacttggaacagaacctaaaactggtggtaaaggctccaaaagcattggctgtgactgtgattatagccgtcaggacccagaaggacaggctgagagggcccaggcgaaggtcctgggacacgcgcttcgggcaatcggaaac

SEQ ID NO: 170355 - DNA, 30 bp, Homo sapiens
  chr11:133804510-133804540
  hypo
ttaggggtccgatggcgctcagcaggcgca

SEQ ID NO: 170356 - DNA, 101 bp, Homo sapiens; identical to SEQ ID NO: 25909
  chr11:133804994-133805095
  hypo

SEQ ID NO: 170357 - DNA, 380 bp, Homo sapiens
  chr11:133805531-133805911
  hypo
gaggcggagggggagcgccccaggctgttgctgggcacacaggtgtacttccccgagtcctccggcttcacccggaagatgatcagggtcccatcgattaggatgcgcaccctcagcttcaggtcgctgcaaagcggcatggggacagggggttgggcgagcagaaggggatcttgccgcagacacacagtcaccgtcactgccccagatgtggcatggagagcccatgcccctggcatccccagggcccctccatgcagaccctggccttggcatgtgagacacacggaccagactgcccacctcccccagctccaagagccacgggcagcctgcccgtgcaatttctgctcaggggccctgcccgtgggggctggggt

SEQ ID NO: 170358 - DNA, 30 bp, Homo sapiens; identical to SEQ ID NO: 83426
  chr11:133808077-133808107
  hypo

SEQ ID NO: 170359 - DNA, 1427 bp, Homo sapiens; identical to SEQ ID NO: 121729
  chr11:133825231-133826658
  hypo

SEQ ID NO: 170360 - DNA, 769 bp, Homo sapiens; identical to SEQ ID NO: 49171
  chr11:133826702-133827471
  hypo

SEQ ID NO: 170361 - DNA, 30 bp, Homo sapiens; identical to SEQ ID NO: 83429
  chr11:133845231-133845261
  hypo

SEQ ID NO: 170362 - DNA, 30 bp, Homo sapiens; identical to SEQ ID NO: 83430
  chr11:133855186-133855216
  hypo

SEQ ID NO: 170363 - DNA, 30 bp, Homo sapiens
  chr11:133905122-133905152
  hypo
ggcggaggaaaggagcgggtgagatttcta

SEQ ID NO: 170364 - DNA, 30 bp, Homo sapiens
  chr11:133914671-133914701
  hypo
gtgatggccaaccggcgaggcgagcggtag

SEQ ID NO: 170365 - DNA, 247 bp, Homo sapiens
  chr11:133915022-133915269
  hypo
ggtacaggagggaggcggctagcatcgctggaatgcgttgtctgtgtttggggcaagtatgattacatatgggagagcacactgcctgagagcttcccacattgaagccacaagcaaagatgacgttccatgcatgctggcttccagtcctcacagctcgtcttcaaggcaaatgctcttcccagccttccctagcattctgtgacttgctcagggctaccgctggcaggtgcgaatcctgcattca

SEQ ID NO: 170366 - DNA, 877 bp, Homo sapiens; identical to SEQ ID NO: 49175
  chr11:133938735-133939612
  hypo

SEQ ID NO: 170367 - DNA, 167 bp, Homo sapiens; identical to SEQ ID NO: 83432
  chr11:134011306-134011473
  hypo

SEQ ID NO: 170368 - DNA, 30 bp, Homo sapiens; identical to SEQ ID NO: 83433
  chr11:134011744-134011774
  hypo

SEQ ID NO: 170369 - DNA, 188 bp, Homo sapiens
  chr11:134015726-134015914
  hypo
ggaagctgaaagcaagcgagcaggtgtcgacctagttctggacccagctggctgtgctctcagaaatcggccccatgatgggtccgattatttacttgtcattccctgaaacaggtgttcactgctgttcacaaggacgactctgggcagtactactgcattgcttccaatgacgcaggctcagccag

SEQ ID NO: 170370 - DNA, 30 bp, Homo sapiens; identical to SEQ ID NO: 83435
  chr11:134019425-134019455
  hypo

SEQ ID NO: 170371 - DNA, 30 bp, Homo sapiens; identical to SEQ ID NO: 25915
  chr11:134022769-134022799
  hypo

SEQ ID NO: 170372 - DNA, 139 bp, Homo sapiens; identical to SEQ ID NO: 83437
  chr11:134023319-134023458
  hypo

SEQ ID NO: 170373 - DNA, 30 bp, Homo sapiens; identical to SEQ ID NO: 83438
  chr11:134026846-134026876
  hypo

SEQ ID NO: 170374 - DNA, 53 bp, Homo sapiens
  chr11:134027874-134027927
  hypo
tcctaagctccgactccgatgcctgctctttgactccacggctttcttgacag

SEQ ID NO: 170375 - DNA, 24 bp, Homo sapiens
  chr11:134071201-134071225
  hypo
gagccaccacgcctggcccagaat

SEQ ID NO: 170376 - DNA, 36 bp, Homo sapiens; identical to SEQ ID NO: 25918
  chr11:134071992-134072028
  hypo

SEQ ID NO: 170377 - DNA, 95 bp, Homo sapiens; identical to SEQ ID NO: 83441
  chr11:134075570-134075665
  hypo

SEQ ID NO: 170378 - DNA, 98 bp, Homo sapiens; identical to SEQ ID NO: 25919
  chr11:134083474-134083572
  hypo

SEQ ID NO: 170379 - DNA, 31 bp, Homo sapiens; identical to SEQ ID NO: 25920
  chr11:134085636-134085667
  hypo

SEQ ID NO: 170380 - DNA, 179 bp, Homo sapiens; identical to SEQ ID NO: 25921
  chr11:134088870-134089049
  hypo

SEQ ID NO: 170381 - DNA, 25 bp, Homo sapiens
  chr11:134089976-134090001
  hypo
catgcctggtcgcagattttcttaa

SEQ ID NO: 170382 - DNA, 958 bp, Homo sapiens; identical to SEQ ID NO: 8498
  chr11:134145468-134146426
  hypo

SEQ ID NO: 170383 - DNA, 155 bp, Homo sapiens; identical to SEQ ID NO: 8499
  chr11:134146444-134146599
  hypo

SEQ ID NO: 170384 - DNA, 453 bp, Homo sapiens; identical to SEQ ID NO: 121744
  chr11:134146621-134147074
  hypo

SEQ ID NO: 170385 - DNA, 38 bp, Homo sapiens; identical to SEQ ID NO: 83449
  chr11:134152956-134152994
  hypo

SEQ ID NO: 170386 - DNA, 37 bp, Homo sapiens; identical to SEQ ID NO: 83450
  chr11:134153233-134153270
  hypo

SEQ ID NO: 170387 - DNA, 93 bp, Homo sapiens
  chr11:134182295-134182388
  hypo
gagcggccagtcctacgggcttgtcctgtatgagaagtccatctgctccggaggccgcctccgtgcccacgctcatgacgtggcacaggtagg

SEQ ID NO: 170388 - DNA, 387 bp, Homo sapiens; identical to SEQ ID NO: 83451
  chr11:134212672-134213059
  hypo

SEQ ID NO: 170389 - DNA, 30 bp, Homo sapiens; identical to SEQ ID NO: 83452
  chr11:134216061-134216091
  hypo

SEQ ID NO: 170390 - DNA, 33 bp, Homo sapiens; identical to SEQ ID NO: 83453
  chr11:134222549-134222582
  hypo

SEQ ID NO: 170391 - DNA, 33 bp, Homo sapiens; identical to SEQ ID NO: 83454
  chr11:134222821-134222854
  hypo

SEQ ID NO: 170392 - DNA, 169 bp, Homo sapiens; identical to SEQ ID NO: 83455
  chr11:134227490-134227659
  hypo

SEQ ID NO: 170393 - DNA, 387 bp, Homo sapiens
  chr11:134228004-134228391
  hypo
cccagcagatgatctcgctgtctatccacttccaaaagatttcagcggaaataaacagtcttggcataatatctgcagggaagattacgagaagacacctctgttgggatttttgatccaaaagatcctagcacctcagcacagagcctttggctctgggttcaggcccacgttgccatgggccctgtaacctgcgatgcttgacttcacgcctccgaggcgcgtctctactgtgaagacagcaactgcaaggctcgcgtaggacagtctgtgtatgagcggagggcctggcgtggcagtgactgctctgcggatgtcaggggacgctctgagtggtgattgtcgtcactgcccctcaagcacagcgtttcttccacttcactctct

SEQ ID NO: 170394 - DNA, 30 bp, Homo sapiens
  chr11:134228598-134228628
  hypo
cccagcagacagtggcgggtgacacgcggc

SEQ ID NO: 170395 - DNA, 234 bp, Homo sapiens; identical to SEQ ID NO: 83457
  chr11:134232149-134232383
  hypo

SEQ ID NO: 170396 - DNA, 30 bp, Homo sapiens
  chr11:134234318-134234348
  hypo
gcccgccctgctcagcggcctatgggaatt

SEQ ID NO: 170397 - DNA, 30 bp, Homo sapiens
  chr11:134241624-134241654
  hypo
ttagccccgtgttcccggcagggttacacc

SEQ ID NO: 170398 - DNA, 30 bp, Homo sapiens
  chr11:134241908-134241938
  hypo
cctgttagcactgcacgcgtgcatcgtctg

SEQ ID NO: 170399 - DNA, 30 bp, Homo sapiens
  chr11:134252363-134252393
  hypo
ggaggtgctggagcacggctgttctgtggg

SEQ ID NO: 170400 - DNA, 421 bp, Homo sapiens; identical to SEQ ID NO: 25928
  chr11:134252614-134253035
  hypo

SEQ ID NO: 170401 - DNA, 30 bp, Homo sapiens; identical to SEQ ID NO: 83459
  chr11:134253594-134253624
  hypo

SEQ ID NO: 170402 - DNA, 30 bp, Homo sapiens
  chr11:134257729-134257759
  hypo
caacccacccattgcggaagcaggtttgga

SEQ ID NO: 170403 - DNA, 31 bp, Homo sapiens; identical to SEQ ID NO: 83460
  chr11:134260004-134260035
  hypo

SEQ ID NO: 170404 - DNA, 163 bp, Homo sapiens; identical to SEQ ID NO: 49184
  chr11:134281376-134281539
  hypo

SEQ ID NO: 170405 - DNA, 47 bp, Homo sapiens; identical to SEQ ID NO: 49185
  chr11:134281595-134281642
  hypo

SEQ ID NO: 170406 - DNA, 174 bp, Homo sapiens; identical to SEQ ID NO: 49186
  chr11:134281706-134281880
  hypo

SEQ ID NO: 170407 - DNA, 833 bp, Homo sapiens; identical to SEQ ID NO: 121750
  chr11:134282100-134282933
  hypo

SEQ ID NO: 170408 - DNA, 217 bp, Homo sapiens; identical to SEQ ID NO: 83465
  chr11:134317567-134317784
  hypo

SEQ ID NO: 170409 - DNA, 58 bp, Homo sapiens
  chr11:134356382-134356440
  hypo
tggggtactgctgtgggcatgcgagtgcttgctccccggggcactgctgtggacatgt

SEQ ID NO: 170410 - DNA, 197 bp, Homo sapiens; identical to SEQ ID NO: 83466
  chr11:134378731-134378928
  hypo

SEQ ID NO: 170411 - DNA, 30 bp, Homo sapiens
  chr11:134388661-134388691
  hypo
cacggccgttccttgcgtgtgccccaagga

SEQ ID NO: 170412 - DNA, 30 bp, Homo sapiens
  chr11:134401245-134401275
  hypo
ctcacacgggtctggcggggggctggaggg

SEQ ID NO: 170413 - DNA, 330 bp, Homo sapiens; identical to SEQ ID NO: 83467
  chr11:134401568-134401898
  hypo

SEQ ID NO: 170414 - DNA, 404 bp, Homo sapiens
  chr11:134458219-134458623
  hypo
cgagtgctgcatctgcgatgtgaacctgtgctggattccctgctgagagctgcacctgtgatgtgaacctgtgctggattccgtgccgagagctgcacctgcgatgtgaacctgtgctggattccctgctgagagctgcacctgcgatgtgaacctgtgctggattccctgccacgtgctgcacctgcgatgtgaacctctgctggattccctgccgagtgctgcacctgcgatgtgaacctgtgctggattccctgccgagtgctgcacctgcgatgtgaacctgtgctggattccctgccgagagctgcacctgcgatgtgaacctgtgctggattccctgccacgtgctgcacctgcgatgtgaacctgtgctggattccatgccacgtgctgcacctgcg

SEQ ID NO: 170415 - DNA, 30 bp, Homo sapiens
  chr11:134500963-134500993
  hypo
taaaaatgagaggcgcggcctctgccattc

SEQ ID NO: 170416 - DNA, 30 bp, Homo sapiens
  chr11:134526372-134526402
  hypo
aaggttgagtcaagtcgctcggctgtgctg

SEQ ID NO: 170417 - DNA, 345 bp, Homo sapiens
  chr11:134526968-134527313
  hypo
tgagcccgagagccgcggagaacacgtggagctcttgcagtggcgaacacgtttcttcctaaaggagacacacagcaattttgctttccatgtccattcttgggattgtctttcgtgaatgagttaacggacgcagagaaagcactgagtcttcccagagggccagtgaggggccagctacgcaaggcttcccatccctggggcgcagcactcctgataccaggcagaggtgtgtccagcccggagcttgagcagcagcagcgcctcctgaccgactccatggggttggcctcagggcctcccaggacccgcccagcccggagaccagcccgcaggccacattcc

SEQ ID NO: 170418 - DNA, 34 bp, Homo sapiens; identical to SEQ ID NO: 83469
  chr11:134534371-134534405
  hypo

SEQ ID NO: 170419 - DNA, 235 bp, Homo sapiens
  chr11:134571548-134571783
  hypo
gtctgcagccgcctccggtggtcagctgctgcagagtctcctcatctcactcagggtcatgctatgcccgggcggtccacacccagtgccggggccccgaggcagcagaatgggagaaccctggggggaatgactcactccagagccttcccctgggtcctggcggccccgagagggaggacaaagctggagcacctgcagcagccagagaaagcgtgcccggcaatgcttcaag

SEQ ID NO: 170420 - DNA, 30 bp, Homo sapiens
  chr11:134598570-134598600
  hypo
gtcagctccatgacacgtgtgtgtggccct

SEQ ID NO: 170421 - DNA, 30 bp, Homo sapiens
  chr11:134598887-134598917
  hypo
cactctgggcttccacgcaccgggctctcc

SEQ ID NO: 170422 - DNA, 403 bp, Homo sapiens; identical to SEQ ID NO: 25931
  chr11:134608534-134608937
  hypo

SEQ ID NO: 170423 - DNA, 30 bp, Homo sapiens
  chr11:134682164-134682194
  hypo
cggtgaggtggctcacgcctgtcctcctag

SEQ ID NO: 170424 - DNA, 30 bp, Homo sapiens
  chr11:134786501-134786531
  hypo
agccaccccgccccacgcacctgctgccag

SEQ ID NO: 170425 - DNA, 33 bp, Homo sapiens
  chr11:134831336-134831369
  hypo
agatccaacgagagccgctgagtcacatctggc

SEQ ID NO: 170426 - DNA, 186 bp, Homo sapiens
  chr11:134852668-134852854
  hypo
acccactgtgggcttcgtaacattagatccacggacctcaccttgggtgagatgagacatacgtacccctattttaaaaataaaataaaatccatcggtgattctgccgcacagtcaaaattgaaaagcactggagcatcacttggacaactggtcagatcggaggatgtgcgtcaaggagagaag

SEQ ID NO: 170427 - DNA, 30 bp, Homo sapiens
  chr11:134853115-134853145
  hypo
aagttacactggacgcgtgctatgcagtcc

SEQ ID NO: 170428 - DNA, 186 bp, Homo sapiens; identical to SEQ ID NO: 83471
  chr12:287239-287425
  hypo

SEQ ID NO: 170429 - DNA, 41 bp, Homo sapiens; identical to SEQ ID NO: 83472
  chr12:287643-287684
  hypo

SEQ ID NO: 170430 - DNA, 30 bp, Homo sapiens; identical to SEQ ID NO: 83473
  chr12:299634-299664
  hypo

SEQ ID NO: 170431 - DNA, 30 bp, Homo sapiens; identical to SEQ ID NO: 25933
  chr12:316441-316471
  hypo

SEQ ID NO: 170432 - DNA, 96 bp, Homo sapiens
  chr12:318479-318575
  hypo
tagaccacgcggaaccgtttgtccgcaacctgccgcagacacagtacaactcctcagaatcctcccacggagggtggcacacggaatgtgttctgt

SEQ ID NO: 170433 - DNA, 30 bp, Homo sapiens; identical to SEQ ID NO: 25934
  chr12:328212-328242
  hypo

SEQ ID NO: 170434 - DNA, 170 bp, Homo sapiens
  chr12:334114-334284
  hypo
ccgttgtatttgtacggaatgtagatggtaccaaaaaaatcgctccaaggccagagttggcctccagttaccacctctgcgcccggagccctttctgtcaccctgcaatgactacactggcactggtttcagaatgccgctgacacacgccctcgcggcgcgtgaatgtt

SEQ ID NO: 170435 - DNA, 138 bp, Homo sapiens
  chr12:363088-363226
  hypo
gaaaatgttggcagacggttttttcatctgggctgagataggcaggaaggtgatttaaattccccgctggctatggacagtcctatgaccagaaccctctcccgctaccttcttcccacatcacgcctcctgcgttat

SEQ ID NO: 170436 - DNA, 30 bp, Homo sapiens
  chr12:383069-383099
  hypo
aggtcattctacgcacgtcgggaaaaccag

SEQ ID NO: 170437 - DNA, 272 bp, Homo sapiens
  chr12:417386-417658
  hypo
cctcttctgtagggtgcggtacaaagatggcatgccttgaaatcaagcaacctgggtacaaagcctggctcttgtacttttagactgttaatatggggtacaagtttcagaacgtccgttttctgaaaaatgagaatactaccaaccgtattttgctgttttacggattaaataagataacatatgaaagtgcctaacctggtaccttgcacaaggtaaacactcttaaagtattagtttcctatcacctcgtaattcattccctggggcaa

SEQ ID NO: 170438 - DNA, 30 bp, Homo sapiens
  chr12:515597-515627
  hypo
ggccggtgtttttaccgcagtgaacaagga

SEQ ID NO: 170439 - DNA, 30 bp, Homo sapiens; identical to SEQ ID NO: 83478
  chr12:543194-543224
  hypo

SEQ ID NO: 170440 - DNA, 30 bp, Homo sapiens; identical to SEQ ID NO: 25936
  chr12:551031-551061
  hypo

SEQ ID NO: 170441 - DNA, 30 bp, Homo sapiens
  chr12:562065-562095
  hypo
gtgaggcaccgtgcccggccaccaaactga

SEQ ID NO: 170442 - DNA, 31 bp, Homo sapiens
  chr12:562775-562806
  hypo
tccccagtccgggtggcggcagagctcaaag

SEQ ID NO: 170443 - DNA, 149 bp, Homo sapiens
  chr12:563164-563313
  hypo
ctaggttaatacggccgtgcgctccactcggccgggctgcctgcagcgctccccgctgtggattcaaccgtgttcaaggcaagggaagaacatccacgccccctttctcttttctttttctttttctttttgagacggagtctcgctct

SEQ ID NO: 170444 - DNA, 28 bp, Homo sapiens
  chr12:563552-563580
  hypo
ggcgcccggcatgaccatttctgttttc

SEQ ID NO: 170445 - DNA, 30 bp, Homo sapiens; identical to SEQ ID NO: 121757
  chr12:569311-569341
  hypo

SEQ ID NO: 170446 - DNA, 477 bp, Homo sapiens; identical to SEQ ID NO: 121758
  chr12:569664-570141
  hypo

SEQ ID NO: 170447 - DNA, 31 bp, Homo sapiens; identical to SEQ ID NO: 83483
  chr12:631679-631710
  hypo

SEQ ID NO: 170448 - DNA, 188 bp, Homo sapiens; identical to SEQ ID NO: 25937
  chr12:646783-646971
  hypo

SEQ ID NO: 170449 - DNA, 18 bp, Homo sapiens
  chr12:658056-658074
  hypo
agacgctgcctcaaaagc

SEQ ID NO: 170450 - DNA, 109 bp, Homo sapiens; identical to SEQ ID NO: 83486
  chr12:658732-658841
  hypo

SEQ ID NO: 170451 - DNA, 290 bp, Homo sapiens
  chr12:665734-666024
  hypo
gtgaacgtggaaaagcgtcaggaccagctacgtgggggtcgctacctcctggagcttgaactgttggaacaaggccagcgcgtggtgcggctctcggagtatgtgtctgcacgaggctggcagggcatcgatccagctggtggggaggaggtcgaggcccggaacctgcaaggcctggtctgggacccacacaaccgtaggagacaggtcctgaatacccgggcccaagagcccaagctgtgctggcctcagggtttctcctggagtcaccgagccgtggtccacttcgt

SEQ ID NO: 170452 - DNA, 218 bp, Homo sapiens
  chr12:666655-666873
  hypo
ccctcagccgaggtccgatgggcactcctgactcacctgggagctgggggtggaggcgctcatccgctcatctttgccttgtctgtgtttccttctcctgcctgaccccctggggtagtgaagaaccaggcacgctgggtacagcaattcatcaaagacatggaaaacctgttccaggtcaccggtgacccacacttcaacatcgtcatcactgacta

SEQ ID NO: 170453 - DNA, 92 bp, Homo sapiens
  chr12:667200-667292
  hypo
agtggaaactttgaacgctcagctggacttcaggctggcatagacctcgtgaaggtaaagggcctggatggggcctgcgagatggaattcaa

SEQ ID NO: 170454 - DNA, 30 bp, Homo sapiens
  chr12:667597-667627
  hypo
gcttctcctagacggcgacctgacctccta

SEQ ID NO: 170455 - DNA, 149 bp, Homo sapiens
  chr12:670521-670670
  hypo
ggcctggacgtggagcgtctctccctcaggaatttcttccatcatttccattccaagcgaggcatgtggagccgtcgccagatgaagacgctgtagccggagggtgtccgcggggcccagcactccccgctctggactagcagtggctc

SEQ ID NO: 170456 - DNA, 800 bp, Homo sapiens
  chr12:674437-675237
  hypo
cctgttttatgtgccccgaaggctgtaatgaaaacattgatgaccacagtgaagaagaccaagatggtggctgcgttgttgagctggttgagtcgccactgcttttctacctcattcaggttcagccgtgctgcagggaagtggagtggggggaaagggtcagagacggggccacagcacggagctgcccccacaacacccaccagagtttggagagaggggcccttcagaaacccatgtggcagaaatcaagggaggtggtcgtcatcgggctgagatgcctctgccctcgccaaccagtacaatggggcaccctagtgtgcttcatcccaccaggatttgggaacttaagctgggtcctgtaagcgtggggacgagtgctcatggagaagcggtgagcgagtgagtgagttagcagttagcgaggtgctggcgcagtcattcagcaggtactgcggagggtctgctccatgggataccaggagacaggacagggcgcctgccctcgcggggtggaagttggtctttgggcctctgttagcggagggctcactgcaggtcagcgtgtggttgcaaagctgcctgtgccaatgcagggtggcccaggggacacgtggggcctttctgccagccacgggtgccgaggcagaaggtctgactgcaggctgggctcctcaccaatgaccacgagcaggacaccgatgaccacctgcaggagcagagagaggctgatgagggtgaccagggtggtgtagtagtgagaggatggtccctgctccagcaccgccttcagccgcatg

SEQ ID NO: 170457 - DNA, 210 bp, Homo sapiens; identical to SEQ ID NO: 8506
  chr12:694939-695149
  hypo

SEQ ID NO: 170458 - DNA, 385 bp, Homo sapiens; identical to SEQ ID NO: 121760
  chr12:708873-709258
  hypo

SEQ ID NO: 170459 - DNA, 198 bp, Homo sapiens
  chr12:718160-718358
  hypo
ttcatgcacatacacggcgccacgctaggggctgtacgcacgcacggcgccacgcgctaggggctgaacgcacacgcacggcgccacgctaggggctgaacgcacgcacggcgccacgcgctaggtgctgaacgcgcacgcacggcgccacgctaggggctgtacgcgcacgcacggcgccacgcgctaggtgctgaa

SEQ ID NO: 170460 - DNA, 101 bp, Homo sapiens
  chr12:724131-724232
  hypo
tagcgcacaagcccacgtccctgacaccagccacaggaggattctgcactcccatggtctctctgaagagtcgggagagcggtttgtgtgaatgtgtaagg

SEQ ID NO: 170461 - DNA, 26 bp, Homo sapiens
  chr12:747868-747894
  hypo
ccgcgcccggccgacacttagtttta

SEQ ID NO: 170462 - DNA, 39 bp, Homo sapiens; identical to SEQ ID NO: 83497
  chr12:750706-750745
  hypo

SEQ ID NO: 170463 - DNA, 158 bp, Homo sapiens; identical to SEQ ID NO: 83498
  chr12:751044-751202
  hypo

SEQ ID NO: 170464 - DNA, 18 bp, Homo sapiens
  chr12:765250-765268
  hypo
cagggcgtagtggctcgc

SEQ ID NO: 170465 - DNA, 20 bp, Homo sapiens
  chr12:843655-843675
  hypo
tgagatggagtctcgcgctg

SEQ ID NO: 170466 - DNA, 28 bp, Homo sapiens
  chr12:849664-849692
  hypo
gcgtgagccaccgcgcccggctgcacaa

SEQ ID NO: 170467 - DNA, 23 bp, Homo sapiens
  chr12:854667-854690
  hypo
ttgttttttgagacagagtcccg

SEQ ID NO: 170468 - DNA, 40 bp, Homo sapiens
  chr12:885895-885935
  hypo
cagatcttaatgtgttcttgctctgcgtggtgtttgtacc

SEQ ID NO: 170469 - DNA, 26 bp, Homo sapiens
  chr12:886604-886630
  hypo
tgagccaccgcgcccagcctggaatt

SEQ ID NO: 170470 - DNA, 207 bp, Homo sapiens; identical to SEQ ID NO: 25944
  chr12:934132-934339
  hypo

SEQ ID NO: 170471 - DNA, 238 bp, Homo sapiens; identical to SEQ ID NO: 25945
  chr12:939092-939330
  hypo

SEQ ID NO: 170472 - DNA, 237 bp, Homo sapiens
  chr12:974282-974519
  hypo
gtggccgtagcatgtcggtttgtgttcccatctttctgctgttgcctctgtgtcccgcatctctcccagtgctcttccaccccaccgccagtactgtctgcacctctttctccttccctcctccggactgccccgaggaaacttttgccgaaaagctttctaaagcattggagagtgtcctgcctatgcactctgcctctcagcgcaagcaccgacgctccagcctgccttccctct

SEQ ID NO: 170473 - DNA, 70 bp, Homo sapiens
  chr12:1005678-1005748
  hypo
ggccgtcttctgacccggaggccgcttttttaagtagggatgtggatgatggttccggtagtccacactc

SEQ ID NO: 170474 - DNA, 30 bp, Homo sapiens
  chr12:1006759-1006789
  hypo
tcagggagaagacgacgacccactaaaagc

SEQ ID NO: 170475 - DNA, 21 bp, Homo sapiens
  chr12:1007361-1007382
  hypo
agtcattggttaggcacggtg

SEQ ID NO: 170476 - DNA, 320 bp, Homo sapiens
  chr12:1026087-1026407
  hypo
tcctccatccatcacgccttctaggtcctgtaactccatgagcaggaggagccaaacaatttcatgttctgtgttagtgaagttttgataaaaaggaatccttctttggttttgacttagggcagatgttctgtaaaatcgcatttgaatctttcctgggctgctgggtctgtctttgctgcctccttgtcctttttccacggaaatgagcacacacagtctctgtggaggtctgtaccttcccaaccctttctgccagggccacccctgcaaatcgcgctcgtcactgagggagcctcgggcacgctgtggcatcacga

SEQ ID NO: 170477 - DNA, 30 bp, Homo sapiens; identical to SEQ ID NO: 83505
  chr12:1036287-1036317
  hypo

SEQ ID NO: 170478 - DNA, 30 bp, Homo sapiens; identical to SEQ ID NO: 25948
  chr12:1041932-1041962
  hypo

SEQ ID NO: 170479 - DNA, 39 bp, Homo sapiens
  chr12:1073020-1073059
  hypo
gcagaactagagtgacgagggcagcggtactctttcaaa

SEQ ID NO: 170480 - DNA, 87 bp, Homo sapiens
  chr12:1079111-1079198
  hypo
ctgttgacagactttgcgtcagtgtgaagtgagacacattgtcttcatatatcccactccatttctggtgatataatttagggctgg

SEQ ID NO: 170481 - DNA, 30 bp, Homo sapiens; identical to SEQ ID NO: 25949
  chr12:1104437-1104467
  hypo

SEQ ID NO: 170482 - DNA, 85 bp, Homo sapiens
  chr12:1353961-1354046
  hypo
ggtgtgaaccagcacacctggccttatacttaatgttttgaatagtttatgtttaatctttatcagatgccgttttgatattcaa

SEQ ID NO: 170483 - DNA, 100 bp, Homo sapiens; identical to SEQ ID NO: 25950
  chr12:1411785-1411885
  hypo

SEQ ID NO: 170484 - DNA, 29 bp, Homo sapiens
  chr12:1463860-1463889
  hypo
ggctggagtgccgaagcgcagtgtcggct

SEQ ID NO: 170485 - DNA, 70 bp, Homo sapiens
  chr12:1476690-1476760
  hypo
tcacaacgctaattacggtctcttatttactagcaatagaagtctaatgttgtggcgttctcaaggattc

SEQ ID NO: 170486 - DNA, 30 bp, Homo sapiens
  chr12:1552732-1552762
  hypo
ctgccagcgttttggcggtgcttcgcagtg

SEQ ID NO: 170487 - DNA, 176 bp, Homo sapiens
  chr12:1553849-1554025
  hypo
ttcctataacttggacgatgaccaggcggcttgggagaatgagctgcagaagatgacccgggggcaggtgagcctctcactcaaactttgaaaagagcctgtgaaaatccagttgctgtgtaggttgatgcagtgggggctaccttggggaatccagttgccgtgtagttgatgca

SEQ ID NO: 170488 - DNA, 30 bp, Homo sapiens; identical to SEQ ID NO: 83512
  chr12:1602297-1602327
  hypo

SEQ ID NO: 170489 - DNA, 253 bp, Homo sapiens; identical to SEQ ID NO: 83513
  chr12:1605197-1605450
  hypo

SEQ ID NO: 170490 - DNA, 84 bp, Homo sapiens; identical to SEQ ID NO: 25952
  chr12:1607424-1607508
  hypo

SEQ ID NO: 170491 - DNA, 31 bp, Homo sapiens; identical to SEQ ID NO: 25953
  chr12:1608813-1608844
  hypo

SEQ ID NO: 170492 - DNA, 31 bp, Homo sapiens; identical to SEQ ID NO: 25954
  chr12:1609724-1609755
  hypo

SEQ ID NO: 170493 - DNA, 30 bp, Homo sapiens; identical to SEQ ID NO: 83517
  chr12:1612657-1612687
  hypo

SEQ ID NO: 170494 - DNA, 1656 bp, Homo sapiens; identical to SEQ ID NO: 121765
  chr12:1639107-1640763
  hypo

SEQ ID NO: 170495 - DNA, 30 bp, Homo sapiens; identical to SEQ ID NO: 83519
  chr12:1649998-1650028
  hypo

SEQ ID NO: 170496 - DNA, 39 bp, Homo sapiens
  chr12:1650723-1650762
  hypo
tgcaacaggtgctggctcaaccctcgccccaaaacctca

SEQ ID NO: 170497 - DNA, 158 bp, Homo sapiens
  chr12:1656341-1656499
  hypo
cttacctgttacagtcgtgatggaagcttttgtttccacaaaccagtaaattctccagtctccctcacagagaccctgaacactgcggtggagaggagactcgggtgtccgacactggatctgagcctctgccgtccgccctctgtcctctggtgcac

SEQ ID NO: 170498 - DNA, 219 bp, Homo sapiens; identical to SEQ ID NO: 83521
  chr12:1711557-1711776
  hypo

SEQ ID NO: 170499 - DNA, 141 bp, Homo sapiens; identical to SEQ ID NO: 25956
  chr12:1716711-1716852
  hypo

SEQ ID NO: 170500 - DNA, 55 bp, Homo sapiens; identical to SEQ ID NO: 25957
  chr12:1738020-1738075
  hypo

SEQ ID NO: 170501 - DNA, 30 bp, Homo sapiens; identical to SEQ ID NO: 83524
  chr12:1755053-1755083
  hypo

SEQ ID NO: 170502 - DNA, 30 bp, Homo sapiens
  chr12:1755307-1755337
  hypo
aaccagttcaagagcgtgcaggtggagcgc

SEQ ID NO: 170503 - DNA, 223 bp, Homo sapiens
  chr12:1766123-1766346
  hypo
ggagagatgcacaagaggctacgtgcatccaaacagcctcgcaatcagaccgcacgagatcatgcagctcacaaatctggacagacctgaaagatcgtatctcgaacgaagccactgaatgtcgctggctcccatgcaggcccgagcagggaacagccggcaaccacacagttgcacacaggctgctggctgtgccctaggaccggcccggaatccagctggg

SEQ ID NO: 170504 - DNA, 17 bp, Homo sapiens
  chr12:1840272-1840289
  hypo
ctggagtgcagtgatgc

SEQ ID NO: 170505 - DNA, 121 bp, Homo sapiens; identical to SEQ ID NO: 25959
  chr12:1840408-1840529
  hypo

SEQ ID NO: 170506 - DNA, 181 bp, Homo sapiens; identical to SEQ ID NO: 25960
  chr12:1840588-1840769
  hypo

SEQ ID NO: 170507 - DNA, 26 bp, Homo sapiens
  chr12:1867073-1867099
  hypo
ggactagtggatggacgaggagcaaa

SEQ ID NO: 170508 - DNA, 26 bp, Homo sapiens
  chr12:1867158-1867184
  hypo
tcttgggaccacgcgccatggctgcg

SEQ ID NO: 170509 - DNA, 30 bp, Homo sapiens; identical to SEQ ID NO: 25961
  chr12:1908288-1908318
  hypo

SEQ ID NO: 170510 - DNA, 30 bp, Homo sapiens
  chr12:1916737-1916767
  hypo
ccccagactctccgccgccctgtcttccac

SEQ ID NO: 170511 - DNA, 496 bp, Homo sapiens; identical to SEQ ID NO: 25962
  chr12:1943595-1944091
  hypo

SEQ ID NO: 170512 - DNA, 30 bp, Homo sapiens; identical to SEQ ID NO: 25963
  chr12:1946942-1946972
  hypo

SEQ ID NO: 170513 - DNA, 233 bp, Homo sapiens
  chr12:1948632-1948865
  hypo
taagccatggcaaaccgcagcacagggcagtgaacctgggttccaacgagaggcggtctgcgttcaaatcccagcctcattcattattagctgtggggctttgggcaagtaagttttctgtgtctcagtcccctcagctgtaaagtagagccagaaccatcgccttcactgggtcaccccaaggaccacatgggaggcagtccacagtgcccggcacacgctgaacacacaca

SEQ ID NO: 170514 - DNA, 30 bp, Homo sapiens
  chr12:1949231-1949261
  hypo
ggcatctcagtaaagcgcactctggttgaa

SEQ ID NO: 170515 - DNA, 71 bp, Homo sapiens; identical to SEQ ID NO: 83532
  chr12:1973181-1973252
  hypo

SEQ ID NO: 170516 - DNA, 30 bp, Homo sapiens; identical to SEQ ID NO: 25964
  chr12:1974799-1974829
  hypo

SEQ ID NO: 170517 - DNA, 30 bp, Homo sapiens
  chr12:1979689-1979719
  hypo
aaagagccatcaaaacgcatatcacaccca

SEQ ID NO: 170518 - DNA, 234 bp, Homo sapiens
  chr12:1980081-1980315
  hypo
gacagtgtaagagcacgtcacagagtactctagccctgtgttcctgaaatccagggtgcagggattcaagggcactggaggaacacgaggcaaagctgctctgaatgccagccgctggtgtgtgtgtgtatacgtgtgtgttgctggtggtgtgtacgcacgtgttgctggtgtgtgtgtacgtgtgtgctgctgttgtgtgcatatgtacacgtgtgttgctggtgtgtgtgt

SEQ ID NO: 170519 - DNA, 31 bp, Homo sapiens; identical to SEQ ID NO: 25965
  chr12:1980942-1980973
  hypo

SEQ ID NO: 170520 - DNA, 134 bp, Homo sapiens
  chr12:1987521-1987655
  hypo
tggtgttcagaaaggcgtatccgtgcactccaagctgccagagtccagggtggaggcgcattaggcctgctgtttgtgctgggcatctggagttgggcaggggtttgggggccacaggacggtcaaagatggca

SEQ ID NO: 170521 - DNA, 197 bp, Homo sapiens; identical to SEQ ID NO: 25966
  chr12:1992046-1992243
  hypo

SEQ ID NO: 170522 - DNA, 30 bp, Homo sapiens
  chr12:1996126-1996156
  hypo
tatgagataaatacccgggccgcaaacctt

SEQ ID NO: 170523 - DNA, 479 bp, Homo sapiens
  chr12:2017664-2018143
  hypo
cctcggcctctcccacgcggtgttggagggcgtgctaggattgcctccggtggagccccggccccgtttcctccacacgaccgggttcacacctgaacaccccccaggactgcgtcacggacatccccacgccaactcccacgccggactgcctcacggacatccccacgccaactcccacgccggactgcgtcacggacatccccacgccaactcccacgccggactgcgtcacggacatccccacgccaactcccacgccggactgcctcacggacatccccacgccaactcccacgccggacagcgttatggacatccccacgccaactcccacgccggactgcgtcacggacatccccacgccaactcccacgccggactgcgtcacggacatccccacgccaactcccacgccaggttcctgcaccccacacccggctcctcctcacgacactgtggcccgcgctggccttcca

SEQ ID NO: 170524 - DNA, 30 bp, Homo sapiens; identical to SEQ ID NO: 25968
  chr12:2018849-2018879
  hypo

SEQ ID NO: 170525 - DNA, 30 bp, Homo sapiens
  chr12:2023152-2023182
  hypo
gctgtgaggggcaggcggggcctcagctgt

SEQ ID NO: 170526 - DNA, 87 bp, Homo sapiens; identical to SEQ ID NO: 83539
  chr12:2023584-2023671
  hypo

SEQ ID NO: 170527 - DNA, 183 bp, Homo sapiens; identical to SEQ ID NO: 25969
  chr12:2023974-2024157
  hypo

SEQ ID NO: 170528 - DNA, 30 bp, Homo sapiens; identical to SEQ ID NO: 25970
  chr12:2024395-2024425
  hypo

SEQ ID NO: 170529 - DNA, 30 bp, Homo sapiens; identical to SEQ ID NO: 83542
  chr12:2040211-2040241
  hypo

SEQ ID NO: 170530 - DNA, 96 bp, Homo sapiens
  chr12:2040489-2040585
  hypo
ctgtgcgtccatccccgcggagctggtggcagagtggcggatgccgtggtggagcactgcatggagcactgacggatgacacgtgcacatggcgat

SEQ ID NO: 170531 - DNA, 230 bp, Homo sapiens; identical to SEQ ID NO: 83544
  chr12:2046015-2046245
  hypo

SEQ ID NO: 170532 - DNA, 31 bp, Homo sapiens
  chr12:2047230-2047261
  hypo
actggagcatggcccccgcaccacagtcatg

SEQ ID NO: 170533 - DNA, 30 bp, Homo sapiens
  chr12:2047973-2048003
  hypo
ttctcacattaggtacggcaactgatattc

SEQ ID NO: 170534 - DNA, 213 bp, Homo sapiens
  chr12:2048774-2048987
  hypo
gaataaaacacctgtcggctgtgcagtaatcgaagatctttttattatccgagaataagaagtgctattgaaacgcaaagctttatttattacaaatactcagcagggacgaattcccatagatactcttaacaacttggcaggggctcttctgactccttccaagattaagctcctcatctctgcgaacataaaactcgatctgctacacag

SEQ ID NO: 170535 - DNA, 30 bp, Homo sapiens
  chr12:2059444-2059474
  hypo
gagcagtgatgctcccggaggtggagtcaa

SEQ ID NO: 170536 - DNA, 79 bp, Homo sapiens; identical to SEQ ID NO: 83545
  chr12:2088759-2088838
  hypo

SEQ ID NO: 170537 - DNA, 461 bp, Homo sapiens; identical to SEQ ID NO: 121776
  chr12:2144045-2144506
  hypo

SEQ ID NO: 170538 - DNA, 697 bp, Homo sapiens; identical to SEQ ID NO: 49207
  chr12:2161356-2162053
  hypo

SEQ ID NO: 170539 - DNA, 1199 bp, Homo sapiens; identical to SEQ ID NO: 8516
  chr12:2162067-2163266
  hypo

SEQ ID NO: 170540 - DNA, 304 bp, Homo sapiens; identical to SEQ ID NO: 121779
  chr12:2163279-2163583
  hypo

SEQ ID NO: 170541 - DNA, 30 bp, Homo sapiens
  chr12:2191613-2191643
  hypo
gactgggccggctgtcgctccccagtttct

SEQ ID NO: 170542 - DNA, 210 bp, Homo sapiens
  chr12:2222747-2222957
  hypo
ctggtctggctgcttcggccacagtctctgggcagctgaagtgtcctcagatgccaacctcaccgcccacagtagcaccctcttatctgcggcttttcttgatcctgcggcacctggccaattgactagcggtaccacgtctcaaggtcatgcatgtgttctgggagattcaggtttgggccaggctgagctgatcgcttggcaaacctt

SEQ ID NO: 170543 - DNA, 156 bp, Homo sapiens; identical to SEQ ID NO: 83551
  chr12:2224503-2224659
  hypo

SEQ ID NO: 170544 - DNA, 30 bp, Homo sapiens; identical to SEQ ID NO: 83552
  chr12:2255903-2255933
  hypo

SEQ ID NO: 170545 - DNA, 30 bp, Homo sapiens
  chr12:2355783-2355813
  hypo
taggtcgtcaggtcccgtgagtcgcgagtg

SEQ ID NO: 170546 - DNA, 30 bp, Homo sapiens
  chr12:2379356-2379386
  hypo
ctcgtcctgagaaggcgagcttcgaaagct

SEQ ID NO: 170547 - DNA, 30 bp, Homo sapiens; identical to SEQ ID NO: 25977
  chr12:2483079-2483109
  hypo

SEQ ID NO: 170548 - DNA, 30 bp, Homo sapiens; identical to SEQ ID NO: 25978
  chr12:2493552-2493582
  hypo

SEQ ID NO: 170549 - DNA, 31 bp, Homo sapiens; identical to SEQ ID NO: 83555
  chr12:2516314-2516345
  hypo

SEQ ID NO: 170550 - DNA, 30 bp, Homo sapiens
  chr12:2562823-2562853
  hypo
cctttctcaccaccccgctgcagaaacctt

SEQ ID NO: 170551 - DNA, 30 bp, Homo sapiens
  chr12:2566150-2566180
  hypo
tctcagttacgtgcacgtgtggttctaccc

SEQ ID NO: 170552 - DNA, 30 bp, Homo sapiens
  chr12:2571073-2571103
  hypo
ggcccggacctaacacggcattcaaacggc

SEQ ID NO: 170553 - DNA, 30 bp, Homo sapiens
  chr12:2571444-2571474
  hypo
tcctcggcaccccctcggctcagctctcat

SEQ ID NO: 170554 - DNA, 21 bp, Homo sapiens
  chr12:2572363-2572384
  hypo
cgcacccggcctaaaagttgc

SEQ ID NO: 170555 - DNA, 30 bp, Homo sapiens
  chr12:2574939-2574969
  hypo
gttcacgaacccacccgggctggtggcaga

SEQ ID NO: 170556 - DNA, 109 bp, Homo sapiens; identical to SEQ ID NO: 83556
  chr12:2591270-2591379
  hypo

SEQ ID NO: 170557 - DNA, 91 bp, Homo sapiens; identical to SEQ ID NO: 25979
  chr12:2595421-2595512
  hypo

SEQ ID NO: 170558 - DNA, 58 bp, Homo sapiens; identical to SEQ ID NO: 83558
  chr12:2597994-2598052
  hypo

SEQ ID NO: 170559 - DNA, 251 bp, Homo sapiens; identical to SEQ ID NO: 25980
  chr12:2602367-2602618
  hypo

SEQ ID NO: 170560 - DNA, 30 bp, Homo sapiens; identical to SEQ ID NO: 25981
  chr12:2603318-2603348
  hypo

SEQ ID NO: 170561 - DNA, 158 bp, Homo sapiens; identical to SEQ ID NO: 25982
  chr12:2613882-2614040
  hypo

SEQ ID NO: 170562 - DNA, 30 bp, Homo sapiens
  chr12:2631738-2631768
  hypo
gagaaagccgggagtcgacagaacagggac

SEQ ID NO: 170563 - DNA, 31 bp, Homo sapiens; identical to SEQ ID NO: 83562
  chr12:2632289-2632320
  hypo

SEQ ID NO: 170564 - DNA, 30 bp, Homo sapiens
  chr12:2632750-2632780
  hypo
gggggatcactgacacgtggtgtctttgga

SEQ ID NO: 170565 - DNA, 37 bp, Homo sapiens; identical to SEQ ID NO: 83563
  chr12:2654535-2654572
  hypo

SEQ ID NO: 170566 - DNA, 427 bp, Homo sapiens
  chr12:2664071-2664498
  hypo
aaaagtgccagcctttaaaagcggatgaggttttgatccccatgaacctaaaattctgctcacaatcccggaggatagcaacaatagcaacaaaatcagtcttcaagtgtggtgcccaggcttatccatccagacctgtaacaaagcagacaagaaggctctgtccatttcgtgctcagaatgtgcccggatgccacagaaggacctgtagtccacgactgtgcttgaagcaggacctcctttcccagcacccccagcgccaatcctgcttcccagggtcatttcccttggagacgaacactcaggattaggtttccccagaggggagcttttcagagcccacttgcacttgtgacccgcttgcactgtgagcaagacaacgcctcatggcaaagggccggtggtcgtcatcaaggggcaccccaga

SEQ ID NO: 170567 - DNA, 30 bp, Homo sapiens
  chr12:2730580-2730610
  hypo
aaactgagagtggcgcgtgaaaaggactgt

SEQ ID NO: 170568 - DNA, 34 bp, Homo sapiens
  chr12:2743146-2743180
  hypo
gtgcaggggacacaccgcccggctccccggggcg

SEQ ID NO: 170569 - DNA, 30 bp, Homo sapiens
  chr12:2760635-2760665
  hypo
actcattaaagtgggcggccgccctcccat

SEQ ID NO: 170570 - DNA, 115 bp, Homo sapiens; identical to SEQ ID NO: 83566
  chr12:2777031-2777146
  hypo

SEQ ID NO: 170571 - DNA, 149 bp, Homo sapiens; identical to SEQ ID NO: 25983
  chr12:2778006-2778155
  hypo

SEQ ID NO: 170572 - DNA, 30 bp, Homo sapiens
  chr12:2779468-2779498
  hypo
ggcaggtgggaggctcgaatccgagtccct

SEQ ID NO: 170573 - DNA, 369 bp, Homo sapiens; identical to SEQ ID NO: 25984
  chr12:2788593-2788962
  hypo

SEQ ID NO: 170574 - DNA, 30 bp, Homo sapiens; identical to SEQ ID NO: 83569
  chr12:2797730-2797760
  hypo

SEQ ID NO: 170575 - DNA, 84 bp, Homo sapiens
  chr12:2798043-2798127
  hypo
attgcagtcaatatctgagcccgaaagaccctccctctcagggctgcaggagggctcgtgtgcggaaagccatgactgcacaag

SEQ ID NO: 170576 - DNA, 83 bp, Homo sapiens; identical to SEQ ID NO: 83570
  chr12:2846931-2847014
  hypo

SEQ ID NO: 170577 - DNA, 30 bp, Homo sapiens
  chr12:2872738-2872768
  hypo
agttccactcggtgacgagacagttctatg

SEQ ID NO: 170578 - DNA, 30 bp, Homo sapiens
  chr12:2921106-2921136
  hypo
attctggtttgagcacgcaccccgccccac

SEQ ID NO: 170579 - DNA, 554 bp, Homo sapiens; identical to SEQ ID NO: 83571
  chr12:2964258-2964812
  hypo

SEQ ID NO: 170580 - DNA, 207 bp, Homo sapiens; identical to SEQ ID NO: 83572
  chr12:2972287-2972494
  hypo

SEQ ID NO: 170581 - DNA, 30 bp, Homo sapiens; identical to SEQ ID NO: 25986
  chr12:2977818-2977848
  hypo

SEQ ID NO: 170582 - DNA, 90 bp, Homo sapiens; identical to SEQ ID NO: 25987
  chr12:2995015-2995105
  hypo

SEQ ID NO: 170583 - DNA, 17 bp, Homo sapiens
  chr12:3002514-3002531
  hypo
acggagtttcgctctcg

SEQ ID NO: 170584 - DNA, 16 bp, Homo sapiens
  chr12:3014650-3014666
  hypo
tataaaatgtctttat

SEQ ID NO: 170585 - DNA, 30 bp, Homo sapiens
  chr12:3021904-3021934
  hypo
tctgtgggaagtttgcgatcgggacatagc

SEQ ID NO: 170586 - DNA, 149 bp, Homo sapiens
  chr12:3030586-3030735
  hypo
ttgagccaccatgcccggcaagaactgttgttttctagatgccagatgaatgagtttagaatgacctatttgaggagctcttgattgttaaatcgtggcagaggtgaatcatgaagccgggaataggtagagagcgtccattcttccaa

SEQ ID NO: 170587 - DNA, 30 bp, Homo sapiens
  chr12:3067011-3067041
  hypo
acaggcgtgagccaccgggccccccatgat

SEQ ID NO: 170588 - DNA, 23 bp, Homo sapiens
  chr12:3073922-3073945
  hypo
ccaccgtgcgcctggccatgggg

SEQ ID NO: 170589 - DNA, 524 bp, Homo sapiens; identical to SEQ ID NO: 25991
  chr12:3103768-3104292
  hypo

SEQ ID NO: 170590 - DNA, 31 bp, Homo sapiens; identical to SEQ ID NO: 83579
  chr12:3116195-3116226
  hypo

SEQ ID NO: 170591 - DNA, 197 bp, Homo sapiens; identical to SEQ ID NO: 83580
  chr12:3118650-3118847
  hypo

SEQ ID NO: 170592 - DNA, 31 bp, Homo sapiens; identical to SEQ ID NO: 83581
  chr12:3119177-3119208
  hypo

SEQ ID NO: 170593 - DNA, 225 bp, Homo sapiens; identical to SEQ ID NO: 49220
  chr12:3129380-3129605
  hypo

SEQ ID NO: 170594 - DNA, 31 bp, Homo sapiens; identical to SEQ ID NO: 83583
  chr12:3131347-3131378
  hypo

SEQ ID NO: 170595 - DNA, 37 bp, Homo sapiens; identical to SEQ ID NO: 83584
  chr12:3147029-3147066
  hypo

SEQ ID NO: 170596 - DNA, 30 bp, Homo sapiens
  chr12:3149296-3149326
  hypo
ggacactactcttaccgcatccaccggtcc

SEQ ID NO: 170597 - DNA, 31 bp, Homo sapiens; identical to SEQ ID NO: 83585
  chr12:3181109-3181140
  hypo

SEQ ID NO: 170598 - DNA, 1059 bp, Homo sapiens; identical to SEQ ID NO: 121796
  chr12:3186011-3187070
  hypo

SEQ ID NO: 170599 - DNA, 47 bp, Homo sapiens; identical to SEQ ID NO: 83587
  chr12:3215226-3215273
  hypo

SEQ ID NO: 170600 - DNA, 30 bp, Homo sapiens
  chr12:3255150-3255180
  hypo
gcacgcggggcctggcggtggccttccacc

SEQ ID NO: 170601 - DNA, 99 bp, Homo sapiens; identical to SEQ ID NO: 83588
  chr12:3266174-3266273
  hypo

SEQ ID NO: 170602 - DNA, 31 bp, Homo sapiens; identical to SEQ ID NO: 83589
  chr12:3292083-3292114
  hypo

SEQ ID NO: 170603 - DNA, 179 bp, Homo sapiens; identical to SEQ ID NO: 25997
  chr12:3302734-3302913
  hypo

SEQ ID NO: 170604 - DNA, 184 bp, Homo sapiens; identical to SEQ ID NO: 83591
  chr12:3316790-3316974
  hypo

SEQ ID NO: 170605 - DNA, 30 bp, Homo sapiens
  chr12:3324411-3324441
  hypo
gtgtccgtgcaccagcgccgcaggccatag

SEQ ID NO: 170606 - DNA, 304 bp, Homo sapiens
  chr12:3324916-3325220
  hypo
tttgctgctctctccaggctccgtggtgggcccggcacagcctgtatcggagtggagaacgtaggttggtccagagcacgttccaccgggacctctccgtctggagcctgtatcagagtggagaacgtaggttggtccagagcacgttccaccgggacctctctgtctggcttgctcaggctcatttcttctgtctggggacttacggggatgagcatgaaaacctgtgcatcctggaatcacagggacacggctccatgttcccagcggttgatccattatccctggtcgccctgcttccttc

SEQ ID NO: 170607 - DNA, 30 bp, Homo sapiens
  chr12:3332924-3332954
  hypo
gggcatgaattcagccgtggcggcggcagc

SEQ ID NO: 170608 - DNA, 46 bp, Homo sapiens; identical to SEQ ID NO: 83592
  chr12:3333940-3333986
  hypo

SEQ ID NO: 170609 - DNA, 27 bp, Homo sapiens
  chr12:3344031-3344058
  hypo
tataggtaagtgaggccgggcgtggtg

SEQ ID NO: 170610 - DNA, 31 bp, Homo sapiens; identical to SEQ ID NO: 83594
  chr12:3361965-3361996
  hypo

SEQ ID NO: 170611 - DNA, 45 bp, Homo sapiens; identical to SEQ ID NO: 83595
  chr12:3369200-3369245
  hypo

SEQ ID NO: 170612 - DNA, 110 bp, Homo sapiens; identical to SEQ ID NO: 83596
  chr12:3370678-3370788
  hypo

SEQ ID NO: 170613 - DNA, 283 bp, Homo sapiens; identical to SEQ ID NO: 83597
  chr12:3389521-3389804
  hypo

SEQ ID NO: 170614 - DNA, 112 bp, Homo sapiens; identical to SEQ ID NO: 83598
  chr12:3390416-3390528
  hypo

SEQ ID NO: 170615 - DNA, 434 bp, Homo sapiens
  chr12:3392260-3392694
  hypo
tggtaagaagtacgacgcatgagcgggctggccgggagtgcccaccccgccctgctgccctgtggagggaagaggattgagctttgtgtcacctgcctgcgctctccagatatgacccctgcacccaccccccacagcctgccctaccccacctaccctgcctcagcctcggacttctcagtgggtggagtgccagggaggaggaggcacacggagacctggggctcggggcccctggattcctgcatctgcatatgcgtatttgccaaagacgacagggtgggctggggtgcgctccggaggaacccccggcactgatgggcttctgcccctgcccttcctcacactgacactttgtccccacatggggtggggagcagagtgcccgccccgtggagataccgccccagcgggggctgcgacatccatggcca

SEQ ID NO: 170616 - DNA, 30 bp, Homo sapiens
  chr12:3392995-3393025
  hypo
gatggggcgcgcctgcgccctcagaacgtg

SEQ ID NO: 170617 - DNA, 136 bp, Homo sapiens; identical to SEQ ID NO: 26002
  chr12:3409752-3409888
  hypo

SEQ ID NO: 170618 - DNA, 431 bp, Homo sapiens
  chr12:3414072-3414503
  hypo
gagggcagggagtcacgcggcctcacacatccctgtgtctctgtctgtgtgtgctggcgccgcacgactgctgggccacttgcttgtaaaatggggccaacaaaaggacctgcgccctgggccatcgtgcggactgaaagaggtgattcatggaaagcaattagaagagagcctggcgcagcacccgcagttaatgagagacacttttgtgatcatcgtcgtgtgaatgcaggtgcgcgtgcccgtgtcatttacatccatggggtgctgctgggaggcctgacgctagccctggctctgcagccactgctttctgggggtcggtctcctgcctgagatgcaggttggggttctaactgttcccggcctgtgtgagggcctgcgttcgcgtgcactggtgccctgcaggtcttggtcggtgacaccgcctc

SEQ ID NO: 170619 - DNA, 30 bp, Homo sapiens
  chr12:3420029-3420059
  hypo
caggctgttagcacccgccagtgctgcaaa

SEQ ID NO: 170620 - DNA, 153 bp, Homo sapiens
  chr12:3420372-3420525
  hypo
tgctcatctggatcccgcactgaggctggctagaactcccgggcagtgggccgggctgttgggcctttagctgtgtgacagcacagatgccaacaaatccacctttgccccgctaccctgcatttacccagcgtttcccggctccctccgtgc

SEQ ID NO: 170621 - DNA, 31 bp, Homo sapiens; identical to SEQ ID NO: 8527
  chr12:3474950-3474981
  hypo

SEQ ID NO: 170622 - DNA, 640 bp, Homo sapiens; identical to SEQ ID NO: 121799
  chr12:3474997-3475637
  hypo

SEQ ID NO: 170623 - DNA, 329 bp, Homo sapiens
  chr12:3562708-3563037
  hypo
ccagacgctgcattccgcatgccatcgtgaccttgaagtagggctgagaatgaggtgtctgggtcaggaactggtgagcgcggtcaggggacacccttaggagaggagcttgcccttcacagccagggcaaatgctggggcgcagccatgctggctgtctcctcgtctgttctgcccacacatctcctgcggcaccctgtggtctgtgtcctgacgtggcccgactgtggacccccttgtcctcctgcccgctgtgtctatttctcagctcctgctatgctaggtctgggcttccgacgccggccctgctccggcgattgaaaatgact

SEQ ID NO: 170624 - DNA, 760 bp, Homo sapiens; identical to SEQ ID NO: 121800
  chr12:3600022-3600782
  hypo

SEQ ID NO: 170625 - DNA, 52 bp, Homo sapiens; identical to SEQ ID NO: 49226
  chr12:3600974-3601026
  hypo

SEQ ID NO: 170626 - DNA, 279 bp, Homo sapiens; identical to SEQ ID NO: 49227
  chr12:3601062-3601341
  hypo

SEQ ID NO: 170627 - DNA, 1339 bp, Homo sapiens; identical to SEQ ID NO: 49228
  chr12:3601377-3602716
  hypo

SEQ ID NO: 170628 - DNA, 139 bp, Homo sapiens; identical to SEQ ID NO: 49229
  chr12:3602864-3603003
  hypo

SEQ ID NO: 170629 - DNA, 31 bp, Homo sapiens; identical to SEQ ID NO: 26011
  chr12:3747307-3747338
  hypo

SEQ ID NO: 170630 - DNA, 30 bp, Homo sapiens
  chr12:3761131-3761161
  hypo
acgggacatgctctccgggccccagcatgc

SEQ ID NO: 170631 - DNA, 30 bp, Homo sapiens; identical to SEQ ID NO: 26012
  chr12:3833981-3834011
  hypo

SEQ ID NO: 170632 - DNA, 30 bp, Homo sapiens; identical to SEQ ID NO: 26013
  chr12:3841524-3841554
  hypo

SEQ ID NO: 170633 - DNA, 116 bp, Homo sapiens; identical to SEQ ID NO: 26014
  chr12:3901111-3901227
  hypo

SEQ ID NO: 170634 - DNA, 30 bp, Homo sapiens; identical to SEQ ID NO: 26015
  chr12:3919423-3919453
  hypo

SEQ ID NO: 170635 - DNA, 30 bp, Homo sapiens
  chr12:3972823-3972853
  hypo
atacaaggttccaagcgtcccttcccggtg

SEQ ID NO: 170636 - DNA, 30 bp, Homo sapiens
  chr12:3973215-3973245
  hypo
aaccccagcctgttgcgttaacccccttcc

SEQ ID NO: 170637 - DNA, 30 bp, Homo sapiens
  chr12:3988406-3988436
  hypo
atgagccactgcgcccggcgcatggagatc

SEQ ID NO: 170638 - DNA, 37 bp, Homo sapiens
  chr12:3998557-3998594
  hypo
gtgagccactgcacccggccctcctttctctaaattt

SEQ ID NO: 170639 - DNA, 23 bp, Homo sapiens
  chr12:4023339-4023362
  hypo
aaacaaacaaaaaaacggagtct

SEQ ID NO: 170640 - DNA, 93 bp, Homo sapiens
  chr12:4033269-4033362
  hypo
agccacgggggcggccgtggtgctggcagatgaaccatgccaatatggagggagcgagggacagattttaataagccacggtgaggacggtgg

SEQ ID NO: 170641 - DNA, 223 bp, Homo sapiens
  chr12:4060806-4061029
  hypo
ttccgtgacttgcatcgtatccctgtaaaccaggcaaggatttggggaccaagcccattcacgcccgcacctcaggtgatctcgtgcctgagaattcacaaagaatgccctcccctctcttcactgcatcctgtctctagagcccgcgtcactgcatcttcccacctccctggacacggccttaacctcatttttttctctggggcaccgctgcagttcgggc

SEQ ID NO: 170642 - DNA, 29 bp, Homo sapiens
  chr12:4079022-4079051
  hypo
tttttttttttttttttgagacggagtct

SEQ ID NO: 170643 - DNA, 30 bp, Homo sapiens; identical to SEQ ID NO: 83615
  chr12:4234148-4234178
  hypo

SEQ ID NO: 170644 - DNA, 30 bp, Homo sapiens
  chr12:4246931-4246961
  hypo
ccagagtaagttgcgcgatatactgttaac

SEQ ID NO: 170645 - DNA, 30 bp, Homo sapiens
  chr12:4303803-4303833
  hypo
cgctttcctcccctccgcacctccctgcta

SEQ ID NO: 170646 - DNA, 138 bp, Homo sapiens
  chr12:4304032-4304170
  hypo
cactatttcctgtgcactcatcgagtgcggctgggacaccaactatgaccgagatgcgctccctgcccttggaaagccccccagtcccatggaggagtaagaaacccatgggggaggaagaaagagaggtgagggctg

SEQ ID NO: 170647 - DNA, 172 bp, Homo sapiens; identical to SEQ ID NO: 83617
  chr12:4309609-4309781
  hypo

SEQ ID NO: 170648 - DNA, 66 bp, Homo sapiens; identical to SEQ ID NO: 83618
  chr12:4362283-4362349
  hypo

SEQ ID NO: 170649 - DNA, 30 bp, Homo sapiens; identical to SEQ ID NO: 49233
  chr12:4368336-4368366
  hypo

SEQ ID NO: 170650 - DNA, 4832 bp, Homo sapiens; identical to SEQ ID NO: 121811
  chr12:4377788-4382620
  hypo

SEQ ID NO: 170651 - DNA, 30 bp, Homo sapiens
  chr12:4392482-4392512
  hypo
attcctgagccagagcgccacctttggggc

SEQ ID NO: 170652 - DNA, 30 bp, Homo sapiens
  chr12:4392892-4392922
  hypo
gggaggcgggaatgtcgggtgttcctggtt

SEQ ID NO: 170653 - DNA, 30 bp, Homo sapiens; identical to SEQ ID NO: 83622
  chr12:4405534-4405564
  hypo

SEQ ID NO: 170654 - DNA, 154 bp, Homo sapiens
  chr12:4433844-4433998
  hypo
tgcggccgctggcacgcactgtacagctgcgtcagctgctcgcaggacacgtcccgtcccgcagctggtccaagtctgtgccgcggtaggtgagtttgcggaaggtccgcttcttctgctctacctcggccatcttgtcggatcctcagaaaag

SEQ ID NO: 170655 - DNA, 30 bp, Homo sapiens; identical to SEQ ID NO: 49238
  chr12:4492593-4492623
  hypo

SEQ ID NO: 170656 - DNA, 30 bp, Homo sapiens; identical to SEQ ID NO: 83625
  chr12:4518026-4518056
  hypo

SEQ ID NO: 170657 - DNA, 39 bp, Homo sapiens
  chr12:4534347-4534386
  hypo
gagccaccgcgctcggcccacaaacgtggacttctttcc

SEQ ID NO: 170658 - DNA, 700 bp, Homo sapiens
  chr12:4554340-4555040
  hypo
gcatgagcccaaacccccaagcgtcccgactggctgcagctggcactcactgtaggggttctcctcgtgggtcccgctgatccggccgtcggggagcacctggaggtgaaagccgatgcccacgttgcagtagagcctccgctgccgcttgatccccaccaaatagccactttcccagttcaccccggcaatctctccagctagcccggcgcgagacctggacagcagggtgccccagcccctcgagtccagcagcgtgttgttggcacgggtgcctgcaggcgagggcaccaccatgcccactaggatgcctaggaagacgagagcccacagcgtgccctgcagacgtcctgctccccgggacatagtgatgaacagtttctgtcccagggccatccaccttgcctctcaggcacgtggtcagaattaatggccctaaaaataccgcccttcttgtttttctccctccggcatggcggcaggggcttatttttggaaggcagatgaaggctgctgacatgaaaccaaagcctccatcgggcactcgggttgagagcagagggacccaggctgagccgcggccggtagagaccatggctcggggacgctctctagctcgcccgcttgctccgtccctagttgatgatatttgatttgacctatctttatagttgcttcagcagcccggccctcccctcca

SEQ ID NO: 170659 - DNA, 30 bp, Homo sapiens
  chr12:4671916-4671946
  hypo
cccagcccatatgcccgggcacctctgtgc

SEQ ID NO: 170660 - DNA, 224 bp, Homo sapiens; identical to SEQ ID NO: 83627
  chr12:4672160-4672384
  hypo

SEQ ID NO: 170661 - DNA, 170 bp, Homo sapiens; identical to SEQ ID NO: 83628
  chr12:4734866-4735036
  hypo

SEQ ID NO: 170662 - DNA, 293 bp, Homo sapiens
  chr12:4737610-4737903
  hypo
tgttttcagagccatcgatcttctcattgatctctttgcgggccatggctatgactagattcgtgaggcggttagcatagaaggaaacttcatctactgaactcccgttgccaagttgggccctggggccctggcaaggaatctctttgtgagtcatctcaaaatgcaatctttctggagtgcccttggtggtggtgttgtaatagtctacagagaaacctttgtgtgggtctcctgagttggacgtttccccaccaaatgattctccgggtttgaaccgaacatcttggaac

SEQ ID NO: 170663 - DNA, 43 bp, Homo sapiens; identical to SEQ ID NO: 83629
  chr12:4810315-4810358
  hypo

SEQ ID NO: 170664 - DNA, 30 bp, Homo sapiens
  chr12:4810934-4810964
  hypo
taaatcagctacattcgcaatcaagccaag

SEQ ID NO: 170665 - DNA, 102 bp, Homo sapiens; identical to SEQ ID NO: 83630
  chr12:4872383-4872485
  hypo

SEQ ID NO: 170666 - DNA, 30 bp, Homo sapiens; identical to SEQ ID NO: 49241
  chr12:4918321-4918351
  hypo

SEQ ID NO: 170667 - DNA, 125 bp, Homo sapiens; identical to SEQ ID NO: 8545
  chr12:4918557-4918682
  hypo

SEQ ID NO: 170668 - DNA, 175 bp, Homo sapiens; identical to SEQ ID NO: 8546
  chr12:4918713-4918888
  hypo

SEQ ID NO: 170669 - DNA, 584 bp, Homo sapiens; identical to SEQ ID NO: 121823
  chr12:4920224-4920808
  hypo

SEQ ID NO: 170670 - DNA, 18 bp, Homo sapiens
  chr12:4991476-4991494
  hypo
ttttttttcctttttttg

SEQ ID NO: 170671 - DNA, 1017 bp, Homo sapiens; identical to SEQ ID NO: 8548
  chr12:5018017-5019034
  hypo

SEQ ID NO: 170672 - DNA, 658 bp, Homo sapiens; identical to SEQ ID NO: 8549
  chr12:5019084-5019742
  hypo

SEQ ID NO: 170673 - DNA, 520 bp, Homo sapiens; identical to SEQ ID NO: 49247
  chr12:5019793-5020313
  hypo

SEQ ID NO: 170674 - DNA, 30 bp, Homo sapiens
  chr12:5074066-5074096
  hypo
gagagctcattctcacgatgctccagagag

SEQ ID NO: 170675 - DNA, 45 bp, Homo sapiens; identical to SEQ ID NO: 83639
  chr12:5087445-5087490
  hypo

SEQ ID NO: 170676 - DNA, 122 bp, Homo sapiens
  chr12:5208522-5208644
  hypo
gacagcggagggctgcgaagtgcatcggcgatgcacatctgccatgcgcgagtgcagggatgggcaacagttccagcctggccctctgcaccttagatgctttttctcgcagcgtgcccagc

SEQ ID NO: 170677 - DNA, 41 bp, Homo sapiens; identical to SEQ ID NO: 83640
  chr12:5231584-5231625
  hypo

SEQ ID NO: 170678 - DNA, 361 bp, Homo sapiens; identical to SEQ ID NO: 83641
  chr12:5252232-5252593
  hypo

SEQ ID NO: 170679 - DNA, 121 bp, Homo sapiens; identical to SEQ ID NO: 83642
  chr12:5252652-5252773
  hypo

SEQ ID NO: 170680 - DNA, 30 bp, Homo sapiens
  chr12:5312877-5312907
  hypo
agaaggctcttctctcgcaggtttgggaat

SEQ ID NO: 170681 - DNA, 87 bp, Homo sapiens
  chr12:5319954-5320041
  hypo
agccaaggcatttatgccccccggggctcccttctgtcatccctcctgctctgcacggcaacagcactgctccgcgcccactgcctg

SEQ ID NO: 170682 - DNA, 123 bp, Homo sapiens; identical to SEQ ID NO: 83644
  chr12:5323918-5324041
  hypo

SEQ ID NO: 170683 - DNA, 154 bp, Homo sapiens; identical to SEQ ID NO: 83645
  chr12:5335902-5336056
  hypo

SEQ ID NO: 170684 - DNA, 30 bp, Homo sapiens
  chr12:5336582-5336612
  hypo
tggcttctatatccacgcggcaggagggcc

SEQ ID NO: 170685 - DNA, 92 bp, Homo sapiens
  chr12:5344277-5344369
  hypo
tgtcttccctgcccccgcatagatgattgctacatttgtgccttttattattattattattattattattgttatatatatatattttttga

SEQ ID NO: 170686 - DNA, 27 bp, Homo sapiens
  chr12:5370550-5370577
  hypo
gacctttcaaaaaacatttaccggctg

SEQ ID NO: 170687 - DNA, 30 bp, Homo sapiens
  chr12:5380223-5380253
  hypo
atacaatgtgcgtttcgccatagcttctcc

SEQ ID NO: 170688 - DNA, 43 bp, Homo sapiens; identical to SEQ ID NO: 83647
  chr12:5384589-5384632
  hypo

SEQ ID NO: 170689 - DNA, 87 bp, Homo sapiens; identical to SEQ ID NO: 83648
  chr12:5435948-5436035
  hypo

SEQ ID NO: 170690 - DNA, 86 bp, Homo sapiens; identical to SEQ ID NO: 83649
  chr12:5437111-5437197
  hypo

SEQ ID NO: 170691 - DNA, 30 bp, Homo sapiens
  chr12:5493770-5493800
  hypo
cgcacgtgtttctcccgtccgtctcctctc

SEQ ID NO: 170692 - DNA, 30 bp, Homo sapiens
  chr12:5503345-5503375
  hypo
aaaaaaaaaattctgcgagtgacaggaggg

SEQ ID NO: 170693 - DNA, 31 bp, Homo sapiens; identical to SEQ ID NO: 83650
  chr12:5513315-5513346
  hypo

SEQ ID NO: 170694 - DNA, 31 bp, Homo sapiens
  chr12:5513405-5513436
  hypo
tctcgctgtgtcctcacgtggccttttttct

SEQ ID NO: 170695 - DNA, 37 bp, Homo sapiens
  chr12:5532610-5532647
  hypo
ctggggcggcagagagagactccgtctcaaaaaaaaa

SEQ ID NO: 170696 - DNA, 30 bp, Homo sapiens; identical to SEQ ID NO: 121832
  chr12:5539646-5539676
  hypo

SEQ ID NO: 170697 - DNA, 30 bp, Homo sapiens; identical to SEQ ID NO: 121833
  chr12:5539887-5539917
  hypo

SEQ ID NO: 170698 - DNA, 2100 bp, Homo sapiens; identical to SEQ ID NO: 49252
  chr12:5540931-5543031
  hypo

SEQ ID NO: 170699 - DNA, 30 bp, Homo sapiens
  chr12:5563302-5563332
  hypo
ggttgcggtcagggccgtgtttcatctgaa

SEQ ID NO: 170700 - DNA, 30 bp, Homo sapiens
  chr12:5568854-5568884
  hypo
gtggctgtggtttcccggaaaaggccttgg

SEQ ID NO: 170701 - DNA, 30 bp, Homo sapiens
  chr12:5576929-5576959
  hypo
ttttttaaatgccgccgtcatttcaaaaca

SEQ ID NO: 170702 - DNA, 39 bp, Homo sapiens; identical to SEQ ID NO: 83652
  chr12:5579367-5579406
  hypo

SEQ ID NO: 170703 - DNA, 217 bp, Homo sapiens
  chr12:5589466-5589683
  hypo
gaaaaacaatcccaccggcctttatttaccacagtgggtagcctcgggaggagggggagctgggtgggaaaggaagacaatagaatgctgtgttgccttgctgtaaaagcttgctctaagcaaataaagtggcaagctcagtcagagccctgctcaattagccccagtgcttaaaggagggtctccctgcagctgttggcggcgggcgggctggagc

SEQ ID NO: 170704 - DNA, 27 bp, Homo sapiens
  chr12:5601169-5601196
  hypo
gtacccggcctttctcctcttctttaa

SEQ ID NO: 170705 - DNA, 30 bp, Homo sapiens; identical to SEQ ID NO: 83654
  chr12:5602378-5602408
  hypo

SEQ ID NO: 170706 - DNA, 30 bp, Homo sapiens; identical to SEQ ID NO: 83655
  chr12:5602717-5602747
  hypo

SEQ ID NO: 170707 - DNA, 203 bp, Homo sapiens; identical to SEQ ID NO: 83656
  chr12:5603079-5603282
  hypo

SEQ ID NO: 170708 - DNA, 501 bp, Homo sapiens
  chr12:5603566-5604067
  hypo
ctgcccaaagctgaggctccccgagagccggagcggggagggcccgccaagtcagcattccagccggtgattgcaatggacaccgaactgctgcgacaacagagacgctacaactcaccgcgggtcctgctgagcgacagcacccccttggagcccccgcccttgtatctcatggaggattacgtgggcagccccgtggtggcgaacagaacatcacggcggaaacggtacgcggagcataagagtcaccgaggggagtactcggtatgtgacagtgagagtctgtgggtgaccgacaagtcatcggccatcgacattcggggacaccaggtcacggtgctgggggagatcaaaacgggcaactctcccgtcaaacaatatttttatgaaacgcgatgtaaggaagccaggccggtcaaaaacggttgcaggggtattgatgataaacactggaactctcagtgcaaaacatcccaaacctacgtccgagcactgacttca

SEQ ID NO: 170709 - DNA, 322 bp, Homo sapiens
  chr12:5632711-5633033
  hypo
gtagagggaggcttgagaacacgggccttgaacatcggagttggtgtggccatagccaccggaccctggaagaggcgcgtaacagattctccccgccagcccctgagtgagtgcagctctgccaactcttgatgttggcccagggaaactgttttcagacttctggcccccacaactgcgagagaataaattacgttgttttaagctactaaggttttagtaatttattacggcagccacaggaaactaatacagtgttttccctgggcccggcccggccttggaactgtgtcgtcctatcggtaccctggacccataagag

SEQ ID NO: 170710 - DNA, 120 bp, Homo sapiens; identical to SEQ ID NO: 83658
  chr12:5672754-5672874
  hypo

SEQ ID NO: 170711 - DNA, 109 bp, Homo sapiens; identical to SEQ ID NO: 83659
  chr12:5674727-5674836
  hypo

SEQ ID NO: 170712 - DNA, 126 bp, Homo sapiens
  chr12:5687505-5687631
  hypo
gtggggcctctaagtggggcacgtaccgatatctttggttcttacagcatccggccgtctcagctctgtaacaaacttctttgcatcgagccgcacttcaatgacgttgttgaggagggcaaacac

SEQ ID NO: 170713 - DNA, 175 bp, Homo sapiens
  chr12:5697255-5697430
  hypo
caagcacaccagaggcggggggcagctttggtttcattgctctcatttttgttcaaagtccaagacatgggcccttctggaacgggggaggtctagccagtcgggaaggaaggaggaagcctcacttcattccatccttccatgtcaagcacaccagaggcggggggcagctttg

SEQ ID NO: 170714 - DNA, 30 bp, Homo sapiens
  chr12:5702100-5702130
  hypo
ttaacatctggtctccgagaggaacctgcc

SEQ ID NO: 170715 - DNA, 76 bp, Homo sapiens
  chr12:5713301-5713377
  hypo
attaaaaagtggatggtggatcgtacacagaagggaaggacaatgaggaatcagcgatgattctcatggtcttagg

SEQ ID NO: 170716 - DNA, 129 bp, Homo sapiens; identical to SEQ ID NO: 26032
  chr12:5726938-5727067
  hypo

SEQ ID NO: 170717 - DNA, 30 bp, Homo sapiens
  chr12:5841993-5842023
  hypo
gggacacacaacactcgttatcacactgaa

SEQ ID NO: 170718 - DNA, 30 bp, Homo sapiens
  chr12:5937549-5937579
  hypo
gtaatggggccatctcgcccacctgctcgg

SEQ ID NO: 170719 - DNA, 203 bp, Homo sapiens
  chr12:5951754-5951957
  hypo
catgactcactctttcgttcgctaccagcatttatttagtgcctgctgtacaccaggcactgttgtgggtgctgctgataaaacggtttagattaacttgctattgtaacacattttcatatttttaacgtcactgtttctgggccctgagtcacacttgtccactgaaaggcctccacgtagtcaaccgggcctggggtctt

SEQ ID NO: 170720 - DNA, 30 bp, Homo sapiens
  chr12:6022593-6022623
  hypo
ggctcacggccctggcgccacacgctcctt

SEQ ID NO: 170721 - DNA, 162 bp, Homo sapiens; identical to SEQ ID NO: 26033
  chr12:6030342-6030504
  hypo

SEQ ID NO: 170722 - DNA, 61 bp, Homo sapiens
  chr12:6030958-6031019
  hypo
aggtgaaggggcctgtgtacacgcgtatctacccgagtgcgctctaacacacacaccccct

SEQ ID NO: 170723 - DNA, 30 bp, Homo sapiens
  chr12:6034935-6034965
  hypo
tcataactgcaatgccgtgagggtgggggc

SEQ ID NO: 170724 - DNA, 21 bp, Homo sapiens
  chr12:6141391-6141412
  hypo
gaaaaacagagtgtgtcgctt

SEQ ID NO: 170725 - DNA, 41 bp, Homo sapiens; identical to SEQ ID NO: 26034
  chr12:6159829-6159870
  hypo

SEQ ID NO: 170726 - DNA, 48 bp, Homo sapiens
  chr12:6172071-6172119
  hypo
ttgtaagggtcgggccgcagggagccagtaccccgtgagggcacctac

SEQ ID NO: 170727 - DNA, 31 bp, Homo sapiens; identical to SEQ ID NO: 83664
  chr12:6185879-6185910
  hypo

SEQ ID NO: 170728 - DNA, 96 bp, Homo sapiens
  chr12:6199648-6199744
  hypo
cttgtgcttaaagcccggcgtgtgcttgtcctgcttctgccggctcccattctcaaggcaggggcactccagcggaaaacacgggacagtgggaga

SEQ ID NO: 170729 - DNA, 121 bp, Homo sapiens; identical to SEQ ID NO: 83665
  chr12:6220746-6220867
  hypo

SEQ ID NO: 170730 - DNA, 31 bp, Homo sapiens; identical to SEQ ID NO: 83666
  chr12:6247504-6247535
  hypo

SEQ ID NO: 170731 - DNA, 24 bp, Homo sapiens
  chr12:6272593-6272617
  hypo
cactgtgcccggcctgtttaatat

SEQ ID NO: 170732 - DNA, 84 bp, Homo sapiens; identical to SEQ ID NO: 83668
  chr12:6284863-6284947
  hypo

SEQ ID NO: 170733 - DNA, 86 bp, Homo sapiens; identical to SEQ ID NO: 83669
  chr12:6294431-6294517
  hypo

SEQ ID NO: 170734 - DNA, 824 bp, Homo sapiens; identical to SEQ ID NO: 49254
  chr12:6309397-6310221
  hypo

SEQ ID NO: 170735 - DNA, 310 bp, Homo sapiens
  chr12:6334301-6334611
  hypo
gtagctagagttactcgttttcactgctgtatagtgttctgttgcctataaaataccccttcagccaatgggcggcaggtaggtcactgtttattcctcgcttgctggtatttttagtacctgcatgaatcaaacacaccccgtaatggcatctacaactaccaggcgtatatgaggggcagagaccaagggtggtcacaaagtcctttgcaagtctcacccttaagcgcgtggggactgtgttgttgctggcagccagaattaatgctgatgtcctgtatgtcttgcagcttgccgggattgctgtcct

SEQ ID NO: 170736 - DNA, 45 bp, Homo sapiens; identical to SEQ ID NO: 83671
  chr12:6336635-6336680
  hypo

SEQ ID NO: 170737 - DNA, 30 bp, Homo sapiens; identical to SEQ ID NO: 83672
  chr12:6337293-6337323
  hypo

SEQ ID NO: 170738 - DNA, 302 bp, Homo sapiens; identical to SEQ ID NO: 83673
  chr12:6344302-6344604
  hypo

SEQ ID NO: 170739 - DNA, 31 bp, Homo sapiens; identical to SEQ ID NO: 83674
  chr12:6350370-6350401
  hypo

SEQ ID NO: 170740 - DNA, 77 bp, Homo sapiens
  chr12:6363068-6363145
  hypo
aaaaagaattttaacattttcaactctgtgagagaccccattcttcatgaaatggagtgattcgtagctgttatcga

SEQ ID NO: 170741 - DNA, 22 bp, Homo sapiens
  chr12:6372615-6372637
  hypo
aagatttaaggctgggcgcagt

SEQ ID NO: 170742 - DNA, 307 bp, Homo sapiens
  chr12:6373750-6374057
  hypo
agggcccactggcgtcgtgccagccctttcaggtaacttaggtcaatgagaaacaaacaggttccagaactttctctagatcatactgcagcaggtgctgaagtggggatttgaaccaggttcaccacactttgaaacccatgctctctttaccaccgcttgagacacccaaacacacacatgtatcggcacggctacgtctcccggtctgtttccagtttcacgttcctccctcctgggccaaaccaccactggggactcttttcttcctacagctccaggcagcgctgcatcatggaaaggtcac

SEQ ID NO: 170743 - DNA, 89 bp, Homo sapiens; identical to SEQ ID NO: 83677
  chr12:6375950-6376039
  hypo

SEQ ID NO: 170744 - DNA, 36 bp, Homo sapiens; identical to SEQ ID NO: 83678
  chr12:6381466-6381502
  hypo

SEQ ID NO: 170745 - DNA, 30 bp, Homo sapiens; identical to SEQ ID NO: 49255
  chr12:6385711-6385741
  hypo

SEQ ID NO: 170746 - DNA, 185 bp, Homo sapiens; identical to SEQ ID NO: 8559
  chr12:6387949-6388134
  hypo

SEQ ID NO: 170747 - DNA, 18 bp, Homo sapiens
  chr12:6388450-6388468
  hypo
tctcggctcccaaagcgc

SEQ ID NO: 170748 - DNA, 188 bp, Homo sapiens; identical to SEQ ID NO: 83682
  chr12:6388700-6388888
  hypo

SEQ ID NO: 170749 - DNA, 276 bp, Homo sapiens; identical to SEQ ID NO: 26041
  chr12:6391152-6391428
  hypo

SEQ ID NO: 170750 - DNA, 39 bp, Homo sapiens
  chr12:6396068-6396107
  hypo
gctgggattacaggcgtgagccaccgcgcccagcgagag

SEQ ID NO: 170751 - DNA, 106 bp, Homo sapiens; identical to SEQ ID NO: 26042
  chr12:6421422-6421528
  hypo

SEQ ID NO: 170752 - DNA, 51 bp, Homo sapiens; identical to SEQ ID NO: 26043
  chr12:6422990-6423041
  hypo

SEQ ID NO: 170753 - DNA, 31 bp, Homo sapiens; identical to SEQ ID NO: 83686
  chr12:6425105-6425136
  hypo

SEQ ID NO: 170754 - DNA, 246 bp, Homo sapiens; identical to SEQ ID NO: 83687
  chr12:6425446-6425692
  hypo

SEQ ID NO: 170755 - DNA, 30 bp, Homo sapiens; identical to SEQ ID NO: 83688
  chr12:6437893-6437923
  hypo

SEQ ID NO: 170756 - DNA, 215 bp, Homo sapiens; identical to SEQ ID NO: 26045
  chr12:6438302-6438517
  hypo

SEQ ID NO: 170757 - DNA, 159 bp, Homo sapiens; identical to SEQ ID NO: 26046
  chr12:6464387-6464546
  hypo

SEQ ID NO: 170758 - DNA, 21 bp, Homo sapiens
  chr12:6473956-6473977
  hypo
gtctcaaaaagaaattaattg

SEQ ID NO: 170759 - DNA, 31 bp, Homo sapiens; identical to SEQ ID NO: 83692
  chr12:6475367-6475398
  hypo

SEQ ID NO: 170760 - DNA, 39 bp, Homo sapiens; identical to SEQ ID NO: 83693
  chr12:6481165-6481204
  hypo

SEQ ID NO: 170761 - DNA, 30 bp, Homo sapiens
  chr12:6482332-6482362
  hypo
caccctttcttagtccgtaacgcacctttg

SEQ ID NO: 170762 - DNA, 419 bp, Homo sapiens; identical to SEQ ID NO: 26047
  chr12:6483475-6483894
  hypo

SEQ ID NO: 170763 - DNA, 30 bp, Homo sapiens; identical to SEQ ID NO: 83695
  chr12:6484796-6484826
  hypo

SEQ ID NO: 170764 - DNA, 31 bp, Homo sapiens; identical to SEQ ID NO: 83696
  chr12:6490845-6490876
  hypo

SEQ ID NO: 170765 - DNA, 499 bp, Homo sapiens; identical to SEQ ID NO: 121848
  chr12:6492949-6493448
  hypo

SEQ ID NO: 170766 - DNA, 117 bp, Homo sapiens; identical to SEQ ID NO: 121849
  chr12:6493504-6493621
  hypo

SEQ ID NO: 170767 - DNA, 30 bp, Homo sapiens; identical to SEQ ID NO: 121850
  chr12:6493822-6493852
  hypo

SEQ ID NO: 170768 - DNA, 30 bp, Homo sapiens; identical to SEQ ID NO: 26050
  chr12:6500388-6500418
  hypo

SEQ ID NO: 170769 - DNA, 98 bp, Homo sapiens; identical to SEQ ID NO: 83701
  chr12:6514986-6515084
  hypo

SEQ ID NO: 170770 - DNA, 30 bp, Homo sapiens; identical to SEQ ID NO: 83702
  chr12:6516224-6516254
  hypo

SEQ ID NO: 170771 - DNA, 121 bp, Homo sapiens
  chr12:6531709-6531830
  hypo
ttacaggtgtgagccaccgcacccggcccctattttaattttaaaaagaaaacaagatcaggtcatactttggtgcattctttttttctttctttctttttttttttatttgagatggagt

SEQ ID NO: 170772 - DNA, 25 bp, Homo sapiens
  chr12:6532069-6532094
  hypo
ggattacaggcgtgagccaccacgc

SEQ ID NO: 170773 - DNA, 30 bp, Homo sapiens; identical to SEQ ID NO: 83704
  chr12:6566951-6566981
  hypo

SEQ ID NO: 170774 - DNA, 30 bp, Homo sapiens; identical to SEQ ID NO: 83705
  chr12:6586806-6586836
  hypo

SEQ ID NO: 170775 - DNA, 187 bp, Homo sapiens; identical to SEQ ID NO: 83706
  chr12:6587831-6588018
  hypo

SEQ ID NO: 170776 - DNA, 31 bp, Homo sapiens; identical to SEQ ID NO: 26051
  chr12:6623436-6623467
  hypo

SEQ ID NO: 170777 - DNA, 17 bp, Homo sapiens
  chr12:6632862-6632879
  hypo
acaagtattattgagtt

SEQ ID NO: 170778 - DNA, 30 bp, Homo sapiens
  chr12:6635792-6635822
  hypo
ggggttgacccactgcggcagccagcttct

SEQ ID NO: 170779 - DNA, 498 bp, Homo sapiens
  chr12:6636151-6636649
  hypo
gcagtgagtggagagctctgccggcgccgagttctccgggaagaacaggagcacaagaccaaagatcccaaggagaaggtgtgtgaatgtcctcagcacttcccagatttatttcatacctcagctcagaactgagctgatccccttccggcaatctctgctcctctgctattacatgaagcgaagagtttctgcctctctgtggctactaccgtaggaaaggttcgtgtgaacaatgacgaaactgtcagtgatcacccaggaaggaaagatttaggtaaatgcagagtgtggagttagagacctcagcataaaacagaggctttgtgtctgaggcagggtttgttagaacacgcacgtacccgccggccttttccatcagcttccattgctggcctggccccggatggggccctgtgttccctccactagaggcaatgatgtcttgcagacaaataagacacagagccttgcagcgctggagaaaagtctgacctc

SEQ ID NO: 170780 - DNA, 58 bp, Homo sapiens
  chr12:6637924-6637982
  hypo
tgaaggggcaggtcagcgagatggcggtgctgctcatcgaccccgagcctcagattgc

SEQ ID NO: 170781 - DNA, 30 bp, Homo sapiens
  chr12:6638298-6638328
  hypo
tagctgtacagccttcggcaataacttagc

SEQ ID NO: 170782 - DNA, 213 bp, Homo sapiens
  chr12:6638550-6638763
  hypo
gaggcagacaggggccgtggcagagaacatcagagaagacgagtgctgggggagggtccagggttggtcttagtggatggcagagctggccctgggccatcgaacatcctcatctccccttcctgcagacagctcctctcctacatcaccaaggacaagcagacagagagcctggtggaaaagctgtgtcagcggttccgcacatcccggtat

SEQ ID NO: 170783 - DNA, 30 bp, Homo sapiens
  chr12:6639082-6639112
  hypo
gttgtaggcaagctgcgacgtggggccaag

SEQ ID NO: 170784 - DNA, 29 bp, Homo sapiens
  chr12:6678399-6678428
  hypo
aaaaaaccgtggaattccatgccacttac

SEQ ID NO: 170785 - DNA, 476 bp, Homo sapiens; identical to SEQ ID NO: 83713
  chr12:6678911-6679387
  hypo

SEQ ID NO: 170786 - DNA, 111 bp, Homo sapiens
  chr12:6686945-6687056
  hypo
ctcaccttaaaccttcgagctagaaatttattcttgatctctaagaaattgccacggttcatttcacccttgaaaggctcattgaggatggcatagcgtgggtcattctgg

SEQ ID NO: 170787 - DNA, 30 bp, Homo sapiens; identical to SEQ ID NO: 26054
  chr12:6691562-6691592
  hypo

SEQ ID NO: 170788 - DNA, 30 bp, Homo sapiens; identical to SEQ ID NO: 26055
  chr12:6692186-6692216
  hypo

SEQ ID NO: 170789 - DNA, 30 bp, Homo sapiens; identical to SEQ ID NO: 83716
  chr12:6696967-6696997
  hypo

SEQ ID NO: 170790 - DNA, 30 bp, Homo sapiens; identical to SEQ ID NO: 83717
  chr12:6729264-6729294
  hypo

SEQ ID NO: 170791 - DNA, 39 bp, Homo sapiens; identical to SEQ ID NO: 83718
  chr12:6749346-6749385
  hypo

SEQ ID NO: 170792 - DNA, 31 bp, Homo sapiens; identical to SEQ ID NO: 26056
  chr12:6757458-6757489
  hypo

SEQ ID NO: 170793 - DNA, 30 bp, Homo sapiens; identical to SEQ ID NO: 83720
  chr12:6760067-6760097
  hypo

SEQ ID NO: 170794 - DNA, 30 bp, Homo sapiens
  chr12:6781774-6781804
  hypo
atgacgttgcttgacggatgagagcacccc

SEQ ID NO: 170795 - DNA, 724 bp, Homo sapiens; identical to SEQ ID NO: 121866
  chr12:6809092-6809816
  hypo

SEQ ID NO: 170796 - DNA, 45 bp, Homo sapiens; identical to SEQ ID NO: 26057
  chr12:6831876-6831921
  hypo

SEQ ID NO: 170797 - DNA, 37 bp, Homo sapiens; identical to SEQ ID NO: 83722
  chr12:6848749-6848786
  hypo

SEQ ID NO: 170798 - DNA, 240 bp, Homo sapiens; identical to SEQ ID NO: 83723
  chr12:6857749-6857989
  hypo

SEQ ID NO: 170799 - DNA, 30 bp, Homo sapiens
  chr12:6858534-6858564
  hypo
ccagcacctgactccgcccgagcggaggag

SEQ ID NO: 170800 - DNA, 30 bp, Homo sapiens; identical to SEQ ID NO: 83724
  chr12:6859133-6859163
  hypo

SEQ ID NO: 170801 - DNA, 48 bp, Homo sapiens; identical to SEQ ID NO: 83725
  chr12:6868197-6868245
  hypo

SEQ ID NO: 170802 - DNA, 46 bp, Homo sapiens; identical to SEQ ID NO: 83726
  chr12:6871062-6871108
  hypo

SEQ ID NO: 170803 - DNA, 31 bp, Homo sapiens; identical to SEQ ID NO: 26059
  chr12:6876862-6876893
  hypo

SEQ ID NO: 170804 - DNA, 30 bp, Homo sapiens; identical to SEQ ID NO: 121872
  chr12:6888413-6888443
  hypo

SEQ ID NO: 170805 - DNA, 25 bp, Homo sapiens
  chr12:6900415-6900440
  hypo
ttattatttttgagacggagtctcg

SEQ ID NO: 170806 - DNA, 56 bp, Homo sapiens; identical to SEQ ID NO: 83729
  chr12:7249424-7249480
  hypo

SEQ ID NO: 170807 - DNA, 31 bp, Homo sapiens
  chr12:7249838-7249869
  hypo
ctgtggtaggggacgcgtgaagagactctgg

SEQ ID NO: 170808 - DNA, 49 bp, Homo sapiens; identical to SEQ ID NO: 83730
  chr12:7351758-7351807
  hypo

SEQ ID NO: 170809 - DNA, 89 bp, Homo sapiens
  chr12:7368501-7368590
  hypo
gccattttacaaagacgcgatttaaattatttgtaatcaatttaaatatattaattaaattaaaaaaaaatttttttttgagatggagt

SEQ ID NO: 170810 - DNA, 28 bp, Homo sapiens
  chr12:7368829-7368857
  hypo
ctgggattacaggcgtgagccaccgtgc

SEQ ID NO: 170811 - DNA, 25 bp, Homo sapiens
  chr12:7432749-7432774
  hypo
tgagccaccgcgcccggcctacaaa

SEQ ID NO: 170812 - DNA, 27 bp, Homo sapiens
  chr12:7483436-7483463
  hypo
tacagctcccagcatgagtgacgcaga

SEQ ID NO: 170813 - DNA, 30 bp, Homo sapiens
  chr12:7562201-7562231
  hypo
tctcaccgcccactgcgtggcccaattcct

SEQ ID NO: 170814 - DNA, 43 bp, Homo sapiens; identical to SEQ ID NO: 83733
  chr12:7826420-7826463
  hypo

SEQ ID NO: 170815 - DNA, 30 bp, Homo sapiens; identical to SEQ ID NO: 26060
  chr12:7850947-7850977
  hypo

SEQ ID NO: 170816 - DNA, 26 bp, Homo sapiens
  chr12:7851215-7851241
  hypo
atcgtaggctgggcgcggtggctcac

SEQ ID NO: 170817 - DNA, 266 bp, Homo sapiens; identical to SEQ ID NO: 83736
  chr12:7858582-7858848
  hypo

SEQ ID NO: 170818 - DNA, 30 bp, Homo sapiens; identical to SEQ ID NO: 83737
  chr12:7865836-7865866
  hypo

SEQ ID NO: 170819 - DNA, 17 bp, Homo sapiens
  chr12:7896223-7896240
  hypo
ctcggcctcccaaagtg

SEQ ID NO: 170820 - DNA, 38 bp, Homo sapiens; identical to SEQ ID NO: 83738
  chr12:7910483-7910521
  hypo

SEQ ID NO: 170821 - DNA, 39 bp, Homo sapiens; identical to SEQ ID NO: 26063
  chr12:7963844-7963883
  hypo

SEQ ID NO: 170822 - DNA, 33 bp, Homo sapiens; identical to SEQ ID NO: 83740
  chr12:7968172-7968205
  hypo

SEQ ID NO: 170823 - DNA, 121 bp, Homo sapiens
  chr12:7969975-7970096
  hypo
gctgggattacaggagtgagccacctcgcccagcctgactactgtattattaaggtgtatcttcaatatgtcagcctacgtaggctggttttaagataaggtgagttggccgggcatggtg

SEQ ID NO: 170824 - DNA, 104 bp, Homo sapiens
  chr12:8001693-8001797
  hypo
gcccacctccgtctcccaaagtgctgggattactggtctgagacactgcgcccgctttcactgagttcttatttggacctctcaatcttcgggcaagataacat

SEQ ID NO: 170825 - DNA, 33 bp, Homo sapiens; identical to SEQ ID NO: 26064
  chr12:8009569-8009602
  hypo

SEQ ID NO: 170826 - DNA, 28 bp, Homo sapiens
  chr12:8014270-8014298
  hypo
aaaacaggccatgcgcggaggctcaccc

SEQ ID NO: 170827 - DNA, 33 bp, Homo sapiens; identical to SEQ ID NO: 26065
  chr12:8017217-8017250
  hypo

SEQ ID NO: 170828 - DNA, 65 bp, Homo sapiens
  chr12:8022093-8022158
  hypo
tatgttactcttcacgcgtatatagccatggttctttccaaggaaattcccgcaaaaccagttgc

SEQ ID NO: 170829 - DNA, 30 bp, Homo sapiens; identical to SEQ ID NO: 83744
  chr12:8023661-8023691
  hypo

SEQ ID NO: 170830 - DNA, 32 bp, Homo sapiens
  chr12:8071328-8071360
  hypo
gaaagctgttttcttttgagacggagtttcgc

SEQ ID NO: 170831 - DNA, 39 bp, Homo sapiens; identical to SEQ ID NO: 83745
  chr12:8072018-8072057
  hypo

SEQ ID NO: 170832 - DNA, 39 bp, Homo sapiens; identical to SEQ ID NO: 83746
  chr12:8072296-8072335
  hypo

SEQ ID NO: 170833 - DNA, 447 bp, Homo sapiens; identical to SEQ ID NO: 49285
  chr12:8123150-8123597
  hypo

SEQ ID NO: 170834 - DNA, 32 bp, Homo sapiens; identical to SEQ ID NO: 26066
  chr12:8146996-8147028
  hypo

SEQ ID NO: 170835 - DNA, 32 bp, Homo sapiens; identical to SEQ ID NO: 26067
  chr12:8147087-8147119
  hypo

SEQ ID NO: 170836 - DNA, 522 bp, Homo sapiens; identical to SEQ ID NO: 8575
  chr12:8171288-8171810
  hypo

SEQ ID NO: 170837 - DNA, 99 bp, Homo sapiens; identical to SEQ ID NO: 83751
  chr12:8178280-8178379
  hypo

SEQ ID NO: 170838 - DNA, 32 bp, Homo sapiens
  chr12:8180904-8180936
  hypo
tttgagatggagtctccgatctgtcgcccagg

SEQ ID NO: 170839 - DNA, 121 bp, Homo sapiens
  chr12:8181175-8181296
  hypo
ccacgctcggctaaacagtactttttaaaaaattgtttatcttgtaataattcaaacacacacaaaagtagagaaaataagatttttttttttttgagacagtctcattctgtcactcagg

SEQ ID NO: 170840 - DNA, 37 bp, Homo sapiens; identical to SEQ ID NO: 83753
  chr12:8252175-8252212
  hypo

SEQ ID NO: 170841 - DNA, 31 bp, Homo sapiens; identical to SEQ ID NO: 83754
  chr12:8386002-8386033
  hypo

SEQ ID NO: 170842 - DNA, 33 bp, Homo sapiens
  chr12:8398730-8398763
  hypo
agcaagtgaagattacgacggatgcttaaaaac

SEQ ID NO: 170843 - DNA, 37 bp, Homo sapiens; identical to SEQ ID NO: 26071
  chr12:8423885-8423922
  hypo

SEQ ID NO: 170844 - DNA, 30 bp, Homo sapiens
  chr12:8532383-8532413
  hypo
catccacagacgtatcgctgcagggctggt

SEQ ID NO: 170845 - DNA, 121 bp, Homo sapiens
  chr12:8597878-8597999
  hypo
cctaatagccagggggggataggggctggctgttactccccgtacagttgggggggcctcacccccctgcgatggggctcctaagagccagggggagagaggggctggatcttactcccgg

SEQ ID NO: 170846 - DNA, 48 bp, Homo sapiens
  chr12:8601975-8602023
  hypo
tactccactttgaatcgcgtcactcagggtggccgcagtcgcccgcag

SEQ ID NO: 170847 - DNA, 165 bp, Homo sapiens
  chr12:8751033-8751198
  hypo
aaagatacgtgaaatgttaatattaatggacccattttacagagaggaaagaaattaaggctttacagagattaaacatctaacccattgtcacatggaaccagaactctagtttaggtttacttgacttcgaagtcatactgacaggcccggcacggtagctca

SEQ ID NO: 170848 - DNA, 490 bp, Homo sapiens; identical to SEQ ID NO: 26072
  chr12:8757659-8758149
  hypo

SEQ ID NO: 170849 - DNA, 30 bp, Homo sapiens
  chr12:8802146-8802176
  hypo
ttgacgatgtacatacgtcgtaaactgcag

SEQ ID NO: 170850 - DNA, 275 bp, Homo sapiens; identical to SEQ ID NO: 26073
  chr12:8808408-8808683
  hypo

SEQ ID NO: 170851 - DNA, 34 bp, Homo sapiens; identical to SEQ ID NO: 83760
  chr12:8808922-8808956
  hypo

SEQ ID NO: 170852 - DNA, 25 bp, Homo sapiens
  chr12:8848567-8848592
  hypo
cgtgagccaccgcgccctgccctga

SEQ ID NO: 170853 - DNA, 33 bp, Homo sapiens; identical to SEQ ID NO: 26074
  chr12:8890589-8890622
  hypo

SEQ ID NO: 170854 - DNA, 181 bp, Homo sapiens
  chr12:8893948-8894129
  hypo
gggcgacagagcaagactccaccttaaaaaaaaaaaggagaatcagttcttcaatttgaagtataacttgatggaaggaaaaaataaatcaataaaatagaagaaccaggagggagcggcgcaagggttataaaactaactgttggggctgggtgcggtggctcatgcctgtaatcccagc

SEQ ID NO: 170855 - DNA, 90 bp, Homo sapiens; identical to SEQ ID NO: 83763
  chr12:8906529-8906619
  hypo

SEQ ID NO: 170856 - DNA, 43 bp, Homo sapiens; identical to SEQ ID NO: 83764
  chr12:8936108-8936151
  hypo

SEQ ID NO: 170857 - DNA, 121 bp, Homo sapiens; identical to SEQ ID NO: 83765
  chr12:8936630-8936751
  hypo

SEQ ID NO: 170858 - DNA, 36 bp, Homo sapiens
  chr12:8975181-8975217
  hypo
agtatataaagctacgcggagcgatctctgcccctg

SEQ ID NO: 170859 - DNA, 22 bp, Homo sapiens
  chr12:8983842-8983864
  hypo
cggcctgagtgcttacttctta

SEQ ID NO: 170860 - DNA, 133 bp, Homo sapiens; identical to SEQ ID NO: 83768
  chr12:8995542-8995675
  hypo

SEQ ID NO: 170861 - DNA, 24 bp, Homo sapiens
  chr12:9001061-9001085
  hypo
gcaagactccgtctcaaaaaaaaa

SEQ ID NO: 170862 - DNA, 30 bp, Homo sapiens
  chr12:9001457-9001487
  hypo
ttatctggaggccctcgttctctgaaggca

SEQ ID NO: 170863 - DNA, 30 bp, Homo sapiens
  chr12:9004388-9004418
  hypo
gaaggaggcggtccacgtcacagttcctga

SEQ ID NO: 170864 - DNA, 30 bp, Homo sapiens
  chr12:9006823-9006853
  hypo
catcaagccagttctcgtcaaagtgagttt

SEQ ID NO: 170865 - DNA, 30 bp, Homo sapiens
  chr12:9008242-9008272
  hypo
aggtgtggagtggggcgggacatacggacc

SEQ ID NO: 170866 - DNA, 30 bp, Homo sapiens; identical to SEQ ID NO: 83769
  chr12:9025789-9025819
  hypo

SEQ ID NO: 170867 - DNA, 31 bp, Homo sapiens; identical to SEQ ID NO: 83770
  chr12:9071260-9071291
  hypo

SEQ ID NO: 170868 - DNA, 20 bp, Homo sapiens
  chr12:9084000-9084020
  hypo
aagactaatggagaggcggg

SEQ ID NO: 170869 - DNA, 301 bp, Homo sapiens
  chr12:9108767-9109068
  hypo
aaaagaacagcaggtgaaaggctgtagccctcctgccctctcctggcaccaggcggccaccccacgttatgggaagtggtggtggcgccaggccagcccaggagccgtgggctggtgggactgaacaagttgggacatgcccccgttcggcaaagcttgtggacagcaggaatgaatgaactgtaacacaaacgagctgagactcttcggggtgcagacctcgggattccccaagccagagctgtaacatgctgtaacaccccccaccgcatttttttttctttttcttttgagacagagt

SEQ ID NO: 170870 - DNA, 100 bp, Homo sapiens
  chr12:9109307-9109407
  hypo
gtggggattaccggcatgagccactgcacctgacctttgaagttccgcagttgctggtgtcttttgagttttttggacgccactgcgttcccttcgttca

SEQ ID NO: 170871 - DNA, 43 bp, Homo sapiens; identical to SEQ ID NO: 83774
  chr12:9187310-9187353
  hypo

SEQ ID NO: 170872 - DNA, 293 bp, Homo sapiens; identical to SEQ ID NO: 121889
  chr12:9216952-9217245
  hypo

SEQ ID NO: 170873 - DNA, 30 bp, Homo sapiens; identical to SEQ ID NO: 26079
  chr12:9395289-9395319
  hypo

SEQ ID NO: 170874 - DNA, 31 bp, Homo sapiens; identical to SEQ ID NO: 26080
  chr12:9574344-9574375
  hypo

SEQ ID NO: 170875 - DNA, 200 bp, Homo sapiens; identical to SEQ ID NO: 26081
  chr12:9585207-9585407
  hypo

SEQ ID NO: 170876 - DNA, 30 bp, Homo sapiens; identical to SEQ ID NO: 8579
  chr12:9620959-9620989
  hypo

SEQ ID NO: 170877 - DNA, 37 bp, Homo sapiens; identical to SEQ ID NO: 83779
  chr12:9824088-9824125
  hypo

SEQ ID NO: 170878 - DNA, 30 bp, Homo sapiens; identical to SEQ ID NO: 83780
  chr12:9927548-9927578
  hypo

SEQ ID NO: 170879 - DNA, 207 bp, Homo sapiens
  chr12:10025414-10025621
  hypo
ctctgggactcctgccgccgccacgcctgcagcagcacgccctggcctgcaaggccagctctgtcaggattagcagcttaactctttccctctgggcacaagctcgttcctggttcccctctgcctgccttcaaggcgactggctctcccttacaagggtcaatagtgctactctctttctgggcaccagtgcgagccatgtcatgc

SEQ ID NO: 170880 - DNA, 30 bp, Homo sapiens
  chr12:10056921-10056951
  hypo
ggctggaggaccatacgagtggaaacggga

SEQ ID NO: 170881 - DNA, 215 bp, Homo sapiens
  chr12:10073225-10073440
  hypo
tgctgtatttactcaccccttcagttcctctctttgagagctgcgcactccagctacttctagtcggccatcttggccactctccaacccccagcttttctttaaaaactaatctattttcttactctgtgtccctagagtccacgtgtctccttctttgccctctttacttccattaattcactcgcgtcttcgaagtgcacatatttccttca

SEQ ID NO: 170882 - DNA, 30 bp, Homo sapiens; identical to SEQ ID NO: 83782
  chr12:10084921-10084951
  hypo

SEQ ID NO: 170883 - DNA, 48 bp, Homo sapiens; identical to SEQ ID NO: 26083
  chr12:10264177-10264225
  hypo

SEQ ID NO: 170884 - DNA, 26 bp, Homo sapiens
  chr12:10267733-10267759
  hypo
aagaatcattcaggccgggcgcggtg

SEQ ID NO: 170885 - DNA, 146 bp, Homo sapiens; identical to SEQ ID NO: 83785
  chr12:10267998-10268144
  hypo

SEQ ID NO: 170886 - DNA, 30 bp, Homo sapiens; identical to SEQ ID NO: 83786
  chr12:10268686-10268716
  hypo

SEQ ID NO: 170887 - DNA, 31 bp, Homo sapiens; identical to SEQ ID NO: 26085
  chr12:10317434-10317465
  hypo

SEQ ID NO: 170888 - DNA, 31 bp, Homo sapiens
  chr12:10363277-10363308
  hypo
cagtttaattttcagtcgctcatgttaggtt

SEQ ID NO: 170889 - DNA, 123 bp, Homo sapiens
  chr12:10523865-10523988
  hypo
atccaattggctatccgcttcacgctggcatttcgtcaatctaaaaaggtaaaaacaaaacaccgcaggccaaaggaaactccttgagtcctttaatcctcaggtttacgtaaatgttattaa

SEQ ID NO: 170890 - DNA, 30 bp, Homo sapiens
  chr12:10658266-10658296
  hypo
atctaccaagtctgcgacgaatagctccag

SEQ ID NO: 170891 - DNA, 30 bp, Homo sapiens
  chr12:10658524-10658554
  hypo
gactctggggcagccgcacctttcgcgtca

SEQ ID NO: 170892 - DNA, 33 bp, Homo sapiens; identical to SEQ ID NO: 83788
  chr12:10767895-10767928
  hypo

SEQ ID NO: 170893 - DNA, 30 bp, Homo sapiens
  chr12:10778890-10778920
  hypo
gcgcctctgcaattgcggttctgaatacag

SEQ ID NO: 170894 - DNA, 76 bp, Homo sapiens
  chr12:10823867-10823943
  hypo
acaggcgtgagccaccacgcctggccatgttgatttttaatagcgttgaaatagcgaaggggaattaaggttacag

SEQ ID NO: 170895 - DNA, 30 bp, Homo sapiens; identical to SEQ ID NO: 8581
  chr12:11053581-11053611
  hypo

SEQ ID NO: 170896 - DNA, 31 bp, Homo sapiens; identical to SEQ ID NO: 26087
  chr12:11720902-11720933
  hypo

SEQ ID NO: 170897 - DNA, 45 bp, Homo sapiens; identical to SEQ ID NO: 8583
  chr12:11801642-11801687
  hypo

SEQ ID NO: 170898 - DNA, 428 bp, Homo sapiens; identical to SEQ ID NO: 121911
  chr12:11802786-11803214
  hypo

SEQ ID NO: 170899 - DNA, 30 bp, Homo sapiens
  chr12:11847872-11847902
  hypo
aacaaaatttggaaccggtcatgtaaagat

SEQ ID NO: 170900 - DNA, 199 bp, Homo sapiens; identical to SEQ ID NO: 49305
  chr12:11905382-11905581
  hypo

SEQ ID NO: 170901 - DNA, 30 bp, Homo sapiens; identical to SEQ ID NO: 26091
  chr12:11909578-11909608
  hypo

SEQ ID NO: 170902 - DNA, 166 bp, Homo sapiens; identical to SEQ ID NO: 8586
  chr12:11992072-11992238
  hypo

SEQ ID NO: 170903 - DNA, 66 bp, Homo sapiens
  chr12:12001022-12001088
  hypo
agacatgtctgttcacgcttatgacaattgcaagagacaccatccattgagcgtttatgatggcag

SEQ ID NO: 170904 - DNA, 383 bp, Homo sapiens; identical to SEQ ID NO: 8587
  chr12:12006112-12006495
  hypo

SEQ ID NO: 170905 - DNA, 30 bp, Homo sapiens; identical to SEQ ID NO: 49308
  chr12:12009725-12009755
  hypo

SEQ ID NO: 170906 - DNA, 547 bp, Homo sapiens; identical to SEQ ID NO: 8588
  chr12:12022356-12022903
  hypo

SEQ ID NO: 170907 - DNA, 148 bp, Homo sapiens; identical to SEQ ID NO: 8589
  chr12:12037377-12037525
  hypo

SEQ ID NO: 170908 - DNA, 102 bp, Homo sapiens; identical to SEQ ID NO: 8590
  chr12:12038858-12038960
  hypo

SEQ ID NO: 170909 - DNA, 2802 bp, Homo sapiens; identical to SEQ ID NO: 8591
  chr12:12043873-12046675
  hypo

SEQ ID NO: 170910 - DNA, 1482 bp, Homo sapiens; identical to SEQ ID NO: 8592
  chr12:12046854-12048336
  hypo

SEQ ID NO: 170911 - DNA, 30 bp, Homo sapiens
  chr12:12080964-12080994
  hypo
ttttccttgtgagttcgatacagcgacaga

SEQ ID NO: 170912 - DNA, 189 bp, Homo sapiens; identical to SEQ ID NO: 26099
  chr12:12184632-12184821
  hypo

SEQ ID NO: 170913 - DNA, 31 bp, Homo sapiens; identical to SEQ ID NO: 83804
  chr12:12208458-12208489
  hypo

SEQ ID NO: 170914 - DNA, 30 bp, Homo sapiens; identical to SEQ ID NO: 26100
  chr12:12240348-12240378
  hypo

SEQ ID NO: 170915 - DNA, 303 bp, Homo sapiens
  chr12:12476518-12476821
  hypo
atgaccttcaatgaacgggttataaaattcactcatgatcacttattgaatgcctatgtgccagacacactgttaagcatgatggaatcagagaaatgttgctgtctaacgtatcccagtctagtggggtaatatataacctgatacattatgattccatggaagtgtttcactaatggtataaatcacgagctgtgtcagaaacccaggaggaattgatacgtctcccgggagagtgtggggagactctggtggaggtgacgtgtgatcgtggtcttgaaggatgagcggaaatttgccaag

SEQ ID NO: 170916 - DNA, 30 bp, Homo sapiens
  chr12:12484732-12484762
  hypo
aaaccagagatatatcgttccagcactgtg

SEQ ID NO: 170917 - DNA, 30 bp, Homo sapiens
  chr12:12488132-12488162
  hypo
tctctccatctcgcccgccactccctgttt

SEQ ID NO: 170918 - DNA, 587 bp, Homo sapiens; identical to SEQ ID NO: 121924
  chr12:12502884-12503471
  hypo

SEQ ID NO: 170919 - DNA, 43 bp, Homo sapiens; identical to SEQ ID NO: 83807
  chr12:12504472-12504515
  hypo

SEQ ID NO: 170920 - DNA, 43 bp, Homo sapiens; identical to SEQ ID NO: 83808
  chr12:12504814-12504857
  hypo

SEQ ID NO: 170921 - DNA, 30 bp, Homo sapiens; identical to SEQ ID NO: 26101
  chr12:12514213-12514243
  hypo

SEQ ID NO: 170922 - DNA, 30 bp, Homo sapiens; identical to SEQ ID NO: 83810
  chr12:12601957-12601987
  hypo

SEQ ID NO: 170923 - DNA, 41 bp, Homo sapiens; identical to SEQ ID NO: 83811
  chr12:12604521-12604562
  hypo

SEQ ID NO: 170924 - DNA, 180 bp, Homo sapiens; identical to SEQ ID NO: 83812
  chr12:12605361-12605541
  hypo

SEQ ID NO: 170925 - DNA, 446 bp, Homo sapiens; identical to SEQ ID NO: 83813
  chr12:12618402-12618848
  hypo

SEQ ID NO: 170926 - DNA, 30 bp, Homo sapiens
  chr12:12655833-12655863
  hypo
ataccaccctcacaccgccccatgcatgca

SEQ ID NO: 170927 - DNA, 91 bp, Homo sapiens
  chr12:12656415-12656506
  hypo
ccccgtttttttgttacggtgatcaaacattcagtatctagcgccatctgtggggccttcctccacctttgagctgcggctgtttagctac

SEQ ID NO: 170928 - DNA, 25 bp, Homo sapiens
  chr12:12685865-12685890
  hypo
gagcgaaactctgtctcaaaaaaaa

SEQ ID NO: 170929 - DNA, 31 bp, Homo sapiens; identical to SEQ ID NO: 83815
  chr12:12718323-12718354
  hypo

SEQ ID NO: 170930 - DNA, 31 bp, Homo sapiens
  chr12:12764238-12764269
  hypo
cagtaaaggacatttgcgttgtttccacttt

SEQ ID NO: 170931 - DNA, 203 bp, Homo sapiens; identical to SEQ ID NO: 121929
  chr12:12848340-12848543
  hypo

SEQ ID NO: 170932 - DNA, 503 bp, Homo sapiens; identical to SEQ ID NO: 121930
  chr12:12869128-12869631
  hypo

SEQ ID NO: 170933 - DNA, 287 bp, Homo sapiens; identical to SEQ ID NO: 121934
  chr12:12877457-12877744
  hypo

SEQ ID NO: 170934 - DNA, 29 bp, Homo sapiens
  chr12:12900060-12900089
  hypo
ttctagagacagtctcgctttgtcaccca

SEQ ID NO: 170935 - DNA, 28 bp, Homo sapiens
  chr12:12900148-12900176
  hypo
aatcctcccacatcggcctcctaaagca

SEQ ID NO: 170936 - DNA, 83 bp, Homo sapiens
  chr12:12902966-12903049
  hypo
cccccacactgaaatcccttccggtagagacaaagcataataagaaattgggaaagatggccgggcgcggtggctcacgcctg

SEQ ID NO: 170937 - DNA, 32 bp, Homo sapiens
  chr12:12923065-12923097
  hypo
gggggcggtggctcacgtctgtaatcccagca

SEQ ID NO: 170938 - DNA, 30 bp, Homo sapiens; identical to SEQ ID NO: 83821
  chr12:12982491-12982521
  hypo

SEQ ID NO: 170939 - DNA, 177 bp, Homo sapiens
  chr12:12989448-12989625
  hypo
actaggcagggaccgcgcctaatttgtggatattactaatatcatacagggcccatacgcagtaaatgttcaatatctgtcattttctgaaacctaagatgtgtcaggcggcttgacctgtattatttctagttctttgaacaatcccgaacagtcgatattattgttcccaatatg

SEQ ID NO: 170940 - DNA, 267 bp, Homo sapiens
  chr12:12990440-12990707
  hypo
gctgtggaccctcctcgtcaacttccaaacacttggttcttttccaaagcctgcctttccctctgggatgttgatgaagccacttgctttgtttgctcctttccccaccccctaccccagtctgtaagtcaggaatactctttcccccgcctatcccaatacacgttgtttgtgagccaccgacccccctcactgcttccctctctcctcactgcgtatccatccagtaggcttggtccacagcccgtgctcctgtatcaaataagc

SEQ ID NO: 170941 - DNA, 38 bp, Homo sapiens
  chr12:13003127-13003165
  hypo
agacgtggccgggcgcggtgggtcacacctgtaatccc

SEQ ID NO: 170942 - DNA, 27 bp, Homo sapiens
  chr12:13029637-13029664
  hypo
gggtgcggtggcttacgcctgtaatcc

SEQ ID NO: 170943 - DNA, 27 bp, Homo sapiens
  chr12:13029903-13029930
  hypo
cgctccgtctcaaaaaacaaacaaaga

SEQ ID NO: 170944 - DNA, 159 bp, Homo sapiens
  chr12:13035880-13036039
  hypo
aaggagagctagcacacagtacgacttcaatcaatacttggttcttacctctgtcttccctgaggtgtttcattcttcagatgcctcaggaaaccatgagtgaggctgtattaaacaacgtgtttaaggccgggcgcggtggctcatgcctgtaatccc

SEQ ID NO: 170945 - DNA, 30 bp, Homo sapiens; identical to SEQ ID NO: 83826
  chr12:13046178-13046208
  hypo

SEQ ID NO: 170946 - DNA, 38 bp, Homo sapiens
  chr12:13050516-13050554
  hypo
acagacaaaaaggagcgaatacgcttcttttttttttt

SEQ ID NO: 170947 - DNA, 37 bp, Homo sapiens; identical to SEQ ID NO: 83827
  chr12:13050853-13050890
  hypo

SEQ ID NO: 170948 - DNA, 87 bp, Homo sapiens; identical to SEQ ID NO: 83828
  chr12:13056217-13056304
  hypo

SEQ ID NO: 170949 - DNA, 31 bp, Homo sapiens; identical to SEQ ID NO: 26106
  chr12:13057640-13057671
  hypo

SEQ ID NO: 170950 - DNA, 71 bp, Homo sapiens; identical to SEQ ID NO: 121939
  chr12:13069192-13069263
  hypo

SEQ ID NO: 170951 - DNA, 108 bp, Homo sapiens; identical to SEQ ID NO: 121940
  chr12:13069316-13069424
  hypo

SEQ ID NO: 170952 - DNA, 356 bp, Homo sapiens
  chr12:13079662-13080018
  hypo
gttgggacaaggcgtcggccagtcatccacattgtctttttgcagatccactaatcttccatgcaggctccaacagctccttcccggcctgggaacccaaatccgcaggaagaatctcggggtgttgtcttggcttattcattcagagctgtcgtgtgtggttctgcaaacagtactcagatgcgttccctctccccgtagggatcttgctggagatgcccagggttaacagtggaactccatatggagacagaggcatggggggagcttcgctggagatgggacagcctgctccaccgcgaagcctactgaggctctcttcttacgtaccccgcgcaatctcatctccctgaaca

SEQ ID NO: 170953 - DNA, 448 bp, Homo sapiens; identical to SEQ ID NO: 121941
  chr12:13152997-13153445
  hypo

SEQ ID NO: 170954 - DNA, 94 bp, Homo sapiens; identical to SEQ ID NO: 49324
  chr12:13154240-13154334
  hypo

SEQ ID NO: 170955 - DNA, 30 bp, Homo sapiens; identical to SEQ ID NO: 26109
  chr12:13155147-13155177
  hypo

SEQ ID NO: 170956 - DNA, 234 bp, Homo sapiens; identical to SEQ ID NO: 83835
  chr12:13173188-13173422
  hypo

SEQ ID NO: 170957 - DNA, 30 bp, Homo sapiens
  chr12:13196600-13196630
  hypo
ggtgattacggggagcgtgcagatgcctta

SEQ ID NO: 170958 - DNA, 18 bp, Homo sapiens
  chr12:13199068-13199086
  hypo
agaaaatgttcacttgcg

SEQ ID NO: 170959 - DNA, 17 bp, Homo sapiens
  chr12:13199145-13199162
  hypo
gtcgggcctggttagta

SEQ ID NO: 170960 - DNA, 30 bp, Homo sapiens; identical to SEQ ID NO: 83838
  chr12:13211454-13211484
  hypo

SEQ ID NO: 170961 - DNA, 200 bp, Homo sapiens
  chr12:13215210-13215410
  hypo
ataggcttagtactgctgggccgtgtgctcacgtggagcggaataaataacatccttcccaggtttagaggttggagtttggtcgcggggtgcttctgagtgaaaaaaactgggatttgagttaactgtagaactgaagccatctggaaaacttcctatgatgctgtggtgcttacttatgtgaccgtgtgggggaagga

SEQ ID NO: 170962 - DNA, 30 bp, Homo sapiens; identical to SEQ ID NO: 26113
  chr12:13215624-13215654
  hypo

SEQ ID NO: 170963 - DNA, 175 bp, Homo sapiens; identical to SEQ ID NO: 26114
  chr12:13222375-13222550
  hypo

SEQ ID NO: 170964 - DNA, 192 bp, Homo sapiens; identical to SEQ ID NO: 83842
  chr12:13237736-13237928
  hypo

SEQ ID NO: 170965 - DNA, 18 bp, Homo sapiens
  chr12:13249114-13249132
  hypo
ataagtactattgccggg

SEQ ID NO: 170966 - DNA, 30 bp, Homo sapiens
  chr12:13253811-13253841
  hypo
ctctagtcttcctaacgtaggtcccgagtt

SEQ ID NO: 170967 - DNA, 52 bp, Homo sapiens
  chr12:13281246-13281298
  hypo
tgctctgggggtcttcgtgggcaagaagcgtgtctgtcgcctgcatataatt

SEQ ID NO: 170968 - DNA, 177 bp, Homo sapiens
  chr12:13519032-13519209
  hypo
acatcttgtagcggtcgcgggtctgacacacacggttccagttgttgtggaccttgcaaattctctggccgagatccaggcagtaggcgtcctcctccgcgggctcccgctgaggccccatcacatgttcctggtgcagttcttctccactgtgctgtgaagcgtgtgggatgtgcc

SEQ ID NO: 170969 - DNA, 30 bp, Homo sapiens
  chr12:13519439-13519469
  hypo
caaatccttttgggtcggctcctcccttcc

SEQ ID NO: 170970 - DNA, 647 bp, Homo sapiens; identical to SEQ ID NO: 26115
  chr12:13716428-13717075
  hypo

SEQ ID NO: 170971 - DNA, 2022 bp, Homo sapiens; identical to SEQ ID NO: 121946
  chr12:14133240-14135262
  hypo

SEQ ID NO: 170972 - DNA, 37 bp, Homo sapiens; identical to SEQ ID NO: 83846
  chr12:14469617-14469654
  hypo

SEQ ID NO: 170973 - DNA, 19 bp, Homo sapiens
  chr12:14719972-14719991
  hypo
gagccgagatcacaccatt

SEQ ID NO: 170974 - DNA, 37 bp, Homo sapiens; identical to SEQ ID NO: 26117
  chr12:14721512-14721549
  hypo

SEQ ID NO: 170975 - DNA, 37 bp, Homo sapiens; identical to SEQ ID NO: 26118
  chr12:14721788-14721825
  hypo

SEQ ID NO: 170976 - DNA, 198 bp, Homo sapiens
  chr12:14743807-14744005
  hypo
tcggcaggcaggtggcagaggcgactagttcttccggggcagctgtggtgcagtttccagcatacagtctctcatggtataggtgccaagcagtgcctgctgtggtgtttttctgaaatagttctctgtcgtgactagttattgtttctggattctcctggctttgcgagggtaagcgtctggaaacttttatggcag

SEQ ID NO: 170977 - DNA, 28 bp, Homo sapiens
  chr12:14817851-14817879
  hypo
taagaataagccctgagggggcgcggtg

SEQ ID NO: 170978 - DNA, 88 bp, Homo sapiens; identical to SEQ ID NO: 26119
  chr12:14818118-14818206
  hypo

SEQ ID NO: 170979 - DNA, 284 bp, Homo sapiens; identical to SEQ ID NO: 83853
  chr12:14818748-14819032
  hypo

SEQ ID NO: 170980 - DNA, 241 bp, Homo sapiens; identical to SEQ ID NO: 83854
  chr12:14819091-14819332
  hypo

SEQ ID NO: 170981 - DNA, 30 bp, Homo sapiens
  chr12:14929914-14929944
  hypo
tgccctgtcgccacccgcctctcccaccac

SEQ ID NO: 170982 - DNA, 73 bp, Homo sapiens
  chr12:15057300-15057373
  hypo
agctgagctggacgtcgagaggaacacactgacactggcacacctgcaggccaccgaccggcagaagcagaac

SEQ ID NO: 170983 - DNA, 121 bp, Homo sapiens; identical to SEQ ID NO: 83855
  chr12:15095458-15095579
  hypo

SEQ ID NO: 170984 - DNA, 26 bp, Homo sapiens
  chr12:15496643-15496669
  hypo
ttgagacagagtctggagtctcgctc

SEQ ID NO: 170985 - DNA, 26 bp, Homo sapiens
  chr12:15496908-15496934
  hypo
cgcccggccataaataaacaatcttt

SEQ ID NO: 170986 - DNA, 1113 bp, Homo sapiens; identical to SEQ ID NO: 121957
  chr12:15941608-15942721
  hypo

SEQ ID NO: 170987 - DNA, 24 bp, Homo sapiens
  chr12:15950001-15950025
  hypo
gggatttaaaaacagactccccgc

SEQ ID NO: 170988 - DNA, 30 bp, Homo sapiens
  chr12:16034084-16034114
  hypo
tatttcaagttctcacgttgtttgactcga

SEQ ID NO: 170989 - DNA, 59 bp, Homo sapiens; identical to SEQ ID NO: 83858
  chr12:16109904-16109963
  hypo

SEQ ID NO: 170990 - DNA, 30 bp, Homo sapiens
  chr12:16115819-16115849
  hypo
tggagctacagaaatcgacgtggtaattaa

SEQ ID NO: 170991 - DNA, 197 bp, Homo sapiens; identical to SEQ ID NO: 26123
  chr12:16150421-16150618
  hypo

SEQ ID NO: 170992 - DNA, 23 bp, Homo sapiens
  chr12:19230438-19230461
  hypo
accgcgcccggctaaaatatgtt

SEQ ID NO: 170993 - DNA, 113 bp, Homo sapiens; identical to SEQ ID NO: 83861
  chr12:19260899-19261012
  hypo

SEQ ID NO: 170994 - DNA, 31 bp, Homo sapiens; identical to SEQ ID NO: 83862
  chr12:19261247-19261278
  hypo

SEQ ID NO: 170995 - DNA, 1777 bp, Homo sapiens; identical to SEQ ID NO: 49341
  chr12:19282246-19284023
  hypo

SEQ ID NO: 170996 - DNA, 21 bp, Homo sapiens
  chr12:19425383-19425404
  hypo
agctttaggctgagcacggtg

SEQ ID NO: 170997 - DNA, 312 bp, Homo sapiens; identical to SEQ ID NO: 83865
  chr12:19459335-19459647
  hypo

SEQ ID NO: 170998 - DNA, 26 bp, Homo sapiens
  chr12:19493203-19493229
  hypo
actcaaattactaacacgtgtttgaa

SEQ ID NO: 170999 - DNA, 31 bp, Homo sapiens; identical to SEQ ID NO: 83867
  chr12:19497743-19497774
  hypo

SEQ ID NO: 171000 - DNA, 152 bp, Homo sapiens; identical to SEQ ID NO: 83868
  chr12:19512468-19512620
  hypo

SEQ ID NO: 171001 - DNA, 37 bp, Homo sapiens; identical to SEQ ID NO: 26126
  chr12:19539886-19539923
  hypo

SEQ ID NO: 171002 - DNA, 85 bp, Homo sapiens
  chr12:19549592-19549677
  hypo
acttaggaaaataataccttttctttttctaaataaaatacaaacagagtcttgctgtgttgccgacaattgtcttgaactcctg

SEQ ID NO: 171003 - DNA, 36 bp, Homo sapiens
  chr12:19636458-19636494
  hypo
ttgaagcaaaagttcacggtgcgagtctccacatgg

SEQ ID NO: 171004 - DNA, 44 bp, Homo sapiens
  chr12:19928382-19928426
  hypo
ctgtggcattttccccgctcctctggccgccgaaggagtcctgt

SEQ ID NO: 171005 - DNA, 21 bp, Homo sapiens
  chr12:19952158-19952179
  hypo
aagctccgtctcaccaaaaaa

SEQ ID NO: 171006 - DNA, 42 bp, Homo sapiens
  chr12:20015440-20015482
  hypo
agagtttggctcagccgggcgcggtggctcacgcctgtaatc

SEQ ID NO: 171007 - DNA, 30 bp, Homo sapiens; identical to SEQ ID NO: 26127
  chr12:20094235-20094265
  hypo

SEQ ID NO: 171008 - DNA, 30 bp, Homo sapiens; identical to SEQ ID NO: 8614
  chr12:20183925-20183955
  hypo

SEQ ID NO: 171009 - DNA, 30 bp, Homo sapiens
  chr12:20192663-20192693
  hypo
ttattctcacccctccgcatataaatctag

SEQ ID NO: 171010 - DNA, 30 bp, Homo sapiens
  chr12:20421504-20421534
  hypo
gccgtgcccagccaacgtgcagaccccgag

SEQ ID NO: 171011 - DNA, 181 bp, Homo sapiens
  chr12:20704638-20704819
  hypo
actgccctgagtgccggaatgatgccagcgaggtggtactggcgggagagcggctgagagagagcaagaagaaggcgaagatggcctcggccacatcgtcctcacagcgggactgggacaagggcatggcctgtgtgggccgcaccaaggaatgtaccatcatcccgtccaaccactacgg

SEQ ID NO: 171012 - DNA, 20 bp, Homo sapiens
  chr12:21547964-21547984
  hypo
aaataggaacagctccggtg

SEQ ID NO: 171013 - DNA, 30 bp, Homo sapiens
  chr12:21591724-21591754
  hypo
tggatgcgtattttccgtttattcactaag

SEQ ID NO: 171014 - DNA, 793 bp, Homo sapiens; identical to SEQ ID NO: 8621
  chr12:21680358-21681151
  hypo

SEQ ID NO: 171015 - DNA, 26 bp, Homo sapiens
  chr12:21811389-21811415
  hypo
cgcccggccagaaataaatttctatg

SEQ ID NO: 171016 - DNA, 24 bp, Homo sapiens
  chr12:21815668-21815692
  hypo
cccgggggacatgataaatctggg

SEQ ID NO: 171017 - DNA, 30 bp, Homo sapiens; identical to SEQ ID NO: 26133
  chr12:21833062-21833092
  hypo

SEQ ID NO: 171018 - DNA, 110 bp, Homo sapiens; identical to SEQ ID NO: 26134
  chr12:21847671-21847781
  hypo

SEQ ID NO: 171019 - DNA, 157 bp, Homo sapiens; identical to SEQ ID NO: 83879
  chr12:22161231-22161388
  hypo

SEQ ID NO: 171020 - DNA, 31 bp, Homo sapiens; identical to SEQ ID NO: 8628
  chr12:22198510-22198541
  hypo

SEQ ID NO: 171021 - DNA, 27 bp, Homo sapiens
  chr12:22247464-22247491
  hypo
agccaccgcgcccggccaactaatata

SEQ ID NO: 171022 - DNA, 88 bp, Homo sapiens; identical to SEQ ID NO: 8629
  chr12:22486793-22486881
  hypo

SEQ ID NO: 171023 - DNA, 1133 bp, Homo sapiens; identical to SEQ ID NO: 8630
  chr12:22487133-22488266
  hypo

SEQ ID NO: 171024 - DNA, 505 bp, Homo sapiens; identical to SEQ ID NO: 49359
  chr12:22488339-22488844
  hypo

SEQ ID NO: 171025 - DNA, 30 bp, Homo sapiens
  chr12:22492754-22492784
  hypo
ccggcagaccagcaacggcagaacgacatg

SEQ ID NO: 171026 - DNA, 138 bp, Homo sapiens; identical to SEQ ID NO: 121988
  chr12:22529505-22529643
  hypo

SEQ ID NO: 171027 - DNA, 30 bp, Homo sapiens; identical to SEQ ID NO: 83886
  chr12:22545252-22545282
  hypo

SEQ ID NO: 171028 - DNA, 30 bp, Homo sapiens
  chr12:22620381-22620411
  hypo
taaattaaatacagacgctcagtgtgacct

SEQ ID NO: 171029 - DNA, 160 bp, Homo sapiens
  chr12:22698123-22698283
  hypo
ctctgtctccaaaaaaagaaaaaaaagaaagaaagaaatagagataccaggcacatctcgaatagtgaaataaatatttagtgaaatattttattcagtcataggcacttgtgttgtgcactgggtcacagatattactgtgggcggggtgggggaggtc

SEQ ID NO: 171030 - DNA, 30 bp, Homo sapiens; identical to SEQ ID NO: 83888
  chr12:22740485-22740515
  hypo

SEQ ID NO: 171031 - DNA, 30 bp, Homo sapiens
  chr12:23003232-23003262
  hypo
ccttgcaggaggcagcgtgtgaacgaatga

SEQ ID NO: 171032 - DNA, 30 bp, Homo sapiens
  chr12:24117950-24117980
  hypo
gcagcccccagggggcgcgtggtcagctcc

SEQ ID NO: 171033 - DNA, 116 bp, Homo sapiens
  chr12:24323134-24323250
  hypo
aggcagctctcctctgccatccgcaaaatagcaggcagcgctagtgcaaggacagggaacttgcgccacatctgcaaggcaactgtagggtggccggtgacatttctgcattagtc

SEQ ID NO: 171034 - DNA, 38 bp, Homo sapiens; identical to SEQ ID NO: 83889
  chr12:24617257-24617295
  hypo

SEQ ID NO: 171035 - DNA, 26 bp, Homo sapiens
  chr12:24678770-24678796
  hypo
agagcgagactccatctcaaaaaaaa

SEQ ID NO: 171036 - DNA, 55 bp, Homo sapiens; identical to SEQ ID NO: 83891
  chr12:24679250-24679305
  hypo

SEQ ID NO: 171037 - DNA, 1938 bp, Homo sapiens; identical to SEQ ID NO: 49363
  chr12:24714475-24716413
  hypo

SEQ ID NO: 171038 - DNA, 628 bp, Homo sapiens; identical to SEQ ID NO: 121996
  chr12:25101369-25101997
  hypo

SEQ ID NO: 171039 - DNA, 323 bp, Homo sapiens; identical to SEQ ID NO: 8636
  chr12:25102009-25102332
  hypo

SEQ ID NO: 171040 - DNA, 28 bp, Homo sapiens
  chr12:25202626-25202654
  hypo
attttaaaagacggccggatgcggtggc

SEQ ID NO: 171041 - DNA, 121 bp, Homo sapiens
  chr12:25203073-25203194
  hypo
caaaaaacaaataaaaaaaagtgttggtgaggatgtagagatattggagtcctagtgcacagttgggggaatggaaagtggtgcaggcactatagaaaatgttatggagggccgggtgcgg

SEQ ID NO: 171042 - DNA, 43 bp, Homo sapiens; identical to SEQ ID NO: 26142
  chr12:25344061-25344104
  hypo

SEQ ID NO: 171043 - DNA, 30 bp, Homo sapiens
  chr12:25359917-25359947
  hypo
taaagtagcttgatcgaagagtttcagtgg

SEQ ID NO: 171044 - DNA, 30 bp, Homo sapiens
  chr12:25367638-25367668
  hypo
aaagtgtatctctccggtttcacaatgaat

SEQ ID NO: 171045 - DNA, 30 bp, Homo sapiens; identical to SEQ ID NO: 8639
  chr12:25368388-25368418
  hypo

SEQ ID NO: 171046 - DNA, 136 bp, Homo sapiens; identical to SEQ ID NO: 8640
  chr12:25378545-25378681
  hypo

SEQ ID NO: 171047 - DNA, 95 bp, Homo sapiens; identical to SEQ ID NO: 8641
  chr12:25380228-25380323
  hypo

SEQ ID NO: 171048 - DNA, 87 bp, Homo sapiens; identical to SEQ ID NO: 8642
  chr12:25398213-25398300
  hypo

SEQ ID NO: 171049 - DNA, 260 bp, Homo sapiens; identical to SEQ ID NO: 49374
  chr12:25404338-25404598
  hypo

SEQ ID NO: 171050 - DNA, 24 bp, Homo sapiens
  chr12:25428814-25428838
  hypo
agaaggatataatgaccgggcgtg

SEQ ID NO: 171051 - DNA, 30 bp, Homo sapiens; identical to SEQ ID NO: 83902
  chr12:25429183-25429213
  hypo

SEQ ID NO: 171052 - DNA, 221 bp, Homo sapiens; identical to SEQ ID NO: 83903
  chr12:25537193-25537414
  hypo

SEQ ID NO: 171053 - DNA, 21 bp, Homo sapiens
  chr12:25537441-25537462
  hypo
gaagttgacaggatagcagga

SEQ ID NO: 171054 - DNA, 143 bp, Homo sapiens; identical to SEQ ID NO: 122006
  chr12:25538252-25538395
  hypo

SEQ ID NO: 171055 - DNA, 30 bp, Homo sapiens
  chr12:25937809-25937839
  hypo
tcccagcagtgttgccggctgtgttactca

SEQ ID NO: 171056 - DNA, 31 bp, Homo sapiens; identical to SEQ ID NO: 26150
  chr12:26178194-26178225
  hypo

SEQ ID NO: 171057 - DNA, 31 bp, Homo sapiens; identical to SEQ ID NO: 83906
  chr12:26265814-26265845
  hypo

SEQ ID NO: 171058 - DNA, 31 bp, Homo sapiens; identical to SEQ ID NO: 26151
  chr12:26278876-26278907
  hypo

SEQ ID NO: 171059 - DNA, 180 bp, Homo sapiens; identical to SEQ ID NO: 26152
  chr12:26398929-26399109
  hypo

SEQ ID NO: 171060 - DNA, 30 bp, Homo sapiens
  chr12:26439299-26439329
  hypo
tagggcatctgggcacgcggcccacctcca

SEQ ID NO: 171061 - DNA, 166 bp, Homo sapiens
  chr12:26492033-26492199
  hypo
ctccttccatcctgccgctccctgccctctccagccttttgggcaagccttttcttcctgatgcattgcgaatgtgtgatgtacgctttctagcagatgcatttgaggttaggtcttcgcaaccatgaaaacacagttataaattgttctcggagctaacccactc

SEQ ID NO: 171062 - DNA, 30 bp, Homo sapiens; identical to SEQ ID NO: 83910
  chr12:26513248-26513278
  hypo

SEQ ID NO: 171063 - DNA, 64 bp, Homo sapiens
  chr12:26893420-26893484
  hypo
aggacatctgcgatacgtcacacagtagaaagagtaagcttcattccgccgtataaggtgatcc

SEQ ID NO: 171064 - DNA, 35 bp, Homo sapiens; identical to SEQ ID NO: 83911
  chr12:26949666-26949701
  hypo

SEQ ID NO: 171065 - DNA, 200 bp, Homo sapiens; identical to SEQ ID NO: 26154
  chr12:26966973-26967173
  hypo

SEQ ID NO: 171066 - DNA, 25 bp, Homo sapiens
  chr12:27300328-27300353
  hypo
tgagccatcacgcccagccgcgtct

SEQ ID NO: 171067 - DNA, 30 bp, Homo sapiens; identical to SEQ ID NO: 26155
  chr12:27311416-27311446
  hypo

SEQ ID NO: 171068 - DNA, 31 bp, Homo sapiens; identical to SEQ ID NO: 8648
  chr12:27485803-27485834
  hypo

SEQ ID NO: 171069 - DNA, 179 bp, Homo sapiens; identical to SEQ ID NO: 122033
  chr12:27486616-27486795
  hypo

SEQ ID NO: 171070 - DNA, 40 bp, Homo sapiens; identical to SEQ ID NO: 83916
  chr12:27489587-27489627
  hypo

SEQ ID NO: 171071 - DNA, 30 bp, Homo sapiens
  chr12:27494503-27494533
  hypo
tatttcatttatttccgtgacagcctattg

SEQ ID NO: 171072 - DNA, 31 bp, Homo sapiens; identical to SEQ ID NO: 83917
  chr12:27523815-27523846
  hypo

SEQ ID NO: 171073 - DNA, 140 bp, Homo sapiens
  chr12:27600800-27600940
  hypo
ttctctggacttacgcgtctgagccccagaaactcagccgagtgcctctcctatgtgctgccaccgcaaccttccctagcacttaacacattgcacctgaccagagccaagtggcctgcaagctccgcagggacaggaac

SEQ ID NO: 171074 - DNA, 30 bp, Homo sapiens; identical to SEQ ID NO: 83918
  chr12:27668688-27668718
  hypo

SEQ ID NO: 171075 - DNA, 154 bp, Homo sapiens; identical to SEQ ID NO: 83919
  chr12:27671114-27671268
  hypo

SEQ ID NO: 171076 - DNA, 26 bp, Homo sapiens
  chr12:27673412-27673438
  hypo
ccacgcccaaccgagaaagatcttta

SEQ ID NO: 171077 - DNA, 80 bp, Homo sapiens; identical to SEQ ID NO: 83921
  chr12:27742241-27742321
  hypo

SEQ ID NO: 171078 - DNA, 79 bp, Homo sapiens
  chr12:27742380-27742459
  hypo
aatgtatttgacactataattaagagatactgagatatttcctattttaaaatacttcgtcctgctttctaatatatag

SEQ ID NO: 171079 - DNA, 31 bp, Homo sapiens; identical to SEQ ID NO: 83923
  chr12:27749980-27750011
  hypo

SEQ ID NO: 171080 - DNA, 139 bp, Homo sapiens; identical to SEQ ID NO: 83924
  chr12:27842658-27842797
  hypo

SEQ ID NO: 171081 - DNA, 115 bp, Homo sapiens; identical to SEQ ID NO: 83925
  chr12:27950700-27950815
  hypo

SEQ ID NO: 171082 - DNA, 1274 bp, Homo sapiens; identical to SEQ ID NO: 122040
  chr12:28122886-28124160
  hypo

SEQ ID NO: 171083 - DNA, 30 bp, Homo sapiens; identical to SEQ ID NO: 49395
  chr12:28155064-28155094
  hypo

SEQ ID NO: 171084 - DNA, 30 bp, Homo sapiens; identical to SEQ ID NO: 49396
  chr12:28174801-28174831
  hypo

SEQ ID NO: 171085 - DNA, 30 bp, Homo sapiens; identical to SEQ ID NO: 26159
  chr12:28721892-28721922
  hypo

SEQ ID NO: 171086 - DNA, 204 bp, Homo sapiens; identical to SEQ ID NO: 122044
  chr12:29301530-29301734
  hypo

SEQ ID NO: 171087 - DNA, 787 bp, Homo sapiens; identical to SEQ ID NO: 122045
  chr12:29301985-29302772
  hypo

SEQ ID NO: 171088 - DNA, 24 bp, Homo sapiens
  chr12:29324526-29324550
  hypo
tgcctttgccggcctgccaaccgc

SEQ ID NO: 171089 - DNA, 241 bp, Homo sapiens; identical to SEQ ID NO: 26161
  chr12:29373861-29374102
  hypo

SEQ ID NO: 171090 - DNA, 30 bp, Homo sapiens; identical to SEQ ID NO: 83931
  chr12:29565376-29565406
  hypo

SEQ ID NO: 171091 - DNA, 46 bp, Homo sapiens; identical to SEQ ID NO: 83932
  chr12:29889830-29889876
  hypo

SEQ ID NO: 171092 - DNA, 35 bp, Homo sapiens; identical to SEQ ID NO: 83933
  chr12:29890151-29890186
  hypo

SEQ ID NO: 171093 - DNA, 30 bp, Homo sapiens
  chr12:29938302-29938332
  hypo
atcaaaatctttcacgcttggtaaccttaa

SEQ ID NO: 171094 - DNA, 160 bp, Homo sapiens; identical to SEQ ID NO: 83934
  chr12:29945370-29945530
  hypo

SEQ ID NO: 171095 - DNA, 179 bp, Homo sapiens
  chr12:30274284-30274463
  hypo
ggcacacaggcagctggaagtcgagaggagcagaggtgcggaagagcgcactgagaggcaccagaagacgccggccggccattgaccagcggaacgacatggaccctgaggggaatatggctggggcggtcagagaagagtcaggccactgaacacccgactccaagagaaaaccacct

SEQ ID NO: 171096 - DNA, 43 bp, Homo sapiens; identical to SEQ ID NO: 83935
  chr12:30473846-30473889
  hypo

SEQ ID NO: 171097 - DNA, 30 bp, Homo sapiens
  chr12:30776751-30776781
  hypo
catttgttggctcaccgtgcccttcctccg

SEQ ID NO: 171098 - DNA, 22 bp, Homo sapiens
  chr12:30851645-30851667
  hypo
tttctctctctcgcgcgcgcgc

SEQ ID NO: 171099 - DNA, 191 bp, Homo sapiens
  chr12:30861037-30861228
  hypo
ctggcctttaatcattcgtgcacaggactgctctcttggtgggtgggggaggggagcgggcatgttaattacccacacgtgtgttgactcaaagcttttgtcattaaatctgtactaaataaatacaaatattgctggcttattggggcttcactctcgctgtactctctcgtcagcggtgctgagcagtg

SEQ ID NO: 171100 - DNA, 36 bp, Homo sapiens; identical to SEQ ID NO: 83938
  chr12:30950606-30950642
  hypo

SEQ ID NO: 171101 - DNA, 30 bp, Homo sapiens; identical to SEQ ID NO: 83939
  chr12:30976852-30976882
  hypo

SEQ ID NO: 171102 - DNA, 27 bp, Homo sapiens
  chr12:31231897-31231924
  hypo
ggcatgagtcaccgtgcccggcctaaa

SEQ ID NO: 171103 - DNA, 53 bp, Homo sapiens
  chr12:31255263-31255316
  hypo
gcttgggtctgagatcgtgtgggggtggcagctggaaacgttgtgggtgtcat

SEQ ID NO: 171104 - DNA, 278 bp, Homo sapiens
  chr12:31255690-31255968
  hypo
acgggatctctcagccgaacaagccctctccaggtggtaggtacagagtggagagaggctgagttttgatcacagtcggagaggctgagggaaggggtagaacggagcagctggtgacgtgggtgatgacccgggaggtcctgacgtccacctgctgggctcttgtctcccccgcccaggtgtgtggtgatggtgggcatgcccttccccaacatcaggtctgcagagctgcaggagaagatggcctacttggatcaaaccctcgtgagtgaccccag

SEQ ID NO: 171105 - DNA, 31 bp, Homo sapiens; identical to SEQ ID NO: 83941
  chr12:31381945-31381976
  hypo

SEQ ID NO: 171106 - DNA, 31 bp, Homo sapiens; identical to SEQ ID NO: 26164
  chr12:31382410-31382441
  hypo

SEQ ID NO: 171107 - DNA, 31 bp, Homo sapiens; identical to SEQ ID NO: 83943
  chr12:31385501-31385532
  hypo

SEQ ID NO: 171108 - DNA, 109 bp, Homo sapiens
  chr12:31399694-31399803
  hypo
tcttattatcgaaaccgcaaatatgtcgcataccaacgtctgagcccttttaattactgtcattgcctcctccctgacagctgtctacagcacccgaattattttcttt

SEQ ID NO: 171109 - DNA, 30 bp, Homo sapiens; identical to SEQ ID NO: 26165
  chr12:31432478-31432508
  hypo

SEQ ID NO: 171110 - DNA, 30 bp, Homo sapiens
  chr12:31513626-31513656
  hypo
atgtagcatgttagccgtcatattctgtgt

SEQ ID NO: 171111 - DNA, 24 bp, Homo sapiens
  chr12:31514820-31514844
  hypo
gcaacagagcgaaactcagtctca

SEQ ID NO: 171112 - DNA, 27 bp, Homo sapiens
  chr12:31589735-31589762
  hypo
tgggattacagacgtgagtcactgcgc

SEQ ID NO: 171113 - DNA, 36 bp, Homo sapiens
  chr12:31663418-31663454
  hypo
aatccattttcaagcacactgcggttattgctggaa

SEQ ID NO: 171114 - DNA, 31 bp, Homo sapiens; identical to SEQ ID NO: 26166
  chr12:31791719-31791750
  hypo

SEQ ID NO: 171115 - DNA, 37 bp, Homo sapiens; identical to SEQ ID NO: 83946
  chr12:31881030-31881067
  hypo

SEQ ID NO: 171116 - DNA, 111 bp, Homo sapiens
  chr12:31973812-31973923
  hypo
cacagtaaggtgcttttggcacgactacaaattatacgaacatatatgagatgtctctgcccacgtaagtccacttaggtctgaggtcccggagttcttacaggagtctgg

SEQ ID NO: 171117 - DNA, 37 bp, Homo sapiens; identical to SEQ ID NO: 26167
  chr12:31986809-31986846
  hypo

SEQ ID NO: 171118 - DNA, 30 bp, Homo sapiens
  chr12:32097685-32097715
  hypo
tggccgctgaaagaccgaaaaagtaaagga

SEQ ID NO: 171119 - DNA, 40 bp, Homo sapiens; identical to SEQ ID NO: 26168
  chr12:32140932-32140972
  hypo

SEQ ID NO: 171120 - DNA, 224 bp, Homo sapiens; identical to SEQ ID NO: 83950
  chr12:32142772-32142996
  hypo

SEQ ID NO: 171121 - DNA, 143 bp, Homo sapiens
  chr12:32155238-32155381
  hypo
caagactccatctcaaaaaaaaaaaaaaaaaaaaaatcaagtagcttgctcggggttccataacacctcttccttctgtttctctggctttccctcagtccacatataaggcttcatgagagaagacacgaatggatataaac

SEQ ID NO: 171122 - DNA, 17 bp, Homo sapiens
  chr12:32178128-32178145
  hypo
actggtagagggtcttg

SEQ ID NO: 171123 - DNA, 16 bp, Homo sapiens
  chr12:32178264-32178280
  hypo
agcacttcacagggtg

SEQ ID NO: 171124 - DNA, 30 bp, Homo sapiens
  chr12:32230018-32230048
  hypo
ctggagcagcaggagcggcctcttcgaaat

SEQ ID NO: 171125 - DNA, 30 bp, Homo sapiens
  chr12:32423895-32423925
  hypo
cagccgctggccagccggaagccaccatgc

SEQ ID NO: 171126 - DNA, 30 bp, Homo sapiens
  chr12:32446581-32446611
  hypo
aattttataatgttccgttcaatggatgca

SEQ ID NO: 171127 - DNA, 30 bp, Homo sapiens
  chr12:32446975-32447005
  hypo
cgagaatataagttccgggaggcacggctc

SEQ ID NO: 171128 - DNA, 31 bp, Homo sapiens; identical to SEQ ID NO: 26171
  chr12:32490527-32490558
  hypo

SEQ ID NO: 171129 - DNA, 30 bp, Homo sapiens; identical to SEQ ID NO: 83954
  chr12:32554194-32554224
  hypo

SEQ ID NO: 171130 - DNA, 43 bp, Homo sapiens; identical to SEQ ID NO: 83955
  chr12:32597608-32597651
  hypo

SEQ ID NO: 171131 - DNA, 80 bp, Homo sapiens; identical to SEQ ID NO: 83956
  chr12:32831134-32831214
  hypo

SEQ ID NO: 171132 - DNA, 301 bp, Homo sapiens; identical to SEQ ID NO: 26173
  chr12:32831273-32831574
  hypo

SEQ ID NO: 171133 - DNA, 194 bp, Homo sapiens; identical to SEQ ID NO: 26174
  chr12:32864282-32864476
  hypo

SEQ ID NO: 171134 - DNA, 30 bp, Homo sapiens
  chr12:32949067-32949097
  hypo
ttttctggatgcccccggtgtttagaaggt

SEQ ID NO: 171135 - DNA, 44 bp, Homo sapiens; identical to SEQ ID NO: 83959
  chr12:32995443-32995487
  hypo

SEQ ID NO: 171136 - DNA, 88 bp, Homo sapiens
  chr12:33034689-33034777
  hypo
ggaattctcctgcctcagcctctgtgagccaccgtgtctggcctcatattattattttatgttggctgaggctcgcgcctaggctaac

SEQ ID NO: 171137 - DNA, 683 bp, Homo sapiens; identical to SEQ ID NO: 8672
  chr12:33049652-33050335
  hypo

SEQ ID NO: 171138 - DNA, 30 bp, Homo sapiens; identical to SEQ ID NO: 26176
  chr12:33205799-33205829
  hypo

SEQ ID NO: 171139 - DNA, 438 bp, Homo sapiens; identical to SEQ ID NO: 49427
  chr12:33591574-33592012
  hypo

SEQ ID NO: 171140 - DNA, 196 bp, Homo sapiens; identical to SEQ ID NO: 8674
  chr12:33592057-33592253
  hypo

SEQ ID NO: 171141 - DNA, 563 bp, Homo sapiens; identical to SEQ ID NO: 8675
  chr12:33592284-33592847
  hypo

SEQ ID NO: 171142 - DNA, 101 bp, Homo sapiens; identical to SEQ ID NO: 8676
  chr12:33592932-33593033
  hypo

SEQ ID NO: 171143 - DNA, 683 bp, Homo sapiens; identical to SEQ ID NO: 26181
  chr12:34319318-34320001
  hypo

SEQ ID NO: 171144 - DNA, 30 bp, Homo sapiens
  chr12:34357046-34357076
  hypo
tggctccagctggggcggggtggtatatgt

SEQ ID NO: 171145 - DNA, 123 bp, Homo sapiens
  chr12:34357281-34357404
  hypo
ccgtccctgtgcacccggattcccattgccaccgacttcgagtaaactccagtcccgaggacacgagagacacccaggcctcaggccccatgggcacgctccacgccacggctcctaccagag

SEQ ID NO: 171146 - DNA, 394 bp, Homo sapiens; identical to SEQ ID NO: 26182
  chr12:34358286-34358680
  hypo

SEQ ID NO: 171147 - DNA, 355 bp, Homo sapiens; identical to SEQ ID NO: 83968
  chr12:34364380-34364735
  hypo

SEQ ID NO: 171148 - DNA, 73 bp, Homo sapiens; identical to SEQ ID NO: 83969
  chr12:37971168-37971241
  hypo

SEQ ID NO: 171149 - DNA, 30 bp, Homo sapiens; identical to SEQ ID NO: 83970
  chr12:38493268-38493298
  hypo

SEQ ID NO: 171150 - DNA, 30 bp, Homo sapiens
  chr12:38493675-38493705
  hypo
cccgtccctgcgtggcgtcctgctgtgcgc

SEQ ID NO: 171151 - DNA, 43 bp, Homo sapiens; identical to SEQ ID NO: 83971
  chr12:38543127-38543170
  hypo

SEQ ID NO: 171152 - DNA, 30 bp, Homo sapiens
  chr12:38543905-38543935
  hypo
gtgtggtcggtgactcgacaccctgccccc

SEQ ID NO: 171153 - DNA, 30 bp, Homo sapiens; identical to SEQ ID NO: 83972
  chr12:38544474-38544504
  hypo

SEQ ID NO: 171154 - DNA, 30 bp, Homo sapiens; identical to SEQ ID NO: 83973
  chr12:38544920-38544950
  hypo

SEQ ID NO: 171155 - DNA, 30 bp, Homo sapiens; identical to SEQ ID NO: 83974
  chr12:38548047-38548077
  hypo

SEQ ID NO: 171156 - DNA, 726 bp, Homo sapiens; identical to SEQ ID NO: 26183
  chr12:38548365-38549091
  hypo

SEQ ID NO: 171157 - DNA, 420 bp, Homo sapiens; identical to SEQ ID NO: 83976
  chr12:38550956-38551376
  hypo

SEQ ID NO: 171158 - DNA, 217 bp, Homo sapiens; identical to SEQ ID NO: 83977
  chr12:38551793-38552010
  hypo

SEQ ID NO: 171159 - DNA, 84 bp, Homo sapiens
  chr12:38552282-38552366
  hypo
ccagggtgcgtgtctcgctcaagggggcaccccaaagcggcaagtagattcccgggggaagggagagcacgtcaggcttgaagg

SEQ ID NO: 171160 - DNA, 1387 bp, Homo sapiens; identical to SEQ ID NO: 83978
  chr12:38553242-38554629
  hypo

SEQ ID NO: 171161 - DNA, 30 bp, Homo sapiens; identical to SEQ ID NO: 83979
  chr12:38555543-38555573
  hypo

SEQ ID NO: 171162 - DNA, 136 bp, Homo sapiens
  chr12:38555925-38556061
  hypo
tcagggctgaaccgccggcctagccccagggaccctttctctcacaacgtccctaacagcgtcgcttgtcccgacaaggacgtgacccacggccaaatgagttgggggagctgctttgccccgcgctgccactaga

SEQ ID NO: 171163 - DNA, 30 bp, Homo sapiens
  chr12:38556632-38556662
  hypo
gagatttgtagagtgcgtccgtccgtgtgg

SEQ ID NO: 171164 - DNA, 205 bp, Homo sapiens; identical to SEQ ID NO: 26186
  chr12:38595390-38595595
  hypo

SEQ ID NO: 171165 - DNA, 25 bp, Homo sapiens
  chr12:39420324-39420349
  hypo
gggctcggtggctcacgcctgtaat

SEQ ID NO: 171166 - DNA, 30 bp, Homo sapiens; identical to SEQ ID NO: 83981
  chr12:39727015-39727045
  hypo

SEQ ID NO: 171167 - DNA, 20 bp, Homo sapiens
  chr12:40341755-40341775
  hypo
ctggccgagaatttcttgaa

SEQ ID NO: 171168 - DNA, 843 bp, Homo sapiens; identical to SEQ ID NO: 122102
  chr12:40618248-40619091
  hypo

SEQ ID NO: 171169 - DNA, 30 bp, Homo sapiens
  chr12:40719976-40720006
  hypo
gaaatctctgccgggcgcagtggctcatgc

SEQ ID NO: 171170 - DNA, 60 bp, Homo sapiens; identical to SEQ ID NO: 122105
  chr12:41582146-41582206
  hypo

SEQ ID NO: 171171 - DNA, 984 bp, Homo sapiens; identical to SEQ ID NO: 122106
  chr12:41582398-41583382
  hypo

SEQ ID NO: 171172 - DNA, 30 bp, Homo sapiens; identical to SEQ ID NO: 8688
  chr12:41699787-41699817
  hypo

SEQ ID NO: 171173 - DNA, 66 bp, Homo sapiens
  chr12:41925114-41925180
  hypo
aactccacgtcattccgccagtggatggcctgccggagttccagtgcctgtcggtgcttacaacgt

SEQ ID NO: 171174 - DNA, 16 bp, Homo sapiens
  chr12:41934992-41935008
  hypo
acgtgctgggaatacg

SEQ ID NO: 171175 - DNA, 121 bp, Homo sapiens
  chr12:41967349-41967470
  hypo
tggcatgaccacagacgatgacaccatgagcgagatgaaaatggggcgctactggagcaaagaggagagaaagcagcacctggttagggccaaagagcagcgccgtcgccgtgagttcatg

SEQ ID NO: 171176 - DNA, 30 bp, Homo sapiens
  chr12:41976448-41976478
  hypo
tgtcattctacaccccgtgtccatgggtac

SEQ ID NO: 171177 - DNA, 30 bp, Homo sapiens
  chr12:42056542-42056572
  hypo
cttcccggacgggcacggtggctctcgccc

SEQ ID NO: 171178 - DNA, 121 bp, Homo sapiens
  chr12:42066118-42066239
  hypo
ttggctcctccctctcttagatatattctaataacaaaattttctggtatgaaaatcactagcataaaaagtaactgaaaaatgtaatcagttatatgttcatcatgtggaaacattaaac

SEQ ID NO: 171179 - DNA, 30 bp, Homo sapiens
  chr12:42236316-42236346
  hypo
cacaggatccttacacgcaaaagtcagagg

SEQ ID NO: 171180 - DNA, 30 bp, Homo sapiens
  chr12:42472449-42472479
  hypo
gcatagtagattcaccgtaacttttcagta

SEQ ID NO: 171181 - DNA, 22 bp, Homo sapiens
  chr12:42493376-42493398
  hypo
aggcacagcgactcacgcctgt

SEQ ID NO: 171182 - DNA, 99 bp, Homo sapiens
  chr12:42503370-42503469
  hypo
caagaacaatctctgcgaagcacatggtttaaagagttttttccactctgctgcattctcacttggaaaggttatggggtataacgtataattaaatgt

SEQ ID NO: 171183 - DNA, 33 bp, Homo sapiens; identical to SEQ ID NO: 83988
  chr12:42504944-42504977
  hypo

SEQ ID NO: 171184 - DNA, 29 bp, Homo sapiens
  chr12:42608361-42608390
  hypo
ccatgcccggcctcctcttatccttctgc

SEQ ID NO: 171185 - DNA, 30 bp, Homo sapiens
  chr12:42620666-42620696
  hypo
ggccccagaaggctcgaaggcgccgcgggc

SEQ ID NO: 171186 - DNA, 31 bp, Homo sapiens; identical to SEQ ID NO: 26193
  chr12:42633450-42633481
  hypo

SEQ ID NO: 171187 - DNA, 31 bp, Homo sapiens
  chr12:42661936-42661967
  hypo
gccagtgtctttgcagcggctgctccagatg

SEQ ID NO: 171188 - DNA, 41 bp, Homo sapiens; identical to SEQ ID NO: 83991
  chr12:42758693-42758734
  hypo

SEQ ID NO: 171189 - DNA, 184 bp, Homo sapiens
  chr12:42836273-42836457
  hypo
gtgttggcttcaggcctttggcgttctgtctgtaccgaataaatacaagcggctccagcttatcaggactgcactctcttttgggctgcgctaaagccggcagtcccctagccattcttacacaaaatacctgcgtctgaatactcctttcatccggtcgctcggccagagtctgcaggacaga

SEQ ID NO: 171190 - DNA, 30 bp, Homo sapiens; identical to SEQ ID NO: 26194
  chr12:42842694-42842724
  hypo

SEQ ID NO: 171191 - DNA, 151 bp, Homo sapiens
  chr12:42847593-42847744
  hypo
ctcagccaccgtgcccggccgcctggccgatggtattctaacgctacagcattatcactaaaattatctaaggttttaaagttttttccccattaaaaaaaaaaaaaaaacttggctgggtgtggtcacgcctgtaatcccagcactttgg

SEQ ID NO: 171192 - DNA, 42 bp, Homo sapiens; identical to SEQ ID NO: 83994
  chr12:42848887-42848929
  hypo

SEQ ID NO: 171193 - DNA, 79 bp, Homo sapiens; identical to SEQ ID NO: 83995
  chr12:42854065-42854144
  hypo

SEQ ID NO: 171194 - DNA, 90 bp, Homo sapiens; identical to SEQ ID NO: 26195
  chr12:42857518-42857608
  hypo

SEQ ID NO: 171195 - DNA, 39 bp, Homo sapiens
  chr12:43159469-43159508
  hypo
ctcaaaaaaaaaaaaaaaaaaaagcggtgggggggcggg

SEQ ID NO: 171196 - DNA, 17 bp, Homo sapiens
  chr12:43810601-43810618
  hypo
ggcgtgagccaccgcgc

SEQ ID NO: 171197 - DNA, 31 bp, Homo sapiens; identical to SEQ ID NO: 83997
  chr12:43834852-43834883
  hypo

SEQ ID NO: 171198 - DNA, 34 bp, Homo sapiens; identical to SEQ ID NO: 83998
  chr12:44214604-44214638
  hypo

SEQ ID NO: 171199 - DNA, 206 bp, Homo sapiens
  chr12:44278769-44278975
  hypo
atggcacgctcgcaacgtattttcatactttctgctttctctaataaatctgcttttctttacttactaatgtcttggtaaattattctaactgcctgcgcaatacaggccccagatagtcgctacccgagacacctatcccatcccatttatgaaagtgaggcagcaagccaataaacacttcatggattcgtagcaatcacagt

SEQ ID NO: 171200 - DNA, 28 bp, Homo sapiens
  chr12:44508030-44508058
  hypo
ctcctccgtaccaaatttaaataagttt

SEQ ID NO: 171201 - DNA, 79 bp, Homo sapiens; identical to SEQ ID NO: 84000
  chr12:45344681-45344760
  hypo

SEQ ID NO: 171202 - DNA, 569 bp, Homo sapiens; identical to SEQ ID NO: 8692
  chr12:45444112-45444681
  hypo

SEQ ID NO: 171203 - DNA, 692 bp, Homo sapiens; identical to SEQ ID NO: 8693
  chr12:45444714-45445406
  hypo

SEQ ID NO: 171204 - DNA, 30 bp, Homo sapiens
  chr12:45773357-45773387
  hypo
attttaactattaaccgtactctcagcgtt

SEQ ID NO: 171205 - DNA, 86 bp, Homo sapiens
  chr12:45826929-45827015
  hypo
atcgcataggatacccgcttctagttagctacctacagcttcccacatcagtggcctccaatcaggcatagcggaagccttcccac

SEQ ID NO: 171206 - DNA, 30 bp, Homo sapiens
  chr12:45827457-45827487
  hypo
tgctctttgagccctcgtcaccgtcaccgt

SEQ ID NO: 171207 - DNA, 30 bp, Homo sapiens
  chr12:45827846-45827876
  hypo
accaactggaagatacgcctgagatcggtc

SEQ ID NO: 171208 - DNA, 134 bp, Homo sapiens; identical to SEQ ID NO: 84004
  chr12:45862283-45862417
  hypo

SEQ ID NO: 171209 - DNA, 30 bp, Homo sapiens
  chr12:46308805-46308835
  hypo
ggaaattatcaattcgacaaaacttaaaac

SEQ ID NO: 171210 - DNA, 30 bp, Homo sapiens
  chr12:46320095-46320125
  hypo
cctgttcactttttcgcttataggattgct

SEQ ID NO: 171211 - DNA, 30 bp, Homo sapiens; identical to SEQ ID NO: 84005
  chr12:46361139-46361169
  hypo

SEQ ID NO: 171212 - DNA, 37 bp, Homo sapiens; identical to SEQ ID NO: 84006
  chr12:46610345-46610382
  hypo

SEQ ID NO: 171213 - DNA, 37 bp, Homo sapiens; identical to SEQ ID NO: 84007
  chr12:46610621-46610658
  hypo

SEQ ID NO: 171214 - DNA, 30 bp, Homo sapiens
  chr12:46613717-46613747
  hypo
tctagcgcatgtgcgcgcacacacacacgc

SEQ ID NO: 171215 - DNA, 43 bp, Homo sapiens; identical to SEQ ID NO: 84008
  chr12:46634309-46634352
  hypo

SEQ ID NO: 171216 - DNA, 30 bp, Homo sapiens
  chr12:46652944-46652974
  hypo
atataatttttaaagcggagaaagtgttaa

SEQ ID NO: 171217 - DNA, 132 bp, Homo sapiens
  chr12:46757483-46757615
  hypo
ttttggtaaaggaggcgttacttaccgtaaaatgttaggtatccaaagagggcggcaagcagatacatgagaaacatagcaaaaaatgaaatcttggacacattcatcattcttctacggctgcggctatgt

SEQ ID NO: 171218 - DNA, 30 bp, Homo sapiens
  chr12:47471891-47471921
  hypo
atgaataaagccaagcgcacgaaaggaacc

SEQ ID NO: 171219 - DNA, 215 bp, Homo sapiens
  chr12:47497157-47497372
  hypo
gttacgggaaagatgcgcactgcagcagggcctggaatgtggctcccatctgcactgccagaagccatgatgaagtcacgagttgcacaacagtagtaattcgcagctatttatgaccattttaatagcaaaggtctagattagaaggctgtgtttacatgccatgtagcagaatagttcacgaatcattcccacagtaacgtttggtcaaacca

SEQ ID NO: 171220 - DNA, 40 bp, Homo sapiens; identical to SEQ ID NO: 84009
  chr12:47603244-47603284
  hypo

SEQ ID NO: 171221 - DNA, 30 bp, Homo sapiens
  chr12:47611966-47611996
  hypo
gagctcggctggacacggcagcagggagaa

SEQ ID NO: 171222 - DNA, 22 bp, Homo sapiens
  chr12:47627206-47627228
  hypo
cgccacaatttttaaattaata

SEQ ID NO: 171223 - DNA, 1091 bp, Homo sapiens; identical to SEQ ID NO: 84011
  chr12:47628717-47629808
  hypo

SEQ ID NO: 171224 - DNA, 30 bp, Homo sapiens; identical to SEQ ID NO: 26199
  chr12:47671343-47671373
  hypo

SEQ ID NO: 171225 - DNA, 150 bp, Homo sapiens
  chr12:47699296-47699446
  hypo
gacggttctcccccggagttgggccgctcatcaacgaggctctcctccaactgccccagccaaactccgtattgttctgcggatcggggtgcctgctggattgcctgtgccagtgcattccacttgacacccagccgcctgtgtgtgcct

SEQ ID NO: 171226 - DNA, 121 bp, Homo sapiens
  chr12:47799204-47799325
  hypo
gccaccacacccggccacattctatgatttttttaggtaaatgtagagttgtgctgtttttaagtaaatgtagagttgtgcccatatcaccacacgccagtgtgagaacattttcatcacc

SEQ ID NO: 171227 - DNA, 30 bp, Homo sapiens; identical to SEQ ID NO: 26200
  chr12:48174654-48174684
  hypo

SEQ ID NO: 171228 - DNA, 192 bp, Homo sapiens; identical to SEQ ID NO: 84014
  chr12:48191882-48192074
  hypo

SEQ ID NO: 171229 - DNA, 30 bp, Homo sapiens
  chr12:48192331-48192361
  hypo
gccacctccttacttcgcttgctcttgtcc

SEQ ID NO: 171230 - DNA, 49 bp, Homo sapiens
  chr12:48218920-48218969
  hypo
aagcgcaaatgagtgcgtcgcaaagagggaagaccggagcacatcggga

SEQ ID NO: 171231 - DNA, 40 bp, Homo sapiens
  chr12:48226919-48226959
  hypo
gtgtgtgtgtgcgcgcgcgcgcgtgcgcgcgcacgcgtgt

SEQ ID NO: 171232 - DNA, 29 bp, Homo sapiens
  chr12:48236541-48236570
  hypo
accgcgccgggcctgtcctggcccacttc

SEQ ID NO: 171233 - DNA, 30 bp, Homo sapiens; identical to SEQ ID NO: 84016
  chr12:48237737-48237767
  hypo

SEQ ID NO: 171234 - DNA, 91 bp, Homo sapiens
  chr12:48238688-48238779
  hypo
cccgggggcgggtggcggcagcggatgtacgtctgcagtgtgttggacaggcggtcctggatggcctcaatcagcgcggcgtcctgcaccc

SEQ ID NO: 171235 - DNA, 98 bp, Homo sapiens
  chr12:48240442-48240540
  hypo
tggtcacgtcactgacgcggtacttgtagtcttggttgccacaggtccaggacatgtcgtccatggtgaaggactcattggagcgcaacatgatgacc

SEQ ID NO: 171236 - DNA, 321 bp, Homo sapiens; identical to SEQ ID NO: 122163
  chr12:48299193-48299514
  hypo

SEQ ID NO: 171237 - DNA, 132 bp, Homo sapiens; identical to SEQ ID NO: 84018
  chr12:48347938-48348070
  hypo

SEQ ID NO: 171238 - DNA, 2349 bp, Homo sapiens; identical to SEQ ID NO: 122167
  chr12:48396585-48398934
  hypo

SEQ ID NO: 171239 - DNA, 1490 bp, Homo sapiens; identical to SEQ ID NO: 122172
  chr12:48576834-48578324
  hypo

SEQ ID NO: 171240 - DNA, 38 bp, Homo sapiens; identical to SEQ ID NO: 84021
  chr12:48590826-48590864
  hypo

SEQ ID NO: 171241 - DNA, 30 bp, Homo sapiens; identical to SEQ ID NO: 84022
  chr12:48722685-48722715
  hypo

SEQ ID NO: 171242 - DNA, 30 bp, Homo sapiens; identical to SEQ ID NO: 26204
  chr12:48722975-48723005
  hypo

SEQ ID NO: 171243 - DNA, 33 bp, Homo sapiens
  chr12:48727660-48727693
  hypo
ccggcggtcgggcggcggcggctgccaagtctt

SEQ ID NO: 171244 - DNA, 175 bp, Homo sapiens; identical to SEQ ID NO: 84024
  chr12:48745082-48745257
  hypo

SEQ ID NO: 171245 - DNA, 77 bp, Homo sapiens; identical to SEQ ID NO: 84025
  chr12:48838929-48839006
  hypo

SEQ ID NO: 171246 - DNA, 30 bp, Homo sapiens; identical to SEQ ID NO: 84026
  chr12:48921767-48921797
  hypo

SEQ ID NO: 171247 - DNA, 30 bp, Homo sapiens
  chr12:48922035-48922065
  hypo
agaccggggccacgcgggcaccgtgatccc

SEQ ID NO: 171248 - DNA, 30 bp, Homo sapiens; identical to SEQ ID NO: 84027
  chr12:49062841-49062871
  hypo

SEQ ID NO: 171249 - DNA, 139 bp, Homo sapiens; identical to SEQ ID NO: 26206
  chr12:49065583-49065722
  hypo

SEQ ID NO: 171250 - DNA, 19 bp, Homo sapiens
  chr12:49111678-49111697
  hypo
ttcccagctcctttgccgg

SEQ ID NO: 171251 - DNA, 31 bp, Homo sapiens; identical to SEQ ID NO: 84029
  chr12:49150047-49150078
  hypo

SEQ ID NO: 171252 - DNA, 336 bp, Homo sapiens; identical to SEQ ID NO: 8711
  chr12:49182446-49182782
  hypo

SEQ ID NO: 171253 - DNA, 327 bp, Homo sapiens; identical to SEQ ID NO: 49494
  chr12:49183003-49183330
  hypo

SEQ ID NO: 171254 - DNA, 39 bp, Homo sapiens; identical to SEQ ID NO: 84032
  chr12:49191467-49191506
  hypo

SEQ ID NO: 171255 - DNA, 30 bp, Homo sapiens
  chr12:49237792-49237822
  hypo
cccgctccttatctcgttctcgttctttgt

SEQ ID NO: 171256 - DNA, 482 bp, Homo sapiens; identical to SEQ ID NO: 49497
  chr12:49351241-49351723
  hypo

SEQ ID NO: 171257 - DNA, 544 bp, Homo sapiens; identical to SEQ ID NO: 122190
  chr12:49363693-49364237
  hypo

SEQ ID NO: 171258 - DNA, 699 bp, Homo sapiens; identical to SEQ ID NO: 122192
  chr12:49371613-49372312
  hypo

SEQ ID NO: 171259 - DNA, 1033 bp, Homo sapiens; identical to SEQ ID NO: 122193
  chr12:49373993-49375026
  hypo

SEQ ID NO: 171260 - DNA, 455 bp, Homo sapiens; identical to SEQ ID NO: 8720
  chr12:49375115-49375570
  hypo

SEQ ID NO: 171261 - DNA, 30 bp, Homo sapiens
  chr12:49396105-49396135
  hypo
accttagctaaccacgctgctctcctcctc

SEQ ID NO: 171262 - DNA, 177 bp, Homo sapiens; identical to SEQ ID NO: 26214
  chr12:49416382-49416559
  hypo

SEQ ID NO: 171263 - DNA, 30 bp, Homo sapiens
  chr12:49422415-49422445
  hypo
tgggactacgagccccgtgagggcaggaac

SEQ ID NO: 171264 - DNA, 251 bp, Homo sapiens; identical to SEQ ID NO: 26215
  chr12:49422760-49423011
  hypo

SEQ ID NO: 171265 - DNA, 49 bp, Homo sapiens; identical to SEQ ID NO: 26216
  chr12:49436024-49436073
  hypo

SEQ ID NO: 171266 - DNA, 232 bp, Homo sapiens; identical to SEQ ID NO: 84041
  chr12:49443422-49443654
  hypo

SEQ ID NO: 171267 - DNA, 30 bp, Homo sapiens; identical to SEQ ID NO: 26217
  chr12:49444142-49444172
  hypo

SEQ ID NO: 171268 - DNA, 91 bp, Homo sapiens; identical to SEQ ID NO: 122206
  chr12:49487979-49488070
  hypo

SEQ ID NO: 171269 - DNA, 78 bp, Homo sapiens; identical to SEQ ID NO: 122207
  chr12:49488131-49488209
  hypo

SEQ ID NO: 171270 - DNA, 45 bp, Homo sapiens; identical to SEQ ID NO: 84043
  chr12:49520523-49520568
  hypo

SEQ ID NO: 171271 - DNA, 31 bp, Homo sapiens; identical to SEQ ID NO: 84044
  chr12:49566959-49566990
  hypo

SEQ ID NO: 171272 - DNA, 19 bp, Homo sapiens
  chr12:49575837-49575856
  hypo
actccgtctcaaaaaaaaa

SEQ ID NO: 171273 - DNA, 17 bp, Homo sapiens
  chr12:49596187-49596204
  hypo
aatcagacagccgggcg

SEQ ID NO: 171274 - DNA, 155 bp, Homo sapiens; identical to SEQ ID NO: 26218
  chr12:49620905-49621060
  hypo

SEQ ID NO: 171275 - DNA, 86 bp, Homo sapiens
  chr12:49647105-49647191
  hypo
ggtaggtgtaagctacggtggaagctatggaaggagacctgaggatgtagcggaatagaggacagtgcacacgtgggcgtgtcaat

SEQ ID NO: 171276 - DNA, 103 bp, Homo sapiens; identical to SEQ ID NO: 84048
  chr12:49657606-49657709
  hypo

SEQ ID NO: 171277 - DNA, 302 bp, Homo sapiens; identical to SEQ ID NO: 8732
  chr12:49761540-49761842
  hypo

SEQ ID NO: 171278 - DNA, 17 bp, Homo sapiens
  chr12:49875127-49875144
  hypo
agcgagactccgtctcc

SEQ ID NO: 171279 - DNA, 30 bp, Homo sapiens
  chr12:49921549-49921579
  hypo
agtattgaacgtaaccgtataattgagctc

SEQ ID NO: 171280 - DNA, 384 bp, Homo sapiens
  chr12:49927212-49927596
  hypo
gggcacatactccctcgccaactccggcagggctatgttggccaccttcccttcgggtcctgcagttaactgcagtgtctcacctggcgtggagtccaggtgttgttcacaatgggcattcaccacaggtcactgaccatctgtcagaaataaccatgccgttcccttttcataggctgtttaccaaaggagaagacaaagtggccgcactgcatggcatagtcctgaattgccgtcatcctagtcaaatcttggttcagacctgattctttttcttactagccaagcaatatgggccagtttctttatctgtaaacacaactctgtgcctcccaggtttcccttgtttgaaagttgattgtgggccgggcgcagtggctcaca

SEQ ID NO: 171281 - DNA, 461 bp, Homo sapiens; identical to SEQ ID NO: 49529
  chr12:49931602-49932063
  hypo

SEQ ID NO: 171282 - DNA, 93 bp, Homo sapiens; identical to SEQ ID NO: 122233
  chr12:49932285-49932378
  hypo

SEQ ID NO: 171283 - DNA, 293 bp, Homo sapiens; identical to SEQ ID NO: 122234
  chr12:49932965-49933258
  hypo

SEQ ID NO: 171284 - DNA, 215 bp, Homo sapiens; identical to SEQ ID NO: 49531
  chr12:49933289-49933504
  hypo

SEQ ID NO: 171285 - DNA, 30 bp, Homo sapiens; identical to SEQ ID NO: 26220
  chr12:49934891-49934921
  hypo

SEQ ID NO: 171286 - DNA, 248 bp, Homo sapiens; identical to SEQ ID NO: 84054
  chr12:49935482-49935730
  hypo

SEQ ID NO: 171287 - DNA, 30 bp, Homo sapiens; identical to SEQ ID NO: 84055
  chr12:49943989-49944019
  hypo

SEQ ID NO: 171288 - DNA, 103 bp, Homo sapiens; identical to SEQ ID NO: 26222
  chr12:49989770-49989873
  hypo

SEQ ID NO: 171289 - DNA, 30 bp, Homo sapiens; identical to SEQ ID NO: 84057
  chr12:50024314-50024344
  hypo

SEQ ID NO: 171290 - DNA, 421 bp, Homo sapiens
  chr12:50036035-50036456
  hypo
gcacgggagagggagcgggagaaggaggaggcacgcaggatgcggcgcagggaagctgcctttcgaagcatgctgaggcaggctgtgcctgctctggagctaggcactgcctgggaagaggtcaggagcgtagcctggccccaagcacccctcaagcctgagggcagcggtgcttcaccactgagggcccaccccagtcacgtcacagccctgggccagctccagttcccttcctttctctgccccagccctgccctgtgctcatggcggtgtccaggccaggctgagtggggcctagtctgatcagcagtgctctcctcgttcaaggtccgtgagcgttttgtgtgtgactcagcctttgagcagatcaccctggagtcggagcggatccggctcttccgggagttcctacaggtgctgg

SEQ ID NO: 171291 - DNA, 261 bp, Homo sapiens; identical to SEQ ID NO: 84058
  chr12:50037797-50038058
  hypo

SEQ ID NO: 171292 - DNA, 30 bp, Homo sapiens; identical to SEQ ID NO: 84059
  chr12:50045903-50045933
  hypo

SEQ ID NO: 171293 - DNA, 30 bp, Homo sapiens
  chr12:50182794-50182824
  hypo
catttctatagtctcgggaaaaaatttttt

SEQ ID NO: 171294 - DNA, 183 bp, Homo sapiens; identical to SEQ ID NO: 84060
  chr12:50185745-50185928
  hypo

SEQ ID NO: 171295 - DNA, 30 bp, Homo sapiens; identical to SEQ ID NO: 84061
  chr12:50188838-50188868
  hypo

SEQ ID NO: 171296 - DNA, 152 bp, Homo sapiens
  chr12:50237318-50237470
  hypo
tgtgactcaaaaacttccacccggttcaggaaagggtagccaggaggtgcaggtcacttgcgaagccagccgactcagccctgtcccccaggggcaactgtagaccatgagctccttgagaggcaaggaccgtgccttaagagccagcactt

SEQ ID NO: 171297 - DNA, 39 bp, Homo sapiens; identical to SEQ ID NO: 84063
  chr12:50262262-50262301
  hypo

SEQ ID NO: 171298 - DNA, 31 bp, Homo sapiens; identical to SEQ ID NO: 84064
  chr12:50262514-50262545
  hypo

SEQ ID NO: 171299 - DNA, 194 bp, Homo sapiens; identical to SEQ ID NO: 84065
  chr12:50269010-50269204
  hypo

SEQ ID NO: 171300 - DNA, 21 bp, Homo sapiens
  chr12:50270257-50270278
  hypo
aaagctgggctgggtgcggtg

SEQ ID NO: 171301 - DNA, 47 bp, Homo sapiens
  chr12:50282792-50282839
  hypo
tcctggccttccctggcggataggggagggaacggcaccttgggcca

SEQ ID NO: 171302 - DNA, 31 bp, Homo sapiens; identical to SEQ ID NO: 26224
  chr12:50290502-50290533
  hypo

SEQ ID NO: 171303 - DNA, 185 bp, Homo sapiens; identical to SEQ ID NO: 84068
  chr12:50296426-50296611
  hypo

SEQ ID NO: 171304 - DNA, 98 bp, Homo sapiens; identical to SEQ ID NO: 26225
  chr12:50322850-50322948
  hypo

SEQ ID NO: 171305 - DNA, 308 bp, Homo sapiens; identical to SEQ ID NO: 84070
  chr12:50366184-50366492
  hypo

SEQ ID NO: 171306 - DNA, 31 bp, Homo sapiens; identical to SEQ ID NO: 84071
  chr12:50370399-50370430
  hypo

SEQ ID NO: 171307 - DNA, 234 bp, Homo sapiens; identical to SEQ ID NO: 26227
  chr12:50400183-50400417
  hypo

SEQ ID NO: 171308 - DNA, 22 bp, Homo sapiens
  chr12:50422260-50422282
  hypo
tgcaattatggctgggcgaggt

SEQ ID NO: 171309 - DNA, 27 bp, Homo sapiens
  chr12:50432783-50432810
  hypo
tgagacagagtcttgctctgtcgccca

SEQ ID NO: 171310 - DNA, 30 bp, Homo sapiens
  chr12:50446878-50446908
  hypo
agacagattggggcgcgtgtgatttcatgc

SEQ ID NO: 171311 - DNA, 185 bp, Homo sapiens
  chr12:50467723-50467908
  hypo
cgtgacccttctaaacgaagtggccaccacggagctggccttcccggcagtcaccctctgcaacactaatgctgtgcggctgtcccagctcagctaccctgacttgctttatttggcccccatgctgggactggatgaaagtgatgaccccggggtgcccctcgctccaccgggccctgaggcct

SEQ ID NO: 171312 - DNA, 31 bp, Homo sapiens; identical to SEQ ID NO: 26229
  chr12:50470988-50471019
  hypo

SEQ ID NO: 171313 - DNA, 31 bp, Homo sapiens; identical to SEQ ID NO: 84076
  chr12:50472154-50472185
  hypo

SEQ ID NO: 171314 - DNA, 30 bp, Homo sapiens; identical to SEQ ID NO: 26230
  chr12:50476154-50476184
  hypo

SEQ ID NO: 171315 - DNA, 133 bp, Homo sapiens
  chr12:50484302-50484435
  hypo
tcagagatccctcagcggctccatgccttgcttatgccaccagaacctatcatcattaatcatgtcatcaggtaggcctgtgtgtgggaggcagtgctgtgccggagctgccttgtgccgatttgcacaagcc

SEQ ID NO: 171316 - DNA, 31 bp, Homo sapiens; identical to SEQ ID NO: 84079
  chr12:50499947-50499978
  hypo

SEQ ID NO: 171317 - DNA, 23 bp, Homo sapiens
  chr12:50558873-50558896
  hypo
ctccaggatgactaactacaacg

SEQ ID NO: 171318 - DNA, 22 bp, Homo sapiens
  chr12:50559195-50559217
  hypo
cgtctcaaaaaaaaaagaaaaa

SEQ ID NO: 171319 - DNA, 181 bp, Homo sapiens
  chr12:50602877-50603058
  hypo
ttacaggtgtgggccactgcatccggcctgattgggtctatttttaataaaaactaaaacaagctggaacaacactatccgtgctacatcacacacaggtcaggcatactttcatgaattattatacatccatatgactcacacagctcaacatactcttgctctaggagcagccgctatc

SEQ ID NO: 171320 - DNA, 19 bp, Homo sapiens
  chr12:50609261-50609280
  hypo
tatttttctttgaggcagt

SEQ ID NO: 171321 - DNA, 17 bp, Homo sapiens
  chr12:50671769-50671786
  hypo
aatattcgggccgggcg

SEQ ID NO: 171322 - DNA, 23 bp, Homo sapiens
  chr12:50672189-50672212
  hypo
gcgagactccatctcaaaaatca

SEQ ID NO: 171323 - DNA, 22 bp, Homo sapiens
  chr12:50676322-50676344
  hypo
tttttgtagagacaagggtctc

SEQ ID NO: 171324 - DNA, 506 bp, Homo sapiens; identical to SEQ ID NO: 122263
  chr12:50677033-50677539
  hypo

SEQ ID NO: 171325 - DNA, 81 bp, Homo sapiens
  chr12:50785991-50786072
  hypo
aaatgggcaaaatcattatgtcgatgtggtgaaggtttcacaggtttgttgtttgtttgtttgtttgtttgtttgtttgtt

SEQ ID NO: 171326 - DNA, 33 bp, Homo sapiens
  chr12:50790623-50790656
  hypo
ctagatgtgttggccgggtgcagtggctcatgc

SEQ ID NO: 171327 - DNA, 25 bp, Homo sapiens
  chr12:50897741-50897766
  hypo
ttttcttttctttagacggagtgtt

SEQ ID NO: 171328 - DNA, 18 bp, Homo sapiens
  chr12:50950149-50950167
  hypo
gcccggccgactcctcat

SEQ ID NO: 171329 - DNA, 30 bp, Homo sapiens
  chr12:51021057-51021087
  hypo
ccgtagtcaggctacgcagaaaccaaatca

SEQ ID NO: 171330 - DNA, 31 bp, Homo sapiens; identical to SEQ ID NO: 84089
  chr12:51041858-51041889
  hypo

SEQ ID NO: 171331 - DNA, 30 bp, Homo sapiens; identical to SEQ ID NO: 49553
  chr12:51045433-51045463
  hypo

SEQ ID NO: 171332 - DNA, 137 bp, Homo sapiens; identical to SEQ ID NO: 26237
  chr12:51116976-51117113
  hypo

SEQ ID NO: 171333 - DNA, 41 bp, Homo sapiens; identical to SEQ ID NO: 26238
  chr12:51148429-51148470
  hypo

SEQ ID NO: 171334 - DNA, 30 bp, Homo sapiens; identical to SEQ ID NO: 49554
  chr12:51155647-51155677
  hypo

SEQ ID NO: 171335 - DNA, 30 bp, Homo sapiens
  chr12:51180182-51180212
  hypo
gtaggcaagcgtgagcgtatagaatccttg

SEQ ID NO: 171336 - DNA, 21 bp, Homo sapiens
  chr12:51207583-51207604
  hypo
gagactccatctcaaaaaaga

SEQ ID NO: 171337 - DNA, 113 bp, Homo sapiens; identical to SEQ ID NO: 84095
  chr12:51346408-51346521
  hypo

SEQ ID NO: 171338 - DNA, 182 bp, Homo sapiens; identical to SEQ ID NO: 84096
  chr12:51346932-51347114
  hypo

SEQ ID NO: 171339 - DNA, 30 bp, Homo sapiens; identical to SEQ ID NO: 26241
  chr12:51376078-51376108
  hypo

SEQ ID NO: 171340 - DNA, 121 bp, Homo sapiens
  chr12:51407287-51407408
  hypo
ccaggctgtaaatcacttttgtaatgatgattaatatcattaaggcactggaaaatcagctgggcactgtttaaggcactggaaaatcacctgggcgtggtagtgcatgtctgtggtgcca

SEQ ID NO: 171341 - DNA, 121 bp, Homo sapiens; identical to SEQ ID NO: 84098
  chr12:51407527-51407648
  hypo

SEQ ID NO: 171342 - DNA, 30 bp, Homo sapiens; identical to SEQ ID NO: 84099
  chr12:51408356-51408386
  hypo

SEQ ID NO: 171343 - DNA, 571 bp, Homo sapiens; identical to SEQ ID NO: 84100
  chr12:51421109-51421680
  hypo

SEQ ID NO: 171344 - DNA, 18 bp, Homo sapiens
  chr12:51441350-51441368
  hypo
gggcgacagagcaaaact

SEQ ID NO: 171345 - DNA, 114 bp, Homo sapiens
  chr12:51461519-51461633
  hypo
caaccacattcttcccgtgacaggcggatggctcgaagttcttgcttctcttcagcatcaatacggtggaccccagaagccctcagcagggcccgtcgccgtttggtgggcaga

SEQ ID NO: 171346 - DNA, 121 bp, Homo sapiens
  chr12:51478094-51478215
  hypo
agcgagactccgtctcaaaaaaaaaaaaaaaaaaatcttctcaactttgcaaactaatttatttatttaaatagaaaaggggttttcgccatgttgccccggctggtcttgcactcctggg

SEQ ID NO: 171347 - DNA, 152 bp, Homo sapiens; identical to SEQ ID NO: 26243
  chr12:51479054-51479206
  hypo

SEQ ID NO: 171348 - DNA, 30 bp, Homo sapiens; identical to SEQ ID NO: 84104
  chr12:51488901-51488931
  hypo

SEQ ID NO: 171349 - DNA, 22 bp, Homo sapiens
  chr12:51512321-51512343
  hypo
cgtctcaaaacaaacaaacaaa

SEQ ID NO: 171350 - DNA, 30 bp, Homo sapiens; identical to SEQ ID NO: 84105
  chr12:51518404-51518434
  hypo

SEQ ID NO: 171351 - DNA, 102 bp, Homo sapiens; identical to SEQ ID NO: 84106
  chr12:51565446-51565548
  hypo

SEQ ID NO: 171352 - DNA, 30 bp, Homo sapiens; identical to SEQ ID NO: 84107
  chr12:51585364-51585394
  hypo

SEQ ID NO: 171353 - DNA, 112 bp, Homo sapiens; identical to SEQ ID NO: 84108
  chr12:51592044-51592156
  hypo

SEQ ID NO: 171354 - DNA, 33 bp, Homo sapiens; identical to SEQ ID NO: 122276
  chr12:51610958-51610991
  hypo

SEQ ID NO: 171355 - DNA, 121 bp, Homo sapiens; identical to SEQ ID NO: 84110
  chr12:51615466-51615587
  hypo

SEQ ID NO: 171356 - DNA, 30 bp, Homo sapiens; identical to SEQ ID NO: 26245
  chr12:51756227-51756257
  hypo

SEQ ID NO: 171357 - DNA, 241 bp, Homo sapiens
  chr12:51794743-51794984
  hypo
ggttcccttgtccccctcacagggagtgcaacaaggggagtggctcgcttctttagggcccggctgctgaaatctctatggaacatacagatgggcaggttgtggggttcagatcccacggcagcgtctacctttggacagtgccaacatgtttttcttttgtttgtttgagacggagcgttcctctgtcgccagttagtgtttacagctcctagccccagtgggcgtgtgctaccgtgtg

SEQ ID NO: 171358 - DNA, 82 bp, Homo sapiens
  chr12:51795223-51795305
  hypo
cagctgggctctcctctgactgccccaggcaaactctatgtctttccgtgggccgatggcgtgccagcgtgctggcatctgc

SEQ ID NO: 171359 - DNA, 690 bp, Homo sapiens; identical to SEQ ID NO: 122283
  chr12:51818411-51819101
  hypo

SEQ ID NO: 171360 - DNA, 84 bp, Homo sapiens
  chr12:51844685-51844769
  hypo
cggatgccgcttggccggcagagccatcggcatcaccgcactcatggccagaagcaccggagacgagggcggggcaaaggagcc

SEQ ID NO: 171361 - DNA, 95 bp, Homo sapiens
  chr12:51873685-51873780
  hypo
gctgcccttttttctgtctcacgaaacagagggctgtttctacaaggccaagttttgtataaatggaatttttttttttttttttttcagatgga

SEQ ID NO: 171362 - DNA, 25 bp, Homo sapiens
  chr12:51894479-51894504
  hypo
tttttttttgagatggagtctcgct

SEQ ID NO: 171363 - DNA, 329 bp, Homo sapiens
  chr12:51919430-51919759
  hypo
ctgtgcccggcctacatttattatctcattgtttccttggatcgggagcctgggcgtggctcaacagggtcctctactcagggtctctcaggggctgcagtcaaggtgtcggctgcggcttctgtctcgtctgaagctggaggtccttttctaagatcctggaagttgttgggagaattcagatccttgtggctgtgggctgaggccctccactctcagagaccactggtttctatggccgtgtcatgtcatggctgatagcttctggaggcccagaatccagtcacaggttttctaaatttcgaaatatttctcgaagttcttacttc

SEQ ID NO: 171364 - DNA, 30 bp, Homo sapiens
  chr12:52164285-52164315
  hypo
ctgacccgcctctcccgctggtgccaggtt

SEQ ID NO: 171365 - DNA, 30 bp, Homo sapiens
  chr12:52216197-52216227
  hypo
cttcaacagagctgcgggcaagagacagga

SEQ ID NO: 171366 - DNA, 30 bp, Homo sapiens; identical to SEQ ID NO: 26247
  chr12:52231194-52231224
  hypo

SEQ ID NO: 171367 - DNA, 30 bp, Homo sapiens; identical to SEQ ID NO: 26248
  chr12:52283209-52283239
  hypo

SEQ ID NO: 171368 - DNA, 231 bp, Homo sapiens; identical to SEQ ID NO: 122291
  chr12:52294167-52294398
  hypo

SEQ ID NO: 171369 - DNA, 30 bp, Homo sapiens
  chr12:52309135-52309165
  hypo
gaggctagctgtgtccgcggcatgcggcct

SEQ ID NO: 171370 - DNA, 148 bp, Homo sapiens; identical to SEQ ID NO: 122294
  chr12:52345763-52345911
  hypo

SEQ ID NO: 171371 - DNA, 246 bp, Homo sapiens
  chr12:52387803-52388049
  hypo
ttggtatgccaacggcgcagcccgcctgacggccctgcgcatcaagaagaccctctcccagctcagcgtgcaggaagacgtgaagatctaactgctccctctctccacacggagctcctggcagcgagaactacgcacagctgccgcgttgagcgtacgatggaggcctacctctcgtttctgcccagccctctgtggccaggagccctggcccgcaagagggacagagcccgggagagactcgct

SEQ ID NO: 171372 - DNA, 107 bp, Homo sapiens; identical to SEQ ID NO: 84122
  chr12:52388408-52388515
  hypo

SEQ ID NO: 171373 - DNA, 335 bp, Homo sapiens; identical to SEQ ID NO: 122295
  chr12:52400153-52400488
  hypo

SEQ ID NO: 171374 - DNA, 1022 bp, Homo sapiens; identical to SEQ ID NO: 122296
  chr12:52400516-52401538
  hypo

SEQ ID NO: 171375 - DNA, 30 bp, Homo sapiens
  chr12:52406769-52406799
  hypo
ggtcttatggccagcgtggactggacagaa

SEQ ID NO: 171376 - DNA, 361 bp, Homo sapiens; identical to SEQ ID NO: 122298
  chr12:52416803-52417164
  hypo

SEQ ID NO: 171377 - DNA, 192 bp, Homo sapiens; identical to SEQ ID NO: 122301
  chr12:52427133-52427325
  hypo

SEQ ID NO: 171378 - DNA, 30 bp, Homo sapiens
  chr12:52448893-52448923
  hypo
gtggaagtgaaggccgctgtgctgtgtgtg

SEQ ID NO: 171379 - DNA, 40 bp, Homo sapiens; identical to SEQ ID NO: 84125
  chr12:52462470-52462510
  hypo

SEQ ID NO: 171380 - DNA, 235 bp, Homo sapiens
  chr12:52467433-52467668
  hypo
gatgaactgtcgctcggaggtgctggaggtgtcggtggaggggcggcaggtggaggaggccatgctggctgtgctgcacacggtgcttctgcaccgcagcacaggcaagttccactacaagaaggagggcacctactccattggcaccgtgggcacccaggatgttgactgtgacttcatcgacttcacttatgtgcgtgtctcttctgaggaactggatcgtgccctgcgcaag

SEQ ID NO: 171381 - DNA, 30 bp, Homo sapiens
  chr12:52469743-52469773
  hypo
gaccagcctggataacgtaacaataccccg

SEQ ID NO: 171382 - DNA, 57 bp, Homo sapiens; identical to SEQ ID NO: 84127
  chr12:52477807-52477864
  hypo

SEQ ID NO: 171383 - DNA, 180 bp, Homo sapiens; identical to SEQ ID NO: 84128
  chr12:52490991-52491171
  hypo

SEQ ID NO: 171384 - DNA, 123 bp, Homo sapiens
  chr12:52539733-52539856
  hypo
gggggccagtgtgggcgcagtgtgggcagtctgagcacaagtggggtttgtgggcagtgtggatgctggggggcttagcggagggttactggagacgatagaggtgtgcggtgctcctgggct

SEQ ID NO: 171385 - DNA, 30 bp, Homo sapiens
  chr12:52540218-52540248
  hypo
gggtaggatcaggtgcgtggggcctgctga

SEQ ID NO: 171386 - DNA, 30 bp, Homo sapiens
  chr12:52541749-52541779
  hypo
ttgtccagagtcacccgactagcatgtgtc

SEQ ID NO: 171387 - DNA, 30 bp, Homo sapiens; identical to SEQ ID NO: 84130
  chr12:52551206-52551236
  hypo

SEQ ID NO: 171388 - DNA, 31 bp, Homo sapiens; identical to SEQ ID NO: 84131
  chr12:52566972-52567003
  hypo

SEQ ID NO: 171389 - DNA, 309 bp, Homo sapiens
  chr12:52567343-52567652
  hypo
tgtccaggctgcttctcgtgccctgtgtggtcagccccacctggctccgagagtatgcctcggcctcctccaggctgcgagccgcgacggcgtcatactgggccttcacctcctccacgatgccgctcaggtcgatgtggcagcggctgtccatgccgacggtcaccgacacatccttcacctgtgctgccaggtccttcagctcctgaccgggcacagatgtgggggctcagggctggtggggagggcacaaggaccctcagccccacacagtcactttgtccccggggtgagcggagagtggagctg

SEQ ID NO: 171390 - DNA, 31 bp, Homo sapiens; identical to SEQ ID NO: 84134
  chr12:52635223-52635254
  hypo

SEQ ID NO: 171391 - DNA, 99 bp, Homo sapiens
  chr12:52647004-52647103
  hypo
tggcgttctccacctcggctgtcagcctctggatcatgcggttcagctcgttgatctcctccttggtgcggcgcagggtctccccgtgcctgatcaccg

SEQ ID NO: 171392 - DNA, 154 bp, Homo sapiens
  chr12:52647389-52647543
  hypo
tgcggtaccaggactcggcctcggcccggctgcgggtggcaatgtcatcgtactgagctttgatctcagtgatgacacagtgcatgttcaggtcccgactgttgtccatcttgacgaccactgaggtgtctgagatgtgcgactggagaacgcg

SEQ ID NO: 171393 - DNA, 43 bp, Homo sapiens
  chr12:52648050-52648093
  hypo
acctcctcatatagccgcctcaggaagtcgatctcctgggtca

SEQ ID NO: 171394 - DNA, 31 bp, Homo sapiens; identical to SEQ ID NO: 84135
  chr12:52742300-52742331
  hypo

SEQ ID NO: 171395 - DNA, 60 bp, Homo sapiens; identical to SEQ ID NO: 84136
  chr12:52750115-52750175
  hypo

SEQ ID NO: 171396 - DNA, 30 bp, Homo sapiens; identical to SEQ ID NO: 84137
  chr12:52750493-52750523
  hypo

SEQ ID NO: 171397 - DNA, 115 bp, Homo sapiens
  chr12:52779174-52779289
  hypo
tatccggggtgagtacgatccaaaggtgatgacactccgactaccaaagctgccaaggccccggaatccaggcccactccaacaggagacagagttggcccggaagcgattcagg

SEQ ID NO: 171398 - DNA, 349 bp, Homo sapiens
  chr12:52793640-52793989
  hypo
tgtgtctgtggcatggcgtggctctcattagctcctcacccacttctgcggagaaggagtctgggggtcctcccctcccctggtttgtcacctctccagtctccctgcccccaaccacagggcctcacccggcactggtaccaggcctctgcttcggctttgctgcggctggcgatgtcgtcatactgcgccttgatctcagcgatgatgccgtccacgtccagctcccggctgttgtccatcttcacaatgaccgaggtctcagagatctgagactggagcaggcagatctcctgggggcagggcccatgtgagaaggagtgagctctctgagcgtccggggacagga

SEQ ID NO: 171399 - DNA, 30 bp, Homo sapiens; identical to SEQ ID NO: 84139
  chr12:52867532-52867562
  hypo

SEQ ID NO: 171400 - DNA, 96 bp, Homo sapiens; identical to SEQ ID NO: 84140
  chr12:52906093-52906189
  hypo

SEQ ID NO: 171401 - DNA, 173 bp, Homo sapiens
  chr12:52910442-52910615
  hypo
gcttgcggtaagtggcgatctccacgtccagggccagcttggtgttcatgagctcctggtactcacgcagcagccgggccatgtcctgcttggccttctgcagggcctcctccagctcggccagcttgttcctggcatccttgagggccagctccccacgctgctcggcatcc

SEQ ID NO: 171402 - DNA, 30 bp, Homo sapiens
  chr12:52910954-52910984
  hypo
tcatgcttggtgttgcggaggtcatcgcca

SEQ ID NO: 171403 - DNA, 73 bp, Homo sapiens
  chr12:52911389-52911462
  hypo
gactcggcttctgtccggctgcggttggcaatctcctcatactgggccttgacctcagcgatgatgctatcca

SEQ ID NO: 171404 - DNA, 623 bp, Homo sapiens
  chr12:52913579-52914202
  hypo
ctcggtcctcaccctctggatgctggggtcgatttgcaggttgaggggagtcaggagactctggttgacagtgacctcttggatacctccaggagggcagacaggaaagccagggccaccgaagccacctccaaagccagctccgccaccgagcccaaagccaccaccagctccaccgccgaaaccaaatccactaccggcaccacctccaaagccatagccgcctccagcaccagcaccaaaccggttcctgaagctgccaccactagtgctgatggatatcctcttggagccccccaggttgtagaggctccggctgccatagccacccactccacaagcacccgcaaggctgaccctgccgaagccaccaccaccgccacccccggaccgggacacggaggtgaagctggtgcgggagacagacggggtgatggcagaggcggtgctgaagctacgactgcccccgctccggaaggacacacttgactggcgagacatggtggcttgttcctggtggagcaagagaaccaggcactagtgggttgggaggtgctggagagaacagagctcagcaggacgcagaaggtggctctgttacccaggaacggtgatgccccctt

SEQ ID NO: 171405 - DNA, 186 bp, Homo sapiens; identical to SEQ ID NO: 26253
  chr12:53007441-53007627
  hypo

SEQ ID NO: 171406 - DNA, 106 bp, Homo sapiens; identical to SEQ ID NO: 26254
  chr12:53040688-53040794
  hypo

SEQ ID NO: 171407 - DNA, 57 bp, Homo sapiens
  chr12:53041515-53041572
  hypo
gcttcttcacatgtgcgatctccccctgcagcctctggatcacgcggttcagctcgc

SEQ ID NO: 171408 - DNA, 57 bp, Homo sapiens
  chr12:53041985-53042042
  hypo
ccttgctcctctgggcgatctcctcatactgggccttgacctcggcgatgatgctat

SEQ ID NO: 171409 - DNA, 269 bp, Homo sapiens; identical to SEQ ID NO: 26255
  chr12:53045571-53045840
  hypo

SEQ ID NO: 171410 - DNA, 420 bp, Homo sapiens
  chr12:53068867-53069287
  hypo
atagctcttttctccggtaaggctgggacaaatcgacctcggtcttgccaagcatatttgttagtgatgctgggggagaactagagctaatgaaacagagggcatctctttatctggttactccggaataagtggtagaaacaaacttcacgctggaactgccaccagaggacttgacacccccagagctggatccccggcctcctatggagcctccagagctcccgccgccagagccccggccgccagagctgccgccgccgccgcctccagagccacctctgtagcccccactgctgcttccggagccgtagctgccatggccgccgccgccacctccagagccatagctgccacctccggagccgtagctgctacctccggagccatagctgccacggccgccgccgccgccacctc

SEQ ID NO: 171411 - DNA, 422 bp, Homo sapiens
  chr12:53183248-53183670
  hypo
acctctccctccccacggtgctcacagaataatgaacaaccggatccgcaccatggactgagaagacgaactgcctttgtttcagaggaagagttctccagctgctctgtggatcacagagcccacatgggagaggcagaggcagggaggccagggaggtgaccagggagctcagtgccctaaggagaaggacatggagcgaatactcagaggcccggagtgaaacacagtgcactttattggcgacagaccggaggggcggagggggctgtgtgctatatacatcagagctgtagtgagcatcccacccagggaggggactccggggcagcagaaggtggcggcctaggccacacctggacaatcacaggcacaggctggagccggagagaagagcctgaaattctcgtgactgggcttgg

SEQ ID NO: 171412 - DNA, 176 bp, Homo sapiens; identical to SEQ ID NO: 26257
  chr12:53189554-53189730
  hypo

SEQ ID NO: 171413 - DNA, 204 bp, Homo sapiens; identical to SEQ ID NO: 84148
  chr12:53214327-53214531
  hypo

SEQ ID NO: 171414 - DNA, 31 bp, Homo sapiens; identical to SEQ ID NO: 84149
  chr12:53215666-53215697
  hypo

SEQ ID NO: 171415 - DNA, 30 bp, Homo sapiens; identical to SEQ ID NO: 84150
  chr12:53227801-53227831
  hypo

SEQ ID NO: 171416 - DNA, 150 bp, Homo sapiens; identical to SEQ ID NO: 84151
  chr12:53241430-53241580
  hypo

SEQ ID NO: 171417 - DNA, 30 bp, Homo sapiens; identical to SEQ ID NO: 84152
  chr12:53261123-53261153
  hypo

SEQ ID NO: 171418 - DNA, 186 bp, Homo sapiens; identical to SEQ ID NO: 49587
  chr12:53272442-53272628
  hypo

SEQ ID NO: 171419 - DNA, 31 bp, Homo sapiens; identical to SEQ ID NO: 84154
  chr12:53292655-53292686
  hypo

SEQ ID NO: 171420 - DNA, 30 bp, Homo sapiens; identical to SEQ ID NO: 26259
  chr12:53293534-53293564
  hypo

SEQ ID NO: 171421 - DNA, 30 bp, Homo sapiens; identical to SEQ ID NO: 84156
  chr12:53307529-53307559
  hypo

SEQ ID NO: 171422 - DNA, 30 bp, Homo sapiens
  chr12:53312267-53312297
  hypo
ccgccagacagacgccgcgcaggtgcagct

SEQ ID NO: 171423 - DNA, 34 bp, Homo sapiens
  chr12:53345413-53345447
  hypo
gtactggtctcagcaggtgcgtgaggggagggga

SEQ ID NO: 171424 - DNA, 217 bp, Homo sapiens
  chr12:53441498-53441715
  hypo
cagggtgcgggcgaacgttttcctttcctgcttcacatgtgggacagaggccgtaagcgggcacagatgaggctgattcgactcgccagccccgctctgcggccccctccagtctgcccccatcctccagacccttctgggaacacccccagagccgccgccctccctcgctccttccctgggccttacccctcctccgcggcggccgggctcccag

SEQ ID NO: 171425 - DNA, 30 bp, Homo sapiens; identical to SEQ ID NO: 26260
  chr12:53451966-53451996
  hypo

SEQ ID NO: 171426 - DNA, 161 bp, Homo sapiens; identical to SEQ ID NO: 84158
  chr12:53452998-53453159
  hypo

SEQ ID NO: 171427 - DNA, 30 bp, Homo sapiens; identical to SEQ ID NO: 84159
  chr12:53453429-53453459
  hypo

SEQ ID NO: 171428 - DNA, 76 bp, Homo sapiens
  chr12:53454238-53454314
  hypo
ctgcctcggtctccccgagatgccccatgcagtgcttcgtcagagttgtctggtccctccacgcccctgcacacca

SEQ ID NO: 171429 - DNA, 82 bp, Homo sapiens
  chr12:53463203-53463285
  hypo
gcacagaagcctgtgcgtgtctccagcagaggctgctcccgcatccccactcccagcctcagacggccgctgcttagctcag

SEQ ID NO: 171430 - DNA, 87 bp, Homo sapiens; identical to SEQ ID NO: 84161
  chr12:53467252-53467339
  hypo

SEQ ID NO: 171431 - DNA, 196 bp, Homo sapiens
  chr12:53474291-53474487
  hypo
atttataacacttattaccgtcttgctttcgttattggagttacttgtgtgtgtagacccgtctctgctagactgtgagctccttcagaccccagactattctattcttatcacactaggtactctaacgtgttgagtgccaggaaagccatcagctcgcataccgtgaatagtgcccactcggcataacggcaat

SEQ ID NO: 171432 - DNA, 30 bp, Homo sapiens
  chr12:53483967-53483997
  hypo
agagggaaaacactgcgaagacagccacgt

SEQ ID NO: 171433 - DNA, 17 bp, Homo sapiens
  chr12:53508226-53508243
  hypo
gggtgcagtggctcacg

SEQ ID NO: 171434 - DNA, 76 bp, Homo sapiens; identical to SEQ ID NO: 84162
  chr12:53509320-53509396
  hypo

SEQ ID NO: 171435 - DNA, 41 bp, Homo sapiens
  chr12:53517535-53517576
  hypo
accagcgcaccggcccggcatggaacgtgctgatgtggacc

SEQ ID NO: 171436 - DNA, 30 bp, Homo sapiens; identical to SEQ ID NO: 84164
  chr12:53546880-53546910
  hypo

SEQ ID NO: 171437 - DNA, 59 bp, Homo sapiens; identical to SEQ ID NO: 84165
  chr12:53547965-53548024
  hypo

SEQ ID NO: 171438 - DNA, 18 bp, Homo sapiens
  chr12:53572935-53572953
  hypo
gcaaaaagataactattt

SEQ ID NO: 171439 - DNA, 30 bp, Homo sapiens
  chr12:53575649-53575679
  hypo
gggacacgaaggagtcgctaccgtgatttg

SEQ ID NO: 171440 - DNA, 30 bp, Homo sapiens
  chr12:53579048-53579078
  hypo
ttcctctaagctttcggggcaggtggttta

SEQ ID NO: 171441 - DNA, 31 bp, Homo sapiens; identical to SEQ ID NO: 84167
  chr12:53641241-53641272
  hypo

SEQ ID NO: 171442 - DNA, 30 bp, Homo sapiens; identical to SEQ ID NO: 26264
  chr12:53646914-53646944
  hypo

SEQ ID NO: 171443 - DNA, 197 bp, Homo sapiens; identical to SEQ ID NO: 84169
  chr12:53662983-53663180
  hypo

SEQ ID NO: 171444 - DNA, 30 bp, Homo sapiens; identical to SEQ ID NO: 84170
  chr12:53664497-53664527
  hypo

SEQ ID NO: 171445 - DNA, 23 bp, Homo sapiens
  chr12:53667919-53667942
  hypo
aagccaccgcgctgggcaagaac

SEQ ID NO: 171446 - DNA, 58 bp, Homo sapiens
  chr12:53668185-53668243
  hypo
aactgaagcagctgcacgagggatggaatgcagtggatcggtgcgagaagccaaggat

SEQ ID NO: 171447 - DNA, 28 bp, Homo sapiens
  chr12:53672063-53672091
  hypo
gtctgggcaacacggcgaaaccccgtct

SEQ ID NO: 171448 - DNA, 126 bp, Homo sapiens
  chr12:53677869-53677995
  hypo
gagctggagctggcccgcaatgacattgatctctgtcagtcggacctgcagcaggttctgttcttgcttgagtcttgcacaggtgagcagccatgtccccatgaccataggcggtgctgaaatgac

SEQ ID NO: 171449 - DNA, 308 bp, Homo sapiens; identical to SEQ ID NO: 26267
  chr12:53685892-53686200
  hypo

SEQ ID NO: 171450 - DNA, 90 bp, Homo sapiens
  chr12:53686626-53686716
  hypo
gggcaggctgtcctgcggctgagctgtcgggcagtggccctgctgtttggctgtagcagtgcggccctggctgtgcgtggaaacctggag

SEQ ID NO: 171451 - DNA, 30 bp, Homo sapiens
  chr12:53687090-53687120
  hypo
gaccgcgacattgaccgctacacggaagct

SEQ ID NO: 171452 - DNA, 25 bp, Homo sapiens
  chr12:53691195-53691220
  hypo
gagcgagactctgtctcagaaagca

SEQ ID NO: 171453 - DNA, 431 bp, Homo sapiens; identical to SEQ ID NO: 122344
  chr12:53719361-53719792
  hypo

SEQ ID NO: 171454 - DNA, 30 bp, Homo sapiens; identical to SEQ ID NO: 26271
  chr12:53746265-53746295
  hypo

SEQ ID NO: 171455 - DNA, 29 bp, Homo sapiens
  chr12:53756977-53757006
  hypo
ccgcacccggctggcacttggcctatttt

SEQ ID NO: 171456 - DNA, 31 bp, Homo sapiens; identical to SEQ ID NO: 26272
  chr12:53761921-53761952
  hypo

SEQ ID NO: 171457 - DNA, 139 bp, Homo sapiens; identical to SEQ ID NO: 122348
  chr12:53765063-53765202
  hypo

SEQ ID NO: 171458 - DNA, 30 bp, Homo sapiens
  chr12:53772234-53772264
  hypo
tgagccattgcgcccggcggcagtttaatt

SEQ ID NO: 171459 - DNA, 241 bp, Homo sapiens; identical to SEQ ID NO: 84179
  chr12:53778350-53778591
  hypo

SEQ ID NO: 171460 - DNA, 17 bp, Homo sapiens
  chr12:53780780-53780797
  hypo
ctggagtgcagtggtgc

SEQ ID NO: 171461 - DNA, 94 bp, Homo sapiens
  chr12:53785409-53785503
  hypo
ttttaagtaatttcaacttttattttgtttgttatatgatcttgagatttgggatacaaatgatcttgttacccgggtccggtcatgagcatag

SEQ ID NO: 171462 - DNA, 93 bp, Homo sapiens; identical to SEQ ID NO: 84182
  chr12:53796832-53796925
  hypo

SEQ ID NO: 171463 - DNA, 33 bp, Homo sapiens; identical to SEQ ID NO: 84183
  chr12:53810591-53810624
  hypo

SEQ ID NO: 171464 - DNA, 30 bp, Homo sapiens; identical to SEQ ID NO: 26274
  chr12:53818167-53818197
  hypo

SEQ ID NO: 171465 - DNA, 31 bp, Homo sapiens; identical to SEQ ID NO: 84185
  chr12:53822881-53822912
  hypo

SEQ ID NO: 171466 - DNA, 44 bp, Homo sapiens; identical to SEQ ID NO: 84186
  chr12:53823276-53823320
  hypo

SEQ ID NO: 171467 - DNA, 30 bp, Homo sapiens; identical to SEQ ID NO: 84187
  chr12:53825003-53825033
  hypo

SEQ ID NO: 171468 - DNA, 36 bp, Homo sapiens
  chr12:53830284-53830320
  hypo
gggattacaggtgtgagccaccgcacccggccaata

SEQ ID NO: 171469 - DNA, 121 bp, Homo sapiens; identical to SEQ ID NO: 84188
  chr12:53832349-53832470
  hypo

SEQ ID NO: 171470 - DNA, 116 bp, Homo sapiens
  chr12:53834983-53835099
  hypo
ctacttgacagatggcggagctatgcaattgagagagggaatcctgggagagattatgaaatctctgtatcttccgcaagaatgtttgtttgcttcccttgcgagtgtaagacgga

SEQ ID NO: 171471 - DNA, 42 bp, Homo sapiens; identical to SEQ ID NO: 84189
  chr12:53836911-53836953
  hypo

SEQ ID NO: 171472 - DNA, 27 bp, Homo sapiens
  chr12:53843449-53843476
  hypo
caccgcgcccagctaatgtttgaattt

SEQ ID NO: 171473 - DNA, 23 bp, Homo sapiens
  chr12:53885487-53885510
  hypo
attacaggcgtgagccaccgcgc

SEQ ID NO: 171474 - DNA, 158 bp, Homo sapiens
  chr12:53898407-53898565
  hypo
ctgcgtggggaccagcgtgggtgtgagaagccttttttcactcagcctcatgcaccctgtgtctcccttccaaggagctggtggtgcagaaaggctggcggttgccggagtacacagtgacccaggagtctgggccagcccaccgcaaagaattcacc

SEQ ID NO: 171475 - DNA, 205 bp, Homo sapiens; identical to SEQ ID NO: 26275
  chr12:53899812-53900017
  hypo

SEQ ID NO: 171476 - DNA, 30 bp, Homo sapiens
  chr12:53901014-53901044
  hypo
gtggtaggaggctgcggaaccatttcctca

SEQ ID NO: 171477 - DNA, 29 bp, Homo sapiens
  chr12:53966366-53966395
  hypo
gtagcctccccttacccgtggtttcactt

SEQ ID NO: 171478 - DNA, 405 bp, Homo sapiens
  chr12:53994391-53994796
  hypo
aggcgtgagccaccgcgcccggcatgaagagaaaacatttctaaacttgctttgtatttagatggacagctttagaaaggaggagacagcaacatgtatttttccatactgtgtggtgggaaacaaacaccagtagaataacaatatggaagacagcaaggcagatttcattacggtagagtgcctacacttcctcataacttggatttacacactgcaaatcctctgatctgattacctccagtgatcacgtaaaatactggctttaaactctttgccttagtgataaaacagccactttgattcacaacgagacattcacaataaagtatattgtaaacgtacctgtccacagcccggggcattgcacacaaacggtctgtcgtctcccatatttcatatagc

SEQ ID NO: 171479 - DNA, 37 bp, Homo sapiens
  chr12:54023345-54023382
  hypo
ggattacaggcatgagccaccgcgcccggcctgaagc

SEQ ID NO: 171480 - DNA, 45 bp, Homo sapiens
  chr12:54031205-54031250
  hypo
gtaaataaaagctttgcaggccgggcgcggtggctcatacctgta

SEQ ID NO: 171481 - DNA, 88 bp, Homo sapiens
  chr12:54051790-54051878
  hypo
ttctgtctcagtctctcgagtagctgggattacaggtgcacacaagcataccagctacttttagtaactttctatttttttttaaatt

SEQ ID NO: 171482 - DNA, 156 bp, Homo sapiens; identical to SEQ ID NO: 84195
  chr12:54122157-54122313
  hypo

SEQ ID NO: 171483 - DNA, 1090 bp, Homo sapiens; identical to SEQ ID NO: 122374
  chr12:54144767-54145857
  hypo

SEQ ID NO: 171484 - DNA, 512 bp, Homo sapiens; identical to SEQ ID NO: 122387
  chr12:54332434-54332946
  hypo

SEQ ID NO: 171485 - DNA, 875 bp, Homo sapiens; identical to SEQ ID NO: 49633
  chr12:54332963-54333838
  hypo

SEQ ID NO: 171486 - DNA, 481 bp, Homo sapiens; identical to SEQ ID NO: 49667
  chr12:54393242-54393723
  hypo

SEQ ID NO: 171487 - DNA, 620 bp, Homo sapiens; identical to SEQ ID NO: 8801
  chr12:54393798-54394418
  hypo

SEQ ID NO: 171488 - DNA, 170 bp, Homo sapiens; identical to SEQ ID NO: 49669
  chr12:54394466-54394636
  hypo

SEQ ID NO: 171489 - DNA, 82 bp, Homo sapiens; identical to SEQ ID NO: 8803
  chr12:54398703-54398785
  hypo

SEQ ID NO: 171490 - DNA, 129 bp, Homo sapiens; identical to SEQ ID NO: 122431
  chr12:54398888-54399017
  hypo

SEQ ID NO: 171491 - DNA, 421 bp, Homo sapiens; identical to SEQ ID NO: 122432
  chr12:54399253-54399674
  hypo

SEQ ID NO: 171492 - DNA, 434 bp, Homo sapiens; identical to SEQ ID NO: 122433
  chr12:54400006-54400440
  hypo

SEQ ID NO: 171493 - DNA, 584 bp, Homo sapiens; identical to SEQ ID NO: 49683
  chr12:54426522-54427106
  hypo

SEQ ID NO: 171494 - DNA, 342 bp, Homo sapiens; identical to SEQ ID NO: 49684
  chr12:54427293-54427635
  hypo

SEQ ID NO: 171495 - DNA, 30 bp, Homo sapiens; identical to SEQ ID NO: 84208
  chr12:54576259-54576289
  hypo

SEQ ID NO: 171496 - DNA, 30 bp, Homo sapiens; identical to SEQ ID NO: 84209
  chr12:54577253-54577283
  hypo

SEQ ID NO: 171497 - DNA, 30 bp, Homo sapiens; identical to SEQ ID NO: 84210
  chr12:54622929-54622959
  hypo

SEQ ID NO: 171498 - DNA, 45 bp, Homo sapiens
  chr12:54629096-54629141
  hypo
tctgcttagaaatcaccctctcggcccggcggtggctcacgcctg

SEQ ID NO: 171499 - DNA, 357 bp, Homo sapiens
  chr12:54651108-54651465
  hypo
gcagtatcattagaacgtaagctccacaagcggagagattttgttttctttactgctgtgtcttctaactcttaggaagagtgcaggagggggaagaaaaagacaaaaatgcttgtgattcctaaggaagtaaaccaaaggtatctatctctacagagtcccaacgcctgggggaaaaaaggaacttactcagaaaagcctttccacttcagtagatattccacttgtcccttaaccacgcgcctgtctagcaccttctccacaacatactcctcctcatcctctgaagaagaactgtcagctgtccgcttggttttctttcccatgtcgcacaccgttccacctgaaagactaagg

SEQ ID NO: 171500 - DNA, 42 bp, Homo sapiens; identical to SEQ ID NO: 8824
  chr12:54686413-54686455
  hypo

SEQ ID NO: 171501 - DNA, 39 bp, Homo sapiens; identical to SEQ ID NO: 84213
  chr12:54718114-54718153
  hypo

SEQ ID NO: 171502 - DNA, 98 bp, Homo sapiens
  chr12:54720205-54720303
  hypo
gagccactgcgccgggccaggaattcttattgtatgatctaggatgctaatttctccctctctggttacatgagaattgtggtcgctaaagggctgta

SEQ ID NO: 171503 - DNA, 30 bp, Homo sapiens; identical to SEQ ID NO: 84215
  chr12:54756575-54756605
  hypo

SEQ ID NO: 171504 - DNA, 123 bp, Homo sapiens
  chr12:54767803-54767926
  hypo
ggagctgggtctccaggttctcggacgccaggctccctgcctctggtcttggcagcctcaatgcctttgactcgtcgggcgtggcgattacctttgtagtgcgcctcagcctggctctttagg

SEQ ID NO: 171505 - DNA, 743 bp, Homo sapiens; identical to SEQ ID NO: 49698
  chr12:54811879-54812622
  hypo

SEQ ID NO: 171506 - DNA, 375 bp, Homo sapiens; identical to SEQ ID NO: 122469
  chr12:54812829-54813204
  hypo

SEQ ID NO: 171507 - DNA, 32 bp, Homo sapiens; identical to SEQ ID NO: 84220
  chr12:54890475-54890507
  hypo

SEQ ID NO: 171508 - DNA, 30 bp, Homo sapiens
  chr12:54923265-54923295
  hypo
aagatgttccagtgacgctgtcctctccag

SEQ ID NO: 171509 - DNA, 30 bp, Homo sapiens; identical to SEQ ID NO: 84221
  chr12:54963134-54963164
  hypo

SEQ ID NO: 171510 - DNA, 92 bp, Homo sapiens
  chr12:55310065-55310157
  hypo
gccactgtgcctggctcaactgtccactttataaggacactatcaccattccatttacctttctctctctccttcaacgttcccacttgtat

SEQ ID NO: 171511 - DNA, 30 bp, Homo sapiens
  chr12:55356821-55356851
  hypo
atggctttccgaaggcggtctctgggtgac

SEQ ID NO: 171512 - DNA, 28 bp, Homo sapiens
  chr12:55397120-55397148
  hypo
gtaagtgttcccggccgggcgcggtggc

SEQ ID NO: 171513 - DNA, 28 bp, Homo sapiens
  chr12:55397447-55397475
  hypo
atcctgtaactggcgctgctttcagaat

SEQ ID NO: 171514 - DNA, 40 bp, Homo sapiens; identical to SEQ ID NO: 26291
  chr12:55481151-55481191
  hypo

SEQ ID NO: 171515 - DNA, 37 bp, Homo sapiens; identical to SEQ ID NO: 84223
  chr12:55511043-55511080
  hypo

SEQ ID NO: 171516 - DNA, 27 bp, Homo sapiens
  chr12:55873853-55873880
  hypo
ggagagggagaccgtggggagagggag

SEQ ID NO: 171517 - DNA, 279 bp, Homo sapiens
  chr12:56078876-56079155
  hypo
ccagctcgggatgcccgtcagcagccaggatggggtgtgcatccgggccctcccgccgggggctgccccagttgttcctcaggatggtgcccgtcttctcctccttgaactgctgtcggtcttcccgaggaatcttcaccgcatggtactggggcacggtggcctcggggtgcttcgcccgtttgaagaatcccatctataaggacaccaggccagaccatgaggagcctgaagagctgcggtccctggagcagatgcctagcgcggcacagctcctca

SEQ ID NO: 171518 - DNA, 34 bp, Homo sapiens; identical to SEQ ID NO: 84224
  chr12:56108935-56108969
  hypo

SEQ ID NO: 171519 - DNA, 181 bp, Homo sapiens
  chr12:56116618-56116799
  hypo
gcccaaggcctgagttcttagcaggagtataaggcgcctaagcttagtctaccttctaaggaagcctgcgtttgtcaccatcactcagcaaataacctgaatgtctcctgtctctcagccttaatttttcaggcagcatcatgggacacatacttttagttttgagacaaggccttgctct

SEQ ID NO: 171520 - DNA, 270 bp, Homo sapiens; identical to SEQ ID NO: 26292
  chr12:56142455-56142725
  hypo

SEQ ID NO: 171521 - DNA, 30 bp, Homo sapiens; identical to SEQ ID NO: 84226
  chr12:56159688-56159718
  hypo

SEQ ID NO: 171522 - DNA, 89 bp, Homo sapiens; identical to SEQ ID NO: 26293
  chr12:56182546-56182635
  hypo

SEQ ID NO: 171523 - DNA, 152 bp, Homo sapiens; identical to SEQ ID NO: 26294
  chr12:56183313-56183465
  hypo

SEQ ID NO: 171524 - DNA, 32 bp, Homo sapiens; identical to SEQ ID NO: 26295
  chr12:56183704-56183736
  hypo

SEQ ID NO: 171525 - DNA, 141 bp, Homo sapiens; identical to SEQ ID NO: 84230
  chr12:56230958-56231099
  hypo

SEQ ID NO: 171526 - DNA, 30 bp, Homo sapiens; identical to SEQ ID NO: 122491
  chr12:56325490-56325520
  hypo

SEQ ID NO: 171527 - DNA, 43 bp, Homo sapiens; identical to SEQ ID NO: 122492
  chr12:56326150-56326193
  hypo

SEQ ID NO: 171528 - DNA, 138 bp, Homo sapiens
  chr12:56329172-56329310
  hypo
gctgtattatattaacgtaagatatgttattatcattactgaatcaaggaaagtcgcccactgcaccttggtccctggatccagtagccaaaacctggggctccctaagcactgctgacctagcggagtggaaggaag

SEQ ID NO: 171529 - DNA, 197 bp, Homo sapiens
  chr12:56329556-56329753
  hypo
ggaacgcagtccaggcggggccggggctagggaccttgccagagctggttctgtgtcgcgcgtcagaagcgctagaggtcgttgcgtggcgtgggtggctcggggagtgggtggctgagcggagctggggtccctggccagaggcggaacaaaatggggtcatggccaggaagacgcgctaacgcagtaagagtcac

SEQ ID NO: 171530 - DNA, 30 bp, Homo sapiens; identical to SEQ ID NO: 84232
  chr12:56333298-56333328
  hypo

SEQ ID NO: 171531 - DNA, 30 bp, Homo sapiens; identical to SEQ ID NO: 26296
  chr12:56350370-56350400
  hypo

SEQ ID NO: 171532 - DNA, 121 bp, Homo sapiens
  chr12:56354597-56354718
  hypo
tgcgattacaggcgtgagccaccgcgcccggccttctctgtgtttttaaattttaactacaatgagtatgtattacacatataacttgttttaaaaattaaaggaggaggccgggtgcgat

SEQ ID NO: 171533 - DNA, 30 bp, Homo sapiens; identical to SEQ ID NO: 26297
  chr12:56359143-56359173
  hypo

SEQ ID NO: 171534 - DNA, 30 bp, Homo sapiens
  chr12:56364488-56364518
  hypo
aggttgggggatgaccgcagtgtctacccc

SEQ ID NO: 171535 - DNA, 30 bp, Homo sapiens
  chr12:56364956-56364986
  hypo
ttccccaagtgggcccggcaagattttagt

SEQ ID NO: 171536 - DNA, 30 bp, Homo sapiens
  chr12:56365323-56365353
  hypo
ctaacaagcggatttcggccaaggcagccc

SEQ ID NO: 171537 - DNA, 30 bp, Homo sapiens; identical to SEQ ID NO: 26298
  chr12:56381232-56381262
  hypo

SEQ ID NO: 171538 - DNA, 152 bp, Homo sapiens; identical to SEQ ID NO: 8830
  chr12:56390555-56390707
  hypo

SEQ ID NO: 171539 - DNA, 29 bp, Homo sapiens
  chr12:56406938-56406967
  hypo
acatatgtgcctacccgccatcactgagt

SEQ ID NO: 171540 - DNA, 20 bp, Homo sapiens
  chr12:56408877-56408897
  hypo
gagacagagtcttgctcttg

SEQ ID NO: 171541 - DNA, 33 bp, Homo sapiens; identical to SEQ ID NO: 84238
  chr12:56441276-56441309
  hypo

SEQ ID NO: 171542 - DNA, 305 bp, Homo sapiens; identical to SEQ ID NO: 122502
  chr12:56472731-56473036
  hypo

SEQ ID NO: 171543 - DNA, 348 bp, Homo sapiens; identical to SEQ ID NO: 122505
  chr12:56473998-56474346
  hypo

SEQ ID NO: 171544 - DNA, 175 bp, Homo sapiens; identical to SEQ ID NO: 84241
  chr12:56480247-56480422
  hypo

SEQ ID NO: 171545 - DNA, 57 bp, Homo sapiens
  chr12:56504405-56504462
  hypo
aaaatgaaaacttcacgtgccttcttcagtgaggtggaaaggcgttttgatgccatg

SEQ ID NO: 171546 - DNA, 30 bp, Homo sapiens
  chr12:56525334-56525364
  hypo
cttcatccgacgcccggtaagggaaaacaa

SEQ ID NO: 171547 - DNA, 441 bp, Homo sapiens; identical to SEQ ID NO: 26301
  chr12:56558006-56558447
  hypo

SEQ ID NO: 171548 - DNA, 24 bp, Homo sapiens
  chr12:56558811-56558835
  hypo
cacccatttcggcctcccaaagaa

SEQ ID NO: 171549 - DNA, 149 bp, Homo sapiens; identical to SEQ ID NO: 26303
  chr12:56601394-56601543
  hypo

SEQ ID NO: 171550 - DNA, 208 bp, Homo sapiens; identical to SEQ ID NO: 26304
  chr12:56604086-56604294
  hypo

SEQ ID NO: 171551 - DNA, 91 bp, Homo sapiens; identical to SEQ ID NO: 26305
  chr12:56610572-56610663
  hypo

SEQ ID NO: 171552 - DNA, 30 bp, Homo sapiens; identical to SEQ ID NO: 26306
  chr12:56610902-56610932
  hypo

SEQ ID NO: 171553 - DNA, 30 bp, Homo sapiens; identical to SEQ ID NO: 84248
  chr12:56622043-56622073
  hypo

SEQ ID NO: 171554 - DNA, 31 bp, Homo sapiens; identical to SEQ ID NO: 26307
  chr12:56649705-56649736
  hypo

SEQ ID NO: 171555 - DNA, 67 bp, Homo sapiens
  chr12:56661198-56661265
  hypo
gagaagggaagttctcggggtgagtgtccaacctcttcttggccctcgcgggcgccctggggtcccc

SEQ ID NO: 171556 - DNA, 21 bp, Homo sapiens
  chr12:56841889-56841910
  hypo
tgtacaaagtactagtagggc

SEQ ID NO: 171557 - DNA, 27 bp, Homo sapiens
  chr12:56882540-56882567
  hypo
ccgaaggccaaaccagcgcccagtaac

SEQ ID NO: 171558 - DNA, 3 bp, Homo sapiens
  chr12:56882583-56882586
  hypo
cgc

SEQ ID NO: 171559 - DNA, 31 bp, Homo sapiens; identical to SEQ ID NO: 8838
  chr12:56958137-56958168
  hypo

SEQ ID NO: 171560 - DNA, 19 bp, Homo sapiens
  chr12:56976738-56976757
  hypo
gatctgggttttaacaagc

SEQ ID NO: 171561 - DNA, 30 bp, Homo sapiens; identical to SEQ ID NO: 84255
  chr12:56985185-56985215
  hypo

SEQ ID NO: 171562 - DNA, 30 bp, Homo sapiens; identical to SEQ ID NO: 84256
  chr12:56992940-56992970
  hypo

SEQ ID NO: 171563 - DNA, 201 bp, Homo sapiens; identical to SEQ ID NO: 84257
  chr12:56993680-56993881
  hypo

SEQ ID NO: 171564 - DNA, 20 bp, Homo sapiens
  chr12:57054154-57054174
  hypo
gccaccgcacccggccaagc

SEQ ID NO: 171565 - DNA, 82 bp, Homo sapiens; identical to SEQ ID NO: 84259
  chr12:57054398-57054480
  hypo

SEQ ID NO: 171566 - DNA, 17 bp, Homo sapiens
  chr12:57063685-57063702
  hypo
cccggccaaaagtttat

SEQ ID NO: 171567 - DNA, 26 bp, Homo sapiens
  chr12:57120638-57120664
  hypo
ctaccgcccctggcacttcttggata

SEQ ID NO: 171568 - DNA, 23 bp, Homo sapiens
  chr12:57142809-57142832
  hypo
ttagacagggtctcactctgtcg

SEQ ID NO: 171569 - DNA, 30 bp, Homo sapiens; identical to SEQ ID NO: 84263
  chr12:57146955-57146985
  hypo

SEQ ID NO: 171570 - DNA, 36 bp, Homo sapiens
  chr12:57211450-57211486
  hypo
ccaaagtgctgggattacaggcgttaactgctttat

SEQ ID NO: 171571 - DNA, 31 bp, Homo sapiens; identical to SEQ ID NO: 84264
  chr12:57213866-57213897
  hypo

SEQ ID NO: 171572 - DNA, 30 bp, Homo sapiens; identical to SEQ ID NO: 84265
  chr12:57323180-57323210
  hypo

SEQ ID NO: 171573 - DNA, 30 bp, Homo sapiens; identical to SEQ ID NO: 84266
  chr12:57396719-57396749
  hypo

SEQ ID NO: 171574 - DNA, 31 bp, Homo sapiens; identical to SEQ ID NO: 84267
  chr12:57403584-57403615
  hypo

SEQ ID NO: 171575 - DNA, 31 bp, Homo sapiens; identical to SEQ ID NO: 84268
  chr12:57422731-57422762
  hypo

SEQ ID NO: 171576 - DNA, 109 bp, Homo sapiens; identical to SEQ ID NO: 84269
  chr12:57431636-57431745
  hypo

SEQ ID NO: 171577 - DNA, 33 bp, Homo sapiens; identical to SEQ ID NO: 26314
  chr12:57446183-57446216
  hypo

SEQ ID NO: 171578 - DNA, 23 bp, Homo sapiens
  chr12:57462656-57462679
  hypo
tttctttacgtctgaacaaaatg

SEQ ID NO: 171579 - DNA, 173 bp, Homo sapiens
  chr12:57489923-57490096
  hypo
gtctgtatgttcctgcctatccgtcctaggccctgggtcagaatgggcggagaagccttccatgccctaacctgtgctcttacccagcccccctcctgctcagccccatcaccctcagagagctctgtatgtgtgtgtgcgtgcgtgtgcgcgctgcaggtgcaggcatgttg

SEQ ID NO: 171580 - DNA, 75 bp, Homo sapiens; identical to SEQ ID NO: 84273
  chr12:57499241-57499316
  hypo

SEQ ID NO: 171581 - DNA, 31 bp, Homo sapiens; identical to SEQ ID NO: 84274
  chr12:57539050-57539081
  hypo

SEQ ID NO: 171582 - DNA, 30 bp, Homo sapiens; identical to SEQ ID NO: 26317
  chr12:57540572-57540602
  hypo

SEQ ID NO: 171583 - DNA, 31 bp, Homo sapiens; identical to SEQ ID NO: 84276
  chr12:57552057-57552088
  hypo

SEQ ID NO: 171584 - DNA, 92 bp, Homo sapiens
  chr12:57559572-57559664
  hypo
ctgtggtgcccacagcgaacccatcctacgtgcctccaccccagtgccagccaggcgagtttgcctgtgccaacagccgctgcatccaggag

SEQ ID NO: 171585 - DNA, 154 bp, Homo sapiens
  chr12:57559885-57560039
  hypo
ggaccgattcaagtgcgagaacaaccggtgcatccccaaccgctggctctgcgacggggacaatgactgtgggaacagtgaagatgagtccaatgccacttgttcaggtgtggagcggggctcagatcacacgaggcacccctcagtcaaggag

SEQ ID NO: 171586 - DNA, 357 bp, Homo sapiens; identical to SEQ ID NO: 84278
  chr12:57570815-57571172
  hypo

SEQ ID NO: 171587 - DNA, 36 bp, Homo sapiens; identical to SEQ ID NO: 84279
  chr12:57572147-57572183
  hypo

SEQ ID NO: 171588 - DNA, 31 bp, Homo sapiens; identical to SEQ ID NO: 84280
  chr12:57572885-57572916
  hypo

SEQ ID NO: 171589 - DNA, 31 bp, Homo sapiens; identical to SEQ ID NO: 84281
  chr12:57574072-57574103
  hypo

SEQ ID NO: 171590 - DNA, 39 bp, Homo sapiens
  chr12:57577264-57577303
  hypo
gctggctgtcggcatcgacttccacgctggtgagccatt

SEQ ID NO: 171591 - DNA, 31 bp, Homo sapiens; identical to SEQ ID NO: 84282
  chr12:57582407-57582438
  hypo

SEQ ID NO: 171592 - DNA, 183 bp, Homo sapiens; identical to SEQ ID NO: 84283
  chr12:57583523-57583706
  hypo

SEQ ID NO: 171593 - DNA, 72 bp, Homo sapiens
  chr12:57584914-57584986
  hypo
ccaggccccagcctcggtcaaccccaccctgtccagcttgctcctcatcagctagacgagggagatagcagg

SEQ ID NO: 171594 - DNA, 30 bp, Homo sapiens; identical to SEQ ID NO: 26321
  chr12:57587758-57587788
  hypo

SEQ ID NO: 171595 - DNA, 31 bp, Homo sapiens; identical to SEQ ID NO: 84286
  chr12:57591466-57591497
  hypo

SEQ ID NO: 171596 - DNA, 198 bp, Homo sapiens
  chr12:57593154-57593352
  hypo
tgtcttccatgccctgcgccagccagacggtgagcaggcaaggggtgggagcaggcgaacggtgagccaggcaccggggtccctgggagttcctgctcatcccttctctagcattgaccaagccctcctggccagacactgggagactccaggagggtctagacaggggatggtctggctcccgggagcttcagcccg

SEQ ID NO: 171597 - DNA, 68 bp, Homo sapiens; identical to SEQ ID NO: 84288
  chr12:57595539-57595607
  hypo

SEQ ID NO: 171598 - DNA, 150 bp, Homo sapiens; identical to SEQ ID NO: 84289
  chr12:57596872-57597022
  hypo

SEQ ID NO: 171599 - DNA, 30 bp, Homo sapiens; identical to SEQ ID NO: 84290
  chr12:57597223-57597253
  hypo

SEQ ID NO: 171600 - DNA, 79 bp, Homo sapiens; identical to SEQ ID NO: 84291
  chr12:57601871-57601950
  hypo

SEQ ID NO: 171601 - DNA, 31 bp, Homo sapiens; identical to SEQ ID NO: 26323
  chr12:57605266-57605297
  hypo

SEQ ID NO: 171602 - DNA, 201 bp, Homo sapiens
  chr12:57625973-57626174
  hypo
tacttcctctcacttcgcagtctcacccacggctacatgtctgacgtcaagcggatatcagccacgtccatcttcttcgagtctatgccctataagctcaacgtgagtgctctagggtgtggggaggggctcttggccctggtggtggtcctcccctggagaagctgagggcctggagcgccgggccgtccttagggttaa

SEQ ID NO: 171603 - DNA, 30 bp, Homo sapiens
  chr12:57626565-57626595
  hypo
cgcctttcaagcacgcggacatcgtcacca

SEQ ID NO: 171604 - DNA, 30 bp, Homo sapiens; identical to SEQ ID NO: 84293
  chr12:57640657-57640687
  hypo

SEQ ID NO: 171605 - DNA, 81 bp, Homo sapiens; identical to SEQ ID NO: 84294
  chr12:57642437-57642518
  hypo

SEQ ID NO: 171606 - DNA, 151 bp, Homo sapiens
  chr12:57858460-57858611
  hypo
ctcttttcttctccccggagtgcagtcaagttgaccaagaagcgggcactgtccatctcacctctgtcggatgccagcctggacctgcagacggttatccgcacctcacccagctccctcgtagctttcatcaactcgcgatgcacatctc

SEQ ID NO: 171607 - DNA, 30 bp, Homo sapiens; identical to SEQ ID NO: 26324
  chr12:57863251-57863281
  hypo

SEQ ID NO: 171608 - DNA, 57 bp, Homo sapiens
  chr12:57868220-57868277
  hypo
ctgggaacacatacctcccatcggaggtgaccgcacgctctgcaacatgaatgagga

SEQ ID NO: 171609 - DNA, 301 bp, Homo sapiens
  chr12:57881025-57881326
  hypo
ctggattacatgcataagccaccgcgcccggcctatgtacatttttgttgttgttgttgataggatggatatgtacactaacttccactttgtcactaattccgcacatggtaactccgaactctaaaactctgaccgttaagagcttgcatcgagagccactgcgagtagctgctgttatgacatggccatttcattctccacaacaagagaagcagccgcggcttcagtcaccgccctccagcagcgtaagaggataaaagtgcgacttgccctaaaacctaaacgtctcttctggatc

SEQ ID NO: 171610 - DNA, 83 bp, Homo sapiens; identical to SEQ ID NO: 84297
  chr12:57885676-57885759
  hypo

SEQ ID NO: 171611 - DNA, 104 bp, Homo sapiens
  chr12:57963864-57963968
  hypo
atcgtggtgcgcatcgcgcccgaggagcggcagaaatacgaggaggagatccgccgtctctataagcagcttgacgacaaggtgagggcggccaggcagggcac

SEQ ID NO: 171612 - DNA, 106 bp, Homo sapiens; identical to SEQ ID NO: 84298
  chr12:57982778-57982884
  hypo

SEQ ID NO: 171613 - DNA, 43 bp, Homo sapiens; identical to SEQ ID NO: 84299
  chr12:57986073-57986116
  hypo

SEQ ID NO: 171614 - DNA, 87 bp, Homo sapiens; identical to SEQ ID NO: 84300
  chr12:58068673-58068760
  hypo

SEQ ID NO: 171615 - DNA, 30 bp, Homo sapiens
  chr12:58122326-58122356
  hypo
aaagtcagtggccccggagcagagtggaac

SEQ ID NO: 171616 - DNA, 45 bp, Homo sapiens
  chr12:58122680-58122725
  hypo
gcctgtaatccccaccgcctgtaatcccagcactttgggaggccg

SEQ ID NO: 171617 - DNA, 37 bp, Homo sapiens
  chr12:58124643-58124680
  hypo
ggcagagatggccctcgggggccgcttgcccgggact

SEQ ID NO: 171618 - DNA, 167 bp, Homo sapiens; identical to SEQ ID NO: 84301
  chr12:58152860-58153027
  hypo

SEQ ID NO: 171619 - DNA, 715 bp, Homo sapiens; identical to SEQ ID NO: 49775
  chr12:58158778-58159493
  hypo

SEQ ID NO: 171620 - DNA, 31 bp, Homo sapiens; identical to SEQ ID NO: 26328
  chr12:58190007-58190038
  hypo

SEQ ID NO: 171621 - DNA, 30 bp, Homo sapiens
  chr12:58204829-58204859
  hypo
ttcacatgtagcagccgcttcacgtcgtag

SEQ ID NO: 171622 - DNA, 30 bp, Homo sapiens; identical to SEQ ID NO: 26329
  chr12:58218605-58218635
  hypo

SEQ ID NO: 171623 - DNA, 220 bp, Homo sapiens; identical to SEQ ID NO: 84305
  chr12:58241481-58241701
  hypo

SEQ ID NO: 171624 - DNA, 375 bp, Homo sapiens; identical to SEQ ID NO: 122609
  chr12:58259122-58259497
  hypo

SEQ ID NO: 171625 - DNA, 158 bp, Homo sapiens
  chr12:58262603-58262761
  hypo
ttcaccacccactggcgatgccccattcacaagggggcccggctggccacgcgacccagcagcatccatttgaaggcagcaagcaacaagctggctccattcacaaaccctgtcctcctttgaaaaccaatcaccgtgcgaagcgtgactgggtggtg

SEQ ID NO: 171626 - DNA, 213 bp, Homo sapiens; identical to SEQ ID NO: 84307
  chr12:58263122-58263335
  hypo

SEQ ID NO: 171627 - DNA, 42 bp, Homo sapiens; identical to SEQ ID NO: 84308
  chr12:58274993-58275035
  hypo

SEQ ID NO: 171628 - DNA, 227 bp, Homo sapiens; identical to SEQ ID NO: 84309
  chr12:58284084-58284311
  hypo

SEQ ID NO: 171629 - DNA, 281 bp, Homo sapiens; identical to SEQ ID NO: 122610
  chr12:58290226-58290507
  hypo

SEQ ID NO: 171630 - DNA, 30 bp, Homo sapiens; identical to SEQ ID NO: 122611
  chr12:58290854-58290884
  hypo

SEQ ID NO: 171631 - DNA, 1072 bp, Homo sapiens; identical to SEQ ID NO: 49783
  chr12:59313473-59314545
  hypo

SEQ ID NO: 171632 - DNA, 1473 bp, Homo sapiens; identical to SEQ ID NO: 49784
  chr12:59989520-59990993
  hypo

SEQ ID NO: 171633 - DNA, 18 bp, Homo sapiens
  chr12:60384603-60384621
  hypo
taaaaagacgtgtccacg

SEQ ID NO: 171634 - DNA, 198 bp, Homo sapiens; identical to SEQ ID NO: 26336
  chr12:60507736-60507934
  hypo

SEQ ID NO: 171635 - DNA, 30 bp, Homo sapiens
  chr12:61563909-61563939
  hypo
tcaactaatggcgaacgcgaatcagtgggt

SEQ ID NO: 171636 - DNA, 190 bp, Homo sapiens
  chr12:61582595-61582785
  hypo
cctaacttggccggccggaccaaattcctaaccctaaaaggacgaacttaaccgtttatctaattgagtgatgtcttccaaggttgctgaagtgggctctgccatttccgattagaacctcatcagatccagctggcgggcaacaagatggtctctagtgctgaccggcattcaccgcaaggcacggttc

SEQ ID NO: 171637 - DNA, 30 bp, Homo sapiens
  chr12:62265813-62265843
  hypo
agtgagctcatactgcgccaccgcactcca

SEQ ID NO: 171638 - DNA, 122 bp, Homo sapiens
  chr12:62266113-62266235
  hypo
tctttacattgatctaaataccggacaaacttggtgttaactagttacaatggcatggaccttaacagacaaatctcgaaaaaaattcgcccttagggtagaatgcgcggtggattagtcac

SEQ ID NO: 171639 - DNA, 311 bp, Homo sapiens; identical to SEQ ID NO: 122616
  chr12:62584701-62585012
  hypo

SEQ ID NO: 171640 - DNA, 1483 bp, Homo sapiens; identical to SEQ ID NO: 8874
  chr12:62585030-62586513
  hypo

SEQ ID NO: 171641 - DNA, 29 bp, Homo sapiens
  chr12:62616289-62616318
  hypo
attattattattattttgagacggagtct

SEQ ID NO: 171642 - DNA, 30 bp, Homo sapiens; identical to SEQ ID NO: 49788
  chr12:62665265-62665295
  hypo

SEQ ID NO: 171643 - DNA, 23 bp, Homo sapiens
  chr12:62898313-62898336
  hypo
accgcacccggcctgtttttatg

SEQ ID NO: 171644 - DNA, 30 bp, Homo sapiens
  chr12:62912976-62913006
  hypo
gaaaggcactggggacgccctggctgtctg

SEQ ID NO: 171645 - DNA, 19 bp, Homo sapiens
  chr12:62913610-62913629
  hypo
cttgagacggagtctcgct

SEQ ID NO: 171646 - DNA, 19 bp, Homo sapiens
  chr12:62913868-62913887
  hypo
actgcgtgagccaccacac

SEQ ID NO: 171647 - DNA, 158 bp, Homo sapiens
  chr12:63014932-63015090
  hypo
ctctctaactggtctccgtggcttctcttgccttcctccagtcttgcccgtgaaccttgattagaggacaacacaacactaacagccactcctccctctccctcctgactccttatttgagttagaggctctcgtaacacctgcgtcttcccctttgt

SEQ ID NO: 171648 - DNA, 41 bp, Homo sapiens; identical to SEQ ID NO: 84321
  chr12:63033700-63033741
  hypo

SEQ ID NO: 171649 - DNA, 30 bp, Homo sapiens; identical to SEQ ID NO: 26341
  chr12:63038405-63038435
  hypo

SEQ ID NO: 171650 - DNA, 30 bp, Homo sapiens
  chr12:63056951-63056981
  hypo
atcttcttgcatgaacgacgatgcaagagt

SEQ ID NO: 171651 - DNA, 30 bp, Homo sapiens
  chr12:63078140-63078170
  hypo
tgggtttggcaaactcgagatttttccagc

SEQ ID NO: 171652 - DNA, 43 bp, Homo sapiens; identical to SEQ ID NO: 84323
  chr12:63126531-63126574
  hypo

SEQ ID NO: 171653 - DNA, 30 bp, Homo sapiens; identical to SEQ ID NO: 8877
  chr12:63138854-63138884
  hypo

SEQ ID NO: 171654 - DNA, 30 bp, Homo sapiens; identical to SEQ ID NO: 26343
  chr12:63187177-63187207
  hypo

SEQ ID NO: 171655 - DNA, 30 bp, Homo sapiens; identical to SEQ ID NO: 26344
  chr12:63187506-63187536
  hypo

SEQ ID NO: 171656 - DNA, 396 bp, Homo sapiens; identical to SEQ ID NO: 84327
  chr12:63195598-63195994
  hypo

SEQ ID NO: 171657 - DNA, 30 bp, Homo sapiens
  chr12:63267590-63267620
  hypo
gataattacaaattacgataattgcctaag

SEQ ID NO: 171658 - DNA, 193 bp, Homo sapiens; identical to SEQ ID NO: 26346
  chr12:63271245-63271438
  hypo

SEQ ID NO: 171659 - DNA, 31 bp, Homo sapiens; identical to SEQ ID NO: 26347
  chr12:63318526-63318557
  hypo

SEQ ID NO: 171660 - DNA, 30 bp, Homo sapiens
  chr12:63326701-63326731
  hypo
accgcgcccggcctaaatgggcttttaaat

SEQ ID NO: 171661 - DNA, 30 bp, Homo sapiens
  chr12:63396660-63396690
  hypo
tcaaaggctttcctccggcatgagaaagga

SEQ ID NO: 171662 - DNA, 267 bp, Homo sapiens
  chr12:63397170-63397437
  hypo
ggcgctggcaagggccgcgcagccgcagtagagggccagggggcgggtggtgcgcacccgccacagagggctgaaggtgctgcccacggctttcttggcgtctcgacgttttggtcagcggcttttttccattctttccctccacttcttgagtgagcagccatgagttggactgtacctgttgtgtgggccagccagagagtgagctcggcaggagcgaattttctgtgcctggggatggccctgtgtccccgtcaggcagcgtgc

SEQ ID NO: 171663 - DNA, 34 bp, Homo sapiens; identical to SEQ ID NO: 84330
  chr12:63397757-63397791
  hypo

SEQ ID NO: 171664 - DNA, 41 bp, Homo sapiens; identical to SEQ ID NO: 84331
  chr12:63788039-63788080
  hypo

SEQ ID NO: 171665 - DNA, 330 bp, Homo sapiens; identical to SEQ ID NO: 8882
  chr12:64237614-64237944
  hypo

SEQ ID NO: 171666 - DNA, 111 bp, Homo sapiens; identical to SEQ ID NO: 8883
  chr12:64238194-64238305
  hypo

SEQ ID NO: 171667 - DNA, 22 bp, Homo sapiens
  chr12:64317643-64317665
  hypo
tgggcatggtggctcacgcctg

SEQ ID NO: 171668 - DNA, 99 bp, Homo sapiens; identical to SEQ ID NO: 84335
  chr12:64373752-64373851
  hypo

SEQ ID NO: 171669 - DNA, 31 bp, Homo sapiens; identical to SEQ ID NO: 84336
  chr12:64383904-64383935
  hypo

SEQ ID NO: 171670 - DNA, 31 bp, Homo sapiens; identical to SEQ ID NO: 84337
  chr12:64458621-64458652
  hypo

SEQ ID NO: 171671 - DNA, 30 bp, Homo sapiens
  chr12:64498444-64498474
  hypo
tgctcgcagccatcacggttagaggccttc

SEQ ID NO: 171672 - DNA, 276 bp, Homo sapiens; identical to SEQ ID NO: 26350
  chr12:64521628-64521904
  hypo

SEQ ID NO: 171673 - DNA, 30 bp, Homo sapiens; identical to SEQ ID NO: 84339
  chr12:64537052-64537082
  hypo

SEQ ID NO: 171674 - DNA, 31 bp, Homo sapiens; identical to SEQ ID NO: 84340
  chr12:64543910-64543941
  hypo

SEQ ID NO: 171675 - DNA, 393 bp, Homo sapiens; identical to SEQ ID NO: 122637
  chr12:64782915-64783308
  hypo

SEQ ID NO: 171676 - DNA, 36 bp, Homo sapiens; identical to SEQ ID NO: 122638
  chr12:64783543-64783579
  hypo

SEQ ID NO: 171677 - DNA, 474 bp, Homo sapiens; identical to SEQ ID NO: 122639
  chr12:64784132-64784606
  hypo

SEQ ID NO: 171678 - DNA, 215 bp, Homo sapiens
  chr12:64797257-64797472
  hypo
caactagtgaggaggcggagtggcagtcaagtcgaggcagcctaagcctacactgcctctatgttgcattaataaattaataaatctgtgaccaaataaatgaagtgacatttagtagcatcgaaagatcccgtgagtaggacttcctaagaatgctctccttcttttcatggacaaaattttagtctgtttaaaataaattttggaccggacac

SEQ ID NO: 171679 - DNA, 76 bp, Homo sapiens
  chr12:64799658-64799734
  hypo
gtgctgggattacaggcgtgagccaccgcgcccggccttccactgcatattgatcgtccaaatgccttctatgtgg

SEQ ID NO: 171680 - DNA, 397 bp, Homo sapiens; identical to SEQ ID NO: 122642
  chr12:64845174-64845571
  hypo

SEQ ID NO: 171681 - DNA, 145 bp, Homo sapiens
  chr12:64993417-64993562
  hypo
ctcgggctgccttgccgcttgccgttgtaaagtctatgccacgcttccaggggaagatgagaagtgttaggaggattaaatgagtttaggagcgctcaaaatactgcctgataagccgggcgcggtggctcacgcctgtaatccc

SEQ ID NO: 171682 - DNA, 28 bp, Homo sapiens
  chr12:65002325-65002353
  hypo
caagtgatccacccgcctctgcctcctc

SEQ ID NO: 171683 - DNA, 33 bp, Homo sapiens
  chr12:65030350-65030383
  hypo
caaaaattaaagtagccgggcgcggtggctcac

SEQ ID NO: 171684 - DNA, 30 bp, Homo sapiens
  chr12:65037211-65037241
  hypo
ctaaggcagaacgaccgcttgagccgagga

SEQ ID NO: 171685 - DNA, 30 bp, Homo sapiens
  chr12:65085257-65085287
  hypo
tgcaagctctcagaccgggaacatccactc

SEQ ID NO: 171686 - DNA, 30 bp, Homo sapiens; identical to SEQ ID NO: 26352
  chr12:65128950-65128980
  hypo

SEQ ID NO: 171687 - DNA, 48 bp, Homo sapiens; identical to SEQ ID NO: 84347
  chr12:65516499-65516547
  hypo

SEQ ID NO: 171688 - DNA, 33 bp, Homo sapiens; identical to SEQ ID NO: 26353
  chr12:65557256-65557289
  hypo

SEQ ID NO: 171689 - DNA, 33 bp, Homo sapiens; identical to SEQ ID NO: 84349
  chr12:65557468-65557501
  hypo

SEQ ID NO: 171690 - DNA, 24 bp, Homo sapiens
  chr12:65562062-65562086
  hypo
tttgactaacgtttttctgtacag

SEQ ID NO: 171691 - DNA, 272 bp, Homo sapiens; identical to SEQ ID NO: 122655
  chr12:65564380-65564652
  hypo

SEQ ID NO: 171692 - DNA, 50 bp, Homo sapiens; identical to SEQ ID NO: 49821
  chr12:65564722-65564772
  hypo

SEQ ID NO: 171693 - DNA, 30 bp, Homo sapiens
  chr12:65970402-65970432
  hypo
gaggtggagtctttgcgaggtaattaggat

SEQ ID NO: 171694 - DNA, 42 bp, Homo sapiens; identical to SEQ ID NO: 26355
  chr12:66213995-66214037
  hypo

SEQ ID NO: 171695 - DNA, 21 bp, Homo sapiens
  chr12:66242348-66242369
  hypo
gtttaaggccgggtgcggtgg

SEQ ID NO: 171696 - DNA, 32 bp, Homo sapiens
  chr12:66248226-66248258
  hypo
acacaatccattcatcgcgattagatttcccc

SEQ ID NO: 171697 - DNA, 34 bp, Homo sapiens
  chr12:66269545-66269579
  hypo
atagtaggcctacgtatgccattagtcaactttc

SEQ ID NO: 171698 - DNA, 18 bp, Homo sapiens
  chr12:66277651-66277669
  hypo
tttgttagtttgagacgc

SEQ ID NO: 171699 - DNA, 30 bp, Homo sapiens; identical to SEQ ID NO: 26356
  chr12:66284819-66284849
  hypo

SEQ ID NO: 171700 - DNA, 90 bp, Homo sapiens; identical to SEQ ID NO: 84355
  chr12:66343865-66343955
  hypo

SEQ ID NO: 171701 - DNA, 40 bp, Homo sapiens
  chr12:66523434-66523474
  hypo
gattacaggcttgagccaccgcgcccggctgaatttcttt

SEQ ID NO: 171702 - DNA, 30 bp, Homo sapiens
  chr12:66554848-66554878
  hypo
cccagacagggcggcggccggcagaggcgt

SEQ ID NO: 171703 - DNA, 607 bp, Homo sapiens; identical to SEQ ID NO: 49831
  chr12:66582758-66583365
  hypo

SEQ ID NO: 171704 - DNA, 30 bp, Homo sapiens
  chr12:66622096-66622126
  hypo
tcactacctgcacaacgttcaaccatgctc

SEQ ID NO: 171705 - DNA, 342 bp, Homo sapiens; identical to SEQ ID NO: 8904
  chr12:66629082-66629424
  hypo

SEQ ID NO: 171706 - DNA, 93 bp, Homo sapiens; identical to SEQ ID NO: 84358
  chr12:66843697-66843790
  hypo

SEQ ID NO: 171707 - DNA, 95 bp, Homo sapiens; identical to SEQ ID NO: 84359
  chr12:66889675-66889770
  hypo

SEQ ID NO: 171708 - DNA, 19 bp, Homo sapiens
  chr12:67164861-67164880
  hypo
gactctgtctcaaaagaaa

SEQ ID NO: 171709 - DNA, 30 bp, Homo sapiens; identical to SEQ ID NO: 84360
  chr12:67460019-67460049
  hypo

SEQ ID NO: 171710 - DNA, 30 bp, Homo sapiens; identical to SEQ ID NO: 84361
  chr12:68052304-68052334
  hypo

SEQ ID NO: 171711 - DNA, 30 bp, Homo sapiens
  chr12:68376203-68376233
  hypo
atggtgctccattgtcggctcaccgctgtc

SEQ ID NO: 171712 - DNA, 36 bp, Homo sapiens; identical to SEQ ID NO: 84362
  chr12:68433184-68433220
  hypo

SEQ ID NO: 171713 - DNA, 36 bp, Homo sapiens; identical to SEQ ID NO: 84363
  chr12:68433459-68433495
  hypo

SEQ ID NO: 171714 - DNA, 31 bp, Homo sapiens; identical to SEQ ID NO: 26359
  chr12:68646672-68646703
  hypo

SEQ ID NO: 171715 - DNA, 30 bp, Homo sapiens
  chr12:68713763-68713793
  hypo
ttggctgagatcaagcgtagaaatctcaga

SEQ ID NO: 171716 - DNA, 30 bp, Homo sapiens
  chr12:68714232-68714262
  hypo
agacagcatggcagtcgccaggacatatgt

SEQ ID NO: 171717 - DNA, 30 bp, Homo sapiens
  chr12:68744481-68744511
  hypo
gcgctgatatttatccggcttattctggta

SEQ ID NO: 171718 - DNA, 30 bp, Homo sapiens; identical to SEQ ID NO: 26360
  chr12:68770814-68770844
  hypo

SEQ ID NO: 171719 - DNA, 85 bp, Homo sapiens; identical to SEQ ID NO: 26361
  chr12:68978213-68978298
  hypo

SEQ ID NO: 171720 - DNA, 24 bp, Homo sapiens
  chr12:68978597-68978621
  hypo
ctttttttccgttttcactagaaa

SEQ ID NO: 171721 - DNA, 34 bp, Homo sapiens
  chr12:69002753-69002787
  hypo
actcaaggccaggcgcggtggctcacgcatgtaa

SEQ ID NO: 171722 - DNA, 65 bp, Homo sapiens; identical to SEQ ID NO: 122681
  chr12:69080590-69080655
  hypo

SEQ ID NO: 171723 - DNA, 48 bp, Homo sapiens; identical to SEQ ID NO: 122682
  chr12:69080865-69080913
  hypo

SEQ ID NO: 171724 - DNA, 30 bp, Homo sapiens
  chr12:69120358-69120388
  hypo
cttattttgtttttccgtactctgggacta

SEQ ID NO: 171725 - DNA, 44 bp, Homo sapiens; identical to SEQ ID NO: 26363
  chr12:69133794-69133838
  hypo

SEQ ID NO: 171726 - DNA, 30 bp, Homo sapiens
  chr12:69144422-69144452
  hypo
cctgtggcgaagacacgcggctgcctgaag

SEQ ID NO: 171727 - DNA, 30 bp, Homo sapiens; identical to SEQ ID NO: 84371
  chr12:69165486-69165516
  hypo

SEQ ID NO: 171728 - DNA, 210 bp, Homo sapiens; identical to SEQ ID NO: 84372
  chr12:69190342-69190552
  hypo

SEQ ID NO: 171729 - DNA, 44 bp, Homo sapiens
  chr12:69193919-69193963
  hypo
cttaaaactcttaaacgtggccgggtgcagtggcgcacgcctat

SEQ ID NO: 171730 - DNA, 98 bp, Homo sapiens; identical to SEQ ID NO: 84373
  chr12:69203730-69203828
  hypo

SEQ ID NO: 171731 - DNA, 105 bp, Homo sapiens; identical to SEQ ID NO: 84374
  chr12:69218065-69218170
  hypo

SEQ ID NO: 171732 - DNA, 19 bp, Homo sapiens
  chr12:69219143-69219162
  hypo
gagataagggccgggcgca

SEQ ID NO: 171733 - DNA, 138 bp, Homo sapiens
  chr12:69219401-69219539
  hypo
cgcctgggcgacacagtgagactgtctaaaaaaaagagagagagagaaaatagttgacagagagaaaatagttgagaacagttagtagacgtagtagacgagaaggctgttgcctgaggaagtcgcagtaactaagac

SEQ ID NO: 171734 - DNA, 35 bp, Homo sapiens
  chr12:69220639-69220674
  hypo
cagaacttgtgatctcgataaaacgtaaaaatccc

SEQ ID NO: 171735 - DNA, 35 bp, Homo sapiens; identical to SEQ ID NO: 84375
  chr12:69225857-69225892
  hypo

SEQ ID NO: 171736 - DNA, 30 bp, Homo sapiens
  chr12:69234204-69234234
  hypo
tgagccaccgcgtccggcctaaatgtcact

SEQ ID NO: 171737 - DNA, 40 bp, Homo sapiens; identical to SEQ ID NO: 49845
  chr12:69241506-69241546
  hypo

SEQ ID NO: 171738 - DNA, 199 bp, Homo sapiens
  chr12:69277879-69278078
  hypo
aattccatcggaaaaaaaaaaaaaaaaaaaaaagcattctgagggaccttgatcaagggacctcgatcaatagacaagatagcaaaagggaaacgcagtctgagctgctgtctataacgaacagttgttttattaaaactaactttggtcagactccttgcaacgtagtcttttttaaagaagccgcccgtgatgctca

SEQ ID NO: 171739 - DNA, 30 bp, Homo sapiens
  chr12:69459678-69459708
  hypo
ctctgtttatttacgcgtgtaatttttatg

SEQ ID NO: 171740 - DNA, 115 bp, Homo sapiens; identical to SEQ ID NO: 84377
  chr12:69461742-69461857
  hypo

SEQ ID NO: 171741 - DNA, 65 bp, Homo sapiens
  chr12:69639024-69639089
  hypo
ttcacaccagcattacgagcccaaacgtgaggaatgcattgggctaagatcgctaaacaatagta

SEQ ID NO: 171742 - DNA, 103 bp, Homo sapiens; identical to SEQ ID NO: 26365
  chr12:69644223-69644326
  hypo

SEQ ID NO: 171743 - DNA, 30 bp, Homo sapiens; identical to SEQ ID NO: 84379
  chr12:69656304-69656334
  hypo

SEQ ID NO: 171744 - DNA, 16 bp, Homo sapiens
  chr12:69659663-69659679
  hypo
gcgtgagccaccgcgc

SEQ ID NO: 171745 - DNA, 99 bp, Homo sapiens
  chr12:69799147-69799246
  hypo
acaatgtattggtctcgatttcatggatagatgattcattcttactaaagaagacctttagtgacctcagcgtacagttttttttctttccttattaag

SEQ ID NO: 171746 - DNA, 34 bp, Homo sapiens; identical to SEQ ID NO: 84380
  chr12:69820433-69820467
  hypo

SEQ ID NO: 171747 - DNA, 18 bp, Homo sapiens
  chr12:69896231-69896249
  hypo
tcaaactccgaggctcga

SEQ ID NO: 171748 - DNA, 127 bp, Homo sapiens; identical to SEQ ID NO: 26366
  chr12:69964170-69964297
  hypo

SEQ ID NO: 171749 - DNA, 30 bp, Homo sapiens; identical to SEQ ID NO: 26367
  chr12:69965239-69965269
  hypo

SEQ ID NO: 171750 - DNA, 30 bp, Homo sapiens; identical to SEQ ID NO: 84384
  chr12:69978363-69978393
  hypo

SEQ ID NO: 171751 - DNA, 154 bp, Homo sapiens; identical to SEQ ID NO: 84385
  chr12:69999218-69999372
  hypo

SEQ ID NO: 171752 - DNA, 179 bp, Homo sapiens; identical to SEQ ID NO: 84386
  chr12:70004623-70004802
  hypo

SEQ ID NO: 171753 - DNA, 31 bp, Homo sapiens; identical to SEQ ID NO: 84387
  chr12:70023345-70023376
  hypo

SEQ ID NO: 171754 - DNA, 30 bp, Homo sapiens
  chr12:70035520-70035550
  hypo
aacagctgaaggacacggttgtttccactc

SEQ ID NO: 171755 - DNA, 325 bp, Homo sapiens
  chr12:70087356-70087681
  hypo
ttgagtgaataaacaaacataaagaattttcaaaggaattctggaggtcctgtctcagctgagaagagcccatggaaggaaaagccattcatagtacctgcttcaaccacgtggtccattgtgggaaatcttttgtacacagcagtgctcaccgagcgaaagatgagcagggaggtgagattgacgtagcgcatcagcgtccttctaagcaggcgcccgtgctcgtcgcttccgtgaacactgctagagatgaggaacattagcctgtctggccagggcaaattcacaaactggttccaccatcggttcactaccagagtaacat

SEQ ID NO: 171756 - DNA, 30 bp, Homo sapiens; identical to SEQ ID NO: 84389
  chr12:70094285-70094315
  hypo

SEQ ID NO: 171757 - DNA, 73 bp, Homo sapiens
  chr12:70135095-70135168
  hypo
ttagttgtaggtggtcgtacagctggccagtgacagagccggtattaaaaactgtatccgactgcccaaaatg

SEQ ID NO: 171758 - DNA, 30 bp, Homo sapiens
  chr12:70159456-70159486
  hypo
ggcaactcaggctgccgaacgaagcatgca

SEQ ID NO: 171759 - DNA, 210 bp, Homo sapiens
  chr12:70173197-70173407
  hypo
ttcggccatcttggctcctcctcccatttgtctttctttattccctcttgaactccaattactcgaacattttctcttttgatgctatcccatagatcttgtaagctttcttcattcctctttagtctttttttttttcttctctacctgtatatttttcacttatcctgcctttgagctcactcatcgtttcttcgcttggttaattct

SEQ ID NO: 171760 - DNA, 21 bp, Homo sapiens
  chr12:70214350-70214371
  hypo
aaaactggccaggtgcgatgg

SEQ ID NO: 171761 - DNA, 34 bp, Homo sapiens
  chr12:70435914-70435948
  hypo
gggcgcagtggctcacgcctgtaataccagcact

SEQ ID NO: 171762 - DNA, 24 bp, Homo sapiens
  chr12:70640966-70640990
  hypo
acgaagttttgctcgtcgctgagg

SEQ ID NO: 171763 - DNA, 172 bp, Homo sapiens; identical to SEQ ID NO: 26371
  chr12:70648186-70648358
  hypo

SEQ ID NO: 171764 - DNA, 101 bp, Homo sapiens; identical to SEQ ID NO: 84392
  chr12:70651427-70651528
  hypo

SEQ ID NO: 171765 - DNA, 30 bp, Homo sapiens
  chr12:70723241-70723271
  hypo
cccctcagttaaatcgcagcttatcacaag

SEQ ID NO: 171766 - DNA, 206 bp, Homo sapiens; identical to SEQ ID NO: 84393
  chr12:70765936-70766142
  hypo

SEQ ID NO: 171767 - DNA, 30 bp, Homo sapiens
  chr12:70799648-70799678
  hypo
ccacatagcgagatccgatctcgaaaagaa

SEQ ID NO: 171768 - DNA, 195 bp, Homo sapiens; identical to SEQ ID NO: 84394
  chr12:70954497-70954692
  hypo

SEQ ID NO: 171769 - DNA, 19 bp, Homo sapiens
  chr12:71278351-71278370
  hypo
attaaaaatttttttgcca

SEQ ID NO: 171770 - DNA, 31 bp, Homo sapiens; identical to SEQ ID NO: 26372
  chr12:71925321-71925352
  hypo

SEQ ID NO: 171771 - DNA, 27 bp, Homo sapiens
  chr12:72042566-72042593
  hypo
acattagaaaataattcgagcagccag

SEQ ID NO: 171772 - DNA, 30 bp, Homo sapiens
  chr12:72066645-72066675
  hypo
aatatgcgagaactgcgagagatcactttc

SEQ ID NO: 171773 - DNA, 43 bp, Homo sapiens; identical to SEQ ID NO: 84398
  chr12:72098320-72098363
  hypo

SEQ ID NO: 171774 - DNA, 121 bp, Homo sapiens; identical to SEQ ID NO: 84399
  chr12:72127144-72127265
  hypo

SEQ ID NO: 171775 - DNA, 31 bp, Homo sapiens; identical to SEQ ID NO: 84400
  chr12:72147562-72147593
  hypo

SEQ ID NO: 171776 - DNA, 29 bp, Homo sapiens
  chr12:72150915-72150944
  hypo
ttgagtcttgccctgtcgcccaggctgaa

SEQ ID NO: 171777 - DNA, 105 bp, Homo sapiens; identical to SEQ ID NO: 26376
  chr12:72165398-72165503
  hypo

SEQ ID NO: 171778 - DNA, 99 bp, Homo sapiens
  chr12:72272241-72272340
  hypo
cttagctttcctcactactgacgatagggttagggttaatagggatggtggtgagggtttttgtttttttttttggaggagtctctctctttcatccag

SEQ ID NO: 171779 - DNA, 41 bp, Homo sapiens; identical to SEQ ID NO: 26377
  chr12:72642201-72642242
  hypo

SEQ ID NO: 171780 - DNA, 103 bp, Homo sapiens; identical to SEQ ID NO: 84404
  chr12:73130928-73131031
  hypo

SEQ ID NO: 171781 - DNA, 17 bp, Homo sapiens
  chr12:73147747-73147764
  hypo
cactgaaatcccaggag

SEQ ID NO: 171782 - DNA, 17 bp, Homo sapiens
  chr12:73148063-73148080
  hypo
ttgtgattcttctggtc

SEQ ID NO: 171783 - DNA, 22 bp, Homo sapiens
  chr12:73732446-73732468
  hypo
gggattacgggcgtgagccact

SEQ ID NO: 171784 - DNA, 167 bp, Homo sapiens; identical to SEQ ID NO: 84408
  chr12:74564710-74564877
  hypo

SEQ ID NO: 171785 - DNA, 30 bp, Homo sapiens
  chr12:74687740-74687770
  hypo
gtaggcagcgcgaggcgcccagacagacgg

SEQ ID NO: 171786 - DNA, 20 bp, Homo sapiens
  chr12:74691583-74691603
  hypo
ccaccgcgcccggcctactc

SEQ ID NO: 171787 - DNA, 20 bp, Homo sapiens
  chr12:74952274-74952294
  hypo
ttttttttttttgagacgga

SEQ ID NO: 171788 - DNA, 238 bp, Homo sapiens
  chr12:75699402-75699640
  hypo
tcagcagcaggccgcggagaagggcggcgcccaccaggcccctagcactgcccagtctggcccggcacagctgctgcagaaggcgcacgacgagctcgtgtggtacatgcgggtcaaggaccagaagaagatgatcatctggtttccagacatggtgaaggatgtcgtcggcagctacaattagtgatggaggggcatattcaggctcaccagcctcatcctcgcccaggtgttcggg

SEQ ID NO: 171789 - DNA, 45 bp, Homo sapiens
  chr12:75702601-75702646
  hypo
aaaaaatgagtaaggcgcttgcagtgagccgagatcacaccacta

SEQ ID NO: 171790 - DNA, 30 bp, Homo sapiens
  chr12:75703104-75703134
  hypo
ttgcttcgctatctgcgtgtgtctcgtcca

SEQ ID NO: 171791 - DNA, 30 bp, Homo sapiens; identical to SEQ ID NO: 84412
  chr12:75890434-75890464
  hypo

SEQ ID NO: 171792 - DNA, 31 bp, Homo sapiens; identical to SEQ ID NO: 84413
  chr12:76417874-76417905
  hypo

SEQ ID NO: 171793 - DNA, 30 bp, Homo sapiens
  chr12:76466877-76466907
  hypo
gtttccactcttctcgttttttttaatgct

SEQ ID NO: 171794 - DNA, 30 bp, Homo sapiens; identical to SEQ ID NO: 26381
  chr12:76530992-76531022
  hypo

SEQ ID NO: 171795 - DNA, 32 bp, Homo sapiens; identical to SEQ ID NO: 84415
  chr12:76706640-76706672
  hypo

SEQ ID NO: 171796 - DNA, 19 bp, Homo sapiens
  chr12:76848714-76848733
  hypo
ggataaaaaagcagcagag

SEQ ID NO: 171797 - DNA, 121 bp, Homo sapiens; identical to SEQ ID NO: 26382
  chr12:76878983-76879104
  hypo

SEQ ID NO: 171798 - DNA, 39 bp, Homo sapiens; identical to SEQ ID NO: 26383
  chr12:76879283-76879322
  hypo

SEQ ID NO: 171799 - DNA, 30 bp, Homo sapiens; identical to SEQ ID NO: 84419
  chr12:76891990-76892020
  hypo

SEQ ID NO: 171800 - DNA, 71 bp, Homo sapiens
  chr12:77002012-77002083
  hypo
gccgtgctcaaggtgcgaattcccggtggctccaccccactctcccagtgcgcgggcggtcccccagtcag

SEQ ID NO: 171801 - DNA, 87 bp, Homo sapiens; identical to SEQ ID NO: 84421
  chr12:77085815-77085902
  hypo

SEQ ID NO: 171802 - DNA, 30 bp, Homo sapiens
  chr12:77096746-77096776
  hypo
aggcatgagtcaccacgcctggccggaatt

SEQ ID NO: 171803 - DNA, 322 bp, Homo sapiens
  chr12:77216006-77216328
  hypo
tattctttgggaaagcgtaataagaaacatgtaatgatgcaggtgtttttagtaatttacacaatgtcaaaacaacgttaatagggcagtaaattaatttttatagaagttctttaaaggtaactaagatagcctgcttttaaacttttaataggaatttcttctgtttatattatcagggcgaatcagcgcttgatttggcaaaacagagaaaaaatgtgtggatgatcaaccacttacaagaggcaaggcaagcaaaaggatatgacaatccgtccttccttagaaagctgaaagctgataaggtaaactcataactgaa

SEQ ID NO: 171804 - DNA, 30 bp, Homo sapiens; identical to SEQ ID NO: 84423
  chr12:77244824-77244854
  hypo

SEQ ID NO: 171805 - DNA, 30 bp, Homo sapiens
  chr12:77252278-77252308
  hypo
aggcgtaagctaccgcgcccggcctgcaac

SEQ ID NO: 171806 - DNA, 115 bp, Homo sapiens; identical to SEQ ID NO: 122740
  chr12:77272743-77272858
  hypo

SEQ ID NO: 171807 - DNA, 28 bp, Homo sapiens
  chr12:77317341-77317369
  hypo
gtctctgttgcccacacgggagggcagt

SEQ ID NO: 171808 - DNA, 30 bp, Homo sapiens; identical to SEQ ID NO: 26386
  chr12:77378548-77378578
  hypo

SEQ ID NO: 171809 - DNA, 55 bp, Homo sapiens; identical to SEQ ID NO: 84427
  chr12:77424234-77424289
  hypo

SEQ ID NO: 171810 - DNA, 33 bp, Homo sapiens; identical to SEQ ID NO: 26387
  chr12:77453496-77453529
  hypo

SEQ ID NO: 171811 - DNA, 30 bp, Homo sapiens; identical to SEQ ID NO: 8932
  chr12:77928810-77928840
  hypo

SEQ ID NO: 171812 - DNA, 30 bp, Homo sapiens
  chr12:78665352-78665382
  hypo
caggggttgagtcaccgcgcctggccgcct

SEQ ID NO: 171813 - DNA, 312 bp, Homo sapiens
  chr12:79842601-79842913
  hypo
cttctatttccaattctttagcgctcaaggacgctttatagtcgggccttatctctagagctagatgattcatattcatttcatggcttctttcagaaagtgcaggtggtggtaactgttttggactatgacaagattggcaagaacgatgccatcggcaaagtctttgtgggctacaacagcaccggcgcggagctgcgacactggtcagacatgctggccaaccccaggcgacctattgcccagtggcacaccctgcaggtagaggaggaagttgatgccatgctggccgtcaagaagtaaaggaaagaa

SEQ ID NO: 171814 - DNA, 165 bp, Homo sapiens; identical to SEQ ID NO: 84431
  chr12:79926687-79926852
  hypo

SEQ ID NO: 171815 - DNA, 31 bp, Homo sapiens; identical to SEQ ID NO: 8935
  chr12:80083437-80083468
  hypo

SEQ ID NO: 171816 - DNA, 856 bp, Homo sapiens; identical to SEQ ID NO: 122749
  chr12:80084233-80085089
  hypo

SEQ ID NO: 171817 - DNA, 20 bp, Homo sapiens
  chr12:80194519-80194539
  hypo
ttttttttttttgaaacgga

SEQ ID NO: 171818 - DNA, 42 bp, Homo sapiens; identical to SEQ ID NO: 84435
  chr12:80871261-80871303
  hypo

SEQ ID NO: 171819 - DNA, 1556 bp, Homo sapiens; identical to SEQ ID NO: 49884
  chr12:81330304-81331860
  hypo

SEQ ID NO: 171820 - DNA, 30 bp, Homo sapiens
  chr12:81688758-81688788
  hypo
ctcttcacgttggctcggcaggctgccacg

SEQ ID NO: 171821 - DNA, 414 bp, Homo sapiens; identical to SEQ ID NO: 122764
  chr12:83080990-83081404
  hypo

SEQ ID NO: 171822 - DNA, 44 bp, Homo sapiens
  chr12:84323712-84323756
  hypo
atatttccagccgggcgcggtggctcatgcctgtaataccagca

SEQ ID NO: 171823 - DNA, 30 bp, Homo sapiens; identical to SEQ ID NO: 8954
  chr12:85918797-85918827
  hypo

SEQ ID NO: 171824 - DNA, 39 bp, Homo sapiens; identical to SEQ ID NO: 84439
  chr12:86216674-86216713
  hypo

SEQ ID NO: 171825 - DNA, 41 bp, Homo sapiens; identical to SEQ ID NO: 84440
  chr12:89020038-89020079
  hypo

SEQ ID NO: 171826 - DNA, 30 bp, Homo sapiens; identical to SEQ ID NO: 122781
  chr12:89747074-89747104
  hypo

SEQ ID NO: 171827 - DNA, 450 bp, Homo sapiens; identical to SEQ ID NO: 8957
  chr12:89747141-89747591
  hypo

SEQ ID NO: 171828 - DNA, 159 bp, Homo sapiens
  chr12:89772133-89772292
  hypo
ttcttctctaatgagcgttgtttgttttactctaggatgcatttggataaaatattgggataaaatttagagaggtctgtttagaaaagggaattaaacatgattggctattattgtgtctttgttttctcatttaaaaaaattacagaggccgggtgt

SEQ ID NO: 171829 - DNA, 30 bp, Homo sapiens; identical to SEQ ID NO: 26398
  chr12:89785810-89785840
  hypo

SEQ ID NO: 171830 - DNA, 24 bp, Homo sapiens
  chr12:89789130-89789154
  hypo
tatggggagggtaggccgggcgcg

SEQ ID NO: 171831 - DNA, 30 bp, Homo sapiens
  chr12:89794338-89794368
  hypo
aaccgcttaggatgccgatgggaaacacct

SEQ ID NO: 171832 - DNA, 95 bp, Homo sapiens; identical to SEQ ID NO: 26399
  chr12:89800519-89800614
  hypo

SEQ ID NO: 171833 - DNA, 30 bp, Homo sapiens
  chr12:89896583-89896613
  hypo
ttcgtgtactttacacgaaataccttatat

SEQ ID NO: 171834 - DNA, 22 bp, Homo sapiens
  chr12:89900846-89900868
  hypo
agaccagctgggcaacgtctcg

SEQ ID NO: 171835 - DNA, 34 bp, Homo sapiens; identical to SEQ ID NO: 26400
  chr12:89915162-89915196
  hypo

SEQ ID NO: 171836 - DNA, 158 bp, Homo sapiens; identical to SEQ ID NO: 84447
  chr12:89916943-89917101
  hypo

SEQ ID NO: 171837 - DNA, 31 bp, Homo sapiens; identical to SEQ ID NO: 26401
  chr12:89919632-89919663
  hypo

SEQ ID NO: 171838 - DNA, 34 bp, Homo sapiens
  chr12:89973339-89973373
  hypo
gctgggaggcatgagccaccgcacccggccaaaa

SEQ ID NO: 171839 - DNA, 30 bp, Homo sapiens; identical to SEQ ID NO: 84449
  chr12:89986558-89986588
  hypo

SEQ ID NO: 171840 - DNA, 30 bp, Homo sapiens
  chr12:89987900-89987930
  hypo
tcaaagaacagttctcgagatacatacaat

SEQ ID NO: 171841 - DNA, 137 bp, Homo sapiens
  chr12:90025698-90025835
  hypo
tgctcggcctgaaggttatacaactattaaatgtcaaggcaaagattcagtccagctctgtcagaggataaagagtatattcttcttcagttataatgctgataagtctgcttacggttctccgacttgtacatcca

SEQ ID NO: 171842 - DNA, 127 bp, Homo sapiens; identical to SEQ ID NO: 26402
  chr12:90049545-90049672
  hypo

SEQ ID NO: 171843 - DNA, 30 bp, Homo sapiens
  chr12:90105232-90105262
  hypo
tataaatgaaacatacggaatatatatatt

SEQ ID NO: 171844 - DNA, 244 bp, Homo sapiens; identical to SEQ ID NO: 84451
  chr12:90313457-90313701
  hypo

SEQ ID NO: 171845 - DNA, 30 bp, Homo sapiens; identical to SEQ ID NO: 26404
  chr12:91348062-91348092
  hypo

SEQ ID NO: 171846 - DNA, 30 bp, Homo sapiens
  chr12:92682489-92682519
  hypo
gtcttcgtaattacacgaagcagttatcac

SEQ ID NO: 171847 - DNA, 76 bp, Homo sapiens; identical to SEQ ID NO: 84453
  chr12:93475465-93475541
  hypo

SEQ ID NO: 171848 - DNA, 40 bp, Homo sapiens
  chr12:93476369-93476409
  hypo
ctatggaaagcagccatgtaggctacgggacctcaatcag

SEQ ID NO: 171849 - DNA, 328 bp, Homo sapiens
  chr12:93709061-93709389
  hypo
aaaaaaaatgcgcaccgccgggcccgcctccctcagcacccaatgctggtcggagccctcgggcaaacaaactacctcctgcatccgggaacttaccctccaggcggaaggaaagaatgcggggacagagacctgtcctgggagaagctccttaggagatgaaggagcaccgaaagatgcctgacgtttttacgactcctctttcatgtttgtgtcccatctcttctcagaagaattagccatgttttgtgaattccaggtgccatcttcaaaaacacccttggattctagccaatcaccaaaatggcagagacggccacctgagacc

SEQ ID NO: 171850 - DNA, 171 bp, Homo sapiens; identical to SEQ ID NO: 84455
  chr12:93710943-93711114
  hypo

SEQ ID NO: 171851 - DNA, 25 bp, Homo sapiens
  chr12:93720902-93720927
  hypo
agcaaaactccgtctcaaaaaaaaa

SEQ ID NO: 171852 - DNA, 97 bp, Homo sapiens; identical to SEQ ID NO: 84457
  chr12:93738882-93738979
  hypo

SEQ ID NO: 171853 - DNA, 31 bp, Homo sapiens; identical to SEQ ID NO: 26405
  chr12:93797480-93797511
  hypo

SEQ ID NO: 171854 - DNA, 24 bp, Homo sapiens
  chr12:93807642-93807666
  hypo
agtcatagtcctgagccgggtgcg

SEQ ID NO: 171855 - DNA, 1186 bp, Homo sapiens; identical to SEQ ID NO: 8960
  chr12:93966029-93967215
  hypo

SEQ ID NO: 171856 - DNA, 529 bp, Homo sapiens; identical to SEQ ID NO: 8961
  chr12:93985155-93985684
  hypo

SEQ ID NO: 171857 - DNA, 30 bp, Homo sapiens; identical to SEQ ID NO: 26408
  chr12:94077129-94077159
  hypo

SEQ ID NO: 171858 - DNA, 142 bp, Homo sapiens
  chr12:94093736-94093878
  hypo
tgcagcatgaaggagcgatctcagcggggaagggaataaagtagggagtgcttcgaaggtgaatctgggttttatggaaggtagagtcattggttccaggggaagaagccagtccagatggaggagacgccaagtacttccc

SEQ ID NO: 171859 - DNA, 43 bp, Homo sapiens; identical to SEQ ID NO: 26409
  chr12:94145344-94145387
  hypo

SEQ ID NO: 171860 - DNA, 282 bp, Homo sapiens
  chr12:94145626-94145908
  hypo
agactctgtttcaaaaacacaaacaaaaaatcctttatctttactttgctcctttcaggatagctctggaatttgaatctgctttccagagctttattctcaactgccagcctcatttttcatactgtagttacttaagggtggaggtagtcgggccggcaagtaactacctgcagtgtacttgagaacctttgaaagcatctgtacttgccaagggtggggcatgtatgcttgagagccctttaaagcgtctttacttgctaagggcgctatgaccattcc

SEQ ID NO: 171861 - DNA, 41 bp, Homo sapiens; identical to SEQ ID NO: 84464
  chr12:94203994-94204035
  hypo

SEQ ID NO: 171862 - DNA, 57 bp, Homo sapiens
  chr12:94233299-94233356
  hypo
acttgctggccagtacgactgtccgatctttatttccattggcggtgaacaacgttc

SEQ ID NO: 171863 - DNA, 105 bp, Homo sapiens
  chr12:94235584-94235689
  hypo
acgggacagtctcttcgctcagcttttttttctagtcccgcacacctgcagcatatgacacttacatcagtaacagtggttcactgcagccgtgagctggggtga

SEQ ID NO: 171864 - DNA, 30 bp, Homo sapiens; identical to SEQ ID NO: 84465
  chr12:94246127-94246157
  hypo

SEQ ID NO: 171865 - DNA, 30 bp, Homo sapiens; identical to SEQ ID NO: 26410
  chr12:94533218-94533248
  hypo

SEQ ID NO: 171866 - DNA, 2369 bp, Homo sapiens; identical to SEQ ID NO: 122806
  chr12:94541783-94544152
  hypo

SEQ ID NO: 171867 - DNA, 35 bp, Homo sapiens; identical to SEQ ID NO: 122807
  chr12:94544416-94544451
  hypo

SEQ ID NO: 171868 - DNA, 252 bp, Homo sapiens
  chr12:94658438-94658690
  hypo
gcatttttttaaatgtcgtttatttctggcttgctaaagggtgattaaatacgaatgtaaacaaaggtacactctccacatctaactgttcctaggcattaacccactgatgagcattagtctgccatatgtaagtttaaacataaaataacaaggtatactgtgggtactgcacgtcgctgtgaatgtgcacgcgtgcgcgtgtgcagatgtgcattcgcgatggagagaggaggcggttttctgagtttt

SEQ ID NO: 171869 - DNA, 30 bp, Homo sapiens; identical to SEQ ID NO: 84470
  chr12:94852075-94852105
  hypo

SEQ ID NO: 171870 - DNA, 23 bp, Homo sapiens
  chr12:94852490-94852513
  hypo
gcgacagagtgagactcagtcat

SEQ ID NO: 171871 - DNA, 30 bp, Homo sapiens
  chr12:94942051-94942081
  hypo
tctgcaagccctagcgctgctgccccgctt

SEQ ID NO: 171872 - DNA, 30 bp, Homo sapiens; identical to SEQ ID NO: 84472
  chr12:94975746-94975776
  hypo

SEQ ID NO: 171873 - DNA, 78 bp, Homo sapiens; identical to SEQ ID NO: 84473
  chr12:95397955-95398033
  hypo

SEQ ID NO: 171874 - DNA, 30 bp, Homo sapiens
  chr12:95451579-95451609
  hypo
ttttttctgttgaagcggcacagttggaag

SEQ ID NO: 171875 - DNA, 41 bp, Homo sapiens; identical to SEQ ID NO: 84474
  chr12:95467947-95467988
  hypo

SEQ ID NO: 171876 - DNA, 30 bp, Homo sapiens; identical to SEQ ID NO: 92128
  chr12:95492651-95492681
  hypo

SEQ ID NO: 171877 - DNA, 90 bp, Homo sapiens; identical to SEQ ID NO: 84476
  chr12:95492920-95493010
  hypo

SEQ ID NO: 171878 - DNA, 42 bp, Homo sapiens; identical to SEQ ID NO: 84477
  chr12:95562126-95562168
  hypo

SEQ ID NO: 171879 - DNA, 153 bp, Homo sapiens; identical to SEQ ID NO: 84478
  chr12:95602735-95602888
  hypo

SEQ ID NO: 171880 - DNA, 210 bp, Homo sapiens; identical to SEQ ID NO: 84479
  chr12:95676256-95676466
  hypo

SEQ ID NO: 171881 - DNA, 30 bp, Homo sapiens
  chr12:95759550-95759580
  hypo
ctccgctttggcccccgagtcctttccaga

SEQ ID NO: 171882 - DNA, 31 bp, Homo sapiens; identical to SEQ ID NO: 84480
  chr12:95802944-95802975
  hypo

SEQ ID NO: 171883 - DNA, 29 bp, Homo sapiens
  chr12:95823033-95823062
  hypo
ccgcgcccggccagtccttctctatctgg

SEQ ID NO: 171884 - DNA, 17 bp, Homo sapiens
  chr12:95863738-95863755
  hypo
tggagtgttgctctgtc

SEQ ID NO: 171885 - DNA, 38 bp, Homo sapiens; identical to SEQ ID NO: 84483
  chr12:95900347-95900385
  hypo

SEQ ID NO: 171886 - DNA, 28 bp, Homo sapiens
  chr12:95901842-95901870
  hypo
caccgcacccagccgattcacatattct

SEQ ID NO: 171887 - DNA, 30 bp, Homo sapiens; identical to SEQ ID NO: 49928
  chr12:96027743-96027773
  hypo

SEQ ID NO: 171888 - DNA, 31 bp, Homo sapiens; identical to SEQ ID NO: 84486
  chr12:96043430-96043461
  hypo

SEQ ID NO: 171889 - DNA, 154 bp, Homo sapiens
  chr12:96115681-96115835
  hypo
aagtgtgcatgtgcatgcacacgtgcgcgcacacacacactcacacacaaatttccaaatgcgaccccatctgtgtacattgactggccacatctgtatacatctatatatatacacggtgggcactgattccgagactgcttaaagttgtgat

SEQ ID NO: 171890 - DNA, 95 bp, Homo sapiens
  chr12:96131818-96131913
  hypo
ttcagcagctgcacgcgaaggttggtgatcttcagctgctcctgaactttggcactgtaagggttctctgtatcgtatggtggtgacaaagcttt

SEQ ID NO: 171891 - DNA, 110 bp, Homo sapiens; identical to SEQ ID NO: 122823
  chr12:96183925-96184035
  hypo

SEQ ID NO: 171892 - DNA, 30 bp, Homo sapiens; identical to SEQ ID NO: 122824
  chr12:96184403-96184433
  hypo

SEQ ID NO: 171893 - DNA, 30 bp, Homo sapiens; identical to SEQ ID NO: 122825
  chr12:96184708-96184738
  hypo

SEQ ID NO: 171894 - DNA, 376 bp, Homo sapiens; identical to SEQ ID NO: 8968
  chr12:96184964-96185340
  hypo

SEQ ID NO: 171895 - DNA, 40 bp, Homo sapiens
  chr12:96431741-96431781
  hypo
acaggcgtgagccaccgcgcccggccgagaaagaattttt

SEQ ID NO: 171896 - DNA, 33 bp, Homo sapiens
  chr12:96437260-96437293
  hypo
tgtagtcccagctactcgggaggctgaggcagg

SEQ ID NO: 171897 - DNA, 93 bp, Homo sapiens
  chr12:96437412-96437505
  hypo
catgtagttcttttccatttagagagttttattggtgattattataggaaaacagactggagagagaataaaagtaggcgctgcagcaattct

SEQ ID NO: 171898 - DNA, 175 bp, Homo sapiens; identical to SEQ ID NO: 84491
  chr12:96566282-96566457
  hypo

SEQ ID NO: 171899 - DNA, 207 bp, Homo sapiens; identical to SEQ ID NO: 122832
  chr12:96587647-96587854
  hypo

SEQ ID NO: 171900 - DNA, 60 bp, Homo sapiens
  chr12:96613303-96613363
  hypo
ctcatagttaaactacgtcgagtggaacgaaaacaatatggagagcgctgtggcagctgg

SEQ ID NO: 171901 - DNA, 34 bp, Homo sapiens; identical to SEQ ID NO: 49937
  chr12:96618051-96618085
  hypo

SEQ ID NO: 171902 - DNA, 78 bp, Homo sapiens
  chr12:96633651-96633729
  hypo
gttagtgtctgcaccacctttcggggcctgacatgtggcgtctcgcctgtaggctgcggccagcatctaagcggagca

SEQ ID NO: 171903 - DNA, 84 bp, Homo sapiens
  chr12:96641020-96641104
  hypo
gaagacagcccccccgtggaagaagtcaggactgtgatcaggtttgtgaccaataaaaccgacaagcacgtcaccaggccggtg

SEQ ID NO: 171904 - DNA, 24 bp, Homo sapiens
  chr12:96881021-96881045
  hypo
cacgacacccagccaatttaattt

SEQ ID NO: 171905 - DNA, 30 bp, Homo sapiens
  chr12:96912861-96912891
  hypo
ttaactctgaggagtcgagttttttttttt

SEQ ID NO: 171906 - DNA, 63 bp, Homo sapiens; identical to SEQ ID NO: 84496
  chr12:97339535-97339598
  hypo

SEQ ID NO: 171907 - DNA, 31 bp, Homo sapiens; identical to SEQ ID NO: 84497
  chr12:98815582-98815613
  hypo

SEQ ID NO: 171908 - DNA, 19 bp, Homo sapiens
  chr12:98825880-98825899
  hypo
gaattccagctgggggcgg

SEQ ID NO: 171909 - DNA, 18 bp, Homo sapiens
  chr12:98826138-98826156
  hypo
agccggggtgacagagtg

SEQ ID NO: 171910 - DNA, 39 bp, Homo sapiens
  chr12:98895874-98895913
  hypo
aagtttatagccaggcgcggtggctcacgcctgtaatcc

SEQ ID NO: 171911 - DNA, 26 bp, Homo sapiens
  chr12:98947595-98947621
  hypo
gtcttttttttctttttgagacggag

SEQ ID NO: 171912 - DNA, 241 bp, Homo sapiens; identical to SEQ ID NO: 84501
  chr12:98947860-98948101
  hypo

SEQ ID NO: 171913 - DNA, 85 bp, Homo sapiens; identical to SEQ ID NO: 84502
  chr12:98948340-98948425
  hypo

SEQ ID NO: 171914 - DNA, 86 bp, Homo sapiens; identical to SEQ ID NO: 84503
  chr12:98983723-98983809
  hypo

SEQ ID NO: 171915 - DNA, 30 bp, Homo sapiens
  chr12:98992125-98992155
  hypo
tgttcacatagttacgtgttttgttaatga

SEQ ID NO: 171916 - DNA, 990 bp, Homo sapiens; identical to SEQ ID NO: 49948
  chr12:99287417-99288407
  hypo

SEQ ID NO: 171917 - DNA, 315 bp, Homo sapiens; identical to SEQ ID NO: 8974
  chr12:99288621-99288936
  hypo

SEQ ID NO: 171918 - DNA, 353 bp, Homo sapiens; identical to SEQ ID NO: 49950
  chr12:99289161-99289514
  hypo

SEQ ID NO: 171919 - DNA, 31 bp, Homo sapiens; identical to SEQ ID NO: 84507
  chr12:100352715-100352746
  hypo

SEQ ID NO: 171920 - DNA, 121 bp, Homo sapiens
  chr12:100624654-100624775
  hypo
aaaatagttgaattgctagttataccccttttattctgaagtataagccctaaactaacttaaaatagtttctagtgacaatctttttttttttttgagaatgagtctcgctctgttgccc

SEQ ID NO: 171921 - DNA, 31 bp, Homo sapiens; identical to SEQ ID NO: 84508
  chr12:100710890-100710921
  hypo

SEQ ID NO: 171922 - DNA, 27 bp, Homo sapiens
  chr12:100712398-100712425
  hypo
tgggcgtggccacgtgtgcctttttct

SEQ ID NO: 171923 - DNA, 34 bp, Homo sapiens; identical to SEQ ID NO: 26426
  chr12:100969542-100969576
  hypo

SEQ ID NO: 171924 - DNA, 170 bp, Homo sapiens; identical to SEQ ID NO: 26427
  chr12:101711199-101711369
  hypo

SEQ ID NO: 171925 - DNA, 95 bp, Homo sapiens; identical to SEQ ID NO: 26428
  chr12:101718175-101718270
  hypo

SEQ ID NO: 171926 - DNA, 197 bp, Homo sapiens
  chr12:101720928-101721125
  hypo
atggccattgtcctgcggttcctggccgggacccaacctgaggagatccagatattcttagacctgctgtttgaacctgtgaggcatttcaagaatggtaactatcagctacctctcactctaatacctgttgtctgcggtggacttctcacatctcaggctacatttcccatgctcctgggcgtctttctaacagg

SEQ ID NO: 171927 - DNA, 31 bp, Homo sapiens; identical to SEQ ID NO: 8980
  chr12:101762739-101762770
  hypo

SEQ ID NO: 171928 - DNA, 23 bp, Homo sapiens
  chr12:101861451-101861474
  hypo
aaaagctctcaaggccaggtgcg

SEQ ID NO: 171929 - DNA, 37 bp, Homo sapiens
  chr12:101962171-101962208
  hypo
acttggatttgaacccgatcagcggctttcctttcac

SEQ ID NO: 171930 - DNA, 161 bp, Homo sapiens
  chr12:102092191-102092352
  hypo
ggacgggccggagggcgcctgcccagccgctatcccatgcggcgccaacctgtgagacggacccgcggtcgggtgctttgcacactggggactgaacacccccatctccgtcctgcctggcacagggacttgtgccaagcccgagacgccctttgaatact

SEQ ID NO: 171931 - DNA, 193 bp, Homo sapiens
  chr12:102108363-102108556
  hypo
gtttgtgttttattgcgctcattggcagacttatgtttcaggcatgttgagatttggaaagtaagtatgctttttaagttgtacattaaaaaatataattgaattcatttgcacaatctgttatgtcattcatcgataataaggagaacaaatcttcaatcagtaacttaaattaattcgtcggagtactcat

SEQ ID NO: 171932 - DNA, 198 bp, Homo sapiens; identical to SEQ ID NO: 84515
  chr12:102132857-102133055
  hypo

SEQ ID NO: 171933 - DNA, 57 bp, Homo sapiens; identical to SEQ ID NO: 84516
  chr12:102133324-102133381
  hypo

SEQ ID NO: 171934 - DNA, 37 bp, Homo sapiens
  chr12:102134947-102134984
  hypo
ttgggtaaggaatgacggatgacgactcccagacttg

SEQ ID NO: 171935 - DNA, 30 bp, Homo sapiens
  chr12:102158651-102158681
  hypo
atgtctcttaaacttcgggaagcgtttttc

SEQ ID NO: 171936 - DNA, 30 bp, Homo sapiens; identical to SEQ ID NO: 84517
  chr12:102267343-102267373
  hypo

SEQ ID NO: 171937 - DNA, 34 bp, Homo sapiens; identical to SEQ ID NO: 84518
  chr12:102276170-102276204
  hypo

SEQ ID NO: 171938 - DNA, 31 bp, Homo sapiens; identical to SEQ ID NO: 26432
  chr12:102280965-102280996
  hypo

SEQ ID NO: 171939 - DNA, 30 bp, Homo sapiens; identical to SEQ ID NO: 26433
  chr12:102288360-102288390
  hypo

SEQ ID NO: 171940 - DNA, 359 bp, Homo sapiens
  chr12:102301885-102302244
  hypo
agcccagagtgagagtgcttgcggttcgatgttgacaaacccacccagagtaacacacatttatgactttttctccaggagttagctgtgccagtggttcatgacgggggcgctcttttggcctttgtctgtggtgtcgtgtacacgctcctacagtccatcatctcttacaaatcatgtccccagtggaacagtctctcgacatgccacatacggatggtcatctctgccgtttcttgcgcagctgtcatccccagtatcctttttcacatttgtgccttgttaaaggaataaaacattcagtgacacttgttaaagaagggtaatgaagactttatagggaccgctgcaatgagttc

SEQ ID NO: 171941 - DNA, 30 bp, Homo sapiens
  chr12:102351198-102351228
  hypo
aaaaaacagcgcgtgcgcatgcatacacat

SEQ ID NO: 171942 - DNA, 32 bp, Homo sapiens; identical to SEQ ID NO: 84522
  chr12:102457127-102457159
  hypo

SEQ ID NO: 171943 - DNA, 151 bp, Homo sapiens
  chr12:102457338-102457489
  hypo
aggagacgtagccagaaaattttcgtttaagggccttttatgccagatttgatactatagtccatgtttatctaatgtgattcataggccatctgtagcaattatttgggtgtgggtggtgtttcttaaagttgcacgttgcccagcttaa

SEQ ID NO: 171944 - DNA, 30 bp, Homo sapiens
  chr12:102989283-102989313
  hypo
tgccattgcgacctgcgcccatgaagcaag

SEQ ID NO: 171945 - DNA, 842 bp, Homo sapiens; identical to SEQ ID NO: 49971
  chr12:103351143-103351985
  hypo

SEQ ID NO: 171946 - DNA, 103 bp, Homo sapiens; identical to SEQ ID NO: 8987
  chr12:103352051-103352154
  hypo

SEQ ID NO: 171947 - DNA, 112 bp, Homo sapiens; identical to SEQ ID NO: 8988
  chr12:103352170-103352282
  hypo

SEQ ID NO: 171948 - DNA, 469 bp, Homo sapiens; identical to SEQ ID NO: 8989
  chr12:103352313-103352782
  hypo

SEQ ID NO: 171949 - DNA, 30 bp, Homo sapiens; identical to SEQ ID NO: 49978
  chr12:103481413-103481443
  hypo

SEQ ID NO: 171950 - DNA, 30 bp, Homo sapiens; identical to SEQ ID NO: 49979
  chr12:103602171-103602201
  hypo

SEQ ID NO: 171951 - DNA, 8 bp, Homo sapiens
  chr12:103696151-103696159
  hypo
cgggattt

SEQ ID NO: 171952 - DNA, 202 bp, Homo sapiens; identical to SEQ ID NO: 122896
  chr12:103696193-103696395
  hypo

SEQ ID NO: 171953 - DNA, 93 bp, Homo sapiens
  chr12:103926637-103926730
  hypo
gggcagacacagagtcgagtcttcaaagaggtcacatcaaaacgcccctgccccacaggcaaggtgaagcgcggatcacggagacaacgggga

SEQ ID NO: 171954 - DNA, 99 bp, Homo sapiens; identical to SEQ ID NO: 84529
  chr12:103970053-103970152
  hypo

SEQ ID NO: 171955 - DNA, 30 bp, Homo sapiens; identical to SEQ ID NO: 49982
  chr12:104036483-104036513
  hypo

SEQ ID NO: 171956 - DNA, 127 bp, Homo sapiens
  chr12:104169294-104169421
  hypo
acttgaagccaagaacaccagcgcattcttttagaaccccgacaccgagcagttctgggcgcaacacacacccattaagtgtcagcctccaatacaccctgatggcgaaaacacctagaagcaagca

SEQ ID NO: 171957 - DNA, 40 bp, Homo sapiens; identical to SEQ ID NO: 26439
  chr12:104220731-104220771
  hypo

SEQ ID NO: 171958 - DNA, 797 bp, Homo sapiens; identical to SEQ ID NO: 49984
  chr12:104322591-104323388
  hypo

SEQ ID NO: 171959 - DNA, 99 bp, Homo sapiens; identical to SEQ ID NO: 122906
  chr12:104459022-104459121
  hypo

SEQ ID NO: 171960 - DNA, 30 bp, Homo sapiens; identical to SEQ ID NO: 84534
  chr12:104464092-104464122
  hypo

SEQ ID NO: 171961 - DNA, 38 bp, Homo sapiens; identical to SEQ ID NO: 26441
  chr12:104506940-104506978
  hypo

SEQ ID NO: 171962 - DNA, 30 bp, Homo sapiens; identical to SEQ ID NO: 26442
  chr12:104532892-104532922
  hypo

SEQ ID NO: 171963 - DNA, 31 bp, Homo sapiens; identical to SEQ ID NO: 26443
  chr12:104598457-104598488
  hypo

SEQ ID NO: 171964 - DNA, 30 bp, Homo sapiens
  chr12:104669904-104669934
  hypo
gggcacatttgaaggcggaatggcttaaac

SEQ ID NO: 171965 - DNA, 24 bp, Homo sapiens
  chr12:104671655-104671679
  hypo
tctttttttttttttttgagacga

SEQ ID NO: 171966 - DNA, 31 bp, Homo sapiens; identical to SEQ ID NO: 26445
  chr12:104684139-104684170
  hypo

SEQ ID NO: 171967 - DNA, 18 bp, Homo sapiens
  chr12:104684834-104684852
  hypo
cctcggcctcctaaagtg

SEQ ID NO: 171968 - DNA, 43 bp, Homo sapiens; identical to SEQ ID NO: 84541
  chr12:104685527-104685570
  hypo

SEQ ID NO: 171969 - DNA, 93 bp, Homo sapiens; identical to SEQ ID NO: 26447
  chr12:104686066-104686159
  hypo

SEQ ID NO: 171970 - DNA, 36 bp, Homo sapiens; identical to SEQ ID NO: 84543
  chr12:104691423-104691459
  hypo

SEQ ID NO: 171971 - DNA, 27 bp, Homo sapiens
  chr12:104692209-104692236
  hypo
atatttttctggggccgggcgcagtgg

SEQ ID NO: 171972 - DNA, 27 bp, Homo sapiens
  chr12:104692475-104692502
  hypo
tgggcaaccaagcgagactctatctaa

SEQ ID NO: 171973 - DNA, 17 bp, Homo sapiens
  chr12:104693228-104693245
  hypo
acataactttaaagaaa

SEQ ID NO: 171974 - DNA, 17 bp, Homo sapiens
  chr12:104693544-104693561
  hypo
caaaaaaaaaaaaaaaa

SEQ ID NO: 171975 - DNA, 19 bp, Homo sapiens
  chr12:104695138-104695157
  hypo
ggagtctcgctctgtcgcc

SEQ ID NO: 171976 - DNA, 78 bp, Homo sapiens; identical to SEQ ID NO: 84545
  chr12:104695396-104695474
  hypo

SEQ ID NO: 171977 - DNA, 93 bp, Homo sapiens; identical to SEQ ID NO: 84546
  chr12:104696545-104696638
  hypo

SEQ ID NO: 171978 - DNA, 113 bp, Homo sapiens
  chr12:104698273-104698386
  hypo
caccagaaaaaagttcgcaagatggaagaaaatggcaacatgcctacaaagttgcagaagttggacctgagtagttatccagaagcgacagaaaaaaacgtagaaaggatttt

SEQ ID NO: 171979 - DNA, 37 bp, Homo sapiens; identical to SEQ ID NO: 26451
  chr12:104702053-104702090
  hypo

SEQ ID NO: 171980 - DNA, 36 bp, Homo sapiens; identical to SEQ ID NO: 26452
  chr12:104703966-104704002
  hypo

SEQ ID NO: 171981 - DNA, 30 bp, Homo sapiens; identical to SEQ ID NO: 84549
  chr12:104744650-104744680
  hypo

SEQ ID NO: 171982 - DNA, 144 bp, Homo sapiens
  chr12:104799423-104799567
  hypo
ctttttgtttttttctatgttggataagattatcttttcaaacttattttcacaatcagcactgagatgaccaactagccaagctgccccgtgtgcctgccacctctccatccacgggtgcctgccagccggtaatgagaagtt

SEQ ID NO: 171983 - DNA, 395 bp, Homo sapiens; identical to SEQ ID NO: 122914
  chr12:104850141-104850536
  hypo

SEQ ID NO: 171984 - DNA, 2255 bp, Homo sapiens; identical to SEQ ID NO: 49993
  chr12:104850577-104852832
  hypo

SEQ ID NO: 171985 - DNA, 22 bp, Homo sapiens
  chr12:105019096-105019118
  hypo
tctgagacggagtttcgctctt

SEQ ID NO: 171986 - DNA, 31 bp, Homo sapiens; identical to SEQ ID NO: 84552
  chr12:105056938-105056969
  hypo

SEQ ID NO: 171987 - DNA, 30 bp, Homo sapiens; identical to SEQ ID NO: 84553
  chr12:105071468-105071498
  hypo

SEQ ID NO: 171988 - DNA, 176 bp, Homo sapiens
  chr12:105096585-105096761
  hypo
tccaagggcggacagcgggtcggcgagagtcgataatgggttccagcagattggacgccgttcagatctaactcgagcctggcgccctttgcagacttggagtccaagtcctcctcatgccttagcagcaagttccaaagcagcctggaggggacggcaggcgtgtggtcaccact

SEQ ID NO: 171989 - DNA, 132 bp, Homo sapiens
  chr12:105097265-105097397
  hypo
cacttccccccaccccggctgccgtctttcttctccagtctcacctggatgaacccatcctccacctcctctcccacctgagaacattctactgccgcagccagagctggtctacagcgtaagtcggatcat

SEQ ID NO: 171990 - DNA, 30 bp, Homo sapiens; identical to SEQ ID NO: 26456
  chr12:105106499-105106529
  hypo

SEQ ID NO: 171991 - DNA, 50 bp, Homo sapiens
  chr12:105132875-105132925
  hypo
gttgggaaccaacgccggtgtgtgccagaggagcccgggtagtgggtgcg

SEQ ID NO: 171992 - DNA, 30 bp, Homo sapiens; identical to SEQ ID NO: 26458
  chr12:105150855-105150885
  hypo

SEQ ID NO: 171993 - DNA, 43 bp, Homo sapiens
  chr12:105156924-105156967
  hypo
attgggtgagaaaatagatcccgttttcaaccatgctagatat

SEQ ID NO: 171994 - DNA, 330 bp, Homo sapiens
  chr12:105392582-105392912
  hypo
tgtgtgccctctgtgcgtgtgcttacatgggtagcagtggccactcagggtaagggggcgggctgctggtctccatgcatagtttcacaccactggcagtgttgacacaggggcagggtactggtggctgcgggactggtgccaaatgtgcgcacgtttatgctggctgcagtggctgcacagggcgcagggcaggtccactggtcactgtgcctagttttgcagctggtggcagtgttggtgtcggagtggggtactggtggtctccgtacctgcagatactccagtggcagtggcagcatggtggtcgggtgcagtgtgctcaagcca

SEQ ID NO: 171995 - DNA, 240 bp, Homo sapiens
  chr12:105472669-105472909
  hypo
aatgcatgtgcacagcgtgtccaatactgggagttaaggagtggtgacaagcgacaccgtagcaagagacattatggagcgctttgtgtcaaataattgggaccttattgtgaagacaatgagattcactgagccgctttaagcaggagagttaattgaaaccaggagagtctagtttctatgctaatagactgcttaggtaactctggaggcatgaactagctccgggtagacacacct

SEQ ID NO: 171996 - DNA, 147 bp, Homo sapiens
  chr12:105607979-105608126
  hypo
aaaaaccatacttccatcctttgggaactattcactccctactaaaacaatcatcattcctgcccatgacaacgtggttgtaagtaaatattttaaactggaaatcttgcttctggggtttcgacaactaaccgcgtttccttagca

SEQ ID NO: 171997 - DNA, 41 bp, Homo sapiens
  chr12:105773502-105773543
  hypo
tagaaacaatgtagaaacaatcggccgggcgcggtggctca

SEQ ID NO: 171998 - DNA, 205 bp, Homo sapiens
  chr12:105955872-105956077
  hypo
gagaagggtggattgccgggagaaagtgtggcactgccatcagactgtaggtggcctcgccattgggtcaagcaagtatttggtgctggggagtatggagggggcacacgggccttctcaggcagcccaagaaggacgaggccttataggaaaactgacttaagatgaaccctgccagaaagggccactccgtcaccagccttgt

SEQ ID NO: 171999 - DNA, 159 bp, Homo sapiens
  chr12:105956296-105956455
  hypo
attctgcctaaactgcggtgtggtgtgagtgagcccgctcccttggagctgccccacagcggtagcggaggtgagtcatggccataaaatctggaaagctcgtagggggatggagggcggtggagaaatataaattattgtgatcgtctttcaggagcg

SEQ ID NO: 172000 - DNA, 30 bp, Homo sapiens; identical to SEQ ID NO: 49998
  chr12:106216288-106216318
  hypo

SEQ ID NO: 172001 - DNA, 118 bp, Homo sapiens; identical to SEQ ID NO: 26459
  chr12:106460687-106460805
  hypo

SEQ ID NO: 172002 - DNA, 903 bp, Homo sapiens; identical to SEQ ID NO: 122921
  chr12:106532091-106532994
  hypo

SEQ ID NO: 172003 - DNA, 31 bp, Homo sapiens; identical to SEQ ID NO: 84563
  chr12:106537677-106537708
  hypo

SEQ ID NO: 172004 - DNA, 265 bp, Homo sapiens; identical to SEQ ID NO: 50002
  chr12:106640991-106641256
  hypo

SEQ ID NO: 172005 - DNA, 55 bp, Homo sapiens; identical to SEQ ID NO: 9007
  chr12:106641514-106641569
  hypo

SEQ ID NO: 172006 - DNA, 143 bp, Homo sapiens; identical to SEQ ID NO: 84566
  chr12:106643970-106644113
  hypo

SEQ ID NO: 172007 - DNA, 60 bp, Homo sapiens
  chr12:106669248-106669308
  hypo
tgagcttagcaaggatctacccgggcaggagtcagacccgcttgctgcatgggagaaaag

SEQ ID NO: 172008 - DNA, 30 bp, Homo sapiens
  chr12:106763423-106763453
  hypo
agccagaggatcatccgcaatgccttacct

SEQ ID NO: 172009 - DNA, 43 bp, Homo sapiens; identical to SEQ ID NO: 84567
  chr12:106829973-106830016
  hypo

SEQ ID NO: 172010 - DNA, 190 bp, Homo sapiens; identical to SEQ ID NO: 26461
  chr12:106881471-106881661
  hypo

SEQ ID NO: 172011 - DNA, 1110 bp, Homo sapiens; identical to SEQ ID NO: 122935
  chr12:106979636-106980746
  hypo

SEQ ID NO: 172012 - DNA, 43 bp, Homo sapiens; identical to SEQ ID NO: 84570
  chr12:107103206-107103249
  hypo

SEQ ID NO: 172013 - DNA, 40 bp, Homo sapiens; identical to SEQ ID NO: 84571
  chr12:107114441-107114481
  hypo

SEQ ID NO: 172014 - DNA, 986 bp, Homo sapiens; identical to SEQ ID NO: 50017
  chr12:107167935-107168921
  hypo

SEQ ID NO: 172015 - DNA, 30 bp, Homo sapiens
  chr12:107208873-107208903
  hypo
tcaggtcacaattgcgctatgagctccagg

SEQ ID NO: 172016 - DNA, 30 bp, Homo sapiens; identical to SEQ ID NO: 84573
  chr12:107272881-107272911
  hypo

SEQ ID NO: 172017 - DNA, 30 bp, Homo sapiens
  chr12:107369062-107369092
  hypo
actcaccgccacccccgcccccgagacatg

SEQ ID NO: 172018 - DNA, 231 bp, Homo sapiens; identical to SEQ ID NO: 84574
  chr12:107436702-107436933
  hypo

SEQ ID NO: 172019 - DNA, 27 bp, Homo sapiens
  chr12:107484818-107484845
  hypo
agtccttttttttttttcttgcgacag

SEQ ID NO: 172020 - DNA, 27 bp, Homo sapiens
  chr12:107485084-107485111
  hypo
gatgagccaccgcgcccagcctaactc

SEQ ID NO: 172021 - DNA, 30 bp, Homo sapiens
  chr12:107851164-107851194
  hypo
ccgaaagatagactccgaagttttattaac

SEQ ID NO: 172022 - DNA, 30 bp, Homo sapiens; identical to SEQ ID NO: 84577
  chr12:107889170-107889200
  hypo

SEQ ID NO: 172023 - DNA, 31 bp, Homo sapiens; identical to SEQ ID NO: 84578
  chr12:108012257-108012288
  hypo

SEQ ID NO: 172024 - DNA, 22 bp, Homo sapiens
  chr12:108080453-108080475
  hypo
aaaagtcccgccgggcgcggtg

SEQ ID NO: 172025 - DNA, 409 bp, Homo sapiens; identical to SEQ ID NO: 122949
  chr12:108169004-108169413
  hypo

SEQ ID NO: 172026 - DNA, 439 bp, Homo sapiens; identical to SEQ ID NO: 50028
  chr12:108297324-108297763
  hypo

SEQ ID NO: 172027 - DNA, 42 bp, Homo sapiens; identical to SEQ ID NO: 122955
  chr12:108298347-108298389
  hypo

SEQ ID NO: 172028 - DNA, 30 bp, Homo sapiens; identical to SEQ ID NO: 9022
  chr12:108594027-108594057
  hypo

SEQ ID NO: 172029 - DNA, 30 bp, Homo sapiens
  chr12:108823619-108823649
  hypo
gtaatgggacgccagcggcaaattattagc

SEQ ID NO: 172030 - DNA, 30 bp, Homo sapiens
  chr12:108919234-108919264
  hypo
tttggtttgccagcccggttggtgaccagc

SEQ ID NO: 172031 - DNA, 30 bp, Homo sapiens
  chr12:108919569-108919599
  hypo
tcttcctctgtaaaacggcaagaataaaag

SEQ ID NO: 172032 - DNA, 520 bp, Homo sapiens
  chr12:108926048-108926568
  hypo
cactggtgcactggacggcccggtgcagagccttccggcagtgctgggtgtcaccatgagctctaaggcagaaaacaaaaagttgctgccaccaggacacaaagtggaaggcactcgaagggagaggccgtcttctcccaggtagaaactcactcttcagtaactctagcttctgagaagaccttagctttcagatctatccatgatgctttctccttccagagtctctacagtcacctacgaagtatttccctgaagcactctctccctcagccatgtaggggctactggaaagtgtacctgatattgtgatctgcaaccagcattctgcctttacagcattcacatgtgcggcacatggcgggggagtccaacagctctctgtaacctgatacagtccccagggaaattttactatggcgtcctactgacaggagagttatgaatccagggtagtgtcaaatttcatacccagagtcagatcttttttttttttttgaaagggagtctcgctcttgtc

SEQ ID NO: 172033 - DNA, 31 bp, Homo sapiens; identical to SEQ ID NO: 26467
  chr12:108931819-108931850
  hypo

SEQ ID NO: 172034 - DNA, 30 bp, Homo sapiens
  chr12:108938952-108938982
  hypo
aagcctcccagagggcgagtcctttggtca

SEQ ID NO: 172035 - DNA, 21 bp, Homo sapiens
  chr12:108939449-108939470
  hypo
aaaaacacatttggccaggtg

SEQ ID NO: 172036 - DNA, 33 bp, Homo sapiens; identical to SEQ ID NO: 26469
  chr12:108963689-108963722
  hypo

SEQ ID NO: 172037 - DNA, 93 bp, Homo sapiens
  chr12:108985670-108985763
  hypo
ctcgggcctgctgtcgggggctctgtcggggacctcactgaaggcccgggggcccccggcccggtcactctggtccacgtacttcttcttggg

SEQ ID NO: 172038 - DNA, 30 bp, Homo sapiens; identical to SEQ ID NO: 84587
  chr12:108986004-108986034
  hypo

SEQ ID NO: 172039 - DNA, 44 bp, Homo sapiens
  chr12:109014133-109014177
  hypo
atgcttaaaatcaggcgtcagcaaactgacggagctgaaatgag

SEQ ID NO: 172040 - DNA, 213 bp, Homo sapiens; identical to SEQ ID NO: 84589
  chr12:109050946-109051159
  hypo

SEQ ID NO: 172041 - DNA, 29 bp, Homo sapiens
  chr12:109107871-109107900
  hypo
aaagaacaacctgggccgggcacagtggc

SEQ ID NO: 172042 - DNA, 30 bp, Homo sapiens
  chr12:109178399-109178429
  hypo
ttgtcaattaccatccgagagcagccccgg

SEQ ID NO: 172043 - DNA, 170 bp, Homo sapiens
  chr12:109181382-109181552
  hypo
tagaacgtgtgccgcggtgaggctgccaccaccaggactcttctgcaggatgcgaagggaacagtctggatgtgtgcgcctatgtgtgcacgttcttcctaaaacatggttcttcttgaagacacggtgggagcggagttttgtgtctcctggccggcggctcctggttc

SEQ ID NO: 172044 - DNA, 30 bp, Homo sapiens; identical to SEQ ID NO: 84591
  chr12:109186582-109186612
  hypo

SEQ ID NO: 172045 - DNA, 30 bp, Homo sapiens
  chr12:109195431-109195461
  hypo
gtcttgatttttaaacgtggtaattctaga

SEQ ID NO: 172046 - DNA, 81 bp, Homo sapiens
  chr12:109195702-109195783
  hypo
agggttgctgactaacgcaacagccagcagacctctgcgtccacactagggtttgcagcaactgtgcggggcagggaagcg

SEQ ID NO: 172047 - DNA, 181 bp, Homo sapiens; identical to SEQ ID NO: 84592
  chr12:109204590-109204771
  hypo

SEQ ID NO: 172048 - DNA, 262 bp, Homo sapiens
  chr12:109208563-109208825
  hypo
gggacctgggagaactgaagtcggggtgccgaggggaggcaaagggaggagagggtgggaaggaagagcgccatgggggcggtgcggacgagcgcacgggccagtctcctccagccaggcagcagcggagtgggatgcgcatgtgggcatctaaggcatgcccgtgactgctggcctgtgagctctgtgagactgtaggtgtgtctgccgtgctccctgatgtggccccagcacctggcggggcgcccggcacagggaaaga

SEQ ID NO: 172049 - DNA, 30 bp, Homo sapiens
  chr12:109209197-109209227
  hypo
aggccgatttccgttcgggatcagaaagca

SEQ ID NO: 172050 - DNA, 135 bp, Homo sapiens
  chr12:109209741-109209876
  hypo
ttaccgtgacactcacggcctccctgactggtttctgctgttgattctgcctcaaatgctcctcaaatgcaccttgctgctccgcctccaccctagagctcgcctgactgcccacttgcccgttaagagtcggct

SEQ ID NO: 172051 - DNA, 127 bp, Homo sapiens
  chr12:109213024-109213151
  hypo
aaaacaggcagtaaccagggacggcttctgaacttctctgagctgccccagggttcaggaggtgttcctggagtgcagtgaggaaagtctcttactggccatgagtctcgcgcgaagcagagaccct

SEQ ID NO: 172052 - DNA, 30 bp, Homo sapiens
  chr12:109278812-109278842
  hypo
atcgggctgtccaccgccctctgcatccat

SEQ ID NO: 172053 - DNA, 205 bp, Homo sapiens; identical to SEQ ID NO: 84595
  chr12:109488355-109488560
  hypo

SEQ ID NO: 172054 - DNA, 31 bp, Homo sapiens; identical to SEQ ID NO: 26474
  chr12:109506483-109506514
  hypo

SEQ ID NO: 172055 - DNA, 246 bp, Homo sapiens; identical to SEQ ID NO: 84597
  chr12:109507774-109508020
  hypo

SEQ ID NO: 172056 - DNA, 31 bp, Homo sapiens; identical to SEQ ID NO: 84598
  chr12:109520626-109520657
  hypo

SEQ ID NO: 172057 - DNA, 30 bp, Homo sapiens; identical to SEQ ID NO: 26475
  chr12:109534311-109534341
  hypo

SEQ ID NO: 172058 - DNA, 42 bp, Homo sapiens
  chr12:109540085-109540127
  hypo
aaagtcccttgggggcgtaaaatcacccctggttaagaacca

SEQ ID NO: 172059 - DNA, 30 bp, Homo sapiens
  chr12:109629592-109629622
  hypo
cccctctggatggccgagacctcggcttcc

SEQ ID NO: 172060 - DNA, 157 bp, Homo sapiens
  chr12:109637355-109637512
  hypo
aggtgactgcagagccggccgtggggaatcctgaaccctcaaactcccactcttctggctttgtcccatgtctgaacaaacaggcctacctctccccttgaccactgtctgcaaatttctaagggaatcagtctgtggatttcagccaaatcccctg

SEQ ID NO: 172061 - DNA, 30 bp, Homo sapiens; identical to SEQ ID NO: 84600
  chr12:109644631-109644661
  hypo

SEQ ID NO: 172062 - DNA, 211 bp, Homo sapiens; identical to SEQ ID NO: 84601
  chr12:109717148-109717359
  hypo

SEQ ID NO: 172063 - DNA, 30 bp, Homo sapiens
  chr12:109719543-109719573
  hypo
cccggtttgccggggcgccggcagctttca

SEQ ID NO: 172064 - DNA, 625 bp, Homo sapiens; identical to SEQ ID NO: 122971
  chr12:109746883-109747508
  hypo

SEQ ID NO: 172065 - DNA, 98 bp, Homo sapiens
  chr12:109796963-109797061
  hypo
acccaggcatttgagcgcctcatagctcgtggggaacctgacaggcaattgtattatgaaagctgacatgctgaatggacccttcttgacgatattct

SEQ ID NO: 172066 - DNA, 18 bp, Homo sapiens
  chr12:109861254-109861272
  hypo
ccacgctcggccacattt

SEQ ID NO: 172067 - DNA, 418 bp, Homo sapiens
  chr12:109873122-109873540
  hypo
atataaacattgttccgccgtttcagttctcgtttggatcagattctgttgttcactactagggtgtaaaaccgtgagagaccagccccttgaaattaaagtttacaaaacttcacttgtctgcgtgtctgatgttggaaagtttagcttcaaagcctgcagcctgggtgtttgctgggaatggtcaatgagaaaagttagatggggaaatgcaaaaagtaaaaaatcaaaactgcggggggagggagcgtctcttttgaaatgtaaccggtctgtcaagaactacgcttgagtcatttgagggcctgctgtgcgccaggtgaacactaagtcctttaaaccatggtctcattctgttctgagaacagacctgtaagggaggtgacataggtgctatcgtctccgctttctatgcagg

SEQ ID NO: 172068 - DNA, 40 bp, Homo sapiens
  chr12:109878128-109878168
  hypo
ccgtgcccagccgacagagtactttcgaatcatttctatt

SEQ ID NO: 172069 - DNA, 30 bp, Homo sapiens; identical to SEQ ID NO: 26477
  chr12:109878713-109878743
  hypo

SEQ ID NO: 172070 - DNA, 196 bp, Homo sapiens; identical to SEQ ID NO: 84606
  chr12:109881227-109881423
  hypo

SEQ ID NO: 172071 - DNA, 30 bp, Homo sapiens
  chr12:109883754-109883784
  hypo
acgtggaaatcaatgcgcttgtgtcccacc

SEQ ID NO: 172072 - DNA, 30 bp, Homo sapiens
  chr12:109884068-109884098
  hypo
ggtcccagtggtcctcgctggctgctagta

SEQ ID NO: 172073 - DNA, 215 bp, Homo sapiens
  chr12:109886525-109886740
  hypo
actttgagcatttttttatggcgcaaagagacagaaaggttaatgacacacttaactgttacagtgactttgggtagggccctaaagacagcacacgctccagagggcgggctgagtgttgttcacacttgggtcctgaatcgctgttgtaaggtacagagacacactttaactggggaatggggtccccacacagtgatcgccccacgggaggg

SEQ ID NO: 172074 - DNA, 176 bp, Homo sapiens
  chr12:109887567-109887743
  hypo
gccaacattcacttcgactttctaaaaaagctcaacccaaaagaaagacagggttggtgtttaacacttaaacagtataaaatatttacgaaacattttgtaagccctctttccttagcacttaataaaatccaaatggcctaatataaaagtttctcacacgacagtttaaaaag

SEQ ID NO: 172075 - DNA, 200 bp, Homo sapiens
  chr12:109887945-109888145
  hypo
ggtataaaacggtaacgattcccttgacaaacccatccatcacctgacgcacattcacatctcctggtaactactctacctagtctagtctcaaccacccctgtcagtcacgactcactcctgttcctttgcaggtgcagaggagcctgggaggtaggtcactgagaacacccgtcctacataggcgctgcgcccagccg

SEQ ID NO: 172076 - DNA, 179 bp, Homo sapiens
  chr12:109898434-109898613
  hypo
gcctacttgtagggccgcctggcactcttccaccaggccttggactaggtagtacttggcttctgctagcagctcctcgatctcccggcggctctcgggtaaaggcaccgccccgtctcgaaggtagttgagtatcgtaccaaagtgcttcccacagcggtcaatgaggatccagcctg

SEQ ID NO: 172077 - DNA, 31 bp, Homo sapiens; identical to SEQ ID NO: 26479
  chr12:109906335-109906366
  hypo

SEQ ID NO: 172078 - DNA, 30 bp, Homo sapiens; identical to SEQ ID NO: 26480
  chr12:109911493-109911523
  hypo

SEQ ID NO: 172079 - DNA, 35 bp, Homo sapiens; identical to SEQ ID NO: 84611
  chr12:109916249-109916284
  hypo

SEQ ID NO: 172080 - DNA, 34 bp, Homo sapiens
  chr12:109916583-109916617
  hypo
tcaaaaaaacaaagattatcgagaactgatagag

SEQ ID NO: 172081 - DNA, 47 bp, Homo sapiens
  chr12:109935638-109935685
  hypo
cagttctcagacaatctgattcggccgttcctcatccacatcatgtc

SEQ ID NO: 172082 - DNA, 304 bp, Homo sapiens
  chr12:109935996-109936300
  hypo
ttctggcagtttctgatttaacggtctgctattctttgcagcgcctcactgttttagaatcccatgacatgcttcgtaaattcatcatatttttaagagaccaagatcgatgccgtgatgtatgtgaaagtttagaaggatgccatacgctttgtctaatgggtaagtatccgtggctggaacttgattgtgtcctggccatcagggaaagcccgagtgttttgcctgtcactattctagagatttggttgttttctgtaacaattggaagtgcttacaataaaaaacacgtatttagatagac

SEQ ID NO: 172083 - DNA, 160 bp, Homo sapiens
  chr12:109936814-109936974
  hypo
gagacggggtttttcaccatgttgcccagtctagtctccttgggctcgaacaatccacacgcctcagcctgcgagattacagacttgagataaaaacttccctggggccaaatttcatgaggagtttctggtgcgaatgttcacacgagtgacgttgact

SEQ ID NO: 172084 - DNA, 30 bp, Homo sapiens
  chr12:109948213-109948243
  hypo
gagcgggactgccggcggcgcttcaccccc

SEQ ID NO: 172085 - DNA, 30 bp, Homo sapiens; identical to SEQ ID NO: 84614
  chr12:109955675-109955705
  hypo

SEQ ID NO: 172086 - DNA, 31 bp, Homo sapiens; identical to SEQ ID NO: 26481
  chr12:109963007-109963038
  hypo

SEQ ID NO: 172087 - DNA, 173 bp, Homo sapiens
  chr12:109970799-109970972
  hypo
cgggctccctctgttcgcaccacgtgcagtgggtgccaccagcctccgcctcgccctcaccgtctcccattttctcctcacatggtctctctgtgggagggtgtcagctgctgctctgttcctcttaacaatcccacaggagacctgcctctcggggacgcctcaccagtgcc

SEQ ID NO: 172088 - DNA, 77 bp, Homo sapiens; identical to SEQ ID NO: 84616
  chr12:109973150-109973227
  hypo

SEQ ID NO: 172089 - DNA, 30 bp, Homo sapiens; identical to SEQ ID NO: 84617
  chr12:109985301-109985331
  hypo

SEQ ID NO: 172090 - DNA, 180 bp, Homo sapiens; identical to SEQ ID NO: 84618
  chr12:110019851-110020031
  hypo

SEQ ID NO: 172091 - DNA, 30 bp, Homo sapiens; identical to SEQ ID NO: 84619
  chr12:110025878-110025908
  hypo

SEQ ID NO: 172092 - DNA, 142 bp, Homo sapiens; identical to SEQ ID NO: 84620
  chr12:110164949-110165091
  hypo

SEQ ID NO: 172093 - DNA, 31 bp, Homo sapiens; identical to SEQ ID NO: 84621
  chr12:110169314-110169345
  hypo

SEQ ID NO: 172094 - DNA, 44 bp, Homo sapiens
  chr12:110170346-110170390
  hypo
cagatcatttgtaaccgtcaccaggcaatcgggcccgtcgctga

SEQ ID NO: 172095 - DNA, 339 bp, Homo sapiens
  chr12:110224373-110224712
  hypo
ggaaatgaactctgctcgggcctcttggggcctcagtggctccagaaattgcaatgggtagacgacgctggagcagcaggggccccgagccagtggggacagttccgccctgccatcctggccccactgccccagcctcacctgaagcaccacctgcggtcaggagtgccgtccgagctcttgcccacggtgaccatctccccagagcggaaggccttcctcaggaatacggggaaggagcgctcaatgtccaggatggtggtggcccactgcggggagggagggtcaggagggacatcggtgagcctcacagcctgcgcctgccgctctggtggcaga

SEQ ID NO: 172096 - DNA, 35 bp, Homo sapiens; identical to SEQ ID NO: 84625
  chr12:110250927-110250962
  hypo

SEQ ID NO: 172097 - DNA, 345 bp, Homo sapiens
  chr12:110258636-110258981
  hypo
cctattaagggatcgtaatagggtcgttgtgagaggtatataccttgagtcaagtgcctggcataaagaaagcctcaataaacagcagattgcacaacagatggcttctctctgagaatcccggattcaaaggcggtggaggtctctggctccgtccccatgccccaacttgcggagggtggaaaaaggggcccatcctcggggttacccgcggctttgcctgatctcatggaaaccctggcaaacatttgtcaaatcccatcctcctgattacgtgaccaaggaaagctgcttaaatctgggggcaagtttgggcatgcaaacctgctccgccccagcggggag

SEQ ID NO: 172098 - DNA, 20 bp, Homo sapiens
  chr12:110323293-110323313
  hypo
ttttttttttttgagacgga

SEQ ID NO: 172099 - DNA, 30 bp, Homo sapiens; identical to SEQ ID NO: 26485
  chr12:110340886-110340916
  hypo

SEQ ID NO: 172100 - DNA, 675 bp, Homo sapiens
  chr12:110352779-110353454
  hypo
acgaggtacacgccacgcatatgtatagcctctccagctttccatgaggtacacgccacgcatacagcctctccagctttctacgaggtacatgccatgcatacagcctctccagctttctaccaggtacacacaatgcatacagcctctccagctttccacgaggtacacgccacgcatacagcctctccagctttccacgaggtaagcgccacgcatacagcctctccagctttctatgaggtacacaccatgcatacagcctttcaagtcccgcatgctcccttccgttccttggcacgtgcattgctgttgctcagctggattctccagtctgggtagggccgcaggcttaccttcctcatcagaggcagggctctgccctgtgggccttgtcttggggtggtgactttgctcttggcactcaggttgcagagcgccggctgcaggcatgggaagcagaccagcaggaggaggaggaagaggaggaggcccggcgggtcgagcagctctcagatgccctgctgcagcaggaggcggagactatggctgagcagggctaccggcctaaggtaggaagtctgccaggatataggccaacaccggcaagacagactctgcccggcccctgctcccctgggcctgctcatcgccccgcgccggggtctgctctcc

SEQ ID NO: 172101 - DNA, 72 bp, Homo sapiens
  chr12:110357432-110357504
  hypo
tgaacagtgacaagagtcagacgctcgaatcggacacatggatgagcagacgtcactggcaaacagccagtt

SEQ ID NO: 172102 - DNA, 30 bp, Homo sapiens; identical to SEQ ID NO: 26486
  chr12:110368219-110368249
  hypo

SEQ ID NO: 172103 - DNA, 193 bp, Homo sapiens; identical to SEQ ID NO: 26487
  chr12:110378868-110379061
  hypo

SEQ ID NO: 172104 - DNA, 30 bp, Homo sapiens
  chr12:110385050-110385080
  hypo
tgttacttacgtgcgcggggaagggctgga

SEQ ID NO: 172105 - DNA, 30 bp, Homo sapiens; identical to SEQ ID NO: 84631
  chr12:110385974-110386004
  hypo

SEQ ID NO: 172106 - DNA, 37 bp, Homo sapiens; identical to SEQ ID NO: 84632
  chr12:110388923-110388960
  hypo

SEQ ID NO: 172107 - DNA, 101 bp, Homo sapiens
  chr12:110389829-110389930
  hypo
gtcttggaatgacctcggctctcactgagtgaaccaggtggcttccgggaagtctgcgcaggggtgtcccctgcatctgctaatgacgccatctttctcac

SEQ ID NO: 172108 - DNA, 27 bp, Homo sapiens
  chr12:110487901-110487928
  hypo
cggctcgtcctgctacaagactagaag

SEQ ID NO: 172109 - DNA, 163 bp, Homo sapiens
  chr12:110489067-110489230
  hypo
tgcatgacttgcttccgtgtgactcgttttccctctctgcacaatgggaagcataatcatacctgcctcatgaattgtgaggatcaaatgatatatgtctgcaaactcctttgcccagtatctggcacatactgagcactcgctataggaaagctgctgcccc

SEQ ID NO: 172110 - DNA, 30 bp, Homo sapiens; identical to SEQ ID NO: 84635
  chr12:110504564-110504594
  hypo

SEQ ID NO: 172111 - DNA, 28 bp, Homo sapiens
  chr12:110507232-110507260
  hypo
agactccgtctcaaaacaaacaaacaaa

SEQ ID NO: 172112 - DNA, 88 bp, Homo sapiens
  chr12:110518054-110518142
  hypo
ctccgctcccacccccgagatggagtctcgctctgttgccccggttgcagtgcagcggcgccacatcggctcactgcaaccttcccct

SEQ ID NO: 172113 - DNA, 30 bp, Homo sapiens
  chr12:110520219-110520249
  hypo
ggggctttacagccacgatacaaggctttt

SEQ ID NO: 172114 - DNA, 39 bp, Homo sapiens; identical to SEQ ID NO: 84637
  chr12:110563200-110563239
  hypo

SEQ ID NO: 172115 - DNA, 38 bp, Homo sapiens; identical to SEQ ID NO: 84638
  chr12:110563478-110563516
  hypo

SEQ ID NO: 172116 - DNA, 106 bp, Homo sapiens; identical to SEQ ID NO: 84639
  chr12:110563721-110563827
  hypo

SEQ ID NO: 172117 - DNA, 122 bp, Homo sapiens
  chr12:110717631-110717753
  hypo
gtgcccctcttgaagcggctctgatcctgtgacctaaccagtttccacctggcttctctcagtgcgttgccatatagtataattttttgtttgtttgtttcgtgtagggttttgttggttct

SEQ ID NO: 172118 - DNA, 31 bp, Homo sapiens; identical to SEQ ID NO: 9031
  chr12:110719374-110719405
  hypo

SEQ ID NO: 172119 - DNA, 32 bp, Homo sapiens; identical to SEQ ID NO: 84642
  chr12:110767511-110767543
  hypo

SEQ ID NO: 172120 - DNA, 445 bp, Homo sapiens; identical to SEQ ID NO: 26490
  chr12:110778336-110778781
  hypo

SEQ ID NO: 172121 - DNA, 30 bp, Homo sapiens; identical to SEQ ID NO: 84644
  chr12:110780035-110780065
  hypo

SEQ ID NO: 172122 - DNA, 237 bp, Homo sapiens
  chr12:110782523-110782760
  hypo
tgctctggctaccaggcgtgagcaggtggtggtagcaccacaggccccggttaccatcactgtcccatgtctttgatcttcgtccttgtggggactggcctgcatggcctcggtggcagcgagccctgcagaggcaagtgcatcagcatcactgtgtttgttcccaggttacgtcggcgctgctaccgtgggtgctgctgcatggtggttcattgctgctgacggtggtccaagagt

SEQ ID NO: 172123 - DNA, 530 bp, Homo sapiens
  chr12:110783742-110784272
  hypo
actgccactgtgacacgtgccttgccttgggggtgcgtttccccacctctccttgctctgcagcttgtccgaaaaccagtccttgctgaggatgcccccctgggagaacatctggctcgtgggctccatctgcctgtccatgtcactccacttcctgatcctctatgtcgaacccttgccagtaagtggttgggtggggcttgggaccagccacctccttccaggggaggctggaggcgtgacacgtcttccctgtgtgtcagctcatcttccagatcacaccgctgaacgtgacccagtggctgatggtgctgaaaatctccttgcccgtgattctcatggatgagacgctcaagtttgtggcccgcaactacctggaacctggtaaagagtgtgtgcagcctgccaccaaatcctgctcgttctcggcatgcaccgatgggatttcctggccgtttgtgctgctcataatgcccctggtgatctgggtctatagcacagacactaactttagcgatatgttctggtct

SEQ ID NO: 172124 - DNA, 143 bp, Homo sapiens
  chr12:110784842-110784985
  hypo
ctccccaccttacccccgccccgcttggcttcttctttaggattgtgatggttcgttctgtttacatcagttttaacgagaggtatgcctgtactcgcttgtgcagaaaacattgttccagattcaatcgactgggtttatgt

SEQ ID NO: 172125 - DNA, 304 bp, Homo sapiens
  chr12:110785457-110785761
  hypo
tgtggcactaaccaccaccaccgttactacgatcaatgtttgcgcatgttcgagatgagtctcaccaacagtgtgtaagtcattaacagtcctaactgtggtgttttcctccaatgccttccaacatccatcaactaacgtgagtattttcttcctgggatttggatgctttagcctaaaggtgactgccaccaagtgagataactgtatgtcactaacttataagccgcctccatggcagatgctgctgtgctccctgatgccctgtgagcaccggggttgcctgtggcgcctgccatgtgac

SEQ ID NO: 172126 - DNA, 149 bp, Homo sapiens
  chr12:110806696-110806845
  hypo
ccaccagtagcagaagggttgcggaaattgttccttctgcagaatggattctgcagtactgatgattaaggggtgcactgacgctgcacagaatgtccctgtgcacagcacggcctcgtattttttttttcatacggggtctctgtcgc

SEQ ID NO: 172127 - DNA, 165 bp, Homo sapiens
  chr12:110807994-110808159
  hypo
cattgtaccgaaagacgcaccttggtttgtttatctactcatctaaggacacgtgggttgtttccaccttttgctgctgtggacagtgctgcgtggacatggacgtgcaatcttttggcgttccagctttcacttcttcgggtgtacacccggaggtggaacact

SEQ ID NO: 172128 - DNA, 202 bp, Homo sapiens
  chr12:110808572-110808774
  hypo
tacctcaatggcccctcccagcgcagggcttcccggtgacctggccacagccgtgcctggaggatgaggtgaggttcatgtggagtctggactcactgcctgtcgtcagcagggaacgcaggcctgagcacaaccccagagagctgctcacggggacagctcacctaagctctgggaagcagctccgcgcaggccctggcct

SEQ ID NO: 172129 - DNA, 18 bp, Homo sapiens
  chr12:110814621-110814639
  hypo
tcaaaccagataacagtg

SEQ ID NO: 172130 - DNA, 16 bp, Homo sapiens
  chr12:110908162-110908178
  hypo
ttttgtctctggtgct

SEQ ID NO: 172131 - DNA, 121 bp, Homo sapiens; identical to SEQ ID NO: 26494
  chr12:110915436-110915557
  hypo

SEQ ID NO: 172132 - DNA, 98 bp, Homo sapiens; identical to SEQ ID NO: 84655
  chr12:110916596-110916694
  hypo

SEQ ID NO: 172133 - DNA, 38 bp, Homo sapiens; identical to SEQ ID NO: 84656
  chr12:110916993-110917031
  hypo

SEQ ID NO: 172134 - DNA, 30 bp, Homo sapiens; identical to SEQ ID NO: 84657
  chr12:110941072-110941102
  hypo

SEQ ID NO: 172135 - DNA, 268 bp, Homo sapiens; identical to SEQ ID NO: 84658
  chr12:110983625-110983893
  hypo

SEQ ID NO: 172136 - DNA, 28 bp, Homo sapiens
  chr12:110990381-110990409
  hypo
acagtgggccgggcgcggtggctcacgc

SEQ ID NO: 172137 - DNA, 30 bp, Homo sapiens; identical to SEQ ID NO: 84659
  chr12:111074700-111074730
  hypo

SEQ ID NO: 172138 - DNA, 317 bp, Homo sapiens
  chr12:111083707-111084024
  hypo
gatccgccctcccaccgaggccagcagagacccgggattactcagtccctgccgttccactgcgaagtcttgactcaactctcccaccagaaccaggcacatcgcttctggcttcttggccatgggtgaagatgtgcagttattactcctcctcagaagggaagacatgggttgggaggagaggcagcagtgcgcacatggcaccgtcagggtctgtgctgatcctgggtgctcagagggcctgcagcagcaggttttgtaccaactctgccggcaacccaggtagaggcaggcacgagcacctgctaaactcagtt

SEQ ID NO: 172139 - DNA, 154 bp, Homo sapiens; identical to SEQ ID NO: 84661
  chr12:111087518-111087672
  hypo

SEQ ID NO: 172140 - DNA, 30 bp, Homo sapiens
  chr12:111157920-111157950
  hypo
caaagaaagcataatcggtcactcgtatag

SEQ ID NO: 172141 - DNA, 30 bp, Homo sapiens
  chr12:111164787-111164817
  hypo
gggggaatgaagcgacgcaatcttggctca

SEQ ID NO: 172142 - DNA, 30 bp, Homo sapiens
  chr12:111165296-111165326
  hypo
cctgtaatgcggtttcgcattactgtacat

SEQ ID NO: 172143 - DNA, 121 bp, Homo sapiens
  chr12:111195774-111195895
  hypo
aaggatgcggtgaacagtgatcatgccgctgctctccaatttgtgtgatagagtgaaactctgtttctaaaataacaacaaaaaaagttgaataaacataaacaaatgggccaggtgcagg

SEQ ID NO: 172144 - DNA, 571 bp, Homo sapiens; identical to SEQ ID NO: 123001
  chr12:111284504-111285075
  hypo

SEQ ID NO: 172145 - DNA, 295 bp, Homo sapiens
  chr12:111369069-111369364
  hypo
caggatcccagagctcggatccagcctcaacgacccagatagccctgcagtggctttcttgtccctggtatttttagccctcggtcatctatcttgcctgcactggggacagcggcactcagacaagcccatttttactggtgcccttcagatgcccgcgggctcagctgtctcggtgcctggcattccgggggtattgttcctctctacgagtcccagattccagcaacagctgctgccccaggctcccccgccagcttccccctgcgctccccctgcccgcctgccagagccc

SEQ ID NO: 172146 - DNA, 399 bp, Homo sapiens
  chr12:111402644-111403043
  hypo
acaatcagcccaaagcggaccccgagtggaaggtggttggtgtcccaaaggcaaattagggtgctggtatctgagcaggaaaaagagatatcaggaaggccaaacaacagacattccctgtgggcataaagttggtacttgcaaaacagcgccaatacctggatattcctgttaccagaaaaacaaagagctggatcgccttcccagtttctcggaaggacaccgtggtgtttctgagggaaggtcatcagggcccagaaaagtcgttttcttttcagcccccaccccgaccctggttccctgaaaaggttggaagagctccatcccggccctgtggtgatgccaggcgattatgtccagggcaccacgtctggactagttgaccgagagatctcgaga

SEQ ID NO: 172147 - DNA, 828 bp, Homo sapiens; identical to SEQ ID NO: 50054
  chr12:111471131-111471959
  hypo

SEQ ID NO: 172148 - DNA, 137 bp, Homo sapiens; identical to SEQ ID NO: 9036
  chr12:111472058-111472195
  hypo

SEQ ID NO: 172149 - DNA, 315 bp, Homo sapiens; identical to SEQ ID NO: 9037
  chr12:111472356-111472671
  hypo

SEQ ID NO: 172150 - DNA, 537 bp, Homo sapiens; identical to SEQ ID NO: 123005
  chr12:111472851-111473388
  hypo

SEQ ID NO: 172151 - DNA, 30 bp, Homo sapiens
  chr12:111495704-111495734
  hypo
tgaacgcgctaactccgttagcagccctgg

SEQ ID NO: 172152 - DNA, 243 bp, Homo sapiens
  chr12:111501287-111501530
  hypo
gggcctttgggacatcgcgaggcggcaccatcgcctcccacagccccggcaaaggttggcctcatggggcctgcactttgagatacggtgggcttccgttttagatcagtctggtgctccagtaactccagcagggcctgccttgggggctgggggttctcaggcaggctggctcctggaagggtaaaattcccagaggaagggaggtagcgagtccgggggatttggcggccgcccctgcat

SEQ ID NO: 172153 - DNA, 30 bp, Homo sapiens
  chr12:111535498-111535528
  hypo
gctcggcaagcgaggcgctcagagtcagga

SEQ ID NO: 172154 - DNA, 30 bp, Homo sapiens
  chr12:111535926-111535956
  hypo
ggcgctgtggctttacgcctgtaataccac

SEQ ID NO: 172155 - DNA, 31 bp, Homo sapiens; identical to SEQ ID NO: 84669
  chr12:111590541-111590572
  hypo

SEQ ID NO: 172156 - DNA, 30 bp, Homo sapiens
  chr12:111626560-111626590
  hypo
gcaggttttaggctgcggagcggtaggatc

SEQ ID NO: 172157 - DNA, 30 bp, Homo sapiens
  chr12:111701023-111701053
  hypo
ggcactttgggaggccgaggcaggggaatc

SEQ ID NO: 172158 - DNA, 30 bp, Homo sapiens; identical to SEQ ID NO: 84670
  chr12:111702688-111702718
  hypo

SEQ ID NO: 172159 - DNA, 183 bp, Homo sapiens
  chr12:111725444-111725627
  hypo
tggcataccctgctgcgcaggccctgcctaatgacggggcgtgggggctgccggcagatgaaagccaccgccgccttcccgcgcacctgcttacctcggcatggacgcccattgtccaagcccctgccacctaaacaaacaggccacagcagagtaaaacagggaagccgccttgttccagcc

SEQ ID NO: 172160 - DNA, 30 bp, Homo sapiens; identical to SEQ ID NO: 26505
  chr12:111748331-111748361
  hypo

SEQ ID NO: 172161 - DNA, 389 bp, Homo sapiens
  chr12:111800613-111801002
  hypo
tggtggagggggctcgggtccaggcctgaaggtggcctcagtgctccagacagcgcagccattctccttgggcgggagggcactgggccggcggggcaggggcagggctgggaccggggctggggcagaaggcagggatgggactggggccagggcagagggcagggacgggggcaagggcagggactggggctggggctggggcagggccatgccacccccgccacgtacagccgccagctgctgctccagctcgcgcaccaccagccgcaggtagtcgaagctggcacgcgacagggccttgacccagccctccatggcatcctgactctcagcggccagcacgtaggtgcgcgcccgggtccccgcaaagcgcacagcgaaggcga

SEQ ID NO: 172162 - DNA, 181 bp, Homo sapiens
  chr12:111829847-111830028
  hypo
ccaaaatttttaaaaatagtaaaaagcaacttgtaaccatgcattaggctggaaattaatgggtttaatatgcatgagtgggttctaatccccactctgccatttgcaaactgtgtgtccttcagcaagtcactttacctctctgtgccttggcctcctcatctgtaaaacaggggaaaca

SEQ ID NO: 172163 - DNA, 536 bp, Homo sapiens; identical to SEQ ID NO: 123009
  chr12:111844274-111844810
  hypo

SEQ ID NO: 172164 - DNA, 62 bp, Homo sapiens; identical to SEQ ID NO: 84676
  chr12:111855882-111855944
  hypo

SEQ ID NO: 172165 - DNA, 30 bp, Homo sapiens; identical to SEQ ID NO: 84677
  chr12:111856401-111856431
  hypo

SEQ ID NO: 172166 - DNA, 30 bp, Homo sapiens; identical to SEQ ID NO: 84678
  chr12:111856637-111856667
  hypo

SEQ ID NO: 172167 - DNA, 18 bp, Homo sapiens
  chr12:111859890-111859908
  hypo
gtttttgttttgagacgg

SEQ ID NO: 172168 - DNA, 30 bp, Homo sapiens; identical to SEQ ID NO: 50061
  chr12:111884592-111884622
  hypo

SEQ ID NO: 172169 - DNA, 114 bp, Homo sapiens; identical to SEQ ID NO: 84680
  chr12:111885451-111885565
  hypo

SEQ ID NO: 172170 - DNA, 43 bp, Homo sapiens; identical to SEQ ID NO: 84681
  chr12:112015340-112015383
  hypo

SEQ ID NO: 172171 - DNA, 221 bp, Homo sapiens
  chr12:112082000-112082221
  hypo
ggtcacttgcccctcttgctgcggcccttcctggagggcaacttcccactgccccccgaagaggcagggctcgaggccgaggccatggcgatgttgatctgtccctcctggatttcctgccgggtctcggcaggcagatggttgatcttctgctgtgtctccaggtagaacatgacgtcacgcagctgctcctggatctcggtgatctgcagatctttttg

SEQ ID NO: 172172 - DNA, 82 bp, Homo sapiens; identical to SEQ ID NO: 84683
  chr12:112082471-112082553
  hypo

SEQ ID NO: 172173 - DNA, 22 bp, Homo sapiens
  chr12:112083152-112083174
  hypo
gagccaccgcgtccagcccaca

SEQ ID NO: 172174 - DNA, 87 bp, Homo sapiens; identical to SEQ ID NO: 84685
  chr12:112110964-112111051
  hypo

SEQ ID NO: 172175 - DNA, 30 bp, Homo sapiens
  chr12:112116143-112116173
  hypo
ttctggaatagttaccgcttgtttaaaaaa

SEQ ID NO: 172176 - DNA, 121 bp, Homo sapiens; identical to SEQ ID NO: 84686
  chr12:112126605-112126726
  hypo

SEQ ID NO: 172177 - DNA, 22 bp, Homo sapiens
  chr12:112149606-112149628
  hypo
cgcccagctatgctaacatttt

SEQ ID NO: 172178 - DNA, 30 bp, Homo sapiens; identical to SEQ ID NO: 50065
  chr12:112167993-112168023
  hypo

SEQ ID NO: 172179 - DNA, 169 bp, Homo sapiens
  chr12:112171647-112171816
  hypo
agggcaaacagaccacgcagaatccaccctagccggcagttttcttagtgctgtctctattcctcctgcgacttttcaggctcgacaacctggtgtttcatccagaagagccagaggtgcttgctgtccttgactgggaactttctaccttgggcgacccccttgctga

SEQ ID NO: 172180 - DNA, 55 bp, Homo sapiens; identical to SEQ ID NO: 26509
  chr12:112194069-112194124
  hypo

SEQ ID NO: 172181 - DNA, 160 bp, Homo sapiens; identical to SEQ ID NO: 84690
  chr12:112196486-112196646
  hypo

SEQ ID NO: 172182 - DNA, 92 bp, Homo sapiens; identical to SEQ ID NO: 84691
  chr12:112218334-112218426
  hypo

SEQ ID NO: 172183 - DNA, 30 bp, Homo sapiens; identical to SEQ ID NO: 50068
  chr12:112241750-112241780
  hypo

SEQ ID NO: 172184 - DNA, 83 bp, Homo sapiens; identical to SEQ ID NO: 84693
  chr12:112288154-112288237
  hypo

SEQ ID NO: 172185 - DNA, 31 bp, Homo sapiens; identical to SEQ ID NO: 26511
  chr12:112430857-112430888
  hypo

SEQ ID NO: 172186 - DNA, 30 bp, Homo sapiens; identical to SEQ ID NO: 84695
  chr12:112457536-112457566
  hypo

SEQ ID NO: 172187 - DNA, 38 bp, Homo sapiens; identical to SEQ ID NO: 84696
  chr12:112535636-112535674
  hypo

SEQ ID NO: 172188 - DNA, 35 bp, Homo sapiens
  chr12:112560193-112560228
  hypo
gggcgcagcggctcacgcctgtaatcctaacactt

SEQ ID NO: 172189 - DNA, 91 bp, Homo sapiens; identical to SEQ ID NO: 84697
  chr12:112574642-112574733
  hypo

SEQ ID NO: 172190 - DNA, 36 bp, Homo sapiens; identical to SEQ ID NO: 84698
  chr12:112575270-112575306
  hypo

SEQ ID NO: 172191 - DNA, 32 bp, Homo sapiens; identical to SEQ ID NO: 84699
  chr12:112591127-112591159
  hypo

SEQ ID NO: 172192 - DNA, 131 bp, Homo sapiens; identical to SEQ ID NO: 26513
  chr12:112591859-112591990
  hypo

SEQ ID NO: 172193 - DNA, 30 bp, Homo sapiens
  chr12:112601883-112601913
  hypo
gccagcccctgacacgcgcacacactcacg

SEQ ID NO: 172194 - DNA, 268 bp, Homo sapiens; identical to SEQ ID NO: 84701
  chr12:112605588-112605856
  hypo

SEQ ID NO: 172195 - DNA, 645 bp, Homo sapiens; identical to SEQ ID NO: 26515
  chr12:112610021-112610666
  hypo

SEQ ID NO: 172196 - DNA, 94 bp, Homo sapiens; identical to SEQ ID NO: 26516
  chr12:112612658-112612752
  hypo

SEQ ID NO: 172197 - DNA, 71 bp, Homo sapiens; identical to SEQ ID NO: 26517
  chr12:112616769-112616840
  hypo

SEQ ID NO: 172198 - DNA, 231 bp, Homo sapiens
  chr12:112620316-112620547
  hypo
agtttacaagggggacgcatgagctgtcctcaagcatatgatgaaataattaccagcaatgttctagctgcacaggacagaacaaaataaatacactgcacttgaaccaggggaaggctggctagacaaaaaggaaaaaatgacttgaatacaagcccacattcaagcctgttgcaggcggcgcaaagccacccctggtagcctctccagctggaacgcggcaggcctgtg

SEQ ID NO: 172199 - DNA, 252 bp, Homo sapiens; identical to SEQ ID NO: 84705
  chr12:112622464-112622716
  hypo

SEQ ID NO: 172200 - DNA, 30 bp, Homo sapiens; identical to SEQ ID NO: 84706
  chr12:112623022-112623052
  hypo

SEQ ID NO: 172201 - DNA, 161 bp, Homo sapiens; identical to SEQ ID NO: 26518
  chr12:112628548-112628709
  hypo

SEQ ID NO: 172202 - DNA, 30 bp, Homo sapiens; identical to SEQ ID NO: 50071
  chr12:112645385-112645415
  hypo

SEQ ID NO: 172203 - DNA, 31 bp, Homo sapiens; identical to SEQ ID NO: 26519
  chr12:112647931-112647962
  hypo

SEQ ID NO: 172204 - DNA, 383 bp, Homo sapiens; identical to SEQ ID NO: 26520
  chr12:112657023-112657406
  hypo

SEQ ID NO: 172205 - DNA, 30 bp, Homo sapiens; identical to SEQ ID NO: 84711
  chr12:112671602-112671632
  hypo

SEQ ID NO: 172206 - DNA, 178 bp, Homo sapiens; identical to SEQ ID NO: 84712
  chr12:112681202-112681380
  hypo

SEQ ID NO: 172207 - DNA, 115 bp, Homo sapiens; identical to SEQ ID NO: 84713
  chr12:112684717-112684832
  hypo

SEQ ID NO: 172208 - DNA, 43 bp, Homo sapiens; identical to SEQ ID NO: 50072
  chr12:112689846-112689889
  hypo

SEQ ID NO: 172209 - DNA, 244 bp, Homo sapiens; identical to SEQ ID NO: 26522
  chr12:112743069-112743313
  hypo

SEQ ID NO: 172210 - DNA, 54 bp, Homo sapiens
  chr12:112753045-112753099
  hypo
cctgaactaaatgatcgcctgtatctgacgggctgacttcgacttgctgcctta

SEQ ID NO: 172211 - DNA, 20 bp, Homo sapiens
  chr12:112802516-112802536
  hypo
caaagcgagaccctgtctca

SEQ ID NO: 172212 - DNA, 31 bp, Homo sapiens; identical to SEQ ID NO: 26523
  chr12:112814900-112814931
  hypo

SEQ ID NO: 172213 - DNA, 30 bp, Homo sapiens; identical to SEQ ID NO: 50073
  chr12:112817767-112817797
  hypo

SEQ ID NO: 172214 - DNA, 18 bp, Homo sapiens
  chr12:112821838-112821856
  hypo
cgggcacagtggctcacg

SEQ ID NO: 172215 - DNA, 30 bp, Homo sapiens; identical to SEQ ID NO: 9042
  chr12:112842259-112842289
  hypo

SEQ ID NO: 172216 - DNA, 30 bp, Homo sapiens; identical to SEQ ID NO: 84721
  chr12:112844577-112844607
  hypo

SEQ ID NO: 172217 - DNA, 36 bp, Homo sapiens; identical to SEQ ID NO: 9043
  chr12:112884176-112884212
  hypo

SEQ ID NO: 172218 - DNA, 197 bp, Homo sapiens; identical to SEQ ID NO: 9044
  chr12:112888120-112888317
  hypo

SEQ ID NO: 172219 - DNA, 30 bp, Homo sapiens; identical to SEQ ID NO: 9045
  chr12:112891142-112891172
  hypo

SEQ ID NO: 172220 - DNA, 482 bp, Homo sapiens
  chr12:112893630-112894112
  hypo
tatgaaccctctgtccgtgcctttatgaatatcaacatagacatgtttttttttttttttttgcattaacaccgttttctgtaatattttctttattttacatcaactgctgtactcgatcagccccttaacacgactcgtataaatgctgctgaaatagaaagcagagttcgagaactaagcaaattagctgagaccacagataaagtcaaacaaggcttttgggaagaatttgaggtaagttattaaaaaactgtttttacgtgagttgttatatcctatttttagtggaggagaagttgctcttgtgtttggaattggacctgagagacttgaaactgacgtccttttttaattcggccattgattgacacggagcaagttgctgagagggcttcttcgaaacagaagagcattgtgttctgagggaagggagttggcagtgagtagtcaatggatgtgctagccgctccatttggctc

SEQ ID NO: 172221 - DNA, 87 bp, Homo sapiens; identical to SEQ ID NO: 9046
  chr12:112915450-112915537
  hypo

SEQ ID NO: 172222 - DNA, 35 bp, Homo sapiens
  chr12:112919566-112919601
  hypo
attacaggcatgagccactgcgccccagctgattc

SEQ ID NO: 172223 - DNA, 30 bp, Homo sapiens
  chr12:112919942-112919972
  hypo
gaacgtcaaagaaagcgccgctcatgacta

SEQ ID NO: 172224 - DNA, 117 bp, Homo sapiens; identical to SEQ ID NO: 9047
  chr12:112924320-112924437
  hypo

SEQ ID NO: 172225 - DNA, 153 bp, Homo sapiens; identical to SEQ ID NO: 9048
  chr12:112926826-112926979
  hypo

SEQ ID NO: 172226 - DNA, 30 bp, Homo sapiens
  chr12:112963249-112963279
  hypo
atgaacacccatgcccgtcaccctaatgtg

SEQ ID NO: 172227 - DNA, 272 bp, Homo sapiens; identical to SEQ ID NO: 123043
  chr12:113013006-113013278
  hypo

SEQ ID NO: 172228 - DNA, 24 bp, Homo sapiens
  chr12:113013320-113013344
  hypo
cgcaggacccgtgctatcctttgg

SEQ ID NO: 172229 - DNA, 19 bp, Homo sapiens
  chr12:113128836-113128855
  hypo
tttttttttttgagacgga

SEQ ID NO: 172230 - DNA, 30 bp, Homo sapiens
  chr12:113374670-113374700
  hypo
atattgacccttctgcgttccatcttctaa

SEQ ID NO: 172231 - DNA, 30 bp, Homo sapiens
  chr12:113436952-113436982
  hypo
cgttcaggcaggtgccgggggcaacagtca

SEQ ID NO: 172232 - DNA, 9 bp, Homo sapiens
  chr12:113494406-113494415
  hypo
ggatttggg

SEQ ID NO: 172233 - DNA, 794 bp, Homo sapiens; identical to SEQ ID NO: 50087
  chr12:113494430-113495224
  hypo

SEQ ID NO: 172234 - DNA, 30 bp, Homo sapiens
  chr12:113534576-113534606
  hypo
tccaacaccacgggcgagtcggacaccgtg

SEQ ID NO: 172235 - DNA, 31 bp, Homo sapiens; identical to SEQ ID NO: 26533
  chr12:113595320-113595351
  hypo

SEQ ID NO: 172236 - DNA, 30 bp, Homo sapiens; identical to SEQ ID NO: 84731
  chr12:113596782-113596812
  hypo

SEQ ID NO: 172237 - DNA, 249 bp, Homo sapiens
  chr12:113598985-113599234
  hypo
gcccctgcacctgtgcctcagcgttaccctaatctgaccacaactgctctgcctacctgtgcacccacactccccaccctggctctcaccttggccacggtctcgcttcccacctcttcgctctgggcctcgccggtcagatgccccttcttcgtccgagtcacgatcatcaattttctgtttctgtttccacttctgatagctgggaaacctcgttaaggaagctgcgtgaagcccctgggatgggag

SEQ ID NO: 172238 - DNA, 30 bp, Homo sapiens; identical to SEQ ID NO: 26535
  chr12:113600982-113601012
  hypo

SEQ ID NO: 172239 - DNA, 31 bp, Homo sapiens; identical to SEQ ID NO: 26536
  chr12:113609784-113609815
  hypo

SEQ ID NO: 172240 - DNA, 187 bp, Homo sapiens; identical to SEQ ID NO: 26537
  chr12:113629776-113629963
  hypo

SEQ ID NO: 172241 - DNA, 309 bp, Homo sapiens; identical to SEQ ID NO: 26538
  chr12:113669641-113669950
  hypo

SEQ ID NO: 172242 - DNA, 30 bp, Homo sapiens
  chr12:113678173-113678203
  hypo
attttctgagtgtcgcgcagtctgcaaagg

SEQ ID NO: 172243 - DNA, 30 bp, Homo sapiens
  chr12:113680410-113680440
  hypo
tacctttgcccactgcgtcatcctggtcac

SEQ ID NO: 172244 - DNA, 823 bp, Homo sapiens
  chr12:113685185-113686008
  hypo
cccttctgccccctgccttcccgctttctgggcctgaaatgtcctcctcagaaagctgccgagccttcgagcataccttctgcgggaacaacgcagcactcggagtgggagcatatccattgtcccttcagccacttctgcaacctcttaagtggggaagagggttagacagcagacagggcaggggattagcactccacgaggtggcccagccccacccggcccctgccgtgccctcgtcttggctggtacagctgcactgctgcgtgaaggccacgtacaaaaggaacagaatggaactgtggctcctcgccttccatttgcaccctttctataatccctaaatatgtagcccagttgctcgtgccttgatgtgaaggaggccctttgcgatcacctgtggctttcttgaaaagtccctgagtggccagtgtcaccccaggccttccatccctctctccgtgtggagaaatgagcgatcatgctttgccttttgggaccacatgagcactccaagtcctgttttctgaggttgagtggttagaagcacagaacaaagtccgtcctgggagggggagaattcgctgttctttcaccttagctcttgagtcttattctcccctttccctttcaaggttctaccctgaattactcttaacacaaaacagcccctcttccgcagatccttaaaagaaaggtttttacaaatacaaacttaccacatcacaccccttcctaacaccctttggcgctgcccactgcaccccgggtggagcccgccctcttgcccgaggcctgccaggccccacggatggctccttgt

SEQ ID NO: 172245 - DNA, 428 bp, Homo sapiens
  chr12:113690092-113690520
  hypo
ctgcaccgtgggacgcgtcgggccacctggtcccagggatgctgcggtataagtggtaagggataggggagcttttgaggaggaccagacgttgtctccccaccaggaacgggctgagagagcctcctgagcacaaggaggaagctcctgtcaattcgaggagacccctgtgtgagaagaagggcaggaaggctccaaagggggtcttcacggcagccgctcacatagacactcgtgtctagtgtcaagtgggagggtggcactaatggctgctgccatctgtgccagctagcagctgcctgctccgctccatcattgttatttatgttacctaggactcttctgtgttgccggtgccagcccctgctggggcatgtggaggtcgtggaggacagggcatgggctcacgaggacgcagctccatccag

SEQ ID NO: 172246 - DNA, 87 bp, Homo sapiens; identical to SEQ ID NO: 84739
  chr12:113704019-113704106
  hypo

SEQ ID NO: 172247 - DNA, 451 bp, Homo sapiens
  chr12:113725551-113726002
  hypo
ctgctcctgagtgtccgcctccgtcccgccccctgccacccttcttcactggtgagctccattgcccccgctccccggggcacatgggcttctccccgctctttcccaggagcaaggccttgctcctgtctgagcctgcagctctactgcaaggagatgtggcctggccctgctcctcttcgtggaaggaccccgcccagccggtgtcctggggctgccaccatcccttccctcatgcatgaatcacctgagcccagctcagggttggtggcgcccaagggagtggacgcaggtggaggagaggccctcacctgtcttcaccgcatggcgtgtggaaggcggggccggcatgttctgagggcgggggctgaggcgtgcacctgtgtgtggaggtgacgggtgtcctcctcgctcaggttgtttaagttgaaggagcgctaccgcaacgtgc

SEQ ID NO: 172248 - DNA, 30 bp, Homo sapiens; identical to SEQ ID NO: 84741
  chr12:113729476-113729506
  hypo

SEQ ID NO: 172249 - DNA, 177 bp, Homo sapiens
  chr12:113734197-113734374
  hypo
gggctggcctccatcggccacgtccaaagctgtcactgctactgcttcaggctcacatccccccgacctgatggcgtgcccgccccctctccctgcggcccatgccacaggtttctgtgttttgctttagggacagaaccacttaggaaggaaagaactcccggtctccagggtggt

SEQ ID NO: 172250 - DNA, 30 bp, Homo sapiens
  chr12:113754406-113754436
  hypo
accaggatctgagccgtggtctcctggtag

SEQ ID NO: 172251 - DNA, 22 bp, Homo sapiens
  chr12:113783671-113783693
  hypo
gccacctcgcccggcctttgag

SEQ ID NO: 172252 - DNA, 638 bp, Homo sapiens; identical to SEQ ID NO: 123059
  chr12:113796256-113796894
  hypo

SEQ ID NO: 172253 - DNA, 30 bp, Homo sapiens; identical to SEQ ID NO: 84745
  chr12:113827151-113827181
  hypo

SEQ ID NO: 172254 - DNA, 31 bp, Homo sapiens; identical to SEQ ID NO: 84746
  chr12:113872021-113872052
  hypo

SEQ ID NO: 172255 - DNA, 2053 bp, Homo sapiens; identical to SEQ ID NO: 123066
  chr12:113904445-113906498
  hypo

SEQ ID NO: 172256 - DNA, 340 bp, Homo sapiens; identical to SEQ ID NO: 50109
  chr12:113913883-113914223
  hypo

SEQ ID NO: 172257 - DNA, 319 bp, Homo sapiens; identical to SEQ ID NO: 123076
  chr12:113914300-113914619
  hypo

SEQ ID NO: 172258 - DNA, 492 bp, Homo sapiens; identical to SEQ ID NO: 50117
  chr12:114029352-114029844
  hypo

SEQ ID NO: 172259 - DNA, 46 bp, Homo sapiens; identical to SEQ ID NO: 50118
  chr12:114075829-114075875
  hypo

SEQ ID NO: 172260 - DNA, 150 bp, Homo sapiens; identical to SEQ ID NO: 123085
  chr12:114075909-114076059
  hypo

SEQ ID NO: 172261 - DNA, 108 bp, Homo sapiens; identical to SEQ ID NO: 84752
  chr12:114163036-114163144
  hypo

SEQ ID NO: 172262 - DNA, 30 bp, Homo sapiens; identical to SEQ ID NO: 84753
  chr12:114236490-114236520
  hypo

SEQ ID NO: 172263 - DNA, 30 bp, Homo sapiens
  chr12:114240311-114240341
  hypo
agccgggaggcgacacgcccgggtgcgctc

SEQ ID NO: 172264 - DNA, 30 bp, Homo sapiens
  chr12:114241028-114241058
  hypo
gtgagcaggcgaccacggccaccttgttgc

SEQ ID NO: 172265 - DNA, 30 bp, Homo sapiens; identical to SEQ ID NO: 84754
  chr12:114243009-114243039
  hypo

SEQ ID NO: 172266 - DNA, 62 bp, Homo sapiens; identical to SEQ ID NO: 84755
  chr12:114254875-114254937
  hypo

SEQ ID NO: 172267 - DNA, 801 bp, Homo sapiens
  chr12:114273197-114273998
  hypo
gatcttaattgcacacgtgagcacctgacggcaggctgtggtactcgaggaggaccaggggaggggcatgacaagggaatcacgaaaaggagaggtgtgggggaaaagctgcatctttgacactctggctgggaggcagtgggggccggggtcagtgggggctgccgggaccagggctctagcaagcaggctccttccctgctcctcgcgaggctgggagggtgactgtttgctggaggccggcgacccatggggacagccacccgtctgtgccggaagagcacttctccgggcactctgctcatagatctcccgccccagcccaacctggcttgggcaggcgggggaaggccccactgccagccactcgccatgctggtcatgtctgcgctcccagctctggaggtgaaaggtagagacgctaaccacagcccatcagtcctccccagctggaataagacaacatgggaagcagagccacgctcccagccaaataaaagcctgtttgcccagcctccctggctgtgagtgctgtaaaacacagggttctgcgcacggatttcttccataccattatattctctcggctgcgctcgcaggtactgtggcctgccgcggccctgaaagcttctcgatgccgtgaccctgctggtttgtaacacgctcaggaagaaaaggacacagccagcggcggactttcctctttcttccctccttgctctctcttttcaaactcccacatgcaaggcagtgaagaatagcacttcacctaccacggggctgctgcgctggagatgagaa

SEQ ID NO: 172268 - DNA, 116 bp, Homo sapiens; identical to SEQ ID NO: 84757
  chr12:114282480-114282596
  hypo

SEQ ID NO: 172269 - DNA, 198 bp, Homo sapiens; identical to SEQ ID NO: 84758
  chr12:114282866-114283064
  hypo

SEQ ID NO: 172270 - DNA, 266 bp, Homo sapiens; identical to SEQ ID NO: 26548
  chr12:114290575-114290841
  hypo

SEQ ID NO: 172271 - DNA, 30 bp, Homo sapiens
  chr12:114292650-114292680
  hypo
tgcaaatctcccacccgatgctggagctgc

SEQ ID NO: 172272 - DNA, 31 bp, Homo sapiens; identical to SEQ ID NO: 84760
  chr12:114294979-114295010
  hypo

SEQ ID NO: 172273 - DNA, 201 bp, Homo sapiens; identical to SEQ ID NO: 84761
  chr12:114295303-114295504
  hypo

SEQ ID NO: 172274 - DNA, 140 bp, Homo sapiens; identical to SEQ ID NO: 84762
  chr12:114318247-114318387
  hypo

SEQ ID NO: 172275 - DNA, 110 bp, Homo sapiens; identical to SEQ ID NO: 84763
  chr12:114318956-114319066
  hypo

SEQ ID NO: 172276 - DNA, 188 bp, Homo sapiens; identical to SEQ ID NO: 84764
  chr12:114334063-114334251
  hypo

SEQ ID NO: 172277 - DNA, 539 bp, Homo sapiens; identical to SEQ ID NO: 84765
  chr12:114337458-114337997
  hypo

SEQ ID NO: 172278 - DNA, 152 bp, Homo sapiens; identical to SEQ ID NO: 84766
  chr12:114349903-114350055
  hypo

SEQ ID NO: 172279 - DNA, 31 bp, Homo sapiens; identical to SEQ ID NO: 84767
  chr12:114393632-114393663
  hypo

SEQ ID NO: 172280 - DNA, 284 bp, Homo sapiens
  chr12:114399936-114400220
  hypo
caaagtgaagagggacggtctttgaactcaagtgctgagtgaaagatcaaacaacgtcacacttgacaggaaggtaagggtgagactcctgcccactcactgtgatccgggatgtgtcgatgaagctcttgttgaaatgcttctgtgccttctgggcctcttcctcggacttgaagccaataaaaccaaacttgcggaacttgccatctttggtgaacttcaggctgcagtctgtcagcgtgccgaaggcggcaaacagctgcctgaaacgctcctccttcatc

SEQ ID NO: 172281 - DNA, 177 bp, Homo sapiens; identical to SEQ ID NO: 123094
  chr12:114841463-114841640
  hypo

SEQ ID NO: 172282 - DNA, 497 bp, Homo sapiens; identical to SEQ ID NO: 123108
  chr12:114881652-114882149
  hypo

SEQ ID NO: 172283 - DNA, 38 bp, Homo sapiens; identical to SEQ ID NO: 123111
  chr12:114885145-114885183
  hypo

SEQ ID NO: 172284 - DNA, 265 bp, Homo sapiens; identical to SEQ ID NO: 123112
  chr12:114885371-114885636
  hypo

SEQ ID NO: 172285 - DNA, 118 bp, Homo sapiens
  chr12:114982646-114982764
  hypo
gagaaggcacagatctgaccacgagtgagattaggagaggcagcagaagcaggagcgagagcctcagaccccagcaacgcattcctgatgaggccccggccagtgcagcagggagctt

SEQ ID NO: 172286 - DNA, 80 bp, Homo sapiens; identical to SEQ ID NO: 26555
  chr12:114983016-114983096
  hypo

SEQ ID NO: 172287 - DNA, 236 bp, Homo sapiens; identical to SEQ ID NO: 84773
  chr12:115188682-115188918
  hypo

SEQ ID NO: 172288 - DNA, 89 bp, Homo sapiens; identical to SEQ ID NO: 84774
  chr12:115192171-115192260
  hypo

SEQ ID NO: 172289 - DNA, 141 bp, Homo sapiens; identical to SEQ ID NO: 84775
  chr12:115204969-115205110
  hypo

SEQ ID NO: 172290 - DNA, 18 bp, Homo sapiens
  chr12:115263647-115263665
  hypo
gcacgcgcgcacacacac

SEQ ID NO: 172291 - DNA, 150 bp, Homo sapiens; identical to SEQ ID NO: 84777
  chr12:115544513-115544663
  hypo

SEQ ID NO: 172292 - DNA, 30 bp, Homo sapiens; identical to SEQ ID NO: 50158
  chr12:115836506-115836536
  hypo

SEQ ID NO: 172293 - DNA, 44 bp, Homo sapiens; identical to SEQ ID NO: 84779
  chr12:116040840-116040884
  hypo

SEQ ID NO: 172294 - DNA, 30 bp, Homo sapiens; identical to SEQ ID NO: 50160
  chr12:116185147-116185177
  hypo

SEQ ID NO: 172295 - DNA, 204 bp, Homo sapiens; identical to SEQ ID NO: 26557
  chr12:116394792-116394996
  hypo

SEQ ID NO: 172296 - DNA, 30 bp, Homo sapiens
  chr12:116400210-116400240
  hypo
acaggctgtaatgctcgctcacttgctact

SEQ ID NO: 172297 - DNA, 27 bp, Homo sapiens
  chr12:116400806-116400833
  hypo
cagagcgagactccatctcgaataaac

SEQ ID NO: 172298 - DNA, 139 bp, Homo sapiens
  chr12:116401201-116401340
  hypo
tggtatctaccttaaaacatccgacgtggttttggagtcaagagggtgtggaacccgctgagaattcctggcaggcagaagttcgtctgtctgtgctactgaaatgtggtgatgcagcgaagcctggtgaaaaaacaaa

SEQ ID NO: 172299 - DNA, 30 bp, Homo sapiens; identical to SEQ ID NO: 84783
  chr12:116409720-116409750
  hypo

SEQ ID NO: 172300 - DNA, 30 bp, Homo sapiens; identical to SEQ ID NO: 84784
  chr12:116409959-116409989
  hypo

SEQ ID NO: 172301 - DNA, 260 bp, Homo sapiens
  chr12:116443622-116443882
  hypo
aagtcctttcatgtagcgaaatttttgtttatgtagctacggcaaactcaccccaagttcgtcgtcatcagaattatcaaagatgttgtctaagtcatgcagggaaggtgccaaatctgttacctgtgtaaggctactggagccagctctgccagcagcattatcctgccggacatctgtaggaaaggaggcaaaagacacagaataaacaactccaccaagcgcaaaggagtagggagaggacacggatctcaatgaac

SEQ ID NO: 172302 - DNA, 316 bp, Homo sapiens
  chr12:116475433-116475749
  hypo
gacacttgggtagtgcgttataaattcttccagactgtaggataccattcccagcaccgtagtggtatcagagaagcagcacactttgtgttaatgaaaaaatggtgttctactggcctacgggacttaattctccctgggtacatcacttattaagagcaagtgatagtgaagaggccgtgactcagtatgtccttaattcaaagagtcgaagaggctgaggggtcccactccggtagtaaaaactaatataattttcaagatgccaaaatagatataagagctgctctagtcagtgatgcgtgcttgaaaaacc

SEQ ID NO: 172303 - DNA, 23 bp, Homo sapiens
  chr12:116603422-116603445
  hypo
ccgcacctggcctgcctatgtcc

SEQ ID NO: 172304 - DNA, 30 bp, Homo sapiens; identical to SEQ ID NO: 84786
  chr12:116650862-116650892
  hypo

SEQ ID NO: 172305 - DNA, 36 bp, Homo sapiens; identical to SEQ ID NO: 84787
  chr12:116678338-116678374
  hypo

SEQ ID NO: 172306 - DNA, 35 bp, Homo sapiens; identical to SEQ ID NO: 84788
  chr12:116678613-116678648
  hypo

SEQ ID NO: 172307 - DNA, 18 bp, Homo sapiens
  chr12:116696277-116696295
  hypo
ttattataaaaagaaaaa

SEQ ID NO: 172308 - DNA, 43 bp, Homo sapiens
  chr12:116724731-116724774
  hypo
tttcttgggcttctctagtcacgtgggtactaaattctcatca

SEQ ID NO: 172309 - DNA, 30 bp, Homo sapiens; identical to SEQ ID NO: 26559
  chr12:116731524-116731554
  hypo

SEQ ID NO: 172310 - DNA, 30 bp, Homo sapiens
  chr12:116740159-116740189
  hypo
agccaatcaagctggcgctgagaatttatg

SEQ ID NO: 172311 - DNA, 417 bp, Homo sapiens
  chr12:116755981-116756398
  hypo
aaattgtttcatgaacgtctgctgtgatggcaaacctttcgggtagatccatctagtttctcacgcgtgcggcaagcggctgccgtgtttaccgaccgtcctgtgactgtggggactggcaaagctaaatggcctgagtgggttgaactgtggccgcacctggttagcaccgttctttttcttcttctgaaggaaaggcgtggctgttccgaggtgccttgtgaaatagccagccgtcctgggctgccctttcactgttcctgctgaagccaaaggtgccagaaaagcctagacattgagctccgcgctccccagtcgtgactctgtgtctacgacgaactttctaaaggcagtggcttataaacgagcagtactgactccatggcggttccatctacttcccgagtgtgtctgtgt

SEQ ID NO: 172312 - DNA, 66 bp, Homo sapiens
  chr12:116756738-116756804
  hypo
catctgtttaatgtgcgttctgtgccattcacggattttggcaaggtctggcgaggtggcatggca

SEQ ID NO: 172313 - DNA, 13 bp, Homo sapiens
  chr12:116756874-116756887
  hypo
cttctccctctgg

SEQ ID NO: 172314 - DNA, 70 bp, Homo sapiens
  chr12:116757110-116757180
  hypo
aaacactgcaaggcccggaaggccagaaaatgctaacacctggatccgatagtcccgacgcctaaagaaa

SEQ ID NO: 172315 - DNA, 44 bp, Homo sapiens
  chr12:116770790-116770834
  hypo
ggattaaatgcgtgagccaccgcgcccagccaagatgactgttt

SEQ ID NO: 172316 - DNA, 93 bp, Homo sapiens; identical to SEQ ID NO: 84794
  chr12:116804025-116804118
  hypo

SEQ ID NO: 172317 - DNA, 143 bp, Homo sapiens
  chr12:116842261-116842404
  hypo
gttggtgtctggtcaccgcacgtcgttattcagttcacacacagctaagcgtgcagctgtgttgcctccttctctctgggtgataactcacttgacattttacataaatggatagtaaaaagaaggaattagccaacaaagat

SEQ ID NO: 172318 - DNA, 30 bp, Homo sapiens
  chr12:116898189-116898219
  hypo
aggtctgctctacgccggactcgaagagac

SEQ ID NO: 172319 - DNA, 35 bp, Homo sapiens
  chr12:116936894-116936929
  hypo
tacttccagtctccacgcttcgcctactctgggca

SEQ ID NO: 172320 - DNA, 246 bp, Homo sapiens; identical to SEQ ID NO: 84795
  chr12:116941178-116941424
  hypo

SEQ ID NO: 172321 - DNA, 230 bp, Homo sapiens; identical to SEQ ID NO: 123138
  chr12:116972229-116972459
  hypo

SEQ ID NO: 172322 - DNA, 41 bp, Homo sapiens; identical to SEQ ID NO: 84796
  chr12:116981480-116981521
  hypo

SEQ ID NO: 172323 - DNA, 193 bp, Homo sapiens; identical to SEQ ID NO: 26562
  chr12:116999940-117000133
  hypo

SEQ ID NO: 172324 - DNA, 30 bp, Homo sapiens
  chr12:117109817-117109847
  hypo
gccactgcgcccagccgagcttgtgcttta

SEQ ID NO: 172325 - DNA, 211 bp, Homo sapiens
  chr12:117135885-117136096
  hypo
tcctaaaggcaacggcggcggcaacaaatagatgggttaatttgtttcatgcccccgttgtcaccaggctctcgcagaataaaaccaccaccaccaccaccacaacctccatttgtggggtttaataccccagctgctgggaatcagattcagccggaggaagaaaatgtgacgtcgatgcagagatccatttattcggtgatgtttgctt

SEQ ID NO: 172326 - DNA, 325 bp, Homo sapiens; identical to SEQ ID NO: 84798
  chr12:117150056-117150381
  hypo

SEQ ID NO: 172327 - DNA, 101 bp, Homo sapiens; identical to SEQ ID NO: 84799
  chr12:117150586-117150687
  hypo

SEQ ID NO: 172328 - DNA, 491 bp, Homo sapiens; identical to SEQ ID NO: 84800
  chr12:117155344-117155835
  hypo

SEQ ID NO: 172329 - DNA, 30 bp, Homo sapiens
  chr12:117157142-117157172
  hypo
tcctaaaataaacagcgactccatcccaga

SEQ ID NO: 172330 - DNA, 195 bp, Homo sapiens
  chr12:117157434-117157629
  hypo
aaacaaagcgtgacacggcttcgagtctcttctcccttaccaccccaccaaaaggatcgacagtgtgtattttctagtttccttctaacccgtcagctgccatcccacagctagagacatcacagcttctgacctgagatgaggtcctgcatttggccaggcacaactcaaagtgatcttcgactgccatgaaga

SEQ ID NO: 172331 - DNA, 85 bp, Homo sapiens
  chr12:117160856-117160941
  hypo
ggaagccagcctcaccgagttcatccgtgatgaggtgcttcccttgaatggagttgcggcactgattgctcggacgactgctatt

SEQ ID NO: 172332 - DNA, 62 bp, Homo sapiens; identical to SEQ ID NO: 84802
  chr12:117161611-117161673
  hypo

SEQ ID NO: 172333 - DNA, 42 bp, Homo sapiens
  chr12:117162194-117162236
  hypo
tgtttactacatgatcgtttcgatggtataaaaaacctgaaa

SEQ ID NO: 172334 - DNA, 30 bp, Homo sapiens
  chr12:117186099-117186129
  hypo
ctgcaggcctaactccgggctctctgctcc

SEQ ID NO: 172335 - DNA, 30 bp, Homo sapiens
  chr12:117186573-117186603
  hypo
gtgctcccttttcaacgaagtgtgctggtt

SEQ ID NO: 172336 - DNA, 30 bp, Homo sapiens; identical to SEQ ID NO: 26566
  chr12:117187853-117187883
  hypo

SEQ ID NO: 172337 - DNA, 73 bp, Homo sapiens; identical to SEQ ID NO: 123144
  chr12:117316908-117316981
  hypo

SEQ ID NO: 172338 - DNA, 561 bp, Homo sapiens; identical to SEQ ID NO: 123145
  chr12:117317224-117317785
  hypo

SEQ ID NO: 172339 - DNA, 149 bp, Homo sapiens
  chr12:117392975-117393124
  hypo
cattacctccgtgagcgccttctctggccctcgttcttgtctttctctgctgtcacttgaccacttagcaaggatatgcagcagcgcagaaaagacctgcaccagttgttttctttgttggagagataagtggacgtgccttcaactgc

SEQ ID NO: 172340 - DNA, 564 bp, Homo sapiens; identical to SEQ ID NO: 26567
  chr12:117407819-117408383
  hypo

SEQ ID NO: 172341 - DNA, 30 bp, Homo sapiens
  chr12:117425038-117425068
  hypo
cgtgttctggaggccggctttgaactcttt

SEQ ID NO: 172342 - DNA, 30 bp, Homo sapiens; identical to SEQ ID NO: 84808
  chr12:117436978-117437008
  hypo

SEQ ID NO: 172343 - DNA, 30 bp, Homo sapiens; identical to SEQ ID NO: 84809
  chr12:117448196-117448226
  hypo

SEQ ID NO: 172344 - DNA, 30 bp, Homo sapiens; identical to SEQ ID NO: 84810
  chr12:117457798-117457828
  hypo

SEQ ID NO: 172345 - DNA, 30 bp, Homo sapiens; identical to SEQ ID NO: 84811
  chr12:117461035-117461065
  hypo

SEQ ID NO: 172346 - DNA, 117 bp, Homo sapiens
  chr12:117461715-117461832
  hypo
actgtccttggcctgcgtctttcttgctccatgtgcttttaaaccattcagatgagaccgtgtgggtcctccctgacagtctgtgcttgatgtccttattatcgatgtttgtttgca

SEQ ID NO: 172347 - DNA, 206 bp, Homo sapiens
  chr12:117464844-117465050
  hypo
gggacttgcccagggaggcagcgatgggccagtctctgttgcatgtggctgattcgtctgcagtagggtgtgccctttatgtctggaatgtaccaggttgtgggggcagatgccagcatgcgtacggggcatgcagacctgtttacaaagtcatgcccaaagcgtggcctgctcacctgagcttcgggaactgaggtgagacactg

SEQ ID NO: 172348 - DNA, 30 bp, Homo sapiens
  chr12:117465583-117465613
  hypo
tcaggggcaaggcccgccctcttgagtcct

SEQ ID NO: 172349 - DNA, 240 bp, Homo sapiens
  chr12:117466158-117466398
  hypo
gcgtgtgccagggctcgagtcccacgtgctgccaactcaaacatagcctccttccccacccagctggccaccctggcctcagctccctcaggacgcctcagggatctcgctgcgcggtcctatacggtccctgcttagccagcttctgtgtgtccgccctcccagctccagccctgcaggccgtcttttccgtctccagccccttacctcttttcctccgagggcctttggatgtgcttg

SEQ ID NO: 172350 - DNA, 185 bp, Homo sapiens
  chr12:117472594-117472779
  hypo
agcccgaggcacagaccgcagtgcccagatggtggggctgactgagatccgtgcccggggcagcaaccctcggtctgtgttgatcaaaggccagcagccccacaagacgcatcagcctgccccttctgggatcaggtttgcaccaactcatcgccaaccctgatcgttcccgggatgccacagac

SEQ ID NO: 172351 - DNA, 27 bp, Homo sapiens
  chr12:117473776-117473803
  hypo
cctcaagtgagtcgcctgcctcggcct

SEQ ID NO: 172352 - DNA, 93 bp, Homo sapiens
  chr12:117474091-117474184
  hypo
acctacccaggaggtcgtgcgcattaaccaaaagctgagcctccccaggccgcactcactttcccggggccattcgcccgctccctgtgtagc

SEQ ID NO: 172353 - DNA, 135 bp, Homo sapiens; identical to SEQ ID NO: 84817
  chr12:117476985-117477120
  hypo

SEQ ID NO: 172354 - DNA, 282 bp, Homo sapiens; identical to SEQ ID NO: 84818
  chr12:117484291-117484573
  hypo

SEQ ID NO: 172355 - DNA, 288 bp, Homo sapiens
  chr12:117484910-117485198
  hypo
gagctagcgctgtggcgttagggcctggcaactgccccgtgagcatgaatatcacgacagtaagcgttacccgttaacacaagtcaaacggtgtcgagttcaaaatattgttcccacagccctggagggcaccatcatctcacccatagcaggtcacggtccacagtgcttctgatctgggcccgactgatctaacatgggcagccccaggcctggcatcagggaggcgatggccgggagggggcctctccatgttgttcccagcacggccttgggagctggagctct

SEQ ID NO: 172356 - DNA, 116 bp, Homo sapiens; identical to SEQ ID NO: 84820
  chr12:117487069-117487185
  hypo

SEQ ID NO: 172357 - DNA, 41 bp, Homo sapiens
  chr12:117529340-117529381
  hypo
attaccaccaatctgcggagcgaggacgtcttggagaggac

SEQ ID NO: 172358 - DNA, 409 bp, Homo sapiens
  chr12:117529745-117530154
  hypo
ggcatgcgggagaggcggtttctcccggcactgcacttggcaaatcccactagaaggcctggttttgagtctggattccctacccagcaactaagtgatcttgggcagtcatttcctctgtccaaacctcagtttgcccatctataaactggcagcaatagtcccaccctcaaagggcttttcggcagatcagatgattgacaagtgctcaagaaagagcagctgtcacctcattcacagctggctgcgttttttaaggagcggaactggtggctcaaagaaggacacagcctggatgagacatctgagcgaagtggcacaggacggctccagcaccgagctcagtgcacatggaacgccatcctccagggtcccgctctgtggctgcgacagatggtgagatgatggg

SEQ ID NO: 172359 - DNA, 197 bp, Homo sapiens; identical to SEQ ID NO: 84823
  chr12:117531043-117531240
  hypo

SEQ ID NO: 172360 - DNA, 30 bp, Homo sapiens
  chr12:117531920-117531950
  hypo
cccccgggacgccttcgctcgggcttttca

SEQ ID NO: 172361 - DNA, 21 bp, Homo sapiens
  chr12:117532530-117532551
  hypo
agggttaacgctgtgcgcggt

SEQ ID NO: 172362 - DNA, 24 bp, Homo sapiens
  chr12:117533159-117533183
  hypo
gagccaccacgcccggcctagacc

SEQ ID NO: 172363 - DNA, 297 bp, Homo sapiens
  chr12:117579414-117579711
  hypo
ctgcagaaatgtgtccgtccccacggacagcctggcttagctgtccgtggctgtctcctgcggtggaggagcacactggagtggcccgtgcagtggaccagagcttccacccacactgtgttctgtctcctttcctagaacacaactggacgtttcccacctccgtgcaaaatgagtggacataaggggtgccacttccacacctggctcatggaagctcccagatggtctcagccctccatgctccccgctacttcaggcgggatggagatggacggctcaggttgctctgatgcc

SEQ ID NO: 172364 - DNA, 82 bp, Homo sapiens; identical to SEQ ID NO: 84825
  chr12:117583675-117583757
  hypo

SEQ ID NO: 172365 - DNA, 181 bp, Homo sapiens; identical to SEQ ID NO: 84826
  chr12:117586329-117586510
  hypo

SEQ ID NO: 172366 - DNA, 62 bp, Homo sapiens
  chr12:117588318-117588380
  hypo
tgtgtgtgtacttaaacaaaacgtattctaaccactcacccgcaactggcttattcaattgc

SEQ ID NO: 172367 - DNA, 44 bp, Homo sapiens; identical to SEQ ID NO: 26573
  chr12:117588695-117588739
  hypo

SEQ ID NO: 172368 - DNA, 104 bp, Homo sapiens; identical to SEQ ID NO: 26574
  chr12:117588798-117588902
  hypo

SEQ ID NO: 172369 - DNA, 290 bp, Homo sapiens; identical to SEQ ID NO: 84829
  chr12:117593453-117593743
  hypo

SEQ ID NO: 172370 - DNA, 30 bp, Homo sapiens
  chr12:117595805-117595835
  hypo
gtagcccaccgccccgtgctgccccgggtc

SEQ ID NO: 172371 - DNA, 87 bp, Homo sapiens
  chr12:117597669-117597756
  hypo
taattacccccaccttcgctggatgtgtggctgagcgcgaagggagagggcagaaatgaagacattgtgcctcggggcctggcgtat

SEQ ID NO: 172372 - DNA, 330 bp, Homo sapiens; identical to SEQ ID NO: 84830
  chr12:117599138-117599468
  hypo

SEQ ID NO: 172373 - DNA, 358 bp, Homo sapiens
  chr12:117600036-117600394
  hypo
tggatcatgatgaggacgaaggtctggcagcaggaaggagaaggtgcctgtgtgctggcttcttcagaagcgctctggccttggcccactgtaccacgggatgccgcatggggtgggctagggcatcagcttgcctgcactgaactcctagtgccgtcacggcatgtgcaggagacctggctaagttatttaacttctccctgcctcagtttcattatttcccatatggcaaaaagaaaaataatatctaccctatagggctgctaagaagatggaaggaggcgttcagtcagtactcccgacttaaaatctcaccatcccgccctctctatgtccatacagccgtcataaccctgca

SEQ ID NO: 172374 - DNA, 166 bp, Homo sapiens
  chr12:117600621-117600787
  hypo
gctgacatctgcaggcgccacaccctcccacccctggaccacgtgcaggctgttcccactgactggagtcacgtacttttctgccctctgaagttgtttttcatttttcaaggtcacacctgaaacccttcctctggagaggaaccttgtccgatttcttcagcac

SEQ ID NO: 172375 - DNA, 30 bp, Homo sapiens
  chr12:117721130-117721160
  hypo
tgctgggatttcgggcgtgagccacagcgc

SEQ ID NO: 172376 - DNA, 30 bp, Homo sapiens; identical to SEQ ID NO: 50179
  chr12:117747574-117747604
  hypo

SEQ ID NO: 172377 - DNA, 88 bp, Homo sapiens; identical to SEQ ID NO: 26579
  chr12:117788577-117788665
  hypo

SEQ ID NO: 172378 - DNA, 192 bp, Homo sapiens; identical to SEQ ID NO: 50182
  chr12:117799086-117799278
  hypo

SEQ ID NO: 172379 - DNA, 138 bp, Homo sapiens; identical to SEQ ID NO: 50183
  chr12:117799330-117799468
  hypo

SEQ ID NO: 172380 - DNA, 601 bp, Homo sapiens; identical to SEQ ID NO: 26582
  chr12:118198706-118199307
  hypo

SEQ ID NO: 172381 - DNA, 25 bp, Homo sapiens
  chr12:118208772-118208797
  hypo
ctccgtctcaaaaaaaaaaaaaaaa

SEQ ID NO: 172382 - DNA, 30 bp, Homo sapiens; identical to SEQ ID NO: 50184
  chr12:118274656-118274686
  hypo

SEQ ID NO: 172383 - DNA, 197 bp, Homo sapiens; identical to SEQ ID NO: 84838
  chr12:118293043-118293240
  hypo

SEQ ID NO: 172384 - DNA, 226 bp, Homo sapiens; identical to SEQ ID NO: 84839
  chr12:118293459-118293685
  hypo

SEQ ID NO: 172385 - DNA, 60 bp, Homo sapiens; identical to SEQ ID NO: 84840
  chr12:118313382-118313442
  hypo

SEQ ID NO: 172386 - DNA, 58 bp, Homo sapiens; identical to SEQ ID NO: 84841
  chr12:118318418-118318476
  hypo

SEQ ID NO: 172387 - DNA, 80 bp, Homo sapiens; identical to SEQ ID NO: 84842
  chr12:118331633-118331713
  hypo

SEQ ID NO: 172388 - DNA, 19 bp, Homo sapiens
  chr12:118332012-118332031
  hypo
ccaaaattcttaaataaag

SEQ ID NO: 172389 - DNA, 30 bp, Homo sapiens; identical to SEQ ID NO: 84844
  chr12:118334537-118334567
  hypo

SEQ ID NO: 172390 - DNA, 34 bp, Homo sapiens
  chr12:118361693-118361727
  hypo
ttttttgagacaagagtttcacgcttgttgccca

SEQ ID NO: 172391 - DNA, 33 bp, Homo sapiens
  chr12:118361966-118361999
  hypo
gccactgcgcccggcctatatttgcttttttaa

SEQ ID NO: 172392 - DNA, 30 bp, Homo sapiens
  chr12:118461048-118461078
  hypo
tcttcaggggcctagcgcagttcttttctc

SEQ ID NO: 172393 - DNA, 108 bp, Homo sapiens
  chr12:118461362-118461470
  hypo
ttggcagcctttcttcggcatcttgttctgccgagtgactgtcattctgggcagatccccatgtgagaacattgggtacctacagaatggaaccggtgtcataagcaa

SEQ ID NO: 172394 - DNA, 28 bp, Homo sapiens
  chr12:118473719-118473747
  hypo
aatgaaccaggccaggcgcagtggctca

SEQ ID NO: 172395 - DNA, 108 bp, Homo sapiens
  chr12:118474192-118474300
  hypo
ggtatcgtaagaagccgtgacaagcagggcagagtcgggggagaagtcacaagagacaacactgctttgatggccctctagcttccgaattaacgtgtaggacctcat

SEQ ID NO: 172396 - DNA, 30 bp, Homo sapiens; identical to SEQ ID NO: 84847
  chr12:118476063-118476093
  hypo

SEQ ID NO: 172397 - DNA, 121 bp, Homo sapiens; identical to SEQ ID NO: 84848
  chr12:118481548-118481669
  hypo

SEQ ID NO: 172398 - DNA, 18 bp, Homo sapiens
  chr12:118481908-118481926
  hypo
ggcaaaactctatctcaa

SEQ ID NO: 172399 - DNA, 30 bp, Homo sapiens
  chr12:118484377-118484407
  hypo
gaatgtcacttcgatcggctgcctctccac

SEQ ID NO: 172400 - DNA, 49 bp, Homo sapiens; identical to SEQ ID NO: 84850
  chr12:118533280-118533329
  hypo

SEQ ID NO: 172401 - DNA, 326 bp, Homo sapiens; identical to SEQ ID NO: 26587
  chr12:118583594-118583920
  hypo

SEQ ID NO: 172402 - DNA, 30 bp, Homo sapiens; identical to SEQ ID NO: 26588
  chr12:118588914-118588944
  hypo

SEQ ID NO: 172403 - DNA, 214 bp, Homo sapiens; identical to SEQ ID NO: 26589
  chr12:118590037-118590251
  hypo

SEQ ID NO: 172404 - DNA, 30 bp, Homo sapiens; identical to SEQ ID NO: 84854
  chr12:118626750-118626780
  hypo

SEQ ID NO: 172405 - DNA, 20 bp, Homo sapiens
  chr12:118648811-118648831
  hypo
gattacgggcatgagccgcc

SEQ ID NO: 172406 - DNA, 30 bp, Homo sapiens
  chr12:118656893-118656923
  hypo
gctacttccagagcccgattctgagaagta

SEQ ID NO: 172407 - DNA, 30 bp, Homo sapiens
  chr12:118746444-118746474
  hypo
tgtaatttggccgggcgcggtggctcacac

SEQ ID NO: 172408 - DNA, 90 bp, Homo sapiens; identical to SEQ ID NO: 84855
  chr12:118860391-118860481
  hypo

SEQ ID NO: 172409 - DNA, 30 bp, Homo sapiens
  chr12:118860720-118860750
  hypo
attacaggcgtgagccgccacgcctggcca

SEQ ID NO: 172410 - DNA, 32 bp, Homo sapiens
  chr12:118870266-118870298
  hypo
ggactagaggccgggcgcggtggctcacgcct

SEQ ID NO: 172411 - DNA, 32 bp, Homo sapiens
  chr12:118870537-118870569
  hypo
gtgacagagtgagaattcgtctcaaaaaaaaa

SEQ ID NO: 172412 - DNA, 27 bp, Homo sapiens
  chr12:119002845-119002872
  hypo
aaccccgtctctactaaaaatggttcc

SEQ ID NO: 172413 - DNA, 30 bp, Homo sapiens; identical to SEQ ID NO: 50193
  chr12:119421330-119421360
  hypo

SEQ ID NO: 172414 - DNA, 100 bp, Homo sapiens; identical to SEQ ID NO: 26591
  chr12:119626323-119626423
  hypo

SEQ ID NO: 172415 - DNA, 30 bp, Homo sapiens
  chr12:119882480-119882510
  hypo
aggtcttagagaccacgctggccactcttc

SEQ ID NO: 172416 - DNA, 26 bp, Homo sapiens
  chr12:119882960-119882986
  hypo
aggcgcggtggctcacgcctttaatc

SEQ ID NO: 172417 - DNA, 30 bp, Homo sapiens
  chr12:120115154-120115184
  hypo
gcatgtgtgctgagacgaggaatgcacgtg

SEQ ID NO: 172418 - DNA, 52 bp, Homo sapiens; identical to SEQ ID NO: 26592
  chr12:120117232-120117284
  hypo

SEQ ID NO: 172419 - DNA, 379 bp, Homo sapiens
  chr12:120117589-120117968
  hypo
ttggacaagcccttgcgctgcctgatttgggaagagaggtcggcctgagcgctgcctcctgtcctttgatatctggcactgggaagtaaaggggagaatcttggtttccaaatcccaaatgctcaccgctgcctttgttccctcacagtgtgatccagctttgcttcctgagcccaatcacgtcatgctgaaccacctatacgcgctgtctatcaaggtaatgacatgtctgtccccatgagagctgtgttgcccagtgtgtgctctgaggacccccagcagtggaatgacctggcgggactgacttaaagggcagcttccagggtctggcacaggccatcaggctcaggttctgaagctggcccgggaatttgtggtt

SEQ ID NO: 172420 - DNA, 30 bp, Homo sapiens
  chr12:120119493-120119523
  hypo
gttgcgtttcagtaccgttcttgtggctct

SEQ ID NO: 172421 - DNA, 154 bp, Homo sapiens; identical to SEQ ID NO: 84863
  chr12:120127977-120128131
  hypo

SEQ ID NO: 172422 - DNA, 197 bp, Homo sapiens; identical to SEQ ID NO: 26595
  chr12:120134817-120135014
  hypo

SEQ ID NO: 172423 - DNA, 30 bp, Homo sapiens
  chr12:120135743-120135773
  hypo
agctgaagttttccacgcatgggaggacaa

SEQ ID NO: 172424 - DNA, 395 bp, Homo sapiens
  chr12:120137278-120137673
  hypo
ctggtatgcgtgccccggtgcagttccctggccttgaatctgggctgactctgcggtctgctctaaccagtagagcgtggtggaagtgagcacgcttgccagcttccgcttctatattcttggaagaagccagcgtggaaagcaacaaggcctccagccaccagccgcagctaagcgcccacattatggccagcactcattgcgtgccatgtttgtgagcctgtcttgggctttctagttgtcccagtggccctgctgataccacatgaagcagaactgtccagtcaagccacggagttggggccaataataagctgttgtttgaagtcactaagctttcagatggcttgttatgcagcaagagagaaacaaaatagcctcgaagggtatctggg

SEQ ID NO: 172425 - DNA, 1359 bp, Homo sapiens
  chr12:120147740-120149099
  hypo
ggcccacggtggtttcgttgcaatcaggacaaagggtttggctttagatagtcttcgaggcttagcactcttcacttggcctaacagtgggatgttctttgggaatgtcagactgtgctaaactggatactggaagggaactgaatctggacagagggggtccattagctgaggcttgggcatctatggggacacagagataagagctacaacggctcctctctactattttgtgttttacgagcatgaaacgtggcttcaacatattggctcccttgaaagtaaagaaaaaacaccatgtccttggcctcacacctgctatcatgagtagcttctccaggtccttgataatataaatttggaagactgctccaattcctgggacatgggttagggagtttttcaagacattcagggcgtagagcccttcctcggtgcccaccaacaccacctgcaagggcagaagtccgaaggcagaacataagcacggtcacgtcaccagaacaatctctagtaagagcaacaaggcctccacagccctttctttcttgatggggtgtggctgtaaccagacaccagctggccgtgcccatgcaagcattacctggtcactgaagggcagcgtgcagttcatgtctagacggtcatcaccttccagtttcagcagggagtttccaagcagtttcttttcataggtgaaagaaaagaaaaacagaagacatcgtgaggctgatctgtttatgaccaaaccatccagagaaaccaagagaaggttaaggccaagttattcctggaaatgctcagaaacgcacatatgctcttagctcagcccgtattttgatctgagctccaaatgcaaaatgcgagtgctattggtatctctggggcagctgttaattagcatctgagttataatttggctgggatgcagaaataagggagggtagtagacatggaaagctattctgtaataagaaataagctgaagctaaggagatttcacctgcgcagggttaataagacacatgaaagactccttcccccataaggctgcagcagaagtgcaaaggcgccgtgttagcagcgagccagcacgcctctgcatctctttacctgaacccaggcaggcagaagctcgtaagaaacacagtcgcgggcctattgtacacatattaacaaggatttcagtaaaagctcacgtgtgaaacgaccaacaagtcatccaaacaggtctaaccactgagtaaagcccttttcaggaggcttgtggttaagaatctgccaattgctaacacataaagtgtttattaggagtgaagagtctgaaaagagctgtttggtcttcgctggagcaaacgt

SEQ ID NO: 172426 - DNA, 103 bp, Homo sapiens; identical to SEQ ID NO: 84869
  chr12:120150399-120150502
  hypo

SEQ ID NO: 172427 - DNA, 267 bp, Homo sapiens; identical to SEQ ID NO: 84870
  chr12:120151875-120152142
  hypo

SEQ ID NO: 172428 - DNA, 435 bp, Homo sapiens; identical to SEQ ID NO: 84871
  chr12:120155993-120156428
  hypo

SEQ ID NO: 172429 - DNA, 86 bp, Homo sapiens
  chr12:120165249-120165335
  hypo
tcagaagggggaaggcgaggaggggagtgagggatgaaaaattacctatcgggtacgatatacactatttgcgtgacaggtacacg

SEQ ID NO: 172430 - DNA, 311 bp, Homo sapiens; identical to SEQ ID NO: 84872
  chr12:120172971-120173282
  hypo

SEQ ID NO: 172431 - DNA, 305 bp, Homo sapiens; identical to SEQ ID NO: 84873
  chr12:120186342-120186647
  hypo

SEQ ID NO: 172432 - DNA, 30 bp, Homo sapiens; identical to SEQ ID NO: 84874
  chr12:120186872-120186902
  hypo

SEQ ID NO: 172433 - DNA, 94 bp, Homo sapiens
  chr12:120189896-120189990
  hypo
ttccagctctgtcttcgcctggcgaagctggctctccagggccgcccgtgcagcctgcagggctgtcaactgtgactcgcgctcctgcagggag

SEQ ID NO: 172434 - DNA, 98 bp, Homo sapiens; identical to SEQ ID NO: 84875
  chr12:120214486-120214584
  hypo

SEQ ID NO: 172435 - DNA, 305 bp, Homo sapiens; identical to SEQ ID NO: 84876
  chr12:120222342-120222647
  hypo

SEQ ID NO: 172436 - DNA, 31 bp, Homo sapiens; identical to SEQ ID NO: 26603
  chr12:120234817-120234848
  hypo

SEQ ID NO: 172437 - DNA, 364 bp, Homo sapiens
  chr12:120241059-120241423
  hypo
cggcagttcttcacccgagaagcctgaggggctcagctggcacggagaggatgaaacccacgaattcttctctggttcatcaaaattggaggtgtcatcgtcagacttgagggtgggaacgaaggggggaggagctggttaaagaaaaacaagaaaggaggcggggaggaaaaaaaatttcagccggattcaacactgttgcggagaagatcgtcttactccttcggcgctggcgatggcactgcagcgcctgctttcaatctagctcgcaacctcggctcctacagcaacaagagattaaccccttctctgccaacatggccaccaacccgcagacaggctgccttcccgcctggggtaaact

SEQ ID NO: 172438 - DNA, 36 bp, Homo sapiens
  chr12:120241908-120241944
  hypo
tacagcacccctgcgcgctgacggtgggaatgcacg

SEQ ID NO: 172439 - DNA, 30 bp, Homo sapiens
  chr12:120242153-120242183
  hypo
ggcgggccagccaggcgagttagagccgag

SEQ ID NO: 172440 - DNA, 30 bp, Homo sapiens; identical to SEQ ID NO: 84880
  chr12:120246512-120246542
  hypo

SEQ ID NO: 172441 - DNA, 37 bp, Homo sapiens; identical to SEQ ID NO: 84881
  chr12:120265238-120265275
  hypo

SEQ ID NO: 172442 - DNA, 17 bp, Homo sapiens
  chr12:120286921-120286938
  hypo
gaggaggattagaaaat

SEQ ID NO: 172443 - DNA, 30 bp, Homo sapiens
  chr12:120311360-120311390
  hypo
ggcgtgagccaccacgcccagcaagttgga

SEQ ID NO: 172444 - DNA, 98 bp, Homo sapiens
  chr12:120339152-120339250
  hypo
acctctattctactttctgtatctatgaatttgcccattttaggcacctcatataagtggaatgatatcatacagcagcccttcgtgcctggctgatt

SEQ ID NO: 172445 - DNA, 30 bp, Homo sapiens
  chr12:120387288-120387318
  hypo
gctactggtctggaccgggtacagtggctc

SEQ ID NO: 172446 - DNA, 31 bp, Homo sapiens; identical to SEQ ID NO: 26604
  chr12:120421162-120421193
  hypo

SEQ ID NO: 172447 - DNA, 33 bp, Homo sapiens
  chr12:120431042-120431075
  hypo
aggcatgagccactgcgccgggccggcaccttt

SEQ ID NO: 172448 - DNA, 30 bp, Homo sapiens; identical to SEQ ID NO: 26605
  chr12:120533272-120533302
  hypo

SEQ ID NO: 172449 - DNA, 30 bp, Homo sapiens; identical to SEQ ID NO: 84885
  chr12:120534554-120534584
  hypo

SEQ ID NO: 172450 - DNA, 30 bp, Homo sapiens; identical to SEQ ID NO: 84886
  chr12:120534783-120534813
  hypo

SEQ ID NO: 172451 - DNA, 30 bp, Homo sapiens
  chr12:120536707-120536737
  hypo
cttccgctcagggtcgtcattcttattacc

SEQ ID NO: 172452 - DNA, 150 bp, Homo sapiens
  chr12:120540009-120540159
  hypo
gatagtcacaggtctctctaccgggattaaccaaaataaagcagctgaaatcctagcgacaggaccaacccagagcaaggattcatgaggtcagcgcccagaccagccaacggcatgagggcttgcctcgcctgggcctgcagccccagg

SEQ ID NO: 172453 - DNA, 30 bp, Homo sapiens
  chr12:120541384-120541414
  hypo
acatggccactgtccggccagactccagcc

SEQ ID NO: 172454 - DNA, 30 bp, Homo sapiens; identical to SEQ ID NO: 26606
  chr12:120541722-120541752
  hypo

SEQ ID NO: 172455 - DNA, 131 bp, Homo sapiens; identical to SEQ ID NO: 84888
  chr12:120543003-120543134
  hypo

SEQ ID NO: 172456 - DNA, 36 bp, Homo sapiens; identical to SEQ ID NO: 26607
  chr12:120545352-120545388
  hypo

SEQ ID NO: 172457 - DNA, 298 bp, Homo sapiens; identical to SEQ ID NO: 26608
  chr12:120565537-120565835
  hypo

SEQ ID NO: 172458 - DNA, 31 bp, Homo sapiens; identical to SEQ ID NO: 26609
  chr12:120571412-120571443
  hypo

SEQ ID NO: 172459 - DNA, 128 bp, Homo sapiens
  chr12:120574315-120574443
  hypo
aagaggctgagtgtctcgagcagagccgccttcacattccagctgaacctgtcccccaggatgcggatcagagggccagtgatgctgaccacggagggcctcagggcgtcagccgaggtcaggcggat

SEQ ID NO: 172460 - DNA, 30 bp, Homo sapiens; identical to SEQ ID NO: 26610
  chr12:120578177-120578207
  hypo

SEQ ID NO: 172461 - DNA, 256 bp, Homo sapiens; identical to SEQ ID NO: 84894
  chr12:120580289-120580545
  hypo

SEQ ID NO: 172462 - DNA, 116 bp, Homo sapiens; identical to SEQ ID NO: 84895
  chr12:120597712-120597828
  hypo

SEQ ID NO: 172463 - DNA, 172 bp, Homo sapiens; identical to SEQ ID NO: 26612
  chr12:120613495-120613667
  hypo

SEQ ID NO: 172464 - DNA, 202 bp, Homo sapiens
  chr12:120620160-120620362
  hypo
ccatgtttgtccccagaggtgcgctggataagctcccagggatgcagccctctatctaaccagcaggctgcttcatggagcggtacttgtgtttcctaaggccggtcatcactggcacctacctgcctgggactctccagtttccacagtcatctcaaccctcaacgaaacctggctttgcgacaactctttgaggtggaca

SEQ ID NO: 172465 - DNA, 283 bp, Homo sapiens; identical to SEQ ID NO: 84898
  chr12:120647680-120647963
  hypo

SEQ ID NO: 172466 - DNA, 30 bp, Homo sapiens
  chr12:120651927-120651957
  hypo
ccagcccgtaccttcgggaccaaagaaggc

SEQ ID NO: 172467 - DNA, 76 bp, Homo sapiens; identical to SEQ ID NO: 84899
  chr12:120662006-120662082
  hypo

SEQ ID NO: 172468 - DNA, 30 bp, Homo sapiens; identical to SEQ ID NO: 84900
  chr12:120720047-120720077
  hypo

SEQ ID NO: 172469 - DNA, 90 bp, Homo sapiens
  chr12:120725459-120725549
  hypo
gcacgttcaccctcccgcttcttcccctccctgacccgtgacagccccgtgaaagctgcagaacacttacaaatgtatgtatcaggccag

SEQ ID NO: 172470 - DNA, 121 bp, Homo sapiens
  chr12:120736008-120736129
  hypo
aaaaaaaaaaaaaaaaaggagggggctgtcatatgagtttccccgcctagtagatcctacagctactgactttcgctgttgctggagctactactccctgtgtactaagttaaaaagaatc

SEQ ID NO: 172471 - DNA, 30 bp, Homo sapiens; identical to SEQ ID NO: 84901
  chr12:120741550-120741580
  hypo

SEQ ID NO: 172472 - DNA, 121 bp, Homo sapiens; identical to SEQ ID NO: 84902
  chr12:120758713-120758834
  hypo

SEQ ID NO: 172473 - DNA, 30 bp, Homo sapiens
  chr12:120822054-120822084
  hypo
gcggtgagctatgatcgtgccactgcattc

SEQ ID NO: 172474 - DNA, 23 bp, Homo sapiens
  chr12:120868613-120868636
  hypo
ttttttttttttgagacggagtt

SEQ ID NO: 172475 - DNA, 241 bp, Homo sapiens; identical to SEQ ID NO: 26615
  chr12:120908354-120908595
  hypo

SEQ ID NO: 172476 - DNA, 44 bp, Homo sapiens
  chr12:120909712-120909756
  hypo
tgcttgtaggatttttatcagacggaaataagcaagagattctc

SEQ ID NO: 172477 - DNA, 30 bp, Homo sapiens
  chr12:120926937-120926967
  hypo
ttacttccatctacacgtactccgccctca

SEQ ID NO: 172478 - DNA, 37 bp, Homo sapiens; identical to SEQ ID NO: 84904
  chr12:120927817-120927854
  hypo

SEQ ID NO: 172479 - DNA, 30 bp, Homo sapiens
  chr12:120951965-120951995
  hypo
acactagcgactgtccgccttctgaccagt

SEQ ID NO: 172480 - DNA, 19 bp, Homo sapiens
  chr12:120952230-120952249
  hypo
aagagggcagaatagcggc

SEQ ID NO: 172481 - DNA, 37 bp, Homo sapiens; identical to SEQ ID NO: 26616
  chr12:120956374-120956411
  hypo

SEQ ID NO: 172482 - DNA, 30 bp, Homo sapiens
  chr12:120971343-120971373
  hypo
ccacaggtgcgcaccgccacgccaggctaa

SEQ ID NO: 172483 - DNA, 41 bp, Homo sapiens; identical to SEQ ID NO: 84906
  chr12:120983606-120983647
  hypo

SEQ ID NO: 172484 - DNA, 30 bp, Homo sapiens
  chr12:120984227-120984257
  hypo
tccaagcgttataatcgcaaacgtgaactt

SEQ ID NO: 172485 - DNA, 32 bp, Homo sapiens; identical to SEQ ID NO: 26617
  chr12:120991483-120991515
  hypo

SEQ ID NO: 172486 - DNA, 22 bp, Homo sapiens
  chr12:121031704-121031726
  hypo
gagccaccgcacccagccagca

SEQ ID NO: 172487 - DNA, 31 bp, Homo sapiens; identical to SEQ ID NO: 26618
  chr12:121038110-121038141
  hypo

SEQ ID NO: 172488 - DNA, 254 bp, Homo sapiens; identical to SEQ ID NO: 123210
  chr12:121077957-121078211
  hypo

SEQ ID NO: 172489 - DNA, 30 bp, Homo sapiens; identical to SEQ ID NO: 84911
  chr12:121093694-121093724
  hypo

SEQ ID NO: 172490 - DNA, 30 bp, Homo sapiens; identical to SEQ ID NO: 26619
  chr12:121104894-121104924
  hypo

SEQ ID NO: 172491 - DNA, 22 bp, Homo sapiens
  chr12:121120721-121120743
  hypo
ttacaggcgtgagccaccgtgc

SEQ ID NO: 172492 - DNA, 30 bp, Homo sapiens
  chr12:121134748-121134778
  hypo
actgggagttaggtacggtctgaagttatg

SEQ ID NO: 172493 - DNA, 39 bp, Homo sapiens
  chr12:121135002-121135041
  hypo
gcatccaagacgtttcggttatgtcgggtcctcagatcg

SEQ ID NO: 172494 - DNA, 30 bp, Homo sapiens; identical to SEQ ID NO: 84913
  chr12:121154632-121154662
  hypo

SEQ ID NO: 172495 - DNA, 30 bp, Homo sapiens; identical to SEQ ID NO: 26620
  chr12:121159497-121159527
  hypo

SEQ ID NO: 172496 - DNA, 95 bp, Homo sapiens; identical to SEQ ID NO: 26621
  chr12:121166588-121166683
  hypo

SEQ ID NO: 172497 - DNA, 30 bp, Homo sapiens; identical to SEQ ID NO: 84916
  chr12:121174995-121175025
  hypo

SEQ ID NO: 172498 - DNA, 30 bp, Homo sapiens; identical to SEQ ID NO: 84917
  chr12:121175402-121175432
  hypo

SEQ ID NO: 172499 - DNA, 30 bp, Homo sapiens; identical to SEQ ID NO: 84918
  chr12:121175804-121175834
  hypo

SEQ ID NO: 172500 - DNA, 30 bp, Homo sapiens; identical to SEQ ID NO: 26622
  chr12:121177325-121177355
  hypo

SEQ ID NO: 172501 - DNA, 30 bp, Homo sapiens
  chr12:121197537-121197567
  hypo
gccaggaggcacaagcgaaggaggaaaggt

SEQ ID NO: 172502 - DNA, 41 bp, Homo sapiens
  chr12:121197974-121198015
  hypo
ctggtgtcgggatcccggggctggatcgcttgtcttcagac

SEQ ID NO: 172503 - DNA, 180 bp, Homo sapiens
  chr12:121198380-121198560
  hypo
gaaccagaagcgaagcggagtctgccgcatgaattcttaagacctcaggttatctaggaaatctaccgcacgctaaagtgctcctccgtaagtgctgcagttagaatcttcacagcctccctgcaggatgtttgtatcaagcacctgctaaccactggctccgtgcggtaagacttctga

SEQ ID NO: 172504 - DNA, 136 bp, Homo sapiens
  chr12:121199361-121199497
  hypo
cactgaagaccagaaagagaccgagatggcttccttctgagcctgtaccgctgacatagctctgtagagaagggggttgtataaatgatgtccctaaggcatgtactcccatgtatagacacgagtgctgcattcc

SEQ ID NO: 172505 - DNA, 40 bp, Homo sapiens
  chr12:121199753-121199793
  hypo
cccaagccaccgaaccgttcctatgcggggagctgtcact

SEQ ID NO: 172506 - DNA, 139 bp, Homo sapiens; identical to SEQ ID NO: 84920
  chr12:121200045-121200184
  hypo

SEQ ID NO: 172507 - DNA, 24 bp, Homo sapiens
  chr12:121200413-121200437
  hypo
tgagatggagtctcaccctgtcgc

SEQ ID NO: 172508 - DNA, 42 bp, Homo sapiens; identical to SEQ ID NO: 26623
  chr12:121203844-121203886
  hypo

SEQ ID NO: 172509 - DNA, 222 bp, Homo sapiens; identical to SEQ ID NO: 84923
  chr12:121203945-121204167
  hypo

SEQ ID NO: 172510 - DNA, 242 bp, Homo sapiens; identical to SEQ ID NO: 84924
  chr12:121205141-121205383
  hypo

SEQ ID NO: 172511 - DNA, 150 bp, Homo sapiens; identical to SEQ ID NO: 84925
  chr12:121212804-121212954
  hypo

SEQ ID NO: 172512 - DNA, 32 bp, Homo sapiens; identical to SEQ ID NO: 84926
  chr12:121289696-121289728
  hypo

SEQ ID NO: 172513 - DNA, 111 bp, Homo sapiens
  chr12:121328590-121328701
  hypo
catatacacacaaacacggagcgaaaagtcaacaggccttattatttgatgagaatcaagaatgtctccgaggtatctagctgtgaagccgaaacccgatgctctcaacag

SEQ ID NO: 172514 - DNA, 38 bp, Homo sapiens
  chr12:121352798-121352836
  hypo
tccctgaggccttcccgggaacgcgtcagcacttgagc

SEQ ID NO: 172515 - DNA, 280 bp, Homo sapiens
  chr12:121363904-121364184
  hypo
ttcagaggatcctgtcgtagtcagcctcattccccaactgagaaacccctggcgttggcttgacgggggaaaaacagagctgatctgctatcctgagtcagctgttgggagaacctgacttctcaggtgagacaaggacccccaacaaggcgaggcctgggaatgctacccaagaaaaggaaacagatgtgacccttctgctccgagctcattccatggtgactcaaataaccgagtcttccctggcctctcagctccagcacctcggccattcccgtat

SEQ ID NO: 172516 - DNA, 30 bp, Homo sapiens; identical to SEQ ID NO: 84930
  chr12:121440256-121440286
  hypo

SEQ ID NO: 172517 - DNA, 30 bp, Homo sapiens
  chr12:121524453-121524483
  hypo
acttcacataacacccggatgattgcgtgg

SEQ ID NO: 172518 - DNA, 36 bp, Homo sapiens; identical to SEQ ID NO: 26627
  chr12:121531379-121531415
  hypo

SEQ ID NO: 172519 - DNA, 30 bp, Homo sapiens
  chr12:121622198-121622228
  hypo
tgcttagaaaggaggcgactcctagatcca

SEQ ID NO: 172520 - DNA, 104 bp, Homo sapiens
  chr12:121622521-121622625
  hypo
ctgcccagctgctgccgctggaggatccggaaagagtttccgaagagtgaagggcagtacagtggcttcaagagtccttactgaagccaggcaccgtggctcac

SEQ ID NO: 172521 - DNA, 22 bp, Homo sapiens
  chr12:121641649-121641671
  hypo
taaaaagaggccgggcgcggtg

SEQ ID NO: 172522 - DNA, 89 bp, Homo sapiens; identical to SEQ ID NO: 84932
  chr12:121653375-121653464
  hypo

SEQ ID NO: 172523 - DNA, 30 bp, Homo sapiens
  chr12:121659599-121659629
  hypo
agagcgggagagcacgcggtcagtgtttga

SEQ ID NO: 172524 - DNA, 98 bp, Homo sapiens
  chr12:121667859-121667957
  hypo
gccaggtaaatttccacgtaccctttgttgcatttttcacagtccttaaaaaggaagcgctccaggccgggcgcagtgactcacacctgtaatcctag

SEQ ID NO: 172525 - DNA, 171 bp, Homo sapiens
  chr12:121675680-121675851
  hypo
catcgggcattgaatcgatcacagagtagaaaaatctgcagtccccagaaactcggcctccagctggagaggggaaccagcgtaccctgaaacttccctagcaccttggaagcaagtggaggtcatggttcttccactcggcaacgtgaagctccccgctggaagacaagt

SEQ ID NO: 172526 - DNA, 1000 bp, Homo sapiens; identical to SEQ ID NO: 84933
  chr12:121687591-121688591
  hypo

SEQ ID NO: 172527 - DNA, 31 bp, Homo sapiens; identical to SEQ ID NO: 26630
  chr12:121691829-121691860
  hypo

SEQ ID NO: 172528 - DNA, 136 bp, Homo sapiens; identical to SEQ ID NO: 84935
  chr12:121693276-121693412
  hypo

SEQ ID NO: 172529 - DNA, 150 bp, Homo sapiens
  chr12:121706434-121706584
  hypo
actcacgtggaaagccggcctgccggatcagcttctttttggacagcaccttcattgcctgcaggaaaatgaaggacagcacctttagccaggtcctgtttaaagcagggaggaaaaggggaaggagggcgcagtcggggttcctctact

SEQ ID NO: 172530 - DNA, 179 bp, Homo sapiens; identical to SEQ ID NO: 84937
  chr12:121711832-121712011
  hypo

SEQ ID NO: 172531 - DNA, 31 bp, Homo sapiens; identical to SEQ ID NO: 84938
  chr12:121740281-121740312
  hypo

SEQ ID NO: 172532 - DNA, 78 bp, Homo sapiens; identical to SEQ ID NO: 26632
  chr12:121754199-121754277
  hypo

SEQ ID NO: 172533 - DNA, 153 bp, Homo sapiens; identical to SEQ ID NO: 26633
  chr12:121756056-121756209
  hypo

SEQ ID NO: 172534 - DNA, 30 bp, Homo sapiens; identical to SEQ ID NO: 84941
  chr12:122107438-122107468
  hypo

SEQ ID NO: 172535 - DNA, 30 bp, Homo sapiens
  chr12:122109509-122109539
  hypo
gggagcggtggcacacgcctgtaatcccag

SEQ ID NO: 172536 - DNA, 121 bp, Homo sapiens
  chr12:122136315-122136436
  hypo
aggtgacaaaaaaaaaaaaaaaaaagatcgaagaactgtttcatattacaggcagccaaagagacatgacacctgaatgtgatggagaatcttggattggatcctttgctataaaggatgc

SEQ ID NO: 172537 - DNA, 30 bp, Homo sapiens
  chr12:122141060-122141090
  hypo
agagaagagtccctccgattcgcaacctga

SEQ ID NO: 172538 - DNA, 102 bp, Homo sapiens
  chr12:122158111-122158213
  hypo
aatgcgtgcctcccacgcacagacccccacttaccgctcccgtaacataccgttcatggattctgacacatgactcagaatctgtcccgcacaggacgcata

SEQ ID NO: 172539 - DNA, 31 bp, Homo sapiens; identical to SEQ ID NO: 26634
  chr12:122166515-122166546
  hypo

SEQ ID NO: 172540 - DNA, 213 bp, Homo sapiens; identical to SEQ ID NO: 84944
  chr12:122179048-122179261
  hypo

SEQ ID NO: 172541 - DNA, 281 bp, Homo sapiens; identical to SEQ ID NO: 26635
  chr12:122182116-122182397
  hypo

SEQ ID NO: 172542 - DNA, 376 bp, Homo sapiens; identical to SEQ ID NO: 84946
  chr12:122192679-122193055
  hypo

SEQ ID NO: 172543 - DNA, 136 bp, Homo sapiens; identical to SEQ ID NO: 84947
  chr12:122206326-122206462
  hypo

SEQ ID NO: 172544 - DNA, 30 bp, Homo sapiens
  chr12:122208472-122208502
  hypo
gagccgtgcctggagcgcccgcgtgctggg

SEQ ID NO: 172545 - DNA, 582 bp, Homo sapiens
  chr12:122208735-122209317
  hypo
taggtggggcctcagcgagacacatgcctgcgttgctctcccctcctgagcactttccgttctctccctctcccgagaattaaaggctggtgggtgtctcaccactacgtctccacattcctgtccggagtgatgctgacctggtgagtagcccctcgctgggcccctccagcctcccagggagtagagcctggggcccgggaatggggagggggctgatccagacagcggtggggggtgtgctccagggccaacttgggaaagaaagtatgagcctgcagctgcgccgggctgcgcgggccccacccagcccgtgaggggttctccagggaatggtttcgggtgtccctggccagggcagaggtagcggggctgcaaggctggagggagcgagtgaggctgggcactgaaggagactgcggaggacagaggggtcacagggagttagcgcttctgcacggccatgtggacccctgtgcttctagaaaggaagatgggatgacctcgcccagccccagggatagaagggcggaagtctggacctcagtttgactttatacaccttttcgcctcttctggttg

SEQ ID NO: 172546 - DNA, 30 bp, Homo sapiens
  chr12:122212505-122212535
  hypo
gagctgtgggggcagcggaccccctcagcg

SEQ ID NO: 172547 - DNA, 333 bp, Homo sapiens
  chr12:122212933-122213266
  hypo
ctggtgggtgagcagcgcctgccttcctctccagttctggcagctctacaatgccgtcacgctgtttgagctctccagccacgaggaatgcagagaatggcaggtatggggggtgggggcatgctcgggggaggttcccgggagggctggggtggcagggatggggtgtatgtgtggcatgctggggtgcggattcctggggagggctgggatggcagatgtgggggtggggtgtgtgcgtgtgtgtggtgtgctgtggggaggttcctggggcgggctgggctggcaggtgtggggtgttgtggggggcctgcttggcgggaggcttctgga

SEQ ID NO: 172548 - DNA, 336 bp, Homo sapiens
  chr12:122213468-122213804
  hypo
gcagggcagatgccccagcctcgccctcctctctggactcccccaggtgttcgtactggcgttcaccttcctcatcctcttcctcggcaacttcctgaccacgctcaaagtcgtgcatgccaagctccagaagaacagaggcaagacaaagcagccgtgagcctcgggctcctgtgccctcggcccggacttcagactgcagggggctcccgggctccttcccagcagccctctcaggcccgtggcatcgctgggagagggcccaggccctggtcccccagtggaccccagtggtctagaggaatgtgagccccgcctgtccgcacagtgtccgcc

SEQ ID NO: 172549 - DNA, 214 bp, Homo sapiens; identical to SEQ ID NO: 50232
  chr12:122214096-122214310
  hypo

SEQ ID NO: 172550 - DNA, 170 bp, Homo sapiens; identical to SEQ ID NO: 84951
  chr12:122218792-122218962
  hypo

SEQ ID NO: 172551 - DNA, 1023 bp, Homo sapiens; identical to SEQ ID NO: 50234
  chr12:122231273-122232296
  hypo

SEQ ID NO: 172552 - DNA, 103 bp, Homo sapiens; identical to SEQ ID NO: 84953
  chr12:122246167-122246270
  hypo

SEQ ID NO: 172553 - DNA, 205 bp, Homo sapiens; identical to SEQ ID NO: 84954
  chr12:122252456-122252661
  hypo

SEQ ID NO: 172554 - DNA, 30 bp, Homo sapiens
  chr12:122252917-122252947
  hypo
actgttaactggaaacgctgccgtggaccc

SEQ ID NO: 172555 - DNA, 30 bp, Homo sapiens
  chr12:122253363-122253393
  hypo
cacctcccctcatgccgccttttacacgga

SEQ ID NO: 172556 - DNA, 30 bp, Homo sapiens; identical to SEQ ID NO: 26643
  chr12:122254987-122255017
  hypo

SEQ ID NO: 172557 - DNA, 80 bp, Homo sapiens
  chr12:122255281-122255361
  hypo
agcgagagcgagaccgggatatggcagacaccccctgtgagctcgccaagcgggaccccaagggcgtgggtgtgcggcgg

SEQ ID NO: 172558 - DNA, 30 bp, Homo sapiens; identical to SEQ ID NO: 84957
  chr12:122257629-122257659
  hypo

SEQ ID NO: 172559 - DNA, 30 bp, Homo sapiens; identical to SEQ ID NO: 84958
  chr12:122261147-122261177
  hypo

SEQ ID NO: 172560 - DNA, 30 bp, Homo sapiens
  chr12:122261400-122261430
  hypo
gggggccgtggcgccggccacctaagaagc

SEQ ID NO: 172561 - DNA, 196 bp, Homo sapiens; identical to SEQ ID NO: 26644
  chr12:122261813-122262009
  hypo

SEQ ID NO: 172562 - DNA, 122 bp, Homo sapiens; identical to SEQ ID NO: 84960
  chr12:122265476-122265598
  hypo

SEQ ID NO: 172563 - DNA, 31 bp, Homo sapiens; identical to SEQ ID NO: 26645
  chr12:122266346-122266377
  hypo

SEQ ID NO: 172564 - DNA, 30 bp, Homo sapiens; identical to SEQ ID NO: 26646
  chr12:122268182-122268212
  hypo

SEQ ID NO: 172565 - DNA, 111 bp, Homo sapiens; identical to SEQ ID NO: 84963
  chr12:122268639-122268750
  hypo

SEQ ID NO: 172566 - DNA, 30 bp, Homo sapiens
  chr12:122269060-122269090
  hypo
ctcccaagggcaggcgggtcccccagtccc

SEQ ID NO: 172567 - DNA, 212 bp, Homo sapiens; identical to SEQ ID NO: 26647
  chr12:122276668-122276880
  hypo

SEQ ID NO: 172568 - DNA, 42 bp, Homo sapiens; identical to SEQ ID NO: 26648
  chr12:122282338-122282380
  hypo

SEQ ID NO: 172569 - DNA, 155 bp, Homo sapiens
  chr12:122285027-122285182
  hypo
gccaccacaatggatcgcagagagctatattccgtgtgcacctgcgtgtcatccacggaccagaagcggtggaactgcaggtttttcaggtacctgtagggtgggcggtggaacacatatgctctgagcgcctccagggacggcctccatcaccc

SEQ ID NO: 172570 - DNA, 20 bp, Homo sapiens
  chr12:122312672-122312692
  hypo
ttttttttttttgagacgta

SEQ ID NO: 172571 - DNA, 31 bp, Homo sapiens; identical to SEQ ID NO: 26649
  chr12:122319020-122319051
  hypo

SEQ ID NO: 172572 - DNA, 79 bp, Homo sapiens
  chr12:122353721-122353800
  hypo
taacgaggctgaacacgaaatgagcttattttcttttcagaagcccctgaatgtgacagtgatccgcaggggggaaaaa

SEQ ID NO: 172573 - DNA, 118 bp, Homo sapiens; identical to SEQ ID NO: 84969
  chr12:122396581-122396699
  hypo

SEQ ID NO: 172574 - DNA, 35 bp, Homo sapiens; identical to SEQ ID NO: 84970
  chr12:122425315-122425350
  hypo

SEQ ID NO: 172575 - DNA, 59 bp, Homo sapiens; identical to SEQ ID NO: 84971
  chr12:122438022-122438081
  hypo

SEQ ID NO: 172576 - DNA, 380 bp, Homo sapiens
  chr12:122439463-122439843
  hypo
cgagggatggaaatccgagcctgcaacctgctccgtcaaaggtaccccagctggctttgtctgggcatgtagctgtggctcactgatttgttgtagacttcagtacatttatttctcctgatcggtgcaagccactctccctaagactgcacataacaaagcatgtctgttgggaatcccacatgaataagttatgaaaagaacagtgagtggtggcttttgttcccgcgctctgtccgtccttttgtttcttctgggcttattttccctttgttccactgacctgtcatcttgccggcttgggtgggtgaatattggccacccgtagaggatccagtttgacagctgtttcaggagaataggtatgtaaagagagactt

SEQ ID NO: 172577 - DNA, 161 bp, Homo sapiens
  chr12:122444434-122444595
  hypo
ctgactcttacatcccggtttgtgagttctggatcaggaaccaccaagagcctccccggcgccagctctctgctccagacccggtcccacctgcaggtgagggcctcgcacgcacagcgtctgcgctgggagcccatggacttgccgcgctcctgttcagc

SEQ ID NO: 172578 - DNA, 25 bp, Homo sapiens
  chr12:122455086-122455111
  hypo
ccactgtacccggcctctcttttac

SEQ ID NO: 172579 - DNA, 86 bp, Homo sapiens
  chr12:122455989-122456075
  hypo
actccgtctcaatcaaaaaaaggccagaaaattaaaatccacgactcacactaagcgggagtcctttcccacgataatctgggccc

SEQ ID NO: 172580 - DNA, 40 bp, Homo sapiens; identical to SEQ ID NO: 84976
  chr12:122458547-122458587
  hypo

SEQ ID NO: 172581 - DNA, 239 bp, Homo sapiens; identical to SEQ ID NO: 123239
  chr12:122459881-122460120
  hypo

SEQ ID NO: 172582 - DNA, 603 bp, Homo sapiens; identical to SEQ ID NO: 123240
  chr12:122460948-122461551
  hypo

SEQ ID NO: 172583 - DNA, 77 bp, Homo sapiens; identical to SEQ ID NO: 26653
  chr12:122463062-122463139
  hypo

SEQ ID NO: 172584 - DNA, 385 bp, Homo sapiens
  chr12:122471977-122472362
  hypo
aagggagacttcgctcgcaaacatgcatgtaaatacacgcatgcacatacagagcatgcacacacacacacatcctttgcttaccactggtggtgaggctcacgtatcctgcatctttcatatatatatatatatatatatatatatatatatatatatatatatatatatatcttggcgatattgacatatgttaagtgttagtattctgcagatcaccccatgttagtctgtgaagaaccaccttattccctgtaattgttgcatccgatttcattgaatgaatgtaccacgattgatttaacgagtctcctacagttcagccaaggttgtttctaacatgattcctttcgtaaaaaaaaaaaaaaaaaaaaaattgaatggc

SEQ ID NO: 172585 - DNA, 85 bp, Homo sapiens; identical to SEQ ID NO: 84981
  chr12:122472661-122472746
  hypo

SEQ ID NO: 172586 - DNA, 361 bp, Homo sapiens
  chr12:122473250-122473611
  hypo
gaaaaaaggcaaggacgagaagtgtggctcagaggtgaccactccggagaacagttcctccccagggatgatggacatgcatggtgagtgcccatggcctgccagcctctcctgcccagcccggggccttggccaagcactcggtcatgtttttgtttctccagcaggtttgttcacattccaggcaaggggtaggagggctgggcagggcccggcggcctctgtgccaaggagaagagtcagcggaggagaggatgtttcttttcccagcgtaccaagccaagagacataaactaagccagagacatagaaattagaccctctcctcacccagggacaagaaccccgcaggagatgtttc

SEQ ID NO: 172587 - DNA, 121 bp, Homo sapiens
  chr12:122474041-122474162
  hypo
cggcctccaaactggatttctgatttcatgttaatcccaccaggaccttgggaactgcccttccacgtctacacctaacttcctttgctgtttaatttcaaatgttgtaacttagccgggt

SEQ ID NO: 172588 - DNA, 144 bp, Homo sapiens; identical to SEQ ID NO: 84983
  chr12:122474513-122474657
  hypo

SEQ ID NO: 172589 - DNA, 84 bp, Homo sapiens; identical to SEQ ID NO: 84984
  chr12:122474896-122474980
  hypo

SEQ ID NO: 172590 - DNA, 31 bp, Homo sapiens; identical to SEQ ID NO: 9137
  chr12:122478893-122478924
  hypo

SEQ ID NO: 172591 - DNA, 214 bp, Homo sapiens; identical to SEQ ID NO: 26655
  chr12:122479006-122479220
  hypo

SEQ ID NO: 172592 - DNA, 450 bp, Homo sapiens; identical to SEQ ID NO: 26656
  chr12:122480939-122481389
  hypo

SEQ ID NO: 172593 - DNA, 390 bp, Homo sapiens; identical to SEQ ID NO: 84988
  chr12:122481628-122482018
  hypo

SEQ ID NO: 172594 - DNA, 27 bp, Homo sapiens
  chr12:122482996-122483023
  hypo
aagatgggcaccaggcgcggtggctca

SEQ ID NO: 172595 - DNA, 146 bp, Homo sapiens; identical to SEQ ID NO: 26658
  chr12:122483262-122483408
  hypo

SEQ ID NO: 172596 - DNA, 30 bp, Homo sapiens
  chr12:122487297-122487327
  hypo
gctggagaggccgggcgtggtggctcatac

SEQ ID NO: 172597 - DNA, 319 bp, Homo sapiens
  chr12:122491188-122491507
  hypo
gccgcgcccggccagggctcctagtctgagaagtaagtgtcaaccctgctcagactccctgggaaggagggtcttgctgtcccgttcccccgccctctgtgtcccggcctgtcccaggccctgcactgtctccttcttcttcccatcttgcctgcttgcttttaaacttaagcatgggttattttcccctttgttattactctgcctcagaaaccccagcagggaagtcttggtcgcacaggcattctctaggattcgtttcgtgtgtgctttttaacatcagggtaccatggtgtccgggcctcgggtaggatttttg

SEQ ID NO: 172598 - DNA, 21 bp, Homo sapiens
  chr12:122491955-122491976
  hypo
gtcagtcattgctctggcaat

SEQ ID NO: 172599 - DNA, 31 bp, Homo sapiens; identical to SEQ ID NO: 84992
  chr12:122492518-122492549
  hypo

SEQ ID NO: 172600 - DNA, 196 bp, Homo sapiens; identical to SEQ ID NO: 84993
  chr12:122493938-122494134
  hypo

SEQ ID NO: 172601 - DNA, 30 bp, Homo sapiens; identical to SEQ ID NO: 26661
  chr12:122497811-122497841
  hypo

SEQ ID NO: 172602 - DNA, 30 bp, Homo sapiens; identical to SEQ ID NO: 26662
  chr12:122499172-122499202
  hypo

SEQ ID NO: 172603 - DNA, 94 bp, Homo sapiens; identical to SEQ ID NO: 84996
  chr12:122511272-122511366
  hypo

SEQ ID NO: 172604 - DNA, 38 bp, Homo sapiens; identical to SEQ ID NO: 84997
  chr12:122586393-122586431
  hypo

SEQ ID NO: 172605 - DNA, 77 bp, Homo sapiens; identical to SEQ ID NO: 84998
  chr12:122591532-122591609
  hypo

SEQ ID NO: 172606 - DNA, 24 bp, Homo sapiens
  chr12:122596890-122596914
  hypo
aaatgtatgtacaggccgggcgtg

SEQ ID NO: 172607 - DNA, 179 bp, Homo sapiens
  chr12:122602776-122602955
  hypo
tattccaaatggtgcacggtttaggatttatagattgtttatttctgcaactttccatgtaatattttcagacagcggttgatcatgggtaaagcacaataccgcagaaaagggaggaatgccgtacattccagtgttatatttcaacaatacaaaacggtgttcagtgaacactcctt

SEQ ID NO: 172608 - DNA, 493 bp, Homo sapiens; identical to SEQ ID NO: 85001
  chr12:122614570-122615063
  hypo

SEQ ID NO: 172609 - DNA, 30 bp, Homo sapiens
  chr12:122621755-122621785
  hypo
ccagtgactggaacacgtcacacagggttg

SEQ ID NO: 172610 - DNA, 30 bp, Homo sapiens
  chr12:122622042-122622072
  hypo
cctctccgtgtgcatcggagcagagcccca

SEQ ID NO: 172611 - DNA, 533 bp, Homo sapiens
  chr12:122622384-122622917
  hypo
actgctcaggctgcccgcatcagttgcaggaggggtgtggccaccaccagagctgtgctgtggggaggaggcagggctgggtggggaaggcggagcttgcagcacctgggatgcaccggttcagccctgccgttcccagccccagctgtgcaccattctgcagagcgggttttctgtggttcccagtcttgtccctccggctcctcattggagccttcagcttctcgtcgtgccctcctcccacgtagctctctagccctggcccttgggcacccaggatcagcgtagggggtgaggaagggtggacagtgtgcctgcaatgtgcctgtcttagtgaccagcgggttctccagcagaaccggcagatgaagcacatctcagctgagcagaaaaggcgcttcaacatcaagatgtgcttcgacatgctcaacagcctcatctccaacaattccaagctggtgagttgccaagagcgtgggctgtggcagggcaggggagctggcaggacgtgctccctgcgtggtcattgctgg

SEQ ID NO: 172612 - DNA, 172 bp, Homo sapiens
  chr12:122623389-122623561
  hypo
ggagtccccgttacccggcgccagtttgatcacatgaaagacatgtttgacgaatacgtgaaaacccggaccttgcagaattggaagttctggattgtatctttgggttttctttttgctcttcccggccctcagccaatgcactgaagccacagaccgtggcactgtagtt

SEQ ID NO: 172613 - DNA, 285 bp, Homo sapiens
  chr12:122623819-122624104
  hypo
agccagctcggtcctcgaagccacagggagggtgagtgccacccctgctgtgacaggcggaaaccaggactccctccactgagtggtagagcccaatttgaagcctaatggagcatgtccacctctaggggctctcgtgccaaggccaccttgcactcagccttccaggtggcagcacggctctcacggggagtggttcccgcctggtcactccccaccctgccaccgctctgcctctgagtaaacggtcggcacatgtgttgggttgaccgtggcattggggca

SEQ ID NO: 172614 - DNA, 30 bp, Homo sapiens; identical to SEQ ID NO: 85004
  chr12:122631443-122631473
  hypo

SEQ ID NO: 172615 - DNA, 31 bp, Homo sapiens; identical to SEQ ID NO: 26666
  chr12:122667355-122667386
  hypo

SEQ ID NO: 172616 - DNA, 30 bp, Homo sapiens; identical to SEQ ID NO: 26667
  chr12:122684978-122685008
  hypo

SEQ ID NO: 172617 - DNA, 619 bp, Homo sapiens; identical to SEQ ID NO: 50247
  chr12:122688563-122689182
  hypo

SEQ ID NO: 172618 - DNA, 35 bp, Homo sapiens
  chr12:122691181-122691216
  hypo
tggtcacgtggagcgacgtgcggctatccgcagca

SEQ ID NO: 172619 - DNA, 30 bp, Homo sapiens; identical to SEQ ID NO: 85008
  chr12:122691978-122692008
  hypo

SEQ ID NO: 172620 - DNA, 30 bp, Homo sapiens; identical to SEQ ID NO: 85009
  chr12:122692275-122692305
  hypo

SEQ ID NO: 172621 - DNA, 30 bp, Homo sapiens; identical to SEQ ID NO: 123246
  chr12:122711247-122711277
  hypo

SEQ ID NO: 172622 - DNA, 450 bp, Homo sapiens
  chr12:122712003-122712453
  hypo
gagattttcaagcagcggcactcaacaactaggtgtggtctagagaccaattacaacctccgcgtggtccccgagctctcagggagctgcgcacaggcgttcctagcccaggcggggcgctggcaaccctgcccgccctctgcctgtgtcgccaccacagcccacagggctcagatgtggtttcacagacccagatgggctgagcaggcggcacactagtgggtatttcaagccccttcttgtttttttctgaacattgtaaggggttatggggttatagtgcgaacagtttcgtttctaacaaacacattgagagcagtcccatctcctccgagtctgggcaccagaagaaccactggacagtgttcacttgcgaccgcccaactactaaagcaaaagctgttgtcttaaaaaacatgcaagtgcaagcatgcacgggtgtgagaacca

SEQ ID NO: 172623 - DNA, 177 bp, Homo sapiens
  chr12:122734926-122735103
  hypo
agcctctggtctcaacgtttctgtcaattgatcaatacgtaacccagttttatatgtgtttctgcttaaagatgcctgacttaacataattgttgatcactcacactgaactgacagccagcagctctgtgactcgtgcctgaacgaagcgtctctgacacacgtaatgtctccgcc

SEQ ID NO: 172624 - DNA, 30 bp, Homo sapiens
  chr12:122735515-122735545
  hypo
cagccggttctcacccgagcgcattctcct

SEQ ID NO: 172625 - DNA, 32 bp, Homo sapiens; identical to SEQ ID NO: 85011
  chr12:122752534-122752566
  hypo

SEQ ID NO: 172626 - DNA, 30 bp, Homo sapiens
  chr12:122770745-122770775
  hypo
tctctaaataaaaaccgcacattttaaaag

SEQ ID NO: 172627 - DNA, 30 bp, Homo sapiens; identical to SEQ ID NO: 26669
  chr12:122794214-122794244
  hypo

SEQ ID NO: 172628 - DNA, 30 bp, Homo sapiens
  chr12:122828193-122828223
  hypo
tattcccatgtacttcgattctatttgagc

SEQ ID NO: 172629 - DNA, 30 bp, Homo sapiens; identical to SEQ ID NO: 26670
  chr12:122839905-122839935
  hypo

SEQ ID NO: 172630 - DNA, 60 bp, Homo sapiens; identical to SEQ ID NO: 85014
  chr12:122877151-122877211
  hypo

SEQ ID NO: 172631 - DNA, 37 bp, Homo sapiens; identical to SEQ ID NO: 85015
  chr12:122878700-122878737
  hypo

SEQ ID NO: 172632 - DNA, 203 bp, Homo sapiens; identical to SEQ ID NO: 50249
  chr12:122907626-122907829
  hypo

SEQ ID NO: 172633 - DNA, 513 bp, Homo sapiens; identical to SEQ ID NO: 123251
  chr12:122907837-122908350
  hypo

SEQ ID NO: 172634 - DNA, 30 bp, Homo sapiens
  chr12:122922357-122922387
  hypo
gacacagaactgggacgccgcgttacagga

SEQ ID NO: 172635 - DNA, 33 bp, Homo sapiens; identical to SEQ ID NO: 85017
  chr12:122950310-122950343
  hypo

SEQ ID NO: 172636 - DNA, 28 bp, Homo sapiens
  chr12:122950833-122950861
  hypo
gagccaccaagcccggtgcacttaacat

SEQ ID NO: 172637 - DNA, 104 bp, Homo sapiens; identical to SEQ ID NO: 85018
  chr12:122952404-122952508
  hypo

SEQ ID NO: 172638 - DNA, 18 bp, Homo sapiens
  chr12:122952917-122952935
  hypo
taattaatttattttttg

SEQ ID NO: 172639 - DNA, 18 bp, Homo sapiens
  chr12:122953534-122953552
  hypo
tcaaaaataaaataaaat

SEQ ID NO: 172640 - DNA, 288 bp, Homo sapiens
  chr12:122958415-122958703
  hypo
tggtacctcaggctcatccagcgtctgcttttcagatgtttttccctccgggacagggaggtctagctcatttggacaaggtgatgaggcaacggaattgccagttaaaggtgtgtccacaggaacgtcggagtcgctgtttacgctctcggcctgctcaagagctgcccagatccgcctctgctgttcttcaagttcttctagagtcagtgcgtcctcatccacagctccagatgctgttctggtctggggtgagtcactgggagtcagcggcggggtgccctttgg

SEQ ID NO: 172641 - DNA, 144 bp, Homo sapiens
  chr12:122970384-122970528
  hypo
ttttttacgacgacattcttactggcactcgggccaaaaacctgagtcactccgatgactcttttgctctcatattctgcgtccaattcatcaacacatttgatcagctctacttccccagtacatccacgttctaagcacttc

SEQ ID NO: 172642 - DNA, 30 bp, Homo sapiens
  chr12:123001896-123001926
  hypo
ctgcttctggatctcgatttcttccgctcc

SEQ ID NO: 172643 - DNA, 121 bp, Homo sapiens
  chr12:123031661-123031782
  hypo
tgagccactgcgcctggtctgaaatgtaaatttttaatcattaagaagacacgtaggctaggcgtggtggctagcctactaaaaatacaaaaaatacaaaaatacaaaaaattagctgggc

SEQ ID NO: 172644 - DNA, 77 bp, Homo sapiens
  chr12:123031901-123031978
  hypo
acaagagcaaaactctgtctcaaaaaaaaaggacatgtaaatgaaatgtctctattgcagaacgtgctgagtttatg

SEQ ID NO: 172645 - DNA, 165 bp, Homo sapiens
  chr12:123044411-123044576
  hypo
gcgcccggcctatcttaagcatttttaaatttaatggtattaaatacattcataatcacattcggccatcgtccatctccccaactcttttcatcgttgtgaaactgaaactctgcccattaaacacagacttcccatttctccgtctccccagcccctggcaaa

SEQ ID NO: 172646 - DNA, 37 bp, Homo sapiens; identical to SEQ ID NO: 85024
  chr12:123097244-123097281
  hypo

SEQ ID NO: 172647 - DNA, 38 bp, Homo sapiens; identical to SEQ ID NO: 85025
  chr12:123120644-123120682
  hypo

SEQ ID NO: 172648 - DNA, 37 bp, Homo sapiens; identical to SEQ ID NO: 26676
  chr12:123120921-123120958
  hypo

SEQ ID NO: 172649 - DNA, 181 bp, Homo sapiens; identical to SEQ ID NO: 85027
  chr12:123128961-123129142
  hypo

SEQ ID NO: 172650 - DNA, 20 bp, Homo sapiens
  chr12:123136709-123136729
  hypo
cagagtcttgctctttcgcc

SEQ ID NO: 172651 - DNA, 30 bp, Homo sapiens; identical to SEQ ID NO: 85028
  chr12:123211159-123211189
  hypo

SEQ ID NO: 172652 - DNA, 932 bp, Homo sapiens
  chr12:123213912-123214844
  hypo
ctgatgcaactcctgcgaccgaggttcgaaattggcatctcttccggcctttgtgtttttgagtgtcctggctgcttgggtttcagactgcagattttgagcttgttgtagaatttgggaaaggaggggcttgaaaaataatacaccaggggatccagcatgctgttcatgtaggtgaagctgagggttatgtgcagggccccatggacagagggatcgcaggcactcgagggcaccgtccagaggaaatagagtctagcagacacgctgggcaggtagcatgtgatgaacacaattgccaccaccatgatgaaccgggtcgccttcttcatccgagcctgtctggccagctgctgcctccgcctcaggctccaaacaatcttgaaggagcaaaataagatgatgccgaggggcataaagaactccagctggaacatgatgtcatgccagccattggccgactccatgatgaagctctcacaggagacggccgtctcttgcacgcagagatggttctccagcaaaagatacactgttcccaggatgaccagggcccacagggtgcagacgatgccagccgccacccgggtggagatagtgttcaccgcgtggtgggggtggaccactttgaaatacctgtccgcagccaccaccgtaaggaacacgatgctcccggccctgttcatggccaacgtgaagagccccactcggcagggaatgtccccaaaagcccagtgtctacgtctgaggtaatagtctgtccgaaaaggcaggcagatcataaggaggaaatcagccacggccaaattgaaaaggtaaacagtgctgggcttccaggtcttcatgtggaagcagaaaccacacagggcgaccccattgcctagtgcgcccagcacaaaggccacaatgagcagcggcggcatcacctggga

SEQ ID NO: 172653 - DNA, 30 bp, Homo sapiens
  chr12:123215103-123215133
  hypo
gcccgtctcacaagccgcctgcctctggga

SEQ ID NO: 172654 - DNA, 38 bp, Homo sapiens
  chr12:123233815-123233853
  hypo
cttcagccaccgcgcccgccctattactattattatta

SEQ ID NO: 172655 - DNA, 25 bp, Homo sapiens
  chr12:123234881-123234906
  hypo
aaaaaacttgtaagccgggcgcggt

SEQ ID NO: 172656 - DNA, 571 bp, Homo sapiens; identical to SEQ ID NO: 123258
  chr12:123258811-123259382
  hypo

SEQ ID NO: 172657 - DNA, 206 bp, Homo sapiens
  chr12:123324496-123324702
  hypo
tttagaaaagggcaacatttacgtgtataggagtgatttgcccgcagcatggcatgggcgttgagctcgttgttcctgggcatgcgcactgctgtctcgccccgtgacatcctctgctcggttccaccccatcagcccacatggtgatgccctcgtggtgatgcccggcaggccgctgacttcccgacccctgggctgcatattgc

SEQ ID NO: 172658 - DNA, 325 bp, Homo sapiens
  chr12:123325624-123325949
  hypo
ccggctaacctgagacgccttggctgctctgttggcaatgcccttacccgccccctccccgcccaacttggtaatctgcgatgctaacttgaatatcacctcctctgtgcagccacccgctgccgtcctcctgcccaagcctctctgtgctgcccagtcctcatgacattatttgcgctgcttccacatctgccctgacacgctgtggctggcccagcagagcgggaggaagcagacagacatggggtgggcgcatgtgtagaccaggctcgcctgagaagtgggagtgtgtcatctccttgccgagttccctgagcaactgctc

SEQ ID NO: 172659 - DNA, 580 bp, Homo sapiens; identical to SEQ ID NO: 85033
  chr12:123333020-123333600
  hypo

SEQ ID NO: 172660 - DNA, 30 bp, Homo sapiens; identical to SEQ ID NO: 26679
  chr12:123339276-123339306
  hypo

SEQ ID NO: 172661 - DNA, 337 bp, Homo sapiens; identical to SEQ ID NO: 85035
  chr12:123340659-123340996
  hypo

SEQ ID NO: 172662 - DNA, 30 bp, Homo sapiens; identical to SEQ ID NO: 26681
  chr12:123341720-123341750
  hypo

SEQ ID NO: 172663 - DNA, 78 bp, Homo sapiens
  chr12:123359582-123359660
  hypo
tcagatgttttcatataaatacgataactttttttttaaattgagacagagtctcgctctgtcaccgagactggaatg

SEQ ID NO: 172664 - DNA, 502 bp, Homo sapiens; identical to SEQ ID NO: 50254
  chr12:123380318-123380820
  hypo

SEQ ID NO: 172665 - DNA, 31 bp, Homo sapiens
  chr12:123400986-123401017
  hypo
ctggaacagaaaagggcgttggggaaaaact

SEQ ID NO: 172666 - DNA, 31 bp, Homo sapiens
  chr12:123401349-123401380
  hypo
agtccagccgacgctccgacaggtcacgggg

SEQ ID NO: 172667 - DNA, 88 bp, Homo sapiens; identical to SEQ ID NO: 26682
  chr12:123409956-123410044
  hypo

SEQ ID NO: 172668 - DNA, 30 bp, Homo sapiens; identical to SEQ ID NO: 50255
  chr12:123414330-123414360
  hypo

SEQ ID NO: 172669 - DNA, 31 bp, Homo sapiens; identical to SEQ ID NO: 9141
  chr12:123414419-123414450
  hypo

SEQ ID NO: 172670 - DNA, 30 bp, Homo sapiens; identical to SEQ ID NO: 85041
  chr12:123414623-123414653
  hypo

SEQ ID NO: 172671 - DNA, 326 bp, Homo sapiens; identical to SEQ ID NO: 85042
  chr12:123416624-123416950
  hypo

SEQ ID NO: 172672 - DNA, 106 bp, Homo sapiens; identical to SEQ ID NO: 85043
  chr12:123428942-123429048
  hypo

SEQ ID NO: 172673 - DNA, 297 bp, Homo sapiens; identical to SEQ ID NO: 85044
  chr12:123434318-123434615
  hypo

SEQ ID NO: 172674 - DNA, 245 bp, Homo sapiens; identical to SEQ ID NO: 85045
  chr12:123434936-123435181
  hypo

SEQ ID NO: 172675 - DNA, 58 bp, Homo sapiens; identical to SEQ ID NO: 85046
  chr12:123446772-123446830
  hypo

SEQ ID NO: 172676 - DNA, 30 bp, Homo sapiens; identical to SEQ ID NO: 50257
  chr12:123450200-123450230
  hypo

SEQ ID NO: 172677 - DNA, 30 bp, Homo sapiens
  chr12:123463747-123463777
  hypo
ttgtcgtctggctccgagcctctgctgtgc

SEQ ID NO: 172678 - DNA, 30 bp, Homo sapiens; identical to SEQ ID NO: 85048
  chr12:123470608-123470638
  hypo

SEQ ID NO: 172679 - DNA, 168 bp, Homo sapiens
  chr12:123470901-123471069
  hypo
ggggtcagtgaggacggctgtcacaggctggggctccccgagctgcccgcctgcacccgcccccacaatgcgcccactcacctggcactgctgctgcagcttcttggtgggccggcccacgatgtagatctgcatgggggacaggctaatggcgctgtacaccgccac

SEQ ID NO: 172680 - DNA, 30 bp, Homo sapiens; identical to SEQ ID NO: 85049
  chr12:123481559-123481589
  hypo

SEQ ID NO: 172681 - DNA, 192 bp, Homo sapiens
  chr12:123481876-123482068
  hypo
gaccagggcaaaggcgtcagagcagacgggcgggcagggcaccaggcggatggcaaggcggcccagggcgctggggtagtgcacgcgcatgacggtgtcgaacacgttggcgatggtgttagcatcgcccttcttggagctggggtccccggcgcctgtgtccaggatggtgcctccgtgcagcaccagtag

SEQ ID NO: 172682 - DNA, 31 bp, Homo sapiens; identical to SEQ ID NO: 85051
  chr12:123485544-123485575
  hypo

SEQ ID NO: 172683 - DNA, 31 bp, Homo sapiens; identical to SEQ ID NO: 85052
  chr12:123490025-123490056
  hypo

SEQ ID NO: 172684 - DNA, 31 bp, Homo sapiens; identical to SEQ ID NO: 50261
  chr12:123497425-123497456
  hypo

SEQ ID NO: 172685 - DNA, 30 bp, Homo sapiens
  chr12:123512734-123512764
  hypo
gctgaacacctcggacggatggccctctcc

SEQ ID NO: 172686 - DNA, 158 bp, Homo sapiens; identical to SEQ ID NO: 26684
  chr12:123542054-123542212
  hypo

SEQ ID NO: 172687 - DNA, 43 bp, Homo sapiens; identical to SEQ ID NO: 85055
  chr12:123563305-123563348
  hypo

SEQ ID NO: 172688 - DNA, 260 bp, Homo sapiens
  chr12:123579930-123580190
  hypo
caatcatttcttgggcgtgcacccacatgtgtacatctcgattttacaggctctgttaaagcgcaaagatctttcaggtactcaacaaagcaagatgtcgtgatgttgccaccagcctgccccctcctccccccgcctccgacctgtcacccagatgaagtgagacgaagtgtcttccaatacacacatcggagtgtgtcacttctctgagtaaaggccctcaacgctccccttgggtttcaaggcgacatctaagctcc

SEQ ID NO: 172689 - DNA, 32 bp, Homo sapiens
  chr12:123584527-123584559
  hypo
gaattgcaggtgacacgcgcacagcctactcc

SEQ ID NO: 172690 - DNA, 104 bp, Homo sapiens
  chr12:123618507-123618611
  hypo
gtgagccaccgcatccggccccagcctcattactctgaaaaacatagagactgagggataggcaaagatttcaacaatataaggaatatctccaaccaggagct

SEQ ID NO: 172691 - DNA, 164 bp, Homo sapiens
  chr12:123618850-123619014
  hypo
ctgcccaccttggcctcccaaagtgctggggtctgccaagcccggtgaccacccctgagccatatgaccaggtaagagcacacccaggacattggtgatgtgatggaaaccaccactccacacctcctgcaagagtctgcggcggtgtcacccacagggtcctg

SEQ ID NO: 172692 - DNA, 382 bp, Homo sapiens
  chr12:123636567-123636949
  hypo
ggccaggaaggccatcgttcccgactcgcctccaggtgcccctgaccatgaccacgcagaggaggaccaaggcgtaccaccatcacctagaacgcttcagctccttccctccaccaagaggtgccctaggatccatccagaaagatctgcggagcccacagagtcccaacgggaactgtgctcctggatggacgccccttaacccataactcaaggacttctctatgcctgggacttaaaatcaccaacaacccgctcctgcagccagctagcagaaataaacacacaaaggccacacgccagttcacagccacaagtatttattgagtgcctgtagtgcaagaaagagagatggtccctgctcccgcggagcttacagctt

SEQ ID NO: 172693 - DNA, 31 bp, Homo sapiens; identical to SEQ ID NO: 26686
  chr12:123688895-123688926
  hypo

SEQ ID NO: 172694 - DNA, 31 bp, Homo sapiens; identical to SEQ ID NO: 26687
  chr12:123733912-123733943
  hypo

SEQ ID NO: 172695 - DNA, 42 bp, Homo sapiens; identical to SEQ ID NO: 85061
  chr12:123736870-123736912
  hypo

SEQ ID NO: 172696 - DNA, 102 bp, Homo sapiens; identical to SEQ ID NO: 85062
  chr12:123736971-123737073
  hypo

SEQ ID NO: 172697 - DNA, 181 bp, Homo sapiens
  chr12:123737475-123737656
  hypo
aataaaatagactctcatactgtcatctttacattttgatttcagagattctcaaacatttaaatactggcacttgacccagatcctaatttttgcttgatgcactatttacctgtatcaaattacagtccgttcctttgaatttttttttttttttttttttttttttttttttttttga

SEQ ID NO: 172698 - DNA, 30 bp, Homo sapiens; identical to SEQ ID NO: 26688
  chr12:123738276-123738306
  hypo

SEQ ID NO: 172699 - DNA, 31 bp, Homo sapiens
  chr12:123751043-123751074
  hypo
agggagagcatcttcccgctgggaccttccc

SEQ ID NO: 172700 - DNA, 358 bp, Homo sapiens; identical to SEQ ID NO: 123275
  chr12:123754845-123755203
  hypo

SEQ ID NO: 172701 - DNA, 153 bp, Homo sapiens; identical to SEQ ID NO: 85066
  chr12:123757398-123757551
  hypo

SEQ ID NO: 172702 - DNA, 538 bp, Homo sapiens
  chr12:123773443-123773981
  hypo
cctcccaccgccttccgcagcagtccaagacagcagcccactccgggcccacacactgcacctgggctgggcaccgccccaccctggctggctccctgactcagtgcctgtgccatctgcaaaggcacggtgacagcacttacattttataaagacactatgaagatgttcatgagatctgcgaagacagcgcgcaaagaaagcacaacccgtgactcgtatttaatttatttagaatcttacaaaaacaaaaaacaaaacaaaaaccaccacaacagaaaaaaaaactaaatacagaatttgttacgcttcacggttgatcgtttttacttgcaagagtaaataaaccttgctaaaatgcagccagtacatttttattgcatgagaccaaatttttcagttacatatcaaaaatgattgggataatcaattccggacgcttggtaccgtgctcccacgaaaggctggatgcagcaatgcagtatcattggaacagggcgcacccttcacacactgatggacacgctacaacaggagc

SEQ ID NO: 172703 - DNA, 31 bp, Homo sapiens; identical to SEQ ID NO: 85067
  chr12:123775023-123775054
  hypo

SEQ ID NO: 172704 - DNA, 31 bp, Homo sapiens; identical to SEQ ID NO: 26690
  chr12:123775567-123775598
  hypo

SEQ ID NO: 172705 - DNA, 30 bp, Homo sapiens
  chr12:123826459-123826489
  hypo
caactcaaaaggaacgtgtgcaagggaagc

SEQ ID NO: 172706 - DNA, 31 bp, Homo sapiens; identical to SEQ ID NO: 26691
  chr12:123879620-123879651
  hypo

SEQ ID NO: 172707 - DNA, 105 bp, Homo sapiens
  chr12:123881626-123881731
  hypo
gtctgctctttcccacgctgctgccatactaggagcctgcagaccagtgagcagcaccggctggaaggccagctggcctatgcgggcctccgctgccatgtttgc

SEQ ID NO: 172708 - DNA, 43 bp, Homo sapiens; identical to SEQ ID NO: 85071
  chr12:123881964-123882007
  hypo

SEQ ID NO: 172709 - DNA, 155 bp, Homo sapiens
  chr12:123882804-123882959
  hypo
ggtggctgagcaagactccgtctcaaaaaaaaaaaaagacagcactgcagatggtgaggtggtgccagaccacagaatcccagacacctcccagccagggttggagctgcggtgtgcccacacacagggcctctgctgagcgtccaccaagggct

SEQ ID NO: 172710 - DNA, 44 bp, Homo sapiens; identical to SEQ ID NO: 85073
  chr12:123894662-123894706
  hypo

SEQ ID NO: 172711 - DNA, 600 bp, Homo sapiens; identical to SEQ ID NO: 123282
  chr12:123920538-123921138
  hypo

SEQ ID NO: 172712 - DNA, 30 bp, Homo sapiens; identical to SEQ ID NO: 85075
  chr12:123945975-123946005
  hypo

SEQ ID NO: 172713 - DNA, 30 bp, Homo sapiens; identical to SEQ ID NO: 85076
  chr12:123950159-123950189
  hypo

SEQ ID NO: 172714 - DNA, 365 bp, Homo sapiens
  chr12:123959872-123960237
  hypo
gtgtcactcggggaccgcagtgggcgttgattactgacccgtcacttaaaggaccttctttactggatcatgggcaaggtggttttaaaacagaaacagaagagacaaaaagaattatcggtgacagagccgagaattctgaggcttcgctcgagtagaccgagcgcagccagtggcacagctgaaatcacactcaacatccacgtcaaatggagcacacaggtggcggccatgcagcttaagtggccagggggagacaggtcagccccagcagtagccgaagcagacattccaagggggcagctcaaacaaaacccaaaacacacacagtgcctacaagggaaacaagtcgtcggacaggctgc

SEQ ID NO: 172715 - DNA, 129 bp, Homo sapiens
  chr12:123986830-123986959
  hypo
agtctgaggctggaccggccactgccgggcagacgtcgtagcagaagtctttttgtgtaaggttacaaaggcctttgtgcaaagctgtcgtttttccagagtcttttttgttatcgggcatgcaagcgt

SEQ ID NO: 172716 - DNA, 301 bp, Homo sapiens; identical to SEQ ID NO: 26693
  chr12:123997852-123998153
  hypo

SEQ ID NO: 172717 - DNA, 30 bp, Homo sapiens; identical to SEQ ID NO: 26694
  chr12:123998629-123998659
  hypo

SEQ ID NO: 172718 - DNA, 21 bp, Homo sapiens
  chr12:124004349-124004370
  hypo
ctgagctaaccctttgggagc

SEQ ID NO: 172719 - DNA, 20 bp, Homo sapiens
  chr12:124004416-124004436
  hypo
tgtgggctgattcatgacaa

SEQ ID NO: 172720 - DNA, 320 bp, Homo sapiens; identical to SEQ ID NO: 123284
  chr12:124017663-124017983
  hypo

SEQ ID NO: 172721 - DNA, 44 bp, Homo sapiens
  chr12:124085761-124085805
  hypo
aaaagtttgctgagtgaaggccgggcgcggtggctcacgcctgt

SEQ ID NO: 172722 - DNA, 30 bp, Homo sapiens
  chr12:124106385-124106415
  hypo
aaggggcagtgtagtcgacccacggatgct

SEQ ID NO: 172723 - DNA, 30 bp, Homo sapiens
  chr12:124106752-124106782
  hypo
atagagagcttgcagcgtgccagggactgt

SEQ ID NO: 172724 - DNA, 24 bp, Homo sapiens
  chr12:124108088-124108112
  hypo
tctgcctgcagacctccgcctccc

SEQ ID NO: 172725 - DNA, 126 bp, Homo sapiens; identical to SEQ ID NO: 26696
  chr12:124111671-124111797
  hypo

SEQ ID NO: 172726 - DNA, 30 bp, Homo sapiens; identical to SEQ ID NO: 85085
  chr12:124116905-124116935
  hypo

SEQ ID NO: 172727 - DNA, 39 bp, Homo sapiens
  chr12:124128644-124128683
  hypo
tgggacgtgagccaccacgcccagccaccagtgttctgt

SEQ ID NO: 172728 - DNA, 30 bp, Homo sapiens; identical to SEQ ID NO: 85086
  chr12:124140554-124140584
  hypo

SEQ ID NO: 172729 - DNA, 277 bp, Homo sapiens; identical to SEQ ID NO: 26697
  chr12:124141810-124142087
  hypo

SEQ ID NO: 172730 - DNA, 20 bp, Homo sapiens
  chr12:124145883-124145903
  hypo
ttttttaaaaatgtttactg

SEQ ID NO: 172731 - DNA, 143 bp, Homo sapiens; identical to SEQ ID NO: 85089
  chr12:124152493-124152636
  hypo

SEQ ID NO: 172732 - DNA, 31 bp, Homo sapiens; identical to SEQ ID NO: 9146
  chr12:124156317-124156348
  hypo

SEQ ID NO: 172733 - DNA, 187 bp, Homo sapiens
  chr12:124171332-124171519
  hypo
aggagatcctgaccacggtcacagctcctgcctttatgtttgtcttccaggaatgctcatcaaatttaacaacgctgttcagacggtcctgcttcaccggcgtgtttggaggagacgtcaatcctccttttgatcagctctgctctgctgggacgacgacacgtggtgtccccgattggtttccctt

SEQ ID NO: 172734 - DNA, 30 bp, Homo sapiens
  chr12:124174928-124174958
  hypo
agcgggtcaactagtcggtgaacttgccgt

SEQ ID NO: 172735 - DNA, 49 bp, Homo sapiens
  chr12:124175160-124175209
  hypo
gaactataccaagaacgagatggtattatcaatgcgaagataaagaatg

SEQ ID NO: 172736 - DNA, 30 bp, Homo sapiens
  chr12:124175435-124175465
  hypo
ttttgtttgtttctccgtcacgcaggttgg

SEQ ID NO: 172737 - DNA, 31 bp, Homo sapiens
  chr12:124195918-124195949
  hypo
aggagtcttgcgaggtcggtgggaaatgttt

SEQ ID NO: 172738 - DNA, 30 bp, Homo sapiens
  chr12:124233527-124233557
  hypo
cagtagccatcaaaacgagtaggaagaggc

SEQ ID NO: 172739 - DNA, 30 bp, Homo sapiens; identical to SEQ ID NO: 85092
  chr12:124268537-124268567
  hypo

SEQ ID NO: 172740 - DNA, 30 bp, Homo sapiens; identical to SEQ ID NO: 85093
  chr12:124270424-124270454
  hypo

SEQ ID NO: 172741 - DNA, 168 bp, Homo sapiens
  chr12:124272113-124272281
  hypo
agccccagccctgcacgcaggttggcggctgcaacggaaacctcgcagcttgggactcccgcccttgcacatgggacagggcagccgcttgcccgctctgccttttccgatgaggccgtgaaaccagggggggcgcccgggtcagagcttcacgggacactggctccc

SEQ ID NO: 172742 - DNA, 30 bp, Homo sapiens; identical to SEQ ID NO: 85095
  chr12:124325918-124325948
  hypo

SEQ ID NO: 172743 - DNA, 31 bp, Homo sapiens; identical to SEQ ID NO: 85096
  chr12:124330450-124330481
  hypo

SEQ ID NO: 172744 - DNA, 213 bp, Homo sapiens; identical to SEQ ID NO: 85097
  chr12:124335327-124335540
  hypo

SEQ ID NO: 172745 - DNA, 43 bp, Homo sapiens; identical to SEQ ID NO: 26701
  chr12:124338356-124338399
  hypo

SEQ ID NO: 172746 - DNA, 42 bp, Homo sapiens; identical to SEQ ID NO: 26702
  chr12:124338458-124338500
  hypo

SEQ ID NO: 172747 - DNA, 31 bp, Homo sapiens; identical to SEQ ID NO: 85100
  chr12:124341872-124341903
  hypo

SEQ ID NO: 172748 - DNA, 30 bp, Homo sapiens
  chr12:124371977-124372007
  hypo
gttcctccctcacggcggcccctgagatag

SEQ ID NO: 172749 - DNA, 97 bp, Homo sapiens
  chr12:124393560-124393657
  hypo
ttttaatgctgcccccgcaccattccaggcgcctggtctggaacctgagagggggacccggccctgcccttagggacgctcccgcccaggagtgcgg

SEQ ID NO: 172750 - DNA, 30 bp, Homo sapiens
  chr12:124397861-124397891
  hypo
ggttagcgctgctcacgagcccacctgttg

SEQ ID NO: 172751 - DNA, 126 bp, Homo sapiens
  chr12:124398891-124399017
  hypo
gatgagctgatgcaccggcgcgtgaagctgctgggggactgcctgctctgcgcggctttcctcagctacgagggagccttcacctgggagttccgtgacgagatggtcaatcggatttggcaaaat

SEQ ID NO: 172752 - DNA, 242 bp, Homo sapiens; identical to SEQ ID NO: 26703
  chr12:124404098-124404340
  hypo

SEQ ID NO: 172753 - DNA, 30 bp, Homo sapiens; identical to SEQ ID NO: 85102
  chr12:124422046-124422076
  hypo

SEQ ID NO: 172754 - DNA, 103 bp, Homo sapiens; identical to SEQ ID NO: 85103
  chr12:124423711-124423814
  hypo

SEQ ID NO: 172755 - DNA, 40 bp, Homo sapiens; identical to SEQ ID NO: 85104
  chr12:124444121-124444161
  hypo

SEQ ID NO: 172756 - DNA, 37 bp, Homo sapiens; identical to SEQ ID NO: 26704
  chr12:124514724-124514761
  hypo

SEQ ID NO: 172757 - DNA, 115 bp, Homo sapiens; identical to SEQ ID NO: 85106
  chr12:124562300-124562415
  hypo

SEQ ID NO: 172758 - DNA, 30 bp, Homo sapiens
  chr12:124581072-124581102
  hypo
tttcctacctttctccgtggatcagttcac

SEQ ID NO: 172759 - DNA, 51 bp, Homo sapiens
  chr12:124582792-124582843
  hypo
aggttaagtgcccagcgttacatgataggaagcagccgtggctgcactgga

SEQ ID NO: 172760 - DNA, 173 bp, Homo sapiens
  chr12:124651760-124651933
  hypo
ggagacagattccgccgcctcccccactcgggtctgtttttcagccgtggctccggcagtgggtctgattttatcccgcaaagtgatgtcctgtgaccgttcgatagttccctgagtcactcaataagccagttgggccccatctccctgccctcttgcgagtgtcgggcaga

SEQ ID NO: 172761 - DNA, 146 bp, Homo sapiens; identical to SEQ ID NO: 85108
  chr12:124668397-124668543
  hypo

SEQ ID NO: 172762 - DNA, 324 bp, Homo sapiens; identical to SEQ ID NO: 85109
  chr12:124669009-124669333
  hypo

SEQ ID NO: 172763 - DNA, 104 bp, Homo sapiens
  chr12:124693753-124693857
  hypo
agctggaggctgccgcgtcgacagcacccaggatgtgtctcagccaggcccacagctcctggctgcgctgccacacgtgagcagaaagtcgcacggctcatggc

SEQ ID NO: 172764 - DNA, 253 bp, Homo sapiens
  chr12:124716385-124716638
  hypo
gtctcctgctttccccgtgggatgaactagcttgagaggcacaagattcctgagcaggcagagggactctgtaggagtctcagagctcctgaggctgcaccctcgccctggagccccatgaaatcttcaattttgggttttatgagcttcacaaaccttccaggggcctctccggctccggatggggtgcgttggaggcctggtgcccacgtgtctcctgggccctccacctgtgccccgcctgtttgcacag

SEQ ID NO: 172765 - DNA, 30 bp, Homo sapiens
  chr12:124717031-124717061
  hypo
gccagggtgggcacgcgtcctgggtcatcc

SEQ ID NO: 172766 - DNA, 30 bp, Homo sapiens
  chr12:124721236-124721266
  hypo
agcggctgttgacaccgctcaattgttctg

SEQ ID NO: 172767 - DNA, 217 bp, Homo sapiens; identical to SEQ ID NO: 85111
  chr12:124788612-124788829
  hypo

SEQ ID NO: 172768 - DNA, 31 bp, Homo sapiens; identical to SEQ ID NO: 50280
  chr12:124790623-124790654
  hypo

SEQ ID NO: 172769 - DNA, 353 bp, Homo sapiens
  chr12:124791414-124791767
  hypo
agttcccgcccagcccgatgtccaccctccactccctctgcccgaggccggtgtgcatgtggtcaccatggttataggcttggccctctgcggcccaggcacgagcaccagtctggaggaatagggtccccaccacctgctgtcccccgtgggagccagctatcccctcttcagccaagaacaaagcactgagcatcaccacgcactagacgctggggtgtaagggatgcagaccgtgcctccccatccgcgggggcatcgtgatctgggtagggccagagagcagggagagggccgcaaacctagaaataaatgcgtaagcaaaacctgctaagtgccgtgtcccagtgacg

SEQ ID NO: 172770 - DNA, 226 bp, Homo sapiens; identical to SEQ ID NO: 85114
  chr12:124798800-124799026
  hypo

SEQ ID NO: 172771 - DNA, 30 bp, Homo sapiens; identical to SEQ ID NO: 26707
  chr12:124810859-124810889
  hypo

SEQ ID NO: 172772 - DNA, 246 bp, Homo sapiens; identical to SEQ ID NO: 85116
  chr12:124819438-124819684
  hypo

SEQ ID NO: 172773 - DNA, 376 bp, Homo sapiens; identical to SEQ ID NO: 85117
  chr12:124821026-124821402
  hypo

SEQ ID NO: 172774 - DNA, 124 bp, Homo sapiens; identical to SEQ ID NO: 85118
  chr12:124827620-124827744
  hypo

SEQ ID NO: 172775 - DNA, 185 bp, Homo sapiens
  chr12:124829273-124829458
  hypo
accggggcgccgcgcgcaatggagccccccgagctgctggcggtccctggccggctcttcaggctctcctcgtagcaggcacgttccagtgcccgggcgtcggccatcacatccagcgggtgcacgggtgggaacgtccggccggggctgccgatgagggagcgtacgtcgtgctttttggagcc

SEQ ID NO: 172776 - DNA, 101 bp, Homo sapiens; identical to SEQ ID NO: 85120
  chr12:124831186-124831287
  hypo

SEQ ID NO: 172777 - DNA, 111 bp, Homo sapiens
  chr12:124831991-124832102
  hypo
gccatggaccagccgcgagaacctgaaagagttctcggagctctccaagcctctcccaatcgcatgtgcctcaccaggatgttctgtaaaacgatacgcaggtggcacctg

SEQ ID NO: 172778 - DNA, 932 bp, Homo sapiens
  chr12:124832317-124833249
  hypo
gcgtgactgtacacccgttgggggcaacgagggagcagggaacagggcagtaccttgtgtgatggacccgcggatgtggtgctgctctttgaggtggtgggggctgtgtcgctccggcgggatggcacggcccatgagacctgggtaggagagggtgaggccatcattccgtggctccctgagccgacactgggcagtgacaggggtcagtgtttacagccgccagtggtcatccccacgatgatggtggagtaggacccagcacgggaaggtccctgcgctacctccagatggagcctcagaaagcccagcctcggtttccccatctgtaaaacggggtcagccatccccccaccgcccaccagggggcaccgagagatgaagtctcctccctgctatcaccttcgatgctggctgaggagatggctctgcccacgcggccctccatcatgtcataggtgcgcttgggggcggccgtctcatgggggggtcctgagctgcttctgccgtcctccttggagcactgggtcacagacatgccacctggaaaccacacaaagcactcggtgaggagctgggcacgggcccaggaccacggtgggcaggcaggacaggcagagccggtaggcaggagccagcagtgcttccatgctggccccgtcacaaagcctcacagccgaggcctccagagggagctggcagcctgcaggccctgggggcctgccagcaggacccaggagcttttccagggggttgcacggtgggagatgcagggcacgctgcctgcaccctgtaccctagccctccagggtgctctgtctgcaagcaagggtgtgcctgtgaccacatgagcacgtgagtctgtgtccacacccacgggtgccgacatggggcgtgaacaagtgcacacacatgcacgtgagcaaggacgc

SEQ ID NO: 172779 - DNA, 30 bp, Homo sapiens; identical to SEQ ID NO: 26713
  chr12:124833920-124833950
  hypo

SEQ ID NO: 172780 - DNA, 30 bp, Homo sapiens; identical to SEQ ID NO: 85124
  chr12:124835201-124835231
  hypo

SEQ ID NO: 172781 - DNA, 315 bp, Homo sapiens
  chr12:124843494-124843809
  hypo
gcaagtggcagatagcggcttcgaacccaggcactggggctgcagaccatggccttaatccagactgctatgccacatggcctgcggcagagaagcaatgatgggtcctagatttcaggcctggggagatcctgtaaactcagcggggccccggggctcaggcctggcttcatggcatcttcctgctggcctctcgccctttgctgaaatctgtcctcagctctgaacctctccctgaggaccaatcctatggagagataaccggccaagaagttgagcagagacacaacttgggaatgacggagccctctgggt

SEQ ID NO: 172782 - DNA, 736 bp, Homo sapiens
  chr12:124850142-124850878
  hypo
gagcagacacagactcggtgatgcctgcttaggctgcccatggcgcacagacgggggccagacgaggaaggtcaccctgacttctgcatgcacctccaccgcccccaccgccagcccactctcctccctcccctccctccacctgtccagaccctgcttgatctcccaggaccacctaaagcctctcctttggccactgccatgcctcactccctggacctgggcccagctgtgctctccccgccatcctcaaggtacagacaaggtaccctgacccaggtccaaacacagatggtatcacctgtcccaacattctccacctgcggcttcaactgccgccacccctatgtccctccccacaggtttacctaccaccatccgtttcaaccagctcgcacttgcaagctgaaatttaaaagagaatgctgcagccactttggaaagcagtcggtgagccctcattgccctaaacccagcactgccactcctaggcacacaccaggcaaatgagagcaaatgtctatgcagaaacctgcacgtgcccaccactgcagcaccgcccagcgcacaacagccagaaggcagagacaacccgacatccaccaagagacgaatgaggagacaaagcgtgccctgtccgcacgatggaacacatggccatcaaaaggcatgaggctctgacacgggctatgacgtgggtggaccctgaagacacgatgcgcgtgaaacaagctag

SEQ ID NO: 172783 - DNA, 264 bp, Homo sapiens; identical to SEQ ID NO: 85126
  chr12:124856542-124856806
  hypo

SEQ ID NO: 172784 - DNA, 30 bp, Homo sapiens; identical to SEQ ID NO: 85127
  chr12:124858829-124858859
  hypo

SEQ ID NO: 172785 - DNA, 30 bp, Homo sapiens; identical to SEQ ID NO: 85128
  chr12:124869418-124869448
  hypo

SEQ ID NO: 172786 - DNA, 795 bp, Homo sapiens
  chr12:124869697-124870492
  hypo
ccatttacacgctggcgaggcgagcctgcaccttctgtgcttgtggaggagggaagggtctcagcctcccgtggcctgcctcaagccctccaggatgctggggctgagacgtccgcccccgcccccccagacctgtccctccccaaccacggcagccctaaagctgtgaggtcaaatggggcaggggagccactcgctcaggacccatttgcctccgggtcctcattccaacgcgctgacagcccgaattcctggctgagtcagtctggtccaccgcgctccttcccccacaccgtgagacagggctgagggcccccagaggtgtctgtctgagaggagtggggtgcagggtgggggtggagggcagcctggcccggcccgtctccaaggcagggacactcatagcagcattgccgcctgcagccatctcggggtactcccgggcttgaacccccagaagctgagttctaacaaggcggcataatagcccctccctggcccatgcctcctggggtgcagagacatctcctgaggcagtctgggctcctctcccagcttcccagaggcgcggtgcagcgtgactgggggctcaccatcttcagcttgtgctgctgcaagatctcatcgaggttctgcctcttcttgtagttgaagtagaagttcttacactgcgacacagtcttggagcccaccatccgggcgatggccgaccagttgcggccgtgttccaggagacctgtctcaggagaggagggcagtgagaagaggccaggcccggcacgcagagggggcctg

SEQ ID NO: 172787 - DNA, 30 bp, Homo sapiens
  chr12:124870716-124870746
  hypo
caggtgaagtcccaccgaggccactgcgcg

SEQ ID NO: 172788 - DNA, 425 bp, Homo sapiens; identical to SEQ ID NO: 85130
  chr12:124879850-124880275
  hypo

SEQ ID NO: 172789 - DNA, 191 bp, Homo sapiens; identical to SEQ ID NO: 85131
  chr12:124881244-124881435
  hypo

SEQ ID NO: 172790 - DNA, 214 bp, Homo sapiens; identical to SEQ ID NO: 85132
  chr12:124881709-124881923
  hypo

SEQ ID NO: 172791 - DNA, 30 bp, Homo sapiens
  chr12:124882272-124882302
  hypo
taccgagatggccgccggcaagctctgact

SEQ ID NO: 172792 - DNA, 249 bp, Homo sapiens
  chr12:124886237-124886486
  hypo
gggagagttttactgcgggaggctcagattgatcacctctgccttcccattcatcttcctgaaaggcccttgctggaagcgtctgggagacggggtgaggaagccagatgttctctgaagccaaattcctgagcccattacaggtacctggcgctaagtcgtgccgcccccctttctccagctggctgcactcctgcagcccctggcaggcacaggaggctgtcacggcccccgcggtgaggctgtgcc

SEQ ID NO: 172793 - DNA, 459 bp, Homo sapiens; identical to SEQ ID NO: 26719
  chr12:124893320-124893779
  hypo

SEQ ID NO: 172794 - DNA, 34 bp, Homo sapiens
  chr12:124894789-124894823
  hypo
tctgcctctctgatgcgatcgcccctgcactgca

SEQ ID NO: 172795 - DNA, 30 bp, Homo sapiens
  chr12:124895284-124895314
  hypo
aataccaacacccaccgcacagcggctgcc

SEQ ID NO: 172796 - DNA, 723 bp, Homo sapiens
  chr12:124895906-124896629
  hypo
tggggaacagtggagagtggacggcagcagtcgggggcggagcctcggcctccctgggcttccttcttggacccaggccggatgactggagcccaggacgggctgttcccgtctcagtgtcccatctctgcagaaagagaggcccccttggccacatgaacccccatcgctgcgggaaggccatattggctaccaggggccgggccctgccacctggcctagccagcctcacatcctcgctccccaacggtctgcagtcaggccccagcattcctgggctctggttttgcaattcactaggataacgcggcccttccatcaatgaatcatggactataaaccactgtgccagcgcttgagctgttccccgcaccgccccacagtccgtgattcacctcagggtggtggtgatggggctcggagcccaagagaggatgctcgggcctcaacccagcctccaggctcaaaagccgctcacggccgatctcaggggccaggttccgggaggtgggggctcggccctcccttgccaaagctcaggcctgtggggtctcatgggggtgggtgtggaggggctagcattccaaaagcctatgcccgggcctgcatccccgtgtcagaacacagagaagcttccagaaagaggatggcaccctccattaaacaagaaggcaatcccaccactctaaacagccatgcacatccctcgcctccagccggcca

SEQ ID NO: 172797 - DNA, 30 bp, Homo sapiens; identical to SEQ ID NO: 85136
  chr12:124899762-124899792
  hypo

SEQ ID NO: 172798 - DNA, 173 bp, Homo sapiens
  chr12:124901266-124901439
  hypo
acagggagtccccgcggcacagatagaccccgcggcacagggagtccccgcagcacagatagacccgtggcacagggagaccccgcagcacagatagaccccgcggcacagggagaccccgtggcccagggagaccccgtggcacagatagacccgccgcacagggagacccg

SEQ ID NO: 172799 - DNA, 30 bp, Homo sapiens; identical to SEQ ID NO: 26722
  chr12:124901827-124901857
  hypo

SEQ ID NO: 172800 - DNA, 30 bp, Homo sapiens; identical to SEQ ID NO: 26723
  chr12:124905087-124905117
  hypo

SEQ ID NO: 172801 - DNA, 294 bp, Homo sapiens; identical to SEQ ID NO: 85140
  chr12:124911264-124911558
  hypo

SEQ ID NO: 172802 - DNA, 72 bp, Homo sapiens
  chr12:124915170-124915242
  hypo
gctcctgcagctcgcgctgcttgcggatctcagggaactgcttctcgtagtactcgcgcaccttgctctcct

SEQ ID NO: 172803 - DNA, 30 bp, Homo sapiens
  chr12:124918890-124918920
  hypo
catcccaatcgccaccgcagcttcaggggg

SEQ ID NO: 172804 - DNA, 30 bp, Homo sapiens; identical to SEQ ID NO: 85142
  chr12:124919574-124919604
  hypo

SEQ ID NO: 172805 - DNA, 593 bp, Homo sapiens
  chr12:124929575-124930168
  hypo
cagttcccatcagccgacccccaaatgaggcagcaggagggaagaaatcaggctgcgaaaagagaaaaacgagcaacggaagaaaccggcttccaggcctgagggggccggtgaaccagggcaacccccgggcaggcagaggcagaatgtgcctgagcgccatctgccgctcatccccaggtcccacgcactttcaccacatcccacgcgggctccatagactcccgggaattcctggagcatcctgcccagggtggggcccatccctcgatggagcccccatctcctgcccctctgcggctgccccggccccgccccggtggtctgagcgctccctcctgcagcaggggacaccagcagcgcccgaagcaggtggcggtgggagggcggcggaggcggctacgggcgactccaacgcgtccgaaatcgtctgtgcggcaggaagtcaagcgtgaaattaactttcactccgcggccccagcatgcagacgcagagaaattaaagtgacggggcaaggtctctggggagggaacgacctcccacctagaagcaatgacagcagcgggggcgaggaggccgtgagcgccaggga

SEQ ID NO: 172806 - DNA, 30 bp, Homo sapiens; identical to SEQ ID NO: 85144
  chr12:124930635-124930665
  hypo

SEQ ID NO: 172807 - DNA, 30 bp, Homo sapiens
  chr12:124933373-124933403
  hypo
aacgcttgaacaatcggaccgggctgaact

SEQ ID NO: 172808 - DNA, 30 bp, Homo sapiens; identical to SEQ ID NO: 85145
  chr12:124945950-124945980
  hypo

SEQ ID NO: 172809 - DNA, 31 bp, Homo sapiens; identical to SEQ ID NO: 26726
  chr12:124947479-124947510
  hypo

SEQ ID NO: 172810 - DNA, 30 bp, Homo sapiens; identical to SEQ ID NO: 85147
  chr12:124947727-124947757
  hypo

SEQ ID NO: 172811 - DNA, 15 bp, Homo sapiens
  chr12:124947999-124948014
  hypo
ctgtgcacacctgcc

SEQ ID NO: 172812 - DNA, 33 bp, Homo sapiens
  chr12:124948049-124948082
  hypo
gggaggcgggaaaagcctcgctcagcgggtgcc

SEQ ID NO: 172813 - DNA, 250 bp, Homo sapiens
  chr12:124959723-124959973
  hypo
cacacacggactcctcgagggaaacagagaaaagggctcatatccctcaatcgccccaatgcagtcctccatgctcctcaggccacctcccccagggacacctagaaatcacacctggggccgctcacagctcagcctatcccagtcctctgcacaccccatgaagtcctctgcacaccccatgaagtggatcccacaacagccctccgaggggactgctgctccatctccattacgcagaggcagaaac

SEQ ID NO: 172814 - DNA, 269 bp, Homo sapiens; identical to SEQ ID NO: 85148
  chr12:124964412-124964681
  hypo

SEQ ID NO: 172815 - DNA, 231 bp, Homo sapiens; identical to SEQ ID NO: 85149
  chr12:124966042-124966273
  hypo

SEQ ID NO: 172816 - DNA, 30 bp, Homo sapiens
  chr12:124966961-124966991
  hypo
ggtatcctctctccccgagagaaggccgag

SEQ ID NO: 172817 - DNA, 173 bp, Homo sapiens
  chr12:124967299-124967472
  hypo
cccatggagatgcagacgagcctgaagttgtctggctcccctgcccaaagtgcatccgtggtccctcaggcctgggtggctgcagactcaacccacgctagcccagtgccacacggtggcccaaggagcagccagactgggcagtagaaggcggctttgtcattctaggggtc

SEQ ID NO: 172818 - DNA, 192 bp, Homo sapiens
  chr12:124970971-124971163
  hypo
caactctctcctcaccgttcattcccgggctggaactcagacagcagggagggcctccgccgctggggctggatgatggagccgggcgacaggtgggaggcatagtcgcgggagtggtgctggtactccaggagcccgacgtcctgcaggaggggacagaggagtggtgagcgtgggcgggcacgggcatgg

SEQ ID NO: 172819 - DNA, 196 bp, Homo sapiens; identical to SEQ ID NO: 85152
  chr12:124971725-124971921
  hypo

SEQ ID NO: 172820 - DNA, 780 bp, Homo sapiens
  chr12:124979223-124980003
  hypo
cctcagagcctcgagccgcaccaaggtgaatacacacggaacgggaggacaggaaggaaggggagctgtgacctatccggcccccttgccccctggaagccaccccaatcctacccaatactgcggcagcgggggagcagaggtgaggctaggctgcaggaaagtgaatacagcaggagctccacattcgcgtgccaatcccactaccagtccagagagggcagagccccagctcagcctggccccagcctccatcttcccagctttaaaatgggagcaaagagattttatcagatattctggaaaaggcttcagacaccaggggtctctgtggcggcctcccctctgccctgggaggctcagagccacatgagcctggctcccaggagaaaggaaggggtgaagactcagtggaatggaagaagggtctcaaaggtagccccaggcgcacacatgtgcacccccttaccgtgtgcgtccgggcgatctgcactgggtaggaaaggctgtggggcgggtagcggggctcagtggccctccacgtctgtgccacaggctgtgtggatcccgacatggtggtgggggtcggcggggagctgctcccaggccccaataagctttctcttaatcaccaccaaggattaaaagccagtcctcgtcatcagctcacgggccaccccgtcactggcacctgcgggaaaacaagaaaagaaaaacaagatcagccacggggcagctggctcctccgtgcacaggtccccgagtcgttcctgtggtccc

SEQ ID NO: 172821 - DNA, 135 bp, Homo sapiens
  chr12:124980536-124980671
  hypo
cagaatgacagccagtcgggccctgcagcctagggataggtaccccaaacggctcctggggcagatactggagccttccacgggagaggatctactcgtggccacgccagaggaataacacgaagcgggctagca

SEQ ID NO: 172822 - DNA, 164 bp, Homo sapiens; identical to SEQ ID NO: 85155
  chr12:124989192-124989356
  hypo

SEQ ID NO: 172823 - DNA, 936 bp, Homo sapiens
  chr12:125000463-125001399
  hypo
tcacccaggactcttctccaccgggtaggaaaatcgagtccctgaggactttggcaaaggtcaggggcagccacgacacagctctgtggccaacccaagtggacaccaaggccctgggggtgacaaggggacatggatgagaacccccccgccttcggaggccattctcgaggtcccaggagaggccccatgacaatgagacagcgggcagctggtgcggggggcctggacgcccggggaactccccactggctcctgctggcccaagagcggaggccctgagccagtcactggcccagcatccggtgtcacttacaaacacaggacggctgccaccttctgcaggagaactggccctcccgcgccagtccccaggccacaccaggcactgtggggggtgcctggcccagggctggcacggaggggctcaggctgagtgggagacggggcagaacaggcaggcatggggggagacctggggatcccaaacaaaggcagagcctgggaagcacccactcgacctacctcccattatctggacccaggtttctacaaaacatgagagctctctgcaaagaagaaaagaaaaatggacggaactcgaacttaaatccaaccttgtggttacaattacggaggcccacccaggccagcactgtgcgggccccttcaggcttctctcaggctctcccgagacacaccggcaggctgcagtgctaccactgtggtaaaggacaaggaaactgaggctctgtgggattccgggacttgcccaaggtcacaccatccttgaggggtcgagccaggactggaacctcagtccggccactacaacttcataaataccatcgccctgagatgctgaaatcccaggggccccccaccctcagaccaggtgccggtattgtcagcatcgagaaaacaaagtgccagtga

SEQ ID NO: 172824 - DNA, 274 bp, Homo sapiens
  chr12:125008002-125008276
  hypo
aaggacacatcacgccggccagcatcacccaagctctcagtgtgccagggtcagtgggcttcacgcggcctccactgtgccttacaaccggcgtgtccagtcttttggcttcactgggccacactaaaagaactgtctcggatcacacataacactaacactaaccatagctgatgaactaaaaaaaaaaaaaacaaaaaaccgaaaaacaatctgttttaagaaagtttacaaatttgtgttgggctgcatttaaaaccgtcctgagccgcag

SEQ ID NO: 172825 - DNA, 349 bp, Homo sapiens
  chr12:125009051-125009400
  hypo
agcctgtctgagaacaaggcccgcatggaaggaggcacagctgaggcaaagccagctcccagaggcattgtttgagcacctagatccagccgtgcctgaacgtgtcctaccctggccactctgaggacccatcaactccccgtcatagcctaactcggctcgagtgtgtctctgccacaactcaggagccctaactaactgcccctaactaatcacccccaggtctccccttgaatgactcgtccctggacgcctggcctgatggaagactaattcagctcttgcctcacccaggtgaatgcctgaacctcgtcctcacaaccctcaccacccgcgatagcacttgctt

SEQ ID NO: 172826 - DNA, 31 bp, Homo sapiens
  chr12:125012455-125012486
  hypo
cgtgtccttcccatctcgccctccagggcgt

SEQ ID NO: 172827 - DNA, 30 bp, Homo sapiens; identical to SEQ ID NO: 26734
  chr12:125020032-125020062
  hypo

SEQ ID NO: 172828 - DNA, 30 bp, Homo sapiens; identical to SEQ ID NO: 85159
  chr12:125020464-125020494
  hypo

SEQ ID NO: 172829 - DNA, 431 bp, Homo sapiens
  chr12:125042261-125042692
  hypo
gatggcgtgggtgggcgggatggcaggttaaagcaggtgtctcccaacttctcccgcttgccttcctcccctggtttacccagcagtgggcatcacccaggagccaccgccacacagaattcctcccaaatcctgaccctgtggacctggccaagcccccaggacccaggaaaggccccctgactcctgccaggctccagagggcgacatcccctgcaggcccccatgctgacaggcctggcccagcctagggaaaagcccaggccagggcctggagctgcatccggccccaaccccacccggcaggctctcctctttagcttcaggagcagggctggcaccaggcaggttcccatggtcaccgagacactatagccacactggggcccatgctccctgatggtctcagcaggtaccgcagagttcaatgt

SEQ ID NO: 172830 - DNA, 54 bp, Homo sapiens
  chr12:125062417-125062471
  hypo
cgagctcggcaaacacgcatgtcctcgcaagccacaacacggagcccacccttc

SEQ ID NO: 172831 - DNA, 276 bp, Homo sapiens; identical to SEQ ID NO: 85162
  chr12:125062704-125062980
  hypo

SEQ ID NO: 172832 - DNA, 30 bp, Homo sapiens; identical to SEQ ID NO: 26738
  chr12:125089689-125089719
  hypo

SEQ ID NO: 172833 - DNA, 219 bp, Homo sapiens; identical to SEQ ID NO: 26739
  chr12:125092406-125092625
  hypo

SEQ ID NO: 172834 - DNA, 253 bp, Homo sapiens
  chr12:125102489-125102742
  hypo
gccctcctcagccctcgtgcttgccttccaaagagctgtggctgttttctccgctcccctgcggtggagaaggaagagggcacatcgctggaggcatcttgtctgtgcctatgcagttctgactgcgtttgtgccccttcgattcacgcccattgcacaaatggggacactgaggcaatgagaggcgaggagacttgcccaagacctgcaggctccgtcaggggcagggtcaccggtgcggcttcagaggcag

SEQ ID NO: 172835 - DNA, 87 bp, Homo sapiens
  chr12:125103113-125103200
  hypo
aaatagaatcgtacacgagaccttttgtgtctgacttctttcacctgcgtcgttctcgaggttcatccgtgccgtagcgtgagccag

SEQ ID NO: 172836 - DNA, 106 bp, Homo sapiens
  chr12:125105684-125105790
  hypo
gcttttgctggggaacggtgaatcaacggcctgctgcgggctctgtctgggtggaggctggctggcccagccacagtcccaggggctgtgccgctttcccagctga

SEQ ID NO: 172837 - DNA, 165 bp, Homo sapiens
  chr12:125119169-125119334
  hypo
gcctcagaactcatgcagccacttccaccacacccagtggttgaggtcatcacaaaagtccatccgggttcaagcggaggggaccaagacccaccttttgagtgcttcaacctcaccaggaatccaggatccttccacctttctgctctgcggactttgctctgt

SEQ ID NO: 172838 - DNA, 31 bp, Homo sapiens; identical to SEQ ID NO: 85165
  chr12:125123326-125123357
  hypo

SEQ ID NO: 172839 - DNA, 85 bp, Homo sapiens; identical to SEQ ID NO: 85166
  chr12:125128936-125129021
  hypo

SEQ ID NO: 172840 - DNA, 231 bp, Homo sapiens
  chr12:125145439-125145670
  hypo
ctgcagcgccccagccgacaaggacgcagtggggcggaggccccccaccccgccaaattagggggaaacgcagccttgcctgctcttctccagggctggggcagccagggagacgcggtgtcattaagtagtgagcgcaaagggcggcagtgtctgcagaaggagccacgcggccgcgcttaatgaacagtgacatctgctcggctctttaattaacgagcccccacgcgc

SEQ ID NO: 172841 - DNA, 395 bp, Homo sapiens
  chr12:125151970-125152365
  hypo
aaggggtagccccacagctgtcggggcaaacctccttcgacgctctccaacagctcaggccagcccatttctcactgacttgtggatggaacgtgtcaccttcagaggaagggggcaaaataaacctttgaaggtgagcttgctaaatgcttgcgtagtgaggcccctgcatctccttttgccgagactgggggaggctgaatggcaccaggccctgtctctcagccccgctcagccccatccctctagttcagtcctgtgggaccgcccgatccttgtgcagcccagctacaccagcaggtcgccgaatgtggattgtatccgggtggcatctacacagatcagaaggtagttcagataatgggatcctttgaagcagtcgatgaaacattcca

SEQ ID NO: 172842 - DNA, 31 bp, Homo sapiens; identical to SEQ ID NO: 26741
  chr12:125158872-125158903
  hypo

SEQ ID NO: 172843 - DNA, 46 bp, Homo sapiens
  chr12:125177730-125177776
  hypo
tttatgcatatagatttatatcggcgaactcttgattatggtattt

SEQ ID NO: 172844 - DNA, 521 bp, Homo sapiens; identical to SEQ ID NO: 85169
  chr12:125184197-125184718
  hypo

SEQ ID NO: 172845 - DNA, 152 bp, Homo sapiens; identical to SEQ ID NO: 85170
  chr12:125221106-125221258
  hypo

SEQ ID NO: 172846 - DNA, 52 bp, Homo sapiens; identical to SEQ ID NO: 85171
  chr12:125223361-125223413
  hypo

SEQ ID NO: 172847 - DNA, 157 bp, Homo sapiens; identical to SEQ ID NO: 85172
  chr12:125223878-125224035
  hypo

SEQ ID NO: 172848 - DNA, 36 bp, Homo sapiens; identical to SEQ ID NO: 85173
  chr12:125224154-125224190
  hypo

SEQ ID NO: 172849 - DNA, 141 bp, Homo sapiens; identical to SEQ ID NO: 26744
  chr12:125236640-125236781
  hypo

SEQ ID NO: 172850 - DNA, 84 bp, Homo sapiens
  chr12:125257115-125257199
  hypo
aagttgtttgagaggaagggccgcctctgtctggtccacaattgcaccccctgtgcctagcgcgtagtgagcactggataagta

SEQ ID NO: 172851 - DNA, 31 bp, Homo sapiens; identical to SEQ ID NO: 85175
  chr12:125276597-125276628
  hypo

SEQ ID NO: 172852 - DNA, 519 bp, Homo sapiens
  chr12:125277443-125277962
  hypo
tcctcggccccaggtcgcctcttctatctggtcacccacttggccccagttgcatcccagttagcagcccaggtgccacgcggtggaaccagagggaggacttgggctgcaaacgcctcttccatgcctggggctgtttccccacccacaaatccatcaagaacaaattccctaagtggcctcaaaatataaaaataaaatgcaagggcgggatgaaggaagagagctcacagttattactcgctgccgtgctctgacaaagtgttattctttccagccgagaggcatttgacaaagctgaatagatgctcacattcctgcaacccagggatttttctaagagaattttttttaacgaaactatttcagatatgctaagaagtacagacactgacatagcaacaaatcagtataatccctcaccaagttctagcaacgtgtaatgttatagcaagtgctggtgcgcgtggggaggaactggaaccctgctgcactgctgctaagaatggggatggggcc

SEQ ID NO: 172853 - DNA, 30 bp, Homo sapiens; identical to SEQ ID NO: 26745
  chr12:125292498-125292528
  hypo

SEQ ID NO: 172854 - DNA, 31 bp, Homo sapiens; identical to SEQ ID NO: 85177
  chr12:125298971-125299002
  hypo

SEQ ID NO: 172855 - DNA, 227 bp, Homo sapiens; identical to SEQ ID NO: 85178
  chr12:125299401-125299628
  hypo

SEQ ID NO: 172856 - DNA, 71 bp, Homo sapiens; identical to SEQ ID NO: 85179
  chr12:125301968-125302039
  hypo

SEQ ID NO: 172857 - DNA, 30 bp, Homo sapiens; identical to SEQ ID NO: 85180
  chr12:125302260-125302290
  hypo

SEQ ID NO: 172858 - DNA, 85 bp, Homo sapiens
  chr12:125333252-125333337
  hypo
tgagaacggcagaacgagccgtggtacatccgcaccgtggagcgtttccaggcatctagagaatcagagcgtgatcatcaccaga

SEQ ID NO: 172859 - DNA, 62 bp, Homo sapiens; identical to SEQ ID NO: 85182
  chr12:125336068-125336130
  hypo

SEQ ID NO: 172860 - DNA, 30 bp, Homo sapiens; identical to SEQ ID NO: 85183
  chr12:125349057-125349087
  hypo

SEQ ID NO: 172861 - DNA, 114 bp, Homo sapiens; identical to SEQ ID NO: 26747
  chr12:125411764-125411878
  hypo

SEQ ID NO: 172862 - DNA, 30 bp, Homo sapiens
  chr12:125432700-125432730
  hypo
agaaggctctccgtacggggctgcagcctg

SEQ ID NO: 172863 - DNA, 30 bp, Homo sapiens
  chr12:125434646-125434676
  hypo
ctgcccacggtacccgagatgagggtctgg

SEQ ID NO: 172864 - DNA, 30 bp, Homo sapiens; identical to SEQ ID NO: 85185
  chr12:125434950-125434980
  hypo

SEQ ID NO: 172865 - DNA, 30 bp, Homo sapiens
  chr12:125438431-125438461
  hypo
tggtcagctggccccgcaggcgccggatct

SEQ ID NO: 172866 - DNA, 154 bp, Homo sapiens
  chr12:125447386-125447540
  hypo
aaaaaaaaattaaaaagtgctggtgaggacgtgaagaaactgaaaccctcattcactgttggtaggcatgtcaaatggggcagctgctgtggaaaacagtttggtggctcctcggtaagttaaacccagagttaccatacggcccagcggttct

SEQ ID NO: 172867 - DNA, 108 bp, Homo sapiens
  chr12:125448949-125449057
  hypo
ggccgggctccgtccgtcctgctctgcccgctcgctggtcagctgatgcctgggagacccaggtgacacggaaggaggatacgccagtgacgcggtcgtagtagcgtt

SEQ ID NO: 172868 - DNA, 30 bp, Homo sapiens
  chr12:125464815-125464845
  hypo
cctgccaggcgtgccgccagacacccgccc

SEQ ID NO: 172869 - DNA, 30 bp, Homo sapiens; identical to SEQ ID NO: 85188
  chr12:125465173-125465203
  hypo

SEQ ID NO: 172870 - DNA, 190 bp, Homo sapiens; identical to SEQ ID NO: 85189
  chr12:125498605-125498795
  hypo

SEQ ID NO: 172871 - DNA, 162 bp, Homo sapiens
  chr12:125500618-125500780
  hypo
ccagaatagaggcatcggcagcggatccacgagccctgaatgcctgcattcatcaggggagcagctggcgcgttctggaggcgaaacgagcttgcttccgtgtcgaagcttttctagttctgtttgatgcgtaagcttcaaggcatccgaagccctttggaa

SEQ ID NO: 172872 - DNA, 30 bp, Homo sapiens; identical to SEQ ID NO: 85191
  chr12:125509765-125509795
  hypo

SEQ ID NO: 172873 - DNA, 504 bp, Homo sapiens
  chr12:125565909-125566413
  hypo
gatcacagttagtttacaaatcgcatcccttacttaagcaagggcctaagcagccgattattggctcgggggctttaagatcattgtgcttcgttttctgcatgtttttcctgacttgttccttacccagctgggtgcaggtgctcacggagctctgctccatgctcactcaggcgttctcagcaaaactcatctctcctatgggtaatccccgtcgaggccatgcgatgccctgcttaaaaaaatacatacatgtgcacaattgccttcatgctccagcgagtagagcaaacaacatgcattagcacatccgtgttgagattgttagaacagctgcctgcgcagcacattttgcttttgaagagtagctatcagcttaccgagtattttcacatgatggaaagttttctgggctgggaatgtgggagaggtaataaaaaggctaccccagggcagcaaggagaggatgaagggcagacgcgtacaactctaggcaaataggaa

SEQ ID NO: 172874 - DNA, 419 bp, Homo sapiens; identical to SEQ ID NO: 26751
  chr12:125578189-125578608
  hypo

SEQ ID NO: 172875 - DNA, 328 bp, Homo sapiens
  chr12:125605534-125605862
  hypo
gtgtgcatgtacctgtgtacacgcgtacatgtgcaagtgttcacagcatggtggctggttccgtgccgtaatcacgggccctgggttggccagagcgctgaggctgattgaggtgtggtcgtgctgtcgcagggctccctctggatgtggccatcgccccgcctgagagagcctcctgcgccgtttggcgaggcaggtgtgacttggcaccctggcaggggctgcgggtgaggggctttcggaagaatgcaggctttaaaccactacactggtcgccaccagcagtgagagggagcgggtgctgggcggggcaggacacttcagctca

SEQ ID NO: 172876 - DNA, 217 bp, Homo sapiens; identical to SEQ ID NO: 85194
  chr12:125609558-125609775
  hypo

SEQ ID NO: 172877 - DNA, 31 bp, Homo sapiens; identical to SEQ ID NO: 85195
  chr12:125621160-125621191
  hypo

SEQ ID NO: 172878 - DNA, 77 bp, Homo sapiens
  chr12:125636432-125636509
  hypo
cgagtcttttaggagcgcaaactctattttgaactgcaggcgtgtcagggatctaggttgtgcgctccttatgagaa

SEQ ID NO: 172879 - DNA, 294 bp, Homo sapiens; identical to SEQ ID NO: 123319
  chr12:126018008-126018302
  hypo

SEQ ID NO: 172880 - DNA, 30 bp, Homo sapiens; identical to SEQ ID NO: 50298
  chr12:126109505-126109535
  hypo

SEQ ID NO: 172881 - DNA, 17 bp, Homo sapiens
  chr12:126191562-126191579
  hypo
gtcttgtggcccaggct

SEQ ID NO: 172882 - DNA, 30 bp, Homo sapiens
  chr12:126293265-126293295
  hypo
tgtctggaggcaagacggcgccaaggcgga

SEQ ID NO: 172883 - DNA, 24 bp, Homo sapiens
  chr12:126459884-126459908
  hypo
gtgagccaccgtgcccggccacct

SEQ ID NO: 172884 - DNA, 30 bp, Homo sapiens
  chr12:127498201-127498231
  hypo
cgacaaatagaaacacggggaacataaaaa

SEQ ID NO: 172885 - DNA, 30 bp, Homo sapiens; identical to SEQ ID NO: 9155
  chr12:127509692-127509722
  hypo

SEQ ID NO: 172886 - DNA, 30 bp, Homo sapiens; identical to SEQ ID NO: 85201
  chr12:128245725-128245755
  hypo

SEQ ID NO: 172887 - DNA, 164 bp, Homo sapiens; identical to SEQ ID NO: 85202
  chr12:128247733-128247897
  hypo

SEQ ID NO: 172888 - DNA, 30 bp, Homo sapiens
  chr12:128259050-128259080
  hypo
gccaccgagttgtgacgctcctgagccatt

SEQ ID NO: 172889 - DNA, 30 bp, Homo sapiens
  chr12:128305543-128305573
  hypo
cgccttcactcaccacgctctgtgtctcag

SEQ ID NO: 172890 - DNA, 30 bp, Homo sapiens
  chr12:128305944-128305974
  hypo
tctccagcggggtcacggcgggattgcctt

SEQ ID NO: 172891 - DNA, 94 bp, Homo sapiens; identical to SEQ ID NO: 85203
  chr12:128310533-128310627
  hypo

SEQ ID NO: 172892 - DNA, 109 bp, Homo sapiens
  chr12:128313386-128313495
  hypo
gaggagagcatgcctcgatacctgctggtccgagggggagaagaaacaggaggtgtgtgcagcagatctgacctctctcagccaccgctgacaccggccctccaccaaa

SEQ ID NO: 172893 - DNA, 70 bp, Homo sapiens; identical to SEQ ID NO: 85204
  chr12:128386218-128386288
  hypo

SEQ ID NO: 172894 - DNA, 38 bp, Homo sapiens
  chr12:128439869-128439907
  hypo
atataagaccgggcacggtggctcgcgcctgtaatccc

SEQ ID NO: 172895 - DNA, 66 bp, Homo sapiens
  chr12:128489342-128489408
  hypo
gtggggttttgtccgcggctagtcctgctgcagtgcatctgggctaatgcccgaggttcgttgctg

SEQ ID NO: 172896 - DNA, 31 bp, Homo sapiens
  chr12:128570491-128570522
  hypo
aaccctaaagcaactacgtttaaaaaataac

SEQ ID NO: 172897 - DNA, 1179 bp, Homo sapiens; identical to SEQ ID NO: 123332
  chr12:128750698-128751877
  hypo

SEQ ID NO: 172898 - DNA, 1095 bp, Homo sapiens; identical to SEQ ID NO: 123333
  chr12:128752114-128753209
  hypo

SEQ ID NO: 172899 - DNA, 264 bp, Homo sapiens; identical to SEQ ID NO: 85207
  chr12:128773736-128774000
  hypo

SEQ ID NO: 172900 - DNA, 354 bp, Homo sapiens
  chr12:128899664-128900018
  hypo
ggatgaccacggcgccggggagaagctgccatgcctgagggtctttgctttccgagaaaccagagaggtgcggggcagctgccggctgaagggggacctggggctgtgtgtggctgagctggagctcctgtccagctggttcagtgccccgacggtgggtgccgggaggaagaagtccatggaccagccggaggggacccctgtggagctctactacaccgtgcacccaggaaacgagcgaggggactgtgccgggggtgacttcaggaagggcaacgccatccgtccaggaaaggatgggctggaggaaaccacgtcccacctgcagaggatcggcaccgtcggcctttaccg

SEQ ID NO: 172901 - DNA, 30 bp, Homo sapiens
  chr12:128995437-128995467
  hypo
agatggcctgcaatgcgatgctgtgtgccg

SEQ ID NO: 172902 - DNA, 30 bp, Homo sapiens
  chr12:129000607-129000637
  hypo
aaggaggaacctggacgacagaacgaggcc

SEQ ID NO: 172903 - DNA, 30 bp, Homo sapiens
  chr12:129000867-129000897
  hypo
ggcagctctcacgtgcgttaggctgggtca

SEQ ID NO: 172904 - DNA, 30 bp, Homo sapiens; identical to SEQ ID NO: 85209
  chr12:129014690-129014720
  hypo

SEQ ID NO: 172905 - DNA, 30 bp, Homo sapiens; identical to SEQ ID NO: 85210
  chr12:129028676-129028706
  hypo

SEQ ID NO: 172906 - DNA, 30 bp, Homo sapiens
  chr12:129046593-129046623
  hypo
taaggatccaatgcgcgtctaccttcccac

SEQ ID NO: 172907 - DNA, 224 bp, Homo sapiens; identical to SEQ ID NO: 85211
  chr12:129148502-129148726
  hypo

SEQ ID NO: 172908 - DNA, 46 bp, Homo sapiens; identical to SEQ ID NO: 85212
  chr12:129151359-129151405
  hypo

SEQ ID NO: 172909 - DNA, 198 bp, Homo sapiens; identical to SEQ ID NO: 85213
  chr12:129180360-129180558
  hypo

SEQ ID NO: 172910 - DNA, 30 bp, Homo sapiens
  chr12:129181878-129181908
  hypo
cgccctttaccccaacgcagaaaacagcaa

SEQ ID NO: 172911 - DNA, 592 bp, Homo sapiens
  chr12:129189629-129190221
  hypo
tgcaggaggctgtattcagcacgtggctgcagttcagtgatggctctgtgacgcccctggacatctacgacaccaaggacttctccctggcagccacctcccaggacgaggctgtcgtgtcagtcccccagccccgctctcccaggtggcccgttgtggtggccgaaggggaaggccagggcccactgatccgagtggacatgacgatcgccgaggcctgccagaaatctaaacgcaagagcatcctggctgtgggcgtcggcaacgtcagggtcaagttcggacagaacgatgctgactccagccccggcggggactatgaggaagatgagatcaagaaccacgccagcgaccgccggcagaagggccagcaccatgagcgcacaggccaagatgggcacctctatggcagctctcccgtggagcgtgaggaaggggctctccgaagagccactaccacggccaggtccctgctggacaacaaagtggtgaagaacagtcgggcagacgggggcaggctggcaggagaggggcagctgcagaacatccccattgacttcaccaacttccctgcccacgtggacctccccaa

SEQ ID NO: 172912 - DNA, 30 bp, Homo sapiens
  chr12:129190512-129190542
  hypo
cggaccgggggcctgcgaggagagcaacca

SEQ ID NO: 172913 - DNA, 30 bp, Homo sapiens
  chr12:129277804-129277834
  hypo
aaagtattaacaaacggagaagccccagat

SEQ ID NO: 172914 - DNA, 207 bp, Homo sapiens
  chr12:129298023-129298230
  hypo
caggagcaaagtaggcgcacagggctattttggtgaagtttcaatctaccacgtggaaggaatattagacacattcgctacggctccaagagcatgagtaagacaaacacagacaggccgcaggcaggcagatgtgtgagtgggcccgcagaagaatgtccagcaaccagtgccatgccacaatggggtgcacggctcagagacaca

SEQ ID NO: 172915 - DNA, 69 bp, Homo sapiens; identical to SEQ ID NO: 85215
  chr12:129305164-129305233
  hypo

SEQ ID NO: 172916 - DNA, 15 bp, Homo sapiens
  chr12:129337894-129337909
  hypo
cacggggcacacccg

SEQ ID NO: 172917 - DNA, 238 bp, Homo sapiens; identical to SEQ ID NO: 9163
  chr12:129338587-129338825
  hypo

SEQ ID NO: 172918 - DNA, 30 bp, Homo sapiens
  chr12:129416568-129416598
  hypo
ggtttgagcaaggatcgccatggctttgcc

SEQ ID NO: 172919 - DNA, 30 bp, Homo sapiens
  chr12:129650453-129650483
  hypo
tggctattcacgtgacgctgactatgggct

SEQ ID NO: 172920 - DNA, 30 bp, Homo sapiens
  chr12:129650864-129650894
  hypo
catatgtttcgtctccggctactgtttgac

SEQ ID NO: 172921 - DNA, 32 bp, Homo sapiens; identical to SEQ ID NO: 85218
  chr12:129806102-129806134
  hypo

SEQ ID NO: 172922 - DNA, 31 bp, Homo sapiens; identical to SEQ ID NO: 85219
  chr12:129806373-129806404
  hypo

SEQ ID NO: 172923 - DNA, 30 bp, Homo sapiens
  chr12:129822262-129822292
  hypo
gtactcgacctgccacgtgaccagctgtgt

SEQ ID NO: 172924 - DNA, 278 bp, Homo sapiens; identical to SEQ ID NO: 85220
  chr12:130037480-130037758
  hypo

SEQ ID NO: 172925 - DNA, 40 bp, Homo sapiens; identical to SEQ ID NO: 85221
  chr12:130060595-130060635
  hypo

SEQ ID NO: 172926 - DNA, 31 bp, Homo sapiens; identical to SEQ ID NO: 9164
  chr12:130136921-130136952
  hypo

SEQ ID NO: 172927 - DNA, 30 bp, Homo sapiens; identical to SEQ ID NO: 85223
  chr12:130161095-130161125
  hypo

SEQ ID NO: 172928 - DNA, 629 bp, Homo sapiens
  chr12:130184243-130184872
  hypo
aggccggctctacttcggtgagcgataacacagcttttctggtcaaacagcttctggaaaacaccacctgatcgacgggcgggtacagacagacattgggaaacgacttacctcaacgtgaagcgatcttcagtggaatttctggagatggaaacaggaaaagtcagcacgtctcctttcctcacggtctttggtatatagtggatggccacgctgttgtccagacgcagttctctcagggagggtttcctgtgtgtctgataaaggaagatgctcccgatcctctgcaaggggggcccggactcatcgatgtcactgtggcctgtccggatcccattgcttctcctcgcgtcttccctgacgcagtcccctctctcaccccctgggtgcacggtgtagtagagctccacgggggtcccctccggctggtccacggacttcctcctcccggcaaccaccgtgggggggctgaaccagctggacaggagctccagctcggccacgcacagccccaggtccccctgcagccggcagctgccccgcacctctcgggtctctcggaaagcaaagaccctcaggcacggcagcttctccccggcgctgcggtcgtcccagtctctgcccatgat

SEQ ID NO: 172929 - DNA, 36 bp, Homo sapiens; identical to SEQ ID NO: 85225
  chr12:130326760-130326796
  hypo

SEQ ID NO: 172930 - DNA, 30 bp, Homo sapiens
  chr12:130376043-130376073
  hypo
gagcatcaggttcagcggactggacacttt

SEQ ID NO: 172931 - DNA, 186 bp, Homo sapiens
  chr12:130493340-130493526
  hypo
gctttttcttaaaaacgtcctaaaggaactaagctccggccagcaccaccacctggagctgcaccgtgtctcccgcggcaggacaggagtccagaactccccttgtccctttgcccagttcccatcacgagaggggctggggtgggcaagcagtgggtatagcagcaggtgcggctaccctcggcc

SEQ ID NO: 172932 - DNA, 139 bp, Homo sapiens
  chr12:130628826-130628965
  hypo
aaaaaaaaaaaagtaaagagaagcatgtaaaatgaattgtgataacattttatttaactcgatgatccaaacgatgctcatttcaatgcaggatccatatgaagattactgtttctccccgcctcgcatctccatttgg

SEQ ID NO: 172933 - DNA, 1467 bp, Homo sapiens; identical to SEQ ID NO: 123350
  chr12:130645186-130646653
  hypo

SEQ ID NO: 172934 - DNA, 170 bp, Homo sapiens; identical to SEQ ID NO: 9169
  chr12:130646945-130647115
  hypo

SEQ ID NO: 172935 - DNA, 86 bp, Homo sapiens
  chr12:130663583-130663669
  hypo
gaaagagcgaaactccacctcaaaaaaaaaaaatggtccagcgatgctgtcaagactggagtttttgtgtacgcctgtgcagctga

SEQ ID NO: 172936 - DNA, 31 bp, Homo sapiens; identical to SEQ ID NO: 85229
  chr12:130700589-130700620
  hypo

SEQ ID NO: 172937 - DNA, 31 bp, Homo sapiens; identical to SEQ ID NO: 9170
  chr12:130709678-130709709
  hypo

SEQ ID NO: 172938 - DNA, 56 bp, Homo sapiens
  chr12:130744951-130745007
  hypo
gcatcaatgctgtgttcagggcggggggagcgttcgccttttcatgctcacggttg

SEQ ID NO: 172939 - DNA, 30 bp, Homo sapiens; identical to SEQ ID NO: 50324
  chr12:130765404-130765434
  hypo

SEQ ID NO: 172940 - DNA, 27 bp, Homo sapiens
  chr12:130765888-130765915
  hypo
tattcatcgactccccggcagggggag

SEQ ID NO: 172941 - DNA, 30 bp, Homo sapiens
  chr12:130788271-130788301
  hypo
gggttcccccaggaccggtgtgacaatgca

SEQ ID NO: 172942 - DNA, 92 bp, Homo sapiens
  chr12:130821452-130821544
  hypo
cggcgtagacccggtcgctaccacctgcgatgccttggaaatgcagccggcggggcccacctgtggagcctgcagaccggaatctctggtct

SEQ ID NO: 172943 - DNA, 30 bp, Homo sapiens; identical to SEQ ID NO: 123357
  chr12:130823616-130823646
  hypo

SEQ ID NO: 172944 - DNA, 39 bp, Homo sapiens
  chr12:130828449-130828488
  hypo
gcgtgagccaccgcacccggcccattgaaggattcttaa

SEQ ID NO: 172945 - DNA, 144 bp, Homo sapiens; identical to SEQ ID NO: 26764
  chr12:130852206-130852350
  hypo

SEQ ID NO: 172946 - DNA, 43 bp, Homo sapiens; identical to SEQ ID NO: 85235
  chr12:130883020-130883063
  hypo

SEQ ID NO: 172947 - DNA, 64 bp, Homo sapiens
  chr12:130889075-130889139
  hypo
ctcaggtgatcagcacgcctcagcctccgcatgagtcaccgtgcccggccgttggatctatata

SEQ ID NO: 172948 - DNA, 202 bp, Homo sapiens; identical to SEQ ID NO: 85236
  chr12:130892169-130892371
  hypo

SEQ ID NO: 172949 - DNA, 34 bp, Homo sapiens; identical to SEQ ID NO: 26765
  chr12:130894170-130894204
  hypo

SEQ ID NO: 172950 - DNA, 30 bp, Homo sapiens
  chr12:130897141-130897171
  hypo
tcgaataggggtttgcgcttacctattttc

SEQ ID NO: 172951 - DNA, 225 bp, Homo sapiens; identical to SEQ ID NO: 85238
  chr12:130906936-130907161
  hypo

SEQ ID NO: 172952 - DNA, 37 bp, Homo sapiens
  chr12:130907880-130907917
  hypo
tgagtcactgaggcacggatctcgcacctctcctggg

SEQ ID NO: 172953 - DNA, 743 bp, Homo sapiens
  chr12:130909490-130910233
  hypo
cagaattagtcctggaggcaccgaggggggggaagcatgcgtctactcaggccgggggcatgccgtggagggctctgcaatgaaaacagaatgggttacggggctggggcggggtggaggctgaggcagagcacacgcagagccagcgggccgggcaggagccagcgccatgcatccagccaaggagagggcaggtgagatcccggcggcacatcaggccccacagtgcccacggtaccgctgctgtagatggtgggtgtggccacggtgccaggggagactgcccgggggctacatcctcagaaaccctgagggcagctgccactggaggccgtgtgtgactggagacagttcaccagacacggagcctgacccgtccctgtccatccactgggccaacttcccttccagcgctcggcaccctctgcaggactttctagttaggctgacgtgtcacccttctccctaagatacaagctgcgtgaaaccacgccatccccggccccaccaacagcgcccgcacaccatcgtgcagagtctgtgtcagcaaaggactggggtccgcctgtctcctctgcatcctgcatcaagtccctgagagccacacttgagccatcacagtctccagtgggtggcacagagctggccacaccgggagctgcttaaccagaccagtgtccatgacttttatactgcccgtctgcacgccatcactctctgccggggacagccctcaactcacc

SEQ ID NO: 172954 - DNA, 31 bp, Homo sapiens; identical to SEQ ID NO: 85241
  chr12:130910644-130910675
  hypo

SEQ ID NO: 172955 - DNA, 382 bp, Homo sapiens
  chr12:130913638-130914020
  hypo
ctcaaaaaacaaacaaaacaaaagacacttaggtttttaaaacatgccacgttgtctaacacacacgcgcagacactggcagacagcctggcctggcaggaggtggagccaccgcacagactgtgtgcttactccgggcccagctcagcctcagcatgagacgaagattgtgcagatagtaggggcactgggcggaggctgcggacagcagaaaggcttcaacaaaaaaagtgtgtttaaatgaagaggctacctggtaacatgccagcttggagacagcgacagccctggtggtctctcccagtgatggtgccagcagcagccgctgggtttccactcacagagaaagcacctagtcacgtggtaacggtattcaaagcaa

SEQ ID NO: 172956 - DNA, 259 bp, Homo sapiens; identical to SEQ ID NO: 85243
  chr12:130915749-130916008
  hypo

SEQ ID NO: 172957 - DNA, 578 bp, Homo sapiens; identical to SEQ ID NO: 85244
  chr12:130918919-130919497
  hypo

SEQ ID NO: 172958 - DNA, 173 bp, Homo sapiens; identical to SEQ ID NO: 85245
  chr12:130920512-130920685
  hypo

SEQ ID NO: 172959 - DNA, 610 bp, Homo sapiens
  chr12:130921353-130921963
  hypo
gaggagccaccgaggcgggagccccagccttaccctgctgctctcggccaccctctgcgcggcctcccgggccatggccttggcgacggtggtggacaccggggtgccctgtggctgtggcaggatgcggctgggtgagggcgaccgccttccggggcccacgggcggctccagcatgtgcccatgcacagggccaggtgcacggctctgctcccaggcctcatccatcctggcgtggggacccaggtgctcgtctttggtttcggggactccagaacttgctaatggctttgattggggtgcaggtctcgggtggggggtaggaggcaccaggagctcggggggaacggcagcaactgcagagtccacggactcgccctgggcggagagggtccgcacggtcacgcccttggcctccaggctccgcagccgcacaagctccacggccgtgctgtctgccgtggggaagatgacttcagccacctgtggacaagcagagctggctcgcgggctgcccgaggtgagccccgcggtcctgcaatggggagccgaccagtcctctgcccagaggccaggtgcaaaggatcatgcccagcgacctccgactcca

SEQ ID NO: 172960 - DNA, 40 bp, Homo sapiens
  chr12:130922986-130923026
  hypo
gtctccaggagacccggatggtggcgggggtcaccccagc

SEQ ID NO: 172961 - DNA, 142 bp, Homo sapiens; identical to SEQ ID NO: 26770
  chr12:130925067-130925209
  hypo

SEQ ID NO: 172962 - DNA, 437 bp, Homo sapiens; identical to SEQ ID NO: 85249
  chr12:130926605-130927042
  hypo

SEQ ID NO: 172963 - DNA, 103 bp, Homo sapiens; identical to SEQ ID NO: 85250
  chr12:130929719-130929822
  hypo

SEQ ID NO: 172964 - DNA, 293 bp, Homo sapiens
  chr12:130931807-130932100
  hypo
ggtccctggctggtaagggcacggagaagaagtgggagatcctacggctgtcgtgacaacctcgtcggtgctcctgcgtgtgggccctggaggccacccgacctcgtgggtgttcagggcagacgctgccacgtactgtgtggatgagaccaggggacacgtcgggaatggggactcaacagagacagaagtaggtcaggggtcacgcagcgctggaggcgggggaggagggacaggtgatcactgatgggaatgggttcttgaggggcgatgggagacgagggacaggtgat

SEQ ID NO: 172965 - DNA, 587 bp, Homo sapiens
  chr12:130933877-130934464
  hypo
atccttgcccacgtccgcctctgcggaagctcccgtggaggacctgagaggtgtgcgggacaaaactggctcattacctctcagcgagcacaaacactgaaggcccctgcacgggaagcccactcagcggctgtcatcgcagcgagatgcagcctgcagcgcccagcagagggtgaggatgcgggagatcagggtgctggacacaccccctttcactctcggtggtggggatcggggctctggacatgtcccctttcactctcggtggcgggatgtcccctggaaagacgcactcatggaccaacccctgcacctgtgaatgggaccttatttggaaacagtctttgcaaatgtgatggagttagtcatactgcagcggggcagattccaatccagggaagggtatccttaaaggaagaggggagaacgcacaaagacagggagggcgaggcggccaggcaggatggaggatggaggcagagactggagccacgcagctacaagccagggccgcctggtctcccggcagccagaagaggaaagaaggacccctccttggagccctcggagggcgagaccctgccgat

SEQ ID NO: 172966 - DNA, 333 bp, Homo sapiens; identical to SEQ ID NO: 85253
  chr12:130934696-130935029
  hypo

SEQ ID NO: 172967 - DNA, 416 bp, Homo sapiens
  chr12:130939633-130940049
  hypo
tgggtttcccagagcagaagccgtgcgtttcttgtcgcacggagtggggctctgtgtggcccttcacgggagggagagagacagcatggagacacgtgcattctgttttcccctgggaagaacggaaaccgtcttgttttcctccactcttcaggtgtcacagctcaaatgtggtttcttggcagccgccttccaggaccatctagaagagcccaagtcactgtccacctcatcacctggtcttcatgcagcgtctggatcagaggctccccacgtatcgtctgcccgccagcgggagctccgcacggtgccctgtctgtctctcagcgttgcaacctaggcagggcatgcagcctgggtgtcgtgagtgcctggagatgagcggcagagcgctcggaccctggtccctgcctgct

SEQ ID NO: 172968 - DNA, 125 bp, Homo sapiens; identical to SEQ ID NO: 26773
  chr12:130941077-130941202
  hypo

SEQ ID NO: 172969 - DNA, 30 bp, Homo sapiens
  chr12:130953932-130953962
  hypo
catgtcaatgggctccggggcaactgggga

SEQ ID NO: 172970 - DNA, 191 bp, Homo sapiens
  chr12:130954678-130954869
  hypo
gaaggccactcatgtcgtgtttgcgaggaccacacccggggaagtgcctcagatggcgctgaggactctgattccccaggccctcctttctctgatcctacaaatgcctccccaggatgggtgtcataccttaaaaaggtaccccaaggcagttcatcagagaccaggatggcctccggaaggtccaccgg

SEQ ID NO: 172971 - DNA, 30 bp, Homo sapiens
  chr12:130955212-130955242
  hypo
cagaaagcaggggcacgctccttacctcta

SEQ ID NO: 172972 - DNA, 176 bp, Homo sapiens; identical to SEQ ID NO: 85256
  chr12:130958395-130958571
  hypo

SEQ ID NO: 172973 - DNA, 30 bp, Homo sapiens; identical to SEQ ID NO: 85257
  chr12:130958981-130959011
  hypo

SEQ ID NO: 172974 - DNA, 144 bp, Homo sapiens; identical to SEQ ID NO: 85258
  chr12:130963327-130963471
  hypo

SEQ ID NO: 172975 - DNA, 446 bp, Homo sapiens
  chr12:130968369-130968815
  hypo
gccccgaccctcacctacacacggtgcccggagcccccaccctcacctacacacagtgcccggagcccccgtccccacctagacacggtgcccggagcccctgtccccgcctagatgtgtccctgagccatgccactaacaggggctgcgagggcttccgcggctcctggaaaggccccagaagttcccccaggcactggcttgctggcatggacaatgtcccatgggaaggatagactggaggcgaaacatctctccagagtctgccggcgactgtcacttaggtgtccttggccggaaggagcccgatgccccccgaagtggacccctggccccatgtcgcatcccagctgaaagcccctcggtggggagtaaagcggcatgctgtcacagggccacctgactgcctcttgcctcctgatgccgctgccaccaccatctgcctg

SEQ ID NO: 172976 - DNA, 30 bp, Homo sapiens
  chr12:130980584-130980614
  hypo
aagcattgtggaccacggcagagagtacgt

SEQ ID NO: 172977 - DNA, 282 bp, Homo sapiens
  chr12:130985314-130985596
  hypo
taggacatggaagacacaagacgcgtcaggtgctagatgagaacggtggccacaggatttgggaacaaaggccgtggtgatggctgcctgagcttcatgctttaacccaagtgagccgcttctatcactctaccacacgcgtcatctaataatggaacaacatgggtttcttgaggatcagcagggaggtccgtagagtgggaacccggagctctcccacccgagcatccaggggtcacgacacactccatctcccacacgtggtgacgccctgaccctgaa

SEQ ID NO: 172978 - DNA, 30 bp, Homo sapiens
  chr12:131057942-131057972
  hypo
gtgtgcgactgtgtgcgtgtgagtgtgtgc

SEQ ID NO: 172979 - DNA, 216 bp, Homo sapiens; identical to SEQ ID NO: 26776
  chr12:131077262-131077478
  hypo

SEQ ID NO: 172980 - DNA, 455 bp, Homo sapiens
  chr12:131095738-131096193
  hypo
gggaccgggaaccgccgcagctcctggaactgcacattcccctcccatcccacgagctctgtccccacgtcccccagaccccacaggggaagcactcagtgcctgcctctccaggagccgccttctcctccctgatgattgacgtccctcccgtaaaggatctctttgagctacagcctccatcagacaatacgttgcaggatattgggggcccttttgtcttccactcccgcagaagccagggcacctggggccgcttcatttacccgcatctctgcccccgatcctccgctggaagacaccggctgccggctaccgggcttcgctgcaggtgtaagtggcagatgccaccatgctggcggcgacgcgtctcctgcggagaggatttacctccgtagcctgggctaggaccttcaggaggcctgcacagcctcgatttaggaagccctttgcct

SEQ ID NO: 172981 - DNA, 210 bp, Homo sapiens; identical to SEQ ID NO: 85262
  chr12:131097714-131097924
  hypo

SEQ ID NO: 172982 - DNA, 152 bp, Homo sapiens; identical to SEQ ID NO: 85263
  chr12:131102207-131102359
  hypo

SEQ ID NO: 172983 - DNA, 697 bp, Homo sapiens
  chr12:131110921-131111618
  hypo
ccatcttctccatcacgactaccgccagcatcaccatcagctcctccatcaccatgactaccactggcatcaccaccatcttctccatcacgactaccgccagcatcaccatcagctcctccatcaccatgactaccactggcatcaccaccatcttctccattaccatgactaccgccggcatcaccaccatcttctccatcacgactaccgccggcatcaccaccatctcctccatcaccacgactaccactggcatcaccacaatctcctccatcaccatgactaccagtcatcaccatctcttccatcacaactactgcttcatcacacctcctccatcaccacaactaccgccggcatcatcaccatctcctctgttgccacgactacctaccaccaaaatcatcaccatctcctccatcaacacgactaccaccagcatcaccaccatctcctccatcaccatgactatcagtcatcaccatcatcttctccatcaccacgactactgccggcatcaccaccatcttctccatcacgactaccgccagcatcaccattaccaccattatcaccacgactaccgccagcatcaccatcatcttctccatcaccatgactaccaccaaaatcatcaccatctcctccatcacaactaccaccagcatccccatctcctcgatcaagtctactg

SEQ ID NO: 172984 - DNA, 30 bp, Homo sapiens; identical to SEQ ID NO: 85265
  chr12:131125184-131125214
  hypo

SEQ ID NO: 172985 - DNA, 210 bp, Homo sapiens
  chr12:131125841-131126051
  hypo
tgactgccggacactcggcccggcatcacgggctggatttaggatggtgactgccggacactcggcccggcttcacgggctggatttaggatggtgactgccggacactcggcccggcatcacgggctggatttaggatggtgactgccggacactcggcccggcatcacgggctggatttaggatggtgactgccggacactcggcccg

SEQ ID NO: 172986 - DNA, 51 bp, Homo sapiens; identical to SEQ ID NO: 85267
  chr12:131129059-131129110
  hypo

SEQ ID NO: 172987 - DNA, 460 bp, Homo sapiens; identical to SEQ ID NO: 85268
  chr12:131133584-131134044
  hypo

SEQ ID NO: 172988 - DNA, 18 bp, Homo sapiens
  chr12:131148891-131148909
  hypo
acacatgcacacacatat

SEQ ID NO: 172989 - DNA, 78 bp, Homo sapiens; identical to SEQ ID NO: 85270
  chr12:131149028-131149106
  hypo

SEQ ID NO: 172990 - DNA, 30 bp, Homo sapiens
  chr12:131153549-131153579
  hypo
acacgtggaggtgtgcgcctgcgtgccgaa

SEQ ID NO: 172991 - DNA, 148 bp, Homo sapiens
  chr12:131157700-131157848
  hypo
ccacacatcgctccccgtttaggttcctggtaaacagcaggagctgctcaggcagaggaggtgggtgcctcgccggacaactcaactcgcgggctggctcgtctgccaacctcatcctggatctgggactggccgtcagatttcccag

SEQ ID NO: 172992 - DNA, 569 bp, Homo sapiens; identical to SEQ ID NO: 26777
  chr12:131159258-131159827
  hypo

SEQ ID NO: 172993 - DNA, 288 bp, Homo sapiens; identical to SEQ ID NO: 85272
  chr12:131164353-131164641
  hypo

SEQ ID NO: 172994 - DNA, 32 bp, Homo sapiens
  chr12:131173698-131173730
  hypo
ctcccgtgtcctgggccgggcacagtggctca

SEQ ID NO: 172995 - DNA, 133 bp, Homo sapiens; identical to SEQ ID NO: 85274
  chr12:131174312-131174445
  hypo

SEQ ID NO: 172996 - DNA, 189 bp, Homo sapiens
  chr12:131182718-131182907
  hypo
aaagactttcaagggagaaggcgtgggccacagagccagagggggtgcaaccgtgacttagtgaagccccttcctttgggtctcgttacagccacagaacccgcctccatctgactcaaacactgtccttaacttgctcacttcagaaggccgtccgtccctgctaccgctcctaatgtcctggtctct

SEQ ID NO: 172997 - DNA, 43 bp, Homo sapiens
  chr12:131186210-131186253
  hypo
tcaaagccatgggacacaaatcgctcctgcttgacagtgtggg

SEQ ID NO: 172998 - DNA, 223 bp, Homo sapiens; identical to SEQ ID NO: 85275
  chr12:131189178-131189401
  hypo

SEQ ID NO: 172999 - DNA, 216 bp, Homo sapiens; identical to SEQ ID NO: 85276
  chr12:131193260-131193476
  hypo

SEQ ID NO: 173000 - DNA, 30 bp, Homo sapiens
  chr12:131224396-131224426
  hypo
cagtgaccccatccccgcagaggggccccc

SEQ ID NO: 173001 - DNA, 155 bp, Homo sapiens
  chr12:131249876-131250031
  hypo
gtgatgtggtgttgatgatgtcgtggtgatgtcattgtgctgatgttgtgttgatgtcgtggagttaatgatgtggtgttaatgatgtcatggtgttgatgtcgtggcattgatggtgtcatggtgttgatgacgtcatgatgttaatgcagtgt

SEQ ID NO: 173002 - DNA, 384 bp, Homo sapiens
  chr12:131264840-131265224
  hypo
acctaggatgcacgccgaagcaaaacatagcatctgtgagggatctgagcttgtgattcctgcattagaagctcagaaagaaacagaaaactccaacgtgtgtagagcctggagtgagtcatgggagcaagggcctcctaccttctttccccgcccggagcagcaggggccctgccccatgcagaaccacagaggcaggggcgccgcctcacccctcctccaccagcgactcctgcagcctgggctcctgtcttctggcaggtgcccaccggagcagctcaggatcgcagatgtctcagaatcttccctctagcaaagttactcctaaaaacctatcccagccagggcagggaggagacaggagatgcccggctctgcccgcct

SEQ ID NO: 173003 - DNA, 403 bp, Homo sapiens
  chr12:131265525-131265928
  hypo
tgcagagccacggagcgtccaccgatccccaggacaggttgtggctcagggaggcggcacccacaacaggcttcccaggccgcacctccaggccccgatctctgctctcacctcctgggctcaccctcccgggggaaggaggggctggacatggagcctgtggctgctcggtgtgggtggtgacactcttggtgacgtccctcggtcgtcaggactcatttccccggtgttggatgcagctcgaggacagcagaggggcccagcccataaggatgggaaggtctaactgtagatgctgacaccgaatgccggagacgcggatgcttctaccccagtggcaccaaggctgctgtctgcggaatcccaaaggtgacagctttctctaccacgggccgccccagcc

SEQ ID NO: 173004 - DNA, 30 bp, Homo sapiens
  chr12:131268091-131268121
  hypo
agagcctcaggaatccgagcgcagatgagg

SEQ ID NO: 173005 - DNA, 294 bp, Homo sapiens
  chr12:131268400-131268694
  hypo
acccctgggaagcagacgtaaaatagaaacaataaatttaaaaactgatgagggacatcaacgcctacgtaccagagacaggtttcacaggttgagcctgggcaagttaccaacgaagaaaggaattaaaaatgaacaatcaaaaacgcagcaacaacaatcatcttcgcggatccaattccaaaattactacattactaaaaacatccagctttaaacaaatgatacatgcaaagaaacatgaaagtggaactcatccatgaaagcataaaaaagcagcgaatagaaactctc

SEQ ID NO: 173006 - DNA, 1713 bp, Homo sapiens
  chr12:131271735-131273448
  hypo
tgggccggccacccgcgcccagggcagggatctacacttgagtgtttccgcgtctgggtcctaattcctagtgggagcacggaaggacacagggaatgttgggagctgcatgggccatgtcttggtcccatgggacctggccctacttgacccgaggccacaccagcttgtagacatgagcttttgggggggctttgagtcctaagagacccagctgcccacgccacacagggggaaaggaagcagctggagagtccgctgcccacaccaccccgggctccacggcctcacccccaggccgtcacagagctccagtctcccgccacttcagtgcaaccctcgctgtctgcccactcctccggacatgacgcttaggaccttaccttgctctccagctcagagcccggcccccatggccgggccagacctgccccggcctctcccctccgcctgagccacgccccggcttcctgctcaccaggcctgcgttagcatctgcagctgtgcttcttcaggccgccgcaacaccagccttcccgcactgctccaagacactgagcctggtgcatgctcaggaaattcaacaatttcaaaacattgtcactctccccgcctgacgaccagccttgtactctactcacagggcaacctgctttagcaaactcaacgacacattaaaaagtacaatttgcaaaggagagctaccacctggctgggtgttctgcgcctagagactgggccccgggagagcgctccacagtgaacttgcgaaggatggaatttacataaagaaggcaccgtctttagtcctggaaaggcaccctgggattctctacctccgtccgtctttttcacaggcagggaactgaggtcccaggaggcccaggtcaccccacccaaggaggcagggcctcccctgcactctctggaacctctccctgccaagaagccagaggccctgttttctcaggcttaggaatctgcactctcttgttcaaagactgtgagtcagaagaggagggccaagtgccgccttgaatttctcttactgctcaaatggaaaacaatgaaacagggctgtccacatcacagcctgccacctgccagtcatttagagcctggcgcgcatttccatagctcctctgacgccaggacaatcagacccgtctccggagggctcctgcctctggatgtctaaatgttcttgccttaaacccggtgtgacgctccacccctcccacaccgcacacatacgaattttaacaaaatcttcaaagcagaacttaacaaaaggttgcgtggtaccaggtccatttggttccatgtgaaaccaactaggaagatccgcattaggctcttcctcagctgcgccgagggcctggtttctattcatttgagaagctgtgtgcgcccctgtatggtctgttctttcctttagggctcgcttttaacagtgagtgttgttgtggcaactaaaataaggagccggccagtgctcctagggaggaaaacctcggcaactccgcaggtgcaggcaccggccacagacccacgcctggggcactcgcgtttgcattagcagagcgcaggagtcagggagcgcgggcaggggcgggaggaggggtctgcgcactggccacggtgtgggggacccagccctaccccttcccggggctgagtgggactcgccacgaggccagcagtttttccagg

SEQ ID NO: 173007 - DNA, 28 bp, Homo sapiens
  chr12:131279174-131279202
  hypo
gggactataggcacgtgtgccaccatgc

SEQ ID NO: 173008 - DNA, 30 bp, Homo sapiens
  chr12:131279783-131279813
  hypo
caatgtttttctcagcgttcatccatgccc

SEQ ID NO: 173009 - DNA, 342 bp, Homo sapiens
  chr12:131288902-131289244
  hypo
aaccaccgtgatgaccgatgctcgactcgtgcatgccaagctgttctgcaatgaggtctgaagacgatgcctccggcacaggcaacctctcatcaagatgctcatccagcctgaccagtggtcccaagtgttgtcaagcaagtcagaagacagggccggctgcacacgttctaccctgaaagcctgctgtataaagaacactttctgagggcaggcggctgtggggtccaccgtctctgtctctcgggggcttctgttcgtacgtccctagccaatgtttccttcgagaaactggatttgttagcctctttctttggcgtctcagctcgctcagcctttggg

SEQ ID NO: 173010 - DNA, 31 bp, Homo sapiens; identical to SEQ ID NO: 26780
  chr12:131291827-131291858
  hypo

SEQ ID NO: 173011 - DNA, 41 bp, Homo sapiens; identical to SEQ ID NO: 26781
  chr12:131294421-131294462
  hypo

SEQ ID NO: 173012 - DNA, 263 bp, Homo sapiens
  chr12:131314793-131315056
  hypo
acccatctcaatgctccccagcgccacgcttccctgtgaaagcaagctgctttcccatggtgaccgtcccatgctgtgtgatgcaccccccacagtggcgtggcgtaaacaaccagaggctcaaccctcctctcccatggtgaccgtcccatgctgcgcgatgcaccccccacagtggcgtggcgtcaatcctcctccactctgaacccacggcacgggcggatttttgttccaagtcattcgcttgctggtaaacaatttgt

SEQ ID NO: 173013 - DNA, 30 bp, Homo sapiens; identical to SEQ ID NO: 26782
  chr12:131366696-131366726
  hypo

SEQ ID NO: 173014 - DNA, 30 bp, Homo sapiens; identical to SEQ ID NO: 26783
  chr12:131389263-131389293
  hypo

SEQ ID NO: 173015 - DNA, 226 bp, Homo sapiens; identical to SEQ ID NO: 85284
  chr12:131402640-131402866
  hypo

SEQ ID NO: 173016 - DNA, 296 bp, Homo sapiens
  chr12:131418193-131418489
  hypo
ccaggcccctcggggcgtccccacgtcagatccctggggtcaagcctgtccccaggatgactccccaggttttgacctgatcgctgcacccatgaggctcccggtgtccgggcgctcctcaggtccccgacacggaggcaggcttgggatgactgcaacctgctctcatgagtcacagcaggtgcctgtcgagacccacacggacccgggcgggcaggacctcggatgctgactccctgtggggtcaggacctccttcctccaggttctgccgtctgaggccgcagcctgctcctc

SEQ ID NO: 173017 - DNA, 30 bp, Homo sapiens; identical to SEQ ID NO: 85285
  chr12:131418750-131418780
  hypo

SEQ ID NO: 173018 - DNA, 386 bp, Homo sapiens
  chr12:131443180-131443566
  hypo
aggctcgcctgcccccgggcagctctggcagaggaagcctggccctggcgcgtctcctcaggagcgctcatgacgggcacgggcgtcacaaacacaccaacagaaacaacctgtttccatcgcaagagaacagctccttaacacgtagcatttcattctaaagagtgctaaacagctatgaaaagcggccagtttgtctgcacgttgggcctttcaatgattttacatcatccttgcgagagccctgcggtggtgtcacgccctcgcaccgcgggtggagaagcgtgtctttcagacagaccaagcgatttgctcaaggtcacagggctcagaggacacaatattaagcccaagaagctcacagcgtgaggggaattaggggagac

SEQ ID NO: 173019 - DNA, 223 bp, Homo sapiens; identical to SEQ ID NO: 85287
  chr12:131478125-131478348
  hypo

SEQ ID NO: 173020 - DNA, 523 bp, Homo sapiens; identical to SEQ ID NO: 85288
  chr12:131478660-131479183
  hypo

SEQ ID NO: 173021 - DNA, 30 bp, Homo sapiens
  chr12:131496437-131496467
  hypo
agtcgcgtgcggggcggggacaaggttctg

SEQ ID NO: 173022 - DNA, 109 bp, Homo sapiens; identical to SEQ ID NO: 85289
  chr12:131499287-131499396
  hypo

SEQ ID NO: 173023 - DNA, 84 bp, Homo sapiens; identical to SEQ ID NO: 85290
  chr12:131501102-131501186
  hypo

SEQ ID NO: 173024 - DNA, 147 bp, Homo sapiens
  chr12:131512464-131512611
  hypo
gcagaacagagctgccggatgttctagtgagcgcgtttctgctggtgaacctgactgtgcccttctttgtgggatctgcccaggatggcgtcgctgggtcgaggggcatgttcagcatgaacagctggtgcccggtgccttctccag

SEQ ID NO: 173025 - DNA, 74 bp, Homo sapiens; identical to SEQ ID NO: 85291
  chr12:131513784-131513858
  hypo

SEQ ID NO: 173026 - DNA, 217 bp, Homo sapiens; identical to SEQ ID NO: 85292
  chr12:131515097-131515314
  hypo

SEQ ID NO: 173027 - DNA, 434 bp, Homo sapiens
  chr12:131518463-131518897
  hypo
ccaccctctgccagtcctccccgggggatgccggctccacctgcagctcacgtccgatttccaccggtacccatcgtcaccatcaccagccttgcccctggtttcactgtctaccccggaggccagcgccagcctcccagccgcccccagctgcacacagcagccagagtaatattcgacgtggccgtcaggtggtgtcaccctgtgctcgaaccctctcggggcttcctctgcatttcaagtaagatctacacgcccttcttcccctgcccaccctgccgcactctgggccactccccgcccattccactccgctcccgccatgcgtctgccttgctctgcgccacatcaagtgcattcccaccccagggcctttgcacgcctgtccttttgaatggaatgctcttcccccgggtccccgcatggttgacacc

SEQ ID NO: 173028 - DNA, 76 bp, Homo sapiens
  chr12:131556199-131556275
  hypo
tgtgcacgcactggcgggtcctatgtgtccaggaggcccgaggaaggagagagtggagacccggatgccgggttca

SEQ ID NO: 173029 - DNA, 938 bp, Homo sapiens; identical to SEQ ID NO: 26784
  chr12:131572480-131573418
  hypo

SEQ ID NO: 173030 - DNA, 331 bp, Homo sapiens; identical to SEQ ID NO: 85296
  chr12:131581011-131581342
  hypo

SEQ ID NO: 173031 - DNA, 35 bp, Homo sapiens
  chr12:131615308-131615343
  hypo
gcgaagctggccatcccgtgcggggccccagtggc

SEQ ID NO: 173032 - DNA, 343 bp, Homo sapiens
  chr12:131623220-131623563
  hypo
gctcccacccattctcgcactccgcccccgcccgcagctgtgtgattttccatttgcttagggaccacgtctgccctgctccatgggagctggctggctcatgggctgctctagccccacggctacagctgcgccgggtgtgtggcacgctccatgagtcaccgtggaatgaacgcagcgtggacagatgcatgggggtgaaagcgtgggtgccgggcagatgggtgagcagaggagggagtgagcgctcagcacagcacgcctgcagtgcccttaaggggagtcagcgtggagaaccgtgcggctggagacgccacagtgcgcacatcctcatctcccccag

SEQ ID NO: 173033 - DNA, 30 bp, Homo sapiens; identical to SEQ ID NO: 85298
  chr12:131649180-131649210
  hypo

SEQ ID NO: 173034 - DNA, 128 bp, Homo sapiens
  chr12:131687732-131687860
  hypo
ctgtccctggggagacggaaggagcagccgacttgcaccgagaagaaagcaaaacactctctcgtggttaagggcgttgcgcggttgctctcacagggaccggcgttccctgtcgggagggatgcggc

SEQ ID NO: 173035 - DNA, 31 bp, Homo sapiens; identical to SEQ ID NO: 26786
  chr12:131693247-131693278
  hypo

SEQ ID NO: 173036 - DNA, 30 bp, Homo sapiens
  chr12:131746711-131746741
  hypo
ggtgggaaggtctcacgtccatgaggaact

SEQ ID NO: 173037 - DNA, 141 bp, Homo sapiens
  chr12:131747237-131747378
  hypo
cgcatggcgggacggcgtggctgagaagcagaggagaaccgtgccccgcagttctccacgggttcaaacaaccggatgttacctgtggcctccgtggatcaggaacttgtggcagaggcacaggctcgaggaagacctcag

SEQ ID NO: 173038 - DNA, 178 bp, Homo sapiens
  chr12:131758655-131758833
  hypo
tcccagagatgaagccgctcctgacagccactcacagtaacaagggcagagcccagggaaaaatgcaccatcacggggaagactctgcagggacagggcagacccgagtcccgttgggtcccaaccctggccgcctgccctgcatcagaggttcccaaagcggcggacacgggcaccc

SEQ ID NO: 173039 - DNA, 566 bp, Homo sapiens
  chr12:131766861-131767427
  hypo
agcgttcctgggtggcgttcctgggtggcgttcctgggtggcgttcctgggtggcgttcctggggtactcgggagggagacggagagccaggcttgcttgcacccaggtggctgggtctgctaagatccctgctggccacgcagtgagctcagtgtcgttgtcaccatcctcgacgtcagccccacaaggagggtgctgcccgacatcccagcctcccgctgcggaagagagaggtttggtaaagaaggaacaggtctcagagtcccagcctgtgggctctggggaggggattagaaatggcgcttccagagtgcctggaaggagcgaagcagctgccagtgtcattgtcattatctatgttgaggatgacacaacaatgccctcgatgacgttgaaaggctgtttccagactcaggggctccccgcctcgctcagttgaggacctgccctggccgcagcccaccctcagccctcagcagagctggggcctgggcagctctgccgtcttcttccagaggggcgctggaagaagctcccgaggatgaagtctcggccgtcttcatcc

SEQ ID NO: 173040 - DNA, 30 bp, Homo sapiens
  chr12:131830316-131830346
  hypo
tgcttacagcgtgcccgaggatgggtgtca

SEQ ID NO: 173041 - DNA, 184 bp, Homo sapiens
  chr12:131834062-131834246
  hypo
tgtggccaccagcgtcgcagcagcaaggtgagcctgagcaggagcacactgtccctacctgtctctgtttcttcctgccccttggggtgtgggcaccttgccagctgggaagctgtagtctgtaacagtgatcatcgtgctcttcgctgccgtcatttccaacatcgtccgagaatttatgaag

SEQ ID NO: 173042 - DNA, 351 bp, Homo sapiens; identical to SEQ ID NO: 85301
  chr12:131836987-131837338
  hypo

SEQ ID NO: 173043 - DNA, 152 bp, Homo sapiens; identical to SEQ ID NO: 85302
  chr12:131872312-131872464
  hypo

SEQ ID NO: 173044 - DNA, 403 bp, Homo sapiens; identical to SEQ ID NO: 85303
  chr12:131943498-131943901
  hypo

SEQ ID NO: 173045 - DNA, 435 bp, Homo sapiens
  chr12:131978694-131979129
  hypo
ggagccgggaaagcgcgggcatcaggagcacgaggggcctcaggacagcgcgggtgaccctgggccaaccgagcctcgatgccagccccaagcccgtggagcccgctgtccccttgtatgtcggcggcagacagagggacagggtcaggtggggcagagtccacagaaggcccactgcactcgctacctgggcagtaggggagccgcccaagccgggcctccgacgtcccctggttggagggcgagtggttcaggctcactcccgagggtcctgaccagcagaaggaggggcccagggacaggtgaggagatgcagtcctggtcccggcgaggacagcggccggctcttcccgtggcccggagggccctgtcggaaacagcttgaggacccggagttcccaggagtctcctgccagccttcgtctctgcctgccc

SEQ ID NO: 173046 - DNA, 47 bp, Homo sapiens
  chr12:131999407-131999454
  hypo
ccctgggcacaaccccgagccagccttccccacgctaccgggatatc

SEQ ID NO: 173047 - DNA, 110 bp, Homo sapiens; identical to SEQ ID NO: 85305
  chr12:132014575-132014685
  hypo

SEQ ID NO: 173048 - DNA, 31 bp, Homo sapiens
  chr12:132043901-132043932
  hypo
cagaagccgggcgaggcggctgagttcagtg

SEQ ID NO: 173049 - DNA, 30 bp, Homo sapiens; identical to SEQ ID NO: 85306
  chr12:132045350-132045380
  hypo

SEQ ID NO: 173050 - DNA, 302 bp, Homo sapiens
  chr12:132060403-132060705
  hypo
gcaaagaggaattctaacacacggcttccccgtgccacctgccacctgccctgggctcagcgcacacaggcccccctgttgctgtgaagacgctgatctaagaggacaggggaagaccaaggactccacgctgctgggtcattttaacccctccacacaggcctggtgaccgtccccgtgtctcaacagtcggagcaaaatgcacagaggaaaggggtcaaatccccaaaagatgcagtgagtaagacccactgcagtgagtgagagccagtgcagtgaattagacccggtgcagtgagtga

SEQ ID NO: 173051 - DNA, 30 bp, Homo sapiens
  chr12:132060989-132061019
  hypo
gagtatgacccgatgcggtaagacccagtg

SEQ ID NO: 173052 - DNA, 30 bp, Homo sapiens; identical to SEQ ID NO: 85308
  chr12:132069080-132069110
  hypo

SEQ ID NO: 173053 - DNA, 46 bp, Homo sapiens
  chr12:132069343-132069389
  hypo
aataataaaattggtcgcacggtctgctcaccgtcacgtagcccca

SEQ ID NO: 173054 - DNA, 234 bp, Homo sapiens
  chr12:132069599-132069833
  hypo
tcagccctctcttcgcgtctgatcagccctctcttcgcgtctcatcagccctctcttcacgtctggatcagccctctcttcgggtctggatcagccctctcttcgcgtctggatagccctctcttcgggtctggatcagccctctcttcgggtctggatcagccctctcttcacgtctggatcagccctctcttcacgtctggatcagccctctcttcacgtctgatcagccct

SEQ ID NO: 173055 - DNA, 497 bp, Homo sapiens
  chr12:132076258-132076755
  hypo
gccacagaggggtcacgcagcccagtcaccagggccatgcggctccacggcttctacgcttgggcactgaggaccgaggggttcaatcaggtcccagctccagtccaaccttggaagccaagtgttgggaagggagcatccgaggacagacagagccagggcccctgagtcactgcaggaggacgcccccgctgggactcggcgtccgctgcgctgagccgctaaggagccggtctacttgctcccgcagcagcccgggggccggagctgccgacaccagggagacgcgttttctgcactgactcctacgctcccgcgtggacatccccagcatgatttctgtctccacccacttcgcacacaccccgccccggccagacacccccaaacccacacagggtgcagggacaccgccctggccttggctgtggctgtcacactcgcctgtcccgccttggccccaagtcctgccagcccggctccgtccccgccccact

SEQ ID NO: 173056 - DNA, 30 bp, Homo sapiens
  chr12:132083146-132083176
  hypo
tgccacctcccggcacgggctggagaaggc

SEQ ID NO: 173057 - DNA, 30 bp, Homo sapiens; identical to SEQ ID NO: 26789
  chr12:132084638-132084668
  hypo

SEQ ID NO: 173058 - DNA, 58 bp, Homo sapiens
  chr12:132097242-132097300
  hypo
gtggactgtggccctcgaggggacccatgtggaccacggcagccgaggctgcagagcc

SEQ ID NO: 173059 - DNA, 30 bp, Homo sapiens
  chr12:132097939-132097969
  hypo
gtgacacgggagccacgcggggtgcagggc

SEQ ID NO: 173060 - DNA, 152 bp, Homo sapiens; identical to SEQ ID NO: 85313
  chr12:132101820-132101972
  hypo

SEQ ID NO: 173061 - DNA, 31 bp, Homo sapiens; identical to SEQ ID NO: 26790
  chr12:132105679-132105710
  hypo

SEQ ID NO: 173062 - DNA, 77 bp, Homo sapiens; identical to SEQ ID NO: 85315
  chr12:132158657-132158734
  hypo

SEQ ID NO: 173063 - DNA, 266 bp, Homo sapiens; identical to SEQ ID NO: 26791
  chr12:132169224-132169490
  hypo

SEQ ID NO: 173064 - DNA, 30 bp, Homo sapiens
  chr12:132171715-132171745
  hypo
ggtgtgtctttcactcgagtctggcacata

SEQ ID NO: 173065 - DNA, 242 bp, Homo sapiens
  chr12:132177127-132177369
  hypo
atctccacctgcccccgtgaaacacaccggatatcagctcccccaggcacagcagctgaatcccagggtctatgacgtgctgcggaggcggggagggggacaggaggccaccagatccctgacgtcacctgcccatccaggacaggaaaggacatcatcgtgcaaggagcctccgtggggtgtgctggagttggcccgtgagcttgcagagccggtcattagagctccgggaatgcacgagc

SEQ ID NO: 173066 - DNA, 93 bp, Homo sapiens
  chr12:132197184-132197277
  hypo
ttttggaattagagctcgaaaacgagaactggtgaagggagggccgcggaatcagatcatgtctggatctgatggctccgtgctgtgctcaag

SEQ ID NO: 173067 - DNA, 30 bp, Homo sapiens
  chr12:132199524-132199554
  hypo
ggtgtagggctacacgtgtacgcacaggct

SEQ ID NO: 173068 - DNA, 65 bp, Homo sapiens; identical to SEQ ID NO: 26792
  chr12:132205018-132205083
  hypo

SEQ ID NO: 173069 - DNA, 30 bp, Homo sapiens
  chr12:132209930-132209960
  hypo
tatgtgtgttttcccgtagccaccaaccgc

SEQ ID NO: 173070 - DNA, 623 bp, Homo sapiens
  chr12:132218720-132219343
  hypo
atcgctggctcctgccgccctcgaggacttgaaggctgacgttgggctgggtgtggctcgtacataggacagggcccacacactggattcacgtttttcctcacaacttagaatagcaaagttacagactttggattcttacgaagacaagaatgaatgtcttggctaaccatgatcttacccaagaggacttaaaatgaatgtgcaggagaaatgagaagaggacttaagatcaaaaagagagtgactaggaggtcagagaggcagccgcccaccccacgcactccctgcttgtaagccggggccgcattgttgtgttaccacacttctgttttagagcctgttacggttttgagttacacagacatgtgtgggcttgtgcatgtttgaatgccctgtggacccggagctctgtgaggcaaaggctgggactgtcttactagccagcgtgctccttgcacctcgatccaaggggccacggggctcccaggaacattcaccgagtaacttcagaaaagtgaagagcagaagttccaaaagcacctggtgcttcctgggagaagtcacctgcacaggtaccttggatccaactgacaggtgagatgaacgagctctccctgcgt

SEQ ID NO: 173071 - DNA, 119 bp, Homo sapiens; identical to SEQ ID NO: 26795
  chr12:132221104-132221223
  hypo

SEQ ID NO: 173072 - DNA, 678 bp, Homo sapiens; identical to SEQ ID NO: 26796
  chr12:132221596-132222274
  hypo

SEQ ID NO: 173073 - DNA, 31 bp, Homo sapiens; identical to SEQ ID NO: 26797
  chr12:132224662-132224693
  hypo

SEQ ID NO: 173074 - DNA, 30 bp, Homo sapiens
  chr12:132237774-132237804
  hypo
cctgctggcgtgaccgtgtctaactcccct

SEQ ID NO: 173075 - DNA, 30 bp, Homo sapiens; identical to SEQ ID NO: 85323
  chr12:132238985-132239015
  hypo

SEQ ID NO: 173076 - DNA, 43 bp, Homo sapiens; identical to SEQ ID NO: 85324
  chr12:132240155-132240198
  hypo

SEQ ID NO: 173077 - DNA, 231 bp, Homo sapiens; identical to SEQ ID NO: 85325
  chr12:132241085-132241316
  hypo

SEQ ID NO: 173078 - DNA, 296 bp, Homo sapiens
  chr12:132241763-132242059
  hypo
tctgtggagtagaggcgttcagctggtgttgcgagaggaacgggaagctctgaggcaggggtgcagccctaggcaggagccccgtggtgcgagctgcccggccccgtgttgagatgcggtaggtggtcagcagtgacttcgggggtggctggtgaaggagccttggccagcttgccccggtgcaccctgtcggggaggggccagcacatctgacaggctttaggtcagcggaataactttatccagtctggtgactttgtgatgcggttaagccactggagcgacttcagagattt

SEQ ID NO: 173079 - DNA, 82 bp, Homo sapiens
  chr12:132242311-132242393
  hypo
tttgggcctctcattcgagtaggttacctgagcacaagtgatccagctctcacccttcccggccacccgcatactctcactg

SEQ ID NO: 173080 - DNA, 30 bp, Homo sapiens
  chr12:132242801-132242831
  hypo
gctgctgccaaccagcgtgaccttctccac

SEQ ID NO: 173081 - DNA, 103 bp, Homo sapiens; identical to SEQ ID NO: 85328
  chr12:132243978-132244081
  hypo

SEQ ID NO: 173082 - DNA, 330 bp, Homo sapiens; identical to SEQ ID NO: 85329
  chr12:132247419-132247749
  hypo

SEQ ID NO: 173083 - DNA, 323 bp, Homo sapiens; identical to SEQ ID NO: 85330
  chr12:132249366-132249689
  hypo

SEQ ID NO: 173084 - DNA, 242 bp, Homo sapiens; identical to SEQ ID NO: 85331
  chr12:132250661-132250903
  hypo

SEQ ID NO: 173085 - DNA, 582 bp, Homo sapiens; identical to SEQ ID NO: 26800
  chr12:132259527-132260109
  hypo

SEQ ID NO: 173086 - DNA, 24 bp, Homo sapiens
  chr12:132260356-132260380
  hypo
gggcacggtggttcacgcccgtaa

SEQ ID NO: 173087 - DNA, 23 bp, Homo sapiens
  chr12:132260619-132260642
  hypo
ccggcaacagagcaagactctgc

SEQ ID NO: 173088 - DNA, 30 bp, Homo sapiens
  chr12:132261189-132261219
  hypo
ctgcgcacactgccgcgggctgggctggag

SEQ ID NO: 173089 - DNA, 112 bp, Homo sapiens
  chr12:132263618-132263730
  hypo
gcactcaccggcaccgcactctgcacatacactcaccggtgccacactctgcacacacttcgtgtggcaccggtgagcgtgtgtgcagagatgcagcgacggtgagtgtgtg

SEQ ID NO: 173090 - DNA, 340 bp, Homo sapiens
  chr12:132270178-132270518
  hypo
tcacccctggaggggcgcgggtctcagggtccttggccgcgtgtggattatgtcaccacaggagagggacgagtcctttccaggcacatgaggaggaggaatcagtgttaatgggtggctttgcatctgtgaaatcgcataaacttaagttagctgaagctgtcgtgagactggcatttccaaattggattgaaggtttcaggcttcatgccagcgcaccacagcctgttcctgagtatctgtgctgagaggctgtaagattagtgtgaacaggagaaatttccaggtaggcctctagcttcattaccgttgggtttcttactgccggtattcagacagg

SEQ ID NO: 173091 - DNA, 321 bp, Homo sapiens
  chr12:132270819-132271140
  hypo
gtttcagttcgttgtcggtaaagtagtgaagtgtggcaggggttctctgaagcctcagggtctacacaggcaccaccctgaggagcagcctctgcagacggggcctgatctctgccagggcagtaggaagcatgacacgtcccgccagccaggccacagagctgaacactgcctcctcccctgtccaggtcccgctcccggtcccctcggaggagagcccactcccctgagagacggagggaagagaggagtgtgcccactgcctaccgcgtgagccgcagccctggggccagtaggaagcggacccgctccaggtaggcc

SEQ ID NO: 173092 - DNA, 30 bp, Homo sapiens; identical to SEQ ID NO: 85336
  chr12:132276662-132276692
  hypo

SEQ ID NO: 173093 - DNA, 31 bp, Homo sapiens
  chr12:132278453-132278484
  hypo
cgggggagagtgggcacgggcccagcggctg

SEQ ID NO: 173094 - DNA, 30 bp, Homo sapiens; identical to SEQ ID NO: 26803
  chr12:132282352-132282382
  hypo

SEQ ID NO: 173095 - DNA, 289 bp, Homo sapiens; identical to SEQ ID NO: 85338
  chr12:132284410-132284699
  hypo

SEQ ID NO: 173096 - DNA, 479 bp, Homo sapiens; identical to SEQ ID NO: 85339
  chr12:132285799-132286278
  hypo

SEQ ID NO: 173097 - DNA, 27 bp, Homo sapiens
  chr12:132295800-132295827
  hypo
gccagctcttgaaaaattgtgcggccg

SEQ ID NO: 173098 - DNA, 384 bp, Homo sapiens; identical to SEQ ID NO: 123365
  chr12:132312445-132312829
  hypo

SEQ ID NO: 173099 - DNA, 562 bp, Homo sapiens; identical to SEQ ID NO: 85342
  chr12:132324903-132325465
  hypo

SEQ ID NO: 173100 - DNA, 112 bp, Homo sapiens
  chr12:132326246-132326358
  hypo
cacactccatcatgcggccgtactaccagggcccggtgggtgacccgctgcgctacgggctcccctacgaggacaaggtgcgcgtctggcagctgtacggtgagtgtctccc

SEQ ID NO: 173101 - DNA, 31 bp, Homo sapiens; identical to SEQ ID NO: 85344
  chr12:132326974-132327005
  hypo

SEQ ID NO: 173102 - DNA, 248 bp, Homo sapiens; identical to SEQ ID NO: 85345
  chr12:132328363-132328611
  hypo

SEQ ID NO: 173103 - DNA, 164 bp, Homo sapiens
  chr12:132329466-132329630
  hypo
tctcggcccccgcccgctgaagcggtggacaggcacccccgttttaatttgcctttagcagacctctaggcaaggataggggctccacacaaggatgcctgtcccatgccgctcaggtcaggggctctgccgcaggatgccctgtcccgcgctgcccaggcccc

SEQ ID NO: 173104 - DNA, 209 bp, Homo sapiens
  chr12:132329847-132330056
  hypo
acttctggcggctgacgcgggaccggcacctggtgtccctgcagccggcacagatgcaccgcttctggcggggcctgccgctgcacctggacagcgtggacgccgtgtacgagcgcaccagcgaccacaagatcgtcttctttaaaggtgggtgggcctccccgtcgcactccgggcttcccgggccctctgtccgcctcatggaggga

SEQ ID NO: 173105 - DNA, 95 bp, Homo sapiens
  chr12:132333033-132333128
  hypo
tgcagctgtcacctgcgtccacctcccgaagatttccaccttcccaaacggaaacgctgccccgtgaaacacggatgccccgccccgcccctggg

SEQ ID NO: 173106 - DNA, 21 bp, Homo sapiens
  chr12:132333428-132333449
  hypo
gtctctccaagaccctgcttt

SEQ ID NO: 173107 - DNA, 200 bp, Homo sapiens; identical to SEQ ID NO: 85349
  chr12:132333508-132333708
  hypo

SEQ ID NO: 173108 - DNA, 30 bp, Homo sapiens; identical to SEQ ID NO: 85350
  chr12:132334500-132334530
  hypo

SEQ ID NO: 173109 - DNA, 30 bp, Homo sapiens
  chr12:132348746-132348776
  hypo
cctcacagctattggcggagcgcctactct

SEQ ID NO: 173110 - DNA, 383 bp, Homo sapiens
  chr12:132349596-132349979
  hypo
aaaaaaaaaaaagcaaagctggaaaagatagcttctaggtatacacatgcacatacgcactaagatcgcttctaggtatacacacacatacgtgctaagatagcttctaggtatacacacgcacatatgcactaagatcacttctaggtatacacacacatacgtgctaagatagcttctaggtatacacacgcacatacgcgctaagactgtttagtgagaagcaaggagatgatgcagtgtcagcggggagtctcgcagctgacacagggtgagtcctgtctgactccatttatgtgcagtccggggatgggcacgctaatgtccagaggctgagatcaggacagtgactcactcgtcaggaacgacggggcacctgccag

SEQ ID NO: 173111 - DNA, 332 bp, Homo sapiens
  chr12:132377941-132378273
  hypo
agccattccaactagcgcgcaacgtgtacggtgaacagcactaacttttccccggtcctctctcccagagcaatcgctgttggctgtgtcttctgtgagtgagcccccgggctcttttggctgccggcggtgtgactttggacacattctccaacttttctccgccttgatttcctcatctgtaaaacagggacataacagcaagtgcctcgtggaatcattgaatggatgcactaatcgctggaaagtgcgctgcttggcctaagtgatgagttagctgtcattatagttaggaacgaccatgtacacattacaggcgtttcacacacaca

SEQ ID NO: 173112 - DNA, 38 bp, Homo sapiens; identical to SEQ ID NO: 9175
  chr12:132380827-132380865
  hypo

SEQ ID NO: 173113 - DNA, 30 bp, Homo sapiens
  chr12:132384982-132385012
  hypo
acagccgctgggaggcggctggagcacctg

SEQ ID NO: 173114 - DNA, 30 bp, Homo sapiens; identical to SEQ ID NO: 26810
  chr12:132390059-132390089
  hypo

SEQ ID NO: 173115 - DNA, 30 bp, Homo sapiens; identical to SEQ ID NO: 85355
  chr12:132392621-132392651
  hypo

SEQ ID NO: 173116 - DNA, 35 bp, Homo sapiens; identical to SEQ ID NO: 85356
  chr12:132397844-132397879
  hypo

SEQ ID NO: 173117 - DNA, 131 bp, Homo sapiens; identical to SEQ ID NO: 85357
  chr12:132400434-132400565
  hypo

SEQ ID NO: 173118 - DNA, 30 bp, Homo sapiens; identical to SEQ ID NO: 26812
  chr12:132401010-132401040
  hypo

SEQ ID NO: 173119 - DNA, 30 bp, Homo sapiens; identical to SEQ ID NO: 85359
  chr12:132401591-132401621
  hypo

SEQ ID NO: 173120 - DNA, 30 bp, Homo sapiens; identical to SEQ ID NO: 85360
  chr12:132403882-132403912
  hypo

SEQ ID NO: 173121 - DNA, 30 bp, Homo sapiens; identical to SEQ ID NO: 26813
  chr12:132404841-132404871
  hypo

SEQ ID NO: 173122 - DNA, 293 bp, Homo sapiens
  chr12:132406593-132406886
  hypo
gttctttgttcaagcgttcctctggggaccggcagcagaggcaccgtgttctctcagccctggatacgtcttgtaatctttcacactttattcctaaaacgtgtcttatttttatgcagctcattttttctttaaaggagaaaacttgtaggtgtttaagaattggttttgggagggcgaggactgggccaggttagaggcagatggcacaggggcgtgtggcgggcgggtgaggctgctttgcacacctgtgttggtggctgtcccctgccgcccctccctgtggcagcagc

SEQ ID NO: 173123 - DNA, 121 bp, Homo sapiens; identical to SEQ ID NO: 85363
  chr12:132411601-132411722
  hypo

SEQ ID NO: 173124 - DNA, 30 bp, Homo sapiens; identical to SEQ ID NO: 26815
  chr12:132412423-132412453
  hypo

SEQ ID NO: 173125 - DNA, 499 bp, Homo sapiens; identical to SEQ ID NO: 85365
  chr12:132423549-132424048
  hypo

SEQ ID NO: 173126 - DNA, 31 bp, Homo sapiens; identical to SEQ ID NO: 85366
  chr12:132425403-132425434
  hypo

SEQ ID NO: 173127 - DNA, 30 bp, Homo sapiens; identical to SEQ ID NO: 85367
  chr12:132426923-132426953
  hypo

SEQ ID NO: 173128 - DNA, 30 bp, Homo sapiens; identical to SEQ ID NO: 26817
  chr12:132429296-132429326
  hypo

SEQ ID NO: 173129 - DNA, 30 bp, Homo sapiens; identical to SEQ ID NO: 85369
  chr12:132429618-132429648
  hypo

SEQ ID NO: 173130 - DNA, 30 bp, Homo sapiens
  chr12:132445395-132445425
  hypo
agcgtgggccctgtcgtcgggggaaaccag

SEQ ID NO: 173131 - DNA, 30 bp, Homo sapiens; identical to SEQ ID NO: 26818
  chr12:132446727-132446757
  hypo

SEQ ID NO: 173132 - DNA, 30 bp, Homo sapiens
  chr12:132450640-132450670
  hypo
aagaacccgtccggccgggtgcagtggcac

SEQ ID NO: 173133 - DNA, 30 bp, Homo sapiens; identical to SEQ ID NO: 85371
  chr12:132455522-132455552
  hypo

SEQ ID NO: 173134 - DNA, 30 bp, Homo sapiens
  chr12:132468722-132468752
  hypo
gtgagtcaccgcacccggcctacaggttct

SEQ ID NO: 173135 - DNA, 182 bp, Homo sapiens; identical to SEQ ID NO: 85373
  chr12:132474660-132474842
  hypo

SEQ ID NO: 173136 - DNA, 51 bp, Homo sapiens; identical to SEQ ID NO: 50336
  chr12:132480345-132480396
  hypo

SEQ ID NO: 173137 - DNA, 30 bp, Homo sapiens; identical to SEQ ID NO: 85375
  chr12:132497596-132497626
  hypo

SEQ ID NO: 173138 - DNA, 194 bp, Homo sapiens
  chr12:132504706-132504900
  hypo
gcccgcttcgaggacggccgcccatcgccacgttctctgccaatccggaggcaaaaggtagacttcacgtagttgtctgctctccgccttatggaggtttttgtgggacaagttcatggcactttcttctcgcgcctctggatgcggtaattgtccctgagtgggaacaggcaccacccgctggctttctgaag

SEQ ID NO: 173139 - DNA, 30 bp, Homo sapiens
  chr12:132508668-132508698
  hypo
gcctgcacttgatgcgtgtcagataaacaa

SEQ ID NO: 173140 - DNA, 30 bp, Homo sapiens
  chr12:132512054-132512084
  hypo
tcccattggagggccgacccaggtaagcac

SEQ ID NO: 173141 - DNA, 272 bp, Homo sapiens; identical to SEQ ID NO: 85377
  chr12:132514251-132514523
  hypo

SEQ ID NO: 173142 - DNA, 30 bp, Homo sapiens; identical to SEQ ID NO: 85378
  chr12:132516053-132516083
  hypo

SEQ ID NO: 173143 - DNA, 74 bp, Homo sapiens; identical to SEQ ID NO: 85379
  chr12:132529443-132529517
  hypo

SEQ ID NO: 173144 - DNA, 30 bp, Homo sapiens
  chr12:132529899-132529929
  hypo
cggtcgtccctcctcggtccctgtttgacc

SEQ ID NO: 173145 - DNA, 30 bp, Homo sapiens; identical to SEQ ID NO: 85380
  chr12:132530150-132530180
  hypo

SEQ ID NO: 173146 - DNA, 1164 bp, Homo sapiens
  chr12:132536799-132537963
  hypo
ttgtcacacagtggcggatttgggaggcttcctcgttctgtggccccctttccgcacagtagtggagtgatccttgtcagaaggagttggctcagggcccatctccgcaaacccccaggactccctactgcccacgctctgagtcgcctggccctggctttcagccccttggtgctccctgagtgtgctggcagccgcgccccagcccttcacttaactgccctcgtgagatgttttcagagcgcactgttgagaattgcagccccgccctgctgttttcctccatagcagccagtacgtcttcagacccactgcacattttacctgtttgtcgtctgatgtgagtgctgtgatcgctgggactctagcgtctgggagcacagacccatcatttgattgatgttgtcgattaaatgaagagttaattcaccctactaatatttatggaccgcgggcctgcgcggcgtggagcctgggcattctcgggggagcgagagaggcacagtcccgccctccctttacctccctggagaggaactcgagggcatcctcacagaaggaacagacagagattttcccaagtacagtgcagacacatgaggtgggctgtgcgtttgggggctgccacaagtacgctggggacgtgttcggagatacttttcctggagagtgggagagctcggcctcaaggaagaggactcagcgccaggctgaggatgaggtctaggtggctcgatctcctgcagggcacattgggcaccttgctttacgccctcatctcttgggctggagctgccccagcacctggcagcatggtgtttctagggtacgtggtacttgtctgtcttaaaacttgcctgtatgtttttaacctttgcgtctgtctttcagtggaatcaactatgacaagccgctgcctcccatccaggtggcatctctccgtgcagagcgaatcgcaaaagagaaaaaggtcagcgccctgggcccttctgcttgagtgggaaaatgtggtgactgtgacttcatccagggggtatgcaggccgagtctgcccctccagtggctcctcttccttcctggcccctcaggctctggctgatcagcagaaggcacagcagccggccgtggcccagccacccccgccccagccgcagcccccaccac

SEQ ID NO: 173147 - DNA, 176 bp, Homo sapiens; identical to SEQ ID NO: 26823
  chr12:132541956-132542132
  hypo

SEQ ID NO: 173148 - DNA, 207 bp, Homo sapiens; identical to SEQ ID NO: 26824
  chr12:132546644-132546851
  hypo

SEQ ID NO: 173149 - DNA, 64 bp, Homo sapiens; identical to SEQ ID NO: 85384
  chr12:132547230-132547294
  hypo

SEQ ID NO: 173150 - DNA, 194 bp, Homo sapiens; identical to SEQ ID NO: 85385
  chr12:132548918-132549112
  hypo

SEQ ID NO: 173151 - DNA, 484 bp, Homo sapiens; identical to SEQ ID NO: 85386
  chr12:132549415-132549899
  hypo

SEQ ID NO: 173152 - DNA, 237 bp, Homo sapiens
  chr12:132551504-132551741
  hypo
aaggcagcaggtgcccgccccagcacaccctcccgtcctgggcttgagcctggtttcacaggcctctctggtggcagtggtcgccagcgacccgtgttctttcctcacacccacccacttgagcgtgccatcacgtgttctagcacaaacgtgccttggcgctttccaggcgcaaggctgggtcctcaattgaactgttaacattctgaaatttccgtcttaatttaagtgtaattt

SEQ ID NO: 173153 - DNA, 101 bp, Homo sapiens; identical to SEQ ID NO: 85388
  chr12:132553983-132554084
  hypo

SEQ ID NO: 173154 - DNA, 372 bp, Homo sapiens; identical to SEQ ID NO: 26827
  chr12:132556449-132556821
  hypo

SEQ ID NO: 173155 - DNA, 226 bp, Homo sapiens
  chr12:132561922-132562148
  hypo
gttttctgactctctcggctcaggcttctccacagactgtggcgctcacgcaggcgacggcggccgggcagcaggtgcagatgatccctgcagtgaccgcgactgcccaggtggttcagcagaaactcattcagcagcaggtggtgaccacggcgtcggccccgctccagactccaggcgctcccaacccagcccaggtgcccgccagctccgacagcccaagcca

SEQ ID NO: 173156 - DNA, 142 bp, Homo sapiens
  chr12:132567362-132567504
  hypo
gggaacctttatttccgacctcctgcctgatcttgtgtagccacctacactccgaccagcccccagagcagcatcgttctgccccctgtgcagcctttcctgtctccctgactttgtgctcgtctcctttgttgtaaagtat

SEQ ID NO: 173157 - DNA, 39 bp, Homo sapiens
  chr12:132567749-132567788
  hypo
gaaaatcaaagctggccgggcacggtggctcacacttgt

SEQ ID NO: 173158 - DNA, 39 bp, Homo sapiens; identical to SEQ ID NO: 26828
  chr12:132581293-132581332
  hypo

SEQ ID NO: 173159 - DNA, 99 bp, Homo sapiens; identical to SEQ ID NO: 26829
  chr12:132581391-132581490
  hypo

SEQ ID NO: 173160 - DNA, 30 bp, Homo sapiens; identical to SEQ ID NO: 85394
  chr12:132588308-132588338
  hypo

SEQ ID NO: 173161 - DNA, 30 bp, Homo sapiens; identical to SEQ ID NO: 26830
  chr12:132588622-132588652
  hypo

SEQ ID NO: 173162 - DNA, 439 bp, Homo sapiens; identical to SEQ ID NO: 85396
  chr12:132592864-132593303
  hypo

SEQ ID NO: 173163 - DNA, 85 bp, Homo sapiens; identical to SEQ ID NO: 85397
  chr12:132601573-132601658
  hypo

SEQ ID NO: 173164 - DNA, 30 bp, Homo sapiens; identical to SEQ ID NO: 85398
  chr12:132601919-132601949
  hypo

SEQ ID NO: 173165 - DNA, 302 bp, Homo sapiens; identical to SEQ ID NO: 85399
  chr12:132603384-132603686
  hypo

SEQ ID NO: 173166 - DNA, 30 bp, Homo sapiens; identical to SEQ ID NO: 85400
  chr12:132606754-132606784
  hypo

SEQ ID NO: 173167 - DNA, 30 bp, Homo sapiens
  chr12:132616636-132616666
  hypo
gaggcggggagtggccgcccacggagggtc

SEQ ID NO: 173168 - DNA, 463 bp, Homo sapiens
  chr12:132617103-132617566
  hypo
gccttccatgagccccgcaacccccaggccttcctggagtgggcgcctggtgttgcctcccacccctgcccggcgcagcccctgggagcaggagccgtggggagggctggactgcagtaaggacgcctcgtgggatgtgccaaaccgctgcgtggagcctgggctgacttctctggatcttggtgcaactggcgtggcccttccaggaagccgggccacctggctcagagacgccagaccctggccggcaatggggctgccaggggcggggacgctggaggagctaggggtgtgggccactgtgctgcctgccccggcctggcggcctctccgtagcagagctgaggctgggacgcaggtgggggagcctggatgcgcctccttcctcagccacgggaggatgaggtccaggagcgcagcggggcccacgggggagcgccttcgggtgcggctcgtcgctgcc

SEQ ID NO: 173169 - DNA, 30 bp, Homo sapiens
  chr12:132618543-132618573
  hypo
gtggcccaccgtccgcggcccaccaggaaa

SEQ ID NO: 173170 - DNA, 30 bp, Homo sapiens
  chr12:132618860-132618890
  hypo
ctcgaggcccagccacggacgcctgcctga

SEQ ID NO: 173171 - DNA, 166 bp, Homo sapiens; identical to SEQ ID NO: 85402
  chr12:132622472-132622638
  hypo

SEQ ID NO: 173172 - DNA, 30 bp, Homo sapiens
  chr12:132624242-132624272
  hypo
cttgctggagagctcgtgccgctgcaactc

SEQ ID NO: 173173 - DNA, 101 bp, Homo sapiens; identical to SEQ ID NO: 26833
  chr12:132630792-132630893
  hypo

SEQ ID NO: 173174 - DNA, 30 bp, Homo sapiens; identical to SEQ ID NO: 85404
  chr12:132632566-132632596
  hypo

SEQ ID NO: 173175 - DNA, 30 bp, Homo sapiens; identical to SEQ ID NO: 85405
  chr12:132632845-132632875
  hypo

SEQ ID NO: 173176 - DNA, 30 bp, Homo sapiens; identical to SEQ ID NO: 26834
  chr12:132637719-132637749
  hypo

SEQ ID NO: 173177 - DNA, 809 bp, Homo sapiens
  chr12:132643290-132644099
  hypo
actcctcggatctcacgggggctaacgtgtcccccggaaagagatgtccccgtcctggcccccagcatcggcgagtggaccttatttggaaatagggtctttgcagattaaggagccagctgagatcatcctgcattcagggtgggccatcagtccggtggccggtgtcctagtcagaggcgtgaagaggagggcggaggccggaactatccatcggctccgagggtggagcaggggcctctgggagctggaaaaggcaggaatgggtcctccctgagtctctgagggccccgcctgcccacacctgcccatatttgccccaacctgcccacacctgcctcaggacagcatctcggtctcctggctgccagactgtgatgaagatgcatggttctaggccactggcttgtggtgacttgttgcatcagctgtggggagctcacacggtagcgcctgtcttggggggtgctgggcgggtgaccttcaggagacccctggggccccgctgccctcccaatgcctccagtcccagtgtctctgtggtggcatcctgtgctgaggatggtgcctcgcggagcctccactgcccctgtgtgctccgcaccacgtctgtctcgatggcgcccctcgaagacctcgggaagctccccgttcgctgtggccccccggggtctgtcccctgcagcactgttctctgggggctcgtggtccgagttctgatactgcaggtggcaggtcccctgaaggcatagtcagaggctttgctctgggctggcatggaggtatgggcgtggcggggtgtggctggg

SEQ ID NO: 173178 - DNA, 197 bp, Homo sapiens; identical to SEQ ID NO: 85408
  chr12:132653030-132653227
  hypo

SEQ ID NO: 173179 - DNA, 37 bp, Homo sapiens
  chr12:132656981-132657018
  hypo
cgctgcccatgagcccggagcccgccattcccgctgc

SEQ ID NO: 173180 - DNA, 253 bp, Homo sapiens; identical to SEQ ID NO: 85409
  chr12:132665275-132665528
  hypo

SEQ ID NO: 173181 - DNA, 653 bp, Homo sapiens
  chr12:132665938-132666591
  hypo
cacacagcacacacacgcacagtacacacacccaacacaactcaaaccacacacacactcagtacacacacccaacacaactcacacagcacacacacacacactcggtacacacacccagcacgcacacatagtacacacacccagcacaactcacactcagtacacacacccagcacatgtacccacccagcacacgttcactcgcaccctgcacagcccagcgcgcacacacccagcagacagcacatgctctcacatgctggcatcagccgtcagcctcagctgctggagggtgtggtggaggcgggcggtgagcgctgggtgctggggtccacgtccttccaagcccctgcatagcggccgccttggctggcgatgactggagggggtgaggggtgaggccaccagcacaggtgtgtcccttcactgtttccacctcgtgtgcccgccacgctgtcttcctgccgctggtgaagtctgtctcccccccccccccccccgagtgatggggcgcctccgactgcccggccacggtgcctgcacctccgctcctcctctccctgcaccctccaggcctgggggccccggggctgaccttgaccttcccacccgcccaggtgtggccgggacagcaccgcagttgtggcgcc

SEQ ID NO: 173182 - DNA, 30 bp, Homo sapiens; identical to SEQ ID NO: 26839
  chr12:132667045-132667075
  hypo

SEQ ID NO: 173183 - DNA, 30 bp, Homo sapiens; identical to SEQ ID NO: 85412
  chr12:132673055-132673085
  hypo

SEQ ID NO: 173184 - DNA, 141 bp, Homo sapiens
  chr12:132675094-132675235
  hypo
ttcagccagtccggccgccgtggctttcctctgcagcccccggtgcctgctggcgtcgtgcctttccgtgtgctcgttggccacgcacatgtcgaggggccgttctgacgatggactgaggggctcggggatagcacgtgt

SEQ ID NO: 173185 - DNA, 220 bp, Homo sapiens
  chr12:132682561-132682781
  hypo
cactgacaggccgtgcgagctgccttgagctgcaaacggggccctgcgcggctgccttggagcctcccaccccggggacgctgttgcgggcgggagaggaccgccgggcagggcccacgtggggatgcgggctggacggcgcccaaatgctccgcagggccaggctcccggcttgcacagctggctggtcttccgcctggacagacgtcatgaatgtggc

SEQ ID NO: 173186 - DNA, 201 bp, Homo sapiens
  chr12:132688063-132688264
  hypo
tccaggccatgtacacgtgggacttgaagtcatccatccacacctcggcggcgcgcagggcgttgcgcttggcatagtagtcaatgtcgttgttgtagggcttcctggtgcgctcgatgtgggccacgcgggagcagggcagcacctccatgctgccgccacactgccacacctgcggggagacggcgctgggtgccggcg

SEQ ID NO: 173187 - DNA, 285 bp, Homo sapiens
  chr12:132694696-132694981
  hypo
gtccctggggcccgtcgtctgcaggccccgggctggcacatcacagcgagaggagagacaggagaggggccctgctgcgcgtgggcgttgggtcaaaaactccccctgtacattcaggactgacgttgtctttggcggcgctgtgggcctggcaaagggcctgcgggcgaggccgtcccgtgaagtcggacctgttcttctggtcaaggcaagcaaagcaacagggctcgtagggttctcctggaagcgctggggacatgcggccttcatcgtgaaactgtcatc

SEQ ID NO: 173188 - DNA, 90 bp, Homo sapiens; identical to SEQ ID NO: 85417
  chr12:132695505-132695595
  hypo

SEQ ID NO: 173189 - DNA, 481 bp, Homo sapiens
  chr12:132698401-132698882
  hypo
gcatcagttggtgcgcgtgggcgctgacagtccagaacagcccggtcacggagcagccctggagatgcaggcccaaccccaccccctatgtccgcacaccctccctgcagcatgagtccagggacacccgcgactccgagtcctcaaccacccccgctccctgccaggtcaggcgtggggatgggggtctgggcccctcagtcctcccaggtgaaagccgggacaccaccctcacaaggattaccaggaggggcactgaccccaagggcacctggagaagagagagccgattccggggtgccgtgtgtgaggtccctgatggtggctcctttggagatggctggagaaccacgcctgtgattccactgtccctaaccaggccagcgactccgccctccctcaccacaccggcgactccaccgtcagcaggagcccagggatgaagggggcgagcaggagcggagcccgtgtattaatcatg

SEQ ID NO: 173190 - DNA, 30 bp, Homo sapiens; identical to SEQ ID NO: 26842
  chr12:132975804-132975834
  hypo

SEQ ID NO: 173191 - DNA, 30 bp, Homo sapiens; identical to SEQ ID NO: 85419
  chr12:132980288-132980318
  hypo

SEQ ID NO: 173192 - DNA, 30 bp, Homo sapiens; identical to SEQ ID NO: 85420
  chr12:132980678-132980708
  hypo

SEQ ID NO: 173193 - DNA, 31 bp, Homo sapiens; identical to SEQ ID NO: 9177
  chr12:132982486-132982517
  hypo

SEQ ID NO: 173194 - DNA, 813 bp, Homo sapiens
  chr12:132983178-132983991
  hypo
gggggacgccgccctcgacatccccagcacagacgccgccgtcgacgttcccagtgcagacaccgccctcgacgttttcccagccaggacgccgccctcaacattcccagaggggacgccgccctcgacattcccagcaggcgcagctcaggagcaccttgccatctgcagctccctgggggacgagaagaaacagcagccacccctttctcgggcaccttcagctccgccgagaacgcccgacactcagagaccctgctctttgttaaatgggaatgagacatgacacagacgcggggcagcggccactgcagcacgggttgtccactgcccagctctggggccaaaccctcggcgtcgcgcaaaccatacctcccgcgtgacggccgtgtccggcctgctcacctgtgcgaggcagccctgcagagcaggtcaccaggccacaggagcaccagaagagaagccacgtccactgcgagggccatccggtgtcatgtccctgcctccactcagccccaggcccacagctgcagccacgcagccccgcacagcgtcaccgtctccaggatccatcggcagtggggggggccgtctcccacctccctcctcttacctccccccacctccccagggcacgcactccctggctcctgcgcgatgcccagcagggtccaaaatgcacctggatgcccgggagccgtcgtccgccccacaggcagccccaggagccatcgcccgccccaaaggcccccccgggagccgtcacctgccccacaggcccccccaggagccgtcgtgcgctcagtcgggtcg

SEQ ID NO: 173195 - DNA, 385 bp, Homo sapiens
  chr12:132985470-132985855
  hypo
cagtctagcgagtaacggctgaggggcttggagcctgtgtgcctcagtttcctcacctgtgacgtgggccatgatagcacgcccctcacaagtgtcctgggggccaagtgagttcagaacactgctcagagctcacctgctgctgatgacaagtcgtgtcacgggacctgttgttttatgacacactcaaccccaccccacatggagccccgtccagtcagccggccccgttctctgctgagccaccagccctgggggtggccgggccaggcaggagccccacagaggcccctcagtgagctcagcgcaggcccaagcaccgccggtttctctgccgtccacaccgtccccagacgggccgcacccctgacgcagggagggcttc

SEQ ID NO: 173196 - DNA, 714 bp, Homo sapiens
  chr12:132986269-132986983
  hypo
cagaacgcagagagccgcggtgccatctccaccctggctttccaggccctggagggcaaaggtcagtcagatggagggagcccggggtccctggcaggagtgtggccaagtcccagcagcgctgccccgagagaggaggacggcgcagctccattgctccacctgcccggctcagggatggaacccagagctgccaccgtcctgtgggtgacggcagaacatctggctgccgggtggcctccgtaaccgccacacacctgcctctgctggaatcacctgaggctctggtgcctcacacggattggccaaaacagggagcggagccgggaaggccacggacatctgtgtggtgtcacgaacaaggtccggccacgtgtgtgggagacgcgggcgccgaggcaggcgccaaactaagcccggccaccaaggggacgcccacaccccacctccgtggtgacccctgaacccccggagctcaccatccacaccagggtgagaggagaggatgggcaaggaaccgtcaaccagaggggatgctcagctgcgtgcacgtggcgggtggtacatgggggctcggggaggcacccagagaggatgcgtgtgtagtgcagaaaatgaggctttggggcccgcacaccgagcccaggacagcacggaggcgggagacactgccaagcccccctcaccctccttgatggacgccccagagtctca

SEQ ID NO: 173197 - DNA, 30 bp, Homo sapiens; identical to SEQ ID NO: 26846
  chr12:133000013-133000043
  hypo

SEQ ID NO: 173198 - DNA, 62 bp, Homo sapiens
  chr12:133002956-133003018
  hypo
cctagagctgcggtttcgtcaggttcatggtccaacttccaagttgccgagtccagtctgac

SEQ ID NO: 173199 - DNA, 30 bp, Homo sapiens
  chr12:133008998-133009028
  hypo
cctgtgagcattggccgctgcctgtcccgt

SEQ ID NO: 173200 - DNA, 194 bp, Homo sapiens
  chr12:133009777-133009971
  hypo
acacctgagagctcacgcgtgtctgtgggtactcagggtgcgatgtgtacacagatctgaatgcagacgcacgtgcccatgagcacgcacgtccagagagacgcacgtctgcttatccacaaggtgcacgcgtgtctggatccgcacaggtgcgcgtctgctcgtggacacgcagaggcgggtggggctgtgca

SEQ ID NO: 173201 - DNA, 30 bp, Homo sapiens; identical to SEQ ID NO: 26848
  chr12:133015505-133015535
  hypo

SEQ ID NO: 173202 - DNA, 30 bp, Homo sapiens; identical to SEQ ID NO: 26849
  chr12:133016772-133016802
  hypo

SEQ ID NO: 173203 - DNA, 30 bp, Homo sapiens; identical to SEQ ID NO: 26850
  chr12:133018295-133018325
  hypo

SEQ ID NO: 173204 - DNA, 399 bp, Homo sapiens
  chr12:133018847-133019246
  hypo
cctcggtggaatcccggctgttcgcagccgcactggatgaagctctcgtctcctctctggttcctcacaggtgtcggtggacttcggggaaggcaggtgcagcctcctgcgttggctccatcgcctctggccaaggccatggcacacactctgcccgcgttcctctgcactcccaggaaggcgatgcccccggccccagcctcggagaagtggacacgaagccccacttgctttgtggccggttccattttaatttggtctcaacggagtagaaaatgggagagagccggcgcgtgctccagacagaaatcagccaacgagcccatgagaccccaagtcactgaatccccccacactctggcgtctctgaacaacccgcaaggacgtcggtgccacggc

SEQ ID NO: 173205 - DNA, 210 bp, Homo sapiens
  chr12:133019659-133019869
  hypo
cagcctgggggacagagcaagactccgccccgaaaaaaaaaaaacccacagtgcactgtgaatattttgtttaaacagtcaattaccttcgacggatacttcatccatttgtcaaatctcaggtatctaattcaccacgccgtggctgttccgggggctccgcgtctgtcgtcccacatctgcgctgctcctgccgggaggacacgcccg

SEQ ID NO: 173206 - DNA, 30 bp, Homo sapiens; identical to SEQ ID NO: 26852
  chr12:133060202-133060232
  hypo

SEQ ID NO: 173207 - DNA, 30 bp, Homo sapiens; identical to SEQ ID NO: 26853
  chr12:133077296-133077326
  hypo

SEQ ID NO: 173208 - DNA, 505 bp, Homo sapiens
  chr12:133088530-133089035
  hypo
ttataacagcatcagcgtttgtaatttaaacagacgagcatgtgtcttacgtgatttattcccacaaagggcttttgtgctgggcttggctcgggattcattgcactctgaccgaacagaggggagacctggagcatctgttcctgaccttcctgcccacccatctgaggcctggaatgggggtttgtactgtgctcagcatgggggcaccggcctccagatccccccaccgcaaggctactgtgtgggccagtgtgacaggggtcgagacccccctctcggctcatgcctggggggcacccatccccgggatcagtgtcctggggactggtgagggagggtggttcagctcagagtcctctgcatggcctgggcacgcgtgagggagcatggttcagcccagcatcctctgcacagcctgtcaggtgcttgtgttctgctcacggaaggccggggcatggaggggccgagtcctggctgcagcgccctggctgagctccaggct

SEQ ID NO: 173209 - DNA, 145 bp, Homo sapiens
  chr12:133097813-133097958
  hypo
gcgaggaggagggagcgcaggctgtggggctggggcaggggtgcgctgtgtccacactcatttccactcagacacggatggcggcagctccgcctctgcatacctgtgctccatttctgcaggggcgtcgcgttcccgtctcctg

SEQ ID NO: 173210 - DNA, 222 bp, Homo sapiens; identical to SEQ ID NO: 85436
  chr12:133099877-133100099
  hypo

SEQ ID NO: 173211 - DNA, 30 bp, Homo sapiens
  chr12:133100339-133100369
  hypo
acacggttcctggagcgggctggaaactca

SEQ ID NO: 173212 - DNA, 1259 bp, Homo sapiens; identical to SEQ ID NO: 85437
  chr12:133100821-133102080
  hypo

SEQ ID NO: 173213 - DNA, 231 bp, Homo sapiens; identical to SEQ ID NO: 85438
  chr12:133102581-133102812
  hypo

SEQ ID NO: 173214 - DNA, 30 bp, Homo sapiens; identical to SEQ ID NO: 26857
  chr12:133103098-133103128
  hypo

SEQ ID NO: 173215 - DNA, 431 bp, Homo sapiens; identical to SEQ ID NO: 26858
  chr12:133111678-133112109
  hypo

SEQ ID NO: 173216 - DNA, 513 bp, Homo sapiens; identical to SEQ ID NO: 26859
  chr12:133121645-133122158
  hypo

SEQ ID NO: 173217 - DNA, 45 bp, Homo sapiens
  chr12:133122900-133122945
  hypo
gcccttggtgagctccgcacctgcagcctccggggcgggatgggc

SEQ ID NO: 173218 - DNA, 609 bp, Homo sapiens
  chr12:133123359-133123968
  hypo
ggagccacctggagtgtgactcgtcatgcgctgggagcagcacgttctcgctgcagagtgtctgctaaagcgcatttcacaccgtactgtgagctccgtcgctgaacactcggcagccgcggctgcacatggagggtggctgtgcgtttggttccctgcattaacccagtgggctccacataggagggcgccgcccacacatccggctggcactcaccaccctccgtgcactggggggtttattcttccaccaggtcattcattcgacgtgaatgcctcataattgcagttgccaggaggggatttttccccttttgactgtttcgggggacattgcagtcagtgtgttcttcgtagagctctgcttactgaaaacggagaacggacagtcagtgtgttcttcgtagggctctgcttactgaaaacggagaacggacagtcagtgtgttcttcgtagggctctgcttactgaaaacggagaacggacagtcagtgtgttcttcgtagggctctgcttactgaaaacggagaacggacagtcagtgtgttctttgtagggctctgcctactgaaaacggagaacggatttgttttcgggattatcacacc

SEQ ID NO: 173219 - DNA, 30 bp, Homo sapiens; identical to SEQ ID NO: 85444
  chr12:133126415-133126445
  hypo

SEQ ID NO: 173220 - DNA, 148 bp, Homo sapiens
  chr12:133129457-133129605
  hypo
cgtgggcgctcaccccgcagttgctgggcctccgtggggtcctgggaaatttcaacagcagtccagtgtgcgggccgcgcctttgttctgtccagccagcggcccaggctgcgcctttgttgtatctggccgccggcaggccaggcac

SEQ ID NO: 173221 - DNA, 149 bp, Homo sapiens
  chr12:133129828-133129977
  hypo
cccacaccgggtgaccgtggggtgacctcacagggtgtgtggggttccgaagccgccaccctccttcctgagcctgcactttgacctgggactgctgagcccagaagggccttgagagggctggctcagtggcacgtgggggccttggg

SEQ ID NO: 173222 - DNA, 215 bp, Homo sapiens; identical to SEQ ID NO: 26862
  chr12:133131956-133132171
  hypo

SEQ ID NO: 173223 - DNA, 30 bp, Homo sapiens
  chr12:133142055-133142085
  hypo
cccgagtgtgcccacgtacacgtacccaac

SEQ ID NO: 173224 - DNA, 30 bp, Homo sapiens
  chr12:133143859-133143889
  hypo
ctgtgtgcccccagcgtgagcacatgtata

SEQ ID NO: 173225 - DNA, 30 bp, Homo sapiens; identical to SEQ ID NO: 85446
  chr12:133144795-133144825
  hypo

SEQ ID NO: 173226 - DNA, 30 bp, Homo sapiens; identical to SEQ ID NO: 85447
  chr12:133145037-133145067
  hypo

SEQ ID NO: 173227 - DNA, 45 bp, Homo sapiens
  chr12:133146995-133147040
  hypo
tacctcacacctggcgctccggtcccaggcgcagcaccagctcca

SEQ ID NO: 173228 - DNA, 935 bp, Homo sapiens
  chr12:133147758-133148693
  hypo
tgggcccgcacgtggcgagcggccaccccggcttggcctgccgaccccgggagtgccaggtgactatccgcctcgccccgccgggagcccgcggccaacgtgcctctctgtctctctctctttttctcttgtagatcacgagctgctcaggcaagagctgaacacgcggtttctggtgcagagcgccgagcggcctggcgcctccctgggcccgggggctctgctgcgggcggagttccatcagcaccagcacacacaccagcacacgcaccaacacacacaccagcaccaacacacattcgcccccttccccgcagggctgcccccgacgccgcccgccgcacccccgccggtgcgtaggcccgcgtgctggcagggggcgggggcgggcgtggggcggggacacgcagcaggcacacacagacacacgctcgcacacacaccagcccaggaggaggtggggggccggcggcacctctctgtcgtctgtccggtccccaacgtgccttctggtgtccccaccccaagctgtgccatgaggcccccaccctcggcagtggtcctggacttaggcaggcaccccgtgcccacgtgcatgggacaccctcacgcctgcactagatccccagtgccagggctggaggcccagacaggcctgagggcacagggaccatgactcagggtgcctcccgtgttccccgccccggaggcccggtctgaggagggagttgctgggggctggagtcccctccactctctcgagttttattcggaaactggccagtttgtcagtaacccggtgtgtccccagcgcgacccagcagccagggcttcacgccccaggcctcagccaggcacacagactgcctgggggggccgagttcccaccccatgcaaggggacccttagaatggcagggccgccctggtctgaga

SEQ ID NO: 173229 - DNA, 95 bp, Homo sapiens
  chr12:133148940-133149035
  hypo
ccgaggggcccggcgcgtgtcgctgtgcacgcaggtcctggccacggggcggtgggtggggctgcccctcgcctggcctcgcccctgctgcattg

SEQ ID NO: 173230 - DNA, 61 bp, Homo sapiens
  chr12:133149548-133149609
  hypo
caaggaggttcttacggggccatccacactgcgaggaggttcttacggggccgtccacacc

SEQ ID NO: 173231 - DNA, 30 bp, Homo sapiens; identical to SEQ ID NO: 85453
  chr12:133150698-133150728
  hypo

SEQ ID NO: 173232 - DNA, 31 bp, Homo sapiens; identical to SEQ ID NO: 26865
  chr12:133153970-133154001
  hypo

SEQ ID NO: 173233 - DNA, 149 bp, Homo sapiens
  chr12:133156530-133156679
  hypo
tttggggcaggctccgtagctgtcggtgtccatccgtcacgcctgaactccgcaggccctggcaattcttaatgttgcttggctgtgtcgtcttttttccttcattaatctcaccagaagtttgtccatttcaccagtattttatttta

SEQ ID NO: 173234 - DNA, 31 bp, Homo sapiens; identical to SEQ ID NO: 26867
  chr12:133158012-133158043
  hypo

SEQ ID NO: 173235 - DNA, 30 bp, Homo sapiens; identical to SEQ ID NO: 85457
  chr12:133158295-133158325
  hypo

SEQ ID NO: 173236 - DNA, 533 bp, Homo sapiens
  chr12:133167896-133168429
  hypo
ggtgcagggcctcagcattcacgctgcttcctcctgggagagcccgccccgcctctcagggactctcacaaccttggtgcgcagaaggttctggaccgcaattcggggacgccctcactggctttctccggagcgtgggcattggagtggaaatacgtagaattgctggggatcctcgaagccgccggcagcgcccgatgccagcttgtcccatcaggcgttggtcccgacctgcactcagccacctgcccccggttttgtaattgagcattgaggggaagatgcctgaacccatatgaaacctctttcccctcaaacgttccctgcacgcatcaattacatcagcgcagctgggccttcccctgagcgtgatgtccaggggcgaggccagtggcttcctgcgcgtgcccgtccccactcacagcccctgacctccggggcccccacgcaccaggcgctccctgcccggccccatctcccggagccctggaggctcagcctgggtgtcgtgtgtgcctcgtgctcttgggaaa

SEQ ID NO: 173237 - DNA, 210 bp, Homo sapiens
  chr12:133168794-133169004
  hypo
caaaaaaagaaaaaaaagaaaaccctggaattccagtccgaccgcacagggctcatcccgtgctcctggcatccactggcttccccacggcggggagcccgcctgctccccttgcagatgcccctactcctcacctgagcccagcacccacccggggccgcccacccggcacagcgcctgccctctgctcggccccggccaccccaagcc

SEQ ID NO: 173238 - DNA, 541 bp, Homo sapiens
  chr12:133172480-133173021
  hypo
cgggccactgtggcccgggtgactggacgttttctgtttgtatcttgctccctggctatggcagatgctccacttgccaggtatactcagctccccacaccgcgagcacacgcaggactgtgcgtccagccctcatggctgttctggttacaggcccgttggggagcgtgcgctgccttgggcccggagcactcagcgctggcatcatcctctccagagcctctcgtgttctctgacacagcagccaggaatgtttccaagggtgacattacaaggatatctccagcagcctggctctcggtgaggaagatagagcagggcgcccgaggggcacacgttggacggcaagggcgtgtggctgtcccaaccctgggagcagggctgctcctcaaggcagcatggcctcacctgcccttgctgacaggccggctgacccctctgacgccttccagcagcgtttccagtgcttttctttcttcccaggaagatactgggccagcgccatcaggggtggctcatcggtcgtcgtggtggtctcacg

SEQ ID NO: 173239 - DNA, 30 bp, Homo sapiens; identical to SEQ ID NO: 26869
  chr12:133183673-133183703
  hypo

SEQ ID NO: 173240 - DNA, 566 bp, Homo sapiens
  chr12:133199754-133200320
  hypo
gctgtgttcaggtggcgagaacatgtcttccgtgggccccatttcccttgactgtggcctcccagcctcgggcatcggcctcaggtcaccccacggcctgcacatgctgtgtggctcacaaatatccagctcatttttggagaaactggctcttctggttgagccgctgcttgggaaccagggccagagcttcccgtttctgacccctccaccactactcaaatgcccgcagctagcctcacagtgaacccaggctgactggcgcccacggctgcaccgggcgacccctggtcctgctaggtggccttcctgggggacgagcggctgtcccctggccccatcactcctcattcctgagggttctccagattcgcttccaggaatgaagcctagtcagccagcctccctcctcccctgcttgccctaatttgatttgatctccactctggaggcctcagcactcctccatctgagcaggcatcaggtttctccaggcaggcggccccagcagcatccaggggccaaacacgtgcccagtggtacccagtccccgatctgaggcgctc

SEQ ID NO: 173241 - DNA, 31 bp, Homo sapiens; identical to SEQ ID NO: 26871
  chr12:133200832-133200863
  hypo

SEQ ID NO: 173242 - DNA, 30 bp, Homo sapiens
  chr12:133201721-133201751
  hypo
atgagtaaaatgcacgacctcatcccacgg

SEQ ID NO: 173243 - DNA, 30 bp, Homo sapiens; identical to SEQ ID NO: 85463
  chr12:133202743-133202773
  hypo

SEQ ID NO: 173244 - DNA, 30 bp, Homo sapiens
  chr12:133208468-133208498
  hypo
tccccacagcacctgcgcctctgaacggcc

SEQ ID NO: 173245 - DNA, 30 bp, Homo sapiens
  chr12:133208866-133208896
  hypo
tgtcctctcctcacacgcacgctggcactc

SEQ ID NO: 173246 - DNA, 210 bp, Homo sapiens; identical to SEQ ID NO: 85464
  chr12:133209150-133209360
  hypo

SEQ ID NO: 173247 - DNA, 152 bp, Homo sapiens; identical to SEQ ID NO: 85465
  chr12:133210034-133210186
  hypo

SEQ ID NO: 173248 - DNA, 30 bp, Homo sapiens; identical to SEQ ID NO: 85466
  chr12:133210492-133210522
  hypo

SEQ ID NO: 173249 - DNA, 30 bp, Homo sapiens
  chr12:133212379-133212409
  hypo
acggccaggcccgccggggccctgagcact

SEQ ID NO: 173250 - DNA, 60 bp, Homo sapiens; identical to SEQ ID NO: 26874
  chr12:133220202-133220262
  hypo

SEQ ID NO: 173251 - DNA, 154 bp, Homo sapiens; identical to SEQ ID NO: 26875
  chr12:133222187-133222341
  hypo

SEQ ID NO: 173252 - DNA, 45 bp, Homo sapiens; identical to SEQ ID NO: 85469
  chr12:133225532-133225577
  hypo

SEQ ID NO: 173253 - DNA, 567 bp, Homo sapiens
  chr12:133225890-133226457
  hypo
cctgcacaatctgccacggaaggtccaggatgctgcgggcagttcttcgcaagaagctccccagccccgtggcaggaccatcccggatggccccgggcctgagcacaccctctgccgactccagacgctgcctcttcctgcgggcgaggcgctgccgggcctgcagctgccacttcttcttgtggaaccggagccagacaagccattcctcctgggatggatggtgagcacagccagtgtgcaagtggtgagatgggaatgcccgccatgactttctcacaagcagcctccctaggggtcaggacgcatctcgggctccctgggctgtgcagacccctcagagacagacagtatcacagctgtgtgccttacctggctggttcccagggcgggaggctgccccaagatttcctgccagggcacagtcggcgtgaggtcctgggactcctcctggctctcccaaagaactcgcttcctcttcacagtgacaggggctgctgggtgaggcagctttacgaggccgaagtcctccatgtcaggagcacttggcctcggactgtcttctga

SEQ ID NO: 173254 - DNA, 30 bp, Homo sapiens; identical to SEQ ID NO: 85472
  chr12:133250168-133250198
  hypo

SEQ ID NO: 173255 - DNA, 30 bp, Homo sapiens
  chr12:133250558-133250588
  hypo
ttgtggcctctccgacgggcgccccacctc

SEQ ID NO: 173256 - DNA, 64 bp, Homo sapiens
  chr12:133250821-133250885
  hypo
ctcctccctacagacgcattccctggagcagctgtccaggggtcatgtccggtctccacccccc

SEQ ID NO: 173257 - DNA, 31 bp, Homo sapiens; identical to SEQ ID NO: 26878
  chr12:133256229-133256260
  hypo

SEQ ID NO: 173258 - DNA, 121 bp, Homo sapiens
  chr12:133262725-133262846
  hypo
gtgctgggattacaggtgtgagccaccgcgccgggcctcatccgttttctgcttatggcaggccagtcctccggtcatgtttaccgtttgctctggccaccaagcagccgcgtcttatcct

SEQ ID NO: 173259 - DNA, 121 bp, Homo sapiens
  chr12:133262905-133263026
  hypo
cgatcccggctcacagcagccttgacctgccgggctcaggtgaacctccggctcggattcgggagtattaatagctgggacctcgggcgcgcaccaccagcctgtctaatttttcttgttt

SEQ ID NO: 173260 - DNA, 62 bp, Homo sapiens; identical to SEQ ID NO: 26879
  chr12:133277668-133277730
  hypo

SEQ ID NO: 173261 - DNA, 205 bp, Homo sapiens
  chr12:133280427-133280632
  hypo
atgggccactggttctcgggaatttagagaaggaagcagagacaactgagaagacagactggccgggaacacggaggatctgggatggaagaggggagagctgggaagccgcgcctctgagtagcgtgggggcagagtcgccatcctaggtgggtgcaggtgtatgcggaagcagcattcattcagcaagcgtttcctgagcagt

SEQ ID NO: 173262 - DNA, 30 bp, Homo sapiens; identical to SEQ ID NO: 85477
  chr12:133281489-133281519
  hypo

SEQ ID NO: 173263 - DNA, 495 bp, Homo sapiens; identical to SEQ ID NO: 123385
  chr12:133286718-133287213
  hypo

SEQ ID NO: 173264 - DNA, 30 bp, Homo sapiens; identical to SEQ ID NO: 85479
  chr12:133296209-133296239
  hypo

SEQ ID NO: 173265 - DNA, 30 bp, Homo sapiens
  chr12:133296462-133296492
  hypo
tgaagatgccacggcgggtagatcccatct

SEQ ID NO: 173266 - DNA, 30 bp, Homo sapiens
  chr12:133297354-133297384
  hypo
gcgctcaggaccctcggggacacggggttc

SEQ ID NO: 173267 - DNA, 30 bp, Homo sapiens; identical to SEQ ID NO: 26881
  chr12:133301535-133301565
  hypo

SEQ ID NO: 173268 - DNA, 30 bp, Homo sapiens; identical to SEQ ID NO: 85481
  chr12:133302144-133302174
  hypo

SEQ ID NO: 173269 - DNA, 30 bp, Homo sapiens; identical to SEQ ID NO: 85482
  chr12:133303309-133303339
  hypo

SEQ ID NO: 173270 - DNA, 30 bp, Homo sapiens
  chr12:133303908-133303938
  hypo
caggcctggctttgcggggttgcttccagc

SEQ ID NO: 173271 - DNA, 30 bp, Homo sapiens
  chr12:133304218-133304248
  hypo
cacacgcgcccgggcggaggagacacactg

SEQ ID NO: 173272 - DNA, 31 bp, Homo sapiens; identical to SEQ ID NO: 26882
  chr12:133306572-133306603
  hypo

SEQ ID NO: 173273 - DNA, 30 bp, Homo sapiens; identical to SEQ ID NO: 85484
  chr12:133307637-133307667
  hypo

SEQ ID NO: 173274 - DNA, 87 bp, Homo sapiens
  chr12:133308292-133308379
  hypo
cctaagtgctgggattatagtgtgagccgccacgcccggccgctgggattgcaggcctgagctcccgtgcccggccatcgttgatgt

SEQ ID NO: 173275 - DNA, 30 bp, Homo sapiens
  chr12:133310541-133310571
  hypo
tcatgtaccctccccgacacacaacccatt

SEQ ID NO: 173276 - DNA, 306 bp, Homo sapiens; identical to SEQ ID NO: 85486
  chr12:133312070-133312376
  hypo

SEQ ID NO: 173277 - DNA, 30 bp, Homo sapiens
  chr12:133317891-133317921
  hypo
agccggcacacgcccggggagctcaggaaa

SEQ ID NO: 173278 - DNA, 30 bp, Homo sapiens
  chr12:133324398-133324428
  hypo
gtggagggtgtgcacgcaccatcttgtcgg

SEQ ID NO: 173279 - DNA, 30 bp, Homo sapiens
  chr12:133324699-133324729
  hypo
cccgagggaaccgccgagacctacctgcac

SEQ ID NO: 173280 - DNA, 32 bp, Homo sapiens; identical to SEQ ID NO: 26885
  chr12:133348834-133348866
  hypo

SEQ ID NO: 173281 - DNA, 30 bp, Homo sapiens; identical to SEQ ID NO: 85488
  chr12:133349729-133349759
  hypo

SEQ ID NO: 173282 - DNA, 393 bp, Homo sapiens; identical to SEQ ID NO: 85489
  chr12:133351309-133351702
  hypo

SEQ ID NO: 173283 - DNA, 30 bp, Homo sapiens; identical to SEQ ID NO: 85490
  chr12:133352537-133352567
  hypo

SEQ ID NO: 173284 - DNA, 1101 bp, Homo sapiens; identical to SEQ ID NO: 85491
  chr12:133353480-133354581
  hypo

SEQ ID NO: 173285 - DNA, 514 bp, Homo sapiens
  chr12:133356749-133357263
  hypo
gcatgcacagccccccgcgtgcacacacaccacaccccaggcacacgtgcacgcacaccccccatgtgcacacacacggcaagcgtactaggagtagctgctctgtgccaggtatggcggaggtagccagcaagcagcagcgttctaacagaggagcagggcccagacagggcacctgggggtcaggatgggcctctgctggcgacgtgaccaacgtgtcagtgaacacctgaagcagggcaggggccagccacgaaaagacagctctctacacagagaagggtccacagaaccacccctcttatctgccgaacacaaatgggatcatatgctattctcaagtttgcttttgcaatgcaacacgacatacaggacaccactcccagcacaatataaatacacatgcacgcggagctcattggccccaggccctcacagctgcactgccatttaatctaacgccaccttctacggaccagagcaggtgctctgcggcctccgtcaccaacaactg

SEQ ID NO: 173286 - DNA, 30 bp, Homo sapiens; identical to SEQ ID NO: 26892
  chr12:133360655-133360685
  hypo

SEQ ID NO: 173287 - DNA, 30 bp, Homo sapiens; identical to SEQ ID NO: 85495
  chr12:133362595-133362625
  hypo

SEQ ID NO: 173288 - DNA, 230 bp, Homo sapiens; identical to SEQ ID NO: 85496
  chr12:133365634-133365864
  hypo

SEQ ID NO: 173289 - DNA, 30 bp, Homo sapiens; identical to SEQ ID NO: 85497
  chr12:133372591-133372621
  hypo

SEQ ID NO: 173290 - DNA, 30 bp, Homo sapiens
  chr12:133373007-133373037
  hypo
cccacctgagcggacgtggccccacagcag

SEQ ID NO: 173291 - DNA, 30 bp, Homo sapiens; identical to SEQ ID NO: 26893
  chr12:133373594-133373624
  hypo

SEQ ID NO: 173292 - DNA, 30 bp, Homo sapiens; identical to SEQ ID NO: 26894
  chr12:133374896-133374926
  hypo

SEQ ID NO: 173293 - DNA, 377 bp, Homo sapiens; identical to SEQ ID NO: 85500
  chr12:133380423-133380800
  hypo

SEQ ID NO: 173294 - DNA, 128 bp, Homo sapiens
  chr12:133381357-133381485
  hypo
ctctggtactgctcctcggccacctgcaagtcgttgttggacgacgccaggctggcattttttgcctccagcatgttctgcaggtcagtcatggctcgctccaggtcccagcacgactgcttcagggt

SEQ ID NO: 173295 - DNA, 30 bp, Homo sapiens; identical to SEQ ID NO: 26896
  chr12:133382212-133382242
  hypo

SEQ ID NO: 173296 - DNA, 180 bp, Homo sapiens
  chr12:133383640-133383820
  hypo
ctgccacacatgctgcggcggctgattcccaaccacatctgtgaaacctcgtacccaacagaggagccacacatgctttccgacttcgccgcacgctgagatgtcagtcgaacgtccgttacctgactcgcctccagtgacaaggcttccagctgtccttcgagtcgcattttctctttg

SEQ ID NO: 173297 - DNA, 201 bp, Homo sapiens; identical to SEQ ID NO: 26897
  chr12:133384550-133384751
  hypo

SEQ ID NO: 173298 - DNA, 30 bp, Homo sapiens
  chr12:133385269-133385299
  hypo
caccacacagggtgcggccaggcctccgat

SEQ ID NO: 173299 - DNA, 30 bp, Homo sapiens; identical to SEQ ID NO: 85504
  chr12:133393100-133393130
  hypo

SEQ ID NO: 173300 - DNA, 258 bp, Homo sapiens
  chr12:133393399-133393657
  hypo
tggaaagacagagcacgctggaccaccatggctttaacaacaaggtgacgtcgcttttcagacatgcagctggagtaggagagaagaggatccagactcatgagcacggcactttctcatcccacaaaggcttcactctgagaggagcagcccatgggccccgtcccacaggcggggtggccaggataaggcccacagcccctctggtgtccacgtccttcctgtaaggtgaacctgccctccacacctccacactct

SEQ ID NO: 173301 - DNA, 30 bp, Homo sapiens; identical to SEQ ID NO: 85506
  chr12:133401862-133401892
  hypo

SEQ ID NO: 173302 - DNA, 30 bp, Homo sapiens; identical to SEQ ID NO: 26898
  chr12:133402536-133402566
  hypo

SEQ ID NO: 173303 - DNA, 582 bp, Homo sapiens
  chr12:133403533-133404115
  hypo
tcactcgcactcctgcgtctctagagagaagagacaggacaaagctgtcacttagaactgcgaaaggtacacacaaccctaggttcacagctgggtaacatcaagggacttcatactgagaaaccaccacctcaggcacctacaggactttctgcttcccccacacctgaattctgtatacaaacattcacggctccatctacaccacctcgtttcacctgttcctatcgggtattagaaacaacagagcacagccaaaaaccaaacacgatttcctcaggaaaagagtacctggtggaggccacactagtatccaaaagtaaacacagatctatacacaaagtgaaaaccaaaagcaagcaagcctcatgtcactgcagagacgtgaagggcaggcttggaagtcaggactccggcctcagctcccgaccctccaccacttacctgtgagagcctgggctaaagatttcttaatcacatttagcctgtttcctcaccagtaaaacaatgagaaaatgaacgcaaaattttgccaggattaaatataacaaggcacagagtctgtcccgtgtcctcaataaa

SEQ ID NO: 173304 - DNA, 30 bp, Homo sapiens; identical to SEQ ID NO: 50345
  chr12:133405921-133405951
  hypo

SEQ ID NO: 173305 - DNA, 137 bp, Homo sapiens; identical to SEQ ID NO: 26899
  chr12:133412306-133412443
  hypo

SEQ ID NO: 173306 - DNA, 70 bp, Homo sapiens; identical to SEQ ID NO: 26900
  chr12:133414279-133414349
  hypo

SEQ ID NO: 173307 - DNA, 109 bp, Homo sapiens
  chr12:133417244-133417353
  hypo
gcatgagggagcggcgcgtcctgggacctgcctccagccctgggcttggggccgtggtcactcacacaagggagcagcacgtcctgggacctgcgtccagccccaggct

SEQ ID NO: 173308 - DNA, 42 bp, Homo sapiens; identical to SEQ ID NO: 85512
  chr12:133421486-133421528
  hypo

SEQ ID NO: 173309 - DNA, 223 bp, Homo sapiens; identical to SEQ ID NO: 85513
  chr12:133424358-133424581
  hypo

SEQ ID NO: 173310 - DNA, 128 bp, Homo sapiens; identical to SEQ ID NO: 26902
  chr12:133428294-133428422
  hypo

SEQ ID NO: 173311 - DNA, 20 bp, Homo sapiens
  chr12:133428874-133428894
  hypo
atctgttgaaggttttctat

SEQ ID NO: 173312 - DNA, 30 bp, Homo sapiens; identical to SEQ ID NO: 85515
  chr12:133429934-133429964
  hypo

SEQ ID NO: 173313 - DNA, 30 bp, Homo sapiens; identical to SEQ ID NO: 85516
  chr12:133430211-133430241
  hypo

SEQ ID NO: 173314 - DNA, 30 bp, Homo sapiens; identical to SEQ ID NO: 85517
  chr12:133434301-133434331
  hypo

SEQ ID NO: 173315 - DNA, 388 bp, Homo sapiens; identical to SEQ ID NO: 85518
  chr12:133435575-133435963
  hypo

SEQ ID NO: 173316 - DNA, 99 bp, Homo sapiens; identical to SEQ ID NO: 85519
  chr12:133441851-133441950
  hypo

SEQ ID NO: 173317 - DNA, 443 bp, Homo sapiens; identical to SEQ ID NO: 123388
  chr12:133443617-133444060
  hypo

SEQ ID NO: 173318 - DNA, 75 bp, Homo sapiens; identical to SEQ ID NO: 26905
  chr12:133448787-133448862
  hypo

SEQ ID NO: 173319 - DNA, 126 bp, Homo sapiens; identical to SEQ ID NO: 26906
  chr12:133449099-133449225
  hypo

SEQ ID NO: 173320 - DNA, 173 bp, Homo sapiens
  chr12:133450371-133450544
  hypo
ccagatgccgaggggcgactgcagccatcactcatcctcctgttctttccaaacaaaaatctgattatttcactcctccgcttacacccctttgatgactcctcactgctctcaggctaaagcccaagctcccttgtgtgactttgccgctcaccacacgctccgaccacaca

SEQ ID NO: 173321 - DNA, 30 bp, Homo sapiens; identical to SEQ ID NO: 85523
  chr12:133460321-133460351
  hypo

SEQ ID NO: 173322 - DNA, 1188 bp, Homo sapiens; identical to SEQ ID NO: 123389
  chr12:133463690-133464878
  hypo

SEQ ID NO: 173323 - DNA, 8 bp, Homo sapiens
  chr12:133481374-133481382
  hypo
tttcctca

SEQ ID NO: 173324 - DNA, 173 bp, Homo sapiens; identical to SEQ ID NO: 9185
  chr12:133481489-133481662
  hypo

SEQ ID NO: 173325 - DNA, 252 bp, Homo sapiens; identical to SEQ ID NO: 9186
  chr12:133484600-133484852
  hypo

SEQ ID NO: 173326 - DNA, 186 bp, Homo sapiens; identical to SEQ ID NO: 9187
  chr12:133485161-133485347
  hypo

SEQ ID NO: 173327 - DNA, 250 bp, Homo sapiens; identical to SEQ ID NO: 9188
  chr12:133485439-133485689
  hypo

SEQ ID NO: 173328 - DNA, 62 bp, Homo sapiens; identical to SEQ ID NO: 9189
  chr12:133485815-133485877
  hypo

SEQ ID NO: 173329 - DNA, 26 bp, Homo sapiens
  chr12:133705787-133705813
  hypo
tttaaaaaattgagtcagggccgggt

SEQ ID NO: 173330 - DNA, 242 bp, Homo sapiens; identical to SEQ ID NO: 123396
  chr12:133706774-133707016
  hypo

SEQ ID NO: 173331 - DNA, 137 bp, Homo sapiens; identical to SEQ ID NO: 85533
  chr12:133716925-133717062
  hypo

SEQ ID NO: 173332 - DNA, 36 bp, Homo sapiens; identical to SEQ ID NO: 85534
  chr12:133721474-133721510
  hypo

SEQ ID NO: 173333 - DNA, 30 bp, Homo sapiens
  chr12:133795174-133795204
  hypo
tctgcacgagtgccccggagcccgactgat

SEQ ID NO: 173334 - DNA, 30 bp, Homo sapiens
  chr12:133808130-133808160
  hypo
gggtgagcgcagccacgcccagcctcctca

SEQ ID NO: 173335 - DNA, 103 bp, Homo sapiens; identical to SEQ ID NO: 85535
  chr13:19239972-19240075
  hypo

SEQ ID NO: 173336 - DNA, 180 bp, Homo sapiens
  chr13:19664764-19664944
  hypo
atgcctgctcttagcaggtgacgggtcaagcgtagttcagaggccaggactatcatgggcacaacccgcttctgatggcggttggcagctttgttttctcagaactgccacttacggaaggttacatccagccccccggggccccgtggactgactgccggacaaacatccaatgtccct

SEQ ID NO: 173337 - DNA, 201 bp, Homo sapiens
  chr13:19692225-19692426
  hypo
gtggtgcctctcccttctactcgtcctcctgcccggcaggagaagctcccgctgctggccgccctcctaccgttccatcgccaccaccacctgcagccacccagtgccccggatggcggctgctagcagccccttctcgtagttctctaaggcagatactgagcactgacactgaagagcctgaaacgaggggactccgcc

SEQ ID NO: 173338 - DNA, 30 bp, Homo sapiens
  chr13:19692820-19692850
  hypo
tgcggttggtggtggcggcaacggagacgg

SEQ ID NO: 173339 - DNA, 30 bp, Homo sapiens
  chr13:20134900-20134930
  hypo
cccgggaagggcagcgggtccacctctggc

SEQ ID NO: 173340 - DNA, 78 bp, Homo sapiens
  chr13:20235855-20235933
  hypo
ctggtgatgcttgccgccgccggagggcaggacgacctcctgcgactcctcatcacaaaaggcgcgaaagtgaacggt

SEQ ID NO: 173341 - DNA, 121 bp, Homo sapiens; identical to SEQ ID NO: 85538
  chr13:20265679-20265800
  hypo

SEQ ID NO: 173342 - DNA, 25 bp, Homo sapiens
  chr13:20266541-20266566
  hypo
tgcgcccacccggccaagtcttgtt

SEQ ID NO: 173343 - DNA, 29 bp, Homo sapiens
  chr13:20306777-20306806
  hypo
aaacttttggcagggcgcggtggctcacg

SEQ ID NO: 173344 - DNA, 28 bp, Homo sapiens
  chr13:20337836-20337864
  hypo
ttcattaaatcaaagtgaactcggccag

SEQ ID NO: 173345 - DNA, 30 bp, Homo sapiens
  chr13:20346591-20346621
  hypo
ccatgtgtagcgaagcgaatccgtagaggt

SEQ ID NO: 173346 - DNA, 408 bp, Homo sapiens; identical to SEQ ID NO: 26915
  chr13:20392319-20392727
  hypo

SEQ ID NO: 173347 - DNA, 39 bp, Homo sapiens; identical to SEQ ID NO: 85542
  chr13:20496684-20496723
  hypo

SEQ ID NO: 173348 - DNA, 30 bp, Homo sapiens
  chr13:20514108-20514138
  hypo
gatctggaacaatgtcgataacgtattgtt

SEQ ID NO: 173349 - DNA, 86 bp, Homo sapiens; identical to SEQ ID NO: 26916
  chr13:20521928-20522014
  hypo

SEQ ID NO: 173350 - DNA, 30 bp, Homo sapiens
  chr13:20725845-20725875
  hypo
ctcagcaagctgaggcgggggaggcagaca

SEQ ID NO: 173351 - DNA, 30 bp, Homo sapiens
  chr13:20726380-20726410
  hypo
tgagcacagatgggccgggcacctgcagag

SEQ ID NO: 173352 - DNA, 857 bp, Homo sapiens; identical to SEQ ID NO: 123410
  chr13:20735266-20736123
  hypo

SEQ ID NO: 173353 - DNA, 88 bp, Homo sapiens
  chr13:20748823-20748911
  hypo
gtggcctggccccagcggtctggtccaccttgtactcggtgcccccgctgccccctggcctcagctggagtgacgcacctcatccatg

SEQ ID NO: 173354 - DNA, 1463 bp, Homo sapiens; identical to SEQ ID NO: 123411
  chr13:20766297-20767760
  hypo

SEQ ID NO: 173355 - DNA, 105 bp, Homo sapiens
  chr13:20969539-20969644
  hypo
catgtgtgcatgctgcgtgtcctcttggccacaccgcatttcccactctcctgaaggggacagatctcgtctgcttggtagaatgacgggcgctcctccccctgc

SEQ ID NO: 173356 - DNA, 30 bp, Homo sapiens
  chr13:20970069-20970099
  hypo
ccagactgcctccctcggtcctttccgcga

SEQ ID NO: 173357 - DNA, 322 bp, Homo sapiens; identical to SEQ ID NO: 85546
  chr13:20975929-20976251
  hypo

SEQ ID NO: 173358 - DNA, 535 bp, Homo sapiens
  chr13:20979784-20980319
  hypo
acaagcccccatgcacgctccccacgctcctgctgctccccagccttggagagccatgatttctcagattctaaggagagggccctgggactttggtgaagagatgcaggaagaggcttatcctggagggagagggagggagccgcacgggctaggctgactgtgcgagaatggggtgcgcccaggggaaagcgcaggccagtcacggcccccacccagcactggcctgccccgacccgctgggccccgcagacttactctccctcacattcctcccctccctgctgccgggaggcgaacgggctggtgccggcctgtgcttagcaagtcaagtcagaagccagggccgggatcctggaagaggaggaggaggcgtttctagtcctgggcgccatggaggacataggctgggctactgctgcgaccctgactcatttcccacatctttcaaacccttaaaggctcagcagctggtcagtccgcctacaaaggtaacatggggacaaacgaagctgcagaacgtgcagagcctgcc

SEQ ID NO: 173359 - DNA, 30 bp, Homo sapiens; identical to SEQ ID NO: 26919
  chr13:20987502-20987532
  hypo

SEQ ID NO: 173360 - DNA, 73 bp, Homo sapiens; identical to SEQ ID NO: 85549
  chr13:21005161-21005234
  hypo

SEQ ID NO: 173361 - DNA, 30 bp, Homo sapiens
  chr13:21007721-21007751
  hypo
ggtaaatcgatgcctcggttaaacacctgt

SEQ ID NO: 173362 - DNA, 30 bp, Homo sapiens; identical to SEQ ID NO: 85550
  chr13:21010322-21010352
  hypo

SEQ ID NO: 173363 - DNA, 314 bp, Homo sapiens
  chr13:21047372-21047686
  hypo
gccggcaggagtggcggggagacccgcagtcccactgtgcggcacccacatgctgctcactgtggccggagcgtcggactttaaggagctgtgagacagctatattttatgtggaaatttccagacttttaaacatcagtgagtcattcaaacaaacaaatgaacaattatttttaaagctgcacatggccagactcggcccctggtaccagcctgagacctctgaactggccttcagctagaagagccagaggcagccttgtgatctcagcggacctggccagagtgggtgggcgggcgccaaggatggcgct

SEQ ID NO: 173364 - DNA, 157 bp, Homo sapiens; identical to SEQ ID NO: 85552
  chr13:21057335-21057492
  hypo

SEQ ID NO: 173365 - DNA, 97 bp, Homo sapiens; identical to SEQ ID NO: 85553
  chr13:21057551-21057648
  hypo

SEQ ID NO: 173366 - DNA, 30 bp, Homo sapiens; identical to SEQ ID NO: 85554
  chr13:21094956-21094986
  hypo

SEQ ID NO: 173367 - DNA, 29 bp, Homo sapiens
  chr13:21095285-21095314
  hypo
aaggaaggaaggaacgaacgaacgaaaaa

SEQ ID NO: 173368 - DNA, 722 bp, Homo sapiens; identical to SEQ ID NO: 123414
  chr13:21099486-21100208
  hypo

SEQ ID NO: 173369 - DNA, 112 bp, Homo sapiens; identical to SEQ ID NO: 123418
  chr13:21141667-21141779
  hypo

SEQ ID NO: 173370 - DNA, 117 bp, Homo sapiens
  chr13:21304076-21304193
  hypo
aagttgcgtcccgtcgccttgggcttctgaagaaaaccccaatgcccacggtcccctgttaggcactgggggcctcctgccccgactctgccctcccgggccgctgtggccgtggct

SEQ ID NO: 173371 - DNA, 27 bp, Homo sapiens
  chr13:21363542-21363569
  hypo
tttttttttgagacagagtctcgctct

SEQ ID NO: 173372 - DNA, 173 bp, Homo sapiens; identical to SEQ ID NO: 85559
  chr13:21407277-21407450
  hypo

SEQ ID NO: 173373 - DNA, 30 bp, Homo sapiens
  chr13:21498163-21498193
  hypo
tctggaaggtaaatcgtatagatttcaagt

SEQ ID NO: 173374 - DNA, 30 bp, Homo sapiens; identical to SEQ ID NO: 85560
  chr13:21562223-21562253
  hypo

SEQ ID NO: 173375 - DNA, 245 bp, Homo sapiens; identical to SEQ ID NO: 85561
  chr13:21562938-21563183
  hypo

SEQ ID NO: 173376 - DNA, 31 bp, Homo sapiens; identical to SEQ ID NO: 26923
  chr13:21563687-21563718
  hypo

SEQ ID NO: 173377 - DNA, 319 bp, Homo sapiens; identical to SEQ ID NO: 85563
  chr13:21572945-21573264
  hypo

SEQ ID NO: 173378 - DNA, 251 bp, Homo sapiens
  chr13:21597247-21597498
  hypo
tccaaagatcgctcccggcatccatagcgctgcatcgagggctccgggctccgagggctccgaaggccggggagtgggaccagctcccacacaggagacgcagctcagggcttctacatttctaggaatgctaaaaacccaattttcttaattcctttttttttttctttttagagatagggtctcactacgtcccatcctcctgcctcagtctcctgacacactgggaccacaggcgctcgccccctctc

SEQ ID NO: 173379 - DNA, 121 bp, Homo sapiens
  chr13:21633732-21633853
  hypo
caaaaaacaacaacaacaacaacaaaaaacactcatatccatcctagagaagcgtgaaaatgtaaaagttcttgttcaaaattcttgtcaggtggggcgcggtggctcacgcctgtaatcc

SEQ ID NO: 173380 - DNA, 19 bp, Homo sapiens
  chr13:21634092-21634111
  hypo
gatcttgtcttaaaataac

SEQ ID NO: 173381 - DNA, 1165 bp, Homo sapiens; identical to SEQ ID NO: 50375
  chr13:21634590-21635755
  hypo

SEQ ID NO: 173382 - DNA, 228 bp, Homo sapiens; identical to SEQ ID NO: 9203
  chr13:21635777-21636005
  hypo

SEQ ID NO: 173383 - DNA, 30 bp, Homo sapiens
  chr13:21652100-21652130
  hypo
gagctggcgctttccgtgcgagcccagcat

SEQ ID NO: 173384 - DNA, 50 bp, Homo sapiens; identical to SEQ ID NO: 85569
  chr13:21677729-21677779
  hypo

SEQ ID NO: 173385 - DNA, 113 bp, Homo sapiens; identical to SEQ ID NO: 85570
  chr13:21678549-21678662
  hypo

SEQ ID NO: 173386 - DNA, 83 bp, Homo sapiens; identical to SEQ ID NO: 85571
  chr13:21713730-21713813
  hypo

SEQ ID NO: 173387 - DNA, 20 bp, Homo sapiens
  chr13:21744612-21744632
  hypo
ctggccggttatatactttc

SEQ ID NO: 173388 - DNA, 27 bp, Homo sapiens
  chr13:21745419-21745446
  hypo
aaatgaagacactgggccaggcgctgt

SEQ ID NO: 173389 - DNA, 26 bp, Homo sapiens
  chr13:21745685-21745711
  hypo
tgagcgagactccatctcaaaaaaaa

SEQ ID NO: 173390 - DNA, 30 bp, Homo sapiens
  chr13:21752068-21752098
  hypo
gagccgagagcatgccgctgcactccagcc

SEQ ID NO: 173391 - DNA, 47 bp, Homo sapiens
  chr13:21809434-21809481
  hypo
ggctctgtgaactgccggtgcgcagcaaagcgcggcccatgtgtgca

SEQ ID NO: 173392 - DNA, 32 bp, Homo sapiens; identical to SEQ ID NO: 85576
  chr13:21863995-21864027
  hypo

SEQ ID NO: 173393 - DNA, 70 bp, Homo sapiens; identical to SEQ ID NO: 85577
  chr13:21894156-21894226
  hypo

SEQ ID NO: 173394 - DNA, 30 bp, Homo sapiens; identical to SEQ ID NO: 85578
  chr13:21896601-21896631
  hypo

SEQ ID NO: 173395 - DNA, 24 bp, Homo sapiens
  chr13:21944175-21944199
  hypo
aatacaaataaaaagtcgggtgcg

SEQ ID NO: 173396 - DNA, 148 bp, Homo sapiens; identical to SEQ ID NO: 85579
  chr13:22021308-22021456
  hypo

SEQ ID NO: 173397 - DNA, 30 bp, Homo sapiens; identical to SEQ ID NO: 85580
  chr13:22034713-22034743
  hypo

SEQ ID NO: 173398 - DNA, 35 bp, Homo sapiens; identical to SEQ ID NO: 85581
  chr13:22048999-22049034
  hypo

SEQ ID NO: 173399 - DNA, 35 bp, Homo sapiens
  chr13:22049273-22049308
  hypo
gagccaccgcgcccggctgtttctgcatttcttga

SEQ ID NO: 173400 - DNA, 136 bp, Homo sapiens; identical to SEQ ID NO: 85583
  chr13:22058107-22058243
  hypo

SEQ ID NO: 173401 - DNA, 37 bp, Homo sapiens
  chr13:22091943-22091980
  hypo
gcgcgcgcgcacacgcgctacatacttaggtttacta

SEQ ID NO: 173402 - DNA, 29 bp, Homo sapiens
  chr13:22093222-22093251
  hypo
attttttttgagacagagtttcgcttgcg

SEQ ID NO: 173403 - DNA, 29 bp, Homo sapiens
  chr13:22093490-22093519
  hypo
ccaccctcgagagttcactgcttttaaac

SEQ ID NO: 173404 - DNA, 19 bp, Homo sapiens
  chr13:22145801-22145820
  hypo
actccggcttgggcaacag

SEQ ID NO: 173405 - DNA, 30 bp, Homo sapiens; identical to SEQ ID NO: 85587
  chr13:22176368-22176398
  hypo

SEQ ID NO: 173406 - DNA, 161 bp, Homo sapiens; identical to SEQ ID NO: 26934
  chr13:22214671-22214832
  hypo

SEQ ID NO: 173407 - DNA, 35 bp, Homo sapiens; identical to SEQ ID NO: 85589
  chr13:22239915-22239950
  hypo

SEQ ID NO: 173408 - DNA, 798 bp, Homo sapiens; identical to SEQ ID NO: 123434
  chr13:22243216-22244014
  hypo

SEQ ID NO: 173409 - DNA, 558 bp, Homo sapiens; identical to SEQ ID NO: 9207
  chr13:22244072-22244630
  hypo

SEQ ID NO: 173410 - DNA, 401 bp, Homo sapiens; identical to SEQ ID NO: 50384
  chr13:22244998-22245399
  hypo

SEQ ID NO: 173411 - DNA, 97 bp, Homo sapiens; identical to SEQ ID NO: 9210
  chr13:22247844-22247941
  hypo

SEQ ID NO: 173412 - DNA, 30 bp, Homo sapiens
  chr13:22298892-22298922
  hypo
cggccatgacggacgcggcagtgaggttca

SEQ ID NO: 173413 - DNA, 30 bp, Homo sapiens
  chr13:22299327-22299357
  hypo
agcccgcagcctcagcgcttcttgacacct

SEQ ID NO: 173414 - DNA, 35 bp, Homo sapiens; identical to SEQ ID NO: 85594
  chr13:22338336-22338371
  hypo

SEQ ID NO: 173415 - DNA, 46 bp, Homo sapiens; identical to SEQ ID NO: 85595
  chr13:22350433-22350479
  hypo

SEQ ID NO: 173416 - DNA, 32 bp, Homo sapiens; identical to SEQ ID NO: 26939
  chr13:22392837-22392869
  hypo

SEQ ID NO: 173417 - DNA, 32 bp, Homo sapiens; identical to SEQ ID NO: 26940
  chr13:22392988-22393020
  hypo

SEQ ID NO: 173418 - DNA, 188 bp, Homo sapiens
  chr13:22417568-22417756
  hypo
acagaagcaaatgaaactgaccggatgcctagaagcaaacagattttattcgaatatccggttggatacacaagtctggagtgatgtggtgagattcggggaatgagcctgacctgggcactgctggcagggatggtgttgcagccaaggaactgctgggcggcgtcggactcagccctccttgtcca

SEQ ID NO: 173419 - DNA, 45 bp, Homo sapiens; identical to SEQ ID NO: 85599
  chr13:22467017-22467062
  hypo

SEQ ID NO: 173420 - DNA, 30 bp, Homo sapiens
  chr13:22493619-22493649
  hypo
agctcagaaacatgccgaagcagcttcttc

SEQ ID NO: 173421 - DNA, 30 bp, Homo sapiens
  chr13:22493862-22493892
  hypo
ttctgtaagtgtgttcggaattggtgtgtt

SEQ ID NO: 173422 - DNA, 46 bp, Homo sapiens
  chr13:22496748-22496794
  hypo
aaacagtgagagcatgtctgacgccgcaggtaagagcatatccaac

SEQ ID NO: 173423 - DNA, 30 bp, Homo sapiens
  chr13:22503874-22503904
  hypo
cccacggctgcaccacgttagggcctgctg

SEQ ID NO: 173424 - DNA, 158 bp, Homo sapiens
  chr13:22511718-22511876
  hypo
ttttgaacatcatgcaacagtcgcttgtggtaattatttcttcagcctaggtctatttaatttaacgttgcttgggaaaaaaatgataataaaatcccaaaagataccgataagttctgcatcccgatatgtctttatgatgacgtagggtgacaaat

SEQ ID NO: 173425 - DNA, 181 bp, Homo sapiens; identical to SEQ ID NO: 26941
  chr13:22539243-22539424
  hypo

SEQ ID NO: 173426 - DNA, 31 bp, Homo sapiens; identical to SEQ ID NO: 9211
  chr13:22553926-22553957
  hypo

SEQ ID NO: 173427 - DNA, 30 bp, Homo sapiens
  chr13:22678153-22678183
  hypo
cttctgtctcctggccgcttggcttggaga

SEQ ID NO: 173428 - DNA, 200 bp, Homo sapiens; identical to SEQ ID NO: 85603
  chr13:22785988-22786188
  hypo

SEQ ID NO: 173429 - DNA, 92 bp, Homo sapiens
  chr13:22786756-22786848
  hypo
caaaactctaaaagctatgccatgaggggctgaagtatcctcgttgtggaaaggcaggttacgcagagcacagcgaccgggagccccaggca

SEQ ID NO: 173430 - DNA, 21 bp, Homo sapiens
  chr13:23143353-23143374
  hypo
ggcccaactgattcattttta

SEQ ID NO: 173431 - DNA, 30 bp, Homo sapiens; identical to SEQ ID NO: 85605
  chr13:23299563-23299593
  hypo

SEQ ID NO: 173432 - DNA, 370 bp, Homo sapiens
  chr13:23508830-23509200
  hypo
ttcttttccgtctccggttaggtgagaaggtcaatctggccctgcgggttatgttgggggttacatgagaacctcattggcatgaagaggccaggcaggtcctccgacagtgccacagccccaggcttgtgccgccaaatcacggaggccttccgggccctgaacacgaaccggacggggccttcccgcattactacccgaatgacactgctggggggaccgctctctggatgccattgtggccacgtgtcgggacggtcggctgcttgactccacgacttaaagctagatttggccttttaagcctctgtctcagtgccctcgggtcccttctgcagctcacctacctgtccctcggcctctggggtgg

SEQ ID NO: 173433 - DNA, 141 bp, Homo sapiens
  chr13:23629552-23629693
  hypo
ggtcttagtcgtcgtaaaggcagcattttacttgatagagaaacattggaggcgttaacactaagatcaaaaaaacaaggcaagcagttcaggccggatccctgcgtgtggtgaagaggctgccgccggcttcactccagg

SEQ ID NO: 173434 - DNA, 33 bp, Homo sapiens; identical to SEQ ID NO: 85607
  chr13:23654297-23654330
  hypo

SEQ ID NO: 173435 - DNA, 787 bp, Homo sapiens; identical to SEQ ID NO: 123443
  chr13:23733510-23734297
  hypo

SEQ ID NO: 173436 - DNA, 22 bp, Homo sapiens
  chr13:23734814-23734836
  hypo
cgccttcagttcccccaattcc

SEQ ID NO: 173437 - DNA, 128 bp, Homo sapiens; identical to SEQ ID NO: 26947
  chr13:23896846-23896974
  hypo

SEQ ID NO: 173438 - DNA, 202 bp, Homo sapiens; identical to SEQ ID NO: 26948
  chr13:23897355-23897557
  hypo

SEQ ID NO: 173439 - DNA, 156 bp, Homo sapiens
  chr13:23910725-23910881
  hypo
tcactgattattcgtcggcaaagctgaaaattctcttctgttatttgctttgttcctctttcttgatcaatagattccaaaacaagagcaaaatcttcaacagtgcatgactgcctcacacccacggtttcaaaaagttcgcggaaattattttta

SEQ ID NO: 173440 - DNA, 30 bp, Homo sapiens; identical to SEQ ID NO: 26949
  chr13:23993512-23993542
  hypo

SEQ ID NO: 173441 - DNA, 565 bp, Homo sapiens; identical to SEQ ID NO: 50393
  chr13:24040495-24041060
  hypo

SEQ ID NO: 173442 - DNA, 30 bp, Homo sapiens; identical to SEQ ID NO: 85614
  chr13:24152120-24152150
  hypo

SEQ ID NO: 173443 - DNA, 31 bp, Homo sapiens; identical to SEQ ID NO: 26950
  chr13:24155136-24155167
  hypo

SEQ ID NO: 173444 - DNA, 30 bp, Homo sapiens; identical to SEQ ID NO: 85616
  chr13:24269279-24269309
  hypo

SEQ ID NO: 173445 - DNA, 136 bp, Homo sapiens
  chr13:24289625-24289761
  hypo
ggtttgcattgcaggcggtggggccagctgcggtatggcggtggcggggggtggttacactgccagaggctacactgcccgagccaggaggcgggttatgtccgctattgtggactgctggcggcagggtgatggg

SEQ ID NO: 173446 - DNA, 30 bp, Homo sapiens
  chr13:24296509-24296539
  hypo
cactagtgacgggttcgctccaccacccca

SEQ ID NO: 173447 - DNA, 30 bp, Homo sapiens
  chr13:24297087-24297117
  hypo
taatgtatgtatgtccgcgcagtctgaaaa

SEQ ID NO: 173448 - DNA, 22 bp, Homo sapiens
  chr13:24373752-24373774
  hypo
ctgcgcccggcctaggataatt

SEQ ID NO: 173449 - DNA, 253 bp, Homo sapiens; identical to SEQ ID NO: 85618
  chr13:24408048-24408301
  hypo

SEQ ID NO: 173450 - DNA, 36 bp, Homo sapiens; identical to SEQ ID NO: 85619
  chr13:24527675-24527711
  hypo

SEQ ID NO: 173451 - DNA, 31 bp, Homo sapiens; identical to SEQ ID NO: 85620
  chr13:24631435-24631466
  hypo

SEQ ID NO: 173452 - DNA, 184 bp, Homo sapiens
  chr13:24658297-24658481
  hypo
taacttagcaacaagcgagacgagagaagaaagcagctgaacaatttaaatgcgttggggagatgtgggtggaaagaggggaaaagggccccaggtgcagtcgaaggaggcattcgctggtggggaaaagggtctctgtgcttgcagttctgcttcttttgagaaaggaaggaggagctgagcc

SEQ ID NO: 173453 - DNA, 359 bp, Homo sapiens; identical to SEQ ID NO: 85621
  chr13:24718515-24718874
  hypo

SEQ ID NO: 173454 - DNA, 114 bp, Homo sapiens; identical to SEQ ID NO: 85622
  chr13:24720490-24720604
  hypo

SEQ ID NO: 173455 - DNA, 1103 bp, Homo sapiens; identical to SEQ ID NO: 123454
  chr13:24734666-24735769
  hypo

SEQ ID NO: 173456 - DNA, 30 bp, Homo sapiens
  chr13:24774620-24774650
  hypo
ttgaatgtcccacctcgttctcagccccaa

SEQ ID NO: 173457 - DNA, 44 bp, Homo sapiens
  chr13:24781501-24781545
  hypo
cccctgaacttaaaataaaaatcggaaagaaaataaaatctgtt

SEQ ID NO: 173458 - DNA, 31 bp, Homo sapiens; identical to SEQ ID NO: 85624
  chr13:24797365-24797396
  hypo

SEQ ID NO: 173459 - DNA, 90 bp, Homo sapiens; identical to SEQ ID NO: 85625
  chr13:24797622-24797712
  hypo

SEQ ID NO: 173460 - DNA, 49 bp, Homo sapiens; identical to SEQ ID NO: 85626
  chr13:24815547-24815596
  hypo

SEQ ID NO: 173461 - DNA, 52 bp, Homo sapiens
  chr13:24819242-24819294
  hypo
tttctttggtgcatccgtgggccccggcagcccacgccggagtctgagttag

SEQ ID NO: 173462 - DNA, 31 bp, Homo sapiens; identical to SEQ ID NO: 26955
  chr13:24860470-24860501
  hypo

SEQ ID NO: 173463 - DNA, 110 bp, Homo sapiens; identical to SEQ ID NO: 85628
  chr13:24868947-24869057
  hypo

SEQ ID NO: 173464 - DNA, 30 bp, Homo sapiens
  chr13:24915149-24915179
  hypo
actgtgcgtgggtgcgggagccttggtcca

SEQ ID NO: 173465 - DNA, 31 bp, Homo sapiens; identical to SEQ ID NO: 85629
  chr13:24966169-24966200
  hypo

SEQ ID NO: 173466 - DNA, 30 bp, Homo sapiens; identical to SEQ ID NO: 85630
  chr13:25016308-25016338
  hypo

SEQ ID NO: 173467 - DNA, 71 bp, Homo sapiens; identical to SEQ ID NO: 85631
  chr13:25026103-25026174
  hypo

SEQ ID NO: 173468 - DNA, 232 bp, Homo sapiens; identical to SEQ ID NO: 85632
  chr13:25026474-25026706
  hypo

SEQ ID NO: 173469 - DNA, 38 bp, Homo sapiens; identical to SEQ ID NO: 85633
  chr13:25084392-25084430
  hypo

SEQ ID NO: 173470 - DNA, 31 bp, Homo sapiens
  chr13:25229906-25229937
  hypo
ttagaaaaggccgggcgcggtggctcacgcc

SEQ ID NO: 173471 - DNA, 1081 bp, Homo sapiens; identical to SEQ ID NO: 9221
  chr13:25321112-25322193
  hypo

SEQ ID NO: 173472 - DNA, 30 bp, Homo sapiens; identical to SEQ ID NO: 50405
  chr13:25322238-25322268
  hypo

SEQ ID NO: 173473 - DNA, 30 bp, Homo sapiens; identical to SEQ ID NO: 85636
  chr13:25337240-25337270
  hypo

SEQ ID NO: 173474 - DNA, 34 bp, Homo sapiens
  chr13:25463714-25463748
  hypo
gtgcacacacacgcacgcgcgccccttttgacaa

SEQ ID NO: 173475 - DNA, 30 bp, Homo sapiens; identical to SEQ ID NO: 85637
  chr13:25469132-25469162
  hypo

SEQ ID NO: 173476 - DNA, 49 bp, Homo sapiens; identical to SEQ ID NO: 85638
  chr13:25469372-25469421
  hypo

SEQ ID NO: 173477 - DNA, 23 bp, Homo sapiens
  chr13:25491084-25491107
  hypo
aaagacaaaaaaatacatttacg

SEQ ID NO: 173478 - DNA, 30 bp, Homo sapiens; identical to SEQ ID NO: 85640
  chr13:25590533-25590563
  hypo

SEQ ID NO: 173479 - DNA, 79 bp, Homo sapiens; identical to SEQ ID NO: 26959
  chr13:25642760-25642839
  hypo

SEQ ID NO: 173480 - DNA, 22 bp, Homo sapiens
  chr13:25645193-25645215
  hypo
tgggcgtcggccgggcgcggtg

SEQ ID NO: 173481 - DNA, 35 bp, Homo sapiens
  chr13:25668696-25668731
  hypo
ctactctaggctaggcgcggcggctcacgcctgta

SEQ ID NO: 173482 - DNA, 22 bp, Homo sapiens
  chr13:25669248-25669270
  hypo
taacattacatatttattggtc

SEQ ID NO: 173483 - DNA, 102 bp, Homo sapiens; identical to SEQ ID NO: 85644
  chr13:25670561-25670663
  hypo

SEQ ID NO: 173484 - DNA, 52 bp, Homo sapiens; identical to SEQ ID NO: 50412
  chr13:25744682-25744734
  hypo

SEQ ID NO: 173485 - DNA, 294 bp, Homo sapiens; identical to SEQ ID NO: 9226
  chr13:25745300-25745594
  hypo

SEQ ID NO: 173486 - DNA, 354 bp, Homo sapiens; identical to SEQ ID NO: 9227
  chr13:25745726-25746080
  hypo

SEQ ID NO: 173487 - DNA, 30 bp, Homo sapiens; identical to SEQ ID NO: 26964
  chr13:25889270-25889300
  hypo

SEQ ID NO: 173488 - DNA, 30 bp, Homo sapiens
  chr13:25905688-25905718
  hypo
tgctacaggtctgaacgcattcaagttata

SEQ ID NO: 173489 - DNA, 165 bp, Homo sapiens; identical to SEQ ID NO: 85649
  chr13:25932256-25932421
  hypo

SEQ ID NO: 173490 - DNA, 293 bp, Homo sapiens
  chr13:25939929-25940222
  hypo
ggcgtcctcactgcacggcttgttcattggcactgcttcccgagtcctggggcttcatcacgtcgggcagctcaggcgggctggaaaacggctcgatgcacagggtctcaaagctgtcgtctgcgcggaaggcgagccccactgtggctggggcctgtggccgtgctgtttggctggtgaagccacactcacccagtgtcttgccatcatccaagagttggtcgtcctagcacagccactgctcatctggcagcagcttgaggatggcctcaacgatgcgcttcagctcgaac

SEQ ID NO: 173491 - DNA, 373 bp, Homo sapiens; identical to SEQ ID NO: 9229
  chr13:25946300-25946673
  hypo

SEQ ID NO: 173492 - DNA, 150 bp, Homo sapiens; identical to SEQ ID NO: 123480
  chr13:25946801-25946951
  hypo

SEQ ID NO: 173493 - DNA, 30 bp, Homo sapiens
  chr13:26020142-26020172
  hypo
gtaaatgatagcgtgcgtggagtgtgcctg

SEQ ID NO: 173494 - DNA, 14 bp, Homo sapiens
  chr13:26042693-26042707
  hypo
cgggactagagggt

SEQ ID NO: 173495 - DNA, 402 bp, Homo sapiens; identical to SEQ ID NO: 50420
  chr13:26042768-26043170
  hypo

SEQ ID NO: 173496 - DNA, 118 bp, Homo sapiens; identical to SEQ ID NO: 123483
  chr13:26043340-26043458
  hypo

SEQ ID NO: 173497 - DNA, 165 bp, Homo sapiens
  chr13:26354974-26355139
  hypo
tgcccgctagccctccgctcacctcctgctatgtggtcgggtttgcaacagccaccgaccagcaccagtccagtccgtggcccaggggttggggatccctgtactacaggatatgagaaaaggccttactggcagtttgttttctgtgtcttcgaattctcacgc

SEQ ID NO: 173498 - DNA, 30 bp, Homo sapiens
  chr13:26412152-26412182
  hypo
ctgggcacagaggggcgagatgtgagcatg

SEQ ID NO: 173499 - DNA, 30 bp, Homo sapiens
  chr13:26482308-26482338
  hypo
ggttttctaccgaggcgtgctttctttgct

SEQ ID NO: 173500 - DNA, 59 bp, Homo sapiens
  chr13:26548841-26548900
  hypo
agtctcctgctccatcgggatgaatttttcccacactgcagactcgctctcagtgtcca

SEQ ID NO: 173501 - DNA, 30 bp, Homo sapiens; identical to SEQ ID NO: 9232
  chr13:26594656-26594686
  hypo

SEQ ID NO: 173502 - DNA, 390 bp, Homo sapiens; identical to SEQ ID NO: 9234
  chr13:26625266-26625656
  hypo

SEQ ID NO: 173503 - DNA, 124 bp, Homo sapiens; identical to SEQ ID NO: 9235
  chr13:26626239-26626363
  hypo

SEQ ID NO: 173504 - DNA, 28 bp, Homo sapiens
  chr13:26759863-26759891
  hypo
aacgagcgaaaccctgtctcaaaaaaaa

SEQ ID NO: 173505 - DNA, 30 bp, Homo sapiens
  chr13:26885530-26885560
  hypo
tagaatgcgtttggtcgcaaataataggaa

SEQ ID NO: 173506 - DNA, 30 bp, Homo sapiens; identical to SEQ ID NO: 85658
  chr13:26907172-26907202
  hypo

SEQ ID NO: 173507 - DNA, 31 bp, Homo sapiens; identical to SEQ ID NO: 85659
  chr13:27058903-27058934
  hypo

SEQ ID NO: 173508 - DNA, 30 bp, Homo sapiens
  chr13:27333490-27333520
  hypo
ataggtaaacgtgaccgtcctctccgaatg

SEQ ID NO: 173509 - DNA, 1014 bp, Homo sapiens; identical to SEQ ID NO: 50436
  chr13:27334205-27335219
  hypo

SEQ ID NO: 173510 - DNA, 30 bp, Homo sapiens
  chr13:27528977-27529007
  hypo
cctgggaagcgtttacggaacgagggtgtg

SEQ ID NO: 173511 - DNA, 30 bp, Homo sapiens
  chr13:27550033-27550063
  hypo
caggtcggccttccccgctccctggccatt

SEQ ID NO: 173512 - DNA, 38 bp, Homo sapiens; identical to SEQ ID NO: 26973
  chr13:27556410-27556448
  hypo

SEQ ID NO: 173513 - DNA, 30 bp, Homo sapiens
  chr13:27587636-27587666
  hypo
ttaaaaagtttaaaacggccgggtgtggtg

SEQ ID NO: 173514 - DNA, 30 bp, Homo sapiens
  chr13:27588343-27588373
  hypo
gaggtgtgcattgtgcgcgtgtcttagcac

SEQ ID NO: 173515 - DNA, 30 bp, Homo sapiens; identical to SEQ ID NO: 85662
  chr13:27597715-27597745
  hypo

SEQ ID NO: 173516 - DNA, 213 bp, Homo sapiens
  chr13:27610223-27610436
  hypo
gctcattctgacccgcgcaccgagatggaagctgtgacacaggaggctgtgtcagcgccatcccagctctgcaagtacatccaaattccaggttcccgcctcacctctctggtctacctaagagttcacagcgcagttgcagtgctctgggttcctgcctgcttcatggtaccagcccatgcccttctgtgatccacacgcgtccgggacctc

SEQ ID NO: 173517 - DNA, 179 bp, Homo sapiens; identical to SEQ ID NO: 26974
  chr13:27620502-27620681
  hypo

SEQ ID NO: 173518 - DNA, 400 bp, Homo sapiens
  chr13:27690600-27691000
  hypo
ttttaaaactgcttccgaacatgattctaaaagcgtatcaatggatacttacattgactaatccaaaatagtgctcattgaccggaaactgttctggaccaatctctttctctaatgccgaagcattggcgccctataaaatgaaaaacaaaaatcttagtatttatagtagtcatgcaccacataatgacacttcagtcaatgacaggccgcaacatgatggtcctatcacattacgatggagctgccctacacaggtgcgtctttatcctttacaccgtatttttagctgtacctttcttacgtttagatatgttcagatgcacacttattcctgtgttacgattgcctagaaaatacaggaacatgctgtataggtttgtggccttcgagcaacagg

SEQ ID NO: 173519 - DNA, 99 bp, Homo sapiens; identical to SEQ ID NO: 85665
  chr13:27691059-27691158
  hypo

SEQ ID NO: 173520 - DNA, 295 bp, Homo sapiens; identical to SEQ ID NO: 123501
  chr13:27744739-27745034
  hypo

SEQ ID NO: 173521 - DNA, 181 bp, Homo sapiens
  chr13:27786255-27786436
  hypo
ggccaaagccagagctggctccctctgctcctggggagatttcagggagaggcgtgggtgggagccagggctgcaggcgcaggttctgggtgggcatgggcttggcgggccctgcactcctagtggccggcacctactgggcttcatctgggacgagctccctctgggctgccggaatgcc

SEQ ID NO: 173522 - DNA, 23 bp, Homo sapiens
  chr13:27811768-27811791
  hypo
ccgcaccaggccttaagtgtcat

SEQ ID NO: 173523 - DNA, 30 bp, Homo sapiens; identical to SEQ ID NO: 9240
  chr13:27868706-27868736
  hypo

SEQ ID NO: 173524 - DNA, 32 bp, Homo sapiens; identical to SEQ ID NO: 26979
  chr13:27914839-27914871
  hypo

SEQ ID NO: 173525 - DNA, 92 bp, Homo sapiens; identical to SEQ ID NO: 85670
  chr13:27915170-27915262
  hypo

SEQ ID NO: 173526 - DNA, 86 bp, Homo sapiens
  chr13:27934849-27934935
  hypo
aatagtgcctgcacctcggaggcactcagtacttatttgttgaatgaatcaactaattccatctttaagaactgggttccggccag

SEQ ID NO: 173527 - DNA, 30 bp, Homo sapiens
  chr13:28002723-28002753
  hypo
ctctccaagtgtgccggggtctctcacgcc

SEQ ID NO: 173528 - DNA, 30 bp, Homo sapiens; identical to SEQ ID NO: 26980
  chr13:28026792-28026822
  hypo

SEQ ID NO: 173529 - DNA, 50 bp, Homo sapiens
  chr13:28124054-28124104
  hypo
gggaaacttactcagcgctcaatgtcacatcacaacgtgatgaatgaaat

SEQ ID NO: 173530 - DNA, 30 bp, Homo sapiens
  chr13:28124580-28124610
  hypo
cccaagtaacttcttcgtaaaactatatcg

SEQ ID NO: 173531 - DNA, 58 bp, Homo sapiens; identical to SEQ ID NO: 26981
  chr13:28152522-28152580
  hypo

SEQ ID NO: 173532 - DNA, 30 bp, Homo sapiens; identical to SEQ ID NO: 9243
  chr13:28179804-28179834
  hypo

SEQ ID NO: 173533 - DNA, 268 bp, Homo sapiens; identical to SEQ ID NO: 26983
  chr13:28239903-28240171
  hypo

SEQ ID NO: 173534 - DNA, 30 bp, Homo sapiens; identical to SEQ ID NO: 50462
  chr13:28476962-28476992
  hypo

SEQ ID NO: 173535 - DNA, 2037 bp, Homo sapiens; identical to SEQ ID NO: 123538
  chr13:28493980-28496017
  hypo

SEQ ID NO: 173536 - DNA, 726 bp, Homo sapiens; identical to SEQ ID NO: 123551
  chr13:28551658-28552384
  hypo

SEQ ID NO: 173537 - DNA, 334 bp, Homo sapiens; identical to SEQ ID NO: 9263
  chr13:28552659-28552993
  hypo

SEQ ID NO: 173538 - DNA, 244 bp, Homo sapiens; identical to SEQ ID NO: 26987
  chr13:28575158-28575402
  hypo

SEQ ID NO: 173539 - DNA, 30 bp, Homo sapiens; identical to SEQ ID NO: 9264
  chr13:28578210-28578240
  hypo

SEQ ID NO: 173540 - DNA, 67 bp, Homo sapiens; identical to SEQ ID NO: 9265
  chr13:28592625-28592692
  hypo

SEQ ID NO: 173541 - DNA, 30 bp, Homo sapiens; identical to SEQ ID NO: 9266
  chr13:28599040-28599070
  hypo

SEQ ID NO: 173542 - DNA, 30 bp, Homo sapiens; identical to SEQ ID NO: 9267
  chr13:28602387-28602417
  hypo

SEQ ID NO: 173543 - DNA, 500 bp, Homo sapiens; identical to SEQ ID NO: 9268
  chr13:28608022-28608522
  hypo

SEQ ID NO: 173544 - DNA, 30 bp, Homo sapiens; identical to SEQ ID NO: 9269
  chr13:28610100-28610130
  hypo

SEQ ID NO: 173545 - DNA, 30 bp, Homo sapiens; identical to SEQ ID NO: 9270
  chr13:28611397-28611427
  hypo

SEQ ID NO: 173546 - DNA, 30 bp, Homo sapiens; identical to SEQ ID NO: 9271
  chr13:28622462-28622492
  hypo

SEQ ID NO: 173547 - DNA, 30 bp, Homo sapiens; identical to SEQ ID NO: 9272
  chr13:28623585-28623615
  hypo

SEQ ID NO: 173548 - DNA, 107 bp, Homo sapiens; identical to SEQ ID NO: 9273
  chr13:28636039-28636146
  hypo

SEQ ID NO: 173549 - DNA, 30 bp, Homo sapiens; identical to SEQ ID NO: 9274
  chr13:28644712-28644742
  hypo

SEQ ID NO: 173550 - DNA, 39 bp, Homo sapiens; identical to SEQ ID NO: 85692
  chr13:28662982-28663021
  hypo

SEQ ID NO: 173551 - DNA, 170 bp, Homo sapiens; identical to SEQ ID NO: 9275
  chr13:28674056-28674226
  hypo

SEQ ID NO: 173552 - DNA, 470 bp, Homo sapiens; identical to SEQ ID NO: 9276
  chr13:28674720-28675190
  hypo

SEQ ID NO: 173553 - DNA, 23 bp, Homo sapiens
  chr13:28705877-28705900
  hypo
agttcactataccctcgaactcc

SEQ ID NO: 173554 - DNA, 139 bp, Homo sapiens
  chr13:28745529-28745668
  hypo
ctacttggagttagtgcggactccagaggttaagagctcagtcacgcaagactgctctccacttcagataccagtgacatgtagcgggtcctcagattatccacacttctatccgacttggctacaaattgggagttcc

SEQ ID NO: 173555 - DNA, 378 bp, Homo sapiens
  chr13:28745727-28746105
  hypo
cttgcttgactggtttattacaaaggatacagatgaacagtcagatgaaaaggtagaacaaggatcttttttctctgtggagttggggtgtgccaccctcctggctcataaatgtgttcaccggcccacaaactccttgaaccccacagttaagggatttttatggacgcttcatctcgcaggcaagggaaattattaactcagcctgtagcccctctctcctcactggaagatggttgggtagggctgaaagttccaaactggtaatcagggcttggtctttctggtgaacggctcccatctaggtacctaacaaaagtcacctcattagaacaaacgctactcctatcaccctggaaattccgagggatttaggag

SEQ ID NO: 173556 - DNA, 31 bp, Homo sapiens; identical to SEQ ID NO: 27004
  chr13:28777902-28777933
  hypo

SEQ ID NO: 173557 - DNA, 30 bp, Homo sapiens; identical to SEQ ID NO: 27005
  chr13:28778232-28778262
  hypo

SEQ ID NO: 173558 - DNA, 31 bp, Homo sapiens; identical to SEQ ID NO: 27006
  chr13:28818188-28818219
  hypo

SEQ ID NO: 173559 - DNA, 57 bp, Homo sapiens
  chr13:28838071-28838128
  hypo
ttttcaaacaaacaccgccctatgtttctgactatcccttcccgcgtaacatttgtt

SEQ ID NO: 173560 - DNA, 30 bp, Homo sapiens
  chr13:28902792-28902822
  hypo
tgtcccctctacggcggcagatgccgcaga

SEQ ID NO: 173561 - DNA, 1163 bp, Homo sapiens; identical to SEQ ID NO: 123571
  chr13:29067822-29068985
  hypo

SEQ ID NO: 173562 - DNA, 30 bp, Homo sapiens; identical to SEQ ID NO: 85702
  chr13:29112391-29112421
  hypo

SEQ ID NO: 173563 - DNA, 30 bp, Homo sapiens
  chr13:29141611-29141641
  hypo
cacttgaggaggcgacgaccgggctgaata

SEQ ID NO: 173564 - DNA, 31 bp, Homo sapiens; identical to SEQ ID NO: 27008
  chr13:29241509-29241540
  hypo

SEQ ID NO: 173565 - DNA, 30 bp, Homo sapiens; identical to SEQ ID NO: 9283
  chr13:29283831-29283861
  hypo

SEQ ID NO: 173566 - DNA, 30 bp, Homo sapiens
  chr13:29290700-29290730
  hypo
gaagggagataagaccgctgggtgagactc

SEQ ID NO: 173567 - DNA, 1128 bp, Homo sapiens; identical to SEQ ID NO: 9284
  chr13:29292470-29293598
  hypo

SEQ ID NO: 173568 - DNA, 87 bp, Homo sapiens
  chr13:29298156-29298243
  hypo
atccccgccgctgccgccatttcacttcattggagacactgaaggccgaggtcgccaccactcctcctaatcgacggagcgagagaa

SEQ ID NO: 173569 - DNA, 118 bp, Homo sapiens; identical to SEQ ID NO: 123581
  chr13:29394329-29394447
  hypo

SEQ ID NO: 173570 - DNA, 366 bp, Homo sapiens; identical to SEQ ID NO: 123582
  chr13:29394546-29394912
  hypo

SEQ ID NO: 173571 - DNA, 30 bp, Homo sapiens
  chr13:29613517-29613547
  hypo
aaagcatcgcgcgccgggcaccctctggcc

SEQ ID NO: 173572 - DNA, 223 bp, Homo sapiens; identical to SEQ ID NO: 27012
  chr13:29913840-29914063
  hypo

SEQ ID NO: 173573 - DNA, 205 bp, Homo sapiens; identical to SEQ ID NO: 27013
  chr13:29920652-29920857
  hypo

SEQ ID NO: 173574 - DNA, 167 bp, Homo sapiens
  chr13:29933412-29933579
  hypo
aggactgcggcagctcgaaatgggtttccgcccaagccggacccgcaggcccgtgaggctgagcggcagctggtgctgcggctgaaggagcggtgtgagcagcagaccagacagctgggcgttgcgcaaggggagctgaagagggccatctgcggctttgatgccct

SEQ ID NO: 173575 - DNA, 16 bp, Homo sapiens
  chr13:29980174-29980190
  hypo
gccttaactatgttta

SEQ ID NO: 173576 - DNA, 96 bp, Homo sapiens; identical to SEQ ID NO: 85710
  chr13:30079032-30079128
  hypo

SEQ ID NO: 173577 - DNA, 227 bp, Homo sapiens; identical to SEQ ID NO: 85711
  chr13:30079643-30079870
  hypo

SEQ ID NO: 173578 - DNA, 243 bp, Homo sapiens; identical to SEQ ID NO: 85712
  chr13:30082637-30082880
  hypo

SEQ ID NO: 173579 - DNA, 150 bp, Homo sapiens; identical to SEQ ID NO: 85713
  chr13:30087250-30087400
  hypo

SEQ ID NO: 173580 - DNA, 55 bp, Homo sapiens
  chr13:30088600-30088655
  hypo
ggggcggggctgtgcgtcacttgcactggtccaagttgccgtcaggagtccttgc

SEQ ID NO: 173581 - DNA, 30 bp, Homo sapiens; identical to SEQ ID NO: 27016
  chr13:30096169-30096199
  hypo

SEQ ID NO: 173582 - DNA, 46 bp, Homo sapiens; identical to SEQ ID NO: 27017
  chr13:30101131-30101177
  hypo

SEQ ID NO: 173583 - DNA, 459 bp, Homo sapiens; identical to SEQ ID NO: 85717
  chr13:30106966-30107425
  hypo

SEQ ID NO: 173584 - DNA, 247 bp, Homo sapiens; identical to SEQ ID NO: 27019
  chr13:30123248-30123495
  hypo

SEQ ID NO: 173585 - DNA, 39 bp, Homo sapiens; identical to SEQ ID NO: 27020
  chr13:30128332-30128371
  hypo

SEQ ID NO: 173586 - DNA, 171 bp, Homo sapiens
  chr13:30141665-30141836
  hypo
tcccacactgaatgttcggaatgctcaaagggcttggccgcagccttttctctgccaaggcacacctgacaggtaagctcctgccacactcctgggtgtttacaagctgctgggtacaactccctgcaggcgggcatccctcccacggatgcaacccggacagtgcggcag

SEQ ID NO: 173587 - DNA, 30 bp, Homo sapiens
  chr13:30143020-30143050
  hypo
caagtgactcagacgcgcctgaacacaggt

SEQ ID NO: 173588 - DNA, 351 bp, Homo sapiens
  chr13:30146274-30146625
  hypo
gtggtgagggtgcagcggccgcctgtgggtcccaagcacgactccaagtgcgacacgctgtctaggccatctggtcccacaccaagtcacatctgtgcccagagaagcccagtggaccagtgcgggccccccagccctcagggcagagccaggacgcttcacacaagagtcactcattggattttctactccacgcacacgctgtcaataatggcaggcgccacctaaaggggcaggtgccagtgtaatttaacaggggagaaaaagtacagaggccacccaggaggatgctggaaagacagagggtggggagtgggaagaaacactcaggacccgcggcaccagggcgtg

SEQ ID NO: 173589 - DNA, 32 bp, Homo sapiens; identical to SEQ ID NO: 27021
  chr13:30149063-30149095
  hypo

SEQ ID NO: 173590 - DNA, 30 bp, Homo sapiens; identical to SEQ ID NO: 27022
  chr13:30163288-30163318
  hypo

SEQ ID NO: 173591 - DNA, 201 bp, Homo sapiens
  chr13:30163602-30163803
  hypo
ctccgtcacacacaccggctcctgacactggccacgtcccagcgcagctgccccaaggaccccagggctccagctgtgccaggtgcctggacttgggagggggaagacccactttcagagacagcagagggaaatcagggcaaagagaggggaggcagggtgccctccagcgttggggcgggtgaccggtgccagcaccac

SEQ ID NO: 173592 - DNA, 37 bp, Homo sapiens; identical to SEQ ID NO: 85724
  chr13:30314400-30314437
  hypo

SEQ ID NO: 173593 - DNA, 32 bp, Homo sapiens
  chr13:30355022-30355054
  hypo
agtgctagccaggcgcggtggctcacgcctgt

SEQ ID NO: 173594 - DNA, 31 bp, Homo sapiens; identical to SEQ ID NO: 85725
  chr13:30547747-30547778
  hypo

SEQ ID NO: 173595 - DNA, 31 bp, Homo sapiens; identical to SEQ ID NO: 85726
  chr13:30573485-30573516
  hypo

SEQ ID NO: 173596 - DNA, 15 bp, Homo sapiens
  chr13:30707188-30707203
  hypo
catagcgacggggac

SEQ ID NO: 173597 - DNA, 839 bp, Homo sapiens
  chr13:30707244-30708083
  hypo
cgtccctgcactgggtgggccgtgctgggagaaggtcccggggatcactcctcctaggccgccggggcagtctctccagccaccctctttccccagagccagcgggctggggttcttggtttagactctcttctctcctgtcctggaggaccagccatttgacgcccttgtccactgggaggatgttttccatgattccacttcttcccttcctcggccacctaaggcaggccggcttatgcgtgactgtcaaccgaggcaggccacagcgctgtgggcaggcggttttgcacgtatccttagtgaccctgaaggcccagcctctgctggctgcctgagccgagggttttacttcttttcatttaatcactttattggtccttgccgggagggagcccatgggtcctggtaaaagtgcatctccctgtggttctggggctgatcctccttctggagcagaagacagagctcagtgaggaccgcctgtgctgcctgcctgggacgccccagccgcagggccgcgcaggcgtgtttctttgagagccctcccctggaagctccctttcactccaccctgttgataaggcccaggacaaaaagcaagcaaccgctggaaacacacctgctggaaacacgcctccagtgccagcccaggaggtggtggccctgtcctgacgccccgtctagccaccgggccagagctgggagccccatagtggagtctgtgtccggcaggtgtctctggacagctgaggttcttgtaaccaaagaggttcgtttacctccttagatcacccagggacaagtgatgtgttttgtggcctcggatcgttccgtgc

SEQ ID NO: 173598 - DNA, 31 bp, Homo sapiens; identical to SEQ ID NO: 85729
  chr13:30714428-30714459
  hypo

SEQ ID NO: 173599 - DNA, 30 bp, Homo sapiens
  chr13:30830917-30830947
  hypo
aaatttctagaaggccggcaaaaaccgtat

SEQ ID NO: 173600 - DNA, 30 bp, Homo sapiens
  chr13:30831715-30831745
  hypo
ccccacctcagcttgcgattcaatggccgc

SEQ ID NO: 173601 - DNA, 30 bp, Homo sapiens; identical to SEQ ID NO: 27024
  chr13:30905017-30905047
  hypo

SEQ ID NO: 173602 - DNA, 82 bp, Homo sapiens; identical to SEQ ID NO: 27025
  chr13:30910052-30910134
  hypo

SEQ ID NO: 173603 - DNA, 391 bp, Homo sapiens; identical to SEQ ID NO: 123591
  chr13:30982477-30982868
  hypo

SEQ ID NO: 173604 - DNA, 143 bp, Homo sapiens; identical to SEQ ID NO: 85733
  chr13:30992816-30992959
  hypo

SEQ ID NO: 173605 - DNA, 31 bp, Homo sapiens
  chr13:30999761-30999792
  hypo
acacttaccatagtaccgtttaggtgttcat

SEQ ID NO: 173606 - DNA, 263 bp, Homo sapiens
  chr13:31002075-31002338
  hypo
aagtggccgttaccacgatgcattctgggaaagaagcagcaccaaatccaagatggcggccagcaggaggctgatgaaggagcttgaagaaatccgcaaatgtggaatggaaaacttccgtaacatccaggttgatgaagctaatttattgacttggcaagggcttattgttcctgacaaccctccgtataataagggggccttcagaatcgaaatcaactttccagcagagtacccattcaaaccaccgaggatcacattta

SEQ ID NO: 173607 - DNA, 34 bp, Homo sapiens
  chr13:31002684-31002718
  hypo
cgtgccaccgtctggcgttcgcttgcagcagtta

SEQ ID NO: 173608 - DNA, 30 bp, Homo sapiens
  chr13:31055553-31055583
  hypo
attgcaagcactaaccgctaaacgctaaat

SEQ ID NO: 173609 - DNA, 50 bp, Homo sapiens
  chr13:31061044-31061094
  hypo
cccgagggactgcaccgcattccaaatgttgggtgcgggaggggaataaa

SEQ ID NO: 173610 - DNA, 21 bp, Homo sapiens
  chr13:31069567-31069588
  hypo
gctctgtcctccagagcgaca

SEQ ID NO: 173611 - DNA, 30 bp, Homo sapiens
  chr13:31134484-31134514
  hypo
aaatatgaagcttatcggtagccttagcga

SEQ ID NO: 173612 - DNA, 30 bp, Homo sapiens
  chr13:31134724-31134754
  hypo
acttcagacaaaggccgatatcaatagaga

SEQ ID NO: 173613 - DNA, 44 bp, Homo sapiens; identical to SEQ ID NO: 85737
  chr13:31185328-31185372
  hypo

SEQ ID NO: 173614 - DNA, 207 bp, Homo sapiens; identical to SEQ ID NO: 27029
  chr13:31208406-31208613
  hypo

SEQ ID NO: 173615 - DNA, 118 bp, Homo sapiens; identical to SEQ ID NO: 85739
  chr13:31259578-31259696
  hypo

SEQ ID NO: 173616 - DNA, 342 bp, Homo sapiens
  chr13:31305984-31306326
  hypo
tggactgcggccaggcggtcttctgcgggaatccgggcaggcagggcgggctgcgctcccctccccggctctcccggtgccccttgtctttttgttctgtctcagcagctctctattaagatgaatggcatttccaaaggcttcacctctgataagtgttcctctgcagctgcagccagaatcttaatgtgcgcgctgtaatttaatggccgtctcggctattaacacgctcttctcgggtgaagtggactccctccatccccgggcctctgcacgtgctctgcgcgctggctgggggtgactccaaggagctcagagcggggtgcccggcacctctcgcca

SEQ ID NO: 173617 - DNA, 30 bp, Homo sapiens; identical to SEQ ID NO: 27031
  chr13:31392474-31392504
  hypo

SEQ ID NO: 173618 - DNA, 56 bp, Homo sapiens; identical to SEQ ID NO: 85742
  chr13:31579359-31579415
  hypo

SEQ ID NO: 173619 - DNA, 30 bp, Homo sapiens; identical to SEQ ID NO: 27033
  chr13:31609960-31609990
  hypo

SEQ ID NO: 173620 - DNA, 24 bp, Homo sapiens
  chr13:31662753-31662777
  hypo
acgaggtcaggagatcgagaccat

SEQ ID NO: 173621 - DNA, 261 bp, Homo sapiens
  chr13:31742916-31743177
  hypo
gcccaggcagataacccgccggctggtgcctcccaactcccaaagctcctttcgcctgggttctggtgtgccatccatgcttacgcatctctctgtgcccagtgccctgcactaagccaggtgtgtagccggccctcacgctgttagctgctgttaaatgccagcactccgccccacccaactctgttgtggctcctccgactgccagcacggctacgtcatcaaacaggtgctcccaatcattcccggtcatatgaaaaa

SEQ ID NO: 173622 - DNA, 34 bp, Homo sapiens; identical to SEQ ID NO: 85745
  chr13:32244677-32244711
  hypo

SEQ ID NO: 173623 - DNA, 173 bp, Homo sapiens; identical to SEQ ID NO: 85746
  chr13:32526647-32526820
  hypo

SEQ ID NO: 173624 - DNA, 31 bp, Homo sapiens; identical to SEQ ID NO: 85747
  chr13:32527132-32527163
  hypo

SEQ ID NO: 173625 - DNA, 30 bp, Homo sapiens
  chr13:32740127-32740157
  hypo
attggcagtggcacacgtggcctgtgcaga

SEQ ID NO: 173626 - DNA, 260 bp, Homo sapiens; identical to SEQ ID NO: 85748
  chr13:32885415-32885675
  hypo

SEQ ID NO: 173627 - DNA, 304 bp, Homo sapiens; identical to SEQ ID NO: 123611
  chr13:32889500-32889804
  hypo

SEQ ID NO: 173628 - DNA, 107 bp, Homo sapiens; identical to SEQ ID NO: 50526
  chr13:32890557-32890664
  hypo

SEQ ID NO: 173629 - DNA, 250 bp, Homo sapiens; identical to SEQ ID NO: 50527
  chr13:32893212-32893462
  hypo

SEQ ID NO: 173630 - DNA, 110 bp, Homo sapiens; identical to SEQ ID NO: 50528
  chr13:32899211-32899321
  hypo

SEQ ID NO: 173631 - DNA, 183 bp, Homo sapiens; identical to SEQ ID NO: 50529
  chr13:32900236-32900419
  hypo

SEQ ID NO: 173632 - DNA, 116 bp, Homo sapiens; identical to SEQ ID NO: 50530
  chr13:32900634-32900750
  hypo

SEQ ID NO: 173633 - DNA, 51 bp, Homo sapiens; identical to SEQ ID NO: 50531
  chr13:32903578-32903629
  hypo

SEQ ID NO: 173634 - DNA, 160 bp, Homo sapiens; identical to SEQ ID NO: 50532
  chr13:32905054-32905214
  hypo

SEQ ID NO: 173635 - DNA, 1117 bp, Homo sapiens; identical to SEQ ID NO: 50533
  chr13:32906407-32907524
  hypo

SEQ ID NO: 173636 - DNA, 4933 bp, Homo sapiens; identical to SEQ ID NO: 50534
  chr13:32910400-32915333
  hypo

SEQ ID NO: 173637 - DNA, 97 bp, Homo sapiens; identical to SEQ ID NO: 50535
  chr13:32918693-32918790
  hypo

SEQ ID NO: 173638 - DNA, 71 bp, Homo sapiens; identical to SEQ ID NO: 50536
  chr13:32920962-32921033
  hypo

SEQ ID NO: 173639 - DNA, 429 bp, Homo sapiens; identical to SEQ ID NO: 50537
  chr13:32928996-32929425
  hypo

SEQ ID NO: 173640 - DNA, 31 bp, Homo sapiens; identical to SEQ ID NO: 27034
  chr13:32930125-32930156
  hypo

SEQ ID NO: 173641 - DNA, 183 bp, Homo sapiens; identical to SEQ ID NO: 50538
  chr13:32930563-32930746
  hypo

SEQ ID NO: 173642 - DNA, 189 bp, Homo sapiens; identical to SEQ ID NO: 50539
  chr13:32931877-32932066
  hypo

SEQ ID NO: 173643 - DNA, 172 bp, Homo sapiens; identical to SEQ ID NO: 50540
  chr13:32936658-32936830
  hypo

SEQ ID NO: 173644 - DNA, 356 bp, Homo sapiens; identical to SEQ ID NO: 50541
  chr13:32937314-32937670
  hypo

SEQ ID NO: 173645 - DNA, 157 bp, Homo sapiens; identical to SEQ ID NO: 50542
  chr13:32944537-32944694
  hypo

SEQ ID NO: 173646 - DNA, 146 bp, Homo sapiens; identical to SEQ ID NO: 50543
  chr13:32945091-32945237
  hypo

SEQ ID NO: 173647 - DNA, 123 bp, Homo sapiens; identical to SEQ ID NO: 50544
  chr13:32950805-32950928
  hypo

SEQ ID NO: 173648 - DNA, 26 bp, Homo sapiens
  chr13:32951432-32951458
  hypo
acaataaaatagctggccaggcgcgg

SEQ ID NO: 173649 - DNA, 200 bp, Homo sapiens; identical to SEQ ID NO: 50545
  chr13:32953452-32953652
  hypo

SEQ ID NO: 173650 - DNA, 397 bp, Homo sapiens; identical to SEQ ID NO: 50546
  chr13:32953885-32954282
  hypo

SEQ ID NO: 173651 - DNA, 246 bp, Homo sapiens; identical to SEQ ID NO: 50547
  chr13:32968824-32969070
  hypo

SEQ ID NO: 173652 - DNA, 148 bp, Homo sapiens; identical to SEQ ID NO: 50548
  chr13:32971033-32971181
  hypo

SEQ ID NO: 173653 - DNA, 877 bp, Homo sapiens; identical to SEQ ID NO: 50549
  chr13:32972297-32973174
  hypo

SEQ ID NO: 173654 - DNA, 516 bp, Homo sapiens; identical to SEQ ID NO: 50550
  chr13:32973293-32973809
  hypo

SEQ ID NO: 173655 - DNA, 30 bp, Homo sapiens; identical to SEQ ID NO: 85777
  chr13:32977271-32977301
  hypo

SEQ ID NO: 173656 - DNA, 158 bp, Homo sapiens; identical to SEQ ID NO: 85778
  chr13:32983221-32983379
  hypo

SEQ ID NO: 173657 - DNA, 553 bp, Homo sapiens; identical to SEQ ID NO: 123637
  chr13:33000876-33001429
  hypo

SEQ ID NO: 173658 - DNA, 36 bp, Homo sapiens; identical to SEQ ID NO: 27036
  chr13:33103875-33103911
  hypo

SEQ ID NO: 173659 - DNA, 31 bp, Homo sapiens
  chr13:33113988-33114019
  hypo
ttacgtgaggttgtggcgttctcagtgtgtt

SEQ ID NO: 173660 - DNA, 31 bp, Homo sapiens; identical to SEQ ID NO: 9291
  chr13:33162267-33162298
  hypo

SEQ ID NO: 173661 - DNA, 27 bp, Homo sapiens
  chr13:33257158-33257185
  hypo
tttttttttttgaggcagtctcgccct

SEQ ID NO: 173662 - DNA, 123 bp, Homo sapiens
  chr13:33266482-33266605
  hypo
agtagaagatggtatcggggtctttgttgtgatcttctcttttattaaacaagtttgcgtccaaaaagcctttttttttttttttttttttttttttgagatagagtccgatgggtgacttgt

SEQ ID NO: 173663 - DNA, 57 bp, Homo sapiens
  chr13:33510408-33510465
  hypo
gtgcctttgaatagcatttgtcgtattctgcctcacggcttcctgccttctttccac

SEQ ID NO: 173664 - DNA, 671 bp, Homo sapiens; identical to SEQ ID NO: 123642
  chr13:33589986-33590657
  hypo

SEQ ID NO: 173665 - DNA, 19 bp, Homo sapiens
  chr13:33619902-33619921
  hypo
accacgcccggcccataaa

SEQ ID NO: 173666 - DNA, 88 bp, Homo sapiens; identical to SEQ ID NO: 85784
  chr13:33640653-33640741
  hypo

SEQ ID NO: 173667 - DNA, 53 bp, Homo sapiens
  chr13:33687131-33687184
  hypo
ctgtgtaagctccacattcctcgtgtgaacacgcacccagagtcatcatcaac

SEQ ID NO: 173668 - DNA, 30 bp, Homo sapiens
  chr13:35113918-35113948
  hypo
gatagaagatgtgagcgttctcgctctccc

SEQ ID NO: 173669 - DNA, 30 bp, Homo sapiens
  chr13:35829600-35829630
  hypo
ggcaagcgcaggttccggccactgtgcaca

SEQ ID NO: 173670 - DNA, 30 bp, Homo sapiens
  chr13:36079508-36079538
  hypo
ttagttaaaccatggcgacctattccggag

SEQ ID NO: 173671 - DNA, 37 bp, Homo sapiens
  chr13:36673373-36673410
  hypo
ggattacaggcatgagccaccgcgcccagcattattt

SEQ ID NO: 173672 - DNA, 593 bp, Homo sapiens; identical to SEQ ID NO: 85785
  chr13:36788447-36789040
  hypo

SEQ ID NO: 173673 - DNA, 78 bp, Homo sapiens
  chr13:36789489-36789567
  hypo
acggggcgtgatttcgtctcaaaaaaaaaaattaaaaatattagaaacacttcatttttgtgccgtgatttaacaaat

SEQ ID NO: 173674 - DNA, 29 bp, Homo sapiens
  chr13:36852068-36852097
  hypo
aagactccgtctcaaaaaaaaaaaaaaaa

SEQ ID NO: 173675 - DNA, 226 bp, Homo sapiens; identical to SEQ ID NO: 85788
  chr13:36909034-36909260
  hypo

SEQ ID NO: 173676 - DNA, 150 bp, Homo sapiens; identical to SEQ ID NO: 9303
  chr13:37005430-37005580
  hypo

SEQ ID NO: 173677 - DNA, 163 bp, Homo sapiens; identical to SEQ ID NO: 9304
  chr13:37005899-37006062
  hypo

SEQ ID NO: 173678 - DNA, 224 bp, Homo sapiens; identical to SEQ ID NO: 9305
  chr13:37006433-37006657
  hypo

SEQ ID NO: 173679 - DNA, 64 bp, Homo sapiens; identical to SEQ ID NO: 50570
  chr13:37006733-37006797
  hypo

SEQ ID NO: 173680 - DNA, 30 bp, Homo sapiens
  chr13:37239520-37239550
  hypo
gtgtgcgtgctgttgcgggcaggacagtac

SEQ ID NO: 173681 - DNA, 30 bp, Homo sapiens; identical to SEQ ID NO: 50574
  chr13:37357329-37357359
  hypo

SEQ ID NO: 173682 - DNA, 305 bp, Homo sapiens; identical to SEQ ID NO: 123667
  chr13:37393231-37393536
  hypo

SEQ ID NO: 173683 - DNA, 163 bp, Homo sapiens; identical to SEQ ID NO: 85795
  chr13:37453824-37453987
  hypo

SEQ ID NO: 173684 - DNA, 30 bp, Homo sapiens; identical to SEQ ID NO: 85796
  chr13:37566847-37566877
  hypo

SEQ ID NO: 173685 - DNA, 30 bp, Homo sapiens
  chr13:37604076-37604106
  hypo
caatatacttgttagcgcaagaattcttaa

SEQ ID NO: 173686 - DNA, 423 bp, Homo sapiens; identical to SEQ ID NO: 85797
  chr13:37643589-37644012
  hypo

SEQ ID NO: 173687 - DNA, 389 bp, Homo sapiens; identical to SEQ ID NO: 85798
  chr13:37679435-37679824
  hypo

SEQ ID NO: 173688 - DNA, 61 bp, Homo sapiens; identical to SEQ ID NO: 85799
  chr13:37838970-37839031
  hypo

SEQ ID NO: 173689 - DNA, 78 bp, Homo sapiens; identical to SEQ ID NO: 85800
  chr13:39358215-39358293
  hypo

SEQ ID NO: 173690 - DNA, 34 bp, Homo sapiens; identical to SEQ ID NO: 9311
  chr13:39612008-39612042
  hypo

SEQ ID NO: 173691 - DNA, 30 bp, Homo sapiens; identical to SEQ ID NO: 123689
  chr13:39612050-39612080
  hypo

SEQ ID NO: 173692 - DNA, 29 bp, Homo sapiens
  chr13:39614034-39614063
  hypo
ggacgccgtggctcacgcctgtaatccca

SEQ ID NO: 173693 - DNA, 201 bp, Homo sapiens
  chr13:39694433-39694634
  hypo
tgaactgtcaccccccgccgcctactttttcttactctccttgggtcatgccaactgcctagtcagtcccagtgaggtgaactggctgcctcagttggaaatgcagaaatcactcgcttcttgcgtttgtactgctgggagctactgaccgcagagagctgtttgtatcttggcgctgccctgattttttttttttttaaa

SEQ ID NO: 173694 - DNA, 30 bp, Homo sapiens; identical to SEQ ID NO: 85803
  chr13:40397655-40397685
  hypo

SEQ ID NO: 173695 - DNA, 30 bp, Homo sapiens
  chr13:40660785-40660815
  hypo
gtgagccaccacgcccggccgagcttaaag

SEQ ID NO: 173696 - DNA, 30 bp, Homo sapiens
  chr13:40661432-40661462
  hypo
atggcaggtggttggcggtggcttgacagc

SEQ ID NO: 173697 - DNA, 225 bp, Homo sapiens; identical to SEQ ID NO: 85804
  chr13:40762415-40762640
  hypo

SEQ ID NO: 173698 - DNA, 31 bp, Homo sapiens; identical to SEQ ID NO: 27045
  chr13:40956513-40956544
  hypo

SEQ ID NO: 173699 - DNA, 30 bp, Homo sapiens
  chr13:41010516-41010546
  hypo
aacggaaagtgaagccgcgctgtgatgggt

SEQ ID NO: 173700 - DNA, 30 bp, Homo sapiens; identical to SEQ ID NO: 85806
  chr13:41055573-41055603
  hypo

SEQ ID NO: 173701 - DNA, 30 bp, Homo sapiens; identical to SEQ ID NO: 27046
  chr13:41056273-41056303
  hypo

SEQ ID NO: 173702 - DNA, 26 bp, Homo sapiens
  chr13:41106791-41106817
  hypo
ttactaacaataggccggcgtggtgg

SEQ ID NO: 173703 - DNA, 30 bp, Homo sapiens
  chr13:41107433-41107463
  hypo
agtggagcggctgggcgcggtggctcacag

SEQ ID NO: 173704 - DNA, 30 bp, Homo sapiens; identical to SEQ ID NO: 85808
  chr13:41256562-41256592
  hypo

SEQ ID NO: 173705 - DNA, 18 bp, Homo sapiens
  chr13:41341299-41341317
  hypo
tttttttttttgagacgg

SEQ ID NO: 173706 - DNA, 416 bp, Homo sapiens; identical to SEQ ID NO: 123698
  chr13:41345168-41345584
  hypo

SEQ ID NO: 173707 - DNA, 207 bp, Homo sapiens; identical to SEQ ID NO: 123699
  chr13:41364042-41364249
  hypo

SEQ ID NO: 173708 - DNA, 86 bp, Homo sapiens
  chr13:41450219-41450305
  hypo
cttcaaagggagctgctccataaacttgtatgctgagcagaacagctggaccctgcctcgcattgtgctgtcggcaggttacacac

SEQ ID NO: 173709 - DNA, 108 bp, Homo sapiens
  chr13:41453083-41453191
  hypo
gggtccccccttcctcggcccttcgggggaactcctctaatagctgcagctagcagataggtgttttgccgggcttggcacttgctttctttgcggctctctctacgg

SEQ ID NO: 173710 - DNA, 30 bp, Homo sapiens; identical to SEQ ID NO: 85811
  chr13:41500599-41500629
  hypo

SEQ ID NO: 173711 - DNA, 121 bp, Homo sapiens; identical to SEQ ID NO: 85812
  chr13:41561357-41561478
  hypo

SEQ ID NO: 173712 - DNA, 147 bp, Homo sapiens; identical to SEQ ID NO: 85813
  chr13:41567498-41567645
  hypo

SEQ ID NO: 173713 - DNA, 24 bp, Homo sapiens
  chr13:41687832-41687856
  hypo
ttttttttttttgaaacggggtct

SEQ ID NO: 173714 - DNA, 327 bp, Homo sapiens; identical to SEQ ID NO: 50600
  chr13:41767765-41768092
  hypo

SEQ ID NO: 173715 - DNA, 30 bp, Homo sapiens; identical to SEQ ID NO: 50601
  chr13:41768402-41768432
  hypo

SEQ ID NO: 173716 - DNA, 39 bp, Homo sapiens; identical to SEQ ID NO: 85817
  chr13:41884494-41884533
  hypo

SEQ ID NO: 173717 - DNA, 82 bp, Homo sapiens
  chr13:42026223-42026305
  hypo
aaaaataatgtcccacggtgataaccaagtgtgccaggagagaaaatatcctaggagtaactaatatcttataatgtcacac

SEQ ID NO: 173718 - DNA, 745 bp, Homo sapiens; identical to SEQ ID NO: 123709
  chr13:42032015-42032760
  hypo

SEQ ID NO: 173719 - DNA, 30 bp, Homo sapiens
  chr13:42546440-42546470
  hypo
cttcaacatatttcacgttcctcacaaaca

SEQ ID NO: 173720 - DNA, 30 bp, Homo sapiens
  chr13:42585357-42585387
  hypo
ggtgctgtcagccgccgctgcacctgctaa

SEQ ID NO: 173721 - DNA, 34 bp, Homo sapiens; identical to SEQ ID NO: 85819
  chr13:42600813-42600847
  hypo

SEQ ID NO: 173722 - DNA, 30 bp, Homo sapiens; identical to SEQ ID NO: 85820
  chr13:42601182-42601212
  hypo

SEQ ID NO: 173723 - DNA, 874 bp, Homo sapiens; identical to SEQ ID NO: 123711
  chr13:42615144-42616018
  hypo

SEQ ID NO: 173724 - DNA, 30 bp, Homo sapiens; identical to SEQ ID NO: 85824
  chr13:42692954-42692984
  hypo

SEQ ID NO: 173725 - DNA, 31 bp, Homo sapiens; identical to SEQ ID NO: 85825
  chr13:43179216-43179247
  hypo

SEQ ID NO: 173726 - DNA, 43 bp, Homo sapiens; identical to SEQ ID NO: 27050
  chr13:43217490-43217533
  hypo

SEQ ID NO: 173727 - DNA, 178 bp, Homo sapiens; identical to SEQ ID NO: 85827
  chr13:43543175-43543353
  hypo

SEQ ID NO: 173728 - DNA, 598 bp, Homo sapiens; identical to SEQ ID NO: 9320
  chr13:43566053-43566651
  hypo

SEQ ID NO: 173729 - DNA, 85 bp, Homo sapiens; identical to SEQ ID NO: 85829
  chr13:43596562-43596647
  hypo

SEQ ID NO: 173730 - DNA, 42 bp, Homo sapiens; identical to SEQ ID NO: 85830
  chr13:43598747-43598789
  hypo

SEQ ID NO: 173731 - DNA, 121 bp, Homo sapiens; identical to SEQ ID NO: 85831
  chr13:43620968-43621089
  hypo

SEQ ID NO: 173732 - DNA, 21 bp, Homo sapiens
  chr13:43621268-43621289
  hypo
aagacccgcccgtaacagtgg

SEQ ID NO: 173733 - DNA, 30 bp, Homo sapiens
  chr13:43727677-43727707
  hypo
cacgaacattctggtcgttagtagggaagt

SEQ ID NO: 173734 - DNA, 123 bp, Homo sapiens
  chr13:43728027-43728150
  hypo
tgtacttgcctggggcgtgattctggttgcgttgtttttctgacaattcaaccacatttggaattttcttacgtaggatatgggcttgagtttttaatttaaagtcttcgggtaaggtcagct

SEQ ID NO: 173735 - DNA, 28 bp, Homo sapiens
  chr13:44471009-44471037
  hypo
cagcctcgttttcatacttgatatttca

SEQ ID NO: 173736 - DNA, 18 bp, Homo sapiens
  chr13:44539696-44539714
  hypo
caccgcactctagcctag

SEQ ID NO: 173737 - DNA, 30 bp, Homo sapiens; identical to SEQ ID NO: 85835
  chr13:44542847-44542877
  hypo

SEQ ID NO: 173738 - DNA, 31 bp, Homo sapiens; identical to SEQ ID NO: 85836
  chr13:44543380-44543411
  hypo

SEQ ID NO: 173739 - DNA, 178 bp, Homo sapiens; identical to SEQ ID NO: 85837
  chr13:44543797-44543975
  hypo

SEQ ID NO: 173740 - DNA, 313 bp, Homo sapiens; identical to SEQ ID NO: 50619
  chr13:44544246-44544559
  hypo

SEQ ID NO: 173741 - DNA, 338 bp, Homo sapiens; identical to SEQ ID NO: 85839
  chr13:44544878-44545216
  hypo

SEQ ID NO: 173742 - DNA, 21 bp, Homo sapiens
  chr13:44935631-44935652
  hypo
tataggcgtgaaccaccatgc

SEQ ID NO: 173743 - DNA, 104 bp, Homo sapiens; identical to SEQ ID NO: 85841
  chr13:44947060-44947164
  hypo

SEQ ID NO: 173744 - DNA, 30 bp, Homo sapiens
  chr13:44949192-44949222
  hypo
catgggtagtttggcgaagttggtctccaa

SEQ ID NO: 173745 - DNA, 24 bp, Homo sapiens
  chr13:44950895-44950919
  hypo
gcaagactccgtctaaaaaaaaaa

SEQ ID NO: 173746 - DNA, 18 bp, Homo sapiens
  chr13:44955224-44955242
  hypo
gggtagcatttggcagcg

SEQ ID NO: 173747 - DNA, 17 bp, Homo sapiens
  chr13:44955661-44955678
  hypo
agcgagactgcgtctca

SEQ ID NO: 173748 - DNA, 25 bp, Homo sapiens
  chr13:44969723-44969748
  hypo
aggaagactccgtctcaaaaaaaaa

SEQ ID NO: 173749 - DNA, 30 bp, Homo sapiens
  chr13:44970899-44970929
  hypo
gctggaagatactcacgcatggagggttct

SEQ ID NO: 173750 - DNA, 88 bp, Homo sapiens
  chr13:44981952-44982040
  hypo
caagatcacagacttcggctgagtttgaagcattgagagaatatccaaccgcaagtgggtcacagagacctggcgatgcggatgggcc

SEQ ID NO: 173751 - DNA, 206 bp, Homo sapiens; identical to SEQ ID NO: 50622
  chr13:44991618-44991824
  hypo

SEQ ID NO: 173752 - DNA, 31 bp, Homo sapiens; identical to SEQ ID NO: 85847
  chr13:44994997-44995028
  hypo

SEQ ID NO: 173753 - DNA, 253 bp, Homo sapiens
  chr13:45003133-45003386
  hypo
gagggcactatacttcggtcattcagggatccagctgacaaaggctctgtcactcccaaggttgccgggtcttctccatcccatcagtggaaggagaaggagcctggcagatcactgagaatggttttctcatgggccaagcctggggggcttcagttacttcatcactcatccactgactaaacctgagtcccacggtcactcctaactccaagggggcggggagatgtaattcaggcgtgtgcccaagtgg

SEQ ID NO: 173754 - DNA, 104 bp, Homo sapiens; identical to SEQ ID NO: 9329
  chr13:45150766-45150870
  hypo

SEQ ID NO: 173755 - DNA, 88 bp, Homo sapiens
  chr13:45154327-45154415
  hypo
aaaaagggcaactctacagttagggaaatctgagtttcaaaaatctgggtctctccccctccaaaattcttacgacagcaatatatga

SEQ ID NO: 173756 - DNA, 30 bp, Homo sapiens
  chr13:45165499-45165529
  hypo
agctttcagcaatatcgcccctacccgaga

SEQ ID NO: 173757 - DNA, 31 bp, Homo sapiens; identical to SEQ ID NO: 85850
  chr13:45302393-45302424
  hypo

SEQ ID NO: 173758 - DNA, 30 bp, Homo sapiens
  chr13:45333450-45333480
  hypo
ggagaaggggcgtgccgcttagggaagaca

SEQ ID NO: 173759 - DNA, 320 bp, Homo sapiens; identical to SEQ ID NO: 85851
  chr13:45383494-45383814
  hypo

SEQ ID NO: 173760 - DNA, 30 bp, Homo sapiens
  chr13:45423340-45423370
  hypo
acgcgaatgaaccctcgtgctttcctgttt

SEQ ID NO: 173761 - DNA, 23 bp, Homo sapiens
  chr13:45459147-45459170
  hypo
ataatgaacaagaaaacgactta

SEQ ID NO: 173762 - DNA, 31 bp, Homo sapiens; identical to SEQ ID NO: 27061
  chr13:45465264-45465295
  hypo

SEQ ID NO: 173763 - DNA, 37 bp, Homo sapiens
  chr13:45491124-45491161
  hypo
cgccactgcactgcagcccgtgcgacataactagact

SEQ ID NO: 173764 - DNA, 102 bp, Homo sapiens
  chr13:45493228-45493330
  hypo
gaaatagaaattgttctgcctcgcactcattaccacgaagaagctccccaacagggaatgaacgcaacccaacataattaaaagtgaatatgggccgggcgc

SEQ ID NO: 173765 - DNA, 193 bp, Homo sapiens; identical to SEQ ID NO: 85854
  chr13:45500373-45500566
  hypo

SEQ ID NO: 173766 - DNA, 109 bp, Homo sapiens; identical to SEQ ID NO: 85855
  chr13:45564772-45564881
  hypo

SEQ ID NO: 173767 - DNA, 138 bp, Homo sapiens
  chr13:45741237-45741375
  hypo
ttttttaaagaacttcgtgtatgtgtatcagcccacaaattcttgcttatacagactgtatcattagctatttcaaaataataaagggtaaaaagccctacagacacatactatacatactattttactatttttttt

SEQ ID NO: 173768 - DNA, 18 bp, Homo sapiens
  chr13:45741434-45741452
  hypo
tctcggctcactgcaacc

SEQ ID NO: 173769 - DNA, 30 bp, Homo sapiens; identical to SEQ ID NO: 27062
  chr13:45767894-45767924
  hypo

SEQ ID NO: 173770 - DNA, 30 bp, Homo sapiens; identical to SEQ ID NO: 85857
  chr13:45840995-45841025
  hypo

SEQ ID NO: 173771 - DNA, 20 bp, Homo sapiens
  chr13:45856016-45856036
  hypo
caacaacaaaagagtcgctt

SEQ ID NO: 173772 - DNA, 30 bp, Homo sapiens
  chr13:45857711-45857741
  hypo
gcatgctagtgaaacgactagcagcgatgc

SEQ ID NO: 173773 - DNA, 30 bp, Homo sapiens; identical to SEQ ID NO: 85858
  chr13:45889677-45889707
  hypo

SEQ ID NO: 173774 - DNA, 24 bp, Homo sapiens
  chr13:45896921-45896945
  hypo
gattacaggcgtgagccaccgcgc

SEQ ID NO: 173775 - DNA, 32 bp, Homo sapiens
  chr13:45905218-45905250
  hypo
aacaacaaaaaaatgtacgctttgcttttgtc

SEQ ID NO: 173776 - DNA, 301 bp, Homo sapiens; identical to SEQ ID NO: 85859
  chr13:45926320-45926621
  hypo

SEQ ID NO: 173777 - DNA, 23 bp, Homo sapiens
  chr13:45933586-45933609
  hypo
accgcgcccggcccaagtttctt

SEQ ID NO: 173778 - DNA, 105 bp, Homo sapiens; identical to SEQ ID NO: 85861
  chr13:45936012-45936117
  hypo

SEQ ID NO: 173779 - DNA, 30 bp, Homo sapiens; identical to SEQ ID NO: 85862
  chr13:45936532-45936562
  hypo

SEQ ID NO: 173780 - DNA, 42 bp, Homo sapiens
  chr13:45938916-45938958
  hypo
agcaatggaagaatggcctcgtacacacgctagagtggaaag

SEQ ID NO: 173781 - DNA, 65 bp, Homo sapiens
  chr13:45939384-45939449
  hypo
cgatgctgtgggtgacgttggagagggaagcccggagccctgacctagtccggcgtggagagagg

SEQ ID NO: 173782 - DNA, 42 bp, Homo sapiens
  chr13:45939904-45939946
  hypo
tcctcttaaacatatccgggcctggcatggtggctcacgcct

SEQ ID NO: 173783 - DNA, 30 bp, Homo sapiens
  chr13:45943277-45943307
  hypo
ggttttggttttagccgtatcaccggcatc

SEQ ID NO: 173784 - DNA, 99 bp, Homo sapiens
  chr13:45953003-45953102
  hypo
ctagttgtttagagacgtaggacattggcctcatccagggccccagagtttcggttaaaagtccagctgccatcttttctctatctgacgcgttcaacg

SEQ ID NO: 173785 - DNA, 163 bp, Homo sapiens; identical to SEQ ID NO: 85863
  chr13:45965400-45965563
  hypo

SEQ ID NO: 173786 - DNA, 30 bp, Homo sapiens
  chr13:46028533-46028563
  hypo
cctcttttctggctccgcggactgctctgc

SEQ ID NO: 173787 - DNA, 137 bp, Homo sapiens; identical to SEQ ID NO: 27066
  chr13:46037881-46038018
  hypo

SEQ ID NO: 173788 - DNA, 31 bp, Homo sapiens; identical to SEQ ID NO: 27067
  chr13:46048626-46048657
  hypo

SEQ ID NO: 173789 - DNA, 30 bp, Homo sapiens
  chr13:46108969-46108999
  hypo
gagaaccacacgagcgtgctgctcagtgct

SEQ ID NO: 173790 - DNA, 88 bp, Homo sapiens; identical to SEQ ID NO: 27068
  chr13:46287704-46287792
  hypo

SEQ ID NO: 173791 - DNA, 78 bp, Homo sapiens; identical to SEQ ID NO: 85867
  chr13:46288450-46288528
  hypo

SEQ ID NO: 173792 - DNA, 88 bp, Homo sapiens; identical to SEQ ID NO: 85868
  chr13:46318162-46318250
  hypo

SEQ ID NO: 173793 - DNA, 28 bp, Homo sapiens
  chr13:46318489-46318517
  hypo
agactccgtctcaaaaaacaaaaaacaa

SEQ ID NO: 173794 - DNA, 30 bp, Homo sapiens; identical to SEQ ID NO: 85870
  chr13:46357889-46357919
  hypo

SEQ ID NO: 173795 - DNA, 30 bp, Homo sapiens; identical to SEQ ID NO: 85871
  chr13:46358159-46358189
  hypo

SEQ ID NO: 173796 - DNA, 31 bp, Homo sapiens; identical to SEQ ID NO: 27070
  chr13:46444487-46444518
  hypo

SEQ ID NO: 173797 - DNA, 108 bp, Homo sapiens; identical to SEQ ID NO: 85873
  chr13:46543044-46543152
  hypo

SEQ ID NO: 173798 - DNA, 30 bp, Homo sapiens; identical to SEQ ID NO: 85874
  chr13:46549520-46549550
  hypo

SEQ ID NO: 173799 - DNA, 30 bp, Homo sapiens; identical to SEQ ID NO: 27072
  chr13:46559599-46559629
  hypo

SEQ ID NO: 173800 - DNA, 17 bp, Homo sapiens
  chr13:46622414-46622431
  hypo
caaactttgaagatttc

SEQ ID NO: 173801 - DNA, 22 bp, Homo sapiens
  chr13:46622975-46622997
  hypo
aaaaatgtggccaagcgcagtg

SEQ ID NO: 173802 - DNA, 30 bp, Homo sapiens
  chr13:46660109-46660139
  hypo
agctactacacacagcgaggcatgctggct

SEQ ID NO: 173803 - DNA, 146 bp, Homo sapiens
  chr13:46660688-46660834
  hypo
tgggaggaagtgagtgctgattggttcatgggtggccataggcgggtgcggaaaaatcaccgtcagttcccactgcggtccacgggactggcagccttcctgggcttgaaggtggggcttcaccagggacccgcccttttctgcct

SEQ ID NO: 173804 - DNA, 146 bp, Homo sapiens
  chr13:46661314-46661460
  hypo
ggagcatgaggctgccgccctgccatcacagaagggggcgggacttttacctcctcctggcttctgctggctccgtggagcacacagccccagccgtgcctcccgcatggcagcagccgctctagatgggccgccactgccattaa

SEQ ID NO: 173805 - DNA, 261 bp, Homo sapiens
  chr13:46946182-46946443
  hypo
tgagagtatcctgggcggaccatgtgtacctctgttgaggacagagagaagctgctactcttttcactcgagccatggggagaagcgctgccaacggagtctgtggtatcctcagacaacgttgtctctgccagggagtccccgaggcacgaaggtgaagggcctgagggagaggcagcatctgtcacaaaatgggtcccactgttccctgctgctggcacctgagattgcaagtcctgcggctgttgctgcacatcctgg

SEQ ID NO: 173806 - DNA, 121 bp, Homo sapiens; identical to SEQ ID NO: 27075
  chr13:46948514-46948635
  hypo

SEQ ID NO: 173807 - DNA, 37 bp, Homo sapiens
  chr13:47349767-47349804
  hypo
tacaacgaatctcaacgaaatccgcttcaagctatgt

SEQ ID NO: 173808 - DNA, 77 bp, Homo sapiens; identical to SEQ ID NO: 85881
  chr13:48318850-48318927
  hypo

SEQ ID NO: 173809 - DNA, 27 bp, Homo sapiens
  chr13:48545073-48545100
  hypo
ttaaggagaatggtgtgaacccgggag

SEQ ID NO: 173810 - DNA, 27 bp, Homo sapiens
  chr13:48545159-48545186
  hypo
gactccgtctcaaaaaaaaactaaaaa

SEQ ID NO: 173811 - DNA, 41 bp, Homo sapiens; identical to SEQ ID NO: 27076
  chr13:48731918-48731959
  hypo

SEQ ID NO: 173812 - DNA, 27 bp, Homo sapiens
  chr13:48747095-48747122
  hypo
ttgttttgttttgttttgagacggagt

SEQ ID NO: 173813 - DNA, 27 bp, Homo sapiens
  chr13:48747421-48747448
  hypo
atgctcggggaaacataaacacactac

SEQ ID NO: 173814 - DNA, 31 bp, Homo sapiens; identical to SEQ ID NO: 27077
  chr13:48759963-48759994
  hypo

SEQ ID NO: 173815 - DNA, 160 bp, Homo sapiens
  chr13:49076868-49077028
  hypo
ggaggcgccacgtgacggcgggcgtggcaaagcaggcaaacacgtcgtcagtgcaggagaagtgggtgaggtgcgggaggatcacggactgaccccggcactggccccacatgtacacgtgcccaccctgcgtcttggccgcagacgtgtgtgtggagtg

SEQ ID NO: 173816 - DNA, 30 bp, Homo sapiens; identical to SEQ ID NO: 85889
  chr13:49168112-49168142
  hypo

SEQ ID NO: 173817 - DNA, 30 bp, Homo sapiens
  chr13:49219561-49219591
  hypo
ttaagaggcacttaccgcccctatcttcag

SEQ ID NO: 173818 - DNA, 44 bp, Homo sapiens
  chr13:49397810-49397854
  hypo
gattatatgcatgagccaccgcgcccggccgcattgttaatttt

SEQ ID NO: 173819 - DNA, 30 bp, Homo sapiens
  chr13:49492762-49492792
  hypo
ctgtggtgtgaatgccgacgcaaaggtgtg

SEQ ID NO: 173820 - DNA, 30 bp, Homo sapiens; identical to SEQ ID NO: 27078
  chr13:49752543-49752573
  hypo

SEQ ID NO: 173821 - DNA, 30 bp, Homo sapiens
  chr13:49761832-49761862
  hypo
cacagaaaccgaggacggatgaaatggcgg

SEQ ID NO: 173822 - DNA, 30 bp, Homo sapiens
  chr13:49817342-49817372
  hypo
tcatgcgctccctcccgcaaggagttgaga

SEQ ID NO: 173823 - DNA, 37 bp, Homo sapiens; identical to SEQ ID NO: 27079
  chr13:49848523-49848560
  hypo

SEQ ID NO: 173824 - DNA, 304 bp, Homo sapiens
  chr13:49879454-49879758
  hypo
caccgagttcgcactcgctgttaccagctggcgctcatcatcccaccctccctcattgttccccctccaggcccggctccagagctctcccccaccagacacacaggtgttcaggtcacttcctgaataaaggccagccgccttaatgatggcgtcagacccttagctgggcatttaaggctccctcccggccctctcacatccccacatgccccggacaaagcgcacacgcctcgtcattttccagccatgcttcgtgcccacggccctccctgcagcgggaatctctcgctctggtgacggg

SEQ ID NO: 173825 - DNA, 68 bp, Homo sapiens
  chr13:49883682-49883750
  hypo
attcttgtaaaatatcgctttaaaatcccgttttagatggttgatgtctgaaacgaaaccacggcctt

SEQ ID NO: 173826 - DNA, 279 bp, Homo sapiens; identical to SEQ ID NO: 85893
  chr13:49884959-49885238
  hypo

SEQ ID NO: 173827 - DNA, 122 bp, Homo sapiens; identical to SEQ ID NO: 85894
  chr13:49914521-49914643
  hypo

SEQ ID NO: 173828 - DNA, 255 bp, Homo sapiens; identical to SEQ ID NO: 85895
  chr13:49922187-49922442
  hypo

SEQ ID NO: 173829 - DNA, 30 bp, Homo sapiens
  chr13:50020475-50020505
  hypo
tccttcttgaaagttcgtatatgataaaaa

SEQ ID NO: 173830 - DNA, 138 bp, Homo sapiens
  chr13:50027699-50027837
  hypo
ctgggattacaggcatgaaccaccatgtcctgctcagttggctcttgtgtccctttgatataccgtcatcagtgtaggtattttttatttgtctttgttttatagcacttcccttttggcactcgaagattgctctag

SEQ ID NO: 173831 - DNA, 126 bp, Homo sapiens
  chr13:50050852-50050978
  hypo
tgtggaaggagtctacgaaacgtggaggaagtttttcgttacctgcttgagacagagtgtaactttttatttacagataacttttctttcaatacctatgttcagttggctcggaattacccaaag

SEQ ID NO: 173832 - DNA, 30 bp, Homo sapiens; identical to SEQ ID NO: 27081
  chr13:50262868-50262898
  hypo

SEQ ID NO: 173833 - DNA, 30 bp, Homo sapiens
  chr13:50356092-50356122
  hypo
tcccacatatctagccggcaggaattaacg

SEQ ID NO: 173834 - DNA, 22 bp, Homo sapiens
  chr13:50367841-50367863
  hypo
gataaagagctgctttcggccg

SEQ ID NO: 173835 - DNA, 183 bp, Homo sapiens; identical to SEQ ID NO: 85898
  chr13:50411346-50411529
  hypo

SEQ ID NO: 173836 - DNA, 30 bp, Homo sapiens
  chr13:50434010-50434040
  hypo
tctaaaatgtcggggcgcggtggcccatgc

SEQ ID NO: 173837 - DNA, 31 bp, Homo sapiens; identical to SEQ ID NO: 85899
  chr13:50528477-50528508
  hypo

SEQ ID NO: 173838 - DNA, 30 bp, Homo sapiens; identical to SEQ ID NO: 123787
  chr13:50570075-50570105
  hypo

SEQ ID NO: 173839 - DNA, 30 bp, Homo sapiens; identical to SEQ ID NO: 123788
  chr13:50570378-50570408
  hypo

SEQ ID NO: 173840 - DNA, 30 bp, Homo sapiens; identical to SEQ ID NO: 27082
  chr13:50702395-50702425
  hypo

SEQ ID NO: 173841 - DNA, 30 bp, Homo sapiens
  chr13:50723237-50723267
  hypo
acgcttcctttggggcgcaggaactcaggg

SEQ ID NO: 173842 - DNA, 30 bp, Homo sapiens
  chr13:51038828-51038858
  hypo
agctgtccagaaagacgcctagttcttttt

SEQ ID NO: 173843 - DNA, 33 bp, Homo sapiens
  chr13:51568862-51568895
  hypo
ggagctgaaggctgtcgccggtcggctgtctcc

SEQ ID NO: 173844 - DNA, 30 bp, Homo sapiens; identical to SEQ ID NO: 85901
  chr13:51575223-51575253
  hypo

SEQ ID NO: 173845 - DNA, 30 bp, Homo sapiens
  chr13:51703769-51703799
  hypo
tgcaaaccagttgaacgcacgacaaaaatc

SEQ ID NO: 173846 - DNA, 30 bp, Homo sapiens; identical to SEQ ID NO: 85902
  chr13:51826071-51826101
  hypo

SEQ ID NO: 173847 - DNA, 33 bp, Homo sapiens; identical to SEQ ID NO: 85903
  chr13:52242303-52242336
  hypo

SEQ ID NO: 173848 - DNA, 93 bp, Homo sapiens; identical to SEQ ID NO: 27083
  chr13:52334719-52334812
  hypo

SEQ ID NO: 173849 - DNA, 30 bp, Homo sapiens; identical to SEQ ID NO: 27084
  chr13:52335568-52335598
  hypo

SEQ ID NO: 173850 - DNA, 183 bp, Homo sapiens; identical to SEQ ID NO: 27085
  chr13:52335913-52336096
  hypo

SEQ ID NO: 173851 - DNA, 30 bp, Homo sapiens; identical to SEQ ID NO: 27086
  chr13:52336387-52336417
  hypo

SEQ ID NO: 173852 - DNA, 101 bp, Homo sapiens; identical to SEQ ID NO: 85908
  chr13:52343292-52343393
  hypo

SEQ ID NO: 173853 - DNA, 199 bp, Homo sapiens; identical to SEQ ID NO: 85909
  chr13:52390090-52390289
  hypo

SEQ ID NO: 173854 - DNA, 31 bp, Homo sapiens
  chr13:52390971-52391002
  hypo
ctgagcgccaggactccgactgcaaagaggt

SEQ ID NO: 173855 - DNA, 111 bp, Homo sapiens
  chr13:52493823-52493934
  hypo
acttccctaagcagacgtctcggctgtgtcccgagcaaacggtgccatggtgacctgcctttgcaggtctcctgctgcgcacctgcgtgagcatgtcgctctcctcacctg

SEQ ID NO: 173856 - DNA, 30 bp, Homo sapiens
  chr13:52513287-52513317
  hypo
gcttgacagcgtctgcgattgcgatcatcc

SEQ ID NO: 173857 - DNA, 30 bp, Homo sapiens
  chr13:52523842-52523872
  hypo
aatccataccaccaacgtcaaagttgacat

SEQ ID NO: 173858 - DNA, 219 bp, Homo sapiens
  chr13:52532585-52532804
  hypo
atgcttgtggccaggacgatgagcacgtccatgttggctgacctgtgtctcagagatttgtaggcctgaacgtagaagtaccacccaccgaggagctgaaagacaaggacagtgaaggctgccagcaagtagggaggagagttcaatgagcgacacagggccaagggccctggggatggcaaagcctctagctttgtgcacagtcgtgacagtacttct

SEQ ID NO: 173859 - DNA, 30 bp, Homo sapiens
  chr13:52539072-52539102
  hypo
tggtggcaagggcaacggaggcataagtga

SEQ ID NO: 173860 - DNA, 30 bp, Homo sapiens
  chr13:52539505-52539535
  hypo
atactaatgcctgtacggggttgtgcactt

SEQ ID NO: 173861 - DNA, 38 bp, Homo sapiens; identical to SEQ ID NO: 27088
  chr13:52564915-52564953
  hypo

SEQ ID NO: 173862 - DNA, 38 bp, Homo sapiens; identical to SEQ ID NO: 27089
  chr13:52565192-52565230
  hypo

SEQ ID NO: 173863 - DNA, 292 bp, Homo sapiens; identical to SEQ ID NO: 123813
  chr13:52585268-52585560
  hypo

SEQ ID NO: 173864 - DNA, 30 bp, Homo sapiens
  chr13:52603645-52603675
  hypo
tatgaggccaaggctcgaaaagagaagaaa

SEQ ID NO: 173865 - DNA, 30 bp, Homo sapiens
  chr13:52604028-52604058
  hypo
gcagatgaatgtggacggaccgaatccctg

SEQ ID NO: 173866 - DNA, 30 bp, Homo sapiens; identical to SEQ ID NO: 85914
  chr13:52699290-52699320
  hypo

SEQ ID NO: 173867 - DNA, 86 bp, Homo sapiens; identical to SEQ ID NO: 123815
  chr13:52702429-52702515
  hypo

SEQ ID NO: 173868 - DNA, 545 bp, Homo sapiens; identical to SEQ ID NO: 123816
  chr13:52702766-52703311
  hypo

SEQ ID NO: 173869 - DNA, 31 bp, Homo sapiens; identical to SEQ ID NO: 27090
  chr13:52732303-52732334
  hypo

SEQ ID NO: 173870 - DNA, 30 bp, Homo sapiens
  chr13:52744200-52744230
  hypo
aacagatgggtttttcgtcagttatttaca

SEQ ID NO: 173871 - DNA, 33 bp, Homo sapiens
  chr13:52770511-52770544
  hypo
tagtcataaagagggccgggcgcggtggctgac

SEQ ID NO: 173872 - DNA, 30 bp, Homo sapiens
  chr13:52770956-52770986
  hypo
ctttctgtggcactccggacaagttttcgc

SEQ ID NO: 173873 - DNA, 30 bp, Homo sapiens
  chr13:52785667-52785697
  hypo
tgttgggcccttatacgtactgtcacttat

SEQ ID NO: 173874 - DNA, 31 bp, Homo sapiens; identical to SEQ ID NO: 85918
  chr13:53171462-53171493
  hypo

SEQ ID NO: 173875 - DNA, 37 bp, Homo sapiens
  chr13:53175585-53175622
  hypo
ggattacaggcatgagccaccgcgcccggcctgccca

SEQ ID NO: 173876 - DNA, 23 bp, Homo sapiens
  chr13:53403252-53403275
  hypo
ccgtgggtggccgggcgcggtgg

SEQ ID NO: 173877 - DNA, 1391 bp, Homo sapiens; identical to SEQ ID NO: 50689
  chr13:53424662-53426053
  hypo

SEQ ID NO: 173878 - DNA, 19 bp, Homo sapiens
  chr13:53475513-53475532
  hypo
tttgagttggagtctcgct

SEQ ID NO: 173879 - DNA, 30 bp, Homo sapiens
  chr13:55010378-55010408
  hypo
gacagcgcttttttacgctattatctcatg

SEQ ID NO: 173880 - DNA, 30 bp, Homo sapiens
  chr13:59102668-59102698
  hypo
aagctgagtgttctccgcagcttattgtgg

SEQ ID NO: 173881 - DNA, 125 bp, Homo sapiens
  chr13:60232277-60232402
  hypo
tagaacagtgcctggcgtgtgagtgcacaagccgcatcagtgagtggttttattcctcactgcatttcggcatgctggggatgagctgctttactgctcagactgagccccgcggcagcccaggt

SEQ ID NO: 173882 - DNA, 90 bp, Homo sapiens
  chr13:60267288-60267378
  hypo
cagcgtgaaggcctccggtggaaggcgcttatgactggaaagtagtgaccaaagagaagagtgactggactgagacggaagaggtagcct

SEQ ID NO: 173883 - DNA, 30 bp, Homo sapiens
  chr13:60267721-60267751
  hypo
gcggaacaaaaacagcgtatttcccaatct

SEQ ID NO: 173884 - DNA, 30 bp, Homo sapiens; identical to SEQ ID NO: 27092
  chr13:60422151-60422181
  hypo

SEQ ID NO: 173885 - DNA, 161 bp, Homo sapiens; identical to SEQ ID NO: 27093
  chr13:60492534-60492695
  hypo

SEQ ID NO: 173886 - DNA, 30 bp, Homo sapiens; identical to SEQ ID NO: 27094
  chr13:60587328-60587358
  hypo

SEQ ID NO: 173887 - DNA, 214 bp, Homo sapiens; identical to SEQ ID NO: 50701
  chr13:60972271-60972485
  hypo

SEQ ID NO: 173888 - DNA, 30 bp, Homo sapiens; identical to SEQ ID NO: 50704
  chr13:67797088-67797118
  hypo

SEQ ID NO: 173889 - DNA, 30 bp, Homo sapiens; identical to SEQ ID NO: 50705
  chr13:67798990-67799020
  hypo

SEQ ID NO: 173890 - DNA, 244 bp, Homo sapiens; identical to SEQ ID NO: 50706
  chr13:67799456-67799700
  hypo

SEQ ID NO: 173891 - DNA, 33 bp, Homo sapiens; identical to SEQ ID NO: 50707
  chr13:67801106-67801139
  hypo

SEQ ID NO: 173892 - DNA, 255 bp, Homo sapiens; identical to SEQ ID NO: 50708
  chr13:67801446-67801701
  hypo

SEQ ID NO: 173893 - DNA, 30 bp, Homo sapiens; identical to SEQ ID NO: 50709
  chr13:67802379-67802409
  hypo

SEQ ID NO: 173894 - DNA, 30 bp, Homo sapiens; identical to SEQ ID NO: 50714
  chr13:67806732-67806762
  hypo

SEQ ID NO: 173895 - DNA, 400 bp, Homo sapiens
  chr13:68343644-68344044
  hypo
ggttctcacgctgaccgaccagggttgctctcctcgctcggccctgcaggctgcactcgactcgtgccaccaacccagatcctgtgcctgctgtggctctgcactcagcccacgggctggaccaggcgtgccgccagcggcttccaccttgggcacccgcatctagatgagcggaagttggtggtgcctgaaaacagggatgccagcaaccgtgaagcctggggagtcctgagagctgagcccctaagaaatgttatggctgctgtagttcagcgagcagcagggaatggcgcccagtggctttttctctcctactgcttggcgagcgggagggcgtggtacccgcagcttggcgaatgggcgcgtgttacagctttcctgctcccgctgccccacagct

SEQ ID NO: 173896 - DNA, 30 bp, Homo sapiens
  chr13:68494761-68494791
  hypo
tgcagcgtggattcccgtcttgtcctctga

SEQ ID NO: 173897 - DNA, 31 bp, Homo sapiens; identical to SEQ ID NO: 27095
  chr13:70989770-70989801
  hypo

SEQ ID NO: 173898 - DNA, 30 bp, Homo sapiens; identical to SEQ ID NO: 85932
  chr13:72249070-72249100
  hypo

SEQ ID NO: 173899 - DNA, 96 bp, Homo sapiens
  chr13:72305715-72305811
  hypo
gtttcttgatgttctttagaaatggtgttatggaatattctttttacctaattcccatggttgtaatattaacactcaaatcgtagactagactcc

SEQ ID NO: 173900 - DNA, 30 bp, Homo sapiens; identical to SEQ ID NO: 9374
  chr13:72966642-72966672
  hypo

SEQ ID NO: 173901 - DNA, 84 bp, Homo sapiens; identical to SEQ ID NO: 27097
  chr13:73324106-73324190
  hypo

SEQ ID NO: 173902 - DNA, 30 bp, Homo sapiens; identical to SEQ ID NO: 27098
  chr13:73394526-73394556
  hypo

SEQ ID NO: 173903 - DNA, 30 bp, Homo sapiens
  chr13:73545240-73545270
  hypo
atcctttaattacctcgacattccattccg

SEQ ID NO: 173904 - DNA, 268 bp, Homo sapiens
  chr13:73619518-73619786
  hypo
cataggagtccagtacgtatctgttggttgttttaaaaatactttatcataggaaaatcttcaatgactcctttctccctcatacatacacgctgtgggcaatttgcatcggcatctcttcaatcatcctttgtgtgtgctctgtcttctgttgccacgtgccattaggccaccctgctcattatgtctgggattccaaacctcaacaataatgttgtgaacagtgttaaggatctcatttctgccgggcgcggtggctcacacctgt

SEQ ID NO: 173905 - DNA, 158 bp, Homo sapiens
  chr13:73636132-73636290
  hypo
cagtatcaacatgaacgtcttcctccctgacatcactcacctgagaactggcctctacaaatcccagagaccgtgcgtaacacacatcaagacagaacctgttgccattttcagccaccagagtgaaacgactgcccctcctccggccccgacccagg

SEQ ID NO: 173906 - DNA, 87 bp, Homo sapiens; identical to SEQ ID NO: 85937
  chr13:73636810-73636897
  hypo

SEQ ID NO: 173907 - DNA, 27 bp, Homo sapiens
  chr13:73636956-73636983
  hypo
acgcgcgtgcccttttcaacctcatgg

SEQ ID NO: 173908 - DNA, 21 bp, Homo sapiens
  chr13:73638964-73638985
  hypo
ccaccgcgcccgaccagcact

SEQ ID NO: 173909 - DNA, 51 bp, Homo sapiens
  chr13:73640030-73640081
  hypo
gaatgcttatacctgcgattcaggaacttgacctgccggcaaatacattta

SEQ ID NO: 173910 - DNA, 39 bp, Homo sapiens; identical to SEQ ID NO: 85940
  chr13:73642916-73642955
  hypo

SEQ ID NO: 173911 - DNA, 30 bp, Homo sapiens
  chr13:73743361-73743391
  hypo
cttccctcacttttgcgcgtgggtgtgagt

SEQ ID NO: 173912 - DNA, 21 bp, Homo sapiens
  chr13:73754217-73754238
  hypo
tagccattccaatgtcgtaga

SEQ ID NO: 173913 - DNA, 63 bp, Homo sapiens
  chr13:73809564-73809627
  hypo
cagcgacggtgcggccggtcacaagcatgcgtccctttggcaggcaatcgctcgtctccacga

SEQ ID NO: 173914 - DNA, 30 bp, Homo sapiens; identical to SEQ ID NO: 50722
  chr13:73811863-73811893
  hypo

SEQ ID NO: 173915 - DNA, 30 bp, Homo sapiens; identical to SEQ ID NO: 50723
  chr13:73814875-73814905
  hypo

SEQ ID NO: 173916 - DNA, 204 bp, Homo sapiens; identical to SEQ ID NO: 85943
  chr13:73824307-73824511
  hypo

SEQ ID NO: 173917 - DNA, 30 bp, Homo sapiens; identical to SEQ ID NO: 50724
  chr13:73916612-73916642
  hypo

SEQ ID NO: 173918 - DNA, 30 bp, Homo sapiens; identical to SEQ ID NO: 50725
  chr13:73957665-73957695
  hypo

SEQ ID NO: 173919 - DNA, 102 bp, Homo sapiens; identical to SEQ ID NO: 85946
  chr13:73972454-73972556
  hypo

SEQ ID NO: 173920 - DNA, 144 bp, Homo sapiens
  chr13:74248144-74248288
  hypo
gagccaccatgcccagccgtgttttctttattgtacaactcaacaactgtaatagatgagttctttagcatatagtggttaaaacatgggcgaagtgctgggcccacctgctcgtcatgtgacctttgacgtatttgtttaact

SEQ ID NO: 173921 - DNA, 235 bp, Homo sapiens
  chr13:74269499-74269734
  hypo
tctggtttcagacatcgtgggatggtgatgcccttttgtgttaacactgtgaaggggattcagccctgctgaattgggtgccgctaagagatccagctcttacgctcagctggacaggtagcattcctcacaccaacatatgcctccggcggtgcagggccaaatgatctgaccgggaaaagctgcgatcacagtccgcgcacttgaatggcttcactcccgtatgtttgcggta

SEQ ID NO: 173922 - DNA, 76 bp, Homo sapiens; identical to SEQ ID NO: 85948
  chr13:74352827-74352903
  hypo

SEQ ID NO: 173923 - DNA, 145 bp, Homo sapiens
  chr13:74445353-74445498
  hypo
gtcagctgtagtactcgcaacagcagcagcagcttctctgtctctgcttcacagctatggtggcgtgtcctgaaatcaatgatggggaggcagacctgacttccatccctccttctcttcaatgaataagcgagcattcgctata

SEQ ID NO: 173924 - DNA, 30 bp, Homo sapiens
  chr13:74500273-74500303
  hypo
tgaaagcagttccaccgtgggtaaaacact

SEQ ID NO: 173925 - DNA, 1486 bp, Homo sapiens; identical to SEQ ID NO: 123886
  chr13:74707108-74708594
  hypo

SEQ ID NO: 173926 - DNA, 201 bp, Homo sapiens; identical to SEQ ID NO: 123887
  chr13:74709333-74709534
  hypo

SEQ ID NO: 173927 - DNA, 30 bp, Homo sapiens
  chr13:74941487-74941517
  hypo
ccgcttcttcctccccgctaacaaacaaac

SEQ ID NO: 173928 - DNA, 36 bp, Homo sapiens; identical to SEQ ID NO: 9377
  chr13:75794020-75794056
  hypo

SEQ ID NO: 173929 - DNA, 30 bp, Homo sapiens
  chr13:75825026-75825056
  hypo
tgtggcttttgacaccgcgcccctcgtcca

SEQ ID NO: 173930 - DNA, 187 bp, Homo sapiens; identical to SEQ ID NO: 85952
  chr13:75936266-75936453
  hypo

SEQ ID NO: 173931 - DNA, 31 bp, Homo sapiens; identical to SEQ ID NO: 85953
  chr13:76043220-76043251
  hypo

SEQ ID NO: 173932 - DNA, 1104 bp, Homo sapiens; identical to SEQ ID NO: 50731
  chr13:76055017-76056121
  hypo

SEQ ID NO: 173933 - DNA, 30 bp, Homo sapiens
  chr13:76065334-76065364
  hypo
atttcgtagacgggtcgattttgcttcaaa

SEQ ID NO: 173934 - DNA, 30 bp, Homo sapiens; identical to SEQ ID NO: 85955
  chr13:76250123-76250153
  hypo

SEQ ID NO: 173935 - DNA, 33 bp, Homo sapiens; identical to SEQ ID NO: 85956
  chr13:76291200-76291233
  hypo

SEQ ID NO: 173936 - DNA, 31 bp, Homo sapiens; identical to SEQ ID NO: 85957
  chr13:76352060-76352091
  hypo

SEQ ID NO: 173937 - DNA, 152 bp, Homo sapiens; identical to SEQ ID NO: 85958
  chr13:76352658-76352810
  hypo

SEQ ID NO: 173938 - DNA, 30 bp, Homo sapiens
  chr13:76379149-76379179
  hypo
gatgacttagccaaccgtagattccaagtg

SEQ ID NO: 173939 - DNA, 26 bp, Homo sapiens
  chr13:76440859-76440885
  hypo
gaatgagccaccgcgcccggcctctc

SEQ ID NO: 173940 - DNA, 23 bp, Homo sapiens
  chr13:76588047-76588070
  hypo
tttgggaggctgaggcgggcaga

SEQ ID NO: 173941 - DNA, 22 bp, Homo sapiens
  chr13:76997386-76997408
  hypo
gggcgcggtggctcacgtctgt

SEQ ID NO: 173942 - DNA, 24 bp, Homo sapiens
  chr13:77234814-77234838
  hypo
aatgcttataacaagtagaagcgg

SEQ ID NO: 173943 - DNA, 33 bp, Homo sapiens; identical to SEQ ID NO: 85960
  chr13:77356968-77357001
  hypo

SEQ ID NO: 173944 - DNA, 30 bp, Homo sapiens
  chr13:77405386-77405416
  hypo
aaagactaacccccgcgccgggcaccagcc

SEQ ID NO: 173945 - DNA, 1110 bp, Homo sapiens; identical to SEQ ID NO: 50736
  chr13:77459235-77460345
  hypo

SEQ ID NO: 173946 - DNA, 166 bp, Homo sapiens
  chr13:77553617-77553783
  hypo
ttttttgtctgaagcccggctgggtcgctggagatccagcggagtgtgcggagggaggcgtgttggataccttttaaaaatgagaagccccaggccgggcgcggtgactcacgactgtaagtcgcggcccaaccctttgggaggccgaggcaggtggatcacttga

SEQ ID NO: 173947 - DNA, 30 bp, Homo sapiens
  chr13:77614371-77614401
  hypo
agttcattcatcaagcgccttctctgtaga

SEQ ID NO: 173948 - DNA, 31 bp, Homo sapiens; identical to SEQ ID NO: 27106
  chr13:77850148-77850179
  hypo

SEQ ID NO: 173949 - DNA, 17 bp, Homo sapiens
  chr13:78081917-78081934
  hypo
ggcgtaactcatagtaa

SEQ ID NO: 173950 - DNA, 793 bp, Homo sapiens; identical to SEQ ID NO: 123909
  chr13:78271861-78272654
  hypo

SEQ ID NO: 173951 - DNA, 104 bp, Homo sapiens
  chr13:78633632-78633736
  hypo
tatccagcagggtgtcggctgcgctcctgattcatcaaggagcccattactgctcccgattgggctaaaggctagccattgttcctacaggctaagtgcctttg

SEQ ID NO: 173952 - DNA, 21 bp, Homo sapiens
  chr13:78925931-78925952
  hypo
tgagaaggagcctcactctgt

SEQ ID NO: 173953 - DNA, 264 bp, Homo sapiens; identical to SEQ ID NO: 9384
  chr13:79169849-79170113
  hypo

SEQ ID NO: 173954 - DNA, 36 bp, Homo sapiens; identical to SEQ ID NO: 9385
  chr13:79170347-79170383
  hypo

SEQ ID NO: 173955 - DNA, 1162 bp, Homo sapiens; identical to SEQ ID NO: 123918
  chr13:79170467-79171629
  hypo

SEQ ID NO: 173956 - DNA, 341 bp, Homo sapiens; identical to SEQ ID NO: 123919
  chr13:79175602-79175943
  hypo

SEQ ID NO: 173957 - DNA, 48 bp, Homo sapiens; identical to SEQ ID NO: 50752
  chr13:79176077-79176125
  hypo

SEQ ID NO: 173958 - DNA, 144 bp, Homo sapiens; identical to SEQ ID NO: 9387
  chr13:79176276-79176420
  hypo

SEQ ID NO: 173959 - DNA, 576 bp, Homo sapiens; identical to SEQ ID NO: 9388
  chr13:79176608-79177184
  hypo

SEQ ID NO: 173960 - DNA, 317 bp, Homo sapiens; identical to SEQ ID NO: 9389
  chr13:79177305-79177622
  hypo

SEQ ID NO: 173961 - DNA, 189 bp, Homo sapiens; identical to SEQ ID NO: 123924
  chr13:79177885-79178074
  hypo

SEQ ID NO: 173962 - DNA, 31 bp, Homo sapiens; identical to SEQ ID NO: 9391
  chr13:79979539-79979570
  hypo

SEQ ID NO: 173963 - DNA, 37 bp, Homo sapiens; identical to SEQ ID NO: 27116
  chr13:79992931-79992968
  hypo

SEQ ID NO: 173964 - DNA, 36 bp, Homo sapiens; identical to SEQ ID NO: 27117
  chr13:79993207-79993243
  hypo

SEQ ID NO: 173965 - DNA, 24 bp, Homo sapiens
  chr13:80902405-80902429
  hypo
caccgcgcccggccctgcctggct

SEQ ID NO: 173966 - DNA, 500 bp, Homo sapiens; identical to SEQ ID NO: 50764
  chr13:80916946-80917446
  hypo

SEQ ID NO: 173967 - DNA, 41 bp, Homo sapiens
  chr13:83206247-83206288
  hypo
tttcaaaatccttaacttggccgggcgcggtggctcacgct

SEQ ID NO: 173968 - DNA, 41 bp, Homo sapiens
  chr13:83206527-83206568
  hypo
gcaagagagagcgagactccgtctcaaaacaaaacaaaaca

SEQ ID NO: 173969 - DNA, 30 bp, Homo sapiens
  chr13:83758094-83758124
  hypo
catgtcagagccacccgaagtgcatgtaaa

SEQ ID NO: 173970 - DNA, 30 bp, Homo sapiens
  chr13:83758389-83758419
  hypo
caatcctggctcccgcgggctctgcaaagc

SEQ ID NO: 173971 - DNA, 109 bp, Homo sapiens
  chr13:84107122-84107231
  hypo
tggtcatcaagagcacgctgacactctggcaggccatcgacctgccggacaaggcagagtttggccggagcagtgtgaggaaagccggggctgccgagtggcccaactc

SEQ ID NO: 173972 - DNA, 44 bp, Homo sapiens
  chr13:84267882-84267926
  hypo
tcatcatattatatagtttttatttaaagcgtttctcgattaga

SEQ ID NO: 173973 - DNA, 30 bp, Homo sapiens
  chr13:84480800-84480830
  hypo
tagggacgtgggggacggcttcagtccagg

SEQ ID NO: 173974 - DNA, 61 bp, Homo sapiens; identical to SEQ ID NO: 85982
  chr13:84481753-84481814
  hypo

SEQ ID NO: 173975 - DNA, 116 bp, Homo sapiens
  chr13:86083229-86083345
  hypo
cgaccatacacccctcgctgctgtaggcctggcttgcccttggcagttgtgggatctgggctgatagtgtaagcggagcgcagcctactgggctgagtgggcggaatgagcccagc

SEQ ID NO: 173976 - DNA, 202 bp, Homo sapiens
  chr13:86086567-86086769
  hypo
agggaagacttctcaccgataaaggatctgaagtatgaacagaaacaatacaagcagagaggagtgcattctccggtgtctggaaaggtaatatataaggcatgtcggttgatctgcatctgggagagttcacggggagtatgcaggacttccattgggaaaaatgtgaatactcataaaaatatgacgttaagcctgtttg

SEQ ID NO: 173977 - DNA, 52 bp, Homo sapiens; identical to SEQ ID NO: 85983
  chr13:87732414-87732466
  hypo

SEQ ID NO: 173978 - DNA, 450 bp, Homo sapiens; identical to SEQ ID NO: 9398
  chr13:88323380-88323830
  hypo

SEQ ID NO: 173979 - DNA, 651 bp, Homo sapiens; identical to SEQ ID NO: 9399
  chr13:88323867-88324518
  hypo

SEQ ID NO: 173980 - DNA, 71 bp, Homo sapiens; identical to SEQ ID NO: 50769
  chr13:88324920-88324991
  hypo

SEQ ID NO: 173981 - DNA, 31 bp, Homo sapiens; identical to SEQ ID NO: 9403
  chr13:90384876-90384907
  hypo

SEQ ID NO: 173982 - DNA, 30 bp, Homo sapiens
  chr13:90924381-90924411
  hypo
tagttttatatgtatcgaagatatagaaag

SEQ ID NO: 173983 - DNA, 44 bp, Homo sapiens; identical to SEQ ID NO: 27123
  chr13:91755717-91755761
  hypo

SEQ ID NO: 173984 - DNA, 20 bp, Homo sapiens
  chr13:92687456-92687476
  hypo
gactccgtctcaaaaaaaaa

SEQ ID NO: 173985 - DNA, 41 bp, Homo sapiens
  chr13:92746465-92746506
  hypo
gtaaatatttaagaaacttttcggccgggcacggtggctca

SEQ ID NO: 173986 - DNA, 29 bp, Homo sapiens
  chr13:92834840-92834869
  hypo
gtttcagtgttaagaaaattccgatcgcc

SEQ ID NO: 173987 - DNA, 29 bp, Homo sapiens
  chr13:92835108-92835137
  hypo
gagactccgtctcaaaaaaagaaaaaaaa

SEQ ID NO: 173988 - DNA, 104 bp, Homo sapiens; identical to SEQ ID NO: 85991
  chr13:92858651-92858755
  hypo

SEQ ID NO: 173989 - DNA, 30 bp, Homo sapiens; identical to SEQ ID NO: 9406
  chr13:93152311-93152341
  hypo

SEQ ID NO: 173990 - DNA, 151 bp, Homo sapiens; identical to SEQ ID NO: 85993
  chr13:95061642-95061793
  hypo

SEQ ID NO: 173991 - DNA, 30 bp, Homo sapiens
  chr13:95131300-95131330
  hypo
ggccttgtgtcggctcgcacctctgtgcac

SEQ ID NO: 173992 - DNA, 819 bp, Homo sapiens; identical to SEQ ID NO: 9413
  chr13:95201108-95201927
  hypo

SEQ ID NO: 173993 - DNA, 150 bp, Homo sapiens; identical to SEQ ID NO: 27126
  chr13:95238871-95239021
  hypo

SEQ ID NO: 173994 - DNA, 460 bp, Homo sapiens; identical to SEQ ID NO: 123963
  chr13:95354379-95354839
  hypo

SEQ ID NO: 173995 - DNA, 175 bp, Homo sapiens; identical to SEQ ID NO: 50787
  chr13:95355116-95355291
  hypo

SEQ ID NO: 173996 - DNA, 1182 bp, Homo sapiens; identical to SEQ ID NO: 123969
  chr13:95359620-95360802
  hypo

SEQ ID NO: 173997 - DNA, 466 bp, Homo sapiens; identical to SEQ ID NO: 9421
  chr13:95363493-95363959
  hypo

SEQ ID NO: 173998 - DNA, 226 bp, Homo sapiens; identical to SEQ ID NO: 9422
  chr13:95364064-95364290
  hypo

SEQ ID NO: 173999 - DNA, 1127 bp, Homo sapiens; identical to SEQ ID NO: 9423
  chr13:95364329-95365456
  hypo

SEQ ID NO: 174000 - DNA, 198 bp, Homo sapiens; identical to SEQ ID NO: 86003
  chr13:95411482-95411680
  hypo

SEQ ID NO: 174001 - DNA, 978 bp, Homo sapiens; identical to SEQ ID NO: 123975
  chr13:95619803-95620781
  hypo

SEQ ID NO: 174002 - DNA, 215 bp, Homo sapiens; identical to SEQ ID NO: 123976
  chr13:95620853-95621068
  hypo

SEQ ID NO: 174003 - DNA, 30 bp, Homo sapiens
  chr13:95654783-95654813
  hypo
caggagcccacgaaccgcacgagtggggag

SEQ ID NO: 174004 - DNA, 160 bp, Homo sapiens; identical to SEQ ID NO: 86006
  chr13:95683563-95683723
  hypo

SEQ ID NO: 174005 - DNA, 121 bp, Homo sapiens; identical to SEQ ID NO: 86007
  chr13:95693146-95693267
  hypo

SEQ ID NO: 174006 - DNA, 30 bp, Homo sapiens; identical to SEQ ID NO: 27134
  chr13:95711730-95711760
  hypo

SEQ ID NO: 174007 - DNA, 109 bp, Homo sapiens; identical to SEQ ID NO: 27135
  chr13:95751945-95752054
  hypo

SEQ ID NO: 174008 - DNA, 163 bp, Homo sapiens
  chr13:95767876-95768039
  hypo
gtaaagcaaaatccacgccagatacctagaggcagacggagagccacttaccaagcacgaagctgcttcaaactaaccctgacgcgactgtatagccactcccacacacaaggtattactcatgccaacttagcctctgagttataaccgcacctttctttta

SEQ ID NO: 174009 - DNA, 92 bp, Homo sapiens; identical to SEQ ID NO: 27136
  chr13:95775583-95775675
  hypo

SEQ ID NO: 174010 - DNA, 154 bp, Homo sapiens; identical to SEQ ID NO: 86011
  chr13:95788978-95789132
  hypo

SEQ ID NO: 174011 - DNA, 43 bp, Homo sapiens; identical to SEQ ID NO: 86012
  chr13:95839495-95839538
  hypo

SEQ ID NO: 174012 - DNA, 138 bp, Homo sapiens; identical to SEQ ID NO: 86013
  chr13:95852550-95852688
  hypo

SEQ ID NO: 174013 - DNA, 95 bp, Homo sapiens; identical to SEQ ID NO: 86014
  chr13:95869959-95870054
  hypo

SEQ ID NO: 174014 - DNA, 141 bp, Homo sapiens; identical to SEQ ID NO: 86015
  chr13:95888735-95888876
  hypo

SEQ ID NO: 174015 - DNA, 30 bp, Homo sapiens; identical to SEQ ID NO: 27138
  chr13:95910917-95910947
  hypo

SEQ ID NO: 174016 - DNA, 21 bp, Homo sapiens
  chr13:95990699-95990720
  hypo
ttttgagatagagtttcgctc

SEQ ID NO: 174017 - DNA, 210 bp, Homo sapiens; identical to SEQ ID NO: 27139
  chr13:96061945-96062155
  hypo

SEQ ID NO: 174018 - DNA, 462 bp, Homo sapiens; identical to SEQ ID NO: 27140
  chr13:96085828-96086290
  hypo

SEQ ID NO: 174019 - DNA, 93 bp, Homo sapiens; identical to SEQ ID NO: 86020
  chr13:96126086-96126179
  hypo

SEQ ID NO: 174020 - DNA, 31 bp, Homo sapiens; identical to SEQ ID NO: 27142
  chr13:96210199-96210230
  hypo

SEQ ID NO: 174021 - DNA, 185 bp, Homo sapiens; identical to SEQ ID NO: 27143
  chr13:96353303-96353488
  hypo

SEQ ID NO: 174022 - DNA, 30 bp, Homo sapiens
  chr13:96354615-96354645
  hypo
tggctacttagtttccgtacgtgcctttgt

SEQ ID NO: 174023 - DNA, 154 bp, Homo sapiens; identical to SEQ ID NO: 27144
  chr13:96409577-96409731
  hypo

SEQ ID NO: 174024 - DNA, 30 bp, Homo sapiens; identical to SEQ ID NO: 86024
  chr13:96433392-96433422
  hypo

SEQ ID NO: 174025 - DNA, 30 bp, Homo sapiens; identical to SEQ ID NO: 86025
  chr13:96433813-96433843
  hypo

SEQ ID NO: 174026 - DNA, 626 bp, Homo sapiens; identical to SEQ ID NO: 123986
  chr13:96705318-96705944
  hypo

SEQ ID NO: 174027 - DNA, 30 bp, Homo sapiens
  chr13:97416757-97416787
  hypo
atacttgattagtgtcgttgcccactcatt

SEQ ID NO: 174028 - DNA, 121 bp, Homo sapiens
  chr13:97599723-97599844
  hypo
acgatctcgcctcactgcaacctccagcaccggggttccagacattctcgtgcctcaaccccgcgaatacctgggatgacaggcgcgctactgaaccggtacatttttgtattgtagagcc

SEQ ID NO: 174029 - DNA, 104 bp, Homo sapiens
  chr13:97599963-97600067
  hypo
cgcacccggaccatagttttgttctgccatcttgagaacaagctgccgtcgttatttcgtggctgaaatgggatctgctcgtgattcaccgtcattccgggaat

SEQ ID NO: 174030 - DNA, 31 bp, Homo sapiens
  chr13:97668667-97668698
  hypo
agaaaaagtgttgacacgttgctgctctgtt

SEQ ID NO: 174031 - DNA, 30 bp, Homo sapiens
  chr13:97871112-97871142
  hypo
acggagcgcctccaccgtgtgccacgaaca

SEQ ID NO: 174032 - DNA, 293 bp, Homo sapiens
  chr13:97980685-97980978
  hypo
aaccttagggccagcacttgccgttccgcggcctggcctgcttgcttgaaaatatcatcatgcacctacagcagcaagtgctgccaaggtggcactgaaagaggcaaaattcagaaaatcaggttgggattccagcccttcgctagaatcgttttccccaagaaaagtgttgctggagtctgccggtcaatgactcagcccatgtaaagacacagttcaaattattccagcggaatacaaatggcgggggcctgttaactgaattgtagatcgtagaaatccattgcttttcc

SEQ ID NO: 174033 - DNA, 229 bp, Homo sapiens; identical to SEQ ID NO: 86028
  chr13:97999150-97999379
  hypo

SEQ ID NO: 174034 - DNA, 30 bp, Homo sapiens; identical to SEQ ID NO: 86029
  chr13:98116566-98116596
  hypo

SEQ ID NO: 174035 - DNA, 112 bp, Homo sapiens
  chr13:98528397-98528509
  hypo
tttgttaccatgtgtacggtaataaaaaaatggcgcaactcaggcagagaacctacctccataataaaagattagagtgggggctaccagatattcacgccctatgcaaatg

SEQ ID NO: 174036 - DNA, 81 bp, Homo sapiens; identical to SEQ ID NO: 27147
  chr13:98679645-98679726
  hypo

SEQ ID NO: 174037 - DNA, 91 bp, Homo sapiens; identical to SEQ ID NO: 86031
  chr13:98688093-98688184
  hypo

SEQ ID NO: 174038 - DNA, 40 bp, Homo sapiens; identical to SEQ ID NO: 86032
  chr13:98695034-98695074
  hypo

SEQ ID NO: 174039 - DNA, 24 bp, Homo sapiens
  chr13:98699892-98699916
  hypo
tttatattttgagaccgagtctca

SEQ ID NO: 174040 - DNA, 30 bp, Homo sapiens
  chr13:98707251-98707281
  hypo
gtgagccactgcgcccggcccctacatgca

SEQ ID NO: 174041 - DNA, 93 bp, Homo sapiens; identical to SEQ ID NO: 86033
  chr13:98761015-98761108
  hypo

SEQ ID NO: 174042 - DNA, 147 bp, Homo sapiens; identical to SEQ ID NO: 86034
  chr13:98768944-98769091
  hypo

SEQ ID NO: 174043 - DNA, 703 bp, Homo sapiens; identical to SEQ ID NO: 50815
  chr13:98795068-98795771
  hypo

SEQ ID NO: 174044 - DNA, 154 bp, Homo sapiens; identical to SEQ ID NO: 86036
  chr13:98829227-98829381
  hypo

SEQ ID NO: 174045 - DNA, 22 bp, Homo sapiens
  chr13:98829879-98829901
  hypo
gacagagcgagaccctgtctca

SEQ ID NO: 174046 - DNA, 45 bp, Homo sapiens
  chr13:98851325-98851370
  hypo
tcttttctctattttcgcacttctattagtcggatccgctattgg

SEQ ID NO: 174047 - DNA, 31 bp, Homo sapiens; identical to SEQ ID NO: 86038
  chr13:98861198-98861229
  hypo

SEQ ID NO: 174048 - DNA, 639 bp, Homo sapiens
  chr13:98869700-98870339
  hypo
gtctacgaccgtcgtcgcaggaaatgatccttgtaactttctcgtgttgctgtcttgtcactgctgtactcgagcttttgtagctcctgagacttaagtagcattcatcctttgcctgaggatcaagtgtgggcttcgtagctcggggagcctgggagagagcaatgagcctccatggaggggccctgtacaccgggaggtgcctgggcaactcccatggctcatctcaaccacagtcctcggcggtttgttttctgcattagcttctcatgccagaacaccctcttatttgtttacctgcttagtgttggcctcttgcaggtagagtggccactccttggagggcaaggcctcttgttcttgttcgtcatcatatcctacgccgcagcggtgcctgtgcatgaaactgactggtgacagttctgctcggtcgtttaactatacgagagttggtgctgtcctagcataacaagggaaagagcaagtgggaagagcttctgagtcccttcctcgtgttttcacagcgtgaaggtggggctgggattggagtccggcccgccagaccctcaacttacccatcttctgggcactaagagccgcctcctttgtgagattcgcggacttcctctgcctcctact

SEQ ID NO: 174049 - DNA, 94 bp, Homo sapiens; identical to SEQ ID NO: 86040
  chr13:98873756-98873850
  hypo

SEQ ID NO: 174050 - DNA, 44 bp, Homo sapiens; identical to SEQ ID NO: 27150
  chr13:98917860-98917904
  hypo

SEQ ID NO: 174051 - DNA, 30 bp, Homo sapiens; identical to SEQ ID NO: 27151
  chr13:98945158-98945188
  hypo

SEQ ID NO: 174052 - DNA, 30 bp, Homo sapiens
  chr13:98965052-98965082
  hypo
gccgtgtgcacagggcgctctgccttctcc

SEQ ID NO: 174053 - DNA, 30 bp, Homo sapiens
  chr13:98965681-98965711
  hypo
gccagggcttgccagcgccaccaggagagg

SEQ ID NO: 174054 - DNA, 213 bp, Homo sapiens; identical to SEQ ID NO: 86043
  chr13:98965959-98966172
  hypo

SEQ ID NO: 174055 - DNA, 31 bp, Homo sapiens; identical to SEQ ID NO: 86044
  chr13:98969018-98969049
  hypo

SEQ ID NO: 174056 - DNA, 188 bp, Homo sapiens; identical to SEQ ID NO: 86045
  chr13:98981024-98981212
  hypo

SEQ ID NO: 174057 - DNA, 246 bp, Homo sapiens
  chr13:99034905-99035151
  hypo
gtcatttgtggatggcgaaaatttggagtcacctgatgtgcattcccagtggaggtcaaacgaggcaaagctctgccttctgttttttttttctcgtactgttaataagtatccttttcatggtctatttagtgccacgcttttcgcatttttgtgcatgtttttggtgatttcactgtttaaagcagtccccaggcgttgtgctgaagcgctgtctgtcttgtgtccccgcgtgcagtgctatct

SEQ ID NO: 174058 - DNA, 31 bp, Homo sapiens; identical to SEQ ID NO: 86046
  chr13:99045547-99045578
  hypo

SEQ ID NO: 174059 - DNA, 368 bp, Homo sapiens; identical to SEQ ID NO: 86047
  chr13:99047502-99047870
  hypo

SEQ ID NO: 174060 - DNA, 31 bp, Homo sapiens; identical to SEQ ID NO: 27153
  chr13:99054006-99054037
  hypo

SEQ ID NO: 174061 - DNA, 219 bp, Homo sapiens
  chr13:99059217-99059436
  hypo
tttcctctctgttgccggatgctgtctagggcctgttagttgctatttccttgcctccgctccccttcccactagccttctaactaccttttattctcggctccaactctttcaatgatgaggtgaatgctttttctgttccacgtcactgcaaagtcaaggtgtccagcatgctctcacttataactgcctcacccgatctcacgcacagtgcgagag

SEQ ID NO: 174062 - DNA, 31 bp, Homo sapiens; identical to SEQ ID NO: 9440
  chr13:99064433-99064464
  hypo

SEQ ID NO: 174063 - DNA, 377 bp, Homo sapiens; identical to SEQ ID NO: 86050
  chr13:99068033-99068410
  hypo

SEQ ID NO: 174064 - DNA, 43 bp, Homo sapiens
  chr13:99072615-99072658
  hypo
gcaaccttgctgttggtcagccgcccacccacagttggtcatt

SEQ ID NO: 174065 - DNA, 31 bp, Homo sapiens; identical to SEQ ID NO: 86051
  chr13:99074470-99074501
  hypo

SEQ ID NO: 174066 - DNA, 109 bp, Homo sapiens; identical to SEQ ID NO: 86052
  chr13:99095615-99095724
  hypo

SEQ ID NO: 174067 - DNA, 445 bp, Homo sapiens
  chr13:99101262-99101707
  hypo
tctgttaagcaaagccgagatccagtgcaatacctggactgtcaccgtcctgtgagtggtgtacacaatgggaagataataagccgtggtgttttgctgtctgtctgtgtcacaagcatgaaaacccgtgtgtcattgatcagcaccatttgtggtatgttccgtgatgagcgtttagtgagcctgctggctgcagagcactatgaaatcatggtacgtagtccccggcacctgtcgttattcctatatcctcctgcaactgtggtttgaaactgcgcattctctagtagtatatatcgtgcctgtcttcaaaaacatttccctttttatactcattccccccaggcatggggtagtgtcagtcggactgcacagggaacacggtttccagtggctttggcccctactcgggaaacgtctgcctgttctcgatggtgatggggtg

SEQ ID NO: 174068 - DNA, 28 bp, Homo sapiens
  chr13:99104148-99104176
  hypo
caaaataactcttaaggtccccggcaac

SEQ ID NO: 174069 - DNA, 363 bp, Homo sapiens
  chr13:99104223-99104586
  hypo
gtgagcaagtgcgcaagcagtccagggcgctgacctgggcactcggcagctccaggcctggggacttctccctggagtcttccaaagtgtctcatcacacacacacagccacgagtacacacgcacggccacacatacacagcaggtgccctgtcctctgaagagtcacatttcaaggagtatgcaaaataagcgtgttataaaatttatttgtgtaagcattcagacatttttaggtgggaaagatgatatgcagaatccactacaaggtgcaacagaaaatcgtattggaaaggacggtacatctggcgcagaccagcagtggcacgattccaaacaaatgtcagacgagagcgcttcatg

SEQ ID NO: 174070 - DNA, 30 bp, Homo sapiens
  chr13:99105274-99105304
  hypo
gtgtgtgtccctggacgggcgcctggcgct

SEQ ID NO: 174071 - DNA, 30 bp, Homo sapiens
  chr13:99108994-99109024
  hypo
acctgcgcccgctcccgctgagttgaccac

SEQ ID NO: 174072 - DNA, 102 bp, Homo sapiens; identical to SEQ ID NO: 86054
  chr13:99115921-99116023
  hypo

SEQ ID NO: 174073 - DNA, 30 bp, Homo sapiens
  chr13:99119142-99119172
  hypo
gagtgggtgtacgctcgcgagtcaccccct

SEQ ID NO: 174074 - DNA, 195 bp, Homo sapiens; identical to SEQ ID NO: 123998
  chr13:99128922-99129117
  hypo

SEQ ID NO: 174075 - DNA, 96 bp, Homo sapiens; identical to SEQ ID NO: 86056
  chr13:99141396-99141492
  hypo

SEQ ID NO: 174076 - DNA, 114 bp, Homo sapiens; identical to SEQ ID NO: 86057
  chr13:99157092-99157206
  hypo

SEQ ID NO: 174077 - DNA, 30 bp, Homo sapiens; identical to SEQ ID NO: 27157
  chr13:99174594-99174624
  hypo

SEQ ID NO: 174078 - DNA, 30 bp, Homo sapiens; identical to SEQ ID NO: 86059
  chr13:99188983-99189013
  hypo

SEQ ID NO: 174079 - DNA, 113 bp, Homo sapiens; identical to SEQ ID NO: 27158
  chr13:99189689-99189802
  hypo

SEQ ID NO: 174080 - DNA, 169 bp, Homo sapiens
  chr13:99192182-99192351
  hypo
atgattcacagtaaccgccagtgcaaacggcctaaatgtccaccagctggagagtaaacagacaacaaacaggtggcccatccaaacaacagaatacgattctgctgcaaaaggaatgaacaacagacacaagctgcgttgcgagccccaagaacgtcatgctaagcaa

SEQ ID NO: 174081 - DNA, 30 bp, Homo sapiens; identical to SEQ ID NO: 86061
  chr13:99197410-99197440
  hypo

SEQ ID NO: 174082 - DNA, 167 bp, Homo sapiens; identical to SEQ ID NO: 27159
  chr13:99204542-99204709
  hypo

SEQ ID NO: 174083 - DNA, 30 bp, Homo sapiens; identical to SEQ ID NO: 27160
  chr13:99219202-99219232
  hypo

SEQ ID NO: 174084 - DNA, 155 bp, Homo sapiens; identical to SEQ ID NO: 86064
  chr13:99219591-99219746
  hypo

SEQ ID NO: 174085 - DNA, 330 bp, Homo sapiens; identical to SEQ ID NO: 9441
  chr13:99229763-99230093
  hypo

SEQ ID NO: 174086 - DNA, 34 bp, Homo sapiens
  chr13:99235378-99235412
  hypo
atgcatgcacacatacgcacgcacacacacgttc

SEQ ID NO: 174087 - DNA, 42 bp, Homo sapiens; identical to SEQ ID NO: 27162
  chr13:99293493-99293535
  hypo

SEQ ID NO: 174088 - DNA, 256 bp, Homo sapiens
  chr13:99328242-99328498
  hypo
ctcgccctgcagtctcgctgcagccccaccctcccgaaagcacgcgttcacccaggctgcagggtctctccctgtgtccgcttcttgccagcacctgcctgctgcccgacccctcccgcctgcaggcaatttgcccgtctccacttgccagaggcacctcccaggccacaccacagaaagcctgcacactccgatttacctccatgtcccgtgttggtcactgctgtggtttgggagccaccgccctctgctactg

SEQ ID NO: 174089 - DNA, 145 bp, Homo sapiens
  chr13:99328717-99328862
  hypo
tcaaggacctgagtcagactccggacttactgaagttcaaccttcctgaagacgaaaacaggctgagcagcatggatggcaaggccgtctctgccccaaggcaccagctggcggacaggatctcggttccatctaccagccactg

SEQ ID NO: 174090 - DNA, 31 bp, Homo sapiens; identical to SEQ ID NO: 27163
  chr13:99329817-99329848
  hypo

SEQ ID NO: 174091 - DNA, 31 bp, Homo sapiens; identical to SEQ ID NO: 86069
  chr13:99336418-99336449
  hypo

SEQ ID NO: 174092 - DNA, 207 bp, Homo sapiens; identical to SEQ ID NO: 86070
  chr13:99376080-99376287
  hypo

SEQ ID NO: 174093 - DNA, 43 bp, Homo sapiens; identical to SEQ ID NO: 86071
  chr13:99427800-99427843
  hypo

SEQ ID NO: 174094 - DNA, 456 bp, Homo sapiens
  chr13:99428267-99428723
  hypo
cttctaagggaccctggagtgcggcctgactgagagagtggatggggaggggatgccgggtctctggctcaggtgttgcgtgttgggagcccactaggtagaacaagtgtcctccacccagctcagctccggagccttcctcgaaaggcaagaggtcaattcatcttctgcctcagcagaatcgtcccttcctttacaaggggactttgctccatgatctgacagacctgggaagtgtgtggaggttttacacgatgactcagtgcacatcagagtcagagacaggacggccgaacactgattccagagataggcatgtgggccccgcccgggaaggagagctgcctgggagatggggagctgcaagagagcacccagaggggtaaatttgcacaaggccactgcgtacactggtacgtgcttccttgaaaatgtgacattttcaggcagggcgcg

SEQ ID NO: 174095 - DNA, 59 bp, Homo sapiens
  chr13:99444807-99444866
  hypo
aaggtttattagccccggctgggatgtcagcgacatggaacaaacgtatgctgggtaag

SEQ ID NO: 174096 - DNA, 30 bp, Homo sapiens; identical to SEQ ID NO: 86075
  chr13:99460082-99460112
  hypo

SEQ ID NO: 174097 - DNA, 21 bp, Homo sapiens
  chr13:99645849-99645870
  hypo
aatacttccactaggtggtgg

SEQ ID NO: 174098 - DNA, 21 bp, Homo sapiens
  chr13:99645989-99646010
  hypo
gtctcaaaaaataaaaataaa

SEQ ID NO: 174099 - DNA, 355 bp, Homo sapiens; identical to SEQ ID NO: 9443
  chr13:99739097-99739452
  hypo

SEQ ID NO: 174100 - DNA, 102 bp, Homo sapiens; identical to SEQ ID NO: 27166
  chr13:99851315-99851417
  hypo

SEQ ID NO: 174101 - DNA, 161 bp, Homo sapiens; identical to SEQ ID NO: 86080
  chr13:99851656-99851817
  hypo

SEQ ID NO: 174102 - DNA, 41 bp, Homo sapiens; identical to SEQ ID NO: 27168
  chr13:99863140-99863181
  hypo

SEQ ID NO: 174103 - DNA, 31 bp, Homo sapiens; identical to SEQ ID NO: 27169
  chr13:99870196-99870227
  hypo

SEQ ID NO: 174104 - DNA, 30 bp, Homo sapiens; identical to SEQ ID NO: 86083
  chr13:99917890-99917920
  hypo

SEQ ID NO: 174105 - DNA, 125 bp, Homo sapiens; identical to SEQ ID NO: 86084
  chr13:100005096-100005221
  hypo

SEQ ID NO: 174106 - DNA, 100 bp, Homo sapiens; identical to SEQ ID NO: 86085
  chr13:100020046-100020146
  hypo

SEQ ID NO: 174107 - DNA, 33 bp, Homo sapiens; identical to SEQ ID NO: 86086
  chr13:100020350-100020383
  hypo

SEQ ID NO: 174108 - DNA, 109 bp, Homo sapiens
  chr13:100033195-100033304
  hypo
gatgaagagcgagcccgctgcaagctgtgacagcagacgctctcttctgccaagacctgtgaaaagccagtcttagttgtcaaaaccagcaccgcggcacatgtcgttc

SEQ ID NO: 174109 - DNA, 161 bp, Homo sapiens; identical to SEQ ID NO: 27170
  chr13:100035863-100036024
  hypo

SEQ ID NO: 174110 - DNA, 130 bp, Homo sapiens
  chr13:100036955-100037085
  hypo
cgagcatggcagtgacgccaggagtgtgatgccagggctgagcgtggcagtgacgccaggagtgtgatgccagggctgagcgtggcagtgacgccaggagtgtgatgccagggccgagcgtggcagtgat

SEQ ID NO: 174111 - DNA, 31 bp, Homo sapiens; identical to SEQ ID NO: 86089
  chr13:100042130-100042161
  hypo

SEQ ID NO: 174112 - DNA, 30 bp, Homo sapiens
  chr13:100050582-100050612
  hypo
ccctgaggttctcctcgccttgactcggct

SEQ ID NO: 174113 - DNA, 30 bp, Homo sapiens; identical to SEQ ID NO: 27171
  chr13:100066633-100066663
  hypo

SEQ ID NO: 174114 - DNA, 320 bp, Homo sapiens; identical to SEQ ID NO: 86091
  chr13:100067887-100068207
  hypo

SEQ ID NO: 174115 - DNA, 135 bp, Homo sapiens; identical to SEQ ID NO: 27172
  chr13:100068638-100068773
  hypo

SEQ ID NO: 174116 - DNA, 193 bp, Homo sapiens; identical to SEQ ID NO: 27173
  chr13:100068976-100069169
  hypo

SEQ ID NO: 174117 - DNA, 30 bp, Homo sapiens
  chr13:100086562-100086592
  hypo
ccagcttccagacggcgaggaaatacattt

SEQ ID NO: 174118 - DNA, 30 bp, Homo sapiens
  chr13:100086950-100086980
  hypo
ctacacaggtataaccgcgggccctgagtc

SEQ ID NO: 174119 - DNA, 21 bp, Homo sapiens
  chr13:100151880-100151901
  hypo
ttttttttttttgagacggag

SEQ ID NO: 174120 - DNA, 98 bp, Homo sapiens; identical to SEQ ID NO: 86095
  chr13:100307597-100307695
  hypo

SEQ ID NO: 174121 - DNA, 186 bp, Homo sapiens; identical to SEQ ID NO: 86096
  chr13:100482065-100482251
  hypo

SEQ ID NO: 174122 - DNA, 38 bp, Homo sapiens
  chr13:100523137-100523175
  hypo
gtttgaacatctgttcgttgtttcgtggttccgatgtt

SEQ ID NO: 174123 - DNA, 124 bp, Homo sapiens
  chr13:100575404-100575528
  hypo
aaggtctgcagcttccgatctccccgcctttcccaaatatgcacgccctgtaccgccgtcccaggctccgtgccaggcggcagcagccactgtgctcacactcatgtgtcgtgtctctcctccc

SEQ ID NO: 174124 - DNA, 30 bp, Homo sapiens; identical to SEQ ID NO: 86099
  chr13:100583874-100583904
  hypo

SEQ ID NO: 174125 - DNA, 193 bp, Homo sapiens; identical to SEQ ID NO: 124015
  chr13:100620291-100620484
  hypo

SEQ ID NO: 174126 - DNA, 104 bp, Homo sapiens; identical to SEQ ID NO: 50831
  chr13:100620515-100620619
  hypo

SEQ ID NO: 174127 - DNA, 1399 bp, Homo sapiens; identical to SEQ ID NO: 9447
  chr13:100620631-100622030
  hypo

SEQ ID NO: 174128 - DNA, 505 bp, Homo sapiens; identical to SEQ ID NO: 50833
  chr13:100622155-100622660
  hypo

SEQ ID NO: 174129 - DNA, 1690 bp, Homo sapiens; identical to SEQ ID NO: 124023
  chr13:100631530-100633220
  hypo

SEQ ID NO: 174130 - DNA, 467 bp, Homo sapiens; identical to SEQ ID NO: 124024
  chr13:100633419-100633886
  hypo

SEQ ID NO: 174131 - DNA, 613 bp, Homo sapiens; identical to SEQ ID NO: 124025
  chr13:100634131-100634744
  hypo

SEQ ID NO: 174132 - DNA, 96 bp, Homo sapiens; identical to SEQ ID NO: 86107
  chr13:100678150-100678246
  hypo

SEQ ID NO: 174133 - DNA, 29 bp, Homo sapiens
  chr13:100878043-100878072
  hypo
agcttttttttttctttgagacgaagagt

SEQ ID NO: 174134 - DNA, 92 bp, Homo sapiens
  chr13:101091895-101091987
  hypo
attgtttgtcgttagcgttttacatactagattttcatcgtgcatagtcacgttgtttgaacatttgcaagcagagccgactaactgctgtt

SEQ ID NO: 174135 - DNA, 102 bp, Homo sapiens
  chr13:101129317-101129419
  hypo
ttaccgggtaatgaccgagggcacctgctttaaagtcaagtgcatactaatttactggctatttgcttggcctcatttacgctctctcggcacagtttctgg

SEQ ID NO: 174136 - DNA, 106 bp, Homo sapiens
  chr13:101160648-101160754
  hypo
cattggtccagtaaacgacttaactccaagaaccacctaccagtaacacaacaaaaccttgagtacagattgattcataaatggcagcggacgagtgttgaaagtg

SEQ ID NO: 174137 - DNA, 30 bp, Homo sapiens
  chr13:101161171-101161201
  hypo
aacctaaaccgtaaacgcttgcagttgcga

SEQ ID NO: 174138 - DNA, 30 bp, Homo sapiens; identical to SEQ ID NO: 27181
  chr13:101178560-101178590
  hypo

SEQ ID NO: 174139 - DNA, 113 bp, Homo sapiens; identical to SEQ ID NO: 86110
  chr13:101184479-101184592
  hypo

SEQ ID NO: 174140 - DNA, 30 bp, Homo sapiens; identical to SEQ ID NO: 86111
  chr13:101184832-101184862
  hypo

SEQ ID NO: 174141 - DNA, 30 bp, Homo sapiens
  chr13:101186754-101186784
  hypo
accagctgagagcagcgctggtgtctggag

SEQ ID NO: 174142 - DNA, 261 bp, Homo sapiens; identical to SEQ ID NO: 86112
  chr13:101194462-101194723
  hypo

SEQ ID NO: 174143 - DNA, 30 bp, Homo sapiens
  chr13:101287109-101287139
  hypo
actccgccactcgccgctgcgcagcacaca

SEQ ID NO: 174144 - DNA, 37 bp, Homo sapiens
  chr13:101297338-101297375
  hypo
tacaggcgtgagccactgcacccggcctgaacattct

SEQ ID NO: 174145 - DNA, 203 bp, Homo sapiens
  chr13:101297850-101298053
  hypo
tgagcaggtgagccccgtgcaccgctccaagtccctgactgccgctgtgaggtgagccttgttcactgactgcccccgtagattaggttaggcccagctgtagtgctctaaactgccctgatcacagtctatcacaatattcctcacagagtttatcacaagcacttgattttctgtcattcccgagtcgagggtctgtccac

SEQ ID NO: 174146 - DNA, 30 bp, Homo sapiens
  chr13:101298524-101298554
  hypo
ctaaatcagcaggcccgactgacgctggaa

SEQ ID NO: 174147 - DNA, 15 bp, Homo sapiens
  chr13:101302747-101302762
  hypo
gcctggcatctccac

SEQ ID NO: 174148 - DNA, 58 bp, Homo sapiens; identical to SEQ ID NO: 27185
  chr13:101302821-101302879
  hypo

SEQ ID NO: 174149 - DNA, 210 bp, Homo sapiens; identical to SEQ ID NO: 27186
  chr13:101317802-101318012
  hypo

SEQ ID NO: 174150 - DNA, 208 bp, Homo sapiens; identical to SEQ ID NO: 27187
  chr13:101327900-101328108
  hypo

SEQ ID NO: 174151 - DNA, 30 bp, Homo sapiens; identical to SEQ ID NO: 9456
  chr13:101422012-101422042
  hypo

SEQ ID NO: 174152 - DNA, 30 bp, Homo sapiens; identical to SEQ ID NO: 50852
  chr13:101449976-101450006
  hypo

SEQ ID NO: 174153 - DNA, 199 bp, Homo sapiens; identical to SEQ ID NO: 124045
  chr13:102068158-102068357
  hypo

SEQ ID NO: 174154 - DNA, 228 bp, Homo sapiens; identical to SEQ ID NO: 9459
  chr13:102068417-102068645
  hypo

SEQ ID NO: 174155 - DNA, 259 bp, Homo sapiens; identical to SEQ ID NO: 9460
  chr13:102068811-102069070
  hypo

SEQ ID NO: 174156 - DNA, 30 bp, Homo sapiens
  chr13:102135257-102135287
  hypo
tcagtttcatactcacggcatcagagactc

SEQ ID NO: 174157 - DNA, 108 bp, Homo sapiens; identical to SEQ ID NO: 9462
  chr13:102568659-102568767
  hypo

SEQ ID NO: 174158 - DNA, 705 bp, Homo sapiens; identical to SEQ ID NO: 50859
  chr13:102569312-102570017
  hypo

SEQ ID NO: 174159 - DNA, 22 bp, Homo sapiens
  chr13:102713428-102713450
  hypo
ccatgctggctccacatccatc

SEQ ID NO: 174160 - DNA, 804 bp, Homo sapiens; identical to SEQ ID NO: 124051
  chr13:103046524-103047328
  hypo

SEQ ID NO: 174161 - DNA, 33 bp, Homo sapiens; identical to SEQ ID NO: 27196
  chr13:103262163-103262196
  hypo

SEQ ID NO: 174162 - DNA, 1778 bp, Homo sapiens; identical to SEQ ID NO: 124057
  chr13:103450866-103452644
  hypo

SEQ ID NO: 174163 - DNA, 31 bp, Homo sapiens; identical to SEQ ID NO: 27198
  chr13:103453932-103453963
  hypo

SEQ ID NO: 174164 - DNA, 30 bp, Homo sapiens; identical to SEQ ID NO: 9470
  chr13:103454353-103454383
  hypo

SEQ ID NO: 174165 - DNA, 39 bp, Homo sapiens; identical to SEQ ID NO: 86132
  chr13:103456536-103456575
  hypo

SEQ ID NO: 174166 - DNA, 29 bp, Homo sapiens
  chr13:103458965-103458994
  hypo
tgggctatttgctggccgggcatggtggc

SEQ ID NO: 174167 - DNA, 23 bp, Homo sapiens
  chr13:103464143-103464166
  hypo
attacaggcgtgagccaccgtgc

SEQ ID NO: 174168 - DNA, 71 bp, Homo sapiens
  chr13:103523454-103523525
  hypo
ctaggaccccttaagatggctcgcggggctgatgaggtggcttcggcctcggggcctgggtggacacttgg

SEQ ID NO: 174169 - DNA, 45 bp, Homo sapiens; identical to SEQ ID NO: 27200
  chr13:103568842-103568887
  hypo

SEQ ID NO: 174170 - DNA, 45 bp, Homo sapiens; identical to SEQ ID NO: 86136
  chr13:103569186-103569231
  hypo

SEQ ID NO: 174171 - DNA, 30 bp, Homo sapiens
  chr13:104600488-104600518
  hypo
tttttaccatctttgcggccttaaggaagt

SEQ ID NO: 174172 - DNA, 30 bp, Homo sapiens; identical to SEQ ID NO: 86137
  chr13:104859163-104859193
  hypo

SEQ ID NO: 174173 - DNA, 93 bp, Homo sapiens
  chr13:105300809-105300902
  hypo
cagttcctacacccacggctgctgtaatgcggcacagccaggcgtcacgcctcagcagatgctctaacaacaatacatcgatgaataatctgt

SEQ ID NO: 174174 - DNA, 25 bp, Homo sapiens
  chr13:106314335-106314360
  hypo
agcgagactccgtcttaaaaaaaaa

SEQ ID NO: 174175 - DNA, 20 bp, Homo sapiens
  chr13:106478035-106478055
  hypo
taaaatatgaatacacggcc

SEQ ID NO: 174176 - DNA, 37 bp, Homo sapiens; identical to SEQ ID NO: 27201
  chr13:106549791-106549828
  hypo

SEQ ID NO: 174177 - DNA, 30 bp, Homo sapiens; identical to SEQ ID NO: 86139
  chr13:106705518-106705548
  hypo

SEQ ID NO: 174178 - DNA, 34 bp, Homo sapiens; identical to SEQ ID NO: 86140
  chr13:106718243-106718277
  hypo

SEQ ID NO: 174179 - DNA, 64 bp, Homo sapiens; identical to SEQ ID NO: 86141
  chr13:106739740-106739804
  hypo

SEQ ID NO: 174180 - DNA, 202 bp, Homo sapiens; identical to SEQ ID NO: 86142
  chr13:106788530-106788732
  hypo

SEQ ID NO: 174181 - DNA, 31 bp, Homo sapiens; identical to SEQ ID NO: 86143
  chr13:106886316-106886347
  hypo

SEQ ID NO: 174182 - DNA, 659 bp, Homo sapiens; identical to SEQ ID NO: 27202
  chr13:106912352-106913011
  hypo

SEQ ID NO: 174183 - DNA, 31 bp, Homo sapiens; identical to SEQ ID NO: 27203
  chr13:106915515-106915546
  hypo

SEQ ID NO: 174184 - DNA, 30 bp, Homo sapiens; identical to SEQ ID NO: 27204
  chr13:107027610-107027640
  hypo

SEQ ID NO: 174185 - DNA, 269 bp, Homo sapiens
  chr13:107078198-107078467
  hypo
gagcggtcccagctgcgagtcgccaaagtgacaggcggcgaggcctccaagctctctaagattcgagttgtctgcaagtccgttgcccgtgttctcaccgttattaaccagactcagaaagaaaacatcaggaaattctgcaagggcaagagatgcgagcccctgaccctgaggcctgagaagactcacgccaggcgccgccggctcaacaagccgaggagaacctgaagaccaagaagcagcagcgttaggagcggctgtactcactg

SEQ ID NO: 174186 - DNA, 132 bp, Homo sapiens; identical to SEQ ID NO: 86147
  chr13:107125446-107125578
  hypo

SEQ ID NO: 174187 - DNA, 30 bp, Homo sapiens
  chr13:107125953-107125983
  hypo
tgagagaagctgcgccgtcctggagtgagt

SEQ ID NO: 174188 - DNA, 43 bp, Homo sapiens; identical to SEQ ID NO: 86148
  chr13:107128749-107128792
  hypo

SEQ ID NO: 174189 - DNA, 2699 bp, Homo sapiens; identical to SEQ ID NO: 9472
  chr13:107186447-107189146
  hypo

SEQ ID NO: 174190 - DNA, 30 bp, Homo sapiens
  chr13:107225775-107225805
  hypo
gagcacatgatgggacgcggtcaacaaaac

SEQ ID NO: 174191 - DNA, 53 bp, Homo sapiens; identical to SEQ ID NO: 86150
  chr13:107229931-107229984
  hypo

SEQ ID NO: 174192 - DNA, 169 bp, Homo sapiens; identical to SEQ ID NO: 86151
  chr13:107248707-107248876
  hypo

SEQ ID NO: 174193 - DNA, 30 bp, Homo sapiens
  chr13:107823540-107823570
  hypo
agcaacagatcataacgtcatagctctagg

SEQ ID NO: 174194 - DNA, 31 bp, Homo sapiens; identical to SEQ ID NO: 27206
  chr13:108210141-108210172
  hypo

SEQ ID NO: 174195 - DNA, 256 bp, Homo sapiens; identical to SEQ ID NO: 9475
  chr13:108518444-108518700
  hypo

SEQ ID NO: 174196 - DNA, 1037 bp, Homo sapiens; identical to SEQ ID NO: 50876
  chr13:108518708-108519745
  hypo

SEQ ID NO: 174197 - DNA, 195 bp, Homo sapiens; identical to SEQ ID NO: 9478
  chr13:108519901-108520096
  hypo

SEQ ID NO: 174198 - DNA, 225 bp, Homo sapiens; identical to SEQ ID NO: 9479
  chr13:108520309-108520534
  hypo

SEQ ID NO: 174199 - DNA, 124 bp, Homo sapiens; identical to SEQ ID NO: 50879
  chr13:108520701-108520825
  hypo

SEQ ID NO: 174200 - DNA, 168 bp, Homo sapiens; identical to SEQ ID NO: 50880
  chr13:108520915-108521083
  hypo

SEQ ID NO: 174201 - DNA, 41 bp, Homo sapiens
  chr13:108816274-108816315
  hypo
taaagaatttttttccggggcaggtgcggtgactcacactt

SEQ ID NO: 174202 - DNA, 38 bp, Homo sapiens; identical to SEQ ID NO: 86159
  chr13:108841824-108841862
  hypo

SEQ ID NO: 174203 - DNA, 84 bp, Homo sapiens; identical to SEQ ID NO: 9482
  chr13:109147713-109147797
  hypo

SEQ ID NO: 174204 - DNA, 124 bp, Homo sapiens; identical to SEQ ID NO: 9483
  chr13:109148154-109148278
  hypo

SEQ ID NO: 174205 - DNA, 31 bp, Homo sapiens; identical to SEQ ID NO: 86162
  chr13:109318504-109318535
  hypo

SEQ ID NO: 174206 - DNA, 30 bp, Homo sapiens
  chr13:109571814-109571844
  hypo
ggaatttggcgtgagcgattgtcgttaacc

SEQ ID NO: 174207 - DNA, 30 bp, Homo sapiens
  chr13:109779393-109779423
  hypo
atgatggatatcccgcgggctcatgtgctt

SEQ ID NO: 174208 - DNA, 286 bp, Homo sapiens
  chr13:109779668-109779954
  hypo
ctccatgtcagtctgcgcggccgtggatggcctgggccagtgcctcgttggcccgtccatctggtctccttcgctgcactcggtgttcagcatggatgacagcagcagcctcccgtctccacggaaacagcccccgcccaagccaaagagggaccccaacacccggctgagtgcttcctatgaggctgtgagcgcctgcctctccgcggccagggaagcggccaacgaaggtcagccctggggagggacccagcctcgtgttccgggctcgcgcatgctctgactt

SEQ ID NO: 174209 - DNA, 30 bp, Homo sapiens
  chr13:109792479-109792509
  hypo
ggaacatgcaggcccggtcccttgggattc

SEQ ID NO: 174210 - DNA, 45 bp, Homo sapiens; identical to SEQ ID NO: 27216
  chr13:109934404-109934449
  hypo

SEQ ID NO: 174211 - DNA, 117 bp, Homo sapiens; identical to SEQ ID NO: 86165
  chr13:109985084-109985201
  hypo

SEQ ID NO: 174212 - DNA, 30 bp, Homo sapiens; identical to SEQ ID NO: 86166
  chr13:109985621-109985651
  hypo

SEQ ID NO: 174213 - DNA, 210 bp, Homo sapiens
  chr13:110008367-110008577
  hypo
agaccagtaacaggacgggcatgctggcaccatggcggggcacgggagagcgcacgggagggcacggtactagagaagggtttctgctacattacccaggaagcctgcccttcacgcgtgtccctgccattgtgctgctccgaaaccgcacggctctcgaatgttaatgcctacctaattatatattttggcttccgttttggcaatagg

SEQ ID NO: 174214 - DNA, 30 bp, Homo sapiens; identical to SEQ ID NO: 27218
  chr13:110174216-110174246
  hypo

SEQ ID NO: 174215 - DNA, 30 bp, Homo sapiens
  chr13:110347946-110347976
  hypo
attggaaagatacatcggcagtgatgcagg

SEQ ID NO: 174216 - DNA, 30 bp, Homo sapiens; identical to SEQ ID NO: 27219
  chr13:110397628-110397658
  hypo

SEQ ID NO: 174217 - DNA, 178 bp, Homo sapiens
  chr13:110407324-110407502
  hypo
cgagggagcagaaaacggcagaacattctgccggtcaagttcagcagttttaggtaacatctgcgagaactgccacacactggtattttcagaatactgaaaacataaaacaagggtagtcttgtccggaattttttcgacaagtaacatgtactgcgagattgcttttcttcttttt

SEQ ID NO: 174218 - DNA, 205 bp, Homo sapiens
  chr13:110408017-110408222
  hypo
tgggctcggtgtggacgtaaacatcgcaggtacctgcactggaatccaacaagcagctgtctacttggaccatttcaataaggccgaggaccgcgctccagacacacagcgcaggggctactacaggaggtcctgtgggacccccgccacggaaatccggctttaccttgaactgaggtaggactgtggtcgttttgagtgtaag

SEQ ID NO: 174219 - DNA, 555 bp, Homo sapiens; identical to SEQ ID NO: 86171
  chr13:110424382-110424937
  hypo

SEQ ID NO: 174220 - DNA, 2107 bp, Homo sapiens; identical to SEQ ID NO: 9486
  chr13:110434418-110436525
  hypo

SEQ ID NO: 174221 - DNA, 1906 bp, Homo sapiens; identical to SEQ ID NO: 124084
  chr13:110438287-110440193
  hypo

SEQ ID NO: 174222 - DNA, 115 bp, Homo sapiens; identical to SEQ ID NO: 86174
  chr13:110486577-110486692
  hypo

SEQ ID NO: 174223 - DNA, 55 bp, Homo sapiens; identical to SEQ ID NO: 86175
  chr13:110525934-110525989
  hypo

SEQ ID NO: 174224 - DNA, 30 bp, Homo sapiens; identical to SEQ ID NO: 86176
  chr13:110709428-110709458
  hypo

SEQ ID NO: 174225 - DNA, 30 bp, Homo sapiens
  chr13:110772974-110773004
  hypo
gtgcacacattgtggcgtgtgcagggcaca

SEQ ID NO: 174226 - DNA, 284 bp, Homo sapiens; identical to SEQ ID NO: 86177
  chr13:110804669-110804953
  hypo

SEQ ID NO: 174227 - DNA, 30 bp, Homo sapiens
  chr13:110814457-110814487
  hypo
gcgcagtgtttcactcgctactgccctcac

SEQ ID NO: 174228 - DNA, 30 bp, Homo sapiens
  chr13:110830219-110830249
  hypo
tggtcctggtgagcccggctgcccgggggt

SEQ ID NO: 174229 - DNA, 30 bp, Homo sapiens
  chr13:110830527-110830557
  hypo
ccagtccagggaatccggggaaacccttct

SEQ ID NO: 174230 - DNA, 222 bp, Homo sapiens
  chr13:110831441-110831663
  hypo
ggagacccatgcacacgaatggccccagcaacggaaagccacgagctctaggcctctaagatttgcatcgttcgttcaacaaatacatatcaaatatactcggtaggggctctgggaatgcaaaaataagcacatcctgtcctcgaaaccctccagactgatctgcatgaagttacctctgatcccctgaagcccagggggtccgatcgctccatgttctcc

SEQ ID NO: 174231 - DNA, 30 bp, Homo sapiens
  chr13:110860737-110860767
  hypo
ggccctggacatgcccgcctctgagaagag

SEQ ID NO: 174232 - DNA, 30 bp, Homo sapiens; identical to SEQ ID NO: 27223
  chr13:110900678-110900708
  hypo

SEQ ID NO: 174233 - DNA, 131 bp, Homo sapiens; identical to SEQ ID NO: 9488
  chr13:110959517-110959648
  hypo

SEQ ID NO: 174234 - DNA, 390 bp, Homo sapiens; identical to SEQ ID NO: 9489
  chr13:110959752-110960142
  hypo

SEQ ID NO: 174235 - DNA, 840 bp, Homo sapiens; identical to SEQ ID NO: 50895
  chr13:110960344-110961184
  hypo

SEQ ID NO: 174236 - DNA, 66 bp, Homo sapiens; identical to SEQ ID NO: 86182
  chr13:110998868-110998934
  hypo

SEQ ID NO: 174237 - DNA, 78 bp, Homo sapiens
  chr13:110999280-110999358
  hypo
atcccctgcgcttatcgtggctcactgccaagtgcgaacacctgggtccacgcctccgcatgccgggcccgtgtgcac

SEQ ID NO: 174238 - DNA, 30 bp, Homo sapiens; identical to SEQ ID NO: 86183
  chr13:111005705-111005735
  hypo

SEQ ID NO: 174239 - DNA, 241 bp, Homo sapiens; identical to SEQ ID NO: 86184
  chr13:111006027-111006268
  hypo

SEQ ID NO: 174240 - DNA, 43 bp, Homo sapiens; identical to SEQ ID NO: 86185
  chr13:111087190-111087233
  hypo

SEQ ID NO: 174241 - DNA, 30 bp, Homo sapiens; identical to SEQ ID NO: 86186
  chr13:111096179-111096209
  hypo

SEQ ID NO: 174242 - DNA, 35 bp, Homo sapiens; identical to SEQ ID NO: 86187
  chr13:111109169-111109204
  hypo

SEQ ID NO: 174243 - DNA, 30 bp, Homo sapiens; identical to SEQ ID NO: 86188
  chr13:111109482-111109512
  hypo

SEQ ID NO: 174244 - DNA, 104 bp, Homo sapiens; identical to SEQ ID NO: 27227
  chr13:111122537-111122641
  hypo

SEQ ID NO: 174245 - DNA, 590 bp, Homo sapiens
  chr13:111127025-111127615
  hypo
acacgtacccacacacgtgcctgtgtacactcacatgatcacacacgcacgtacccacacacgtgccgtgcacactcacacatcacacacgcacgtacccacacacgtgcctgtgtacactcacacatgatcacacatgcacgtacccacacacgtgcctgtgcatgctcaaacatgatcacacactccatacacacacgtacccacacacgtgcctatgcacactcacgatcacacacatgcacatacccacacacgtgcctgtgcacacacgatcacacacacgtacatacccacacacgtgcctgtgcacactcacacatgatcgtacactcatacacacacgtacatacccactcgtgcctatgcacgctcacacatgatcacacactcacatacacacacgtgcctatgcatgctcacacatacacatccaaccctgaaccaagccagctagagcaggttgttgggtgaaattacgaggatggggaggcctcgtgctcggccatccagatctcccctttccagtcctactgactctccaggtcatttatggaagataagatgcaaatcagcgctgtctgcagaaa

SEQ ID NO: 174246 - DNA, 171 bp, Homo sapiens; identical to SEQ ID NO: 27228
  chr13:111135307-111135478
  hypo

SEQ ID NO: 174247 - DNA, 47 bp, Homo sapiens; identical to SEQ ID NO: 86192
  chr13:111144432-111144479
  hypo

SEQ ID NO: 174248 - DNA, 196 bp, Homo sapiens; identical to SEQ ID NO: 86193
  chr13:111145417-111145613
  hypo

SEQ ID NO: 174249 - DNA, 30 bp, Homo sapiens
  chr13:111152071-111152101
  hypo
aatcatagcggtttccgtctagattccagc

SEQ ID NO: 174250 - DNA, 30 bp, Homo sapiens
  chr13:111156923-111156953
  hypo
acaagagccgcactgcgaagccctgtctta

SEQ ID NO: 174251 - DNA, 30 bp, Homo sapiens
  chr13:111157228-111157258
  hypo
acaggtgtaagtcaccgtgcctggtcgtct

SEQ ID NO: 174252 - DNA, 192 bp, Homo sapiens; identical to SEQ ID NO: 86194
  chr13:111168952-111169144
  hypo

SEQ ID NO: 174253 - DNA, 31 bp, Homo sapiens; identical to SEQ ID NO: 86195
  chr13:111171237-111171268
  hypo

SEQ ID NO: 174254 - DNA, 31 bp, Homo sapiens; identical to SEQ ID NO: 86196
  chr13:111171957-111171988
  hypo

SEQ ID NO: 174255 - DNA, 829 bp, Homo sapiens; identical to SEQ ID NO: 50897
  chr13:111213551-111214380
  hypo

SEQ ID NO: 174256 - DNA, 344 bp, Homo sapiens; identical to SEQ ID NO: 124094
  chr13:111267964-111268308
  hypo

SEQ ID NO: 174257 - DNA, 1310 bp, Homo sapiens
  chr13:111277408-111278718
  hypo
aatccgagctagtacgtttctcatgcacgtcaccagggctgagtaatgagcgctggacgcctgtgtctggcgggtgggcagcgatgccggagcgatccctgagtcggcctcttgtgctccttcatcagggcgcagacttgtcccacgtgttctgtgccagtgcggccgcacctgtgattaaggcctacagcccggagctgatcgtccacccagttctgtgagtcgctctgcgccggcttctcgtaggttctctttccctcctgcatcatttggggttttggcactgacaccgaaagcgtcctgatggattttccatcctcagagtttctcagcaggtgctgtagaggaagtagggaaatgaaggagcccgttcttctggggtcagaataagacagagacggcggggtggagaggtgggtgggggagcttgggcctgttggaaatggccggggcccagctccagaggcagggaggccctgtgggctgtgtgtgacaggtttgcagaaggtggaaacgaagggcctctgagcaataacaagacccttcctgcactcggcacatatgtctggtgccaggccctagcctgtgttccatgggtcagcgtggaactgggcaggcaaaaacctgcccccgtggggctcccccagaccgcctatgctatagagcttgctgtgtggaggtgttctctctgccgtccaggattgtggccactgagggcttgaaatgtggctgggaggtgcgggagcagagcgtttgctcttgtttacttttcattgtgtgtgtttgcaccgactggattgggctgtgctgctctggagacaagggagaggaggatgtcaggtggtgaaggaaccgtagagagcggcagcagggagggggctgtgagagtgggcagaggggcagttggggcggcagcacagtgtgatgacgcctgggtcgagcccggcctctccacaccagagaggagccggcgcggagctccaggtgcggtgctgtgatgtgtcgggtgaccaagaggtgcagggctgggccccacagggtgtggggctgctgtcagggctgtggctctggccctgagtaagcagggcagggccagtgtgggtcataaaggctcctacgcggctgtggggctgggccggaggctgtggtaaggacctgtgggagggaagggtgcagtcagatggtgagaggggccggattctgggtatgtttggaaagtttgggggtggaatttgccgacagattggattggaaaaggcaaggggcacagactccaccaagggttttggtctgagcgagtggtcactcca

SEQ ID NO: 174258 - DNA, 187 bp, Homo sapiens
  chr13:111279859-111280046
  hypo
tgggtagagatgatgcgcttctcagaaatgtccaggtaatgtgtatactcactcacttccctcatgacaggcttagccttaggcgtgaagttggaacagaggcatttctcttgcattttgtgtagtgttccgtgtgcctctttgtggcatgattgagataagatttgagggacggaggagaaactga

SEQ ID NO: 174259 - DNA, 190 bp, Homo sapiens
  chr13:111280868-111281058
  hypo
gggtctctgaggctgcggggcttgaaggcggcgagtgatggagccagcagtgcaggatgagtcatctgaggggcaggcagacgcaggctgacactgcacagaccaggaaaagcggcgtggagtcagcacgggagcccgtctttgagctttaaggtcttacccgctcaccgggaaggaggaggtggccatg

SEQ ID NO: 174260 - DNA, 30 bp, Homo sapiens; identical to SEQ ID NO: 86202
  chr13:111281309-111281339
  hypo

SEQ ID NO: 174261 - DNA, 30 bp, Homo sapiens; identical to SEQ ID NO: 27235
  chr13:111287102-111287132
  hypo

SEQ ID NO: 174262 - DNA, 175 bp, Homo sapiens; identical to SEQ ID NO: 86204
  chr13:111288423-111288598
  hypo

SEQ ID NO: 174263 - DNA, 260 bp, Homo sapiens; identical to SEQ ID NO: 86205
  chr13:111289025-111289285
  hypo

SEQ ID NO: 174264 - DNA, 283 bp, Homo sapiens; identical to SEQ ID NO: 86206
  chr13:111290652-111290935
  hypo

SEQ ID NO: 174265 - DNA, 30 bp, Homo sapiens; identical to SEQ ID NO: 86207
  chr13:111294558-111294588
  hypo

SEQ ID NO: 174266 - DNA, 227 bp, Homo sapiens; identical to SEQ ID NO: 27239
  chr13:111294869-111295096
  hypo

SEQ ID NO: 174267 - DNA, 195 bp, Homo sapiens; identical to SEQ ID NO: 86209
  chr13:111295805-111296000
  hypo

SEQ ID NO: 174268 - DNA, 200 bp, Homo sapiens; identical to SEQ ID NO: 86210
  chr13:111301302-111301502
  hypo

SEQ ID NO: 174269 - DNA, 30 bp, Homo sapiens; identical to SEQ ID NO: 86211
  chr13:111303408-111303438
  hypo

SEQ ID NO: 174270 - DNA, 30 bp, Homo sapiens; identical to SEQ ID NO: 86212
  chr13:111303774-111303804
  hypo

SEQ ID NO: 174271 - DNA, 290 bp, Homo sapiens; identical to SEQ ID NO: 27241
  chr13:111305193-111305483
  hypo

SEQ ID NO: 174272 - DNA, 588 bp, Homo sapiens; identical to SEQ ID NO: 86214
  chr13:111305919-111306507
  hypo

SEQ ID NO: 174273 - DNA, 31 bp, Homo sapiens; identical to SEQ ID NO: 27244
  chr13:111307807-111307838
  hypo

SEQ ID NO: 174274 - DNA, 30 bp, Homo sapiens
  chr13:111314692-111314722
  hypo
ccatggccaggctccgaccccactgcatac

SEQ ID NO: 174275 - DNA, 289 bp, Homo sapiens
  chr13:111330262-111330551
  hypo
cccccaccagggaaatccagccggccaccccggtggaagcccctccagccgccagtgggcagcacgccccaggctgtgtctcttcgaaggagccttggcttctcgttcactcctgtttcacccacgtgagggacaggagcaccggcaacgctttcacctcagatgcaccagcgcacagggagagctgggcggccgggaacccacagaggctcatttctcaggaatgtactgtggaccaggtggggttttcccatttttccttattctgtcttacgagaaatactctgct

SEQ ID NO: 174276 - DNA, 196 bp, Homo sapiens; identical to SEQ ID NO: 86217
  chr13:111334623-111334819
  hypo

SEQ ID NO: 174277 - DNA, 143 bp, Homo sapiens
  chr13:111337749-111337892
  hypo
gatcctcagggcctcacgtgctcatcttacgctccaagtaggacccaggaaggacaggaacgtccagggcagtgcttcatgctttctgactcattgcaacaaacattcaatacctacgtatcttcagccgtcggctggatact

SEQ ID NO: 174278 - DNA, 30 bp, Homo sapiens
  chr13:111340335-111340365
  hypo
actggcgagggaagcgggggaaatattcat

SEQ ID NO: 174279 - DNA, 38 bp, Homo sapiens
  chr13:111363565-111363603
  hypo
tttttctctttttttccggagatagtcttgctctgtcg

SEQ ID NO: 174280 - DNA, 277 bp, Homo sapiens
  chr13:111363842-111364119
  hypo
gagccaccgcgtccggccaagtgttatagtcttttgtgcagaccaagtagtggccaataaatcttgtagaaactaaagtactcatttgcttttaactaggccaagactagaatagcgtgatctgtaagtaaaataacagccatttccccaaatatcaaagccaaagctctcctgctgtgtaggtgagatgaaggggcttaaaagtgaagattaaatccacttcaaagtgtaaagagtatccatccatttatcattgcagcaacgttgcaacgtgaac

SEQ ID NO: 174281 - DNA, 31 bp, Homo sapiens; identical to SEQ ID NO: 27247
  chr13:111409606-111409637
  hypo

SEQ ID NO: 174282 - DNA, 30 bp, Homo sapiens; identical to SEQ ID NO: 86221
  chr13:111468879-111468909
  hypo

SEQ ID NO: 174283 - DNA, 31 bp, Homo sapiens; identical to SEQ ID NO: 27248
  chr13:111481866-111481897
  hypo

SEQ ID NO: 174284 - DNA, 80 bp, Homo sapiens
  chr13:111589025-111589105
  hypo
gctccaggcgcaggcggcggaagcgcgtgtctccaggtcgtcgcgtcgggctcctgggatttggcggcaactgtgggagg

SEQ ID NO: 174285 - DNA, 30 bp, Homo sapiens
  chr13:111600353-111600383
  hypo
tctggacggggctcccgtggagctcaggcg

SEQ ID NO: 174286 - DNA, 356 bp, Homo sapiens; identical to SEQ ID NO: 27249
  chr13:111682504-111682860
  hypo

SEQ ID NO: 174287 - DNA, 48 bp, Homo sapiens; identical to SEQ ID NO: 86225
  chr13:111738320-111738368
  hypo

SEQ ID NO: 174288 - DNA, 103 bp, Homo sapiens
  chr13:111747876-111747979
  hypo
attcagatcagtgttcgtgtttgaagagagtcaccgtcctgccatgggaaacacttgcatcgtcttccaaccttgacaggattacgcgcgctcctggaccgca

SEQ ID NO: 174289 - DNA, 168 bp, Homo sapiens
  chr13:111773928-111774096
  hypo
ggcttgacgcccacgcgtctctcactgcacgagggaggtggcagaggcacatcatccctttgggcacgcaactctaccacgtgcatcgctgggagatgggaggactggcatcccccgaacccacgggtccctgcctggagacactgggagacccggtcctctgcgtgc

SEQ ID NO: 174290 - DNA, 30 bp, Homo sapiens
  chr13:111865777-111865807
  hypo
tacatggaacattcccgtgtaagcacccag

SEQ ID NO: 174291 - DNA, 1050 bp, Homo sapiens
  chr13:111880804-111881854
  hypo
agaacacggcgggagcggatgaggcaggctcgatgctgaggactgctaacactgttaagagtctatacgtggtcattctctgtatgtttatgtatatttttaagtttctaaaagtttgggaaaaagtaatggcacaattataacattttcgaacaaagatcgagcgtcttagcagatcatcccttgaacaactcggaggacgtcacctgacaggagggtgcatgtggttcaggaaagcggcaggcagacactgctgagcacgggcagacacacacagacattgactctgtgaactctgagtgcgtgagtaacagccaacaaaccacgcacagagccccagcacagaaggtcggaagaggacgtgggaattccgagtttttcagggccatgtctgctctggtggttgaagccagcggtgatgattaactctggactttgctgggttggtgacacgtcacaaatgaaagcgtaaccactgaaacagagggaagcggctgggtggcttccagtcaagcggaagaggcaagtgaggactcacagaagtgtgttcttctcaaaagaggcagaaattcccagccctgtgatggtggagctgcctcggagtggggagggcattgcacctggctccccggacctggccctcgcccagctgtgcagcgttcctgtgtgtcttggtggactctggttttgctcggggctggctgtgcttcctcagcccaaggaatccagagctcttcagttccagaaaggatcttctcaaggactacttccagctcactccctgatttttctcctgaatatcttactagatgtcttattttgccctctgttttaatccgcgtattttaatctactttgcgtatctgtttgtttcactgtgctgtattatctattcctctgcctgtcagttcattaattccctcctcacggtgatactaacctgtttgtggagatttccattttagtgaccatatttatttgtagaagttttgctgcgcttcagatgttttcagtcttcatggcgccttttttattcgtcgtgattggtcc

SEQ ID NO: 174292 - DNA, 138 bp, Homo sapiens
  chr13:111884808-111884946
  hypo
ccatagagctgatgacgggcatgcatggtgccaggttttgtttggcaggtgtttcttcggcaggtgtttcttcagcacctgttatgcagagtaagtgtgtgttgaatggatgtggagtgaaagcggtgctgttttaaa

SEQ ID NO: 174293 - DNA, 30 bp, Homo sapiens
  chr13:111885288-111885318
  hypo
gagcagtctcttagacgccttcaacttgaa

SEQ ID NO: 174294 - DNA, 30 bp, Homo sapiens
  chr13:111894340-111894370
  hypo
tggtggctggcatcacggtttacctctgct

SEQ ID NO: 174295 - DNA, 22 bp, Homo sapiens
  chr13:111899889-111899911
  hypo
ttacaggcgtgagcaaccacgc

SEQ ID NO: 174296 - DNA, 103 bp, Homo sapiens; identical to SEQ ID NO: 86229
  chr13:111911429-111911532
  hypo

SEQ ID NO: 174297 - DNA, 241 bp, Homo sapiens
  chr13:111932739-111932980
  hypo
gaggcagcttgtccccgcgtgcagattcttgcttgcgtatttcagaaggtggtgtttaagcgctgagtggaattctggggggtgtgcacgcacgtgctttttacctgtgtttccactcggcctattttttccttctctcctatagggagcatgattgagcggatattagtgtcgtgcaacaaccagcaggatctgcaggaatgggtggagcacctacagaagcaaacgaaggtcacgtctg

SEQ ID NO: 174298 - DNA, 254 bp, Homo sapiens; identical to SEQ ID NO: 86230
  chr13:111935986-111936240
  hypo

SEQ ID NO: 174299 - DNA, 30 bp, Homo sapiens; identical to SEQ ID NO: 86231
  chr13:111936479-111936509
  hypo

SEQ ID NO: 174300 - DNA, 30 bp, Homo sapiens; identical to SEQ ID NO: 86232
  chr13:111937037-111937067
  hypo

SEQ ID NO: 174301 - DNA, 151 bp, Homo sapiens
  chr13:111937756-111937907
  hypo
tatcggtatttaacacgtgcttgacagttgacaccttacctgctctgttgggacttgctttgctcactttgttttttgccgtcgtcttctgtgcttgtttgaaaagctgtttgaagaggtaaggggtgggccattccgttgtgaacactct

SEQ ID NO: 174302 - DNA, 30 bp, Homo sapiens
  chr13:111939750-111939780
  hypo
tgcagctgagaccatcgttcatggacgcgt

SEQ ID NO: 174303 - DNA, 106 bp, Homo sapiens
  chr13:111940173-111940279
  hypo
acaagatgatgggcccgggttttcacaggaccacgggctgccgtgtggggaacagacaggcacggatggccacgtcgacactgagagttgtcggccttttgttttc

SEQ ID NO: 174304 - DNA, 43 bp, Homo sapiens; identical to SEQ ID NO: 86234
  chr13:111943423-111943466
  hypo

SEQ ID NO: 174305 - DNA, 30 bp, Homo sapiens; identical to SEQ ID NO: 86235
  chr13:111944542-111944572
  hypo

SEQ ID NO: 174306 - DNA, 30 bp, Homo sapiens
  chr13:111954848-111954878
  hypo
acgctttgcccctaccggcagcaggcatct

SEQ ID NO: 174307 - DNA, 30 bp, Homo sapiens
  chr13:111955210-111955240
  hypo
cccataggcagctcacgtgggatttcatga

SEQ ID NO: 174308 - DNA, 30 bp, Homo sapiens
  chr13:111955951-111955981
  hypo
caccagggcctccaccgtgctgtggcagca

SEQ ID NO: 174309 - DNA, 30 bp, Homo sapiens; identical to SEQ ID NO: 86236
  chr13:111957372-111957402
  hypo

SEQ ID NO: 174310 - DNA, 30 bp, Homo sapiens
  chr13:111957833-111957863
  hypo
ttcacactcagtggcgtctgtgcttgtcca

SEQ ID NO: 174311 - DNA, 102 bp, Homo sapiens
  chr13:111967885-111967987
  hypo
cagtgcacccgcctgcggcctcccccagcccctcctccctggccccgccctgctgagtcctgcagggcccccgtgcttcactagccccgcttttggacaccc

SEQ ID NO: 174312 - DNA, 99 bp, Homo sapiens
  chr13:111978023-111978122
  hypo
cgtgcaggaaaataacggtgggtgtggagggaaaatgggacaccggaggaggcgcgggaggactgccgggattcgacggctgggcggtcagatgcgatg

SEQ ID NO: 174313 - DNA, 30 bp, Homo sapiens
  chr13:111978481-111978511
  hypo
gatggggtggaagagcgttcgggcatcacg

SEQ ID NO: 174314 - DNA, 30 bp, Homo sapiens
  chr13:111979968-111979998
  hypo
tcctctggaaagggtcgtctgccaggagct

SEQ ID NO: 174315 - DNA, 33 bp, Homo sapiens
  chr13:111980234-111980267
  hypo
gtgggctctgtcgtgcgccgtgcctggcgctgc

SEQ ID NO: 174316 - DNA, 187 bp, Homo sapiens
  chr13:111980477-111980664
  hypo
agagtggctttgttttcgggggtgacacttgtgtatgtctgtgcttttgcagtgtgtgacgttcctctgtatgacatttgtgactacaacgtctccagggaccgatgccaggagctcgggtgctgcttctacgaaggcgtctgctacaagaaagcggttcccagtgagtagacgccccggccacccc

SEQ ID NO: 174317 - DNA, 30 bp, Homo sapiens
  chr13:111996962-111996992
  hypo
cagtcccagagtggccgacagatgctcaca

SEQ ID NO: 174318 - DNA, 144 bp, Homo sapiens
  chr13:111997477-111997621
  hypo
gaaggcagacaccgacgatgcctccaggaaggacgtggccttgctccaaaaagactttcttatggaagccagtgacgggctggacgctgcctacaagctgtagtcggtaaacccccaggctagagatgttagaaatgtgttttg

SEQ ID NO: 174319 - DNA, 31 bp, Homo sapiens; identical to SEQ ID NO: 27256
  chr13:111999133-111999164
  hypo

SEQ ID NO: 174320 - DNA, 201 bp, Homo sapiens
  chr13:112022970-112023171
  hypo
tcggccaggagaagccgtgcaggctggttcccgagtctctcgggcacgtcgccatcattctccgaggatgttcctgctttgtgacaccacgcaacatcccacgtccttcccagccctggggttctccgtccctgcagggagccctggttcctgtcagtggtgcctcctttatccccaaatttgagacgctggctccggcca

SEQ ID NO: 174321 - DNA, 30 bp, Homo sapiens
  chr13:112036579-112036609
  hypo
gctctaagcaggaggcgctttctgctgctg

SEQ ID NO: 174322 - DNA, 57 bp, Homo sapiens; identical to SEQ ID NO: 27257
  chr13:112051222-112051279
  hypo

SEQ ID NO: 174323 - DNA, 210 bp, Homo sapiens
  chr13:112062636-112062846
  hypo
accagggccctccgccgcaccgcgcaggtgcggggcaggcacatccgcctccgggcccctgggctattgtttgctggtacagactttttttccactttaaaattgtgaagatgaaaacctattctggcgtggggtaaagattctccacagagcccgagtcaagtccaacgacgaccaccctgacagctcttggcgcgcagcgtggggtgt

SEQ ID NO: 174324 - DNA, 30 bp, Homo sapiens
  chr13:112168099-112168129
  hypo
gacctgctgctggcccggctgtccctcgaa

SEQ ID NO: 174325 - DNA, 82 bp, Homo sapiens; identical to SEQ ID NO: 86243
  chr13:112170645-112170727
  hypo

SEQ ID NO: 174326 - DNA, 1009 bp, Homo sapiens; identical to SEQ ID NO: 86244
  chr13:112199982-112200991
  hypo

SEQ ID NO: 174327 - DNA, 30 bp, Homo sapiens; identical to SEQ ID NO: 86245
  chr13:112238783-112238813
  hypo

SEQ ID NO: 174328 - DNA, 30 bp, Homo sapiens
  chr13:112239327-112239357
  hypo
gaaacacgtgtatttcggcgtatcgtgtac

SEQ ID NO: 174329 - DNA, 30 bp, Homo sapiens
  chr13:112239769-112239799
  hypo
actgccgctggcgtccgcatgcacccctcc

SEQ ID NO: 174330 - DNA, 66 bp, Homo sapiens; identical to SEQ ID NO: 27259
  chr13:112273029-112273095
  hypo

SEQ ID NO: 174331 - DNA, 199 bp, Homo sapiens
  chr13:112274813-112275012
  hypo
ctcagtgaggagcaccggcgagaggaggccgctgtgcctcccaggttctcccggttctgcagcccagccttcacctgttctcaggccacagccaagctgctgaattcctggcatgttttgcttgcttccacctgggactgaaattttaaacacttgacctccatcctccttaaattcacacatcatgcaacgtgtctta

SEQ ID NO: 174332 - DNA, 283 bp, Homo sapiens; identical to SEQ ID NO: 86248
  chr13:112275479-112275762
  hypo

SEQ ID NO: 174333 - DNA, 123 bp, Homo sapiens; identical to SEQ ID NO: 86249
  chr13:112297654-112297777
  hypo

SEQ ID NO: 174334 - DNA, 386 bp, Homo sapiens; identical to SEQ ID NO: 86250
  chr13:112320936-112321322
  hypo

SEQ ID NO: 174335 - DNA, 305 bp, Homo sapiens; identical to SEQ ID NO: 86251
  chr13:112321605-112321910
  hypo

SEQ ID NO: 174336 - DNA, 30 bp, Homo sapiens; identical to SEQ ID NO: 86252
  chr13:112323107-112323137
  hypo

SEQ ID NO: 174337 - DNA, 180 bp, Homo sapiens; identical to SEQ ID NO: 86253
  chr13:112334237-112334417
  hypo

SEQ ID NO: 174338 - DNA, 88 bp, Homo sapiens; identical to SEQ ID NO: 86254
  chr13:112336760-112336848
  hypo

SEQ ID NO: 174339 - DNA, 30 bp, Homo sapiens
  chr13:112348811-112348841
  hypo
tgtgtgtgcgtgcatcggagagttgcggca

SEQ ID NO: 174340 - DNA, 30 bp, Homo sapiens
  chr13:112517192-112517222
  hypo
agagcagcccgattgcggctggcgtgtgcc

SEQ ID NO: 174341 - DNA, 30 bp, Homo sapiens
  chr13:112517475-112517505
  hypo
tttttatccaatgcacgctggtccccgccg

SEQ ID NO: 174342 - DNA, 294 bp, Homo sapiens; identical to SEQ ID NO: 86255
  chr13:112559679-112559973
  hypo

SEQ ID NO: 174343 - DNA, 51 bp, Homo sapiens; identical to SEQ ID NO: 86256
  chr13:112573543-112573594
  hypo

SEQ ID NO: 174344 - DNA, 661 bp, Homo sapiens
  chr13:112610838-112611499
  hypo
atgcagcattcctgctaaaggcgggcgggaagctgtgaaaggcgtggaggccgcaggccccgaccactcgcgaaagtagcgtctgtgctgtttaagcctgcgggggaagaagtggaggccgtggaggggtgcgggggctgtgtgtgcgtttggggcggtttgggggatgagaacagcaggaactcgtcgcgcccgcatctggggtcggaaatggttgtcttcagagacaatcgtgctgtaccacgggcgcaccaggcaggctcacggtcctcctcatgccacagaaggttggggcttcttccagtctctttaggaaacgtaataatgcctgcataatcttaacgcttgttccaaaaaccgtggctcctgaccaagctctaccgttcaacccatgggccgtggcgcaggtctgtgtgagcggggacaccccctgtcctggtcgtgcccgtcgcggttatgcattgctggtagacctcgtcctcagcacccaggcagccctggtcaggctttgtccaacgtgaaccgtttgctgccgcagaggtgccgaacgtcaggcttagcaagactcgaaatgaagtcagttgttttcatcgcggcatgaacacctacctgagtcctcccgtaactcagcctgggcctgtgaagacgtgtgctaattcgt

SEQ ID NO: 174345 - DNA, 276 bp, Homo sapiens; identical to SEQ ID NO: 27262
  chr13:112618853-112619129
  hypo

SEQ ID NO: 174346 - DNA, 122 bp, Homo sapiens
  chr13:112620244-112620366
  hypo
ccgggctctgccccacggggttccggctctgcacccagccccgccctgctctgtggcccacacggcggcgattacctgctggaaaggggaccaagggaaggaaagagcgtgaaggcctgaag

SEQ ID NO: 174347 - DNA, 30 bp, Homo sapiens
  chr13:112624651-112624681
  hypo
acgtgatggaaggtgcgtcccgagctgcag

SEQ ID NO: 174348 - DNA, 83 bp, Homo sapiens
  chr13:112625060-112625143
  hypo
ccacttgggacacagcgaggccttggtgcatccttgcaagccaccaggagcactggagtcatatcctgcgccacagacacagc

SEQ ID NO: 174349 - DNA, 30 bp, Homo sapiens
  chr13:112635070-112635100
  hypo
tgtcgcacccctgcacgccgtcccaccctg

SEQ ID NO: 174350 - DNA, 175 bp, Homo sapiens; identical to SEQ ID NO: 86258
  chr13:112668108-112668283
  hypo

SEQ ID NO: 174351 - DNA, 151 bp, Homo sapiens
  chr13:112679893-112680044
  hypo
gtccatgttcttggatgacaccggcaaaagtgctggggcaaggggccctgattccatggtttgctctcagacgggttagcaagcagtggatccaaaacgaaacttcacgcatgtacatacacgcacatatagagagcgagagaatacagat

SEQ ID NO: 174352 - DNA, 91 bp, Homo sapiens; identical to SEQ ID NO: 86259
  chr13:112682966-112683057
  hypo

SEQ ID NO: 174353 - DNA, 284 bp, Homo sapiens; identical to SEQ ID NO: 86260
  chr13:112690615-112690899
  hypo

SEQ ID NO: 174354 - DNA, 226 bp, Homo sapiens; identical to SEQ ID NO: 86261
  chr13:112691505-112691731
  hypo

SEQ ID NO: 174355 - DNA, 371 bp, Homo sapiens; identical to SEQ ID NO: 124112
  chr13:112708307-112708678
  hypo

SEQ ID NO: 174356 - DNA, 47 bp, Homo sapiens; identical to SEQ ID NO: 124114
  chr13:112710205-112710252
  hypo

SEQ ID NO: 174357 - DNA, 116 bp, Homo sapiens; identical to SEQ ID NO: 124115
  chr13:112710359-112710475
  hypo

SEQ ID NO: 174358 - DNA, 203 bp, Homo sapiens; identical to SEQ ID NO: 124116
  chr13:112710635-112710838
  hypo

SEQ ID NO: 174359 - DNA, 250 bp, Homo sapiens; identical to SEQ ID NO: 124117
  chr13:112711043-112711293
  hypo

SEQ ID NO: 174360 - DNA, 1512 bp, Homo sapiens; identical to SEQ ID NO: 124118
  chr13:112711375-112712887
  hypo

SEQ ID NO: 174361 - DNA, 128 bp, Homo sapiens; identical to SEQ ID NO: 50922
  chr13:112722274-112722402
  hypo

SEQ ID NO: 174362 - DNA, 384 bp, Homo sapiens; identical to SEQ ID NO: 124128
  chr13:112722597-112722981
  hypo

SEQ ID NO: 174363 - DNA, 293 bp, Homo sapiens; identical to SEQ ID NO: 124131
  chr13:112726435-112726728
  hypo

SEQ ID NO: 174364 - DNA, 379 bp, Homo sapiens; identical to SEQ ID NO: 50925
  chr13:112726796-112727175
  hypo

SEQ ID NO: 174365 - DNA, 41 bp, Homo sapiens; identical to SEQ ID NO: 50926
  chr13:112727837-112727878
  hypo

SEQ ID NO: 174366 - DNA, 239 bp, Homo sapiens; identical to SEQ ID NO: 50927
  chr13:112727961-112728200
  hypo

SEQ ID NO: 174367 - DNA, 115 bp, Homo sapiens; identical to SEQ ID NO: 124135
  chr13:112728335-112728450
  hypo

SEQ ID NO: 174368 - DNA, 30 bp, Homo sapiens
  chr13:112774006-112774036
  hypo
cacatgactgagacacgcacatgactgaga

SEQ ID NO: 174369 - DNA, 30 bp, Homo sapiens
  chr13:112780817-112780847
  hypo
tgcggccccaaaactcgtatgttgaaatcc

SEQ ID NO: 174370 - DNA, 183 bp, Homo sapiens; identical to SEQ ID NO: 86272
  chr13:112786385-112786568
  hypo

SEQ ID NO: 174371 - DNA, 198 bp, Homo sapiens
  chr13:112804753-112804951
  hypo
aagtccttcagctcccacatccggctcggagtgctcctgggtctaaaattccttggaaccacttgcaaacgttttctacttcaggcaatggtcacattcacattccttaagaagatggggatggagtccttcctgccccaccccaccccaacacccacacaccacacacacgcacggcaagcacacacatacacacac

SEQ ID NO: 174372 - DNA, 138 bp, Homo sapiens; identical to SEQ ID NO: 86274
  chr13:112805010-112805148
  hypo

SEQ ID NO: 174373 - DNA, 30 bp, Homo sapiens
  chr13:112805398-112805428
  hypo
cacccacggcaagcgcgcacacacacaccc

SEQ ID NO: 174374 - DNA, 64 bp, Homo sapiens; identical to SEQ ID NO: 86275
  chr13:112841712-112841776
  hypo

SEQ ID NO: 174375 - DNA, 217 bp, Homo sapiens; identical to SEQ ID NO: 86276
  chr13:112882620-112882837
  hypo

SEQ ID NO: 174376 - DNA, 479 bp, Homo sapiens
  chr13:112885757-112886236
  hypo
ctgtattgtccgaaacgccctgctgggaggaggtgaaggacccacgccactctcaaggagtcagacttcaccagcaatgtcgccttccatcgtgggtggcacctggagaggaatgcagacaactccaagcaagttcagagaaagacgatcaagacaccgagaagacatggcattgcctcgggtgaaaggcagcggaagagactgggttccatgagaagagaatatcattgtcctcagatgctgggacacctcttgtgggaagatgagccagtgctgctcctcaaagcccaggggaggagaagtgccgtgccagcgggtgagagtcgcagagatggcattcctgctcagccagaggaggcagacgccggaggaagagggaaacctcaggacaggctgtgttcacctttagcaggctcagaccacgcatctaaaaagactgttatccgaaaagtgtgtgtgccctgcgtgtaagtcatgac

SEQ ID NO: 174377 - DNA, 233 bp, Homo sapiens; identical to SEQ ID NO: 86277
  chr13:112887633-112887866
  hypo

SEQ ID NO: 174378 - DNA, 148 bp, Homo sapiens
  chr13:112901217-112901365
  hypo
tcactgtaaagctgacggcaggaggccacaggaccagacgcgcctggagtgtgtgtgtccaggcccatgcgggctccctctttgctcctgtcattgggaccccacacattttatgccccagccctcctttgaccgcagaccccaaggt

SEQ ID NO: 174379 - DNA, 153 bp, Homo sapiens; identical to SEQ ID NO: 86278
  chr13:112904338-112904491
  hypo

SEQ ID NO: 174380 - DNA, 250 bp, Homo sapiens
  chr13:112906487-112906737
  hypo
ctctctgcaagccaacgcagagaagtgagttagctactctcacccacagagtggacagagactagaccgggcattaaggagcccaggatttcgggtctgactttgctgttaactcaagtggagcctggcaagctgggcatcagcccgggctctcattccagggacaggcactgctacggacccaggtccgcccgggctctcattccagggacaggcactgcgacggacccaggtccgcccgggctctcat

SEQ ID NO: 174381 - DNA, 30 bp, Homo sapiens
  chr13:112907262-112907292
  hypo
aggccggcctcccgtcgtgagtcctgcagc

SEQ ID NO: 174382 - DNA, 30 bp, Homo sapiens
  chr13:112910039-112910069
  hypo
tcacccttgagtctccgtcacccaaccctg

SEQ ID NO: 174383 - DNA, 163 bp, Homo sapiens; identical to SEQ ID NO: 27270
  chr13:112998005-112998168
  hypo

SEQ ID NO: 174384 - DNA, 46 bp, Homo sapiens; identical to SEQ ID NO: 86280
  chr13:113008185-113008231
  hypo

SEQ ID NO: 174385 - DNA, 53 bp, Homo sapiens; identical to SEQ ID NO: 86281
  chr13:113086507-113086560
  hypo

SEQ ID NO: 174386 - DNA, 31 bp, Homo sapiens; identical to SEQ ID NO: 27271
  chr13:113097958-113097989
  hypo

SEQ ID NO: 174387 - DNA, 628 bp, Homo sapiens
  chr13:113098819-113099447
  hypo
agactggggtttggggtcaagcgggggtctgggaccgtgcctcaccacgggatctgtgtacacagcgatgcacccagcgtacgcgggcccttccctctgagccctcggcccctcatctgcaggatgggtgagccctggagaagcgggcagaagcagaggaggcagcgaacgcagagcatgtggcctgtgactgagcctagaaagtccgctcggcaacagaggctgcaatccagaaagccccctcggtgacagaggctacaatctagaaagctcgctcagcgacagaggctaccacctagaaagcctgctcggcgacagacactacaatctagacagcccatttggcgacagtggctacaacccagacagcccgctcagcaacagtgtctatgatctagaaagctccctcggcaacagcagctgtcatctagaaagcccgctcagcgacagaggccacaatctagaaagcctcctcagcgacagcggctgcgacccagaaagccctctcagtgacagtggctatgatcgctcgcaactctggcccctggctctgttggtcaagcctgccacagcccggaagcctctgcagcctccctgttgctgctgaaaaggacgctggttggagaag

SEQ ID NO: 174388 - DNA, 30 bp, Homo sapiens
  chr13:113099909-113099939
  hypo
tcaaggtccgctccccgtgccctgcccgcc

SEQ ID NO: 174389 - DNA, 30 bp, Homo sapiens
  chr13:113105947-113105977
  hypo
gtgactccatgtcccgggactggcggaggc

SEQ ID NO: 174390 - DNA, 295 bp, Homo sapiens
  chr13:113107701-113107996
  hypo
cacagcacggagccccgcctgacgccgcggtcgcttgacttcacaatcacaggagcgtgacgcctacagcctaatgttgccgtgtagggcacagacttcttaaaaagaatcttcaggggatgtcgccaggtgatggcgggaatcctcagtgagagggtgaggccaccggggctgctgtgtccgcagatgtggtgccacctccgagggcctccaagggtgcatgtgagccacagtcaccaccacagtgcgccgacgaccgccacagaaacagccacggcaccgcgaggaccgtcct

SEQ ID NO: 174391 - DNA, 147 bp, Homo sapiens
  chr13:113108781-113108928
  hypo
gcagtccttgccgtccgaccacctctggtcatgacctgctgaggaagggcttaccctccacccacaatgaacccgcatttctgagcccccgagatcctgacaccaaagtgaagccttgcgtgaggacacgggcgataaggcatcagt

SEQ ID NO: 174392 - DNA, 43 bp, Homo sapiens
  chr13:113111903-113111946
  hypo
cccttatggtcaacacgggctcttcagccgctggccggcaggt

SEQ ID NO: 174393 - DNA, 30 bp, Homo sapiens; identical to SEQ ID NO: 86284
  chr13:113120219-113120249
  hypo

SEQ ID NO: 174394 - DNA, 192 bp, Homo sapiens; identical to SEQ ID NO: 86285
  chr13:113120930-113121122
  hypo

SEQ ID NO: 174395 - DNA, 30 bp, Homo sapiens
  chr13:113139569-113139599
  hypo
cactcctatttacacgctgctttagctgat

SEQ ID NO: 174396 - DNA, 30 bp, Homo sapiens
  chr13:113160152-113160182
  hypo
ggtctccagggacgcgccgtgcacttggga

SEQ ID NO: 174397 - DNA, 123 bp, Homo sapiens; identical to SEQ ID NO: 86286
  chr13:113163201-113163324
  hypo

SEQ ID NO: 174398 - DNA, 41 bp, Homo sapiens
  chr13:113174158-113174199
  hypo
cggtgccggggcggcgttcccaacacgcagagccgcagtac

SEQ ID NO: 174399 - DNA, 23 bp, Homo sapiens
  chr13:113218174-113218197
  hypo
caagacttcgcctcaaaaaaaaa

SEQ ID NO: 174400 - DNA, 212 bp, Homo sapiens
  chr13:113233672-113233884
  hypo
acactgctgaatgcccgcggggccacggcatccctggggctctcgcacactgctgagtgccagcggggccacggcatccctgcagctctcccacactgctgagtgcccgcggggccacggcatccccggagctctcgcacactgctgagtgtcagggggccacggcatccctggagctctcccacactgctgagtgccggggggccacggca

SEQ ID NO: 174401 - DNA, 147 bp, Homo sapiens; identical to SEQ ID NO: 27274
  chr13:113244575-113244722
  hypo

SEQ ID NO: 174402 - DNA, 233 bp, Homo sapiens; identical to SEQ ID NO: 86291
  chr13:113255705-113255938
  hypo

SEQ ID NO: 174403 - DNA, 30 bp, Homo sapiens
  chr13:113257386-113257416
  hypo
atcattttacttcctcgcgcctgcattctc

SEQ ID NO: 174404 - DNA, 36 bp, Homo sapiens; identical to SEQ ID NO: 124145
  chr13:113261126-113261162
  hypo

SEQ ID NO: 174405 - DNA, 207 bp, Homo sapiens; identical to SEQ ID NO: 86293
  chr13:113274713-113274920
  hypo

SEQ ID NO: 174406 - DNA, 27 bp, Homo sapiens
  chr13:113275159-113275186
  hypo
aattccgtcaaaaaaaaaaaaaaaaag

SEQ ID NO: 174407 - DNA, 20 bp, Homo sapiens
  chr13:113284700-113284720
  hypo
gttagggccgggcgccgggg

SEQ ID NO: 174408 - DNA, 30 bp, Homo sapiens
  chr13:113291044-113291074
  hypo
ccctgcgaacgtgcacgatgactgactccc

SEQ ID NO: 174409 - DNA, 311 bp, Homo sapiens; identical to SEQ ID NO: 86295
  chr13:113291491-113291802
  hypo

SEQ ID NO: 174410 - DNA, 128 bp, Homo sapiens
  chr13:113301704-113301832
  hypo
ggttttgaacaccgtcggggggaagacgccagtctgctcaagtggtgcccaaaccagaaatgccagtgtcatgtccacgtttccgcttcttcggagaagggacctgtctcacacgtccagccagagct

SEQ ID NO: 174411 - DNA, 30 bp, Homo sapiens; identical to SEQ ID NO: 86296
  chr13:113303416-113303446
  hypo

SEQ ID NO: 174412 - DNA, 30 bp, Homo sapiens
  chr13:113308876-113308906
  hypo
atgagggcgtgcacacgcgtctcctctcct

SEQ ID NO: 174413 - DNA, 242 bp, Homo sapiens; identical to SEQ ID NO: 86297
  chr13:113312400-113312642
  hypo

SEQ ID NO: 174414 - DNA, 99 bp, Homo sapiens; identical to SEQ ID NO: 86298
  chr13:113342678-113342777
  hypo

SEQ ID NO: 174415 - DNA, 30 bp, Homo sapiens; identical to SEQ ID NO: 124147
  chr13:113344045-113344075
  hypo

SEQ ID NO: 174416 - DNA, 30 bp, Homo sapiens; identical to SEQ ID NO: 124148
  chr13:113344430-113344460
  hypo

SEQ ID NO: 174417 - DNA, 177 bp, Homo sapiens; identical to SEQ ID NO: 86299
  chr13:113346803-113346980
  hypo

SEQ ID NO: 174418 - DNA, 507 bp, Homo sapiens; identical to SEQ ID NO: 86300
  chr13:113347506-113348013
  hypo

SEQ ID NO: 174419 - DNA, 1386 bp, Homo sapiens; identical to SEQ ID NO: 86301
  chr13:113350354-113351740
  hypo

SEQ ID NO: 174420 - DNA, 524 bp, Homo sapiens; identical to SEQ ID NO: 86302
  chr13:113356665-113357189
  hypo

SEQ ID NO: 174421 - DNA, 31 bp, Homo sapiens; identical to SEQ ID NO: 86303
  chr13:113357650-113357681
  hypo

SEQ ID NO: 174422 - DNA, 338 bp, Homo sapiens
  chr13:113358328-113358666
  hypo
ttgacaaaattggaccgtgctagttggaagttgcacttgaaatgcaggtcagaacaatgggatacgctggtcctgctgtcccaggcgggggagtcacgggagggctcgagtgccacaccacccacacgtcagccaccatgtgggttcccaaggcaagcagtgagttcccaagccagctgtcgtccacctttctgggttagtgtctttttaaataatcaaaggtctttaccatccattaagtactggcccagttgttgtacgcacaactcagaggtgattgtaggttgtgactgctctcagtcggtagttagggtggcctctggcgattgttggaggaa

SEQ ID NO: 174423 - DNA, 388 bp, Homo sapiens
  chr13:113364152-113364540
  hypo
atctcttcagatattttacagagtttgactcttgttgtcaactgtctgcaaataggagctgcgcccatgagggcatagcccagttaggccgcgctgctccctgctgctgaccagcccctgttggagctgatgctgcccacatcccacagctgagagcaagggtctcaacagcacaggtcctctgcctgcactctgccctggagctgggcatcagccatggtgagggcctggaactgcgtgacacccgggtgtcaggcggccactctcagcatccacattccctcagcatcacggggaggccggctgcagtcgggaatcacgagtgtcatccatgtggtcctccctctttgcagacgtgtgtgtggccgtggtgtttaagttgtgtctg

SEQ ID NO: 174424 - DNA, 267 bp, Homo sapiens; identical to SEQ ID NO: 86306
  chr13:113366787-113367054
  hypo

SEQ ID NO: 174425 - DNA, 242 bp, Homo sapiens
  chr13:113368822-113369064
  hypo
cccagggctgaggagaggtggcgtctccactcctgacctggaggcccgtctggcttctggctccagccccctctgctgccttctttgtgtgtctgtgatggaatacgcgttctgcgtgatgagactgttatggagacgcaagagaatgtgaaggtgaagcttctcgaccttgggctggagcgggtggggtgctgagagcaccgagagccccttgccacctcggcttctggcaggtcagtgag

SEQ ID NO: 174426 - DNA, 179 bp, Homo sapiens; identical to SEQ ID NO: 86308
  chr13:113369393-113369572
  hypo

SEQ ID NO: 174427 - DNA, 371 bp, Homo sapiens
  chr13:113371105-113371476
  hypo
ccaggtggggtgtgggtaggtcggggaggctgctggcctcccagcctccctcaatttctgcgttctaaagatggctatgtgcaaaataaaggtgaaatgatggggcagtactggatcaggtggacatccgggagctggaggcccgtgcactttccctgggacgggcagaggcttgtggtgtccacccacagacgcagacccactggcctgcagggcccatagaggctgttgttggccctggtgatgagtgggggacacgagtatgttctgaaatgagggggaggcttctgttgtgaccttgaccaggaagagaaagagaagccaggaggagagcagacacgcttccgccttgaggacggcacttgttcaag

SEQ ID NO: 174428 - DNA, 126 bp, Homo sapiens; identical to SEQ ID NO: 86310
  chr13:113375329-113375455
  hypo

SEQ ID NO: 174429 - DNA, 293 bp, Homo sapiens; identical to SEQ ID NO: 86311
  chr13:113379233-113379526
  hypo

SEQ ID NO: 174430 - DNA, 91 bp, Homo sapiens
  chr13:113382139-113382230
  hypo
actccggcgctgggcgaggaactcggctccaggtgcatcttgttaaaggctgagccccatttctcacatgcgttgcggaatcgaattctcc

SEQ ID NO: 174431 - DNA, 250 bp, Homo sapiens; identical to SEQ ID NO: 86313
  chr13:113382653-113382903
  hypo

SEQ ID NO: 174432 - DNA, 318 bp, Homo sapiens; identical to SEQ ID NO: 86314
  chr13:113383513-113383831
  hypo

SEQ ID NO: 174433 - DNA, 30 bp, Homo sapiens
  chr13:113387538-113387568
  hypo
cttgggggcacacggcgcggggcacagcat

SEQ ID NO: 174434 - DNA, 30 bp, Homo sapiens; identical to SEQ ID NO: 86315
  chr13:113389371-113389401
  hypo

SEQ ID NO: 174435 - DNA, 30 bp, Homo sapiens
  chr13:113390198-113390228
  hypo
taagtcccatggtccgtgtgctcctccatg

SEQ ID NO: 174436 - DNA, 206 bp, Homo sapiens
  chr13:113391635-113391841
  hypo
ttacccaggtgaaggctgagccgcacacccagggcaggttaggcactttgtgagcaagttatccttcggtgaaatgttcgttaaaacagatcatgactcatgtggcgttaaatattacagggaaacctccagaagggatgggcttccagggacggtttggcaagggccagctatgctgagctgccgtggtcataaagaccagaagg

SEQ ID NO: 174437 - DNA, 30 bp, Homo sapiens; identical to SEQ ID NO: 86317
  chr13:113396096-113396126
  hypo

SEQ ID NO: 174438 - DNA, 111 bp, Homo sapiens; identical to SEQ ID NO: 27283
  chr13:113396991-113397102
  hypo

SEQ ID NO: 174439 - DNA, 392 bp, Homo sapiens; identical to SEQ ID NO: 86319
  chr13:113398308-113398700
  hypo

SEQ ID NO: 174440 - DNA, 737 bp, Homo sapiens; identical to SEQ ID NO: 86320
  chr13:113400146-113400883
  hypo

SEQ ID NO: 174441 - DNA, 274 bp, Homo sapiens; identical to SEQ ID NO: 86321
  chr13:113401316-113401590
  hypo

SEQ ID NO: 174442 - DNA, 30 bp, Homo sapiens; identical to SEQ ID NO: 27287
  chr13:113406735-113406765
  hypo

SEQ ID NO: 174443 - DNA, 30 bp, Homo sapiens; identical to SEQ ID NO: 86323
  chr13:113408405-113408435
  hypo

SEQ ID NO: 174444 - DNA, 30 bp, Homo sapiens; identical to SEQ ID NO: 27288
  chr13:113409130-113409160
  hypo

SEQ ID NO: 174445 - DNA, 68 bp, Homo sapiens; identical to SEQ ID NO: 86325
  chr13:113411147-113411215
  hypo

SEQ ID NO: 174446 - DNA, 118 bp, Homo sapiens
  chr13:113413670-113413788
  hypo
acacttggcagagtccggagacttctgaccgtcatgacggtgggggttgctcccaagaccctgctctgaagacttcctaacctgcgtgctctttcaacaatagcgcgtggacacattt

SEQ ID NO: 174447 - DNA, 112 bp, Homo sapiens; identical to SEQ ID NO: 86326
  chr13:113417107-113417219
  hypo

SEQ ID NO: 174448 - DNA, 31 bp, Homo sapiens; identical to SEQ ID NO: 86327
  chr13:113418566-113418597
  hypo

SEQ ID NO: 174449 - DNA, 983 bp, Homo sapiens
  chr13:113419197-113420180
  hypo
acctctttccttagctcagggcgctaccagtctgggctggtagaagccccgacacttgcctcactcggatccctggaggaggattatatgggcactggggcaaggcagggacatcttggcagcctccccaccgcacgcttttcttgcaagtcctttgaacggcacctgctccttagctgctgcctggcaactttgagggtttcagtgagatggggtgagtgcttcccagccagcaaagtgcgttgacagtggctggcttgccccccctcccccccgccccggctctggaagcttctccccctgggtcttccagtctcatgtctggacacagacaggagaggtgaggaggagcagcaggggtggcccgggcagttcctgtgacctggaggcctggcaagttgttctgacggccaggcccatccttggggaggcctctgaggacgcctggaaccccaggcccgccctgccttgttttctggtcctggcctgggggggtcgtggtctcgctggtgcagcctcctccgggcaggccccgcctctgctcccttcccctcactccatctgattcggccccgtttccttgtccactccacgttcttctgagcgtgtctctgggacatggttaaggttaagaagcggcctctgaacgagggagaatgtactgaaattgcctaagtgaacttcaaacacaggaagaagcgctcagtcgatgttcatggtgagaacgagggttgatcttttgaatgagtcacgggtttgagagagacctaagaaccattcgatctgaaaactagattcactttgaacaaaatatctcaggtgctaaatactccagttagtgtggggaaatgtctctgagaacgaaagctctgactgaccggagcctgctacagtggatctgaaagatgctcacgaataattctcgctgcagagcttagtaaaccaacaatacaaacgattttctgtaacgacctcccgtaaag

SEQ ID NO: 174450 - DNA, 295 bp, Homo sapiens; identical to SEQ ID NO: 86329
  chr13:113424729-113425024
  hypo

SEQ ID NO: 174451 - DNA, 539 bp, Homo sapiens
  chr13:113425233-113425772
  hypo
tgtacatttgaataccggccattagggagaatcgccctgtaaacattgatccagtgattgaggccggtcggcttgcttctgttctgccccgcggtgtaattcagctaataggttttgtttgtctcagctgaaatgtgaaacttccattaggtgtctaaccctggctaaaagtggttttcagcctatttttaaaaaatctcctttgtccctgcatgcattctaaccccattctaacctgatgcgggcagccacaacccaggccctaacagagttcatggtaaggatggtgaaggcgtgacccacggtggaaagttggttattttgggtaatccagcgattttctgattgaacttcgaatgcggaaacatcttgcccttactggggcaacgaggggaggcaaggcgtgcgccaggcagagacaccttggaatcccacccagcccagatgtgtctcctgggttctgggacgggcgcaggtgactgtatttgcgctggtgggaggagttgcccccttggttaaatccggaggacacagctgca

SEQ ID NO: 174452 - DNA, 76 bp, Homo sapiens
  chr13:113426593-113426669
  hypo
tgtgcagaagatgggcaggtagaaggttccagcggtgaggggtgctgacctggagcggctgcggtggggccatgtg

SEQ ID NO: 174453 - DNA, 93 bp, Homo sapiens
  chr13:113426946-113427039
  hypo
ccccagctcccctcccgtcatgccccagcccagccctgggcagctgctaatgcaccttctgttgcccgcagatttgcccgtgtggacgcttct

SEQ ID NO: 174454 - DNA, 133 bp, Homo sapiens
  chr13:113428310-113428443
  hypo
cagctcctcaaacacagtgcccgctgcctccctgcttcccgtccacctcacggggaactaggaattccctcctgtgtctggcggagagagaacctggctaagcattgcggccgaaggttgcagcctcctagga

SEQ ID NO: 174455 - DNA, 30 bp, Homo sapiens; identical to SEQ ID NO: 27293
  chr13:113430251-113430281
  hypo

SEQ ID NO: 174456 - DNA, 106 bp, Homo sapiens
  chr13:113435264-113435370
  hypo
ctcctgccctggagagcttcccgactacccgtgtctttgctctgaatcctgaaaacagccccgtgtgatgtgaccccgtcttttgtttgtttgtttgttcgtttgt

SEQ ID NO: 174457 - DNA, 20 bp, Homo sapiens
  chr13:113439158-113439178
  hypo
ccctgagctgtttccactgg

SEQ ID NO: 174458 - DNA, 30 bp, Homo sapiens
  chr13:113439934-113439964
  hypo
cagtaaggtagaaacgataccagccacccc

SEQ ID NO: 174459 - DNA, 30 bp, Homo sapiens
  chr13:113444913-113444943
  hypo
atgtgtagacccctgcgatagacctcctta

SEQ ID NO: 174460 - DNA, 244 bp, Homo sapiens
  chr13:113445466-113445710
  hypo
tactgcttagaactcagcctgcgcagcccagaggtacagagaggcaggaagcacccaggtgtccacatacggtgccattgtggacttgtagggcaggattccaggatatgggtgatgggcgtgtggaaccgcggcgccccctgcacagtgtggctcatttgagccggatgggggccgtgaaggcatcacccagcctgccccctgggagctggcttctcccttcctggggcggagctcgcccgac

SEQ ID NO: 174461 - DNA, 191 bp, Homo sapiens; identical to SEQ ID NO: 27295
  chr13:113446209-113446400
  hypo

SEQ ID NO: 174462 - DNA, 31 bp, Homo sapiens; identical to SEQ ID NO: 86336
  chr13:113448116-113448147
  hypo

SEQ ID NO: 174463 - DNA, 201 bp, Homo sapiens; identical to SEQ ID NO: 27296
  chr13:113461152-113461353
  hypo

SEQ ID NO: 174464 - DNA, 440 bp, Homo sapiens
  chr13:113461412-113461852
  hypo
tgtgtttcacacccaccagattggctttcagatgtgaaaggctggagagggcatggcgagggaggcaccacgggccgccggcaggagcgtggcggagccaccaagcacagcagttggcaacatctgacacaggcagagatggggacacacagggtccagtgcagatgataaacatgcagctgtgcagtcagtacatggggcctgtgtgtcttcactaggccagagccggccgtgcctaccgggatacgtgaactaggatattcatggtggctgtcattgattagcaaaggactcgggcaacctggtgtccctccgtaaggaaatggacagctccgccgcggtgcatggcagaacacagcacagtaacgaaacgaactgtgctgcctggagaacagaacatgagggagactcacgcttcccaaggacgcgctgcctgtgac

SEQ ID NO: 174465 - DNA, 31 bp, Homo sapiens; identical to SEQ ID NO: 27299
  chr13:113463034-113463065
  hypo

SEQ ID NO: 174466 - DNA, 30 bp, Homo sapiens
  chr13:113464342-113464372
  hypo
ctcagatgcggaaacgcacagagagcctta

SEQ ID NO: 174467 - DNA, 245 bp, Homo sapiens
  chr13:113466630-113466875
  hypo
gcccccactggtcctcgtgcaccctgcctggctctttccaactcccacgcctccctccctcgtgcagccccactgcctccctggctgttttcccagctgagccgtaggaggtttggtgagggaggcagggagcaccccagtcctgtgcatgtggagagccaggtgcgttccagaagcctggagggagggcctccaagcagcccagccagcctgggctcagtgaacctctccggacaaggccgcag

SEQ ID NO: 174468 - DNA, 112 bp, Homo sapiens; identical to SEQ ID NO: 86340
  chr13:113472457-113472569
  hypo

SEQ ID NO: 174469 - DNA, 249 bp, Homo sapiens; identical to SEQ ID NO: 86341
  chr13:113474179-113474428
  hypo

SEQ ID NO: 174470 - DNA, 335 bp, Homo sapiens; identical to SEQ ID NO: 27302
  chr13:113477606-113477941
  hypo

SEQ ID NO: 174471 - DNA, 38 bp, Homo sapiens; identical to SEQ ID NO: 27303
  chr13:113482706-113482744
  hypo

SEQ ID NO: 174472 - DNA, 30 bp, Homo sapiens
  chr13:113486719-113486749
  hypo
agcgccacaggtcacgcctagtctaacaca

SEQ ID NO: 174473 - DNA, 305 bp, Homo sapiens
  chr13:113488275-113488580
  hypo
ggtgccgcgaagcacgtctgtctcccgggtcctctgctggcctctcgcatcccaaagccatgctctgtctctgccgtcccagtggctcccacaaggccctgaaggtcgctgacccccaggcgtgcaggaggaggcattgtatagatgggtgcacccacgtgctggctgaaggcctgcgctggaccttcgttccccgtcagtgactcaagggccttggtgtgggggtaacagcctctcagggtccctctccctctggcatcgtgttctccgctcaacaacaacaaagtccacgaatcaatgagcaa

SEQ ID NO: 174474 - DNA, 154 bp, Homo sapiens
  chr13:113489719-113489873
  hypo
caaatcccttgattcggcggggctcctgggccctccgctggcaccagctgcaccctctccacagcaccctgggcttcccgggggccgcaactcactgccgttgaggctccgggtttgcagccgtggaggtagtgaggtcgtggcctagatgaga

SEQ ID NO: 174475 - DNA, 36 bp, Homo sapiens; identical to SEQ ID NO: 86346
  chr13:113493551-113493587
  hypo

SEQ ID NO: 174476 - DNA, 577 bp, Homo sapiens; identical to SEQ ID NO: 27305
  chr13:113497160-113497737
  hypo

SEQ ID NO: 174477 - DNA, 95 bp, Homo sapiens; identical to SEQ ID NO: 27306
  chr13:113498378-113498473
  hypo

SEQ ID NO: 174478 - DNA, 55 bp, Homo sapiens; identical to SEQ ID NO: 86349
  chr13:113499308-113499363
  hypo

SEQ ID NO: 174479 - DNA, 46 bp, Homo sapiens; identical to SEQ ID NO: 86350
  chr13:113500587-113500633
  hypo

SEQ ID NO: 174480 - DNA, 179 bp, Homo sapiens; identical to SEQ ID NO: 86351
  chr13:113507107-113507286
  hypo

SEQ ID NO: 174481 - DNA, 160 bp, Homo sapiens
  chr13:113508784-113508944
  hypo
cgagctgagcaagacggtcctgcgccacagcgggagcctgaccagagacaacctgtccgggtaggcagcgcgtccccgcccccacccccacactcccgcaaaaggggcttcagacccagtggccttcacctgcaagtcggggagccgcattgtctctact

SEQ ID NO: 174482 - DNA, 606 bp, Homo sapiens
  chr13:113513505-113514111
  hypo
ctgagtggccaaaacgtggtcacatgtgcatttcagttgcccctgaaataagagaaagctttctagaacccattagtgctgttctgccgcacgctgggtgcacgtggatccctcctcccatgtggggtgggccacgtcggtaggtggcggctgcctccctctgtcccgtcaccgaactaacagttatgccttgcctttcagaacgtctgcttcatcttccctcagtttttataccagttcttctgtgggttttcacaacaggtcagtcctagggtcttcagggacaggctgtctgagccttcttttccttcccgcagtgggtggctgctgtggggaggggagacttgggaatgagcagcactccccggcaccacgagggagccagggtgcccagcagcaggcgggggtgaagggtcgggcctggggaggggggccacggagctgaggagttgccgtcctggaggccccttgttccatgtcttctgaaactgccgtggccctgagatgcgggccagtgatgatgtggtctcctcagggcccagcagtgctgggctgggcatcctgatgccactgcaagaattaactccaactcgaggtccttgtgga

SEQ ID NO: 174483 - DNA, 76 bp, Homo sapiens; identical to SEQ ID NO: 86354
  chr13:113516325-113516401
  hypo

SEQ ID NO: 174484 - DNA, 30 bp, Homo sapiens; identical to SEQ ID NO: 86355
  chr13:113520790-113520820
  hypo

SEQ ID NO: 174485 - DNA, 30 bp, Homo sapiens; identical to SEQ ID NO: 86356
  chr13:113533378-113533408
  hypo

SEQ ID NO: 174486 - DNA, 30 bp, Homo sapiens; identical to SEQ ID NO: 86357
  chr13:113533958-113533988
  hypo

SEQ ID NO: 174487 - DNA, 440 bp, Homo sapiens
  chr13:113534532-113534972
  hypo
gcttcaggattccagcggtgcctggtagaccttccagccgagggacctcagaccctctgcctcccgcgggtgcatggcccgtccctgagcctgtcgctgtctcagttctgggctcgggcccctcatgggagcggccctgctgggacagtgttttcccaagacgccccaagccctcgccctggcagctccatgacaccccatgcagactccaacaggggcttcgagcctcttcctgctggggtcccacggatggtgcaggcagaggcccgagcactcctggtggccccgtgtggcccacgtcgctcagtatctttcctcgccttgcagaggggtgtgaagcacaaggctccagtccaggccgcacagagcagcgatgggcccctcctgaaggacctcctacggcggccaaggcgcagttagctccacgctaggtaactgtg

SEQ ID NO: 174488 - DNA, 30 bp, Homo sapiens
  chr13:113535183-113535213
  hypo
ctcaccccacacgcacggcacacagcctga

SEQ ID NO: 174489 - DNA, 142 bp, Homo sapiens; identical to SEQ ID NO: 27309
  chr13:113536447-113536589
  hypo

SEQ ID NO: 174490 - DNA, 181 bp, Homo sapiens; identical to SEQ ID NO: 86359
  chr13:113537190-113537371
  hypo

SEQ ID NO: 174491 - DNA, 100 bp, Homo sapiens
  chr13:113537722-113537822
  hypo
gctggaggaggagccggccctcacgcccgccccgcgccacgctgtggaacggggctccggcaagtgaaacccagagggtgtttccgaggtgctcgacagt

SEQ ID NO: 174492 - DNA, 30 bp, Homo sapiens
  chr13:113539192-113539222
  hypo
gaccgtctcagacacgcacagtgggcctgc

SEQ ID NO: 174493 - DNA, 209 bp, Homo sapiens; identical to SEQ ID NO: 86361
  chr13:113539437-113539646
  hypo

SEQ ID NO: 174494 - DNA, 85 bp, Homo sapiens
  chr13:113543110-113543195
  hypo
ggtcctgaggtggacgaggactggccctgtcctgaggaggctgccggtcctttgcacgcgcagtgaacccgctcacctcgtgcag

SEQ ID NO: 174495 - DNA, 690 bp, Homo sapiens
  chr13:113544110-113544800
  hypo
cacctgggagcagccgcggcctgcggggtggatccgggcctgtgcggcggtggggtggggttggaggggtgtttgaggccatggctgctccttggatgacaacctggaacacaccaggggagctcgcttgccatcggttctgagtggctcaacctgggtgactgcaatggaccgagagggtccgggtcgtccccaacccgcaaaggcatccaggaagccacccggggaccctgctcagagcaaggcagagccagacacacagcaacaggcaagccgccccgcagaggatgagccgaggcagcacgcaccaacacggggctaaagtcagcatctcactcatctcacaaggcttcctgacttcttaagacatcagtggttactctaaaagagaagagcaggccgtggcgggcaggtgacccctcaccgtcgccctgggggaaggagcgggctgtggcggccgggtgacctctcaccgtctctgtggcggcatcactgtctttctgccggccaagccatcggggcagcagaagagtctcaaacagaaacccggctcagctcttgtttctcacctccttgtttcagcaaaattctccccaaaaggtggctatatttgttgtctctgtctccgtacacaccctcatctgcctcccgatctgtggacggcttctgggccctcgtgggacggctggg

SEQ ID NO: 174496 - DNA, 30 bp, Homo sapiens
  chr13:113545243-113545273
  hypo
agacctcggcactttcgttctggaggaggg

SEQ ID NO: 174497 - DNA, 201 bp, Homo sapiens
  chr13:113545810-113546011
  hypo
gctcgctgtaagtgccgcacggcttacgtggaatccacagaggcagcccgtactcccccctccatgtgcagcgcccagacacgtgtgccgaggctgcaggtgtgctacagtgcggcggccaaccggctttcccctgcagcctcagctcctgcgggatctgctcactggtaggcagtgacgccctggcgggagttgtccctg

SEQ ID NO: 174498 - DNA, 31 bp, Homo sapiens; identical to SEQ ID NO: 9515
  chr13:113548669-113548700
  hypo

SEQ ID NO: 174499 - DNA, 30 bp, Homo sapiens; identical to SEQ ID NO: 86365
  chr13:113552757-113552787
  hypo

SEQ ID NO: 174500 - DNA, 367 bp, Homo sapiens
  chr13:113553327-113553694
  hypo
tggctgctgaacctgcggagaagctggctctccctgggatccgagctcctcggggacaggagcttccctgacatttgtgtcctcggcacctgcgtcataaacgaggaccgagcaaacgagtcacaaagccgtgctgacttggtgcttccgtggggctgggccgagttctagccgcctgtgaccgtgtctgcatctgtagacagatttaattgtgtgtgtgtgtgtgcgaggcgcctcgctcagcccaggaccacaaagcccagggggcctggctctcggtccagccttcggccttcactgctgacggcttctcaaggttttgcccaggggaaagcagacgctccaagggtggcggcgcctgttgggt

SEQ ID NO: 174501 - DNA, 278 bp, Homo sapiens
  chr13:113554073-113554351
  hypo
tgtggacggagggatcgctgcatcccttcctccaccatgtcagtgtgacgggccgcgcgtgccatctgcagccttcactgggtaaaagtgaaggtccctcacctggatcttttccaccgtatcttgagatcaagtggttaggaatgcttgcagggtcttgcctcatagtggagagaaacagcggaacagccccttgggttggtttctggatggggaggatgtagccctcatgcctggtgtctacagagtccagcttggggacgcgattgcagccaggg

SEQ ID NO: 174502 - DNA, 30 bp, Homo sapiens; identical to SEQ ID NO: 86368
  chr13:113554692-113554722
  hypo

SEQ ID NO: 174503 - DNA, 46 bp, Homo sapiens
  chr13:113555444-113555490
  hypo
tggagccaccgataccgtttattttttattttattttttttgagac

SEQ ID NO: 174504 - DNA, 46 bp, Homo sapiens
  chr13:113555729-113555775
  hypo
agtgctgggattacaggcgtgagccacaatacggtttatttaagta

SEQ ID NO: 174505 - DNA, 30 bp, Homo sapiens
  chr13:113560793-113560823
  hypo
gcatatgtacacacacgcacacacggtgca

SEQ ID NO: 174506 - DNA, 243 bp, Homo sapiens; identical to SEQ ID NO: 86369
  chr13:113565659-113565902
  hypo

SEQ ID NO: 174507 - DNA, 183 bp, Homo sapiens
  chr13:113570826-113571009
  hypo
tcccttctcacccagcgtcacgccctgacccctcggctcccgtgtcctctgacttccttgcaccagcaccctgttgagctccacccctgcactggggtctgtataggtggctgtcatgtgtgccgagcatagctcagtatagctgcatgaagcgttccaccgggcagacggtgttgatcctcc

SEQ ID NO: 174508 - DNA, 133 bp, Homo sapiens
  chr13:113571417-113571550
  hypo
ctgtactcagcccctcggcgatctcagtcccctggcttgtgacccacctgagtgtgatgattcctagtccacagctccagtccggacccctcccccgggcactgcaccgccctgcctccgcagagcctccacc

SEQ ID NO: 174509 - DNA, 30 bp, Homo sapiens; identical to SEQ ID NO: 86370
  chr13:113580658-113580688
  hypo

SEQ ID NO: 174510 - DNA, 30 bp, Homo sapiens
  chr13:113586502-113586532
  hypo
ccgatggcgaccaggcgtgtagactcgtgc

SEQ ID NO: 174511 - DNA, 711 bp, Homo sapiens; identical to SEQ ID NO: 124153
  chr13:113597559-113598270
  hypo

SEQ ID NO: 174512 - DNA, 213 bp, Homo sapiens; identical to SEQ ID NO: 86372
  chr13:113598679-113598892
  hypo

SEQ ID NO: 174513 - DNA, 32 bp, Homo sapiens
  chr13:113599071-113599103
  hypo
ttacaggcgtgagccaccgcgcccggccaaac

SEQ ID NO: 174514 - DNA, 185 bp, Homo sapiens
  chr13:113622063-113622248
  hypo
ctggtgcattgttgccggatgctggaatggtgcacgcacgctctgttggacgctggaatgctggtgcattgttgccggatgctggaatggtgcacgcatgccctgttggactctggaatgctggtgcattgttgccaaatgccggaatggtacacggatgctctgttggacgctggaatgctggt

SEQ ID NO: 174515 - DNA, 342 bp, Homo sapiens; identical to SEQ ID NO: 86373
  chr13:113627844-113628186
  hypo

SEQ ID NO: 174516 - DNA, 119 bp, Homo sapiens; identical to SEQ ID NO: 86374
  chr13:113631095-113631214
  hypo

SEQ ID NO: 174517 - DNA, 31 bp, Homo sapiens; identical to SEQ ID NO: 27317
  chr13:113638952-113638983
  hypo

SEQ ID NO: 174518 - DNA, 30 bp, Homo sapiens; identical to SEQ ID NO: 27318
  chr13:113641396-113641426
  hypo

SEQ ID NO: 174519 - DNA, 30 bp, Homo sapiens; identical to SEQ ID NO: 27319
  chr13:113642769-113642799
  hypo

SEQ ID NO: 174520 - DNA, 93 bp, Homo sapiens; identical to SEQ ID NO: 27320
  chr13:113644355-113644448
  hypo

SEQ ID NO: 174521 - DNA, 30 bp, Homo sapiens; identical to SEQ ID NO: 27321
  chr13:113647374-113647404
  hypo

SEQ ID NO: 174522 - DNA, 309 bp, Homo sapiens; identical to SEQ ID NO: 27322
  chr13:113648322-113648631
  hypo

SEQ ID NO: 174523 - DNA, 62 bp, Homo sapiens
  chr13:113649446-113649508
  hypo
ggcactccgctgtgtcgaggcactgtgcccgtgccccgggctcccctcgttttacagactcg

SEQ ID NO: 174524 - DNA, 288 bp, Homo sapiens; identical to SEQ ID NO: 86382
  chr13:113649730-113650018
  hypo

SEQ ID NO: 174525 - DNA, 101 bp, Homo sapiens; identical to SEQ ID NO: 86383
  chr13:113650920-113651021
  hypo

SEQ ID NO: 174526 - DNA, 39 bp, Homo sapiens; identical to SEQ ID NO: 86384
  chr13:113654368-113654407
  hypo

SEQ ID NO: 174527 - DNA, 120 bp, Homo sapiens
  chr13:113661970-113662090
  hypo
gaaactgtgcaaacgcggttcggcggcctcagtcactgtcctttgtaagcttggggagtcggcgggagagacgtgacccactggccacttcaggcggctctgtgtcgtaaggatcagttt

SEQ ID NO: 174528 - DNA, 197 bp, Homo sapiens; identical to SEQ ID NO: 86385
  chr13:113663191-113663388
  hypo

SEQ ID NO: 174529 - DNA, 31 bp, Homo sapiens; identical to SEQ ID NO: 86386
  chr13:113666494-113666525
  hypo

SEQ ID NO: 174530 - DNA, 37 bp, Homo sapiens; identical to SEQ ID NO: 86387
  chr13:113666830-113666867
  hypo

SEQ ID NO: 174531 - DNA, 302 bp, Homo sapiens
  chr13:113667314-113667616
  hypo
cggacggtgcccccacggtctgtgaggcaggcaggggattgaggacagtgcctcctggtttcctctcaggtcacagtcgctcctggtgagagagaaaaacttaccgtaaaatctgaacatccaactgcgcagtctaggctgccgtcggctgcaccagacacacattccagagaggtgtgcaccagtggaagtcaccttgccaggagcatgagatagtatttcatgctttactgattgactgtttctgtctttctcccacaaaagaagccatcgccgagacgtggttgcgtactgggaatggg

SEQ ID NO: 174532 - DNA, 30 bp, Homo sapiens
  chr13:113670915-113670945
  hypo
ggtactgctgcccccgcgtcatatgctgcc

SEQ ID NO: 174533 - DNA, 188 bp, Homo sapiens
  chr13:113672312-113672500
  hypo
ctgtgctgtctgccgcggagccatggctgccactgtgacatgtgcggtcccgtcttctccctccattgtctgtagacgcacaggtgccacgcagaaccctacagctctgtccagatcctggatccagatgaggcagcttttgaaaggcggccaagtgagggatgcgtaaacctcgggggctccggact

SEQ ID NO: 174534 - DNA, 31 bp, Homo sapiens; identical to SEQ ID NO: 86388
  chr13:113673343-113673374
  hypo

SEQ ID NO: 174535 - DNA, 30 bp, Homo sapiens; identical to SEQ ID NO: 86389
  chr13:113673759-113673789
  hypo

SEQ ID NO: 174536 - DNA, 30 bp, Homo sapiens; identical to SEQ ID NO: 86390
  chr13:113679009-113679039
  hypo

SEQ ID NO: 174537 - DNA, 37 bp, Homo sapiens; identical to SEQ ID NO: 86391
  chr13:113684750-113684787
  hypo

SEQ ID NO: 174538 - DNA, 68 bp, Homo sapiens; identical to SEQ ID NO: 86392
  chr13:113696467-113696535
  hypo

SEQ ID NO: 174539 - DNA, 141 bp, Homo sapiens
  chr13:113696848-113696989
  hypo
cacaggcaggccgggcggcatccagtggcatcgggcgcctttttcgtggctgcagcgtcagcctgcactgccgggtgtgaggcagacgcgcacttaacggcgtgagaagccagatgtgggaggcaccgggcactgtgggca

SEQ ID NO: 174540 - DNA, 30 bp, Homo sapiens
  chr13:113697303-113697333
  hypo
acgccgctcaggcagcgctgcgggttacag

SEQ ID NO: 174541 - DNA, 30 bp, Homo sapiens
  chr13:113700526-113700556
  hypo
ctctccccgcctgtccgtccaaatttcatt

SEQ ID NO: 174542 - DNA, 310 bp, Homo sapiens
  chr13:113700863-113701173
  hypo
agtcattcctttccccgcacattgcctcattccttcatcttttacaagaattagaggccccatatctgctccgatgcccacaaccttcatcgttttggtgcaagcctgtccctgagccgctggttctcatcgaagtctttaggatgaggcatctccttgcacccccacggcacctctctgcccctcgccgcggcggatccccgttcctgaccctgactcaacctggcacacaccacctatggcatcgttatctgaaataattcaaaacgcttcaggatgcttccaaaaaagtagacgtgtatagaatcgg

SEQ ID NO: 174543 - DNA, 30 bp, Homo sapiens
  chr13:113702264-113702294
  hypo
cacacacatcaccacgtgtgtgtctcagat

SEQ ID NO: 174544 - DNA, 183 bp, Homo sapiens; identical to SEQ ID NO: 86394
  chr13:113703692-113703875
  hypo

SEQ ID NO: 174545 - DNA, 326 bp, Homo sapiens; identical to SEQ ID NO: 86395
  chr13:113718438-113718764
  hypo

SEQ ID NO: 174546 - DNA, 953 bp, Homo sapiens; identical to SEQ ID NO: 86396
  chr13:113719022-113719975
  hypo

SEQ ID NO: 174547 - DNA, 31 bp, Homo sapiens; identical to SEQ ID NO: 86397
  chr13:113720175-113720206
  hypo

SEQ ID NO: 174548 - DNA, 144 bp, Homo sapiens; identical to SEQ ID NO: 86398
  chr13:113724280-113724424
  hypo

SEQ ID NO: 174549 - DNA, 30 bp, Homo sapiens
  chr13:113730411-113730441
  hypo
atccaggagctcaacgcgatttacaaggaa

SEQ ID NO: 174550 - DNA, 111 bp, Homo sapiens; identical to SEQ ID NO: 86399
  chr13:113731261-113731372
  hypo

SEQ ID NO: 174551 - DNA, 30 bp, Homo sapiens
  chr13:113732724-113732754
  hypo
ggagagggccctaccggagggccaaggtga

SEQ ID NO: 174552 - DNA, 30 bp, Homo sapiens; identical to SEQ ID NO: 86400
  chr13:113735316-113735346
  hypo

SEQ ID NO: 174553 - DNA, 97 bp, Homo sapiens
  chr13:113739495-113739592
  hypo
ggctccgcggtgaccgtggcccggcctccccagcacctgctggccaggtgtctgtgccgccctggggccccgtccccatcgcgccctgcccctccca

SEQ ID NO: 174554 - DNA, 30 bp, Homo sapiens; identical to SEQ ID NO: 86402
  chr13:113742879-113742909
  hypo

SEQ ID NO: 174555 - DNA, 31 bp, Homo sapiens; identical to SEQ ID NO: 86403
  chr13:113745595-113745626
  hypo

SEQ ID NO: 174556 - DNA, 30 bp, Homo sapiens; identical to SEQ ID NO: 27327
  chr13:113748343-113748373
  hypo

SEQ ID NO: 174557 - DNA, 30 bp, Homo sapiens; identical to SEQ ID NO: 86405
  chr13:113750929-113750959
  hypo

SEQ ID NO: 174558 - DNA, 30 bp, Homo sapiens; identical to SEQ ID NO: 27328
  chr13:113769397-113769427
  hypo

SEQ ID NO: 174559 - DNA, 30 bp, Homo sapiens; identical to SEQ ID NO: 27329
  chr13:113771922-113771952
  hypo

SEQ ID NO: 174560 - DNA, 250 bp, Homo sapiens
  chr13:113776016-113776266
  hypo
gtgcgtggtgcccgccgtgggaggccagcctggcgttggcatccagcatcatcagtttgtgcagtcgggtggggctcagtgagtgcctcctgtgtgccaggcacaatgacgcacaatgtgtgcacaccaggctcatgtgcaggtggctgcgagacagggcgacccatcaaggcagatgcaccatgaggcagtggccagtgctgtgggtgttaggggcattgctccccggccactacggcatagcaggcag

SEQ ID NO: 174561 - DNA, 30 bp, Homo sapiens
  chr13:113776729-113776759
  hypo
cacgctcactgccagcggcctcggctcagg

SEQ ID NO: 174562 - DNA, 264 bp, Homo sapiens; identical to SEQ ID NO: 27330
  chr13:113796034-113796298
  hypo

SEQ ID NO: 174563 - DNA, 30 bp, Homo sapiens; identical to SEQ ID NO: 27331
  chr13:113797338-113797368
  hypo

SEQ ID NO: 174564 - DNA, 361 bp, Homo sapiens; identical to SEQ ID NO: 27332
  chr13:113797732-113798093
  hypo

SEQ ID NO: 174565 - DNA, 30 bp, Homo sapiens; identical to SEQ ID NO: 27333
  chr13:113803258-113803288
  hypo

SEQ ID NO: 174566 - DNA, 30 bp, Homo sapiens; identical to SEQ ID NO: 27334
  chr13:113803564-113803594
  hypo

SEQ ID NO: 174567 - DNA, 352 bp, Homo sapiens
  chr13:113825827-113826179
  hypo
gctccctgagaagctcgtttgagcattatgtccccttgaaaatcagactgtaaagaactgacgattgttcatgatttcagattttaacagaacgagccaagacccgctgatgatcaagataacgcacgtccatgtgcacatgcggtatgacgcggacgcgggggagaatgacctgtcactgctggagctggagtggcccatccagtgcccaggtgcggggctccccgtgtgcacccctgagaaagacttcgctgagcacctcctcatcccacgcaccaggggcctcctcagcggctgggcacgcaatggcactgacctgggcaactcgctgaccacgcggcctgtcacactt

SEQ ID NO: 174568 - DNA, 30 bp, Homo sapiens; identical to SEQ ID NO: 27336
  chr13:113826539-113826569
  hypo

SEQ ID NO: 174569 - DNA, 30 bp, Homo sapiens; identical to SEQ ID NO: 27337
  chr13:113832340-113832370
  hypo

SEQ ID NO: 174570 - DNA, 30 bp, Homo sapiens
  chr13:113834359-113834389
  hypo
gtgaggggggaggcgcgtcagaaggagggt

SEQ ID NO: 174571 - DNA, 30 bp, Homo sapiens
  chr13:113851463-113851493
  hypo
gacagctgccatgaacgacaaaggatattg

SEQ ID NO: 174572 - DNA, 30 bp, Homo sapiens
  chr13:113851894-113851924
  hypo
aaatctggaacctatcgcacactgcacaga

SEQ ID NO: 174573 - DNA, 20 bp, Homo sapiens
  chr13:113865698-113865718
  hypo
ttgtttgtttgttctttgag

SEQ ID NO: 174574 - DNA, 104 bp, Homo sapiens
  chr13:113866199-113866303
  hypo
agtgtatgggagctccggttccactccgccaccagcgtgtgcgtctctcccagcagtgtatgggagctccagttccactccgccaccagcgtgtggtgtcctca

SEQ ID NO: 174575 - DNA, 244 bp, Homo sapiens; identical to SEQ ID NO: 86417
  chr13:113884094-113884338
  hypo

SEQ ID NO: 174576 - DNA, 30 bp, Homo sapiens
  chr13:113887131-113887161
  hypo
tggggcaggcagggtcgtggtgcccaactg

SEQ ID NO: 174577 - DNA, 116 bp, Homo sapiens
  chr13:113887568-113887684
  hypo
actgctgatcgagcgcgagaggagcggcgaggccgtggaccggagcctgttgcggagcctcctgggcatgctgtctgacctgcaggtgagtgctgcctgtgcggaagatacctggg

SEQ ID NO: 174578 - DNA, 116 bp, Homo sapiens; identical to SEQ ID NO: 27340
  chr13:113887884-113888000
  hypo

SEQ ID NO: 174579 - DNA, 81 bp, Homo sapiens
  chr13:113950840-113950921
  hypo
gcgagactccgtctcaaaaaaaaaaacaaagtgctcgacaggaactttctgtaagccaaagagtatcgccatcgcaccttc

SEQ ID NO: 174580 - DNA, 88 bp, Homo sapiens; identical to SEQ ID NO: 9520
  chr13:113951224-113951312
  hypo

SEQ ID NO: 174581 - DNA, 32 bp, Homo sapiens; identical to SEQ ID NO: 27342
  chr13:113953157-113953189
  hypo

SEQ ID NO: 174582 - DNA, 30 bp, Homo sapiens
  chr13:113958625-113958655
  hypo
cagtctccctgtccacgctgagctccagtc

SEQ ID NO: 174583 - DNA, 21 bp, Homo sapiens
  chr13:113969598-113969619
  hypo
aaccagcgtggagatgccggt

SEQ ID NO: 174584 - DNA, 30 bp, Homo sapiens; identical to SEQ ID NO: 86424
  chr13:113973513-113973543
  hypo

SEQ ID NO: 174585 - DNA, 30 bp, Homo sapiens
  chr13:113973994-113974024
  hypo
agagggggacggcacggtagggctggagcc

SEQ ID NO: 174586 - DNA, 30 bp, Homo sapiens; identical to SEQ ID NO: 86425
  chr13:113974973-113975003
  hypo

SEQ ID NO: 174587 - DNA, 30 bp, Homo sapiens; identical to SEQ ID NO: 86426
  chr13:113977648-113977678
  hypo

SEQ ID NO: 174588 - DNA, 291 bp, Homo sapiens; identical to SEQ ID NO: 86427
  chr13:113980175-113980466
  hypo

SEQ ID NO: 174589 - DNA, 30 bp, Homo sapiens; identical to SEQ ID NO: 86428
  chr13:113982370-113982400
  hypo

SEQ ID NO: 174590 - DNA, 259 bp, Homo sapiens
  chr13:113983360-113983619
  hypo
acgctttatgtcccccgatccgggtgctctccagggtgtgcgtgacacgtgttgataagcgtctttttctcactcattattcagtcttcggccagtcccatgtacagagcccagctgggggacctaaggtgtacaggggaagacctttcttcctccctggccaccgacagttaaggaaggtataatccacgcataacacactctgcagtgccacggagacattgggagagagcttaaaaattaccgcattggccgggtg

SEQ ID NO: 174591 - DNA, 210 bp, Homo sapiens
  chr13:113984299-113984509
  hypo
atgggagcccgggtgcgtgcatgggagcccaggtgcgtacatggaaacccaggtgcctgcatggaaacccgggtgcgtgcatggaaacccgggtgcgtgcatggaaacccgggtgtgtgcatggaaacccgggtgtgtgcatggaaacccaggagtgtgcatggaaactcaggtgcgtgcatgggagcccaggtgcgtggatggaaaccc

SEQ ID NO: 174592 - DNA, 81 bp, Homo sapiens
  chr13:113985422-113985503
  hypo
gcccgggtgtgtgcacgaaagcctaggtgtgtgcatgggaacccgggtgtgtgcatggaaaccggtcgcagctctcctgtg

SEQ ID NO: 174593 - DNA, 286 bp, Homo sapiens; identical to SEQ ID NO: 86430
  chr13:113985702-113985988
  hypo

SEQ ID NO: 174594 - DNA, 31 bp, Homo sapiens; identical to SEQ ID NO: 86431
  chr13:113986523-113986554
  hypo

SEQ ID NO: 174595 - DNA, 31 bp, Homo sapiens; identical to SEQ ID NO: 86432
  chr13:113987422-113987453
  hypo

SEQ ID NO: 174596 - DNA, 38 bp, Homo sapiens; identical to SEQ ID NO: 86433
  chr13:113990085-113990123
  hypo

SEQ ID NO: 174597 - DNA, 30 bp, Homo sapiens
  chr13:113999740-113999770
  hypo
cacctgccaaagggcgggtgctgcctccaa

SEQ ID NO: 174598 - DNA, 84 bp, Homo sapiens; identical to SEQ ID NO: 86434
  chr13:114002278-114002362
  hypo

SEQ ID NO: 174599 - DNA, 98 bp, Homo sapiens; identical to SEQ ID NO: 86435
  chr13:114003075-114003173
  hypo

SEQ ID NO: 174600 - DNA, 347 bp, Homo sapiens
  chr13:114004198-114004545
  hypo
aaccacccatcgcgacgatgtccttccctgtcctcctagaaacgtttaagccagccacaacccctaggagcccgtgaagcacatggcctaaaatgccaggaacgcactctccaatcccggtggcagccgtgggctccaggctctcagccacggggactcacaggcagtcacgggctgtgcgcacacctggaaaccctcgtggaggccagccctgcccagatgcctgccctgccctcggcgagctcagacagactggaacagcaccaccagcgacaggcccaggcaggacacacaggctgggagactgcacggctcctggttgccctgcattccggcctgttcactcc

SEQ ID NO: 174601 - DNA, 363 bp, Homo sapiens
  chr13:114004969-114005332
  hypo
ccggaatgaggtcgtcggctgctgctccctgtcctccctgctgggaaatggcgtccgagcctcaatggggcatcaggacgtggaattcatgaacagggttgacagagacgtgaggccgtcactgccgagcctgcagctgtggacagacctgtcctcacagccacctcatggcgtcagagggtcccgaggctcacctggcagtagcccactccctggttatggtgcccatatgccagcagcacattgtacagggtcctctgtaagcaggggtccgtggtcttccggaacttcacgttgtcggggaaggtccggttcaggtctgtgggaaattcagaaggaatcacccacgggtttctgttccac

SEQ ID NO: 174602 - DNA, 298 bp, Homo sapiens; identical to SEQ ID NO: 86438
  chr13:114009497-114009795
  hypo

SEQ ID NO: 174603 - DNA, 20 bp, Homo sapiens
  chr13:114012194-114012214
  hypo
catatatttaaaactgcggc

SEQ ID NO: 174604 - DNA, 477 bp, Homo sapiens; identical to SEQ ID NO: 50947
  chr13:114017991-114018468
  hypo

SEQ ID NO: 174605 - DNA, 30 bp, Homo sapiens; identical to SEQ ID NO: 86441
  chr13:114024465-114024495
  hypo

SEQ ID NO: 174606 - DNA, 85 bp, Homo sapiens
  chr13:114032121-114032206
  hypo
cctggcctttagataaactctttcaaacgactgacaatctgaaaatcacctatgacctgaagcccacccccgcgtccttcaagtt

SEQ ID NO: 174607 - DNA, 31 bp, Homo sapiens; identical to SEQ ID NO: 9523
  chr13:114048391-114048422
  hypo

SEQ ID NO: 174608 - DNA, 30 bp, Homo sapiens
  chr13:114048842-114048872
  hypo
tacacatcgggtgttcgtggataaccactg

SEQ ID NO: 174609 - DNA, 957 bp, Homo sapiens; identical to SEQ ID NO: 86443
  chr13:114055640-114056597
  hypo

SEQ ID NO: 174610 - DNA, 484 bp, Homo sapiens
  chr13:114059956-114060440
  hypo
cctccgggtggcgggcgagggtcgcaatgtcctctgggtgctggacgagggccacgcctctcaggaggctcctccctgctgctccactcttgggctccaaggatcccccaggggccaggaggccgtggctgtgagggtctcgagggagagcctctcctctggggtggctttcggacaaggctctgcttccccactggcccagcgtctctggctctcccgctgtgcggtctccagggctctgggtgctgcctggcgctggtgcaggcgtggcgcggctcgcaacgctccctgcagctgccatcgccccacaggctttcatacctggtttgggtggttcatttaatgaggacagtgggttctcgcgaacatcatggctggtgatttcctcggcagccttcaggggctgagaagactctattagcagcggccttctgcattcctccagcgcaccgggcactgtcatgcccatcggggtgacaccctc

SEQ ID NO: 174611 - DNA, 221 bp, Homo sapiens; identical to SEQ ID NO: 86445
  chr13:114063698-114063919
  hypo

SEQ ID NO: 174612 - DNA, 184 bp, Homo sapiens
  chr13:114064569-114064753
  hypo
ttcgcccccaaaccccggtgggcatcagtggatcaagaggccttgctgagacccggattttggggccgcaccaccaacgcctctgatccacggtctggggaggggcctgggaatctgcattttaacgagtccctggtgattccgaggccgctggtccggggaccccactcggaaccactgaggc

SEQ ID NO: 174613 - DNA, 151 bp, Homo sapiens
  chr13:114065025-114065176
  hypo
cccagagtcgacaggcgcaccctcaactgcgccgtggggatggggagggcagaggagcaggccgacctcggggttgggggaccagcctgggggcattgtgctccctctgaaggctgcacccccagcgaagggtcagcggccctacctgcct

SEQ ID NO: 174614 - DNA, 711 bp, Homo sapiens
  chr13:114074573-114075284
  hypo
tgccagcttttgtttacgatgcttgtggattttgtgtttgtgtgttttaatctataatcagtttgtaaatagactcactttctgattctcacggaggggtttgatttgcggatggagaccgagtccaccctgtttgaatgcagccgcgccctgctcatgcgagctggccttctcttccatacagcagggtggagagggaagcccactttccggtaagcgggcaaaacaggtactacgaccgtgttacttatgctagcaacagttccgacttaccttaattgggtttcttttcctgaaaggtaattctcagttaatttccccacacccacgggtgctgggaccacactccatggacgtgtgtgacgtgaggcccttcgcccccgtgtgcctgtctctctggttcttctgacttaaagcaccagtagcagcacagttagtccagttattcggaagctcagcacggagccacattgctgcagcatagaaggccacggattcctccatcagcatggactacacttcccacaaaacgaacggggcatctctatggaaaaagcaaagcgtgtccctatccctgggacacctctacccctgggacacacctagccccaggacccgcccacccccgggacccgctcaccccgggacaccactacccctgggacatgcccacccctgggacaaccctaccccccccgacacgccctggga

SEQ ID NO: 174615 - DNA, 30 bp, Homo sapiens
  chr13:114075747-114075777
  hypo
cccatccctgggacacgcccatccccggga

SEQ ID NO: 174616 - DNA, 169 bp, Homo sapiens
  chr13:114077018-114077187
  hypo
agtcaggcacagaccgcagtggagcctcacagagacaccctcacccaggggctgcgagagggccctacgggccccggggtggaatcggctctctagggggaaagtggcagaaatggctttacttctcctctgtggacaggcggtagagagccgcgcccaggtcctccag

SEQ ID NO: 174617 - DNA, 200 bp, Homo sapiens
  chr13:114080528-114080728
  hypo
aatcgccttccccgccgtggagccaggaggtgtgcagctgcccagacccgggcccactgccctcctgcctgccttacggtgagcacccctgcccgccacaccccacctcctgctccctggcaccgcgggagccacagagggtgggagccgtgcaggccgctggtggctgtcaggcccaagggacacgtgtgccgatcaca

SEQ ID NO: 174618 - DNA, 31 bp, Homo sapiens; identical to SEQ ID NO: 86449
  chr13:114081077-114081108
  hypo

SEQ ID NO: 174619 - DNA, 242 bp, Homo sapiens
  chr13:114082756-114082998
  hypo
ttagacggcaccttccgtggggtggaagaatcttccggaaccgtcacggatttcctagtcccatacctgctgtccctgcctctggccagcctcatggggctcctgagggaagggcccagccctgagctcgcccaaaccggcagaagcagagtttttccagggggcaccacaggtcccactcacatcccagtggctgccagtcgcttggtgccgcgggctggggtggacggggacgggtggac

SEQ ID NO: 174620 - DNA, 30 bp, Homo sapiens
  chr13:114083255-114083285
  hypo
gagcggctcacctgccgtgtgccggatggt

SEQ ID NO: 174621 - DNA, 176 bp, Homo sapiens; identical to SEQ ID NO: 86450
  chr13:114085571-114085747
  hypo

SEQ ID NO: 174622 - DNA, 30 bp, Homo sapiens; identical to SEQ ID NO: 86451
  chr13:114086979-114087009
  hypo

SEQ ID NO: 174623 - DNA, 30 bp, Homo sapiens; identical to SEQ ID NO: 86452
  chr13:114087949-114087979
  hypo

SEQ ID NO: 174624 - DNA, 30 bp, Homo sapiens
  chr13:114096075-114096105
  hypo
atgctccgccccgccgtgtgggtctgtgtc

SEQ ID NO: 174625 - DNA, 30 bp, Homo sapiens
  chr13:114104208-114104238
  hypo
ccaagctctgccactcgctgggctgtgtgg

SEQ ID NO: 174626 - DNA, 144 bp, Homo sapiens; identical to SEQ ID NO: 86453
  chr13:114107395-114107539
  hypo

SEQ ID NO: 174627 - DNA, 128 bp, Homo sapiens
  chr13:114108040-114108168
  hypo
ggggctcctctcgctgtccctggaaggagtgcgcacacttccccgtgtgtggcgtggggtgatgcgggagcagatgtgtgcaggcgtgcctgtcactgccgcccgctgcggggcgtgccctcacccct

SEQ ID NO: 174628 - DNA, 30 bp, Homo sapiens; identical to SEQ ID NO: 86455
  chr13:114108698-114108728
  hypo

SEQ ID NO: 174629 - DNA, 190 bp, Homo sapiens; identical to SEQ ID NO: 86456
  chr13:114115106-114115296
  hypo

SEQ ID NO: 174630 - DNA, 587 bp, Homo sapiens
  chr13:114122881-114123468
  hypo
aggactcctgactggtttaaacgcgagacgtgccacgctccatcaacctctccttcagacaagcggcctatgaggacgcagcactaaagggggcgggggagggccctggacaggcggggcggaggcagcacagtgtgtaaccttccctgaatctgcgcataaaagcagatgcagcaattagaaagcaaagccaaacacccagaggcaacatttaccataaatttaggtgagaaagtatcaccacaaacccaagttgtaagctaggggatgagccactgccagcaacaggacccgtgtgttgccgtcatgccggggacgtggggggcacagggcctctgacagatgtgagaacaggagggcctcagaggtgcctacacgccgggaccaggtaaggacgagcctgaagtaggctgtggctgagggcagaggccaccaacagggaagtgcctgggagcagaacaggctgggcgggaaagggacaatggagatggaaaagagagaaaagctgaggaggggggaggagcagtgccagacaatctcagacagcaaagccgacatttctgtctactacacgcctgcacacacac

SEQ ID NO: 174631 - DNA, 207 bp, Homo sapiens; identical to SEQ ID NO: 86458
  chr13:114148518-114148725
  hypo

SEQ ID NO: 174632 - DNA, 30 bp, Homo sapiens
  chr13:114174958-114174988
  hypo
cggcatgctggtgacgcaggacgtgcagct

SEQ ID NO: 174633 - DNA, 110 bp, Homo sapiens
  chr13:114183219-114183329
  hypo
ggttgtcatgctagccggagatgacttctagttaagaggtctgagcattttccacgcacaaccagttattctcaacggagggcggactctccatacgaaacaagcagagc

SEQ ID NO: 174634 - DNA, 31 bp, Homo sapiens; identical to SEQ ID NO: 86459
  chr13:114185373-114185404
  hypo

SEQ ID NO: 174635 - DNA, 61 bp, Homo sapiens; identical to SEQ ID NO: 27358
  chr13:114185956-114186017
  hypo

SEQ ID NO: 174636 - DNA, 30 bp, Homo sapiens; identical to SEQ ID NO: 86461
  chr13:114187533-114187563
  hypo

SEQ ID NO: 174637 - DNA, 139 bp, Homo sapiens; identical to SEQ ID NO: 86462
  chr13:114188350-114188489
  hypo

SEQ ID NO: 174638 - DNA, 86 bp, Homo sapiens; identical to SEQ ID NO: 86463
  chr13:114188956-114189042
  hypo

SEQ ID NO: 174639 - DNA, 753 bp, Homo sapiens; identical to SEQ ID NO: 86464
  chr13:114189670-114190423
  hypo

SEQ ID NO: 174640 - DNA, 140 bp, Homo sapiens
  chr13:114192724-114192864
  hypo
cgtcttggctctattcgtgctctttccaaattccactcgagtttttagattcagctggtcagtttcacacacatgagtctcttggcgctcctgtgcgtctgttggccaggggagggagcatccgccgctccgccgtgctg

SEQ ID NO: 174641 - DNA, 192 bp, Homo sapiens
  chr13:114193075-114193267
  hypo
ttggccggtgtcagccgtgcgtcatccggaaggctgccataagcctgcgtttcgcagagctgcgctgaggctcccgtgtcgcggccgtccggccggcgcgctgatgtggctgcaaacctgggtatcagatcagccgccgtggacacgccgatgcttctcgctggcttcgtgccctcccggggctgttgcttg

SEQ ID NO: 174642 - DNA, 30 bp, Homo sapiens
  chr13:114198304-114198334
  hypo
gagtccaggcagcacgtagacggcatctgc

SEQ ID NO: 174643 - DNA, 30 bp, Homo sapiens; identical to SEQ ID NO: 27363
  chr13:114199040-114199070
  hypo

SEQ ID NO: 174644 - DNA, 30 bp, Homo sapiens; identical to SEQ ID NO: 27364
  chr13:114201781-114201811
  hypo

SEQ ID NO: 174645 - DNA, 623 bp, Homo sapiens
  chr13:114202334-114202957
  hypo
tggttggggcgggggcgggggggcttgggcaaggcttattattttctgctaatgaaccgaaaggcttaattttgccttattgttcagtgtggattatttaagaggttttgcgtgtatttggtgccttcgggtgtttggagtgcttctgtgcctttccctacttgacgtgttattcagggaccatcgcagcgtgcctgtggctcgtctgggttctctgtttcgtgtgtgtttaactctgtgtgggtccagtcttcagcagtgacgtaatgaaccgctcttgcagtttctcctggcggcgctggtcctgtctctcattctgccgaggagcagccagtacatcaagtggatcgtctctgcggggcttgcccaggtcagcgagttttcctttgtcctggggagccgggcgcgaagagcgggcgtcatctctcgggaggtgagtggcttccccccgcggagcgcttctcgggcggcacgggctgcactctgggtttgagtcgggtgtggcgaaggcggctcggcagcacagcggggcctgggggcagggtcctcctccaggggggcacgcagaggcctggctgctctctgctcatccagcatgtggcgttttcagaggaaagttgcag

SEQ ID NO: 174646 - DNA, 348 bp, Homo sapiens; identical to SEQ ID NO: 86470
  chr13:114203746-114204094
  hypo

SEQ ID NO: 174647 - DNA, 297 bp, Homo sapiens
  chr13:114204952-114205249
  hypo
aaggctgggtgctaacgtggtagaagagcaggagagccaaccactccccagtcccctttgtgtggcagcattgattcacgagggcagattcctcctgacctaaacacctccctgcaggcctcacctcccaacgcttgcagtgcacatcgaggggacagaagcatttgaaccgtagcaggtaccgtattaggctttttcaactgcatgaatttttttaattgacagataaaagtcaacatatttattgtgtacaacatagcaagtactttaagccagggttttcgtatacctgtcagc

SEQ ID NO: 174648 - DNA, 30 bp, Homo sapiens
  chr13:114205587-114205617
  hypo
tgtgctgctttgccacgcctgtgacactcc

SEQ ID NO: 174649 - DNA, 31 bp, Homo sapiens; identical to SEQ ID NO: 86472
  chr13:114206580-114206611
  hypo

SEQ ID NO: 174650 - DNA, 43 bp, Homo sapiens; identical to SEQ ID NO: 86473
  chr13:114212468-114212511
  hypo

SEQ ID NO: 174651 - DNA, 30 bp, Homo sapiens
  chr13:114220602-114220632
  hypo
gccacagccctgcccgacgtaggtaattca

SEQ ID NO: 174652 - DNA, 32 bp, Homo sapiens
  chr13:114221385-114221417
  hypo
ttggtgaacaaatgccgcggccaggcaggtgg

SEQ ID NO: 174653 - DNA, 51 bp, Homo sapiens; identical to SEQ ID NO: 86475
  chr13:114237563-114237614
  hypo

SEQ ID NO: 174654 - DNA, 31 bp, Homo sapiens; identical to SEQ ID NO: 50949
  chr13:114238865-114238896
  hypo

SEQ ID NO: 174655 - DNA, 165 bp, Homo sapiens
  chr13:114240859-114241024
  hypo
tttcccaccgtgcatcgttttgtaactgagtgaaaggtgctgttgatgtgtttacctacttaccgcacagagttggaaagagtccgcacatgctgcctctgcctgagatacatctgtagcgaaaatgcgtccagagtgtggagccctctccgttggcgcagaggt

SEQ ID NO: 174656 - DNA, 30 bp, Homo sapiens
  chr13:114241228-114241258
  hypo
accatgccctgacctcgtgcgggcatgcac

SEQ ID NO: 174657 - DNA, 43 bp, Homo sapiens; identical to SEQ ID NO: 27369
  chr13:114244324-114244367
  hypo

SEQ ID NO: 174658 - DNA, 146 bp, Homo sapiens; identical to SEQ ID NO: 86478
  chr13:114246190-114246336
  hypo

SEQ ID NO: 174659 - DNA, 851 bp, Homo sapiens; identical to SEQ ID NO: 86479
  chr13:114251688-114252539
  hypo

SEQ ID NO: 174660 - DNA, 31 bp, Homo sapiens; identical to SEQ ID NO: 27372
  chr13:114256383-114256414
  hypo

SEQ ID NO: 174661 - DNA, 86 bp, Homo sapiens; identical to SEQ ID NO: 86481
  chr13:114258209-114258295
  hypo

SEQ ID NO: 174662 - DNA, 30 bp, Homo sapiens; identical to SEQ ID NO: 86482
  chr13:114264423-114264453
  hypo

SEQ ID NO: 174663 - DNA, 31 bp, Homo sapiens; identical to SEQ ID NO: 86483
  chr13:114264680-114264711
  hypo

SEQ ID NO: 174664 - DNA, 245 bp, Homo sapiens; identical to SEQ ID NO: 86484
  chr13:114271764-114272009
  hypo

SEQ ID NO: 174665 - DNA, 30 bp, Homo sapiens; identical to SEQ ID NO: 27374
  chr13:114276770-114276800
  hypo

SEQ ID NO: 174666 - DNA, 102 bp, Homo sapiens
  chr13:114281662-114281764
  hypo
gccggcaggagcagcggcctgtgtgagcccctggggagaagcagccccccacccaggcctgtgtcccagaagtcggcatctgtggtcgcagtggcctttcct

SEQ ID NO: 174667 - DNA, 30 bp, Homo sapiens; identical to SEQ ID NO: 86487
  chr13:114282671-114282701
  hypo

SEQ ID NO: 174668 - DNA, 115 bp, Homo sapiens
  chr13:114283431-114283546
  hypo
gcagggacagtgctgcggagacacagtgaggggagctgccacgcagggcacgcagaggaaggtgcaggcacccttgcccagcactgcatgggccggatgccgcggggccttccgc

SEQ ID NO: 174669 - DNA, 945 bp, Homo sapiens; identical to SEQ ID NO: 27375
  chr13:114283924-114284869
  hypo

SEQ ID NO: 174670 - DNA, 755 bp, Homo sapiens; identical to SEQ ID NO: 50950
  chr13:114285597-114286352
  hypo

SEQ ID NO: 174671 - DNA, 20 bp, Homo sapiens
  chr13:114286822-114286842
  hypo
tggtgcttggggctcacgcc

SEQ ID NO: 174672 - DNA, 31 bp, Homo sapiens; identical to SEQ ID NO: 27377
  chr13:114287596-114287627
  hypo

SEQ ID NO: 174673 - DNA, 42 bp, Homo sapiens; identical to SEQ ID NO: 86493
  chr13:114288212-114288254
  hypo

SEQ ID NO: 174674 - DNA, 22 bp, Homo sapiens
  chr13:114289075-114289097
  hypo
gccttattcccagagcgaggtt

SEQ ID NO: 174675 - DNA, 101 bp, Homo sapiens; identical to SEQ ID NO: 86494
  chr13:114290174-114290275
  hypo

SEQ ID NO: 174676 - DNA, 158 bp, Homo sapiens
  chr13:114290657-114290815
  hypo
gggagaataggcctcgatttgcctctcatctcatttacttcagagtttataaattctgtgaggagacactgatgactgggaaccgggaagctgtgtgtggcggtcagcgggtcagccgtcctggctccaccccagtgtgtaccgtctccgctgggaga

SEQ ID NO: 174677 - DNA, 30 bp, Homo sapiens; identical to SEQ ID NO: 86496
  chr13:114292205-114292235
  hypo

SEQ ID NO: 174678 - DNA, 175 bp, Homo sapiens
  chr13:114292580-114292755
  hypo
tcagaacgcgtctgcggtctgggcgcaagtagttttcagaacgtgtctgcgatcacagcacacatttttcagaacgcatctgcggtcatggtgcatgtgtttttcagaatgcatctatggtcatagcgcatgtatttttcagaacgtctgccatcacggcgcacgtgtttttcag

SEQ ID NO: 174679 - DNA, 30 bp, Homo sapiens
  chr13:114293221-114293251
  hypo
ccgggtaacagggctcgacatagtgagttt

SEQ ID NO: 174680 - DNA, 30 bp, Homo sapiens
  chr13:114293455-114293485
  hypo
gcttttgacagaggccggttctccttctgt

SEQ ID NO: 174681 - DNA, 693 bp, Homo sapiens; identical to SEQ ID NO: 86498
  chr13:114293924-114294617
  hypo

SEQ ID NO: 174682 - DNA, 57 bp, Homo sapiens; identical to SEQ ID NO: 86499
  chr13:114294961-114295018
  hypo

SEQ ID NO: 174683 - DNA, 30 bp, Homo sapiens; identical to SEQ ID NO: 27379
  chr13:114295265-114295295
  hypo

SEQ ID NO: 174684 - DNA, 151 bp, Homo sapiens; identical to SEQ ID NO: 86501
  chr13:114295751-114295902
  hypo

SEQ ID NO: 174685 - DNA, 43 bp, Homo sapiens
  chr13:114296439-114296482
  hypo
ggctcagaaaagacccgagaagaccttacgtttacacctcagg

SEQ ID NO: 174686 - DNA, 251 bp, Homo sapiens
  chr13:114300499-114300750
  hypo
agaaaataaacattggcgaggatgtggagaaggcagagccctgtacacggtggggatgtaaagagccgcagccactatgaaaaaccaaatggctgtttttcacagaattaaaaacagaattaccctatgcccggcaattctgctcagcgtatacacccagagacatttgtacacccatgtctacacgtaccactattcagggtagctaaacagtggaggcacccgaagtgtccatccgtggatgagtggac

SEQ ID NO: 174687 - DNA, 506 bp, Homo sapiens; identical to SEQ ID NO: 86504
  chr13:114302290-114302796
  hypo

SEQ ID NO: 174688 - DNA, 30 bp, Homo sapiens
  chr13:114303026-114303056
  hypo
tcccggagctgtgagcgtccttaggtgaca

SEQ ID NO: 174689 - DNA, 30 bp, Homo sapiens; identical to SEQ ID NO: 86505
  chr13:114303262-114303292
  hypo

SEQ ID NO: 174690 - DNA, 298 bp, Homo sapiens
  chr13:114303497-114303795
  hypo
ggaagaactgatactcgcgagcaggtccttcagatgtgggcgcttctctggagttcgcacactgacaacaccgttgctccaaaccactttggggatgatttggcagggaactgacgggcaaggtaagcccaaccaggagggtgtccttgagcgaccccgcaggcgtgcccaggacccctgcgcaaaccgtttcacttctcaatcttgagtttgaactccactttcccttcatacgggtcgtggggattgttgaaggtcacgtgctccgccatgaccttgcacacgatggcgacctcag

SEQ ID NO: 174691 - DNA, 571 bp, Homo sapiens
  chr13:114304565-114305136
  hypo
tgggcttgggaaacacgcagaacgttccagtcaggaccggctaagtcacacctttgtttcatttttctacatgaaggggcttattgctttcctttcgctaagtgtgagaggactcagcagctgtggtgagggaagcgtggaaggaaggaacctacctgggctttcttcccgtaataagggaagtagtgcagactgaaggtgccgttgggagggtagtacttgacctgcagcggctggccgagctcgcggggctggtcctggggaggagaggccactgcctgagtcaggcgggagctggtgtgtgccggtgtctgtgtgttgcgtttgtgtgcgtgtgtgcacacacgcgctgtgtaggtgcttgcataaacactttattgcatacttagcataaatcagatgcaatctttctaatcagtgctgagatctcagcaaggatatgatttgttagcatgcaaaatgcccagtgacccctccgtgtgcctctaacaacttgaaatgttggaaggatgacgcaggtgggtgaagctgggaggcggcttgcttgtctgtactcgagggtagccactgc

SEQ ID NO: 174692 - DNA, 213 bp, Homo sapiens
  chr13:114305731-114305944
  hypo
gcgtgctgctgacacgctactcagatgcttctggaagccaaacaataagaaaaagccccattgtttcccttgctgggttttacccgccatggtggagctcgctgtggtgatggttcggtgtttacgtctggtttactgggccgacggctgacattcctggagagaaccaggtgggccgtgcccagcatgaaccagcacgaccctgacaagctc

SEQ ID NO: 174693 - DNA, 30 bp, Homo sapiens
  chr13:114309107-114309137
  hypo
ggcaacatcccgggcgcttacctggtgacc

SEQ ID NO: 174694 - DNA, 30 bp, Homo sapiens; identical to SEQ ID NO: 27384
  chr13:114312312-114312342
  hypo

SEQ ID NO: 174695 - DNA, 30 bp, Homo sapiens
  chr13:114313399-114313429
  hypo
tgcccacttccgcccggagattctgcctga

SEQ ID NO: 174696 - DNA, 293 bp, Homo sapiens; identical to SEQ ID NO: 86510
  chr13:114318213-114318506
  hypo

SEQ ID NO: 174697 - DNA, 30 bp, Homo sapiens; identical to SEQ ID NO: 86511
  chr13:114325814-114325844
  hypo

SEQ ID NO: 174698 - DNA, 30 bp, Homo sapiens; identical to SEQ ID NO: 124170
  chr13:114428140-114428170
  hypo

SEQ ID NO: 174699 - DNA, 31 bp, Homo sapiens
  chr13:114440432-114440463
  hypo
cccatagatcccacgtcggccacaccctggg

SEQ ID NO: 174700 - DNA, 119 bp, Homo sapiens
  chr13:114459435-114459554
  hypo
tgcacacgagactcacgtccgtgtatctgcacacatgagtcacggtgtccatgtatctgcacacacgagacggtgtccatgtatctgcacacgagactcacgtccgtgtatctgcacac

SEQ ID NO: 174701 - DNA, 358 bp, Homo sapiens; identical to SEQ ID NO: 86512
  chr13:114460622-114460980
  hypo

SEQ ID NO: 174702 - DNA, 30 bp, Homo sapiens
  chr13:114464685-114464715
  hypo
tcgtgtctcactggacgcttatcacaatct

SEQ ID NO: 174703 - DNA, 126 bp, Homo sapiens
  chr13:114492850-114492976
  hypo
tggactgaccatgtacgtggatgtcctagtgctgaactgaacaggcacgtggacatcctaacactgaactgaccgggcatgtggacatcctagcgctggactgactgggcacgtggacatcctagc

SEQ ID NO: 174704 - DNA, 30 bp, Homo sapiens
  chr13:114493184-114493214
  hypo
atgtggacatcctagcgctggactgaccgg

SEQ ID NO: 174705 - DNA, 204 bp, Homo sapiens
  chr13:114497266-114497470
  hypo
tgcgcaggacaggtccgaacagactcaggcttcccctgtccctgtgtagcaccatgtgcccgagccacaggccctccctctgctgttaccgatgggttctgcttgtcactgggacctctttcccgagccgacaactcatccatcgggacggaaccaagcgagatgccaactcggggccacagttttcagcggccattcaggagg

SEQ ID NO: 174706 - DNA, 503 bp, Homo sapiens; identical to SEQ ID NO: 86513
  chr13:114497775-114498278
  hypo

SEQ ID NO: 174707 - DNA, 30 bp, Homo sapiens
  chr13:114499615-114499645
  hypo
tgcgtcctcagcctccggtgggctgcgcca

SEQ ID NO: 174708 - DNA, 130 bp, Homo sapiens
  chr13:114499939-114500069
  hypo
actcccacggaggtgcgtcatgggagctttctcagcgggtggctgggtgacttgctattctatggcttccagacggtggtttccactgtgctccaggcgcccgtggccgtggccccgccgaggagcaggg

SEQ ID NO: 174709 - DNA, 264 bp, Homo sapiens; identical to SEQ ID NO: 27386
  chr13:114502705-114502969
  hypo

SEQ ID NO: 174710 - DNA, 177 bp, Homo sapiens
  chr13:114504646-114504823
  hypo
ctatgagttcatcggcgtcagcggctgccaggacgtgctgcacctgtaccgcctgctctgggcctctgcagttctgaacgtcctgggcctgttcctgggcatcatcaccgccgccgtcctgggggccttcaaggacatggtgaggccccttggtgggacccccgctgctcactggga

SEQ ID NO: 174711 - DNA, 30 bp, Homo sapiens
  chr13:114507939-114507969
  hypo
caggcttccgcctgacgcccgagcccgtcc

SEQ ID NO: 174712 - DNA, 30 bp, Homo sapiens
  chr13:114508175-114508205
  hypo
tatggccggggaccgcgccaggtggccctg

SEQ ID NO: 174713 - DNA, 136 bp, Homo sapiens
  chr13:114508568-114508704
  hypo
atgggtgaaacagaccgggccacgtttcttacctcggcactgtaggcattcagggctggccaaccgctgtgctggggcaccctaggtgctgagggtgctggtgggccctggcctctgcctgcggcatatcagagcc

SEQ ID NO: 174714 - DNA, 105 bp, Homo sapiens
  chr13:114515795-114515900
  hypo
agtgggtcacaggtcccgggtgggtcacaggcatcccgggtgggtcacaggtcccgagtgggtcacaggccccgggtgagtcacaggccccgggtgagtcacggg

SEQ ID NO: 174715 - DNA, 151 bp, Homo sapiens
  chr13:114517612-114517763
  hypo
cctgtctcatgtggacggatcctgtctggggccaccaagctctgccagcctgagtcacggtctgatgaaccccctctctgggctccgctggggccttctgatcccagcctcctctgcagggatgggctcccaatcccgccctcacttggtt

SEQ ID NO: 174716 - DNA, 30 bp, Homo sapiens; identical to SEQ ID NO: 27387
  chr13:114536567-114536597
  hypo

SEQ ID NO: 174717 - DNA, 231 bp, Homo sapiens; identical to SEQ ID NO: 27388
  chr13:114537012-114537243
  hypo

SEQ ID NO: 174718 - DNA, 177 bp, Homo sapiens; identical to SEQ ID NO: 86519
  chr13:114551824-114552001
  hypo

SEQ ID NO: 174719 - DNA, 152 bp, Homo sapiens
  chr13:114565256-114565408
  hypo
cctcaactcccatcaccagcacgccccatgccacagtccctgtgcacgcagaatgttccgggtgaggacgctgttggaggacactgcaccagccacacgaccaaccccacagctgggcggcgactccgagcgaccagggcacacaggcccac

SEQ ID NO: 174720 - DNA, 301 bp, Homo sapiens; identical to SEQ ID NO: 9525
  chr13:114565969-114566270
  hypo

SEQ ID NO: 174721 - DNA, 113 bp, Homo sapiens; identical to SEQ ID NO: 124172
  chr13:114566409-114566522
  hypo

SEQ ID NO: 174722 - DNA, 170 bp, Homo sapiens; identical to SEQ ID NO: 86522
  chr13:114616941-114617111
  hypo

SEQ ID NO: 174723 - DNA, 190 bp, Homo sapiens; identical to SEQ ID NO: 27391
  chr13:114617342-114617532
  hypo

SEQ ID NO: 174724 - DNA, 230 bp, Homo sapiens
  chr13:114741915-114742145
  hypo
ggggagcgccagctcgcagctccgtgtcagcccctcagccctgtgctctgggccagtattcaaggtgtgaggaggtgactgcagcaccatccccaggcccacaccaccgtccgttcggcacacctggaaacatctcagagtggcgagtgtggaccgacacaggggcagcctacacgtttcgcggtttagaagccaaccgtgtcaaacaccagctacgcaggttccttgct

SEQ ID NO: 174725 - DNA, 30 bp, Homo sapiens; identical to SEQ ID NO: 27392
  chr13:114742406-114742436
  hypo

SEQ ID NO: 174726 - DNA, 30 bp, Homo sapiens; identical to SEQ ID NO: 86526
  chr13:114744516-114744546
  hypo

SEQ ID NO: 174727 - DNA, 31 bp, Homo sapiens
  chr13:114746821-114746852
  hypo
gccactgtcagagcagcgctgcccatcacca

SEQ ID NO: 174728 - DNA, 90 bp, Homo sapiens
  chr13:114747443-114747533
  hypo
gtcggtacaaggatacgtcgtgctgtgtatttaaacggcgcttcccacacacctgccgtctgcatcccgggaggacgccctttgggaaag

SEQ ID NO: 174729 - DNA, 916 bp, Homo sapiens
  chr13:114748177-114749093
  hypo
ggaatcaaacgaacctcgaaagtggaacagggaggccgcctcccatggctgcctggatggcaggcacagtgggagagtaatgctctgaacctcccaatgtgatgaagccgaaagccgaggcggggccagcaggcctcccgggcacagagccacagagcccagcgtcacacgcaccgtgcacgcaagacagacgtgcacgagactgacgcacacacggccggaggtgcatgtcacagtcgactagacgggccgtggctccctgaggctggctgtggtgtggctagggcacagcccacacttcctgatccttcagctgatccccagatccccacaaacaaggagcaaaaagcacagaatcaaatgacgacacgttccacagggccaggtgggctttctgcggagggcgtggcggtggtggcagcggttctgggagagggaaaccccagcgccacttgtctatgggccgggacggcgtgcatctcactttgccggctctgcgctcttccttctcttctccctcccaaaggctgcggctttgcatgggcagcttgctggcgccactgggcgcgtcccgcagactttaaatggaatgagtggaggtctcggactgctgccggatgtagttctggaagctcttgtctccgatggggtgctccctgaaaagggggatgggagagggaatgaggcacagaccccgttgcctggtgctcacccgtggctgcgggagcttttcctgttcctaaatgtgacacactcacactgcaatccacacaaaaaatagaggagccaaaggaaccacagtgcccccggaagcacccacggtgactctgatgtgtgtgcacaggtgggtcaggcgtgcaagtacatgtgcacgtgtgctctccctgtggcacgtgtgtagcgcatatacatgtgc

SEQ ID NO: 174730 - DNA, 405 bp, Homo sapiens
  chr13:114750985-114751390
  hypo
acgggcggccccacccgggagctccctgcagccccacccccactgcaatctcccgcccactacactggccgtccagggcaggcacgggagtggcactcactggcttccatatttcgtcttcttgaacttgtccctcttatactgggcgtgctcctgctccaaagccccaaccccagcgatgacttgctttagcgtcttgtaggtctcctgggggtcgtcaatgacgaacgtcgaatactcctcctgctccgggccgtcatacacagatttgctcccacaggcctctgtggagggcggaggggtcagcgcagggcaggagcccaggccaccggccccgtctccacacagctgcgtcgctgcaggccccacccacagtacacatccttccaacgcaagctcctccag

SEQ ID NO: 174731 - DNA, 169 bp, Homo sapiens; identical to SEQ ID NO: 86531
  chr13:114760877-114761046
  hypo

SEQ ID NO: 174732 - DNA, 30 bp, Homo sapiens; identical to SEQ ID NO: 86532
  chr13:114761592-114761622
  hypo

SEQ ID NO: 174733 - DNA, 30 bp, Homo sapiens
  chr13:114762242-114762272
  hypo
cgcacatgaggtctcgtggctgagcacgtg

SEQ ID NO: 174734 - DNA, 31 bp, Homo sapiens
  chr13:114764645-114764676
  hypo
aagtacttgttctactcgtgcaacttctata

SEQ ID NO: 174735 - DNA, 362 bp, Homo sapiens; identical to SEQ ID NO: 86533
  chr13:114764875-114765237
  hypo

SEQ ID NO: 174736 - DNA, 230 bp, Homo sapiens
  chr13:114766160-114766390
  hypo
ggctctgggtcaccgcggccccgggctctgcccgcagcactgaatccttcctcccctcagctctccccctgaaaaagcagactcagtcccagggcccagcacgctccagcaagagccagggaaagcgaccttgctccttacctttgcttttgtggtaggtaaattcatggttggtcaagcgaaaccatctcttcttaaaattcttcatcccaaagcgcttccgtccttgg

SEQ ID NO: 174737 - DNA, 229 bp, Homo sapiens; identical to SEQ ID NO: 86535
  chr13:114767008-114767237
  hypo

SEQ ID NO: 174738 - DNA, 456 bp, Homo sapiens
  chr13:114767507-114767963
  hypo
agggccctctgaggctcggccttcattgccgggcaggggtccctgaccagaaccggcggccgagctggaggagaagaaagtggccagacagagtgactggaggacagaggtggaagctgaggacgagaagccaagctggagagacagagtggggaggtgggcgggggagacgcacctcgacaagcgcactcagaaatcggaaagaggggctttgagcagcaacacagccagatgtggccagagagctgtggacgcacaccggagggtgtggaagctgctgggagctgttcaagagagaaaagggcggggcgctgggagccgccaggacagcgcagttcacaaccagtggatgccgaacgccgttcattccagggattcacaggcaggaagtcagcccaggaggctgttgaggaccagcaggacccagtgggatgcgcagggcggggcctacacaga

SEQ ID NO: 174739 - DNA, 78 bp, Homo sapiens; identical to SEQ ID NO: 86537
  chr13:114768254-114768332
  hypo

SEQ ID NO: 174740 - DNA, 329 bp, Homo sapiens
  chr13:114769879-114770208
  hypo
gccaaaggacagggggatagacgtttttcagaagacaaatggccaacaagcatacgatataaagcccagcgtggctcatcacctgaggaatgagagccagagctgcctgtgaccccacctcacgccaggcagaacgaagccacctgcgaccccagctcacgccaggcagaatggagccgcctgaacccagctcacgccgggcagaatggctgggatcaaataaaacacggaaaaatgacagacgctgcagagctgtggaggacgtgagcgcttgcacgctgtggggaatggaaattagcgcttaaggaaacccacggagatttctcaag

SEQ ID NO: 174741 - DNA, 30 bp, Homo sapiens
  chr13:114770540-114770570
  hypo
cacggaggggcggggcgctctgggacacgt

SEQ ID NO: 174742 - DNA, 30 bp, Homo sapiens
  chr13:114770774-114770804
  hypo
agcgggagtgggagccgggccacaggacgg

SEQ ID NO: 174743 - DNA, 202 bp, Homo sapiens
  chr13:114771035-114771237
  hypo
tgagcaaagagccctcgggagcctggagggaaggccagccccaagtgcgggtgtggacaacacggccagtggtacagaaatcacaaggctgctggccagcaagggaggaggctgcccccgactagggaatcttctggaatgtgctgggtgctctggggactgggggcccccatccctttctcccctccggccctgccggatg

SEQ ID NO: 174744 - DNA, 75 bp, Homo sapiens; identical to SEQ ID NO: 86540
  chr13:114773206-114773281
  hypo

SEQ ID NO: 174745 - DNA, 282 bp, Homo sapiens; identical to SEQ ID NO: 86541
  chr13:114774838-114775120
  hypo

SEQ ID NO: 174746 - DNA, 241 bp, Homo sapiens; identical to SEQ ID NO: 124174
  chr13:114776259-114776500
  hypo

SEQ ID NO: 174747 - DNA, 269 bp, Homo sapiens; identical to SEQ ID NO: 124175
  chr13:114776781-114777050
  hypo

SEQ ID NO: 174748 - DNA, 147 bp, Homo sapiens
  chr13:114777571-114777718
  hypo
ctgttgactcaatacacggatgatacgccgatcatcaatactccatatgtgatgggcaggggaggagagcagggcggtgaccagcagctaaaaccctggacaaaccgtccactgcttttgtgacactgtctcgactcccccagaacg

SEQ ID NO: 174749 - DNA, 126 bp, Homo sapiens; identical to SEQ ID NO: 86545
  chr13:114778696-114778822
  hypo

SEQ ID NO: 174750 - DNA, 108 bp, Homo sapiens; identical to SEQ ID NO: 86546
  chr13:114779900-114780008
  hypo

SEQ ID NO: 174751 - DNA, 528 bp, Homo sapiens; identical to SEQ ID NO: 86547
  chr13:114780555-114781083
  hypo

SEQ ID NO: 174752 - DNA, 56 bp, Homo sapiens
  chr13:114781424-114781480
  hypo
ggaggaagagctggccgggaccccccaggggacgcagagcccggcacacaggccag

SEQ ID NO: 174753 - DNA, 31 bp, Homo sapiens
  chr13:114785670-114785701
  hypo
gggtggagcctgtgtccgaggcattagcagc

SEQ ID NO: 174754 - DNA, 30 bp, Homo sapiens; identical to SEQ ID NO: 86548
  chr13:114785928-114785958
  hypo

SEQ ID NO: 174755 - DNA, 30 bp, Homo sapiens
  chr13:114786326-114786356
  hypo
aacaagacccggagcgcagccgcggcgcag

SEQ ID NO: 174756 - DNA, 43 bp, Homo sapiens; identical to SEQ ID NO: 86549
  chr13:114786708-114786751
  hypo

SEQ ID NO: 174757 - DNA, 244 bp, Homo sapiens
  chr13:114789848-114790092
  hypo
agaaagcgctgagaccgcggtgccaccaggcgggggtatatgcggacctaggccccgggctgccctaccctctgcgcttacccacacaccactcaagggccacaaccaggaaggcgccaggcgggattcgggattcaggcctggcttcctgagtgccagcatttcctactcacggcgcccctggaggggcagacccaggtgagacctgccccaaggctgttcacggccacggccggactctccc

SEQ ID NO: 174758 - DNA, 145 bp, Homo sapiens; identical to SEQ ID NO: 27405
  chr13:114791747-114791892
  hypo

SEQ ID NO: 174759 - DNA, 154 bp, Homo sapiens; identical to SEQ ID NO: 86552
  chr13:114799637-114799791
  hypo

SEQ ID NO: 174760 - DNA, 22 bp, Homo sapiens
  chr13:114802295-114802317
  hypo
agccaccgcgcccagcctggag

SEQ ID NO: 174761 - DNA, 104 bp, Homo sapiens
  chr13:114802591-114802695
  hypo
ggtacgcagcctcgggcgttaattatgagattccaccagctgtgagatcaacctgcggcattcttatttacagctttgtggagatgcaacgtctgagtcctgat

SEQ ID NO: 174762 - DNA, 49 bp, Homo sapiens
  chr13:114804553-114804602
  hypo
acgttggcaacaatccgatgagggagctggctccgagcctggcggcctg

SEQ ID NO: 174763 - DNA, 66 bp, Homo sapiens
  chr13:114804860-114804926
  hypo
aggaagccctcccgcgtcccaagggcgctgtgccacaaccctacactcagacgctcactgcggtcc

SEQ ID NO: 174764 - DNA, 205 bp, Homo sapiens
  chr13:114805210-114805415
  hypo
tgggcaccgtgcgtccgtgagcagctgtgaacacaagggtctgggacatgggccccagcactggagcccccggtcttgcgtggggaggtgggacaagctccccccactggacaggaccggggtgagccccagtcagcacacagtcccggcaagccagggtgagcccctggccactttcgacaatggacacgggagaccagaacgc

SEQ ID NO: 174765 - DNA, 44 bp, Homo sapiens; identical to SEQ ID NO: 86557
  chr13:114807146-114807190
  hypo

SEQ ID NO: 174766 - DNA, 425 bp, Homo sapiens
  chr13:114807528-114807953
  hypo
tatttgtacaatatacgtttacctagtatggatttatatgtgtaaattcgcatctgcaaccattattatctgcttatacgttcacctcattccagaaacattcccgaggcgcggcaaacgtgtgcccatcccatccccggcaggacagggcttgtcaggcgctgggcaccgagccatctcccatcctgcgtcccttcatggcaccaccatgtcaaccctgccagtggcctccgcacactgcggaccacgccacccaccacggtgagcacccacggcagcacatgcacctctgttgaccgatgcacgtgaactcctagggagtcgcacacacatgtgaagtctgagcccatcacagagcacacacgagagcaggagtgaggaaggaaatgttggcagactcctcacgtcttcgttctgcacccaga

SEQ ID NO: 174767 - DNA, 35 bp, Homo sapiens
  chr13:114812022-114812057
  hypo
gtaatttccgagtcacggggttgttcctatggaaa

SEQ ID NO: 174768 - DNA, 274 bp, Homo sapiens
  chr13:114812176-114812450
  hypo
cggtgtccgagccctgccttcagagtccagtcccgcctcctacctcagatggaagagaatacagaggccacaaacagacccacacaatgcagccaactaagctgtaaatgtgccaaagtcatcaacggaggaagggtcgtctttcagccaagggtgccggaacaaagggatgtctacatggaaaaaacagaatcccgacccttttctttgtgctataagtgaaaattagcttgaaacagatcatggaactaaatgtgaacgctgaaagcacatg

SEQ ID NO: 174769 - DNA, 30 bp, Homo sapiens; identical to SEQ ID NO: 86559
  chr13:114816400-114816430
  hypo

SEQ ID NO: 174770 - DNA, 30 bp, Homo sapiens; identical to SEQ ID NO: 27409
  chr13:114827286-114827316
  hypo

SEQ ID NO: 174771 - DNA, 229 bp, Homo sapiens; identical to SEQ ID NO: 86561
  chr13:114841889-114842118
  hypo

SEQ ID NO: 174772 - DNA, 30 bp, Homo sapiens; identical to SEQ ID NO: 27410
  chr13:114843009-114843039
  hypo

SEQ ID NO: 174773 - DNA, 30 bp, Homo sapiens; identical to SEQ ID NO: 86563
  chr13:114844710-114844740
  hypo

SEQ ID NO: 174774 - DNA, 30 bp, Homo sapiens; identical to SEQ ID NO: 86564
  chr13:114845180-114845210
  hypo

SEQ ID NO: 174775 - DNA, 91 bp, Homo sapiens
  chr13:114846579-114846670
  hypo
gcgtggcagagggccgtccacccaaaacgcaacagtaccccagttacacgctcctggtgcaaatgaccctcctctcgtgcttggtgcaaag

SEQ ID NO: 174776 - DNA, 320 bp, Homo sapiens
  chr13:114847024-114847344
  hypo
tatcctgagaaacacgactccaaaccctgtcagctggttctaactgtgctcactcttataaacaggtaataaaatatgggaaagaaggcgattgcagacaggggacctctcctccacagagacgtgtccaccaggagactgaggcaaatcctatgggttcaaaaccgaagtttcactggcggctgaaaacacccagggaataacgaggaaagagaaggcaaaggtgggctgaaatgaagccgcccttctgagttcacaaaggagcagagacacaccggtgctgcacaggaacccccagggcccccgtgttcctagcgcag

SEQ ID NO: 174777 - DNA, 30 bp, Homo sapiens
  chr13:114855087-114855117
  hypo
tgcacagacatcagccgcgcacggccgccc

SEQ ID NO: 174778 - DNA, 271 bp, Homo sapiens
  chr13:114855473-114855744
  hypo
atgatatttcatgtcacggatggaacgcattctgtgtatttgttaatcactgatggatgtttgggctgttcccagctttcagttgttgtgaatggtgccgctgtgaagtgtgcacaagttcccatgtgaacacggacagctttgggattctcttgattatttaccaacgggtggggccgcacggcaacaggtttaattaccctaggagccacccggctgcctgcccagggccgtgccttcacacctgcctgcaaagcgcaagcgttaccat

SEQ ID NO: 174779 - DNA, 121 bp, Homo sapiens
  chr13:114861674-114861795
  hypo
ctgggaagggagtgcgcaggcccaccccggcgtgctgcctgggagtccacgttctcgaaaatgcagggtgaccctggcgcaggatcgggtctgagagctgctcaccgacccatgcctcctc

SEQ ID NO: 174780 - DNA, 30 bp, Homo sapiens
  chr13:114862338-114862368
  hypo
tacaccccagccaaacgcactccgtgtttg

SEQ ID NO: 174781 - DNA, 30 bp, Homo sapiens
  chr13:114862896-114862926
  hypo
caatggtccaaaagacgccatcgctgctac

SEQ ID NO: 174782 - DNA, 30 bp, Homo sapiens
  chr13:114863259-114863289
  hypo
gggcagccgacaggacgggggacgcagcct

SEQ ID NO: 174783 - DNA, 1063 bp, Homo sapiens; identical to SEQ ID NO: 86569
  chr13:114867636-114868699
  hypo

SEQ ID NO: 174784 - DNA, 85 bp, Homo sapiens; identical to SEQ ID NO: 27414
  chr13:114869699-114869784
  hypo

SEQ ID NO: 174785 - DNA, 71 bp, Homo sapiens; identical to SEQ ID NO: 86571
  chr13:114881846-114881917
  hypo

SEQ ID NO: 174786 - DNA, 160 bp, Homo sapiens
  chr13:114887172-114887332
  hypo
gtagccctgaggacgcgggcggccagaccagtccctgagtgcggcaccatggccgtgtgagtttatggcccattgcgctagccctgtacagtgaatgagatactagttgtttacagctgtgagcatacacaggccccccgccacacgctcaggaaggagc

SEQ ID NO: 174787 - DNA, 30 bp, Homo sapiens; identical to SEQ ID NO: 27416
  chr13:114902141-114902171
  hypo

SEQ ID NO: 174788 - DNA, 30 bp, Homo sapiens; identical to SEQ ID NO: 86573
  chr13:114911726-114911756
  hypo

SEQ ID NO: 174789 - DNA, 230 bp, Homo sapiens; identical to SEQ ID NO: 27417
  chr13:114917487-114917717
  hypo

SEQ ID NO: 174790 - DNA, 245 bp, Homo sapiens; identical to SEQ ID NO: 86575
  chr13:114961695-114961940
  hypo

SEQ ID NO: 174791 - DNA, 30 bp, Homo sapiens; identical to SEQ ID NO: 27419
  chr13:114963680-114963710
  hypo

SEQ ID NO: 174792 - DNA, 31 bp, Homo sapiens; identical to SEQ ID NO: 50956
  chr13:114976825-114976856
  hypo

SEQ ID NO: 174793 - DNA, 42 bp, Homo sapiens; identical to SEQ ID NO: 86578
  chr13:114989884-114989926
  hypo

SEQ ID NO: 174794 - DNA, 99 bp, Homo sapiens; identical to SEQ ID NO: 27420
  chr13:115024216-115024315
  hypo

SEQ ID NO: 174795 - DNA, 30 bp, Homo sapiens
  chr13:115024854-115024884
  hypo
taaagcaattgggaacgaggtattctttgt

SEQ ID NO: 174796 - DNA, 90 bp, Homo sapiens
  chr13:115025096-115025186
  hypo
gctctagctttgaaacgtgagaggcatcagaatagattgggtgattatttgaagctaggaatagtcattgggtcacggaaacaattgggc

SEQ ID NO: 174797 - DNA, 248 bp, Homo sapiens; identical to SEQ ID NO: 86580
  chr13:115052294-115052542
  hypo

SEQ ID NO: 174798 - DNA, 31 bp, Homo sapiens; identical to SEQ ID NO: 86581
  chr14:20146797-20146828
  hypo

SEQ ID NO: 174799 - DNA, 36 bp, Homo sapiens; identical to SEQ ID NO: 86582
  chr14:20707549-20707585
  hypo

SEQ ID NO: 174800 - DNA, 30 bp, Homo sapiens; identical to SEQ ID NO: 86583
  chr14:20785766-20785796
  hypo

SEQ ID NO: 174801 - DNA, 30 bp, Homo sapiens; identical to SEQ ID NO: 27422
  chr14:20786054-20786084
  hypo

SEQ ID NO: 174802 - DNA, 31 bp, Homo sapiens; identical to SEQ ID NO: 27423
  chr14:20786685-20786716
  hypo

SEQ ID NO: 174803 - DNA, 30 bp, Homo sapiens; identical to SEQ ID NO: 27424
  chr14:20904154-20904184
  hypo

SEQ ID NO: 174804 - DNA, 317 bp, Homo sapiens; identical to SEQ ID NO: 124201
  chr14:21121262-21121579
  hypo

SEQ ID NO: 174805 - DNA, 30 bp, Homo sapiens
  chr14:21149895-21149925
  hypo
cgcgagttcaaatctcgctggggccttgcg

SEQ ID NO: 174806 - DNA, 537 bp, Homo sapiens; identical to SEQ ID NO: 124203
  chr14:21150138-21150675
  hypo

SEQ ID NO: 174807 - DNA, 817 bp, Homo sapiens; identical to SEQ ID NO: 124205
  chr14:21152234-21153051
  hypo

SEQ ID NO: 174808 - DNA, 30 bp, Homo sapiens; identical to SEQ ID NO: 86588
  chr14:21167983-21168013
  hypo

SEQ ID NO: 174809 - DNA, 30 bp, Homo sapiens; identical to SEQ ID NO: 86589
  chr14:21200801-21200831
  hypo

SEQ ID NO: 174810 - DNA, 30 bp, Homo sapiens
  chr14:21227473-21227503
  hypo
cattccaatgaatatcgatttaagacctga

SEQ ID NO: 174811 - DNA, 30 bp, Homo sapiens
  chr14:21230397-21230427
  hypo
tgggagagaggctctcgctgacctagcgca

SEQ ID NO: 174812 - DNA, 26 bp, Homo sapiens
  chr14:21236065-21236091
  hypo
cccagctgactcgtttcatcgacaat

SEQ ID NO: 174813 - DNA, 30 bp, Homo sapiens; identical to SEQ ID NO: 27425
  chr14:21238096-21238126
  hypo

SEQ ID NO: 174814 - DNA, 34 bp, Homo sapiens
  chr14:21253763-21253797
  hypo
accgtgcttggccgatttttacttttttaggggg

SEQ ID NO: 174815 - DNA, 30 bp, Homo sapiens
  chr14:21258706-21258736
  hypo
cactggaagaacacacgagctgctagatgt

SEQ ID NO: 174816 - DNA, 30 bp, Homo sapiens
  chr14:21281835-21281865
  hypo
gcaggtcaggcctcccgctcttcagtccat

SEQ ID NO: 174817 - DNA, 30 bp, Homo sapiens
  chr14:21288626-21288656
  hypo
ttcctaatgtgcgtgcgggccccttattgc

SEQ ID NO: 174818 - DNA, 43 bp, Homo sapiens; identical to SEQ ID NO: 86591
  chr14:21304101-21304144
  hypo

SEQ ID NO: 174819 - DNA, 241 bp, Homo sapiens; identical to SEQ ID NO: 86592
  chr14:21304263-21304504
  hypo

SEQ ID NO: 174820 - DNA, 30 bp, Homo sapiens
  chr14:21308933-21308963
  hypo
tcaatttgcttgatgcgagacggagacgat

SEQ ID NO: 174821 - DNA, 24 bp, Homo sapiens
  chr14:21315805-21315829
  hypo
tccgtgatctgtaaaacagacaag

SEQ ID NO: 174822 - DNA, 30 bp, Homo sapiens; identical to SEQ ID NO: 86594
  chr14:21456702-21456732
  hypo

SEQ ID NO: 174823 - DNA, 275 bp, Homo sapiens
  chr14:21464748-21465023
  hypo
gctcatcgctggccccgtatcactcagcctgtccttaaacggcctcgccatgtgcattgtcacttgtgctgtccagatgggcacatgcagcatgctgtgctcacagcccgccggcacggcaggtatggggggtgtgaccaaaatcagtgggatgtggcaggaagctgcagcccacgccagcatctgtttccacagggatttgtatcgttgtgcccgtgtcagctcctggggagatcttttacctgtgcttactccgtctgcgtttcctccatcta

SEQ ID NO: 174824 - DNA, 269 bp, Homo sapiens; identical to SEQ ID NO: 124213
  chr14:21493800-21494069
  hypo

SEQ ID NO: 174825 - DNA, 105 bp, Homo sapiens; identical to SEQ ID NO: 124214
  chr14:21494160-21494265
  hypo

SEQ ID NO: 174826 - DNA, 31 bp, Homo sapiens; identical to SEQ ID NO: 86595
  chr14:21548996-21549027
  hypo

SEQ ID NO: 174827 - DNA, 33 bp, Homo sapiens
  chr14:21549737-21549770
  hypo
ctgcactggccctgcggcgggccccagagccca

SEQ ID NO: 174828 - DNA, 30 bp, Homo sapiens; identical to SEQ ID NO: 86597
  chr14:21558837-21558867
  hypo

SEQ ID NO: 174829 - DNA, 30 bp, Homo sapiens
  chr14:21559341-21559371
  hypo
tgcacgcacccacccgaatttcgcccaatt

SEQ ID NO: 174830 - DNA, 556 bp, Homo sapiens; identical to SEQ ID NO: 86598
  chr14:21560013-21560569
  hypo

SEQ ID NO: 174831 - DNA, 30 bp, Homo sapiens; identical to SEQ ID NO: 86599
  chr14:21561051-21561081
  hypo

SEQ ID NO: 174832 - DNA, 34 bp, Homo sapiens; identical to SEQ ID NO: 86600
  chr14:21657869-21657903
  hypo

SEQ ID NO: 174833 - DNA, 42 bp, Homo sapiens
  chr14:21688655-21688697
  hypo
gggattacaggcgtcagccaccactctcggcctctatttctt

SEQ ID NO: 174834 - DNA, 121 bp, Homo sapiens; identical to SEQ ID NO: 86601
  chr14:21689076-21689197
  hypo

SEQ ID NO: 174835 - DNA, 24 bp, Homo sapiens
  chr14:21714428-21714452
  hypo
gcctcaaaggctgggcgcggtggc

SEQ ID NO: 174836 - DNA, 83 bp, Homo sapiens
  chr14:21752060-21752143
  hypo
attataaacgtgagccaccgtgcctggcctgagatttacttgtaatcctaggtctaacatgcgaaagtacttaaactttgggg

SEQ ID NO: 174837 - DNA, 30 bp, Homo sapiens; identical to SEQ ID NO: 86604
  chr14:21755783-21755813
  hypo

SEQ ID NO: 174838 - DNA, 400 bp, Homo sapiens; identical to SEQ ID NO: 124225
  chr14:21768994-21769394
  hypo

SEQ ID NO: 174839 - DNA, 39 bp, Homo sapiens; identical to SEQ ID NO: 86606
  chr14:21789023-21789062
  hypo

SEQ ID NO: 174840 - DNA, 21 bp, Homo sapiens
  chr14:21818238-21818259
  hypo
aaacaggaattaaaggccagg

SEQ ID NO: 174841 - DNA, 31 bp, Homo sapiens; identical to SEQ ID NO: 27430
  chr14:21876123-21876154
  hypo

SEQ ID NO: 174842 - DNA, 30 bp, Homo sapiens; identical to SEQ ID NO: 86609
  chr14:21899060-21899090
  hypo

SEQ ID NO: 174843 - DNA, 113 bp, Homo sapiens
  chr14:21943009-21943122
  hypo
tattttgtactctcaccgtatcccagatttgcagtttgatttgttttccatcaatgttgaccatacgagctccaaactccacacctgtcggtaaagaccgagagaaagaatgt

SEQ ID NO: 174844 - DNA, 105 bp, Homo sapiens; identical to SEQ ID NO: 86610
  chr14:21969878-21969983
  hypo

SEQ ID NO: 174845 - DNA, 73 bp, Homo sapiens
  chr14:21971444-21971517
  hypo
cagaccagagactaacgaactggcaaaggcagctactgtagtcgagtcctgttctgcacgccgcttctgccct

SEQ ID NO: 174846 - DNA, 267 bp, Homo sapiens
  chr14:21980068-21980335
  hypo
acacccggccatagtacagatttttaagatgaaggatcactagttccttttgacagtttggtactaacataccttttccactgaaggtggtgttggtttgtttccatgcgttcatttacaaaaaaataaaaaaataaaaaacacaacggtggtccccaatctgaggtgaggagggggcggtggtgggtgcgggcatgcttctttgtgttgacgaggcgtggggaagtggggagggctgatgaaggaaaaatccgagaggtcttcaaa

SEQ ID NO: 174847 - DNA, 30 bp, Homo sapiens; identical to SEQ ID NO: 9553
  chr14:22694049-22694079
  hypo

SEQ ID NO: 174848 - DNA, 36 bp, Homo sapiens; identical to SEQ ID NO: 86613
  chr14:22763725-22763761
  hypo

SEQ ID NO: 174849 - DNA, 30 bp, Homo sapiens
  chr14:22988678-22988708
  hypo
ctgcagcatctaaagcggacgcccaggctt

SEQ ID NO: 174850 - DNA, 30 bp, Homo sapiens
  chr14:22997042-22997072
  hypo
tacaggcgtgcaccgcgcccggcctcatga

SEQ ID NO: 174851 - DNA, 30 bp, Homo sapiens
  chr14:23017516-23017546
  hypo
acagtattctaagtacgccagaaagctgtt

SEQ ID NO: 174852 - DNA, 30 bp, Homo sapiens
  chr14:23022622-23022652
  hypo
ccaccttcacaaaggcggggtttgccacct

SEQ ID NO: 174853 - DNA, 30 bp, Homo sapiens
  chr14:23023083-23023113
  hypo
gcctgtggaggcccgcgggagcctgtggag

SEQ ID NO: 174854 - DNA, 30 bp, Homo sapiens; identical to SEQ ID NO: 86614
  chr14:23027726-23027756
  hypo

SEQ ID NO: 174855 - DNA, 18 bp, Homo sapiens
  chr14:23183108-23183126
  hypo
gggggtgtacaccccccg

SEQ ID NO: 174856 - DNA, 121 bp, Homo sapiens
  chr14:23183245-23183366
  hypo
tactcccaatatcgcaggtggggaaaacaccccgcctgtgatattgttcttaatatccattaagggagcagatgatattactcccaaaattgcagtgagtgtacacccaccctgtaatatt

SEQ ID NO: 174857 - DNA, 30 bp, Homo sapiens
  chr14:23183738-23183768
  hypo
attgttcctaatacccgggggggcggggag

SEQ ID NO: 174858 - DNA, 30 bp, Homo sapiens
  chr14:23184020-23184050
  hypo
tcccaatatcgcaggcgctgtacaccccac

SEQ ID NO: 174859 - DNA, 31 bp, Homo sapiens; identical to SEQ ID NO: 27432
  chr14:23240342-23240373
  hypo

SEQ ID NO: 174860 - DNA, 60 bp, Homo sapiens
  chr14:23311695-23311755
  hypo
gtgccacaccactgcgcttccgcgaggtgccctatgcctacatccgtgagggccatgaga

SEQ ID NO: 174861 - DNA, 251 bp, Homo sapiens; identical to SEQ ID NO: 86619
  chr14:23315013-23315264
  hypo

SEQ ID NO: 174862 - DNA, 91 bp, Homo sapiens
  chr14:23323995-23324086
  hypo
gggtgcggtggctcacgagctcgtgcctctaatcccagcactgtggaaggccaatcatgaggtcaagagatcgagaccatcctggccaaca

SEQ ID NO: 174863 - DNA, 28 bp, Homo sapiens
  chr14:23339756-23339784
  hypo
agactccgtctcaaaaaacaaacaaaca

SEQ ID NO: 174864 - DNA, 197 bp, Homo sapiens; identical to SEQ ID NO: 124253
  chr14:23355350-23355547
  hypo

SEQ ID NO: 174865 - DNA, 30 bp, Homo sapiens
  chr14:23374325-23374355
  hypo
gcactcccagcaaccgctgcccagtcagcc

SEQ ID NO: 174866 - DNA, 30 bp, Homo sapiens; identical to SEQ ID NO: 27433
  chr14:23375560-23375590
  hypo

SEQ ID NO: 174867 - DNA, 94 bp, Homo sapiens
  chr14:23400198-23400292
  hypo
aagagcaaaataatgtcggggcagggggaggaggaaaggaaagtcggaaaaaccaaagcatttaaaaaatgcaccatgaaggccaggctgggca

SEQ ID NO: 174868 - DNA, 329 bp, Homo sapiens
  chr14:23426911-23427240
  hypo
cctcgtttagttcttaaagcgtcctgtgagaaagtcaccattatactcattttacagagggggagaactgaggcacaaagggttaagttcgaggtcgccatttggggggtctaaacctgtcccaatagctctcggaaggaaccttcccagacctgccacccaagccgcgtcctgcgagtctcctcactaaggcctggctctgaggcgctgccgcccagcccagcccagcccagcccagcccatgccgggcaccatacagtgcttcctcagggtcaccttcctctcgaattcccaccacagactccctattagcgcgcattcctcattcg

SEQ ID NO: 174869 - DNA, 30 bp, Homo sapiens; identical to SEQ ID NO: 86624
  chr14:23429489-23429519
  hypo

SEQ ID NO: 174870 - DNA, 30 bp, Homo sapiens
  chr14:23456688-23456718
  hypo
cgctgggcccggaaacggggagggcgggcc

SEQ ID NO: 174871 - DNA, 31 bp, Homo sapiens; identical to SEQ ID NO: 86625
  chr14:23457305-23457336
  hypo

SEQ ID NO: 174872 - DNA, 28 bp, Homo sapiens
  chr14:23469629-23469657
  hypo
aaaggagaggaggagccgggcatggtgg

SEQ ID NO: 174873 - DNA, 121 bp, Homo sapiens
  chr14:23470947-23471068
  hypo
acaggtgtgagccactgcgcccagctccttcttctttaaatagtctttccttggtcgtccttccttggtcatctttccaaaacagcactgtactgcaggttaaaaaaaaaaaaaaaaaaaa

SEQ ID NO: 174874 - DNA, 30 bp, Homo sapiens; identical to SEQ ID NO: 86628
  chr14:23495359-23495389
  hypo

SEQ ID NO: 174875 - DNA, 30 bp, Homo sapiens
  chr14:23502719-23502749
  hypo
tgccgagccaacagccgttcccagaagctg

SEQ ID NO: 174876 - DNA, 30 bp, Homo sapiens
  chr14:23504906-23504936
  hypo
cagagacgggaggacggttgagactgcata

SEQ ID NO: 174877 - DNA, 449 bp, Homo sapiens; identical to SEQ ID NO: 86629
  chr14:23511621-23512070
  hypo

SEQ ID NO: 174878 - DNA, 34 bp, Homo sapiens; identical to SEQ ID NO: 86630
  chr14:23517721-23517755
  hypo

SEQ ID NO: 174879 - DNA, 105 bp, Homo sapiens; identical to SEQ ID NO: 27436
  chr14:23518258-23518363
  hypo

SEQ ID NO: 174880 - DNA, 99 bp, Homo sapiens
  chr14:23528346-23528445
  hypo
gttttcccagctagcggcgcccaccccggtcccgcacaggtgtgctccgactccggcttctgctgtggcgcttggtgtccctgcgatccctttccctgc

SEQ ID NO: 174881 - DNA, 89 bp, Homo sapiens; identical to SEQ ID NO: 86633
  chr14:23530468-23530557
  hypo

SEQ ID NO: 174882 - DNA, 30 bp, Homo sapiens
  chr14:23532894-23532924
  hypo
ccgctaggggtatttcgttatcggctcact

SEQ ID NO: 174883 - DNA, 31 bp, Homo sapiens; identical to SEQ ID NO: 27437
  chr14:23536685-23536716
  hypo

SEQ ID NO: 174884 - DNA, 42 bp, Homo sapiens
  chr14:23537840-23537882
  hypo
cagggttatattttacgggcggattaccgtacatgaggtact

SEQ ID NO: 174885 - DNA, 87 bp, Homo sapiens
  chr14:23559265-23559352
  hypo
ctccctcaggatggatcatctcgtcctccgactcagctgaagcttctgcaaagtacagatcgggtcggggcagggagggagtgaagg

SEQ ID NO: 174886 - DNA, 44 bp, Homo sapiens; identical to SEQ ID NO: 86635
  chr14:23577684-23577728
  hypo

SEQ ID NO: 174887 - DNA, 30 bp, Homo sapiens
  chr14:23606420-23606450
  hypo
actcgtggacccgctcgcacttctggcttc

SEQ ID NO: 174888 - DNA, 30 bp, Homo sapiens
  chr14:23606912-23606942
  hypo
gtatgccacacacatcgcaggtgaccacgt

SEQ ID NO: 174889 - DNA, 31 bp, Homo sapiens; identical to SEQ ID NO: 86636
  chr14:23634538-23634569
  hypo

SEQ ID NO: 174890 - DNA, 92 bp, Homo sapiens; identical to SEQ ID NO: 86637
  chr14:23706638-23706730
  hypo

SEQ ID NO: 174891 - DNA, 139 bp, Homo sapiens
  chr14:23707516-23707655
  hypo
cgaacaaataggacaacgaagctcgtggcactgtgggatgcgtttgcgttgagctgtttattcagtacattttttatcgtaaatcttacgaagtttgtatccctcagcggttacacacacacacacatcctacgaaaag

SEQ ID NO: 174892 - DNA, 46 bp, Homo sapiens; identical to SEQ ID NO: 27438
  chr14:23719830-23719876
  hypo

SEQ ID NO: 174893 - DNA, 155 bp, Homo sapiens; identical to SEQ ID NO: 86640
  chr14:23757711-23757866
  hypo

SEQ ID NO: 174894 - DNA, 189 bp, Homo sapiens; identical to SEQ ID NO: 9560
  chr14:23776070-23776259
  hypo

SEQ ID NO: 174895 - DNA, 327 bp, Homo sapiens; identical to SEQ ID NO: 27441
  chr14:23776953-23777280
  hypo

SEQ ID NO: 174896 - DNA, 95 bp, Homo sapiens; identical to SEQ ID NO: 27442
  chr14:23793465-23793560
  hypo

SEQ ID NO: 174897 - DNA, 149 bp, Homo sapiens; identical to SEQ ID NO: 27443
  chr14:23815818-23815967
  hypo

SEQ ID NO: 174898 - DNA, 30 bp, Homo sapiens; identical to SEQ ID NO: 86645
  chr14:23820322-23820352
  hypo

SEQ ID NO: 174899 - DNA, 85 bp, Homo sapiens; identical to SEQ ID NO: 51020
  chr14:23835314-23835399
  hypo

SEQ ID NO: 174900 - DNA, 30 bp, Homo sapiens; identical to SEQ ID NO: 124285
  chr14:23835847-23835877
  hypo

SEQ ID NO: 174901 - DNA, 146 bp, Homo sapiens
  chr14:23853627-23853773
  hypo
ctggtgtctggcgtccgccgcacctggtaggtgagctccttgatgcgccgctcgctcttcctcatgcccttcaccgactctgcgttgcgcttctgctcggcctccagctcaccctccagctcccgcacccgcgcttccagcttctg

SEQ ID NO: 174902 - DNA, 30 bp, Homo sapiens
  chr14:23854138-23854168
  hypo
tcttggccttctcctcggcgtttctgcact

SEQ ID NO: 174903 - DNA, 30 bp, Homo sapiens; identical to SEQ ID NO: 27444
  chr14:23855282-23855312
  hypo

SEQ ID NO: 174904 - DNA, 227 bp, Homo sapiens; identical to SEQ ID NO: 86649
  chr14:23884170-23884397
  hypo

SEQ ID NO: 174905 - DNA, 177 bp, Homo sapiens; identical to SEQ ID NO: 86650
  chr14:23938089-23938266
  hypo

SEQ ID NO: 174906 - DNA, 174 bp, Homo sapiens
  chr14:23982724-23982898
  hypo
gacagagggatggagtggaagaaggaggggagaggcttggggtctgggaggggagaagagggtgcatgagttgcttcatgctgcctgcttacaggcattggcattgtagctgccacccttgtgcccacggagatgggaggaggcgagtggagggcgcagcggcaggagtcctgt

SEQ ID NO: 174907 - DNA, 30 bp, Homo sapiens; identical to SEQ ID NO: 86651
  chr14:24001942-24001972
  hypo

SEQ ID NO: 174908 - DNA, 30 bp, Homo sapiens
  chr14:24032611-24032641
  hypo
cattgtagaggcggcgcacagagtaggcat

SEQ ID NO: 174909 - DNA, 30 bp, Homo sapiens; identical to SEQ ID NO: 86652
  chr14:24035064-24035094
  hypo

SEQ ID NO: 174910 - DNA, 64 bp, Homo sapiens; identical to SEQ ID NO: 86653
  chr14:24081961-24082025
  hypo

SEQ ID NO: 174911 - DNA, 47 bp, Homo sapiens; identical to SEQ ID NO: 86654
  chr14:24108493-24108540
  hypo

SEQ ID NO: 174912 - DNA, 17 bp, Homo sapiens
  chr14:24368400-24368417
  hypo
agcgggagacggagaag

SEQ ID NO: 174913 - DNA, 117 bp, Homo sapiens
  chr14:24427533-24427650
  hypo
cacccctctgtgtgccaaatccggagcacaaagttgaccgagggcccgtgtactgcaacttgcccaaggcatcaaaattgccagttccgggcaaacggaaagtctggtttcagggtg

SEQ ID NO: 174914 - DNA, 25 bp, Homo sapiens
  chr14:24456361-24456386
  hypo
cagagtctccatctgtcgctcaggt

SEQ ID NO: 174915 - DNA, 24 bp, Homo sapiens
  chr14:24456625-24456649
  hypo
cacgcccagctgaatgtccaaatc

SEQ ID NO: 174916 - DNA, 30 bp, Homo sapiens
  chr14:24506951-24506981
  hypo
gatcggcttcgccgtcgcccagcgtctggc

SEQ ID NO: 174917 - DNA, 30 bp, Homo sapiens
  chr14:24524807-24524837
  hypo
actgcaaggacttgcggctggtaggaactg

SEQ ID NO: 174918 - DNA, 39 bp, Homo sapiens; identical to SEQ ID NO: 86657
  chr14:24542843-24542882
  hypo

SEQ ID NO: 174919 - DNA, 31 bp, Homo sapiens; identical to SEQ ID NO: 86658
  chr14:24546649-24546680
  hypo

SEQ ID NO: 174920 - DNA, 107 bp, Homo sapiens; identical to SEQ ID NO: 124297
  chr14:24550911-24551018
  hypo

SEQ ID NO: 174921 - DNA, 30 bp, Homo sapiens; identical to SEQ ID NO: 27447
  chr14:24608184-24608214
  hypo

SEQ ID NO: 174922 - DNA, 98 bp, Homo sapiens; identical to SEQ ID NO: 86660
  chr14:24629477-24629575
  hypo

SEQ ID NO: 174923 - DNA, 30 bp, Homo sapiens; identical to SEQ ID NO: 27449
  chr14:24634133-24634163
  hypo

SEQ ID NO: 174924 - DNA, 30 bp, Homo sapiens; identical to SEQ ID NO: 86662
  chr14:24635514-24635544
  hypo

SEQ ID NO: 174925 - DNA, 30 bp, Homo sapiens; identical to SEQ ID NO: 86663
  chr14:24674784-24674814
  hypo

SEQ ID NO: 174926 - DNA, 30 bp, Homo sapiens
  chr14:24675922-24675952
  hypo
tgcaccggtgagggcgctgccacccagact

SEQ ID NO: 174927 - DNA, 20 bp, Homo sapiens
  chr14:24713358-24713378
  hypo
tacttttttttttttttgag

SEQ ID NO: 174928 - DNA, 95 bp, Homo sapiens; identical to SEQ ID NO: 86665
  chr14:24722548-24722643
  hypo

SEQ ID NO: 174929 - DNA, 503 bp, Homo sapiens; identical to SEQ ID NO: 86666
  chr14:24731054-24731557
  hypo

SEQ ID NO: 174930 - DNA, 30 bp, Homo sapiens; identical to SEQ ID NO: 86667
  chr14:24732371-24732401
  hypo

SEQ ID NO: 174931 - DNA, 54 bp, Homo sapiens; identical to SEQ ID NO: 27452
  chr14:24733718-24733772
  hypo

SEQ ID NO: 174932 - DNA, 30 bp, Homo sapiens; identical to SEQ ID NO: 86669
  chr14:24737590-24737620
  hypo

SEQ ID NO: 174933 - DNA, 30 bp, Homo sapiens; identical to SEQ ID NO: 27453
  chr14:24800290-24800320
  hypo

SEQ ID NO: 174934 - DNA, 30 bp, Homo sapiens; identical to SEQ ID NO: 86671
  chr14:24838813-24838843
  hypo

SEQ ID NO: 174935 - DNA, 63 bp, Homo sapiens
  chr14:24839211-24839274
  hypo
atgaggcggcctcccgctttggcctgggctccccgctgccctcgccccgggcctcccctcggc

SEQ ID NO: 174936 - DNA, 32 bp, Homo sapiens; identical to SEQ ID NO: 86673
  chr14:24859465-24859497
  hypo

SEQ ID NO: 174937 - DNA, 31 bp, Homo sapiens; identical to SEQ ID NO: 86674
  chr14:24877468-24877499
  hypo

SEQ ID NO: 174938 - DNA, 110 bp, Homo sapiens
  chr14:25113296-25113406
  hypo
cgtggatagccagagcgcgaacttgcctgactcagccccgacctggtttgcctttttacccaccctggtagcttaacacaaaggacagaaactttcgggagtgttatgga

SEQ ID NO: 174939 - DNA, 30 bp, Homo sapiens
  chr14:25338833-25338863
  hypo
aattgggggataaaccgttttaaggagatg

SEQ ID NO: 174940 - DNA, 71 bp, Homo sapiens; identical to SEQ ID NO: 86675
  chr14:26802500-26802571
  hypo

SEQ ID NO: 174941 - DNA, 508 bp, Homo sapiens; identical to SEQ ID NO: 124344
  chr14:29235826-29236334
  hypo

SEQ ID NO: 174942 - DNA, 403 bp, Homo sapiens; identical to SEQ ID NO: 124345
  chr14:29236413-29236816
  hypo

SEQ ID NO: 174943 - DNA, 30 bp, Homo sapiens
  chr14:30374989-30375019
  hypo
tatgtatttgggaaacgacagattaatcat

SEQ ID NO: 174944 - DNA, 1308 bp, Homo sapiens; identical to SEQ ID NO: 124356
  chr14:30396132-30397440
  hypo

SEQ ID NO: 174945 - DNA, 38 bp, Homo sapiens; identical to SEQ ID NO: 86677
  chr14:30790493-30790531
  hypo

SEQ ID NO: 174946 - DNA, 101 bp, Homo sapiens
  chr14:31027392-31027493
  hypo
caggcgtgagccaccgcgcccggccctcaaactgtatttttgacaaaggctaaaggtatgctgtcatggtttggtttgtactgatccgtttaggtaattca

SEQ ID NO: 174947 - DNA, 85 bp, Homo sapiens
  chr14:31035126-31035211
  hypo
aaagtgctggattacagacgtgagccaccacacctggccaacttcattcttatttacatggctgtctggtcgtcccaggaccatt

SEQ ID NO: 174948 - DNA, 33 bp, Homo sapiens
  chr14:31079527-31079560
  hypo
aaaacagaatatggccgggcgcagtgggtcacg

SEQ ID NO: 174949 - DNA, 30 bp, Homo sapiens; identical to SEQ ID NO: 86678
  chr14:31103971-31104001
  hypo

SEQ ID NO: 174950 - DNA, 30 bp, Homo sapiens; identical to SEQ ID NO: 86679
  chr14:31161407-31161437
  hypo

SEQ ID NO: 174951 - DNA, 30 bp, Homo sapiens
  chr14:31442128-31442158
  hypo
agattaggccgggtgcgggctcacgcctgt

SEQ ID NO: 174952 - DNA, 79 bp, Homo sapiens; identical to SEQ ID NO: 27455
  chr14:31456367-31456446
  hypo

SEQ ID NO: 174953 - DNA, 101 bp, Homo sapiens; identical to SEQ ID NO: 27456
  chr14:31456880-31456981
  hypo

SEQ ID NO: 174954 - DNA, 62 bp, Homo sapiens
  chr14:31478678-31478740
  hypo
acccccccgcccccgcgccccagttgaaaaccacttttgcatttgtacggaaaaaattctga

SEQ ID NO: 174955 - DNA, 206 bp, Homo sapiens; identical to SEQ ID NO: 27458
  chr14:31484305-31484511
  hypo

SEQ ID NO: 174956 - DNA, 30 bp, Homo sapiens
  chr14:31500018-31500048
  hypo
attttgtcctgatccgtcttgaaactacct

SEQ ID NO: 174957 - DNA, 19 bp, Homo sapiens
  chr14:31512415-31512434
  hypo
gactctttcaaaaaagaaa

SEQ ID NO: 174958 - DNA, 37 bp, Homo sapiens
  chr14:31527414-31527451
  hypo
catgaaccacctcgcctggccccgtattctactctga

SEQ ID NO: 174959 - DNA, 30 bp, Homo sapiens
  chr14:31529509-31529539
  hypo
ggacttgagtatgcacggatttggttatac

SEQ ID NO: 174960 - DNA, 30 bp, Homo sapiens; identical to SEQ ID NO: 86685
  chr14:31534585-31534615
  hypo

SEQ ID NO: 174961 - DNA, 25 bp, Homo sapiens
  chr14:31542418-31542443
  hypo
gggcgcgatggctcacgcctgtaat

SEQ ID NO: 174962 - DNA, 121 bp, Homo sapiens
  chr14:31542682-31542803
  hypo
gagactccgtctcagaaaaaaaaaaaaccctcttatttgttttctcccaattatgagcttttgctatctgacttgccccctcttttcttcttccctctgctttctttttttattttttatt

SEQ ID NO: 174963 - DNA, 42 bp, Homo sapiens
  chr14:31629123-31629165
  hypo
ccatgagtcactgtgcctggcgccggtttttattactggccc

SEQ ID NO: 174964 - DNA, 92 bp, Homo sapiens
  chr14:31632734-31632826
  hypo
ggagtttgaagttgccgtaagctatgagcactccactatactccagcctgtgcgacagtgagaccctgtagctaaaacctttttttttaatt

SEQ ID NO: 174965 - DNA, 34 bp, Homo sapiens; identical to SEQ ID NO: 86688
  chr14:31648024-31648058
  hypo

SEQ ID NO: 174966 - DNA, 88 bp, Homo sapiens; identical to SEQ ID NO: 86689
  chr14:31671011-31671099
  hypo

SEQ ID NO: 174967 - DNA, 31 bp, Homo sapiens; identical to SEQ ID NO: 86690
  chr14:31707415-31707446
  hypo

SEQ ID NO: 174968 - DNA, 42 bp, Homo sapiens; identical to SEQ ID NO: 86691
  chr14:31847699-31847741
  hypo

SEQ ID NO: 174969 - DNA, 25 bp, Homo sapiens
  chr14:31910757-31910782
  hypo
ccccgaggactttcagaatgtaatc

SEQ ID NO: 174970 - DNA, 30 bp, Homo sapiens; identical to SEQ ID NO: 27459
  chr14:31923652-31923682
  hypo

SEQ ID NO: 174971 - DNA, 80 bp, Homo sapiens; identical to SEQ ID NO: 86694
  chr14:31925273-31925353
  hypo

SEQ ID NO: 174972 - DNA, 79 bp, Homo sapiens; identical to SEQ ID NO: 86695
  chr14:31925652-31925731
  hypo

SEQ ID NO: 174973 - DNA, 30 bp, Homo sapiens
  chr14:31960093-31960123
  hypo
agtgcaatgggcgggcgcttcggcaagaga

SEQ ID NO: 174974 - DNA, 32 bp, Homo sapiens; identical to SEQ ID NO: 86696
  chr14:32287761-32287793
  hypo

SEQ ID NO: 174975 - DNA, 32 bp, Homo sapiens; identical to SEQ ID NO: 86697
  chr14:32288032-32288064
  hypo

SEQ ID NO: 174976 - DNA, 85 bp, Homo sapiens
  chr14:32413187-32413272
  hypo
ctaatttacctggaccgttgctgtctcctgtgcacggctgcggggatgagcaccttgttgtgcgttcctccgctgggctgacgga

SEQ ID NO: 174977 - DNA, 40 bp, Homo sapiens
  chr14:32543358-32543398
  hypo
tttccatttctgtccgatatttgtgcgcgcgcatgtgtgt

SEQ ID NO: 174978 - DNA, 316 bp, Homo sapiens; identical to SEQ ID NO: 86699
  chr14:32597575-32597891
  hypo

SEQ ID NO: 174979 - DNA, 31 bp, Homo sapiens; identical to SEQ ID NO: 86700
  chr14:32606878-32606909
  hypo

SEQ ID NO: 174980 - DNA, 114 bp, Homo sapiens
  chr14:32902045-32902159
  hypo
gagcagcaatcagacctggtacggtagctcctccggtatcaagtggaacccgtgtttctaccctcatgctccaccgtcctctacccgtcatacgcaaaggcctctctgggtctg

SEQ ID NO: 174981 - DNA, 25 bp, Homo sapiens
  chr14:33053287-33053312
  hypo
agctgtagaccggagctgttcctat

SEQ ID NO: 174982 - DNA, 27 bp, Homo sapiens
  chr14:33163271-33163298
  hypo
agtgtggtccatggggccaggcgcggt

SEQ ID NO: 174983 - DNA, 2396 bp, Homo sapiens; identical to SEQ ID NO: 51077
  chr14:33402367-33404763
  hypo

SEQ ID NO: 174984 - DNA, 30 bp, Homo sapiens; identical to SEQ ID NO: 27462
  chr14:33462062-33462092
  hypo

SEQ ID NO: 174985 - DNA, 31 bp, Homo sapiens; identical to SEQ ID NO: 86704
  chr14:33491855-33491886
  hypo

SEQ ID NO: 174986 - DNA, 30 bp, Homo sapiens
  chr14:33991359-33991389
  hypo
gtaaaaatccataaacgtataggcagacaa

SEQ ID NO: 174987 - DNA, 30 bp, Homo sapiens; identical to SEQ ID NO: 9589
  chr14:34126415-34126445
  hypo

SEQ ID NO: 174988 - DNA, 74 bp, Homo sapiens
  chr14:34165620-34165694
  hypo
tggttattgggccatcgaaagacataataaacacgagagtgcttcatgaaaacatgaagcgtttcatttgaaaa

SEQ ID NO: 174989 - DNA, 30 bp, Homo sapiens
  chr14:34266721-34266751
  hypo
aaacttccgaatcctcggagacatccgact

SEQ ID NO: 174990 - DNA, 100 bp, Homo sapiens; identical to SEQ ID NO: 86707
  chr14:34308654-34308754
  hypo

SEQ ID NO: 174991 - DNA, 37 bp, Homo sapiens
  chr14:34334927-34334964
  hypo
agtctggtttttggccaggctcggtggctcatgcctg

SEQ ID NO: 174992 - DNA, 18 bp, Homo sapiens
  chr14:34408718-34408736
  hypo
acaatcttaaaacaggag

SEQ ID NO: 174993 - DNA, 38 bp, Homo sapiens; identical to SEQ ID NO: 27464
  chr14:34415280-34415318
  hypo

SEQ ID NO: 174994 - DNA, 31 bp, Homo sapiens; identical to SEQ ID NO: 86710
  chr14:34567013-34567044
  hypo

SEQ ID NO: 174995 - DNA, 31 bp, Homo sapiens; identical to SEQ ID NO: 27465
  chr14:34682592-34682623
  hypo

SEQ ID NO: 174996 - DNA, 30 bp, Homo sapiens; identical to SEQ ID NO: 86712
  chr14:34902847-34902877
  hypo

SEQ ID NO: 174997 - DNA, 34 bp, Homo sapiens; identical to SEQ ID NO: 86713
  chr14:34918991-34919025
  hypo

SEQ ID NO: 174998 - DNA, 27 bp, Homo sapiens
  chr14:34920639-34920666
  hypo
caattctaggctgggcgcggtagctca

SEQ ID NO: 174999 - DNA, 26 bp, Homo sapiens
  chr14:34920905-34920931
  hypo
agaacgagactctgtttcaaaaaaaa

SEQ ID NO: 175000 - DNA, 29 bp, Homo sapiens
  chr14:34921193-34921222
  hypo
aaatgtaaagaaagtgcctagcgtggtgg

SEQ ID NO: 175001 - DNA, 17 bp, Homo sapiens
  chr14:34932541-34932558
  hypo
caagtgccggccaagcg

SEQ ID NO: 175002 - DNA, 31 bp, Homo sapiens
  chr14:34941505-34941536
  hypo
cagctgaggccgcacccggcctccaaggcct

SEQ ID NO: 175003 - DNA, 42 bp, Homo sapiens
  chr14:34949998-34950040
  hypo
aagaaaaagacaatagaaatgaatgaacgagtgtttcacgga

SEQ ID NO: 175004 - DNA, 30 bp, Homo sapiens; identical to SEQ ID NO: 86717
  chr14:35006059-35006089
  hypo

SEQ ID NO: 175005 - DNA, 43 bp, Homo sapiens; identical to SEQ ID NO: 86718
  chr14:35009568-35009611
  hypo

SEQ ID NO: 175006 - DNA, 30 bp, Homo sapiens; identical to SEQ ID NO: 86719
  chr14:35009837-35009867
  hypo

SEQ ID NO: 175007 - DNA, 31 bp, Homo sapiens
  chr14:35017304-35017335
  hypo
aaatacacgccaggcgcggtggctcacgcct

SEQ ID NO: 175008 - DNA, 30 bp, Homo sapiens; identical to SEQ ID NO: 86720
  chr14:35021968-35021998
  hypo

SEQ ID NO: 175009 - DNA, 162 bp, Homo sapiens
  chr14:35022414-35022576
  hypo
gcctgggcgacagagcgagtcaaaaagcaacaacaaaaaaagataaccctgcaccgcgccctgggtgaaccctggctcctggctcctttctaaatattctgatttcctcttggatgacattaagaattagtccattcagaccgggcgcggtggctcacgcct

SEQ ID NO: 175010 - DNA, 342 bp, Homo sapiens; identical to SEQ ID NO: 86721
  chr14:35023175-35023517
  hypo

SEQ ID NO: 175011 - DNA, 122 bp, Homo sapiens; identical to SEQ ID NO: 86722
  chr14:35032072-35032194
  hypo

SEQ ID NO: 175012 - DNA, 30 bp, Homo sapiens; identical to SEQ ID NO: 27469
  chr14:35070432-35070462
  hypo

SEQ ID NO: 175013 - DNA, 30 bp, Homo sapiens; identical to SEQ ID NO: 27470
  chr14:35070701-35070731
  hypo

SEQ ID NO: 175014 - DNA, 37 bp, Homo sapiens; identical to SEQ ID NO: 27471
  chr14:35117758-35117795
  hypo

SEQ ID NO: 175015 - DNA, 33 bp, Homo sapiens
  chr14:35136956-35136989
  hypo
aaaaaaaaaaaacaaaaacggtatgtttatctt

SEQ ID NO: 175016 - DNA, 49 bp, Homo sapiens
  chr14:35147556-35147605
  hypo
gaaaattttagagttcgacttgcaaattagaacccgatgaatttattca

SEQ ID NO: 175017 - DNA, 30 bp, Homo sapiens
  chr14:35182499-35182529
  hypo
tttcgtatgtggcatcgtacaaagcatatc

SEQ ID NO: 175018 - DNA, 20 bp, Homo sapiens
  chr14:35194584-35194604
  hypo
gagatcgcgccactgcactc

SEQ ID NO: 175019 - DNA, 38 bp, Homo sapiens; identical to SEQ ID NO: 86726
  chr14:35266882-35266920
  hypo

SEQ ID NO: 175020 - DNA, 121 bp, Homo sapiens; identical to SEQ ID NO: 86727
  chr14:35266979-35267100
  hypo

SEQ ID NO: 175021 - DNA, 49 bp, Homo sapiens
  chr14:35331321-35331370
  hypo
tcatcacaaatttcatgtaagcgcgaacgatgggtaaggctggtcaagt

SEQ ID NO: 175022 - DNA, 33 bp, Homo sapiens
  chr14:35389181-35389214
  hypo
atgagtgagcagtaggctgggcgcggtggctca

SEQ ID NO: 175023 - DNA, 32 bp, Homo sapiens
  chr14:35389453-35389485
  hypo
agcgagactccgtctccaaaaaaaaagaaaaa

SEQ ID NO: 175024 - DNA, 30 bp, Homo sapiens
  chr14:35389934-35389964
  hypo
ctgtccctcaaccaccgctgccgcctcctt

SEQ ID NO: 175025 - DNA, 30 bp, Homo sapiens; identical to SEQ ID NO: 86728
  chr14:35447869-35447899
  hypo

SEQ ID NO: 175026 - DNA, 36 bp, Homo sapiens
  chr14:35507692-35507728
  hypo
tcctcctcaagacttacgaatagagcgccgcccggg

SEQ ID NO: 175027 - DNA, 98 bp, Homo sapiens; identical to SEQ ID NO: 27472
  chr14:35578167-35578265
  hypo

SEQ ID NO: 175028 - DNA, 17 bp, Homo sapiens
  chr14:35684088-35684105
  hypo
ggcgacagagcgagact

SEQ ID NO: 175029 - DNA, 280 bp, Homo sapiens; identical to SEQ ID NO: 86732
  chr14:35808160-35808440
  hypo

SEQ ID NO: 175030 - DNA, 30 bp, Homo sapiens
  chr14:35838895-35838925
  hypo
tgtccatcatggatccgactgagaccaccg

SEQ ID NO: 175031 - DNA, 120 bp, Homo sapiens; identical to SEQ ID NO: 86733
  chr14:35866799-35866919
  hypo

SEQ ID NO: 175032 - DNA, 1530 bp, Homo sapiens; identical to SEQ ID NO: 124405
  chr14:36002426-36003956
  hypo

SEQ ID NO: 175033 - DNA, 654 bp, Homo sapiens; identical to SEQ ID NO: 9596
  chr14:36004080-36004734
  hypo

SEQ ID NO: 175034 - DNA, 100 bp, Homo sapiens; identical to SEQ ID NO: 9597
  chr14:36004821-36004921
  hypo

SEQ ID NO: 175035 - DNA, 394 bp, Homo sapiens; identical to SEQ ID NO: 86737
  chr14:36288872-36289266
  hypo

SEQ ID NO: 175036 - DNA, 39 bp, Homo sapiens; identical to SEQ ID NO: 86738
  chr14:36301410-36301449
  hypo

SEQ ID NO: 175037 - DNA, 39 bp, Homo sapiens; identical to SEQ ID NO: 86739
  chr14:36301688-36301727
  hypo

SEQ ID NO: 175038 - DNA, 30 bp, Homo sapiens
  chr14:36693186-36693216
  hypo
cgggcatgcaaacaccgagcctggcactgc

SEQ ID NO: 175039 - DNA, 30 bp, Homo sapiens
  chr14:36693480-36693510
  hypo
tatagcataatgaggcggccgcttatgggg

SEQ ID NO: 175040 - DNA, 55 bp, Homo sapiens
  chr14:36738435-36738490
  hypo
tcctatgcctcagtgcgaaacaacaatgcaggcctcttgacgaattctggcgtcg

SEQ ID NO: 175041 - DNA, 739 bp, Homo sapiens; identical to SEQ ID NO: 124456
  chr14:37132602-37133341
  hypo

SEQ ID NO: 175042 - DNA, 35 bp, Homo sapiens
  chr14:37174262-37174297
  hypo
attttttttttgagacggatctcactctgtcgccc

SEQ ID NO: 175043 - DNA, 30 bp, Homo sapiens; identical to SEQ ID NO: 86742
  chr14:37606484-37606514
  hypo

SEQ ID NO: 175044 - DNA, 31 bp, Homo sapiens; identical to SEQ ID NO: 86743
  chr14:37611523-37611554
  hypo

SEQ ID NO: 175045 - DNA, 24 bp, Homo sapiens
  chr14:37639248-37639272
  hypo
tttttttttttgagaccgagtctc

SEQ ID NO: 175046 - DNA, 44 bp, Homo sapiens
  chr14:37665912-37665956
  hypo
gctggggtgcagtggcgccagccatcgtagcttatttcagtctc

SEQ ID NO: 175047 - DNA, 43 bp, Homo sapiens
  chr14:37666135-37666178
  hypo
gtgttgggactacaggcgtaagccaccgcgcccggcctttttc

SEQ ID NO: 175048 - DNA, 1866 bp, Homo sapiens; identical to SEQ ID NO: 124474
  chr14:38677133-38678999
  hypo

SEQ ID NO: 175049 - DNA, 30 bp, Homo sapiens; identical to SEQ ID NO: 86746
  chr14:39519311-39519341
  hypo

SEQ ID NO: 175050 - DNA, 30 bp, Homo sapiens; identical to SEQ ID NO: 86747
  chr14:39569519-39569549
  hypo

SEQ ID NO: 175051 - DNA, 30 bp, Homo sapiens
  chr14:39575898-39575928
  hypo
tccagggatgtcaccgtgttggccaggcta

SEQ ID NO: 175052 - DNA, 329 bp, Homo sapiens
  chr14:39648101-39648430
  hypo
cctgttaatttttttgtgtttttagtagagatggtggtgttggcttctgacttcagatgatctacctgcctctaatgtttcacgtaattagtatgtgtaataactttttatcataattgaactgaaatcatatataccttttgttgtaactatttcaacacgtaagtattaaagcaggctacttaacttttagcaaaagcggcgccaggaaattgaacaaaaacttgaagttcaggcagaagaagagagaaagcaggttgaaaatgaaaggagagaactgtttgaagagaggcgtgctaaacagacagaactgcggcttttggaacaga

SEQ ID NO: 175053 - DNA, 98 bp, Homo sapiens
  chr14:39648715-39648813
  hypo
atgttcatatgcacacgtttgttttctaaaataattatgattcagtgattggtttgctgtgtttgctttttttttttaaataagataataagatattc

SEQ ID NO: 175054 - DNA, 244 bp, Homo sapiens; identical to SEQ ID NO: 124486
  chr14:39735534-39735778
  hypo

SEQ ID NO: 175055 - DNA, 30 bp, Homo sapiens; identical to SEQ ID NO: 27482
  chr14:39856145-39856175
  hypo

SEQ ID NO: 175056 - DNA, 22 bp, Homo sapiens
  chr14:39889602-39889624
  hypo
gaagaaagcggctgggcgccgg

SEQ ID NO: 175057 - DNA, 292 bp, Homo sapiens
  chr14:39911459-39911751
  hypo
tggcatctccgggcttttgggcgccaccttgttcccctcatcgagacactggtctttgcagcagaagctgcttgcagtacatctggtccagccagagcctcacatggagccagtgcctgtgctggtgcttggtgctgcccgctccgcagcagcagctggtatgcctggctgtgcgcagtggccggattccacactgacttgctcatgcatcccttgtcactgagtgcttggctcacccttagtagccgtgggatccgggccaatagtgagagcgaagcgcagcatgctgggt

SEQ ID NO: 175058 - DNA, 38 bp, Homo sapiens; identical to SEQ ID NO: 27485
  chr14:39914480-39914518
  hypo

SEQ ID NO: 175059 - DNA, 38 bp, Homo sapiens; identical to SEQ ID NO: 27486
  chr14:40470105-40470143
  hypo

SEQ ID NO: 175060 - DNA, 647 bp, Homo sapiens; identical to SEQ ID NO: 51175
  chr14:42075396-42076043
  hypo

SEQ ID NO: 175061 - DNA, 1262 bp, Homo sapiens; identical to SEQ ID NO: 124492
  chr14:42076105-42077367
  hypo

SEQ ID NO: 175062 - DNA, 30 bp, Homo sapiens; identical to SEQ ID NO: 86757
  chr14:43123066-43123096
  hypo

SEQ ID NO: 175063 - DNA, 105 bp, Homo sapiens; identical to SEQ ID NO: 27489
  chr14:43839405-43839510
  hypo

SEQ ID NO: 175064 - DNA, 253 bp, Homo sapiens
  chr14:44004250-44004503
  hypo
ccgctgcacgtatttcgtgacttaaaagagtttaaaaggcaatcatataatctaactctggctaccttttcgggaccccttccacactgtgggacctttttactttcactctgctcaataaagcctacagctttttctcttttggtctgtgtctctatcactcgccgcggtcagctgccgcaccaccgcatcaattctttggcatggctaggcaagaaccttaggcgttacatcttggcgagccagccaggag

SEQ ID NO: 175065 - DNA, 30 bp, Homo sapiens
  chr14:44109794-44109824
  hypo
agctcggtatgggcgcgcctataggcagcc

SEQ ID NO: 175066 - DNA, 30 bp, Homo sapiens; identical to SEQ ID NO: 86759
  chr14:45356592-45356622
  hypo

SEQ ID NO: 175067 - DNA, 30 bp, Homo sapiens; identical to SEQ ID NO: 27490
  chr14:45365636-45365666
  hypo

SEQ ID NO: 175068 - DNA, 216 bp, Homo sapiens; identical to SEQ ID NO: 9671
  chr14:45431366-45431582
  hypo

SEQ ID NO: 175069 - DNA, 33 bp, Homo sapiens; identical to SEQ ID NO: 86762
  chr14:45437463-45437496
  hypo

SEQ ID NO: 175070 - DNA, 32 bp, Homo sapiens; identical to SEQ ID NO: 86763
  chr14:45437735-45437767
  hypo

SEQ ID NO: 175071 - DNA, 30 bp, Homo sapiens; identical to SEQ ID NO: 86764
  chr14:45565391-45565421
  hypo

SEQ ID NO: 175072 - DNA, 30 bp, Homo sapiens; identical to SEQ ID NO: 86765
  chr14:45565851-45565881
  hypo

SEQ ID NO: 175073 - DNA, 52 bp, Homo sapiens; identical to SEQ ID NO: 86766
  chr14:45579810-45579862
  hypo

SEQ ID NO: 175074 - DNA, 30 bp, Homo sapiens; identical to SEQ ID NO: 27493
  chr14:45588021-45588051
  hypo

SEQ ID NO: 175075 - DNA, 29 bp, Homo sapiens
  chr14:45588230-45588259
  hypo
tttttaaaatgttacggcactaagatctt

SEQ ID NO: 175076 - DNA, 24 bp, Homo sapiens
  chr14:45595675-45595699
  hypo
gcgtgaccccgtctcaaaaaacaa

SEQ ID NO: 175077 - DNA, 29 bp, Homo sapiens
  chr14:46074248-46074277
  hypo
ccgcgcccggccacaatattcttaaagtt

SEQ ID NO: 175078 - DNA, 30 bp, Homo sapiens; identical to SEQ ID NO: 86770
  chr14:47121018-47121048
  hypo

SEQ ID NO: 175079 - DNA, 31 bp, Homo sapiens; identical to SEQ ID NO: 27495
  chr14:48130915-48130946
  hypo

SEQ ID NO: 175080 - DNA, 125 bp, Homo sapiens; identical to SEQ ID NO: 51191
  chr14:48145236-48145361
  hypo

SEQ ID NO: 175081 - DNA, 133 bp, Homo sapiens; identical to SEQ ID NO: 124509
  chr14:48145469-48145602
  hypo

SEQ ID NO: 175082 - DNA, 30 bp, Homo sapiens; identical to SEQ ID NO: 9677
  chr14:50022777-50022807
  hypo

SEQ ID NO: 175083 - DNA, 30 bp, Homo sapiens; identical to SEQ ID NO: 86775
  chr14:50155756-50155786
  hypo

SEQ ID NO: 175084 - DNA, 30 bp, Homo sapiens; identical to SEQ ID NO: 86776
  chr14:50185987-50186017
  hypo

SEQ ID NO: 175085 - DNA, 28 bp, Homo sapiens
  chr14:50221158-50221186
  hypo
gtgtgagccaccacgcccggccaccagt

SEQ ID NO: 175086 - DNA, 181 bp, Homo sapiens; identical to SEQ ID NO: 27497
  chr14:50233117-50233298
  hypo

SEQ ID NO: 175087 - DNA, 151 bp, Homo sapiens; identical to SEQ ID NO: 27498
  chr14:50233597-50233748
  hypo

SEQ ID NO: 175088 - DNA, 138 bp, Homo sapiens; identical to SEQ ID NO: 86779
  chr14:50287091-50287229
  hypo

SEQ ID NO: 175089 - DNA, 20 bp, Homo sapiens
  chr14:50316835-50316855
  hypo
ttttagatggagtctcgctc

SEQ ID NO: 175090 - DNA, 45 bp, Homo sapiens; identical to SEQ ID NO: 27499
  chr14:50327505-50327550
  hypo

SEQ ID NO: 175091 - DNA, 181 bp, Homo sapiens
  chr14:50333498-50333679
  hypo
ggccctataatcttttgatttggtgcatcataatttatgactatttaaattgaaccactatcagtcacactaatcactttactattctatatatttcacctttattgttttatgaattagtgatcggcatagtatccagtgctaagtcagttatgcacaacctcgaatcagccgtttgctt

SEQ ID NO: 175092 - DNA, 121 bp, Homo sapiens; identical to SEQ ID NO: 27500
  chr14:50333978-50334099
  hypo

SEQ ID NO: 175093 - DNA, 24 bp, Homo sapiens
  chr14:50334338-50334362
  hypo
tccgtctcaaaaaaaaaaaaaaaa

SEQ ID NO: 175094 - DNA, 22 bp, Homo sapiens
  chr14:50337701-50337723
  hypo
gccaccgcgcccggcctatatg

SEQ ID NO: 175095 - DNA, 38 bp, Homo sapiens; identical to SEQ ID NO: 86784
  chr14:50373517-50373555
  hypo

SEQ ID NO: 175096 - DNA, 23 bp, Homo sapiens
  chr14:50375775-50375798
  hypo
ccgtctcaaaaaaaaaaaaaaat

SEQ ID NO: 175097 - DNA, 26 bp, Homo sapiens
  chr14:50379101-50379127
  hypo
gatcattaaagacttacttttcggcc

SEQ ID NO: 175098 - DNA, 36 bp, Homo sapiens; identical to SEQ ID NO: 86786
  chr14:50434015-50434051
  hypo

SEQ ID NO: 175099 - DNA, 30 bp, Homo sapiens
  chr14:50473757-50473787
  hypo
atgcacccaggatggcgggaaaagggaaaa

SEQ ID NO: 175100 - DNA, 30 bp, Homo sapiens
  chr14:50477652-50477682
  hypo
tcattggctggaacacggagactccaccag

SEQ ID NO: 175101 - DNA, 30 bp, Homo sapiens; identical to SEQ ID NO: 86787
  chr14:50517342-50517372
  hypo

SEQ ID NO: 175102 - DNA, 33 bp, Homo sapiens; identical to SEQ ID NO: 86788
  chr14:50540506-50540539
  hypo

SEQ ID NO: 175103 - DNA, 30 bp, Homo sapiens; identical to SEQ ID NO: 86789
  chr14:50548794-50548824
  hypo

SEQ ID NO: 175104 - DNA, 17 bp, Homo sapiens
  chr14:50568437-50568454
  hypo
taatttgtggctgggcg

SEQ ID NO: 175105 - DNA, 76 bp, Homo sapiens; identical to SEQ ID NO: 86790
  chr14:50574253-50574329
  hypo

SEQ ID NO: 175106 - DNA, 41 bp, Homo sapiens; identical to SEQ ID NO: 86791
  chr14:50589169-50589210
  hypo

SEQ ID NO: 175107 - DNA, 30 bp, Homo sapiens
  chr14:50632114-50632144
  hypo
aaggacacacacacccgcgcacacactgtt

SEQ ID NO: 175108 - DNA, 38 bp, Homo sapiens; identical to SEQ ID NO: 86792
  chr14:50681832-50681870
  hypo

SEQ ID NO: 175109 - DNA, 40 bp, Homo sapiens; identical to SEQ ID NO: 86793
  chr14:50777876-50777916
  hypo

SEQ ID NO: 175110 - DNA, 121 bp, Homo sapiens
  chr14:50828853-50828974
  hypo
cctgcagcctgccatgcctgagcctcccctccccacccccccacccccaccgtgggctcctgcgcggccgagcctccacgatcagaaccgccccctgctccgcagcacccggtcccatcga

SEQ ID NO: 175111 - DNA, 24 bp, Homo sapiens
  chr14:50888265-50888289
  hypo
caccgcgcccggcaacaaaataaa

SEQ ID NO: 175112 - DNA, 267 bp, Homo sapiens
  chr14:50903478-50903745
  hypo
atgctggaaaagtaacgccatccattaaccatagggagaggacaacagaagctccatgtttggtatttttcctggactctgccctatgtacttcttcccttggctgattttaatctatattctgtccctgttctaaacggtaatgattttaatctatattctttccctgttctaaacggtaatgatttaaatctatattttttccctgttctaaattgtaatcgtaactatgagtataactgcttccagttccgtgataccttctag

SEQ ID NO: 175113 - DNA, 277 bp, Homo sapiens; identical to SEQ ID NO: 124541
  chr14:50999521-50999798
  hypo

SEQ ID NO: 175114 - DNA, 1183 bp, Homo sapiens; identical to SEQ ID NO: 51212
  chr14:51026823-51028006
  hypo

SEQ ID NO: 175115 - DNA, 30 bp, Homo sapiens; identical to SEQ ID NO: 86797
  chr14:51061291-51061321
  hypo

SEQ ID NO: 175116 - DNA, 35 bp, Homo sapiens; identical to SEQ ID NO: 86798
  chr14:51092387-51092422
  hypo

SEQ ID NO: 175117 - DNA, 36 bp, Homo sapiens; identical to SEQ ID NO: 86799
  chr14:51123745-51123781
  hypo

SEQ ID NO: 175118 - DNA, 43 bp, Homo sapiens
  chr14:51148374-51148417
  hypo
gttttaggataaaacttgaagcggatatttctgttagaaagga

SEQ ID NO: 175119 - DNA, 31 bp, Homo sapiens; identical to SEQ ID NO: 86800
  chr14:51171101-51171132
  hypo

SEQ ID NO: 175120 - DNA, 481 bp, Homo sapiens; identical to SEQ ID NO: 27503
  chr14:51171646-51172127
  hypo

SEQ ID NO: 175121 - DNA, 30 bp, Homo sapiens; identical to SEQ ID NO: 27504
  chr14:51172389-51172419
  hypo

SEQ ID NO: 175122 - DNA, 30 bp, Homo sapiens; identical to SEQ ID NO: 27505
  chr14:51293778-51293808
  hypo

SEQ ID NO: 175123 - DNA, 27 bp, Homo sapiens
  chr14:51358238-51358265
  hypo
gcgtgagccaccgcgcccagctgataa

SEQ ID NO: 175124 - DNA, 1235 bp, Homo sapiens; identical to SEQ ID NO: 124548
  chr14:51410198-51411433
  hypo

SEQ ID NO: 175125 - DNA, 1891 bp, Homo sapiens; identical to SEQ ID NO: 51217
  chr14:51560770-51562661
  hypo

SEQ ID NO: 175126 - DNA, 30 bp, Homo sapiens; identical to SEQ ID NO: 27509
  chr14:51711222-51711252
  hypo

SEQ ID NO: 175127 - DNA, 42 bp, Homo sapiens; identical to SEQ ID NO: 27510
  chr14:51836279-51836321
  hypo

SEQ ID NO: 175128 - DNA, 1742 bp, Homo sapiens; identical to SEQ ID NO: 124553
  chr14:52117842-52119584
  hypo

SEQ ID NO: 175129 - DNA, 395 bp, Homo sapiens
  chr14:52210540-52210935
  hypo
ggtgatattactgcccgcacggcgggggggtgcccccgcctccctgcgttgtggatcgtcatatccatggtgggattggggggtgatattactccccgaatcgaaggggggcccgcccccatgcgatgtggatcttaatatccaggggggagaggcgggtgatattactccccgcatcgaggggggcttccgcgcccctgcgatatggatcgtaatatccagtgggggagaggggagtgatattactccccgatttttcctcggatcctttctatagtgcctccctcggttcacaccctgggacattatcttccatattctagcaggatatggctactaaagtcgcagggggtatacacccgtcaatattattcgtaattttctaggggaatgtt

SEQ ID NO: 175130 - DNA, 206 bp, Homo sapiens
  chr14:52211308-52211514
  hypo
tatgaagatccatatcgcatgggggcgggtgccaccgcgattcggggagtaatatcaccccccactcccaccctggatatgaccatccacatcgcaggggggcggacgccccccccccccgatgcggggagtaatatcatcccccacttcccccctggctcttcttccccccctggctctttcaggaccccatcgcaggggggcga

SEQ ID NO: 175131 - DNA, 85 bp, Homo sapiens
  chr14:52216036-52216121
  hypo
gcaggtgttggtaaacggggacgcagtaagccgcgaggaaaagcgcaaagagaatgaacgtcaggcccggcgaaacgccgacctg

SEQ ID NO: 175132 - DNA, 48 bp, Homo sapiens; identical to SEQ ID NO: 27513
  chr14:52373770-52373818
  hypo

SEQ ID NO: 175133 - DNA, 30 bp, Homo sapiens
  chr14:52433008-52433038
  hypo
gcatgcccctgccagcgagtgcctccttcg

SEQ ID NO: 175134 - DNA, 30 bp, Homo sapiens
  chr14:52690038-52690068
  hypo
cctcctttagggtgtcgctgtggctctgct

SEQ ID NO: 175135 - DNA, 17 bp, Homo sapiens
  chr14:52939944-52939961
  hypo
cctaaacaacttgtgtg

SEQ ID NO: 175136 - DNA, 77 bp, Homo sapiens
  chr14:52940020-52940097
  hypo
caacgctgctgctttgatttcatcaataaacatctggtgatgcttgtttatacaaagtgccacgttacatattttgc

SEQ ID NO: 175137 - DNA, 20 bp, Homo sapiens
  chr14:53173039-53173059
  hypo
gcaggagcaagactccatct

SEQ ID NO: 175138 - DNA, 30 bp, Homo sapiens; identical to SEQ ID NO: 86815
  chr14:53176801-53176831
  hypo

SEQ ID NO: 175139 - DNA, 30 bp, Homo sapiens; identical to SEQ ID NO: 27515
  chr14:53194027-53194057
  hypo

SEQ ID NO: 175140 - DNA, 85 bp, Homo sapiens; identical to SEQ ID NO: 86817
  chr14:53196019-53196104
  hypo

SEQ ID NO: 175141 - DNA, 18 bp, Homo sapiens
  chr14:53251937-53251955
  hypo
gcccggctattatcaggt

SEQ ID NO: 175142 - DNA, 143 bp, Homo sapiens; identical to SEQ ID NO: 86819
  chr14:53259035-53259178
  hypo

SEQ ID NO: 175143 - DNA, 30 bp, Homo sapiens; identical to SEQ ID NO: 86820
  chr14:53310493-53310523
  hypo

SEQ ID NO: 175144 - DNA, 137 bp, Homo sapiens
  chr14:53564363-53564500
  hypo
tagatctggtagtaaaactaacgtgaaccaattccatattattaaatattaaacgagaacgaaatgggaaatgtatggaccatttgaccatgttttaaaattatgtaaacgctttcggaaagctagccaagatacac

SEQ ID NO: 175145 - DNA, 30 bp, Homo sapiens; identical to SEQ ID NO: 51237
  chr14:54410903-54410933
  hypo

SEQ ID NO: 175146 - DNA, 30 bp, Homo sapiens; identical to SEQ ID NO: 86822
  chr14:54863039-54863069
  hypo

SEQ ID NO: 175147 - DNA, 30 bp, Homo sapiens; identical to SEQ ID NO: 86823
  chr14:55031846-55031876
  hypo

SEQ ID NO: 175148 - DNA, 30 bp, Homo sapiens; identical to SEQ ID NO: 51250
  chr14:55032290-55032320
  hypo

SEQ ID NO: 175149 - DNA, 108 bp, Homo sapiens; identical to SEQ ID NO: 51251
  chr14:55032357-55032465
  hypo

SEQ ID NO: 175150 - DNA, 30 bp, Homo sapiens
  chr14:55034714-55034744
  hypo
gtcgctgctcaagcgcgtgagccagaccca

SEQ ID NO: 175151 - DNA, 216 bp, Homo sapiens
  chr14:55035013-55035229
  hypo
cttacctccgccggccgctttgggattttgcccactgtgaactccgtcagccctttccgtgtggtagctacggtagcatgaatgattgatttttctctcatgcagtttcctgggaaataagtaagtcaggtcacgtagagtctggattttctgggtgtgtgtgttttttccttcctcctccttcttttgggcaacgtggctcgctggatttcagca

SEQ ID NO: 175152 - DNA, 30 bp, Homo sapiens
  chr14:55227049-55227079
  hypo
tgcaaagatggggccgcagccactggcgcc

SEQ ID NO: 175153 - DNA, 30 bp, Homo sapiens
  chr14:55286036-55286066
  hypo
acggcccactgagcacggcacactttaccg

SEQ ID NO: 175154 - DNA, 30 bp, Homo sapiens; identical to SEQ ID NO: 27518
  chr14:55439698-55439728
  hypo

SEQ ID NO: 175155 - DNA, 18 bp, Homo sapiens
  chr14:55517152-55517170
  hypo
tcttaaaaaatgtatatt

SEQ ID NO: 175156 - DNA, 121 bp, Homo sapiens
  chr14:55517469-55517590
  hypo
tatatgtatatattttgcacaccatataattatcacgacatctttattgctagttagtaggttccttgactggggtcatgtcatctgtgcctgacacaggaggtaatgtttattcagaaat

SEQ ID NO: 175157 - DNA, 143 bp, Homo sapiens; identical to SEQ ID NO: 86828
  chr14:55522630-55522773
  hypo

SEQ ID NO: 175158 - DNA, 31 bp, Homo sapiens; identical to SEQ ID NO: 27521
  chr14:55523173-55523204
  hypo

SEQ ID NO: 175159 - DNA, 202 bp, Homo sapiens
  chr14:55590025-55590227
  hypo
ctctctctggctcacgtctccaccagcacacacacaggacccagccctccacagtcaggtggcctccagtgaggccccatttgggtctatattctgtatgagggccccttggtggcaagtgacagagacaagcgtcagcaagcctgagcagaaaaaggatgcgaaaaggggaggtgggccggacgcggtggctcacgcctgc

SEQ ID NO: 175160 - DNA, 30 bp, Homo sapiens
  chr14:55590867-55590897
  hypo
ttgctgcaggtgagccgtgactattggggc

SEQ ID NO: 175161 - DNA, 30 bp, Homo sapiens
  chr14:55593585-55593615
  hypo
gaggttgcggtgagccgagcaaaactccgt

SEQ ID NO: 175162 - DNA, 19 bp, Homo sapiens
  chr14:55668507-55668526
  hypo
agtgcggctttctgctcca

SEQ ID NO: 175163 - DNA, 215 bp, Homo sapiens
  chr14:55731631-55731846
  hypo
gtgagatccctaggccgatcaaacttctgaatgccatcaaggccgatcaaacttctgaatgccatcaaggaggtctgaatgacccaagaatcattgttctttggaaaaacaagttcattaatcttgtgggcagcccctgagggttaggatatgaagttaatcaattagtagtgactaccctctaccgaaatgactatgtgcgagcaatcacgcat

SEQ ID NO: 175164 - DNA, 87 bp, Homo sapiens; identical to SEQ ID NO: 86832
  chr14:55740425-55740512
  hypo

SEQ ID NO: 175165 - DNA, 27 bp, Homo sapiens
  chr14:55751787-55751814
  hypo
agcttctttcaagaattgttccggccg

SEQ ID NO: 175166 - DNA, 881 bp, Homo sapiens; identical to SEQ ID NO: 86834
  chr14:55765279-55766160
  hypo

SEQ ID NO: 175167 - DNA, 31 bp, Homo sapiens; identical to SEQ ID NO: 27527
  chr14:55772519-55772550
  hypo

SEQ ID NO: 175168 - DNA, 30 bp, Homo sapiens
  chr14:55783504-55783534
  hypo
cagactcaaagtccacggctctgcatgact

SEQ ID NO: 175169 - DNA, 222 bp, Homo sapiens; identical to SEQ ID NO: 27528
  chr14:55817969-55818191
  hypo

SEQ ID NO: 175170 - DNA, 30 bp, Homo sapiens; identical to SEQ ID NO: 86837
  chr14:55819290-55819320
  hypo

SEQ ID NO: 175171 - DNA, 165 bp, Homo sapiens; identical to SEQ ID NO: 27529
  chr14:55819828-55819993
  hypo

SEQ ID NO: 175172 - DNA, 30 bp, Homo sapiens; identical to SEQ ID NO: 27530
  chr14:55822929-55822959
  hypo

SEQ ID NO: 175173 - DNA, 21 bp, Homo sapiens
  chr14:55823182-55823203
  hypo
tgagatggagtcttgctctgt

SEQ ID NO: 175174 - DNA, 30 bp, Homo sapiens
  chr14:55852627-55852657
  hypo
aatatatgggatcgtcgaagatttgccaga

SEQ ID NO: 175175 - DNA, 30 bp, Homo sapiens
  chr14:55855669-55855699
  hypo
tttttttcaacatggcgatttgacattgcc

SEQ ID NO: 175176 - DNA, 30 bp, Homo sapiens
  chr14:55855968-55855998
  hypo
aggttcacagatgcccggtggcaaagccct

SEQ ID NO: 175177 - DNA, 32 bp, Homo sapiens; identical to SEQ ID NO: 86841
  chr14:55894599-55894631
  hypo

SEQ ID NO: 175178 - DNA, 181 bp, Homo sapiens; identical to SEQ ID NO: 86842
  chr14:55894690-55894871
  hypo

SEQ ID NO: 175179 - DNA, 195 bp, Homo sapiens; identical to SEQ ID NO: 86843
  chr14:55981995-55982190
  hypo

SEQ ID NO: 175180 - DNA, 231 bp, Homo sapiens; identical to SEQ ID NO: 124616
  chr14:56047748-56047979
  hypo

SEQ ID NO: 175181 - DNA, 30 bp, Homo sapiens
  chr14:56072094-56072124
  hypo
atgatggcttatcacgtgttctgttatttt

SEQ ID NO: 175182 - DNA, 56 bp, Homo sapiens; identical to SEQ ID NO: 27533
  chr14:56088960-56089016
  hypo

SEQ ID NO: 175183 - DNA, 30 bp, Homo sapiens; identical to SEQ ID NO: 86845
  chr14:56095795-56095825
  hypo

SEQ ID NO: 175184 - DNA, 29 bp, Homo sapiens
  chr14:56230412-56230441
  hypo
tgagccactgagcccggctgccgaagtta

SEQ ID NO: 175185 - DNA, 24 bp, Homo sapiens
  chr14:56255319-56255343
  hypo
ttttttttttttaagacggagtct

SEQ ID NO: 175186 - DNA, 30 bp, Homo sapiens
  chr14:56512926-56512956
  hypo
tcatacttggagattcgtacttgggagatc

SEQ ID NO: 175187 - DNA, 30 bp, Homo sapiens
  chr14:56523462-56523492
  hypo
gggaaactgggaatgcgtcaaggtcagata

SEQ ID NO: 175188 - DNA, 136 bp, Homo sapiens
  chr14:56584469-56584605
  hypo
gtggggtgctccaagcgccttcgaaacgtcctctacgccagcaccaactggcaaaaccttctaattttctagacgcctttctgcttggttttggaaggggaggcacccaagtgggtgtgtgcgacacctctagttg

SEQ ID NO: 175189 - DNA, 30 bp, Homo sapiens; identical to SEQ ID NO: 124618
  chr14:56585236-56585266
  hypo

SEQ ID NO: 175190 - DNA, 568 bp, Homo sapiens; identical to SEQ ID NO: 124619
  chr14:56585471-56586039
  hypo

SEQ ID NO: 175191 - DNA, 97 bp, Homo sapiens
  chr14:56608020-56608117
  hypo
agaatgttgtatgtgcgcccctgtgccctcagggcttttgtcaggacggacgttaggactggcaaggcaagattggctggcacgagaatggccagtt

SEQ ID NO: 175192 - DNA, 30 bp, Homo sapiens
  chr14:56645133-56645163
  hypo
tgtcaaacccagcaccgtccatgtgatatc

SEQ ID NO: 175193 - DNA, 30 bp, Homo sapiens
  chr14:56645382-56645412
  hypo
tgccagtagcacccccgcattcttgctccc

SEQ ID NO: 175194 - DNA, 30 bp, Homo sapiens
  chr14:56654636-56654666
  hypo
ctccgcaggtggccacgttttctctggcct

SEQ ID NO: 175195 - DNA, 30 bp, Homo sapiens
  chr14:56689071-56689101
  hypo
agattttccttaagtcgctattaaaagtgc

SEQ ID NO: 175196 - DNA, 30 bp, Homo sapiens
  chr14:56737880-56737910
  hypo
agtgtgcacagtgctcgagatggtaaaatc

SEQ ID NO: 175197 - DNA, 30 bp, Homo sapiens
  chr14:56738408-56738438
  hypo
cacaagcgtacattacgtttcttggtagaa

SEQ ID NO: 175198 - DNA, 222 bp, Homo sapiens
  chr14:56756999-56757221
  hypo
gtggaaaaaccccgacggccacatggatgggctcactactaatggcgtcctggtgatgcatccacgagggggcttcaccgaggagtcccagcccggggtctggcgcgagatctctgtctgtggagatgtgtacaccttgcgagaaaccaggtcggcccagcaacgaggaaagctggtgagtgtgcttcactctgcaagtgtgaagtacgaaactactcaagc

SEQ ID NO: 175199 - DNA, 31 bp, Homo sapiens
  chr14:56769122-56769153
  hypo
cagcatgggcgacgagcgaaactccgtctca

SEQ ID NO: 175200 - DNA, 30 bp, Homo sapiens; identical to SEQ ID NO: 86847
  chr14:56793461-56793491
  hypo

SEQ ID NO: 175201 - DNA, 268 bp, Homo sapiens
  chr14:57045519-57045787
  hypo
gtgctggccccatgaccgtcaaggtaggtatatgttactctatagtttagtcactgtgtctctatcaaattgcgcgtaacacgtttgagattgtcactggttttcagtgtgtctttgagatacattttatgcgggttgctctcctccccgcccactccaggataattgctttaataataaaacataagcttaaaaagcttaactgcgctgttatgtagttgtccttattaacggctccgattctttttttttgcgttacagctcattg

SEQ ID NO: 175202 - DNA, 53 bp, Homo sapiens
  chr14:57052071-57052124
  hypo
tcaggcaagaccttacgactgtcagcatggtggtaatccgatagcagtgtggt

SEQ ID NO: 175203 - DNA, 30 bp, Homo sapiens; identical to SEQ ID NO: 86850
  chr14:57052549-57052579
  hypo

SEQ ID NO: 175204 - DNA, 19 bp, Homo sapiens
  chr14:57073330-57073349
  hypo
tgggtgtagtggttcacgc

SEQ ID NO: 175205 - DNA, 78 bp, Homo sapiens; identical to SEQ ID NO: 27535
  chr14:57073648-57073726
  hypo

SEQ ID NO: 175206 - DNA, 158 bp, Homo sapiens; identical to SEQ ID NO: 124629
  chr14:57265912-57266070
  hypo

SEQ ID NO: 175207 - DNA, 18 bp, Homo sapiens
  chr14:57666704-57666722
  hypo
ccacgcccggcctaaagg

SEQ ID NO: 175208 - DNA, 31 bp, Homo sapiens; identical to SEQ ID NO: 9735
  chr14:57734480-57734511
  hypo

SEQ ID NO: 175209 - DNA, 30 bp, Homo sapiens
  chr14:57757742-57757772
  hypo
atttcaaagggattccgattccagaagctt

SEQ ID NO: 175210 - DNA, 30 bp, Homo sapiens
  chr14:57812157-57812187
  hypo
ccacatctcctctgccggacctctggaaaa

SEQ ID NO: 175211 - DNA, 30 bp, Homo sapiens; identical to SEQ ID NO: 9737
  chr14:58546605-58546635
  hypo

SEQ ID NO: 175212 - DNA, 152 bp, Homo sapiens
  chr14:58599585-58599737
  hypo
agccactgcgcccggccaacccttgtccttttaaggctctgccacacctcttcaaacaggacagagctcacacccctttccaggtaaaggtgtgtgtgtgtgtgtacgtgcacgcacgcgcgcgctgatggcaatgtcggctgcctcactca

SEQ ID NO: 175213 - DNA, 215 bp, Homo sapiens; identical to SEQ ID NO: 86858
  chr14:58708562-58708777
  hypo

SEQ ID NO: 175214 - DNA, 259 bp, Homo sapiens; identical to SEQ ID NO: 86859
  chr14:58761577-58761836
  hypo

SEQ ID NO: 175215 - DNA, 174 bp, Homo sapiens
  chr14:58766592-58766766
  hypo
ctctgccccgatcctcgcgccctgaacactgccaatcctaaggctagtgccgtggaatgtcatttgttttgctactcaaaattgatgttcctactgatcagcagtttcggcataggaggatgtgttgaatgggtgaaaaatgatctgtgtgtctaaatgcggagtttaggccct

SEQ ID NO: 175216 - DNA, 30 bp, Homo sapiens; identical to SEQ ID NO: 124669
  chr14:58862505-58862535
  hypo

SEQ ID NO: 175217 - DNA, 241 bp, Homo sapiens; identical to SEQ ID NO: 124670
  chr14:58862949-58863190
  hypo

SEQ ID NO: 175218 - DNA, 98 bp, Homo sapiens; identical to SEQ ID NO: 86861
  chr14:58863446-58863544
  hypo

SEQ ID NO: 175219 - DNA, 35 bp, Homo sapiens
  chr14:58893191-58893226
  hypo
ggattacaggcgtgagccaccgcgctcagacttta

SEQ ID NO: 175220 - DNA, 180 bp, Homo sapiens; identical to SEQ ID NO: 86862
  chr14:58922735-58922915
  hypo

SEQ ID NO: 175221 - DNA, 162 bp, Homo sapiens; identical to SEQ ID NO: 86863
  chr14:59014414-59014576
  hypo

SEQ ID NO: 175222 - DNA, 244 bp, Homo sapiens; identical to SEQ ID NO: 27540
  chr14:59112402-59112646
  hypo

SEQ ID NO: 175223 - DNA, 472 bp, Homo sapiens; identical to SEQ ID NO: 86865
  chr14:59113227-59113699
  hypo

SEQ ID NO: 175224 - DNA, 30 bp, Homo sapiens
  chr14:59165575-59165605
  hypo
cgttggccaaaagctcgtggtacttcagag

SEQ ID NO: 175225 - DNA, 30 bp, Homo sapiens; identical to SEQ ID NO: 86866
  chr14:59650757-59650787
  hypo

SEQ ID NO: 175226 - DNA, 31 bp, Homo sapiens; identical to SEQ ID NO: 27541
  chr14:59706174-59706205
  hypo

SEQ ID NO: 175227 - DNA, 35 bp, Homo sapiens; identical to SEQ ID NO: 86868
  chr14:59715782-59715817
  hypo

SEQ ID NO: 175228 - DNA, 35 bp, Homo sapiens; identical to SEQ ID NO: 86869
  chr14:59734887-59734922
  hypo

SEQ ID NO: 175229 - DNA, 31 bp, Homo sapiens; identical to SEQ ID NO: 27542
  chr14:59789611-59789642
  hypo

SEQ ID NO: 175230 - DNA, 307 bp, Homo sapiens
  chr14:59809359-59809666
  hypo
caaaagttaagataacgttgctgcctttgaaagcacatggctaattggagaagaaaaatgacacctgtgagaagatttgtgcgcagttcagggcttacactggtctgactgaaggacatggagcccggccatgtaggaggggcaccagcagggcttattgtagaaagtaggcctcaaaggcaaagactgttatatgacaagaggaggggccgggaaggtggtgtcaaggaggcgtgcagcagcaaagatgtgggagggacataagcacagttagtagagagccctgcaatcccggcagaaaattatc

SEQ ID NO: 175231 - DNA, 146 bp, Homo sapiens
  chr14:59810622-59810768
  hypo
gagtagaatgggcacgtcttagagacgttcctcaggtcctcagggaataagcaacttttctactggtatgtgtgcatgggtgacatgtagcaatttaaaatttactctgttttattccccaaaacagacctcgctgccaaaggcct

SEQ ID NO: 175232 - DNA, 30 bp, Homo sapiens
  chr14:59811307-59811337
  hypo
tttgatccaacaggacgcgtgcatagcatt

SEQ ID NO: 175233 - DNA, 165 bp, Homo sapiens; identical to SEQ ID NO: 27544
  chr14:59821077-59821242
  hypo

SEQ ID NO: 175234 - DNA, 30 bp, Homo sapiens
  chr14:59930441-59930471
  hypo
ctggccattccaaccgtcttagaggctggt

SEQ ID NO: 175235 - DNA, 30 bp, Homo sapiens; identical to SEQ ID NO: 51310
  chr14:59932273-59932303
  hypo

SEQ ID NO: 175236 - DNA, 170 bp, Homo sapiens; identical to SEQ ID NO: 27546
  chr14:59935187-59935357
  hypo

SEQ ID NO: 175237 - DNA, 78 bp, Homo sapiens; identical to SEQ ID NO: 27547
  chr14:59961996-59962074
  hypo

SEQ ID NO: 175238 - DNA, 137 bp, Homo sapiens; identical to SEQ ID NO: 51312
  chr14:60097109-60097246
  hypo

SEQ ID NO: 175239 - DNA, 167 bp, Homo sapiens; identical to SEQ ID NO: 9745
  chr14:60097406-60097573
  hypo

SEQ ID NO: 175240 - DNA, 720 bp, Homo sapiens; identical to SEQ ID NO: 27550
  chr14:60193646-60194366
  hypo

SEQ ID NO: 175241 - DNA, 822 bp, Homo sapiens; identical to SEQ ID NO: 124688
  chr14:60385920-60386742
  hypo

SEQ ID NO: 175242 - DNA, 157 bp, Homo sapiens
  chr14:60557423-60557580
  hypo
catgaaactcagacttcttggcggtaagtgatgcttccgagatgcttaatgtggtactctgacccgcaatgagtgagcttcaatgagaaaaactatggatggaccaacagcacgttttcccatattctatcaaatcgtgaagataccaaactatgaa

SEQ ID NO: 175243 - DNA, 23 bp, Homo sapiens
  chr14:60722175-60722198
  hypo
accgcgcccggcctatcatatgt

SEQ ID NO: 175244 - DNA, 250 bp, Homo sapiens; identical to SEQ ID NO: 124702
  chr14:60973757-60974007
  hypo

SEQ ID NO: 175245 - DNA, 469 bp, Homo sapiens; identical to SEQ ID NO: 124703
  chr14:60974077-60974546
  hypo

SEQ ID NO: 175246 - DNA, 335 bp, Homo sapiens; identical to SEQ ID NO: 9761
  chr14:60981477-60981812
  hypo

SEQ ID NO: 175247 - DNA, 1455 bp, Homo sapiens; identical to SEQ ID NO: 124725
  chr14:61123171-61124626
  hypo

SEQ ID NO: 175248 - DNA, 185 bp, Homo sapiens; identical to SEQ ID NO: 86887
  chr14:61246678-61246863
  hypo

SEQ ID NO: 175249 - DNA, 30 bp, Homo sapiens; identical to SEQ ID NO: 124731
  chr14:61644283-61644313
  hypo

SEQ ID NO: 175250 - DNA, 31 bp, Homo sapiens; identical to SEQ ID NO: 9778
  chr14:61736456-61736487
  hypo

SEQ ID NO: 175251 - DNA, 139 bp, Homo sapiens; identical to SEQ ID NO: 9779
  chr14:61747388-61747527
  hypo

SEQ ID NO: 175252 - DNA, 579 bp, Homo sapiens; identical to SEQ ID NO: 9780
  chr14:61747582-61748161
  hypo

SEQ ID NO: 175253 - DNA, 29 bp, Homo sapiens
  chr14:61903530-61903559
  hypo
tgagccgccacacccggccttgctgccat

SEQ ID NO: 175254 - DNA, 93 bp, Homo sapiens
  chr14:61929138-61929231
  hypo
gattttctaatgctgagatagaggtatacaattttagttttgctgtcgttgttgccttctttgaggtttgcaaggtatcggactccacagtac

SEQ ID NO: 175255 - DNA, 80 bp, Homo sapiens; identical to SEQ ID NO: 86892
  chr14:61992776-61992856
  hypo

SEQ ID NO: 175256 - DNA, 67 bp, Homo sapiens
  chr14:61995223-61995290
  hypo
tgccaggcataatggcgccaggcataatggtgaaccgcataaacacaatccccgccgtcatggagct

SEQ ID NO: 175257 - DNA, 149 bp, Homo sapiens; identical to SEQ ID NO: 27559
  chr14:62015168-62015317
  hypo

SEQ ID NO: 175258 - DNA, 50 bp, Homo sapiens
  chr14:62021520-62021570
  hypo
acagaaatgctcaatcgatgttggctattattatcgtcagctctcccaca

SEQ ID NO: 175259 - DNA, 112 bp, Homo sapiens
  chr14:62027305-62027417
  hypo
ctgctgagtatataacgtggactgtgagaaatatggacttggaatcaggagacatggatttgaaacttgacgcattcatcctgggccggctgttaaacgctcccaatccttg

SEQ ID NO: 175260 - DNA, 260 bp, Homo sapiens; identical to SEQ ID NO: 51361
  chr14:62105860-62106120
  hypo

SEQ ID NO: 175261 - DNA, 87 bp, Homo sapiens
  chr14:62148149-62148236
  hypo
actggaagcagggtgcgtaaagtaccgaagaatggagctgggatccgggagtcaatgggccataggcagagacgagatgaacaacca

SEQ ID NO: 175262 - DNA, 89 bp, Homo sapiens; identical to SEQ ID NO: 51362
  chr14:62161812-62161901
  hypo

SEQ ID NO: 175263 - DNA, 921 bp, Homo sapiens; identical to SEQ ID NO: 124741
  chr14:62162323-62163244
  hypo

SEQ ID NO: 175264 - DNA, 23 bp, Homo sapiens
  chr14:62207098-62207121
  hypo
gataaacacgatggacttggttg

SEQ ID NO: 175265 - DNA, 36 bp, Homo sapiens
  chr14:62227899-62227935
  hypo
gggtgcagtggctcacgtctgtaatcccaacacttt

SEQ ID NO: 175266 - DNA, 30 bp, Homo sapiens; identical to SEQ ID NO: 86899
  chr14:62263105-62263135
  hypo

SEQ ID NO: 175267 - DNA, 30 bp, Homo sapiens; identical to SEQ ID NO: 27562
  chr14:62273614-62273644
  hypo

SEQ ID NO: 175268 - DNA, 30 bp, Homo sapiens; identical to SEQ ID NO: 86901
  chr14:62298855-62298885
  hypo

SEQ ID NO: 175269 - DNA, 234 bp, Homo sapiens; identical to SEQ ID NO: 27563
  chr14:62523572-62523806
  hypo

SEQ ID NO: 175270 - DNA, 645 bp, Homo sapiens; identical to SEQ ID NO: 9788
  chr14:63512063-63512708
  hypo

SEQ ID NO: 175271 - DNA, 457 bp, Homo sapiens; identical to SEQ ID NO: 51372
  chr14:63512740-63513197
  hypo

SEQ ID NO: 175272 - DNA, 122 bp, Homo sapiens; identical to SEQ ID NO: 86905
  chr14:63856996-63857118
  hypo

SEQ ID NO: 175273 - DNA, 30 bp, Homo sapiens; identical to SEQ ID NO: 86906
  chr14:63872814-63872844
  hypo

SEQ ID NO: 175274 - DNA, 30 bp, Homo sapiens
  chr14:63889154-63889184
  hypo
taactgctggccgggcgcagtggctcacgc

SEQ ID NO: 175275 - DNA, 30 bp, Homo sapiens; identical to SEQ ID NO: 86907
  chr14:63950402-63950432
  hypo

SEQ ID NO: 175276 - DNA, 30 bp, Homo sapiens
  chr14:64006242-64006272
  hypo
ttaccttttagcagcggcagaggtgttaac

SEQ ID NO: 175277 - DNA, 234 bp, Homo sapiens
  chr14:64061785-64062019
  hypo
gttgaggattcctccggagacgccgtccacgtggatgtgcggcccctgacgggacgtgatgacccgctcactcttccaggtgccagctccgcggatcccttccagctccccctccagaatgccgcgcagctgggccagtactgactgcgcgctgcggccgcacggcaccccggaaagcgcggcgcgccaggcgtttccagcccacattgctcctacctcgccagagcgcacctt

SEQ ID NO: 175278 - DNA, 30 bp, Homo sapiens; identical to SEQ ID NO: 86909
  chr14:64064593-64064623
  hypo

SEQ ID NO: 175279 - DNA, 30 bp, Homo sapiens; identical to SEQ ID NO: 86910
  chr14:64107207-64107237
  hypo

SEQ ID NO: 175280 - DNA, 21 bp, Homo sapiens
  chr14:64149781-64149802
  hypo
ccaccgcgactggccaagttt

SEQ ID NO: 175281 - DNA, 36 bp, Homo sapiens; identical to SEQ ID NO: 51377
  chr14:64182959-64182995
  hypo

SEQ ID NO: 175282 - DNA, 43 bp, Homo sapiens; identical to SEQ ID NO: 27566
  chr14:64190116-64190159
  hypo

SEQ ID NO: 175283 - DNA, 45 bp, Homo sapiens; identical to SEQ ID NO: 27567
  chr14:64191360-64191405
  hypo

SEQ ID NO: 175284 - DNA, 37 bp, Homo sapiens; identical to SEQ ID NO: 27568
  chr14:64222413-64222450
  hypo

SEQ ID NO: 175285 - DNA, 36 bp, Homo sapiens; identical to SEQ ID NO: 86916
  chr14:64227544-64227580
  hypo

SEQ ID NO: 175286 - DNA, 148 bp, Homo sapiens
  chr14:64385259-64385407
  hypo
tctttgggagagagacgtcagatgccggatgaataatttactgtcgttgaaggtctgtgcggtgatgcatgttgggcgagcatgggagggaaaaggcagaaagagtagccacgcgcttttgctgctgtcttgtcgggtggagcagcat

SEQ ID NO: 175287 - DNA, 1006 bp, Homo sapiens; identical to SEQ ID NO: 51381
  chr14:64760752-64761758
  hypo

SEQ ID NO: 175288 - DNA, 18 bp, Homo sapiens
  chr14:64822460-64822478
  hypo
tttttttttgagaggaag

SEQ ID NO: 175289 - DNA, 155 bp, Homo sapiens; identical to SEQ ID NO: 27569
  chr14:64884525-64884680
  hypo

SEQ ID NO: 175290 - DNA, 81 bp, Homo sapiens; identical to SEQ ID NO: 27570
  chr14:64888235-64888316
  hypo

SEQ ID NO: 175291 - DNA, 31 bp, Homo sapiens; identical to SEQ ID NO: 27571
  chr14:64892253-64892284
  hypo

SEQ ID NO: 175292 - DNA, 33 bp, Homo sapiens; identical to SEQ ID NO: 86922
  chr14:64904875-64904908
  hypo

SEQ ID NO: 175293 - DNA, 82 bp, Homo sapiens; identical to SEQ ID NO: 86923
  chr14:64905828-64905910
  hypo

SEQ ID NO: 175294 - DNA, 30 bp, Homo sapiens
  chr14:64954197-64954227
  hypo
tacgggaatcaaaacgttccccacagtaat

SEQ ID NO: 175295 - DNA, 27 bp, Homo sapiens
  chr14:64955675-64955702
  hypo
tgaaatcagcagggtgcggtggctcac

SEQ ID NO: 175296 - DNA, 22 bp, Homo sapiens
  chr14:64982517-64982539
  hypo
tgagccacggtgcccggcctca

SEQ ID NO: 175297 - DNA, 44 bp, Homo sapiens; identical to SEQ ID NO: 86926
  chr14:64992808-64992852
  hypo

SEQ ID NO: 175298 - DNA, 44 bp, Homo sapiens; identical to SEQ ID NO: 9796
  chr14:65005556-65005600
  hypo

SEQ ID NO: 175299 - DNA, 163 bp, Homo sapiens; identical to SEQ ID NO: 51388
  chr14:65005779-65005942
  hypo

SEQ ID NO: 175300 - DNA, 98 bp, Homo sapiens; identical to SEQ ID NO: 124775
  chr14:65006318-65006416
  hypo

SEQ ID NO: 175301 - DNA, 39 bp, Homo sapiens; identical to SEQ ID NO: 86929
  chr14:65122506-65122545
  hypo

SEQ ID NO: 175302 - DNA, 21 bp, Homo sapiens
  chr14:65136323-65136344
  hypo
actagcatcagcagtattaat

SEQ ID NO: 175303 - DNA, 20 bp, Homo sapiens
  chr14:65136643-65136663
  hypo
tctcaaaaaaaaaaaaaaaa

SEQ ID NO: 175304 - DNA, 191 bp, Homo sapiens
  chr14:65150030-65150221
  hypo
ggttgtcccttcgcccgctctgggtttgttatgacgtactggtcggcagccccaggccgcagaggttgcccaagacaatcatgcttttctgagaggcaggctgtgctgcgagtctcaggccgcagccgcacacacaatgccctctgtctccgctggggcagaaaggcgcattattgcgggtcaggtgactc

SEQ ID NO: 175305 - DNA, 292 bp, Homo sapiens; identical to SEQ ID NO: 86933
  chr14:65194542-65194834
  hypo

SEQ ID NO: 175306 - DNA, 31 bp, Homo sapiens; identical to SEQ ID NO: 27579
  chr14:65195784-65195815
  hypo

SEQ ID NO: 175307 - DNA, 31 bp, Homo sapiens; identical to SEQ ID NO: 86935
  chr14:65199533-65199564
  hypo

SEQ ID NO: 175308 - DNA, 31 bp, Homo sapiens; identical to SEQ ID NO: 86936
  chr14:65203193-65203224
  hypo

SEQ ID NO: 175309 - DNA, 30 bp, Homo sapiens; identical to SEQ ID NO: 86937
  chr14:65207684-65207714
  hypo

SEQ ID NO: 175310 - DNA, 240 bp, Homo sapiens
  chr14:65207950-65208190
  hypo
taaggccctgagcagcgaggaggaagaagaaatgggaggtgccgcccaggagcctgagagccttctgccaccctctgtgctggaccaggccagcgtcattgcggagcgatttgtcagcagcttctctcggcggagcagcgtggcacaggaggacagcaagtccagtggctttgggagcccgcggctggtcagccggagcagcagcgtgctcagcctggagggcagcgagaagggcctggc

SEQ ID NO: 175311 - DNA, 140 bp, Homo sapiens; identical to SEQ ID NO: 27581
  chr14:65209827-65209967
  hypo

SEQ ID NO: 175312 - DNA, 31 bp, Homo sapiens; identical to SEQ ID NO: 86940
  chr14:65210331-65210362
  hypo

SEQ ID NO: 175313 - DNA, 147 bp, Homo sapiens
  chr14:65215873-65216020
  hypo
agcttttgcagtgcagcgtggggcccgggggcccggcccgcgactcgactcatctcgattcgaccggcgggcggcggcgagaggaggccaaggcctgggctgcccggtctctgcgcgtcccgactccgccgcgcccgccagccccac

SEQ ID NO: 175314 - DNA, 31 bp, Homo sapiens; identical to SEQ ID NO: 86942
  chr14:65217132-65217163
  hypo

SEQ ID NO: 175315 - DNA, 143 bp, Homo sapiens; identical to SEQ ID NO: 27582
  chr14:65220229-65220372
  hypo

SEQ ID NO: 175316 - DNA, 449 bp, Homo sapiens
  chr14:65233319-65233768
  hypo
gggaggatggagggcggggctgcgccagctcatctcgcctccacctgggctgagcctagtaggggtgagagggctctggctgcagtgactcccaggaactagacaaacgagaccagagactgaccggggacgttctctcggtggccgcatggtgggaaactggagcctcccctgctgtctcgccttcctcctcttgaggcctaaggaagacacagtctctctttagaaacaagcacccctctgaggccagtgcctcctgcgaggcctggcttttcacctgcgcccacagggaggagcaccaaatagctccccctccagtcagccggcagcctggatggtgcttggcaaggagccgcccagcgacttcttcggaaaagccaaggcagattcttcagaagggagccaggttccaggcagaacggcctgtggggccccgtgttcaggtggct

SEQ ID NO: 175317 - DNA, 30 bp, Homo sapiens
  chr14:65235747-65235777
  hypo
tcacacatgcggagccgctcccagcgggct

SEQ ID NO: 175318 - DNA, 156 bp, Homo sapiens
  chr14:65236140-65236296
  hypo
tggggctccaatccccgggcctgtgtgtagccccgatctccatgagtgagagcaagacaagctcctcagaaaagctgcagctctcatctccctcccaggaggctgcctggctggcacagtggggacggagacggaggagctcgcctccatccttgc

SEQ ID NO: 175319 - DNA, 85 bp, Homo sapiens; identical to SEQ ID NO: 27584
  chr14:65237646-65237731
  hypo

SEQ ID NO: 175320 - DNA, 557 bp, Homo sapiens; identical to SEQ ID NO: 27585
  chr14:65239301-65239858
  hypo

SEQ ID NO: 175321 - DNA, 31 bp, Homo sapiens; identical to SEQ ID NO: 86948
  chr14:65240158-65240189
  hypo

SEQ ID NO: 175322 - DNA, 55 bp, Homo sapiens; identical to SEQ ID NO: 86949
  chr14:65248986-65249041
  hypo

SEQ ID NO: 175323 - DNA, 398 bp, Homo sapiens
  chr14:65259854-65260252
  hypo
ctgctgacgcaggtccgcctgggccaccacctgttggtagagctcccgcagggcctgcagccgatgggtcacatctggggaatcccgaaactcttcggggaatccctgggcctgctgctccaggtgctccatcaccccacggctctcctccagctcctccaggaagtccttgtgctttttccccagggcccgcgtggccccttcgtcctgccccacatcttcaccagagagcagccggtgggcgtcttgcagccaagccttcaggtcatccgcatcgccctggaactggaaaaagttctcagcatcctggaggttcttcttgcagaaggcagccaggtccttcagctggtcccactgtgccgacacctcctttatgcgggcctcgatctgcgggtgcc

SEQ ID NO: 175324 - DNA, 90 bp, Homo sapiens
  chr14:65266470-65266560
  hypo
ggcttctccacggtgcggtaggtgctgaaggcctgcagctgctgctggacgcccgtcagcgagttggcaaacttgcggctgttcaggaca

SEQ ID NO: 175325 - DNA, 222 bp, Homo sapiens; identical to SEQ ID NO: 27587
  chr14:65271601-65271823
  hypo

SEQ ID NO: 175326 - DNA, 91 bp, Homo sapiens; identical to SEQ ID NO: 27588
  chr14:65273126-65273217
  hypo

SEQ ID NO: 175327 - DNA, 44 bp, Homo sapiens
  chr14:65320613-65320657
  hypo
agatacttatcactggccagccgcggtggctcacgcctgtaatc

SEQ ID NO: 175328 - DNA, 30 bp, Homo sapiens
  chr14:65383575-65383605
  hypo
gtgagccaccgcgccgggccttaggttgga

SEQ ID NO: 175329 - DNA, 208 bp, Homo sapiens
  chr14:65406251-65406459
  hypo
atggttgggaaggtgcggctgtagcgtcggaagggctctccctccggccctatgaggaacttctcaaagttccaggccacatctgagcggcgcacagggctccaaatgatgagcttgggatcggtcatgagggaaaatgggtcatcataagggtaggggagcttgtccttcaggtaggcgaagacaggatgctcgttctgcccattca

SEQ ID NO: 175330 - DNA, 30 bp, Homo sapiens
  chr14:65421768-65421798
  hypo
aaggctgaggaattccggggctcgcagcac

SEQ ID NO: 175331 - DNA, 129 bp, Homo sapiens
  chr14:65422097-65422226
  hypo
gtaacccgtgcccatcgtggctccttccctctccctgcgtggctgttggttttttccactgctgagcactgcaggacaaagtcaacacactggccttattgaggcctctgcagacggatgctttctcac

SEQ ID NO: 175332 - DNA, 30 bp, Homo sapiens
  chr14:65491961-65491991
  hypo
cagtagtgttgcgttcggcacgattctatc

SEQ ID NO: 175333 - DNA, 35 bp, Homo sapiens; identical to SEQ ID NO: 27590
  chr14:65492491-65492526
  hypo

SEQ ID NO: 175334 - DNA, 147 bp, Homo sapiens; identical to SEQ ID NO: 86954
  chr14:65493163-65493310
  hypo

SEQ ID NO: 175335 - DNA, 27 bp, Homo sapiens
  chr14:65493549-65493576
  hypo
agcctgggcgaccgagggcaaccccgc

SEQ ID NO: 175336 - DNA, 36 bp, Homo sapiens
  chr14:65532137-65532173
  hypo
gtcaggtgatctcgtcgttgtgtgaacatcatggag

SEQ ID NO: 175337 - DNA, 395 bp, Homo sapiens
  chr14:65532352-65532747
  hypo
tattatgatctcacgggaccactgtcgtacatgcattctgttgttaaccaaaacatgatgtggcgtgactatatacaaaactctaccaccaattagccccaagaccaaggctttacctgctgcttaaaaagtgctgaccactcttgcctcatctgcccaaacaataacccctaagacagtccctcctgttctaccgcctctcatttgatccttgactcaccttgtaaggtgggtgaagcaggcgtattacctgccttttacaactggagaaacaggttggagagcttacgtaaatcacccaaggtttcccagctgtcaagtggtggtgcctgagcccgagcccgtatctgctgcctccaaagcccatgcccttccaccaccgcaggcctctgaag

SEQ ID NO: 175338 - DNA, 30 bp, Homo sapiens; identical to SEQ ID NO: 86957
  chr14:65532964-65532994
  hypo

SEQ ID NO: 175339 - DNA, 24 bp, Homo sapiens
  chr14:65533278-65533302
  hypo
agaaaaatgcatggccgggtgtgg

SEQ ID NO: 175340 - DNA, 35 bp, Homo sapiens
  chr14:65631812-65631847
  hypo
ttaagaaattccagccaggtgcggtggctcatgcc

SEQ ID NO: 175341 - DNA, 177 bp, Homo sapiens
  chr14:65746809-65746986
  hypo
ccggacctgccctccggggacagctagccctcgctggaccagacatggccgtggccttcgacctttcagttcccaacatccacggagccctggccccccggccatcccctcggcggtggcggcagctgcagcggcaggccagatcgccatcctgggcctggcggggacaggaaattc

SEQ ID NO: 175342 - DNA, 30 bp, Homo sapiens; identical to SEQ ID NO: 27591
  chr14:65747465-65747495
  hypo

SEQ ID NO: 175343 - DNA, 30 bp, Homo sapiens; identical to SEQ ID NO: 86961
  chr14:66096205-66096235
  hypo

SEQ ID NO: 175344 - DNA, 31 bp, Homo sapiens; identical to SEQ ID NO: 27592
  chr14:66169220-66169251
  hypo

SEQ ID NO: 175345 - DNA, 30 bp, Homo sapiens
  chr14:66303752-66303782
  hypo
cttttccactcactccgcagagagccttgg

SEQ ID NO: 175346 - DNA, 30 bp, Homo sapiens; identical to SEQ ID NO: 27593
  chr14:66308224-66308254
  hypo

SEQ ID NO: 175347 - DNA, 219 bp, Homo sapiens; identical to SEQ ID NO: 86964
  chr14:66479540-66479759
  hypo

SEQ ID NO: 175348 - DNA, 30 bp, Homo sapiens
  chr14:66556308-66556338
  hypo
ccatgctttccacctcggttctaaatggca

SEQ ID NO: 175349 - DNA, 89 bp, Homo sapiens
  chr14:66560630-66560719
  hypo
ccacactgcctcgagcgtgcacacacctgcccaggctgcgacagcgtccaggcttgactacaactttgctccaagatcagagcaagtgc

SEQ ID NO: 175350 - DNA, 89 bp, Homo sapiens
  chr14:66560898-66560987
  hypo
gtgcagagtggagcgcaccaccaccctggacctacctccgcctcgaggcccctctctgcccgcccctccatgcccgactgtgctgctcc

SEQ ID NO: 175351 - DNA, 43 bp, Homo sapiens; identical to SEQ ID NO: 27594
  chr14:66814103-66814146
  hypo

SEQ ID NO: 175352 - DNA, 324 bp, Homo sapiens
  chr14:66976211-66976535
  hypo
taatatccgtcacttcggcgatcggcagttgctgcagggcatgacttccaagatgaacagcaagcggatttgtaggggtttctgctgtggttctgtaattggcaaggtttatgtgtaattgagtggcgagacgggggttaaagaactatatttggaatctgagggcttagtttggagtgaaggaaatccaagactcagtgatgtgatttcggaaaaagaagcagtgtggacgggaatcctagtgtttcccttacttctttttttaattttttctttaactgtcaaattctgacaggtcgagacggtgctcgagaagggactaaa

SEQ ID NO: 175353 - DNA, 23 bp, Homo sapiens
  chr14:67585481-67585504
  hypo
gcggggggagttacctttcttaa

SEQ ID NO: 175354 - DNA, 30 bp, Homo sapiens; identical to SEQ ID NO: 86967
  chr14:67647725-67647755
  hypo

SEQ ID NO: 175355 - DNA, 31 bp, Homo sapiens; identical to SEQ ID NO: 86968
  chr14:67860125-67860156
  hypo

SEQ ID NO: 175356 - DNA, 170 bp, Homo sapiens; identical to SEQ ID NO: 86969
  chr14:67864420-67864590
  hypo

SEQ ID NO: 175357 - DNA, 93 bp, Homo sapiens; identical to SEQ ID NO: 86970
  chr14:67876364-67876457
  hypo

SEQ ID NO: 175358 - DNA, 30 bp, Homo sapiens
  chr14:67879332-67879362
  hypo
gcagggccccctgtccgcaggatatacccc

SEQ ID NO: 175359 - DNA, 30 bp, Homo sapiens
  chr14:67885262-67885292
  hypo
gtgccacaagccccgcgcggcccagatagg

SEQ ID NO: 175360 - DNA, 38 bp, Homo sapiens; identical to SEQ ID NO: 86971
  chr14:67886278-67886316
  hypo

SEQ ID NO: 175361 - DNA, 97 bp, Homo sapiens; identical to SEQ ID NO: 86972
  chr14:67886555-67886652
  hypo

SEQ ID NO: 175362 - DNA, 180 bp, Homo sapiens; identical to SEQ ID NO: 86973
  chr14:67888348-67888528
  hypo

SEQ ID NO: 175363 - DNA, 143 bp, Homo sapiens
  chr14:67893183-67893326
  hypo
gccccttaaaacacaagtggccggtgcgattgccttcagcagcagcagactgtgaaatggtaggctgccgggttcgggggacagtgtggataatgtctatttttttggttttgttttgttttttttgagacagagtttcactc

SEQ ID NO: 175364 - DNA, 30 bp, Homo sapiens
  chr14:67907190-67907220
  hypo
actccggactgggcgcgtggctcacacctg

SEQ ID NO: 175365 - DNA, 30 bp, Homo sapiens; identical to SEQ ID NO: 86975
  chr14:68062849-68062879
  hypo

SEQ ID NO: 175366 - DNA, 215 bp, Homo sapiens; identical to SEQ ID NO: 27598
  chr14:68067573-68067788
  hypo

SEQ ID NO: 175367 - DNA, 30 bp, Homo sapiens
  chr14:68129785-68129815
  hypo
ctctgggtgtggcaccggcaatgacttgaa

SEQ ID NO: 175368 - DNA, 23 bp, Homo sapiens
  chr14:68130112-68130135
  hypo
gggcacggtgactcacgcctgta

SEQ ID NO: 175369 - DNA, 83 bp, Homo sapiens
  chr14:68130374-68130457
  hypo
agggagactccatttcaaaataaataaataaataaataaaatgtaagtgacagtaataatgatacttgcggatggcaaaaatt

SEQ ID NO: 175370 - DNA, 30 bp, Homo sapiens; identical to SEQ ID NO: 86977
  chr14:68142518-68142548
  hypo

SEQ ID NO: 175371 - DNA, 55 bp, Homo sapiens
  chr14:68163050-68163105
  hypo
ctgggaaatgaaaggcggattagacaggagaggagcggtccgaagtctgacagtt

SEQ ID NO: 175372 - DNA, 24 bp, Homo sapiens
  chr14:68166570-68166594
  hypo
gatttaggctgggcgcggtggctc

SEQ ID NO: 175373 - DNA, 23 bp, Homo sapiens
  chr14:68166833-68166856
  hypo
agacagagcgagaaaaaaaaaaa

SEQ ID NO: 175374 - DNA, 30 bp, Homo sapiens; identical to SEQ ID NO: 27600
  chr14:68214727-68214757
  hypo

SEQ ID NO: 175375 - DNA, 330 bp, Homo sapiens
  chr14:68265538-68265868
  hypo
cattttaaaagtacagctggccgggtcccgccccgaggccaaccgggcctccccagccttttggccaccaggccccgcccccggggagggcgctgagctccgcttggcgcctctgatctttatttctcgcgccgcggtttcggtgggaggggcgggggtgatttacggatactctctgccctcagatcctgggaaaagtctattccgttcccagtgacaaagaacagagagcagtgtacgatgagcagggaacagtggacgaggactctccagtgctcacccaagacctagactaggaggcgtactggcggctactctttaaaaagatat

SEQ ID NO: 175376 - DNA, 31 bp, Homo sapiens; identical to SEQ ID NO: 86982
  chr14:68621852-68621883
  hypo

SEQ ID NO: 175377 - DNA, 30 bp, Homo sapiens; identical to SEQ ID NO: 51423
  chr14:68660412-68660442
  hypo

SEQ ID NO: 175378 - DNA, 30 bp, Homo sapiens
  chr14:68779019-68779049
  hypo
gagcagaatgtataacggatccaccgttct

SEQ ID NO: 175379 - DNA, 99 bp, Homo sapiens; identical to SEQ ID NO: 86984
  chr14:68829197-68829296
  hypo

SEQ ID NO: 175380 - DNA, 30 bp, Homo sapiens
  chr14:68960374-68960404
  hypo
tattttatagaagccgagaggcagcctctg

SEQ ID NO: 175381 - DNA, 43 bp, Homo sapiens; identical to SEQ ID NO: 86985
  chr14:68968538-68968581
  hypo

SEQ ID NO: 175382 - DNA, 99 bp, Homo sapiens
  chr14:68993116-68993215
  hypo
ctaatgatatatttctcagaacgtgtcgttaagcgacatgtgaccgtattatacgtccagcaattgagatgaattaccgttgcacacagtgctgaagct

SEQ ID NO: 175383 - DNA, 30 bp, Homo sapiens; identical to SEQ ID NO: 86986
  chr14:69006125-69006155
  hypo

SEQ ID NO: 175384 - DNA, 30 bp, Homo sapiens
  chr14:69013867-69013897
  hypo
tctgagttcaggttccggcacgattagtgc

SEQ ID NO: 175385 - DNA, 133 bp, Homo sapiens; identical to SEQ ID NO: 86987
  chr14:69014214-69014347
  hypo

SEQ ID NO: 175386 - DNA, 30 bp, Homo sapiens; identical to SEQ ID NO: 51424
  chr14:69034666-69034696
  hypo

SEQ ID NO: 175387 - DNA, 100 bp, Homo sapiens; identical to SEQ ID NO: 86989
  chr14:69050652-69050752
  hypo

SEQ ID NO: 175388 - DNA, 253 bp, Homo sapiens
  chr14:69052662-69052915
  hypo
gcgtcgccaaggcaacggctcatctgctgcagatctcatcaaggccctgcaaagcatccacggcacgttacgctttgcgtttcacagtgaatcggctgcaatcagtcttcctgcagccctcccttacccccatcacctcctagcctatggaagagaagatcattaaaggcgggtgaaaaactgcaatcagaactctccgaggctggcacggagaggcagagctgcgatagtcctgttccgaggacagtagatt

SEQ ID NO: 175389 - DNA, 94 bp, Homo sapiens; identical to SEQ ID NO: 86990
  chr14:69070515-69070609
  hypo

SEQ ID NO: 175390 - DNA, 128 bp, Homo sapiens
  chr14:69143521-69143649
  hypo
gcactgactggatgacgggcgtccccgcccaggagccagagactgtgtctccacatgcaggcagggccagcgtgaggtcaggattaaccagagaagctgtgctcttcttgcagcgccacactaggctg

SEQ ID NO: 175391 - DNA, 35 bp, Homo sapiens
  chr14:69144066-69144101
  hypo
attgcactgctgctccggcccgggcctcttcacat

SEQ ID NO: 175392 - DNA, 178 bp, Homo sapiens
  chr14:69144732-69144910
  hypo
cgccatgctttatctcgttaacctgcactacaactttaagaggtggatatttttatccacattttacagataaggaatatgagactcagagataaaataacttgcccaaggttacatagctaataaatggcggggcctggatttgaaccaccacgttcttaaccgctgagctccacca

SEQ ID NO: 175393 - DNA, 44 bp, Homo sapiens; identical to SEQ ID NO: 86991
  chr14:69153994-69154038
  hypo

SEQ ID NO: 175394 - DNA, 35 bp, Homo sapiens; identical to SEQ ID NO: 86992
  chr14:69154692-69154727
  hypo

SEQ ID NO: 175395 - DNA, 94 bp, Homo sapiens; identical to SEQ ID NO: 86993
  chr14:69218774-69218868
  hypo

SEQ ID NO: 175396 - DNA, 31 bp, Homo sapiens; identical to SEQ ID NO: 86994
  chr14:69229175-69229206
  hypo

SEQ ID NO: 175397 - DNA, 157 bp, Homo sapiens
  chr14:69245842-69245999
  hypo
gaagggctaatcccttagaatcgtgggctcttagaagctatgacacctgtaccaatagaaaaatcatccattcagtaggtaagtgcctgctgagtgccaggcatcagcgttgacatgaaatagaacggtgaacaggaggctgggcgcggtggctcat

SEQ ID NO: 175398 - DNA, 31 bp, Homo sapiens; identical to SEQ ID NO: 9812
  chr14:69258877-69258908
  hypo

SEQ ID NO: 175399 - DNA, 228 bp, Homo sapiens; identical to SEQ ID NO: 9813
  chr14:69259277-69259505
  hypo

SEQ ID NO: 175400 - DNA, 30 bp, Homo sapiens
  chr14:69277572-69277602
  hypo
cagatcgcagcttgtcgagatttgtcctca

SEQ ID NO: 175401 - DNA, 230 bp, Homo sapiens
  chr14:69278050-69278280
  hypo
gggtggagcactggtcgggaaagccaaggacaggcactcgcagccagggcggctgtgtgggtgggaggacgcagggggctgcgctccagtctcccctaattagctcaacctggctacatccttaccattgcatgtgttcatccttatgtgaaacggagcccatattgacctagcacccagtatgtgcaaggcgctggctgaatagggagctgcagcgggagatttcagcg

SEQ ID NO: 175402 - DNA, 18 bp, Homo sapiens
  chr14:69312385-69312403
  hypo
acagtgtcaggccaggcg

SEQ ID NO: 175403 - DNA, 41 bp, Homo sapiens; identical to SEQ ID NO: 87000
  chr14:69337464-69337505
  hypo

SEQ ID NO: 175404 - DNA, 161 bp, Homo sapiens; identical to SEQ ID NO: 27606
  chr14:69345630-69345791
  hypo

SEQ ID NO: 175405 - DNA, 175 bp, Homo sapiens; identical to SEQ ID NO: 87002
  chr14:69347539-69347714
  hypo

SEQ ID NO: 175406 - DNA, 54 bp, Homo sapiens; identical to SEQ ID NO: 87003
  chr14:69352138-69352192
  hypo

SEQ ID NO: 175407 - DNA, 148 bp, Homo sapiens; identical to SEQ ID NO: 87004
  chr14:69352453-69352601
  hypo

SEQ ID NO: 175408 - DNA, 253 bp, Homo sapiens; identical to SEQ ID NO: 87005
  chr14:69354665-69354918
  hypo

SEQ ID NO: 175409 - DNA, 31 bp, Homo sapiens; identical to SEQ ID NO: 87006
  chr14:69369341-69369372
  hypo

SEQ ID NO: 175410 - DNA, 39 bp, Homo sapiens; identical to SEQ ID NO: 87007
  chr14:69385003-69385042
  hypo

SEQ ID NO: 175411 - DNA, 31 bp, Homo sapiens; identical to SEQ ID NO: 87008
  chr14:69396464-69396495
  hypo

SEQ ID NO: 175412 - DNA, 622 bp, Homo sapiens; identical to SEQ ID NO: 51432
  chr14:69444742-69445364
  hypo

SEQ ID NO: 175413 - DNA, 300 bp, Homo sapiens; identical to SEQ ID NO: 51433
  chr14:69445726-69446026
  hypo

SEQ ID NO: 175414 - DNA, 193 bp, Homo sapiens; identical to SEQ ID NO: 87011
  chr14:69470453-69470646
  hypo

SEQ ID NO: 175415 - DNA, 164 bp, Homo sapiens; identical to SEQ ID NO: 27612
  chr14:69550072-69550236
  hypo

SEQ ID NO: 175416 - DNA, 105 bp, Homo sapiens; identical to SEQ ID NO: 124835
  chr14:69618202-69618307
  hypo

SEQ ID NO: 175417 - DNA, 96 bp, Homo sapiens; identical to SEQ ID NO: 9820
  chr14:69658737-69658833
  hypo

SEQ ID NO: 175418 - DNA, 260 bp, Homo sapiens
  chr14:69666619-69666879
  hypo
atagtcgtttattgtcgttatcaggtatgtgctatacataattgcatgtgctatacttttatacgactggctgtgctgtaggttcgttaactccagcataattacacacatttgtgagtaacgcattgtgcagcaacgttaggacggttaggatggctatgatgtcactaggcaataggaatttttctgcaccattgtaatcttataattttgtagaactattgtatgtgtcatctgttgttgaccgaaacattgttata

SEQ ID NO: 175419 - DNA, 21 bp, Homo sapiens
  chr14:69712707-69712728
  hypo
agccatcgcacccggccccta

SEQ ID NO: 175420 - DNA, 67 bp, Homo sapiens
  chr14:69824242-69824309
  hypo
cattcctccagggctcggtattcttccttcgggaaggtgggtctagttggtacgggaattagtgatc

SEQ ID NO: 175421 - DNA, 30 bp, Homo sapiens
  chr14:69855358-69855388
  hypo
ttgagccatcgtgcccggcctgatactctc

SEQ ID NO: 175422 - DNA, 22 bp, Homo sapiens
  chr14:69866543-69866565
  hypo
atggagggctgggcgcggtggc

SEQ ID NO: 175423 - DNA, 30 bp, Homo sapiens
  chr14:69867080-69867110
  hypo
gttaagcgagggtcccgggaagagggatag

SEQ ID NO: 175424 - DNA, 254 bp, Homo sapiens
  chr14:69867590-69867844
  hypo
ctgggtgcggtggggcgcgcctgtagtcctagctactcaagaggataaggtaggaggattgcttgaacccaggagttggcctgggcaacattgagactctttctcttaaaaaaaaaaaaaaagaaaataaaaatcagtgacatatagatgaggaaacggagactggataggttcatgaagtttgttagaatcagaagagaggtattttttcagtctagcttttctgactcagactagttcgtagccactaagca

SEQ ID NO: 175425 - DNA, 29 bp, Homo sapiens
  chr14:69924205-69924234
  hypo
ccacgcccggctgcttaagagatatttct

SEQ ID NO: 175426 - DNA, 31 bp, Homo sapiens
  chr14:69986590-69986621
  hypo
gcgcctggccgcgcacggtggctcacgccta

SEQ ID NO: 175427 - DNA, 354 bp, Homo sapiens; identical to SEQ ID NO: 124848
  chr14:70041210-70041564
  hypo

SEQ ID NO: 175428 - DNA, 31 bp, Homo sapiens; identical to SEQ ID NO: 27616
  chr14:70078067-70078098
  hypo

SEQ ID NO: 175429 - DNA, 24 bp, Homo sapiens
  chr14:70106022-70106046
  hypo
tccgtctcaaaaaaaaaaaaaaaa

SEQ ID NO: 175430 - DNA, 30 bp, Homo sapiens
  chr14:70232658-70232688
  hypo
taaaagcattaaagcgaagttaagcaatct

SEQ ID NO: 175431 - DNA, 517 bp, Homo sapiens
  chr14:70236217-70236734
  hypo
tatttgccagcctgtctgtgtcgttggccttatgacgaggagtgcctgtgggttatcctaatcgttgtcttggtcactcttggttgggcctggttgactttgccagtcagctcctacagtgatcagttggccacctctagatctgtgtttgccggtctagacgttatcggtgcacttccttgaagtgccaggttgcagcgatcccagagcgttgataacgtgatctgatccctaagttgagacctgtcttcctgtaacgcttccgaataagaggtccggtcgaaaagagttgaaagatacgaaattaggtggtcgttggaatcctgatcgcagtaaagtggtccttggtaactgctcgagtagaacatgtctgcatccgccaatagtccgctaatagggagggctgtgcgattaaaggcttccatcgattgggtagtgtccttcaagtgggtggcgaagagccagtcgggcatatgtcatgaaggtttctccgaccgattaatggtttgctgcttga

SEQ ID NO: 175432 - DNA, 30 bp, Homo sapiens; identical to SEQ ID NO: 87020
  chr14:70238026-70238056
  hypo

SEQ ID NO: 175433 - DNA, 491 bp, Homo sapiens; identical to SEQ ID NO: 124854
  chr14:70346056-70346547
  hypo

SEQ ID NO: 175434 - DNA, 88 bp, Homo sapiens
  chr14:70387801-70387889
  hypo
agagcacctgggccgcgaaccttctctcgcacagacttcccgctgcagggctggccagatgcctcctgagcatcgcctcggctgtgac

SEQ ID NO: 175435 - DNA, 1534 bp, Homo sapiens; identical to SEQ ID NO: 9826
  chr14:70654355-70655889
  hypo

SEQ ID NO: 175436 - DNA, 218 bp, Homo sapiens; identical to SEQ ID NO: 9827
  chr14:70655919-70656137
  hypo

SEQ ID NO: 175437 - DNA, 30 bp, Homo sapiens
  chr14:70701248-70701278
  hypo
ccaaagcaggacctcggctggtttgggggg

SEQ ID NO: 175438 - DNA, 527 bp, Homo sapiens; identical to SEQ ID NO: 51450
  chr14:70826031-70826558
  hypo

SEQ ID NO: 175439 - DNA, 61 bp, Homo sapiens; identical to SEQ ID NO: 51452
  chr14:71108797-71108858
  hypo

SEQ ID NO: 175440 - DNA, 17 bp, Homo sapiens
  chr14:71398551-71398568
  hypo
gatctagggccaggcac

SEQ ID NO: 175441 - DNA, 41 bp, Homo sapiens
  chr14:71443358-71443399
  hypo
ggattacaagcgtgagccactgcgcccggcccctttgtttc

SEQ ID NO: 175442 - DNA, 44 bp, Homo sapiens
  chr14:71811495-71811539
  hypo
tgctctccaactgctgagctcaagtgatccgccagcttcagtct

SEQ ID NO: 175443 - DNA, 30 bp, Homo sapiens; identical to SEQ ID NO: 87027
  chr14:71865070-71865100
  hypo

SEQ ID NO: 175444 - DNA, 68 bp, Homo sapiens
  chr14:72204249-72204317
  hypo
gccgtctgtctagctcgctggctggcctgccgtaccccagctcacacttctttcggtactccactagc

SEQ ID NO: 175445 - DNA, 29 bp, Homo sapiens
  chr14:72394662-72394691
  hypo
ccgcgcccggccaagaatccttttttttt

SEQ ID NO: 175446 - DNA, 43 bp, Homo sapiens; identical to SEQ ID NO: 87029
  chr14:72431250-72431293
  hypo

SEQ ID NO: 175447 - DNA, 30 bp, Homo sapiens; identical to SEQ ID NO: 87030
  chr14:72703611-72703641
  hypo

SEQ ID NO: 175448 - DNA, 31 bp, Homo sapiens; identical to SEQ ID NO: 87031
  chr14:72732621-72732652
  hypo

SEQ ID NO: 175449 - DNA, 37 bp, Homo sapiens; identical to SEQ ID NO: 27622
  chr14:72939847-72939884
  hypo

SEQ ID NO: 175450 - DNA, 36 bp, Homo sapiens; identical to SEQ ID NO: 27623
  chr14:72940123-72940159
  hypo

SEQ ID NO: 175451 - DNA, 30 bp, Homo sapiens
  chr14:73029295-73029325
  hypo
gagggcaatgaagggcgatggtggggagac

SEQ ID NO: 175452 - DNA, 199 bp, Homo sapiens
  chr14:73029649-73029848
  hypo
ctacatccccaccgccgcctgtcatccctcacgtctctgtggccacccgggtgtcactgccagcaccaggcactgctttcacgtaaaatgtccaaatcacatcttcagcaagaaagcaacctcacggattgccccgcctcaaggtctttccaccctctttgagatcagcgttcggagaggtccccgccagcccggtggc

SEQ ID NO: 175453 - DNA, 30 bp, Homo sapiens
  chr14:73032292-73032322
  hypo
taagtggtcaggtaccgggccagcatcctg

SEQ ID NO: 175454 - DNA, 31 bp, Homo sapiens; identical to SEQ ID NO: 87034
  chr14:73033095-73033126
  hypo

SEQ ID NO: 175455 - DNA, 30 bp, Homo sapiens
  chr14:73065740-73065770
  hypo
gggcattgggagacccggcgcagccacggg

SEQ ID NO: 175456 - DNA, 31 bp, Homo sapiens
  chr14:73140381-73140412
  hypo
tgcctcattgatctatcggggtctcttctgt

SEQ ID NO: 175457 - DNA, 30 bp, Homo sapiens
  chr14:73146362-73146392
  hypo
tgtttccatggcaaccggaatcctgggctc

SEQ ID NO: 175458 - DNA, 168 bp, Homo sapiens
  chr14:73146624-73146792
  hypo
aagggtggaccccgacgtgccttccctgcagaatcaggagcaagcctcagctggaggccactgccacagcctgctacctcggcctagcctttaatgagggctgcgggaggagggagaggcgggctggggagacaaggcgcctgcgaggagctccggcaggcccagcgt

SEQ ID NO: 175459 - DNA, 194 bp, Homo sapiens
  chr14:73147136-73147330
  hypo
gcctggaagcctggcggggaagcagacagtagggcccgctccccacaggaccctccaatcgtcagagccctcgacggcagagaactcgctctccccacaggccatcttgccaccagctctgaggacaccgtgaatatatgggaaagtaaaggggactacgctggagcggatgcggaaggcgctgaggccagggc

SEQ ID NO: 175460 - DNA, 30 bp, Homo sapiens
  chr14:73150343-73150373
  hypo
gaacccaagcaaccgcgcacctgaggggag

SEQ ID NO: 175461 - DNA, 30 bp, Homo sapiens
  chr14:73155915-73155945
  hypo
gggcgatagagcaagcgacagcaggaggac

SEQ ID NO: 175462 - DNA, 30 bp, Homo sapiens
  chr14:73156423-73156453
  hypo
acacattcggggcggcgagcaagtcagcgg

SEQ ID NO: 175463 - DNA, 180 bp, Homo sapiens
  chr14:73167781-73167961
  hypo
gaaatatctgtcgtgcggaatcagcctgagccccaggagcgctgaagcagcagagagggtcatgccccatcttcccactccagtctccttccccgggggcaagcgcttttgcaccatgcacctctgaagccaccacccctgggaccagtcagccctgcctgtgcacgacctaaggtcctt

SEQ ID NO: 175464 - DNA, 30 bp, Homo sapiens
  chr14:73168236-73168266
  hypo
cactcctagtctgggcgggggtcgggggga

SEQ ID NO: 175465 - DNA, 30 bp, Homo sapiens
  chr14:73168931-73168961
  hypo
atgctcccttgctctcggcaagaaggaggc

SEQ ID NO: 175466 - DNA, 168 bp, Homo sapiens
  chr14:73175069-73175237
  hypo
ccatgccacaagccccgctccacaaatcaagtttctgggggcaccgagcctttcctcccctccccgatcctacccccatccaaggacctgcaagacaactgagtgatgagcccagcttcccttccgcgacaaaggcagtgagcctgaaggccgcgttattggcttttc

SEQ ID NO: 175467 - DNA, 30 bp, Homo sapiens
  chr14:73176273-73176303
  hypo
tgaaaatgctttttccgcagccttcaagag

SEQ ID NO: 175468 - DNA, 81 bp, Homo sapiens
  chr14:73178784-73178865
  hypo
tggcccctgctccaccgagagagggagaggaggcagcacgcatgcggacagagccaagaaagcagccgctgagacttccag

SEQ ID NO: 175469 - DNA, 30 bp, Homo sapiens; identical to SEQ ID NO: 27624
  chr14:73180229-73180259
  hypo

SEQ ID NO: 175470 - DNA, 30 bp, Homo sapiens; identical to SEQ ID NO: 87037
  chr14:73195193-73195223
  hypo

SEQ ID NO: 175471 - DNA, 21 bp, Homo sapiens
  chr14:73195668-73195689
  hypo
aggaaggccaggcaccgtggc

SEQ ID NO: 175472 - DNA, 30 bp, Homo sapiens
  chr14:73196462-73196492
  hypo
tgccaggcattaggacggagggagggatga

SEQ ID NO: 175473 - DNA, 30 bp, Homo sapiens
  chr14:73198115-73198145
  hypo
ccggactcacgtggccgtagctggagcaga

SEQ ID NO: 175474 - DNA, 30 bp, Homo sapiens
  chr14:73198560-73198590
  hypo
tcaaccccctcgccacggagcaaggcttcc

SEQ ID NO: 175475 - DNA, 30 bp, Homo sapiens
  chr14:73198923-73198953
  hypo
ctccagccatgacatcggacaaggcaggcg

SEQ ID NO: 175476 - DNA, 39 bp, Homo sapiens
  chr14:73213600-73213639
  hypo
tcccctcacatgttacggcaggcccgacaacggggcatg

SEQ ID NO: 175477 - DNA, 22 bp, Homo sapiens
  chr14:73226888-73226910
  hypo
acaatgatggccgggcgcggtg

SEQ ID NO: 175478 - DNA, 162 bp, Homo sapiens; identical to SEQ ID NO: 87038
  chr14:73238397-73238559
  hypo

SEQ ID NO: 175479 - DNA, 30 bp, Homo sapiens
  chr14:73258267-73258297
  hypo
gagcttccccctgtgcggggtgttaaggga

SEQ ID NO: 175480 - DNA, 471 bp, Homo sapiens
  chr14:73302674-73303145
  hypo
tcaagatacacccgccggagaccacattcccagacatcccgagggccagccgtcaccacacgggtgcctcggggagatgctggagacacaagtggctttgaaattagcacaacttacatggcctccaggtctgctgtggaaatccaggtccaaagaagaagccagtgaggaacaggaggctgatcattgtgttctcagaaggggttggagcctctggggagggggcactgaggacagagcacggtgttctgcagatcatatcacatctctacttccctctccagtgatatgcttccctcactctcccattttgctccctctctcctgccaaactcccagggcaaccctggataataaagtgaccgaatgtgaatgcttccaggtggcacaccagcactccagagaaactgtcagagcagggggcaaacccctggcctactccagccactggataagcgcaccctcctccat

SEQ ID NO: 175481 - DNA, 30 bp, Homo sapiens
  chr14:73304913-73304943
  hypo
gcaccaggccgggcacggtggctcacgcct

SEQ ID NO: 175482 - DNA, 30 bp, Homo sapiens
  chr14:73309191-73309221
  hypo
cgtgctagaagattccgttcgatggggtta

SEQ ID NO: 175483 - DNA, 472 bp, Homo sapiens
  chr14:73318503-73318975
  hypo
tcctaccacgggcaacgggtaggcaaccgatatgcccagaaaggcggccaatgggaggacagctcgcccagcctcccgattggccaggcccgccaccagctggaaccatggcgagctttgaggacagcagagccacttgatgggattctctctctcttcaaagcatagagcaaacatcaattaatcctcaaaagacgctttcaagaagaacattatcccttttggagacgcagaagctaagaggtgccgcaggtaggtgaagggaaggcaggaagttgaagaggagaggagaaagtggagcaccgggctttcagccccagttctggttctcctgagagagtcaagttgcaggagaagaatgaacctgcagaagccgggcagggagaggtggtggagaagccgctgctcttgggtgcgcccctcaaggcttcccactgccccatcccctaggagaccacggagtgaaaaaagt

SEQ ID NO: 175484 - DNA, 30 bp, Homo sapiens
  chr14:73327172-73327202
  hypo
atgagccaccacacccggccctttattaac

SEQ ID NO: 175485 - DNA, 802 bp, Homo sapiens; identical to SEQ ID NO: 124875
  chr14:73358888-73359690
  hypo

SEQ ID NO: 175486 - DNA, 501 bp, Homo sapiens; identical to SEQ ID NO: 124876
  chr14:73359749-73360250
  hypo

SEQ ID NO: 175487 - DNA, 89 bp, Homo sapiens; identical to SEQ ID NO: 87042
  chr14:73390959-73391048
  hypo

SEQ ID NO: 175488 - DNA, 443 bp, Homo sapiens
  chr14:73391898-73392341
  hypo
ggcgtgagccactgcacccggcctgactactctttccctggcaattgctgcgtcaccaagccccaacccaccctgctgagttttccttccaagactcccctcccatccagccggcttgaaccggcctccagtcacgttgtttgttcagctagaatttttctctgccttctcttcaaggccgctcaagcttcatgaagcggttctttattctgactatgcccacttctctcatttccctcatcacccggccccgctccacatactgcatttatctataaactcctgagagccaggagtttagcctgaaatcctagcttcctggttaagagctgaaatgccttcgcacggcgtgcaatgggtgaaccccaccgcctgctttctaacgggtccaagccgcgggcaggggcctgtgttacggagccgcatgacacaccaggcctact

SEQ ID NO: 175489 - DNA, 475 bp, Homo sapiens; identical to SEQ ID NO: 124880
  chr14:73393143-73393618
  hypo

SEQ ID NO: 175490 - DNA, 30 bp, Homo sapiens; identical to SEQ ID NO: 87045
  chr14:73413375-73413405
  hypo

SEQ ID NO: 175491 - DNA, 74 bp, Homo sapiens; identical to SEQ ID NO: 87046
  chr14:73428613-73428687
  hypo

SEQ ID NO: 175492 - DNA, 30 bp, Homo sapiens; identical to SEQ ID NO: 87047
  chr14:73459382-73459412
  hypo

SEQ ID NO: 175493 - DNA, 336 bp, Homo sapiens; identical to SEQ ID NO: 87048
  chr14:73459711-73460047
  hypo

SEQ ID NO: 175494 - DNA, 252 bp, Homo sapiens
  chr14:73464662-73464914
  hypo
ccccaaggaatttgaagaggtcgttatgcagccggtctgcatgagttcgatagatgacgaggtctgagatggccaggaccttaagcagcagccgtgttctctggcttagattcacggtggcccccaggagcccttccgtatcgatcactgctactttgtgaactgggtcataggctgcccacactcccacagtgcaggactcctgggtcggggaggttttaaagacttcacgaccataaaagaaagtgtggt

SEQ ID NO: 175495 - DNA, 181 bp, Homo sapiens
  chr14:73482389-73482570
  hypo
cctgctattttccattcctgaactccactagaataacatctcttttagtcaagtcccagtattctgagcaacactattctgggactgtaaacaagtgaggccgccaagccacacgatgggtcttcttaaagaagcagtcttgttgggcacggtggctcacgcctgtacccaagaggtggag

SEQ ID NO: 175496 - DNA, 90 bp, Homo sapiens; identical to SEQ ID NO: 87050
  chr14:73482874-73482964
  hypo

SEQ ID NO: 175497 - DNA, 31 bp, Homo sapiens; identical to SEQ ID NO: 9833
  chr14:73485669-73485700
  hypo

SEQ ID NO: 175498 - DNA, 30 bp, Homo sapiens; identical to SEQ ID NO: 27632
  chr14:73570122-73570152
  hypo

SEQ ID NO: 175499 - DNA, 30 bp, Homo sapiens
  chr14:73591862-73591892
  hypo
aaacatttgcggcagcgcgcctcagggcac

SEQ ID NO: 175500 - DNA, 16 bp, Homo sapiens
  chr14:73602380-73602396
  hypo
ggggtggatttttaaa

SEQ ID NO: 175501 - DNA, 32 bp, Homo sapiens
  chr14:73687398-73687430
  hypo
tttgtggtctctgcccgcgttacctttcctct

SEQ ID NO: 175502 - DNA, 30 bp, Homo sapiens
  chr14:73705657-73705687
  hypo
cattctgcgatacagcgacatgtatgtaca

SEQ ID NO: 175503 - DNA, 365 bp, Homo sapiens; identical to SEQ ID NO: 87054
  chr14:73708406-73708771
  hypo

SEQ ID NO: 175504 - DNA, 30 bp, Homo sapiens; identical to SEQ ID NO: 87055
  chr14:73753942-73753972
  hypo

SEQ ID NO: 175505 - DNA, 36 bp, Homo sapiens; identical to SEQ ID NO: 27634
  chr14:73855376-73855412
  hypo

SEQ ID NO: 175506 - DNA, 38 bp, Homo sapiens; identical to SEQ ID NO: 87057
  chr14:73926313-73926351
  hypo

SEQ ID NO: 175507 - DNA, 139 bp, Homo sapiens
  chr14:73967284-73967423
  hypo
gccaaacaggctgcccgccgaactgctgtgaagtcatcagagaagcagtgcaggaagcttgggagaagcttggcggtcataagcttgagctcacctatcaggtagagagcttccacacgctcctgggaatttccttgac

SEQ ID NO: 175508 - DNA, 31 bp, Homo sapiens; identical to SEQ ID NO: 87059
  chr14:73971262-73971293
  hypo

SEQ ID NO: 175509 - DNA, 27 bp, Homo sapiens
  chr14:74020157-74020184
  hypo
tgagccgggatcgcgccactgcactcc

SEQ ID NO: 175510 - DNA, 418 bp, Homo sapiens; identical to SEQ ID NO: 124893
  chr14:74100394-74100812
  hypo

SEQ ID NO: 175511 - DNA, 25 bp, Homo sapiens
  chr14:74110603-74110628
  hypo
gtttgtttgtttgttttgagacgga

SEQ ID NO: 175512 - DNA, 24 bp, Homo sapiens
  chr14:74110867-74110891
  hypo
gattacaggcgtgagccaccagtc

SEQ ID NO: 175513 - DNA, 155 bp, Homo sapiens; identical to SEQ ID NO: 51469
  chr14:74111424-74111579
  hypo

SEQ ID NO: 175514 - DNA, 94 bp, Homo sapiens; identical to SEQ ID NO: 27637
  chr14:74113148-74113242
  hypo

SEQ ID NO: 175515 - DNA, 33 bp, Homo sapiens; identical to SEQ ID NO: 87064
  chr14:74142424-74142457
  hypo

SEQ ID NO: 175516 - DNA, 522 bp, Homo sapiens; identical to SEQ ID NO: 51470
  chr14:74180376-74180898
  hypo

SEQ ID NO: 175517 - DNA, 1186 bp, Homo sapiens
  chr14:74184828-74186014
  hypo
gctttggacaagaacgctagcccctcccccaacgctgagaaaactttctagccctagcaaggccgccagcaagcagcaaagggagagtacctgccgcggcctccctcccaaggaggaggtggccactcaggacacggtcacgggagcagctcagacaggcctagagactgcagggacagcacaggtgtcaggctgcgccccttctcagagaagcccgcagactccctccaagagtttctttttctggggcttggggcagggccgttgcagccttcgaggtcctctggggaggagaaatgctgctccaaagtgggtgagcttgtgcttggccggccacggtggcttcctggaggccgaggggaggagggggaagcaaataaagggaaaagactgcggggcagcagagcagcagaaatcggagtgtgagaggcggtggagtccctcccgaggggaccgggactctcccggtccaggaaagcacgaggacagcttccgacagaccaaatgcaaagagagctggatcctggagcccttaacgctgctcccagggccttcataaataaaagagccgtttatgtcattgtctcatttgtttcgcagggaaaagtccctgcaatcctctcctcactccctcttgagatgccagggtgtctgcgggcgctggcggcggtgcgggaagggccgaggcccaggactgggccagcctggctcccgcgctcagcccttgtcgcccgcaccgctctcctcccgcagggcctgctggtgggcggcggcggcggcagcagcggcctctttctccttcagcctcagcgctgcagccttcttctcctgctctgcgtggctcttcatatgcgcactgcggctcttcaccttgtaaaacaccctgcagccgggtgggggttgctcagaaccggcctagcccacccgggggcccccagcgcgggtgcgcgaggagccccagccttcaccttcacccccacgctgcacagccgcggccggccagctcgcgtcattttccgaaagctgccccatgacgtcacagccctagaaacccgctgagccaaccagaaacgaggcggacaccgcctgtacctcttccccctcccctccaccccacccccgccccctccgcgcaccagcccgcgggggtcccagcggggacagcgctgcccaccttacctgccac

SEQ ID NO: 175518 - DNA, 245 bp, Homo sapiens; identical to SEQ ID NO: 87068
  chr14:74196425-74196670
  hypo

SEQ ID NO: 175519 - DNA, 263 bp, Homo sapiens
  chr14:74206016-74206279
  hypo
tgccggaagacctgccggttcacctggtggccgaatgccagctggaagggttgcaggggcagtgactggtttgggggtttcttggctgcgtggaaagaattcaggggtgcctggggccgccctacctccagctgcaccttctgtggcatcattggtcgcacatagcggtccagctgtgggccccccgctttctcccgcttcagtgcctcagggtggttatagtaagtcgggactcccactccaggatgcgggctccccttggt

SEQ ID NO: 175520 - DNA, 40 bp, Homo sapiens; identical to SEQ ID NO: 27642
  chr14:74244736-74244776
  hypo

SEQ ID NO: 175521 - DNA, 136 bp, Homo sapiens; identical to SEQ ID NO: 9841
  chr14:74253328-74253464
  hypo

SEQ ID NO: 175522 - DNA, 19 bp, Homo sapiens
  chr14:74273171-74273190
  hypo
atatcgaacaactgctttt

SEQ ID NO: 175523 - DNA, 100 bp, Homo sapiens; identical to SEQ ID NO: 87071
  chr14:74273408-74273508
  hypo

SEQ ID NO: 175524 - DNA, 22 bp, Homo sapiens
  chr14:74311711-74311733
  hypo
tttaattcggttgattgtcttc

SEQ ID NO: 175525 - DNA, 30 bp, Homo sapiens
  chr14:74316882-74316912
  hypo
taactagcttaacttcggtttcctcattcg

SEQ ID NO: 175526 - DNA, 30 bp, Homo sapiens; identical to SEQ ID NO: 27645
  chr14:74367436-74367466
  hypo

SEQ ID NO: 175527 - DNA, 30 bp, Homo sapiens; identical to SEQ ID NO: 27646
  chr14:74367983-74368013
  hypo

SEQ ID NO: 175528 - DNA, 36 bp, Homo sapiens; identical to SEQ ID NO: 27647
  chr14:74369045-74369081
  hypo

SEQ ID NO: 175529 - DNA, 92 bp, Homo sapiens
  chr14:74418712-74418804
  hypo
gtgccctttacagagcatgctctacagagcatgtccctgtgccccatcctccacagcaaaagctgccaagatggaccgctcactgtctgtat

SEQ ID NO: 175530 - DNA, 17 bp, Homo sapiens
  chr14:74499970-74499987
  hypo
atgcaaaaataaaaggg

SEQ ID NO: 175531 - DNA, 25 bp, Homo sapiens
  chr14:74529004-74529029
  hypo
ttacaaaagctgtgactaggccggg

SEQ ID NO: 175532 - DNA, 23 bp, Homo sapiens
  chr14:74601753-74601776
  hypo
gggatttgttgttgttgttgtcg

SEQ ID NO: 175533 - DNA, 89 bp, Homo sapiens; identical to SEQ ID NO: 27650
  chr14:74626547-74626636
  hypo

SEQ ID NO: 175534 - DNA, 162 bp, Homo sapiens; identical to SEQ ID NO: 27651
  chr14:74628385-74628547
  hypo

SEQ ID NO: 175535 - DNA, 23 bp, Homo sapiens
  chr14:74646928-74646951
  hypo
gtgagcaaacttaagcgctcaaa

SEQ ID NO: 175536 - DNA, 23 bp, Homo sapiens
  chr14:74647250-74647273
  hypo
gcgcccagcctagggaggaggaa

SEQ ID NO: 175537 - DNA, 30 bp, Homo sapiens; identical to SEQ ID NO: 87084
  chr14:74683509-74683539
  hypo

SEQ ID NO: 175538 - DNA, 604 bp, Homo sapiens; identical to SEQ ID NO: 51485
  chr14:74706940-74707544
  hypo

SEQ ID NO: 175539 - DNA, 175 bp, Homo sapiens; identical to SEQ ID NO: 9845
  chr14:74707572-74707747
  hypo

SEQ ID NO: 175540 - DNA, 1374 bp, Homo sapiens; identical to SEQ ID NO: 124918
  chr14:74707791-74709165
  hypo

SEQ ID NO: 175541 - DNA, 30 bp, Homo sapiens; identical to SEQ ID NO: 87088
  chr14:74727449-74727479
  hypo

SEQ ID NO: 175542 - DNA, 30 bp, Homo sapiens; identical to SEQ ID NO: 27656
  chr14:74728371-74728401
  hypo

SEQ ID NO: 175543 - DNA, 30 bp, Homo sapiens
  chr14:74768698-74768728
  hypo
acgatggagggataccgggaaacaggaagc

SEQ ID NO: 175544 - DNA, 30 bp, Homo sapiens; identical to SEQ ID NO: 27657
  chr14:74771139-74771169
  hypo

SEQ ID NO: 175545 - DNA, 30 bp, Homo sapiens; identical to SEQ ID NO: 87091
  chr14:74824408-74824438
  hypo

SEQ ID NO: 175546 - DNA, 30 bp, Homo sapiens; identical to SEQ ID NO: 87092
  chr14:74824735-74824765
  hypo

SEQ ID NO: 175547 - DNA, 86 bp, Homo sapiens; identical to SEQ ID NO: 87093
  chr14:74954262-74954348
  hypo

SEQ ID NO: 175548 - DNA, 95 bp, Homo sapiens; identical to SEQ ID NO: 27658
  chr14:74957658-74957753
  hypo

SEQ ID NO: 175549 - DNA, 35 bp, Homo sapiens; identical to SEQ ID NO: 87095
  chr14:74958052-74958087
  hypo

SEQ ID NO: 175550 - DNA, 30 bp, Homo sapiens
  chr14:75034049-75034079
  hypo
cccctcgagatcctgcgcggcctttgttcc

SEQ ID NO: 175551 - DNA, 30 bp, Homo sapiens
  chr14:75034637-75034667
  hypo
atttcatgaattcgtcgttcaaccaccgcc

SEQ ID NO: 175552 - DNA, 30 bp, Homo sapiens
  chr14:75035063-75035093
  hypo
gccagcatgttccagcgcggccgtggggct

SEQ ID NO: 175553 - DNA, 13 bp, Homo sapiens
  chr14:75039894-75039907
  hypo
cacaatgactata

SEQ ID NO: 175554 - DNA, 30 bp, Homo sapiens
  chr14:75040547-75040577
  hypo
ctgaccacagctctgcgcagccagtattgg

SEQ ID NO: 175555 - DNA, 30 bp, Homo sapiens; identical to SEQ ID NO: 87096
  chr14:75061253-75061283
  hypo

SEQ ID NO: 175556 - DNA, 82 bp, Homo sapiens; identical to SEQ ID NO: 87097
  chr14:75062986-75063068
  hypo

SEQ ID NO: 175557 - DNA, 28 bp, Homo sapiens
  chr14:75173766-75173794
  hypo
ttatcaaaattatacacgatctggtcgg

SEQ ID NO: 175558 - DNA, 31 bp, Homo sapiens; identical to SEQ ID NO: 87099
  chr14:75189113-75189144
  hypo

SEQ ID NO: 175559 - DNA, 30 bp, Homo sapiens; identical to SEQ ID NO: 87100
  chr14:75265989-75266019
  hypo

SEQ ID NO: 175560 - DNA, 31 bp, Homo sapiens
  chr14:75332118-75332149
  hypo
tggaaactggagagagcggttggggagaagg

SEQ ID NO: 175561 - DNA, 29 bp, Homo sapiens
  chr14:75337378-75337407
  hypo
aggcaggggatatatgcgaaatctctgta

SEQ ID NO: 175562 - DNA, 30 bp, Homo sapiens; identical to SEQ ID NO: 87102
  chr14:75358451-75358481
  hypo

SEQ ID NO: 175563 - DNA, 27 bp, Homo sapiens
  chr14:75358763-75358790
  hypo
tcttaagcctaagtcaaccctcgatga

SEQ ID NO: 175564 - DNA, 30 bp, Homo sapiens; identical to SEQ ID NO: 87104
  chr14:75386636-75386666
  hypo

SEQ ID NO: 175565 - DNA, 30 bp, Homo sapiens; identical to SEQ ID NO: 27660
  chr14:75388090-75388120
  hypo

SEQ ID NO: 175566 - DNA, 30 bp, Homo sapiens; identical to SEQ ID NO: 87106
  chr14:75389051-75389081
  hypo

SEQ ID NO: 175567 - DNA, 21 bp, Homo sapiens
  chr14:75411912-75411933
  hypo
tgcgcccggccacttttgaaa

SEQ ID NO: 175568 - DNA, 40 bp, Homo sapiens; identical to SEQ ID NO: 87107
  chr14:75416061-75416101
  hypo

SEQ ID NO: 175569 - DNA, 72 bp, Homo sapiens; identical to SEQ ID NO: 87108
  chr14:75423074-75423146
  hypo

SEQ ID NO: 175570 - DNA, 31 bp, Homo sapiens; identical to SEQ ID NO: 87109
  chr14:75446327-75446358
  hypo

SEQ ID NO: 175571 - DNA, 286 bp, Homo sapiens; identical to SEQ ID NO: 87110
  chr14:75567771-75568057
  hypo

SEQ ID NO: 175572 - DNA, 30 bp, Homo sapiens; identical to SEQ ID NO: 87111
  chr14:75568426-75568456
  hypo

SEQ ID NO: 175573 - DNA, 19 bp, Homo sapiens
  chr14:75595121-75595140
  hypo
agagaaagccatgtgccta

SEQ ID NO: 175574 - DNA, 19 bp, Homo sapiens
  chr14:75595379-75595398
  hypo
gcctgggcaacagagtgag

SEQ ID NO: 175575 - DNA, 42 bp, Homo sapiens
  chr14:75616513-75616555
  hypo
gaacttcttttgggatgggcacggtggctcatgcctgtaatc

SEQ ID NO: 175576 - DNA, 31 bp, Homo sapiens; identical to SEQ ID NO: 27662
  chr14:75636943-75636974
  hypo

SEQ ID NO: 175577 - DNA, 40 bp, Homo sapiens; identical to SEQ ID NO: 87113
  chr14:75641439-75641479
  hypo

SEQ ID NO: 175578 - DNA, 18 bp, Homo sapiens
  chr14:75697860-75697878
  hypo
ccgcgcccggcctattca

SEQ ID NO: 175579 - DNA, 31 bp, Homo sapiens; identical to SEQ ID NO: 27663
  chr14:75725465-75725496
  hypo

SEQ ID NO: 175580 - DNA, 31 bp, Homo sapiens; identical to SEQ ID NO: 87115
  chr14:75732469-75732500
  hypo

SEQ ID NO: 175581 - DNA, 31 bp, Homo sapiens; identical to SEQ ID NO: 87116
  chr14:75739620-75739651
  hypo

SEQ ID NO: 175582 - DNA, 395 bp, Homo sapiens; identical to SEQ ID NO: 51503
  chr14:75743667-75744062
  hypo

SEQ ID NO: 175583 - DNA, 72 bp, Homo sapiens
  chr14:75747280-75747352
  hypo
gagaaaaggagaatccgaagggaaaggaataagatggctgcagccaaatgccgcaaccggaggagggagctg

SEQ ID NO: 175584 - DNA, 327 bp, Homo sapiens
  chr14:75747939-75748266
  hypo
agctggagcccctgtgcactccggtggtcacctgtactcccagctgcactgcttacacgtcttccttcgtcttcacctaccccgaggctgactccttccccagctgtgcagctgcccaccgcaagggcagcagcagcaatgagccttcctctgactcgctcagctcacccacgctgctggccctgtgagggggcagggaaggggaggcagccggcacccacaagtgccactgcccgagctggtgcattacagagaggagaaacacatcttccctagagggttcctgtagacctagggaggaccttatctgtgcgtgaaacacaccag

SEQ ID NO: 175585 - DNA, 197 bp, Homo sapiens; identical to SEQ ID NO: 87120
  chr14:75749313-75749510
  hypo

SEQ ID NO: 175586 - DNA, 30 bp, Homo sapiens; identical to SEQ ID NO: 87121
  chr14:75759879-75759909
  hypo

SEQ ID NO: 175587 - DNA, 155 bp, Homo sapiens; identical to SEQ ID NO: 87122
  chr14:75760173-75760328
  hypo

SEQ ID NO: 175588 - DNA, 30 bp, Homo sapiens
  chr14:75876664-75876694
  hypo
actgtgtcagacttcgtactaacagccgta

SEQ ID NO: 175589 - DNA, 30 bp, Homo sapiens
  chr14:75898931-75898961
  hypo
agccgcgtgacctacgtcattcagattcca

SEQ ID NO: 175590 - DNA, 30 bp, Homo sapiens
  chr14:75948374-75948404
  hypo
cagcacaaggaattacgagggtggtgaaac

SEQ ID NO: 175591 - DNA, 30 bp, Homo sapiens
  chr14:75994217-75994247
  hypo
gatgcagcaagcctgcggactgctgccaat

SEQ ID NO: 175592 - DNA, 405 bp, Homo sapiens; identical to SEQ ID NO: 87123
  chr14:76012912-76013317
  hypo

SEQ ID NO: 175593 - DNA, 94 bp, Homo sapiens; identical to SEQ ID NO: 27670
  chr14:76128608-76128702
  hypo

SEQ ID NO: 175594 - DNA, 30 bp, Homo sapiens; identical to SEQ ID NO: 87125
  chr14:76289098-76289128
  hypo

SEQ ID NO: 175595 - DNA, 30 bp, Homo sapiens
  chr14:76375937-76375967
  hypo
ccaactttgacataccgtatccaacatgta

SEQ ID NO: 175596 - DNA, 17 bp, Homo sapiens
  chr14:76377380-76377397
  hypo
ttttgagtcagagtctc

SEQ ID NO: 175597 - DNA, 30 bp, Homo sapiens; identical to SEQ ID NO: 87126
  chr14:76425453-76425483
  hypo

SEQ ID NO: 175598 - DNA, 176 bp, Homo sapiens; identical to SEQ ID NO: 87127
  chr14:76431241-76431417
  hypo

SEQ ID NO: 175599 - DNA, 137 bp, Homo sapiens; identical to SEQ ID NO: 87128
  chr14:76446057-76446194
  hypo

SEQ ID NO: 175600 - DNA, 86 bp, Homo sapiens; identical to SEQ ID NO: 87129
  chr14:76446467-76446553
  hypo

SEQ ID NO: 175601 - DNA, 321 bp, Homo sapiens; identical to SEQ ID NO: 87130
  chr14:76446750-76447071
  hypo

SEQ ID NO: 175602 - DNA, 161 bp, Homo sapiens; identical to SEQ ID NO: 87131
  chr14:76447284-76447445
  hypo

SEQ ID NO: 175603 - DNA, 30 bp, Homo sapiens; identical to SEQ ID NO: 87132
  chr14:76455257-76455287
  hypo

SEQ ID NO: 175604 - DNA, 103 bp, Homo sapiens; identical to SEQ ID NO: 87133
  chr14:76461806-76461909
  hypo

SEQ ID NO: 175605 - DNA, 30 bp, Homo sapiens; identical to SEQ ID NO: 87134
  chr14:76478947-76478977
  hypo

SEQ ID NO: 175606 - DNA, 115 bp, Homo sapiens
  chr14:76600678-76600793
  hypo
tcccgtccatgctgccgctggcataataaatgaagacaaagtgccggcggcatagaccatctctcccactgcaccactggccgctgccagcttcattattcgcttaagttgccgg

SEQ ID NO: 175607 - DNA, 990 bp, Homo sapiens; identical to SEQ ID NO: 124960
  chr14:76604547-76605537
  hypo

SEQ ID NO: 175608 - DNA, 30 bp, Homo sapiens; identical to SEQ ID NO: 87136
  chr14:76621091-76621121
  hypo

SEQ ID NO: 175609 - DNA, 90 bp, Homo sapiens
  chr14:76628407-76628497
  hypo
gctctaaacaatgaatactttatcgcttggaatctgagagtgacttagctggatggttctggttcagtcttctcacgaggttatagtcta

SEQ ID NO: 175610 - DNA, 33 bp, Homo sapiens
  chr14:76738012-76738045
  hypo
acacaatatttacgtcggcgctacgaacaatta

SEQ ID NO: 175611 - DNA, 30 bp, Homo sapiens
  chr14:76806156-76806186
  hypo
cgtgccccgtcacatcgcacaaaaggacat

SEQ ID NO: 175612 - DNA, 30 bp, Homo sapiens
  chr14:76858452-76858482
  hypo
gctctcagcaggccccggggcagggagggg

SEQ ID NO: 175613 - DNA, 30 bp, Homo sapiens
  chr14:76863713-76863743
  hypo
acctcctggagtgaccgctctgactttcct

SEQ ID NO: 175614 - DNA, 578 bp, Homo sapiens; identical to SEQ ID NO: 87137
  chr14:76905594-76906172
  hypo

SEQ ID NO: 175615 - DNA, 86 bp, Homo sapiens
  chr14:76998179-76998265
  hypo
caccttcatggagaccgacgatgtgatcgggtttccgcttctgctgatctcacctcgcccagcagcaggcccgggcctgccccctt

SEQ ID NO: 175616 - DNA, 31 bp, Homo sapiens; identical to SEQ ID NO: 87139
  chr14:77119608-77119639
  hypo

SEQ ID NO: 175617 - DNA, 242 bp, Homo sapiens; identical to SEQ ID NO: 87140
  chr14:77242296-77242538
  hypo

SEQ ID NO: 175618 - DNA, 30 bp, Homo sapiens
  chr14:77255414-77255444
  hypo
ggagaaagtctaaccgtgggaaaaagggaa

SEQ ID NO: 175619 - DNA, 30 bp, Homo sapiens
  chr14:77331926-77331956
  hypo
agtgttaacagattgcgtttgtagataatg

SEQ ID NO: 175620 - DNA, 30 bp, Homo sapiens
  chr14:77332211-77332241
  hypo
cctggaagcatgggccgctcttttgtggga

SEQ ID NO: 175621 - DNA, 92 bp, Homo sapiens
  chr14:77370515-77370607
  hypo
gtgtgaatgtgtgagcggataaggatgggcatgctggagagcgagtgagagcgcgtgggagggtacgtgaggacatgcgtgtgtgtgtactt

SEQ ID NO: 175622 - DNA, 34 bp, Homo sapiens; identical to SEQ ID NO: 87141
  chr14:77426435-77426469
  hypo

SEQ ID NO: 175623 - DNA, 104 bp, Homo sapiens; identical to SEQ ID NO: 87142
  chr14:77433609-77433713
  hypo

SEQ ID NO: 175624 - DNA, 61 bp, Homo sapiens
  chr14:77434975-77435036
  hypo
cagtgactagcactgcgtccggcagcgccagtcccacactcgcccgcgccatggcctccat

SEQ ID NO: 175625 - DNA, 39 bp, Homo sapiens
  chr14:77437669-77437708
  hypo
attacaggcgtgagccactgcgttcggtctggacttcag

SEQ ID NO: 175626 - DNA, 366 bp, Homo sapiens; identical to SEQ ID NO: 51519
  chr14:77493393-77493759
  hypo

SEQ ID NO: 175627 - DNA, 22 bp, Homo sapiens
  chr14:77495948-77495970
  hypo
tgttgccccagaaggcggaaca

SEQ ID NO: 175628 - DNA, 31 bp, Homo sapiens; identical to SEQ ID NO: 27678
  chr14:77575062-77575093
  hypo

SEQ ID NO: 175629 - DNA, 181 bp, Homo sapiens
  chr14:77580195-77580376
  hypo
ggtatccagcagtcacgtggctaaagctcccagtctgaccttcgcttcccccgccagtcctgtctgcgcatcagacagcactctccatgggttagagagcaactctcccctttcaccactgtccgctaattatagctcacctttatgggctgcagagcacctctgccgcagcccagatatc

SEQ ID NO: 175630 - DNA, 827 bp, Homo sapiens; identical to SEQ ID NO: 124978
  chr14:77591040-77591867
  hypo

SEQ ID NO: 175631 - DNA, 671 bp, Homo sapiens; identical to SEQ ID NO: 124980
  chr14:77605687-77606358
  hypo

SEQ ID NO: 175632 - DNA, 30 bp, Homo sapiens
  chr14:77683132-77683162
  hypo
ccattgtctcctgcccggaccctggccgag

SEQ ID NO: 175633 - DNA, 30 bp, Homo sapiens
  chr14:77715153-77715183
  hypo
gatgaacgtgttcagcgtggtgatggcgta

SEQ ID NO: 175634 - DNA, 138 bp, Homo sapiens; identical to SEQ ID NO: 51533
  chr14:77736728-77736866
  hypo

SEQ ID NO: 175635 - DNA, 285 bp, Homo sapiens; identical to SEQ ID NO: 51534
  chr14:77736883-77737168
  hypo

SEQ ID NO: 175636 - DNA, 441 bp, Homo sapiens; identical to SEQ ID NO: 124987
  chr14:77737210-77737651
  hypo

SEQ ID NO: 175637 - DNA, 164 bp, Homo sapiens
  chr14:77769160-77769324
  hypo
gggatggagtttctgacctgtcggcgcaagagttgtacttgaccatgctcagcatggcagccatgatgaagaacatcaggatggggtcaaggaggatgtactgggacagagtgaggcatcccgtgtctgaaaaacatgagctcgctggtgaaaaagcgaggtaa

SEQ ID NO: 175638 - DNA, 30 bp, Homo sapiens; identical to SEQ ID NO: 87151
  chr14:77781546-77781576
  hypo

SEQ ID NO: 175639 - DNA, 30 bp, Homo sapiens; identical to SEQ ID NO: 87152
  chr14:77808998-77809028
  hypo

SEQ ID NO: 175640 - DNA, 32 bp, Homo sapiens; identical to SEQ ID NO: 87153
  chr14:77935682-77935714
  hypo

SEQ ID NO: 175641 - DNA, 103 bp, Homo sapiens; identical to SEQ ID NO: 87154
  chr14:77937150-77937253
  hypo

SEQ ID NO: 175642 - DNA, 30 bp, Homo sapiens
  chr14:77938585-77938615
  hypo
tgatacatgtagaaacgctggcacctggtg

SEQ ID NO: 175643 - DNA, 102 bp, Homo sapiens
  chr14:77939353-77939455
  hypo
tgctcccgccgttggcgctgctcctcacacacaggtgctcctaaagcctgcagccacctgcgcagtgtctttctcctttgcattgctcgaataaatgtaatt

SEQ ID NO: 175644 - DNA, 70 bp, Homo sapiens; identical to SEQ ID NO: 87155
  chr14:77942015-77942085
  hypo

SEQ ID NO: 175645 - DNA, 30 bp, Homo sapiens; identical to SEQ ID NO: 87156
  chr14:77942287-77942317
  hypo

SEQ ID NO: 175646 - DNA, 31 bp, Homo sapiens; identical to SEQ ID NO: 27682
  chr14:77949054-77949085
  hypo

SEQ ID NO: 175647 - DNA, 637 bp, Homo sapiens; identical to SEQ ID NO: 124996
  chr14:77964581-77965218
  hypo

SEQ ID NO: 175648 - DNA, 408 bp, Homo sapiens; identical to SEQ ID NO: 124997
  chr14:77965244-77965652
  hypo

SEQ ID NO: 175649 - DNA, 27 bp, Homo sapiens
  chr14:77968364-77968391
  hypo
actgcgcctggccggcctatttttcct

SEQ ID NO: 175650 - DNA, 30 bp, Homo sapiens
  chr14:77999886-77999916
  hypo
gcaagcagttagtttcgggaaggctggact

SEQ ID NO: 175651 - DNA, 28 bp, Homo sapiens
  chr14:78058349-78058377
  hypo
agccgccgtgcccagccagttgtgttct

SEQ ID NO: 175652 - DNA, 30 bp, Homo sapiens; identical to SEQ ID NO: 87162
  chr14:78086571-78086601
  hypo

SEQ ID NO: 175653 - DNA, 30 bp, Homo sapiens
  chr14:78127497-78127527
  hypo
ttgtctccaacctttcgacaaagcccaaga

SEQ ID NO: 175654 - DNA, 38 bp, Homo sapiens
  chr14:78152932-78152970
  hypo
agcgccttatgtaagcgttggcatttctcttagcaatt

SEQ ID NO: 175655 - DNA, 44 bp, Homo sapiens; identical to SEQ ID NO: 87163
  chr14:78165391-78165435
  hypo

SEQ ID NO: 175656 - DNA, 32 bp, Homo sapiens; identical to SEQ ID NO: 87164
  chr14:78166102-78166134
  hypo

SEQ ID NO: 175657 - DNA, 145 bp, Homo sapiens; identical to SEQ ID NO: 27683
  chr14:78189474-78189619
  hypo

SEQ ID NO: 175658 - DNA, 37 bp, Homo sapiens; identical to SEQ ID NO: 87166
  chr14:78228356-78228393
  hypo

SEQ ID NO: 175659 - DNA, 34 bp, Homo sapiens; identical to SEQ ID NO: 87167
  chr14:78247789-78247823
  hypo

SEQ ID NO: 175660 - DNA, 30 bp, Homo sapiens
  chr14:78265674-78265704
  hypo
taaaatctatggcccggtgaggtggctcag

SEQ ID NO: 175661 - DNA, 32 bp, Homo sapiens; identical to SEQ ID NO: 87168
  chr14:78268993-78269025
  hypo

SEQ ID NO: 175662 - DNA, 31 bp, Homo sapiens; identical to SEQ ID NO: 27684
  chr14:78291539-78291570
  hypo

SEQ ID NO: 175663 - DNA, 30 bp, Homo sapiens; identical to SEQ ID NO: 87170
  chr14:78304342-78304372
  hypo

SEQ ID NO: 175664 - DNA, 96 bp, Homo sapiens; identical to SEQ ID NO: 27685
  chr14:78335481-78335577
  hypo

SEQ ID NO: 175665 - DNA, 35 bp, Homo sapiens; identical to SEQ ID NO: 27686
  chr14:78335636-78335671
  hypo

SEQ ID NO: 175666 - DNA, 30 bp, Homo sapiens
  chr14:78348817-78348847
  hypo
ttctaaaaccaaaatcggcctgacgtgacc

SEQ ID NO: 175667 - DNA, 30 bp, Homo sapiens; identical to SEQ ID NO: 87173
  chr14:78352831-78352861
  hypo

SEQ ID NO: 175668 - DNA, 18 bp, Homo sapiens
  chr14:78387390-78387408
  hypo
caggcgcggtggctcacg

SEQ ID NO: 175669 - DNA, 38 bp, Homo sapiens; identical to SEQ ID NO: 87175
  chr14:78388713-78388751
  hypo

SEQ ID NO: 175670 - DNA, 31 bp, Homo sapiens; identical to SEQ ID NO: 87176
  chr14:78397856-78397887
  hypo

SEQ ID NO: 175671 - DNA, 30 bp, Homo sapiens; identical to SEQ ID NO: 87177
  chr14:78709673-78709703
  hypo

SEQ ID NO: 175672 - DNA, 20 bp, Homo sapiens
  chr14:79525884-79525904
  hypo
ccaccgcgcctggcctcagg

SEQ ID NO: 175673 - DNA, 19 bp, Homo sapiens
  chr14:80928439-80928458
  hypo
gactctgtctcaaaaacaa

SEQ ID NO: 175674 - DNA, 208 bp, Homo sapiens; identical to SEQ ID NO: 27689
  chr14:81231424-81231632
  hypo

SEQ ID NO: 175675 - DNA, 30 bp, Homo sapiens; identical to SEQ ID NO: 87180
  chr14:81404941-81404971
  hypo

SEQ ID NO: 175676 - DNA, 76 bp, Homo sapiens
  chr14:81439764-81439840
  hypo
aaaaaaaaatctgtgtacttattctcagaggcttagagctaccaaacatactttcccgtgtcgaaaggttttaaga

SEQ ID NO: 175677 - DNA, 94 bp, Homo sapiens; identical to SEQ ID NO: 87181
  chr14:81489151-81489245
  hypo

SEQ ID NO: 175678 - DNA, 115 bp, Homo sapiens
  chr14:81609902-81610017
  hypo
actgtctttgcaagcgagttatcggtgtatacgctgacggtcatcaccctggagcgctggtatgccatcaccttcgccatgcgcctggaccggaagatccgcctcaggcacgcat

SEQ ID NO: 175679 - DNA, 31 bp, Homo sapiens; identical to SEQ ID NO: 9876
  chr14:81685635-81685666
  hypo

SEQ ID NO: 175680 - DNA, 30 bp, Homo sapiens
  chr14:81838603-81838633
  hypo
tcatatcattacggccgggcacggtggctc

SEQ ID NO: 175681 - DNA, 301 bp, Homo sapiens; identical to SEQ ID NO: 87184
  chr14:81879109-81879410
  hypo

SEQ ID NO: 175682 - DNA, 38 bp, Homo sapiens
  chr14:81904518-81904556
  hypo
attgaataggtggacacgcatgggttgaacctcacctg

SEQ ID NO: 175683 - DNA, 103 bp, Homo sapiens; identical to SEQ ID NO: 87185
  chr14:82295805-82295908
  hypo

SEQ ID NO: 175684 - DNA, 30 bp, Homo sapiens
  chr14:84619128-84619158
  hypo
aaccctctctgatttcggaacaaagttgaa

SEQ ID NO: 175685 - DNA, 35 bp, Homo sapiens
  chr14:86054379-86054414
  hypo
attctcctgcctcagcctcccgagtgatatttcag

SEQ ID NO: 175686 - DNA, 30 bp, Homo sapiens
  chr14:86087832-86087862
  hypo
ttgtattttatttccgtacttcagaaatgg

SEQ ID NO: 175687 - DNA, 76 bp, Homo sapiens; identical to SEQ ID NO: 87186
  chr14:87963379-87963455
  hypo

SEQ ID NO: 175688 - DNA, 31 bp, Homo sapiens; identical to SEQ ID NO: 27691
  chr14:88131325-88131356
  hypo

SEQ ID NO: 175689 - DNA, 79 bp, Homo sapiens; identical to SEQ ID NO: 87188
  chr14:88457501-88457580
  hypo

SEQ ID NO: 175690 - DNA, 78 bp, Homo sapiens; identical to SEQ ID NO: 27693
  chr14:88457819-88457897
  hypo

SEQ ID NO: 175691 - DNA, 170 bp, Homo sapiens; identical to SEQ ID NO: 125029
  chr14:88458956-88459126
  hypo

SEQ ID NO: 175692 - DNA, 539 bp, Homo sapiens; identical to SEQ ID NO: 125030
  chr14:88459170-88459709
  hypo

SEQ ID NO: 175693 - DNA, 34 bp, Homo sapiens; identical to SEQ ID NO: 87191
  chr14:88527463-88527497
  hypo

SEQ ID NO: 175694 - DNA, 34 bp, Homo sapiens; identical to SEQ ID NO: 87192
  chr14:88527736-88527770
  hypo

SEQ ID NO: 175695 - DNA, 148 bp, Homo sapiens; identical to SEQ ID NO: 87193
  chr14:88587437-88587585
  hypo

SEQ ID NO: 175696 - DNA, 169 bp, Homo sapiens
  chr14:88625250-88625419
  hypo
cttctatttcaggcccaccagcgctattaccgatcttggacaggtccaaaccttctccctctccaatgctcctacacctgcgctgctgaacactgcttgagaaagtcatacacagggcctccagcctctcccgggatcacagcatcccgtaataaccctcacccatatc

SEQ ID NO: 175697 - DNA, 31 bp, Homo sapiens; identical to SEQ ID NO: 27696
  chr14:88669111-88669142
  hypo

SEQ ID NO: 175698 - DNA, 37 bp, Homo sapiens; identical to SEQ ID NO: 27697
  chr14:88686788-88686825
  hypo

SEQ ID NO: 175699 - DNA, 30 bp, Homo sapiens
  chr14:88770863-88770893
  hypo
aaagtttgagtcacccgatgcacatgtcct

SEQ ID NO: 175700 - DNA, 859 bp, Homo sapiens; identical to SEQ ID NO: 125031
  chr14:88789387-88790246
  hypo

SEQ ID NO: 175701 - DNA, 208 bp, Homo sapiens; identical to SEQ ID NO: 125032
  chr14:88790298-88790506
  hypo

SEQ ID NO: 175702 - DNA, 30 bp, Homo sapiens; identical to SEQ ID NO: 87200
  chr14:88945300-88945330
  hypo

SEQ ID NO: 175703 - DNA, 30 bp, Homo sapiens; identical to SEQ ID NO: 27700
  chr14:88945553-88945583
  hypo

SEQ ID NO: 175704 - DNA, 21 bp, Homo sapiens
  chr14:88954148-88954169
  hypo
agtgcccacaaattagccagg

SEQ ID NO: 175705 - DNA, 103 bp, Homo sapiens
  chr14:88954652-88954755
  hypo
tcttggcgctcttgccgcagcacccagtgtggaggcgaacactgcccactgtagtagccggctctactaagaaaacaaactacaaaagcgtgtacctgccaaa

SEQ ID NO: 175706 - DNA, 783 bp, Homo sapiens; identical to SEQ ID NO: 51568
  chr14:89020630-89021413
  hypo

SEQ ID NO: 175707 - DNA, 726 bp, Homo sapiens; identical to SEQ ID NO: 51571
  chr14:89290489-89291215
  hypo

SEQ ID NO: 175708 - DNA, 105 bp, Homo sapiens
  chr14:89291875-89291980
  hypo
tacaatgtacgtgagcggtacaattctggtgggcaggtggctcctggaataggcaaaaaaggagaaaatgggagaacagaagtagcgctgcggcagtttgtcagt

SEQ ID NO: 175709 - DNA, 181 bp, Homo sapiens; identical to SEQ ID NO: 27704
  chr14:89292609-89292790
  hypo

SEQ ID NO: 175710 - DNA, 20 bp, Homo sapiens
  chr14:89293029-89293049
  hypo
ctgggcgacagagagactct

SEQ ID NO: 175711 - DNA, 239 bp, Homo sapiens; identical to SEQ ID NO: 125044
  chr14:89506860-89507099
  hypo

SEQ ID NO: 175712 - DNA, 30 bp, Homo sapiens
  chr14:89507522-89507552
  hypo
gcggatggtgaccatcgtttcccagcccag

SEQ ID NO: 175713 - DNA, 30 bp, Homo sapiens
  chr14:89551670-89551700
  hypo
tgcaccgagggtgaccgcttttcaagcact

SEQ ID NO: 175714 - DNA, 30 bp, Homo sapiens; identical to SEQ ID NO: 87208
  chr14:89577766-89577796
  hypo

SEQ ID NO: 175715 - DNA, 138 bp, Homo sapiens
  chr14:89579157-89579295
  hypo
tgagaccaagaacccaccaattccagacacagtggggcgcactgggcatggtacaggagccctttcacctgcgcctgccgacggttgcagcagccgaggggcccgggcactgcagcctgagcccggccgtgcacccac

SEQ ID NO: 175716 - DNA, 30 bp, Homo sapiens; identical to SEQ ID NO: 27706
  chr14:89606226-89606256
  hypo

SEQ ID NO: 175717 - DNA, 436 bp, Homo sapiens
  chr14:89627945-89628381
  hypo
cgtgcacagggccaatcttcaggcttatggcttttggaacattttcttaatttaatagagaacagaattcaatgattagcaacatcactaaaaatttaccccatttcttctccatgagtcactgacacccgatgcgcatgaacagtccaacgtccacctcgtaagatgtcatcgggcttcagggttcagaagcatcgaggactggtggccggccctctgtgctcgccgtgtgacaattccagtggctttcctggcaccatcagatgcctggtgccacaagcttgggtctgctcctagggggacgaggggttcctcctcctcctcaattgctttatgtgccttcactcagtgaacccaatgggatggacaacctgactttttaaacctaagggttgggcctgaacgatgattactttgcccacgtgccttctaggtg

SEQ ID NO: 175718 - DNA, 30 bp, Homo sapiens
  chr14:89629126-89629156
  hypo
aaactcatagtggtcgtcggctgaggagga

SEQ ID NO: 175719 - DNA, 182 bp, Homo sapiens
  chr14:89646423-89646605
  hypo
agggccgcaggctggcggtggaccctgatccggggctgacagtggagatggagagcatggaggagagaaatgtcccaaggaagggttcatgcggtttggcagctggcctcattcttggaagcaggggaatgatgccacctgctatttatagaccacgtaccaaagctcgcctcacatctgat

SEQ ID NO: 175720 - DNA, 30 bp, Homo sapiens
  chr14:89647105-89647135
  hypo
ctcggctcaggacccgcgctccattttgga

SEQ ID NO: 175721 - DNA, 227 bp, Homo sapiens
  chr14:89657647-89657874
  hypo
tgaaaagaacatctgccccagcgcagcgtcccagctgccctggggcgaaattcactaatagtgcggtgatgccgcgtgacagaagctgccgcctgtgccctgtccaaataaatgaagtgtgcaattgaagtcgacatcaaaatgccttcccttgcagattactgcctctgtgtccgccaaacccaatgactaatgatgggggacaaggggctcgcacttgtcagttt

SEQ ID NO: 175722 - DNA, 167 bp, Homo sapiens; identical to SEQ ID NO: 27709
  chr14:89711494-89711661
  hypo

SEQ ID NO: 175723 - DNA, 208 bp, Homo sapiens
  chr14:89720604-89720812
  hypo
catcaccaccatcatcgccatgctatcctgccttctgcaaggctgcttgaattgcctgagcctggaacgtttccccaacagaagtcagcaagcttgttccctaaccagggactcagttcaaatggctgagtgtctgtaagggaggtggggagaaggggtggtgcagggaaaggagcgagtggtcagaactgcacggccagacagacag

SEQ ID NO: 175724 - DNA, 30 bp, Homo sapiens
  chr14:89743562-89743592
  hypo
caaacacatagagaccgtaacacagagaca

SEQ ID NO: 175725 - DNA, 30 bp, Homo sapiens
  chr14:89771166-89771196
  hypo
aagtgcctggtggagcgggggaccctgacc

SEQ ID NO: 175726 - DNA, 217 bp, Homo sapiens; identical to SEQ ID NO: 87214
  chr14:89775980-89776197
  hypo

SEQ ID NO: 175727 - DNA, 156 bp, Homo sapiens
  chr14:89786298-89786454
  hypo
gaagctcaaggatgacgctttgcatttcattactaagacaggtaaacatcagatctgctgcagaatcaaacacaattaaaactttaattaactgaaacctaactagcccccaacttcaaataaaaaacatttgcgggcagccgggaaggggaagat

SEQ ID NO: 175728 - DNA, 153 bp, Homo sapiens
  chr14:89803722-89803875
  hypo
caagagatttaaacacggattatgtatctggtagagaaagaacacaattgagtgtttgggctggcctggggtgaaaacttttcccattatgactggggcagggagagctccggcgccttacctttcaagtgccagttccgcagaaatgtacag

SEQ ID NO: 175729 - DNA, 248 bp, Homo sapiens; identical to SEQ ID NO: 87215
  chr14:89811173-89811421
  hypo

SEQ ID NO: 175730 - DNA, 41 bp, Homo sapiens
  chr14:89819260-89819301
  hypo
agccagaagctgcagcgagcggagatcgcaccatttgcact

SEQ ID NO: 175731 - DNA, 31 bp, Homo sapiens; identical to SEQ ID NO: 27711
  chr14:89845804-89845835
  hypo

SEQ ID NO: 175732 - DNA, 140 bp, Homo sapiens
  chr14:89875688-89875828
  hypo
tgggggacgggggggtcgcatggcgggagaacagctcctcccagtgtgcctcaacacagggcatccaacacccacttgtcactcccaaggctgactgatgaataatgttcccaagtctcgctgcacgccttggcgttggt

SEQ ID NO: 175733 - DNA, 208 bp, Homo sapiens
  chr14:89895063-89895271
  hypo
gttgctcgcagcagacgtcagagagacctcagcgcaggggtccaagcacctggccaaggcaccctgcgcaggcctccacgccccacgagtgcctgcagaggctacctgaggaccaaggtgggcatgccacggtgtcctggacttctggatggaggccagtcccagggagtgaatggcagagctctccggaggctgcccaggccaggtt

SEQ ID NO: 175734 - DNA, 30 bp, Homo sapiens; identical to SEQ ID NO: 87219
  chr14:89902458-89902488
  hypo

SEQ ID NO: 175735 - DNA, 23 bp, Homo sapiens
  chr14:89914452-89914475
  hypo
ccgatgcctttcttcttacatgt

SEQ ID NO: 175736 - DNA, 146 bp, Homo sapiens
  chr14:89938160-89938306
  hypo
aaccagcacctggttcgtcatttgcacctttccctcggccacggagatgaggaatgacccatcagcttcgatccaggaatgggaataaagatgacttggaacagagtcctcatcaatcttcaacagaaatgtagagtaagcaagaa

SEQ ID NO: 175737 - DNA, 30 bp, Homo sapiens
  chr14:89947719-89947749
  hypo
gctggctctggaaaacgacgtagtgacttc

SEQ ID NO: 175738 - DNA, 30 bp, Homo sapiens
  chr14:89956185-89956215
  hypo
agccttacacacacgcgcgcgcatgcacac

SEQ ID NO: 175739 - DNA, 236 bp, Homo sapiens
  chr14:89956431-89956667
  hypo
tttgccacagtgctgcgcccagctggcccagtgatacggtgcccaggcgctgggaggcatgtgctttcttttttccactctttttaagggtctgaacttgcctgaattcagcagctgccgtgtcctcagcgacggctaatgaattgttagctttgctcctggttcccctgagctcaactcccagtccacttttgtttttaattctatcccaatgatatcagcgtttagcaaagagt

SEQ ID NO: 175740 - DNA, 30 bp, Homo sapiens; identical to SEQ ID NO: 87222
  chr14:89959559-89959589
  hypo

SEQ ID NO: 175741 - DNA, 30 bp, Homo sapiens
  chr14:89982166-89982196
  hypo
gccacatgatgaaagcgaagggtgctgagc

SEQ ID NO: 175742 - DNA, 597 bp, Homo sapiens; identical to SEQ ID NO: 125051
  chr14:90085315-90085912
  hypo

SEQ ID NO: 175743 - DNA, 30 bp, Homo sapiens
  chr14:90087087-90087117
  hypo
tctctgtaagtactgcggaaaatgaagcat

SEQ ID NO: 175744 - DNA, 89 bp, Homo sapiens
  chr14:90097938-90098027
  hypo
gcttttttttaatacacattttccaaagtctcactttcagaaattctgagtcagtagacctgagattcggcctaggaataaacattttt

SEQ ID NO: 175745 - DNA, 183 bp, Homo sapiens; identical to SEQ ID NO: 125052
  chr14:90167707-90167890
  hypo

SEQ ID NO: 175746 - DNA, 30 bp, Homo sapiens; identical to SEQ ID NO: 125053
  chr14:90168234-90168264
  hypo

SEQ ID NO: 175747 - DNA, 30 bp, Homo sapiens; identical to SEQ ID NO: 87225
  chr14:90216222-90216252
  hypo

SEQ ID NO: 175748 - DNA, 40 bp, Homo sapiens
  chr14:90323675-90323715
  hypo
gtgctataatcatgacgcacgaagacggaaagactggttg

SEQ ID NO: 175749 - DNA, 236 bp, Homo sapiens; identical to SEQ ID NO: 87226
  chr14:90358153-90358389
  hypo

SEQ ID NO: 175750 - DNA, 360 bp, Homo sapiens; identical to SEQ ID NO: 51580
  chr14:90420658-90421018
  hypo

SEQ ID NO: 175751 - DNA, 200 bp, Homo sapiens; identical to SEQ ID NO: 9902
  chr14:90421129-90421329
  hypo

SEQ ID NO: 175752 - DNA, 728 bp, Homo sapiens; identical to SEQ ID NO: 125056
  chr14:90422067-90422795
  hypo

SEQ ID NO: 175753 - DNA, 168 bp, Homo sapiens
  chr14:90429697-90429865
  hypo
ttcccaggaggacctcggctggtgtctgtccagcagtgatgatgagctgcaaccagaaatgccgcagaagcaggctgagaaagtggtgatcaaaaaggagaaagacatctctgctcccaatgacggcactgcccaaagaactgaaaatcatggcgctcccgcctgcca

SEQ ID NO: 175754 - DNA, 164 bp, Homo sapiens; identical to SEQ ID NO: 27717
  chr14:90505788-90505952
  hypo

SEQ ID NO: 175755 - DNA, 2212 bp, Homo sapiens; identical to SEQ ID NO: 51583
  chr14:90526594-90528806
  hypo

SEQ ID NO: 175756 - DNA, 278 bp, Homo sapiens; identical to SEQ ID NO: 125058
  chr14:90528869-90529147
  hypo

SEQ ID NO: 175757 - DNA, 30 bp, Homo sapiens; identical to SEQ ID NO: 87233
  chr14:90651033-90651063
  hypo

SEQ ID NO: 175758 - DNA, 28 bp, Homo sapiens
  chr14:90720940-90720968
  hypo
gctggagtgcaatggcgcaatctcggct

SEQ ID NO: 175759 - DNA, 26 bp, Homo sapiens
  chr14:90723953-90723979
  hypo
ttaatttttatttttttgagacggag

SEQ ID NO: 175760 - DNA, 25 bp, Homo sapiens
  chr14:90724218-90724243
  hypo
ccaccgcgcccggcctcatagaggt

SEQ ID NO: 175761 - DNA, 30 bp, Homo sapiens; identical to SEQ ID NO: 87236
  chr14:90743968-90743998
  hypo

SEQ ID NO: 175762 - DNA, 30 bp, Homo sapiens; identical to SEQ ID NO: 87237
  chr14:90744600-90744630
  hypo

SEQ ID NO: 175763 - DNA, 92 bp, Homo sapiens
  chr14:90747428-90747520
  hypo
cgaagccccaggaaccgaatctcatacaaaccatctgaagaactcagccaacaagatgctggccggacacggtggctcacgcctgtaatccc

SEQ ID NO: 175764 - DNA, 30 bp, Homo sapiens
  chr14:90747809-90747839
  hypo
tcccctgtgcgaccacgggggaggcgagta

SEQ ID NO: 175765 - DNA, 166 bp, Homo sapiens
  chr14:90754240-90754406
  hypo
tagccatcaggctttcgtgacggcttctcagcattcccgtgatctgacagccaccacccatgcacacagaaacaacattcatactccccagaagcacacccaggcgacagccaccaacccccctcctgagaggcgccgctactttgtgtctcgcttgcctttcaat

SEQ ID NO: 175766 - DNA, 381 bp, Homo sapiens; identical to SEQ ID NO: 9908
  chr14:90849476-90849857
  hypo

SEQ ID NO: 175767 - DNA, 660 bp, Homo sapiens; identical to SEQ ID NO: 51588
  chr14:90849897-90850557
  hypo

SEQ ID NO: 175768 - DNA, 178 bp, Homo sapiens; identical to SEQ ID NO: 87241
  chr14:90871524-90871702
  hypo

SEQ ID NO: 175769 - DNA, 30 bp, Homo sapiens
  chr14:90872434-90872464
  hypo
cagtcacctttgattcgcgacttttaattt

SEQ ID NO: 175770 - DNA, 215 bp, Homo sapiens
  chr14:90980460-90980675
  hypo
gcgtgttctgtgttacgagtcccagtctcttcatttctaacaaggggctcatgcatcacgcctggctcacctggctgcgtgcgcatcaaatcagatgagtgtgtgaggacgttcattctaaactttacaagctctgagcaaacagagggagttattattgggccaagcgggcagaccagacattagagttgatgataaatcggtcgggcccctgt

SEQ ID NO: 175771 - DNA, 195 bp, Homo sapiens
  chr14:90983274-90983469
  hypo
acaagccactctccagggccacgggatggcagcctgatgagtcagcgcagttacctgatcaggcagcgtcgcgccatgagaggtgatctcatgcgccagtctccagccgctcctcgctattccccaggctctgggacggtggagttagctgaccaggcagaagttggctccctggcagcacgctggtggtcccaa

SEQ ID NO: 175772 - DNA, 165 bp, Homo sapiens
  chr14:90988560-90988725
  hypo
cctgaaggcctgggccgggagggggaagaatgtccagaacaccgcctgctgggctccttgtgcggtgtgcctggtgcacagtgggtgcctgctgaacgtggcactgtgctgagtgaggtgggctcagcaattgcgctagcacagggcgctcgggctgagacccct

SEQ ID NO: 175773 - DNA, 91 bp, Homo sapiens
  chr14:90989572-90989663
  hypo
actggccctgggttccgcagagctggtcaccaatggcctcactgatcagagaagggcgggatgcccggggctgggggcttaaagctccctc

SEQ ID NO: 175774 - DNA, 31 bp, Homo sapiens
  chr14:90990070-90990101
  hypo
tggaagagcaccaaccgcacggcaggtgatc

SEQ ID NO: 175775 - DNA, 169 bp, Homo sapiens; identical to SEQ ID NO: 87244
  chr14:91007705-91007874
  hypo

SEQ ID NO: 175776 - DNA, 30 bp, Homo sapiens; identical to SEQ ID NO: 87245
  chr14:91066723-91066753
  hypo

SEQ ID NO: 175777 - DNA, 30 bp, Homo sapiens
  chr14:91077082-91077112
  hypo
cacctgtctcgggatcgctgaagtctggca

SEQ ID NO: 175778 - DNA, 104 bp, Homo sapiens
  chr14:91077533-91077637
  hypo
tagcaagtgagtccatgaacacgccatccatgaagagttgtcttcatgaaccaatgctccacacctgcgcttctaaaacccaggctgcacggaaaaatcaccca

SEQ ID NO: 175779 - DNA, 30 bp, Homo sapiens; identical to SEQ ID NO: 87247
  chr14:91087571-91087601
  hypo

SEQ ID NO: 175780 - DNA, 177 bp, Homo sapiens
  chr14:91091767-91091944
  hypo
ttctgagggcccaccgtatgctgctcttggagccactgctctcctggctgggtttccaaagcaccccaatctcagaaggtgttatatctctgcaaacagcagcctctggtcccaggctgagtcactgtcactgaaaatcaataccgtcactggcccgacctccgccaggtgagccta

SEQ ID NO: 175781 - DNA, 132 bp, Homo sapiens; identical to SEQ ID NO: 27724
  chr14:91127197-91127329
  hypo

SEQ ID NO: 175782 - DNA, 31 bp, Homo sapiens; identical to SEQ ID NO: 87250
  chr14:91288493-91288524
  hypo

SEQ ID NO: 175783 - DNA, 27 bp, Homo sapiens
  chr14:91318387-91318414
  hypo
gcaaagacaaattatcggtatcttttc

SEQ ID NO: 175784 - DNA, 26 bp, Homo sapiens
  chr14:91318653-91318679
  hypo
ggtctcgacctcgtgatctgcccgcc

SEQ ID NO: 175785 - DNA, 188 bp, Homo sapiens
  chr14:91589622-91589810
  hypo
cagttagacagtaaacggaggggcccagccaagcatattcccatgctgcaaagccacttgatattagcgcacatcttgaagcaataaacgctgccctggcaggccctggcaaatggcacttgtgaatatttagaaacggagcagccctgtttgggaaaactgtcatactgacgcgctaggttgggaga

SEQ ID NO: 175786 - DNA, 36 bp, Homo sapiens; identical to SEQ ID NO: 87253
  chr14:91590534-91590570
  hypo

SEQ ID NO: 175787 - DNA, 276 bp, Homo sapiens
  chr14:91691045-91691321
  hypo
atcttggtgcagcacaaagtccggagtggcgtctcgggcatcgtgggcatggaggtggatgggctgcccttccacaacacccacgccgagatgatccagaagctggtggacgtcaccacggcacaggtgtaaccgtccatgttccgtgtgagcagagtccctaccaacgggcaggtctgcatccggggagaatgcagctgcttctggcgacaatcctgctagtaaacactggtcttcggtgagcaacgaacactcgcctggcctgggaaactgcat

SEQ ID NO: 175788 - DNA, 27 bp, Homo sapiens
  chr14:91691627-91691654
  hypo
tactcatagccaactgcagaccgaaaa

SEQ ID NO: 175789 - DNA, 87 bp, Homo sapiens; identical to SEQ ID NO: 87256
  chr14:91691773-91691860
  hypo

SEQ ID NO: 175790 - DNA, 30 bp, Homo sapiens
  chr14:91700386-91700416
  hypo
ctcaccctgggccccgcttttcccggaggc

SEQ ID NO: 175791 - DNA, 42 bp, Homo sapiens; identical to SEQ ID NO: 27726
  chr14:91700729-91700771
  hypo

SEQ ID NO: 175792 - DNA, 158 bp, Homo sapiens; identical to SEQ ID NO: 87258
  chr14:91701161-91701319
  hypo

SEQ ID NO: 175793 - DNA, 162 bp, Homo sapiens; identical to SEQ ID NO: 87259
  chr14:91712443-91712605
  hypo

SEQ ID NO: 175794 - DNA, 54 bp, Homo sapiens
  chr14:91731774-91731828
  hypo
cggctggcatagctgcgtacaccttaggacggtcagctccgcaaagcccctagc

SEQ ID NO: 175795 - DNA, 30 bp, Homo sapiens; identical to SEQ ID NO: 87260
  chr14:91738072-91738102
  hypo

SEQ ID NO: 175796 - DNA, 63 bp, Homo sapiens
  chr14:91739005-91739068
  hypo
tccccgccgggctccggggaggccggactgctctttgagacgctccctcgactgcagtcctcc

SEQ ID NO: 175797 - DNA, 30 bp, Homo sapiens
  chr14:91740053-91740083
  hypo
agccgcctcctgcgcgggacgcccccgagc

SEQ ID NO: 175798 - DNA, 409 bp, Homo sapiens
  chr14:91744076-91744485
  hypo
cagggttggggctggcggctggcttgcggtgacttgtcagctagtgctctagtcagcctctcatgtccaagccagtcctgtgcctaggccacgccacccccaccccatcctttctgcagctatgatcttgagccaggaagagacagagagggaagagagacgggccaagtccgtgtccggatcactcacatgggtgggggagctgcggttgctctcctccaggaactcctccaaggtgaccatctcactgctgggggaggccgagcagggccgcactccgacgtagggaggggctgtgcccctcttctgggcaccctcctgtgggagaggcccgttccgaggcaaggggtactcgtggcggccgagggcgttgcgtcccggtgtgctggcttcccggggcaaagtggcc

SEQ ID NO: 175799 - DNA, 173 bp, Homo sapiens
  chr14:91750810-91750983
  hypo
caggtggaatgaatcgggacaggtcatcctacaggtgaagctaaaatgaggatccacaggggaggcagagatgagtgaacagttagcatgagcagcgaacagagaaagcacaattccaacagcatgcgcggaaggcaggtctggaggacccggcaccacggcagcccagggtt

SEQ ID NO: 175800 - DNA, 30 bp, Homo sapiens; identical to SEQ ID NO: 27730
  chr14:91752078-91752108
  hypo

SEQ ID NO: 175801 - DNA, 289 bp, Homo sapiens; identical to SEQ ID NO: 125081
  chr14:91755342-91755631
  hypo

SEQ ID NO: 175802 - DNA, 30 bp, Homo sapiens
  chr14:91756218-91756248
  hypo
cctgtgctctcaccccgtctctgaaacgaa

SEQ ID NO: 175803 - DNA, 288 bp, Homo sapiens
  chr14:91757478-91757766
  hypo
agtgaatttactcatcggcccagcctggaacctggtgtacccggggctggtatttttccaggattgagatgagggtgctcaccaccgtcatggtcactgagtttggaatacgggaatggtggcatgcgccgtgggttcagggagctctatgaccctgagatttactgaagcccctgggacccagctgtgagcgagctcaaggcagcaaacttctaacaatctgaaaactcacgctcggaagacccaaggattctccttccaggttgttcaagacgtgagatgctcctg

SEQ ID NO: 175804 - DNA, 113 bp, Homo sapiens
  chr14:91758192-91758305
  hypo
ggcacctctgcttaccggggagaccttggccttcctcatacaaacagaaagcttctgtttgcacttagggagtcacggggctgcgcccacagtgcattcggagccgcgctgcc

SEQ ID NO: 175805 - DNA, 30 bp, Homo sapiens; identical to SEQ ID NO: 87267
  chr14:91758626-91758656
  hypo

SEQ ID NO: 175806 - DNA, 341 bp, Homo sapiens; identical to SEQ ID NO: 87268
  chr14:91766242-91766583
  hypo

SEQ ID NO: 175807 - DNA, 30 bp, Homo sapiens
  chr14:91767476-91767506
  hypo
gtgtgaggaatgacacgtagtgaatgcttg

SEQ ID NO: 175808 - DNA, 396 bp, Homo sapiens; identical to SEQ ID NO: 27733
  chr14:91770037-91770433
  hypo

SEQ ID NO: 175809 - DNA, 30 bp, Homo sapiens; identical to SEQ ID NO: 87270
  chr14:91772368-91772398
  hypo

SEQ ID NO: 175810 - DNA, 101 bp, Homo sapiens; identical to SEQ ID NO: 27734
  chr14:91775791-91775892
  hypo

SEQ ID NO: 175811 - DNA, 200 bp, Homo sapiens
  chr14:91780258-91780458
  hypo
tccagcttctctgcccgctcccccttctccttggcctgctccaagtccctgtgcagctgccgcttctcaaactccaactggctgagcttgccattggcctccgtcaccgtctggtggagggctttgttctccttctccacgtctttcatgcgggcctcactgctgacctgcgacctctcccgcagcgaccacatggctcg

SEQ ID NO: 175812 - DNA, 169 bp, Homo sapiens; identical to SEQ ID NO: 27735
  chr14:91781817-91781986
  hypo

SEQ ID NO: 175813 - DNA, 30 bp, Homo sapiens
  chr14:91788066-91788096
  hypo
gtaactgaccactcccgttggccatgggtg

SEQ ID NO: 175814 - DNA, 27 bp, Homo sapiens
  chr14:91789563-91789590
  hypo
tagtgcaaatctcgtcagcacccccca

SEQ ID NO: 175815 - DNA, 33 bp, Homo sapiens
  chr14:91801070-91801103
  hypo
tgtgcatcaaggtaacgccgggccttgacatga

SEQ ID NO: 175816 - DNA, 253 bp, Homo sapiens
  chr14:91801541-91801794
  hypo
gtagaaagcagggctcgtgcatcaggcagacttggggccacgtagcctgagtgcttaaatgttctgaaacaccccacgccacccgcctcgtgaaaatgcttgatgggcacgatgcacgctgcacaccttccatggctgggccctgagagcccctccagcctcacctctcaccgtccacccagacacaccaggaccttgtggccctgacctcaggtgtctctcctgcacgctgctttctcgggcttccaggcct

SEQ ID NO: 175817 - DNA, 30 bp, Homo sapiens
  chr14:91802298-91802328
  hypo
catcacctgcgttggcggctcagtgtctgc

SEQ ID NO: 175818 - DNA, 30 bp, Homo sapiens
  chr14:91803964-91803994
  hypo
gtgagccgctgcacccggttgcccgttatt

SEQ ID NO: 175819 - DNA, 414 bp, Homo sapiens; identical to SEQ ID NO: 87274
  chr14:91804340-91804754
  hypo

SEQ ID NO: 175820 - DNA, 1311 bp, Homo sapiens
  chr14:91805117-91806428
  hypo
taaactatgtccatccgccactcaggtctccctccctgtgtgtggggcaggtaaggagaccccagcggcagctgtaccaccccacagccaggctccacaggtgacatccatcagctgcaggaaacctgggagaacaggctcaccagattggagggaaggaggggcacctcatccctccagccaagaaaacacatcaggtgtggtcgtcccggccccaagctggagctgagcgtggactggaggctgcttctgtggacaacttgcaccgtctggacgggaggaaaccctgaagaccgggaagaatccccgcccccatccctgtgcaggcctcagaaggggaggcagctagtccgaggtcaaagagtaagctcagggcagaccccagctgactccggggcacacgtcagagctgtgccattggcagcaccacacatgtgagtcgacaccacaccagaaacatgtctgcaacacacacaaaggtaggagaagcagccggggactcacagctcctgcctgacgcgccgcagcctggccttggtgtcggccagctctacggccaggtgctgcttgtcttcgctagagaggctgctggtggggctgggagtggagtcggcgctggaggacttgatggggctgggtggatgctgtgcctgcaggtagtcccgttcctgagtgaggtccacgatcagctgcagccgggcagagagggggatggaggagaacaaacggggttaaccagcacaacgcctgagcttgaacagggtgaagaaaccgccaaaagacagatatttcagcggagactaagaaacgaggaggaaggtgggaaaaggctggcatgggttttgaaaagaggtgaaatatttagtgaaacaaaagggagtgtacgaaggaggagggccccaagctccgcgtcctgattccctgtatcctcccacaggcccgaggtgaccatgcactgcaggggccgtaaccagggaaagcacgcacgtcccacccccaccagaacctcagcagcaggaccgaggcgtctaggctgaagatgaagggagaggagatgaaggggcctaagccccttcccaggctgaccgggccaccgacccgcggacgcacctcggtgcactcgtcccgctggtcgatgagcctccgcaggtggagcaccatgctcctcgacagggcctccagctcctccggagccacgtcgggcagctccagccactgcaggtcaaacacgttctcttggttgtgagtcacctgtgggcacacatggcagggcactgcaggggcggcagagacgggcgcccacttccctca

SEQ ID NO: 175821 - DNA, 200 bp, Homo sapiens
  chr14:91808059-91808259
  hypo
gccccctagggtgggcggcctccttagctgataccacctttgccaacatcaatggcaaagggccgggaaggtcaggcctcaaaggccaggggctcctcctcctccactccgctgacgctcagtgcagagccctcccggcccctcgctggggggcctgagttggggctgggccaagtctcccaaggcggtctttctgggac

SEQ ID NO: 175822 - DNA, 105 bp, Homo sapiens
  chr14:91825111-91825216
  hypo
tttggggttataggagtgagccactgcgctcggcctcattgagtctttcaaactcacactgagcgtcagagactgcggggacctagaacgcgtgcctgccaggag

SEQ ID NO: 175823 - DNA, 65 bp, Homo sapiens; identical to SEQ ID NO: 87277
  chr14:91837060-91837125
  hypo

SEQ ID NO: 175824 - DNA, 30 bp, Homo sapiens; identical to SEQ ID NO: 51598
  chr14:91841053-91841083
  hypo

SEQ ID NO: 175825 - DNA, 54 bp, Homo sapiens
  chr14:91841580-91841634
  hypo
cagggttagcatgcgcgcgtgtctgtgtgtgtgtgtgcgcgcgcgcatgtggga

SEQ ID NO: 175826 - DNA, 225 bp, Homo sapiens
  chr14:91841939-91842164
  hypo
gcttccccgcagggccggccgagagcccacacttcaggcaaataaaagcaccctcaccagctgttcccatggccaagccaagcaggatggcagtctgtgccagccctgcctcggcagcaagtggactcttccagcccaagccacgagatgaggggagactcaaccctgtccgtgcccggagcaccttccctgtgcgaggctcctcagggcgagtggggggcaaat

SEQ ID NO: 175827 - DNA, 237 bp, Homo sapiens; identical to SEQ ID NO: 87281
  chr14:91842553-91842790
  hypo

SEQ ID NO: 175828 - DNA, 190 bp, Homo sapiens; identical to SEQ ID NO: 87282
  chr14:91848933-91849123
  hypo

SEQ ID NO: 175829 - DNA, 30 bp, Homo sapiens; identical to SEQ ID NO: 27744
  chr14:91849584-91849614
  hypo

SEQ ID NO: 175830 - DNA, 208 bp, Homo sapiens; identical to SEQ ID NO: 87284
  chr14:91850942-91851150
  hypo

SEQ ID NO: 175831 - DNA, 31 bp, Homo sapiens; identical to SEQ ID NO: 27746
  chr14:91861311-91861342
  hypo

SEQ ID NO: 175832 - DNA, 214 bp, Homo sapiens
  chr14:91871518-91871732
  hypo
acttgagcatcctagcgacacggcccacgctctttaggaaaggcctggccttccagactgtcactgctccagtgtgccgcagagaagaaggggacagttaggggcacagagccatctcctggcaaacaaaacccagagccagaatgcgcgaccttgatgtgtctaccaaaaagccacaggtgagagggaggcccgcccacgcagcaccccagtc

SEQ ID NO: 175833 - DNA, 117 bp, Homo sapiens; identical to SEQ ID NO: 125083
  chr14:91883379-91883496
  hypo

SEQ ID NO: 175834 - DNA, 420 bp, Homo sapiens; identical to SEQ ID NO: 125084
  chr14:91883530-91883950
  hypo

SEQ ID NO: 175835 - DNA, 30 bp, Homo sapiens
  chr14:91886639-91886669
  hypo
cacacaccgctcttcgctcggaagcctctc

SEQ ID NO: 175836 - DNA, 18 bp, Homo sapiens
  chr14:91903220-91903238
  hypo
catcttggctcctcccca

SEQ ID NO: 175837 - DNA, 480 bp, Homo sapiens; identical to SEQ ID NO: 125087
  chr14:91976435-91976915
  hypo

SEQ ID NO: 175838 - DNA, 26 bp, Homo sapiens
  chr14:91984187-91984213
  hypo
gccactgtgcccggccttttgtccta

SEQ ID NO: 175839 - DNA, 26 bp, Homo sapiens
  chr14:92081552-92081578
  hypo
ccacctcctgtcacatcggcggcagc

SEQ ID NO: 175840 - DNA, 30 bp, Homo sapiens
  chr14:92336727-92336757
  hypo
tgctatggacagaaccggggaacaccagtg

SEQ ID NO: 175841 - DNA, 31 bp, Homo sapiens; identical to SEQ ID NO: 87291
  chr14:92403222-92403253
  hypo

SEQ ID NO: 175842 - DNA, 30 bp, Homo sapiens; identical to SEQ ID NO: 87292
  chr14:92451341-92451371
  hypo

SEQ ID NO: 175843 - DNA, 30 bp, Homo sapiens; identical to SEQ ID NO: 87293
  chr14:92471671-92471701
  hypo

SEQ ID NO: 175844 - DNA, 21 bp, Homo sapiens
  chr14:92491942-92491963
  hypo
ccagccgggcactgtggctca

SEQ ID NO: 175845 - DNA, 21 bp, Homo sapiens
  chr14:92492202-92492223
  hypo
acagagcgagactccgtctca

SEQ ID NO: 175846 - DNA, 200 bp, Homo sapiens; identical to SEQ ID NO: 87295
  chr14:92492742-92492942
  hypo

SEQ ID NO: 175847 - DNA, 44 bp, Homo sapiens; identical to SEQ ID NO: 87296
  chr14:92507491-92507535
  hypo

SEQ ID NO: 175848 - DNA, 44 bp, Homo sapiens; identical to SEQ ID NO: 87297
  chr14:92507654-92507698
  hypo

SEQ ID NO: 175849 - DNA, 31 bp, Homo sapiens; identical to SEQ ID NO: 27751
  chr14:92554792-92554823
  hypo

SEQ ID NO: 175850 - DNA, 40 bp, Homo sapiens
  chr14:92573382-92573422
  hypo
gatagctaggccgggcgaggtgcttcacgcttgtaatccc

SEQ ID NO: 175851 - DNA, 30 bp, Homo sapiens; identical to SEQ ID NO: 87299
  chr14:92683547-92683577
  hypo

SEQ ID NO: 175852 - DNA, 452 bp, Homo sapiens; identical to SEQ ID NO: 51611
  chr14:92789369-92789821
  hypo

SEQ ID NO: 175853 - DNA, 139 bp, Homo sapiens; identical to SEQ ID NO: 51612
  chr14:92789959-92790098
  hypo

SEQ ID NO: 175854 - DNA, 532 bp, Homo sapiens; identical to SEQ ID NO: 51613
  chr14:92790280-92790812
  hypo

SEQ ID NO: 175855 - DNA, 44 bp, Homo sapiens
  chr14:92825887-92825931
  hypo
agccaagatcgcaccattacactcccacccgggggactgtgaga

SEQ ID NO: 175856 - DNA, 30 bp, Homo sapiens
  chr14:92827166-92827196
  hypo
cccaccacacagccacgttaccacggaggc

SEQ ID NO: 175857 - DNA, 30 bp, Homo sapiens; identical to SEQ ID NO: 87303
  chr14:92953026-92953056
  hypo

SEQ ID NO: 175858 - DNA, 1280 bp, Homo sapiens; identical to SEQ ID NO: 125103
  chr14:92979676-92980956
  hypo

SEQ ID NO: 175859 - DNA, 45 bp, Homo sapiens; identical to SEQ ID NO: 87306
  chr14:92992505-92992550
  hypo

SEQ ID NO: 175860 - DNA, 30 bp, Homo sapiens; identical to SEQ ID NO: 87307
  chr14:92994574-92994604
  hypo

SEQ ID NO: 175861 - DNA, 339 bp, Homo sapiens
  chr14:92994812-92995151
  hypo
gaacagagtcaagaacgtagtaggcgttgtttccatggtcttctgaagggccctggttccacacccccttgtccactccactcacagtttgcactgcctcttgtgaccccgtgggggtgtggacggcatgatcatctgggaaatggggggcaggtccccagcgccaggtctgcccttgcttactgtgagacctctccgatcattgcttcttccattcatgcagtgtggagatacagggctgcactgtgtcccgggtggagtgtgagcagtgtgtagcacagcagccccgcacagtaggcacttcgcagcaggcatgaaaatgtgcggcttcatgatgtg

SEQ ID NO: 175862 - DNA, 27 bp, Homo sapiens
  chr14:93000627-93000654
  hypo
tagaaagtaaatggggctgggcgtggt

SEQ ID NO: 175863 - DNA, 45 bp, Homo sapiens
  chr14:93042657-93042702
  hypo
aaccattgcttagagcgtgagaaggagaagcgagtgtccgtcaac

SEQ ID NO: 175864 - DNA, 31 bp, Homo sapiens; identical to SEQ ID NO: 87310
  chr14:93077330-93077361
  hypo

SEQ ID NO: 175865 - DNA, 30 bp, Homo sapiens; identical to SEQ ID NO: 27757
  chr14:93078612-93078642
  hypo

SEQ ID NO: 175866 - DNA, 30 bp, Homo sapiens; identical to SEQ ID NO: 87312
  chr14:93103282-93103312
  hypo

SEQ ID NO: 175867 - DNA, 30 bp, Homo sapiens; identical to SEQ ID NO: 51616
  chr14:93104056-93104086
  hypo

SEQ ID NO: 175868 - DNA, 21 bp, Homo sapiens
  chr14:93106249-93106270
  hypo
cctgactgtgcgttcgtcggg

SEQ ID NO: 175869 - DNA, 30 bp, Homo sapiens; identical to SEQ ID NO: 27758
  chr14:93107808-93107838
  hypo

SEQ ID NO: 175870 - DNA, 226 bp, Homo sapiens; identical to SEQ ID NO: 87315
  chr14:93115302-93115528
  hypo

SEQ ID NO: 175871 - DNA, 130 bp, Homo sapiens
  chr14:93140293-93140423
  hypo
caaccagattttagatacagtcgttgtttcttgagtgtagtgcgtttgttaactttttccacctggttcaaaatatgagaggctattttgataaacacatatggggcacgcagttttccttttgcctcag

SEQ ID NO: 175872 - DNA, 101 bp, Homo sapiens
  chr14:93149542-93149643
  hypo
tggcactggaagggctgggcagaaaggcctttgcagtggtgggaaagcccaaggaagcaccatggaggtgggcggcgctggggacccgagagaccagggtt

SEQ ID NO: 175873 - DNA, 30 bp, Homo sapiens; identical to SEQ ID NO: 27759
  chr14:93151433-93151463
  hypo

SEQ ID NO: 175874 - DNA, 136 bp, Homo sapiens
  chr14:93154180-93154316
  hypo
gctatccatccagggaggggcctgggccgggagagggcgcctgaggagacagggccccgccgtgaccacaggcccctcgcgtctccgcaggacttcatctgcgtgtcgtacctggagcccgagcagcaggcgcgga

SEQ ID NO: 175875 - DNA, 633 bp, Homo sapiens
  chr14:93154577-93155210
  hypo
gggagcccaacttcctgtgaggccctcccggggcgcctcccctcacccccaggcgcacgtctggccccgcctctggctgcgcactcccgaccgcgacgtccacgcagcagagggacatgggccattccatgacgtgcccaggccaacgtcgcaggacagttgtgaaaataacatgacgctcgtccaaggccacttcctgagggcaagtcctaatagccctgagacaccgagacggcatgttcttcattagacggaaagggaaactgaggctcaggagagaggcgctccaggccgctgcagccaacaaaccggcgccctcttcacacgtagctcctcaggccattccccatgagtcccccacacccaccccatcctcggtctttgcaaagaagggcccgagcttagtttccccaggactggcctaggaaggagcaccggccacagctgctccccgtgccactcagggtggacccagcatctcaggagcacctcagggtgtcggttaagagacaggcctccacccctgcaccagagcctgctcttagctcccggtgcccccagaccccgcagctctgtgcccggcaagaagcagctagacacacgccagggcgccaagcacggccagctccgcgg

SEQ ID NO: 175876 - DNA, 30 bp, Homo sapiens
  chr14:93168299-93168329
  hypo
ctctgagtagcatgacggaatcgcgcaccc

SEQ ID NO: 175877 - DNA, 104 bp, Homo sapiens; identical to SEQ ID NO: 87319
  chr14:93226910-93227014
  hypo

SEQ ID NO: 175878 - DNA, 30 bp, Homo sapiens
  chr14:93362218-93362248
  hypo
tcattccatcctacccgggatgcgaatcat

SEQ ID NO: 175879 - DNA, 137 bp, Homo sapiens; identical to SEQ ID NO: 51618
  chr14:93389556-93389693
  hypo

SEQ ID NO: 175880 - DNA, 335 bp, Homo sapiens; identical to SEQ ID NO: 51619
  chr14:93389712-93390047
  hypo

SEQ ID NO: 175881 - DNA, 113 bp, Homo sapiens; identical to SEQ ID NO: 87322
  chr14:93415128-93415241
  hypo

SEQ ID NO: 175882 - DNA, 714 bp, Homo sapiens
  chr14:93423288-93424002
  hypo
gagtctgggagccacacgcccagctaggaaggccacctgccctcggaggaaaatgaacacctgcacgtttccaaagtatccacgctctgcatgtgtccatggaaagagaagaggcatctaggggaagaagggctgagagggcaaccgcagcactgcagcccctccatgccgggcggcacaccagccaggagatgtggatggccacaggcagtccccggaggagggatgccaagaggacacatctgtttgctcagctggaggtaaaacagccggcgtctgaacgcttctgatgatgtgggttccccttgctgaaagaaatgtgcagctgatttgaacaagccacagcggggcagtgagtgttctccaaagggtcctcctggaaagctacttatcccaagacactgccactgttccaaaggtttccagaacgtgccttagagatgccttcagaagccactagaacatcctttcgagcagctccactgccagcaaatctttaactcagtgtccgtttttaaaatggctgaggctggagagggcggtgagcagctggcggaaggaaggcccctcagcgcagtggggtccacaggctgctccctgggaggctgcttctcaggcccagcgacaacagcatcatgcagagaacgccctatgtgacacccacgggactcctagaccaccgtccactgactcaaaacacgctcactggcacgg

SEQ ID NO: 175883 - DNA, 30 bp, Homo sapiens
  chr14:93424989-93425019
  hypo
cgtgacaccacttgtcgcactgtggtccag

SEQ ID NO: 175884 - DNA, 401 bp, Homo sapiens
  chr14:93425269-93425670
  hypo
tttcacagatgaggacgatgaggcgctgagaggttcagtgactgctggacagtgagtgagcccgggatggaactgggtctgcacagcacccagccgcgcccctacacacggagccatgtgatactccgcaaacaacaggcctttgtgctcctggtccccgactcctctggggaaaaaggtccctgacaggaggatctggtaggggctggggtagggagtgcaggggggcagctgccaaaaccctctcagccccggccagcacgggctctgcacagggtctgctctaaggacagaggggtgggccctaggcctagccgatccagctgctggtgccagggtcatggctaatccctcagcccgcagggccccaggaaggagccaccagacggctggggctgctg

SEQ ID NO: 175885 - DNA, 212 bp, Homo sapiens
  chr14:93426322-93426534
  hypo
tgtacttggcttccccgggtacccctggaatctgtgagaagcttgtcccccaacctctgccgatctggtggacagtgtccaccccagagggcacgtccctgcaatgctaacatgccccgtctgcacagagagtccgctggggtctctgagtacatgggacgtggtggcacaccttgccggcagtggacccagacagccggctggggagtaga

SEQ ID NO: 175886 - DNA, 241 bp, Homo sapiens
  chr14:93426784-93427025
  hypo
atccttcacagaagccgctaacgtctccagtcacaaatgtgatactctgggtggctgggtaatttgccaaagtcgcacaaatggcaacacacggcaccagaatcagtcccaggtctctgggattccacagccccggccctcaggccttgagtgactcgcagaagtggctccctcctcccgggctgccaggttctgagttaggcggatctactcacgttaataactacgctcgtgcttccat

SEQ ID NO: 175887 - DNA, 30 bp, Homo sapiens
  chr14:93429236-93429266
  hypo
ccgccccaggtgcacgtcctgtgacagccc

SEQ ID NO: 175888 - DNA, 558 bp, Homo sapiens
  chr14:93454158-93454716
  hypo
tcttcctcaccccatgactcccggactgggggagggcactggcttccacacggcagacgccaggacggcagctcacgcagactcagaccagggctagccttggtcccagctgccgcctcatgccggcaacgcacctacccggcctggtctgcagctggcgcttagccgccccagggcaggggagccacaagcacaatcctgctctgcggagcctcccctgcactgaaagggcgggtctcagcctgggtggcagacaacagccgatgtgaaaacaaaaacagtggtgctcccacacatccctgaagtccaagaaagggaaccacaaaccaagcacctcccctgagagaccctacctccctggcaccctgtcctccctcattccagacccttcgatggggcacgctgtcccctcacctcagccctgtggtctgggcaggctgacactgggggaggcatgggcaggtgcacaccaaggggtcgctctgcccgatctggggtggggccaccagctgagacgcccactcagcacgtccgaggcactggcgacccacttcccag

SEQ ID NO: 175889 - DNA, 30 bp, Homo sapiens
  chr14:93464182-93464212
  hypo
ggtgcccacctacagcgcaagctctctcag

SEQ ID NO: 175890 - DNA, 190 bp, Homo sapiens; identical to SEQ ID NO: 27764
  chr14:93486021-93486211
  hypo

SEQ ID NO: 175891 - DNA, 182 bp, Homo sapiens
  chr14:93494483-93494665
  hypo
cagaatgggagcagacgtagtgggtgcttccaggccaagctagttcaagtgtatgatgaacagcgtgccttccctagaccccattcatgtggctgacgaaaaagacttggatgacagaataacctgatggagtgaacacagattcttgagtcactgcttggagaggccgctggtctccactg

SEQ ID NO: 175892 - DNA, 137 bp, Homo sapiens
  chr14:93495038-93495175
  hypo
agctctcagaccctccggaacctcagcaatcacagttcccattggatctcccacctctaacgccaaacagtaaccgccttcaggttcagcttcggcatttctaagcctcagcgtcccaggcacgatgatggggctgt

SEQ ID NO: 175893 - DNA, 22 bp, Homo sapiens
  chr14:93509347-93509369
  hypo
cgagactgtctcaaaaaaaaaa

SEQ ID NO: 175894 - DNA, 181 bp, Homo sapiens
  chr14:93510735-93510916
  hypo
ccatgaataagtttgtgctggcgattactgagaaagtctagcataaaaattaaaccgaagcctaggccgaacactggcatccctctgcttggctgtgaagctggtgaggatgctgcactcggcctggcagcagatggaaactctggaactcgagggccacggatgagccacagggcccccc

SEQ ID NO: 175895 - DNA, 434 bp, Homo sapiens
  chr14:93521882-93522316
  hypo
ttactgggactctcccgagcctcggtgctgcctggcccagaacagatactcaagggacatacaaatgccacctgaacttctgcactcacctgcgcatgagctcgggactcctctcagctgtcccctcccatgcctccctcccacagcgcctttccaaagtccaaggacccatccttatccggtcctagccccaactgccagtcaggcctcaggtagaaactgaaggtgcccagcggtccctaccactccccgggcagagagtacaggctcttggaagaagtccagactcaagtctcagccttgtgaagccagctgactggagtggcaatgactccacagaccttcctgagcgctggctggggtctgagcacccagcagacgggaggagcagccggggcacccagtgaggtcacggctagggaggtgaatcaggc

SEQ ID NO: 175896 - DNA, 47 bp, Homo sapiens; identical to SEQ ID NO: 27766
  chr14:93525815-93525862
  hypo

SEQ ID NO: 175897 - DNA, 282 bp, Homo sapiens; identical to SEQ ID NO: 87330
  chr14:93533286-93533568
  hypo

SEQ ID NO: 175898 - DNA, 30 bp, Homo sapiens; identical to SEQ ID NO: 51620
  chr14:93552647-93552677
  hypo

SEQ ID NO: 175899 - DNA, 55 bp, Homo sapiens
  chr14:93557921-93557976
  hypo
ctgggctctacacctcggttttccggcctggaaaatagcacggtggctgggcatg

SEQ ID NO: 175900 - DNA, 31 bp, Homo sapiens
  chr14:93568563-93568594
  hypo
ggcttccccagagcagcgagaggatggggca

SEQ ID NO: 175901 - DNA, 34 bp, Homo sapiens; identical to SEQ ID NO: 87332
  chr14:93570835-93570869
  hypo

SEQ ID NO: 175902 - DNA, 30 bp, Homo sapiens
  chr14:93571296-93571326
  hypo
tctatctggccagatcggtcccaggaatgt

SEQ ID NO: 175903 - DNA, 30 bp, Homo sapiens
  chr14:93575658-93575688
  hypo
acctacacgtgcacgcgcccctgagtgtgc

SEQ ID NO: 175904 - DNA, 121 bp, Homo sapiens
  chr14:93630790-93630911
  hypo
acaaaattttttttaaaaattaactgagtttagtgatgcatgcctataatcccagcaactggaccggatgagaccggaggattgcttgagaccgggagtttgggggttacagagagctatg

SEQ ID NO: 175905 - DNA, 30 bp, Homo sapiens
  chr14:93690040-93690070
  hypo
aactgcttgatggccggccggctggcggca

SEQ ID NO: 175906 - DNA, 30 bp, Homo sapiens; identical to SEQ ID NO: 87333
  chr14:93693520-93693550
  hypo

SEQ ID NO: 175907 - DNA, 21 bp, Homo sapiens
  chr14:93695624-93695645
  hypo
aaaatgcaggcagggcgcggt

SEQ ID NO: 175908 - DNA, 157 bp, Homo sapiens; identical to SEQ ID NO: 87335
  chr14:93697027-93697184
  hypo

SEQ ID NO: 175909 - DNA, 423 bp, Homo sapiens; identical to SEQ ID NO: 87336
  chr14:93706462-93706885
  hypo

SEQ ID NO: 175910 - DNA, 121 bp, Homo sapiens
  chr14:93756454-93756575
  hypo
tcccaaagtgctgggattaaaggtgtttgagccaccgcacctggcaccaagaatccttttacccacttgccaaaccactctagctgtctgccaatactgccttttaatttttttttttttt

SEQ ID NO: 175911 - DNA, 86 bp, Homo sapiens
  chr14:93763604-93763690
  hypo
tcatgtttaaaaatatcgttaacatttgtgttttcctacaatcttttatagactatatttatatgaaaattaattatttatttaga

SEQ ID NO: 175912 - DNA, 30 bp, Homo sapiens; identical to SEQ ID NO: 87338
  chr14:93764504-93764534
  hypo

SEQ ID NO: 175913 - DNA, 30 bp, Homo sapiens; identical to SEQ ID NO: 27771
  chr14:93770536-93770566
  hypo

SEQ ID NO: 175914 - DNA, 19 bp, Homo sapiens
  chr14:93783652-93783671
  hypo
aatatactttcaatcatat

SEQ ID NO: 175915 - DNA, 313 bp, Homo sapiens; identical to SEQ ID NO: 87341
  chr14:93813479-93813792
  hypo

SEQ ID NO: 175916 - DNA, 30 bp, Homo sapiens; identical to SEQ ID NO: 87342
  chr14:93814022-93814052
  hypo

SEQ ID NO: 175917 - DNA, 101 bp, Homo sapiens
  chr14:94048703-94048804
  hypo
gactgccggggaatgcgccacgtgcacatggcctgatgctcaaatcaccgggttcttggtttaatatcgacttgggcaaattcagacgtggtttccttagt

SEQ ID NO: 175918 - DNA, 30 bp, Homo sapiens; identical to SEQ ID NO: 87344
  chr14:94055557-94055587
  hypo

SEQ ID NO: 175919 - DNA, 30 bp, Homo sapiens
  chr14:94088177-94088207
  hypo
ccaagctgcgtatatcgcacaaagaccaaa

SEQ ID NO: 175920 - DNA, 30 bp, Homo sapiens
  chr14:94088515-94088545
  hypo
acgaagaagaggagacgatgaaccaaggcg

SEQ ID NO: 175921 - DNA, 243 bp, Homo sapiens
  chr14:94187384-94187627
  hypo
gcagggagtgggctccggaccatctttcttttggctaaagggggaagcctccctgccacagtagaaagacagatccctctggcttcgccagtgcgcatgctttagacagcagctgggggcagtcgacagaccagacaccagacagggaggaggatgtggagggcctggggtggggacactgcccaggtgctgcgccgggctcagcctggtgtccgagctgcctgggcccgcaggctgaccagg

SEQ ID NO: 175922 - DNA, 31 bp, Homo sapiens; identical to SEQ ID NO: 87346
  chr14:94196048-94196079
  hypo

SEQ ID NO: 175923 - DNA, 352 bp, Homo sapiens
  chr14:94209922-94210274
  hypo
tcaaggagccgatgtcggtgaatgtgcttcccaagactccgaggttaagttcagcctttgctgtgggaaaccgaaggcagaagcacctgggctgggagttgtttctctgtcttaaaaccagtgtgggcctggtgactcggccatggggagcagaggtgaaaggagtcacagccctgcttcagggacagtctcatggcaccgctggtcctcagcgtgtgcaggggtcccctttggcaccactccctcccgcccaccaaagtgtcttgaggaaactgtccagaatgtcacggaaaagtgcaaatgcacgggactcggtgcgcgctgaaagggggcgggacgctgaaaagcactt

SEQ ID NO: 175924 - DNA, 30 bp, Homo sapiens; identical to SEQ ID NO: 27775
  chr14:94210751-94210781
  hypo

SEQ ID NO: 175925 - DNA, 30 bp, Homo sapiens; identical to SEQ ID NO: 87350
  chr14:94220184-94220214
  hypo

SEQ ID NO: 175926 - DNA, 30 bp, Homo sapiens
  chr14:94326270-94326300
  hypo
tctccaaccttcgctcggttatgccaggag

SEQ ID NO: 175927 - DNA, 30 bp, Homo sapiens
  chr14:94338486-94338516
  hypo
gacgaggtgggaagacgggacttttacaca

SEQ ID NO: 175928 - DNA, 372 bp, Homo sapiens
  chr14:94392581-94392953
  hypo
ttagcatttcccaggcggccgccctcgccttcagcctcaccttccctctggccagttggtgggcagggccaacagcggctctgggctcccttgcttgctcagagtggccctgcttgcagccccgccggcgttggcacggtgacagtagccaagtgtgcaaacttgtcccattgtccgcaggccagggggagccatggaaactggctaatatgacacaggaaaatgtttgctgatggcaattctatgggctttgtccacctctttctccatcatgacgactcgatttaagtccctaactgtttgactacaaatgcaaggggaccgtgcaacgccaaccttttgtccggctgcgctgaatgggcaattcaggct

SEQ ID NO: 175929 - DNA, 59 bp, Homo sapiens
  chr14:94393218-94393277
  hypo
aacactcaaggacagcgggaaaagcagcccgccccggcttaccccgtccgattgtctgt

SEQ ID NO: 175930 - DNA, 184 bp, Homo sapiens
  chr14:94404100-94404284
  hypo
gcgagcagagctgcacgttgcccacgtagtccaggaggacatcgatgatgggccccgcccagcggctcacctctggggcagatacgaactcacagaactgaaagagaacatgccgggaccaagaagtgagttcatcccacctgcaagagcctgcggccagggacggcagcggatgtgtccaagc

SEQ ID NO: 175931 - DNA, 225 bp, Homo sapiens
  chr14:94404859-94405084
  hypo
acaggcgtgagccaccgcgcccggccaagttctgacttttaaagtaacaacatggacgtgtcctgcctctgggtcgctggctttctgcttctgacctgaccctacaccagcctgctcttgacatgcctttccggatcgtgcttgtttcacatcgcattccaggtgtaggtttgctggaggtgacgagcctcttagtttggcagagttctccgctccatcattggt

SEQ ID NO: 175932 - DNA, 496 bp, Homo sapiens; identical to SEQ ID NO: 125129
  chr14:94405737-94406233
  hypo

SEQ ID NO: 175933 - DNA, 30 bp, Homo sapiens; identical to SEQ ID NO: 27777
  chr14:94417498-94417528
  hypo

SEQ ID NO: 175934 - DNA, 30 bp, Homo sapiens
  chr14:94560707-94560737
  hypo
aggatgacaagtggccgcctgaatttttga

SEQ ID NO: 175935 - DNA, 31 bp, Homo sapiens; identical to SEQ ID NO: 87355
  chr14:94583280-94583311
  hypo

SEQ ID NO: 175936 - DNA, 225 bp, Homo sapiens; identical to SEQ ID NO: 87356
  chr14:94603536-94603761
  hypo

SEQ ID NO: 175937 - DNA, 30 bp, Homo sapiens
  chr14:94606423-94606453
  hypo
ttgacaaaggactaacgtgctcggggtttc

SEQ ID NO: 175938 - DNA, 72 bp, Homo sapiens; identical to SEQ ID NO: 9929
  chr14:94640375-94640447
  hypo

SEQ ID NO: 175939 - DNA, 176 bp, Homo sapiens; identical to SEQ ID NO: 87358
  chr14:94829567-94829743
  hypo

SEQ ID NO: 175940 - DNA, 31 bp, Homo sapiens; identical to SEQ ID NO: 27779
  chr14:94844985-94845016
  hypo

SEQ ID NO: 175941 - DNA, 31 bp, Homo sapiens; identical to SEQ ID NO: 87360
  chr14:95109946-95109977
  hypo

SEQ ID NO: 175942 - DNA, 31 bp, Homo sapiens; identical to SEQ ID NO: 87361
  chr14:95157711-95157742
  hypo

SEQ ID NO: 175943 - DNA, 31 bp, Homo sapiens; identical to SEQ ID NO: 27780
  chr14:95200598-95200629
  hypo

SEQ ID NO: 175944 - DNA, 125 bp, Homo sapiens
  chr14:95538386-95538511
  hypo
ctccccatcctcatccgcaggggcctccacccctggatccaattagaccgcggctcagcgggtctgaggttgcgctgaaaagccatcagtaggcgaacccattaataactcgccagtgccctgcg

SEQ ID NO: 175945 - DNA, 30 bp, Homo sapiens
  chr14:95590396-95590426
  hypo
tatcagcaatgatggcgccaagtcaaggac

SEQ ID NO: 175946 - DNA, 24 bp, Homo sapiens
  chr14:95597377-95597401
  hypo
tttttttctgagatggagtctcgc

SEQ ID NO: 175947 - DNA, 30 bp, Homo sapiens
  chr14:95664800-95664830
  hypo
gtaccctccccctacgctcacccacacgga

SEQ ID NO: 175948 - DNA, 30 bp, Homo sapiens
  chr14:95693195-95693225
  hypo
gtgagccaccatgaccggccgaaacccgat

SEQ ID NO: 175949 - DNA, 149 bp, Homo sapiens
  chr14:95693649-95693798
  hypo
cacagaaaagggcttcgcttcaagggcaacagcgactttgaaccaaaaggcaaattattttctttgcaaactgccgcagctccttgggcaccttccaccctgagcatgacgggatcaggttactgaggctcttacggaaatgttattcc

SEQ ID NO: 175950 - DNA, 43 bp, Homo sapiens
  chr14:95701033-95701076
  hypo
gaggcctggccctggctcagccgcaccagcccaaattcctagg

SEQ ID NO: 175951 - DNA, 30 bp, Homo sapiens
  chr14:95722531-95722561
  hypo
acgggcacacccaaccgaggcccgccaccc

SEQ ID NO: 175952 - DNA, 337 bp, Homo sapiens
  chr14:95740080-95740417
  hypo
aaagcctgccctctgcccttccgtgcctgagtgtctccactttgttgacacactttaggtcaacaataaaagccacacactcttaaggcctccctgcttcccaaagccaatcctatagataaaccgatcgtacatgaacctcatgaacctcattcagacctacgacacgctcctcccagccagtccagcctgcacttggaaactcacaacgctgggtcacgctcaactcagctgtctgattctgaacctggcatccccttcggttattaaacaaagaacgggtcctttaccgatgtagttctcagtgtcattacccgggttctggcttatcaatagg

SEQ ID NO: 175953 - DNA, 37 bp, Homo sapiens; identical to SEQ ID NO: 9935
  chr14:95864477-95864514
  hypo

SEQ ID NO: 175954 - DNA, 149 bp, Homo sapiens
  chr14:95880711-95880860
  hypo
gggctcaagcacccacgagcaccaaacgagcacattctttgtctcccttgtcggtgttccctctgtcccgccaccactgggcacctcccagggtctcctcgcctcgtctgctgtcagtacctgcccatccctcccgctcccagcttttc

SEQ ID NO: 175955 - DNA, 514 bp, Homo sapiens
  chr14:95905971-95906485
  hypo
cctcaaggcccgccacgactctgccagctccctgagctcctcctgcaccacggcagcaccctccggagaagacttctccatcaccagccagccctgcgcttccaccagggacagctgggcctccttctccgggaattctgccaccagcctctaaaggacacacggacacacagacacacacacggtgagggtggagggaggtttctgctccttggtgtgggaacgttggcctgtcaaggctgcttctttgggaagtgggtgagggaaccaccgccttacctcaaactcggcctcttgggactcggcatcccccgggcccgcctctccccggtgtgcctccagcttttgcgtggtcacaacgatccactgccgcagctccagcagctggtggctgaaggtgcagtgctcctgcacactctgccgacacctgtccacaaggtcctgcagcacagcccggggagcccagggcatcctgagtgctggccgagggggagacccccgcaccacccccacc

SEQ ID NO: 175956 - DNA, 275 bp, Homo sapiens; identical to SEQ ID NO: 125154
  chr14:95932314-95932589
  hypo

SEQ ID NO: 175957 - DNA, 31 bp, Homo sapiens; identical to SEQ ID NO: 9936
  chr14:95932616-95932647
  hypo

SEQ ID NO: 175958 - DNA, 30 bp, Homo sapiens; identical to SEQ ID NO: 87366
  chr14:95942760-95942790
  hypo

SEQ ID NO: 175959 - DNA, 30 bp, Homo sapiens
  chr14:95944425-95944455
  hypo
tgaaacccagggacccggtggggttgagca

SEQ ID NO: 175960 - DNA, 30 bp, Homo sapiens
  chr14:95951799-95951829
  hypo
gtaaactgagagagtcggctgctccccgac

SEQ ID NO: 175961 - DNA, 30 bp, Homo sapiens; identical to SEQ ID NO: 125157
  chr14:95983260-95983290
  hypo

SEQ ID NO: 175962 - DNA, 30 bp, Homo sapiens; identical to SEQ ID NO: 87367
  chr14:96010482-96010512
  hypo

SEQ ID NO: 175963 - DNA, 30 bp, Homo sapiens
  chr14:96014448-96014478
  hypo
ctggacttggtaccgcgctgtggtatccac

SEQ ID NO: 175964 - DNA, 36 bp, Homo sapiens; identical to SEQ ID NO: 27783
  chr14:96015606-96015642
  hypo

SEQ ID NO: 175965 - DNA, 31 bp, Homo sapiens; identical to SEQ ID NO: 87369
  chr14:96022242-96022273
  hypo

SEQ ID NO: 175966 - DNA, 98 bp, Homo sapiens
  chr14:96054925-96055023
  hypo
actgaactggaactgcgtggcgcggaggtgggcatcagaaagcccgggaagggggaatctggctggcatcatcacacaaaggacgaccgagtcaccga

SEQ ID NO: 175967 - DNA, 30 bp, Homo sapiens
  chr14:96128247-96128277
  hypo
aggcgtaagccaccgcgtccggccacatta

SEQ ID NO: 175968 - DNA, 30 bp, Homo sapiens; identical to SEQ ID NO: 87370
  chr14:96152513-96152543
  hypo

SEQ ID NO: 175969 - DNA, 296 bp, Homo sapiens; identical to SEQ ID NO: 51650
  chr14:96152750-96153046
  hypo

SEQ ID NO: 175970 - DNA, 100 bp, Homo sapiens; identical to SEQ ID NO: 125161
  chr14:96342209-96342309
  hypo

SEQ ID NO: 175971 - DNA, 100 bp, Homo sapiens; identical to SEQ ID NO: 125162
  chr14:96342530-96342630
  hypo

SEQ ID NO: 175972 - DNA, 363 bp, Homo sapiens; identical to SEQ ID NO: 9939
  chr14:96342879-96343242
  hypo

SEQ ID NO: 175973 - DNA, 30 bp, Homo sapiens
  chr14:96358749-96358779
  hypo
gcacattgtgtgttccggggagccgggcca

SEQ ID NO: 175974 - DNA, 31 bp, Homo sapiens; identical to SEQ ID NO: 51654
  chr14:96499773-96499804
  hypo

SEQ ID NO: 175975 - DNA, 1208 bp, Homo sapiens; identical to SEQ ID NO: 125167
  chr14:96505312-96506520
  hypo

SEQ ID NO: 175976 - DNA, 81 bp, Homo sapiens; identical to SEQ ID NO: 87376
  chr14:96547951-96548032
  hypo

SEQ ID NO: 175977 - DNA, 296 bp, Homo sapiens
  chr14:96552857-96553153
  hypo
tggggggagctttcatggactcgcccaacgaggacttcagcaccgagtactccctgtttaactcctctgccaatgtccacgcggctgccaatggccagggccagccggaagatcctcctcggtcctccaacgacgccgtcttgctatggattgccatcatagctacgctggggaacatcgtggtggtgggcgtggtgtatgccttcaccttctgaggacggcacaccctgcaccaccatggggtgaggcttggcacgtagctctgacttgctgtcggcctttggcttctcctgtgt

SEQ ID NO: 175978 - DNA, 203 bp, Homo sapiens; identical to SEQ ID NO: 87377
  chr14:96653270-96653473
  hypo

SEQ ID NO: 175979 - DNA, 31 bp, Homo sapiens; identical to SEQ ID NO: 27790
  chr14:96694176-96694207
  hypo

SEQ ID NO: 175980 - DNA, 490 bp, Homo sapiens
  chr14:96730193-96730683
  hypo
ctgttggtcttcctcctgccccggcggcaactgaacgtggcagaaatctacctggccaacctggcagcctctgatctggtgtttgtcttgggcttgcccttctgggcagagaatatctggaaccagtttaactggcctttcggagccctcctctgccgtgtcatcaacggggtcatcaaggccaatttgttcatcagcatcttcctggtggtggccatcagccaggaccgctaccgcgtgctggtgcaccctatggccagccggaggcagcagcggcggaggcaggcccgggtcacctgcgtgctcatctgggttgtggggggcctcttgagcatccccacattcctgctgcgatccatccaagccgtcccagatctgaacatcaccgcctgcatcctgctcctcccccatgaggcctggcactttgcaaggattgtggagttaaatattctgggtttcctcctaccactggctgcgatcgtcttcttca

SEQ ID NO: 175981 - DNA, 187 bp, Homo sapiens; identical to SEQ ID NO: 87380
  chr14:96745876-96746063
  hypo

SEQ ID NO: 175982 - DNA, 30 bp, Homo sapiens
  chr14:96785393-96785423
  hypo
gcctggtgtgaataccggtcaaggcgccgc

SEQ ID NO: 175983 - DNA, 38 bp, Homo sapiens; identical to SEQ ID NO: 87381
  chr14:96822199-96822237
  hypo

SEQ ID NO: 175984 - DNA, 79 bp, Homo sapiens
  chr14:96831095-96831174
  hypo
gaacagtgtcaagaatcaggccgaaccttcaaggagtttatgttctaaaacggaagcatggtggtacctgcttgtggag

SEQ ID NO: 175985 - DNA, 142 bp, Homo sapiens
  chr14:96911951-96912093
  hypo
acaccactgcctgccagcctgggcaacagagcgagactcaaaataaataaataaatgagtgaataaataaataaatatagaaaaaaagaaatgaatacaaaataaatgtgaactgcacatttggaagcgtgcattcgattta

SEQ ID NO: 175986 - DNA, 37 bp, Homo sapiens
  chr14:96912989-96913026
  hypo
tttgctggctgggcgcggtggctcatgcctgtaatcc

SEQ ID NO: 175987 - DNA, 20 bp, Homo sapiens
  chr14:96923681-96923701
  hypo
gccaccgtgccaagcctgaa

SEQ ID NO: 175988 - DNA, 22 bp, Homo sapiens
  chr14:96939127-96939149
  hypo
tgttctctgggctgggcgtggt

SEQ ID NO: 175989 - DNA, 83 bp, Homo sapiens
  chr14:96970709-96970792
  hypo
atttcaaattcttcgcgagttagttcaagtgtgtaaaatggaagacggggccaggcgcggtggttcacgcctgtaatcccagc

SEQ ID NO: 175990 - DNA, 26 bp, Homo sapiens
  chr14:96980797-96980823
  hypo
gtgtgccaccacgcccagcctatttg

SEQ ID NO: 175991 - DNA, 30 bp, Homo sapiens
  chr14:97002280-97002310
  hypo
cacgtacaatgtgtccgtttcaacacggat

SEQ ID NO: 175992 - DNA, 30 bp, Homo sapiens
  chr14:97043830-97043860
  hypo
attggagacttgtaccgttgcatacttgct

SEQ ID NO: 175993 - DNA, 30 bp, Homo sapiens
  chr14:97044175-97044205
  hypo
gcgggtgcgagggaacgatatgtcacaagc

SEQ ID NO: 175994 - DNA, 30 bp, Homo sapiens
  chr14:97044919-97044949
  hypo
acctggcccctgcgtcgtcaagaagcaccg

SEQ ID NO: 175995 - DNA, 78 bp, Homo sapiens; identical to SEQ ID NO: 87386
  chr14:97045353-97045431
  hypo

SEQ ID NO: 175996 - DNA, 30 bp, Homo sapiens; identical to SEQ ID NO: 125175
  chr14:97050255-97050285
  hypo

SEQ ID NO: 175997 - DNA, 93 bp, Homo sapiens
  chr14:97128736-97128829
  hypo
gttggtccctggaggcgggctgctgccccatttgggagaggacagtgcactccttgcacaacctttcaagtacgggcgcgtcagagcaacagc

SEQ ID NO: 175998 - DNA, 30 bp, Homo sapiens
  chr14:97129988-97130018
  hypo
caccacgggacagcgcggcaccccactgga

SEQ ID NO: 175999 - DNA, 41 bp, Homo sapiens; identical to SEQ ID NO: 27793
  chr14:97262845-97262886
  hypo

SEQ ID NO: 176000 - DNA, 38 bp, Homo sapiens; identical to SEQ ID NO: 27794
  chr14:97338412-97338450
  hypo

SEQ ID NO: 176001 - DNA, 141 bp, Homo sapiens
  chr14:97361313-97361454
  hypo
gctagatgaaaagaccggcagaactatttgcctgctaatttgtttccgttttcttcaaaggaaaatacttccttaagggatgctcacagctctcttgagctttgagcatgtcaggaggatagttaacgcagttcagaagaa

SEQ ID NO: 176002 - DNA, 30 bp, Homo sapiens
  chr14:97361901-97361931
  hypo
ccactctgctgtgggcgctcagtccttatt

SEQ ID NO: 176003 - DNA, 43 bp, Homo sapiens; identical to SEQ ID NO: 87389
  chr14:97389551-97389594
  hypo

SEQ ID NO: 176004 - DNA, 92 bp, Homo sapiens; identical to SEQ ID NO: 87390
  chr14:97404571-97404663
  hypo

SEQ ID NO: 176005 - DNA, 30 bp, Homo sapiens; identical to SEQ ID NO: 87391
  chr14:97410219-97410249
  hypo

SEQ ID NO: 176006 - DNA, 30 bp, Homo sapiens; identical to SEQ ID NO: 87392
  chr14:97410525-97410555
  hypo

SEQ ID NO: 176007 - DNA, 30 bp, Homo sapiens
  chr14:97411067-97411097
  hypo
agtcacattcgctggcgctgggagttagga

SEQ ID NO: 176008 - DNA, 30 bp, Homo sapiens
  chr14:97411595-97411625
  hypo
atcgaagccacccagcgtcagagcttggac

SEQ ID NO: 176009 - DNA, 27 bp, Homo sapiens
  chr14:97419092-97419119
  hypo
ataaaagacaagcaggccaggcgtggt

SEQ ID NO: 176010 - DNA, 30 bp, Homo sapiens
  chr14:97431248-97431278
  hypo
tagttagtggaagacgttatgacactccag

SEQ ID NO: 176011 - DNA, 31 bp, Homo sapiens; identical to SEQ ID NO: 27795
  chr14:97513199-97513230
  hypo

SEQ ID NO: 176012 - DNA, 83 bp, Homo sapiens
  chr14:97524123-97524206
  hypo
agacaaaaggaggcacgaagctgccggagctactcagctttacctctaggaaagatacagcgaatcaccgccaataaaacaaa

SEQ ID NO: 176013 - DNA, 34 bp, Homo sapiens
  chr14:97589659-97589693
  hypo
aaataagtggaacctcgtgcggatgatgtatgaa

SEQ ID NO: 176014 - DNA, 621 bp, Homo sapiens; identical to SEQ ID NO: 125185
  chr14:97685395-97686016
  hypo

SEQ ID NO: 176015 - DNA, 30 bp, Homo sapiens; identical to SEQ ID NO: 51663
  chr14:98978313-98978343
  hypo

SEQ ID NO: 176016 - DNA, 30 bp, Homo sapiens; identical to SEQ ID NO: 51664
  chr14:99325155-99325185
  hypo

SEQ ID NO: 176017 - DNA, 30 bp, Homo sapiens; identical to SEQ ID NO: 87398
  chr14:99355835-99355865
  hypo

SEQ ID NO: 176018 - DNA, 30 bp, Homo sapiens; identical to SEQ ID NO: 87399
  chr14:99437415-99437445
  hypo

SEQ ID NO: 176019 - DNA, 30 bp, Homo sapiens
  chr14:99474383-99474413
  hypo
aaattcacacatgcacgcacacacattcac

SEQ ID NO: 176020 - DNA, 30 bp, Homo sapiens
  chr14:99474845-99474875
  hypo
aagggctagttggggcgacagtgtttgctc

SEQ ID NO: 176021 - DNA, 215 bp, Homo sapiens
  chr14:99509011-99509226
  hypo
gacgagcctgccaggcggaggggaggagggtggcccagggtgagggtgcagacccaagtgaggttcagcagtcccaccaggctccatcaggagccagcgcccccccccccccacagtaaaggagcacacccgaggatctgccgctcccgccacaggcccgaggggttgttcaaacccagaccaggtctgttcagccttgacgcctccccataagc

SEQ ID NO: 176022 - DNA, 30 bp, Homo sapiens
  chr14:99529669-99529699
  hypo
accaaaagtgcaagacgctaaaaaatattc

SEQ ID NO: 176023 - DNA, 118 bp, Homo sapiens; identical to SEQ ID NO: 27797
  chr14:99651821-99651939
  hypo

SEQ ID NO: 176024 - DNA, 331 bp, Homo sapiens; identical to SEQ ID NO: 87401
  chr14:99655544-99655875
  hypo

SEQ ID NO: 176025 - DNA, 30 bp, Homo sapiens; identical to SEQ ID NO: 51665
  chr14:99656310-99656340
  hypo

SEQ ID NO: 176026 - DNA, 30 bp, Homo sapiens
  chr14:99657175-99657205
  hypo
caactcctacaggtgcgactgtgacagaca

SEQ ID NO: 176027 - DNA, 98 bp, Homo sapiens
  chr14:99681713-99681811
  hypo
ccctgccaaagaaaacgcaagcttgcttattttctccatggggcgcaacagtgcctatgtgtgccggcagagaatcggctggccgtgaaaagaattct

SEQ ID NO: 176028 - DNA, 78 bp, Homo sapiens
  chr14:99707130-99707208
  hypo
ttgttagcacattaacgctaggaatattgctccttacgattcatctagccacgcgcgagacgccgctgtaacagaggt

SEQ ID NO: 176029 - DNA, 18 bp, Homo sapiens
  chr14:99716739-99716757
  hypo
gggcgacagcgagactct

SEQ ID NO: 176030 - DNA, 30 bp, Homo sapiens
  chr14:99723888-99723918
  hypo
cgatctccaccggctcggacactttcctga

SEQ ID NO: 176031 - DNA, 30 bp, Homo sapiens
  chr14:99724372-99724402
  hypo
ctctaggagcaacgtcgtgccccctgggca

SEQ ID NO: 176032 - DNA, 72 bp, Homo sapiens
  chr14:99725775-99725847
  hypo
tacgacgatgtaagacgtacaacgcgcacgtatgaactatgtgtgaataggtagcgacgtaggtatcgctga

SEQ ID NO: 176033 - DNA, 31 bp, Homo sapiens; identical to SEQ ID NO: 87405
  chr14:99785811-99785842
  hypo

SEQ ID NO: 176034 - DNA, 30 bp, Homo sapiens; identical to SEQ ID NO: 51670
  chr14:99787653-99787683
  hypo

SEQ ID NO: 176035 - DNA, 224 bp, Homo sapiens
  chr14:99810716-99810940
  hypo
agctctggatgatggcgaggagaagggagaagggactgatccactttaccgttacctcttccaccaagcaacagggtgcttgaagagtcagccctcatccagatggtcggactttctgcgctagctaagtctgaatgaatgaggtttacatttctactcagtcactcatcaacaacgtgccggtcaaacacaatcccctgagcagtgcccgcgaaccattcttt

SEQ ID NO: 176036 - DNA, 606 bp, Homo sapiens
  chr14:99849764-99850370
  hypo
cgaaggcaggggaagggacgacgcatttggaggaagcaccatccgagccacaccccgcacagaaaaaggacccaggcccacggcaaggcgcttcttggtcctttcggaagggccgctcctaaaccaccagggctgatccgctgcttgggtggagcacaggcgggaagccctgccccgtctctttgtgagctgtgggtgcgcttggcgagtcacaagcctctctgggcccagttctttctatggaagtcatgggttgcagtgttgttgagggagccggtggtgcacgtggtgaagacctggctctgtagccggccagctgggtccccgtcacacactcacacgtgcacacatgcatgcatgcacacatcctcacacacattcatacgtgtgctctcacgctcacatgcacacattcacacacacgttcacacacccatgcgctcacatgcccatgcacgcacacgtttgcacatgtacgcgcacacacactaaacccgttgggcctcagcttactcatctgtcaagcggagaccatggcagtggctccgacaggtgcttggcacatggtaaatgcccaatacatacgacagcacttggaaatttgtc

SEQ ID NO: 176037 - DNA, 30 bp, Homo sapiens; identical to SEQ ID NO: 87408
  chr14:99861095-99861125
  hypo

SEQ ID NO: 176038 - DNA, 30 bp, Homo sapiens; identical to SEQ ID NO: 87409
  chr14:99864937-99864967
  hypo

SEQ ID NO: 176039 - DNA, 210 bp, Homo sapiens; identical to SEQ ID NO: 87410
  chr14:99880378-99880588
  hypo

SEQ ID NO: 176040 - DNA, 179 bp, Homo sapiens; identical to SEQ ID NO: 87411
  chr14:99889213-99889392
  hypo

SEQ ID NO: 176041 - DNA, 30 bp, Homo sapiens; identical to SEQ ID NO: 27801
  chr14:99891614-99891644
  hypo

SEQ ID NO: 176042 - DNA, 206 bp, Homo sapiens
  chr14:99893209-99893415
  hypo
acctcgctcggccaacgagggcagaggccttgcctttcatatttacctactccccaccttctgcctcccccacactgcatgccccacatgctgcaatcagtaactcaggtggggacgcagggagaagcaggcggtgatgtcagggttttacttggcaggcaagagagcgtggggggcagctggggagcatccggagcgcctcctgt

SEQ ID NO: 176043 - DNA, 30 bp, Homo sapiens
  chr14:99894085-99894115
  hypo
cttttaaggagccaacgactttggagcagg

SEQ ID NO: 176044 - DNA, 151 bp, Homo sapiens; identical to SEQ ID NO: 87414
  chr14:99902510-99902661
  hypo

SEQ ID NO: 176045 - DNA, 226 bp, Homo sapiens
  chr14:99931508-99931734
  hypo
caccaaaaagaaaggcgagccattccagtgaggggcagagctctgaaggccaggtctccaagaggcacgctggactcccctgggccaacagcccgtgaagtaccttcacacaccacatctcacaaggcccttggctcattccctgagacagttattatctatgtttacgacaagaacactgagtttcggaagggttcagtaatctgccgagcggcacactgtgaaa

SEQ ID NO: 176046 - DNA, 297 bp, Homo sapiens
  chr14:99932716-99933013
  hypo
agctgatggcagacccgggacttgaacgaggtctcccgtcgcgttccagtgtgccacacacgggtcctctgcgggcatgtgagaaatgatgagcatattttcacacgcagatgagaccatgtggtataggacacgccatggtgtcctgggtaaagaccctatgagataatgcttgcttgcaagtgcttttaacaataggtctcaaagaaagtaagggacatggatgtgtgaagaatggcgggggggggggggggcattcaaagacagggacaggactagaagcgtgagggaagcaca

SEQ ID NO: 176047 - DNA, 568 bp, Homo sapiens
  chr14:99969302-99969870
  hypo
acaggttaagcgagccgtggtgagtgggctaaagcaggccctgggtagagcaggctttccaggtggcggcaacacctgagcactgttcccatttctaagcgagcacagggaacaccggaagcagggggtgttcgccgaaactcgcagtccgactgcttgtcggtggggagcctgaaaacaaaggtgctccaaggacaggctgcctctgagaaccaggagggggctctctgcccggctccagccctgctgcctgtttcatccctgccagggttctgaagcctgtcggtgtcgttgccgtgtcctagcagtgtcgttgtgcatgctgcttctgtgcagctgcctgaccccaaacagtggaccgtttcctgcacccaagtggtcctgaaacttagtgtttactcagaactcaccattcaggaaagctagtcattctgtcttatttggtaaatggaaagaggaagggagcagaaatgatgatctggtaggtgccgtggtttgccctgaaagttcaggctagaaataatttttgtccgaggctgttcacagtgactgccgtcgctgattctgg

SEQ ID NO: 176048 - DNA, 101 bp, Homo sapiens; identical to SEQ ID NO: 27803
  chr14:99975811-99975912
  hypo

SEQ ID NO: 176049 - DNA, 62 bp, Homo sapiens; identical to SEQ ID NO: 27804
  chr14:99976342-99976404
  hypo

SEQ ID NO: 176050 - DNA, 82 bp, Homo sapiens
  chr14:99978204-99978286
  hypo
cagctggaggagcagcggcctcactgtccaccttgaggggccacggctctgtctgtggaaggggccccgactgagcccccat

SEQ ID NO: 176051 - DNA, 30 bp, Homo sapiens
  chr14:99978561-99978591
  hypo
cccagctctaaacggcgccagggcaggaag

SEQ ID NO: 176052 - DNA, 31 bp, Homo sapiens; identical to SEQ ID NO: 87418
  chr14:99987054-99987085
  hypo

SEQ ID NO: 176053 - DNA, 1691 bp, Homo sapiens; identical to SEQ ID NO: 51671
  chr14:100069898-100071589
  hypo

SEQ ID NO: 176054 - DNA, 30 bp, Homo sapiens; identical to SEQ ID NO: 51672
  chr14:100097094-100097124
  hypo

SEQ ID NO: 176055 - DNA, 31 bp, Homo sapiens; identical to SEQ ID NO: 87421
  chr14:100104269-100104300
  hypo

SEQ ID NO: 176056 - DNA, 178 bp, Homo sapiens; identical to SEQ ID NO: 87422
  chr14:100118138-100118316
  hypo

SEQ ID NO: 176057 - DNA, 30 bp, Homo sapiens; identical to SEQ ID NO: 87423
  chr14:100118959-100118989
  hypo

SEQ ID NO: 176058 - DNA, 121 bp, Homo sapiens
  chr14:100148280-100148401
  hypo
cacgcagacagcccgccccaagggaagaatcaggggcgaagagagatgcaaccccccgggagcatgccaacctacaaaaccccgagtcaaaggtcaagccacacacttgcctctctcaagt

SEQ ID NO: 176059 - DNA, 30 bp, Homo sapiens; identical to SEQ ID NO: 51675
  chr14:100149398-100149428
  hypo

SEQ ID NO: 176060 - DNA, 1116 bp, Homo sapiens; identical to SEQ ID NO: 51676
  chr14:100149731-100150847
  hypo

SEQ ID NO: 176061 - DNA, 30 bp, Homo sapiens
  chr14:100198953-100198983
  hypo
gggctgggcccctgccgtgtggcatgcgtt

SEQ ID NO: 176062 - DNA, 31 bp, Homo sapiens; identical to SEQ ID NO: 87426
  chr14:100268030-100268061
  hypo

SEQ ID NO: 176063 - DNA, 30 bp, Homo sapiens; identical to SEQ ID NO: 9955
  chr14:100371996-100372026
  hypo

SEQ ID NO: 176064 - DNA, 271 bp, Homo sapiens
  chr14:100402446-100402717
  hypo
gagtgggcaagtgctcggtaagcgctgacagtggacctgtcgcttctcatgcactgcgtatagtttaactaccgtggaacagtgttggcagggacttctaaggccaatgaaatgaagacagtgttttaccctcccagggtcattccagcttcattactcacctggactggtctgtaaactcacagttcctcgtgtcaaattccggagactacgaaatcctctactgtgagtaccaccccggggttgtatgaagtctcgatctcagaaagcg

SEQ ID NO: 176065 - DNA, 30 bp, Homo sapiens; identical to SEQ ID NO: 27810
  chr14:100434919-100434949
  hypo

SEQ ID NO: 176066 - DNA, 163 bp, Homo sapiens; identical to SEQ ID NO: 125206
  chr14:100437166-100437329
  hypo

SEQ ID NO: 176067 - DNA, 544 bp, Homo sapiens; identical to SEQ ID NO: 9956
  chr14:100437405-100437949
  hypo

SEQ ID NO: 176068 - DNA, 1009 bp, Homo sapiens; identical to SEQ ID NO: 51680
  chr14:100438017-100439026
  hypo

SEQ ID NO: 176069 - DNA, 30 bp, Homo sapiens; identical to SEQ ID NO: 27813
  chr14:100485479-100485509
  hypo

SEQ ID NO: 176070 - DNA, 30 bp, Homo sapiens; identical to SEQ ID NO: 27814
  chr14:100504751-100504781
  hypo

SEQ ID NO: 176071 - DNA, 30 bp, Homo sapiens
  chr14:100543918-100543948
  hypo
gaggagacgtgaaagcgaatggtcctcaaa

SEQ ID NO: 176072 - DNA, 184 bp, Homo sapiens
  chr14:100551050-100551234
  hypo
ttccgtgatggtctacgatgacaccagtaagaaatgggtaccaatcaaacctggccagcagggattcagccggatcaacatctaccacaacactgccagcaacaccttcagagtcgttggagtcaagttgcaggatcagcaggtcagtgctggaattacagattatacccgtgagcctgcgcac

SEQ ID NO: 176073 - DNA, 63 bp, Homo sapiens; identical to SEQ ID NO: 87434
  chr14:100587317-100587380
  hypo

SEQ ID NO: 176074 - DNA, 231 bp, Homo sapiens
  chr14:100591083-100591314
  hypo
gtacttcatttctctcgaaactgcttcatcacccgcagtgctgaattctgtaccccagggcccaatccaagctgtgtggggtcactggccgtccgggaatgggcataccgcctggcggtcggggtgtgaacagcaggggacacacacacaagcacatacacttgtcccaaggcaggaccacacacatagctgcccccagacgagaccacgtacggacggacacacacacct

SEQ ID NO: 176075 - DNA, 246 bp, Homo sapiens
  chr14:100599147-100599393
  hypo
ccccactgagatgagcgcatcgccagggaggctctctggtctcaggcgaggcctttgggacatgcgtgggatgggcgcttcatcaggtgattcacaggaggggcggagggtctctgcggtgcttgtccctgcgccaccctggccccagcagcaggcctgccctcactgagcaccccctaccagacactgctccacccttggagctgcagcctgaggcgctggccgctgcaccgcagggctacctcg

SEQ ID NO: 176076 - DNA, 30 bp, Homo sapiens
  chr14:100600354-100600384
  hypo
gccccggtcttctcccgaggccctctgcac

SEQ ID NO: 176077 - DNA, 186 bp, Homo sapiens; identical to SEQ ID NO: 125209
  chr14:100613201-100613387
  hypo

SEQ ID NO: 176078 - DNA, 398 bp, Homo sapiens; identical to SEQ ID NO: 87437
  chr14:100615562-100615960
  hypo

SEQ ID NO: 176079 - DNA, 875 bp, Homo sapiens; identical to SEQ ID NO: 51682
  chr14:100625298-100626173
  hypo

SEQ ID NO: 176080 - DNA, 64 bp, Homo sapiens; identical to SEQ ID NO: 125211
  chr14:100626295-100626359
  hypo

SEQ ID NO: 176081 - DNA, 22 bp, Homo sapiens
  chr14:100637036-100637058
  hypo
gccaccgcgcccggcccaaagg

SEQ ID NO: 176082 - DNA, 218 bp, Homo sapiens
  chr14:100643285-100643503
  hypo
ggcaccgagtccctacggtgggaccatgcccgcagcggcagtgtggaagatgggacagacacagcgaaatgcctccagggcgtggtgggaggggccggaacagggagatggcgcgtgagtagcatctgttcttacagcaaaacctgtaaaagtaaaatatacgtaggtttgtcactaaagacgtgtctgcataaatacacccacgccgaagactgttc

SEQ ID NO: 176083 - DNA, 502 bp, Homo sapiens; identical to SEQ ID NO: 87440
  chr14:100644134-100644636
  hypo

SEQ ID NO: 176084 - DNA, 229 bp, Homo sapiens
  chr14:100681485-100681714
  hypo
tacgcctttttaaagcggagaagagaagaaatgctctcatccattagcagtgggattctgggtgattaaaactcgtttttcagtgctcacctgtcgagtgaaagctgtcttatttccactcactggagagctctggagactggaagctgtgagtcttggttactgatgtattccagctccatatggtgcctggtgcttcgtatgttttgttgaccgaataagcaagtaa

SEQ ID NO: 176085 - DNA, 207 bp, Homo sapiens
  chr14:100684859-100685066
  hypo
tgatgatggcctgactgatggcgtcttcagtgagcgaggtcctgcaggacagcacgtgggaggccctgcctggtcctgccgtggcctgctccacaggcttcagtctccccaccctggtcctgggcgcacccagtgagctcctgtaaactattataaaagcccacgtggaagctggcagaaatgggccctttttgttgtgactttgtt

SEQ ID NO: 176086 - DNA, 20 bp, Homo sapiens
  chr14:100720797-100720817
  hypo
tcttttcttttcttttcgac

SEQ ID NO: 176087 - DNA, 31 bp, Homo sapiens; identical to SEQ ID NO: 27822
  chr14:100725479-100725510
  hypo

SEQ ID NO: 176088 - DNA, 31 bp, Homo sapiens; identical to SEQ ID NO: 27823
  chr14:100731699-100731730
  hypo

SEQ ID NO: 176089 - DNA, 264 bp, Homo sapiens
  chr14:100747006-100747270
  hypo
accctttcacaggatagtgtgcgcaatacctgtccgtgtttccaagcagagttcaagttcatgtcttcacaagtagatgagagtcacttccagtcgggggaagcccgcctgagcagtgttttgagagtgcgtacattggaggactgccccacgtccgtttgcactctgccttgcaaaacttactgtggagacgtgtcccagactggtctcagaccagagtttgtggcacaggaaaacctggccccctaaaaagaagttttggaa

SEQ ID NO: 176090 - DNA, 23 bp, Homo sapiens
  chr14:100747389-100747412
  hypo
ccgtctcccaaaaaaaaaaaaaa

SEQ ID NO: 176091 - DNA, 98 bp, Homo sapiens
  chr14:100747813-100747911
  hypo
tgacagtaatgtgagcgcagcacttcagagttcaggcccagcaggtcctggcaagtgcattccacccgaacttttaacccaagcggtggggaaggaag

SEQ ID NO: 176092 - DNA, 250 bp, Homo sapiens
  chr14:100748314-100748564
  hypo
atgggcagcatgtacttgacacgttatcacccagtccccttgtaaaatctggaatggagcgtttaagctgagcgttagcatcaggtcagcaggcaaagcaaacctcccacaaactgggtgccgtaaggtgggaggtgacacatggagagcttcgtcctggccgagcaggcacccagccccatgtcccccgccagcattctggatgtcagaggagggtgcgtgtgatggcgtcacattcatctgaagcaca

SEQ ID NO: 176093 - DNA, 30 bp, Homo sapiens
  chr14:100748785-100748815
  hypo
tacattgtccatacccggacatgtgaggct

SEQ ID NO: 176094 - DNA, 387 bp, Homo sapiens
  chr14:100749239-100749626
  hypo
ccggggcagttcttgcggcttgctttctcacacacaggactgggaactcccaggatttggtctcacaccagcaagaaatgcttctgtaacctttcagctccaaggtgggctcaggagcaagagggcgttttaaagagagcctcacccactgttcagaaagcacagcccagtgaaatgcccacgcagccggacctatgagcccatgtcagccctggaagctccggagctaactgggatggactcggaagaacttgaccaaatacactgagagctacttaggatttagccaaaagcaaaatgcagagcagagcttcctccctctggttggggccttggtgtctgatgttctgcagagcaaggttcagagtgaggcgtgaagttcattat

SEQ ID NO: 176095 - DNA, 209 bp, Homo sapiens; identical to SEQ ID NO: 125218
  chr14:100751378-100751587
  hypo

SEQ ID NO: 176096 - DNA, 35 bp, Homo sapiens; identical to SEQ ID NO: 27825
  chr14:100754245-100754280
  hypo

SEQ ID NO: 176097 - DNA, 30 bp, Homo sapiens; identical to SEQ ID NO: 27826
  chr14:100757483-100757513
  hypo

SEQ ID NO: 176098 - DNA, 104 bp, Homo sapiens; identical to SEQ ID NO: 87454
  chr14:100758849-100758953
  hypo

SEQ ID NO: 176099 - DNA, 30 bp, Homo sapiens; identical to SEQ ID NO: 87455
  chr14:100759295-100759325
  hypo

SEQ ID NO: 176100 - DNA, 403 bp, Homo sapiens; identical to SEQ ID NO: 125220
  chr14:100771907-100772310
  hypo

SEQ ID NO: 176101 - DNA, 371 bp, Homo sapiens; identical to SEQ ID NO: 51689
  chr14:100773261-100773632
  hypo

SEQ ID NO: 176102 - DNA, 245 bp, Homo sapiens; identical to SEQ ID NO: 87458
  chr14:100795241-100795486
  hypo

SEQ ID NO: 176103 - DNA, 146 bp, Homo sapiens
  chr14:100795806-100795952
  hypo
gccagaggcgctaccggggtctcctgcactgtatggtgaccagcgttcgagaggagggaccccgggtccttttcaaggggctggtactcaattgctgccgcgccttccctgtcaacatggtggtcttcgtcgcctatgaggcagtg

SEQ ID NO: 176104 - DNA, 42 bp, Homo sapiens; identical to SEQ ID NO: 87459
  chr14:100812220-100812262
  hypo

SEQ ID NO: 176105 - DNA, 35 bp, Homo sapiens; identical to SEQ ID NO: 87460
  chr14:100843921-100843956
  hypo

SEQ ID NO: 176106 - DNA, 199 bp, Homo sapiens; identical to SEQ ID NO: 87461
  chr14:100847789-100847988
  hypo

SEQ ID NO: 176107 - DNA, 30 bp, Homo sapiens; identical to SEQ ID NO: 27829
  chr14:100890348-100890378
  hypo

SEQ ID NO: 176108 - DNA, 127 bp, Homo sapiens
  chr14:100910094-100910221
  hypo
taattgggagcgctccgggctgatgtgaaatgagcgcatttggaaggcatgaggaatatgtactgagtgattggagcatgagtaataataattgctgtcgtttagtgccgggcgctggctaggtgct

SEQ ID NO: 176109 - DNA, 162 bp, Homo sapiens
  chr14:100937836-100937998
  hypo
cttgtcctttctcttcgctgagtctgatctccctttctactggatctgcctttttccgcccttggtgatttggctttttcatttcaatctaattagggctccctgccaggagaaggcagtgcagggcgttctcaccgcagcgctttgggaattagtcacttg

SEQ ID NO: 176110 - DNA, 30 bp, Homo sapiens
  chr14:100938332-100938362
  hypo
gtcagctgtgccacacgccagctcagccag

SEQ ID NO: 176111 - DNA, 68 bp, Homo sapiens
  chr14:100940877-100940945
  hypo
actctggagcccaaacgtgtttacggcatgtctgctattggaatggcgagttccgagtttcagaaaac

SEQ ID NO: 176112 - DNA, 30 bp, Homo sapiens
  chr14:100942894-100942924
  hypo
acgaataactggcggcgatgcaaggtaggg

SEQ ID NO: 176113 - DNA, 30 bp, Homo sapiens
  chr14:100964177-100964207
  hypo
gctgcttccacagctcgatagcctgggttg

SEQ ID NO: 176114 - DNA, 30 bp, Homo sapiens
  chr14:100964578-100964608
  hypo
tctgcaaatctggcgcggaggctgcggagg

SEQ ID NO: 176115 - DNA, 31 bp, Homo sapiens; identical to SEQ ID NO: 87463
  chr14:100966491-100966522
  hypo

SEQ ID NO: 176116 - DNA, 30 bp, Homo sapiens
  chr14:100970029-100970059
  hypo
ggccacctcagcccccgtccccgaagactg

SEQ ID NO: 176117 - DNA, 43 bp, Homo sapiens; identical to SEQ ID NO: 87464
  chr14:100980663-100980706
  hypo

SEQ ID NO: 176118 - DNA, 194 bp, Homo sapiens; identical to SEQ ID NO: 87465
  chr14:100990018-100990212
  hypo

SEQ ID NO: 176119 - DNA, 30 bp, Homo sapiens; identical to SEQ ID NO: 27830
  chr14:101002155-101002185
  hypo

SEQ ID NO: 176120 - DNA, 1414 bp, Homo sapiens
  chr14:101003645-101005059
  hypo
gagatgagcaccggccgcactggggcatcatcccggcccacccgggacgatgggccgtgggagggctcagggcggtgtggtggccacactgcgaagaatggatttttaaaacacttcatagccccgaatttgtttcagctccctcttcgtggacacaacttcagggctcccttgtcactggcttgcgggggtggtctccccacttgcagagtctggtctccacaggacaccgtccttcccttcccttccaaggggcaggccccacgcaccctcgcccaaaaaataaaggagctttgtgttgaaaacgccaaggcagccgtccagggagctggaggccaagtgcgttaagaaagaccctttttctctataaaaatagtttcgctttataaaaggggggatgctcctctcacatgggggaaggacgcgtgaaaaacgctctaagtggagttccacgggccggggccgggtggacaccgtggtgtgggggaccctcccctcaggcctacagggctggggaggagaggaggtgcggggaggaacagactcctcgttgttggccggggcaggggaacagcgggggctggggagaggtgaggccggcccttctggggcacgtgggctggcggggagcgaaccacggccaggcctgcacgcaggcgctcagttgagcaaggttccgtagagctgggccttggtgaggctgtccttgcggctcagccccgagccaccagtccgcggaaaggcctgctgggggctgaggcgggcggcaggatgcatttccggggaggcctccatggagctcggctccaaggagtccctggaaccctgctcgggctcagggctgctggcggtcccacacagctgcaccccgagcctgtccccgtcccccccctcgctgggtgcatagccgggcagtgggtcagccgagcggccgggactgaggctcaggtcgccgcccgcccgcaggaagcagggctctgccaggtggccctgggagaggtcgtccccctcggagaagctgtcggccttgtagctggcgtagagcgggctggcgcggccgtcggccttcttgcccgggctgcccccggccccgccgtagtagcgttcagagaagctgcagggtgaggcgcggccggcagcgctcacggggtaggagtaggcgccgatgtcctccacgctcaggggacgccactggcccctcatgtcctccccggggagccgggcggtccccggcttggcccgcaggctccacaggtttgggggcatcagggcctgctggggacccggagaggccgggaagcggaaggtctcggccgggtacggtgacatggtccgcccgaagcctggggccacttcggcctccagcggggccgccaccgcggccgtggccttggcaaagcgagggctgccctcg

SEQ ID NO: 176121 - DNA, 199 bp, Homo sapiens
  chr14:101005496-101005695
  hypo
ggaggacaggctggcggggtccggcttctccagcaccttggcaatgacgcaggtggggacgctgtcggcgtaggccgggtggcagagcggggatggcaggctgcagccgtgcttctccatgtgcaggctcacgcgctcctggaaatccgagggcagctggaacgggtgcgaggagggggacggcgggtacagggtcact

SEQ ID NO: 176122 - DNA, 30 bp, Homo sapiens
  chr14:101032652-101032682
  hypo
gtgcacccagccgggcggggtcatgcctct

SEQ ID NO: 176123 - DNA, 30 bp, Homo sapiens
  chr14:101060242-101060272
  hypo
aaggcatgggtgacccgtacgtcccccaga

SEQ ID NO: 176124 - DNA, 320 bp, Homo sapiens
  chr14:101060507-101060827
  hypo
aggcatttgcagtttcggtcctgggggcaaataactgggagactctgatgctggggcaccctctgtgccaggcactgagctccttgtaaagggacgcgaggtggcgggagggctgcggctgcgggatgccccatgctgcccttgttggaaatggggccacagaggcggccacaaatttgcctcactccactgggcaggaaaattgtttccgccattcttctgtgttccagccgcttctagtgcctgcaagggatctaggggctgctcagctcatggaacagtggctgcggccagcctcaaaggcacggtgtggacaggga

SEQ ID NO: 176125 - DNA, 30 bp, Homo sapiens
  chr14:101071066-101071096
  hypo
ggcgcacagctgtgcgcgctttgttcagcg

SEQ ID NO: 176126 - DNA, 30 bp, Homo sapiens
  chr14:101095761-101095791
  hypo
gatctgccgggacaccgactggccgggtct

SEQ ID NO: 176127 - DNA, 195 bp, Homo sapiens
  chr14:101096260-101096455
  hypo
ctgccgggagggatgcgctggccgtggggaccagtgcccgccgctgcagctgatcctgccctgtcccgtctccatgtgaataaagccttgttccagccagtgcctcactgcgtgtattccttggcgactcggagaccaagatccaggggtacccggacttctactcccgatagcaggcaacggatgcctcctgct

SEQ ID NO: 176128 - DNA, 30 bp, Homo sapiens; identical to SEQ ID NO: 87469
  chr14:101122984-101123014
  hypo

SEQ ID NO: 176129 - DNA, 331 bp, Homo sapiens; identical to SEQ ID NO: 87470
  chr14:101133881-101134212
  hypo

SEQ ID NO: 176130 - DNA, 30 bp, Homo sapiens
  chr14:101142393-101142423
  hypo
cttctggagcttgcccggcacacggggttg

SEQ ID NO: 176131 - DNA, 137 bp, Homo sapiens
  chr14:101155082-101155219
  hypo
cttctctcctgtcagcgtgggccagcgtgggctgctgtggccccggctgctccaggttggggggattaattggcctgttgctggaggcaggcagaggctggacggcgggtaggcagagcaggcgagggggacccaag

SEQ ID NO: 176132 - DNA, 31 bp, Homo sapiens; identical to SEQ ID NO: 27833
  chr14:101177221-101177252
  hypo

SEQ ID NO: 176133 - DNA, 109 bp, Homo sapiens; identical to SEQ ID NO: 125226
  chr14:101192401-101192510
  hypo

SEQ ID NO: 176134 - DNA, 178 bp, Homo sapiens; identical to SEQ ID NO: 125227
  chr14:101192968-101193146
  hypo

SEQ ID NO: 176135 - DNA, 392 bp, Homo sapiens
  chr14:101198381-101198773
  hypo
ttcgggcctgctcctcggccccctgtgccaacaacaggacctgcgtgagcctggacgatggcctctatgaatgctcctgtgcccccgggtactcgggaaaggactgccagaaaaaggacgggccctgtgtgatcaacgggtaaatatccttcctgtgtgtgatctaatgaatgctgcttttcatgcggccaccaaagaccctttcagcctaaccctgctggacctgtcgtctgacaaaagatgaagtaagcgctcatcctggcagccccgtaggggaccgccctggatgggagtattcacgggggaatgtgtcattgccataattttttcaaatgatcctgaaggcgatttcatattcccctgatgttctcaagtcccgatgcgtgtgagtg

SEQ ID NO: 176136 - DNA, 548 bp, Homo sapiens
  chr14:101200684-101201232
  hypo
gacaagacctgcagccgcccggtgaccaactgcgccagcagcccgtgccagaacgggggcacctgcctgcagcacacccaggtgagctacgagtgtctgtgcaagcccgagttcacaggtctcacctgtgtcaagaagcgcgcgctgagcccccagcaggtcacccgtctgcccagcggctatgggctggcctaccgcctgacccctggggtgcacgagctgccggtgcagcagccggagcaccgcatcctgaaggtgtccatgaaagagctcaacaagaaaacccctctcctcaccgagggccaggccatctgcttcaccatcctgggcgtgctcaccagcctggtggtgctgggcactgtgggtatcgtcttcctcaacaagtgcgagacctgggtgtccaacctgcgctacaaccacatgctgcggaagaagaagaacctgctgcttcagtacaacagcggggaggacctggccgtcaacatcatcttccccgagaagatcgacatgaccaccttcagcaaggaggccggcgacgaggagatcta

SEQ ID NO: 176137 - DNA, 30 bp, Homo sapiens
  chr14:101217892-101217922
  hypo
ctatggaccccggctcgctctcgatctgcc

SEQ ID NO: 176138 - DNA, 256 bp, Homo sapiens; identical to SEQ ID NO: 87474
  chr14:101250116-101250372
  hypo

SEQ ID NO: 176139 - DNA, 30 bp, Homo sapiens; identical to SEQ ID NO: 87475
  chr14:101250597-101250627
  hypo

SEQ ID NO: 176140 - DNA, 30 bp, Homo sapiens
  chr14:101257819-101257849
  hypo
actccaggcggaaaccgcgccactcctcac

SEQ ID NO: 176141 - DNA, 31 bp, Homo sapiens; identical to SEQ ID NO: 87476
  chr14:101274010-101274041
  hypo

SEQ ID NO: 176142 - DNA, 30 bp, Homo sapiens; identical to SEQ ID NO: 27836
  chr14:101337576-101337606
  hypo

SEQ ID NO: 176143 - DNA, 30 bp, Homo sapiens
  chr14:101340955-101340985
  hypo
ttggctgcacggggacgcgtcctcaagtcc

SEQ ID NO: 176144 - DNA, 30 bp, Homo sapiens; identical to SEQ ID NO: 87478
  chr14:101341534-101341564
  hypo

SEQ ID NO: 176145 - DNA, 270 bp, Homo sapiens; identical to SEQ ID NO: 87479
  chr14:101348431-101348701
  hypo

SEQ ID NO: 176146 - DNA, 724 bp, Homo sapiens
  chr14:101349269-101349993
  hypo
acaggttcccaaggcgcggtggagggacactcgtaaaaggtctcgctgtgatcactgtctccagcctgctgaagctcagagggctctgattcagaaagatcatcggatccgtctgagcttggctggtcggaagtctcatcatctgcttccttcgggttaaacacgtcggccaggtctgagtatgggtgtggcagtccgggtagcaggctcatgccgtgcctctctagggcaatgcatggcgggggcgggcggaagcagttcttcaggcagtagggagagtggaaggtgcagcggcctttgatccagtcgacttcgggggcgtggactcggagccagcggatgcctaggaccacagagaagttcggtgaaggtacgatgtcaaattcgatggactcctggtggttctggtggatacacaccaggggctccgtgtagagccagacaggctcgttgccaatcagcgagccgtccacggattggaccggctgtgggtacggcttctcgtagagctcgacgtagtgctcttgggcgaacttctcatccatgaagttgccgtcagctcccgaatccaccagggcctggaccgcgacgctgtggtaggggttcactctcaccatgagcagcaggaagaggtgggcgcgattgatgtccggatggacttcgctgggcaaccagctgctgaccatccacctctctggagcaggtgagtcgatccaggtcaggt

SEQ ID NO: 176147 - DNA, 30 bp, Homo sapiens
  chr14:101350218-101350248
  hypo
cagtggcagagcggccgccctgcctgatgg

SEQ ID NO: 176148 - DNA, 30 bp, Homo sapiens; identical to SEQ ID NO: 87482
  chr14:101350857-101350887
  hypo

SEQ ID NO: 176149 - DNA, 30 bp, Homo sapiens
  chr14:101360033-101360063
  hypo
ttactatgcgccaagcgctgctttcaccat

SEQ ID NO: 176150 - DNA, 207 bp, Homo sapiens
  chr14:101377325-101377532
  hypo
ctgggcgtcatgggacggggaaagggtggggtgtgcgcaggtgtgcaaggcgggctacttgagggatgggcgatagttcaggtcaccctccggttggacccacgagggcgctgcattcctcattctacaaaccgtacaagtcggggcacaagacagagaagccaggtcacgtctctgcagttacacagctcacgagtgcctgctggg

SEQ ID NO: 176151 - DNA, 442 bp, Homo sapiens
  chr14:101489765-101490207
  hypo
aaacaacgctgtcttcggggaggaacggttggacccaccaccacttctccatgacacccgaagagatgattttctgtatggcatgtgtttttctgcatgatgcaaaatggcataatctcgctcctcttaaatcaagttctgccttgggaaatcgcgccatccctggggaggagaccttgattcttcccggaatcagtgccattccatggtgctcaatgacgtggttgactacgctacgcttattcagtagacaccgtgacctgcttcttctcagcgtcaaatgcagcctagaagaagcgccctcaggcaacttcgtggacatgagccttcttccagccaccaccaccaccatcgtgcggtacttgaagaaatggtttaccgtcccacatacattttgaatatgtatgtgggatggtaaaccgcttcttggtatccagcccag

SEQ ID NO: 176152 - DNA, 322 bp, Homo sapiens; identical to SEQ ID NO: 87485
  chr14:101491362-101491684
  hypo

SEQ ID NO: 176153 - DNA, 205 bp, Homo sapiens
  chr14:101492083-101492288
  hypo
aggtggtccgtggcgcgttcgctttatttatggcgcacattacacggtcgacctctttgcagtatctaatcccgccttgcaagctttcctggagctaacatcaactgcgggggtgggggccactaggtctgcgctcagtgtgacccagcggggtttgtgatgtgtttgtcttgtgtgtgacgataactcacgtgtggcagccttc

SEQ ID NO: 176154 - DNA, 30 bp, Homo sapiens
  chr14:101495894-101495924
  hypo
tgacaccaacatcggcgaagattcggcagt

SEQ ID NO: 176155 - DNA, 30 bp, Homo sapiens
  chr14:101496394-101496424
  hypo
gaggggatggtagaccggtgacgtgcactt

SEQ ID NO: 176156 - DNA, 30 bp, Homo sapiens; identical to SEQ ID NO: 87486
  chr14:101505882-101505912
  hypo

SEQ ID NO: 176157 - DNA, 163 bp, Homo sapiens
  chr14:101506230-101506393
  hypo
tgcggaccacccacccgccttgaggagacccctctcgcaagctgcccgctcggccaagcggctgggctccgtcgtcattttctccatgaggccgaatgctctcctctgtgctatgttacttttgtgtttgatggattgtacttaggttcgtgctttccgggat

SEQ ID NO: 176158 - DNA, 30 bp, Homo sapiens; identical to SEQ ID NO: 87488
  chr14:101515184-101515214
  hypo

SEQ ID NO: 176159 - DNA, 195 bp, Homo sapiens; identical to SEQ ID NO: 87489
  chr14:101515981-101516176
  hypo

SEQ ID NO: 176160 - DNA, 491 bp, Homo sapiens
  chr14:101531749-101532240
  hypo
cacctcggggaaggacgccggcatcagcaccattctggggtacggggatggatggtcgaccagttggaaagtaattgtttctaatgtacttcacctggtccactagccgtccgtatccgctgcagcctgtggggcctgcgggccggggagccgatcgcgcttcagctcagcgcctttcctggtacttgaagggagatcgaccgtgttatattcgctttattgacttcgaataatacatggttgatcttttctcagtatcaaatctcaccttggaggacccgttggagatgaagcccttttgagggtaggagcaggacgggtgctttggagtcgctgcctcagtggggcctggtcaccgagagtgggccgggcaggggtctctttcctgtctctgtgtcttctcacctttgatgtcccatccgtcctcaggactgcttcccgggggcagcgctggcaccacgggacgcggcagccacgttcttgagccgatg

SEQ ID NO: 176161 - DNA, 30 bp, Homo sapiens
  chr14:101539405-101539435
  hypo
gcaacctcctgaagtcggggctcactcctg

SEQ ID NO: 176162 - DNA, 382 bp, Homo sapiens; identical to SEQ ID NO: 87492
  chr14:101569745-101570127
  hypo

SEQ ID NO: 176163 - DNA, 275 bp, Homo sapiens; identical to SEQ ID NO: 27842
  chr14:101579007-101579282
  hypo

SEQ ID NO: 176164 - DNA, 30 bp, Homo sapiens
  chr14:101583130-101583160
  hypo
acaggcttgcggcaccgtctgacctgaccg

SEQ ID NO: 176165 - DNA, 30 bp, Homo sapiens
  chr14:101591896-101591926
  hypo
ggacaaagggggacgcgtgtccagggtggg

SEQ ID NO: 176166 - DNA, 312 bp, Homo sapiens
  chr14:101592183-101592495
  hypo
aaacctctctaaagtcgtggccagtgaaaccacagcgccctaccaggccccatccctggacccatcctgccatctccccgccgtctgcccagggacccatggctcctccccagctgctcctcagcacccgggtctggggcacgtcggcactcctggaggcctcttgtgactggtgtctcctccgtcaccctcctagaccatgaggaagaaatgagacccaggtgtctgcagcgtctcggaacccggttctgttgctcaccataaagctctgccgagcgccctcaggtgagcagaggcggccctggcctatca

SEQ ID NO: 176167 - DNA, 51 bp, Homo sapiens; identical to SEQ ID NO: 87495
  chr14:101638847-101638898
  hypo

SEQ ID NO: 176168 - DNA, 204 bp, Homo sapiens
  chr14:101640847-101641051
  hypo
atgtaaaatacacaccgggcagctgccttcccagcctgcaggtggaggccggcgatggctgatgcgtgggctggcacatgtctgagtgagggctcacggggacataagtggccggcggagagctcaagtgtttgctgccaccgcccacagctcccctctgccaccacaggctctggtttctgtgttccccgcagtggtgagggc

SEQ ID NO: 176169 - DNA, 30 bp, Homo sapiens
  chr14:101650582-101650612
  hypo
tacaacccacggctgcgtccgggggttgct

SEQ ID NO: 176170 - DNA, 30 bp, Homo sapiens; identical to SEQ ID NO: 9963
  chr14:101656894-101656924
  hypo

SEQ ID NO: 176171 - DNA, 520 bp, Homo sapiens
  chr14:101693618-101694138
  hypo
cccgcagacctgtgccgaaagacagaaggatgtgcacctcaagtcagacagcatgtgcccacacacgcttgcacacgcatacactcagaggatgcccagtcacacggccccgtgcggctcccaagccccggacaatctgggcaggtttgtatcggggagagatgtcgaaggtggaggaggacagggtaaggtttcttgccctccagtccacaaaccatcagccctggagagcgttctgcgtgcctgcaaaagggcagcaggaagaaataatagatgagaacaacaaagagccgtgaaggcatcgaaacaccagcttcgagggagccgcttgagagagcagccctcgggaaggctcccccaccatgtcgcctgttgctggggatgaaaccaacttggggtcagatggagggggctccatgggagggagagcccagggagaagcaggtcggggcaggagtctcggcctgatacccattggccctccctggacaccgcaggccggggacgctgtgcagaccac

SEQ ID NO: 176172 - DNA, 171 bp, Homo sapiens
  chr14:101694469-101694640
  hypo
cattgctgaccgcagcgtttctcaaaattcaagcactggaggaccccggagaacggagctgcagaaccgccgggtctgtgcgaaccgcggggtctgtgcgaaccgcggggtctgtgagaaccgcggggtctgtgccgcctggtggggagcgctgagcgctgattggtgttt

SEQ ID NO: 176173 - DNA, 36 bp, Homo sapiens
  chr14:101716823-101716859
  hypo
aggtgctgactcctacggtgacgggcgttagctggg

SEQ ID NO: 176174 - DNA, 35 bp, Homo sapiens
  chr14:101727902-101727937
  hypo
gcgcgagccaccacgcccagcctgtttattgtatc

SEQ ID NO: 176175 - DNA, 116 bp, Homo sapiens
  chr14:101834397-101834513
  hypo
cttagtgtgtgcccacggagggtcagggcatctgtccaaatccgtctcacactgtgccctgggttccacgtggagggcgagcgggtttctccagcacccctcgtgcacatcagtgt

SEQ ID NO: 176176 - DNA, 31 bp, Homo sapiens; identical to SEQ ID NO: 87498
  chr14:101838210-101838241
  hypo

SEQ ID NO: 176177 - DNA, 273 bp, Homo sapiens
  chr14:101874588-101874861
  hypo
ggttctcaaggcaatcgcaccttgcctagcaactgttgctaccgaaagccaacgtccctggtattccaacaataaagcacagcgctccgactacaactcccagatattattgaaaagaaaggcaggtttatttcaaggccaggaggggagaggatctgcgtgttggaggctggagcagcagcgcattcgatggccggcctgacagcatggcgagcagcttgtgctggtgcgtcctccagaaaaagaatgcgcgctctccaggaggtgatggtc

SEQ ID NO: 176178 - DNA, 30 bp, Homo sapiens
  chr14:101875177-101875207
  hypo
gctgccttggattggcgaactgtgatgttc

SEQ ID NO: 176179 - DNA, 233 bp, Homo sapiens
  chr14:101970404-101970637
  hypo
gtggattgaaggggacggtcgggcctctgaagagtgagagacagtggtgcttacagctgggtgatgccagagatggagagaagcagagagatcccagacatgttctggatacggacacgacagatgcagaggagcgtgaggaagaccccggggctgagccctaaccttggcttgagcagctggggctgagttggcgccatggacgtggcagcagagaacgctagtggaagggc

SEQ ID NO: 176180 - DNA, 30 bp, Homo sapiens
  chr14:101975848-101975878
  hypo
caatgcttgactggacgtgattaaccagca

SEQ ID NO: 176181 - DNA, 30 bp, Homo sapiens
  chr14:101976531-101976561
  hypo
gttcagagatgtgggcgtgttatcacgggt

SEQ ID NO: 176182 - DNA, 30 bp, Homo sapiens
  chr14:101982890-101982920
  hypo
tcaaagatcactggccgacggctgcttctt

SEQ ID NO: 176183 - DNA, 30 bp, Homo sapiens
  chr14:101983170-101983200
  hypo
tgttcccctccccgtcggccccacccacct

SEQ ID NO: 176184 - DNA, 31 bp, Homo sapiens; identical to SEQ ID NO: 27845
  chr14:101985982-101986013
  hypo

SEQ ID NO: 176185 - DNA, 119 bp, Homo sapiens
  chr14:101994454-101994573
  hypo
tgggtctgaacccagcgaccaggccacagggagggcccaggtgggtgtggtggtttggcggcaggtgtggcagggatggtctgcatcagaggggagtttgcgcccgccggccctgccac

SEQ ID NO: 176186 - DNA, 156 bp, Homo sapiens
  chr14:102018352-102018508
  hypo
cagacacagcacaggcggctccctgccgctcatgtatgggggctgctttcttcatgtgcctctgccattgcggtgagatcaggcctgggcgagtctgcagatcagaggcgtggagcagagcagagcggccaccaccccagccgggtccgccaggga

SEQ ID NO: 176187 - DNA, 306 bp, Homo sapiens; identical to SEQ ID NO: 87501
  chr14:102053853-102054159
  hypo

SEQ ID NO: 176188 - DNA, 495 bp, Homo sapiens
  chr14:102068307-102068802
  hypo
gcgaggagcctggcacgggactggcgcttgtcagcccctcatgtgggtgtgcctgcatctgcgtccccacgtcgcacaggatagggcttatgcatggcctagcttgtcgtgtgaggttgactggcatgtcacaggcactgtcacagattctcagagcccaggagcacatcccctgaaggactcctcagccggggctgggctggaagcagggcctggagaaggtcagagaggccccgccctcctggcactcccagggcaggggacgcagcacagagcgggtgccggtcagccagggaggccgggacgggacgcagcacgaggagaacactgcgcaaggcaggcccgcagtcagtcaggacagctgcccagagtaggtggcgtttgggccaggcttcgcaagctgtgtgggggttcgcccagcagaagacgggagagggcgttccaggcagaaggctcagcatggcccaaagcacagaggcacggcaatgtccggcg

SEQ ID NO: 176189 - DNA, 279 bp, Homo sapiens; identical to SEQ ID NO: 87502
  chr14:102093962-102094241
  hypo

SEQ ID NO: 176190 - DNA, 282 bp, Homo sapiens
  chr14:102175309-102175591
  hypo
cgttaaacatttacacgtagtgcactactgtccataaggggcagcatggtcagactgcacttttaaaaggtcttgagggcaggggaaccaagaggcgttcaagtaaaggagtgaagaatcagagcgtgacgtagtttagcgacttggaccaggacacgtttgaaagcctaagtaccttagaggagccactggctgacgtccagatggcagaaagaaagccaccccaaatcaggccctctcattcagtgctgaggagcacggtctagacggctggttcaactt

SEQ ID NO: 176191 - DNA, 128 bp, Homo sapiens
  chr14:102186688-102186816
  hypo
ctgtaccacatgctgcgagatgttcgcaatcagggaggtcatgtgagaggtacggaacgctctgtactagcttcacaatgattctgtgcctctagagccgtcctaaaagaaaacgtttatttaacagt

SEQ ID NO: 176192 - DNA, 385 bp, Homo sapiens
  chr14:102230010-102230395
  hypo
cccatcctggatctggtatttttaagttcatttcccacacctcaaacccagcaaccctcctgtatagattggtcttatgcagtctatggtgttgctatgttgcttttagctttagggtcatctccccaccgccacttccattgcaagctgccaggcaactcagtggttagttctttttcttccatcaccttgttttccttcaaaccacctctgctactgacgtcctgggctagctccctatttctgttgacggtcccttggcctctttctccaataatgttggtatttgaaaaaatttacctagttttggtattttattattgttcacattgtgtgtgtgtgtgtgtgtgtgtgtgggcgcgcgcacttgcgcgtcggccacttg

SEQ ID NO: 176193 - DNA, 153 bp, Homo sapiens; identical to SEQ ID NO: 87504
  chr14:102239452-102239605
  hypo

SEQ ID NO: 176194 - DNA, 30 bp, Homo sapiens
  chr14:102282456-102282486
  hypo
aacctgctgagcagacgttatacccaagtg

SEQ ID NO: 176195 - DNA, 30 bp, Homo sapiens
  chr14:102285764-102285794
  hypo
gcgcctttctttcatcgagcaggacagcgg

SEQ ID NO: 176196 - DNA, 36 bp, Homo sapiens
  chr14:102286259-102286295
  hypo
ctcctttttaattttgcgtgacgaaatgcagagttc

SEQ ID NO: 176197 - DNA, 167 bp, Homo sapiens; identical to SEQ ID NO: 27847
  chr14:102293899-102294066
  hypo

SEQ ID NO: 176198 - DNA, 30 bp, Homo sapiens
  chr14:102296845-102296875
  hypo
gggccctggattggacgtgctttggacagc

SEQ ID NO: 176199 - DNA, 30 bp, Homo sapiens
  chr14:102298870-102298900
  hypo
aaaccccagggtgggcgactctgggttcca

SEQ ID NO: 176200 - DNA, 25 bp, Homo sapiens
  chr14:102300430-102300455
  hypo
ccaccacacccggcctgaatcagtt

SEQ ID NO: 176201 - DNA, 30 bp, Homo sapiens
  chr14:102300745-102300775
  hypo
ggtcccttgatgtggcgtctcagtacggct

SEQ ID NO: 176202 - DNA, 95 bp, Homo sapiens; identical to SEQ ID NO: 87507
  chr14:102302010-102302105
  hypo

SEQ ID NO: 176203 - DNA, 31 bp, Homo sapiens; identical to SEQ ID NO: 27849
  chr14:102303817-102303848
  hypo

SEQ ID NO: 176204 - DNA, 34 bp, Homo sapiens
  chr14:102306200-102306234
  hypo
tggctctcagtggtgcgctcgtccgcacacactc

SEQ ID NO: 176205 - DNA, 246 bp, Homo sapiens; identical to SEQ ID NO: 87509
  chr14:102307820-102308066
  hypo

SEQ ID NO: 176206 - DNA, 300 bp, Homo sapiens; identical to SEQ ID NO: 87510
  chr14:102325126-102325426
  hypo

SEQ ID NO: 176207 - DNA, 325 bp, Homo sapiens
  chr14:102330612-102330937
  hypo
gactcagaagtacttcgcattagagtggacctctccagaaatatccaaatctattgtgctggaccactgagaacgcaacctggtgtactcaatcatgcaagaaatgtgtattgcagacaccatgctacctcttggggctaccccaagaactaaaataatatagtctctacctatatggcatccacccttactggtctgggagacaagaagaggcagcagacgtaatgatacgagggccaaggactgcggtggcggtcagtgtaaggtctggtaagagcacaggcataggaggcctaaccccttgcctgggcgccccagagaagtg

SEQ ID NO: 176208 - DNA, 97 bp, Homo sapiens
  chr14:102331832-102331929
  hypo
gcccaccaaaccatgcgatagagtcaaggagcaagaattccccagaagggagggagtcgtgtgcttctctgggcagatgaaacggtcggatctgtac

SEQ ID NO: 176209 - DNA, 101 bp, Homo sapiens
  chr14:102335777-102335878
  hypo
acatagggatgcaatcgctaggtgaatggtaagtgtgtgttgagctttctaaggaactgccaaaccgttttccaaagtggctgccccgtgtgattccccca

SEQ ID NO: 176210 - DNA, 207 bp, Homo sapiens; identical to SEQ ID NO: 87511
  chr14:102343691-102343898
  hypo

SEQ ID NO: 176211 - DNA, 31 bp, Homo sapiens; identical to SEQ ID NO: 27852
  chr14:102349235-102349266
  hypo

SEQ ID NO: 176212 - DNA, 505 bp, Homo sapiens
  chr14:102355901-102356406
  hypo
gctggcacagagggtagggtgcgtgtcctggggctcccctagaagcaggcgcagtggacagagatgtctcagaggaagggagctgggtctgtcgcagatgggtgcttcagaaagatcgcacctgagacagcacggaggatgcgtgtgggtgtcagtggggaactgggcaggtagaataagaggagttcaggaatcacttctaccctttgcaggaactgtgctaaatattgcgggctttaaaattaagtaagacattggcctatgttgaaatacagcaaaaacgtaagatggattaatgaacgagtaaaagatggatgaacagatgtgcgtgtgatcaagcagatggagcacattgctcgtggtcgaatctggtggttgaaatgggtgttcactgtagaattctttccgttttcctagatgcttgaaattttccaaaataaaatattgagaaaaaaattcgtgcaagaccaagttctctgccctcgaggcatttacagctgcaggc

SEQ ID NO: 176213 - DNA, 30 bp, Homo sapiens; identical to SEQ ID NO: 87514
  chr14:102358075-102358105
  hypo

SEQ ID NO: 176214 - DNA, 211 bp, Homo sapiens; identical to SEQ ID NO: 27854
  chr14:102360719-102360930
  hypo

SEQ ID NO: 176215 - DNA, 246 bp, Homo sapiens
  chr14:102361138-102361384
  hypo
actttactgtttgaacgtaaagcacttgagcggttattgtagccactaaattttagtgtgcaattcagtagtttcacatctgcttggtttgacaacatattgaactgattatgatcagaggaattatagttagggtttgaaattattgttgtactaaagaggctttaccgccttgaaaatacttcccaagttacactgtaactattttatgatcattgaatcacaagtgaacgttagattactgct

SEQ ID NO: 176216 - DNA, 31 bp, Homo sapiens; identical to SEQ ID NO: 27855
  chr14:102365883-102365914
  hypo

SEQ ID NO: 176217 - DNA, 31 bp, Homo sapiens; identical to SEQ ID NO: 27856
  chr14:102372315-102372346
  hypo

SEQ ID NO: 176218 - DNA, 154 bp, Homo sapiens
  chr14:102375767-102375921
  hypo
agaaaacaagtaacgcggaatgagcaggccttgcattttagaccttagggatcctgtgcgatgtgggactgttggaatatggagcagcctgagagtggagaggcgagggctcagcaggaatgcgtgctcccaggctcaccgtgcggttttcttt

SEQ ID NO: 176219 - DNA, 30 bp, Homo sapiens; identical to SEQ ID NO: 27857
  chr14:102384062-102384092
  hypo

SEQ ID NO: 176220 - DNA, 343 bp, Homo sapiens; identical to SEQ ID NO: 87519
  chr14:102391502-102391845
  hypo

SEQ ID NO: 176221 - DNA, 192 bp, Homo sapiens; identical to SEQ ID NO: 87520
  chr14:102392533-102392725
  hypo

SEQ ID NO: 176222 - DNA, 81 bp, Homo sapiens
  chr14:102396658-102396739
  hypo
tgattccagtccagtggctcccgttcctcggaggctattgtttttttgttttgtttcgtcttgttttgtttttgagacaga

SEQ ID NO: 176223 - DNA, 162 bp, Homo sapiens; identical to SEQ ID NO: 87521
  chr14:102398576-102398738
  hypo

SEQ ID NO: 176224 - DNA, 30 bp, Homo sapiens
  chr14:102399673-102399703
  hypo
tggagccctgcggcgcgctggcttctcctg

SEQ ID NO: 176225 - DNA, 32 bp, Homo sapiens
  chr14:102416014-102416046
  hypo
ccaaaaggactctggcggccgggcgcagtggc

SEQ ID NO: 176226 - DNA, 121 bp, Homo sapiens
  chr14:102418519-102418640
  hypo
ctgccttggcccaggagttgctcgcatgagccaccacgcccagtgtattcagattttcttcgtgtttcttttctcttccgggatcccatgcaggacaccacgtcgcatttagttgtccacc

SEQ ID NO: 176227 - DNA, 24 bp, Homo sapiens
  chr14:102418939-102418963
  hypo
cgcgcctggcccaccacagtttta

SEQ ID NO: 176228 - DNA, 30 bp, Homo sapiens
  chr14:102428880-102428910
  hypo
tgtacactgattgttcgggttctttcagtt

SEQ ID NO: 176229 - DNA, 128 bp, Homo sapiens
  chr14:102429248-102429376
  hypo
gcagtgaacactcagcgttcgctgtcagtggtgtgttattattattcattaccattaggatccttgcacaaactcatcgcagttgcctatttattttttccaggaagattactcggaactgcttaggc

SEQ ID NO: 176230 - DNA, 36 bp, Homo sapiens
  chr14:102450594-102450630
  hypo
gggattataggcatgagccaccgcgccctgcccgta

SEQ ID NO: 176231 - DNA, 30 bp, Homo sapiens; identical to SEQ ID NO: 87525
  chr14:102452458-102452488
  hypo

SEQ ID NO: 176232 - DNA, 315 bp, Homo sapiens; identical to SEQ ID NO: 87526
  chr14:102467326-102467641
  hypo

SEQ ID NO: 176233 - DNA, 30 bp, Homo sapiens
  chr14:102476945-102476975
  hypo
tgcacgaatgtgggcgagtggtgctcgcac

SEQ ID NO: 176234 - DNA, 30 bp, Homo sapiens; identical to SEQ ID NO: 87527
  chr14:102479218-102479248
  hypo

SEQ ID NO: 176235 - DNA, 30 bp, Homo sapiens; identical to SEQ ID NO: 87528
  chr14:102481482-102481512
  hypo

SEQ ID NO: 176236 - DNA, 30 bp, Homo sapiens; identical to SEQ ID NO: 87529
  chr14:102482286-102482316
  hypo

SEQ ID NO: 176237 - DNA, 30 bp, Homo sapiens
  chr14:102483059-102483089
  hypo
accttggttgcagccggactcacacttcca

SEQ ID NO: 176238 - DNA, 30 bp, Homo sapiens
  chr14:102483294-102483324
  hypo
atgacactcttcagcgccctccgggccttg

SEQ ID NO: 176239 - DNA, 537 bp, Homo sapiens; identical to SEQ ID NO: 27860
  chr14:102493476-102494013
  hypo

SEQ ID NO: 176240 - DNA, 122 bp, Homo sapiens; identical to SEQ ID NO: 87531
  chr14:102499705-102499827
  hypo

SEQ ID NO: 176241 - DNA, 629 bp, Homo sapiens; identical to SEQ ID NO: 87532
  chr14:102500433-102501062
  hypo

SEQ ID NO: 176242 - DNA, 30 bp, Homo sapiens; identical to SEQ ID NO: 27862
  chr14:102504836-102504866
  hypo

SEQ ID NO: 176243 - DNA, 30 bp, Homo sapiens
  chr14:102505410-102505440
  hypo
tttggatgacgacacgatcataaccactct

SEQ ID NO: 176244 - DNA, 30 bp, Homo sapiens; identical to SEQ ID NO: 87534
  chr14:102505787-102505817
  hypo

SEQ ID NO: 176245 - DNA, 30 bp, Homo sapiens; identical to SEQ ID NO: 87535
  chr14:102508984-102509014
  hypo

SEQ ID NO: 176246 - DNA, 109 bp, Homo sapiens; identical to SEQ ID NO: 87536
  chr14:102510266-102510375
  hypo

SEQ ID NO: 176247 - DNA, 30 bp, Homo sapiens; identical to SEQ ID NO: 87537
  chr14:102510775-102510805
  hypo

SEQ ID NO: 176248 - DNA, 30 bp, Homo sapiens; identical to SEQ ID NO: 87538
  chr14:102515011-102515041
  hypo

SEQ ID NO: 176249 - DNA, 810 bp, Homo sapiens
  chr14:102516075-102516885
  hypo
tgttcgtgcctgaggcgtacatcactgccaccaggcagtatgtggcccaggccaacagctggtccctggaggagctctgcctggaagtcaacgtcaccacctcacagggcgccacccttgacgcttgcagcttcggagtcacgggtgagtggagtctcacagaaaatactggctctttgcaggtgacctcggtggcctgagaccattgttcccagatacatgcacttagggtgaccggctggcagttgggtggagcctctgggcgccctgtgactggggtttgtgtagctgttgtgttcacctcagcctgggttttggcttccgcctcacaggtttgaaacttcaaggggccacgtgcaacaacaacaagctgtcactgtccaatgccatctcaaccgcccttcccctgacgcagctgcgctgggtcaagcagacaaacaccgagaagaaggccagtgtggtaaggaggcactgcctttcccaggcattctgcagggacccctgcggtaacaagggcagaggcggctcctcttctatgcctgggttccacttggaacgggaaatgaggttcacagaggaaatccatttcgcacctgtccaaacctctccttgccgggccccatcagctgtcccgggcagtcttccagttttcttacttttcccttaagccaccagtaaacccctctgcttctgcaggtaaccttacctgtctacctgaacttcacccgtgcagacctcatcttcaccgtggacttcgaaattgctacaaaggaggatcctcgcagcttctacgagcggggtgtcgcagtc

SEQ ID NO: 176250 - DNA, 30 bp, Homo sapiens
  chr14:102517116-102517146
  hypo
acactaagcatgagccggctccgcctcttc

SEQ ID NO: 176251 - DNA, 123 bp, Homo sapiens
  chr14:102521601-102521724
  hypo
gctcctcctgcatcagcgccccacccaacagagccgaccaggctgggaacaccgagaccgagagcgcgtggctgtgtctacaaaggcctcctctttgagggagacacgcgaggcacgggtggg

SEQ ID NO: 176252 - DNA, 30 bp, Homo sapiens
  chr14:102521937-102521967
  hypo
ctctgcccagccccccgctgaagtctctaa

SEQ ID NO: 176253 - DNA, 370 bp, Homo sapiens
  chr14:102523352-102523722
  hypo
gcacaggtgcacacgcgcacacacatgctgcacagttgcacacacgtgcagacacgctgcgcagatgcacacgtgcacacacatgcacacccacacgctgcagttgcacacacgtgcacacgcacacccacatgcacagttgcaaacgtgcacacactgcagatgcacacacgtgcacacacatgcacagccacaagctgcatagttgcacacgtgcacacgctgcgcagatgcacacacgtgcacacatgctgcacagttgcacacacgtgcacactacacagatgcacacacgctgcacagatgcacacacgtgcacacatgcacacccacacgctgcacagttgcacacacacgctgcgcagatgca

SEQ ID NO: 176254 - DNA, 189 bp, Homo sapiens
  chr14:102530106-102530295
  hypo
caagctccggagagacgagcgggggagactggggtcccagcagacgcagaatggtctctccacaaagaggggttagcaaatgtactctccagacctgtccccaccctccacaccgtcaaagagcaaagagaaaatcttccaggcccccactccaggcatggtgggtgcgtcaggattcagaacagatga

SEQ ID NO: 176255 - DNA, 24 bp, Homo sapiens
  chr14:102537593-102537617
  hypo
gagccaccgcgcccagcctgtttt

SEQ ID NO: 176256 - DNA, 21 bp, Homo sapiens
  chr14:102549238-102549259
  hypo
agccaccgcgcccagccacac

SEQ ID NO: 176257 - DNA, 86 bp, Homo sapiens; identical to SEQ ID NO: 87542
  chr14:102592763-102592849
  hypo

SEQ ID NO: 176258 - DNA, 26 bp, Homo sapiens
  chr14:102593148-102593174
  hypo
gccactgcgcccggccgactagattc

SEQ ID NO: 176259 - DNA, 30 bp, Homo sapiens
  chr14:102628066-102628096
  hypo
taccgtgtttcagcccggtttaggtggcaa

SEQ ID NO: 176260 - DNA, 191 bp, Homo sapiens; identical to SEQ ID NO: 27865
  chr14:102635325-102635516
  hypo

SEQ ID NO: 176261 - DNA, 293 bp, Homo sapiens; identical to SEQ ID NO: 27866
  chr14:102650991-102651284
  hypo

SEQ ID NO: 176262 - DNA, 30 bp, Homo sapiens
  chr14:102652093-102652123
  hypo
gaattatcgagattgcgccactgcagtcca

SEQ ID NO: 176263 - DNA, 29 bp, Homo sapiens
  chr14:102653307-102653336
  hypo
ccaagaaaacctgcggaacagtctttgca

SEQ ID NO: 176264 - DNA, 30 bp, Homo sapiens
  chr14:102653981-102654011
  hypo
tgacctaaggcttcccgaagatgtgtctgg

SEQ ID NO: 176265 - DNA, 31 bp, Homo sapiens; identical to SEQ ID NO: 18955
  chr14:102668717-102668748
  hypo

SEQ ID NO: 176266 - DNA, 91 bp, Homo sapiens; identical to SEQ ID NO: 87547
  chr14:102668987-102669078
  hypo

SEQ ID NO: 176267 - DNA, 30 bp, Homo sapiens; identical to SEQ ID NO: 87548
  chr14:102680172-102680202
  hypo

SEQ ID NO: 176268 - DNA, 119 bp, Homo sapiens; identical to SEQ ID NO: 87549
  chr14:102680414-102680533
  hypo

SEQ ID NO: 176269 - DNA, 30 bp, Homo sapiens
  chr14:102681592-102681622
  hypo
aggactgttgattggcgtttcggctgagct

SEQ ID NO: 176270 - DNA, 272 bp, Homo sapiens; identical to SEQ ID NO: 27868
  chr14:102681973-102682245
  hypo

SEQ ID NO: 176271 - DNA, 30 bp, Homo sapiens
  chr14:102682567-102682597
  hypo
tacagctctcaaaagcggcctcctggggcc

SEQ ID NO: 176272 - DNA, 30 bp, Homo sapiens; identical to SEQ ID NO: 27869
  chr14:102685384-102685414
  hypo

SEQ ID NO: 176273 - DNA, 30 bp, Homo sapiens; identical to SEQ ID NO: 87552
  chr14:102685663-102685693
  hypo

SEQ ID NO: 176274 - DNA, 290 bp, Homo sapiens
  chr14:102685938-102686228
  hypo
tttgctctgacgggcgggctccagggagtccctggtcaagcaccctggggtcctcttgggtttttcaccggtggccaacgtgcttcctgagtgctgcagcatggggaccctgagttttgatcatgggcacattctctgcatggcgatgcattctaaaagaactgttaaccagggctgccatcaaaagggcgaagcctgctaacgggaacccccagttccgttatgccagtatggactacagaagacgagaggaggacaggtttgagggcggttgattcaagatctctctg

SEQ ID NO: 176275 - DNA, 30 bp, Homo sapiens; identical to SEQ ID NO: 87554
  chr14:102688909-102688939
  hypo

SEQ ID NO: 176276 - DNA, 30 bp, Homo sapiens; identical to SEQ ID NO: 87555
  chr14:102689357-102689387
  hypo

SEQ ID NO: 176277 - DNA, 133 bp, Homo sapiens; identical to SEQ ID NO: 87556
  chr14:102691860-102691993
  hypo

SEQ ID NO: 176278 - DNA, 30 bp, Homo sapiens
  chr14:102692315-102692345
  hypo
caggaagaggtcggccgtgccaggggtggg

SEQ ID NO: 176279 - DNA, 449 bp, Homo sapiens; identical to SEQ ID NO: 87557
  chr14:102695441-102695890
  hypo

SEQ ID NO: 176280 - DNA, 30 bp, Homo sapiens; identical to SEQ ID NO: 87558
  chr14:102698077-102698107
  hypo

SEQ ID NO: 176281 - DNA, 27 bp, Homo sapiens
  chr14:102791275-102791302
  hypo
gggtccgtctcaaaagaaaaagaaaaa

SEQ ID NO: 176282 - DNA, 234 bp, Homo sapiens; identical to SEQ ID NO: 27872
  chr14:102792999-102793233
  hypo

SEQ ID NO: 176283 - DNA, 37 bp, Homo sapiens
  chr14:102900922-102900959
  hypo
gaggcagtgatgtcacgggactcggagatgagccgtg

SEQ ID NO: 176284 - DNA, 144 bp, Homo sapiens
  chr14:102901394-102901538
  hypo
gacattgacgtccagcgatgaggaggacatctatgcccacgggcttccttcttcatcctcagagacgagtgtgacagagctcggacctagttgctcccagcaggacctgagccggctgggtgcagaggacgccgggctgctcaa

SEQ ID NO: 176285 - DNA, 479 bp, Homo sapiens
  chr14:102909002-102909481
  hypo
ctgctcaggagtgtgtcgtgtaagaagtcctgccggtgattcccacctagtttagtggaaggaaatatcacccaaggactgcaatactataggtgcgtctgtgattagtcacggagcatatttgagtactgagacctaattgcaggcctaaggtcaaggaatacagggttgtaggcgacagttggtctgtctgctcccctgggaatagcctttgagctcatttagacatactttattgacagaacacaaggaggcaaggggagagccctggacagggagccagggaccctgagctttggcctgccactgccttgcagtttgacagacctcagatttcatctgggaaattcggggtttcattttattagtggaacctcgcacccagtcagagcagagaggagccgccgtgctggagctctctgcaggaacgactgcaggcctcaggtccctgccaactccagcagcgctgcagccctctg

SEQ ID NO: 176286 - DNA, 30 bp, Homo sapiens; identical to SEQ ID NO: 87562
  chr14:102910236-102910266
  hypo

SEQ ID NO: 176287 - DNA, 81 bp, Homo sapiens
  chr14:102931212-102931293
  hypo
aggggtgccgtgtggcgcctggcaggtggcagagtggccagaggccattattactctcttgagttacggtgttctcaagcc

SEQ ID NO: 176288 - DNA, 109 bp, Homo sapiens
  chr14:102931754-102931863
  hypo
gggtctacacactctcgttcatcaacatcacaactggaattcgggatttgtgaagtttagagctgaacagactgttacagattatgagtcaacacgtatattttctctt

SEQ ID NO: 176289 - DNA, 639 bp, Homo sapiens; identical to SEQ ID NO: 87564
  chr14:102939181-102939820
  hypo

SEQ ID NO: 176290 - DNA, 30 bp, Homo sapiens; identical to SEQ ID NO: 87565
  chr14:102959521-102959551
  hypo

SEQ ID NO: 176291 - DNA, 76 bp, Homo sapiens
  chr14:102961170-102961246
  hypo
aaaaaaaaactaaactagctcattcacctcactggcaggctgagacctgcagtcactccagcggcaccctgagtga

SEQ ID NO: 176292 - DNA, 353 bp, Homo sapiens
  chr14:102961891-102962244
  hypo
ggtggggaggccgggcggctggggaagaaacctgccatgtctgggaagaccggttggtccttagaggacctagcagcagcaaaggcaaacactggctcaggcagtggtgactggtggtgatgtgccgacaagagcggccaccgccccgtcctccttgctgctctgtctctccatcctccatgtcctgatccactgggactggccctggggctgaggtgtgagacttggtgcccacgggaggcatttcatacatgcgttcatcagcccacagttaggggcccctgcccagagcagccggcgggtgaggatgcgggcagcctggagagggcacctcgatccgggaggtgcaggtg

SEQ ID NO: 176293 - DNA, 30 bp, Homo sapiens; identical to SEQ ID NO: 87566
  chr14:102965540-102965570
  hypo

SEQ ID NO: 176294 - DNA, 169 bp, Homo sapiens; identical to SEQ ID NO: 87567
  chr14:102966287-102966456
  hypo

SEQ ID NO: 176295 - DNA, 252 bp, Homo sapiens; identical to SEQ ID NO: 87568
  chr14:102968259-102968511
  hypo

SEQ ID NO: 176296 - DNA, 493 bp, Homo sapiens; identical to SEQ ID NO: 87569
  chr14:102973239-102973732
  hypo

SEQ ID NO: 176297 - DNA, 30 bp, Homo sapiens; identical to SEQ ID NO: 87570
  chr14:102974350-102974380
  hypo

SEQ ID NO: 176298 - DNA, 378 bp, Homo sapiens; identical to SEQ ID NO: 51716
  chr14:102975680-102976058
  hypo

SEQ ID NO: 176299 - DNA, 34 bp, Homo sapiens; identical to SEQ ID NO: 87572
  chr14:103018820-103018854
  hypo

SEQ ID NO: 176300 - DNA, 155 bp, Homo sapiens
  chr14:103019456-103019611
  hypo
actcttgagagggcttctccacgtggccacaggacagactgtgcttcatccagcactgtacgctcaaacacacacacctgaaacaaaggctccacgaacaggcctgcccttacagcacaccatgctcttgtttagtcttccttatgttttttgtt

SEQ ID NO: 176301 - DNA, 30 bp, Homo sapiens; identical to SEQ ID NO: 27878
  chr14:103024332-103024362
  hypo

SEQ ID NO: 176302 - DNA, 96 bp, Homo sapiens; identical to SEQ ID NO: 87575
  chr14:103046496-103046592
  hypo

SEQ ID NO: 176303 - DNA, 32 bp, Homo sapiens
  chr14:103055785-103055817
  hypo
ttttgttttatacagacgggatctcgctatgt

SEQ ID NO: 176304 - DNA, 30 bp, Homo sapiens
  chr14:103056532-103056562
  hypo
taggcctgaggaggacgtgagtacccgaca

SEQ ID NO: 176305 - DNA, 37 bp, Homo sapiens; identical to SEQ ID NO: 27880
  chr14:103109323-103109360
  hypo

SEQ ID NO: 176306 - DNA, 37 bp, Homo sapiens; identical to SEQ ID NO: 87577
  chr14:103109599-103109636
  hypo

SEQ ID NO: 176307 - DNA, 26 bp, Homo sapiens
  chr14:103141100-103141126
  hypo
tctttaaaacttgataaaaatcgact

SEQ ID NO: 176308 - DNA, 121 bp, Homo sapiens; identical to SEQ ID NO: 27881
  chr14:103144543-103144664
  hypo

SEQ ID NO: 176309 - DNA, 40 bp, Homo sapiens
  chr14:103193873-103193913
  hypo
tttatgaaagctgcgcgttgttccgcgttctctcggtgtg

SEQ ID NO: 176310 - DNA, 203 bp, Homo sapiens
  chr14:103215839-103216042
  hypo
gcacagccgggaccgcggctgtcacacgcccctgcaaggcctggaggagggtccctgaaacttcgtgcagcacccgccctctcctgcagcagagattggcgctgcgttcccagccccttcagctgcttctccccagagccaggtgcttgggtccagccgtgcggtgtggaccaggccatgcttggggacgacaatcgaggcaa

SEQ ID NO: 176311 - DNA, 169 bp, Homo sapiens
  chr14:103216356-103216525
  hypo
ctgtccctgtggcctcggtccccgcggcctcggtccctgcagccgcagtggcgcctgcatggagggggccccctaatcatggtgcctcggctgtggaatgttctgggagctagtcagaacggacatggctgccgcagctgaccctcccgcctggcgaactctttctggc

SEQ ID NO: 176312 - DNA, 30 bp, Homo sapiens
  chr14:103216857-103216887
  hypo
gtcgttcctgtgtgccgaggccggtgcggg

SEQ ID NO: 176313 - DNA, 174 bp, Homo sapiens; identical to SEQ ID NO: 51719
  chr14:103242389-103242563
  hypo

SEQ ID NO: 176314 - DNA, 353 bp, Homo sapiens; identical to SEQ ID NO: 87583
  chr14:103242914-103243267
  hypo

SEQ ID NO: 176315 - DNA, 31 bp, Homo sapiens; identical to SEQ ID NO: 9977
  chr14:103263057-103263088
  hypo

SEQ ID NO: 176316 - DNA, 37 bp, Homo sapiens
  chr14:103277593-103277630
  hypo
tgctgtctgtattagcgtccttctgagcaaacaatgg

SEQ ID NO: 176317 - DNA, 97 bp, Homo sapiens
  chr14:103277689-103277786
  hypo
gcagtggctattcacaggtgctgtcgtactgccctggatgatagtacactgcagccatgaagtcctgggcttaagcagttttcgcctcagcctcctg

SEQ ID NO: 176318 - DNA, 30 bp, Homo sapiens; identical to SEQ ID NO: 87586
  chr14:103298717-103298747
  hypo

SEQ ID NO: 176319 - DNA, 30 bp, Homo sapiens; identical to SEQ ID NO: 27885
  chr14:103345559-103345589
  hypo

SEQ ID NO: 176320 - DNA, 424 bp, Homo sapiens; identical to SEQ ID NO: 87588
  chr14:103363892-103364316
  hypo

SEQ ID NO: 176321 - DNA, 56 bp, Homo sapiens
  chr14:103366992-103367048
  hypo
cttcactcaggctgccggcaccaccgggcttctcacagcgccgggcttgtgtgcca

SEQ ID NO: 176322 - DNA, 385 bp, Homo sapiens; identical to SEQ ID NO: 27887
  chr14:103369446-103369831
  hypo

SEQ ID NO: 176323 - DNA, 30 bp, Homo sapiens
  chr14:103371599-103371629
  hypo
gacatccgcctagccgacatggacctgcgc

SEQ ID NO: 176324 - DNA, 30 bp, Homo sapiens; identical to SEQ ID NO: 87590
  chr14:103377890-103377920
  hypo

SEQ ID NO: 176325 - DNA, 30 bp, Homo sapiens; identical to SEQ ID NO: 87591
  chr14:103378128-103378158
  hypo

SEQ ID NO: 176326 - DNA, 145 bp, Homo sapiens; identical to SEQ ID NO: 87592
  chr14:103391459-103391604
  hypo

SEQ ID NO: 176327 - DNA, 836 bp, Homo sapiens; identical to SEQ ID NO: 51721
  chr14:103394621-103395457
  hypo

SEQ ID NO: 176328 - DNA, 93 bp, Homo sapiens; identical to SEQ ID NO: 87594
  chr14:103397490-103397583
  hypo

SEQ ID NO: 176329 - DNA, 30 bp, Homo sapiens; identical to SEQ ID NO: 87595
  chr14:103405832-103405862
  hypo

SEQ ID NO: 176330 - DNA, 278 bp, Homo sapiens; identical to SEQ ID NO: 87596
  chr14:103406318-103406596
  hypo

SEQ ID NO: 176331 - DNA, 137 bp, Homo sapiens; identical to SEQ ID NO: 27889
  chr14:103407160-103407297
  hypo

SEQ ID NO: 176332 - DNA, 507 bp, Homo sapiens; identical to SEQ ID NO: 87598
  chr14:103408300-103408807
  hypo

SEQ ID NO: 176333 - DNA, 378 bp, Homo sapiens
  chr14:103409903-103410281
  hypo
atgaatgccacgccccgttctcggttcgccgagcccttctgcccaggggcctatgcccgccgacggggtcctctgctgaggcctctggaagaaccggccccatgtgctcagggagagaggttgctgagcccgcctactgctggtctgagacgtgagatctgaaccatgctctctgctgcgggctggcatggggcccacctctcccgatgctctgtgactactcaactaagggactggaagacaaaccaaagcaaaatcgaacacatgctgactgtcggtgggaaaagcagcaacagggatatgcaacagaaaacatatacatactacaggcgacaggagccgcaggccacatgagctcctgcgcgcgtgccctccggc

SEQ ID NO: 176334 - DNA, 30 bp, Homo sapiens; identical to SEQ ID NO: 27892
  chr14:103411444-103411474
  hypo

SEQ ID NO: 176335 - DNA, 30 bp, Homo sapiens; identical to SEQ ID NO: 87601
  chr14:103411851-103411881
  hypo

SEQ ID NO: 176336 - DNA, 75 bp, Homo sapiens
  chr14:103416813-103416888
  hypo
ctttgtaggctgttccgatgcctcgctgcacgtccacgcccagaggcctcttggactgctcgggaggtattgggc

SEQ ID NO: 176337 - DNA, 133 bp, Homo sapiens
  chr14:103417430-103417563
  hypo
tgcgtcttcagcatgcgcacagggaaagggcccatggcagaagcctgcttccatgctgtccctgccagcccgggccgcctcccacacgtgggagtttctacacggcaattcaggccagcggtcatggggacgt

SEQ ID NO: 176338 - DNA, 31 bp, Homo sapiens; identical to SEQ ID NO: 27893
  chr14:103419854-103419885
  hypo

SEQ ID NO: 176339 - DNA, 200 bp, Homo sapiens; identical to SEQ ID NO: 27894
  chr14:103421193-103421393
  hypo

SEQ ID NO: 176340 - DNA, 308 bp, Homo sapiens
  chr14:103423608-103423916
  hypo
gaggcatgaagatgccgcctctgtctccatctctgctgcccactctccacagctgtgactcacacactcatggacagtactggctgtaaactcacttgctaccgggccctctactctgttaatgttacagaaagctaccgctttcctggccgcctccattcagtgatcaagcaccatctctggttctctggaatccacttattcctccccacagcagtgcccggctccgcagcaacgagagaggcaatgacttgtgcagaaacaggcttatcaaagatctggcgggcacttaccggttaaatagattt

SEQ ID NO: 176341 - DNA, 412 bp, Homo sapiens; identical to SEQ ID NO: 125273
  chr14:103430221-103430633
  hypo

SEQ ID NO: 176342 - DNA, 30 bp, Homo sapiens
  chr14:103430925-103430955
  hypo
tgcagctccagccgcgcggacatgtccagc

SEQ ID NO: 176343 - DNA, 146 bp, Homo sapiens
  chr14:103432739-103432885
  hypo
gatgttctatctcacgaagcatggctatcagggagaagccaaacaagaaggggacgttcccgccttcctcggcacacagtgacacagtgtcacgtcagctagagtgcccgcagtgtacccgttgtatacacgggatctcattgatg

SEQ ID NO: 176344 - DNA, 266 bp, Homo sapiens; identical to SEQ ID NO: 87607
  chr14:103433123-103433389
  hypo

SEQ ID NO: 176345 - DNA, 269 bp, Homo sapiens; identical to SEQ ID NO: 27898
  chr14:103433868-103434137
  hypo

SEQ ID NO: 176346 - DNA, 18 bp, Homo sapiens
  chr14:103437783-103437801
  hypo
cactcacctaagcggcgg

SEQ ID NO: 176347 - DNA, 17 bp, Homo sapiens
  chr14:103437920-103437937
  hypo
cccggcccgtgatttgc

SEQ ID NO: 176348 - DNA, 30 bp, Homo sapiens
  chr14:103438338-103438368
  hypo
tgtctcgcagctgccgggacaccttctgct

SEQ ID NO: 176349 - DNA, 31 bp, Homo sapiens; identical to SEQ ID NO: 87611
  chr14:103442024-103442055
  hypo

SEQ ID NO: 176350 - DNA, 151 bp, Homo sapiens; identical to SEQ ID NO: 87612
  chr14:103442295-103442446
  hypo

SEQ ID NO: 176351 - DNA, 214 bp, Homo sapiens; identical to SEQ ID NO: 27902
  chr14:103444035-103444249
  hypo

SEQ ID NO: 176352 - DNA, 553 bp, Homo sapiens
  chr14:103453116-103453669
  hypo
ccccagttaccctggcgaggccctgtgacgattcctactcgtctgcccacccagctaacgagcccctcctgagcatctccttggtgccaggcactgctctccagcccacccacctatgcacgtgacaacgctgcccctgccttcatgaagcctgcacacgagctgaggtcttgcaaacacaaataggcactgctgtctcaggcaggctcacacggtgcaagctctgtgctgagtaccacggaaaacaggaatgggacaaagggacagagggacacgtgtggaggaagctggctgggggctgccacacaaagagacggcagtggccagacgaggtccaggaggcaggtggcgatctgggggaagactgctgcaaaccgccccatacccccaaaactgcactttatagatgaagacatggaagctgagccaactgcccacagttacagagcagcacgtgctggagcaggaacataaacacaggtctgtcccactaacgcctgtttctaaactactttctgtgcgctctcaaacacatgtgcgggtgcagggcacc

SEQ ID NO: 176353 - DNA, 118 bp, Homo sapiens; identical to SEQ ID NO: 87615
  chr14:103459688-103459806
  hypo

SEQ ID NO: 176354 - DNA, 277 bp, Homo sapiens
  chr14:103460343-103460620
  hypo
aaccataatttcacatacacacgaaaaatgtcccaagtggcctgagacaggctaggaagacacagaagagagtaaggaggcgccgagacacgccacaacaggtgttctatggaccgagttagcaggaatgcaacgaccagagtccaggctaaacaggacctggttgccaggaattccctataaaacagggatgtttttccaggggccaccccaggaccaccaacacagtacactctgagaagacaggccgaggaggggtctccggaaggccatcttc

SEQ ID NO: 176355 - DNA, 30 bp, Homo sapiens; identical to SEQ ID NO: 87617
  chr14:103460909-103460939
  hypo

SEQ ID NO: 176356 - DNA, 356 bp, Homo sapiens; identical to SEQ ID NO: 87618
  chr14:103467946-103468302
  hypo

SEQ ID NO: 176357 - DNA, 30 bp, Homo sapiens
  chr14:103468589-103468619
  hypo
ccggccccgcagtcacgggccagaaagctt

SEQ ID NO: 176358 - DNA, 68 bp, Homo sapiens; identical to SEQ ID NO: 87619
  chr14:103470285-103470353
  hypo

SEQ ID NO: 176359 - DNA, 31 bp, Homo sapiens; identical to SEQ ID NO: 87620
  chr14:103474513-103474544
  hypo

SEQ ID NO: 176360 - DNA, 93 bp, Homo sapiens
  chr14:103477692-103477785
  hypo
aaaacagctgctattcgaccctctctgtgttttttagaaaatgccaagaagtcaaaattcaattaacaaatggagttttagaaactacgtcag

SEQ ID NO: 176361 - DNA, 44 bp, Homo sapiens; identical to SEQ ID NO: 87621
  chr14:103487485-103487529
  hypo

SEQ ID NO: 176362 - DNA, 30 bp, Homo sapiens; identical to SEQ ID NO: 87622
  chr14:103492444-103492474
  hypo

SEQ ID NO: 176363 - DNA, 29 bp, Homo sapiens
  chr14:103492713-103492742
  hypo
gaggttccgtctcaaaaacaaaacaaaac

SEQ ID NO: 176364 - DNA, 1542 bp, Homo sapiens; identical to SEQ ID NO: 125274
  chr14:103523057-103524599
  hypo

SEQ ID NO: 176365 - DNA, 35 bp, Homo sapiens
  chr14:103525031-103525066
  hypo
taggagtgggcctggcgcggtggctcacacctgta

SEQ ID NO: 176366 - DNA, 94 bp, Homo sapiens; identical to SEQ ID NO: 87625
  chr14:103525305-103525399
  hypo

SEQ ID NO: 176367 - DNA, 216 bp, Homo sapiens; identical to SEQ ID NO: 87626
  chr14:103538913-103539129
  hypo

SEQ ID NO: 176368 - DNA, 30 bp, Homo sapiens
  chr14:103539338-103539368
  hypo
ccagagggctgtaggcgattctgctgcaca

SEQ ID NO: 176369 - DNA, 308 bp, Homo sapiens
  chr14:103539676-103539984
  hypo
aggctgagaggccagcgtgagattctgcactgagcgggggtaggggtactccacaccccaggtctccatcagtcaccaccatcgtgggtctggctcctatccctccccagcattcagaggataatctccctacatggccttggacacccagctcactgggtcgggtagcctgaggccgggatgccaggcctttgcacagagactgtctcagaggccacccctcccaccagcgctttggacctttctccacctttacaccccacccagccaacccaggctgcacacccctcgggcgcagtgttggcact

SEQ ID NO: 176370 - DNA, 78 bp, Homo sapiens; identical to SEQ ID NO: 9982
  chr14:103541956-103542034
  hypo

SEQ ID NO: 176371 - DNA, 31 bp, Homo sapiens; identical to SEQ ID NO: 51725
  chr14:103542258-103542289
  hypo

SEQ ID NO: 176372 - DNA, 30 bp, Homo sapiens; identical to SEQ ID NO: 87630
  chr14:103556641-103556671
  hypo

SEQ ID NO: 176373 - DNA, 170 bp, Homo sapiens
  chr14:103576353-103576523
  hypo
gcatgtctctgcaggcgggaccacatactggccattctggcgctgcgccgactgggccgccagcggaaccagcatctcttgcagcacactcaagacctgctgagagctgcggccggggcggcgggtgcggaggcccctcggggccgcgtgctcttcgaggagatcaaggt

SEQ ID NO: 176374 - DNA, 30 bp, Homo sapiens
  chr14:103576783-103576813
  hypo
ctcaatgctgcctatcgggcgggggggggc

SEQ ID NO: 176375 - DNA, 34 bp, Homo sapiens
  chr14:103583157-103583191
  hypo
ctggcatggcaggccatggcggcgcgtgcggaca

SEQ ID NO: 176376 - DNA, 30 bp, Homo sapiens; identical to SEQ ID NO: 27911
  chr14:103591734-103591764
  hypo

SEQ ID NO: 176377 - DNA, 30 bp, Homo sapiens; identical to SEQ ID NO: 125280
  chr14:103593101-103593131
  hypo

SEQ ID NO: 176378 - DNA, 30 bp, Homo sapiens; identical to SEQ ID NO: 125281
  chr14:103593514-103593544
  hypo

SEQ ID NO: 176379 - DNA, 539 bp, Homo sapiens; identical to SEQ ID NO: 125282
  chr14:103593754-103594293
  hypo

SEQ ID NO: 176380 - DNA, 143 bp, Homo sapiens
  chr14:103594642-103594785
  hypo
gttaccctgtgagcccgccgcagagctggagcccctcaggtgggaggctggctgtgcagctggtacccctgctgagtacagcctcaggcgtcccttgactccatagatccctgggcgtgcccgtcattcgcacggtctgcatg

SEQ ID NO: 176381 - DNA, 30 bp, Homo sapiens
  chr14:103595761-103595791
  hypo
ggagctgatgggagccggccagggcgccag

SEQ ID NO: 176382 - DNA, 408 bp, Homo sapiens
  chr14:103596228-103596636
  hypo
agcagaggagaggctcggagacagacaggacatgggcagggagcttgacgggtcttccaggtgagcgaggtgagggatagtgccccagtgacctgcccctcctcctccaggccaatgtgagggagttgatggaccgagctctggagctagaggcacggcgctgggctgaggatgtgcctccccagaggctggacggccactgccacagcgagctggccatcgacatcatccaggtactgcaatctgccccagggcacacgtaccgcccgtgcacgtgcatggggagccccacgcacattccgtcctgtgtgcatacccatgcccacctcggggcaccccctctgttcccgcctgtttcctccccgtcccctgcccccttgtccaggcgagcccctgctcagctcaccc

SEQ ID NO: 176383 - DNA, 31 bp, Homo sapiens; identical to SEQ ID NO: 87634
  chr14:103693881-103693912
  hypo

SEQ ID NO: 176384 - DNA, 73 bp, Homo sapiens; identical to SEQ ID NO: 87635
  chr14:103697778-103697851
  hypo

SEQ ID NO: 176385 - DNA, 31 bp, Homo sapiens; identical to SEQ ID NO: 87636
  chr14:103698758-103698789
  hypo

SEQ ID NO: 176386 - DNA, 58 bp, Homo sapiens
  chr14:103699247-103699305
  hypo
tccctccccactgaccggacctcaggtgctgacccctggggaccgggtcccccggatc

SEQ ID NO: 176387 - DNA, 54 bp, Homo sapiens
  chr14:103699525-103699579
  hypo
ctcgggtctcaagttcggagctggcagccaatgccccagcgcccccagcagccc

SEQ ID NO: 176388 - DNA, 30 bp, Homo sapiens
  chr14:103766907-103766937
  hypo
taatggcaaaaacaacgattacttttgcac

SEQ ID NO: 176389 - DNA, 30 bp, Homo sapiens
  chr14:103767601-103767631
  hypo
tgatgttctgtttcccgatgtgggtgccag

SEQ ID NO: 176390 - DNA, 30 bp, Homo sapiens; identical to SEQ ID NO: 27914
  chr14:103777894-103777924
  hypo

SEQ ID NO: 176391 - DNA, 16 bp, Homo sapiens
  chr14:103795971-103795987
  hypo
acggagcgagactcca

SEQ ID NO: 176392 - DNA, 36 bp, Homo sapiens
  chr14:103802597-103802633
  hypo
tttacaaaactaccaggggaacgcatttaaagagtg

SEQ ID NO: 176393 - DNA, 168 bp, Homo sapiens
  chr14:103803089-103803257
  hypo
tggatctcatgaggcgaataagctgcaagacatgttggatggattcattaaaaaatttgttctctgtcctgaatgtgagaatcctgaaacagatttggtaagtgcttttgtggttgtcgaaagaaaaagccatatacctgcttctgtgataccgctaagtcaccttcc

SEQ ID NO: 176394 - DNA, 31 bp, Homo sapiens; identical to SEQ ID NO: 87641
  chr14:103845496-103845527
  hypo

SEQ ID NO: 176395 - DNA, 30 bp, Homo sapiens
  chr14:103892081-103892111
  hypo
tttgcgtttttcaggcgcacacactcgttt

SEQ ID NO: 176396 - DNA, 30 bp, Homo sapiens; identical to SEQ ID NO: 87642
  chr14:103912492-103912522
  hypo

SEQ ID NO: 176397 - DNA, 30 bp, Homo sapiens
  chr14:103943238-103943268
  hypo
ctgcagttaaaattccgtctccaacgtttg

SEQ ID NO: 176398 - DNA, 159 bp, Homo sapiens
  chr14:103966174-103966333
  hypo
ggagtgcccgctgtgcgtgcgtggtgtgcggtgtgtgcagtgtgcagcgtgcagcggtatggcatgcaatgtgtgtgatgtatgcagtgtgcagcatggagctggcccctgtgcacacccctgcagccttgtggaagaaggtagcgctggctcagtcaa

SEQ ID NO: 176399 - DNA, 357 bp, Homo sapiens
  chr14:103977202-103977559
  hypo
cgaggcgagaccctccgagcggagtccggctggttaaagggcctgcacgggtctctcacagaagaaggaaagctggtcctgagggtggagccaggggaatctgggggccacttcagcattctttgttgccattggctttggttcagtaagctttgttgatttattttgttgttgttattgttgttagagtgatggggctgattgcttataagttctgaggttcttatttgcgtttccagctccctgggtattcattcatacctggtttctggctgtggtgaaatgtcttctgaccaagtgggttgataaacagggggcttcgctggagcgggggcagggggcgcggtcactgaacag

SEQ ID NO: 176400 - DNA, 152 bp, Homo sapiens; identical to SEQ ID NO: 27916
  chr14:103977770-103977922
  hypo

SEQ ID NO: 176401 - DNA, 440 bp, Homo sapiens; identical to SEQ ID NO: 87645
  chr14:103981302-103981742
  hypo

SEQ ID NO: 176402 - DNA, 176 bp, Homo sapiens
  chr14:103986337-103986513
  hypo
agacgtcgaagaccccgcccaccgcagccgtgtccacaccgcctggggagacagcaagtcagggcggaggaaacagggctgcccaaaggccacgggaagccgcagcacctgccctgctcacctgtgcctcgcttctgaagtcgcagccgcttaagcacctccgagaacttctcatg

SEQ ID NO: 176403 - DNA, 1104 bp, Homo sapiens; identical to SEQ ID NO: 125299
  chr14:103988424-103989528
  hypo

SEQ ID NO: 176404 - DNA, 182 bp, Homo sapiens; identical to SEQ ID NO: 9988
  chr14:103989537-103989719
  hypo

SEQ ID NO: 176405 - DNA, 30 bp, Homo sapiens; identical to SEQ ID NO: 87648
  chr14:103999035-103999065
  hypo

SEQ ID NO: 176406 - DNA, 158 bp, Homo sapiens
  chr14:104000004-104000162
  hypo
gtggctcggggaacccgcgcctgcctctgggacctgtccctttccctgcgagctcccccttctgggtccaaaggctcctggctcattcatgggcccggcatctcctgccggccacgggagcccgctggggaggatgcggcatgctcagcctctgtgcc

SEQ ID NO: 176407 - DNA, 748 bp, Homo sapiens
  chr14:104000388-104001136
  hypo
tgccctggtgggaggcggcagggaggggctgtcatgctcgggctctgcttcgagtaggcgcctcctgttcccgggagcagcgacagcctctaatttcctgtgacagcagcggcccccgcaccgccccacgctgccgtgctgtcagagctgctccgggcccagagctccagcagccctgtggaaggcaggagagcagtgcccgctgtgggccaagtgagacaatggcagcgcgggcttgacccggtgcctggcacatgggagggcctggcatggctaagctgggtgacatgaacagcggcgccaggccccatggggggctgtcagttgagggccaggcccctctgccctgcagtcccagctcttggagagcttgcagtctgtgttggggctgtcttaggctggcctcagaccctagggtgggagtccagggatgctagggccagacgggccaggctctgccacccctgccctctgaccctcgggtcctgtttcccacaggcgggcgcttctgctccttctcaccgtgcatcgagcaggtgcaacgcacatgccaggcgctggcagcgcgcggcttctcagagctgagcaccctggaggtgctgccacaggtctacaacgtgcgcactgtcagcctgccaccgcccgacctgggcacaggcacagatggccctgccggctccgacaccagccccttccgcagcggcacgcccatgaaggaggccgtgggccacaccggctacctgacctt

SEQ ID NO: 176408 - DNA, 30 bp, Homo sapiens; identical to SEQ ID NO: 27920
  chr14:104006540-104006570
  hypo

SEQ ID NO: 176409 - DNA, 285 bp, Homo sapiens
  chr14:104012457-104012742
  hypo
ttcctgcagctgcagcgacatgcgccaaggctcgctgtgggcagaggtctccgccaccaagaagcgaggctggagggcaggcactgattctccatcaccacacccagagcccccactgggaccagcgaagcacaaggcagccagtgccacagccccacaccccgcccgccagctgccctgtgtggtgtggaggcggctccgggggcggctgttcacagcagtgacccccgcctgctgcacggccacttgagctgtcctggctgctgccaacgccactgtgaagta

SEQ ID NO: 176410 - DNA, 455 bp, Homo sapiens
  chr14:104017443-104017898
  hypo
ggctgagtggatgcccgcccacctggaacagtgctaggtggggatggggggggggcatcacggggcacacacaagctgtcggaagggccgatgtccacaagggacgagagtcaggggcgcggctgtgggggtggaggcggcctggaagagcaggcatggcacagcggccgctggctcatgtggactggcgaggcactgtcctgctggggccgtcccaaagggaagcatggcccgtcactccccaggctaaaaaccatccacggctgcccctcctcatggctgaagtgcagctcctaggccctaccccgacgctctcaggtccccttctctccctcaccctgtggagagcggacctgcctcctgtccctcggaggactctcaggccccagccctgccgcagcagctcgtggtccagcttggctggccctgcctggccctcccggctccagcagcag

SEQ ID NO: 176411 - DNA, 38 bp, Homo sapiens; identical to SEQ ID NO: 87653
  chr14:104041399-104041437
  hypo

SEQ ID NO: 176412 - DNA, 156 bp, Homo sapiens; identical to SEQ ID NO: 87654
  chr14:104047673-104047829
  hypo

SEQ ID NO: 176413 - DNA, 1235 bp, Homo sapiens
  chr14:104047888-104049123
  hypo
ccatttaatattttcagaccccactttacctcgggtaactgaaaccatggaaagaaaaaccatggatggaggggacagctgtgctgccgccatctcccttacacagttgagtaaaccgaggcacagaagaaaatgaagtagccccagatgacgtaggaaatggcagaactgaagggaaaagcagagcagggggctgtagagttaaactgttcttcattccggtggcactagacctgcccgggcggccagaggacacgtggctcctgtcctgtctgccgtgtggctaggggacagccgtgcttgtgctgtgccgtctgagtgtttgtttctgtctgtgggaataaaggggttgccagacaccctccctgctctgtggagggagggtggaatcatgcctttggccactttgcccactcccccttgggccggagcatcagcattagctgtgccacagggtggtatgcgctctgctgaaggtggcaccttcagggaaaggcagtctgccggggaggctagcgagcaccctgggtaggagctgagcgtggcctccgcgcctcctcatgggaagtgctggagatgcaggagcccctgagccagagcccagcgctcttacaagagacctcacttcctgttcggggactggggctgctaagtcagagtgcgcctcctgcacccgccaccctggatgtggttccattccctggtccctgagccatagctggggggcatgagactgtcccctgggctgctttggggaccctacttcagggcagccctgccactccctgtaacgggctgtgggtcctgccctgtggccttcctacctctcttgcgtgtgggtgagcctgagcgtggccaccgccctgggagtgccacagaggcaagcggcactggtcctcatgtgtaaacagccccaccagcacgcggggctggagtagtcaggccgggacctgtcccaggaatgggcaggctgttaacctaggatgcattcaagttaggacacatttcattcccgtgtagcggtggctcccagttcctccgcagaacctgcaggagtgtgcgtgatgaaacccgtcactcgttgtgtatggtagacatacctgcctgggtcgtaatcacttgtgaagaaaatgaattatgctgtgacctttagatacgattcacataccataaaattcaccctgccttttttttttttttttgagatggagtctccttgtcgtgccctgcctaaa

SEQ ID NO: 176414 - DNA, 177 bp, Homo sapiens
  chr14:104061734-104061911
  hypo
gaacggtgtgctacagcgccttcattcctttccagagtattttcctctgtgatgcatgctctgcagtggatcagcttttgtcgtggatggctgagcgtgaggctgagccacccctgcctcctggtggatgtgggccgcacccctccagctggtcccacctgccgaccagctgttctg

SEQ ID NO: 176415 - DNA, 37 bp, Homo sapiens
  chr14:104062196-104062233
  hypo
tcttttttttttttttgagaccgagtctcgctctgtc

SEQ ID NO: 176416 - DNA, 120 bp, Homo sapiens; identical to SEQ ID NO: 125302
  chr14:104094603-104094723
  hypo

SEQ ID NO: 176417 - DNA, 106 bp, Homo sapiens; identical to SEQ ID NO: 125303
  chr14:104094809-104094915
  hypo

SEQ ID NO: 176418 - DNA, 20 bp, Homo sapiens
  chr14:104116033-104116053
  hypo
tgttttttttttttttcgag

SEQ ID NO: 176419 - DNA, 155 bp, Homo sapiens; identical to SEQ ID NO: 87659
  chr14:104121122-104121277
  hypo

SEQ ID NO: 176420 - DNA, 30 bp, Homo sapiens; identical to SEQ ID NO: 87660
  chr14:104129049-104129079
  hypo

SEQ ID NO: 176421 - DNA, 115 bp, Homo sapiens; identical to SEQ ID NO: 87661
  chr14:104152223-104152338
  hypo

SEQ ID NO: 176422 - DNA, 120 bp, Homo sapiens; identical to SEQ ID NO: 87662
  chr14:104158784-104158904
  hypo

SEQ ID NO: 176423 - DNA, 381 bp, Homo sapiens
  chr14:104159176-104159557
  hypo
ctctgttaacatgatgactagcgtgctgtcagtttgacactaaaacctgaagcactcggtgcagttgctcgggcctcacacagacacatcaggtttacatctgaaagtactgcctcccttccccatcacggaggccgtttgagttttcatccactccgccctttggtgtggctgtcagtgggtggccgggtgcctgtggctgctctagaacctgtttctcaggtgcctggggcccacccggcagctcgagctgttgggacttggcagtccctgcccctgtgctggtgctgagagttcgcgacagtggccaggcactgccctcccagttgtccagatccactaatcctcacagacaggccagtgccccgacctgtcccccaa

SEQ ID NO: 176424 - DNA, 407 bp, Homo sapiens
  chr14:104159871-104160278
  hypo
atttgttttttcatgcaggaacgaaataattgtctggccgactcgcgagctctgagtgccagccacactgacctggcccactgagagccagcagggctaggtaacctgtcttgggagtgtgagaccgccccgccctgccacgcccctcaccgccctgcccggaggcgccagccgcactccttggcttcctttcctagatagtgacgtccaccaaccttggaggtgccttttcaaaacacccgggaggccgtgcctcagcattctgttactcggcctgcagccccagtgccaggagccaccccgaccgcgacccggccaggctggctcagggaggccgaggtggcgctgaggtggcttcagcacgctggggattggctcctgctcacggatgctgttgcatttcctgc

SEQ ID NO: 176425 - DNA, 30 bp, Homo sapiens
  chr14:104161233-104161263
  hypo
tgtttgtgaaagcgcgtttgtttccacaag

SEQ ID NO: 176426 - DNA, 30 bp, Homo sapiens; identical to SEQ ID NO: 27930
  chr14:104164387-104164417
  hypo

SEQ ID NO: 176427 - DNA, 263 bp, Homo sapiens; identical to SEQ ID NO: 87666
  chr14:104164989-104165252
  hypo

SEQ ID NO: 176428 - DNA, 30 bp, Homo sapiens
  chr14:104168891-104168921
  hypo
cagatggtgtacaggcgcccagttacatct

SEQ ID NO: 176429 - DNA, 154 bp, Homo sapiens
  chr14:104169505-104169659
  hypo
tcaccacatcggccacgtgctcgatgaagatctggctgccaaatcggagcttctgaagcagctctcctggaacgtcagtgcgcagccgcggctgctgggccatgagctgctgcaggcgcttgtgcgggaaggcgtcttccgtgcagatgtagac

SEQ ID NO: 176430 - DNA, 30 bp, Homo sapiens; identical to SEQ ID NO: 87667
  chr14:104172959-104172989
  hypo

SEQ ID NO: 176431 - DNA, 30 bp, Homo sapiens; identical to SEQ ID NO: 87668
  chr14:104175832-104175862
  hypo

SEQ ID NO: 176432 - DNA, 132 bp, Homo sapiens; identical to SEQ ID NO: 87669
  chr14:104188352-104188484
  hypo

SEQ ID NO: 176433 - DNA, 30 bp, Homo sapiens; identical to SEQ ID NO: 87670
  chr14:104191125-104191155
  hypo

SEQ ID NO: 176434 - DNA, 30 bp, Homo sapiens
  chr14:104191454-104191484
  hypo
ccctgctgttagagcgggggagccggcggc

SEQ ID NO: 176435 - DNA, 30 bp, Homo sapiens; identical to SEQ ID NO: 87671
  chr14:104192605-104192635
  hypo

SEQ ID NO: 176436 - DNA, 30 bp, Homo sapiens; identical to SEQ ID NO: 27932
  chr14:104193784-104193814
  hypo

SEQ ID NO: 176437 - DNA, 680 bp, Homo sapiens
  chr14:104194174-104194854
  hypo
gcagtgcgcggagtgcgccctcgtgtccctcaaggaggcggagttctacgacaagcagctcaaagtgctcctgagcggtaaggacgggtgtcctgcacagtcccgcgcgctccgccagccggctcctcgtgtctgtggcgatgctgtgggctgtgcacggggcgttctgcttctctgacgttctctcgccctccctcccttccccgttttcttctggattcgtttagaagcggttatagagccttcccttcttttcagaggcggaatgtcgtctaaaatgttggtgctgactccgctgggcacgtccatcaggtgggaggggaggccctgggcccaggcagcaccttcctccttcccccgggtggaacccggcgccggcgctcgggcgtttgcaaccactgtggctcctcggaggggccggagacctttgcccaatagcacgatgcagacccggttttgagccatctctggggacctggtgtgggagaagggcattctccaggggcatagggtgtgcctccctggaatctgaacaacgagcagcgccttctccccactgtccgtccacctctggccactgccgtcccagcctcctgtcccctgcctgcccgccgtggggtctgggaccacctgccttcctgcccacagctccatcctgtgtgaaacgggcatggtccctg

SEQ ID NO: 176438 - DNA, 73 bp, Homo sapiens
  chr14:104195242-104195315
  hypo
aggagccaccttcctcgtcacgtttggaaactcagagaaacctgaaactatgacttgtcgtctttccaataac

SEQ ID NO: 176439 - DNA, 153 bp, Homo sapiens; identical to SEQ ID NO: 87675
  chr14:104200029-104200182
  hypo

SEQ ID NO: 176440 - DNA, 486 bp, Homo sapiens; identical to SEQ ID NO: 27935
  chr14:104202355-104202841
  hypo

SEQ ID NO: 176441 - DNA, 122 bp, Homo sapiens; identical to SEQ ID NO: 27936
  chr14:104204086-104204208
  hypo

SEQ ID NO: 176442 - DNA, 30 bp, Homo sapiens; identical to SEQ ID NO: 87678
  chr14:104205284-104205314
  hypo

SEQ ID NO: 176443 - DNA, 30 bp, Homo sapiens; identical to SEQ ID NO: 87679
  chr14:104206687-104206717
  hypo

SEQ ID NO: 176444 - DNA, 25 bp, Homo sapiens
  chr14:104220122-104220147
  hypo
ttcaggctggggagcactggccgga

SEQ ID NO: 176445 - DNA, 66 bp, Homo sapiens; identical to SEQ ID NO: 87681
  chr14:104222923-104222989
  hypo

SEQ ID NO: 176446 - DNA, 89 bp, Homo sapiens; identical to SEQ ID NO: 87682
  chr14:104231445-104231534
  hypo

SEQ ID NO: 176447 - DNA, 30 bp, Homo sapiens
  chr14:104268977-104269007
  hypo
ttacttgctctgaaacgcggaattctttat

SEQ ID NO: 176448 - DNA, 30 bp, Homo sapiens
  chr14:104315207-104315237
  hypo
ggatcctaaacaagccgcatcttctctgca

SEQ ID NO: 176449 - DNA, 83 bp, Homo sapiens; identical to SEQ ID NO: 27938
  chr14:104335354-104335437
  hypo

SEQ ID NO: 176450 - DNA, 203 bp, Homo sapiens
  chr14:104335676-104335879
  hypo
cgagactccgtctcaaaaaaaaaaaaaagacggcaaactggggcagcgttgggtggcaacaagccaaaccagggaccttaaaccaggtctttggtttgatctcaggtggggatctgggttccggaaggctccaagagctgcagttacaggttagttttcaggacagcgtgcagggcatcctggggacacggctgggcatcctg

SEQ ID NO: 176451 - DNA, 83 bp, Homo sapiens; identical to SEQ ID NO: 87685
  chr14:104349423-104349506
  hypo

SEQ ID NO: 176452 - DNA, 130 bp, Homo sapiens; identical to SEQ ID NO: 27941
  chr14:104353833-104353963
  hypo

SEQ ID NO: 176453 - DNA, 18 bp, Homo sapiens
  chr14:104391675-104391693
  hypo
gcccggccaaaaaaacct

SEQ ID NO: 176454 - DNA, 604 bp, Homo sapiens; identical to SEQ ID NO: 87688
  chr14:104393985-104394589
  hypo

SEQ ID NO: 176455 - DNA, 382 bp, Homo sapiens
  chr14:104395205-104395587
  hypo
ctacacaacccgacgcgcggcccagagcggtgcctgtaaggaagctgagctagaggtttttttttttttttttttttcagttcttaatgtttaacagactagtttttgaggcactcaggttttcaggataacggagcggagggcagaggtcccataggccccttccctcccagagtttcccctgtgagcatctgcgtaaggtgtgggtatttgtgacagtcggcgaacctgcatcgctgcgtcttcgtcacccggaggccatcgttacaggagggttcacgcctcgtactggacgttctgtgggtttggacaaacgcctaacgtcacgcattacagagttcactgacctacagatcttctcggccccactgttcctgcctcc

SEQ ID NO: 176456 - DNA, 30 bp, Homo sapiens
  chr14:104547259-104547289
  hypo
tagggcaacagacgacgcctgagcggctga

SEQ ID NO: 176457 - DNA, 30 bp, Homo sapiens; identical to SEQ ID NO: 27944
  chr14:104547817-104547847
  hypo

SEQ ID NO: 176458 - DNA, 64 bp, Homo sapiens; identical to SEQ ID NO: 87691
  chr14:104548474-104548538
  hypo

SEQ ID NO: 176459 - DNA, 30 bp, Homo sapiens; identical to SEQ ID NO: 87692
  chr14:104560589-104560619
  hypo

SEQ ID NO: 176460 - DNA, 30 bp, Homo sapiens
  chr14:104562040-104562070
  hypo
cacagggcaagtcagcgctgtgggcggccg

SEQ ID NO: 176461 - DNA, 30 bp, Homo sapiens
  chr14:104562338-104562368
  hypo
gcatcagggtggccgcgcacagagccgcac

SEQ ID NO: 176462 - DNA, 30 bp, Homo sapiens
  chr14:104567369-104567399
  hypo
aggctcaagacacaccggcctcaggcccag

SEQ ID NO: 176463 - DNA, 232 bp, Homo sapiens
  chr14:104570010-104570242
  hypo
tggtagggaccgccccggccatcctgcccctgcagccctgagccccagccctctgcagctcccacggccctcaggctccctggggccctcaccagccagtgcagaccccgcgtggacctgagatgtctgcagtgtggccccaccagccccaggccctgtcccctgtcctccgtcgtggtgctttccagcctctcggggagtgggcagggttggggcgcggctcacagccaga

SEQ ID NO: 176464 - DNA, 112 bp, Homo sapiens
  chr14:104571680-104571792
  hypo
ttcggggggagatgacgccaccctcggtggaagagcgccggccctcactgcagggcaacacgctgggcggtggggtctcctggctcctcagtctgagcggcagccaggtaat

SEQ ID NO: 176465 - DNA, 31 bp, Homo sapiens
  chr14:104577438-104577469
  hypo
ctgctcggcaggtgggcgtgcatatgtgtgt

SEQ ID NO: 176466 - DNA, 113 bp, Homo sapiens
  chr14:104600534-104600647
  hypo
ctgtgccgcacactgcgtgcccgtccctgtcccgggtccacctgccgtccatccactgtcgccaaggatgaagagacgattggccattcctacccagccggtttccactacta

SEQ ID NO: 176467 - DNA, 3632 bp, Homo sapiens; identical to SEQ ID NO: 125316
  chr14:104601963-104605595
  hypo

SEQ ID NO: 176468 - DNA, 30 bp, Homo sapiens
  chr14:104617148-104617178
  hypo
gtggaggacccctgtcgggtggtgttcgga

SEQ ID NO: 176469 - DNA, 47 bp, Homo sapiens
  chr14:104617751-104617798
  hypo
ctgtacccgatcctgcggctcttgcgccccttcggtgagctcatgtg

SEQ ID NO: 176470 - DNA, 790 bp, Homo sapiens; identical to SEQ ID NO: 87695
  chr14:104618013-104618803
  hypo

SEQ ID NO: 176471 - DNA, 30 bp, Homo sapiens
  chr14:104619189-104619219
  hypo
cctgggggtgtgaggcgtccatggacgtcg

SEQ ID NO: 176472 - DNA, 30 bp, Homo sapiens; identical to SEQ ID NO: 27949
  chr14:104621161-104621191
  hypo

SEQ ID NO: 176473 - DNA, 822 bp, Homo sapiens
  chr14:104623040-104623862
  hypo
tcctgggtcccggggcggcttgttctgctgacgtgccgtgcctggcctctggcctgtgccacttgggacaccctgaggacgctgggccttccagaccagcccacgtcccctcagcacggggaccccagtcctctgctagcctgggtacaaaggacgcctcgggcagtggttatcgactggacacttggggccgaatgacgcttggcacctgggtgaccgtgacctgaccaggccacggtgcccaagggggtccttggagagcttggggcactgggcccttggggaaggggccggggcgaggggtggccaggctgaagcaggctgccttccctgccttgcctggggttgcatccccccacgccgcccaggaccaggtttggcctgagggttcggggtcccacgtgtctgggaatggaacgtgcggaggtggagctcacgtttgctgggctgtcccgggcgtttaattacgtttgtgcttcattatgaggaggcctccctttctgggatttatttgagctaatgagttggaaatgccagggtagtatttcagatgagggagcgccacacatcaccgtacgtggggcaattagtgttcctgccaaatagttatcgtggtttcttctctaattacgccgctgggtgctcccaggaggctcaggggtgagagggtggggggtctgtgtccatcggtcttgaccagtgtggtcgctgcgattctggagtttgatgggggagaggcggaaagtctggcttctggaccaccatctgcctccctctctgcctccaaggagtcctgctggggcagaccgcccacacaccccg

SEQ ID NO: 176474 - DNA, 30 bp, Homo sapiens
  chr14:104624155-104624185
  hypo
gccctgatggcttgtcgaaggcctggggcc

SEQ ID NO: 176475 - DNA, 30 bp, Homo sapiens; identical to SEQ ID NO: 27951
  chr14:104624723-104624753
  hypo

SEQ ID NO: 176476 - DNA, 30 bp, Homo sapiens; identical to SEQ ID NO: 87700
  chr14:104627668-104627698
  hypo

SEQ ID NO: 176477 - DNA, 36 bp, Homo sapiens
  chr14:104627958-104627994
  hypo
tgtctcgttcatcctcgctcacgcgtgttctgagct

SEQ ID NO: 176478 - DNA, 111 bp, Homo sapiens
  chr14:104628657-104628768
  hypo
accacagaggacgcccggtcccagcctctgtctaggcggcctgggccctgggtgtgcccgctgtggcccaggcatacctgagatctgtgctgcggacgctgctcctgggag

SEQ ID NO: 176479 - DNA, 30 bp, Homo sapiens; identical to SEQ ID NO: 27952
  chr14:104630658-104630688
  hypo

SEQ ID NO: 176480 - DNA, 30 bp, Homo sapiens
  chr14:104630998-104631028
  hypo
gtgtgtgcctgtctgcgtgtgtatgtgtgt

SEQ ID NO: 176481 - DNA, 261 bp, Homo sapiens
  chr14:104633623-104633884
  hypo
tgtactaggttcagcgtggggcgggacagccaggtcacggggctcccagggactaaggttgggtttgatccagggaagccccttgcgtaggctccactgagacgcagccctgagggggctgggggcaggaggggactctctgctctccagagtcaccgtgtgcaggcgggcccctgccatgggaaagcgggatgcgtgatgggttgattctggcgccgcgctccacatgggaagactgccgcctgtggagggcacagggcc

SEQ ID NO: 176482 - DNA, 30 bp, Homo sapiens; identical to SEQ ID NO: 27953
  chr14:104637046-104637076
  hypo

SEQ ID NO: 176483 - DNA, 30 bp, Homo sapiens
  chr14:104638922-104638952
  hypo
ctcggggaccgtggccgacgtgctccagtc

SEQ ID NO: 176484 - DNA, 601 bp, Homo sapiens; identical to SEQ ID NO: 27954
  chr14:104639201-104639802
  hypo

SEQ ID NO: 176485 - DNA, 638 bp, Homo sapiens
  chr14:104640044-104640682
  hypo
tccggaggccgcagccgcctgcacctcatcgacctgggcagctgtgaggcggcggctggcagggccggggaggctgctgggggtcccctgtgtctgtccctgtcggccctgggcagcgtcatcttggccctggtcaacggagccaagcatgtgccgtatcggtgagtgtagggcctgggcaggtgccgaccagggtggccccttggtgacctggtaaatccgtgtctggtgtgcccggtgctgctgtggcccccagctcctcagggctttgctcctccaccacctgacaggcctcgctgcccgtgggctgcctggggccccacgctgggctggtgccggagctgggtgggaaccagactgatcccagggctgcccttggccagcctgtccccgaagctcccttcccaaggccttggcatctgaaccgcctcgacccgcagggaccacaggctcaccatgctgctgcgtgaatccctggccaccgctggctgccgcaccaccatgatcgcccacgtgtcggatgcgccagcccagcacgcagagacactcagcaccgtgcagctcgccgcccgcatccaccgcctgcgcaggaagaaggccaaggtgctccccacctcctgcccgccccatctcggggc

SEQ ID NO: 176486 - DNA, 699 bp, Homo sapiens; identical to SEQ ID NO: 27955
  chr14:104641145-104641844
  hypo

SEQ ID NO: 176487 - DNA, 709 bp, Homo sapiens
  chr14:104642173-104642882
  hypo
acagtgaccctgcagcggccagtggagctcaacggcgaggacgagctggtgttcacggtggtggaggagctgtccctgggggcgcttgccggagctgggcggcccaccagcctggctagcttcgacagtgactgctccctgcgggccctggcctcggggtcccggccagtcagcatcatcagcagcatcaatgatgagtttgacgcctacacctctcaggcccctgagggggggcccctggagggggcagcctgggccggcagcagtcacggctcctccatcagctcctggctcagcgaggtcagcgtctgcactgccgacagccgtgaccccacgccgcagccccgcttcagccccgactcgctggcagggcttgaccctgggggcccccctgccctggatggttccctgggggatggaagctctgggttcctggggccagacagacctgacagtcctgggccaacctggggtccgtgccctggggaagtggctgcagtggccccatcccgacccggcagggagccccaggccgggccctcgcggtgggcatccgcagcccagaccatccactccagcctcccccggaaaccgaggactgcctctgccaccacccgtgtgggctgtgctcgcctgggccagagcccacctggccgtggaggcctgtttgaggacccatggctgctccgggtaggggagtgtgataccc

SEQ ID NO: 176488 - DNA, 1071 bp, Homo sapiens; identical to SEQ ID NO: 27956
  chr14:104643152-104644223
  hypo

SEQ ID NO: 176489 - DNA, 222 bp, Homo sapiens
  chr14:104645047-104645269
  hypo
cgccttcagcggccccgccccaccccgagggaggcccccacccaggtagggcctttggtgggctggggtctatgacccctggtggggagcctgccgcggatggcagagtgagccatttgatgggctcgccaggcctctgggggtgtggctgggcagcccctgacctcactttctgtccacgttcctcccaggacgcaaaggtaggagcggccctgcccagcc

SEQ ID NO: 176490 - DNA, 1147 bp, Homo sapiens
  chr14:104645539-104646686
  hypo
catgcctgagcccccgcccgccctgcctcccagggtctggcgtgcgtcagtacaaggctgcggctggcggagcgcaggcagcagcggctgcgggaggtgcaggccaagcacaagcacctgtgtgaggagctggccgagacccagggccggctgatgctggagcctggccgctggctggagcagtgtgagtcccgcccgcccacggacccagcccggcccaccgtgtgccctgacagctgccctcccctcccagagccctgttgctctcctgtacctcgtggtgggaaggctggaaggcagggtcggccgggccaagatgcctttcctggggcctctggggggccaggtggctgcccccagcctcgggcctgacgcaggtgcccctcccctctcctcccctccccagttgaggtggacccggagctggagcccgagtcggccgagtacctggcggccctggagcgagccacggcggccctggagcagtgcgtgaacctgtgcaaggcgcacgtcatgatggtcacctgcttcgacatcagcgttgcagccagtgctgccatcccggggccgcaggaggtggacgtctgaggctgggcgccggacaagaggagggggcgtgcagcgggctggaggacgggacgtgggacggagcgaggatgtggtgggggctgcggggggaggatgcggaggggtttctgtgcaggacgggagtctcagagaggagacggagtgtgggggagggagggccggccacgcggtggacagagcgagggtgccagggtgaccagaagaccgtcaccacccgacagcaacgcaagtgcctttgaccttgatttggacttttctcccttttgcatttggtgctacagacttgagacaccagcagaagttgtgttcagcccggccccgctgcgcctgtccgggccggggctggcgccggttgtgtttgtgtccaccttgccttctttgcagccaagcagtttttgtggagtggagtgggacttacctgcacgccccaggggtctttcaggattcaggatgacttttcttttacaatggtttcctctcggcagagcccgggttgtgggggatctgtgtggggttctcaacgcagatccatcctggggtctcccgggcagggatggct

SEQ ID NO: 176491 - DNA, 238 bp, Homo sapiens
  chr14:104647087-104647325
  hypo
tgccagcgtttgcgacgtccccgcacgacaggctcatactttctgaggatcgtgcatagcataggacgtctgaacctttgtacaaatgtgtagatgacatcttgctacagcttttatttgtgaattaaagatgcatcgatggttcccacggctgccgagttcactgggcgtcggcagactcctcacgccctggtgtgccgccctctgagggtccctggggtgacgggcagtaagcgtg

SEQ ID NO: 176492 - DNA, 30 bp, Homo sapiens
  chr14:104648461-104648491
  hypo
aagaggctccggctgcggtggaagcaggtc

SEQ ID NO: 176493 - DNA, 30 bp, Homo sapiens
  chr14:104648794-104648824
  hypo
agaagccgagggccacgcatgccggctctg

SEQ ID NO: 176494 - DNA, 31 bp, Homo sapiens; identical to SEQ ID NO: 87713
  chr14:104650284-104650315
  hypo

SEQ ID NO: 176495 - DNA, 194 bp, Homo sapiens; identical to SEQ ID NO: 87714
  chr14:104655995-104656189
  hypo

SEQ ID NO: 176496 - DNA, 97 bp, Homo sapiens
  chr14:104678738-104678835
  hypo
gcagggctgagagattagcatcggcaccacctgtgttggccactgaagctgctccacaccacggcggctggagagcgcaggtccatgcaccctgggg

SEQ ID NO: 176497 - DNA, 30 bp, Homo sapiens
  chr14:104679319-104679349
  hypo
ccaccccatcccgcccgcctggctctgctc

SEQ ID NO: 176498 - DNA, 442 bp, Homo sapiens
  chr14:104679814-104680256
  hypo
gccccatggagcctccggtgagaactcaccgcagctgacacccgattctgggctacgcagagaacccggccgtgcgggaagtccggcctgcaggtggggagctcatccatgccctggtttaagacgctaagtgtatggcttaagacgctaagtgtatgacagttgtcacacagcacaggaaatgaatacatgtccccgatgtgtttttctggaaaacacgccttgcatttggcgtcctgtggccgctgcaaccagtgatcgcaaacgatgagcagggggcatcctctcaacgccccagggtccagaggtctgaaatccgtgtccctgggccacagccaaggtgcctgcaggcattgccccctctgggtgctgctgccgggacccttccctgcctctcccggcccgtggtggccccaggcgtccttggcgtgtggccccatcc

SEQ ID NO: 176499 - DNA, 30 bp, Homo sapiens
  chr14:104682605-104682635
  hypo
gattgcaaaagacatcgggcatcgggcggg

SEQ ID NO: 176500 - DNA, 30 bp, Homo sapiens
  chr14:104682917-104682947
  hypo
acgagccaattcccccggctgccctctccc

SEQ ID NO: 176501 - DNA, 30 bp, Homo sapiens
  chr14:104688464-104688494
  hypo
caggcccctcctccccgctttgtcctctgc

SEQ ID NO: 176502 - DNA, 438 bp, Homo sapiens
  chr14:104695969-104696407
  hypo
agcggcctgcccgtccgcgaagtcacttagctgggatctaatcgggtttcacaggggcataaattacttggctagaggttgttcccgggtgtttccaccccgggcctgttatttacacaccgtgcggtaatgtagtcacggccttgggtgcgcagtatttatggtgtttgatcggcttccagcccaggccgcctgtccaggaacatttgttgagatgttgtgcagagccgctggggacctctgccacaggcgggcatcaatctacctggagctcctgcggcagccctgcagagcctcaaaagggcagggcgggcctgtggtgccaccctgagctggtcactgtctgcagatggcagctctaggagtgatggctgaggacgaacaagggtgcgaactgtcactgacatttccgtggggcgtggacgtgacacatcccga

SEQ ID NO: 176503 - DNA, 30 bp, Homo sapiens
  chr14:104718405-104718435
  hypo
acacgcccactcacccgctcattcattcat

SEQ ID NO: 176504 - DNA, 187 bp, Homo sapiens
  chr14:104718657-104718844
  hypo
gggggtgccgactcccgcctgccacccaccctttgtccacggcgttcctggctgctttggctccctcagcctccagtcctttcttctcttttcacctccttttccaattaagagcccaccctgcctgccccacagacaccgtcaagcctggccccattatccagtcccctggcgggtggtctctgca

SEQ ID NO: 176505 - DNA, 30 bp, Homo sapiens
  chr14:104733272-104733302
  hypo
gtgtgcgcatgtgcacgcagtcagagtgcg

SEQ ID NO: 176506 - DNA, 31 bp, Homo sapiens; identical to SEQ ID NO: 27959
  chr14:104733598-104733629
  hypo

SEQ ID NO: 176507 - DNA, 91 bp, Homo sapiens; identical to SEQ ID NO: 27960
  chr14:104733748-104733839
  hypo

SEQ ID NO: 176508 - DNA, 605 bp, Homo sapiens; identical to SEQ ID NO: 87719
  chr14:104746282-104746887
  hypo

SEQ ID NO: 176509 - DNA, 30 bp, Homo sapiens
  chr14:104760913-104760943
  hypo
gatttggggtgtgtccgtgcaggtgtttct

SEQ ID NO: 176510 - DNA, 101 bp, Homo sapiens
  chr14:104761169-104761270
  hypo
ctccagcttactgactcggtgcaggtctgcggactcagcctccatcattgtatgagctaattcactgcaataaatctctctttccacggcctgttgattct

SEQ ID NO: 176511 - DNA, 321 bp, Homo sapiens
  chr14:104770264-104770585
  hypo
gctctgcaagctgcccgggtctggccagcgggcactagtgtgggagttcagctggcaacccccgacagccttctgagcacggcccccttaccaggtgccgccgcttcccagcctccagccccaccccacctcggggatcctgcccaaggtctgctctgcccggaagtgaaggagaagcccgttctcttccccctcgggctggggaagagctcacagcccaggtcacgccacagaaatcccctcctcatctggccctctgactccacctttccacgctgtccgtgggaccaggggctgagccgtcagcggccgtggaccttg

SEQ ID NO: 176512 - DNA, 30 bp, Homo sapiens
  chr14:104783996-104784026
  hypo
ggtactaacgcgctccgtgcacgctctgct

SEQ ID NO: 176513 - DNA, 502 bp, Homo sapiens
  chr14:104800475-104800977
  hypo
cgctccccagtctctcgtgggttccgggcagtgagtggcagccggagggcccagggcaggtgctgcctgtcaggacctcagcctgtatgtgccgggggatgttcgtgcccaacagaggccacttgtctctgggccggggaggcaccgggtggccgtgcctgtcagggcctccttagacagtgccctctcgggccagccggcggctgcccaggtcgggaacagatatgtcgccggcgacaccattatctcccgggcgaacggcgacgtctccgcagccaggcagagcccaggctgccgtgtaattggaccattcagaagtaaattatctgcagctggaaacaagacactgccttttaactcgggcattataaggtcaagactcgagacatcgctgggaaaagcagttattgaaaagcgatgggaaaatgaaatttaaaattcaaagccaccatgggcggcgagcgtggcgggaggcgtgcgtcaccggcggccccaggagccg

SEQ ID NO: 176514 - DNA, 109 bp, Homo sapiens
  chr14:104812557-104812666
  hypo
cactggagggcattgcgagaatgttggagatggggaatgagagagaccggcagtgaaggcggcacacccgccccaccctcaaggcaccgtgcaccgccctgtcctcgga

SEQ ID NO: 176515 - DNA, 97 bp, Homo sapiens
  chr14:104813188-104813285
  hypo
ctgctgggggctgaccgtggagtagcttgacagggagcaatttcctggggccacactctttttttttagatggagtctcgctcttgtcgcccagttt

SEQ ID NO: 176516 - DNA, 37 bp, Homo sapiens
  chr14:104813344-104813381
  hypo
ctccttatggggggcccattttcgtgggcttcactcc

SEQ ID NO: 176517 - DNA, 208 bp, Homo sapiens
  chr14:104824379-104824587
  hypo
gtgccagtcactaaacgccacacaggccgcaggactccttcggcccagggccactgtcctgcagtggtgagaagcctgtctccacttggtaggaccgtaattaaccagtctggaagcttccgtcaagctctgtatagaatcagccccaggcaaggcaccgcacagtggccatgggcctagcgcactccatgggcggagaatacactga

SEQ ID NO: 176518 - DNA, 256 bp, Homo sapiens
  chr14:104839336-104839592
  hypo
cgagagccgtcctaacggggagatggcccatccagggccaacacggcacctgtgcgttctcccatcctccttcccaagggagtcctggccaggcccctctcctgtgtccgaggagtcttgccagccctcatggtctgtgtcacgatctgcagtagctgtcccatcagggctgatctggaaggagcctttcctccacatggcttttcccaagtcagccctcaagtgctgtgagcctggaccgcgcccctgtcctcca

SEQ ID NO: 176519 - DNA, 268 bp, Homo sapiens; identical to SEQ ID NO: 87722
  chr14:104854590-104854858
  hypo

SEQ ID NO: 176520 - DNA, 30 bp, Homo sapiens
  chr14:104856856-104856886
  hypo
cgatgacgatccttccgttttgctcaatgc

SEQ ID NO: 176521 - DNA, 70 bp, Homo sapiens
  chr14:104893580-104893650
  hypo
cctcccaagatgagtcgggccacgagcctggcctggggctccaatcactacagcacgctccttccccgag

SEQ ID NO: 176522 - DNA, 30 bp, Homo sapiens
  chr14:104893900-104893930
  hypo
ccccggccacgcagccgaggccatcgtctc

SEQ ID NO: 176523 - DNA, 272 bp, Homo sapiens; identical to SEQ ID NO: 87723
  chr14:104895985-104896257
  hypo

SEQ ID NO: 176524 - DNA, 285 bp, Homo sapiens; identical to SEQ ID NO: 87724
  chr14:104897580-104897865
  hypo

SEQ ID NO: 176525 - DNA, 30 bp, Homo sapiens
  chr14:105037411-105037441
  hypo
cggacgtgcatacatcgcggtcctcccctt

SEQ ID NO: 176526 - DNA, 30 bp, Homo sapiens
  chr14:105052528-105052558
  hypo
aaaggaaattgcttgcgatggcatttctga

SEQ ID NO: 176527 - DNA, 86 bp, Homo sapiens; identical to SEQ ID NO: 87725
  chr14:105102962-105103048
  hypo

SEQ ID NO: 176528 - DNA, 270 bp, Homo sapiens
  chr14:105103479-105103749
  hypo
cacccactgaggaacgggcaccacccgtcgcccgagacctgtgtcgccacccactgaggaacgggcaccacccgtcgcccgagacctgtgtcgccacccactgaggaacgggcaccacccgtcgcccgagacctgtgtcgccacccactgaggaacgggcaccacccgtcgtccgagacctgtgtcgccacccactgaggaacgggcaccacccgtcgtccgagacctgtgtcgccacccactgaggaacgggtacgacctgtcatccga

SEQ ID NO: 176529 - DNA, 30 bp, Homo sapiens; identical to SEQ ID NO: 87727
  chr14:105117867-105117897
  hypo

SEQ ID NO: 176530 - DNA, 68 bp, Homo sapiens; identical to SEQ ID NO: 87728
  chr14:105119950-105120018
  hypo

SEQ ID NO: 176531 - DNA, 305 bp, Homo sapiens; identical to SEQ ID NO: 87729
  chr14:105149125-105149430
  hypo

SEQ ID NO: 176532 - DNA, 115 bp, Homo sapiens; identical to SEQ ID NO: 27967
  chr14:105153067-105153182
  hypo

SEQ ID NO: 176533 - DNA, 153 bp, Homo sapiens
  chr14:105157362-105157515
  hypo
actgtcatgggccctgcagcccggcaaaggggatgtcgctagtggggacggaccaagtggccaggtgcgactgtagcctccacagccagggctcctgagttaaccttcaggtgagcgcccactttgtggaggagctgacggctgtcaagcgaa

SEQ ID NO: 176534 - DNA, 31 bp, Homo sapiens; identical to SEQ ID NO: 87732
  chr14:105173532-105173563
  hypo

SEQ ID NO: 176535 - DNA, 183 bp, Homo sapiens
  chr14:105174275-105174458
  hypo
aacccacccacactgcgcatgaagaagctgaactggcagaagctgccatccaacgtggcacgtggtgagggtccccagacccccaagggaagcttcccctaggacgggggctggtctctgctggggagaggggcaggtggcacatggaacttgtgtgcgcgtcctgcccgtgcgtggccaggg

SEQ ID NO: 176536 - DNA, 30 bp, Homo sapiens
  chr14:105174751-105174781
  hypo
ggccgtgtccccacccgacagagcacaact

SEQ ID NO: 176537 - DNA, 31 bp, Homo sapiens; identical to SEQ ID NO: 27968
  chr14:105175828-105175859
  hypo

SEQ ID NO: 176538 - DNA, 30 bp, Homo sapiens; identical to SEQ ID NO: 87734
  chr14:105176566-105176596
  hypo

SEQ ID NO: 176539 - DNA, 30 bp, Homo sapiens; identical to SEQ ID NO: 87735
  chr14:105179109-105179139
  hypo

SEQ ID NO: 176540 - DNA, 57 bp, Homo sapiens
  chr14:105181887-105181944
  hypo
tcctgcaggcaggacgcaacctcagtgctggccccgggcatgcgggcctcgagaggg

SEQ ID NO: 176541 - DNA, 162 bp, Homo sapiens
  chr14:105182342-105182504
  hypo
tcaatcagccaggtccgtccacagggctggagaggccaatgcatccagctagacaggaccagcctgcactgggtggaggaggggctagagcagagaaccagaaggtccagcccggccgatcatgagctctgtgagcccaggtcgtggcgtcttccagcacct

SEQ ID NO: 176542 - DNA, 213 bp, Homo sapiens; identical to SEQ ID NO: 125321
  chr14:105189960-105190173
  hypo

SEQ ID NO: 176543 - DNA, 30 bp, Homo sapiens
  chr14:105194965-105194995
  hypo
ccgggcacagtcgtcgtacaaactgccatt

SEQ ID NO: 176544 - DNA, 440 bp, Homo sapiens; identical to SEQ ID NO: 125324
  chr14:105195465-105195905
  hypo

SEQ ID NO: 176545 - DNA, 455 bp, Homo sapiens; identical to SEQ ID NO: 125325
  chr14:105196123-105196578
  hypo

SEQ ID NO: 176546 - DNA, 199 bp, Homo sapiens; identical to SEQ ID NO: 87742
  chr14:105201186-105201385
  hypo

SEQ ID NO: 176547 - DNA, 158 bp, Homo sapiens; identical to SEQ ID NO: 87743
  chr14:105204797-105204955
  hypo

SEQ ID NO: 176548 - DNA, 31 bp, Homo sapiens; identical to SEQ ID NO: 87744
  chr14:105206348-105206379
  hypo

SEQ ID NO: 176549 - DNA, 31 bp, Homo sapiens; identical to SEQ ID NO: 27974
  chr14:105208946-105208977
  hypo

SEQ ID NO: 176550 - DNA, 31 bp, Homo sapiens; identical to SEQ ID NO: 87746
  chr14:105210188-105210219
  hypo

SEQ ID NO: 176551 - DNA, 31 bp, Homo sapiens; identical to SEQ ID NO: 87747
  chr14:105211493-105211524
  hypo

SEQ ID NO: 176552 - DNA, 42 bp, Homo sapiens; identical to SEQ ID NO: 87748
  chr14:105214102-105214144
  hypo

SEQ ID NO: 176553 - DNA, 40 bp, Homo sapiens; identical to SEQ ID NO: 51755
  chr14:105218313-105218353
  hypo

SEQ ID NO: 176554 - DNA, 45 bp, Homo sapiens; identical to SEQ ID NO: 27975
  chr14:105223768-105223813
  hypo

SEQ ID NO: 176555 - DNA, 109 bp, Homo sapiens
  chr14:105225797-105225906
  hypo
cagctgtgccatgttcgagacctgaggctggctcaagccggctgccttcaccgggagccacgccgtgcatggcagccttccctggacgagcgctcggtgttcacactga

SEQ ID NO: 176556 - DNA, 167 bp, Homo sapiens
  chr14:105226171-105226338
  hypo
gctcagcccagagcacgctcctccccagctcgcccagctggtaaatggggagaaaggacccaggtctggctccagggtacacaaccagtgtactagaccttcacggagagaggtgatactcgcgccccatccccagacgccactgtcatgcacgcctgatccatcac

SEQ ID NO: 176557 - DNA, 95 bp, Homo sapiens; identical to SEQ ID NO: 27976
  chr14:105236574-105236669
  hypo

SEQ ID NO: 176558 - DNA, 30 bp, Homo sapiens; identical to SEQ ID NO: 87752
  chr14:105239842-105239872
  hypo

SEQ ID NO: 176559 - DNA, 899 bp, Homo sapiens
  chr14:105240770-105241669
  hypo
cgagacccaccctcccgccttccaccacaggcgactgtgcttttaaagcaaaggccccatctgcaggagaatcgtccccaaacacagtgacctggaactaaccaagtggctggaccctggcccccttcacagtaaatacctcctgggccaagtccccagaacaggttctgcaggacagagcccgggcctcaacaaaagcctggcaggcagggctgcagggcatggggagctggggcctcctggagcctcggcagagtgcaaggaagaccagggccacctgccccacccacctgcccgcacacgggagcagcgagcacagcccctagcccacactgggcacctccacagcctgaccctccagggcaggcctgtctcaccagcggcggagtccacggtgtgtaaagccctcacgtgcccaagaagacaggacatcgtcccctagagacagccccaggagtcgctacctggccccagcccttcagccccatctgggctcccactcactgtgaggaaggggtgcctggagttctgcaggacgcggttctcggtgagtgtgtgggccacctcgtcctgtaaagcagggctgggtgagctgccaccccgcaccctcatctccaccctgccccaccgccccggccccaccttggccacgatgacttccttcttgaggatcttcatggcgtagtagcggcctgtggccttctccttcaccaggatcaccttgccgaaagtgcccttgcccagcagcttcaggtactcaaactcgttcatggtctatgggcaggcaccagggtcagcaagcggcgctgccaacagtgcccagctggtcggcatgcgtggggtggcatgaggggccccagagtcggaggcagagccaggagaggcgtccacttcacacc

SEQ ID NO: 176560 - DNA, 30 bp, Homo sapiens; identical to SEQ ID NO: 51756
  chr14:105243204-105243234
  hypo

SEQ ID NO: 176561 - DNA, 30 bp, Homo sapiens
  chr14:105243943-105243973
  hypo
ggctgtgggaacgtgcggggccctgagagg

SEQ ID NO: 176562 - DNA, 143 bp, Homo sapiens
  chr14:105244207-105244350
  hypo
cagagaagtggaaaccggtgtgaagccccggcacacccacctcccactcgctcctggatggtccgatctgccccagtatgcaatccccagggccagagtctcgagcccactgccccggaaccgttccccggagaaaagccccg

SEQ ID NO: 176563 - DNA, 59 bp, Homo sapiens; identical to SEQ ID NO: 27978
  chr14:105245407-105245466
  hypo

SEQ ID NO: 176564 - DNA, 30 bp, Homo sapiens; identical to SEQ ID NO: 10001
  chr14:105246536-105246566
  hypo

SEQ ID NO: 176565 - DNA, 205 bp, Homo sapiens; identical to SEQ ID NO: 87758
  chr14:105247292-105247497
  hypo

SEQ ID NO: 176566 - DNA, 30 bp, Homo sapiens; identical to SEQ ID NO: 27980
  chr14:105248619-105248649
  hypo

SEQ ID NO: 176567 - DNA, 229 bp, Homo sapiens
  chr14:105268574-105268803
  hypo
cacactgaagaggcacgagcggacacactcgggtgagaagccctatacgtgtgtgcagtgtggcaaaagttttcagtactcccacaacctgagccggcacaccgtagtgcacactcgagagaagccgcatgcctgccggtggtgtgagcgccgtttcacgcagtccggggacctctaccgccacgtccgcaagtttcactgtggcctcgtcaagtcccttctggtgtga

SEQ ID NO: 176568 - DNA, 318 bp, Homo sapiens; identical to SEQ ID NO: 125332
  chr14:105269021-105269339
  hypo

SEQ ID NO: 176569 - DNA, 30 bp, Homo sapiens
  chr14:105269888-105269918
  hypo
tgaaagtggccatggcggcagggttagggg

SEQ ID NO: 176570 - DNA, 65 bp, Homo sapiens; identical to SEQ ID NO: 87762
  chr14:105270249-105270314
  hypo

SEQ ID NO: 176571 - DNA, 30 bp, Homo sapiens; identical to SEQ ID NO: 27982
  chr14:105271515-105271545
  hypo

SEQ ID NO: 176572 - DNA, 129 bp, Homo sapiens
  chr14:105273626-105273755
  hypo
caagtcccaggaattcggaattccatggcacacagggccaccggtgcctgtcccgtcagccacctgtcctgtgctcataaccatgtcactccctttcttcagcctcagcattctcgcctgtgaaatggg

SEQ ID NO: 176573 - DNA, 31 bp, Homo sapiens; identical to SEQ ID NO: 87764
  chr14:105277932-105277963
  hypo

SEQ ID NO: 176574 - DNA, 30 bp, Homo sapiens; identical to SEQ ID NO: 27983
  chr14:105287865-105287895
  hypo

SEQ ID NO: 176575 - DNA, 726 bp, Homo sapiens; identical to SEQ ID NO: 51764
  chr14:105330980-105331706
  hypo

SEQ ID NO: 176576 - DNA, 154 bp, Homo sapiens; identical to SEQ ID NO: 51765
  chr14:105331744-105331898
  hypo

SEQ ID NO: 176577 - DNA, 189 bp, Homo sapiens; identical to SEQ ID NO: 87768
  chr14:105335726-105335915
  hypo

SEQ ID NO: 176578 - DNA, 31 bp, Homo sapiens; identical to SEQ ID NO: 87769
  chr14:105337646-105337677
  hypo

SEQ ID NO: 176579 - DNA, 30 bp, Homo sapiens
  chr14:105342415-105342445
  hypo
ccctggcatcttggcgaatcctgctctgga

SEQ ID NO: 176580 - DNA, 31 bp, Homo sapiens; identical to SEQ ID NO: 87770
  chr14:105346091-105346122
  hypo

SEQ ID NO: 176581 - DNA, 190 bp, Homo sapiens
  chr14:105347538-105347728
  hypo
ctgcacgagggtccgcgtgggtccggtgggcacaaagggaagggaaggagcgagagtgagaaagtgcctggtggggtgtggaggggtcggggtggggtatccaagcctgaggccccagacttgagttctggttagacaggggtgtatccggggatcaggctctcggctcccacctcggtccaggaggggt

SEQ ID NO: 176582 - DNA, 253 bp, Homo sapiens; identical to SEQ ID NO: 87771
  chr14:105349523-105349776
  hypo

SEQ ID NO: 176583 - DNA, 109 bp, Homo sapiens; identical to SEQ ID NO: 87772
  chr14:105350161-105350270
  hypo

SEQ ID NO: 176584 - DNA, 30 bp, Homo sapiens; identical to SEQ ID NO: 87773
  chr14:105350682-105350712
  hypo

SEQ ID NO: 176585 - DNA, 63 bp, Homo sapiens; identical to SEQ ID NO: 87774
  chr14:105351132-105351195
  hypo

SEQ ID NO: 176586 - DNA, 241 bp, Homo sapiens
  chr14:105352619-105352860
  hypo
ctgggacgtagaggcggggagccggaggggtccctgcctgtgcgcatgcggcgacggctccctcagctgcccagtgagagggctgacagccctgcgggcccagagagcagcaggaggagtgggcctgggccaccggagctggacagtgagcagcccagccgcctcttcggccaggaggagttggatcctgacagcctcagcgatgccagtgggtcggacgggggccgaggccccgagccag

SEQ ID NO: 176587 - DNA, 30 bp, Homo sapiens; identical to SEQ ID NO: 87775
  chr14:105354204-105354234
  hypo

SEQ ID NO: 176588 - DNA, 30 bp, Homo sapiens; identical to SEQ ID NO: 87776
  chr14:105354874-105354904
  hypo

SEQ ID NO: 176589 - DNA, 72 bp, Homo sapiens; identical to SEQ ID NO: 87777
  chr14:105355230-105355302
  hypo

SEQ ID NO: 176590 - DNA, 30 bp, Homo sapiens
  chr14:105362446-105362476
  hypo
cctggaccagactggcgtgggtgagctcca

SEQ ID NO: 176591 - DNA, 126 bp, Homo sapiens
  chr14:105362736-105362862
  hypo
gctagcccggtccaccgggctgctgcccacccctgcatgccccagttgcccaccccgcctgcccctggacatgaagtggtcacgcttcatccacggctccttcccacccctcggcagtggctgtgc

SEQ ID NO: 176592 - DNA, 30 bp, Homo sapiens
  chr14:105436563-105436593
  hypo
caggagaaggggctccggggctttctccct

SEQ ID NO: 176593 - DNA, 30 bp, Homo sapiens; identical to SEQ ID NO: 87778
  chr14:105451489-105451519
  hypo

SEQ ID NO: 176594 - DNA, 30 bp, Homo sapiens; identical to SEQ ID NO: 87779
  chr14:105455824-105455854
  hypo

SEQ ID NO: 176595 - DNA, 700 bp, Homo sapiens; identical to SEQ ID NO: 87780
  chr14:105457658-105458358
  hypo

SEQ ID NO: 176596 - DNA, 55 bp, Homo sapiens
  chr14:105464944-105464999
  hypo
ctgaagtagcaggtgcgggaaagcagcttctctgggttggcggtgaggtacagtg

SEQ ID NO: 176597 - DNA, 30 bp, Homo sapiens; identical to SEQ ID NO: 87782
  chr14:105465281-105465311
  hypo

SEQ ID NO: 176598 - DNA, 96 bp, Homo sapiens
  chr14:105468471-105468567
  hypo
ttcagttgcaaggaatgagctcggggatctcttgtacgcagggaccgtaatcagtaacaatggattacattcttgaaaaccactaggagagactgg

SEQ ID NO: 176599 - DNA, 301 bp, Homo sapiens
  chr14:105469614-105469915
  hypo
ccaccaaaacagttaattttttaaaaaagaacagcaacacacacaacctgggcaaacctcacgacatgtaaaggccaggccctgcaggtgcccattcacaagcagatcaggcccacaaatcctgttggcaacggtggggacgcacctcccctaccttaacccatagcagctacagggtatcttcccgtgtaaactgttgccaagcggacactgacaattctggcatgttctggactctactatgtacctcaatttttaaaagttaaaaaggaaataaaggggccgggcgtggtggctcacg

SEQ ID NO: 176600 - DNA, 21 bp, Homo sapiens
  chr14:105470154-105470175
  hypo
gacagcaagactccatctcaa

SEQ ID NO: 176601 - DNA, 98 bp, Homo sapiens
  chr14:105472076-105472174
  hypo
gaggaggaaaatgcacggcccgtgctcctcgcagccgcacccagtgtgagcacggctgagcagctctgcgggagtggtggccccgtggtcacagggac

SEQ ID NO: 176602 - DNA, 31 bp, Homo sapiens; identical to SEQ ID NO: 27991
  chr14:105477331-105477362
  hypo

SEQ ID NO: 176603 - DNA, 30 bp, Homo sapiens; identical to SEQ ID NO: 27992
  chr14:105477630-105477660
  hypo

SEQ ID NO: 176604 - DNA, 125 bp, Homo sapiens
  chr14:105478879-105479004
  hypo
gtgccaccaggaacgcgcaggggaaggactgcagggctgtatgctcatcccatgcagcgagtggtctgtgtttcgtgcacaattctccaagggacacagggtctcctggccgagcctatgtggcc

SEQ ID NO: 176605 - DNA, 30 bp, Homo sapiens
  chr14:105479351-105479381
  hypo
atgcctcagcactggcgctgttggttgaag

SEQ ID NO: 176606 - DNA, 30 bp, Homo sapiens; identical to SEQ ID NO: 51771
  chr14:105486766-105486796
  hypo

SEQ ID NO: 176607 - DNA, 30 bp, Homo sapiens; identical to SEQ ID NO: 125350
  chr14:105486838-105486868
  hypo

SEQ ID NO: 176608 - DNA, 30 bp, Homo sapiens
  chr14:105509369-105509399
  hypo
agtccccggcacagccgtctcaggtgctca

SEQ ID NO: 176609 - DNA, 98 bp, Homo sapiens; identical to SEQ ID NO: 125353
  chr14:105511595-105511693
  hypo

SEQ ID NO: 176610 - DNA, 566 bp, Homo sapiens; identical to SEQ ID NO: 125354
  chr14:105511921-105512487
  hypo

SEQ ID NO: 176611 - DNA, 39 bp, Homo sapiens; identical to SEQ ID NO: 87790
  chr14:105516267-105516306
  hypo

SEQ ID NO: 176612 - DNA, 792 bp, Homo sapiens
  chr14:105517522-105518314
  hypo
ttggcgggaatggtccgtggccagcacgtagataatggggtcagccacgccgttcaccgtggacaggcacagaaacaccacagaggctgtgtacagcctttcctccaagccgcacatggcgttcctgtctcctctgtagtaggaaaaggcagcggctttgacgaggagaaccaggtggtacggggcgaagcagactaggaagatgacaaccaccgcgatggccgagtgcttcaccttggccttctgggcagcgcttaagcccatgctctgcttgatgctcctgaaaatccggtggttggtgaaggcgatgatggagagagggatggcaaagccaacggtgaacctggcgtagtagtacccggcaatcctgctgtccatctgcagcatgtcaaagcaggtctccttgtcttccgtctggaacaccgggtagtgaacgatcccgacgaggatgaagatgcaggcggagatgaggatggcggtcctccggcggcggcggccccgactctccagcgcgtacaccacggccacgaagcggtcgcaggagatgcagcacaggaagaggatgctgacgtagatgttgcagaagaagatgtaggcggtcaccttgcaggccagcaggcctagggtccagcggtgctggttgcggatatagatgacccagagtggcagcgtgcctgtgtacagcagctcgcagagtgccaggcagagcaggtagacggccagcacgttgccctgcagtacctgcagcagcgccagccacgcagtcaggcagttggccggcacccccagcgt

SEQ ID NO: 176613 - DNA, 51 bp, Homo sapiens; identical to SEQ ID NO: 87792
  chr14:105533294-105533345
  hypo

SEQ ID NO: 176614 - DNA, 174 bp, Homo sapiens; identical to SEQ ID NO: 27996
  chr14:105538392-105538566
  hypo

SEQ ID NO: 176615 - DNA, 323 bp, Homo sapiens
  chr14:105546625-105546948
  hypo
catttcgtgactgtgcgatgggatggcatcgtgctttcaatctgcactcgcctaatgagaaattatgttgagcgtcttctcatgtgcttatctgccatctgtataccttctgtggcgctctgtttgcgtggctgtgcaatgggatggcattgcgtttaatctacactcgcctaacgagaaattacgtggcgcgtcttttcatgttcgtatctgccgtctgtataccttctgtgactctgtttcttcagatctttagcctttttttttcctttccttttctcttcctctctttttcttttttgagacagtctcactctgtctcc

SEQ ID NO: 176616 - DNA, 34 bp, Homo sapiens
  chr14:105547473-105547507
  hypo
aaagtgctgggattacaggcgtgagccaccgcgc

SEQ ID NO: 176617 - DNA, 31 bp, Homo sapiens; identical to SEQ ID NO: 87795
  chr14:105562583-105562614
  hypo

SEQ ID NO: 176618 - DNA, 31 bp, Homo sapiens; identical to SEQ ID NO: 27998
  chr14:105603443-105603474
  hypo

SEQ ID NO: 176619 - DNA, 30 bp, Homo sapiens; identical to SEQ ID NO: 87797
  chr14:105608459-105608489
  hypo

SEQ ID NO: 176620 - DNA, 30 bp, Homo sapiens; identical to SEQ ID NO: 87798
  chr14:105609816-105609846
  hypo

SEQ ID NO: 176621 - DNA, 46 bp, Homo sapiens; identical to SEQ ID NO: 87799
  chr14:105610436-105610482
  hypo

SEQ ID NO: 176622 - DNA, 337 bp, Homo sapiens
  chr14:105611096-105611433
  hypo
agttccacgggtctgcggcatggacagcgaggggccgcagggagacaggcctgcccgcagtccttccgcaccaggactagcctcgccagagcctctgtccagcatagccaggacctgcatagtacgggacccagggcccacccaggtgctgctccccactgggcactcaccacggccacctccacagcactggcccccgaggacgcccggtcgcaaagcaacaccagcaggcggtcccgtgccacagcccttgtggctggcagggagcggatcccggagcaaatggcgcccaccgtggtgccctgggcagagacaggcagtgcgtgggcagggcagg

SEQ ID NO: 176623 - DNA, 221 bp, Homo sapiens
  chr14:105612115-105612336
  hypo
attgtccaggtggccggagcgtggcaggcagggggtgctcggtggctcttctgcgccgcactccccccaggcctcacagggtggtcgcagacactggcctggggccttctccaggcacctttgccccagtgggcactgggcgctcagggcctcgggctggccggccagcagacaaggcttccatccgcaccacacctgggcaggcacgcacaggagggtca

SEQ ID NO: 176624 - DNA, 379 bp, Homo sapiens
  chr14:105612738-105613117
  hypo
ggccatccaggcagcggcagctgttgcagtcttccacccaggagcttccgtgtgggaacggagtgccccgggaccagcaggatctcccgaacccgatcactgtggggagaaggggctcgagggtcagcagtgggcatctggccctcggggctgggtgtcacccatgccccccaacccgccccaacccagggcaatcacacggggcctaccttcctggcaccgggggccggctcggccgggtgggcagctacagcgatacccgttgatctcatccacacacgtggccccgtaggcacagggcgaggactggcactcgtcgatgtctgcagggagagccaccgctgctcagtgcagtgaggccaacgcccaccgcaggacc

SEQ ID NO: 176625 - DNA, 30 bp, Homo sapiens; identical to SEQ ID NO: 28001
  chr14:105613768-105613798
  hypo

SEQ ID NO: 176626 - DNA, 30 bp, Homo sapiens; identical to SEQ ID NO: 87804
  chr14:105614549-105614579
  hypo

SEQ ID NO: 176627 - DNA, 30 bp, Homo sapiens; identical to SEQ ID NO: 28002
  chr14:105615444-105615474
  hypo

SEQ ID NO: 176628 - DNA, 215 bp, Homo sapiens
  chr14:105616973-105617188
  hypo
gtggcagtggaagccgtcggccaggtcctcgcagaggccgccgctgtggcaggggctgctggcacactcgtctcgttccagctcgcaatgccggcctccgaagccccgtgggcacacacactggtacccgttcaccaggtcctgggcgggccagccaggtgagcgtcccgcaggcaccctgacggccccgcagcacccacgccacacaccctcct

SEQ ID NO: 176629 - DNA, 325 bp, Homo sapiens
  chr14:105621961-105622286
  hypo
gcgaacagagaggagcgagaggcacagctgcagccagcctggccgcaaggcctgtgcccggggccctgcccgaggccctccctgccctccacgcagcccagcggccccctcaccttccttgcactccttgcccatccagccgtccatgcaggccttgttgccgtactggtcgcaggtgtagtggccgaaaaagtcgttgcggggccggcagaacttgttgcaagtggcgctgtagtagttctcgtcgcagcgcacgcggatctgcagctccaggtgcgccacgtggccgctgaagtgcaggctcttccagcggtcctccgggttg

SEQ ID NO: 176630 - DNA, 31 bp, Homo sapiens; identical to SEQ ID NO: 87807
  chr14:105625471-105625502
  hypo

SEQ ID NO: 176631 - DNA, 58 bp, Homo sapiens; identical to SEQ ID NO: 87808
  chr14:105639400-105639458
  hypo

SEQ ID NO: 176632 - DNA, 156 bp, Homo sapiens; identical to SEQ ID NO: 51773
  chr14:105647608-105647764
  hypo

SEQ ID NO: 176633 - DNA, 30 bp, Homo sapiens
  chr14:105655163-105655193
  hypo
gttttccacattgtcgcgtcttggcttggg

SEQ ID NO: 176634 - DNA, 30 bp, Homo sapiens
  chr14:105676893-105676923
  hypo
gccgtcgtcctcatcgccatcacagccata

SEQ ID NO: 176635 - DNA, 30 bp, Homo sapiens
  chr14:105683990-105684020
  hypo
cggactgcccccgccggcgctgctgaggcc

SEQ ID NO: 176636 - DNA, 30 bp, Homo sapiens
  chr14:105685717-105685747
  hypo
ctcatcgcgcggggcgagttggggacctgt

SEQ ID NO: 176637 - DNA, 669 bp, Homo sapiens; identical to SEQ ID NO: 87810
  chr14:105687720-105688389
  hypo

SEQ ID NO: 176638 - DNA, 99 bp, Homo sapiens; identical to SEQ ID NO: 28005
  chr14:105688873-105688972
  hypo

SEQ ID NO: 176639 - DNA, 443 bp, Homo sapiens; identical to SEQ ID NO: 28006
  chr14:105689522-105689965
  hypo

SEQ ID NO: 176640 - DNA, 271 bp, Homo sapiens
  chr14:105690179-105690450
  hypo
agactgagaaaagaactttcacgggaggaatgtgactcctcctccttgagctacgtgttcatttcttgaaaccacttgctgttgccacaagtagctctaaactaacccaataatgccgcacccaatagtttaacgatgtacagccaatcacgaatgaacgttactattgtaagccaatgagaattcccaacagacaactttgtatctatccaatcactgtccctttttgcctttaaaaatccatctgtagctgaggctggctcactcctgt

SEQ ID NO: 176641 - DNA, 31 bp, Homo sapiens; identical to SEQ ID NO: 28007
  chr14:105691546-105691577
  hypo

SEQ ID NO: 176642 - DNA, 30 bp, Homo sapiens; identical to SEQ ID NO: 87815
  chr14:105695296-105695326
  hypo

SEQ ID NO: 176643 - DNA, 184 bp, Homo sapiens; identical to SEQ ID NO: 51776
  chr14:105714257-105714441
  hypo

SEQ ID NO: 176644 - DNA, 31 bp, Homo sapiens
  chr14:105715843-105715874
  hypo
gtgggtccgttttaggcggcctccggaggct

SEQ ID NO: 176645 - DNA, 181 bp, Homo sapiens; identical to SEQ ID NO: 87817
  chr14:105717869-105718050
  hypo

SEQ ID NO: 176646 - DNA, 80 bp, Homo sapiens
  chr14:105720529-105720609
  hypo
gggcctttacatggaaactcacgtttaaaaagccatgtgtgcaaaacgcgtgcagtttttttgttttagtttgtttgttt

SEQ ID NO: 176647 - DNA, 445 bp, Homo sapiens
  chr14:105723692-105724137
  hypo
agcaaagccccaccacgcaagaacctcgcaagcaatcagatggttaggacgccagcccactcatccacgccctgggctggaggcccctgacctctcttgcaactccatgcagaacagcaaggcctcccaccctaagaaggtgccagggctgggtacaggggcattccgacacagagcagaacccccaggacggctgggacgtgagcggtgaggcccgtgaacaaaggtgcatctgaaggcaggcagtcccagagggccgagacaacgggcaggaccgactgcagcacagccaacagcctcacaagaggcactatgagaagaccggcggcaggggtggggccagtgacatcaaaggaaaccaaaggaaagcagtaagaactacctggggaaacgcccgtgacagccaacacacaccaacgggaaaagtgaacgaggccagaaggct

SEQ ID NO: 176648 - DNA, 30 bp, Homo sapiens
  chr14:105725301-105725331
  hypo
gccacgagcccgcgacgtcactgaatgccg

SEQ ID NO: 176649 - DNA, 425 bp, Homo sapiens; identical to SEQ ID NO: 87818
  chr14:105728095-105728520
  hypo

SEQ ID NO: 176650 - DNA, 31 bp, Homo sapiens; identical to SEQ ID NO: 28009
  chr14:105729868-105729899
  hypo

SEQ ID NO: 176651 - DNA, 30 bp, Homo sapiens; identical to SEQ ID NO: 87820
  chr14:105737833-105737863
  hypo

SEQ ID NO: 176652 - DNA, 30 bp, Homo sapiens; identical to SEQ ID NO: 87821
  chr14:105738145-105738175
  hypo

SEQ ID NO: 176653 - DNA, 193 bp, Homo sapiens
  chr14:105739046-105739239
  hypo
ccaaaggatacgcggcgtgccctccgtacggcagaccaggtagaggcaggcagcaatcacgtgggccatcttccggccgcgggtcaggtgcctgctcacggccatcttgaagaagttgaaggcggtgtccaggcagtgctggttcagctgcagctggttccccaggtggtggatgtggcgcctccctaggaca

SEQ ID NO: 176654 - DNA, 197 bp, Homo sapiens
  chr14:105739465-105739662
  hypo
ctctgagtggcgtgtgcggtgtggctgaatgtgcctctctccagggctctgaggtgcggcgtgtctggcaagggcttggtttgggctggctggcaggtgctatgcccctgactgccctgggctacagtgggaatgccccttttcctacagccacatgccccagcgccaccgccttccccaaccgcacagagtctggg

SEQ ID NO: 176655 - DNA, 30 bp, Homo sapiens
  chr14:105747035-105747065
  hypo
cgtgatcctgagtccgggtgtgcggataca

SEQ ID NO: 176656 - DNA, 30 bp, Homo sapiens; identical to SEQ ID NO: 28011
  chr14:105778026-105778056
  hypo

SEQ ID NO: 176657 - DNA, 30 bp, Homo sapiens
  chr14:105779517-105779547
  hypo
tcaggcggcccatccgtctgactgcaactg

SEQ ID NO: 176658 - DNA, 181 bp, Homo sapiens; identical to SEQ ID NO: 51779
  chr14:105781804-105781985
  hypo

SEQ ID NO: 176659 - DNA, 30 bp, Homo sapiens
  chr14:105790261-105790291
  hypo
cacaccgctctgtccgcgcaggctgtgccc

SEQ ID NO: 176660 - DNA, 30 bp, Homo sapiens; identical to SEQ ID NO: 28013
  chr14:105792838-105792868
  hypo

SEQ ID NO: 176661 - DNA, 30 bp, Homo sapiens; identical to SEQ ID NO: 28014
  chr14:105793864-105793894
  hypo

SEQ ID NO: 176662 - DNA, 30 bp, Homo sapiens; identical to SEQ ID NO: 28015
  chr14:105794170-105794200
  hypo

SEQ ID NO: 176663 - DNA, 95 bp, Homo sapiens; identical to SEQ ID NO: 28016
  chr14:105796584-105796679
  hypo

SEQ ID NO: 176664 - DNA, 30 bp, Homo sapiens; identical to SEQ ID NO: 87830
  chr14:105801691-105801721
  hypo

SEQ ID NO: 176665 - DNA, 9 bp, Homo sapiens
  chr14:105802372-105802381
  hypo
agcagggca

SEQ ID NO: 176666 - DNA, 30 bp, Homo sapiens; identical to SEQ ID NO: 10011
  chr14:106326603-106326633
  hypo

SEQ ID NO: 176667 - DNA, 30 bp, Homo sapiens; identical to SEQ ID NO: 10012
  chr14:106326872-106326902
  hypo

SEQ ID NO: 176668 - DNA, 30 bp, Homo sapiens; identical to SEQ ID NO: 87834
  chr14:106929435-106929465
  hypo

SEQ ID NO: 176669 - DNA, 203 bp, Homo sapiens; identical to SEQ ID NO: 51782
  chr15:20478122-20478325
  hypo

SEQ ID NO: 176670 - DNA, 30 bp, Homo sapiens
  chr15:20554732-20554762
  hypo
ttccccctcctctgccgaaggctctggtgt

SEQ ID NO: 176671 - DNA, 30 bp, Homo sapiens
  chr15:22440600-22440630
  hypo
gacaacatcgatgatcgttgttttatgagc

SEQ ID NO: 176672 - DNA, 31 bp, Homo sapiens; identical to SEQ ID NO: 28020
  chr15:22547260-22547291
  hypo

SEQ ID NO: 176673 - DNA, 149 bp, Homo sapiens
  chr15:22803358-22803507
  hypo
ccgcggggcccaccacgcccggctaatctttgtggcttttgttttgtttttccgttaagagaccgggtttcgggccaggcgcagtgactcacgactgcaattccagcagcccgggaggccgaggccggcggatcacccgaggtgaggag

SEQ ID NO: 176674 - DNA, 27 bp, Homo sapiens
  chr15:22822347-22822374
  hypo
gtaaagttccaggatacggccgggcgc

SEQ ID NO: 176675 - DNA, 22 bp, Homo sapiens
  chr15:22834998-22835020
  hypo
attgtggactgggcgcggtggc

SEQ ID NO: 176676 - DNA, 441 bp, Homo sapiens
  chr15:22876755-22877196
  hypo
gccaattaaaccgcacgagcaccacagcctctggcatggctaaaataaaaagaccggcatgtcaaataattttcaaggatttagagcaactggaaattacaagatggtacaagcacttggggaaactatatggcattttcttacaaaggttaacatgtatctacccctgagaagcagcagttcacccttaggtatttatccaagaggaatttttaaatgcgtccacgcagagatttgtatctgaatattcataagagctaaaagctagaaacatcctgatgacggtgaagaggtagatggatcaacactgaagtatatgcacgcagtggaatgcagttcagctgtgaaaacacagctcatccacataacgacataagagaattccaggaactttatgtcgaaaaaaaagccagacttaaaaggatccgttattattccatt

SEQ ID NO: 176677 - DNA, 761 bp, Homo sapiens; identical to SEQ ID NO: 125370
  chr15:22892003-22892764
  hypo

SEQ ID NO: 176678 - DNA, 30 bp, Homo sapiens; identical to SEQ ID NO: 87841
  chr15:22913648-22913678
  hypo

SEQ ID NO: 176679 - DNA, 61 bp, Homo sapiens; identical to SEQ ID NO: 87842
  chr15:22920759-22920820
  hypo

SEQ ID NO: 176680 - DNA, 438 bp, Homo sapiens
  chr15:22927768-22928206
  hypo
tcacaccgggcagggcgtctgccctgagcccttcctctgtgttcctaactgcaggtctcatggccagcaggttgttgagggctgggtggagccaaggtgtaacgcctgtggcacccctcagagatgcctgcgtgtcactgacacccctctcgcctgcagaagccatggggtgttttgggtggtcattgtggcccccagcgccgcacctcagtgtcactagcttctggcagccgtctcttggcacacaggccacagtgcttaggatagtttgtggcgctttgtctggattttagcaactggcatctgcttttcatgctagttcccccgcctgcctttgatttgccctgtgttccattgcagaacgagatgctggaggagggccaagaatatgctgtcatgctgtacacctggaggagctgctcccgggccatcccacag

SEQ ID NO: 176681 - DNA, 119 bp, Homo sapiens
  chr15:22929814-22929933
  hypo
attcatcaacatgttcgctgtgctggacgagctgaagaacatgaagtgcagtgtgaagaacgaccactcagcgtacaagaggtgagcacccacctcgcgcactgcgggccctcccgaga

SEQ ID NO: 176682 - DNA, 45 bp, Homo sapiens
  chr15:22930283-22930328
  hypo
tgcagtcctcggtgccggtcactcgccagcgggggtccccagcac

SEQ ID NO: 176683 - DNA, 294 bp, Homo sapiens
  chr15:22933548-22933842
  hypo
ttgttttcaaagggccgctcagtttttacgtaaaatggcagatccacagtccatccaggaatcgcagaatctgtccatgttcctggccaatcataacaagatcacacaggtaaggctggtgtttgcacactcaggttgatgggccaagcagccggccgggcgccgggcccatgcatgagtctcttgctctgtgtttcagtctctgcagcagcagctcgaagtgatttctggctacgaagagctcctggcagatattgtgaatctgtgtgtggattactacgagaacaggatgta

SEQ ID NO: 176684 - DNA, 53 bp, Homo sapiens
  chr15:22940779-22940832
  hypo
atgatccagatccgcgaggaccacatgcgcttcatttcggagctggcgcgcta

SEQ ID NO: 176685 - DNA, 87 bp, Homo sapiens; identical to SEQ ID NO: 87847
  chr15:22945062-22945149
  hypo

SEQ ID NO: 176686 - DNA, 30 bp, Homo sapiens
  chr15:22946972-22947002
  hypo
cttgtgcaccccaccgacaagtactccaac

SEQ ID NO: 176687 - DNA, 34 bp, Homo sapiens
  chr15:22954801-22954835
  hypo
ggcccagctctgctccgtgcggaggctgtgttct

SEQ ID NO: 176688 - DNA, 30 bp, Homo sapiens
  chr15:22955270-22955300
  hypo
cagcactcaggttctcgtcccttgagcccc

SEQ ID NO: 176689 - DNA, 30 bp, Homo sapiens
  chr15:22956036-22956066
  hypo
agctctacctggtgcgcaccatggccgagt

SEQ ID NO: 176690 - DNA, 30 bp, Homo sapiens; identical to SEQ ID NO: 28024
  chr15:22956997-22957027
  hypo

SEQ ID NO: 176691 - DNA, 143 bp, Homo sapiens; identical to SEQ ID NO: 28025
  chr15:22966141-22966284
  hypo

SEQ ID NO: 176692 - DNA, 117 bp, Homo sapiens
  chr15:22968265-22968382
  hypo
gagacagacctgtggcggcctttttctacgagcgtaatttggtacaggccatggtgtttctgttggcattggccaaatatgattttgagtaaaatcattggtcgaggctttgatcga

SEQ ID NO: 176693 - DNA, 241 bp, Homo sapiens
  chr15:22968628-22968869
  hypo
gctgtgctccggccccggctgccacatcggacagtgcagcctgggcgagctccagagcagcgcacgtgagggcttgcaaggcctgtgggaacaagtgcacctgccctgccacccacacgtgcctttcagtgacttcaggcacctcagagaaagctggctcagctccaacgcccagggagatgcagccgccggctgggttatactgcagggcagggccggggctcagcgggcacatgggggg

SEQ ID NO: 176694 - DNA, 267 bp, Homo sapiens; identical to SEQ ID NO: 87852
  chr15:22977063-22977330
  hypo

SEQ ID NO: 176695 - DNA, 104 bp, Homo sapiens; identical to SEQ ID NO: 28028
  chr15:22979737-22979841
  hypo

SEQ ID NO: 176696 - DNA, 115 bp, Homo sapiens
  chr15:22994698-22994813
  hypo
ctttctgccacatctcgctggtccaggcatctgtctctgacatcatagcacattgtcttgctcatcgttgctctaacatgactctcgagtccccacttgccgcgttccctgcctt

SEQ ID NO: 176697 - DNA, 30 bp, Homo sapiens
  chr15:23003072-23003102
  hypo
catgcctttctctccgtaaactatttagtg

SEQ ID NO: 176698 - DNA, 30 bp, Homo sapiens
  chr15:23013465-23013495
  hypo
atctactcattggccgggcacagtggctca

SEQ ID NO: 176699 - DNA, 30 bp, Homo sapiens; identical to SEQ ID NO: 87854
  chr15:23044965-23044995
  hypo

SEQ ID NO: 176700 - DNA, 36 bp, Homo sapiens; identical to SEQ ID NO: 28029
  chr15:23077085-23077121
  hypo

SEQ ID NO: 176701 - DNA, 24 bp, Homo sapiens
  chr15:23084568-23084592
  hypo
tgagatggagtcttgctctgccgc

SEQ ID NO: 176702 - DNA, 384 bp, Homo sapiens; identical to SEQ ID NO: 87857
  chr15:23084831-23085215
  hypo

SEQ ID NO: 176703 - DNA, 30 bp, Homo sapiens; identical to SEQ ID NO: 87858
  chr15:23087571-23087601
  hypo

SEQ ID NO: 176704 - DNA, 28 bp, Homo sapiens
  chr15:23217789-23217817
  hypo
caggctgagccaccgcgccctgccctgg

SEQ ID NO: 176705 - DNA, 21 bp, Homo sapiens
  chr15:23272990-23273011
  hypo
tggtgtcgggtcaggcgcagt

SEQ ID NO: 176706 - DNA, 31 bp, Homo sapiens; identical to SEQ ID NO: 87861
  chr15:23666806-23666837
  hypo

SEQ ID NO: 176707 - DNA, 31 bp, Homo sapiens
  chr15:23692315-23692346
  hypo
gttggggccacatcagcgtgattcagacgag

SEQ ID NO: 176708 - DNA, 30 bp, Homo sapiens; identical to SEQ ID NO: 87862
  chr15:23891765-23891795
  hypo

SEQ ID NO: 176709 - DNA, 30 bp, Homo sapiens
  chr15:25309870-25309900
  hypo
ccttgagaggcccaccgcctgctggcatga

SEQ ID NO: 176710 - DNA, 30 bp, Homo sapiens
  chr15:25459497-25459527
  hypo
tcacgtgggagctctcggtgcctggcgtgt

SEQ ID NO: 176711 - DNA, 30 bp, Homo sapiens
  chr15:25473541-25473571
  hypo
ctaggtacgatctctcggacttccaggtct

SEQ ID NO: 176712 - DNA, 30 bp, Homo sapiens
  chr15:25582387-25582417
  hypo
cacacatttcttcacgaatttattatataa

SEQ ID NO: 176713 - DNA, 30 bp, Homo sapiens; identical to SEQ ID NO: 28033
  chr15:25779326-25779356
  hypo

SEQ ID NO: 176714 - DNA, 230 bp, Homo sapiens
  chr15:25863449-25863679
  hypo
tcacgtgacaggagtctgtcccggcagctcagggtgcaaactgggaacccgccctggctaggatgccatgccctcatggggagcactcacacagccacactcattcacacggggaccatggagacatggggatctgctttacctgcacggctttgggatgtgggagagaacgaagtacctggggaaacccatacagacagggggagaacgtgcaaactccacacagtggc

SEQ ID NO: 176715 - DNA, 31 bp, Homo sapiens; identical to SEQ ID NO: 87865
  chr15:25896683-25896714
  hypo

SEQ ID NO: 176716 - DNA, 153 bp, Homo sapiens
  chr15:25918276-25918429
  hypo
actccagtggtcagccgtcaggatgaactggaatctcattccaacgtggagggtgggttttacaggagcagcccactccggttgagcgaggtagctcaggcaaaacctgctggactccccctatgcgctgggcaggggcggaggaggcccctg

SEQ ID NO: 176717 - DNA, 52 bp, Homo sapiens
  chr15:25940020-25940072
  hypo
cttctgcagaggcgtcgaccgacagcagaggacggagcggcactgcttggca

SEQ ID NO: 176718 - DNA, 302 bp, Homo sapiens; identical to SEQ ID NO: 28034
  chr15:25963360-25963662
  hypo

SEQ ID NO: 176719 - DNA, 30 bp, Homo sapiens; identical to SEQ ID NO: 28035
  chr15:25971133-25971163
  hypo

SEQ ID NO: 176720 - DNA, 159 bp, Homo sapiens
  chr15:25972183-25972342
  hypo
acagtgcgagactcgtctcaaaaaaaaaaaatgaaaaagaaaaaagaaaagaaaacagtgaggggaagtgctggagaacacagcgctgtctggcggcaggtggtgccaggtgcccgagcctacctgcgtagatgacaatgccgacgactgcgtccgtgt

SEQ ID NO: 176721 - DNA, 30 bp, Homo sapiens
  chr15:26011884-26011914
  hypo
tgtgccgcctgcaagcgctcctcgggcctc

SEQ ID NO: 176722 - DNA, 30 bp, Homo sapiens
  chr15:26013030-26013060
  hypo
gccctctgtctgagacgcatctaacatgcc

SEQ ID NO: 176723 - DNA, 30 bp, Homo sapiens
  chr15:26013318-26013348
  hypo
tcacaggacacagcacgcgagcagctgcga

SEQ ID NO: 176724 - DNA, 245 bp, Homo sapiens; identical to SEQ ID NO: 28036
  chr15:26026130-26026375
  hypo

SEQ ID NO: 176725 - DNA, 30 bp, Homo sapiens
  chr15:26047341-26047371
  hypo
ccgtggaaacacgtgcgtgtgcctgcgccg

SEQ ID NO: 176726 - DNA, 27 bp, Homo sapiens
  chr15:26113812-26113839
  hypo
catattgtccacgcgcggtggctcatg

SEQ ID NO: 176727 - DNA, 154 bp, Homo sapiens
  chr15:26234705-26234859
  hypo
aggctgaggggggcgcggcaagactccaagtagaagcggaccttgagaggcagccaggccaggcggcagccgcgcccggagggtgcggaatgaggagcgcaaggtgggcagagcgtgaaaccttcaccgactgcacctccgccctcgctgccct

SEQ ID NO: 176728 - DNA, 30 bp, Homo sapiens; identical to SEQ ID NO: 28037
  chr15:26328926-26328956
  hypo

SEQ ID NO: 176729 - DNA, 30 bp, Homo sapiens
  chr15:26817232-26817262
  hypo
atcagcaaaatgttccggtatccggcgcat

SEQ ID NO: 176730 - DNA, 405 bp, Homo sapiens; identical to SEQ ID NO: 28038
  chr15:27128172-27128577
  hypo

SEQ ID NO: 176731 - DNA, 105 bp, Homo sapiens; identical to SEQ ID NO: 87873
  chr15:27494274-27494379
  hypo

SEQ ID NO: 176732 - DNA, 30 bp, Homo sapiens; identical to SEQ ID NO: 28039
  chr15:27597394-27597424
  hypo

SEQ ID NO: 176733 - DNA, 275 bp, Homo sapiens
  chr15:27959331-27959606
  hypo
ttgcttctcactttttgggttcggatttccgttaaaagctgtaacactgggagagtctgcggcttcactcctaaatcaggaagaccacgaactcctcgagagaagcgaactctggacgtgacacttttaggagctgtaacacggcaaaggtctgtggcttcattcctaacgtcagagagacaacaaactcaccgggaaaaatgaacaactccggacccgccacccttaggagctgtaacacggccagggtctgcggcttcacttccgaagtaagc

SEQ ID NO: 176734 - DNA, 95 bp, Homo sapiens
  chr15:27959725-27959820
  hypo
agtctgtgaacccaagaaccctccgcaaggaaccagttccaggcccacggctagactttcttattcagcataccgggggcagggaaaaaagagat

SEQ ID NO: 176735 - DNA, 30 bp, Homo sapiens; identical to SEQ ID NO: 87875
  chr15:27988992-27989022
  hypo

SEQ ID NO: 176736 - DNA, 30 bp, Homo sapiens
  chr15:28016500-28016530
  hypo
cctgcgagaggccccgggggagagagaagc

SEQ ID NO: 176737 - DNA, 30 bp, Homo sapiens; identical to SEQ ID NO: 87876
  chr15:28272133-28272163
  hypo

SEQ ID NO: 176738 - DNA, 30 bp, Homo sapiens; identical to SEQ ID NO: 87877
  chr15:28356552-28356582
  hypo

SEQ ID NO: 176739 - DNA, 126 bp, Homo sapiens
  chr15:28356785-28356911
  hypo
cctcccgcctggctcgaggacggacgcttctcatcagacacaccaggcagcctacagtctacacagcagcgagcgctctgctgcctggctcaggctctcatctcacgaggacgtttccccatctta

SEQ ID NO: 176740 - DNA, 150 bp, Homo sapiens
  chr15:28358253-28358403
  hypo
gtcctgggcagcctcgtccggccccagacgaagcgaaggaaaagagagcgctctgtgttggagaaggactccatcacctcccagaaccactggatcagcgatgcggaaggctcgatgcctttataggtggccaccgacttgagaaggtgc

SEQ ID NO: 176741 - DNA, 191 bp, Homo sapiens
  chr15:28360049-28360240
  hypo
gcctcaagtgcatctcgaggctgcaagtgcatggcacacaccaagatataagaggagcaacgagagagtacttcacccaaggagctgaacgaagaattcacaattcagccaaatgcttaaaactaaccaccgagaaagttacagcaactggctagcaagggttccctccctgcagccgaggcacaacacag

SEQ ID NO: 176742 - DNA, 30 bp, Homo sapiens
  chr15:28361780-28361810
  hypo
gacacagtctcaagcggccgagaagctcac

SEQ ID NO: 176743 - DNA, 31 bp, Homo sapiens; identical to SEQ ID NO: 28041
  chr15:28362499-28362530
  hypo

SEQ ID NO: 176744 - DNA, 30 bp, Homo sapiens; identical to SEQ ID NO: 87881
  chr15:28363845-28363875
  hypo

SEQ ID NO: 176745 - DNA, 31 bp, Homo sapiens; identical to SEQ ID NO: 28042
  chr15:28365195-28365226
  hypo

SEQ ID NO: 176746 - DNA, 30 bp, Homo sapiens; identical to SEQ ID NO: 87883
  chr15:28376711-28376741
  hypo

SEQ ID NO: 176747 - DNA, 93 bp, Homo sapiens; identical to SEQ ID NO: 87884
  chr15:28377831-28377924
  hypo

SEQ ID NO: 176748 - DNA, 30 bp, Homo sapiens; identical to SEQ ID NO: 87885
  chr15:28382604-28382634
  hypo

SEQ ID NO: 176749 - DNA, 322 bp, Homo sapiens; identical to SEQ ID NO: 87886
  chr15:28389776-28390098
  hypo

SEQ ID NO: 176750 - DNA, 30 bp, Homo sapiens
  chr15:28397369-28397399
  hypo
cgccagatcaaaggccggggcctcaacaat

SEQ ID NO: 176751 - DNA, 30 bp, Homo sapiens; identical to SEQ ID NO: 87887
  chr15:28422179-28422209
  hypo

SEQ ID NO: 176752 - DNA, 31 bp, Homo sapiens; identical to SEQ ID NO: 87888
  chr15:28427419-28427450
  hypo

SEQ ID NO: 176753 - DNA, 424 bp, Homo sapiens; identical to SEQ ID NO: 87889
  chr15:28516950-28517374
  hypo

SEQ ID NO: 176754 - DNA, 30 bp, Homo sapiens; identical to SEQ ID NO: 28045
  chr15:28519576-28519606
  hypo

SEQ ID NO: 176755 - DNA, 30 bp, Homo sapiens; identical to SEQ ID NO: 87891
  chr15:28520144-28520174
  hypo

SEQ ID NO: 176756 - DNA, 87 bp, Homo sapiens; identical to SEQ ID NO: 28046
  chr15:28900533-28900620
  hypo

SEQ ID NO: 176757 - DNA, 34 bp, Homo sapiens; identical to SEQ ID NO: 87893
  chr15:28938355-28938389
  hypo

SEQ ID NO: 176758 - DNA, 121 bp, Homo sapiens; identical to SEQ ID NO: 87894
  chr15:29029576-29029697
  hypo

SEQ ID NO: 176759 - DNA, 23 bp, Homo sapiens
  chr15:29088391-29088414
  hypo
ccgcatctgctcctcctgctcct

SEQ ID NO: 176760 - DNA, 153 bp, Homo sapiens
  chr15:29101154-29101307
  hypo
gaaatttagttcatagtctaacgttgccatttccagtcctcgggggtcccctctttccactccacgcttagttatcaatttgttactctgctttaaaatgtatgttgtttttttgtaatcccagatactcgggagactgaggcaggagaatcg

SEQ ID NO: 176761 - DNA, 33 bp, Homo sapiens; identical to SEQ ID NO: 28048
  chr15:29101366-29101399
  hypo

SEQ ID NO: 176762 - DNA, 30 bp, Homo sapiens; identical to SEQ ID NO: 87898
  chr15:29101710-29101740
  hypo

SEQ ID NO: 176763 - DNA, 46 bp, Homo sapiens; identical to SEQ ID NO: 125412
  chr15:29107355-29107401
  hypo

SEQ ID NO: 176764 - DNA, 87 bp, Homo sapiens; identical to SEQ ID NO: 28050
  chr15:29111212-29111299
  hypo

SEQ ID NO: 176765 - DNA, 44 bp, Homo sapiens; identical to SEQ ID NO: 87901
  chr15:29114836-29114880
  hypo

SEQ ID NO: 176766 - DNA, 392 bp, Homo sapiens; identical to SEQ ID NO: 125413
  chr15:29130655-29131047
  hypo

SEQ ID NO: 176767 - DNA, 98 bp, Homo sapiens; identical to SEQ ID NO: 51817
  chr15:29131532-29131630
  hypo

SEQ ID NO: 176768 - DNA, 156 bp, Homo sapiens; identical to SEQ ID NO: 87904
  chr15:29133628-29133784
  hypo

SEQ ID NO: 176769 - DNA, 503 bp, Homo sapiens
  chr15:29140039-29140542
  hypo
agtaagaacacaggagggtggcgggggcaggtgtctggccaaggcagctcctgcgtcattggggggctccagagcccgctccctatgttctgtaggaggcggctgctgctgccaagtcccagccttgctagtgaggacgtttaattttaccctttagagatttacaggatttctagattaacttgcccctgtttttctaaaagaacgacaaaatccatgacaaaccgttcatcacattattaactggctcacccagccttaacctgtgcagctccgccaacttaccctcggcacacagggaggcctgggtccccaggcagctccagtgtgcaggggtgtgggtgacagcgcaggtgtggcctccctgctgctggcctccggtggctggcctcagcctggctgggcacgcaggctgtccttacggggctcccagtagctttctggtcctgcgtcaggagaggggactgcacagggcttgggaaagagagcgggagcagcagtgc

SEQ ID NO: 176770 - DNA, 90 bp, Homo sapiens; identical to SEQ ID NO: 87906
  chr15:29144521-29144611
  hypo

SEQ ID NO: 176771 - DNA, 166 bp, Homo sapiens
  chr15:29145324-29145490
  hypo
cttcccagcctcctccgcctggactcaggcttcttcgggctcatcagacctgaacagcctggcagtgtggctgtgtgggaatgggtgacaggtgctgttctccccagtgcaaatcaccaatgctgggcaccgtgcatcagcgtcgtggtgacggcagcattgggtg

SEQ ID NO: 176772 - DNA, 93 bp, Homo sapiens; identical to SEQ ID NO: 87907
  chr15:29146200-29146293
  hypo

SEQ ID NO: 176773 - DNA, 30 bp, Homo sapiens
  chr15:29155100-29155130
  hypo
cagagccggggaggtcgtggcttgcaaaac

SEQ ID NO: 176774 - DNA, 30 bp, Homo sapiens
  chr15:29158187-29158217
  hypo
ggacagggaccattgcgttttgtcgtatat

SEQ ID NO: 176775 - DNA, 30 bp, Homo sapiens
  chr15:29158471-29158501
  hypo
tttcacaccttgctgcgaccaccaggctgc

SEQ ID NO: 176776 - DNA, 67 bp, Homo sapiens; identical to SEQ ID NO: 87908
  chr15:29223573-29223640
  hypo

SEQ ID NO: 176777 - DNA, 351 bp, Homo sapiens
  chr15:29236504-29236855
  hypo
cttgccatcctctattttgtacgctcagtcaccccagaaaattgctccggcccttggatttacctccgtgtcactgtccatccggtaccctctgcctgggatgcctcctgggtctccatcacccgcctcactcgtttttcctctgcacatggcatctacttccgcccttccgcaggacaccttcccaggctgggtctggaccaccctgcggactcgctcctcgcaatactggccacatgccctcaagcccatctgtttcttagagtcgatgtcccctaaggtgtgagttcctggtgagcaggagaacctgtgccttttataacctggtgtgctgctcggcgtgccgaagga

SEQ ID NO: 176778 - DNA, 30 bp, Homo sapiens
  chr15:29237371-29237401
  hypo
ggtttctgtttggcgcggggacgaccagag

SEQ ID NO: 176779 - DNA, 39 bp, Homo sapiens; identical to SEQ ID NO: 28053
  chr15:29302742-29302781
  hypo

SEQ ID NO: 176780 - DNA, 1188 bp, Homo sapiens
  chr15:29345749-29346937
  hypo
agtgagaagtcaggaatgagccggtaggttcctggggagaggcgtgtgtcctcgtgagttgccggtgcctcccttgactgcttttcccggagctctgtgtgccctcgttctccttggtgtggatgcgtgttgttctgatgatgagttagcgggggtggggatggcgcactgtttgaacagatgtgccctcacatggctgcgggaggacgtggtgggaggtgctgtggtgaagtggccccacacatggctgggctttgtggggttttgactctgtccttcccaatgttcctccccacagtggctgcctccgggtgatgatggctgtgtgaacgactgccatggcccaccggaagcttgagagcgtggggagcggcatgttggaccatagggtgagaccaggtcctgtccctcacagccaggagcccgagagcgaggacatggagctgcccttggagggctatgtgcccgagggcctggagctggctgccctgcggccagagagccccgcgccagaggaacaggagtgccacaaccacagccccgatggggactccagctctgactacgtgaacaacacctctgaggaggaggactatgacgagggcctccctgaggaggaggagggcatcacctactacatccgctactgccctgaggacgacagctacctagagggcatggactgcaacggggaggagtacctggcccacagtgcacaccctgtggacactgatgagtgccaggaggcggtggaggagtggacggactcggcgggcccgcacccccacggccacgaggctgaaggcagccaggactacccagacggccaactgcccattccggaggatgagccctccgtccttgaggcccatgaccaggaagaagatggtcactactgtgccagcaaagagggctaccaggactactaccccgaggaggccaacgggaacaccggcgcctccccctaccgcctgaggcgtggggatggggacctggaggaccaggaggaggacattgaccagatcgtggcagagatcaagatgagtctgagcatgaccagcatcaccagcgccagtgaggccagccccgagcatgggcctgagccagggcctgaggactctgtagaggcctgcccacccatcaaggccagctgcagccccagcaggcacgaggcgaggcccaagtcgc

SEQ ID NO: 176781 - DNA, 158 bp, Homo sapiens
  chr15:29357221-29357379
  hypo
gtgtgtgtgcacgcacgcttgtatgtgagatattgacttgcattgtactcatctgccggtggggtgtctagggcagattgtggggagtgagagcattgggtatgggacccaggctgtccacgtgcgtctgcttcttgaggccccgtacctcccgttct

SEQ ID NO: 176782 - DNA, 30 bp, Homo sapiens; identical to SEQ ID NO: 87913
  chr15:29385349-29385379
  hypo

SEQ ID NO: 176783 - DNA, 185 bp, Homo sapiens; identical to SEQ ID NO: 87914
  chr15:29389586-29389771
  hypo

SEQ ID NO: 176784 - DNA, 55 bp, Homo sapiens; identical to SEQ ID NO: 125417
  chr15:29395802-29395857
  hypo

SEQ ID NO: 176785 - DNA, 124 bp, Homo sapiens; identical to SEQ ID NO: 125418
  chr15:29396025-29396149
  hypo

SEQ ID NO: 176786 - DNA, 157 bp, Homo sapiens; identical to SEQ ID NO: 28055
  chr15:29398811-29398968
  hypo

SEQ ID NO: 176787 - DNA, 30 bp, Homo sapiens
  chr15:29399537-29399567
  hypo
aggcagaagggtcaccggcagctagggtgg

SEQ ID NO: 176788 - DNA, 43 bp, Homo sapiens; identical to SEQ ID NO: 87916
  chr15:29403247-29403290
  hypo

SEQ ID NO: 176789 - DNA, 31 bp, Homo sapiens; identical to SEQ ID NO: 28056
  chr15:29404344-29404375
  hypo

SEQ ID NO: 176790 - DNA, 30 bp, Homo sapiens; identical to SEQ ID NO: 87918
  chr15:29409339-29409369
  hypo

SEQ ID NO: 176791 - DNA, 30 bp, Homo sapiens; identical to SEQ ID NO: 87919
  chr15:29409660-29409690
  hypo

SEQ ID NO: 176792 - DNA, 633 bp, Homo sapiens
  chr15:29410105-29410738
  hypo
tgtctgccccctctttaaaatcgatctacacacatccacgcacatgcgaccccgaggaaacgaaacccactctagaaaacgcgaccttggccgcacctaaagcagccagccgtgagtgcagaccccttggccagcgtggcgcagtggccctgagcagtagtggcatgtgtgtagatcaagtcggatctagtccagctcggttcattagcgatccatgtaatctgacgtcatcttgtctcgaagtctctttttttggcccaggccttgaagaatacactgtgacttaagaagccttaccacgcagtaactaaagctttaggatgactgtattcgaggagtgccgtgtgttgcatgcagctacccgtaggaagacttcgcgcatatcactaataaacctgaagtcgtgatgaaaagccgtgtgtgtgactggtctgttacctcagcggcgggtgcccgcctgtcctttcattcacagcttggatgcggctctgcaaattcactatgcggtggcagccacagctgctctgtgctcctcctggatcctgaaccttggaagctgtcactaatgagttcggtgggtgggtgctctgggcaccaggtgtcagctgggcaacgccccgctgcaactggagg

SEQ ID NO: 176793 - DNA, 218 bp, Homo sapiens; identical to SEQ ID NO: 87921
  chr15:29411053-29411271
  hypo

SEQ ID NO: 176794 - DNA, 30 bp, Homo sapiens; identical to SEQ ID NO: 87922
  chr15:29413476-29413506
  hypo

SEQ ID NO: 176795 - DNA, 386 bp, Homo sapiens; identical to SEQ ID NO: 87923
  chr15:29415481-29415867
  hypo

SEQ ID NO: 176796 - DNA, 280 bp, Homo sapiens
  chr15:29417873-29418153
  hypo
gactgggtgtgagttctccagcgccgggggtgcccaagactcccggggagctactgtgaaatgcaaattcctgcgctgctggccacagggacctggtgccaggtcctaggctccagggcactgcccgcagacacagtcgcatggggcgatttttgaaagctctgggctgtgtggagagccaagctgcctgggaaatgctgctgaaaacgcacctgtgtctgcgtggggcggctccagctgatgacacccccatgcccagagctatcgttgggggtcatct

SEQ ID NO: 176797 - DNA, 154 bp, Homo sapiens
  chr15:29418508-29418662
  hypo
agcgggacacacgcccgggacctggctgcacctgtgagcccatgccaggatcctctggagacacatggccagggggaagggcaggttcggagggtgctggggcgcccacagggccatcgggggatgggctggaacctggcgtagcagtgccctc

SEQ ID NO: 176798 - DNA, 30 bp, Homo sapiens
  chr15:29426761-29426791
  hypo
cggggcaccttacagcgtctgaatgcgctg

SEQ ID NO: 176799 - DNA, 61 bp, Homo sapiens; identical to SEQ ID NO: 28061
  chr15:29428199-29428260
  hypo

SEQ ID NO: 176800 - DNA, 110 bp, Homo sapiens
  chr15:29431469-29431579
  hypo
acggagcacactcctcgcctctctggctggaccgacccacggctgcgtgtgtttaattgtccgaaacagaggtgaatcatccgctgtgagcgggacgcatgtgcgtctgt

SEQ ID NO: 176801 - DNA, 105 bp, Homo sapiens; identical to SEQ ID NO: 28062
  chr15:29448968-29449073
  hypo

SEQ ID NO: 176802 - DNA, 30 bp, Homo sapiens
  chr15:29471766-29471796
  hypo
gatcagggccggagtcgtcttttttttttt

SEQ ID NO: 176803 - DNA, 66 bp, Homo sapiens; identical to SEQ ID NO: 87928
  chr15:29487546-29487612
  hypo

SEQ ID NO: 176804 - DNA, 30 bp, Homo sapiens; identical to SEQ ID NO: 28063
  chr15:29637535-29637565
  hypo

SEQ ID NO: 176805 - DNA, 31 bp, Homo sapiens; identical to SEQ ID NO: 87930
  chr15:29650110-29650141
  hypo

SEQ ID NO: 176806 - DNA, 79 bp, Homo sapiens
  chr15:29697961-29698040
  hypo
acacatgagagtgaaggctgtcggcacgcacaaggttggccagcgcccacctccgggcgggagactttgtgcccatgct

SEQ ID NO: 176807 - DNA, 22 bp, Homo sapiens
  chr15:29766772-29766794
  hypo
tttggagacagggtctcactcc

SEQ ID NO: 176808 - DNA, 18 bp, Homo sapiens
  chr15:29770525-29770543
  hypo
cagcctaacaatatattt

SEQ ID NO: 176809 - DNA, 19 bp, Homo sapiens
  chr15:29893412-29893431
  hypo
gatacgttctaatgcttgt

SEQ ID NO: 176810 - DNA, 31 bp, Homo sapiens; identical to SEQ ID NO: 87934
  chr15:29998410-29998441
  hypo

SEQ ID NO: 176811 - DNA, 73 bp, Homo sapiens; identical to SEQ ID NO: 87935
  chr15:30022824-30022897
  hypo

SEQ ID NO: 176812 - DNA, 38 bp, Homo sapiens; identical to SEQ ID NO: 87936
  chr15:30024946-30024984
  hypo

SEQ ID NO: 176813 - DNA, 780 bp, Homo sapiens; identical to SEQ ID NO: 125424
  chr15:30113522-30114302
  hypo

SEQ ID NO: 176814 - DNA, 866 bp, Homo sapiens; identical to SEQ ID NO: 125425
  chr15:30114349-30115215
  hypo

SEQ ID NO: 176815 - DNA, 43 bp, Homo sapiens; identical to SEQ ID NO: 87939
  chr15:30333820-30333863
  hypo

SEQ ID NO: 176816 - DNA, 31 bp, Homo sapiens; identical to SEQ ID NO: 87940
  chr15:30400068-30400099
  hypo

SEQ ID NO: 176817 - DNA, 26 bp, Homo sapiens
  chr15:30779249-30779275
  hypo
agaattgtctaaaatccggccgggcg

SEQ ID NO: 176818 - DNA, 31 bp, Homo sapiens; identical to SEQ ID NO: 28066
  chr15:31115691-31115722
  hypo

SEQ ID NO: 176819 - DNA, 30 bp, Homo sapiens; identical to SEQ ID NO: 87943
  chr15:31122522-31122552
  hypo

SEQ ID NO: 176820 - DNA, 30 bp, Homo sapiens
  chr15:31135472-31135502
  hypo
gggtttcacttcctgcgttgggccttgtgg

SEQ ID NO: 176821 - DNA, 121 bp, Homo sapiens; identical to SEQ ID NO: 87944
  chr15:31188900-31189021
  hypo

SEQ ID NO: 176822 - DNA, 30 bp, Homo sapiens
  chr15:31192875-31192905
  hypo
gggcgtgagccaccgcgcccggcgatttta

SEQ ID NO: 176823 - DNA, 56 bp, Homo sapiens; identical to SEQ ID NO: 28068
  chr15:31194967-31195023
  hypo

SEQ ID NO: 176824 - DNA, 30 bp, Homo sapiens; identical to SEQ ID NO: 87946
  chr15:31217392-31217422
  hypo

SEQ ID NO: 176825 - DNA, 438 bp, Homo sapiens; identical to SEQ ID NO: 87947
  chr15:31220890-31221328
  hypo

SEQ ID NO: 176826 - DNA, 91 bp, Homo sapiens; identical to SEQ ID NO: 87948
  chr15:31239317-31239408
  hypo

SEQ ID NO: 176827 - DNA, 17 bp, Homo sapiens
  chr15:31253443-31253460
  hypo
tttttttttttttgacg

SEQ ID NO: 176828 - DNA, 35 bp, Homo sapiens; identical to SEQ ID NO: 28069
  chr15:31289999-31290034
  hypo

SEQ ID NO: 176829 - DNA, 34 bp, Homo sapiens; identical to SEQ ID NO: 28070
  chr15:31290273-31290307
  hypo

SEQ ID NO: 176830 - DNA, 211 bp, Homo sapiens
  chr15:31332300-31332511
  hypo
tcgcagcacgttgcacgcaccttcaggccggggttcttccgcatccgcagtcttcccatccacatatcggtcagcagcatctggctgcaggtgtgagcaatgaagtcccggtgtttggctgccacggccagtttgaggcaggtcgagttgctccagtttttcagctcgtaggtcaggagtttcatagcgatctgctcgtcatgcttatagg

SEQ ID NO: 176831 - DNA, 30 bp, Homo sapiens
  chr15:31339241-31339271
  hypo
ttgttgaaaagcaagcgaggaaccacatgg

SEQ ID NO: 176832 - DNA, 31 bp, Homo sapiens
  chr15:31358307-31358338
  hypo
ttttccagcagccttcgcagcttcacctcgg

SEQ ID NO: 176833 - DNA, 158 bp, Homo sapiens; identical to SEQ ID NO: 28072
  chr15:31395007-31395165
  hypo

SEQ ID NO: 176834 - DNA, 30 bp, Homo sapiens; identical to SEQ ID NO: 87954
  chr15:31452884-31452914
  hypo

SEQ ID NO: 176835 - DNA, 164 bp, Homo sapiens; identical to SEQ ID NO: 87955
  chr15:31453186-31453350
  hypo

SEQ ID NO: 176836 - DNA, 69 bp, Homo sapiens
  chr15:31455370-31455439
  hypo
aattttctgaggcctcgcagaggattggatgcagccgatgcctcatcctcaggccgtcccagtttgcct

SEQ ID NO: 176837 - DNA, 76 bp, Homo sapiens
  chr15:31490443-31490519
  hypo
ggcgatggacttgatcggtttctccaatcatcctcgaattgcctggattcctaccacactccgccttcccctcctt

SEQ ID NO: 176838 - DNA, 162 bp, Homo sapiens; identical to SEQ ID NO: 51830
  chr15:31508792-31508954
  hypo

SEQ ID NO: 176839 - DNA, 45 bp, Homo sapiens; identical to SEQ ID NO: 87957
  chr15:31512244-31512289
  hypo

SEQ ID NO: 176840 - DNA, 386 bp, Homo sapiens
  chr15:31533286-31533672
  hypo
aacgaggctcagacatgcacagcccgccatggctctgtcctccatcgcactaacacttgggtggcaaacgcagaggaggactggcatctactggccaagtaaccttgtccatttgattacttagtgcctctcccgggtggattcaaacatccttacaccccgtgcgcaccctcatacgtctatccactacctcttccctggggcctttctgtccctgaacttctggtctcctcccaggctcctgaccataagcccagccactccccactgcccataaatccacggatgtttttaccttgggccttggaaacatgaagtgaatgaccaggtgcgccacagaatgctctgcccattaggaagatgttcatcgtcggcagatggtgact

SEQ ID NO: 176841 - DNA, 30 bp, Homo sapiens
  chr15:31544823-31544853
  hypo
taggggttgttctctcgcacagcgtgtgtc

SEQ ID NO: 176842 - DNA, 279 bp, Homo sapiens; identical to SEQ ID NO: 87959
  chr15:31561302-31561581
  hypo

SEQ ID NO: 176843 - DNA, 227 bp, Homo sapiens
  chr15:31564281-31564508
  hypo
cctcaggggatcctaggccaccggaaaggctctgcgtggcccaaggtttcagtcccagagccagcctttttgtctttggcttcgaaaacctcaatcgtaaaatggagctaataaaaacaccaagcccagattggaggacgaaatggcatatggccctggtggggactccaccgggggggaggcatggcccaaaaggcttgggttgcgtcaatgattcccattctgtt

SEQ ID NO: 176844 - DNA, 150 bp, Homo sapiens
  chr15:31571205-31571355
  hypo
cctccagtcctgcaacggtgccccatccctggcatggtccccactccaccctgccccagcaggaggccagtttgtcctggatgggaagaaggcctcacgggcaggggaggctcccacgcatgccaccccttcggccgtgccctggggttc

SEQ ID NO: 176845 - DNA, 20 bp, Homo sapiens
  chr15:31591814-31591834
  hypo
ccagccgcattcttttcatg

SEQ ID NO: 176846 - DNA, 30 bp, Homo sapiens; identical to SEQ ID NO: 87962
  chr15:31597337-31597367
  hypo

SEQ ID NO: 176847 - DNA, 30 bp, Homo sapiens
  chr15:31611045-31611075
  hypo
aacacagtgatggttcgggagcatgttctt

SEQ ID NO: 176848 - DNA, 39 bp, Homo sapiens
  chr15:31611579-31611618
  hypo
ggtgtccgggaagtgaactgagtcgcaactgtggagagg

SEQ ID NO: 176849 - DNA, 15 bp, Homo sapiens
  chr15:31620728-31620743
  hypo
aaaggaatgccctgg

SEQ ID NO: 176850 - DNA, 261 bp, Homo sapiens; identical to SEQ ID NO: 125434
  chr15:31620800-31621061
  hypo

SEQ ID NO: 176851 - DNA, 51 bp, Homo sapiens
  chr15:31632060-31632111
  hypo
ttgctgtgggagatgcagcagcgggctctcgtgcaggcctgacccttcacc

SEQ ID NO: 176852 - DNA, 30 bp, Homo sapiens
  chr15:31643883-31643913
  hypo
ggcagggagagtgggcgggtggctgttgga

SEQ ID NO: 176853 - DNA, 30 bp, Homo sapiens
  chr15:31664430-31664460
  hypo
accggctccctcagcgactacagccgctcc

SEQ ID NO: 176854 - DNA, 30 bp, Homo sapiens; identical to SEQ ID NO: 87966
  chr15:31665235-31665265
  hypo

SEQ ID NO: 176855 - DNA, 248 bp, Homo sapiens
  chr15:31668807-31669055
  hypo
tgtctgagacacattccggagacctttgtaccagaacttggatgcatagtccaccttactactgatacacgcctgagcaccctttagggcgaggcgccgcctcctgcctgctgtcctgtccctcagcatcagaagagttgaattcagcaggagacgggagcccggtgtccatgagggaagaggggtcgcgcttggtttctactgacccccatgaagatttcagacttgcagtgcggccacctggccct

SEQ ID NO: 176856 - DNA, 30 bp, Homo sapiens
  chr15:31692415-31692445
  hypo
agggaatccacggagcgagagcggtgaaac

SEQ ID NO: 176857 - DNA, 30 bp, Homo sapiens; identical to SEQ ID NO: 28076
  chr15:31695412-31695442
  hypo

SEQ ID NO: 176858 - DNA, 116 bp, Homo sapiens; identical to SEQ ID NO: 87969
  chr15:31731208-31731324
  hypo

SEQ ID NO: 176859 - DNA, 525 bp, Homo sapiens; identical to SEQ ID NO: 125437
  chr15:31774609-31775134
  hypo

SEQ ID NO: 176860 - DNA, 124 bp, Homo sapiens; identical to SEQ ID NO: 51836
  chr15:31775349-31775473
  hypo

SEQ ID NO: 176861 - DNA, 154 bp, Homo sapiens; identical to SEQ ID NO: 51837
  chr15:31775483-31775637
  hypo

SEQ ID NO: 176862 - DNA, 104 bp, Homo sapiens; identical to SEQ ID NO: 51838
  chr15:31775678-31775782
  hypo

SEQ ID NO: 176863 - DNA, 458 bp, Homo sapiens; identical to SEQ ID NO: 87974
  chr15:31776580-31777038
  hypo

SEQ ID NO: 176864 - DNA, 201 bp, Homo sapiens
  chr15:31851204-31851405
  hypo
cgatcaagtcccgctcgatgaagctcctgaaatcctcgctgtacacgctcaggtctggcaactggaatgtgtagattggcatctccagggggaactgctcgttgttgcattcacttgccacgtgggaccgggccagggagacgatggctgagctggcgtgggaaatcccccgggaaagccgcttttctgcagggggagaag

SEQ ID NO: 176865 - DNA, 24 bp, Homo sapiens
  chr15:31977846-31977870
  hypo
gcgagactccgtctcaaaaaaaga

SEQ ID NO: 176866 - DNA, 1083 bp, Homo sapiens; identical to SEQ ID NO: 125442
  chr15:32162215-32163298
  hypo

SEQ ID NO: 176867 - DNA, 30 bp, Homo sapiens; identical to SEQ ID NO: 87978
  chr15:32428944-32428974
  hypo

SEQ ID NO: 176868 - DNA, 20 bp, Homo sapiens
  chr15:32445343-32445363
  hypo
gggcacggtggctcacgcct

SEQ ID NO: 176869 - DNA, 39 bp, Homo sapiens
  chr15:32942575-32942614
  hypo
acaggcgtgagccaccacgcccggcgccccagtcttatt

SEQ ID NO: 176870 - DNA, 30 bp, Homo sapiens
  chr15:32976214-32976244
  hypo
gtcctgccagaggcgcgtgaggctgtagtg

SEQ ID NO: 176871 - DNA, 30 bp, Homo sapiens; identical to SEQ ID NO: 51842
  chr15:32994740-32994770
  hypo

SEQ ID NO: 176872 - DNA, 395 bp, Homo sapiens; identical to SEQ ID NO: 10048
  chr15:33010280-33010675
  hypo

SEQ ID NO: 176873 - DNA, 30 bp, Homo sapiens; identical to SEQ ID NO: 51847
  chr15:33012486-33012516
  hypo

SEQ ID NO: 176874 - DNA, 30 bp, Homo sapiens
  chr15:33141455-33141485
  hypo
tgctgtgattataggcgtgagccaccgcgc

SEQ ID NO: 176875 - DNA, 30 bp, Homo sapiens
  chr15:33191175-33191205
  hypo
gagaaatttctaattcgtgaaaactggctt

SEQ ID NO: 176876 - DNA, 107 bp, Homo sapiens; identical to SEQ ID NO: 87983
  chr15:33358714-33358821
  hypo

SEQ ID NO: 176877 - DNA, 134 bp, Homo sapiens; identical to SEQ ID NO: 87984
  chr15:33359131-33359265
  hypo

SEQ ID NO: 176878 - DNA, 376 bp, Homo sapiens; identical to SEQ ID NO: 87985
  chr15:33445899-33446275
  hypo

SEQ ID NO: 176879 - DNA, 121 bp, Homo sapiens
  chr15:33541442-33541563
  hypo
tactttgtttcatttctgccctaaagctttttgtttctctttcacactccacaactcccctctaaagctttttgtttttaaattttttaaatttttaagagatggagtcgcgctctgtcgc

SEQ ID NO: 176880 - DNA, 36 bp, Homo sapiens; identical to SEQ ID NO: 28080
  chr15:33549939-33549975
  hypo

SEQ ID NO: 176881 - DNA, 35 bp, Homo sapiens; identical to SEQ ID NO: 28081
  chr15:33550214-33550249
  hypo

SEQ ID NO: 176882 - DNA, 917 bp, Homo sapiens; identical to SEQ ID NO: 51850
  chr15:33602691-33603608
  hypo

SEQ ID NO: 176883 - DNA, 142 bp, Homo sapiens; identical to SEQ ID NO: 51851
  chr15:33603647-33603789
  hypo

SEQ ID NO: 176884 - DNA, 210 bp, Homo sapiens; identical to SEQ ID NO: 51852
  chr15:33603879-33604089
  hypo

SEQ ID NO: 176885 - DNA, 17 bp, Homo sapiens
  chr15:33652121-33652138
  hypo
tcctgaccccttattta

SEQ ID NO: 176886 - DNA, 30 bp, Homo sapiens; identical to SEQ ID NO: 28084
  chr15:33691031-33691061
  hypo

SEQ ID NO: 176887 - DNA, 27 bp, Homo sapiens
  chr15:33691827-33691854
  hypo
gactccgtttcaaaaataaaaaaggaa

SEQ ID NO: 176888 - DNA, 119 bp, Homo sapiens
  chr15:33746677-33746796
  hypo
tcattaagcatttaccgaacatatcctctctgctaggccttatcctcggcacggagatgagtcagacacagttgccatctccaaggatggaggaggcagacaagcgaaacagcggttaa

SEQ ID NO: 176889 - DNA, 28 bp, Homo sapiens
  chr15:33849587-33849615
  hypo
ttttttattgattttttgagacggagtc

SEQ ID NO: 176890 - DNA, 30 bp, Homo sapiens
  chr15:33896328-33896358
  hypo
tgcaattggagacgtcgcgtcccttataga

SEQ ID NO: 176891 - DNA, 30 bp, Homo sapiens
  chr15:33936537-33936567
  hypo
ctatctcagatcggccgcatgaatctcggg

SEQ ID NO: 176892 - DNA, 126 bp, Homo sapiens; identical to SEQ ID NO: 28087
  chr15:33954375-33954501
  hypo

SEQ ID NO: 176893 - DNA, 150 bp, Homo sapiens
  chr15:33969175-33969325
  hypo
ttgtgcccggtactgcgcttggcacttcaccttacctcgtttgattttattctcgcaacaagcaaccaagtatagtgacctctaggctcccattttatgcactaggcaactaagcctgagggtagaaaaataattcggacaaagtcttgc

SEQ ID NO: 176894 - DNA, 30 bp, Homo sapiens; identical to SEQ ID NO: 87995
  chr15:34015217-34015247
  hypo

SEQ ID NO: 176895 - DNA, 30 bp, Homo sapiens
  chr15:34123960-34123990
  hypo
gcgtatcattaccgtcggtgatacaagatt

SEQ ID NO: 176896 - DNA, 99 bp, Homo sapiens
  chr15:34142219-34142318
  hypo
tgcaatcatcagtaatgcctgcgtcttgttatacaggggcatgtggcctaaaagtcccagtaagaaggcagttcaatttcggccaggcacaatggttca

SEQ ID NO: 176897 - DNA, 24 bp, Homo sapiens
  chr15:34208022-34208046
  hypo
aataaactccgtgctgttggagaa

SEQ ID NO: 176898 - DNA, 30 bp, Homo sapiens
  chr15:34248464-34248494
  hypo
ccatttccatctccccgctcctccaattcc

SEQ ID NO: 176899 - DNA, 21 bp, Homo sapiens
  chr15:34322547-34322568
  hypo
tttgttttgttttgtttgaga

SEQ ID NO: 176900 - DNA, 121 bp, Homo sapiens
  chr15:34322807-34322928
  hypo
tgtgagccaccacgcccagcctggtttggggggttttgttgagaaagagtctcgggctgtcatccaggctggagtgatcatagctcactgcaacctccaactcctgggttaaaaatcttcc

SEQ ID NO: 176901 - DNA, 511 bp, Homo sapiens
  chr15:34358081-34358592
  hypo
cgtcttagtgtaggccgggtccttttcagtctcatttgctaagaggatggaaaattagctggtttagttgtcctgggaattagatatgtacctgagtatgggagagcttcagcctaccactgaagagcatcatcagcctctcacaggatgtcccacggaggcttcagggtagtagaatctcaggcaggacgggactggtcccttataaagacttcacgttgacatgaaacatcttgtaagcagtgcatctgctgagcctttgtaaagggcaggttgacacctgcaaagaattcggtgggaacagtaattggctcagttctccagcacagaggctttcgggcctccgtgatgccaactgggtgtgacttcatgagcaaacctgctctaccagcgccagataaacagttgagtcttcgtttaaggctttgattcctgataaagatgaaaaccccttcatgagaataggcttttaagcccatgttgggcattcaccattcgcagttgagagtga

SEQ ID NO: 176902 - DNA, 211 bp, Homo sapiens; identical to SEQ ID NO: 87998
  chr15:34395525-34395736
  hypo

SEQ ID NO: 176903 - DNA, 30 bp, Homo sapiens; identical to SEQ ID NO: 28089
  chr15:34396313-34396343
  hypo

SEQ ID NO: 176904 - DNA, 81 bp, Homo sapiens; identical to SEQ ID NO: 28090
  chr15:34467904-34467985
  hypo

SEQ ID NO: 176905 - DNA, 45 bp, Homo sapiens; identical to SEQ ID NO: 88001
  chr15:34524062-34524107
  hypo

SEQ ID NO: 176906 - DNA, 30 bp, Homo sapiens
  chr15:34526103-34526133
  hypo
tcactgccaccaccccggacaagtaggact

SEQ ID NO: 176907 - DNA, 30 bp, Homo sapiens; identical to SEQ ID NO: 88002
  chr15:34531365-34531395
  hypo

SEQ ID NO: 176908 - DNA, 83 bp, Homo sapiens; identical to SEQ ID NO: 28091
  chr15:34546025-34546108
  hypo

SEQ ID NO: 176909 - DNA, 22 bp, Homo sapiens
  chr15:34546167-34546189
  hypo
agcacgtcgggaggccaaggtg

SEQ ID NO: 176910 - DNA, 153 bp, Homo sapiens; identical to SEQ ID NO: 88005
  chr15:34630946-34631099
  hypo

SEQ ID NO: 176911 - DNA, 276 bp, Homo sapiens
  chr15:34634196-34634472
  hypo
atgagcaccttgaagcgtttcttgatggtgattcggtgtcgagagtatttgtcatctggggagaaccgagcaggatgggctgagcaggtctgttgtcccatcgggtcaaatttctgctccaggaacacagaatgtatgtcagtacaggagtgatgaaatggggtggggccagcgcgaaaaagggcaaacatgaaaatagaagatgcaatggtcaactcaaaaagttgtacaaataaatagagaaatataaaatttaaaaaggccgagcgcggtggc

SEQ ID NO: 176912 - DNA, 393 bp, Homo sapiens
  chr15:34635788-34636181
  hypo
cgtaaagcgaaagagcgtaaagttattttatgaaactggtgaagcatgtttcagcggtcgaaccaagatttaaagttaggtccctaccgcaaattcagcgctctttcttatggtggtgagtagctaataataacgtaataaagtgcaccttctaggagtttttacaatttttaaaagaatatagaagttctccttataagactctcgtttaaagaaatgaaaatgagaaccaaaatatcattacaaagatcatcgttacgccattatttacaatgacaaaagcattggaatatatattaactgtgtaaccagaaaaacctgcacttttttttttttttttttaagaatatggtttggcggggcgcggtggctcacgcctgtaatcccaacact

SEQ ID NO: 176913 - DNA, 27 bp, Homo sapiens
  chr15:34656938-34656965
  hypo
gccaccgtgcctggcctgttatctttg

SEQ ID NO: 176914 - DNA, 22 bp, Homo sapiens
  chr15:34728766-34728788
  hypo
gtgctgcaggacaggcccctcc

SEQ ID NO: 176915 - DNA, 845 bp, Homo sapiens; identical to SEQ ID NO: 10055
  chr15:34728813-34729658
  hypo

SEQ ID NO: 176916 - DNA, 236 bp, Homo sapiens; identical to SEQ ID NO: 10056
  chr15:34729900-34730136
  hypo

SEQ ID NO: 176917 - DNA, 428 bp, Homo sapiens; identical to SEQ ID NO: 125468
  chr15:34786515-34786943
  hypo

SEQ ID NO: 176918 - DNA, 31 bp, Homo sapiens; identical to SEQ ID NO: 88012
  chr15:34812800-34812831
  hypo

SEQ ID NO: 176919 - DNA, 30 bp, Homo sapiens
  chr15:34872717-34872747
  hypo
aggtcacctaactcccgggcctcccttgtg

SEQ ID NO: 176920 - DNA, 254 bp, Homo sapiens
  chr15:34873191-34873445
  hypo
gcccagagctctctccgtttctctaaggaccaggctgaaacgcagggcatgtgatctctgccgaagacattgaagccacccagtgatgtgtgcagggcctcgatccccaccgaccgccagtcctgtcctcccctggacagtaaaggtttctccaagacttcagaccatggtgtcacctgaggcccacacctgttaagtcactggggcaggtatgcgtggcagaggacagcgaggagtgccggagaggagctgag

SEQ ID NO: 176921 - DNA, 31 bp, Homo sapiens; identical to SEQ ID NO: 88013
  chr15:34879898-34879929
  hypo

SEQ ID NO: 176922 - DNA, 30 bp, Homo sapiens; identical to SEQ ID NO: 10058
  chr15:34903026-34903056
  hypo

SEQ ID NO: 176923 - DNA, 104 bp, Homo sapiens; identical to SEQ ID NO: 125475
  chr15:35046504-35046608
  hypo

SEQ ID NO: 176924 - DNA, 459 bp, Homo sapiens; identical to SEQ ID NO: 125476
  chr15:35046689-35047148
  hypo

SEQ ID NO: 176925 - DNA, 404 bp, Homo sapiens; identical to SEQ ID NO: 51866
  chr15:35047296-35047700
  hypo

SEQ ID NO: 176926 - DNA, 30 bp, Homo sapiens
  chr15:35092695-35092725
  hypo
aaaggcgtgagccaccgcactcagactaaa

SEQ ID NO: 176927 - DNA, 30 bp, Homo sapiens; identical to SEQ ID NO: 88017
  chr15:35202377-35202407
  hypo

SEQ ID NO: 176928 - DNA, 31 bp, Homo sapiens; identical to SEQ ID NO: 88018
  chr15:35213343-35213374
  hypo

SEQ ID NO: 176929 - DNA, 30 bp, Homo sapiens
  chr15:35261711-35261741
  hypo
cacacacaccagactcgcccgagctcacct

SEQ ID NO: 176930 - DNA, 121 bp, Homo sapiens
  chr15:35310621-35310742
  hypo
tacaggcgtgagccactgcacccagcgtttaaagggaattctgatgtttgtttccatagacagtttttttcttagtaaggaatggatgtaggcacggtgcggtagctcacgcctgtaatcc

SEQ ID NO: 176931 - DNA, 32 bp, Homo sapiens
  chr15:35384633-35384665
  hypo
ctccacaggtctcccgcgggcgtcagcagggg

SEQ ID NO: 176932 - DNA, 130 bp, Homo sapiens; identical to SEQ ID NO: 88020
  chr15:35385318-35385448
  hypo

SEQ ID NO: 176933 - DNA, 31 bp, Homo sapiens; identical to SEQ ID NO: 88021
  chr15:35389042-35389073
  hypo

SEQ ID NO: 176934 - DNA, 111 bp, Homo sapiens; identical to SEQ ID NO: 88022
  chr15:35414091-35414202
  hypo

SEQ ID NO: 176935 - DNA, 78 bp, Homo sapiens; identical to SEQ ID NO: 28103
  chr15:35529458-35529536
  hypo

SEQ ID NO: 176936 - DNA, 31 bp, Homo sapiens; identical to SEQ ID NO: 88024
  chr15:35591336-35591367
  hypo

SEQ ID NO: 176937 - DNA, 30 bp, Homo sapiens; identical to SEQ ID NO: 88025
  chr15:35591655-35591685
  hypo

SEQ ID NO: 176938 - DNA, 30 bp, Homo sapiens; identical to SEQ ID NO: 10064
  chr15:36053807-36053837
  hypo

SEQ ID NO: 176939 - DNA, 147 bp, Homo sapiens
  chr15:36870093-36870240
  hypo
atttatggccaaaaccgcagttgctcttgcaccaacctaatatttcacatagactatcctctagacaccacgctatataatcttttatttgtaccagcctgttaatcttaaaaacagcccatgcccgggcgaagtggctaatgcctg

SEQ ID NO: 176940 - DNA, 31 bp, Homo sapiens; identical to SEQ ID NO: 88027
  chr15:36905527-36905558
  hypo

SEQ ID NO: 176941 - DNA, 19 bp, Homo sapiens
  chr15:37212638-37212657
  hypo
cgcccggtctatactgatc

SEQ ID NO: 176942 - DNA, 30 bp, Homo sapiens
  chr15:37350219-37350249
  hypo
tgagtaaaacaagcacgataacagaaagtt

SEQ ID NO: 176943 - DNA, 30 bp, Homo sapiens
  chr15:37350638-37350668
  hypo
tggggctgttttcaacgttctctcctgggc

SEQ ID NO: 176944 - DNA, 30 bp, Homo sapiens; identical to SEQ ID NO: 125492
  chr15:37393174-37393204
  hypo

SEQ ID NO: 176945 - DNA, 680 bp, Homo sapiens; identical to SEQ ID NO: 125493
  chr15:37393562-37394242
  hypo

SEQ ID NO: 176946 - DNA, 65 bp, Homo sapiens
  chr15:37783012-37783077
  hypo
agcagcgtttgaaccgggtctggggcggaaacagcactcgccgctgaagcgcctgcgcaaggcca

SEQ ID NO: 176947 - DNA, 30 bp, Homo sapiens; identical to SEQ ID NO: 51880
  chr15:38217644-38217674
  hypo

SEQ ID NO: 176948 - DNA, 136 bp, Homo sapiens; identical to SEQ ID NO: 125499
  chr15:38365201-38365337
  hypo

SEQ ID NO: 176949 - DNA, 562 bp, Homo sapiens; identical to SEQ ID NO: 51882
  chr15:38543128-38543690
  hypo

SEQ ID NO: 176950 - DNA, 31 bp, Homo sapiens; identical to SEQ ID NO: 51883
  chr15:38545321-38545352
  hypo

SEQ ID NO: 176951 - DNA, 32 bp, Homo sapiens; identical to SEQ ID NO: 88035
  chr15:38652447-38652479
  hypo

SEQ ID NO: 176952 - DNA, 137 bp, Homo sapiens; identical to SEQ ID NO: 125507
  chr15:38857267-38857404
  hypo

SEQ ID NO: 176953 - DNA, 31 bp, Homo sapiens; identical to SEQ ID NO: 51885
  chr15:39140581-39140612
  hypo

SEQ ID NO: 176954 - DNA, 25 bp, Homo sapiens
  chr15:39267347-39267372
  hypo
ccgcgcccggcgaaaaatttatttt

SEQ ID NO: 176955 - DNA, 85 bp, Homo sapiens; identical to SEQ ID NO: 88038
  chr15:39415394-39415479
  hypo

SEQ ID NO: 176956 - DNA, 40 bp, Homo sapiens; identical to SEQ ID NO: 88039
  chr15:39628273-39628313
  hypo

SEQ ID NO: 176957 - DNA, 218 bp, Homo sapiens; identical to SEQ ID NO: 88040
  chr15:39703027-39703245
  hypo

SEQ ID NO: 176958 - DNA, 219 bp, Homo sapiens; identical to SEQ ID NO: 88041
  chr15:39742867-39743086
  hypo

SEQ ID NO: 176959 - DNA, 31 bp, Homo sapiens; identical to SEQ ID NO: 28110
  chr15:39853006-39853037
  hypo

SEQ ID NO: 176960 - DNA, 30 bp, Homo sapiens; identical to SEQ ID NO: 51887
  chr15:39873899-39873929
  hypo

SEQ ID NO: 176961 - DNA, 159 bp, Homo sapiens
  chr15:39881426-39881585
  hypo
ttcaaccacaatggagagcaccggtgtgagaacacggaccccggctacaactgcctgccctgccccccacgcttcaccggctcacagcccttcggccagggtgtcgaacatgccacggccaacaaacaggtacagtcaactagacgagtaaaccagagg

SEQ ID NO: 176962 - DNA, 30 bp, Homo sapiens
  chr15:39882109-39882139
  hypo
gtgcaagcctggctacgctggcaatggcat

SEQ ID NO: 176963 - DNA, 30 bp, Homo sapiens; identical to SEQ ID NO: 51888
  chr15:39921485-39921515
  hypo

SEQ ID NO: 176964 - DNA, 46 bp, Homo sapiens; identical to SEQ ID NO: 51889
  chr15:39958297-39958343
  hypo

SEQ ID NO: 176965 - DNA, 143 bp, Homo sapiens
  chr15:39971425-39971568
  hypo
ccaagaagtccaaaaacgctaacggctaaggaataaggaaccctgaatatcttaaaatctagctttacaagccaaagacatcaagacaaatattgtaaggccttgtgcatttgtctgacctgttgcgccgacaaactgacagg

SEQ ID NO: 176966 - DNA, 35 bp, Homo sapiens; identical to SEQ ID NO: 88048
  chr15:39986668-39986703
  hypo

SEQ ID NO: 176967 - DNA, 345 bp, Homo sapiens; identical to SEQ ID NO: 125515
  chr15:40074970-40075315
  hypo

SEQ ID NO: 176968 - DNA, 67 bp, Homo sapiens; identical to SEQ ID NO: 51892
  chr15:40094249-40094316
  hypo

SEQ ID NO: 176969 - DNA, 30 bp, Homo sapiens; identical to SEQ ID NO: 88051
  chr15:40113152-40113182
  hypo

SEQ ID NO: 176970 - DNA, 149 bp, Homo sapiens; identical to SEQ ID NO: 125519
  chr15:40225952-40226101
  hypo

SEQ ID NO: 176971 - DNA, 30 bp, Homo sapiens; identical to SEQ ID NO: 88052
  chr15:40236611-40236641
  hypo

SEQ ID NO: 176972 - DNA, 30 bp, Homo sapiens; identical to SEQ ID NO: 88053
  chr15:40236920-40236950
  hypo

SEQ ID NO: 176973 - DNA, 30 bp, Homo sapiens
  chr15:40279493-40279523
  hypo
tactgacaattattccgaaggtgatagaac

SEQ ID NO: 176974 - DNA, 65 bp, Homo sapiens
  chr15:40280195-40280260
  hypo
gagaagagcactttacgagacaccattgaccagggactgtatcgagacaccgtcagactctggag

SEQ ID NO: 176975 - DNA, 30 bp, Homo sapiens; identical to SEQ ID NO: 51895
  chr15:40322108-40322138
  hypo

SEQ ID NO: 176976 - DNA, 49 bp, Homo sapiens; identical to SEQ ID NO: 88055
  chr15:40336684-40336733
  hypo

SEQ ID NO: 176977 - DNA, 30 bp, Homo sapiens; identical to SEQ ID NO: 51896
  chr15:40364846-40364876
  hypo

SEQ ID NO: 176978 - DNA, 173 bp, Homo sapiens; identical to SEQ ID NO: 88057
  chr15:40368063-40368236
  hypo

SEQ ID NO: 176979 - DNA, 172 bp, Homo sapiens
  chr15:40377025-40377197
  hypo
agcttatttctttccaatcttcgcactgggcttagggtggcgcctcgcttcagtgccagtgactcattcagtgtacctcaccttcttaggagcagggttggcgctcgaatgagcattcgaatgctggtgacagatccccctgcagagtagcgtggagccaggggacatgtga

SEQ ID NO: 176980 - DNA, 30 bp, Homo sapiens; identical to SEQ ID NO: 51897
  chr15:40383911-40383941
  hypo

SEQ ID NO: 176981 - DNA, 77 bp, Homo sapiens
  chr15:40405038-40405115
  hypo
actttatctgttatccgtctgtctgcaaaggatagttcctctcttctgagttgtagagagtgtgtgtttgtgcgcac

SEQ ID NO: 176982 - DNA, 76 bp, Homo sapiens
  chr15:40405234-40405310
  hypo
tgtgcgtgggtgtgtgtgtatgcgtgtgtgcgggtgcacacacacgtatggcgggggtgcgcgcacgtgtgtgtgt

SEQ ID NO: 176983 - DNA, 325 bp, Homo sapiens
  chr15:40423134-40423459
  hypo
aattatattaattatcgattgttaataataattattaatattattcctgatatccagggggtcgaggatgacattgcttcctatacctcagaacacgtacacccccatgtgatgttgttcctaataaccagggggtagaggatgacgttactccaaatatcgccgtgggtgtacatcccttctgcgatcttgttgctaatacccaggcggggagaagacgatattaatcccaatattgcagaaggtgtagacctcccctgatattcaggggaaagagcacgatattgctcccaatatcgcagtctgtgtacgcccactctgtgat

SEQ ID NO: 176984 - DNA, 183 bp, Homo sapiens; identical to SEQ ID NO: 88060
  chr15:40532012-40532195
  hypo

SEQ ID NO: 176985 - DNA, 135 bp, Homo sapiens; identical to SEQ ID NO: 28116
  chr15:40532790-40532925
  hypo

SEQ ID NO: 176986 - DNA, 31 bp, Homo sapiens; identical to SEQ ID NO: 88062
  chr15:40548271-40548302
  hypo

SEQ ID NO: 176987 - DNA, 31 bp, Homo sapiens; identical to SEQ ID NO: 88063
  chr15:40557125-40557156
  hypo

SEQ ID NO: 176988 - DNA, 86 bp, Homo sapiens; identical to SEQ ID NO: 88064
  chr15:40558265-40558351
  hypo

SEQ ID NO: 176989 - DNA, 58 bp, Homo sapiens; identical to SEQ ID NO: 51901
  chr15:40559554-40559612
  hypo

SEQ ID NO: 176990 - DNA, 30 bp, Homo sapiens; identical to SEQ ID NO: 125531
  chr15:40574858-40574888
  hypo

SEQ ID NO: 176991 - DNA, 30 bp, Homo sapiens; identical to SEQ ID NO: 125532
  chr15:40575087-40575117
  hypo

SEQ ID NO: 176992 - DNA, 377 bp, Homo sapiens; identical to SEQ ID NO: 125533
  chr15:40575341-40575718
  hypo

SEQ ID NO: 176993 - DNA, 30 bp, Homo sapiens; identical to SEQ ID NO: 28118
  chr15:40577310-40577340
  hypo

SEQ ID NO: 176994 - DNA, 30 bp, Homo sapiens; identical to SEQ ID NO: 88068
  chr15:40586481-40586511
  hypo

SEQ ID NO: 176995 - DNA, 560 bp, Homo sapiens; identical to SEQ ID NO: 88069
  chr15:40631662-40632222
  hypo

SEQ ID NO: 176996 - DNA, 30 bp, Homo sapiens
  chr15:40640069-40640099
  hypo
gcacacctggatgctcggcaccctggggga

SEQ ID NO: 176997 - DNA, 30 bp, Homo sapiens
  chr15:40640535-40640565
  hypo
tgtctgcccaagtggcgcctggctgtccca

SEQ ID NO: 176998 - DNA, 216 bp, Homo sapiens
  chr15:40645374-40645590
  hypo
agaaaggaaagactgcaatttagattacagtaaattaaaagttaccttttgaacacaggtattccctgctcttactccaaaaagatggacccaggtaagcactgtggctgagaggctgggaattggaagaagggagagagcaggagagcggtaaaggcagggactatcagtcagccataactagtgcgtgccaaaaatgtacgtgcgtgtgtgttt

SEQ ID NO: 176999 - DNA, 30 bp, Homo sapiens
  chr15:40645806-40645836
  hypo
tgggagctgtgccatcggcttccctcgaaa

SEQ ID NO: 177000 - DNA, 28 bp, Homo sapiens
  chr15:40676286-40676314
  hypo
tgaagtggccaggcacggtggctcacgc

SEQ ID NO: 177001 - DNA, 147 bp, Homo sapiens
  chr15:40676553-40676700
  hypo
gacagagcgagactccgtctcaaaaaaaaaaagattgagctctgaagtaaataggcttttctccaaaggcttaatgggttgtttgttgtcttgtgttgccgcagaacacctgaatggtaatcctggcaccagcggggactaggagtt

SEQ ID NO: 177002 - DNA, 30 bp, Homo sapiens
  chr15:40678602-40678632
  hypo
taggtccaaagaagtcgatgtttccaaaca

SEQ ID NO: 177003 - DNA, 30 bp, Homo sapiens
  chr15:40679134-40679164
  hypo
ggttgttagggtggtcggaggcatgcccct

SEQ ID NO: 177004 - DNA, 104 bp, Homo sapiens; identical to SEQ ID NO: 88071
  chr15:40701401-40701505
  hypo

SEQ ID NO: 177005 - DNA, 44 bp, Homo sapiens; identical to SEQ ID NO: 88072
  chr15:40701564-40701608
  hypo

SEQ ID NO: 177006 - DNA, 190 bp, Homo sapiens; identical to SEQ ID NO: 88073
  chr15:40716011-40716201
  hypo

SEQ ID NO: 177007 - DNA, 30 bp, Homo sapiens; identical to SEQ ID NO: 88074
  chr15:40722562-40722592
  hypo

SEQ ID NO: 177008 - DNA, 30 bp, Homo sapiens
  chr15:40749852-40749882
  hypo
cctcagaagccctgcgtttggggaggggat

SEQ ID NO: 177009 - DNA, 30 bp, Homo sapiens; identical to SEQ ID NO: 88075
  chr15:40750991-40751021
  hypo

SEQ ID NO: 177010 - DNA, 34 bp, Homo sapiens; identical to SEQ ID NO: 88076
  chr15:40766006-40766040
  hypo

SEQ ID NO: 177011 - DNA, 22 bp, Homo sapiens
  chr15:40780876-40780898
  hypo
aaacgttatgtttttcggccgg

SEQ ID NO: 177012 - DNA, 34 bp, Homo sapiens; identical to SEQ ID NO: 28120
  chr15:40782123-40782157
  hypo

SEQ ID NO: 177013 - DNA, 25 bp, Homo sapiens
  chr15:40843287-40843312
  hypo
aaaatccatcctggcagggcacggt

SEQ ID NO: 177014 - DNA, 21 bp, Homo sapiens
  chr15:40848757-40848778
  hypo
caggtgcagtggctcccgctt

SEQ ID NO: 177015 - DNA, 20 bp, Homo sapiens
  chr15:40849017-40849037
  hypo
cagagcgagattccatctca

SEQ ID NO: 177016 - DNA, 22 bp, Homo sapiens
  chr15:40850999-40851021
  hypo
tctttctttttttttttgagac

SEQ ID NO: 177017 - DNA, 32 bp, Homo sapiens; identical to SEQ ID NO: 88082
  chr15:40854468-40854500
  hypo

SEQ ID NO: 177018 - DNA, 46 bp, Homo sapiens; identical to SEQ ID NO: 88083
  chr15:40856289-40856335
  hypo

SEQ ID NO: 177019 - DNA, 29 bp, Homo sapiens
  chr15:40860277-40860306
  hypo
agattcttggccgggcgcggtggcttacg

SEQ ID NO: 177020 - DNA, 33 bp, Homo sapiens
  chr15:40933190-40933223
  hypo
gaagattgtgaggctcgtcgccaaaagattgaa

SEQ ID NO: 177021 - DNA, 31 bp, Homo sapiens; identical to SEQ ID NO: 88085
  chr15:41021280-41021311
  hypo

SEQ ID NO: 177022 - DNA, 22 bp, Homo sapiens
  chr15:41029269-41029291
  hypo
gaactcccgacttcaggtgatc

SEQ ID NO: 177023 - DNA, 30 bp, Homo sapiens; identical to SEQ ID NO: 88086
  chr15:41043696-41043726
  hypo

SEQ ID NO: 177024 - DNA, 70 bp, Homo sapiens; identical to SEQ ID NO: 28125
  chr15:41044230-41044300
  hypo

SEQ ID NO: 177025 - DNA, 57 bp, Homo sapiens; identical to SEQ ID NO: 10081
  chr15:41046992-41047049
  hypo

SEQ ID NO: 177026 - DNA, 17 bp, Homo sapiens
  chr15:41048730-41048747
  hypo
gagtttcgctcttttcg

SEQ ID NO: 177027 - DNA, 26 bp, Homo sapiens
  chr15:41055007-41055033
  hypo
tctagaaaaccaatcacaggccggat

SEQ ID NO: 177028 - DNA, 606 bp, Homo sapiens
  chr15:41059264-41059870
  hypo
ggaggaggcagggggcgtgcacttaccccagcgcccagcaagcagccagcaagtgtgagtcactacaagagtggccaggctgcctgctgcagacactagctttgtaccaggagcttgctgtgtgcccctcctcaccccccccatcctgtctctttgcagttatgaatactacgtcgatgaccctccccgcatagtcctggacaagctggaacgcaggggcttccgtgtgctgagcatgacgggggtgggccagacgctggtgtggtgtctgcacaaggagtgaccttctcatgctgatttgcagacggggcacccctgtggaggggctgctgtgggccctgacctccaagctcctgcctcaccgtctgccttgctcctctcttcccaaatcatcaccgccatgggcccagccccaaagggcagtgaatggccttctctgaaaccctgcgtcaagcagtgggagagggcagtgcccggtgccctggtgctcccagctgccctcctgcttcgggcctgggccgagggccttgtgtaggccatgttcctcgggcagctgccccgggccggagctgggcactccagcggccctggcgcgtggctcctgca

SEQ ID NO: 177029 - DNA, 30 bp, Homo sapiens
  chr15:41064485-41064515
  hypo
tgttggtggccccccgggactcgctaagag

SEQ ID NO: 177030 - DNA, 151 bp, Homo sapiens; identical to SEQ ID NO: 28129
  chr15:41082364-41082515
  hypo

SEQ ID NO: 177031 - DNA, 30 bp, Homo sapiens; identical to SEQ ID NO: 88092
  chr15:41082754-41082784
  hypo

SEQ ID NO: 177032 - DNA, 102 bp, Homo sapiens
  chr15:41091047-41091149
  hypo
aacagcgttaactcacgacttaatccttcattctggcagccgtggtgccccgccttgtgagtgtgtgtgtaagaatttggcgcttgctggctgggcgcggtg

SEQ ID NO: 177033 - DNA, 105 bp, Homo sapiens
  chr15:41120621-41120726
  hypo
tccatctccagccagcgctggagctggccccggtcatacttcactgtcaggcggctgggtctccgggacctgggtatcttggaggagtccgggtgggacttggac

SEQ ID NO: 177034 - DNA, 173 bp, Homo sapiens; identical to SEQ ID NO: 28131
  chr15:41121305-41121478
  hypo

SEQ ID NO: 177035 - DNA, 157 bp, Homo sapiens; identical to SEQ ID NO: 125559
  chr15:41136284-41136441
  hypo

SEQ ID NO: 177036 - DNA, 490 bp, Homo sapiens; identical to SEQ ID NO: 125560
  chr15:41136701-41137191
  hypo

SEQ ID NO: 177037 - DNA, 30 bp, Homo sapiens
  chr15:41164773-41164803
  hypo
acctcttttcctgctcgctctctcaatctc

SEQ ID NO: 177038 - DNA, 433 bp, Homo sapiens; identical to SEQ ID NO: 28133
  chr15:41165166-41165599
  hypo

SEQ ID NO: 177039 - DNA, 30 bp, Homo sapiens; identical to SEQ ID NO: 88098
  chr15:41191674-41191704
  hypo

SEQ ID NO: 177040 - DNA, 38 bp, Homo sapiens
  chr15:41235296-41235334
  hypo
gctcttgggaggggtcgcgtgtgcagtgtgcttactgg

SEQ ID NO: 177041 - DNA, 94 bp, Homo sapiens; identical to SEQ ID NO: 88099
  chr15:41253507-41253601
  hypo

SEQ ID NO: 177042 - DNA, 226 bp, Homo sapiens
  chr15:41276132-41276358
  hypo
ggttaagatcattacgaccccctgtgctcaccgcccatggccttgcacccagctaggaacatgcttcacagttgaggctgctttggcttctgagaaaccaacctgtcctcatttgtttttctccttacagacctcatgtgcaacctacttcaacaaggctggagaactccaggagaagcaaagactgcccagcagtgtgtccctgctacacggtcaggacactcct

SEQ ID NO: 177043 - DNA, 30 bp, Homo sapiens; identical to SEQ ID NO: 28134
  chr15:41304855-41304885
  hypo

SEQ ID NO: 177044 - DNA, 150 bp, Homo sapiens
  chr15:41316676-41316826
  hypo
tcctacaggagctaacccctttcttgcttcattaacctctgaaactacagtaccttcaggggctgcccccttaagcgttcagcgcgtccttcctgaggacacgtatgttcctgctctagctgaaggaagcgtaaccgctccaagcgctgc

SEQ ID NO: 177045 - DNA, 19 bp, Homo sapiens
  chr15:41425640-41425659
  hypo
gcagcaatcctgagacgct

SEQ ID NO: 177046 - DNA, 20 bp, Homo sapiens
  chr15:41522244-41522264
  hypo
tgagagtaggcactaattta

SEQ ID NO: 177047 - DNA, 34 bp, Homo sapiens; identical to SEQ ID NO: 28135
  chr15:41622888-41622922
  hypo

SEQ ID NO: 177048 - DNA, 30 bp, Homo sapiens; identical to SEQ ID NO: 88104
  chr15:41630412-41630442
  hypo

SEQ ID NO: 177049 - DNA, 21 bp, Homo sapiens
  chr15:41631142-41631163
  hypo
acagagcgagactctgtctcc

SEQ ID NO: 177050 - DNA, 30 bp, Homo sapiens; identical to SEQ ID NO: 88106
  chr15:41696047-41696077
  hypo

SEQ ID NO: 177051 - DNA, 92 bp, Homo sapiens; identical to SEQ ID NO: 28136
  chr15:41732306-41732398
  hypo

SEQ ID NO: 177052 - DNA, 119 bp, Homo sapiens; identical to SEQ ID NO: 88108
  chr15:41769413-41769532
  hypo

SEQ ID NO: 177053 - DNA, 216 bp, Homo sapiens
  chr15:41769811-41770027
  hypo
aacgtaggcacttaacgtatacacactctctctgtatgtccacgtacatcgatataatttattcataatgaaaagcagcagtcttctgccctgtcctacctcttcccacccttagattctactccacaggtatttgttttttctcaatttctgtttcttggttgtttcccccatatctactctggtattcttgaagggaaaaggataatatgccgg

SEQ ID NO: 177054 - DNA, 42 bp, Homo sapiens; identical to SEQ ID NO: 88110
  chr15:41840740-41840782
  hypo

SEQ ID NO: 177055 - DNA, 110 bp, Homo sapiens
  chr15:41842773-41842883
  hypo
tttcatactatgtgcagatcacgtagtatgtcactatgtgcagatcacaatgagtgggcagtcgtgctccgcctccatgtgggtggagcgcctacatacattatttggaa

SEQ ID NO: 177056 - DNA, 31 bp, Homo sapiens; identical to SEQ ID NO: 88111
  chr15:41862231-41862262
  hypo

SEQ ID NO: 177057 - DNA, 31 bp, Homo sapiens; identical to SEQ ID NO: 88112
  chr15:41872409-41872440
  hypo

SEQ ID NO: 177058 - DNA, 30 bp, Homo sapiens
  chr15:41935986-41936016
  hypo
gaagtctcactaagtcgcctccgcccgcct

SEQ ID NO: 177059 - DNA, 29 bp, Homo sapiens
  chr15:42076231-42076260
  hypo
acctctacgctactgctttggagaaaagc

SEQ ID NO: 177060 - DNA, 201 bp, Homo sapiens; identical to SEQ ID NO: 51933
  chr15:42112222-42112423
  hypo

SEQ ID NO: 177061 - DNA, 38 bp, Homo sapiens; identical to SEQ ID NO: 28138
  chr15:42117756-42117794
  hypo

SEQ ID NO: 177062 - DNA, 385 bp, Homo sapiens
  chr15:42122289-42122674
  hypo
catccccgaggcagccgactgcaccacccccaccctcacatggctgggcaggacctgctcctcagcccagaccctctgctgcagcctgaacctcgctccctgccacatcccagaagcctgcgagcaccctgccaaaggtgcaactgggacttgtagggacttgcacttgtgagtacaaaaatactcacacatgtgcacaaagaccctgctcctgcaaactggcttcttcactgtttccggaacacaggactactaggctcatttgtttggggtggtcagagctgccatgccatatgcaccttgcccgccgccgctgtggggaaaacgtgaagaggagaggcagctggggccacatgttccacagagctggcgggaactggggaca

SEQ ID NO: 177063 - DNA, 30 bp, Homo sapiens; identical to SEQ ID NO: 28139
  chr15:42129449-42129479
  hypo

SEQ ID NO: 177064 - DNA, 30 bp, Homo sapiens
  chr15:42131643-42131673
  hypo
ttggagggagctaccgggggaccatcttca

SEQ ID NO: 177065 - DNA, 30 bp, Homo sapiens
  chr15:42140135-42140165
  hypo
gtgcttcagagcctcgggctcaggtggcac

SEQ ID NO: 177066 - DNA, 244 bp, Homo sapiens
  chr15:42147779-42148023
  hypo
gctgtctgctgcagccgctcgatgcgtgggctgaacgcttccaggtctctcttggtggcctccagccgccgcagaagggcctgtgtggcttcagcactgtggcccatgtcctcgctgtccaggacatggccccgctcagccagccaggatcccgcctccaggagctgggggtgacagagtggagatccgttttcccggggcaccctccagggctcaggatttacagccacgattctcagcctgg

SEQ ID NO: 177067 - DNA, 31 bp, Homo sapiens; identical to SEQ ID NO: 88117
  chr15:42148468-42148499
  hypo

SEQ ID NO: 177068 - DNA, 121 bp, Homo sapiens
  chr15:42151062-42151183
  hypo
gcctccctctccaagcgaggcgaacctcctgggagtcctgcaggaaggcctgcagctgccggagctcctccaggcgatggcggcgggtcccggcttgcctgaagagcgcctccttcctgcc

SEQ ID NO: 177069 - DNA, 147 bp, Homo sapiens; identical to SEQ ID NO: 88118
  chr15:42153324-42153471
  hypo

SEQ ID NO: 177070 - DNA, 56 bp, Homo sapiens; identical to SEQ ID NO: 88119
  chr15:42160235-42160291
  hypo

SEQ ID NO: 177071 - DNA, 31 bp, Homo sapiens; identical to SEQ ID NO: 28142
  chr15:42160910-42160941
  hypo

SEQ ID NO: 177072 - DNA, 175 bp, Homo sapiens; identical to SEQ ID NO: 88121
  chr15:42162017-42162192
  hypo

SEQ ID NO: 177073 - DNA, 68 bp, Homo sapiens
  chr15:42162806-42162874
  hypo
gtcattcctccctcccgctaggtctggtcagcccgctcctctctgagttgtatcgggacttgcccaaa

SEQ ID NO: 177074 - DNA, 31 bp, Homo sapiens; identical to SEQ ID NO: 88122
  chr15:42166942-42166973
  hypo

SEQ ID NO: 177075 - DNA, 72 bp, Homo sapiens; identical to SEQ ID NO: 88123
  chr15:42167405-42167477
  hypo

SEQ ID NO: 177076 - DNA, 175 bp, Homo sapiens; identical to SEQ ID NO: 88124
  chr15:42171429-42171604
  hypo

SEQ ID NO: 177077 - DNA, 169 bp, Homo sapiens; identical to SEQ ID NO: 88125
  chr15:42185522-42185691
  hypo

SEQ ID NO: 177078 - DNA, 192 bp, Homo sapiens; identical to SEQ ID NO: 88126
  chr15:42192980-42193172
  hypo

SEQ ID NO: 177079 - DNA, 102 bp, Homo sapiens; identical to SEQ ID NO: 88127
  chr15:42211494-42211596
  hypo

SEQ ID NO: 177080 - DNA, 105 bp, Homo sapiens
  chr15:42232133-42232238
  hypo
ctaaacaggagatttagatgacgtttactcccctggaatgctatgtatttttttttttaaataaatagggatgaggtctcactatgttggccaagctggtctcta

SEQ ID NO: 177081 - DNA, 164 bp, Homo sapiens; identical to SEQ ID NO: 88128
  chr15:42232297-42232461
  hypo

SEQ ID NO: 177082 - DNA, 38 bp, Homo sapiens; identical to SEQ ID NO: 88129
  chr15:42280069-42280107
  hypo

SEQ ID NO: 177083 - DNA, 175 bp, Homo sapiens; identical to SEQ ID NO: 88130
  chr15:42284448-42284623
  hypo

SEQ ID NO: 177084 - DNA, 30 bp, Homo sapiens; identical to SEQ ID NO: 28145
  chr15:42289870-42289900
  hypo

SEQ ID NO: 177085 - DNA, 63 bp, Homo sapiens; identical to SEQ ID NO: 88132
  chr15:42302478-42302541
  hypo

SEQ ID NO: 177086 - DNA, 100 bp, Homo sapiens; identical to SEQ ID NO: 88133
  chr15:42350763-42350863
  hypo

SEQ ID NO: 177087 - DNA, 46 bp, Homo sapiens; identical to SEQ ID NO: 88134
  chr15:42362297-42362343
  hypo

SEQ ID NO: 177088 - DNA, 111 bp, Homo sapiens; identical to SEQ ID NO: 88135
  chr15:42362996-42363107
  hypo

SEQ ID NO: 177089 - DNA, 65 bp, Homo sapiens
  chr15:42363981-42364046
  hypo
gcagatccggggctccgggatcctcctcatcagccgtcccatgaagaactcggagccgaagagct

SEQ ID NO: 177090 - DNA, 31 bp, Homo sapiens; identical to SEQ ID NO: 88136
  chr15:42379547-42379578
  hypo

SEQ ID NO: 177091 - DNA, 30 bp, Homo sapiens; identical to SEQ ID NO: 28147
  chr15:42387272-42387302
  hypo

SEQ ID NO: 177092 - DNA, 45 bp, Homo sapiens; identical to SEQ ID NO: 88138
  chr15:42388223-42388268
  hypo

SEQ ID NO: 177093 - DNA, 30 bp, Homo sapiens
  chr15:42434025-42434055
  hypo
ctgcaagagctttccggggcctggggcacc

SEQ ID NO: 177094 - DNA, 193 bp, Homo sapiens; identical to SEQ ID NO: 88139
  chr15:42434609-42434802
  hypo

SEQ ID NO: 177095 - DNA, 184 bp, Homo sapiens
  chr15:42438904-42439088
  hypo
ccaggagcagccaggcggagtgagttatggcggaattggctgagaagtgggtgtggcgctgggcctcacttccaggtgtgggctgaaatcactttcaaaacatcctgagaacaactaaaatcactctctctggaaggggggccgaggcatgggtgtgtttgaaaagctgcgccggtgattctaa

SEQ ID NO: 177096 - DNA, 159 bp, Homo sapiens; identical to SEQ ID NO: 88140
  chr15:42446542-42446701
  hypo

SEQ ID NO: 177097 - DNA, 77 bp, Homo sapiens
  chr15:42446968-42447045
  hypo
aaagctccctgagagcgcgtgctgacttgtagccacagcgggcctcacactgtcacccagggcggcactcccaggca

SEQ ID NO: 177098 - DNA, 30 bp, Homo sapiens
  chr15:42447400-42447430
  hypo
ttgcactcacacactcgctcacacttgcac

SEQ ID NO: 177099 - DNA, 249 bp, Homo sapiens
  chr15:42447818-42448067
  hypo
gctagtgtgagcctggtccctcgccccattgttcccctcgtcccatcatggagcagcaacctggcatagggtcactgacgtctctgtgccggggagcagggagaccttggcgggtcccaggcattgggagttcagcaccttcgtgatgtgtctggaccctggaacccatccggtctgggttcaaatctaaatccagcacggactcactgaactaacgatggctgtcacgcaccacacacctgcagctcc

SEQ ID NO: 177100 - DNA, 194 bp, Homo sapiens
  chr15:42451756-42451950
  hypo
gctgttcttgccccccgcgtcccctctgctgtgcctaaacacctctcaggaacacttggcagcacgccattgtcagttccaggtccactcatcccctgcgtgttgccgggacccaccttcctgcgctatcccagcacaactctccaaccacaccattgctgaacaaagctggggagtgacggccagggcaggct

SEQ ID NO: 177101 - DNA, 120 bp, Homo sapiens; identical to SEQ ID NO: 88143
  chr15:42452408-42452528
  hypo

SEQ ID NO: 177102 - DNA, 30 bp, Homo sapiens; identical to SEQ ID NO: 88144
  chr15:42470144-42470174
  hypo

SEQ ID NO: 177103 - DNA, 58 bp, Homo sapiens; identical to SEQ ID NO: 88145
  chr15:42470688-42470746
  hypo

SEQ ID NO: 177104 - DNA, 121 bp, Homo sapiens; identical to SEQ ID NO: 28152
  chr15:42562565-42562686
  hypo

SEQ ID NO: 177105 - DNA, 194 bp, Homo sapiens
  chr15:42644702-42644896
  hypo
gccatgcagcattggcgctctggctgcagcagctgagttgctcaaggccagtgtccaagtggacagcagcctctggtactccccccagttatcttccacccacatggactgggcagagcagccctcttctgtgtgcactgcatacgctgcagccgtgggagttattctcccctagagatcgacttggcagcacg

SEQ ID NO: 177106 - DNA, 256 bp, Homo sapiens; identical to SEQ ID NO: 88147
  chr15:42684672-42684928
  hypo

SEQ ID NO: 177107 - DNA, 252 bp, Homo sapiens
  chr15:42686335-42686587
  hypo
ggcagaacaccctcgcgtaagagatttgccccccagccccgtcccagccctcagcaagacagaagattccctttccagagaggctgcagagcatgagagctctttctgtgtgcttaaggtcccgttcaaaggtgagaaagtgaagctggtgcggctgcggaatccgtggggccaggtggagtggaacggttcttggagtgataggtaggtgaggggaccccacgggattggcggtggcggggaacagggtcc

SEQ ID NO: 177108 - DNA, 69 bp, Homo sapiens; identical to SEQ ID NO: 88148
  chr15:42696331-42696400
  hypo

SEQ ID NO: 177109 - DNA, 30 bp, Homo sapiens
  chr15:42704337-42704367
  hypo
ctccatcaccttcacgctgtcccaccatgg

SEQ ID NO: 177110 - DNA, 181 bp, Homo sapiens; identical to SEQ ID NO: 88149
  chr15:42711708-42711889
  hypo

SEQ ID NO: 177111 - DNA, 31 bp, Homo sapiens; identical to SEQ ID NO: 28153
  chr15:42717196-42717227
  hypo

SEQ ID NO: 177112 - DNA, 70 bp, Homo sapiens; identical to SEQ ID NO: 88151
  chr15:42742088-42742158
  hypo

SEQ ID NO: 177113 - DNA, 138 bp, Homo sapiens; identical to SEQ ID NO: 88152
  chr15:42748434-42748572
  hypo

SEQ ID NO: 177114 - DNA, 241 bp, Homo sapiens; identical to SEQ ID NO: 88153
  chr15:42784384-42784625
  hypo

SEQ ID NO: 177115 - DNA, 30 bp, Homo sapiens; identical to SEQ ID NO: 88154
  chr15:42804855-42804885
  hypo

SEQ ID NO: 177116 - DNA, 41 bp, Homo sapiens; identical to SEQ ID NO: 88155
  chr15:42806616-42806657
  hypo

SEQ ID NO: 177117 - DNA, 121 bp, Homo sapiens
  chr15:42819325-42819446
  hypo
gtgcccggccttgatcgtttttttaaagaggaaactcttaaatgaaaaactcctacactacaggatttatgaatgaccgcttgtgtggtcaaggtacttatttgtccgctgattgtccaat

SEQ ID NO: 177118 - DNA, 92 bp, Homo sapiens
  chr15:43019853-43019945
  hypo
catggtgctcacaggcgcgggagcagcccctccgctccccccgggcagcaggttcaggaccctgggctcgaagtgtgcgactcactgctgct

SEQ ID NO: 177119 - DNA, 395 bp, Homo sapiens
  chr15:43020213-43020608
  hypo
ctctgcactgctcagaacctgcgaaacagaactacagagtcaggggctaggggagggctgggtgcaacaaaggatgccagagtcgagcactgaccccgcccccacacaccctcccgcagcctcagactactccgtgcacctccccacaactgcctggcctgctagctgcaggcctccctcacacgtacggctgccggggtctcctctggaagcagcgcccgcacagccccagggctcttcctttgacagaacctaaaaggggacagatggggtcagtgatctctgggtatttcagcctggctgcagaagtaaatgccccgagtgcaccaagcccctgacctgggaggctgtaccttggaaggaggcaccgtttgccctcccgccccaccccaggt

SEQ ID NO: 177120 - DNA, 30 bp, Homo sapiens; identical to SEQ ID NO: 88158
  chr15:43022814-43022844
  hypo

SEQ ID NO: 177121 - DNA, 30 bp, Homo sapiens; identical to SEQ ID NO: 88159
  chr15:43024899-43024929
  hypo

SEQ ID NO: 177122 - DNA, 34 bp, Homo sapiens; identical to SEQ ID NO: 88160
  chr15:43124801-43124835
  hypo

SEQ ID NO: 177123 - DNA, 93 bp, Homo sapiens; identical to SEQ ID NO: 88161
  chr15:43124894-43124987
  hypo

SEQ ID NO: 177124 - DNA, 27 bp, Homo sapiens
  chr15:43227492-43227519
  hypo
gtagtccatactttggccaggcgtggt

SEQ ID NO: 177125 - DNA, 193 bp, Homo sapiens; identical to SEQ ID NO: 88162
  chr15:43300432-43300625
  hypo

SEQ ID NO: 177126 - DNA, 31 bp, Homo sapiens; identical to SEQ ID NO: 10096
  chr15:43312163-43312194
  hypo

SEQ ID NO: 177127 - DNA, 27 bp, Homo sapiens
  chr15:43323932-43323959
  hypo
gatgacagccgggcgcggtggctcacg

SEQ ID NO: 177128 - DNA, 42 bp, Homo sapiens
  chr15:43406097-43406139
  hypo
acctagctgccaggccgggcccggtggctcacgcctgtaatc

SEQ ID NO: 177129 - DNA, 30 bp, Homo sapiens
  chr15:43427564-43427594
  hypo
ggacattggtggtctcgtgagcagttatgc

SEQ ID NO: 177130 - DNA, 105 bp, Homo sapiens; identical to SEQ ID NO: 28158
  chr15:43467794-43467899
  hypo

SEQ ID NO: 177131 - DNA, 30 bp, Homo sapiens
  chr15:43508509-43508539
  hypo
gcacggactggagcgcggaagtacaggatg

SEQ ID NO: 177132 - DNA, 30 bp, Homo sapiens
  chr15:43508757-43508787
  hypo
cttacgttttagctgcgcaatcccaggcaa

SEQ ID NO: 177133 - DNA, 20 bp, Homo sapiens
  chr15:43511836-43511856
  hypo
gtctctacagaataaaaaga

SEQ ID NO: 177134 - DNA, 207 bp, Homo sapiens; identical to SEQ ID NO: 88167
  chr15:43527645-43527852
  hypo

SEQ ID NO: 177135 - DNA, 209 bp, Homo sapiens
  chr15:43574741-43574950
  hypo
ccagaacctgccacccgttgtatcctggtgggagatctttccggatcatccagcactcattccagacgtggaagttcctgcaggagggagtaaggagacaaggattcatgttagctgaggttttgccaggtaccaggcactatacggagtgatttatatcattgtttctttttcttactttttattaggaagtaatttcatactaaaag

SEQ ID NO: 177136 - DNA, 31 bp, Homo sapiens; identical to SEQ ID NO: 10100
  chr15:43584165-43584196
  hypo

SEQ ID NO: 177137 - DNA, 97 bp, Homo sapiens
  chr15:43610150-43610247
  hypo
caggggcagagtcaacgctgccggtacggccagtctgaccagcagcacattctcagaggtacttccttcaagtgccatcttgactcttccagttagg

SEQ ID NO: 177138 - DNA, 152 bp, Homo sapiens; identical to SEQ ID NO: 88169
  chr15:43661820-43661972
  hypo

SEQ ID NO: 177139 - DNA, 347 bp, Homo sapiens
  chr15:43662590-43662937
  hypo
ctcccccagtatctccgcagtccttcccgaggccttctgcgtccgccccgccccctcgggctgcacaactcccaaagcccaccccaggcaaaaatcacgtccagaatctcgggtctttgttttccccgcgtagtagtagccgctcagcaaggattagggagctacctgtcggaaaacctcgcgcaaggagagaagctggttttggctccaaagcgaggaccatgggggcttggggagagtcacattgggcaggagagacggaatccgaggagcagtagtaacgggcttcctgaggacgggctcgggtgtcggccagaggctccaggtgctgccggttcgcggacgca

SEQ ID NO: 177140 - DNA, 30 bp, Homo sapiens
  chr15:43695957-43695987
  hypo
ggatgagcgtggagccgcccagctgagcat

SEQ ID NO: 177141 - DNA, 196 bp, Homo sapiens; identical to SEQ ID NO: 88170
  chr15:43820126-43820322
  hypo

SEQ ID NO: 177142 - DNA, 30 bp, Homo sapiens; identical to SEQ ID NO: 88171
  chr15:43940125-43940155
  hypo

SEQ ID NO: 177143 - DNA, 68 bp, Homo sapiens
  chr15:43941019-43941087
  hypo
agcccaggaccatgcggagcaacgctcgcccagccactcgccgcctaggccccgccccgccccgctct

SEQ ID NO: 177144 - DNA, 18 bp, Homo sapiens
  chr15:43942153-43942171
  hypo
ttctttaaaatgtcaata

SEQ ID NO: 177145 - DNA, 112 bp, Homo sapiens; identical to SEQ ID NO: 28161
  chr15:44037225-44037337
  hypo

SEQ ID NO: 177146 - DNA, 94 bp, Homo sapiens
  chr15:44037567-44037661
  hypo
aaagacattgagcagtcgaccaagtggccaggcatcttcactttgtgacggcactaccaattaaaagctcattaaaaaaaaaaaaaaaaaaaaa

SEQ ID NO: 177147 - DNA, 33 bp, Homo sapiens
  chr15:44037900-44037933
  hypo
cgcgccactgcactccagcgtgggggacagagc

SEQ ID NO: 177148 - DNA, 158 bp, Homo sapiens; identical to SEQ ID NO: 51955
  chr15:44038551-44038709
  hypo

SEQ ID NO: 177149 - DNA, 286 bp, Homo sapiens
  chr15:44091895-44092181
  hypo
tgagatatctgacctttctctcgacctaaacacctggggctggaaacatggcgggagagatttacagattatacctggggcaacgaaccagaacgacattagaggagaaaagaggcctgtcgtttttattggcttctgcacgtcttcctccccagcttcggccactctccccttcgcaccctctcacctgacagaagggacttttcactaggacactgctgcctccgctgtgctgctgtgccaggcccagggaggtgccggggctggggccggccttggcacccac

SEQ ID NO: 177150 - DNA, 251 bp, Homo sapiens
  chr15:44105317-44105568
  hypo
gctcttttttggtttcctcttcgacaatctggatagggagaacaattcagcttggacttccttactctcctcagacaaacctgattacactatttcttgtactcattccttgcaaccactccccagtaccttgagtgtgtacttgcgcctttcctcagccatgcgttttgcttcctgctccagctccttctgtttcaatgcttcggcttcacgttcttgaactgtcactcggtccttcctgcatcacagag

SEQ ID NO: 177151 - DNA, 30 bp, Homo sapiens
  chr15:44117338-44117368
  hypo
atttaggccagtgaccgaaaaaaaaaaaaa

SEQ ID NO: 177152 - DNA, 43 bp, Homo sapiens
  chr15:44117883-44117926
  hypo
aagtgctgggattacagaggtgagccaccgcacccggcctatt

SEQ ID NO: 177153 - DNA, 30 bp, Homo sapiens; identical to SEQ ID NO: 28162
  chr15:44121425-44121455
  hypo

SEQ ID NO: 177154 - DNA, 21 bp, Homo sapiens
  chr15:44142777-44142798
  hypo
ccaccgcgcccggccattttt

SEQ ID NO: 177155 - DNA, 30 bp, Homo sapiens
  chr15:44143354-44143384
  hypo
tctcacccgccaatccggcccacatactgt

SEQ ID NO: 177156 - DNA, 30 bp, Homo sapiens; identical to SEQ ID NO: 88181
  chr15:44171768-44171798
  hypo

SEQ ID NO: 177157 - DNA, 31 bp, Homo sapiens; identical to SEQ ID NO: 28163
  chr15:44191954-44191985
  hypo

SEQ ID NO: 177158 - DNA, 30 bp, Homo sapiens; identical to SEQ ID NO: 88183
  chr15:44204567-44204597
  hypo

SEQ ID NO: 177159 - DNA, 24 bp, Homo sapiens
  chr15:44319844-44319868
  hypo
ttttgtttttttttttttttccga

SEQ ID NO: 177160 - DNA, 42 bp, Homo sapiens; identical to SEQ ID NO: 88185
  chr15:44435787-44435829
  hypo

SEQ ID NO: 177161 - DNA, 927 bp, Homo sapiens; identical to SEQ ID NO: 10105
  chr15:44486763-44487690
  hypo

SEQ ID NO: 177162 - DNA, 34 bp, Homo sapiens; identical to SEQ ID NO: 88187
  chr15:44523584-44523618
  hypo

SEQ ID NO: 177163 - DNA, 38 bp, Homo sapiens; identical to SEQ ID NO: 88188
  chr15:44823849-44823887
  hypo

SEQ ID NO: 177164 - DNA, 21 bp, Homo sapiens
  chr15:44872692-44872713
  hypo
ctggccaggcacagaggctca

SEQ ID NO: 177165 - DNA, 18 bp, Homo sapiens
  chr15:45206207-45206225
  hypo
tggagtctcactctgtcg

SEQ ID NO: 177166 - DNA, 37 bp, Homo sapiens
  chr15:45274983-45275020
  hypo
ttacaggcgcgagccaacgcgccgggccggttgtgtc

SEQ ID NO: 177167 - DNA, 31 bp, Homo sapiens; identical to SEQ ID NO: 88192
  chr15:45387030-45387061
  hypo

SEQ ID NO: 177168 - DNA, 38 bp, Homo sapiens; identical to SEQ ID NO: 88193
  chr15:45391479-45391517
  hypo

SEQ ID NO: 177169 - DNA, 204 bp, Homo sapiens
  chr15:45397862-45398066
  hypo
aagatctccaggatgcgttcccgctgctgctttgtcacagccttcctaaatagctccttctcgctcatctcagccacatggaggcccagagcccagcgcacgcagaagtcccatagctgctgcacaaaggcgccccgttcctcttcagaactaaacagcagcacctgggtgggaggaaggcggcactgacgcagggagctcgct

SEQ ID NO: 177170 - DNA, 145 bp, Homo sapiens
  chr15:45436255-45436400
  hypo
ggagccctgccggcccgtgcttgtgtacctgcagcccgggcagatccgtgtggtagatggcaggctcaccgtgctccgcaccatccagctgcagcctccacagaaggtcaacttcgtcctgtccagcaaccgtggacgccgcact

SEQ ID NO: 177171 - DNA, 197 bp, Homo sapiens; identical to SEQ ID NO: 88194
  chr15:45439951-45440148
  hypo

SEQ ID NO: 177172 - DNA, 131 bp, Homo sapiens; identical to SEQ ID NO: 88195
  chr15:45440518-45440649
  hypo

SEQ ID NO: 177173 - DNA, 628 bp, Homo sapiens; identical to SEQ ID NO: 88196
  chr15:45444091-45444719
  hypo

SEQ ID NO: 177174 - DNA, 32 bp, Homo sapiens
  chr15:45450626-45450658
  hypo
ccgagtgcagtggctcgcacctgtaatcccag

SEQ ID NO: 177175 - DNA, 41 bp, Homo sapiens; identical to SEQ ID NO: 88197
  chr15:45465161-45465202
  hypo

SEQ ID NO: 177176 - DNA, 303 bp, Homo sapiens
  chr15:45471639-45471942
  hypo
actttggcccttcacttcctacgctgcccctttctcccacacaagtgggctcacggccactcctctatgcctgctgccattcatcgcacagtgaactgcaaaccacacactccgaagaggcactcaaggtgctcagggcggggcgcagctgaggacaatagaacctttctccaagctgggcttgggcttctcctgatggggcgctggctgaggcagagactgagcccggttcacccagggctgccagcaccccaggagcactgcaccactgggttgacaggcgatgacaggaggtggctccag

SEQ ID NO: 177177 - DNA, 263 bp, Homo sapiens; identical to SEQ ID NO: 10110
  chr15:45479774-45480037
  hypo

SEQ ID NO: 177178 - DNA, 30 bp, Homo sapiens
  chr15:45494705-45494735
  hypo
ctcgagagtgttctgcgcaaaatagaatgg

SEQ ID NO: 177179 - DNA, 650 bp, Homo sapiens; identical to SEQ ID NO: 10114
  chr15:45670188-45670838
  hypo

SEQ ID NO: 177180 - DNA, 117 bp, Homo sapiens; identical to SEQ ID NO: 10115
  chr15:45670932-45671049
  hypo

SEQ ID NO: 177181 - DNA, 23 bp, Homo sapiens
  chr15:45683594-45683617
  hypo
gcgagactgtatctcaaaaaaca

SEQ ID NO: 177182 - DNA, 515 bp, Homo sapiens; identical to SEQ ID NO: 10116
  chr15:45722444-45722959
  hypo

SEQ ID NO: 177183 - DNA, 30 bp, Homo sapiens; identical to SEQ ID NO: 88204
  chr15:45742300-45742330
  hypo

SEQ ID NO: 177184 - DNA, 57 bp, Homo sapiens
  chr15:45742669-45742726
  hypo
ttgggtacttaatccctcactcgagacctcagtgtcgtcttctgtaaactgaatgga

SEQ ID NO: 177185 - DNA, 62 bp, Homo sapiens
  chr15:45742969-45743031
  hypo
tgctgacccagcagagaggagcggagcagcctcagcgaggcggccctgggaaaagtgctagg

SEQ ID NO: 177186 - DNA, 121 bp, Homo sapiens
  chr15:45809768-45809889
  hypo
tcgaactcccgatccattcttcacataacagcagagtaatctttcaaaaaggtaaatcccatcttgttactctcctgcttaaaaccttatctggttggccaggcgcggtggctcacgcctg

SEQ ID NO: 177187 - DNA, 25 bp, Homo sapiens
  chr15:45811613-45811638
  hypo
tcagtagagacggggtttcaccatg

SEQ ID NO: 177188 - DNA, 30 bp, Homo sapiens
  chr15:45813894-45813924
  hypo
atacaatgaagataacgtccttaactttac

SEQ ID NO: 177189 - DNA, 140 bp, Homo sapiens
  chr15:45960771-45960911
  hypo
tggctttggggctgaagctcccggatgccagggcagggcctcttgactgcacgttacttcccttggctcctcagccagagccaagcactctcaggtcttggagtcctctctctccaactgcgattcgctcgggttgcttg

SEQ ID NO: 177190 - DNA, 31 bp, Homo sapiens; identical to SEQ ID NO: 88206
  chr15:47410608-47410639
  hypo

SEQ ID NO: 177191 - DNA, 36 bp, Homo sapiens
  chr15:48003205-48003241
  hypo
tgtaaaaatgtataggcgtggccgggcgcggtggct

SEQ ID NO: 177192 - DNA, 30 bp, Homo sapiens; identical to SEQ ID NO: 88207
  chr15:48054295-48054325
  hypo

SEQ ID NO: 177193 - DNA, 30 bp, Homo sapiens
  chr15:48351890-48351920
  hypo
tatgttgcctctcagcgcgtcaatgtggac

SEQ ID NO: 177194 - DNA, 30 bp, Homo sapiens; identical to SEQ ID NO: 59735
  chr15:48594809-48594839
  hypo

SEQ ID NO: 177195 - DNA, 175 bp, Homo sapiens
  chr15:48666257-48666432
  hypo
agctatctggacttgcgccatgcttgcttttcccccactacctccctcctcctccccatttctccccagacagattgtgaagtctctttgcttggtccactccctgcctgtctccaatcctctgattgcttcaccttcccccggctgccattatctgtcgcgacccaccctttcg

SEQ ID NO: 177196 - DNA, 195 bp, Homo sapiens
  chr15:48707763-48707958
  hypo
agccacacaggtaaccgccctcggtattggaacagccatagctgcagggggcctgcgcagagccacattcattgatgtcttggcatcctccactgaactgttcatactggaagccggcgggacacatgcacttgtagctccccagggtgttgtgacaggaggctcctccgcagatgtgagcgctgaggcattcgt

SEQ ID NO: 177197 - DNA, 1007 bp, Homo sapiens; identical to SEQ ID NO: 125681
  chr15:48936638-48937645
  hypo

SEQ ID NO: 177198 - DNA, 888 bp, Homo sapiens; identical to SEQ ID NO: 10126
  chr15:48937709-48938597
  hypo

SEQ ID NO: 177199 - DNA, 25 bp, Homo sapiens
  chr15:49084196-49084221
  hypo
actcttttttttgaaacggagtttc

SEQ ID NO: 177200 - DNA, 16 bp, Homo sapiens
  chr15:49156944-49156960
  hypo
ccaataccacttttaa

SEQ ID NO: 177201 - DNA, 30 bp, Homo sapiens
  chr15:49217939-49217969
  hypo
ggaggcttaagtcagcggcagtatgaaggt

SEQ ID NO: 177202 - DNA, 276 bp, Homo sapiens; identical to SEQ ID NO: 88213
  chr15:49268641-49268917
  hypo

SEQ ID NO: 177203 - DNA, 138 bp, Homo sapiens
  chr15:49411762-49411900
  hypo
tctagaggtctgctgcgtaacattgtgcctgtacttaacaatactctattgtacacttaaaaatctcatgtttagtgttcttactaccaccacaaccacccaaaaaaaggactttaaaaaaaaacctttaggtcgggc

SEQ ID NO: 177204 - DNA, 140 bp, Homo sapiens; identical to SEQ ID NO: 28176
  chr15:49658850-49658990
  hypo

SEQ ID NO: 177205 - DNA, 319 bp, Homo sapiens
  chr15:49698667-49698986
  hypo
tgcactgcaggcaggcgtgatcactcagggtgggggagggtctgctgttctccatgcttagcttcactcccacagcagcagctttggcgggagggtggggtgctggccggggtggggctggctagctggctaagtgccggccaaggctccaactgcaatgatggttagtggtggggagtgccgtgggggagcggagtgcacttctgacccagcagtggcagggcagggtgcatacacagagacgtgcacacacacacacactggcagggcaaggaaagcaaaacccacccatacgcatgtgtgccggtacatgtttggg

SEQ ID NO: 177206 - DNA, 30 bp, Homo sapiens
  chr15:49930186-49930216
  hypo
aagaaattttgttgccgatgtttgatagaa

SEQ ID NO: 177207 - DNA, 218 bp, Homo sapiens; identical to SEQ ID NO: 28178
  chr15:49997485-49997703
  hypo

SEQ ID NO: 177208 - DNA, 94 bp, Homo sapiens
  chr15:50158728-50158822
  hypo
agcatcattttacctcgtgatgtttcgcgagaactgccctgtggcaggaagtttgcacctgcctagttgccaagccaaccgcgggcatccccac

SEQ ID NO: 177209 - DNA, 30 bp, Homo sapiens; identical to SEQ ID NO: 125693
  chr15:50474530-50474560
  hypo

SEQ ID NO: 177210 - DNA, 367 bp, Homo sapiens; identical to SEQ ID NO: 125694
  chr15:50474765-50475132
  hypo

SEQ ID NO: 177211 - DNA, 31 bp, Homo sapiens; identical to SEQ ID NO: 88218
  chr15:50516711-50516742
  hypo

SEQ ID NO: 177212 - DNA, 17 bp, Homo sapiens
  chr15:50657055-50657072
  hypo
ctcggcctcccaaagtg

SEQ ID NO: 177213 - DNA, 31 bp, Homo sapiens; identical to SEQ ID NO: 28180
  chr15:50709664-50709695
  hypo

SEQ ID NO: 177214 - DNA, 30 bp, Homo sapiens; identical to SEQ ID NO: 28181
  chr15:50793954-50793984
  hypo

SEQ ID NO: 177215 - DNA, 24 bp, Homo sapiens
  chr15:50798860-50798884
  hypo
aaatatccagttctagccaggcgc

SEQ ID NO: 177216 - DNA, 30 bp, Homo sapiens; identical to SEQ ID NO: 28183
  chr15:50834686-50834716
  hypo

SEQ ID NO: 177217 - DNA, 30 bp, Homo sapiens
  chr15:50906338-50906368
  hypo
ctattatatattaatcgaaaacgtttccta

SEQ ID NO: 177218 - DNA, 23 bp, Homo sapiens
  chr15:50928670-50928693
  hypo
agccagcacgcccagcccattct

SEQ ID NO: 177219 - DNA, 38 bp, Homo sapiens; identical to SEQ ID NO: 28184
  chr15:51016479-51016517
  hypo

SEQ ID NO: 177220 - DNA, 32 bp, Homo sapiens
  chr15:51059306-51059338
  hypo
gcatgagccaccgcacccggcctgtccagtca

SEQ ID NO: 177221 - DNA, 30 bp, Homo sapiens
  chr15:51101184-51101214
  hypo
ttcaacaaatgtaaacgatgtctttgtgcc

SEQ ID NO: 177222 - DNA, 20 bp, Homo sapiens
  chr15:51146751-51146771
  hypo
gccaccgtgcccggcctgct

SEQ ID NO: 177223 - DNA, 59 bp, Homo sapiens
  chr15:51176887-51176946
  hypo
tgaagttttgattctcgttagtatattagtacagggctgggcgcggtggagtatagcct

SEQ ID NO: 177224 - DNA, 121 bp, Homo sapiens
  chr15:51182344-51182465
  hypo
ctagattgggtgaaagagcaagactccgtctcagaaaaaaaagtggaatagttttcaacctaattgtacacattagggaactagaaaaagaagagcagtccaggcgcggtggctcacgcct

SEQ ID NO: 177225 - DNA, 85 bp, Homo sapiens; identical to SEQ ID NO: 28186
  chr15:51202496-51202581
  hypo

SEQ ID NO: 177226 - DNA, 31 bp, Homo sapiens; identical to SEQ ID NO: 88228
  chr15:51350224-51350255
  hypo

SEQ ID NO: 177227 - DNA, 30 bp, Homo sapiens
  chr15:51471318-51471348
  hypo
tcttgtttatgtacacgttggctctagcgt

SEQ ID NO: 177228 - DNA, 186 bp, Homo sapiens
  chr15:51476313-51476499
  hypo
gcttccttagcctctgagtttcggccccgacgttggcacatccagctgtgtgcatacctcgctgcccagctcctgcacctcctcccagctaagtcgggaaggcccagcctggtgaggacactcggtatgaaacagagatggctttgctgtggtcttaacctcctttctcctcggatagcctcgact

SEQ ID NO: 177229 - DNA, 300 bp, Homo sapiens; identical to SEQ ID NO: 52015
  chr15:51633850-51634150
  hypo

SEQ ID NO: 177230 - DNA, 154 bp, Homo sapiens; identical to SEQ ID NO: 52016
  chr15:51634174-51634328
  hypo

SEQ ID NO: 177231 - DNA, 198 bp, Homo sapiens
  chr15:51659606-51659804
  hypo
ctgccgtagcccttgcgtgcaagagggctggccagggcttgtgggtggacttcaaaccaacacttggtaattatttgtttaagattttattagagaatcagggcaatgatggaggcggagcgggaaggagcactgctagaggttccacccagtctccaccaattcagtgcagctttgcagactcgattcagcaaaaca

SEQ ID NO: 177232 - DNA, 30 bp, Homo sapiens
  chr15:51660635-51660665
  hypo
cttgccccccaggccgctgatgtgggatgg

SEQ ID NO: 177233 - DNA, 31 bp, Homo sapiens; identical to SEQ ID NO: 52017
  chr15:51812127-51812158
  hypo

SEQ ID NO: 177234 - DNA, 23 bp, Homo sapiens
  chr15:51946188-51946211
  hypo
ctttcctggccaggtgcggtggc

SEQ ID NO: 177235 - DNA, 19 bp, Homo sapiens
  chr15:51949284-51949303
  hypo
acttcgtgtcaaaataagt

SEQ ID NO: 177236 - DNA, 90 bp, Homo sapiens; identical to SEQ ID NO: 88235
  chr15:52000704-52000794
  hypo

SEQ ID NO: 177237 - DNA, 30 bp, Homo sapiens; identical to SEQ ID NO: 28189
  chr15:52001033-52001063
  hypo

SEQ ID NO: 177238 - DNA, 42 bp, Homo sapiens
  chr15:52089409-52089451
  hypo
gtgaaggtctggaggcgcctctgtttccgcactgcttctgtc

SEQ ID NO: 177239 - DNA, 30 bp, Homo sapiens
  chr15:52111100-52111130
  hypo
catccttgagaaatacgggctacgtaacag

SEQ ID NO: 177240 - DNA, 30 bp, Homo sapiens
  chr15:52216951-52216981
  hypo
tataaagagacgggacgtccagaatgagat

SEQ ID NO: 177241 - DNA, 90 bp, Homo sapiens
  chr15:52276807-52276897
  hypo
atatttaaatatgcagtaaatgtctaggaggatgtgtacagtgatgcgctagtaaaagcttaacaaccagttctccgggggggaagaaaa

SEQ ID NO: 177242 - DNA, 30 bp, Homo sapiens
  chr15:52283689-52283719
  hypo
acttttattacataacgcgacaaatgtatt

SEQ ID NO: 177243 - DNA, 30 bp, Homo sapiens
  chr15:52283924-52283954
  hypo
gaagtgtgacttgaacgatatgtaggtcaa

SEQ ID NO: 177244 - DNA, 30 bp, Homo sapiens
  chr15:52297090-52297120
  hypo
gattttcccttctgtcgctctgaggctgag

SEQ ID NO: 177245 - DNA, 96 bp, Homo sapiens
  chr15:52310148-52310244
  hypo
ctggtactcagctgacgttgttttaaatattaaaaaatataaagcattcaagctcaccccaaccacttaacttcattactctgtgatttttttttt

SEQ ID NO: 177246 - DNA, 17 bp, Homo sapiens
  chr15:52318481-52318498
  hypo
ttgttttgttgttgtcg

SEQ ID NO: 177247 - DNA, 24 bp, Homo sapiens
  chr15:52324098-52324122
  hypo
aataattttttttttttgaggcgg

SEQ ID NO: 177248 - DNA, 73 bp, Homo sapiens
  chr15:52387469-52387542
  hypo
tcactgcctgactgccgccatcatgggtcgcatgcatgctcctgggaagggcccgtcccggttggctttgccc

SEQ ID NO: 177249 - DNA, 181 bp, Homo sapiens; identical to SEQ ID NO: 10133
  chr15:52404391-52404572
  hypo

SEQ ID NO: 177250 - DNA, 31 bp, Homo sapiens; identical to SEQ ID NO: 88240
  chr15:52405140-52405171
  hypo

SEQ ID NO: 177251 - DNA, 30 bp, Homo sapiens; identical to SEQ ID NO: 88241
  chr15:52405410-52405440
  hypo

SEQ ID NO: 177252 - DNA, 31 bp, Homo sapiens; identical to SEQ ID NO: 28192
  chr15:52426276-52426307
  hypo

SEQ ID NO: 177253 - DNA, 30 bp, Homo sapiens
  chr15:52427919-52427949
  hypo
gggcacatgtgccatcgccgctcgctgtca

SEQ ID NO: 177254 - DNA, 24 bp, Homo sapiens
  chr15:52544672-52544696
  hypo
actaaaaatacaaaaattggccgg

SEQ ID NO: 177255 - DNA, 23 bp, Homo sapiens
  chr15:52544995-52545018
  hypo
ccgaaaccttattaatcctcact

SEQ ID NO: 177256 - DNA, 37 bp, Homo sapiens; identical to SEQ ID NO: 88245
  chr15:52579877-52579914
  hypo

SEQ ID NO: 177257 - DNA, 36 bp, Homo sapiens; identical to SEQ ID NO: 88246
  chr15:52580153-52580189
  hypo

SEQ ID NO: 177258 - DNA, 829 bp, Homo sapiens; identical to SEQ ID NO: 125721
  chr15:52587420-52588249
  hypo

SEQ ID NO: 177259 - DNA, 224 bp, Homo sapiens
  chr15:52611440-52611664
  hypo
aggtgccctcatcggcgatactggaggttcgctttctcaaccctgtgggcttcaccccagacacgccctgaatcgtttcatgttccagcatgcctgagactgcaggagtatttcaattgttagaggagatgatgtggaagggaacctttcatgtgcacatatccatgtgcacaaacacatgcacattcaacttaggaaaattagctgggcacggtggctcacat

SEQ ID NO: 177260 - DNA, 606 bp, Homo sapiens; identical to SEQ ID NO: 125722
  chr15:52820414-52821020
  hypo

SEQ ID NO: 177261 - DNA, 30 bp, Homo sapiens
  chr15:52885884-52885914
  hypo
aaccatcaacaatgccgagaggatcgaaac

SEQ ID NO: 177262 - DNA, 33 bp, Homo sapiens; identical to SEQ ID NO: 28194
  chr15:52967805-52967838
  hypo

SEQ ID NO: 177263 - DNA, 32 bp, Homo sapiens
  chr15:52968137-52968169
  hypo
aacttagtgttaagtacggttatctaattatc

SEQ ID NO: 177264 - DNA, 26 bp, Homo sapiens
  chr15:53976374-53976400
  hypo
tctactgtttttaagaattgccggag

SEQ ID NO: 177265 - DNA, 19 bp, Homo sapiens
  chr15:54032741-54032760
  hypo
ctccgcctcccaaagtgct

SEQ ID NO: 177266 - DNA, 97 bp, Homo sapiens; identical to SEQ ID NO: 88252
  chr15:54191739-54191836
  hypo

SEQ ID NO: 177267 - DNA, 45 bp, Homo sapiens; identical to SEQ ID NO: 88253
  chr15:55074344-55074389
  hypo

SEQ ID NO: 177268 - DNA, 34 bp, Homo sapiens; identical to SEQ ID NO: 88254
  chr15:55313740-55313774
  hypo

SEQ ID NO: 177269 - DNA, 31 bp, Homo sapiens; identical to SEQ ID NO: 28195
  chr15:55508246-55508277
  hypo

SEQ ID NO: 177270 - DNA, 30 bp, Homo sapiens; identical to SEQ ID NO: 28196
  chr15:55545630-55545660
  hypo

SEQ ID NO: 177271 - DNA, 26 bp, Homo sapiens
  chr15:55594209-55594235
  hypo
accaaaaatagaacaattagccgacc

SEQ ID NO: 177272 - DNA, 91 bp, Homo sapiens; identical to SEQ ID NO: 88258
  chr15:55699074-55699165
  hypo

SEQ ID NO: 177273 - DNA, 30 bp, Homo sapiens
  chr15:55699404-55699434
  hypo
aacaagagcgaaaccctctctcaaaaaaaa

SEQ ID NO: 177274 - DNA, 90 bp, Homo sapiens; identical to SEQ ID NO: 10158
  chr15:55699899-55699989
  hypo

SEQ ID NO: 177275 - DNA, 31 bp, Homo sapiens; identical to SEQ ID NO: 88260
  chr15:55723598-55723629
  hypo

SEQ ID NO: 177276 - DNA, 35 bp, Homo sapiens
  chr15:55777914-55777949
  hypo
aagcgcagtggctcacgcctgtaatcccagcactt

SEQ ID NO: 177277 - DNA, 162 bp, Homo sapiens; identical to SEQ ID NO: 28198
  chr15:55806738-55806900
  hypo

SEQ ID NO: 177278 - DNA, 961 bp, Homo sapiens; identical to SEQ ID NO: 10159
  chr15:55879821-55880782
  hypo

SEQ ID NO: 177279 - DNA, 220 bp, Homo sapiens; identical to SEQ ID NO: 52061
  chr15:55880890-55881110
  hypo

SEQ ID NO: 177280 - DNA, 38 bp, Homo sapiens
  chr15:55881584-55881622
  hypo
acagacaggagtctcgtccttccggagacagacaccca

SEQ ID NO: 177281 - DNA, 36 bp, Homo sapiens
  chr15:55893170-55893206
  hypo
gattacaggcgtgagctaccgcgcccggcctccacg

SEQ ID NO: 177282 - DNA, 115 bp, Homo sapiens
  chr15:55965686-55965801
  hypo
caaaaggtactcatgcgtggtccccgggagctccagaacttggattgaattctcagtacttaggcggaaagacaagcgatacagcaccacttggccccgccgatatttggctggg

SEQ ID NO: 177283 - DNA, 323 bp, Homo sapiens; identical to SEQ ID NO: 125764
  chr15:56034399-56034722
  hypo

SEQ ID NO: 177284 - DNA, 374 bp, Homo sapiens; identical to SEQ ID NO: 10162
  chr15:56034885-56035259
  hypo

SEQ ID NO: 177285 - DNA, 284 bp, Homo sapiens; identical to SEQ ID NO: 52064
  chr15:56035304-56035588
  hypo

SEQ ID NO: 177286 - DNA, 82 bp, Homo sapiens; identical to SEQ ID NO: 125767
  chr15:56035677-56035759
  hypo

SEQ ID NO: 177287 - DNA, 43 bp, Homo sapiens; identical to SEQ ID NO: 88268
  chr15:56105142-56105185
  hypo

SEQ ID NO: 177288 - DNA, 26 bp, Homo sapiens
  chr15:56133124-56133150
  hypo
caaagttttgtttgttcgtttgtttt

SEQ ID NO: 177289 - DNA, 31 bp, Homo sapiens; identical to SEQ ID NO: 88270
  chr15:56137949-56137980
  hypo

SEQ ID NO: 177290 - DNA, 185 bp, Homo sapiens; identical to SEQ ID NO: 88271
  chr15:56140360-56140545
  hypo

SEQ ID NO: 177291 - DNA, 88 bp, Homo sapiens
  chr15:56170929-56171017
  hypo
acaactagtagaattactcagcgatgaaatgaaatgaacggatatacaaaataacatatataaatctcaaagaaaagtggtttttttg

SEQ ID NO: 177292 - DNA, 30 bp, Homo sapiens; identical to SEQ ID NO: 88272
  chr15:56201481-56201511
  hypo

SEQ ID NO: 177293 - DNA, 31 bp, Homo sapiens; identical to SEQ ID NO: 88273
  chr15:56220529-56220560
  hypo

SEQ ID NO: 177294 - DNA, 505 bp, Homo sapiens; identical to SEQ ID NO: 125768
  chr15:56285863-56286368
  hypo

SEQ ID NO: 177295 - DNA, 104 bp, Homo sapiens
  chr15:56363528-56363632
  hypo
gttatcgtccttgcccgcgccctcctggagcgagcagttctccaagcacccagcatccagccagacacgctgcacaccgacggaggggacgtgggcagagcagt

SEQ ID NO: 177296 - DNA, 31 bp, Homo sapiens; identical to SEQ ID NO: 88275
  chr15:56510268-56510299
  hypo

SEQ ID NO: 177297 - DNA, 90 bp, Homo sapiens
  chr15:57179144-57179234
  hypo
gtccgttagggaagccgggacggtgggagagccacagatactctttctcctacggaacccttggacctcttgccccgtttccctgtcact

SEQ ID NO: 177298 - DNA, 36 bp, Homo sapiens
  chr15:57204847-57204883
  hypo
gccattacaagcacatgagtccggcactccttcctt

SEQ ID NO: 177299 - DNA, 37 bp, Homo sapiens; identical to SEQ ID NO: 88276
  chr15:57209352-57209389
  hypo

SEQ ID NO: 177300 - DNA, 341 bp, Homo sapiens; identical to SEQ ID NO: 125776
  chr15:57210211-57210552
  hypo

SEQ ID NO: 177301 - DNA, 30 bp, Homo sapiens
  chr15:57490089-57490119
  hypo
ctacaagggtacattcgattgatgcgagtg

SEQ ID NO: 177302 - DNA, 75 bp, Homo sapiens
  chr15:57565297-57565372
  hypo
aacaatgccagagaacgcttacgcgtgcgggatattaatgaagcattcaaagagcttggccgaatgtgtcagctt

SEQ ID NO: 177303 - DNA, 30 bp, Homo sapiens
  chr15:57578796-57578826
  hypo
cattaaagcggttcacgtgcagagaacaaa

SEQ ID NO: 177304 - DNA, 392 bp, Homo sapiens; identical to SEQ ID NO: 125778
  chr15:57598788-57599180
  hypo

SEQ ID NO: 177305 - DNA, 295 bp, Homo sapiens
  chr15:57611510-57611805
  hypo
cacgcggtcagcacgcggagcacaggtggggagaagcggctgacggtggcgtggccccgcgtacctgggtgtggacgccccgccgccccgcaggggaaagctcctggagtctggggtctgctgccccgagctctgggtgtccaggtaggaaacaggtagagagtatccgggtttcctacccctccgccggggtggctgtgcctccccatcctcctgctcccctccttccctccctccgcaggggagggcaaacccaacccccaggtgagggtctgttctgcgggagtgggaaaca

SEQ ID NO: 177306 - DNA, 30 bp, Homo sapiens
  chr15:57612085-57612115
  hypo
aggcgcacccccagacggtgggaaagcgcc

SEQ ID NO: 177307 - DNA, 30 bp, Homo sapiens
  chr15:57612330-57612360
  hypo
tggcaggagcagtggcgggtggtgtgggaa

SEQ ID NO: 177308 - DNA, 146 bp, Homo sapiens
  chr15:57614725-57614871
  hypo
gccttcacctgaatgcgattgcaattcgctagcccttcaattcaacaaatattctggaatgattagcgtgtgctgtgacaatgacaaattccgatacgggaagacatgaattaaatgatcacgttcacccacgcgtgattagaaac

SEQ ID NO: 177309 - DNA, 30 bp, Homo sapiens; identical to SEQ ID NO: 88280
  chr15:57617666-57617696
  hypo

SEQ ID NO: 177310 - DNA, 256 bp, Homo sapiens; identical to SEQ ID NO: 88281
  chr15:57618464-57618720
  hypo

SEQ ID NO: 177311 - DNA, 258 bp, Homo sapiens
  chr15:57620371-57620629
  hypo
ctcaacaaataaggtcgctgggaagaagtgctggcattaaatttaccgttaacgccagggtcaatttactaaacagtcatcgacgtgtggttccacaagacctctgggtaaattccagaaactgactgggaggaagatagcttgcgcatgaagtcactgaatcctggtcagtgtgactcttgatgatcatctctcagtacaccagaaagcatttccaaagacaggacgccacttggcgtggaaagcctttggaagcta

SEQ ID NO: 177312 - DNA, 31 bp, Homo sapiens; identical to SEQ ID NO: 28208
  chr15:57625821-57625852
  hypo

SEQ ID NO: 177313 - DNA, 185 bp, Homo sapiens; identical to SEQ ID NO: 88284
  chr15:57731149-57731334
  hypo

SEQ ID NO: 177314 - DNA, 31 bp, Homo sapiens; identical to SEQ ID NO: 88285
  chr15:57763916-57763947
  hypo

SEQ ID NO: 177315 - DNA, 130 bp, Homo sapiens; identical to SEQ ID NO: 28209
  chr15:57792922-57793052
  hypo

SEQ ID NO: 177316 - DNA, 30 bp, Homo sapiens
  chr15:57900415-57900445
  hypo
aggtgtttaatattgcggggatgccacgat

SEQ ID NO: 177317 - DNA, 31 bp, Homo sapiens; identical to SEQ ID NO: 28210
  chr15:57905026-57905057
  hypo

SEQ ID NO: 177318 - DNA, 157 bp, Homo sapiens; identical to SEQ ID NO: 88288
  chr15:57923146-57923303
  hypo

SEQ ID NO: 177319 - DNA, 22 bp, Homo sapiens
  chr15:57990321-57990343
  hypo
cgaaagaaaaaaaaatgcaaag

SEQ ID NO: 177320 - DNA, 393 bp, Homo sapiens
  chr15:57993254-57993647
  hypo
atttaaagtatacagcgcaataagttttttttaattttctctttttatctctagaagtaagttttgacttatcaaatgattacacccatataaccatcaccgcaattaaggtattgagcatccccgtcactcccaaatgtttcctcctgcccctttgtcatccttcctcccagcctctccctgacaccccacaacatccgataatcactgatctgctttctatcactatagatgcgttcgtattttttacaattttatataaatggagtcatacggtgtgtaattttttcctggcctctttctcagtatactcgagattcatcagagttgttgcatgtaccagagtattcgatcatatgcacagactacaacgtgtttatccacttacctact

SEQ ID NO: 177321 - DNA, 227 bp, Homo sapiens
  chr15:58001324-58001551
  hypo
gtgtttcaagtcaagcggaagatacttccagcagctttgacaacctgtttattgacaggttacagaggatcaccattgcggaccaaggtgaacaacagtcagaagaaaacgcaagtactaagaacttgacaggcctttccagtgggactgagaagaaacctcattacatggaagtgctagaaatgcgagccaaaaacccagtgccccagctgcgtaaatttaaaacc

SEQ ID NO: 177322 - DNA, 30 bp, Homo sapiens
  chr15:58027708-58027738
  hypo
gctcagcttggcagccgcagctaaggacac

SEQ ID NO: 177323 - DNA, 111 bp, Homo sapiens
  chr15:58028017-58028128
  hypo
aaccgtgatgaattgcgtatattacctcccgagagcctaaacgctcacatgttaaaagttagcatctgcggcaggtagtccttaatatttatgatccgctctggcattgag

SEQ ID NO: 177324 - DNA, 20 bp, Homo sapiens
  chr15:58357799-58357819
  hypo
cggggtcggccttcacctcg

SEQ ID NO: 177325 - DNA, 24 bp, Homo sapiens
  chr15:58504154-58504178
  hypo
caccacagccggcccaggctagct

SEQ ID NO: 177326 - DNA, 30 bp, Homo sapiens
  chr15:58532651-58532681
  hypo
ttagggcactcactgcgcgcacacagcaca

SEQ ID NO: 177327 - DNA, 31 bp, Homo sapiens; identical to SEQ ID NO: 88293
  chr15:58652177-58652208
  hypo

SEQ ID NO: 177328 - DNA, 167 bp, Homo sapiens
  chr15:58761930-58762097
  hypo
gaccctaccctctactaaaaacgtggcccagtggattccagttactaacaaagctcgttgagaagatgcaagaaaggaatggaacaatggctaggacctccccgcggcagcacttcccccaagagaatagaggagctgatgggcacgtcacatttttctcaatgctg

SEQ ID NO: 177329 - DNA, 155 bp, Homo sapiens; identical to SEQ ID NO: 28213
  chr15:58839521-58839676
  hypo

SEQ ID NO: 177330 - DNA, 30 bp, Homo sapiens
  chr15:58840581-58840611
  hypo
gactccttgctgcacgccggcacgcagagc

SEQ ID NO: 177331 - DNA, 32 bp, Homo sapiens; identical to SEQ ID NO: 88295
  chr15:58896582-58896614
  hypo

SEQ ID NO: 177332 - DNA, 30 bp, Homo sapiens
  chr15:58936772-58936802
  hypo
aatccaatcctacaacgtcacacgtccatt

SEQ ID NO: 177333 - DNA, 30 bp, Homo sapiens
  chr15:58937118-58937148
  hypo
ctacaaggagataaacgatgataaacccaa

SEQ ID NO: 177334 - DNA, 30 bp, Homo sapiens; identical to SEQ ID NO: 88296
  chr15:59026708-59026738
  hypo

SEQ ID NO: 177335 - DNA, 28 bp, Homo sapiens
  chr15:59066351-59066379
  hypo
agtgtttgggttcccactgtgcgtgagg

SEQ ID NO: 177336 - DNA, 92 bp, Homo sapiens; identical to SEQ ID NO: 88298
  chr15:59158445-59158537
  hypo

SEQ ID NO: 177337 - DNA, 38 bp, Homo sapiens; identical to SEQ ID NO: 88299
  chr15:59158759-59158797
  hypo

SEQ ID NO: 177338 - DNA, 214 bp, Homo sapiens
  chr15:59243450-59243664
  hypo
gtatgattgaactagtctggacggaagggcttgtctaggctaggttcaaagattggtgagaatgatcacgtaagtgattccttattcacgaccgaacctgtacgaaagcagtgaacaaaatatttacacgaccaaagatatgaataaatgtggttccccaaagcctacctttattcttcatggtggtacacccaaaggccgacagtctgagatg

SEQ ID NO: 177339 - DNA, 28 bp, Homo sapiens
  chr15:59278989-59279017
  hypo
aggcgtgagccaccgtgcccggccaaaa

SEQ ID NO: 177340 - DNA, 41 bp, Homo sapiens; identical to SEQ ID NO: 88301
  chr15:59291803-59291844
  hypo

SEQ ID NO: 177341 - DNA, 62 bp, Homo sapiens
  chr15:59450929-59450991
  hypo
tgagcaggttcactaatgctgcggatcaacggggttggcatgaagcccgttctggcactgac

SEQ ID NO: 177342 - DNA, 85 bp, Homo sapiens; identical to SEQ ID NO: 88302
  chr15:59454859-59454944
  hypo

SEQ ID NO: 177343 - DNA, 30 bp, Homo sapiens; identical to SEQ ID NO: 88303
  chr15:59463865-59463895
  hypo

SEQ ID NO: 177344 - DNA, 117 bp, Homo sapiens; identical to SEQ ID NO: 88304
  chr15:59474905-59475022
  hypo

SEQ ID NO: 177345 - DNA, 31 bp, Homo sapiens; identical to SEQ ID NO: 88305
  chr15:59490728-59490759
  hypo

SEQ ID NO: 177346 - DNA, 75 bp, Homo sapiens
  chr15:59499024-59499099
  hypo
gcacgcgcacctgccgtagagtgctgaaggtcctgccaacggctctcttggcgtctcaacgttcggatcagcagc

SEQ ID NO: 177347 - DNA, 31 bp, Homo sapiens; identical to SEQ ID NO: 88307
  chr15:59524090-59524121
  hypo

SEQ ID NO: 177348 - DNA, 35 bp, Homo sapiens; identical to SEQ ID NO: 88308
  chr15:59525451-59525486
  hypo

SEQ ID NO: 177349 - DNA, 20 bp, Homo sapiens
  chr15:59533606-59533626
  hypo
ttggctgggtgcagtggctc

SEQ ID NO: 177350 - DNA, 103 bp, Homo sapiens; identical to SEQ ID NO: 88310
  chr15:59561664-59561767
  hypo

SEQ ID NO: 177351 - DNA, 87 bp, Homo sapiens; identical to SEQ ID NO: 28217
  chr15:59580023-59580110
  hypo

SEQ ID NO: 177352 - DNA, 30 bp, Homo sapiens; identical to SEQ ID NO: 88312
  chr15:59621554-59621584
  hypo

SEQ ID NO: 177353 - DNA, 18 bp, Homo sapiens
  chr15:59639313-59639331
  hypo
tggcctgtcaggaaccgg

SEQ ID NO: 177354 - DNA, 77 bp, Homo sapiens
  chr15:59639390-59639467
  hypo
tgtaagatcaaagcagcactagattcccatagaagcacaaagcccattgtgaaccgaatatacgcaggatccaggct

SEQ ID NO: 177355 - DNA, 112 bp, Homo sapiens
  chr15:59648542-59648654
  hypo
ccaacgaaaatgaaaggcttgcgacattcaaatcacagggtgctttcacctattcattcactcctgttcattctatcagctgagtacccacgagcagcagttttttggagta

SEQ ID NO: 177356 - DNA, 133 bp, Homo sapiens; identical to SEQ ID NO: 125797
  chr15:59663972-59664105
  hypo

SEQ ID NO: 177357 - DNA, 513 bp, Homo sapiens; identical to SEQ ID NO: 125798
  chr15:59664434-59664947
  hypo

SEQ ID NO: 177358 - DNA, 31 bp, Homo sapiens; identical to SEQ ID NO: 88316
  chr15:59679645-59679676
  hypo

SEQ ID NO: 177359 - DNA, 165 bp, Homo sapiens; identical to SEQ ID NO: 28220
  chr15:59685906-59686071
  hypo

SEQ ID NO: 177360 - DNA, 30 bp, Homo sapiens
  chr15:59838389-59838419
  hypo
aaacaggcatgctttcgacatgccctcctg

SEQ ID NO: 177361 - DNA, 30 bp, Homo sapiens
  chr15:59838942-59838972
  hypo
ggggtccccagccctcgggtcgcagatcag

SEQ ID NO: 177362 - DNA, 31 bp, Homo sapiens; identical to SEQ ID NO: 28221
  chr15:59847661-59847692
  hypo

SEQ ID NO: 177363 - DNA, 87 bp, Homo sapiens; identical to SEQ ID NO: 88319
  chr15:59906438-59906525
  hypo

SEQ ID NO: 177364 - DNA, 30 bp, Homo sapiens; identical to SEQ ID NO: 10177
  chr15:59915561-59915591
  hypo

SEQ ID NO: 177365 - DNA, 21 bp, Homo sapiens
  chr15:59950342-59950363
  hypo
aaactccgtctcaaaaaaaaa

SEQ ID NO: 177366 - DNA, 46 bp, Homo sapiens; identical to SEQ ID NO: 88322
  chr15:59989016-59989062
  hypo

SEQ ID NO: 177367 - DNA, 145 bp, Homo sapiens; identical to SEQ ID NO: 52095
  chr15:60288753-60288898
  hypo

SEQ ID NO: 177368 - DNA, 438 bp, Homo sapiens; identical to SEQ ID NO: 52096
  chr15:60289224-60289662
  hypo

SEQ ID NO: 177369 - DNA, 17 bp, Homo sapiens
  chr15:60315278-60315295
  hypo
gggcgtggtggctcacg

SEQ ID NO: 177370 - DNA, 23 bp, Homo sapiens
  chr15:60668302-60668325
  hypo
gcagtggctcacacccgtaatcc

SEQ ID NO: 177371 - DNA, 155 bp, Homo sapiens; identical to SEQ ID NO: 88325
  chr15:60672389-60672544
  hypo

SEQ ID NO: 177372 - DNA, 93 bp, Homo sapiens
  chr15:60680000-60680093
  hypo
acagtggaagctatgcgtatgtgggaacaggggaacatgggcattctttgtattttctattcaactttgccatgaacctaaaactttcctaaa

SEQ ID NO: 177373 - DNA, 79 bp, Homo sapiens; identical to SEQ ID NO: 125814
  chr15:60690264-60690343
  hypo

SEQ ID NO: 177374 - DNA, 36 bp, Homo sapiens; identical to SEQ ID NO: 88327
  chr15:60694277-60694313
  hypo

SEQ ID NO: 177375 - DNA, 29 bp, Homo sapiens
  chr15:60701626-60701655
  hypo
gttaagaaggtacagacaggccgggcgcg

SEQ ID NO: 177376 - DNA, 24 bp, Homo sapiens
  chr15:60705309-60705333
  hypo
gtgagccaccgcgcccggccaata

SEQ ID NO: 177377 - DNA, 30 bp, Homo sapiens
  chr15:60705806-60705836
  hypo
cactgtgacttcacacgctcccccacccca

SEQ ID NO: 177378 - DNA, 30 bp, Homo sapiens; identical to SEQ ID NO: 88329
  chr15:60735294-60735324
  hypo

SEQ ID NO: 177379 - DNA, 30 bp, Homo sapiens
  chr15:60797841-60797871
  hypo
gggagatcacaaacacgaaaagcgaagttc

SEQ ID NO: 177380 - DNA, 197 bp, Homo sapiens
  chr15:60865561-60865758
  hypo
aagaggcagagcggccgcacagaaacccaaatcataacacagaagagacctttgccgcatccaaaaagcttttttatctcttgaaataattaagggaaaggaagatactgagaatatctgattgtttctcgtgtttcttcatgtgccttaaaaatatctggcagcctccctccgtggcctcccggcaccttcagtag

SEQ ID NO: 177381 - DNA, 1569 bp, Homo sapiens; identical to SEQ ID NO: 125817
  chr15:60883784-60885353
  hypo

SEQ ID NO: 177382 - DNA, 30 bp, Homo sapiens
  chr15:61012243-61012273
  hypo
taaaatagaaagaggcggcattttgaagac

SEQ ID NO: 177383 - DNA, 53 bp, Homo sapiens
  chr15:61012491-61012544
  hypo
acaagatgtagtcctcgccctgacggcaagacggcatgcgagagtcctatttg

SEQ ID NO: 177384 - DNA, 227 bp, Homo sapiens
  chr15:61231723-61231950
  hypo
tcatttaccactatgcgacctggagcaataatatattatgcctttcgccagagggagccgtgccagcctcagcacagggcggccgtgtcggccatcagtcaccactccccttcacaaccttttgttccccgctcattatggtgaattataacagggggacagcacatttttcaggagagtttctcctgttaagtctgagagctaactcttcccgggttgttccaagt

SEQ ID NO: 177385 - DNA, 31 bp, Homo sapiens; identical to SEQ ID NO: 88331
  chr15:61711645-61711676
  hypo

SEQ ID NO: 177386 - DNA, 31 bp, Homo sapiens; identical to SEQ ID NO: 88332
  chr15:61726879-61726910
  hypo

SEQ ID NO: 177387 - DNA, 273 bp, Homo sapiens
  chr15:61931836-61932109
  hypo
ggtcccagatgtaatcggatctgccggagactgacaggattcaagaggcagccactcctcatggcgctggctcacctgtgaggcacgaggcaagaataagacagaacattatttcttagcaagtctgggcagccgatcatttccgaaaacttggagagcaagccgggagtcagcctgtgctgtaacgttccattttactaacctttttatccaatttgaaaatacaaatagagctctcagggtgtaattagcggcaatgactcttaatacctg

SEQ ID NO: 177388 - DNA, 94 bp, Homo sapiens
  chr15:61948807-61948901
  hypo
tctcctctgttcatccgcccactgccgtgccgaaggcatcagcgggtaacttcagactttatgctcaagagaagaaaagcgccaagttcaagcg

SEQ ID NO: 177389 - DNA, 30 bp, Homo sapiens
  chr15:62016076-62016106
  hypo
agtagacaatgccagcgcacgatgggctcg

SEQ ID NO: 177390 - DNA, 20 bp, Homo sapiens
  chr15:62347426-62347446
  hypo
ctcaaccttttttttttgag

SEQ ID NO: 177391 - DNA, 28 bp, Homo sapiens
  chr15:62361490-62361518
  hypo
gttataataggctaggtgtggcggctca

SEQ ID NO: 177392 - DNA, 27 bp, Homo sapiens
  chr15:62361757-62361784
  hypo
gcaaccggagtgagaccctgtctgcaa

SEQ ID NO: 177393 - DNA, 201 bp, Homo sapiens
  chr15:62367507-62367708
  hypo
tagaaactgtacgttcgaatttcgatgtaatgtaatcatcattatcttggtataagatattcagaaaatatgcgggtccattaaagaaacctggaacatcaagatttttaaatattcagcgatgattccacagctttagtgttcagtaagagttactgtgtttctttccaaaactcattaatttagccatttaaaaccaat

SEQ ID NO: 177394 - DNA, 827 bp, Homo sapiens; identical to SEQ ID NO: 125826
  chr15:62456138-62456965
  hypo

SEQ ID NO: 177395 - DNA, 559 bp, Homo sapiens; identical to SEQ ID NO: 125827
  chr15:62457008-62457567
  hypo

SEQ ID NO: 177396 - DNA, 17 bp, Homo sapiens
  chr15:62511781-62511798
  hypo
aacacccaagaatgatc

SEQ ID NO: 177397 - DNA, 73 bp, Homo sapiens
  chr15:62591900-62591973
  hypo
ggcccccagggatcccgctctgtcctcgcacacgcgcacacacgaagagcaaatgaagcggatccaaggagtg

SEQ ID NO: 177398 - DNA, 30 bp, Homo sapiens; identical to SEQ ID NO: 28228
  chr15:62635671-62635701
  hypo

SEQ ID NO: 177399 - DNA, 30 bp, Homo sapiens
  chr15:62667747-62667777
  hypo
gcatggtaaagtcagcgctaacccgcccca

SEQ ID NO: 177400 - DNA, 17 bp, Homo sapiens
  chr15:62681566-62681583
  hypo
gtattgggatggaaata

SEQ ID NO: 177401 - DNA, 31 bp, Homo sapiens; identical to SEQ ID NO: 88342
  chr15:62702852-62702883
  hypo

SEQ ID NO: 177402 - DNA, 30 bp, Homo sapiens
  chr15:62736802-62736832
  hypo
tggttcttcaccgcacggtcctgactcact

SEQ ID NO: 177403 - DNA, 30 bp, Homo sapiens
  chr15:62742526-62742556
  hypo
gtgtatccgagtcaccgtgtttgtagaaag

SEQ ID NO: 177404 - DNA, 30 bp, Homo sapiens
  chr15:62744157-62744187
  hypo
gtgtgtgtgtgtgtacgtgttgatattctt

SEQ ID NO: 177405 - DNA, 236 bp, Homo sapiens
  chr15:62747447-62747683
  hypo
ccaggtgaggagagaggtgctcgatggaggggacgtgatggggaactcaggaaggggttcctggaggtgcacttcagccgcgccttcagcaatctgcagaatgtcaaaaagccagtgggagagggtgttcgggatgggagagactgaataaaccaagacaaaaagatggtacagcgcagtaggagtcagatagcacaggggttggttaaagactggggcaccgcaatgtatgggga

SEQ ID NO: 177406 - DNA, 218 bp, Homo sapiens
  chr15:62750294-62750512
  hypo
ttttgtatgagtcaacggtagagcctttattgctggtggctctcagcgccacctctgcagtggtgtgggcatctcgttggtgggagtgagggcttatgtagcgatgaccagtggggacaaggcttactcttgtgcccaggccttttttccagtgtctctccatgctaagggtcaggcggggtcactcctccacccctgctgcccgccgcctctccctg

SEQ ID NO: 177407 - DNA, 46 bp, Homo sapiens; identical to SEQ ID NO: 88344
  chr15:62752749-62752795
  hypo

SEQ ID NO: 177408 - DNA, 42 bp, Homo sapiens; identical to SEQ ID NO: 88345
  chr15:62753413-62753455
  hypo

SEQ ID NO: 177409 - DNA, 526 bp, Homo sapiens; identical to SEQ ID NO: 88346
  chr15:62753661-62754187
  hypo

SEQ ID NO: 177410 - DNA, 100 bp, Homo sapiens; identical to SEQ ID NO: 28230
  chr15:62776551-62776651
  hypo

SEQ ID NO: 177411 - DNA, 39 bp, Homo sapiens; identical to SEQ ID NO: 28231
  chr15:62776890-62776929
  hypo

SEQ ID NO: 177412 - DNA, 153 bp, Homo sapiens
  chr15:62779385-62779538
  hypo
tgtgaatctcttctcttctgtcgttgacttactgggttgattccgtgtggtcaacttgcgtgatgtgtacataccaggctagtcagacctgccctggctgctcattcaccgattatgagattccttgtagacgtgattctgagaactcaggag

SEQ ID NO: 177413 - DNA, 33 bp, Homo sapiens; identical to SEQ ID NO: 28232
  chr15:62791805-62791838
  hypo

SEQ ID NO: 177414 - DNA, 181 bp, Homo sapiens
  chr15:62792077-62792258
  hypo
aggcataagccaccgctcctggctgcaaagtttcaaagtttctttaaaaacaagcaaagaaacaaacaaacaaacaaaaaaaacagtcaaaattacaattcaggtgagggaggaggagtgaaggtccaaaacagatggtgggcgttggtggttttctcttgtttaaaatgaatgtaggcca

SEQ ID NO: 177415 - DNA, 181 bp, Homo sapiens; identical to SEQ ID NO: 28234
  chr15:62799428-62799609
  hypo

SEQ ID NO: 177416 - DNA, 77 bp, Homo sapiens
  chr15:62810500-62810577
  hypo
gctgggattataggcgtgagccaccaccagcacatttctttatagttatttgtgtcggaggcaggaaggagccacac

SEQ ID NO: 177417 - DNA, 82 bp, Homo sapiens
  chr15:62821543-62821625
  hypo
tggccttgtgttggtattacacgtgtgagccactgcgcccagcctttttagggcttttatcgtctactgtaaagtaactatt

SEQ ID NO: 177418 - DNA, 74 bp, Homo sapiens; identical to SEQ ID NO: 28235
  chr15:62828094-62828168
  hypo

SEQ ID NO: 177419 - DNA, 88 bp, Homo sapiens; identical to SEQ ID NO: 88353
  chr15:62832518-62832606
  hypo

SEQ ID NO: 177420 - DNA, 94 bp, Homo sapiens
  chr15:62863459-62863553
  hypo
tgcccatcactcctgcgagtcagtccaacttacttcatgtcatctggggggacggtgccaaactgtaatgtcaaggtgacgtgctctttgggtg

SEQ ID NO: 177421 - DNA, 41 bp, Homo sapiens; identical to SEQ ID NO: 28236
  chr15:62880085-62880126
  hypo

SEQ ID NO: 177422 - DNA, 30 bp, Homo sapiens; identical to SEQ ID NO: 28237
  chr15:62884053-62884083
  hypo

SEQ ID NO: 177423 - DNA, 30 bp, Homo sapiens
  chr15:62894018-62894048
  hypo
tatttctttttttagcgtaatttaattgat

SEQ ID NO: 177424 - DNA, 31 bp, Homo sapiens; identical to SEQ ID NO: 88356
  chr15:62896942-62896973
  hypo

SEQ ID NO: 177425 - DNA, 53 bp, Homo sapiens; identical to SEQ ID NO: 28238
  chr15:62898022-62898075
  hypo

SEQ ID NO: 177426 - DNA, 19 bp, Homo sapiens
  chr15:62898583-62898602
  hypo
ctggccccaaaagatattt

SEQ ID NO: 177427 - DNA, 31 bp, Homo sapiens; identical to SEQ ID NO: 28239
  chr15:62930017-62930048
  hypo

SEQ ID NO: 177428 - DNA, 30 bp, Homo sapiens; identical to SEQ ID NO: 28240
  chr15:62937894-62937924
  hypo

SEQ ID NO: 177429 - DNA, 30 bp, Homo sapiens; identical to SEQ ID NO: 88361
  chr15:62938319-62938349
  hypo

SEQ ID NO: 177430 - DNA, 30 bp, Homo sapiens
  chr15:62939587-62939617
  hypo
gtgtacgatgcgtgtcgagtcattcgggaa

SEQ ID NO: 177431 - DNA, 98 bp, Homo sapiens; identical to SEQ ID NO: 28241
  chr15:62959084-62959182
  hypo

SEQ ID NO: 177432 - DNA, 30 bp, Homo sapiens
  chr15:62960841-62960871
  hypo
ccacggatgagacggcgtgtgtgctgtgac

SEQ ID NO: 177433 - DNA, 89 bp, Homo sapiens
  chr15:62966653-62966742
  hypo
gtttctgagtactatcgtgcacaggcgtgtatttaccctattctatggaaaacgatattttttttttttttgagacagagccaagacgg

SEQ ID NO: 177434 - DNA, 66 bp, Homo sapiens; identical to SEQ ID NO: 88363
  chr15:62967378-62967444
  hypo

SEQ ID NO: 177435 - DNA, 185 bp, Homo sapiens; identical to SEQ ID NO: 88364
  chr15:62968123-62968308
  hypo

SEQ ID NO: 177436 - DNA, 31 bp, Homo sapiens; identical to SEQ ID NO: 28243
  chr15:62970008-62970039
  hypo

SEQ ID NO: 177437 - DNA, 162 bp, Homo sapiens; identical to SEQ ID NO: 88366
  chr15:62978881-62979043
  hypo

SEQ ID NO: 177438 - DNA, 30 bp, Homo sapiens; identical to SEQ ID NO: 88367
  chr15:62990455-62990485
  hypo

SEQ ID NO: 177439 - DNA, 347 bp, Homo sapiens; identical to SEQ ID NO: 88368
  chr15:62993096-62993443
  hypo

SEQ ID NO: 177440 - DNA, 264 bp, Homo sapiens; identical to SEQ ID NO: 28245
  chr15:63000748-63001012
  hypo

SEQ ID NO: 177441 - DNA, 185 bp, Homo sapiens; identical to SEQ ID NO: 88370
  chr15:63012432-63012617
  hypo

SEQ ID NO: 177442 - DNA, 142 bp, Homo sapiens; identical to SEQ ID NO: 88371
  chr15:63017544-63017686
  hypo

SEQ ID NO: 177443 - DNA, 27 bp, Homo sapiens
  chr15:63022558-63022585
  hypo
tattttcatctccgcaatacagtctca

SEQ ID NO: 177444 - DNA, 31 bp, Homo sapiens; identical to SEQ ID NO: 88373
  chr15:63024967-63024998
  hypo

SEQ ID NO: 177445 - DNA, 162 bp, Homo sapiens
  chr15:63028500-63028662
  hypo
agagactctgtctcaaaaaaaaaaaaaaaacagtaaaagtagtctaaggtaatagacgttagaatggtgattacttctggtatgaagggagcattgactggcacaactgatggtggatatgtggctgtatccatatgtaccaattcacggagctgcacatgt

SEQ ID NO: 177446 - DNA, 245 bp, Homo sapiens
  chr15:63029114-63029359
  hypo
ctggcccaggccgcccgtggagtggctgcatcgacaaccgaccccgcggccgcccatgccatgttagattctgctcgagacgtgatggagggctccgccatgctcattcaagaggccaagcaggccctgattgcacctggagatgcagagcgtcaacaaagactggctcaggtgaggctaggaatgagaaattgtggttgtcatggtcatcattaacgtggacatgtggtcgggctgtctcctgg

SEQ ID NO: 177447 - DNA, 319 bp, Homo sapiens
  chr15:63030465-63030784
  hypo
gcagaaggatgtggacgtggccttgaagagcatcggggagtccagcaagaagctgcttgtggattcggtgagaggttcttagattgagaaaggacactgggggactaggctcgcgttaggtgtgagtgaagtcttcttctctccatgagatctctgagcagctaacccttcctttaggagtcctgtttttcccgccagtctttgttttccatgttttgctgtctgatcaacaaagttcccaggtggagcttttaaagtttactttttctttgagcccatgttgccatttcctctcggatcgtcccggtgagacaggcaa

SEQ ID NO: 177448 - DNA, 73 bp, Homo sapiens
  chr15:63036389-63036462
  hypo
gctttcattttcttccggctccctgcgagtccctacatacctctggtcccttgctcagcgatccatcatgccc

SEQ ID NO: 177449 - DNA, 21 bp, Homo sapiens
  chr15:63037029-63037050
  hypo
tcaccgcgcctggcctagatt

SEQ ID NO: 177450 - DNA, 94 bp, Homo sapiens; identical to SEQ ID NO: 28248
  chr15:63059822-63059916
  hypo

SEQ ID NO: 177451 - DNA, 30 bp, Homo sapiens; identical to SEQ ID NO: 28249
  chr15:63060247-63060277
  hypo

SEQ ID NO: 177452 - DNA, 128 bp, Homo sapiens; identical to SEQ ID NO: 28250
  chr15:63060545-63060673
  hypo

SEQ ID NO: 177453 - DNA, 83 bp, Homo sapiens
  chr15:63062563-63062646
  hypo
ggaaagaggcctgtgcggaggcagtggttcctgtcgggataagctttttttgttctcccaagttgggcgaatcataaacagag

SEQ ID NO: 177454 - DNA, 102 bp, Homo sapiens
  chr15:63063188-63063290
  hypo
gcccttgatcttagccgcagttggtgtggcctccaagattcttgatcatcagcagcagatgacggtgctggaccagaccaagactctcgcagagtctgcctt

SEQ ID NO: 177455 - DNA, 195 bp, Homo sapiens; identical to SEQ ID NO: 28252
  chr15:63066064-63066259
  hypo

SEQ ID NO: 177456 - DNA, 347 bp, Homo sapiens; identical to SEQ ID NO: 88381
  chr15:63068832-63069179
  hypo

SEQ ID NO: 177457 - DNA, 21 bp, Homo sapiens
  chr15:63069713-63069734
  hypo
aacgagcgaaactctcaaaaa

SEQ ID NO: 177458 - DNA, 142 bp, Homo sapiens
  chr15:63072878-63073020
  hypo
ggatagccatggactcgaccattcctcaggaagtgcttcctgatggagagtctgcctcctttcccacctcatcttctggcactttgcgcttccctagaagtgtcaggctggctcccgcctccatgtacgtgaattctgttcc

SEQ ID NO: 177459 - DNA, 404 bp, Homo sapiens
  chr15:63075602-63076006
  hypo
tgaccccccagggctgcgctggcgaggggctggcacactcacctgccagagggtgggccctgggcactggctccaagctgcacagcccgaacgctgagcatgtgcccactgggcccggccagaatctgtggcctgagcggggccctgcgagggctctggccttttgtgtgcaatgcagcatgggcttggcttgaattgccctctccagcatctagccccaaatgcaaggcctggccttcaccccctcaggagcttaaaagtgaatgaaaccctttggcttccagtgatattaacacatggttctcatgcgtttctctctgtgtgtgtgtgtgtgtgtgtgtgtgtcttgcttgttttctttttccagatgactaagtcggttactaacccggaggagttgggag

SEQ ID NO: 177460 - DNA, 31 bp, Homo sapiens; identical to SEQ ID NO: 28255
  chr15:63077574-63077605
  hypo

SEQ ID NO: 177461 - DNA, 30 bp, Homo sapiens
  chr15:63080826-63080856
  hypo
acagtcgctagtatgcgagccactttaaat

SEQ ID NO: 177462 - DNA, 157 bp, Homo sapiens
  chr15:63084826-63084983
  hypo
cttgcctctgcagatcggattccagattcgcactcgtgtgcaggacctgggccacggctgtatcttcctggtgcagaaggcaggggccctccaggtctgccccacagacagctacaccaagagggagctgatcgaatgcgcccgtgccgtcacggaa

SEQ ID NO: 177463 - DNA, 655 bp, Homo sapiens
  chr15:63086975-63087630
  hypo
tctgctgagatctcagcagcacgggggacagagtgtctcatactccatgcctcttgctggcacggtaacacagtgactcccctgccctggtcagcatgtttgaagaaatctacctacgaaacgttgtcagattcttctttgggtcgtagtcaagggtagtgggtgtgtgcacgcagaggttaatacaaagactcaaagagcctccagccactagcctgacacatgcgatttacattgggtgcattgggccatcctgagggcaagaacggtgtgctgtggcgtcccgggaggcagggctgtctctggaagaggagagcagggggaggtgtccggggctcagctgttttgcaggctgcttgaggcacaggatgatacatccgtgcttggtggcttttccttcttccttcactttggcatctgacggggcaactagttcggtggctgcgggagaggggcaggagtcgttgcaggcagagcgcagacccagggtggagaggtgggagtgtttgggaaagtcaggagctggcgggtgtggtgagagccaggtgaagcggacacatgaccagaaacggagctcagccaggggagatttgtaagcagggtgttagtgtggtcaggtttatgtcataggaaagtacctcggagcagtgagggt

SEQ ID NO: 177464 - DNA, 264 bp, Homo sapiens; identical to SEQ ID NO: 88387
  chr15:63088320-63088584
  hypo

SEQ ID NO: 177465 - DNA, 771 bp, Homo sapiens; identical to SEQ ID NO: 88388
  chr15:63089566-63090337
  hypo

SEQ ID NO: 177466 - DNA, 151 bp, Homo sapiens
  chr15:63091222-63091373
  hypo
atacgttgtcacatctgagatcccagtttatcttcaaagcaatttaatgaggtagatggggctagcaagctaatttcactgtggatgaggacccagagccacgcacacaggcatggcgcagtgtggaggttaagaccgtggccctcatgct

SEQ ID NO: 177467 - DNA, 182 bp, Homo sapiens
  chr15:63092760-63092942
  hypo
cttgctcatagcatgcgatccagaagtaaaaggagtaggggctggacctgagtcactgcactatctgtattcattctcccttcctatgcaggtgatggtgaccaatgtcacctcgctcctcaagactgtaaaggcagtggaggatgaggccacccggggcaccagggcgcttgaggccacaa

SEQ ID NO: 177468 - DNA, 94 bp, Homo sapiens; identical to SEQ ID NO: 88389
  chr15:63100844-63100938
  hypo

SEQ ID NO: 177469 - DNA, 30 bp, Homo sapiens
  chr15:63102159-63102189
  hypo
agaaccagagccttgcgtttcgggacggag

SEQ ID NO: 177470 - DNA, 30 bp, Homo sapiens
  chr15:63102410-63102440
  hypo
aaagtgcggtctggacgaagttgcagttag

SEQ ID NO: 177471 - DNA, 30 bp, Homo sapiens; identical to SEQ ID NO: 88390
  chr15:63105189-63105219
  hypo

SEQ ID NO: 177472 - DNA, 65 bp, Homo sapiens; identical to SEQ ID NO: 88391
  chr15:63111786-63111851
  hypo

SEQ ID NO: 177473 - DNA, 171 bp, Homo sapiens; identical to SEQ ID NO: 88392
  chr15:63115971-63116142
  hypo

SEQ ID NO: 177474 - DNA, 25 bp, Homo sapiens
  chr15:63118207-63118232
  hypo
gagtgagactcggtctcaaaaacat

SEQ ID NO: 177475 - DNA, 173 bp, Homo sapiens; identical to SEQ ID NO: 28262
  chr15:63129978-63130151
  hypo

SEQ ID NO: 177476 - DNA, 212 bp, Homo sapiens; identical to SEQ ID NO: 52116
  chr15:63130455-63130667
  hypo

SEQ ID NO: 177477 - DNA, 30 bp, Homo sapiens; identical to SEQ ID NO: 88396
  chr15:63131849-63131879
  hypo

SEQ ID NO: 177478 - DNA, 1054 bp, Homo sapiens; identical to SEQ ID NO: 88397
  chr15:63132462-63133516
  hypo

SEQ ID NO: 177479 - DNA, 31 bp, Homo sapiens; identical to SEQ ID NO: 88398
  chr15:63148262-63148293
  hypo

SEQ ID NO: 177480 - DNA, 267 bp, Homo sapiens; identical to SEQ ID NO: 88399
  chr15:63167174-63167441
  hypo

SEQ ID NO: 177481 - DNA, 90 bp, Homo sapiens; identical to SEQ ID NO: 28265
  chr15:63245890-63245980
  hypo

SEQ ID NO: 177482 - DNA, 101 bp, Homo sapiens; identical to SEQ ID NO: 88401
  chr15:63267855-63267956
  hypo

SEQ ID NO: 177483 - DNA, 93 bp, Homo sapiens; identical to SEQ ID NO: 88402
  chr15:63282595-63282688
  hypo

SEQ ID NO: 177484 - DNA, 48 bp, Homo sapiens; identical to SEQ ID NO: 88403
  chr15:63321675-63321723
  hypo

SEQ ID NO: 177485 - DNA, 17 bp, Homo sapiens
  chr15:63329447-63329464
  hypo
gccgtctcaaaaataat

SEQ ID NO: 177486 - DNA, 179 bp, Homo sapiens
  chr15:63382904-63383083
  hypo
agcgtcactcagcagcggtaggtctcctgactgcagctgggatgtgctgtcacccactccagcactaaaattcaacactgattgccaattcgcctttgaagggcgcattattttctttaatgattttactcttacacttgagaaaagggaggaggaaaaaattgcgttctccagacacc

SEQ ID NO: 177487 - DNA, 30 bp, Homo sapiens
  chr15:63383297-63383327
  hypo
gccacccagcctggccgcacagggcccaag

SEQ ID NO: 177488 - DNA, 21 bp, Homo sapiens
  chr15:63494471-63494492
  hypo
gtctcaaaaagaaaaaagaaa

SEQ ID NO: 177489 - DNA, 145 bp, Homo sapiens
  chr15:63585218-63585363
  hypo
ctgctgactacctttcggcgcagttgaatgacttgcacttctccattctctatagaccttgtttcttctcatgggtaaaattgtccttattttcgtcagccactgctgcctttatttttagttatttattttattttattttact

SEQ ID NO: 177490 - DNA, 205 bp, Homo sapiens
  chr15:63592832-63593037
  hypo
cttcatctgccatagcgtcaaaactttggaaactgtttctcttctaatttagttaaaatatctaccaccgtttactgaaataattacacgtttacaccagatataacagctttctttcatcacaacagttacgtcttttagttttgcatgttttagaattcatatcaatgaaataatacgcattttttcacgatacggttttctt

SEQ ID NO: 177491 - DNA, 235 bp, Homo sapiens; identical to SEQ ID NO: 88406
  chr15:63597953-63598188
  hypo

SEQ ID NO: 177492 - DNA, 30 bp, Homo sapiens; identical to SEQ ID NO: 88407
  chr15:63598540-63598570
  hypo

SEQ ID NO: 177493 - DNA, 30 bp, Homo sapiens
  chr15:63612886-63612916
  hypo
gcacggtaaactctacgaccagaaggtgtt

SEQ ID NO: 177494 - DNA, 30 bp, Homo sapiens; identical to SEQ ID NO: 88408
  chr15:63613299-63613329
  hypo

SEQ ID NO: 177495 - DNA, 200 bp, Homo sapiens; identical to SEQ ID NO: 88409
  chr15:63614191-63614391
  hypo

SEQ ID NO: 177496 - DNA, 30 bp, Homo sapiens
  chr15:63616242-63616272
  hypo
tcagtggaatgagtgcggatccgaagaaag

SEQ ID NO: 177497 - DNA, 137 bp, Homo sapiens
  chr15:63647632-63647769
  hypo
caaaatgcagagtctcgggccccaccccaggcctaccgaaccggacactctgggggtggcgcccagcatctgccgttggacaaggctgccaggcgatgctgctgcgggctgaggctgagaagcgctgcactagactg

SEQ ID NO: 177498 - DNA, 68 bp, Homo sapiens; identical to SEQ ID NO: 88410
  chr15:63660075-63660143
  hypo

SEQ ID NO: 177499 - DNA, 44 bp, Homo sapiens
  chr15:63665231-63665275
  hypo
ccttggcgaacaccacgtcatgatgaagaggcagttaagattct

SEQ ID NO: 177500 - DNA, 105 bp, Homo sapiens
  chr15:63695753-63695858
  hypo
taccatattggacagcgcagacgcgatcattcccaccattgcagacaatcctgttggaaagcatgggcctgaggctttgtttacctcgctcggctcacctctttt

SEQ ID NO: 177501 - DNA, 31 bp, Homo sapiens; identical to SEQ ID NO: 88411
  chr15:63712164-63712195
  hypo

SEQ ID NO: 177502 - DNA, 372 bp, Homo sapiens
  chr15:63753341-63753713
  hypo
taaaagaatgttactgcggggcctccctaaaagacaagggaggaatcaagagaattccaagaaaggcgtccgagcaggaggtaagacagtagatttgaaagcaggactgagggagcaggaatgggaagaggggcccagccccagcgggtcaggggccggactaggctagcgaggcccaagtgcggtggccccatgcagagatcctggctcggtgcaaaggagatgccgctcccaccgtctgcaggaggcaagggctccccttccccggccaggagccgggtgcaagaggagcctggggagggagctccaggcctggagcaaaggctcctcctaggggcccgcggtcggcagagagcgcgggacactcacggc

SEQ ID NO: 177503 - DNA, 46 bp, Homo sapiens
  chr15:63772319-63772365
  hypo
gaactggaggccgggcgaggtggctcacatctataatgccagcact

SEQ ID NO: 177504 - DNA, 46 bp, Homo sapiens; identical to SEQ ID NO: 28268
  chr15:63772604-63772650
  hypo

SEQ ID NO: 177505 - DNA, 858 bp, Homo sapiens; identical to SEQ ID NO: 10203
  chr15:63795379-63796237
  hypo

SEQ ID NO: 177506 - DNA, 30 bp, Homo sapiens
  chr15:63889511-63889541
  hypo
accatatatgtccaccggcccagagtcggg

SEQ ID NO: 177507 - DNA, 245 bp, Homo sapiens
  chr15:63889821-63890066
  hypo
ctggcactccagccgcgtgcaggtgtgcagcattgaggactggctcaagagtgccttccagagaagcatctgcagccggcacgagagcctggtcaatgatttcctcctccgggtgtgcgacaggtaggccaccttgcctcctgagcagtgctggccccgctagctctggcttccctcttggggggcagggaagagcaaattacgagaccaagatggctccaccttcggggcgcctcaaactaggc

SEQ ID NO: 177508 - DNA, 59 bp, Homo sapiens; identical to SEQ ID NO: 28271
  chr15:63901442-63901501
  hypo

SEQ ID NO: 177509 - DNA, 30 bp, Homo sapiens; identical to SEQ ID NO: 28272
  chr15:63920918-63920948
  hypo

SEQ ID NO: 177510 - DNA, 30 bp, Homo sapiens
  chr15:63967168-63967198
  hypo
catgtcttcatgaacgccagtgagatatgt

SEQ ID NO: 177511 - DNA, 80 bp, Homo sapiens; identical to SEQ ID NO: 88418
  chr15:64109576-64109656
  hypo

SEQ ID NO: 177512 - DNA, 97 bp, Homo sapiens; identical to SEQ ID NO: 88419
  chr15:64234749-64234846
  hypo

SEQ ID NO: 177513 - DNA, 30 bp, Homo sapiens
  chr15:64309709-64309739
  hypo
ccgcattccaggacacgggcaggtccacac

SEQ ID NO: 177514 - DNA, 29 bp, Homo sapiens
  chr15:64392504-64392533
  hypo
aatgggagagaattggccaggcgcagtgg

SEQ ID NO: 177515 - DNA, 30 bp, Homo sapiens; identical to SEQ ID NO: 88421
  chr15:64422110-64422140
  hypo

SEQ ID NO: 177516 - DNA, 30 bp, Homo sapiens; identical to SEQ ID NO: 88422
  chr15:64422568-64422598
  hypo

SEQ ID NO: 177517 - DNA, 394 bp, Homo sapiens
  chr15:64439384-64439778
  hypo
ccctccgctgccgcccgcccagcccgggcccagaaaagaatccagcctctgtgccccgtggcgcccacaagctcgtggcccaggggctgtttgttttcttaacgaggttgaccaaacctcctgagcagcctttgtggcgcagcagaagccttgccggtgaaagggggctttgtgtgactgcaatggaagccagggcctgagctaaggcagggtctgtgggccagcctacccgtgcgcaggaatggggcgagtcggggtacatcttcactccccagcccttcctgccctctgctccttggttctatttccaagtggcaaactgccggctctatgcctgcatagaggagcgagtggagccaggcccccggcggggctgctgcggtaatcaggagac

SEQ ID NO: 177518 - DNA, 99 bp, Homo sapiens
  chr15:64443215-64443314
  hypo
atacacttgcctgaaggagccacgttatccctattttgcagatgagcaaaggtctacggagctcctgaaatccaggcagtctgacgtccaaatcggagt

SEQ ID NO: 177519 - DNA, 30 bp, Homo sapiens; identical to SEQ ID NO: 28274
  chr15:64451476-64451506
  hypo

SEQ ID NO: 177520 - DNA, 217 bp, Homo sapiens; identical to SEQ ID NO: 125857
  chr15:64454727-64454944
  hypo

SEQ ID NO: 177521 - DNA, 81 bp, Homo sapiens
  chr15:64481961-64482042
  hypo
caaaaaggcatttctcgtaaaaatcagagctttgtacaccagctacaatttactttttttttttttttttttttgagacgg

SEQ ID NO: 177522 - DNA, 181 bp, Homo sapiens; identical to SEQ ID NO: 88426
  chr15:64649872-64650053
  hypo

SEQ ID NO: 177523 - DNA, 148 bp, Homo sapiens; identical to SEQ ID NO: 88427
  chr15:64670700-64670848
  hypo

SEQ ID NO: 177524 - DNA, 241 bp, Homo sapiens; identical to SEQ ID NO: 88428
  chr15:64674682-64674923
  hypo

SEQ ID NO: 177525 - DNA, 29 bp, Homo sapiens
  chr15:64675162-64675191
  hypo
cctgggcgacagggcgagtctccgtctct

SEQ ID NO: 177526 - DNA, 23 bp, Homo sapiens
  chr15:64675582-64675605
  hypo
tgagatggagtctcacttcttcg

SEQ ID NO: 177527 - DNA, 121 bp, Homo sapiens
  chr15:64682670-64682791
  hypo
ggaaaaaagaaagattgaggctatttttgataaattaacaatttgaaatagggtaagaatgatagatgtagtcttctcagtctagaatccagttgtattttgtttggattacacagtatca

SEQ ID NO: 177528 - DNA, 80 bp, Homo sapiens; identical to SEQ ID NO: 88432
  chr15:64683090-64683170
  hypo

SEQ ID NO: 177529 - DNA, 85 bp, Homo sapiens
  chr15:64715654-64715739
  hypo
cgtctcaaaaaaaaaaaaaaaaaaaaaaaaaagcaaatgggtgtggttctaattgaagagtaaagataagcgtttttatttactt

SEQ ID NO: 177530 - DNA, 89 bp, Homo sapiens; identical to SEQ ID NO: 28280
  chr15:64865095-64865184
  hypo

SEQ ID NO: 177531 - DNA, 30 bp, Homo sapiens
  chr15:64967433-64967463
  hypo
agatctacagtttcacggacaatgccccca

SEQ ID NO: 177532 - DNA, 30 bp, Homo sapiens
  chr15:64968041-64968071
  hypo
actaacacggcttaccggcagcagtacgaa

SEQ ID NO: 177533 - DNA, 31 bp, Homo sapiens; identical to SEQ ID NO: 88435
  chr15:65035875-65035906
  hypo

SEQ ID NO: 177534 - DNA, 40 bp, Homo sapiens; identical to SEQ ID NO: 88436
  chr15:65041215-65041255
  hypo

SEQ ID NO: 177535 - DNA, 30 bp, Homo sapiens
  chr15:65043675-65043705
  hypo
ctgccctgcccgacccgagattcactcccg

SEQ ID NO: 177536 - DNA, 241 bp, Homo sapiens; identical to SEQ ID NO: 28281
  chr15:65119039-65119280
  hypo

SEQ ID NO: 177537 - DNA, 103 bp, Homo sapiens
  chr15:65119639-65119742
  hypo
cagaacgagaacttgtctcaaaacaaacaacaacaacaaaaaacaaaaacgaaagtacactccacagtgtgggaggggacccgagatacagaattttcttggg

SEQ ID NO: 177538 - DNA, 29 bp, Homo sapiens
  chr15:65124557-65124586
  hypo
atcttttttttttttttgagacggagtct

SEQ ID NO: 177539 - DNA, 43 bp, Homo sapiens; identical to SEQ ID NO: 88440
  chr15:65127718-65127761
  hypo

SEQ ID NO: 177540 - DNA, 508 bp, Homo sapiens; identical to SEQ ID NO: 52139
  chr15:65203767-65204275
  hypo

SEQ ID NO: 177541 - DNA, 30 bp, Homo sapiens
  chr15:65207094-65207124
  hypo
tgctaaaggtgcagcgatgggggtgagagg

SEQ ID NO: 177542 - DNA, 41 bp, Homo sapiens
  chr15:65214139-65214180
  hypo
cctgtctgcctggttcggccacttacgaatcctccagatct

SEQ ID NO: 177543 - DNA, 111 bp, Homo sapiens
  chr15:65242068-65242179
  hypo
gagctatcaggagcacggccaccgaatgctgctcatttggctgcatggcgtggccacggctggtgagaaccccagcaaagcgctgttcgagggcctcgtggccattggcag

SEQ ID NO: 177544 - DNA, 30 bp, Homo sapiens
  chr15:65321259-65321289
  hypo
caaaagagcgagacacgggtgtgccgaagg

SEQ ID NO: 177545 - DNA, 30 bp, Homo sapiens
  chr15:65321592-65321622
  hypo
ctgggagccagaagacgccgagatctgggc

SEQ ID NO: 177546 - DNA, 79 bp, Homo sapiens
  chr15:65349770-65349849
  hypo
ggaaagggtggaggtaaaccacggggagtggtgaggcctggggtcggctggagagagcgtgccccacctcaaagcattc

SEQ ID NO: 177547 - DNA, 101 bp, Homo sapiens; identical to SEQ ID NO: 125874
  chr15:65360172-65360273
  hypo

SEQ ID NO: 177548 - DNA, 14 bp, Homo sapiens
  chr15:65360278-65360292
  hypo
cggccccggacccg

SEQ ID NO: 177549 - DNA, 62 bp, Homo sapiens; identical to SEQ ID NO: 125876
  chr15:65360323-65360385
  hypo

SEQ ID NO: 177550 - DNA, 30 bp, Homo sapiens; identical to SEQ ID NO: 88444
  chr15:65361320-65361350
  hypo

SEQ ID NO: 177551 - DNA, 144 bp, Homo sapiens; identical to SEQ ID NO: 88445
  chr15:65380108-65380252
  hypo

SEQ ID NO: 177552 - DNA, 31 bp, Homo sapiens; identical to SEQ ID NO: 88446
  chr15:65385856-65385887
  hypo

SEQ ID NO: 177553 - DNA, 30 bp, Homo sapiens; identical to SEQ ID NO: 88447
  chr15:65395025-65395055
  hypo

SEQ ID NO: 177554 - DNA, 22 bp, Homo sapiens
  chr15:65478870-65478892
  hypo
cgtctcaaaaaaaaaaaaaaaa

SEQ ID NO: 177555 - DNA, 22 bp, Homo sapiens
  chr15:65482347-65482369
  hypo
taatcacccactggctagggcc

SEQ ID NO: 177556 - DNA, 31 bp, Homo sapiens; identical to SEQ ID NO: 88450
  chr15:65499416-65499447
  hypo

SEQ ID NO: 177557 - DNA, 196 bp, Homo sapiens
  chr15:65538639-65538835
  hypo
gcactatctccggaccgcccccaactctccttgtacctgctggaactcagccattccagaggccttgagggcacaggggtcatggaggtctccttggtctctcaggtgctctatgattctcagccacctgagccaggagcagagcgatgcgctcccagcaatatcaatcatgggaggcagacgccctccgcctgtc

SEQ ID NO: 177558 - DNA, 30 bp, Homo sapiens; identical to SEQ ID NO: 88451
  chr15:65594633-65594663
  hypo

SEQ ID NO: 177559 - DNA, 20 bp, Homo sapiens
  chr15:65600620-65600640
  hypo
gccatcgtgccccacccgga

SEQ ID NO: 177560 - DNA, 373 bp, Homo sapiens; identical to SEQ ID NO: 88452
  chr15:65625115-65625488
  hypo

SEQ ID NO: 177561 - DNA, 30 bp, Homo sapiens; identical to SEQ ID NO: 88453
  chr15:65667514-65667544
  hypo

SEQ ID NO: 177562 - DNA, 1409 bp, Homo sapiens; identical to SEQ ID NO: 125889
  chr15:65669255-65670664
  hypo

SEQ ID NO: 177563 - DNA, 30 bp, Homo sapiens; identical to SEQ ID NO: 88455
  chr15:65708903-65708933
  hypo

SEQ ID NO: 177564 - DNA, 765 bp, Homo sapiens; identical to SEQ ID NO: 125891
  chr15:65714727-65715492
  hypo

SEQ ID NO: 177565 - DNA, 71 bp, Homo sapiens; identical to SEQ ID NO: 125892
  chr15:65715513-65715584
  hypo

SEQ ID NO: 177566 - DNA, 30 bp, Homo sapiens
  chr15:65759458-65759488
  hypo
cctctccaggatttacgtaactgactacgt

SEQ ID NO: 177567 - DNA, 30 bp, Homo sapiens; identical to SEQ ID NO: 88456
  chr15:65849181-65849211
  hypo

SEQ ID NO: 177568 - DNA, 27 bp, Homo sapiens
  chr15:65849509-65849536
  hypo
acatcatatcaagagtacatacggccg

SEQ ID NO: 177569 - DNA, 26 bp, Homo sapiens
  chr15:65849835-65849861
  hypo
tcaacgtgacacatcactgttgatat

SEQ ID NO: 177570 - DNA, 158 bp, Homo sapiens; identical to SEQ ID NO: 88459
  chr15:65862036-65862194
  hypo

SEQ ID NO: 177571 - DNA, 44 bp, Homo sapiens; identical to SEQ ID NO: 28289
  chr15:65901232-65901276
  hypo

SEQ ID NO: 177572 - DNA, 30 bp, Homo sapiens
  chr15:66010568-66010598
  hypo
aaaaaaagctcaggtcggtcatggtagctc

SEQ ID NO: 177573 - DNA, 30 bp, Homo sapiens
  chr15:66115108-66115138
  hypo
aatctttggcttggccgggtgcagtggctc

SEQ ID NO: 177574 - DNA, 43 bp, Homo sapiens
  chr15:66596943-66596986
  hypo
taagatattttatggccgggcgtgacggcttatgcctataatc

SEQ ID NO: 177575 - DNA, 30 bp, Homo sapiens; identical to SEQ ID NO: 88462
  chr15:66612916-66612946
  hypo

SEQ ID NO: 177576 - DNA, 43 bp, Homo sapiens
  chr15:66618555-66618598
  hypo
gatcctggccaaccactgggtcgccaaaaagatctgggagagc

SEQ ID NO: 177577 - DNA, 30 bp, Homo sapiens
  chr15:66621413-66621443
  hypo
ctgtacttctccaccggatcctgtgcggag

SEQ ID NO: 177578 - DNA, 28 bp, Homo sapiens
  chr15:66645659-66645687
  hypo
aaaaaaaaaatctgggctgggcgcggtg

SEQ ID NO: 177579 - DNA, 30 bp, Homo sapiens; identical to SEQ ID NO: 28291
  chr15:66649764-66649794
  hypo

SEQ ID NO: 177580 - DNA, 30 bp, Homo sapiens
  chr15:66850807-66850837
  hypo
atttcagctagccaccgcgcttgggtaggt

SEQ ID NO: 177581 - DNA, 30 bp, Homo sapiens; identical to SEQ ID NO: 88465
  chr15:66856966-66856996
  hypo

SEQ ID NO: 177582 - DNA, 54 bp, Homo sapiens; identical to SEQ ID NO: 88466
  chr15:66886755-66886809
  hypo

SEQ ID NO: 177583 - DNA, 82 bp, Homo sapiens; identical to SEQ ID NO: 28292
  chr15:66929156-66929238
  hypo

SEQ ID NO: 177584 - DNA, 441 bp, Homo sapiens
  chr15:66946021-66946462
  hypo
tggacccactgagcccgaggccctggcatctctctcggggggccctgccacagcctcccagttggtgtccctgcttctgtcctcaccctccagtccattcaccacacaatggccagaggactctgaaaaacacacccgggtcatggcactccccgcctccgaccctctctctacctcctcgccaccacccctgacgtggaccactgaggcccatgccttctggcttctgccctctcctttcacgtcttgggcccctgctctgaacaaggggcctgtttttcgctctcagatctgtgggggtctcctctggcttcagcacctccacccagaagaccctcacggcccacactctcacccttcacctgggtcaacccgccctcagatctgagcaatcagtgtctcccaagggaagcctccccgaacacccgctccctgcgccca

SEQ ID NO: 177585 - DNA, 44 bp, Homo sapiens; identical to SEQ ID NO: 88469
  chr15:66951023-66951067
  hypo

SEQ ID NO: 177586 - DNA, 17 bp, Homo sapiens
  chr15:66961541-66961558
  hypo
ttttttttttttgagac

SEQ ID NO: 177587 - DNA, 31 bp, Homo sapiens; identical to SEQ ID NO: 88471
  chr15:66962085-66962116
  hypo

SEQ ID NO: 177588 - DNA, 172 bp, Homo sapiens
  chr15:66963540-66963712
  hypo
cgcccttcctctgccccgcccctctcctctgctctgctcctcccacagcttcccgctacctgccccagccactcccgcctcctggcttggttttccaggatgtccactgtgcagctgctcctcctctgttctccagcctgaggtgcccgcctcccaccgcaccgcctgctgt

SEQ ID NO: 177589 - DNA, 164 bp, Homo sapiens
  chr15:66964078-66964242
  hypo
ggctgggacacagagcgagtaggtgctgtccattcgcctttgctgtgtccctccattcctaccctgggagagccggggatccccatccactaaaggcatgtcatgcaggccccagggtcacacaagggagtgatggcacagcctgcctccgcggccccaggagg

SEQ ID NO: 177590 - DNA, 262 bp, Homo sapiens; identical to SEQ ID NO: 125911
  chr15:66994355-66994617
  hypo

SEQ ID NO: 177591 - DNA, 1266 bp, Homo sapiens; identical to SEQ ID NO: 125912
  chr15:66994911-66996177
  hypo

SEQ ID NO: 177592 - DNA, 91 bp, Homo sapiens; identical to SEQ ID NO: 88475
  chr15:67011790-67011881
  hypo

SEQ ID NO: 177593 - DNA, 214 bp, Homo sapiens; identical to SEQ ID NO: 88476
  chr15:67049570-67049784
  hypo

SEQ ID NO: 177594 - DNA, 31 bp, Homo sapiens; identical to SEQ ID NO: 88477
  chr15:67071084-67071115
  hypo

SEQ ID NO: 177595 - DNA, 669 bp, Homo sapiens; identical to SEQ ID NO: 88478
  chr15:67073253-67073922
  hypo

SEQ ID NO: 177596 - DNA, 94 bp, Homo sapiens
  chr15:67088297-67088391
  hypo
ttacggatgtctgcccgccccacacgcattgttcgttggacgccttagaaggcggggcggggtggggcatgcatcattccgtggagtgctgaat

SEQ ID NO: 177597 - DNA, 31 bp, Homo sapiens; identical to SEQ ID NO: 88479
  chr15:67100496-67100527
  hypo

SEQ ID NO: 177598 - DNA, 168 bp, Homo sapiens; identical to SEQ ID NO: 88480
  chr15:67100820-67100988
  hypo

SEQ ID NO: 177599 - DNA, 31 bp, Homo sapiens; identical to SEQ ID NO: 88481
  chr15:67130300-67130331
  hypo

SEQ ID NO: 177600 - DNA, 143 bp, Homo sapiens; identical to SEQ ID NO: 88482
  chr15:67137811-67137954
  hypo

SEQ ID NO: 177601 - DNA, 45 bp, Homo sapiens; identical to SEQ ID NO: 88483
  chr15:67149349-67149394
  hypo

SEQ ID NO: 177602 - DNA, 87 bp, Homo sapiens; identical to SEQ ID NO: 88484
  chr15:67368275-67368362
  hypo

SEQ ID NO: 177603 - DNA, 30 bp, Homo sapiens; identical to SEQ ID NO: 52171
  chr15:67386694-67386724
  hypo

SEQ ID NO: 177604 - DNA, 30 bp, Homo sapiens; identical to SEQ ID NO: 88486
  chr15:67418485-67418515
  hypo

SEQ ID NO: 177605 - DNA, 30 bp, Homo sapiens
  chr15:67423510-67423540
  hypo
ttctctgaggacccgcggcttcgcatgtgt

SEQ ID NO: 177606 - DNA, 30 bp, Homo sapiens
  chr15:67423740-67423770
  hypo
atcgagctgtgttctcgggtttcattgttg

SEQ ID NO: 177607 - DNA, 213 bp, Homo sapiens; identical to SEQ ID NO: 88487
  chr15:67457569-67457782
  hypo

SEQ ID NO: 177608 - DNA, 30 bp, Homo sapiens; identical to SEQ ID NO: 28300
  chr15:67458650-67458680
  hypo

SEQ ID NO: 177609 - DNA, 30 bp, Homo sapiens; identical to SEQ ID NO: 52172
  chr15:67466231-67466261
  hypo

SEQ ID NO: 177610 - DNA, 97 bp, Homo sapiens
  chr15:67480892-67480989
  hypo
acggaccaaagtttgcggagaggcagggctgtgtgcccccgccttctgctccacactcccccctgccagccgccagctcctgcggcagatgcagagg

SEQ ID NO: 177611 - DNA, 78 bp, Homo sapiens; identical to SEQ ID NO: 88491
  chr15:67481787-67481865
  hypo

SEQ ID NO: 177612 - DNA, 123 bp, Homo sapiens; identical to SEQ ID NO: 88492
  chr15:67482197-67482320
  hypo

SEQ ID NO: 177613 - DNA, 30 bp, Homo sapiens
  chr15:67485605-67485635
  hypo
cctagtcaacacgaccgcgtgtgttgcccc

SEQ ID NO: 177614 - DNA, 30 bp, Homo sapiens; identical to SEQ ID NO: 28301
  chr15:67489023-67489053
  hypo

SEQ ID NO: 177615 - DNA, 91 bp, Homo sapiens; identical to SEQ ID NO: 28302
  chr15:67545399-67545490
  hypo

SEQ ID NO: 177616 - DNA, 342 bp, Homo sapiens
  chr15:67757460-67757802
  hypo
tcaggtgtgggcaaccggccttaacctcgcatatagtgaccagctggccctgactcaactcaccttatacctgacaaacggccatctggattgcagtttgagcaccctggaagtgccccgctttgttccaaaggaaaggaagaaaaccaaatgcatgagtgcgctgtcaatgccggtaagcaagaggtgcttcctgaaggttctcggtgttcagcaacacccactgccactgcctgagctctgtctaggagccaggatctttgagtacaggaagaagaaagagcctaaggcaagtcattggacttgtctgagcagggtctggaaatgcgaatgtgttggtca

SEQ ID NO: 177617 - DNA, 30 bp, Homo sapiens
  chr15:68073932-68073962
  hypo
gtttctttccagtatcgtggtttaccgttt

SEQ ID NO: 177618 - DNA, 106 bp, Homo sapiens
  chr15:68085073-68085179
  hypo
ttcttttccgccccccgctttgaccataaatcttaaaagtaatcaaactctctgcaaagaagccaaggtaaacttgggcccaaagcggccccgtatgtctttaatg

SEQ ID NO: 177619 - DNA, 548 bp, Homo sapiens
  chr15:68098611-68099159
  hypo
cacagtgccaggcctcggctgactggccgtgcgagtgatgccgggcagaggaagggccaggcagagtgtgcagcgaagacaggccctcgcccttaagcaccttccaggctagtgcgagcctcaggaagaggtggcagagtctgagatgtgccagccagcactccacacgcttggtgctgactaccagtatgtcactgctcgtccctgggcctcaattatctaggccgtgaaatggagctgatagcctccctcgttacctcacagggttactggggaaagagatcagatccaggctgagggcaggccctggaaagtacaatgagcgcgggagtccgaggactgcctgtcacagcctcctcctcttccccgcagggccacccgttcatcgtgcagttcaatgatggaaatgccgccgtggtgtccatgtgggtgtgccgggcgctggaggagaggcggagccagcaggggcccccgtgaggctgccgcagggcactgaaagcccaggaccagtaaccaaggagaacaacccacccgtcgcccttctccgt

SEQ ID NO: 177620 - DNA, 1024 bp, Homo sapiens; identical to SEQ ID NO: 125930
  chr15:68115495-68116519
  hypo

SEQ ID NO: 177621 - DNA, 72 bp, Homo sapiens; identical to SEQ ID NO: 52190
  chr15:68177207-68177279
  hypo

SEQ ID NO: 177622 - DNA, 27 bp, Homo sapiens
  chr15:68218916-68218943
  hypo
cccggcgagaggtgttttcttaagagg

SEQ ID NO: 177623 - DNA, 106 bp, Homo sapiens; identical to SEQ ID NO: 88499
  chr15:68394332-68394438
  hypo

SEQ ID NO: 177624 - DNA, 30 bp, Homo sapiens
  chr15:68496681-68496711
  hypo
aggaatgggatgcctcgggggactctcagg

SEQ ID NO: 177625 - DNA, 30 bp, Homo sapiens
  chr15:68496951-68496981
  hypo
ggaataaagtgctcacgcccaaaccaggct

SEQ ID NO: 177626 - DNA, 30 bp, Homo sapiens; identical to SEQ ID NO: 88500
  chr15:68499165-68499195
  hypo

SEQ ID NO: 177627 - DNA, 30 bp, Homo sapiens
  chr15:68499737-68499767
  hypo
gccaggggagtgggcggtgcctccagctcc

SEQ ID NO: 177628 - DNA, 234 bp, Homo sapiens; identical to SEQ ID NO: 88501
  chr15:68502838-68503072
  hypo

SEQ ID NO: 177629 - DNA, 44 bp, Homo sapiens; identical to SEQ ID NO: 28306
  chr15:68506852-68506896
  hypo

SEQ ID NO: 177630 - DNA, 30 bp, Homo sapiens
  chr15:68520509-68520539
  hypo
aaaacggacacagtccgcagctgctcagcc

SEQ ID NO: 177631 - DNA, 30 bp, Homo sapiens; identical to SEQ ID NO: 88503
  chr15:68523060-68523090
  hypo

SEQ ID NO: 177632 - DNA, 30 bp, Homo sapiens; identical to SEQ ID NO: 28307
  chr15:68594511-68594541
  hypo

SEQ ID NO: 177633 - DNA, 186 bp, Homo sapiens; identical to SEQ ID NO: 88505
  chr15:68614577-68614763
  hypo

SEQ ID NO: 177634 - DNA, 85 bp, Homo sapiens
  chr15:68624698-68624783
  hypo
ccttgcctcgctcacggccctcgttgaagtacatgggtgcgcccaccagcaggacatcagtcacgccgtcgccgtcgatgtccac

SEQ ID NO: 177635 - DNA, 190 bp, Homo sapiens; identical to SEQ ID NO: 88507
  chr15:68854100-68854290
  hypo

SEQ ID NO: 177636 - DNA, 128 bp, Homo sapiens
  chr15:68888206-68888334
  hypo
gtgagacggagcgggcgtctgggaggaggaggtgttggagtgtggctctgaacctaggtgagggaaggagcagcgtgagcagaggccagggcagcgacgccgtggggtgctcccgagccacgagggtg

SEQ ID NO: 177637 - DNA, 117 bp, Homo sapiens; identical to SEQ ID NO: 88508
  chr15:68893749-68893866
  hypo

SEQ ID NO: 177638 - DNA, 20 bp, Homo sapiens
  chr15:68898352-68898372
  hypo
gcgcccggccggctcttggg

SEQ ID NO: 177639 - DNA, 41 bp, Homo sapiens; identical to SEQ ID NO: 88509
  chr15:68899867-68899908
  hypo

SEQ ID NO: 177640 - DNA, 115 bp, Homo sapiens
  chr15:68908913-68909028
  hypo
gcaagtcttccaggccgcggtcgaatgattctgacaagcggtgagtacggctgtgtcagcgcgtgggccccagcgcaagcaggcaatcccatgtcatctgcgagatctcccatgg

SEQ ID NO: 177641 - DNA, 216 bp, Homo sapiens; identical to SEQ ID NO: 88511
  chr15:68937486-68937702
  hypo

SEQ ID NO: 177642 - DNA, 259 bp, Homo sapiens; identical to SEQ ID NO: 28310
  chr15:69002973-69003232
  hypo

SEQ ID NO: 177643 - DNA, 94 bp, Homo sapiens
  chr15:69003954-69004048
  hypo
gtccttcaacacggacggcagcctgctcaccaccacgtgcaaggacaagaagctgcgtgtgattgagccccgctctggccgtgttctgcaggtg

SEQ ID NO: 177644 - DNA, 181 bp, Homo sapiens; identical to SEQ ID NO: 88514
  chr15:69011589-69011770
  hypo

SEQ ID NO: 177645 - DNA, 30 bp, Homo sapiens; identical to SEQ ID NO: 52203
  chr15:69059068-69059098
  hypo

SEQ ID NO: 177646 - DNA, 251 bp, Homo sapiens; identical to SEQ ID NO: 88516
  chr15:69076662-69076913
  hypo

SEQ ID NO: 177647 - DNA, 490 bp, Homo sapiens
  chr15:69099730-69100220
  hypo
ggctggtattcctcccgccccacctccacagaaaacgggggggggggagtctctcctttgcccagagcctccctgcccctcccctccgcttcacagctccaggcgaggcctcctcctggggcaggccgagacagctcttctcagacttgctcccaccccagcaagcaccttctggagaggggctgactccaccccacccccaccgctgaccaaacagctcattcaagccctgacgggtagaatctaaccttcagggtccgtctacaacccatacctggcataaacgatatttctttccgtgctaacaacaagctctgggaagcaggttattcaccgtttcacagatgtggcaactgaggctcagtgaggtgacctgccaacatcctcaggctcagcagttctcaagcactactgcccactgtacctgactgcctgggtctgcgcctgggcccccgcccttttacaaaaggtccacggcctctcaagagct

SEQ ID NO: 177648 - DNA, 24 bp, Homo sapiens
  chr15:69138833-69138857
  hypo
aacaattcatgaggccgggcgcgg

SEQ ID NO: 177649 - DNA, 30 bp, Homo sapiens
  chr15:69223880-69223910
  hypo
tgtggattgtgggtcgcggtctgggacact

SEQ ID NO: 177650 - DNA, 31 bp, Homo sapiens; identical to SEQ ID NO: 28313
  chr15:69240580-69240611
  hypo

SEQ ID NO: 177651 - DNA, 31 bp, Homo sapiens; identical to SEQ ID NO: 88520
  chr15:69277654-69277685
  hypo

SEQ ID NO: 177652 - DNA, 30 bp, Homo sapiens
  chr15:69285183-69285213
  hypo
tcctcaagtttccgccgtgtgtagactggt

SEQ ID NO: 177653 - DNA, 114 bp, Homo sapiens
  chr15:69285722-69285836
  hypo
aagacctgatcccatcgcggaagagtctccagacaaaatttcttcagcagctgcttgagtgtctggttcatgcgctccacttttcctgagctctgcagccggtaggctgtgtgt

SEQ ID NO: 177654 - DNA, 30 bp, Homo sapiens; identical to SEQ ID NO: 28314
  chr15:69320686-69320716
  hypo

SEQ ID NO: 177655 - DNA, 142 bp, Homo sapiens; identical to SEQ ID NO: 28315
  chr15:69322603-69322745
  hypo

SEQ ID NO: 177656 - DNA, 181 bp, Homo sapiens; identical to SEQ ID NO: 28316
  chr15:69322966-69323147
  hypo

SEQ ID NO: 177657 - DNA, 34 bp, Homo sapiens; identical to SEQ ID NO: 88525
  chr15:69325017-69325051
  hypo

SEQ ID NO: 177658 - DNA, 31 bp, Homo sapiens; identical to SEQ ID NO: 10239
  chr15:69351241-69351272
  hypo

SEQ ID NO: 177659 - DNA, 33 bp, Homo sapiens; identical to SEQ ID NO: 88527
  chr15:69369616-69369649
  hypo

SEQ ID NO: 177660 - DNA, 185 bp, Homo sapiens; identical to SEQ ID NO: 88528
  chr15:69387166-69387351
  hypo

SEQ ID NO: 177661 - DNA, 40 bp, Homo sapiens; identical to SEQ ID NO: 28319
  chr15:69461180-69461220
  hypo

SEQ ID NO: 177662 - DNA, 78 bp, Homo sapiens
  chr15:69481790-69481868
  hypo
acatattggtggcttccaagtttgggcaattatgaataaaactgctataaacataaggacatacgttttcgactcatt

SEQ ID NO: 177663 - DNA, 38 bp, Homo sapiens; identical to SEQ ID NO: 88530
  chr15:69566085-69566123
  hypo

SEQ ID NO: 177664 - DNA, 161 bp, Homo sapiens; identical to SEQ ID NO: 88531
  chr15:69577240-69577401
  hypo

SEQ ID NO: 177665 - DNA, 17 bp, Homo sapiens
  chr15:69584194-69584211
  hypo
cgggcatggtggctcac

SEQ ID NO: 177666 - DNA, 215 bp, Homo sapiens
  chr15:69590151-69590366
  hypo
aggacaagcgcatgtcgcacgcacacacacacgcacatgcatacacacccttacaagatgcacagccaccaaaaagcctaataaagcaaggtgcccaagaccacggttcaggatccgtaaaaatggccggagataattgactgcaacctattcactgcaaatggggcaacttgggcccacaaagggccagagacttgacccgagtcacagagtag

SEQ ID NO: 177667 - DNA, 20 bp, Homo sapiens
  chr15:69598756-69598776
  hypo
ttttttttttttgatacgga

SEQ ID NO: 177668 - DNA, 31 bp, Homo sapiens; identical to SEQ ID NO: 88535
  chr15:69672049-69672080
  hypo

SEQ ID NO: 177669 - DNA, 21 bp, Homo sapiens
  chr15:69694938-69694959
  hypo
accaccgcgcctggcctaaac

SEQ ID NO: 177670 - DNA, 79 bp, Homo sapiens; identical to SEQ ID NO: 28322
  chr15:69715404-69715483
  hypo

SEQ ID NO: 177671 - DNA, 49 bp, Homo sapiens; identical to SEQ ID NO: 88538
  chr15:69754274-69754323
  hypo

SEQ ID NO: 177672 - DNA, 132 bp, Homo sapiens; identical to SEQ ID NO: 88539
  chr15:69793873-69794005
  hypo

SEQ ID NO: 177673 - DNA, 120 bp, Homo sapiens
  chr15:69851549-69851669
  hypo
tataagcagaaggtaatagaccggcccatctctatgccggagaactttgtcttcaaaccccacagccttctctttgcgctgagggcagggctactggtcgatgcaggaggaggaggcctt

SEQ ID NO: 177674 - DNA, 201 bp, Homo sapiens; identical to SEQ ID NO: 88540
  chr15:69879204-69879405
  hypo

SEQ ID NO: 177675 - DNA, 142 bp, Homo sapiens; identical to SEQ ID NO: 28323
  chr15:69883339-69883481
  hypo

SEQ ID NO: 177676 - DNA, 35 bp, Homo sapiens
  chr15:69900971-69901006
  hypo
gtgtcagagatgagacgggacgaagtgtgaacccc

SEQ ID NO: 177677 - DNA, 156 bp, Homo sapiens; identical to SEQ ID NO: 88542
  chr15:69925150-69925306
  hypo

SEQ ID NO: 177678 - DNA, 151 bp, Homo sapiens; identical to SEQ ID NO: 88543
  chr15:70126640-70126791
  hypo

SEQ ID NO: 177679 - DNA, 247 bp, Homo sapiens
  chr15:70133512-70133759
  hypo
agggagcccaagaagcgaagggagcatgatcagagatggggagacaggcctcattagatagctccagtgctgcgggctctgtcgccatggcagccagcgctcgcgcaggccaggtggtttttattaccgaacttggaaaactttacggcggcaccaacaatgaatctttattctgtttttaatagcgtgtctcttattaacatgtatcttttccccttcttaataacctttacgtttccaagccaca

SEQ ID NO: 177680 - DNA, 30 bp, Homo sapiens; identical to SEQ ID NO: 88544
  chr15:70233743-70233773
  hypo

SEQ ID NO: 177681 - DNA, 200 bp, Homo sapiens; identical to SEQ ID NO: 88545
  chr15:70339878-70340078
  hypo

SEQ ID NO: 177682 - DNA, 30 bp, Homo sapiens; identical to SEQ ID NO: 28325
  chr15:70340692-70340722
  hypo

SEQ ID NO: 177683 - DNA, 117 bp, Homo sapiens; identical to SEQ ID NO: 28326
  chr15:70342263-70342380
  hypo

SEQ ID NO: 177684 - DNA, 30 bp, Homo sapiens; identical to SEQ ID NO: 88548
  chr15:70345446-70345476
  hypo

SEQ ID NO: 177685 - DNA, 143 bp, Homo sapiens
  chr15:70347465-70347608
  hypo
tgtgtagacgtgcctcgtggggttgctgatggtcacggcacacaccacctccccgtggctgagtgtgttgatctgccgggcgtgcctcgggatgccggggcctgccagggcgtcgtgggggaagggcacgggctgcatctgcc

SEQ ID NO: 177686 - DNA, 30 bp, Homo sapiens
  chr15:70349875-70349905
  hypo
gttgtggaggccggcgtaggcgccaggact

SEQ ID NO: 177687 - DNA, 440 bp, Homo sapiens
  chr15:70352912-70353352
  hypo
cttccatgctgtagtccgcagagccccggtgcttctcactggcccggaggctttccgagggtgacacagagttattctggaaggaaaaagagggttcggggttaaaactttctgctgcgtgtaacaattcacacatccgcacacagctaagtgcaggtgacacggaggtcaggggagggaagagaagctgaactcctctctgccctgcagatcgtggctccatcagagccttgccagggaagccttccccactcccctgagactgagtccccggggagatgccctgggcgcatccccaattctcttttgcagctctgcactgctattaaataattaaccctgcagtaagccgtctgccttctggcctgtgggactacgctctgtgagggcgagggtcacctgggtctcattcaccacccatctcgcgcttgccacactca

SEQ ID NO: 177688 - DNA, 261 bp, Homo sapiens
  chr15:70354302-70354563
  hypo
tccactttcccagaggccaagcgtggctcaggggcaagggccacttggagggaacggggctgggcagtattcggtgggaatagtgcggcaaccagcctcagaacttaatttcctttcctaagccgggttctgggcagccctacccggccaagtttctgcccgaagcaaattaaaatggcagagttatcaagccttgaagaaaaaatggaggttataatggaactgcagctcaaccttccccacagccgtgcaggagcggtg

SEQ ID NO: 177689 - DNA, 88 bp, Homo sapiens; identical to SEQ ID NO: 28328
  chr15:70355591-70355679
  hypo

SEQ ID NO: 177690 - DNA, 30 bp, Homo sapiens; identical to SEQ ID NO: 88552
  chr15:70358404-70358434
  hypo

SEQ ID NO: 177691 - DNA, 30 bp, Homo sapiens; identical to SEQ ID NO: 125980
  chr15:70387887-70387917
  hypo

SEQ ID NO: 177692 - DNA, 71 bp, Homo sapiens; identical to SEQ ID NO: 125981
  chr15:70388125-70388196
  hypo

SEQ ID NO: 177693 - DNA, 286 bp, Homo sapiens; identical to SEQ ID NO: 125982
  chr15:70388411-70388697
  hypo

SEQ ID NO: 177694 - DNA, 77 bp, Homo sapiens; identical to SEQ ID NO: 10243
  chr15:70391278-70391355
  hypo

SEQ ID NO: 177695 - DNA, 31 bp, Homo sapiens; identical to SEQ ID NO: 28330
  chr15:70539034-70539065
  hypo

SEQ ID NO: 177696 - DNA, 181 bp, Homo sapiens; identical to SEQ ID NO: 88555
  chr15:70703921-70704102
  hypo

SEQ ID NO: 177697 - DNA, 37 bp, Homo sapiens
  chr15:70707943-70707980
  hypo
caatgaaactcacagccgtaaacgagtttattattgt

SEQ ID NO: 177698 - DNA, 213 bp, Homo sapiens
  chr15:70718601-70718814
  hypo
gcctcgggggcccgtcgactcactccccagaggtgcctctgcctccggcttcggttcagcgctggctcctcgaggtgccaggtggaatcccaacattttttccgccttcctcaggcctggcaagtggagcccaaaaacagatgcctagcaccttgttcttggcgagaatgacagattttcgagtccccttccaggagccgtgctcgcttcccc

SEQ ID NO: 177699 - DNA, 30 bp, Homo sapiens
  chr15:70736843-70736873
  hypo
catttttgtaggggcgtaacatggcatcta

SEQ ID NO: 177700 - DNA, 31 bp, Homo sapiens; identical to SEQ ID NO: 88556
  chr15:70921645-70921676
  hypo

SEQ ID NO: 177701 - DNA, 97 bp, Homo sapiens; identical to SEQ ID NO: 88557
  chr15:70926694-70926791
  hypo

SEQ ID NO: 177702 - DNA, 30 bp, Homo sapiens
  chr15:71015596-71015626
  hypo
cctagaatggagggtcgctggagctcaggc

SEQ ID NO: 177703 - DNA, 100 bp, Homo sapiens; identical to SEQ ID NO: 28331
  chr15:71047984-71048084
  hypo

SEQ ID NO: 177704 - DNA, 30 bp, Homo sapiens
  chr15:71073641-71073671
  hypo
aggcctgggccaccgcgcttggtaccgatg

SEQ ID NO: 177705 - DNA, 30 bp, Homo sapiens
  chr15:71087077-71087107
  hypo
cctctggtcacaggcgatggagtccaggct

SEQ ID NO: 177706 - DNA, 30 bp, Homo sapiens; identical to SEQ ID NO: 88559
  chr15:71093476-71093506
  hypo

SEQ ID NO: 177707 - DNA, 31 bp, Homo sapiens; identical to SEQ ID NO: 88560
  chr15:71113899-71113930
  hypo

SEQ ID NO: 177708 - DNA, 36 bp, Homo sapiens; identical to SEQ ID NO: 28332
  chr15:71124500-71124536
  hypo

SEQ ID NO: 177709 - DNA, 121 bp, Homo sapiens
  chr15:71152086-71152207
  hypo
gttaaggatgccaacgccaagctgtccgagctggaggcctctctgcaatgggccaggcaggatatggtgtggcagctgcgtgagtaccaggagctgatgaatgtcaagctggccttgggca

SEQ ID NO: 177710 - DNA, 17 bp, Homo sapiens
  chr15:71152506-71152523
  hypo
cgcggcagcccctccca

SEQ ID NO: 177711 - DNA, 36 bp, Homo sapiens
  chr15:71164698-71164734
  hypo
ggctcggcatcagagggagaccgcggaaagtgggag

SEQ ID NO: 177712 - DNA, 1163 bp, Homo sapiens; identical to SEQ ID NO: 125993
  chr15:71184273-71185436
  hypo

SEQ ID NO: 177713 - DNA, 1048 bp, Homo sapiens; identical to SEQ ID NO: 125994
  chr15:71407570-71408618
  hypo

SEQ ID NO: 177714 - DNA, 32 bp, Homo sapiens; identical to SEQ ID NO: 28335
  chr15:71466446-71466478
  hypo

SEQ ID NO: 177715 - DNA, 31 bp, Homo sapiens; identical to SEQ ID NO: 88567
  chr15:71509041-71509072
  hypo

SEQ ID NO: 177716 - DNA, 30 bp, Homo sapiens
  chr15:71630755-71630785
  hypo
tccagttcatactcgcgcgtggatcctaga

SEQ ID NO: 177717 - DNA, 180 bp, Homo sapiens; identical to SEQ ID NO: 88568
  chr15:71704015-71704195
  hypo

SEQ ID NO: 177718 - DNA, 39 bp, Homo sapiens; identical to SEQ ID NO: 88569
  chr15:71880350-71880389
  hypo

SEQ ID NO: 177719 - DNA, 100 bp, Homo sapiens; identical to SEQ ID NO: 88570
  chr15:71966263-71966363
  hypo

SEQ ID NO: 177720 - DNA, 392 bp, Homo sapiens
  chr15:72039023-72039415
  hypo
gtgcccagcctaggctgactttcaagcaatgctctagtaagaaactctacccatagtgattctgatgattctgtgtacgctgctgcgggctcacgctgacttcctgttgactgaaggttgtctctcactctcgctctctcattcctgaaccagctgggacatcggggagtggtctgagtgcagcaagacctgtggcctgggcatgcagcaccgccaggttctgtgccgccaggtgtacgccaaccgcagcctgacggtgcagccctaccgctgccagcacctggagaaacctgagaccaccagcacctgccaactcaagatctgcagcgagtggcagatccggaccgactggacctcggtacgcaggcagggcagcccgctctgcagctccc

SEQ ID NO: 177721 - DNA, 232 bp, Homo sapiens; identical to SEQ ID NO: 28336
  chr15:72040755-72040987
  hypo

SEQ ID NO: 177722 - DNA, 200 bp, Homo sapiens; identical to SEQ ID NO: 88572
  chr15:72042475-72042675
  hypo

SEQ ID NO: 177723 - DNA, 259 bp, Homo sapiens
  chr15:72081592-72081851
  hypo
ggaacttacacttaccgcgcctccacatgatcgacctcaccttgtatactcacagccacctcaacagctgggtgctgcaggtctctctgctttacagcggggaaaacaaagcctcagccaggtgagggaacttgctcgtgatcatgcaggtctcaagtgactggggactttgagcccaagtccgcctcatttcaaagcttatgctggttcctctgcatgctgcggcctttctgaaacaatcacacgaagccatcacgta

SEQ ID NO: 177724 - DNA, 288 bp, Homo sapiens; identical to SEQ ID NO: 88574
  chr15:72082356-72082644
  hypo

SEQ ID NO: 177725 - DNA, 124 bp, Homo sapiens; identical to SEQ ID NO: 88575
  chr15:72093245-72093369
  hypo

SEQ ID NO: 177726 - DNA, 30 bp, Homo sapiens; identical to SEQ ID NO: 88576
  chr15:72103893-72103923
  hypo

SEQ ID NO: 177727 - DNA, 30 bp, Homo sapiens; identical to SEQ ID NO: 88577
  chr15:72105865-72105895
  hypo

SEQ ID NO: 177728 - DNA, 26 bp, Homo sapiens
  chr15:72109411-72109437
  hypo
ctcctctggttaatgcggcttttctt

SEQ ID NO: 177729 - DNA, 148 bp, Homo sapiens
  chr15:72109740-72109888
  hypo
aatgtggcttttcctcgaaattcctcctgacccactctggggacctcatctctcctctccttcctcccctccctttcctgggagggcaccgccccagggactagtgctcagaagctggtcgtaaaactgatggcgtcctctctcctgt

SEQ ID NO: 177730 - DNA, 30 bp, Homo sapiens; identical to SEQ ID NO: 28337
  chr15:72118829-72118859
  hypo

SEQ ID NO: 177731 - DNA, 30 bp, Homo sapiens
  chr15:72267704-72267734
  hypo
ccctttggcctatgacgtgattttatcgtg

SEQ ID NO: 177732 - DNA, 23 bp, Homo sapiens
  chr15:72399866-72399889
  hypo
gcgacagagcaagactttgcccc

SEQ ID NO: 177733 - DNA, 31 bp, Homo sapiens; identical to SEQ ID NO: 88580
  chr15:72403196-72403227
  hypo

SEQ ID NO: 177734 - DNA, 46 bp, Homo sapiens; identical to SEQ ID NO: 28338
  chr15:72411789-72411835
  hypo

SEQ ID NO: 177735 - DNA, 225 bp, Homo sapiens
  chr15:72412074-72412299
  hypo
cgagactccgtccccgcccccagaaaaaaaagatggaggtcatttaactacagagaggcttggagatggaatgagaaacttgagcggcgttatgtttggaataactggtctgggaaatgggagaaggagccactcttgcctttctcttcagcactgttcattcctcagtgtttatcaggtccaaattagttacttgtctctttgctctcccgttcccttccgtcc

SEQ ID NO: 177736 - DNA, 16 bp, Homo sapiens
  chr15:72444093-72444109
  hypo
cagccctactgtctca

SEQ ID NO: 177737 - DNA, 389 bp, Homo sapiens; identical to SEQ ID NO: 88583
  chr15:72462415-72462804
  hypo

SEQ ID NO: 177738 - DNA, 42 bp, Homo sapiens; identical to SEQ ID NO: 28341
  chr15:72471182-72471224
  hypo

SEQ ID NO: 177739 - DNA, 30 bp, Homo sapiens; identical to SEQ ID NO: 28342
  chr15:72491017-72491047
  hypo

SEQ ID NO: 177740 - DNA, 30 bp, Homo sapiens
  chr15:72492888-72492918
  hypo
acagggaagatgccacggtacaggtgggcc

SEQ ID NO: 177741 - DNA, 1075 bp, Homo sapiens; identical to SEQ ID NO: 126000
  chr15:72522951-72524026
  hypo

SEQ ID NO: 177742 - DNA, 38 bp, Homo sapiens; identical to SEQ ID NO: 88587
  chr15:72525046-72525084
  hypo

SEQ ID NO: 177743 - DNA, 38 bp, Homo sapiens; identical to SEQ ID NO: 88588
  chr15:72525323-72525361
  hypo

SEQ ID NO: 177744 - DNA, 647 bp, Homo sapiens; identical to SEQ ID NO: 126001
  chr15:72564619-72565266
  hypo

SEQ ID NO: 177745 - DNA, 183 bp, Homo sapiens; identical to SEQ ID NO: 88590
  chr15:72581554-72581737
  hypo

SEQ ID NO: 177746 - DNA, 81 bp, Homo sapiens; identical to SEQ ID NO: 88591
  chr15:72743818-72743899
  hypo

SEQ ID NO: 177747 - DNA, 43 bp, Homo sapiens; identical to SEQ ID NO: 88592
  chr15:72758598-72758641
  hypo

SEQ ID NO: 177748 - DNA, 43 bp, Homo sapiens; identical to SEQ ID NO: 88593
  chr15:72768976-72769019
  hypo

SEQ ID NO: 177749 - DNA, 31 bp, Homo sapiens; identical to SEQ ID NO: 28346
  chr15:72773266-72773297
  hypo

SEQ ID NO: 177750 - DNA, 31 bp, Homo sapiens; identical to SEQ ID NO: 10258
  chr15:72827182-72827213
  hypo

SEQ ID NO: 177751 - DNA, 30 bp, Homo sapiens; identical to SEQ ID NO: 10259
  chr15:72827251-72827281
  hypo

SEQ ID NO: 177752 - DNA, 31 bp, Homo sapiens; identical to SEQ ID NO: 88597
  chr15:72967696-72967727
  hypo

SEQ ID NO: 177753 - DNA, 205 bp, Homo sapiens
  chr15:72992554-72992759
  hypo
aggcatgagccactgcacccggcctgaacatttatttactggttttttttgtgtgtgcatgtgtgtgcaagttttcacttgaataagtgcctagggagtggaattgcttggtcatatgtgaactgtttgttttaactttataataaactgccgaagtattttccaaagtggttgtacagttttacccgaccgccagcaacgtgtg

SEQ ID NO: 177754 - DNA, 96 bp, Homo sapiens
  chr15:73147249-73147345
  hypo
ctgctgggattacaggtatgagtcatcgcacccggccctgctatggtttttattctgggaattttgagtggtctcgccttctcctctccttcaagt

SEQ ID NO: 177755 - DNA, 298 bp, Homo sapiens; identical to SEQ ID NO: 52239
  chr15:73344007-73344305
  hypo

SEQ ID NO: 177756 - DNA, 30 bp, Homo sapiens
  chr15:73595105-73595135
  hypo
aattgtacagagtacgagaggacagcactt

SEQ ID NO: 177757 - DNA, 213 bp, Homo sapiens
  chr15:73615717-73615930
  hypo
cggctatggtggtggcggctacgccagctgatggtgtgggagccgagggggagccacaggccccggggggtggggaggagctggatgagggcaggagtgggctcagtccagcgggggcagagaatccagccagctgttggatgtggaaggaggatgaagacggtgtgtccacctgggacgggctgctggcgggcgaggcggagcccagcgcag

SEQ ID NO: 177758 - DNA, 47 bp, Homo sapiens
  chr15:73616152-73616199
  hypo
cctggacgcggtgcgcgcagtgggccatctcccggtcatgctgcaca

SEQ ID NO: 177759 - DNA, 112 bp, Homo sapiens; identical to SEQ ID NO: 88602
  chr15:73616436-73616548
  hypo

SEQ ID NO: 177760 - DNA, 58 bp, Homo sapiens
  chr15:73634700-73634758
  hypo
actccaacttgcccgcgtgatttcactctctacagccagcggccgcaccttttgtcag

SEQ ID NO: 177761 - DNA, 100 bp, Homo sapiens
  chr15:73635759-73635859
  hypo
gagaggcgtaacaggcgtaagaggctgaggatcttcgtgaagcggacaatgcgcagggcccgggcagtcttgtagacctccgagtcgatgcgtgtctcca

SEQ ID NO: 177762 - DNA, 30 bp, Homo sapiens
  chr15:73640722-73640752
  hypo
acagacacgaacatgcgtgcacacacgcac

SEQ ID NO: 177763 - DNA, 85 bp, Homo sapiens; identical to SEQ ID NO: 88603
  chr15:73735439-73735524
  hypo

SEQ ID NO: 177764 - DNA, 28 bp, Homo sapiens
  chr15:73806804-73806832
  hypo
ctcccccgccacagcacagtttctaacc

SEQ ID NO: 177765 - DNA, 30 bp, Homo sapiens; identical to SEQ ID NO: 88605
  chr15:73857171-73857201
  hypo

SEQ ID NO: 177766 - DNA, 30 bp, Homo sapiens
  chr15:73863992-73864022
  hypo
gaggtcgggactcagcgggatggctcactg

SEQ ID NO: 177767 - DNA, 19 bp, Homo sapiens
  chr15:73867752-73867771
  hypo
cagccgggttacagtaatc

SEQ ID NO: 177768 - DNA, 334 bp, Homo sapiens
  chr15:73889350-73889684
  hypo
tgctggactcactctgaaggacgcttatggtggcctgggctcgaatccatgttatggaggggttttgcctcaagtcattcctcttggggtcgttgctggccctgcactcgtaagtcccagagtcctccaaggtgagccgggttattctcagcacactcacgccgtttgacccgtaggcggtgtttacggtgacacggcgcttccgagcaccgtcccacagctgtctgaaagactctgcccggttgacttctgcgtaccaccactggatctctggcgtggggctcccgaccacgtcacagtacagctcaaaggcgtcccccgtgagcttagtttc

SEQ ID NO: 177769 - DNA, 181 bp, Homo sapiens
  chr15:73898086-73898267
  hypo
tggaaaatgttaaaagcaaagagaagaatcagctcacaattgaacccctcttgcattccttttgtacgtctgtcttccagggttccttcctatgatcctgaatatcctcacatggactcttaacagattgaaagctctgcctgtatgttacttatcagaaaatactatggccatcatgcgg

SEQ ID NO: 177770 - DNA, 31 bp, Homo sapiens; identical to SEQ ID NO: 28353
  chr15:73996272-73996303
  hypo

SEQ ID NO: 177771 - DNA, 30 bp, Homo sapiens
  chr15:73999507-73999537
  hypo
aagggtccatagcaccgcgcactgcactga

SEQ ID NO: 177772 - DNA, 30 bp, Homo sapiens; identical to SEQ ID NO: 88608
  chr15:74020171-74020201
  hypo

SEQ ID NO: 177773 - DNA, 31 bp, Homo sapiens; identical to SEQ ID NO: 88609
  chr15:74043427-74043458
  hypo

SEQ ID NO: 177774 - DNA, 224 bp, Homo sapiens; identical to SEQ ID NO: 126025
  chr15:74044798-74045022
  hypo

SEQ ID NO: 177775 - DNA, 646 bp, Homo sapiens; identical to SEQ ID NO: 126026
  chr15:74045074-74045720
  hypo

SEQ ID NO: 177776 - DNA, 31 bp, Homo sapiens; identical to SEQ ID NO: 88612
  chr15:74067232-74067263
  hypo

SEQ ID NO: 177777 - DNA, 31 bp, Homo sapiens; identical to SEQ ID NO: 88613
  chr15:74185285-74185316
  hypo

SEQ ID NO: 177778 - DNA, 202 bp, Homo sapiens; identical to SEQ ID NO: 88614
  chr15:74188045-74188247
  hypo

SEQ ID NO: 177779 - DNA, 30 bp, Homo sapiens; identical to SEQ ID NO: 28355
  chr15:74222801-74222831
  hypo

SEQ ID NO: 177780 - DNA, 70 bp, Homo sapiens; identical to SEQ ID NO: 88616
  chr15:74223033-74223103
  hypo

SEQ ID NO: 177781 - DNA, 30 bp, Homo sapiens; identical to SEQ ID NO: 52254
  chr15:74229274-74229304
  hypo

SEQ ID NO: 177782 - DNA, 31 bp, Homo sapiens; identical to SEQ ID NO: 88618
  chr15:74230145-74230176
  hypo

SEQ ID NO: 177783 - DNA, 31 bp, Homo sapiens; identical to SEQ ID NO: 88619
  chr15:74246982-74247013
  hypo

SEQ ID NO: 177784 - DNA, 409 bp, Homo sapiens; identical to SEQ ID NO: 88620
  chr15:74315316-74315725
  hypo

SEQ ID NO: 177785 - DNA, 30 bp, Homo sapiens; identical to SEQ ID NO: 28357
  chr15:74332762-74332792
  hypo

SEQ ID NO: 177786 - DNA, 117 bp, Homo sapiens
  chr15:74333741-74333858
  hypo
accgagttggaaaggcgagacagcagtgtgggctcacccggagcaagacgtgtgaaatcagcttttgacagcgtggctgaatgaggatctggagatgcgaggcgctgggcagactct

SEQ ID NO: 177787 - DNA, 15 bp, Homo sapiens
  chr15:74427056-74427071
  hypo
cgagaaaagctaccc

SEQ ID NO: 177788 - DNA, 28 bp, Homo sapiens
  chr15:74441682-74441710
  hypo
atgtttggccgggcgcggtgactcacac

SEQ ID NO: 177789 - DNA, 28 bp, Homo sapiens
  chr15:74441949-74441977
  hypo
ctgggagacagagcgacactctgtctca

SEQ ID NO: 177790 - DNA, 30 bp, Homo sapiens; identical to SEQ ID NO: 52265
  chr15:74473110-74473140
  hypo

SEQ ID NO: 177791 - DNA, 31 bp, Homo sapiens; identical to SEQ ID NO: 88623
  chr15:74634325-74634356
  hypo

SEQ ID NO: 177792 - DNA, 31 bp, Homo sapiens; identical to SEQ ID NO: 28358
  chr15:74636045-74636076
  hypo

SEQ ID NO: 177793 - DNA, 30 bp, Homo sapiens
  chr15:74640343-74640373
  hypo
ccacatcttcagggtcgatgacataaaccg

SEQ ID NO: 177794 - DNA, 163 bp, Homo sapiens; identical to SEQ ID NO: 28359
  chr15:74679804-74679967
  hypo

SEQ ID NO: 177795 - DNA, 30 bp, Homo sapiens
  chr15:74680383-74680413
  hypo
ccacgtgggcctttccgctgggcctgcctt

SEQ ID NO: 177796 - DNA, 43 bp, Homo sapiens; identical to SEQ ID NO: 88626
  chr15:74688409-74688452
  hypo

SEQ ID NO: 177797 - DNA, 30 bp, Homo sapiens
  chr15:74691492-74691522
  hypo
gcctggaaaacatagcgcgacctcatctct

SEQ ID NO: 177798 - DNA, 30 bp, Homo sapiens
  chr15:74701412-74701442
  hypo
ctcgagcaagcagcacgctgctgaggagtc

SEQ ID NO: 177799 - DNA, 175 bp, Homo sapiens; identical to SEQ ID NO: 88627
  chr15:74702941-74703116
  hypo

SEQ ID NO: 177800 - DNA, 30 bp, Homo sapiens; identical to SEQ ID NO: 28360
  chr15:74704408-74704438
  hypo

SEQ ID NO: 177801 - DNA, 389 bp, Homo sapiens; identical to SEQ ID NO: 126049
  chr15:74725113-74725502
  hypo

SEQ ID NO: 177802 - DNA, 680 bp, Homo sapiens; identical to SEQ ID NO: 126050
  chr15:74725548-74726228
  hypo

SEQ ID NO: 177803 - DNA, 30 bp, Homo sapiens
  chr15:74727400-74727430
  hypo
cctagacacgattcacgcactgcagacacc

SEQ ID NO: 177804 - DNA, 30 bp, Homo sapiens; identical to SEQ ID NO: 88630
  chr15:74751123-74751153
  hypo

SEQ ID NO: 177805 - DNA, 40 bp, Homo sapiens; identical to SEQ ID NO: 88631
  chr15:74818766-74818806
  hypo

SEQ ID NO: 177806 - DNA, 39 bp, Homo sapiens; identical to SEQ ID NO: 88632
  chr15:74819045-74819084
  hypo

SEQ ID NO: 177807 - DNA, 32 bp, Homo sapiens
  chr15:74839795-74839827
  hypo
ttacaggcgtgagccaccgcgcctaccctgac

SEQ ID NO: 177808 - DNA, 114 bp, Homo sapiens
  chr15:74903824-74903938
  hypo
gcctccggcactgcccgaagacggcttgccagctcggccctctgctgcctgctttctgccagctgctcccacaggtccttctctgcccgcctccagtcccgctcgggggccctg

SEQ ID NO: 177809 - DNA, 31 bp, Homo sapiens
  chr15:74911444-74911475
  hypo
cctcttcaggagcaaccgggaagccccagca

SEQ ID NO: 177810 - DNA, 177 bp, Homo sapiens; identical to SEQ ID NO: 126055
  chr15:74912312-74912489
  hypo

SEQ ID NO: 177811 - DNA, 126 bp, Homo sapiens; identical to SEQ ID NO: 88634
  chr15:74913936-74914062
  hypo

SEQ ID NO: 177812 - DNA, 592 bp, Homo sapiens; identical to SEQ ID NO: 88635
  chr15:75091222-75091814
  hypo

SEQ ID NO: 177813 - DNA, 30 bp, Homo sapiens
  chr15:75092768-75092798
  hypo
cagatggactctgtacgcgcctcattaaac

SEQ ID NO: 177814 - DNA, 254 bp, Homo sapiens
  chr15:75093182-75093436
  hypo
ccgagggaacaaagtcgccgtcaagtgcattaagaacgacgccactgcccaggccttcctggctgaagcctcagtcatgacgtgagtgggggcggggtaggggggaggttggcctaggttaggagtgaggcaccagcttcccctttctgaccactctcgtcctgccccaggcaactgcggcatagcaacctggtgcagctcctgggcgtgatcgtggaggagaagggcgggctctacatcgtcactgagtacat

SEQ ID NO: 177815 - DNA, 184 bp, Homo sapiens
  chr15:75094767-75094951
  hypo
tggcacctggacgccgccatgcggccctccttcctacagctccgagagcagcttgagcacatcaaaacccacgagctgcacctgtgacggctggcctccgcctgggtcatgggcctgtggggactgaacctggaagatcatggacctggtgcccctgctcactgggcccgagcctgaactgagc

SEQ ID NO: 177816 - DNA, 30 bp, Homo sapiens; identical to SEQ ID NO: 28363
  chr15:75118006-75118036
  hypo

SEQ ID NO: 177817 - DNA, 30 bp, Homo sapiens; identical to SEQ ID NO: 88638
  chr15:75132698-75132728
  hypo

SEQ ID NO: 177818 - DNA, 104 bp, Homo sapiens; identical to SEQ ID NO: 88639
  chr15:75158700-75158804
  hypo

SEQ ID NO: 177819 - DNA, 43 bp, Homo sapiens; identical to SEQ ID NO: 28365
  chr15:75158923-75158966
  hypo

SEQ ID NO: 177820 - DNA, 30 bp, Homo sapiens; identical to SEQ ID NO: 88641
  chr15:75190199-75190229
  hypo

SEQ ID NO: 177821 - DNA, 30 bp, Homo sapiens
  chr15:75196868-75196898
  hypo
gcagagtggaagatcgtagaacagaccaga

SEQ ID NO: 177822 - DNA, 88 bp, Homo sapiens; identical to SEQ ID NO: 88642
  chr15:75205463-75205551
  hypo

SEQ ID NO: 177823 - DNA, 143 bp, Homo sapiens; identical to SEQ ID NO: 88643
  chr15:75221040-75221183
  hypo

SEQ ID NO: 177824 - DNA, 268 bp, Homo sapiens; identical to SEQ ID NO: 52284
  chr15:75248822-75249090
  hypo

SEQ ID NO: 177825 - DNA, 59 bp, Homo sapiens; identical to SEQ ID NO: 88645
  chr15:75293193-75293252
  hypo

SEQ ID NO: 177826 - DNA, 33 bp, Homo sapiens; identical to SEQ ID NO: 88646
  chr15:75413014-75413047
  hypo

SEQ ID NO: 177827 - DNA, 30 bp, Homo sapiens; identical to SEQ ID NO: 88647
  chr15:75490773-75490803
  hypo

SEQ ID NO: 177828 - DNA, 104 bp, Homo sapiens; identical to SEQ ID NO: 88648
  chr15:75498357-75498461
  hypo

SEQ ID NO: 177829 - DNA, 114 bp, Homo sapiens
  chr15:75500844-75500958
  hypo
tgtctcagctgcagcgcttcgatcgcacccaccggtgccccttcccccatgtggtgcgagctggcgccatcttcgtgcccattcacctggtgaaggagcggctcttccctcggc

SEQ ID NO: 177830 - DNA, 152 bp, Homo sapiens; identical to SEQ ID NO: 88650
  chr15:75594675-75594827
  hypo

SEQ ID NO: 177831 - DNA, 70 bp, Homo sapiens; identical to SEQ ID NO: 28368
  chr15:75614950-75615020
  hypo

SEQ ID NO: 177832 - DNA, 30 bp, Homo sapiens; identical to SEQ ID NO: 126078
  chr15:75639966-75639996
  hypo

SEQ ID NO: 177833 - DNA, 30 bp, Homo sapiens; identical to SEQ ID NO: 126079
  chr15:75640259-75640289
  hypo

SEQ ID NO: 177834 - DNA, 5 bp, Homo sapiens
  chr15:75640490-75640495
  hypo
gggga

SEQ ID NO: 177835 - DNA, 455 bp, Homo sapiens; identical to SEQ ID NO: 126081
  chr15:75640520-75640975
  hypo

SEQ ID NO: 177836 - DNA, 30 bp, Homo sapiens; identical to SEQ ID NO: 88653
  chr15:75646768-75646798
  hypo

SEQ ID NO: 177837 - DNA, 216 bp, Homo sapiens; identical to SEQ ID NO: 88654
  chr15:75648426-75648642
  hypo

SEQ ID NO: 177838 - DNA, 30 bp, Homo sapiens; identical to SEQ ID NO: 88655
  chr15:75649002-75649032
  hypo

SEQ ID NO: 177839 - DNA, 105 bp, Homo sapiens
  chr15:75664800-75664905
  hypo
tgggctgaaaaagctcgctgttctcaattttagcatgcgttagtataaccgagggaatgtgttaaaaaatacacatttctgaccaggtgcagtgactcatgcctg

SEQ ID NO: 177840 - DNA, 197 bp, Homo sapiens; identical to SEQ ID NO: 28372
  chr15:75672984-75673181
  hypo

SEQ ID NO: 177841 - DNA, 27 bp, Homo sapiens
  chr15:75712725-75712752
  hypo
ttttgtttgttttttctgagacggagt

SEQ ID NO: 177842 - DNA, 30 bp, Homo sapiens
  chr15:75725352-75725382
  hypo
ggctgggggacagcgcgactgtctcaaaaa

SEQ ID NO: 177843 - DNA, 37 bp, Homo sapiens; identical to SEQ ID NO: 28373
  chr15:75726681-75726718
  hypo

SEQ ID NO: 177844 - DNA, 31 bp, Homo sapiens; identical to SEQ ID NO: 10287
  chr15:75745114-75745145
  hypo

SEQ ID NO: 177845 - DNA, 30 bp, Homo sapiens; identical to SEQ ID NO: 126088
  chr15:75745214-75745244
  hypo

SEQ ID NO: 177846 - DNA, 30 bp, Homo sapiens
  chr15:75754924-75754954
  hypo
ttttttttaaagcaacgagttcctttgtta

SEQ ID NO: 177847 - DNA, 259 bp, Homo sapiens; identical to SEQ ID NO: 88661
  chr15:75760808-75761067
  hypo

SEQ ID NO: 177848 - DNA, 31 bp, Homo sapiens; identical to SEQ ID NO: 88662
  chr15:75790554-75790585
  hypo

SEQ ID NO: 177849 - DNA, 206 bp, Homo sapiens; identical to SEQ ID NO: 88663
  chr15:75949259-75949465
  hypo

SEQ ID NO: 177850 - DNA, 31 bp, Homo sapiens; identical to SEQ ID NO: 88664
  chr15:75968616-75968647
  hypo

SEQ ID NO: 177851 - DNA, 220 bp, Homo sapiens; identical to SEQ ID NO: 52300
  chr15:75976175-75976395
  hypo

SEQ ID NO: 177852 - DNA, 127 bp, Homo sapiens
  chr15:75981376-75981503
  hypo
agccttgggccagtcgcaaccctgtgctgcggtggatctgtatggccggccggatggccaccaccttcagcgtggccggggggctggcctgcagtccatcgctgacccggaacgtcaagtcctgtgc

SEQ ID NO: 177853 - DNA, 31 bp, Homo sapiens; identical to SEQ ID NO: 88667
  chr15:75990979-75991010
  hypo

SEQ ID NO: 177854 - DNA, 154 bp, Homo sapiens; identical to SEQ ID NO: 88668
  chr15:75997149-75997303
  hypo

SEQ ID NO: 177855 - DNA, 21 bp, Homo sapiens
  chr15:75999581-75999602
  hypo
gccaccgcgcctggcctccac

SEQ ID NO: 177856 - DNA, 264 bp, Homo sapiens
  chr15:76019476-76019740
  hypo
tacacgtttggctaccggcgcccatacagagtgatggacctcaacccggctcccaaccagtaccagatgccactcttgctggggcccaacacccctgtcagccgagctgctccctgctacagtctggcctccagggacaagaactggttctacaaggaggatgtggcaggaggccctggacctaccacgtacgcccgacctgagccatccatctatcagaaccgcagccctacttacagcatggccaagcgcttcgcctaccct

SEQ ID NO: 177857 - DNA, 187 bp, Homo sapiens; identical to SEQ ID NO: 28376
  chr15:76083846-76084033
  hypo

SEQ ID NO: 177858 - DNA, 17 bp, Homo sapiens
  chr15:76155787-76155804
  hypo
gtttttctttttttttt

SEQ ID NO: 177859 - DNA, 148 bp, Homo sapiens; identical to SEQ ID NO: 88673
  chr15:76197435-76197583
  hypo

SEQ ID NO: 177860 - DNA, 30 bp, Homo sapiens; identical to SEQ ID NO: 88674
  chr15:76444510-76444540
  hypo

SEQ ID NO: 177861 - DNA, 30 bp, Homo sapiens
  chr15:76557916-76557946
  hypo
gacttccacgggtatcgttggcgtagggac

SEQ ID NO: 177862 - DNA, 121 bp, Homo sapiens
  chr15:76558866-76558987
  hypo
ttatagcccccgataaaatccaaacttctactccctttcaatatcaaggaatgaagttagaacaaagtgctattaagcctcaaaaagttcaaatttggccgggtgcggtgactcatgcctg

SEQ ID NO: 177863 - DNA, 30 bp, Homo sapiens; identical to SEQ ID NO: 88675
  chr15:76559644-76559674
  hypo

SEQ ID NO: 177864 - DNA, 31 bp, Homo sapiens; identical to SEQ ID NO: 88676
  chr15:76845087-76845118
  hypo

SEQ ID NO: 177865 - DNA, 43 bp, Homo sapiens
  chr15:77072237-77072280
  hypo
tcaacgggggatcttcgaccaacatgggtgaataggaacagct

SEQ ID NO: 177866 - DNA, 121 bp, Homo sapiens; identical to SEQ ID NO: 88677
  chr15:77072339-77072460
  hypo

SEQ ID NO: 177867 - DNA, 18 bp, Homo sapiens
  chr15:77204539-77204557
  hypo
gttttgttttgctttttg

SEQ ID NO: 177868 - DNA, 393 bp, Homo sapiens
  chr15:77321762-77322155
  hypo
ttccccccagggtggccggggaagcttgacagtcacttcaggtctgctggggtgggccctggctcctggggcaggggcttagcgctgcttcccctctgtttcctcagagtcagaacaaagccaggcagtgcaaggactcggccaccgaggcaggtatgtgggcctggctgccccgtccgaccagggcggaggcctgggcggtactccccacacacacctcctcaccctggggacacacacactccccctggctgcacaatcatgggcgcggcgctctcattccagatatgtgccgtcaaagtaaacgctgtgttcccccattcgccagcccttcttggcgcttcatgtgttcagtcctcacagctgccctccgaggtggctgctgttactgtt

SEQ ID NO: 177869 - DNA, 30 bp, Homo sapiens
  chr15:77322868-77322898
  hypo
cagctggagaaggtccgggctgagtgggag

SEQ ID NO: 177870 - DNA, 30 bp, Homo sapiens; identical to SEQ ID NO: 28378
  chr15:77323550-77323580
  hypo

SEQ ID NO: 177871 - DNA, 31 bp, Homo sapiens; identical to SEQ ID NO: 88681
  chr15:77331121-77331152
  hypo

SEQ ID NO: 177872 - DNA, 35 bp, Homo sapiens; identical to SEQ ID NO: 88682
  chr15:77332739-77332774
  hypo

SEQ ID NO: 177873 - DNA, 35 bp, Homo sapiens; identical to SEQ ID NO: 28379
  chr15:77333013-77333048
  hypo

SEQ ID NO: 177874 - DNA, 32 bp, Homo sapiens; identical to SEQ ID NO: 88684
  chr15:77358027-77358059
  hypo

SEQ ID NO: 177875 - DNA, 26 bp, Homo sapiens
  chr15:77448959-77448985
  hypo
ctgttcctattcggccatcttggctc

SEQ ID NO: 177876 - DNA, 26 bp, Homo sapiens
  chr15:77457818-77457844
  hypo
gtgagccactgcgcccgacccttgga

SEQ ID NO: 177877 - DNA, 184 bp, Homo sapiens
  chr15:77473435-77473619
  hypo
tttgctctgaagttggcaaagcgaggttgccctctcatgcgaatctccatggccaacagctcttcatcactctcatcccaactctcgtgctcctcctccatgttactgaaaagtacatcctcttcactctcctcgccactggaaaactctgggtaacagaaccggcccccttcattactaatca

SEQ ID NO: 177878 - DNA, 30 bp, Homo sapiens
  chr15:77672589-77672619
  hypo
tgtaataatacaggccgatggttaggtcat

SEQ ID NO: 177879 - DNA, 20 bp, Homo sapiens
  chr15:77729918-77729938
  hypo
tttttgttttttgagacgga

SEQ ID NO: 177880 - DNA, 30 bp, Homo sapiens
  chr15:77768431-77768461
  hypo
atgaatacaggagctcgggtgtcagatttc

SEQ ID NO: 177881 - DNA, 30 bp, Homo sapiens
  chr15:77796095-77796125
  hypo
atcaccagaggatctcgttaaaacagattt

SEQ ID NO: 177882 - DNA, 31 bp, Homo sapiens; identical to SEQ ID NO: 28381
  chr15:77841399-77841430
  hypo

SEQ ID NO: 177883 - DNA, 210 bp, Homo sapiens; identical to SEQ ID NO: 88688
  chr15:77880952-77881162
  hypo

SEQ ID NO: 177884 - DNA, 401 bp, Homo sapiens
  chr15:77906717-77907118
  hypo
gggcgggcatggagtcgttgccgcccgcgttggccgcgatgcacaggtacgtgccgttgtcctgtacctgggcgtagcgcacctccagcgtgccatcagggaagactgtgagccgcccattgctcttggctgagaccaggtgctttcggggtgagagccagaggatggcgggcggcgggtcgccatcggcccggcacacaaactgcaccgtgtggccctcgtccacaaacacctgctgggccttgcggtcccggatgcgggcgcggcggcaggtgaagtagttgggcagtagcacatcagggaagtccttgaactccttgccctggacaaactcgggcgtggcgcacgtgggctgctgccggttgaagttgagccgccagcggcgccggaacacccacagg

SEQ ID NO: 177885 - DNA, 131 bp, Homo sapiens
  chr15:77908019-77908150
  hypo
ccagcaggcgcgtctcggtggggatgccctcggggactgccacaaagcgcttgcggtggcacagcacagcgcggtcctgggcggagcactcgcagcggggcgggcagcccgtggccgagcctgacagcact

SEQ ID NO: 177886 - DNA, 205 bp, Homo sapiens; identical to SEQ ID NO: 88690
  chr15:77936321-77936526
  hypo

SEQ ID NO: 177887 - DNA, 31 bp, Homo sapiens; identical to SEQ ID NO: 88691
  chr15:77937833-77937864
  hypo

SEQ ID NO: 177888 - DNA, 277 bp, Homo sapiens
  chr15:78010516-78010793
  hypo
acggaggggtcttgccgtggccctcagcttcacacgcagacctacacaggaagacacgtatgtgtgaacatgcagggacagagctggagaagtgcagcaccccagacacgcgggtttaacagccacatgtatgaatgcacacgctcatgcatacccacgcccatcccatgtatacagaggagcatgcccacgcatggctgtgcatgtgatatgcacacagcgcccacatgtatacacacacgtgtcaacatgcacacctggacgagctcacacacgc

SEQ ID NO: 177889 - DNA, 31 bp, Homo sapiens; identical to SEQ ID NO: 28383
  chr15:78090760-78090791
  hypo

SEQ ID NO: 177890 - DNA, 143 bp, Homo sapiens; identical to SEQ ID NO: 52323
  chr15:78110976-78111119
  hypo

SEQ ID NO: 177891 - DNA, 95 bp, Homo sapiens; identical to SEQ ID NO: 126141
  chr15:78111195-78111290
  hypo

SEQ ID NO: 177892 - DNA, 370 bp, Homo sapiens; identical to SEQ ID NO: 126142
  chr15:78111498-78111868
  hypo

SEQ ID NO: 177893 - DNA, 647 bp, Homo sapiens; identical to SEQ ID NO: 126143
  chr15:78111916-78112563
  hypo

SEQ ID NO: 177894 - DNA, 184 bp, Homo sapiens
  chr15:78159873-78160057
  hypo
gtttgtgtgaatacacgcgtgcatctcctggggtgcacgtgcacctatgttccatatgggtctctatacgtgtgcactgtggggcttcacactgaaacccacccctgtgtgtacacgtctctgttggatccgtgtgcttgcaccgtgtgtctggggagttgcgcgttaccgtgcaagtctctgt

SEQ ID NO: 177895 - DNA, 152 bp, Homo sapiens; identical to SEQ ID NO: 88697
  chr15:78165452-78165604
  hypo

SEQ ID NO: 177896 - DNA, 96 bp, Homo sapiens
  chr15:78181924-78182020
  hypo
ctagtgaggcggaggcgtggagtgtccgtggaagagagcaagagaccctgcaggcagggccgagggcaccctggctttcgtcgccacccaggggtg

SEQ ID NO: 177897 - DNA, 30 bp, Homo sapiens
  chr15:78182333-78182363
  hypo
acggggctggcgagccggctgtaggggaga

SEQ ID NO: 177898 - DNA, 30 bp, Homo sapiens
  chr15:78189699-78189729
  hypo
ggcccgcttcatccacgatggctctgagga

SEQ ID NO: 177899 - DNA, 341 bp, Homo sapiens
  chr15:78189971-78190312
  hypo
ctccccgtggagtgccgagaccagcctggagagccggcaaccgagttctcctgccgggagttggaggccggcagcctagtctatgtccaccgcggtggccctgcacaggacttgacgttctgggtcagcgatggactgcaggccagccccccggcgacgctgaaggtgatggccatccagccggccatacagatccaccgcagcacagggctgcacctggcccaaggctctgccatgcccatcttgcccgccaacctgttggtggagaccaatgccgtggggcaggatgtgagcgtgctgttccgcgttactggagccctgaagttcggggagctgaagaa

SEQ ID NO: 177900 - DNA, 532 bp, Homo sapiens
  chr15:78191121-78191653
  hypo
ccatttgttgctacccgccagggcgagagcagtggtgacgtggcctgggaggaggtacggggtgtcttccgagtggccatcagccgtgaatgaccacgcccctgtgcagaccatcagccggatcttccatgtggcccagggtgggtggcggctgctgactacagactacgtggccttcagcgatgctgactcaggctttgctgacgcccagctggtgctcacccgcaaggacctccctttggcagtatcatggccatggataagcccacgcggcccatctactgcttaacccaggaggacctcaggaagaggcgagtactgttcatgcacttgggctgatcatggcgggatccagctgcaggtgtccgatgggcaacaccaggccactgtgctgctggaggtgcaggcctcggagccctacctccgtgtggccaacggctccagccttgtggtccctcaaggaggccagggcaccatcgacatggccgtgctccacctggacaccagcctcgacatccgcaatggagatgag

SEQ ID NO: 177901 - DNA, 59 bp, Homo sapiens; identical to SEQ ID NO: 88699
  chr15:78193840-78193899
  hypo

SEQ ID NO: 177902 - DNA, 30 bp, Homo sapiens
  chr15:78219391-78219421
  hypo
attcggggagaggggcggggcctgcctact

SEQ ID NO: 177903 - DNA, 173 bp, Homo sapiens; identical to SEQ ID NO: 88700
  chr15:78267622-78267795
  hypo

SEQ ID NO: 177904 - DNA, 172 bp, Homo sapiens
  chr15:78268338-78268510
  hypo
gggtctcacaggctgcgccccctgcatcctcccatcccatctctagccatggatggggcctgtgcctggacgaccctcctgccaaggacatcatcgacttccccttggtgctgcctggcatcccctatgctgtgagccaccagtgccgcctccagtacggggcctactctgc

SEQ ID NO: 177905 - DNA, 30 bp, Homo sapiens
  chr15:78269184-78269214
  hypo
ggatgcagccatggacggcacccggttggg

SEQ ID NO: 177906 - DNA, 38 bp, Homo sapiens
  chr15:78285343-78285381
  hypo
gctctccgcccagccacggcgcccgctcccgaggccat

SEQ ID NO: 177907 - DNA, 39 bp, Homo sapiens; identical to SEQ ID NO: 88702
  chr15:78295564-78295603
  hypo

SEQ ID NO: 177908 - DNA, 28 bp, Homo sapiens
  chr15:78349692-78349720
  hypo
aacctaaacaggctgctatggcggctca

SEQ ID NO: 177909 - DNA, 28 bp, Homo sapiens
  chr15:78349959-78349987
  hypo
cctgggcgacagtgagactctgtctcaa

SEQ ID NO: 177910 - DNA, 94 bp, Homo sapiens
  chr15:78403529-78403623
  hypo
tgaggctcatgggcacgtggacgatggggctcttcctgtagtccattgggacgaggttgggggccagctcatagaatcgcgaatgcagccttgg

SEQ ID NO: 177911 - DNA, 80 bp, Homo sapiens; identical to SEQ ID NO: 28388
  chr15:78450090-78450170
  hypo

SEQ ID NO: 177912 - DNA, 19 bp, Homo sapiens
  chr15:78450289-78450308
  hypo
ccaccgcacctggctggct

SEQ ID NO: 177913 - DNA, 179 bp, Homo sapiens; identical to SEQ ID NO: 28390
  chr15:78463269-78463448
  hypo

SEQ ID NO: 177914 - DNA, 38 bp, Homo sapiens; identical to SEQ ID NO: 88708
  chr15:78487123-78487161
  hypo

SEQ ID NO: 177915 - DNA, 30 bp, Homo sapiens
  chr15:78494129-78494159
  hypo
aaatgcaaggcagaacggtcagaaggggtt

SEQ ID NO: 177916 - DNA, 176 bp, Homo sapiens; identical to SEQ ID NO: 88709
  chr15:78498324-78498500
  hypo

SEQ ID NO: 177917 - DNA, 313 bp, Homo sapiens
  chr15:78501674-78501987
  hypo
gtggcgccgttcttgcgaaatttgtgagcaaggcctgggccacaggcctggagcagcccttccattgctatggcgacccactccagggaggttgtggaaaaactgaagagatggcaacgtgtgcttccggggcgaggcctcctgtgccgggcagacagaggcgtgtgaatgctgcagaactcgtcctactgactttggatccttggttacagctctctgggatagccaggtagaagctgcctccactttgggccgcaatgttaccaaatggcccctgagctctgggttcaggcagcgacggcaaacgagggac

SEQ ID NO: 177918 - DNA, 22 bp, Homo sapiens
  chr15:78509925-78509947
  hypo
gagatggagtcttcactctgtc

SEQ ID NO: 177919 - DNA, 82 bp, Homo sapiens; identical to SEQ ID NO: 28393
  chr15:78510186-78510268
  hypo

SEQ ID NO: 177920 - DNA, 53 bp, Homo sapiens; identical to SEQ ID NO: 88713
  chr15:78526012-78526065
  hypo

SEQ ID NO: 177921 - DNA, 30 bp, Homo sapiens
  chr15:78531298-78531328
  hypo
aaactcttattgggtcggggggtccttgct

SEQ ID NO: 177922 - DNA, 30 bp, Homo sapiens; identical to SEQ ID NO: 88714
  chr15:78552597-78552627
  hypo

SEQ ID NO: 177923 - DNA, 79 bp, Homo sapiens; identical to SEQ ID NO: 88715
  chr15:78554708-78554787
  hypo

SEQ ID NO: 177924 - DNA, 46 bp, Homo sapiens
  chr15:78555194-78555240
  hypo
cacatgcccattttacgaatgcctatggtcccgagtactaaatctg

SEQ ID NO: 177925 - DNA, 30 bp, Homo sapiens
  chr15:78555920-78555950
  hypo
gactccctgagcacccgttgggagctgggg

SEQ ID NO: 177926 - DNA, 150 bp, Homo sapiens; identical to SEQ ID NO: 88717
  chr15:78566543-78566693
  hypo

SEQ ID NO: 177927 - DNA, 27 bp, Homo sapiens
  chr15:78569543-78569570
  hypo
gagacaggggtcttgctctgtcgccca

SEQ ID NO: 177928 - DNA, 26 bp, Homo sapiens
  chr15:78569689-78569715
  hypo
gtttcgccatgttgcccagacttgtg

SEQ ID NO: 177929 - DNA, 33 bp, Homo sapiens; identical to SEQ ID NO: 88720
  chr15:78570999-78571032
  hypo

SEQ ID NO: 177930 - DNA, 119 bp, Homo sapiens; identical to SEQ ID NO: 88721
  chr15:78577625-78577744
  hypo

SEQ ID NO: 177931 - DNA, 215 bp, Homo sapiens; identical to SEQ ID NO: 88722
  chr15:78596057-78596272
  hypo

SEQ ID NO: 177932 - DNA, 30 bp, Homo sapiens; identical to SEQ ID NO: 88723
  chr15:78601931-78601961
  hypo

SEQ ID NO: 177933 - DNA, 31 bp, Homo sapiens; identical to SEQ ID NO: 28397
  chr15:78605856-78605887
  hypo

SEQ ID NO: 177934 - DNA, 31 bp, Homo sapiens; identical to SEQ ID NO: 88725
  chr15:78612008-78612039
  hypo

SEQ ID NO: 177935 - DNA, 31 bp, Homo sapiens; identical to SEQ ID NO: 28398
  chr15:78615520-78615551
  hypo

SEQ ID NO: 177936 - DNA, 30 bp, Homo sapiens; identical to SEQ ID NO: 28399
  chr15:78679678-78679708
  hypo

SEQ ID NO: 177937 - DNA, 98 bp, Homo sapiens
  chr15:78681250-78681348
  hypo
caacaagagcgaaacttcgtctcagaaaacaaaaacaaaaaaactccacttgagagcagatgcttaagtacgatgtagcttcacgtcccgatgaaagt

SEQ ID NO: 177938 - DNA, 189 bp, Homo sapiens; identical to SEQ ID NO: 88728
  chr15:78698063-78698252
  hypo

SEQ ID NO: 177939 - DNA, 189 bp, Homo sapiens; identical to SEQ ID NO: 28400
  chr15:78699263-78699452
  hypo

SEQ ID NO: 177940 - DNA, 29 bp, Homo sapiens
  chr15:78740773-78740802
  hypo
atcacgccgggcccaatggcaatatattt

SEQ ID NO: 177941 - DNA, 30 bp, Homo sapiens
  chr15:78787193-78787223
  hypo
cttgagccatgtgcccggcccccactgtta

SEQ ID NO: 177942 - DNA, 31 bp, Homo sapiens; identical to SEQ ID NO: 28401
  chr15:78832918-78832949
  hypo

SEQ ID NO: 177943 - DNA, 30 bp, Homo sapiens
  chr15:78859304-78859334
  hypo
aaatggcgggccgggcgcggtggctcacgc

SEQ ID NO: 177944 - DNA, 586 bp, Homo sapiens; identical to SEQ ID NO: 52341
  chr15:78912441-78913027
  hypo

SEQ ID NO: 177945 - DNA, 375 bp, Homo sapiens; identical to SEQ ID NO: 52342
  chr15:78913094-78913469
  hypo

SEQ ID NO: 177946 - DNA, 122 bp, Homo sapiens; identical to SEQ ID NO: 126166
  chr15:78913480-78913602
  hypo

SEQ ID NO: 177947 - DNA, 153 bp, Homo sapiens
  chr15:78922144-78922297
  hypo
tgcagttctgctggtcgaagggaaagtacttcacctcaatcttgcaggcgctcttgtagatggcagggggcagccacaggacgctgccgttggaccggactatcaagttggtgtagacagacacctcataggtcccgtcggcgctgggcaggg

SEQ ID NO: 177948 - DNA, 22 bp, Homo sapiens
  chr15:79007656-79007678
  hypo
tttttgtttgtttttttgagac

SEQ ID NO: 177949 - DNA, 72 bp, Homo sapiens; identical to SEQ ID NO: 28404
  chr15:79031605-79031677
  hypo

SEQ ID NO: 177950 - DNA, 134 bp, Homo sapiens; identical to SEQ ID NO: 88735
  chr15:79050494-79050628
  hypo

SEQ ID NO: 177951 - DNA, 240 bp, Homo sapiens
  chr15:79055677-79055917
  hypo
tacgcccccttctgccgctggcctttgccgggctccccggccccctcaagctcgtcattcctgcctcagacttcacacctgatgtcccttcgatccctgtccttggcatcactgactcctccctcgggtctcaaccccagacccctccttggaaggccttccctgacaccacagcacacgcgccctttccttgtctgtttctccctggcaggtgtgagcaccagccgggcggggcctcgt

SEQ ID NO: 177952 - DNA, 233 bp, Homo sapiens
  chr15:79056238-79056471
  hypo
ctccccccaactcaacggccaggcctcacctccctccaggaagatgtgtaccagctgaggcagggctgggccccgcagggccggtgcgcaggcggcttggcaggcccgggctgacaatggaagggccgcagtggccggaggtcccgtgtgtccacacactgcacgtcccgcactgaggaacctccgccgcagctgcgggagcactggggaccgagagacgtgtatggacacat

SEQ ID NO: 177953 - DNA, 31 bp, Homo sapiens; identical to SEQ ID NO: 88737
  chr15:79066666-79066697
  hypo

SEQ ID NO: 177954 - DNA, 265 bp, Homo sapiens
  chr15:79069813-79070078
  hypo
gccccgtactggaggcggcactggtggcttacatcatagaggacgccaggtggcaccgaggggaagtcgataatgtccttggcaggagggtcgtccaggcacaggccccacccacggctaaagatgggacgggaggatggaggggggcgcagcctgtgagacccatcggagaagccttggtggggccgggacaggaggagaggtgggagggggcacagagccctacaactgtaggaaactccagcctccccgctcggctcagccg

SEQ ID NO: 177955 - DNA, 124 bp, Homo sapiens; identical to SEQ ID NO: 88738
  chr15:79081979-79082103
  hypo

SEQ ID NO: 177956 - DNA, 14 bp, Homo sapiens
  chr15:79082154-79082168
  hypo
ggttcatggctgca

SEQ ID NO: 177957 - DNA, 30 bp, Homo sapiens; identical to SEQ ID NO: 10305
  chr15:79125413-79125443
  hypo

SEQ ID NO: 177958 - DNA, 31 bp, Homo sapiens; identical to SEQ ID NO: 88741
  chr15:79138735-79138766
  hypo

SEQ ID NO: 177959 - DNA, 27 bp, Homo sapiens
  chr15:79152040-79152067
  hypo
agccaccgcgcccggcctttgtttttt

SEQ ID NO: 177960 - DNA, 274 bp, Homo sapiens; identical to SEQ ID NO: 88743
  chr15:79163905-79164179
  hypo

SEQ ID NO: 177961 - DNA, 31 bp, Homo sapiens; identical to SEQ ID NO: 28407
  chr15:79202795-79202826
  hypo

SEQ ID NO: 177962 - DNA, 79 bp, Homo sapiens
  chr15:79208259-79208338
  hypo
cttactaagagccagatgtgacgctgagtatttccataaatcatctcaattctgtccacaaaatcgtgaaggcggccaa

SEQ ID NO: 177963 - DNA, 207 bp, Homo sapiens; identical to SEQ ID NO: 88746
  chr15:79218011-79218218
  hypo

SEQ ID NO: 177964 - DNA, 104 bp, Homo sapiens
  chr15:79222386-79222490
  hypo
catagcattccgcaccgcctgacctagtctagccttgactgtggtctctctgagcctgccagaatgcccgctcttccagttctgctgagcgctgtatccccagg

SEQ ID NO: 177965 - DNA, 102 bp, Homo sapiens; identical to SEQ ID NO: 126173
  chr15:79237307-79237409
  hypo

SEQ ID NO: 177966 - DNA, 31 bp, Homo sapiens; identical to SEQ ID NO: 28410
  chr15:79240714-79240745
  hypo

SEQ ID NO: 177967 - DNA, 31 bp, Homo sapiens; identical to SEQ ID NO: 88749
  chr15:79288611-79288642
  hypo

SEQ ID NO: 177968 - DNA, 126 bp, Homo sapiens; identical to SEQ ID NO: 88750
  chr15:79309572-79309698
  hypo

SEQ ID NO: 177969 - DNA, 134 bp, Homo sapiens; identical to SEQ ID NO: 88751
  chr15:79310061-79310195
  hypo

SEQ ID NO: 177970 - DNA, 30 bp, Homo sapiens
  chr15:79350709-79350739
  hypo
tcctcgatctgctgccgaagctgcttggcc

SEQ ID NO: 177971 - DNA, 18 bp, Homo sapiens
  chr15:79381727-79381745
  hypo
ggctcacccccaccccgc

SEQ ID NO: 177972 - DNA, 1285 bp, Homo sapiens; identical to SEQ ID NO: 10307
  chr15:79382098-79383383
  hypo

SEQ ID NO: 177973 - DNA, 30 bp, Homo sapiens
  chr15:79471379-79471409
  hypo
gtctgagaacaccggcggggagtgggtggt

SEQ ID NO: 177974 - DNA, 112 bp, Homo sapiens
  chr15:79471665-79471777
  hypo
agtaactgccccagccgcctcacagggatgtgaaatccacagcaaaatgagccaaaggtggcctcccgtaaagcacctaccacgggttacgaggcatcgctctgtgcagcca

SEQ ID NO: 177975 - DNA, 30 bp, Homo sapiens; identical to SEQ ID NO: 10310
  chr15:79551660-79551690
  hypo

SEQ ID NO: 177976 - DNA, 30 bp, Homo sapiens; identical to SEQ ID NO: 88754
  chr15:79589981-79590011
  hypo

SEQ ID NO: 177977 - DNA, 17 bp, Homo sapiens
  chr15:79616609-79616626
  hypo
ggcgtgagccactgcac

SEQ ID NO: 177978 - DNA, 144 bp, Homo sapiens; identical to SEQ ID NO: 10313
  chr15:79723975-79724119
  hypo

SEQ ID NO: 177979 - DNA, 209 bp, Homo sapiens; identical to SEQ ID NO: 10314
  chr15:79724351-79724560
  hypo

SEQ ID NO: 177980 - DNA, 81 bp, Homo sapiens; identical to SEQ ID NO: 10315
  chr15:79724606-79724687
  hypo

SEQ ID NO: 177981 - DNA, 91 bp, Homo sapiens; identical to SEQ ID NO: 10316
  chr15:79724701-79724792
  hypo

SEQ ID NO: 177982 - DNA, 761 bp, Homo sapiens; identical to SEQ ID NO: 126188
  chr15:79724863-79725624
  hypo

SEQ ID NO: 177983 - DNA, 30 bp, Homo sapiens; identical to SEQ ID NO: 88760
  chr15:79852971-79853001
  hypo

SEQ ID NO: 177984 - DNA, 31 bp, Homo sapiens; identical to SEQ ID NO: 88761
  chr15:79891742-79891773
  hypo

SEQ ID NO: 177985 - DNA, 1248 bp, Homo sapiens; identical to SEQ ID NO: 52362
  chr15:80215296-80216544
  hypo

SEQ ID NO: 177986 - DNA, 224 bp, Homo sapiens; identical to SEQ ID NO: 88763
  chr15:80216924-80217148
  hypo

SEQ ID NO: 177987 - DNA, 80 bp, Homo sapiens; identical to SEQ ID NO: 88764
  chr15:80217365-80217445
  hypo

SEQ ID NO: 177988 - DNA, 20 bp, Homo sapiens
  chr15:80217744-80217764
  hypo
caccgcgcctggccagtgat

SEQ ID NO: 177989 - DNA, 96 bp, Homo sapiens; identical to SEQ ID NO: 88765
  chr15:80219640-80219736
  hypo

SEQ ID NO: 177990 - DNA, 196 bp, Homo sapiens
  chr15:80295589-80295785
  hypo
aaaaagacatacttttccaattagggtaaacgtgcgattcgcaagggagggtgggggataggagtggtccctctgctacagcacaaggcgtgttcggacatgtctgggcaagtccgggcacaacaagagcgggagggctgctcacaggctagaaacaagaaagtacaaggaggtgaggctccgaaccaaggacaag

SEQ ID NO: 177991 - DNA, 25 bp, Homo sapiens
  chr15:80416209-80416234
  hypo
cccccacacccggtctcaagaatta

SEQ ID NO: 177992 - DNA, 40 bp, Homo sapiens; identical to SEQ ID NO: 88768
  chr15:80434193-80434233
  hypo

SEQ ID NO: 177993 - DNA, 37 bp, Homo sapiens; identical to SEQ ID NO: 28421
  chr15:80451293-80451330
  hypo

SEQ ID NO: 177994 - DNA, 203 bp, Homo sapiens
  chr15:80471842-80472045
  hypo
ctgggacaggcatgggcgtgcattgcatctgagcgtctcggtgggcacgtggtgccttggccccctctgcccacagcctgaccgcccacagctctccctcgctccttggcctgccctgacatcgtgtttgaatcgttcagctccattgcccagtgtccatcccaaggcccggcatgggagaatgggagcgagggctttgctca

SEQ ID NO: 177995 - DNA, 247 bp, Homo sapiens
  chr15:80478407-80478654
  hypo
cctaggtgttggttccggtgagcccagcaactttgtgactgatccttgtcctcctctgttccagggtactgccagggggatggttaccgcatcggctttggccagtgtgctggaaaagtgctgcctgctctcctgccatcatgagattttctctgctcttctggaaacaaagggctcaagcacccctttcaaccctgtgactggggtcctccctcgggctgtaggcctggtccgccattcagtgaca

SEQ ID NO: 177996 - DNA, 30 bp, Homo sapiens; identical to SEQ ID NO: 10322
  chr15:80654042-80654072
  hypo

SEQ ID NO: 177997 - DNA, 30 bp, Homo sapiens; identical to SEQ ID NO: 88773
  chr15:80700805-80700835
  hypo

SEQ ID NO: 177998 - DNA, 193 bp, Homo sapiens; identical to SEQ ID NO: 88774
  chr15:80759863-80760056
  hypo

SEQ ID NO: 177999 - DNA, 30 bp, Homo sapiens; identical to SEQ ID NO: 88775
  chr15:80884056-80884086
  hypo

SEQ ID NO: 178000 - DNA, 114 bp, Homo sapiens
  chr15:80889493-80889607
  hypo
cagtgtccttctagctttagccgagaaagaaaccagtcccagggaatgaatggtggtctccccactcccggcagcactttaggcagcccataagctatgcgagaatgtgaacgc

SEQ ID NO: 178001 - DNA, 236 bp, Homo sapiens
  chr15:80907143-80907379
  hypo
caatgtgcctcaatgcgtgaggataggcgaggtgagctgaggagtgacatctgatttctgggattttcttagaagagatatcctaggctcggggagtgtctaggtgaaagggaaaggacgttttacaccgactgtcgtcatgcattcttgccaagctgcctacagtgaactgactgctggatactccctcagaatctgtcgtccagcctttgagaaaatctcgtggtcacgaattt

SEQ ID NO: 178002 - DNA, 177 bp, Homo sapiens; identical to SEQ ID NO: 28425
  chr15:81041838-81042015
  hypo

SEQ ID NO: 178003 - DNA, 30 bp, Homo sapiens
  chr15:81142328-81142358
  hypo
tggtggggagagggcggcaccgcaagcttt

SEQ ID NO: 178004 - DNA, 371 bp, Homo sapiens
  chr15:81164288-81164659
  hypo
ttgggtcaggcagggcggctgttaagaggacacggccggcattgattctgggagtatcgtttcctccctcccccggcctcccaagcacacctgtgtgggaggtaccaggcagagggcccagtgtgctcctttcagtccccttgcctgtcccacctcactgaactcgcacaaagagcttcactttgaaccgaaaggtcaggggtgaccagacttttcgctaagctggttcaaagggaggagcctgggccgggtgagatagattttggcccttttctcagtgtgggagagtatctgtttgttcctgggcacaactacagtcatattcagaggagaaattgcggagatggcatagaagccgaagctggccaccg

SEQ ID NO: 178005 - DNA, 30 bp, Homo sapiens; identical to SEQ ID NO: 28426
  chr15:81192769-81192799
  hypo

SEQ ID NO: 178006 - DNA, 95 bp, Homo sapiens; identical to SEQ ID NO: 88780
  chr15:81199004-81199099
  hypo

SEQ ID NO: 178007 - DNA, 230 bp, Homo sapiens
  chr15:81224340-81224570
  hypo
ccataacaacgtgaccggcattgcctttgaggacgttccggtgagtgaggcgccagggcagactcccggcaaacccagactttggatggtgattcacaagtcccctgggtcccagagtttgagctattgccaccaccgcaggggttgagaagcctcctccaactaggctgggccatgtcccagtttgctcttcatccaaactggaaaagtacaagcgtaggttgccccac

SEQ ID NO: 178008 - DNA, 30 bp, Homo sapiens
  chr15:81235412-81235442
  hypo
ttttcaactatgtggcgaccatccctgaca

SEQ ID NO: 178009 - DNA, 152 bp, Homo sapiens
  chr15:81235651-81235803
  hypo
tcaggcggaggcaggcgggacagccccgctgcacatgggaaggttgccctggccctcttcactacactcccagcatgatctcatcccctcccacaccttcaatacgatccaagtgctggtggctactatctccagcccggatctccttccta

SEQ ID NO: 178010 - DNA, 30 bp, Homo sapiens; identical to SEQ ID NO: 28427
  chr15:81245851-81245881
  hypo

SEQ ID NO: 178011 - DNA, 121 bp, Homo sapiens; identical to SEQ ID NO: 88782
  chr15:81247851-81247972
  hypo

SEQ ID NO: 178012 - DNA, 47 bp, Homo sapiens
  chr15:81262920-81262967
  hypo
ttcctctctgcttcccggccccaaatgaactccgtagctaactcagc

SEQ ID NO: 178013 - DNA, 30 bp, Homo sapiens
  chr15:81271750-81271780
  hypo
ccttgatctcccaggcgtagctcccatcgc

SEQ ID NO: 178014 - DNA, 208 bp, Homo sapiens; identical to SEQ ID NO: 126210
  chr15:81294106-81294314
  hypo

SEQ ID NO: 178015 - DNA, 170 bp, Homo sapiens
  chr15:81342114-81342284
  hypo
atctggtgcccactccgatatcttttttggtggtggatcatcaagaagaaagcataatacgacttacaaatattcgcttttcagacaaagtagccgataagttgcatgctttggagtttggttggagatcctctggacagacacagtcagaggaacggcgattacaatgc

SEQ ID NO: 178016 - DNA, 30 bp, Homo sapiens; identical to SEQ ID NO: 88784
  chr15:81428880-81428910
  hypo

SEQ ID NO: 178017 - DNA, 30 bp, Homo sapiens; identical to SEQ ID NO: 28429
  chr15:81489145-81489175
  hypo

SEQ ID NO: 178018 - DNA, 183 bp, Homo sapiens
  chr15:81605217-81605400
  hypo
gacagtcagggaaacgtggtctctgagagtgatgggcacataaagccttggtgccagagtgcatcgcatggtgtccaggccgagtctctgtcagatggttagaggcctgggtctaccctgccaggagaggcgtgtttgggtaacaggcagatggagtttggaacacatgaatggctcatcaca

SEQ ID NO: 178019 - DNA, 201 bp, Homo sapiens
  chr15:81605678-81605879
  hypo
ttctgtgggaggtaaccgctgaggtcggtatggaagaatgtgaccaggttggtcttggtgggttccctgtgaaggcaacagcagagctgtgttatgatctgcagcagaggtgctggggacgagcgccaggcaggtgagcagagcccagcccagtggaaatggccatgatacagtgatcgcgtctcatcccttgctgtgccc

SEQ ID NO: 178020 - DNA, 30 bp, Homo sapiens; identical to SEQ ID NO: 88788
  chr15:81625063-81625093
  hypo

SEQ ID NO: 178021 - DNA, 26 bp, Homo sapiens
  chr15:82162735-82162761
  hypo
aagacgcatgcacacatatgtttatt

SEQ ID NO: 178022 - DNA, 44 bp, Homo sapiens
  chr15:82276015-82276059
  hypo
aggcacacgtgagggcgtgattggcaagacggggtagccagctg

SEQ ID NO: 178023 - DNA, 30 bp, Homo sapiens; identical to SEQ ID NO: 126218
  chr15:82339354-82339384
  hypo

SEQ ID NO: 178024 - DNA, 572 bp, Homo sapiens; identical to SEQ ID NO: 10331
  chr15:82339663-82340235
  hypo

SEQ ID NO: 178025 - DNA, 30 bp, Homo sapiens; identical to SEQ ID NO: 28432
  chr15:82379868-82379898
  hypo

SEQ ID NO: 178026 - DNA, 30 bp, Homo sapiens; identical to SEQ ID NO: 88791
  chr15:82452671-82452701
  hypo

SEQ ID NO: 178027 - DNA, 30 bp, Homo sapiens
  chr15:82464978-82465008
  hypo
gaaatggaattaccacgtaaatcaaaggaa

SEQ ID NO: 178028 - DNA, 27 bp, Homo sapiens
  chr15:83261445-83261472
  hypo
aacaattgggccgggcgcggtggttca

SEQ ID NO: 178029 - DNA, 844 bp, Homo sapiens; identical to SEQ ID NO: 10332
  chr15:83316231-83317075
  hypo

SEQ ID NO: 178030 - DNA, 30 bp, Homo sapiens; identical to SEQ ID NO: 88793
  chr15:83361042-83361072
  hypo

SEQ ID NO: 178031 - DNA, 1174 bp, Homo sapiens; identical to SEQ ID NO: 52385
  chr15:83377914-83379088
  hypo

SEQ ID NO: 178032 - DNA, 105 bp, Homo sapiens; identical to SEQ ID NO: 88795
  chr15:83379973-83380078
  hypo

SEQ ID NO: 178033 - DNA, 30 bp, Homo sapiens
  chr15:83431115-83431145
  hypo
tcagtcggtggtctacgaacgtggtggtag

SEQ ID NO: 178034 - DNA, 92 bp, Homo sapiens
  chr15:83440819-83440911
  hypo
ctcacctgcttggtccgtcccaggtgagctgtcctgcactggccggtaggacagctgatagctctccacagtgtcgtcggagtataagctcc

SEQ ID NO: 178035 - DNA, 95 bp, Homo sapiens
  chr15:83459216-83459311
  hypo
cctgcttcttggagaacgagattaacacagtcggttggactccaaagtccatgctttcttcctggcacagagctgccatttgtgtgtgtgtgtgt

SEQ ID NO: 178036 - DNA, 96 bp, Homo sapiens; identical to SEQ ID NO: 88796
  chr15:83523580-83523676
  hypo

SEQ ID NO: 178037 - DNA, 121 bp, Homo sapiens; identical to SEQ ID NO: 28435
  chr15:83572357-83572478
  hypo

SEQ ID NO: 178038 - DNA, 26 bp, Homo sapiens
  chr15:83622337-83622363
  hypo
gggacaggtcgggcgcggtggctcac

SEQ ID NO: 178039 - DNA, 30 bp, Homo sapiens; identical to SEQ ID NO: 52388
  chr15:83627114-83627144
  hypo

SEQ ID NO: 178040 - DNA, 376 bp, Homo sapiens; identical to SEQ ID NO: 52389
  chr15:83654592-83654968
  hypo

SEQ ID NO: 178041 - DNA, 106 bp, Homo sapiens; identical to SEQ ID NO: 52390
  chr15:83655930-83656036
  hypo

SEQ ID NO: 178042 - DNA, 30 bp, Homo sapiens; identical to SEQ ID NO: 52391
  chr15:83656501-83656531
  hypo

SEQ ID NO: 178043 - DNA, 31 bp, Homo sapiens; identical to SEQ ID NO: 88802
  chr15:83665102-83665133
  hypo

SEQ ID NO: 178044 - DNA, 135 bp, Homo sapiens; identical to SEQ ID NO: 52392
  chr15:83680650-83680785
  hypo

SEQ ID NO: 178045 - DNA, 30 bp, Homo sapiens; identical to SEQ ID NO: 52393
  chr15:83695057-83695087
  hypo

SEQ ID NO: 178046 - DNA, 61 bp, Homo sapiens
  chr15:83698962-83699023
  hypo
cccctgagacagcatcttggtcggtcaatgtattcaactcggggtttagggttgacagtaa

SEQ ID NO: 178047 - DNA, 30 bp, Homo sapiens; identical to SEQ ID NO: 52394
  chr15:83722444-83722474
  hypo

SEQ ID NO: 178048 - DNA, 30 bp, Homo sapiens; identical to SEQ ID NO: 52395
  chr15:83735225-83735255
  hypo

SEQ ID NO: 178049 - DNA, 86 bp, Homo sapiens; identical to SEQ ID NO: 10338
  chr15:83775915-83776001
  hypo

SEQ ID NO: 178050 - DNA, 115 bp, Homo sapiens; identical to SEQ ID NO: 10339
  chr15:83776022-83776137
  hypo

SEQ ID NO: 178051 - DNA, 149 bp, Homo sapiens; identical to SEQ ID NO: 10340
  chr15:83776157-83776306
  hypo

SEQ ID NO: 178052 - DNA, 384 bp, Homo sapiens; identical to SEQ ID NO: 10341
  chr15:83776332-83776716
  hypo

SEQ ID NO: 178053 - DNA, 174 bp, Homo sapiens; identical to SEQ ID NO: 52401
  chr15:83776768-83776942
  hypo

SEQ ID NO: 178054 - DNA, 30 bp, Homo sapiens; identical to SEQ ID NO: 52402
  chr15:83777667-83777697
  hypo

SEQ ID NO: 178055 - DNA, 30 bp, Homo sapiens; identical to SEQ ID NO: 52403
  chr15:83801859-83801889
  hypo

SEQ ID NO: 178056 - DNA, 42 bp, Homo sapiens; identical to SEQ ID NO: 28442
  chr15:83827861-83827903
  hypo

SEQ ID NO: 178057 - DNA, 30 bp, Homo sapiens; identical to SEQ ID NO: 52408
  chr15:83912383-83912413
  hypo

SEQ ID NO: 178058 - DNA, 30 bp, Homo sapiens; identical to SEQ ID NO: 52409
  chr15:83950994-83951024
  hypo

SEQ ID NO: 178059 - DNA, 30 bp, Homo sapiens; identical to SEQ ID NO: 52412
  chr15:84006836-84006866
  hypo

SEQ ID NO: 178060 - DNA, 260 bp, Homo sapiens; identical to SEQ ID NO: 126254
  chr15:84034238-84034498
  hypo

SEQ ID NO: 178061 - DNA, 30 bp, Homo sapiens; identical to SEQ ID NO: 52414
  chr15:84042481-84042511
  hypo

SEQ ID NO: 178062 - DNA, 30 bp, Homo sapiens; identical to SEQ ID NO: 52415
  chr15:84103752-84103782
  hypo

SEQ ID NO: 178063 - DNA, 30 bp, Homo sapiens; identical to SEQ ID NO: 52421
  chr15:84178217-84178247
  hypo

SEQ ID NO: 178064 - DNA, 30 bp, Homo sapiens; identical to SEQ ID NO: 52422
  chr15:84228139-84228169
  hypo

SEQ ID NO: 178065 - DNA, 30 bp, Homo sapiens; identical to SEQ ID NO: 52423
  chr15:84250230-84250260
  hypo

SEQ ID NO: 178066 - DNA, 219 bp, Homo sapiens; identical to SEQ ID NO: 126267
  chr15:84322993-84323212
  hypo

SEQ ID NO: 178067 - DNA, 195 bp, Homo sapiens; identical to SEQ ID NO: 126268
  chr15:84323434-84323629
  hypo

SEQ ID NO: 178068 - DNA, 30 bp, Homo sapiens; identical to SEQ ID NO: 52427
  chr15:84573172-84573202
  hypo

SEQ ID NO: 178069 - DNA, 30 bp, Homo sapiens; identical to SEQ ID NO: 88827
  chr15:84683975-84684005
  hypo

SEQ ID NO: 178070 - DNA, 47 bp, Homo sapiens; identical to SEQ ID NO: 10353
  chr15:84748572-84748619
  hypo

SEQ ID NO: 178071 - DNA, 627 bp, Homo sapiens; identical to SEQ ID NO: 10354
  chr15:84748678-84749305
  hypo

SEQ ID NO: 178072 - DNA, 30 bp, Homo sapiens; identical to SEQ ID NO: 52430
  chr15:84820321-84820351
  hypo

SEQ ID NO: 178073 - DNA, 218 bp, Homo sapiens
  chr15:84827425-84827643
  hypo
actggaaaattgggccgcaccatggatgccttgcttccatctcctggcgcacagtatggttcctggatgtgttttgtttaaaccacacgttcttttgaaatttgacctggttgtcaacatttaaaacctgggagattccaccacaaattctgcattttaaagttctcttaaaacacgaggagccagccaggtgtggtggctcacgcctgtaatcccag

SEQ ID NO: 178074 - DNA, 30 bp, Homo sapiens
  chr15:84828010-84828040
  hypo
agtttccctccccagcgcgggctgagcccc

SEQ ID NO: 178075 - DNA, 30 bp, Homo sapiens; identical to SEQ ID NO: 52431
  chr15:84862070-84862100
  hypo

SEQ ID NO: 178076 - DNA, 31 bp, Homo sapiens; identical to SEQ ID NO: 88832
  chr15:84862581-84862612
  hypo

SEQ ID NO: 178077 - DNA, 30 bp, Homo sapiens; identical to SEQ ID NO: 88833
  chr15:84954170-84954200
  hypo

SEQ ID NO: 178078 - DNA, 30 bp, Homo sapiens; identical to SEQ ID NO: 52432
  chr15:85138337-85138367
  hypo

SEQ ID NO: 178079 - DNA, 30 bp, Homo sapiens; identical to SEQ ID NO: 52433
  chr15:85141961-85141991
  hypo

SEQ ID NO: 178080 - DNA, 578 bp, Homo sapiens; identical to SEQ ID NO: 126276
  chr15:85143660-85144238
  hypo

SEQ ID NO: 178081 - DNA, 30 bp, Homo sapiens; identical to SEQ ID NO: 52436
  chr15:85173528-85173558
  hypo

SEQ ID NO: 178082 - DNA, 30 bp, Homo sapiens; identical to SEQ ID NO: 52437
  chr15:85177510-85177540
  hypo

SEQ ID NO: 178083 - DNA, 30 bp, Homo sapiens; identical to SEQ ID NO: 52438
  chr15:85189435-85189465
  hypo

SEQ ID NO: 178084 - DNA, 30 bp, Homo sapiens; identical to SEQ ID NO: 52439
  chr15:85192532-85192562
  hypo

SEQ ID NO: 178085 - DNA, 30 bp, Homo sapiens; identical to SEQ ID NO: 52440
  chr15:85198783-85198813
  hypo

SEQ ID NO: 178086 - DNA, 30 bp, Homo sapiens; identical to SEQ ID NO: 52441
  chr15:85199264-85199294
  hypo

SEQ ID NO: 178087 - DNA, 184 bp, Homo sapiens; identical to SEQ ID NO: 52442
  chr15:85200332-85200516
  hypo

SEQ ID NO: 178088 - DNA, 30 bp, Homo sapiens
  chr15:85204778-85204808
  hypo
ctactgggccgtggccggacgtggtggctc

SEQ ID NO: 178089 - DNA, 30 bp, Homo sapiens; identical to SEQ ID NO: 52444
  chr15:85207731-85207761
  hypo

SEQ ID NO: 178090 - DNA, 30 bp, Homo sapiens; identical to SEQ ID NO: 52445
  chr15:85223340-85223370
  hypo

SEQ ID NO: 178091 - DNA, 124 bp, Homo sapiens; identical to SEQ ID NO: 126293
  chr15:85258868-85258992
  hypo

SEQ ID NO: 178092 - DNA, 30 bp, Homo sapiens; identical to SEQ ID NO: 52450
  chr15:85328132-85328162
  hypo

SEQ ID NO: 178093 - DNA, 30 bp, Homo sapiens; identical to SEQ ID NO: 52451
  chr15:85358579-85358609
  hypo

SEQ ID NO: 178094 - DNA, 75 bp, Homo sapiens; identical to SEQ ID NO: 88849
  chr15:85383064-85383139
  hypo

SEQ ID NO: 178095 - DNA, 30 bp, Homo sapiens; identical to SEQ ID NO: 52452
  chr15:85399690-85399720
  hypo

SEQ ID NO: 178096 - DNA, 83 bp, Homo sapiens; identical to SEQ ID NO: 88851
  chr15:85401075-85401158
  hypo

SEQ ID NO: 178097 - DNA, 30 bp, Homo sapiens; identical to SEQ ID NO: 52453
  chr15:85412526-85412556
  hypo

SEQ ID NO: 178098 - DNA, 31 bp, Homo sapiens; identical to SEQ ID NO: 88853
  chr15:85436148-85436179
  hypo

SEQ ID NO: 178099 - DNA, 30 bp, Homo sapiens; identical to SEQ ID NO: 52454
  chr15:85447871-85447901
  hypo

SEQ ID NO: 178100 - DNA, 90 bp, Homo sapiens; identical to SEQ ID NO: 28447
  chr15:85478274-85478364
  hypo

SEQ ID NO: 178101 - DNA, 438 bp, Homo sapiens; identical to SEQ ID NO: 52456
  chr15:85525135-85525573
  hypo

SEQ ID NO: 178102 - DNA, 30 bp, Homo sapiens; identical to SEQ ID NO: 28448
  chr15:85680329-85680359
  hypo

SEQ ID NO: 178103 - DNA, 102 bp, Homo sapiens
  chr15:85680560-85680662
  hypo
gggactgagaccagacgcgtgtgtccccaggctgcacgttcttcatgtggtgcaggtgaaaggagatgctggtgtatgtgaagcatgcgtgaagggacagtg

SEQ ID NO: 178104 - DNA, 300 bp, Homo sapiens
  chr15:85680888-85681188
  hypo
ctgggtgtgtttgcccgggtctgtttagcctcacgcagatgcctgctcccatctgtcactctttaaaatgctcttagtgaaagcctaaaatgtaaacagaggctgtgaaagcatatcacattcctatctttctctccagcctttgtagacctgcctgatttaatgcagcatcttgacaacaactttaaatactggaaaggactggacgaaatgaagctgcggaacctccgaccacctcctgaatagtgggagacaccacccagagccctgaagctttgttccttcggtcatttggaattc

SEQ ID NO: 178105 - DNA, 152 bp, Homo sapiens; identical to SEQ ID NO: 28450
  chr15:85695658-85695810
  hypo

SEQ ID NO: 178106 - DNA, 121 bp, Homo sapiens; identical to SEQ ID NO: 88860
  chr15:85725511-85725632
  hypo

SEQ ID NO: 178107 - DNA, 43 bp, Homo sapiens; identical to SEQ ID NO: 88861
  chr15:85774089-85774132
  hypo

SEQ ID NO: 178108 - DNA, 30 bp, Homo sapiens
  chr15:85819686-85819716
  hypo
aactatgtaaaattccgttgcatcagtgac

SEQ ID NO: 178109 - DNA, 33 bp, Homo sapiens
  chr15:85886326-85886359
  hypo
cttagcaaatacttggcgaattaaagaatgtat

SEQ ID NO: 178110 - DNA, 27 bp, Homo sapiens
  chr15:86072640-86072667
  hypo
gactccgtctcaaaataaataaataaa

SEQ ID NO: 178111 - DNA, 32 bp, Homo sapiens; identical to SEQ ID NO: 88863
  chr15:86095825-86095857
  hypo

SEQ ID NO: 178112 - DNA, 32 bp, Homo sapiens
  chr15:86096036-86096068
  hypo
gttttttcaccgtgttagccaggatggattta

SEQ ID NO: 178113 - DNA, 30 bp, Homo sapiens; identical to SEQ ID NO: 88865
  chr15:86219060-86219090
  hypo

SEQ ID NO: 178114 - DNA, 117 bp, Homo sapiens
  chr15:86220153-86220270
  hypo
gccctggcataatccgagcatgctctaatgtcttctgtgaacctccttctcagctcagcagcagatgcggccagcaaggcggatctccatcagcatctctccgctcctccttaagtc

SEQ ID NO: 178115 - DNA, 368 bp, Homo sapiens
  chr15:86284346-86284714
  hypo
gcagcttgtcccgcccgagctccctcattgagcaggagaagcagcgcagcctggagaagcagcgccaggacctggccaacctgcagaagcagcaggcccagtacctcgaggagaagcgcaggcgcgagcgtgagtgggaagctcgtgagagggagctgcgggagcgggaggccctcctggcccagcgcgaggaggaggtgcagcaggggcagcaggacctggaaaaggagcgggaggagctccagcagaagaagggcacataccagtatgacctggagcgactgcgtgctgcccagaaacagcttgagagggaacaggagcagctgcgccgggaggcagagcggctcagccagcggcagacagaacgg

SEQ ID NO: 178116 - DNA, 98 bp, Homo sapiens
  chr15:86293193-86293291
  hypo
gctgcctggagtccccgctctgccacttcccagctccccgcccctccctgacagtcaccaaaaagaaagtcctggccaggcgtggtggctcacgccta

SEQ ID NO: 178117 - DNA, 167 bp, Homo sapiens
  chr15:86295445-86295612
  hypo
agtctgcaggtggcgcgcacattcgtcatgatgctgaagagatgagcagagtgcttagtctggggcccagcgcactcatctggaagcatgtcagcggagccgcgggacagctgccacggacggcagtggccccggattcatgtcccgagtctgaagagagctcctcc

SEQ ID NO: 178118 - DNA, 334 bp, Homo sapiens
  chr15:86306284-86306618
  hypo
agggttgggagtctgcgccttaaagggcctggagtacggggtgcccagtgggagagaaagagagagaaggagagaatgttcacagcaagatcacccttagtgggtaagcgggggcctcctgcagccgctggctgctatcccctaggctgtggatccaaccgcaacactggagcaaggggctgccctggaggtcgctcaggttccagctcagcaattccccgccgcttctggacggctgctggccaagcctgtgctctgtgccaggggcgcagacgtgaggatgcccgtggccagctccccagaggcgcctgcaggcaggcggcacactcagggc

SEQ ID NO: 178119 - DNA, 364 bp, Homo sapiens
  chr15:86313541-86313905
  hypo
aggattctcacatgggctgtccggctctggagcctgatctctgttcaaggtgactaatccctgcagggtttgctgtggacgcccaagcagagcctcacgtacccacttccctgctcccagcaggctctgccctgggccgggctccaagcggtactggctagacatcccccttgccttggaacaagagccgccatcaaggcccaagtgctcagtggagacatgttctctgaatccaggtgtctccacagggctctttacctagctggggcaagtgatggcttggaggtggggccgccagtgactcaccctcgagaccaacgcagaggcccaagatgacagcaggacatgccgaaccctaacggaa

SEQ ID NO: 178120 - DNA, 99 bp, Homo sapiens; identical to SEQ ID NO: 88870
  chr15:86332521-86332620
  hypo

SEQ ID NO: 178121 - DNA, 30 bp, Homo sapiens; identical to SEQ ID NO: 88871
  chr15:86675318-86675348
  hypo

SEQ ID NO: 178122 - DNA, 43 bp, Homo sapiens; identical to SEQ ID NO: 88872
  chr15:88493812-88493855
  hypo

SEQ ID NO: 178123 - DNA, 17 bp, Homo sapiens
  chr15:88600097-88600114
  hypo
caagaacacaaagaaat

SEQ ID NO: 178124 - DNA, 264 bp, Homo sapiens; identical to SEQ ID NO: 10360
  chr15:88798724-88798988
  hypo

SEQ ID NO: 178125 - DNA, 1265 bp, Homo sapiens; identical to SEQ ID NO: 10361
  chr15:88799036-88800301
  hypo

SEQ ID NO: 178126 - DNA, 596 bp, Homo sapiens; identical to SEQ ID NO: 52462
  chr15:88800412-88801008
  hypo

SEQ ID NO: 178127 - DNA, 30 bp, Homo sapiens
  chr15:89074572-89074602
  hypo
caaagagccggccccggatattcactgacc

SEQ ID NO: 178128 - DNA, 267 bp, Homo sapiens
  chr15:89179286-89179553
  hypo
gggagaggggcctctcgccctccagtgtgagttgtctcagcctgaggccagtgctgtggatccagagagggccacagagtggccgacttgtacctgttatggtcattacaggtggtcagctgtagctggatgtgtgccttgaaaggctgacaagtttgccctgagtgactcacctactgtcacctgatccaacaagatttgtgggcgtagcctgccgatgggtgacgccagttaaaggtagagcgtcggcaccgggaaaccctggct

SEQ ID NO: 178129 - DNA, 30 bp, Homo sapiens; identical to SEQ ID NO: 28455
  chr15:89180784-89180814
  hypo

SEQ ID NO: 178130 - DNA, 30 bp, Homo sapiens; identical to SEQ ID NO: 88878
  chr15:89198767-89198797
  hypo

SEQ ID NO: 178131 - DNA, 108 bp, Homo sapiens; identical to SEQ ID NO: 126321
  chr15:89248381-89248489
  hypo

SEQ ID NO: 178132 - DNA, 210 bp, Homo sapiens; identical to SEQ ID NO: 126322
  chr15:89248726-89248936
  hypo

SEQ ID NO: 178133 - DNA, 220 bp, Homo sapiens
  chr15:89284710-89284930
  hypo
ggccggcatgcccagcggcggcccagatggggcatgacatcaaaacagcacacgggaaggggcgaggctcccacggccacctcagccccaccctggcaccctggcatgcccctcacgcttcccccggcacccactgcagagtgaccatgacaaaggcaacacctttactgccttctcaggtggcggacgcccgtgaccctcagctcgagaaacccatctg

SEQ ID NO: 178134 - DNA, 329 bp, Homo sapiens; identical to SEQ ID NO: 10369
  chr15:89345997-89346326
  hypo

SEQ ID NO: 178135 - DNA, 447 bp, Homo sapiens; identical to SEQ ID NO: 10370
  chr15:89346346-89346793
  hypo

SEQ ID NO: 178136 - DNA, 342 bp, Homo sapiens; identical to SEQ ID NO: 52473
  chr15:89346881-89347223
  hypo

SEQ ID NO: 178137 - DNA, 30 bp, Homo sapiens
  chr15:89383289-89383319
  hypo
tttgacagggcgcagcgggcctgcctgcag

SEQ ID NO: 178138 - DNA, 137 bp, Homo sapiens
  chr15:89386709-89386846
  hypo
ggacatgtgcagcgccggctggctggccgaccgcagcgtgcgctaccccatctccaaggcccggcccaactgcggtggcaacctcctgggcgtgaggaccgtctacgtgcatgccaaccagacgggctaccccgacc

SEQ ID NO: 178139 - DNA, 228 bp, Homo sapiens
  chr15:89388856-89389084
  hypo
tgaagcccgaggcagcgtgatccttaccgtaaagcccatcttcgaggtctcccccagtcccctggaacccgaggagcccttcacgtttgcccctgaaataggggccactgccttcgctgaggttgagaatgagactggagaggccaccaggccctggggctttcccacacctggcctgggccctgccacggcattcaccagtgaggacctcgtcgtgcaggtgaccgc

SEQ ID NO: 178140 - DNA, 187 bp, Homo sapiens; identical to SEQ ID NO: 88886
  chr15:89404007-89404194
  hypo

SEQ ID NO: 178141 - DNA, 31 bp, Homo sapiens; identical to SEQ ID NO: 88887
  chr15:89421231-89421262
  hypo

SEQ ID NO: 178142 - DNA, 30 bp, Homo sapiens; identical to SEQ ID NO: 88888
  chr15:89424701-89424731
  hypo

SEQ ID NO: 178143 - DNA, 30 bp, Homo sapiens; identical to SEQ ID NO: 88889
  chr15:89454572-89454602
  hypo

SEQ ID NO: 178144 - DNA, 31 bp, Homo sapiens; identical to SEQ ID NO: 88890
  chr15:89460438-89460469
  hypo

SEQ ID NO: 178145 - DNA, 31 bp, Homo sapiens; identical to SEQ ID NO: 28462
  chr15:89538331-89538362
  hypo

SEQ ID NO: 178146 - DNA, 36 bp, Homo sapiens; identical to SEQ ID NO: 88892
  chr15:89605893-89605929
  hypo

SEQ ID NO: 178147 - DNA, 30 bp, Homo sapiens
  chr15:89650779-89650809
  hypo
aaaatattaaaaatacggtagtattgtatg

SEQ ID NO: 178148 - DNA, 140 bp, Homo sapiens
  chr15:89659578-89659718
  hypo
tcccgaactcccagccgtgtttgatggagtgaagctggctgcagtggctgctgtgctgtacgtgatcgtccggtgtttgaacctgaagagccccacagccccacctgacctctacttccaggactcggggctctcacgct

SEQ ID NO: 178149 - DNA, 30 bp, Homo sapiens
  chr15:89690863-89690893
  hypo
gtgagccactgcgcccggctgcatagctct

SEQ ID NO: 178150 - DNA, 30 bp, Homo sapiens; identical to SEQ ID NO: 28463
  chr15:89703308-89703338
  hypo

SEQ ID NO: 178151 - DNA, 19 bp, Homo sapiens
  chr15:89714323-89714342
  hypo
gcaacgagcaaaactccat

SEQ ID NO: 178152 - DNA, 30 bp, Homo sapiens; identical to SEQ ID NO: 88895
  chr15:89760454-89760484
  hypo

SEQ ID NO: 178153 - DNA, 46 bp, Homo sapiens
  chr15:89807366-89807412
  hypo
gatgctttcatttcacgtgagcaaacatagccgaacatagatgctt

SEQ ID NO: 178154 - DNA, 41 bp, Homo sapiens; identical to SEQ ID NO: 28464
  chr15:89809025-89809066
  hypo

SEQ ID NO: 178155 - DNA, 520 bp, Homo sapiens; identical to SEQ ID NO: 88897
  chr15:89876310-89876830
  hypo

SEQ ID NO: 178156 - DNA, 30 bp, Homo sapiens; identical to SEQ ID NO: 88898
  chr15:89880712-89880742
  hypo

SEQ ID NO: 178157 - DNA, 788 bp, Homo sapiens; identical to SEQ ID NO: 52478
  chr15:89905399-89906187
  hypo

SEQ ID NO: 178158 - DNA, 19 bp, Homo sapiens
  chr15:90109241-90109260
  hypo
tgcccggcccattctcgct

SEQ ID NO: 178159 - DNA, 69 bp, Homo sapiens; identical to SEQ ID NO: 28466
  chr15:90171831-90171900
  hypo

SEQ ID NO: 178160 - DNA, 30 bp, Homo sapiens; identical to SEQ ID NO: 28467
  chr15:90174811-90174841
  hypo

SEQ ID NO: 178161 - DNA, 30 bp, Homo sapiens; identical to SEQ ID NO: 28468
  chr15:90176972-90177002
  hypo

SEQ ID NO: 178162 - DNA, 30 bp, Homo sapiens; identical to SEQ ID NO: 88904
  chr15:90191911-90191941
  hypo

SEQ ID NO: 178163 - DNA, 73 bp, Homo sapiens; identical to SEQ ID NO: 88905
  chr15:90192227-90192300
  hypo

SEQ ID NO: 178164 - DNA, 251 bp, Homo sapiens
  chr15:90192510-90192761
  hypo
cccgtgtgccgcgccgcgttgcccatctccaggaggctcagcacctcatccaggccctccacgtcgacctccttcaccccgcacagcactgcgggcacagaaggccgtgagccccagggcaggggccgccagactgaccagccaggagggcaggcagagcagaactagccccaaacctgcccttcctgacccactgctccctccccatgcccacggggtactgcccttcctagttccggcttgaggggctc

SEQ ID NO: 178165 - DNA, 59 bp, Homo sapiens; identical to SEQ ID NO: 88907
  chr15:90192965-90193024
  hypo

SEQ ID NO: 178166 - DNA, 31 bp, Homo sapiens; identical to SEQ ID NO: 88908
  chr15:90193326-90193357
  hypo

SEQ ID NO: 178167 - DNA, 30 bp, Homo sapiens; identical to SEQ ID NO: 88909
  chr15:90196079-90196109
  hypo

SEQ ID NO: 178168 - DNA, 30 bp, Homo sapiens; identical to SEQ ID NO: 88910
  chr15:90207834-90207864
  hypo

SEQ ID NO: 178169 - DNA, 244 bp, Homo sapiens; identical to SEQ ID NO: 88911
  chr15:90214506-90214750
  hypo

SEQ ID NO: 178170 - DNA, 30 bp, Homo sapiens; identical to SEQ ID NO: 88912
  chr15:90292468-90292498
  hypo

SEQ ID NO: 178171 - DNA, 33 bp, Homo sapiens; identical to SEQ ID NO: 28470
  chr15:90296996-90297029
  hypo

SEQ ID NO: 178172 - DNA, 42 bp, Homo sapiens; identical to SEQ ID NO: 88914
  chr15:90317993-90318035
  hypo

SEQ ID NO: 178173 - DNA, 81 bp, Homo sapiens; identical to SEQ ID NO: 88915
  chr15:90342640-90342721
  hypo

SEQ ID NO: 178174 - DNA, 31 bp, Homo sapiens; identical to SEQ ID NO: 88916
  chr15:90344911-90344942
  hypo

SEQ ID NO: 178175 - DNA, 31 bp, Homo sapiens; identical to SEQ ID NO: 88917
  chr15:90346603-90346634
  hypo

SEQ ID NO: 178176 - DNA, 213 bp, Homo sapiens
  chr15:90378766-90378979
  hypo
tgggaactttgatgttgagatcgccaatgttgatgttccgaggaatctctggcaggttgatgtttttcacagcagacacagcccgcgcaggggctgctgaaaggccaccctaagaagaaatgagaggcgagtatgagacaaattctcactgttatctgcttaatgctaaaaaaaaaaaaaaaaaaaaagcaaaaacaaaaacaaacaagcagg

SEQ ID NO: 178177 - DNA, 31 bp, Homo sapiens; identical to SEQ ID NO: 88919
  chr15:90448918-90448949
  hypo

SEQ ID NO: 178178 - DNA, 137 bp, Homo sapiens; identical to SEQ ID NO: 28471
  chr15:90451517-90451654
  hypo

SEQ ID NO: 178179 - DNA, 540 bp, Homo sapiens; identical to SEQ ID NO: 126379
  chr15:90455669-90456209
  hypo

SEQ ID NO: 178180 - DNA, 165 bp, Homo sapiens
  chr15:90501229-90501394
  hypo
cttccgactgagcgacgtgcagtaatttgaaggaacgcattactggtgcacactcttctacctgtccggagggcctctctgccccttcctcccacatgctctaagcttggaggaggagttgctaagtgttaattgggtcctgtttggcagcggatggggtcactg

SEQ ID NO: 178181 - DNA, 130 bp, Homo sapiens
  chr15:90501635-90501765
  hypo
gtccggaggggaggccgtgttagacatggccaggcctgcaagctcagactgcccacggcctcctgacccagaagaaaaatgaaaatgcatatactcattgtcgcagcgcgactgcaacaggcaataccca

SEQ ID NO: 178182 - DNA, 16 bp, Homo sapiens
  chr15:90541279-90541295
  hypo
aaataatagaagtgta

SEQ ID NO: 178183 - DNA, 37 bp, Homo sapiens; identical to SEQ ID NO: 28475
  chr15:90548959-90548996
  hypo

SEQ ID NO: 178184 - DNA, 30 bp, Homo sapiens
  chr15:90564462-90564492
  hypo
gacctgaaagagccccgctgaagcggctca

SEQ ID NO: 178185 - DNA, 30 bp, Homo sapiens; identical to SEQ ID NO: 28476
  chr15:90586506-90586536
  hypo

SEQ ID NO: 178186 - DNA, 93 bp, Homo sapiens; identical to SEQ ID NO: 88927
  chr15:90590717-90590810
  hypo

SEQ ID NO: 178187 - DNA, 197 bp, Homo sapiens; identical to SEQ ID NO: 88928
  chr15:90606045-90606242
  hypo

SEQ ID NO: 178188 - DNA, 506 bp, Homo sapiens
  chr15:90611267-90611773
  hypo
gcgagaagtcctacacgtccaagtacaacctggtgacgcacatcctgggccacaacggcatcaagccacactcgtgcccacactgcagcaagctcttcaagcagcccagccacctgcagacgcacctgctgacgcaccagggcacccggccccacaagtgccaggtatgccacaaggccttcacgcagaccagccacctcaagcgccacatgctgctgcactcggaggtcaagccctacagctgccacttctgcggccgcggcttcgcctaccccagcgagctcaaggcccacgaagtgaagcatgagagtggccgctgccatgtctgcgtcgagtgcggcctggacttctccaccctgacccagctcaagcgccacctggcctcccaccagggccccaccctctaccagtgcctcgagtgtgacaagtccttccactaccgcagccagttgcagaaccacatgctcaagcaccagaacgtgcgacccttcgtgtgcactgaatgc

SEQ ID NO: 178189 - DNA, 154 bp, Homo sapiens; identical to SEQ ID NO: 88930
  chr15:90617274-90617428
  hypo

SEQ ID NO: 178190 - DNA, 30 bp, Homo sapiens; identical to SEQ ID NO: 10391
  chr15:90627537-90627567
  hypo

SEQ ID NO: 178191 - DNA, 69 bp, Homo sapiens; identical to SEQ ID NO: 10392
  chr15:90628226-90628295
  hypo

SEQ ID NO: 178192 - DNA, 30 bp, Homo sapiens; identical to SEQ ID NO: 10393
  chr15:90630474-90630504
  hypo

SEQ ID NO: 178193 - DNA, 370 bp, Homo sapiens; identical to SEQ ID NO: 10394
  chr15:90631579-90631949
  hypo

SEQ ID NO: 178194 - DNA, 30 bp, Homo sapiens; identical to SEQ ID NO: 10395
  chr15:90633802-90633832
  hypo

SEQ ID NO: 178195 - DNA, 82 bp, Homo sapiens; identical to SEQ ID NO: 10396
  chr15:90634776-90634858
  hypo

SEQ ID NO: 178196 - DNA, 30 bp, Homo sapiens; identical to SEQ ID NO: 10397
  chr15:90645565-90645595
  hypo

SEQ ID NO: 178197 - DNA, 33 bp, Homo sapiens
  chr15:90702245-90702278
  hypo
ggcatgagccaccgcgcccggcgcataggcact

SEQ ID NO: 178198 - DNA, 18 bp, Homo sapiens
  chr15:90706029-90706047
  hypo
tctcccttttttattgtc

SEQ ID NO: 178199 - DNA, 28 bp, Homo sapiens
  chr15:90717590-90717618
  hypo
ccaccgcgcccagccccagggctggatt

SEQ ID NO: 178200 - DNA, 28 bp, Homo sapiens
  chr15:90718920-90718948
  hypo
tttttttttttttttttgagacggagtc

SEQ ID NO: 178201 - DNA, 147 bp, Homo sapiens; identical to SEQ ID NO: 88941
  chr15:90719187-90719334
  hypo

SEQ ID NO: 178202 - DNA, 25 bp, Homo sapiens
  chr15:90724716-90724741
  hypo
agcaagactccgtctcaaaaaaaaa

SEQ ID NO: 178203 - DNA, 37 bp, Homo sapiens; identical to SEQ ID NO: 28487
  chr15:90729567-90729604
  hypo

SEQ ID NO: 178204 - DNA, 21 bp, Homo sapiens
  chr15:90741432-90741453
  hypo
gccaccgcgcctggctggtaa

SEQ ID NO: 178205 - DNA, 255 bp, Homo sapiens
  chr15:90746123-90746378
  hypo
aggcagggccctagcggcttcaagtaaccctacctgaacccctgtctgaaatactgcagatgacctgggttcaaatgctacctcagccacttagtaaccatgtgaccttgagcaggctacttaaagtttctgggtcttgatttcttcatctgtaaaacaggtataataacagaacctacctcaaggtagtgaggattaaatcagctcgtgtttgaaaagtcgttaggacagggcctggtacgggaaccgctgaat

SEQ ID NO: 178206 - DNA, 133 bp, Homo sapiens
  chr15:90746747-90746880
  hypo
gaaggcaaaactggagagcagcgaggggaatcgaggggacctgcttcccgaggagcagctagaatacttggttattattaccaatgcagctgcaggacctggtccacttctacaagcccgtgactgttcccag

SEQ ID NO: 178207 - DNA, 37 bp, Homo sapiens; identical to SEQ ID NO: 88947
  chr15:90751190-90751227
  hypo

SEQ ID NO: 178208 - DNA, 19 bp, Homo sapiens
  chr15:90752482-90752501
  hypo
ggaaaagaagagcacaaag

SEQ ID NO: 178209 - DNA, 233 bp, Homo sapiens; identical to SEQ ID NO: 88948
  chr15:90753832-90754065
  hypo

SEQ ID NO: 178210 - DNA, 566 bp, Homo sapiens; identical to SEQ ID NO: 28490
  chr15:90755552-90756118
  hypo

SEQ ID NO: 178211 - DNA, 152 bp, Homo sapiens; identical to SEQ ID NO: 28491
  chr15:90761174-90761326
  hypo

SEQ ID NO: 178212 - DNA, 30 bp, Homo sapiens; identical to SEQ ID NO: 88951
  chr15:90771699-90771729
  hypo

SEQ ID NO: 178213 - DNA, 218 bp, Homo sapiens; identical to SEQ ID NO: 52517
  chr15:90792592-90792810
  hypo

SEQ ID NO: 178214 - DNA, 201 bp, Homo sapiens; identical to SEQ ID NO: 88953
  chr15:90806188-90806389
  hypo

SEQ ID NO: 178215 - DNA, 30 bp, Homo sapiens; identical to SEQ ID NO: 28493
  chr15:90818578-90818608
  hypo

SEQ ID NO: 178216 - DNA, 31 bp, Homo sapiens; identical to SEQ ID NO: 88955
  chr15:90835325-90835356
  hypo

SEQ ID NO: 178217 - DNA, 90 bp, Homo sapiens; identical to SEQ ID NO: 52518
  chr15:90891917-90892007
  hypo

SEQ ID NO: 178218 - DNA, 30 bp, Homo sapiens; identical to SEQ ID NO: 28494
  chr15:90892481-90892511
  hypo

SEQ ID NO: 178219 - DNA, 27 bp, Homo sapiens
  chr15:90896204-90896231
  hypo
cttttttttttttagacggaatttcgc

SEQ ID NO: 178220 - DNA, 375 bp, Homo sapiens
  chr15:90903996-90904371
  hypo
acccacacgggagaacggcccttcaaatgcccggagtgcgggaagggcttcagagatagttctcattttgtagctcacatgagcactcattcaggagagaggcctttcagttgtcctgactgccacaaaagcttcagtcagagctcacatttggtcacgcaccaaagaacacacacaggtgagagaccttttaagtgcgaaaactgtgggaaaggattcgccgacagctccgccctcattaagcaccaacgaatccacaccggagaaagaccctacaaatgtggagagtgtgggaagagcttcaatcagagctcccactttattacccatcagcgaatccacttaggagacaggccctatcgatgtcctgagtgt

SEQ ID NO: 178221 - DNA, 30 bp, Homo sapiens; identical to SEQ ID NO: 88960
  chr15:90904584-90904614
  hypo

SEQ ID NO: 178222 - DNA, 28 bp, Homo sapiens
  chr15:90919363-90919391
  hypo
tttttttttttgagacggagtctcgctc

SEQ ID NO: 178223 - DNA, 27 bp, Homo sapiens
  chr15:90919630-90919657
  hypo
ggcctgagccaccgcacccgacccatc

SEQ ID NO: 178224 - DNA, 31 bp, Homo sapiens
  chr15:90930073-90930104
  hypo
taggcaaagaataaacggaagagggccgggc

SEQ ID NO: 178225 - DNA, 25 bp, Homo sapiens
  chr15:90938840-90938865
  hypo
tgcgcccggccggctaaagagcagt

SEQ ID NO: 178226 - DNA, 121 bp, Homo sapiens; identical to SEQ ID NO: 28497
  chr15:91072202-91072323
  hypo

SEQ ID NO: 178227 - DNA, 38 bp, Homo sapiens; identical to SEQ ID NO: 28498
  chr15:91072382-91072420
  hypo

SEQ ID NO: 178228 - DNA, 96 bp, Homo sapiens
  chr15:91083104-91083200
  hypo
aaacccagaaagcaccggaaaccttgagggtgtgatcacttacgtcgagaagaaattgaaacaagactttcattcttgaaccgttcccctacaaaa

SEQ ID NO: 178229 - DNA, 30 bp, Homo sapiens; identical to SEQ ID NO: 88965
  chr15:91150817-91150847
  hypo

SEQ ID NO: 178230 - DNA, 81 bp, Homo sapiens
  chr15:91162924-91163005
  hypo
aatttggctttacagcgagtaagcccagctttcattgtctcttctcagattcagtccctgtcaggacgccctcgatcctgt

SEQ ID NO: 178231 - DNA, 31 bp, Homo sapiens; identical to SEQ ID NO: 88967
  chr15:91166197-91166228
  hypo

SEQ ID NO: 178232 - DNA, 31 bp, Homo sapiens; identical to SEQ ID NO: 88968
  chr15:91166886-91166917
  hypo

SEQ ID NO: 178233 - DNA, 89 bp, Homo sapiens
  chr15:91185744-91185833
  hypo
gatctccgtccgcaccgaaggcgggcccggagtgggaggctcggcctggggcggcggcaccggagagggcacctcgatgcctgctctga

SEQ ID NO: 178234 - DNA, 54 bp, Homo sapiens
  chr15:91189345-91189399
  hypo
ctgggccagctcccgccgtgtcccagctgctccccattccgtcccatggcccgt

SEQ ID NO: 178235 - DNA, 31 bp, Homo sapiens; identical to SEQ ID NO: 28499
  chr15:91192933-91192964
  hypo

SEQ ID NO: 178236 - DNA, 40 bp, Homo sapiens; identical to SEQ ID NO: 88971
  chr15:91268409-91268449
  hypo

SEQ ID NO: 178237 - DNA, 41 bp, Homo sapiens; identical to SEQ ID NO: 28500
  chr15:91311951-91311992
  hypo

SEQ ID NO: 178238 - DNA, 41 bp, Homo sapiens; identical to SEQ ID NO: 88973
  chr15:91312231-91312272
  hypo

SEQ ID NO: 178239 - DNA, 30 bp, Homo sapiens; identical to SEQ ID NO: 28502
  chr15:91312476-91312506
  hypo

SEQ ID NO: 178240 - DNA, 51 bp, Homo sapiens; identical to SEQ ID NO: 88975
  chr15:91312874-91312925
  hypo

SEQ ID NO: 178241 - DNA, 35 bp, Homo sapiens; identical to SEQ ID NO: 88976
  chr15:91313687-91313722
  hypo

SEQ ID NO: 178242 - DNA, 26 bp, Homo sapiens
  chr15:91328773-91328799
  hypo
tttttttttttttttccggagacaga

SEQ ID NO: 178243 - DNA, 44 bp, Homo sapiens; identical to SEQ ID NO: 88978
  chr15:91365250-91365294
  hypo

SEQ ID NO: 178244 - DNA, 30 bp, Homo sapiens; identical to SEQ ID NO: 88979
  chr15:91368495-91368525
  hypo

SEQ ID NO: 178245 - DNA, 197 bp, Homo sapiens
  chr15:91407798-91407995
  hypo
tgggttgggggatcccgcctggctgctccgccagctcttgtcctgcagaggcccccacttcgcaggtcagatgtgtggttcacctcctgtccagccttcccaggcctgcgcaggagcctaccacctgctcactggtttgtaagtcattcaggggctgggcgcttatagagtcactcaaggcggtgactcacacctgt

SEQ ID NO: 178246 - DNA, 30 bp, Homo sapiens; identical to SEQ ID NO: 88980
  chr15:91410493-91410523
  hypo

SEQ ID NO: 178247 - DNA, 131 bp, Homo sapiens; identical to SEQ ID NO: 126400
  chr15:91414299-91414430
  hypo

SEQ ID NO: 178248 - DNA, 31 bp, Homo sapiens; identical to SEQ ID NO: 10400
  chr15:91414432-91414463
  hypo

SEQ ID NO: 178249 - DNA, 31 bp, Homo sapiens; identical to SEQ ID NO: 28505
  chr15:91419630-91419661
  hypo

SEQ ID NO: 178250 - DNA, 30 bp, Homo sapiens; identical to SEQ ID NO: 28506
  chr15:91421366-91421396
  hypo

SEQ ID NO: 178251 - DNA, 108 bp, Homo sapiens; identical to SEQ ID NO: 88984
  chr15:91423322-91423430
  hypo

SEQ ID NO: 178252 - DNA, 286 bp, Homo sapiens; identical to SEQ ID NO: 88985
  chr15:91425021-91425307
  hypo

SEQ ID NO: 178253 - DNA, 121 bp, Homo sapiens; identical to SEQ ID NO: 126402
  chr15:91427347-91427468
  hypo

SEQ ID NO: 178254 - DNA, 278 bp, Homo sapiens; identical to SEQ ID NO: 52525
  chr15:91427788-91428066
  hypo

SEQ ID NO: 178255 - DNA, 30 bp, Homo sapiens; identical to SEQ ID NO: 88988
  chr15:91433515-91433545
  hypo

SEQ ID NO: 178256 - DNA, 30 bp, Homo sapiens; identical to SEQ ID NO: 88989
  chr15:91434273-91434303
  hypo

SEQ ID NO: 178257 - DNA, 30 bp, Homo sapiens
  chr15:91436123-91436153
  hypo
aagtgcttgaccaccgtggtggtgtttagt

SEQ ID NO: 178258 - DNA, 31 bp, Homo sapiens; identical to SEQ ID NO: 28509
  chr15:91448167-91448198
  hypo

SEQ ID NO: 178259 - DNA, 30 bp, Homo sapiens; identical to SEQ ID NO: 28510
  chr15:91450699-91450729
  hypo

SEQ ID NO: 178260 - DNA, 30 bp, Homo sapiens; identical to SEQ ID NO: 28511
  chr15:91454676-91454706
  hypo

SEQ ID NO: 178261 - DNA, 93 bp, Homo sapiens; identical to SEQ ID NO: 88993
  chr15:91497738-91497831
  hypo

SEQ ID NO: 178262 - DNA, 175 bp, Homo sapiens
  chr15:91500765-91500940
  hypo
gattggagaagcaagcggagcgggaccccttaatgcgactgtagctgacgacggtctcccttgctcaggcatggacagctgggccatgggaccctggaggcagagctggagccacggctgttggaggcgttgcagggcctagtcatggctgaggtggccgcggggggctggcatt

SEQ ID NO: 178263 - DNA, 121 bp, Homo sapiens; identical to SEQ ID NO: 88994
  chr15:91501897-91502018
  hypo

SEQ ID NO: 178264 - DNA, 418 bp, Homo sapiens; identical to SEQ ID NO: 28512
  chr15:91503629-91504047
  hypo

SEQ ID NO: 178265 - DNA, 30 bp, Homo sapiens; identical to SEQ ID NO: 88996
  chr15:91517536-91517566
  hypo

SEQ ID NO: 178266 - DNA, 26 bp, Homo sapiens
  chr15:91529849-91529875
  hypo
agagcgaaactgtcaaaaaagaaaat

SEQ ID NO: 178267 - DNA, 30 bp, Homo sapiens; identical to SEQ ID NO: 28513
  chr15:91542179-91542209
  hypo

SEQ ID NO: 178268 - DNA, 135 bp, Homo sapiens
  chr15:91557049-91557184
  hypo
atcactttgtatttgcgagttcggccagccaatttgtcagcattgacaagacctacagagagaaggaatgcagcccagcaagtcatgggccatctgttatgctagaaacagggaagctgccgggcacagtggttc

SEQ ID NO: 178269 - DNA, 118 bp, Homo sapiens
  chr15:91584150-91584268
  hypo
cttgacacacaggcaaatccacggagacagaaagcagatgagtggcaaccggcgcctggggaaggtgcggaattggaagtgactgcttcgtgggtacggggtttcttttggagggatg

SEQ ID NO: 178270 - DNA, 30 bp, Homo sapiens; identical to SEQ ID NO: 88999
  chr15:91586359-91586389
  hypo

SEQ ID NO: 178271 - DNA, 309 bp, Homo sapiens
  chr15:91840016-91840325
  hypo
caatcattgggctcacgctccttctgcccgatcgctgggctcacgctccttctgcccgatcttgggcgcacgctccttctgcccgatcgttgggcgcacgctccttctgcccgatcgttgggcgcatgctccttctgcccgatcgttgggagcacgctcattctgcccgattgttgggagcacgctccttctgcccgatcgttgggcgcacgctccttctgcccgatcgttgggcgcacgcttcttctgcctgatcgttgggcgcacgctccttctgcctgatcgttgggcgcacgctccttctgcctg

SEQ ID NO: 178272 - DNA, 320 bp, Homo sapiens
  chr15:92006742-92007062
  hypo
cagccatgtgacctgcgtgctccctgccttcacctgccgccatgattggaagctttctgaggccgccttagaagccaagtagatgccaacatcaagcctctaatacagcctgcagaaccgtgagccaatgagagcctttttctttataaattacccagtgtcaggtttttctttataggaatgggagaacagaataatataccaatgtttcactgttagcattaatactacgatgaacacccttgtacagatatcttcgtatacatgtttgattattttcttaagataattactagaaatgggacgggcacggtggctca

SEQ ID NO: 178273 - DNA, 40 bp, Homo sapiens
  chr15:92021562-92021602
  hypo
tgctgggattacaggtgtgagccaccgcgcccggctggga

SEQ ID NO: 178274 - DNA, 18 bp, Homo sapiens
  chr15:92238882-92238900
  hypo
actcgttggtgctgtcct

SEQ ID NO: 178275 - DNA, 31 bp, Homo sapiens; identical to SEQ ID NO: 89003
  chr15:92279572-92279603
  hypo

SEQ ID NO: 178276 - DNA, 23 bp, Homo sapiens
  chr15:92415799-92415822
  hypo
acgtgcccaagcccaagttggca

SEQ ID NO: 178277 - DNA, 444 bp, Homo sapiens; identical to SEQ ID NO: 10404
  chr15:92459206-92459650
  hypo

SEQ ID NO: 178278 - DNA, 30 bp, Homo sapiens; identical to SEQ ID NO: 89006
  chr15:92463539-92463569
  hypo

SEQ ID NO: 178279 - DNA, 132 bp, Homo sapiens
  chr15:92509293-92509425
  hypo
cgtcattttggcagccgcagggcatttgtgcccagcgaattatgggcagctctgatctgaagtaacaaggttgagtcgagataggttgagaaatgacccagacagaaacaggggcctcggctggcagcccca

SEQ ID NO: 178280 - DNA, 31 bp, Homo sapiens; identical to SEQ ID NO: 89007
  chr15:92621960-92621991
  hypo

SEQ ID NO: 178281 - DNA, 30 bp, Homo sapiens
  chr15:92684232-92684262
  hypo
tatgttctcgtagaacggacaagcctgttc

SEQ ID NO: 178282 - DNA, 990 bp, Homo sapiens; identical to SEQ ID NO: 52533
  chr15:92936663-92937653
  hypo

SEQ ID NO: 178283 - DNA, 364 bp, Homo sapiens; identical to SEQ ID NO: 52534
  chr15:92937696-92938060
  hypo

SEQ ID NO: 178284 - DNA, 171 bp, Homo sapiens; identical to SEQ ID NO: 52535
  chr15:92938122-92938293
  hypo

SEQ ID NO: 178285 - DNA, 213 bp, Homo sapiens; identical to SEQ ID NO: 126416
  chr15:92938315-92938528
  hypo

SEQ ID NO: 178286 - DNA, 31 bp, Homo sapiens; identical to SEQ ID NO: 89012
  chr15:92979028-92979059
  hypo

SEQ ID NO: 178287 - DNA, 195 bp, Homo sapiens
  chr15:92987935-92988130
  hypo
ccctcggtcatccagcgggcctttgaggacttggtcaatgccacgtggcgggagaagctgctgcaacggctgcacagcctcaatggcagcatcctgtggatccctgccttcatggcccggggcggcaaggagcgtgttgagtgggtcaacgagcttatcctgaagcaccacgtcaacgtgcgcactgcatacccc

SEQ ID NO: 178288 - DNA, 30 bp, Homo sapiens
  chr15:92988687-92988717
  hypo
gttatcatcaatcatcgctatctttatgtc

SEQ ID NO: 178289 - DNA, 187 bp, Homo sapiens; identical to SEQ ID NO: 89013
  chr15:93153519-93153706
  hypo

SEQ ID NO: 178290 - DNA, 30 bp, Homo sapiens
  chr15:93166941-93166971
  hypo
ggccttatgagtgaacgacggagaagccgg

SEQ ID NO: 178291 - DNA, 75 bp, Homo sapiens; identical to SEQ ID NO: 89014
  chr15:93176137-93176212
  hypo

SEQ ID NO: 178292 - DNA, 271 bp, Homo sapiens
  chr15:93179833-93180104
  hypo
tggtctgaaatgtgccgcggagataggctgcatggggcttgagagtatagactggaagcaactcgggaaaatcacagggcatagtgagcacatatgacccctgagagggccagggggtgctccagctgagacctccccaacaggtcgccttgagtcatccctggtatgccctgctctgtcacccccactcactcccatccaagagccccactccacgcctcaccggagttcgcagccacttgactttagcgccaaaaaactctttgccctc

SEQ ID NO: 178293 - DNA, 30 bp, Homo sapiens
  chr15:93182117-93182147
  hypo
cacaggcccctcctgcgtcatccacagcac

SEQ ID NO: 178294 - DNA, 31 bp, Homo sapiens; identical to SEQ ID NO: 28520
  chr15:93206673-93206704
  hypo

SEQ ID NO: 178295 - DNA, 17 bp, Homo sapiens
  chr15:93315585-93315602
  hypo
ctgaggtcaggagatcg

SEQ ID NO: 178296 - DNA, 181 bp, Homo sapiens
  chr15:93316008-93316189
  hypo
aaacaaacagctcctcgctttgtgttctccaaagctcagtgtccacgctgtgaagcccgggcaatccaaacagtgagccgtggtttatggaccatcgaggtggtcgctctgcagttctctgagctctctgtgtgcagagctctcactctgttcatctttgcagccacggtgtccgccacga

SEQ ID NO: 178297 - DNA, 29 bp, Homo sapiens
  chr15:93338401-93338430
  hypo
aaaaacaggtggctggctgggcgcggtgc

SEQ ID NO: 178298 - DNA, 121 bp, Homo sapiens
  chr15:93350342-93350463
  hypo
ggcttgagccactacgcctagcccagcatacttttcaactgttcagttttacctggaacaagtaataggttcacatggtccaaattcataagttactaaattttttttttttattgagagg

SEQ ID NO: 178299 - DNA, 44 bp, Homo sapiens
  chr15:93360309-93360353
  hypo
ggatggatggccaggcgcggtggctcatgcctataatcccagca

SEQ ID NO: 178300 - DNA, 124 bp, Homo sapiens
  chr15:93362348-93362472
  hypo
aaacttgaaaattaccggctaacactgtccctaggtgtctaaactcatgcaaaacatttgtttagtactcaaatatcacagctccgcattctgaaaaacatgaaacgtccgtcagaaattacta

SEQ ID NO: 178301 - DNA, 25 bp, Homo sapiens
  chr15:93364650-93364675
  hypo
tctcgggggaaaaaaaaaaaaaaaa

SEQ ID NO: 178302 - DNA, 32 bp, Homo sapiens; identical to SEQ ID NO: 28524
  chr15:93368948-93368980
  hypo

SEQ ID NO: 178303 - DNA, 29 bp, Homo sapiens
  chr15:93372503-93372532
  hypo
acctggccgggactctgtcttaaaaaaca

SEQ ID NO: 178304 - DNA, 22 bp, Homo sapiens
  chr15:93374251-93374273
  hypo
cggcctctttttgaattttttt

SEQ ID NO: 178305 - DNA, 121 bp, Homo sapiens
  chr15:93399861-93399982
  hypo
aaaaagagtctaacaaatctgtgagtcacgttattggttaagatagcagatgaagcacttagtgggagagatgggacaataatttttttttttttttgagacggagttttgctcttgttgc

SEQ ID NO: 178306 - DNA, 24 bp, Homo sapiens
  chr15:93400221-93400245
  hypo
atgagtcaccgcgcccggccaaca

SEQ ID NO: 178307 - DNA, 38 bp, Homo sapiens; identical to SEQ ID NO: 89024
  chr15:93432396-93432434
  hypo

SEQ ID NO: 178308 - DNA, 160 bp, Homo sapiens
  chr15:93433732-93433892
  hypo
gcctgctatatttcttgattatgatctgtccgaatgactaaaggaatttagatttgggaagataaacagggacttgctctataatttgaaaattagtcctaaagaagcatttgggtagcatagttttaactaaaatcctaaacttcgttgccttctaaaa

SEQ ID NO: 178309 - DNA, 20 bp, Homo sapiens
  chr15:93434385-93434405
  hypo
cattttatttattttttgag

SEQ ID NO: 178310 - DNA, 29 bp, Homo sapiens
  chr15:93460771-93460800
  hypo
cagagcgcgacttggtctcaaaaaacaaa

SEQ ID NO: 178311 - DNA, 95 bp, Homo sapiens; identical to SEQ ID NO: 28527
  chr15:93504238-93504333
  hypo

SEQ ID NO: 178312 - DNA, 35 bp, Homo sapiens; identical to SEQ ID NO: 89029
  chr15:93505378-93505413
  hypo

SEQ ID NO: 178313 - DNA, 30 bp, Homo sapiens
  chr15:93524603-93524633
  hypo
atagatgaaattttgcggttggctgaaacg

SEQ ID NO: 178314 - DNA, 78 bp, Homo sapiens
  chr15:93524850-93524928
  hypo
gttctacagtccgcacgaaggtaatcactgaagtgggctatcctatgtagagtcagtgtgtggcggaaaagaaatcac

SEQ ID NO: 178315 - DNA, 138 bp, Homo sapiens; identical to SEQ ID NO: 28528
  chr15:93546306-93546444
  hypo

SEQ ID NO: 178316 - DNA, 82 bp, Homo sapiens; identical to SEQ ID NO: 28529
  chr15:93567907-93567989
  hypo

SEQ ID NO: 178317 - DNA, 666 bp, Homo sapiens
  chr15:93588121-93588787
  hypo
gggccatggtggacacgccaggagatctgcaccccgtgggcggtcccagcccacacatggggaagccgagaggacggagcccgcgcctccctccacatctacgcgtctagcagaacacagggagcagggccaggagcgggacgagggcgcccaggaggggccggggggccaggggcagccccgcagccgccctgcctggcaggtcccgagtcctatcatacaggtgcagtttgtctttgttggagtggagcatcttgacatcctccaacgcgtagtaggcggccagtgtgaagttcacgtcgcccgtggtgaggaggtcgaagacgcaggcctggtagtacaggtcctccaccggcagcttctccttgcacttggccacggctgtctcgtatgggaaggtctcgggggctgtgggtgcagggctggcggctgccagcctgcgggcaccggtgccctcagcattggtgtggaaggcctggaagtcgatctgctggttgagggggcagccccgcaggcagaggtagagaccctggctgtcccagtcctccacagcattgaccacttcctctggcatgcggacggcaaaggtcaggtagcggcccacctggcgcaccacgatggtggtgccgatgtacttggcctggatctccacgtgctggcctgaca

SEQ ID NO: 178318 - DNA, 549 bp, Homo sapiens
  chr15:93595094-93595643
  hypo
cctgtgtccccgctccgctccgtcttcccccattcccaggcacccgaggccctctcagcctctcagtgtccacgcagggcagagacaaagggcagggctgtgccctacagccgccccctcccccttaccttgctggtggcagtggccgctgagccgggcagcacaggcgtgttggtgacctgcacgttcaggtaattattgtcgatgagcggccaggcgccctgcaccttgcaggtctggaagcggtcggtgaaagtcctgaggtgtgggtccccgaagaggccacagtgcgtgtagttgggggtggccgagtgcttgtgaaagctcttctcgtaatggcagatctcggggctgtccgagcgctcctggctgtctccggccggtgggagcgtgcgcaggcgtggctgcgaggtggggccatccttggagcagttgtgctggctcatgaggtcctctatgccatggacggccgagtggtaggccaggtcaccccggcaggtgcgggccgtccgccgcgtgcacagggcgtagctgcgcaaggctgcacag

SEQ ID NO: 178319 - DNA, 24 bp, Homo sapiens
  chr15:93612618-93612642
  hypo
gtgagccaccgcgcctggccgatg

SEQ ID NO: 178320 - DNA, 38 bp, Homo sapiens; identical to SEQ ID NO: 28532
  chr15:93642691-93642729
  hypo

SEQ ID NO: 178321 - DNA, 27 bp, Homo sapiens
  chr15:93663179-93663206
  hypo
cgtgagccaccgcgcctggcctgaata

SEQ ID NO: 178322 - DNA, 30 bp, Homo sapiens; identical to SEQ ID NO: 89036
  chr15:93808641-93808671
  hypo

SEQ ID NO: 178323 - DNA, 45 bp, Homo sapiens; identical to SEQ ID NO: 89037
  chr15:93897784-93897829
  hypo

SEQ ID NO: 178324 - DNA, 101 bp, Homo sapiens
  chr15:93957515-93957616
  hypo
tctcctggagtcgggctgtccagcggctgggctctcccctgactgcccccagctgaattccatgtcacccgccatccattgcctgccggcatctgccggtg

SEQ ID NO: 178325 - DNA, 30 bp, Homo sapiens; identical to SEQ ID NO: 89039
  chr15:93975779-93975809
  hypo

SEQ ID NO: 178326 - DNA, 33 bp, Homo sapiens; identical to SEQ ID NO: 28533
  chr15:94014474-94014507
  hypo

SEQ ID NO: 178327 - DNA, 43 bp, Homo sapiens; identical to SEQ ID NO: 89041
  chr15:94025233-94025276
  hypo

SEQ ID NO: 178328 - DNA, 393 bp, Homo sapiens; identical to SEQ ID NO: 89042
  chr15:94048776-94049169
  hypo

SEQ ID NO: 178329 - DNA, 33 bp, Homo sapiens; identical to SEQ ID NO: 89043
  chr15:94442494-94442527
  hypo

SEQ ID NO: 178330 - DNA, 30 bp, Homo sapiens
  chr15:94663574-94663604
  hypo
tcgagaataagagaacgcaatcatgcatct

SEQ ID NO: 178331 - DNA, 30 bp, Homo sapiens
  chr15:94707501-94707531
  hypo
agtaaagaagtaatacgcaggcctagctgg

SEQ ID NO: 178332 - DNA, 30 bp, Homo sapiens
  chr15:94707881-94707911
  hypo
cagtgaaaagaaatgcgtcccccttttcct

SEQ ID NO: 178333 - DNA, 1066 bp, Homo sapiens; identical to SEQ ID NO: 126431
  chr15:94774273-94775339
  hypo

SEQ ID NO: 178334 - DNA, 42 bp, Homo sapiens
  chr15:94778180-94778222
  hypo
attaaaagccctggtggtggtcgggcacagtggctcacgcct

SEQ ID NO: 178335 - DNA, 221 bp, Homo sapiens; identical to SEQ ID NO: 89047
  chr15:94778461-94778682
  hypo

SEQ ID NO: 178336 - DNA, 44 bp, Homo sapiens; identical to SEQ ID NO: 28535
  chr15:94794562-94794606
  hypo

SEQ ID NO: 178337 - DNA, 30 bp, Homo sapiens
  chr15:94795225-94795255
  hypo
gttgtatgtatttatcgcattttgttcatt

SEQ ID NO: 178338 - DNA, 77 bp, Homo sapiens; identical to SEQ ID NO: 89049
  chr15:94841668-94841745
  hypo

SEQ ID NO: 178339 - DNA, 31 bp, Homo sapiens; identical to SEQ ID NO: 28536
  chr15:94871784-94871815
  hypo

SEQ ID NO: 178340 - DNA, 382 bp, Homo sapiens
  chr15:94881643-94882025
  hypo
aagcattgtatcatgcgacgcacatgcatgtaacacacgcacaatacataattcatgtattatgtttgcaggcattttttttttttttttttttacttccattgatctgaaaaatgtggaggagggtctgccatcagcccttctttttgctttgggcggagtgactggagggacattattcatttcttttggcgtctgtttcaaagctcccagggaggagccgggcgggtcagcggtgtcagcactgaggccagctgagggcctggctgatgtggagttcagctgccctggctgagacaatgttggctgctttagtgcaggtgcggggacgcagcaaagaatggcaactttgtcaatttaatctctacgcctccagtttcac

SEQ ID NO: 178341 - DNA, 30 bp, Homo sapiens; identical to SEQ ID NO: 89052
  chr15:94897961-94897991
  hypo

SEQ ID NO: 178342 - DNA, 77 bp, Homo sapiens
  chr15:94925966-94926043
  hypo
cttggccatttgttggaacagcgtctgtccttgtgcccccaattaatttagcaagcgctgctttgtaaagtgccagt

SEQ ID NO: 178343 - DNA, 28 bp, Homo sapiens
  chr15:94935312-94935340
  hypo
ttataaggccaggcgcggtggctcatgc

SEQ ID NO: 178344 - DNA, 27 bp, Homo sapiens
  chr15:94947824-94947851
  hypo
gcctccgtttcatcttctttcattctt

SEQ ID NO: 178345 - DNA, 57 bp, Homo sapiens
  chr15:95019093-95019150
  hypo
gccaccaaagagggacggtctataggatgttgacatcttaaacgttcaacccgtttc

SEQ ID NO: 178346 - DNA, 248 bp, Homo sapiens
  chr15:95019364-95019612
  hypo
gtggggaaagacagatgactgcggttttctttgtaacaacaagaaaacaactcccgccctctacctcccactgctacgtttggtccagagcctccaagcagggacttgtttgggctaatgaaggccttttcccatctgggacatttgttttcatagcagaggcggctgttaatcagcgtattccaaaaaagccaacgtgctccccagtttgagcgtgtgtttctgtcgccctgctgctgggattgtaa

SEQ ID NO: 178347 - DNA, 391 bp, Homo sapiens
  chr15:95398762-95399153
  hypo
ggtttcctggggctgcggcccatttcggcggacccagcgctgaggcggcggcggcggcgaggcccaagaaataagaagtgggactggcggaggcttgcgcaggagccgctggggctggaggttgaccagttcctggaagacgtgcggctacaggggcgcatgagcggtggcttgttgagagaggccccaaatgaaaaactcttcttcgtggacaccggctccaaggaaaaagggctaagaagagaaccaaagtccagaagaagtcactgcttctcaagaaaccccttcgggttgacctcatcctcgagacacatccaaagtccctgcccccaaagacgtcctcgcccaccaggtcccgaacgccaagaagctcaggcggaaggagcagcta

SEQ ID NO: 178348 - DNA, 30 bp, Homo sapiens
  chr15:95399379-95399409
  hypo
gcctgcacaccaagccgtcccaggcacccg

SEQ ID NO: 178349 - DNA, 20 bp, Homo sapiens
  chr15:95404989-95405009
  hypo
tgcccagcctgtcattttac

SEQ ID NO: 178350 - DNA, 90 bp, Homo sapiens; identical to SEQ ID NO: 89056
  chr15:96007650-96007740
  hypo

SEQ ID NO: 178351 - DNA, 30 bp, Homo sapiens; identical to SEQ ID NO: 10416
  chr15:96284567-96284597
  hypo

SEQ ID NO: 178352 - DNA, 30 bp, Homo sapiens
  chr15:96406806-96406836
  hypo
tctttaacttttatccgattgtatttcttt

SEQ ID NO: 178353 - DNA, 146 bp, Homo sapiens
  chr15:96817335-96817481
  hypo
tatctcctcctgtgagttcttcgcgagtataatccatgcctccatctttgcgtctccactttatcaaagaggctggctcatagttggcacttgattcggattgattaattgattagttaattaacgtatggctaaagcaattaggt

SEQ ID NO: 178354 - DNA, 1254 bp, Homo sapiens; identical to SEQ ID NO: 126439
  chr15:96873420-96874674
  hypo

SEQ ID NO: 178355 - DNA, 31 bp, Homo sapiens; identical to SEQ ID NO: 89062
  chr15:97308493-97308524
  hypo

SEQ ID NO: 178356 - DNA, 30 bp, Homo sapiens; identical to SEQ ID NO: 52581
  chr15:98061086-98061116
  hypo

SEQ ID NO: 178357 - DNA, 213 bp, Homo sapiens; identical to SEQ ID NO: 89064
  chr15:98292426-98292639
  hypo

SEQ ID NO: 178358 - DNA, 30 bp, Homo sapiens
  chr15:98381972-98382002
  hypo
gcttgcgtttcttcacgactttccaaacac

SEQ ID NO: 178359 - DNA, 30 bp, Homo sapiens
  chr15:98382246-98382276
  hypo
agtcacacccccacgcgagcgaggagtccc

SEQ ID NO: 178360 - DNA, 30 bp, Homo sapiens
  chr15:98447563-98447593
  hypo
gaggcggcgcctccgcgcaccgctcccaga

SEQ ID NO: 178361 - DNA, 137 bp, Homo sapiens; identical to SEQ ID NO: 28540
  chr15:98448106-98448243
  hypo

SEQ ID NO: 178362 - DNA, 267 bp, Homo sapiens; identical to SEQ ID NO: 52584
  chr15:98503609-98503876
  hypo

SEQ ID NO: 178363 - DNA, 842 bp, Homo sapiens; identical to SEQ ID NO: 126462
  chr15:98503946-98504788
  hypo

SEQ ID NO: 178364 - DNA, 31 bp, Homo sapiens; identical to SEQ ID NO: 28543
  chr15:98512522-98512553
  hypo

SEQ ID NO: 178365 - DNA, 57 bp, Homo sapiens
  chr15:98757742-98757799
  hypo
ctctgcctgtgccaccggccgtgccgcgggggcatccatcaccgtaagtaccataag

SEQ ID NO: 178366 - DNA, 345 bp, Homo sapiens; identical to SEQ ID NO: 126463
  chr15:98836082-98836427
  hypo

SEQ ID NO: 178367 - DNA, 140 bp, Homo sapiens
  chr15:98947753-98947893
  hypo
tcagtggcagggcaccgtgccatgccagccagcgcacataaagaaggcaaggtggggaagctgggtaggttccggtagaaacaccccatccctgcacagacacctgcgacaccatcaacctgagacgtccacccactgtc

SEQ ID NO: 178368 - DNA, 23 bp, Homo sapiens
  chr15:98971127-98971150
  hypo
aaagctagacattttttttttcg

SEQ ID NO: 178369 - DNA, 518 bp, Homo sapiens; identical to SEQ ID NO: 126466
  chr15:98971413-98971931
  hypo

SEQ ID NO: 178370 - DNA, 260 bp, Homo sapiens
  chr15:99055006-99055266
  hypo
attacaggcgtcagcctcggcacccggctgagatcctgtatttctaaccagctccttggtgatgccttgctgccgggcacaggccacgctaccgagtcgcaaggcaggaaaataaggctcagagacactcaggaacttcaccagggccacccgctcctaagggtcagagccaggatctgaacccaggactaacttactacaaaacccaggtgcttccacaatggcacccatgacacaagttctgacgtcgtgctaaaaga

SEQ ID NO: 178371 - DNA, 124 bp, Homo sapiens
  chr15:99105787-99105911
  hypo
cctggccactggctgcgatgctcataaatgcccaggccaggctgggcacgtcagagcgtccgcgggagctggcgcatgtctatagagctggcagggaggcccgtctcagcgtgagaagaggcct

SEQ ID NO: 178372 - DNA, 31 bp, Homo sapiens; identical to SEQ ID NO: 89072
  chr15:99107215-99107246
  hypo

SEQ ID NO: 178373 - DNA, 213 bp, Homo sapiens
  chr15:99136065-99136278
  hypo
aaaaaaacaaaaagaaaaccaaaggaagttagttaggctcaatcgctcctgcacctggatccctggctgctggtggggtggaggtgggaaaattgcttgagcgcaggagtttgagtccagcctggacaacatagcaaaaccctgtctctaaataaacgaataagtaaataataaaaagcgaattcctataagattttgcgcattttctgatgt

SEQ ID NO: 178374 - DNA, 20 bp, Homo sapiens
  chr15:99153343-99153363
  hypo
tttgtttttgagacagtgtc

SEQ ID NO: 178375 - DNA, 181 bp, Homo sapiens
  chr15:99161541-99161722
  hypo
tctttcacagcacacgataacacatagcagtgggtcctgctgagccctgtgcacggggtatgttgaattcactcacaagatgcactcctgagaaggaggtcgagaaacacaggaacaagctggtgaaagtccgggcgaaaggcaggtaatagtggtggctgtgttgaaacaatttccagtc

SEQ ID NO: 178376 - DNA, 20 bp, Homo sapiens
  chr15:99168894-99168914
  hypo
tcccagacctcagagtcctc

SEQ ID NO: 178377 - DNA, 19 bp, Homo sapiens
  chr15:99169213-99169232
  hypo
ctctaaataaataaataca

SEQ ID NO: 178378 - DNA, 30 bp, Homo sapiens
  chr15:99177799-99177829
  hypo
gcgcccttctctcttcggtctctcaagagt

SEQ ID NO: 178379 - DNA, 358 bp, Homo sapiens
  chr15:99190044-99190402
  hypo
cgaacgatggatacacgttctaatgcagaagtattttagaattagagagtaaaagaaacctactaccttcctttacatcaggtcccttctaccatcctacccgattgtttgagacaaccacttcttatctcgacaattcacaactcttttattagctatcttaaaaaaatttattactggcatcaattagcctgagtcatgaaaccggaccacattaagggcgacacatggtccaatcactgtttgtaaaagtccacgtatttcaaactcctctctcctgccactgctgggctgtttccctctttgaggacctggtctccgcagcatttattcattagatggcagtcctaggggagtc

SEQ ID NO: 178380 - DNA, 30 bp, Homo sapiens; identical to SEQ ID NO: 52591
  chr15:99190542-99190572
  hypo

SEQ ID NO: 178381 - DNA, 510 bp, Homo sapiens; identical to SEQ ID NO: 126470
  chr15:99191215-99191725
  hypo

SEQ ID NO: 178382 - DNA, 210 bp, Homo sapiens; identical to SEQ ID NO: 126471
  chr15:99191748-99191958
  hypo

SEQ ID NO: 178383 - DNA, 583 bp, Homo sapiens; identical to SEQ ID NO: 126472
  chr15:99192161-99192744
  hypo

SEQ ID NO: 178384 - DNA, 1770 bp, Homo sapiens; identical to SEQ ID NO: 126473
  chr15:99192791-99194561
  hypo

SEQ ID NO: 178385 - DNA, 224 bp, Homo sapiens
  chr15:99210727-99210951
  hypo
ctagagaccatggcacgcatgctgtgtgtcgaaggccaggtccgcctgtctgcctctccagcagatactctctggggctatttttttctgcttggttgtcatcctttggtttaaccaggcgccagggctcaggcctggacctgctggattccaaagaagacttcgaggtggccgagcttgtctggcttccagaggagctttctctgtcccgcccgggggagtgg

SEQ ID NO: 178386 - DNA, 30 bp, Homo sapiens; identical to SEQ ID NO: 89081
  chr15:99213129-99213159
  hypo

SEQ ID NO: 178387 - DNA, 77 bp, Homo sapiens
  chr15:99215805-99215882
  hypo
aaaaaaaaaaaaaagtgtaggttagcaaaagtgcctacagttcaaatgcttccatgctaaacgttgtatttcttccg

SEQ ID NO: 178388 - DNA, 31 bp, Homo sapiens; identical to SEQ ID NO: 28550
  chr15:99222035-99222066
  hypo

SEQ ID NO: 178389 - DNA, 30 bp, Homo sapiens
  chr15:99230529-99230559
  hypo
gagtctgcacccaggcgagtgttaaaggcc

SEQ ID NO: 178390 - DNA, 30 bp, Homo sapiens; identical to SEQ ID NO: 89084
  chr15:99237484-99237514
  hypo

SEQ ID NO: 178391 - DNA, 38 bp, Homo sapiens; identical to SEQ ID NO: 28551
  chr15:99244846-99244884
  hypo

SEQ ID NO: 178392 - DNA, 178 bp, Homo sapiens; identical to SEQ ID NO: 89086
  chr15:99250370-99250548
  hypo

SEQ ID NO: 178393 - DNA, 64 bp, Homo sapiens; identical to SEQ ID NO: 89087
  chr15:99250991-99251055
  hypo

SEQ ID NO: 178394 - DNA, 258 bp, Homo sapiens; identical to SEQ ID NO: 89088
  chr15:99254455-99254713
  hypo

SEQ ID NO: 178395 - DNA, 30 bp, Homo sapiens; identical to SEQ ID NO: 89089
  chr15:99254929-99254959
  hypo

SEQ ID NO: 178396 - DNA, 225 bp, Homo sapiens; identical to SEQ ID NO: 28553
  chr15:99256134-99256359
  hypo

SEQ ID NO: 178397 - DNA, 125 bp, Homo sapiens
  chr15:99271449-99271574
  hypo
gatgtgtcctaggagaaatcacgcctgttgttgccgctggccatcacagatcccggtgcctgtctgtgaaaggctggccgggctgggtggggatgagaatggtcgggttgtctagactcagcctg

SEQ ID NO: 178398 - DNA, 210 bp, Homo sapiens; identical to SEQ ID NO: 89091
  chr15:99276211-99276421
  hypo

SEQ ID NO: 178399 - DNA, 30 bp, Homo sapiens
  chr15:99280247-99280277
  hypo
gtattcaaagtcagtcgattttctggaaac

SEQ ID NO: 178400 - DNA, 30 bp, Homo sapiens
  chr15:99287397-99287427
  hypo
ttaaagggacgtcagcgttcaagggccagg

SEQ ID NO: 178401 - DNA, 19 bp, Homo sapiens
  chr15:99295591-99295610
  hypo
aaagaatagagtgtttatt

SEQ ID NO: 178402 - DNA, 19 bp, Homo sapiens
  chr15:99295909-99295928
  hypo
ctcaaagaaaaaaaaaaag

SEQ ID NO: 178403 - DNA, 30 bp, Homo sapiens
  chr15:99305557-99305587
  hypo
ctgggctcaagtgatcgcctgcctcagact

SEQ ID NO: 178404 - DNA, 30 bp, Homo sapiens
  chr15:99328069-99328099
  hypo
tacgttatatgcaagcgctgccattttatt

SEQ ID NO: 178405 - DNA, 342 bp, Homo sapiens
  chr15:99338921-99339263
  hypo
gtcatgagccactgcgcctattatgtgtttcttatagaaaatctctctaattttttaataagcatgtttttacaaatgctgtttcctgagaactgtcgcaccacatgcgacatgccatgcatgcgactggaacatgccagatatttgtgggtggtcccttcgtgtcacctgtgccttcttaccaagtaatttgaaacacccgtgtaaactacctttggcaaataggatagctaaatcaccgctaagatttataatttactttttggatatctgaaacatcaacaatacagccatccatggcgtgttcctctggagtgtggtccgtgccgtctctgcctgctc

SEQ ID NO: 178406 - DNA, 39 bp, Homo sapiens; identical to SEQ ID NO: 89095
  chr15:99340601-99340640
  hypo

SEQ ID NO: 178407 - DNA, 30 bp, Homo sapiens
  chr15:99341253-99341283
  hypo
tctccatgatggcatcgattattcgctcca

SEQ ID NO: 178408 - DNA, 28 bp, Homo sapiens
  chr15:99347979-99348007
  hypo
gcaattgtgcaatctcggctcactgcaa

SEQ ID NO: 178409 - DNA, 181 bp, Homo sapiens
  chr15:99349403-99349584
  hypo
ctattactggtttaccgtgaaggctctatgtccagagtggacaggacaagtggaagagtggcacagggcgaggtgtggggggtggcgtggagctccttttcaggagtctctaagaaggtgggactccagcggcaatgccttgtccatgtgctaagccagccgagggcgcacgaagtgctgt

SEQ ID NO: 178410 - DNA, 173 bp, Homo sapiens; identical to SEQ ID NO: 89096
  chr15:99352650-99352823
  hypo

SEQ ID NO: 178411 - DNA, 30 bp, Homo sapiens
  chr15:99353065-99353095
  hypo
taaagtcacgttccacgtattgtgttctga

SEQ ID NO: 178412 - DNA, 20 bp, Homo sapiens
  chr15:99354251-99354271
  hypo
ggacgcggtggctcacgcct

SEQ ID NO: 178413 - DNA, 121 bp, Homo sapiens; identical to SEQ ID NO: 28558
  chr15:99354750-99354871
  hypo

SEQ ID NO: 178414 - DNA, 30 bp, Homo sapiens
  chr15:99358649-99358679
  hypo
tggggagaggcctggcgcatgaaagcaggc

SEQ ID NO: 178415 - DNA, 30 bp, Homo sapiens
  chr15:99364056-99364086
  hypo
agtacgtttgaattacggaacacctctctt

SEQ ID NO: 178416 - DNA, 30 bp, Homo sapiens
  chr15:99364406-99364436
  hypo
acttctggtgtgagacgcgctacattgcgc

SEQ ID NO: 178417 - DNA, 70 bp, Homo sapiens
  chr15:99364725-99364795
  hypo
tttttggaagagagtcgaaggggaaggggtggcttgccagtcagttgagtgatgcgtgagggaggcgtta

SEQ ID NO: 178418 - DNA, 160 bp, Homo sapiens; identical to SEQ ID NO: 28559
  chr15:99371125-99371285
  hypo

SEQ ID NO: 178419 - DNA, 30 bp, Homo sapiens
  chr15:99390517-99390547
  hypo
ctctttacaggggggcgtcttggtataagt

SEQ ID NO: 178420 - DNA, 94 bp, Homo sapiens
  chr15:99400734-99400828
  hypo
accacgcccagcctacgtctttaaaaataaatgtaaatacccaaggctcacagttccgttcttccatctagtctagcaccgtccagtggaagtt

SEQ ID NO: 178421 - DNA, 43 bp, Homo sapiens
  chr15:99411822-99411865
  hypo
gcactgaccctgaagtcaggtcgcccaggttggaattccagct

SEQ ID NO: 178422 - DNA, 11 bp, Homo sapiens
  chr15:99414271-99414282
  hypo
catgcacaaag

SEQ ID NO: 178423 - DNA, 30 bp, Homo sapiens
  chr15:99419115-99419145
  hypo
atgacaggcctcatacgcatcacgtctgaa

SEQ ID NO: 178424 - DNA, 30 bp, Homo sapiens
  chr15:99422306-99422336
  hypo
ctcgccccagaacgccgaagcagggccggt

SEQ ID NO: 178425 - DNA, 30 bp, Homo sapiens
  chr15:99423189-99423219
  hypo
tgcctgggaaaggggcgtgggaagcatggc

SEQ ID NO: 178426 - DNA, 30 bp, Homo sapiens
  chr15:99426391-99426421
  hypo
acgtttaagacacagcgcttgccacttgaa

SEQ ID NO: 178427 - DNA, 137 bp, Homo sapiens
  chr15:99426894-99427031
  hypo
actcagcgcctgccccggctaggctgtcctcctcctgtgccagccgtgggttccctgagtccctctgcagtcattcatgggtgctgaaaataaagataccctttctgtcgaaagtgttcgccgggctgcctctgcct

SEQ ID NO: 178428 - DNA, 30 bp, Homo sapiens; identical to SEQ ID NO: 89102
  chr15:99429890-99429920
  hypo

SEQ ID NO: 178429 - DNA, 30 bp, Homo sapiens
  chr15:99430505-99430535
  hypo
gatgtgtgggaaatgcggaatatatctaca

SEQ ID NO: 178430 - DNA, 86 bp, Homo sapiens
  chr15:99430911-99430997
  hypo
gagcgggaatgtgagcgttgtttctgtaaccagttttactgaacctcacagatccattatacgacgtgaattttgtgggaataaca

SEQ ID NO: 178431 - DNA, 30 bp, Homo sapiens; identical to SEQ ID NO: 89104
  chr15:99431389-99431419
  hypo

SEQ ID NO: 178432 - DNA, 80 bp, Homo sapiens
  chr15:99433316-99433396
  hypo
cacgaagaggcttagcggaggtggcttctaatatcctatggttctgtgggctcggagatgctactcacccacttgtcaga

SEQ ID NO: 178433 - DNA, 121 bp, Homo sapiens
  chr15:99433455-99433576
  hypo
cccagacagttaagacattctgagtcacaggatgaggttaaaggtcagcacaaaatacaggtcataaagaccttgctgatctagcagatgcagttaaagaagccggcgcaaacccaccaaa

SEQ ID NO: 178434 - DNA, 495 bp, Homo sapiens; identical to SEQ ID NO: 28560
  chr15:99434482-99434977
  hypo

SEQ ID NO: 178435 - DNA, 109 bp, Homo sapiens; identical to SEQ ID NO: 89107
  chr15:99440184-99440293
  hypo

SEQ ID NO: 178436 - DNA, 30 bp, Homo sapiens; identical to SEQ ID NO: 89108
  chr15:99451514-99451544
  hypo

SEQ ID NO: 178437 - DNA, 212 bp, Homo sapiens
  chr15:99451865-99452077
  hypo
gactgtggccaagggcaggtgcgctaacatcgatttctgtgcttctaggaattactccttctacgtcctcgacaaccagaacttgcagcaactgtgggactgggaccaccgcaacctgaccatcaaagcagggaaaatgtactttgctttcaatcccaaattatgtgtttccgaaatttaccgcatggaggaagtgacggggactaaagggc

SEQ ID NO: 178438 - DNA, 145 bp, Homo sapiens
  chr15:99453278-99453423
  hypo
aaatcagaaccgatgcgtgtttggctttggcttgtttcgctggtgtctggatttacctggcgacacttgttgctctgggggatcttagagggaagcacgctgactgacctagggctgaacagcaggctgacgaccagcgccgcct

SEQ ID NO: 178439 - DNA, 109 bp, Homo sapiens; identical to SEQ ID NO: 89110
  chr15:99454575-99454684
  hypo

SEQ ID NO: 178440 - DNA, 30 bp, Homo sapiens; identical to SEQ ID NO: 28563
  chr15:99456401-99456431
  hypo

SEQ ID NO: 178441 - DNA, 408 bp, Homo sapiens
  chr15:99459878-99460286
  hypo
ttggcttttcttttccgagaagacaaaatccccatcaggaagtatgccgacggcaccatcgacattgaggaggtcacagagaaccccaagactgaggtgtgtggtggggagaaagggccttgctgcgcctgccccaaaactgaagccgagaagcaggccgagaaggaggaggctgaataccgcaaagtctttgagaatttcctgcacaactccatcttcgtgcccaggtacccagctcatgtgaaatttcagttggcaaaacccactgctcaggccggttctgttgcctttctccccaccaggtagtgtgtaagtcagcagctggggggtacaatacagtagccactgagacggagccgaaaaagatgacaggttcggtgaagtgagtccctgcggaagccagtcagc

SEQ ID NO: 178442 - DNA, 42 bp, Homo sapiens; identical to SEQ ID NO: 28564
  chr15:99461819-99461861
  hypo

SEQ ID NO: 178443 - DNA, 30 bp, Homo sapiens; identical to SEQ ID NO: 89113
  chr15:99462513-99462543
  hypo

SEQ ID NO: 178444 - DNA, 30 bp, Homo sapiens; identical to SEQ ID NO: 89114
  chr15:99464335-99464365
  hypo

SEQ ID NO: 178445 - DNA, 234 bp, Homo sapiens
  chr15:99465436-99465670
  hypo
caggaacaccacggccgcagacacctacaacatcaccgacccggaagagctggagacagagtaccctttctttgagagcagagtggataacaaggagagaactgtcatttctaaccttcggcctttcacattgtaccgcatcgatatccacagctgcaaccacgaggctgagaagctgggctgcagcgcctccaacttcgtctttgcaaggactatgcccgcaggtatggtatg

SEQ ID NO: 178446 - DNA, 30 bp, Homo sapiens
  chr15:99465930-99465960
  hypo
ctacttggtgcacatcgtgcattcctgctg

SEQ ID NO: 178447 - DNA, 279 bp, Homo sapiens
  chr15:99482497-99482776
  hypo
catggcatacctcaacgccaataagttcgtccacagagaccttgctgcccggaattgcatggtagccgaagatttcacagtcaaaatcggaggtgtgtccttagctttccaggtctgggcaagaactaaactcaggtgttttgaggactttgttggcattagtctgcccctggagaggttttctagtgtgtcccttgagtgcacggactccttcttgggaatgatgtgattgtctccagttgatggtcacaaacctggcacggtcggtcccaatgctga

SEQ ID NO: 178448 - DNA, 30 bp, Homo sapiens
  chr15:99483086-99483116
  hypo
cccttaggtgagggacgatcactgctcact

SEQ ID NO: 178449 - DNA, 30 bp, Homo sapiens; identical to SEQ ID NO: 28565
  chr15:99491944-99491974
  hypo

SEQ ID NO: 178450 - DNA, 312 bp, Homo sapiens; identical to SEQ ID NO: 89116
  chr15:99497067-99497379
  hypo

SEQ ID NO: 178451 - DNA, 30 bp, Homo sapiens; identical to SEQ ID NO: 89117
  chr15:99500688-99500718
  hypo

SEQ ID NO: 178452 - DNA, 30 bp, Homo sapiens; identical to SEQ ID NO: 89118
  chr15:99502669-99502699
  hypo

SEQ ID NO: 178453 - DNA, 275 bp, Homo sapiens; identical to SEQ ID NO: 89119
  chr15:99504098-99504373
  hypo

SEQ ID NO: 178454 - DNA, 138 bp, Homo sapiens
  chr15:99505058-99505196
  hypo
gaccgtgttcgtggccgacctggcctctcctggcctgtttcttaagatgcggagtcacatttcaatggtacgaaaagtggcttcgtaaaatagaagagcagtcactgtggaactaccaaatggcgagatgctcggtgc

SEQ ID NO: 178455 - DNA, 178 bp, Homo sapiens; identical to SEQ ID NO: 28567
  chr15:99506041-99506219
  hypo

SEQ ID NO: 178456 - DNA, 106 bp, Homo sapiens; identical to SEQ ID NO: 89121
  chr15:99512751-99512857
  hypo

SEQ ID NO: 178457 - DNA, 30 bp, Homo sapiens; identical to SEQ ID NO: 89122
  chr15:99514211-99514241
  hypo

SEQ ID NO: 178458 - DNA, 30 bp, Homo sapiens
  chr15:99710524-99710554
  hypo
cttcaatgggcatttcgcacgcaagcaggc

SEQ ID NO: 178459 - DNA, 30 bp, Homo sapiens
  chr15:99791211-99791241
  hypo
agctcttagaacgaacgctcaacgtgggat

SEQ ID NO: 178460 - DNA, 31 bp, Homo sapiens; identical to SEQ ID NO: 28569
  chr15:99947375-99947406
  hypo

SEQ ID NO: 178461 - DNA, 98 bp, Homo sapiens
  chr15:99954582-99954680
  hypo
gccacagtgtgagaacgtgcctcgactcgcctgccggtggacagcacacttggaacaggactggtgtcgccagctgccccagccgaggccaccctaga

SEQ ID NO: 178462 - DNA, 30 bp, Homo sapiens; identical to SEQ ID NO: 126477
  chr15:99955056-99955086
  hypo

SEQ ID NO: 178463 - DNA, 39 bp, Homo sapiens; identical to SEQ ID NO: 10433
  chr15:99955138-99955177
  hypo

SEQ ID NO: 178464 - DNA, 473 bp, Homo sapiens
  chr15:99966716-99967189
  hypo
cctcatggtcacttccaggtgcgcagagtccaggaactgtcccgttttccagatgaggaaatggatgcttttgagagtcacgtcacatgcacggagcacaggtgtgcccgaggccgcgccccgcagcagagctgggattagaatctagctgttttggagccatcgtcttttccgtgatgttctgaggggcctctctgtttcttttgaggagtttcatgctgattattgagacaaggtggttcaggcaagaccgctctcgagcatggacgcaggcacgtaaaagttcatgcacaatcacaccacaggcattccagagcacctcagacgggaggggcctgcgggagggtaaagtcagagggcctgggcgggcggcagatgcagtgatgaggagagagcatcccggggagctactctggggatcggcgtgggaggctggacgaagcagcgtggacggagcacagatgtggtcacag

SEQ ID NO: 178465 - DNA, 31 bp, Homo sapiens; identical to SEQ ID NO: 28572
  chr15:99975076-99975107
  hypo

SEQ ID NO: 178466 - DNA, 99 bp, Homo sapiens
  chr15:99984007-99984106
  hypo
caggtgtgagccactgcgcccagccaggagccgtgcccgctctttcccaaacagctgcccagcctacccctcctctcctccacgcggcctctcaagacc

SEQ ID NO: 178467 - DNA, 235 bp, Homo sapiens; identical to SEQ ID NO: 89127
  chr15:100007567-100007802
  hypo

SEQ ID NO: 178468 - DNA, 30 bp, Homo sapiens
  chr15:100048982-100049012
  hypo
acgtggacagcaaaacggaacgctatagca

SEQ ID NO: 178469 - DNA, 61 bp, Homo sapiens; identical to SEQ ID NO: 52596
  chr15:100273843-100273904
  hypo

SEQ ID NO: 178470 - DNA, 337 bp, Homo sapiens; identical to SEQ ID NO: 52597
  chr15:100273945-100274282
  hypo

SEQ ID NO: 178471 - DNA, 100 bp, Homo sapiens
  chr15:100290728-100290828
  hypo
tgccgacttgccgagcgtttgatgaatatataatcaactatgcctatatcccctcctcttcacatgtaacatgtggattcagtgacgtgaccgcaccctc

SEQ ID NO: 178472 - DNA, 30 bp, Homo sapiens
  chr15:100441128-100441158
  hypo
atgatctcacttacacgtggagtataaaac

SEQ ID NO: 178473 - DNA, 31 bp, Homo sapiens; identical to SEQ ID NO: 89130
  chr15:100519845-100519876
  hypo

SEQ ID NO: 178474 - DNA, 210 bp, Homo sapiens; identical to SEQ ID NO: 89131
  chr15:100649030-100649240
  hypo

SEQ ID NO: 178475 - DNA, 205 bp, Homo sapiens; identical to SEQ ID NO: 28575
  chr15:100726605-100726810
  hypo

SEQ ID NO: 178476 - DNA, 255 bp, Homo sapiens; identical to SEQ ID NO: 89133
  chr15:100739955-100740210
  hypo

SEQ ID NO: 178477 - DNA, 103 bp, Homo sapiens; identical to SEQ ID NO: 28576
  chr15:100791526-100791629
  hypo

SEQ ID NO: 178478 - DNA, 31 bp, Homo sapiens; identical to SEQ ID NO: 89135
  chr15:100796879-100796910
  hypo

SEQ ID NO: 178479 - DNA, 146 bp, Homo sapiens; identical to SEQ ID NO: 89136
  chr15:100851743-100851889
  hypo

SEQ ID NO: 178480 - DNA, 178 bp, Homo sapiens
  chr15:100880284-100880462
  hypo
acagaagacagagaacccctgcggttcatgctctgggtccataccaagcttcgctgggggcagcccatctgccggccatgtgtgcggctttcggggcacgatggagaagctgagtgctcgtctgggcgccagtgtagccacatgatcaagtgtgcgcgcaggcagggcaagtgcacac

SEQ ID NO: 178481 - DNA, 683 bp, Homo sapiens; identical to SEQ ID NO: 52599
  chr15:100881160-100881843
  hypo

SEQ ID NO: 178482 - DNA, 600 bp, Homo sapiens; identical to SEQ ID NO: 126484
  chr15:100881966-100882566
  hypo

SEQ ID NO: 178483 - DNA, 27 bp, Homo sapiens
  chr15:100889039-100889066
  hypo
tcaagatggagtcgctctggttcgaac

SEQ ID NO: 178484 - DNA, 27 bp, Homo sapiens
  chr15:100920027-100920054
  hypo
aagagcgaaactccatctcaaaaaaaa

SEQ ID NO: 178485 - DNA, 43 bp, Homo sapiens
  chr15:101059358-101059401
  hypo
atctcaaaaaaaaaaaaaatccgccaaaaaatatacttggcca

SEQ ID NO: 178486 - DNA, 238 bp, Homo sapiens; identical to SEQ ID NO: 28579
  chr15:101099269-101099507
  hypo

SEQ ID NO: 178487 - DNA, 30 bp, Homo sapiens; identical to SEQ ID NO: 28580
  chr15:101189043-101189073
  hypo

SEQ ID NO: 178488 - DNA, 36 bp, Homo sapiens
  chr15:101194865-101194901
  hypo
ccctgagcccccatggcgctacgagcccccaaagga

SEQ ID NO: 178489 - DNA, 31 bp, Homo sapiens; identical to SEQ ID NO: 89142
  chr15:101246102-101246133
  hypo

SEQ ID NO: 178490 - DNA, 31 bp, Homo sapiens; identical to SEQ ID NO: 89143
  chr15:101251437-101251468
  hypo

SEQ ID NO: 178491 - DNA, 194 bp, Homo sapiens; identical to SEQ ID NO: 89144
  chr15:101266999-101267193
  hypo

SEQ ID NO: 178492 - DNA, 30 bp, Homo sapiens
  chr15:101325787-101325817
  hypo
caagcccctcggccccgcaggagagcccag

SEQ ID NO: 178493 - DNA, 30 bp, Homo sapiens
  chr15:101342484-101342514
  hypo
tacctgtgaggggaacggcccaggtgtgcg

SEQ ID NO: 178494 - DNA, 30 bp, Homo sapiens; identical to SEQ ID NO: 89145
  chr15:101417773-101417803
  hypo

SEQ ID NO: 178495 - DNA, 107 bp, Homo sapiens
  chr15:101427824-101427931
  hypo
ggctcgccatggcgccggctggatgccctgagtcgtgggcggctgctgcaccagctggctgacctggtggagagggaccgcgccaccttggccgtgagtacatgcac

SEQ ID NO: 178496 - DNA, 525 bp, Homo sapiens; identical to SEQ ID NO: 126496
  chr15:101458273-101458798
  hypo

SEQ ID NO: 178497 - DNA, 1335 bp, Homo sapiens; identical to SEQ ID NO: 126497
  chr15:101459064-101460399
  hypo

SEQ ID NO: 178498 - DNA, 164 bp, Homo sapiens; identical to SEQ ID NO: 89148
  chr15:101464763-101464927
  hypo

SEQ ID NO: 178499 - DNA, 175 bp, Homo sapiens; identical to SEQ ID NO: 89149
  chr15:101469410-101469585
  hypo

SEQ ID NO: 178500 - DNA, 148 bp, Homo sapiens; identical to SEQ ID NO: 89150
  chr15:101535256-101535404
  hypo

SEQ ID NO: 178501 - DNA, 101 bp, Homo sapiens
  chr15:101591988-101592089
  hypo
ctgggcccagcacacggaccccagtgagaaatcagaggatgtgcagtacttcgacatggaagactgtgtcctgacggccatcgagcgggacttcatctcct

SEQ ID NO: 178502 - DNA, 30 bp, Homo sapiens; identical to SEQ ID NO: 89152
  chr15:101593326-101593356
  hypo

SEQ ID NO: 178503 - DNA, 30 bp, Homo sapiens; identical to SEQ ID NO: 89153
  chr15:101605991-101606021
  hypo

SEQ ID NO: 178504 - DNA, 30 bp, Homo sapiens; identical to SEQ ID NO: 28585
  chr15:101606252-101606282
  hypo

SEQ ID NO: 178505 - DNA, 30 bp, Homo sapiens; identical to SEQ ID NO: 89155
  chr15:101626332-101626362
  hypo

SEQ ID NO: 178506 - DNA, 30 bp, Homo sapiens; identical to SEQ ID NO: 89156
  chr15:101641428-101641458
  hypo

SEQ ID NO: 178507 - DNA, 42 bp, Homo sapiens
  chr15:101679903-101679945
  hypo
cagcagtaggcagtgcgtgtgtgtgcgcgtgtgtgtgtgtgg

SEQ ID NO: 178508 - DNA, 30 bp, Homo sapiens; identical to SEQ ID NO: 28586
  chr15:101713830-101713860
  hypo

SEQ ID NO: 178509 - DNA, 30 bp, Homo sapiens
  chr15:101718878-101718908
  hypo
ccagaatctcctctcgctggcggggctgaa

SEQ ID NO: 178510 - DNA, 244 bp, Homo sapiens
  chr15:101719767-101720011
  hypo
ggaagcaaaagcacacgctgaaaaccctcttcacgctgctggcctcctgcgtacgaggaaggtacccctctcccaggtcttctgtggaggcaggagcgggcctgcttgctcagcacggggtctccggcaccagcacggagcttggtgcctgggggatcagaaaatgctggcagatgggaaacatgcaggacgcacagggctcaccattccaccaaccctgcctccgccccgtggcgcaggtttt

SEQ ID NO: 178511 - DNA, 108 bp, Homo sapiens
  chr15:101720484-101720592
  hypo
gggcacccgtgagtccggtcttagagcaagaattagagcagaattacaggtcctccaaagtgccgccgctgtttccaactttccttcccacaccgcttatgctcccca

SEQ ID NO: 178512 - DNA, 82 bp, Homo sapiens
  chr15:101739033-101739115
  hypo
gctaagctgagcagctgggagcgagatcccacggcctgcaaaaaccctaaaacatttacccgccaaccctttacacagcaca

SEQ ID NO: 178513 - DNA, 20 bp, Homo sapiens
  chr15:101761369-101761389
  hypo
tgtcacacgcaggtacgcag

SEQ ID NO: 178514 - DNA, 158 bp, Homo sapiens
  chr15:101785783-101785941
  hypo
ttaacagacaggggaacgtgaagctgccggtgcaatggaaacagtcacgcacaatccgctattgacagccacatctatccctggaatcaatccgctattgacagccacagccatccctggaaatccctggaatattgtttgagcgcttcaagatcttg

SEQ ID NO: 178515 - DNA, 155 bp, Homo sapiens; identical to SEQ ID NO: 126501
  chr15:101791011-101791166
  hypo

SEQ ID NO: 178516 - DNA, 31 bp, Homo sapiens; identical to SEQ ID NO: 89160
  chr15:101801703-101801734
  hypo

SEQ ID NO: 178517 - DNA, 171 bp, Homo sapiens
  chr15:101809433-101809604
  hypo
agaacaaggagtggccagaaacgtaggagaaagccaggcaaactcggtgttttggaagccaagggaggtgtttcttcaggagtgctcaaggaccgcaaaggatgctaacttcaggcgaggaccgaggcgacccatcaccccctgccacacgtgacctgaagagcagcttca

SEQ ID NO: 178518 - DNA, 391 bp, Homo sapiens
  chr15:101818141-101818532
  hypo
ccaagaaagtccccaccgatcctcaaggttctttctccaaaatcaaagccttttaggaaagaacgatcatagtaactgctctaacctgtgttgaattatactgtatcaccacaagacacgatcacagagttacttataatagtgtcctggctgtgttcctctgcctgcaacgccgtcccgcaccctcttccaccactcaaacgtcaccacctttatggtgaccataaccatcctatttgaaatgtgaccttgggtttttctggagcatttgaagtgcacatacctagctgtgtttcaaaagaagggttgggaattgggaatagaactgaaaaaataatgaataggtgacaacatccgagtgctgcgtcaccactgtcgccaggagcagtgt

SEQ ID NO: 178519 - DNA, 339 bp, Homo sapiens; identical to SEQ ID NO: 126505
  chr15:101835609-101835948
  hypo

SEQ ID NO: 178520 - DNA, 30 bp, Homo sapiens; identical to SEQ ID NO: 89163
  chr15:101843584-101843614
  hypo

SEQ ID NO: 178521 - DNA, 188 bp, Homo sapiens
  chr15:101845351-101845539
  hypo
gctgtcaggtgcagggcgccgctcctgaaacagactctggccgacagtctggaggaaggtggacggatggatggatgggagtgcctgccctctgtgggcagctaggcacccttacccggccaggaggcacgtgcggcagcagaactgaatgaagagcttccgttcgcacagccggttggacttcacca

SEQ ID NO: 178522 - DNA, 466 bp, Homo sapiens
  chr15:101850123-101850589
  hypo
ctcagcgtcgggcctcggcttccacctgcagttgccaacccagcaggcctgcgtcctgacctgcatgttccaacgcagcccgtctggccacatgctccctcggagctgcctggcacagcagcagcggacggccacggcgtccaccagcattctggggcctggaggatgcctgtggttctcagctcaggctgtccaagtggggagagaccccgcagaaccaatcggaccaaggccttgcttcctttgggaggcgtccacactgacgctcttcctggggggtgcttctccaagacccggtgtgtcagccccagcactgtcagcctctgcagggccgaaagctgcccctcacctgggaacaagtacccaggaaactcctgtcctccactgcccaaagagaggtttgcggtggggctgcccgcctgctgcctcctgaggggcaaagagaggtttgcggtggggctgcctg

SEQ ID NO: 178523 - DNA, 31 bp, Homo sapiens; identical to SEQ ID NO: 89166
  chr15:101859003-101859034
  hypo

SEQ ID NO: 178524 - DNA, 197 bp, Homo sapiens; identical to SEQ ID NO: 89167
  chr15:101862666-101862863
  hypo

SEQ ID NO: 178525 - DNA, 117 bp, Homo sapiens; identical to SEQ ID NO: 89168
  chr15:101865102-101865219
  hypo

SEQ ID NO: 178526 - DNA, 31 bp, Homo sapiens; identical to SEQ ID NO: 89169
  chr15:101865528-101865559
  hypo

SEQ ID NO: 178527 - DNA, 30 bp, Homo sapiens
  chr15:101866801-101866831
  hypo
cccgctggggctggacggccagacgacaag

SEQ ID NO: 178528 - DNA, 30 bp, Homo sapiens
  chr15:101896398-101896428
  hypo
cagctctgcctgcaccgttgccagctccgt

SEQ ID NO: 178529 - DNA, 30 bp, Homo sapiens
  chr15:101897850-101897880
  hypo
gtcctgcccacctggcgtggcctcacaggc

SEQ ID NO: 178530 - DNA, 425 bp, Homo sapiens
  chr15:101910611-101911036
  hypo
tgtgagatggaggtgcgaaccaccacgtgctccaagtagaccacccgctggtccgagtgctccgcgcaggcgctggtcagggccgtagtccgcagcacctgcactaaggggatgctcctgggggagaagggagggctcagcacttggcaccggaagcatgaagtctcacccacacagccaggagctccagcgcccgtccactctatccccactgcagcctcagggccctgcgggccccggggagccgcagcagcctctgactgcctcacgtggatgctccactgtgaactttatcacctgtcctgaagacgtttatgcctctggaatttgcttacagagatttgaaagatggttcggctgggcactgtggctcacgcctctgatcccagctctttgggaggccgaggcaccgcctgctgccaccg

SEQ ID NO: 178531 - DNA, 31 bp, Homo sapiens; identical to SEQ ID NO: 28590
  chr15:101911510-101911541
  hypo

SEQ ID NO: 178532 - DNA, 30 bp, Homo sapiens
  chr15:101919965-101919995
  hypo
agcagctgggaaccccgatggggaaaactc

SEQ ID NO: 178533 - DNA, 30 bp, Homo sapiens
  chr15:101920476-101920506
  hypo
tctgccatcttaaaacgatttctggcagga

SEQ ID NO: 178534 - DNA, 31 bp, Homo sapiens; identical to SEQ ID NO: 89171
  chr15:101922353-101922384
  hypo

SEQ ID NO: 178535 - DNA, 30 bp, Homo sapiens; identical to SEQ ID NO: 89172
  chr15:101926292-101926322
  hypo

SEQ ID NO: 178536 - DNA, 289 bp, Homo sapiens; identical to SEQ ID NO: 28591
  chr15:101938604-101938893
  hypo

SEQ ID NO: 178537 - DNA, 34 bp, Homo sapiens; identical to SEQ ID NO: 89174
  chr15:101949372-101949406
  hypo

SEQ ID NO: 178538 - DNA, 33 bp, Homo sapiens; identical to SEQ ID NO: 89175
  chr15:101949765-101949798
  hypo

SEQ ID NO: 178539 - DNA, 138 bp, Homo sapiens
  chr15:101966966-101967104
  hypo
ggctcggtggcagaacggcagaaagtggctgcagccaccctcaccaaggctcggtggcagaacggcagaaagcggctgcaggcaccctcaccaaggctcagtggcaggatggcagtgcccccccgggaaggtggtttc

SEQ ID NO: 178540 - DNA, 43 bp, Homo sapiens
  chr15:101967390-101967433
  hypo
gcaagaccagacgcacgcggggcaggggcggctgctgctccgt

SEQ ID NO: 178541 - DNA, 130 bp, Homo sapiens
  chr15:101968051-101968181
  hypo
ctgccccaggcccctcggctcgcaggctgccacgcccggccttacctcctattttggcattgtacgctatgcccacgatgcagtaggaattgtttgctgaagcagcaacttctcccgcacaacgagtgcc

SEQ ID NO: 178542 - DNA, 215 bp, Homo sapiens
  chr15:101974812-101975027
  hypo
tctctctgtcgtggtcgcaggggcagccctctctctgctaacacacctgctcattgtaagtctctgacggcaagtgaggtgctctcaggccaatggaaccgaacactgtacaacagatgactgaccaggcgtgggggcttctccgtggagacgggatgcaggcagacagcgcggtggcagaggctgattctcccggcactgtgtcccttcctctg

SEQ ID NO: 178543 - DNA, 115 bp, Homo sapiens; identical to SEQ ID NO: 89178
  chr15:101977434-101977549
  hypo

SEQ ID NO: 178544 - DNA, 40 bp, Homo sapiens
  chr15:101998573-101998613
  hypo
cataaacccaaatgccgtagagacccgagctgggcaatgt

SEQ ID NO: 178545 - DNA, 30 bp, Homo sapiens; identical to SEQ ID NO: 89180
  chr15:101998878-101998908
  hypo

SEQ ID NO: 178546 - DNA, 173 bp, Homo sapiens; identical to SEQ ID NO: 28593
  chr15:102004884-102005057
  hypo

SEQ ID NO: 178547 - DNA, 214 bp, Homo sapiens
  chr15:102017127-102017341
  hypo
gtaggtgggatgagacgccataaccagggacccagggcatgtggggcggggaagcagcgcagtggcagagcctcttccacctccctgcacggtcctgaccttccacagcagctgcagcactatccacctccccacgcagtgataaagaactcactgacctaaacgtcaggaaagaatgacacaaatgatgggccagctacgccaaggtacactg

SEQ ID NO: 178548 - DNA, 30 bp, Homo sapiens
  chr15:102019696-102019726
  hypo
atgagtgagcaggcccggcctcggctgtgg

SEQ ID NO: 178549 - DNA, 237 bp, Homo sapiens
  chr15:102020330-102020567
  hypo
gatcactcagagcttcggtagtctgctccatttgggctgtttctgcccactctcactgagaagatggattttcccaacaaggactctagaagtgatggatgctggccggtggcagaaatacaagagcccccgaggaagattagagaactaacagtgacagcctcttcccagcccaattcagtaaatgggtccatgtgcggctgggcagagccacaggtcgggcgtggctgcggggcc

SEQ ID NO: 178550 - DNA, 30 bp, Homo sapiens
  chr15:102021053-102021083
  hypo
actccaaaaagcaaacgattgggatgagaa

SEQ ID NO: 178551 - DNA, 284 bp, Homo sapiens; identical to SEQ ID NO: 89182
  chr15:102022131-102022415
  hypo

SEQ ID NO: 178552 - DNA, 76 bp, Homo sapiens; identical to SEQ ID NO: 89183
  chr15:102030589-102030665
  hypo

SEQ ID NO: 178553 - DNA, 31 bp, Homo sapiens; identical to SEQ ID NO: 28595
  chr15:102031395-102031426
  hypo

SEQ ID NO: 178554 - DNA, 469 bp, Homo sapiens
  chr15:102043026-102043495
  hypo
tccacctcctgggcctcactccgccctatacacgcgcacacttaatgacatctctgatcatgtcttcaggacgcataccctctttgacttgaaaaagtaacaactgtttgtggccttctcacaggccgaaaagaacaagcggggtccagtggagaaaggtgaggcatgggaaggcctggcccgagcactgtgacttcagcgaggcaccctccacccctctcagctttcctggtctgaaagtagaatttcgccagagggtgagccgacaggtagagctgtttccacctgcgtgtgctgcctgtgagctggggaactgcccacactgggaggggttgggaagcgtaggagggcacctgtcgcagacgttgaggaggggctgcctttcccctccaggggctgacctcccaggtgattcccagagccagaccacaattccagaattcagtgaaaacagcgccaaatcctattc

SEQ ID NO: 178555 - DNA, 25 bp, Homo sapiens
  chr15:102043695-102043720
  hypo
catgaacaaagaatacgggccgggc

SEQ ID NO: 178556 - DNA, 162 bp, Homo sapiens
  chr15:102070178-102070340
  hypo
ctggccttctggatgctttttattttgtggttatgcagcatcaggacagccttttaacatttgagaagtgaaccgtcttagtgggaggcaaaaccctgcttccctctacagaagcctaaaaggccaagaacgtgcactccctgacaccggtggggggtagca

SEQ ID NO: 178557 - DNA, 157 bp, Homo sapiens; identical to SEQ ID NO: 89187
  chr15:102070858-102071015
  hypo

SEQ ID NO: 178558 - DNA, 30 bp, Homo sapiens
  chr15:102075030-102075060
  hypo
acttcctcactgagccggctttgtgtccgc

SEQ ID NO: 178559 - DNA, 505 bp, Homo sapiens
  chr15:102075401-102075906
  hypo
gacagggccggatctcgcagccttgccgcagcctcaacactggctttgtctcgtatgggacagggagctggcggagggtagggccttcaaacagcaaagggacatgtggcttgtacgtgaaagagccaccctttccgcgtgttgaggcaagactgcaggggcacatgtgcatgcagggaggtgaggccaggcgcttgcgatgttccaggcgggaggtggtgaccacagggcccagggtggtggcaatcatgggggcaatagtggccccatggagggcgcacttccgtgtcctaaagtaatggtgtggaaggaggggagtcaagaagacgcaaatgcatggtgcgtgcgacggaactgccattctccggggtgggcgagacaaggtggagcaggggccagagacccgagaggcccaggtgtgcaggacaggccagtgggaaacgcgtgtagggttgtttgcacagatggtctttcaggccaggagaattctcggctcatgggtaga

SEQ ID NO: 178560 - DNA, 37 bp, Homo sapiens
  chr15:102076393-102076430
  hypo
gctggtcttgtggggcggggggcgggggtggacggcg

SEQ ID NO: 178561 - DNA, 581 bp, Homo sapiens; identical to SEQ ID NO: 89190
  chr15:102076806-102077387
  hypo

SEQ ID NO: 178562 - DNA, 9 bp, Homo sapiens
  chr15:102157738-102157747
  hypo
tacagccct

SEQ ID NO: 178563 - DNA, 27 bp, Homo sapiens
  chr15:102193451-102193478
  hypo
tatcacggccgggggcggtgaatcacg

SEQ ID NO: 178564 - DNA, 26 bp, Homo sapiens
  chr15:102193717-102193743
  hypo
gggtgacagagcgagactccgtctca

SEQ ID NO: 178565 - DNA, 153 bp, Homo sapiens
  chr15:102226030-102226183
  hypo
aaaagataattgtgacgaagcgtgctatgtgctctcatgaaaaggtctgcttcgcttttaatactcaccagtgccctggacaattcatgggtttgagggcaaaagtgtccttttcaatctcaaaggtaaacatgttctcgctgtaatgctgcc

SEQ ID NO: 178566 - DNA, 175 bp, Homo sapiens; identical to SEQ ID NO: 89193
  chr15:102251171-102251346
  hypo

SEQ ID NO: 178567 - DNA, 21 bp, Homo sapiens
  chr15:102332520-102332541
  hypo
gatgggtttaaaatgctttac

SEQ ID NO: 178568 - DNA, 30 bp, Homo sapiens; identical to SEQ ID NO: 89195
  chr15:102506222-102506252
  hypo

SEQ ID NO: 178569 - DNA, 30 bp, Homo sapiens; identical to SEQ ID NO: 10441
  chr15:102515284-102515314
  hypo

SEQ ID NO: 178570 - DNA, 120 bp, Homo sapiens; identical to SEQ ID NO: 89197
  chr16:84350-84470
  hypo

SEQ ID NO: 178571 - DNA, 260 bp, Homo sapiens; identical to SEQ ID NO: 89198
  chr16:91468-91728
  hypo

SEQ ID NO: 178572 - DNA, 392 bp, Homo sapiens; identical to SEQ ID NO: 89199
  chr16:94324-94716
  hypo

SEQ ID NO: 178573 - DNA, 94 bp, Homo sapiens; identical to SEQ ID NO: 89200
  chr16:101671-101765
  hypo

SEQ ID NO: 178574 - DNA, 31 bp, Homo sapiens; identical to SEQ ID NO: 89201
  chr16:109540-109571
  hypo

SEQ ID NO: 178575 - DNA, 119 bp, Homo sapiens; identical to SEQ ID NO: 28605
  chr16:111054-111173
  hypo

SEQ ID NO: 178576 - DNA, 148 bp, Homo sapiens; identical to SEQ ID NO: 89203
  chr16:111738-111886
  hypo

SEQ ID NO: 178577 - DNA, 30 bp, Homo sapiens; identical to SEQ ID NO: 28606
  chr16:112429-112459
  hypo

SEQ ID NO: 178578 - DNA, 55 bp, Homo sapiens; identical to SEQ ID NO: 28607
  chr16:112972-113027
  hypo

SEQ ID NO: 178579 - DNA, 30 bp, Homo sapiens; identical to SEQ ID NO: 28608
  chr16:113696-113726
  hypo

SEQ ID NO: 178580 - DNA, 146 bp, Homo sapiens; identical to SEQ ID NO: 28609
  chr16:114336-114482
  hypo

SEQ ID NO: 178581 - DNA, 276 bp, Homo sapiens
  chr16:114726-115002
  hypo
cgttgcagcaccggccgccggagctcatggtggggtgaagagatgtgggctgtctcggctggcatactcacactcctcaggaaagcctgtcgcctcaggggctgggcaacagggtcatggtgagggtactggacagggggcacccacagtccctgcaggccagggcctacctgcaggaagctgggctcttctgccgtcaggggcaccgcagagggaatgtccagctttagccagggtggcttcttgcgctgcaggctgctcgtgctgtccctgcgg

SEQ ID NO: 178582 - DNA, 294 bp, Homo sapiens
  chr16:117785-118079
  hypo
aacaacgcaggccatcggggtccctaatctggggtaacggaggattcctcaagatgacctctcagctgggtctgggaagacgagctgcctggcatgagcggatgcaagcaggaacagtcagggggtgagaagagccgagagctgtgagcgtgtacggggaacctgacctccccaggactgtttcggccggggaccacagccggccccaggaacctccccaggactgtctcagccggggaccacagtcggccccaggaacctccccaggactgtctcagccggggaccacagtcg

SEQ ID NO: 178583 - DNA, 30 bp, Homo sapiens
  chr16:118368-118398
  hypo
agtctggccagggagcggcacattgccctc

SEQ ID NO: 178584 - DNA, 144 bp, Homo sapiens
  chr16:136641-136785
  hypo
ggggtggggagacgcgagcgcccacctgcgcaccccagcagccttccgccctccgcctgggctcaggggagcagagcctggaagacggcaatgacagggtcctcgtgggtggtcaccaccagcacgctgcggaacttgtcaaac

SEQ ID NO: 178585 - DNA, 30 bp, Homo sapiens
  chr16:137090-137120
  hypo
gttcaggacggcagacggctgttcaaaccc

SEQ ID NO: 178586 - DNA, 345 bp, Homo sapiens; identical to SEQ ID NO: 89211
  chr16:142445-142790
  hypo

SEQ ID NO: 178587 - DNA, 121 bp, Homo sapiens; identical to SEQ ID NO: 28614
  chr16:189553-189674
  hypo

SEQ ID NO: 178588 - DNA, 24 bp, Homo sapiens
  chr16:192027-192051
  hypo
caccgtgcccggcctgcataacat

SEQ ID NO: 178589 - DNA, 26 bp, Homo sapiens
  chr16:204415-204441
  hypo
ccccaggacaggctgcggcccctccc

SEQ ID NO: 178590 - DNA, 406 bp, Homo sapiens; identical to SEQ ID NO: 52616
  chr16:204480-204886
  hypo

SEQ ID NO: 178591 - DNA, 30 bp, Homo sapiens
  chr16:212449-212479
  hypo
ttctgtgaggagtccggcctcccaagacgc

SEQ ID NO: 178592 - DNA, 30 bp, Homo sapiens; identical to SEQ ID NO: 126516
  chr16:214760-214790
  hypo

SEQ ID NO: 178593 - DNA, 701 bp, Homo sapiens; identical to SEQ ID NO: 126517
  chr16:215171-215872
  hypo

SEQ ID NO: 178594 - DNA, 534 bp, Homo sapiens; identical to SEQ ID NO: 10444
  chr16:215912-216446
  hypo

SEQ ID NO: 178595 - DNA, 273 bp, Homo sapiens; identical to SEQ ID NO: 10445
  chr16:216505-216778
  hypo

SEQ ID NO: 178596 - DNA, 912 bp, Homo sapiens; identical to SEQ ID NO: 126520
  chr16:230496-231408
  hypo

SEQ ID NO: 178597 - DNA, 41 bp, Homo sapiens
  chr16:232124-232165
  hypo
agtggacaggccgggcgcggtggctcacgcctgtaatccca

SEQ ID NO: 178598 - DNA, 40 bp, Homo sapiens
  chr16:232584-232624
  hypo
caaaaaaaaaaaaaagaggagggggcggggggaagagcca

SEQ ID NO: 178599 - DNA, 81 bp, Homo sapiens
  chr16:233801-233882
  hypo
aatgtagatacacgtcgtgccactgaactgtacactgaaaaactgttataacggcacgttttgtgtgcactttactataat

SEQ ID NO: 178600 - DNA, 21 bp, Homo sapiens
  chr16:234181-234202
  hypo
gtctcaaaaaaaaaaaaaaaa

SEQ ID NO: 178601 - DNA, 90 bp, Homo sapiens; identical to SEQ ID NO: 89221
  chr16:255868-255958
  hypo

SEQ ID NO: 178602 - DNA, 31 bp, Homo sapiens; identical to SEQ ID NO: 28619
  chr16:267427-267458
  hypo

SEQ ID NO: 178603 - DNA, 24 bp, Homo sapiens
  chr16:280205-280229
  hypo
tttgagacggagtttcgcccaggc

SEQ ID NO: 178604 - DNA, 37 bp, Homo sapiens; identical to SEQ ID NO: 28621
  chr16:299612-299649
  hypo

SEQ ID NO: 178605 - DNA, 102 bp, Homo sapiens; identical to SEQ ID NO: 28622
  chr16:299876-299978
  hypo

SEQ ID NO: 178606 - DNA, 101 bp, Homo sapiens
  chr16:300217-300318
  hypo
ccgcgcccggccaggaatctatgttttaaacatttcacacatcccttccttggggacatggtggctagatttgctgaattaatggccgtctcctcttcttc

SEQ ID NO: 178607 - DNA, 30 bp, Homo sapiens; identical to SEQ ID NO: 89227
  chr16:304589-304619
  hypo

SEQ ID NO: 178608 - DNA, 37 bp, Homo sapiens
  chr16:310515-310552
  hypo
aacatgaaccagcactcggcccgtcaggggagatcgg

SEQ ID NO: 178609 - DNA, 355 bp, Homo sapiens; identical to SEQ ID NO: 28624
  chr16:311205-311560
  hypo

SEQ ID NO: 178610 - DNA, 30 bp, Homo sapiens; identical to SEQ ID NO: 89230
  chr16:312550-312580
  hypo

SEQ ID NO: 178611 - DNA, 30 bp, Homo sapiens
  chr16:314651-314681
  hypo
cccaccctgccgcgcgtgctgctggagctg

SEQ ID NO: 178612 - DNA, 51 bp, Homo sapiens; identical to SEQ ID NO: 89231
  chr16:316209-316260
  hypo

SEQ ID NO: 178613 - DNA, 30 bp, Homo sapiens
  chr16:318177-318207
  hypo
acacacaatcacacacgctatacatacaca

SEQ ID NO: 178614 - DNA, 30 bp, Homo sapiens; identical to SEQ ID NO: 89232
  chr16:322262-322292
  hypo

SEQ ID NO: 178615 - DNA, 205 bp, Homo sapiens
  chr16:323417-323622
  hypo
agcacgctgacccctgcgctggccagcgacccccaccctcaccgcaggtgggctcaccgggggcctgttcaccagccagtaggtctgctcctggcacgcaatgaccagcctgtcccccttgctgcgctgcttggctgccctgggaggaggaggccgagttgagggcacgccctgcacacagcagcccctccgcccccaccctcag

SEQ ID NO: 178616 - DNA, 489 bp, Homo sapiens; identical to SEQ ID NO: 126523
  chr16:325110-325599
  hypo

SEQ ID NO: 178617 - DNA, 213 bp, Homo sapiens; identical to SEQ ID NO: 126524
  chr16:325889-326102
  hypo

SEQ ID NO: 178618 - DNA, 172 bp, Homo sapiens; identical to SEQ ID NO: 89235
  chr16:332588-332760
  hypo

SEQ ID NO: 178619 - DNA, 189 bp, Homo sapiens; identical to SEQ ID NO: 89236
  chr16:334794-334983
  hypo

SEQ ID NO: 178620 - DNA, 152 bp, Homo sapiens
  chr16:337626-337778
  hypo
ggtgcagtgctccgtcgccgattcacacagtggcaggcaagagacaagctgtgttgaaggcactcggtggcgcgtacaattgacagaggccctgcaggcctctgcatccgggcctgggccccacccagacctgggtacgtgggcaaatccca

SEQ ID NO: 178621 - DNA, 137 bp, Homo sapiens; identical to SEQ ID NO: 89238
  chr16:339476-339613
  hypo

SEQ ID NO: 178622 - DNA, 31 bp, Homo sapiens; identical to SEQ ID NO: 28625
  chr16:339929-339960
  hypo

SEQ ID NO: 178623 - DNA, 122 bp, Homo sapiens; identical to SEQ ID NO: 89240
  chr16:341170-341292
  hypo

SEQ ID NO: 178624 - DNA, 30 bp, Homo sapiens; identical to SEQ ID NO: 89241
  chr16:343248-343278
  hypo

SEQ ID NO: 178625 - DNA, 30 bp, Homo sapiens
  chr16:343691-343721
  hypo
ggctgtggcttcctcgtccccgaagacctt

SEQ ID NO: 178626 - DNA, 124 bp, Homo sapiens; identical to SEQ ID NO: 126526
  chr16:347152-347276
  hypo

SEQ ID NO: 178627 - DNA, 30 bp, Homo sapiens; identical to SEQ ID NO: 52624
  chr16:347279-347309
  hypo

SEQ ID NO: 178628 - DNA, 383 bp, Homo sapiens; identical to SEQ ID NO: 89243
  chr16:350654-351037
  hypo

SEQ ID NO: 178629 - DNA, 30 bp, Homo sapiens
  chr16:352144-352174
  hypo
ggcctcactctcaccgccacagggaccacg

SEQ ID NO: 178630 - DNA, 135 bp, Homo sapiens; identical to SEQ ID NO: 89244
  chr16:354254-354389
  hypo

SEQ ID NO: 178631 - DNA, 35 bp, Homo sapiens; identical to SEQ ID NO: 89245
  chr16:356088-356123
  hypo

SEQ ID NO: 178632 - DNA, 334 bp, Homo sapiens; identical to SEQ ID NO: 28628
  chr16:356182-356516
  hypo

SEQ ID NO: 178633 - DNA, 191 bp, Homo sapiens
  chr16:360131-360322
  hypo
atagagctcctggccccgaccgccggtcagcaggcaatgatgaggacacctgtgagccaccaccactgagacacgtgcacacaggtgatgcaggcacccatgtgtgcacaggggaacatgtacacacaaaggttcacacgtgatggtaaagcccaggtgcccagccacgcgtcttcctagctggtatttac

SEQ ID NO: 178634 - DNA, 144 bp, Homo sapiens; identical to SEQ ID NO: 28630
  chr16:364474-364618
  hypo

SEQ ID NO: 178635 - DNA, 82 bp, Homo sapiens; identical to SEQ ID NO: 28631
  chr16:364963-365045
  hypo

SEQ ID NO: 178636 - DNA, 30 bp, Homo sapiens; identical to SEQ ID NO: 89250
  chr16:368033-368063
  hypo

SEQ ID NO: 178637 - DNA, 14 bp, Homo sapiens
  chr16:374801-374815
  hypo
tgcagaggcagctt

SEQ ID NO: 178638 - DNA, 261 bp, Homo sapiens; identical to SEQ ID NO: 52626
  chr16:374858-375119
  hypo

SEQ ID NO: 178639 - DNA, 22 bp, Homo sapiens
  chr16:394798-394820
  hypo
cttaaatcgtatcacttagact

SEQ ID NO: 178640 - DNA, 47 bp, Homo sapiens; identical to SEQ ID NO: 89253
  chr16:400401-400448
  hypo

SEQ ID NO: 178641 - DNA, 1724 bp, Homo sapiens
  chr16:409997-411721
  hypo
acacgcctctccgggcgctgccgcccccccgttggtgctcatctgtccttctgcccactatccccagcggccccgatacctgcacaccccagtgcccagcggttccccctcgagctggcaaggggacattaaatgggaggtgaggaagtgcggcccccagcgggcagctgcctttgccccggcccacctgcgcccccgcccacctgtgccctccgccgcctccctctgcttggctgtcccaagatgtctctctccactgcctaggaaccctgaggccgcggccaagttctgagcgtgtgactgtgtgtgctgggccccaggcccctttgtcgccgcggcgtctgtcgtggcaaacaaaagtgaaccggattagccacagtggattaaaagatttacgtctcagagtttacctaataacctaacaatcgtgtcaacgggagctttgaacccccagggcgcgcctgccaggccaactgagagctcaaggcctctgtgggcagcaggacgtggtcggggggaggagacgcagccacggctgtcctcacacccagctcggcccctgcgggctcctctgggcagaacctggggaaggcacggcctctagcaggaggtggaggcctttgaaagggtgcaggtgttgggaccaggtacccggcccaggcccccagccgcgtccacacacgtcgcacacggcagcaaggacgcaagcagtgtggaggtggccgcgtcggcgacgtatgggccccgtggtgctgcggtgcacgacctctgtgctgtcaccccacagtgtccgctcctgcacgtacacgcgtgcacgcgcacacacgtgcacacgcacacacacacaagcacgccccgctttgatctctaaaggagagtccattgacaagctcttaatcgcagctgcccttgcagggcctgtccctgaagtcccgagtaatgggatttggcgcttctgatccatcgggctggccgcttcccgtgtcataggtggacattttttttctttatatcgcttctgtttcttttttttttttctcctcgaaaaaatgctgcttaaacggcaccgacttgacatggcttgtctcctaaccttggagtggcggccgggacgccggcctggatcagtcgggggtctttgatgccgcctccatgtgaaacctgacgtggaagacccaccggggcggttttggggtccgaggtccgtcaggattcatcctgcctcaccctgctccctttgtctcttcccctgacccttcctcgggacacccggagagggtctgagggtgagggtgcgggcgctgcgtgtgggcttgcactcgagggtggggtgggccgagggcagggccgcagccgcgagaacaatgggcagaggaggcgcgtccacctgtccgcccggccgcctgcccggcttacctcacctgcctggctccgtgtgcctgctcacgccccaccgtcccgctgtccgccatgatgggcttggccgtccgtccgagcactttcagccactctgggaagcaggtccctgctcttggccactgtgtggctgggaggcagaagcgtgactctgggctgcagctcgggctcctgccgccgattggctgaggcagggaccagatgacgggcctcagaaccctatggtagccatggcaaccagcccctttagacaccgccacccccgagccactcctgactgctgagggagcaggcggcactgcccgtgg

SEQ ID NO: 178642 - DNA, 192 bp, Homo sapiens
  chr16:412823-413015
  hypo
gggcgccgggggtctcgggccgcggctgctcccccaggactctgggcgccgggggtctcgggccgcggctgctcccccaggactctgggcgccgggggtctcgggccgcggctgctcccccaggactctgggcgccgggggtctcgggccgcggctgctcccccaggactctgggtccggatccaagcttct

SEQ ID NO: 178643 - DNA, 267 bp, Homo sapiens
  chr16:422073-422340
  hypo
gggctggtcaggtggcggcagcagcaaggctgcgctcccggccagcaggatgtgccagatgctgtgggtgtagtagtagttgtcgctagtcatcatggaggtgtagatggcgatgcccacagaggccatagagacgccgggcaggaggtagaaggcccagcgctgccacgaggtggggtagcactggcgccggtgcccgcagcggtaagcctggagaaaacagccacgcaggtatcagtgcaggtggggccgcggctgcagctccca

SEQ ID NO: 178644 - DNA, 30 bp, Homo sapiens; identical to SEQ ID NO: 89255
  chr16:423857-423887
  hypo

SEQ ID NO: 178645 - DNA, 30 bp, Homo sapiens
  chr16:425384-425414
  hypo
cgaggcagcattcacgcaggccactacgac

SEQ ID NO: 178646 - DNA, 30 bp, Homo sapiens
  chr16:426156-426186
  hypo
ggtgagggaacccccgctgtccatgccggt

SEQ ID NO: 178647 - DNA, 116 bp, Homo sapiens
  chr16:426698-426814
  hypo
ctaggcagggtgaccgggcccacggtgagacgcacggggcagcccaggctcccattggacacgcagtcccgcagctccagcagaagctcccgcgtgtaatcggggacaaagaccct

SEQ ID NO: 178648 - DNA, 756 bp, Homo sapiens
  chr16:428820-429576
  hypo
caaggggacagctgccctctgcgttccaagcgggcaaggctcctaactgtcctcagggaacgcacccacgcctggtgcggggatggagaagggcccgtgggagacatcctgctcatggccccaggcgaggactcaggctctcacccccagccccccgtgccagctccagcctcgtgcccttgcgaccttgggcatccttccctccctgggtcccagccttctcctgggtaggtcagggcggagggcacatccctttgggggcccctccctccgaggttaattaacgacaaaggcttcagaaggaaaagcacagtggacacagcagggggcgggaccctcccctctgctgcagctccccctccccacacactcaggagcgctgcctaggtctcactggagagtggctggctcaggcccaggcccctcctgaggagggagacaggtgagcagcaggctctcctgccagcctcgtgaccctcccatagaggcaccagaagaaacgatacacctgccaatagcagcctgtcggcaaatccaggccaagctccaggggaacctggcgtggcgactgggcaggggctggccaggctccacccacgacgcactccaggctttccaggtgtctgctggccaccaggtcccacccaccaggctgtggcctgataatgtgggcagagaaagctcaagtgctgggagctgaagcaggacagccccccaggaccacggtgtcccggagaaagccggcctctgcggggg

SEQ ID NO: 178649 - DNA, 93 bp, Homo sapiens
  chr16:439055-439148
  hypo
ccaaagtgctgggaatgacagttcagttttttgttgttttacattcagtccagctttttgttgttgttttacgttcagcggatggcagtagac

SEQ ID NO: 178650 - DNA, 79 bp, Homo sapiens; identical to SEQ ID NO: 89258
  chr16:440410-440489
  hypo

SEQ ID NO: 178651 - DNA, 19 bp, Homo sapiens
  chr16:440908-440927
  hypo
acacaatttgttttccaat

SEQ ID NO: 178652 - DNA, 30 bp, Homo sapiens; identical to SEQ ID NO: 89260
  chr16:457367-457397
  hypo

SEQ ID NO: 178653 - DNA, 181 bp, Homo sapiens; identical to SEQ ID NO: 89261
  chr16:460350-460531
  hypo

SEQ ID NO: 178654 - DNA, 30 bp, Homo sapiens; identical to SEQ ID NO: 89262
  chr16:460731-460761
  hypo

SEQ ID NO: 178655 - DNA, 30 bp, Homo sapiens; identical to SEQ ID NO: 89263
  chr16:464501-464531
  hypo

SEQ ID NO: 178656 - DNA, 30 bp, Homo sapiens; identical to SEQ ID NO: 89264
  chr16:467590-467620
  hypo

SEQ ID NO: 178657 - DNA, 163 bp, Homo sapiens
  chr16:468013-468176
  hypo
tgtattttctaggattttatgtaagtggagtcataaggtacgcactcttttttgtccggcttctctcactgaacctgattgctcccagagtcacctgtgatgtcgtgtgtgtcagtagtgaaatcctcttcagggttgagccgggctccgcgccgggtcctcc

SEQ ID NO: 178658 - DNA, 30 bp, Homo sapiens
  chr16:500807-500837
  hypo
agggagagagcctcccgctccctccctccc

SEQ ID NO: 178659 - DNA, 116 bp, Homo sapiens
  chr16:501345-501461
  hypo
cacctcaccctccccacgcttcccgtatcagggagcttcttaaacacagaatggggtgttaagatgattggagggcagcagcctattggaatcccgatgaacgtggaaaggtgtca

SEQ ID NO: 178660 - DNA, 121 bp, Homo sapiens; identical to SEQ ID NO: 89266
  chr16:505064-505185
  hypo

SEQ ID NO: 178661 - DNA, 32 bp, Homo sapiens
  chr16:505484-505516
  hypo
aaaagaattgagaaccgcgcacactctcacaa

SEQ ID NO: 178662 - DNA, 50 bp, Homo sapiens; identical to SEQ ID NO: 89267
  chr16:512664-512714
  hypo

SEQ ID NO: 178663 - DNA, 30 bp, Homo sapiens
  chr16:513188-513218
  hypo
gcggtgtaggggtgacggtggcgggtcctt

SEQ ID NO: 178664 - DNA, 306 bp, Homo sapiens; identical to SEQ ID NO: 89268
  chr16:514975-515281
  hypo

SEQ ID NO: 178665 - DNA, 31 bp, Homo sapiens; identical to SEQ ID NO: 89269
  chr16:517376-517407
  hypo

SEQ ID NO: 178666 - DNA, 30 bp, Homo sapiens; identical to SEQ ID NO: 28637
  chr16:521260-521290
  hypo

SEQ ID NO: 178667 - DNA, 4 bp, Homo sapiens
  chr16:521899-521903
  hypo
tggt

SEQ ID NO: 178668 - DNA, 228 bp, Homo sapiens; identical to SEQ ID NO: 28639
  chr16:521925-522153
  hypo

SEQ ID NO: 178669 - DNA, 30 bp, Homo sapiens; identical to SEQ ID NO: 28640
  chr16:522594-522624
  hypo

SEQ ID NO: 178670 - DNA, 30 bp, Homo sapiens
  chr16:523904-523934
  hypo
ctgcctcttccagaacgccacggagctaga

SEQ ID NO: 178671 - DNA, 329 bp, Homo sapiens
  chr16:524278-524607
  hypo
atttctctttactgggagcatcgcagtgctcacaccggggtggtcgggtaaaatgtgcagttagtcatggccgagctagtgggtctgctggctcgcactgttttcccagggatcctttcagcaggcagcttataacgggaaagttgctgctatggtgtctgagtaagtggggagagtagaaggggatggactgtggcgccgctgagttcctgggcatggtgatgtctgaggatctgagcaggtggagcccagggggtggtggggctgtttgtcgggtttctggaagagcgaagggaaagtcagggagtgtaaggcgcatctcacagaat

SEQ ID NO: 178672 - DNA, 569 bp, Homo sapiens
  chr16:525277-525846
  hypo
aacgtttcaacatagcgacgttttccaagatgcactttgattttcaagcgagttcatcttaacattggtaatttgtaaaaatgttaaaaagttggtagcatagacttgatggcttctgggcaaggccaggtcctggctggctggcaaataaaataaactgccggggccggtgtgagctgttactgcattttatccaggaggccgggagtgagcaggcaccgtgctctgaggtacatttttgtctctggaaaggcaggtgatggctgccctggaaaactccatgtagggaggccttgaactgcagaaaccaacccgcagggctgaattgggaagtgagcaggtggggtggctcctgtgagcctcatgagctgtctggaacccccagggcatccagccggccaggggctctgagtatcgatggcgatggcatggaagtggacgtccacaaccccagagcaaataaaggggtgggtgcagtcaccgaagccgctgaggagtggaactgttcatctctgtgggatctacagtgcacggagccactctgcaatggcagggaggcccggcttact

SEQ ID NO: 178673 - DNA, 30 bp, Homo sapiens
  chr16:526181-526211
  hypo
aaggtgggtccagagcggagcgtgtgagtt

SEQ ID NO: 178674 - DNA, 218 bp, Homo sapiens; identical to SEQ ID NO: 89276
  chr16:532453-532671
  hypo

SEQ ID NO: 178675 - DNA, 142 bp, Homo sapiens; identical to SEQ ID NO: 89277
  chr16:533135-533277
  hypo

SEQ ID NO: 178676 - DNA, 164 bp, Homo sapiens; identical to SEQ ID NO: 28644
  chr16:534202-534366
  hypo

SEQ ID NO: 178677 - DNA, 159 bp, Homo sapiens
  chr16:537528-537687
  hypo
gagcacagtgggtccgggcggagcagagcgcgcggtcctcctgactctgcccccttctcctgggcacgaggagtcgcctcactctgccaggcccctttctttcctggagtggagcagcgccgggcctgcacagaaggttctcccgaggactcctgcggg

SEQ ID NO: 178678 - DNA, 30 bp, Homo sapiens
  chr16:541364-541394
  hypo
gagcctctcaggcagcgggactctccctgg

SEQ ID NO: 178679 - DNA, 63 bp, Homo sapiens
  chr16:541775-541838
  hypo
ctttgcacatattgacgtgcccgttgggcatcgtgttgatttcgcttgcggtgaagcccctgg

SEQ ID NO: 178680 - DNA, 30 bp, Homo sapiens; identical to SEQ ID NO: 89280
  chr16:560096-560126
  hypo

SEQ ID NO: 178681 - DNA, 131 bp, Homo sapiens; identical to SEQ ID NO: 126537
  chr16:565595-565726
  hypo

SEQ ID NO: 178682 - DNA, 46 bp, Homo sapiens; identical to SEQ ID NO: 89281
  chr16:567190-567236
  hypo

SEQ ID NO: 178683 - DNA, 30 bp, Homo sapiens; identical to SEQ ID NO: 28646
  chr16:569152-569182
  hypo

SEQ ID NO: 178684 - DNA, 30 bp, Homo sapiens
  chr16:570173-570203
  hypo
aggccgagcagcggcggggccgcagcagca

SEQ ID NO: 178685 - DNA, 30 bp, Homo sapiens
  chr16:571140-571170
  hypo
caagctggccatgaacgcgtacacttcagt

SEQ ID NO: 178686 - DNA, 538 bp, Homo sapiens; identical to SEQ ID NO: 89283
  chr16:571575-572113
  hypo

SEQ ID NO: 178687 - DNA, 66 bp, Homo sapiens; identical to SEQ ID NO: 89284
  chr16:573425-573491
  hypo

SEQ ID NO: 178688 - DNA, 252 bp, Homo sapiens; identical to SEQ ID NO: 52631
  chr16:577427-577679
  hypo

SEQ ID NO: 178689 - DNA, 480 bp, Homo sapiens
  chr16:584706-585186
  hypo
gggtgcagttttagggcgcagtggggttgccgtggggcaaggccaggccaccagctgcctggacacaggggcccccgctttccatctgctgccccccacacccccagctcgggcaggggtgacaccggggcatccttgttggggtcgctgtggttcccatggtggcaagatggctctgtgaaagattgacggagatgtagggcccaggagcaggtgctgtgtgagtgggacacgcctgtgtcacctgcggggcaggggagggctcgggggtacagccgtgtacatgattagttagcgagacagtgaggagtgtatgcggagtggacacagctgtgggtgccgcccgcgcaaggctgggggtcgctgtgccagccctgctcccatgtgggctcccagctccccaggtagggacgctgaccccgggaggtgcctttgcctgcatccactggagcctcaggagcatgcgttccgtccccacgg

SEQ ID NO: 178690 - DNA, 73 bp, Homo sapiens; identical to SEQ ID NO: 28650
  chr16:587257-587330
  hypo

SEQ ID NO: 178691 - DNA, 30 bp, Homo sapiens; identical to SEQ ID NO: 89288
  chr16:587553-587583
  hypo

SEQ ID NO: 178692 - DNA, 166 bp, Homo sapiens; identical to SEQ ID NO: 28651
  chr16:588069-588235
  hypo

SEQ ID NO: 178693 - DNA, 68 bp, Homo sapiens; identical to SEQ ID NO: 28652
  chr16:588486-588554
  hypo

SEQ ID NO: 178694 - DNA, 30 bp, Homo sapiens
  chr16:589859-589889
  hypo
cacagacgtgatgccgggcttttgggggcc

SEQ ID NO: 178695 - DNA, 592 bp, Homo sapiens
  chr16:594120-594712
  hypo
aaggctgaccggcgccgggctgtggccagaccaggagactgcagcccagctcgagggaggcaccacgcctgcccctcagagcactgagcagagccccccatggtatcccccgccctgggcacagcaggaggagctgccgaccaagtctggcaccccggtgtgccccgagagctgtctgggcacaggttgcggggctgccccggccggacggggcatctgtgtttctcggtgtggcctcagggctctggtggctttgaccgaggccccgggggacagaatgcagcttcctgctcctcacttttcctaagaaaggggccgcctcccaggactggggctgcgccagtcacaggcccgcggcctccacgctccgggtgctgctgtcccggctgcttcagggcgggctctgtcttgcacgcagcgagcggcttcatcacctcccttttgaattggagctgagtgtcggcaacgcccagataactggggcgcgcgggtcttttgtgctggatttttctgtacagttgcctcgatcttccatccagcttggcctctgtgcagtaaggagcggcccgtcgcctcccccacgtcgcctccc

SEQ ID NO: 178696 - DNA, 667 bp, Homo sapiens
  chr16:595533-596200
  hypo
tcctgaagtgcagacgtcttcctgacccacctgggttttgccaggatgactccgaaaggtgtctcccagcagacacaccccgctggcgattgtttggtcctggggacccgggttctcattctcctctctggagctggtgaggctgtccttgctagtcggtgacaactacagggccaaagggagggtgtgtcccaggaggcccagcccacctctgcctgcacctgcggtcagcggggtgcagagtctgtgaaggcacctcccggagtgggggctgcaaagatcatggccactgtgccacccacaggggcccaggccggacgcctgggctgtgccgcctcggcagccaggccgaggaacgtgcaggtgcggccgggagcccgccggccacagctgcatccatgcccttctccgagtggtgatggcggggagaggcctggctgtctacgggcagattgcttgggctttcacagaagcccgctgttagagcagattcccggccttgggtctctctgctccagctggacgccctgagcctcgccgggcccagtccacccccgtccactctgccaggggcagctcagagccctcgccacgcggggctgagcgcagggaaggcagcatcacggagttcgctcggctccacagaacacccgtgttgctcgcggag

SEQ ID NO: 178697 - DNA, 30 bp, Homo sapiens
  chr16:603919-603949
  hypo
gggaccacccctcacggggcataaggtcag

SEQ ID NO: 178698 - DNA, 30 bp, Homo sapiens
  chr16:604173-604203
  hypo
ccgctcactgctgccgggcacactgggacc

SEQ ID NO: 178699 - DNA, 364 bp, Homo sapiens
  chr16:604991-605355
  hypo
tggagtgagggggcgcgtggggagaaaagtttcctgtcccctcccagcctcgtcccagggtggcctctgcccccacacgggtgctgctgagcaaagcgcccgctcggaggctctgctgtctccctggacggagttgggggctggggtgcggccggcgcggggtaagaggctgtcacgggcagcgtatcgaatgtgaaagcaattaaagccaccagcagtgttcgctccgggcgggcctcgggcggcggggagctgccagaacacatctcacctcggtgcccgcggacgccggccctgctgctccgcgactgcgccacgtcacactcctcctgtgggtgggggccgggctcgtgcccgctcctgt

SEQ ID NO: 178700 - DNA, 103 bp, Homo sapiens; identical to SEQ ID NO: 126540
  chr16:609993-610096
  hypo

SEQ ID NO: 178701 - DNA, 205 bp, Homo sapiens; identical to SEQ ID NO: 126541
  chr16:610110-610315
  hypo

SEQ ID NO: 178702 - DNA, 157 bp, Homo sapiens; identical to SEQ ID NO: 126542
  chr16:610343-610500
  hypo

SEQ ID NO: 178703 - DNA, 30 bp, Homo sapiens; identical to SEQ ID NO: 126543
  chr16:610892-610922
  hypo

SEQ ID NO: 178704 - DNA, 31 bp, Homo sapiens; identical to SEQ ID NO: 89293
  chr16:611329-611360
  hypo

SEQ ID NO: 178705 - DNA, 627 bp, Homo sapiens
  chr16:611785-612412
  hypo
ccccagccaggtctgcgtgtgtcctggggagtcggtgtgtagggcctgtgtgagcatgtgagtgccgtgttggagtggtttggaaagcccccccacacctggatgggtggtgagtgtgttatcacggacaagcagccgtgttcaccgtgatggagtgtgaggtgtgtgcagccagggccccgcacttggtggcagactccgttctgagcttaggtggcacagaggtggcttctccgggcactgggtgagggctctgtgtgagcctgtgggctgtgtacacacacccaaagcccgtgtgcgcaggcgtgctgtgcaccccacacaggcgcgtgctggggcggtggacagcccaggtggcggcccagatggagtgtggcgcgcataccagcgccgtgtggggcgtggggaggagcgggtcttggctgagtgtggccgctgcaggctcggccgctgacctgcccgaagccacccagatggagctgggctgagcaggtggctgagccgtggggccatgctgggacgtccactccccacagcctggcctggccccacatgagactgaccccctaagagacccccagtgcccacctgacgccctgctagagcaggctctgtgccgcctttaga

SEQ ID NO: 178706 - DNA, 44 bp, Homo sapiens
  chr16:612884-612928
  hypo
cgataaaataaaggacgcctagttaaaatcgaatttccgataaa

SEQ ID NO: 178707 - DNA, 136 bp, Homo sapiens; identical to SEQ ID NO: 28655
  chr16:613511-613647
  hypo

SEQ ID NO: 178708 - DNA, 655 bp, Homo sapiens
  chr16:614709-615364
  hypo
ggacggggatccaggcggccctgagacccccggccctgagggccccctccccctgcagccacggggcccagtgccaggaagcccggagcatgtgggcgaggacctgacccgagccctcggtgactacgccagggtggagcagcgcctgggacagttggggcccgcggggggcctggccccgagacccctgcgggagcagctgggcaagatccgcctggagctgctcaccattcaccaggcgctggagcaggccgtgaggccgccagacgcacccctcgacctctctgtgaaacgtgcgcccgccaaggggccccaggctcttggagaggcgtgggggcggcccgagctgggtcccgtgttgaccgggggcacccccgagccacccggcatgctgggccctgcagcgccccaacccttctctggccacaccaccaagtgtgaggccgactccagcgtcccacccccagggctccccctcgcagccccagatgaccctgtcattcctggcagtggctggggcacctgtgttgcgacgaggagttcccagacccctgaggctgtctgtggcctgcagagcccccagggcgccgaggtctgacctgcagcgcctgaggtctgactgtctctgcctgcagcatgccggcccctctcctgc

SEQ ID NO: 178709 - DNA, 235 bp, Homo sapiens
  chr16:617603-617838
  hypo
ggctcccggcagctccggctgcttgggtggatccgggtgcccgcaggggctgtgggagggccccggggcctgcactgctcccccgatggcctgctcttcctcacggccggggctgcaccctgtgtccacgtgctagatctggagggacgccccatctgcctcctgccctgccgcactccggggagcggggccttcgttccagaggacgtggctgtgacagcgtcagggcttgtgg

SEQ ID NO: 178710 - DNA, 30 bp, Homo sapiens; identical to SEQ ID NO: 89297
  chr16:622800-622830
  hypo

SEQ ID NO: 178711 - DNA, 786 bp, Homo sapiens
  chr16:623990-624776
  hypo
tctgtgcaacatcccgcagcccacggtgggggggcagcagcagctctgagccgagcctctcctcttctcttccagcctcccggcatggtgctcaaggccttcttccccacgtgctgcgtctcgacggacagcgggctgctggtgggacggtgggtgccggagcagagcagcgccgtggtcctggcggtcctgcactttcccttcatccccatccaggtcaagcagctcctggcccaggtgcggcaggccagccaggtgggcgtggccgtgctgggcacctggtgccactgccggcaggagcccgaggagagcctgggccgcttcctggagagcctgggtgctgtcttcccccatgagccctggctgcggctgtgccgggagagaggcggcacgttctggagctgcgaggccacccaccggcaagcgcccactgcccccggtgcccctggtgaggaccaggtcatgctcatcttctatgaccagcgccaggtgttgctgtcacagctacacctgcccaccgtcctgcccgaccgccaggctggagccaccactgccagcacggggggcctggctgccgtcttcgacacggtagcacgcagtgaggtgctcttccgcagtgaccgctttgatgagggccccgtgcggctgagccactggcagtcggagggcgtggaggccagcatcctcgcggagctggccaggcgagcctcgggacccatttgcctgctgttggccagcctgctgtcgctggtctcagctgtcagtgcctgccggtaggtgtcccgg

SEQ ID NO: 178712 - DNA, 30 bp, Homo sapiens
  chr16:625891-625921
  hypo
aacagctccggcaccggctggagcacctca

SEQ ID NO: 178713 - DNA, 30 bp, Homo sapiens
  chr16:642125-642155
  hypo
agggaatgccatctacgctggcgaacttac

SEQ ID NO: 178714 - DNA, 734 bp, Homo sapiens
  chr16:643849-644583
  hypo
caggatggaacagagcgctttgcatagagtgcccctgggtgatggtggcgagttacccggcaggaattatgcttcatccaggagtgtgggtggtgcacgcggcggggaggagaaagctgcagttcaggagcgaacctgcagtcaggctccagggtgtgggccagggtggtgggcccgtgttggcccccaggaaccacccgcacagggtgcacacccttccccaagcccagccgctcccgctctgcagggggcatcgaaggtcctggattaaggcagttccaccctcggcaccgtgtccccacaaaccttcctgggagcaagttttcctcccgccacgttggtcagggtgtgtgtgcccgggtcctggaagacttcagaaggggttaatcctggcttgactttatttctctctctgctcttttggggttcagtgttggtggaagctgctgagtgacactccggtcctttgagcctggcaagttgtggggagaaacggagggaggcggttgtggacatggcgaggctaacatcacggtttgctgtggatgttggggcctggtggtcactgagatgtctgtggggccacacgctgcctgctgtacccatgggagcgagggcaccctgtgtgggtgtcccagcttcttcggcttcacgactccctgagctttctccaaacagttacaaacgtttcttctcatctggcttgaagttcgtggctccgaagtggccaattc

SEQ ID NO: 178715 - DNA, 30 bp, Homo sapiens; identical to SEQ ID NO: 89300
  chr16:649672-649702
  hypo

SEQ ID NO: 178716 - DNA, 296 bp, Homo sapiens; identical to SEQ ID NO: 89301
  chr16:660722-661018
  hypo

SEQ ID NO: 178717 - DNA, 243 bp, Homo sapiens; identical to SEQ ID NO: 28659
  chr16:666663-666906
  hypo

SEQ ID NO: 178718 - DNA, 157 bp, Homo sapiens; identical to SEQ ID NO: 28660
  chr16:667407-667564
  hypo

SEQ ID NO: 178719 - DNA, 541 bp, Homo sapiens; identical to SEQ ID NO: 89304
  chr16:667863-668404
  hypo

SEQ ID NO: 178720 - DNA, 167 bp, Homo sapiens
  chr16:670660-670827
  hypo
cgacgggctccaccgcgggcatcccagccccccccgatgggctccaccgcgggcatcccagccccccgccgacgggctccaccgcgggcatcccagccccccgccgacgggctccaccgcgggcatcccagccccccgccgacgggctccaccgcgggcatcccagc

SEQ ID NO: 178721 - DNA, 593 bp, Homo sapiens; identical to SEQ ID NO: 89306
  chr16:671079-671672
  hypo

SEQ ID NO: 178722 - DNA, 30 bp, Homo sapiens
  chr16:671873-671903
  hypo
ggtacgggaggcacacgtgctgctggcttg

SEQ ID NO: 178723 - DNA, 97 bp, Homo sapiens
  chr16:672458-672555
  hypo
agagcagggcgagcgcgcgtcctgactcatcccctagagcactcgctcgttcttttgttttgttttttgagacacggtctggctctgtcgccaggct

SEQ ID NO: 178724 - DNA, 336 bp, Homo sapiens; identical to SEQ ID NO: 89307
  chr16:672794-673130
  hypo

SEQ ID NO: 178725 - DNA, 30 bp, Homo sapiens; identical to SEQ ID NO: 89308
  chr16:675101-675131
  hypo

SEQ ID NO: 178726 - DNA, 92 bp, Homo sapiens
  chr16:675965-676057
  hypo
cgacggagcaggcccgcgcgtacgcagagaagaactgcatgaccttctttgaggtcagccccctgtgcaacttcaacgtcatcgagtccttc

SEQ ID NO: 178727 - DNA, 141 bp, Homo sapiens
  chr16:677346-677487
  hypo
agcctgcaggacctctgctgccgggccatcgtctcctgcacccccgtgcacctcatcgacaagcttccactgcccgtcaccatcaagagccacctcaagtccttctcgatggccaacggcatgaacgcggtcatgatgcac

SEQ ID NO: 178728 - DNA, 410 bp, Homo sapiens; identical to SEQ ID NO: 89311
  chr16:677801-678211
  hypo

SEQ ID NO: 178729 - DNA, 30 bp, Homo sapiens; identical to SEQ ID NO: 89312
  chr16:683837-683867
  hypo

SEQ ID NO: 178730 - DNA, 206 bp, Homo sapiens; identical to SEQ ID NO: 89313
  chr16:684416-684622
  hypo

SEQ ID NO: 178731 - DNA, 146 bp, Homo sapiens
  chr16:689009-689155
  hypo
caggaagactctgggccctgccgcccacccgccacagctccgttttcagccacagcatccctgacctctccttggagaatgtgggggccactggacacgccaggccctgatgccggcacaggcagcctcctcttgttcctggacca

SEQ ID NO: 178732 - DNA, 30 bp, Homo sapiens; identical to SEQ ID NO: 89315
  chr16:690453-690483
  hypo

SEQ ID NO: 178733 - DNA, 30 bp, Homo sapiens; identical to SEQ ID NO: 89316
  chr16:702571-702601
  hypo

SEQ ID NO: 178734 - DNA, 30 bp, Homo sapiens
  chr16:703807-703837
  hypo
cagggccctggctgcgggttggggtggggc

SEQ ID NO: 178735 - DNA, 30 bp, Homo sapiens; identical to SEQ ID NO: 28666
  chr16:704961-704991
  hypo

SEQ ID NO: 178736 - DNA, 30 bp, Homo sapiens
  chr16:706633-706663
  hypo
tttccagcctgtgtcggccccatgggtttg

SEQ ID NO: 178737 - DNA, 84 bp, Homo sapiens; identical to SEQ ID NO: 89318
  chr16:712803-712887
  hypo

SEQ ID NO: 178738 - DNA, 122 bp, Homo sapiens
  chr16:714160-714282
  hypo
attcagcagctttggaaaccccgtgcgtgcctagaggaaaccccgtgcgtgcctgttcctcggtcgctccctgcttcccgcctccccagcccctggcgaccgttgagtggctttctgtgtct

SEQ ID NO: 178739 - DNA, 30 bp, Homo sapiens; identical to SEQ ID NO: 89319
  chr16:714604-714634
  hypo

SEQ ID NO: 178740 - DNA, 16 bp, Homo sapiens
  chr16:714969-714985
  hypo
cgcccggctgaactga

SEQ ID NO: 178741 - DNA, 30 bp, Homo sapiens
  chr16:715192-715222
  hypo
ctgcatggcgcgctcgctgcaacctcagtc

SEQ ID NO: 178742 - DNA, 30 bp, Homo sapiens
  chr16:715576-715606
  hypo
tggtttggacagcccggccctgggggctgg

SEQ ID NO: 178743 - DNA, 42 bp, Homo sapiens; identical to SEQ ID NO: 89321
  chr16:716020-716062
  hypo

SEQ ID NO: 178744 - DNA, 523 bp, Homo sapiens
  chr16:717198-717721
  hypo
tgcacgggtggcagcgacttttaaggagggaactggcccagctgcaggccgacagcctggcagtgatggaccccctagtcccagtggcacgtggagggcacagccaggagcccttttagcaccagctcccccgaccagcatcatgcccagtggggacagtctgggtgggttgggggagccctctgagtgctgcctggtcctggccctggcccacctgcaccgtctacccacagagtgcatgctgaggctggtagactgtgccatggggactgcccaagactttgccggccacgacaacgcagtgcacctgtgcaggtttacaccgtccgccaggctgctcttcacggccgcccgcaacgagatccttgtgtgggaggtccccggcctctgagatgcagcagggactgtggtggtgggcatcacgcctggtcatgccaggcacctggacacaggcttggcagaggcgccaggttgtcaatggcctcatgctgggacaggccaggattcacgtaaatcgcctgga

SEQ ID NO: 178745 - DNA, 51 bp, Homo sapiens; identical to SEQ ID NO: 10451
  chr16:717959-718010
  hypo

SEQ ID NO: 178746 - DNA, 30 bp, Homo sapiens; identical to SEQ ID NO: 28670
  chr16:720868-720898
  hypo

SEQ ID NO: 178747 - DNA, 494 bp, Homo sapiens
  chr16:726553-727047
  hypo
gcaggcagctcctcacggcggtgggtggggggcttgtggatgcggggagctgggtgagcctcacaggcaggggtgccatggggaggtccgtggcccacactcaggcccctgcccccagatcagcagcaagcgctccagcagtttcaagcgggccattgctaacggacagcgggcactgccccgggacgggccgctggatgagccaggcctaggtgtctacaagcggtttgtgcgttacgtggcctacgagatcctgccttgtgaggtggaccgccgctggtacttctaccgtcaccgcagctgcccaccccccgtgttcatggcctcggtcactcttgcccaggtgggccccccggccgctgccccgggagcctcccgcgctcctggccatgaccagcctaacactcgtgtccccagatcatcgtgttcctgtgttacggggcccgcctcaacaagtgggtgctgcagacctaccaccccgagtacatgaagag

SEQ ID NO: 178748 - DNA, 120 bp, Homo sapiens; identical to SEQ ID NO: 89326
  chr16:728000-728120
  hypo

SEQ ID NO: 178749 - DNA, 30 bp, Homo sapiens
  chr16:728454-728484
  hypo
tggctgggggccgggcgtgtggtcaggcca

SEQ ID NO: 178750 - DNA, 253 bp, Homo sapiens
  chr16:731352-731605
  hypo
tggctgacaagctgcccggttgtggggcctctggggccaggcgggtggactggccagagagtgacgtgaagcccccgttccccagcttacagcctggccaaggagcagcggctgaacttcggggacgacatccccagcgctcttcgaatcgcgaagaagaagcgctggaacagcattgaggagcggcgcatccaccaggagagcgagctgcactcctacctctccaggctcattgccgcggagcgtgagaggt

SEQ ID NO: 178751 - DNA, 30 bp, Homo sapiens; identical to SEQ ID NO: 89328
  chr16:732201-732231
  hypo

SEQ ID NO: 178752 - DNA, 30 bp, Homo sapiens; identical to SEQ ID NO: 89329
  chr16:732620-732650
  hypo

SEQ ID NO: 178753 - DNA, 30 bp, Homo sapiens; identical to SEQ ID NO: 89330
  chr16:733043-733073
  hypo

SEQ ID NO: 178754 - DNA, 1089 bp, Homo sapiens
  chr16:734873-735962
  hypo
cggcacacatgctggcgcagcggtggcacctgggggcgggcgggagggagggtgcctcagcgggggctgctgcgctgcctgcaggcccctgccccacctcccgaccccactgccccacctgtcgcagacccagccccggctgctcatgggccgcttgcagtggctgcagttgacgtgcagggtggtggaggcctggttgaggcagctgacggcgcggctggtgctcagcttgaccacctcgttggacacgttccagaggcggaagcgctgcagcaggtcgatgtaggaagtgtaccagtgctcctgggggagggagcgcccggcagtcaggatctgggtgccaggggcggcgctgcaggggggaggccccgcccaccacacacctgggtctgctcgtcgatgtccttgcgcacccgttcacccaggacgatgagcacagacacagccatctgcacgtcgccctgctcagcgtagaagtgcagcatgtcgcgcaccagcacgccgaagaagtcgggcggcaggcggctgtcgtagagcgcgtgtgagacagacaggagcgagaaggaggagtccacgggggccagggaggccacatccgcctcgctgccgctcacgtgcggggagtcggccttgtcctgcaggtgctcgggcccgggaggcgtgtccacgatctcgtggcgcagcggaaaggcctcctgcggcagcacgcactcagggtcctcggctggaaggcagggaccagcggaggctctgagtctgtcctccatccgcctctgaaccccaccctgcccggacccccactcacggtgcgcgtgttccggatccagcaggtacagctcgtcctcctcaccttccacgtcacccagcaggtagtcggcaggtacgtcgctgccctcggtttcctcgttatctgcccgacaatggggcgggcattcagggtcgtctgggacacccccacccctctcccatcagcacccctacccaccccagcctaccctcattggtgatgagtgtggccgaggagtcgagcagaactgtgtcgctccgtgcatctcctttgctgcggtccagccgcgtctcactgcccaa

SEQ ID NO: 178755 - DNA, 138 bp, Homo sapiens; identical to SEQ ID NO: 28674
  chr16:736746-736884
  hypo

SEQ ID NO: 178756 - DNA, 45 bp, Homo sapiens
  chr16:737199-737244
  hypo
catggcagctggcacgaagggccggcgcacgtcccaaacatagat

SEQ ID NO: 178757 - DNA, 661 bp, Homo sapiens; identical to SEQ ID NO: 89333
  chr16:740888-741549
  hypo

SEQ ID NO: 178758 - DNA, 30 bp, Homo sapiens; identical to SEQ ID NO: 126556
  chr16:744800-744830
  hypo

SEQ ID NO: 178759 - DNA, 76 bp, Homo sapiens; identical to SEQ ID NO: 126557
  chr16:745045-745121
  hypo

SEQ ID NO: 178760 - DNA, 96 bp, Homo sapiens; identical to SEQ ID NO: 126558
  chr16:745316-745412
  hypo

SEQ ID NO: 178761 - DNA, 30 bp, Homo sapiens; identical to SEQ ID NO: 89334
  chr16:746931-746961
  hypo

SEQ ID NO: 178762 - DNA, 30 bp, Homo sapiens; identical to SEQ ID NO: 28677
  chr16:747172-747202
  hypo

SEQ ID NO: 178763 - DNA, 112 bp, Homo sapiens; identical to SEQ ID NO: 52643
  chr16:765206-765318
  hypo

SEQ ID NO: 178764 - DNA, 63 bp, Homo sapiens; identical to SEQ ID NO: 52644
  chr16:765585-765648
  hypo

SEQ ID NO: 178765 - DNA, 519 bp, Homo sapiens; identical to SEQ ID NO: 89338
  chr16:767026-767545
  hypo

SEQ ID NO: 178766 - DNA, 709 bp, Homo sapiens
  chr16:771677-772386
  hypo
tctgggctctggcgacggcaggatcgtaagtgcctgcgtctgggtcttcgccgccccacaccgcccacctgctggcgggcgcccctgcccacatcctggttcccacactctcggtgcccacaggtgctggcggcccacaggtgcggcctccgcccggccgtgggctacgagctgaacccctggctggtggcgctggcgcggctgcacgcctggagggccggctgtgccggcagcgtctgctatcgccgcaaggatctctggaaggtaacctggggatccctggccacccgctgacagcccaaggtgcggctgacacctgcgagggctgggggccgggactcggaagctgcgatgacccggtgcccaccaggcctctccccggccggggcgacttctcttccggcaggtgagcctgagggactgccgcaacgtgtctgtgttcctggcccctagcgtggtaggtgcggggttgccagccccgctgggaagccccagccacaccccagggtgtttgctgctctgaggcctgggcctgcctggtgggtgctaggcttggggctaggggggtgagcgcggctgttttctaccggccccgcccccgccccctctactctgctgttctctccctcagctcccgctgctggaggacaagctgcggacagagctgcctgctggggcccgcgtggtgtctgggcgcttcccactcccc

SEQ ID NO: 178767 - DNA, 30 bp, Homo sapiens
  chr16:775649-775679
  hypo
gtgcacgctcaggggcgcgcagcactcaga

SEQ ID NO: 178768 - DNA, 256 bp, Homo sapiens; identical to SEQ ID NO: 126567
  chr16:778110-778366
  hypo

SEQ ID NO: 178769 - DNA, 122 bp, Homo sapiens; identical to SEQ ID NO: 126568
  chr16:778760-778882
  hypo

SEQ ID NO: 178770 - DNA, 30 bp, Homo sapiens; identical to SEQ ID NO: 28681
  chr16:780243-780273
  hypo

SEQ ID NO: 178771 - DNA, 30 bp, Homo sapiens; identical to SEQ ID NO: 89341
  chr16:783309-783339
  hypo

SEQ ID NO: 178772 - DNA, 163 bp, Homo sapiens
  chr16:783582-783745
  hypo
gtccctggacaggacgggccctggctgtgacagaaaatgacactgacccattcccagtgtgcctgcgctccctaacagccaagtccagcggaggagaagtggccttcccacggctcgggccggctcactgcacagcagccggggaaacggatgtcacggggga

SEQ ID NO: 178773 - DNA, 31 bp, Homo sapiens; identical to SEQ ID NO: 89342
  chr16:796912-796943
  hypo

SEQ ID NO: 178774 - DNA, 453 bp, Homo sapiens
  chr16:798240-798693
  hypo
aaggctgccgggccccgggctcgccggtgggtggccccgtgcagcctgttattcataaaacttggagagaaagtgcctttttgtaggaaagtgtggggtgctggcggccatttccacctgtggttggacccagactgcctccccgcgtgtggcccatgccccaccccacacgcacccccgccctctgtcaagcaggactcgggctctccgttggccgagcagacgttttatttgtggaacggaattgctgtcgggatgggcgtggggtcgttagcagcataatcaacacccacatccaccctgggggcagccacgtcttgtcaacaggtggaggccgtgacatgctgcaattagcagctaatgaggaggcctgtgtgacccacgcctccgtcacaggtgcgcagtgagctgtggaaacgccgacaatttaaaatagtcgaacagggccgggcg

SEQ ID NO: 178775 - DNA, 252 bp, Homo sapiens
  chr16:809244-809496
  hypo
ctcaacggaccctcccgcatcggcctcccacggtgctggctgaagggtgagcccaggctggccacagcgcgttttcatcattgtccgcagcttgcagtcggctggttcagagcttagccgggcacatgggcccctctgaggctcctgttcagggctcagccgtgtctacggggccctccgagctcttcctggaccctcctcggctccttcagttcagggctcagctgggcacgtgggcgcctccttggctcc

SEQ ID NO: 178776 - DNA, 714 bp, Homo sapiens
  chr16:809695-810409
  hypo
tttacctgtgagttcccgcccaagccggctgccttctgtcccctccccagagcccttgggtaactggtttgctacaagagtgtctggaatttttcagttgttctctgcggaagggagtttttaaaaggcccttaatcccttcttgacatttgtaagttgacgcttacacctggcagccttgctgaattctgtgtgcgtgaaggtccgattccaccgcgagtcacgatagaaaacccactctgtggagagaccagagatgaccgccgcgcacacctccgttcagcacacaaacctttgcaggtgttcatagcggaggcagattccgtactggggataagagctcacgacatgctgggaggggtttcaggggcagggagggggcttctgtggccccaggtcaggaggagcagctcttccatcagcagcaggcagccagcccagatgcgtagggaagacagctcccacttcgccaggccagagagcgcccgggggcagctctgttccagtcgaccctgcgagaaaggggtgtgcgtgtgcctggagctgggccccgtcctgcctccctgacctgtgtgctcccacagccctgagacggacggctcacagccttgcgaggcccacactgcactgggggtcaggcttgtgctcccgggagtcctgtctgggctgcgtggccaccatccagagcctgctgacctgcgactgggggggcca

SEQ ID NO: 178777 - DNA, 30 bp, Homo sapiens
  chr16:811309-811339
  hypo
accccgcagggcacacgcagacccatttgt

SEQ ID NO: 178778 - DNA, 30 bp, Homo sapiens; identical to SEQ ID NO: 89346
  chr16:815538-815568
  hypo

SEQ ID NO: 178779 - DNA, 478 bp, Homo sapiens; identical to SEQ ID NO: 89347
  chr16:816635-817113
  hypo

SEQ ID NO: 178780 - DNA, 30 bp, Homo sapiens
  chr16:824274-824304
  hypo
ccttcccacctggcacgaagccaccacgct

SEQ ID NO: 178781 - DNA, 271 bp, Homo sapiens
  chr16:824929-825200
  hypo
gggggtctgcggcaccgatgctggacgcgtccatgtcacacaccagggccccgagcagttgctggtcggaggcgctgagtcgcaggcgggccaccccctgcagggccagcaggtcggcgcccagcgggaggctgcctccaatgcaccgggcccatcctgcccaggcgcccaccagacaggccacagccaccccccacacgctccggcccaccccacccagcgcccaccaggcaggccacagccgcacgccacagggcgaccctctggtcgg

SEQ ID NO: 178782 - DNA, 100 bp, Homo sapiens
  chr16:830346-830446
  hypo
tggagcatgcacaggcgtgatgctgtgggtgcatgcaggcacgcacatgtaggtgacagtgtgcacgtgtaagtgacagtgtgcacgggtaggtgacagt

SEQ ID NO: 178783 - DNA, 141 bp, Homo sapiens; identical to SEQ ID NO: 89349
  chr16:834384-834525
  hypo

SEQ ID NO: 178784 - DNA, 31 bp, Homo sapiens; identical to SEQ ID NO: 89350
  chr16:835960-835991
  hypo

SEQ ID NO: 178785 - DNA, 31 bp, Homo sapiens; identical to SEQ ID NO: 89351
  chr16:837307-837338
  hypo

SEQ ID NO: 178786 - DNA, 30 bp, Homo sapiens
  chr16:843280-843310
  hypo
ggtggccacagcctcggcccagatgctcac

SEQ ID NO: 178787 - DNA, 411 bp, Homo sapiens
  chr16:844996-845407
  hypo
ttgtggagggtctgcgaagcctcgtggggcaggcggcaggcaggagtggagggtctgtggcgggaggtggagggtccgtggtggtgcaccttccctggggtgggcaggagctcaggggttgccggccgcctgcagggcttgtttgacaacttcctgcgtctgcggctgcgagactccagcctgggtgctgtgtgtgtggccctcgactggctggccttcgatgacctgctggcgggggctgctcatcacagccagagcttccagctgctgcgctacccacccttcctgcccgtggccttccatgtgctgtttgcttccagccacacacccaggatcaccttccccagcagccagcaggaggtgtgctcgtccctgcaccacgcctgcccccggccccgtgcccgcccccct

SEQ ID NO: 178788 - DNA, 418 bp, Homo sapiens
  chr16:845725-846143
  hypo
gctggtgtccggcatcgcgccagccacgcgcagccgggccacgccccaggccctgctcctcgatgccctctgcctgctcctggacattcttgcacccaagctccgccccgtgagtgccgtccccggggtgggggattccccgcctgctgccctcctgtcctaggtgagcacacatttgtacagcctgctcagctccctgtctgctgcctcccatcccctaggtgagcacacagctgtacagcacccgtgaaaagcaacagctggccagcctggtgggcacgatgctcgcttacagcctgacctaccgccaggagcgcacgcccgatggccagtacatctacaggctggagccgtgagtcccccagtgcctggggtgtgctccagggtcatgctccccggctgtgctccatgttcaggg

SEQ ID NO: 178789 - DNA, 144 bp, Homo sapiens
  chr16:846348-846492
  hypo
cactttccaacactccgtttcccgctgtgggatggccatgggggtggtgggggtgaggcatggggcagtggccccggggtcctgctgccccagcgacggcaccaacttgcaggacgctgagtcactctccgtggcagccatcgg

SEQ ID NO: 178790 - DNA, 145 bp, Homo sapiens
  chr16:858656-858801
  hypo
gcattctccagaggccgaccaatatattggagagacggattaatagacggatgatagtgggtttgtcaggggaattggcccatgcggttagggaggccgagaagtcccgggagggatgccatctgcaagccggagacctgggatg

SEQ ID NO: 178791 - DNA, 30 bp, Homo sapiens
  chr16:859324-859354
  hypo
atctgggcccccaggcgattgatggtatcc

SEQ ID NO: 178792 - DNA, 105 bp, Homo sapiens
  chr16:876965-877070
  hypo
gagttttaaactaaaaaatgtaaaagccgtttcaagactcaccaggccgaggagggaggttctctgaggagcggctgtgccttcggggagcggagggtgcgcaca

SEQ ID NO: 178793 - DNA, 30 bp, Homo sapiens; identical to SEQ ID NO: 89355
  chr16:883607-883637
  hypo

SEQ ID NO: 178794 - DNA, 624 bp, Homo sapiens
  chr16:894557-895181
  hypo
acacacagtggacagcgagctccaacatgtccacgggtgaacatcagcgtggccaccaccaggtccagagcacagtagaccctgtgccgccagtgtccgtcgccttccacacgtggccgcagttctgtgcatggggccgcccgccatcctgccgcctctgacctgggctgtgggctcgtgacacgtgtctgagctttccagtcgtggccgtgacgctctgtgcggaggctccgtccgcgtgctgcctccgtcccctctgccctggacggccactcactacctttgtctctcaccctgggggtttcatgaccccggagcctccacgtcctggtacagagcctgcctctccgggactgggcttcggccgagcagacaccgcctagctgctctttgaccagcgttctctgctctgcgtctggctggcatcggcggcttgctgagtccagcctggcatctcgctggcatcggcggctcgctgggtccagcctggcgctgacacgtttctgtgctcatttcattttacaaatcaactccccaaggtgaggtgggctcgtgccagcaggtgggagccggtcgtgcacgtctgcccagctccgtgctgagtgaggacgtgttgggggcttg

SEQ ID NO: 178795 - DNA, 371 bp, Homo sapiens; identical to SEQ ID NO: 89357
  chr16:898859-899230
  hypo

SEQ ID NO: 178796 - DNA, 30 bp, Homo sapiens; identical to SEQ ID NO: 89358
  chr16:900730-900760
  hypo

SEQ ID NO: 178797 - DNA, 30 bp, Homo sapiens; identical to SEQ ID NO: 89359
  chr16:901019-901049
  hypo

SEQ ID NO: 178798 - DNA, 276 bp, Homo sapiens
  chr16:902048-902324
  hypo
cccattgccccacaccggcaggtgggaccctccgtcacacagaacacaggcagccgggggctgggcgtctcgcacagactctgtggagagttcagacgtgagggaagaagctgacatgcccgatgggagggctgaggcccgtgattccgtttatatgaagggtcccgaacagggacccacagaggcatgagatggattccctggggctagaggctctgtctggaagatggaaatgggctggatggaggggaggtggatgcacggcctcgggagcgc

SEQ ID NO: 178799 - DNA, 31 bp, Homo sapiens
  chr16:902720-902751
  hypo
gggaggacagccgcacgggagggttccgggc

SEQ ID NO: 178800 - DNA, 30 bp, Homo sapiens
  chr16:902966-902996
  hypo
tgtggccgacagctccgcgtggtcgctccg

SEQ ID NO: 178801 - DNA, 30 bp, Homo sapiens; identical to SEQ ID NO: 28688
  chr16:903877-903907
  hypo

SEQ ID NO: 178802 - DNA, 30 bp, Homo sapiens; identical to SEQ ID NO: 89362
  chr16:905629-905659
  hypo

SEQ ID NO: 178803 - DNA, 97 bp, Homo sapiens; identical to SEQ ID NO: 89363
  chr16:919966-920063
  hypo

SEQ ID NO: 178804 - DNA, 30 bp, Homo sapiens
  chr16:924085-924115
  hypo
agttctggaaccaggcggaggcggcggttg

SEQ ID NO: 178805 - DNA, 265 bp, Homo sapiens
  chr16:924503-924768
  hypo
tgctggctgggcggccgggctctgcggtcactgctcttgtgcacctctccaggcaggcagcggccccagggccccgcggaaccctccggaacagctgtgtaaactgcgtgggaggagggaggctgctcatgccgcaactccccaacggaaggatcacgggaaccaggacaggctccgggggacggtgctcagatgggaacacacggaaccaggacgggatccggggaggcggcgctcagatgggaacacacggaaccaggacagg

SEQ ID NO: 178806 - DNA, 30 bp, Homo sapiens
  chr16:925045-925075
  hypo
cgcagagcacagccacgaccctggtgcttc

SEQ ID NO: 178807 - DNA, 30 bp, Homo sapiens; identical to SEQ ID NO: 89364
  chr16:925814-925844
  hypo

SEQ ID NO: 178808 - DNA, 30 bp, Homo sapiens; identical to SEQ ID NO: 89365
  chr16:928139-928169
  hypo

SEQ ID NO: 178809 - DNA, 243 bp, Homo sapiens
  chr16:929543-929786
  hypo
gggcagggcgggcggcgcgggctcacctggaacaggatctgcagcaccccgtggatgatgcacgcccgccggccgaggaagaggaagaagggcaccaggagctcgatgaagtggttgctgagcgtctcgaagcgatggaaccaccagggtgagtggtgcaggtagtacgccacaggattgggcatcggctgggtctgcagggacaggaggggccgtgaggtgcctggccgatctcggggggcg

SEQ ID NO: 178810 - DNA, 30 bp, Homo sapiens; identical to SEQ ID NO: 89366
  chr16:930013-930043
  hypo

SEQ ID NO: 178811 - DNA, 30 bp, Homo sapiens
  chr16:935551-935581
  hypo
ccatacaaacacgagcgacgagaaggctgg

SEQ ID NO: 178812 - DNA, 30 bp, Homo sapiens; identical to SEQ ID NO: 89367
  chr16:938034-938064
  hypo

SEQ ID NO: 178813 - DNA, 30 bp, Homo sapiens; identical to SEQ ID NO: 89368
  chr16:940182-940212
  hypo

SEQ ID NO: 178814 - DNA, 30 bp, Homo sapiens; identical to SEQ ID NO: 89369
  chr16:941933-941963
  hypo

SEQ ID NO: 178815 - DNA, 30 bp, Homo sapiens; identical to SEQ ID NO: 89370
  chr16:943023-943053
  hypo

SEQ ID NO: 178816 - DNA, 240 bp, Homo sapiens; identical to SEQ ID NO: 89371
  chr16:943453-943693
  hypo

SEQ ID NO: 178817 - DNA, 30 bp, Homo sapiens
  chr16:944135-944165
  hypo
ccgtcccctgtccaccggaccgtccgccca

SEQ ID NO: 178818 - DNA, 30 bp, Homo sapiens
  chr16:944401-944431
  hypo
cactggaccgtccgtcgactcatcccctgt

SEQ ID NO: 178819 - DNA, 353 bp, Homo sapiens; identical to SEQ ID NO: 28691
  chr16:945416-945769
  hypo

SEQ ID NO: 178820 - DNA, 425 bp, Homo sapiens
  chr16:946275-946700
  hypo
gaggctcagccaccccgcgcactgtgaaggctgcctctggcggggccatgtctgggtccggcatcgccgtctctagggtcttgctgtacgtccctgccctcacatgccctgtgcccccaacgacagggagggcgccgaacacccgggagtgttactgtttaaagacctgaagggtgaactgttttaaaaactgagagtcaggtcttctggaggctgggtttgctcagatcacaaaagcaccggagactgtttcccgcttgggctcctgttctgcaaacaggcatgaaaacagccgagggtgtccagctgaccgggcggagaaggccccactcctcaaggcgctgcccacacccaggggagctgctgcttctgatgaaatgcacggctccaccgggcaggggcacaaccaccgccactgctccccc

SEQ ID NO: 178821 - DNA, 208 bp, Homo sapiens; identical to SEQ ID NO: 28692
  chr16:947036-947244
  hypo

SEQ ID NO: 178822 - DNA, 130 bp, Homo sapiens
  chr16:949644-949774
  hypo
tcaggtcttgatgtcggcagcaccgctccacgtctgcctttcagcgccgcccatgacccacacctcccatgggctgcggaccctctggcaggctcgggggtgaagcatgctcggcgtaaagcgctttgca

SEQ ID NO: 178823 - DNA, 30 bp, Homo sapiens; identical to SEQ ID NO: 89376
  chr16:951790-951820
  hypo

SEQ ID NO: 178824 - DNA, 30 bp, Homo sapiens; identical to SEQ ID NO: 89377
  chr16:958324-958354
  hypo

SEQ ID NO: 178825 - DNA, 30 bp, Homo sapiens; identical to SEQ ID NO: 89378
  chr16:961201-961231
  hypo

SEQ ID NO: 178826 - DNA, 687 bp, Homo sapiens
  chr16:962796-963483
  hypo
cttgaggaattccagcagctgcgcggcgtgcacaagggctgccattgttctccgcctcagcgtggcggacaacgcgtccccaggaaagtcaataagcagcacgctgccagggcggcctcagcgccaaggtcagggccagggctctccagacagctctcacccagcaaacaccagcgctgcctgaagcgagccccaggcacccgaacgaggcggcaacacgcagggccacagcacacgctgccactgccggggagaggagccgtcctcgcccccgcctcagtgcctttcccgttgcgcagctgcacgcgctgcctgctgggcgccagcatctgcacgccctgctcttccccagggacctcccttccctttagccagggggacggctccgggagggcccctgctccactccacggctccggcgtcgtttccacctcgtgctgtgctgggccttccgggagactgagcacaccctgtgaggagcctgacgcgttctgcctgggtaacggggcagtagctcttgtggggaacattcacttccacggccgctgctctccttcctgcgacacagacagcgttggcccaatcagcggagaagctgcatgtgcacggtccagggagatgctcctgagccctgcccgctggacagggtgcgacacccaactcctgccctggcgcctcgcccggtgc

SEQ ID NO: 178827 - DNA, 179 bp, Homo sapiens; identical to SEQ ID NO: 89380
  chr16:966495-966674
  hypo

SEQ ID NO: 178828 - DNA, 30 bp, Homo sapiens
  chr16:967252-967282
  hypo
tgctgcgcaggcccacgtgaagaaatgcca

SEQ ID NO: 178829 - DNA, 127 bp, Homo sapiens
  chr16:967567-967694
  hypo
gctgcgggcaggtgccgttctaggggcttgtccaggcccgctgacccctccggctcactggagatgaccaggcagggctgccctcccctaagagacatgcctgcccccgtaccggggctgtttgcag

SEQ ID NO: 178830 - DNA, 143 bp, Homo sapiens
  chr16:967905-968048
  hypo
tgagcttcacagctgcgtctgcccgctggccatgtctcacgtcctgaggacgtttcacaggagggccgcccttctgctgcccgcaagacatacaggtgcagagctggggacatggcgtcgggacgtggcgcggggcggctggc

SEQ ID NO: 178831 - DNA, 429 bp, Homo sapiens
  chr16:969054-969483
  hypo
cctgtgtgggcagtcggcatgtcggcgtggactcccaggctgcagaatcaggtgttcccctcaccacacagtctcgggggacagtctgttttcactcgcggcttttccagaccctcccctgacactcggcagtcggcgtttccaggtgtgctcagtgtggccaacaggcacgatccaccccacgtggagggtggtgtgtccaggggctatgtgagctcacacactcacagggaaggaacgtgggggttggcacacctgagaagtgggcgggaatcaccccacatgcccgcggcagggggcagggcagccctgtggcctctgcttcatctctgtcaggacctatggtggacacacacagctcctgccccaccttcatcactgctgagcccccctgggaaagctcatatctccagcgctcgcgtgaggaca

SEQ ID NO: 178832 - DNA, 36 bp, Homo sapiens; identical to SEQ ID NO: 89383
  chr16:969857-969893
  hypo

SEQ ID NO: 178833 - DNA, 30 bp, Homo sapiens; identical to SEQ ID NO: 89384
  chr16:979173-979203
  hypo

SEQ ID NO: 178834 - DNA, 30 bp, Homo sapiens; identical to SEQ ID NO: 89385
  chr16:980007-980037
  hypo

SEQ ID NO: 178835 - DNA, 30 bp, Homo sapiens; identical to SEQ ID NO: 28695
  chr16:981127-981157
  hypo

SEQ ID NO: 178836 - DNA, 918 bp, Homo sapiens; identical to SEQ ID NO: 28696
  chr16:981462-982380
  hypo

SEQ ID NO: 178837 - DNA, 30 bp, Homo sapiens
  chr16:982851-982881
  hypo
caggtcaccacacacgcttcctcacgtcta

SEQ ID NO: 178838 - DNA, 30 bp, Homo sapiens; identical to SEQ ID NO: 89388
  chr16:983855-983885
  hypo

SEQ ID NO: 178839 - DNA, 172 bp, Homo sapiens
  chr16:1014777-1014949
  hypo
tcgggtgtcatctgacgaggatgccaagctacaagggctgcggtgagactcagagacacgctaccaatggcaccgcggccccacctcgccgaagcagctgccggggagacgcgataaaactgccccacgcggaaaagaaggaagggcggtgagcaggcgcacagaacagacg

SEQ ID NO: 178840 - DNA, 30 bp, Homo sapiens
  chr16:1016448-1016478
  hypo
cgccatggcacccacgaaaagtgccacaca

SEQ ID NO: 178841 - DNA, 567 bp, Homo sapiens
  chr16:1017654-1018221
  hypo
catccccgaccacctcgggcagcctcggtcctcccaggagccgtcacggcccgagaacgccgctgcccagatgtgaaccgggtgtccaggatacgcaggctgcacagtggcgtgaatgaagggcagggctgaactccagggcctacggacaatcgctgcacagccgggccagtggctgaccctgcttcctcgctgtccactgggggtagtggcgttgtcaccaggaggtcagcaccgggcagggtgctacttcagcatctgctcaacgcagtaatcacactagggacccgagtccacacgtcaggaagacaggtgtgtcttcaactctgagccctgtgaaaatgccgctttccgctaacacactccggctcccacagcacagcagggcatgcccgacaccccaggacgcccgcggtatgcacgtctgtgtgcagtgagcacacccctagcacctacacacctcggtggcagcacatggaaacgcccaggcccgcggtgggaaggagccagccccaggacggatgcaaagtcaggttgaatgcagaggcctgtcgctggcagccggcc

SEQ ID NO: 178842 - DNA, 98 bp, Homo sapiens; identical to SEQ ID NO: 89390
  chr16:1019651-1019749
  hypo

SEQ ID NO: 178843 - DNA, 30 bp, Homo sapiens; identical to SEQ ID NO: 28698
  chr16:1021765-1021795
  hypo

SEQ ID NO: 178844 - DNA, 367 bp, Homo sapiens
  chr16:1022297-1022664
  hypo
ttaaagatgttgcaacgggtacgaacacacaaacatcctccgcatgctggcccagcctccgggagcgtggtgtgtgcctgagggctcggagccttggggatcgcaggaggcatcggccctggctggcgcccggcacccaagtccctccacagagcccacgacccgtacctctcctcgtgacctgggggccagcttaggaagggccggcacagcccacactgttcccctcatctgtggggaacagggagccccacaccctgggaccacgcctgcagagcgggccctgtctgggtgccaggcctgctaggggacggacggcgagagggactgccctgcgtcaggtgtggccctgcgctgtcctcaggtg

SEQ ID NO: 178845 - DNA, 30 bp, Homo sapiens
  chr16:1022894-1022924
  hypo
tcttgagacgctgaccgcaggggtcccatc

SEQ ID NO: 178846 - DNA, 641 bp, Homo sapiens; identical to SEQ ID NO: 126578
  chr16:1031782-1032423
  hypo

SEQ ID NO: 178847 - DNA, 214 bp, Homo sapiens; identical to SEQ ID NO: 126579
  chr16:1035437-1035651
  hypo

SEQ ID NO: 178848 - DNA, 30 bp, Homo sapiens; identical to SEQ ID NO: 126580
  chr16:1035867-1035897
  hypo

SEQ ID NO: 178849 - DNA, 30 bp, Homo sapiens
  chr16:1036200-1036230
  hypo
cggcttatgggaggccgccctggagggccc

SEQ ID NO: 178850 - DNA, 222 bp, Homo sapiens
  chr16:1036852-1037074
  hypo
tctcccttggcaccgcgttcggaggacgcaccctcactcccctgctgccttcactcctttctgaccaagcaacgctaacttttgtacagatcgatttgataaaattaaacaaagtgctttttatggacgtgggctgcattttgtgtgttgctttgtgtgagcctggggctcccggggtaaagatgtccggcaaaggcaggatcaggccgtgccacgcggccg

SEQ ID NO: 178851 - DNA, 44 bp, Homo sapiens
  chr16:1037684-1037728
  hypo
tctacaattttaacacggtggcctgggtagggggccacccaccc

SEQ ID NO: 178852 - DNA, 185 bp, Homo sapiens
  chr16:1037750-1037935
  hypo
ccctgcccctcaccccacagtggggatcccgttccagggcctaccaagaacagcagggggaggggctgtgcggatttatgacggttccttgggggtggggtgtgccaagccccacgggcgaggaggaggctgggagggggctgccgaaagccaggttcacagacatccgtcgcctctgtggaaca

SEQ ID NO: 178853 - DNA, 30 bp, Homo sapiens
  chr16:1038267-1038297
  hypo
ccagtatctgagtttcgtgaaggtcaggga

SEQ ID NO: 178854 - DNA, 31 bp, Homo sapiens; identical to SEQ ID NO: 28700
  chr16:1038887-1038918
  hypo

SEQ ID NO: 178855 - DNA, 193 bp, Homo sapiens
  chr16:1052509-1052702
  hypo
gggtgaaggaacccacggacgtggctcatccataccgcggaacgtgagccatgaaaaggggcagcctcggctcagccaccgcagggaaggactcgacacacgccgagcagaagaggccaggcctgagaggccacctgcgattccatctgcggaaatgccagaaagggaggtccgcagacgcaagagctggact

SEQ ID NO: 178856 - DNA, 30 bp, Homo sapiens; identical to SEQ ID NO: 28701
  chr16:1053700-1053730
  hypo

SEQ ID NO: 178857 - DNA, 30 bp, Homo sapiens; identical to SEQ ID NO: 28702
  chr16:1056977-1057007
  hypo

SEQ ID NO: 178858 - DNA, 343 bp, Homo sapiens
  chr16:1061203-1061546
  hypo
cggccagggcagagacgtaggacagagacgcagcgcagagcggccagggcagagatgcagggcagagacacagcgtagagcggccagggcagagacgcagggcagagacgcagggcagagacacagggcagagacgcagggcaaagcggcagggcagagacgcagggcaaagcggcagggcagagacgcagggcaaagcggcagggcagagacgcagggcaaagcggcagggcagagacgcagggcaaagcggcagggcagagacgtagggcagagcggcagggcagagacacagggcagagcggcagggcagagatgcagggcagagcggccaggggcccag

SEQ ID NO: 178859 - DNA, 30 bp, Homo sapiens
  chr16:1062238-1062268
  hypo
ggtttgagacactgccggggtcccttcctg

SEQ ID NO: 178860 - DNA, 30 bp, Homo sapiens
  chr16:1063180-1063210
  hypo
cccaggacacatgcacgcacacccaggaca

SEQ ID NO: 178861 - DNA, 621 bp, Homo sapiens
  chr16:1075860-1076481
  hypo
cgtgttcagcacagacgcagccctccactaaaagatatattttccatctgaggttggttgaatccccaaaagtggagttcacggacgcggccggctggctatatcatgcagccataaaagggaaagacgtacagacaccccacagatgagtcccggaaacacggcgcacgatgacacgagccagacacaaaaggacgcacattgtgactccatttacacgacaggtgcagagaaggaaagtccggagacagaacggagcccattggttggcgggggctggggagtggtgggagtgcctggtggtttgggggggactccctttgcgctgataaaaatgttctgaaagcgacagtgaagacgttcgcacagccctgcgaatacggcaaaggcccctcgagctgcgtgcttccgtggctgggtggcgtgctgtgtgaatcacatctcagtagagctgttaggtaaagaatgtaagcatctcattcattatttttatattgactgcacgctgccacgataatattgtggataaactgggtgaagtgaaatattagcatgaatttgaatttcacgtcttctatttcaccttcttcgctgtggacaccagaacgttcgcagttgcac

SEQ ID NO: 178862 - DNA, 30 bp, Homo sapiens
  chr16:1076689-1076719
  hypo
aggtcccccgcaccgcggcagctaacgggg

SEQ ID NO: 178863 - DNA, 30 bp, Homo sapiens
  chr16:1077305-1077335
  hypo
acggctctctgcacccgcataccctgaata

SEQ ID NO: 178864 - DNA, 416 bp, Homo sapiens
  chr16:1077581-1077997
  hypo
gggaacagttgttcccgtgctattttttacccccgtgggctgcgagttctggaacgttccaaacgacagtgacaacggtgacggtggtgggggcagggagggtggcgtccttccgtccctaagcgcacgcgggccgggcgctgctgaccacatcaccgtagtgaatgacttctttctcacggcggctggcgtcctattggctattaaatataatcattacaataattattaaatataagaatgtcatattgtattatattcttttacggatgggcaaggtgaggaccttgggccaggcccttcctgaaggccagagaccccggcatgccctcgggggaggagggaggtggggccggttggtctggggccccgctggccggagcaggcccggccactggacacggagcggcagaggc

SEQ ID NO: 178865 - DNA, 326 bp, Homo sapiens
  chr16:1081653-1081979
  hypo
ggctctgcctctgccggttactgcctctaccatacagatggggaaactgaagctcagggaggtcaggtgcccagcctcagctacccaatgcagcgctcggtgggcagtgtggggctgaccacccgccctggattgcgggcacagcggcccccacaccggctgccggggctgcacaggctctggtgggctttagggtggcaaacatgcccaggttggggcctacaccccccaggttgagggagtggctccctggggtggctgccgcccatcccggcgtttctgggcttgtggacgtgtcgccccagccctgccggtcttcacgcggc

SEQ ID NO: 178866 - DNA, 37 bp, Homo sapiens
  chr16:1095306-1095343
  hypo
ctgtgctgaggggccccgccgacggtggggtccagac

SEQ ID NO: 178867 - DNA, 400 bp, Homo sapiens
  chr16:1110840-1111240
  hypo
ccccgcaccacaacccgagacctagaagaccctatgccccaggcggggctgaacaggacagacctcgaagagccggtccccagatcggaccgccaacaaccaggccggattccgcgcctccagccggtcagtgccttggcaaggcaggagcgggtgaaactcccagccctcccagggagcagtcagatgatgacacatccacacccgtccacagggagggagtgcgacaaggcctgtggctttctgcgcgagaatcggccagtgtcctttggggcccgggatggggtttcagcacccactctcactaccggggctcgggagggagggctggagagcctccatctggtgccgtcggtggccactcctcagacagcgcgggcgggttcgcaggccctgggca

SEQ ID NO: 178868 - DNA, 191 bp, Homo sapiens
  chr16:1111875-1112066
  hypo
gggtcccaaaagcaacgaccggcaccttgtaaggaggctgctgacagcagggagaagtcgggcgcgtgacgtcagaggcagagactggagagaggcagcccaggaacaccacgggtggctggcagtgcggagcggtagggccctcccctggaggcttcggagggagtgtggccctgcggacacctcgatct

SEQ ID NO: 178869 - DNA, 256 bp, Homo sapiens
  chr16:1112294-1112550
  hypo
ctgacggggtcgtcccggctgcagctccggccctggctccttgaggcctcgcacccttcctggcacccactggctgggctctcggggcctctggtcaccccgtgggtgctgattgaatcgggacaaacgctgtgtgcagctaaggggtgactcaaggccggccaggcccagagctgatcccaggccgggaacagcagcagtgatggtgtcggcatccaccgtgtccctcccagggcccggccgtgggagccgaggg

SEQ ID NO: 178870 - DNA, 95 bp, Homo sapiens
  chr16:1113829-1113924
  hypo
ccggtgagccggcgtcgtggccacagccttcacactcccagccgctgcaggtccccgtttccgtacgtcacccagcgccacgcttctgcacccac

SEQ ID NO: 178871 - DNA, 837 bp, Homo sapiens; identical to SEQ ID NO: 89400
  chr16:1129248-1130085
  hypo

SEQ ID NO: 178872 - DNA, 31 bp, Homo sapiens; identical to SEQ ID NO: 28704
  chr16:1147812-1147843
  hypo

SEQ ID NO: 178873 - DNA, 286 bp, Homo sapiens
  chr16:1154983-1155269
  hypo
gcagctccgtctccacgtagtcgcccacgaggtaagggtgccagcattgctcgtggtactgcaggttgttggtggcgatggagaagggcacggtcatggtgtccgaggcatgacacagctgcggctccggggccagcagcaggcgggtctcagcggcggtgctaccacctcccactcaggctccaacttccagccgcgcgtgtcctacggctgccgcccaccctgtgtgtgtggagtccctttgtgtgcactgtgccgcggcctcggtctccgctgcccactgctg

SEQ ID NO: 178874 - DNA, 30 bp, Homo sapiens
  chr16:1166572-1166602
  hypo
gggacgccaggtctgcgggcggcaggcaga

SEQ ID NO: 178875 - DNA, 32 bp, Homo sapiens
  chr16:1173373-1173405
  hypo
acctccggcctcccgcgcgccttcacctccgg

SEQ ID NO: 178876 - DNA, 30 bp, Homo sapiens
  chr16:1179674-1179704
  hypo
cccaccccaggctccggctgagtccacaag

SEQ ID NO: 178877 - DNA, 30 bp, Homo sapiens; identical to SEQ ID NO: 89403
  chr16:1179926-1179956
  hypo

SEQ ID NO: 178878 - DNA, 20 bp, Homo sapiens
  chr16:1186710-1186730
  hypo
gttgaaattgaaattggtgg

SEQ ID NO: 178879 - DNA, 449 bp, Homo sapiens
  chr16:1187522-1187971
  hypo
ccactccaccaagagtgaaaacgtccattgcactgaaagctggagcccctcgctccccaccccacccccagaagcggcccccctgctctccatcacggtgggtgaatccgaggccccaggatggcgtgtgagcgggatcagccgcatgcgctgttttcctctggcttctcccacccggcacaatggccttgacattcaccgcacttccgcgtccgcagctcactcatccctggtgcggttgagtcatgtctcatggtctgaacgtccgcggtggtttagctgttctcctgtcggtgaacacgtgggccgtttccagctcggggctactgtaagtcaagctgccacgagcactgacgtagggaacagcgtgtgacacatgcttccatttatccagggtcaacacctacccgtagagagacgggatcatgcacccaatacacatttttttt

SEQ ID NO: 178880 - DNA, 30 bp, Homo sapiens
  chr16:1195792-1195822
  hypo
cactctaggcccacgcgtggtcatctgtgg

SEQ ID NO: 178881 - DNA, 31 bp, Homo sapiens
  chr16:1196743-1196774
  hypo
ttttcagtgcacccagcggtgcagccgtctc

SEQ ID NO: 178882 - DNA, 110 bp, Homo sapiens; identical to SEQ ID NO: 89406
  chr16:1198573-1198683
  hypo

SEQ ID NO: 178883 - DNA, 228 bp, Homo sapiens
  chr16:1199856-1200084
  hypo
gctcagcgaagggcgcgcatcacggcatcaccgctctcaggacgatttcccgtctcgtctcactggaccgtctgccgtttatgtcctttctcggtggaggccctcacgtcgcgttgaggtggtccccgctccggctgcgtgaacgcggcctcagctgcctcatcttccggcagatggatgttcagagcagggagcatccatgttccaggcgtgcgggcacctgtcccg

SEQ ID NO: 178884 - DNA, 40 bp, Homo sapiens; identical to SEQ ID NO: 52658
  chr16:1202546-1202586
  hypo

SEQ ID NO: 178885 - DNA, 494 bp, Homo sapiens; identical to SEQ ID NO: 52659
  chr16:1203265-1203759
  hypo

SEQ ID NO: 178886 - DNA, 155 bp, Homo sapiens; identical to SEQ ID NO: 10459
  chr16:1203807-1203962
  hypo

SEQ ID NO: 178887 - DNA, 108 bp, Homo sapiens; identical to SEQ ID NO: 10460
  chr16:1204002-1204110
  hypo

SEQ ID NO: 178888 - DNA, 192 bp, Homo sapiens; identical to SEQ ID NO: 126590
  chr16:1204128-1204320
  hypo

SEQ ID NO: 178889 - DNA, 30 bp, Homo sapiens
  chr16:1206819-1206849
  hypo
acctctcctgaaccccggggtagacgctca

SEQ ID NO: 178890 - DNA, 156 bp, Homo sapiens
  chr16:1207051-1207207
  hypo
gggttatgtgctgcccggactcccggggttcctgactccgcgttcgcctgcgacacagctgccgccgtcccggcacacggacggggcggggcccccgggaatgcttggaggccaggaagggggaccctgcttcggtccctgcgagagcgagggagg

SEQ ID NO: 178891 - DNA, 126 bp, Homo sapiens
  chr16:1207500-1207626
  hypo
tgtcacgctgctccgcgggcgtcccccgggagtgtgagagggcacccgtctggaaagggccagtcccgcctgcgcccgcctccccgggctccacgtgccccgcaggcctctcgtgggcaggacggg

SEQ ID NO: 178892 - DNA, 30 bp, Homo sapiens
  chr16:1213317-1213347
  hypo
ctgggaggccggcgccggggtacggtgtgg

SEQ ID NO: 178893 - DNA, 45 bp, Homo sapiens
  chr16:1213953-1213998
  hypo
gaagaggggagaggccgtgtctggctcagccgcccctgccccagc

SEQ ID NO: 178894 - DNA, 212 bp, Homo sapiens
  chr16:1214593-1214805
  hypo
ccgggcggtgccgagcgtggctacaccaggctcactgctgcacagaatggggcacagttaaaacctgggagtgaggcctttccgtcggagacccttcggatctcccttctgtgagatcttggccctcaagccccgcagaggggcctcctggggttctgtcggtggagctggggtctggtggtgctgccctcactggccgggctccggatatg

SEQ ID NO: 178895 - DNA, 177 bp, Homo sapiens
  chr16:1215008-1215185
  hypo
cgtggggttctggggcgtgaaggacacctgtgcaggggtgggaacagtggcgctcacctgaccggggcaaggagggggctgatggggcaggaggagcggagaaggtgctggcatgtctgggcccgggagtgggtgggggtgcggcaggcaccagctgaccaccgtggcgcgattgct

SEQ ID NO: 178896 - DNA, 1026 bp, Homo sapiens
  chr16:1216477-1217503
  hypo
taatttatccaccacctaactcgccaatgaagggtccaattcggtcgttctccctgtatcctcgcggtggtgcagccccagcagcgatgggttccagaatgctttcctcgccccgagaggaaaccctgcagtcagctgtctcggcgtctcccgctggccttttccgtctccgaggttggcctgttctggacgttccctgtatatgggatcccacgtggtgtggactcctgcaccggcttctctcgagctttgtgcgggccggtcgtccatcctccccgcagagccctgacccttccacggttagatgcgccctcatgtagacgggctgcggtgtttatctcttcaccgctggtggatgtctgggccgtttcaccctttgctgctgttcatggcgctgccgggccgtccctgctccaggttcgggggaaaccctggcttcgtgtctcttggacgtaaatctgggagcaaaattgctgggtcaggcggaaacagtgttgagtcctcggaggaatggccaggctgttttccaaagcggtgcccacctgttgacccacctctcgcccccagcttttgggtccctgagtggtggttcagcagcagtgagtgctgacaaccacacccagccggagtccagggctgtgggagtggacacggcccttcctttcctcgccgaccctttggggcgtctcccatcgggaaatggcagcccctgacctgccccgtggggatgaaacgggctctttgcggggggcctgtggggtatgggcctcctgtcagcagcccgtcccggtgggtggggcttgccggccgcccgcgaatgtcaggaaccttggattcctgacacacgggtgcgggggcgatatcggcgcggagcgggcggggtggcgcccgggccgcgggtgggagaatctggcgtgtgtgtttgcacggcatccatccctccatccgtcctctggagaatttcaacacccacacttggaataaaaaaaaaaattattaatgagcttggtgcggttgccatgggaa

SEQ ID NO: 178897 - DNA, 237 bp, Homo sapiens
  chr16:1217938-1218175
  hypo
gccaggcctgttccccggggctgcctggaggcggccgcttgtccccaaggcctggtgaccgcacctctgtctgccctaggccttcgagttgggggacattttgtaaggagccgctgtgcctaggccagagatgttttcggaaggggtgcctgtaccccgagaggtggaccagaattcccctggggcacggtggcgggagaccagggcggcctctggtgcccccgccccctccagttg

SEQ ID NO: 178898 - DNA, 30 bp, Homo sapiens; identical to SEQ ID NO: 28711
  chr16:1227387-1227417
  hypo

SEQ ID NO: 178899 - DNA, 1216 bp, Homo sapiens
  chr16:1236136-1237352
  hypo
gggcgggtgactagacggtcggcgtgcgtaggggccggaggcggggtgtgtgcagggccagggtgtaccgtgctggtcctcccagggctgcttggggagagcctgtttccttagtggtgttttgaataagaatgcgcggctccctcgaggtgtcccagtggggctgttcagaagctgggcccagggagccctgaaggcaggggtccagcctgccgtgaccgcacaggcccagattcctggacgtttcgctttcgtaattgcacacgcagggcctggattcgccgtgcagaaagccggacgatgccgcggcgtggggtgaacgtcaaagggtcactgtggactctgcccacgtcctgagtgccctcgtcttgtccctctccacggcgttctcatcctccggcgattccctgggaacgtctctgtacctctgcacacgtgcccacacacatgcccctcgagatggcctgcactgtggcttctgtcgtgaatgtggtcacgtgtcctccgtgactcgctcctcctgccccgtgtgccctggacctggctcggtcccgatgcccgtggcaccaccgcctcctcaacgggtggccacgtaatgcttcctggccggtgaatgtgccacggcagtggagatattctgcccttctagctcttctgtatacaagcagtgcgccctggttctcagggccgtgaccaccaccatgaccggcagacttcagggcggtccgtcccactcccgtggcctcgagggtcctttggagctgccgcggttctgagtgggggtggacacggacacagggctggttcccggggatctcctgtaccacccactgactcccagggtctgcggctggcccggcccctcctgggtctcttgatgtgggaccaaagctgttgcttcctctgcggcagaggcgatggagtccctcagagcccgcgaccgtcccctccgcactgcgggctgatagcgcctgtgggaatgggcttccccggtgaatacacataggtcgtcttcttgagcaaattggaaaagtaaggttgagcgttcctgagaatgaggggccgggaggggaggaggcggccagcgccgcgtggggccgtgggcagagcggacagggagggagcggcctcagccttggcaccctctacccagggcagggaggggtttgcccagccaggggtgggtacagagaggggagcacgtggctaagagtcc

SEQ ID NO: 178900 - DNA, 30 bp, Homo sapiens; identical to SEQ ID NO: 28715
  chr16:1246018-1246048
  hypo

SEQ ID NO: 178901 - DNA, 74 bp, Homo sapiens
  chr16:1247872-1247946
  hypo
atggagcgaggggcgcgtggggcttggctgacccacttgctggattaatctggagttcacgtagcccatagcac

SEQ ID NO: 178902 - DNA, 812 bp, Homo sapiens
  chr16:1248212-1249024
  hypo
tggtcatcccgagcccgagatgccacgtggtcagacctgccgcagccagttccctgcctcggccagtcccctgcctccactcctgcccctccacaccccagccctccaaaagcagcagacctgctgccctgggatggttggaggtggagacctggcgccccgctggatgcacgtcagaccccagggtgtcagtgtccctggaggccggtggtggtaggaggggagtcccgatcacactaggggtgcgggaaaatcaccagggggtggcccgagtcagtgtgcagtgggcgtggacacccactgtgaacagtggacggggctcgggggtcccgggaggggctgcagccccgaggacactcctgcagggcttagcagtgccaatcctggccctgctgcccacaggcatgcggatcctggtcactctgctgctggatacgctgcccatgctcgggaacgtccttctgctgtgcttcttcgtcttcttcattttcggcatcgttggcgtccagctctgggctggcctcctgcggaaccgctgcttcctggacagtgcctttgtcaggtgcccaggccccacccccgtgaggcccctgcccagatggccctgcccaccatgcagataacgcaccatgtggctccaccgccccacgtggctctgcccaccgtgcagtcacccgccccgccactgctgtccccgtcatggctccgtccaccatgctgtctcccgcccccaccccccatcatggctccgcccagctggcagtcaccgccccacatggctccgcccacggtgcagtcgctgcacatatgcc

SEQ ID NO: 178903 - DNA, 427 bp, Homo sapiens
  chr16:1250310-1250737
  hypo
aacccgttcatctgctcctcacgccgagacaacggcatgcagaagtgctcgcacatccccggccgccgcgagctgcgcatgccctgcaccctgggctgggaggcctacacgcagccgcaggccgagggggtgggcgctgcacgcaacgcctgcatcaactggaaccagtactacaacgtgtgccgctcgggtgactccaacccccacaacggtgccatcaacttcgacaacatcggctacgcctggattgccatcttccaggtgggcggcaagatggtgggacggggaccctggggcacggcaggggagcgggtgcaggactcgccccccccagcccagaccccaggggcacggggaggaggaggaggggtcgtgcgggcccaagtcaagccactgcccccccaggtgatcacgctggaaggctggg

SEQ ID NO: 178904 - DNA, 383 bp, Homo sapiens; identical to SEQ ID NO: 89419
  chr16:1251772-1252155
  hypo

SEQ ID NO: 178905 - DNA, 30 bp, Homo sapiens; identical to SEQ ID NO: 89420
  chr16:1252469-1252499
  hypo

SEQ ID NO: 178906 - DNA, 30 bp, Homo sapiens
  chr16:1252806-1252836
  hypo
ctggaggacgtgcagcgtccttcgtggcca

SEQ ID NO: 178907 - DNA, 217 bp, Homo sapiens
  chr16:1253095-1253312
  hypo
tgcgagcgagggtgccgagggtgccgggatgctgtgtgccctcatgcgctggtacccagggcgtgcagacgagtgtcgggcgcatgctcctagcccttgaattgtgggagtccagccgctgtgtgttataagaggcacacgggctccaaagacagcacgaaaacatcacaggacggctcgatggtcattttcatgtcagtttcgtgttggagtaacc

SEQ ID NO: 178908 - DNA, 84 bp, Homo sapiens; identical to SEQ ID NO: 89421
  chr16:1254184-1254268
  hypo

SEQ ID NO: 178909 - DNA, 30 bp, Homo sapiens
  chr16:1257111-1257141
  hypo
gttccaggtagtgcccggggtccccgcagc

SEQ ID NO: 178910 - DNA, 30 bp, Homo sapiens; identical to SEQ ID NO: 28719
  chr16:1259307-1259337
  hypo

SEQ ID NO: 178911 - DNA, 30 bp, Homo sapiens; identical to SEQ ID NO: 28720
  chr16:1260002-1260032
  hypo

SEQ ID NO: 178912 - DNA, 30 bp, Homo sapiens; identical to SEQ ID NO: 28721
  chr16:1260641-1260671
  hypo

SEQ ID NO: 178913 - DNA, 30 bp, Homo sapiens; identical to SEQ ID NO: 89425
  chr16:1261651-1261681
  hypo

SEQ ID NO: 178914 - DNA, 296 bp, Homo sapiens; identical to SEQ ID NO: 89426
  chr16:1262511-1262807
  hypo

SEQ ID NO: 178915 - DNA, 30 bp, Homo sapiens; identical to SEQ ID NO: 28722
  chr16:1263751-1263781
  hypo

SEQ ID NO: 178916 - DNA, 523 bp, Homo sapiens; identical to SEQ ID NO: 89428
  chr16:1265049-1265572
  hypo

SEQ ID NO: 178917 - DNA, 30 bp, Homo sapiens
  chr16:1266883-1266913
  hypo
gcctccctgcccgcccgtctgacccagctc

SEQ ID NO: 178918 - DNA, 124 bp, Homo sapiens
  chr16:1267125-1267249
  hypo
cacacgcctcctgggcgtcctcacccggccctgcttccggagccttttctgcacgaggccgagtctcgtgttgacgcagaggcatgtgcccaggcttgtgacacgtgtgcggacgtgcacacag

SEQ ID NO: 178919 - DNA, 1181 bp, Homo sapiens
  chr16:1267478-1268659
  hypo
cagccctgcccctgccgggttccacttcaggcagcccagtccctgcagggccctcccccgggccctgtcccgacggtgggtgtggcgttgccacagtccagtgtctgtccaccaggtaagcttgattttggtcagccggcgcctactcatcccccgccacgcgcagtcacagacacacacaataatgattcttccatggcagccgccaggcctgatgagccccagcccaggtgcggcagcaggggcctcggcccaggggctccgacctcacacccagggtcaccctctgccaggcagggcgaaccgccagggcctcgtcatccacatcctccgggctatcctgcctctgggctccccaaggggcatgtggaggctgggtgcatgtcccgcctccacccggagcgggctcggctgaccgggcggggtctccctccccgcagagtgcagtgaagacaacccctgcgagggcctgagcaggcacgccaccttcagcaacttcggcatggccttcctcacgctgttccgcgtgtccacgggggacaactggaacgggatcatgaaggtacccgccgcggccatgcctctggcacctggcagccccagcggtttttcaggctctcccaggaacgggtcggatccgtccttgcagggcagggggaaggggacggcactgccagggtggcacccgcgggtgggtgtggaccccggcccacagctgtcccccaccgcaggacacgctgcgcgagtgctcccgtgaggacaagcactgcctgagctacctgccggccctgtcgcccgtctacttcgtgaccttcgtgctggtggcccagttcgtgctggtgaacgtggtggtggccgtgctcatgaagcacctggaggagagcaacaaggaggcacgggaggatgcggagctggacgccgagatcgagctggagatggcgcagggccccgggagtgcacgccgggtggacgcggacaggcctcccttgccccaggagagtccgggcgccagggacgccccaaacctggttgcacgcaaggtgtccgtgtccaggatgctctcgctgcccaacgacagctacatgttcaggcccgtggtgcctgcctcggcgccccacccccgcccgctgcaggaggtggagatggagacctatggggccggcacccccttgggtatggta

SEQ ID NO: 178920 - DNA, 30 bp, Homo sapiens
  chr16:1269054-1269084
  hypo
cggcgagcccctccacgccctgtcccctcg

SEQ ID NO: 178921 - DNA, 758 bp, Homo sapiens; identical to SEQ ID NO: 28726
  chr16:1270044-1270802
  hypo

SEQ ID NO: 178922 - DNA, 525 bp, Homo sapiens
  chr16:1271079-1271604
  hypo
ccctgacttgggtcccgtcgtgagcagaaaggcccggggaggatgacggcccaggccctggttctctgcccagcgaagcaggagtagctgccgggccccacgagcctccgtccgttctggttcgggtttctccgagttttgctaccagccgaggctgtgcgggcaactgggtcagcctcccgtcaggagagaagccgcgtctgtgggacgaagaccgggcacccgccagagaggggaaggtaccaggttgcgtcctttcaggccccgcgttgttacaggacactcgctgggggccctgtgcccttgccggcggcaggttgcagccaccgcggcccaatgtcaccttcactcacagtctgagttcttgtccgcctgtcacgccctcaccaccctccccttccagccaccaccctttccgttccgctcgggccttcccagaagcgtcctgtgactctgggagaggtgacacctcactaaggggccgaccccatggagtaacgcgcccggccccgatgcgaatcaggc

SEQ ID NO: 178923 - DNA, 30 bp, Homo sapiens
  chr16:1271999-1272029
  hypo
gcctgttggggcggccgcagccctcacccc

SEQ ID NO: 178924 - DNA, 40 bp, Homo sapiens; identical to SEQ ID NO: 89432
  chr16:1273469-1273509
  hypo

SEQ ID NO: 178925 - DNA, 31 bp, Homo sapiens
  chr16:1308372-1308403
  hypo
cctaactgcaggcgggcgtggtcagctggga

SEQ ID NO: 178926 - DNA, 30 bp, Homo sapiens; identical to SEQ ID NO: 89433
  chr16:1321465-1321495
  hypo

SEQ ID NO: 178927 - DNA, 31 bp, Homo sapiens; identical to SEQ ID NO: 28728
  chr16:1323384-1323415
  hypo

SEQ ID NO: 178928 - DNA, 30 bp, Homo sapiens; identical to SEQ ID NO: 28729
  chr16:1330528-1330558
  hypo

SEQ ID NO: 178929 - DNA, 40 bp, Homo sapiens
  chr16:1341418-1341458
  hypo
gtgtggtgcgtttgccgcagtcgtgcgtgtgctcacttga

SEQ ID NO: 178930 - DNA, 30 bp, Homo sapiens; identical to SEQ ID NO: 28730
  chr16:1362611-1362641
  hypo

SEQ ID NO: 178931 - DNA, 134 bp, Homo sapiens
  chr16:1365758-1365892
  hypo
tcggcctgttcctgcggggattggagtcctctccaaagaggcccgtggctgtggccgtggcgccctggtccgggcgatccatggagctgggagggagtgagatcacagatttggaggtcggctttgatccctga

SEQ ID NO: 178932 - DNA, 143 bp, Homo sapiens
  chr16:1367992-1368135
  hypo
ctacagtgtatgtacgtacctcagccctcaccctgaatctaccaagagctcctgggaatcagtaagaaggctgccatgacgtccagcgtgtccctcacaggaaaggcctccacccagccagcaaatgcggcagggatgcctgg

SEQ ID NO: 178933 - DNA, 257 bp, Homo sapiens; identical to SEQ ID NO: 89440
  chr16:1369125-1369382
  hypo

SEQ ID NO: 178934 - DNA, 101 bp, Homo sapiens; identical to SEQ ID NO: 89441
  chr16:1370326-1370427
  hypo

SEQ ID NO: 178935 - DNA, 84 bp, Homo sapiens; identical to SEQ ID NO: 89442
  chr16:1374350-1374434
  hypo

SEQ ID NO: 178936 - DNA, 211 bp, Homo sapiens; identical to SEQ ID NO: 126597
  chr16:1384031-1384242
  hypo

SEQ ID NO: 178937 - DNA, 131 bp, Homo sapiens; identical to SEQ ID NO: 126598
  chr16:1384574-1384705
  hypo

SEQ ID NO: 178938 - DNA, 146 bp, Homo sapiens
  chr16:1390247-1390393
  hypo
agacgcatacgcacacaggctgcaggtgcacacagacacacacacaggctgcaggtgcgcacagatgcccaggcacacaggctgcaggtgcacacagacacacgcacacaggctgcaggtgcacacagacacgcacacaggttgca

SEQ ID NO: 178939 - DNA, 30 bp, Homo sapiens
  chr16:1390624-1390654
  hypo
acgcacctcgaaggacgctcccggcttcca

SEQ ID NO: 178940 - DNA, 30 bp, Homo sapiens
  chr16:1391332-1391362
  hypo
gcctcggacgccacgcgggagccccgtgca

SEQ ID NO: 178941 - DNA, 583 bp, Homo sapiens
  chr16:1391649-1392232
  hypo
gccaccggggccacacggctggcaacacctggcgggatcaggatttggacctgaacagcctgtctggagagcgggtgcttgtggcctggtccctgctgcttctggactccctgaccccggcctgggcagagcctcgccggggaccctcatgggcatctctgttctccttgtagcgagattgaggatgtgagcacggaccagctgcacctggacatctggtacaggcccctgcgccatgcagggcggcggggatgcacaccttttgcgggggagcaggacggactcagggcccggctgcgggctccagacaagccaggtcctcccctgtccccaccagggatcatgacgacgatgtatccctggtagaagcgtgcaggaagctgaatgaagtcatcggcctgaagggcatgggcaggtatgactgctgggacctttctacccatcacccgtgccctcagcttggtcatggggcccggcgggcagtggctccccaggagccatcagcgtgatgctcaccacctgtggtggccaggtacttcaaacagatcgtcaagtcagcccgcgcaaacgggacagcaggacc

SEQ ID NO: 178942 - DNA, 31 bp, Homo sapiens
  chr16:1395998-1396029
  hypo
gccaccctcttctatacggagctgcttcgga

SEQ ID NO: 178943 - DNA, 842 bp, Homo sapiens
  chr16:1397416-1398258
  hypo
agttcaaactgcagccccacacgggctgtgtccttgagcatgaggtggccccacgggcagtcaggtctccaagtgccagcgctgaccaccagcacccaggggcccctcctgatgcgcttccccctgcagaggctgaaggaggagctgcggctgcacaaatgttccacccgcgagtgcatcgagcagttctacctggacaagctcaaacaggtagggaggcgccagggacagggtgctgcctccgaggctcccagagcccagctgcgctcacccgcctttccgcagaggaccctggagcagaaccggtttggacgcctgagcgtccgttgccattacgaggcggctgagcagcggctggccgtggaggtgctgcacgccgcggacctgctccccctggacgccaacggtgagttgcagcggggacgggtcgggtggtggtgggatgggggcaggggggctcacgactgtgctcctgcaggcttaagtgacccctttgtgatcgtggagctgggcccaccgcatctctttccactggtccgcagccagaggacccaggtgaagacccggacgctgcaccctgtatacgacgaactcttctacttgtgagtgtcctaagccccagccccagccccaggctccaggctgccggagcgagactcccgactggcctctgtccgcagttccgtgcctgccgaggcgtgccgccgccgcgcggcctgtgtgttgttcaccgtcatggaccacgactggctgtccaccaacgacttcgctggggaggcggccctcggcctaggtggcgtcactggtgtcgcccggccccaggtgggcgggggtgcaagggc

SEQ ID NO: 178944 - DNA, 30 bp, Homo sapiens; identical to SEQ ID NO: 28735
  chr16:1399386-1399416
  hypo

SEQ ID NO: 178945 - DNA, 91 bp, Homo sapiens
  chr16:1400757-1400848
  hypo
caggaacagcaggccgccgggtcacactgctgtggggcccctggactcacctacgatgcagaaggtggcagcaaacgcttccacgcaggaa

SEQ ID NO: 178946 - DNA, 75 bp, Homo sapiens
  chr16:1406893-1406968
  hypo
gcgggagtgtgcgggcgagagtgtgcgggcgggggtctgcgggcgggagtgtgcgggtggcggtctgcgggcagg

SEQ ID NO: 178947 - DNA, 225 bp, Homo sapiens
  chr16:1407318-1407543
  hypo
gaacagaaggccaggccgggccagcaccccagaggtctcagtggcattagcctctgccctccgggggcgggggccaggctgagggtggccccagtgtggcatctggctcctgggctggccagattcccagggaacagtcacccagcacctcgtgtgtatttcgactttattattattattattattattattagagccgagtgtcgctgtgtcgcccaggctgga

SEQ ID NO: 178948 - DNA, 465 bp, Homo sapiens; identical to SEQ ID NO: 89450
  chr16:1407782-1408247
  hypo

SEQ ID NO: 178949 - DNA, 30 bp, Homo sapiens
  chr16:1411888-1411918
  hypo
tgcccgttccacaacgtgacccagcacgag

SEQ ID NO: 178950 - DNA, 30 bp, Homo sapiens; identical to SEQ ID NO: 28736
  chr16:1413144-1413174
  hypo

SEQ ID NO: 178951 - DNA, 235 bp, Homo sapiens
  chr16:1414466-1414701
  hypo
cacccacgtggcccgcggagagccaggtcgccgtaaaccacagatgcctgttcctgctcaactcctagggacagtcccagccctgagcagaagggtcaggtcatcgcggggatgcgttctcagtcacgtttctgctgcggccgaaaccacactgtcgctccaggggcagacgggacaggggaccacagcagagccgggacctggggggggtcgcttcccccgtgtgctccaggcc

SEQ ID NO: 178952 - DNA, 146 bp, Homo sapiens; identical to SEQ ID NO: 89453
  chr16:1416340-1416486
  hypo

SEQ ID NO: 178953 - DNA, 283 bp, Homo sapiens
  chr16:1417075-1417358
  hypo
cccagagcaggactcacgccgtccaccgcctccaggtccaggcgcagctgactctgcagcgagtgcagcttcggcaggggaatggtgccgatgtccccacagccccgcagccccggcagtgtggaggctacgcccaggccctccagctcctcctgcagctgcttcacctgtgcctccacctcctccttcttctgcagcgccagctgccggtcgctatcggccacacgggcacgctccttggcctcctgcgcctctcgctgccaggcatcgcagacctgaaacc

SEQ ID NO: 178954 - DNA, 387 bp, Homo sapiens; identical to SEQ ID NO: 89455
  chr16:1417674-1418061
  hypo

SEQ ID NO: 178955 - DNA, 361 bp, Homo sapiens
  chr16:1424293-1424654
  hypo
gggccctgccctgtcgtccctgctggctgcaagttcttggaccctcactgatgcctggtactggacagtgtgctgctgaggcctgctctgagacaggcaaagccacccctgcctgtccctgaagggccctagacccccttcctcctgtcctcacctgggaccgatggtccctccatggccccaggcaaccgcaccccggggaaacctgtcagacccgaccgtgggggtcggcgcgccgggaacctccacagcctggccagcccctgcctggtgctcggttcagacaagctggggcccagcagaagcaaagaggcggtcactgccccacctacccgacatcgagtcccgccctcgcagacct

SEQ ID NO: 178956 - DNA, 1205 bp, Homo sapiens
  chr16:1424907-1426112
  hypo
agggtgacttctgaagaagaacgctgccctagccgcacatgagatttgtcgggaacacagctgtggggcacgtggcctgcacctcacccctctgcccaggcctccgcttctcctccctggaagcagctggcaccagtcagcgccacggggaccatgggagcaaccacagggtggcgggtggcccctcgcccgaggcctggcgctcggcggtcacaccccccgagccccccagggcagccggagtatcctcgtgccgcggtggtggccccagcggagcacaggcagaggctggcgtggacgtggcgcagctggcaggtccgggcctctgaacttcaccccgaatctggccgcgctcagcagccacactgtgtggagaccgtgctccaccacccagagcggcaggcgggagagaagcctggctcgggagtggacggtggactccagaggccgcaaggcagaggccacccccaccccactccaccgcacagcacgacccagactcaaccctcgtccacacgccagccgtgagggaatttccggggcgtggaggccgggctgtggcgccacctggcaacactgtccttccccatcccgtcacagaggcagcagggcccagggcagagaacctgaacccctggggcgtccgggacggcacacggcgcatgcgggagtggcctccactcccacggagacaccgttccaatgaagcttttagggactttcgaaggtcttatccagaaactagagtaacaggttgggggtcggggcagccaggccaagaccccctggggaccaggaacccacagtagcatccgaaaatgcctcagccctcaaggatgctcatcggcggagccaaaggcaggccttgggccagccgcacccagagccattcactcctctccttcccattcacaggacggtggcgtccctgagcggacatccaccctggcctgcagggtgggccagccctcccggtcgctgtcatccacttgacgttctcaggccatggctgaagagggcaagacctcaaagcctgactgaagtcgtgctgagcagcagagccgagacactgcaggcagtggcagaggaccacgcactgagcggccttggacaggtggctccaaggctgaaagtgagatctgtggcgggcagggcctcttccctcctccctccagggctggggcgctcctcctccctcactccaa

SEQ ID NO: 178957 - DNA, 557 bp, Homo sapiens
  chr16:1428211-1428768
  hypo
cactgaggacaggcaccgaccccccaacccgcaggcctgcccacagccccctcatgctcccatacgggggcttgatgacgggcagggccaagcggtttgcccatagtcaggtcagccaggctcgggaacctggacctgccctctgcacccaagtcccaggatcaggatatggcagccccttcagagctcaccgcccctcacacctggcagagatccagaaactcctcatgaaaatcaaagacgcaaagaagttgggggacaggaacggaggcgccttttctccccttggagtggggtgatcccaccaggctccgtgctaagtcggcagaagcttcacccaccagctgcagagtgcgcagcatgtggaggggctaagctgccttcaatgctcacccgacaaactacggctcgcactcaactcagagggcgtcagccaccacctacctcagccaagtcacctgtgctgaagcccgggaagctgcctggagaggggacgttcagggagcgtgtgggtgcccccgagagactccggccccgcttcaaagccaagtgcccct

SEQ ID NO: 178958 - DNA, 244 bp, Homo sapiens; identical to SEQ ID NO: 10465
  chr16:1429036-1429280
  hypo

SEQ ID NO: 178959 - DNA, 30 bp, Homo sapiens
  chr16:1432407-1432437
  hypo
ccagccagtgaggacgaaacaaacgcaaac

SEQ ID NO: 178960 - DNA, 249 bp, Homo sapiens; identical to SEQ ID NO: 89460
  chr16:1435411-1435660
  hypo

SEQ ID NO: 178961 - DNA, 30 bp, Homo sapiens
  chr16:1444123-1444153
  hypo
ttactcactctcaacgtgtgcaaaggcaca

SEQ ID NO: 178962 - DNA, 30 bp, Homo sapiens; identical to SEQ ID NO: 89461
  chr16:1451539-1451569
  hypo

SEQ ID NO: 178963 - DNA, 73 bp, Homo sapiens; identical to SEQ ID NO: 28743
  chr16:1462653-1462726
  hypo

SEQ ID NO: 178964 - DNA, 33 bp, Homo sapiens; identical to SEQ ID NO: 89463
  chr16:1465336-1465369
  hypo

SEQ ID NO: 178965 - DNA, 35 bp, Homo sapiens
  chr16:1466430-1466465
  hypo
ggattacaggcgtgagctaccgcgccagccaggat

SEQ ID NO: 178966 - DNA, 121 bp, Homo sapiens; identical to SEQ ID NO: 28745
  chr16:1472167-1472288
  hypo

SEQ ID NO: 178967 - DNA, 151 bp, Homo sapiens; identical to SEQ ID NO: 89465
  chr16:1484607-1484758
  hypo

SEQ ID NO: 178968 - DNA, 49 bp, Homo sapiens; identical to SEQ ID NO: 28746
  chr16:1487581-1487630
  hypo

SEQ ID NO: 178969 - DNA, 234 bp, Homo sapiens
  chr16:1487859-1488093
  hypo
ccggctgctcagagccgggagatggccactcagctcctttaactgcccggccagctgcgccacggatgcctccagagcccggctcttctctcggagctgcaggggacaggtgggcacggggaggcctggctgagcgcccatcccgtgtgcgtgggagaccccgttggggacatgttgcgctaccccctcaccagcaccagctctccatgcatctcctgccgggccagctcgcca

SEQ ID NO: 178970 - DNA, 317 bp, Homo sapiens
  chr16:1488496-1488813
  hypo
gtcgagcactctgctcgggggaggcaaggtcattccctgctgagtcggccactgcggccccctcctgagtgggacatcaggggtccccccgcctgacagcacctgaggccccaggacacccaccaggctttctcctcggccagtaggacacggttcagcgacgcctggttctgctgcacaaacttggtcagctgggccacggcagcatccaggccctggcactgctccaggaggtggctctcctgccagggggtggaggccgccctgagacctgcaccccggccccggccccacctgcccgccgcccgcccggcccc

SEQ ID NO: 178971 - DNA, 940 bp, Homo sapiens
  chr16:1493328-1494268
  hypo
gctggacctaggcccgggtctggcacctgcccctggagtccacccagctccggcaccactggcccctgggagctctgggcctgggcagcaggggtgagctgggctccaggcccagaagcagctgcccccaacacccaggaaaggggcagctcgacctgtgggtgggggagccgctcacctccggcgcctccttttcgggggcctgggctgccggccgcgcctcctgctgcaactgcctcagctctgagccctgcagctgcacgcgggcccgcacctggagcagctcccgcagcaggctccgcgtggcgcgctcacagcgctgcttgtgctcccgcaggcaggccacctcggcctgcagctccaccaccctggccggggcgagagtgggcgagtctggcggtgcccgccgtggaggcggaggcggcggcgacgtggtcctcccccgccagcaccccctgcagggctcaccactgctccagctggttccagtgcttggcggtgtcctgctcggggacagaggccgtggatgtcggatggctggactcatacctctccgagagctcctccaggctcaagggctcggggctggccaggcctcctgccaggaggagccccaggtcttccagggtgacggctctcagctgggaaggggccgatgcccctgagggtccactgtcagccaactctacaaggaggcatcttgggagcttgccccttggggcccggcccccactggagcttacgggaacaaggccccaaacccccgcaggaccctcgcccaccacccagagctcaacgcgtctccttgggtcacacaggatccagacgggcttggctcagacaagtccagggccctgcctgaagacacacagcactgggcggcaggaacaagcgagctggagggagcccggggtcagaagcagagcggtccccaccctca

SEQ ID NO: 178972 - DNA, 31 bp, Homo sapiens; identical to SEQ ID NO: 89468
  chr16:1496408-1496439
  hypo

SEQ ID NO: 178973 - DNA, 30 bp, Homo sapiens
  chr16:1497452-1497482
  hypo
ctcgtcctgggacacgtggatggactggat

SEQ ID NO: 178974 - DNA, 30 bp, Homo sapiens; identical to SEQ ID NO: 28748
  chr16:1497751-1497781
  hypo

SEQ ID NO: 178975 - DNA, 30 bp, Homo sapiens; identical to SEQ ID NO: 89470
  chr16:1500552-1500582
  hypo

SEQ ID NO: 178976 - DNA, 30 bp, Homo sapiens; identical to SEQ ID NO: 89471
  chr16:1507250-1507280
  hypo

SEQ ID NO: 178977 - DNA, 850 bp, Homo sapiens
  chr16:1510690-1511540
  hypo
acacagccagcctggccgggccgcctccacctgcactggaacacgctgggctcaggacttctgcccgggactcggcccaggccacgcccccctcccaagctgcagcggccgcactgggaaggatactgcccttgatgaccctgtacttgaggccagccaggttttccaccacgatgtcaatgaagcaggccacgaggcccgtgaggatcccaatgagggcgcagatgacccagcgcttgatctccaccgtccggaaggcctgcagggcgcggtcagggcgagggtcaggcagggccctggcgcagtcactctggcagcagcaggaccgcccagaccgcctgcaggccccgggattatgaagggcccagtgtgcacggtgcgctgagtcccacaaaggacagtttctggccaacatctgaggcgcacccggggcccgagggtgactcggggaggtgggtgaattcccaacaacttcacagccagcggttgttatgctgggcaccgcatctggcggccgtaagagcagccttcttggttacggtgaccgtgaccctcccactgtctctagaaaccagacgaaccacaggcctcagaggcggagtcagaggaggagggaggaggtgcgtcacctcaccccggcagaagagcagccccaggcccggccggcaccaggccccgcaccgtggggccctgcagggagcggcgtccagctcaccgtgtgattgatccgccgctcctcctccaggaacagctggttctcactgttgtcatagtccaagctctgcaggccgggacagcaagggcagcactcagcaccgaacccacgctctgggtgcgggcacaggggacc

SEQ ID NO: 178978 - DNA, 30 bp, Homo sapiens; identical to SEQ ID NO: 89474
  chr16:1514398-1514428
  hypo

SEQ ID NO: 178979 - DNA, 30 bp, Homo sapiens
  chr16:1516034-1516064
  hypo
agatcctttggagacgactccaatttccac

SEQ ID NO: 178980 - DNA, 30 bp, Homo sapiens
  chr16:1518234-1518264
  hypo
aaggtgaaggctgccggtgcagtatgtgac

SEQ ID NO: 178981 - DNA, 181 bp, Homo sapiens
  chr16:1523649-1523830
  hypo
agatgtgagccaccgtgccctgccgtccttcctaatctttaagcacaagacaagtgtttaaaggactagacaagagaaaatgtaaagaataactgcaaagcagattaagacccatcaacaaaacggtccattaactcaaaagtaacacaatacggccaggcgcagtggctcacgcctgtaa

SEQ ID NO: 178982 - DNA, 25 bp, Homo sapiens
  chr16:1524069-1524094
  hypo
agtgaaactccgtctcaaaaaaaaa

SEQ ID NO: 178983 - DNA, 37 bp, Homo sapiens; identical to SEQ ID NO: 89476
  chr16:1536440-1536477
  hypo

SEQ ID NO: 178984 - DNA, 335 bp, Homo sapiens
  chr16:1541163-1541498
  hypo
tgggtgacagagcaaagaataaagacattttcagacacacaaaggcttgagaaatttgtcctccaagcacccactgttggatgcggggcttcaggaaaagaagggaatagggaaggacggagctgccgtgggcactggcgagggctggaacccagcagcggacggaggaggagtttccgggatgatgggatgctgcctgccccatatcccatccatcagctctgcctgcagagacatgccctgagttcagctgcttctctacacccccattccgccccaagctcatcctcacaatggccacctagtcccctcgtccgtgtcgcccccctaccgtc

SEQ ID NO: 178985 - DNA, 30 bp, Homo sapiens; identical to SEQ ID NO: 89477
  chr16:1551381-1551411
  hypo

SEQ ID NO: 178986 - DNA, 397 bp, Homo sapiens
  chr16:1557351-1557748
  hypo
cttcgcttccacatcgatgcgtgagtggcctgtggggctgggccaggccaggggtgcaggcagacacaggggtcttattgtgggggccccgtggagcctcgaggtggctgacaggcagcctggcctggtacttcccaaataggaagtgtgccaggcagggccgcagcgtgggtggtctgccacactgaggggagtgggaggtctggggtgtggtccctgccgagctcagcccccgccttcttgccggcagctacgtgcgccaggggctgttgtcggccgtctcctccgtcctgctcagcctgcctgctgcgcgcctgctggaggacctgatggacgagctgctggaagcccggtcctggctggcgggtgagtgtcggcctgcggtgtgtgtgtgaga

SEQ ID NO: 178987 - DNA, 233 bp, Homo sapiens; identical to SEQ ID NO: 89479
  chr16:1560776-1561009
  hypo

SEQ ID NO: 178988 - DNA, 30 bp, Homo sapiens; identical to SEQ ID NO: 89480
  chr16:1570394-1570424
  hypo

SEQ ID NO: 178989 - DNA, 30 bp, Homo sapiens; identical to SEQ ID NO: 89481
  chr16:1573385-1573415
  hypo

SEQ ID NO: 178990 - DNA, 30 bp, Homo sapiens
  chr16:1574575-1574605
  hypo
tgaaggcctgtgcccgggtgtagaagtgca

SEQ ID NO: 178991 - DNA, 30 bp, Homo sapiens; identical to SEQ ID NO: 89482
  chr16:1574970-1575000
  hypo

SEQ ID NO: 178992 - DNA, 43 bp, Homo sapiens; identical to SEQ ID NO: 89483
  chr16:1575250-1575293
  hypo

SEQ ID NO: 178993 - DNA, 854 bp, Homo sapiens; identical to SEQ ID NO: 89484
  chr16:1575856-1576710
  hypo

SEQ ID NO: 178994 - DNA, 196 bp, Homo sapiens
  chr16:1578982-1579178
  hypo
ccgagatggtagccccgggcaggctcggtgcacttgtgtctgagtctaggggctggacgcaggttcctgggatgggccctgcggtggtgtctgtggctgcaacgcggcatacccaggtgcccgctcccgaaagccagcaggtactttgtgcctggttttacatgtactcgggtgaattccacggacgcattccacc

SEQ ID NO: 178995 - DNA, 119 bp, Homo sapiens
  chr16:1579422-1579541
  hypo
ctggcagcttcctggacgctcagtcggcgctgcggtgaaggtgacaccgggtgcatgggaccccagggaggtgccccaggcgcagcgtcctgatctccgattcgcgctcctcagtcttt

SEQ ID NO: 178996 - DNA, 382 bp, Homo sapiens
  chr16:1580444-1580826
  hypo
tttaaaaaatctcccgattgtgcacaccctctcccgaggcccaggtgtggggctggacagggctgggacctgcctctacctgccccgcgtggctcctttcctctcccttgtcctgaaaacaactggttccttccgtccacatccaattgcggtggaaaatcacaaacaagcacaggaatgtggcagctgacttgggtcccagacgggctcccctgtgctctgaacgccccgtctctcccacgcggaggccacccgtggggagcgggagagagcccgcccgtggggagcgggagagagcccgcaggccggccctggttttgctctggttcctggggcccatgtgtgaccgaggacccagccagcacaccgtcagatgcccgca

SEQ ID NO: 178997 - DNA, 68 bp, Homo sapiens; identical to SEQ ID NO: 89487
  chr16:1613976-1614044
  hypo

SEQ ID NO: 178998 - DNA, 252 bp, Homo sapiens; identical to SEQ ID NO: 89488
  chr16:1614792-1615044
  hypo

SEQ ID NO: 178999 - DNA, 128 bp, Homo sapiens
  chr16:1642684-1642812
  hypo
ggtgtcccggcagagcgactggtggagggacaggtgtcccggcagagtgactggtggagggacaggtgtcccggcagagtgactggtggagggacaggtgaacaccagccacacggtgcccagcactg

SEQ ID NO: 179000 - DNA, 30 bp, Homo sapiens; identical to SEQ ID NO: 89489
  chr16:1644649-1644679
  hypo

SEQ ID NO: 179001 - DNA, 177 bp, Homo sapiens; identical to SEQ ID NO: 89490
  chr16:1651460-1651637
  hypo

SEQ ID NO: 179002 - DNA, 384 bp, Homo sapiens; identical to SEQ ID NO: 28756
  chr16:1652261-1652645
  hypo

SEQ ID NO: 179003 - DNA, 30 bp, Homo sapiens; identical to SEQ ID NO: 89492
  chr16:1659577-1659607
  hypo

SEQ ID NO: 179004 - DNA, 435 bp, Homo sapiens; identical to SEQ ID NO: 52671
  chr16:1660448-1660883
  hypo

SEQ ID NO: 179005 - DNA, 701 bp, Homo sapiens; identical to SEQ ID NO: 52674
  chr16:1664480-1665181
  hypo

SEQ ID NO: 179006 - DNA, 177 bp, Homo sapiens; identical to SEQ ID NO: 89495
  chr16:1666425-1666602
  hypo

SEQ ID NO: 179007 - DNA, 197 bp, Homo sapiens; identical to SEQ ID NO: 28758
  chr16:1668008-1668205
  hypo

SEQ ID NO: 179008 - DNA, 30 bp, Homo sapiens
  chr16:1675807-1675837
  hypo
agcctcgctggtgccgtgggtcctgggtgc

SEQ ID NO: 179009 - DNA, 30 bp, Homo sapiens; identical to SEQ ID NO: 28759
  chr16:1676661-1676691
  hypo

SEQ ID NO: 179010 - DNA, 151 bp, Homo sapiens; identical to SEQ ID NO: 28760
  chr16:1677032-1677183
  hypo

SEQ ID NO: 179011 - DNA, 207 bp, Homo sapiens
  chr16:1678526-1678733
  hypo
ttacaggcatgagtcaccgcacctggcctaacacgtttcatttctgcattgtgtgtctcatcaaaactaggtggccttctggtggggtcttgatgtgtggctgactggccggtggcaggtgtgactgtgaaccctcaagctgtggggtgacggtgactgggcacaggcctctgctctgagaagtgcggcttctgccatgttgtcatg

SEQ ID NO: 179012 - DNA, 83 bp, Homo sapiens; identical to SEQ ID NO: 89500
  chr16:1681340-1681423
  hypo

SEQ ID NO: 179013 - DNA, 441 bp, Homo sapiens
  chr16:1682396-1682837
  hypo
gcccacaggcagggccggcttctgctcagagcgcagcttccagcaagcccgccggacctgctttctggcattttctcaccagccgcttggcctggggctcctcgccttgcagcgctttggctgattgtgtgctgtctaactcggtcaaaccaagttgccaggaagtggcccgtatcccatgctccagggttcttaccactgcttttctgagctatggtttgtgtgtttccagtggctctgagtgtgcgtgagttctgggtccctggctcacctgaagcctgtggtctccactgcaaatgatagcaccatggtccagcgaggggcttgggccgcaggcaccgtgcctggcgctggtcttcctgggggacggccagccttcccaggcctctcgccctctacactgggacccaggtctgcgtcggccctcgttcagtcacggga

SEQ ID NO: 179014 - DNA, 17 bp, Homo sapiens
  chr16:1698314-1698331
  hypo
tagaattgacttgagcc

SEQ ID NO: 179015 - DNA, 30 bp, Homo sapiens; identical to SEQ ID NO: 89503
  chr16:1700357-1700387
  hypo

SEQ ID NO: 179016 - DNA, 30 bp, Homo sapiens; identical to SEQ ID NO: 89504
  chr16:1700668-1700698
  hypo

SEQ ID NO: 179017 - DNA, 129 bp, Homo sapiens; identical to SEQ ID NO: 28763
  chr16:1701257-1701386
  hypo

SEQ ID NO: 179018 - DNA, 30 bp, Homo sapiens; identical to SEQ ID NO: 89506
  chr16:1703460-1703490
  hypo

SEQ ID NO: 179019 - DNA, 334 bp, Homo sapiens
  chr16:1704525-1704859
  hypo
ctaagtttgcagttcaggggcatttaacacgatcacattgttctgtggccaccgtctctgtccagctccagagcattttcatgacgctagaagaggccctgtgcacctcagcactcactcctctattctccattctcaccctcccacggccgccggcacctcccagtccgccttgtgtctcagtggacttgcctgctctgaacgtttcatagaaacggaatcacacgcagaggcctccgggcctggcatctttcactgggcgtgatgcttttgaggttcacccatcatagcgcatcagtacttcattccttccgctcatgtacttctccctcag

SEQ ID NO: 179020 - DNA, 144 bp, Homo sapiens; identical to SEQ ID NO: 89508
  chr16:1705538-1705682
  hypo

SEQ ID NO: 179021 - DNA, 30 bp, Homo sapiens
  chr16:1706186-1706216
  hypo
cctcctgcggctgacgccttgcagagctcc

SEQ ID NO: 179022 - DNA, 30 bp, Homo sapiens; identical to SEQ ID NO: 89509
  chr16:1706695-1706725
  hypo

SEQ ID NO: 179023 - DNA, 94 bp, Homo sapiens; identical to SEQ ID NO: 89510
  chr16:1708013-1708107
  hypo

SEQ ID NO: 179024 - DNA, 40 bp, Homo sapiens; identical to SEQ ID NO: 89511
  chr16:1712682-1712722
  hypo

SEQ ID NO: 179025 - DNA, 129 bp, Homo sapiens
  chr16:1719760-1719889
  hypo
tttggatgtctggggtcttcccgcccacagttgtacggggccagggcttgtggctgggcacatcaggcatggcgggtaccatgcctgacagctctgaaccagttgggcgacctgggtctgggaggtgct

SEQ ID NO: 179026 - DNA, 30 bp, Homo sapiens; identical to SEQ ID NO: 89512
  chr16:1722317-1722347
  hypo

SEQ ID NO: 179027 - DNA, 30 bp, Homo sapiens
  chr16:1723427-1723457
  hypo
tcccccacgtatcctcgggttttaccccac

SEQ ID NO: 179028 - DNA, 124 bp, Homo sapiens
  chr16:1723671-1723795
  hypo
atcataggctctctgcgagcacttatctaaagagtgtgcgggcagacgacaggtgattgtgattctgcacagagccctgggctgccatccctagcttagcttcctgcagcgggagtcgatagga

SEQ ID NO: 179029 - DNA, 505 bp, Homo sapiens
  chr16:1724904-1725409
  hypo
ctaatatgattacagcgaagactttcctgataagttctcaaactcgatgtgtgactgtttggcacttgagacaaacctgcctttgcagggaaagtgtctctcacgggcattggtgtgggcgtgcctgacatacgtgttcagtcccttgcatacctttgccttgagacttctgtgtctccttcccatttgggacacccaggtgagggcccagacatctggatgtggtcagacctcaccaaatatatgccttcgtggtggtctccctccttgcgccctcttgggtggccagcgttcctactgcagacggcccaacatccagtctttccccaggacagagctaacaagggcccctttgccttctcatcctcaggagttccaggcacatgagtcaccgtccatccacatccagtgtggcctggagctgctacagaggtgttgggcaggccatgcctgtgccgccatctctcccttcctgcctcatttcatcccccgcagcagccgggat

SEQ ID NO: 179030 - DNA, 805 bp, Homo sapiens
  chr16:1730075-1730880
  hypo
atccatggaacagtgattattatgcctaggtctgcaccgatgtgggaccaggagtttaaactagtgctcagagcgaatccggtttctggttcctggtggccagagttttgcaccacccacatcagtggggggagggactgcatccccagccctgtcccagttgtgtgcatttagtacgtttcctttttgtttgtgctgcctggcactggctgcccggtaaatgatggtgtttattatcaccctgagcgacgccgatgtttttatattgactttcacgctccagaagttagctgcacagggccgcactaaagtcatactcacactaccctgggggactggtttctggacaaggtgttgagaaagggagaaaactcttccttttaggatggtgaggaaggaaagccggtctgaactggatgatgaggtatcactggaagcttctgcttggggtccaccagacgctgcacatttgccactcatctgaacggggtcgagtcgcagggcgggcgccttgtaagcgtcacatttagttttgctgtgaagcgagtcaggtggtggctgtaagattacctagccaggttttcctctcctgagacctcacatctctcctttccttgctgagggattgtcttgtgttaaaggggtttcgtaaaagcgttatgctttagccgcgattaacctgaggtcttccttcaagctggaacatttctatttgtaaggaatttaatccaagtttatttctcactgcttctctctaagcctgaccagtcccctcatcctttctgaaactcggggacaaactatt

SEQ ID NO: 179031 - DNA, 199 bp, Homo sapiens; identical to SEQ ID NO: 89514
  chr16:1731568-1731767
  hypo

SEQ ID NO: 179032 - DNA, 42 bp, Homo sapiens
  chr16:1732070-1732112
  hypo
ctatccaagaaaaatcgcagaattggctgggcacagtggctc

SEQ ID NO: 179033 - DNA, 165 bp, Homo sapiens
  chr16:1735953-1736118
  hypo
tgtttttattcagatcgtcagtgggattgaaactcttaacaaggaagaattgatctagcacacatctacatagttcttcagtatttacccaacctcctagtggttacagtaggagggactctttgaaaaaggtttcttggccaggcgcggtggctcatgcctgta

SEQ ID NO: 179034 - DNA, 801 bp, Homo sapiens
  chr16:1737554-1738355
  hypo
gagcactccatggaaggcaggcggtaccactttgcccgttccacatggtctcatgcccagtggggagcccggccccttgcggttagtgagccagcctctactcctggtcacagtgtgtggtgccagccatcatggctccccatgccaggttcctgcttctcatggtccttctcacggttgttgggagttttcctatctctccagtgctcttggaagacggtttatggtatattatcaagggaagcctgaaagggaaactgctagttgtgttcaccacccaacgagatctggagtcctgccttctttctacacttagtcacacagacctagccccacagccctctagttgcagggcttgattgagaaaagtatgcagaggccgagagtgtgtgtgaccgaccacatcatagccatcgaatgtttatcaattcccattcagtgtttcagtgaatcttcagtagtctctgtgttctttgttagtcacctggtttagatgttccatgaattgttcttcctcttctagcaatgatgaccaacgtctatgaattgttaatatttaccggggactgtgctaagtgctttgcatgtgtatttttcatttggtgttcgctataactaggagtaggttgttttgctcctttcacagaggaggaaacaggcttggaaaaggtcactggcatgcataaatcccaagctagtcagtagcagagctagtcggtagcagaactagtccgtagcagagctagtcggtagcagacctagccggtagcagtgctagtcggtggcagagctagcctttga

SEQ ID NO: 179035 - DNA, 299 bp, Homo sapiens; identical to SEQ ID NO: 89518
  chr16:1739990-1740289
  hypo

SEQ ID NO: 179036 - DNA, 392 bp, Homo sapiens
  chr16:1741720-1742112
  hypo
ctggagctcagggctggcactcggggttcctatgagaggaggtctccaaagcactgcgggggtggggtggggtggggtccggtggacgtctggttgctcagtgttctgtgatcgtttctgcagggggtaaaggaagtggtatctttgacgaatcaacccccgtgcagactcgacagcacctgaacccacctggagggaagaccagcgacatttttgggtctccggtcactgccacttcacgcttggcacacccaaacaaacccaaggtatggactgcattcagacgtgacagcgcagcagcgggtatgccaggtgctctttccaaaaaggctccaaggcagatgcgacatgtttttagggagaatcatggtgggtgccgtagattatcctgg

SEQ ID NO: 179037 - DNA, 69 bp, Homo sapiens; identical to SEQ ID NO: 89520
  chr16:1748234-1748303
  hypo

SEQ ID NO: 179038 - DNA, 122 bp, Homo sapiens
  chr16:1748860-1748982
  hypo
cagaaaagcaggccccgccaaggagcaggagcccatgcccacagtcgacagccatgagccccggctggggccgcggcctcgctctcacaacaaggtcctgaacccaccgggaggcaaatcca

SEQ ID NO: 179039 - DNA, 35 bp, Homo sapiens
  chr16:1750804-1750839
  hypo
caggaagaaataggacgtgacggtactgggccctg

SEQ ID NO: 179040 - DNA, 91 bp, Homo sapiens
  chr16:1751082-1751173
  hypo
gaagaagagttcctgcgcatgcaagccctgctgtgtggctgtcgtttacatttgggaggtgtcctgtatgtctgtacgttggggactgcct

SEQ ID NO: 179041 - DNA, 145 bp, Homo sapiens; identical to SEQ ID NO: 89521
  chr16:1753651-1753796
  hypo

SEQ ID NO: 179042 - DNA, 31 bp, Homo sapiens; identical to SEQ ID NO: 28772
  chr16:1762443-1762474
  hypo

SEQ ID NO: 179043 - DNA, 30 bp, Homo sapiens
  chr16:1767551-1767581
  hypo
ggttagataggtggtcgtgtcaaatacacg

SEQ ID NO: 179044 - DNA, 30 bp, Homo sapiens; identical to SEQ ID NO: 89523
  chr16:1782508-1782538
  hypo

SEQ ID NO: 179045 - DNA, 30 bp, Homo sapiens; identical to SEQ ID NO: 89524
  chr16:1782890-1782920
  hypo

SEQ ID NO: 179046 - DNA, 18 bp, Homo sapiens
  chr16:1788170-1788188
  hypo
gtccgtgtgagcgtccgt

SEQ ID NO: 179047 - DNA, 30 bp, Homo sapiens; identical to SEQ ID NO: 28773
  chr16:1790385-1790415
  hypo

SEQ ID NO: 179048 - DNA, 30 bp, Homo sapiens
  chr16:1793473-1793503
  hypo
ccaggttttgtagccgtgccgtggagtgag

SEQ ID NO: 179049 - DNA, 30 bp, Homo sapiens
  chr16:1795225-1795255
  hypo
ggccggggacccagcgtggaggaaggtggc

SEQ ID NO: 179050 - DNA, 107 bp, Homo sapiens; identical to SEQ ID NO: 89527
  chr16:1795483-1795590
  hypo

SEQ ID NO: 179051 - DNA, 1289 bp, Homo sapiens
  chr16:1796042-1797331
  hypo
gagtcccccacggtgcgccctctgagagaccacgggaacccacccagcggctgcctgggacaggcacaggagccacctgggtgcctctgaggccttgcactttcccacacctcaaggagggccgggggccacgggcaagctctgccatagcgggtgatcaggtcagctaagacgagaacgtttggggctctttttctccagctggttcagtatctttgttaggaaagaccattggaaagaatgtttgtttcgcattccgcattagtcacatagaatgcgctcctccctagcgagcttcctgaggtagacggctggttgcggtttctcgtaatccgggctgcccccaccctccagaatgtcttggtggcgtccctttctgtgagcagggattgtggtttctttgcgcttgctcatgttcaggggtgagctctggtccagtcaagccacagggtcagcaccttctggtcactccctggccctgacctgagcccggggaggaacgtggggcaggcgcgggtgggcccagcctcgagctcttcagcacagtgatggtgacggggcagcggtggcggcacagccagcccttcttgggtccccagtcagagccctctgccctacctgggctggacttgtttctgaacagccacaagctacagggggctgccgctgtgtccctggcgaggcactggcccattacaagcaatcgtctggggagggcaccagtggaaagccccgttccaagccatttcaggagggtggccctgcttccgaggagccggagtcagtggccggataagcagagccactcgggagtggtgaggcccggaagggttagcccggtgggcggcagaggagctctggcccgcagggtgtcgggcgaggcaaagtgcaaagcattggtgcgcggggcctcaggcagccacggcggagccgcaggccagggacctgcagtgactcgctctccctcctccctgtgtttggccttagtgtccacaggatgaaatgtccgagtcaggccagtcctcggcggccgccacacccagcaccacaggcaccaagtccaacacgcccacatcctccgtgccctcggccgccgtcacacccctcaacgagagcctgcagcccctgggggactatggcgtgggctccaagaacagcaagcgtgcccgggagaagcgcgacagccgcaacatggaagtacaggtcacccaggagatgcgcaacgtcagtataggtgggtgcccacctccgggactctgggctccctcgggcaggaggcagggcttggt

SEQ ID NO: 179052 - DNA, 30 bp, Homo sapiens
  chr16:1798726-1798756
  hypo
cgcaagccttcccccgcaccgctgtgcctg

SEQ ID NO: 179053 - DNA, 106 bp, Homo sapiens
  chr16:1804797-1804903
  hypo
accttgagaaaagacaagcctgtgtaagattcagaagcaccattgaaagacataaaagaagctgtacacgcagagggtgttgccacgtgcccggacctgaagacac

SEQ ID NO: 179054 - DNA, 165 bp, Homo sapiens; identical to SEQ ID NO: 89530
  chr16:1805217-1805382
  hypo

SEQ ID NO: 179055 - DNA, 35 bp, Homo sapiens
  chr16:1807113-1807148
  hypo
tttttttaattgaggcggagtcttgctctgtcgcc

SEQ ID NO: 179056 - DNA, 705 bp, Homo sapiens
  chr16:1807724-1808429
  hypo
ctgcggtgtctccctcgccgctctctccctcgcccacgctggggggcttttggagactgggtacctgccacaccctgccacacacactctcctcttcacaggcctgcatcatgggggctgcggggggcctgccctcctgatgggcgatgggagcagagggcagcaggcttccgggtcagggctcggcaacacagccctgggctggaccacggcgcctgggcctggttccctgcaggcctctgcctgggcacacggggcaccgggacctgctggaggctgctccctctctctcctgccctgcaacatgggagcagccgaatcattgctgggttttctgtaataagaatgtattgttagttccagtccctaattgacctttgtcccttccttcccctgcctctctgtgcgtcgctggactcgccaggggagttctcaggtgagtatctcactctcctgtctgtctcccctctgtgtgacggggggagtgggtggacgggggatgccccgagctatcccgtcaccgtggctgtgtggactgccccccacgtcgccgcagcgcctctgcttctgctcgcagccaccgccgctcggaagcttgttcggtttgctccaccagccacttgacaatgacctggatatccaacccccccagcctgaggagtcccccgcgggccatttctgaaggccctgcggagccctaagcca

SEQ ID NO: 179057 - DNA, 124 bp, Homo sapiens
  chr16:1810313-1810437
  hypo
tggcaaggccccttcacgtacctgtatgccgcgcccgtggcactcccatctttctgctttttcaaagaaacgccttgaatgtggtgaagaatgacctgattgccaaggtcgaccagctgtccgg

SEQ ID NO: 179058 - DNA, 30 bp, Homo sapiens
  chr16:1811231-1811261
  hypo
tccgaggccatcatcgcccgccgtgaaccc

SEQ ID NO: 179059 - DNA, 359 bp, Homo sapiens
  chr16:1812258-1812617
  hypo
gagatccacctatacgtgtaggcaccccaggaggaagcaggtgtcacccggcctccgagggctggctgagcctctgtgcccctccctccgcaggacaaaatccccatggcccagcgccgccgcttcacgcgggtggagatggcccgtgtgctcatggagcggaaccagtacaaggagcggctgatggagctgcaggaggctgtgcggtggactgagatgatcaggtgggagttgcggccaccccaggaggggctgcgggatcatccctgacggcaggactgcggctccctcctctgcacctccctgtcttctggggggactgaagtgcgctgggtgcttcctggcgggagccagagagt

SEQ ID NO: 179060 - DNA, 66 bp, Homo sapiens
  chr16:1812930-1812996
  hypo
ggcttcagccagcgccgcaaccatgccatgtgcccgatctcggcaggcagccggcccctggaattc

SEQ ID NO: 179061 - DNA, 1218 bp, Homo sapiens
  chr16:1813284-1814502
  hypo
tctgcagcaaggagccgtttcaggcgtctgtccagcagggagtcgctggtcatgcctgtgccccggcggcactccaggtcccggtctgtggaaccctcagtgactgtggcagcagagcagcctctgggtcgagcaggggccagctgtggcctccaagcccaggggcatagccggtgccaggaaagccacccttcccagctgggcacccagtgccgggaaagccacccttcccagctgggcacccggtggccgggaaaaggcgaggatgggcccaggcgggcctccctgccgtgacctcccccaggacaagcctggggcactgtgggggccgctcaccctggacagagacatcacccatcattcttccactcagcgactgcacgtcctccgcccgtcgagagcagaagcgcgagcagtaccgccaggtgcgtgagcacgtgcgtaacgacgacggccgtctgcaggcctgcggctggagcctgcccgccaagtacaagcaggtgcgggcgggcgctgcggggaccgggcggggccccgcagaggcggggcgggggtaaggggcggggcgctgtggggcggggagagggcggggcagtgctagggggtgggagaggacggcgggtggggcggggcctggcaggttcctagtgagcctcctgggcaggggtctggagggtcggagaaggagccccgcggctcccacgcccccacctgcctccagtcttgaagtggctgtgccgccagaagctggcagccctacctgtctcagatttctggagggatgggtaggagccagggttcgtgcccacggcgcctccctgctccctgcagctgagtcccaacgggggccaggaggacacgcggatgaagaacgtgccggtgccggtgtactgccgccctctggtggagaaggaccccaccatgaaggtgagcccgcgaggaccccgctcaggctggctgggcgagcgggaggctggggagtgccggtgacacccgacctcggccctgcccttgcagctgtggtgtgccgcgggcgtcaacctgagcgggtggaggcccaatgaggacgacgctgggaatggagtcaagccagcgccaggccgcgatcccctgacctgcgaccgcgaaggagacggcgagcccaagagcgcccacacgtctcccgagaagaagaaggtgagcatggccgaggccaccgggcaccctccctggcttagt

SEQ ID NO: 179062 - DNA, 74 bp, Homo sapiens
  chr16:1815139-1815213
  hypo
gtctgcaacgcgcacgtgctgtgcatctccagcatccccggtgagcagctggagtgggcgtttccactcgggcg

SEQ ID NO: 179063 - DNA, 30 bp, Homo sapiens; identical to SEQ ID NO: 89536
  chr16:1815953-1815983
  hypo

SEQ ID NO: 179064 - DNA, 30 bp, Homo sapiens; identical to SEQ ID NO: 89537
  chr16:1817733-1817763
  hypo

SEQ ID NO: 179065 - DNA, 308 bp, Homo sapiens; identical to SEQ ID NO: 89538
  chr16:1818406-1818714
  hypo

SEQ ID NO: 179066 - DNA, 31 bp, Homo sapiens; identical to SEQ ID NO: 28781
  chr16:1818974-1819005
  hypo

SEQ ID NO: 179067 - DNA, 30 bp, Homo sapiens; identical to SEQ ID NO: 89540
  chr16:1826025-1826055
  hypo

SEQ ID NO: 179068 - DNA, 30 bp, Homo sapiens; identical to SEQ ID NO: 89541
  chr16:1826842-1826872
  hypo

SEQ ID NO: 179069 - DNA, 30 bp, Homo sapiens; identical to SEQ ID NO: 89542
  chr16:1827242-1827272
  hypo

SEQ ID NO: 179070 - DNA, 228 bp, Homo sapiens; identical to SEQ ID NO: 89543
  chr16:1827933-1828161
  hypo

SEQ ID NO: 179071 - DNA, 242 bp, Homo sapiens
  chr16:1831183-1831425
  hypo
agagtcttactgaatgcggtgcatccaggagacaggcccaggtttggactggtcctctagcctcagaagcatctttttctccgactgattccgtgttcaggtaatgtctgcctgcctgcctagggcatctccacaccttaggccagccacgtccgcctcgcccgctggaacctacctgcccatcagagtcgtagccccagttagtggagcctgctagagccacggcccgggcatctgcgtct

SEQ ID NO: 179072 - DNA, 95 bp, Homo sapiens
  chr16:1835077-1835172
  hypo
aaaatatatttgtccaccacgtggaatgatctggatttgctaacccataaagctgaccgggactcattgtccatggagagcgcactcgccttcct

SEQ ID NO: 179073 - DNA, 66 bp, Homo sapiens; identical to SEQ ID NO: 89544
  chr16:1839099-1839165
  hypo

SEQ ID NO: 179074 - DNA, 31 bp, Homo sapiens; identical to SEQ ID NO: 89545
  chr16:1854038-1854069
  hypo

SEQ ID NO: 179075 - DNA, 30 bp, Homo sapiens; identical to SEQ ID NO: 28782
  chr16:1859315-1859345
  hypo

SEQ ID NO: 179076 - DNA, 30 bp, Homo sapiens
  chr16:1866931-1866961
  hypo
cgggctccacgtggcgtgcaaacttgaggt

SEQ ID NO: 179077 - DNA, 30 bp, Homo sapiens; identical to SEQ ID NO: 89547
  chr16:1869143-1869173
  hypo

SEQ ID NO: 179078 - DNA, 30 bp, Homo sapiens
  chr16:1869385-1869415
  hypo
tcactccatgggtgcgccccaagtgcaggg

SEQ ID NO: 179079 - DNA, 38 bp, Homo sapiens; identical to SEQ ID NO: 89548
  chr16:1881726-1881764
  hypo

SEQ ID NO: 179080 - DNA, 38 bp, Homo sapiens; identical to SEQ ID NO: 89549
  chr16:1881883-1881921
  hypo

SEQ ID NO: 179081 - DNA, 105 bp, Homo sapiens
  chr16:1889554-1889659
  hypo
gtgttcagtgctatgcggtctacaagacagtcgtaaaaaacagtaaaacacactttctacgcagccattctcaggagtcatctgaaactgcgtacaccagtcctc

SEQ ID NO: 179082 - DNA, 32 bp, Homo sapiens; identical to SEQ ID NO: 89550
  chr16:1895225-1895257
  hypo

SEQ ID NO: 179083 - DNA, 18 bp, Homo sapiens
  chr16:1919743-1919761
  hypo
gcccggcctcagtgggac

SEQ ID NO: 179084 - DNA, 30 bp, Homo sapiens
  chr16:1937176-1937206
  hypo
tgctgggattacaggcgtgagccaccccgc

SEQ ID NO: 179085 - DNA, 37 bp, Homo sapiens; identical to SEQ ID NO: 89552
  chr16:1938627-1938664
  hypo

SEQ ID NO: 179086 - DNA, 33 bp, Homo sapiens; identical to SEQ ID NO: 89553
  chr16:1944316-1944349
  hypo

SEQ ID NO: 179087 - DNA, 31 bp, Homo sapiens
  chr16:1946528-1946559
  hypo
aggctgggtgcgtggcggtggcagtcccgct

SEQ ID NO: 179088 - DNA, 391 bp, Homo sapiens
  chr16:1946678-1947069
  hypo
gctgcacctggcctacacggcttttaaatcttacattgtgcaccagagaagagtcaaacaaagcaaaattagcggcagaaagcacccccttgcttctctgtacacacgacccaggtgtatcgcagagcaaacacagtgaaagtgtgcacgctcgggaaaggcgcaggaactgacattttaccaaggtctctgaaggggcagaaaacaggccccgagaggcacagatgccaacaatgattgtcaggaatcaatgggaaagcgtgtttgtgcagcgctattggcatctgatgtgtttgttataattggctcccgccagccctgtctcctttattaattgcacatattcctcttgacgaaagtgacatgccgatggcagcgttgtgggcttgaa

SEQ ID NO: 179089 - DNA, 21 bp, Homo sapiens
  chr16:1956107-1956128
  hypo
ccaccgcgcccggcccagaat

SEQ ID NO: 179090 - DNA, 200 bp, Homo sapiens; identical to SEQ ID NO: 89557
  chr16:1960051-1960251
  hypo

SEQ ID NO: 179091 - DNA, 1213 bp, Homo sapiens; identical to SEQ ID NO: 126617
  chr16:1967766-1968979
  hypo

SEQ ID NO: 179092 - DNA, 31 bp, Homo sapiens; identical to SEQ ID NO: 89559
  chr16:1982770-1982801
  hypo

SEQ ID NO: 179093 - DNA, 101 bp, Homo sapiens
  chr16:1985414-1985515
  hypo
cagtcggcttctgtctatttcacttctgggaacaccatgatccacaagtcaacgctgtgggtctctgtgagtcagactattgtgatcgctggttcacctct

SEQ ID NO: 179094 - DNA, 380 bp, Homo sapiens
  chr16:1989197-1989577
  hypo
gcggaaagccgggcgcgggggcggtggaaagccagggtaggggcagaaagcaagtcactgcaaggcagagcttcaggtgccgttccctgcgctttcacactctgccctggcctgcaggccacaggggagctgaaaagaccagatgcccgactcaggggagtctgtgtaccccattttgttctgacatccacaggagaacccagaatctcttctccctccactcacacggaggacaaataacaacaaaaggacgaaaacatcgcaggtttaccacgcaccagatcctgacaggctgctcgctcaaccccacagcacggtgatggccacaagcgtgtgctgttaacagccccatttcaggcgaggcagtggctcaagcctgt

SEQ ID NO: 179095 - DNA, 27 bp, Homo sapiens
  chr16:1994615-1994642
  hypo
aaaactccggtctcccgcacagccagc

SEQ ID NO: 179096 - DNA, 86 bp, Homo sapiens
  chr16:1994701-1994787
  hypo
taggcagcaggcaaggtgaaccccttgggcggttacacagcgctctgagacctcgcaggaagagtcgcctccggcctttgttagac

SEQ ID NO: 179097 - DNA, 111 bp, Homo sapiens; identical to SEQ ID NO: 89562
  chr16:1997450-1997561
  hypo

SEQ ID NO: 179098 - DNA, 419 bp, Homo sapiens
  chr16:2000528-2000947
  hypo
acttacgctggaaaccgaagagaggtgaccagccctccacacagcacacttggctggggacccggctcttcagggcgtgccagggtcttagttgactagccggcgtggctgatgcccctggcaccccagaaggcaccgatgcctttcagcagccatgcctggggctgcacgtggccagcgaggctggtcagccgctcctctgggtctgtgccgaggctcgggtatttttaggctgacatttgccacagctcctggaagctggggtgagggagcgtggtcctagggactgaccgacagcggagggccgggggctgacctgagtgtggacaatgacccgaatgaccttgcagtacttcttcatggcggcgaagtccttctgtagctgctttttcccgtctgtgtcccgccacctcttgcag

SEQ ID NO: 179099 - DNA, 516 bp, Homo sapiens; identical to SEQ ID NO: 89564
  chr16:2003498-2004014
  hypo

SEQ ID NO: 179100 - DNA, 121 bp, Homo sapiens; identical to SEQ ID NO: 89565
  chr16:2007510-2007631
  hypo

SEQ ID NO: 179101 - DNA, 121 bp, Homo sapiens
  chr16:2012607-2012728
  hypo
ctgggtgcagggatgaggcgtaccagcacagagccgcagcggcctgtcacctggtgagggaaggagtcaggagacgggggcccgagggagcctgccccacggcaggcccatcacctgccac

SEQ ID NO: 179102 - DNA, 217 bp, Homo sapiens
  chr16:2012907-2013124
  hypo
tgcctgcgaaaagatgtgtgtgaggcagctggtggccctacacccaatcactgcccaccgcccagggcctgttgcacccctcaaggaaagagaggccacagtaaggcccatccgaggtcctgaggagatcttttctctctctccccgttacgaaagtcacacgggtgaagccaagtgcaactatgcagagccgagagagtcccggcaagcccagcgc

SEQ ID NO: 179103 - DNA, 209 bp, Homo sapiens
  chr16:2016681-2016890
  hypo
ggtgtgagccaccgcgcctggctacctgtgatccttcagagaagggggcaagggctgggctgtacggggtctctgggtcctgaaccagggttgtgactggcttgagctggacaatgctattgtgatgtcagcccacacccactgtgaaatgcaggctcctgagctctgggggcctgtggagctgctgtctagacgcagatcatggtgag

SEQ ID NO: 179104 - DNA, 30 bp, Homo sapiens; identical to SEQ ID NO: 89566
  chr16:2018543-2018573
  hypo

SEQ ID NO: 179105 - DNA, 369 bp, Homo sapiens
  chr16:2024264-2024633
  hypo
cgggggccgtgctgcggagtctggagcaggtgagggcagcctgggtgggtgaggggcaagtggagagggcagcccactcacaccgtgctcggcacaccactctttctcctaggaggaccaggaggacatcactgcctttgacctcagccctgacaacgaggtatgtggggcggggcctggaggggacccgctccagcgcctccctcccagactgagtccaggaagatgtgagcagggtattgctgcccctctgctgacctgtaccctcccccaggtgctggtgacagccagtcgggcattgctgctggctcagtgggcctggcaagagggcagcgttacccgcctgtggaaggcgatacacacggcccc

SEQ ID NO: 179106 - DNA, 30 bp, Homo sapiens; identical to SEQ ID NO: 89568
  chr16:2025673-2025703
  hypo

SEQ ID NO: 179107 - DNA, 30 bp, Homo sapiens; identical to SEQ ID NO: 89569
  chr16:2026310-2026340
  hypo

SEQ ID NO: 179108 - DNA, 30 bp, Homo sapiens
  chr16:2027556-2027586
  hypo
cgagtgtgtgcggacgctggatgcccacga

SEQ ID NO: 179109 - DNA, 671 bp, Homo sapiens
  chr16:2028551-2029222
  hypo
gagcggcactttcagcggctcagcaggaccctccaggccgccgctttcttggacttcctgtggcacaacatgaagctccctgtgccggccgccgcccccaccccctgggaaacccataaaggcgcactgccctagccggtccggcctctctccagtccatcctgaacccctggaaaacccataaaggccgctctcctggccggctctgtctctctggactgcagtccagccccccaccctggccaacaccctacctagccagccagaagggcactggagctgatggtctcggccctgccacgcccatcccgcaccctggcctggcagagatccagcccgcggctccgcacgcttagacggtgggggtcatgcagaacaagctttactcagaggaacagcaaatggccccctcccatccctgctggccagggagatccgccctccccgctcctccccagccctgggatggcgcggtccatcccctcatcgggatcctcgcgctcactgctccgtcgtggggtgcggcacagagtccacgcaccctcgagggcggccctggcgccgtgggcgccgctccagggccctgcgtgtgacggtgcagcagcggctctggatggcgcccggcgaaggtcgggtgggcacggtggggggaggggcggtggcctgggagg

SEQ ID NO: 179110 - DNA, 309 bp, Homo sapiens
  chr16:2035674-2035983
  hypo
ggagttcatcacacccggggagctgcagggtcagccctgttctgggagtgcctgtaccttggagcataagggcactcccaggtgtagttcacagcagtgccccagctctccttccttgacagcagacagggaactggcaggggcagtggagccgctgcgtcctctcattctttacctgctctccctacacaggctgtgcaggaaccacccagacacccgcacccgggcatgcttcacacagtggctgtgccacctgcacaatgaagtgaaccgcaagctgggcaagcctgacttcgactgctcaaaagt

SEQ ID NO: 179111 - DNA, 30 bp, Homo sapiens
  chr16:2036515-2036545
  hypo
gggaaagctcaggtcgggtctttctgaggg

SEQ ID NO: 179112 - DNA, 599 bp, Homo sapiens; identical to SEQ ID NO: 52687
  chr16:2041581-2042180
  hypo

SEQ ID NO: 179113 - DNA, 100 bp, Homo sapiens; identical to SEQ ID NO: 126631
  chr16:2042498-2042598
  hypo

SEQ ID NO: 179114 - DNA, 230 bp, Homo sapiens; identical to SEQ ID NO: 126632
  chr16:2042617-2042847
  hypo

SEQ ID NO: 179115 - DNA, 246 bp, Homo sapiens; identical to SEQ ID NO: 89574
  chr16:2043000-2043246
  hypo

SEQ ID NO: 179116 - DNA, 309 bp, Homo sapiens; identical to SEQ ID NO: 28793
  chr16:2049433-2049742
  hypo

SEQ ID NO: 179117 - DNA, 31 bp, Homo sapiens; identical to SEQ ID NO: 89576
  chr16:2051261-2051292
  hypo

SEQ ID NO: 179118 - DNA, 30 bp, Homo sapiens
  chr16:2051632-2051662
  hypo
cagcccgggccactcggccctggcggctgt

SEQ ID NO: 179119 - DNA, 30 bp, Homo sapiens
  chr16:2052254-2052284
  hypo
tgtggcggttctggcgtgcctcggcgcggc

SEQ ID NO: 179120 - DNA, 30 bp, Homo sapiens; identical to SEQ ID NO: 89577
  chr16:2052604-2052634
  hypo

SEQ ID NO: 179121 - DNA, 30 bp, Homo sapiens; identical to SEQ ID NO: 89578
  chr16:2075461-2075491
  hypo

SEQ ID NO: 179122 - DNA, 141 bp, Homo sapiens
  chr16:2099382-2099523
  hypo
gggctaggtcgttatcttttatgtgtgtttgtgtctttgtcacacatgcctggcattgtgttttgcccatgagtaaatgctgaatttttgcacttgtaaagttttctacttagaaacaactaaaacgttcatcaactgatg

SEQ ID NO: 179123 - DNA, 30 bp, Homo sapiens; identical to SEQ ID NO: 89580
  chr16:2101039-2101069
  hypo

SEQ ID NO: 179124 - DNA, 30 bp, Homo sapiens; identical to SEQ ID NO: 89581
  chr16:2104107-2104137
  hypo

SEQ ID NO: 179125 - DNA, 918 bp, Homo sapiens
  chr16:2104667-2105585
  hypo
gtctctggggcttggggcctccgaacacctctgcaacggcaggagctgggcgagttctgtcactgggaggtggtgctgctgacttggtctcaaccggagcgtactggtcccgtcttcctcctcctttctccactttgtggaccttcctcctgccatcctgtggtgggaggtttccattagtcttgggtctctgtgtcatgattctgggaagtagagaaagaggaggaagagatcggtctgactctggctttgctgttctgtcgcccagaaaagggcctcagtggctgggctgcctgcaggacaggtgccggccaggtgcctaccgtcaggtttcctgtctgaggtgacgtggccggcagccaagtgtgcacacgtctcctccgagccactctctgctgggggtggggaacgcccaggagtctggtgatgtcggcgtctcccagcctcgggttgggccctgagtgtacggcatacacacttctgctgccgcctcggcacagaccctctgtgcagccccaggggcggtagatcctagtgtccgtgcgtagccggcctgccctgggctcccctgagcctcttcgggcccagtgcgtggtctgtctgttgctgccgggggactgatgatggggtttctggcagtgacgggtttggacacactgtcctgcggcgggagggggaggtgagtgggagatgtagattcggcgtcctcgcaaactgccgccgcttctcccccagctgactttgtcctgcagtggatggatgttggcttgtcctcggaattccttctggtgctggtgaacttggtcaaattcaatagctgttacctcgacgagtacatcgcaaggatggttcagtaagaaaagaattgagatcctgttctgataatggtcctaagttcagctccgcagtgaataaagt

SEQ ID NO: 179126 - DNA, 251 bp, Homo sapiens; identical to SEQ ID NO: 89583
  chr16:2106518-2106769
  hypo

SEQ ID NO: 179127 - DNA, 525 bp, Homo sapiens
  chr16:2106972-2107497
  hypo
tgggaggagatggtggcgagctggccggaccttgggtggctatagggcagcagccaggcggggccagcagcgggactggggctgggggcagggcttatgcctgccagcccctgacacgcattgtgtctcgcagctgatgcggaacctccttggcacccacctgggccacagcgccatctacaacatgtgccacctcatggaggacaggtgagtgtggtgggtggggcgcagggcagtggaggccagcacagccctcggggcagctccagtgtcccttgccaagcacacactggcttagagagtccttgtcctctcgggcagctgttccagaggctgccactagagcgaggcccatgacttctaggatccagcccctgtcctctccttcctctgtcagttcaacagaatatccacacccagctcagtgcctgccccatgctcggacgtcctccagcggtgctccccaactacttagcctgttacaaggcgaggctcggggtcttggcttgacgttgcccttgccct

SEQ ID NO: 179128 - DNA, 460 bp, Homo sapiens
  chr16:2108516-2108976
  hypo
acctgtagctcacagcgtggtcagcagtgatgggctgccgcctgtgcgcaggagtgaacaagagtgttactgctggcctctgttccctgcccttccccagcggtgctcctgccccccccaagcacagggacctctggggctgctgcaggagcctcggcaacctcacacatccatggcggaccctgggacagggccctgctcacattccgtctctctggggaacacttttagagcctacatggaggacgcgcccctgctgagaggagccgtgttttttgtgggcatggctctctggggagcccaccggctctattctctcaggaactcgccgacatctgtgttgccatcattttaccaggtaaggcggtttctgtgtgcagtgagctggcaggaacgggagagctcccctcacgcctgcccacccatcccactgggggtcctgctgcgggggctgcggtgg

SEQ ID NO: 179129 - DNA, 30 bp, Homo sapiens; identical to SEQ ID NO: 89586
  chr16:2110347-2110377
  hypo

SEQ ID NO: 179130 - DNA, 30 bp, Homo sapiens; identical to SEQ ID NO: 89587
  chr16:2110673-2110703
  hypo

SEQ ID NO: 179131 - DNA, 30 bp, Homo sapiens; identical to SEQ ID NO: 28799
  chr16:2113243-2113273
  hypo

SEQ ID NO: 179132 - DNA, 30 bp, Homo sapiens; identical to SEQ ID NO: 28800
  chr16:2123200-2123230
  hypo

SEQ ID NO: 179133 - DNA, 167 bp, Homo sapiens; identical to SEQ ID NO: 89590
  chr16:2124088-2124255
  hypo

SEQ ID NO: 179134 - DNA, 149 bp, Homo sapiens; identical to SEQ ID NO: 89591
  chr16:2125860-2126009
  hypo

SEQ ID NO: 179135 - DNA, 173 bp, Homo sapiens; identical to SEQ ID NO: 89592
  chr16:2126989-2127162
  hypo

SEQ ID NO: 179136 - DNA, 30 bp, Homo sapiens
  chr16:2127632-2127662
  hypo
aataactctccacccgtgaaagaattcaag

SEQ ID NO: 179137 - DNA, 1181 bp, Homo sapiens; identical to SEQ ID NO: 89593
  chr16:2128598-2129779
  hypo

SEQ ID NO: 179138 - DNA, 342 bp, Homo sapiens
  chr16:2131436-2131778
  hypo
tggccgtcagagcagcgctggctccgacatcgtggtcctgaggattgtgggagggagcatgagggcaaaaccagggcccaggccaggaggcccctggggggccagagatgggtaaggggaggtactggcctcaggccaaaggtgctgccgcctccgcagggaacaccagctggctgatgagcctggagaacccgctcagccctttctcctcggacatcaacaacatgcccctgcaggagctgtctaacgccctcatggcggctgagcgcttcaaggagcaccgggacacagccctgtacaagtcactgtcggtgccggcagccagcacggccaaaccccctc

SEQ ID NO: 179139 - DNA, 30 bp, Homo sapiens
  chr16:2132119-2132149
  hypo
ttggacacctgagcccgcctgcgcactctg

SEQ ID NO: 179140 - DNA, 40 bp, Homo sapiens
  chr16:2134064-2134104
  hypo
tggcagtgctgctgcgtcaacgggcgggggccgtagcctg

SEQ ID NO: 179141 - DNA, 213 bp, Homo sapiens
  chr16:2134433-2134646
  hypo
aggccgacgtgggccggctgagccctgaggttaaggcccggtcacagtcagggaccctggacggggaaagtgctgcctggtcggcctcgggcgaagacagtcggggccagcccgagggtcccttgccttccagctccccccgctcgcccagtggcctccggccccgaggttacaccatctccgactcggccccatcacgcaggggcaagagag

SEQ ID NO: 179142 - DNA, 415 bp, Homo sapiens
  chr16:2135229-2135644
  hypo
gtcacagtcctttgagcggtcggtgcagctcctcgaccagatcccatcatacgacacccacaagatcgccgtcctgtatgttggagaaggccaggtgaggctgcggggccggcctaggtgcctggacagggccagctgggcctcagcctgcagtgggtagggagtctgggcccccaacgccccacagagctcaacactgccgggtcccctacagcatgaagtgctcattgagctctgtgccaggtgctgctctgagtgctggggaccccggtgcgagtgacaggttagcgtgggagcacccggcacaccaaggagtgggaaggactgggcgggtggcaccggtcgcagggctggggagggcgctgttggtcagtgagctgacagctgagtggtgagggagcgggcagggggagcc

SEQ ID NO: 179143 - DNA, 30 bp, Homo sapiens; identical to SEQ ID NO: 89598
  chr16:2138071-2138101
  hypo

SEQ ID NO: 179144 - DNA, 30 bp, Homo sapiens; identical to SEQ ID NO: 28805
  chr16:2139099-2139129
  hypo

SEQ ID NO: 179145 - DNA, 1201 bp, Homo sapiens; identical to SEQ ID NO: 89600
  chr16:2141839-2143040
  hypo

SEQ ID NO: 179146 - DNA, 72 bp, Homo sapiens; identical to SEQ ID NO: 89601
  chr16:2144842-2144914
  hypo

SEQ ID NO: 179147 - DNA, 332 bp, Homo sapiens
  chr16:2145546-2145878
  hypo
cagggaatgccagggcagaggcgccgccaggacggagggtgcaggctcaggcgcagggaaggccgtgctctgcgttgggaaaggagccacgggacgcgctggaggctgcagtgaggaaggacgcagaggggtccaggacaaacccaagcctccgacctggtcagcccgaagcactgtccgagcaagggacggccaagggttgaggaagccgggagggtgagggccacgcgctctgtgtggatgcggagtctgagctgccgtcagaaatccccgcggaagcactgaatctggatttcacagagctttgggccggagatacctggggctggtca

SEQ ID NO: 179148 - DNA, 345 bp, Homo sapiens
  chr16:2146180-2146525
  hypo
gcaaatgtcacagggcgtagttacccaaacccagacaccgcagcccctgtgcatgcaggccctgtggtgtggcctgtggctccggggcaccgcacctgcactgcatgccactgcactgaatcctgcaggcagctgcagtgcaacggcagggccgtgtggacctcagcacacctgagcataggagggcatggcagagcccggggtcacacgcgtgggaacacgccgtgggtgcgctccgccgccggctgccatgtgcgtgactatgtgcgtgactacatacaaggtaacctctatatgaccatttgttgataagttacaaaacaaccaagaaattgaggaattttt

SEQ ID NO: 179149 - DNA, 37 bp, Homo sapiens
  chr16:2147115-2147152
  hypo
caatcccccctcccccgagagccggacactcacaggc

SEQ ID NO: 179150 - DNA, 68 bp, Homo sapiens
  chr16:2147355-2147423
  hypo
tggccagggagaagccgtcctcctctgggcccagcccatggcccgcctggccccgtgccagctgccgc

SEQ ID NO: 179151 - DNA, 30 bp, Homo sapiens; identical to SEQ ID NO: 89603
  chr16:2162904-2162934
  hypo

SEQ ID NO: 179152 - DNA, 57 bp, Homo sapiens
  chr16:2193199-2193256
  hypo
gcacttggtgcagtccggggtagtcagtgattgttacggttacgcaggggtctgttt

SEQ ID NO: 179153 - DNA, 384 bp, Homo sapiens
  chr16:2211792-2212176
  hypo
ctggccagctctccccgaccttcctgccgggagctgctggagacgggatagacatgtgccagggcagagcagccttgtagacacaccacgaccacacctctgtcccagggctgactcctctgagcctggctgcaggtgtgtggcactgcccacactcaggagcccctgcctcttccacaagagaagtcccccgagagcctagtctgggtcacacagggccaagcccctcgagtcgcagtggggcctggggaaggccgagggaggctttggccaggccccatctcccgagaccatgggacgcaaagatcaggtggggccaggtagctcgtggcgctgccaactgcaggggctgagatgtcgggttgagcccgagtcctgaaggct

SEQ ID NO: 179154 - DNA, 244 bp, Homo sapiens; identical to SEQ ID NO: 89605
  chr16:2212715-2212959
  hypo

SEQ ID NO: 179155 - DNA, 764 bp, Homo sapiens; identical to SEQ ID NO: 89606
  chr16:2213240-2214004
  hypo

SEQ ID NO: 179156 - DNA, 30 bp, Homo sapiens; identical to SEQ ID NO: 89607
  chr16:2222622-2222652
  hypo

SEQ ID NO: 179157 - DNA, 30 bp, Homo sapiens; identical to SEQ ID NO: 89608
  chr16:2223173-2223203
  hypo

SEQ ID NO: 179158 - DNA, 30 bp, Homo sapiens; identical to SEQ ID NO: 28813
  chr16:2223517-2223547
  hypo

SEQ ID NO: 179159 - DNA, 55 bp, Homo sapiens
  chr16:2226065-2226120
  hypo
ccaaggagcaggtgcggaccctcacgggccacgtgggcaccgtgtatgccctggc

SEQ ID NO: 179160 - DNA, 391 bp, Homo sapiens
  chr16:2226418-2226809
  hypo
ctgcacaggatggagcgggggtggggacgaggagctggcagccccagcacaaagtggtggagggcaggtacgtgtggcaggtgtggctggggcagggcagccggccgcaggacatcctggtgaagcagccctttctctgcaggtttggacttgctaacaggatccaggccaggctgtggtttcccctgaaccagccctggacctttctgagccaggctggccacatggggtggtctcggggtttctgcctgccccgtgggcataggtggacaggctctggcagccgggcagtgccctccccgtcccatgctcggcgagcctccctctactcggcactgtccttgctgcccagcccctctctgggtgccaggtacgacgcttgccccggccc

SEQ ID NO: 179161 - DNA, 30 bp, Homo sapiens; identical to SEQ ID NO: 89611
  chr16:2228335-2228365
  hypo

SEQ ID NO: 179162 - DNA, 1785 bp, Homo sapiens
  chr16:2229594-2231379
  hypo
tgggctgccagggcctggcagcggcaccttcttggaggtgggtgtgggcgagccctggagcttgggcacaggctgcgtcaggacgggcttgggagagacaggcggcttggccggcttccgggcttcgccctcgggcgggggcaatgggggtaggtgcgccaggtcggtgggcgggggttcggcaggcgggggcggtggaggcagctccggaggcccagcctgctccgaggccggtcggcggcgcacggtgccagtgccattatggtacacggacagtggcggtggtggctcaggcccggcctcccgctccttggccttgggcctgcgcttgaccgtgtcagactcggtcaggatgaacttgacgttctcctgctggttctgcttggcccggatgcgcctcttgagtgtggcgctggcttccaccttggccaagggcgggccttcgacacccgcctcgcccttggagggaccccgaggccgctgccggccagtgccatcctccacaaaggggcctgggtctgccgactccccaggcccccggcgggcagtggccagaagtccggtgactggcccgctgagcgtgcggcgccggttcaccacctccccgccaggcccgatggcctctttgtgtttcactgaggccagcacggtggccacccggcccggctctgggctggcagggcggggagtggggtggccctcaggaggcctgcgggcagcccggcccccacccccaatggaggacagctccagcatggccgcgatgctcttcacactgccggcactacccgtgtccacgctgccggccaggtcactggcccgccggcactgtgcccggacccccagcaggccatcctcaggctcggcgtcaggcaccggctcatccgccaggttggcactagccagggccgagctggagcgcttgggtgggggcggcgggggccccttctttcggggccgcacggcaaaggactggctgcggttgacgttcttgtcggcacctgcgggcgccctcactgagtggctgcggcccacgcgccgctggaccgtggcataggggccggcagccgcaggcaccagcagctcgtcccgctccggctcgctgtcggacgccgcatagcgattcaggctgtgggcccgcttcttgggccgccccggctccgcgtcggcctcagggggcaggcacagtgtgggcacagccgtcggcacgggtgggggcgcaggccccggggcagccggccccacctcgccctccacgggctggggcagcacgtaggcaaagccgcggtgcgtcggtgactgaggcagggagcggggtgacatggggcgctctgtcggcggcagcagctgcggggtgggcttcaccttggccgtagctggggctggaccatgaggtcccccaagggcctggggagagcctggtcgggttttggtgggcgtctgggggggcgtgaagtggctagtgcctggtgggaggacctgccgtggcttgccaggcacggggggcacgctggccctcttgatgctgtggccgtggcggccgggccgggcctccctgggcggggtgccgggggcggggccctcatccaggaggtactcctggcttcgagacatggggctgctgggcccagggggcccatctcccagcagctcctgcgagctgctcatgtgccgtgcccgaccacccaggctggagtcctgccgcgtggtggccctcggggtgggtggcaggtggctggagggcttctcagtggtgggccccacctcagccgggccagtcatggc

SEQ ID NO: 179163 - DNA, 43 bp, Homo sapiens; identical to SEQ ID NO: 28815
  chr16:2232745-2232788
  hypo

SEQ ID NO: 179164 - DNA, 102 bp, Homo sapiens; identical to SEQ ID NO: 28816
  chr16:2233087-2233189
  hypo

SEQ ID NO: 179165 - DNA, 30 bp, Homo sapiens
  chr16:2233682-2233712
  hypo
gccgctgatctctgccgcgatcttcttccg

SEQ ID NO: 179166 - DNA, 759 bp, Homo sapiens
  chr16:2234441-2235200
  hypo
ccgtgcccatgcacacgctgcaccatctcatacccatccccttccacctgtacacagacacgcgtgcccagctcgcagtcccaccatcacacacacacacgcacacacagaggcacaggttggcccacacgcacagcctgcacaatgacgacacccgtacacacaggcagacacacacacaacacacagactgacagacagaggagagggtctggcctggcaatgcccccgaccccgccgctgccaggccaggcaggccgtgtaagcacccatcagcccatcggccttacagcctctccccggagcccacgctgagaacacccccaagccctgtaccttgccctccgatgctggctccagcttcttgggcggctgctccccatagacctgcccggcgtgggccactggaggctgggaccgggccacacctgaggacgagagtgggtgggggacaagggctgtcgggctgctttcctccatcgggctgcgtggcagcacccttgctcttacctgcagagccttccggaggcttggcggggctgtcccccgggccggactcagagacggacttctgggaaagcaccgttgccaggagctgcaacccagaaaccccggcttgtcacctgctcccagccctggccaccctggccctggccactaccccacctaccttgacgccttcagagcccgcgtgtagggcgtgacccccgctgccccggccgccagccatgccgctaatgctgccgcttcggtccccac

SEQ ID NO: 179167 - DNA, 66 bp, Homo sapiens
  chr16:2235437-2235503
  hypo
ctgggccagcgatggcgggtactgacgcaggggaggcaggacagagactggcgcagccacagccgg

SEQ ID NO: 179168 - DNA, 243 bp, Homo sapiens
  chr16:2239260-2239503
  hypo
gccaggtccaggggcgtcttccccgagttgtccaccatgcacgggttagactggtgctgtagcagcatctcagactgggggccaagggcgcagtcaggtccgcacatcctcaggccgcgctgccccgcccccgctgccccgcccccgctcgggcctcaccacatcatagtgaccatgctgggccgccaggtgcagggggatgtggccctcatcagacgggatgttcacggccgagcccgcctt

SEQ ID NO: 179169 - DNA, 31 bp, Homo sapiens; identical to SEQ ID NO: 28817
  chr16:2241313-2241344
  hypo

SEQ ID NO: 179170 - DNA, 342 bp, Homo sapiens; identical to SEQ ID NO: 89617
  chr16:2260755-2261097
  hypo

SEQ ID NO: 179171 - DNA, 495 bp, Homo sapiens; identical to SEQ ID NO: 89618
  chr16:2278290-2278785
  hypo

SEQ ID NO: 179172 - DNA, 30 bp, Homo sapiens; identical to SEQ ID NO: 89619
  chr16:2280431-2280461
  hypo

SEQ ID NO: 179173 - DNA, 973 bp, Homo sapiens
  chr16:2280800-2281773
  hypo
atgtgggaggtggggcgggctctggccttgacctggcgtttggtttctgggatggtggcgtcacctgggagcatgaactccttaggttctggcggggtctctgggctgggtctctggccagccaggcccctttccacccacctaaactctagcagcctccagccctaggctcagcacccctccctgtgcttcagcagcccctcttggcacccctgccactctggcacccctgggattttcccctttgcgggcatcctgggtactctgtgtgtgcccttggccagtcagcaggcccggtgggcttagtccagggctgctagctctcctgttggcctctagtggagatggcagagggtcctgcctgctggtggccaagggctggggcgtgccaggtcctgtctttgcgggtgcaggggtgcggtcagctgtgtgggcagttggaacccacctccaggccctcctgccgcttcgcggaaaaagttcgcgtctcctctggcctcgcagcagccatgttcccccaggtcctccccatcagaggcctctgtcctttggaagatcactcctggggcatcgagcgtgtaagggctcgggcaggagaggctcttaattgtttctgagtcaccacgcttttgtcgtgtttcaagagaacagcttgtcaaaacaagacgccagccggactgaggtggtttctaagcagtggcttcacagctgtttcccacttgtcatctttatgagcagaaaacctgaactgtgtttacaacctagctttgcacattgtcagatttttcccagcatcctccagaagtgcaaaagcccagcttcctcgcctcaggctgtcccgggtgtctggagagcgttcactctcccaggccaagcctgccttgggacggggctctggccaggcctgcctgccctgctgcagtggcccagcccatctcctccgatggaagagtggccccggacgcacatcctc

SEQ ID NO: 179174 - DNA, 34 bp, Homo sapiens; identical to SEQ ID NO: 28822
  chr16:2282208-2282242
  hypo

SEQ ID NO: 179175 - DNA, 824 bp, Homo sapiens; identical to SEQ ID NO: 28823
  chr16:2282326-2283150
  hypo

SEQ ID NO: 179176 - DNA, 189 bp, Homo sapiens
  chr16:2284110-2284299
  hypo
ggcaggcggcctggcgggcccgcgggtgatgggcttggcctgatgctgtgtgtggctgcagggccgaggccgttcgcctgcgcgcagtgtggcaaggccttccccaaggcctacctgctcaagaagcaccaggaggtgcacgtgcgtgagcgccgcttccgctgtggcgactgcgggaagctctacaag

SEQ ID NO: 179177 - DNA, 30 bp, Homo sapiens
  chr16:2285521-2285551
  hypo
ggtcatcgcctcgccggagggccagctgga

SEQ ID NO: 179178 - DNA, 96 bp, Homo sapiens
  chr16:2286026-2286122
  hypo
gagcctcggcctccaccgcagggtgagcaggtggagcagcagcaggagatgctgggtagggagtgtggctggtcctacctgcgctgccttgctttc

SEQ ID NO: 179179 - DNA, 30 bp, Homo sapiens; identical to SEQ ID NO: 89625
  chr16:2289963-2289993
  hypo

SEQ ID NO: 179180 - DNA, 30 bp, Homo sapiens
  chr16:2293163-2293193
  hypo
ccagctgcagggcacgctccgccgcccggt

SEQ ID NO: 179181 - DNA, 51 bp, Homo sapiens
  chr16:2294341-2294392
  hypo
ctgtcccaccccctggcgctggcccagaacagccagcgaggccacctggga

SEQ ID NO: 179182 - DNA, 30 bp, Homo sapiens; identical to SEQ ID NO: 28824
  chr16:2294624-2294654
  hypo

SEQ ID NO: 179183 - DNA, 182 bp, Homo sapiens; identical to SEQ ID NO: 126655
  chr16:2295227-2295409
  hypo

SEQ ID NO: 179184 - DNA, 30 bp, Homo sapiens
  chr16:2302932-2302962
  hypo
cacattccaaggtggcgataaaaccatctc

SEQ ID NO: 179185 - DNA, 121 bp, Homo sapiens; identical to SEQ ID NO: 89628
  chr16:2306143-2306264
  hypo

SEQ ID NO: 179186 - DNA, 29 bp, Homo sapiens
  chr16:2308394-2308423
  hypo
cctaaaacatcttttcggtaatcacacac

SEQ ID NO: 179187 - DNA, 25 bp, Homo sapiens
  chr16:2310496-2310521
  hypo
aataaaaaaccggcctcctattttg

SEQ ID NO: 179188 - DNA, 95 bp, Homo sapiens; identical to SEQ ID NO: 28826
  chr16:2314152-2314247
  hypo

SEQ ID NO: 179189 - DNA, 30 bp, Homo sapiens
  chr16:2321584-2321614
  hypo
gtgactgaggcacccggggtgcctcttagg

SEQ ID NO: 179190 - DNA, 30 bp, Homo sapiens; identical to SEQ ID NO: 89631
  chr16:2326065-2326095
  hypo

SEQ ID NO: 179191 - DNA, 30 bp, Homo sapiens; identical to SEQ ID NO: 89632
  chr16:2334949-2334979
  hypo

SEQ ID NO: 179192 - DNA, 186 bp, Homo sapiens; identical to SEQ ID NO: 89633
  chr16:2338096-2338282
  hypo

SEQ ID NO: 179193 - DNA, 161 bp, Homo sapiens; identical to SEQ ID NO: 89634
  chr16:2339390-2339551
  hypo

SEQ ID NO: 179194 - DNA, 30 bp, Homo sapiens; identical to SEQ ID NO: 89635
  chr16:2341613-2341643
  hypo

SEQ ID NO: 179195 - DNA, 397 bp, Homo sapiens
  chr16:2347404-2347801
  hypo
ccagcaggtcagcctcgtccatgaagtgggtggtcagcacgatggtgcggtcacttttctgccgctgaagaagatcccagatggccctcctggagatggcgtccatgcccgaggtgggctcgtccagtatcagcacctggagggagagacacagtctcgcgacgctggtagagccacaccccgggcccaggctggccttgcggtaggccccatcgaggggttcgcggagccggcttgagtcctccaaggatggtgatggccttgtctggggtgtcaagggccaaggtgcccgggccatggcggaagggccatcccaggtcgagcaggaggggaacccactgcctccagtcccaccgccacaccttggagcctgcgatgagggcgatgccgatggaga

SEQ ID NO: 179196 - DNA, 30 bp, Homo sapiens
  chr16:2350572-2350602
  hypo
aagagaagccgaaggcgccacgcctccctc

SEQ ID NO: 179197 - DNA, 30 bp, Homo sapiens
  chr16:2350804-2350834
  hypo
tgcggggcggggactcgtttacccgcagct

SEQ ID NO: 179198 - DNA, 541 bp, Homo sapiens; identical to SEQ ID NO: 89637
  chr16:2358231-2358772
  hypo

SEQ ID NO: 179199 - DNA, 55 bp, Homo sapiens
  chr16:2369671-2369726
  hypo
gtactggatggccacgaggaaggggtctgcgatgaacggcgggtacgggaacctc

SEQ ID NO: 179200 - DNA, 31 bp, Homo sapiens; identical to SEQ ID NO: 89638
  chr16:2380700-2380731
  hypo

SEQ ID NO: 179201 - DNA, 622 bp, Homo sapiens; identical to SEQ ID NO: 89639
  chr16:2382127-2382749
  hypo

SEQ ID NO: 179202 - DNA, 30 bp, Homo sapiens
  chr16:2474253-2474283
  hypo
gaccccgtggcccggcgcctgttctggaat

SEQ ID NO: 179203 - DNA, 30 bp, Homo sapiens; identical to SEQ ID NO: 89640
  chr16:2475042-2475072
  hypo

SEQ ID NO: 179204 - DNA, 150 bp, Homo sapiens; identical to SEQ ID NO: 89641
  chr16:2475884-2476034
  hypo

SEQ ID NO: 179205 - DNA, 227 bp, Homo sapiens
  chr16:2477160-2477387
  hypo
acctctcttctgagacgggctccatcccgtggcctttctctctctgtggagttcactctgccccttgccacaggcccctcagctcctctctgggaagtgcagatgctggtctctgccccttctcagccaggactcaggaaagggtcatgcacaggccttgcctatggttcctgcaccccttgcccagaacaacggcgttgcacacccatggtcgccaacccaccctc

SEQ ID NO: 179206 - DNA, 30 bp, Homo sapiens; identical to SEQ ID NO: 89642
  chr16:2482760-2482790
  hypo

SEQ ID NO: 179207 - DNA, 511 bp, Homo sapiens
  chr16:2485933-2486444
  hypo
tgaagaagtggtccccgtgttagcagttcagttgctgtccttgctctatccgatggcctgcctccccattccctctcaggagctcgtgcccagatgtaccctgctgagggacctgctaatgatactctgactttgcaggttacgaaagtcgcctcttgttttagcaaaccctttaatttcagttggcaaagagtgactgagccagagcctcagcacgggggctgtttgggctccctgccctgtgcgccatgagcacgcagacctgcctgtggatgctggccctctccttggccatcctcttagaactctcgagacagagttcagcgtgccctgtaacacagagccaggcttctaaacgggaagcaggtacaggcaggttagaactggcctggtgcctggatcccttcatccccagaggccaggtgctccttgaaagaaacttgcgcagccttttcttctaccagttaactgcttatctgctcagcaccccaaggaacgagcccatgatctg

SEQ ID NO: 179208 - DNA, 332 bp, Homo sapiens; identical to SEQ ID NO: 89644
  chr16:2497818-2498150
  hypo

SEQ ID NO: 179209 - DNA, 30 bp, Homo sapiens
  chr16:2498937-2498967
  hypo
atgatgggcgagatcgtctccgccttggaa

SEQ ID NO: 179210 - DNA, 109 bp, Homo sapiens
  chr16:2501132-2501241
  hypo
catgaagtccctaccgtggtccaggcgctgggggagagggcaggacagagagttcagaggtcaggtcgtgacgagagaaacagcaggcaggcgcgcggggcaggtggcg

SEQ ID NO: 179211 - DNA, 116 bp, Homo sapiens
  chr16:2505251-2505367
  hypo
caccggcatcttcttcgtagcagaacctttgggagcacgtggtgacaggctggggcacgcgggtgttagaggcaggtgtggagggcctggcctcccagcgccgccgtccatgactg

SEQ ID NO: 179212 - DNA, 100 bp, Homo sapiens; identical to SEQ ID NO: 28829
  chr16:2508555-2508655
  hypo

SEQ ID NO: 179213 - DNA, 30 bp, Homo sapiens
  chr16:2512488-2512518
  hypo
cgctgctgagactgcgcatgagggaggagc

SEQ ID NO: 179214 - DNA, 518 bp, Homo sapiens; identical to SEQ ID NO: 126666
  chr16:2521458-2521976
  hypo

SEQ ID NO: 179215 - DNA, 264 bp, Homo sapiens
  chr16:2531016-2531280
  hypo
cctgtcctttgaccacgctgtctctatcccttctgaggctaaggcttcctcacactgcaagatccagccgaggcaggccttggcgctgggaaagcaccgtgtcacagcacctgcaccttgaattggcatcgtcagtacacctgacccgggctggggtggggccatgcctctgtactcctctgcactcaggtacctggcacactggcattcgggaagcatgtcttgaatgcctattaaaatgattaggaccgggcgtggtggctc

SEQ ID NO: 179216 - DNA, 101 bp, Homo sapiens
  chr16:2531771-2531872
  hypo
gcccctgctcaggctccgagcagcaggctcagcagccacagttaggcacgtttgcacttccaaccatcacaggcaggcgggccaaccggcccatggtgtgg

SEQ ID NO: 179217 - DNA, 48 bp, Homo sapiens
  chr16:2539900-2539948
  hypo
gccagtttcccactgcgcttggaatataatccacgggggcttgtgggt

SEQ ID NO: 179218 - DNA, 577 bp, Homo sapiens; identical to SEQ ID NO: 89651
  chr16:2540426-2541003
  hypo

SEQ ID NO: 179219 - DNA, 30 bp, Homo sapiens
  chr16:2542270-2542300
  hypo
cacacatccttggctcgggggtccctgtga

SEQ ID NO: 179220 - DNA, 177 bp, Homo sapiens; identical to SEQ ID NO: 89652
  chr16:2544809-2544986
  hypo

SEQ ID NO: 179221 - DNA, 932 bp, Homo sapiens; identical to SEQ ID NO: 89653
  chr16:2546127-2547059
  hypo

SEQ ID NO: 179222 - DNA, 30 bp, Homo sapiens
  chr16:2550107-2550137
  hypo
gggcttcatctgctcgagccaccagctccc

SEQ ID NO: 179223 - DNA, 30 bp, Homo sapiens
  chr16:2550482-2550512
  hypo
tcatcgtcggtgagcgccagcagacggggc

SEQ ID NO: 179224 - DNA, 22 bp, Homo sapiens
  chr16:2554703-2554725
  hypo
gcaaccgcgcccagccgagatt

SEQ ID NO: 179225 - DNA, 146 bp, Homo sapiens
  chr16:2579463-2579609
  hypo
gctctgtcccagacttcgtggtgctcgacgactcccttcacgtccaggccacctacatctcgggtgagctggtgtggcaggcggacgcagctaggcagtgacaaggacctcggctgagaggacacctggccgcagcgggatgccat

SEQ ID NO: 179226 - DNA, 30 bp, Homo sapiens; identical to SEQ ID NO: 89655
  chr16:2580058-2580088
  hypo

SEQ ID NO: 179227 - DNA, 30 bp, Homo sapiens; identical to SEQ ID NO: 89656
  chr16:2580818-2580848
  hypo

SEQ ID NO: 179228 - DNA, 30 bp, Homo sapiens
  chr16:2581107-2581137
  hypo
atccccacctcagacgggacgcccagtcca

SEQ ID NO: 179229 - DNA, 30 bp, Homo sapiens; identical to SEQ ID NO: 28834
  chr16:2635430-2635460
  hypo

SEQ ID NO: 179230 - DNA, 30 bp, Homo sapiens; identical to SEQ ID NO: 89658
  chr16:2635847-2635877
  hypo

SEQ ID NO: 179231 - DNA, 391 bp, Homo sapiens
  chr16:2642767-2643158
  hypo
ctgtgctctagatgccgccagtggagctttgcccgcagtctctgtccatgcaccctgggccaccggggagtggaattgtccatttcattgtctctctcaggggatgctggcgcgggggtgggtggcgcctgtccgtggggcccttgcctgcctccccgtggtgctggcgtgttctgtcactgagccactctggggcttcagtgtccctggcatgggtgacactgctgggagtgcctctgggctccttgcctgtggcctttttttttctcaggatggatttctggaagcgaggctacttctcagtactatttccgaatcgcttcctcagtgagtcctccccaggctgcaggtgccgagcgggagcaccactcctgcacgcccgtgcctgtgg

SEQ ID NO: 179232 - DNA, 466 bp, Homo sapiens
  chr16:2645426-2645892
  hypo
cgggaggcagttctgcgcctcaccacagctttgttaaggcagcaatgacctgtgtcacctgcccgtttctacagcacggtcctcccccaccttttccccgctgtgtggatgtcactggcagtgagggggcaacaggcactgtgtctggtatctgcaggctccgttgcaaatacggattaaggctctctgcgtggcagtgctgtatgtgctgggttacatgtggcgaacgttctctgctcatcccaaagtgaggctggctctgtgaggggcaggccgaggctatggggagttcgtgtggcaggaggagcgtggagaatttctgtttgtgattgtcatgggagcatctctttcttgtttctttccacaggcaccagtttgtagaaaataatttaatactaaagatgggcccagtggataagcggaaggtgagtggtcagtggtcccgctgctccgcacggacacctgc

SEQ ID NO: 179233 - DNA, 123 bp, Homo sapiens
  chr16:2647310-2647433
  hypo
taatgggagggctttgcaccacgtgggaagcagccacaggccttggccagagggagcagcggggatcggggcagctgcctcgccctttccgacatcccagacgcccacactagtggctcagtc

SEQ ID NO: 179234 - DNA, 250 bp, Homo sapiens; identical to SEQ ID NO: 28837
  chr16:2648041-2648291
  hypo

SEQ ID NO: 179235 - DNA, 30 bp, Homo sapiens; identical to SEQ ID NO: 28838
  chr16:2661607-2661637
  hypo

SEQ ID NO: 179236 - DNA, 30 bp, Homo sapiens; identical to SEQ ID NO: 89663
  chr16:2715058-2715088
  hypo

SEQ ID NO: 179237 - DNA, 30 bp, Homo sapiens
  chr16:2716233-2716263
  hypo
gccatcgatgtaaagcgataatggacacac

SEQ ID NO: 179238 - DNA, 67 bp, Homo sapiens
  chr16:2716588-2716655
  hypo
cccgacactgccagtcggcaagggaccaaaaacacctgtaggaacagcaatacgtggctctccaggc

SEQ ID NO: 179239 - DNA, 210 bp, Homo sapiens
  chr16:2716877-2717087
  hypo
agagggggctggggccggcccctcatcccgtttccctgatttttaaaaggccgtacaggattgccatcaatatcaaatctggaatggcattgagatgcccagtgaagacccttttggcttcgtgggcatacagcagaaggtggggtgtcttgttgctgaaaagtttctttttgttgttggtggtgatgtaaaggacggccacctgcacgc

SEQ ID NO: 179240 - DNA, 102 bp, Homo sapiens; identical to SEQ ID NO: 89666
  chr16:2725741-2725843
  hypo

SEQ ID NO: 179241 - DNA, 37 bp, Homo sapiens
  chr16:2731314-2731351
  hypo
aattctttttttttcttgagacggagtctcactctgt

SEQ ID NO: 179242 - DNA, 30 bp, Homo sapiens; identical to SEQ ID NO: 89667
  chr16:2741055-2741085
  hypo

SEQ ID NO: 179243 - DNA, 30 bp, Homo sapiens
  chr16:2752350-2752380
  hypo
cagttggtcagcatcggctcctcttacaac

SEQ ID NO: 179244 - DNA, 31 bp, Homo sapiens; identical to SEQ ID NO: 28839
  chr16:2760239-2760270
  hypo

SEQ ID NO: 179245 - DNA, 518 bp, Homo sapiens
  chr16:2764191-2764709
  hypo
ccagggccacgtcagcgctggaggccgtgccctggtacagggggttgctctccacctgcctcacccgggcatacatagcgtgtggtcccggctgcactagctgccttgcccccagcaggacctggtacagggacgtctcagaggtgctggcgggagaaacagagaggcggcgtgaggcggcccctcgtgtggggacaggcccgggaggggctggggctcctctggccaccaccgtgccccacacctctctctgcacaatgtcttcgagagtcatctctaggacagccaggtgcagcggtgatgcgtgttgacattgaagccagaccgcccgactcagatttccacctccacccctggccgctgtgtggccttgggcaagtcacttaacaagttctctgtgatgcagctttctcacctgtgctgtggggacagtcacagtgcctacctgaaaggctggctcggagagaaccaccctccaggtgcagcagggccagccccacctgcgggcctctggcagg

SEQ ID NO: 179246 - DNA, 498 bp, Homo sapiens; identical to SEQ ID NO: 89669
  chr16:2770027-2770525
  hypo

SEQ ID NO: 179247 - DNA, 44 bp, Homo sapiens
  chr16:2782314-2782358
  hypo
gcagtaaagtcctggcgcggtggctcacgtctgtaatcccagca

SEQ ID NO: 179248 - DNA, 344 bp, Homo sapiens; identical to SEQ ID NO: 89670
  chr16:2806255-2806599
  hypo

SEQ ID NO: 179249 - DNA, 30 bp, Homo sapiens; identical to SEQ ID NO: 28841
  chr16:2807461-2807491
  hypo

SEQ ID NO: 179250 - DNA, 30 bp, Homo sapiens; identical to SEQ ID NO: 89672
  chr16:2810160-2810190
  hypo

SEQ ID NO: 179251 - DNA, 30 bp, Homo sapiens
  chr16:2812477-2812507
  hypo
gaaccccagctagacgtggccgctcacgct

SEQ ID NO: 179252 - DNA, 225 bp, Homo sapiens
  chr16:2819592-2819817
  hypo
ctggccaccatcatcttctcccgactctgtccacagcctcctccctgtctccccgtctccacgccattctcttccacatgtagccagagggacctttctaaaacgcacatctggctacttccctccactccacaaatccttcgggacgccctgtggcctgcaggacaaagccccacctctgcgggagtggcgtgtgaggctcttcaccaacgggccttgcccgcc

SEQ ID NO: 179253 - DNA, 26 bp, Homo sapiens
  chr16:2828851-2828877
  hypo
acatcgcctggcgacagagtgagact

SEQ ID NO: 179254 - DNA, 30 bp, Homo sapiens; identical to SEQ ID NO: 28842
  chr16:2849075-2849105
  hypo

SEQ ID NO: 179255 - DNA, 348 bp, Homo sapiens
  chr16:2849307-2849655
  hypo
gacggtccagctgggcgagctgacttccaggccaactccttggaacctgcgggcctacagcagtcgttacaaagtgcaggacatcattgtgaaccctgacgcacttggggttttacgcaatgacattgccctgctgagactggcctcttctgtcacctacaatgcgtacatccagcccatttgcatcgagtcttccaccttcaacttcgtgcaccggccggactgctgggtgaccggctgggggttaatcagccccagtggcagtgaggctggggatagaccgggtggggtgatgggggtgcggggtgagcattaccctctacccctgttcccgctacacaagcacag

SEQ ID NO: 179256 - DNA, 31 bp, Homo sapiens; identical to SEQ ID NO: 89677
  chr16:2861515-2861546
  hypo

SEQ ID NO: 179257 - DNA, 30 bp, Homo sapiens
  chr16:2906055-2906085
  hypo
caagtgccccaggccggctgtacatactcc

SEQ ID NO: 179258 - DNA, 30 bp, Homo sapiens; identical to SEQ ID NO: 89678
  chr16:2944428-2944458
  hypo

SEQ ID NO: 179259 - DNA, 31 bp, Homo sapiens; identical to SEQ ID NO: 89679
  chr16:2946522-2946553
  hypo

SEQ ID NO: 179260 - DNA, 36 bp, Homo sapiens
  chr16:2959165-2959201
  hypo
gcactttgggaggctgcggcgggtgaataacttgag

SEQ ID NO: 179261 - DNA, 31 bp, Homo sapiens; identical to SEQ ID NO: 10486
  chr16:2969679-2969710
  hypo

SEQ ID NO: 179262 - DNA, 224 bp, Homo sapiens
  chr16:2974620-2974844
  hypo
ggaatgtgtaccctacgctcctgccacgctgtgggtcacgcaacccccccaggctagtcaaggttcaggcaggtggagacaaagcccggttgctgaggggcctgtggactttaacgggcggagtggcggtgggtcagcatctaccatccaagagcctgaacgggcaagagtgggaacgggtcctcagccttccacaagccggcggtcagggccttttcttgtat

SEQ ID NO: 179263 - DNA, 233 bp, Homo sapiens
  chr16:2975079-2975312
  hypo
tgcaggaccagctggcggggtgaacagtgtgcgagtcactgtgccagcctgcatagtctgggaggcctctgtcaggagcaacctggcgtccccatgcctcgccctggctgggagggaggccgggaatcacggcagttctcagggaggtgcctccccaggaacaaaggggactttctccagagggcgggggcctcgcgggacctgggctggggggaccccgggagggtgcaggg

SEQ ID NO: 179264 - DNA, 31 bp, Homo sapiens; identical to SEQ ID NO: 89683
  chr16:2979897-2979928
  hypo

SEQ ID NO: 179265 - DNA, 30 bp, Homo sapiens; identical to SEQ ID NO: 28846
  chr16:2983528-2983558
  hypo

SEQ ID NO: 179266 - DNA, 30 bp, Homo sapiens; identical to SEQ ID NO: 89685
  chr16:2984392-2984422
  hypo

SEQ ID NO: 179267 - DNA, 30 bp, Homo sapiens; identical to SEQ ID NO: 89686
  chr16:2986752-2986782
  hypo

SEQ ID NO: 179268 - DNA, 380 bp, Homo sapiens; identical to SEQ ID NO: 28847
  chr16:3021541-3021921
  hypo

SEQ ID NO: 179269 - DNA, 30 bp, Homo sapiens; identical to SEQ ID NO: 89688
  chr16:3025740-3025770
  hypo

SEQ ID NO: 179270 - DNA, 66 bp, Homo sapiens; identical to SEQ ID NO: 89689
  chr16:3051090-3051156
  hypo

SEQ ID NO: 179271 - DNA, 137 bp, Homo sapiens
  chr16:3052304-3052441
  hypo
ttccctaaatattttgcgtgccttaaatgcctgattaacgaaatagccttagacatctcaaacaacaattagaaacataatcgacttgactctcttgattctctctctcttttttttttttttgagacggagtctcg

SEQ ID NO: 179272 - DNA, 36 bp, Homo sapiens
  chr16:3053164-3053200
  hypo
actccacatcggtggcgtcggggggcgggcgcggtg

SEQ ID NO: 179273 - DNA, 30 bp, Homo sapiens
  chr16:3055033-3055063
  hypo
acttgtctaaagattcgggtcttccatttt

SEQ ID NO: 179274 - DNA, 30 bp, Homo sapiens; identical to SEQ ID NO: 89690
  chr16:3060956-3060986
  hypo

SEQ ID NO: 179275 - DNA, 49 bp, Homo sapiens; identical to SEQ ID NO: 28848
  chr16:3062886-3062935
  hypo

SEQ ID NO: 179276 - DNA, 31 bp, Homo sapiens; identical to SEQ ID NO: 10490
  chr16:3071261-3071292
  hypo

SEQ ID NO: 179277 - DNA, 69 bp, Homo sapiens; identical to SEQ ID NO: 126700
  chr16:3096719-3096788
  hypo

SEQ ID NO: 179278 - DNA, 225 bp, Homo sapiens; identical to SEQ ID NO: 126701
  chr16:3096821-3097046
  hypo

SEQ ID NO: 179279 - DNA, 1432 bp, Homo sapiens; identical to SEQ ID NO: 28850
  chr16:3139012-3140444
  hypo

SEQ ID NO: 179280 - DNA, 31 bp, Homo sapiens; identical to SEQ ID NO: 10494
  chr16:3156726-3156757
  hypo

SEQ ID NO: 179281 - DNA, 23 bp, Homo sapiens
  chr16:3158300-3158323
  hypo
accgcgcccggcctatagtcagt

SEQ ID NO: 179282 - DNA, 62 bp, Homo sapiens; identical to SEQ ID NO: 89696
  chr16:3165155-3165217
  hypo

SEQ ID NO: 179283 - DNA, 134 bp, Homo sapiens; identical to SEQ ID NO: 89697
  chr16:3167168-3167302
  hypo

SEQ ID NO: 179284 - DNA, 68 bp, Homo sapiens; identical to SEQ ID NO: 89698
  chr16:3169008-3169076
  hypo

SEQ ID NO: 179285 - DNA, 440 bp, Homo sapiens
  chr16:3169369-3169809
  hypo
caggaagcagcctgcggccggagctcagggccggccaaagactccgggcagccggctgagccagatcgcaccccggatgcagctccgccagaccccagtcccacggagccccaggagtaccgcgtcccggagaagcccaacgaggaggagaagggcgccccggagagtggcgaggagggcctggcccctgacagtgaggtgggcaggaagagctaccggtgcgagcagtgcggcaagggcttcagctggcactcgcacctggtgacgcaccggcgcacgcacacgggcgagaagccctacgcctgcactgactgcgggaagcgcttcggccgcagctcgcacctcatccagcaccagatcatccacacgggcgagaagccctacacctgccccgcctgccggaagagcttcagccaccactccacgctgattcagcacca

SEQ ID NO: 179286 - DNA, 30 bp, Homo sapiens; identical to SEQ ID NO: 89700
  chr16:3170089-3170119
  hypo

SEQ ID NO: 179287 - DNA, 129 bp, Homo sapiens; identical to SEQ ID NO: 89701
  chr16:3170503-3170632
  hypo

SEQ ID NO: 179288 - DNA, 31 bp, Homo sapiens; identical to SEQ ID NO: 28853
  chr16:3170903-3170934
  hypo

SEQ ID NO: 179289 - DNA, 22 bp, Homo sapiens
  chr16:3171178-3171200
  hypo
cagagtcttgctctgtcgccca

SEQ ID NO: 179290 - DNA, 30 bp, Homo sapiens; identical to SEQ ID NO: 89704
  chr16:3177219-3177249
  hypo

SEQ ID NO: 179291 - DNA, 30 bp, Homo sapiens; identical to SEQ ID NO: 89705
  chr16:3183110-3183140
  hypo

SEQ ID NO: 179292 - DNA, 188 bp, Homo sapiens
  chr16:3189116-3189304
  hypo
ttgggtccaggctggccgcccccgattctgctggaacttcagtcttgtttcccaccccatccttagctggttccaaagcaggctctccctaggtcttgccaggagcctgagtaactcctttcttggctgatgatcagtttttgtgcgtttccacatgcagcatgggacggcgccggcgctgcccagcc

SEQ ID NO: 179293 - DNA, 45 bp, Homo sapiens
  chr16:3189703-3189748
  hypo
tggctcctcagtttccgactgtgacggttgggaaaaattttcttt

SEQ ID NO: 179294 - DNA, 328 bp, Homo sapiens
  chr16:3193318-3193646
  hypo
gtgatcatccaggcacgacccctccttccacccatgctggttccttctctttcacctgctagtggcctcagggcccctggctgaggggaggcgggggccggtggacaagacgctctggtcccttggtaacaggtgtgcatgtgccagccctctctgcccctaggcctttcttagccaaccttccatgcacacatcatcctgcggtcactgtcatggtctccgtttcccgtaagaagcaagcaaggtctcgctgtggacaaggctgattccagttggtgatttttacctctgggggcctggtgctgtgtgcatgcgtgtggcgggtggc

SEQ ID NO: 179295 - DNA, 30 bp, Homo sapiens; identical to SEQ ID NO: 89708
  chr16:3196500-3196530
  hypo

SEQ ID NO: 179296 - DNA, 323 bp, Homo sapiens; identical to SEQ ID NO: 52736
  chr16:3200662-3200985
  hypo

SEQ ID NO: 179297 - DNA, 592 bp, Homo sapiens; identical to SEQ ID NO: 126712
  chr16:3208781-3209373
  hypo

SEQ ID NO: 179298 - DNA, 214 bp, Homo sapiens
  chr16:3211535-3211749
  hypo
cacaggtggcaggggcgtggttgtcaaataatcaaaatgatcaggcacttcaggtccccgggaaagcgggcacagaggtggccacccctgttcccctcctggcaccatgatggtcaggaccgccgggagcccatgcccacctccctcagctcccgtggtgcgcccgggggaaatgtggttggaaatcgcggcggccgggcatggtggctcacgc

SEQ ID NO: 179299 - DNA, 121 bp, Homo sapiens; identical to SEQ ID NO: 89712
  chr16:3211808-3211929
  hypo

SEQ ID NO: 179300 - DNA, 418 bp, Homo sapiens; identical to SEQ ID NO: 126719
  chr16:3232598-3233016
  hypo

SEQ ID NO: 179301 - DNA, 132 bp, Homo sapiens; identical to SEQ ID NO: 10504
  chr16:3233198-3233330
  hypo

SEQ ID NO: 179302 - DNA, 669 bp, Homo sapiens; identical to SEQ ID NO: 10505
  chr16:3233434-3234103
  hypo

SEQ ID NO: 179303 - DNA, 184 bp, Homo sapiens; identical to SEQ ID NO: 89716
  chr16:3286264-3286448
  hypo

SEQ ID NO: 179304 - DNA, 29 bp, Homo sapiens
  chr16:3315201-3315230
  hypo
tttctttcttcttttttgagacggagtct

SEQ ID NO: 179305 - DNA, 88 bp, Homo sapiens; identical to SEQ ID NO: 28864
  chr16:3315529-3315617
  hypo

SEQ ID NO: 179306 - DNA, 29 bp, Homo sapiens
  chr16:3330944-3330973
  hypo
tttgagatgcagtcttgctgtcgcccagg

SEQ ID NO: 179307 - DNA, 28 bp, Homo sapiens
  chr16:3331212-3331240
  hypo
agccagcgcacctagcctaaattcatct

SEQ ID NO: 179308 - DNA, 30 bp, Homo sapiens; identical to SEQ ID NO: 89720
  chr16:3439765-3439795
  hypo

SEQ ID NO: 179309 - DNA, 43 bp, Homo sapiens; identical to SEQ ID NO: 89721
  chr16:3492712-3492755
  hypo

SEQ ID NO: 179310 - DNA, 138 bp, Homo sapiens
  chr16:3515976-3516114
  hypo
acccgggaccttgccggaacacctgtggccgttgctgctgttaactgaggtgtaattaacatgcagccaagtgcacagcttcacccagcagatccgtacgttttgacaactgtgaaacaagacgtagcacatcgccat

SEQ ID NO: 179311 - DNA, 30 bp, Homo sapiens
  chr16:3532401-3532431
  hypo
ctgtcgtgggaagtcggtgcggagcccgcc

SEQ ID NO: 179312 - DNA, 30 bp, Homo sapiens
  chr16:3532914-3532944
  hypo
gtattcactgctcacgattcagagtagaaa

SEQ ID NO: 179313 - DNA, 111 bp, Homo sapiens
  chr16:3537862-3537973
  hypo
tggagtaggggtggacgctggtgccctgggaggccaggcagctgggcgcgctggacccatgtccaaagccatggggtgagtgaaaccagattaacccgctgagcttgccca

SEQ ID NO: 179314 - DNA, 30 bp, Homo sapiens
  chr16:3538468-3538498
  hypo
ttcctagcccaccggcgttcagggactcac

SEQ ID NO: 179315 - DNA, 146 bp, Homo sapiens
  chr16:3542402-3542548
  hypo
aaacatcaacagagtcgagtggagacaccccggcacagaggaagcccacacctgggtgcgcagagtctggtccggctgggaggagaagggctgtgctcatcctgcccagagggacctgggagctggggtcccgcggagcagtgacc

SEQ ID NO: 179316 - DNA, 89 bp, Homo sapiens; identical to SEQ ID NO: 89723
  chr16:3552080-3552169
  hypo

SEQ ID NO: 179317 - DNA, 38 bp, Homo sapiens; identical to SEQ ID NO: 28869
  chr16:3552774-3552812
  hypo

SEQ ID NO: 179318 - DNA, 30 bp, Homo sapiens; identical to SEQ ID NO: 89725
  chr16:3591713-3591743
  hypo

SEQ ID NO: 179319 - DNA, 30 bp, Homo sapiens
  chr16:3596843-3596873
  hypo
agacgccaggcaagcgaagatgacatagga

SEQ ID NO: 179320 - DNA, 182 bp, Homo sapiens
  chr16:3599032-3599214
  hypo
gctccttctccaaccctgtgacgtggcgagggtgcccgtcagcccaggctcggtgtgggtgtggtcatggcatgaacagcctgtggagtcacaggcccccaccacgtactccaggttcttcagggtgctgttggcgcagagggcatgagcgatggcctgggctccctcgggactgatggagt

SEQ ID NO: 179321 - DNA, 30 bp, Homo sapiens; identical to SEQ ID NO: 28870
  chr16:3610567-3610597
  hypo

SEQ ID NO: 179322 - DNA, 31 bp, Homo sapiens; identical to SEQ ID NO: 89728
  chr16:3613740-3613771
  hypo

SEQ ID NO: 179323 - DNA, 30 bp, Homo sapiens; identical to SEQ ID NO: 89729
  chr16:3614585-3614615
  hypo

SEQ ID NO: 179324 - DNA, 119 bp, Homo sapiens; identical to SEQ ID NO: 89730
  chr16:3635038-3635157
  hypo

SEQ ID NO: 179325 - DNA, 409 bp, Homo sapiens
  chr16:3696476-3696885
  hypo
aacctggggccatggcgggtgtaggggttgggtggggagaggatgtcctctgaaaaggtgacatttaagctgaaactggaatgacaagaaggccccagctctgcaggcagagcggaaggctcagagcttagaatcacgtaggtcatggaaagcattggatttcgtgttagggacaatgagaaactggtgacagattttaagtaggggaataaagagatctaattacacatttgcgagatgttctgagagctgtggggacggctgggacatgtacctggaagcagggcagccaaagggagaggcagtgatgacgggtggtatggaggctgcagaatctggaggacgtgcaggctcagggtgcatggtgcgggcggggctgagggggagcggggcctaggatgatctcagg

SEQ ID NO: 179326 - DNA, 30 bp, Homo sapiens
  chr16:3700829-3700859
  hypo
ctcatttttccacgtcgaccttcacagtaa

SEQ ID NO: 179327 - DNA, 30 bp, Homo sapiens; identical to SEQ ID NO: 89732
  chr16:3701712-3701742
  hypo

SEQ ID NO: 179328 - DNA, 122 bp, Homo sapiens; identical to SEQ ID NO: 89733
  chr16:3704779-3704901
  hypo

SEQ ID NO: 179329 - DNA, 30 bp, Homo sapiens
  chr16:3706111-3706141
  hypo
agacacctatcactacgtggtcagtgagcc

SEQ ID NO: 179330 - DNA, 30 bp, Homo sapiens
  chr16:3706377-3706407
  hypo
ctgtcgcctgggtcccggaccaatgggttg

SEQ ID NO: 179331 - DNA, 78 bp, Homo sapiens
  chr16:3706728-3706806
  hypo
tgtcaggttcttctcccggttcacaggtgggtgctgcctgggccagggtggggctcggcttggcgcttatggcctcca

SEQ ID NO: 179332 - DNA, 166 bp, Homo sapiens; identical to SEQ ID NO: 89735
  chr16:3707024-3707190
  hypo

SEQ ID NO: 179333 - DNA, 30 bp, Homo sapiens
  chr16:3714397-3714427
  hypo
gctggttagctgcccggagggcagcgccga

SEQ ID NO: 179334 - DNA, 31 bp, Homo sapiens; identical to SEQ ID NO: 89736
  chr16:3721594-3721625
  hypo

SEQ ID NO: 179335 - DNA, 30 bp, Homo sapiens; identical to SEQ ID NO: 89737
  chr16:3722616-3722646
  hypo

SEQ ID NO: 179336 - DNA, 30 bp, Homo sapiens; identical to SEQ ID NO: 89738
  chr16:3724611-3724641
  hypo

SEQ ID NO: 179337 - DNA, 30 bp, Homo sapiens
  chr16:3726350-3726380
  hypo
tctcctggttccctcgggcggggggcgggg

SEQ ID NO: 179338 - DNA, 384 bp, Homo sapiens; identical to SEQ ID NO: 89739
  chr16:3741881-3742265
  hypo

SEQ ID NO: 179339 - DNA, 283 bp, Homo sapiens
  chr16:3772841-3773124
  hypo
acaatttagatcaacggcaaagcactgtcatctactcatcaaagctcctcagaatctactttgctagtctgggcattacactcacttaaatttcttcagtatcttataagggacctatgttttcccacctctgcctatttattatgaagtgtatacaagtaattcatgtggaattaacacataaaatccatacgtccatgaggctgcgatgtcttcatggtctgagatgaagttattctcctgcctacatgcccctgcccgtctgttacggcgctgtgggcgc

SEQ ID NO: 179340 - DNA, 355 bp, Homo sapiens; identical to SEQ ID NO: 28873
  chr16:3776073-3776428
  hypo

SEQ ID NO: 179341 - DNA, 147 bp, Homo sapiens; identical to SEQ ID NO: 89742
  chr16:3777134-3777281
  hypo

SEQ ID NO: 179342 - DNA, 30 bp, Homo sapiens; identical to SEQ ID NO: 28874
  chr16:3777731-3777761
  hypo

SEQ ID NO: 179343 - DNA, 30 bp, Homo sapiens
  chr16:3777975-3778005
  hypo
gctgggactggggccgtggagactggacag

SEQ ID NO: 179344 - DNA, 132 bp, Homo sapiens; identical to SEQ ID NO: 89744
  chr16:3781041-3781173
  hypo

SEQ ID NO: 179345 - DNA, 1165 bp, Homo sapiens; identical to SEQ ID NO: 52760
  chr16:3781397-3782562
  hypo

SEQ ID NO: 179346 - DNA, 28 bp, Homo sapiens
  chr16:3783073-3783101
  hypo
aacaatccagccgggcggggtggctcac

SEQ ID NO: 179347 - DNA, 925 bp, Homo sapiens; identical to SEQ ID NO: 28876
  chr16:3784365-3785290
  hypo

SEQ ID NO: 179348 - DNA, 183 bp, Homo sapiens; identical to SEQ ID NO: 89748
  chr16:3785795-3785978
  hypo

SEQ ID NO: 179349 - DNA, 30 bp, Homo sapiens
  chr16:3790353-3790383
  hypo
gcgtggggactgctcgcagagcactgtaga

SEQ ID NO: 179350 - DNA, 30 bp, Homo sapiens; identical to SEQ ID NO: 89749
  chr16:3790973-3791003
  hypo

SEQ ID NO: 179351 - DNA, 153 bp, Homo sapiens; identical to SEQ ID NO: 28878
  chr16:3802011-3802164
  hypo

SEQ ID NO: 179352 - DNA, 45 bp, Homo sapiens
  chr16:3803029-3803074
  hypo
gagtgtcaggtagcgacggcagcacgaatgcggtttagtgctcaa

SEQ ID NO: 179353 - DNA, 208 bp, Homo sapiens; identical to SEQ ID NO: 89751
  chr16:3811571-3811779
  hypo

SEQ ID NO: 179354 - DNA, 210 bp, Homo sapiens; identical to SEQ ID NO: 28880
  chr16:3812493-3812703
  hypo

SEQ ID NO: 179355 - DNA, 266 bp, Homo sapiens
  chr16:3821347-3821613
  hypo
gcgtgagccaccgcgcccagccaaatgtatgggaatttaatcacattttcttgggagtgttctgcttgtgaaaattcatcgagctatacacttgtaatgggcactcctcaataacggtaaaactacacacgtttcttatagtctgatttatataattaaaacaaccattgaaacttatggcttaaacacacacatctacagcagtcccctcatatccactcggatacattccaagacccccagtcttggaacgcctgaaactgcgg

SEQ ID NO: 179356 - DNA, 31 bp, Homo sapiens
  chr16:3837953-3837984
  hypo
cagacgttagccactgcgtccggccaaaagg

SEQ ID NO: 179357 - DNA, 30 bp, Homo sapiens; identical to SEQ ID NO: 28881
  chr16:3868173-3868203
  hypo

SEQ ID NO: 179358 - DNA, 43 bp, Homo sapiens
  chr16:3870816-3870859
  hypo
agccactgtgtacacacacacacagccacgaccagaatgtgac

SEQ ID NO: 179359 - DNA, 51 bp, Homo sapiens
  chr16:3873407-3873458
  hypo
gtcacaacgtggccgcgtaacctgtcaagctttgctcgaatgccttatacc

SEQ ID NO: 179360 - DNA, 31 bp, Homo sapiens; identical to SEQ ID NO: 28882
  chr16:3892676-3892707
  hypo

SEQ ID NO: 179361 - DNA, 149 bp, Homo sapiens; identical to SEQ ID NO: 89755
  chr16:3900217-3900366
  hypo

SEQ ID NO: 179362 - DNA, 79 bp, Homo sapiens
  chr16:3925258-3925337
  hypo
taccttcatccctgacgacctttgaatggggccaccgctctcacccctctcagttattcaaaaacgaagcacggtcatg

SEQ ID NO: 179363 - DNA, 310 bp, Homo sapiens; identical to SEQ ID NO: 126736
  chr16:3931081-3931391
  hypo

SEQ ID NO: 179364 - DNA, 78 bp, Homo sapiens
  chr16:3931902-3931980
  hypo
accagagttaacatcccgaaaagagagggagaaaatctgtttaaaacaactccctggccaggcgcggtggcagatcac

SEQ ID NO: 179365 - DNA, 29 bp, Homo sapiens
  chr16:3951109-3951138
  hypo
aaaaaagttaaaaaaatttaccggccggg

SEQ ID NO: 179366 - DNA, 20 bp, Homo sapiens
  chr16:3952781-3952801
  hypo
ccatccgcctcggcctccaa

SEQ ID NO: 179367 - DNA, 112 bp, Homo sapiens; identical to SEQ ID NO: 126737
  chr16:3989146-3989258
  hypo

SEQ ID NO: 179368 - DNA, 31 bp, Homo sapiens; identical to SEQ ID NO: 28885
  chr16:3997064-3997095
  hypo

SEQ ID NO: 179369 - DNA, 149 bp, Homo sapiens; identical to SEQ ID NO: 28886
  chr16:3998688-3998837
  hypo

SEQ ID NO: 179370 - DNA, 31 bp, Homo sapiens
  chr16:4007727-4007758
  hypo
gggggcggttcaggtgcgtcttggcacaagc

SEQ ID NO: 179371 - DNA, 76 bp, Homo sapiens; identical to SEQ ID NO: 89761
  chr16:4016325-4016401
  hypo

SEQ ID NO: 179372 - DNA, 30 bp, Homo sapiens; identical to SEQ ID NO: 89762
  chr16:4016705-4016735
  hypo

SEQ ID NO: 179373 - DNA, 238 bp, Homo sapiens
  chr16:4021224-4021462
  hypo
ctggaggaattaagcccatcccgtgtgactctaccgggagaggactcttggaagctggtgccggcttcctccaaacgtcaactcacacacccttccctttgctgattctgccttatgtcttttcgctgtaatcacagcggtgagagagcagattgcggagtcctgagtccacctggggctggtcttgggagccctgatacgggctttgtgactcaacgcctatgaccaggaaccaaga

SEQ ID NO: 179374 - DNA, 30 bp, Homo sapiens
  chr16:4027487-4027517
  hypo
tgggcacagggagacgtagagcaggagcag

SEQ ID NO: 179375 - DNA, 139 bp, Homo sapiens
  chr16:4029239-4029378
  hypo
ggtgcaggccatgacgtcctccaggaagaacaccatcctgcgagaggcatgggggttagcaggagcgacggggcccggggtgggtcatcggccaggagacaggtgcgaggccgcagccagcgccgccctctgctctctc

SEQ ID NO: 179376 - DNA, 30 bp, Homo sapiens
  chr16:4029599-4029629
  hypo
ccacgttgccgtcaccggctcccatcagct

SEQ ID NO: 179377 - DNA, 219 bp, Homo sapiens
  chr16:4030045-4030264
  hypo
ccaaacccgcacacgcgtgccgtctgcatctgggctgtcatgttcatcgtgcatgttcacctctagctggcggcttcaggactctccagacagcggggctctgttgtacgtgaggtccagcaccacgtatttcattttaaaagactttgtccttctaagcagagcgactgtattcactgactccttttgcaggcgtgtgtctagcgggcttcgtttcag

SEQ ID NO: 179378 - DNA, 30 bp, Homo sapiens; identical to SEQ ID NO: 89765
  chr16:4031216-4031246
  hypo

SEQ ID NO: 179379 - DNA, 31 bp, Homo sapiens; identical to SEQ ID NO: 89766
  chr16:4043268-4043299
  hypo

SEQ ID NO: 179380 - DNA, 31 bp, Homo sapiens; identical to SEQ ID NO: 89767
  chr16:4043834-4043865
  hypo

SEQ ID NO: 179381 - DNA, 31 bp, Homo sapiens; identical to SEQ ID NO: 89768
  chr16:4047660-4047691
  hypo

SEQ ID NO: 179382 - DNA, 7 bp, Homo sapiens
  chr16:4092822-4092829
  hypo
gccactc

SEQ ID NO: 179383 - DNA, 122 bp, Homo sapiens; identical to SEQ ID NO: 89770
  chr16:4092845-4092967
  hypo

SEQ ID NO: 179384 - DNA, 40 bp, Homo sapiens
  chr16:4097829-4097869
  hypo
gattacaggcgtgagccaccgcatccggccagagtgtgtt

SEQ ID NO: 179385 - DNA, 30 bp, Homo sapiens
  chr16:4098561-4098591
  hypo
acgggtgagatgaaacggacgtcagtaccc

SEQ ID NO: 179386 - DNA, 30 bp, Homo sapiens; identical to SEQ ID NO: 52763
  chr16:4106772-4106802
  hypo

SEQ ID NO: 179387 - DNA, 30 bp, Homo sapiens
  chr16:4135645-4135675
  hypo
agagggagaggtctgcgttgcctccaagca

SEQ ID NO: 179388 - DNA, 30 bp, Homo sapiens; identical to SEQ ID NO: 89772
  chr16:4136352-4136382
  hypo

SEQ ID NO: 179389 - DNA, 29 bp, Homo sapiens
  chr16:4143596-4143625
  hypo
aaaatacaaaaattagtcagtcgtgttgg

SEQ ID NO: 179390 - DNA, 28 bp, Homo sapiens
  chr16:4143744-4143772
  hypo
gccagacgctgtctcaaaataattaatt

SEQ ID NO: 179391 - DNA, 274 bp, Homo sapiens
  chr16:4160069-4160343
  hypo
cagcaggagccccctctaaagcgctccccactcccgaacatactccacaacatttttaactgtgagctcacggaggttgggaactattaacgcaggtcagacgcgccccaaagtggggccgagcccaagagggttcttggctttgcccaggaaataattcaagggtgagccggtggcaggaaagaaaacacctttattgaagaggcaggcagtgttatacggctccatgactgctcctgcagagctgggctttcccaaaggcggaaagtagcag

SEQ ID NO: 179392 - DNA, 106 bp, Homo sapiens
  chr16:4164069-4164175
  hypo
atggtcggcccggggctcgggacagcccgccacgcagtagtaacagtctcccagggtgctgattttctcacacttggtctcctcacacaggcggtcgaagcgaccg

SEQ ID NO: 179393 - DNA, 555 bp, Homo sapiens
  chr16:4164398-4164953
  hypo
gcttcattaagtcatcggctatgattcttggcatcacggaatgaatcatcctctctttgagggctttttccacttccaggtccttcccgtgcataatggattgccccaccttgaggaaggtgctcctggacctcacctgggacatgacgaacaggtggaccccgatggcgtggatgcagccgtggagcagccccctgctcagcagctcccagtgcagggccccggctccgggcgaggggaagcaggcttcatcccggaaatggtagccaaaggtctcgaaaaggacagagtaggccacccccagacacaaactcaggtacaaaggtaagtgcatgacggtatagagcaaaaagagcacttcgatgcacatggagaagctccccacttgagataagcaagtatctgtgggccgggctgtggccgtaaggttggagctgtcgccgcgtcctgagacaggcgtcaagacctggaactgcgcagccagggtcagggcgaacaccagcagggtgagagccagcgaggtccacgcgtaatgccgggcgtacagcttggtga

SEQ ID NO: 179394 - DNA, 1449 bp, Homo sapiens; identical to SEQ ID NO: 126739
  chr16:4165531-4166980
  hypo

SEQ ID NO: 179395 - DNA, 86 bp, Homo sapiens
  chr16:4174070-4174156
  hypo
tgcaggcttgttaggaagatgcgtgtttattttagccacggggtagtaccaaaataccattaacattactcaaaaataagtttgcc

SEQ ID NO: 179396 - DNA, 80 bp, Homo sapiens; identical to SEQ ID NO: 89778
  chr16:4183951-4184031
  hypo

SEQ ID NO: 179397 - DNA, 88 bp, Homo sapiens
  chr16:4203550-4203638
  hypo
agcgcctgtgtgcagcgctggagacctgagtcctgttgtgtgtgaaggtggggcagggcagcagggcaaatgccgaaaacaaaaactg

SEQ ID NO: 179398 - DNA, 259 bp, Homo sapiens
  chr16:4203943-4204202
  hypo
aactgatcaatgagccgccagatgccgagcaccacaccggcaagggctgcggatcgtgaacactggagattcaaacagcagagagaccacctcacaccattctgtcaacccgtgccaagtgcccaggcctgtgccaacgcttggcacacaatgattcaacagaggcagcctcatgcttcacggcccgatgctcgcttgttgtctatggccgtaggctaacctgcaaataaagaactggactgcacggaggtggtcattc

SEQ ID NO: 179399 - DNA, 31 bp, Homo sapiens; identical to SEQ ID NO: 89781
  chr16:4228477-4228508
  hypo

SEQ ID NO: 179400 - DNA, 554 bp, Homo sapiens; identical to SEQ ID NO: 126740
  chr16:4233231-4233785
  hypo

SEQ ID NO: 179401 - DNA, 205 bp, Homo sapiens; identical to SEQ ID NO: 126741
  chr16:4234086-4234291
  hypo

SEQ ID NO: 179402 - DNA, 31 bp, Homo sapiens
  chr16:4241282-4241313
  hypo
tgaggaaaccaggagcaagtccgggggattg

SEQ ID NO: 179403 - DNA, 30 bp, Homo sapiens; identical to SEQ ID NO: 89785
  chr16:4242891-4242921
  hypo

SEQ ID NO: 179404 - DNA, 550 bp, Homo sapiens
  chr16:4257892-4258442
  hypo
cggggcccgcgctggcggcagacgcgggggtcttcttggggctctcggcctccctgccatctgggtagtgaaggagcagtttcttgtcttgaggggctgtgtctgcataaagcgccctttctttctcctctagacttgcgtctccagcagagaaatgattctccaacaaattgccaacatcttctgtgccacccgacgcggagacttgcagttctaaatgattagaacatgattggtcagtttcacagggttggcaccggctctgtttctcaagagtctataataacctagctcccgtcttctgggatgtggtgttggcctggtgtgcagtgttacgcccaccaacctgggtcttcaggactacctcgtgcgtagcgagcagaataggtgttattctgcctccctcccaagatgtagaagctgtggatcagggagttaaaggactgacccgttgtccatcactaacgaagtgagcagctgtgctaacccgagaaccgcccccgcaccgcgaccctggccctgaccttcaagcttccgggcttggtcctga

SEQ ID NO: 179405 - DNA, 483 bp, Homo sapiens; identical to SEQ ID NO: 89786
  chr16:4268165-4268648
  hypo

SEQ ID NO: 179406 - DNA, 30 bp, Homo sapiens
  chr16:4292101-4292131
  hypo
ctctatttatacggccggccgtggcagcag

SEQ ID NO: 179407 - DNA, 30 bp, Homo sapiens; identical to SEQ ID NO: 28893
  chr16:4308055-4308085
  hypo

SEQ ID NO: 179408 - DNA, 494 bp, Homo sapiens
  chr16:4310353-4310847
  hypo
aagaagcagagaggacgtggcctagggagaggcttccgccattcaagatcacctgtccccttcccggtccccagagcccactcccgggcgcctcctgctcacctgggtccgcagctgctgctgttcccgctccagcttctcctggtgcagcagcctcacctgttcctgctgctgctgcagctgcacctgctgcgcaatcaccttgagcttttccgggtacatgtgggcctccagcgagcgcacctggaggcaggacaacctgggctcagggccaaggccgggagcacaccctgccctgtcagtctcacagcagctcattcactcctgctgaaaaccctagcacagggcgggcccctctcaacagaggccagaagcctttccagagcccttcagcccccggctcctctcgcctcccacctcggcctccactggaccatgctccctcctgcccgagtctttgcctatgctattccctctgccgggaacacctttct

SEQ ID NO: 179409 - DNA, 53 bp, Homo sapiens; identical to SEQ ID NO: 89788
  chr16:4312581-4312634
  hypo

SEQ ID NO: 179410 - DNA, 154 bp, Homo sapiens; identical to SEQ ID NO: 89789
  chr16:4313274-4313428
  hypo

SEQ ID NO: 179411 - DNA, 30 bp, Homo sapiens; identical to SEQ ID NO: 28895
  chr16:4355449-4355479
  hypo

SEQ ID NO: 179412 - DNA, 378 bp, Homo sapiens; identical to SEQ ID NO: 126747
  chr16:4357422-4357800
  hypo

SEQ ID NO: 179413 - DNA, 31 bp, Homo sapiens; identical to SEQ ID NO: 10521
  chr16:4366576-4366607
  hypo

SEQ ID NO: 179414 - DNA, 463 bp, Homo sapiens; identical to SEQ ID NO: 89792
  chr16:4372511-4372974
  hypo

SEQ ID NO: 179415 - DNA, 30 bp, Homo sapiens; identical to SEQ ID NO: 89793
  chr16:4382012-4382042
  hypo

SEQ ID NO: 179416 - DNA, 307 bp, Homo sapiens
  chr16:4382285-4382592
  hypo
actccctggacgagccgctcgacctgaagctgagtatcaccaagctccgggcggcaagagagaagcgggagaggacgctgggtgtggtccggccccgtgctctgcacagggagctgggcctggtggatgacagccccacacctggctctccaggctccccgccctcaggtactggccctgggcagggcagggggacttagccctgatccagtcatggtgacagggagaatggccaagtgtgtccaccagcatgtagctgcagcccctctcggcttccggttcatgggaagcccgcacgcttgtcctt

SEQ ID NO: 179417 - DNA, 286 bp, Homo sapiens
  chr16:4385111-4385397
  hypo
taccatgtcaagcccgagaaggatgcggggtactgctgccactgggagggctgcgcccgccatggccgaggtttcaacgccaggtgaggtgggggagagaggggtagagggaggactggggtctccagtgagctgagccgtgccccccgccctccctggagcaggtacaagatgctcatccacatccgcacacacaccaacgagaagccacaccgctgtccgacctgcagcaagagcttctcccgcctggagaacctgaagatccacaaccggtcgcacacaggta

SEQ ID NO: 179418 - DNA, 30 bp, Homo sapiens
  chr16:4395128-4395158
  hypo
gacgcaggggggtggcgcgggctggaggca

SEQ ID NO: 179419 - DNA, 71 bp, Homo sapiens
  chr16:4395409-4395480
  hypo
tcacagcagtcactacgcagggtcccggggtctgaaggtagggcacctgggcaagccgacaagtatcaaga

SEQ ID NO: 179420 - DNA, 30 bp, Homo sapiens
  chr16:4401519-4401549
  hypo
gtgcttaccccagtgcgctggagcagctaa

SEQ ID NO: 179421 - DNA, 31 bp, Homo sapiens; identical to SEQ ID NO: 28898
  chr16:4411851-4411882
  hypo

SEQ ID NO: 179422 - DNA, 45 bp, Homo sapiens; identical to SEQ ID NO: 89797
  chr16:4414172-4414217
  hypo

SEQ ID NO: 179423 - DNA, 31 bp, Homo sapiens; identical to SEQ ID NO: 28899
  chr16:4414526-4414557
  hypo

SEQ ID NO: 179424 - DNA, 117 bp, Homo sapiens
  chr16:4428514-4428631
  hypo
ccaggccgcacccgccgtcctctgagtcagtgagggtggagcgggtcccatgggggaagagaaggctaggggtgtggccccagggccttaggtcatcagacacgagcccccctgggg

SEQ ID NO: 179425 - DNA, 43 bp, Homo sapiens; identical to SEQ ID NO: 89799
  chr16:4429223-4429266
  hypo

SEQ ID NO: 179426 - DNA, 1720 bp, Homo sapiens
  chr16:4430995-4432715
  hypo
gcccgccaggggaccacggtgccccgagacgtgccacccgacacggtggggctgtacgtctttgagaacggcatcaccatgctcgacgcaggcagctttgccggcctgccgggcctgcagctcctggacctgtcacagaaccagatcgccagcctgcccagcggggtcttccagccactcgccaacctcagcaacctggacctgacagccaacaggctgcatgaaatcaccaatgagaccttccgtggcctgcggcgcctcgagcgcctctacctgggcaagaaccgcatccgccacatccagcctggtgccttcgacacgctcgaccgcctcctggagctcaagctgcaggacaacgagctgcgggcactgcccccgctgcgcctgccccgcctgctgctgctggacctcagccacaacagcctcctggccctggagcccggcatcctggacactgccaacgtggaggcgctgcggctggctggtctggggctgcagcagctggacgaggggctcttcagccgcttgcgcaacctccacgacctggatgtgtccgacaaccagctggagcgagtgccacctgtgatccgaggcctccggggcctgacgcgcctgcggctggccggcaacacccgcattgcccagctgcggcccgaggacctggccggcctggctgccctgcaggagctggatgtgagcaacctaagcctgcaggccctgcctggcgacctctcgggcctcttcccccgcctgcggctgctggcagctgcccgcaaccccttcaactgcgtgtgccccctgagctggtttggcccctgggtgcgcgagagccacgtcacactggccagccctgaggagacgcgctgccacttcccgcccaagaacgctggccggctgctcctggagcttgactacgccgactttggctgcccagccaccaccaccacagccacagtgcccaccacgaggcccgtggtgcgggagcccacagccttgtcttctagcttggctcctacctggcttagccccacagagccggccactgaggcccccagcccgccctccactgccccaccgactgtagggcctgtcccccagccccaggactgcccaccgtccacctgcctcaatgggggcacatgccacctggggacacggcaccacctggcgtgcttgtgccccgaaggcttcacgggcctgtactgtgagagccagatggggcaggggacacggcccagccctacaccagtcacgccgaggccaccacggtccctgaccctgggcatcgagccggtgagccccacctccctgcgcgtggggctgcagcgctacctccaggggagctccgtgcagctcaggagcctccgtctcacctatcgcaacctatcgggccctgataagcggctggtgacgctgcgactgcctgcctcgctcgctgagtacacggtcacccagctgcggcccaacgccacttactccgtctgtgtcatgcctttggggcccgggcgggtgccggagggcgaggaggcctgcggggaggcccatacacccccagccgtccactccaaccacgccccagtcacccaggcccgcgagggcaacctgccgctcctcattgcgcccgccctggccgcggtgctcctggccgcgctggctgcggtgggggcagcctactgtgtgcggcgggggcgggccatggcagcagcggctcaggacaaag

SEQ ID NO: 179427 - DNA, 30 bp, Homo sapiens
  chr16:4433157-4433187
  hypo
tgcagtccctgggcacggcgggccctgcca

SEQ ID NO: 179428 - DNA, 177 bp, Homo sapiens
  chr16:4437959-4438136
  hypo
agcccacctgcgtgccgcagctcctacccaagcgaggtgtccaaggtgagggaggccagggcgctggagaagaaccgcgtgtcccacagcttcacttcgcgctcacgcatctgcagggagggcgagagaggggctcagaggggcctgtccctcagccccacccggggggctcccagg

SEQ ID NO: 179429 - DNA, 100 bp, Homo sapiens
  chr16:4438390-4438490
  hypo
tgaggctctgagacccggcagcacagccaggccgtatatggacaggcctggaactggccctcagtcccccgcctcccattggtttcgtccccgcccaaag

SEQ ID NO: 179430 - DNA, 30 bp, Homo sapiens
  chr16:4438798-4438828
  hypo
gtctccgaagcaccccggggatcagccccg

SEQ ID NO: 179431 - DNA, 524 bp, Homo sapiens
  chr16:4442608-4443132
  hypo
gagggcaggcggccccgctccctgacccccagccacaccccactaggcaggaaggaggattgccagagaaggagctcccagaaggcctctccctcgagccggcccctcggctcacaccggccctggctgccagcagcggttttcctaatagaagccaggtgtgggccagatgccctgggcggaagtggggggcagggccacacggagagcggcattccaggcctgctgcccccgcaccagggcccgagcacaggccccagccagcagctggaaggggtgggagccacccacgctcttcccaggtctcctcgccccaaagccccgcaggggggctccctccagaaccagatcctctccctctctcttcgaggagctgggagccccttggatagcagccactctatccccacctcggcatcagtcaccgccccagccctgctggaagaggaggggagaggaggaggaaggctggaaagagggggcggaggaggggagaataggaagaatcacgtgggcccagtgag

SEQ ID NO: 179432 - DNA, 31 bp, Homo sapiens; identical to SEQ ID NO: 28903
  chr16:4451020-4451051
  hypo

SEQ ID NO: 179433 - DNA, 198 bp, Homo sapiens
  chr16:4478612-4478810
  hypo
tgactaaggaactgcggttagctgtcttgttccccaagtgagctcataacctgccatgggcaagttttatatcaggtagtgtacacaggtgagaggtggcatccttcagggtacgtgctgttttcacagatagagtcatcaactggttgggcggggtggctcacgactgtaattccagcgctatgctggcgctgaggc

SEQ ID NO: 179434 - DNA, 30 bp, Homo sapiens
  chr16:4508228-4508258
  hypo
aaaaaaaaggtggccgtgcaacagctgtag

SEQ ID NO: 179435 - DNA, 250 bp, Homo sapiens
  chr16:4511752-4512002
  hypo
ccccacaaggggccgcgaggcgggcaggtcacagcaggttgaagtcccctttgtgctgttccagccactggtccagcgtcagggccttggggttgagtctcagggtcagctcgatgtcacggtcgggtctcagggcatagaaacggaacatgttggccaggtcccgggcaccgggaaagccaagcttttcgtagtcctcaggagtcatctggaagcagaggagcctgtcgtggccggcgtcctccagtgc

SEQ ID NO: 179436 - DNA, 249 bp, Homo sapiens
  chr16:4513531-4513780
  hypo
aacgttgacgatgaacgaatgaatttagatgtactgcccagaggtgtgggcagccctggacacaccctccctacgggagctagaaagccctgacaaggatgcctgagtcacctggggcgggaggcccaccttggcatcgtgcacgaccttgcgggtgtgcttggtgagcagggcagcgtactcctcggccgtgtgcctgcaagtgctcagcccgatgttctggccgacgtatttttctggcatcttcaa

SEQ ID NO: 179437 - DNA, 17 bp, Homo sapiens
  chr16:4524975-4524992
  hypo
agtgtcttggtccgtcg

SEQ ID NO: 179438 - DNA, 93 bp, Homo sapiens
  chr16:4527577-4527670
  hypo
gtgttttgttgatggcgctacaaaccagacaaggtggagtgtgattgaagaaagaaacgctggccggtgcagtggctcactcctgtaatccca

SEQ ID NO: 179439 - DNA, 145 bp, Homo sapiens
  chr16:4557895-4558040
  hypo
ggctgcccagaagtacgtggagcggatccactacatagggcagaacgagccggagctactggtggcccatgcatacacccgctacatgggggatctctcggggggccaggtgctgaagaaggtggcccagcgagcactgaaactc

SEQ ID NO: 179440 - DNA, 30 bp, Homo sapiens; identical to SEQ ID NO: 28906
  chr16:4606403-4606433
  hypo

SEQ ID NO: 179441 - DNA, 46 bp, Homo sapiens
  chr16:4606717-4606763
  hypo
gctcagcaatgtcttcgaccacgtggtgagccgcctcgacaagttg

SEQ ID NO: 179442 - DNA, 31 bp, Homo sapiens; identical to SEQ ID NO: 28907
  chr16:4641210-4641241
  hypo

SEQ ID NO: 179443 - DNA, 30 bp, Homo sapiens
  chr16:4642364-4642394
  hypo
gcccgtgagtaccaccgcccagggtgcccc

SEQ ID NO: 179444 - DNA, 117 bp, Homo sapiens
  chr16:4644647-4644764
  hypo
gttcgggggcagatcgggtcgggggctccctaacccgggacctgggccatccaacaggccgaggtggacatcctgggcgtggatgggatcctgtacaaaggccgcgtgaacagccag

SEQ ID NO: 179445 - DNA, 153 bp, Homo sapiens
  chr16:4644980-4645133
  hypo
gggggagggagaccgcgggagcgaggatctgctgttcccgagatcaacagctgaccagagagagggccgtggccacaggaccatggcctgtgacgaaggacgatgagctaggaaaggtgctgggctggtgccaagggacgccagtccacggag

SEQ ID NO: 179446 - DNA, 30 bp, Homo sapiens; identical to SEQ ID NO: 28908
  chr16:4655418-4655448
  hypo

SEQ ID NO: 179447 - DNA, 31 bp, Homo sapiens; identical to SEQ ID NO: 28909
  chr16:4656032-4656063
  hypo

SEQ ID NO: 179448 - DNA, 30 bp, Homo sapiens; identical to SEQ ID NO: 89812
  chr16:4659192-4659222
  hypo

SEQ ID NO: 179449 - DNA, 30 bp, Homo sapiens; identical to SEQ ID NO: 89813
  chr16:4660333-4660363
  hypo

SEQ ID NO: 179450 - DNA, 247 bp, Homo sapiens
  chr16:4665339-4665586
  hypo
gcacggatggaggtccgcaggcgggggcctcaggttcgtgcataggcgtttttgccaaggcccaggaacggtgtctgaaaactgagtgcctaatgtgtgcaggcgcctgagctgggaccagagccagtcacgtccacgtcgccctcgttgctctcggtggcacccacgcccctgctctggcgggaattaggagcccagaggccggggccacagatctgtgcatgggcgcaaacgccaggccacagac

SEQ ID NO: 179451 - DNA, 101 bp, Homo sapiens
  chr16:4671350-4671451
  hypo
catctcaaaaaaaataaaataaataaataaataaataaaaataaatgaatccactcagatgttgataatggaacttggaccaaatcgggaagggcctgtct

SEQ ID NO: 179452 - DNA, 93 bp, Homo sapiens; identical to SEQ ID NO: 89815
  chr16:4689935-4690028
  hypo

SEQ ID NO: 179453 - DNA, 527 bp, Homo sapiens; identical to SEQ ID NO: 89816
  chr16:4704659-4705186
  hypo

SEQ ID NO: 179454 - DNA, 456 bp, Homo sapiens
  chr16:4717780-4718236
  hypo
gtttttagagctttgcggttccctgtgtgtgcaccactgtgcgtgctcccgctctgtctttctaactcagccgggcctgggagagcaggaagctgttttgtctgtcttgattcttgctgccaggtgatacttctcggtgtgcaggaggcccttgtccatcatctgaacttggctgattggcattcagcttgagtgtgcttgagaccaaccgaggagagttgggttctgtgggtcagcagagggtccccgggctgtgtgttctggaggcctcagatagttgcacagccaggcctgaggccgtgttttcagaaatcccggctctttcgctgtcaagtggccccacccttttttttttttttcttttttctttttccagctgtgggcatggattggctggggcagggtggccaacccaggcggccacgcaggggtgctcagaggcgccagcttgaccac

SEQ ID NO: 179455 - DNA, 101 bp, Homo sapiens; identical to SEQ ID NO: 89818
  chr16:4719476-4719577
  hypo

SEQ ID NO: 179456 - DNA, 139 bp, Homo sapiens
  chr16:4723492-4723631
  hypo
cggcagccctcggacgacgagaacagcgacaacagcaacgagtgtgtggtgtgcctgtccgacctgcgggacacgctgatcctgccctgccgccacctgtgcctctgtacctcctgcgccgacacgctgcgctaccagg

SEQ ID NO: 179457 - DNA, 30 bp, Homo sapiens
  chr16:4728172-4728202
  hypo
ctgtttcccccatgcgctgctgtgcaaggg

SEQ ID NO: 179458 - DNA, 227 bp, Homo sapiens
  chr16:4731809-4732036
  hypo
gtgtgtggtggcgcgcgtgcggagcgggtgtctttgtggtttcaaatcagtttgtgatgtgttctgtgtggcgattccccagaaggactcggagaccccgtatcaggttagactcatgggtaaagtttattacggcaaagaacgcagcagacgaggcaggaagagcgtccgggcagctggaggctttgatcccccgaccagggccacaccggcgtgcaggcgcatac

SEQ ID NO: 179459 - DNA, 30 bp, Homo sapiens
  chr16:4736854-4736884
  hypo
gaaagaatgcgccccgattgggagagcccc

SEQ ID NO: 179460 - DNA, 68 bp, Homo sapiens; identical to SEQ ID NO: 89820
  chr16:4748492-4748560
  hypo

SEQ ID NO: 179461 - DNA, 102 bp, Homo sapiens; identical to SEQ ID NO: 89821
  chr16:4748900-4749002
  hypo

SEQ ID NO: 179462 - DNA, 337 bp, Homo sapiens
  chr16:4779952-4780289
  hypo
tgagaggaagttccccgagatctcttaccgctgcacacactccttcaccacttcatactggccaatggaagcagctgtgtgaagatccagggggacatccagctcctccccgctgacctgtgtcccgagcccgtgccacatggacaagctgcggttcaggagttccggctcgctggcttcatcgctgagctcggacatcactgaggaggaaggcccaagggttagatctttcctggctggttgttccagggcatgaaacaggctggtcctgcccctgctacaccactgcactagcagactgataacccagtgcagtcaaccccgggagtaactcaga

SEQ ID NO: 179463 - DNA, 292 bp, Homo sapiens; identical to SEQ ID NO: 89823
  chr16:4787715-4788007
  hypo

SEQ ID NO: 179464 - DNA, 143 bp, Homo sapiens
  chr16:4795506-4795649
  hypo
agggccccagggtcccgtaaggcccctctatatgcctgccctccccacactttggttgctccgcacttgaggaatctgagaaccagtgaatcccttttcacctgaccagcagtgggtttctgtgtctggaaaccaaaagtacc

SEQ ID NO: 179465 - DNA, 30 bp, Homo sapiens; identical to SEQ ID NO: 28915
  chr16:4799188-4799218
  hypo

SEQ ID NO: 179466 - DNA, 593 bp, Homo sapiens
  chr16:4802454-4803047
  hypo
gtgcttgtgcaggtcggtgccccggcggaagccccggccacaggccgggcaggtgtagggcttctcacctgtgtgcgtccggcggtgggcgctgaagtgcgagctgttgttgaagcgcttcccgcactgggtgcaggcatagggccgctccccgctgtgtgtcctgcggtggatgaccaggctggagctctggctgaagcgcttcccacactcggggcacgggtagggcttctcgcctgtgtgcaccctctggtgcgtgctgaagttggagcggtcgctaaagcccttcccacagactaggcacttgtaaggccgctcgcccgtgtgtgtgcgctggtgcttggtcaagtgggacgtcttgctgaagcctttgccacattcggggcaggtgtacggcttgtcagccccatgggaagcccgtcttcctggtggggggccgcctcttggctgatcaggcctgaccaagcccctgactggggctggcctctgacctgggagcgggtggccaggcccctggcatcgtgccgagagcactcggtaccactccattctcaacggggcatcctccctgccatcaccgccgtcctccaact

SEQ ID NO: 179467 - DNA, 31 bp, Homo sapiens; identical to SEQ ID NO: 89826
  chr16:4807248-4807279
  hypo

SEQ ID NO: 179468 - DNA, 135 bp, Homo sapiens
  chr16:4841347-4841482
  hypo
ctggatggaatcacacgtcaacacggcgataatagcacagggcattcagtgcacgtttctgtgagccttccatcatgcttcgacggctctgacatcgatgatcagttcatttcatcctcacgacactgggaggag

SEQ ID NO: 179469 - DNA, 21 bp, Homo sapiens
  chr16:4841970-4841991
  hypo
agccaccgcgcctggcctgac

SEQ ID NO: 179470 - DNA, 94 bp, Homo sapiens; identical to SEQ ID NO: 89827
  chr16:4845269-4845363
  hypo

SEQ ID NO: 179471 - DNA, 456 bp, Homo sapiens; identical to SEQ ID NO: 28919
  chr16:4845961-4846417
  hypo

SEQ ID NO: 179472 - DNA, 35 bp, Homo sapiens; identical to SEQ ID NO: 89829
  chr16:4846716-4846751
  hypo

SEQ ID NO: 179473 - DNA, 30 bp, Homo sapiens
  chr16:4848024-4848054
  hypo
gggcgtgtgcatggcgggcagtgggccggg

SEQ ID NO: 179474 - DNA, 30 bp, Homo sapiens
  chr16:4852502-4852532
  hypo
ccgcccgctggcccgcgcgccttaccagca

SEQ ID NO: 179475 - DNA, 394 bp, Homo sapiens; identical to SEQ ID NO: 126773
  chr16:4852796-4853190
  hypo

SEQ ID NO: 179476 - DNA, 30 bp, Homo sapiens; identical to SEQ ID NO: 89832
  chr16:4863863-4863893
  hypo

SEQ ID NO: 179477 - DNA, 31 bp, Homo sapiens; identical to SEQ ID NO: 28921
  chr16:4864722-4864753
  hypo

SEQ ID NO: 179478 - DNA, 31 bp, Homo sapiens; identical to SEQ ID NO: 28922
  chr16:4878735-4878766
  hypo

SEQ ID NO: 179479 - DNA, 33 bp, Homo sapiens; identical to SEQ ID NO: 28923
  chr16:4887143-4887176
  hypo

SEQ ID NO: 179480 - DNA, 244 bp, Homo sapiens; identical to SEQ ID NO: 89836
  chr16:4900507-4900751
  hypo

SEQ ID NO: 179481 - DNA, 766 bp, Homo sapiens
  chr16:4920095-4920861
  hypo
aacaagacagggtttgactgccgttggctcctagctttcctctccacgtacggtgagctgatgaagacaggagttgcagtgagctgcagccggtggtgactgtgttttgttcttcagcatagaggcgcagactcgggagctgagcagtcaggtccgctctggggtgtatgcctatcttgcgtcattcctgccctgcagcaaggatgccctgctcaagcgtgctcggaaacttcacctctatgaacaggtgggtgactctagagtgaagccctttggctttggggtcctggcggaggggtgactgagtcttaagcaatgatgcgtctgctgccccactgcctccttgtgatcaccccatcatgcgtcctgagcgtaagagcgatgtgtaaacctgccttgaattgtgtcccgctcttcgcaggggggccgtctgaaggagcctctccagaagctcaaggaagccattggcagggcgatgccagagcagatggccaagtaccaggacgaatgccaggcacacacgcaggcaaaggttgccaagtaagtttgtcctggcgcttgcaggtgcaaccctcccgtcttgcctcttcccctcccgtttctcggtgtgtactgccgtttcccaaggagcctcttggctcttctttggccttttctccttctctgtgaagtcccagtagtgcagagtgaggggagaggcggtgggcaggagcaccttggggccccatgtaattctattcaccccgtaggatgctggaagaggaga

SEQ ID NO: 179482 - DNA, 159 bp, Homo sapiens; identical to SEQ ID NO: 89838
  chr16:4931478-4931637
  hypo

SEQ ID NO: 179483 - DNA, 348 bp, Homo sapiens; identical to SEQ ID NO: 89839
  chr16:4931952-4932300
  hypo

SEQ ID NO: 179484 - DNA, 512 bp, Homo sapiens; identical to SEQ ID NO: 89840
  chr16:4933219-4933731
  hypo

SEQ ID NO: 179485 - DNA, 30 bp, Homo sapiens; identical to SEQ ID NO: 28927
  chr16:4934035-4934065
  hypo

SEQ ID NO: 179486 - DNA, 30 bp, Homo sapiens; identical to SEQ ID NO: 89842
  chr16:4934460-4934490
  hypo

SEQ ID NO: 179487 - DNA, 30 bp, Homo sapiens; identical to SEQ ID NO: 89843
  chr16:4938138-4938168
  hypo

SEQ ID NO: 179488 - DNA, 81 bp, Homo sapiens
  chr16:4960035-4960116
  hypo
tcaacccaatcgcaccgggctggcgctggtggaaggtttaaagagaaggtgaccattccagcggctcgtgagtccctcagg

SEQ ID NO: 179489 - DNA, 31 bp, Homo sapiens; identical to SEQ ID NO: 28928
  chr16:4964117-4964148
  hypo

SEQ ID NO: 179490 - DNA, 158 bp, Homo sapiens; identical to SEQ ID NO: 28929
  chr16:4971734-4971892
  hypo

SEQ ID NO: 179491 - DNA, 168 bp, Homo sapiens; identical to SEQ ID NO: 28930
  chr16:4980310-4980478
  hypo

SEQ ID NO: 179492 - DNA, 367 bp, Homo sapiens
  chr16:4981428-4981795
  hypo
tgaagagagctttgtcccacccggaggcagaaaggggcaccaggtggcctcccgggctccagaggctgcagcacagcaacccatcagaagccgggagaacaaagaccagaggccgtttccccattcgctcccaagacaggccggggcaggcaggctgggaggatgcaaggtggtgccggtaacaccggcacagacctgccgggagcagagagcagctgcacgctgggaagccagggttctcttccccagacgaggagctttggaagctctctaaagcagcttctcccccaggtcccctacttccagggcctcccccaaccacacccttagggtattgcttaaagggtgtggacggagctgagtctct

SEQ ID NO: 179493 - DNA, 29 bp, Homo sapiens
  chr16:5004699-5004728
  hypo
tgagccactgtgctcggaccattttgcca

SEQ ID NO: 179494 - DNA, 682 bp, Homo sapiens; identical to SEQ ID NO: 52788
  chr16:5007928-5008610
  hypo

SEQ ID NO: 179495 - DNA, 208 bp, Homo sapiens
  chr16:5084817-5085025
  hypo
gcttgatactgttgcggtcttgccagtgcaccttaatatagcagtttctccttgtctgaactagtcccggggttctttgtcctacctccaagaaaactaaggagcgtggacacaagggtggggttggagcgaacgtttaataagggaaagaagaaagctctccaaagtggagacgggagtccgagtggattgtcgggttacagctgaa

SEQ ID NO: 179496 - DNA, 30 bp, Homo sapiens
  chr16:5094329-5094359
  hypo
tggcatggaaccgtccgtctcagcggctgc

SEQ ID NO: 179497 - DNA, 30 bp, Homo sapiens
  chr16:5094894-5094924
  hypo
gctgagtgggtgcttcggtgctcccttagg

SEQ ID NO: 179498 - DNA, 142 bp, Homo sapiens; identical to SEQ ID NO: 126782
  chr16:5121864-5122006
  hypo

SEQ ID NO: 179499 - DNA, 30 bp, Homo sapiens; identical to SEQ ID NO: 89851
  chr16:5138280-5138310
  hypo

SEQ ID NO: 179500 - DNA, 205 bp, Homo sapiens
  chr16:5406086-5406291
  hypo
ttctcaagtaaaaataaaggaagacgtgaggcatagacaggcacagaggggaaggccgtgtgcaggtggatgcagagactggagtgacgcatctaacagccaaggggtggcaaggatttttggcagccaccaggagccaggagggaggcatggaatggatgctccctcagagcctccagaaggaatcatccgtgatgacaccttg

SEQ ID NO: 179501 - DNA, 30 bp, Homo sapiens
  chr16:5406826-5406856
  hypo
ccttatgtttgttgccgatagtaatactat

SEQ ID NO: 179502 - DNA, 79 bp, Homo sapiens; identical to SEQ ID NO: 89852
  chr16:5481659-5481738
  hypo

SEQ ID NO: 179503 - DNA, 207 bp, Homo sapiens; identical to SEQ ID NO: 28933
  chr16:5628621-5628828
  hypo

SEQ ID NO: 179504 - DNA, 381 bp, Homo sapiens
  chr16:5703272-5703653
  hypo
ggtggggtgctgagccgtgtgctgggcttcagtgcagaaggtggggtgctgagttgtgtgctgggcctttgtgcggaaggtggggtgtggagccatgtgctgggcctatatgcggaaggtggggtgctgagccgtgtgctgggtttctttgaggcaggtggggtgtggagccgtgtgctccacctttgtacggaaggtggggtgctgagccgtgtgctgcgtctttgaggaagttggggtgcggagccgtgtgctgcgcctttgtgcagaaggtggggtgctgagccgtatgcgggcctggggtgattgcctctccctgacctcctttgcctctccctccgctaacagaccagaagcctgttctgccgcatgtgcagctgc

SEQ ID NO: 179505 - DNA, 30 bp, Homo sapiens
  chr16:5830966-5830996
  hypo
acccttgcggggtcccgctgggagaggtgg

SEQ ID NO: 179506 - DNA, 30 bp, Homo sapiens
  chr16:6503938-6503968
  hypo
ctcagttctggaggccgaagtccaaatcca

SEQ ID NO: 179507 - DNA, 23 bp, Homo sapiens
  chr16:6625024-6625047
  hypo
cgagactccgtctcaattaaaaa

SEQ ID NO: 179508 - DNA, 30 bp, Homo sapiens; identical to SEQ ID NO: 28934
  chr16:6744841-6744871
  hypo

SEQ ID NO: 179509 - DNA, 30 bp, Homo sapiens
  chr16:6823902-6823932
  hypo
agtgcatttgcgttgcgggggtgtggagtg

SEQ ID NO: 179510 - DNA, 32 bp, Homo sapiens
  chr16:6838743-6838775
  hypo
gggattacaggtgtgagcgaccgtgcccggcc

SEQ ID NO: 179511 - DNA, 100 bp, Homo sapiens
  chr16:6860825-6860925
  hypo
tgtgccgggaaaggtcgccatgatccaatcacaagcctccctcaacatgtggggattacggttcaagagctgatttgggtggagacggagccaaatcata

SEQ ID NO: 179512 - DNA, 35 bp, Homo sapiens
  chr16:6885176-6885211
  hypo
caggcgtgagccaccacgcccgaccggcctgactt

SEQ ID NO: 179513 - DNA, 30 bp, Homo sapiens
  chr16:7292859-7292889
  hypo
gagatatggagtctgcggacagtttgcaag

SEQ ID NO: 179514 - DNA, 31 bp, Homo sapiens; identical to SEQ ID NO: 28935
  chr16:7823780-7823811
  hypo

SEQ ID NO: 179515 - DNA, 33 bp, Homo sapiens; identical to SEQ ID NO: 89856
  chr16:8410250-8410283
  hypo

SEQ ID NO: 179516 - DNA, 253 bp, Homo sapiens; identical to SEQ ID NO: 28936
  chr16:8722898-8723151
  hypo

SEQ ID NO: 179517 - DNA, 31 bp, Homo sapiens
  chr16:8755209-8755240
  hypo
gaacttaccgttggccgggcgcggtggctca

SEQ ID NO: 179518 - DNA, 830 bp, Homo sapiens; identical to SEQ ID NO: 126800
  chr16:8767885-8768715
  hypo

SEQ ID NO: 179519 - DNA, 30 bp, Homo sapiens
  chr16:8816100-8816130
  hypo
tttcctagttgccttcgtagcaaataaaac

SEQ ID NO: 179520 - DNA, 30 bp, Homo sapiens
  chr16:8816745-8816775
  hypo
atggaactcttagcacgcttgtcaggtgtt

SEQ ID NO: 179521 - DNA, 298 bp, Homo sapiens
  chr16:8870108-8870406
  hypo
tcttcaagagaggaggcggggcgcctggggtaagtgactcctgcagggtgtgcatgtgtgtgaagccttccaacacccgttcctcattccagccctaccggatcttcaacacctggctgggggacccgtccaagaacctgttgctggctgaggtcatcaacatcatcaagcgggaggacctgctaaataatgcagcccatgccgggaaggccctgctcacaggactgctggacctccaggtaacaccccctcccctgccccgcccccaccacccatggctccccgcagcagcctccgg

SEQ ID NO: 179522 - DNA, 30 bp, Homo sapiens; identical to SEQ ID NO: 28938
  chr16:8941732-8941762
  hypo

SEQ ID NO: 179523 - DNA, 30 bp, Homo sapiens; identical to SEQ ID NO: 28939
  chr16:8942325-8942355
  hypo

SEQ ID NO: 179524 - DNA, 27 bp, Homo sapiens
  chr16:8963898-8963925
  hypo
tacttgaggccgggtgcggtggctcac

SEQ ID NO: 179525 - DNA, 31 bp, Homo sapiens; identical to SEQ ID NO: 28940
  chr16:8995325-8995356
  hypo

SEQ ID NO: 179526 - DNA, 30 bp, Homo sapiens
  chr16:8995562-8995592
  hypo
tatagtctttgtggccgccttagtacagac

SEQ ID NO: 179527 - DNA, 443 bp, Homo sapiens
  chr16:8995948-8996391
  hypo
aaacttgggtaaggtcgctccactagcagccagctcgggatcaactgtttccaggaatattgtccaagggttttcattatcactgagctcaatcatctatttccaaaagagacgctgattttagaagagtctaatggcttaggtgacagagcgaaaaactacagtcaagtattgaagaaaacgtccaattctagttaagtggaccaaaagggaaacaagctgcactaagtgcagaggactaacgccttctgcacggttccaaaccagatacgctattaacaatatttactgttttattgccgtcggcttcattatctaacattgctggtcgttttgttccattactccttgcttgcatgggccacaatcgaatttgatcttgtggaaatccctgaaaaaaatattaagagtagattaaaataaaaacacgctcatattttagt

SEQ ID NO: 179528 - DNA, 30 bp, Homo sapiens; identical to SEQ ID NO: 89867
  chr16:9004609-9004639
  hypo

SEQ ID NO: 179529 - DNA, 537 bp, Homo sapiens
  chr16:9005256-9005793
  hypo
gtaacattaagagtgaaagggcgagccacatgctgagtgacaagctctcaatccaacacggaattgtatatccagagtgtatggagagctcgtcctgctccggtcatgaaggaaaaacgcaactgcacaacactgaaaacagcgctgtcacgctccggacacatgcggtacaggacagggatccctgaagggacaaatgagagccccgtgatgggcccagctctgctgaaagtttacaggctgcagcccggagaaggcaaacccagacagagccaagaagtgagaatgagaggagctcaagggagcgggaacctgctgggcagagtagcctaaagcagaatgctgcccagaaagcgagatctggggatgtgcagtttcttccgaagctgtcagtgagaactgatcagtgaactcgaggaaattacctggggcaaggaaaagaaccagcaagaggatgaggattggggggaacaaccttcagagctcacgacaggctgggaagtctgtgttcccaccagccaccgtggaaaaaccgct

SEQ ID NO: 179530 - DNA, 30 bp, Homo sapiens
  chr16:9006533-9006563
  hypo
ttcgggaggccaaggcgggcagactgattg

SEQ ID NO: 179531 - DNA, 200 bp, Homo sapiens; identical to SEQ ID NO: 89869
  chr16:9009859-9010059
  hypo

SEQ ID NO: 179532 - DNA, 130 bp, Homo sapiens
  chr16:9013679-9013809
  hypo
gggagacacctactgcgcagtaccattcaccagcaccttgccactccaggggttagctcccagccttggaaacactcaaatacacctaacggccttgtcacccctctttactcctcgctcaccatgttag

SEQ ID NO: 179533 - DNA, 30 bp, Homo sapiens
  chr16:9014133-9014163
  hypo
tctctattacatgcacgctaaagcttcttt

SEQ ID NO: 179534 - DNA, 32 bp, Homo sapiens; identical to SEQ ID NO: 89870
  chr16:9016041-9016073
  hypo

SEQ ID NO: 179535 - DNA, 31 bp, Homo sapiens; identical to SEQ ID NO: 28944
  chr16:9019562-9019593
  hypo

SEQ ID NO: 179536 - DNA, 31 bp, Homo sapiens; identical to SEQ ID NO: 28945
  chr16:9020778-9020809
  hypo

SEQ ID NO: 179537 - DNA, 31 bp, Homo sapiens; identical to SEQ ID NO: 10534
  chr16:9022848-9022879
  hypo

SEQ ID NO: 179538 - DNA, 121 bp, Homo sapiens; identical to SEQ ID NO: 89874
  chr16:9062110-9062231
  hypo

SEQ ID NO: 179539 - DNA, 26 bp, Homo sapiens
  chr16:9063641-9063667
  hypo
gtatagtggttggagtcgtgttcatt

SEQ ID NO: 179540 - DNA, 30 bp, Homo sapiens
  chr16:9135051-9135081
  hypo
tttttctggccgcatcgcattgcatttcat

SEQ ID NO: 179541 - DNA, 328 bp, Homo sapiens; identical to SEQ ID NO: 10537
  chr16:9186866-9187194
  hypo

SEQ ID NO: 179542 - DNA, 136 bp, Homo sapiens; identical to SEQ ID NO: 89877
  chr16:9218838-9218974
  hypo

SEQ ID NO: 179543 - DNA, 81 bp, Homo sapiens; identical to SEQ ID NO: 28948
  chr16:9222466-9222547
  hypo

SEQ ID NO: 179544 - DNA, 30 bp, Homo sapiens; identical to SEQ ID NO: 89879
  chr16:9231661-9231691
  hypo

SEQ ID NO: 179545 - DNA, 31 bp, Homo sapiens; identical to SEQ ID NO: 89880
  chr16:9242311-9242342
  hypo

SEQ ID NO: 179546 - DNA, 30 bp, Homo sapiens
  chr16:9254586-9254616
  hypo
aatggtcacgtgggccgggagcggtggctc

SEQ ID NO: 179547 - DNA, 176 bp, Homo sapiens
  chr16:10031817-10031993
  hypo
gtgcaaggtgtgcatcgggacctctggcctctccatctgcccgtagcagctggccttggcctcggggatgtaggagaacttctccagcatagaagatgcagcggtggttaggatgccaatgccgtccctcactctcgcctccaggctgtagtcccagtcatcgtaggagacagaaa

SEQ ID NO: 179548 - DNA, 30 bp, Homo sapiens
  chr16:10048723-10048753
  hypo
ctttctccaggccagcgtcctttatgttca

SEQ ID NO: 179549 - DNA, 98 bp, Homo sapiens
  chr16:10517769-10517867
  hypo
attgttccggcacacgcatagaaatatagagtgtggagcaggaatcggggctgatagccttcatagctgagagccacgaagagttttacccacatatt

SEQ ID NO: 179550 - DNA, 31 bp, Homo sapiens; identical to SEQ ID NO: 89881
  chr16:10617155-10617186
  hypo

SEQ ID NO: 179551 - DNA, 31 bp, Homo sapiens; identical to SEQ ID NO: 89882
  chr16:10625824-10625855
  hypo

SEQ ID NO: 179552 - DNA, 187 bp, Homo sapiens; identical to SEQ ID NO: 89883
  chr16:10631324-10631511
  hypo

SEQ ID NO: 179553 - DNA, 773 bp, Homo sapiens; identical to SEQ ID NO: 126815
  chr16:10673912-10674685
  hypo

SEQ ID NO: 179554 - DNA, 30 bp, Homo sapiens
  chr16:10712604-10712634
  hypo
ggagggaacagcacgcgcgaagaccctgat

SEQ ID NO: 179555 - DNA, 30 bp, Homo sapiens
  chr16:10719849-10719879
  hypo
tcagactccgttgtacggattcagcacatt

SEQ ID NO: 179556 - DNA, 30 bp, Homo sapiens; identical to SEQ ID NO: 89885
  chr16:10721520-10721550
  hypo

SEQ ID NO: 179557 - DNA, 104 bp, Homo sapiens
  chr16:10823579-10823683
  hypo
tagcaccctccaacccgcccaggagcagctacacagcctcactcatccctgttcacccagccccagatccctgcaagcacgggaggcaacgtgatattccgagg

SEQ ID NO: 179558 - DNA, 30 bp, Homo sapiens; identical to SEQ ID NO: 89887
  chr16:10856150-10856180
  hypo

SEQ ID NO: 179559 - DNA, 258 bp, Homo sapiens
  chr16:10868651-10868909
  hypo
gagacggggtttctccattccccttacttttaagtgacactgctcagcactcttaagcatgtctcaggagtctaaaccaaagtacctcttggtaccacgcacacaggggacaagcctcgtgtttcggaagtgatgacatcacacgaaagggcctcaccttcacagaccagaagtccagggacaggaggagcagcaccatgacaaaacagcccacaaagctcttgctgaaccagtcgcagctcacgtaggtgacgatgg

SEQ ID NO: 179560 - DNA, 30 bp, Homo sapiens
  chr16:10890570-10890600
  hypo
aggcgtgagccaccgcgcccggcccataaa

SEQ ID NO: 179561 - DNA, 30 bp, Homo sapiens
  chr16:10912789-10912819
  hypo
ccaacagtctctgcgcgcaagaaattccca

SEQ ID NO: 179562 - DNA, 39 bp, Homo sapiens
  chr16:10913110-10913149
  hypo
gagcactggtgccatcgtagctcactgtggcctcaaact

SEQ ID NO: 179563 - DNA, 39 bp, Homo sapiens
  chr16:10913328-10913367
  hypo
attacaggagtgagccaccacacccggcctcacctgcct

SEQ ID NO: 179564 - DNA, 200 bp, Homo sapiens
  chr16:11000392-11000592
  hypo
gtatggtgccgagcccgcaggcccggatggcatcctagtggaggtggatctggtgcaggccaggctggagaggagcagcagcaagagcctggagcgggaactggccaccccggactgggcagaacggcagctggcccaaggaggcctggctgaggtgctgttggctgccaaggagcaccggcggccgcgtgagacacgag

SEQ ID NO: 179565 - DNA, 30 bp, Homo sapiens; identical to SEQ ID NO: 28952
  chr16:11001017-11001047
  hypo

SEQ ID NO: 179566 - DNA, 115 bp, Homo sapiens; identical to SEQ ID NO: 10545
  chr16:11035551-11035666
  hypo

SEQ ID NO: 179567 - DNA, 63 bp, Homo sapiens
  chr16:11037114-11037177
  hypo
catgcatcgcttaatcggaggtatacaaggcagtgtagtatgtatgtgcgtactttttacaga

SEQ ID NO: 179568 - DNA, 55 bp, Homo sapiens; identical to SEQ ID NO: 89891
  chr16:11072430-11072485
  hypo

SEQ ID NO: 179569 - DNA, 315 bp, Homo sapiens
  chr16:11072843-11073158
  hypo
cctcctggaggcctctcctgccggggcgtccagtgccccagctggtacaaatgaacgtgcttggtaacttaaggagcaagttctcgtgggtcagcctctcatccgtgagtaatggtgaaaggtttctcagatggaaaaatagtgtccttgcaaacagtattgagtgggattttgcggagtggacttttgagtagcaccaagaaaggacagccctagggccgtggaggaagtcagtgggacaggacgcctttgttcacacagaaggcttttggctttgtgtattttgtgctgctcgcttgtgtgacctgatctctc

SEQ ID NO: 179570 - DNA, 30 bp, Homo sapiens; identical to SEQ ID NO: 89893
  chr16:11084194-11084224
  hypo

SEQ ID NO: 179571 - DNA, 197 bp, Homo sapiens
  chr16:11085469-11085666
  hypo
ggaaggagactggaacctcttcgtctttgtgtccccatgtctagcatggttcctgcagtcaacgttgattgtcttgatgtgacaagtctcggtacgggaatcaaacacatatctctaatgagcggtggacatccggtcttggccagtgtcagagtccttgaaactggttttgctgcgggatgctttgcctgatggga

SEQ ID NO: 179572 - DNA, 17 bp, Homo sapiens
  chr16:11102884-11102901
  hypo
tataaccatcaccacca

SEQ ID NO: 179573 - DNA, 30 bp, Homo sapiens; identical to SEQ ID NO: 28956
  chr16:11103441-11103471
  hypo

SEQ ID NO: 179574 - DNA, 31 bp, Homo sapiens; identical to SEQ ID NO: 28957
  chr16:11114091-11114122
  hypo

SEQ ID NO: 179575 - DNA, 286 bp, Homo sapiens; identical to SEQ ID NO: 89898
  chr16:11118476-11118762
  hypo

SEQ ID NO: 179576 - DNA, 30 bp, Homo sapiens; identical to SEQ ID NO: 28959
  chr16:11132914-11132944
  hypo

SEQ ID NO: 179577 - DNA, 30 bp, Homo sapiens
  chr16:11150727-11150757
  hypo
tttctttcttttcgtcgtagcacaagaagt

SEQ ID NO: 179578 - DNA, 357 bp, Homo sapiens
  chr16:11151036-11151393
  hypo
cacattaaactgcttcggccctcttttaagaatgactgactttcacagctacatggcctcagtgggcttctaacttgagtgactgtcgcctaaactaggcagcttgcacatgcagcaaggaagcaggagggtgaaaaccgagcctttgttccaggccagctcgtgggctcagcacatcaccggtgccatcccgttgtacctgcacggtgggtgccccatttccagaacacaagcctgggcttgggcacgtcacgtgattaccaagccccagcttgagccacagtgtgtctgactacagagccacccaccttcccctgctcattggactgattccccggtgacattgagtttgccaga

SEQ ID NO: 179579 - DNA, 54 bp, Homo sapiens
  chr16:11157537-11157591
  hypo
cagcagcaggtctctcggctgggtgtgacagccgagctccggctgtcataaaag

SEQ ID NO: 179580 - DNA, 187 bp, Homo sapiens; identical to SEQ ID NO: 28961
  chr16:11174342-11174529
  hypo

SEQ ID NO: 179581 - DNA, 808 bp, Homo sapiens
  chr16:11178511-11179319
  hypo
ttagtcttctgaactcgccggctatatgagtcatctccactgtggagggaggcaattttaaactggaaaggtcaatcgacatgtcagaatatctagtaaatcattcgcgttccacctggtgccccttccattcccctgaaaaagcctgcccttgttcagcgcctctcgaagacactgtggagaaagaggtagccggggctgggtggtgatttacctcgaggaaaattaatatggtgccatcaattctgaaggcagaaagggcccatggccagaaggctgcacgcaggctggaataactcacggcccatgagggccctgagtttggggaggcctctccttggccctggatataaatcagcagcccttttgcagagagagagtcggagttttgtcaggcctgggggaagggagccagcaccagaagcccctcttccccaggagcctgtcgttgtctgaagggttgaaaggcacctctgtgccacccttctcggccagcaccaagcactggactcatttacagacgaggccatgaagcccccaccctgggttccaggaggatcacgggaagggggctttcagcctggctgtcagagaagaatgtgacaggcccattttcactccacaggccttaattggatggtcagagggcacatctgtggcttataagaaacagatggcgggatgggttagtgaaggagaaagcacgcttgcttcaggttgagtgcccgtggaggtgctggggcagcacgctggcaagcaggcagactcggccaagacccagctttgtcacgtgcgtgaggccttggct

SEQ ID NO: 179582 - DNA, 30 bp, Homo sapiens; identical to SEQ ID NO: 89903
  chr16:11189368-11189398
  hypo

SEQ ID NO: 179583 - DNA, 235 bp, Homo sapiens
  chr16:11192354-11192589
  hypo
ttcctaagagctgagcgtgagggcgttagtgtggccatccataatggtatttgggatctgacaagtctccaaaccacttgtccatagaccctccagggccctgcaccctgagaaccagcctggtggggctggagtcctaaaatctgcactttgtcccagtaccgggtgccccaggctgccaatgggcctcccttcgaggaaccctggatctctcccaagacgctgtgtgtgagct

SEQ ID NO: 179584 - DNA, 347 bp, Homo sapiens; identical to SEQ ID NO: 28963
  chr16:11192847-11193194
  hypo

SEQ ID NO: 179585 - DNA, 617 bp, Homo sapiens; identical to SEQ ID NO: 89906
  chr16:11219552-11220169
  hypo

SEQ ID NO: 179586 - DNA, 42 bp, Homo sapiens
  chr16:11225772-11225814
  hypo
cagggcctctgttttcgtgcttccctccgcctggagccctct

SEQ ID NO: 179587 - DNA, 30 bp, Homo sapiens; identical to SEQ ID NO: 89908
  chr16:11226083-11226113
  hypo

SEQ ID NO: 179588 - DNA, 334 bp, Homo sapiens; identical to SEQ ID NO: 89909
  chr16:11232439-11232773
  hypo

SEQ ID NO: 179589 - DNA, 30 bp, Homo sapiens; identical to SEQ ID NO: 89910
  chr16:11242100-11242130
  hypo

SEQ ID NO: 179590 - DNA, 293 bp, Homo sapiens
  chr16:11249098-11249391
  hypo
atgctttcatcctcacgaaccctgtaaggtgtggtggtgtcactctgctttagagtgacaacagtgctttagaggacacaggctcgtggggtgaacaggtcccctgctgtcacatgcccagagccacggcactctcctcaccaccgtatcctgtagccagagtaaaagtgacaagcctaaagccaagttgctgctcttcaggtttctcccctgcagatagcagaaggctcgtgtccagccgtccggttagccatgtcccacaggtctgccagggcagacgtcaacagagccct

SEQ ID NO: 179591 - DNA, 227 bp, Homo sapiens
  chr16:11249643-11249870
  hypo
cccaccctgcaaagtcggagtcctggcgaacacaagcaaatggaatgggtccacaggcatggtgctctctgccttgggtgcatactaagtatgtgtcaacggcaggtgccttttgcagagaatcaagactaattccctggcccctttgtacagtgccacctcctagaacacacggagcaggccaaacatgtcagtgtaggatacacactgtacggcctccctgcttc

SEQ ID NO: 179592 - DNA, 30 bp, Homo sapiens
  chr16:11255736-11255766
  hypo
gtgcaagcccctaggcggctgctggccggc

SEQ ID NO: 179593 - DNA, 30 bp, Homo sapiens
  chr16:11256875-11256905
  hypo
ttcactcctgtcgcacgatctctggcttgt

SEQ ID NO: 179594 - DNA, 105 bp, Homo sapiens; identical to SEQ ID NO: 28966
  chr16:11265076-11265181
  hypo

SEQ ID NO: 179595 - DNA, 135 bp, Homo sapiens; identical to SEQ ID NO: 89912
  chr16:11267977-11268112
  hypo

SEQ ID NO: 179596 - DNA, 30 bp, Homo sapiens; identical to SEQ ID NO: 89913
  chr16:11268359-11268389
  hypo

SEQ ID NO: 179597 - DNA, 30 bp, Homo sapiens; identical to SEQ ID NO: 89914
  chr16:11271037-11271067
  hypo

SEQ ID NO: 179598 - DNA, 394 bp, Homo sapiens
  chr16:11272122-11272516
  hypo
gcacagggcgcagtgcgacggggtgtctcaagggctcagtgtgtttccggtttttctcccccaatccagatgcccccatgagtccagaactgcctaagcctcaccttcctgaccagttggtaatcgtcaacgaaacggaagcagactctaagcccagcaagaacgtggccaggagcgcagccgtggagacagccagcctgtcccccagcctcgtccctgcccggcagcccaccatttccctgctctgcgaggacacggctgacacgctgagcgtcgaatcgctgacccttgtccccccagttgacccccacagcctccgcagcctcaccggcatgcccccgctgtccacgccggctgccgcctgcacagagcccgtgggcgaagaggctgcatg

SEQ ID NO: 179599 - DNA, 30 bp, Homo sapiens
  chr16:11272763-11272793
  hypo
gcggagacaccgcggcgaatgcagatgact

SEQ ID NO: 179600 - DNA, 30 bp, Homo sapiens
  chr16:11273981-11274011
  hypo
agtctcgggagccgcgctgagatcttttgc

SEQ ID NO: 179601 - DNA, 597 bp, Homo sapiens
  chr16:11275088-11275685
  hypo
acctcatagctggggcgctcccagacaggccagtccagacaggacacgctgggcccctggcatccagaggaagagccaggagtgtgggaaggcccacagtgggggctgtggcttctgacactcaggtcatagcctcagaggtctgaggtcagcccccacagacccatccggcccgccccccaagtccctgcagagagcacttagagttatggcccaggccctggtccacccttcccctgtgcacctccggctgggtttgccaagtcagggagcagggctggccgcaggaactcccaaaccttggctttgaatattgttgtggaggtgtgctcgtccctttctggacgtgcaaggtacctgtcccagcaggtcagatggggccagctgaggcgctcccccaggcaggaagggccagccttcaccatcgcgtgggattgggaggaggggcctccgtgagcagcccctcctctgccgctgtcccagcccagtccctctcccggagccttggcagcctcccacaacccagacacttgcgttcacaagcaacctaaggggcaggtgaagaagcgcagccctgccagacgcgctagattcctc

SEQ ID NO: 179602 - DNA, 174 bp, Homo sapiens
  chr16:11282894-11283068
  hypo
atttgcatgccccagcggatggtaggaaccactccgcttgttcattcaatccccgtgtttgttctttggctccactctgcagcactagctcccgggccaggctgggcgtggcgtagatggaagatggtaaagaagccagctagaaaggcaggaacgcagcgtgacggtgccata

SEQ ID NO: 179603 - DNA, 30 bp, Homo sapiens
  chr16:11283307-11283337
  hypo
attgacaggtttggtcggactggccacaag

SEQ ID NO: 179604 - DNA, 30 bp, Homo sapiens; identical to SEQ ID NO: 89916
  chr16:11320424-11320454
  hypo

SEQ ID NO: 179605 - DNA, 120 bp, Homo sapiens; identical to SEQ ID NO: 89917
  chr16:11323717-11323837
  hypo

SEQ ID NO: 179606 - DNA, 31 bp, Homo sapiens; identical to SEQ ID NO: 89918
  chr16:11342006-11342037
  hypo

SEQ ID NO: 179607 - DNA, 30 bp, Homo sapiens; identical to SEQ ID NO: 28967
  chr16:11343450-11343480
  hypo

SEQ ID NO: 179608 - DNA, 30 bp, Homo sapiens; identical to SEQ ID NO: 28968
  chr16:11343686-11343716
  hypo

SEQ ID NO: 179609 - DNA, 120 bp, Homo sapiens
  chr16:11344315-11344435
  hypo
gtctacaggaccccacgtgcccgggcccctgcccatccctcccgcttcttcacccctcccactctgccagccttcttgaacgggccgaactccttcctgactgagcgcctttgcactcgc

SEQ ID NO: 179610 - DNA, 417 bp, Homo sapiens; identical to SEQ ID NO: 126820
  chr16:11348662-11349079
  hypo

SEQ ID NO: 179611 - DNA, 53 bp, Homo sapiens; identical to SEQ ID NO: 89921
  chr16:11370334-11370387
  hypo

SEQ ID NO: 179612 - DNA, 388 bp, Homo sapiens; identical to SEQ ID NO: 89922
  chr16:11398034-11398422
  hypo

SEQ ID NO: 179613 - DNA, 48 bp, Homo sapiens; identical to SEQ ID NO: 89923
  chr16:11443252-11443300
  hypo

SEQ ID NO: 179614 - DNA, 30 bp, Homo sapiens
  chr16:11482302-11482332
  hypo
gttagaggcagagccggattccagatgctc

SEQ ID NO: 179615 - DNA, 29 bp, Homo sapiens
  chr16:11500579-11500608
  hypo
gcccggccttcccccggattttcaaatgg

SEQ ID NO: 179616 - DNA, 122 bp, Homo sapiens; identical to SEQ ID NO: 89925
  chr16:11541943-11542065
  hypo

SEQ ID NO: 179617 - DNA, 30 bp, Homo sapiens
  chr16:11563357-11563387
  hypo
cattaccgtccagctcgattttcttcttgg

SEQ ID NO: 179618 - DNA, 30 bp, Homo sapiens; identical to SEQ ID NO: 89926
  chr16:11582788-11582818
  hypo

SEQ ID NO: 179619 - DNA, 30 bp, Homo sapiens; identical to SEQ ID NO: 89927
  chr16:11588517-11588547
  hypo

SEQ ID NO: 179620 - DNA, 161 bp, Homo sapiens; identical to SEQ ID NO: 89928
  chr16:11622038-11622199
  hypo

SEQ ID NO: 179621 - DNA, 30 bp, Homo sapiens
  chr16:11641197-11641227
  hypo
ctgacatgaaagttccgcataagacatgtt

SEQ ID NO: 179622 - DNA, 162 bp, Homo sapiens
  chr16:11641618-11641780
  hypo
tgccgccatcaatgacgcctattgggttccaatagcctcatgttcaaatctgactcgttagcaaatccacccaactcaacatcggtcatcttgacattgcaggatattcagcaagtctgaagtttttaatcgggaaggattttctaccgttactgaacaaat

SEQ ID NO: 179623 - DNA, 139 bp, Homo sapiens
  chr16:11703385-11703524
  hypo
aatgggtgaattgtccggtatgtaaattacgtatccaaaacactcttggaaaaaagaaaaagggataaagggagcaaaggattcaggctgcaggactggctgtgccacttcccggctgcgtgaccgtgagcaagttact

SEQ ID NO: 179624 - DNA, 159 bp, Homo sapiens
  chr16:11712390-11712549
  hypo
gcttgatgggctccccgggctttcgctgtgtgcgatgggctaatagcaagatagtttctctctggccatggagccactggccattgtccccgcctcccagtgggtggagcatttctgggggtggggagggggcgcttcatagagctgcaaattaaaaac

SEQ ID NO: 179625 - DNA, 275 bp, Homo sapiens
  chr16:11770049-11770324
  hypo
ggacgaggagagcatcgtgggggatggggagaccaaggaacccttcctgctggtgcagtattcggccaagggaccgtgcgtggagagaaaggccaagctgatgactcccaacggcccggaagtccacggctgagccaggatgcaaggctcctggtcctgtttgcagccggccaagaggcgctgggaggggcaaaaccatacggatgcgctgctgtctgagaggaagggctgacacttgctggcatggcctctgcgggcttcgtcatcgcatgcac

SEQ ID NO: 179626 - DNA, 187 bp, Homo sapiens; identical to SEQ ID NO: 89931
  chr16:11770869-11771056
  hypo

SEQ ID NO: 179627 - DNA, 30 bp, Homo sapiens
  chr16:11774032-11774062
  hypo
ctcggagatgcccagcggctgtgtcaggaa

SEQ ID NO: 179628 - DNA, 215 bp, Homo sapiens; identical to SEQ ID NO: 89932
  chr16:11775049-11775264
  hypo

SEQ ID NO: 179629 - DNA, 30 bp, Homo sapiens
  chr16:11778276-11778306
  hypo
tacaacattctactacgtggacgctttcca

SEQ ID NO: 179630 - DNA, 19 bp, Homo sapiens
  chr16:11784713-11784732
  hypo
ccactgctttctctttaag

SEQ ID NO: 179631 - DNA, 73 bp, Homo sapiens
  chr16:11786029-11786102
  hypo
atccatggtcaactccggttcaaaaatactaaatggaaaattccagaaataaacaagtcgtaagttttaaact

SEQ ID NO: 179632 - DNA, 188 bp, Homo sapiens; identical to SEQ ID NO: 89935
  chr16:11792616-11792804
  hypo

SEQ ID NO: 179633 - DNA, 214 bp, Homo sapiens
  chr16:11793449-11793663
  hypo
acagcatctgggctacgagagatatgcagaagccagggcgactggcaagcaagggggcacccctggagtgggcccaacagcccctccgaaggcacaagacttagacattgtgccaaggggggcgcaggttttaaaggctgggtacactgggtgcagggaaattgatctgtatatgacctgtaagttactgacagtgatgcgagagagacagaat

SEQ ID NO: 179634 - DNA, 30 bp, Homo sapiens
  chr16:11808588-11808618
  hypo
tctacaagcaaatctcggcagcatcagacg

SEQ ID NO: 179635 - DNA, 32 bp, Homo sapiens
  chr16:11809450-11809482
  hypo
ctaaaatctttctcacgcgtcctttaccagtc

SEQ ID NO: 179636 - DNA, 23 bp, Homo sapiens
  chr16:11831012-11831035
  hypo
gtaaaggagaccaggcgtggtga

SEQ ID NO: 179637 - DNA, 181 bp, Homo sapiens; identical to SEQ ID NO: 28977
  chr16:11831274-11831455
  hypo

SEQ ID NO: 179638 - DNA, 24 bp, Homo sapiens
  chr16:11843359-11843383
  hypo
ggaggcaggagaatggcgtgagcc

SEQ ID NO: 179639 - DNA, 46 bp, Homo sapiens; identical to SEQ ID NO: 89937
  chr16:11851040-11851086
  hypo

SEQ ID NO: 179640 - DNA, 184 bp, Homo sapiens
  chr16:11853075-11853259
  hypo
agaaaacctccatcacggagaatgcattcttgaataccatcaacctacttgtctgtatgaggtataaatcctagtacaactaattattagcttatcttagtttgtgcttcaacggcagctggccctacattatttagcttacgtggcattaaatgcttagcatctgtcacgtttttcagagttt

SEQ ID NO: 179641 - DNA, 45 bp, Homo sapiens; identical to SEQ ID NO: 28978
  chr16:11853663-11853708
  hypo

SEQ ID NO: 179642 - DNA, 30 bp, Homo sapiens
  chr16:11859420-11859450
  hypo
ccaaagaaagcctcccggctgaatgctcct

SEQ ID NO: 179643 - DNA, 154 bp, Homo sapiens; identical to SEQ ID NO: 89940
  chr16:11879767-11879921
  hypo

SEQ ID NO: 179644 - DNA, 30 bp, Homo sapiens
  chr16:11885040-11885070
  hypo
atgaagccttgcctccgtacggtgacctag

SEQ ID NO: 179645 - DNA, 40 bp, Homo sapiens; identical to SEQ ID NO: 28980
  chr16:11900210-11900250
  hypo

SEQ ID NO: 179646 - DNA, 41 bp, Homo sapiens; identical to SEQ ID NO: 28981
  chr16:11968753-11968794
  hypo

SEQ ID NO: 179647 - DNA, 90 bp, Homo sapiens; identical to SEQ ID NO: 28982
  chr16:11974693-11974783
  hypo

SEQ ID NO: 179648 - DNA, 45 bp, Homo sapiens; identical to SEQ ID NO: 89944
  chr16:11989478-11989523
  hypo

SEQ ID NO: 179649 - DNA, 181 bp, Homo sapiens; identical to SEQ ID NO: 28983
  chr16:12011432-12011613
  hypo

SEQ ID NO: 179650 - DNA, 40 bp, Homo sapiens; identical to SEQ ID NO: 89946
  chr16:12012092-12012132
  hypo

SEQ ID NO: 179651 - DNA, 121 bp, Homo sapiens
  chr16:12018077-12018198
  hypo
gggattacaggcgtgagccactgcgcctggccgattgccaattgccaatgcctcaacaccttctttcatgttttaaataaacaatttttttatttaaataaataaatgagaaataaaacaa

SEQ ID NO: 179652 - DNA, 37 bp, Homo sapiens; identical to SEQ ID NO: 89948
  chr16:12042327-12042364
  hypo

SEQ ID NO: 179653 - DNA, 30 bp, Homo sapiens; identical to SEQ ID NO: 89949
  chr16:12050239-12050269
  hypo

SEQ ID NO: 179654 - DNA, 28 bp, Homo sapiens
  chr16:12068642-12068670
  hypo
acaatgtgcagggcgcggtggctcacgc

SEQ ID NO: 179655 - DNA, 121 bp, Homo sapiens
  chr16:12068909-12069030
  hypo
cgacagagcgagatgccgtctcaaaaacaaaacaaaacaaaagaacgttgtgaatgtgtcacacttgtgttcacactcaatccatcaccttttttttttttttttttttttttgagacgga

SEQ ID NO: 179656 - DNA, 30 bp, Homo sapiens
  chr16:12083991-12084021
  hypo
tatgtctcagtatggcggattggtggcggg

SEQ ID NO: 179657 - DNA, 225 bp, Homo sapiens
  chr16:12084472-12084697
  hypo
ttgggctggtagcgccgggcatcccagatgcccgccagtgtaactgagaatgaattctgcagtgacaacaggttgatgatgtccttgttccctgcaagactctgtatgtggggccttggttagagggcaagggaagatgggagcatgattatgatgcgggcctggtctacagcctgctggggaactctcacgtttaaccatctaaccgcacggtggctgtaaggt

SEQ ID NO: 179658 - DNA, 30 bp, Homo sapiens; identical to SEQ ID NO: 28985
  chr16:12088022-12088052
  hypo

SEQ ID NO: 179659 - DNA, 149 bp, Homo sapiens
  chr16:12118316-12118465
  hypo
atgaccagtagatacgtgctcagatccaaactggaggtggaaagggcatatggggagggtgttaagtagaacggcctttggcgaggaaggcatcatagtgatctaattaaaagactagcatccacctgggtattcgtgcagtgttaggt

SEQ ID NO: 179660 - DNA, 30 bp, Homo sapiens
  chr16:12124600-12124630
  hypo
acaaagtatccagtgcgtgatctggcttct

SEQ ID NO: 179661 - DNA, 20 bp, Homo sapiens
  chr16:12130476-12130496
  hypo
caccgcgcccagcgggtttt

SEQ ID NO: 179662 - DNA, 609 bp, Homo sapiens
  chr16:12132238-12132847
  hypo
tgttaacaggtgccccggggcagctcttctcaacaccccttcctggcacttgttcttgttggcattcggctttcaggtgtttggagaaccagaagcccttgcccgctttttgacttaaccccatgtttcaaagcagatcagtgtatatccctaaattaaattacggacaccgcaggcgctaattggcaggtgagctgcgctttaaatagaccacattaattctggcagtggaagcggaaccctgctgggataattcttatcatcatcagcatcaccctgactagctttaaaaggattctgtagcagtaagcaatttgcagaattgaaaggtgaaaacacactttaaagcgttcatgtagattcaaggtcggagggaggtgactgcatttttcaagacaggctgcaggtgagagtcacttgactggaaatgtgatggacgtaccgacaatggtctggggtatttcgaaatacgttgttggccagctggcccagggtgttgttgtcgccagattccccgtcctggtttcttgagtgaggcggagaatggaaggaaggctgttttgtacagttgtgtggagtagactgatcggatgagcttgggaagtggat

SEQ ID NO: 179663 - DNA, 79 bp, Homo sapiens
  chr16:12136758-12136837
  hypo
gtgttctggtactacgtgaaggaggtcctcaacaagcacgagctgcagcgcttctactccctgcgccacatcgcctcag

SEQ ID NO: 179664 - DNA, 30 bp, Homo sapiens; identical to SEQ ID NO: 28988
  chr16:12142320-12142350
  hypo

SEQ ID NO: 179665 - DNA, 112 bp, Homo sapiens
  chr16:12142576-12142688
  hypo
gagtccagtgcacttgcgttttccatttgtgtttctgtttctcatcctcattcactctgaaagggctctgacggccttacctagatgcgagaattgccgggtggaaaaatga

SEQ ID NO: 179666 - DNA, 30 bp, Homo sapiens; identical to SEQ ID NO: 89957
  chr16:12146059-12146089
  hypo

SEQ ID NO: 179667 - DNA, 34 bp, Homo sapiens
  chr16:12157505-12157539
  hypo
gattataggcatgagccaccgtgcccggcctttt

SEQ ID NO: 179668 - DNA, 480 bp, Homo sapiens
  chr16:12172488-12172968
  hypo
ggttacaaataaattttagtgcgtagatgaatttccaaatacggaatctgcagataacgaggcctgactaatttccaatgactgcctctatcccttctagtagaggtaccggagtaaaccgacctctgctagtttttggaatggtgagggtgtgtactttcagtggccgagtgtaacttcctcctgcctgctttttcctagtgtggaagccagctctccaggccacggaagtcctctgagcagcctgttaccttctgcctcagtgccagagtccatgacaattagtaagtactttcgcagccccctccaccagctctgggatgacttctggcccacgtctcatggcggtgcctttgtgcttctaaccctgtgactgtgggttcacgtcaggtgtgtacgtccctggttgtagactggaggtgtggtacgtgcttgtggatatccagaaccgtggttaatgcgtggcgcttgggcgtgtgc

SEQ ID NO: 179669 - DNA, 30 bp, Homo sapiens
  chr16:12191928-12191958
  hypo
gccatgtgcagtgcccgcacacgctgggcc

SEQ ID NO: 179670 - DNA, 30 bp, Homo sapiens
  chr16:12192247-12192277
  hypo
caccttctggaagaacgtcgctgcccagtt

SEQ ID NO: 179671 - DNA, 383 bp, Homo sapiens; identical to SEQ ID NO: 89959
  chr16:12210601-12210984
  hypo

SEQ ID NO: 179672 - DNA, 151 bp, Homo sapiens; identical to SEQ ID NO: 52824
  chr16:12211190-12211341
  hypo

SEQ ID NO: 179673 - DNA, 30 bp, Homo sapiens
  chr16:12226932-12226962
  hypo
tgaggctcattgcgccggcgccatgctttc

SEQ ID NO: 179674 - DNA, 197 bp, Homo sapiens; identical to SEQ ID NO: 89961
  chr16:12237124-12237321
  hypo

SEQ ID NO: 179675 - DNA, 182 bp, Homo sapiens; identical to SEQ ID NO: 89962
  chr16:12264696-12264878
  hypo

SEQ ID NO: 179676 - DNA, 55 bp, Homo sapiens
  chr16:12272502-12272557
  hypo
ttccagggtatggcccgggccctctctgttatcgtgcatacgcaatgctcttagt

SEQ ID NO: 179677 - DNA, 86 bp, Homo sapiens
  chr16:12286196-12286282
  hypo
ttgtctccatgtgcacggctacctcttcggtcctctcagttctggccaccatcgtttcttgcctggatgaccgtaatggcctccta

SEQ ID NO: 179678 - DNA, 138 bp, Homo sapiens; identical to SEQ ID NO: 89963
  chr16:12289442-12289580
  hypo

SEQ ID NO: 179679 - DNA, 189 bp, Homo sapiens; identical to SEQ ID NO: 89964
  chr16:12293538-12293727
  hypo

SEQ ID NO: 179680 - DNA, 30 bp, Homo sapiens
  chr16:12309053-12309083
  hypo
agaaaggtcagagaccggctgggcacggcg

SEQ ID NO: 179681 - DNA, 29 bp, Homo sapiens
  chr16:12309142-12309171
  hypo
ccaggagtttgagacgcaatctctacaga

SEQ ID NO: 179682 - DNA, 84 bp, Homo sapiens
  chr16:12327924-12328008
  hypo
tacaagttgtgtggacgtgtttttcatttctctcgggtataacctaggagtgggattgctgggtcaaagcggctgtaccttccc

SEQ ID NO: 179683 - DNA, 102 bp, Homo sapiens
  chr16:12331020-12331122
  hypo
taggacaggagggtgcgaagctctgtccacccccgactcctcacccccaccagcataaaacagaaaaagggagtttctgaagcccagcggtgtttcctctca

SEQ ID NO: 179684 - DNA, 30 bp, Homo sapiens
  chr16:12350960-12350990
  hypo
gacagaatccagttccgagtagctgaatga

SEQ ID NO: 179685 - DNA, 30 bp, Homo sapiens
  chr16:12359281-12359311
  hypo
ctgatctcttggaagcgagacgcagcttcg

SEQ ID NO: 179686 - DNA, 30 bp, Homo sapiens
  chr16:12361539-12361569
  hypo
aggctgttgggtaaccgcattcctcgcaat

SEQ ID NO: 179687 - DNA, 170 bp, Homo sapiens
  chr16:12377984-12378154
  hypo
cacaacaatgtgaagtgttggcgacattcggactttgggcctgcatcactttgtcgctgccttctgcagcctggtgacttggaaagcacatgtatcgcgtgtcagactgagttcagatttgccacttactgccgtatgttcctgggcacgccccctaacctctctaagcc

SEQ ID NO: 179688 - DNA, 85 bp, Homo sapiens; identical to SEQ ID NO: 89965
  chr16:12390746-12390831
  hypo

SEQ ID NO: 179689 - DNA, 83 bp, Homo sapiens
  chr16:12399115-12399198
  hypo
caagtcttggcagaggtgtgacgaggttagactcaggtgttgcgaagatcccccccggccacggagtggtatcaggactggag

SEQ ID NO: 179690 - DNA, 31 bp, Homo sapiens; identical to SEQ ID NO: 28992
  chr16:12410419-12410450
  hypo

SEQ ID NO: 179691 - DNA, 359 bp, Homo sapiens; identical to SEQ ID NO: 89967
  chr16:12412004-12412363
  hypo

SEQ ID NO: 179692 - DNA, 30 bp, Homo sapiens; identical to SEQ ID NO: 89968
  chr16:12412562-12412592
  hypo

SEQ ID NO: 179693 - DNA, 93 bp, Homo sapiens
  chr16:12415814-12415907
  hypo
catcaaagcacctgtcgtggttcacgtgatggtgaagtccaggtaaggggggattccagaggaggttcaggctgtcgtcggggtcccggtcct

SEQ ID NO: 179694 - DNA, 81 bp, Homo sapiens; identical to SEQ ID NO: 89969
  chr16:12497523-12497604
  hypo

SEQ ID NO: 179695 - DNA, 166 bp, Homo sapiens; identical to SEQ ID NO: 89970
  chr16:12498044-12498210
  hypo

SEQ ID NO: 179696 - DNA, 31 bp, Homo sapiens; identical to SEQ ID NO: 28993
  chr16:12506196-12506227
  hypo

SEQ ID NO: 179697 - DNA, 30 bp, Homo sapiens
  chr16:12562828-12562858
  hypo
ctgaaatggagtgaacgtaatctgtgcacc

SEQ ID NO: 179698 - DNA, 30 bp, Homo sapiens
  chr16:12563501-12563531
  hypo
ccgctgctcactcctcgggcaatagagagc

SEQ ID NO: 179699 - DNA, 328 bp, Homo sapiens
  chr16:12579139-12579467
  hypo
cttaggtaaaggactcgtttttgatgatgttactaaagtctgcattatggctcagggagcgaatgagaatagagagactgtcattccttcttaggataatagattccgtctccaaaagttcatttggcattaaggcaaggcaaatcactttccctggagccacagataattcaacttgttggagaaattatgcattaaaatcctcattaaaaacacatacacccgtgtgtggtagaggaaccgactggtactcgccgagccgtgggaagcccctttgcaacttcttgggaggtgccattggaaacacagccctcgagacggcagggtc

SEQ ID NO: 179700 - DNA, 30 bp, Homo sapiens
  chr16:12596270-12596300
  hypo
ggaatgcttcacagccgccggtggtggtgg

SEQ ID NO: 179701 - DNA, 30 bp, Homo sapiens
  chr16:12596672-12596702
  hypo
acattgcggttgctgcgatgtttccagcca

SEQ ID NO: 179702 - DNA, 273 bp, Homo sapiens; identical to SEQ ID NO: 89972
  chr16:12609441-12609714
  hypo

SEQ ID NO: 179703 - DNA, 30 bp, Homo sapiens; identical to SEQ ID NO: 89973
  chr16:12620498-12620528
  hypo

SEQ ID NO: 179704 - DNA, 30 bp, Homo sapiens
  chr16:12662459-12662489
  hypo
gtggagccccagagcggtgacctctgacct

SEQ ID NO: 179705 - DNA, 151 bp, Homo sapiens
  chr16:12758794-12758945
  hypo
agctcatctagactgtagtatcggtgaacaattttctcggcggtgaccaccacgactcggagcccgtgggggtctctgcccagctggcatccaatggcagatgacaccaccatgtcgaggttctggtaggtacccccggcattcctgtggt

SEQ ID NO: 179706 - DNA, 57 bp, Homo sapiens; identical to SEQ ID NO: 89975
  chr16:12777324-12777381
  hypo

SEQ ID NO: 179707 - DNA, 30 bp, Homo sapiens
  chr16:12778948-12778978
  hypo
atgtcaaatgacaagcgactgcacctcgct

SEQ ID NO: 179708 - DNA, 30 bp, Homo sapiens
  chr16:12779365-12779395
  hypo
gttaggagtttcagacgtaatgcgtttaaa

SEQ ID NO: 179709 - DNA, 36 bp, Homo sapiens; identical to SEQ ID NO: 89976
  chr16:12782488-12782524
  hypo

SEQ ID NO: 179710 - DNA, 30 bp, Homo sapiens; identical to SEQ ID NO: 89977
  chr16:12798577-12798607
  hypo

SEQ ID NO: 179711 - DNA, 92 bp, Homo sapiens; identical to SEQ ID NO: 89978
  chr16:12800829-12800921
  hypo

SEQ ID NO: 179712 - DNA, 30 bp, Homo sapiens
  chr16:12810413-12810443
  hypo
aggtgtttgtggctacgcccctaaaacttc

SEQ ID NO: 179713 - DNA, 129 bp, Homo sapiens; identical to SEQ ID NO: 89979
  chr16:12850874-12851003
  hypo

SEQ ID NO: 179714 - DNA, 103 bp, Homo sapiens
  chr16:12867589-12867692
  hypo
aatacataaaaatacacaaataaataataaaataaaaagtgtctgtctcagccacccacgtgaacaatctgtggtgatttggcatcaccgcgattcctgactc

SEQ ID NO: 179715 - DNA, 17 bp, Homo sapiens
  chr16:12893408-12893425
  hypo
agctagttctttaactt

SEQ ID NO: 179716 - DNA, 565 bp, Homo sapiens; identical to SEQ ID NO: 52825
  chr16:12897344-12897909
  hypo

SEQ ID NO: 179717 - DNA, 1405 bp, Homo sapiens; identical to SEQ ID NO: 126837
  chr16:12994398-12995803
  hypo

SEQ ID NO: 179718 - DNA, 1626 bp, Homo sapiens; identical to SEQ ID NO: 126838
  chr16:12996073-12997699
  hypo

SEQ ID NO: 179719 - DNA, 127 bp, Homo sapiens
  chr16:13157453-13157580
  hypo
tctttctttacatcaggaaagcgagatatttctattgattgcgcaatggcattgacagctcaccactttccagcgagagtcagtgatggtatccaaggaagggtgcgtatactgcaaagactataac

SEQ ID NO: 179720 - DNA, 30 bp, Homo sapiens; identical to SEQ ID NO: 89983
  chr16:13491910-13491940
  hypo

SEQ ID NO: 179721 - DNA, 19 bp, Homo sapiens
  chr16:13534500-13534519
  hypo
ggtggccgggtgcggcggc

SEQ ID NO: 179722 - DNA, 81 bp, Homo sapiens
  chr16:13643877-13643958
  hypo
tcaaaaaaaaaaaaaataaagtatatatattagagctgagaactcaatgatgagaaggagtgaccccgggaagatctagaa

SEQ ID NO: 179723 - DNA, 19 bp, Homo sapiens
  chr16:13648595-13648614
  hypo
gcttcggcctcccaaagag

SEQ ID NO: 179724 - DNA, 46 bp, Homo sapiens; identical to SEQ ID NO: 89985
  chr16:13740877-13740923
  hypo

SEQ ID NO: 179725 - DNA, 178 bp, Homo sapiens; identical to SEQ ID NO: 52830
  chr16:13877529-13877707
  hypo

SEQ ID NO: 179726 - DNA, 207 bp, Homo sapiens
  chr16:13977141-13977348
  hypo
atcccgcagtgagagacgaatctctattctcctgctgatacatccatcagcatccttaatcatcctccttccgcggaggtttatcatccttctagttattctattactcactctgctattaagagggcaagaaccatttcatttttatgttgcctgatcatatcattcagctggaaaacatcgttaaggaaccgcagcgtaaaagcc

SEQ ID NO: 179727 - DNA, 31 bp, Homo sapiens; identical to SEQ ID NO: 89987
  chr16:14095398-14095429
  hypo

SEQ ID NO: 179728 - DNA, 30 bp, Homo sapiens; identical to SEQ ID NO: 89988
  chr16:14169295-14169325
  hypo

SEQ ID NO: 179729 - DNA, 30 bp, Homo sapiens; identical to SEQ ID NO: 89989
  chr16:14357873-14357903
  hypo

SEQ ID NO: 179730 - DNA, 380 bp, Homo sapiens; identical to SEQ ID NO: 126846
  chr16:14396709-14397089
  hypo

SEQ ID NO: 179731 - DNA, 84 bp, Homo sapiens
  chr16:14494053-14494137
  hypo
ggaatccacaggccccgggctgaacgtggaactaatttgggaggcaatgagaaagagcggaacataacgcggagcccgggaggc

SEQ ID NO: 179732 - DNA, 30 bp, Homo sapiens
  chr16:14494367-14494397
  hypo
ctgagcctcagctgccgcatctgtgaatgt

SEQ ID NO: 179733 - DNA, 36 bp, Homo sapiens
  chr16:14525416-14525452
  hypo
caagcccgctgggcgcggtggctcaagcctgtaatc

SEQ ID NO: 179734 - DNA, 96 bp, Homo sapiens
  chr16:14525691-14525787
  hypo
gacactctgtctaaaaaaagaaaaaaagaaagaaaataagcaagccatacattgggactaaatatttgcaaaacaactatccgacagaggactgat

SEQ ID NO: 179735 - DNA, 30 bp, Homo sapiens
  chr16:14529699-14529729
  hypo
gtgatctgtttcaacggagaatgggctggg

SEQ ID NO: 179736 - DNA, 30 bp, Homo sapiens
  chr16:14570604-14570634
  hypo
gtgagccacgtgggccggatttggtttgag

SEQ ID NO: 179737 - DNA, 78 bp, Homo sapiens; identical to SEQ ID NO: 89992
  chr16:14632541-14632619
  hypo

SEQ ID NO: 179738 - DNA, 31 bp, Homo sapiens; identical to SEQ ID NO: 89993
  chr16:14642089-14642120
  hypo

SEQ ID NO: 179739 - DNA, 30 bp, Homo sapiens
  chr16:14679011-14679041
  hypo
ttcaaatactgctgccggtctaccattccc

SEQ ID NO: 179740 - DNA, 30 bp, Homo sapiens
  chr16:14679341-14679371
  hypo
acacaaacacttgttcggtaggctccacat

SEQ ID NO: 179741 - DNA, 30 bp, Homo sapiens
  chr16:14688985-14689015
  hypo
taaatgtacttctcgcgaggtatgggttag

SEQ ID NO: 179742 - DNA, 70 bp, Homo sapiens
  chr16:14692497-14692567
  hypo
ttccaactttctattcgactttaatcgccccacttacttgagcaagagaagtcctcgtgagccaaccctc

SEQ ID NO: 179743 - DNA, 30 bp, Homo sapiens
  chr16:14696195-14696225
  hypo
tcttctcattcctcacgtactctgcagttg

SEQ ID NO: 179744 - DNA, 30 bp, Homo sapiens
  chr16:14696471-14696501
  hypo
gtaaaggctaatctgcgtcttggccacaga

SEQ ID NO: 179745 - DNA, 181 bp, Homo sapiens; identical to SEQ ID NO: 89994
  chr16:14725659-14725840
  hypo

SEQ ID NO: 179746 - DNA, 102 bp, Homo sapiens
  chr16:14728322-14728424
  hypo
attctgttaataatgccgatcagccccacacagcaaactttgagtacctgtagatagtttgtcatctaaacctcacagcagggcggggctccgcagctcacg

SEQ ID NO: 179747 - DNA, 41 bp, Homo sapiens
  chr16:14728483-14728524
  hypo
agaccaacctaggcaacatagggagacgctgtctcttaaaa

SEQ ID NO: 179748 - DNA, 30 bp, Homo sapiens; identical to SEQ ID NO: 29001
  chr16:14729418-14729448
  hypo

SEQ ID NO: 179749 - DNA, 23 bp, Homo sapiens
  chr16:14729655-14729678
  hypo
ttttaatatttttagtagatacg

SEQ ID NO: 179750 - DNA, 87 bp, Homo sapiens; identical to SEQ ID NO: 89997
  chr16:14734690-14734777
  hypo

SEQ ID NO: 179751 - DNA, 39 bp, Homo sapiens; identical to SEQ ID NO: 29002
  chr16:14735317-14735356
  hypo

SEQ ID NO: 179752 - DNA, 30 bp, Homo sapiens
  chr16:14750271-14750301
  hypo
gcgaggctgaggctgcgctaaaccatgatc

SEQ ID NO: 179753 - DNA, 402 bp, Homo sapiens
  chr16:14761336-14761738
  hypo
gtaggcagaggtctcaggcaccggggacagaagacaaggacattcagcacgggcagccatgctcttcccagcacccagaaaaggcccagggcccggactcctgggtgtggtcatgagaagcgcctccgattcagcctcttctcttcttgtttcaggaccgtgcctcagaggatgtggagccatttctggaaagtatcaacgcaggggctttttgtggccatgttctggcccctcatccctcagtttgtttgcaactgtttgttttactgggccctgtactttaacccaattattaacattgatcttgtggtcaaggaactccggcggctggaaacccaggtgttgtgactggcactgcccaggctgagactcttcaagtcccgctgacgtctgagctttgat

SEQ ID NO: 179754 - DNA, 153 bp, Homo sapiens; identical to SEQ ID NO: 29004
  chr16:14763026-14763179
  hypo

SEQ ID NO: 179755 - DNA, 30 bp, Homo sapiens; identical to SEQ ID NO: 29005
  chr16:15051574-15051604
  hypo

SEQ ID NO: 179756 - DNA, 30 bp, Homo sapiens
  chr16:15053035-15053065
  hypo
agtgcgttcatgtcccgttaatgtccccaa

SEQ ID NO: 179757 - DNA, 39 bp, Homo sapiens; identical to SEQ ID NO: 90002
  chr16:15055594-15055633
  hypo

SEQ ID NO: 179758 - DNA, 30 bp, Homo sapiens
  chr16:15122395-15122425
  hypo
gcctagttagatgatcgtggcactcacaga

SEQ ID NO: 179759 - DNA, 235 bp, Homo sapiens
  chr16:15122677-15122912
  hypo
ttttttttggtcagccgtgtttctgggagtgactccctttctgtgttttggtgtcagatccggtgtttaaagccgtcccagtgcccaacatgacaccttcaggagtcggccgggagaggcactcgtgtgacgcgctgaatcgctgggtgagaatggcagtcacccccctttcctttcaggtccccgtccatcaccatccgacctgctggtgagggtgacgcgtgctcgtgtatgg

SEQ ID NO: 179760 - DNA, 30 bp, Homo sapiens; identical to SEQ ID NO: 90003
  chr16:15126912-15126942
  hypo

SEQ ID NO: 179761 - DNA, 30 bp, Homo sapiens; identical to SEQ ID NO: 90004
  chr16:15127168-15127198
  hypo

SEQ ID NO: 179762 - DNA, 143 bp, Homo sapiens; identical to SEQ ID NO: 29006
  chr16:15129341-15129484
  hypo

SEQ ID NO: 179763 - DNA, 30 bp, Homo sapiens; identical to SEQ ID NO: 90006
  chr16:15130663-15130693
  hypo

SEQ ID NO: 179764 - DNA, 30 bp, Homo sapiens; identical to SEQ ID NO: 90007
  chr16:15148377-15148407
  hypo

SEQ ID NO: 179765 - DNA, 77 bp, Homo sapiens
  chr16:15191478-15191555
  hypo
acagagtgagactccgtctccaaaaaaaaaaaaaagaacataatgaacacctgtgaacatatcgcccaatttaagaa

SEQ ID NO: 179766 - DNA, 30 bp, Homo sapiens
  chr16:15532616-15532646
  hypo
ctgttttctagatgcgtgtttgcacgcagg

SEQ ID NO: 179767 - DNA, 192 bp, Homo sapiens; identical to SEQ ID NO: 90009
  chr16:15541439-15541631
  hypo

SEQ ID NO: 179768 - DNA, 30 bp, Homo sapiens
  chr16:15556811-15556841
  hypo
actttgcctgtaaaccgcggagagtttcaa

SEQ ID NO: 179769 - DNA, 94 bp, Homo sapiens
  chr16:15602902-15602996
  hypo
ggagcctggcaccaccgcctccatcctcccccggggatggaggtaaaatgccagttcctgggatgtgattaattctcttcgtcccacgcctcgc

SEQ ID NO: 179770 - DNA, 76 bp, Homo sapiens; identical to SEQ ID NO: 90010
  chr16:15604260-15604336
  hypo

SEQ ID NO: 179771 - DNA, 104 bp, Homo sapiens
  chr16:15606080-15606184
  hypo
ttactgagaatccaacgtctgctgaacaactcagggccgggagagtcccacaggtggacaaatgcatcaggtggactcctagaagagggcgctgttctatctag

SEQ ID NO: 179772 - DNA, 315 bp, Homo sapiens; identical to SEQ ID NO: 29007
  chr16:15606939-15607254
  hypo

SEQ ID NO: 179773 - DNA, 19 bp, Homo sapiens
  chr16:15607464-15607483
  hypo
gtgtctgcccaggcgcggt

SEQ ID NO: 179774 - DNA, 121 bp, Homo sapiens
  chr16:15607782-15607903
  hypo
acacatattatatatataaaaaaccacatatattcatatatgtatatacacacacatatttatatatccgtatgtatgctcacgcttgtaatcccagcacttcaggaggccaagttgggag

SEQ ID NO: 179775 - DNA, 163 bp, Homo sapiens; identical to SEQ ID NO: 90014
  chr16:15608919-15609082
  hypo

SEQ ID NO: 179776 - DNA, 30 bp, Homo sapiens; identical to SEQ ID NO: 90015
  chr16:15610771-15610801
  hypo

SEQ ID NO: 179777 - DNA, 23 bp, Homo sapiens
  chr16:15623169-15623192
  hypo
accgcgcccggcggtgtttgttg

SEQ ID NO: 179778 - DNA, 44 bp, Homo sapiens; identical to SEQ ID NO: 90017
  chr16:15626663-15626707
  hypo

SEQ ID NO: 179779 - DNA, 30 bp, Homo sapiens
  chr16:15642901-15642931
  hypo
aggaatgactgcggccggatgtggtggttc

SEQ ID NO: 179780 - DNA, 92 bp, Homo sapiens; identical to SEQ ID NO: 29011
  chr16:15649665-15649757
  hypo

SEQ ID NO: 179781 - DNA, 30 bp, Homo sapiens
  chr16:15656640-15656670
  hypo
gctgatagaaactcacgggaacagtctgtg

SEQ ID NO: 179782 - DNA, 31 bp, Homo sapiens; identical to SEQ ID NO: 90019
  chr16:15680991-15681022
  hypo

SEQ ID NO: 179783 - DNA, 30 bp, Homo sapiens; identical to SEQ ID NO: 90020
  chr16:15692836-15692866
  hypo

SEQ ID NO: 179784 - DNA, 69 bp, Homo sapiens; identical to SEQ ID NO: 90021
  chr16:15693240-15693309
  hypo

SEQ ID NO: 179785 - DNA, 248 bp, Homo sapiens
  chr16:15704141-15704389
  hypo
atcaatgttctgcaggagcaccgtttaagaaccagataatagaaggaggatacgaccatacagtcaccccttggtgttctcaagggatcgggtccaggaccctgcctggataccaaaatccgcacctactcaagtcttgcggtctgccccgcggaaactgcagacacgaaaaattggcccccagtatccatgagtttcgcatccctcaaatactgtactttctacccgtaactggacctgtgcagttc

SEQ ID NO: 179786 - DNA, 84 bp, Homo sapiens; identical to SEQ ID NO: 90023
  chr16:15707173-15707257
  hypo

SEQ ID NO: 179787 - DNA, 83 bp, Homo sapiens
  chr16:15707962-15708045
  hypo
aacgtggaccaaaatgactttcgaaggtaaatctgcattaagtggtatttccttcaaatacctgaaagtacttttttttttaa

SEQ ID NO: 179788 - DNA, 20 bp, Homo sapiens
  chr16:15709469-15709489
  hypo
gactccgtctcaaaaaaaat

SEQ ID NO: 179789 - DNA, 30 bp, Homo sapiens; identical to SEQ ID NO: 90026
  chr16:15710112-15710142
  hypo

SEQ ID NO: 179790 - DNA, 46 bp, Homo sapiens; identical to SEQ ID NO: 90027
  chr16:15710352-15710398
  hypo

SEQ ID NO: 179791 - DNA, 30 bp, Homo sapiens
  chr16:15718904-15718934
  hypo
ccccgagtttttcggcgtcgacactgcagc

SEQ ID NO: 179792 - DNA, 261 bp, Homo sapiens; identical to SEQ ID NO: 90028
  chr16:15723201-15723462
  hypo

SEQ ID NO: 179793 - DNA, 30 bp, Homo sapiens; identical to SEQ ID NO: 90029
  chr16:15723815-15723845
  hypo

SEQ ID NO: 179794 - DNA, 20 bp, Homo sapiens
  chr16:15724975-15724995
  hypo
aaactccatctcaaaataaa

SEQ ID NO: 179795 - DNA, 105 bp, Homo sapiens; identical to SEQ ID NO: 90030
  chr16:15728111-15728216
  hypo

SEQ ID NO: 179796 - DNA, 128 bp, Homo sapiens; identical to SEQ ID NO: 90031
  chr16:15729536-15729664
  hypo

SEQ ID NO: 179797 - DNA, 182 bp, Homo sapiens; identical to SEQ ID NO: 90032
  chr16:15729932-15730114
  hypo

SEQ ID NO: 179798 - DNA, 44 bp, Homo sapiens
  chr16:15738993-15739037
  hypo
ctcgaactcctagcctcaagtgatcctcccgcctcggcctcttt

SEQ ID NO: 179799 - DNA, 30 bp, Homo sapiens
  chr16:15740143-15740173
  hypo
ccgaggggggccaggcgcagtggctcacgc

SEQ ID NO: 179800 - DNA, 102 bp, Homo sapiens; identical to SEQ ID NO: 90034
  chr16:15746762-15746864
  hypo

SEQ ID NO: 179801 - DNA, 100 bp, Homo sapiens; identical to SEQ ID NO: 90035
  chr16:15747493-15747593
  hypo

SEQ ID NO: 179802 - DNA, 95 bp, Homo sapiens; identical to SEQ ID NO: 90036
  chr16:15762689-15762784
  hypo

SEQ ID NO: 179803 - DNA, 110 bp, Homo sapiens
  chr16:15767614-15767724
  hypo
ccacctgaggtgctgggattgcggcatgaggcaccgcacctggctctgggtgtttggtgaaggaaagtaatttggaagcagagcaggaatagaatcgagagagcacggga

SEQ ID NO: 179804 - DNA, 137 bp, Homo sapiens; identical to SEQ ID NO: 90038
  chr16:15798617-15798754
  hypo

SEQ ID NO: 179805 - DNA, 83 bp, Homo sapiens; identical to SEQ ID NO: 29018
  chr16:15799466-15799549
  hypo

SEQ ID NO: 179806 - DNA, 79 bp, Homo sapiens; identical to SEQ ID NO: 90040
  chr16:15808721-15808800
  hypo

SEQ ID NO: 179807 - DNA, 30 bp, Homo sapiens; identical to SEQ ID NO: 90041
  chr16:15814791-15814821
  hypo

SEQ ID NO: 179808 - DNA, 30 bp, Homo sapiens
  chr16:15818801-15818831
  hypo
cttcccctcggcctcgttaagcatccctgt

SEQ ID NO: 179809 - DNA, 337 bp, Homo sapiens
  chr16:15820528-15820865
  hypo
ggtttttttaatatttaattgaacagggagatcatcgcctctcctccaggaacgcaactagaggaaaggacttgccttgcagcaagagagacctcagcgagccgggaagaggctcctccccacagaactgggcaccacccagcactgcccaccacaccaccgcgccacctcctcacctgcagcttgtggactttgtcattgagctccgcccgggcccgctccccatcgctgcacttggactgcagctcctgcacctgcgcctccagcttcttcttcttatgttccacctcctgcttggcctggcccaggacccgcagctccccggccaggtctgcgt

SEQ ID NO: 179810 - DNA, 30 bp, Homo sapiens; identical to SEQ ID NO: 90043
  chr16:15826453-15826483
  hypo

SEQ ID NO: 179811 - DNA, 142 bp, Homo sapiens
  chr16:15843924-15844066
  hypo
tggggacgctgtgaccgcttgggacagccctggcttctgggagccccagggtctgggcggcgggcctcaccctcttctcgtggttggggatgatgcagcgcacgaagttgggcgtggtgttgcgtagcgtggtcatcagctt

SEQ ID NO: 179812 - DNA, 30 bp, Homo sapiens
  chr16:15852166-15852196
  hypo
atgtgaaaacagaggcgcagagagaaagtg

SEQ ID NO: 179813 - DNA, 30 bp, Homo sapiens
  chr16:15877931-15877961
  hypo
agctggggccttaccgcgccaccaaagcta

SEQ ID NO: 179814 - DNA, 211 bp, Homo sapiens; identical to SEQ ID NO: 126862
  chr16:15952215-15952426
  hypo

SEQ ID NO: 179815 - DNA, 84 bp, Homo sapiens; identical to SEQ ID NO: 90045
  chr16:15979201-15979285
  hypo

SEQ ID NO: 179816 - DNA, 43 bp, Homo sapiens
  chr16:15991505-15991548
  hypo
actcacttaaaatattttacccggcacttgaagaaaacatttg

SEQ ID NO: 179817 - DNA, 77 bp, Homo sapiens
  chr16:16019073-16019150
  hypo
gcctgtgcaacgtggcaaaaccagagtggggccttgtctcattttaaaaagtaataagagaccgagcacgggaactc

SEQ ID NO: 179818 - DNA, 32 bp, Homo sapiens
  chr16:16022602-16022634
  hypo
gcacacgcacacgcacacgcgcgcgcgcacac

SEQ ID NO: 179819 - DNA, 36 bp, Homo sapiens
  chr16:16041978-16042014
  hypo
gaaatttacactctgcggcctcgccctagctcctct

SEQ ID NO: 179820 - DNA, 31 bp, Homo sapiens; identical to SEQ ID NO: 29020
  chr16:16047431-16047462
  hypo

SEQ ID NO: 179821 - DNA, 31 bp, Homo sapiens; identical to SEQ ID NO: 29021
  chr16:16080203-16080234
  hypo

SEQ ID NO: 179822 - DNA, 40 bp, Homo sapiens; identical to SEQ ID NO: 90050
  chr16:16090900-16090940
  hypo

SEQ ID NO: 179823 - DNA, 30 bp, Homo sapiens; identical to SEQ ID NO: 90051
  chr16:16095331-16095361
  hypo

SEQ ID NO: 179824 - DNA, 196 bp, Homo sapiens; identical to SEQ ID NO: 29022
  chr16:16103292-16103488
  hypo

SEQ ID NO: 179825 - DNA, 25 bp, Homo sapiens
  chr16:16113239-16113264
  hypo
tgtgagccaccgtgtctggccgagc

SEQ ID NO: 179826 - DNA, 30 bp, Homo sapiens
  chr16:16161084-16161114
  hypo
gcgtccctgtcgtttcgagcaccttgcctc

SEQ ID NO: 179827 - DNA, 235 bp, Homo sapiens
  chr16:16180667-16180902
  hypo
tgtctctccccagggcgtgaacctgtctgggggccagaagcagcgcgtgagcctggcccgggccgtgtactccaacgctgacatttacctcttcgatgatcccctctcagcagtggatgcccatgtgggaaaacacatctttgaaaatgtgattggccccaaggggatgctgaagaacaaggtgcctgctggcggggtggggcttggtgttgggccgtctcgccctttggttaag

SEQ ID NO: 179828 - DNA, 30 bp, Homo sapiens; identical to SEQ ID NO: 29023
  chr16:16184284-16184314
  hypo

SEQ ID NO: 179829 - DNA, 30 bp, Homo sapiens
  chr16:16188053-16188083
  hypo
gctctgtaggtccggcgacgcaacttaggt

SEQ ID NO: 179830 - DNA, 78 bp, Homo sapiens
  chr16:16188312-16188390
  hypo
ttgtggccttttgtacgtgcatacctttgatggcctgggcgctttcaggagtgttctttttctttttcttttttttga

SEQ ID NO: 179831 - DNA, 307 bp, Homo sapiens; identical to SEQ ID NO: 90054
  chr16:16208593-16208900
  hypo

SEQ ID NO: 179832 - DNA, 207 bp, Homo sapiens; identical to SEQ ID NO: 29025
  chr16:16219543-16219750
  hypo

SEQ ID NO: 179833 - DNA, 225 bp, Homo sapiens; identical to SEQ ID NO: 90056
  chr16:16227958-16228183
  hypo

SEQ ID NO: 179834 - DNA, 44 bp, Homo sapiens
  chr16:16245754-16245798
  hypo
aaagtgtgtgggtggcggggcacggcggctcacacctgtaatcc

SEQ ID NO: 179835 - DNA, 280 bp, Homo sapiens; identical to SEQ ID NO: 90057
  chr16:16259431-16259711
  hypo

SEQ ID NO: 179836 - DNA, 187 bp, Homo sapiens; identical to SEQ ID NO: 90058
  chr16:16282898-16283085
  hypo

SEQ ID NO: 179837 - DNA, 22 bp, Homo sapiens
  chr16:16574095-16574117
  hypo
cggccctgaattcacttttgtg

SEQ ID NO: 179838 - DNA, 27 bp, Homo sapiens
  chr16:16663219-16663246
  hypo
tttgttgttgagaggaagtctcgctct

SEQ ID NO: 179839 - DNA, 43 bp, Homo sapiens
  chr16:17054604-17054647
  hypo
attgagtcatttgcccaaggtcgcacctctagcaggtgtgggg

SEQ ID NO: 179840 - DNA, 22 bp, Homo sapiens
  chr16:17078108-17078130
  hypo
gaagtcacttaatacaaatgcc

SEQ ID NO: 179841 - DNA, 30 bp, Homo sapiens
  chr16:17200742-17200772
  hypo
tctttgcgtggtgttcgatgcccctgcttt

SEQ ID NO: 179842 - DNA, 30 bp, Homo sapiens
  chr16:17285885-17285915
  hypo
tttgccccaagacaccggacttaggaaaag

SEQ ID NO: 179843 - DNA, 76 bp, Homo sapiens; identical to SEQ ID NO: 90062
  chr16:17294378-17294454
  hypo

SEQ ID NO: 179844 - DNA, 139 bp, Homo sapiens
  chr16:17357448-17357587
  hypo
gagaggcgcagtcagcgagaattggaggcctgagaatttctgtccctcagagtcactgtcattttctatagtgactgcggcgttctctctggcttccccccttcaattcatttttttcttttcttttcttttttgagat

SEQ ID NO: 179845 - DNA, 22 bp, Homo sapiens
  chr16:17477886-17477908
  hypo
gagccaccgcgccggcccctaa

SEQ ID NO: 179846 - DNA, 30 bp, Homo sapiens; identical to SEQ ID NO: 10557
  chr16:17481113-17481143
  hypo

SEQ ID NO: 179847 - DNA, 30 bp, Homo sapiens
  chr16:17511463-17511493
  hypo
taacaaagaagccggcgtgtgctagttcac

SEQ ID NO: 179848 - DNA, 30 bp, Homo sapiens
  chr16:17525554-17525584
  hypo
atcaatgcaggtaaacgaatccattcgaag

SEQ ID NO: 179849 - DNA, 30 bp, Homo sapiens
  chr16:17550473-17550503
  hypo
aggcatgtgccaccacgcccggcaacagta

SEQ ID NO: 179850 - DNA, 43 bp, Homo sapiens; identical to SEQ ID NO: 29029
  chr16:17754965-17755008
  hypo

SEQ ID NO: 179851 - DNA, 30 bp, Homo sapiens
  chr16:17939839-17939869
  hypo
tgcatggacagaacacgacagagggagatt

SEQ ID NO: 179852 - DNA, 30 bp, Homo sapiens
  chr16:18019796-18019826
  hypo
aacaaaacggagcagcgagcgagccatcac

SEQ ID NO: 179853 - DNA, 38 bp, Homo sapiens
  chr16:18036045-18036083
  hypo
cctagatcccttgcacgtgcagttcacacagggttcct

SEQ ID NO: 179854 - DNA, 51 bp, Homo sapiens; identical to SEQ ID NO: 90066
  chr16:18076375-18076426
  hypo

SEQ ID NO: 179855 - DNA, 30 bp, Homo sapiens; identical to SEQ ID NO: 10559
  chr16:18178839-18178869
  hypo

SEQ ID NO: 179856 - DNA, 205 bp, Homo sapiens
  chr16:18802482-18802687
  hypo
tttttaattaaaaagttaagttcagacaaaagtcacccaacagttgtttactgagcacccatgtaccagacgctagcaaggccctggggtacgaggtgcccacacaggcaccatttagccagttctgtccctgccggttcttccagcttcgtcctctctcacacgtcaatgcccctgctcattcgttgcatttcctcttccctct

SEQ ID NO: 179857 - DNA, 250 bp, Homo sapiens; identical to SEQ ID NO: 90069
  chr16:18804299-18804549
  hypo

SEQ ID NO: 179858 - DNA, 29 bp, Homo sapiens
  chr16:18814226-18814255
  hypo
cttgacacgacctttcttccattagaggt

SEQ ID NO: 179859 - DNA, 30 bp, Homo sapiens
  chr16:18814457-18814487
  hypo
agtagccaccgcgcccggccgatttttcat

SEQ ID NO: 179860 - DNA, 44 bp, Homo sapiens
  chr16:18884773-18884817
  hypo
gctcaggtgatctgcccccctcggtctcccgagggattacaggc

SEQ ID NO: 179861 - DNA, 30 bp, Homo sapiens
  chr16:18885315-18885345
  hypo
gtaactggtaataagcgaagcagctatgga

SEQ ID NO: 179862 - DNA, 34 bp, Homo sapiens; identical to SEQ ID NO: 29032
  chr16:18950991-18951025
  hypo

SEQ ID NO: 179863 - DNA, 31 bp, Homo sapiens; identical to SEQ ID NO: 90072
  chr16:19026859-19026890
  hypo

SEQ ID NO: 179864 - DNA, 21 bp, Homo sapiens
  chr16:19040620-19040641
  hypo
ccggcacgagatttgcacttc

SEQ ID NO: 179865 - DNA, 161 bp, Homo sapiens; identical to SEQ ID NO: 90074
  chr16:19051021-19051182
  hypo

SEQ ID NO: 179866 - DNA, 20 bp, Homo sapiens
  chr16:19075686-19075706
  hypo
gtgtgtgtgtttgagacgaa

SEQ ID NO: 179867 - DNA, 37 bp, Homo sapiens
  chr16:19085557-19085594
  hypo
aaaaaaaaggccgggcgtgatggctcacacctgtaat

SEQ ID NO: 179868 - DNA, 30 bp, Homo sapiens
  chr16:19088806-19088836
  hypo
agagaaaaccaatgacgttgctttgacaaa

SEQ ID NO: 179869 - DNA, 43 bp, Homo sapiens; identical to SEQ ID NO: 29034
  chr16:19184225-19184268
  hypo

SEQ ID NO: 179870 - DNA, 356 bp, Homo sapiens; identical to SEQ ID NO: 90077
  chr16:19185276-19185632
  hypo

SEQ ID NO: 179871 - DNA, 90 bp, Homo sapiens; identical to SEQ ID NO: 90078
  chr16:19252127-19252217
  hypo

SEQ ID NO: 179872 - DNA, 31 bp, Homo sapiens; identical to SEQ ID NO: 90079
  chr16:19252578-19252609
  hypo

SEQ ID NO: 179873 - DNA, 30 bp, Homo sapiens; identical to SEQ ID NO: 29036
  chr16:19412005-19412035
  hypo

SEQ ID NO: 179874 - DNA, 159 bp, Homo sapiens
  chr16:19431053-19431212
  hypo
ttattgtcatactttgccagaaaaggtcctgtccccagaagacagggtcaagttcaagctatagagtatcttcataaacacttaatgaataacgcaatgaatcatatttgccaagatttttcgggatgacgtggcaggaggtgacgctattattgctca

SEQ ID NO: 179875 - DNA, 32 bp, Homo sapiens
  chr16:19456419-19456451
  hypo
cagcctgggcagtagagcgagactctgttaaa

SEQ ID NO: 179876 - DNA, 82 bp, Homo sapiens
  chr16:19485544-19485626
  hypo
gcttgtggagaggtacgagatgccacggcacgaagtctacgttctcctgatccggtaggtgatgtgtcgcgcccaacaccag

SEQ ID NO: 179877 - DNA, 31 bp, Homo sapiens; identical to SEQ ID NO: 90083
  chr16:19498384-19498415
  hypo

SEQ ID NO: 179878 - DNA, 131 bp, Homo sapiens; identical to SEQ ID NO: 90084
  chr16:19528377-19528508
  hypo

SEQ ID NO: 179879 - DNA, 27 bp, Homo sapiens
  chr16:19531558-19531585
  hypo
tttaaaagtataaatcttggccgggca

SEQ ID NO: 179880 - DNA, 27 bp, Homo sapiens
  chr16:19534827-19534854
  hypo
tggaattataggcgtaagccatcacgc

SEQ ID NO: 179881 - DNA, 46 bp, Homo sapiens
  chr16:19568730-19568776
  hypo
gttgagacggagtctcgcccaggcttgattgcagtggcgtgatctt

SEQ ID NO: 179882 - DNA, 258 bp, Homo sapiens
  chr16:19606511-19606769
  hypo
cagaggagggaggtgatcccacgtgggatttaacaggctccgtgttgagactagactgtagggcgggggtagagcccggagcctgtggcagcacttgcggtgagaggcaggggtggcttggccccgggaggcggtggagatggtgaggagagacccaggatggatgagggctttaggttctcaggttagatgtcaaatcatacactgctggtccttgacgtgtccatgcacacagcttaccttcggcgagtgtgaggc

SEQ ID NO: 179883 - DNA, 34 bp, Homo sapiens
  chr16:19630524-19630558
  hypo
gatcacagacaagagccaccgtgcccagccgccc

SEQ ID NO: 179884 - DNA, 93 bp, Homo sapiens
  chr16:19665685-19665778
  hypo
tcactaggacaggcacgtgtcttcattgtgtgtaggtcaacatggaactttctcctactgcttgctttggtaagaatgatgggttatcgggag

SEQ ID NO: 179885 - DNA, 87 bp, Homo sapiens
  chr16:19706324-19706411
  hypo
ttcagaaaaaaaaaaaaaaaagacagagctcaagtgatccgcccaccttggccttgggctcccaaagtgctgcggattctgggcgta

SEQ ID NO: 179886 - DNA, 242 bp, Homo sapiens; identical to SEQ ID NO: 90086
  chr16:19708366-19708608
  hypo

SEQ ID NO: 179887 - DNA, 225 bp, Homo sapiens; identical to SEQ ID NO: 29038
  chr16:19719065-19719290
  hypo

SEQ ID NO: 179888 - DNA, 101 bp, Homo sapiens; identical to SEQ ID NO: 90088
  chr16:19743741-19743842
  hypo

SEQ ID NO: 179889 - DNA, 186 bp, Homo sapiens; identical to SEQ ID NO: 29039
  chr16:19845504-19845690
  hypo

SEQ ID NO: 179890 - DNA, 23 bp, Homo sapiens
  chr16:19848129-19848152
  hypo
ggctgatgcggaatgcttttgaa

SEQ ID NO: 179891 - DNA, 23 bp, Homo sapiens
  chr16:19877258-19877281
  hypo
tgtttttttttgagacggagtcc

SEQ ID NO: 179892 - DNA, 147 bp, Homo sapiens; identical to SEQ ID NO: 29041
  chr16:19883197-19883344
  hypo

SEQ ID NO: 179893 - DNA, 344 bp, Homo sapiens; identical to SEQ ID NO: 90092
  chr16:19904163-19904507
  hypo

SEQ ID NO: 179894 - DNA, 84 bp, Homo sapiens
  chr16:20335322-20335406
  hypo
gcgtctgtctggcatcggtgcacctggacacaggtctccgacatccttactcctccttcccctacaaagcggtaccagccgctc

SEQ ID NO: 179895 - DNA, 30 bp, Homo sapiens
  chr16:20638414-20638444
  hypo
gaaatttcaccaatgcgtgaaaaaatgtct

SEQ ID NO: 179896 - DNA, 30 bp, Homo sapiens
  chr16:20638860-20638890
  hypo
atatcaattctgccacgtgcggtggctcac

SEQ ID NO: 179897 - DNA, 36 bp, Homo sapiens; identical to SEQ ID NO: 90093
  chr16:20702407-20702443
  hypo

SEQ ID NO: 179898 - DNA, 30 bp, Homo sapiens; identical to SEQ ID NO: 90094
  chr16:20709533-20709563
  hypo

SEQ ID NO: 179899 - DNA, 165 bp, Homo sapiens; identical to SEQ ID NO: 90095
  chr16:20754569-20754734
  hypo

SEQ ID NO: 179900 - DNA, 40 bp, Homo sapiens; identical to SEQ ID NO: 29045
  chr16:20803221-20803261
  hypo

SEQ ID NO: 179901 - DNA, 80 bp, Homo sapiens
  chr16:20816393-20816473
  hypo
agaaatatgcacagcgcatccaggaatcagggaggacacaataattcatattgtgaattaaaaggatcactaggccaggc

SEQ ID NO: 179902 - DNA, 212 bp, Homo sapiens; identical to SEQ ID NO: 52865
  chr16:20817421-20817633
  hypo

SEQ ID NO: 179903 - DNA, 76 bp, Homo sapiens
  chr16:20822043-20822119
  hypo
ctaacaatgagaaacccgacacccaacatcttcagtatatttgatcaatccttattgctgccgctgacccaccctc

SEQ ID NO: 179904 - DNA, 101 bp, Homo sapiens; identical to SEQ ID NO: 90100
  chr16:20823437-20823538
  hypo

SEQ ID NO: 179905 - DNA, 24 bp, Homo sapiens
  chr16:20902610-20902634
  hypo
gccgattttctttaattagttttt

SEQ ID NO: 179906 - DNA, 140 bp, Homo sapiens
  chr16:20966045-20966185
  hypo
gcgcaagcttaaacacgcacctggaaacacacctatatgtgtctgatatcctttccctcaggccactcaggtgcactgtcatcgcttacctagggggccgaagtttcttctctcttgaacaacggcgtggaagaaacaaa

SEQ ID NO: 179907 - DNA, 30 bp, Homo sapiens
  chr16:20976234-20976264
  hypo
ggatccccagctgtcgggcagcttcggtcc

SEQ ID NO: 179908 - DNA, 158 bp, Homo sapiens; identical to SEQ ID NO: 90102
  chr16:21174563-21174721
  hypo

SEQ ID NO: 179909 - DNA, 54 bp, Homo sapiens; identical to SEQ ID NO: 90103
  chr16:21178769-21178823
  hypo

SEQ ID NO: 179910 - DNA, 32 bp, Homo sapiens; identical to SEQ ID NO: 90104
  chr16:21179023-21179055
  hypo

SEQ ID NO: 179911 - DNA, 30 bp, Homo sapiens
  chr16:21279725-21279755
  hypo
tggagggtggggcagcggcctcaccaggag

SEQ ID NO: 179912 - DNA, 30 bp, Homo sapiens
  chr16:21515316-21515346
  hypo
acaaaaattacccggcgtggtagcgcgtgc

SEQ ID NO: 179913 - DNA, 121 bp, Homo sapiens
  chr16:21515405-21515526
  hypo
aggctgcagtgacctatgatcctgccactgcactccaggctgggctgcggagggtagggagggagggagaagaagaaagagaaaacgcggggcaccatggatggctgactcctgtaatccc

SEQ ID NO: 179914 - DNA, 90 bp, Homo sapiens
  chr16:21526520-21526610
  hypo
taaataaataaataaataaaataaatcactttctatggcttttcactgctccaggaacaatgtccacagatcaaacgccgagcctctcct

SEQ ID NO: 179915 - DNA, 234 bp, Homo sapiens
  chr16:21535691-21535925
  hypo
cagcgctgctttcttcggctactttgccccgcctctcagttttggggacagtggctgcagggcagatgccattcaaccaggtcaaatttccatgtgaggatggaaatttgtaggttataattcaattctctattttgaaaaatatccaggtggatattgtttaccaccaaaacaatgacttctattgtgtgggcccgaaaaccaggctgatgcatgctacggcatgggtgtgtg

SEQ ID NO: 179916 - DNA, 192 bp, Homo sapiens
  chr16:21539167-21539359
  hypo
agaccaatggcgctgcgagcttctggggcgtgggctgggcccagcatgtcagtgcgacccacagcggggctggagctgctgaatgtgcacaacacacttcaccccgggcctggttcaggagcgggcaaggcagctgtacaccctgtccttcagcaaactcctcttgatcgatggaatcgaagtcaggagcat

SEQ ID NO: 179917 - DNA, 41 bp, Homo sapiens
  chr16:21541460-21541501
  hypo
ttgatccagacccgacgcggtgactcatgccagtaatctca

SEQ ID NO: 179918 - DNA, 130 bp, Homo sapiens
  chr16:21566610-21566740
  hypo
ttaaaaactggaaagccgtgtttcgctgctcttcctgtagacaatacagcatgggggcaggagtggggtctggagtcggacgcacgttcagaggctggggtcacttctcccaaaccgtgtgcagtcggac

SEQ ID NO: 179919 - DNA, 93 bp, Homo sapiens
  chr16:21567012-21567105
  hypo
aggggcaaaggctctcgctggccaggttctggcgtgtcccgggcaccacgcatcctgtccatgagctcacgtcgttgtcgtgatggagaaggc

SEQ ID NO: 179920 - DNA, 30 bp, Homo sapiens
  chr16:21568495-21568525
  hypo
caggcaggcaggggccgcagccactgcaag

SEQ ID NO: 179921 - DNA, 624 bp, Homo sapiens
  chr16:21569155-21569779
  hypo
taaaattgctatcatcactggcatcgtcatcatctcactacagcagagatccgcagttccccgaaacaaataccacgagtctcaaggtaagacctgcacgtaaggatgtcgaaagataaatatgtcttaagaacatgtccatgagaaggggctttgccagccatgcaagcataaaagaagaaaagtccctcattcatccaaaaacacccgctgagtttctcccgcgtgccgggcaccacgctcagtacgggggacagagggaggaggctctaggctctgacttgcccttgcagagcttggaatccaggagtgtcagacggtggtagagataaaaagctgtgtgtctgagaggtgagggcgtgggctttggggccctaaacttgcttgggacgcccgggagggcccccgtggaagcggcgtttcagtggagccctgaagatgggtttctatttgtcaggtgaagataatggcagctccaggcagaaagggacgaccagcggaaaggaccctggtgagagcagccaccacgacggaacaggcagaagcaccagctggcaaaggcactgtcaggggcagcgggagatgggattggaagggcaacagggttggcgcccgtggtggcaa

SEQ ID NO: 179922 - DNA, 24 bp, Homo sapiens
  chr16:21609382-21609406
  hypo
gctgttgggccaggtgcggtggct

SEQ ID NO: 179923 - DNA, 41 bp, Homo sapiens; identical to SEQ ID NO: 29052
  chr16:21633193-21633234
  hypo

SEQ ID NO: 179924 - DNA, 81 bp, Homo sapiens; identical to SEQ ID NO: 90109
  chr16:21635697-21635778
  hypo

SEQ ID NO: 179925 - DNA, 128 bp, Homo sapiens; identical to SEQ ID NO: 90110
  chr16:21666677-21666805
  hypo

SEQ ID NO: 179926 - DNA, 430 bp, Homo sapiens; identical to SEQ ID NO: 52874
  chr16:21831534-21831964
  hypo

SEQ ID NO: 179927 - DNA, 30 bp, Homo sapiens
  chr16:22038569-22038599
  hypo
ggtttgtggaaaatgcgccacttgtctggg

SEQ ID NO: 179928 - DNA, 81 bp, Homo sapiens; identical to SEQ ID NO: 29056
  chr16:22083798-22083879
  hypo

SEQ ID NO: 179929 - DNA, 81 bp, Homo sapiens
  chr16:22084118-22084199
  hypo
ctccatctcaaaaaaaaaaaaaaaaagtgtattgattttcttatatacagtatgccttctgtttgtcgattagcattagct

SEQ ID NO: 179930 - DNA, 30 bp, Homo sapiens; identical to SEQ ID NO: 90114
  chr16:22176858-22176888
  hypo

SEQ ID NO: 179931 - DNA, 44 bp, Homo sapiens; identical to SEQ ID NO: 90115
  chr16:22216592-22216636
  hypo

SEQ ID NO: 179932 - DNA, 43 bp, Homo sapiens; identical to SEQ ID NO: 90116
  chr16:22216815-22216858
  hypo

SEQ ID NO: 179933 - DNA, 231 bp, Homo sapiens; identical to SEQ ID NO: 52881
  chr16:22217231-22217462
  hypo

SEQ ID NO: 179934 - DNA, 124 bp, Homo sapiens; identical to SEQ ID NO: 90118
  chr16:22236966-22237090
  hypo

SEQ ID NO: 179935 - DNA, 30 bp, Homo sapiens
  chr16:22269890-22269920
  hypo
ggccacccctgctccgtcccctttcagaga

SEQ ID NO: 179936 - DNA, 30 bp, Homo sapiens; identical to SEQ ID NO: 90119
  chr16:22277955-22277985
  hypo

SEQ ID NO: 179937 - DNA, 91 bp, Homo sapiens; identical to SEQ ID NO: 29058
  chr16:22285048-22285139
  hypo

SEQ ID NO: 179938 - DNA, 30 bp, Homo sapiens
  chr16:22313472-22313502
  hypo
ctctcttcttccaggcgcacctaacgtgcc

SEQ ID NO: 179939 - DNA, 190 bp, Homo sapiens
  chr16:22324532-22324722
  hypo
aggaaatccaggtgtgtggggcgggacagtaaggctgagctggccgaggcctggagggtaaacagcagggcgaatttgatgaggattagctgcctagtgttgcaaagcgagcagctggggagaggggcgtggaaccagactgggaggtgggactgaaggaagtggcttcgaacagaagagtccaggttcc

SEQ ID NO: 179940 - DNA, 770 bp, Homo sapiens
  chr16:22325982-22326752
  hypo
tgtttggaagcccttgaggaccggggaacacgggcgtaatggacatggaggtggcgcagggagctcatcctgttctctccgtagcttattaggaccttagaaactcccttccgctctggggaacttagaaaaggcatcctgggcctgtctgctttaaggactctgctggctctggcgcctgggactctaatccccctcaagcctctgggctgggcaggcacgagcaagtataagccgttccctggcgtgtgcaggcagctctgggagggacacggttggaacggaatttaaacgacctgtgctaggaaaggaagggagagtggaaaacccctatacggagttctctggtcttctggcaggggctgagacggcagtccagcaagggtcacaggcctgacggtatgacctcttccccttcccaccgcaggtgcggttctcccggccggagtcagagcaggcccgccagcgccgtgtgcagtcctatgagttcctgcagaagaagcacgcagaggagccctgggtccacctgcattactatggcctgagggtgagcggggcttcgtggggtcctgggggaaacacctcggtgcccggaagggtcatggtgtggcctccgtgtctcaccttgaacttaagtcaaattcatgagtcatagccacagatagaggatcgagtcctgtgggcagtttacacttcactccagccgagccacttagcgtgggccccaggagagcaagaggaaaagatgcgagtccttggttccctgggtg

SEQ ID NO: 179941 - DNA, 30 bp, Homo sapiens; identical to SEQ ID NO: 29060
  chr16:22333249-22333279
  hypo

SEQ ID NO: 179942 - DNA, 30 bp, Homo sapiens
  chr16:22337560-22337590
  hypo
acggtgctggccgccggttgcaagcagata

SEQ ID NO: 179943 - DNA, 193 bp, Homo sapiens; identical to SEQ ID NO: 29061
  chr16:22358430-22358623
  hypo

SEQ ID NO: 179944 - DNA, 80 bp, Homo sapiens
  chr16:22398760-22398840
  hypo
cagctttcaaaaatcgttaagccatttgggatagaaatagttctaaaatgttttaagtgttgccacaatttctttatttc

SEQ ID NO: 179945 - DNA, 90 bp, Homo sapiens
  chr16:22411851-22411941
  hypo
tctcctacctcagcctcccaagtacctttaataatcttaagtggcttcttattgctttcagggtatttcgaaatgatgacattatgatgt

SEQ ID NO: 179946 - DNA, 30 bp, Homo sapiens; identical to SEQ ID NO: 90125
  chr16:22435187-22435217
  hypo

SEQ ID NO: 179947 - DNA, 154 bp, Homo sapiens
  chr16:22792388-22792542
  hypo
gccagcatgtctctaaattttaaagatgcgtatatatttgtggtaaaaatactgagatattcacgggaaagatccacaccaacttcagggttatgcttacatctgaggcggaaggtcgggaggagactagggcggagtatgtgcctggggtgac

SEQ ID NO: 179948 - DNA, 465 bp, Homo sapiens; identical to SEQ ID NO: 52887
  chr16:22825885-22826350
  hypo

SEQ ID NO: 179949 - DNA, 30 bp, Homo sapiens
  chr16:22902617-22902647
  hypo
actgagaaatttccacgcatcgtctcgaag

SEQ ID NO: 179950 - DNA, 30 bp, Homo sapiens; identical to SEQ ID NO: 90128
  chr16:23093084-23093114
  hypo

SEQ ID NO: 179951 - DNA, 43 bp, Homo sapiens
  chr16:23093840-23093883
  hypo
ttacagtgtgggcaacgccaggcatcatcgggggcaagctgaa

SEQ ID NO: 179952 - DNA, 35 bp, Homo sapiens
  chr16:23157623-23157658
  hypo
gatctcagctgggcacggtggctcacgcctgtaat

SEQ ID NO: 179953 - DNA, 203 bp, Homo sapiens; identical to SEQ ID NO: 52889
  chr16:23193695-23193898
  hypo

SEQ ID NO: 179954 - DNA, 437 bp, Homo sapiens; identical to SEQ ID NO: 126929
  chr16:23194200-23194637
  hypo

SEQ ID NO: 179955 - DNA, 31 bp, Homo sapiens
  chr16:23308001-23308032
  hypo
agcttgctgtggcctcgggcaatgagatcga

SEQ ID NO: 179956 - DNA, 486 bp, Homo sapiens; identical to SEQ ID NO: 126930
  chr16:23313252-23313738
  hypo

SEQ ID NO: 179957 - DNA, 297 bp, Homo sapiens; identical to SEQ ID NO: 52893
  chr16:23313779-23314076
  hypo

SEQ ID NO: 179958 - DNA, 34 bp, Homo sapiens
  chr16:23331327-23331361
  hypo
aaagtgctcagattacaggcgtgagccaccttgc

SEQ ID NO: 179959 - DNA, 97 bp, Homo sapiens; identical to SEQ ID NO: 90135
  chr16:23332277-23332374
  hypo

SEQ ID NO: 179960 - DNA, 30 bp, Homo sapiens; identical to SEQ ID NO: 29065
  chr16:23383324-23383354
  hypo

SEQ ID NO: 179961 - DNA, 185 bp, Homo sapiens; identical to SEQ ID NO: 29066
  chr16:23402108-23402293
  hypo

SEQ ID NO: 179962 - DNA, 156 bp, Homo sapiens; identical to SEQ ID NO: 90138
  chr16:23402870-23403026
  hypo

SEQ ID NO: 179963 - DNA, 360 bp, Homo sapiens
  chr16:23410366-23410726
  hypo
cgggagtgactccggcggtcatgtaggaactgctgtctgcagccacctgatgttggatccggttgcctgatcctttaagtagcattccgggaaaggaatgaccatgtccaaccctgggctcccagcccaggctcagcctcggcagccctccccgtgctctctagcgcccacttgattcggtcttattttctttgatgtaaatgagctcttttcttccccaccccaggtgcccccaacccttgtcctacagttttctagactctttgttcttgcctgcgaatgctcttttgtctcaaaagagcctacattttttccagctaactcccaatccagcgagaaggaacacgccaaccatccaca

SEQ ID NO: 179964 - DNA, 30 bp, Homo sapiens
  chr16:23410982-23411012
  hypo
gggcgattagagaagcggctggccatagga

SEQ ID NO: 179965 - DNA, 30 bp, Homo sapiens; identical to SEQ ID NO: 29067
  chr16:23420552-23420582
  hypo

SEQ ID NO: 179966 - DNA, 54 bp, Homo sapiens; identical to SEQ ID NO: 90140
  chr16:23444900-23444954
  hypo

SEQ ID NO: 179967 - DNA, 50 bp, Homo sapiens
  chr16:23481440-23481490
  hypo
attctgaatccattccggtcatacacaatgagaggcggcaggctgcctgg

SEQ ID NO: 179968 - DNA, 30 bp, Homo sapiens; identical to SEQ ID NO: 90141
  chr16:23494240-23494270
  hypo

SEQ ID NO: 179969 - DNA, 201 bp, Homo sapiens
  chr16:23496841-23497042
  hypo
ttacccataagaaatgaaaatcgatgttcacacaaaatcccgtacaaaattgtttacagtagcatgattcacaatcacccaaagctggaaacaacgcaaggcccatcaacaggtacatgctgtggtacatccaggtgacgggacagtacccggcaataagaaacaagctactgctacacacagcaacgtgaatggatctcg

SEQ ID NO: 179970 - DNA, 30 bp, Homo sapiens
  chr16:23497402-23497432
  hypo
accttcacatggcttcgcacttcctccacc

SEQ ID NO: 179971 - DNA, 129 bp, Homo sapiens
  chr16:23497823-23497952
  hypo
tgagaagtacggcagcgggatttctggttccaatcaccaccttgctgcccttgagggagactatggctgttccccagagttcagggctaggagccactctttctcccaggcaaccgttcctctacccct

SEQ ID NO: 179972 - DNA, 27 bp, Homo sapiens
  chr16:23498304-23498331
  hypo
gttttttttttttttttgagacggggt

SEQ ID NO: 179973 - DNA, 30 bp, Homo sapiens
  chr16:23504630-23504660
  hypo
cagtgggcgtaggtgcgacacagtcagcag

SEQ ID NO: 179974 - DNA, 36 bp, Homo sapiens; identical to SEQ ID NO: 90143
  chr16:23510925-23510961
  hypo

SEQ ID NO: 179975 - DNA, 73 bp, Homo sapiens; identical to SEQ ID NO: 90144
  chr16:23511602-23511675
  hypo

SEQ ID NO: 179976 - DNA, 257 bp, Homo sapiens
  chr16:23539148-23539405
  hypo
caggcgtgagtcaccgcgcccagcaaaggatgatcgttcttactgcatcatctctatgttcggaatgtttgtgttcccctaaattcatatgttgaaattttaacccccaaggggacagtattcacaggtgtgggctttgggaggtgaacaggtcatgcaggccgagcccttatgcacagatgagtgcctttataaaagacaccccagagagtccctcgtccctccaccacgtgaggatgcagcgaagggctggaaaa

SEQ ID NO: 179977 - DNA, 36 bp, Homo sapiens; identical to SEQ ID NO: 90146
  chr16:23551962-23551998
  hypo

SEQ ID NO: 179978 - DNA, 385 bp, Homo sapiens
  chr16:23577992-23578377
  hypo
tttcttggatatttattaaccatcagacttttaaaaaataatcccagggaagatacaattctgccctcagagacctttactataccattgccaaacccagtttcccacttgctcctacggagttcccagctcccacacgaagccctatgtgcactggtcagaagaccctgtcgtgttgtccccagagggcatggcgccagtcacttgagtttactgtagatcccgcagccaccagccctgatgagggactgctgagtcagagaagttagaacaggagggccctttgaataatcactgtaatccctctcaacttagagcggactgagaaattgcccatgggctccataaaaaatgtggtcagtgaacctatcgaaggacatgaaga

SEQ ID NO: 179979 - DNA, 211 bp, Homo sapiens; identical to SEQ ID NO: 90147
  chr16:23595587-23595798
  hypo

SEQ ID NO: 179980 - DNA, 86 bp, Homo sapiens
  chr16:23606210-23606296
  hypo
ctatcctaccttaagacggttatttttattcccaactgcacttcagagtcatctggagaacttagaaaacaacaaaaaaaaggcag

SEQ ID NO: 179981 - DNA, 30 bp, Homo sapiens
  chr16:23631457-23631487
  hypo
ttgaactccaaatgccgaaactgaaattcg

SEQ ID NO: 179982 - DNA, 30 bp, Homo sapiens; identical to SEQ ID NO: 90148
  chr16:23641371-23641401
  hypo

SEQ ID NO: 179983 - DNA, 42 bp, Homo sapiens; identical to SEQ ID NO: 29068
  chr16:23689210-23689252
  hypo

SEQ ID NO: 179984 - DNA, 173 bp, Homo sapiens; identical to SEQ ID NO: 90150
  chr16:23702178-23702351
  hypo

SEQ ID NO: 179985 - DNA, 92 bp, Homo sapiens
  chr16:23716301-23716393
  hypo
agtgtctcgagccagcgtgagatgcggcagctggcgcaggccgtcctggtgccaggtgtagacgcccatcacaggcacgcccaggtcctgtg

SEQ ID NO: 179986 - DNA, 580 bp, Homo sapiens; identical to SEQ ID NO: 52900
  chr16:23765897-23766477
  hypo

SEQ ID NO: 179987 - DNA, 291 bp, Homo sapiens; identical to SEQ ID NO: 52901
  chr16:23846762-23847053
  hypo

SEQ ID NO: 179988 - DNA, 201 bp, Homo sapiens; identical to SEQ ID NO: 10585
  chr16:23847310-23847511
  hypo

SEQ ID NO: 179989 - DNA, 86 bp, Homo sapiens; identical to SEQ ID NO: 10586
  chr16:23847788-23847874
  hypo

SEQ ID NO: 179990 - DNA, 544 bp, Homo sapiens; identical to SEQ ID NO: 52904
  chr16:23847933-23848477
  hypo

SEQ ID NO: 179991 - DNA, 30 bp, Homo sapiens
  chr16:23982583-23982613
  hypo
atgttgtaggtgtagcgggcaatcgtgatc

SEQ ID NO: 179992 - DNA, 87 bp, Homo sapiens; identical to SEQ ID NO: 90156
  chr16:24079283-24079370
  hypo

SEQ ID NO: 179993 - DNA, 143 bp, Homo sapiens; identical to SEQ ID NO: 29074
  chr16:24118920-24119063
  hypo

SEQ ID NO: 179994 - DNA, 122 bp, Homo sapiens
  chr16:24131551-24131673
  hypo
gtgatggaaatgttccgcgtcttgtttggggtttgggttacatgggtgtgcacatttgtcaaaatctacagaactgtgcacgtgagattggtgcactttgcggtgcccacctcaagtttcaa

SEQ ID NO: 179995 - DNA, 43 bp, Homo sapiens; identical to SEQ ID NO: 90159
  chr16:24288801-24288844
  hypo

SEQ ID NO: 179996 - DNA, 45 bp, Homo sapiens; identical to SEQ ID NO: 10589
  chr16:24354627-24354672
  hypo

SEQ ID NO: 179997 - DNA, 343 bp, Homo sapiens
  chr16:24372757-24373100
  hypo
ctatggttggtccttttatttcggagccttctctttcatcatcgcagaaattgtaggagtggttgccgtgcacatctatattgaaaaacatcagcagttacgagccaaatcccactcggagttcctgaagaaatctacttttgcccgcctcccaccctacaggtatcgattccggaggcggtcaagttctcgctccaccgagcccagatcccgagacctgtcccccatcagcaaaggcttccacaccatcccttccactgacatctcgatgttcaccctctcccgggacccctcaaagatcaccatggggaccctcctcaactccgaccgggaccacgctttt

SEQ ID NO: 179998 - DNA, 30 bp, Homo sapiens
  chr16:24396438-24396468
  hypo
ggaggcccgccactgcgggccacccacctg

SEQ ID NO: 179999 - DNA, 30 bp, Homo sapiens
  chr16:24505362-24505392
  hypo
actccttccccaccccgtcctctaggcaac

SEQ ID NO: 180000 - DNA, 30 bp, Homo sapiens; identical to SEQ ID NO: 29076
  chr16:24547942-24547972
  hypo

SEQ ID NO: 180001 - DNA, 30 bp, Homo sapiens
  chr16:24549369-24549399
  hypo
catctctatggatcacgtaaaaatgtatcc

SEQ ID NO: 180002 - DNA, 30 bp, Homo sapiens
  chr16:24580229-24580259
  hypo
agagccgcaattaccgttcacggtctagat

SEQ ID NO: 180003 - DNA, 42 bp, Homo sapiens
  chr16:24587542-24587584
  hypo
tgctggcattataggtgtgagtcactgcgccagccagtcatc

SEQ ID NO: 180004 - DNA, 35 bp, Homo sapiens
  chr16:24707389-24707424
  hypo
ccgagagcggtggctcgcccctgtaatcccagcac

SEQ ID NO: 180005 - DNA, 164 bp, Homo sapiens; identical to SEQ ID NO: 90164
  chr16:24739329-24739493
  hypo

SEQ ID NO: 180006 - DNA, 30 bp, Homo sapiens; identical to SEQ ID NO: 90165
  chr16:24758307-24758337
  hypo

SEQ ID NO: 180007 - DNA, 81 bp, Homo sapiens; identical to SEQ ID NO: 29077
  chr16:24772183-24772264
  hypo

SEQ ID NO: 180008 - DNA, 30 bp, Homo sapiens
  chr16:24794982-24795012
  hypo
cctacagcattgcagcgtataaacattttg

SEQ ID NO: 180009 - DNA, 21 bp, Homo sapiens
  chr16:24813085-24813106
  hypo
gtgctcagctgctactactct

SEQ ID NO: 180010 - DNA, 30 bp, Homo sapiens
  chr16:24826700-24826730
  hypo
tgatgtagcccagatcggcgtgcttagact

SEQ ID NO: 180011 - DNA, 30 bp, Homo sapiens; identical to SEQ ID NO: 90168
  chr16:24834904-24834934
  hypo

SEQ ID NO: 180012 - DNA, 762 bp, Homo sapiens; identical to SEQ ID NO: 29079
  chr16:24837122-24837884
  hypo

SEQ ID NO: 180013 - DNA, 248 bp, Homo sapiens
  chr16:24849491-24849739
  hypo
tccctactaggaatacggaagatggtcattaaaatagtagcacacagttatttagcacttacggaagaaagctcaacagtttacaggtgttacctcattgaaggctcgccactattctgtgaaggaggtgttgttatttctccctcgtttagcggataatgaagcagatttgcagaggtgaagtaacttgcccacgtcacacacctactgagccgtgaagtctaaagacaaagcgtgtgtctctgcaa

SEQ ID NO: 180014 - DNA, 31 bp, Homo sapiens; identical to SEQ ID NO: 90170
  chr16:24937029-24937060
  hypo

SEQ ID NO: 180015 - DNA, 30 bp, Homo sapiens; identical to SEQ ID NO: 90171
  chr16:24946780-24946810
  hypo

SEQ ID NO: 180016 - DNA, 30 bp, Homo sapiens
  chr16:24947278-24947308
  hypo
ttattttatgagattcgttgcatcagactg

SEQ ID NO: 180017 - DNA, 30 bp, Homo sapiens
  chr16:24965242-24965272
  hypo
ctttgatctgagcgccgactccatgggtgg

SEQ ID NO: 180018 - DNA, 154 bp, Homo sapiens; identical to SEQ ID NO: 29080
  chr16:25006924-25007078
  hypo

SEQ ID NO: 180019 - DNA, 126 bp, Homo sapiens; identical to SEQ ID NO: 90173
  chr16:25009669-25009795
  hypo

SEQ ID NO: 180020 - DNA, 19 bp, Homo sapiens
  chr16:25018660-25018679
  hypo
agaaagtagttcattacga

SEQ ID NO: 180021 - DNA, 121 bp, Homo sapiens
  chr16:25071329-25071450
  hypo
ttcattcttgaagggagttgtggcgtgctccctttccagctgtggcaaaactgcttattttctcaccaacacagtttgttataaaacttgttaatcaccgggcgcggtggctcacgcctgt

SEQ ID NO: 180022 - DNA, 30 bp, Homo sapiens; identical to SEQ ID NO: 90175
  chr16:25104120-25104150
  hypo

SEQ ID NO: 180023 - DNA, 30 bp, Homo sapiens; identical to SEQ ID NO: 90176
  chr16:25152007-25152037
  hypo

SEQ ID NO: 180024 - DNA, 85 bp, Homo sapiens; identical to SEQ ID NO: 90177
  chr16:25168833-25168918
  hypo

SEQ ID NO: 180025 - DNA, 30 bp, Homo sapiens
  chr16:25228672-25228702
  hypo
tcattgagaatgggacggacactgggctgc

SEQ ID NO: 180026 - DNA, 186 bp, Homo sapiens
  chr16:25266494-25266680
  hypo
gcactaggcgtgctccgagtcttccctcttaccattcttgggtaagggccgacgttctcgctttcggttcagctgttcctggtgtcctgagtggaggcttccaggttcctcccgagacaccgccctgggttgggtctccacctgctctggctggaagtctgccacctcccacgctgctccaagtgg

SEQ ID NO: 180027 - DNA, 32 bp, Homo sapiens
  chr16:25290984-25291016
  hypo
cttgaaataggcttgcgcgctggcgcttgctg

SEQ ID NO: 180028 - DNA, 30 bp, Homo sapiens; identical to SEQ ID NO: 29082
  chr16:25531745-25531775
  hypo

SEQ ID NO: 180029 - DNA, 22 bp, Homo sapiens
  chr16:25597779-25597801
  hypo
ttacaggcgtgagccactgcgc

SEQ ID NO: 180030 - DNA, 1333 bp, Homo sapiens; identical to SEQ ID NO: 126966
  chr16:25702789-25704122
  hypo

SEQ ID NO: 180031 - DNA, 31 bp, Homo sapiens; identical to SEQ ID NO: 90182
  chr16:25824622-25824653
  hypo

SEQ ID NO: 180032 - DNA, 21 bp, Homo sapiens
  chr16:26176739-26176760
  hypo
aaaattgtgccataggctggg

SEQ ID NO: 180033 - DNA, 30 bp, Homo sapiens
  chr16:26500349-26500379
  hypo
aagaagggtcagggtcgggggccgcggagg

SEQ ID NO: 180034 - DNA, 31 bp, Homo sapiens; identical to SEQ ID NO: 90184
  chr16:26977613-26977644
  hypo

SEQ ID NO: 180035 - DNA, 308 bp, Homo sapiens
  chr16:27052119-27052427
  hypo
tccatatttccaaacagaatgcgacggttccaggcaaagcaaatcaatattgtgctccgccattcatcttcattcgcgccacatccgcgcgctatccccggcgcttctcgcccaggctcctggtaatgggttcccggacgctgacaaataggattctcggaggcagccacgccacgttagcagattaaatcattaatacccgcatcggtcatttttacgagcctgccttaccccgaactcctcaccaccccggtgttgagtacactgttagtgatgcaggcagacacggagaggatgaaattgccact

SEQ ID NO: 180036 - DNA, 30 bp, Homo sapiens; identical to SEQ ID NO: 90185
  chr16:27063191-27063221
  hypo

SEQ ID NO: 180037 - DNA, 159 bp, Homo sapiens; identical to SEQ ID NO: 90186
  chr16:27063489-27063648
  hypo

SEQ ID NO: 180038 - DNA, 144 bp, Homo sapiens; identical to SEQ ID NO: 10593
  chr16:27121250-27121394
  hypo

SEQ ID NO: 180039 - DNA, 31 bp, Homo sapiens; identical to SEQ ID NO: 90188
  chr16:27186525-27186556
  hypo

SEQ ID NO: 180040 - DNA, 36 bp, Homo sapiens
  chr16:27219619-27219655
  hypo
acctggctacaaagccgcacacgtgaggccaccttg

SEQ ID NO: 180041 - DNA, 38 bp, Homo sapiens
  chr16:27220818-27220856
  hypo
attacaggcgtgagccaccatgccggccttctcgaata

SEQ ID NO: 180042 - DNA, 30 bp, Homo sapiens; identical to SEQ ID NO: 90190
  chr16:27230271-27230301
  hypo

SEQ ID NO: 180043 - DNA, 33 bp, Homo sapiens; identical to SEQ ID NO: 90191
  chr16:27242668-27242701
  hypo

SEQ ID NO: 180044 - DNA, 478 bp, Homo sapiens; identical to SEQ ID NO: 90192
  chr16:27244719-27245197
  hypo

SEQ ID NO: 180045 - DNA, 166 bp, Homo sapiens; identical to SEQ ID NO: 90193
  chr16:27268603-27268769
  hypo

SEQ ID NO: 180046 - DNA, 259 bp, Homo sapiens; identical to SEQ ID NO: 10595
  chr16:27280120-27280379
  hypo

SEQ ID NO: 180047 - DNA, 31 bp, Homo sapiens; identical to SEQ ID NO: 90195
  chr16:27284486-27284517
  hypo

SEQ ID NO: 180048 - DNA, 37 bp, Homo sapiens; identical to SEQ ID NO: 90196
  chr16:27309234-27309271
  hypo

SEQ ID NO: 180049 - DNA, 180 bp, Homo sapiens; identical to SEQ ID NO: 90197
  chr16:27356583-27356763
  hypo

SEQ ID NO: 180050 - DNA, 30 bp, Homo sapiens
  chr16:27460520-27460550
  hypo
gacgaaggacccccccggagctacctccgc

SEQ ID NO: 180051 - DNA, 30 bp, Homo sapiens; identical to SEQ ID NO: 90198
  chr16:27474642-27474672
  hypo

SEQ ID NO: 180052 - DNA, 185 bp, Homo sapiens; identical to SEQ ID NO: 29088
  chr16:27475123-27475308
  hypo

SEQ ID NO: 180053 - DNA, 575 bp, Homo sapiens
  chr16:27475617-27476192
  hypo
gtgggggacaaggcgcgcggtacctctggggtcttcagagccctctggaggctgcgcctggccgctcagctgctcttggcctggggaactgaactcaccgacaccctcttggtcttcctgtgctgctcccgctgcagcggtgtcttcaagagctgggggtggagatggggcctgggcttctgccccatcttcagctccgggcccaaggctgggggccaaatttgagtcctggagcgctggcctcttggcaggggtcatctgggtgccctcggcgtcggtctccccattctcactggcccagctggcgcgcctcttggtgccccgggggctgtgagaaggaggtgcctgcccctcgggggggctgtcctcactggaagacccctccaggggtctggcctgggggtcttctctctggatgtcggcgtcttctctgtctttcagccgcacggagtgcaggagccaaggccaggcagagcccatggctaccaggcgcgcagtgttgccaccgacctccagcacctgatgctgctccaggagggcctggggaggcaggagacacgcggggtctgtgggga

SEQ ID NO: 180054 - DNA, 30 bp, Homo sapiens; identical to SEQ ID NO: 90201
  chr16:27481809-27481839
  hypo

SEQ ID NO: 180055 - DNA, 30 bp, Homo sapiens
  chr16:27500903-27500933
  hypo
gcttgggacggacacgcacgtggtgtactc

SEQ ID NO: 180056 - DNA, 189 bp, Homo sapiens
  chr16:27506623-27506812
  hypo
ccagaggaggacggccggacgcctgccctgcctgactcctgctttatcgttctccgttcactgatgaagcttggcttctccacggtgttgctggcagggtgcccgtagatgaggtaccacagaaacatgtggaccacccgcaggcgaggcattttgggcagaaatcctagagaacgccccagtccggga

SEQ ID NO: 180057 - DNA, 30 bp, Homo sapiens; identical to SEQ ID NO: 29090
  chr16:27509978-27510008
  hypo

SEQ ID NO: 180058 - DNA, 339 bp, Homo sapiens; identical to SEQ ID NO: 90203
  chr16:27510215-27510554
  hypo

SEQ ID NO: 180059 - DNA, 30 bp, Homo sapiens; identical to SEQ ID NO: 90204
  chr16:27511236-27511266
  hypo

SEQ ID NO: 180060 - DNA, 239 bp, Homo sapiens
  chr16:27517090-27517329
  hypo
aggcaggcctcggcacgcagcactctcgctgtggatgattccactgtgatcatgtgattcctaaacacagaaacgatgaggccacagactccttcttggagacagctccctccctctgcatgcactgacctttgggttttccatccggacctcctcgatcacagctatgtcaccactgttgctgtccgcacagtgggagacaaaggacacgttgggttctgagacgctgctggtatcta

SEQ ID NO: 180061 - DNA, 69 bp, Homo sapiens
  chr16:27523535-27523604
  hypo
tgacaacaggagacgcgcctgtctcttcctgttcccttcccagcacccaggacacggcccacactcagg

SEQ ID NO: 180062 - DNA, 38 bp, Homo sapiens
  chr16:27539545-27539583
  hypo
agatcgcaccactgcactatgggcgacaaaagcgagac

SEQ ID NO: 180063 - DNA, 56 bp, Homo sapiens; identical to SEQ ID NO: 29094
  chr16:27539975-27540031
  hypo

SEQ ID NO: 180064 - DNA, 184 bp, Homo sapiens; identical to SEQ ID NO: 29095
  chr16:27560715-27560899
  hypo

SEQ ID NO: 180065 - DNA, 161 bp, Homo sapiens
  chr16:27568345-27568506
  hypo
catttcagtgccttccgtgcattggaattcagagatgccaaaatgagtaagattgaatccaggtgaaggcgatatgggaattcattgtactattcttgacatttttctgtgaagttgatttttttttttttttttgaggtggagtctcactttgtagccca

SEQ ID NO: 180066 - DNA, 104 bp, Homo sapiens
  chr16:27640047-27640151
  hypo
ctctgtctatgtcaacggtgccaattcggagctgaaatcatcaccgcggaaagctattcactctgacttctccagaagtgcctcccacacggaggggacacacg

SEQ ID NO: 180067 - DNA, 30 bp, Homo sapiens; identical to SEQ ID NO: 90210
  chr16:27714665-27714695
  hypo

SEQ ID NO: 180068 - DNA, 114 bp, Homo sapiens
  chr16:27735233-27735347
  hypo
agttgcgaggcacctcgagtcaggaaactaacaggacaggcagccccggccagctgtgtgtacgcacagtgctgcccagagctttctctgatttctgatcgttgaggttgtttg

SEQ ID NO: 180069 - DNA, 544 bp, Homo sapiens
  chr16:27748860-27749404
  hypo
ggagagcaagggaagagcactcgggaggcctaggactgagccctgggcagcctagtcgttcaaagtgcagccgaagaaaaggaagcaacccaggagtcgggcaggctcagccagcgaggcaggaggaaagccaggtgggtgcagagccacacaagccccagggaggaaagtcatcgcaaaggaggggaagctgccgagtactgccgagccgccacacccacccactcctaggagaaattcctattgcgtatggcagtcagctggaccctgtaatttactttaggaaccagacacttctgagagtcattagtaatgacaccaggataacagatataaatcagaattgtcccagacaaactaggatggcccgtcaccctagttacaggtgcccgggccaggtgggttccatgtggaggtggaggcagaagcccaacgggaggaggaacaaggggtagtgggaggaggagcccacggggacagtgacactcagagattcactgacggggtgacggacagatcatgcggggggccctgcaatggaata

SEQ ID NO: 180070 - DNA, 219 bp, Homo sapiens; identical to SEQ ID NO: 90212
  chr16:27750003-27750222
  hypo

SEQ ID NO: 180071 - DNA, 30 bp, Homo sapiens; identical to SEQ ID NO: 90213
  chr16:27761074-27761104
  hypo

SEQ ID NO: 180072 - DNA, 636 bp, Homo sapiens; identical to SEQ ID NO: 90214
  chr16:27780833-27781469
  hypo

SEQ ID NO: 180073 - DNA, 31 bp, Homo sapiens; identical to SEQ ID NO: 90215
  chr16:27786949-27786980
  hypo

SEQ ID NO: 180074 - DNA, 30 bp, Homo sapiens; identical to SEQ ID NO: 29096
  chr16:27788240-27788270
  hypo

SEQ ID NO: 180075 - DNA, 244 bp, Homo sapiens
  chr16:27790982-27791226
  hypo
cccccttcagccacttcccagcgagttggaaatgtgccttgcacccccagccgagtgaagcccagaacgcatctatatgcatcgatgtaacaagctcggatcagggacctaattggtttcccagtagtgggtaatttctcgttgcaaatattaatccgttgtttttctggcgcccagcccggcccgccgcagtactgtactcgaggtacgttcctatgcaaccgagagccccggcaaatacttc

SEQ ID NO: 180076 - DNA, 30 bp, Homo sapiens
  chr16:27834647-27834677
  hypo
acacgcacacagacgcgcacacacacacat

SEQ ID NO: 180077 - DNA, 43 bp, Homo sapiens; identical to SEQ ID NO: 90218
  chr16:27945906-27945949
  hypo

SEQ ID NO: 180078 - DNA, 30 bp, Homo sapiens
  chr16:27973154-27973184
  hypo
gtagggagtccttgtcgctttctgggaact

SEQ ID NO: 180079 - DNA, 173 bp, Homo sapiens; identical to SEQ ID NO: 90219
  chr16:28043669-28043842
  hypo

SEQ ID NO: 180080 - DNA, 40 bp, Homo sapiens; identical to SEQ ID NO: 126976
  chr16:28074001-28074041
  hypo

SEQ ID NO: 180081 - DNA, 149 bp, Homo sapiens; identical to SEQ ID NO: 52923
  chr16:28074076-28074225
  hypo

SEQ ID NO: 180082 - DNA, 519 bp, Homo sapiens; identical to SEQ ID NO: 10599
  chr16:28074417-28074936
  hypo

SEQ ID NO: 180083 - DNA, 299 bp, Homo sapiens; identical to SEQ ID NO: 10600
  chr16:28074955-28075254
  hypo

SEQ ID NO: 180084 - DNA, 95 bp, Homo sapiens
  chr16:28093978-28094073
  hypo
agccacacccatttgttagtgttctccgtggctgcagttcatgctccggtggcagagttgagcattcgagacagagacaacggcctgcaaagcct

SEQ ID NO: 180085 - DNA, 441 bp, Homo sapiens
  chr16:28104121-28104562
  hypo
gggattacaggcgtgaaccactgtgcccaaccaaaacctgagtgtctttaaaaaaaaaatctacctgttgccaaaatgcctgccgcctacgtcaggtctgtggatctctgggacgtttcattgaaatacttaactttccaacccaccccttggtacctgactgacccagggaaagcttctgccacccttcagaggcccctgggggctctgagtcaggctctgaccagcaccacggagctctctctgcccaccccaggaggccgcataacccggcctgctctcaatgcctgcccccactcagcacctccaagccctgaggcaattaattaacaaggcttttaaaagatgttttcaaatgatacaaacagggaagggcggaaaagggagtccttgagctacagaaattcttcactgaagagcctttcacgtaagtgcttttcc

SEQ ID NO: 180086 - DNA, 157 bp, Homo sapiens; identical to SEQ ID NO: 29102
  chr16:28116152-28116309
  hypo

SEQ ID NO: 180087 - DNA, 30 bp, Homo sapiens; identical to SEQ ID NO: 29103
  chr16:28128324-28128354
  hypo

SEQ ID NO: 180088 - DNA, 165 bp, Homo sapiens; identical to SEQ ID NO: 29104
  chr16:28128686-28128851
  hypo

SEQ ID NO: 180089 - DNA, 89 bp, Homo sapiens
  chr16:28183882-28183971
  hypo
gggaaggaaagcggtcggtttcaatttcgattacttctccaggagcctagaaagggtataaccaacccaccgcacgtaaggctgggtta

SEQ ID NO: 180090 - DNA, 30 bp, Homo sapiens; identical to SEQ ID NO: 90228
  chr16:28224119-28224149
  hypo

SEQ ID NO: 180091 - DNA, 30 bp, Homo sapiens; identical to SEQ ID NO: 29105
  chr16:28224647-28224677
  hypo

SEQ ID NO: 180092 - DNA, 31 bp, Homo sapiens; identical to SEQ ID NO: 90230
  chr16:28229877-28229908
  hypo

SEQ ID NO: 180093 - DNA, 30 bp, Homo sapiens; identical to SEQ ID NO: 90231
  chr16:28237436-28237466
  hypo

SEQ ID NO: 180094 - DNA, 30 bp, Homo sapiens; identical to SEQ ID NO: 90232
  chr16:28331434-28331464
  hypo

SEQ ID NO: 180095 - DNA, 30 bp, Homo sapiens; identical to SEQ ID NO: 29107
  chr16:28331856-28331886
  hypo

SEQ ID NO: 180096 - DNA, 142 bp, Homo sapiens; identical to SEQ ID NO: 90234
  chr16:28332353-28332495
  hypo

SEQ ID NO: 180097 - DNA, 25 bp, Homo sapiens
  chr16:28344914-28344939
  hypo
gaccctgtctcgaaaaaaaaaaaaa

SEQ ID NO: 180098 - DNA, 30 bp, Homo sapiens
  chr16:28488816-28488846
  hypo
cgtcctgaggatcccgagtatcaggagagc

SEQ ID NO: 180099 - DNA, 30 bp, Homo sapiens; identical to SEQ ID NO: 29110
  chr16:28583870-28583900
  hypo

SEQ ID NO: 180100 - DNA, 112 bp, Homo sapiens; identical to SEQ ID NO: 90237
  chr16:28585538-28585650
  hypo

SEQ ID NO: 180101 - DNA, 121 bp, Homo sapiens; identical to SEQ ID NO: 90238
  chr16:28822779-28822900
  hypo

SEQ ID NO: 180102 - DNA, 130 bp, Homo sapiens; identical to SEQ ID NO: 90239
  chr16:28845817-28845947
  hypo

SEQ ID NO: 180103 - DNA, 30 bp, Homo sapiens; identical to SEQ ID NO: 29112
  chr16:28877866-28877896
  hypo

SEQ ID NO: 180104 - DNA, 219 bp, Homo sapiens; identical to SEQ ID NO: 90241
  chr16:28878636-28878855
  hypo

SEQ ID NO: 180105 - DNA, 31 bp, Homo sapiens; identical to SEQ ID NO: 90242
  chr16:28880885-28880916
  hypo

SEQ ID NO: 180106 - DNA, 30 bp, Homo sapiens; identical to SEQ ID NO: 90243
  chr16:28884315-28884345
  hypo

SEQ ID NO: 180107 - DNA, 59 bp, Homo sapiens
  chr16:28887786-28887845
  hypo
gcgccaaaagccttggcgggtgtgagcctgagtccagcggagacggtgggtgctgggcc

SEQ ID NO: 180108 - DNA, 204 bp, Homo sapiens
  chr16:28911980-28912184
  hypo
gtgacgccgggatccgggtgatcatgatcactggggacaacaagggcacagccattgccatctgccggcgaattggcatctttggggagaacgaggaggtggccgatcgcgcctacacgggccgagagttcgacgacctgcccctggctgaacagcgggaagcctgccgacgtgcctgctgcttcgcccgtgtggagccctcgc

SEQ ID NO: 180109 - DNA, 232 bp, Homo sapiens; identical to SEQ ID NO: 90246
  chr16:28914704-28914936
  hypo

SEQ ID NO: 180110 - DNA, 30 bp, Homo sapiens; identical to SEQ ID NO: 29115
  chr16:28915181-28915211
  hypo

SEQ ID NO: 180111 - DNA, 75 bp, Homo sapiens; identical to SEQ ID NO: 90248
  chr16:28915761-28915836
  hypo

SEQ ID NO: 180112 - DNA, 531 bp, Homo sapiens; identical to SEQ ID NO: 90249
  chr16:28922054-28922585
  hypo

SEQ ID NO: 180113 - DNA, 117 bp, Homo sapiens; identical to SEQ ID NO: 90250
  chr16:28925775-28925892
  hypo

SEQ ID NO: 180114 - DNA, 20 bp, Homo sapiens
  chr16:28947335-28947355
  hypo
gccaccgcgcccgtccgcct

SEQ ID NO: 180115 - DNA, 30 bp, Homo sapiens; identical to SEQ ID NO: 29119
  chr16:29000905-29000935
  hypo

SEQ ID NO: 180116 - DNA, 114 bp, Homo sapiens; identical to SEQ ID NO: 29120
  chr16:29001661-29001775
  hypo

SEQ ID NO: 180117 - DNA, 100 bp, Homo sapiens
  chr16:29023075-29023175
  hypo
tctcccaggcctcctcgccctacctctgggcctgactcctgttccaccagccttgcgtggagctcctcccacccacctgctgcgtcggggtgaagggagt

SEQ ID NO: 180118 - DNA, 30 bp, Homo sapiens; identical to SEQ ID NO: 10605
  chr16:29110443-29110473
  hypo

SEQ ID NO: 180119 - DNA, 179 bp, Homo sapiens
  chr16:29118742-29118921
  hypo
caggcacgcaggtagcggccccatcggagggtggcagaggtgggacggtgctgccgggccaccagaggcagcaagcccggcggacaaacaccctggctgccacgccctggcccggcccccccgacctcaccttccctcggggcccaggcggagccagctagaggcgggcacctggggtg

SEQ ID NO: 180120 - DNA, 218 bp, Homo sapiens
  chr16:29150830-29151048
  hypo
tgcttctgaggcagccggacacagctcttgacgcagaaggttgattttgtttggatctctcttgaccagacaaggtagggttaagtgtgtgaagggggagaagggaatgcagacctcctggaacttgaaacttcccagcccagagccagccagtgcgtggagacgcagccccaacgtgctgctgctgctgcggacacctggggcgtggagccagggca

SEQ ID NO: 180121 - DNA, 265 bp, Homo sapiens
  chr16:29153226-29153491
  hypo
taatcctctgtggcacgcgggggggggtgtggaataatcctccgtggcacgagggggtggtggaataatcctccgtggcacggggggtggaataatcctccgtggcatgagggggcggtggaataatcctccgtggcacgagggggcagtggtataatcctctgtggcacgaggggtcggcggtataatcctccgtggcacgaggatggtcaccgcattcgtcactcttagctgcagtgcgtgtgacagtcgccagggctgctgt

SEQ ID NO: 180122 - DNA, 30 bp, Homo sapiens
  chr16:29154049-29154079
  hypo
gcgggtcacacaatgcgtggccctttggga

SEQ ID NO: 180123 - DNA, 30 bp, Homo sapiens; identical to SEQ ID NO: 90257
  chr16:29166968-29166998
  hypo

SEQ ID NO: 180124 - DNA, 445 bp, Homo sapiens; identical to SEQ ID NO: 90258
  chr16:29169931-29170376
  hypo

SEQ ID NO: 180125 - DNA, 188 bp, Homo sapiens
  chr16:29198307-29198495
  hypo
tgtatggggggatggcgtgagggttccctcccacgacaggatatttctttctgaactcctgctgccctgggcaggttggtggggccgggggtgtggacagtgcccagcacaggctggacagggtatcccatttccagcccaatctcgttctctctgcacccctggaatgcaggcgaaggggccgagtg

SEQ ID NO: 180126 - DNA, 36 bp, Homo sapiens
  chr16:29229642-29229678
  hypo
tgaattccggggtcacggcagcgtggcacccagcct

SEQ ID NO: 180127 - DNA, 219 bp, Homo sapiens
  chr16:29230252-29230471
  hypo
gtgcggggacacgtgcgtgcacacagacacggactcacataaatgcaatccacatgcactcacaataggctcttatgcacagaccctcacactcatgtgaacacactcatgcacacgcaagacttacatattcacactcacacccgtgggcacacccagacatggatacacactcatacaggcacacacgtatccagacacccacgcacagacacactc

SEQ ID NO: 180128 - DNA, 106 bp, Homo sapiens; identical to SEQ ID NO: 90260
  chr16:29231512-29231618
  hypo

SEQ ID NO: 180129 - DNA, 182 bp, Homo sapiens
  chr16:29231866-29232048
  hypo
gctcccatcacgtgccgggagctgatcttggcaggtcgcgtcctcccgaagcctgcacttcagccccagggttttccgaccgcctctgctcccagaggggaccctcaggggcgaagaggccgaagacagcaccgagacctcagtgtcgggcgcgggtgctcccaaagcgcagcgggcccacc

SEQ ID NO: 180130 - DNA, 30 bp, Homo sapiens
  chr16:29242344-29242374
  hypo
ggccgggctgcaacccgagaaggcgccgcg

SEQ ID NO: 180131 - DNA, 30 bp, Homo sapiens
  chr16:29242676-29242706
  hypo
caggtcgcgttcctccggccgcccccggct

SEQ ID NO: 180132 - DNA, 78 bp, Homo sapiens
  chr16:29262665-29262743
  hypo
ttattagttttccattcgcccaatcatttctaatgtggatcattttctttcaaatgataagagcgatgtttacttttc

SEQ ID NO: 180133 - DNA, 30 bp, Homo sapiens; identical to SEQ ID NO: 90262
  chr16:29268142-29268172
  hypo

SEQ ID NO: 180134 - DNA, 30 bp, Homo sapiens
  chr16:29283257-29283287
  hypo
ctctccctcatggaccgtcctcccgcaccg

SEQ ID NO: 180135 - DNA, 30 bp, Homo sapiens; identical to SEQ ID NO: 29124
  chr16:29300658-29300688
  hypo

SEQ ID NO: 180136 - DNA, 30 bp, Homo sapiens
  chr16:29324438-29324468
  hypo
ctcccctctgaagagcgggacttgctccag

SEQ ID NO: 180137 - DNA, 174 bp, Homo sapiens
  chr16:29324694-29324868
  hypo
gttgcctcaggggatcgtgaatggaaatctgatcttgaaacagggcgagcgaggtggagcactcagcgtccgggatctcagcgtgcggggggcctccgggatctcagcgtgcggggggcgtccaggatctcagcgtgcggggggcatccgggatctcagcgtgtgggggctgct

SEQ ID NO: 180138 - DNA, 30 bp, Homo sapiens
  chr16:29328270-29328300
  hypo
atcgggcagaggcttcgagatgccttttgt

SEQ ID NO: 180139 - DNA, 31 bp, Homo sapiens; identical to SEQ ID NO: 29126
  chr16:29340561-29340592
  hypo

SEQ ID NO: 180140 - DNA, 35 bp, Homo sapiens
  chr16:29420289-29420324
  hypo
gtacttgcggctgggcgtggtggctcatgtcccag

SEQ ID NO: 180141 - DNA, 80 bp, Homo sapiens; identical to SEQ ID NO: 10606
  chr16:29606231-29606311
  hypo

SEQ ID NO: 180142 - DNA, 538 bp, Homo sapiens; identical to SEQ ID NO: 10609
  chr16:29624653-29625191
  hypo

SEQ ID NO: 180143 - DNA, 36 bp, Homo sapiens; identical to SEQ ID NO: 52943
  chr16:29691805-29691841
  hypo

SEQ ID NO: 180144 - DNA, 100 bp, Homo sapiens
  chr16:29697747-29697847
  hypo
cgcttcttttcttcgcgagcacgcctaccctgtgctagacagtgttcctaagggctttcaaacataaagtcttttgttttttgtttttgagacgcagtct

SEQ ID NO: 180145 - DNA, 181 bp, Homo sapiens
  chr16:29703875-29704056
  hypo
agactatctccaaaaaaaaaaaaaaagtgtgggtatatagtaggtgtatatatttatggggtgcacattgataaaggcatgcaatgcataataatcacatcatgggctagatgcggtggctgacgccgagatcgcgcctctgcagtcgccaggccactgcaggcgccacagtggcgacaga

SEQ ID NO: 180146 - DNA, 414 bp, Homo sapiens
  chr16:29755601-29756015
  hypo
aaccccacactggtccggccttcacgcttccagaaagctgagatctgctccaaggtgacccgtggctggaggccccactcaggatccgggctccctggccgctgcctcctggcctgggggctcccaaactggacgctggcctctggcctctgctcgggttcagcccagctcaccaggcctgtggcggggggcctcccctcccagggctggggcccccagaaggtgctccgggctgggacctccagtacggtctgggggcccaagttgctgggagcagaatttggggctgagggggcaggtggggctgttgctcgggcctccaaagtgcccacctgggtgggaggctcaggggcccgatctgtcagcagggggaccgcagagccataccagtcctcagagcgctctcgggcggtg

SEQ ID NO: 180147 - DNA, 85 bp, Homo sapiens
  chr16:29797108-29797193
  hypo
aggcaaagggtgtccacgtgggatagactggcatagcttcctggccacccatggtgctccattatctcttcgaggaccccttctc

SEQ ID NO: 180148 - DNA, 32 bp, Homo sapiens; identical to SEQ ID NO: 90271
  chr16:29820499-29820531
  hypo

SEQ ID NO: 180149 - DNA, 339 bp, Homo sapiens; identical to SEQ ID NO: 90272
  chr16:29820787-29821126
  hypo

SEQ ID NO: 180150 - DNA, 30 bp, Homo sapiens; identical to SEQ ID NO: 90273
  chr16:29821415-29821445
  hypo

SEQ ID NO: 180151 - DNA, 31 bp, Homo sapiens; identical to SEQ ID NO: 10612
  chr16:29822267-29822298
  hypo

SEQ ID NO: 180152 - DNA, 286 bp, Homo sapiens; identical to SEQ ID NO: 127012
  chr16:29822514-29822800
  hypo

SEQ ID NO: 180153 - DNA, 124 bp, Homo sapiens
  chr16:29825624-29825748
  hypo
tgtgcctccacccctcgccctaaccccagtcccggaacagcctgcagcagggggacgtggacggggcccagcgtctgggccgggtagccaagctcttaagcatcgtggcgctggtggggggagt

SEQ ID NO: 180154 - DNA, 220 bp, Homo sapiens; identical to SEQ ID NO: 29132
  chr16:29830865-29831085
  hypo

SEQ ID NO: 180155 - DNA, 35 bp, Homo sapiens
  chr16:29834878-29834913
  hypo
tattaagagtcagaggccaggcgcggtggctcacg

SEQ ID NO: 180156 - DNA, 121 bp, Homo sapiens; identical to SEQ ID NO: 29133
  chr16:29835152-29835273
  hypo

SEQ ID NO: 180157 - DNA, 137 bp, Homo sapiens; identical to SEQ ID NO: 10615
  chr16:29836030-29836167
  hypo

SEQ ID NO: 180158 - DNA, 218 bp, Homo sapiens; identical to SEQ ID NO: 90279
  chr16:29853059-29853277
  hypo

SEQ ID NO: 180159 - DNA, 30 bp, Homo sapiens; identical to SEQ ID NO: 90280
  chr16:29854107-29854137
  hypo

SEQ ID NO: 180160 - DNA, 30 bp, Homo sapiens
  chr16:29855896-29855926
  hypo
aagccatcgcatcccgggtgcggggggccg

SEQ ID NO: 180161 - DNA, 30 bp, Homo sapiens; identical to SEQ ID NO: 29135
  chr16:29856179-29856209
  hypo

SEQ ID NO: 180162 - DNA, 208 bp, Homo sapiens; identical to SEQ ID NO: 90282
  chr16:29857082-29857290
  hypo

SEQ ID NO: 180163 - DNA, 35 bp, Homo sapiens
  chr16:29866929-29866964
  hypo
gcgcctgccaccacgcctggcgttctatgcaacca

SEQ ID NO: 180164 - DNA, 30 bp, Homo sapiens
  chr16:29870293-29870323
  hypo
gagggggcctcccgcgtatcctccctgatt

SEQ ID NO: 180165 - DNA, 162 bp, Homo sapiens
  chr16:29873347-29873509
  hypo
ggcctgaatggacttgtattcagagagacctccagcagcgccaccgccatgtcatgtcttgctaatccacacctctcacaagcagtgagttctcaagagctagcttaaattccttttgctacaaaatcagtccattcttgctgggcgcggcactttgggagc

SEQ ID NO: 180166 - DNA, 30 bp, Homo sapiens; identical to SEQ ID NO: 90283
  chr16:29884955-29884985
  hypo

SEQ ID NO: 180167 - DNA, 169 bp, Homo sapiens; identical to SEQ ID NO: 10617
  chr16:29910604-29910773
  hypo

SEQ ID NO: 180168 - DNA, 31 bp, Homo sapiens; identical to SEQ ID NO: 29138
  chr16:29911101-29911132
  hypo

SEQ ID NO: 180169 - DNA, 562 bp, Homo sapiens
  chr16:29912775-29913337
  hypo
atgggtagagtgaggcgggcagctcagggtggcccaggccctgggagagggccaggggtcctaggtattcagcgcccaggcctgcttttcctaccagacctgccttcagccccctttgtgccgcgggacgcccagcggcacgacgtggagctcctggagagcagcttccctgccattttgcgggacttcggggctgtgagctgggacttctcagggactacccctccgcctcggggctggtccccacctctggcccccgggtgctaccagctcctgctgtaccaagcaggccggtgccaacccagcaactgccgccggtgcccgggggcctatcgggcactgagggggcttcgaagctttatgagtgccaacaccttcggcaatgccggcttttccgttctcctgcctggggcccggctcgagggccgctgtgggcccaccaatgcccgggtcagatgccatctgggtaagtagctgccgcctactgacaacctccttgcctcgatgatttcccccccagacccttctctccgccagagccgtctgctgtctggttctcatt

SEQ ID NO: 180170 - DNA, 31 bp, Homo sapiens; identical to SEQ ID NO: 29140
  chr16:29922300-29922331
  hypo

SEQ ID NO: 180171 - DNA, 31 bp, Homo sapiens
  chr16:29936459-29936490
  hypo
aagtctcacttgggcacgaagggtccatact

SEQ ID NO: 180172 - DNA, 44 bp, Homo sapiens
  chr16:29937912-29937956
  hypo
ggaggccaaagcggccgggcgctgtggctcacacctgtaacccc

SEQ ID NO: 180173 - DNA, 182 bp, Homo sapiens; identical to SEQ ID NO: 127026
  chr16:29938015-29938197
  hypo

SEQ ID NO: 180174 - DNA, 105 bp, Homo sapiens
  chr16:29971776-29971881
  hypo
gcctgttgtgtccttcgatgcacagaaaagactcttttctctactgaacgcccacagcacccttgtcaaaaatcatttgactagtcagggcacagtggctcacgc

SEQ ID NO: 180175 - DNA, 30 bp, Homo sapiens
  chr16:29994422-29994452
  hypo
actctgaccagcctcgagagtagccactca

SEQ ID NO: 180176 - DNA, 216 bp, Homo sapiens; identical to SEQ ID NO: 90288
  chr16:29997640-29997856
  hypo

SEQ ID NO: 180177 - DNA, 30 bp, Homo sapiens; identical to SEQ ID NO: 29141
  chr16:29998837-29998867
  hypo

SEQ ID NO: 180178 - DNA, 171 bp, Homo sapiens
  chr16:30000465-30000636
  hypo
gcttgttctcgtgcacgttctcatatttgctcacgtgcttctgtctctaggtcacagtctctccctctttgcctggtcagagcttccaagatcctcagttccctgtccagtaactccgatgttctttctcgtgggtatcgcacccaactccgtgcacgtgctcttggaacc

SEQ ID NO: 180179 - DNA, 288 bp, Homo sapiens; identical to SEQ ID NO: 90290
  chr16:30000929-30001217
  hypo

SEQ ID NO: 180180 - DNA, 30 bp, Homo sapiens; identical to SEQ ID NO: 90291
  chr16:30002433-30002463
  hypo

SEQ ID NO: 180181 - DNA, 31 bp, Homo sapiens; identical to SEQ ID NO: 29143
  chr16:30010434-30010465
  hypo

SEQ ID NO: 180182 - DNA, 767 bp, Homo sapiens
  chr16:30017147-30017914
  hypo
tcctctgaacctcccctaatccgacctcctccctgttgggggagagggacggggcagcgtggagaggcaggagtgaggagcgcgggggcctggggccgggctctgagcactgcccgggtgtgcagatgatggggggtttgcatatttgcagggactagcgagtcaggcaggaggtttgcatatgtgaatatagaactccgcagcccctcatgagcagacagacccgggtcacggagactcacaaaaataggtagtgcagggtgggggcagcccaccctgtgtaaacgtgcaacacactcgtgcgaaggttgggtactggacccggctcgatgggcctgtgccgggacactgctgtccactcaggctgaggacagagccccggccgcagggggcagctcactggtcagggtgtgccagcgctccagggctgcgtccggctgctgcaggcagtcactccagtgcttccgagcctcgcctcgggcacctggccccagggacacgccacctggggagcaggtgggcagggtcagggccacctccctgccacttgcccgccctcaacacccgcagccagctcctccctcaccaatgaagtcattggatttgccaatgtcatagtcccagacggtgacttccagggtcttggtggccagagtggagagctctatctcgtagaaaaactcctagggacaaggccggccacccgttcgtgagccagctccccagcccctccctggcctccctccatgtcccgtcccctcctgggt

SEQ ID NO: 180183 - DNA, 38 bp, Homo sapiens
  chr16:30018171-30018209
  hypo
cctaccagcagtccccggcgccgcgagctgtagctgag

SEQ ID NO: 180184 - DNA, 124 bp, Homo sapiens
  chr16:30018454-30018578
  hypo
ggccccctcccctggcgcccctgcagcccccacacagaccgggacctggcgctcgaggcagatgttaaaatgcttcttctgcgaaggcttgaggcggcggaggggcacgcggatctccccaata

SEQ ID NO: 180185 - DNA, 122 bp, Homo sapiens
  chr16:30040913-30041035
  hypo
aacgactgcgctttgcgttcagccacttctcgggccagtccttgcctgccttcgcccaaggctgggctgcctgaggtgtgccccaccacaggtacctcacggctctccggcccgctcggctg

SEQ ID NO: 180186 - DNA, 205 bp, Homo sapiens
  chr16:30061413-30061618
  hypo
gggcactgcaggccacggacgtgtccaggggccttgccaaggctgaagtctctctgttggcagaatatgcagaatatgtgttcctggaggccttttgtagggctgaggtgagaactggcctcaacttggtcctcaggattccatcagacaataagaccgcccaaggccgggcacagtggttcacgcttgtaatcccagcaattcg

SEQ ID NO: 180187 - DNA, 121 bp, Homo sapiens; identical to SEQ ID NO: 90296
  chr16:30073148-30073269
  hypo

SEQ ID NO: 180188 - DNA, 34 bp, Homo sapiens
  chr16:30079667-30079701
  hypo
agccaccatgcccggcttaagtaactaaatattt

SEQ ID NO: 180189 - DNA, 30 bp, Homo sapiens; identical to SEQ ID NO: 90297
  chr16:30080784-30080814
  hypo

SEQ ID NO: 180190 - DNA, 30 bp, Homo sapiens; identical to SEQ ID NO: 29147
  chr16:30100415-30100445
  hypo

SEQ ID NO: 180191 - DNA, 202 bp, Homo sapiens; identical to SEQ ID NO: 29148
  chr16:30116120-30116322
  hypo

SEQ ID NO: 180192 - DNA, 50 bp, Homo sapiens
  chr16:30124064-30124114
  hypo
gtgtcagctgacagtcgagctccaggaggtccgagcgctgggccatggag

SEQ ID NO: 180193 - DNA, 361 bp, Homo sapiens; identical to SEQ ID NO: 90301
  chr16:30124533-30124894
  hypo

SEQ ID NO: 180194 - DNA, 128 bp, Homo sapiens; identical to SEQ ID NO: 90302
  chr16:30125290-30125418
  hypo

SEQ ID NO: 180195 - DNA, 22 bp, Homo sapiens
  chr16:30158379-30158401
  hypo
gagccaccgtgcccggcccggt

SEQ ID NO: 180196 - DNA, 156 bp, Homo sapiens; identical to SEQ ID NO: 29152
  chr16:30169919-30170075
  hypo

SEQ ID NO: 180197 - DNA, 304 bp, Homo sapiens
  chr16:30195221-30195525
  hypo
gccggggccccagagcgctctgcggaggcgagggctagggaccaccgcggccaagatggaggtgggtggccgggggtcagcacagtgtcgagggcccgactccccacggaattgagtctcggggagggtggggacgagggcagggtggggtgagcggggcagctgccctgggcttggagacaggaaggggttgagagcaaaacaagaaaagaccaagttcccctttccgtggtttccgggcctggtacctgtggtgggggaggaggcagggtggggcgatggcttcctgtcccccacctctggt

SEQ ID NO: 180198 - DNA, 147 bp, Homo sapiens
  chr16:30195626-30195773
  hypo
cgggagtcctggggtggccgggggtgctggagcccccagtgagtaggcgaggctgaggctaggggcagaggctctgggcatggcaccctccaagcggcagcacaggccccttccctgagcaggaaggtgatgcggtggcacaaggtc

SEQ ID NO: 180199 - DNA, 30 bp, Homo sapiens; identical to SEQ ID NO: 90304
  chr16:30198771-30198801
  hypo

SEQ ID NO: 180200 - DNA, 404 bp, Homo sapiens; identical to SEQ ID NO: 90305
  chr16:30199142-30199546
  hypo

SEQ ID NO: 180201 - DNA, 199 bp, Homo sapiens; identical to SEQ ID NO: 90306
  chr16:30354616-30354815
  hypo

SEQ ID NO: 180202 - DNA, 31 bp, Homo sapiens; identical to SEQ ID NO: 90307
  chr16:30362422-30362453
  hypo

SEQ ID NO: 180203 - DNA, 30 bp, Homo sapiens; identical to SEQ ID NO: 90308
  chr16:30369805-30369835
  hypo

SEQ ID NO: 180204 - DNA, 31 bp, Homo sapiens; identical to SEQ ID NO: 29154
  chr16:30381967-30381998
  hypo

SEQ ID NO: 180205 - DNA, 30 bp, Homo sapiens; identical to SEQ ID NO: 90310
  chr16:30386029-30386059
  hypo

SEQ ID NO: 180206 - DNA, 158 bp, Homo sapiens; identical to SEQ ID NO: 90311
  chr16:30402327-30402485
  hypo

SEQ ID NO: 180207 - DNA, 30 bp, Homo sapiens
  chr16:30415213-30415243
  hypo
taggtgtgaccaccgcgcatggcccaaaaa

SEQ ID NO: 180208 - DNA, 30 bp, Homo sapiens
  chr16:30415713-30415743
  hypo
tatccaggccgggcgcggtggctcacgcct

SEQ ID NO: 180209 - DNA, 64 bp, Homo sapiens; identical to SEQ ID NO: 90312
  chr16:30430046-30430110
  hypo

SEQ ID NO: 180210 - DNA, 53 bp, Homo sapiens; identical to SEQ ID NO: 90313
  chr16:30442021-30442074
  hypo

SEQ ID NO: 180211 - DNA, 29 bp, Homo sapiens
  chr16:30476455-30476484
  hypo
atcatatagggccaggcgcagtggctcag

SEQ ID NO: 180212 - DNA, 40 bp, Homo sapiens
  chr16:30506740-30506780
  hypo
aaatgctgggattacaggcgtgagccgctgcacctggtag

SEQ ID NO: 180213 - DNA, 30 bp, Homo sapiens; identical to SEQ ID NO: 90315
  chr16:30535918-30535948
  hypo

SEQ ID NO: 180214 - DNA, 205 bp, Homo sapiens
  chr16:30537513-30537718
  hypo
agacaccccagtccccgccggcccctccttcgagtcccaggtgtcccagccccgggccctcgctccctccctggagccacagccccttctcctgcgcgcaagtccactcctcggacgggcgctccctcctcacctctgaggtacccttcggggctcctcatttcgtcagaactctgcacatcctggggctcgaggccccacggca

SEQ ID NO: 180215 - DNA, 30 bp, Homo sapiens; identical to SEQ ID NO: 90317
  chr16:30543905-30543935
  hypo

SEQ ID NO: 180216 - DNA, 31 bp, Homo sapiens; identical to SEQ ID NO: 29157
  chr16:30562563-30562594
  hypo

SEQ ID NO: 180217 - DNA, 851 bp, Homo sapiens; identical to SEQ ID NO: 90319
  chr16:30566777-30567628
  hypo

SEQ ID NO: 180218 - DNA, 112 bp, Homo sapiens; identical to SEQ ID NO: 90320
  chr16:30567839-30567951
  hypo

SEQ ID NO: 180219 - DNA, 30 bp, Homo sapiens
  chr16:30573640-30573670
  hypo
cgaccgagggcctgacgtccccttcccagt

SEQ ID NO: 180220 - DNA, 30 bp, Homo sapiens; identical to SEQ ID NO: 90321
  chr16:30594461-30594491
  hypo

SEQ ID NO: 180221 - DNA, 690 bp, Homo sapiens; identical to SEQ ID NO: 127070
  chr16:30596383-30597073
  hypo

SEQ ID NO: 180222 - DNA, 39 bp, Homo sapiens; identical to SEQ ID NO: 90323
  chr16:30609412-30609451
  hypo

SEQ ID NO: 180223 - DNA, 34 bp, Homo sapiens
  chr16:30610866-30610900
  hypo
gattacagacgtgagccaccgcgcccggccatgt

SEQ ID NO: 180224 - DNA, 31 bp, Homo sapiens; identical to SEQ ID NO: 29159
  chr16:30617002-30617033
  hypo

SEQ ID NO: 180225 - DNA, 31 bp, Homo sapiens; identical to SEQ ID NO: 29160
  chr16:30628279-30628310
  hypo

SEQ ID NO: 180226 - DNA, 30 bp, Homo sapiens
  chr16:30675865-30675895
  hypo
gggggccatcaccccgggctcgggcccagt

SEQ ID NO: 180227 - DNA, 30 bp, Homo sapiens; identical to SEQ ID NO: 90326
  chr16:30676429-30676459
  hypo

SEQ ID NO: 180228 - DNA, 30 bp, Homo sapiens; identical to SEQ ID NO: 90327
  chr16:30681981-30682011
  hypo

SEQ ID NO: 180229 - DNA, 30 bp, Homo sapiens; identical to SEQ ID NO: 90328
  chr16:30683050-30683080
  hypo

SEQ ID NO: 180230 - DNA, 30 bp, Homo sapiens; identical to SEQ ID NO: 90329
  chr16:30685937-30685967
  hypo

SEQ ID NO: 180231 - DNA, 31 bp, Homo sapiens; identical to SEQ ID NO: 90330
  chr16:30700819-30700850
  hypo

SEQ ID NO: 180232 - DNA, 48 bp, Homo sapiens
  chr16:30737304-30737352
  hypo
aacttagaacctttccgtggccccaaaaagaaacgctgcacctgttag

SEQ ID NO: 180233 - DNA, 30 bp, Homo sapiens
  chr16:30750467-30750497
  hypo
gtggattggggaggcgacggcaaccccagg

SEQ ID NO: 180234 - DNA, 30 bp, Homo sapiens; identical to SEQ ID NO: 90331
  chr16:30768660-30768690
  hypo

SEQ ID NO: 180235 - DNA, 30 bp, Homo sapiens; identical to SEQ ID NO: 90332
  chr16:30775643-30775673
  hypo

SEQ ID NO: 180236 - DNA, 116 bp, Homo sapiens; identical to SEQ ID NO: 90333
  chr16:30780231-30780347
  hypo

SEQ ID NO: 180237 - DNA, 30 bp, Homo sapiens
  chr16:30783204-30783234
  hypo
gtgcagactcggctgcgggagatccagccc

SEQ ID NO: 180238 - DNA, 57 bp, Homo sapiens; identical to SEQ ID NO: 29162
  chr16:30784031-30784088
  hypo

SEQ ID NO: 180239 - DNA, 69 bp, Homo sapiens
  chr16:30790406-30790475
  hypo
tttcctaccgcaagacgcctgaccctacgaactgtgcgctcacatcatccatcccgtacaagagccaag

SEQ ID NO: 180240 - DNA, 30 bp, Homo sapiens; identical to SEQ ID NO: 29163
  chr16:30794190-30794220
  hypo

SEQ ID NO: 180241 - DNA, 101 bp, Homo sapiens; identical to SEQ ID NO: 90336
  chr16:30794664-30794765
  hypo

SEQ ID NO: 180242 - DNA, 30 bp, Homo sapiens; identical to SEQ ID NO: 90337
  chr16:30795252-30795282
  hypo

SEQ ID NO: 180243 - DNA, 30 bp, Homo sapiens; identical to SEQ ID NO: 90338
  chr16:30795728-30795758
  hypo

SEQ ID NO: 180244 - DNA, 30 bp, Homo sapiens
  chr16:30803256-30803286
  hypo
cgtggatcctaaacacgtctctcctgctca

SEQ ID NO: 180245 - DNA, 40 bp, Homo sapiens
  chr16:30803840-30803880
  hypo
gattacaggcgtgaaccaccatgcccggcccaatgctctt

SEQ ID NO: 180246 - DNA, 199 bp, Homo sapiens; identical to SEQ ID NO: 90339
  chr16:30826378-30826577
  hypo

SEQ ID NO: 180247 - DNA, 42 bp, Homo sapiens; identical to SEQ ID NO: 90340
  chr16:30831398-30831440
  hypo

SEQ ID NO: 180248 - DNA, 119 bp, Homo sapiens; identical to SEQ ID NO: 90341
  chr16:30833277-30833396
  hypo

SEQ ID NO: 180249 - DNA, 48 bp, Homo sapiens
  chr16:30835265-30835313
  hypo
ttggaggcatccccgcgggcttggtcccctggcgtgtgtcatcaggcc

SEQ ID NO: 180250 - DNA, 661 bp, Homo sapiens; identical to SEQ ID NO: 90343
  chr16:30845546-30846207
  hypo

SEQ ID NO: 180251 - DNA, 25 bp, Homo sapiens
  chr16:30853903-30853928
  hypo
ttttaaaacagagtctcgctctgtc

SEQ ID NO: 180252 - DNA, 154 bp, Homo sapiens; identical to SEQ ID NO: 127089
  chr16:30905624-30905778
  hypo

SEQ ID NO: 180253 - DNA, 285 bp, Homo sapiens; identical to SEQ ID NO: 90345
  chr16:30906985-30907270
  hypo

SEQ ID NO: 180254 - DNA, 30 bp, Homo sapiens; identical to SEQ ID NO: 90346
  chr16:30922430-30922460
  hypo

SEQ ID NO: 180255 - DNA, 30 bp, Homo sapiens; identical to SEQ ID NO: 90347
  chr16:30937139-30937169
  hypo

SEQ ID NO: 180256 - DNA, 43 bp, Homo sapiens; identical to SEQ ID NO: 90348
  chr16:30938665-30938708
  hypo

SEQ ID NO: 180257 - DNA, 214 bp, Homo sapiens
  chr16:30939037-30939251
  hypo
cctcacccccagcttctgtcccgcctaggattcaggtgaggggcctggccgccgtagggccgacaacggcgaggagggcgccagcttggggagcggatggaagctgacagaggagccaccgcttccaccgcccccgcccaggcgcaagggccccctgcctgccgggccccccccggaggacgtgcctgggccccccaaacgaaaggaaagggag

SEQ ID NO: 180258 - DNA, 199 bp, Homo sapiens; identical to SEQ ID NO: 90350
  chr16:30939778-30939977
  hypo

SEQ ID NO: 180259 - DNA, 31 bp, Homo sapiens; identical to SEQ ID NO: 29170
  chr16:30941312-30941343
  hypo

SEQ ID NO: 180260 - DNA, 30 bp, Homo sapiens; identical to SEQ ID NO: 90352
  chr16:30941743-30941773
  hypo

SEQ ID NO: 180261 - DNA, 459 bp, Homo sapiens; identical to SEQ ID NO: 90353
  chr16:30958050-30958509
  hypo

SEQ ID NO: 180262 - DNA, 557 bp, Homo sapiens; identical to SEQ ID NO: 127098
  chr16:30959756-30960313
  hypo

SEQ ID NO: 180263 - DNA, 31 bp, Homo sapiens; identical to SEQ ID NO: 10635
  chr16:30964524-30964555
  hypo

SEQ ID NO: 180264 - DNA, 268 bp, Homo sapiens; identical to SEQ ID NO: 52999
  chr16:30964612-30964880
  hypo

SEQ ID NO: 180265 - DNA, 65 bp, Homo sapiens; identical to SEQ ID NO: 90357
  chr16:30968111-30968176
  hypo

SEQ ID NO: 180266 - DNA, 30 bp, Homo sapiens; identical to SEQ ID NO: 90358
  chr16:30989019-30989049
  hypo

SEQ ID NO: 180267 - DNA, 30 bp, Homo sapiens
  chr16:30991018-30991048
  hypo
ggccgtcaagcccacgccccctgcgccagc

SEQ ID NO: 180268 - DNA, 227 bp, Homo sapiens
  chr16:30991259-30991486
  hypo
ggggagggcgccctccggaggcgcagcctccgctcccacgcccggcgccgccgccctccgcccccacccccgccgccaccgccccgcgcctacgagccacgcagtgagtttgaacagatgaccatcctgtatgacatttggaactcgggcctggactcagaggacatgagttacctgcggcttacgtacgagcggctgctgcagcagacaagcggggctgactggct

SEQ ID NO: 180269 - DNA, 254 bp, Homo sapiens
  chr16:30991712-30991966
  hypo
ctgggtatgctcagcggcgtgggccccgccctctcctttggctgggacgcaggtggccagagaggagccgttctcttccttaacaccctgcactcaccaacctgaccaccccaaaacgcaagcggcggccccaggatgggccccgggagcaccagacaggctcagcccgcagcgaaggctactaccccatcagcaagaaggagaaggacaagtacctggacgtgtgcccagtctcggcccggcagctggagggc

SEQ ID NO: 180270 - DNA, 30 bp, Homo sapiens; identical to SEQ ID NO: 90360
  chr16:30993470-30993500
  hypo

SEQ ID NO: 180271 - DNA, 149 bp, Homo sapiens; identical to SEQ ID NO: 29176
  chr16:30993850-30993999
  hypo

SEQ ID NO: 180272 - DNA, 30 bp, Homo sapiens; identical to SEQ ID NO: 29177
  chr16:30994494-30994524
  hypo

SEQ ID NO: 180273 - DNA, 205 bp, Homo sapiens; identical to SEQ ID NO: 90363
  chr16:30995027-30995232
  hypo

SEQ ID NO: 180274 - DNA, 151 bp, Homo sapiens; identical to SEQ ID NO: 90364
  chr16:30999437-30999588
  hypo

SEQ ID NO: 180275 - DNA, 211 bp, Homo sapiens
  chr16:31000908-31001119
  hypo
ctacatcacgtgacacgccagtgacacagaaacacacgccaacgcacacggctgcacagcgggcaggggcggttaggggaaagggagccggggccacccatcttgtcctctgcagggcgggctggggggcagggtgaatgcatagaacacatcatgtgtacacgctcagggcgtggcaagagcgtgtgtcgacccacgggtacatgggatg

SEQ ID NO: 180276 - DNA, 31 bp, Homo sapiens; identical to SEQ ID NO: 90366
  chr16:31002040-31002071
  hypo

SEQ ID NO: 180277 - DNA, 64 bp, Homo sapiens
  chr16:31009763-31009827
  hypo
atggcccagggatattggaatcggctggcccagattggggcccgactgtcagccttggggctgg

SEQ ID NO: 180278 - DNA, 189 bp, Homo sapiens; identical to SEQ ID NO: 90367
  chr16:31012747-31012936
  hypo

SEQ ID NO: 180279 - DNA, 105 bp, Homo sapiens; identical to SEQ ID NO: 90368
  chr16:31013739-31013844
  hypo

SEQ ID NO: 180280 - DNA, 38 bp, Homo sapiens
  chr16:31039943-31039981
  hypo
tcttgttgcccccagcgtacaatggcgcagtcttggct

SEQ ID NO: 180281 - DNA, 30 bp, Homo sapiens; identical to SEQ ID NO: 29179
  chr16:31053308-31053338
  hypo

SEQ ID NO: 180282 - DNA, 30 bp, Homo sapiens; identical to SEQ ID NO: 90370
  chr16:31072199-31072229
  hypo

SEQ ID NO: 180283 - DNA, 30 bp, Homo sapiens
  chr16:31073019-31073049
  hypo
tgcttcctcaggctcgacgacaccacaaag

SEQ ID NO: 180284 - DNA, 30 bp, Homo sapiens; identical to SEQ ID NO: 90371
  chr16:31073251-31073281
  hypo

SEQ ID NO: 180285 - DNA, 109 bp, Homo sapiens; identical to SEQ ID NO: 90372
  chr16:31073552-31073661
  hypo

SEQ ID NO: 180286 - DNA, 335 bp, Homo sapiens; identical to SEQ ID NO: 127108
  chr16:31075205-31075540
  hypo

SEQ ID NO: 180287 - DNA, 231 bp, Homo sapiens
  chr16:31099848-31100079
  hypo
cacaggccccgccaacgcaaactgcagctggcccgagaaaatctcatccatgttgacacaggtggccacatataccaccccacagagtcctacggagttacatccccactggtggactgtcgcccacaggcggtccccccaccaagaagcagggactgctggggcagagatggcccctgagcccccaccaggccacacccataccccagcacatggcggcttaccctccat

SEQ ID NO: 180288 - DNA, 29 bp, Homo sapiens
  chr16:31114851-31114880
  hypo
aaaatacattgaaagcgcttagaaagccg

SEQ ID NO: 180289 - DNA, 320 bp, Homo sapiens; identical to SEQ ID NO: 127112
  chr16:31117072-31117392
  hypo

SEQ ID NO: 180290 - DNA, 320 bp, Homo sapiens; identical to SEQ ID NO: 29183
  chr16:31131558-31131878
  hypo

SEQ ID NO: 180291 - DNA, 426 bp, Homo sapiens; identical to SEQ ID NO: 29184
  chr16:31138386-31138812
  hypo

SEQ ID NO: 180292 - DNA, 307 bp, Homo sapiens
  chr16:31142699-31143006
  hypo
aaggggaggccaagagcggatgttcttcatttcacttcacacatgcacggcaagttgtgctcaaacattttaatcatttctgccctgttactcccaccccagatccaagcgccagcccagttccggtgggggctcagtcctccggagtccaggagtcagggctcgggggcgctcagcggccagtgggcaagattggggcctttcctgtcctcgaagctgcacaaaggtggccccagcccagaacacagggagagggcagagagatgtgctcatcagtctgggcaggcgggccgggagcagtcttcca

SEQ ID NO: 180293 - DNA, 31 bp, Homo sapiens
  chr16:31143796-31143827
  hypo
cctcttggacaaagtgcggctcctcaggctt

SEQ ID NO: 180294 - DNA, 272 bp, Homo sapiens; identical to SEQ ID NO: 53009
  chr16:31153836-31154108
  hypo

SEQ ID NO: 180295 - DNA, 30 bp, Homo sapiens; identical to SEQ ID NO: 29187
  chr16:31203778-31203808
  hypo

SEQ ID NO: 180296 - DNA, 30 bp, Homo sapiens; identical to SEQ ID NO: 29188
  chr16:31234390-31234420
  hypo

SEQ ID NO: 180297 - DNA, 30 bp, Homo sapiens; identical to SEQ ID NO: 29189
  chr16:31236024-31236054
  hypo

SEQ ID NO: 180298 - DNA, 30 bp, Homo sapiens
  chr16:31285363-31285393
  hypo
gcagtgcaaggttagcgataaccaggtcca

SEQ ID NO: 180299 - DNA, 30 bp, Homo sapiens; identical to SEQ ID NO: 90383
  chr16:31374278-31374308
  hypo

SEQ ID NO: 180300 - DNA, 30 bp, Homo sapiens; identical to SEQ ID NO: 90384
  chr16:31374537-31374567
  hypo

SEQ ID NO: 180301 - DNA, 31 bp, Homo sapiens; identical to SEQ ID NO: 90385
  chr16:31381550-31381581
  hypo

SEQ ID NO: 180302 - DNA, 111 bp, Homo sapiens
  chr16:31384659-31384770
  hypo
caccttctcccaccccgcaggactgtcctaccgctacgtggcagagggccaggtgcaccctctggggaaggaggaggaggcagggctgggcgttagcgtagattcccgtgc

SEQ ID NO: 180303 - DNA, 31 bp, Homo sapiens; identical to SEQ ID NO: 90386
  chr16:31408992-31409023
  hypo

SEQ ID NO: 180304 - DNA, 115 bp, Homo sapiens
  chr16:31415512-31415627
  hypo
actcacctcctctcccgcatccctcacccctgcgcaccccctgtgctacccaggcactcaccgtgggcctgccccgtgcacatgcagtctattcctaaaacgatgtaggaggtgg

SEQ ID NO: 180305 - DNA, 307 bp, Homo sapiens
  chr16:31422483-31422790
  hypo
tactatgagcagacccgagggggccaggtgtccgtgtgtcccttgcctaggggggtgagtggctgatgggacctaggctgggtggggtccggtgtgagtggaggcgtcacctggattggggtctgacactgcttgtgttcagcagagggtgcagtggcagtgtgacgctgttctccgtggtgagcagggccacccctggggccgctttggggcagccctgacagtgttgggggatgtgaatgaggacaagctgatagacgtggccattggggccccgggagagcaggagaaccggggtgctgtctac

SEQ ID NO: 180306 - DNA, 51 bp, Homo sapiens; identical to SEQ ID NO: 90387
  chr16:31438630-31438681
  hypo

SEQ ID NO: 180307 - DNA, 577 bp, Homo sapiens; identical to SEQ ID NO: 29190
  chr16:31446853-31447430
  hypo

SEQ ID NO: 180308 - DNA, 30 bp, Homo sapiens; identical to SEQ ID NO: 29191
  chr16:31447987-31448017
  hypo

SEQ ID NO: 180309 - DNA, 422 bp, Homo sapiens; identical to SEQ ID NO: 127124
  chr16:31453941-31454363
  hypo

SEQ ID NO: 180310 - DNA, 203 bp, Homo sapiens; identical to SEQ ID NO: 90391
  chr16:31464578-31464781
  hypo

SEQ ID NO: 180311 - DNA, 352 bp, Homo sapiens; identical to SEQ ID NO: 90392
  chr16:31475824-31476176
  hypo

SEQ ID NO: 180312 - DNA, 216 bp, Homo sapiens
  chr16:31487138-31487354
  hypo
ggtcaatcctggagcgcagctggaagacggaacacgggagctagatctccatcgcttacaggctgcgtgatctcgaacactggattctttattctgatcgctcagagaggactcgaaaaacgccgcgtaaatcttgcctcactgggcatgtggttgtcagagccgctctgacccgcctcacctcccactcgcaggtggtgacggctctgggccgcg

SEQ ID NO: 180313 - DNA, 185 bp, Homo sapiens; identical to SEQ ID NO: 127129
  chr16:31487757-31487942
  hypo

SEQ ID NO: 180314 - DNA, 31 bp, Homo sapiens; identical to SEQ ID NO: 90394
  chr16:31496889-31496920
  hypo

SEQ ID NO: 180315 - DNA, 153 bp, Homo sapiens; identical to SEQ ID NO: 29193
  chr16:31497940-31498093
  hypo

SEQ ID NO: 180316 - DNA, 514 bp, Homo sapiens
  chr16:31500251-31500765
  hypo
gcaggcggcacagggcgggcagctcttcgattacatccaggcagtctctagctacctggcaccgcccgtgtccgccgtcttcgtgctggcgctcttcgtgccgcgcgttaatgagcaggtgagcggcacgcgcgtggtgacggcagggctgggcttgcacatcctcagcaggctgacctgtttccttcgcagggcgccttctggggactcatcgggggcctgctgatgggcctggcacgcctgattcccgagttctccttcggctcgggcagctgtgtgcagccctcggcgtgcccagctttcctctgcggcgtgcactacctctacttcgccattgtgctgttcttctgctctggcctcctcaccctcacggtctccctgtgcaccgcgcccatccccagaaagcacgtgagtggccaggtgccccaggcaagcactgtgggacacagcacctaccctctgcttcctggagtgcccagctgggaggacctgaatttctcgactgagggttggg

SEQ ID NO: 180317 - DNA, 30 bp, Homo sapiens; identical to SEQ ID NO: 90397
  chr16:31503994-31504024
  hypo

SEQ ID NO: 180318 - DNA, 165 bp, Homo sapiens
  chr16:31508121-31508286
  hypo
ccccttcccctccccactccacgccctccctccagctctggcactcacctggctgctgtccttggctgacacgtcagccatgttgttcctccgagcctggtgcacggtcagggcagcccgagtggccccaccagcaacactcacgatgcactgggtgggagggga

SEQ ID NO: 180319 - DNA, 31 bp, Homo sapiens; identical to SEQ ID NO: 90399
  chr16:31548220-31548251
  hypo

SEQ ID NO: 180320 - DNA, 38 bp, Homo sapiens
  chr16:31557994-31558032
  hypo
aaaatgtctaagttggaaacaacggtaagtggacaata

SEQ ID NO: 180321 - DNA, 61 bp, Homo sapiens; identical to SEQ ID NO: 90401
  chr16:31607114-31607175
  hypo

SEQ ID NO: 180322 - DNA, 411 bp, Homo sapiens; identical to SEQ ID NO: 127137
  chr16:31712178-31712589
  hypo

SEQ ID NO: 180323 - DNA, 30 bp, Homo sapiens; identical to SEQ ID NO: 29196
  chr16:31722459-31722489
  hypo

SEQ ID NO: 180324 - DNA, 161 bp, Homo sapiens
  chr16:31725777-31725938
  hypo
ggagagtggaggaaggtctgacgtttgctatcctggggtaggttttagagctcgctagatgcttgtggagagctgatgagatgggaagaaggcaccccacctcgatggacctgaaagagagagcctgcgaattgagaagcgggtgtgtggaataaccctga

SEQ ID NO: 180325 - DNA, 24 bp, Homo sapiens
  chr16:31932457-31932481
  hypo
ggttttttttttgagacggagtct

SEQ ID NO: 180326 - DNA, 199 bp, Homo sapiens; identical to SEQ ID NO: 90404
  chr16:32485423-32485622
  hypo

SEQ ID NO: 180327 - DNA, 37 bp, Homo sapiens; identical to SEQ ID NO: 90405
  chr16:32649133-32649170
  hypo

SEQ ID NO: 180328 - DNA, 176 bp, Homo sapiens; identical to SEQ ID NO: 90406
  chr16:34986006-34986182
  hypo

SEQ ID NO: 180329 - DNA, 30 bp, Homo sapiens; identical to SEQ ID NO: 90407
  chr16:46615071-46615101
  hypo

SEQ ID NO: 180330 - DNA, 543 bp, Homo sapiens
  chr16:46683290-46683833
  hypo
aacattgcctccagccgagactgcgcagagatgaacttcaggggagaaaaaagaaacacatgtcacagtttttcttaaaccgtgagagaggaggagcaggaggagaagagaccagagcccctctcccaggcaccggggctttccttggatgtcctgagactcaagatttctcacctctgcaggtggacctgataatcctacgcagaagaaccgctacagggcagcgagaacgcctgcaatggcagcagacagccgagcctccccagcacggcgtctcccgggacaaatgagcgtccacgtcgcttgacgtcatggtgtgtgcatttgtcctgtgctgggctccctacactgctcgtgatcatcggagctgcctgccacgggtcacatgtccagcactttctctatgagacacgcttctggctccactggctgaattcggctatcagccctcttccgtactcattctgccacgagtttcagaaaagcattccatcaaaccgctgtgtcctggaaaggctgagcgagatccacccacccccatat

SEQ ID NO: 180331 - DNA, 23 bp, Homo sapiens
  chr16:46688038-46688061
  hypo
agggagaccgtggggagagggag

SEQ ID NO: 180332 - DNA, 98 bp, Homo sapiens; identical to SEQ ID NO: 29199
  chr16:46717907-46718005
  hypo

SEQ ID NO: 180333 - DNA, 49 bp, Homo sapiens
  chr16:46721677-46721726
  hypo
tcggatgcaaaagtgcgacaccaagaagactaagcgagctgcctaaatt

SEQ ID NO: 180334 - DNA, 30 bp, Homo sapiens; identical to SEQ ID NO: 29200
  chr16:46726872-46726902
  hypo

SEQ ID NO: 180335 - DNA, 30 bp, Homo sapiens
  chr16:46762904-46762934
  hypo
ccgaggcggccgccccgcctctgatactca

SEQ ID NO: 180336 - DNA, 110 bp, Homo sapiens; identical to SEQ ID NO: 90412
  chr16:46781698-46781808
  hypo

SEQ ID NO: 180337 - DNA, 31 bp, Homo sapiens; identical to SEQ ID NO: 90413
  chr16:46920967-46920998
  hypo

SEQ ID NO: 180338 - DNA, 304 bp, Homo sapiens
  chr16:46934653-46934957
  hypo
aagaaacgtgcccggcggatcctgcaggcttgtggcgggaacagcctgggtgaggccccaacttgccaggcccctaggcgtgaaatgaatgagtgttcccaggcggccccagcctcaagcggagggtcctgcatgcgaatgggtgtgtgaacgtgtgtgggtggctgacagcacacagagtaaacaaaaaatagcgtcctcttcccactcacaccttgctggcctcgtttattaagcaggcggtgccggtgccacctttaggtgcaagtgcctgcatcatgccgggtgtgggtgctcctcctgg

SEQ ID NO: 180339 - DNA, 94 bp, Homo sapiens
  chr16:46941060-46941154
  hypo
gcctagacactactgcagcctcgatttctgtccggagtgcacaccagcaggtccagctgcagagaagccgggggacacccgagggtagccactg

SEQ ID NO: 180340 - DNA, 138 bp, Homo sapiens; identical to SEQ ID NO: 29203
  chr16:46945508-46945646
  hypo

SEQ ID NO: 180341 - DNA, 79 bp, Homo sapiens; identical to SEQ ID NO: 29204
  chr16:46952489-46952568
  hypo

SEQ ID NO: 180342 - DNA, 31 bp, Homo sapiens; identical to SEQ ID NO: 29205
  chr16:46964712-46964743
  hypo

SEQ ID NO: 180343 - DNA, 35 bp, Homo sapiens; identical to SEQ ID NO: 29206
  chr16:46992084-46992119
  hypo

SEQ ID NO: 180344 - DNA, 45 bp, Homo sapiens; identical to SEQ ID NO: 29207
  chr16:47001891-47001936
  hypo

SEQ ID NO: 180345 - DNA, 30 bp, Homo sapiens; identical to SEQ ID NO: 90420
  chr16:47117077-47117107
  hypo

SEQ ID NO: 180346 - DNA, 27 bp, Homo sapiens
  chr16:47172024-47172051
  hypo
gcccagggccaggcgcggtgactcacg

SEQ ID NO: 180347 - DNA, 1115 bp, Homo sapiens; identical to SEQ ID NO: 127145
  chr16:47176461-47177576
  hypo

SEQ ID NO: 180348 - DNA, 118 bp, Homo sapiens; identical to SEQ ID NO: 10650
  chr16:47177628-47177746
  hypo

SEQ ID NO: 180349 - DNA, 624 bp, Homo sapiens; identical to SEQ ID NO: 10651
  chr16:47177805-47178429
  hypo

SEQ ID NO: 180350 - DNA, 20 bp, Homo sapiens
  chr16:47216665-47216685
  hypo
ggtgggaggagccaagatgg

SEQ ID NO: 180351 - DNA, 41 bp, Homo sapiens; identical to SEQ ID NO: 29211
  chr16:47288964-47289005
  hypo

SEQ ID NO: 180352 - DNA, 30 bp, Homo sapiens; identical to SEQ ID NO: 29212
  chr16:47362864-47362894
  hypo

SEQ ID NO: 180353 - DNA, 30 bp, Homo sapiens; identical to SEQ ID NO: 29213
  chr16:47497807-47497837
  hypo

SEQ ID NO: 180354 - DNA, 31 bp, Homo sapiens; identical to SEQ ID NO: 29214
  chr16:47567943-47567974
  hypo

SEQ ID NO: 180355 - DNA, 30 bp, Homo sapiens
  chr16:48041507-48041537
  hypo
aggggcatcacatgccgggcttgtgtgtgt

SEQ ID NO: 180356 - DNA, 30 bp, Homo sapiens
  chr16:48138074-48138104
  hypo
cagcaaggctggccacgactaaaaggacag

SEQ ID NO: 180357 - DNA, 190 bp, Homo sapiens; identical to SEQ ID NO: 29215
  chr16:48177831-48178021
  hypo

SEQ ID NO: 180358 - DNA, 108 bp, Homo sapiens; identical to SEQ ID NO: 90430
  chr16:48209331-48209439
  hypo

SEQ ID NO: 180359 - DNA, 31 bp, Homo sapiens; identical to SEQ ID NO: 90431
  chr16:48243649-48243680
  hypo

SEQ ID NO: 180360 - DNA, 46 bp, Homo sapiens
  chr16:48290943-48290989
  hypo
tttgactgggtgctcacgcctgtagtcccagcactttgggaggctg

SEQ ID NO: 180361 - DNA, 215 bp, Homo sapiens
  chr16:48291760-48291975
  hypo
tgcgggaacagagagcggcctgtgctccgacaaatcactagtgagagttggttgagtgcttctgttctcttgtgtatgtaaacatttaatattttgaacctataatttgtttagatctaatatgaaaacacattctgggcttcaagagagtaattcccagaaagagttgacgtcaactgtgtgtctggttttttcatcttaaaaacacacagctt

SEQ ID NO: 180362 - DNA, 352 bp, Homo sapiens; identical to SEQ ID NO: 90433
  chr16:48381405-48381757
  hypo

SEQ ID NO: 180363 - DNA, 30 bp, Homo sapiens
  chr16:48385516-48385546
  hypo
tggcggcacacagagcgggactgaagcaag

SEQ ID NO: 180364 - DNA, 91 bp, Homo sapiens
  chr16:48418232-48418323
  hypo
acttttctgaatgtccgagcaaacaaattatgtatctttccaggaacgggcagacagcgaaaacgaacctacgcatcggagtggcccaggt

SEQ ID NO: 180365 - DNA, 98 bp, Homo sapiens; identical to SEQ ID NO: 90434
  chr16:48420735-48420833
  hypo

SEQ ID NO: 180366 - DNA, 154 bp, Homo sapiens; identical to SEQ ID NO: 90435
  chr16:48530538-48530692
  hypo

SEQ ID NO: 180367 - DNA, 87 bp, Homo sapiens; identical to SEQ ID NO: 90436
  chr16:48530909-48530996
  hypo

SEQ ID NO: 180368 - DNA, 100 bp, Homo sapiens
  chr16:48535067-48535167
  hypo
tgcacccggtctcggacgcattttcattaggtgccctctgacgtcagcagctggttgaaggtttaatggcttagagtgcgcacagagtggggtgggaact

SEQ ID NO: 180369 - DNA, 157 bp, Homo sapiens; identical to SEQ ID NO: 29219
  chr16:48577582-48577739
  hypo

SEQ ID NO: 180370 - DNA, 143 bp, Homo sapiens; identical to SEQ ID NO: 29220
  chr16:48641645-48641788
  hypo

SEQ ID NO: 180371 - DNA, 121 bp, Homo sapiens; identical to SEQ ID NO: 29221
  chr16:48642027-48642148
  hypo

SEQ ID NO: 180372 - DNA, 23 bp, Homo sapiens
  chr16:48642207-48642230
  hypo
ccggcctacaatgttttaagtta

SEQ ID NO: 180373 - DNA, 148 bp, Homo sapiens; identical to SEQ ID NO: 90441
  chr16:48663528-48663676
  hypo

SEQ ID NO: 180374 - DNA, 30 bp, Homo sapiens
  chr16:49050739-49050769
  hypo
gcaagaaggcactcacgatctgtgcctcgg

SEQ ID NO: 180375 - DNA, 1356 bp, Homo sapiens; identical to SEQ ID NO: 127163
  chr16:49314959-49316315
  hypo

SEQ ID NO: 180376 - DNA, 30 bp, Homo sapiens; identical to SEQ ID NO: 29225
  chr16:49358814-49358844
  hypo

SEQ ID NO: 180377 - DNA, 115 bp, Homo sapiens
  chr16:49465045-49465160
  hypo
ctaccctcgacatcccgaatcctgatgtcaccactctaaacaaaacatttaccagcaccctcccatggcggcaccgtgactgcccgcacaagggcccccacgtgtgagttctccc

SEQ ID NO: 180378 - DNA, 30 bp, Homo sapiens
  chr16:49539557-49539587
  hypo
actttatgattgtgacggttcttgggaaac

SEQ ID NO: 180379 - DNA, 30 bp, Homo sapiens
  chr16:49540040-49540070
  hypo
gaaattaagagcacacgaagaaggcatccg

SEQ ID NO: 180380 - DNA, 30 bp, Homo sapiens; identical to SEQ ID NO: 90444
  chr16:49572212-49572242
  hypo

SEQ ID NO: 180381 - DNA, 125 bp, Homo sapiens; identical to SEQ ID NO: 90445
  chr16:49577673-49577798
  hypo

SEQ ID NO: 180382 - DNA, 222 bp, Homo sapiens
  chr16:49670788-49671010
  hypo
gtcccagttgcaggccgtgcagcggtacatcttcttctcattgctgtgcttcaccgccaggtgcacctggatggacaccttggagtcgaagacctcctgacacagggtgcagtggtacaacacaaaggtgtgcatgtccagcaggtgcttctgcaggtcatccaccgaggaaaattgcttgtcgcagctctcgcacacatagtgggtcgacgtggtcatgta

SEQ ID NO: 180383 - DNA, 30 bp, Homo sapiens
  chr16:49671222-49671252
  hypo
aagacacctccacatcggacgagactgggc

SEQ ID NO: 180384 - DNA, 108 bp, Homo sapiens
  chr16:49671510-49671618
  hypo
agaaagcattattaccgtcagaggggttggcgttggggccgcagtgggagacgcggatgtgctcctgcaggctattgatgtcggcgaacatctcggggcagtagttgc

SEQ ID NO: 180385 - DNA, 129 bp, Homo sapiens
  chr16:49671877-49672006
  hypo
cttctgcccccgcagcggcttcaaggtggagtccggggtggagccacgctccacagaggcgctggagtcgggtgtggcgctgctcatggaggccacgctgcccagtacagggtcgggactgacactgtg

SEQ ID NO: 180386 - DNA, 389 bp, Homo sapiens
  chr16:49672242-49672631
  hypo
ggctgaaggtgtcctcgcagtagtcgcacatgaagtcgtccttcttggcttccttctccgacttggccagatgctccttgttctttttgtgggcctgcatgtggctctgcagcgagctggtggaggagaagccgcgcttgcacacagtgcacttgaagggcttgctggagctgtgggtcttcaggtggatcttgaggtggtcgctgcgggagaaggctgcctcgcactcgtggcagtgatacttcttgtcgcccgtatgcagcttgatgtgccggtcacggctcctcttgtgcttgaagaggcggctgcagtaggtgcacttgaacggcagcttgtcgctgtggatctgctcgtgcctcttcaagtagctcaagcggatgaaggacttg

SEQ ID NO: 180387 - DNA, 30 bp, Homo sapiens
  chr16:49739929-49739959
  hypo
cagggaggcacactgcggggtggtgtttaa

SEQ ID NO: 180388 - DNA, 67 bp, Homo sapiens
  chr16:49767035-49767102
  hypo
agccttcgatattgtaagtcatcatacaaccatggttacacagtcaagtgcccgtctccgaaattcc

SEQ ID NO: 180389 - DNA, 31 bp, Homo sapiens; identical to SEQ ID NO: 90447
  chr16:49950450-49950481
  hypo

SEQ ID NO: 180390 - DNA, 32 bp, Homo sapiens; identical to SEQ ID NO: 90448
  chr16:50070328-50070360
  hypo

SEQ ID NO: 180391 - DNA, 33 bp, Homo sapiens; identical to SEQ ID NO: 90449
  chr16:50218667-50218700
  hypo

SEQ ID NO: 180392 - DNA, 45 bp, Homo sapiens; identical to SEQ ID NO: 90450
  chr16:50227516-50227561
  hypo

SEQ ID NO: 180393 - DNA, 88 bp, Homo sapiens
  chr16:50272244-50272332
  hypo
actctgtcccccccccaaaaaaaaaaaaaaagaatttctgctgtaatttctattctttggaaaagtcttttctcggggctggggttct

SEQ ID NO: 180394 - DNA, 144 bp, Homo sapiens
  chr16:50285662-50285806
  hypo
agccttgcctgtcattgtccccgcctggcctccgggggctcccagttcactgtcctaggaagtgatcgcagggtgctgggccacaaagcttgggttctccccttccccggcctgctcccccacgcagagggcatagcattgcac

SEQ ID NO: 180395 - DNA, 31 bp, Homo sapiens; identical to SEQ ID NO: 29227
  chr16:50334491-50334522
  hypo

SEQ ID NO: 180396 - DNA, 653 bp, Homo sapiens
  chr16:50335357-50336010
  hypo
aggagctaatccgagcgaggccttcacagtgcgcctggcacgtcacagcattctatgtattctcgtcactcttggtttattttccatgaggtggttattaatctcccagatttccgagagacacactttcaaaacaagctttggatgaaactcaggaaagcagggagtggcctgggagccactgggcaggagcctctgagtgtcctgggtgctgactgcaggtcccctggtggctccaggaccccacggtggaggaggcagttccactgccctggccaggtggggcccgccttggcctgtctgctgcccgaccctggcctgcttcagggagtccggcacgtctggccacttctctgtgaatcatccatgaggcttgctcaagaatgtcggcccagccagcgagtggctcctttcactctggtcctcgctatgccttggggctggcccgactgccagaccctgggggaccaagggctggcctgtgagcctccctacacatctgctggcctcactctgcccccagcacccccagtgctgcaccatccatactgagccagcatctgggaaaacccctgccggtacctgtgtcccattccaccaccctcctagaatagggccctgatcctcgccctgtaccccggccctggccccgc

SEQ ID NO: 180397 - DNA, 563 bp, Homo sapiens
  chr16:50336214-50336777
  hypo
tgcagccccccaccccgtgctgagatggatgcccggctcgaagctagtgctcagatagcccttgaatgagtgaagcagagctcctcacccaggaggctccaaaatccacccccgcaggctgccaggttgagcagggaaaactgcaggctgcctgggccgacttgaatttcagataactgtaaatcatgtttcgcataagtgttgcacgcagtactcaactggacagttgtatttatttggcggccccaccttccccccaccccaccctaccccaccctcttttttgtttaacttcatttatccacgcagttgaaagttcaaaaggtgtgaagggcgtgttgtagaaagactccttgtccccagccggcacatctcagaggggacctgtgcagtgagtttcttgtattccctccacagggattttcacggacaccgagtgaactgcgagtccccccacccttcttgctaaggtggcagtggcgggccccatggtcgcgcaccctgcatttttcctaccttggggacatccctcctgtgtgcagggtgctcgtctgtagctcctg

SEQ ID NO: 180398 - DNA, 30 bp, Homo sapiens; identical to SEQ ID NO: 29230
  chr16:50338365-50338395
  hypo

SEQ ID NO: 180399 - DNA, 30 bp, Homo sapiens
  chr16:50340948-50340978
  hypo
tgctgcccccagtaccgcctggcacccatc

SEQ ID NO: 180400 - DNA, 30 bp, Homo sapiens
  chr16:50341563-50341593
  hypo
gttaggccgaagcatcgaccaggattgtgg

SEQ ID NO: 180401 - DNA, 117 bp, Homo sapiens
  chr16:50346832-50346949
  hypo
tgtcatgtttgcctccgtgccggacttcaaagtgttctacacagagtgcgatgtcaacaaagaagggctggagtgcctacgcctgctcaatgagatcattgccgacttcgacgaggt

SEQ ID NO: 180402 - DNA, 278 bp, Homo sapiens
  chr16:50425277-50425555
  hypo
cgtggggatgaaaggcgcgctggcataattatgggcgagggtgcgcgggggcgggcgggcggctttaccttgccgccagcgctattaatgatgaggctccctctttttcttctctagaaggggtgcctttggttttcgggaatggggtggggcaccgtgcgccgaggctgacatttggcgcaggtggtggggatgcgatgcattgctcagtgcagaggtgcttgggagccacagcgccctcgtggctgccaaggccctgtcatcgtgagaaggaggca

SEQ ID NO: 180403 - DNA, 184 bp, Homo sapiens; identical to SEQ ID NO: 90456
  chr16:50633342-50633526
  hypo

SEQ ID NO: 180404 - DNA, 30 bp, Homo sapiens
  chr16:50657746-50657776
  hypo
gtgtgtaggggtatgcgtgtgtgtgtgtgt

SEQ ID NO: 180405 - DNA, 73 bp, Homo sapiens; identical to SEQ ID NO: 90457
  chr16:50666331-50666404
  hypo

SEQ ID NO: 180406 - DNA, 31 bp, Homo sapiens; identical to SEQ ID NO: 90458
  chr16:50667597-50667628
  hypo

SEQ ID NO: 180407 - DNA, 30 bp, Homo sapiens; identical to SEQ ID NO: 90459
  chr16:50708056-50708086
  hypo

SEQ ID NO: 180408 - DNA, 67 bp, Homo sapiens; identical to SEQ ID NO: 10661
  chr16:50773733-50773800
  hypo

SEQ ID NO: 180409 - DNA, 30 bp, Homo sapiens; identical to SEQ ID NO: 127182
  chr16:50875209-50875239
  hypo

SEQ ID NO: 180410 - DNA, 58 bp, Homo sapiens; identical to SEQ ID NO: 29233
  chr16:50897228-50897286
  hypo

SEQ ID NO: 180411 - DNA, 579 bp, Homo sapiens
  chr16:51025074-51025653
  hypo
ggggaggacaagctacggatggccggcacaagcctggaggcccgccgagcgccaggctggctgaggcccctcccttggcagcggcggcacctctgggaccttgcggtgggctgagctccttgcagacccagggtctaagggaggaggggaaggcaaggagacattgctgtggttttgcggccaaggagggaacgtacttaggatatttaggggatggacagggaaccggctccacttccctgcagcctctgcctgccagcgctcacccactggaacatgccatttgagaaatgtcttcattttctctgtcattggccaggttcccgccacactcgttgggagcgggaagaggggggcaggagagggaaggtaggggtcatagaccggagcgaaggattggaaaactggctcctaagagctctctgcacaaagaaaacaccatgggtcctgccaaatctgcccgctgcatggtctgacacccacacgtggccccctgagctccctcccgccatcccacaggaagtcccatttctccctggcccatggcccgatgggggcacacctcgaaccgaggcccaa

SEQ ID NO: 180412 - DNA, 422 bp, Homo sapiens; identical to SEQ ID NO: 10665
  chr16:51185542-51185964
  hypo

SEQ ID NO: 180413 - DNA, 303 bp, Homo sapiens; identical to SEQ ID NO: 10666
  chr16:51186025-51186328
  hypo

SEQ ID NO: 180414 - DNA, 27 bp, Homo sapiens
  chr16:51188696-51188723
  hypo
cggcagctgcgccggggtcgcgacctc

SEQ ID NO: 180415 - DNA, 124 bp, Homo sapiens; identical to SEQ ID NO: 127194
  chr16:51189083-51189207
  hypo

SEQ ID NO: 180416 - DNA, 150 bp, Homo sapiens; identical to SEQ ID NO: 53061
  chr16:51189282-51189432
  hypo

SEQ ID NO: 180417 - DNA, 94 bp, Homo sapiens; identical to SEQ ID NO: 90466
  chr16:52498847-52498941
  hypo

SEQ ID NO: 180418 - DNA, 30 bp, Homo sapiens; identical to SEQ ID NO: 53067
  chr16:52586325-52586355
  hypo

SEQ ID NO: 180419 - DNA, 30 bp, Homo sapiens; identical to SEQ ID NO: 53068
  chr16:52599172-52599202
  hypo

SEQ ID NO: 180420 - DNA, 31 bp, Homo sapiens; identical to SEQ ID NO: 90469
  chr16:52860764-52860795
  hypo

SEQ ID NO: 180421 - DNA, 27 bp, Homo sapiens
  chr16:53218078-53218105
  hypo
atctcctgacctcgtgatcctggctaa

SEQ ID NO: 180422 - DNA, 192 bp, Homo sapiens; identical to SEQ ID NO: 90471
  chr16:53337681-53337873
  hypo

SEQ ID NO: 180423 - DNA, 121 bp, Homo sapiens; identical to SEQ ID NO: 29238
  chr16:53448475-53448596
  hypo

SEQ ID NO: 180424 - DNA, 102 bp, Homo sapiens
  chr16:53467354-53467456
  hypo
caaaaaaaaaaaaaaagtttaattcacgcagagccagctgaacggcagacaggagtttggttattcaaatcagcctaccagaaaattcggagactggggttt

SEQ ID NO: 180425 - DNA, 30 bp, Homo sapiens
  chr16:53497754-53497784
  hypo
aggcgtgagccactgcgcccggtccccctt

SEQ ID NO: 180426 - DNA, 484 bp, Homo sapiens; identical to SEQ ID NO: 90474
  chr16:53563448-53563932
  hypo

SEQ ID NO: 180427 - DNA, 30 bp, Homo sapiens
  chr16:53564213-53564243
  hypo
tgcgggagcgcctgccgtcgtcagagctcc

SEQ ID NO: 180428 - DNA, 241 bp, Homo sapiens; identical to SEQ ID NO: 90475
  chr16:53659273-53659514
  hypo

SEQ ID NO: 180429 - DNA, 30 bp, Homo sapiens; identical to SEQ ID NO: 53073
  chr16:53813351-53813381
  hypo

SEQ ID NO: 180430 - DNA, 83 bp, Homo sapiens; identical to SEQ ID NO: 29241
  chr16:53825644-53825727
  hypo

SEQ ID NO: 180431 - DNA, 30 bp, Homo sapiens; identical to SEQ ID NO: 29242
  chr16:53851107-53851137
  hypo

SEQ ID NO: 180432 - DNA, 30 bp, Homo sapiens; identical to SEQ ID NO: 53074
  chr16:53855275-53855305
  hypo

SEQ ID NO: 180433 - DNA, 30 bp, Homo sapiens
  chr16:53920841-53920871
  hypo
tccacgtttctttagcgggcagtggtaaaa

SEQ ID NO: 180434 - DNA, 30 bp, Homo sapiens
  chr16:53944969-53944999
  hypo
ggaacttggtagagacgtcagagccaagcg

SEQ ID NO: 180435 - DNA, 30 bp, Homo sapiens
  chr16:53945296-53945326
  hypo
gtggaggaaagtcagcgaatgtaatagtgt

SEQ ID NO: 180436 - DNA, 30 bp, Homo sapiens
  chr16:53984498-53984528
  hypo
tttcctgttcttaagcgcaaagggctgctt

SEQ ID NO: 180437 - DNA, 30 bp, Homo sapiens
  chr16:53984889-53984919
  hypo
tctcatttattataacgaagctaatgatgc

SEQ ID NO: 180438 - DNA, 30 bp, Homo sapiens
  chr16:54019231-54019261
  hypo
gactagctgtggtggcgaagattctctgag

SEQ ID NO: 180439 - DNA, 30 bp, Homo sapiens; identical to SEQ ID NO: 29243
  chr16:54096325-54096355
  hypo

SEQ ID NO: 180440 - DNA, 199 bp, Homo sapiens; identical to SEQ ID NO: 29244
  chr16:54128644-54128843
  hypo

SEQ ID NO: 180441 - DNA, 30 bp, Homo sapiens; identical to SEQ ID NO: 90482
  chr16:54150750-54150780
  hypo

SEQ ID NO: 180442 - DNA, 30 bp, Homo sapiens; identical to SEQ ID NO: 90483
  chr16:54155978-54156008
  hypo

SEQ ID NO: 180443 - DNA, 36 bp, Homo sapiens; identical to SEQ ID NO: 90484
  chr16:54198161-54198197
  hypo

SEQ ID NO: 180444 - DNA, 31 bp, Homo sapiens; identical to SEQ ID NO: 29245
  chr16:54201073-54201104
  hypo

SEQ ID NO: 180445 - DNA, 30 bp, Homo sapiens; identical to SEQ ID NO: 90486
  chr16:54211522-54211552
  hypo

SEQ ID NO: 180446 - DNA, 30 bp, Homo sapiens; identical to SEQ ID NO: 90487
  chr16:54244546-54244576
  hypo

SEQ ID NO: 180447 - DNA, 23 bp, Homo sapiens
  chr16:54288680-54288703
  hypo
aggtaaggccgggcgcggtggct

SEQ ID NO: 180448 - DNA, 30 bp, Homo sapiens; identical to SEQ ID NO: 127223
  chr16:54322757-54322787
  hypo

SEQ ID NO: 180449 - DNA, 96 bp, Homo sapiens
  chr16:54441922-54442018
  hypo
actgataaggttgaacgtgataattaaaaatgtatttgccgttcctgcctgatggtatcagtgagaatcacctttctcaacatccagtgtttgaaa

SEQ ID NO: 180450 - DNA, 30 bp, Homo sapiens
  chr16:54574693-54574723
  hypo
tgcgacattcaattccgaagagaaggaaac

SEQ ID NO: 180451 - DNA, 213 bp, Homo sapiens; identical to SEQ ID NO: 90488
  chr16:55052637-55052850
  hypo

SEQ ID NO: 180452 - DNA, 47 bp, Homo sapiens; identical to SEQ ID NO: 90489
  chr16:55053596-55053643
  hypo

SEQ ID NO: 180453 - DNA, 31 bp, Homo sapiens; identical to SEQ ID NO: 90490
  chr16:55189531-55189562
  hypo

SEQ ID NO: 180454 - DNA, 36 bp, Homo sapiens
  chr16:55215531-55215567
  hypo
aaaaaaaatttttttttgagacgagtctcgctctgt

SEQ ID NO: 180455 - DNA, 35 bp, Homo sapiens
  chr16:55215806-55215841
  hypo
gcgtgtgccaccgcgcctggccaaaaatttttaat

SEQ ID NO: 180456 - DNA, 30 bp, Homo sapiens
  chr16:55335197-55335227
  hypo
ctttaaaagttgcttcgtaatattaaaaaa

SEQ ID NO: 180457 - DNA, 72 bp, Homo sapiens; identical to SEQ ID NO: 53085
  chr16:55357500-55357572
  hypo

SEQ ID NO: 180458 - DNA, 329 bp, Homo sapiens; identical to SEQ ID NO: 10685
  chr16:55357611-55357940
  hypo

SEQ ID NO: 180459 - DNA, 195 bp, Homo sapiens; identical to SEQ ID NO: 127241
  chr16:55362577-55362772
  hypo

SEQ ID NO: 180460 - DNA, 393 bp, Homo sapiens; identical to SEQ ID NO: 127242
  chr16:55362962-55363355
  hypo

SEQ ID NO: 180461 - DNA, 30 bp, Homo sapiens
  chr16:55479962-55479992
  hypo
tcaggatgcggaaggcgggccccatccaag

SEQ ID NO: 180462 - DNA, 428 bp, Homo sapiens; identical to SEQ ID NO: 53096
  chr16:55512935-55513363
  hypo

SEQ ID NO: 180463 - DNA, 199 bp, Homo sapiens; identical to SEQ ID NO: 10693
  chr16:55513482-55513681
  hypo

SEQ ID NO: 180464 - DNA, 507 bp, Homo sapiens; identical to SEQ ID NO: 53098
  chr16:55513946-55514453
  hypo

SEQ ID NO: 180465 - DNA, 30 bp, Homo sapiens
  chr16:55535975-55536005
  hypo
caggattgctgccgccggaactgaggtggc

SEQ ID NO: 180466 - DNA, 31 bp, Homo sapiens; identical to SEQ ID NO: 90497
  chr16:55705894-55705925
  hypo

SEQ ID NO: 180467 - DNA, 211 bp, Homo sapiens; identical to SEQ ID NO: 29251
  chr16:55739210-55739421
  hypo

SEQ ID NO: 180468 - DNA, 350 bp, Homo sapiens; identical to SEQ ID NO: 10698
  chr16:56224482-56224832
  hypo

SEQ ID NO: 180469 - DNA, 1491 bp, Homo sapiens; identical to SEQ ID NO: 53105
  chr16:56224880-56226371
  hypo

SEQ ID NO: 180470 - DNA, 56 bp, Homo sapiens; identical to SEQ ID NO: 53106
  chr16:56227983-56228039
  hypo

SEQ ID NO: 180471 - DNA, 137 bp, Homo sapiens; identical to SEQ ID NO: 53107
  chr16:56228279-56228416
  hypo

SEQ ID NO: 180472 - DNA, 85 bp, Homo sapiens; identical to SEQ ID NO: 127261
  chr16:56228577-56228662
  hypo

SEQ ID NO: 180473 - DNA, 255 bp, Homo sapiens
  chr16:56309851-56310106
  hypo
tgaagatggcttctccggagaagacgtgaaacagtacaagcctgttgtctacagcaacactatccagtccctggcagccatcgtccgggccatggacactttgggcatcgaatatggtgataaggagagaaaggtaggcccctgagcccataagcacagcaacaagaggttctgtctgtgttaccccactgcctcctctttatagtgctgggctgccttaaatgaacgagaagagactccgctatgtttgaaaga

SEQ ID NO: 180474 - DNA, 30 bp, Homo sapiens; identical to SEQ ID NO: 90505
  chr16:56322639-56322669
  hypo

SEQ ID NO: 180475 - DNA, 55 bp, Homo sapiens
  chr16:56345485-56345540
  hypo
acccacctggccctgcgctgaactgagaacccgaggagcgcgtcccctccctcct

SEQ ID NO: 180476 - DNA, 30 bp, Homo sapiens; identical to SEQ ID NO: 90506
  chr16:56358203-56358233
  hypo

SEQ ID NO: 180477 - DNA, 58 bp, Homo sapiens; identical to SEQ ID NO: 90507
  chr16:56368402-56368460
  hypo

SEQ ID NO: 180478 - DNA, 166 bp, Homo sapiens; identical to SEQ ID NO: 90508
  chr16:56368689-56368855
  hypo

SEQ ID NO: 180479 - DNA, 30 bp, Homo sapiens
  chr16:56369358-56369388
  hypo
acctgcagtaacatgcgtgcactgaggcct

SEQ ID NO: 180480 - DNA, 254 bp, Homo sapiens; identical to SEQ ID NO: 90509
  chr16:56370682-56370936
  hypo

SEQ ID NO: 180481 - DNA, 30 bp, Homo sapiens; identical to SEQ ID NO: 90510
  chr16:56394089-56394119
  hypo

SEQ ID NO: 180482 - DNA, 30 bp, Homo sapiens; identical to SEQ ID NO: 90511
  chr16:56396839-56396869
  hypo

SEQ ID NO: 180483 - DNA, 366 bp, Homo sapiens
  chr16:56397995-56398361
  hypo
ggtccagtggcacacgctcggtctggacacggggcaggaagcaaggaggcagctgtgagcacaggcctccctcctaagcaggttcctcacctacagggcaccccagacacggctgttctggacgcaaagagaaggctgctgccaagcagggaggcagaaactaggaaccacaagctacggataatggagcagcagcttccctgagggcaggcctgctgcctatggcttgagtagtactaagaacaggacctgactcacacagaatgttcggcatcagagggtaagtaaatgattaccagcatgaaaaacgtaagcaccttcaagctgcactcttagaatacgctaccaacacgacaaccgtgagtt

SEQ ID NO: 180484 - DNA, 190 bp, Homo sapiens
  chr16:56398930-56399120
  hypo
ccagatgcagacctgcgctggccagggtcagcccattgcccgcttctaggctgtgacagaatggaggtgggtgcagctgagaggcaggctgttttacttcagagttcctgctggacctaccctcactttttcctgccttcagctaagctcgagagggaacttcaagagaaccattcgtatccccgagagt

SEQ ID NO: 180485 - DNA, 30 bp, Homo sapiens; identical to SEQ ID NO: 90514
  chr16:56400946-56400976
  hypo

SEQ ID NO: 180486 - DNA, 195 bp, Homo sapiens
  chr16:56407220-56407415
  hypo
tgatcaaagctgcaccgaccggagggaactccagtccactcgaaccatcctgtcccacaggaggaggggaaactgagaagtagattgaagttcacagtccagagcatgggctcactaaaagacggagccctaatcccaggactacagcatgcttctttccctcccccgacacctacatcacgacaggcctgttca

SEQ ID NO: 180487 - DNA, 30 bp, Homo sapiens
  chr16:56435661-56435691
  hypo
acagggcagtttccgcgcagcctgcatgga

SEQ ID NO: 180488 - DNA, 26 bp, Homo sapiens
  chr16:56605852-56605878
  hypo
tcacttgccccgcggcctggttccta

SEQ ID NO: 180489 - DNA, 557 bp, Homo sapiens; identical to SEQ ID NO: 127270
  chr16:56623200-56623757
  hypo

SEQ ID NO: 180490 - DNA, 218 bp, Homo sapiens; identical to SEQ ID NO: 53115
  chr16:56642230-56642448
  hypo

SEQ ID NO: 180491 - DNA, 634 bp, Homo sapiens; identical to SEQ ID NO: 53117
  chr16:56666027-56666661
  hypo

SEQ ID NO: 180492 - DNA, 101 bp, Homo sapiens; identical to SEQ ID NO: 127281
  chr16:56691991-56692092
  hypo

SEQ ID NO: 180493 - DNA, 28 bp, Homo sapiens
  chr16:56774934-56774962
  hypo
gggagagggagagcgctaaatttctttt

SEQ ID NO: 180494 - DNA, 136 bp, Homo sapiens
  chr16:56782259-56782395
  hypo
aggagatccagcaggcgggagagcgcctgcgttcccgtaccctaacacgcacgtcccaggagacggcagatgtcaaggcgtgagtactggtagggagacagcattagtactgggtggcttgcgggcaggatctgtt

SEQ ID NO: 180495 - DNA, 75 bp, Homo sapiens
  chr16:56812016-56812091
  hypo
cagactgaatgagagcgacacaggattctaaatgccatgggaattcagaggcgtggaagcggttaataacgaatg

SEQ ID NO: 180496 - DNA, 30 bp, Homo sapiens; identical to SEQ ID NO: 29261
  chr16:56815811-56815841
  hypo

SEQ ID NO: 180497 - DNA, 30 bp, Homo sapiens; identical to SEQ ID NO: 29262
  chr16:56821256-56821286
  hypo

SEQ ID NO: 180498 - DNA, 21 bp, Homo sapiens
  chr16:56828552-56828573
  hypo
gggataggctgggcgcggtgg

SEQ ID NO: 180499 - DNA, 23 bp, Homo sapiens
  chr16:56848400-56848423
  hypo
ctgcatttcgtttttttctaact

SEQ ID NO: 180500 - DNA, 115 bp, Homo sapiens; identical to SEQ ID NO: 90526
  chr16:56857027-56857142
  hypo

SEQ ID NO: 180501 - DNA, 312 bp, Homo sapiens; identical to SEQ ID NO: 90527
  chr16:56857407-56857719
  hypo

SEQ ID NO: 180502 - DNA, 41 bp, Homo sapiens; identical to SEQ ID NO: 90528
  chr16:56869745-56869786
  hypo

SEQ ID NO: 180503 - DNA, 30 bp, Homo sapiens
  chr16:56902251-56902281
  hypo
ggctgccctggattacggcccaggcaggca

SEQ ID NO: 180504 - DNA, 44 bp, Homo sapiens
  chr16:56902580-56902624
  hypo
aagctgcactctggccgggcacggtggctcacgctttgggaggc

SEQ ID NO: 180505 - DNA, 31 bp, Homo sapiens; identical to SEQ ID NO: 29265
  chr16:56925877-56925908
  hypo

SEQ ID NO: 180506 - DNA, 267 bp, Homo sapiens
  chr16:56928222-56928489
  hypo
ttgtttatttaaatatgctgcacaagcacaaataaaccctaccccacagagcaccgtgtgcgacttgaattcagtcagccatgttcattatacagatgggtcgactggggtccagcgaggagaggaaggggtttgctaatggcagagcggggcaggaactcacatagtgctctgtcctgagtgtattcttgtcatgactcacggggactctccttgccaggcctcaccctcctcattccctatctccttggccgcaagaggaggtgg

SEQ ID NO: 180507 - DNA, 79 bp, Homo sapiens; identical to SEQ ID NO: 90531
  chr16:56951554-56951633
  hypo

SEQ ID NO: 180508 - DNA, 40 bp, Homo sapiens
  chr16:56953539-56953579
  hypo
aacacgcaggctgggcgcggtgcctcatgcttgtaatccc

SEQ ID NO: 180509 - DNA, 30 bp, Homo sapiens; identical to SEQ ID NO: 29267
  chr16:57006125-57006155
  hypo

SEQ ID NO: 180510 - DNA, 30 bp, Homo sapiens; identical to SEQ ID NO: 29268
  chr16:57050328-57050358
  hypo

SEQ ID NO: 180511 - DNA, 30 bp, Homo sapiens; identical to SEQ ID NO: 29269
  chr16:57054725-57054755
  hypo

SEQ ID NO: 180512 - DNA, 31 bp, Homo sapiens; identical to SEQ ID NO: 29270
  chr16:57100435-57100466
  hypo

SEQ ID NO: 180513 - DNA, 361 bp, Homo sapiens; identical to SEQ ID NO: 53132
  chr16:57126698-57127059
  hypo

SEQ ID NO: 180514 - DNA, 28 bp, Homo sapiens
  chr16:57138115-57138143
  hypo
caccacgcccggccggaaggcactcttg

SEQ ID NO: 180515 - DNA, 31 bp, Homo sapiens; identical to SEQ ID NO: 90538
  chr16:57148714-57148745
  hypo

SEQ ID NO: 180516 - DNA, 30 bp, Homo sapiens; identical to SEQ ID NO: 29271
  chr16:57180833-57180863
  hypo

SEQ ID NO: 180517 - DNA, 200 bp, Homo sapiens
  chr16:57222225-57222425
  hypo
atggttttccaaatatcgggcaatcatttcctgggatggtatcttgctttgtagatccctctatgagattgtaagagacttgtgtccctgtatgacattttactagtgtttggttcgtcgtacttgttagagatggttttccaaatatcgggcaatttatatgggattttttccgaagtaatttagttgtgtttttggtt

SEQ ID NO: 180518 - DNA, 30 bp, Homo sapiens; identical to SEQ ID NO: 90541
  chr16:57278224-57278254
  hypo

SEQ ID NO: 180519 - DNA, 30 bp, Homo sapiens
  chr16:57281308-57281338
  hypo
attccgggatgggtacggtggctcacacct

SEQ ID NO: 180520 - DNA, 30 bp, Homo sapiens
  chr16:57281634-57281664
  hypo
agctgagatgcgattcgaacccagacgggc

SEQ ID NO: 180521 - DNA, 169 bp, Homo sapiens; identical to SEQ ID NO: 90542
  chr16:57289763-57289932
  hypo

SEQ ID NO: 180522 - DNA, 30 bp, Homo sapiens; identical to SEQ ID NO: 90543
  chr16:57290510-57290540
  hypo

SEQ ID NO: 180523 - DNA, 374 bp, Homo sapiens
  chr16:57298908-57299282
  hypo
cccagggaaggtgtcccgctctccagggctcagcacctgctcctccccacactggggtgaagctccagggatccaccccccaacacacagcaccctgccagcctctgctgcccgtcagcactctcaccgccgcaagcaggccaggtgagggtaggcaggtgaggaagccagggcggagccacagggccttgcccgctgtcacacaccaagctgggggcagagcccttacgagtgtggacccagggcaggatgtctcagaacaacaccctgccagaaacagacacacctggagaggccacgaacccccagagctggggggaggccagtgttctgaaggagaacaaacacttcgggcagcacgcctccgtcccttc

SEQ ID NO: 180524 - DNA, 95 bp, Homo sapiens; identical to SEQ ID NO: 90544
  chr16:57304015-57304110
  hypo

SEQ ID NO: 180525 - DNA, 85 bp, Homo sapiens; identical to SEQ ID NO: 90545
  chr16:57304958-57305043
  hypo

SEQ ID NO: 180526 - DNA, 30 bp, Homo sapiens
  chr16:57309740-57309770
  hypo
tttagatcctggcgccgcgccttgcattta

SEQ ID NO: 180527 - DNA, 19 bp, Homo sapiens
  chr16:57311201-57311220
  hypo
cctattaaagaaattaggg

SEQ ID NO: 180528 - DNA, 470 bp, Homo sapiens; identical to SEQ ID NO: 127300
  chr16:57318148-57318618
  hypo

SEQ ID NO: 180529 - DNA, 32 bp, Homo sapiens; identical to SEQ ID NO: 29273
  chr16:57326588-57326620
  hypo

SEQ ID NO: 180530 - DNA, 317 bp, Homo sapiens
  chr16:57416035-57416352
  hypo
ctaactcgaaatggcggcaccttcgagaagcagatcggcgaggtgaagcccaggaccacccctgccgccgggggaatggacgagtctgtggtcctggagcccgaagccacaggcgaaagcagtagcctggagccgactccttcttcccaggaagcacagagggccctggggacctccccagagctgccgacgggcgtgactggttcctcagggaccaggctccccccgacgccaaaggctcaggatggagggcctgtgggcacggagcttttccgagtgcctcccgtctccactgccgccacgtggcagagttctgc

SEQ ID NO: 180531 - DNA, 31 bp, Homo sapiens; identical to SEQ ID NO: 90551
  chr16:57442423-57442454
  hypo

SEQ ID NO: 180532 - DNA, 30 bp, Homo sapiens
  chr16:57533261-57533291
  hypo
accacctgtctgaggcgttccccttgacaa

SEQ ID NO: 180533 - DNA, 275 bp, Homo sapiens; identical to SEQ ID NO: 90552
  chr16:57537287-57537562
  hypo

SEQ ID NO: 180534 - DNA, 288 bp, Homo sapiens; identical to SEQ ID NO: 29274
  chr16:57559707-57559995
  hypo

SEQ ID NO: 180535 - DNA, 189 bp, Homo sapiens
  chr16:57601800-57601989
  hypo
gaacctgcatgcctccgtgctgctcctgaacatcgccttcctgctgagccccgcattcgcaatgtctcctgtgcccgggtcagcatgcacggctctggccgctgccctgcactacgcgctgctcagctgcctcacctggatggccatcgagggcttcaacctctacctcctcctcgggcgtgtctacaa

SEQ ID NO: 180536 - DNA, 31 bp, Homo sapiens
  chr16:57653689-57653720
  hypo
caacagcctgggcggccgctgagacccagag

SEQ ID NO: 180537 - DNA, 60 bp, Homo sapiens; identical to SEQ ID NO: 90554
  chr16:57657364-57657424
  hypo

SEQ ID NO: 180538 - DNA, 109 bp, Homo sapiens
  chr16:57674289-57674398
  hypo
taacttgacctccctgggcctcgctggccttatttgttgagtgggtgtgatggtacttgtctcaagggttttgaggaagcttaaatgcgtgaacatgtgtaaaaagctc

SEQ ID NO: 180539 - DNA, 58 bp, Homo sapiens; identical to SEQ ID NO: 90556
  chr16:57686682-57686740
  hypo

SEQ ID NO: 180540 - DNA, 102 bp, Homo sapiens; identical to SEQ ID NO: 90557
  chr16:57697545-57697647
  hypo

SEQ ID NO: 180541 - DNA, 31 bp, Homo sapiens; identical to SEQ ID NO: 90558
  chr16:57716416-57716447
  hypo

SEQ ID NO: 180542 - DNA, 225 bp, Homo sapiens; identical to SEQ ID NO: 29276
  chr16:57734045-57734270
  hypo

SEQ ID NO: 180543 - DNA, 76 bp, Homo sapiens; identical to SEQ ID NO: 90560
  chr16:57737537-57737613
  hypo

SEQ ID NO: 180544 - DNA, 208 bp, Homo sapiens; identical to SEQ ID NO: 90561
  chr16:57759977-57760185
  hypo

SEQ ID NO: 180545 - DNA, 538 bp, Homo sapiens
  chr16:57935115-57935653
  hypo
gcatgaagccgcagacgctcttctccctccccaacaatctcgctctgccctgggctggcaggcacccctccagctcagttccttgaaagccagggggatggtgaaccccagatcccgtggtggctgccaggccagctcaccttcttgcacacatagtcgttgggcaggtagacaacagagcgaagcctcttcagcatgtcaaagatcatctgccggtcacagccctgtcccggtgaggaagggaaaggaactttttagagaagattgggcttggagcctcccacagccctgagcgtgagggcaccaaaaggtgtacctgaaagagtgcgactttgctaacgatgttgtagttcacgtcgatggcgaggtccagccgcatcttgtctggaagctgcaccatcagctctgactcatctgtgaacaaggcctggcaagggtcagaggcaaggccgggccccaccccagacatacataccggccaagtgcccacctactggctcaccagggcacaccattgccctgccgcatggaaccactc

SEQ ID NO: 180546 - DNA, 57 bp, Homo sapiens
  chr16:57937696-57937753
  hypo
tggtggctgccagggcgtgaccatcttacccagcatgccttgcgagtgccaggtgta

SEQ ID NO: 180547 - DNA, 1326 bp, Homo sapiens; identical to SEQ ID NO: 90564
  chr16:58030193-58031519
  hypo

SEQ ID NO: 180548 - DNA, 749 bp, Homo sapiens; identical to SEQ ID NO: 53143
  chr16:58059828-58060577
  hypo

SEQ ID NO: 180549 - DNA, 148 bp, Homo sapiens
  chr16:58062995-58063143
  hypo
tggtgccaccaccaccaaaaccgatccacccgcctttcctcaacaggcccacgagtatcttcctagcccctacccagccactgagtagatgaggcagcgggggtgggggcgttgggagggggtcagcgtgaattaccattttgacctt

SEQ ID NO: 180550 - DNA, 31 bp, Homo sapiens; identical to SEQ ID NO: 90567
  chr16:58075443-58075474
  hypo

SEQ ID NO: 180551 - DNA, 68 bp, Homo sapiens; identical to SEQ ID NO: 90568
  chr16:58076201-58076269
  hypo

SEQ ID NO: 180552 - DNA, 152 bp, Homo sapiens; identical to SEQ ID NO: 90569
  chr16:58077137-58077289
  hypo

SEQ ID NO: 180553 - DNA, 175 bp, Homo sapiens; identical to SEQ ID NO: 90570
  chr16:58078934-58079109
  hypo

SEQ ID NO: 180554 - DNA, 213 bp, Homo sapiens
  chr16:58119930-58120143
  hypo
caggcactaatgtcccggtggtcctctgacaccttccgtgtggcgctggttggaagttatgggcttgctgttgagaggctgcgtgcccctgggcaaatatacattattaaccgtggtgtttatactgggaggagcgggcagagatgagcgctggggaaggcctgagtccctctgagcagcctgtgggatccatgaatccgaacagggatccat

SEQ ID NO: 180555 - DNA, 307 bp, Homo sapiens
  chr16:58120757-58121064
  hypo
tagcagcacctgcctcgaaggttgctatgagagcaattggtagctaagagaaccgagacatgttcctgcccctttccacgttggcttctctgtgacacatcagccctagggaagcagggccagtgccaccccacatgcaggtggcaacactgaggctccagggggtcgattcaggccggtttctttccccgtttatacaccctgcttctctccagcatccacgactacaggtgatggccacgctactcccatgtcctcacatgcacctgggttacgtcagcggcagccatgcgtgcacatgcacact

SEQ ID NO: 180556 - DNA, 30 bp, Homo sapiens; identical to SEQ ID NO: 90572
  chr16:58164150-58164180
  hypo

SEQ ID NO: 180557 - DNA, 142 bp, Homo sapiens; identical to SEQ ID NO: 90573
  chr16:58192178-58192320
  hypo

SEQ ID NO: 180558 - DNA, 31 bp, Homo sapiens; identical to SEQ ID NO: 29282
  chr16:58192530-58192561
  hypo

SEQ ID NO: 180559 - DNA, 30 bp, Homo sapiens; identical to SEQ ID NO: 90575
  chr16:58283174-58283204
  hypo

SEQ ID NO: 180560 - DNA, 30 bp, Homo sapiens; identical to SEQ ID NO: 29283
  chr16:58314560-58314590
  hypo

SEQ ID NO: 180561 - DNA, 125 bp, Homo sapiens; identical to SEQ ID NO: 127319
  chr16:58426259-58426384
  hypo

SEQ ID NO: 180562 - DNA, 20 bp, Homo sapiens
  chr16:58448890-58448910
  hypo
gccaccgtgccaggactggt

SEQ ID NO: 180563 - DNA, 1300 bp, Homo sapiens; identical to SEQ ID NO: 53149
  chr16:58497469-58498769
  hypo

SEQ ID NO: 180564 - DNA, 31 bp, Homo sapiens; identical to SEQ ID NO: 90579
  chr16:58523213-58523244
  hypo

SEQ ID NO: 180565 - DNA, 169 bp, Homo sapiens; identical to SEQ ID NO: 29286
  chr16:58534052-58534221
  hypo

SEQ ID NO: 180566 - DNA, 98 bp, Homo sapiens
  chr16:58548288-58548386
  hypo
ggtattatcttagtttcgcaggtgaggagactaaggttcaggaaaaaggatttgcctgagtaacagaccaggccgcgcgcggtggctcacgcctgtaa

SEQ ID NO: 180567 - DNA, 30 bp, Homo sapiens; identical to SEQ ID NO: 90581
  chr16:58554844-58554874
  hypo

SEQ ID NO: 180568 - DNA, 102 bp, Homo sapiens; identical to SEQ ID NO: 29287
  chr16:58558293-58558395
  hypo

SEQ ID NO: 180569 - DNA, 80 bp, Homo sapiens
  chr16:58633211-58633291
  hypo
caaggccagcgagagcgagtcaagattcattgctggttggggcggaagcaggcggccgagcccggcgcaaaatcaccatt

SEQ ID NO: 180570 - DNA, 29 bp, Homo sapiens
  chr16:58886044-58886073
  hypo
ggagggaatgctggtcaggcacggtggct

SEQ ID NO: 180571 - DNA, 19 bp, Homo sapiens
  chr16:59350147-59350166
  hypo
ctgaagtttctgtgattag

SEQ ID NO: 180572 - DNA, 18 bp, Homo sapiens
  chr16:60581691-60581709
  hypo
caggcgctgtggctcacg

SEQ ID NO: 180573 - DNA, 30 bp, Homo sapiens; identical to SEQ ID NO: 90584
  chr16:61278306-61278336
  hypo

SEQ ID NO: 180574 - DNA, 31 bp, Homo sapiens; identical to SEQ ID NO: 10725
  chr16:61445875-61445906
  hypo

SEQ ID NO: 180575 - DNA, 134 bp, Homo sapiens; identical to SEQ ID NO: 90586
  chr16:61615417-61615551
  hypo

SEQ ID NO: 180576 - DNA, 30 bp, Homo sapiens; identical to SEQ ID NO: 90587
  chr16:63007819-63007849
  hypo

SEQ ID NO: 180577 - DNA, 30 bp, Homo sapiens; identical to SEQ ID NO: 90588
  chr16:63737551-63737581
  hypo

SEQ ID NO: 180578 - DNA, 2252 bp, Homo sapiens; identical to SEQ ID NO: 127332
  chr16:65154642-65156894
  hypo

SEQ ID NO: 180579 - DNA, 739 bp, Homo sapiens; identical to SEQ ID NO: 127333
  chr16:65156939-65157678
  hypo

SEQ ID NO: 180580 - DNA, 30 bp, Homo sapiens; identical to SEQ ID NO: 29290
  chr16:65998387-65998417
  hypo

SEQ ID NO: 180581 - DNA, 20 bp, Homo sapiens
  chr16:66179370-66179390
  hypo
ttgtttgtttttgagacgga

SEQ ID NO: 180582 - DNA, 291 bp, Homo sapiens
  chr16:66420653-66420944
  hypo
acactcacacacagccactgccgcccattcccagctcacgtcacctcttcttttctagatcaagtcaagcgtgagtcgcaagaatgccaagtacctgctcaaaggagaatatgtgggcaaggtcttccgggtcgatgcagagacaggagacgtgttcgccattgagaggctggaccgggagaatatctcagagtaccacctcactgctgtcattgtggacaaggacactggcgaaaacctggagactccttccagcttcaccatcaaagttcatgacgtgaacgacaactg

SEQ ID NO: 180583 - DNA, 66 bp, Homo sapiens; identical to SEQ ID NO: 29292
  chr16:66440979-66441045
  hypo

SEQ ID NO: 180584 - DNA, 605 bp, Homo sapiens; identical to SEQ ID NO: 127337
  chr16:66461511-66462116
  hypo

SEQ ID NO: 180585 - DNA, 30 bp, Homo sapiens
  chr16:66467781-66467811
  hypo
atccccagacactggcgcgtcagcagaccc

SEQ ID NO: 180586 - DNA, 30 bp, Homo sapiens
  chr16:66503669-66503699
  hypo
aggcccggcttcagcggcaccgccaccgcc

SEQ ID NO: 180587 - DNA, 30 bp, Homo sapiens
  chr16:66514235-66514265
  hypo
agctcagtgttcatgcgttgagctcacacc

SEQ ID NO: 180588 - DNA, 162 bp, Homo sapiens
  chr16:66514520-66514682
  hypo
agctgtatgtccccacggacgcaccaccaccctactcgctgactgattcctgccccacgctggatggcacctccgactcaggcagcggccacagccctggccgacaccagcaggagcagaggaccccggcccaaggtggccttcacacggtctccatggaca

SEQ ID NO: 180589 - DNA, 117 bp, Homo sapiens
  chr16:66542830-66542947
  hypo
agggacattacggtacgggatgggaatggtgagggtgaggatgagggtgggatgacgtgggggcagaggggagagggaggtgaagcccaaaggaccccacggcgctgatgccaggtc

SEQ ID NO: 180590 - DNA, 160 bp, Homo sapiens; identical to SEQ ID NO: 90595
  chr16:66579298-66579458
  hypo

SEQ ID NO: 180591 - DNA, 619 bp, Homo sapiens; identical to SEQ ID NO: 90596
  chr16:66600010-66600629
  hypo

SEQ ID NO: 180592 - DNA, 196 bp, Homo sapiens; identical to SEQ ID NO: 127342
  chr16:66638025-66638221
  hypo

SEQ ID NO: 180593 - DNA, 753 bp, Homo sapiens; identical to SEQ ID NO: 127343
  chr16:66638268-66639021
  hypo

SEQ ID NO: 180594 - DNA, 30 bp, Homo sapiens; identical to SEQ ID NO: 29296
  chr16:66646880-66646910
  hypo

SEQ ID NO: 180595 - DNA, 74 bp, Homo sapiens
  chr16:66652462-66652536
  hypo
tacgcctgggccacacgcaggacatggcacccactagggttgttcaggtctcattcactgcaagcaagaattca

SEQ ID NO: 180596 - DNA, 173 bp, Homo sapiens; identical to SEQ ID NO: 29297
  chr16:66652773-66652946
  hypo

SEQ ID NO: 180597 - DNA, 317 bp, Homo sapiens; identical to SEQ ID NO: 127344
  chr16:66730082-66730399
  hypo

SEQ ID NO: 180598 - DNA, 65 bp, Homo sapiens; identical to SEQ ID NO: 90603
  chr16:66752186-66752251
  hypo

SEQ ID NO: 180599 - DNA, 17 bp, Homo sapiens
  chr16:66769685-66769702
  hypo
ggcgtgagccaccgcaa

SEQ ID NO: 180600 - DNA, 19 bp, Homo sapiens
  chr16:66771383-66771402
  hypo
actccgtctcaaaaaaaaa

SEQ ID NO: 180601 - DNA, 181 bp, Homo sapiens
  chr16:66781285-66781466
  hypo
ccctctactaaacagctcttggagatggtagaattacggtgctggaaaggaccttggttcaactttgtcattttagcaataaggaaatgggggactagaggtggtaggatcagccctcattatataatcgcccatacatcgtaatctttactgtttaaatgagtaaaggcaaatataaaga

SEQ ID NO: 180602 - DNA, 758 bp, Homo sapiens
  chr16:66835305-66836063
  hypo
agggcctgacggggcggtaagacatcctggccggcccaacccgccttacacaggcgccaacatacagagtttccaagcgcggtaaggcaggacaacaacgcgcgggagcggaggccgtggcgtctaccctcaagcgggagcttccgccctttcttcatcaccgctcacctgccacgacgcacgacagggtttcccgcccagccgaccaggctcacgtccgtgggcgggacttccggccggcagccccgccgcccctgcaaggtgtcttacgcttccgcgggtgccctaggttgccaagggcaatggggtggtcggtgtcccggccgcaagattttttaaaaagctacaatttgaaagagaaatctcaccgcccccggtttttagggtttttacctcagacgagcattagccccaaaattaggggactgtgcacgcggttgacgaggcctggctatgggacggtggccgcgaagcacaggacggcgaagccccaacctcccctccacctggcatctgtgctgtgtgttctcccttttgttgggcacctcgctaatcgtcaccacagccccacaggggcagccaggcctccacctcaccagggggcttccggagttcagtccaggaggacttctccgcgcctggaccaaaggatcagagtggggccaaggcctgtcccttgccgcctctgccgtaaaatgcagcccatgggactgctaggcgatgaaggcgaggggaaggtccccgatacagtgaagaac

SEQ ID NO: 180603 - DNA, 30 bp, Homo sapiens; identical to SEQ ID NO: 90608
  chr16:66862019-66862049
  hypo

SEQ ID NO: 180604 - DNA, 30 bp, Homo sapiens; identical to SEQ ID NO: 29300
  chr16:66919589-66919619
  hypo

SEQ ID NO: 180605 - DNA, 82 bp, Homo sapiens; identical to SEQ ID NO: 29301
  chr16:66942965-66943047
  hypo

SEQ ID NO: 180606 - DNA, 674 bp, Homo sapiens; identical to SEQ ID NO: 127348
  chr16:66958743-66959417
  hypo

SEQ ID NO: 180607 - DNA, 121 bp, Homo sapiens; identical to SEQ ID NO: 90611
  chr16:66986332-66986453
  hypo

SEQ ID NO: 180608 - DNA, 191 bp, Homo sapiens; identical to SEQ ID NO: 29302
  chr16:67006194-67006385
  hypo

SEQ ID NO: 180609 - DNA, 44 bp, Homo sapiens; identical to SEQ ID NO: 90613
  chr16:67138795-67138839
  hypo

SEQ ID NO: 180610 - DNA, 26 bp, Homo sapiens
  chr16:67175406-67175432
  hypo
cagcctggcaggctgcgcttagctca

SEQ ID NO: 180611 - DNA, 145 bp, Homo sapiens; identical to SEQ ID NO: 29303
  chr16:67175551-67175696
  hypo

SEQ ID NO: 180612 - DNA, 30 bp, Homo sapiens; identical to SEQ ID NO: 90615
  chr16:67182988-67183018
  hypo

SEQ ID NO: 180613 - DNA, 203 bp, Homo sapiens; identical to SEQ ID NO: 127353
  chr16:67183853-67184056
  hypo

SEQ ID NO: 180614 - DNA, 187 bp, Homo sapiens; identical to SEQ ID NO: 127354
  chr16:67184120-67184307
  hypo

SEQ ID NO: 180615 - DNA, 131 bp, Homo sapiens; identical to SEQ ID NO: 127355
  chr16:67184511-67184642
  hypo

SEQ ID NO: 180616 - DNA, 30 bp, Homo sapiens; identical to SEQ ID NO: 127356
  chr16:67188746-67188776
  hypo

SEQ ID NO: 180617 - DNA, 633 bp, Homo sapiens; identical to SEQ ID NO: 10737
  chr16:67189017-67189650
  hypo

SEQ ID NO: 180618 - DNA, 31 bp, Homo sapiens; identical to SEQ ID NO: 10739
  chr16:67203649-67203680
  hypo

SEQ ID NO: 180619 - DNA, 30 bp, Homo sapiens; identical to SEQ ID NO: 127366
  chr16:67203747-67203777
  hypo

SEQ ID NO: 180620 - DNA, 30 bp, Homo sapiens
  chr16:67208513-67208543
  hypo
tccgccccaggctaccgggaccgcagctat

SEQ ID NO: 180621 - DNA, 209 bp, Homo sapiens
  chr16:67213016-67213225
  hypo
ggttctttctctggccggtcagggcctgaccagccttgcccgcactgttgggagaagtcggagaggaagtggagagagaaaaatatacccgaaaggaccaagagatgagagcgagcccagagcatgggcaggcatgttctggcctacctctgtaagcagagggcgggaggtggctgctcaggaagggaaagccccgacctcaggaggga

SEQ ID NO: 180622 - DNA, 31 bp, Homo sapiens; identical to SEQ ID NO: 90619
  chr16:67214547-67214578
  hypo

SEQ ID NO: 180623 - DNA, 195 bp, Homo sapiens; identical to SEQ ID NO: 90620
  chr16:67221090-67221285
  hypo

SEQ ID NO: 180624 - DNA, 30 bp, Homo sapiens
  chr16:67222673-67222703
  hypo
tgggcaacccgctcccgtaggggctctaga

SEQ ID NO: 180625 - DNA, 102 bp, Homo sapiens
  chr16:67222914-67223016
  hypo
atgcccaccttgaggcgcgattccagggagcaggtacgctgcacctcgcggctgcggtactggcctagcctggccagctgctccggccggtagaagatgcct

SEQ ID NO: 180626 - DNA, 30 bp, Homo sapiens
  chr16:67230440-67230470
  hypo
gaactcttccctggcgtgtccttaaacatt

SEQ ID NO: 180627 - DNA, 252 bp, Homo sapiens
  chr16:67235495-67235747
  hypo
tggggctgctggagccgcgcatgcggacgcccctggacccctacagccaggtgtgtgtctttggtgaggacaaggcagggggtggcttagagcttggccttgaatctataatcttgatcccctcccccgccacccaacactgaccccaggagcagcgggagcagctgcaggtcctacgccaggctgccttcgaggtggagggggagtcctcgggtgccgggctaagtgctgaccgtcgccgttccctctgtg

SEQ ID NO: 180628 - DNA, 30 bp, Homo sapiens; identical to SEQ ID NO: 90622
  chr16:67236343-67236373
  hypo

SEQ ID NO: 180629 - DNA, 33 bp, Homo sapiens
  chr16:67241297-67241330
  hypo
aggggcctgtggcagcgacgtgtagctggaaag

SEQ ID NO: 180630 - DNA, 248 bp, Homo sapiens
  chr16:67241529-67241777
  hypo
gcccctcccacgaagcgggactggacacaggacacctggggcagctgggcttggaagcgtctgacggcggccatgttgatgccagggcacgtggccacatccaacacccggagctgcctgcacgcctgcccaatagcatccagtgtcctgtggggaggccacctgatgagtgcctggcccggtgtgggacccagcccagcccctgcaccgtggctccatctgcctggtgtcatcggacacacttactg

SEQ ID NO: 180631 - DNA, 232 bp, Homo sapiens; identical to SEQ ID NO: 29307
  chr16:67270957-67271189
  hypo

SEQ ID NO: 180632 - DNA, 216 bp, Homo sapiens; identical to SEQ ID NO: 10744
  chr16:67280007-67280223
  hypo

SEQ ID NO: 180633 - DNA, 458 bp, Homo sapiens; identical to SEQ ID NO: 10746
  chr16:67281139-67281597
  hypo

SEQ ID NO: 180634 - DNA, 30 bp, Homo sapiens; identical to SEQ ID NO: 90627
  chr16:67290834-67290864
  hypo

SEQ ID NO: 180635 - DNA, 26 bp, Homo sapiens
  chr16:67309946-67309972
  hypo
tgcgcccggccgtagtcaacagttta

SEQ ID NO: 180636 - DNA, 344 bp, Homo sapiens; identical to SEQ ID NO: 90629
  chr16:67313744-67314088
  hypo

SEQ ID NO: 180637 - DNA, 31 bp, Homo sapiens; identical to SEQ ID NO: 90630
  chr16:67321789-67321820
  hypo

SEQ ID NO: 180638 - DNA, 70 bp, Homo sapiens
  chr16:67337017-67337087
  hypo
ccccccaccccaccccggacagagcaatcaccaatgaagcggaactcgctgcactcgcactcgatgaggg

SEQ ID NO: 180639 - DNA, 31 bp, Homo sapiens; identical to SEQ ID NO: 29310
  chr16:67363908-67363939
  hypo

SEQ ID NO: 180640 - DNA, 30 bp, Homo sapiens
  chr16:67431878-67431908
  hypo
cccgcgcatgcttggcgcctgggcaggtgt

SEQ ID NO: 180641 - DNA, 31 bp, Homo sapiens; identical to SEQ ID NO: 90632
  chr16:67446022-67446053
  hypo

SEQ ID NO: 180642 - DNA, 31 bp, Homo sapiens; identical to SEQ ID NO: 90633
  chr16:67456091-67456122
  hypo

SEQ ID NO: 180643 - DNA, 369 bp, Homo sapiens; identical to SEQ ID NO: 29311
  chr16:67469688-67470057
  hypo

SEQ ID NO: 180644 - DNA, 50 bp, Homo sapiens; identical to SEQ ID NO: 29312
  chr16:67470487-67470537
  hypo

SEQ ID NO: 180645 - DNA, 123 bp, Homo sapiens; identical to SEQ ID NO: 29313
  chr16:67470862-67470985
  hypo

SEQ ID NO: 180646 - DNA, 80 bp, Homo sapiens; identical to SEQ ID NO: 29314
  chr16:67472274-67472354
  hypo

SEQ ID NO: 180647 - DNA, 80 bp, Homo sapiens
  chr16:67472413-67472493
  hypo
agccttgggccaggacgctagaagatagggatgtagttgtcgattttggcgcggtggcgctgggcgatacattcagcgat

SEQ ID NO: 180648 - DNA, 219 bp, Homo sapiens; identical to SEQ ID NO: 90638
  chr16:67478340-67478559
  hypo

SEQ ID NO: 180649 - DNA, 42 bp, Homo sapiens; identical to SEQ ID NO: 29315
  chr16:67511576-67511618
  hypo

SEQ ID NO: 180650 - DNA, 30 bp, Homo sapiens; identical to SEQ ID NO: 29316
  chr16:67513453-67513483
  hypo

SEQ ID NO: 180651 - DNA, 30 bp, Homo sapiens
  chr16:67517231-67517261
  hypo
ccatctgggctcctcgcgtggcaggcagtg

SEQ ID NO: 180652 - DNA, 65 bp, Homo sapiens; identical to SEQ ID NO: 29317
  chr16:67518129-67518194
  hypo

SEQ ID NO: 180653 - DNA, 202 bp, Homo sapiens; identical to SEQ ID NO: 127389
  chr16:67563141-67563343
  hypo

SEQ ID NO: 180654 - DNA, 66 bp, Homo sapiens; identical to SEQ ID NO: 127390
  chr16:67563575-67563641
  hypo

SEQ ID NO: 180655 - DNA, 146 bp, Homo sapiens; identical to SEQ ID NO: 53196
  chr16:67564102-67564248
  hypo

SEQ ID NO: 180656 - DNA, 30 bp, Homo sapiens; identical to SEQ ID NO: 53197
  chr16:67564457-67564487
  hypo

SEQ ID NO: 180657 - DNA, 725 bp, Homo sapiens; identical to SEQ ID NO: 127393
  chr16:67571278-67572003
  hypo

SEQ ID NO: 180658 - DNA, 67 bp, Homo sapiens; identical to SEQ ID NO: 90645
  chr16:67574478-67574545
  hypo

SEQ ID NO: 180659 - DNA, 180 bp, Homo sapiens
  chr16:67578534-67578714
  hypo
tgagcacgatcctcccgagccctaccctgaggcctgagctacttggccacccatgttctccagaaactgggcacatttgggcccctgcgctgccaggaggcatgggccctggagcggctgctgcgggaagcccgagtactggaggcagtatgcgagttcagcaggcggtgggagatcccg

SEQ ID NO: 180660 - DNA, 30 bp, Homo sapiens
  chr16:67587110-67587140
  hypo
gtccagtgactgctccgctccattccttcc

SEQ ID NO: 180661 - DNA, 26 bp, Homo sapiens
  chr16:67593738-67593764
  hypo
attagacatgagaaaacttgccgggc

SEQ ID NO: 180662 - DNA, 418 bp, Homo sapiens; identical to SEQ ID NO: 127395
  chr16:67678708-67679126
  hypo

SEQ ID NO: 180663 - DNA, 200 bp, Homo sapiens
  chr16:67681426-67681626
  hypo
ctggcccaggcgctggcgggacactcaagctctgggctgcgggagctcagcctcgcggggaacctgctggatgaccgaggtatgactgagcctggggaccgcaggggtgggcagcaggaggaggtgagacccacgtggctgttcccaccccccaaggcatgactgcactcagcagacacctcgagcgttgtccaggagcc

SEQ ID NO: 180664 - DNA, 30 bp, Homo sapiens; identical to SEQ ID NO: 90650
  chr16:67691165-67691195
  hypo

SEQ ID NO: 180665 - DNA, 30 bp, Homo sapiens; identical to SEQ ID NO: 90651
  chr16:67691471-67691501
  hypo

SEQ ID NO: 180666 - DNA, 339 bp, Homo sapiens
  chr16:67700023-67700362
  hypo
acgtccccgacgccgcgctggccgcgctccaggatctctccggcaccgggaccgatgcaggggccacggggagcggtggtgtccagggcccggtcggaagtcagcaagtccagcttcagcgcgtttccctcgaggcgcccttgagctgtggggcggagccgggcggagtccggggctcagaggtggagccagggccgacccctgagcctcgcaccaccgccaagcccccggactcacccgaggtcggccgcctgtagttgtcaggacagagcgtcgggtctggggggatgggccccgagatgcgggacgggccctcgcacatgccgccggcgccgccca

SEQ ID NO: 180667 - DNA, 650 bp, Homo sapiens; identical to SEQ ID NO: 127397
  chr16:67700712-67701362
  hypo

SEQ ID NO: 180668 - DNA, 290 bp, Homo sapiens; identical to SEQ ID NO: 29321
  chr16:67709088-67709378
  hypo

SEQ ID NO: 180669 - DNA, 30 bp, Homo sapiens; identical to SEQ ID NO: 29322
  chr16:67825195-67825225
  hypo

SEQ ID NO: 180670 - DNA, 100 bp, Homo sapiens
  chr16:67848820-67848920
  hypo
tctaccatgttcactccggatctctccgccattcctcttttttaaagtttgtatataaaaatgaatgctgtaccaaaggtatcagaagagaaatgaaatt

SEQ ID NO: 180671 - DNA, 30 bp, Homo sapiens; identical to SEQ ID NO: 90658
  chr16:67875250-67875280
  hypo

SEQ ID NO: 180672 - DNA, 30 bp, Homo sapiens
  chr16:67918015-67918045
  hypo
atgctgcatggcctcgtgacccccagcctc

SEQ ID NO: 180673 - DNA, 203 bp, Homo sapiens; identical to SEQ ID NO: 90659
  chr16:67920021-67920224
  hypo

SEQ ID NO: 180674 - DNA, 30 bp, Homo sapiens; identical to SEQ ID NO: 90660
  chr16:67943082-67943112
  hypo

SEQ ID NO: 180675 - DNA, 30 bp, Homo sapiens
  chr16:67963623-67963653
  hypo
aggggtgggggccccggcctcggcatggct

SEQ ID NO: 180676 - DNA, 30 bp, Homo sapiens
  chr16:67965084-67965114
  hypo
gatggcaggaatgccgcagcctggccattg

SEQ ID NO: 180677 - DNA, 141 bp, Homo sapiens; identical to SEQ ID NO: 29324
  chr16:67965741-67965882
  hypo

SEQ ID NO: 180678 - DNA, 30 bp, Homo sapiens; identical to SEQ ID NO: 90662
  chr16:67966241-67966271
  hypo

SEQ ID NO: 180679 - DNA, 31 bp, Homo sapiens
  chr16:67968862-67968893
  hypo
ggtgtgtgagacctaacgggctctctctgct

SEQ ID NO: 180680 - DNA, 308 bp, Homo sapiens
  chr16:67981966-67982274
  hypo
tgatagtacttgaaccggggccgccagttgggggtcctcaggagtgtctgcaccgcacaggcgaggttcacgaacaggtagcacatcagaaagaacctgcggcacagagggcggttggcgaagagcagcctcctcggcagctggggacctgatgtcaggctgggcctggcccagaaacggggcgtggcccggccctgccctgcatggctcagcaaggtcttctcaacctcattgctgccacctccatggcctgaggcaatgagactactgtggaggagtcctcggagccagatcgcagaggatgggca

SEQ ID NO: 180681 - DNA, 30 bp, Homo sapiens
  chr16:68012258-68012288
  hypo
gtgaccaccctccacgccaatgaggcaggc

SEQ ID NO: 180682 - DNA, 30 bp, Homo sapiens
  chr16:68024740-68024770
  hypo
catcaggaacattccgagcactgttgcaca

SEQ ID NO: 180683 - DNA, 342 bp, Homo sapiens; identical to SEQ ID NO: 53214
  chr16:68118297-68118639
  hypo

SEQ ID NO: 180684 - DNA, 311 bp, Homo sapiens; identical to SEQ ID NO: 10758
  chr16:68118759-68119070
  hypo

SEQ ID NO: 180685 - DNA, 26 bp, Homo sapiens
  chr16:68126066-68126092
  hypo
atgtgtgaggctgggcgcggtggctc

SEQ ID NO: 180686 - DNA, 30 bp, Homo sapiens
  chr16:68234729-68234759
  hypo
gtaaacatttatgttcgttatggtttttat

SEQ ID NO: 180687 - DNA, 40 bp, Homo sapiens; identical to SEQ ID NO: 90667
  chr16:68250712-68250752
  hypo

SEQ ID NO: 180688 - DNA, 72 bp, Homo sapiens; identical to SEQ ID NO: 10759
  chr16:68269812-68269884
  hypo

SEQ ID NO: 180689 - DNA, 111 bp, Homo sapiens; identical to SEQ ID NO: 10760
  chr16:68269896-68270007
  hypo

SEQ ID NO: 180690 - DNA, 281 bp, Homo sapiens; identical to SEQ ID NO: 10761
  chr16:68270022-68270303
  hypo

SEQ ID NO: 180691 - DNA, 30 bp, Homo sapiens; identical to SEQ ID NO: 127422
  chr16:68270562-68270592
  hypo

SEQ ID NO: 180692 - DNA, 638 bp, Homo sapiens; identical to SEQ ID NO: 127423
  chr16:68270866-68271504
  hypo

SEQ ID NO: 180693 - DNA, 58 bp, Homo sapiens; identical to SEQ ID NO: 10763
  chr16:68298828-68298886
  hypo

SEQ ID NO: 180694 - DNA, 20 bp, Homo sapiens
  chr16:68314936-68314956
  hypo
gctgtggctccttttaaatg

SEQ ID NO: 180695 - DNA, 30 bp, Homo sapiens
  chr16:68327718-68327748
  hypo
aagcctcaagcctagcgagtgagtgtcgtg

SEQ ID NO: 180696 - DNA, 31 bp, Homo sapiens
  chr16:68362038-68362069
  hypo
gaatgctaatcctccacgctgacttctgacc

SEQ ID NO: 180697 - DNA, 40 bp, Homo sapiens; identical to SEQ ID NO: 90674
  chr16:68385560-68385600
  hypo

SEQ ID NO: 180698 - DNA, 46 bp, Homo sapiens; identical to SEQ ID NO: 29332
  chr16:68386059-68386105
  hypo

SEQ ID NO: 180699 - DNA, 194 bp, Homo sapiens
  chr16:68386174-68386368
  hypo
ttcttcactaccagcctgctgccgtggcacaacctctacttctggtacgtgcggaccgctgtggaccagcacctggggccaggtgccatggtgatgccccaggcagcctcgctgcacgctgtggttgtggagttcagggtaggccacccaggggatgttggagaaaaaagcagaggaggcgggtggggaacctt

SEQ ID NO: 180700 - DNA, 30 bp, Homo sapiens; identical to SEQ ID NO: 90677
  chr16:68394714-68394744
  hypo

SEQ ID NO: 180701 - DNA, 31 bp, Homo sapiens
  chr16:68397456-68397487
  hypo
gagtacctgggggggacgagggggtgacagt

SEQ ID NO: 180702 - DNA, 810 bp, Homo sapiens; identical to SEQ ID NO: 53222
  chr16:68481955-68482765
  hypo

SEQ ID NO: 180703 - DNA, 261 bp, Homo sapiens
  chr16:68525539-68525800
  hypo
aattcaccttcaaaacgctacgtgagtccaggggggcagcgaagaagaggccgaaggagcagtggggcaggggtcgcgggtctctgtggtgtggagggggcagcgccgggaatgtgcggggaagcctggaggcctgggtcccaagcccctgtgccaattgctgggggcccatgagactcactccaccttgctgagctgattctggaccctgatcacaagggactgcaaatccgtgttctcgtgccttcaatctgggcctgc

SEQ ID NO: 180704 - DNA, 232 bp, Homo sapiens; identical to SEQ ID NO: 90680
  chr16:68526074-68526306
  hypo

SEQ ID NO: 180705 - DNA, 270 bp, Homo sapiens; identical to SEQ ID NO: 127431
  chr16:68544136-68544406
  hypo

SEQ ID NO: 180706 - DNA, 31 bp, Homo sapiens; identical to SEQ ID NO: 90681
  chr16:68560873-68560904
  hypo

SEQ ID NO: 180707 - DNA, 92 bp, Homo sapiens; identical to SEQ ID NO: 53224
  chr16:68564223-68564315
  hypo

SEQ ID NO: 180708 - DNA, 30 bp, Homo sapiens
  chr16:68572327-68572357
  hypo
ttgaaaatttccatcgggccgggcgcggtt

SEQ ID NO: 180709 - DNA, 30 bp, Homo sapiens
  chr16:68598591-68598621
  hypo
taaactctaggaaccgtgaaattaaggaat

SEQ ID NO: 180710 - DNA, 25 bp, Homo sapiens
  chr16:68610371-68610396
  hypo
gggcacggtggctcacgcctgtaat

SEQ ID NO: 180711 - DNA, 25 bp, Homo sapiens
  chr16:68610635-68610660
  hypo
agcgagactccgtctcaaaaaaaaa

SEQ ID NO: 180712 - DNA, 31 bp, Homo sapiens; identical to SEQ ID NO: 90683
  chr16:68672309-68672340
  hypo

SEQ ID NO: 180713 - DNA, 36 bp, Homo sapiens; identical to SEQ ID NO: 90684
  chr16:68697406-68697442
  hypo

SEQ ID NO: 180714 - DNA, 31 bp, Homo sapiens; identical to SEQ ID NO: 29335
  chr16:68721866-68721897
  hypo

SEQ ID NO: 180715 - DNA, 30 bp, Homo sapiens; identical to SEQ ID NO: 29336
  chr16:68731681-68731711
  hypo

SEQ ID NO: 180716 - DNA, 30 bp, Homo sapiens
  chr16:68732089-68732119
  hypo
gcagaacctgaaggcggctaacacagaccc

SEQ ID NO: 180717 - DNA, 192 bp, Homo sapiens; identical to SEQ ID NO: 90687
  chr16:68737003-68737195
  hypo

SEQ ID NO: 180718 - DNA, 35 bp, Homo sapiens; identical to SEQ ID NO: 90688
  chr16:68739593-68739628
  hypo

SEQ ID NO: 180719 - DNA, 121 bp, Homo sapiens; identical to SEQ ID NO: 90689
  chr16:68743255-68743376
  hypo

SEQ ID NO: 180720 - DNA, 18 bp, Homo sapiens
  chr16:68755428-68755446
  hypo
acccggccacagttcagt

SEQ ID NO: 180721 - DNA, 46 bp, Homo sapiens
  chr16:68755702-68755748
  hypo
tccttgttggccaggcgtggtggctcacgcctgtaattctagcact

SEQ ID NO: 180722 - DNA, 18 bp, Homo sapiens
  chr16:68761399-68761417
  hypo
atctgtaaaatggtcacg

SEQ ID NO: 180723 - DNA, 30 bp, Homo sapiens; identical to SEQ ID NO: 90691
  chr16:68767774-68767804
  hypo

SEQ ID NO: 180724 - DNA, 23 bp, Homo sapiens
  chr16:68769450-68769473
  hypo
caggactccgtctcaaaaaaaaa

SEQ ID NO: 180725 - DNA, 121 bp, Homo sapiens
  chr16:68770616-68770737
  hypo
accaggctgggcaatacagggagacacagcgcccccactgcccctgtccgccccgacttgtctctctacaaaaaggcaaaagaaaaaaaaattagcctggcgtggtggtgtgcacctgtac

SEQ ID NO: 180726 - DNA, 20 bp, Homo sapiens
  chr16:68770856-68770876
  hypo
caaaacgaacaaacaaaaaa

SEQ ID NO: 180727 - DNA, 21 bp, Homo sapiens
  chr16:68780831-68780852
  hypo
acagagcgatactccatctca

SEQ ID NO: 180728 - DNA, 89 bp, Homo sapiens; identical to SEQ ID NO: 90695
  chr16:68782326-68782415
  hypo

SEQ ID NO: 180729 - DNA, 30 bp, Homo sapiens; identical to SEQ ID NO: 90696
  chr16:68792435-68792465
  hypo

SEQ ID NO: 180730 - DNA, 30 bp, Homo sapiens; identical to SEQ ID NO: 53233
  chr16:68820930-68820960
  hypo

SEQ ID NO: 180731 - DNA, 19 bp, Homo sapiens
  chr16:68829771-68829790
  hypo
aaagctaaatgcaggccgg

SEQ ID NO: 180732 - DNA, 38 bp, Homo sapiens; identical to SEQ ID NO: 90699
  chr16:68838287-68838325
  hypo

SEQ ID NO: 180733 - DNA, 168 bp, Homo sapiens; identical to SEQ ID NO: 90700
  chr16:68849365-68849533
  hypo

SEQ ID NO: 180734 - DNA, 19 bp, Homo sapiens
  chr16:68849942-68849961
  hypo
tggagtctcactttgtcgc

SEQ ID NO: 180735 - DNA, 18 bp, Homo sapiens
  chr16:68850200-68850218
  hypo
caccgcacccagcccata

SEQ ID NO: 180736 - DNA, 141 bp, Homo sapiens; identical to SEQ ID NO: 90703
  chr16:68854967-68855108
  hypo

SEQ ID NO: 180737 - DNA, 225 bp, Homo sapiens; identical to SEQ ID NO: 90704
  chr16:68856756-68856981
  hypo

SEQ ID NO: 180738 - DNA, 30 bp, Homo sapiens; identical to SEQ ID NO: 90705
  chr16:68866427-68866457
  hypo

SEQ ID NO: 180739 - DNA, 155 bp, Homo sapiens; identical to SEQ ID NO: 90706
  chr16:68876699-68876854
  hypo

SEQ ID NO: 180740 - DNA, 78 bp, Homo sapiens; identical to SEQ ID NO: 90707
  chr16:68942209-68942287
  hypo

SEQ ID NO: 180741 - DNA, 31 bp, Homo sapiens; identical to SEQ ID NO: 90708
  chr16:68955370-68955401
  hypo

SEQ ID NO: 180742 - DNA, 21 bp, Homo sapiens
  chr16:68970520-68970541
  hypo
agccaccgcaccctgcctata

SEQ ID NO: 180743 - DNA, 30 bp, Homo sapiens
  chr16:69007957-69007987
  hypo
ctgagaaaatcttgccggacttgttggctc

SEQ ID NO: 180744 - DNA, 35 bp, Homo sapiens; identical to SEQ ID NO: 90710
  chr16:69077093-69077128
  hypo

SEQ ID NO: 180745 - DNA, 28 bp, Homo sapiens
  chr16:69098023-69098051
  hypo
ccaccacgcccagctctacagccatact

SEQ ID NO: 180746 - DNA, 27 bp, Homo sapiens
  chr16:69107558-69107585
  hypo
ggttagaaagggcactcgaagccaggc

SEQ ID NO: 180747 - DNA, 30 bp, Homo sapiens; identical to SEQ ID NO: 90713
  chr16:69117664-69117694
  hypo

SEQ ID NO: 180748 - DNA, 135 bp, Homo sapiens; identical to SEQ ID NO: 29347
  chr16:69129257-69129392
  hypo

SEQ ID NO: 180749 - DNA, 139 bp, Homo sapiens; identical to SEQ ID NO: 90715
  chr16:69133539-69133678
  hypo

SEQ ID NO: 180750 - DNA, 252 bp, Homo sapiens
  chr16:69134519-69134771
  hypo
ctcactaggagacagcggagcagaaccgtgggacgatggagcacctgggtcctggcaaggttgctctgcagcttccggcactggtgatgacagagaggttacgggtgcaggatatttgagcatttcgtgagtttggatttggaatttcattgaaaggtgaaatctttgtggaactgtcagcttcagttacctccaacctgctaaagctttgagaaaggccccttgaactctctgcaccgtcgagtacttttc

SEQ ID NO: 180751 - DNA, 30 bp, Homo sapiens; identical to SEQ ID NO: 29349
  chr16:69136641-69136671
  hypo

SEQ ID NO: 180752 - DNA, 1079 bp, Homo sapiens; identical to SEQ ID NO: 53234
  chr16:69139466-69140545
  hypo

SEQ ID NO: 180753 - DNA, 797 bp, Homo sapiens
  chr16:69143277-69144074
  hypo
tctcctgccttctctcgccagatgccggtgcagctgacgacagccctgcgtgtggtgggcaccagcctgtttgccctggcagtgctgggtggcatcctggcagcctatgtgacgggctaccagttcatccacacggaaaagcactacctgtccttcggcctgtacggcgccatcctgggcctgcacctgctcattcagagcctttttgccttcctggagcaccggcgcatgcgacgtgccggccaggccctgaagctgccctccccgcggcggggctcggtggcactgtgcattgccgcataccaggaggaccctgactacttgcgcaagtgcctgcgctcggcccagcgcatctccttccctgacctcaaggtggtcatggtggtggatggcaaccgccaggaggacgcctacatgctggacatcttccacgaggtgctgggcggcaccgagcaggccggcttctttgtgtggcgcagcaacttccatgaggcaggcgagggtgagacggaggccagcctgcaggagggcatggaccgtgtgcgggatgtggtgcgggccagcaccttctcgtgcatcatgcagaagtggggaggcaagcgcgaggtcatgtacacggccttcaaggccctcggcgattcggtggactacatccaggtaagggcgcctccctaggagcgtgtgtacatggggataagtctggacagcctggcaaactctccgccaagaatctgaggtctggtctaggtcccttgggttgtgcacacacctgtgcacttaagaaggcaacaaggtgg

SEQ ID NO: 180754 - DNA, 30 bp, Homo sapiens
  chr16:69144854-69144884
  hypo
ttttgtaggagcatcggcaggggcgggacc

SEQ ID NO: 180755 - DNA, 30 bp, Homo sapiens
  chr16:69148459-69148489
  hypo
ggcacctcaccaaccgagtcctgagccttg

SEQ ID NO: 180756 - DNA, 279 bp, Homo sapiens; identical to SEQ ID NO: 90719
  chr16:69264948-69265227
  hypo

SEQ ID NO: 180757 - DNA, 20 bp, Homo sapiens
  chr16:69293158-69293178
  hypo
tttttttttgagacagagtt

SEQ ID NO: 180758 - DNA, 27 bp, Homo sapiens
  chr16:69296280-69296307
  hypo
tcactgcaagctcggcctcccgggttg

SEQ ID NO: 180759 - DNA, 19 bp, Homo sapiens
  chr16:69298857-69298876
  hypo
aattacatctattggccgg

SEQ ID NO: 180760 - DNA, 57 bp, Homo sapiens
  chr16:69334741-69334798
  hypo
acctgcactcttgtccgaagccgattgtatttgtgttgcacacgtttttatcggcca

SEQ ID NO: 180761 - DNA, 36 bp, Homo sapiens; identical to SEQ ID NO: 90723
  chr16:69344403-69344439
  hypo

SEQ ID NO: 180762 - DNA, 35 bp, Homo sapiens; identical to SEQ ID NO: 90724
  chr16:69344498-69344533
  hypo

SEQ ID NO: 180763 - DNA, 816 bp, Homo sapiens; identical to SEQ ID NO: 90725
  chr16:69352179-69352995
  hypo

SEQ ID NO: 180764 - DNA, 585 bp, Homo sapiens
  chr16:69354733-69355318
  hypo
ctgctgctggcagcccgggtgcagcctggccccttttccctggagtcttcccgtctgcctgccaagcagagccctttgtgaggctggcttgttgaggatgtgccgccagcatcactggcccatgaaatgcgtccgtttcactcaaatcttcgtgcctccccttccgtgaataccattccatcatccgctgtcaactcctgccgtgtgctgggctctctaggtttgaaaaacgaatttatatccccttgccggaggaagctgcccgcgcccagatgttccggttgcatctcgggagcactccccacaacctcacggatgcaaacatccacgagctggcccggaagacggaaggctactcgggcgcggacatcagcatcatcgtgcgggactctctcatgcagcccgtgaggaaggtgcagtcggccacacacttcaaaaaggtgagtgcccgcggccactgctgagaaaaatctcatagtaagagcgggatgttcggttttttttttcccagctcctggtcctgctccccggctgctcaggtgacacagtctctgaggcctcctggagagccgagggccagtgcca

SEQ ID NO: 180765 - DNA, 127 bp, Homo sapiens
  chr16:69358550-69358677
  hypo
tggaagtgtcaaggagtggggcggggtggcgggggagaagcagccgtgctgccaggtcacccagacctccagacagccggctagccccactgcccgttccttttacgcccaagttttgctccttgag

SEQ ID NO: 180766 - DNA, 30 bp, Homo sapiens
  chr16:69365763-69365793
  hypo
actgtgaagcagaacgtaacggaacagcag

SEQ ID NO: 180767 - DNA, 90 bp, Homo sapiens; identical to SEQ ID NO: 53235
  chr16:69373054-69373144
  hypo

SEQ ID NO: 180768 - DNA, 30 bp, Homo sapiens
  chr16:69377403-69377433
  hypo
aggctctgggctgtcgaccaccagttcacg

SEQ ID NO: 180769 - DNA, 186 bp, Homo sapiens; identical to SEQ ID NO: 29356
  chr16:69383485-69383671
  hypo

SEQ ID NO: 180770 - DNA, 30 bp, Homo sapiens; identical to SEQ ID NO: 29357
  chr16:69386176-69386206
  hypo

SEQ ID NO: 180771 - DNA, 101 bp, Homo sapiens; identical to SEQ ID NO: 90731
  chr16:69391671-69391772
  hypo

SEQ ID NO: 180772 - DNA, 33 bp, Homo sapiens; identical to SEQ ID NO: 90732
  chr16:69397587-69397620
  hypo

SEQ ID NO: 180773 - DNA, 31 bp, Homo sapiens; identical to SEQ ID NO: 29358
  chr16:69400784-69400815
  hypo

SEQ ID NO: 180774 - DNA, 37 bp, Homo sapiens
  chr16:69439223-69439260
  hypo
acaggtgtgagccaccacgcccggcctactccctgaa

SEQ ID NO: 180775 - DNA, 231 bp, Homo sapiens
  chr16:69446264-69446495
  hypo
gaaaaacacgagttgcgtgcgttggaaagaagacaaggccatatctgaatcatcagccttacaataatgtgaacgtcattatggcagcatttcaaacaaaaggctatgaagctgttgcgcagggctgcaggtgccattgtgctcactaatggtatgtgctccatgcgtgtgggcttcagcggtctggaagcactgaagaggatctgtgctccagagcggggtggggcctgc

SEQ ID NO: 180776 - DNA, 23 bp, Homo sapiens
  chr16:69485566-69485589
  hypo
aaagttggccgggggcggtgact

SEQ ID NO: 180777 - DNA, 23 bp, Homo sapiens
  chr16:69485828-69485851
  hypo
aagcgagacgccgtctcaaaaaa

SEQ ID NO: 180778 - DNA, 25 bp, Homo sapiens
  chr16:69494916-69494941
  hypo
gtactaaagaaattttctggccggc

SEQ ID NO: 180779 - DNA, 85 bp, Homo sapiens; identical to SEQ ID NO: 90738
  chr16:69495120-69495205
  hypo

SEQ ID NO: 180780 - DNA, 146 bp, Homo sapiens
  chr16:69557040-69557186
  hypo
agaaggcctgatttaaaggtccgatttagtcctggggtgggaggaaagacgttcctgctgtcgatgaaagcggcattctacagccactagactggctgcagctctttcaaagaattgaaaacatcgagaaactgaagggacccaga

SEQ ID NO: 180781 - DNA, 276 bp, Homo sapiens
  chr16:69557608-69557884
  hypo
ggggcagatcaaagccggatttcccagcacaggtagcaagcatggcaggaatctgggagacctctcacccagtccccaacccacgctcacagatggaaagccacaccattattggtcacacctttgcgcattgccagcacgcaggcgtttgtgacaaatcttttatagtctagtatatagctctctcagataggcagctgtgatatgattgggccctgtgatttctggctaggccgcctgggttcagttcacagctgatgtcgggcccacttggca

SEQ ID NO: 180782 - DNA, 31 bp, Homo sapiens; identical to SEQ ID NO: 90741
  chr16:69560242-69560273
  hypo

SEQ ID NO: 180783 - DNA, 135 bp, Homo sapiens; identical to SEQ ID NO: 90742
  chr16:69560822-69560957
  hypo

SEQ ID NO: 180784 - DNA, 23 bp, Homo sapiens
  chr16:69564040-69564063
  hypo
gggcgcgatggctcacgcctgta

SEQ ID NO: 180785 - DNA, 42 bp, Homo sapiens; identical to SEQ ID NO: 90743
  chr16:69613047-69613089
  hypo

SEQ ID NO: 180786 - DNA, 30 bp, Homo sapiens; identical to SEQ ID NO: 90744
  chr16:69630322-69630352
  hypo

SEQ ID NO: 180787 - DNA, 20 bp, Homo sapiens
  chr16:69632633-69632653
  hypo
aatgtcagcgtaggccgggc

SEQ ID NO: 180788 - DNA, 31 bp, Homo sapiens; identical to SEQ ID NO: 29365
  chr16:69641962-69641993
  hypo

SEQ ID NO: 180789 - DNA, 30 bp, Homo sapiens
  chr16:69642112-69642142
  hypo
agccgggtgttgtggcgtgcctgtaatctc

SEQ ID NO: 180790 - DNA, 39 bp, Homo sapiens; identical to SEQ ID NO: 90747
  chr16:69642740-69642779
  hypo

SEQ ID NO: 180791 - DNA, 26 bp, Homo sapiens
  chr16:69694309-69694335
  hypo
gcagcagactgcgactgtctcaaaaa

SEQ ID NO: 180792 - DNA, 30 bp, Homo sapiens
  chr16:69712132-69712162
  hypo
tgggagacggagtctcgctgtgtcgcccag

SEQ ID NO: 180793 - DNA, 31 bp, Homo sapiens; identical to SEQ ID NO: 90749
  chr16:69746590-69746621
  hypo

SEQ ID NO: 180794 - DNA, 241 bp, Homo sapiens; identical to SEQ ID NO: 90750
  chr16:69757713-69757954
  hypo

SEQ ID NO: 180795 - DNA, 88 bp, Homo sapiens
  chr16:69759427-69759515
  hypo
gaaacggatccagtacgatctgatcaggtttgcctaatccaagggcctcaatggaaaatgcctcccaaggccaggcacggtggctcac

SEQ ID NO: 180796 - DNA, 241 bp, Homo sapiens; identical to SEQ ID NO: 90751
  chr16:69761436-69761677
  hypo

SEQ ID NO: 180797 - DNA, 31 bp, Homo sapiens; identical to SEQ ID NO: 29368
  chr16:69789089-69789120
  hypo

SEQ ID NO: 180798 - DNA, 183 bp, Homo sapiens; identical to SEQ ID NO: 90753
  chr16:69825949-69826132
  hypo

SEQ ID NO: 180799 - DNA, 30 bp, Homo sapiens; identical to SEQ ID NO: 29370
  chr16:69833186-69833216
  hypo

SEQ ID NO: 180800 - DNA, 440 bp, Homo sapiens
  chr16:69833661-69834101
  hypo
tgccctgtgcttactcggcactcagtaaacatttactggatgttggaacgtgatggacgcgccatctgaattagccaacgtgcctctacgtcacggacatataaatcctcatctatttattgctgtttgtggtcagtggcatggcccatggcggtggtattggaccctccttcataaggcctctattcagagcagtaccatatgtggcgaatgaatggcatggaaagaaaggctcctttttctcttgatatctggaaagtattttctgaaagtggatgtagcttaagagagaggtgggggcggggagagttgcgtcccagcgagcgtgttacatgatttaagagtctttcttttctctccaagcctgtccttttaagcgatgggccacttgaaaggtctttgagcctcctctggtcttttcttttcggctgggcacatag

SEQ ID NO: 180801 - DNA, 28 bp, Homo sapiens
  chr16:69885595-69885623
  hypo
caactcggtcgggaacggtggctcatgc

SEQ ID NO: 180802 - DNA, 125 bp, Homo sapiens; identical to SEQ ID NO: 29372
  chr16:69906917-69907042
  hypo

SEQ ID NO: 180803 - DNA, 208 bp, Homo sapiens; identical to SEQ ID NO: 29373
  chr16:69921951-69922159
  hypo

SEQ ID NO: 180804 - DNA, 140 bp, Homo sapiens
  chr16:69922445-69922585
  hypo
tcattggaggatgttcgcctagatcctgcctagaaaacagcttttctctcttgaattttatcgtatcagcccacggaggagttgggttttaggctgtgaatattgctgtatgttattctcataatcgggacttaagttaa

SEQ ID NO: 180805 - DNA, 160 bp, Homo sapiens
  chr16:69955522-69955682
  hypo
gtttgcttgcttcaccgttgcagtttctttttgccgtcttgtgtcgtgttcctgctgggacccactgaagatgcctggcacagccttgcacattgtgctgttgtgacgggactatcacacggccgacaatttctggggcatctctctctgcagtattgaa

SEQ ID NO: 180806 - DNA, 30 bp, Homo sapiens
  chr16:69962812-69962842
  hypo
ggagggtacaggggcgcagggtgcagagca

SEQ ID NO: 180807 - DNA, 30 bp, Homo sapiens; identical to SEQ ID NO: 90759
  chr16:69965631-69965661
  hypo

SEQ ID NO: 180808 - DNA, 30 bp, Homo sapiens
  chr16:69971111-69971141
  hypo
ctgcgctactttgacgagaaagagctggag

SEQ ID NO: 180809 - DNA, 30 bp, Homo sapiens; identical to SEQ ID NO: 29375
  chr16:69972986-69973016
  hypo

SEQ ID NO: 180810 - DNA, 151 bp, Homo sapiens; identical to SEQ ID NO: 29376
  chr16:70151412-70151563
  hypo

SEQ ID NO: 180811 - DNA, 161 bp, Homo sapiens
  chr16:70185996-70186157
  hypo
gctgtgtattctcctcgtcctgccgcattctgtgggtctcctgcacccaccttggctgattcaggtgtttcccttacacacataccacaggcgagtgttgcatgcaatagcttggattccttttttccacatttaaagttgtcttcccggcacggtggctc

SEQ ID NO: 180812 - DNA, 290 bp, Homo sapiens; identical to SEQ ID NO: 29377
  chr16:70196487-70196777
  hypo

SEQ ID NO: 180813 - DNA, 131 bp, Homo sapiens; identical to SEQ ID NO: 90763
  chr16:70286314-70286445
  hypo

SEQ ID NO: 180814 - DNA, 177 bp, Homo sapiens; identical to SEQ ID NO: 90764
  chr16:70328601-70328778
  hypo

SEQ ID NO: 180815 - DNA, 31 bp, Homo sapiens; identical to SEQ ID NO: 29380
  chr16:70346138-70346169
  hypo

SEQ ID NO: 180816 - DNA, 55 bp, Homo sapiens; identical to SEQ ID NO: 29381
  chr16:70399210-70399265
  hypo

SEQ ID NO: 180817 - DNA, 29 bp, Homo sapiens
  chr16:70416195-70416224
  hypo
tctttttcaagacagcgtctcattctgtc

SEQ ID NO: 180818 - DNA, 29 bp, Homo sapiens
  chr16:70416463-70416492
  hypo
ggcgtcagccaccgcgcacggccaataac

SEQ ID NO: 180819 - DNA, 30 bp, Homo sapiens; identical to SEQ ID NO: 29382
  chr16:70426253-70426283
  hypo

SEQ ID NO: 180820 - DNA, 30 bp, Homo sapiens
  chr16:70432243-70432273
  hypo
tctccttgctgaggcgctgcaggccggcat

SEQ ID NO: 180821 - DNA, 411 bp, Homo sapiens
  chr16:70433886-70434297
  hypo
accgcccctcttctctcgactgtggattatcgatgaggtattgctgggtccactcaatgaaccatgaacagtcctgtcagctccgccgttgggggagaacctggctgtgtcaggaggtgtggttgctgggcttggtcctgcccccggacagccctgagggcagttgtctacatccatctgtacattatggacaaagtgaatgccagcgtccctggtagcactgacagcctgaggccccatgctgcccttgcaggcaagaacagggagaaaaggccacttgtaggcagtttgggtctcagccataaggaaaggagctcagatccatgccaagcgtgagggagccacaccaggtgagaggaacgctgagaagggaacccctgagcactggctgtgtgccgtgggaatcttgca

SEQ ID NO: 180822 - DNA, 26 bp, Homo sapiens
  chr16:70439150-70439176
  hypo
ggagccaggcacagcctggtgcggtg

SEQ ID NO: 180823 - DNA, 28 bp, Homo sapiens
  chr16:70439685-70439713
  hypo
aggcgcggtggctcacgcctgtaatccc

SEQ ID NO: 180824 - DNA, 27 bp, Homo sapiens
  chr16:70439952-70439979
  hypo
gactccgtctcaaaaaaaaaaaaagcc

SEQ ID NO: 180825 - DNA, 30 bp, Homo sapiens
  chr16:70440844-70440874
  hypo
acgagatgatggcatcgagtgtcgtcctgg

SEQ ID NO: 180826 - DNA, 56 bp, Homo sapiens
  chr16:70442005-70442061
  hypo
acctctgagcattttcgggggatagcctctcatttagtatgcgcaggagtcccagg

SEQ ID NO: 180827 - DNA, 47 bp, Homo sapiens
  chr16:70442307-70442354
  hypo
aggggtgggggtgggcgcaggtggccagttaccgaaagcccctccct

SEQ ID NO: 180828 - DNA, 24 bp, Homo sapiens
  chr16:70459520-70459544
  hypo
ctgacacaggagaatcgcttgaac

SEQ ID NO: 180829 - DNA, 23 bp, Homo sapiens
  chr16:70459603-70459626
  hypo
aacaagagcgaaactctgtctca

SEQ ID NO: 180830 - DNA, 377 bp, Homo sapiens; identical to SEQ ID NO: 10776
  chr16:70472226-70472603
  hypo

SEQ ID NO: 180831 - DNA, 121 bp, Homo sapiens
  chr16:70479293-70479414
  hypo
agcgagcactctagtgttaattttttgaagagcaccatactgtttcccgtatctgctgcaccattctccactcccaccaacagtggacaggcttccaatttctccacaccttcactaacac

SEQ ID NO: 180832 - DNA, 30 bp, Homo sapiens; identical to SEQ ID NO: 90772
  chr16:70505181-70505211
  hypo

SEQ ID NO: 180833 - DNA, 51 bp, Homo sapiens; identical to SEQ ID NO: 90773
  chr16:70507079-70507130
  hypo

SEQ ID NO: 180834 - DNA, 41 bp, Homo sapiens; identical to SEQ ID NO: 29386
  chr16:70508777-70508818
  hypo

SEQ ID NO: 180835 - DNA, 30 bp, Homo sapiens
  chr16:70509584-70509614
  hypo
tgccttgcagcgagccgcaggccgggtggt

SEQ ID NO: 180836 - DNA, 22 bp, Homo sapiens
  chr16:70510200-70510222
  hypo
cggcctgtgctgtgcctctcat

SEQ ID NO: 180837 - DNA, 30 bp, Homo sapiens; identical to SEQ ID NO: 90776
  chr16:70514649-70514679
  hypo

SEQ ID NO: 180838 - DNA, 103 bp, Homo sapiens; identical to SEQ ID NO: 90777
  chr16:70595194-70595297
  hypo

SEQ ID NO: 180839 - DNA, 178 bp, Homo sapiens; identical to SEQ ID NO: 29387
  chr16:70595529-70595707
  hypo

SEQ ID NO: 180840 - DNA, 31 bp, Homo sapiens; identical to SEQ ID NO: 90779
  chr16:70632022-70632053
  hypo

SEQ ID NO: 180841 - DNA, 30 bp, Homo sapiens
  chr16:70680364-70680394
  hypo
cgtgggtgcggtgtgcgctgtggctgatgg

SEQ ID NO: 180842 - DNA, 433 bp, Homo sapiens
  chr16:70680608-70681041
  hypo
ctgccatgggacttgcggccaccgccccccggctgtcctccacgctgccgggcagataagggcagctgctgcccttggggcacctgctcactcccgcagcccagccactcctccagggccagcccttccctgactgagtgaccacctctgctgccccgaggccatgtaggccgtgcttaggcctctgtggacacactgctggggacggcgcctgagctctcagggggacgaggaacaccaccatgccccggggcttcacctggctgcgctgtgagtactggggggtccctagggacctgcattgggaggccttggcctagatccaggatctgccgtaaccatagcaaccagggcattcttgctggtgagaagttgcgatgcttcccagccggactgcagacaccctctgagattcccacggccgccgtctgcc

SEQ ID NO: 180843 - DNA, 30 bp, Homo sapiens
  chr16:70698038-70698068
  hypo
cgtcttcacagggacgatgggcggccggat

SEQ ID NO: 180844 - DNA, 30 bp, Homo sapiens
  chr16:70698816-70698846
  hypo
gcctaccttggctgcgatggtggcagggga

SEQ ID NO: 180845 - DNA, 30 bp, Homo sapiens; identical to SEQ ID NO: 29389
  chr16:70713552-70713582
  hypo

SEQ ID NO: 180846 - DNA, 30 bp, Homo sapiens; identical to SEQ ID NO: 29390
  chr16:70714363-70714393
  hypo

SEQ ID NO: 180847 - DNA, 30 bp, Homo sapiens
  chr16:70722955-70722985
  hypo
gccaatcggcggggccgggaaggggggtgc

SEQ ID NO: 180848 - DNA, 30 bp, Homo sapiens
  chr16:70723538-70723568
  hypo
tcttggacatgtctacggctgcggctgctg

SEQ ID NO: 180849 - DNA, 350 bp, Homo sapiens
  chr16:70727986-70728336
  hypo
ctctaggatccaggcgactcagggctgggacggtgttgggcgagaccagggtgtgtctctcctgttaccctgccccagcaaagccctgggcttgaggagaaggtgcttggagttcctccagggtcagggagggagggcagtcatcctagggatgcttctggaatgccaagaatgtacaactggagagatgagtcaggacagaccagcagcaggagcagggtctttttaggatctgacctcaggcggccgtgtgggtgcctgtgtccctgggaggccctcggggaagtgtcacgctgggcacacctgggacaggctttagcgcactctgcggagagcagggtctcccccct

SEQ ID NO: 180850 - DNA, 30 bp, Homo sapiens; identical to SEQ ID NO: 29392
  chr16:70733219-70733249
  hypo

SEQ ID NO: 180851 - DNA, 30 bp, Homo sapiens
  chr16:70738623-70738653
  hypo
gggacagccggagcccgctcgggaggagct

SEQ ID NO: 180852 - DNA, 188 bp, Homo sapiens
  chr16:70754252-70754440
  hypo
aagacatccaggcatcgagcctggagggagttgaggctgccacaccgctttgatcaggacgaggaaagaagacacatctggggtgctgaagcatgtgttatgtggtaagaaagggagaacgcttcccggggagacggcaagaccaagctgaaaacaagacagtgtctcgggcacggtggagcttccaa

SEQ ID NO: 180853 - DNA, 399 bp, Homo sapiens; identical to SEQ ID NO: 90786
  chr16:70754643-70755042
  hypo

SEQ ID NO: 180854 - DNA, 149 bp, Homo sapiens
  chr16:70783610-70783759
  hypo
ggggcctggggtgtggggagccggctgatacccggcttctgtgcccctccagtccggctgctgcttcgctcccagttgctagcaaacctgactcagcccagggggtgaccttgaggctctggagcaccaatctcgatgcacaccttggc

SEQ ID NO: 180855 - DNA, 30 bp, Homo sapiens
  chr16:70792930-70792960
  hypo
gacgagacaccccagcgaggccacgcaccc

SEQ ID NO: 180856 - DNA, 142 bp, Homo sapiens
  chr16:70794491-70794633
  hypo
gtgcaggcccacaagacgtgccccaaaaccctgacaacatttggcacttcagcaaatcgagtttccacagccacagcctgaacagcgctgtttaatggactgcatctccgcctgctccctttcaatgcgcacacacaaaaac

SEQ ID NO: 180857 - DNA, 117 bp, Homo sapiens; identical to SEQ ID NO: 90789
  chr16:70795367-70795484
  hypo

SEQ ID NO: 180858 - DNA, 38 bp, Homo sapiens; identical to SEQ ID NO: 90790
  chr16:70796477-70796515
  hypo

SEQ ID NO: 180859 - DNA, 31 bp, Homo sapiens
  chr16:70803217-70803248
  hypo
tggtgccttgggcaagcggcgcagctgaaga

SEQ ID NO: 180860 - DNA, 394 bp, Homo sapiens; identical to SEQ ID NO: 90791
  chr16:70807991-70808385
  hypo

SEQ ID NO: 180861 - DNA, 323 bp, Homo sapiens; identical to SEQ ID NO: 90792
  chr16:70811507-70811830
  hypo

SEQ ID NO: 180862 - DNA, 31 bp, Homo sapiens; identical to SEQ ID NO: 90793
  chr16:70825254-70825285
  hypo

SEQ ID NO: 180863 - DNA, 97 bp, Homo sapiens
  chr16:70829398-70829495
  hypo
aaaaaaaaaaaaaaaaaaaaagaatgcatccctctgaagcgatacatgactctggcaccttccccacagaggtggtaggctccgaagaaccaggtca

SEQ ID NO: 180864 - DNA, 46 bp, Homo sapiens; identical to SEQ ID NO: 29396
  chr16:71324584-71324630
  hypo

SEQ ID NO: 180865 - DNA, 132 bp, Homo sapiens; identical to SEQ ID NO: 10779
  chr16:71459956-71460088
  hypo

SEQ ID NO: 180866 - DNA, 231 bp, Homo sapiens; identical to SEQ ID NO: 53252
  chr16:71460270-71460501
  hypo

SEQ ID NO: 180867 - DNA, 183 bp, Homo sapiens; identical to SEQ ID NO: 90797
  chr16:71537484-71537667
  hypo

SEQ ID NO: 180868 - DNA, 93 bp, Homo sapiens; identical to SEQ ID NO: 90798
  chr16:71661395-71661488
  hypo

SEQ ID NO: 180869 - DNA, 149 bp, Homo sapiens
  chr16:71674492-71674641
  hypo
ctgatatacggtggcgtggctgtttctctgggtctgggggtcctcaccatgggtgttttactccaaggagccaagagtcgaacaatgttgtcagggaagtggctcctcacggaggccgccttcagcctcctagcggcagtgggctactg

SEQ ID NO: 180870 - DNA, 31 bp, Homo sapiens; identical to SEQ ID NO: 29399
  chr16:71705862-71705893
  hypo

SEQ ID NO: 180871 - DNA, 171 bp, Homo sapiens; identical to SEQ ID NO: 90801
  chr16:71715645-71715816
  hypo

SEQ ID NO: 180872 - DNA, 43 bp, Homo sapiens; identical to SEQ ID NO: 90802
  chr16:71716352-71716395
  hypo

SEQ ID NO: 180873 - DNA, 27 bp, Homo sapiens
  chr16:71716784-71716811
  hypo
gtcattcatggctaggcgtggtggctc

SEQ ID NO: 180874 - DNA, 25 bp, Homo sapiens
  chr16:71741956-71741981
  hypo
tctttaaggtgtccacgccgcccct

SEQ ID NO: 180875 - DNA, 137 bp, Homo sapiens; identical to SEQ ID NO: 90805
  chr16:71748845-71748982
  hypo

SEQ ID NO: 180876 - DNA, 138 bp, Homo sapiens; identical to SEQ ID NO: 29403
  chr16:71754749-71754887
  hypo

SEQ ID NO: 180877 - DNA, 36 bp, Homo sapiens; identical to SEQ ID NO: 90807
  chr16:71756039-71756075
  hypo

SEQ ID NO: 180878 - DNA, 30 bp, Homo sapiens
  chr16:71845888-71845918
  hypo
tatcgagtgcagagcgttaaagagttttaa

SEQ ID NO: 180879 - DNA, 46 bp, Homo sapiens; identical to SEQ ID NO: 29404
  chr16:71870743-71870789
  hypo

SEQ ID NO: 180880 - DNA, 90 bp, Homo sapiens; identical to SEQ ID NO: 90809
  chr16:71878715-71878805
  hypo

SEQ ID NO: 180881 - DNA, 231 bp, Homo sapiens; identical to SEQ ID NO: 90810
  chr16:71894093-71894324
  hypo

SEQ ID NO: 180882 - DNA, 24 bp, Homo sapiens
  chr16:71925478-71925502
  hypo
ataaatgaatcatgtcggctgggc

SEQ ID NO: 180883 - DNA, 35 bp, Homo sapiens; identical to SEQ ID NO: 90811
  chr16:71948331-71948366
  hypo

SEQ ID NO: 180884 - DNA, 39 bp, Homo sapiens; identical to SEQ ID NO: 90812
  chr16:72018726-72018765
  hypo

SEQ ID NO: 180885 - DNA, 33 bp, Homo sapiens
  chr16:72032870-72032903
  hypo
ttgaaaacactttgtaagggccgggcgcggtgg

SEQ ID NO: 180886 - DNA, 26 bp, Homo sapiens
  chr16:72038121-72038147
  hypo
gccatcgtgcccggctccactttggt

SEQ ID NO: 180887 - DNA, 164 bp, Homo sapiens
  chr16:72038610-72038774
  hypo
ggtgaaaccctgtctctatttcatatttatcctttcccatgtaaatagcgcaggcagatgaattaacgctgctgctggtgaagtagaacaccatgatgctggcgggggtgcggtgactccaccgtggagcagcagcgttcaactgtggcggttgcctggtcccc

SEQ ID NO: 180888 - DNA, 31 bp, Homo sapiens; identical to SEQ ID NO: 29406
  chr16:72056268-72056299
  hypo

SEQ ID NO: 180889 - DNA, 31 bp, Homo sapiens; identical to SEQ ID NO: 90815
  chr16:72060654-72060685
  hypo

SEQ ID NO: 180890 - DNA, 30 bp, Homo sapiens; identical to SEQ ID NO: 90816
  chr16:72130744-72130774
  hypo

SEQ ID NO: 180891 - DNA, 30 bp, Homo sapiens
  chr16:72132651-72132681
  hypo
ctgagcggagccatcggctgtccactcgag

SEQ ID NO: 180892 - DNA, 30 bp, Homo sapiens; identical to SEQ ID NO: 90817
  chr16:72146498-72146528
  hypo

SEQ ID NO: 180893 - DNA, 30 bp, Homo sapiens
  chr16:72147378-72147408
  hypo
ccaggccagtgccggcgtgagccctgtggt

SEQ ID NO: 180894 - DNA, 54 bp, Homo sapiens; identical to SEQ ID NO: 29407
  chr16:72460075-72460129
  hypo

SEQ ID NO: 180895 - DNA, 529 bp, Homo sapiens
  chr16:72461253-72461782
  hypo
ctgcaaaagggtttcagggaacggctggtacttacgttgtctgcgttgctgtggatcctgaaaggtgttctgttggcaccgggcgctgagccaggggcaggcgctggaaacaaaagggagagacaaaaaaataaagtgattcaatgggaatattaattgctgctcttgtggattttacaaaacacataaactgttttctttttctttcttaaaaaaaaatgtggattggcgcgtgtcccttttgcatggaatatacaagtagtatgggatttacagcccagttacgggactcaggattagctgcgctggcatcttttgggcatattcttccttttaatgaatgagctttcgctgttaatgaggaataatcgtttggctaatgagctttgaaacattaagagaaaagaggttttttccgttaatcgctctggtgcgactgcatggatggattacaaaagacagcaataggaacgcagtacaaagggggggacctctcctgcagtgggagaagcaccgagatgggtgatgt

SEQ ID NO: 180896 - DNA, 23 bp, Homo sapiens
  chr16:72550589-72550612
  hypo
cggtggcactgggcgcggtggct

SEQ ID NO: 180897 - DNA, 209 bp, Homo sapiens; identical to SEQ ID NO: 53261
  chr16:72699009-72699218
  hypo

SEQ ID NO: 180898 - DNA, 30 bp, Homo sapiens; identical to SEQ ID NO: 90821
  chr16:72823677-72823707
  hypo

SEQ ID NO: 180899 - DNA, 31 bp, Homo sapiens; identical to SEQ ID NO: 90822
  chr16:72829265-72829296
  hypo

SEQ ID NO: 180900 - DNA, 30 bp, Homo sapiens
  chr16:72830269-72830299
  hypo
gtctgcatcatcagcggcgagaagatgggc

SEQ ID NO: 180901 - DNA, 31 bp, Homo sapiens; identical to SEQ ID NO: 90823
  chr16:72835834-72835865
  hypo

SEQ ID NO: 180902 - DNA, 31 bp, Homo sapiens; identical to SEQ ID NO: 29410
  chr16:72893758-72893789
  hypo

SEQ ID NO: 180903 - DNA, 149 bp, Homo sapiens; identical to SEQ ID NO: 90825
  chr16:72906616-72906765
  hypo

SEQ ID NO: 180904 - DNA, 199 bp, Homo sapiens; identical to SEQ ID NO: 90826
  chr16:72916140-72916339
  hypo

SEQ ID NO: 180905 - DNA, 31 bp, Homo sapiens; identical to SEQ ID NO: 90827
  chr16:72919232-72919263
  hypo

SEQ ID NO: 180906 - DNA, 116 bp, Homo sapiens; identical to SEQ ID NO: 90828
  chr16:72945690-72945806
  hypo

SEQ ID NO: 180907 - DNA, 213 bp, Homo sapiens; identical to SEQ ID NO: 90829
  chr16:72949232-72949445
  hypo

SEQ ID NO: 180908 - DNA, 194 bp, Homo sapiens; identical to SEQ ID NO: 90830
  chr16:72957738-72957932
  hypo

SEQ ID NO: 180909 - DNA, 625 bp, Homo sapiens
  chr16:72958494-72959119
  hypo
cccacagagaggccgcggctgggtgcgcagaactacgacaccagccctaagaagccaacaggctgttgaatgccaagcctgaactattaatttgcatatgacatcaattctgctgtcagtgtgttaatgtgtgattaattctgtcatgggttagagcaaggagaattagttaattgtcagaaacccttctcgttcactctcgtttagcccccgcctccctttaacttccttttttctcttcttattaaactaacctcctgggttttcttcctctgggcacttctgtcctatgggacttcagtcccatttcctcctaccctttacagaaacgcacctatagacccaaaaacggagaaggcagatgggtcttactccggcgccccagctggcaagtctgaactctgtccaggcagtcacgggggtggtttgggaaggccttacaacggggacacacaggtcccattcatatttgcggtcaactgccaatgccagtgatacctggatacattgtacaatctgtgctttgtgtgctgtgcaaataacctgtggggctggagcaagctggaatgtggagttaacacaaagccattgctgtgctatcgaaatcggtcgtgaggctgcccac

SEQ ID NO: 180910 - DNA, 105 bp, Homo sapiens; identical to SEQ ID NO: 90831
  chr16:72963491-72963596
  hypo

SEQ ID NO: 180911 - DNA, 31 bp, Homo sapiens; identical to SEQ ID NO: 90832
  chr16:72966921-72966952
  hypo

SEQ ID NO: 180912 - DNA, 30 bp, Homo sapiens; identical to SEQ ID NO: 29414
  chr16:72967611-72967641
  hypo

SEQ ID NO: 180913 - DNA, 30 bp, Homo sapiens; identical to SEQ ID NO: 29415
  chr16:72984457-72984487
  hypo

SEQ ID NO: 180914 - DNA, 102 bp, Homo sapiens; identical to SEQ ID NO: 90835
  chr16:72984702-72984804
  hypo

SEQ ID NO: 180915 - DNA, 31 bp, Homo sapiens; identical to SEQ ID NO: 90836
  chr16:72989875-72989906
  hypo

SEQ ID NO: 180916 - DNA, 414 bp, Homo sapiens
  chr16:72991202-72991616
  hypo
ttacacaaaaaccactcgagaagaccagagtcaactgaatccacaggactatctcaccctattcaccattctccctggttaaactcctatcatgaaaacagacaaacacgtagtcatcctcacctagagcaggcgtcatggcggccatgggcccggcgggatccagctggaatccgctcatcatgaactgggcgtccgaggcagcactgtccatcttcaggttgggcaggttcatgttctgggccaggtagtattggtagagctcggcctcggcgggtgagggcaggctgccgaggcccaggtggcggttgtgttggatctgggtcatgttctgttgcagtaacatcatgttatgcatgtgcttctcactggtcatgtgaatgcggaggttcctggccacgttggtctcataat

SEQ ID NO: 180917 - DNA, 489 bp, Homo sapiens; identical to SEQ ID NO: 90838
  chr16:72991938-72992427
  hypo

SEQ ID NO: 180918 - DNA, 1014 bp, Homo sapiens; identical to SEQ ID NO: 90839
  chr16:72993524-72994538
  hypo

SEQ ID NO: 180919 - DNA, 193 bp, Homo sapiens; identical to SEQ ID NO: 90840
  chr16:72997029-72997222
  hypo

SEQ ID NO: 180920 - DNA, 31 bp, Homo sapiens; identical to SEQ ID NO: 90841
  chr16:73000124-73000155
  hypo

SEQ ID NO: 180921 - DNA, 87 bp, Homo sapiens; identical to SEQ ID NO: 29419
  chr16:73007795-73007882
  hypo

SEQ ID NO: 180922 - DNA, 31 bp, Homo sapiens; identical to SEQ ID NO: 90843
  chr16:73026745-73026776
  hypo

SEQ ID NO: 180923 - DNA, 97 bp, Homo sapiens
  chr16:73029801-73029898
  hypo
ggctccagaatttctcgatgttctgctcaggaggcactgtcctatcttggtaattatgaaggcatattcatacgttcttttactgccaggtgcggtg

SEQ ID NO: 180924 - DNA, 48 bp, Homo sapiens
  chr16:73047782-73047830
  hypo
aacaacccccgaagacgcccacatcctaatatccgtaacctacaaata

SEQ ID NO: 180925 - DNA, 31 bp, Homo sapiens; identical to SEQ ID NO: 29420
  chr16:73063563-73063594
  hypo

SEQ ID NO: 180926 - DNA, 30 bp, Homo sapiens; identical to SEQ ID NO: 29421
  chr16:73083848-73083878
  hypo

SEQ ID NO: 180927 - DNA, 334 bp, Homo sapiens; identical to SEQ ID NO: 127505
  chr16:73091550-73091884
  hypo

SEQ ID NO: 180928 - DNA, 217 bp, Homo sapiens; identical to SEQ ID NO: 53263
  chr16:73091900-73092117
  hypo

SEQ ID NO: 180929 - DNA, 167 bp, Homo sapiens; identical to SEQ ID NO: 127507
  chr16:73092379-73092546
  hypo

SEQ ID NO: 180930 - DNA, 31 bp, Homo sapiens; identical to SEQ ID NO: 29423
  chr16:73162952-73162983
  hypo

SEQ ID NO: 180931 - DNA, 95 bp, Homo sapiens; identical to SEQ ID NO: 90850
  chr16:73208570-73208665
  hypo

SEQ ID NO: 180932 - DNA, 37 bp, Homo sapiens; identical to SEQ ID NO: 90851
  chr16:73222729-73222766
  hypo

SEQ ID NO: 180933 - DNA, 31 bp, Homo sapiens; identical to SEQ ID NO: 29424
  chr16:73232149-73232180
  hypo

SEQ ID NO: 180934 - DNA, 212 bp, Homo sapiens
  chr16:73675852-73676064
  hypo
gggcagggatggagacgctggtccacatgctcctccgactcctccctgcagagaatactgaattcaggcagtgtgagggacgcttccaccaaatttgtttctctttaaggcagctgcttaaagagggaaggtggtccgtggcctcgaggacatcaggtcacattggttcatgaactcagacttaattcccagtctctcgtgaaagcagctct

SEQ ID NO: 180935 - DNA, 30 bp, Homo sapiens
  chr16:73891473-73891503
  hypo
tgaagtctcgtgaaacgtgggatacgtgtt

SEQ ID NO: 180936 - DNA, 23 bp, Homo sapiens
  chr16:73891717-73891740
  hypo
tccctgggccaggcacgatggct

SEQ ID NO: 180937 - DNA, 36 bp, Homo sapiens
  chr16:74408511-74408547
  hypo
gctgggattacaggcttgagccgtggcacccggccc

SEQ ID NO: 180938 - DNA, 30 bp, Homo sapiens; identical to SEQ ID NO: 29425
  chr16:74483679-74483709
  hypo

SEQ ID NO: 180939 - DNA, 31 bp, Homo sapiens; identical to SEQ ID NO: 29426
  chr16:74490226-74490257
  hypo

SEQ ID NO: 180940 - DNA, 90 bp, Homo sapiens; identical to SEQ ID NO: 29427
  chr16:74490376-74490466
  hypo

SEQ ID NO: 180941 - DNA, 30 bp, Homo sapiens
  chr16:74495964-74495994
  hypo
gtaaccagttttgcacgcaaatcccacctc

SEQ ID NO: 180942 - DNA, 46 bp, Homo sapiens; identical to SEQ ID NO: 90857
  chr16:74511567-74511613
  hypo

SEQ ID NO: 180943 - DNA, 25 bp, Homo sapiens
  chr16:74529287-74529312
  hypo
aggcgtgagccgccgcacccagcct

SEQ ID NO: 180944 - DNA, 44 bp, Homo sapiens
  chr16:74540182-74540226
  hypo
aacatctcaagaggccaggagcggtggctcacacctgtaatccc

SEQ ID NO: 180945 - DNA, 206 bp, Homo sapiens; identical to SEQ ID NO: 90858
  chr16:74554954-74555160
  hypo

SEQ ID NO: 180946 - DNA, 30 bp, Homo sapiens
  chr16:74637453-74637483
  hypo
gtgagccactgcgcccggctgaacaccaca

SEQ ID NO: 180947 - DNA, 214 bp, Homo sapiens; identical to SEQ ID NO: 10793
  chr16:74659411-74659625
  hypo

SEQ ID NO: 180948 - DNA, 33 bp, Homo sapiens; identical to SEQ ID NO: 90860
  chr16:74694093-74694126
  hypo

SEQ ID NO: 180949 - DNA, 33 bp, Homo sapiens; identical to SEQ ID NO: 29430
  chr16:74694365-74694398
  hypo

SEQ ID NO: 180950 - DNA, 30 bp, Homo sapiens; identical to SEQ ID NO: 29431
  chr16:74716546-74716576
  hypo

SEQ ID NO: 180951 - DNA, 436 bp, Homo sapiens
  chr16:74752676-74753112
  hypo
cagcttgatgctgcacacccacgctgtccccgcctggcttaggttcggatgcccaacccagttgccccgtgagtcacatcaaacgtcccgtccctcccaacccacagccagactcccaggaggctccgcagcacctgaagctgcggctggctgccgggccctctcgggctgcacatgctaggtccgggctgggaccccgccccgctcaccttgtggtgctggccgtgcatgacgaagtgcagcatgatgaggtaatagctgtcgctggggggcttcatgtggaacaggaagcggtggatgaggtactcgatgaggctccagaggaatgtccccagcatgaagagcccggggaacatggacttgggcactgccaccgtgtactctgcagggtggcagggagagcgaggtgaggaccggtgcatagcagcctggtagc

SEQ ID NO: 180952 - DNA, 31 bp, Homo sapiens; identical to SEQ ID NO: 29433
  chr16:74767604-74767635
  hypo

SEQ ID NO: 180953 - DNA, 448 bp, Homo sapiens
  chr16:74782378-74782826
  hypo
caagtgattgctggacgggcggggggagcacacagcagcccactccgagggctgttcccgggaaggttcctcacagtagcctcctttctcccctcgtggaggactctctgggaggtccccaagcccccagcttcctccagggtcccagaccctgtcctccctagagagggtttgcttggacggcgcacgggggagagaacagagaagaacaacagaaagtctgcgctctgcaccacaaacaaacaagtccaccatagaggccgcgtgaaaggaggcagtgtgcggcgggcgggggctgggggcgggggcgccggcataaaggcatgttgttcgggaaagctggggctgggcaccgcgggacggacagatggccttttatcccatagcctggattttgcctgaaaaccctttttctgaaagggaatggttgcctcgggccttgggtcca

SEQ ID NO: 180954 - DNA, 80 bp, Homo sapiens; identical to SEQ ID NO: 127521
  chr16:74808948-74809028
  hypo

SEQ ID NO: 180955 - DNA, 150 bp, Homo sapiens
  chr16:74872625-74872775
  hypo
actgagaatggatcacgctggtccgcctccagtttgttgaacccaggttcctgtgttcccgctgcctttggccagcagccctgagtcaccctttatctgtcaaagaacaggttttcttcattcaatgagcaaataaactattgtttcctt

SEQ ID NO: 180956 - DNA, 29 bp, Homo sapiens
  chr16:74873074-74873103
  hypo
ggcgtgagccatcgcggccggcaatttat

SEQ ID NO: 180957 - DNA, 30 bp, Homo sapiens
  chr16:74878142-74878172
  hypo
taaatgtcacaatcacgactcaccgtagcc

SEQ ID NO: 180958 - DNA, 31 bp, Homo sapiens; identical to SEQ ID NO: 90866
  chr16:74886037-74886068
  hypo

SEQ ID NO: 180959 - DNA, 181 bp, Homo sapiens
  chr16:74901399-74901580
  hypo
tcccttctctttgccaaaccacgcatacagtaaggaagagacagcatggcgccagccaggcaaagaccccatctccataataagattacggtggggtgcccagcttcctcttgtgctaaacgtcacacctggtccaccctatccgtgggcgctacgtaaatcagacactgcctcctcaatc

SEQ ID NO: 180960 - DNA, 147 bp, Homo sapiens
  chr16:74901699-74901846
  hypo
cttaacctcaccccatgtgtgtccgtgtccttgatttccttggcatgaggcaatgacatgccaagacacgcccgggaccacaacaccgcttcatttctggggttcattcccttttattgctgagtagcattccgcaggacagaggct

SEQ ID NO: 180961 - DNA, 336 bp, Homo sapiens
  chr16:74908779-74909115
  hypo
tgcccagcctgtttttttttgttttttttacaccagaactccttcttctgagccactgcacccagctgctgagtactgtattttctcaggggctccgcatggaaacccagtgccctacagcagggggcagctgcgtctgatgcctcttcccaccccgacggctggcagggcctggcacgcaggaggtgttgaacaggtatcagctgaaagaactgaatgactcagcagtaacacttcagcagagggcagactggctttaccaacgcctgctactgcccactcgccactggcccaagtcaggacaccgggatgccgctccaccgccgggcggggact

SEQ ID NO: 180962 - DNA, 30 bp, Homo sapiens; identical to SEQ ID NO: 29436
  chr16:74911730-74911760
  hypo

SEQ ID NO: 180963 - DNA, 104 bp, Homo sapiens; identical to SEQ ID NO: 90871
  chr16:74917221-74917325
  hypo

SEQ ID NO: 180964 - DNA, 128 bp, Homo sapiens; identical to SEQ ID NO: 29437
  chr16:74984547-74984675
  hypo

SEQ ID NO: 180965 - DNA, 41 bp, Homo sapiens; identical to SEQ ID NO: 10795
  chr16:75018962-75019003
  hypo

SEQ ID NO: 180966 - DNA, 30 bp, Homo sapiens; identical to SEQ ID NO: 53275
  chr16:75019006-75019036
  hypo

SEQ ID NO: 180967 - DNA, 149 bp, Homo sapiens; identical to SEQ ID NO: 90875
  chr16:75019625-75019774
  hypo

SEQ ID NO: 180968 - DNA, 27 bp, Homo sapiens
  chr16:75022279-75022306
  hypo
tacaaagaacaacgtatagccaatcag

SEQ ID NO: 180969 - DNA, 20 bp, Homo sapiens
  chr16:75027319-75027339
  hypo
cagagcgaaactccatctca

SEQ ID NO: 180970 - DNA, 364 bp, Homo sapiens; identical to SEQ ID NO: 127527
  chr16:75033798-75034162
  hypo

SEQ ID NO: 180971 - DNA, 17 bp, Homo sapiens
  chr16:75041238-75041255
  hypo
gacgatgccagacccca

SEQ ID NO: 180972 - DNA, 44 bp, Homo sapiens; identical to SEQ ID NO: 29441
  chr16:75057286-75057330
  hypo

SEQ ID NO: 180973 - DNA, 29 bp, Homo sapiens
  chr16:75065306-75065335
  hypo
ggagccaccgtgcccggccatgtccaaat

SEQ ID NO: 180974 - DNA, 33 bp, Homo sapiens; identical to SEQ ID NO: 90882
  chr16:75075661-75075694
  hypo

SEQ ID NO: 180975 - DNA, 45 bp, Homo sapiens
  chr16:75113036-75113081
  hypo
attcatggtccttctcgttcgtgctttctgtctggagagtctcta

SEQ ID NO: 180976 - DNA, 45 bp, Homo sapiens; identical to SEQ ID NO: 90883
  chr16:75113380-75113425
  hypo

SEQ ID NO: 180977 - DNA, 41 bp, Homo sapiens; identical to SEQ ID NO: 90884
  chr16:75113749-75113790
  hypo

SEQ ID NO: 180978 - DNA, 31 bp, Homo sapiens; identical to SEQ ID NO: 90885
  chr16:75122962-75122993
  hypo

SEQ ID NO: 180979 - DNA, 196 bp, Homo sapiens; identical to SEQ ID NO: 90886
  chr16:75127913-75128109
  hypo

SEQ ID NO: 180980 - DNA, 30 bp, Homo sapiens
  chr16:75129303-75129333
  hypo
tttgtccctgttcgccgtctccgcttggga

SEQ ID NO: 180981 - DNA, 380 bp, Homo sapiens; identical to SEQ ID NO: 90887
  chr16:75136325-75136705
  hypo

SEQ ID NO: 180982 - DNA, 31 bp, Homo sapiens; identical to SEQ ID NO: 90888
  chr16:75136946-75136977
  hypo

SEQ ID NO: 180983 - DNA, 298 bp, Homo sapiens; identical to SEQ ID NO: 90889
  chr16:75138820-75139118
  hypo

SEQ ID NO: 180984 - DNA, 30 bp, Homo sapiens; identical to SEQ ID NO: 90890
  chr16:75147485-75147515
  hypo

SEQ ID NO: 180985 - DNA, 805 bp, Homo sapiens
  chr16:75148496-75149301
  hypo
tgtcccgcatggtgccgtagcggaccgcgttggtccccgacgccccggtggccgccatgccacagagagaggcgtccgcgcctgggtctggagggcggcgtacagaaggcagcctcagggaccggaggtcctttccctcgggctgggggaggaaggtcccctgaaccccagacacagccctgctcccacggtgccctcagggtcccaggaaaggttcgcgagtcctacccacgggaaaccagaggccgctgtcccgcaggtgggcgttgagggctttgcgggtgacacctggctccaccaccacagagaagtcctcctggttcagctccaggattcggtccatatgcgtcaggttaacgcagacgccgccctggttggggcaggtgctaagaccactgcagacctgggtctctgacctggccacgtccccggaccacaccccgcgggtgtccccccagcagccagaccagacccccagaggcaggcagcccacgggcgggagcagacccaaggtgccgtgtgtggcgggggaggcagccacaggtgtgccaaggtgtgctgggaccatcctcgggccgggcgagggagccccactgtacctgcacagcacagacgccaccctcaagcccggtgccggtgccgaatgggatgatgggcacaccttggcgatagcacagggctgccagccggctgacctgctccacgttctggggccacaccacagcatcaggaggttcgcacctagaaccagaccctcagcgatttagcggggcgtgacaccctctggtcccgaggtgttgcaggg

SEQ ID NO: 180986 - DNA, 36 bp, Homo sapiens
  chr16:75171633-75171669
  hypo
gattacaggcatgagccaacacgcccggccccaaaa

SEQ ID NO: 180987 - DNA, 22 bp, Homo sapiens
  chr16:75183605-75183627
  hypo
gccaccgcgtccggccagacac

SEQ ID NO: 180988 - DNA, 221 bp, Homo sapiens
  chr16:75222814-75223035
  hypo
gtagccagttgtacccgtgacattttgatggcccatatgggaagtgctcgcggactgcttagggagtcctcccctcctctctccctttcttctccaactccagcctctcagtggacagcgcccaagcctggagacaactgaaggtccccagccaggtctactccctagtggaccagaaggtcccggtggagagatgcctgaccacccgaccaccgaccacc

SEQ ID NO: 180989 - DNA, 250 bp, Homo sapiens
  chr16:75226943-75227193
  hypo
attgcatacatatctcctttacgtcatctccggtcaatgcatacttgagtctattcctgaggaagacgatcagcggaagacattccctcagcttgtggggacctgtcgatggacgaggtgcaaatataccctttagtttgtcgagcatccaatgcttcggcactgcagcacgcttcaagtgctccttagggccccaggccatggtgaaaccctgcgacggaagatcagcgctcttttgaagtgccttgta

SEQ ID NO: 180990 - DNA, 96 bp, Homo sapiens
  chr16:75258688-75258784
  hypo
cacctccagccctggcgtgtacgcccgtgtcaccaagctcataccttgggtgcagaagatcctggctgccaactgagcccgcggctccctccgacc

SEQ ID NO: 180991 - DNA, 30 bp, Homo sapiens
  chr16:75263282-75263312
  hypo
ggcaccaggaccgacgcagagctggggtcc

SEQ ID NO: 180992 - DNA, 13 bp, Homo sapiens
  chr16:75263536-75263549
  hypo
tggccacgatgcc

SEQ ID NO: 180993 - DNA, 30 bp, Homo sapiens; identical to SEQ ID NO: 29448
  chr16:75269207-75269237
  hypo

SEQ ID NO: 180994 - DNA, 30 bp, Homo sapiens
  chr16:75269549-75269579
  hypo
gctgggggaggcaccgcatacacaccactg

SEQ ID NO: 180995 - DNA, 30 bp, Homo sapiens; identical to SEQ ID NO: 29449
  chr16:75295355-75295385
  hypo

SEQ ID NO: 180996 - DNA, 308 bp, Homo sapiens; identical to SEQ ID NO: 127535
  chr16:75299750-75300058
  hypo

SEQ ID NO: 180997 - DNA, 30 bp, Homo sapiens; identical to SEQ ID NO: 29451
  chr16:75300846-75300876
  hypo

SEQ ID NO: 180998 - DNA, 30 bp, Homo sapiens; identical to SEQ ID NO: 29452
  chr16:75328778-75328808
  hypo

SEQ ID NO: 180999 - DNA, 30 bp, Homo sapiens
  chr16:75371143-75371173
  hypo
agagggagcgaggcccggcacaaaggtgga

SEQ ID NO: 181000 - DNA, 26 bp, Homo sapiens
  chr16:75427934-75427960
  hypo
agagcgagactccacctcaaaaaaaa

SEQ ID NO: 181001 - DNA, 27 bp, Homo sapiens
  chr16:75452485-75452512
  hypo
cgtgagccaacgcgcccggctaaccct

SEQ ID NO: 181002 - DNA, 42 bp, Homo sapiens; identical to SEQ ID NO: 90901
  chr16:75458365-75458407
  hypo

SEQ ID NO: 181003 - DNA, 31 bp, Homo sapiens; identical to SEQ ID NO: 29453
  chr16:75464994-75465025
  hypo

SEQ ID NO: 181004 - DNA, 164 bp, Homo sapiens
  chr16:75469089-75469253
  hypo
cgtgagccaccgcgccgggcaccttcaaggttttgttaattttggataatgctacaatccattgctgcaaagaactcgaaaatgcacacgccaacataggagttctttttatgcccccaaacactaagtctctcatccaacccctcaatcggggcataataaaa

SEQ ID NO: 181005 - DNA, 45 bp, Homo sapiens; identical to SEQ ID NO: 90904
  chr16:75479779-75479824
  hypo

SEQ ID NO: 181006 - DNA, 77 bp, Homo sapiens; identical to SEQ ID NO: 29454
  chr16:75495228-75495305
  hypo

SEQ ID NO: 181007 - DNA, 30 bp, Homo sapiens
  chr16:75512601-75512631
  hypo
caccagatcaagggcgaggttgcgctgctc

SEQ ID NO: 181008 - DNA, 458 bp, Homo sapiens; identical to SEQ ID NO: 90906
  chr16:75513118-75513576
  hypo

SEQ ID NO: 181009 - DNA, 35 bp, Homo sapiens; identical to SEQ ID NO: 90907
  chr16:75527395-75527430
  hypo

SEQ ID NO: 181010 - DNA, 96 bp, Homo sapiens; identical to SEQ ID NO: 53290
  chr16:75529238-75529334
  hypo

SEQ ID NO: 181011 - DNA, 177 bp, Homo sapiens; identical to SEQ ID NO: 53291
  chr16:75529726-75529903
  hypo

SEQ ID NO: 181012 - DNA, 36 bp, Homo sapiens; identical to SEQ ID NO: 29457
  chr16:75549846-75549882
  hypo

SEQ ID NO: 181013 - DNA, 19 bp, Homo sapiens
  chr16:75551610-75551629
  hypo
acgaacattctcaggccgg

SEQ ID NO: 181014 - DNA, 405 bp, Homo sapiens; identical to SEQ ID NO: 90912
  chr16:75563099-75563504
  hypo

SEQ ID NO: 181015 - DNA, 30 bp, Homo sapiens; identical to SEQ ID NO: 90913
  chr16:75563886-75563916
  hypo

SEQ ID NO: 181016 - DNA, 139 bp, Homo sapiens; identical to SEQ ID NO: 29458
  chr16:75606234-75606373
  hypo

SEQ ID NO: 181017 - DNA, 89 bp, Homo sapiens; identical to SEQ ID NO: 29459
  chr16:75622684-75622773
  hypo

SEQ ID NO: 181018 - DNA, 21 bp, Homo sapiens
  chr16:75658339-75658360
  hypo
gagtctcaatattttaaaaaa

SEQ ID NO: 181019 - DNA, 30 bp, Homo sapiens
  chr16:75729714-75729744
  hypo
actttcagtgccaggcgtttaccatccccc

SEQ ID NO: 181020 - DNA, 31 bp, Homo sapiens; identical to SEQ ID NO: 10808
  chr16:76507679-76507710
  hypo

SEQ ID NO: 181021 - DNA, 314 bp, Homo sapiens; identical to SEQ ID NO: 29462
  chr16:77227370-77227684
  hypo

SEQ ID NO: 181022 - DNA, 581 bp, Homo sapiens; identical to SEQ ID NO: 29463
  chr16:77228258-77228839
  hypo

SEQ ID NO: 181023 - DNA, 44 bp, Homo sapiens; identical to SEQ ID NO: 29464
  chr16:77229452-77229496
  hypo

SEQ ID NO: 181024 - DNA, 371 bp, Homo sapiens; identical to SEQ ID NO: 90921
  chr16:77232997-77233368
  hypo

SEQ ID NO: 181025 - DNA, 1029 bp, Homo sapiens; identical to SEQ ID NO: 53298
  chr16:77245983-77247012
  hypo

SEQ ID NO: 181026 - DNA, 413 bp, Homo sapiens; identical to SEQ ID NO: 10810
  chr16:77247376-77247789
  hypo

SEQ ID NO: 181027 - DNA, 30 bp, Homo sapiens; identical to SEQ ID NO: 29468
  chr16:77248178-77248208
  hypo

SEQ ID NO: 181028 - DNA, 30 bp, Homo sapiens
  chr16:77353858-77353888
  hypo
cgatgctccagcccccggtgaggtaatact

SEQ ID NO: 181029 - DNA, 202 bp, Homo sapiens; identical to SEQ ID NO: 10811
  chr16:77468255-77468457
  hypo

SEQ ID NO: 181030 - DNA, 187 bp, Homo sapiens; identical to SEQ ID NO: 127556
  chr16:77469028-77469215
  hypo

SEQ ID NO: 181031 - DNA, 30 bp, Homo sapiens; identical to SEQ ID NO: 53302
  chr16:77547051-77547081
  hypo

SEQ ID NO: 181032 - DNA, 30 bp, Homo sapiens; identical to SEQ ID NO: 53303
  chr16:77579671-77579701
  hypo

SEQ ID NO: 181033 - DNA, 30 bp, Homo sapiens; identical to SEQ ID NO: 53304
  chr16:77586643-77586673
  hypo

SEQ ID NO: 181034 - DNA, 30 bp, Homo sapiens; identical to SEQ ID NO: 53305
  chr16:77587954-77587984
  hypo

SEQ ID NO: 181035 - DNA, 30 bp, Homo sapiens; identical to SEQ ID NO: 53306
  chr16:77602331-77602361
  hypo

SEQ ID NO: 181036 - DNA, 30 bp, Homo sapiens; identical to SEQ ID NO: 53307
  chr16:77616137-77616167
  hypo

SEQ ID NO: 181037 - DNA, 30 bp, Homo sapiens; identical to SEQ ID NO: 53308
  chr16:77648978-77649008
  hypo

SEQ ID NO: 181038 - DNA, 30 bp, Homo sapiens; identical to SEQ ID NO: 53309
  chr16:77671843-77671873
  hypo

SEQ ID NO: 181039 - DNA, 30 bp, Homo sapiens; identical to SEQ ID NO: 53310
  chr16:77724574-77724604
  hypo

SEQ ID NO: 181040 - DNA, 256 bp, Homo sapiens; identical to SEQ ID NO: 53311
  chr16:77747178-77747434
  hypo

SEQ ID NO: 181041 - DNA, 30 bp, Homo sapiens; identical to SEQ ID NO: 29471
  chr16:77752391-77752421
  hypo

SEQ ID NO: 181042 - DNA, 292 bp, Homo sapiens
  chr16:77752652-77752944
  hypo
cacagtgtgtaaccaccggatattataaatattagagcgatatttctttaatatcacagcatgtaagccctgtgtgtaaacactggatattataaatatcacagcgatatttcgctgatatcacagtgtgtaaccactgggtattgtaaatatcacagtgatgtttcaccaatatcacaacgtgttactagtggatattggaaatatcacagcgatgttttgccaatatcacagtgtgtaaccactggaaattgtaaatatcacagtgatatttcgccgatatcacagtgtg

SEQ ID NO: 181043 - DNA, 768 bp, Homo sapiens; identical to SEQ ID NO: 90939
  chr16:77753303-77754071
  hypo

SEQ ID NO: 181044 - DNA, 30 bp, Homo sapiens
  chr16:77754361-77754391
  hypo
atttcattgatgtcacggtgtgtaaacact

SEQ ID NO: 181045 - DNA, 31 bp, Homo sapiens; identical to SEQ ID NO: 29474
  chr16:77762012-77762043
  hypo

SEQ ID NO: 181046 - DNA, 30 bp, Homo sapiens; identical to SEQ ID NO: 53313
  chr16:77762427-77762457
  hypo

SEQ ID NO: 181047 - DNA, 30 bp, Homo sapiens; identical to SEQ ID NO: 53314
  chr16:77763011-77763041
  hypo

SEQ ID NO: 181048 - DNA, 1260 bp, Homo sapiens; identical to SEQ ID NO: 127570
  chr16:77822067-77823327
  hypo

SEQ ID NO: 181049 - DNA, 30 bp, Homo sapiens; identical to SEQ ID NO: 53316
  chr16:77823708-77823738
  hypo

SEQ ID NO: 181050 - DNA, 30 bp, Homo sapiens; identical to SEQ ID NO: 53317
  chr16:77899998-77900028
  hypo

SEQ ID NO: 181051 - DNA, 30 bp, Homo sapiens; identical to SEQ ID NO: 53318
  chr16:77927454-77927484
  hypo

SEQ ID NO: 181052 - DNA, 30 bp, Homo sapiens; identical to SEQ ID NO: 53319
  chr16:77962994-77963024
  hypo

SEQ ID NO: 181053 - DNA, 30 bp, Homo sapiens; identical to SEQ ID NO: 53320
  chr16:77971144-77971174
  hypo

SEQ ID NO: 181054 - DNA, 30 bp, Homo sapiens; identical to SEQ ID NO: 53322
  chr16:78105624-78105654
  hypo

SEQ ID NO: 181055 - DNA, 30 bp, Homo sapiens; identical to SEQ ID NO: 90950
  chr16:78130277-78130307
  hypo

SEQ ID NO: 181056 - DNA, 30 bp, Homo sapiens; identical to SEQ ID NO: 53323
  chr16:78136813-78136843
  hypo

SEQ ID NO: 181057 - DNA, 30 bp, Homo sapiens; identical to SEQ ID NO: 53324
  chr16:78139042-78139072
  hypo

SEQ ID NO: 181058 - DNA, 45 bp, Homo sapiens; identical to SEQ ID NO: 127581
  chr16:78139957-78140002
  hypo

SEQ ID NO: 181059 - DNA, 34 bp, Homo sapiens; identical to SEQ ID NO: 29476
  chr16:78159168-78159202
  hypo

SEQ ID NO: 181060 - DNA, 30 bp, Homo sapiens; identical to SEQ ID NO: 53326
  chr16:78162151-78162181
  hypo

SEQ ID NO: 181061 - DNA, 30 bp, Homo sapiens; identical to SEQ ID NO: 53327
  chr16:78190461-78190491
  hypo

SEQ ID NO: 181062 - DNA, 30 bp, Homo sapiens; identical to SEQ ID NO: 53328
  chr16:78211269-78211299
  hypo

SEQ ID NO: 181063 - DNA, 30 bp, Homo sapiens; identical to SEQ ID NO: 53329
  chr16:78224740-78224770
  hypo

SEQ ID NO: 181064 - DNA, 30 bp, Homo sapiens; identical to SEQ ID NO: 53330
  chr16:78232227-78232257
  hypo

SEQ ID NO: 181065 - DNA, 17 bp, Homo sapiens
  chr16:78244367-78244384
  hypo
cctgacacacacacgcg

SEQ ID NO: 181066 - DNA, 30 bp, Homo sapiens; identical to SEQ ID NO: 53332
  chr16:78279709-78279739
  hypo

SEQ ID NO: 181067 - DNA, 30 bp, Homo sapiens; identical to SEQ ID NO: 53333
  chr16:78305114-78305144
  hypo

SEQ ID NO: 181068 - DNA, 30 bp, Homo sapiens; identical to SEQ ID NO: 53334
  chr16:78315504-78315534
  hypo

SEQ ID NO: 181069 - DNA, 344 bp, Homo sapiens; identical to SEQ ID NO: 127591
  chr16:78322867-78323211
  hypo

SEQ ID NO: 181070 - DNA, 30 bp, Homo sapiens; identical to SEQ ID NO: 53336
  chr16:78353748-78353778
  hypo

SEQ ID NO: 181071 - DNA, 30 bp, Homo sapiens; identical to SEQ ID NO: 53337
  chr16:78389209-78389239
  hypo

SEQ ID NO: 181072 - DNA, 175 bp, Homo sapiens; identical to SEQ ID NO: 90967
  chr16:78409035-78409210
  hypo

SEQ ID NO: 181073 - DNA, 33 bp, Homo sapiens; identical to SEQ ID NO: 53338
  chr16:78425002-78425035
  hypo

SEQ ID NO: 181074 - DNA, 30 bp, Homo sapiens; identical to SEQ ID NO: 53339
  chr16:78426875-78426905
  hypo

SEQ ID NO: 181075 - DNA, 30 bp, Homo sapiens; identical to SEQ ID NO: 53340
  chr16:78427365-78427395
  hypo

SEQ ID NO: 181076 - DNA, 30 bp, Homo sapiens; identical to SEQ ID NO: 53341
  chr16:78440058-78440088
  hypo

SEQ ID NO: 181077 - DNA, 30 bp, Homo sapiens
  chr16:78468156-78468186
  hypo
aatggtgttccatgccgcagggtgggattg

SEQ ID NO: 181078 - DNA, 30 bp, Homo sapiens
  chr16:78468563-78468593
  hypo
tggcatcagagagttcgttttctccttctt

SEQ ID NO: 181079 - DNA, 30 bp, Homo sapiens; identical to SEQ ID NO: 53342
  chr16:78469105-78469135
  hypo

SEQ ID NO: 181080 - DNA, 30 bp, Homo sapiens; identical to SEQ ID NO: 53343
  chr16:78472794-78472824
  hypo

SEQ ID NO: 181081 - DNA, 30 bp, Homo sapiens; identical to SEQ ID NO: 53344
  chr16:78498424-78498454
  hypo

SEQ ID NO: 181082 - DNA, 207 bp, Homo sapiens
  chr16:78519524-78519731
  hypo
tgaaagagcactgcccgccgcgtgaaggacatctgctcacaagtgagcaattgtgcttctgatttggggcagcacctttgcttgaacgctggctccagatgaaagaacagattgccgcggagccgcttttccaaggatccctctccccagcatggggcttcatacattattgagagcaaacctactttccaccgccactcctggatg

SEQ ID NO: 181083 - DNA, 30 bp, Homo sapiens; identical to SEQ ID NO: 53345
  chr16:78536379-78536409
  hypo

SEQ ID NO: 181084 - DNA, 30 bp, Homo sapiens; identical to SEQ ID NO: 53346
  chr16:78553779-78553809
  hypo

SEQ ID NO: 181085 - DNA, 17 bp, Homo sapiens
  chr16:78562210-78562227
  hypo
tacatgggtattctaac

SEQ ID NO: 181086 - DNA, 31 bp, Homo sapiens; identical to SEQ ID NO: 53347
  chr16:78601896-78601927
  hypo

SEQ ID NO: 181087 - DNA, 30 bp, Homo sapiens; identical to SEQ ID NO: 53348
  chr16:78623286-78623316
  hypo

SEQ ID NO: 181088 - DNA, 30 bp, Homo sapiens; identical to SEQ ID NO: 53349
  chr16:78630606-78630636
  hypo

SEQ ID NO: 181089 - DNA, 30 bp, Homo sapiens; identical to SEQ ID NO: 53350
  chr16:78642781-78642811
  hypo

SEQ ID NO: 181090 - DNA, 30 bp, Homo sapiens; identical to SEQ ID NO: 53351
  chr16:78654270-78654300
  hypo

SEQ ID NO: 181091 - DNA, 30 bp, Homo sapiens; identical to SEQ ID NO: 53352
  chr16:78669362-78669392
  hypo

SEQ ID NO: 181092 - DNA, 30 bp, Homo sapiens; identical to SEQ ID NO: 53353
  chr16:78765279-78765309
  hypo

SEQ ID NO: 181093 - DNA, 30 bp, Homo sapiens; identical to SEQ ID NO: 53354
  chr16:78769948-78769978
  hypo

SEQ ID NO: 181094 - DNA, 30 bp, Homo sapiens; identical to SEQ ID NO: 53355
  chr16:78781892-78781922
  hypo

SEQ ID NO: 181095 - DNA, 30 bp, Homo sapiens; identical to SEQ ID NO: 53356
  chr16:78791482-78791512
  hypo

SEQ ID NO: 181096 - DNA, 30 bp, Homo sapiens; identical to SEQ ID NO: 53357
  chr16:78859167-78859197
  hypo

SEQ ID NO: 181097 - DNA, 30 bp, Homo sapiens
  chr16:78908295-78908325
  hypo
aaagctgtcaagtcccgctcccttggaatg

SEQ ID NO: 181098 - DNA, 30 bp, Homo sapiens; identical to SEQ ID NO: 53358
  chr16:78923314-78923344
  hypo

SEQ ID NO: 181099 - DNA, 30 bp, Homo sapiens; identical to SEQ ID NO: 53359
  chr16:78949111-78949141
  hypo

SEQ ID NO: 181100 - DNA, 30 bp, Homo sapiens; identical to SEQ ID NO: 53360
  chr16:78974715-78974745
  hypo

SEQ ID NO: 181101 - DNA, 45 bp, Homo sapiens
  chr16:79021596-79021641
  hypo
cgtgaattcatttcgcgctaatgagagttgcgatatgtcggccca

SEQ ID NO: 181102 - DNA, 30 bp, Homo sapiens
  chr16:79021961-79021991
  hypo
tggtgctgtgggtcacgcctgtaataccag

SEQ ID NO: 181103 - DNA, 30 bp, Homo sapiens
  chr16:79029347-79029377
  hypo
tttcttcacagtgccgattggtaaaaccaa

SEQ ID NO: 181104 - DNA, 30 bp, Homo sapiens; identical to SEQ ID NO: 10816
  chr16:79048507-79048537
  hypo

SEQ ID NO: 181105 - DNA, 31 bp, Homo sapiens; identical to SEQ ID NO: 90993
  chr16:79077924-79077955
  hypo

SEQ ID NO: 181106 - DNA, 30 bp, Homo sapiens; identical to SEQ ID NO: 53362
  chr16:79125383-79125413
  hypo

SEQ ID NO: 181107 - DNA, 30 bp, Homo sapiens; identical to SEQ ID NO: 53363
  chr16:79128792-79128822
  hypo

SEQ ID NO: 181108 - DNA, 5 bp, Homo sapiens
  chr16:79263217-79263222
  hypo
atggc

SEQ ID NO: 181109 - DNA, 30 bp, Homo sapiens
  chr16:79264378-79264408
  hypo
taagaccattgatttcgaagaatgtttcca

SEQ ID NO: 181110 - DNA, 30 bp, Homo sapiens
  chr16:79264805-79264835
  hypo
gggtagggctgcatacgctaatatttctct

SEQ ID NO: 181111 - DNA, 30 bp, Homo sapiens
  chr16:79424091-79424121
  hypo
actctccttgaaagccgggtttattttggc

SEQ ID NO: 181112 - DNA, 104 bp, Homo sapiens; identical to SEQ ID NO: 10822
  chr16:79636190-79636294
  hypo

SEQ ID NO: 181113 - DNA, 30 bp, Homo sapiens
  chr16:79692742-79692772
  hypo
ctggaaaacttgtcacgtcaagctcggagt

SEQ ID NO: 181114 - DNA, 407 bp, Homo sapiens; identical to SEQ ID NO: 127628
  chr16:79804150-79804557
  hypo

SEQ ID NO: 181115 - DNA, 257 bp, Homo sapiens; identical to SEQ ID NO: 127629
  chr16:79804596-79804853
  hypo

SEQ ID NO: 181116 - DNA, 30 bp, Homo sapiens; identical to SEQ ID NO: 53372
  chr16:80471689-80471719
  hypo

SEQ ID NO: 181117 - DNA, 527 bp, Homo sapiens; identical to SEQ ID NO: 91000
  chr16:80641601-80642128
  hypo

SEQ ID NO: 181118 - DNA, 30 bp, Homo sapiens
  chr16:80645866-80645896
  hypo
gatggaaatcgcaatcgtttccacatgggg

SEQ ID NO: 181119 - DNA, 397 bp, Homo sapiens
  chr16:80646290-80646687
  hypo
gaggaataattgagacgccatgcagagtgcatggtccatacactgacatcatcgccatcttctcaggccgggctactccatctggcactgaaggtgtgaaggacatgaggcagccaagccaatctgcaggctgacaacaccctcaggtttctagccccatgaagagcccctaaacccaaggcagaggaaggatcctgctgggacccgaatccaggtatcacaggaggcttaccagcgcgacgcccaggatctgggggaaggtgtaggaggagcagccagcaggcgtgaggcggatggtggcgtagggcgtctggaaccaggccttctcactggcccacacgatgtcacagaggggcaggatggaggcacccaggcccagggccggcccattgatggc

SEQ ID NO: 181120 - DNA, 30 bp, Homo sapiens; identical to SEQ ID NO: 53374
  chr16:80650789-80650819
  hypo

SEQ ID NO: 181121 - DNA, 82 bp, Homo sapiens; identical to SEQ ID NO: 91002
  chr16:80654696-80654778
  hypo

SEQ ID NO: 181122 - DNA, 159 bp, Homo sapiens
  chr16:80714338-80714497
  hypo
gctcctagttagggacgtttcacagagtaaaggctcgtgtgaatccatagaacactgatgctttggcctgtttagacgagtgctaagcagttcaccaaggcagaaccacagcaagggttagcaaacccaccagcttttctgtaccgatgaaactcgcgt

SEQ ID NO: 181123 - DNA, 29 bp, Homo sapiens
  chr16:80837324-80837353
  hypo
cgcagcgccccctttcgcccccagggagc

SEQ ID NO: 181124 - DNA, 1574 bp, Homo sapiens; identical to SEQ ID NO: 127634
  chr16:80837395-80838969
  hypo

SEQ ID NO: 181125 - DNA, 37 bp, Homo sapiens; identical to SEQ ID NO: 91004
  chr16:80931967-80932004
  hypo

SEQ ID NO: 181126 - DNA, 23 bp, Homo sapiens
  chr16:80964426-80964449
  hypo
aacaacggcctaaggccgggcgc

SEQ ID NO: 181127 - DNA, 36 bp, Homo sapiens
  chr16:81042209-81042245
  hypo
caagtgatacaccacgcccggcgcgctcccggcccc

SEQ ID NO: 181128 - DNA, 135 bp, Homo sapiens
  chr16:81087463-81087598
  hypo
ggagacctaaaagagcgagccgatgaccatggcaggtgtaaataagaccttgctccaaacgtggcgtcttcttactgcttctgcttgcagcgtttgactctctgctttctggtgatccgccgcttttccatgtcc

SEQ ID NO: 181129 - DNA, 31 bp, Homo sapiens; identical to SEQ ID NO: 91006
  chr16:81094193-81094224
  hypo

SEQ ID NO: 181130 - DNA, 30 bp, Homo sapiens
  chr16:81094987-81095017
  hypo
agcaaggtagcgaacgttgctggggtctgg

SEQ ID NO: 181131 - DNA, 30 bp, Homo sapiens
  chr16:81130988-81131018
  hypo
tgtttcatcggccagcggtgtgaccaaggc

SEQ ID NO: 181132 - DNA, 26 bp, Homo sapiens
  chr16:81177463-81177489
  hypo
ctcccggtcaagagtcactttttaaa

SEQ ID NO: 181133 - DNA, 116 bp, Homo sapiens
  chr16:81309504-81309620
  hypo
agggcttagcagtggcggggtgtggctgggaggggtgtgggcaggggtgggtcatctggaccttggccctgccctggtgctgcagggcgctgtgtgaggcccgaggttcgtgtgca

SEQ ID NO: 181134 - DNA, 199 bp, Homo sapiens; identical to SEQ ID NO: 91009
  chr16:81315518-81315717
  hypo

SEQ ID NO: 181135 - DNA, 30 bp, Homo sapiens
  chr16:81316425-81316455
  hypo
ttgtgtgacataggccgggtcccttctggc

SEQ ID NO: 181136 - DNA, 202 bp, Homo sapiens; identical to SEQ ID NO: 91010
  chr16:81323323-81323525
  hypo

SEQ ID NO: 181137 - DNA, 192 bp, Homo sapiens; identical to SEQ ID NO: 91011
  chr16:81335172-81335364
  hypo

SEQ ID NO: 181138 - DNA, 128 bp, Homo sapiens
  chr16:81361631-81361759
  hypo
cagttgctgcgtcatcgttttaatcgtctttgaactcttaaaattttaacatgcattttcaaaccttgtcttttaagagagaaattttattgactgctttactttcaaaatgacgcgaactagattta

SEQ ID NO: 181139 - DNA, 30 bp, Homo sapiens
  chr16:81453450-81453480
  hypo
aattcaggaggtccgcgtggggccaagatt

SEQ ID NO: 181140 - DNA, 42 bp, Homo sapiens
  chr16:81453687-81453729
  hypo
ttctcaccgttttggtcgaaggtgtgggcagggggctgggcg

SEQ ID NO: 181141 - DNA, 189 bp, Homo sapiens; identical to SEQ ID NO: 91013
  chr16:81492929-81493118
  hypo

SEQ ID NO: 181142 - DNA, 43 bp, Homo sapiens
  chr16:81493361-81493404
  hypo
ccctgcctttgatcccccactcgggtctgcagtgacagagcac

SEQ ID NO: 181143 - DNA, 251 bp, Homo sapiens; identical to SEQ ID NO: 91014
  chr16:81505616-81505867
  hypo

SEQ ID NO: 181144 - DNA, 30 bp, Homo sapiens
  chr16:81520080-81520110
  hypo
tgcacttcgggtcctcgctggagttcattc

SEQ ID NO: 181145 - DNA, 114 bp, Homo sapiens
  chr16:81520547-81520661
  hypo
aaggcgcacggcaggcgataaccgcactgggcgttgagcgccgtgagggaagcttctggagggagcgtgggactggggtgggggcagctggcgcagcttcgtttctctggacac

SEQ ID NO: 181146 - DNA, 255 bp, Homo sapiens; identical to SEQ ID NO: 91015
  chr16:81533314-81533569
  hypo

SEQ ID NO: 181147 - DNA, 755 bp, Homo sapiens
  chr16:81556853-81557608
  hypo
cttgcctttttccaccctatccgacgatgctcatgtgttggagatctctccgttgattcctgaatatctagttcatttcttttgattactgtggagtcactccctgtttgccatcttgttccatctgagtgcgaggcctgaatgggggacagactcaccccctgtcacacagaaggacgtggggcccacagtcacacggccgcaaggtgggtctggtaccctcccagcacattttggttggactccagaagcagggcttccctcacgatacctcaagcttacctgggccccggccaagcaactgactcatccagtctgacaaatccaaattctcgagtcactcagcccaaccgtggttgcctcatttagatcccagccaaacccccttcccgcgaaaagccatggtggcctagaacgaagtctggaaaagaaccaagaggacagcatcttttgtctggagagcaccgtgcctgttctccaaccacctcgtagcccctggtggagcctccctcctcccccaggaagaaggtgagctgagtcaccaccaggtaaccctgaacctcgctcagacacagcttcctttagctaggagcctggatgtaacacccagctcatcccttggctccctccaaacgtcaaggcgtcttgaactaaaagccagcgcctgcacaccggcagaactttgcagctcctggctcctgagttgtaggtgtttttgccaggtgtgcctgtacgtgtgtatgtgtgcccatggg

SEQ ID NO: 181148 - DNA, 884 bp, Homo sapiens; identical to SEQ ID NO: 91017
  chr16:81563918-81564802
  hypo

SEQ ID NO: 181149 - DNA, 641 bp, Homo sapiens; identical to SEQ ID NO: 91018
  chr16:81565568-81566209
  hypo

SEQ ID NO: 181150 - DNA, 159 bp, Homo sapiens; identical to SEQ ID NO: 29492
  chr16:81580486-81580645
  hypo

SEQ ID NO: 181151 - DNA, 32 bp, Homo sapiens; identical to SEQ ID NO: 91020
  chr16:81581958-81581990
  hypo

SEQ ID NO: 181152 - DNA, 31 bp, Homo sapiens; identical to SEQ ID NO: 29493
  chr16:81596519-81596550
  hypo

SEQ ID NO: 181153 - DNA, 30 bp, Homo sapiens; identical to SEQ ID NO: 91022
  chr16:81606080-81606110
  hypo

SEQ ID NO: 181154 - DNA, 263 bp, Homo sapiens
  chr16:81620080-81620343
  hypo
ttacctagtgtctcccgtactaggagaattaaatcccagtaagccctcacattcctcagtgatccggtgtaactccaagcactgtagcctgccacgcaaggctctctgtaatcgagatttaatcagtttttatgactcacctccttcaacttctctctctctgcccaataaactcctattcatccttcaaagcccaactcaaacatcgcatactctctgaagtattcgtcccactttccctcgggctcctctgcctccacacc

SEQ ID NO: 181155 - DNA, 419 bp, Homo sapiens; identical to SEQ ID NO: 91023
  chr16:81626930-81627349
  hypo

SEQ ID NO: 181156 - DNA, 227 bp, Homo sapiens; identical to SEQ ID NO: 91024
  chr16:81632814-81633041
  hypo

SEQ ID NO: 181157 - DNA, 30 bp, Homo sapiens
  chr16:81634398-81634428
  hypo
agcccattctcccagcgcaagccactttga

SEQ ID NO: 181158 - DNA, 30 bp, Homo sapiens
  chr16:81638833-81638863
  hypo
tgtgactttgaggcacgctgcataaagaga

SEQ ID NO: 181159 - DNA, 30 bp, Homo sapiens
  chr16:81652692-81652722
  hypo
tagacacgacagagccgagacttgaacctg

SEQ ID NO: 181160 - DNA, 47 bp, Homo sapiens
  chr16:81654529-81654576
  hypo
aggtaagtactgactcggttgcttgtttaaagcgactcaggcagtgg

SEQ ID NO: 181161 - DNA, 45 bp, Homo sapiens
  chr16:81655117-81655162
  hypo
gccccatggctcaggcgatggaaaccttgacgtcaggaccagggc

SEQ ID NO: 181162 - DNA, 109 bp, Homo sapiens
  chr16:81655706-81655815
  hypo
caccctcaccacaaccgcataaggttgatgattatcgttgttgccattttccatacgggaaagatgaggctcagactggagtccaagctcccatcgttaggaaggggct

SEQ ID NO: 181163 - DNA, 143 bp, Homo sapiens
  chr16:81684996-81685139
  hypo
accgctctctggcttcgacacagcgcccaagcaaaggtgagagcactcttgtcttcctcaccaggtggatgcggagggcagcgctggatttcccgggggagcattccaggtttagtccctacctggccggagtctaattcctg

SEQ ID NO: 181164 - DNA, 128 bp, Homo sapiens
  chr16:81688956-81689084
  hypo
gggagctgctaaggacgcaaaacagttccgagaaagaactgtccgtccaccagcaaagcaaagctggctgtccccaccctcccaggcctttgttgagttgcgtgtaaagtggccgcttagctcgagag

SEQ ID NO: 181165 - DNA, 541 bp, Homo sapiens; identical to SEQ ID NO: 91026
  chr16:81694539-81695080
  hypo

SEQ ID NO: 181166 - DNA, 165 bp, Homo sapiens
  chr16:81700316-81700481
  hypo
acacaccatgagcggcggcggcagaggagaactgctgggaggaccgaggaggatccgcctctcgtgtagaagaacagactgtattaaacagtgattatggccatgccaggcacaggaagacctgacctcatggaatcctaacaacacaggcggtgggcgagagag

SEQ ID NO: 181167 - DNA, 129 bp, Homo sapiens
  chr16:81700924-81701053
  hypo
taattcgccaaactgcgttctgaagaatgaccatgtatctctgtgcccccacgccactcggagtgttcttgtggcaaaggaggcgagaagacacggctgtggtccccagtggaccgtcaagtaacctaa

SEQ ID NO: 181168 - DNA, 401 bp, Homo sapiens
  chr16:81703539-81703940
  hypo
ttcagagtggaagcgcgggtgtcgcagtgctattctttgaagtagacgccacctgtgctttccagagggttggtgtctccccattgccttccacatcaacagctccaggcagagctcggtcccgcccttctttctggtgtcctggctgccctgggctcctgccctgcctagcaccgtcccgactcctgtcctctgctgtctccacaggactttgggaagtgcccgcgactgaggctgtttactcaggagtacatccttgccttgaacgagctcaacgcggggatggaagtggtgaagaagttcattcagaggtgggtctccggcgcgacgtccctctgtggcctaggagccactttcctctcggatcctgtttactcagatatccacggggggctgtcgtg

SEQ ID NO: 181169 - DNA, 30 bp, Homo sapiens
  chr16:81707238-81707268
  hypo
tgagagttgctccgccgaggctggcggtgc

SEQ ID NO: 181170 - DNA, 30 bp, Homo sapiens
  chr16:81716507-81716537
  hypo
atcaccgcatgaggcgcaggaggggtgagg

SEQ ID NO: 181171 - DNA, 30 bp, Homo sapiens; identical to SEQ ID NO: 91028
  chr16:81726238-81726268
  hypo

SEQ ID NO: 181172 - DNA, 31 bp, Homo sapiens; identical to SEQ ID NO: 29497
  chr16:81730091-81730122
  hypo

SEQ ID NO: 181173 - DNA, 454 bp, Homo sapiens
  chr16:81737254-81737708
  hypo
ggccttggaacaccccgctggtgcctcagggtgtgagtcacagcactggaggctttctcctccgcctggcagctgtcgtccatgggatgcgtggcagcccctccctctctggccacccccttggcccatcccaccgagctgtgcccccatctcagctcctgggatttaccgccccccaggaacagctctctgtagggcgaggggagaggaggaggataggggataggagggctcagggtctcgggaactcccagcagcaccctcaggcctctcccccgtctgcccgcaggacgctgacttggctcgtttgctgagctccggctccttcggaaacctggagaacctcagtttggccttcaccaatgtaaccagtgcctgcgccgagcacctcatcaaactgccttcgctcaagcagctgaacctgtggtccactcaggtacgtcctcccgccctg

SEQ ID NO: 181174 - DNA, 360 bp, Homo sapiens
  chr16:81741575-81741935
  hypo
ctcctgccgccagggcgtgctcactggggcatcctccagatgcttctggagcctctgctgtgtaccaggcccatgtcagggacagggacaccgaggtgtggctgccacagtccccttccgggggatagtccctcctggcaggcacaggcaagctcagcaaaccaaggcgggcagagggcctggtggggccaggagggacagtcggtagagagcgaggtccaagagaggacgtatgggacacagaaggtggcaggggcacagccagcagatcacccatcccagcgtttagacctcagccctcagggtggcgtctgcagaccagcaccctcggcaccactcgggggccaacagaaatgcagg

SEQ ID NO: 181175 - DNA, 30 bp, Homo sapiens
  chr16:81743866-81743896
  hypo
cacatcactgcacccgtcctgtgtcctcac

SEQ ID NO: 181176 - DNA, 60 bp, Homo sapiens
  chr16:81765481-81765541
  hypo
ggtcagtgccgaagccgttgtgatgaagcctgcgttagtgagacccggcctgcacaggag

SEQ ID NO: 181177 - DNA, 97 bp, Homo sapiens; identical to SEQ ID NO: 127649
  chr16:81813401-81813498
  hypo

SEQ ID NO: 181178 - DNA, 378 bp, Homo sapiens
  chr16:81924957-81925335
  hypo
gcctgttgatttcccgcatcagagctgttcttcccccctggtgggcgcagaccagaaacaagcagacaccatcctgcccgtcaacgtgatgattcggtcttcgtgtttgactcttttagttcctcacgtacctgttttcacgagaaaacagcatctgggatgagaagtatgacgcggtggacatgcaggacatgaacaaccccctgtctcattactggatctcctcgtcacataacacgtgagtttcagatgagcctgtgatgggttgggcagcacagagcacgtgagggttgaggcaggggtccgatacgccgctccggtgagccctgttgtgaagcaggtggagggtgtagcaccgcattccttggactaaaatac

SEQ ID NO: 181179 - DNA, 30 bp, Homo sapiens; identical to SEQ ID NO: 91032
  chr16:81927331-81927361
  hypo

SEQ ID NO: 181180 - DNA, 198 bp, Homo sapiens
  chr16:81942076-81942274
  hypo
gaagaggacgagtgccgagaagttgctgcaggaatactgcatggagacggggggcaaggatggcaccttcctggttcgggagagcgagaccttccccaatgactacaccctgtccttctggtaatgcccccgacccagggaacgcctaccttcttctccatgccaaccgatgaggcagggtggcgagtggttctagct

SEQ ID NO: 181181 - DNA, 174 bp, Homo sapiens; identical to SEQ ID NO: 91033
  chr16:81958724-81958898
  hypo

SEQ ID NO: 181182 - DNA, 30 bp, Homo sapiens
  chr16:81960018-81960048
  hypo
cttagaggtgctcaccgtctggtggggtcc

SEQ ID NO: 181183 - DNA, 30 bp, Homo sapiens; identical to SEQ ID NO: 29498
  chr16:81970155-81970185
  hypo

SEQ ID NO: 181184 - DNA, 31 bp, Homo sapiens; identical to SEQ ID NO: 29499
  chr16:82054048-82054079
  hypo

SEQ ID NO: 181185 - DNA, 208 bp, Homo sapiens; identical to SEQ ID NO: 29500
  chr16:82172389-82172597
  hypo

SEQ ID NO: 181186 - DNA, 30 bp, Homo sapiens
  chr16:82949902-82949932
  hypo
gggtgccgtagctcacgcctgtaatcccag

SEQ ID NO: 181187 - DNA, 24 bp, Homo sapiens
  chr16:83248976-83249000
  hypo
cccggcccacatagtttattttta

SEQ ID NO: 181188 - DNA, 30 bp, Homo sapiens
  chr16:83292324-83292354
  hypo
gggtgtttgtatgtgcgcgttgtggtgtca

SEQ ID NO: 181189 - DNA, 30 bp, Homo sapiens; identical to SEQ ID NO: 29501
  chr16:83541955-83541985
  hypo

SEQ ID NO: 181190 - DNA, 30 bp, Homo sapiens
  chr16:83654624-83654654
  hypo
ttatatgcacgccctcgagccctcctcctg

SEQ ID NO: 181191 - DNA, 30 bp, Homo sapiens; identical to SEQ ID NO: 91038
  chr16:83749996-83750026
  hypo

SEQ ID NO: 181192 - DNA, 30 bp, Homo sapiens; identical to SEQ ID NO: 91039
  chr16:83842874-83842904
  hypo

SEQ ID NO: 181193 - DNA, 45 bp, Homo sapiens; identical to SEQ ID NO: 91040
  chr16:83862927-83862972
  hypo

SEQ ID NO: 181194 - DNA, 454 bp, Homo sapiens; identical to SEQ ID NO: 29502
  chr16:83863589-83864043
  hypo

SEQ ID NO: 181195 - DNA, 218 bp, Homo sapiens
  chr16:83934481-83934699
  hypo
tcctgaaattcagagcgaaaagctcttgctgatcacccaccctaatccagggttatttgcactacgctttatatcactgtcttaccgttaatcagatgtttattagaaactttcttttttggctacttagatgcataaaattgggcataattaagtatgggattaatgtcaagagtgacaacagtggccatgatttgattccccgtgatagctggtta

SEQ ID NO: 181196 - DNA, 30 bp, Homo sapiens
  chr16:83940991-83941021
  hypo
ctcgtcccaagaccccgtgatcagagttgt

SEQ ID NO: 181197 - DNA, 30 bp, Homo sapiens; identical to SEQ ID NO: 29503
  chr16:83941416-83941446
  hypo

SEQ ID NO: 181198 - DNA, 151 bp, Homo sapiens; identical to SEQ ID NO: 29504
  chr16:83941758-83941909
  hypo

SEQ ID NO: 181199 - DNA, 384 bp, Homo sapiens
  chr16:83945609-83945993
  hypo
gacccccaggcacgcggtggagtcgcctcctccagagagttttcaaaacagagcagcttttaggctctgtagcctgaaccccagctggggagccgaggtctcttccagctccttcagtgctctgagaattgtcttctcgtcccagcaacaggcttgcctcgtgggctgcagagcggccaggccacccttagaaccatcgttggtgttttccaggcaatcgtgaaggaacatcctccatcagaaacagaagagaagaacaaaatcactgctgcgatcttttattccatcagcttgacccagcagggactccaaggggtggagctgggaacattcctcataaagcgagtcgtcaaggagttgcaggtaagcgacacgcagggagcc

SEQ ID NO: 181200 - DNA, 30 bp, Homo sapiens; identical to SEQ ID NO: 91046
  chr16:83947898-83947928
  hypo

SEQ ID NO: 181201 - DNA, 30 bp, Homo sapiens; identical to SEQ ID NO: 91047
  chr16:83948803-83948833
  hypo

SEQ ID NO: 181202 - DNA, 469 bp, Homo sapiens
  chr16:83957598-83958067
  hypo
gcttctctcaaacccgggcatgcacagtgctggccgtatcggtccgagccctcggctgccagggagagaagctgagctcccaccaaagcataaaatccaggccagcgaggggcagccagaccacgggaagacaggaggaacccggacctggctctcgtgcaggaagcaggcagtgcacagctccgccgccacagagacagcctcctctcatgaccccagactcagcccgggccgtggtgggaacgatggttggcccggtttggagatgggggatctggccctgtggtgagtgcacccagagcaggtgtctctccggagcagttgagtagaacagctggcgtcacctcttcatgttgacgaggggagatgagtggcccaggcagttcctagagcgggggagatggagtgggccgtatcccacccagcaggagcgcttgcttctgaagctcccgtgcgtctgtgacagagg

SEQ ID NO: 181203 - DNA, 30 bp, Homo sapiens
  chr16:83966630-83966660
  hypo
gagtgctccagaaacggtccccacgctcca

SEQ ID NO: 181204 - DNA, 419 bp, Homo sapiens
  chr16:83968814-83969233
  hypo
agcgggagggagttccggtttcatgcagggagcgctggcctggctgagaagacgctggagcacagacctgaattcactgaggcagcgtcgtgtgggcgtctgagggaacagtgttccaggcacagggaacagccagtacaaaggccctggggtaagagtcaatcaggagcagggaggagcccagggagatggagacggggacaagggacccagctcagcggtgacttgtcgatatccggcgtggtcagcagagggctttgttctggtgtgggtgtcccggccgctgtgtggagggtgtgttgggggcaccgttcagctgggaggctttgcagcaacccagggtcacagggaggggcccaggggtcagaatccaaatctatttgcaggtggagctggtgggttcgcgaagggactggggt

SEQ ID NO: 181205 - DNA, 143 bp, Homo sapiens; identical to SEQ ID NO: 91050
  chr16:83974848-83974991
  hypo

SEQ ID NO: 181206 - DNA, 30 bp, Homo sapiens; identical to SEQ ID NO: 91051
  chr16:83999168-83999198
  hypo

SEQ ID NO: 181207 - DNA, 42 bp, Homo sapiens; identical to SEQ ID NO: 29506
  chr16:83999490-83999532
  hypo

SEQ ID NO: 181208 - DNA, 40 bp, Homo sapiens; identical to SEQ ID NO: 91053
  chr16:84004406-84004446
  hypo

SEQ ID NO: 181209 - DNA, 181 bp, Homo sapiens; identical to SEQ ID NO: 91054
  chr16:84017888-84018069
  hypo

SEQ ID NO: 181210 - DNA, 31 bp, Homo sapiens; identical to SEQ ID NO: 91055
  chr16:84031862-84031893
  hypo

SEQ ID NO: 181211 - DNA, 30 bp, Homo sapiens
  chr16:84036821-84036851
  hypo
ggttggcccagaccacgcagtgtggctcaa

SEQ ID NO: 181212 - DNA, 31 bp, Homo sapiens; identical to SEQ ID NO: 29508
  chr16:84061605-84061636
  hypo

SEQ ID NO: 181213 - DNA, 197 bp, Homo sapiens
  chr16:84074761-84074958
  hypo
gaagagcgcggcgtccgcgcttccccaaaagggaattctggctttgcacccggcaggcaggagagcggaacatccgacaccaggcaaggccggcccggctctgtgtggggagtgtgggagtgtcacaccagttttaggctcaatctgcacacaggagtcgagctttgtttttgtgtgtttaagacagagtctcactc

SEQ ID NO: 181214 - DNA, 30 bp, Homo sapiens
  chr16:84075444-84075474
  hypo
tagaaaataaaaccccgaagctatagctta

SEQ ID NO: 181215 - DNA, 153 bp, Homo sapiens; identical to SEQ ID NO: 91057
  chr16:84085874-84086027
  hypo

SEQ ID NO: 181216 - DNA, 30 bp, Homo sapiens
  chr16:84089650-84089680
  hypo
ggcctcacttgagggcgattcgatcgaaag

SEQ ID NO: 181217 - DNA, 30 bp, Homo sapiens; identical to SEQ ID NO: 29509
  chr16:84093195-84093225
  hypo

SEQ ID NO: 181218 - DNA, 354 bp, Homo sapiens
  chr16:84129121-84129475
  hypo
catgtctggactttccgcgccttccctgggtaatagcacacacctgtatatcccataagcaccttccctgggtaatagcacacacctgtatatcccatctgccagagcacatctgcctgcagtgtctgggcaacctggcgcgggatggctctcagcagccgtctgctcgaatgccttcccgtagcatgccagaagccagagcccagggagaggctggctcttcgcaggggacgtgatgattgccacttctggctccaccgggtttcattgcagggtactgtggggtcagctacaggcaagggagagaaagatcagaacagaagagcaaaacgaactacacgatacccgccaggc

SEQ ID NO: 181219 - DNA, 620 bp, Homo sapiens; identical to SEQ ID NO: 91060
  chr16:84132211-84132831
  hypo

SEQ ID NO: 181220 - DNA, 20 bp, Homo sapiens
  chr16:84133094-84133114
  hypo
aatgatctatatggggctgg

SEQ ID NO: 181221 - DNA, 237 bp, Homo sapiens
  chr16:84153000-84153237
  hypo
ccaaggaggtgttctcgggcaagatcgcacctgagtcactgctgctcaatccgcacccagaggagacgtccctggagacgtctccagcctctcgctatactcactgcagcctcgcccaccagcacatctcaggtgtcagtggctttttcaaggacaacttcatgctcctggtgctggagctctgccacctgagacctctcatggagttgcacacggggagagcgctaagcctgaggg

SEQ ID NO: 181222 - DNA, 30 bp, Homo sapiens
  chr16:84158096-84158126
  hypo
tgttttgcaaatgacgaatcaacagtatgc

SEQ ID NO: 181223 - DNA, 31 bp, Homo sapiens; identical to SEQ ID NO: 29511
  chr16:84163868-84163899
  hypo

SEQ ID NO: 181224 - DNA, 124 bp, Homo sapiens
  chr16:84170875-84170999
  hypo
agaaaggctcggcaccgtcaagggtctggcctactcgggaaacattaggaagtcccccgcatgcacagcacaggctgtgctgtcctgtgtgacgccccatgtgtgcaggcgcacaggcgtgaag

SEQ ID NO: 181225 - DNA, 157 bp, Homo sapiens; identical to SEQ ID NO: 91064
  chr16:84191395-84191552
  hypo

SEQ ID NO: 181226 - DNA, 30 bp, Homo sapiens; identical to SEQ ID NO: 29512
  chr16:84213818-84213848
  hypo

SEQ ID NO: 181227 - DNA, 209 bp, Homo sapiens
  chr16:84224886-84225095
  hypo
ccgcctggctgcatcgttgcagatcagcccccagccccgcccctggcgaccgctacccgcccaggcccaaagtgcctgggggcccgcgcccgcgcccgcgacgtatcgcgcggagggcgggtggccccaggtctcggtgttgagggacagtgggcctggggcaggggccggagtcggggaactgggggcagcccgggcgtgggaaaact

SEQ ID NO: 181228 - DNA, 31 bp, Homo sapiens; identical to SEQ ID NO: 29513
  chr16:84229845-84229876
  hypo

SEQ ID NO: 181229 - DNA, 151 bp, Homo sapiens
  chr16:84270370-84270521
  hypo
tgacacacaggctgacggctgtggtggccacgaagaggatggagaggcaagcgaagaccttcccgggcagcccggactgcgggttttccaccatctcgcgcagccggttcatgcacaggccccagcgcgaggagtgcgaggcggggcggcg

SEQ ID NO: 181230 - DNA, 195 bp, Homo sapiens; identical to SEQ ID NO: 91069
  chr16:84296329-84296524
  hypo

SEQ ID NO: 181231 - DNA, 30 bp, Homo sapiens
  chr16:84343370-84343400
  hypo
tccttggtctgtagacgccatctctgcctc

SEQ ID NO: 181232 - DNA, 196 bp, Homo sapiens
  chr16:84343756-84343952
  hypo
tttctattaagacaccgagaaagagtgacaagggagggtgggtgtgggacatagaagcgggggtggtgtggccctaaccctggcctgggagggctggtgtcaccgaagcacatcccagccttgagcgctgatttgagtctcggggaatggtccctctggaagacctgaaggaacgggcattcggcagaggatcagc

SEQ ID NO: 181233 - DNA, 19 bp, Homo sapiens
  chr16:84345761-84345780
  hypo
actccgtctcaaaaacaaa

SEQ ID NO: 181234 - DNA, 30 bp, Homo sapiens; identical to SEQ ID NO: 91070
  chr16:84352836-84352866
  hypo

SEQ ID NO: 181235 - DNA, 114 bp, Homo sapiens; identical to SEQ ID NO: 91071
  chr16:84423861-84423975
  hypo

SEQ ID NO: 181236 - DNA, 30 bp, Homo sapiens
  chr16:84482949-84482979
  hypo
cagtgaagccagcgccgagcacgtgtcccc

SEQ ID NO: 181237 - DNA, 413 bp, Homo sapiens
  chr16:84483331-84483744
  hypo
ggagacaatctggcacgtgggtggcagctgcttttgtcatggttgatacgaccaagccattcagtagctccctgttcttgtcacatcacgcctctgctgacgaaatggctcacttaagagtggacacgttagtaagtaaacatcccacgtggcactggcctctaaatctgcacctggcacttgggccccacttgtgtgctgggcaccaggttaagtgcctgtgtgaggccacgccctgaatccccaccgggcagaggagccggcccaggtgacacagccctgcctagtgcagccagcgccttcgcccggatgtctgctgcggagcgtaatgacgcgttccagggacttgctccaggccttgcgggagagcgtaatgagaacgggtcagtggcggaggagcagtgagacctttt

SEQ ID NO: 181238 - DNA, 31 bp, Homo sapiens; identical to SEQ ID NO: 91073
  chr16:84484209-84484240
  hypo

SEQ ID NO: 181239 - DNA, 30 bp, Homo sapiens; identical to SEQ ID NO: 29516
  chr16:84485584-84485614
  hypo

SEQ ID NO: 181240 - DNA, 30 bp, Homo sapiens
  chr16:84492383-84492413
  hypo
atcgcggagatgcacggcgcacttcgggag

SEQ ID NO: 181241 - DNA, 134 bp, Homo sapiens
  chr16:84496271-84496405
  hypo
ctttctctgaagctgcggttatggcaggcatggggcaaggggagggagccagggacaagtcatcgaccccacccttttccccagtgtgctgagagccaaccccaacccggaatagaggacgagggaggccagtg

SEQ ID NO: 181242 - DNA, 30 bp, Homo sapiens
  chr16:84534226-84534256
  hypo
ttgggtgctcacccacgccccatctgatct

SEQ ID NO: 181243 - DNA, 26 bp, Homo sapiens
  chr16:84534689-84534715
  hypo
gactcgtctcaaaaaaaaaaagaaaa

SEQ ID NO: 181244 - DNA, 274 bp, Homo sapiens
  chr16:84535206-84535480
  hypo
caggaaaggcttggacgcagagccaggctggcaacgccactttttcaagcaggagagaggaggttgcatgggaggccccagtaggaaccccagggctggtgccagtgaggtgggaaggtgggcagcccctaagaacacagcgctgtccacagcactgccattcttagtacctgcagagtgctggtgaagggacacgtctcagaacggctcaaggacagcccgtctcctttgagagccccgtgccaggcaagataaagaaatggcaatggtgtgg

SEQ ID NO: 181245 - DNA, 213 bp, Homo sapiens
  chr16:84535779-84535992
  hypo
ctggtgctgacagcgcacatcaaggttgcttgtaccagtggagctcgactggagcagtttcgtcccccaggggcatttggcaatgactggaaaagtgtgtggttgccacaactgggggaggggagtgccgttggcatctagcaggcagaggccagggatactgctaaaaatcctacagtgcacaggatggccttacgacgaggaagtgtccgt

SEQ ID NO: 181246 - DNA, 256 bp, Homo sapiens
  chr16:84537367-84537623
  hypo
ggggtggacagggaccgattgtctgcaggatggcccccaaggttcccactagtatcctaggaatggcttagtcacctcctgctcagagcttctccaacaggctgttacatggctgcttcccaccctggctgccaagctccaactctctactccaagggccccgcatccctagagccacacaagggtccctccgtacccccacaagctggggagattccaactgcctcatctggacaggcttcgaagtcctgtctgt

SEQ ID NO: 181247 - DNA, 30 bp, Homo sapiens
  chr16:84548002-84548032
  hypo
tcctctctccccacgcgcacggcccagctc

SEQ ID NO: 181248 - DNA, 30 bp, Homo sapiens
  chr16:84552873-84552903
  hypo
cgcggatgcatgttccgagctagggaatct

SEQ ID NO: 181249 - DNA, 33 bp, Homo sapiens
  chr16:84553145-84553178
  hypo
tctcccctgtccgtacgccgcagtaaaacctgt

SEQ ID NO: 181250 - DNA, 170 bp, Homo sapiens; identical to SEQ ID NO: 91077
  chr16:84593078-84593248
  hypo

SEQ ID NO: 181251 - DNA, 105 bp, Homo sapiens; identical to SEQ ID NO: 91078
  chr16:84602923-84603028
  hypo

SEQ ID NO: 181252 - DNA, 30 bp, Homo sapiens
  chr16:84604871-84604901
  hypo
acgccagtgcaaagccgagcagagagaagg

SEQ ID NO: 181253 - DNA, 30 bp, Homo sapiens
  chr16:84605316-84605346
  hypo
ggcccattgcctggacgtcacgtggacaca

SEQ ID NO: 181254 - DNA, 389 bp, Homo sapiens
  chr16:84607792-84608181
  hypo
aacccagagaggggacgcagttcatcccaggggacacagcaacttcccggcagggccctggggatgcgttcctggtgccagccccactttctccccacatcccgcctccaggggctgctctagactgccaagccctcgaggcagctgccacaacctgccagagactgcacagcaacatgtgtcagtctgggggcaccgtcacctgtggctgaagaaagctctttgttttgtctgggaactcggtgtcgctctctcatagctgccagacgggggacttctcttttcttgccaaagcaggattttcttccaagggcctcatccgacgaagtctcactccaagcggctgaagctgcttgaatggtttggaattatgcaaccagcaagtggaa

SEQ ID NO: 181255 - DNA, 93 bp, Homo sapiens
  chr16:84617691-84617784
  hypo
aatcctgcagagacacgagaacgataggagcgaggttctgtcctgggcaccagccgggtacttctgtgtggcagacaacagctgtggccagcc

SEQ ID NO: 181256 - DNA, 7 bp, Homo sapiens
  chr16:84617843-84617850
  hypo
ccctgcc

SEQ ID NO: 181257 - DNA, 856 bp, Homo sapiens; identical to SEQ ID NO: 53399
  chr16:84650975-84651831
  hypo

SEQ ID NO: 181258 - DNA, 30 bp, Homo sapiens; identical to SEQ ID NO: 91081
  chr16:84662540-84662570
  hypo

SEQ ID NO: 181259 - DNA, 22 bp, Homo sapiens
  chr16:84670542-84670564
  hypo
cggccacattcacttctactac

SEQ ID NO: 181260 - DNA, 255 bp, Homo sapiens; identical to SEQ ID NO: 91083
  chr16:84683894-84684149
  hypo

SEQ ID NO: 181261 - DNA, 30 bp, Homo sapiens; identical to SEQ ID NO: 91084
  chr16:84684794-84684824
  hypo

SEQ ID NO: 181262 - DNA, 30 bp, Homo sapiens; identical to SEQ ID NO: 91085
  chr16:84690539-84690569
  hypo

SEQ ID NO: 181263 - DNA, 30 bp, Homo sapiens; identical to SEQ ID NO: 29522
  chr16:84695178-84695208
  hypo

SEQ ID NO: 181264 - DNA, 219 bp, Homo sapiens
  chr16:84695418-84695637
  hypo
ttcgacgtgctgggcgtggaggcctacagcccgcagtgcaaccagtggacccgcgtggcgccgctgctgcacgccaacagcgagtcgggcgtggcagtgtgggagggccgcatctacatcctgggcggctacagctgggagaacactgccttctccaagaccgtgcaggtgtacgaccgcgaggccgacaagtggagcaggggcgtcgacctgcccaag

SEQ ID NO: 181265 - DNA, 30 bp, Homo sapiens
  chr16:84696432-84696462
  hypo
tttctgaataattccgtctttcctcattgg

SEQ ID NO: 181266 - DNA, 31 bp, Homo sapiens; identical to SEQ ID NO: 29523
  chr16:84701645-84701676
  hypo

SEQ ID NO: 181267 - DNA, 103 bp, Homo sapiens
  chr16:84717282-84717385
  hypo
cttaccatgtagcaggcatctcgaaaagcacttcgcatttcatatctcaatatgtattcctcgctactgtgctgggaggtgcgtcttgttatcacaaaattac

SEQ ID NO: 181268 - DNA, 30 bp, Homo sapiens
  chr16:84735364-84735394
  hypo
tacaacagtctaaagcgttatacacatctt

SEQ ID NO: 181269 - DNA, 42 bp, Homo sapiens
  chr16:84735937-84735979
  hypo
taggcgtgagccactactgcgcctggccgatttctcataatt

SEQ ID NO: 181270 - DNA, 186 bp, Homo sapiens; identical to SEQ ID NO: 29524
  chr16:84749466-84749652
  hypo

SEQ ID NO: 181271 - DNA, 30 bp, Homo sapiens
  chr16:84779980-84780010
  hypo
gtgttccgagatgtgcgtgttaacatcaga

SEQ ID NO: 181272 - DNA, 144 bp, Homo sapiens; identical to SEQ ID NO: 29525
  chr16:84780617-84780761
  hypo

SEQ ID NO: 181273 - DNA, 30 bp, Homo sapiens; identical to SEQ ID NO: 29526
  chr16:84799780-84799810
  hypo

SEQ ID NO: 181274 - DNA, 31 bp, Homo sapiens; identical to SEQ ID NO: 29527
  chr16:84800117-84800148
  hypo

SEQ ID NO: 181275 - DNA, 232 bp, Homo sapiens; identical to SEQ ID NO: 91092
  chr16:84800548-84800780
  hypo

SEQ ID NO: 181276 - DNA, 64 bp, Homo sapiens; identical to SEQ ID NO: 29528
  chr16:84812704-84812768
  hypo

SEQ ID NO: 181277 - DNA, 363 bp, Homo sapiens
  chr16:84813520-84813883
  hypo
ggtttaaaggtgtgtgcgtgtttctttgaatgcgaatgccttttcgggtaactgaaattcatgggggcatgagtttgcctgcagaattaaaatctgcccttcgatcagctcgacgtgtttgtggaagctgaaccaccactcaggttatgcttgtttagtattttcaaatggattagtgatttgggtacacgaagtttttgactcttcgattggcagaaaggaggaggttttctccccttcccctcctcatcccttgtttctatagcccaccgttttcagtatcaccaaaatagttgctgtaggtcaaggctaaatgctcttcagttgagtgccactggggcggctgagcggtgcctccagacg

SEQ ID NO: 181278 - DNA, 27 bp, Homo sapiens
  chr16:84818255-84818282
  hypo
tgtgagccaccgcggacgacctataaa

SEQ ID NO: 181279 - DNA, 30 bp, Homo sapiens
  chr16:84820514-84820544
  hypo
ccactctggcagatgcgacaccacgcctag

SEQ ID NO: 181280 - DNA, 618 bp, Homo sapiens
  chr16:84822974-84823592
  hypo
taaatgagaggggcgcgggaggtgatggaacacaaaaccatgagccatggctttgctggggaatgctgtggatctggtgtgtgatagagagagagtgtgtgtgcgtgtgtgtgtgtgtatggcaaagtgcacaaatcgcacgtgtacacctcagtggctttttacacatttagacgtgtgtaagtgtatagagcatttccacaccccagaggccccgagctcactccctcccgctctccccatccctgacgctaacctgatgcctgttgtcgtacatcagcttctcaacctcggcactattgattgccatttggggccaataattctagggggtggtggctgtggtgggcactgtaggatgtttcctgtgtccctggccctgacctactagatactagatgcacccaccctctccatcgtgacaaccaaacgtctccagacattgctaaatacaccctggggacacagtcaccctggctgagaaccagagcgtgggtcactgtgacttccgcgcttcctctccatggcatcgcacggtgccatgtgtcctgccctccgtgttcttctctctacgctgcttctctgaaatccctccagcggtggcgggtgccaggagtt

SEQ ID NO: 181281 - DNA, 451 bp, Homo sapiens
  chr16:84824663-84825114
  hypo
ttctgcaatggacagtttttacgtttcaaacgggaaactcttttctccttccgtgtctccatgcaagcccagagacgccagcatcatgtctgtctcccatcctccacttctctgacgaccaaaggtcctgggttctctgaggcctgcgcctgggccttgttacaacccagcaggcttatcttgattccagtaattgagaggcacatttgccaagtttatataccctcttgaaactcaagtactggtttgtggattaatgcgagattcagttgcatgcatttgaaatgcaagcgtctaattccgcgtgtaaaatacggggccacagacctcttgggcattgcacaccattccattcagatgagcgcagcaaaagcaaactgtaacccctaggattaaattctcctttaaatactcacgggtttttagcttcgggggaaaatatgtctgggaa

SEQ ID NO: 181282 - DNA, 30 bp, Homo sapiens
  chr16:84860218-84860248
  hypo
acacggtttattccccgggacctgcgaggc

SEQ ID NO: 181283 - DNA, 70 bp, Homo sapiens; identical to SEQ ID NO: 91096
  chr16:84868031-84868101
  hypo

SEQ ID NO: 181284 - DNA, 149 bp, Homo sapiens; identical to SEQ ID NO: 91097
  chr16:84886290-84886439
  hypo

SEQ ID NO: 181285 - DNA, 159 bp, Homo sapiens; identical to SEQ ID NO: 91098
  chr16:84904247-84904406
  hypo

SEQ ID NO: 181286 - DNA, 30 bp, Homo sapiens; identical to SEQ ID NO: 29530
  chr16:84906600-84906630
  hypo

SEQ ID NO: 181287 - DNA, 31 bp, Homo sapiens; identical to SEQ ID NO: 29531
  chr16:84912366-84912397
  hypo

SEQ ID NO: 181288 - DNA, 46 bp, Homo sapiens; identical to SEQ ID NO: 91101
  chr16:84954214-84954260
  hypo

SEQ ID NO: 181289 - DNA, 24 bp, Homo sapiens
  chr16:84955095-84955119
  hypo
gcgccattgcgaccaccctcagtt

SEQ ID NO: 181290 - DNA, 183 bp, Homo sapiens; identical to SEQ ID NO: 29533
  chr16:84965069-84965252
  hypo

SEQ ID NO: 181291 - DNA, 199 bp, Homo sapiens; identical to SEQ ID NO: 91104
  chr16:84974273-84974472
  hypo

SEQ ID NO: 181292 - DNA, 31 bp, Homo sapiens; identical to SEQ ID NO: 29534
  chr16:84974955-84974986
  hypo

SEQ ID NO: 181293 - DNA, 278 bp, Homo sapiens; identical to SEQ ID NO: 91106
  chr16:84987802-84988080
  hypo

SEQ ID NO: 181294 - DNA, 42 bp, Homo sapiens
  chr16:84997909-84997951
  hypo
gttcattcactatgccgtgctaggaggcgataccgcgaggaa

SEQ ID NO: 181295 - DNA, 315 bp, Homo sapiens; identical to SEQ ID NO: 29536
  chr16:84998379-84998694
  hypo

SEQ ID NO: 181296 - DNA, 245 bp, Homo sapiens; identical to SEQ ID NO: 91108
  chr16:85001516-85001761
  hypo

SEQ ID NO: 181297 - DNA, 567 bp, Homo sapiens; identical to SEQ ID NO: 91109
  chr16:85007506-85008073
  hypo

SEQ ID NO: 181298 - DNA, 144 bp, Homo sapiens; identical to SEQ ID NO: 29539
  chr16:85008290-85008434
  hypo

SEQ ID NO: 181299 - DNA, 187 bp, Homo sapiens; identical to SEQ ID NO: 91111
  chr16:85008677-85008864
  hypo

SEQ ID NO: 181300 - DNA, 342 bp, Homo sapiens
  chr16:85009389-85009731
  hypo
ctcttccggggcagcggggagtgtgccggaagccaccttcactgttcagtgcacagatcttttgcaacttcagtgcaaagcatcggagctaatcgagaccaaaacgtctttctatgtaaacgccctgctgtgatccggggagtgcactgctgagtggcggggtcagcaggagccccctgaaatgactgcttggagaatccctgttcactggattcactgtttttcttcatgattggaaacagcagctcaggacccaggatttgaataacccatgtaataacccgaagtattctccacagaagccccagctctgcaggaggccacggcgtttggcttcttcgt

SEQ ID NO: 181301 - DNA, 475 bp, Homo sapiens
  chr16:85009948-85010423
  hypo
tcacactgagaactccgggccaccttttctgggtctcgtgggcagtcgcctaaatcggaagcccacaaagggattcatccagaggagtgaggggggccccccaaagacggacttcatcccttcccatcgcagcctccgctcccatgtgggcttctcacttttcaatcgctcgatctcctggaagcagaaagaaaagcaagtggcagcggctccaggaagctcggcagaccccaccaagcctcagaatcacaccgtgctcaagcacagtgtgggctcgatggagggtaggtgagtgaactctccttcccagctctgccccgatccagaccccgtggcctctgtgagcccagcccggctgcagccacgtggccagcccagactaccacaatggccctcccagccaggcaccaacatttgtcgctcgttagttactgtgtacagacatttactgagcgccactccaggcctgcagagc

SEQ ID NO: 181302 - DNA, 119 bp, Homo sapiens; identical to SEQ ID NO: 91114
  chr16:85011213-85011332
  hypo

SEQ ID NO: 181303 - DNA, 121 bp, Homo sapiens
  chr16:85013862-85013983
  hypo
acccgcccatagcgtcaccttcttcttattcattgaccttggctccctgcccgacctccacagcacctgacttccaaaacattcccattttatcttcaacagatttattgaagtataattt

SEQ ID NO: 181304 - DNA, 98 bp, Homo sapiens
  chr16:85015384-85015482
  hypo
cctacggtggtgggcgcactctggtttaatacagcagcacacgtacccgcagtggcggatgcgctcgggtttaatacagcagcgcacgtacctgcagt

SEQ ID NO: 181305 - DNA, 30 bp, Homo sapiens; identical to SEQ ID NO: 29541
  chr16:85018907-85018937
  hypo

SEQ ID NO: 181306 - DNA, 459 bp, Homo sapiens
  chr16:85019751-85020210
  hypo
gggggaggggaacggcgtgggcgaggccaccacatgatgtggtgacaagctcaaggtggagcgctcttttcttcctaccgtgcacatttggaatttcccataagaagtgaaattttcgaggccggggctctgaagatagacaatctggttcaaatcccagcctggcctcttactggcacagcgaggcctcgtgttctcacacggatgctacacctacgtcccagcactgctgtgacggtgggaggaaagcacgcttttggcagagctcctggacagcagtcgcggccccatgaaggctacctccggaaggcactcgcacggctgccgagaaggctcgtaggcatccacggggctggcattgaagacacaggctctaacaagtaaagggatgcagggcccagggccgtgggtggccttcctccctcccagccctctcacgatcccaaagtgaagcctggg

SEQ ID NO: 181307 - DNA, 144 bp, Homo sapiens; identical to SEQ ID NO: 91119
  chr16:85024469-85024613
  hypo

SEQ ID NO: 181308 - DNA, 94 bp, Homo sapiens
  chr16:85026075-85026169
  hypo
tccagaaacaaaaagaaaaaagtgcacttttcctggtaactgttttgactgcttctttgattgtacgcccttctcttatcggtgtttgctctga

SEQ ID NO: 181309 - DNA, 30 bp, Homo sapiens; identical to SEQ ID NO: 91120
  chr16:85027659-85027689
  hypo

SEQ ID NO: 181310 - DNA, 186 bp, Homo sapiens
  chr16:85028158-85028344
  hypo
acacctgagccagctcagctccgccttcctggttcaggtcctggtaagacctccacggagtgcaggatgctgctgtggctccatgcctgacctgggggtgcggatggcaggcacagctgtgtaaggagagcgcccacagacaccaaacactggccatggcaggacgttcctataagcacatattag

SEQ ID NO: 181311 - DNA, 29 bp, Homo sapiens
  chr16:85028921-85028950
  hypo
accacacaagcaaaaactttccgtttcag

SEQ ID NO: 181312 - DNA, 148 bp, Homo sapiens; identical to SEQ ID NO: 91122
  chr16:85029249-85029397
  hypo

SEQ ID NO: 181313 - DNA, 30 bp, Homo sapiens; identical to SEQ ID NO: 91123
  chr16:85029687-85029717
  hypo

SEQ ID NO: 181314 - DNA, 43 bp, Homo sapiens
  chr16:85030030-85030073
  hypo
caggccctgctgtgggaggggcgaggaggtgaaggaagacagt

SEQ ID NO: 181315 - DNA, 40 bp, Homo sapiens
  chr16:85032151-85032191
  hypo
taacccgagatggctcgctgtctcccgccctagtgtgcca

SEQ ID NO: 181316 - DNA, 17 bp, Homo sapiens
  chr16:85032654-85032671
  hypo
ccagcctaaatgcagca

SEQ ID NO: 181317 - DNA, 267 bp, Homo sapiens
  chr16:85033741-85034008
  hypo
ctctaaaataaaataaaataaaattgtgcatttcactgtacattaatcatgcctcaattaaaaacatgagcaggagaaaaaatacccagcacaggtatgtacggccggtgtgatagtgcaagggtgcggcacaaggcaagtcccagcgagcagtggagtcacttttcttcctggataacccgcgttcctgagtccagaccctgtcttggatttacttgtatctgtaacttcaagcaagtgtcttaagctcttcgcctttactttttt

SEQ ID NO: 181318 - DNA, 86 bp, Homo sapiens; identical to SEQ ID NO: 91126
  chr16:85036999-85037085
  hypo

SEQ ID NO: 181319 - DNA, 30 bp, Homo sapiens
  chr16:85038548-85038578
  hypo
cagaaaacatgtgcgcgggacctcactaga

SEQ ID NO: 181320 - DNA, 28 bp, Homo sapiens
  chr16:85043916-85043944
  hypo
gagccaccgcgtgcgtaccaggccacaa

SEQ ID NO: 181321 - DNA, 16 bp, Homo sapiens
  chr16:85052352-85052368
  hypo
gctggtgtcttctcta

SEQ ID NO: 181322 - DNA, 30 bp, Homo sapiens; identical to SEQ ID NO: 91129
  chr16:85075511-85075541
  hypo

SEQ ID NO: 181323 - DNA, 256 bp, Homo sapiens; identical to SEQ ID NO: 29545
  chr16:85083542-85083798
  hypo

SEQ ID NO: 181324 - DNA, 29 bp, Homo sapiens
  chr16:85091971-85092000
  hypo
tgttttggccggacgcgttggctcatgcc

SEQ ID NO: 181325 - DNA, 30 bp, Homo sapiens
  chr16:85101322-85101352
  hypo
tggagggacacgctccggagtgcccagctc

SEQ ID NO: 181326 - DNA, 30 bp, Homo sapiens; identical to SEQ ID NO: 91132
  chr16:85112610-85112640
  hypo

SEQ ID NO: 181327 - DNA, 30 bp, Homo sapiens
  chr16:85123896-85123926
  hypo
ggcgctcccttcagccgcctcgtcgtcagc

SEQ ID NO: 181328 - DNA, 30 bp, Homo sapiens; identical to SEQ ID NO: 91133
  chr16:85141798-85141828
  hypo

SEQ ID NO: 181329 - DNA, 98 bp, Homo sapiens; identical to SEQ ID NO: 127673
  chr16:85143893-85143991
  hypo

SEQ ID NO: 181330 - DNA, 47 bp, Homo sapiens; identical to SEQ ID NO: 91135
  chr16:85147114-85147161
  hypo

SEQ ID NO: 181331 - DNA, 30 bp, Homo sapiens
  chr16:85147725-85147755
  hypo
cagggacgggagcggcgcagtgtgagccag

SEQ ID NO: 181332 - DNA, 163 bp, Homo sapiens
  chr16:85151027-85151190
  hypo
acaggcgtgagccatcgcgccctgcatctgccgctgcctctgttttgtaagactctctaccctagatgcttctaggccaccttttcccacatgacataatttccagcctcctcccaccacccatctgcagagcgtcagtcccagaggccgcccaccgcctgga

SEQ ID NO: 181333 - DNA, 209 bp, Homo sapiens; identical to SEQ ID NO: 91136
  chr16:85196721-85196930
  hypo

SEQ ID NO: 181334 - DNA, 1158 bp, Homo sapiens; identical to SEQ ID NO: 127674
  chr16:85202554-85203712
  hypo

SEQ ID NO: 181335 - DNA, 30 bp, Homo sapiens
  chr16:85212953-85212983
  hypo
tgtggctaagaacgccgttgtatggatgga

SEQ ID NO: 181336 - DNA, 174 bp, Homo sapiens; identical to SEQ ID NO: 29548
  chr16:85214270-85214444
  hypo

SEQ ID NO: 181337 - DNA, 375 bp, Homo sapiens
  chr16:85216376-85216751
  hypo
acagtggattgttgacggctgcatgagatgggagtgaagcccctcctgccccagcatccacagggtggggtagttttgcccccaccactcctctgacccacacaccccagcacacccgcctccctctcgcacacacgcaccttgcacctccttctcctgcaccacgctcgcacacttgtatgcgtacacgttcacatgcaaacccacccacacacttgtatgcatactcactgttacacatgcggtcacatgcattcatacatgcatcactcccgtgcacactcatacactgtctcacacctgtgcccacacactcacatgcgtgctcttccatgcacacctgtaccctcaccccctcaccgccacattcgcact

SEQ ID NO: 181338 - DNA, 31 bp, Homo sapiens; identical to SEQ ID NO: 91139
  chr16:85236875-85236906
  hypo

SEQ ID NO: 181339 - DNA, 31 bp, Homo sapiens; identical to SEQ ID NO: 91140
  chr16:85238637-85238668
  hypo

SEQ ID NO: 181340 - DNA, 89 bp, Homo sapiens; identical to SEQ ID NO: 91141
  chr16:85241882-85241971
  hypo

SEQ ID NO: 181341 - DNA, 30 bp, Homo sapiens; identical to SEQ ID NO: 91142
  chr16:85242535-85242565
  hypo

SEQ ID NO: 181342 - DNA, 201 bp, Homo sapiens; identical to SEQ ID NO: 91143
  chr16:85245558-85245759
  hypo

SEQ ID NO: 181343 - DNA, 30 bp, Homo sapiens
  chr16:85276138-85276168
  hypo
cagcgttgtcaccagcgctttacagatggg

SEQ ID NO: 181344 - DNA, 46 bp, Homo sapiens; identical to SEQ ID NO: 91144
  chr16:85283527-85283573
  hypo

SEQ ID NO: 181345 - DNA, 31 bp, Homo sapiens; identical to SEQ ID NO: 29550
  chr16:85285189-85285220
  hypo

SEQ ID NO: 181346 - DNA, 31 bp, Homo sapiens; identical to SEQ ID NO: 91146
  chr16:85289023-85289054
  hypo

SEQ ID NO: 181347 - DNA, 31 bp, Homo sapiens; identical to SEQ ID NO: 91147
  chr16:85294922-85294953
  hypo

SEQ ID NO: 181348 - DNA, 31 bp, Homo sapiens; identical to SEQ ID NO: 91148
  chr16:85299459-85299490
  hypo

SEQ ID NO: 181349 - DNA, 261 bp, Homo sapiens
  chr16:85305675-85305936
  hypo
agatggccccagacccgtatcctgcgttcccatcatcgtcaccatgcggccgccattagctgggtgcacacgcaggcccgaggaagcctaggctcccttttctaacaggctccgctttggatgtctgagtttgggctgcacacttcctagcgtggagcggataggggcccctgtctttggccgtgctctgcaagggctatgcgcgtgggacgatccgtttttccatgtctgaaggagcctcaggcccgcagaggtgtcggg

SEQ ID NO: 181350 - DNA, 222 bp, Homo sapiens
  chr16:85317767-85317989
  hypo
ggcgggtcgggaggccgggagaattgagaatctgcccggcgggtcgtgctttagctgtcgctgtagggcgactcttggcgtgtaatcacagcatgtggcgcgaggacaaagaacatgacagcagagaaggatcagacagggagaaggcgggagagggcagagcaggccgagggaaagagagagaggtctcccggcgggggccgggcgcgagagcctctgctt

SEQ ID NO: 181351 - DNA, 236 bp, Homo sapiens; identical to SEQ ID NO: 91150
  chr16:85318199-85318435
  hypo

SEQ ID NO: 181352 - DNA, 85 bp, Homo sapiens
  chr16:85321495-85321580
  hypo
tgcgcacagtaggcacggaagtatttgtggaaggaagaaatggagatcatcatgaaataagcgctattggccgggcacggtggct

SEQ ID NO: 181353 - DNA, 170 bp, Homo sapiens; identical to SEQ ID NO: 91152
  chr16:85327231-85327401
  hypo

SEQ ID NO: 181354 - DNA, 320 bp, Homo sapiens
  chr16:85328797-85329117
  hypo
gcttcccagggcctccgcacacaccggtccaccttctgcctgaggatggcctgtgctgggcatttcctgggaatggaatcctgcagtacaagctcttttgtggcttctctcactcgggaccagcctggggcgaaaccctgtctctactaaaaatacaaacaaatcagttttcaaggttcacgcgtgctgcagcgcgggtcagcacatcagcccttttatggctgagtgattattccaccgtgcgcgtagaccgcgtcctttttgcccatccaccgccgatggccgtttgggctgtctccacctttcggctgctgtcacgt

SEQ ID NO: 181355 - DNA, 173 bp, Homo sapiens; identical to SEQ ID NO: 91153
  chr16:85329622-85329795
  hypo

SEQ ID NO: 181356 - DNA, 45 bp, Homo sapiens; identical to SEQ ID NO: 29553
  chr16:85332744-85332789
  hypo

SEQ ID NO: 181357 - DNA, 30 bp, Homo sapiens
  chr16:85335873-85335903
  hypo
taatccggggtgactcggagtcatcctgac

SEQ ID NO: 181358 - DNA, 352 bp, Homo sapiens
  chr16:85336378-85336730
  hypo
aattcttggccttggccttgtcgaggtgcggtgtgctgggcagggtgggtgaggtcagcggctgtcacaagtaaccctgcgtcttcagtggcgtgatgcagccgaagcgcattctccttcaatcgggtccaacggggtgctcagtgggtcttccacaaggtgactcggggtccggtttcccggagcctcggcctccccactgctagtgatgagcagaggatggcacagaggtgacgtcacctcgacctacattgcgctgactggagccagtcctgtggcccccgcctgcagcgagggggtgaaaatgttgcttagccatgtgtccagagcgaggaaacgggtttagtgacca

SEQ ID NO: 181359 - DNA, 30 bp, Homo sapiens
  chr16:85348887-85348917
  hypo
tgctctcctgcagtccggtctcacttgccc

SEQ ID NO: 181360 - DNA, 30 bp, Homo sapiens
  chr16:85349259-85349289
  hypo
gagaggagtacgcaccggttccatttgcat

SEQ ID NO: 181361 - DNA, 195 bp, Homo sapiens; identical to SEQ ID NO: 91156
  chr16:85351333-85351528
  hypo

SEQ ID NO: 181362 - DNA, 183 bp, Homo sapiens; identical to SEQ ID NO: 29555
  chr16:85364086-85364269
  hypo

SEQ ID NO: 181363 - DNA, 31 bp, Homo sapiens; identical to SEQ ID NO: 91158
  chr16:85365428-85365459
  hypo

SEQ ID NO: 181364 - DNA, 30 bp, Homo sapiens; identical to SEQ ID NO: 91159
  chr16:85365912-85365942
  hypo

SEQ ID NO: 181365 - DNA, 84 bp, Homo sapiens; identical to SEQ ID NO: 91160
  chr16:85369410-85369494
  hypo

SEQ ID NO: 181366 - DNA, 31 bp, Homo sapiens; identical to SEQ ID NO: 91161
  chr16:85376257-85376288
  hypo

SEQ ID NO: 181367 - DNA, 209 bp, Homo sapiens
  chr16:85377784-85377993
  hypo
gcggccagccctgcccggcgggggagctagggatagtgcccaggggaaagggtacggtccctggctgaggaggaggcagagaacatttctgggagaaaggcagggggcattttatgatgggaggggactcctaggcagttggcaaggtttgtgagcagcccgcgcgttgcttttgcccggaaccctgggccgagcggggtcctgcccgg

SEQ ID NO: 181368 - DNA, 158 bp, Homo sapiens
  chr16:85389786-85389944
  hypo
acgggcagttggcgtcgtcaccatcagcatccccatcatcgtcgtcgtcatggtagttcttgctcgcctcgggaccagtgagcccaggtgcacgcaggatggagaggcacgttttgcagttcctgcaaaagtgccctgaggcccggggctgcaccctt

SEQ ID NO: 181369 - DNA, 115 bp, Homo sapiens
  chr16:85399703-85399818
  hypo
ggcttgggcctccaccgccgggaaggcgggactgcgctcgggtactgggctccggcctcccgaagtccttggtaagccttgcctgtagcggctccgctgccgagtgctttgacac

SEQ ID NO: 181370 - DNA, 21 bp, Homo sapiens
  chr16:85401732-85401753
  hypo
tacaggcgtgagccaccggaa

SEQ ID NO: 181371 - DNA, 30 bp, Homo sapiens
  chr16:85407335-85407365
  hypo
gggcgaatgaatgagcgctggccgccttct

SEQ ID NO: 181372 - DNA, 299 bp, Homo sapiens; identical to SEQ ID NO: 91163
  chr16:85407685-85407984
  hypo

SEQ ID NO: 181373 - DNA, 162 bp, Homo sapiens; identical to SEQ ID NO: 91164
  chr16:85410441-85410603
  hypo

SEQ ID NO: 181374 - DNA, 154 bp, Homo sapiens; identical to SEQ ID NO: 91165
  chr16:85417767-85417921
  hypo

SEQ ID NO: 181375 - DNA, 117 bp, Homo sapiens; identical to SEQ ID NO: 29561
  chr16:85423784-85423901
  hypo

SEQ ID NO: 181376 - DNA, 172 bp, Homo sapiens; identical to SEQ ID NO: 29562
  chr16:85426316-85426488
  hypo

SEQ ID NO: 181377 - DNA, 112 bp, Homo sapiens
  chr16:85428080-85428192
  hypo
tttgggtggttcctcggatgagcggcttgagggggctctgctttatgtaccctcccctgtgcccatttgtggggtcactggtttagtcctggatgggcggcagcccccgcgc

SEQ ID NO: 181378 - DNA, 286 bp, Homo sapiens
  chr16:85428652-85428938
  hypo
acgcggggaatggggcgggcagagactggggcacctaagcatagggaggttgtaggctgcagccacacaaagctgaggatgaggaggaaggatggtctggggcaagctggggtaggccttgcatgccaggctattggcttctcgaacgttaccctgaatccctgggaatggaatggaaccgaatgaacaggtaaaatctatacgaggcccagaaaaatccaagccccgagctgctgaggtgtcagggcagtggcgcctgctgagcgtgttagaaaggagggagaag

SEQ ID NO: 181379 - DNA, 95 bp, Homo sapiens
  chr16:85432464-85432559
  hypo
aatgcatgtcgagtgcgcaccgacatgtgtggtatgtttgtgtagacatgtataatgcatgtcgagtgtgtatccacatgcgttgtatgtttgtg

SEQ ID NO: 181380 - DNA, 31 bp, Homo sapiens; identical to SEQ ID NO: 91171
  chr16:85446736-85446767
  hypo

SEQ ID NO: 181381 - DNA, 101 bp, Homo sapiens
  chr16:85453277-85453378
  hypo
tgcctcgggtgcagtcgtgtgcaacggtgaatgcacgttggaatcagctggggatctctaaaaacccctctgatgcctgcctcccccgccccgcccccacc

SEQ ID NO: 181382 - DNA, 30 bp, Homo sapiens
  chr16:85454188-85454218
  hypo
cgtcctccagtgacgcgactcacaaacact

SEQ ID NO: 181383 - DNA, 145 bp, Homo sapiens
  chr16:85454709-85454854
  hypo
gcacagagcccggcacgcagtgggcgctgtgaaagtgtgtgttaaaccaagagaaacaggaagggcagggctgggcagttcggagtgcaagcaggcaccctcctgtctcctggacggggacccccgccagcgatttgggcccaag

SEQ ID NO: 181384 - DNA, 30 bp, Homo sapiens
  chr16:85455220-85455250
  hypo
gctcatttgcaggcccgagcttgtgaacgg

SEQ ID NO: 181385 - DNA, 33 bp, Homo sapiens; identical to SEQ ID NO: 91172
  chr16:85457901-85457934
  hypo

SEQ ID NO: 181386 - DNA, 39 bp, Homo sapiens
  chr16:85458420-85458459
  hypo
agcctgtgtttccagcgctgcccgcgcagctgtcactta

SEQ ID NO: 181387 - DNA, 30 bp, Homo sapiens
  chr16:85458681-85458711
  hypo
acccaggactccggtcggccctccctgggc

SEQ ID NO: 181388 - DNA, 143 bp, Homo sapiens
  chr16:85464226-85464369
  hypo
tgcatggaacggggacgcctggtgccacccccagaggctctggcttgatagtccccaggtacgggctgggcacagggcggcggcagtctagggcattcgtctgaagggcaccgctggggaaatcctgacgtaggcacacacgt

SEQ ID NO: 181389 - DNA, 30 bp, Homo sapiens; identical to SEQ ID NO: 91175
  chr16:85464584-85464614
  hypo

SEQ ID NO: 181390 - DNA, 202 bp, Homo sapiens; identical to SEQ ID NO: 29565
  chr16:85465096-85465298
  hypo

SEQ ID NO: 181391 - DNA, 30 bp, Homo sapiens
  chr16:85478290-85478320
  hypo
cacacacgctatagccgggctccgtgttgc

SEQ ID NO: 181392 - DNA, 30 bp, Homo sapiens
  chr16:85478614-85478644
  hypo
atgcttcaggtttcccgccgcacgcaggca

SEQ ID NO: 181393 - DNA, 292 bp, Homo sapiens; identical to SEQ ID NO: 91177
  chr16:85485675-85485967
  hypo

SEQ ID NO: 181394 - DNA, 138 bp, Homo sapiens
  chr16:85492604-85492742
  hypo
agtattggccgctttcgctcctgccaccctgtgcctagggccttggcagggactgagactttccgtcggctgctgcctgtggtgcctcggctcatcatcctctgcttacacagtggcctctgacgccgcctgtgctca

SEQ ID NO: 181395 - DNA, 309 bp, Homo sapiens; identical to SEQ ID NO: 91178
  chr16:85497296-85497605
  hypo

SEQ ID NO: 181396 - DNA, 83 bp, Homo sapiens
  chr16:85498188-85498271
  hypo
ggggtgatggtcatgccggttgcacagggtactcacgaagcctcgggaatgtgccaccatctcccgggcggagggtatacctg

SEQ ID NO: 181397 - DNA, 149 bp, Homo sapiens
  chr16:85498782-85498931
  hypo
cccggctgcatgcagcggttgggtgggaatcctgggctcctccatgggctgcccccgcccacctggagctcctgcctccccagctctcctgccaaccgaatctcatgctgcttctgtgccacgccctggcccttcgcatctctgcttgg

SEQ ID NO: 181398 - DNA, 60 bp, Homo sapiens
  chr16:85506193-85506253
  hypo
ttatgggaggcatagcgcagcccggcacagctccaagttcagcagcggctcaggacccgg

SEQ ID NO: 181399 - DNA, 31 bp, Homo sapiens; identical to SEQ ID NO: 91179
  chr16:85507602-85507633
  hypo

SEQ ID NO: 181400 - DNA, 30 bp, Homo sapiens; identical to SEQ ID NO: 91180
  chr16:85515579-85515609
  hypo

SEQ ID NO: 181401 - DNA, 630 bp, Homo sapiens; identical to SEQ ID NO: 91181
  chr16:85517148-85517778
  hypo

SEQ ID NO: 181402 - DNA, 30 bp, Homo sapiens
  chr16:85519918-85519948
  hypo
actcctgctcttgcacgcatgttgtcacgt

SEQ ID NO: 181403 - DNA, 142 bp, Homo sapiens
  chr16:85520265-85520407
  hypo
cgaggatggtgggagcgccgtcccgccctctctcctgccgcctccagcagcctctccatgcccgggacggagcgggcatctgtcctgttgcacaggctgttctcgggggttcccccagccccccgttcgtggcttgtgagaa

SEQ ID NO: 181404 - DNA, 42 bp, Homo sapiens; identical to SEQ ID NO: 29569
  chr16:85523183-85523225
  hypo

SEQ ID NO: 181405 - DNA, 414 bp, Homo sapiens; identical to SEQ ID NO: 91184
  chr16:85529539-85529953
  hypo

SEQ ID NO: 181406 - DNA, 108 bp, Homo sapiens; identical to SEQ ID NO: 29571
  chr16:85535587-85535695
  hypo

SEQ ID NO: 181407 - DNA, 345 bp, Homo sapiens
  chr16:85537317-85537662
  hypo
tgtcgaagcaaacctcgccgatgacagaccctgtaattagaaactgtagtgtccccgagactggtctttaaaactgtcagaagccaagcggccgtcatttgatacaagactatcatcacccgtgaacccattagctgcaggtaaataacatattatgccagggacggaaagcagccaggctggggaattcgccggcgcttaattaggaccggcagtgcggaagatagatggtcatcctttttgctcccttcattaggagggagggtcaggtgtggcggtggtcaccggagcccgggctgccgaccctgcagaaaagcgccatcctccgcccgccctctgcctccc

SEQ ID NO: 181408 - DNA, 322 bp, Homo sapiens
  chr16:85541367-85541689
  hypo
gtcacattctgaggcccgggggctgggatgtcagcgtgtcaattttcgcaggacacaaatcagcctataataggtgtcattttccctctttttcaatttgaaatggatgcgtcatattcatcagaagagttgcgagcacacgcctcgtgtgtttctatgggctgagctcaccatgtaatgggcccctgcatgacaaagagtgtgcccagtcccccagaagccccctgtggccccctgccgaggtggccagtgccccgacttctaactccgtcacttatttttttgtcttttgagatggagtcttgctgtgtcgctcaggctg

SEQ ID NO: 181409 - DNA, 21 bp, Homo sapiens
  chr16:85541928-85541949
  hypo
cacgcccggcctccctcactt

SEQ ID NO: 181410 - DNA, 31 bp, Homo sapiens
  chr16:85542733-85542764
  hypo
gaaggccgggcagagcggggttatcgtgtga

SEQ ID NO: 181411 - DNA, 197 bp, Homo sapiens
  chr16:85543125-85543322
  hypo
agctccgtttggccagcgacccctggccctcgctgtcatcagcttgcctggtgctttgcgggtgcctgatgactgtggagtgacgttgaatggaaaggccaggaggctccatctgaggatgtatgctggccctgaaggccagcgtggggaacaagagccgaatggccatgccgggtgggagacgtgtgtgctgttca

SEQ ID NO: 181412 - DNA, 71 bp, Homo sapiens; identical to SEQ ID NO: 91190
  chr16:85543642-85543713
  hypo

SEQ ID NO: 181413 - DNA, 25 bp, Homo sapiens
  chr16:85550409-85550434
  hypo
ttttttttttttgagacggagtctc

SEQ ID NO: 181414 - DNA, 31 bp, Homo sapiens; identical to SEQ ID NO: 91192
  chr16:85553675-85553706
  hypo

SEQ ID NO: 181415 - DNA, 280 bp, Homo sapiens
  chr16:85554502-85554782
  hypo
gggcctggtcccgcccgccaccctctgacagctggccagcactgccctggatggaggtggcttggcagacagaccggtccaacaggtctttgcttggggccggaaagtctcagccggggttgaggagcctttgggagcccaacgagccggtttgtctgggttcttcgtgaagatctcagggatcaacatgctcatgctgacaccctgacctccgggctgcacctccgtcttgactagtgctgggaggccttggactcctgaccaccgattgccatccgct

SEQ ID NO: 181416 - DNA, 134 bp, Homo sapiens
  chr16:85555418-85555552
  hypo
tccggagcgcgctggcgctcagcccagggggtcgtggagggttcccacacgactcttgtaagatcctctgctaatgaggtcccggcagtgccaagtgttcccgtgacagagcgtgccagcgtgaagctgggccc

SEQ ID NO: 181417 - DNA, 31 bp, Homo sapiens; identical to SEQ ID NO: 91193
  chr16:85564298-85564329
  hypo

SEQ ID NO: 181418 - DNA, 30 bp, Homo sapiens
  chr16:85566217-85566247
  hypo
tgtgtctgcagtggtcgcctcccaccgccc

SEQ ID NO: 181419 - DNA, 282 bp, Homo sapiens
  chr16:85566452-85566734
  hypo
tgccgtgaagtgggccgcccctgcaagtcctgcgcctgtggcccctggtttggtggttgtcatcagcacacttcagggacttgagattttccccagaacatgccccacgtactccaaaaccagcacaaaccagcccgctccctacctcctgttctgccggaggtgtcggccgctgcctgtcaacagtgttgatctggtctccaaggtgaggacagcaacccagtgggctctggaagaaaatgctagaactcaatgtgtcttgtcttttagaaatttctctgt

SEQ ID NO: 181420 - DNA, 42 bp, Homo sapiens; identical to SEQ ID NO: 91194
  chr16:85586222-85586264
  hypo

SEQ ID NO: 181421 - DNA, 1061 bp, Homo sapiens; identical to SEQ ID NO: 127680
  chr16:85589832-85590893
  hypo

SEQ ID NO: 181422 - DNA, 30 bp, Homo sapiens; identical to SEQ ID NO: 91196
  chr16:85615834-85615864
  hypo

SEQ ID NO: 181423 - DNA, 522 bp, Homo sapiens; identical to SEQ ID NO: 91197
  chr16:85616218-85616740
  hypo

SEQ ID NO: 181424 - DNA, 141 bp, Homo sapiens
  chr16:85617677-85617818
  hypo
gggcacgcatggggacggggacacaggctcgccagctgcacagcccgcagactggccttgggtctttgtgtgcgtgcgtgccggtgcgtgggcccctgtctgtttggagaccttcctccccctctgcgtgttccccaagat

SEQ ID NO: 181425 - DNA, 173 bp, Homo sapiens
  chr16:85618048-85618221
  hypo
gtaatttacactctccgggtactgatccatcaatagtgaatgtattacctgtctccgtgaggtttgggagatccaggatgctgctttgagaacgcctgcgaagcagtaggatcggggaggtggagcagtttcccccacccctccctctccccgcacgcgttctttctcagatg

SEQ ID NO: 181426 - DNA, 30 bp, Homo sapiens; identical to SEQ ID NO: 29579
  chr16:85619959-85619989
  hypo

SEQ ID NO: 181427 - DNA, 30 bp, Homo sapiens
  chr16:85642090-85642120
  hypo
gcccagaggtaagagcgtagacctgaaacc

SEQ ID NO: 181428 - DNA, 302 bp, Homo sapiens
  chr16:85643802-85644104
  hypo
tggtaaggagcaccgcgtgcagcatccccagggcaggtgtcctgctctgggaggtgcctccgtaggcctggccctggcacctacctagctccttccaggcaaatgggagtggagggtgggaaggaggtccagggaaagagagctgtgcccaggaagggctcgcactatctgggggcgcggggctgtgggtagggcgctgcttaggaagagagaggaggaggagcaggcctggagggaaatggagggaggccagccttagccccagtgctgggaaattaggagtcaagcgacaaacctcgtta

SEQ ID NO: 181429 - DNA, 30 bp, Homo sapiens
  chr16:85644500-85644530
  hypo
gccggagggattggccggctctaaaaagcc

SEQ ID NO: 181430 - DNA, 529 bp, Homo sapiens
  chr16:85661247-85661776
  hypo
agagcttgtacagtgcggagacagcccccggccccccggccccccggccctcatccgtcacaggccttcacacggtggagcgtattcccagctgttaggataatgaatttacatgagctgataatgtagacaagaattcagtcaatgtccaggagcgcagaagttaataaatacctctctaatgagggcagcaggggggtgtgctctcccagggcctccctctccccgccatccctgtgtcccccacggacaccttggcacctgcactgacctcagccagagaacacctgcacgggaggaggcccgcatcggtctccctggggagggctgggggcttcgtgccgaggcctcgggggcagcagccttgaagtgatccccaccaggcctggaggggcaggaggcacgtgggccctggaggctgtgtccattcacagcaggcccagggggacccctccaaggatctcggggttccccggctcttggcctcctgtcctggcctcaagggagctgcgcccggctgctgcggccc

SEQ ID NO: 181431 - DNA, 30 bp, Homo sapiens; identical to SEQ ID NO: 91202
  chr16:85667834-85667864
  hypo

SEQ ID NO: 181432 - DNA, 30 bp, Homo sapiens
  chr16:85670792-85670822
  hypo
ccagcccccggcggccgctgtctgctttct

SEQ ID NO: 181433 - DNA, 263 bp, Homo sapiens
  chr16:85671082-85671345
  hypo
agcagtggctatgtatcgagtccccccttgatcgcggcagtggctatgtattgagtccccccttgatcgcggcagtggctgtgtatcgagcgcctgctgtgcccctggcgggctcgctgtgcttctcacacacccttcgcctctggtggatgagaactgagcctccggcttgcccgggtcccacgttgtaagtggcatggggaattccaatccccagcttgtgcctgagactccatagacccctgccccgcaggtgtagcctc

SEQ ID NO: 181434 - DNA, 445 bp, Homo sapiens
  chr16:85671744-85672189
  hypo
tttcgccatctgactgcgattgcctccgcgtctctcctctcattgtgtctcaagggtgtagtttaaaaattcaattcagacgaagctgtggcatgcgctgccctgggagaaaggctgggaaggagaggaagaggaggccctcgctgggatttatttttctggaggcgctgagacgtcttctcttcttcaaagctcagtcacccgcccaccagcgcgggccagacacccttccccagggccagcctgaccctttaacctactcacctactcactgccgaggctggggcgctttgggcaagggcagacgcttgcgaatcgccgatgcatgccccagcactttccttccttgctgtgtgatccgggcaggccgctttgcctctctgagcttccactttttcttgggtgaggagcaggtctctacctcatgaatcgtggggactgggtg

SEQ ID NO: 181435 - DNA, 328 bp, Homo sapiens
  chr16:85672903-85673231
  hypo
ccctcctcggaatggcggcctggccaccgcctccctccctgcctctcctaccaggacctcttctgcacagacacccaaccacccccataggcatctgaaacctcagcctaggagtcccaagactggggggatgggtcccagccctgtgtcccaccccctgcgctggacagattctgactcccctctaagcctcctgggcgccaggcctagcctgccttgcgggtgtgtcgggatccccccatcatcccttgtccttggaggtgcttgttgactgactgaataagaggtgtttgccccgagggtgccccgggaacgcctgtgcgtggag

SEQ ID NO: 181436 - DNA, 997 bp, Homo sapiens; identical to SEQ ID NO: 91206
  chr16:85673485-85674482
  hypo

SEQ ID NO: 181437 - DNA, 71 bp, Homo sapiens
  chr16:85678357-85678428
  hypo
tagaaccgtggggccgcgcgctgggtgggtgaattacgcgggatggaatcatagctcggtgaagctataac

SEQ ID NO: 181438 - DNA, 141 bp, Homo sapiens
  chr16:85678694-85678835
  hypo
gtggatctagtagcccgccggcacagtgcccagtcccaggtgttggcccggtcgacttggggtggtggagttctcagggtgtgggcagtggttggctagtccatctgggggtctggggttgggtcacgcctcaggggcagc

SEQ ID NO: 181439 - DNA, 438 bp, Homo sapiens
  chr16:85679145-85679583
  hypo
agttctgtttccacatcgggatgcctgtggggcctctgcctcctggtcacgccactaaggccactttggctgcctgaggcctctgggcaccccctgtgagcagcagttttctttggtgaatgtgcgcgtgcccactccggacacagtgaaggggagatgaggctgcttctgcccccggaaccaaggccaggtctgaacagaagtcgggcaggatgccgggagctgatgggctggggtcctccttctggaaagggcatctacctgcttctaccacgcattctacctgcttctaccacgcttcctatgcatgcattctacctgcttctaccatgcttcctatgcatgcattctaccatgcttctaccatgctttctatgcatgcattctgcctgcttctaccacgcattctacctgcttctaccacgcattctacctgct

SEQ ID NO: 181440 - DNA, 30 bp, Homo sapiens
  chr16:85681852-85681882
  hypo
cctcctgtctggtggcggtgggcggccctg

SEQ ID NO: 181441 - DNA, 338 bp, Homo sapiens
  chr16:85682219-85682557
  hypo
gccagcacacccaagcgcgtgcccatgggccctatcatcgtcccccctgggggccacagcgtgcccagcaccccccccgtggtgaccatcgctccaaccaaaaccgtgaatggtgtctggaggagtgagagccggcaggtgagtggggcggggcagggagcctagcgtcctctaagtggggaggctggattcaggcatccattgggggctctggagctttcgaggttgagtttacattccagacaccccctcccccaccctgagtttccgtctccttctctgcaacgtgagggtgacagcggcaccctcctggaggccctgtgcgggtgagtacatcg

SEQ ID NO: 181442 - DNA, 552 bp, Homo sapiens
  chr16:85682760-85683312
  hypo
gacaccagtcagctggtttagcgcccaccctaatgtccttattctcattcggtcacctctttaaagaccgtgtctccaaatgcagttccgttctgaggccctgggcatcagggctctaacacggatttgggcgggggtggcagtccagttcaagctgtgaaagtggtgtttgcacgctgagcacccggcacactagctgtgactgtcatagtctgtgaactgaacaaagaattgaggtaggaaagatcccagcccagacgctatcagaacaagacatctggtgggttttgtgtttctgtcttacttttggggctcccagcggaggcccctccccaagttttcggggctccttatgtctgtgggcccctcgctctgcactgactggggcctgcctgtgtggaaggagctggcactgggagctgctcttctgccgctgcctggggcctgtgcgccctcaggtgggtacctgcagctctcccggccccccacccctggcgcgcagcctggagtgggcccttcctaattaagagcgattctcaggggctgctgtca

SEQ ID NO: 181443 - DNA, 30 bp, Homo sapiens
  chr16:85683582-85683612
  hypo
ccggactgggacccccggggcctgacgttg

SEQ ID NO: 181444 - DNA, 637 bp, Homo sapiens
  chr16:85683911-85684548
  hypo
gggccctgaatcacccgactcaaacagctgaggctccttgcgccccactggtggggcctggctgctggtgccagcgcccgcagctcatgggaggccacttccctgccccagcctggaccaggagcttctaccagccaggaccctgcacccagccactgccttgaccccgaccagagctcctggcctagacccaggacgcctcgaggggattccagcgccttttccggcgactcctccgctctgagctggtccctcctcggagggtccttaccgcctcgggaacattgagctaccccagagcagagcaggggcgcgacaggcccgccccagcagtgtaccaccgcggcgcttaatggaacacggtgccgccagggaaggcgcggggccggcagctggattagcaggtgatgtacggctcctcgctcgggcacagaggctcagcggggcatttaatcctctcggagtggggaggcagagagaggattcccctcccacccggcccaaagctgtggccatgagtctccgaggctgcggacgtgggtggcagttgccgggccggaggcttctcggccccttctcggggtcacccctctctcccaggtgtagtgggagctgcgagaggagaaatgagatgaaa

SEQ ID NO: 181445 - DNA, 31 bp, Homo sapiens
  chr16:85685921-85685952
  hypo
ccccggttgctgacaccggctggagacccca

SEQ ID NO: 181446 - DNA, 30 bp, Homo sapiens
  chr16:85688430-85688460
  hypo
cccagtaccgtgaccgaggactacctgaga

SEQ ID NO: 181447 - DNA, 153 bp, Homo sapiens
  chr16:85693786-85693939
  hypo
gaaagtgcggatgagcgcttgcccttaggggaattcacgcaagcaggtgggaaaatcgaccgaaactggatctgtcccaggcctgagagggtctctgccttccctagcagcttaggctgggagcctccctatcctcttggagcagcctgcaca

SEQ ID NO: 181448 - DNA, 31 bp, Homo sapiens; identical to SEQ ID NO: 29590
  chr16:85694658-85694689
  hypo

SEQ ID NO: 181449 - DNA, 30 bp, Homo sapiens; identical to SEQ ID NO: 91214
  chr16:85695256-85695286
  hypo

SEQ ID NO: 181450 - DNA, 30 bp, Homo sapiens; identical to SEQ ID NO: 29591
  chr16:85696642-85696672
  hypo

SEQ ID NO: 181451 - DNA, 30 bp, Homo sapiens
  chr16:85697474-85697504
  hypo
cagcgcccgagaaggcgctctttgagccga

SEQ ID NO: 181452 - DNA, 30 bp, Homo sapiens
  chr16:85697900-85697930
  hypo
tctctgggagaaagtcgaaggaaagcagag

SEQ ID NO: 181453 - DNA, 445 bp, Homo sapiens; identical to SEQ ID NO: 91216
  chr16:85699440-85699885
  hypo

SEQ ID NO: 181454 - DNA, 30 bp, Homo sapiens; identical to SEQ ID NO: 91217
  chr16:85700197-85700227
  hypo

SEQ ID NO: 181455 - DNA, 80 bp, Homo sapiens; identical to SEQ ID NO: 29594
  chr16:85704415-85704495
  hypo

SEQ ID NO: 181456 - DNA, 30 bp, Homo sapiens; identical to SEQ ID NO: 29595
  chr16:85711739-85711769
  hypo

SEQ ID NO: 181457 - DNA, 81 bp, Homo sapiens
  chr16:85721548-85721629
  hypo
caggactcccagcgccgaggcgcctccctcatactgaaaacgcaaagccgggcgggcgcgggggctcacaatccagctact

SEQ ID NO: 181458 - DNA, 231 bp, Homo sapiens
  chr16:85731399-85731630
  hypo
ggtggagtgcgggagcgtcacctgaggttggatccccaaacaggatccaagtggaagtggtttattcggaatgcagtcccaggaagggaggttgagaccgggaacttgagaaggagctggttcaggttagcgagaaggtttctatggccggcaaccagggctcagttccaccgggaacctctgggcagctatgacgcctcgctcctcagtgtggcccgtggaccatcggca

SEQ ID NO: 181459 - DNA, 208 bp, Homo sapiens
  chr16:85741386-85741594
  hypo
gaggtgtcagaggtccggtccactcagcggggcctgggaaacactgttctggaagtggacaggctggattcctcgctggtcctgccacgtctctctgagcggaggcccgggttcgctcagttcccatccagggtattcagcacacctgctccaggcagccacgcccccggacacctgaagccgggccgctggagcaggagccagccag

SEQ ID NO: 181460 - DNA, 30 bp, Homo sapiens
  chr16:85743476-85743506
  hypo
ttggctggccggagccgcggcgtggcgggc

SEQ ID NO: 181461 - DNA, 235 bp, Homo sapiens
  chr16:85743823-85744058
  hypo
tgatgatgtcgggcacgtccaggtgcttgtcgttcaggacgggggcctcgtcgtggctgctgctgctgctgctgacacacatttgaaagcctgagaagccaggcgtggagcacacacgcacgtacacacgacagagagacaggcatcagtggccgccgggaaccgcgggcgccaccctcccttcactatcacctgggtcctgacgcctcgcagcaaggagcgcagctgtccccgc

SEQ ID NO: 181462 - DNA, 30 bp, Homo sapiens
  chr16:85744629-85744659
  hypo
caaatgccagccgggcgcggtggctcatgc

SEQ ID NO: 181463 - DNA, 30 bp, Homo sapiens
  chr16:85811955-85811985
  hypo
aactggaggggcctacgctgctgtttcagt

SEQ ID NO: 181464 - DNA, 30 bp, Homo sapiens
  chr16:85835792-85835822
  hypo
cctcccgtagagccccgagttgtgggtggt

SEQ ID NO: 181465 - DNA, 30 bp, Homo sapiens
  chr16:85836104-85836134
  hypo
ttaagttataacttacgtaagtcatacatg

SEQ ID NO: 181466 - DNA, 61 bp, Homo sapiens
  chr16:85847018-85847079
  hypo
gcatcactcttgccacgcaacagactgcctccctaccgctcccgctcgctcccccgggctg

SEQ ID NO: 181467 - DNA, 138 bp, Homo sapiens; identical to SEQ ID NO: 91221
  chr16:85849283-85849421
  hypo

SEQ ID NO: 181468 - DNA, 30 bp, Homo sapiens
  chr16:85858559-85858589
  hypo
ggggcacgctgtctgcgggctccgggggag

SEQ ID NO: 181469 - DNA, 30 bp, Homo sapiens
  chr16:85860493-85860523
  hypo
ggcctcgccacgctgcgggcttcacacact

SEQ ID NO: 181470 - DNA, 30 bp, Homo sapiens; identical to SEQ ID NO: 29597
  chr16:85877228-85877258
  hypo

SEQ ID NO: 181471 - DNA, 861 bp, Homo sapiens; identical to SEQ ID NO: 10843
  chr16:85932119-85932980
  hypo

SEQ ID NO: 181472 - DNA, 30 bp, Homo sapiens
  chr16:85952164-85952194
  hypo
gctggtgcgcttcccgccggccgacgccat

SEQ ID NO: 181473 - DNA, 38 bp, Homo sapiens
  chr16:85954879-85954917
  hypo
accgtctaagtgcgtcgcttgggcgccccaccccgtct

SEQ ID NO: 181474 - DNA, 31 bp, Homo sapiens; identical to SEQ ID NO: 91225
  chr16:85959633-85959664
  hypo

SEQ ID NO: 181475 - DNA, 421 bp, Homo sapiens; identical to SEQ ID NO: 91226
  chr16:85966400-85966821
  hypo

SEQ ID NO: 181476 - DNA, 216 bp, Homo sapiens
  chr16:85985996-85986212
  hypo
agaggtgcgccaggccggctgctcccacagctgctcgaagcctggggactggacatcagggtggcaatgggttggcaccaacccccacatcactctctcggagataaaagtagctgccatctgcagggtgcttctgacgtgccaaatgctgctgagcactgcgtatgcatgcgttcatttcatacccacaaccctagcaggcgtacgagccagctt

SEQ ID NO: 181477 - DNA, 30 bp, Homo sapiens
  chr16:85986898-85986928
  hypo
tcccaccctcactgtcgttccccgctgcca

SEQ ID NO: 181478 - DNA, 31 bp, Homo sapiens; identical to SEQ ID NO: 91227
  chr16:86078363-86078394
  hypo

SEQ ID NO: 181479 - DNA, 298 bp, Homo sapiens
  chr16:86096352-86096650
  hypo
gtccctggcgaaggccgggatggcgccacgtggtcctagaagcacaaggacggttctctgaagagagttccaggtgaggcccacagaaacagaaacacacaggagctggggaaggaacaggcaaaaaccttcacagggatctgggtcacgtgggtggagcccgatagtgtctgtgccatcagtttctagaacgctcaccgccactaggattttagcgctcccgggtggctgtactgttcacagctgagcccccggaagcaaggacacatgtgccaccggtttgctgggtgactttatt

SEQ ID NO: 181480 - DNA, 30 bp, Homo sapiens
  chr16:86101105-86101135
  hypo
acggcgagtgtctggcgcacgtggattgtt

SEQ ID NO: 181481 - DNA, 485 bp, Homo sapiens; identical to SEQ ID NO: 29600
  chr16:86101895-86102380
  hypo

SEQ ID NO: 181482 - DNA, 110 bp, Homo sapiens
  chr16:86244208-86244318
  hypo
tgctgccattcctggcggtctctccgcctctcctcacctcagtttccaaatggggctactaaatcctagttgaagggctttccttagcacagagccgggaacatagcggg

SEQ ID NO: 181483 - DNA, 30 bp, Homo sapiens
  chr16:86411951-86411981
  hypo
acaaactcgcagagacgacatgctcacacg

SEQ ID NO: 181484 - DNA, 30 bp, Homo sapiens
  chr16:86412412-86412442
  hypo
cgtttacaggttctgcgggttaagacgggg

SEQ ID NO: 181485 - DNA, 294 bp, Homo sapiens; identical to SEQ ID NO: 127702
  chr16:86541649-86541943
  hypo

SEQ ID NO: 181486 - DNA, 56 bp, Homo sapiens; identical to SEQ ID NO: 127703
  chr16:86542182-86542238
  hypo

SEQ ID NO: 181487 - DNA, 684 bp, Homo sapiens; identical to SEQ ID NO: 127704
  chr16:86542273-86542957
  hypo

SEQ ID NO: 181488 - DNA, 1194 bp, Homo sapiens; identical to SEQ ID NO: 127705
  chr16:86543363-86544557
  hypo

SEQ ID NO: 181489 - DNA, 358 bp, Homo sapiens; identical to SEQ ID NO: 91234
  chr16:86560977-86561335
  hypo

SEQ ID NO: 181490 - DNA, 49 bp, Homo sapiens
  chr16:86561823-86561872
  hypo
tcaacccggaggggcccgtttccagttcagtgaccggccatctgagggc

SEQ ID NO: 181491 - DNA, 123 bp, Homo sapiens; identical to SEQ ID NO: 91235
  chr16:86562410-86562533
  hypo

SEQ ID NO: 181492 - DNA, 30 bp, Homo sapiens
  chr16:86565704-86565734
  hypo
gctgcggcagagtccgggtaatggaggaag

SEQ ID NO: 181493 - DNA, 30 bp, Homo sapiens; identical to SEQ ID NO: 10847
  chr16:86567476-86567506
  hypo

SEQ ID NO: 181494 - DNA, 190 bp, Homo sapiens
  chr16:86570328-86570518
  hypo
agcttccatctgcacgccttggctcctgcctggccctcattgcgaggcccgcgggagtggctgcctccctccccctgctccgcacagagtcctgcatgggaccagcagctcctgtctcacttccgcacttggggtttcagccctcggagaagagcagccgcgtggttcccctcacgcagacatgcttgag

SEQ ID NO: 181495 - DNA, 30 bp, Homo sapiens
  chr16:86581022-86581052
  hypo
gctatgacaagttccgtatggatcagtgca

SEQ ID NO: 181496 - DNA, 1526 bp, Homo sapiens; identical to SEQ ID NO: 127714
  chr16:86600290-86601816
  hypo

SEQ ID NO: 181497 - DNA, 554 bp, Homo sapiens; identical to SEQ ID NO: 127715
  chr16:86602037-86602591
  hypo

SEQ ID NO: 181498 - DNA, 414 bp, Homo sapiens; identical to SEQ ID NO: 127716
  chr16:86609632-86610046
  hypo

SEQ ID NO: 181499 - DNA, 30 bp, Homo sapiens; identical to SEQ ID NO: 127717
  chr16:86610268-86610298
  hypo

SEQ ID NO: 181500 - DNA, 30 bp, Homo sapiens; identical to SEQ ID NO: 29607
  chr16:86618820-86618850
  hypo

SEQ ID NO: 181501 - DNA, 328 bp, Homo sapiens
  chr16:86665869-86666197
  hypo
actcctccctccctgtgcctccgcacaagcccatgactgtgacgttagccacgcagtgacggctaaggctaagccatcaaagacctccaaccggacatgttgcgatgctcacttttggaaagtagccaccgtgctgtgaggagggcacgctgccacacggaaaggccacctacaggtgtcctgatgcacgggaggtcccggccaacacgaaccagtagccaggagagtgaggggaccttcggatgattccagcttccagccttgaggagtccttgggtgacactgagtcaggcagagatgagctgtccctgcccggccccgcccgatt

SEQ ID NO: 181502 - DNA, 30 bp, Homo sapiens; identical to SEQ ID NO: 29608
  chr16:86735107-86735137
  hypo

SEQ ID NO: 181503 - DNA, 156 bp, Homo sapiens
  chr16:86740873-86741029
  hypo
tctgatttaactctgcgaaacactaaggggtacaacctttctttaaataaactccctactccactgcggcatgctcctgaatccgtcctggcttcgagcagaaccaagtgagcgccgtccattcatgcccttcgtggagtgcgtgactgcagtgat

SEQ ID NO: 181504 - DNA, 161 bp, Homo sapiens
  chr16:86741298-86741459
  hypo
tgctccctcttttcacgcacagaaacttactggaaatccagatatgaaacagtgcaatcccaaggagaggctcgtggattgcaggccgtctacaccaaatgcgctctgcacggccccgtgacggaaacccaggctgctgagtcagacgtgaccggagaaga

SEQ ID NO: 181505 - DNA, 30 bp, Homo sapiens
  chr16:86843003-86843033
  hypo
tggccaccaaatggccggccggctggggcc

SEQ ID NO: 181506 - DNA, 30 bp, Homo sapiens
  chr16:86857875-86857905
  hypo
ttcaacaattgtatacggggtgcctactgc

SEQ ID NO: 181507 - DNA, 30 bp, Homo sapiens
  chr16:86858112-86858142
  hypo
gcgctccagcaaagacgtcacggctgaggc

SEQ ID NO: 181508 - DNA, 30 bp, Homo sapiens
  chr16:86877512-86877542
  hypo
gtgtttgtgtgtgctcgtgtgtgtgcctgt

SEQ ID NO: 181509 - DNA, 399 bp, Homo sapiens
  chr16:86878235-86878634
  hypo
cttctatagtcctttcgtctctctaaagtgggtaagagggaaaggtcaacacaaaaccagccatggcacaggcctcgaggagaaggctgaccgtccatggacagcaggcccatggctgctctagctccgctctgctgctgggagtgagtggccgggtggcaggcgccctccagggcatggatgaaacctcacaaatggcgctttgtcgtcccgccgagagatctgggacatcccgtgagttggaatatataacgcccactggattaagagccgtcagactggttcccaaagcaaacactgagctaatttttccagcatatgcctttcatgtctgggctgcttcaggctttgctgggtcactgggctctttgttgctgcctccgccgaagtccctggccc

SEQ ID NO: 181510 - DNA, 72 bp, Homo sapiens; identical to SEQ ID NO: 91245
  chr16:86903434-86903506
  hypo

SEQ ID NO: 181511 - DNA, 30 bp, Homo sapiens; identical to SEQ ID NO: 91246
  chr16:86991472-86991502
  hypo

SEQ ID NO: 181512 - DNA, 197 bp, Homo sapiens; identical to SEQ ID NO: 29610
  chr16:87022631-87022828
  hypo

SEQ ID NO: 181513 - DNA, 30 bp, Homo sapiens
  chr16:87030640-87030670
  hypo
tgagcacctctgctccgcggagaaaacacc

SEQ ID NO: 181514 - DNA, 30 bp, Homo sapiens
  chr16:87030931-87030961
  hypo
ctggccttcaaggggcggcttcggtgcaca

SEQ ID NO: 181515 - DNA, 225 bp, Homo sapiens
  chr16:87092442-87092667
  hypo
attacccttcagcgacgcagtgcacttaagtggtgaaaggagattcactggttggaaaaacactccagggcgaagggccagcgtgtgcaaaagcaccgaagcatgaccgagcgcgggcattcccgccagccaccagtgggccacgcatcccaacatgtgagtgccgcaaggatacaagtgcctaatgtgaacctccaagtggacgatcattcagtactgactttg

SEQ ID NO: 181516 - DNA, 30 bp, Homo sapiens
  chr16:87106261-87106291
  hypo
actcaatgaagatgtcggcccctggtgaat

SEQ ID NO: 181517 - DNA, 36 bp, Homo sapiens; identical to SEQ ID NO: 91249
  chr16:87146939-87146975
  hypo

SEQ ID NO: 181518 - DNA, 398 bp, Homo sapiens
  chr16:87157396-87157794
  hypo
caaggtcgcagcgtccgcagcagccctgagagcctggcgagtgtgagtcccagccaggcctgccaggcttgctgcgtgatctcaggctgcttggccccataagcccctggttccctgtcggttagacagccaggatgcaaacttccatgcaccttacagagttgtcatgaaggtggaatgagatgccatggggatgtttcatttcaccagcatcgctactgtcgctagtcagcacatggggcaaaacccattgaaagccaattaaatcacgccccaaaccaagccctgggaccttcccagcaagccagagcagctggttctcactatcacgtggggatagaccgttccttcctcacataagcacaagcagtggccagaaaaggcgcaagaaaaatgca

SEQ ID NO: 181519 - DNA, 30 bp, Homo sapiens
  chr16:87159014-87159044
  hypo
tggctgtgtgcaccacgcggcggctacaga

SEQ ID NO: 181520 - DNA, 30 bp, Homo sapiens; identical to SEQ ID NO: 91250
  chr16:87174188-87174218
  hypo

SEQ ID NO: 181521 - DNA, 127 bp, Homo sapiens
  chr16:87177253-87177380
  hypo
ggccgccctccatcacgcaggctctgacacatcccagggaagttacaagtccccgctgcttccaaaaccatggcgctccacgccccactgcagcccagcatgcgaggccgggcggaggtttccatat

SEQ ID NO: 181522 - DNA, 30 bp, Homo sapiens; identical to SEQ ID NO: 29612
  chr16:87219427-87219457
  hypo

SEQ ID NO: 181523 - DNA, 118 bp, Homo sapiens; identical to SEQ ID NO: 91252
  chr16:87219676-87219794
  hypo

SEQ ID NO: 181524 - DNA, 472 bp, Homo sapiens
  chr16:87249906-87250378
  hypo
gcgtgtacacacactcgtctgactcacacctcatcctccctttcgcttcagctggggaaggaggtggaaaggtgacgttcaagactggagggtaatttgcccaagaatgcagcgagcaaacatcttaaaacaccacggagagcctctgaaaactgattagaaccatttgtgtggccaacaagaatgagggccgccgagaactggaagccggggacaatatctgctctgttctggcgcatagcagatgccagcgcggcttctgactttatagctttttcttggcctgtgcggatgaaggaggctgattgaaaccgggccggcgctggatggggaacagcctccccgaatgtggcacaggaccttgcagccaggctgtcctcctcgccgactctggctccgctggccacgcacgacaggcgggcggatctctcactctctcgggctcgacgacgggaccccaggccaggctgag

SEQ ID NO: 181525 - DNA, 30 bp, Homo sapiens; identical to SEQ ID NO: 91254
  chr16:87253133-87253163
  hypo

SEQ ID NO: 181526 - DNA, 210 bp, Homo sapiens
  chr16:87289525-87289735
  hypo
gagccaccctaacctcggctcggaagaaggacccctgagatgcgcagacaccccaatctcggctcggaagaaggaccccgcctgaggggcccagcccagctgagcaggtgcctcgttttgttactgcagtgcctcctgggaaggaccctactccaggctgaagcaacacagctcctcattgcaaccctcgattgttccataaaatgcaaa

SEQ ID NO: 181527 - DNA, 26 bp, Homo sapiens
  chr16:87300170-87300196
  hypo
gtgctgcttaaaaaattctgacgtca

SEQ ID NO: 181528 - DNA, 38 bp, Homo sapiens; identical to SEQ ID NO: 29614
  chr16:87310541-87310579
  hypo

SEQ ID NO: 181529 - DNA, 219 bp, Homo sapiens; identical to SEQ ID NO: 91257
  chr16:87311852-87312071
  hypo

SEQ ID NO: 181530 - DNA, 30 bp, Homo sapiens
  chr16:87328589-87328619
  hypo
gcacctcgtaaaatgcgtaaaccaaaacaa

SEQ ID NO: 181531 - DNA, 370 bp, Homo sapiens
  chr16:87356523-87356893
  hypo
tgatgtgtctgtgatcggggcagccccaagagcacgtatcccgggacatgatgtgttgtggtctgtgtggggtcagagccgtcagtgttcactgccgcgtgcccagtgcttagcactgtttgccgcatgggagatgcaggtcacaacccggtagcgcctagtggcccgggggacacctggcttgtctgggcctgttggctgacaggtaggagggactgccatccattgttggggcaaaggatgctgctcaacctcccacaacgcatggagcggcccggcgcacgactcacccggccccaaacaccaactgtgccgaggtgatgccctgccctgaggcgagcgtacaaggcttgagcgtcgagaacactgc

SEQ ID NO: 181532 - DNA, 30 bp, Homo sapiens
  chr16:87365010-87365040
  hypo
cagccagacgaacccgaagcggtcctcatc

SEQ ID NO: 181533 - DNA, 31 bp, Homo sapiens; identical to SEQ ID NO: 29615
  chr16:87366016-87366047
  hypo

SEQ ID NO: 181534 - DNA, 30 bp, Homo sapiens; identical to SEQ ID NO: 29616
  chr16:87367706-87367736
  hypo

SEQ ID NO: 181535 - DNA, 30 bp, Homo sapiens; identical to SEQ ID NO: 29617
  chr16:87368190-87368220
  hypo

SEQ ID NO: 181536 - DNA, 30 bp, Homo sapiens; identical to SEQ ID NO: 91262
  chr16:87379847-87379877
  hypo

SEQ ID NO: 181537 - DNA, 30 bp, Homo sapiens
  chr16:87380729-87380759
  hypo
gcaccactcctgcccgtgcacagacctcgt

SEQ ID NO: 181538 - DNA, 30 bp, Homo sapiens; identical to SEQ ID NO: 91263
  chr16:87386671-87386701
  hypo

SEQ ID NO: 181539 - DNA, 30 bp, Homo sapiens
  chr16:87387214-87387244
  hypo
tccgcaagagccttcggaggcagcagggcc

SEQ ID NO: 181540 - DNA, 105 bp, Homo sapiens; identical to SEQ ID NO: 29618
  chr16:87391986-87392091
  hypo

SEQ ID NO: 181541 - DNA, 31 bp, Homo sapiens; identical to SEQ ID NO: 29619
  chr16:87404802-87404833
  hypo

SEQ ID NO: 181542 - DNA, 30 bp, Homo sapiens
  chr16:87408510-87408540
  hypo
gggcgtaatggctcacgcctgtaatcccaa

SEQ ID NO: 181543 - DNA, 24 bp, Homo sapiens
  chr16:87417617-87417641
  hypo
aacgttagactgccccgtgtgagg

SEQ ID NO: 181544 - DNA, 564 bp, Homo sapiens; identical to SEQ ID NO: 127723
  chr16:87417700-87418264
  hypo

SEQ ID NO: 181545 - DNA, 30 bp, Homo sapiens; identical to SEQ ID NO: 91267
  chr16:87419660-87419690
  hypo

SEQ ID NO: 181546 - DNA, 142 bp, Homo sapiens; identical to SEQ ID NO: 91268
  chr16:87420751-87420893
  hypo

SEQ ID NO: 181547 - DNA, 26 bp, Homo sapiens
  chr16:87421120-87421146
  hypo
aaccatgttaactgggcagggcgcgg

SEQ ID NO: 181548 - DNA, 20 bp, Homo sapiens
  chr16:87435733-87435753
  hypo
cctggccctgatgactattt

SEQ ID NO: 181549 - DNA, 49 bp, Homo sapiens; identical to SEQ ID NO: 91271
  chr16:87443506-87443555
  hypo

SEQ ID NO: 181550 - DNA, 309 bp, Homo sapiens
  chr16:87444918-87445227
  hypo
gaaatcatcatggccgttttagacccaacagcagtccttctggggacctcacggcctatcatgaagatttccacgcgctttcaaagagcattcgaaaaattatttgctttacaaagaaagaagtttactcttcataaaaaccaagcatttgtgtgcactggtcctgcgggagcctggtgggcgcggccatggcgcgcgcttacctggccggttgaagtccatggacggctgtttgcagtcctgggcgcggtgaccagtggccccgcagttgtaacaagataggttcccgctctttttgtgactggaacc

SEQ ID NO: 181551 - DNA, 48 bp, Homo sapiens; identical to SEQ ID NO: 29623
  chr16:87447845-87447893
  hypo

SEQ ID NO: 181552 - DNA, 30 bp, Homo sapiens; identical to SEQ ID NO: 91274
  chr16:87450911-87450941
  hypo

SEQ ID NO: 181553 - DNA, 30 bp, Homo sapiens; identical to SEQ ID NO: 91275
  chr16:87452102-87452132
  hypo

SEQ ID NO: 181554 - DNA, 179 bp, Homo sapiens; identical to SEQ ID NO: 91276
  chr16:87465350-87465529
  hypo

SEQ ID NO: 181555 - DNA, 142 bp, Homo sapiens
  chr16:87465770-87465912
  hypo
aatgacgctgggaaccgaccttcaagagcagtcagcactcgatgcacatgtggtccaaggagaatgtccccctgtcagggttcctgacagagccctgactgggagctcggcaccatcagccgggacacatttcccagccttt

SEQ ID NO: 181556 - DNA, 119 bp, Homo sapiens
  chr16:87471741-87471860
  hypo
aacagcaaccgggcacgcgctccaatgctgtggtaccgcagcactgcgtggcacacagagcccactgcacaggaggaatgcacgccccgacccagccggctggacggcgtgcacggggg

SEQ ID NO: 181557 - DNA, 96 bp, Homo sapiens
  chr16:87493947-87494043
  hypo
aaacacgggcgcttacgtcttgtggctggggttcatcgggtgcacagaaactatggtagccaaagaggccgggcacggtggctcacgcctgttatc

SEQ ID NO: 181558 - DNA, 1467 bp, Homo sapiens; identical to SEQ ID NO: 127725
  chr16:87525617-87527084
  hypo

SEQ ID NO: 181559 - DNA, 30 bp, Homo sapiens
  chr16:87552642-87552672
  hypo
agcctccgtccacctcgccctgaacgccct

SEQ ID NO: 181560 - DNA, 31 bp, Homo sapiens; identical to SEQ ID NO: 91279
  chr16:87584286-87584317
  hypo

SEQ ID NO: 181561 - DNA, 30 bp, Homo sapiens; identical to SEQ ID NO: 91280
  chr16:87584694-87584724
  hypo

SEQ ID NO: 181562 - DNA, 31 bp, Homo sapiens; identical to SEQ ID NO: 91281
  chr16:87585846-87585877
  hypo

SEQ ID NO: 181563 - DNA, 240 bp, Homo sapiens; identical to SEQ ID NO: 91282
  chr16:87594870-87595110
  hypo

SEQ ID NO: 181564 - DNA, 20 bp, Homo sapiens
  chr16:87596283-87596303
  hypo
ttttttttttttgattcgga

SEQ ID NO: 181565 - DNA, 31 bp, Homo sapiens; identical to SEQ ID NO: 91284
  chr16:87597530-87597561
  hypo

SEQ ID NO: 181566 - DNA, 170 bp, Homo sapiens; identical to SEQ ID NO: 91285
  chr16:87625739-87625909
  hypo

SEQ ID NO: 181567 - DNA, 898 bp, Homo sapiens; identical to SEQ ID NO: 127728
  chr16:87635072-87635970
  hypo

SEQ ID NO: 181568 - DNA, 482 bp, Homo sapiens; identical to SEQ ID NO: 127729
  chr16:87636008-87636490
  hypo

SEQ ID NO: 181569 - DNA, 1102 bp, Homo sapiens; identical to SEQ ID NO: 127730
  chr16:87636626-87637728
  hypo

SEQ ID NO: 181570 - DNA, 30 bp, Homo sapiens; identical to SEQ ID NO: 91290
  chr16:87638586-87638616
  hypo

SEQ ID NO: 181571 - DNA, 31 bp, Homo sapiens; identical to SEQ ID NO: 29628
  chr16:87670945-87670976
  hypo

SEQ ID NO: 181572 - DNA, 31 bp, Homo sapiens; identical to SEQ ID NO: 91292
  chr16:87678207-87678238
  hypo

SEQ ID NO: 181573 - DNA, 311 bp, Homo sapiens; identical to SEQ ID NO: 29629
  chr16:87681105-87681416
  hypo

SEQ ID NO: 181574 - DNA, 1051 bp, Homo sapiens; identical to SEQ ID NO: 127732
  chr16:87723112-87724163
  hypo

SEQ ID NO: 181575 - DNA, 101 bp, Homo sapiens; identical to SEQ ID NO: 91295
  chr16:87724406-87724507
  hypo

SEQ ID NO: 181576 - DNA, 30 bp, Homo sapiens; identical to SEQ ID NO: 91296
  chr16:87724748-87724778
  hypo

SEQ ID NO: 181577 - DNA, 30 bp, Homo sapiens
  chr16:87730132-87730162
  hypo
caggcagagccccccgcagctgtcgctcac

SEQ ID NO: 181578 - DNA, 30 bp, Homo sapiens; identical to SEQ ID NO: 91297
  chr16:87731567-87731597
  hypo

SEQ ID NO: 181579 - DNA, 30 bp, Homo sapiens; identical to SEQ ID NO: 91298
  chr16:87737855-87737885
  hypo

SEQ ID NO: 181580 - DNA, 538 bp, Homo sapiens; identical to SEQ ID NO: 91299
  chr16:87738499-87739037
  hypo

SEQ ID NO: 181581 - DNA, 755 bp, Homo sapiens
  chr16:87739313-87740068
  hypo
gagcaggagggaagaaagaaccggccacacaatggcgtccatcttctggacaagggctggagccgcagagccgggcagggcctgggcgggggcgggggcgggggcgctgctgcctgcgctctggcttctcaaccctgtccgagcctcttccaaccagcttagctgagagtgtgaggaaaggaccttgattgcccagcactcagacaaagtgcccagaccggccgccaaagccggcgcaacgcaacacaagctgcagccctgtgcggggtcggtgcaacacaaacacaagctgcagctctcagggggttggcacaaggcaacacaacctgcagcctgaggggaggaggggtcggcggaacgcaaacacaagctgtagcccttgcggggggcgggcgggctgccggcgcaaaagcaaacacaagctgcagccctcgcgggggggtcagcgtaatgcaaacacaagctgcagccctcgggggggggtcagcgtaatgcaaacacaagctgcagccctcgggggggggtcagcgcaatgcaaacacaagctgcagcccttgagggggtcggtggcggggaggggggtgagctggcacaacccaaacacaagctgcagccctcggagagggggaagttggcgcaatgcaaacacaagctgcagcccttgggggggtcggcgtgggggggttggtcggcacaacacaacacaagctgcagcctccaggggggtcggcggagggggccggcacaacgcaaac

SEQ ID NO: 181582 - DNA, 166 bp, Homo sapiens; identical to SEQ ID NO: 91301
  chr16:87740742-87740908
  hypo

SEQ ID NO: 181583 - DNA, 30 bp, Homo sapiens; identical to SEQ ID NO: 29632
  chr16:87741567-87741597
  hypo

SEQ ID NO: 181584 - DNA, 30 bp, Homo sapiens; identical to SEQ ID NO: 91303
  chr16:87741896-87741926
  hypo

SEQ ID NO: 181585 - DNA, 30 bp, Homo sapiens; identical to SEQ ID NO: 91304
  chr16:87742290-87742320
  hypo

SEQ ID NO: 181586 - DNA, 30 bp, Homo sapiens; identical to SEQ ID NO: 29633
  chr16:87742587-87742617
  hypo

SEQ ID NO: 181587 - DNA, 30 bp, Homo sapiens
  chr16:87742830-87742860
  hypo
ctcgctcccgggcacggaggcaccaagctg

SEQ ID NO: 181588 - DNA, 30 bp, Homo sapiens
  chr16:87743093-87743123
  hypo
cgccgagcctggcgcggtgagcacctgctt

SEQ ID NO: 181589 - DNA, 444 bp, Homo sapiens; identical to SEQ ID NO: 91306
  chr16:87744568-87745012
  hypo

SEQ ID NO: 181590 - DNA, 30 bp, Homo sapiens
  chr16:87749837-87749867
  hypo
tacgcgctatgtctcgtggatactgacata

SEQ ID NO: 181591 - DNA, 30 bp, Homo sapiens
  chr16:87753689-87753719
  hypo
gtcggctcagacgccgacccatttcaatca

SEQ ID NO: 181592 - DNA, 179 bp, Homo sapiens; identical to SEQ ID NO: 91307
  chr16:87756598-87756777
  hypo

SEQ ID NO: 181593 - DNA, 31 bp, Homo sapiens; identical to SEQ ID NO: 29635
  chr16:87774174-87774205
  hypo

SEQ ID NO: 181594 - DNA, 222 bp, Homo sapiens; identical to SEQ ID NO: 91309
  chr16:87776439-87776661
  hypo

SEQ ID NO: 181595 - DNA, 98 bp, Homo sapiens; identical to SEQ ID NO: 29637
  chr16:87782715-87782813
  hypo

SEQ ID NO: 181596 - DNA, 151 bp, Homo sapiens
  chr16:87784653-87784804
  hypo
tagagttttaaactatcatctcgggaagactattcaatgccacagaataatcctacaataatacatcaacggtaaaaaacactatagaaagaacacatacatgcacgctccagttagcgtgaaatagatgcatagaaatatgaactggctg

SEQ ID NO: 181597 - DNA, 36 bp, Homo sapiens
  chr16:87807641-87807677
  hypo
catgtcaacaactgcgagccagggattggctctgag

SEQ ID NO: 181598 - DNA, 31 bp, Homo sapiens; identical to SEQ ID NO: 91312
  chr16:87810850-87810881
  hypo

SEQ ID NO: 181599 - DNA, 161 bp, Homo sapiens
  chr16:87856803-87856964
  hypo
ggctggctttcatggcgcagttgagttcccacttgcagaacatactcaccctgtggctataaggcaaagcgctggggcttgtaggcactggaccccaagcagtgaacaggtcagtgcagggcctgtttggtgtggctgcacaagcgcgagaaacaggaatg

SEQ ID NO: 181600 - DNA, 30 bp, Homo sapiens; identical to SEQ ID NO: 91313
  chr16:87860542-87860572
  hypo

SEQ ID NO: 181601 - DNA, 190 bp, Homo sapiens; identical to SEQ ID NO: 91314
  chr16:87864416-87864606
  hypo

SEQ ID NO: 181602 - DNA, 30 bp, Homo sapiens; identical to SEQ ID NO: 91315
  chr16:87864925-87864955
  hypo

SEQ ID NO: 181603 - DNA, 30 bp, Homo sapiens; identical to SEQ ID NO: 91316
  chr16:87868050-87868080
  hypo

SEQ ID NO: 181604 - DNA, 216 bp, Homo sapiens; identical to SEQ ID NO: 91317
  chr16:87874191-87874407
  hypo

SEQ ID NO: 181605 - DNA, 152 bp, Homo sapiens; identical to SEQ ID NO: 29639
  chr16:87895431-87895583
  hypo

SEQ ID NO: 181606 - DNA, 491 bp, Homo sapiens; identical to SEQ ID NO: 127736
  chr16:87902835-87903326
  hypo

SEQ ID NO: 181607 - DNA, 27 bp, Homo sapiens
  chr16:87905811-87905838
  hypo
cgtgagccaccacgcccagcgccctgc

SEQ ID NO: 181608 - DNA, 83 bp, Homo sapiens
  chr16:87911933-87912016
  hypo
gcagaactgtgctcccagggccggccgaatgcctggcttccaccctcagactttctttccaatgtgggcgaagggaacacgga

SEQ ID NO: 181609 - DNA, 232 bp, Homo sapiens
  chr16:87916176-87916408
  hypo
tccccagaccaacggcgctgcgagcttctggggcgtgggctgggcccaacatgtcagtgcgacccacagcggggctggagctgctgaatgtgcacaacacacttcacccgggcctggttcaggagcgggcgaggcagccgtacaccctgtccttcagcagactcctcttgatcgatggaatcgaagtcaggcgcagcagcttagagcagaacagaaacgtgcccatttcccc

SEQ ID NO: 181610 - DNA, 30 bp, Homo sapiens; identical to SEQ ID NO: 29641
  chr16:87923993-87924023
  hypo

SEQ ID NO: 181611 - DNA, 168 bp, Homo sapiens; identical to SEQ ID NO: 91322
  chr16:87934226-87934394
  hypo

SEQ ID NO: 181612 - DNA, 46 bp, Homo sapiens; identical to SEQ ID NO: 91323
  chr16:87934807-87934853
  hypo

SEQ ID NO: 181613 - DNA, 30 bp, Homo sapiens
  chr16:87958893-87958923
  hypo
gcgagatcagccacgcgaagaggtgtctgg

SEQ ID NO: 181614 - DNA, 30 bp, Homo sapiens
  chr16:87960411-87960441
  hypo
gtacaggcaggatgccgcttcataggagac

SEQ ID NO: 181615 - DNA, 121 bp, Homo sapiens
  chr16:87962652-87962773
  hypo
gcgtgagccaccgcgcccagccttggattattttcttcttacaaattcctaaccacagaatcactaggtcaaagggtgcatccaacagaagtctagaaaacaaggataaagatgtatagcc

SEQ ID NO: 181616 - DNA, 30 bp, Homo sapiens
  chr16:87973419-87973449
  hypo
ctgtggcccgtgtgccgcccaatcttgcct

SEQ ID NO: 181617 - DNA, 38 bp, Homo sapiens
  chr16:87983754-87983792
  hypo
ttacaggcgtgagccgccgcgcccggccagcattttct

SEQ ID NO: 181618 - DNA, 30 bp, Homo sapiens; identical to SEQ ID NO: 91325
  chr16:87991107-87991137
  hypo

SEQ ID NO: 181619 - DNA, 30 bp, Homo sapiens; identical to SEQ ID NO: 29642
  chr16:87992493-87992523
  hypo

SEQ ID NO: 181620 - DNA, 33 bp, Homo sapiens
  chr16:88004306-88004339
  hypo
gcacacaaggcaaggcgtcctcagacagaactc

SEQ ID NO: 181621 - DNA, 19 bp, Homo sapiens
  chr16:88007066-88007085
  hypo
aagaaattctagagctgag

SEQ ID NO: 181622 - DNA, 30 bp, Homo sapiens
  chr16:88030141-88030171
  hypo
tccctggtcctgggcgccggctgggctctg

SEQ ID NO: 181623 - DNA, 131 bp, Homo sapiens; identical to SEQ ID NO: 53458
  chr16:88031993-88032124
  hypo

SEQ ID NO: 181624 - DNA, 365 bp, Homo sapiens; identical to SEQ ID NO: 29643
  chr16:88037885-88038250
  hypo

SEQ ID NO: 181625 - DNA, 31 bp, Homo sapiens; identical to SEQ ID NO: 29644
  chr16:88039775-88039806
  hypo

SEQ ID NO: 181626 - DNA, 294 bp, Homo sapiens
  chr16:88047708-88048002
  hypo
agtcagagtctcctgcggtgctgaaaaaggccaggaagaagtgttgaggcctggacgaggccactggttgtggagggagggctcattgtgacctgcagtgcaggaggagtcacccagagctggggcagctccgtgtggggtggagggcacggccagccttgggtgcactgggtctggacatttgcacactggccctcagtgagtcctgagcctgccagaggatgagcttagcggctgccccgacactgccttgaggtggagcctggggaggacggaggtggtgggtggcagcac

SEQ ID NO: 181627 - DNA, 31 bp, Homo sapiens; identical to SEQ ID NO: 91332
  chr16:88048325-88048356
  hypo

SEQ ID NO: 181628 - DNA, 151 bp, Homo sapiens
  chr16:88048978-88049129
  hypo
tcggaccacgctgggcgtgggcgcctgctttctgcccaggtgactgggccctgcttggttctccaccctctcctgtccctcgtctgccctatgttccctgctctggccacgctggttcccttaccttcctggagcacgtggcccctcctgg

SEQ ID NO: 181629 - DNA, 301 bp, Homo sapiens; identical to SEQ ID NO: 29646
  chr16:88049612-88049913
  hypo

SEQ ID NO: 181630 - DNA, 30 bp, Homo sapiens; identical to SEQ ID NO: 91334
  chr16:88051817-88051847
  hypo

SEQ ID NO: 181631 - DNA, 147 bp, Homo sapiens
  chr16:88056263-88056410
  hypo
acaggcttgtgttctcgtgcaggtttggaggccagatgcctgggatgaaggtgtgggcagggccacgctgcctgagaaggccctttccctctcccagcttctggtggtggccgcatccctccagtctctggccgcatccccctcggc

SEQ ID NO: 181632 - DNA, 99 bp, Homo sapiens
  chr16:88056978-88057077
  hypo
ggcctggaggctggacgtttgaggtgcatggggcgtgagctgtgtatgcttcccccgggagggagcatgtcagctggcttccatcgggcagaggccttt

SEQ ID NO: 181633 - DNA, 30 bp, Homo sapiens; identical to SEQ ID NO: 91335
  chr16:88057646-88057676
  hypo

SEQ ID NO: 181634 - DNA, 281 bp, Homo sapiens; identical to SEQ ID NO: 127739
  chr16:88060795-88061076
  hypo

SEQ ID NO: 181635 - DNA, 283 bp, Homo sapiens
  chr16:88073664-88073947
  hypo
gacctcaaatcaaagacggcttcaggagaggccggtgctgccactcagggtagcgggcggaatcttggtacatggcccctgcttctcttgggaaggaaactgctgtgtgatttaaagaaaccgctgtgttcatctgaagctgccttttctggtgaatctgtgtagcgaaccccctcgttttccatttgtggaaatccttttttttttttttttccatcatttggccagttctcattcctgctgagctacaccctgctcatgcaggcttcgtcctccgggctgg

SEQ ID NO: 181636 - DNA, 30 bp, Homo sapiens
  chr16:88075551-88075581
  hypo
taggagggtgagagacgcagtaggagggtg

SEQ ID NO: 181637 - DNA, 30 bp, Homo sapiens
  chr16:88075888-88075918
  hypo
atgaggttcaggggacggtggcgggtgcgc

SEQ ID NO: 181638 - DNA, 50 bp, Homo sapiens; identical to SEQ ID NO: 91338
  chr16:88078971-88079021
  hypo

SEQ ID NO: 181639 - DNA, 30 bp, Homo sapiens
  chr16:88082061-88082091
  hypo
ttaagaaaggacatcgattctaacagtatt

SEQ ID NO: 181640 - DNA, 51 bp, Homo sapiens; identical to SEQ ID NO: 91339
  chr16:88084705-88084756
  hypo

SEQ ID NO: 181641 - DNA, 472 bp, Homo sapiens; identical to SEQ ID NO: 91340
  chr16:88091518-88091990
  hypo

SEQ ID NO: 181642 - DNA, 30 bp, Homo sapiens; identical to SEQ ID NO: 91341
  chr16:88093862-88093892
  hypo

SEQ ID NO: 181643 - DNA, 311 bp, Homo sapiens; identical to SEQ ID NO: 91342
  chr16:88096549-88096860
  hypo

SEQ ID NO: 181644 - DNA, 302 bp, Homo sapiens
  chr16:88097579-88097881
  hypo
tttttagaaatgagcgaaacacttaatgtacacttaagattcgaagaaagaggtaccggggcttttgtggggaacaaaggcacagacattgttgctgccttggaacaaggtgtgggggccaaccacaagcaggcaccggcgctgggggaccagggtcagggggctctcttcagagacggcagagcacgaggctggggcaggaggtgtcgggggcttgagaggcgcaggggagcagggggggagagtggacagcgaggcggtggatgttgaggcagttgtgcgtccacggcggggcctgcctc

SEQ ID NO: 181645 - DNA, 30 bp, Homo sapiens; identical to SEQ ID NO: 91343
  chr16:88100998-88101028
  hypo

SEQ ID NO: 181646 - DNA, 846 bp, Homo sapiens; identical to SEQ ID NO: 91344
  chr16:88101487-88102333
  hypo

SEQ ID NO: 181647 - DNA, 30 bp, Homo sapiens; identical to SEQ ID NO: 29651
  chr16:88105821-88105851
  hypo

SEQ ID NO: 181648 - DNA, 371 bp, Homo sapiens; identical to SEQ ID NO: 91346
  chr16:88106131-88106502
  hypo

SEQ ID NO: 181649 - DNA, 134 bp, Homo sapiens; identical to SEQ ID NO: 91347
  chr16:88106972-88107106
  hypo

SEQ ID NO: 181650 - DNA, 569 bp, Homo sapiens
  chr16:88109978-88110547
  hypo
ggagcctccctgggcgccagggtcgtgggcgcgtcgttccgctgggagccaggcgttgtgtaccaagtcgggtgagccttggggccgtcagggctccttcgcgctcctgtgtgcgtgtttctcattctgccttaaagtcactggctgttcatgacaccccctggccatgcagtgctgggtatttttctagaaagtccctcctttctcccttttgcagacggccgaagccctgcagcccacgctacagccggagatgcagctcgagcacggggccatccagattcagtgagcggtgcccatggcaccaggagcccctcgccggctccgcctacggcccggcccccacgcgccctgctctcacggcctcggcacaggcagcggctgcacgtgttctgctgaagtgcgtctgaaggccgctgcctccgcggggaacagcatcctatcaactgaaagagcagccgccgccgcccccagccggagacccctttcgtttgagtcctgctgttggtgtcggagcacgaggggaggcacggtgcggagagcgtcgcatatgcgcgggaaatcaagaa

SEQ ID NO: 181651 - DNA, 30 bp, Homo sapiens
  chr16:88110815-88110845
  hypo
gccagctctcggttccgatggggtattgct

SEQ ID NO: 181652 - DNA, 370 bp, Homo sapiens; identical to SEQ ID NO: 91349
  chr16:88111277-88111647
  hypo

SEQ ID NO: 181653 - DNA, 88 bp, Homo sapiens
  chr16:88151479-88151567
  hypo
aggctccacacactgcgcccgtcagcagagcaggaggaggagcacgaggggaggcgccatactgtgattttatttctttgtttttttg

SEQ ID NO: 181654 - DNA, 30 bp, Homo sapiens; identical to SEQ ID NO: 29656
  chr16:88154177-88154207
  hypo

SEQ ID NO: 181655 - DNA, 388 bp, Homo sapiens; identical to SEQ ID NO: 91351
  chr16:88164300-88164688
  hypo

SEQ ID NO: 181656 - DNA, 30 bp, Homo sapiens
  chr16:88165027-88165057
  hypo
tcggctttcccttcccggggcctgtttgtt

SEQ ID NO: 181657 - DNA, 30 bp, Homo sapiens
  chr16:88165285-88165315
  hypo
cagggaggggccgctcgcagaaggcagggg

SEQ ID NO: 181658 - DNA, 30 bp, Homo sapiens; identical to SEQ ID NO: 91352
  chr16:88165707-88165737
  hypo

SEQ ID NO: 181659 - DNA, 30 bp, Homo sapiens
  chr16:88216782-88216812
  hypo
ctgatgaaaatgccgcgcgcctggagtcgc

SEQ ID NO: 181660 - DNA, 30 bp, Homo sapiens
  chr16:88217058-88217088
  hypo
gcaccaagggcgggacgctggtgccaccac

SEQ ID NO: 181661 - DNA, 30 bp, Homo sapiens
  chr16:88217295-88217325
  hypo
cacttaccaagtcgtcggctgtgcatcgaa

SEQ ID NO: 181662 - DNA, 30 bp, Homo sapiens
  chr16:88219693-88219723
  hypo
tcactgggccgacaccggaggctgctgctg

SEQ ID NO: 181663 - DNA, 148 bp, Homo sapiens
  chr16:88233712-88233860
  hypo
gaggagtgcccggcacggccgaagagaacacggcagtggggtgtgtgtcagcagcagtggcaccaccaaaccccggcaggcttcacgcagaaggcggcatttggggagaagttaaaggctgagcaggagccagcgggtgaagtgggaa

SEQ ID NO: 181664 - DNA, 92 bp, Homo sapiens
  chr16:88237695-88237787
  hypo
gcagccggaggtgccccgtaaccccacagagcagccggaggcgctccgtaaccccatagagcagccggaggcgccccgtaaccccacagagc

SEQ ID NO: 181665 - DNA, 30 bp, Homo sapiens; identical to SEQ ID NO: 29657
  chr16:88242366-88242396
  hypo

SEQ ID NO: 181666 - DNA, 72 bp, Homo sapiens; identical to SEQ ID NO: 29658
  chr16:88260675-88260747
  hypo

SEQ ID NO: 181667 - DNA, 30 bp, Homo sapiens; identical to SEQ ID NO: 91356
  chr16:88325086-88325116
  hypo

SEQ ID NO: 181668 - DNA, 328 bp, Homo sapiens; identical to SEQ ID NO: 91357
  chr16:88338948-88339276
  hypo

SEQ ID NO: 181669 - DNA, 237 bp, Homo sapiens; identical to SEQ ID NO: 91358
  chr16:88356031-88356268
  hypo

SEQ ID NO: 181670 - DNA, 130 bp, Homo sapiens
  chr16:88361635-88361765
  hypo
tcccggcacacacggcgactcccacagacacagaagggcacacgccatgggagccacggtcctaaagctgggatgaggtcgaggaatccgcaggtcccagggaaggaggagctgccgagtctgtgcttct

SEQ ID NO: 181671 - DNA, 251 bp, Homo sapiens
  chr16:88368368-88368619
  hypo
atgggaagatgccgacgggaggacacacatgtgatggatacagatgagggagccgtgtgggaagatgccgacgggaggacacatgtgacagagacggacgtgggagccgtgaaggaagatgccgacggaacgacacatgtgtgacagagatggatgtgggagccgtgaaggaagatgccaacggaaggacacatgtgtgatggagatggagggggagccgtgtgggaagatgccaacgggaggacacatgt

SEQ ID NO: 181672 - DNA, 31 bp, Homo sapiens; identical to SEQ ID NO: 91360
  chr16:88375503-88375534
  hypo

SEQ ID NO: 181673 - DNA, 30 bp, Homo sapiens; identical to SEQ ID NO: 91361
  chr16:88378453-88378483
  hypo

SEQ ID NO: 181674 - DNA, 269 bp, Homo sapiens; identical to SEQ ID NO: 91362
  chr16:88385553-88385822
  hypo

SEQ ID NO: 181675 - DNA, 30 bp, Homo sapiens; identical to SEQ ID NO: 91363
  chr16:88386283-88386313
  hypo

SEQ ID NO: 181676 - DNA, 30 bp, Homo sapiens; identical to SEQ ID NO: 91364
  chr16:88388216-88388246
  hypo

SEQ ID NO: 181677 - DNA, 77 bp, Homo sapiens
  chr16:88442478-88442555
  hypo
tcagggcgggcggcacgcaggcccaggtgctgggagaaggacgccgctgttcacggcgcagccgggccacaagggcc

SEQ ID NO: 181678 - DNA, 91 bp, Homo sapiens
  chr16:88458613-88458704
  hypo
gtcgcgtgcgctctgcgcttgtaccgtgtcttgattctggccagcgatgtgcaaacgctccgtggccacgtatgcccgcagctgctgcacg

SEQ ID NO: 181679 - DNA, 502 bp, Homo sapiens
  chr16:88460214-88460716
  hypo
caaccacaagtggggcggacgctgccccaccggtctccggccagcagctttgagggcatgtgtccaggagacgtcatcggggaccccaaagggcgagccatgctggggcctcaggaaggaggggctcatgctacacctctgctgtccgacaggaggggggtttgacacgtctacacctgtgctatccgagaggagcggggtttgacacgtctacacctgtgctgtccaagaggagcagggtttgacacgtctacacctgcgctgcctgagaggagcagggtttgacacgactacacctgcgctgtctgagaggagcggggtttgacacgcctacacctgcgctgtccgagagggatggggtttgacaggtctacacctgcgctgcctgggaggagcggagtttgacacatgtacacctgtgctgtccaagaggagcagggtttgacacgtctacacctgcgctgcctgagaggagcagggtttgacacgtctacacctgtgc

SEQ ID NO: 181680 - DNA, 30 bp, Homo sapiens
  chr16:88465674-88465704
  hypo
tcatatgacatctgccgcatcccaatgatc

SEQ ID NO: 181681 - DNA, 30 bp, Homo sapiens
  chr16:88466239-88466269
  hypo
ggacagcagccaggacggcagcccctctgc

SEQ ID NO: 181682 - DNA, 30 bp, Homo sapiens; identical to SEQ ID NO: 29661
  chr16:88473698-88473728
  hypo

SEQ ID NO: 181683 - DNA, 30 bp, Homo sapiens; identical to SEQ ID NO: 29662
  chr16:88476234-88476264
  hypo

SEQ ID NO: 181684 - DNA, 30 bp, Homo sapiens
  chr16:88479425-88479455
  hypo
acccagggcgcaccacggcgacaccagacc

SEQ ID NO: 181685 - DNA, 636 bp, Homo sapiens
  chr16:88479695-88480331
  hypo
actccaggacagacccgctctgtctctcccctcagcctctctcttcccttcaccctcaaaacacccacctgtgggccctggaggtggcaggaggaacgcaggagtgaggagacagcaaaggagaggcccagcaggccgaggcccggcgcaccgtggctttcccagcacagatgtgttttctgtgtttttctgaaagcagggagccctgggctctgtggcagccctgctcagccccactgggccccgccgtcctgcctgcctgtgaacccaggcctctggagaagtgattccgtccagagtgagcctcggagggtgtcctgcagagctgggggcagcgttatagcaaggttcagtcagtcccgccattgcctctagctgggcgttgaactcggttttctcagctctgaaatggggtgactgtggcagtgctgactgcagctgtggtccggagggtgcaggacccagggacatcccagctcctgggctccgcgcctcagggcctgggcagtgccacagaggcctctgcagcctccgcagcagtggggagagcgaccgggccagcccccagggctgtgtgagtgtggtggcaggtgccatggaggcaggtgccatggaagcaggcgctatggtggcact

SEQ ID NO: 181686 - DNA, 1017 bp, Homo sapiens
  chr16:88480663-88481680
  hypo
cacggccacagatcacggccacggatcccatcacgcccgggcttcagtctccaacacaaacacctgctgggcatcgggaaacgggaacaaactttggtgtggggtggaggcatctggcctcgggggcacctggaggaggccacagtctcgttacctccaccccaaagagccctggggaccgcagactcgagttgttggaggcccagggatgctgtggcgccgggatttgaaaggtggcagcctcccgggagagagccgtgagggcagaggcccccaggcccggcagagctgccctggattgggagcaagctatggctgggagcgggccccacggcaggagggtccgagggagaggcaggccctgtggcctcaggttggcaccgtagaggcctcctctgtcctggctgtggcctcctgctctcgagaacaggccgaacccagaaggacgtcccagtggggggtaacttcccctgccccagggaacagggctcttcagtgcccgggcggcacagggccacccctcaccaggccactgtggccagaggtccacgcaggacagccccgcccagacgtccactgccacccggccctgccttcccagggccatgggtcagccagttagggcggggcagaggggagcacggccaggcctccagtttccagctgcccagagaccagctgaggccacacagcgagtgggaacagcagggtcagccgcgccagggcccaggtagcctcgaggaggcacctgcaacagggaagggcactgcctcggcctcgcagagactccggtcccgggtgccacttcccactgtgtggccttggaaaagtcccttcccctctctgagcctcggtttctcgtctgagcaatggggaggaacagaaccaccttgtggggccttgagaggattcatgaggcagtgctggcccggtgaccacccggaacatcagggaccctccgggatctcaggatctgtcaggccagtgccggtcacagctgagcgaggtcctggagag

SEQ ID NO: 181687 - DNA, 30 bp, Homo sapiens; identical to SEQ ID NO: 29664
  chr16:88492853-88492883
  hypo

SEQ ID NO: 181688 - DNA, 190 bp, Homo sapiens; identical to SEQ ID NO: 91369
  chr16:88493598-88493788
  hypo

SEQ ID NO: 181689 - DNA, 51 bp, Homo sapiens
  chr16:88495628-88495679
  hypo
tgggagcctcccccagcgagtccccactgccgtcaccggccaccaacacgg

SEQ ID NO: 181690 - DNA, 689 bp, Homo sapiens
  chr16:88498086-88498775
  hypo
agccagggatgccccgccggccagcagctcctgcctttgccaggacggcgaggatgccggttccctcgagccacagctgccaaggagcccacctggcaccgctgagacggagccaggcagggctgcatcgccaccgaccttggagtcctcatccctcttcccagacctgccggtggacagattcgacccacccctctatggcagcctgtctgcgaacagggactccggtctgccgttcgcatgtgccgaccctccccagaagacggtgccgtcagatccaccgtacccctcttttttgctgcttgaggaagtatccccgatgctgcctagccattttcctgatctctcggggggaaaggtgctcagtaagacgtgtccccctgaacggacagtggttcccggcgccgccccatctttgcctgggaaggggagtggatgtagcgttgctcttatgagtcacctgtccgaggatgaactggagatccagaaattggtcaccgaattagaaagtcagctgcaaaggagcaaagacacacgtggggccccgagagagcttgcagaagctgagtcggtgggcagggtggagctcggcacaggcacagagccaccctcccaacggcgcacctgccaggccaccgtgccccacgaggacacgttctcggcagctgacctcacgcgcgttggagaat

SEQ ID NO: 181691 - DNA, 70 bp, Homo sapiens
  chr16:88501886-88501956
  hypo
gttacgcagcctctccgagccactgcctctctgtggaaggagggcctgaggctgacggggagcagccgcc

SEQ ID NO: 181692 - DNA, 30 bp, Homo sapiens
  chr16:88502243-88502273
  hypo
tctgggaggagaacacgccccccttgggcc

SEQ ID NO: 181693 - DNA, 30 bp, Homo sapiens
  chr16:88502636-88502666
  hypo
tctgccatgaggacccgtgggaggacgagg

SEQ ID NO: 181694 - DNA, 30 bp, Homo sapiens; identical to SEQ ID NO: 91372
  chr16:88502994-88503024
  hypo

SEQ ID NO: 181695 - DNA, 299 bp, Homo sapiens; identical to SEQ ID NO: 91373
  chr16:88504016-88504315
  hypo

SEQ ID NO: 181696 - DNA, 30 bp, Homo sapiens; identical to SEQ ID NO: 91374
  chr16:88505078-88505108
  hypo

SEQ ID NO: 181697 - DNA, 30 bp, Homo sapiens; identical to SEQ ID NO: 29668
  chr16:88506673-88506703
  hypo

SEQ ID NO: 181698 - DNA, 416 bp, Homo sapiens; identical to SEQ ID NO: 29669
  chr16:88512480-88512896
  hypo

SEQ ID NO: 181699 - DNA, 84 bp, Homo sapiens; identical to SEQ ID NO: 91377
  chr16:88513363-88513447
  hypo

SEQ ID NO: 181700 - DNA, 30 bp, Homo sapiens; identical to SEQ ID NO: 29670
  chr16:88516210-88516240
  hypo

SEQ ID NO: 181701 - DNA, 272 bp, Homo sapiens; identical to SEQ ID NO: 127743
  chr16:88519037-88519309
  hypo

SEQ ID NO: 181702 - DNA, 30 bp, Homo sapiens; identical to SEQ ID NO: 29672
  chr16:88534570-88534600
  hypo

SEQ ID NO: 181703 - DNA, 46 bp, Homo sapiens; identical to SEQ ID NO: 29673
  chr16:88537674-88537720
  hypo

SEQ ID NO: 181704 - DNA, 206 bp, Homo sapiens
  chr16:88538053-88538259
  hypo
caagatgaccgtggccgcggtggctcccacacacagtggaggggtcagggctcccggctctaaagccacatggcctgggcatgaattcctgcccaccacttactcacactgggatctgccacagacacctgagcctgtgactaagactaaggctgtgtgtccatctctgtgaaatcggggcgaggcccccgcgggctgggagggct

SEQ ID NO: 181705 - DNA, 395 bp, Homo sapiens; identical to SEQ ID NO: 91382
  chr16:88545422-88545817
  hypo

SEQ ID NO: 181706 - DNA, 405 bp, Homo sapiens
  chr16:88547818-88548223
  hypo
caccacccccacccccaccaccgctgcctcctcgccgggggccgtggacagggcagctcgcaagtcggccttgctgggccttggtttactcacctgtaaagtgggaatgacctggcttcccactgtgggtattgggatgtggttggcgagtgggatttccacgatggctgcccccaaggtcctgcttacgctactccactccaccctgccacagccgtcaccgagtccccgtactgtcctcataccccctcctccatgcaccctgtccccctgcactttcctgaccgcccctacctgctgaggtctgtgtgggctgccaccctctacaccccaggttccccatctgaaatgaaattggaagaccatctcgctggactacgtgggtgggggcggttaagggtgggc

SEQ ID NO: 181707 - DNA, 204 bp, Homo sapiens
  chr16:88550286-88550490
  hypo
tgctgcatggaacggcggggtcagccttggacatcagcctgaaactcagtcacagcatttctccttctctcgcatcttcgggggtctctgacatgagcctctgaacctggcgttggacgctggcgggtggcacgtttcttactggctgggcaggtgtttcgggcgttagcaggctccacctccgaccagcccatctccctccca

SEQ ID NO: 181708 - DNA, 978 bp, Homo sapiens
  chr16:88550902-88551880
  hypo
tgctgtgaccatggggcttggcggccgcaggacctggggtctgggctcaggagggccacggcccctcccactcctgagtgtgtcgggaggctctgcccccatcgtgcttcacacaggacagtagaaggctgggcgggtcaggccttgtggagtatgggtgcagagggggcagtcgcagcacgcaggctgagtcagggcctggggacctggggagcagtcaaacaggatatggaagggcacctctgtcctctgttcacactggacaccatcacccatcaccagccccgccggcggatgtcagcacacacacctgcactcagcgccactccacagccactgtggggtccggagcagctgcccccgcacttgggccgcgtggccttgtctcagtctgccttgtcacctgtcaggtggactcctggagttcccccaccccgatgtgtgagtctctgagggacccaggccctgaggcactccacccccaggtgctgcagacacctgtgccctgcttggtttgttcgctcgacaagtctgtgagcgcctcctttgtgctgggtgagggtgtcaccccagggagttcccagaccgagggaatgagtgtgagggaagtgcacggggactgggcccctgggcggggcactggcaggtgatgccaggcggaggccgtggcgacggcgaccctcagggcctggatggacgctgggcctacagtacagggagggcccactcgcagctccagggctgccagagcaggtgggggcctgtcccctggtgctggggggagcaggtgggaaagagacacggggtccgcggcccttctctggcaagagtggaatccgtgggcgtggtggaggccaagggtcacggcaggtaagggtgggcggaggcgaccctgcagctttggaaatgttgcagagggtgggggttcgtcaagaatcatcaggtcttttttttttttttttgaaacagaggtctcac

SEQ ID NO: 181709 - DNA, 30 bp, Homo sapiens
  chr16:88556823-88556853
  hypo
agcgcgcaagcggccgtaatgacaccagca

SEQ ID NO: 181710 - DNA, 215 bp, Homo sapiens
  chr16:88596785-88597000
  hypo
gcagtgtcctgggaacgctgcttcggaaggacaccaccgtgagccacacatcttgttgacatacctgagtcctgccctagcacttctgcggctgccagggcacggccgacgcttgtctgctgctctggaagagccgcaggaaccaattccagggtcagatccagtttcattcttgagcctccggcactctgggcccatctcgcctgtgaagcggg

SEQ ID NO: 181711 - DNA, 31 bp, Homo sapiens; identical to SEQ ID NO: 29677
  chr16:88597829-88597860
  hypo

SEQ ID NO: 181712 - DNA, 30 bp, Homo sapiens
  chr16:88598510-88598540
  hypo
tccccggccgcagccgccacagacgagaag

SEQ ID NO: 181713 - DNA, 31 bp, Homo sapiens; identical to SEQ ID NO: 91387
  chr16:88601648-88601679
  hypo

SEQ ID NO: 181714 - DNA, 31 bp, Homo sapiens; identical to SEQ ID NO: 29678
  chr16:88602844-88602875
  hypo

SEQ ID NO: 181715 - DNA, 31 bp, Homo sapiens; identical to SEQ ID NO: 91389
  chr16:88623968-88623999
  hypo

SEQ ID NO: 181716 - DNA, 46 bp, Homo sapiens
  chr16:88624842-88624888
  hypo
gagtcgcgcatccccccgtcggggggtgagtcgcccgtccccccgt

SEQ ID NO: 181717 - DNA, 30 bp, Homo sapiens
  chr16:88633694-88633724
  hypo
ggggcccccatcaccgcagattcggctgcc

SEQ ID NO: 181718 - DNA, 45 bp, Homo sapiens; identical to SEQ ID NO: 29679
  chr16:88642724-88642769
  hypo

SEQ ID NO: 181719 - DNA, 30 bp, Homo sapiens
  chr16:88643951-88643981
  hypo
gccgtccaggaggacgaggctgagaaagcg

SEQ ID NO: 181720 - DNA, 30 bp, Homo sapiens; identical to SEQ ID NO: 91392
  chr16:88644355-88644385
  hypo

SEQ ID NO: 181721 - DNA, 114 bp, Homo sapiens
  chr16:88644981-88645095
  hypo
tatggggagtcattgcggtgaagagtgtctgccgagagtatctctctgatgtcatgctctgggttgaggcaggtaaaggctgccagttagatgtgtaaccgccggtttgccttg

SEQ ID NO: 181722 - DNA, 145 bp, Homo sapiens; identical to SEQ ID NO: 29680
  chr16:88645406-88645551
  hypo

SEQ ID NO: 181723 - DNA, 40 bp, Homo sapiens; identical to SEQ ID NO: 29681
  chr16:88647116-88647156
  hypo

SEQ ID NO: 181724 - DNA, 186 bp, Homo sapiens; identical to SEQ ID NO: 29682
  chr16:88647912-88648098
  hypo

SEQ ID NO: 181725 - DNA, 199 bp, Homo sapiens; identical to SEQ ID NO: 29683
  chr16:88649039-88649238
  hypo

SEQ ID NO: 181726 - DNA, 259 bp, Homo sapiens
  chr16:88664685-88664944
  hypo
tggtgccccgcctctcggacctcacccgctgatgcccgccaacccttgggtgcgtgatgcctcttctttcattgttagcacatcagccaactgagctgtgtctgaatctcaagcttaagacaagtcactgtgccttagcacaggctcagtgccccctttcggctgcttctgtcgtcccgagtggaagcaggcctcggctttccgaggacggagtgaggcttggtggaaggagagcggccacacacggccggcttgtgtt

SEQ ID NO: 181727 - DNA, 494 bp, Homo sapiens
  chr16:88673629-88674123
  hypo
cctcctccttctggccgccggttttcatgtgctgcgatggcactggcttaattatacaggctttttaggatgtttaatgtctcagagggcgtgtctggcgtgtcttttcatttccagggttttcttggctgttcttggggtgcgatttttcatgtgaacttgggtgtcagcttgtctggctccttaaagaagctcattggtgtttttgctgggattgtgttaaatttatcagtcagtgtaggaaggactgacttgtgggcgattccgagctgcgctctcccagtgcaagaggcgtctccccattattcatgcacgctttgtgtcaggtttcaaaacccccatttattcatgcacactttgtatcaggcgtctccccatttattcacacgcttcatgtctctcaggcgtctccccatttattcacaggcttcatgtcacgtgtctccccatttattcacacacgcttcatgtctctcaggcgtctccccatttat

SEQ ID NO: 181728 - DNA, 30 bp, Homo sapiens; identical to SEQ ID NO: 91399
  chr16:88680765-88680795
  hypo

SEQ ID NO: 181729 - DNA, 226 bp, Homo sapiens; identical to SEQ ID NO: 91400
  chr16:88683206-88683432
  hypo

SEQ ID NO: 181730 - DNA, 241 bp, Homo sapiens; identical to SEQ ID NO: 91401
  chr16:88683701-88683942
  hypo

SEQ ID NO: 181731 - DNA, 37 bp, Homo sapiens
  chr16:88684166-88684203
  hypo
ttccctggtaagttccggacaccgcagagtccgcacc

SEQ ID NO: 181732 - DNA, 30 bp, Homo sapiens; identical to SEQ ID NO: 91403
  chr16:88688729-88688759
  hypo

SEQ ID NO: 181733 - DNA, 65 bp, Homo sapiens; identical to SEQ ID NO: 91404
  chr16:88689148-88689213
  hypo

SEQ ID NO: 181734 - DNA, 39 bp, Homo sapiens; identical to SEQ ID NO: 29687
  chr16:88690943-88690982
  hypo

SEQ ID NO: 181735 - DNA, 30 bp, Homo sapiens; identical to SEQ ID NO: 29688
  chr16:88697680-88697710
  hypo

SEQ ID NO: 181736 - DNA, 125 bp, Homo sapiens; identical to SEQ ID NO: 91407
  chr16:88698501-88698626
  hypo

SEQ ID NO: 181737 - DNA, 164 bp, Homo sapiens; identical to SEQ ID NO: 91408
  chr16:88699818-88699982
  hypo

SEQ ID NO: 181738 - DNA, 448 bp, Homo sapiens
  chr16:88702315-88702763
  hypo
aggtgctgcggcctgcgaccacctgagccaggcaggtgatgctaatgcgcctcagggcagccctggcactggagctgctatcatcccactgtacccatggggagagccgctctcctccctcctttttccattctgtgttatttacagagcaccctcctgtatgccctgcactactctcaaccctgggtacacagatggggctgccacagacgtggccctcaaggcgctcaggccgccttttggggagggccgtgaggggctggaatttttctgagacagccaagcgcccgtgcagagaggcctgtatcagcccagcctaaggcagggccaacccacacaggagcacctgtcctgctggggatgcagtgggttctgctgtgtcctggaaaaggctctacccacaccctaacccaacctgtgaacgcgcgctcatttggaaaaggggctt

SEQ ID NO: 181739 - DNA, 712 bp, Homo sapiens
  chr16:88711754-88712466
  hypo
gctgcacctttcccacgcacacacactagaagacgcacagcaaggggagggcagttgcctctgcgggcaggagggacttggctctatggacaaaaggatttaaataagcaaagtctgagggctctgtccacccagagacccccgcagtgagaggtggcctgcagccgtctgttccggagcccagggcaggcagagggcatttcacccaaggcctggccaggctgcgccctgtcctcccacccatccctggcctctcagagagatcactgtatcccatgggatgggcagccttctaacagggtgcagcagtcataaaccaaacgcaggtgtcggcagtttaagaaaatgtctgcgtcctggcaccgcccatgaatcagcgcgaatagggtttaggtgagaaaagcctgataatgggacccaagcgcaggcacggtcttcggccggctgcgtgaccccaggccagtcacagcacctccctgagcctccgcatctttgtctgtaaagtggggaccccagtacccctcccagggctgtggtgcgggttaatgaggaaatgcaaggaaatgacccgacacactagacacgccaaaaatggcagcagcaaccgctgcgtccccgccgtgctgtgagcacacgcccaggctcacacttgctcccagccttggctcagcctacagagccggcttcaagggccatgcgtgtccgagggtgt

SEQ ID NO: 181740 - DNA, 92 bp, Homo sapiens; identical to SEQ ID NO: 127749
  chr16:88721557-88721649
  hypo

SEQ ID NO: 181741 - DNA, 30 bp, Homo sapiens; identical to SEQ ID NO: 91411
  chr16:88721950-88721980
  hypo

SEQ ID NO: 181742 - DNA, 892 bp, Homo sapiens
  chr16:88722260-88723152
  hypo
tgcctgaccacagaggcctcccggccacagcaggggtgacgcaggggcaacttccagatcccagcgggtggtggcgcccgccgcatgggagcggttcctgagcactcaaccacgcttctgttccttcagcccccgctgaccccaggagccaagcaaagcctggatggacgccttcgctcctgctcccggcagcagccctgactagggacagaggccaccgggctgctgctccacccgccccaccccactcaccacaaggatgagcacgcggagttcaggccagtgtgactcgggggccacttgccgagcgatgctgtccttcccgtcggcctgctctcccatctgccactccacaaagcccccatacaggctccggcaggcgctgcctgagccccggcgagccacttctgagaggtcactctccacgccgtagacacgggccagggtgtaggctgcaggcatgcggattcagggagggtcctcagagctgcctgcgctgtgctccctgacagctcaccgccccaggaacgtcccacaccccacggcaaatggggatttccagatgacagggcttctgggccatcagcctttgaggccagcattcaccggcccagccgtctgtcccccacctccgctagttccactctcggacactctctgttcacggcctgcagagcttgcggcccgcgacaagggcaacaaaaggtacctgcggcagagcaggaagccccatggaaggcgggagaaaggcccccgaggacacccaagctgggctttgagggtgggaaggaattttaaggctgtgtggggcagggaccgatgccaggacagagctggactccacaagacgcgccccctgcccacccagcacgggagccaccttctcccctcc

SEQ ID NO: 181743 - DNA, 511 bp, Homo sapiens; identical to SEQ ID NO: 29693
  chr16:88725338-88725849
  hypo

SEQ ID NO: 181744 - DNA, 128 bp, Homo sapiens; identical to SEQ ID NO: 29694
  chr16:88738305-88738433
  hypo

SEQ ID NO: 181745 - DNA, 55 bp, Homo sapiens
  chr16:88756878-88756933
  hypo
gctcacactggcagacgccccgtggctcctgtctgattcacgtccaggttatgcc

SEQ ID NO: 181746 - DNA, 266 bp, Homo sapiens
  chr16:88757465-88757731
  hypo
ggcaagggagagtgaccggtgctgaggggagcccttgggcctgcggcagatgaggtgagacttgagccatcaagcagcgaggcagcgtgcgtgtgagtctgcaggccacaggcgtgttcgtgcgtgtgtccatgggcgtatgcgtgtgggaagtcgcagtagctgctctgaggtgacatggaggctgggcatcagcgggtaagtcccgggcaccaggagagggatctgtggggtccccggcatcgtcctgccgagttggatacctg

SEQ ID NO: 181747 - DNA, 30 bp, Homo sapiens; identical to SEQ ID NO: 91416
  chr16:88763129-88763159
  hypo

SEQ ID NO: 181748 - DNA, 134 bp, Homo sapiens; identical to SEQ ID NO: 127754
  chr16:88764922-88765056
  hypo

SEQ ID NO: 181749 - DNA, 30 bp, Homo sapiens; identical to SEQ ID NO: 127755
  chr16:88765279-88765309
  hypo

SEQ ID NO: 181750 - DNA, 323 bp, Homo sapiens
  chr16:88776936-88777259
  hypo
cacagcgcgtgtgtgcggcccactctcagatgtgtttacagcaggtgcacaaatcagaagctgggtccacagtgcgtgtgtgcggcccactctcagatgtgtttacagcaggtgcaccaatcagaagctgggtccagagtgcgtgtgtgcggcccacttgacttctgtccatttgctcaacctgcgtagaaacacagtcagtggaaagctgcatcttggctcagccatgtgtgacccgagggaagattgggaaaggggcgggggtttgccaggagaagcaaagggagcagcgtttgaggtggaggcggcggcccgcgcaggga

SEQ ID NO: 181751 - DNA, 307 bp, Homo sapiens; identical to SEQ ID NO: 91417
  chr16:88780637-88780944
  hypo

SEQ ID NO: 181752 - DNA, 30 bp, Homo sapiens; identical to SEQ ID NO: 91418
  chr16:88781892-88781922
  hypo

SEQ ID NO: 181753 - DNA, 30 bp, Homo sapiens; identical to SEQ ID NO: 91419
  chr16:88783340-88783370
  hypo

SEQ ID NO: 181754 - DNA, 30 bp, Homo sapiens; identical to SEQ ID NO: 91420
  chr16:88783630-88783660
  hypo

SEQ ID NO: 181755 - DNA, 39 bp, Homo sapiens
  chr16:88785879-88785918
  hypo
agggcctccagcaccacgggttctcgtggcagcagtgcc

SEQ ID NO: 181756 - DNA, 30 bp, Homo sapiens; identical to SEQ ID NO: 91421
  chr16:88786961-88786991
  hypo

SEQ ID NO: 181757 - DNA, 102 bp, Homo sapiens; identical to SEQ ID NO: 29696
  chr16:88787976-88788078
  hypo

SEQ ID NO: 181758 - DNA, 63 bp, Homo sapiens; identical to SEQ ID NO: 29697
  chr16:88788383-88788446
  hypo

SEQ ID NO: 181759 - DNA, 30 bp, Homo sapiens; identical to SEQ ID NO: 91424
  chr16:88789079-88789109
  hypo

SEQ ID NO: 181760 - DNA, 30 bp, Homo sapiens; identical to SEQ ID NO: 29698
  chr16:88789604-88789634
  hypo

SEQ ID NO: 181761 - DNA, 747 bp, Homo sapiens
  chr16:88791424-88792171
  hypo
tggtccagccagggccgccaccactgcctccgtggcggggaggagccccctggactgtcgggccctgtggaggggcagggtgagcatgaggcagcagtcaagccaccaggaggggtcggggctgtgagtgctcccgtcttggagacaggataggtggagacagacacggacacccacagtgacgggggccgtgtggggccatggggctcagagcccatgtgcgtggacggacagtcacagggcggccatggggcctgccagacagagggtgatcatgcggacaggacaggcgggctgggagccctgtgggacgtcacatgggcacagacgcagcacacgccagcaggcacagacatgctggacacggggccctgggtgcccgactccagctgcactcacctggctccaggccggggtccttggggcccagggtgtcctgggggcgactgcggtccacccggccctgcctgtgcttctcctgcttggcacggatacgctccatcctgtggtggggaaaggtggggtatgctgagcattggggggaggagccggggagtccccgccccagaggcacctactgtcttttcagctgggccagggacttctcctctatcctgcggtgaaagtcaatgctcttgaggttggcagcgttgtagagggcgaagcccctgtagggaggcggggatggggtgtgagcaccaggcactcgaccccagcaacatgggcagccgccgctccccgctcagc

SEQ ID NO: 181762 - DNA, 1398 bp, Homo sapiens; identical to SEQ ID NO: 91426
  chr16:88792743-88794141
  hypo

SEQ ID NO: 181763 - DNA, 447 bp, Homo sapiens; identical to SEQ ID NO: 91427
  chr16:88794359-88794806
  hypo

SEQ ID NO: 181764 - DNA, 35 bp, Homo sapiens
  chr16:88796721-88796756
  hypo
gggcgtggcagctcacgcctgtaatcccaggaggg

SEQ ID NO: 181765 - DNA, 438 bp, Homo sapiens
  chr16:88797396-88797834
  hypo
cccctgagccggccacgtgcacaaatgtgactccccatctcagaccgcagggtgctgtgtgccttgagcagacctgcagcaccaggacagccacgcaaatccagtctcacggcgtcagcaacgctaccggcctccctccggaacttcccaagagacaggagaggcgggggcggcttagacccaagacaagagactagagcaaacatcagaccagatcccgtctgaaaaccaaatggccacaaagaagggtgctgaggccggggctgtttgaatgcagaggacacgtttgacgatggcactgccaggagacgggaccacgggtgtggggctgtgggctcagacaccctcacccaggagacgcatgctcgaggcagcacttgggtgtgaggcatcacggccgacccgcacggggcccggagaggacgcagtgctccttgt

SEQ ID NO: 181766 - DNA, 221 bp, Homo sapiens
  chr16:88798777-88798998
  hypo
agtacttgaggcagccgagcagatcctggtccagctgctggcgggtgccgctggcaaacacggcctgggcaggcagcggggccagctggtgctgccggcggtagtgctcctggcgccggtacacgatggcctcgaataccagcagcagcagcacttgcaggtggttctgcggagggcaagggtcagggggcagccgggtactcgcccgcccagccgcccac

SEQ ID NO: 181767 - DNA, 202 bp, Homo sapiens
  chr16:88799616-88799818
  hypo
aggagggtcgggctgcgaatacagagttgcctggagcttcctcccgtcccagccctcgggggccggtacctcggtgcagttgctggaatactcctgggggttgacaaccttgagctggtacagcatcttacacacgatgatgacgcaggtccacacggtggacaggcaggaggccatgggccggaagcgtgggtagggcagg
